United States Patent Application Publication US 2005/0244851 A1 - sequence listing, part 31

SEQ ID NO: 1194624 - DNA, 25 bp, Homo sapien
ctgcagagaacaaactagaaagtgt

SEQ ID NO: 1194625 - DNA, 25 bp, Homo sapien
gcttatatatcaaagttatgctggc

SEQ ID NO: 1194626 - DNA, 25 bp, Homo sapien
aaatgtcattgtaggcttatatatc

SEQ ID NO: 1194627 - DNA, 25 bp, Homo sapien
cattcctagaacgaacctaacttgt

SEQ ID NO: 1194628 - DNA, 25 bp, Homo sapien
ccaattatgatagttctttttcctc

SEQ ID NO: 1194629 - DNA, 25 bp, Homo sapien
tgtctcattcctgatttcaagggaa

SEQ ID NO: 1194630 - DNA, 25 bp, Homo sapien
agaactgtgacattagatctaatta

SEQ ID NO: 1194631 - DNA, 25 bp, Homo sapien
tgcgctagctatactttgatgatat

SEQ ID NO: 1194632 - DNA, 25 bp, Homo sapien
taacaggcagtgtttgtcgatcttg

SEQ ID NO: 1194633 - DNA, 25 bp, Homo sapien
gaaagatatctacactgggcagagt

SEQ ID NO: 1194634 - DNA, 25 bp, Homo sapien
tgtcgatcttgacttagacgaatgt

SEQ ID NO: 1194635 - DNA, 25 bp, Homo sapien
gttatacacctatctgaaaatatct

SEQ ID NO: 1194636 - DNA, 25 bp, Homo sapien
gttcaggtgccaggccgaggcattc

SEQ ID NO: 1194637 - DNA, 25 bp, Homo sapien
gatgaagtagcacacatgaaagaga

SEQ ID NO: 1194638 - DNA, 25 bp, Homo sapien
aggtggattccagagtcatgctttc

SEQ ID NO: 1194639 - DNA, 25 bp, Homo sapien
tcaggtttatcttccgtttccagct

SEQ ID NO: 1194640 - DNA, 25 bp, Homo sapien
gcacagcacggaattcaccacagtt

SEQ ID NO: 1194641 - DNA, 25 bp, Homo sapien
catcctggtccatcatctgttctag

SEQ ID NO: 1194642 - DNA, 25 bp, Homo sapien
tctaggagagtctgatcatctgcgt

SEQ ID NO: 1194643 - DNA, 25 bp, Homo sapien
agatgttcattctccaggcggaaga

SEQ ID NO: 1194644 - DNA, 25 bp, Homo sapien
tatgctctggttgtacttccatgac

SEQ ID NO: 1194645 - DNA, 25 bp, Homo sapien
gctctggttgtacttccatgaccga

SEQ ID NO: 1194646 - DNA, 25 bp, Homo sapien
tgtacttccatgaccgattcttctg

SEQ ID NO: 1194647 - DNA, 25 bp, Homo sapien
gaccgattcttctggcggtttcgta

SEQ ID NO: 1194648 - DNA, 25 bp, Homo sapien
aattatttgcatacacaacacacag

SEQ ID NO: 1194649 - DNA, 25 bp, Homo sapien
catctgtgtcttctatcaatacctt

SEQ ID NO: 1194650 - DNA, 25 bp, Homo sapien
tgtgtcttctatcaataccttagtg

SEQ ID NO: 1194651 - DNA, 25 bp, Homo sapien
tctatcaataccttagtgtcacgag

SEQ ID NO: 1194652 - DNA, 25 bp, Homo sapien
taccttagtgtcacgagccttggat

SEQ ID NO: 1194653 - DNA, 25 bp, Homo sapien
tctcagtaccgtcccatcagagggt

SEQ ID NO: 1194654 - DNA, 25 bp, Homo sapien
ttcaaccagtcaaaaccgggctgag

SEQ ID NO: 1194655 - DNA, 25 bp, Homo sapien
tacagggaccatacatgtggatgca

SEQ ID NO: 1194656 - DNA, 25 bp, Homo sapien
ttttcctgcaagtgcggccagtgcc

SEQ ID NO: 1194657 - DNA, 25 bp, Homo sapien
taactcagtaataattactgctgtt

SEQ ID NO: 1194658 - DNA, 25 bp, Homo sapien
aactcagtaataattactgctgttt

SEQ ID NO: 1194659 - DNA, 25 bp, Homo sapien
ttgacagaccagtgatatttccccc

SEQ ID NO: 1194660 - DNA, 25 bp, Homo sapien
gagtttcagtgtatgggagcctcca

SEQ ID NO: 1194661 - DNA, 25 bp, Homo sapien
taaggtggacacaacattcgcaact

SEQ ID NO: 1194662 - DNA, 25 bp, Homo sapien
tgaaagaataagaccgattagggcc

SEQ ID NO: 1194663 - DNA, 25 bp, Homo sapien
gattagggcctagaactgtaacagt

SEQ ID NO: 1194664 - DNA, 25 bp, Homo sapien
tacgccactgtaatggtataggcag

SEQ ID NO: 1194665 - DNA, 25 bp, Homo sapien
tactgaggtgaatggtgttctccca

SEQ ID NO: 1194666 - DNA, 25 bp, Homo sapien
cgtagttcacctatccagaaatgga

SEQ ID NO: 1194667 - DNA, 25 bp, Homo sapien
cctaaggagcctaatggtagagtgc

SEQ ID NO: 1194668 - DNA, 25 bp, Homo sapien
gctgcggcttactgccaacgtccaa

SEQ ID NO: 1194669 - DNA, 25 bp, Homo sapien
gcggcttactgccaacgtccaacat

SEQ ID NO: 1194670 - DNA, 25 bp, Homo sapien
tgccaacgtccaacatcttcttgct

SEQ ID NO: 1194671 - DNA, 25 bp, Homo sapien
gcttactgccaacgtccaacatctt

SEQ ID NO: 1194672 - DNA, 25 bp, Homo sapien
caatgccacagatagggttattttc

SEQ ID NO: 1194673 - DNA, 25 bp, Homo sapien
gatggaggcatcaccttcgcgtcat

SEQ ID NO: 1194674 - DNA, 25 bp, Homo sapien
tttaataaccactaagcggacagat

SEQ ID NO: 1194675 - DNA, 25 bp, Homo sapien
ttcctgaataatgcaaagtaatggg

SEQ ID NO: 1194676 - DNA, 25 bp, Homo sapien
aagtgtggtgattttgtagttgaga

SEQ ID NO: 1194677 - DNA, 25 bp, Homo sapien
gaggaaaatttcatgtaaaccatta

SEQ ID NO: 1194678 - DNA, 25 bp, Homo sapien
aatgttatacagtaagaggtacttg

SEQ ID NO: 1194679 - DNA, 25 bp, Homo sapien
cagtaagaggtacttgttttttgag

SEQ ID NO: 1194680 - DNA, 25 bp, Homo sapien
caaagcttcaattgtcttcacctgg

SEQ ID NO: 1194681 - DNA, 25 bp, Homo sapien
tgtcttcacctggtcactagagacc

SEQ ID NO: 1194682 - DNA, 25 bp, Homo sapien
gaagttctaccaaagcttcaattgt

SEQ ID NO: 1194683 - DNA, 25 bp, Homo sapien
ctagagaccgtatctgtaatgacac

SEQ ID NO: 1194684 - DNA, 25 bp, Homo sapien
caccatgctggtgttgctacagggc

SEQ ID NO: 1194685 - DNA, 25 bp, Homo sapien
gatagtgagatggaagcctggctct

SEQ ID NO: 1194686 - DNA, 25 bp, Homo sapien
tacaagaaaggcatcatgagccatg

SEQ ID NO: 1194687 - DNA, 25 bp, Homo sapien
gatacaacatgagtccaagcaagca

SEQ ID NO: 1194688 - DNA, 25 bp, Homo sapien
tatgttccctcacagggcatgggta

SEQ ID NO: 1194689 - DNA, 25 bp, Homo sapien
aaggctttgatgctttagtcaataa

SEQ ID NO: 1194690 - DNA, 25 bp, Homo sapien
cctttgcattgtgggtatattcatc

SEQ ID NO: 1194691 - DNA, 25 bp, Homo sapien
tgcagaaaagtcctatgttccctca

SEQ ID NO: 1194692 - DNA, 25 bp, Homo sapien
gagtatctagtgattcttatatatt

SEQ ID NO: 1194693 - DNA, 25 bp, Homo sapien
tatattcatatcctatctttgactt

SEQ ID NO: 1194694 - DNA, 25 bp, Homo sapien
caaattgtaaaagtggtgttgagta

SEQ ID NO: 1194695 - DNA, 25 bp, Homo sapien
tataggcatacaaatgttgagtatg

SEQ ID NO: 1194696 - DNA, 25 bp, Homo sapien
tataaagatgcaggtcactaaaact

SEQ ID NO: 1194697 - DNA, 25 bp, Homo sapien
ttcttctggatatgtctaggatgga

SEQ ID NO: 1194698 - DNA, 25 bp, Homo sapien
tcgactaaaagttatccatataaag

SEQ ID NO: 1194699 - DNA, 25 bp, Homo sapien
accaccggggattgtggactgctgc

SEQ ID NO: 1194700 - DNA, 25 bp, Homo sapien
gaaaattcagattaccctgaggcag

SEQ ID NO: 1194701 - DNA, 25 bp, Homo sapien
gtaagcattggttgaactttggtgc

SEQ ID NO: 1194702 - DNA, 25 bp, Homo sapien
gaagaaacaactcttgacagatctg

SEQ ID NO: 1194703 - DNA, 25 bp, Homo sapien
tgttaatcagtgacaaagtgagtga

SEQ ID NO: 1194704 - DNA, 25 bp, Homo sapien
ccagataacctctcaggctctgtct

SEQ ID NO: 1194705 - DNA, 25 bp, Homo sapien
ggctctgtctgccacgttactccac

SEQ ID NO: 1194706 - DNA, 25 bp, Homo sapien
tctgccacgttactccacactctag

SEQ ID NO: 1194707 - DNA, 25 bp, Homo sapien
agctgctggccagcgattcccaaga

SEQ ID NO: 1194708 - DNA, 25 bp, Homo sapien
agtctctatccgagcagaatctgct

SEQ ID NO: 1194709 - DNA, 25 bp, Homo sapien
acctcagaagcagtctctatccgag

SEQ ID NO: 1194710 - DNA, 25 bp, Homo sapien
acatgagcttgggggagcgccttcc

SEQ ID NO: 1194711 - DNA, 25 bp, Homo sapien
atgtccgtggggactcctgcctcct

SEQ ID NO: 1194712 - DNA, 25 bp, Homo sapien
tggggacagacaccatggaggctca

SEQ ID NO: 1194713 - DNA, 25 bp, Homo sapien
ggggacagacaccatggaggctcac

SEQ ID NO: 1194714 - DNA, 25 bp, Homo sapien
tgccacagtggggacagacaccatg

SEQ ID NO: 1194715 - DNA, 25 bp, Homo sapien
cacagtggggacagacaccatggag

SEQ ID NO: 1194716 - DNA, 25 bp, Homo sapien
aggtcctctcttcctcttggggact

SEQ ID NO: 1194717 - DNA, 25 bp, Homo sapien
tcctctcttcctcttggggactttg

SEQ ID NO: 1194718 - DNA, 25 bp, Homo sapien
tctcttcctcttggggactttgtcc

SEQ ID NO: 1194719 - DNA, 25 bp, Homo sapien
tcaggtcctctcttcctcttgggga

SEQ ID NO: 1194720 - DNA, 25 bp, Homo sapien
atggcaccagagagccccaactctg

SEQ ID NO: 1194721 - DNA, 25 bp, Homo sapien
aacaagtgggaggtcagcttctggc

SEQ ID NO: 1194722 - DNA, 25 bp, Homo sapien
tgcctcaaacaagtgggaggtcagc

SEQ ID NO: 1194723 - DNA, 25 bp, Homo sapien
aggcagcgcaatggcaccagagagc

SEQ ID NO: 1194724 - DNA, 25 bp, Homo sapien
aaggagcgtcttctgaacccaagag

SEQ ID NO: 1194725 - DNA, 25 bp, Homo sapien
gttcctactatgtgctgtgtaactg

SEQ ID NO: 1194726 - DNA, 25 bp, Homo sapien
cacgctgtccatcctcgtgtgtgaa

SEQ ID NO: 1194727 - DNA, 25 bp, Homo sapien
agactcgtactttgtcaccttgggc

SEQ ID NO: 1194728 - DNA, 25 bp, Homo sapien
tcggggtcagcccacgccactcccc

SEQ ID NO: 1194729 - DNA, 25 bp, Homo sapien
ggggtcagcccacgccactccccca

SEQ ID NO: 1194730 - DNA, 25 bp, Homo sapien
ggtcggggtcagcccacgccactcc

SEQ ID NO: 1194731 - DNA, 25 bp, Homo sapien
ctggtcggggtcagcccacgccact

SEQ ID NO: 1194732 - DNA, 25 bp, Homo sapien
agcattggccttacacttcaattct

SEQ ID NO: 1194733 - DNA, 25 bp, Homo sapien
ttcaattctaagtgagcctggaaat

SEQ ID NO: 1194734 - DNA, 25 bp, Homo sapien
tcaccgacagaagcattggccttac

SEQ ID NO: 1194735 - DNA, 25 bp, Homo sapien
caaaatgccatccatcaccgacaga

SEQ ID NO: 1194736 - DNA, 25 bp, Homo sapien
ggttcgtccactcagtatggccagt

SEQ ID NO: 1194737 - DNA, 25 bp, Homo sapien
cgaaggatttggttcgtccactcag

SEQ ID NO: 1194738 - DNA, 25 bp, Homo sapien
gaatcaaggtcctctccgaaggatt

SEQ ID NO: 1194739 - DNA, 25 bp, Homo sapien
tgctaagagaatcaaggtcctctcc

SEQ ID NO: 1194740 - DNA, 25 bp, Homo sapien
ttgatgccctaacccctccgtggga

SEQ ID NO: 1194741 - DNA, 25 bp, Homo sapien
tgttgatgccctaacccctccgtgg

SEQ ID NO: 1194742 - DNA, 25 bp, Homo sapien
atgttgatgccctaacccctccgtg

SEQ ID NO: 1194743 - DNA, 25 bp, Homo sapien
atgccctaacccctccgtgggatag

SEQ ID NO: 1194744 - DNA, 25 bp, Homo sapien
ggagcaaggcccaggaacctgtttc

SEQ ID NO: 1194745 - DNA, 25 bp, Homo sapien
gattcgggttccttaggttggagca

SEQ ID NO: 1194746 - DNA, 25 bp, Homo sapien
gttccttaggttggagcaaggccca

SEQ ID NO: 1194747 - DNA, 25 bp, Homo sapien
ctatgcagattcgggttccttaggt

SEQ ID NO: 1194748 - DNA, 25 bp, Homo sapien
catgggaacatggtccaaggaggca

SEQ ID NO: 1194749 - DNA, 25 bp, Homo sapien
catcacttcctccagcagaggagcg

SEQ ID NO: 1194750 - DNA, 25 bp, Homo sapien
gagcttgtccaaatggaaacctgca

SEQ ID NO: 1194751 - DNA, 25 bp, Homo sapien
ctgtccagcctaaaggagcttgtcc

SEQ ID NO: 1194752 - DNA, 25 bp, Homo sapien
gaaatggggtgggggcacacttcta

SEQ ID NO: 1194753 - DNA, 25 bp, Homo sapien
cattagagcaaagtggggcagaaat

SEQ ID NO: 1194754 - DNA, 25 bp, Homo sapien
accattagagcaaagtggggcagaa

SEQ ID NO: 1194755 - DNA, 25 bp, Homo sapien
gcagaaatggggtgggggcacactt

SEQ ID NO: 1194756 - DNA, 25 bp, Homo sapien
gctctgaacgttggaaatacggcgc

SEQ ID NO: 1194757 - DNA, 25 bp, Homo sapien
tgctctgaacgttggaaatacggcg

SEQ ID NO: 1194758 - DNA, 25 bp, Homo sapien
actttccaatgtgctctgaacgttg

SEQ ID NO: 1194759 - DNA, 25 bp, Homo sapien
tatttatttccttatgcgtcagaca

SEQ ID NO: 1194760 - DNA, 25 bp, Homo sapien
tccttatgcgtcagacactttcatt

SEQ ID NO: 1194761 - DNA, 25 bp, Homo sapien
tgcgtcagacactttcattatcatc

SEQ ID NO: 1194762 - DNA, 25 bp, Homo sapien
ttatttccttatgcgtcagacactt

SEQ ID NO: 1194763 - DNA, 25 bp, Homo sapien
gcagcccctcgggtgtggtcttgac

SEQ ID NO: 1194764 - DNA, 25 bp, Homo sapien
agatgagcatagatgcaggctcgga

SEQ ID NO: 1194765 - DNA, 25 bp, Homo sapien
tggtgaggagcttggaccccaccct

SEQ ID NO: 1194766 - DNA, 25 bp, Homo sapien
caggctcggaggtgtgaaactgcct

SEQ ID NO: 1194767 - DNA, 25 bp, Homo sapien
cataaggtggtgtaggttgctcaca

SEQ ID NO: 1194768 - DNA, 25 bp, Homo sapien
cagaccctacttttgaggaactggg

SEQ ID NO: 1194769 - DNA, 25 bp, Homo sapien
tgtcctaaagatacccatgagcacg

SEQ ID NO: 1194770 - DNA, 25 bp, Homo sapien
tgagcacgagcaaacccttagaatg

SEQ ID NO: 1194771 - DNA, 25 bp, Homo sapien
cgtagagccgtttcctccgaggtca

SEQ ID NO: 1194772 - DNA, 25 bp, Homo sapien
tgaccgagcctcacctatttccaag

SEQ ID NO: 1194773 - DNA, 25 bp, Homo sapien
ccgctctccagaggcgtgagggaaa

SEQ ID NO: 1194774 - DNA, 25 bp, Homo sapien
gacgggaagcaataaaagtggcctc

SEQ ID NO: 1194775 - DNA, 25 bp, Homo sapien
gcgggcgcaagagcggaggcgcgcg

SEQ ID NO: 1194776 - DNA, 25 bp, Homo sapien
ggaaagcgggcgcaagagcggaggc

SEQ ID NO: 1194777 - DNA, 25 bp, Homo sapien
tccccgcgggaaagcgggcgcaaga

SEQ ID NO: 1194778 - DNA, 25 bp, Homo sapien
gcgcacggaggccggggagcgcggg

SEQ ID NO: 1194779 - DNA, 25 bp, Homo sapien
cggcgcagcgccccacgggccgcac

SEQ ID NO: 1194780 - DNA, 25 bp, Homo sapien
ccgggtgggtctggccggcgcagcg

SEQ ID NO: 1194781 - DNA, 25 bp, Homo sapien
ctcgcccctcggggcgcggccgact

SEQ ID NO: 1194782 - DNA, 25 bp, Homo sapien
gggccggagggagtgcggcccgcag

SEQ ID NO: 1194783 - DNA, 25 bp, Homo sapien
tcccctccatccctcggagaggcca

SEQ ID NO: 1194784 - DNA, 25 bp, Homo sapien
ccctccatccctcggagaggccagg

SEQ ID NO: 1194785 - DNA, 25 bp, Homo sapien
gctgccgcccgcgggtttggccgcc

SEQ ID NO: 1194786 - DNA, 25 bp, Homo sapien
ctgtcccctccatccctcggagagg

SEQ ID NO: 1194787 - DNA, 25 bp, Homo sapien
tgatgggtaaactctggaacagcac

SEQ ID NO: 1194788 - DNA, 25 bp, Homo sapien
aacagcacgccagagaccttaaaga

SEQ ID NO: 1194789 - DNA, 25 bp, Homo sapien
tgtaatatgagcaatttctgttaag

SEQ ID NO: 1194790 - DNA, 25 bp, Homo sapien
gtaagaattgttgatgggtaaactc

SEQ ID NO: 1194791 - DNA, 25 bp, Homo sapien
tctatgagttaatctagaatgcagc

SEQ ID NO: 1194792 - DNA, 25 bp, Homo sapien
ttcaatttatacacaagctttcagg

SEQ ID NO: 1194793 - DNA, 25 bp, Homo sapien
tctctgtagtcgtttattacaattc

SEQ ID NO: 1194794 - DNA, 25 bp, Homo sapien
catataatgcgaaatgtcacaccag

SEQ ID NO: 1194795 - DNA, 25 bp, Homo sapien
gtagcttcagtggaggatgcccgca

SEQ ID NO: 1194796 - DNA, 25 bp, Homo sapien
gcatctgctaacaggcaacatgctc

SEQ ID NO: 1194797 - DNA, 25 bp, Homo sapien
agacaccaagcaggatctgacctcc

SEQ ID NO: 1194798 - DNA, 25 bp, Homo sapien
gatgatagacatcaggaagacacca

SEQ ID NO: 1194799 - DNA, 25 bp, Homo sapien
ccccaaagtgtcttggcgttgagtc

SEQ ID NO: 1194800 - DNA, 25 bp, Homo sapien
tcctaagacccagcacaggactaac

SEQ ID NO: 1194801 - DNA, 25 bp, Homo sapien
gggccccaaagtgtcttggcgttga

SEQ ID NO: 1194802 - DNA, 25 bp, Homo sapien
gaaaacagacagagttcctaagacc

SEQ ID NO: 1194803 - DNA, 25 bp, Homo sapien
gtccgttatccagctgtggctcagg

SEQ ID NO: 1194804 - DNA, 25 bp, Homo sapien
actccactccacagctgaggtcccc

SEQ ID NO: 1194805 - DNA, 25 bp, Homo sapien
tcttggggggtgtccgttatccagc

SEQ ID NO: 1194806 - DNA, 25 bp, Homo sapien
ccacagctgaggtcccctccacggg

SEQ ID NO: 1194807 - DNA, 25 bp, Homo sapien
tggattccagcacagaggggccctg

SEQ ID NO: 1194808 - DNA, 25 bp, Homo sapien
ccatcaggctggatgttctgttttc

SEQ ID NO: 1194809 - DNA, 25 bp, Homo sapien
gggccctggagctgtactccccata

SEQ ID NO: 1194810 - DNA, 25 bp, Homo sapien
gctgtactccccataccctgggagg

SEQ ID NO: 1194811 - DNA, 25 bp, Homo sapien
ctggcaggaaagacccctctgatgg

SEQ ID NO: 1194812 - DNA, 25 bp, Homo sapien
aaagacccctctgatggagtcccgg

SEQ ID NO: 1194813 - DNA, 25 bp, Homo sapien
cagggactcactccctgtttggcca

SEQ ID NO: 1194814 - DNA, 25 bp, Homo sapien
tcttgggggatgaccactcttggga

SEQ ID NO: 1194815 - DNA, 25 bp, Homo sapien
catccctggcgggttgctcctcatt

SEQ ID NO: 1194816 - DNA, 25 bp, Homo sapien
cctcattgatgctgccgtccagctg

SEQ ID NO: 1194817 - DNA, 25 bp, Homo sapien
ccatcaggcaggttttgggtacgag

SEQ ID NO: 1194818 - DNA, 25 bp, Homo sapien
cccatcaggcaggttttgggtacga

SEQ ID NO: 1194819 - DNA, 25 bp, Homo sapien
ccatggatcgggctctgttgcaaag

SEQ ID NO: 1194820 - DNA, 25 bp, Homo sapien
cagcagcggacctctgtcatggtca

SEQ ID NO: 1194821 - DNA, 25 bp, Homo sapien
caggccgtccgggagtaactccatg

SEQ ID NO: 1194822 - DNA, 25 bp, Homo sapien
gaagtgtccattcggcttctggagg

SEQ ID NO: 1194823 - DNA, 25 bp, Homo sapien
ggtcagggatgtgctatccagatct

SEQ ID NO: 1194824 - DNA, 25 bp, Homo sapien
cagggatgtgctatccagatctgcc

SEQ ID NO: 1194825 - DNA, 25 bp, Homo sapien
caaagacctcctcggaggtcaggga

SEQ ID NO: 1194826 - DNA, 25 bp, Homo sapien
cctcggaggtcagggatgtgctatc

SEQ ID NO: 1194827 - DNA, 25 bp, Homo sapien
cgatcagacagggacaagacactgc

SEQ ID NO: 1194828 - DNA, 25 bp, Homo sapien
tctccacccgatcagacagggacaa

SEQ ID NO: 1194829 - DNA, 25 bp, Homo sapien
ggcggtttctctccacccgatcaga

SEQ ID NO: 1194830 - DNA, 25 bp, Homo sapien
ggtttctctccacccgatcagacag

SEQ ID NO: 1194831 - DNA, 25 bp, Homo sapien
ggttcccaccttgcgggggctctgc

SEQ ID NO: 1194832 - DNA, 25 bp, Homo sapien
gttcccaccttgcgggggctctgcc

SEQ ID NO: 1194833 - DNA, 25 bp, Homo sapien
ttgatgacaggcaactgtcaggctc

SEQ ID NO: 1194834 - DNA, 25 bp, Homo sapien
agccaaggacaagaggccatcctga

SEQ ID NO: 1194835 - DNA, 25 bp, Homo sapien
cctggacctacacagtgagcttcac

SEQ ID NO: 1194836 - DNA, 25 bp, Homo sapien
ggacaagaggccatcctgatgattt

SEQ ID NO: 1194837 - DNA, 25 bp, Homo sapien
taggatccagaacagaagcagagat

SEQ ID NO: 1194838 - DNA, 25 bp, Homo sapien
ctaggatccagaacagaagcagaga

SEQ ID NO: 1194839 - DNA, 25 bp, Homo sapien
aagcagagatcaggacagagccaga

SEQ ID NO: 1194840 - DNA, 25 bp, Homo sapien
caggacagagccagaaacagggctc

SEQ ID NO: 1194841 - DNA, 25 bp, Homo sapien
ggaggtgcccgaggcccagtccaca

SEQ ID NO: 1194842 - DNA, 25 bp, Homo sapien
aaggaggtgcccgaggcccagtcca

SEQ ID NO: 1194843 - DNA, 25 bp, Homo sapien
tgcaaggaggtgcccgaggcccagt

SEQ ID NO: 1194844 - DNA, 25 bp, Homo sapien
gaggtgcccgaggcccagtccacat

SEQ ID NO: 1194845 - DNA, 25 bp, Homo sapien
cctcgcaggggctgacaacaccaga

SEQ ID NO: 1194846 - DNA, 25 bp, Homo sapien
aaaccacaaggcctcgcaggggctg

SEQ ID NO: 1194847 - DNA, 25 bp, Homo sapien
cgtgtcgacctctgccctccgcaga

SEQ ID NO: 1194848 - DNA, 25 bp, Homo sapien
agcaaccgtgtcgacctctgccctc

SEQ ID NO: 1194849 - DNA, 25 bp, Homo sapien
taaggtcctgggtcgttgcctccca

SEQ ID NO: 1194850 - DNA, 25 bp, Homo sapien
tgggcttttgcctaccactaggagg

SEQ ID NO: 1194851 - DNA, 25 bp, Homo sapien
tatagcctgggcgtctactcagcag

SEQ ID NO: 1194852 - DNA, 25 bp, Homo sapien
ttaatgtctgcccaggagactcggg

SEQ ID NO: 1194853 - DNA, 25 bp, Homo sapien
tgaaagctttctgatgaccacggat

SEQ ID NO: 1194854 - DNA, 25 bp, Homo sapien
gagctctcctactgtgattctgtgt

SEQ ID NO: 1194855 - DNA, 25 bp, Homo sapien
aactgattctgggtcatgtgctcca

SEQ ID NO: 1194856 - DNA, 25 bp, Homo sapien
gggagaatatggagtgtacagaaca

SEQ ID NO: 1194857 - DNA, 25 bp, Homo sapien
cgcacactcggagccttccggtgac

SEQ ID NO: 1194858 - DNA, 25 bp, Homo sapien
actcggagccttccggtgacagctg

SEQ ID NO: 1194859 - DNA, 25 bp, Homo sapien
cacactcggagccttccggtgacag

SEQ ID NO: 1194860 - DNA, 25 bp, Homo sapien
agcccgcacactcggagccttccgg

SEQ ID NO: 1194861 - DNA, 25 bp, Homo sapien
gaacgtcaattgcaagcggagcaga

SEQ ID NO: 1194862 - DNA, 25 bp, Homo sapien
aagacgttgttctccacggagcttg

SEQ ID NO: 1194863 - DNA, 25 bp, Homo sapien
ggcacattgttcaaggtcgaacgtc

SEQ ID NO: 1194864 - DNA, 25 bp, Homo sapien
tgtccagagcagagaagaacgctgg

SEQ ID NO: 1194865 - DNA, 25 bp, Homo sapien
taacgcagattaggagggctttagc

SEQ ID NO: 1194866 - DNA, 25 bp, Homo sapien
gtgcagccttcctcctctagcaccc

SEQ ID NO: 1194867 - DNA, 25 bp, Homo sapien
aagccctgcatgtgcagccttcctc

SEQ ID NO: 1194868 - DNA, 25 bp, Homo sapien
gctttagcagtgtcaagcactggct

SEQ ID NO: 1194869 - DNA, 25 bp, Homo sapien
ggcacgatgtcatggctggcacgga

SEQ ID NO: 1194870 - DNA, 25 bp, Homo sapien
ccctgggtaatggtgggcacgatgt

SEQ ID NO: 1194871 - DNA, 25 bp, Homo sapien
cttcatgcgggcacgctgcagcaga

SEQ ID NO: 1194872 - DNA, 25 bp, Homo sapien
cagcagatgcgtggcttcctcatgc

SEQ ID NO: 1194873 - DNA, 25 bp, Homo sapien
gatttttcagctataccctctgagg

SEQ ID NO: 1194874 - DNA, 25 bp, Homo sapien
aagcatctgcagcaagccatctggc

SEQ ID NO: 1194875 - DNA, 25 bp, Homo sapien
ccatctggcgttgatttttcagcta

SEQ ID NO: 1194876 - DNA, 25 bp, Homo sapien
tctgcagcaagccatctggcgttga

SEQ ID NO: 1194877 - DNA, 25 bp, Homo sapien
cctcctgcatctaactgaggcctgg

SEQ ID NO: 1194878 - DNA, 25 bp, Homo sapien
caagctgctctttagaagtgatgca

SEQ ID NO: 1194879 - DNA, 25 bp, Homo sapien
ccagggtgatttgacggagcgtaac

SEQ ID NO: 1194880 - DNA, 25 bp, Homo sapien
atgttaactcagcatggccctccag

SEQ ID NO: 1194881 - DNA, 25 bp, Homo sapien
taggataaagaaggccctctgagac

SEQ ID NO: 1194882 - DNA, 25 bp, Homo sapien
ctaggataaagaaggccctctgaga

SEQ ID NO: 1194883 - DNA, 25 bp, Homo sapien
taaagaaggccctctgagactgctc

SEQ ID NO: 1194884 - DNA, 25 bp, Homo sapien
ggataaagaaggccctctgagactg

SEQ ID NO: 1194885 - DNA, 25 bp, Homo sapien
tcagtaacaccaatctaggcatgtc

SEQ ID NO: 1194886 - DNA, 25 bp, Homo sapien
tcctgccatcagtaacaccaatcta

SEQ ID NO: 1194887 - DNA, 25 bp, Homo sapien
tcaggcttgccccagctgcctctag

SEQ ID NO: 1194888 - DNA, 25 bp, Homo sapien
tctaggcatgtctatccccaaaatg

SEQ ID NO: 1194889 - DNA, 25 bp, Homo sapien
gcaggcaggggtcgtcctggggtcc

SEQ ID NO: 1194890 - DNA, 25 bp, Homo sapien
cctggggtcccgggctgggcttctg

SEQ ID NO: 1194891 - DNA, 25 bp, Homo sapien
tcccgggctgggcttctgtggccat

SEQ ID NO: 1194892 - DNA, 25 bp, Homo sapien
ctgcaggcaggggtcgtcctggggt

SEQ ID NO: 1194893 - DNA, 25 bp, Homo sapien
ctcaaagcgcacgtgcgacggcgag

SEQ ID NO: 1194894 - DNA, 25 bp, Homo sapien
tggaggaatcgctcgtgtgcccgtt

SEQ ID NO: 1194895 - DNA, 25 bp, Homo sapien
ctcgtgtgcccgttctggaggctgt

SEQ ID NO: 1194896 - DNA, 25 bp, Homo sapien
tggactctccgctggaggaatcgct

SEQ ID NO: 1194897 - DNA, 25 bp, Homo sapien
tgtttcccggatccattccatgtgg

SEQ ID NO: 1194898 - DNA, 25 bp, Homo sapien
ggtgtctccgatgtgtgtttcccgg

SEQ ID NO: 1194899 - DNA, 25 bp, Homo sapien
cgctccaggtgacggaactcggctt

SEQ ID NO: 1194900 - DNA, 25 bp, Homo sapien
ccccgttgatgtagtcggcgaggtc

SEQ ID NO: 1194901 - DNA, 25 bp, Homo sapien
tgctgccttgggtccgcccacacgc

SEQ ID NO: 1194902 - DNA, 25 bp, Homo sapien
gcctcctcactgtcggtcctgcagt

SEQ ID NO: 1194903 - DNA, 25 bp, Homo sapien
tgcagttgtcagagttgtctgtgct

SEQ ID NO: 1194904 - DNA, 25 bp, Homo sapien
agtcgcagtcgcgggctgctgcctt

SEQ ID NO: 1194905 - DNA, 25 bp, Homo sapien
gactcgtggctttctgtaacctggg

SEQ ID NO: 1194906 - DNA, 25 bp, Homo sapien
tgccttcctgtgagacactggcgag

SEQ ID NO: 1194907 - DNA, 25 bp, Homo sapien
gaaccgcgcttcttgaaggaggccg

SEQ ID NO: 1194908 - DNA, 25 bp, Homo sapien
ccttcaggacacaaggaagctgttg

SEQ ID NO: 1194909 - DNA, 25 bp, Homo sapien
agtgggtgcctgacctgagggcggc

SEQ ID NO: 1194910 - DNA, 25 bp, Homo sapien
gcagtgggtgcctgacctgagggcg

SEQ ID NO: 1194911 - DNA, 25 bp, Homo sapien
tcccccgtagggctcctgcagcccc

SEQ ID NO: 1194912 - DNA, 25 bp, Homo sapien
gtgggtgcctgacctgagggcggct

SEQ ID NO: 1194913 - DNA, 25 bp, Homo sapien
tgttctccaggggcggctccggttc

SEQ ID NO: 1194914 - DNA, 25 bp, Homo sapien
ctgttctccaggggcggctccggtt

SEQ ID NO: 1194915 - DNA, 25 bp, Homo sapien
tgagtcagaccggctcatcccacag

SEQ ID NO: 1194916 - DNA, 25 bp, Homo sapien
gaatgggacattcccagcaacaggg

SEQ ID NO: 1194917 - DNA, 25 bp, Homo sapien
agtcagaccggctcatcccacaggt

SEQ ID NO: 1194918 - DNA, 25 bp, Homo sapien
gggaatgggacattcccagcaacag

SEQ ID NO: 1194919 - DNA, 25 bp, Homo sapien
cccgtggagttgatggtggcaacat

SEQ ID NO: 1194920 - DNA, 25 bp, Homo sapien
gttgatggtggcaacatctgctgag

SEQ ID NO: 1194921 - DNA, 25 bp, Homo sapien
ctggactctgactcctctgaggaca

SEQ ID NO: 1194922 - DNA, 25 bp, Homo sapien
gggtgatgcccgtggagttgatggt

SEQ ID NO: 1194923 - DNA, 25 bp, Homo sapien
caaggctttgaggcaagccaaggag

SEQ ID NO: 1194924 - DNA, 25 bp, Homo sapien
gctttgaggcaagccaaggaggtcc

SEQ ID NO: 1194925 - DNA, 25 bp, Homo sapien
aaggctttgaggcaagccaaggagg

SEQ ID NO: 1194926 - DNA, 25 bp, Homo sapien
ggctttgaggcaagccaaggaggtc

SEQ ID NO: 1194927 - DNA, 25 bp, Homo sapien
ttgttctggtccaaaggggcagccg

SEQ ID NO: 1194928 - DNA, 25 bp, Homo sapien
tgttctggtccaaaggggcagccga

SEQ ID NO: 1194929 - DNA, 25 bp, Homo sapien
agcttgggccgggaactctggccca

SEQ ID NO: 1194930 - DNA, 25 bp, Homo sapien
gctgagaagagctttttcagcccca

SEQ ID NO: 1194931 - DNA, 25 bp, Homo sapien
ctgagaagagctttttcagccccag

SEQ ID NO: 1194932 - DNA, 25 bp, Homo sapien
tgcccagcttgggccgggaactctg

SEQ ID NO: 1194933 - DNA, 25 bp, Homo sapien
gccctggactgtgacgtcaggccag

SEQ ID NO: 1194934 - DNA, 25 bp, Homo sapien
cgggtgcagggattgtaacgatggg

SEQ ID NO: 1194935 - DNA, 25 bp, Homo sapien
gattgtaacgatggggccctggact

SEQ ID NO: 1194936 - DNA, 25 bp, Homo sapien
cctggactgtgacgtcaggccaggc

SEQ ID NO: 1194937 - DNA, 25 bp, Homo sapien
ccggaatacaaagatcaagcgttgt

SEQ ID NO: 1194938 - DNA, 25 bp, Homo sapien
agatcaagcgttgttccctcaaata

SEQ ID NO: 1194939 - DNA, 25 bp, Homo sapien
cactcagtatgtattgtgcgtactg

SEQ ID NO: 1194940 - DNA, 25 bp, Homo sapien
gtgcgtactgcactagcttccctag

SEQ ID NO: 1194941 - DNA, 25 bp, Homo sapien
aattaggagaaacagaccacctgaa

SEQ ID NO: 1194942 - DNA, 25 bp, Homo sapien
attaggagaaacagaccacctgaac

SEQ ID NO: 1194943 - DNA, 25 bp, Homo sapien
ttaggagaaacagaccacctgaact

SEQ ID NO: 1194944 - DNA, 25 bp, Homo sapien
aaaggcgccagcgacgcaaaccgct

SEQ ID NO: 1194945 - DNA, 25 bp, Homo sapien
tcattcagtccgcatcctcttctcg

SEQ ID NO: 1194946 - DNA, 25 bp, Homo sapien
tcagtccgcatcctcttctcgcctg

SEQ ID NO: 1194947 - DNA, 25 bp, Homo sapien
tgggaaatgaaaggcgccagcgacg

SEQ ID NO: 1194948 - DNA, 25 bp, Homo sapien
aaagtgacagcacaagcttttatca

SEQ ID NO: 1194949 - DNA, 25 bp, Homo sapien
gaaagtgacagcacaagcttttatc

SEQ ID NO: 1194950 - DNA, 25 bp, Homo sapien
agtgacagcacaagcttttatcatt

SEQ ID NO: 1194951 - DNA, 25 bp, Homo sapien
aagtgacagcacaagcttttatcat

SEQ ID NO: 1194952 - DNA, 25 bp, Homo sapien
cagaggacttggccccaccatgaac

SEQ ID NO: 1194953 - DNA, 25 bp, Homo sapien
gctggaccggttccccttgctgctc

SEQ ID NO: 1194954 - DNA, 25 bp, Homo sapien
tagaggctggaccggttccccttgc

SEQ ID NO: 1194955 - DNA, 25 bp, Homo sapien
aaaagaggcagctttccgacgctgg

SEQ ID NO: 1194956 - DNA, 25 bp, Homo sapien
aggcagctttccgacgctggtgaga

SEQ ID NO: 1194957 - DNA, 25 bp, Homo sapien
cactgtggtcccctggccctgctac

SEQ ID NO: 1194958 - DNA, 25 bp, Homo sapien
agctgcactgtggtcccctggccct

SEQ ID NO: 1194959 - DNA, 25 bp, Homo sapien
ctgcactgtggtcccctggccctgc

SEQ ID NO: 1194960 - DNA, 25 bp, Homo sapien
tgccagctgcactgtggtcccctgg

SEQ ID NO: 1194961 - DNA, 25 bp, Homo sapien
aatgcaccgagggtccatgcagggc

SEQ ID NO: 1194962 - DNA, 25 bp, Homo sapien
gtggcagcctcgtctccacacatca

SEQ ID NO: 1194963 - DNA, 25 bp, Homo sapien
cacacatcacatgtcctgttgcttt

SEQ ID NO: 1194964 - DNA, 25 bp, Homo sapien
ggcactgaggtgctgagactcccgt

SEQ ID NO: 1194965 - DNA, 25 bp, Homo sapien
tgagtctgggcgcccattcccagag

SEQ ID NO: 1194966 - DNA, 25 bp, Homo sapien
aggccacgcagaagccgaaagtgcc

SEQ ID NO: 1194967 - DNA, 25 bp, Homo sapien
cacactgagggcacgccgtggtgaa

SEQ ID NO: 1194968 - DNA, 25 bp, Homo sapien
ggcccacggtgcgagccaggctggg

SEQ ID NO: 1194969 - DNA, 25 bp, Homo sapien
cagccagaaggccctgccttgtttg

SEQ ID NO: 1194970 - DNA, 25 bp, Homo sapien
gaccagaaaagcctctgaccacagc

SEQ ID NO: 1194971 - DNA, 25 bp, Homo sapien
aagaccagaaaagcctctgaccaca

SEQ ID NO: 1194972 - DNA, 25 bp, Homo sapien
gccttgtttgctaaggccgccccag

SEQ ID NO: 1194973 - DNA, 25 bp, Homo sapien
aaggaaccgtttcaacgcagccaca

SEQ ID NO: 1194974 - DNA, 25 bp, Homo sapien
cagacatactccacagccggaggaa

SEQ ID NO: 1194975 - DNA, 25 bp, Homo sapien
tgcaggtgcagactcctagagagcc

SEQ ID NO: 1194976 - DNA, 25 bp, Homo sapien
acaattcagaaagagcccctgaggg

SEQ ID NO: 1194977 - DNA, 25 bp, Homo sapien
tcatctgaacataatcatcgggcac

SEQ ID NO: 1194978 - DNA, 25 bp, Homo sapien
tctgaacataatcatcgggcacagg

SEQ ID NO: 1194979 - DNA, 25 bp, Homo sapien
ctgaacataatcatcgggcacaggc

SEQ ID NO: 1194980 - DNA, 25 bp, Homo sapien
catctgaacataatcatcgggcaca

SEQ ID NO: 1194981 - DNA, 25 bp, Homo sapien
tgtgtgcactcacatcgacaggtga

SEQ ID NO: 1194982 - DNA, 25 bp, Homo sapien
tagagagtctcagtgctcgctccga

SEQ ID NO: 1194983 - DNA, 25 bp, Homo sapien
cagagtgcagaatgatgtccaggac

SEQ ID NO: 1194984 - DNA, 25 bp, Homo sapien
cacgttgccctgaaagactcatgga

SEQ ID NO: 1194985 - DNA, 25 bp, Homo sapien
gaagaagcgaccctctgctgttgga

SEQ ID NO: 1194986 - DNA, 25 bp, Homo sapien
ctgtgtgccatccagcgcccatgat

SEQ ID NO: 1194987 - DNA, 25 bp, Homo sapien
gcacaacggggagctggcaccaact

SEQ ID NO: 1194988 - DNA, 25 bp, Homo sapien
atccagcgcccatgatggcagcagg

SEQ ID NO: 1194989 - DNA, 25 bp, Homo sapien
taccagcatcctgccggttcagtgc

SEQ ID NO: 1194990 - DNA, 25 bp, Homo sapien
ttaataccagcatcctgccggttca

SEQ ID NO: 1194991 - DNA, 25 bp, Homo sapien
gtgcggggcgcaagccagccctcct

SEQ ID NO: 1194992 - DNA, 25 bp, Homo sapien
cctgccggttcagtgcggggcgcaa

SEQ ID NO: 1194993 - DNA, 25 bp, Homo sapien
tgatctctatgttgtatccaattag

SEQ ID NO: 1194994 - DNA, 25 bp, Homo sapien
gacagcctgctgtcataggcattta

SEQ ID NO: 1194995 - DNA, 25 bp, Homo sapien
cataggcatttattgtctgctggaa

SEQ ID NO: 1194996 - DNA, 25 bp, Homo sapien
ctcatatagagtcggatgtgaaagc

SEQ ID NO: 1194997 - DNA, 25 bp, Homo sapien
tgcccacgcgttactgtcttcactt

SEQ ID NO: 1194998 - DNA, 25 bp, Homo sapien
ggctgctcagcgcagcctttggcac

SEQ ID NO: 1194999 - DNA, 25 bp, Homo sapien
tcctcgaatcaggttcttagcaggg

SEQ ID NO: 1195000 - DNA, 25 bp, Homo sapien
cactggcggaattcaggctgctcag

SEQ ID NO: 1195001 - DNA, 25 bp, Homo sapien
taaagtggaaatgctcctagtgcaa

SEQ ID NO: 1195002 - DNA, 25 bp, Homo sapien
acaaccacaactggctttagacata

SEQ ID NO: 1195003 - DNA, 25 bp, Homo sapien
caaataacgcgttaaactgttgtca

SEQ ID NO: 1195004 - DNA, 25 bp, Homo sapien
ttagacatagatacagtgcgcctcc

SEQ ID NO: 1195005 - DNA, 25 bp, Homo sapien
ttggccatgctcatgtcagccatct

SEQ ID NO: 1195006 - DNA, 25 bp, Homo sapien
cttggccccgttcacctcgaggatc

SEQ ID NO: 1195007 - DNA, 25 bp, Homo sapien
gccctgagtacagcttggccatgct

SEQ ID NO: 1195008 - DNA, 25 bp, Homo sapien
ggccccgttcacctcgaggatctca

SEQ ID NO: 1195009 - DNA, 25 bp, Homo sapien
gccaggagctccttaatgtgagcca

SEQ ID NO: 1195010 - DNA, 25 bp, Homo sapien
cctcaggacacggattgacaagctc

SEQ ID NO: 1195011 - DNA, 25 bp, Homo sapien
acggattgacaagctctctgagtgg

SEQ ID NO: 1195012 - DNA, 25 bp, Homo sapien
ctccttaatgtgagccaagcccagc

SEQ ID NO: 1195013 - DNA, 25 bp, Homo sapien
caagctggacagaactaagatggag

SEQ ID NO: 1195014 - DNA, 25 bp, Homo sapien
gttaagactgacacatggccatcca

SEQ ID NO: 1195015 - DNA, 25 bp, Homo sapien
cctttgaccaggcatgggaccagga

SEQ ID NO: 1195016 - DNA, 25 bp, Homo sapien
tgtaaggctggtattccgggacact

SEQ ID NO: 1195017 - DNA, 25 bp, Homo sapien
tcagagaaaagtggagctgtctttg

SEQ ID NO: 1195018 - DNA, 25 bp, Homo sapien
tgcctccttggaattaggtcaccgt

SEQ ID NO: 1195019 - DNA, 25 bp, Homo sapien
attaggtcaccgtccagaggcctgg

SEQ ID NO: 1195020 - DNA, 25 bp, Homo sapien
ccctagcaccaagccttttctggca

SEQ ID NO: 1195021 - DNA, 25 bp, Homo sapien
agcctccagtgtcccgcgtgcctcg

SEQ ID NO: 1195022 - DNA, 25 bp, Homo sapien
acttggcccttgctgtagcttccta

SEQ ID NO: 1195023 - DNA, 25 bp, Homo sapien
tagcttcctactcgttttacaaagc

SEQ ID NO: 1195024 - DNA, 25 bp, Homo sapien
cttgtgctcacctgcccggttggcg

SEQ ID NO: 1195025 - DNA, 25 bp, Homo sapien
gctgcttcgtttctgtgcctgagcc

SEQ ID NO: 1195026 - DNA, 25 bp, Homo sapien
gacataagttagacaccgggaatac

SEQ ID NO: 1195027 - DNA, 25 bp, Homo sapien
tctgcgggtggcttctgaaaatgcc

SEQ ID NO: 1195028 - DNA, 25 bp, Homo sapien
tgccagctgcggatatctctcgccg

SEQ ID NO: 1195029 - DNA, 25 bp, Homo sapien
tgctccgtgtagtcccagtgtcagg

SEQ ID NO: 1195030 - DNA, 25 bp, Homo sapien
cgtgcgttagcctggtataatagtc

SEQ ID NO: 1195031 - DNA, 25 bp, Homo sapien
gagcctcggactcctcgtgcgttag

SEQ ID NO: 1195032 - DNA, 25 bp, Homo sapien
tgttggtctcaacccacaaaattgc

SEQ ID NO: 1195033 - DNA, 25 bp, Homo sapien
tagtctctctctcgcagtgttgccg

SEQ ID NO: 1195034 - DNA, 25 bp, Homo sapien
gaagactaagaagtccacagtcgca

SEQ ID NO: 1195035 - DNA, 25 bp, Homo sapien
ggatccaggagccaacaaacaaagc

SEQ ID NO: 1195036 - DNA, 25 bp, Homo sapien
taatacccacacaagaatcctgtgc

SEQ ID NO: 1195037 - DNA, 25 bp, Homo sapien
cttcttggcacacccggaaaagagg

SEQ ID NO: 1195038 - DNA, 25 bp, Homo sapien
ggccaacccacagccagagagcgct

SEQ ID NO: 1195039 - DNA, 25 bp, Homo sapien
ctggccaacccacagccagagagcg

SEQ ID NO: 1195040 - DNA, 25 bp, Homo sapien
cttgccaaggaaggctcttgccatt

SEQ ID NO: 1195041 - DNA, 25 bp, Homo sapien
gctctggctttgtaggaaagaggga

SEQ ID NO: 1195042 - DNA, 25 bp, Homo sapien
catgggcacatatcagcgccagtcc

SEQ ID NO: 1195043 - DNA, 25 bp, Homo sapien
gcagggcagctgttaagccctggct

SEQ ID NO: 1195044 - DNA, 25 bp, Homo sapien
ggcagctgttaagccctggctccat

SEQ ID NO: 1195045 - DNA, 25 bp, Homo sapien
ggctccatgggcacatatcagcgcc

SEQ ID NO: 1195046 - DNA, 25 bp, Homo sapien
tttctcctggcacagtaagattggc

SEQ ID NO: 1195047 - DNA, 25 bp, Homo sapien
gaggtcagtaactctaaacttcctg

SEQ ID NO: 1195048 - DNA, 25 bp, Homo sapien
gaaagttttatctaaacagtagcca

SEQ ID NO: 1195049 - DNA, 25 bp, Homo sapien
gctggccttcgatgaggtcagtaac

SEQ ID NO: 1195050 - DNA, 25 bp, Homo sapien
ggtgctgctacacggagcgttagca

SEQ ID NO: 1195051 - DNA, 25 bp, Homo sapien
cacggagcgttagcagcagctgttt

SEQ ID NO: 1195052 - DNA, 25 bp, Homo sapien
gctacacggagcgttagcagcagct

SEQ ID NO: 1195053 - DNA, 25 bp, Homo sapien
tgcccaggtgctgctacacggagcg

SEQ ID NO: 1195054 - DNA, 25 bp, Homo sapien
ctccagatgccagctgtatgcccac

SEQ ID NO: 1195055 - DNA, 25 bp, Homo sapien
ctttggcagagggacacagtttgca

SEQ ID NO: 1195056 - DNA, 25 bp, Homo sapien
ttggcagagggacacagtttgcaag

SEQ ID NO: 1195057 - DNA, 25 bp, Homo sapien
tggcagagggacacagtttgcaagg

SEQ ID NO: 1195058 - DNA, 25 bp, Homo sapien
tttggcagagggacacagtttgcaa

SEQ ID NO: 1195059 - DNA, 25 bp, Homo sapien
cgagggagaaacatggactgtgtcg

SEQ ID NO: 1195060 - DNA, 25 bp, Homo sapien
cccgagggagaaacatggactgtgt

SEQ ID NO: 1195061 - DNA, 25 bp, Homo sapien
tacccgagggagaaacatggactgt

SEQ ID NO: 1195062 - DNA, 25 bp, Homo sapien
ctacccgagggagaaacatggactg

SEQ ID NO: 1195063 - DNA, 25 bp, Homo sapien
cagcctcgccagagaaacgagtgct

SEQ ID NO: 1195064 - DNA, 25 bp, Homo sapien
gcttggagagttagggttatatgta

SEQ ID NO: 1195065 - DNA, 25 bp, Homo sapien
tgtatcctctaataaaagtagatca

SEQ ID NO: 1195066 - DNA, 25 bp, Homo sapien
cagagaaacgagtgcttggagagtt

SEQ ID NO: 1195067 - DNA, 25 bp, Homo sapien
tgtgccatatcagagcttgctaagt

SEQ ID NO: 1195068 - DNA, 25 bp, Homo sapien
gcctagcacggaatgtgccatatca

SEQ ID NO: 1195069 - DNA, 25 bp, Homo sapien
tgaccctcatgcctagcacggaatg

SEQ ID NO: 1195070 - DNA, 25 bp, Homo sapien
gagcttgctaagtccttagcttgat

SEQ ID NO: 1195071 - DNA, 25 bp, Homo sapien
ggcagagcaagttatatgaattctt

SEQ ID NO: 1195072 - DNA, 25 bp, Homo sapien
tcttaaacccccgagtagcctgata

SEQ ID NO: 1195073 - DNA, 25 bp, Homo sapien
ctggcagagcaagttatatgaattc

SEQ ID NO: 1195074 - DNA, 25 bp, Homo sapien
taaacccccgagtagcctgatatgg

SEQ ID NO: 1195075 - DNA, 25 bp, Homo sapien
tggcgttcgtggcaacccagcactc

SEQ ID NO: 1195076 - DNA, 25 bp, Homo sapien
gccctgttccctggcgttcgtggca

SEQ ID NO: 1195077 - DNA, 25 bp, Homo sapien
tgagattgtcctactgaaagacaac

SEQ ID NO: 1195078 - DNA, 25 bp, Homo sapien
cagattttagctgagattgtcctac

SEQ ID NO: 1195079 - DNA, 25 bp, Homo sapien
gacatgccctttgtgcagagctgcc

SEQ ID NO: 1195080 - DNA, 25 bp, Homo sapien
cctactgcttgggtttcacatgaac

SEQ ID NO: 1195081 - DNA, 25 bp, Homo sapien
ttatgagctgtcaaacctggaggcc

SEQ ID NO: 1195082 - DNA, 25 bp, Homo sapien
catgcagtgcacctggtttgccaac

SEQ ID NO: 1195083 - DNA, 25 bp, Homo sapien
gaaaggaggcaaagaaggaagacat

SEQ ID NO: 1195084 - DNA, 25 bp, Homo sapien
ctggaaaggaggcaaagaaggaaga

SEQ ID NO: 1195085 - DNA, 25 bp, Homo sapien
ggaaaggaggcaaagaaggaagaca

SEQ ID NO: 1195086 - DNA, 25 bp, Homo sapien
tggaaaggaggcaaagaaggaagac

SEQ ID NO: 1195087 - DNA, 25 bp, Homo sapien
tgagtgattgtagtgtctctgctgg

SEQ ID NO: 1195088 - DNA, 25 bp, Homo sapien
tgattgtagtgtctctgctggcgct

SEQ ID NO: 1195089 - DNA, 25 bp, Homo sapien
tgtagtgtctctgctggcgcttcag

SEQ ID NO: 1195090 - DNA, 25 bp, Homo sapien
agtgtctctgctggcgcttcagttc

SEQ ID NO: 1195091 - DNA, 25 bp, Homo sapien
gccaatcattctctggtaagtgtga

SEQ ID NO: 1195092 - DNA, 25 bp, Homo sapien
acagccaatcattctctggtaagtg

SEQ ID NO: 1195093 - DNA, 25 bp, Homo sapien
atcattctctggtaagtgtgagacc

SEQ ID NO: 1195094 - DNA, 25 bp, Homo sapien
caatcattctctggtaagtgtgaga

SEQ ID NO: 1195095 - DNA, 25 bp, Homo sapien
ccctgtgtcctagaatgggagagta

SEQ ID NO: 1195096 - DNA, 25 bp, Homo sapien
agtaagtagacagtggtgataaccc

SEQ ID NO: 1195097 - DNA, 25 bp, Homo sapien
tgtacctagtaccatattccagttt

SEQ ID NO: 1195098 - DNA, 25 bp, Homo sapien
accccacactgcttataagtgcatc

SEQ ID NO: 1195099 - DNA, 25 bp, Homo sapien
cagtggtcctaatgttcagggcttt

SEQ ID NO: 1195100 - DNA, 25 bp, Homo sapien
gtggtcctaatgttcagggctttag

SEQ ID NO: 1195101 - DNA, 25 bp, Homo sapien
cctcagtggtcctaatgttcagggc

SEQ ID NO: 1195102 - DNA, 25 bp, Homo sapien
tcagtggtcctaatgttcagggctt

SEQ ID NO: 1195103 - DNA, 25 bp, Homo sapien
ggcagccaaagagaacaatccaggg

SEQ ID NO: 1195104 - DNA, 25 bp, Homo sapien
agccaaagagaacaatccagggaac

SEQ ID NO: 1195105 - DNA, 25 bp, Homo sapien
cagccaaagagaacaatccagggaa

SEQ ID NO: 1195106 - DNA, 25 bp, Homo sapien
gcagccaaagagaacaatccaggga

SEQ ID NO: 1195107 - DNA, 25 bp, Homo sapien
gaaactaaaagggtgattgacatcc

SEQ ID NO: 1195108 - DNA, 25 bp, Homo sapien
aaagggcttcagatgtttagagtac

SEQ ID NO: 1195109 - DNA, 25 bp, Homo sapien
gaaaatatgcctgttgatgaaagct

SEQ ID NO: 1195110 - DNA, 25 bp, Homo sapien
gaaccttgtctaagtactgtaatcc

SEQ ID NO: 1195111 - DNA, 25 bp, Homo sapien
aacttccctgactattgacatcaag

SEQ ID NO: 1195112 - DNA, 25 bp, Homo sapien
caagcatcacggtggtacgtttgtt

SEQ ID NO: 1195113 - DNA, 25 bp, Homo sapien
catgcataacttccctgactattga

SEQ ID NO: 1195114 - DNA, 25 bp, Homo sapien
tgactattgacatcaagcatcacgg

SEQ ID NO: 1195115 - DNA, 25 bp, Homo sapien
tattgttggctactgttaatcaggc

SEQ ID NO: 1195116 - DNA, 25 bp, Homo sapien
taaacctaggtctttgacatgaaag

SEQ ID NO: 1195117 - DNA, 25 bp, Homo sapien
ggaaattgcaaaccatgcttcagtg

SEQ ID NO: 1195118 - DNA, 25 bp, Homo sapien
tgctcagtagctagtgggtcctgta

SEQ ID NO: 1195119 - DNA, 25 bp, Homo sapien
tgtctgtgccattcgggataaatag

SEQ ID NO: 1195120 - DNA, 25 bp, Homo sapien
ccagtaacttaaggtacagtagcca

SEQ ID NO: 1195121 - DNA, 25 bp, Homo sapien
taatgattatgactgtggaccctgg

SEQ ID NO: 1195122 - DNA, 25 bp, Homo sapien
gccaaattcttatacagtgtgtgac

SEQ ID NO: 1195123 - DNA, 25 bp, Homo sapien
gagctgagaaataacctccggagca

SEQ ID NO: 1195124 - DNA, 25 bp, Homo sapien
agctgagaaataacctccggagcat

SEQ ID NO: 1195125 - DNA, 25 bp, Homo sapien
accaaaaactgacaggtcccttctg

SEQ ID NO: 1195126 - DNA, 25 bp, Homo sapien
caatgatgagaggtaacaggaacgc

SEQ ID NO: 1195127 - DNA, 25 bp, Homo sapien
tgatgagaggtaacaggaacgccat

SEQ ID NO: 1195128 - DNA, 25 bp, Homo sapien
taacacaatgatgagaggtaacagg

SEQ ID NO: 1195129 - DNA, 25 bp, Homo sapien
aacacaatgatgagaggtaacagga

SEQ ID NO: 1195130 - DNA, 25 bp, Homo sapien
taggctgcctcgactttggagttag

SEQ ID NO: 1195131 - DNA, 25 bp, Homo sapien
tccagagtctttctagaacggctcc

SEQ ID NO: 1195132 - DNA, 25 bp, Homo sapien
gactacatcctcatgagactctgga

SEQ ID NO: 1195133 - DNA, 25 bp, Homo sapien
aatacatacacgtttctgcccctgg

SEQ ID NO: 1195134 - DNA, 25 bp, Homo sapien
tatcgccaattcacagtttcacaca

SEQ ID NO: 1195135 - DNA, 25 bp, Homo sapien
tgaaacatacaaatcacatatggca

SEQ ID NO: 1195136 - DNA, 25 bp, Homo sapien
caaatcacatatggcaatgcatgag

SEQ ID NO: 1195137 - DNA, 25 bp, Homo sapien
agtctgattacacccacccatatcg

SEQ ID NO: 1195138 - DNA, 25 bp, Homo sapien
gaaaagtccaggtaccctctctctc

SEQ ID NO: 1195139 - DNA, 25 bp, Homo sapien
cccaccaggatttgttgcagacata

SEQ ID NO: 1195140 - DNA, 25 bp, Homo sapien
gcctccacaggaacaagtcatgctt

SEQ ID NO: 1195141 - DNA, 25 bp, Homo sapien
gcttgctccttagctgggcctttaa

SEQ ID NO: 1195142 - DNA, 25 bp, Homo sapien
ccaggcacctaaaggctggacttgc

SEQ ID NO: 1195143 - DNA, 25 bp, Homo sapien
cagtcacacccatccaccactggtt

SEQ ID NO: 1195144 - DNA, 25 bp, Homo sapien
ttgacttcaaagtccaggcacctaa

SEQ ID NO: 1195145 - DNA, 25 bp, Homo sapien
tggttcagcccagcgtggctctgct

SEQ ID NO: 1195146 - DNA, 25 bp, Homo sapien
tgtcagctgcaatactgaacaggat

SEQ ID NO: 1195147 - DNA, 25 bp, Homo sapien
ggtgttatcctgcatgtcagctgca

SEQ ID NO: 1195148 - DNA, 25 bp, Homo sapien
gcaatactgaacaggatggaggctg

SEQ ID NO: 1195149 - DNA, 25 bp, Homo sapien
cctgcatgtcagctgcaatactgaa

SEQ ID NO: 1195150 - DNA, 25 bp, Homo sapien
tacttactagttataaggattgtaa

SEQ ID NO: 1195151 - DNA, 25 bp, Homo sapien
acaaaactgtttggccctccctgct

SEQ ID NO: 1195152 - DNA, 25 bp, Homo sapien
ttatgtcaaaccactgctgttaacc

SEQ ID NO: 1195153 - DNA, 25 bp, Homo sapien
accactgctgttaaccattttctta

SEQ ID NO: 1195154 - DNA, 25 bp, Homo sapien
gaaaggaggcaaagaaggaagacat

SEQ ID NO: 1195155 - DNA, 25 bp, Homo sapien
ctggaaaggaggcaaagaaggaaga

SEQ ID NO: 1195156 - DNA, 25 bp, Homo sapien
tggaaaggaggcaaagaaggaagac

SEQ ID NO: 1195157 - DNA, 25 bp, Homo sapien
ggaaaggaggcaaagaaggaagaca

SEQ ID NO: 1195158 - DNA, 25 bp, Homo sapien
agtgcctctgtaggcgcttcagttc

SEQ ID NO: 1195159 - DNA, 25 bp, Homo sapien
tgtagtgcctctgtaggcgcttcag

SEQ ID NO: 1195160 - DNA, 25 bp, Homo sapien
tgattgtagtgcctctgtaggcgct

SEQ ID NO: 1195161 - DNA, 25 bp, Homo sapien
tgagtgattgtagtgcctctgtagg

SEQ ID NO: 1195162 - DNA, 25 bp, Homo sapien
tactcataagcaagtcactaggcct

SEQ ID NO: 1195163 - DNA, 25 bp, Homo sapien
aatgggatgcagatacggatacaga

SEQ ID NO: 1195164 - DNA, 25 bp, Homo sapien
tgactaccaggaagtgagacgcaga

SEQ ID NO: 1195165 - DNA, 25 bp, Homo sapien
atccgcttattggaggccagcccag

SEQ ID NO: 1195166 - DNA, 25 bp, Homo sapien
gccaatcattctctggtaagtgtga

SEQ ID NO: 1195167 - DNA, 25 bp, Homo sapien
acagccaatcattctctggtaagtg

SEQ ID NO: 1195168 - DNA, 25 bp, Homo sapien
atcattctctggtaagtgtgagacc

SEQ ID NO: 1195169 - DNA, 25 bp, Homo sapien
caatcattctctggtaagtgtgaga

SEQ ID NO: 1195170 - DNA, 25 bp, Homo sapien
catgcctgcttgatggtgtgagcca

SEQ ID NO: 1195171 - DNA, 25 bp, Homo sapien
tgatacagcaactcatgctgattgg

SEQ ID NO: 1195172 - DNA, 25 bp, Homo sapien
tgctgattggcctcccatgcctgct

SEQ ID NO: 1195173 - DNA, 25 bp, Homo sapien
tagccaggcaatacattcttcttcc

SEQ ID NO: 1195174 - DNA, 25 bp, Homo sapien
ataaaaacagttgttcaggcaatgt

SEQ ID NO: 1195175 - DNA, 25 bp, Homo sapien
taaaaacagttgttcaggcaatgtg

SEQ ID NO: 1195176 - DNA, 25 bp, Homo sapien
aaaaacagttgttcaggcaatgtgg

SEQ ID NO: 1195177 - DNA, 25 bp, Homo sapien
cattgacggaatggaagaatttgcc

SEQ ID NO: 1195178 - DNA, 25 bp, Homo sapien
tactcctactggtggtgtgtgagcc

SEQ ID NO: 1195179 - DNA, 25 bp, Homo sapien
taagaattgctctatctcccaaaga

SEQ ID NO: 1195180 - DNA, 25 bp, Homo sapien
gacactgaatgtagacagaggcctg

SEQ ID NO: 1195181 - DNA, 25 bp, Homo sapien
gaattgccttgtgtacttgcgctgg

SEQ ID NO: 1195182 - DNA, 25 bp, Homo sapien
catgccatggttgtgccttcgaaga

SEQ ID NO: 1195183 - DNA, 25 bp, Homo sapien
gaaactgatatcatagaagggctcc

SEQ ID NO: 1195184 - DNA, 25 bp, Homo sapien
gacaccaaagaagtacccacgtgtg

SEQ ID NO: 1195185 - DNA, 25 bp, Homo sapien
gaagaagaagctaaagttaaatcaa

SEQ ID NO: 1195186 - DNA, 25 bp, Homo sapien
ggaagaagaagctaaagttaaatca

SEQ ID NO: 1195187 - DNA, 25 bp, Homo sapien
tgataggttccatccccactgggaa

SEQ ID NO: 1195188 - DNA, 25 bp, Homo sapien
agaaccatgtggacaccgcagtgct

SEQ ID NO: 1195189 - DNA, 25 bp, Homo sapien
tttgcgatttactctgaccagtggg

SEQ ID NO: 1195190 - DNA, 25 bp, Homo sapien
tcaattgatgcccacgcctgatagg

SEQ ID NO: 1195191 - DNA, 25 bp, Homo sapien
aggctctctccctagacagccacga

SEQ ID NO: 1195192 - DNA, 25 bp, Homo sapien
tccctagacagccacgatccccgtc

SEQ ID NO: 1195193 - DNA, 25 bp, Homo sapien
tagacagccacgatccccgtcctta

SEQ ID NO: 1195194 - DNA, 25 bp, Homo sapien
ggctctctccctagacagccacgat

SEQ ID NO: 1195195 - DNA, 25 bp, Homo sapien
tgagtgaggcagtgatctatcctcc

SEQ ID NO: 1195196 - DNA, 25 bp, Homo sapien
ggcgtcctggttccaaaaagtgtga

SEQ ID NO: 1195197 - DNA, 25 bp, Homo sapien
ttttaatagtatgaaggcgtcctgg

SEQ ID NO: 1195198 - DNA, 25 bp, Homo sapien
ccattctaaggcacactgagtgagg

SEQ ID NO: 1195199 - DNA, 25 bp, Homo sapien
tcaagcagttcactcgcgtcagcct

SEQ ID NO: 1195200 - DNA, 25 bp, Homo sapien
gagtcttgctcccttcgcacaggct

SEQ ID NO: 1195201 - DNA, 25 bp, Homo sapien
gggctcaagcagttcactcgcgtca

SEQ ID NO: 1195202 - DNA, 25 bp, Homo sapien
gagggagtcttgctcccttcgcaca

SEQ ID NO: 1195203 - DNA, 25 bp, Homo sapien
tgacaaggacaatggacccagagac

SEQ ID NO: 1195204 - DNA, 25 bp, Homo sapien
tcggggccttcttctccagactaga

SEQ ID NO: 1195205 - DNA, 25 bp, Homo sapien
acaatggacccagagacagctttca

SEQ ID NO: 1195206 - DNA, 25 bp, Homo sapien
ttcatcacaagagggatagtttctg

SEQ ID NO: 1195207 - DNA, 25 bp, Homo sapien
tcatcgatctggtgttggaaggtag

SEQ ID NO: 1195208 - DNA, 25 bp, Homo sapien
gtgttggaaggtagatggctccatt

SEQ ID NO: 1195209 - DNA, 25 bp, Homo sapien
tggaaggtagatggctccattttgc

SEQ ID NO: 1195210 - DNA, 25 bp, Homo sapien
catcgatctggtgttggaaggtaga

SEQ ID NO: 1195211 - DNA, 25 bp, Homo sapien
cagaggataacatggctcctagagg

SEQ ID NO: 1195212 - DNA, 25 bp, Homo sapien
gataacatggctcctagaggaagga

SEQ ID NO: 1195213 - DNA, 25 bp, Homo sapien
aggataacatggctcctagaggaag

SEQ ID NO: 1195214 - DNA, 25 bp, Homo sapien
gggacagaggataacatggctccta

SEQ ID NO: 1195215 - DNA, 25 bp, Homo sapien
cataaatgctcaatcccattactct

SEQ ID NO: 1195216 - DNA, 25 bp, Homo sapien
tcaactctgataaaacagtccatca

SEQ ID NO: 1195217 - DNA, 25 bp, Homo sapien
ccattactctcatgtatgttgtggg

SEQ ID NO: 1195218 - DNA, 25 bp, Homo sapien
tgggtgtcgtcaggaccttcaagca

SEQ ID NO: 1195219 - DNA, 25 bp, Homo sapien
cctatgtaggaaggcaagtcatgcc

SEQ ID NO: 1195220 - DNA, 25 bp, Homo sapien
gactacctccatagatccaaccggg

SEQ ID NO: 1195221 - DNA, 25 bp, Homo sapien
catggtgcccatgatattcaaagcg

SEQ ID NO: 1195222 - DNA, 25 bp, Homo sapien
gattaccaagattccaagctcccag

SEQ ID NO: 1195223 - DNA, 25 bp, Homo sapien
tgagctcttagaggcctggcacact

SEQ ID NO: 1195224 - DNA, 25 bp, Homo sapien
gatgagagtatcctgcagttgcaga

SEQ ID NO: 1195225 - DNA, 25 bp, Homo sapien
ttctatgcaactcaacaggcaccgg

SEQ ID NO: 1195226 - DNA, 25 bp, Homo sapien
gaattacatgggacagtggagcaag

SEQ ID NO: 1195227 - DNA, 25 bp, Homo sapien
gagagctcagaaactctcgatggag

SEQ ID NO: 1195228 - DNA, 25 bp, Homo sapien
tggcctccctagtggacaatctgtt

SEQ ID NO: 1195229 - DNA, 25 bp, Homo sapien
cactagacctgcatatgtgaggaca

SEQ ID NO: 1195230 - DNA, 25 bp, Homo sapien
caaagaccccagacagtggttttca

SEQ ID NO: 1195231 - DNA, 25 bp, Homo sapien
tactgaatgtcctgaagctattggg

SEQ ID NO: 1195232 - DNA, 25 bp, Homo sapien
tgtgtccccttgcaccaattctggg

SEQ ID NO: 1195233 - DNA, 25 bp, Homo sapien
gcagttaagtgggaaacacctgggc

SEQ ID NO: 1195234 - DNA, 25 bp, Homo sapien
gctcaggcagtggaatcatcaacct

SEQ ID NO: 1195235 - DNA, 25 bp, Homo sapien
aaatgaagactagagttacgcagcc

SEQ ID NO: 1195236 - DNA, 25 bp, Homo sapien
cgatggagaacatgacattgtgaca

SEQ ID NO: 1195237 - DNA, 25 bp, Homo sapien
aaatggccacaatgatatctcccaa

SEQ ID NO: 1195238 - DNA, 25 bp, Homo sapien
cctttcccagtccctttagaggcag

SEQ ID NO: 1195239 - DNA, 25 bp, Homo sapien
tgagagccttggtgcattcccctga

SEQ ID NO: 1195240 - DNA, 25 bp, Homo sapien
tactgagttgctactacgtacaagg

SEQ ID NO: 1195241 - DNA, 25 bp, Homo sapien
tgcacaaggatagataccccactgg

SEQ ID NO: 1195242 - DNA, 25 bp, Homo sapien
tctactctgtgttctgctggccaag

SEQ ID NO: 1195243 - DNA, 25 bp, Homo sapien
ctttttactttggcaaggactctgc

SEQ ID NO: 1195244 - DNA, 25 bp, Homo sapien
tttttactttggcaaggactctgca

SEQ ID NO: 1195245 - DNA, 25 bp, Homo sapien
ttttactttggcaaggactctgcat

SEQ ID NO: 1195246 - DNA, 25 bp, Homo sapien
tctttttactttggcaaggactctg

SEQ ID NO: 1195247 - DNA, 25 bp, Homo sapien
gggaacagacccacagcacgccttt

SEQ ID NO: 1195248 - DNA, 25 bp, Homo sapien
agagccgcaggtgaagaaggaccat

SEQ ID NO: 1195249 - DNA, 25 bp, Homo sapien
cccacagcacgcctttgagaaggtc

SEQ ID NO: 1195250 - DNA, 25 bp, Homo sapien
tttgagaaggtccagagccgcaggt

SEQ ID NO: 1195251 - DNA, 25 bp, Homo sapien
atgggaagggaaagcacacaatgag

SEQ ID NO: 1195252 - DNA, 25 bp, Homo sapien
tggatgggaagggaaagcacacaat

SEQ ID NO: 1195253 - DNA, 25 bp, Homo sapien
ctggggatgtggatgggaagggaaa

SEQ ID NO: 1195254 - DNA, 25 bp, Homo sapien
ggatgtggatgggaagggaaagcac

SEQ ID NO: 1195255 - DNA, 25 bp, Homo sapien
tctatgaaagactccctctcacact

SEQ ID NO: 1195256 - DNA, 25 bp, Homo sapien
tctgtgggtcctgaaatgtctccta

SEQ ID NO: 1195257 - DNA, 25 bp, Homo sapien
tgtcaactggtactgccagcccagg

SEQ ID NO: 1195258 - DNA, 25 bp, Homo sapien
acactcctccttgtcaactggtact

SEQ ID NO: 1195259 - DNA, 25 bp, Homo sapien
ttgtcggctttgtccttcctccctg

SEQ ID NO: 1195260 - DNA, 25 bp, Homo sapien
tgctctcctcgcctgccacttttac

SEQ ID NO: 1195261 - DNA, 25 bp, Homo sapien
cctttttctgctctcctcgcctgcc

SEQ ID NO: 1195262 - DNA, 25 bp, Homo sapien
tcattgtcggctttgtccttcctcc

SEQ ID NO: 1195263 - DNA, 25 bp, Homo sapien
gattaaattagcaggcagcccaacc

SEQ ID NO: 1195264 - DNA, 25 bp, Homo sapien
tgccatggtagatggaggccttcag

SEQ ID NO: 1195265 - DNA, 25 bp, Homo sapien
ttatgaagcctgaacgtctgtgaga

SEQ ID NO: 1195266 - DNA, 25 bp, Homo sapien
gaacgtctgtgagatcttgaaggca

SEQ ID NO: 1195267 - DNA, 25 bp, Homo sapien
tgctagtgtcaagcctcttgccttc

SEQ ID NO: 1195268 - DNA, 25 bp, Homo sapien
catccaggcaggttattgctagtgt

SEQ ID NO: 1195269 - DNA, 25 bp, Homo sapien
caggttattgctagtgtcaagcctc

SEQ ID NO: 1195270 - DNA, 25 bp, Homo sapien
tattgctagtgtcaagcctcttgcc

SEQ ID NO: 1195271 - DNA, 25 bp, Homo sapien
gtcctgtgttcccatgatgatgtca

SEQ ID NO: 1195272 - DNA, 25 bp, Homo sapien
tggaaaaatcgagcaagttctgaaa

SEQ ID NO: 1195273 - DNA, 25 bp, Homo sapien
cagtccacccttggaaaaatcgagc

SEQ ID NO: 1195274 - DNA, 25 bp, Homo sapien
tcctgtgttcccatgatgatgtcat

SEQ ID NO: 1195275 - DNA, 25 bp, Homo sapien
ttccgaacacggtggtggactctgt

SEQ ID NO: 1195276 - DNA, 25 bp, Homo sapien
gatggcttgccggaaccaaagcgaa

SEQ ID NO: 1195277 - DNA, 25 bp, Homo sapien
gattctggcttgtgcgatggcttgc

SEQ ID NO: 1195278 - DNA, 25 bp, Homo sapien
tgttctgccataaagtcctgatcct

SEQ ID NO: 1195279 - DNA, 25 bp, Homo sapien
ggggcgacggcttgcggccgcagac

SEQ ID NO: 1195280 - DNA, 25 bp, Homo sapien
gggggcgacggcttgcggccgcaga

SEQ ID NO: 1195281 - DNA, 25 bp, Homo sapien
aagggggcgacggcttgcggccgca

SEQ ID NO: 1195282 - DNA, 25 bp, Homo sapien
agggggcgacggcttgcggccgcag

SEQ ID NO: 1195283 - DNA, 25 bp, Homo sapien
gtccggtcgctaaacagggcagcct

SEQ ID NO: 1195284 - DNA, 25 bp, Homo sapien
ttctcgaccgccaatcacgaagggc

SEQ ID NO: 1195285 - DNA, 25 bp, Homo sapien
gctgccccgcgccttatataggctt

SEQ ID NO: 1195286 - DNA, 25 bp, Homo sapien
ttcgaacgttagtcccgcggagcag

SEQ ID NO: 1195287 - DNA, 25 bp, Homo sapien
tgggcacaccctcgatcacctaaga

SEQ ID NO: 1195288 - DNA, 25 bp, Homo sapien
gaacgggaggcgcaaacaagtccgc

SEQ ID NO: 1195289 - DNA, 25 bp, Homo sapien
tgacacgtttggaaattgggaggga

SEQ ID NO: 1195290 - DNA, 25 bp, Homo sapien
agagaaacgactctggtgacgcgcg

SEQ ID NO: 1195291 - DNA, 25 bp, Homo sapien
gatgctgacgatgcgatgagcctcc

SEQ ID NO: 1195292 - DNA, 25 bp, Homo sapien
cgagaccaggaggttcttatgcagc

SEQ ID NO: 1195293 - DNA, 25 bp, Homo sapien
gatcttgcccagagagatgctgacg

SEQ ID NO: 1195294 - DNA, 25 bp, Homo sapien
gctggacccgcgagttgtagatctt

SEQ ID NO: 1195295 - DNA, 25 bp, Homo sapien
ccggggcacgggtcgctcaggtaga

SEQ ID NO: 1195296 - DNA, 25 bp, Homo sapien
cggggcacgggtcgctcaggtagac

SEQ ID NO: 1195297 - DNA, 25 bp, Homo sapien
ggctgcggctcggtctccggccaag

SEQ ID NO: 1195298 - DNA, 25 bp, Homo sapien
gcggctctccccagccggcgggtgg

SEQ ID NO: 1195299 - DNA, 25 bp, Homo sapien
tcggtctccggccaagaggcacgag

SEQ ID NO: 1195300 - DNA, 25 bp, Homo sapien
ccaagaggcacgagcggcgggcggg

SEQ ID NO: 1195301 - DNA, 25 bp, Homo sapien
gcacctcgtcccctacccgcggcgc

SEQ ID NO: 1195302 - DNA, 25 bp, Homo sapien
cacctcgtcccctacccgcggcgcg

SEQ ID NO: 1195303 - DNA, 25 bp, Homo sapien
cggcggtaccctcggcttctctggc

SEQ ID NO: 1195304 - DNA, 25 bp, Homo sapien
cagcctccggcggtaccctcggctt

SEQ ID NO: 1195305 - DNA, 25 bp, Homo sapien
tgaaaaacgtccccgactccagtca

SEQ ID NO: 1195306 - DNA, 25 bp, Homo sapien
ctccaggcagcttccgtcgcgtccg

SEQ ID NO: 1195307 - DNA, 25 bp, Homo sapien
tcctccccgcctagggggcagccgc

SEQ ID NO: 1195308 - DNA, 25 bp, Homo sapien
cagcagcaggcagcgcggggggtcg

SEQ ID NO: 1195309 - DNA, 25 bp, Homo sapien
cgcagcagcaggcagcgcggggggt

SEQ ID NO: 1195310 - DNA, 25 bp, Homo sapien
ccgctggttgcggcgcgcagcagca

SEQ ID NO: 1195311 - DNA, 25 bp, Homo sapien
ctccgctggttgcggcgcgcagcag

SEQ ID NO: 1195312 - DNA, 25 bp, Homo sapien
cttgagcggggtcgagccgggcgcc

SEQ ID NO: 1195313 - DNA, 25 bp, Homo sapien
ttgagcggggtcgagccgggcgccg

SEQ ID NO: 1195314 - DNA, 25 bp, Homo sapien
gcgcagcgcttcctggggcacaccg

SEQ ID NO: 1195315 - DNA, 25 bp, Homo sapien
ccccgccgcgcagcgcttcctgggg

SEQ ID NO: 1195316 - DNA, 25 bp, Homo sapien
tctcagcaccggcttatcgcagcag

SEQ ID NO: 1195317 - DNA, 25 bp, Homo sapien
tgctgatgaggttagccacgttccc

SEQ ID NO: 1195318 - DNA, 25 bp, Homo sapien
tcccgagaaactggaaccgaagatg

SEQ ID NO: 1195319 - DNA, 25 bp, Homo sapien
ttatcgcagcagatctgcccgggct

SEQ ID NO: 1195320 - DNA, 25 bp, Homo sapien
taacgatcgtcctcttccaatgagc

SEQ ID NO: 1195321 - DNA, 25 bp, Homo sapien
taggaaatcctgtgcggaaacgcca

SEQ ID NO: 1195322 - DNA, 25 bp, Homo sapien
ccacttcgggcttctgtctgtaaac

SEQ ID NO: 1195323 - DNA, 25 bp, Homo sapien
tgtgctcttggctaaatccctctcg

SEQ ID NO: 1195324 - DNA, 25 bp, Homo sapien
gaacctgacaggtcgccgatattag

SEQ ID NO: 1195325 - DNA, 25 bp, Homo sapien
tcttcctatgtcagttcgaatgggc

SEQ ID NO: 1195326 - DNA, 25 bp, Homo sapien
aacaatgtcctcagtctgcgaatga

SEQ ID NO: 1195327 - DNA, 25 bp, Homo sapien
gaggtggacctgacaatttggacaa

SEQ ID NO: 1195328 - DNA, 25 bp, Homo sapien
taagcagtcagcacttgatggatct

SEQ ID NO: 1195329 - DNA, 25 bp, Homo sapien
aatacactgagatcgctgttcaagc

SEQ ID NO: 1195330 - DNA, 25 bp, Homo sapien
tttgcagaattaaggccctggacac

SEQ ID NO: 1195331 - DNA, 25 bp, Homo sapien
tttaagcagacacatggacccaggt

SEQ ID NO: 1195332 - DNA, 25 bp, Homo sapien
tccagctaacacagctgtggcttga

SEQ ID NO: 1195333 - DNA, 25 bp, Homo sapien
tattatgatggaattggcggtctgg

SEQ ID NO: 1195334 - DNA, 25 bp, Homo sapien
tcgtggtcaggaaatccaaatctct

SEQ ID NO: 1195335 - DNA, 25 bp, Homo sapien
ttctttgcaagtctcgtggtcagga

SEQ ID NO: 1195336 - DNA, 25 bp, Homo sapien
tcagaccagcgagacctctcgccgg

SEQ ID NO: 1195337 - DNA, 25 bp, Homo sapien
ttgccgctgtcctgcaatactctcg

SEQ ID NO: 1195338 - DNA, 25 bp, Homo sapien
tatgtcccaggtcgcagcagattgc

SEQ ID NO: 1195339 - DNA, 25 bp, Homo sapien
gggcgcattgttatgtcccaggtcg

SEQ ID NO: 1195340 - DNA, 25 bp, Homo sapien
gacaggacacaatttgccagcattt

SEQ ID NO: 1195341 - DNA, 25 bp, Homo sapien
cctctgacaggacacaatttgccag

SEQ ID NO: 1195342 - DNA, 25 bp, Homo sapien
tgcaggtcgtggagaagcaagggcc

SEQ ID NO: 1195343 - DNA, 25 bp, Homo sapien
tctgacaggacacaatttgccagca

SEQ ID NO: 1195344 - DNA, 25 bp, Homo sapien
gggcccttgttgcggatgcgccttt

SEQ ID NO: 1195345 - DNA, 25 bp, Homo sapien
cacacactcagccccttcgaggagt

SEQ ID NO: 1195346 - DNA, 25 bp, Homo sapien
cttgttgcggatgcgcctttcaccc

SEQ ID NO: 1195347 - DNA, 25 bp, Homo sapien
cctttcacccccagtgaagtagtgg

SEQ ID NO: 1195348 - DNA, 25 bp, Homo sapien
cagagaaggcgtttcaattcagact

SEQ ID NO: 1195349 - DNA, 25 bp, Homo sapien
gcagcatcgggcagcgtaaggcaac

SEQ ID NO: 1195350 - DNA, 25 bp, Homo sapien
ttactccatgcgggtctgacgcagt

SEQ ID NO: 1195351 - DNA, 25 bp, Homo sapien
cagggctcccttgtaaaacgctggg

SEQ ID NO: 1195352 - DNA, 25 bp, Homo sapien
aggtgatgaaaacccatttgtgtgg

SEQ ID NO: 1195353 - DNA, 25 bp, Homo sapien
gatgaaaacccatttgtgtgggaca

SEQ ID NO: 1195354 - DNA, 25 bp, Homo sapien
gtgatgaaaacccatttgtgtggga

SEQ ID NO: 1195355 - DNA, 25 bp, Homo sapien
ctaggtgatgaaaacccatttgtgt

SEQ ID NO: 1195356 - DNA, 25 bp, Homo sapien
ttcatggaggagtagttagctgacc

SEQ ID NO: 1195357 - DNA, 25 bp, Homo sapien
ggaggagtagttagctgaccactga

SEQ ID NO: 1195358 - DNA, 25 bp, Homo sapien
catggaggagtagttagctgaccac

SEQ ID NO: 1195359 - DNA, 25 bp, Homo sapien
aggagtagttagctgaccactgaag

SEQ ID NO: 1195360 - DNA, 25 bp, Homo sapien
gttcactgatgatatgcctgctggc

SEQ ID NO: 1195361 - DNA, 25 bp, Homo sapien
atagggcccctatggggtactgaca

SEQ ID NO: 1195362 - DNA, 25 bp, Homo sapien
tggaagagtcacatagggcccctat

SEQ ID NO: 1195363 - DNA, 25 bp, Homo sapien
gagttcactgatgatatgcctgctg

SEQ ID NO: 1195364 - DNA, 25 bp, Homo sapien
aataagacaaggtgggctggcacag

SEQ ID NO: 1195365 - DNA, 25 bp, Homo sapien
tatgggcaccaccaaaaatagaccc

SEQ ID NO: 1195366 - DNA, 25 bp, Homo sapien
gcaggtaaactgatagccccagggt

SEQ ID NO: 1195367 - DNA, 25 bp, Homo sapien
aaaacctgaaggtgctcctgcttgc

SEQ ID NO: 1195368 - DNA, 25 bp, Homo sapien
ggtccatctaggcagtgcattttct

SEQ ID NO: 1195369 - DNA, 25 bp, Homo sapien
gtccatctaggcagtgcattttctg

SEQ ID NO: 1195370 - DNA, 25 bp, Homo sapien
tccatctaggcagtgcattttctgt

SEQ ID NO: 1195371 - DNA, 25 bp, Homo sapien
tggggagggagtggccttgggttca

SEQ ID NO: 1195372 - DNA, 25 bp, Homo sapien
ctcaggctggggagggagtggcctt

SEQ ID NO: 1195373 - DNA, 25 bp, Homo sapien
tcaggctggggagggagtggccttg

SEQ ID NO: 1195374 - DNA, 25 bp, Homo sapien
aggctggggagggagtggccttggg

SEQ ID NO: 1195375 - DNA, 25 bp, Homo sapien
tggcctgtattagctggtcagtgac

SEQ ID NO: 1195376 - DNA, 25 bp, Homo sapien
cctccactagaatatgcacacgtga

SEQ ID NO: 1195377 - DNA, 25 bp, Homo sapien
tgatagagggaacatcgtgctgtgc

SEQ ID NO: 1195378 - DNA, 25 bp, Homo sapien
tcctcatggccatattcctggcctc

SEQ ID NO: 1195379 - DNA, 25 bp, Homo sapien
cagggctgtccacttgtgtggtggc

SEQ ID NO: 1195380 - DNA, 25 bp, Homo sapien
ggttttatatgctagcacagttcca

SEQ ID NO: 1195381 - DNA, 25 bp, Homo sapien
tgtgtggtggcctgcgggcacttgg

SEQ ID NO: 1195382 - DNA, 25 bp, Homo sapien
gagagatccaagtgtgccattcagc

SEQ ID NO: 1195383 - DNA, 25 bp, Homo sapien
ggtttgaaaagtattgagtgctcca

SEQ ID NO: 1195384 - DNA, 25 bp, Homo sapien
gtttgaaaagtattgagtgctccat

SEQ ID NO: 1195385 - DNA, 25 bp, Homo sapien
ccactgtctcctggaaaattatata

SEQ ID NO: 1195386 - DNA, 25 bp, Homo sapien
ccaagcaaggaaagcacactgtcgt

SEQ ID NO: 1195387 - DNA, 25 bp, Homo sapien
ggacgctgaggtctgcttcactcca

SEQ ID NO: 1195388 - DNA, 25 bp, Homo sapien
aaattatataacagcccagagggcc

SEQ ID NO: 1195389 - DNA, 25 bp, Homo sapien
cattggctatcggcttctcatcctc

SEQ ID NO: 1195390 - DNA, 25 bp, Homo sapien
gaaaatcttcttagaggaggtaaga

SEQ ID NO: 1195391 - DNA, 25 bp, Homo sapien
atcctttggatagcgaccctcatcc

SEQ ID NO: 1195392 - DNA, 25 bp, Homo sapien
ctttggatagcgaccctcatcctca

SEQ ID NO: 1195393 - DNA, 25 bp, Homo sapien
tttggatagcgaccctcatcctcat

SEQ ID NO: 1195394 - DNA, 25 bp, Homo sapien
tcaatcctttggatagcgaccctca

SEQ ID NO: 1195395 - DNA, 25 bp, Homo sapien
gtctctgatgcagatgtctcttccc

SEQ ID NO: 1195396 - DNA, 25 bp, Homo sapien
catgccagtttctgaggagtcggca

SEQ ID NO: 1195397 - DNA, 25 bp, Homo sapien
ttggcatgccagtttctgaggagtc

SEQ ID NO: 1195398 - DNA, 25 bp, Homo sapien
agggcggtctctgatgcagatgtct

SEQ ID NO: 1195399 - DNA, 25 bp, Homo sapien
aagagactgtagacacacattgtga

SEQ ID NO: 1195400 - DNA, 25 bp, Homo sapien
ctgcatgctcatgggctcagagttt

SEQ ID NO: 1195401 - DNA, 25 bp, Homo sapien
tgctcatgggctcagagtttggtag

SEQ ID NO: 1195402 - DNA, 25 bp, Homo sapien
agcaactgcatgctcatgggctcag

SEQ ID NO: 1195403 - DNA, 25 bp, Homo sapien
cacatcgtggacaatggcgtaccca

SEQ ID NO: 1195404 - DNA, 25 bp, Homo sapien
aaataagcacatcgtggacaatggc

SEQ ID NO: 1195405 - DNA, 25 bp, Homo sapien
atccttacctcccttctacagccct

SEQ ID NO: 1195406 - DNA, 25 bp, Homo sapien
caatggcgtacccatctgctcaagc

SEQ ID NO: 1195407 - DNA, 25 bp, Homo sapien
ttgctagtgaggaggcccatctgtc

SEQ ID NO: 1195408 - DNA, 25 bp, Homo sapien
ctttgctagtgaggaggcccatctg

SEQ ID NO: 1195409 - DNA, 25 bp, Homo sapien
tttgctagtgaggaggcccatctgt

SEQ ID NO: 1195410 - DNA, 25 bp, Homo sapien
agggagaggaaaaacatgattacat

SEQ ID NO: 1195411 - DNA, 25 bp, Homo sapien
cagggagaggaaaaacatgattaca

SEQ ID NO: 1195412 - DNA, 25 bp, Homo sapien
ggcagggagaggaaaaacatgatta

SEQ ID NO: 1195413 - DNA, 25 bp, Homo sapien
ctgggcagggagaggaaaaacatga

SEQ ID NO: 1195414 - DNA, 25 bp, Homo sapien
gggcgatttccactggagtacccga

SEQ ID NO: 1195415 - DNA, 25 bp, Homo sapien
tggagtacccgattctcgtttgcgg

SEQ ID NO: 1195416 - DNA, 25 bp, Homo sapien
ttgcgggcgggatggccccttcctg

SEQ ID NO: 1195417 - DNA, 25 bp, Homo sapien
acttccgcgggcgatttccactgga

SEQ ID NO: 1195418 - DNA, 25 bp, Homo sapien
ggcatcaataactaaggtgcagaca

SEQ ID NO: 1195419 - DNA, 25 bp, Homo sapien
caggcatcaataactaaggtgcaga

SEQ ID NO: 1195420 - DNA, 25 bp, Homo sapien
agcaggcatcaataactaaggtgca

SEQ ID NO: 1195421 - DNA, 25 bp, Homo sapien
tcaataactaaggtgcagacaaacc

SEQ ID NO: 1195422 - DNA, 25 bp, Homo sapien
gaggatgacattcataacaccagtt

SEQ ID NO: 1195423 - DNA, 25 bp, Homo sapien
ccccaagtccatgcatgtattgcag

SEQ ID NO: 1195424 - DNA, 25 bp, Homo sapien
gttacaatgagaaaggtaccacaca

SEQ ID NO: 1195425 - DNA, 25 bp, Homo sapien
tattgcagacaatagaaccttcttg

SEQ ID NO: 1195426 - DNA, 25 bp, Homo sapien
ggagccccattctataacctcattc

SEQ ID NO: 1195427 - DNA, 25 bp, Homo sapien
cacatgaacataaacgggaaggcct

SEQ ID NO: 1195428 - DNA, 25 bp, Homo sapien
caactgtcatccacatagttacaaa

SEQ ID NO: 1195429 - DNA, 25 bp, Homo sapien
tacaaaggccctgtgattcagagac

SEQ ID NO: 1195430 - DNA, 25 bp, Homo sapien
agagtggactgagagcccctctgag

SEQ ID NO: 1195431 - DNA, 25 bp, Homo sapien
cagtccgcagagtggactgagagcc

SEQ ID NO: 1195432 - DNA, 25 bp, Homo sapien
cgcagagtggactgagagcccctct

SEQ ID NO: 1195433 - DNA, 25 bp, Homo sapien
tcagtcagcagtccgcagagtggac

SEQ ID NO: 1195434 - DNA, 25 bp, Homo sapien
caactcttccggcaggcaggtagca

SEQ ID NO: 1195435 - DNA, 25 bp, Homo sapien
tgtgttgactcaactcttccggcag

SEQ ID NO: 1195436 - DNA, 25 bp, Homo sapien
gactcaactcttccggcaggcaggt

SEQ ID NO: 1195437 - DNA, 25 bp, Homo sapien
tgttgactcaactcttccggcaggc

SEQ ID NO: 1195438 - DNA, 25 bp, Homo sapien
gcgagcacaatgaccccatcatagg

SEQ ID NO: 1195439 - DNA, 25 bp, Homo sapien
gtcatagttggcgagcacaatgacc

SEQ ID NO: 1195440 - DNA, 25 bp, Homo sapien
tcaagtgttaaggatcttgtcaaag

SEQ ID NO: 1195441 - DNA, 25 bp, Homo sapien
tagttggcgagcacaatgaccccat

SEQ ID NO: 1195442 - DNA, 25 bp, Homo sapien
ggttgactcacgatggatagccttg

SEQ ID NO: 1195443 - DNA, 25 bp, Homo sapien
tgcatgactcccataccaccagatg

SEQ ID NO: 1195444 - DNA, 25 bp, Homo sapien
gcatggacctcttctggttgactca

SEQ ID NO: 1195445 - DNA, 25 bp, Homo sapien
ggtgatccacccaggctacaagtag

SEQ ID NO: 1195446 - DNA, 25 bp, Homo sapien
atcatccaaattccccccagcagga

SEQ ID NO: 1195447 - DNA, 25 bp, Homo sapien
gagatgaaccaaggcacaatggtcc

SEQ ID NO: 1195448 - DNA, 25 bp, Homo sapien
gaagtgtccatatgtcaggtgtgaa

SEQ ID NO: 1195449 - DNA, 25 bp, Homo sapien
tccccccagcaggaacctgaagtgt

SEQ ID NO: 1195450 - DNA, 25 bp, Homo sapien
tgcaggctggttgagctgaagccca

SEQ ID NO: 1195451 - DNA, 25 bp, Homo sapien
gccaacccttgctaaagtgggagaa

SEQ ID NO: 1195452 - DNA, 25 bp, Homo sapien
ctgattgaaactctgtgccctgtgc

SEQ ID NO: 1195453 - DNA, 25 bp, Homo sapien
tgtgccctaggccaagggtttcatg

SEQ ID NO: 1195454 - DNA, 25 bp, Homo sapien
gttattttaggcctagagccttctc

SEQ ID NO: 1195455 - DNA, 25 bp, Homo sapien
taggcctagagccttctcggtagcc

SEQ ID NO: 1195456 - DNA, 25 bp, Homo sapien
tggggagttattttaggcctagagc

SEQ ID NO: 1195457 - DNA, 25 bp, Homo sapien
ctagagccttctcggtagccactca

SEQ ID NO: 1195458 - DNA, 25 bp, Homo sapien
tcctgccagagcgtgacagccttca

SEQ ID NO: 1195459 - DNA, 25 bp, Homo sapien
caatcttgcacgtccggttggccat

SEQ ID NO: 1195460 - DNA, 25 bp, Homo sapien
gacagccttcaatcttgcacgtccg

SEQ ID NO: 1195461 - DNA, 25 bp, Homo sapien
gagcgtgacagccttcaatcttgca

SEQ ID NO: 1195462 - DNA, 25 bp, Homo sapien
tgggcaagagcttctctagtaggaa

SEQ ID NO: 1195463 - DNA, 25 bp, Homo sapien
tgcagggtctggagttcagggtgga

SEQ ID NO: 1195464 - DNA, 25 bp, Homo sapien
ggcctttcgaatgggcgatcccaga

SEQ ID NO: 1195465 - DNA, 25 bp, Homo sapien
caggcatgggcctttcgaatgggcg

SEQ ID NO: 1195466 - DNA, 25 bp, Homo sapien
cagaagcctgatagggcacaacact

SEQ ID NO: 1195467 - DNA, 25 bp, Homo sapien
tagggcacaacactcagaaaaactc

SEQ ID NO: 1195468 - DNA, 25 bp, Homo sapien
catcacccacaatggctgacacagt

SEQ ID NO: 1195469 - DNA, 25 bp, Homo sapien
cattgagtttagactgtcacaagcc

SEQ ID NO: 1195470 - DNA, 25 bp, Homo sapien
gcccagtgctctcctaagttgtaag

SEQ ID NO: 1195471 - DNA, 25 bp, Homo sapien
tagacatcgatgtctccaggcacag

SEQ ID NO: 1195472 - DNA, 25 bp, Homo sapien
taagttgtaagtagacatcgatgtc

SEQ ID NO: 1195473 - DNA, 25 bp, Homo sapien
tgctctcctaagttgtaagtagaca

SEQ ID NO: 1195474 - DNA, 25 bp, Homo sapien
gccaggtaaccagtcatcccattaa

SEQ ID NO: 1195475 - DNA, 25 bp, Homo sapien
cattaattcccaatatgtgtgggca

SEQ ID NO: 1195476 - DNA, 25 bp, Homo sapien
gagatgatgtcctgcaggcccatca

SEQ ID NO: 1195477 - DNA, 25 bp, Homo sapien
tgttagatacagcaaatagcagcac

SEQ ID NO: 1195478 - DNA, 25 bp, Homo sapien
ttcctgtctaatgcctccactctca

SEQ ID NO: 1195479 - DNA, 25 bp, Homo sapien
actttcctgtctaatgcctccactc

SEQ ID NO: 1195480 - DNA, 25 bp, Homo sapien
cagtatctcctcctatcaattcagc

SEQ ID NO: 1195481 - DNA, 25 bp, Homo sapien
actctcagtatctcctcctatcaat

SEQ ID NO: 1195482 - DNA, 25 bp, Homo sapien
aaagtaatatgcaaattaattgcct

SEQ ID NO: 1195483 - DNA, 25 bp, Homo sapien
tcacaaagtaatatgcaaattaatt

SEQ ID NO: 1195484 - DNA, 25 bp, Homo sapien
gtaatatgcaaattaattgccttac

SEQ ID NO: 1195485 - DNA, 25 bp, Homo sapien
acaaagtaatatgcaaattaattgc

SEQ ID NO: 1195486 - DNA, 25 bp, Homo sapien
ttagaatccattcgagcaaccaggt

SEQ ID NO: 1195487 - DNA, 25 bp, Homo sapien
aatactctaaaagctcctaccaggg

SEQ ID NO: 1195488 - DNA, 25 bp, Homo sapien
tagctgagcctctttgctgccgtgg

SEQ ID NO: 1195489 - DNA, 25 bp, Homo sapien
tccactggagccaaagaatactcta

SEQ ID NO: 1195490 - DNA, 25 bp, Homo sapien
ggtttaagggatctgagagcactgt

SEQ ID NO: 1195491 - DNA, 25 bp, Homo sapien
tgtgggtccttgcccgctttcccag

SEQ ID NO: 1195492 - DNA, 25 bp, Homo sapien
caggtttaagggatctgagagcact

SEQ ID NO: 1195493 - DNA, 25 bp, Homo sapien
tttaagggatctgagagcactgtgg

SEQ ID NO: 1195494 - DNA, 25 bp, Homo sapien
tgctgctacccagacatgtccaggg

SEQ ID NO: 1195495 - DNA, 25 bp, Homo sapien
ggtggcttggctaacgaacgcttcc

SEQ ID NO: 1195496 - DNA, 25 bp, Homo sapien
tcccaaagcacgtgctcagtgctgc

SEQ ID NO: 1195497 - DNA, 25 bp, Homo sapien
tgtccagggtgaatgagacctccca

SEQ ID NO: 1195498 - DNA, 25 bp, Homo sapien
cacccatcggtagctcccaaagtag

SEQ ID NO: 1195499 - DNA, 25 bp, Homo sapien
tgatcctgatgagcgacagggcacc

SEQ ID NO: 1195500 - DNA, 25 bp, Homo sapien
tttgcgtggcaacctccagggatgg

SEQ ID NO: 1195501 - DNA, 25 bp, Homo sapien
aatcagaaggcgcaaccacaacact

SEQ ID NO: 1195502 - DNA, 25 bp, Homo sapien
tgagtttcaggaggcccatagggca

SEQ ID NO: 1195503 - DNA, 25 bp, Homo sapien
ttgacggcatacagaagggactcat

SEQ ID NO: 1195504 - DNA, 25 bp, Homo sapien
tgtgtcatgcttcaggctggcacca

SEQ ID NO: 1195505 - DNA, 25 bp, Homo sapien
cagtgtggttagtctggcctggccc

SEQ ID NO: 1195506 - DNA, 25 bp, Homo sapien
catgatgttccagcgatggccgtgc

SEQ ID NO: 1195507 - DNA, 25 bp, Homo sapien
tgtagtctcccacggttctcttagg

SEQ ID NO: 1195508 - DNA, 25 bp, Homo sapien
caaaggagtggaacatctagcatga

SEQ ID NO: 1195509 - DNA, 25 bp, Homo sapien
tctgctaagaccaccgctgggtgct

SEQ ID NO: 1195510 - DNA, 25 bp, Homo sapien
ctgcagaggtgttcaaaccaggcat

SEQ ID NO: 1195511 - DNA, 25 bp, Homo sapien
cttggaactaccctacaaagcaggt

SEQ ID NO: 1195512 - DNA, 25 bp, Homo sapien
aactaccctacaaagcaggtctgca

SEQ ID NO: 1195513 - DNA, 25 bp, Homo sapien
tcagggcttggaactaccctacaaa

SEQ ID NO: 1195514 - DNA, 25 bp, Homo sapien
gggcttggaactaccctacaaagca

SEQ ID NO: 1195515 - DNA, 25 bp, Homo sapien
gcacagttgctaggagagtgtccag

SEQ ID NO: 1195516 - DNA, 25 bp, Homo sapien
tgtctctgcaaaaaggcgatggcca

SEQ ID NO: 1195517 - DNA, 25 bp, Homo sapien
caggcagacactagcttaataaggt

SEQ ID NO: 1195518 - DNA, 25 bp, Homo sapien
atttgcacattagcagcaggctggc

SEQ ID NO: 1195519 - DNA, 25 bp, Homo sapien
tgatgtcgcgctgctcgatgaggcc

SEQ ID NO: 1195520 - DNA, 25 bp, Homo sapien
tgcggtctgggctcagtccacgcat

SEQ ID NO: 1195521 - DNA, 25 bp, Homo sapien
acctggaagaagttgtcgaagccag

SEQ ID NO: 1195522 - DNA, 25 bp, Homo sapien
gctctgcatcttgtgcgcctcgtgg

SEQ ID NO: 1195523 - DNA, 25 bp, Homo sapien
gacaagaagttgcaggcttctattg

SEQ ID NO: 1195524 - DNA, 25 bp, Homo sapien
caagaagttgcaggcttctattgtt

SEQ ID NO: 1195525 - DNA, 25 bp, Homo sapien
gcaggcttctattgttagattcaca

SEQ ID NO: 1195526 - DNA, 25 bp, Homo sapien
gcttctattgttagattcacaatct

SEQ ID NO: 1195527 - DNA, 25 bp, Homo sapien
agttagcagttcttgtacactttct

SEQ ID NO: 1195528 - DNA, 25 bp, Homo sapien
gagaaagccatgttgctaggcatgg

SEQ ID NO: 1195529 - DNA, 25 bp, Homo sapien
gccatgttgctaggcatgggggcat

SEQ ID NO: 1195530 - DNA, 25 bp, Homo sapien
gttagcagttcttgtacactttctc

SEQ ID NO: 1195531 - DNA, 25 bp, Homo sapien
aacggatgactctaatcctttcaaa

SEQ ID NO: 1195532 - DNA, 25 bp, Homo sapien
aagaccaacggatgactctaatcct

SEQ ID NO: 1195533 - DNA, 25 bp, Homo sapien
taagaccaacggatgactctaatcc

SEQ ID NO: 1195534 - DNA, 25 bp, Homo sapien
accaacggatgactctaatcctttc

SEQ ID NO: 1195535 - DNA, 25 bp, Homo sapien
ggcagacagctaaagcttgtctttg

SEQ ID NO: 1195536 - DNA, 25 bp, Homo sapien
cagacagctaaagcttgtctttggt

SEQ ID NO: 1195537 - DNA, 25 bp, Homo sapien
ttgggcagacagctaaagcttgtct

SEQ ID NO: 1195538 - DNA, 25 bp, Homo sapien
gacagctaaagcttgtctttggtaa

SEQ ID NO: 1195539 - DNA, 25 bp, Homo sapien
tgttgccatcaaaaccgagtcaaaa

SEQ ID NO: 1195540 - DNA, 25 bp, Homo sapien
tcagtatatgttgccatcaaaaccg

SEQ ID NO: 1195541 - DNA, 25 bp, Homo sapien
catggtcagtatatgttgccatcaa

SEQ ID NO: 1195542 - DNA, 25 bp, Homo sapien
tgagtttcatggtcagtatatgttg

SEQ ID NO: 1195543 - DNA, 25 bp, Homo sapien
gggctgactccaatatcaggcttcc

SEQ ID NO: 1195544 - DNA, 25 bp, Homo sapien
tcgatcggcgatgcaggaagccaca

SEQ ID NO: 1195545 - DNA, 25 bp, Homo sapien
gaagccacactaaagatggcagggt

SEQ ID NO: 1195546 - DNA, 25 bp, Homo sapien
tatcatcagaagttactaggtgggc

SEQ ID NO: 1195547 - DNA, 25 bp, Homo sapien
tctagagccattatgagaccaaaac

SEQ ID NO: 1195548 - DNA, 25 bp, Homo sapien
tagagccattatgagaccaaaactc

SEQ ID NO: 1195549 - DNA, 25 bp, Homo sapien
gcttctagagccattatgagaccaa

SEQ ID NO: 1195550 - DNA, 25 bp, Homo sapien
ctctgcttctagagccattatgaga

SEQ ID NO: 1195551 - DNA, 25 bp, Homo sapien
gggcatcaataagcaggattgggta

SEQ ID NO: 1195552 - DNA, 25 bp, Homo sapien
agtttccattcttcgctccttcatc

SEQ ID NO: 1195553 - DNA, 25 bp, Homo sapien
aataagcaggattgggtatcactga

SEQ ID NO: 1195554 - DNA, 25 bp, Homo sapien
ccagggatgggaaagtttccattct

SEQ ID NO: 1195555 - DNA, 25 bp, Homo sapien
gctttttctgaaatggccgtaacaa

SEQ ID NO: 1195556 - DNA, 25 bp, Homo sapien
tcaatcttgaaaggggcagtctatg

SEQ ID NO: 1195557 - DNA, 25 bp, Homo sapien
ggcaaatattacacttatttcctcc

SEQ ID NO: 1195558 - DNA, 25 bp, Homo sapien
ggcagtctatgccttgccaggcttt

SEQ ID NO: 1195559 - DNA, 25 bp, Homo sapien
tgtgtgaactacagatccccacata

SEQ ID NO: 1195560 - DNA, 25 bp, Homo sapien
tgaactacagatccccacatagcca

SEQ ID NO: 1195561 - DNA, 25 bp, Homo sapien
aactgtaggctttgtgtgaactaca

SEQ ID NO: 1195562 - DNA, 25 bp, Homo sapien
tacagatccccacatagccacttgg

SEQ ID NO: 1195563 - DNA, 25 bp, Homo sapien
tttaacacaagtctctaatacaata

SEQ ID NO: 1195564 - DNA, 25 bp, Homo sapien
aacacaagtctctaatacaatacaa

SEQ ID NO: 1195565 - DNA, 25 bp, Homo sapien
acaagtctctaatacaatacaattt

SEQ ID NO: 1195566 - DNA, 25 bp, Homo sapien
taacacaagtctctaatacaataca

SEQ ID NO: 1195567 - DNA, 25 bp, Homo sapien
gcatctcaactagttttcctgcctg

SEQ ID NO: 1195568 - DNA, 25 bp, Homo sapien
tcgatcctgatcattagttctggct

SEQ ID NO: 1195569 - DNA, 25 bp, Homo sapien
gcccatgccactaaaggactcagcg

SEQ ID NO: 1195570 - DNA, 25 bp, Homo sapien
tgcactccagcaggtaaaacaccca

SEQ ID NO: 1195571 - DNA, 25 bp, Homo sapien
caagtaatgccgagaagagagaggc

SEQ ID NO: 1195572 - DNA, 25 bp, Homo sapien
cgccgccgccctagtaaggtgtcgg

SEQ ID NO: 1195573 - DNA, 25 bp, Homo sapien
aggctccacgaacacggccaggcat

SEQ ID NO: 1195574 - DNA, 25 bp, Homo sapien
agtctccgcaagagagcgagggcct

SEQ ID NO: 1195575 - DNA, 25 bp, Homo sapien
gatttatgtggccaaagggtagcag

SEQ ID NO: 1195576 - DNA, 25 bp, Homo sapien
cgccctcggcggagcactggagaag

SEQ ID NO: 1195577 - DNA, 25 bp, Homo sapien
gaggcgcgcaagagcgctgggagaa

SEQ ID NO: 1195578 - DNA, 25 bp, Homo sapien
cactggagaagatgcggaaggagaa

SEQ ID NO: 1195579 - DNA, 25 bp, Homo sapien
tgagtgccagcatccgcccggagcg

SEQ ID NO: 1195580 - DNA, 25 bp, Homo sapien
agagagcagcgaagcctgagtgcca

SEQ ID NO: 1195581 - DNA, 25 bp, Homo sapien
cctgcgcttgggctagaagttgagc

SEQ ID NO: 1195582 - DNA, 25 bp, Homo sapien
gcctccccggatcagcatgcaacag

SEQ ID NO: 1195583 - DNA, 25 bp, Homo sapien
cagacgcaccacctagttcagggag

SEQ ID NO: 1195584 - DNA, 25 bp, Homo sapien
agcccgccgctgtgaactgttgaat

SEQ ID NO: 1195585 - DNA, 25 bp, Homo sapien
tgcgaagctccattcctcaagaagg

SEQ ID NO: 1195586 - DNA, 25 bp, Homo sapien
caagcagaaagacacacggagactc

SEQ ID NO: 1195587 - DNA, 25 bp, Homo sapien
tgacggtgaaacagttctgccggac

SEQ ID NO: 1195588 - DNA, 25 bp, Homo sapien
tcttctccgaagatgaacagggatc

SEQ ID NO: 1195589 - DNA, 25 bp, Homo sapien
ggttccttgccggttcctgctctgg

SEQ ID NO: 1195590 - DNA, 25 bp, Homo sapien
ctttcgtctgcttgtaggcggccgc

SEQ ID NO: 1195591 - DNA, 25 bp, Homo sapien
gaagaaatgcaaagggggagaggga

SEQ ID NO: 1195592 - DNA, 25 bp, Homo sapien
ccgaagaaatgcaaagggggagagg

SEQ ID NO: 1195593 - DNA, 25 bp, Homo sapien
cgaagaaatgcaaagggggagaggg

SEQ ID NO: 1195594 - DNA, 25 bp, Homo sapien
tgcttcagcaaaggggcaaattggc

SEQ ID NO: 1195595 - DNA, 25 bp, Homo sapien
gatgcaccgaagagtgtgcttcagc

SEQ ID NO: 1195596 - DNA, 25 bp, Homo sapien
gcaaaggggcaaattggcaccagga

SEQ ID NO: 1195597 - DNA, 25 bp, Homo sapien
ttccatgctaggtaccccccttcac

SEQ ID NO: 1195598 - DNA, 25 bp, Homo sapien
acactagtgcccaaacgggtctcca

SEQ ID NO: 1195599 - DNA, 25 bp, Homo sapien
cttgaaaaacactagtgcccaaacg

SEQ ID NO: 1195600 - DNA, 25 bp, Homo sapien
ccaaacgggtctccacggcaccaag

SEQ ID NO: 1195601 - DNA, 25 bp, Homo sapien
ctagtgcccaaacgggtctccacgg

SEQ ID NO: 1195602 - DNA, 25 bp, Homo sapien
ggcccagccgatccacctggatcct

SEQ ID NO: 1195603 - DNA, 25 bp, Homo sapien
ctctggcctcagcggatgaattcag

SEQ ID NO: 1195604 - DNA, 25 bp, Homo sapien
ggatgaattcaggcccagccgatcc

SEQ ID NO: 1195605 - DNA, 25 bp, Homo sapien
ggcctcagcggatgaattcaggccc

SEQ ID NO: 1195606 - DNA, 25 bp, Homo sapien
aacgatggctgctggcacactttgc

SEQ ID NO: 1195607 - DNA, 25 bp, Homo sapien
cgggagggcgcctgtctgaataaac

SEQ ID NO: 1195608 - DNA, 25 bp, Homo sapien
cagaagtacccgaggtgctgaaccc

SEQ ID NO: 1195609 - DNA, 25 bp, Homo sapien
gctgtccgaggtgccaacgatggct

SEQ ID NO: 1195610 - DNA, 25 bp, Homo sapien
gagcatgatgctgaaatcaactccc

SEQ ID NO: 1195611 - DNA, 25 bp, Homo sapien
aacaccttagcagatgttccctgaa

SEQ ID NO: 1195612 - DNA, 25 bp, Homo sapien
tgttaccacagcctacatgctgtag

SEQ ID NO: 1195613 - DNA, 25 bp, Homo sapien
caaaagagaccattgggacagggct

SEQ ID NO: 1195614 - DNA, 25 bp, Homo sapien
gagatgctgtatggcccacagggta

SEQ ID NO: 1195615 - DNA, 25 bp, Homo sapien
gagtctccaagccagacacactact

SEQ ID NO: 1195616 - DNA, 25 bp, Homo sapien
gccatattcatttccacacgaagca

SEQ ID NO: 1195617 - DNA, 25 bp, Homo sapien
ggaatatcctattgcccaactctgg

SEQ ID NO: 1195618 - DNA, 25 bp, Homo sapien
tgctgagacaaccaaggcgatggag

SEQ ID NO: 1195619 - DNA, 25 bp, Homo sapien
tgtgatgagcttcattatctcaggg

SEQ ID NO: 1195620 - DNA, 25 bp, Homo sapien
tgtccacaggttcattgtgatgagc

SEQ ID NO: 1195621 - DNA, 25 bp, Homo sapien
attatctcagggctgcaaacatatt

SEQ ID NO: 1195622 - DNA, 25 bp, Homo sapien
gaaatcatggattaatgtccacagg

SEQ ID NO: 1195623 - DNA, 25 bp, Homo sapien
ttcagagattgtcctgggatgctca

SEQ ID NO: 1195624 - DNA, 25 bp, Homo sapien
attcagagattgtcctgggatgctc

SEQ ID NO: 1195625 - DNA, 25 bp, Homo sapien
aacaggcaattcagagattgtcctg

SEQ ID NO: 1195626 - DNA, 25 bp, Homo sapien
catctagacacttactcaggtcact

SEQ ID NO: 1195627 - DNA, 25 bp, Homo sapien
tcactactcagacatttattcaggt

SEQ ID NO: 1195628 - DNA, 25 bp, Homo sapien
tactctgaagttccatagagtttca

SEQ ID NO: 1195629 - DNA, 25 bp, Homo sapien
tgaagttccatagagtttcaaactg

SEQ ID NO: 1195630 - DNA, 25 bp, Homo sapien
aaaagagcaaagacatttggcccag

SEQ ID NO: 1195631 - DNA, 25 bp, Homo sapien
cccaggccagggctaagaacaggag

SEQ ID NO: 1195632 - DNA, 25 bp, Homo sapien
gcccagaacctcctgagaatatgga

SEQ ID NO: 1195633 - DNA, 25 bp, Homo sapien
tgtagccatggactgacacagagga

SEQ ID NO: 1195634 - DNA, 25 bp, Homo sapien
gcagtttcaagacaatcattaggga

SEQ ID NO: 1195635 - DNA, 25 bp, Homo sapien
aatgctccttcctttgaatggttga

SEQ ID NO: 1195636 - DNA, 25 bp, Homo sapien
taggttcacttattgatttatctcc

SEQ ID NO: 1195637 - DNA, 25 bp, Homo sapien
atggttgacttgtttccttagcaac

SEQ ID NO: 1195638 - DNA, 25 bp, Homo sapien
acaatatccccttggaccatggcag

SEQ ID NO: 1195639 - DNA, 25 bp, Homo sapien
tatccccttggaccatggcagttcc

SEQ ID NO: 1195640 - DNA, 25 bp, Homo sapien
tcacaatatccccttggaccatggc

SEQ ID NO: 1195641 - DNA, 25 bp, Homo sapien
gactctccactcacaatatcccctt

SEQ ID NO: 1195642 - DNA, 25 bp, Homo sapien
tcgcattctaatgggtctatgtggg

SEQ ID NO: 1195643 - DNA, 25 bp, Homo sapien
tcaagctgcagacctctcgcattct

SEQ ID NO: 1195644 - DNA, 25 bp, Homo sapien
cctgaaagtgataagcacaggcttc

SEQ ID NO: 1195645 - DNA, 25 bp, Homo sapien
caaagtagatgggttctcagtgctg

SEQ ID NO: 1195646 - DNA, 25 bp, Homo sapien
gatctgactggagtgaaaccagggc

SEQ ID NO: 1195647 - DNA, 25 bp, Homo sapien
tggatctgactggagtgaaaccagg

SEQ ID NO: 1195648 - DNA, 25 bp, Homo sapien
cacaaagtgggggtctgtctgccag

SEQ ID NO: 1195649 - DNA, 25 bp, Homo sapien
tgatggatctgactggagtgaaacc

SEQ ID NO: 1195650 - DNA, 25 bp, Homo sapien
tgcttgtgcacagatccagctgctg

SEQ ID NO: 1195651 - DNA, 25 bp, Homo sapien
cagtcttcaaaccactgaactgggt

SEQ ID NO: 1195652 - DNA, 25 bp, Homo sapien
tgctgcaatccattgctctcctggg

SEQ ID NO: 1195653 - DNA, 25 bp, Homo sapien
ctgaactgggtaacgatgcttgtgc

SEQ ID NO: 1195654 - DNA, 25 bp, Homo sapien
cttgtcatcctcaggaagatgctgc

SEQ ID NO: 1195655 - DNA, 25 bp, Homo sapien
agggccaggacgatgcagttggcaa

SEQ ID NO: 1195656 - DNA, 25 bp, Homo sapien
ccaggacgatgcagttggcaatgat

SEQ ID NO: 1195657 - DNA, 25 bp, Homo sapien
tcttcgggacatgggggtcttgtca

SEQ ID NO: 1195658 - DNA, 25 bp, Homo sapien
taagagcccttatggaagatgaacc

SEQ ID NO: 1195659 - DNA, 25 bp, Homo sapien
ggccacaattttgatcccagcttca

SEQ ID NO: 1195660 - DNA, 25 bp, Homo sapien
gcttcaaagcaaaagatcccaatga

SEQ ID NO: 1195661 - DNA, 25 bp, Homo sapien
cagccattgcggaggtaagagccct

SEQ ID NO: 1195662 - DNA, 25 bp, Homo sapien
acacaggaccactcctcagtgccca

SEQ ID NO: 1195663 - DNA, 25 bp, Homo sapien
cacatcacttgctgccacatccaca

SEQ ID NO: 1195664 - DNA, 25 bp, Homo sapien
ttgctgccacatccacacaggacca

SEQ ID NO: 1195665 - DNA, 25 bp, Homo sapien
cccagctttgcaggtaccaagagcc

SEQ ID NO: 1195666 - DNA, 25 bp, Homo sapien
gcagttgggtaagggaatttccaga

SEQ ID NO: 1195667 - DNA, 25 bp, Homo sapien
cctgtctgccaagcagttgggtaag

SEQ ID NO: 1195668 - DNA, 25 bp, Homo sapien
tgactcctccctggaaaacaattcc

SEQ ID NO: 1195669 - DNA, 25 bp, Homo sapien
ctttatctaccttcacccctcctct

SEQ ID NO: 1195670 - DNA, 25 bp, Homo sapien
ctgactcctccctggaaaacaattc

SEQ ID NO: 1195671 - DNA, 25 bp, Homo sapien
ctgtgaaggcaattcacaaagccag

SEQ ID NO: 1195672 - DNA, 25 bp, Homo sapien
tgtgaaggcaattcacaaagccagg

SEQ ID NO: 1195673 - DNA, 25 bp, Homo sapien
aaagccagggacatctgaagagcca

SEQ ID NO: 1195674 - DNA, 25 bp, Homo sapien
cacaaagccagggacatctgaagag

SEQ ID NO: 1195675 - DNA, 25 bp, Homo sapien
tgtgggatagaaccgcaaccctcag

SEQ ID NO: 1195676 - DNA, 25 bp, Homo sapien
cattcctgtgggatagaaccgcaac

SEQ ID NO: 1195677 - DNA, 25 bp, Homo sapien
tctcaagaggaccaagctctttgcc

SEQ ID NO: 1195678 - DNA, 25 bp, Homo sapien
gaagagggctaagcagcaggtctgg

SEQ ID NO: 1195679 - DNA, 25 bp, Homo sapien
ttaaaaattgcctgagttgttccca

SEQ ID NO: 1195680 - DNA, 25 bp, Homo sapien
gttcccaatgcaagagagatcccaa

SEQ ID NO: 1195681 - DNA, 25 bp, Homo sapien
ttcccaatgcaagagagatcccaag

SEQ ID NO: 1195682 - DNA, 25 bp, Homo sapien
tctttcttaaaccagcatgccctca

SEQ ID NO: 1195683 - DNA, 25 bp, Homo sapien
ctttcttaaaccagcatgccctcat

SEQ ID NO: 1195684 - DNA, 25 bp, Homo sapien
cttgtcttcatacgttctttcttaa

SEQ ID NO: 1195685 - DNA, 25 bp, Homo sapien
cccctcctttgtgcaagggctctgc

SEQ ID NO: 1195686 - DNA, 25 bp, Homo sapien
ccctcctttgtgcaagggctctgcc

SEQ ID NO: 1195687 - DNA, 25 bp, Homo sapien
cacccagagttttgactaagattca

SEQ ID NO: 1195688 - DNA, 25 bp, Homo sapien
gcaaagataccccaaaccaggtcag

SEQ ID NO: 1195689 - DNA, 25 bp, Homo sapien
ggactaggtaaggactctccaaggc

SEQ ID NO: 1195690 - DNA, 25 bp, Homo sapien
tagtcatgccaacctggactaggta

SEQ ID NO: 1195691 - DNA, 25 bp, Homo sapien
gagcattagtagtggtaaaaggacc

SEQ ID NO: 1195692 - DNA, 25 bp, Homo sapien
ggacacctggattgagaggctcata

SEQ ID NO: 1195693 - DNA, 25 bp, Homo sapien
tcatgtgacaaggattggctggatc

SEQ ID NO: 1195694 - DNA, 25 bp, Homo sapien
taagcagaccgggaataatatattc

SEQ ID NO: 1195695 - DNA, 25 bp, Homo sapien
agcccaccaactggaccactgtctt

SEQ ID NO: 1195696 - DNA, 25 bp, Homo sapien
gagcccaccaactggaccactgtct

SEQ ID NO: 1195697 - DNA, 25 bp, Homo sapien
ttccctgcctcagtgcgctgagtcc

SEQ ID NO: 1195698 - DNA, 25 bp, Homo sapien
agattttcatggccgttaacagact

SEQ ID NO: 1195699 - DNA, 25 bp, Homo sapien
tttcatggccgttaacagactgaag

SEQ ID NO: 1195700 - DNA, 25 bp, Homo sapien
tgagattttcatggccgttaacaga

SEQ ID NO: 1195701 - DNA, 25 bp, Homo sapien
attttcatggccgttaacagactga

SEQ ID NO: 1195702 - DNA, 25 bp, Homo sapien
tgtggtgttaagaaaacccacacca

SEQ ID NO: 1195703 - DNA, 25 bp, Homo sapien
acaccaggtggttgtagcagcagcc

SEQ ID NO: 1195704 - DNA, 25 bp, Homo sapien
aaacccacaccaggtggttgtagca

SEQ ID NO: 1195705 - DNA, 25 bp, Homo sapien
cagcagcccaagagtccagagctct

SEQ ID NO: 1195706 - DNA, 25 bp, Homo sapien
ccttttgacaacctggttgtgtgac

SEQ ID NO: 1195707 - DNA, 25 bp, Homo sapien
agcccttttgacaacctggttgtgt

SEQ ID NO: 1195708 - DNA, 25 bp, Homo sapien
ctgtccattctaatccatccacttc

SEQ ID NO: 1195709 - DNA, 25 bp, Homo sapien
aagcccttttgacaacctggttgtg

SEQ ID NO: 1195710 - DNA, 25 bp, Homo sapien
taatggccctctattgtcttcacag

SEQ ID NO: 1195711 - DNA, 25 bp, Homo sapien
gtagaatccagaagtgtcaccgcag

SEQ ID NO: 1195712 - DNA, 25 bp, Homo sapien
ggttgccgtgacatgcatgccgttc

SEQ ID NO: 1195713 - DNA, 25 bp, Homo sapien
cattgctccagcaagcacgatggga

SEQ ID NO: 1195714 - DNA, 25 bp, Homo sapien
tcatctataacttgaccttggcatc

SEQ ID NO: 1195715 - DNA, 25 bp, Homo sapien
cttccccaacaggatgccctgacac

SEQ ID NO: 1195716 - DNA, 25 bp, Homo sapien
gagacacagcctgtcatctataact

SEQ ID NO: 1195717 - DNA, 25 bp, Homo sapien
caacaggatgccctgacaccacctg

SEQ ID NO: 1195718 - DNA, 25 bp, Homo sapien
gctaggtttaaactgctcctcctca

SEQ ID NO: 1195719 - DNA, 25 bp, Homo sapien
cctggctaggtttaaactgctcctc

SEQ ID NO: 1195720 - DNA, 25 bp, Homo sapien
tggctaggtttaaactgctcctcct

SEQ ID NO: 1195721 - DNA, 25 bp, Homo sapien
taggtttaaactgctcctcctcaac

SEQ ID NO: 1195722 - DNA, 25 bp, Homo sapien
gaatgtcgatgctctgcatcccacg

SEQ ID NO: 1195723 - DNA, 25 bp, Homo sapien
ttgcagaagaatgtcgatgctctgc

SEQ ID NO: 1195724 - DNA, 25 bp, Homo sapien
gaagaatgtcgatgctctgcatccc

SEQ ID NO: 1195725 - DNA, 25 bp, Homo sapien
tgcatcccacgccttcagcagctct

SEQ ID NO: 1195726 - DNA, 25 bp, Homo sapien
tccctggatgtttggagttaggacc

SEQ ID NO: 1195727 - DNA, 25 bp, Homo sapien
gagtttggttgatctcttctgaagc

SEQ ID NO: 1195728 - DNA, 25 bp, Homo sapien
ctggccacagttaacaggatcaggg

SEQ ID NO: 1195729 - DNA, 25 bp, Homo sapien
tggagttaggaccaatagagtttgg

SEQ ID NO: 1195730 - DNA, 25 bp, Homo sapien
cttggtctctgtacctaaactaatg

SEQ ID NO: 1195731 - DNA, 25 bp, Homo sapien
tctgtacctaaactaatgctacttt

SEQ ID NO: 1195732 - DNA, 25 bp, Homo sapien
tacctaaactaatgctactttctct

SEQ ID NO: 1195733 - DNA, 25 bp, Homo sapien
aactaatgctactttctctatcccc

SEQ ID NO: 1195734 - DNA, 25 bp, Homo sapien
ccagccccagttgccataactgggt

SEQ ID NO: 1195735 - DNA, 25 bp, Homo sapien
gatacttctgaccatatgccatgca

SEQ ID NO: 1195736 - DNA, 25 bp, Homo sapien
ggtgatcatggctgtccttgcgata

SEQ ID NO: 1195737 - DNA, 25 bp, Homo sapien
tacaatcgagatacttctgaccata

SEQ ID NO: 1195738 - DNA, 25 bp, Homo sapien
gatggtgatcatggctgtccttgcg

SEQ ID NO: 1195739 - DNA, 25 bp, Homo sapien
catcaggcttagctccatcccagag

SEQ ID NO: 1195740 - DNA, 25 bp, Homo sapien
gggccccttgatgccatcaggctta

SEQ ID NO: 1195741 - DNA, 25 bp, Homo sapien
tgccggggccccttgatgccatcag

SEQ ID NO: 1195742 - DNA, 25 bp, Homo sapien
ccttgatgccatcaggcttagctcc

SEQ ID NO: 1195743 - DNA, 25 bp, Homo sapien
aggactggacagatcctgtcccgtg

SEQ ID NO: 1195744 - DNA, 25 bp, Homo sapien
atcctgtcccgtgggatcttcccag

SEQ ID NO: 1195745 - DNA, 25 bp, Homo sapien
tcccgtgggatcttcccagttctca

SEQ ID NO: 1195746 - DNA, 25 bp, Homo sapien
gaggactggacagatcctgtcccgt

SEQ ID NO: 1195747 - DNA, 25 bp, Homo sapien
caactgggtctttaattgatgcaca

SEQ ID NO: 1195748 - DNA, 25 bp, Homo sapien
aaattctcccaaccacactgcagcc

SEQ ID NO: 1195749 - DNA, 25 bp, Homo sapien
actcccacagttccaatactccttg

SEQ ID NO: 1195750 - DNA, 25 bp, Homo sapien
ttgatgcacattggccactggcagc

SEQ ID NO: 1195751 - DNA, 25 bp, Homo sapien
tggaattaaatttagccatctgggt

SEQ ID NO: 1195752 - DNA, 25 bp, Homo sapien
gtggctccaagtggaattaaattta

SEQ ID NO: 1195753 - DNA, 25 bp, Homo sapien
agtggaattaaatttagccatctgg

SEQ ID NO: 1195754 - DNA, 25 bp, Homo sapien
cagtggctccaagtggaattaaatt

SEQ ID NO: 1195755 - DNA, 25 bp, Homo sapien
tgacgccagctgtatgtgggtgcac

SEQ ID NO: 1195756 - DNA, 25 bp, Homo sapien
ggtgcacctgagcttgggtgaatca

SEQ ID NO: 1195757 - DNA, 25 bp, Homo sapien
tggaaagcacacagcgctgacgcca

SEQ ID NO: 1195758 - DNA, 25 bp, Homo sapien
tgaggcaagctcagcctggaaagca

SEQ ID NO: 1195759 - DNA, 25 bp, Homo sapien
aggacacgcacagcccggagggtcc

SEQ ID NO: 1195760 - DNA, 25 bp, Homo sapien
gggtcctcaggtccacgtgagtatt

SEQ ID NO: 1195761 - DNA, 25 bp, Homo sapien
taggtatccctgacacgagcttcaa

SEQ ID NO: 1195762 - DNA, 25 bp, Homo sapien
tccacgtgagtattgaagtgggttc

SEQ ID NO: 1195763 - DNA, 25 bp, Homo sapien
catgatggacttcaacacaatctgc

SEQ ID NO: 1195764 - DNA, 25 bp, Homo sapien
gtagaactccaaaccaatgatagca

SEQ ID NO: 1195765 - DNA, 25 bp, Homo sapien
tcgatgtaacttgccactgtagaac

SEQ ID NO: 1195766 - DNA, 25 bp, Homo sapien
gcagaagaggtaccatggccttcat

SEQ ID NO: 1195767 - DNA, 25 bp, Homo sapien
acgtgtgggtcaaaacagagagcga

SEQ ID NO: 1195768 - DNA, 25 bp, Homo sapien
cagttcttccataccacgtgtgggt

SEQ ID NO: 1195769 - DNA, 25 bp, Homo sapien
aaatgtctccacagatccggaggga

SEQ ID NO: 1195770 - DNA, 25 bp, Homo sapien
tcagaggctgctgtacaaagagtaa

SEQ ID NO: 1195771 - DNA, 25 bp, Homo sapien
tcaaactgggtgatcccatcattgg

SEQ ID NO: 1195772 - DNA, 25 bp, Homo sapien
gtccttgcattcataaccagctggg

SEQ ID NO: 1195773 - DNA, 25 bp, Homo sapien
gcacagcaaaaaggatgttatcaaa

SEQ ID NO: 1195774 - DNA, 25 bp, Homo sapien
ttgcattcataaccagctgggcagc

SEQ ID NO: 1195775 - DNA, 25 bp, Homo sapien
ctgtccccggactagccaggccaaa

SEQ ID NO: 1195776 - DNA, 25 bp, Homo sapien
cacctcccatcccaatacacctata

SEQ ID NO: 1195777 - DNA, 25 bp, Homo sapien
tacacctatatccatagccctccct

SEQ ID NO: 1195778 - DNA, 25 bp, Homo sapien
tagccaggccaaacaaccacagaag

SEQ ID NO: 1195779 - DNA, 25 bp, Homo sapien
gggcagccagtatcatacattagta

SEQ ID NO: 1195780 - DNA, 25 bp, Homo sapien
ccagctaattctactgggcagccag

SEQ ID NO: 1195781 - DNA, 25 bp, Homo sapien
tcctaatcgtattaagaagctgtgt

SEQ ID NO: 1195782 - DNA, 25 bp, Homo sapien
ttgttcacctatccaacataggatg

SEQ ID NO: 1195783 - DNA, 25 bp, Homo sapien
tatccaaagctctttctaaagggtg

SEQ ID NO: 1195784 - DNA, 25 bp, Homo sapien
gctctttgggcattatagtctcgtc

SEQ ID NO: 1195785 - DNA, 25 bp, Homo sapien
ccctccagtgtaaattatatccaaa

SEQ ID NO: 1195786 - DNA, 25 bp, Homo sapien
agtctcgtcgagtttcttctgagac

SEQ ID NO: 1195787 - DNA, 25 bp, Homo sapien
ctctactaagtacttccttttacag

SEQ ID NO: 1195788 - DNA, 25 bp, Homo sapien
tggtccttgggacttcttcactgcc

SEQ ID NO: 1195789 - DNA, 25 bp, Homo sapien
cttgctgggtgtaagctggtccttg

SEQ ID NO: 1195790 - DNA, 25 bp, Homo sapien
cactgccctttagagctttagcata

SEQ ID NO: 1195791 - DNA, 25 bp, Homo sapien
gggtcacacttcatccctgggcttg

SEQ ID NO: 1195792 - DNA, 25 bp, Homo sapien
atgaggagtgactgcactcatcaac

SEQ ID NO: 1195793 - DNA, 25 bp, Homo sapien
ccagctaatttctgcccctcagtcc

SEQ ID NO: 1195794 - DNA, 25 bp, Homo sapien
tccagctaatttctgcccctcagtc

SEQ ID NO: 1195795 - DNA, 25 bp, Homo sapien
ctgagattctgtcagcatttggatt

SEQ ID NO: 1195796 - DNA, 25 bp, Homo sapien
atttggattccagagtgaaaagtac

SEQ ID NO: 1195797 - DNA, 25 bp, Homo sapien
ctggctgagattctgtcagcatttg

SEQ ID NO: 1195798 - DNA, 25 bp, Homo sapien
gagattctgtcagcatttggattcc

SEQ ID NO: 1195799 - DNA, 25 bp, Homo sapien
tgtaaatctacgcatattgttttca

SEQ ID NO: 1195800 - DNA, 25 bp, Homo sapien
ttgttttcaacaggcatggaatgag

SEQ ID NO: 1195801 - DNA, 25 bp, Homo sapien
tctacgcatattgttttcaacaggc

SEQ ID NO: 1195802 - DNA, 25 bp, Homo sapien
tcaacaggcatggaatgaggaccag

SEQ ID NO: 1195803 - DNA, 25 bp, Homo sapien
agcttcgctgtggccaaacagctga

SEQ ID NO: 1195804 - DNA, 25 bp, Homo sapien
aagcttcgctgtggccaaacagctg

SEQ ID NO: 1195805 - DNA, 25 bp, Homo sapien
taaaggagaaaagatcctgttcaat

SEQ ID NO: 1195806 - DNA, 25 bp, Homo sapien
agggaactgaggtgtaattgagggc

SEQ ID NO: 1195807 - DNA, 25 bp, Homo sapien
tgaggtgtaattgagggcacacatg

SEQ ID NO: 1195808 - DNA, 25 bp, Homo sapien
aaggagaaaagatcctgttcaatcc

SEQ ID NO: 1195809 - DNA, 25 bp, Homo sapien
tgccctttgggcctgcctttccttc

SEQ ID NO: 1195810 - DNA, 25 bp, Homo sapien
tccttccaaattgttaaggcagctg

SEQ ID NO: 1195811 - DNA, 25 bp, Homo sapien
gcctgctgccctttgggcctgcctt

SEQ ID NO: 1195812 - DNA, 25 bp, Homo sapien
aattgttaaggcagctggtggcagc

SEQ ID NO: 1195813 - DNA, 25 bp, Homo sapien
caatgggtccataatgctcaaaggg

SEQ ID NO: 1195814 - DNA, 25 bp, Homo sapien
gcctttcttggctacctcagagaga

SEQ ID NO: 1195815 - DNA, 25 bp, Homo sapien
gagaacaccgccactgcctttatac

SEQ ID NO: 1195816 - DNA, 25 bp, Homo sapien
gctcaaagggaccataacacttcct

SEQ ID NO: 1195817 - DNA, 25 bp, Homo sapien
atctccaggcattttccaccccaac

SEQ ID NO: 1195818 - DNA, 25 bp, Homo sapien
tctccaggcattttccaccccaact

SEQ ID NO: 1195819 - DNA, 25 bp, Homo sapien
cacttcctcaacacggcacacaaat

SEQ ID NO: 1195820 - DNA, 25 bp, Homo sapien
ttcctcaacacggcacacaaatgtc

SEQ ID NO: 1195821 - DNA, 25 bp, Homo sapien
ctctctgtttcctccgaaattgcct

SEQ ID NO: 1195822 - DNA, 25 bp, Homo sapien
tctctgtttcctccgaaattgcctc

SEQ ID NO: 1195823 - DNA, 25 bp, Homo sapien
ttctcccccatcttggaactcttcc

SEQ ID NO: 1195824 - DNA, 25 bp, Homo sapien
tctccccaattgcatgtggtccatt

SEQ ID NO: 1195825 - DNA, 25 bp, Homo sapien
gtctccccaattgcatgtggtccat

SEQ ID NO: 1195826 - DNA, 25 bp, Homo sapien
tgtctccccaattgcatgtggtcca

SEQ ID NO: 1195827 - DNA, 25 bp, Homo sapien
tctgtctccccaattgcatgtggtc

SEQ ID NO: 1195828 - DNA, 25 bp, Homo sapien
tcctctgtggaaacaactgctgtag

SEQ ID NO: 1195829 - DNA, 25 bp, Homo sapien
ccttgtctgcaggataaagcccagt

SEQ ID NO: 1195830 - DNA, 25 bp, Homo sapien
tctgtggaaacaactgctgtagccc

SEQ ID NO: 1195831 - DNA, 25 bp, Homo sapien
ccagtcttccaagcctgacaatcat

SEQ ID NO: 1195832 - DNA, 25 bp, Homo sapien
tcttctgatgctaaagctgtctgtg

SEQ ID NO: 1195833 - DNA, 25 bp, Homo sapien
tacaacaaaggtagagactggcggg

SEQ ID NO: 1195834 - DNA, 25 bp, Homo sapien
aagcaagcccactgccattctttgt

SEQ ID NO: 1195835 - DNA, 25 bp, Homo sapien
tctttccacgtgatcctgatggacc

SEQ ID NO: 1195836 - DNA, 25 bp, Homo sapien
ccaatgaatactgtgttggtgtcca

SEQ ID NO: 1195837 - DNA, 25 bp, Homo sapien
caccgttcttcaccatccaatgaat

SEQ ID NO: 1195838 - DNA, 25 bp, Homo sapien
tgctttgtgcacaccaaatggacca

SEQ ID NO: 1195839 - DNA, 25 bp, Homo sapien
atgctttgtgcacaccaaatggacc

SEQ ID NO: 1195840 - DNA, 25 bp, Homo sapien
agtgctcagcgggtaccagtcctga

SEQ ID NO: 1195841 - DNA, 25 bp, Homo sapien
gtcctgacattgtgggaatgtgttc

SEQ ID NO: 1195842 - DNA, 25 bp, Homo sapien
cacacgtgtgcacgacgagggtgat

SEQ ID NO: 1195843 - DNA, 25 bp, Homo sapien
gatcccctgagtgacacacacatgc

SEQ ID NO: 1195844 - DNA, 25 bp, Homo sapien
tgagaacaaagaaggatccaatgat

SEQ ID NO: 1195845 - DNA, 25 bp, Homo sapien
aagaaggatccaatgatgatgaggg

SEQ ID NO: 1195846 - DNA, 25 bp, Homo sapien
agcactcccaggactaggttgagaa

SEQ ID NO: 1195847 - DNA, 25 bp, Homo sapien
tcccaggactaggttgagaacaaag

SEQ ID NO: 1195848 - DNA, 25 bp, Homo sapien
catcatagcagggtatcatacagga

SEQ ID NO: 1195849 - DNA, 25 bp, Homo sapien
tggccgtcatggaggacctgttcat

SEQ ID NO: 1195850 - DNA, 25 bp, Homo sapien
tcaagttctgctgtactagatgaca

SEQ ID NO: 1195851 - DNA, 25 bp, Homo sapien
gaagttacatgtgccatggccgtca

SEQ ID NO: 1195852 - DNA, 25 bp, Homo sapien
tagggcctcgactatggactataac

SEQ ID NO: 1195853 - DNA, 25 bp, Homo sapien
cagtgtatacgtgtctgcaagtgca

SEQ ID NO: 1195854 - DNA, 25 bp, Homo sapien
ttcagtcaactctgccgagggtggg

SEQ ID NO: 1195855 - DNA, 25 bp, Homo sapien
tctctgtggaacacggcatctcagt

SEQ ID NO: 1195856 - DNA, 25 bp, Homo sapien
tgcaggctgtagaagtctggcagca

SEQ ID NO: 1195857 - DNA, 25 bp, Homo sapien
gaagcatatccatagaatcacacgg

SEQ ID NO: 1195858 - DNA, 25 bp, Homo sapien
aataaagttcataagagcaagggac

SEQ ID NO: 1195859 - DNA, 25 bp, Homo sapien
gtaactgacactggccactagagaa

SEQ ID NO: 1195860 - DNA, 25 bp, Homo sapien
tgaagccttccacacaagttaatta

SEQ ID NO: 1195861 - DNA, 25 bp, Homo sapien
aatgaagccttccacacaagttaat

SEQ ID NO: 1195862 - DNA, 25 bp, Homo sapien
atgaagccttccacacaagttaatt

SEQ ID NO: 1195863 - DNA, 25 bp, Homo sapien
agccctctgcttacttattctatca

SEQ ID NO: 1195864 - DNA, 25 bp, Homo sapien
gagccccaactgcttaggtcataaa

SEQ ID NO: 1195865 - DNA, 25 bp, Homo sapien
ttaggtcataaaagctccagactct

SEQ ID NO: 1195866 - DNA, 25 bp, Homo sapien
catttatcattggtagcataaggag

SEQ ID NO: 1195867 - DNA, 25 bp, Homo sapien
aggccttgggtagcagccatcagct

SEQ ID NO: 1195868 - DNA, 25 bp, Homo sapien
caaggccttgggtagcagccatcag

SEQ ID NO: 1195869 - DNA, 25 bp, Homo sapien
catgatgtttcggagcaaggccttg

SEQ ID NO: 1195870 - DNA, 25 bp, Homo sapien
gagcaaggccttgggtagcagccat

SEQ ID NO: 1195871 - DNA, 25 bp, Homo sapien
tcctttaattcaaaggctgtccaat

SEQ ID NO: 1195872 - DNA, 25 bp, Homo sapien
ctttaattcaaaggctgtccaatca

SEQ ID NO: 1195873 - DNA, 25 bp, Homo sapien
aattcaaaggctgtccaatcacaaa

SEQ ID NO: 1195874 - DNA, 25 bp, Homo sapien
ttaattcaaaggctgtccaatcaca

SEQ ID NO: 1195875 - DNA, 25 bp, Homo sapien
tgtttactgatgcacagcccctcgc

SEQ ID NO: 1195876 - DNA, 25 bp, Homo sapien
ccatgcagggagctttgtttactga

SEQ ID NO: 1195877 - DNA, 25 bp, Homo sapien
tttactgatgcacagcccctcgctg

SEQ ID NO: 1195878 - DNA, 25 bp, Homo sapien
gttttagcctctcgctccagacctc

SEQ ID NO: 1195879 - DNA, 25 bp, Homo sapien
ctggactggtatctcgatgcttgtc

SEQ ID NO: 1195880 - DNA, 25 bp, Homo sapien
aagaaagcctcggttggaggactgc

SEQ ID NO: 1195881 - DNA, 25 bp, Homo sapien
tctcgatgcttgtctagcgatgaag

SEQ ID NO: 1195882 - DNA, 25 bp, Homo sapien
ttgtctagcgatgaagatgttctgg

SEQ ID NO: 1195883 - DNA, 25 bp, Homo sapien
gatccaggtctcactcgctgggttc

SEQ ID NO: 1195884 - DNA, 25 bp, Homo sapien
ttcgccattgtaggctccctttcct

SEQ ID NO: 1195885 - DNA, 25 bp, Homo sapien
gtgtttggaagtttcctggatccag

SEQ ID NO: 1195886 - DNA, 25 bp, Homo sapien
ttcctggatccaggtctcactcgct

SEQ ID NO: 1195887 - DNA, 25 bp, Homo sapien
tccaggttaagcgctgtttccacat

SEQ ID NO: 1195888 - DNA, 25 bp, Homo sapien
ttccaggttaagcgctgtttccaca

SEQ ID NO: 1195889 - DNA, 25 bp, Homo sapien
gttccaggttaagcgctgtttccac

SEQ ID NO: 1195890 - DNA, 25 bp, Homo sapien
ggttccaggttaagcgctgtttcca

SEQ ID NO: 1195891 - DNA, 25 bp, Homo sapien
acaagaaggataagattcactgggt

SEQ ID NO: 1195892 - DNA, 25 bp, Homo sapien
caagaaggataagattcactgggtt

SEQ ID NO: 1195893 - DNA, 25 bp, Homo sapien
aagaaggataagattcactgggttt

SEQ ID NO: 1195894 - DNA, 25 bp, Homo sapien
ctgctttgtctatccaggcacggta

SEQ ID NO: 1195895 - DNA, 25 bp, Homo sapien
tcacgctcaatctgctgctggcgcc

SEQ ID NO: 1195896 - DNA, 25 bp, Homo sapien
ggtagccattcagctcacgctcaat

SEQ ID NO: 1195897 - DNA, 25 bp, Homo sapien
ccaggcacggtagccattcagctca

SEQ ID NO: 1195898 - DNA, 25 bp, Homo sapien
agcctcctgcagccccccaggccta

SEQ ID NO: 1195899 - DNA, 25 bp, Homo sapien
gcctcctgcagccccccaggcctac

SEQ ID NO: 1195900 - DNA, 25 bp, Homo sapien
cagcctcctgcagccccccaggcct

SEQ ID NO: 1195901 - DNA, 25 bp, Homo sapien
tttaagtatagcctctggcaaaacg

SEQ ID NO: 1195902 - DNA, 25 bp, Homo sapien
tttttaagtatagcctctggcaaaa

SEQ ID NO: 1195903 - DNA, 25 bp, Homo sapien
tcttttttaagtatagcctctggca

SEQ ID NO: 1195904 - DNA, 25 bp, Homo sapien
cttttttaagtatagcctctggcaa

SEQ ID NO: 1195905 - DNA, 25 bp, Homo sapien
tttattttcttcagcgagcatgact

SEQ ID NO: 1195906 - DNA, 25 bp, Homo sapien
ttattttcttcagcgagcatgactt

SEQ ID NO: 1195907 - DNA, 25 bp, Homo sapien
tattttcttcagcgagcatgacttc

SEQ ID NO: 1195908 - DNA, 25 bp, Homo sapien
ttttattttcttcagcgagcatgac

SEQ ID NO: 1195909 - DNA, 25 bp, Homo sapien
catcactggagtctcgagtcatggc

SEQ ID NO: 1195910 - DNA, 25 bp, Homo sapien
gtgctcatcactggagtctcgagtc

SEQ ID NO: 1195911 - DNA, 25 bp, Homo sapien
ctggagtctcgagtcatggcctctg

SEQ ID NO: 1195912 - DNA, 25 bp, Homo sapien
gagatatcaacacagtgctcatcac

SEQ ID NO: 1195913 - DNA, 25 bp, Homo sapien
tggttgtgatggacaatggccacac

SEQ ID NO: 1195914 - DNA, 25 bp, Homo sapien
taaccatgtggcgaatggagatgcg

SEQ ID NO: 1195915 - DNA, 25 bp, Homo sapien
caaggctcagcacaatccagtaaaa

SEQ ID NO: 1195916 - DNA, 25 bp, Homo sapien
gaagcctttccttgtgccggaaata

SEQ ID NO: 1195917 - DNA, 25 bp, Homo sapien
gcagttgaatgaagagtgaaaataa

SEQ ID NO: 1195918 - DNA, 25 bp, Homo sapien
aagcagttgaatgaagagtgaaaat

SEQ ID NO: 1195919 - DNA, 25 bp, Homo sapien
gaggccccatgccatacatcttcag

SEQ ID NO: 1195920 - DNA, 25 bp, Homo sapien
gaaaataaaggcgaggccccatgcc

SEQ ID NO: 1195921 - DNA, 25 bp, Homo sapien
ggtctgaagattgcccagaccactt

SEQ ID NO: 1195922 - DNA, 25 bp, Homo sapien
cggagggctcgcaagacactgattc

SEQ ID NO: 1195923 - DNA, 25 bp, Homo sapien
aatattcttagaagccggagggctc

SEQ ID NO: 1195924 - DNA, 25 bp, Homo sapien
ctgattccaaaagacgtaccaggtc

SEQ ID NO: 1195925 - DNA, 25 bp, Homo sapien
gagagcaaagacaacgatgaagagg

SEQ ID NO: 1195926 - DNA, 25 bp, Homo sapien
gatagacttcattgagctcatcaag

SEQ ID NO: 1195927 - DNA, 25 bp, Homo sapien
caaggagaccaccaaattccgtagg

SEQ ID NO: 1195928 - DNA, 25 bp, Homo sapien
taactgcattcctaggagagcaaag

SEQ ID NO: 1195929 - DNA, 25 bp, Homo sapien
ccaaagagatgggtccccggaatga

SEQ ID NO: 1195930 - DNA, 25 bp, Homo sapien
tacaaagactgtaacagtgactact

SEQ ID NO: 1195931 - DNA, 25 bp, Homo sapien
ctttgaagaatgtgcccacgctgca

SEQ ID NO: 1195932 - DNA, 25 bp, Homo sapien
tactgataaactatgcactttgaag

SEQ ID NO: 1195933 - DNA, 25 bp, Homo sapien
gaaggagtcccatcattaaagttaa

SEQ ID NO: 1195934 - DNA, 25 bp, Homo sapien
tcaaaatttgccgaaggagtcccat

SEQ ID NO: 1195935 - DNA, 25 bp, Homo sapien
tggaacacagtcatgatggctgcag

SEQ ID NO: 1195936 - DNA, 25 bp, Homo sapien
cagggaaggtatcaaaatttgccga

SEQ ID NO: 1195937 - DNA, 25 bp, Homo sapien
cctgggagcggatcccattgtacat

SEQ ID NO: 1195938 - DNA, 25 bp, Homo sapien
gaagtagatggcagaccacatgcct

SEQ ID NO: 1195939 - DNA, 25 bp, Homo sapien
tagatggcagaccacatgcctgagc

SEQ ID NO: 1195940 - DNA, 25 bp, Homo sapien
agttgccaaacaaggtgagcacaat

SEQ ID NO: 1195941 - DNA, 25 bp, Homo sapien
ttgccaaacaaggtgagcacaatga

SEQ ID NO: 1195942 - DNA, 25 bp, Homo sapien
gcgagattatccacagcgatagcca

SEQ ID NO: 1195943 - DNA, 25 bp, Homo sapien
gttggcgagattatccacagcgata

SEQ ID NO: 1195944 - DNA, 25 bp, Homo sapien
tggcgagattatccacagcgatagc

SEQ ID NO: 1195945 - DNA, 25 bp, Homo sapien
gagattatccacagcgatagccaag

SEQ ID NO: 1195946 - DNA, 25 bp, Homo sapien
gttgggtgcagacatcgggctgacc

SEQ ID NO: 1195947 - DNA, 25 bp, Homo sapien
atgtttctggttgaaggcctcttct

SEQ ID NO: 1195948 - DNA, 25 bp, Homo sapien
atcgaaggcatgttgggtgcagaca

SEQ ID NO: 1195949 - DNA, 25 bp, Homo sapien
tcgatcgaaggcatgttgggtgcag

SEQ ID NO: 1195950 - DNA, 25 bp, Homo sapien
gagtttctactctgggccaagcgtt

SEQ ID NO: 1195951 - DNA, 25 bp, Homo sapien
tcacagcacatgtacagcaccaaag

SEQ ID NO: 1195952 - DNA, 25 bp, Homo sapien
gatccctgaagcagtggactcacca

SEQ ID NO: 1195953 - DNA, 25 bp, Homo sapien
taccacaggtccaggctagatccct

SEQ ID NO: 1195954 - DNA, 25 bp, Homo sapien
catacacctgggcagagtacgcaca

SEQ ID NO: 1195955 - DNA, 25 bp, Homo sapien
agggtgcacacgtctttgcagggca

SEQ ID NO: 1195956 - DNA, 25 bp, Homo sapien
ggcacacacatctgtgcagggtaca

SEQ ID NO: 1195957 - DNA, 25 bp, Homo sapien
acacgagcagggtgcacacgtcttt

SEQ ID NO: 1195958 - DNA, 25 bp, Homo sapien
tgcaatgcaacaaggcacaggtggg

SEQ ID NO: 1195959 - DNA, 25 bp, Homo sapien
gatgtcaaggctacgaagtggtcca

SEQ ID NO: 1195960 - DNA, 25 bp, Homo sapien
tatgaatgagaccttgtgtacgcct

SEQ ID NO: 1195961 - DNA, 25 bp, Homo sapien
gaagcgtacgctttagacaggcagc

SEQ ID NO: 1195962 - DNA, 25 bp, Homo sapien
tcagattcctattttggaaatcctg

SEQ ID NO: 1195963 - DNA, 25 bp, Homo sapien
aaacaccatgcctcacaggcacgca

SEQ ID NO: 1195964 - DNA, 25 bp, Homo sapien
cagaggcacacaggttatgccattt

SEQ ID NO: 1195965 - DNA, 25 bp, Homo sapien
ggcacgcaaacttccacctacacat

SEQ ID NO: 1195966 - DNA, 25 bp, Homo sapien
tccaatggagtgactttcgattcct

SEQ ID NO: 1195967 - DNA, 25 bp, Homo sapien
cttctgtagactccccacattcgat

SEQ ID NO: 1195968 - DNA, 25 bp, Homo sapien
gacagggagtcctctgtgtggccat

SEQ ID NO: 1195969 - DNA, 25 bp, Homo sapien
cagggagtcctctgtgtggccatca

SEQ ID NO: 1195970 - DNA, 25 bp, Homo sapien
aaatggacaggttcagttcacccca

SEQ ID NO: 1195971 - DNA, 25 bp, Homo sapien
atggacaggttcagttcaccccaac

SEQ ID NO: 1195972 - DNA, 25 bp, Homo sapien
aatggacaggttcagttcaccccaa

SEQ ID NO: 1195973 - DNA, 25 bp, Homo sapien
tgcgtggctcccacatcgacatgtg

SEQ ID NO: 1195974 - DNA, 25 bp, Homo sapien
gctcccacatcgacatgtggtgtct

SEQ ID NO: 1195975 - DNA, 25 bp, Homo sapien
ccacatcgacatgtggtgtcttctc

SEQ ID NO: 1195976 - DNA, 25 bp, Homo sapien
cgtggctcccacatcgacatgtggt

SEQ ID NO: 1195977 - DNA, 25 bp, Homo sapien
aacacgcaaactggtacacacatac

SEQ ID NO: 1195978 - DNA, 25 bp, Homo sapien
aaacacgcaaactggtacacacata

SEQ ID NO: 1195979 - DNA, 25 bp, Homo sapien
gccactttgtctatggcaaggacaa

SEQ ID NO: 1195980 - DNA, 25 bp, Homo sapien
tctatggcaaggacaatgacacatt

SEQ ID NO: 1195981 - DNA, 25 bp, Homo sapien
aatgacacattgtcccacgcccaca

SEQ ID NO: 1195982 - DNA, 25 bp, Homo sapien
tgcacacccagtgccactttgtcta

SEQ ID NO: 1195983 - DNA, 25 bp, Homo sapien
tacgtgagaggtatacccaccaaca

SEQ ID NO: 1195984 - DNA, 25 bp, Homo sapien
tgcagagggcatatccacagatcat

SEQ ID NO: 1195985 - DNA, 25 bp, Homo sapien
gctgaggcccacacatagctgtaca

SEQ ID NO: 1195986 - DNA, 25 bp, Homo sapien
tcacaggccagactgaagagcgaaa

SEQ ID NO: 1195987 - DNA, 25 bp, Homo sapien
caaaagtaagagtgctaggagtctc

SEQ ID NO: 1195988 - DNA, 25 bp, Homo sapien
cagagaaggctaagtgcagagacca

SEQ ID NO: 1195989 - DNA, 25 bp, Homo sapien
gagtgccaggcagacttattacaaa

SEQ ID NO: 1195990 - DNA, 25 bp, Homo sapien
tgcgatcgagcatttcagcccaggg

SEQ ID NO: 1195991 - DNA, 25 bp, Homo sapien
caatccctgctttgtagtagctgag

SEQ ID NO: 1195992 - DNA, 25 bp, Homo sapien
tctcaggttacagcccgggataatg

SEQ ID NO: 1195993 - DNA, 25 bp, Homo sapien
tgcttgtacacactcaacggccctt

SEQ ID NO: 1195994 - DNA, 25 bp, Homo sapien
tgagggctgggtaggcatcaaccct

SEQ ID NO: 1195995 - DNA, 25 bp, Homo sapien
acacggacatgtggtgccggcgcct

SEQ ID NO: 1195996 - DNA, 25 bp, Homo sapien
aatggccctgggtcgccgataaagg

SEQ ID NO: 1195997 - DNA, 25 bp, Homo sapien
tggtcggcgcctcctctctgttgag

SEQ ID NO: 1195998 - DNA, 25 bp, Homo sapien
ggacatctgcatgtgcttcctcagc

SEQ ID NO: 1195999 - DNA, 25 bp, Homo sapien
ccttcagtgggcatggcttcatcca

SEQ ID NO: 1196000 - DNA, 25 bp, Homo sapien
tcacagtttccatgacagggcctgg

SEQ ID NO: 1196001 - DNA, 25 bp, Homo sapien
gcctcctgctgagtcgggtcacagt

SEQ ID NO: 1196002 - DNA, 25 bp, Homo sapien
tggttgcccctgagctcatggtcct

SEQ ID NO: 1196003 - DNA, 25 bp, Homo sapien
caggagaggtcaggctcgctctggc

SEQ ID NO: 1196004 - DNA, 25 bp, Homo sapien
tggcgacggtgacgctggtgctctc

SEQ ID NO: 1196005 - DNA, 25 bp, Homo sapien
ccttgtccgtgttggccgtgatgca

SEQ ID NO: 1196006 - DNA, 25 bp, Homo sapien
tctggctgatgacccggcccatgtc

SEQ ID NO: 1196007 - DNA, 25 bp, Homo sapien
ccagccccagatgggataggagttg

SEQ ID NO: 1196008 - DNA, 25 bp, Homo sapien
aggggaacagggactgtgctctcac

SEQ ID NO: 1196009 - DNA, 25 bp, Homo sapien
ccccagccccagatgggataggagt

SEQ ID NO: 1196010 - DNA, 25 bp, Homo sapien
ggccccagccccagatgggatagga

SEQ ID NO: 1196011 - DNA, 25 bp, Homo sapien
ctatgaccaagaccaaagactagct

SEQ ID NO: 1196012 - DNA, 25 bp, Homo sapien
gcttccccatccgtcttgttgctaa

SEQ ID NO: 1196013 - DNA, 25 bp, Homo sapien
gaacattgagctgtggggcaccatg

SEQ ID NO: 1196014 - DNA, 25 bp, Homo sapien
gatgaacattgagctgtggggcacc

SEQ ID NO: 1196015 - DNA, 25 bp, Homo sapien
tgaacattgagctgtggggcaccat

SEQ ID NO: 1196016 - DNA, 25 bp, Homo sapien
atgaacattgagctgtggggcacca

SEQ ID NO: 1196017 - DNA, 25 bp, Homo sapien
acgatgtagtggcaggccctccgga

SEQ ID NO: 1196018 - DNA, 25 bp, Homo sapien
tgttgcgctccgagttggtcaggac

SEQ ID NO: 1196019 - DNA, 25 bp, Homo sapien
ctggctgcaatcaccaggaggatgc

SEQ ID NO: 1196020 - DNA, 25 bp, Homo sapien
tgcaatcaccaggaggatgcacatc

SEQ ID NO: 1196021 - DNA, 25 bp, Homo sapien
ccttgtagtatgttgggctaagaag

SEQ ID NO: 1196022 - DNA, 25 bp, Homo sapien
cagagccttgtagtatgttgggcta

SEQ ID NO: 1196023 - DNA, 25 bp, Homo sapien
ttagacccacatccaagcccatggg

SEQ ID NO: 1196024 - DNA, 25 bp, Homo sapien
catccatgaccctatattagaccca

SEQ ID NO: 1196025 - DNA, 25 bp, Homo sapien
gtgaacacgcccgtgaacacatagt

SEQ ID NO: 1196026 - DNA, 25 bp, Homo sapien
cacgcccgtgaacacatagtcaaaa

SEQ ID NO: 1196027 - DNA, 25 bp, Homo sapien
catctcaaaggtgaacacgcccgtg

SEQ ID NO: 1196028 - DNA, 25 bp, Homo sapien
cgtgaacacatagtcaaaatacctc

SEQ ID NO: 1196029 - DNA, 25 bp, Homo sapien
tcggaagtaggacccatcctgcagg

SEQ ID NO: 1196030 - DNA, 25 bp, Homo sapien
ccacaagtctcggaagtaggaccca

SEQ ID NO: 1196031 - DNA, 25 bp, Homo sapien
caagtctcggaagtaggacccatcc

SEQ ID NO: 1196032 - DNA, 25 bp, Homo sapien
aatgcgccaacgaccaccacaaagt

SEQ ID NO: 1196033 - DNA, 25 bp, Homo sapien
gaggcttcagctccggggccgttaa

SEQ ID NO: 1196034 - DNA, 25 bp, Homo sapien
tcagctccggggccgttaaggcttc

SEQ ID NO: 1196035 - DNA, 25 bp, Homo sapien
gtctgaggaccaacagagaggcttc

SEQ ID NO: 1196036 - DNA, 25 bp, Homo sapien
ctggtctgaggaccaacagagaggc

SEQ ID NO: 1196037 - DNA, 25 bp, Homo sapien
caaatgtgacgaaggccaaaggagg

SEQ ID NO: 1196038 - DNA, 25 bp, Homo sapien
acctgctccatgagcggagaaaggg

SEQ ID NO: 1196039 - DNA, 25 bp, Homo sapien
ccctcagcaaatgtgacgaaggcca

SEQ ID NO: 1196040 - DNA, 25 bp, Homo sapien
gggaacctgctccatgagcggagaa

SEQ ID NO: 1196041 - DNA, 25 bp, Homo sapien
gctctggacatttatagtcagcaaa

SEQ ID NO: 1196042 - DNA, 25 bp, Homo sapien
acagctctggacatttatagtcagc

SEQ ID NO: 1196043 - DNA, 25 bp, Homo sapien
ccagaaagcgggtgttgtcagggca

SEQ ID NO: 1196044 - DNA, 25 bp, Homo sapien
cagcggaataacgaagccctgaacc

SEQ ID NO: 1196045 - DNA, 25 bp, Homo sapien
tgtgcctcatgtgcagatccccaga

SEQ ID NO: 1196046 - DNA, 25 bp, Homo sapien
gcctcatgtgcagatccccagaaat

SEQ ID NO: 1196047 - DNA, 25 bp, Homo sapien
tcatgtgcagatccccagaaatgcc

SEQ ID NO: 1196048 - DNA, 25 bp, Homo sapien
gggaatgtgcctcatgtgcagatcc

SEQ ID NO: 1196049 - DNA, 25 bp, Homo sapien
gattaatgtgcagtcactgcttcct

SEQ ID NO: 1196050 - DNA, 25 bp, Homo sapien
tttgcatgaagcaggacttcgtcca

SEQ ID NO: 1196051 - DNA, 25 bp, Homo sapien
tggtaaatgggtcttctttgcatga

SEQ ID NO: 1196052 - DNA, 25 bp, Homo sapien
gggcactggatgacctgtctggctc

SEQ ID NO: 1196053 - DNA, 25 bp, Homo sapien
gctaagtggtgcataatcctttccc

SEQ ID NO: 1196054 - DNA, 25 bp, Homo sapien
tgcacatggacctcaacgagctcct

SEQ ID NO: 1196055 - DNA, 25 bp, Homo sapien
ccaactggcaggtgtttttgtccaa

SEQ ID NO: 1196056 - DNA, 25 bp, Homo sapien
cacactcccgagagccttttgcaag

SEQ ID NO: 1196057 - DNA, 25 bp, Homo sapien
agtttgccttttgataaattaaatg

SEQ ID NO: 1196058 - DNA, 25 bp, Homo sapien
tttgataaattaaatgaccgccagt

SEQ ID NO: 1196059 - DNA, 25 bp, Homo sapien
cttttgataaattaaatgaccgcca

SEQ ID NO: 1196060 - DNA, 25 bp, Homo sapien
gataaattaaatgaccgccagtcca

SEQ ID NO: 1196061 - DNA, 25 bp, Homo sapien
caggggagaggcccccagggaatca

SEQ ID NO: 1196062 - DNA, 25 bp, Homo sapien
ctgcaggggagaggcccccagggaa

SEQ ID NO: 1196063 - DNA, 25 bp, Homo sapien
aggggagaggcccccagggaatcat

SEQ ID NO: 1196064 - DNA, 25 bp, Homo sapien
tgcaggggagaggcccccagggaat

SEQ ID NO: 1196065 - DNA, 25 bp, Homo sapien
tcttgatgtcccgtcctttgttggt

SEQ ID NO: 1196066 - DNA, 25 bp, Homo sapien
ttagaactcggagcacccgcagaga

SEQ ID NO: 1196067 - DNA, 25 bp, Homo sapien
cagtggccttagaactcggagcacc

SEQ ID NO: 1196068 - DNA, 25 bp, Homo sapien
cttgggcaagcgcttgatggttttc

SEQ ID NO: 1196069 - DNA, 25 bp, Homo sapien
tgatgggaacaaactctgtaaacac

SEQ ID NO: 1196070 - DNA, 25 bp, Homo sapien
ggatttgatgggaacaaactctgta

SEQ ID NO: 1196071 - DNA, 25 bp, Homo sapien
gggatttgatgggaacaaactctgt

SEQ ID NO: 1196072 - DNA, 25 bp, Homo sapien
tgggaacaaactctgtaaacactac

SEQ ID NO: 1196073 - DNA, 25 bp, Homo sapien
gcactctccttgaggcccactgaat

SEQ ID NO: 1196074 - DNA, 25 bp, Homo sapien
ctgataagggtcagggcccaaggca

SEQ ID NO: 1196075 - DNA, 25 bp, Homo sapien
ccctgcaggatcactgacaatactg

SEQ ID NO: 1196076 - DNA, 25 bp, Homo sapien
ttgtctgcactctccttgaggccca

SEQ ID NO: 1196077 - DNA, 25 bp, Homo sapien
cctgctgtgtgaaccctgtgatggt

SEQ ID NO: 1196078 - DNA, 25 bp, Homo sapien
ccctgctgtgtgaaccctgtgatgg

SEQ ID NO: 1196079 - DNA, 25 bp, Homo sapien
tgtccgtgcaataaaagaactttcc

SEQ ID NO: 1196080 - DNA, 25 bp, Homo sapien
cacaatgagtatgttgaagacattc

SEQ ID NO: 1196081 - DNA, 25 bp, Homo sapien
cttgaagagctgaactgcgatgaca

SEQ ID NO: 1196082 - DNA, 25 bp, Homo sapien
tcttcaaggaggtcactacgcagtc

SEQ ID NO: 1196083 - DNA, 25 bp, Homo sapien
tcagcagggcccagataatgttgtc

SEQ ID NO: 1196084 - DNA, 25 bp, Homo sapien
tgttgtcgtagtggaattcatggcg

SEQ ID NO: 1196085 - DNA, 25 bp, Homo sapien
gcagggcccagataatgttgtcgta

SEQ ID NO: 1196086 - DNA, 25 bp, Homo sapien
aattcatggcgcttccattcccggc

SEQ ID NO: 1196087 - DNA, 25 bp, Homo sapien
cacatctacagagtgctgcagaact

SEQ ID NO: 1196088 - DNA, 25 bp, Homo sapien
gactacataaaagatagacatctcc

SEQ ID NO: 1196089 - DNA, 25 bp, Homo sapien
catctccatgcggttgctgcggctt

SEQ ID NO: 1196090 - DNA, 25 bp, Homo sapien
gaccacaaagtagactacataaaag

SEQ ID NO: 1196091 - DNA, 25 bp, Homo sapien
ccccactttagaccaattgtcatta

SEQ ID NO: 1196092 - DNA, 25 bp, Homo sapien
cccactttagaccaattgtcattac

SEQ ID NO: 1196093 - DNA, 25 bp, Homo sapien
caacagtattcaaggcgatcatggc

SEQ ID NO: 1196094 - DNA, 25 bp, Homo sapien
caaagtgccacacgcggtactggaa

SEQ ID NO: 1196095 - DNA, 25 bp, Homo sapien
cataatggtgtactcaaaggacgga

SEQ ID NO: 1196096 - DNA, 25 bp, Homo sapien
tgtgtctgttctgcggcatgtagcg

SEQ ID NO: 1196097 - DNA, 25 bp, Homo sapien
gctcagtcggctcttgtgcctctct

SEQ ID NO: 1196098 - DNA, 25 bp, Homo sapien
tcgctggggctcagtcggctcttgt

SEQ ID NO: 1196099 - DNA, 25 bp, Homo sapien
ttgccctgggagggaaccatcgctg

SEQ ID NO: 1196100 - DNA, 25 bp, Homo sapien
tgccctgggagggaaccatcgctgg

SEQ ID NO: 1196101 - DNA, 25 bp, Homo sapien
agcgatgaccttcaggacacattcc

SEQ ID NO: 1196102 - DNA, 25 bp, Homo sapien
caaaaagccaaaagcgatgaccttc

SEQ ID NO: 1196103 - DNA, 25 bp, Homo sapien
tgaaggcgatattcaggtacttcag

SEQ ID NO: 1196104 - DNA, 25 bp, Homo sapien
catggtgaaggcgatattcaggtac

SEQ ID NO: 1196105 - DNA, 25 bp, Homo sapien
tcaggataatttctgtgatactgcc

SEQ ID NO: 1196106 - DNA, 25 bp, Homo sapien
cttgctgtctgtcaggataatttct

SEQ ID NO: 1196107 - DNA, 25 bp, Homo sapien
gtcaggataatttctgtgatactgc

SEQ ID NO: 1196108 - DNA, 25 bp, Homo sapien
tattccaggtgtctcggaaatagtt

SEQ ID NO: 1196109 - DNA, 25 bp, Homo sapien
aggagctttatgaggcgggcagctc

SEQ ID NO: 1196110 - DNA, 25 bp, Homo sapien
caaaggtccacagcaaaatgcgtat

SEQ ID NO: 1196111 - DNA, 25 bp, Homo sapien
cagcaaaatgcgtatggtatagccc

SEQ ID NO: 1196112 - DNA, 25 bp, Homo sapien
tagccctgacgcaggagctttatga

SEQ ID NO: 1196113 - DNA, 25 bp, Homo sapien
ttaaaaggcagacataagggagggc

SEQ ID NO: 1196114 - DNA, 25 bp, Homo sapien
aaagcatggcaattaaaaggcagac

SEQ ID NO: 1196115 - DNA, 25 bp, Homo sapien
attaaaaggcagacataagggaggg

SEQ ID NO: 1196116 - DNA, 25 bp, Homo sapien
gaagaaaagcatggcaattaaaagg

SEQ ID NO: 1196117 - DNA, 25 bp, Homo sapien
ctctagcaacaagctcaggtgtctg

SEQ ID NO: 1196118 - DNA, 25 bp, Homo sapien
ccagctcaaagcaagtcatagcaga

SEQ ID NO: 1196119 - DNA, 25 bp, Homo sapien
catgtctctgtggaatggacatggt

SEQ ID NO: 1196120 - DNA, 25 bp, Homo sapien
ggaatggacatggtgctattatcct

SEQ ID NO: 1196121 - DNA, 25 bp, Homo sapien
gaagagagatacagtgacttcacca

SEQ ID NO: 1196122 - DNA, 25 bp, Homo sapien
ttcctgacaccacgtagccacaggg

SEQ ID NO: 1196123 - DNA, 25 bp, Homo sapien
tccgattcttctgcaaaggtccctt

SEQ ID NO: 1196124 - DNA, 25 bp, Homo sapien
tgaaggtctctaaccaacacctcca

SEQ ID NO: 1196125 - DNA, 25 bp, Homo sapien
ggtccaagcataacgtagaacgcaa

SEQ ID NO: 1196126 - DNA, 25 bp, Homo sapien
tagaacgcaagctcttttgaagtca

SEQ ID NO: 1196127 - DNA, 25 bp, Homo sapien
cagagagctgctggatactgtgctt

SEQ ID NO: 1196128 - DNA, 25 bp, Homo sapien
gaataattatcctccactgctctag

SEQ ID NO: 1196129 - DNA, 25 bp, Homo sapien
atgtgtccagcacatgagggttggc

SEQ ID NO: 1196130 - DNA, 25 bp, Homo sapien
tgcatggctcttcccgatgacctac

SEQ ID NO: 1196131 - DNA, 25 bp, Homo sapien
gcacatgagggttggcaaagccact

SEQ ID NO: 1196132 - DNA, 25 bp, Homo sapien
aagccacttgcatggctcttcccga

SEQ ID NO: 1196133 - DNA, 25 bp, Homo sapien
gttgtgccggttgatgtgactctcc

SEQ ID NO: 1196134 - DNA, 25 bp, Homo sapien
gactctcctcgtctaattttatgtt

SEQ ID NO: 1196135 - DNA, 25 bp, Homo sapien
tgactctcctcgtctaattttatgt

SEQ ID NO: 1196136 - DNA, 25 bp, Homo sapien
aagttgttgtgccggttgatgtgac

SEQ ID NO: 1196137 - DNA, 25 bp, Homo sapien
ccacccaagtatttagcagacccaa

SEQ ID NO: 1196138 - DNA, 25 bp, Homo sapien
cccacccaagtatttagcagaccca

SEQ ID NO: 1196139 - DNA, 25 bp, Homo sapien
ccaagtatttagcagacccaaccct

SEQ ID NO: 1196140 - DNA, 25 bp, Homo sapien
cacccaagtatttagcagacccaac

SEQ ID NO: 1196141 - DNA, 25 bp, Homo sapien
gagacattttggttagcaggagcag

SEQ ID NO: 1196142 - DNA, 25 bp, Homo sapien
acattttggttagcaggagcagctc

SEQ ID NO: 1196143 - DNA, 25 bp, Homo sapien
gacattttggttagcaggagcagct

SEQ ID NO: 1196144 - DNA, 25 bp, Homo sapien
aagagacattttggttagcaggagc

SEQ ID NO: 1196145 - DNA, 25 bp, Homo sapien
gatgaaggagacaaagtacacgtag

SEQ ID NO: 1196146 - DNA, 25 bp, Homo sapien
tcgttctcgttctgccctgatggtg

SEQ ID NO: 1196147 - DNA, 25 bp, Homo sapien
ttctccccaaggcatgacagcataa

SEQ ID NO: 1196148 - DNA, 25 bp, Homo sapien
gtacacgtaggccagatcggtgccg

SEQ ID NO: 1196149 - DNA, 25 bp, Homo sapien
tcatattctgcccagacgcggacaa

SEQ ID NO: 1196150 - DNA, 25 bp, Homo sapien
gctgctcggtcatattctgcccaga

SEQ ID NO: 1196151 - DNA, 25 bp, Homo sapien
tggaggagtcccgagtcaggtactc

SEQ ID NO: 1196152 - DNA, 25 bp, Homo sapien
ggacaaactcgtccaagtggtgagg

SEQ ID NO: 1196153 - DNA, 25 bp, Homo sapien
gttctcttgggactgagcccaaata

SEQ ID NO: 1196154 - DNA, 25 bp, Homo sapien
cagtcactgatcatggtggccagat

SEQ ID NO: 1196155 - DNA, 25 bp, Homo sapien
tctgttgagaggaacgagaaagaga

SEQ ID NO: 1196156 - DNA, 25 bp, Homo sapien
aaggagtccactaaccattggcaga

SEQ ID NO: 1196157 - DNA, 25 bp, Homo sapien
cttttcccaggagcccattagagag

SEQ ID NO: 1196158 - DNA, 25 bp, Homo sapien
cccaggagcccattagagagtacca

SEQ ID NO: 1196159 - DNA, 25 bp, Homo sapien
gagcccattagagagtaccagcttc

SEQ ID NO: 1196160 - DNA, 25 bp, Homo sapien
cccttttcccaggagcccattagag

SEQ ID NO: 1196161 - DNA, 25 bp, Homo sapien
aggcccagaggaggcgagatcaccc

SEQ ID NO: 1196162 - DNA, 25 bp, Homo sapien
catatccttatacgggatcctgccg

SEQ ID NO: 1196163 - DNA, 25 bp, Homo sapien
cacccgcactaatttgtacatatcc

SEQ ID NO: 1196164 - DNA, 25 bp, Homo sapien
gtacatatccttatacgggatcctg

SEQ ID NO: 1196165 - DNA, 25 bp, Homo sapien
agatcatggctggggactgggaggc

SEQ ID NO: 1196166 - DNA, 25 bp, Homo sapien
ggcagatcatggctggggactggga

SEQ ID NO: 1196167 - DNA, 25 bp, Homo sapien
atcatggctggggactgggaggcaa

SEQ ID NO: 1196168 - DNA, 25 bp, Homo sapien
catggctggggactgggaggcaaac

SEQ ID NO: 1196169 - DNA, 25 bp, Homo sapien
tgcggctgcgggtttcaccagggtg

SEQ ID NO: 1196170 - DNA, 25 bp, Homo sapien
gctctcccacatgcggctgcgggtt

SEQ ID NO: 1196171 - DNA, 25 bp, Homo sapien
ggctgcgggtttcaccagggtggag

SEQ ID NO: 1196172 - DNA, 25 bp, Homo sapien
ccacatgcggctgcgggtttcacca

SEQ ID NO: 1196173 - DNA, 25 bp, Homo sapien
gagggacatctcttgccgaggccta

SEQ ID NO: 1196174 - DNA, 25 bp, Homo sapien
gagagtcagcatttcatacatctca

SEQ ID NO: 1196175 - DNA, 25 bp, Homo sapien
gaggtgacatgagagtcagcatttc

SEQ ID NO: 1196176 - DNA, 25 bp, Homo sapien
gaggcctagcggaggtgacatgaga

SEQ ID NO: 1196177 - DNA, 25 bp, Homo sapien
accgtcatgtcctcagctactggca

SEQ ID NO: 1196178 - DNA, 25 bp, Homo sapien
gctactggcatgttcatcaggacca

SEQ ID NO: 1196179 - DNA, 25 bp, Homo sapien
ggcaattttaatgtccagagctgtc

SEQ ID NO: 1196180 - DNA, 25 bp, Homo sapien
ctgtccggatcagagccataagtgt

SEQ ID NO: 1196181 - DNA, 25 bp, Homo sapien
gccagatggctagggtctccttttg

SEQ ID NO: 1196182 - DNA, 25 bp, Homo sapien
gataggtgaggccagatggctaggg

SEQ ID NO: 1196183 - DNA, 25 bp, Homo sapien
taggtgaggccagatggctagggtc

SEQ ID NO: 1196184 - DNA, 25 bp, Homo sapien
gaggccagatggctagggtctcctt

SEQ ID NO: 1196185 - DNA, 25 bp, Homo sapien
gcttcttcaccttactctgcttata

SEQ ID NO: 1196186 - DNA, 25 bp, Homo sapien
gatcatcattgctgcatagattttg

SEQ ID NO: 1196187 - DNA, 25 bp, Homo sapien
agattttgcccacagtcaggtcaga

SEQ ID NO: 1196188 - DNA, 25 bp, Homo sapien
ctctgcttatagtagtccatgatca

SEQ ID NO: 1196189 - DNA, 25 bp, Homo sapien
ttagcatgctggcattgactttcac

SEQ ID NO: 1196190 - DNA, 25 bp, Homo sapien
agaattccaatgactacggagtttg

SEQ ID NO: 1196191 - DNA, 25 bp, Homo sapien
tgaaacggggtcctgctggaggtaa

SEQ ID NO: 1196192 - DNA, 25 bp, Homo sapien
ctggaggtaaggcagggctttggca

SEQ ID NO: 1196193 - DNA, 25 bp, Homo sapien
ttagcaatgatctcctgaggcagag

SEQ ID NO: 1196194 - DNA, 25 bp, Homo sapien
ggcagagatgaaggctccatgcgct

SEQ ID NO: 1196195 - DNA, 25 bp, Homo sapien
gagtggactcatcgaagggtatcca

SEQ ID NO: 1196196 - DNA, 25 bp, Homo sapien
tcgaagggtatccactccggccact

SEQ ID NO: 1196197 - DNA, 25 bp, Homo sapien
actcatcgaagggtatccactccgg

SEQ ID NO: 1196198 - DNA, 25 bp, Homo sapien
agagagtggactcatcgaagggtat

SEQ ID NO: 1196199 - DNA, 25 bp, Homo sapien
tcttggaactgtccgtcatcggcgg

SEQ ID NO: 1196200 - DNA, 25 bp, Homo sapien
cggcggggtccatacaagccaactg

SEQ ID NO: 1196201 - DNA, 25 bp, Homo sapien
catcggcggggtccatacaagccaa

SEQ ID NO: 1196202 - DNA, 25 bp, Homo sapien
gtcatcggcggggtccatacaagcc

SEQ ID NO: 1196203 - DNA, 25 bp, Homo sapien
caagcttgtgggacttggttccatc

SEQ ID NO: 1196204 - DNA, 25 bp, Homo sapien
cttgtgggacttggttccatctcat

SEQ ID NO: 1196205 - DNA, 25 bp, Homo sapien
agcttgtgggacttggttccatctc

SEQ ID NO: 1196206 - DNA, 25 bp, Homo sapien
agccaagcttgtgggacttggttcc

SEQ ID NO: 1196207 - DNA, 25 bp, Homo sapien
tgtccgaaggaaggtagatgccatg

SEQ ID NO: 1196208 - DNA, 25 bp, Homo sapien
gggctgcacgctttttaattcacta

SEQ ID NO: 1196209 - DNA, 25 bp, Homo sapien
gtcagacgtggcatagaagatgccc

SEQ ID NO: 1196210 - DNA, 25 bp, Homo sapien
cagatcccgcatgctcctgggtgtc

SEQ ID NO: 1196211 - DNA, 25 bp, Homo sapien
gacctgtgtgtgtaagtaactgcat

SEQ ID NO: 1196212 - DNA, 25 bp, Homo sapien
taacccgtccggagtgaagtatgca

SEQ ID NO: 1196213 - DNA, 25 bp, Homo sapien
ctattagagacgacccatgagccag

SEQ ID NO: 1196214 - DNA, 25 bp, Homo sapien
tgaaaacaccggagaagcaggctct

SEQ ID NO: 1196215 - DNA, 25 bp, Homo sapien
caaggcaaagccatgcggaatgcag

SEQ ID NO: 1196216 - DNA, 25 bp, Homo sapien
ttttcttctgtagctgagtgtacca

SEQ ID NO: 1196217 - DNA, 25 bp, Homo sapien
tgttaatatagtcactggaaatggt

SEQ ID NO: 1196218 - DNA, 25 bp, Homo sapien
ggaactgtgcaagctcccatagagc

SEQ ID NO: 1196219 - DNA, 25 bp, Homo sapien
ctggaaatacaagcccccagagaaa

SEQ ID NO: 1196220 - DNA, 25 bp, Homo sapien
cacaaggtatggattaacgattgaa

SEQ ID NO: 1196221 - DNA, 25 bp, Homo sapien
gagaaacacaaggtatggattaacg

SEQ ID NO: 1196222 - DNA, 25 bp, Homo sapien
ggtatggattaacgattgaaaagat

SEQ ID NO: 1196223 - DNA, 25 bp, Homo sapien
tgaacgtctcatggagctagggtct

SEQ ID NO: 1196224 - DNA, 25 bp, Homo sapien
tccaaccacgaggaatttgaacgct

SEQ ID NO: 1196225 - DNA, 25 bp, Homo sapien
cagccgcaaggaggagtggtaactc

SEQ ID NO: 1196226 - DNA, 25 bp, Homo sapien
tttgaacgcttatcccgaatagtgg

SEQ ID NO: 1196227 - DNA, 25 bp, Homo sapien
gaaagagctggacactgaagacctc

SEQ ID NO: 1196228 - DNA, 25 bp, Homo sapien
aaagagctggacactgaagacctcc

SEQ ID NO: 1196229 - DNA, 25 bp, Homo sapien
tgatgaaagagctggacactgaaga

SEQ ID NO: 1196230 - DNA, 25 bp, Homo sapien
cccctgagcggtgagtgtcagactt

SEQ ID NO: 1196231 - DNA, 25 bp, Homo sapien
gggtccctcgctcttctgaattgca

SEQ ID NO: 1196232 - DNA, 25 bp, Homo sapien
gtgacctggattgacggcgctctgg

SEQ ID NO: 1196233 - DNA, 25 bp, Homo sapien
gctttcgctcttttgatcgtccccg

SEQ ID NO: 1196234 - DNA, 25 bp, Homo sapien
ctgtctgttgggcgtctgtgacctg

SEQ ID NO: 1196235 - DNA, 25 bp, Homo sapien
gtctgttgggcgtctgtgacctgcc

SEQ ID NO: 1196236 - DNA, 25 bp, Homo sapien
tctgttgggcgtctgtgacctgccc

SEQ ID NO: 1196237 - DNA, 25 bp, Homo sapien
tgttgggcgtctgtgacctgccctc

SEQ ID NO: 1196238 - DNA, 25 bp, Homo sapien
tagccacggctgcttcgaaagtgag

SEQ ID NO: 1196239 - DNA, 25 bp, Homo sapien
ccgcgtgtcgaatcagggagctgta

SEQ ID NO: 1196240 - DNA, 25 bp, Homo sapien
gaagactcggtcaggcaagcattgt

SEQ ID NO: 1196241 - DNA, 25 bp, Homo sapien
cacttagcaggttgttgacagcccc

SEQ ID NO: 1196242 - DNA, 25 bp, Homo sapien
taatctcttaggtggcccctgctac

SEQ ID NO: 1196243 - DNA, 25 bp, Homo sapien
tctccatgtgagagaagagcatgca

SEQ ID NO: 1196244 - DNA, 25 bp, Homo sapien
tccccagttaagagccagaaagtct

SEQ ID NO: 1196245 - DNA, 25 bp, Homo sapien
gctggtgtggccgtagcactgttac

SEQ ID NO: 1196246 - DNA, 25 bp, Homo sapien
cacagcactggccttgctgcctcat

SEQ ID NO: 1196247 - DNA, 25 bp, Homo sapien
gcacagcactggccttgctgcctca

SEQ ID NO: 1196248 - DNA, 25 bp, Homo sapien
catcctgtatgatgaggccccactg

SEQ ID NO: 1196249 - DNA, 25 bp, Homo sapien
tgttcaaggtgaacagggccccagt

SEQ ID NO: 1196250 - DNA, 25 bp, Homo sapien
ggagcagcccaagtctaagctgagg

SEQ ID NO: 1196251 - DNA, 25 bp, Homo sapien
gctgcagaatctgcggtcccaacgg

SEQ ID NO: 1196252 - DNA, 25 bp, Homo sapien
gataaagccagtgatgtgtcccctc

SEQ ID NO: 1196253 - DNA, 25 bp, Homo sapien
ccaatggagctgtatgccatatacc

SEQ ID NO: 1196254 - DNA, 25 bp, Homo sapien
tgtcccctccaatggagctgtatgc

SEQ ID NO: 1196255 - DNA, 25 bp, Homo sapien
gaaagggctctcttgctcagtgctt

SEQ ID NO: 1196256 - DNA, 25 bp, Homo sapien
tgctgtgatggcactaaggaggaac

SEQ ID NO: 1196257 - DNA, 25 bp, Homo sapien
tcagtgcagggcagatcaggatcct

SEQ ID NO: 1196258 - DNA, 25 bp, Homo sapien
cagaatggtcgtcctgttgtaggcc

SEQ ID NO: 1196259 - DNA, 25 bp, Homo sapien
tccattagtatcagaagagaaggcg

SEQ ID NO: 1196260 - DNA, 25 bp, Homo sapien
tacaaggcccagtatcagcgtctta

SEQ ID NO: 1196261 - DNA, 25 bp, Homo sapien
tcaggtgaccgcatctgcagtgctt

SEQ ID NO: 1196262 - DNA, 25 bp, Homo sapien
gaaatggcataaggtgtcactaaaa

SEQ ID NO: 1196263 - DNA, 25 bp, Homo sapien
tattcaggactcaaatacctgtgtg

SEQ ID NO: 1196264 - DNA, 25 bp, Homo sapien
tggtaatagaaaacccaggtggtca

SEQ ID NO: 1196265 - DNA, 25 bp, Homo sapien
aaagaataggtgttggggtctacag

SEQ ID NO: 1196266 - DNA, 25 bp, Homo sapien
gcctcttttcaagggaggcagactc

SEQ ID NO: 1196267 - DNA, 25 bp, Homo sapien
tctacaggggcctcttttcaaggga

SEQ ID NO: 1196268 - DNA, 25 bp, Homo sapien
caggggcctcttttcaagggaggca

SEQ ID NO: 1196269 - DNA, 25 bp, Homo sapien
ggtgaagacgagtcatatattagca

SEQ ID NO: 1196270 - DNA, 25 bp, Homo sapien
tggtatatctgaaacactggttgta

SEQ ID NO: 1196271 - DNA, 25 bp, Homo sapien
ccagtgcccaaatttgatcttgtgg

SEQ ID NO: 1196272 - DNA, 25 bp, Homo sapien
tttgcatggaatttctcagatgctg

SEQ ID NO: 1196273 - DNA, 25 bp, Homo sapien
actaaatgcaaacctacttagaaca

SEQ ID NO: 1196274 - DNA, 25 bp, Homo sapien
taaatgcaaacctacttagaacatc

SEQ ID NO: 1196275 - DNA, 25 bp, Homo sapien
gtaactaaatgcaaacctacttaga

SEQ ID NO: 1196276 - DNA, 25 bp, Homo sapien
aatgcaaacctacttagaacatctc

SEQ ID NO: 1196277 - DNA, 25 bp, Homo sapien
gatggggagacagacacagagaaag

SEQ ID NO: 1196278 - DNA, 25 bp, Homo sapien
agatggggagacagacacagagaaa

SEQ ID NO: 1196279 - DNA, 25 bp, Homo sapien
ggagatggggagacagacacagaga

SEQ ID NO: 1196280 - DNA, 25 bp, Homo sapien
ctaggagatggggagacagacacag

SEQ ID NO: 1196281 - DNA, 25 bp, Homo sapien
cctgtccagaggtcgctggcactct

SEQ ID NO: 1196282 - DNA, 25 bp, Homo sapien
tgcccctgtccagaggtcgctggca

SEQ ID NO: 1196283 - DNA, 25 bp, Homo sapien
cctgcccctgtccagaggtcgctgg

SEQ ID NO: 1196284 - DNA, 25 bp, Homo sapien
ccagaggtcgctggcactctgtcct

SEQ ID NO: 1196285 - DNA, 25 bp, Homo sapien
caaggggatgctagctggtgccagc

SEQ ID NO: 1196286 - DNA, 25 bp, Homo sapien
ccagcccttcacggggcaggaaatt

SEQ ID NO: 1196287 - DNA, 25 bp, Homo sapien
cactgacaattgtgttcatgactca

SEQ ID NO: 1196288 - DNA, 25 bp, Homo sapien
agagacccccactgacaattgtgtt

SEQ ID NO: 1196289 - DNA, 25 bp, Homo sapien
tgtggccccagagtcaagagaggtc

SEQ ID NO: 1196290 - DNA, 25 bp, Homo sapien
cagttgtcttgcgaggagcaccagg

SEQ ID NO: 1196291 - DNA, 25 bp, Homo sapien
tataaatgagccgagaaatatccct

SEQ ID NO: 1196292 - DNA, 25 bp, Homo sapien
ggatcagcgctaacatgcagcaaaa

SEQ ID NO: 1196293 - DNA, 25 bp, Homo sapien
ctcctggacggtgcccattgctctg

SEQ ID NO: 1196294 - DNA, 25 bp, Homo sapien
ctggacggtgcccattgctctggga

SEQ ID NO: 1196295 - DNA, 25 bp, Homo sapien
tggacggtgcccattgctctgggat

SEQ ID NO: 1196296 - DNA, 25 bp, Homo sapien
tcctggacggtgcccattgctctgg

SEQ ID NO: 1196297 - DNA, 25 bp, Homo sapien
caaaacaccataggtctgcagccga

SEQ ID NO: 1196298 - DNA, 25 bp, Homo sapien
tctatgtactctgactgggtgggct

SEQ ID NO: 1196299 - DNA, 25 bp, Homo sapien
taacttacagcatgcggagagaggg

SEQ ID NO: 1196300 - DNA, 25 bp, Homo sapien
gaaaaagatggcctccggaaagcaa

SEQ ID NO: 1196301 - DNA, 25 bp, Homo sapien
tggactgccctctaatatcacgaag

SEQ ID NO: 1196302 - DNA, 25 bp, Homo sapien
tatttgaggctagaaccggtgcacc

SEQ ID NO: 1196303 - DNA, 25 bp, Homo sapien
tcataaagattgtcttcgagccgct

SEQ ID NO: 1196304 - DNA, 25 bp, Homo sapien
tcagtttgagcggagttggactgcc

SEQ ID NO: 1196305 - DNA, 25 bp, Homo sapien
cctggtcaacatgcagtgctgaact

SEQ ID NO: 1196306 - DNA, 25 bp, Homo sapien
tattataggatatccgcctggtcaa

SEQ ID NO: 1196307 - DNA, 25 bp, Homo sapien
actgtggctttaggagagatgcacc

SEQ ID NO: 1196308 - DNA, 25 bp, Homo sapien
gatgcaccgatactctgggtgggcc

SEQ ID NO: 1196309 - DNA, 25 bp, Homo sapien
tgagcagaccccaactaagtgcagc

SEQ ID NO: 1196310 - DNA, 25 bp, Homo sapien
catgatttccctttctggtagcagc

SEQ ID NO: 1196311 - DNA, 25 bp, Homo sapien
cctgactggtctgagcagaccccaa

SEQ ID NO: 1196312 - DNA, 25 bp, Homo sapien
gggtaacacatacgagctaccacac

SEQ ID NO: 1196313 - DNA, 25 bp, Homo sapien
taactccaatggtgatagaagccac

SEQ ID NO: 1196314 - DNA, 25 bp, Homo sapien
tagacctccctgagagatgaccaca

SEQ ID NO: 1196315 - DNA, 25 bp, Homo sapien
gaagcagacagttctcggagtggca

SEQ ID NO: 1196316 - DNA, 25 bp, Homo sapien
tggcaaatcaaatggaggcctgggc

SEQ ID NO: 1196317 - DNA, 25 bp, Homo sapien
ctggaaagtttcctaggtgcggaca

SEQ ID NO: 1196318 - DNA, 25 bp, Homo sapien
acttgccttcatcgtgacacacttg

SEQ ID NO: 1196319 - DNA, 25 bp, Homo sapien
ggtgcggacaacctctctttgtcgt

SEQ ID NO: 1196320 - DNA, 25 bp, Homo sapien
ggtcactggagaggatttcagcaaa

SEQ ID NO: 1196321 - DNA, 25 bp, Homo sapien
aaagacctcgtactcagaacctcca

SEQ ID NO: 1196322 - DNA, 25 bp, Homo sapien
ttagagagtaataaacatcccaggt

SEQ ID NO: 1196323 - DNA, 25 bp, Homo sapien
cccaggtttggtgtgagtcagcaga

SEQ ID NO: 1196324 - DNA, 25 bp, Homo sapien
gaggacccaaagcaggaccaaagac

SEQ ID NO: 1196325 - DNA, 25 bp, Homo sapien
ggcagaacccctgagcaaaggacat

SEQ ID NO: 1196326 - DNA, 25 bp, Homo sapien
cgccctagggcaactctgagtgtat

SEQ ID NO: 1196327 - DNA, 25 bp, Homo sapien
ttttaatagcccagccgatcttccg

SEQ ID NO: 1196328 - DNA, 25 bp, Homo sapien
caaggccctgggaagtgatccatct

SEQ ID NO: 1196329 - DNA, 25 bp, Homo sapien
tagtaagtctatcgagttgctggga

SEQ ID NO: 1196330 - DNA, 25 bp, Homo sapien
actgtgcagcactctgaacttttgg

SEQ ID NO: 1196331 - DNA, 25 bp, Homo sapien
taaaagtccattgctcacactgtgc

SEQ ID NO: 1196332 - DNA, 25 bp, Homo sapien
tctgtgttgggcctataaaagtcca

SEQ ID NO: 1196333 - DNA, 25 bp, Homo sapien
ggagggtagccagtactcctcctga

SEQ ID NO: 1196334 - DNA, 25 bp, Homo sapien
gtgtcctgggcatcatctgactgcc

SEQ ID NO: 1196335 - DNA, 25 bp, Homo sapien
gcaaggagggtagccagtactcctc

SEQ ID NO: 1196336 - DNA, 25 bp, Homo sapien
gggcatcatctgactgccttgctac

SEQ ID NO: 1196337 - DNA, 25 bp, Homo sapien
cagattattcttatgtacagcaggg

SEQ ID NO: 1196338 - DNA, 25 bp, Homo sapien
tgtagcctgagcttaactgatcctc

SEQ ID NO: 1196339 - DNA, 25 bp, Homo sapien
tacagcagggttgatgcaatgtaca

SEQ ID NO: 1196340 - DNA, 25 bp, Homo sapien
gagcaaaccagactatgagatacag

SEQ ID NO: 1196341 - DNA, 25 bp, Homo sapien
tggatggatgtgcagggaaccacca

SEQ ID NO: 1196342 - DNA, 25 bp, Homo sapien
gaagaagggacaacaattgagtcac

SEQ ID NO: 1196343 - DNA, 25 bp, Homo sapien
gaaggactcctgaaaatactgcctg

SEQ ID NO: 1196344 - DNA, 25 bp, Homo sapien
cacaggcctcaatgtcacgaaggac

SEQ ID NO: 1196345 - DNA, 25 bp, Homo sapien
gggtgccctctatccctgagttcct

SEQ ID NO: 1196346 - DNA, 25 bp, Homo sapien
agtcatcatgcatggttccatgaga

SEQ ID NO: 1196347 - DNA, 25 bp, Homo sapien
tcttcccctgcactaggggctggga

SEQ ID NO: 1196348 - DNA, 25 bp, Homo sapien
gcatggttccatgagagattccaag

SEQ ID NO: 1196349 - DNA, 25 bp, Homo sapien
tgggaccctgtgtccgctctgagag

SEQ ID NO: 1196350 - DNA, 25 bp, Homo sapien
ctggtgccagtagcggccacactgc

SEQ ID NO: 1196351 - DNA, 25 bp, Homo sapien
tctcttggtccttgtccttcatgtc

SEQ ID NO: 1196352 - DNA, 25 bp, Homo sapien
tctgaggtcctcaaagacacgggct

SEQ ID NO: 1196353 - DNA, 25 bp, Homo sapien
tttaccaaaaggcattgacgactcg

SEQ ID NO: 1196354 - DNA, 25 bp, Homo sapien
gaagagctgcgacttgtttaccaaa

SEQ ID NO: 1196355 - DNA, 25 bp, Homo sapien
cagttcctaccccatgaaagggcat

SEQ ID NO: 1196356 - DNA, 25 bp, Homo sapien
cccatgaggatgagccaagacggaa

SEQ ID NO: 1196357 - DNA, 25 bp, Homo sapien
aggagcaccaccgactccggaacag

SEQ ID NO: 1196358 - DNA, 25 bp, Homo sapien
caccgactccggaacagacttgtaa

SEQ ID NO: 1196359 - DNA, 25 bp, Homo sapien
gcaccaccgactccggaacagactt

SEQ ID NO: 1196360 - DNA, 25 bp, Homo sapien
ggagcaccaccgactccggaacaga

SEQ ID NO: 1196361 - DNA, 25 bp, Homo sapien
gcccactggctctgcggattccaga

SEQ ID NO: 1196362 - DNA, 25 bp, Homo sapien
ttacagccaacgatgctagccatgg

SEQ ID NO: 1196363 - DNA, 25 bp, Homo sapien
cacagagatgctagggaagcggcca

SEQ ID NO: 1196364 - DNA, 25 bp, Homo sapien
tctcagggctcctgtcacagagatg

SEQ ID NO: 1196365 - DNA, 25 bp, Homo sapien
gaagctcagccgagctctagggcag

SEQ ID NO: 1196366 - DNA, 25 bp, Homo sapien
ctctagggcagatgttaaggaaagg

SEQ ID NO: 1196367 - DNA, 25 bp, Homo sapien
cagggaagctcagccgagctctagg

SEQ ID NO: 1196368 - DNA, 25 bp, Homo sapien
cagccgagctctagggcagatgtta

SEQ ID NO: 1196369 - DNA, 25 bp, Homo sapien
gatggcatgggttctgctaggtggc

SEQ ID NO: 1196370 - DNA, 25 bp, Homo sapien
ttctctcgcagatgccctggatggc

SEQ ID NO: 1196371 - DNA, 25 bp, Homo sapien
tctggaatccacagcgctagtgggc

SEQ ID NO: 1196372 - DNA, 25 bp, Homo sapien
ggcaggatccgtctcacacattcca

SEQ ID NO: 1196373 - DNA, 25 bp, Homo sapien
ccaggactagatggagcaggaaacc

SEQ ID NO: 1196374 - DNA, 25 bp, Homo sapien
tttcagtcatgtcagccagtgccca

SEQ ID NO: 1196375 - DNA, 25 bp, Homo sapien
tggacatggtcatgctcagcaggcc

SEQ ID NO: 1196376 - DNA, 25 bp, Homo sapien
tacagggagcacaggccttaaagga

SEQ ID NO: 1196377 - DNA, 25 bp, Homo sapien
ctgatcattccccagagaccacatt

SEQ ID NO: 1196378 - DNA, 25 bp, Homo sapien
cccaaaattggagctgacaagttct

SEQ ID NO: 1196379 - DNA, 25 bp, Homo sapien
tcatcgctgcatgaggagtccctgc

SEQ ID NO: 1196380 - DNA, 25 bp, Homo sapien
aaggattggataataggcttctggc

SEQ ID NO: 1196381 - DNA, 25 bp, Homo sapien
acagggtttacctcgaatgcatgcc

SEQ ID NO: 1196382 - DNA, 25 bp, Homo sapien
ggctcttgcccgctcaactgtgaga

SEQ ID NO: 1196383 - DNA, 25 bp, Homo sapien
aatcccacagggtttacctcgaatg

SEQ ID NO: 1196384 - DNA, 25 bp, Homo sapien
aactgtgagatgcaggacaagccct

SEQ ID NO: 1196385 - DNA, 25 bp, Homo sapien
atttctgtctgccataaagagcaca

SEQ ID NO: 1196386 - DNA, 25 bp, Homo sapien
gtgttatattcacccagtagcctgg

SEQ ID NO: 1196387 - DNA, 25 bp, Homo sapien
gagtttaaaacactctgacttgtca

SEQ ID NO: 1196388 - DNA, 25 bp, Homo sapien
gagcacatcaagaacctaaatttct

SEQ ID NO: 1196389 - DNA, 25 bp, Homo sapien
gctggcatacaaagccccacgctgg

SEQ ID NO: 1196390 - DNA, 25 bp, Homo sapien
ttcctctggcttgtttgcctgagtg

SEQ ID NO: 1196391 - DNA, 25 bp, Homo sapien
ctctggcttgtttgcctgagtgata

SEQ ID NO: 1196392 - DNA, 25 bp, Homo sapien
ttgctggcatacaaagccccacgct

SEQ ID NO: 1196393 - DNA, 25 bp, Homo sapien
cactgtggccttaataaacagaggg

SEQ ID NO: 1196394 - DNA, 25 bp, Homo sapien
gaaaattgccctgctagcacagata

SEQ ID NO: 1196395 - DNA, 25 bp, Homo sapien
caggtatccactgttaaggtagagg

SEQ ID NO: 1196396 - DNA, 25 bp, Homo sapien
cctgggtacaagtcagcagaggcac

SEQ ID NO: 1196397 - DNA, 25 bp, Homo sapien
gtcaatctggcatggaagcaaaagc

SEQ ID NO: 1196398 - DNA, 25 bp, Homo sapien
ctgaggcacggtattgagagaagca

SEQ ID NO: 1196399 - DNA, 25 bp, Homo sapien
gcaaagggttctactctgaggcacg

SEQ ID NO: 1196400 - DNA, 25 bp, Homo sapien
catacctatatgtggcgtcagcaga

SEQ ID NO: 1196401 - DNA, 25 bp, Homo sapien
catccctctgcaagattcctggagc

SEQ ID NO: 1196402 - DNA, 25 bp, Homo sapien
cagggttgggttctacagcctgaga

SEQ ID NO: 1196403 - DNA, 25 bp, Homo sapien
cctagggttcctgcttgtttagaga

SEQ ID NO: 1196404 - DNA, 25 bp, Homo sapien
tttctaagatacagcatcccagcct

SEQ ID NO: 1196405 - DNA, 25 bp, Homo sapien
ctcaaacctgcagggccaccgctga

SEQ ID NO: 1196406 - DNA, 25 bp, Homo sapien
acggactctactctagcgccctctg

SEQ ID NO: 1196407 - DNA, 25 bp, Homo sapien
cgctgaagttctcccacggactcta

SEQ ID NO: 1196408 - DNA, 25 bp, Homo sapien
tcaaatccatcctccgggaaggtgc

SEQ ID NO: 1196409 - DNA, 25 bp, Homo sapien
gcagaacatcccaccctggtgcctt

SEQ ID NO: 1196410 - DNA, 25 bp, Homo sapien
catctgggtttccaggtagggctgg

SEQ ID NO: 1196411 - DNA, 25 bp, Homo sapien
cagaaatctataggggcagaacatc

SEQ ID NO: 1196412 - DNA, 25 bp, Homo sapien
aggtaggaaagttggtgcctgccac

SEQ ID NO: 1196413 - DNA, 25 bp, Homo sapien
atggccaaactagaggccatgagga

SEQ ID NO: 1196414 - DNA, 25 bp, Homo sapien
ccgtgagggccagtctcaagaagct

SEQ ID NO: 1196415 - DNA, 25 bp, Homo sapien
gccgtgagggccagtctcaagaagc

SEQ ID NO: 1196416 - DNA, 25 bp, Homo sapien
gaaagactgaatggccaaactagag

SEQ ID NO: 1196417 - DNA, 25 bp, Homo sapien
ctgtgtacttgtagcattgagtggc

SEQ ID NO: 1196418 - DNA, 25 bp, Homo sapien
caaggactgtccctctgtgtacttg

SEQ ID NO: 1196419 - DNA, 25 bp, Homo sapien
gtccctctgtgtacttgtagcattg

SEQ ID NO: 1196420 - DNA, 25 bp, Homo sapien
gactgtccctctgtgtacttgtagc

SEQ ID NO: 1196421 - DNA, 25 bp, Homo sapien
cattggccatttgcctgtctcctgc

SEQ ID NO: 1196422 - DNA, 25 bp, Homo sapien
tcttgtcctgctgctgctgccctcc

SEQ ID NO: 1196423 - DNA, 25 bp, Homo sapien
ttgtcctgctgctgctgccctcccc

SEQ ID NO: 1196424 - DNA, 25 bp, Homo sapien
ctcttgtcctgctgctgctgccctc

SEQ ID NO: 1196425 - DNA, 25 bp, Homo sapien
gtcctgctgctgctgccctccccag

SEQ ID NO: 1196426 - DNA, 25 bp, Homo sapien
gcaggtctccaggaatgaatgcttc

SEQ ID NO: 1196427 - DNA, 25 bp, Homo sapien
catcggcagggactgggcaccacat

SEQ ID NO: 1196428 - DNA, 25 bp, Homo sapien
gcccagtggcatccactccagcagg

SEQ ID NO: 1196429 - DNA, 25 bp, Homo sapien
ggcatccggcccagtggcatccact

SEQ ID NO: 1196430 - DNA, 25 bp, Homo sapien
gatacaaatggcaagtttatgaggg

SEQ ID NO: 1196431 - DNA, 25 bp, Homo sapien
ttagatacaaatggcaagtttatga

SEQ ID NO: 1196432 - DNA, 25 bp, Homo sapien
ggtgctggggaattgttggttgcca

SEQ ID NO: 1196433 - DNA, 25 bp, Homo sapien
ttgccatgggaaccccgcctgctgc

SEQ ID NO: 1196434 - DNA, 25 bp, Homo sapien
cttagcagaaccctcaagaggagca

SEQ ID NO: 1196435 - DNA, 25 bp, Homo sapien
cacccccttagcagaaccctcaaga

SEQ ID NO: 1196436 - DNA, 25 bp, Homo sapien
ccccttagcagaaccctcaagagga

SEQ ID NO: 1196437 - DNA, 25 bp, Homo sapien
ttccacccccttagcagaaccctca

SEQ ID NO: 1196438 - DNA, 25 bp, Homo sapien
catttctgtgctaccacatcaggct

SEQ ID NO: 1196439 - DNA, 25 bp, Homo sapien
gctgacggtccatattcagtgttcc

SEQ ID NO: 1196440 - DNA, 25 bp, Homo sapien
gccttgcctgtagacccgtggctca

SEQ ID NO: 1196441 - DNA, 25 bp, Homo sapien
ccaagaagggtggactttgctgacg

SEQ ID NO: 1196442 - DNA, 25 bp, Homo sapien
tcaggaataagtttcccttccgatg

SEQ ID NO: 1196443 - DNA, 25 bp, Homo sapien
tggtcctcggagtccccaagaggta

SEQ ID NO: 1196444 - DNA, 25 bp, Homo sapien
tccccaagaggtatttcacgtgtgt

SEQ ID NO: 1196445 - DNA, 25 bp, Homo sapien
agtctcctgcaaattccctcttgat

SEQ ID NO: 1196446 - DNA, 25 bp, Homo sapien
aggtggttccagatgtagggcctct

SEQ ID NO: 1196447 - DNA, 25 bp, Homo sapien
gtggttccagatgtagggcctctga

SEQ ID NO: 1196448 - DNA, 25 bp, Homo sapien
tggttccagatgtagggcctctgat

SEQ ID NO: 1196449 - DNA, 25 bp, Homo sapien
gttccagatgtagggcctctgattt

SEQ ID NO: 1196450 - DNA, 25 bp, Homo sapien
aacctggagcaggaagtcccaacct

SEQ ID NO: 1196451 - DNA, 25 bp, Homo sapien
cctggagcaggaagtcccaacctgt

SEQ ID NO: 1196452 - DNA, 25 bp, Homo sapien
gaacctggagcaggaagtcccaacc

SEQ ID NO: 1196453 - DNA, 25 bp, Homo sapien
ctggagcaggaagtcccaacctgtg

SEQ ID NO: 1196454 - DNA, 25 bp, Homo sapien
ggaaacaagaacaaatctattgtca

SEQ ID NO: 1196455 - DNA, 25 bp, Homo sapien
aagaacaaatctattgtcaggaagc

SEQ ID NO: 1196456 - DNA, 25 bp, Homo sapien
gcaccaggtatcaggaggaaacaag

SEQ ID NO: 1196457 - DNA, 25 bp, Homo sapien
ctgcaccaggtatcaggaggaaaca

SEQ ID NO: 1196458 - DNA, 25 bp, Homo sapien
tttgagaggcgggtactcatgtcct

SEQ ID NO: 1196459 - DNA, 25 bp, Homo sapien
gaggcgggtactcatgtcctctcag

SEQ ID NO: 1196460 - DNA, 25 bp, Homo sapien
tgagaggcgggtactcatgtcctct

SEQ ID NO: 1196461 - DNA, 25 bp, Homo sapien
ctgggagtttgagaggcgggtactc

SEQ ID NO: 1196462 - DNA, 25 bp, Homo sapien
tctgaattgctgaaatgaacgctat

SEQ ID NO: 1196463 - DNA, 25 bp, Homo sapien
tgctgaaatgaacgctatttaggct

SEQ ID NO: 1196464 - DNA, 25 bp, Homo sapien
gacaggtctgaattgctgaaatgaa

SEQ ID NO: 1196465 - DNA, 25 bp, Homo sapien
tgaacgctatttaggctgaactggg

SEQ ID NO: 1196466 - DNA, 25 bp, Homo sapien
atgtctgaagtacccaagccggctc

SEQ ID NO: 1196467 - DNA, 25 bp, Homo sapien
ggctccactccagggtatagactcc

SEQ ID NO: 1196468 - DNA, 25 bp, Homo sapien
cagggtatagactcccaccaccaaa

SEQ ID NO: 1196469 - DNA, 25 bp, Homo sapien
gaggagcccgctgatgtctgaagta

SEQ ID NO: 1196470 - DNA, 25 bp, Homo sapien
caccctcagcctattgtcatggtca

SEQ ID NO: 1196471 - DNA, 25 bp, Homo sapien
acaccctcagcctattgtcatggtc

SEQ ID NO: 1196472 - DNA, 25 bp, Homo sapien
aacaccctcagcctattgtcatggt

SEQ ID NO: 1196473 - DNA, 25 bp, Homo sapien
aggtgcaagatttcccgtgaggcca

SEQ ID NO: 1196474 - DNA, 25 bp, Homo sapien
cctctgtggcagactgctctggctt

SEQ ID NO: 1196475 - DNA, 25 bp, Homo sapien
tcactgcagagtgaaattctggccc

SEQ ID NO: 1196476 - DNA, 25 bp, Homo sapien
gctttgcaggtgcaagatttcccgt

SEQ ID NO: 1196477 - DNA, 25 bp, Homo sapien
tgtggaactggattagtgacataac

SEQ ID NO: 1196478 - DNA, 25 bp, Homo sapien
gaactggattagtgacataactgtg

SEQ ID NO: 1196479 - DNA, 25 bp, Homo sapien
tcttgtggaactggattagtgacat

SEQ ID NO: 1196480 - DNA, 25 bp, Homo sapien
ctgagtcttgtggaactggattagt

SEQ ID NO: 1196481 - DNA, 25 bp, Homo sapien
ccactccacctgcctgttactggct

SEQ ID NO: 1196482 - DNA, 25 bp, Homo sapien
cactccacctgcctgttactggctg

SEQ ID NO: 1196483 - DNA, 25 bp, Homo sapien
gctgatacatctctgaccaaaacaa

SEQ ID NO: 1196484 - DNA, 25 bp, Homo sapien
ggctgatacatctctgaccaaaaca

SEQ ID NO: 1196485 - DNA, 25 bp, Homo sapien
tatgcttggcgttggaaacttcttc

SEQ ID NO: 1196486 - DNA, 25 bp, Homo sapien
attccttatgcttggcgttggaaac

SEQ ID NO: 1196487 - DNA, 25 bp, Homo sapien
tcttccacatcttgtagattcctta

SEQ ID NO: 1196488 - DNA, 25 bp, Homo sapien
ggaaacttctacattgctcagtgct

SEQ ID NO: 1196489 - DNA, 25 bp, Homo sapien
actgtctcttcacaatggcggtctt

SEQ ID NO: 1196490 - DNA, 25 bp, Homo sapien
cacaatggcggtcttaccccttgct

SEQ ID NO: 1196491 - DNA, 25 bp, Homo sapien
ttcacaatggcggtcttaccccttg

SEQ ID NO: 1196492 - DNA, 25 bp, Homo sapien
tctcttcacaatggcggtcttaccc

SEQ ID NO: 1196493 - DNA, 25 bp, Homo sapien
tcctagacttaggtgatccccctac

SEQ ID NO: 1196494 - DNA, 25 bp, Homo sapien
ctcctagacttaggtgatcccccta

SEQ ID NO: 1196495 - DNA, 25 bp, Homo sapien
ctagacttaggtgatccccctactt

SEQ ID NO: 1196496 - DNA, 25 bp, Homo sapien
cctcctagacttaggtgatccccct

SEQ ID NO: 1196497 - DNA, 25 bp, Homo sapien
acaggcttcaggtcatggtattcca

SEQ ID NO: 1196498 - DNA, 25 bp, Homo sapien
ggtttgaactcagctgttgacttct

SEQ ID NO: 1196499 - DNA, 25 bp, Homo sapien
ccttcctctgagagtctctttggag

SEQ ID NO: 1196500 - DNA, 25 bp, Homo sapien
tcccaggtgagtgtctgaagtccca

SEQ ID NO: 1196501 - DNA, 25 bp, Homo sapien
gagtcatgtaaggttagcaatgaga

SEQ ID NO: 1196502 - DNA, 25 bp, Homo sapien
tcacttggaaagtgagtcatgtaag

SEQ ID NO: 1196503 - DNA, 25 bp, Homo sapien
tcatgtaaggttagcaatgagatac

SEQ ID NO: 1196504 - DNA, 25 bp, Homo sapien
gaaagtgagtcatgtaaggttagca

SEQ ID NO: 1196505 - DNA, 25 bp, Homo sapien
ttcacgaattggtgtgccatcctgg

SEQ ID NO: 1196506 - DNA, 25 bp, Homo sapien
acgaattggtgtgccatcctggtga

SEQ ID NO: 1196507 - DNA, 25 bp, Homo sapien
gaattggtgtgccatcctggtgaag

SEQ ID NO: 1196508 - DNA, 25 bp, Homo sapien
aattggtgtgccatcctggtgaagg

SEQ ID NO: 1196509 - DNA, 25 bp, Homo sapien
accaggtcgggaaggagccatttca

SEQ ID NO: 1196510 - DNA, 25 bp, Homo sapien
ggtgcgattcacaaaaagcctcttc

SEQ ID NO: 1196511 - DNA, 25 bp, Homo sapien
tttccggtcaggatcagaggtggct

SEQ ID NO: 1196512 - DNA, 25 bp, Homo sapien
aacagccgtaggtagatgtccagct

SEQ ID NO: 1196513 - DNA, 25 bp, Homo sapien
ctgaagcggatttgaatgttgcacc

SEQ ID NO: 1196514 - DNA, 25 bp, Homo sapien
tgaagcggatttgaatgttgcaccc

SEQ ID NO: 1196515 - DNA, 25 bp, Homo sapien
gaagcggatttgaatgttgcaccca

SEQ ID NO: 1196516 - DNA, 25 bp, Homo sapien
aagcggatttgaatgttgcacccat

SEQ ID NO: 1196517 - DNA, 25 bp, Homo sapien
tgatggcttggggagtagacagtgg

SEQ ID NO: 1196518 - DNA, 25 bp, Homo sapien
ctgggggtgagtgataggcagccag

SEQ ID NO: 1196519 - DNA, 25 bp, Homo sapien
gtagacagtggaattttcccctgaa

SEQ ID NO: 1196520 - DNA, 25 bp, Homo sapien
taggcagccaggaaagtgatggctt

SEQ ID NO: 1196521 - DNA, 25 bp, Homo sapien
cctgaggttgctctttgattgggca

SEQ ID NO: 1196522 - DNA, 25 bp, Homo sapien
gggacctgaggttgctctttgattg

SEQ ID NO: 1196523 - DNA, 25 bp, Homo sapien
gattgggcagttagggtgagtggag

SEQ ID NO: 1196524 - DNA, 25 bp, Homo sapien
aggttgctctttgattgggcagtta

SEQ ID NO: 1196525 - DNA, 25 bp, Homo sapien
agccgggacggaatgtcaggaagtg

SEQ ID NO: 1196526 - DNA, 25 bp, Homo sapien
gacggaatgtcaggaagtgaggggg

SEQ ID NO: 1196527 - DNA, 25 bp, Homo sapien
gggacggaatgtcaggaagtgaggg

SEQ ID NO: 1196528 - DNA, 25 bp, Homo sapien
ccgggacggaatgtcaggaagtgag

SEQ ID NO: 1196529 - DNA, 25 bp, Homo sapien
tatgttattgcattggtcaccctga

SEQ ID NO: 1196530 - DNA, 25 bp, Homo sapien
aagagcagaccccaaacggttacat

SEQ ID NO: 1196531 - DNA, 25 bp, Homo sapien
caagttaagagcagaccccaaacgg

SEQ ID NO: 1196532 - DNA, 25 bp, Homo sapien
cccaaacggttacattacataagct

SEQ ID NO: 1196533 - DNA, 25 bp, Homo sapien
cattacataagctgtggaggttttc

SEQ ID NO: 1196534 - DNA, 25 bp, Homo sapien
tcacagtcccgcatacccaactgct

SEQ ID NO: 1196535 - DNA, 25 bp, Homo sapien
gcatacccaactgcttcagtccttt

SEQ ID NO: 1196536 - DNA, 25 bp, Homo sapien
cagtcctttgttaatccttctttca

SEQ ID NO: 1196537 - DNA, 25 bp, Homo sapien
cattcaactgccgtttatggagcat

SEQ ID NO: 1196538 - DNA, 25 bp, Homo sapien
aatggaaatctaggcctgctaatgg

SEQ ID NO: 1196539 - DNA, 25 bp, Homo sapien
aactggaatggaaatctaggcctgc

SEQ ID NO: 1196540 - DNA, 25 bp, Homo sapien
taacccatgggtagaattctccatc

SEQ ID NO: 1196541 - DNA, 25 bp, Homo sapien
tggaactgttgtaaactaacccatg

SEQ ID NO: 1196542 - DNA, 25 bp, Homo sapien
tctttcccagcctcgggcagcatgc

SEQ ID NO: 1196543 - DNA, 25 bp, Homo sapien
cccagcctcgggcagcatgctagcc

SEQ ID NO: 1196544 - DNA, 25 bp, Homo sapien
gcctcgggcagcatgctagcccgca

SEQ ID NO: 1196545 - DNA, 25 bp, Homo sapien
cagcctcgggcagcatgctagcccg

SEQ ID NO: 1196546 - DNA, 25 bp, Homo sapien
ctgtatctgtaatctctaggggctc

SEQ ID NO: 1196547 - DNA, 25 bp, Homo sapien
gtctgtatctgtaatctctaggggc

SEQ ID NO: 1196548 - DNA, 25 bp, Homo sapien
cagtctgtatctgtaatctctaggg

SEQ ID NO: 1196549 - DNA, 25 bp, Homo sapien
tcagtctgtatctgtaatctctagg

SEQ ID NO: 1196550 - DNA, 25 bp, Homo sapien
agctgaccatcgcaggaatcctgga

SEQ ID NO: 1196551 - DNA, 25 bp, Homo sapien
cagagtatttggtgggcctgagaac

SEQ ID NO: 1196552 - DNA, 25 bp, Homo sapien
tctactggcaggtggtgcaacgacc

SEQ ID NO: 1196553 - DNA, 25 bp, Homo sapien
aggtatcagcatcaaggcagaggaa

SEQ ID NO: 1196554 - DNA, 25 bp, Homo sapien
gacactgtttgccttccgagaatcc

SEQ ID NO: 1196555 - DNA, 25 bp, Homo sapien
tgcctggctctgtactgactcagac

SEQ ID NO: 1196556 - DNA, 25 bp, Homo sapien
cagacccatgggcttgccaaccatg

SEQ ID NO: 1196557 - DNA, 25 bp, Homo sapien
tgccttccgagaatccatgaagccc

SEQ ID NO: 1196558 - DNA, 25 bp, Homo sapien
agagttggctactggctttggatga

SEQ ID NO: 1196559 - DNA, 25 bp, Homo sapien
aagtatgaaagagtgtcctctgtcc

SEQ ID NO: 1196560 - DNA, 25 bp, Homo sapien
aagagaagtatgaaagagtgtcctc

SEQ ID NO: 1196561 - DNA, 25 bp, Homo sapien
ttcagttttagagttggctactggc

SEQ ID NO: 1196562 - DNA, 25 bp, Homo sapien
aatagcatgtcactaaagcaggcct

SEQ ID NO: 1196563 - DNA, 25 bp, Homo sapien
tagagataagagttggctggtcaac

SEQ ID NO: 1196564 - DNA, 25 bp, Homo sapien
gacacacttgtccacataggtttag

SEQ ID NO: 1196565 - DNA, 25 bp, Homo sapien
ttctggttcttgtgttggctgtggc

SEQ ID NO: 1196566 - DNA, 25 bp, Homo sapien
tagctatccggacagagcacgtttg

SEQ ID NO: 1196567 - DNA, 25 bp, Homo sapien
tgatctgggattaggccctcaagac

SEQ ID NO: 1196568 - DNA, 25 bp, Homo sapien
tactctggttaggttaggacttgcc

SEQ ID NO: 1196569 - DNA, 25 bp, Homo sapien
gggtgcacctgtccaataggcgtag

SEQ ID NO: 1196570 - DNA, 25 bp, Homo sapien
agaaagtttcaaatgattagtcttt

SEQ ID NO: 1196571 - DNA, 25 bp, Homo sapien
gagaaagtttcaaatgattagtctt

SEQ ID NO: 1196572 - DNA, 25 bp, Homo sapien
tgtactgcttgtcgggcactgttct

SEQ ID NO: 1196573 - DNA, 25 bp, Homo sapien
gtttcaaatgattagtcttttcaac

SEQ ID NO: 1196574 - DNA, 25 bp, Homo sapien
tggacgtactttaggtgttgacact

SEQ ID NO: 1196575 - DNA, 25 bp, Homo sapien
tacttctgattcacagtgataaata

SEQ ID NO: 1196576 - DNA, 25 bp, Homo sapien
cacttgccttcacattctctcattt

SEQ ID NO: 1196577 - DNA, 25 bp, Homo sapien
tatttgtgacatatgtcatggtgac

SEQ ID NO: 1196578 - DNA, 25 bp, Homo sapien
gcatgagtgctcctcccgcgtgctt

SEQ ID NO: 1196579 - DNA, 25 bp, Homo sapien
ctggtggcttggacccgtcggggct

SEQ ID NO: 1196580 - DNA, 25 bp, Homo sapien
ggcttggacccgtcggggctggcgc

SEQ ID NO: 1196581 - DNA, 25 bp, Homo sapien
cgcgtgcttccgccgctggtggctt

SEQ ID NO: 1196582 - DNA, 25 bp, Homo sapien
tgtgagcagtactgcggcctcctct

SEQ ID NO: 1196583 - DNA, 25 bp, Homo sapien
gagaagagcggagcgtgtgagcagt

SEQ ID NO: 1196584 - DNA, 25 bp, Homo sapien
gcccgggaccgcatcagctgatcgg

SEQ ID NO: 1196585 - DNA, 25 bp, Homo sapien
ctctgcagagtcgagagtgggagaa

SEQ ID NO: 1196586 - DNA, 25 bp, Homo sapien
aaactattccccgtgaaggcggcag

SEQ ID NO: 1196587 - DNA, 25 bp, Homo sapien
tttatttccccagacccaagagagc

SEQ ID NO: 1196588 - DNA, 25 bp, Homo sapien
gaggctccctcgcaacaaaaggcta

SEQ ID NO: 1196589 - DNA, 25 bp, Homo sapien
tggccagcagtatgagacaggtctc

SEQ ID NO: 1196590 - DNA, 25 bp, Homo sapien
gcgtgcccctggtcacatgaatgga

SEQ ID NO: 1196591 - DNA, 25 bp, Homo sapien
gaacactcaccgtggacactactgg

SEQ ID NO: 1196592 - DNA, 25 bp, Homo sapien
aataccataagcctgcagaaccgca

SEQ ID NO: 1196593 - DNA, 25 bp, Homo sapien
tcaagacatctaggaagggaagcag

SEQ ID NO: 1196594 - DNA, 25 bp, Homo sapien
tctccgcagctttcaagaattggct

SEQ ID NO: 1196595 - DNA, 25 bp, Homo sapien
aagtgggtactttacgtgctcacca

SEQ ID NO: 1196596 - DNA, 25 bp, Homo sapien
caagggattgccttttacctgaggg

SEQ ID NO: 1196597 - DNA, 25 bp, Homo sapien
cactaaagtacaggctcctaaaggg

SEQ ID NO: 1196598 - DNA, 25 bp, Homo sapien
gctgtgacctaggtgtaaactctcc

SEQ ID NO: 1196599 - DNA, 25 bp, Homo sapien
tatgtggtccattattaggcagcac

SEQ ID NO: 1196600 - DNA, 25 bp, Homo sapien
gaactacaatctaggctctgcatga

SEQ ID NO: 1196601 - DNA, 25 bp, Homo sapien
cagcattgcttgtatcatgaggaca

SEQ ID NO: 1196602 - DNA, 25 bp, Homo sapien
gacgggacaccacagatagaaggtt

SEQ ID NO: 1196603 - DNA, 25 bp, Homo sapien
aaacatctggtgttctagtgcacac

SEQ ID NO: 1196604 - DNA, 25 bp, Homo sapien
tctttctcagctactgtgggcagtg

SEQ ID NO: 1196605 - DNA, 25 bp, Homo sapien
acaacatgtagctttgatgcctggc

SEQ ID NO: 1196606 - DNA, 25 bp, Homo sapien
cttgtgctgattccccatagaaatg

SEQ ID NO: 1196607 - DNA, 25 bp, Homo sapien
gctgattccccatagaaatgccacc

SEQ ID NO: 1196608 - DNA, 25 bp, Homo sapien
tgccacctgtgagttcctgatgaag

SEQ ID NO: 1196609 - DNA, 25 bp, Homo sapien
gctggtcttccctctcctggagcta

SEQ ID NO: 1196610 - DNA, 25 bp, Homo sapien
tccacttgcacttcagtccatgcaa

SEQ ID NO: 1196611 - DNA, 25 bp, Homo sapien
tcagtccatgcaataatggtgtaat

SEQ ID NO: 1196612 - DNA, 25 bp, Homo sapien
caaccccttgtcctccacttgcact

SEQ ID NO: 1196613 - DNA, 25 bp, Homo sapien
tgtaattgcgatgccaccataactt

SEQ ID NO: 1196614 - DNA, 25 bp, Homo sapien
tgagggttcgctgtcatcaaaagca

SEQ ID NO: 1196615 - DNA, 25 bp, Homo sapien
tggccagttgccagagggcatctac

SEQ ID NO: 1196616 - DNA, 25 bp, Homo sapien
aagtttctcctaagtcccagccgca

SEQ ID NO: 1196617 - DNA, 25 bp, Homo sapien
atcaaaagcaaacgctggccagttg

SEQ ID NO: 1196618 - DNA, 25 bp, Homo sapien
atattagtgttgatctccactctcc

SEQ ID NO: 1196619 - DNA, 25 bp, Homo sapien
aatattagtgttgatctccactctc

SEQ ID NO: 1196620 - DNA, 25 bp, Homo sapien
tggcggcactgtatttcaaactcct

SEQ ID NO: 1196621 - DNA, 25 bp, Homo sapien
ctgatggcggcactgtatttcaaac

SEQ ID NO: 1196622 - DNA, 25 bp, Homo sapien
aaagctggggatgaccaaagactga

SEQ ID NO: 1196623 - DNA, 25 bp, Homo sapien
aaactcctgcataggcgctccagca

SEQ ID NO: 1196624 - DNA, 25 bp, Homo sapien
ctgcagagagtgcacaggacactga

SEQ ID NO: 1196625 - DNA, 25 bp, Homo sapien
tgtcaacctcttgccaacctctatt

SEQ ID NO: 1196626 - DNA, 25 bp, Homo sapien
tctgcagagaaatctcccttgtcaa

SEQ ID NO: 1196627 - DNA, 25 bp, Homo sapien
aggacactgacagttctctgcagag

SEQ ID NO: 1196628 - DNA, 25 bp, Homo sapien
ctcatctttcccactatcaggggaa

SEQ ID NO: 1196629 - DNA, 25 bp, Homo sapien
cccctcatctttcccactatcaggg

SEQ ID NO: 1196630 - DNA, 25 bp, Homo sapien
tacccctcatctttcccactatcag

SEQ ID NO: 1196631 - DNA, 25 bp, Homo sapien
tgggtacccctcatctttcccacta

SEQ ID NO: 1196632 - DNA, 25 bp, Homo sapien
agaccccgaagaacacacgcctgct

SEQ ID NO: 1196633 - DNA, 25 bp, Homo sapien
cccgaagaacacacgcctgctctcc

SEQ ID NO: 1196634 - DNA, 25 bp, Homo sapien
cagccccacatgagggtcagacaca

SEQ ID NO: 1196635 - DNA, 25 bp, Homo sapien
cccacatgagggtcagacacagcct

SEQ ID NO: 1196636 - DNA, 25 bp, Homo sapien
ccatgaagaagatcccaatgctgct

SEQ ID NO: 1196637 - DNA, 25 bp, Homo sapien
aagatcccaatgctgctggcttccc

SEQ ID NO: 1196638 - DNA, 25 bp, Homo sapien
aagaagatcccaatgctgctggctt

SEQ ID NO: 1196639 - DNA, 25 bp, Homo sapien
cccatgaagaagatcccaatgctgc

SEQ ID NO: 1196640 - DNA, 25 bp, Homo sapien
gagactggggaaagagcactgtctt

SEQ ID NO: 1196641 - DNA, 25 bp, Homo sapien
tccagacagtgaaatagaaggagga

SEQ ID NO: 1196642 - DNA, 25 bp, Homo sapien
ccctcttccagacagtgaaatagaa

SEQ ID NO: 1196643 - DNA, 25 bp, Homo sapien
tcctgagatcaagcactgaggtatc

SEQ ID NO: 1196644 - DNA, 25 bp, Homo sapien
ggacagctctctgagcgaccacatt

SEQ ID NO: 1196645 - DNA, 25 bp, Homo sapien
gaactgacttcatagctccctagtg

SEQ ID NO: 1196646 - DNA, 25 bp, Homo sapien
catggggaactgacttcatagctcc

SEQ ID NO: 1196647 - DNA, 25 bp, Homo sapien
acagctctctgagcgaccacattca

SEQ ID NO: 1196648 - DNA, 25 bp, Homo sapien
gatgcacggattcccacagattccc

SEQ ID NO: 1196649 - DNA, 25 bp, Homo sapien
cctttcattcggattgtgaggaacg

SEQ ID NO: 1196650 - DNA, 25 bp, Homo sapien
ggcttccctttcattcggattgtga

SEQ ID NO: 1196651 - DNA, 25 bp, Homo sapien
tgcagagcgaccttggtaagaagta

SEQ ID NO: 1196652 - DNA, 25 bp, Homo sapien
ggatgccgaatctcagatctcgtgc

SEQ ID NO: 1196653 - DNA, 25 bp, Homo sapien
ccgaatctcagatctcgtgccaggc

SEQ ID NO: 1196654 - DNA, 25 bp, Homo sapien
tcagcaaaggatgccgaatctcaga

SEQ ID NO: 1196655 - DNA, 25 bp, Homo sapien
aaaggatgccgaatctcagatctcg

SEQ ID NO: 1196656 - DNA, 25 bp, Homo sapien
caggcagaattggaacctctggctt

SEQ ID NO: 1196657 - DNA, 25 bp, Homo sapien
gagattgggtctacatgccgaagaa

SEQ ID NO: 1196658 - DNA, 25 bp, Homo sapien
ttccatattaccttaatgagcaggg

SEQ ID NO: 1196659 - DNA, 25 bp, Homo sapien
caaaacatgtggaaacgtgtgaggc

SEQ ID NO: 1196660 - DNA, 25 bp, Homo sapien
gatgttccacaaccttcacacatgg

SEQ ID NO: 1196661 - DNA, 25 bp, Homo sapien
tcacacatggcctctacctgagaca

SEQ ID NO: 1196662 - DNA, 25 bp, Homo sapien
ggatacttcgttgctctctggctta

SEQ ID NO: 1196663 - DNA, 25 bp, Homo sapien
tgagacaactctccaggtatgcctg

SEQ ID NO: 1196664 - DNA, 25 bp, Homo sapien
aaaggctcaggaatgaccattcact

SEQ ID NO: 1196665 - DNA, 25 bp, Homo sapien
actgaaagtaggtctgatcaaaggc

SEQ ID NO: 1196666 - DNA, 25 bp, Homo sapien
gaaagtaggtctgatcaaaggcaga

SEQ ID NO: 1196667 - DNA, 25 bp, Homo sapien
aaaaggctcaggaatgaccattcac

SEQ ID NO: 1196668 - DNA, 25 bp, Homo sapien
tagtatatttgccatagcctcgccc

SEQ ID NO: 1196669 - DNA, 25 bp, Homo sapien
cattgcatattaaggctctggagac

SEQ ID NO: 1196670 - DNA, 25 bp, Homo sapien
tcttgggctactaaaatgcaggcac

SEQ ID NO: 1196671 - DNA, 25 bp, Homo sapien
tgggtacagatgaccctcgaagcct

SEQ ID NO: 1196672 - DNA, 25 bp, Homo sapien
caggtaagacaccatcaggggcaga

SEQ ID NO: 1196673 - DNA, 25 bp, Homo sapien
agagcctgggcaccttgctccagag

SEQ ID NO: 1196674 - DNA, 25 bp, Homo sapien
aaatatgaacatgcccagagcctgg

SEQ ID NO: 1196675 - DNA, 25 bp, Homo sapien
gcctgggcaccttgctccagagcag

SEQ ID NO: 1196676 - DNA, 25 bp, Homo sapien
acttgagactgaagctccactcctt

SEQ ID NO: 1196677 - DNA, 25 bp, Homo sapien
gcacttgagactgaagctccactcc

SEQ ID NO: 1196678 - DNA, 25 bp, Homo sapien
cacttgagactgaagctccactcct

SEQ ID NO: 1196679 - DNA, 25 bp, Homo sapien
gaacatggcctgggtgagcagcact

SEQ ID NO: 1196680 - DNA, 25 bp, Homo sapien
agatcagtggcatgttgggagccca

SEQ ID NO: 1196681 - DNA, 25 bp, Homo sapien
gatccagatcagtggcatgttggga

SEQ ID NO: 1196682 - DNA, 25 bp, Homo sapien
aaaaggccttcgtgatccagatcag

SEQ ID NO: 1196683 - DNA, 25 bp, Homo sapien
tacaaaaaggccttcgtgatccaga

SEQ ID NO: 1196684 - DNA, 25 bp, Homo sapien
tcatccatccactgatatagccaga

SEQ ID NO: 1196685 - DNA, 25 bp, Homo sapien
tagccagagattggtttgaacagca

SEQ ID NO: 1196686 - DNA, 25 bp, Homo sapien
gattggtttgaacagcataaagcct

SEQ ID NO: 1196687 - DNA, 25 bp, Homo sapien
acagcataaagcctatgtgcatcag

SEQ ID NO: 1196688 - DNA, 25 bp, Homo sapien
aagccatagatccagatcatcaaaa

SEQ ID NO: 1196689 - DNA, 25 bp, Homo sapien
atagatccagatcatcaaaattggc

SEQ ID NO: 1196690 - DNA, 25 bp, Homo sapien
gatccagatcatcaaaattggcact

SEQ ID NO: 1196691 - DNA, 25 bp, Homo sapien
agatcatcaaaattggcactgaaga

SEQ ID NO: 1196692 - DNA, 25 bp, Homo sapien
tatgcaggcaatagagaaccaattg

SEQ ID NO: 1196693 - DNA, 25 bp, Homo sapien
attgtggcacatccaggttcaggcc

SEQ ID NO: 1196694 - DNA, 25 bp, Homo sapien
gatgcctcagcatgagacacctctg

SEQ ID NO: 1196695 - DNA, 25 bp, Homo sapien
gggtatgcctgtcccagagaagtct

SEQ ID NO: 1196696 - DNA, 25 bp, Homo sapien
ggcccaaaggcaggatatcatgaat

SEQ ID NO: 1196697 - DNA, 25 bp, Homo sapien
tatgagcattgaagaggtccagaac

SEQ ID NO: 1196698 - DNA, 25 bp, Homo sapien
tgcagggcacacagatcactgttgc

SEQ ID NO: 1196699 - DNA, 25 bp, Homo sapien
ggaaagacctcaagaacattctagg

SEQ ID NO: 1196700 - DNA, 25 bp, Homo sapien
gagggacccctgttcatctctagtg

SEQ ID NO: 1196701 - DNA, 25 bp, Homo sapien
tattttacttccatgcgagggaccc

SEQ ID NO: 1196702 - DNA, 25 bp, Homo sapien
cagcgttgttgcctgatcgttccaa

SEQ ID NO: 1196703 - DNA, 25 bp, Homo sapien
tcaagggtacgagaggaggttcaac

SEQ ID NO: 1196704 - DNA, 25 bp, Homo sapien
tgccattgccaaaacagtcttaagg

SEQ ID NO: 1196705 - DNA, 25 bp, Homo sapien
gcctgactatgctagggcttgccat

SEQ ID NO: 1196706 - DNA, 25 bp, Homo sapien
gaaggcttttagcacccattccacg

SEQ ID NO: 1196707 - DNA, 25 bp, Homo sapien
tgttcacagctacacacaccgctgg

SEQ ID NO: 1196708 - DNA, 25 bp, Homo sapien
ctctccatctggttctctcattggc

SEQ ID NO: 1196709 - DNA, 25 bp, Homo sapien
gagcagaacataagagaacccttgc

SEQ ID NO: 1196710 - DNA, 25 bp, Homo sapien
tagtcaccaggcaattcttcaaccc

SEQ ID NO: 1196711 - DNA, 25 bp, Homo sapien
cattggctggagtggtactcacaac

SEQ ID NO: 1196712 - DNA, 25 bp, Homo sapien
gaaatgtgttgaaaaaatcggcaaa

SEQ ID NO: 1196713 - DNA, 25 bp, Homo sapien
cagaattataagatttgtagaacca

SEQ ID NO: 1196714 - DNA, 25 bp, Homo sapien
atcggcaaagacttcatcctctagc

SEQ ID NO: 1196715 - DNA, 25 bp, Homo sapien
tcctctagcagaattataagatttg

SEQ ID NO: 1196716 - DNA, 25 bp, Homo sapien
attttcaacagtataaaatggtgtc

SEQ ID NO: 1196717 - DNA, 25 bp, Homo sapien
tttcaacagtataaaatggtgtctg

SEQ ID NO: 1196718 - DNA, 25 bp, Homo sapien
ttttcaacagtataaaatggtgtct

SEQ ID NO: 1196719 - DNA, 25 bp, Homo sapien
gaattttcaacagtataaaatggtg

SEQ ID NO: 1196720 - DNA, 25 bp, Homo sapien
aggtaatcggcatttttccaaccag

SEQ ID NO: 1196721 - DNA, 25 bp, Homo sapien
tacagaagaaaggtaatcggcattt

SEQ ID NO: 1196722 - DNA, 25 bp, Homo sapien
cggcatttttccaaccaggtcaata

SEQ ID NO: 1196723 - DNA, 25 bp, Homo sapien
tggaaacacaagtttgttttacaga

SEQ ID NO: 1196724 - DNA, 25 bp, Homo sapien
ccttctggggacttaatgaaactga

SEQ ID NO: 1196725 - DNA, 25 bp, Homo sapien
gggacttaatgaaactgatgaactc

SEQ ID NO: 1196726 - DNA, 25 bp, Homo sapien
ttctggggacttaatgaaactgatg

SEQ ID NO: 1196727 - DNA, 25 bp, Homo sapien
ctccttctggggacttaatgaaact

SEQ ID NO: 1196728 - DNA, 25 bp, Homo sapien
gaggaaacagattcctagtgcttcc

SEQ ID NO: 1196729 - DNA, 25 bp, Homo sapien
aggaaacagattcctagtgcttcct

SEQ ID NO: 1196730 - DNA, 25 bp, Homo sapien
gaccccgccaatgcatttctggagt

SEQ ID NO: 1196731 - DNA, 25 bp, Homo sapien
gtaggaatagaagcgccacatccct

SEQ ID NO: 1196732 - DNA, 25 bp, Homo sapien
tgaggtaggaatagaagcgccacat

SEQ ID NO: 1196733 - DNA, 25 bp, Homo sapien
tctgaccccgccaatgcatttctgg

SEQ ID NO: 1196734 - DNA, 25 bp, Homo sapien
gagggacaggtagtagtctctcact

SEQ ID NO: 1196735 - DNA, 25 bp, Homo sapien
tgttctcagcaaggatccagaaatc

SEQ ID NO: 1196736 - DNA, 25 bp, Homo sapien
gttcatgttacagagggttaccacc

SEQ ID NO: 1196737 - DNA, 25 bp, Homo sapien
cctcctgcagatgagtggccctcag

SEQ ID NO: 1196738 - DNA, 25 bp, Homo sapien
ccccaaaaagatgctttataattct

SEQ ID NO: 1196739 - DNA, 25 bp, Homo sapien
cccaaaaagatgctttataattctt

SEQ ID NO: 1196740 - DNA, 25 bp, Homo sapien
ccaaaaagatgctttataattctta

SEQ ID NO: 1196741 - DNA, 25 bp, Homo sapien
caaaaagatgctttataattcttac

SEQ ID NO: 1196742 - DNA, 25 bp, Homo sapien
tcctgcttgagtaccgtttctgaaa

SEQ ID NO: 1196743 - DNA, 25 bp, Homo sapien
gttgggaagccaatagctctggagt

SEQ ID NO: 1196744 - DNA, 25 bp, Homo sapien
gatctccctcctagtggttgattgg

SEQ ID NO: 1196745 - DNA, 25 bp, Homo sapien
cctcctatgtgggtgtagcaaacgc

SEQ ID NO: 1196746 - DNA, 25 bp, Homo sapien
gcttgagatccatttccagagacca

SEQ ID NO: 1196747 - DNA, 25 bp, Homo sapien
cagggaaggcatttgtataaccacc

SEQ ID NO: 1196748 - DNA, 25 bp, Homo sapien
tgacagtcctcaggtgggtagagac

SEQ ID NO: 1196749 - DNA, 25 bp, Homo sapien
gcataatgcatatccttttccaggg

SEQ ID NO: 1196750 - DNA, 25 bp, Homo sapien
tcaggtagagctcgcagattctgtc

SEQ ID NO: 1196751 - DNA, 25 bp, Homo sapien
caagtgacgaaagattgcattccca

SEQ ID NO: 1196752 - DNA, 25 bp, Homo sapien
gacactgaggaaatgctgcaagtcc

SEQ ID NO: 1196753 - DNA, 25 bp, Homo sapien
ggtaagcacggaccaatctgctcat

SEQ ID NO: 1196754 - DNA, 25 bp, Homo sapien
acacagcatatgcattatgaggtgg

SEQ ID NO: 1196755 - DNA, 25 bp, Homo sapien
aaacacagcatatgcattatgaggt

SEQ ID NO: 1196756 - DNA, 25 bp, Homo sapien
aacacagcatatgcattatgaggtg

SEQ ID NO: 1196757 - DNA, 25 bp, Homo sapien
aaggagaaaccagtagtcctcttca

SEQ ID NO: 1196758 - DNA, 25 bp, Homo sapien
tcttcatctagaaactcatcatacc

SEQ ID NO: 1196759 - DNA, 25 bp, Homo sapien
gagaaaccagtagtcctcttcatct

SEQ ID NO: 1196760 - DNA, 25 bp, Homo sapien
aactcatcataccagggactgagca

SEQ ID NO: 1196761 - DNA, 25 bp, Homo sapien
ttcttccctcatcctcatgattcct

SEQ ID NO: 1196762 - DNA, 25 bp, Homo sapien
taacaatttcatttactttaacaca

SEQ ID NO: 1196763 - DNA, 25 bp, Homo sapien
cttccctcatcctcatgattccttc

SEQ ID NO: 1196764 - DNA, 25 bp, Homo sapien
acaatttcatttactttaacacata

SEQ ID NO: 1196765 - DNA, 25 bp, Homo sapien
tttagctttagaacaacagggacca

SEQ ID NO: 1196766 - DNA, 25 bp, Homo sapien
tttccttgagaggtttagctttaga

SEQ ID NO: 1196767 - DNA, 25 bp, Homo sapien
cttttatgctgtctggagctgatga

SEQ ID NO: 1196768 - DNA, 25 bp, Homo sapien
tcttttatgctgtctggagctgatg

SEQ ID NO: 1196769 - DNA, 25 bp, Homo sapien
ggagatgtcagctctacctggagag

SEQ ID NO: 1196770 - DNA, 25 bp, Homo sapien
tcaggtcctcagtagctatctttcg

SEQ ID NO: 1196771 - DNA, 25 bp, Homo sapien
tatctttcgccactgcctatagtcc

SEQ ID NO: 1196772 - DNA, 25 bp, Homo sapien
gtccatttccttcatgtcagccaaa

SEQ ID NO: 1196773 - DNA, 25 bp, Homo sapien
gccatcttttcatctactttggtct

SEQ ID NO: 1196774 - DNA, 25 bp, Homo sapien
ttttcatctactttggtcttgattc

SEQ ID NO: 1196775 - DNA, 25 bp, Homo sapien
atcttttcatctactttggtcttga

SEQ ID NO: 1196776 - DNA, 25 bp, Homo sapien
agccatcttttcatctactttggtc

SEQ ID NO: 1196777 - DNA, 25 bp, Homo sapien
aaacagagatagagtttagttgtcc

SEQ ID NO: 1196778 - DNA, 25 bp, Homo sapien
tttagttgtccaaagtctgggttca

SEQ ID NO: 1196779 - DNA, 25 bp, Homo sapien
atagagtttagttgtccaaagtctg

SEQ ID NO: 1196780 - DNA, 25 bp, Homo sapien
gaaaaacagagatagagtttagttg

SEQ ID NO: 1196781 - DNA, 25 bp, Homo sapien
tctcacagtatattttgtagtcatc

SEQ ID NO: 1196782 - DNA, 25 bp, Homo sapien
ggtgctttctcacagtatattttgt

SEQ ID NO: 1196783 - DNA, 25 bp, Homo sapien
gctttctcacagtatattttgtagt

SEQ ID NO: 1196784 - DNA, 25 bp, Homo sapien
cacagtatattttgtagtcatcact

SEQ ID NO: 1196785 - DNA, 25 bp, Homo sapien
tgaaaaaacctagttgcctcgtcta

SEQ ID NO: 1196786 - DNA, 25 bp, Homo sapien
gttgcctcgtctatccctgatttta

SEQ ID NO: 1196787 - DNA, 25 bp, Homo sapien
cctagttgcctcgtctatccctgat

SEQ ID NO: 1196788 - DNA, 25 bp, Homo sapien
aaacctagttgcctcgtctatccct

SEQ ID NO: 1196789 - DNA, 25 bp, Homo sapien
gataggttgacaagtgaagcagcca

SEQ ID NO: 1196790 - DNA, 25 bp, Homo sapien
ggacaattcacttgccactcttggt

SEQ ID NO: 1196791 - DNA, 25 bp, Homo sapien
ttggtattccctggcccaatttgta

SEQ ID NO: 1196792 - DNA, 25 bp, Homo sapien
tcatgttacatagcagatactggac

SEQ ID NO: 1196793 - DNA, 25 bp, Homo sapien
ttcctatttgagcgtgaaactgtct

SEQ ID NO: 1196794 - DNA, 25 bp, Homo sapien
tatttgagcgtgaaactgtctttgt

SEQ ID NO: 1196795 - DNA, 25 bp, Homo sapien
tcctatttgagcgtgaaactgtctt

SEQ ID NO: 1196796 - DNA, 25 bp, Homo sapien
cctatttgagcgtgaaactgtcttt

SEQ ID NO: 1196797 - DNA, 25 bp, Homo sapien
tgatggcttccttacaagagttctt

SEQ ID NO: 1196798 - DNA, 25 bp, Homo sapien
gatggcttccttacaagagttcttt

SEQ ID NO: 1196799 - DNA, 25 bp, Homo sapien
tcctgggtaatctgtgcctcctctg

SEQ ID NO: 1196800 - DNA, 25 bp, Homo sapien
gtttttcctgggtaatctgtgcctc

SEQ ID NO: 1196801 - DNA, 25 bp, Homo sapien
tttttcctgggtaatctgtgcctcc

SEQ ID NO: 1196802 - DNA, 25 bp, Homo sapien
tttcctgggtaatctgtgcctcctc

SEQ ID NO: 1196803 - DNA, 25 bp, Homo sapien
gaggaactccctgaagaactccaag

SEQ ID NO: 1196804 - DNA, 25 bp, Homo sapien
ccaagtgctgtgtatttaagaggac

SEQ ID NO: 1196805 - DNA, 25 bp, Homo sapien
tgatcttctgtacagctgtgagaaa

SEQ ID NO: 1196806 - DNA, 25 bp, Homo sapien
tgcaatgggattttagccttccgtt

SEQ ID NO: 1196807 - DNA, 25 bp, Homo sapien
tgcttgtggtgacatgacgcatgga

SEQ ID NO: 1196808 - DNA, 25 bp, Homo sapien
atttcataacatgtccctggagcgt

SEQ ID NO: 1196809 - DNA, 25 bp, Homo sapien
ccctggagcgttaacagtgtgcttg

SEQ ID NO: 1196810 - DNA, 25 bp, Homo sapien
cgcatggaagcgatttctttgataa

SEQ ID NO: 1196811 - DNA, 25 bp, Homo sapien
tcctagacgaaatttgtacttcact

SEQ ID NO: 1196812 - DNA, 25 bp, Homo sapien
gttgacactatctttgagggcttcc

SEQ ID NO: 1196813 - DNA, 25 bp, Homo sapien
tgtacttcactttgcacttccacct

SEQ ID NO: 1196814 - DNA, 25 bp, Homo sapien
ttcctgtaggtaagttgacactatc

SEQ ID NO: 1196815 - DNA, 25 bp, Homo sapien
aatctgcggtacttgcaaaaactcc

SEQ ID NO: 1196816 - DNA, 25 bp, Homo sapien
cataaatctgcggtacttgcaaaaa

SEQ ID NO: 1196817 - DNA, 25 bp, Homo sapien
caacataaatctgcggtacttgcaa

SEQ ID NO: 1196818 - DNA, 25 bp, Homo sapien
tcaacataaatctgcggtacttgca

SEQ ID NO: 1196819 - DNA, 25 bp, Homo sapien
ttcctggtgaagatagtcttcaaat

SEQ ID NO: 1196820 - DNA, 25 bp, Homo sapien
tttcctggtgaagatagtcttcaaa

SEQ ID NO: 1196821 - DNA, 25 bp, Homo sapien
atttcctggtgaagatagtcttcaa

SEQ ID NO: 1196822 - DNA, 25 bp, Homo sapien
gagggtggagctgaacgtcccgatg

SEQ ID NO: 1196823 - DNA, 25 bp, Homo sapien
gctgaacgtcccgatgtgttgtgtg

SEQ ID NO: 1196824 - DNA, 25 bp, Homo sapien
acgtcccgatgtgttgtgtgctgtg

SEQ ID NO: 1196825 - DNA, 25 bp, Homo sapien
gtggagctgaacgtcccgatgtgtt

SEQ ID NO: 1196826 - DNA, 25 bp, Homo sapien
gccaaatatacgacgctttacaagg

SEQ ID NO: 1196827 - DNA, 25 bp, Homo sapien
taatcctgtggccaaatatacgacg

SEQ ID NO: 1196828 - DNA, 25 bp, Homo sapien
tagatcattgatcgcaaagttgaca

SEQ ID NO: 1196829 - DNA, 25 bp, Homo sapien
tcgcaaagttgacagtgataatcct

SEQ ID NO: 1196830 - DNA, 25 bp, Homo sapien
tgtgggctgaactgaccagatcatt

SEQ ID NO: 1196831 - DNA, 25 bp, Homo sapien
tgcccggttgacctgcagcatgtgg

SEQ ID NO: 1196832 - DNA, 25 bp, Homo sapien
tggaccgcattaggatcacatcatt

SEQ ID NO: 1196833 - DNA, 25 bp, Homo sapien
ctttggagggatgtcagaattcagg

SEQ ID NO: 1196834 - DNA, 25 bp, Homo sapien
gctccgatctaggtagccctctgtg

SEQ ID NO: 1196835 - DNA, 25 bp, Homo sapien
acagacatgatagccccatggaaga

SEQ ID NO: 1196836 - DNA, 25 bp, Homo sapien
atagccccatggaagacgctccgat

SEQ ID NO: 1196837 - DNA, 25 bp, Homo sapien
taacaacggggaagacagacatgat

SEQ ID NO: 1196838 - DNA, 25 bp, Homo sapien
cagtcactgaataaggagaaacagt

SEQ ID NO: 1196839 - DNA, 25 bp, Homo sapien
ctaacagtcactgaataaggagaaa

SEQ ID NO: 1196840 - DNA, 25 bp, Homo sapien
gtcactgaataaggagaaacagtta

SEQ ID NO: 1196841 - DNA, 25 bp, Homo sapien
aacagtcactgaataaggagaaaca

SEQ ID NO: 1196842 - DNA, 25 bp, Homo sapien
catctgtggattcagtgtttggtgt

SEQ ID NO: 1196843 - DNA, 25 bp, Homo sapien
ctcacattcttgctccaagcaagca

SEQ ID NO: 1196844 - DNA, 25 bp, Homo sapien
aaactggaaactacgaaacagagtg

SEQ ID NO: 1196845 - DNA, 25 bp, Homo sapien
ggaaaccaggcgtttggctctcagt

SEQ ID NO: 1196846 - DNA, 25 bp, Homo sapien
taccaagtgattctaggcaagtccc

SEQ ID NO: 1196847 - DNA, 25 bp, Homo sapien
gatcccttggaggtcaatcttggct

SEQ ID NO: 1196848 - DNA, 25 bp, Homo sapien
gaatggagcctgtaaagggcctact

SEQ ID NO: 1196849 - DNA, 25 bp, Homo sapien
tgggaacatttcagccaggtgtcct

SEQ ID NO: 1196850 - DNA, 25 bp, Homo sapien
tgtaagtaagagcgggttgccttcc

SEQ ID NO: 1196851 - DNA, 25 bp, Homo sapien
gatacttgtccgtagatttaggagg

SEQ ID NO: 1196852 - DNA, 25 bp, Homo sapien
cttgtccgtagatttaggagggctt

SEQ ID NO: 1196853 - DNA, 25 bp, Homo sapien
gaaaggatacttgtccgtagattta

SEQ ID NO: 1196854 - DNA, 25 bp, Homo sapien
gaggtaccctctgctagcactgcta

SEQ ID NO: 1196855 - DNA, 25 bp, Homo sapien
cagaggcgtcctggagttattgcta

SEQ ID NO: 1196856 - DNA, 25 bp, Homo sapien
tccctgagggccaagtaaatgagct

SEQ ID NO: 1196857 - DNA, 25 bp, Homo sapien
tcagcatagactgtgaccggcatgc

SEQ ID NO: 1196858 - DNA, 25 bp, Homo sapien
ctgagcaaggtgaaccttaagatgg

SEQ ID NO: 1196859 - DNA, 25 bp, Homo sapien
ttgaactgaacttattgcttcccgt

SEQ ID NO: 1196860 - DNA, 25 bp, Homo sapien
gctgcaaccactcaatacctctgag

SEQ ID NO: 1196861 - DNA, 25 bp, Homo sapien
tgcttcccgttgaggctgcaaccac

SEQ ID NO: 1196862 - DNA, 25 bp, Homo sapien
cagtggggatccaattccaactcac

SEQ ID NO: 1196863 - DNA, 25 bp, Homo sapien
tcagtggggatccaattccaactca

SEQ ID NO: 1196864 - DNA, 25 bp, Homo sapien
acgaaggccatgatgtcaatcacat

SEQ ID NO: 1196865 - DNA, 25 bp, Homo sapien
tcatctggacacgaaggccatgatg

SEQ ID NO: 1196866 - DNA, 25 bp, Homo sapien
cgaaggccatgatgtcaatcacata

SEQ ID NO: 1196867 - DNA, 25 bp, Homo sapien
tctggacacgaaggccatgatgtca

SEQ ID NO: 1196868 - DNA, 25 bp, Homo sapien
acgagtcttggctgagtaagtttgc

SEQ ID NO: 1196869 - DNA, 25 bp, Homo sapien
agctgcatggcagataccacgagtc

SEQ ID NO: 1196870 - DNA, 25 bp, Homo sapien
catggcagataccacgagtcttggc

SEQ ID NO: 1196871 - DNA, 25 bp, Homo sapien
cagataccacgagtcttggctgagt

SEQ ID NO: 1196872 - DNA, 25 bp, Homo sapien
tctaggttctgcatgccaaggagag

SEQ ID NO: 1196873 - DNA, 25 bp, Homo sapien
taaaagtgcctgtcctagttggagg

SEQ ID NO: 1196874 - DNA, 25 bp, Homo sapien
tattgccaatatcctgccaagcaga

SEQ ID NO: 1196875 - DNA, 25 bp, Homo sapien
tatgtacacctggacattgaccgcg

SEQ ID NO: 1196876 - DNA, 25 bp, Homo sapien
gaggctgctgtctaccaccttggcc

SEQ ID NO: 1196877 - DNA, 25 bp, Homo sapien
caaataactctttggcactcctcag

SEQ ID NO: 1196878 - DNA, 25 bp, Homo sapien
ccaagcctgtcattcagaggctgct

SEQ ID NO: 1196879 - DNA, 25 bp, Homo sapien
tggcaaggacaccaagcctgtcatt

SEQ ID NO: 1196880 - DNA, 25 bp, Homo sapien
gaaacaggcctgagaagtgacttgg

SEQ ID NO: 1196881 - DNA, 25 bp, Homo sapien
ggaaacaggcctgagaagtgacttg

SEQ ID NO: 1196882 - DNA, 25 bp, Homo sapien
ctggaaacaggcctgagaagtgact

SEQ ID NO: 1196883 - DNA, 25 bp, Homo sapien
tggaaacaggcctgagaagtgactt

SEQ ID NO: 1196884 - DNA, 25 bp, Homo sapien
ctgggcactgggacgggcaaataat

SEQ ID NO: 1196885 - DNA, 25 bp, Homo sapien
tccagtgtaaagagcttcaaagtat

SEQ ID NO: 1196886 - DNA, 25 bp, Homo sapien
gggcaaataattcctgggcagcttc

SEQ ID NO: 1196887 - DNA, 25 bp, Homo sapien
caaggccttataaactctgaagcca

SEQ ID NO: 1196888 - DNA, 25 bp, Homo sapien
caggcttcagaatagggcttctcac

SEQ ID NO: 1196889 - DNA, 25 bp, Homo sapien
gggcttctcacattcttagtctcac

SEQ ID NO: 1196890 - DNA, 25 bp, Homo sapien
gaatagggcttctcacattcttagt

SEQ ID NO: 1196891 - DNA, 25 bp, Homo sapien
gtaattgaggttgcattctctgttg

SEQ ID NO: 1196892 - DNA, 25 bp, Homo sapien
cttttttgatgtaggataatttttg

SEQ ID NO: 1196893 - DNA, 25 bp, Homo sapien
tgtcagtgttaggaggcctctaaga

SEQ ID NO: 1196894 - DNA, 25 bp, Homo sapien
cattgcccttcttgatcgtttctgg

SEQ ID NO: 1196895 - DNA, 25 bp, Homo sapien
accaggacctttcatttttgaccag

SEQ ID NO: 1196896 - DNA, 25 bp, Homo sapien
tctgtcagtgttaggaggcctctaa

SEQ ID NO: 1196897 - DNA, 25 bp, Homo sapien
aaataaaaaacttcggcacagcagg

SEQ ID NO: 1196898 - DNA, 25 bp, Homo sapien
gaaataaaaaacttcggcacagcag

SEQ ID NO: 1196899 - DNA, 25 bp, Homo sapien
tcaggtgttcatgagttctgctcca

SEQ ID NO: 1196900 - DNA, 25 bp, Homo sapien
ggtgttcatgagttctgctccaaca

SEQ ID NO: 1196901 - DNA, 25 bp, Homo sapien
ctgctccaacatcacctttttcatc

SEQ ID NO: 1196902 - DNA, 25 bp, Homo sapien
cacctttttcatccttgtgaaaagt

SEQ ID NO: 1196903 - DNA, 25 bp, Homo sapien
gaatgtggacatcctttattctggc

SEQ ID NO: 1196904 - DNA, 25 bp, Homo sapien
cacttggatcagttggaggctctca

SEQ ID NO: 1196905 - DNA, 25 bp, Homo sapien
tattctggctaatgacctgcagccc

SEQ ID NO: 1196906 - DNA, 25 bp, Homo sapien
tctatatagatgacagcaggtctca

SEQ ID NO: 1196907 - DNA, 25 bp, Homo sapien
tgtacagaatctccacgggacacca

SEQ ID NO: 1196908 - DNA, 25 bp, Homo sapien
caggaagcgccacatattttgaagc

SEQ ID NO: 1196909 - DNA, 25 bp, Homo sapien
tgtagagggcatggaaagaagtctc

SEQ ID NO: 1196910 - DNA, 25 bp, Homo sapien
caggaactcagggtgtgcatgtaga

SEQ ID NO: 1196911 - DNA, 25 bp, Homo sapien
tgaatgaaccatcttcgtacatgaa

SEQ ID NO: 1196912 - DNA, 25 bp, Homo sapien
tacccagtctaggagctccttctgg

SEQ ID NO: 1196913 - DNA, 25 bp, Homo sapien
cctcacgggcgatggctgtcttttc

SEQ ID NO: 1196914 - DNA, 25 bp, Homo sapien
cactggaatgtaggctcctcacggg

SEQ ID NO: 1196915 - DNA, 25 bp, Homo sapien
ttttggtatacagcatttacttcca

SEQ ID NO: 1196916 - DNA, 25 bp, Homo sapien
tttgtgttgctaccacatttttgtg

SEQ ID NO: 1196917 - DNA, 25 bp, Homo sapien
tatagttagcattttggtatacagc

SEQ ID NO: 1196918 - DNA, 25 bp, Homo sapien
ttttagattaatgaatgtgttatga

SEQ ID NO: 1196919 - DNA, 25 bp, Homo sapien
tgtggcccaggataatcaacactgt

SEQ ID NO: 1196920 - DNA, 25 bp, Homo sapien
ctgatggcaactcctgcggcagagc

SEQ ID NO: 1196921 - DNA, 25 bp, Homo sapien
gggataatcagaacctgcctgtcac

SEQ ID NO: 1196922 - DNA, 25 bp, Homo sapien
tctttcctgcagacgtgagatgaac

SEQ ID NO: 1196923 - DNA, 25 bp, Homo sapien
cttgagtagagaggtagaagcgcac

SEQ ID NO: 1196924 - DNA, 25 bp, Homo sapien
ccaactcttagggagtggagcggca

SEQ ID NO: 1196925 - DNA, 25 bp, Homo sapien
aagtcccaccaactcttagggagtg

SEQ ID NO: 1196926 - DNA, 25 bp, Homo sapien
ttgatgccacgtgctcagattccag

SEQ ID NO: 1196927 - DNA, 25 bp, Homo sapien
ccatgtgccgcaccctggccgcctt

SEQ ID NO: 1196928 - DNA, 25 bp, Homo sapien
tgcctactacgtgctgccctgcgcc

SEQ ID NO: 1196929 - DNA, 25 bp, Homo sapien
catcctgcctactacgtgctgccct

SEQ ID NO: 1196930 - DNA, 25 bp, Homo sapien
gcgcccgcagccatgtgccgcaccc

SEQ ID NO: 1196931 - DNA, 25 bp, Homo sapien
cgcagttgactagcacctgctaccg

SEQ ID NO: 1196932 - DNA, 25 bp, Homo sapien
caaccgcagttgactagcacctgct

SEQ ID NO: 1196933 - DNA, 25 bp, Homo sapien
agttgactagcacctgctaccgcgc

SEQ ID NO: 1196934 - DNA, 25 bp, Homo sapien
aaacccaaccgcagttgactagcac

SEQ ID NO: 1196935 - DNA, 25 bp, Homo sapien
ggaaactgaagaggtaaccatggca

SEQ ID NO: 1196936 - DNA, 25 bp, Homo sapien
tgaacttggagagggccgttcatct

SEQ ID NO: 1196937 - DNA, 25 bp, Homo sapien
tcatctagagtagggagctttgtgc

SEQ ID NO: 1196938 - DNA, 25 bp, Homo sapien
gggagctttgtgctctcagatttgc

SEQ ID NO: 1196939 - DNA, 25 bp, Homo sapien
cagtagacaaagatccccatctaga

SEQ ID NO: 1196940 - DNA, 25 bp, Homo sapien
ttatcagtagacaaagatccccatc

SEQ ID NO: 1196941 - DNA, 25 bp, Homo sapien
tagacaaagatccccatctagactt

SEQ ID NO: 1196942 - DNA, 25 bp, Homo sapien
gtagacaaagatccccatctagact

SEQ ID NO: 1196943 - DNA, 25 bp, Homo sapien
gtggaggaagctgggcgctggcagg

SEQ ID NO: 1196944 - DNA, 25 bp, Homo sapien
ctggtgagcacagggagaggtggag

SEQ ID NO: 1196945 - DNA, 25 bp, Homo sapien
ctggcaggcagggaaagttcgggag

SEQ ID NO: 1196946 - DNA, 25 bp, Homo sapien
tggcaggcagggaaagttcgggagc

SEQ ID NO: 1196947 - DNA, 25 bp, Homo sapien
gggtttgcagagtggagacagcatg

SEQ ID NO: 1196948 - DNA, 25 bp, Homo sapien
tactttagggaatgcagcaaggtga

SEQ ID NO: 1196949 - DNA, 25 bp, Homo sapien
tggtactttagggaatgcagcaagg

SEQ ID NO: 1196950 - DNA, 25 bp, Homo sapien
ctttagggaatgcagcaaggtgatg

SEQ ID NO: 1196951 - DNA, 25 bp, Homo sapien
ggtgtcttgcttccgactctagctg

SEQ ID NO: 1196952 - DNA, 25 bp, Homo sapien
gtcggcataggtgccatgtgtgttt

SEQ ID NO: 1196953 - DNA, 25 bp, Homo sapien
tccctgattttgctccagtttgctc

SEQ ID NO: 1196954 - DNA, 25 bp, Homo sapien
gggtaggtggagtcggcataggtgc

SEQ ID NO: 1196955 - DNA, 25 bp, Homo sapien
gagccgggttctccctagtacatgc

SEQ ID NO: 1196956 - DNA, 25 bp, Homo sapien
tgtctgacacagagccgggttctcc

SEQ ID NO: 1196957 - DNA, 25 bp, Homo sapien
acacagagccgggttctccctagta

SEQ ID NO: 1196958 - DNA, 25 bp, Homo sapien
gggttctccctagtacatgctgctc

SEQ ID NO: 1196959 - DNA, 25 bp, Homo sapien
tggccccagggtcaaaggctgctga

SEQ ID NO: 1196960 - DNA, 25 bp, Homo sapien
tccataagatgaagagagtggcccc

SEQ ID NO: 1196961 - DNA, 25 bp, Homo sapien
tgggttcacagaggaatgcatgctc

SEQ ID NO: 1196962 - DNA, 25 bp, Homo sapien
tctaacccctcccaagatgtgaagg

SEQ ID NO: 1196963 - DNA, 25 bp, Homo sapien
tgagctgtcattcagtccatagcca

SEQ ID NO: 1196964 - DNA, 25 bp, Homo sapien
tatgaccacagaggctggatctcct

SEQ ID NO: 1196965 - DNA, 25 bp, Homo sapien
tatggttaactctggcgtcttccca

SEQ ID NO: 1196966 - DNA, 25 bp, Homo sapien
tgtttggacatggtcacacagccag

SEQ ID NO: 1196967 - DNA, 25 bp, Homo sapien
gcgcgtgagccgacgtctgtgtcct

SEQ ID NO: 1196968 - DNA, 25 bp, Homo sapien
cggcgagccgcggatatttgctgct

SEQ ID NO: 1196969 - DNA, 25 bp, Homo sapien
tcctgtctgtttccgagcagttgtc

SEQ ID NO: 1196970 - DNA, 25 bp, Homo sapien
cgtctgtgtcctgcgcaagctgctg

SEQ ID NO: 1196971 - DNA, 25 bp, Homo sapien
caaaacgccgcgttcctggtgactg

SEQ ID NO: 1196972 - DNA, 25 bp, Homo sapien
gctggcgatgggcagccgaccaaaa

SEQ ID NO: 1196973 - DNA, 25 bp, Homo sapien
atctcgcgcggacagggctggcgat

SEQ ID NO: 1196974 - DNA, 25 bp, Homo sapien
aagagcttcggagcagggcatctcg

SEQ ID NO: 1196975 - DNA, 25 bp, Homo sapien
aagtcgagtttctccgaaaccactg

SEQ ID NO: 1196976 - DNA, 25 bp, Homo sapien
acttcggagcactttatgccgccca

SEQ ID NO: 1196977 - DNA, 25 bp, Homo sapien
ggcccagtcttcaaggtgatctcca

SEQ ID NO: 1196978 - DNA, 25 bp, Homo sapien
tgccgcccacgttttgttctataac

SEQ ID NO: 1196979 - DNA, 25 bp, Homo sapien
cctggctttgaatggtggctctaca

SEQ ID NO: 1196980 - DNA, 25 bp, Homo sapien
tacaattgtgagattaacagcccct

SEQ ID NO: 1196981 - DNA, 25 bp, Homo sapien
aatacacgtaaagagcgccaggcac

SEQ ID NO: 1196982 - DNA, 25 bp, Homo sapien
gaggctgcgcgtttgcccagtacag

SEQ ID NO: 1196983 - DNA, 25 bp, Homo sapien
gaacctcagaggacctttatggaag

SEQ ID NO: 1196984 - DNA, 25 bp, Homo sapien
cgtaggtgtagaacctcagaggacc

SEQ ID NO: 1196985 - DNA, 25 bp, Homo sapien
aacccgtaggtgtagaacctcagag

SEQ ID NO: 1196986 - DNA, 25 bp, Homo sapien
ctgtagcagtgtaaacccgtaggtg

SEQ ID NO: 1196987 - DNA, 25 bp, Homo sapien
tagatgcacacaggcagcggtgttt

SEQ ID NO: 1196988 - DNA, 25 bp, Homo sapien
ccaaatctgtagatgcacacaggca

SEQ ID NO: 1196989 - DNA, 25 bp, Homo sapien
aaatctgtagatgcacacaggcagc

SEQ ID NO: 1196990 - DNA, 25 bp, Homo sapien
gagagccaaatctgtagatgcacac

SEQ ID NO: 1196991 - DNA, 25 bp, Homo sapien
ctgaccgaggactcctcagccacct

SEQ ID NO: 1196992 - DNA, 25 bp, Homo sapien
ctgctgaccgaggactcctcagcca

SEQ ID NO: 1196993 - DNA, 25 bp, Homo sapien
accgaggactcctcagccacctgta

SEQ ID NO: 1196994 - DNA, 25 bp, Homo sapien
ccgaggactcctcagccacctgtac

SEQ ID NO: 1196995 - DNA, 25 bp, Homo sapien
cgacatgctcttatctcatttatcc

SEQ ID NO: 1196996 - DNA, 25 bp, Homo sapien
ctggaaacataactgatgtggatgt

SEQ ID NO: 1196997 - DNA, 25 bp, Homo sapien
ggatgttctcattcaaggtgtagag

SEQ ID NO: 1196998 - DNA, 25 bp, Homo sapien
gatgaccagaattgtacttttgact

SEQ ID NO: 1196999 - DNA, 25 bp, Homo sapien
catataaaccgcttggctgatggag

SEQ ID NO: 1197000 - DNA, 25 bp, Homo sapien
cgcggcgagcacacaacagatttgt

SEQ ID NO: 1197001 - DNA, 25 bp, Homo sapien
ctgactctttatgaagaaactgtcc

SEQ ID NO: 1197002 - DNA, 25 bp, Homo sapien
ctttactataaacaaggctgtgaga

SEQ ID NO: 1197003 - DNA, 25 bp, Homo sapien
gatgttctccctgtgactcaatgtt

SEQ ID NO: 1197004 - DNA, 25 bp, Homo sapien
tgttttcataagcctaagtgattta

SEQ ID NO: 1197005 - DNA, 25 bp, Homo sapien
ctgccttctcggactctgatgttct

SEQ ID NO: 1197006 - DNA, 25 bp, Homo sapien
tctgccttctcggactctgatgttc

SEQ ID NO: 1197007 - DNA, 25 bp, Homo sapien
agtgttctctgcatggaattggtca

SEQ ID NO: 1197008 - DNA, 25 bp, Homo sapien
tctgcatggaattggtcagtgttct

SEQ ID NO: 1197009 - DNA, 25 bp, Homo sapien
ttcccaaaggcttttgaattcagca

SEQ ID NO: 1197010 - DNA, 25 bp, Homo sapien
gcatcatcatcagaacctttgccag

SEQ ID NO: 1197011 - DNA, 25 bp, Homo sapien
ctgctggagcctgcggtcctccccc

SEQ ID NO: 1197012 - DNA, 25 bp, Homo sapien
gagccacacaggcagtgccatcctg

SEQ ID NO: 1197013 - DNA, 25 bp, Homo sapien
tgcgtggcagtgcgcatcatctgtc

SEQ ID NO: 1197014 - DNA, 25 bp, Homo sapien
ctgggagcgggagagccacacaggc

SEQ ID NO: 1197015 - DNA, 25 bp, Homo sapien
tccctgaattctggagagccaccag

SEQ ID NO: 1197016 - DNA, 25 bp, Homo sapien
ctccctgaattctggagagccacca

SEQ ID NO: 1197017 - DNA, 25 bp, Homo sapien
tggcccaagctgtccaagaggtttt

SEQ ID NO: 1197018 - DNA, 25 bp, Homo sapien
aaatggacctttacagacagaagcg

SEQ ID NO: 1197019 - DNA, 25 bp, Homo sapien
tgactctccaaatggacctttacag

SEQ ID NO: 1197020 - DNA, 25 bp, Homo sapien
ccatttctccatgatgcttcctctt

SEQ ID NO: 1197021 - DNA, 25 bp, Homo sapien
tgcctcatgtgcatggcaggtccag

SEQ ID NO: 1197022 - DNA, 25 bp, Homo sapien
gagactgtgggatccatgtgaaggg

SEQ ID NO: 1197023 - DNA, 25 bp, Homo sapien
caggtccaggagactgtgggatcca

SEQ ID NO: 1197024 - DNA, 25 bp, Homo sapien
gtgcatggcaggtccaggagactgt

SEQ ID NO: 1197025 - DNA, 25 bp, Homo sapien
gggcccagggaactaatctttgctc

SEQ ID NO: 1197026 - DNA, 25 bp, Homo sapien
ttaaggtccctgcagcaacgaagca

SEQ ID NO: 1197027 - DNA, 25 bp, Homo sapien
ctgaaccgagctggcactgctggaa

SEQ ID NO: 1197028 - DNA, 25 bp, Homo sapien
ggcattcattatagtccccgaggga

SEQ ID NO: 1197029 - DNA, 25 bp, Homo sapien
tctaaggacacagctatgtggcacg

SEQ ID NO: 1197030 - DNA, 25 bp, Homo sapien
catctccttcaaggacactgcaggg

SEQ ID NO: 1197031 - DNA, 25 bp, Homo sapien
tccatctccttcaaggacactgcag

SEQ ID NO: 1197032 - DNA, 25 bp, Homo sapien
tcatccatctccttcaaggacactg

SEQ ID NO: 1197033 - DNA, 25 bp, Homo sapien
tgcaggggccagcgggggcttcctt

SEQ ID NO: 1197034 - DNA, 25 bp, Homo sapien
cagcggctgtgagtcaggtctgcct

SEQ ID NO: 1197035 - DNA, 25 bp, Homo sapien
cggctgtgagtcaggtctgcctcac

SEQ ID NO: 1197036 - DNA, 25 bp, Homo sapien
gcggctgtgagtcaggtctgcctca

SEQ ID NO: 1197037 - DNA, 25 bp, Homo sapien
ctgcagcggctgtgagtcaggtctg

SEQ ID NO: 1197038 - DNA, 25 bp, Homo sapien
ttgagggcctcaatgcagagagaca

SEQ ID NO: 1197039 - DNA, 25 bp, Homo sapien
tcttggccgggtttgagggcctcaa

SEQ ID NO: 1197040 - DNA, 25 bp, Homo sapien
agtctgttgttcttggccgggtttg

SEQ ID NO: 1197041 - DNA, 25 bp, Homo sapien
tctgttgttcttggccgggtttgag

SEQ ID NO: 1197042 - DNA, 25 bp, Homo sapien
tcttgatgcttattgccctgaactg

SEQ ID NO: 1197043 - DNA, 25 bp, Homo sapien
ggaatcccatgcaaagtggtgtcct

SEQ ID NO: 1197044 - DNA, 25 bp, Homo sapien
cacacctgtgattgccttaaagatg

SEQ ID NO: 1197045 - DNA, 25 bp, Homo sapien
tcctttgccggcatctttgtgcctc

SEQ ID NO: 1197046 - DNA, 25 bp, Homo sapien
ctcacaactatagcatggcagtggg

SEQ ID NO: 1197047 - DNA, 25 bp, Homo sapien
cacagtaaatggctttggcaacagc

SEQ ID NO: 1197048 - DNA, 25 bp, Homo sapien
taaacaattgctagttactaacagc

SEQ ID NO: 1197049 - DNA, 25 bp, Homo sapien
taaggcccttgtgtcatcaggaagg

SEQ ID NO: 1197050 - DNA, 25 bp, Homo sapien
tctctactcttgtggatcttacagc

SEQ ID NO: 1197051 - DNA, 25 bp, Homo sapien
taagcacggccagcaattgtctcta

SEQ ID NO: 1197052 - DNA, 25 bp, Homo sapien
tccaggaccatacggtttaatgatg

SEQ ID NO: 1197053 - DNA, 25 bp, Homo sapien
gatgctacttcaggctttgggtcca

SEQ ID NO: 1197054 - DNA, 25 bp, Homo sapien
caaacatttggatgaagagatgctc

SEQ ID NO: 1197055 - DNA, 25 bp, Homo sapien
taggggtaacgcatccatttctttc

SEQ ID NO: 1197056 - DNA, 25 bp, Homo sapien
gatctggatgtttggcttctgaaaa

SEQ ID NO: 1197057 - DNA, 25 bp, Homo sapien
ttttcatatgggtccaaatgatctg

SEQ ID NO: 1197058 - DNA, 25 bp, Homo sapien
tggcccccacgatgtgaggtcatca

SEQ ID NO: 1197059 - DNA, 25 bp, Homo sapien
gatgtgaggtcatcacacccttggt

SEQ ID NO: 1197060 - DNA, 25 bp, Homo sapien
ccacgatgtgaggtcatcacaccct

SEQ ID NO: 1197061 - DNA, 25 bp, Homo sapien
cgatgtgaggtcatcacacccttgg

SEQ ID NO: 1197062 - DNA, 25 bp, Homo sapien
cagatgttggttgtctactgctcca

SEQ ID NO: 1197063 - DNA, 25 bp, Homo sapien
catggtgccgtccaaatttgacaac

SEQ ID NO: 1197064 - DNA, 25 bp, Homo sapien
cagagatgtccacttgaggctccac

SEQ ID NO: 1197065 - DNA, 25 bp, Homo sapien
tgcctctgaaaataccatggtgccg

SEQ ID NO: 1197066 - DNA, 25 bp, Homo sapien
aaaactgcttttctgattttgattt

SEQ ID NO: 1197067 - DNA, 25 bp, Homo sapien
taaaactgcttttctgattttgatt

SEQ ID NO: 1197068 - DNA, 25 bp, Homo sapien
ttaaaactgcttttctgattttgat

SEQ ID NO: 1197069 - DNA, 25 bp, Homo sapien
ccatgaagtttctgctcttggattt

SEQ ID NO: 1197070 - DNA, 25 bp, Homo sapien
ttcagctccatgaagtttctgctct

SEQ ID NO: 1197071 - DNA, 25 bp, Homo sapien
agctccatgaagtttctgctcttgg

SEQ ID NO: 1197072 - DNA, 25 bp, Homo sapien
tcttggatttcattgacattatcca

SEQ ID NO: 1197073 - DNA, 25 bp, Homo sapien
aattcaccagtccagaccatcccca

SEQ ID NO: 1197074 - DNA, 25 bp, Homo sapien
gaagacgcccattagaattcaccag

SEQ ID NO: 1197075 - DNA, 25 bp, Homo sapien
ctaggaatgtggaagacgcccatta

SEQ ID NO: 1197076 - DNA, 25 bp, Homo sapien
ccatccccactcatcccgaggtgtt

SEQ ID NO: 1197077 - DNA, 25 bp, Homo sapien
caagtagcagctgactgtatccagc

SEQ ID NO: 1197078 - DNA, 25 bp, Homo sapien
taagtactgacactagagaaagagc

SEQ ID NO: 1197079 - DNA, 25 bp, Homo sapien
tcctagatgaggagtaagtactgac

SEQ ID NO: 1197080 - DNA, 25 bp, Homo sapien
agcactgattctcttcctagatgag

SEQ ID NO: 1197081 - DNA, 25 bp, Homo sapien
gtgattgtcgctgttgccaggtaac

SEQ ID NO: 1197082 - DNA, 25 bp, Homo sapien
ttagcgtgattgtcgctgttgccag

SEQ ID NO: 1197083 - DNA, 25 bp, Homo sapien
tagcgtgattgtcgctgttgccagg

SEQ ID NO: 1197084 - DNA, 25 bp, Homo sapien
gcgtgattgtcgctgttgccaggta

SEQ ID NO: 1197085 - DNA, 25 bp, Homo sapien
catggaatgtgtgagacaggaaaac

SEQ ID NO: 1197086 - DNA, 25 bp, Homo sapien
tggaggctagtttcacccaggcgat

SEQ ID NO: 1197087 - DNA, 25 bp, Homo sapien
tgggtagggacgaaaagccattgat

SEQ ID NO: 1197088 - DNA, 25 bp, Homo sapien
gggtctccccaagtacacaattcca

SEQ ID NO: 1197089 - DNA, 25 bp, Homo sapien
cagacatgcatagtttaatgacagc

SEQ ID NO: 1197090 - DNA, 25 bp, Homo sapien
ttcgttctcgtgtgaaacaacaaaa

SEQ ID NO: 1197091 - DNA, 25 bp, Homo sapien
cccaaatttagtatagccaactaca

SEQ ID NO: 1197092 - DNA, 25 bp, Homo sapien
gcatcagtaggtgatttcgttctcg

SEQ ID NO: 1197093 - DNA, 25 bp, Homo sapien
gaagaatgttgcctcagtgatgcga

SEQ ID NO: 1197094 - DNA, 25 bp, Homo sapien
aaatggtgccgggacataaatagct

SEQ ID NO: 1197095 - DNA, 25 bp, Homo sapien
tcagcaccacattgaattagcagca

SEQ ID NO: 1197096 - DNA, 25 bp, Homo sapien
tctaaagggcctttcaaatggtgcc

SEQ ID NO: 1197097 - DNA, 25 bp, Homo sapien
gctttagaagcagccacagaaatag

SEQ ID NO: 1197098 - DNA, 25 bp, Homo sapien
gtttggctttagaagcagccacaga

SEQ ID NO: 1197099 - DNA, 25 bp, Homo sapien
cttgtttggctttagaagcagccac

SEQ ID NO: 1197100 - DNA, 25 bp, Homo sapien
ggctttagaagcagccacagaaata

SEQ ID NO: 1197101 - DNA, 25 bp, Homo sapien
tatcccagcaatgctggagggatgc

SEQ ID NO: 1197102 - DNA, 25 bp, Homo sapien
tcacaaggggatgttcccttggcct

SEQ ID NO: 1197103 - DNA, 25 bp, Homo sapien
caatgaacttgctattttcagtgtc

SEQ ID NO: 1197104 - DNA, 25 bp, Homo sapien
agattgaccgtgactagccactggg

SEQ ID NO: 1197105 - DNA, 25 bp, Homo sapien
cagacctcaattccattattaacca

SEQ ID NO: 1197106 - DNA, 25 bp, Homo sapien
gacctcaattccattattaaccagt

SEQ ID NO: 1197107 - DNA, 25 bp, Homo sapien
aattccattattaaccagtataggc

SEQ ID NO: 1197108 - DNA, 25 bp, Homo sapien
ttccattattaaccagtataggcat

SEQ ID NO: 1197109 - DNA, 25 bp, Homo sapien
ccagtaaaaggtctgtccacaggtg

SEQ ID NO: 1197110 - DNA, 25 bp, Homo sapien
tcactgtgaagaatgcgtaaccggg

SEQ ID NO: 1197111 - DNA, 25 bp, Homo sapien
tccacaggtggacaagagtctgttc

SEQ ID NO: 1197112 - DNA, 25 bp, Homo sapien
taaccgggtatgagagtcacttctg

SEQ ID NO: 1197113 - DNA, 25 bp, Homo sapien
gcccatcggcgttcaggtctcttcg

SEQ ID NO: 1197114 - DNA, 25 bp, Homo sapien
gtctcttcgggttgacgccgctgca

SEQ ID NO: 1197115 - DNA, 25 bp, Homo sapien
ttgggctgctgtttccgaggcgtac

SEQ ID NO: 1197116 - DNA, 25 bp, Homo sapien
gaggcgtacggagaatcccaactgc

SEQ ID NO: 1197117 - DNA, 25 bp, Homo sapien
gggtgcccgagagcacgcggctcac

SEQ ID NO: 1197118 - DNA, 25 bp, Homo sapien
gcggccgggtgcccgagagcacgcg

SEQ ID NO: 1197119 - DNA, 25 bp, Homo sapien
ctggcggccgggtgcccgagagcac

SEQ ID NO: 1197120 - DNA, 25 bp, Homo sapien
gccgggtgcccgagagcacgcggct

SEQ ID NO: 1197121 - DNA, 25 bp, Homo sapien
gctccccgaggatcggaagcatccg

SEQ ID NO: 1197122 - DNA, 25 bp, Homo sapien
caacatgggctgaagtgactccggc

SEQ ID NO: 1197123 - DNA, 25 bp, Homo sapien
ctccccgaggatcggaagcatccga

SEQ ID NO: 1197124 - DNA, 25 bp, Homo sapien
gctgaagtgactccggcgcagcgcc

SEQ ID NO: 1197125 - DNA, 25 bp, Homo sapien
aggcctccgctcttgtccgtgcagc

SEQ ID NO: 1197126 - DNA, 25 bp, Homo sapien
cgcgctttatatccgcggccgcccg

SEQ ID NO: 1197127 - DNA, 25 bp, Homo sapien
cacgtgccgccacgccagggagcct

SEQ ID NO: 1197128 - DNA, 25 bp, Homo sapien
gaaacgttttgcacactggagtctg

SEQ ID NO: 1197129 - DNA, 25 bp, Homo sapien
gtcgtcgggccgtctgcgtccgtct

SEQ ID NO: 1197130 - DNA, 25 bp, Homo sapien
aacgcccaggtcgtcgggccgtctg

SEQ ID NO: 1197131 - DNA, 25 bp, Homo sapien
tgtcctagcccgtgccgtcgcgggc

SEQ ID NO: 1197132 - DNA, 25 bp, Homo sapien
ggccgtctgcgtccgtctgtcctag

SEQ ID NO: 1197133 - DNA, 25 bp, Homo sapien
gatccgtttcccagcgtatctgcct

SEQ ID NO: 1197134 - DNA, 25 bp, Homo sapien
gcagaatgtacctctgggcagagaa

SEQ ID NO: 1197135 - DNA, 25 bp, Homo sapien
tatcttgagggacaggtactcggag

SEQ ID NO: 1197136 - DNA, 25 bp, Homo sapien
ttggagacccggcagatatgctgtc

SEQ ID NO: 1197137 - DNA, 25 bp, Homo sapien
actacactacgtaaaagtttgctgc

SEQ ID NO: 1197138 - DNA, 25 bp, Homo sapien
gcacagataactacactacgtaaaa

SEQ ID NO: 1197139 - DNA, 25 bp, Homo sapien
cagataactacactacgtaaaagtt

SEQ ID NO: 1197140 - DNA, 25 bp, Homo sapien
tctttgcacagataactacactacg

SEQ ID NO: 1197141 - DNA, 25 bp, Homo sapien
tcttcggtctgatcaacttttaaag

SEQ ID NO: 1197142 - DNA, 25 bp, Homo sapien
tcacttcaatctcttcggtctgatc

SEQ ID NO: 1197143 - DNA, 25 bp, Homo sapien
caatctcttcggtctgatcaacttt

SEQ ID NO: 1197144 - DNA, 25 bp, Homo sapien
cctgtggttctctcacttcaatctc

SEQ ID NO: 1197145 - DNA, 25 bp, Homo sapien
ttgagcccattaagtaacctctttc

SEQ ID NO: 1197146 - DNA, 25 bp, Homo sapien
ccttgagcccattaagtaacctctt

SEQ ID NO: 1197147 - DNA, 25 bp, Homo sapien
accttgagcccattaagtaacctct

SEQ ID NO: 1197148 - DNA, 25 bp, Homo sapien
gaccttgagcccattaagtaacctc

SEQ ID NO: 1197149 - DNA, 25 bp, Homo sapien
tacaagatggtaaaattttagtgct

SEQ ID NO: 1197150 - DNA, 25 bp, Homo sapien
aacacacagagcaagtacaagatgg

SEQ ID NO: 1197151 - DNA, 25 bp, Homo sapien
tttagtgcttaattctattgaggag

SEQ ID NO: 1197152 - DNA, 25 bp, Homo sapien
tctagtttagaactgtaaaatgtgc

SEQ ID NO: 1197153 - DNA, 25 bp, Homo sapien
gccacaagaccctgaagtttcttct

SEQ ID NO: 1197154 - DNA, 25 bp, Homo sapien
cattctcagtcattggcgtgatggt

SEQ ID NO: 1197155 - DNA, 25 bp, Homo sapien
cagtcattggcgtgatggttgcagc

SEQ ID NO: 1197156 - DNA, 25 bp, Homo sapien
cgtgatggttgcagccacaagaccc

SEQ ID NO: 1197157 - DNA, 25 bp, Homo sapien
tctaaggtagaactgcaaaatggcc

SEQ ID NO: 1197158 - DNA, 25 bp, Homo sapien
tatacacagtgcatggctccctatg

SEQ ID NO: 1197159 - DNA, 25 bp, Homo sapien
taagtgcgtattgaccctgtgccaa

SEQ ID NO: 1197160 - DNA, 25 bp, Homo sapien
caacagttctacagaggtgcagggt

SEQ ID NO: 1197161 - DNA, 25 bp, Homo sapien
tatggaccagatgcagtgttaggag

SEQ ID NO: 1197162 - DNA, 25 bp, Homo sapien
cattgtccgtgggtccctgatgaac

SEQ ID NO: 1197163 - DNA, 25 bp, Homo sapien
gatctgcgaacaagtgactgatgca

SEQ ID NO: 1197164 - DNA, 25 bp, Homo sapien
agaagccacttccaggataagaggg

SEQ ID NO: 1197165 - DNA, 25 bp, Homo sapien
ggcagctgggctagcctttaggatc

SEQ ID NO: 1197166 - DNA, 25 bp, Homo sapien
cttggggcagctgggctagccttta

SEQ ID NO: 1197167 - DNA, 25 bp, Homo sapien
agcctttaggatctccgtttcttca

SEQ ID NO: 1197168 - DNA, 25 bp, Homo sapien
gctgggctagcctttaggatctccg

SEQ ID NO: 1197169 - DNA, 25 bp, Homo sapien
ttgtgaaactgcaggtagactctac

SEQ ID NO: 1197170 - DNA, 25 bp, Homo sapien
tgagaagacagaatccacaggacag

SEQ ID NO: 1197171 - DNA, 25 bp, Homo sapien
gatggtccattactataccggctaa

SEQ ID NO: 1197172 - DNA, 25 bp, Homo sapien
tttgcccaaactacataagcggaag

SEQ ID NO: 1197173 - DNA, 25 bp, Homo sapien
tttaattacaggagctatatagttt

SEQ ID NO: 1197174 - DNA, 25 bp, Homo sapien
taattacaggagctatatagtttac

SEQ ID NO: 1197175 - DNA, 25 bp, Homo sapien
ttttttaattacaggagctatatag

SEQ ID NO: 1197176 - DNA, 25 bp, Homo sapien
ttacaggagctatatagtttacttt

SEQ ID NO: 1197177 - DNA, 25 bp, Homo sapien
ccaccctactctgatggtacctagg

SEQ ID NO: 1197178 - DNA, 25 bp, Homo sapien
cagcctgtcccttcacttgttttcc

SEQ ID NO: 1197179 - DNA, 25 bp, Homo sapien
tattttcatcaccagaggccattaa

SEQ ID NO: 1197180 - DNA, 25 bp, Homo sapien
ccatgatcggttaccaggaagtcac

SEQ ID NO: 1197181 - DNA, 25 bp, Homo sapien
caggtctaggccagtatgtgaaact

SEQ ID NO: 1197182 - DNA, 25 bp, Homo sapien
ggaccacaggtgcagctaacttgaa

SEQ ID NO: 1197183 - DNA, 25 bp, Homo sapien
cattcttgagagatactgtttgctc

SEQ ID NO: 1197184 - DNA, 25 bp, Homo sapien
cctctttttagggagttggctgcac

SEQ ID NO: 1197185 - DNA, 25 bp, Homo sapien
aaggatctgatgcttaaggttaaga

SEQ ID NO: 1197186 - DNA, 25 bp, Homo sapien
taaggttaagatctcttaaaatcat

SEQ ID NO: 1197187 - DNA, 25 bp, Homo sapien
gatgcttaaggttaagatctcttaa

SEQ ID NO: 1197188 - DNA, 25 bp, Homo sapien
cttgtaaggatctgatgcttaaggt

SEQ ID NO: 1197189 - DNA, 25 bp, Homo sapien
tactgaccaattactgaaaagttga

SEQ ID NO: 1197190 - DNA, 25 bp, Homo sapien
ctggcgacgctctgagacgctcagg

SEQ ID NO: 1197191 - DNA, 25 bp, Homo sapien
tcccttttgtcacccactcctctgc

SEQ ID NO: 1197192 - DNA, 25 bp, Homo sapien
cgctctgagacgctcagggacaggc

SEQ ID NO: 1197193 - DNA, 25 bp, Homo sapien
ctgcaacctggcgacgctctgagac

SEQ ID NO: 1197194 - DNA, 25 bp, Homo sapien
gctgttgccaaagggcatttttatc

SEQ ID NO: 1197195 - DNA, 25 bp, Homo sapien
aggaagcagggagggcgtatcctct

SEQ ID NO: 1197196 - DNA, 25 bp, Homo sapien
tttttatcctcatgcagccactcac

SEQ ID NO: 1197197 - DNA, 25 bp, Homo sapien
agaggctcactgaatacagctgttg

SEQ ID NO: 1197198 - DNA, 25 bp, Homo sapien
cttcccaccagctgacctcaagccc

SEQ ID NO: 1197199 - DNA, 25 bp, Homo sapien
aagcagtttcccagcggaacctctg

SEQ ID NO: 1197200 - DNA, 25 bp, Homo sapien
ccttgtagacaggtaagaagcagtt

SEQ ID NO: 1197201 - DNA, 25 bp, Homo sapien
tcagcccaaagacgggtaactgtga

SEQ ID NO: 1197202 - DNA, 25 bp, Homo sapien
agaagccaggatcccgggggccctg

SEQ ID NO: 1197203 - DNA, 25 bp, Homo sapien
gctactccgtctactttgggttgtg

SEQ ID NO: 1197204 - DNA, 25 bp, Homo sapien
tactttgggttgtgcggatggtccc

SEQ ID NO: 1197205 - DNA, 25 bp, Homo sapien
tgtcttctaaagctactccgtctac

SEQ ID NO: 1197206 - DNA, 25 bp, Homo sapien
tgggttgtgcggatggtccccaact

SEQ ID NO: 1197207 - DNA, 25 bp, Homo sapien
tttctcttggtttaggtgaagccaa

SEQ ID NO: 1197208 - DNA, 25 bp, Homo sapien
ctcctgggctgctaggcacagctac

SEQ ID NO: 1197209 - DNA, 25 bp, Homo sapien
agcagttttattgcacgacccctcc

SEQ ID NO: 1197210 - DNA, 25 bp, Homo sapien
ggtttaggtgaagccaatcatccat

SEQ ID NO: 1197211 - DNA, 25 bp, Homo sapien
ggcgatatttgttctgataccccga

SEQ ID NO: 1197212 - DNA, 25 bp, Homo sapien
tgtttaggcccaatcacagagtcct

SEQ ID NO: 1197213 - DNA, 25 bp, Homo sapien
tgaaggaccttgaataacacatgcc

SEQ ID NO: 1197214 - DNA, 25 bp, Homo sapien
taaaacaggacctagctgagaagtg

SEQ ID NO: 1197215 - DNA, 25 bp, Homo sapien
tgagaggtggtacaacatagctgtt

SEQ ID NO: 1197216 - DNA, 25 bp, Homo sapien
tgccaatggtgaatcaagcactagg

SEQ ID NO: 1197217 - DNA, 25 bp, Homo sapien
cagctgtgaactcctcagaaaggca

SEQ ID NO: 1197218 - DNA, 25 bp, Homo sapien
tatcccagagttagagtcttgagct

SEQ ID NO: 1197219 - DNA, 25 bp, Homo sapien
cagtgctcctacgtgaattatcacc

SEQ ID NO: 1197220 - DNA, 25 bp, Homo sapien
tgctcctacgtgaattatcacctga

SEQ ID NO: 1197221 - DNA, 25 bp, Homo sapien
caagctcagtgctcctacgtgaatt

SEQ ID NO: 1197222 - DNA, 25 bp, Homo sapien
ccttcaagctcagtgctcctacgtg

SEQ ID NO: 1197223 - DNA, 25 bp, Homo sapien
gaacggtgcaatgacagcgatgcca

SEQ ID NO: 1197224 - DNA, 25 bp, Homo sapien
tgaggaagaacggtgcaatgacagc

SEQ ID NO: 1197225 - DNA, 25 bp, Homo sapien
caatgacagcgatgccatcagctcc

SEQ ID NO: 1197226 - DNA, 25 bp, Homo sapien
tttggtccatggcttgaggaagaac

SEQ ID NO: 1197227 - DNA, 25 bp, Homo sapien
gagaaccactgtaccattgcgactt

SEQ ID NO: 1197228 - DNA, 25 bp, Homo sapien
ggctcagtggatgacccaatcagat

SEQ ID NO: 1197229 - DNA, 25 bp, Homo sapien
gcatctacagatcaaccaggctcag

SEQ ID NO: 1197230 - DNA, 25 bp, Homo sapien
gagcagacacttgacccaaacaggc

SEQ ID NO: 1197231 - DNA, 25 bp, Homo sapien
ctttacccctgtcaaggcaggaatg

SEQ ID NO: 1197232 - DNA, 25 bp, Homo sapien
tttacccctgtcaaggcaggaatgt

SEQ ID NO: 1197233 - DNA, 25 bp, Homo sapien
tctttacccctgtcaaggcaggaat

SEQ ID NO: 1197234 - DNA, 25 bp, Homo sapien
agcaaactgttgctggcgattctga

SEQ ID NO: 1197235 - DNA, 25 bp, Homo sapien
ggaaagcaaactgttgctggcgatt

SEQ ID NO: 1197236 - DNA, 25 bp, Homo sapien
tctgatcaacacattgcccgaagtc

SEQ ID NO: 1197237 - DNA, 25 bp, Homo sapien
taagagatctgtatcactgaatttc

SEQ ID NO: 1197238 - DNA, 25 bp, Homo sapien
cagttgctcccatcaccagagcact

SEQ ID NO: 1197239 - DNA, 25 bp, Homo sapien
gttgctcccatcaccagagcactca

SEQ ID NO: 1197240 - DNA, 25 bp, Homo sapien
ctccagttgctcccatcaccagagc

SEQ ID NO: 1197241 - DNA, 25 bp, Homo sapien
ccatcaccagagcactcaacagttg

SEQ ID NO: 1197242 - DNA, 25 bp, Homo sapien
actgccacctctgtctcctgggttc

SEQ ID NO: 1197243 - DNA, 25 bp, Homo sapien
cagggtttcaccaagctggtctcaa

SEQ ID NO: 1197244 - DNA, 25 bp, Homo sapien
aactgctgatctcgtgatccacccg

SEQ ID NO: 1197245 - DNA, 25 bp, Homo sapien
gagtacagtggcttgatcttggctc

SEQ ID NO: 1197246 - DNA, 25 bp, Homo sapien
agttcagggctaaagagaagtcctt

SEQ ID NO: 1197247 - DNA, 25 bp, Homo sapien
tcagggctaaagagaagtccttttg

SEQ ID NO: 1197248 - DNA, 25 bp, Homo sapien
ttcaaaagcctccaacatctggttt

SEQ ID NO: 1197249 - DNA, 25 bp, Homo sapien
ggtaaacttatcagctagtgcagtg

SEQ ID NO: 1197250 - DNA, 25 bp, Homo sapien
gctttacaaaatgggcccgtgcaga

SEQ ID NO: 1197251 - DNA, 25 bp, Homo sapien
cttccaggatgcctaaggagcacat

SEQ ID NO: 1197252 - DNA, 25 bp, Homo sapien
gaagatggctgggatccatccaggc

SEQ ID NO: 1197253 - DNA, 25 bp, Homo sapien
aacaaagttgataaatctctggata

SEQ ID NO: 1197254 - DNA, 25 bp, Homo sapien
acaacaaagttgataaatctctgga

SEQ ID NO: 1197255 - DNA, 25 bp, Homo sapien
caacaaagttgataaatctctggat

SEQ ID NO: 1197256 - DNA, 25 bp, Homo sapien
gacaacaaagttgataaatctctgg

SEQ ID NO: 1197257 - DNA, 25 bp, Homo sapien
taggtagttcatagcactggcagca

SEQ ID NO: 1197258 - DNA, 25 bp, Homo sapien
cacagttttatatggttggccccga

SEQ ID NO: 1197259 - DNA, 25 bp, Homo sapien
taacgcagattcaattggcccaagg

SEQ ID NO: 1197260 - DNA, 25 bp, Homo sapien
gggactactacacacatcaagcttt

SEQ ID NO: 1197261 - DNA, 25 bp, Homo sapien
caaaaatcccaaagaaggagatcat

SEQ ID NO: 1197262 - DNA, 25 bp, Homo sapien
gaaggagatcatatgctaacagcaa

SEQ ID NO: 1197263 - DNA, 25 bp, Homo sapien
gatgagcaatcattcgaaatccctc

SEQ ID NO: 1197264 - DNA, 25 bp, Homo sapien
ggaaacatgactggtaccgtctatc

SEQ ID NO: 1197265 - DNA, 25 bp, Homo sapien
tcccagagaccagagtcatgatggc

SEQ ID NO: 1197266 - DNA, 25 bp, Homo sapien
cccagagaccagagtcatgatggct

SEQ ID NO: 1197267 - DNA, 25 bp, Homo sapien
gaggctttctgcagtggaagccggg

SEQ ID NO: 1197268 - DNA, 25 bp, Homo sapien
ctggaggctttctgcagtggaagcc

SEQ ID NO: 1197269 - DNA, 25 bp, Homo sapien
tcagtttagcttcagcactatcagt

SEQ ID NO: 1197270 - DNA, 25 bp, Homo sapien
tatgtctcaaggtgcaaaccctgat

SEQ ID NO: 1197271 - DNA, 25 bp, Homo sapien
aaaaatgcactatttaaggtagatt

SEQ ID NO: 1197272 - DNA, 25 bp, Homo sapien
gcaaaccctgatttgatagagaggc

SEQ ID NO: 1197273 - DNA, 25 bp, Homo sapien
tttaaggtagattatgtctcaaggt

SEQ ID NO: 1197274 - DNA, 25 bp, Homo sapien
tgagagctcctaaagacagatggaa

SEQ ID NO: 1197275 - DNA, 25 bp, Homo sapien
gactcctagagtttttgccccttca

SEQ ID NO: 1197276 - DNA, 25 bp, Homo sapien
ggattaggaaccagagaccgagata

SEQ ID NO: 1197277 - DNA, 25 bp, Homo sapien
gaatgactgagagttgtgactccta

SEQ ID NO: 1197278 - DNA, 25 bp, Homo sapien
tgttatgagaaagccgccctttact

SEQ ID NO: 1197279 - DNA, 25 bp, Homo sapien
ggaactgaaacaagtcctcacctga

SEQ ID NO: 1197280 - DNA, 25 bp, Homo sapien
cattctagagttagactgagcagcc

SEQ ID NO: 1197281 - DNA, 25 bp, Homo sapien
taaagtgcctgcctaaatgcagtag

SEQ ID NO: 1197282 - DNA, 25 bp, Homo sapien
ccagaggaagagtcctttggttctt

SEQ ID NO: 1197283 - DNA, 25 bp, Homo sapien
gaaggggaagtttgtggtgcccaga

SEQ ID NO: 1197284 - DNA, 25 bp, Homo sapien
agaggaagagtcctttggttctttg

SEQ ID NO: 1197285 - DNA, 25 bp, Homo sapien
gcccagaggaagagtcctttggttc

SEQ ID NO: 1197286 - DNA, 25 bp, Homo sapien
gatttcaataattcagggtcctgcg

SEQ ID NO: 1197287 - DNA, 25 bp, Homo sapien
gaaaggaagtcagccttcgatttca

SEQ ID NO: 1197288 - DNA, 25 bp, Homo sapien
gagaaagttctgagtcctttgggtc

SEQ ID NO: 1197289 - DNA, 25 bp, Homo sapien
ggataataacattagcccctgggct

SEQ ID NO: 1197290 - DNA, 25 bp, Homo sapien
ttagcaaagataattgaagtctact

SEQ ID NO: 1197291 - DNA, 25 bp, Homo sapien
attaaagagaggattagcaaagata

SEQ ID NO: 1197292 - DNA, 25 bp, Homo sapien
agggttgaggatatatgaatataac

SEQ ID NO: 1197293 - DNA, 25 bp, Homo sapien
taacaacttttaactagctgactaa

SEQ ID NO: 1197294 - DNA, 25 bp, Homo sapien
cagtaagtacggatatcacatcctc

SEQ ID NO: 1197295 - DNA, 25 bp, Homo sapien
cagaaccaaaaacgaacaactcatt

SEQ ID NO: 1197296 - DNA, 25 bp, Homo sapien
ctcagaaccaaaaacgaacaactca

SEQ ID NO: 1197297 - DNA, 25 bp, Homo sapien
ttggctttagtatcagtaagtacgg

SEQ ID NO: 1197298 - DNA, 25 bp, Homo sapien
tagttctttgtttattggataccca

SEQ ID NO: 1197299 - DNA, 25 bp, Homo sapien
ttctttgtttattggatacccaaga

SEQ ID NO: 1197300 - DNA, 25 bp, Homo sapien
ctttgtttattggatacccaagaat

SEQ ID NO: 1197301 - DNA, 25 bp, Homo sapien
tgtttattggatacccaagaattaa

SEQ ID NO: 1197302 - DNA, 25 bp, Homo sapien
taaacttgggttgcagtcactctgc

SEQ ID NO: 1197303 - DNA, 25 bp, Homo sapien
ttggattttccgtgcccttcaggtg

SEQ ID NO: 1197304 - DNA, 25 bp, Homo sapien
gttgtggcaaataccctttctagga

SEQ ID NO: 1197305 - DNA, 25 bp, Homo sapien
acaaagtgtgaggtagtgctctgcc

SEQ ID NO: 1197306 - DNA, 25 bp, Homo sapien
cctcaagccaattatttaaagcggt

SEQ ID NO: 1197307 - DNA, 25 bp, Homo sapien
taaagcggttattagtcaacagaga

SEQ ID NO: 1197308 - DNA, 25 bp, Homo sapien
gaggctgagaggagacctacacata

SEQ ID NO: 1197309 - DNA, 25 bp, Homo sapien
ccagaaagccttatatcttcagtga

SEQ ID NO: 1197310 - DNA, 25 bp, Homo sapien
atgactcagagtggaacctgtagca

SEQ ID NO: 1197311 - DNA, 25 bp, Homo sapien
tggatactagaattactgtatttat

SEQ ID NO: 1197312 - DNA, 25 bp, Homo sapien
cctctacaaactactttagaaagat

SEQ ID NO: 1197313 - DNA, 25 bp, Homo sapien
aaaggtaaatgggatgtaataatct

SEQ ID NO: 1197314 - DNA, 25 bp, Homo sapien
gaaagtgggccgatttcaacacaac

SEQ ID NO: 1197315 - DNA, 25 bp, Homo sapien
taatttaggctctgcacctgagacc

SEQ ID NO: 1197316 - DNA, 25 bp, Homo sapien
ccaactaggagatttcagaggtcaa

SEQ ID NO: 1197317 - DNA, 25 bp, Homo sapien
ggctcttggcaactagcactgtcta

SEQ ID NO: 1197318 - DNA, 25 bp, Homo sapien
gaagacattaaaccgataccacaga

SEQ ID NO: 1197319 - DNA, 25 bp, Homo sapien
gatacaacttaccaaaattggacca

SEQ ID NO: 1197320 - DNA, 25 bp, Homo sapien
cctgaacagatacaacttaccaaaa

SEQ ID NO: 1197321 - DNA, 25 bp, Homo sapien
ctagaagacattaaaccgataccac

SEQ ID NO: 1197322 - DNA, 25 bp, Homo sapien
aacagagaaacgcacagcaactcgc

SEQ ID NO: 1197323 - DNA, 25 bp, Homo sapien
caactcgcatggaggaatcggcgaa

SEQ ID NO: 1197324 - DNA, 25 bp, Homo sapien
tggccttctaccgagacaacagaga

SEQ ID NO: 1197325 - DNA, 25 bp, Homo sapien
tcttaggaccgtgtgtgactctggc

SEQ ID NO: 1197326 - DNA, 25 bp, Homo sapien
gcgcacgcaacccgcaatccgggga

SEQ ID NO: 1197327 - DNA, 25 bp, Homo sapien
gcacgcaacccgcaatccggggacc

SEQ ID NO: 1197328 - DNA, 25 bp, Homo sapien
cggcgaggcgcgcacgcaacccgca

SEQ ID NO: 1197329 - DNA, 25 bp, Homo sapien
gaggcgcgcacgcaacccgcaatcc

SEQ ID NO: 1197330 - DNA, 25 bp, Homo sapien
ccagaggaggaagcgcgctttgcct

SEQ ID NO: 1197331 - DNA, 25 bp, Homo sapien
ccccggcgtacgcaggccagaggag

SEQ ID NO: 1197332 - DNA, 25 bp, Homo sapien
gaagcgcgctttgcctgctagaggc

SEQ ID NO: 1197333 - DNA, 25 bp, Homo sapien
aggctgcccggacggcgcaagcgca

SEQ ID NO: 1197334 - DNA, 25 bp, Homo sapien
ctcgctatactagccaaaggcgctc

SEQ ID NO: 1197335 - DNA, 25 bp, Homo sapien
ccagttattcgtggcttgaatgaat

SEQ ID NO: 1197336 - DNA, 25 bp, Homo sapien
aggcctgcacgacggcgccagttat

SEQ ID NO: 1197337 - DNA, 25 bp, Homo sapien
gccaaaggcgctctccctttacatt

SEQ ID NO: 1197338 - DNA, 25 bp, Homo sapien
cactgctctaatttcataggatggg

SEQ ID NO: 1197339 - DNA, 25 bp, Homo sapien
tcacacatgaatttctgcctgtttt

SEQ ID NO: 1197340 - DNA, 25 bp, Homo sapien
cacaccaggcatacagaaaattttt

SEQ ID NO: 1197341 - DNA, 25 bp, Homo sapien
tccttttgccacaccaggcatacag

SEQ ID NO: 1197342 - DNA, 25 bp, Homo sapien
tcccatgccagtgtaattataacct

SEQ ID NO: 1197343 - DNA, 25 bp, Homo sapien
atttcccatgccagtgtaattataa

SEQ ID NO: 1197344 - DNA, 25 bp, Homo sapien
ttcccatgccagtgtaattataacc

SEQ ID NO: 1197345 - DNA, 25 bp, Homo sapien
tttcccatgccagtgtaattataac

SEQ ID NO: 1197346 - DNA, 25 bp, Homo sapien
ccttcaagttcaaacatctccagac

SEQ ID NO: 1197347 - DNA, 25 bp, Homo sapien
tgtttgacttcactcataattttaa

SEQ ID NO: 1197348 - DNA, 25 bp, Homo sapien
taaatgatccttaaagcccaaaaga

SEQ ID NO: 1197349 - DNA, 25 bp, Homo sapien
tctaaaaccagtggtgaggttacag

SEQ ID NO: 1197350 - DNA, 25 bp, Homo sapien
aagacacaagtatctgacagaatac

SEQ ID NO: 1197351 - DNA, 25 bp, Homo sapien
tcaagtactgatgcattcattacaa

SEQ ID NO: 1197352 - DNA, 25 bp, Homo sapien
caccaaggctggatgatttagccta

SEQ ID NO: 1197353 - DNA, 25 bp, Homo sapien
tagcctagataatagtcaagtactg

SEQ ID NO: 1197354 - DNA, 25 bp, Homo sapien
cattagtactacgtattaagaaagt

SEQ ID NO: 1197355 - DNA, 25 bp, Homo sapien
tattaagatgatcacggaatagata

SEQ ID NO: 1197356 - DNA, 25 bp, Homo sapien
cttataagatcattagtactacgta

SEQ ID NO: 1197357 - DNA, 25 bp, Homo sapien
ttttctcttataagatcattagtac

SEQ ID NO: 1197358 - DNA, 25 bp, Homo sapien
ttcagcatttgctgtagtgtcagga

SEQ ID NO: 1197359 - DNA, 25 bp, Homo sapien
cctttcttgagtagtaatccttcaa

SEQ ID NO: 1197360 - DNA, 25 bp, Homo sapien
aggaacaccatagccagaggcccct

SEQ ID NO: 1197361 - DNA, 25 bp, Homo sapien
ttcctttcttgagtagtaatccttc

SEQ ID NO: 1197362 - DNA, 25 bp, Homo sapien
cttgagtagtaatccttcaagttgg

SEQ ID NO: 1197363 - DNA, 25 bp, Homo sapien
ttgggtgtacttatattctccttgg

SEQ ID NO: 1197364 - DNA, 25 bp, Homo sapien
acagaaggaaaagaatgaaacaagc

SEQ ID NO: 1197365 - DNA, 25 bp, Homo sapien
tacagaaggaaaagaatgaaacaag

SEQ ID NO: 1197366 - DNA, 25 bp, Homo sapien
cagaaggaaaagaatgaaacaagca

SEQ ID NO: 1197367 - DNA, 25 bp, Homo sapien
gaaggaaaagaatgaaacaagcaaa

SEQ ID NO: 1197368 - DNA, 25 bp, Homo sapien
tcataagtacggacagcaaacggaa

SEQ ID NO: 1197369 - DNA, 25 bp, Homo sapien
ttacatcaactagggacaaaccagc

SEQ ID NO: 1197370 - DNA, 25 bp, Homo sapien
atttcagggtcgctagatgcatcca

SEQ ID NO: 1197371 - DNA, 25 bp, Homo sapien
tacatcgctccccagaaaagtctaa

SEQ ID NO: 1197372 - DNA, 25 bp, Homo sapien
gggtcaaaggccactggctttcagg

SEQ ID NO: 1197373 - DNA, 25 bp, Homo sapien
gcacagcggcttcaggggtcaaagg

SEQ ID NO: 1197374 - DNA, 25 bp, Homo sapien
tcaggggaacaacatccaccctttc

SEQ ID NO: 1197375 - DNA, 25 bp, Homo sapien
aagtcagcactcaatctcattctcc

SEQ ID NO: 1197376 - DNA, 25 bp, Homo sapien
catttatttaaatcaggtcctggag

SEQ ID NO: 1197377 - DNA, 25 bp, Homo sapien
acattatatctaaaactgctagcag

SEQ ID NO: 1197378 - DNA, 25 bp, Homo sapien
gccctttgataactatgcattctgg

SEQ ID NO: 1197379 - DNA, 25 bp, Homo sapien
gatacattctaacctagacttggtg

SEQ ID NO: 1197380 - DNA, 25 bp, Homo sapien
tagaaaccagcaaatccaggtctcc

SEQ ID NO: 1197381 - DNA, 25 bp, Homo sapien
aaccagcaaatccaggtctcccaag

SEQ ID NO: 1197382 - DNA, 25 bp, Homo sapien
gttagaaaccagcaaatccaggtct

SEQ ID NO: 1197383 - DNA, 25 bp, Homo sapien
gcaaatccaggtctcccaagtcagg

SEQ ID NO: 1197384 - DNA, 25 bp, Homo sapien
aacatatacaagcaaggttagaaat

SEQ ID NO: 1197385 - DNA, 25 bp, Homo sapien
gtaacaacatatacaagcaaggtta

SEQ ID NO: 1197386 - DNA, 25 bp, Homo sapien
ctgtaacaacatatacaagcaaggt

SEQ ID NO: 1197387 - DNA, 25 bp, Homo sapien
atatacaagcaaggttagaaatttc

SEQ ID NO: 1197388 - DNA, 25 bp, Homo sapien
tataaatggtcatttctgcaataaa

SEQ ID NO: 1197389 - DNA, 25 bp, Homo sapien
ctgcccagctgcttgatataaatgg

SEQ ID NO: 1197390 - DNA, 25 bp, Homo sapien
gatataaatggtcatttctgcaata

SEQ ID NO: 1197391 - DNA, 25 bp, Homo sapien
gctgcttgatataaatggtcatttc

SEQ ID NO: 1197392 - DNA, 25 bp, Homo sapien
tggttacctagaccaggatttggga

SEQ ID NO: 1197393 - DNA, 25 bp, Homo sapien
tgattactggctgatactaggactc

SEQ ID NO: 1197394 - DNA, 25 bp, Homo sapien
gagtttgataaaccataggactggg

SEQ ID NO: 1197395 - DNA, 25 bp, Homo sapien
taattgggtccagagtggttaccta

SEQ ID NO: 1197396 - DNA, 25 bp, Homo sapien
tcttctttgtaagtccggagtaagc

SEQ ID NO: 1197397 - DNA, 25 bp, Homo sapien
tttgcagctgatgctctaaatcttg

SEQ ID NO: 1197398 - DNA, 25 bp, Homo sapien
tgttttgcagctgatgctctaaatc

SEQ ID NO: 1197399 - DNA, 25 bp, Homo sapien
tgatgttttgcagctgatgctctaa

SEQ ID NO: 1197400 - DNA, 25 bp, Homo sapien
gcagctgatgctctaaatcttgaga

SEQ ID NO: 1197401 - DNA, 25 bp, Homo sapien
gtgaccaaggaaccacacccacttg

SEQ ID NO: 1197402 - DNA, 25 bp, Homo sapien
cgctgagatggttcgaactgagcca

SEQ ID NO: 1197403 - DNA, 25 bp, Homo sapien
ttttgtcgctgagatggttcgaact

SEQ ID NO: 1197404 - DNA, 25 bp, Homo sapien
tcaatgttgctactagtccaaggat

SEQ ID NO: 1197405 - DNA, 25 bp, Homo sapien
caaatcatgatcctgttccaactgg

SEQ ID NO: 1197406 - DNA, 25 bp, Homo sapien
tcatgatcctgttccaactggtaca

SEQ ID NO: 1197407 - DNA, 25 bp, Homo sapien
aatcatgatcctgttccaactggta

SEQ ID NO: 1197408 - DNA, 25 bp, Homo sapien
aaatcatgatcctgttccaactggt

SEQ ID NO: 1197409 - DNA, 25 bp, Homo sapien
cctctaataatgacaactgaatttt

SEQ ID NO: 1197410 - DNA, 25 bp, Homo sapien
ccctctaataatgacaactgaattt

SEQ ID NO: 1197411 - DNA, 25 bp, Homo sapien
cccctctaataatgacaactgaatt

SEQ ID NO: 1197412 - DNA, 25 bp, Homo sapien
agaatcagaaatagtctgctctcta

SEQ ID NO: 1197413 - DNA, 25 bp, Homo sapien
cagaaatagtctgctctctaggtat

SEQ ID NO: 1197414 - DNA, 25 bp, Homo sapien
tctaggtatttcatggttggtttac

SEQ ID NO: 1197415 - DNA, 25 bp, Homo sapien
tatttcatggttggtttaccactta

SEQ ID NO: 1197416 - DNA, 25 bp, Homo sapien
cagaagtacagggtagagccaacgg

SEQ ID NO: 1197417 - DNA, 25 bp, Homo sapien
tgggacaaacatgcaggcgctgctc

SEQ ID NO: 1197418 - DNA, 25 bp, Homo sapien
ttaacctgagagcacttagaagagc

SEQ ID NO: 1197419 - DNA, 25 bp, Homo sapien
gagccaacggaactgtttaacctga

SEQ ID NO: 1197420 - DNA, 25 bp, Homo sapien
agacttactgtaccttcatggctga

SEQ ID NO: 1197421 - DNA, 25 bp, Homo sapien
taggtgctgatgaatttgagtgtgt

SEQ ID NO: 1197422 - DNA, 25 bp, Homo sapien
ttctgtaataaccaatcagcatgct

SEQ ID NO: 1197423 - DNA, 25 bp, Homo sapien
tttcatattacaggtaggtgctgat

SEQ ID NO: 1197424 - DNA, 25 bp, Homo sapien
gttcacatgctactggtactcagag

SEQ ID NO: 1197425 - DNA, 25 bp, Homo sapien
tcccaaggaagacatgatagaggtt

SEQ ID NO: 1197426 - DNA, 25 bp, Homo sapien
actcttctgaggtgtgttcacatgc

SEQ ID NO: 1197427 - DNA, 25 bp, Homo sapien
taaactgaatatgcgcaggagatgg

SEQ ID NO: 1197428 - DNA, 25 bp, Homo sapien
agtgacttaacaactacaaagttag

SEQ ID NO: 1197429 - DNA, 25 bp, Homo sapien
gaagtatagactcaaatcgaacgct

SEQ ID NO: 1197430 - DNA, 25 bp, Homo sapien
ggacgaggaagtatagactcaaatc

SEQ ID NO: 1197431 - DNA, 25 bp, Homo sapien
tagactcaaatcgaacgctgtagcc

SEQ ID NO: 1197432 - DNA, 25 bp, Homo sapien
tcgaacgctgtagccacagcttttt

SEQ ID NO: 1197433 - DNA, 25 bp, Homo sapien
cgaatgcctgcttctaattttctca

SEQ ID NO: 1197434 - DNA, 25 bp, Homo sapien
tgtatttcatctacaattacatgac

SEQ ID NO: 1197435 - DNA, 25 bp, Homo sapien
ctgcttctaattttctcaggagcac

SEQ ID NO: 1197436 - DNA, 25 bp, Homo sapien
acatgactgattcctcgaatgcctg

SEQ ID NO: 1197437 - DNA, 25 bp, Homo sapien
taccttttatccagccagactgtta

SEQ ID NO: 1197438 - DNA, 25 bp, Homo sapien
tgtagtaattggtctgtaagtgcac

SEQ ID NO: 1197439 - DNA, 25 bp, Homo sapien
tgcaactgccttcggtatattacct

SEQ ID NO: 1197440 - DNA, 25 bp, Homo sapien
tgtaaggtgacagaactaggtaaga

SEQ ID NO: 1197441 - DNA, 25 bp, Homo sapien
gtatcaatagtagcagacataagaa

SEQ ID NO: 1197442 - DNA, 25 bp, Homo sapien
ggtatcaatagtagcagacataaga

SEQ ID NO: 1197443 - DNA, 25 bp, Homo sapien
tatcaatagtagcagacataagaac

SEQ ID NO: 1197444 - DNA, 25 bp, Homo sapien
catctgaatgcagtcttccagaaaa

SEQ ID NO: 1197445 - DNA, 25 bp, Homo sapien
ggtggaggaacaaagtgggtcatct

SEQ ID NO: 1197446 - DNA, 25 bp, Homo sapien
gtcatctgaatgcagtcttccagaa

SEQ ID NO: 1197447 - DNA, 25 bp, Homo sapien
gaggaacaaagtgggtcatctgaat

SEQ ID NO: 1197448 - DNA, 25 bp, Homo sapien
caaaaaaaccaacacagctccagga

SEQ ID NO: 1197449 - DNA, 25 bp, Homo sapien
tgtacttaagtagagcctcgatgag

SEQ ID NO: 1197450 - DNA, 25 bp, Homo sapien
tttcaatgtacttaagtagagcctc

SEQ ID NO: 1197451 - DNA, 25 bp, Homo sapien
gtagagcctcgatgagttcaaaagg

SEQ ID NO: 1197452 - DNA, 25 bp, Homo sapien
tggttactccaactggtactggatc

SEQ ID NO: 1197453 - DNA, 25 bp, Homo sapien
cttggttactccaactggtactgga

SEQ ID NO: 1197454 - DNA, 25 bp, Homo sapien
ttggttactccaactggtactggat

SEQ ID NO: 1197455 - DNA, 25 bp, Homo sapien
tgtttagtatctacgtcacttccaa

SEQ ID NO: 1197456 - DNA, 25 bp, Homo sapien
tcttcctcaatttagatgggttaca

SEQ ID NO: 1197457 - DNA, 25 bp, Homo sapien
tcctaaaaagatcacccaataactg

SEQ ID NO: 1197458 - DNA, 25 bp, Homo sapien
tgaacaacaatctactaagctcaga

SEQ ID NO: 1197459 - DNA, 25 bp, Homo sapien
aggagtcaatgacataaacaacatc

SEQ ID NO: 1197460 - DNA, 25 bp, Homo sapien
gtcaatgacataaacaacatcgttt

SEQ ID NO: 1197461 - DNA, 25 bp, Homo sapien
caacatcgtttatggtaatgcttgt

SEQ ID NO: 1197462 - DNA, 25 bp, Homo sapien
gagtcaatgacataaacaacatcgt

SEQ ID NO: 1197463 - DNA, 25 bp, Homo sapien
taaagccatacctacttgtgatgtc

SEQ ID NO: 1197464 - DNA, 25 bp, Homo sapien
cactaaatgactgggattggcacag

SEQ ID NO: 1197465 - DNA, 25 bp, Homo sapien
gaatggcacaagtaagaatcagcaa

SEQ ID NO: 1197466 - DNA, 25 bp, Homo sapien
tatcagctgaactgccttggccaaa

SEQ ID NO: 1197467 - DNA, 25 bp, Homo sapien
agcatagttggtcatattgttgtga

SEQ ID NO: 1197468 - DNA, 25 bp, Homo sapien
gcatagttggtcatattgttgtgag

SEQ ID NO: 1197469 - DNA, 25 bp, Homo sapien
tagcatagttggtcatattgttgtg

SEQ ID NO: 1197470 - DNA, 25 bp, Homo sapien
ggtttctgacttatcctcacagctt

SEQ ID NO: 1197471 - DNA, 25 bp, Homo sapien
tcacagcttgatagccttttaggct

SEQ ID NO: 1197472 - DNA, 25 bp, Homo sapien
atctggttgcatagtggtttctgac

SEQ ID NO: 1197473 - DNA, 25 bp, Homo sapien
tgcagcaaggtaatcagggatacag

SEQ ID NO: 1197474 - DNA, 25 bp, Homo sapien
ccagaaattggccaattcctcctag

SEQ ID NO: 1197475 - DNA, 25 bp, Homo sapien
ttggccagaaattggccaattcctc

SEQ ID NO: 1197476 - DNA, 25 bp, Homo sapien
cctagacgcagaagttttatgctaa

SEQ ID NO: 1197477 - DNA, 25 bp, Homo sapien
ctcctagacgcagaagttttatgct

SEQ ID NO: 1197478 - DNA, 25 bp, Homo sapien
tgattaatatctgcgtcaagtaggt

SEQ ID NO: 1197479 - DNA, 25 bp, Homo sapien
taagtgttatctgccagaacaagac

SEQ ID NO: 1197480 - DNA, 25 bp, Homo sapien
ggaggccttactattattatcacag

SEQ ID NO: 1197481 - DNA, 25 bp, Homo sapien
taactatctaaggtaagactggagg

SEQ ID NO: 1197482 - DNA, 25 bp, Homo sapien
tcattggcatctaatgcatcaagct

SEQ ID NO: 1197483 - DNA, 25 bp, Homo sapien
tcattttgccaaaacgaggctcaat

SEQ ID NO: 1197484 - DNA, 25 bp, Homo sapien
catcattggcatctaatgcatcaag

SEQ ID NO: 1197485 - DNA, 25 bp, Homo sapien
cattttgccaaaacgaggctcaatg

SEQ ID NO: 1197486 - DNA, 25 bp, Homo sapien
gggctacgtgatcagaaaatctgtt

SEQ ID NO: 1197487 - DNA, 25 bp, Homo sapien
ccagcaaaatttcgatggatatagc

SEQ ID NO: 1197488 - DNA, 25 bp, Homo sapien
tcgatggatatagcccagccgcttt

SEQ ID NO: 1197489 - DNA, 25 bp, Homo sapien
aaagggctacgtgatcagaaaatct

SEQ ID NO: 1197490 - DNA, 25 bp, Homo sapien
tggcttcccaagtcattcttagtgt

SEQ ID NO: 1197491 - DNA, 25 bp, Homo sapien
ttgtgctcacaaaaacgtatctctg

SEQ ID NO: 1197492 - DNA, 25 bp, Homo sapien
aatctctttgagctgaactttggct

SEQ ID NO: 1197493 - DNA, 25 bp, Homo sapien
tagtgtagccatattaagtcttttg

SEQ ID NO: 1197494 - DNA, 25 bp, Homo sapien
aactagaccagtgttcacgagaact

SEQ ID NO: 1197495 - DNA, 25 bp, Homo sapien
gcttatgacagaagagaaccactca

SEQ ID NO: 1197496 - DNA, 25 bp, Homo sapien
cagctcatcaagaaacatgggttgg

SEQ ID NO: 1197497 - DNA, 25 bp, Homo sapien
agtactcattctgggaactagacca

SEQ ID NO: 1197498 - DNA, 25 bp, Homo sapien
gataatctaagaggacacctactgg

SEQ ID NO: 1197499 - DNA, 25 bp, Homo sapien
tggaaagcatgacagtcaaccgctg

SEQ ID NO: 1197500 - DNA, 25 bp, Homo sapien
aataagagcttgactgataggacca

SEQ ID NO: 1197501 - DNA, 25 bp, Homo sapien
gaatgaaggctgacgtttttaccca

SEQ ID NO: 1197502 - DNA, 25 bp, Homo sapien
tctggtccagtgttagtaaacactt

SEQ ID NO: 1197503 - DNA, 25 bp, Homo sapien
ccagtgttagtaaacacttgtgtca

SEQ ID NO: 1197504 - DNA, 25 bp, Homo sapien
gagataacaacatccaaattattat

SEQ ID NO: 1197505 - DNA, 25 bp, Homo sapien
tccaaattattatctggtccagtgt

SEQ ID NO: 1197506 - DNA, 25 bp, Homo sapien
gatgatttgtggataagtgcattac

SEQ ID NO: 1197507 - DNA, 25 bp, Homo sapien
tttccttatgatagcatacattggg

SEQ ID NO: 1197508 - DNA, 25 bp, Homo sapien
tcttttccttatgatagcatacatt

SEQ ID NO: 1197509 - DNA, 25 bp, Homo sapien
aaaaggacaattaacagatgatttg

SEQ ID NO: 1197510 - DNA, 25 bp, Homo sapien
atacaaagaagggagatgggtactt

SEQ ID NO: 1197511 - DNA, 25 bp, Homo sapien
ccaaatacaaagaagggagatgggt

SEQ ID NO: 1197512 - DNA, 25 bp, Homo sapien
tttcaccaaatacaaagaagggaga

SEQ ID NO: 1197513 - DNA, 25 bp, Homo sapien
acaaagaagggagatgggtacttca

SEQ ID NO: 1197514 - DNA, 25 bp, Homo sapien
gggtgactaaagtcatgcctttagc

SEQ ID NO: 1197515 - DNA, 25 bp, Homo sapien
gactaaagtcatgcctttagcagag

SEQ ID NO: 1197516 - DNA, 25 bp, Homo sapien
tcatgcctttagcagagatggctcg

SEQ ID NO: 1197517 - DNA, 25 bp, Homo sapien
aagtcatgcctttagcagagatggc

SEQ ID NO: 1197518 - DNA, 25 bp, Homo sapien
aattcagtttggagttcacatctga

SEQ ID NO: 1197519 - DNA, 25 bp, Homo sapien
gaattcagtttggagttcacatctg

SEQ ID NO: 1197520 - DNA, 25 bp, Homo sapien
tcagtttggagttcacatctgaaaa

SEQ ID NO: 1197521 - DNA, 25 bp, Homo sapien
ctaagaattcagtttggagttcaca

SEQ ID NO: 1197522 - DNA, 25 bp, Homo sapien
tctgattccatagtggtggtgtgcc

SEQ ID NO: 1197523 - DNA, 25 bp, Homo sapien
gaatttaagagacccagaatactgg

SEQ ID NO: 1197524 - DNA, 25 bp, Homo sapien
cctagtggtagacatggctcaaatt

SEQ ID NO: 1197525 - DNA, 25 bp, Homo sapien
tcaagaatatgatggctgagcctac

SEQ ID NO: 1197526 - DNA, 25 bp, Homo sapien
agaccagtgatacaggcagcagctt

SEQ ID NO: 1197527 - DNA, 25 bp, Homo sapien
accagtgatacaggcagcagcttca

SEQ ID NO: 1197528 - DNA, 25 bp, Homo sapien
ctgcccggagaccagtgatacaggc

SEQ ID NO: 1197529 - DNA, 25 bp, Homo sapien
cccggagaccagtgatacaggcagc

SEQ ID NO: 1197530 - DNA, 25 bp, Homo sapien
tcttgggaggacgtggaccatctcc

SEQ ID NO: 1197531 - DNA, 25 bp, Homo sapien
ccgcttccattgtcgtatcgggcca

SEQ ID NO: 1197532 - DNA, 25 bp, Homo sapien
gcttccattgtcgtatcgggccatc

SEQ ID NO: 1197533 - DNA, 25 bp, Homo sapien
ccattgtcgtatcgggccatcttgg

SEQ ID NO: 1197534 - DNA, 25 bp, Homo sapien
catagcctccaccactgtaactaga

SEQ ID NO: 1197535 - DNA, 25 bp, Homo sapien
gccatagcctccaccactgtaacta

SEQ ID NO: 1197536 - DNA, 25 bp, Homo sapien
tagcctccaccactgtaactagaac

SEQ ID NO: 1197537 - DNA, 25 bp, Homo sapien
tgtaactagaacctccccttctata

SEQ ID NO: 1197538 - DNA, 25 bp, Homo sapien
tgcccgaaaggagttggcgctgcca

SEQ ID NO: 1197539 - DNA, 25 bp, Homo sapien
tcctgcccgaaaggagttggcgctg

SEQ ID NO: 1197540 - DNA, 25 bp, Homo sapien
ccgaaaggagttggcgctgccacca

SEQ ID NO: 1197541 - DNA, 25 bp, Homo sapien
catatcctgcccgaaaggagttggc

SEQ ID NO: 1197542 - DNA, 25 bp, Homo sapien
tctgtagtctcctccagagttgcct

SEQ ID NO: 1197543 - DNA, 25 bp, Homo sapien
tccagagttgcctctaaagccacct

SEQ ID NO: 1197544 - DNA, 25 bp, Homo sapien
tctgtagcctccactaggccctctg

SEQ ID NO: 1197545 - DNA, 25 bp, Homo sapien
tagcctccactaggccctctgtagt

SEQ ID NO: 1197546 - DNA, 25 bp, Homo sapien
ctcttccctgtccaaagtagccagt

SEQ ID NO: 1197547 - DNA, 25 bp, Homo sapien
cctgtccaaagtagccagttccata

SEQ ID NO: 1197548 - DNA, 25 bp, Homo sapien
cttccctgtccaaagtagccagttc

SEQ ID NO: 1197549 - DNA, 25 bp, Homo sapien
tccctgtccaaagtagccagttcca

SEQ ID NO: 1197550 - DNA, 25 bp, Homo sapien
aaaacacgtaacacatagcatgcct

SEQ ID NO: 1197551 - DNA, 25 bp, Homo sapien
ttttaagagatcgttatattttaca

SEQ ID NO: 1197552 - DNA, 25 bp, Homo sapien
catactggaaaaaacacgtaacaca

SEQ ID NO: 1197553 - DNA, 25 bp, Homo sapien
tctattgtattaaacgaaagccagg

SEQ ID NO: 1197554 - DNA, 25 bp, Homo sapien
tagtatacttttgaaacagggtaca

SEQ ID NO: 1197555 - DNA, 25 bp, Homo sapien
tccaagatgatttattctattacaa

SEQ ID NO: 1197556 - DNA, 25 bp, Homo sapien
tctattacaagtagtatcacttagt

SEQ ID NO: 1197557 - DNA, 25 bp, Homo sapien
taacatacgaggtcaacaaacaaac

SEQ ID NO: 1197558 - DNA, 25 bp, Homo sapien
tgtgcacttgccagtatttacttca

SEQ ID NO: 1197559 - DNA, 25 bp, Homo sapien
tgtggcttgtgcacttgccagtatt

SEQ ID NO: 1197560 - DNA, 25 bp, Homo sapien
gcttgtgcacttgccagtatttact

SEQ ID NO: 1197561 - DNA, 25 bp, Homo sapien
tgcacttgccagtatttacttcaaa

SEQ ID NO: 1197562 - DNA, 25 bp, Homo sapien
gcagaagatgctgatgaagttatgg

SEQ ID NO: 1197563 - DNA, 25 bp, Homo sapien
gatgctgatgaagttatgggtaaat

SEQ ID NO: 1197564 - DNA, 25 bp, Homo sapien
cagaagatgctgatgaagttatggg

SEQ ID NO: 1197565 - DNA, 25 bp, Homo sapien
gaagatgctgatgaagttatgggta

SEQ ID NO: 1197566 - DNA, 25 bp, Homo sapien
ccagtctgcgtgtcccgtatgaggg

SEQ ID NO: 1197567 - DNA, 25 bp, Homo sapien
ttgcgacgaagtgctgcaggactgt

SEQ ID NO: 1197568 - DNA, 25 bp, Homo sapien
gctcaggccgaggacacgggagagg

SEQ ID NO: 1197569 - DNA, 25 bp, Homo sapien
tgtggcgggacgagaaggtgtcgct

SEQ ID NO: 1197570 - DNA, 25 bp, Homo sapien
gaggcgagaagtccgcctccgctgt

SEQ ID NO: 1197571 - DNA, 25 bp, Homo sapien
agatggcgtcgggctccaaggcctc

SEQ ID NO: 1197572 - DNA, 25 bp, Homo sapien
aagggcaccgcgatcccagtgcggt

SEQ ID NO: 1197573 - DNA, 25 bp, Homo sapien
ctgctgaggagatggcgtcgggctc

SEQ ID NO: 1197574 - DNA, 25 bp, Homo sapien
ccagagggttccagttagtgtcacc

SEQ ID NO: 1197575 - DNA, 25 bp, Homo sapien
gcaccttctggtgtgtgcggcacct

SEQ ID NO: 1197576 - DNA, 25 bp, Homo sapien
taatcaccctgaaacgtatgaggac

SEQ ID NO: 1197577 - DNA, 25 bp, Homo sapien
gaaatcctatttggtgaaccctgta

SEQ ID NO: 1197578 - DNA, 25 bp, Homo sapien
actagagggcgagccaacagagctt

SEQ ID NO: 1197579 - DNA, 25 bp, Homo sapien
aacagagcttccacttgggattgcg

SEQ ID NO: 1197580 - DNA, 25 bp, Homo sapien
ttttaaccagagacgggactccaga

SEQ ID NO: 1197581 - DNA, 25 bp, Homo sapien
cagatgggcctagctttccttgtcc

SEQ ID NO: 1197582 - DNA, 25 bp, Homo sapien
gtaattccttcatgtggcgagcctt

SEQ ID NO: 1197583 - DNA, 25 bp, Homo sapien
caggaacgaatccacagaaaaagat

SEQ ID NO: 1197584 - DNA, 25 bp, Homo sapien
tccttcgtgtttggtatgttcccag

SEQ ID NO: 1197585 - DNA, 25 bp, Homo sapien
cccagcaggaacgaatccacagaaa

SEQ ID NO: 1197586 - DNA, 25 bp, Homo sapien
gaggccgcttcgctgcttgagcctg

SEQ ID NO: 1197587 - DNA, 25 bp, Homo sapien
agagactgacgggtgggcgccccta

SEQ ID NO: 1197588 - DNA, 25 bp, Homo sapien
acttccgagcgcgtgcccgagtgcg

SEQ ID NO: 1197589 - DNA, 25 bp, Homo sapien
cacgctgggtcacggcgaaggcaag

SEQ ID NO: 1197590 - DNA, 25 bp, Homo sapien
caccacagtcacgttgaaggcggcg

SEQ ID NO: 1197591 - DNA, 25 bp, Homo sapien
tcggcctggttgttgtagtcggtca

SEQ ID NO: 1197592 - DNA, 25 bp, Homo sapien
cggcgttgacgaactcgggcatgca

SEQ ID NO: 1197593 - DNA, 25 bp, Homo sapien
cacacagtattcctcgggcggagtc

SEQ ID NO: 1197594 - DNA, 25 bp, Homo sapien
tccgatccaagaatgcgctgtgatg

SEQ ID NO: 1197595 - DNA, 25 bp, Homo sapien
tccaagaatgcgctgtgatgacctt

SEQ ID NO: 1197596 - DNA, 25 bp, Homo sapien
tcttgtttccgatccaagaatgcgc

SEQ ID NO: 1197597 - DNA, 25 bp, Homo sapien
gtttccgatccaagaatgcgctgtg

SEQ ID NO: 1197598 - DNA, 25 bp, Homo sapien
ccctggaaggacatctaaacatttt

SEQ ID NO: 1197599 - DNA, 25 bp, Homo sapien
catctaaacattttaaaggcgaaag

SEQ ID NO: 1197600 - DNA, 25 bp, Homo sapien
cctcagccctggaaggacatctaaa

SEQ ID NO: 1197601 - DNA, 25 bp, Homo sapien
ggacatctaaacattttaaaggcga

SEQ ID NO: 1197602 - DNA, 25 bp, Homo sapien
ccccttaactcaacagagcaatcac

SEQ ID NO: 1197603 - DNA, 25 bp, Homo sapien
cataggcaatataggcagcgaaggc

SEQ ID NO: 1197604 - DNA, 25 bp, Homo sapien
aggcaatataggcagcgaaggcatt

SEQ ID NO: 1197605 - DNA, 25 bp, Homo sapien
tataggcagcgaaggcatttgctcc

SEQ ID NO: 1197606 - DNA, 25 bp, Homo sapien
cagtaattgtcaattgaatttcagg

SEQ ID NO: 1197607 - DNA, 25 bp, Homo sapien
tgagagccaagattgacaaccccac

SEQ ID NO: 1197608 - DNA, 25 bp, Homo sapien
gcatctgagatttcagacatcaggc

SEQ ID NO: 1197609 - DNA, 25 bp, Homo sapien
taaataacctttagctacacagtgc

SEQ ID NO: 1197610 - DNA, 25 bp, Homo sapien
gaaaagtggtggctagacctagttc

SEQ ID NO: 1197611 - DNA, 25 bp, Homo sapien
tctagggcatggagcttagcagcta

SEQ ID NO: 1197612 - DNA, 25 bp, Homo sapien
gtgccaaaacacttacataactact

SEQ ID NO: 1197613 - DNA, 25 bp, Homo sapien
tagcagctagtgataaagaaactca

SEQ ID NO: 1197614 - DNA, 25 bp, Homo sapien
actgggcccacgtatttcgggctgg

SEQ ID NO: 1197615 - DNA, 25 bp, Homo sapien
tgggcccacgtatttcgggctggcc

SEQ ID NO: 1197616 - DNA, 25 bp, Homo sapien
ctgggcccacgtatttcgggctggc

SEQ ID NO: 1197617 - DNA, 25 bp, Homo sapien
tctcccacaagagatctgagggtgc

SEQ ID NO: 1197618 - DNA, 25 bp, Homo sapien
ccacaagagatctgagggtgccatt

SEQ ID NO: 1197619 - DNA, 25 bp, Homo sapien
acaagagatctgagggtgccattgt

SEQ ID NO: 1197620 - DNA, 25 bp, Homo sapien
tcttctcccacaagagatctgaggg

SEQ ID NO: 1197621 - DNA, 25 bp, Homo sapien
taccaagcttgattgtatgagaggg

SEQ ID NO: 1197622 - DNA, 25 bp, Homo sapien
cttgattgtatgagagggctctgca

SEQ ID NO: 1197623 - DNA, 25 bp, Homo sapien
tccactgcctgaggcgtctaccaag

SEQ ID NO: 1197624 - DNA, 25 bp, Homo sapien
gaggcgtctaccaagcttgattgta

SEQ ID NO: 1197625 - DNA, 25 bp, Homo sapien
ccaaaaccactacctgcttaaagtg

SEQ ID NO: 1197626 - DNA, 25 bp, Homo sapien
tcaaacgatgaagcatcaaccaaaa

SEQ ID NO: 1197627 - DNA, 25 bp, Homo sapien
cattttaccacatcaaacgatgaag

SEQ ID NO: 1197628 - DNA, 25 bp, Homo sapien
cacatcaaacgatgaagcatcaacc

SEQ ID NO: 1197629 - DNA, 25 bp, Homo sapien
tcgaggattttgagaacatgtgggc

SEQ ID NO: 1197630 - DNA, 25 bp, Homo sapien
ccaggactttaggtgggtgactcac

SEQ ID NO: 1197631 - DNA, 25 bp, Homo sapien
ccctccggtgtagcacagggtgcca

SEQ ID NO: 1197632 - DNA, 25 bp, Homo sapien
taattgggattcgtgatgccagggc

SEQ ID NO: 1197633 - DNA, 25 bp, Homo sapien
ggtgttcaaactcccatgtgtccat

SEQ ID NO: 1197634 - DNA, 25 bp, Homo sapien
gtttgaataaccacacacttgggtg

SEQ ID NO: 1197635 - DNA, 25 bp, Homo sapien
tgttcctctgacaaagttactgtgc

SEQ ID NO: 1197636 - DNA, 25 bp, Homo sapien
gacctgaggaagtaaccaggcagtt

SEQ ID NO: 1197637 - DNA, 25 bp, Homo sapien
tttctatatccactccctacaactg

SEQ ID NO: 1197638 - DNA, 25 bp, Homo sapien
cagaggctcttttactgaaaagcta

SEQ ID NO: 1197639 - DNA, 25 bp, Homo sapien
aagctaaagttgtgaggatccacag

SEQ ID NO: 1197640 - DNA, 25 bp, Homo sapien
tgagcgtggtccctatttttctata

SEQ ID NO: 1197641 - DNA, 25 bp, Homo sapien
tgatacctggtattttcgagagggc

SEQ ID NO: 1197642 - DNA, 25 bp, Homo sapien
ctggtattttcgagagggctttggc

SEQ ID NO: 1197643 - DNA, 25 bp, Homo sapien
ctaggtaacaacttggctaagaatc

SEQ ID NO: 1197644 - DNA, 25 bp, Homo sapien
tctgaataggaggaagtgatacctg

SEQ ID NO: 1197645 - DNA, 25 bp, Homo sapien
taaaagtctagctacatgatgaggg

SEQ ID NO: 1197646 - DNA, 25 bp, Homo sapien
gtttcctacgaatatgccacacacg

SEQ ID NO: 1197647 - DNA, 25 bp, Homo sapien
gtgatgtcccctacacagtgccaga

SEQ ID NO: 1197648 - DNA, 25 bp, Homo sapien
cagcacaaatggattgcaaggagca

SEQ ID NO: 1197649 - DNA, 25 bp, Homo sapien
tgggcatccacaaggcatcccagtc

SEQ ID NO: 1197650 - DNA, 25 bp, Homo sapien
aaactggaagtatcccaggaacatc

SEQ ID NO: 1197651 - DNA, 25 bp, Homo sapien
gcatcccagtcatccaacctctgtg

SEQ ID NO: 1197652 - DNA, 25 bp, Homo sapien
aactggaagtatcccaggaacatct

SEQ ID NO: 1197653 - DNA, 25 bp, Homo sapien
cactgggttacctaggtgatgcaaa

SEQ ID NO: 1197654 - DNA, 25 bp, Homo sapien
cacttgcttataccagacacctggg

SEQ ID NO: 1197655 - DNA, 25 bp, Homo sapien
caccaggaaccggtttcaggatgat

SEQ ID NO: 1197656 - DNA, 25 bp, Homo sapien
tgggagtaacaccaaactggcttga

SEQ ID NO: 1197657 - DNA, 25 bp, Homo sapien
gggtgcacacactgtacggtaaact

SEQ ID NO: 1197658 - DNA, 25 bp, Homo sapien
agtgccagctttagaccaggaccct

SEQ ID NO: 1197659 - DNA, 25 bp, Homo sapien
caggtccttacagactgcagccttt

SEQ ID NO: 1197660 - DNA, 25 bp, Homo sapien
tctattcatgtccaagggtgcacac

SEQ ID NO: 1197661 - DNA, 25 bp, Homo sapien
ccagtaagaaaaactatcctaatgt

SEQ ID NO: 1197662 - DNA, 25 bp, Homo sapien
gagtagttatattgtaaagatccca

SEQ ID NO: 1197663 - DNA, 25 bp, Homo sapien
tagatcagtatgcatggcttgagat

SEQ ID NO: 1197664 - DNA, 25 bp, Homo sapien
ggcttgagataaaacttccagtgac

SEQ ID NO: 1197665 - DNA, 25 bp, Homo sapien
aggcatagacaataaaccagaaaag

SEQ ID NO: 1197666 - DNA, 25 bp, Homo sapien
aaaccagaaaagtagcagtcttctt

SEQ ID NO: 1197667 - DNA, 25 bp, Homo sapien
aacaggggtactcactccacatcca

SEQ ID NO: 1197668 - DNA, 25 bp, Homo sapien
cagatgttaaagtcaacaggggtac

SEQ ID NO: 1197669 - DNA, 25 bp, Homo sapien
atgtgcaatttattccacgtgtcat

SEQ ID NO: 1197670 - DNA, 25 bp, Homo sapien
aatttttatgtacaattacagttga

SEQ ID NO: 1197671 - DNA, 25 bp, Homo sapien
gtggaatgaacttaagctcttctga

SEQ ID NO: 1197672 - DNA, 25 bp, Homo sapien
agatcccgagaacatgtgtccccag

SEQ ID NO: 1197673 - DNA, 25 bp, Homo sapien
aacaaagggcttcaacagtcatgtt

SEQ ID NO: 1197674 - DNA, 25 bp, Homo sapien
gaacaaagggcttcaacagtcatgt

SEQ ID NO: 1197675 - DNA, 25 bp, Homo sapien
acaaagggcttcaacagtcatgttt

SEQ ID NO: 1197676 - DNA, 25 bp, Homo sapien
aaaaaatgtttagcttctgagtgtt

SEQ ID NO: 1197677 - DNA, 25 bp, Homo sapien
aaaatgtttagcttctgagtgttct

SEQ ID NO: 1197678 - DNA, 25 bp, Homo sapien
aatgtttagcttctgagtgttctac

SEQ ID NO: 1197679 - DNA, 25 bp, Homo sapien
gtttagcttctgagtgttctactgc

SEQ ID NO: 1197680 - DNA, 25 bp, Homo sapien
tgagagacaaggagcgattcctcat

SEQ ID NO: 1197681 - DNA, 25 bp, Homo sapien
actcagtgcaacacagtggggctct

SEQ ID NO: 1197682 - DNA, 25 bp, Homo sapien
caaggagcgattcctcatgtgtggc

SEQ ID NO: 1197683 - DNA, 25 bp, Homo sapien
gattcctcatgtgtggcctggaccc

SEQ ID NO: 1197684 - DNA, 25 bp, Homo sapien
cataaaggcctgtcgtgatgtgcat

SEQ ID NO: 1197685 - DNA, 25 bp, Homo sapien
gcagttgggtccataagttggctca

SEQ ID NO: 1197686 - DNA, 25 bp, Homo sapien
taagttggctcataaaggcctgtcg

SEQ ID NO: 1197687 - DNA, 25 bp, Homo sapien
aatgacaaactgcagttgggtccat

SEQ ID NO: 1197688 - DNA, 25 bp, Homo sapien
ttgtcaaagttataggcgctgggcc

SEQ ID NO: 1197689 - DNA, 25 bp, Homo sapien
tgtcctgatgaagccgcggtttgcc

SEQ ID NO: 1197690 - DNA, 25 bp, Homo sapien
tggaacttgagacgcacataggtga

SEQ ID NO: 1197691 - DNA, 25 bp, Homo sapien
tgaattcatcagtacacaaggcctg

SEQ ID NO: 1197692 - DNA, 25 bp, Homo sapien
tgacaaaggctatccccatgtggtt

SEQ ID NO: 1197693 - DNA, 25 bp, Homo sapien
taatgatcagcaatcgtgccagaca

SEQ ID NO: 1197694 - DNA, 25 bp, Homo sapien
tcgcatgttgtagaactagctggct

SEQ ID NO: 1197695 - DNA, 25 bp, Homo sapien
tgagtacagcatgaggctcaccagc

SEQ ID NO: 1197696 - DNA, 25 bp, Homo sapien
tgatgtcagtggcagttacccattc

SEQ ID NO: 1197697 - DNA, 25 bp, Homo sapien
aataggacttgagaactttgggatc

SEQ ID NO: 1197698 - DNA, 25 bp, Homo sapien
caaaagtgttcaggcgattaagagt

SEQ ID NO: 1197699 - DNA, 25 bp, Homo sapien
tgggatcgttaaacacttcatctcc

SEQ ID NO: 1197700 - DNA, 25 bp, Homo sapien
cgttcttcatacactcgcttgcgtg

SEQ ID NO: 1197701 - DNA, 25 bp, Homo sapien
gtttgcaattacacaccagcttatc

SEQ ID NO: 1197702 - DNA, 25 bp, Homo sapien
ttcactggcactttccgcagttgcc

SEQ ID NO: 1197703 - DNA, 25 bp, Homo sapien
cgcttgcgtgtccattacatttaca

SEQ ID NO: 1197704 - DNA, 25 bp, Homo sapien
ttaagacaactgacagactgacgtc

SEQ ID NO: 1197705 - DNA, 25 bp, Homo sapien
acagactgacgtcatggggcactca

SEQ ID NO: 1197706 - DNA, 25 bp, Homo sapien
acaactgacagactgacgtcatggg

SEQ ID NO: 1197707 - DNA, 25 bp, Homo sapien
agacaactgacagactgacgtcatg

SEQ ID NO: 1197708 - DNA, 25 bp, Homo sapien
tcctggatagactcaaaatacgaca

SEQ ID NO: 1197709 - DNA, 25 bp, Homo sapien
tagccctagcatcctgacaattaat

SEQ ID NO: 1197710 - DNA, 25 bp, Homo sapien
gggaccaacgagaaaagcaaattga

SEQ ID NO: 1197711 - DNA, 25 bp, Homo sapien
tgtcacagtgctgaagggaccaacg

SEQ ID NO: 1197712 - DNA, 25 bp, Homo sapien
tgtccacactgtcccaacctacagc

SEQ ID NO: 1197713 - DNA, 25 bp, Homo sapien
cggtaaagcagaataacaccactgt

SEQ ID NO: 1197714 - DNA, 25 bp, Homo sapien
tctgagacggtaaagcagaataaca

SEQ ID NO: 1197715 - DNA, 25 bp, Homo sapien
aagatctgatgttctgagacggtaa

SEQ ID NO: 1197716 - DNA, 25 bp, Homo sapien
tagcttatccctcaatccaccaagc

SEQ ID NO: 1197717 - DNA, 25 bp, Homo sapien
aagacgccctagcttatccctcaat

SEQ ID NO: 1197718 - DNA, 25 bp, Homo sapien
cctcaagacgccctagcttatccct

SEQ ID NO: 1197719 - DNA, 25 bp, Homo sapien
tctcttccctcaagacgccctagct

SEQ ID NO: 1197720 - DNA, 25 bp, Homo sapien
ctgggatcgaccattgcaatcacag

SEQ ID NO: 1197721 - DNA, 25 bp, Homo sapien
tagagttcagggtcgaagtagcatt

SEQ ID NO: 1197722 - DNA, 25 bp, Homo sapien
agttggtacagtggcccccatggcc

SEQ ID NO: 1197723 - DNA, 25 bp, Homo sapien
ccccatggccagtggaacgatagag

SEQ ID NO: 1197724 - DNA, 25 bp, Homo sapien
aagttctctcggcacctctcacagt

SEQ ID NO: 1197725 - DNA, 25 bp, Homo sapien
gagaatggaatccaggctggcaacg

SEQ ID NO: 1197726 - DNA, 25 bp, Homo sapien
tgccgtaactatcacactgtgtgct

SEQ ID NO: 1197727 - DNA, 25 bp, Homo sapien
ggcttacagctgcatctgccgtaac

SEQ ID NO: 1197728 - DNA, 25 bp, Homo sapien
ttcagtgagagaatggaatccaggc

SEQ ID NO: 1197729 - DNA, 25 bp, Homo sapien
cattgtctttgcaaacacatcttcc

SEQ ID NO: 1197730 - DNA, 25 bp, Homo sapien
gaagccttcgacattgtctttgcaa

SEQ ID NO: 1197731 - DNA, 25 bp, Homo sapien
gtttcaatattacattcatctatgc

SEQ ID NO: 1197732 - DNA, 25 bp, Homo sapien
ctttcacaattgaagccttcgacat

SEQ ID NO: 1197733 - DNA, 25 bp, Homo sapien
ccaacagcgtttgtacagacagaag

SEQ ID NO: 1197734 - DNA, 25 bp, Homo sapien
gaataaacactgtagccaacagcgt

SEQ ID NO: 1197735 - DNA, 25 bp, Homo sapien
cagaagcagggtgtgcaaccccgag

SEQ ID NO: 1197736 - DNA, 25 bp, Homo sapien
ccccgaggattagatgattccagat

SEQ ID NO: 1197737 - DNA, 25 bp, Homo sapien
ttaagtgtaatctcacagttctaac

SEQ ID NO: 1197738 - DNA, 25 bp, Homo sapien
tattttaagtgtaatctcacagttc

SEQ ID NO: 1197739 - DNA, 25 bp, Homo sapien
gtaatctcacagttctaacaggttg

SEQ ID NO: 1197740 - DNA, 25 bp, Homo sapien
gtgtaatctcacagttctaacaggt

SEQ ID NO: 1197741 - DNA, 25 bp, Homo sapien
agctgtctgagatcacggcgatatc

SEQ ID NO: 1197742 - DNA, 25 bp, Homo sapien
cggcgatatcttgcctctcagagga

SEQ ID NO: 1197743 - DNA, 25 bp, Homo sapien
gaagtaccgaggaaagtagctgtct

SEQ ID NO: 1197744 - DNA, 25 bp, Homo sapien
gaggaccactcgagagatgcttcag

SEQ ID NO: 1197745 - DNA, 25 bp, Homo sapien
cacagtggtctcacttggataggaa

SEQ ID NO: 1197746 - DNA, 25 bp, Homo sapien
tacagatactcttaagccagctccc

SEQ ID NO: 1197747 - DNA, 25 bp, Homo sapien
tatctcgcctgtccactcgaaagga

SEQ ID NO: 1197748 - DNA, 25 bp, Homo sapien
cctgagcgatcaagggtacagatac

SEQ ID NO: 1197749 - DNA, 25 bp, Homo sapien
ggtcaagttgtttaggagcttctga

SEQ ID NO: 1197750 - DNA, 25 bp, Homo sapien
tatgtcccacgtatcttgatagagg

SEQ ID NO: 1197751 - DNA, 25 bp, Homo sapien
cctccaagggtaatctgttgcttca

SEQ ID NO: 1197752 - DNA, 25 bp, Homo sapien
taagagcaggcctccaagggtaatc

SEQ ID NO: 1197753 - DNA, 25 bp, Homo sapien
ggtgcaggactccacccaagttgca

SEQ ID NO: 1197754 - DNA, 25 bp, Homo sapien
ggacgagcacttgccagggtgacat

SEQ ID NO: 1197755 - DNA, 25 bp, Homo sapien
cattgcaggcgcaaagcacacatgg

SEQ ID NO: 1197756 - DNA, 25 bp, Homo sapien
caggtctcgctgtgtccattgcagg

SEQ ID NO: 1197757 - DNA, 25 bp, Homo sapien
tgggaacaacagcacaacttgaacc

SEQ ID NO: 1197758 - DNA, 25 bp, Homo sapien
gtgcctgcagttgaatctccatagt

SEQ ID NO: 1197759 - DNA, 25 bp, Homo sapien
caggacacggacagggttggcaatc

SEQ ID NO: 1197760 - DNA, 25 bp, Homo sapien
acagtgcgggccagccgtattgtct

SEQ ID NO: 1197761 - DNA, 25 bp, Homo sapien
ttcaggcattctcccgtcaagcgat

SEQ ID NO: 1197762 - DNA, 25 bp, Homo sapien
gaagccagcagtgttatagatgcac

SEQ ID NO: 1197763 - DNA, 25 bp, Homo sapien
tctcacagggccgtttctacccagg

SEQ ID NO: 1197764 - DNA, 25 bp, Homo sapien
gatcgatgttgtcactgcactggca

SEQ ID NO: 1197765 - DNA, 25 bp, Homo sapien
gatttccaaaaaatccgtctttgca

SEQ ID NO: 1197766 - DNA, 25 bp, Homo sapien
tgtgacagaatctgatcaaaggctg

SEQ ID NO: 1197767 - DNA, 25 bp, Homo sapien
tgacagaatctgatcaaaggctgat

SEQ ID NO: 1197768 - DNA, 25 bp, Homo sapien
ttagctgtgacagaatctgatcaaa

SEQ ID NO: 1197769 - DNA, 25 bp, Homo sapien
cagaatctgatcaaaggctgattac

SEQ ID NO: 1197770 - DNA, 25 bp, Homo sapien
atataaacaacctaaagagattctt

SEQ ID NO: 1197771 - DNA, 25 bp, Homo sapien
gatgtgctataaacgtgagatacac

SEQ ID NO: 1197772 - DNA, 25 bp, Homo sapien
ctttagacctgtgttgccaggttgg

SEQ ID NO: 1197773 - DNA, 25 bp, Homo sapien
gttgccaggttggtagctgctgtca

SEQ ID NO: 1197774 - DNA, 25 bp, Homo sapien
ggtcccatacagattgcaattgcag

SEQ ID NO: 1197775 - DNA, 25 bp, Homo sapien
agggtcacaagcaccacagtcctgg

SEQ ID NO: 1197776 - DNA, 25 bp, Homo sapien
gcagattgtagaatccagggtcaca

SEQ ID NO: 1197777 - DNA, 25 bp, Homo sapien
cagccttgcccactctgcagattgt

SEQ ID NO: 1197778 - DNA, 25 bp, Homo sapien
aaagtggttgacctcacagcgctca

SEQ ID NO: 1197779 - DNA, 25 bp, Homo sapien
ctgaccagtgatgccgggctggcac

SEQ ID NO: 1197780 - DNA, 25 bp, Homo sapien
agccttcaggtccaaacccaaagtg

SEQ ID NO: 1197781 - DNA, 25 bp, Homo sapien
tgcggatgtcacactgcccattggt

SEQ ID NO: 1197782 - DNA, 25 bp, Homo sapien
gggacacacttcaggttacttagca

SEQ ID NO: 1197783 - DNA, 25 bp, Homo sapien
aaactatcagtgctcgtttcatgca

SEQ ID NO: 1197784 - DNA, 25 bp, Homo sapien
tacttatgctacattccacaggaga

SEQ ID NO: 1197785 - DNA, 25 bp, Homo sapien
taaaacgtgcaacctttgggacaca

SEQ ID NO: 1197786 - DNA, 25 bp, Homo sapien
tagttttcttcacactggtcacagc

SEQ ID NO: 1197787 - DNA, 25 bp, Homo sapien
tgaaagagatccctcaggatgacag

SEQ ID NO: 1197788 - DNA, 25 bp, Homo sapien
gcagccaggccaagaccgattgtag

SEQ ID NO: 1197789 - DNA, 25 bp, Homo sapien
tggtcacagcgatttcccacaaagc

SEQ ID NO: 1197790 - DNA, 25 bp, Homo sapien
tgtagttctatccactccatgcatg

SEQ ID NO: 1197791 - DNA, 25 bp, Homo sapien
tcacacatcagtcaagagtgctcct

SEQ ID NO: 1197792 - DNA, 25 bp, Homo sapien
ccttgagtgtcagattaccttcgtg

SEQ ID NO: 1197793 - DNA, 25 bp, Homo sapien
catctcagtaaataaggcctccagc

SEQ ID NO: 1197794 - DNA, 25 bp, Homo sapien
tatgagactctctaattcctggagc

SEQ ID NO: 1197795 - DNA, 25 bp, Homo sapien
catcctgggcctcacgaaggaggtc

SEQ ID NO: 1197796 - DNA, 25 bp, Homo sapien
tcctcgaaggcttgatctgtcacca

SEQ ID NO: 1197797 - DNA, 25 bp, Homo sapien
tggagcttcactctatgatcagcaa

SEQ ID NO: 1197798 - DNA, 25 bp, Homo sapien
tgtaggcgatccatcaaattctggt

SEQ ID NO: 1197799 - DNA, 25 bp, Homo sapien
taaacggctaatttggctggacaga

SEQ ID NO: 1197800 - DNA, 25 bp, Homo sapien
tgggcacgcgcttgttcagccaagt

SEQ ID NO: 1197801 - DNA, 25 bp, Homo sapien
tctgtgttctctacatgggcacgcg

SEQ ID NO: 1197802 - DNA, 25 bp, Homo sapien
cccctgtagattctggctgagtgac

SEQ ID NO: 1197803 - DNA, 25 bp, Homo sapien
tcttctgccaaaagagtcatgttgt

SEQ ID NO: 1197804 - DNA, 25 bp, Homo sapien
gcaagctttcgagcctcttctgcca

SEQ ID NO: 1197805 - DNA, 25 bp, Homo sapien
gagtcatgttgtttgggtcccctgt

SEQ ID NO: 1197806 - DNA, 25 bp, Homo sapien
cctattaagctcttcaatctcaaat

SEQ ID NO: 1197807 - DNA, 25 bp, Homo sapien
tttgccactcgaacaatgtcatcag

SEQ ID NO: 1197808 - DNA, 25 bp, Homo sapien
tcagttgacgtatcattggctgtct

SEQ ID NO: 1197809 - DNA, 25 bp, Homo sapien
tcagaagcaggttgtatgcctcagt

SEQ ID NO: 1197810 - DNA, 25 bp, Homo sapien
tcctcatgtactcgggcagcttgtt

SEQ ID NO: 1197811 - DNA, 25 bp, Homo sapien
acagctttgtcaccggcccttttgg

SEQ ID NO: 1197812 - DNA, 25 bp, Homo sapien
tgtgagatgttcttcgcttgttcat

SEQ ID NO: 1197813 - DNA, 25 bp, Homo sapien
gagccacgctggcatagatctccac

SEQ ID NO: 1197814 - DNA, 25 bp, Homo sapien
tccagtgtctcagagtccaaagggc

SEQ ID NO: 1197815 - DNA, 25 bp, Homo sapien
ctccagtgtctcagagtccaaaggg

SEQ ID NO: 1197816 - DNA, 25 bp, Homo sapien
gtgaaaagcaagtaagatcactaca

SEQ ID NO: 1197817 - DNA, 25 bp, Homo sapien
tgtgaaaagcaagtaagatcactac

SEQ ID NO: 1197818 - DNA, 25 bp, Homo sapien
ctgtgaaaagcaagtaagatcacta

SEQ ID NO: 1197819 - DNA, 25 bp, Homo sapien
tctctgaggtcctcataatctttta

SEQ ID NO: 1197820 - DNA, 25 bp, Homo sapien
cagattctcagcttccatctttatg

SEQ ID NO: 1197821 - DNA, 25 bp, Homo sapien
cttctctgaggtcctcataatcttt

SEQ ID NO: 1197822 - DNA, 25 bp, Homo sapien
ccagaaggttcttgacttcaagttc

SEQ ID NO: 1197823 - DNA, 25 bp, Homo sapien
agcttcttcagcgagggccttggca

SEQ ID NO: 1197824 - DNA, 25 bp, Homo sapien
aaggtatcccgtcccttctttgcag

SEQ ID NO: 1197825 - DNA, 25 bp, Homo sapien
gagaatgtcattagcttcttgtaag

SEQ ID NO: 1197826 - DNA, 25 bp, Homo sapien
cagcatcagctcgggctaggagttg

SEQ ID NO: 1197827 - DNA, 25 bp, Homo sapien
ttagtgcctcctctgcggccgtctt

SEQ ID NO: 1197828 - DNA, 25 bp, Homo sapien
tctgcggccgtcttgttatcgttca

SEQ ID NO: 1197829 - DNA, 25 bp, Homo sapien
gttatcgttcacacgcctatcaaaa

SEQ ID NO: 1197830 - DNA, 25 bp, Homo sapien
tcagtgatggtctggttgatggcag

SEQ ID NO: 1197831 - DNA, 25 bp, Homo sapien
tttggacagcgctcgcgatcctctc

SEQ ID NO: 1197832 - DNA, 25 bp, Homo sapien
gcctctgtggcatccgccgcagcac

SEQ ID NO: 1197833 - DNA, 25 bp, Homo sapien
tcgcgatcctctccgcctcatgggc

SEQ ID NO: 1197834 - DNA, 25 bp, Homo sapien
cttttggacagcgctcgcgatcctc

SEQ ID NO: 1197835 - DNA, 25 bp, Homo sapien
gatttatactatctcatgacttaca

SEQ ID NO: 1197836 - DNA, 25 bp, Homo sapien
tatctagcactttcatttgtatcct

SEQ ID NO: 1197837 - DNA, 25 bp, Homo sapien
taatggcatacactttctacgacat

SEQ ID NO: 1197838 - DNA, 25 bp, Homo sapien
tttttctcaagtatgctcccgctcc

SEQ ID NO: 1197839 - DNA, 25 bp, Homo sapien
tgccatcatcatgtcctggtcagcg

SEQ ID NO: 1197840 - DNA, 25 bp, Homo sapien
tccagatctgtaacttctgcaaaag

SEQ ID NO: 1197841 - DNA, 25 bp, Homo sapien
cagttgcttcaacatattgttcacc

SEQ ID NO: 1197842 - DNA, 25 bp, Homo sapien
catattgttcacctcattatccaga

SEQ ID NO: 1197843 - DNA, 25 bp, Homo sapien
ctttctgccaatgagcaaatatacc

SEQ ID NO: 1197844 - DNA, 25 bp, Homo sapien
actttctgccaatgagcaaatatac

SEQ ID NO: 1197845 - DNA, 25 bp, Homo sapien
ttctgccaatgagcaaatataccaa

SEQ ID NO: 1197846 - DNA, 25 bp, Homo sapien
tttctgccaatgagcaaatatacca

SEQ ID NO: 1197847 - DNA, 25 bp, Homo sapien
gattaatctctgtccaaacggcagc

SEQ ID NO: 1197848 - DNA, 25 bp, Homo sapien
ccacaagcttgtctgcgagtgtaaa

SEQ ID NO: 1197849 - DNA, 25 bp, Homo sapien
caggacactcttagggacttattag

SEQ ID NO: 1197850 - DNA, 25 bp, Homo sapien
gatgcacctgcatttaacctgtggt

SEQ ID NO: 1197851 - DNA, 25 bp, Homo sapien
ggcttttctggcattgatctcggct

SEQ ID NO: 1197852 - DNA, 25 bp, Homo sapien
tctcggttatagtccatgatggcag

SEQ ID NO: 1197853 - DNA, 25 bp, Homo sapien
agcagccagatggtaaggtcttcct

SEQ ID NO: 1197854 - DNA, 25 bp, Homo sapien
tagggtgccttcaatctcgtttagc

SEQ ID NO: 1197855 - DNA, 25 bp, Homo sapien
catgatctcctcgatatctcggtta

SEQ ID NO: 1197856 - DNA, 25 bp, Homo sapien
tggttcaaaaggacagtcatggaca

SEQ ID NO: 1197857 - DNA, 25 bp, Homo sapien
gagtgggggtctgaaaaatgtaatc

SEQ ID NO: 1197858 - DNA, 25 bp, Homo sapien
tctttgtgtcaaggcactctgtggc

SEQ ID NO: 1197859 - DNA, 25 bp, Homo sapien
aactgcccccctgtcagagggatgc

SEQ ID NO: 1197860 - DNA, 25 bp, Homo sapien
tctattggtgagtgcaagctgccca

SEQ ID NO: 1197861 - DNA, 25 bp, Homo sapien
taaataattgcatcctgacccacgg

SEQ ID NO: 1197862 - DNA, 25 bp, Homo sapien
tacacgggattctgacagtacaagc

SEQ ID NO: 1197863 - DNA, 25 bp, Homo sapien
cattgtaaaaccaccgtgctgcagg

SEQ ID NO: 1197864 - DNA, 25 bp, Homo sapien
actgggcgccctttgtaggcaggca

SEQ ID NO: 1197865 - DNA, 25 bp, Homo sapien
aggccactgggcgccctttgtaggc

SEQ ID NO: 1197866 - DNA, 25 bp, Homo sapien
ccactgggcgccctttgtaggcagg

SEQ ID NO: 1197867 - DNA, 25 bp, Homo sapien
ctgggcgccctttgtaggcaggcat

SEQ ID NO: 1197868 - DNA, 25 bp, Homo sapien
gctgcatgatccatatttacagggt

SEQ ID NO: 1197869 - DNA, 25 bp, Homo sapien
ctgctgcatgatccatatttacagg

SEQ ID NO: 1197870 - DNA, 25 bp, Homo sapien
ttccaactacccagaactgcgcaat

SEQ ID NO: 1197871 - DNA, 25 bp, Homo sapien
gcgcaattcatgattagactttctg

SEQ ID NO: 1197872 - DNA, 25 bp, Homo sapien
tacagctgacatcatgggttgtagt

SEQ ID NO: 1197873 - DNA, 25 bp, Homo sapien
taaggataatcctgcttaaagaaag

SEQ ID NO: 1197874 - DNA, 25 bp, Homo sapien
taaacttgaccattcttagactaag

SEQ ID NO: 1197875 - DNA, 25 bp, Homo sapien
gcttaaagaaagtatgagcctctga

SEQ ID NO: 1197876 - DNA, 25 bp, Homo sapien
attcacacttgtctaggaaagttgc

SEQ ID NO: 1197877 - DNA, 25 bp, Homo sapien
attcacacttgtctaggaaagttgt

SEQ ID NO: 1197878 - DNA, 25 bp, Homo sapien
cacttgtctaggaaagttgtgcata

SEQ ID NO: 1197879 - DNA, 25 bp, Homo sapien
cacttgtctaggaaagttgctatat

SEQ ID NO: 1197880 - DNA, 25 bp, Homo sapien
tgcttactccagtttttatgacctt

SEQ ID NO: 1197881 - DNA, 25 bp, Homo sapien
cagcatcaacttcagtgaaatacca

SEQ ID NO: 1197882 - DNA, 25 bp, Homo sapien
ctttctgcttactccagtttttatg

SEQ ID NO: 1197883 - DNA, 25 bp, Homo sapien
tttcatattcagcatcaacttcagt

SEQ ID NO: 1197884 - DNA, 25 bp, Homo sapien
ccggcgcctcggttggtggttctca

SEQ ID NO: 1197885 - DNA, 25 bp, Homo sapien
tctacctgactcagtcctgacagga

SEQ ID NO: 1197886 - DNA, 25 bp, Homo sapien
ggttctcactctgcgctccgctgtg

SEQ ID NO: 1197887 - DNA, 25 bp, Homo sapien
caggtggttttatcgactcttctac

SEQ ID NO: 1197888 - DNA, 25 bp, Homo sapien
caggaggagcgagaagcagaggcag

SEQ ID NO: 1197889 - DNA, 25 bp, Homo sapien
gcaggaggagcgagaagcagaggca

SEQ ID NO: 1197890 - DNA, 25 bp, Homo sapien
gggcaggaggagcgagaagcagagg

SEQ ID NO: 1197891 - DNA, 25 bp, Homo sapien
tctcagaatgtgaagatcccctcct

SEQ ID NO: 1197892 - DNA, 25 bp, Homo sapien
tcagaatgtgaagatcccctcctac

SEQ ID NO: 1197893 - DNA, 25 bp, Homo sapien
agaatgtgaagatcccctcctacca

SEQ ID NO: 1197894 - DNA, 25 bp, Homo sapien
gaatgtgaagatcccctcctaccat

SEQ ID NO: 1197895 - DNA, 25 bp, Homo sapien
ctgtcagctgcagcatagactcagg

SEQ ID NO: 1197896 - DNA, 25 bp, Homo sapien
catagactcaggaagtgattgtggt

SEQ ID NO: 1197897 - DNA, 25 bp, Homo sapien
tcaggaagtgattgtggtaagattc

SEQ ID NO: 1197898 - DNA, 25 bp, Homo sapien
tgtggtaagattctatatgacagca

SEQ ID NO: 1197899 - DNA, 25 bp, Homo sapien
tgcccgtcaaggcaaaggagtggac

SEQ ID NO: 1197900 - DNA, 25 bp, Homo sapien
cggtgcccgtcaaggcaaaggagtg

SEQ ID NO: 1197901 - DNA, 25 bp, Homo sapien
cccgtcaaggcaaaggagtggacgt

SEQ ID NO: 1197902 - DNA, 25 bp, Homo sapien
tcaaggcaaaggagtggacgtgacc

SEQ ID NO: 1197903 - DNA, 25 bp, Homo sapien
gttgtcattgcagttgaggcagcgg

SEQ ID NO: 1197904 - DNA, 25 bp, Homo sapien
ctttggagttacaattgcagggcaa

SEQ ID NO: 1197905 - DNA, 25 bp, Homo sapien
tgtctgtgaagttcccgatcaaaga

SEQ ID NO: 1197906 - DNA, 25 bp, Homo sapien
cacttctcgcagtgaatgccatcag

SEQ ID NO: 1197907 - DNA, 25 bp, Homo sapien
tgcataataggaactctcagaggtt

SEQ ID NO: 1197908 - DNA, 25 bp, Homo sapien
tctccttagatgttgagttaggcac

SEQ ID NO: 1197909 - DNA, 25 bp, Homo sapien
ggagccttcagtgataatagcataa

SEQ ID NO: 1197910 - DNA, 25 bp, Homo sapien
agacctgcacttagaaagagaactc

SEQ ID NO: 1197911 - DNA, 25 bp, Homo sapien
gcctggcagacatcggtcgcatctg

SEQ ID NO: 1197912 - DNA, 25 bp, Homo sapien
gagttgtcacatcgagcactaagag

SEQ ID NO: 1197913 - DNA, 25 bp, Homo sapien
acagctgcaccgtccggagttgtca

SEQ ID NO: 1197914 - DNA, 25 bp, Homo sapien
cgcatccgtgagcatgtggaagcct

SEQ ID NO: 1197915 - DNA, 25 bp, Homo sapien
ggcccgcgtcacagggccctgcgat

SEQ ID NO: 1197916 - DNA, 25 bp, Homo sapien
cgttctccagtgacagctggcttgc

SEQ ID NO: 1197917 - DNA, 25 bp, Homo sapien
tggcttgcagacacagcggcccgcg

SEQ ID NO: 1197918 - DNA, 25 bp, Homo sapien
gccagctgggtcacagtcacacttg

SEQ ID NO: 1197919 - DNA, 25 bp, Homo sapien
catctgagtagtcggccagtccttg

SEQ ID NO: 1197920 - DNA, 25 bp, Homo sapien
cctggagctactgtttaatggtgac

SEQ ID NO: 1197921 - DNA, 25 bp, Homo sapien
gcatcctcgatgctggagtcacaga

SEQ ID NO: 1197922 - DNA, 25 bp, Homo sapien
tctataagaaccacgactaacaggg

SEQ ID NO: 1197923 - DNA, 25 bp, Homo sapien
gaatgcccatagcagaaacactggg

SEQ ID NO: 1197924 - DNA, 25 bp, Homo sapien
aaacactgggtacagccctcagggt

SEQ ID NO: 1197925 - DNA, 25 bp, Homo sapien
ccccatccagattatagtaacctga

SEQ ID NO: 1197926 - DNA, 25 bp, Homo sapien
gaaaggtagaggtgatcttatggac

SEQ ID NO: 1197927 - DNA, 25 bp, Homo sapien
ggaacacaaacataatcagtctgca

SEQ ID NO: 1197928 - DNA, 25 bp, Homo sapien
cataatcagtctgcattggacaagc

SEQ ID NO: 1197929 - DNA, 25 bp, Homo sapien
caaacataatcagtctgcattggac

SEQ ID NO: 1197930 - DNA, 25 bp, Homo sapien
tcagtctgcattggacaagccctca

SEQ ID NO: 1197931 - DNA, 25 bp, Homo sapien
gctttgcaggagacccatttcgttg

SEQ ID NO: 1197932 - DNA, 25 bp, Homo sapien
tgggctgagctaaacacatcttgat

SEQ ID NO: 1197933 - DNA, 25 bp, Homo sapien
tagacagggtctagtcgttgggctg

SEQ ID NO: 1197934 - DNA, 25 bp, Homo sapien
gcgctgtgaccattggagctttgca

SEQ ID NO: 1197935 - DNA, 25 bp, Homo sapien
caagggagctgtgatccgtagacca

SEQ ID NO: 1197936 - DNA, 25 bp, Homo sapien
caaggcagtgtcttgccaagtggca

SEQ ID NO: 1197937 - DNA, 25 bp, Homo sapien
taagtcttggtgagcccacaaggca

SEQ ID NO: 1197938 - DNA, 25 bp, Homo sapien
tccacacggtagtcaaaggacaggc

SEQ ID NO: 1197939 - DNA, 25 bp, Homo sapien
agattccgcagtaaccttcgatact

SEQ ID NO: 1197940 - DNA, 25 bp, Homo sapien
ctcggatgcggagggctgtgagatt

SEQ ID NO: 1197941 - DNA, 25 bp, Homo sapien
tattctccatatgtagctcggatgc

SEQ ID NO: 1197942 - DNA, 25 bp, Homo sapien
cttcgatactcaaagtaactcagct

SEQ ID NO: 1197943 - DNA, 25 bp, Homo sapien
tcgctgaatctctcttgtagccaga

SEQ ID NO: 1197944 - DNA, 25 bp, Homo sapien
ttgccccttgtacccaacaggacat

SEQ ID NO: 1197945 - DNA, 25 bp, Homo sapien
cagaagcacaatcctggcagaattg

SEQ ID NO: 1197946 - DNA, 25 bp, Homo sapien
tgacagttacaaggaatacaggtgc

SEQ ID NO: 1197947 - DNA, 25 bp, Homo sapien
tgtagaaaccaattgggcagtcagc

SEQ ID NO: 1197948 - DNA, 25 bp, Homo sapien
tcagcacactcaatgtcaggattct

SEQ ID NO: 1197949 - DNA, 25 bp, Homo sapien
gtcgtgcggatcgttgtagaaacca

SEQ ID NO: 1197950 - DNA, 25 bp, Homo sapien
tgagcagctgaacccgttatgacag

SEQ ID NO: 1197951 - DNA, 25 bp, Homo sapien
gaccccgggagggcagttattgcac

SEQ ID NO: 1197952 - DNA, 25 bp, Homo sapien
gtgaccccgggagggcagttattgc

SEQ ID NO: 1197953 - DNA, 25 bp, Homo sapien
accccgggagggcagttattgcaca

SEQ ID NO: 1197954 - DNA, 25 bp, Homo sapien
ccccgggagggcagttattgcacac

SEQ ID NO: 1197955 - DNA, 25 bp, Homo sapien
taggtcgacatccatcaggaggaag

SEQ ID NO: 1197956 - DNA, 25 bp, Homo sapien
aggaagaccagacgcagaggcctaa

SEQ ID NO: 1197957 - DNA, 25 bp, Homo sapien
gaggcctaaagttgcgagtcaccct

SEQ ID NO: 1197958 - DNA, 25 bp, Homo sapien
acaaatgaccaagcctaggtcgaca

SEQ ID NO: 1197959 - DNA, 25 bp, Homo sapien
cactggtcgcagtagatgccggctg

SEQ ID NO: 1197960 - DNA, 25 bp, Homo sapien
tgtcagccggtcacaattcccagag

SEQ ID NO: 1197961 - DNA, 25 bp, Homo sapien
tgggtccccgaagtagcctgctttg

SEQ ID NO: 1197962 - DNA, 25 bp, Homo sapien
tcactgggccatgttcaccaaaggg

SEQ ID NO: 1197963 - DNA, 25 bp, Homo sapien
catcctacaggctctgagcccatgg

SEQ ID NO: 1197964 - DNA, 25 bp, Homo sapien
aaacacaggtgccatcacttcgaca

SEQ ID NO: 1197965 - DNA, 25 bp, Homo sapien
tgattatagcaagctggacagctga

SEQ ID NO: 1197966 - DNA, 25 bp, Homo sapien
gaatgctccatgctcacagttgggg

SEQ ID NO: 1197967 - DNA, 25 bp, Homo sapien
cagctctgtatcaggtactactcca

SEQ ID NO: 1197968 - DNA, 25 bp, Homo sapien
ccaccctgagcctttgaaatcaggg

SEQ ID NO: 1197969 - DNA, 25 bp, Homo sapien
cctttgaaatcagggcctccattct

SEQ ID NO: 1197970 - DNA, 25 bp, Homo sapien
gaagctgctgcataaactgatccat

SEQ ID NO: 1197971 - DNA, 25 bp, Homo sapien
tgtgagtatcccgaactcggttctg

SEQ ID NO: 1197972 - DNA, 25 bp, Homo sapien
tggagaccaagggatctgctagcac

SEQ ID NO: 1197973 - DNA, 25 bp, Homo sapien
ggctcctcaccttggccaactggag

SEQ ID NO: 1197974 - DNA, 25 bp, Homo sapien
tccaggcggctctggtagctgttct

SEQ ID NO: 1197975 - DNA, 25 bp, Homo sapien
tatagtatctgattatcattccact

SEQ ID NO: 1197976 - DNA, 25 bp, Homo sapien
tacattattgttaccataaccttct

SEQ ID NO: 1197977 - DNA, 25 bp, Homo sapien
caaactacatcaagaaaatcatact

SEQ ID NO: 1197978 - DNA, 25 bp, Homo sapien
tgacttcctcattatagtatctgat

SEQ ID NO: 1197979 - DNA, 25 bp, Homo sapien
catttggccccacgtagtggtctga

SEQ ID NO: 1197980 - DNA, 25 bp, Homo sapien
ccatttggccccacgtagtggtctg

SEQ ID NO: 1197981 - DNA, 25 bp, Homo sapien
tttggccccacgtagtggtctgagg

SEQ ID NO: 1197982 - DNA, 25 bp, Homo sapien
agccatttggccccacgtagtggtc

SEQ ID NO: 1197983 - DNA, 25 bp, Homo sapien
gtcagttgctccatgttactggctg

SEQ ID NO: 1197984 - DNA, 25 bp, Homo sapien
agggcttgtttggaatagtcctcag

SEQ ID NO: 1197985 - DNA, 25 bp, Homo sapien
catgttactggctgactcaacgtgg

SEQ ID NO: 1197986 - DNA, 25 bp, Homo sapien
cgcttccgactccttcatgcagggc

SEQ ID NO: 1197987 - DNA, 25 bp, Homo sapien
tgaagccgagacactgaatccagga

SEQ ID NO: 1197988 - DNA, 25 bp, Homo sapien
tcccttgtcaactgctgggccaggg

SEQ ID NO: 1197989 - DNA, 25 bp, Homo sapien
cggagactgtgctgataagacctat

SEQ ID NO: 1197990 - DNA, 25 bp, Homo sapien
tcaatttccgcttgagtggcctccc

SEQ ID NO: 1197991 - DNA, 25 bp, Homo sapien
gcctggttaccaggcttgagagtga

SEQ ID NO: 1197992 - DNA, 25 bp, Homo sapien
gaatccgctttttgtttgatcctct

SEQ ID NO: 1197993 - DNA, 25 bp, Homo sapien
ccaggcttgagagtgaatccgcttt

SEQ ID NO: 1197994 - DNA, 25 bp, Homo sapien
actcatccatatgcctggttaccag

SEQ ID NO: 1197995 - DNA, 25 bp, Homo sapien
tctctcccactttttccattctgta

SEQ ID NO: 1197996 - DNA, 25 bp, Homo sapien
tttccattctgtaagagctgctgtg

SEQ ID NO: 1197997 - DNA, 25 bp, Homo sapien
ccactttttccattctgtaagagct

SEQ ID NO: 1197998 - DNA, 25 bp, Homo sapien
ctctctcccactttttccattctgt

SEQ ID NO: 1197999 - DNA, 25 bp, Homo sapien
aaaagtggcattgcccatactcagt

SEQ ID NO: 1198000 - DNA, 25 bp, Homo sapien
tagcaagattggcacgggaaagcag

SEQ ID NO: 1198001 - DNA, 25 bp, Homo sapien
gtttttaaggatgctctcaacttca

SEQ ID NO: 1198002 - DNA, 25 bp, Homo sapien
agtgcttcttgtgctctgcttttag

SEQ ID NO: 1198003 - DNA, 25 bp, Homo sapien
caatctcactggagatttccagggc

SEQ ID NO: 1198004 - DNA, 25 bp, Homo sapien
ctgttcaatctcactggagatttcc

SEQ ID NO: 1198005 - DNA, 25 bp, Homo sapien
aatctcactggagatttccagggcc

SEQ ID NO: 1198006 - DNA, 25 bp, Homo sapien
gccgggccctgatggagtaaattag

SEQ ID NO: 1198007 - DNA, 25 bp, Homo sapien
tactggcaccaacacacatgtcgat

SEQ ID NO: 1198008 - DNA, 25 bp, Homo sapien
tagaaaaaatacagcggcagccggg

SEQ ID NO: 1198009 - DNA, 25 bp, Homo sapien
tctgcctcaaacaagctaatctggg

SEQ ID NO: 1198010 - DNA, 25 bp, Homo sapien
tctgctgtcacattggcttccaagt

SEQ ID NO: 1198011 - DNA, 25 bp, Homo sapien
catctgtactgcatccatattcgtg

SEQ ID NO: 1198012 - DNA, 25 bp, Homo sapien
cattggcttccaagttcagactccc

SEQ ID NO: 1198013 - DNA, 25 bp, Homo sapien
acttccctcatctcactcttcagag

SEQ ID NO: 1198014 - DNA, 25 bp, Homo sapien
tgcaggaggccgtctaatgtgttga

SEQ ID NO: 1198015 - DNA, 25 bp, Homo sapien
ttggctctggtatcaaccttctggg

SEQ ID NO: 1198016 - DNA, 25 bp, Homo sapien
tgtaaccccagcgttcttggctctg

SEQ ID NO: 1198017 - DNA, 25 bp, Homo sapien
tgagtgtgtcttggattgtaacccc

SEQ ID NO: 1198018 - DNA, 25 bp, Homo sapien
cccaagctgtctcgtgttctgtgaa

SEQ ID NO: 1198019 - DNA, 25 bp, Homo sapien
ggctgccctagtgatctttctgaaa

SEQ ID NO: 1198020 - DNA, 25 bp, Homo sapien
cacccggccggcaagtgattcttga

SEQ ID NO: 1198021 - DNA, 25 bp, Homo sapien
ccatcttagcaacggtaaaacaggg

SEQ ID NO: 1198022 - DNA, 25 bp, Homo sapien
cctgattttcttccacgctgtgcca

SEQ ID NO: 1198023 - DNA, 25 bp, Homo sapien
actcttttgggctcattggatcaca

SEQ ID NO: 1198024 - DNA, 25 bp, Homo sapien
ggttatttacccaagcagctcaagt

SEQ ID NO: 1198025 - DNA, 25 bp, Homo sapien
caacgctgctaaagtctcaattggg

SEQ ID NO: 1198026 - DNA, 25 bp, Homo sapien
cgtgcccttctatacccataactaa

SEQ ID NO: 1198027 - DNA, 25 bp, Homo sapien
tacccataactaattcccatttcca

SEQ ID NO: 1198028 - DNA, 25 bp, Homo sapien
tctccttgaacacccgtgcccttct

SEQ ID NO: 1198029 - DNA, 25 bp, Homo sapien
aatgagacacaagttaacatagaaa

SEQ ID NO: 1198030 - DNA, 25 bp, Homo sapien
caagagcctgggtattgtagcagcc

SEQ ID NO: 1198031 - DNA, 25 bp, Homo sapien
cttggctcgggaaagcttctgctcc

SEQ ID NO: 1198032 - DNA, 25 bp, Homo sapien
gctctgacatcatgggccgcagttg

SEQ ID NO: 1198033 - DNA, 25 bp, Homo sapien
tatgcttgtctccagcaaatggagg

SEQ ID NO: 1198034 - DNA, 25 bp, Homo sapien
atgacatggctcccgagccctgaga

SEQ ID NO: 1198035 - DNA, 25 bp, Homo sapien
acatggctcccgagccctgagatct

SEQ ID NO: 1198036 - DNA, 25 bp, Homo sapien
tgtatcccaagaacctcagttgaga

SEQ ID NO: 1198037 - DNA, 25 bp, Homo sapien
tctgtatcccaagaacctcagttga

SEQ ID NO: 1198038 - DNA, 25 bp, Homo sapien
gggtcaggtcagttgacctgagcat

SEQ ID NO: 1198039 - DNA, 25 bp, Homo sapien
aggtcagttgacctgagcataccca

SEQ ID NO: 1198040 - DNA, 25 bp, Homo sapien
gttgacctgagcatacccattaaac

SEQ ID NO: 1198041 - DNA, 25 bp, Homo sapien
cagttgacctgagcatacccattaa

SEQ ID NO: 1198042 - DNA, 25 bp, Homo sapien
aagcaaggagtatggtgcaataaga

SEQ ID NO: 1198043 - DNA, 25 bp, Homo sapien
ccatccagtctattctttggggtcc

SEQ ID NO: 1198044 - DNA, 25 bp, Homo sapien
gagtatggtgcaataagacaaccac

SEQ ID NO: 1198045 - DNA, 25 bp, Homo sapien
agtgctatctgcctcattgcccagc

SEQ ID NO: 1198046 - DNA, 25 bp, Homo sapien
gtcacattactcaaagaataagttg

SEQ ID NO: 1198047 - DNA, 25 bp, Homo sapien
caacagcacttgtccaaattccagg

SEQ ID NO: 1198048 - DNA, 25 bp, Homo sapien
gaataagttgactatatcccaacag

SEQ ID NO: 1198049 - DNA, 25 bp, Homo sapien
tgtccaaattccaggactccactta

SEQ ID NO: 1198050 - DNA, 25 bp, Homo sapien
tggagaacatgttcacaccctgggt

SEQ ID NO: 1198051 - DNA, 25 bp, Homo sapien
caagcaccatagctctgaatgggcc

SEQ ID NO: 1198052 - DNA, 25 bp, Homo sapien
taggaggaactctgatcagcaagaa

SEQ ID NO: 1198053 - DNA, 25 bp, Homo sapien
aaaggatgtcatgcccaggtccaga

SEQ ID NO: 1198054 - DNA, 25 bp, Homo sapien
tctttcaatgcccaagccacacttt

SEQ ID NO: 1198055 - DNA, 25 bp, Homo sapien
tagacaatcaactctatgagggcag

SEQ ID NO: 1198056 - DNA, 25 bp, Homo sapien
aacattctcttattatgggtggagg

SEQ ID NO: 1198057 - DNA, 25 bp, Homo sapien
cagagactatgtcaccactgtccca

SEQ ID NO: 1198058 - DNA, 25 bp, Homo sapien
caaggcagcaccatagtcttcccag

SEQ ID NO: 1198059 - DNA, 25 bp, Homo sapien
tgggagggtcttgcaacatatgttc

SEQ ID NO: 1198060 - DNA, 25 bp, Homo sapien
gaaatgtgcacaacccagagctctg

SEQ ID NO: 1198061 - DNA, 25 bp, Homo sapien
cagttgtagaaaggcacagagtgac

SEQ ID NO: 1198062 - DNA, 25 bp, Homo sapien
gaatgggcgaagtaagatgctcaga

SEQ ID NO: 1198063 - DNA, 25 bp, Homo sapien
caatcctgtatggttggaatgggcg

SEQ ID NO: 1198064 - DNA, 25 bp, Homo sapien
gccgcttgcgtagatgaccaattca

SEQ ID NO: 1198065 - DNA, 25 bp, Homo sapien
gcaaagtgaccagacctatcagaat

SEQ ID NO: 1198066 - DNA, 25 bp, Homo sapien
ggctgtgctgctagtgggtacctca

SEQ ID NO: 1198067 - DNA, 25 bp, Homo sapien
tagagcttctagagacgccgttctt

SEQ ID NO: 1198068 - DNA, 25 bp, Homo sapien
tactgaagtgcctgaaacccaaagc

SEQ ID NO: 1198069 - DNA, 25 bp, Homo sapien
tctgtccttaaggaatggtcctctg

SEQ ID NO: 1198070 - DNA, 25 bp, Homo sapien
ttcctgcaaagcccaatccaagact

SEQ ID NO: 1198071 - DNA, 25 bp, Homo sapien
ctgcaaagcccaatccaagactggc

SEQ ID NO: 1198072 - DNA, 25 bp, Homo sapien
tcctgcaaagcccaatccaagactg

SEQ ID NO: 1198073 - DNA, 25 bp, Homo sapien
cctgcaaagcccaatccaagactgg

SEQ ID NO: 1198074 - DNA, 25 bp, Homo sapien
gattcagagtctgaagtggtgcccc

SEQ ID NO: 1198075 - DNA, 25 bp, Homo sapien
cacagtcaataccagaaagatgatt

SEQ ID NO: 1198076 - DNA, 25 bp, Homo sapien
cagtcaataccagaaagatgattca

SEQ ID NO: 1198077 - DNA, 25 bp, Homo sapien
ttcagagtctgaagtggtgccccag

SEQ ID NO: 1198078 - DNA, 25 bp, Homo sapien
catttggtctacagcccatgagaag

SEQ ID NO: 1198079 - DNA, 25 bp, Homo sapien
gcactctcagcatgcagtccgaaag

SEQ ID NO: 1198080 - DNA, 25 bp, Homo sapien
tgtttcttggtccactctgtcactc

SEQ ID NO: 1198081 - DNA, 25 bp, Homo sapien
tgaggaaggctcgatttcttttgtt

SEQ ID NO: 1198082 - DNA, 25 bp, Homo sapien
gagttcagttgatccaacactttcc

SEQ ID NO: 1198083 - DNA, 25 bp, Homo sapien
cagccagcaggtgtagggcctgaca

SEQ ID NO: 1198084 - DNA, 25 bp, Homo sapien
ccatgggattaaatggctggtccag

SEQ ID NO: 1198085 - DNA, 25 bp, Homo sapien
tgctgaccaggtgcccatatgattt

SEQ ID NO: 1198086 - DNA, 25 bp, Homo sapien
tgttcctgcagacagttttgccagc

SEQ ID NO: 1198087 - DNA, 25 bp, Homo sapien
ggtctcatgcgtgtcctgcttggag

SEQ ID NO: 1198088 - DNA, 25 bp, Homo sapien
gctttgcttctggttactagggtct

SEQ ID NO: 1198089 - DNA, 25 bp, Homo sapien
ccataaggaaattgctgtcttgtgc

SEQ ID NO: 1198090 - DNA, 25 bp, Homo sapien
acccagtagagaaggccaagcaacc

SEQ ID NO: 1198091 - DNA, 25 bp, Homo sapien
gtggtattacttcccctctgatagg

SEQ ID NO: 1198092 - DNA, 25 bp, Homo sapien
ggttctgaaacctgggacacgagtc

SEQ ID NO: 1198093 - DNA, 25 bp, Homo sapien
tcactccctgtagaacttggatgaa

SEQ ID NO: 1198094 - DNA, 25 bp, Homo sapien
ttgctgacttaaccccccatagtgt

SEQ ID NO: 1198095 - DNA, 25 bp, Homo sapien
caaaagccagctgtacatcaatgcc

SEQ ID NO: 1198096 - DNA, 25 bp, Homo sapien
tgtcccagccggtcatcgactacat

SEQ ID NO: 1198097 - DNA, 25 bp, Homo sapien
cctcgtcttgactgttttccctact

SEQ ID NO: 1198098 - DNA, 25 bp, Homo sapien
gagacaggggcatgccagtcctcct

SEQ ID NO: 1198099 - DNA, 25 bp, Homo sapien
gcatgccagtcctcctgacttgctt

SEQ ID NO: 1198100 - DNA, 25 bp, Homo sapien
tccatctgattgtcatctcttcttg

SEQ ID NO: 1198101 - DNA, 25 bp, Homo sapien
tgattgtcatctcttcttgtgcagg

SEQ ID NO: 1198102 - DNA, 25 bp, Homo sapien
tgttggtgcctctcctccatgggct

SEQ ID NO: 1198103 - DNA, 25 bp, Homo sapien
gttggtgcctctcctccatgggctc

SEQ ID NO: 1198104 - DNA, 25 bp, Homo sapien
ctgttggtgcctctcctccatgggc

SEQ ID NO: 1198105 - DNA, 25 bp, Homo sapien
tttattgttatcaaatcagtctccc

SEQ ID NO: 1198106 - DNA, 25 bp, Homo sapien
tggggggccgcaaattcaaataagc

SEQ ID NO: 1198107 - DNA, 25 bp, Homo sapien
gccgcaaattcaaataagccagttt

SEQ ID NO: 1198108 - DNA, 25 bp, Homo sapien
gagttttattgttatcaaatcagtc

SEQ ID NO: 1198109 - DNA, 25 bp, Homo sapien
gtgcatctgtgttatggcccttctc

SEQ ID NO: 1198110 - DNA, 25 bp, Homo sapien
caatactccgcaaatacaaagtgag

SEQ ID NO: 1198111 - DNA, 25 bp, Homo sapien
cctgctagtgcatctgtgttatggc

SEQ ID NO: 1198112 - DNA, 25 bp, Homo sapien
ctccatcctgctagtgcatctgtgt

SEQ ID NO: 1198113 - DNA, 25 bp, Homo sapien
tcttccatatccgattgttgcctct

SEQ ID NO: 1198114 - DNA, 25 bp, Homo sapien
ttccatatccgattgttgcctcttt

SEQ ID NO: 1198115 - DNA, 25 bp, Homo sapien
cttccatatccgattgttgcctctt

SEQ ID NO: 1198116 - DNA, 25 bp, Homo sapien
cacctctgaggctcgacatatgcca

SEQ ID NO: 1198117 - DNA, 25 bp, Homo sapien
ggagcctttgaccagaagatgaaaa

SEQ ID NO: 1198118 - DNA, 25 bp, Homo sapien
gtgctaaactgagggccactgtatg

SEQ ID NO: 1198119 - DNA, 25 bp, Homo sapien
tagaagcaggataaatgtcacagac

SEQ ID NO: 1198120 - DNA, 25 bp, Homo sapien
ccgttgtgtagggatccgatgctgc

SEQ ID NO: 1198121 - DNA, 25 bp, Homo sapien
ttgtgtagggatccgatgctgccag

SEQ ID NO: 1198122 - DNA, 25 bp, Homo sapien
gtgtagggatccgatgctgccagct

SEQ ID NO: 1198123 - DNA, 25 bp, Homo sapien
aaacccgttgtgtagggatccgatg

SEQ ID NO: 1198124 - DNA, 25 bp, Homo sapien
tggagaactagtctctcccaggaga

SEQ ID NO: 1198125 - DNA, 25 bp, Homo sapien
ggagaactagtctctcccaggagac

SEQ ID NO: 1198126 - DNA, 25 bp, Homo sapien
cccgagttctttattggagaactag

SEQ ID NO: 1198127 - DNA, 25 bp, Homo sapien
tgcattcccgagttctttattggag

SEQ ID NO: 1198128 - DNA, 25 bp, Homo sapien
gggaaatcaagatccagacttctgg

SEQ ID NO: 1198129 - DNA, 25 bp, Homo sapien
cagcctcggagatcagaacccagct

SEQ ID NO: 1198130 - DNA, 25 bp, Homo sapien
agacttctggaccagcctcggagat

SEQ ID NO: 1198131 - DNA, 25 bp, Homo sapien
tgggaaatcaagatccagacttctg

SEQ ID NO: 1198132 - DNA, 25 bp, Homo sapien
agataccaacattataggaccaggg

SEQ ID NO: 1198133 - DNA, 25 bp, Homo sapien
gctggtcttggtgttgtcagatacc

SEQ ID NO: 1198134 - DNA, 25 bp, Homo sapien
caacattataggaccagggagaaga

SEQ ID NO: 1198135 - DNA, 25 bp, Homo sapien
aaatggctggtcttggtgttgtcag

SEQ ID NO: 1198136 - DNA, 25 bp, Homo sapien
tggtgaccaaatgcagagcgggtct

SEQ ID NO: 1198137 - DNA, 25 bp, Homo sapien
gtggcaacggtcatggagtcctcct

SEQ ID NO: 1198138 - DNA, 25 bp, Homo sapien
cctccatgagcacaggagcaaagat

SEQ ID NO: 1198139 - DNA, 25 bp, Homo sapien
cctggaatgagccatgagacacagt

SEQ ID NO: 1198140 - DNA, 25 bp, Homo sapien
tgagtatcaacaatatagaaggagc

SEQ ID NO: 1198141 - DNA, 25 bp, Homo sapien
aatatagaaggagccctggtaaggg

SEQ ID NO: 1198142 - DNA, 25 bp, Homo sapien
gtttgctgagtatcaacaatataga

SEQ ID NO: 1198143 - DNA, 25 bp, Homo sapien
tcaacaatatagaaggagccctggt

SEQ ID NO: 1198144 - DNA, 25 bp, Homo sapien
cctgtgactctagtgctcagcatag

SEQ ID NO: 1198145 - DNA, 25 bp, Homo sapien
caagaatctttgaatagcccctgtc

SEQ ID NO: 1198146 - DNA, 25 bp, Homo sapien
tgtatttgtgtctcacagtgggtgc

SEQ ID NO: 1198147 - DNA, 25 bp, Homo sapien
ctctgctagtgtcaaaagccctggg

SEQ ID NO: 1198148 - DNA, 25 bp, Homo sapien
gtctggtaatctgtgggagctctca

SEQ ID NO: 1198149 - DNA, 25 bp, Homo sapien
agctgccgctgctcagtctgtagac

SEQ ID NO: 1198150 - DNA, 25 bp, Homo sapien
ctgatcccctgagagctgccgctgc

SEQ ID NO: 1198151 - DNA, 25 bp, Homo sapien
cagtctgtagactgttggtctggta

SEQ ID NO: 1198152 - DNA, 25 bp, Homo sapien
aaatgctctctgagggtccgtattt

SEQ ID NO: 1198153 - DNA, 25 bp, Homo sapien
gggtccgtattttgctgatctcagc

SEQ ID NO: 1198154 - DNA, 25 bp, Homo sapien
tattaacatgtagcaccagagaggc

SEQ ID NO: 1198155 - DNA, 25 bp, Homo sapien
aaaacaatcatagcccctccaaggc

SEQ ID NO: 1198156 - DNA, 25 bp, Homo sapien
ggtccagccataaggccatcctaag

SEQ ID NO: 1198157 - DNA, 25 bp, Homo sapien
ggtaacactaaagtcatggcctggt

SEQ ID NO: 1198158 - DNA, 25 bp, Homo sapien
gggttcccaataggctgatggctgc

SEQ ID NO: 1198159 - DNA, 25 bp, Homo sapien
cagccataaggccatcctaagatca

SEQ ID NO: 1198160 - DNA, 25 bp, Homo sapien
gtggacatgcctgggtcaacctggt

SEQ ID NO: 1198161 - DNA, 25 bp, Homo sapien
cactctgcagtggacatgcctgggt

SEQ ID NO: 1198162 - DNA, 25 bp, Homo sapien
tgcagtggacatgcctgggtcaacc

SEQ ID NO: 1198163 - DNA, 25 bp, Homo sapien
ggacatgcctgggtcaacctggtgc

SEQ ID NO: 1198164 - DNA, 25 bp, Homo sapien
cactgtgagcacaatccgggctgga

SEQ ID NO: 1198165 - DNA, 25 bp, Homo sapien
cactgattgtctgagtctaggagaa

SEQ ID NO: 1198166 - DNA, 25 bp, Homo sapien
ctccatgggtttgaacagcaacacg

SEQ ID NO: 1198167 - DNA, 25 bp, Homo sapien
cacgacctgtacaggcccagaaaca

SEQ ID NO: 1198168 - DNA, 25 bp, Homo sapien
ctcgggggtgtaggtaggctgtgca

SEQ ID NO: 1198169 - DNA, 25 bp, Homo sapien
tgtaggtaggctgtgcagcttccat

SEQ ID NO: 1198170 - DNA, 25 bp, Homo sapien
gggtgtaggtaggctgtgcagcttc

SEQ ID NO: 1198171 - DNA, 25 bp, Homo sapien
cctcgggggtgtaggtaggctgtgc

SEQ ID NO: 1198172 - DNA, 25 bp, Homo sapien
ctgtgccaccgttctgtggttctcc

SEQ ID NO: 1198173 - DNA, 25 bp, Homo sapien
cgctctgttgccatagggctctgtg

SEQ ID NO: 1198174 - DNA, 25 bp, Homo sapien
ccgctctgttgccatagggctctgt

SEQ ID NO: 1198175 - DNA, 25 bp, Homo sapien
tgccgctctgttgccatagggctct

SEQ ID NO: 1198176 - DNA, 25 bp, Homo sapien
ggtcttcacactcattgctggctct

SEQ ID NO: 1198177 - DNA, 25 bp, Homo sapien
gatgttgacagataagccggttttg

SEQ ID NO: 1198178 - DNA, 25 bp, Homo sapien
gttgacaggaggaggtaagatattt

SEQ ID NO: 1198179 - DNA, 25 bp, Homo sapien
catgcaaaaaggcatagaggtcttc

SEQ ID NO: 1198180 - DNA, 25 bp, Homo sapien
tggctcagagttgccgtgagaaggg

SEQ ID NO: 1198181 - DNA, 25 bp, Homo sapien
ggaagtgttccccatgcccgtgatt

SEQ ID NO: 1198182 - DNA, 25 bp, Homo sapien
cctggaagtgttccccatgcccgtg

SEQ ID NO: 1198183 - DNA, 25 bp, Homo sapien
agtgttccccatgcccgtgattagg

SEQ ID NO: 1198184 - DNA, 25 bp, Homo sapien
caggggcagagctgcgtagtgcaca

SEQ ID NO: 1198185 - DNA, 25 bp, Homo sapien
aggggcagagctgcgtagtgcacac

SEQ ID NO: 1198186 - DNA, 25 bp, Homo sapien
ccaggggcagagctgcgtagtgcac

SEQ ID NO: 1198187 - DNA, 25 bp, Homo sapien
ttttccagaagagtggacgtaggtc

SEQ ID NO: 1198188 - DNA, 25 bp, Homo sapien
ccagaagagtggacgtaggtcacat

SEQ ID NO: 1198189 - DNA, 25 bp, Homo sapien
gagtggacgtaggtcacattttgtt

SEQ ID NO: 1198190 - DNA, 25 bp, Homo sapien
ttgtttcaaacgtcctcctgaagca

SEQ ID NO: 1198191 - DNA, 25 bp, Homo sapien
gaggcacgcccttgtttctggagcc

SEQ ID NO: 1198192 - DNA, 25 bp, Homo sapien
caatgccgggcagtacagttccttg

SEQ ID NO: 1198193 - DNA, 25 bp, Homo sapien
tttttcactagccaatgccgggcag

SEQ ID NO: 1198194 - DNA, 25 bp, Homo sapien
gggcagtacagttccttgagaggca

SEQ ID NO: 1198195 - DNA, 25 bp, Homo sapien
accaggaaatgacaacttgaagagc

SEQ ID NO: 1198196 - DNA, 25 bp, Homo sapien
tttcatgttaaagtaccaggaaatg

SEQ ID NO: 1198197 - DNA, 25 bp, Homo sapien
gaaatgacaacttgaagagcacact

SEQ ID NO: 1198198 - DNA, 25 bp, Homo sapien
aagtaccaggaaatgacaacttgaa

SEQ ID NO: 1198199 - DNA, 25 bp, Homo sapien
ccctgaaaagctaggctggaatgct

SEQ ID NO: 1198200 - DNA, 25 bp, Homo sapien
cacacactaggaatatcaacacaca

SEQ ID NO: 1198201 - DNA, 25 bp, Homo sapien
tgtcaacactcaagctaaatgcaga

SEQ ID NO: 1198202 - DNA, 25 bp, Homo sapien
taaatgcagaccatgtttagacaca

SEQ ID NO: 1198203 - DNA, 25 bp, Homo sapien
gtaagatcatattatgatggcaggt

SEQ ID NO: 1198204 - DNA, 25 bp, Homo sapien
gtggtaagatcatattatgatggca

SEQ ID NO: 1198205 - DNA, 25 bp, Homo sapien
ggtggtaagatcatattatgatggc

SEQ ID NO: 1198206 - DNA, 25 bp, Homo sapien
tctgtctttctaaatagacacgtgg

SEQ ID NO: 1198207 - DNA, 25 bp, Homo sapien
tagacacgtggcatcctgaggacag

SEQ ID NO: 1198208 - DNA, 25 bp, Homo sapien
tcgggccctcatcagtgactcatag

SEQ ID NO: 1198209 - DNA, 25 bp, Homo sapien
gactcataggcaccgacttgcctgt

SEQ ID NO: 1198210 - DNA, 25 bp, Homo sapien
ggttgcccatggtagtgaagggctg

SEQ ID NO: 1198211 - DNA, 25 bp, Homo sapien
gggtaactgccatccggggatattg

SEQ ID NO: 1198212 - DNA, 25 bp, Homo sapien
tgggagaatggctgaacggcaaaga

SEQ ID NO: 1198213 - DNA, 25 bp, Homo sapien
gctgaacggcaaagaagggtgggta

SEQ ID NO: 1198214 - DNA, 25 bp, Homo sapien
cagggttggtatgggaagatgtcta

SEQ ID NO: 1198215 - DNA, 25 bp, Homo sapien
gtctaattcctttctttgagcagat

SEQ ID NO: 1198216 - DNA, 25 bp, Homo sapien
aagatgtctaattcctttctttgag

SEQ ID NO: 1198217 - DNA, 25 bp, Homo sapien
gcatttgtttgcttgaccatttggg

SEQ ID NO: 1198218 - DNA, 25 bp, Homo sapien
ccagggaccagtgtttgggaattgt

SEQ ID NO: 1198219 - DNA, 25 bp, Homo sapien
gaattgtgggccgtgtattgcccgc

SEQ ID NO: 1198220 - DNA, 25 bp, Homo sapien
tttcggatttggctggtgattctgg

SEQ ID NO: 1198221 - DNA, 25 bp, Homo sapien
ttccgcctaggttcggcctcaggga

SEQ ID NO: 1198222 - DNA, 25 bp, Homo sapien
cggtttgcgtctggagcggctcctt

SEQ ID NO: 1198223 - DNA, 25 bp, Homo sapien
aaagcagcctcggatctagccggag

SEQ ID NO: 1198224 - DNA, 25 bp, Homo sapien
gaggcggagagtgacgcggtttgcg

SEQ ID NO: 1198225 - DNA, 25 bp, Homo sapien
tctagccggagctgcaagcgttaag

SEQ ID NO: 1198226 - DNA, 25 bp, Homo sapien
gcttggataccacgtcttgccttct

SEQ ID NO: 1198227 - DNA, 25 bp, Homo sapien
agagacagttgcaggcaaggtgagc

SEQ ID NO: 1198228 - DNA, 25 bp, Homo sapien
gacagttgcaggcaaggtgagctca

SEQ ID NO: 1198229 - DNA, 25 bp, Homo sapien
agacagttgcaggcaaggtgagctc

SEQ ID NO: 1198230 - DNA, 25 bp, Homo sapien
acagttgcaggcaaggtgagctcat

SEQ ID NO: 1198231 - DNA, 25 bp, Homo sapien
tacatatacggcagctctcagttcc

SEQ ID NO: 1198232 - DNA, 25 bp, Homo sapien
gtacatatacggcagctctcagttc

SEQ ID NO: 1198233 - DNA, 25 bp, Homo sapien
acatatacggcagctctcagttcct

SEQ ID NO: 1198234 - DNA, 25 bp, Homo sapien
ctgtacatatacggcagctctcagt

SEQ ID NO: 1198235 - DNA, 25 bp, Homo sapien
gaggcagaccttccataaacttgta

SEQ ID NO: 1198236 - DNA, 25 bp, Homo sapien
tcctttgagcagaggcagaccttcc

SEQ ID NO: 1198237 - DNA, 25 bp, Homo sapien
agcctcaacctgagtcctttgagca

SEQ ID NO: 1198238 - DNA, 25 bp, Homo sapien
taaacttgtaaggaagcaatgcagt

SEQ ID NO: 1198239 - DNA, 25 bp, Homo sapien
tgatcgtgtgtccagacctggttct

SEQ ID NO: 1198240 - DNA, 25 bp, Homo sapien
ttgcccctgagtgatcgtgtgtcca

SEQ ID NO: 1198241 - DNA, 25 bp, Homo sapien
gatcgtgtgtccagacctggttctc

SEQ ID NO: 1198242 - DNA, 25 bp, Homo sapien
agggcctgaaggagttgacagcctg

SEQ ID NO: 1198243 - DNA, 25 bp, Homo sapien
tgacagtcagatggttgatgatggt

SEQ ID NO: 1198244 - DNA, 25 bp, Homo sapien
gcagcagtgcagcagaggaatgact

SEQ ID NO: 1198245 - DNA, 25 bp, Homo sapien
cagaggaatgacttcctgtgcactt

SEQ ID NO: 1198246 - DNA, 25 bp, Homo sapien
ctaggagcatgggcccaagccaacc

SEQ ID NO: 1198247 - DNA, 25 bp, Homo sapien
gggtctcaggtctacatggacgcaa

SEQ ID NO: 1198248 - DNA, 25 bp, Homo sapien
gtctcaggtctacatggacgcaacg

SEQ ID NO: 1198249 - DNA, 25 bp, Homo sapien
agacacatagccagggggtctcagg

SEQ ID NO: 1198250 - DNA, 25 bp, Homo sapien
ccagggggtctcaggtctacatgga

SEQ ID NO: 1198251 - DNA, 25 bp, Homo sapien
gcgagatttcagcagcgcctgtccc

SEQ ID NO: 1198252 - DNA, 25 bp, Homo sapien
tcagcagcgcctgtccctcagtgat

SEQ ID NO: 1198253 - DNA, 25 bp, Homo sapien
gagggggtccctctcgcgagatttc

SEQ ID NO: 1198254 - DNA, 25 bp, Homo sapien
agcagaggaagtcggcgaccgggcg

SEQ ID NO: 1198255 - DNA, 25 bp, Homo sapien
tcccgcgaagcctccgtgggtctct

SEQ ID NO: 1198256 - DNA, 25 bp, Homo sapien
gcgtcttcccgcgaagcctccgtgg

SEQ ID NO: 1198257 - DNA, 25 bp, Homo sapien
cccgcggcaccgcgggtgctggcgg

SEQ ID NO: 1198258 - DNA, 25 bp, Homo sapien
tcttcccgcgaagcctccgtgggtc

SEQ ID NO: 1198259 - DNA, 25 bp, Homo sapien
cggaggtactgcgcgctctgcaggc

SEQ ID NO: 1198260 - DNA, 25 bp, Homo sapien
aggtactgcgcgctctgcaggctca

SEQ ID NO: 1198261 - DNA, 25 bp, Homo sapien
ggtactgcgcgctctgcaggctcat

SEQ ID NO: 1198262 - DNA, 25 bp, Homo sapien
gaggtactgcgcgctctgcaggctc

SEQ ID NO: 1198263 - DNA, 25 bp, Homo sapien
agtctatacaagcctcaatgtcaga

SEQ ID NO: 1198264 - DNA, 25 bp, Homo sapien
tagtctatacaagcctcaatgtcag

SEQ ID NO: 1198265 - DNA, 25 bp, Homo sapien
ctagtctatacaagcctcaatgtca

SEQ ID NO: 1198266 - DNA, 25 bp, Homo sapien
gtctatacaagcctcaatgtcagaa

SEQ ID NO: 1198267 - DNA, 25 bp, Homo sapien
ttcttgtttcttctttctccttcca

SEQ ID NO: 1198268 - DNA, 25 bp, Homo sapien
tcttgtttcttctttctccttccac

SEQ ID NO: 1198269 - DNA, 25 bp, Homo sapien
tagcttctagcgtaagttctttccc

SEQ ID NO: 1198270 - DNA, 25 bp, Homo sapien
catgagaaatgaacatacagacttc

SEQ ID NO: 1198271 - DNA, 25 bp, Homo sapien
attaccagataacacaggtttaccg

SEQ ID NO: 1198272 - DNA, 25 bp, Homo sapien
cttcaatggcaattgcaggatccaa

SEQ ID NO: 1198273 - DNA, 25 bp, Homo sapien
tgttccttggtaagtaagccctcaa

SEQ ID NO: 1198274 - DNA, 25 bp, Homo sapien
caggtctatgcgcactttgctgcca

SEQ ID NO: 1198275 - DNA, 25 bp, Homo sapien
ccccagtggtatgtcaggtgtaaat

SEQ ID NO: 1198276 - DNA, 25 bp, Homo sapien
gctttgggagtcacactttctgcac

SEQ ID NO: 1198277 - DNA, 25 bp, Homo sapien
catctgggacttaaatgaaacgttt

SEQ ID NO: 1198278 - DNA, 25 bp, Homo sapien
ttctcccacaatgactatctgcaag

SEQ ID NO: 1198279 - DNA, 25 bp, Homo sapien
caagttttcggtcctcatctgggac

SEQ ID NO: 1198280 - DNA, 25 bp, Homo sapien
gaacatccaatttctcataaggtag

SEQ ID NO: 1198281 - DNA, 25 bp, Homo sapien
ctaattcacatgtacaagagggctt

SEQ ID NO: 1198282 - DNA, 25 bp, Homo sapien
acctatttctacaggcacttgggag

SEQ ID NO: 1198283 - DNA, 25 bp, Homo sapien
gcttgattgcatccacgctgacata

SEQ ID NO: 1198284 - DNA, 25 bp, Homo sapien
caagctgatgttacctgcactcaca

SEQ ID NO: 1198285 - DNA, 25 bp, Homo sapien
gaaataccacactaactgataacag

SEQ ID NO: 1198286 - DNA, 25 bp, Homo sapien
tcaggtaagtaacaatattatgccc

SEQ ID NO: 1198287 - DNA, 25 bp, Homo sapien
tagaggtatcactctcgcagaggca

SEQ ID NO: 1198288 - DNA, 25 bp, Homo sapien
ggttccacccttgcaatctagttcc

SEQ ID NO: 1198289 - DNA, 25 bp, Homo sapien
cagcactgttctggaagagatagaa

SEQ ID NO: 1198290 - DNA, 25 bp, Homo sapien
gacgtcaagagaatttacagctgta

SEQ ID NO: 1198291 - DNA, 25 bp, Homo sapien
gaggactggccttgaaaaagagtca

SEQ ID NO: 1198292 - DNA, 25 bp, Homo sapien
gagccatgtggactagacaaaattg

SEQ ID NO: 1198293 - DNA, 25 bp, Homo sapien
tcatgtcagccttcaggacttctgc

SEQ ID NO: 1198294 - DNA, 25 bp, Homo sapien
tgtcagccttcaggacttctgcctg

SEQ ID NO: 1198295 - DNA, 25 bp, Homo sapien
catgtcagccttcaggacttctgcc

SEQ ID NO: 1198296 - DNA, 25 bp, Homo sapien
tgtcatgtcagccttcaggacttct

SEQ ID NO: 1198297 - DNA, 25 bp, Homo sapien
tattagtattacatgcaattcccaa

SEQ ID NO: 1198298 - DNA, 25 bp, Homo sapien
catcccttttggcaactaagatggg

SEQ ID NO: 1198299 - DNA, 25 bp, Homo sapien
aatttcccagaaagatattagccta

SEQ ID NO: 1198300 - DNA, 25 bp, Homo sapien
ctaagatgggatttagtgctgtgca

SEQ ID NO: 1198301 - DNA, 25 bp, Homo sapien
ctaagtctggtttacaatgcttctg

SEQ ID NO: 1198302 - DNA, 25 bp, Homo sapien
tatccccaaggcaaaacctgctcta

SEQ ID NO: 1198303 - DNA, 25 bp, Homo sapien
taacggtagatagataaaccccagc

SEQ ID NO: 1198304 - DNA, 25 bp, Homo sapien
aatatattccatagaatgctgcaga

SEQ ID NO: 1198305 - DNA, 25 bp, Homo sapien
gacttcagctggacccagcttagaa

SEQ ID NO: 1198306 - DNA, 25 bp, Homo sapien
gagcctgcctggatgtccagacttc

SEQ ID NO: 1198307 - DNA, 25 bp, Homo sapien
tttctggtacaggtcctgcagagcc

SEQ ID NO: 1198308 - DNA, 25 bp, Homo sapien
cctgcctggatgtccagacttcagc

SEQ ID NO: 1198309 - DNA, 25 bp, Homo sapien
cttgtctaaagcgtattccaaatcg

SEQ ID NO: 1198310 - DNA, 25 bp, Homo sapien
actttcttgtctaaagcgtattcca

SEQ ID NO: 1198311 - DNA, 25 bp, Homo sapien
cgtattccaaatcggtaactagcat

SEQ ID NO: 1198312 - DNA, 25 bp, Homo sapien
tctaaagcgtattccaaatcggtaa

SEQ ID NO: 1198313 - DNA, 25 bp, Homo sapien
cttctcaaatgataggtaatactta

SEQ ID NO: 1198314 - DNA, 25 bp, Homo sapien
taaagtctcggtgaaattcttgatc

SEQ ID NO: 1198315 - DNA, 25 bp, Homo sapien
taccaatggccaaatatcacaaata

SEQ ID NO: 1198316 - DNA, 25 bp, Homo sapien
taataccaatggccaaatatcacaa

SEQ ID NO: 1198317 - DNA, 25 bp, Homo sapien
tttggtatagcagtgactcactggg

SEQ ID NO: 1198318 - DNA, 25 bp, Homo sapien
ttctatttggtatagcagtgactca

SEQ ID NO: 1198319 - DNA, 25 bp, Homo sapien
aatgtaattctatttggtatagcag

SEQ ID NO: 1198320 - DNA, 25 bp, Homo sapien
taattctatttggtatagcagtgac

SEQ ID NO: 1198321 - DNA, 25 bp, Homo sapien
tgcctgaacttcactccgattcgga

SEQ ID NO: 1198322 - DNA, 25 bp, Homo sapien
ctgagtatagaagccactagctgcc

SEQ ID NO: 1198323 - DNA, 25 bp, Homo sapien
gatttgctcgattctttgcctggcc

SEQ ID NO: 1198324 - DNA, 25 bp, Homo sapien
gccactagctgcctctaggaacaga

SEQ ID NO: 1198325 - DNA, 25 bp, Homo sapien
atttagaagttctatcaggacgtga

SEQ ID NO: 1198326 - DNA, 25 bp, Homo sapien
tgatttagaagttctatcaggacgt

SEQ ID NO: 1198327 - DNA, 25 bp, Homo sapien
gatttagaagttctatcaggacgtg

SEQ ID NO: 1198328 - DNA, 25 bp, Homo sapien
tctccaaggtggacgaggcagtgct

SEQ ID NO: 1198329 - DNA, 25 bp, Homo sapien
tggcttcactatggcgctggtatgc

SEQ ID NO: 1198330 - DNA, 25 bp, Homo sapien
tgggaagacttcacacggcatggta

SEQ ID NO: 1198331 - DNA, 25 bp, Homo sapien
aacaggagctagactgtggcttcac

SEQ ID NO: 1198332 - DNA, 25 bp, Homo sapien
tgcatgcctatagtaggactctgcc

SEQ ID NO: 1198333 - DNA, 25 bp, Homo sapien
gcatgcctatagtaggactctgcct

SEQ ID NO: 1198334 - DNA, 25 bp, Homo sapien
catgcctatagtaggactctgcctg

SEQ ID NO: 1198335 - DNA, 25 bp, Homo sapien
tgcctatagtaggactctgcctggc

SEQ ID NO: 1198336 - DNA, 25 bp, Homo sapien
ctttttgcagattagtggaggcagc

SEQ ID NO: 1198337 - DNA, 25 bp, Homo sapien
aaagggaacttcacagcaatgcttc

SEQ ID NO: 1198338 - DNA, 25 bp, Homo sapien
gaagctaagatagccaactgattat

SEQ ID NO: 1198339 - DNA, 25 bp, Homo sapien
tggtctcctttggaagaagctaaga

SEQ ID NO: 1198340 - DNA, 25 bp, Homo sapien
gctcttactcaggtacacatgaccg

SEQ ID NO: 1198341 - DNA, 25 bp, Homo sapien
cacatgaccgtggaatttaataaag

SEQ ID NO: 1198342 - DNA, 25 bp, Homo sapien
gaagagggctcaacttttccaagct

SEQ ID NO: 1198343 - DNA, 25 bp, Homo sapien
tgaagtcagaaacaccccacttggt

SEQ ID NO: 1198344 - DNA, 25 bp, Homo sapien
aatcccttagtggacctcaacttgg

SEQ ID NO: 1198345 - DNA, 25 bp, Homo sapien
gagtatttcacagaaccagagctgg

SEQ ID NO: 1198346 - DNA, 25 bp, Homo sapien
gtatattttagaaactgcccaccca

SEQ ID NO: 1198347 - DNA, 25 bp, Homo sapien
agatcccaggccttaaatcccttag

SEQ ID NO: 1198348 - DNA, 25 bp, Homo sapien
tgggacaaatgactagaaagcaaca

SEQ ID NO: 1198349 - DNA, 25 bp, Homo sapien
caagtacatattctggaacacaggg

SEQ ID NO: 1198350 - DNA, 25 bp, Homo sapien
tgaactcccagtacataaagcatga

SEQ ID NO: 1198351 - DNA, 25 bp, Homo sapien
caaaagtctttgagtgttcatccat

SEQ ID NO: 1198352 - DNA, 25 bp, Homo sapien
ttgaaacaggttaatgacagtgaca

SEQ ID NO: 1198353 - DNA, 25 bp, Homo sapien
ctgtgtccaacatagctgctcatct

SEQ ID NO: 1198354 - DNA, 25 bp, Homo sapien
ggtttcattgctaaagtcacgaagg

SEQ ID NO: 1198355 - DNA, 25 bp, Homo sapien
catcttggctataagtgtgctgctc

SEQ ID NO: 1198356 - DNA, 25 bp, Homo sapien
gactcattctgtagaggacacttgc

SEQ ID NO: 1198357 - DNA, 25 bp, Homo sapien
tgggtctgagtcttagccagtccat

SEQ ID NO: 1198358 - DNA, 25 bp, Homo sapien
aagaggataggcattgtaggactcc

SEQ ID NO: 1198359 - DNA, 25 bp, Homo sapien
ggacacttgcacaggatgccaagaa

SEQ ID NO: 1198360 - DNA, 25 bp, Homo sapien
tgccacaatgcctggctaatatctt

SEQ ID NO: 1198361 - DNA, 25 bp, Homo sapien
caatgcctggctaatatcttttgta

SEQ ID NO: 1198362 - DNA, 25 bp, Homo sapien
cacaatgcctggctaatatcttttg

SEQ ID NO: 1198363 - DNA, 25 bp, Homo sapien
gccacaatgcctggctaatatcttt

SEQ ID NO: 1198364 - DNA, 25 bp, Homo sapien
aagagaaatcaaccagggccaaatg

SEQ ID NO: 1198365 - DNA, 25 bp, Homo sapien
agaagagaaatcaaccagggccaaa

SEQ ID NO: 1198366 - DNA, 25 bp, Homo sapien
atacttgagaggtcctcttcatggg

SEQ ID NO: 1198367 - DNA, 25 bp, Homo sapien
cactaatacttgagaggtcctcttc

SEQ ID NO: 1198368 - DNA, 25 bp, Homo sapien
aaatgttgtttggtggaatactgtt

SEQ ID NO: 1198369 - DNA, 25 bp, Homo sapien
atgttgtttggtggaatactgttca

SEQ ID NO: 1198370 - DNA, 25 bp, Homo sapien
gggtcaaaatcaaaatttgcaaaca

SEQ ID NO: 1198371 - DNA, 25 bp, Homo sapien
taaagggtcaaaatcaaaatttgca

SEQ ID NO: 1198372 - DNA, 25 bp, Homo sapien
ggtcaaaatcaaaatttgcaaacat

SEQ ID NO: 1198373 - DNA, 25 bp, Homo sapien
tgccaaaaatccttgtaattcaaac

SEQ ID NO: 1198374 - DNA, 25 bp, Homo sapien
ctgaaagaaggtctcaatgccaaaa

SEQ ID NO: 1198375 - DNA, 25 bp, Homo sapien
tgaaagaaggtctcaatgccaaaaa

SEQ ID NO: 1198376 - DNA, 25 bp, Homo sapien
caatgccaaaaatccttgtaattca

SEQ ID NO: 1198377 - DNA, 25 bp, Homo sapien
caactaggagctggatagtgctgga

SEQ ID NO: 1198378 - DNA, 25 bp, Homo sapien
tatggctaagtgcttaccaggctgg

SEQ ID NO: 1198379 - DNA, 25 bp, Homo sapien
catagagtgatacctgagctggacc

SEQ ID NO: 1198380 - DNA, 25 bp, Homo sapien
cagaaggctagatgctgaggacaca

SEQ ID NO: 1198381 - DNA, 25 bp, Homo sapien
caagcgttgctgtcgtattcgtcgt

SEQ ID NO: 1198382 - DNA, 25 bp, Homo sapien
tccatttgcctatagagatcaagcg

SEQ ID NO: 1198383 - DNA, 25 bp, Homo sapien
cgtattcgtcgttgctggccttctt

SEQ ID NO: 1198384 - DNA, 25 bp, Homo sapien
gctgattatcagcaatccatttgcc

SEQ ID NO: 1198385 - DNA, 25 bp, Homo sapien
ttctttgaaggtaaccactggcttc

SEQ ID NO: 1198386 - DNA, 25 bp, Homo sapien
gtagatagcactgattttagccctg

SEQ ID NO: 1198387 - DNA, 25 bp, Homo sapien
cagttgttgcttaaatttcggcttg

SEQ ID NO: 1198388 - DNA, 25 bp, Homo sapien
ggtctctgttcacttctcgtgtctt

SEQ ID NO: 1198389 - DNA, 25 bp, Homo sapien
tcttagttacagttattcctttgct

SEQ ID NO: 1198390 - DNA, 25 bp, Homo sapien
gttattcctttgctatagtcccttc

SEQ ID NO: 1198391 - DNA, 25 bp, Homo sapien
ctttccatcattcttagttacagtt

SEQ ID NO: 1198392 - DNA, 25 bp, Homo sapien
aacttttctaaggtgcatttcttgg

SEQ ID NO: 1198393 - DNA, 25 bp, Homo sapien
ctttcttagttctgtctgggatttt

SEQ ID NO: 1198394 - DNA, 25 bp, Homo sapien
gtctttcttagttctgtctgggatt

SEQ ID NO: 1198395 - DNA, 25 bp, Homo sapien
ttcttagttctgtctgggattttac

SEQ ID NO: 1198396 - DNA, 25 bp, Homo sapien
gagtctttcttagttctgtctggga

SEQ ID NO: 1198397 - DNA, 25 bp, Homo sapien
gggatgaactgggagttacttgctt

SEQ ID NO: 1198398 - DNA, 25 bp, Homo sapien
tggggatgaactgggagttacttgc

SEQ ID NO: 1198399 - DNA, 25 bp, Homo sapien
actgggagttacttgcttgagttgg

SEQ ID NO: 1198400 - DNA, 25 bp, Homo sapien
gggaaggctccagggtgatgaatgg

SEQ ID NO: 1198401 - DNA, 25 bp, Homo sapien
gataacatatgttgggggcggaaac

SEQ ID NO: 1198402 - DNA, 25 bp, Homo sapien
ggtgtaacctgagcccatagaaaat

SEQ ID NO: 1198403 - DNA, 25 bp, Homo sapien
cagctgggaaggtgtaacctgagcc

SEQ ID NO: 1198404 - DNA, 25 bp, Homo sapien
cacaggcggggggataacatatgtt

SEQ ID NO: 1198405 - DNA, 25 bp, Homo sapien
caaagccggcacagcttttgtaggg

SEQ ID NO: 1198406 - DNA, 25 bp, Homo sapien
ggactgtttcccagcttgcacctgg

SEQ ID NO: 1198407 - DNA, 25 bp, Homo sapien
gcttgtagactgtgctgttggctga

SEQ ID NO: 1198408 - DNA, 25 bp, Homo sapien
tccagagggccgttgctggctgtaa

SEQ ID NO: 1198409 - DNA, 25 bp, Homo sapien
tatgggcaccacactcatattttct

SEQ ID NO: 1198410 - DNA, 25 bp, Homo sapien
ccttttgggctattcaatactcaga

SEQ ID NO: 1198411 - DNA, 25 bp, Homo sapien
tggaaacagattatgggcaccacac

SEQ ID NO: 1198412 - DNA, 25 bp, Homo sapien
aaaaagagacgcctgtcataaaggt

SEQ ID NO: 1198413 - DNA, 25 bp, Homo sapien
tctggacggaagactcctggtgacc

SEQ ID NO: 1198414 - DNA, 25 bp, Homo sapien
ctcaaacggcattctgggtacagga

SEQ ID NO: 1198415 - DNA, 25 bp, Homo sapien
caggcataattttccctaatgggcc

SEQ ID NO: 1198416 - DNA, 25 bp, Homo sapien
gcaatgacggctcaaacagttttat

SEQ ID NO: 1198417 - DNA, 25 bp, Homo sapien
tctttaacaggtccggaggaagcag

SEQ ID NO: 1198418 - DNA, 25 bp, Homo sapien
tttaacaggtccggaggaagcagag

SEQ ID NO: 1198419 - DNA, 25 bp, Homo sapien
ctctttaacaggtccggaggaagca

SEQ ID NO: 1198420 - DNA, 25 bp, Homo sapien
agatcaggagggttagaaaaaatca

SEQ ID NO: 1198421 - DNA, 25 bp, Homo sapien
tttctgcatttagttaaccaaacaa

SEQ ID NO: 1198422 - DNA, 25 bp, Homo sapien
ggaaaaagcctcatagcatacatct

SEQ ID NO: 1198423 - DNA, 25 bp, Homo sapien
caaaaaagagccatatactgttcag

SEQ ID NO: 1198424 - DNA, 25 bp, Homo sapien
taaatctcactgttcctaagcaaga

SEQ ID NO: 1198425 - DNA, 25 bp, Homo sapien
aaagcatgcctgtattcgcccactg

SEQ ID NO: 1198426 - DNA, 25 bp, Homo sapien
tgttaacaccaagacaccgcctaag

SEQ ID NO: 1198427 - DNA, 25 bp, Homo sapien
cagagattatattctggcagggacc

SEQ ID NO: 1198428 - DNA, 25 bp, Homo sapien
tgccacaggtgcatagaatcctcct

SEQ ID NO: 1198429 - DNA, 25 bp, Homo sapien
atgtgacatgagctctgagggcttc

SEQ ID NO: 1198430 - DNA, 25 bp, Homo sapien
gtgacatgagctctgagggcttctc

SEQ ID NO: 1198431 - DNA, 25 bp, Homo sapien
gagaatccggtgagggacaggaaag

SEQ ID NO: 1198432 - DNA, 25 bp, Homo sapien
attgagagagaatccggtgagggac

SEQ ID NO: 1198433 - DNA, 25 bp, Homo sapien
gaagtgatggagaccacggagtccc

SEQ ID NO: 1198434 - DNA, 25 bp, Homo sapien
caggtttttcccatatacctcattg

SEQ ID NO: 1198435 - DNA, 25 bp, Homo sapien
cattgaacatactattatttgggta

SEQ ID NO: 1198436 - DNA, 25 bp, Homo sapien
ggccattgagggactgagttctgct

SEQ ID NO: 1198437 - DNA, 25 bp, Homo sapien
tctgagtgtacaggaaatgtaaggt

SEQ ID NO: 1198438 - DNA, 25 bp, Homo sapien
cactatcccttaatcaatctgagtg

SEQ ID NO: 1198439 - DNA, 25 bp, Homo sapien
taatcaatctgagtgtacaggaaat

SEQ ID NO: 1198440 - DNA, 25 bp, Homo sapien
tatttgtaattacagaatctcacta

SEQ ID NO: 1198441 - DNA, 25 bp, Homo sapien
ccaatgggtccaaaattggagaatg

SEQ ID NO: 1198442 - DNA, 25 bp, Homo sapien
agttttccaccgatctgcagtcctt

SEQ ID NO: 1198443 - DNA, 25 bp, Homo sapien
gtccttctatccctgttatctggag

SEQ ID NO: 1198444 - DNA, 25 bp, Homo sapien
acagaattatggttgtgtgttggag

SEQ ID NO: 1198445 - DNA, 25 bp, Homo sapien
gatgacgttgctgagagataatcaa

SEQ ID NO: 1198446 - DNA, 25 bp, Homo sapien
cactcggagtgctggcctgatgcca

SEQ ID NO: 1198447 - DNA, 25 bp, Homo sapien
tcctccatggaagggccatggcctg

SEQ ID NO: 1198448 - DNA, 25 bp, Homo sapien
ccaactgctctcagaggatgacgtt

SEQ ID NO: 1198449 - DNA, 25 bp, Homo sapien
tttgctgtaataatcttgtggttct

SEQ ID NO: 1198450 - DNA, 25 bp, Homo sapien
aatcttgtggttcttgttcctgaaa

SEQ ID NO: 1198451 - DNA, 25 bp, Homo sapien
ctttgctgtaataatcttgtggttc

SEQ ID NO: 1198452 - DNA, 25 bp, Homo sapien
gtggttcttgttcctgaaatctact

SEQ ID NO: 1198453 - DNA, 25 bp, Homo sapien
agggatttttcaatcccagccaaat

SEQ ID NO: 1198454 - DNA, 25 bp, Homo sapien
atttttcaatcccagccaaatataa

SEQ ID NO: 1198455 - DNA, 25 bp, Homo sapien
aatataaaggcatatatatggcccc

SEQ ID NO: 1198456 - DNA, 25 bp, Homo sapien
aacagtccagatcttgtcagcagag

SEQ ID NO: 1198457 - DNA, 25 bp, Homo sapien
cagtgtggagggttcatggtgcctt

SEQ ID NO: 1198458 - DNA, 25 bp, Homo sapien
cttgtccccgttgctgtttctgctt

SEQ ID NO: 1198459 - DNA, 25 bp, Homo sapien
gcagaaggtccaggatgcatcatgg

SEQ ID NO: 1198460 - DNA, 25 bp, Homo sapien
catggtgccttgtccccgttgctgt

SEQ ID NO: 1198461 - DNA, 25 bp, Homo sapien
ggactgtgtgggccagtcctgcaaa

SEQ ID NO: 1198462 - DNA, 25 bp, Homo sapien
gcaaacccaacatgccatggtttat

SEQ ID NO: 1198463 - DNA, 25 bp, Homo sapien
accctcttgacagcgagaaacagaa

SEQ ID NO: 1198464 - DNA, 25 bp, Homo sapien
ggtttatggagccttcattcccagg

SEQ ID NO: 1198465 - DNA, 25 bp, Homo sapien
gtgagaggcggtgataccaagtaac

SEQ ID NO: 1198466 - DNA, 25 bp, Homo sapien
tgagaggcggtgataccaagtaact

SEQ ID NO: 1198467 - DNA, 25 bp, Homo sapien
gcactgcgaacatttcgtgcacact

SEQ ID NO: 1198468 - DNA, 25 bp, Homo sapien
ctttttgttgcactgcgaacatttc

SEQ ID NO: 1198469 - DNA, 25 bp, Homo sapien
gagaagttcccattggcttctccca

SEQ ID NO: 1198470 - DNA, 25 bp, Homo sapien
ctgagaagttcccattggcttctcc

SEQ ID NO: 1198471 - DNA, 25 bp, Homo sapien
tgagaagttcccattggcttctccc

SEQ ID NO: 1198472 - DNA, 25 bp, Homo sapien
tccactggctgaagaggtcggttcc

SEQ ID NO: 1198473 - DNA, 25 bp, Homo sapien
tacacactgactagaagcacacctg

SEQ ID NO: 1198474 - DNA, 25 bp, Homo sapien
cctattagaacgtgtcaggctgtga

SEQ ID NO: 1198475 - DNA, 25 bp, Homo sapien
tcgagcacctacagagtgaagggca

SEQ ID NO: 1198476 - DNA, 25 bp, Homo sapien
ggcacatgtccgtgctgccttgaat

SEQ ID NO: 1198477 - DNA, 25 bp, Homo sapien
ctctgtgggctacgcagatactgct

SEQ ID NO: 1198478 - DNA, 25 bp, Homo sapien
tcttttgggccccaactgctggacc

SEQ ID NO: 1198479 - DNA, 25 bp, Homo sapien
tcttccaaaatggacgacgtcgtgt

SEQ ID NO: 1198480 - DNA, 25 bp, Homo sapien
tctagggcgcaagaatcagtgacag

SEQ ID NO: 1198481 - DNA, 25 bp, Homo sapien
gaagagcaatgagcgttatctcacc

SEQ ID NO: 1198482 - DNA, 25 bp, Homo sapien
taaacctggttagcttgtctagggc

SEQ ID NO: 1198483 - DNA, 25 bp, Homo sapien
gctgcaggtcttgcacagacaaaaa

SEQ ID NO: 1198484 - DNA, 25 bp, Homo sapien
caagtccaggcccaaggagtaagta

SEQ ID NO: 1198485 - DNA, 25 bp, Homo sapien
tataggttactcataaggcatatac

SEQ ID NO: 1198486 - DNA, 25 bp, Homo sapien
cattactgtaattggctcttaaggc

SEQ ID NO: 1198487 - DNA, 25 bp, Homo sapien
gctgtacatttggtgcacttttctg

SEQ ID NO: 1198488 - DNA, 25 bp, Homo sapien
taacagatgtccactcttcacttgt

SEQ ID NO: 1198489 - DNA, 25 bp, Homo sapien
tatgtccagacacggtcgttaggga

SEQ ID NO: 1198490 - DNA, 25 bp, Homo sapien
tattgtatgtccagacacggtcgtt

SEQ ID NO: 1198491 - DNA, 25 bp, Homo sapien
caaatagttattgtatgtccagaca

SEQ ID NO: 1198492 - DNA, 25 bp, Homo sapien
tcagggcacagcatgatagaactgc

SEQ ID NO: 1198493 - DNA, 25 bp, Homo sapien
ttctctctgagtagtctggcttcct

SEQ ID NO: 1198494 - DNA, 25 bp, Homo sapien
tgaaatttattgcaagggtctaagc

SEQ ID NO: 1198495 - DNA, 25 bp, Homo sapien
gaactgcagctcctaggtttataca

SEQ ID NO: 1198496 - DNA, 25 bp, Homo sapien
gtgtgtgctgtcaacctctcaagta

SEQ ID NO: 1198497 - DNA, 25 bp, Homo sapien
gaagtgaaggaacccatcattctgg

SEQ ID NO: 1198498 - DNA, 25 bp, Homo sapien
gaaccacagctctgatgcggtcagt

SEQ ID NO: 1198499 - DNA, 25 bp, Homo sapien
taaaaatgtgtgtccatgtagtgcc

SEQ ID NO: 1198500 - DNA, 25 bp, Homo sapien
tcagatttctgctctcgggagacaa

SEQ ID NO: 1198501 - DNA, 25 bp, Homo sapien
gctgtctttaattagggcctcccca

SEQ ID NO: 1198502 - DNA, 25 bp, Homo sapien
ggccatatcagttgtcttcagattt

SEQ ID NO: 1198503 - DNA, 25 bp, Homo sapien
tttattaaaggccatatcagttgtc

SEQ ID NO: 1198504 - DNA, 25 bp, Homo sapien
cagctcggccatgacgtcatcatgg

SEQ ID NO: 1198505 - DNA, 25 bp, Homo sapien
tcggccatgacgtcatcatggtctt

SEQ ID NO: 1198506 - DNA, 25 bp, Homo sapien
agcagctctccgcaccgtccacctc

SEQ ID NO: 1198507 - DNA, 25 bp, Homo sapien
agagctgagtcagatgtggctgacc

SEQ ID NO: 1198508 - DNA, 25 bp, Homo sapien
aacatgggtagacgtgtgcccttcc

SEQ ID NO: 1198509 - DNA, 25 bp, Homo sapien
catgggtagacgtgtgcccttccca

SEQ ID NO: 1198510 - DNA, 25 bp, Homo sapien
gagaacatgggtagacgtgtgccct

SEQ ID NO: 1198511 - DNA, 25 bp, Homo sapien
tgggtagacgtgtgcccttcccact

SEQ ID NO: 1198512 - DNA, 25 bp, Homo sapien
aaaagaggttgtagcggagaaggtg

SEQ ID NO: 1198513 - DNA, 25 bp, Homo sapien
cggagaaggtgtcgggcaggtcctg

SEQ ID NO: 1198514 - DNA, 25 bp, Homo sapien
tagcggagaaggtgtcgggcaggtc

SEQ ID NO: 1198515 - DNA, 25 bp, Homo sapien
gttgtagcggagaaggtgtcgggca

SEQ ID NO: 1198516 - DNA, 25 bp, Homo sapien
gggcaaagcttgcaaatatggactc

SEQ ID NO: 1198517 - DNA, 25 bp, Homo sapien
aaagcttgcaaatatggactcaggc

SEQ ID NO: 1198518 - DNA, 25 bp, Homo sapien
tcagggcaaagcttgcaaatatgga

SEQ ID NO: 1198519 - DNA, 25 bp, Homo sapien
gcaaagcttgcaaatatggactcag

SEQ ID NO: 1198520 - DNA, 25 bp, Homo sapien
gtggccctatgggatttgaaaaggc

SEQ ID NO: 1198521 - DNA, 25 bp, Homo sapien
gagctcactgacagcatggatggag

SEQ ID NO: 1198522 - DNA, 25 bp, Homo sapien
aggtggccctatgggatttgaaaag

SEQ ID NO: 1198523 - DNA, 25 bp, Homo sapien
aaggcagttaggtccagggagctca

SEQ ID NO: 1198524 - DNA, 25 bp, Homo sapien
acaagtttttatgggcacagtctaa

SEQ ID NO: 1198525 - DNA, 25 bp, Homo sapien
ttgggaggacctaggacatctgatt

SEQ ID NO: 1198526 - DNA, 25 bp, Homo sapien
tgacaagtttttatgggcacagtct

SEQ ID NO: 1198527 - DNA, 25 bp, Homo sapien
gacctaggacatctgattagagagt

SEQ ID NO: 1198528 - DNA, 25 bp, Homo sapien
acaggatcagaaactatctccgtga

SEQ ID NO: 1198529 - DNA, 25 bp, Homo sapien
ggtgcaaattattaacaggatcaga

SEQ ID NO: 1198530 - DNA, 25 bp, Homo sapien
ttaacataagaattctagatggtgc

SEQ ID NO: 1198531 - DNA, 25 bp, Homo sapien
ccgtgatagattcaagaaagtaaaa

SEQ ID NO: 1198532 - DNA, 25 bp, Homo sapien
ccaataggtattagaggtagtcaag

SEQ ID NO: 1198533 - DNA, 25 bp, Homo sapien
tatttgttcacaagaatgggtgggt

SEQ ID NO: 1198534 - DNA, 25 bp, Homo sapien
tagagaccgagtcaaaatggatact

SEQ ID NO: 1198535 - DNA, 25 bp, Homo sapien
aatggatactagctggaaacaactg

SEQ ID NO: 1198536 - DNA, 25 bp, Homo sapien
cagagcactactgaagcctttggag

SEQ ID NO: 1198537 - DNA, 25 bp, Homo sapien
cctagactagaaagtgcaaagtagc

SEQ ID NO: 1198538 - DNA, 25 bp, Homo sapien
tatgtagtatcactgcccaaagacc

SEQ ID NO: 1198539 - DNA, 25 bp, Homo sapien
tctggatggcagctgaatacctata

SEQ ID NO: 1198540 - DNA, 25 bp, Homo sapien
tataaatatcgagtagctctaaaac

SEQ ID NO: 1198541 - DNA, 25 bp, Homo sapien
ctcaaaaaatgaccggtgcttataa

SEQ ID NO: 1198542 - DNA, 25 bp, Homo sapien
cagttctcaaaaaatgaccggtgct

SEQ ID NO: 1198543 - DNA, 25 bp, Homo sapien
aaaagttataaatatcgagtagctc

SEQ ID NO: 1198544 - DNA, 25 bp, Homo sapien
tctgggcagcctctgaatgaaatgc

SEQ ID NO: 1198545 - DNA, 25 bp, Homo sapien
gagatttggtcagaatttgaggcca

SEQ ID NO: 1198546 - DNA, 25 bp, Homo sapien
taaaaaatatgagagactggcagct

SEQ ID NO: 1198547 - DNA, 25 bp, Homo sapien
ccagggttcagagcaagaagtcttg

SEQ ID NO: 1198548 - DNA, 25 bp, Homo sapien
aaaatgagctaatctacatcaggca

SEQ ID NO: 1198549 - DNA, 25 bp, Homo sapien
catgcttctctagaaatccctgcag

SEQ ID NO: 1198550 - DNA, 25 bp, Homo sapien
ggaagactctcaacaatgtcctgtt

SEQ ID NO: 1198551 - DNA, 25 bp, Homo sapien
gacttttaaatggtactgctgtatc

SEQ ID NO: 1198552 - DNA, 25 bp, Homo sapien
ccgacgagggcgaggtggactcctg

SEQ ID NO: 1198553 - DNA, 25 bp, Homo sapien
ggcccgacgagggcgaggtggactc

SEQ ID NO: 1198554 - DNA, 25 bp, Homo sapien
caggccgggcccgacgagggcgagg

SEQ ID NO: 1198555 - DNA, 25 bp, Homo sapien
gccaggccgggcccgacgagggcga

SEQ ID NO: 1198556 - DNA, 25 bp, Homo sapien
gcaattagaacgatgctgggcgccc

SEQ ID NO: 1198557 - DNA, 25 bp, Homo sapien
gataagatttgacctttcgactccg

SEQ ID NO: 1198558 - DNA, 25 bp, Homo sapien
gatcccgttgcgatgctgtcacaca

SEQ ID NO: 1198559 - DNA, 25 bp, Homo sapien
gataggtcgttgacggctgcagcaa

SEQ ID NO: 1198560 - DNA, 25 bp, Homo sapien
caaacgaccacctattttaagatgt

SEQ ID NO: 1198561 - DNA, 25 bp, Homo sapien
aaatctggcctagatggaatcatat

SEQ ID NO: 1198562 - DNA, 25 bp, Homo sapien
tggtttccaccaatccttccacatt

SEQ ID NO: 1198563 - DNA, 25 bp, Homo sapien
tgtcaatgaccctttcccaaattct

SEQ ID NO: 1198564 - DNA, 25 bp, Homo sapien
ccctgaaagcagatacaatgtacct

SEQ ID NO: 1198565 - DNA, 25 bp, Homo sapien
tgattcatacaggtaaattaggccc

SEQ ID NO: 1198566 - DNA, 25 bp, Homo sapien
tgtcaagcactaaggtaggtactgg

SEQ ID NO: 1198567 - DNA, 25 bp, Homo sapien
tacatacaaggcagcaatagaaagg

SEQ ID NO: 1198568 - DNA, 25 bp, Homo sapien
tttgacaatcagctaaagatacagc

SEQ ID NO: 1198569 - DNA, 25 bp, Homo sapien
tcatttgggcaacaatgggatacat

SEQ ID NO: 1198570 - DNA, 25 bp, Homo sapien
ggcagtgtagcctccatcgcttaga

SEQ ID NO: 1198571 - DNA, 25 bp, Homo sapien
gggttcaaagcatctctaaaatcca

SEQ ID NO: 1198572 - DNA, 25 bp, Homo sapien
ttagatcatccaagagctttagtga

SEQ ID NO: 1198573 - DNA, 25 bp, Homo sapien
tccacttagatcatccaagagcttt

SEQ ID NO: 1198574 - DNA, 25 bp, Homo sapien
ccaagagctttagtgattggagcat

SEQ ID NO: 1198575 - DNA, 25 bp, Homo sapien
gatcatccaagagctttagtgattg

SEQ ID NO: 1198576 - DNA, 25 bp, Homo sapien
tcaagccgatgctttcctggaagct

SEQ ID NO: 1198577 - DNA, 25 bp, Homo sapien
tcctggaagcttttgggggccacag

SEQ ID NO: 1198578 - DNA, 25 bp, Homo sapien
gggggccacagacatgatgtcatat

SEQ ID NO: 1198579 - DNA, 25 bp, Homo sapien
tttgggggccacagacatgatgtca

SEQ ID NO: 1198580 - DNA, 25 bp, Homo sapien
caggaaccattcctccgtgcaaact

SEQ ID NO: 1198581 - DNA, 25 bp, Homo sapien
tatagtagtggacaagatggacaaa

SEQ ID NO: 1198582 - DNA, 25 bp, Homo sapien
tgttccaaacacttggcatatagta

SEQ ID NO: 1198583 - DNA, 25 bp, Homo sapien
cattcctccgtgcaaactgttccaa

SEQ ID NO: 1198584 - DNA, 25 bp, Homo sapien
tactggtagcctcatagacagccat

SEQ ID NO: 1198585 - DNA, 25 bp, Homo sapien
cttactggtagcctcatagacagcc

SEQ ID NO: 1198586 - DNA, 25 bp, Homo sapien
ttactggtagcctcatagacagcca

SEQ ID NO: 1198587 - DNA, 25 bp, Homo sapien
tgggaaccaggaatgggtgccagag

SEQ ID NO: 1198588 - DNA, 25 bp, Homo sapien
gagtgggaaccaggaatgggtgcca

SEQ ID NO: 1198589 - DNA, 25 bp, Homo sapien
gggaaccaggaatgggtgccagagg

SEQ ID NO: 1198590 - DNA, 25 bp, Homo sapien
agtgggaaccaggaatgggtgccag

SEQ ID NO: 1198591 - DNA, 25 bp, Homo sapien
aatgccaggaagttgtttccagtgc

SEQ ID NO: 1198592 - DNA, 25 bp, Homo sapien
caggaagttgtttccagtgccaagc

SEQ ID NO: 1198593 - DNA, 25 bp, Homo sapien
gagccatgtactccttcttgctgga

SEQ ID NO: 1198594 - DNA, 25 bp, Homo sapien
ctttaagagccatgtactccttctt

SEQ ID NO: 1198595 - DNA, 25 bp, Homo sapien
agaagggtgaccatgtagagtgaaa

SEQ ID NO: 1198596 - DNA, 25 bp, Homo sapien
gagcaacaagccaggcattgagaag

SEQ ID NO: 1198597 - DNA, 25 bp, Homo sapien
atgaagcgtgagcaacaagccaggc

SEQ ID NO: 1198598 - DNA, 25 bp, Homo sapien
aggcattgagaagggtgaccatgta

SEQ ID NO: 1198599 - DNA, 25 bp, Homo sapien
gagcctgcagtaccgagtggaccac

SEQ ID NO: 1198600 - DNA, 25 bp, Homo sapien
agcactggtaagagtgtgcatcgaa

SEQ ID NO: 1198601 - DNA, 25 bp, Homo sapien
aagagcctgcagtaccgagtggacc

SEQ ID NO: 1198602 - DNA, 25 bp, Homo sapien
agtgtgcatcgaagagcctgcagta

SEQ ID NO: 1198603 - DNA, 25 bp, Homo sapien
ggaggcaggcaggagaatgagctcc

SEQ ID NO: 1198604 - DNA, 25 bp, Homo sapien
ggggaggcaggcaggagaatgagct

SEQ ID NO: 1198605 - DNA, 25 bp, Homo sapien
agtgggggtgcgggggaggcaggca

SEQ ID NO: 1198606 - DNA, 25 bp, Homo sapien
aggcaggcaggagaatgagctccca

SEQ ID NO: 1198607 - DNA, 25 bp, Homo sapien
tcattctcgactgcccttgctatca

SEQ ID NO: 1198608 - DNA, 25 bp, Homo sapien
cattctcgactgcccttgctatcag

SEQ ID NO: 1198609 - DNA, 25 bp, Homo sapien
tcgactgcccttgctatcagccaaa

SEQ ID NO: 1198610 - DNA, 25 bp, Homo sapien
tctcgactgcccttgctatcagcca

SEQ ID NO: 1198611 - DNA, 25 bp, Homo sapien
ccctgaccctatgaggtctttaatc

SEQ ID NO: 1198612 - DNA, 25 bp, Homo sapien
ctatgaggtctttaatctagtgaca

SEQ ID NO: 1198613 - DNA, 25 bp, Homo sapien
ttaagctggtcctttgaatgaagtg

SEQ ID NO: 1198614 - DNA, 25 bp, Homo sapien
caggcacagtgtaggtctctatgag

SEQ ID NO: 1198615 - DNA, 25 bp, Homo sapien
tctgacatgcatagtttccgaaaac

SEQ ID NO: 1198616 - DNA, 25 bp, Homo sapien
taacaagccttgtactgcaggtgtg

SEQ ID NO: 1198617 - DNA, 25 bp, Homo sapien
agacttctctgtgggatctgccttc

SEQ ID NO: 1198618 - DNA, 25 bp, Homo sapien
gaagcctcccatttacatatgtcag

SEQ ID NO: 1198619 - DNA, 25 bp, Homo sapien
ggtgtcggctttagtttcagagtcc

SEQ ID NO: 1198620 - DNA, 25 bp, Homo sapien
gaatgtagggcttgagcactcggtt

SEQ ID NO: 1198621 - DNA, 25 bp, Homo sapien
aaatgcctcaattttgatactaaca

SEQ ID NO: 1198622 - DNA, 25 bp, Homo sapien
cagtattcgatagccaagtttgtga

SEQ ID NO: 1198623 - DNA, 25 bp, Homo sapien
cttctcacgggaggaatgcaaagat

SEQ ID NO: 1198624 - DNA, 25 bp, Homo sapien
tgagctctcgaaaggattcagaggt

SEQ ID NO: 1198625 - DNA, 25 bp, Homo sapien
tcgaaaggattcagaggtggacttc

SEQ ID NO: 1198626 - DNA, 25 bp, Homo sapien
gtggacttctcacgggaggaatgca

SEQ ID NO: 1198627 - DNA, 25 bp, Homo sapien
tctccattcagtgcagccgtctggt

SEQ ID NO: 1198628 - DNA, 25 bp, Homo sapien
ccattcagtgcagccgtctggtcac

SEQ ID NO: 1198629 - DNA, 25 bp, Homo sapien
tcagtgcagccgtctggtcacaaat

SEQ ID NO: 1198630 - DNA, 25 bp, Homo sapien
ttcagtgcagccgtctggtcacaaa

SEQ ID NO: 1198631 - DNA, 25 bp, Homo sapien
cttgaaagaggcaggcaggaggcat

SEQ ID NO: 1198632 - DNA, 25 bp, Homo sapien
ttgaaagaggcaggcaggaggcatt

SEQ ID NO: 1198633 - DNA, 25 bp, Homo sapien
aaagaggcaggcaggaggcattacg

SEQ ID NO: 1198634 - DNA, 25 bp, Homo sapien
gaggcaggcaggaggcattacggat

SEQ ID NO: 1198635 - DNA, 25 bp, Homo sapien
gacacctcttgagtaggttctccca

SEQ ID NO: 1198636 - DNA, 25 bp, Homo sapien
cagtgtcccgtgctttctaccttgg

SEQ ID NO: 1198637 - DNA, 25 bp, Homo sapien
agtttgaatttagacacctcttgag

SEQ ID NO: 1198638 - DNA, 25 bp, Homo sapien
atattcgaacatgatcttccaccag

SEQ ID NO: 1198639 - DNA, 25 bp, Homo sapien
agcccctgaataaagatttgccaag

SEQ ID NO: 1198640 - DNA, 25 bp, Homo sapien
ttgttctccagtcatggctgtgcct

SEQ ID NO: 1198641 - DNA, 25 bp, Homo sapien
tttgccaagctggcctgtggtgctg

SEQ ID NO: 1198642 - DNA, 25 bp, Homo sapien
tggctgtgcctacagcccctgaata

SEQ ID NO: 1198643 - DNA, 25 bp, Homo sapien
tgtagtcattaatgtgcaaaggaca

SEQ ID NO: 1198644 - DNA, 25 bp, Homo sapien
gaatcactgtgtagtcattaatgtg

SEQ ID NO: 1198645 - DNA, 25 bp, Homo sapien
cactgtgtagtcattaatgtgcaaa

SEQ ID NO: 1198646 - DNA, 25 bp, Homo sapien
tggcctgaatcactgtgtagtcatt

SEQ ID NO: 1198647 - DNA, 25 bp, Homo sapien
ccaagaatgtgattttacaatgtga

SEQ ID NO: 1198648 - DNA, 25 bp, Homo sapien
cctccaagaatgtgattttacaatg

SEQ ID NO: 1198649 - DNA, 25 bp, Homo sapien
tttacaatgtgaagccccattcctg

SEQ ID NO: 1198650 - DNA, 25 bp, Homo sapien
ctcctccaagaatgtgattttacaa

SEQ ID NO: 1198651 - DNA, 25 bp, Homo sapien
atgggcattgcagagccaaggtcta

SEQ ID NO: 1198652 - DNA, 25 bp, Homo sapien
gtctaacagagcaagattggtacca

SEQ ID NO: 1198653 - DNA, 25 bp, Homo sapien
ggtaccagttattgagctgaagttg

SEQ ID NO: 1198654 - DNA, 25 bp, Homo sapien
cagagccaaggtctaacagagcaag

SEQ ID NO: 1198655 - DNA, 25 bp, Homo sapien
atgtattcaaagcatgatgtaggct

SEQ ID NO: 1198656 - DNA, 25 bp, Homo sapien
ggcaaccccgcatcaagcaggtctt

SEQ ID NO: 1198657 - DNA, 25 bp, Homo sapien
tgtgccaaatggttagccaagctgt

SEQ ID NO: 1198658 - DNA, 25 bp, Homo sapien
ttgatcaaagctgtgtgtgttctca

SEQ ID NO: 1198659 - DNA, 25 bp, Homo sapien
tatagcacttagtagatactgtgtt

SEQ ID NO: 1198660 - DNA, 25 bp, Homo sapien
ctttatagcacttagtagatactgt

SEQ ID NO: 1198661 - DNA, 25 bp, Homo sapien
ctagtccccatgtcctgacaggtcc

SEQ ID NO: 1198662 - DNA, 25 bp, Homo sapien
cccctagtccccatgtcctgacagg

SEQ ID NO: 1198663 - DNA, 25 bp, Homo sapien
aaatgatagagcacaccagcctttt

SEQ ID NO: 1198664 - DNA, 25 bp, Homo sapien
taaacttggattggttttgctctcc

SEQ ID NO: 1198665 - DNA, 25 bp, Homo sapien
gattctagtggtaaccatgttagcc

SEQ ID NO: 1198666 - DNA, 25 bp, Homo sapien
cattgttgggccttcatgtgtgtac

SEQ ID NO: 1198667 - DNA, 25 bp, Homo sapien
ctcaagatccgggacacaaacataa

SEQ ID NO: 1198668 - DNA, 25 bp, Homo sapien
tcaagatccgggacacaaacataat

SEQ ID NO: 1198669 - DNA, 25 bp, Homo sapien
gggctacctcacacactgtcctaga

SEQ ID NO: 1198670 - DNA, 25 bp, Homo sapien
cagaattaactgtgggggctacctc

SEQ ID NO: 1198671 - DNA, 25 bp, Homo sapien
tcctagaattagcatcgagagtcat

SEQ ID NO: 1198672 - DNA, 25 bp, Homo sapien
cacactgtcctagaattagcatcga

SEQ ID NO: 1198673 - DNA, 25 bp, Homo sapien
ctctcagtaccaacttgtctgggtg

SEQ ID NO: 1198674 - DNA, 25 bp, Homo sapien
aacttgtctgggtgaccgcttgtca

SEQ ID NO: 1198675 - DNA, 25 bp, Homo sapien
tctgggtgaccgcttgtcatctatc

SEQ ID NO: 1198676 - DNA, 25 bp, Homo sapien
ggtgaccgcttgtcatctatcgcca

SEQ ID NO: 1198677 - DNA, 25 bp, Homo sapien
gagcttggaagtctgcccatgaacc

SEQ ID NO: 1198678 - DNA, 25 bp, Homo sapien
agagcttggaagtctgcccatgaac

SEQ ID NO: 1198679 - DNA, 25 bp, Homo sapien
ctcccagagcttggaagtctgccca

SEQ ID NO: 1198680 - DNA, 25 bp, Homo sapien
ccagagcttggaagtctgcccatga

SEQ ID NO: 1198681 - DNA, 25 bp, Homo sapien
aataaggcctagactctttagccag

SEQ ID NO: 1198682 - DNA, 25 bp, Homo sapien
ctaaataaggcctagactctttagc

SEQ ID NO: 1198683 - DNA, 25 bp, Homo sapien
ataaggcctagactctttagccagc

SEQ ID NO: 1198684 - DNA, 25 bp, Homo sapien
taaataaggcctagactctttagcc

SEQ ID NO: 1198685 - DNA, 25 bp, Homo sapien
actaggatcaaattgatcttcctga

SEQ ID NO: 1198686 - DNA, 25 bp, Homo sapien
ctaggatcaaattgatcttcctgaa

SEQ ID NO: 1198687 - DNA, 25 bp, Homo sapien
aatacagctccaattaagatattcc

SEQ ID NO: 1198688 - DNA, 25 bp, Homo sapien
cactaggatcaaattgatcttcctg

SEQ ID NO: 1198689 - DNA, 25 bp, Homo sapien
gaactcgtaccccattaaggcatcc

SEQ ID NO: 1198690 - DNA, 25 bp, Homo sapien
gtgttagtgctatccttgaccagga

SEQ ID NO: 1198691 - DNA, 25 bp, Homo sapien
taattcagccatcctagcacaggtc

SEQ ID NO: 1198692 - DNA, 25 bp, Homo sapien
tagaggtcaaatgtgaggccatcac

SEQ ID NO: 1198693 - DNA, 25 bp, Homo sapien
gtgagtctttgtgagtagccaccat

SEQ ID NO: 1198694 - DNA, 25 bp, Homo sapien
caaagcagggtaaggttttgctagg

SEQ ID NO: 1198695 - DNA, 25 bp, Homo sapien
tgctaggactgacagtgtcctggag

SEQ ID NO: 1198696 - DNA, 25 bp, Homo sapien
ttctgtgagtctttgtgagtagcca

SEQ ID NO: 1198697 - DNA, 25 bp, Homo sapien
tgccaacaggaaatcgcgctgggct

SEQ ID NO: 1198698 - DNA, 25 bp, Homo sapien
catcagcacactgccaacaggaaat

SEQ ID NO: 1198699 - DNA, 25 bp, Homo sapien
caggaaatcgcgctgggcttttcac

SEQ ID NO: 1198700 - DNA, 25 bp, Homo sapien
ccccaattacccagtaactggccat

SEQ ID NO: 1198701 - DNA, 25 bp, Homo sapien
gttttctctccggtgcgcgaacgct

SEQ ID NO: 1198702 - DNA, 25 bp, Homo sapien
gccaacgcaatgtctgctgggctca

SEQ ID NO: 1198703 - DNA, 25 bp, Homo sapien
aggccaacgcaatgtctgctgggct

SEQ ID NO: 1198704 - DNA, 25 bp, Homo sapien
acgctgcatgatgcgccctgctcgg

SEQ ID NO: 1198705 - DNA, 25 bp, Homo sapien
ttttagcttgccaaagcaatttcat

SEQ ID NO: 1198706 - DNA, 25 bp, Homo sapien
cattttagcttgccaaagcaatttc

SEQ ID NO: 1198707 - DNA, 25 bp, Homo sapien
attttagcttgccaaagcaatttca

SEQ ID NO: 1198708 - DNA, 25 bp, Homo sapien
agcctgttgaatctggactcttttg

SEQ ID NO: 1198709 - DNA, 25 bp, Homo sapien
ttgctcctttattggcagcctgttg

SEQ ID NO: 1198710 - DNA, 25 bp, Homo sapien
tgctcctttattggcagcctgttga

SEQ ID NO: 1198711 - DNA, 25 bp, Homo sapien
tcttgctcctttattggcagcctgt

SEQ ID NO: 1198712 - DNA, 25 bp, Homo sapien
tccacctttgaatgctgctcaaaat

SEQ ID NO: 1198713 - DNA, 25 bp, Homo sapien
ttgagtcacatttaattaagtctgg

SEQ ID NO: 1198714 - DNA, 25 bp, Homo sapien
gagtcacatttaattaagtctggaa

SEQ ID NO: 1198715 - DNA, 25 bp, Homo sapien
gggttgagtcacatttaattaagtc

SEQ ID NO: 1198716 - DNA, 25 bp, Homo sapien
tcaatgggttgagtcacatttaatt

SEQ ID NO: 1198717 - DNA, 25 bp, Homo sapien
catgaaacactgaaacgaatagggc

SEQ ID NO: 1198718 - DNA, 25 bp, Homo sapien
gacacagtgataagagagctgcaca

SEQ ID NO: 1198719 - DNA, 25 bp, Homo sapien
tggctgatgaaaccaaaaactccgg

SEQ ID NO: 1198720 - DNA, 25 bp, Homo sapien
tatgtctcaaacactgtcccaggtt

SEQ ID NO: 1198721 - DNA, 25 bp, Homo sapien
gagttccggtaagaaaggtgcacca

SEQ ID NO: 1198722 - DNA, 25 bp, Homo sapien
taaagaaaagtgtcggagggccaga

SEQ ID NO: 1198723 - DNA, 25 bp, Homo sapien
gtaacaggcctcatcattatgggca

SEQ ID NO: 1198724 - DNA, 25 bp, Homo sapien
gccttattggcttgacagtgggtca

SEQ ID NO: 1198725 - DNA, 25 bp, Homo sapien
cacctttgggttaaaggtctctgag

SEQ ID NO: 1198726 - DNA, 25 bp, Homo sapien
ggtgctggaagggaaaagacatcat

SEQ ID NO: 1198727 - DNA, 25 bp, Homo sapien
ggggtgctggaagggaaaagacatc

SEQ ID NO: 1198728 - DNA, 25 bp, Homo sapien
gggtgctggaagggaaaagacatca

SEQ ID NO: 1198729 - DNA, 25 bp, Homo sapien
tttgccatcctgtctcagtagggtt

SEQ ID NO: 1198730 - DNA, 25 bp, Homo sapien
tgccatcctgtctcagtagggtttc

SEQ ID NO: 1198731 - DNA, 25 bp, Homo sapien
cctttgccatcctgtctcagtaggg

SEQ ID NO: 1198732 - DNA, 25 bp, Homo sapien
ccctttgccatcctgtctcagtagg

SEQ ID NO: 1198733 - DNA, 25 bp, Homo sapien
aatttccataattatcgattttggc

SEQ ID NO: 1198734 - DNA, 25 bp, Homo sapien
tatcgattttggcatgagacggaga

SEQ ID NO: 1198735 - DNA, 25 bp, Homo sapien
gaaaaagggcatgtgagagatgaaa

SEQ ID NO: 1198736 - DNA, 25 bp, Homo sapien
gaaagatgccatatttcaattccgt

SEQ ID NO: 1198737 - DNA, 25 bp, Homo sapien
ccagagtggtggcaactgctttcag

SEQ ID NO: 1198738 - DNA, 25 bp, Homo sapien
tggcctgtcagaaatcaaactactg

SEQ ID NO: 1198739 - DNA, 25 bp, Homo sapien
gtcatcatgtcaaaccgctaacagg

SEQ ID NO: 1198740 - DNA, 25 bp, Homo sapien
tatgccaacggtgttattcaactcc

SEQ ID NO: 1198741 - DNA, 25 bp, Homo sapien
tcagtccacagacggcaatgtgcat

SEQ ID NO: 1198742 - DNA, 25 bp, Homo sapien
ttcagtccacagacggcaatgtgca

SEQ ID NO: 1198743 - DNA, 25 bp, Homo sapien
tttcttcagtccacagacggcaatg

SEQ ID NO: 1198744 - DNA, 25 bp, Homo sapien
tcttcagtccacagacggcaatgtg

SEQ ID NO: 1198745 - DNA, 25 bp, Homo sapien
aaggtgccagcttttatggtcctga

SEQ ID NO: 1198746 - DNA, 25 bp, Homo sapien
ggcaaagcctctgtacgttgaaaga

SEQ ID NO: 1198747 - DNA, 25 bp, Homo sapien
cacttctttagtggaggcaaagcct

SEQ ID NO: 1198748 - DNA, 25 bp, Homo sapien
ctgatataggtaaagtcattgtccc

SEQ ID NO: 1198749 - DNA, 25 bp, Homo sapien
agatgctggtgaccctagaggcgac

SEQ ID NO: 1198750 - DNA, 25 bp, Homo sapien
agaggcgacactgggaccataagtc

SEQ ID NO: 1198751 - DNA, 25 bp, Homo sapien
gctctgagacccgtcgtgcgggttc

SEQ ID NO: 1198752 - DNA, 25 bp, Homo sapien
gcgggttcagtttccagtatgtttc

SEQ ID NO: 1198753 - DNA, 25 bp, Homo sapien
ctttctctagctcatcagccttatg

SEQ ID NO: 1198754 - DNA, 25 bp, Homo sapien
catcagccttatggatttcttggcc

SEQ ID NO: 1198755 - DNA, 25 bp, Homo sapien
tgctcctttctctagctcatcagcc

SEQ ID NO: 1198756 - DNA, 25 bp, Homo sapien
tcagccttatggatttcttggcctc

SEQ ID NO: 1198757 - DNA, 25 bp, Homo sapien
catcccatcccggtaggttccagtt

SEQ ID NO: 1198758 - DNA, 25 bp, Homo sapien
catctggtttgacccaacgccagtc

SEQ ID NO: 1198759 - DNA, 25 bp, Homo sapien
aggttccagtttgcgcccttaggca

SEQ ID NO: 1198760 - DNA, 25 bp, Homo sapien
ttgacccaacgccagtccatctggt

SEQ ID NO: 1198761 - DNA, 25 bp, Homo sapien
ttggactctgatgaactttggcttc

SEQ ID NO: 1198762 - DNA, 25 bp, Homo sapien
ttcctgatcaccattttggactctg

SEQ ID NO: 1198763 - DNA, 25 bp, Homo sapien
cattttggactctgatgaactttgg

SEQ ID NO: 1198764 - DNA, 25 bp, Homo sapien
gtttgggcttgtcaggtttccatac

SEQ ID NO: 1198765 - DNA, 25 bp, Homo sapien
gtacttgggagcctgtataaaatgt

SEQ ID NO: 1198766 - DNA, 25 bp, Homo sapien
tacttgggagcctgtataaaatgta

SEQ ID NO: 1198767 - DNA, 25 bp, Homo sapien
acttgggagcctgtataaaatgtaa

SEQ ID NO: 1198768 - DNA, 25 bp, Homo sapien
aatattgattgcaaactctctggga

SEQ ID NO: 1198769 - DNA, 25 bp, Homo sapien
tctgaggcagtaatgtaacacagcc

SEQ ID NO: 1198770 - DNA, 25 bp, Homo sapien
atttacatgatcctttaccagtgac

SEQ ID NO: 1198771 - DNA, 25 bp, Homo sapien
tatccgatgtcttggattactacta

SEQ ID NO: 1198772 - DNA, 25 bp, Homo sapien
ttttctacctcaggcattcttggca

SEQ ID NO: 1198773 - DNA, 25 bp, Homo sapien
attcttttccaaccgactgcaatcg

SEQ ID NO: 1198774 - DNA, 25 bp, Homo sapien
cagaggagacaaccaaaattgagtt

SEQ ID NO: 1198775 - DNA, 25 bp, Homo sapien
tcctcggtcctaagggcaagtatgc

SEQ ID NO: 1198776 - DNA, 25 bp, Homo sapien
ctctagatctatcttattgtttctc

SEQ ID NO: 1198777 - DNA, 25 bp, Homo sapien
tgagaaagacaaatggagagtcact

SEQ ID NO: 1198778 - DNA, 25 bp, Homo sapien
gacaaatggagagtcactgcaccca

SEQ ID NO: 1198779 - DNA, 25 bp, Homo sapien
gagaaagacaaatggagagtcactg

SEQ ID NO: 1198780 - DNA, 25 bp, Homo sapien
aaagacaaatggagagtcactgcac

SEQ ID NO: 1198781 - DNA, 25 bp, Homo sapien
aagccaggcccttagtatggaagcg

SEQ ID NO: 1198782 - DNA, 25 bp, Homo sapien
gggctctcggaagtcttctgcacac

SEQ ID NO: 1198783 - DNA, 25 bp, Homo sapien
cagtttctgtaagcaagggaagtga

SEQ ID NO: 1198784 - DNA, 25 bp, Homo sapien
tcatccgtgtgagataatccagcag

SEQ ID NO: 1198785 - DNA, 25 bp, Homo sapien
gttccccaattaggctcagagccag

SEQ ID NO: 1198786 - DNA, 25 bp, Homo sapien
ttccccaattaggctcagagccagg

SEQ ID NO: 1198787 - DNA, 25 bp, Homo sapien
ggttccccaattaggctcagagcca

SEQ ID NO: 1198788 - DNA, 25 bp, Homo sapien
cggttccccaattaggctcagagcc

SEQ ID NO: 1198789 - DNA, 25 bp, Homo sapien
cctggacttgaagttccagatgcca

SEQ ID NO: 1198790 - DNA, 25 bp, Homo sapien
tgggttatgactgaaaaacgtagaa

SEQ ID NO: 1198791 - DNA, 25 bp, Homo sapien
ggggatcactgcctatccccggagt

SEQ ID NO: 1198792 - DNA, 25 bp, Homo sapien
acttgaagttccagatgccaatggg

SEQ ID NO: 1198793 - DNA, 25 bp, Homo sapien
ctcagccccttcacacccctcacac

SEQ ID NO: 1198794 - DNA, 25 bp, Homo sapien
tccccagtgctcgggttgtttccca

SEQ ID NO: 1198795 - DNA, 25 bp, Homo sapien
gtgctcgggttgtttcccaacctca

SEQ ID NO: 1198796 - DNA, 25 bp, Homo sapien
agccccttcacacccctcacactcc

SEQ ID NO: 1198797 - DNA, 25 bp, Homo sapien
tgaaggagatcgtgttgggaagccc

SEQ ID NO: 1198798 - DNA, 25 bp, Homo sapien
gaaggagatcgtgttgggaagccca

SEQ ID NO: 1198799 - DNA, 25 bp, Homo sapien
aaggagatcgtgttgggaagcccat

SEQ ID NO: 1198800 - DNA, 25 bp, Homo sapien
ctgaaggagatcgtgttgggaagcc

SEQ ID NO: 1198801 - DNA, 25 bp, Homo sapien
gctctgccacgagatcttctgagaa

SEQ ID NO: 1198802 - DNA, 25 bp, Homo sapien
agctgctctgccacgagatcttctg

SEQ ID NO: 1198803 - DNA, 25 bp, Homo sapien
ctgagaagcacgtgaattctgctga

SEQ ID NO: 1198804 - DNA, 25 bp, Homo sapien
gtgaattctgctgactctccaccct

SEQ ID NO: 1198805 - DNA, 25 bp, Homo sapien
taaactgagagatggtggcacggat

SEQ ID NO: 1198806 - DNA, 25 bp, Homo sapien
tatcccttcgagaccaaatgcagcc

SEQ ID NO: 1198807 - DNA, 25 bp, Homo sapien
ggtgaggcactactttcttgaagag

SEQ ID NO: 1198808 - DNA, 25 bp, Homo sapien
gcacggatcgtaggagccaaatgtt

SEQ ID NO: 1198809 - DNA, 25 bp, Homo sapien
caaagaatattttataaaagacaat

SEQ ID NO: 1198810 - DNA, 25 bp, Homo sapien
cacaaagaatattttataaaagaca

SEQ ID NO: 1198811 - DNA, 25 bp, Homo sapien
cacagctgctatgaattcttaccac

SEQ ID NO: 1198812 - DNA, 25 bp, Homo sapien
acagctgctatgaattcttaccaca

SEQ ID NO: 1198813 - DNA, 25 bp, Homo sapien
tcacagctgctatgaattcttacca

SEQ ID NO: 1198814 - DNA, 25 bp, Homo sapien
tagatggaattagactgcagtgccg

SEQ ID NO: 1198815 - DNA, 25 bp, Homo sapien
gactgcagtgccgaaacgatggccc

SEQ ID NO: 1198816 - DNA, 25 bp, Homo sapien
tgccgaaacgatggccctcaaggag

SEQ ID NO: 1198817 - DNA, 25 bp, Homo sapien
caagtcttttttaaccgatagatgg

SEQ ID NO: 1198818 - DNA, 25 bp, Homo sapien
tctcggctggtcaaatggttattat

SEQ ID NO: 1198819 - DNA, 25 bp, Homo sapien
catcagtagttctcggctggtcaaa

SEQ ID NO: 1198820 - DNA, 25 bp, Homo sapien
gtctgagaagatatctgaaagttct

SEQ ID NO: 1198821 - DNA, 25 bp, Homo sapien
gtcaaatggttattatggtctgaga

SEQ ID NO: 1198822 - DNA, 25 bp, Homo sapien
gaaagaaagggactacttctgtagc

SEQ ID NO: 1198823 - DNA, 25 bp, Homo sapien
ccttactttgtaagaagatcacctg

SEQ ID NO: 1198824 - DNA, 25 bp, Homo sapien
caagccaggcaattctcataaatga

SEQ ID NO: 1198825 - DNA, 25 bp, Homo sapien
gatcttggcctgaaatggatgtgcc

SEQ ID NO: 1198826 - DNA, 25 bp, Homo sapien
agccgcctctgggtacgcttctggt

SEQ ID NO: 1198827 - DNA, 25 bp, Homo sapien
caggtttgcaaattttgaggttcct

SEQ ID NO: 1198828 - DNA, 25 bp, Homo sapien
gcagccgcctctgggtacgcttctg

SEQ ID NO: 1198829 - DNA, 25 bp, Homo sapien
tgtccaggtttgcaaattttgaggt

SEQ ID NO: 1198830 - DNA, 25 bp, Homo sapien
cagggaagacgagggccagacatac

SEQ ID NO: 1198831 - DNA, 25 bp, Homo sapien
gggccagtggtgctaacctccatga

SEQ ID NO: 1198832 - DNA, 25 bp, Homo sapien
gaagtatgtaccacaaaagcatggg

SEQ ID NO: 1198833 - DNA, 25 bp, Homo sapien
tattcaaggcctaactgcgggccag

SEQ ID NO: 1198834 - DNA, 25 bp, Homo sapien
ccccttgggctagacttggtgacta

SEQ ID NO: 1198835 - DNA, 25 bp, Homo sapien
agcaaaactgtctttattgtcattg

SEQ ID NO: 1198836 - DNA, 25 bp, Homo sapien
tattgtcattgaaaagttgaggggt

SEQ ID NO: 1198837 - DNA, 25 bp, Homo sapien
ctgaagagcatccaaagcaaaactg

SEQ ID NO: 1198838 - DNA, 25 bp, Homo sapien
caaaactgtctttattgtcattgaa

SEQ ID NO: 1198839 - DNA, 25 bp, Homo sapien
tcaagcatggtcaggtcagtcagga

SEQ ID NO: 1198840 - DNA, 25 bp, Homo sapien
aagggcagtgtcaagcatggtcagg

SEQ ID NO: 1198841 - DNA, 25 bp, Homo sapien
cagtgtcaagcatggtcaggtcagt

SEQ ID NO: 1198842 - DNA, 25 bp, Homo sapien
tgtcaagcatggtcaggtcagtcag

SEQ ID NO: 1198843 - DNA, 25 bp, Homo sapien
ttctccttttctcaaagtttatcag

SEQ ID NO: 1198844 - DNA, 25 bp, Homo sapien
ctccttttctcaaagtttatcagtc

SEQ ID NO: 1198845 - DNA, 25 bp, Homo sapien
ttttctcaaagtttatcagtccacc

SEQ ID NO: 1198846 - DNA, 25 bp, Homo sapien
ccttttctcaaagtttatcagtcca

SEQ ID NO: 1198847 - DNA, 25 bp, Homo sapien
caatagctgttgcaggcagactgta

SEQ ID NO: 1198848 - DNA, 25 bp, Homo sapien
gggtcatgcaatagctgttgcaggc

SEQ ID NO: 1198849 - DNA, 25 bp, Homo sapien
ccactggatgaacttttggtctggg

SEQ ID NO: 1198850 - DNA, 25 bp, Homo sapien
gctttatctgggcaatcacttcaaa

SEQ ID NO: 1198851 - DNA, 25 bp, Homo sapien
tgctcttccgaggcttgggcgaggt

SEQ ID NO: 1198852 - DNA, 25 bp, Homo sapien
gctgcttcaatctcacatgacaggg

SEQ ID NO: 1198853 - DNA, 25 bp, Homo sapien
tcttccgaggcttgggcgaggtggt

SEQ ID NO: 1198854 - DNA, 25 bp, Homo sapien
cttccgaggcttgggcgaggtggtg

SEQ ID NO: 1198855 - DNA, 25 bp, Homo sapien
atgttttcataggactgaccacttg

SEQ ID NO: 1198856 - DNA, 25 bp, Homo sapien
aatgttttcataggactgaccactt

SEQ ID NO: 1198857 - DNA, 25 bp, Homo sapien
gaggatccaggggtattagaactcc

SEQ ID NO: 1198858 - DNA, 25 bp, Homo sapien
cgcaggatgacacgctgacagagtc

SEQ ID NO: 1198859 - DNA, 25 bp, Homo sapien
gggagtaatggagccctcctcagcc

SEQ ID NO: 1198860 - DNA, 25 bp, Homo sapien
gagtggttcgactcgcaggatgaca

SEQ ID NO: 1198861 - DNA, 25 bp, Homo sapien
tgggactggtgatcatgtcagaccc

SEQ ID NO: 1198862 - DNA, 25 bp, Homo sapien
gacctggaccaaatctgtggcctag

SEQ ID NO: 1198863 - DNA, 25 bp, Homo sapien
tagtgtcaagcccaacctagatcag

SEQ ID NO: 1198864 - DNA, 25 bp, Homo sapien
catatgcttgcgagtgggcttgccc

SEQ ID NO: 1198865 - DNA, 25 bp, Homo sapien
gccaaccagcagatacataagagag

SEQ ID NO: 1198866 - DNA, 25 bp, Homo sapien
gggttgattaaggaagacatccctg

SEQ ID NO: 1198867 - DNA, 25 bp, Homo sapien
gtaatggacgtcaccgagacagagc

SEQ ID NO: 1198868 - DNA, 25 bp, Homo sapien
gttgccgttattgtcttccacactg

SEQ ID NO: 1198869 - DNA, 25 bp, Homo sapien
ttccacactgatgcggattatgcag

SEQ ID NO: 1198870 - DNA, 25 bp, Homo sapien
acttgaacaccccaaatattacatc

SEQ ID NO: 1198871 - DNA, 25 bp, Homo sapien
tgaacaccccaaatattacatcagc

SEQ ID NO: 1198872 - DNA, 25 bp, Homo sapien
ggtgatatttaacttgaacacccca

SEQ ID NO: 1198873 - DNA, 25 bp, Homo sapien
tgatatttaacttgaacaccccaaa

SEQ ID NO: 1198874 - DNA, 25 bp, Homo sapien
tctggatcacagcgggggttttatc

SEQ ID NO: 1198875 - DNA, 25 bp, Homo sapien
tcacagcgggggttttatcctggct

SEQ ID NO: 1198876 - DNA, 25 bp, Homo sapien
gatcacagcgggggttttatcctgg

SEQ ID NO: 1198877 - DNA, 25 bp, Homo sapien
gctctctggatcacagcgggggttt

SEQ ID NO: 1198878 - DNA, 25 bp, Homo sapien
tccgagatgacctgcaccagctcgt

SEQ ID NO: 1198879 - DNA, 25 bp, Homo sapien
gagatgacctgcaccagctcgtact

SEQ ID NO: 1198880 - DNA, 25 bp, Homo sapien
ctttgtcctccgagatgacctgcac

SEQ ID NO: 1198881 - DNA, 25 bp, Homo sapien
ttgtcctccgagatgacctgcacca

SEQ ID NO: 1198882 - DNA, 25 bp, Homo sapien
ggcatatggttgtaaaactggacaa

SEQ ID NO: 1198883 - DNA, 25 bp, Homo sapien
aaaatgtgcaagtctagctctgtgg

SEQ ID NO: 1198884 - DNA, 25 bp, Homo sapien
agtatttagcactcaagtgtaatga

SEQ ID NO: 1198885 - DNA, 25 bp, Homo sapien
gagtaatcgccacaagaaggtatac

SEQ ID NO: 1198886 - DNA, 25 bp, Homo sapien
gctgtcctgggcaacgtcaagctgg

SEQ ID NO: 1198887 - DNA, 25 bp, Homo sapien
cacttggctgttcatggcataaaag

SEQ ID NO: 1198888 - DNA, 25 bp, Homo sapien
aagctggtccggctacgcagtttca

SEQ ID NO: 1198889 - DNA, 25 bp, Homo sapien
tccatggagttctttttgcgcaaaa

SEQ ID NO: 1198890 - DNA, 25 bp, Homo sapien
tacaatgtgtagtccaatctcctgg

SEQ ID NO: 1198891 - DNA, 25 bp, Homo sapien
tactgtgatagcaagcacgggaacc

SEQ ID NO: 1198892 - DNA, 25 bp, Homo sapien
aatacacaggatgaacacgggcaca

SEQ ID NO: 1198893 - DNA, 25 bp, Homo sapien
catatatgtcttggtggtcacgccc

SEQ ID NO: 1198894 - DNA, 25 bp, Homo sapien
cctaccccatattatcaatttccta

SEQ ID NO: 1198895 - DNA, 25 bp, Homo sapien
gccctaccccatattatcaatttcc

SEQ ID NO: 1198896 - DNA, 25 bp, Homo sapien
tgggaactttttaacagtatgataa

SEQ ID NO: 1198897 - DNA, 25 bp, Homo sapien
tgccctaccccatattatcaatttc

SEQ ID NO: 1198898 - DNA, 25 bp, Homo sapien
gcagggagaatttacaaacgttcca

SEQ ID NO: 1198899 - DNA, 25 bp, Homo sapien
atgcctcctaatgatcctgcgctgc

SEQ ID NO: 1198900 - DNA, 25 bp, Homo sapien
ctgcagggagaatttacaaacgttc

SEQ ID NO: 1198901 - DNA, 25 bp, Homo sapien
aatgatcctgcgctgcagggagaat

SEQ ID NO: 1198902 - DNA, 25 bp, Homo sapien
gaaacaccgagatggcgaagttgca

SEQ ID NO: 1198903 - DNA, 25 bp, Homo sapien
tgatgactgccaacggtgaacaaac

SEQ ID NO: 1198904 - DNA, 25 bp, Homo sapien
aaggcattacccctctgtggcagag

SEQ ID NO: 1198905 - DNA, 25 bp, Homo sapien
ccgtgcaccctaggagaaggcatta

SEQ ID NO: 1198906 - DNA, 25 bp, Homo sapien
caggtggtcttaaaactggctctcc

SEQ ID NO: 1198907 - DNA, 25 bp, Homo sapien
tggatactgataactggcttacagg

SEQ ID NO: 1198908 - DNA, 25 bp, Homo sapien
cctgtgttaaagcacttggatactg

SEQ ID NO: 1198909 - DNA, 25 bp, Homo sapien
gggaacacccgagactacagatcag

SEQ ID NO: 1198910 - DNA, 25 bp, Homo sapien
caggtctgcccttgaccaaggatgt

SEQ ID NO: 1198911 - DNA, 25 bp, Homo sapien
ttgaccaaggatgtcagagtcaggg

SEQ ID NO: 1198912 - DNA, 25 bp, Homo sapien
gcccttgaccaaggatgtcagagtc

SEQ ID NO: 1198913 - DNA, 25 bp, Homo sapien
aggtctgcccttgaccaaggatgtc

SEQ ID NO: 1198914 - DNA, 25 bp, Homo sapien
gtcttgcgtgctatttcagagtggg

SEQ ID NO: 1198915 - DNA, 25 bp, Homo sapien
ctgcatcatctgtcttgcgtgctat

SEQ ID NO: 1198916 - DNA, 25 bp, Homo sapien
agtgataaactatttgccttctgga

SEQ ID NO: 1198917 - DNA, 25 bp, Homo sapien
aagtgataaactatttgccttctgg

SEQ ID NO: 1198918 - DNA, 25 bp, Homo sapien
tgaacacctgcactttgcagaggac

SEQ ID NO: 1198919 - DNA, 25 bp, Homo sapien
tgtgtgtggactgaacacctgcact

SEQ ID NO: 1198920 - DNA, 25 bp, Homo sapien
cgcttgcggttcattcaggcctgct

SEQ ID NO: 1198921 - DNA, 25 bp, Homo sapien
caaccgtgacatcagcagtgctggt

SEQ ID NO: 1198922 - DNA, 25 bp, Homo sapien
tctggaggctaaaccctgtctggat

SEQ ID NO: 1198923 - DNA, 25 bp, Homo sapien
tcaggtctagaatcccaagcagtgt

SEQ ID NO: 1198924 - DNA, 25 bp, Homo sapien
agtatagaggcctttgcatctgggc

SEQ ID NO: 1198925 - DNA, 25 bp, Homo sapien
tgaacactgtgagccgcagatgtga

SEQ ID NO: 1198926 - DNA, 25 bp, Homo sapien
tagctagagcttagtcacaggacaa

SEQ ID NO: 1198927 - DNA, 25 bp, Homo sapien
tggatgcgtttcagccagcaaggca

SEQ ID NO: 1198928 - DNA, 25 bp, Homo sapien
tactgcccttaattgtggagtccca

SEQ ID NO: 1198929 - DNA, 25 bp, Homo sapien
tgtcccttgaagtgtgcaatccaga

SEQ ID NO: 1198930 - DNA, 25 bp, Homo sapien
tctgggtgccttttctggtctggtt

SEQ ID NO: 1198931 - DNA, 25 bp, Homo sapien
taacagattcgaggcagtactcatt

SEQ ID NO: 1198932 - DNA, 25 bp, Homo sapien
gttgggaggagggtaacagattcga

SEQ ID NO: 1198933 - DNA, 25 bp, Homo sapien
attagtgatgtctgcgatttttctg

SEQ ID NO: 1198934 - DNA, 25 bp, Homo sapien
tttgcttgaacctctgtcctggcca

SEQ ID NO: 1198935 - DNA, 25 bp, Homo sapien
ccttcagcagcttaataccaaacag

SEQ ID NO: 1198936 - DNA, 25 bp, Homo sapien
tcaaagcaactgattgcattcccca

SEQ ID NO: 1198937 - DNA, 25 bp, Homo sapien
tagataagttactgggctcccctgg

SEQ ID NO: 1198938 - DNA, 25 bp, Homo sapien
agctccagagtccaaaaaatgtttt

SEQ ID NO: 1198939 - DNA, 25 bp, Homo sapien
gcactgaagcccaatcactgtctac

SEQ ID NO: 1198940 - DNA, 25 bp, Homo sapien
aaataccccttttcagagctccaga

SEQ ID NO: 1198941 - DNA, 25 bp, Homo sapien
gccttgtctttagatgggaattcca

SEQ ID NO: 1198942 - DNA, 25 bp, Homo sapien
agaactgcaggcttctccagttagc

SEQ ID NO: 1198943 - DNA, 25 bp, Homo sapien
gtcttggacacctgctgtatgtcca

SEQ ID NO: 1198944 - DNA, 25 bp, Homo sapien
aactgcaggcttctccagttagcac

SEQ ID NO: 1198945 - DNA, 25 bp, Homo sapien
ttagagtcttggacacctgctgtat

SEQ ID NO: 1198946 - DNA, 25 bp, Homo sapien
caatggcatcaagatagaaagacag

SEQ ID NO: 1198947 - DNA, 25 bp, Homo sapien
ttaaattctggtagatattaagccc

SEQ ID NO: 1198948 - DNA, 25 bp, Homo sapien
ccagacctaagtccttttttcactg

SEQ ID NO: 1198949 - DNA, 25 bp, Homo sapien
cccagtcttttgcatcaagattatt

SEQ ID NO: 1198950 - DNA, 25 bp, Homo sapien
ggctctgtagtgagactgttttgca

SEQ ID NO: 1198951 - DNA, 25 bp, Homo sapien
gaagtagttgcctctggttacatct

SEQ ID NO: 1198952 - DNA, 25 bp, Homo sapien
gtttgtaaatcatctacagtgccag

SEQ ID NO: 1198953 - DNA, 25 bp, Homo sapien
tggtgtctaccaagggccattgtcc

SEQ ID NO: 1198954 - DNA, 25 bp, Homo sapien
ctcagtagcgtgctctgggtccttg

SEQ ID NO: 1198955 - DNA, 25 bp, Homo sapien
acagatgttgactgagccccggctc

SEQ ID NO: 1198956 - DNA, 25 bp, Homo sapien
aagtttgggccttccttgccagtca

SEQ ID NO: 1198957 - DNA, 25 bp, Homo sapien
taacaggtctgcatccataggccca

SEQ ID NO: 1198958 - DNA, 25 bp, Homo sapien
acctgcatgactggctggtccctgt

SEQ ID NO: 1198959 - DNA, 25 bp, Homo sapien
gtgacagcaactggcaactccattg

SEQ ID NO: 1198960 - DNA, 25 bp, Homo sapien
aaaaaatctagaccccagagccatg

SEQ ID NO: 1198961 - DNA, 25 bp, Homo sapien
cagagccatgctggaaacctctctg

SEQ ID NO: 1198962 - DNA, 25 bp, Homo sapien
ccatagcgaagctctcccaggctgc

SEQ ID NO: 1198963 - DNA, 25 bp, Homo sapien
tctgtgcctttcaagatttggagac

SEQ ID NO: 1198964 - DNA, 25 bp, Homo sapien
cccctctgtgcctttcaagatttgg

SEQ ID NO: 1198965 - DNA, 25 bp, Homo sapien
gtgcctttcaagatttggagacatt

SEQ ID NO: 1198966 - DNA, 25 bp, Homo sapien
ctcctgcagtctctagttctgagga

SEQ ID NO: 1198967 - DNA, 25 bp, Homo sapien
cctcctgcagtctctagttctgagg

SEQ ID NO: 1198968 - DNA, 25 bp, Homo sapien
gagcatcttccctaactttcaacag

SEQ ID NO: 1198969 - DNA, 25 bp, Homo sapien
tcagaacttagaatactccataggt

SEQ ID NO: 1198970 - DNA, 25 bp, Homo sapien
ggatctgttgcgtgggatctcagaa

SEQ ID NO: 1198971 - DNA, 25 bp, Homo sapien
atcagccccacagttccttctagag

SEQ ID NO: 1198972 - DNA, 25 bp, Homo sapien
gcttccccgaggctcgcagctgcag

SEQ ID NO: 1198973 - DNA, 25 bp, Homo sapien
tgcggcgctcccgtggtgcaccacg

SEQ ID NO: 1198974 - DNA, 25 bp, Homo sapien
gtggtgcaccacgacccgcgcccgg

SEQ ID NO: 1198975 - DNA, 25 bp, Homo sapien
ctcccgtggtgcaccacgacccgcg

SEQ ID NO: 1198976 - DNA, 25 bp, Homo sapien
gccggtgcggcgctcccgtggtgca

SEQ ID NO: 1198977 - DNA, 25 bp, Homo sapien
cgggggtcggctcggaatcgccgcg

SEQ ID NO: 1198978 - DNA, 25 bp, Homo sapien
ttagggtgagtgcccatccaggcgt

SEQ ID NO: 1198979 - DNA, 25 bp, Homo sapien
tagggtgagtgcccatccaggcgtc

SEQ ID NO: 1198980 - DNA, 25 bp, Homo sapien
ggtcggctcggaatcgccgcgctcc

SEQ ID NO: 1198981 - DNA, 25 bp, Homo sapien
gtgagggtggcgcgcgtcctcagtc

SEQ ID NO: 1198982 - DNA, 25 bp, Homo sapien
agggtggcgcgcgtcctcagtctcc

SEQ ID NO: 1198983 - DNA, 25 bp, Homo sapien
ggtggcgcgcgtcctcagtctccca

SEQ ID NO: 1198984 - DNA, 25 bp, Homo sapien
tgagggtggcgcgcgtcctcagtct

SEQ ID NO: 1198985 - DNA, 25 bp, Homo sapien
cttgggtggcatctcctatatctaa

SEQ ID NO: 1198986 - DNA, 25 bp, Homo sapien
gaacgctacataaacttgggtggca

SEQ ID NO: 1198987 - DNA, 25 bp, Homo sapien
gtccaggtaaaccaagaacgctaca

SEQ ID NO: 1198988 - DNA, 25 bp, Homo sapien
gggtggcatctcctatatctaattc

SEQ ID NO: 1198989 - DNA, 25 bp, Homo sapien
cacagtttacttcatgccagctttt

SEQ ID NO: 1198990 - DNA, 25 bp, Homo sapien
ttctggtaatcctacacagtttact

SEQ ID NO: 1198991 - DNA, 25 bp, Homo sapien
acagtttacttcatgccagcttttg

SEQ ID NO: 1198992 - DNA, 25 bp, Homo sapien
tcctcaaatagccaagagtaaagct

SEQ ID NO: 1198993 - DNA, 25 bp, Homo sapien
tcctactgctttactcgggaaagga

SEQ ID NO: 1198994 - DNA, 25 bp, Homo sapien
agtaaagctatgaaccctgtatccc

SEQ ID NO: 1198995 - DNA, 25 bp, Homo sapien
gcaagaatggccgaatacaacactc

SEQ ID NO: 1198996 - DNA, 25 bp, Homo sapien
caagctagaaaagcattaattacca

SEQ ID NO: 1198997 - DNA, 25 bp, Homo sapien
ttatcattccaactaattctacttg

SEQ ID NO: 1198998 - DNA, 25 bp, Homo sapien
caagttatcattccaactaattcta

SEQ ID NO: 1198999 - DNA, 25 bp, Homo sapien
aaacaagctttagccattcaagcta

SEQ ID NO: 1199000 - DNA, 25 bp, Homo sapien
taatagcagcttaagccagagtggt

SEQ ID NO: 1199001 - DNA, 25 bp, Homo sapien
accacttagtaggtccaggaggtga

SEQ ID NO: 1199002 - DNA, 25 bp, Homo sapien
caggaacacagtagcctaagatagc

SEQ ID NO: 1199003 - DNA, 25 bp, Homo sapien
tcaatgtgatctacaagtgcaatcc

SEQ ID NO: 1199004 - DNA, 25 bp, Homo sapien
caatgcaaagcgtggaaaatggtga

SEQ ID NO: 1199005 - DNA, 25 bp, Homo sapien
aaatggtgataaatcctgcaagtgg

SEQ ID NO: 1199006 - DNA, 25 bp, Homo sapien
gaggctattcataacattggcaggt

SEQ ID NO: 1199007 - DNA, 25 bp, Homo sapien
gacggtccttcaagaaagtatgtag

SEQ ID NO: 1199008 - DNA, 25 bp, Homo sapien
gcagcatatcacaattgcttcttca

SEQ ID NO: 1199009 - DNA, 25 bp, Homo sapien
caatgcaaatcttttaatgtagcta

SEQ ID NO: 1199010 - DNA, 25 bp, Homo sapien
tgggaagtcacactgtgataaaagg

SEQ ID NO: 1199011 - DNA, 25 bp, Homo sapien
actgatgggaagtcacactgtgata

SEQ ID NO: 1199012 - DNA, 25 bp, Homo sapien
tctgataaagcaacgatagatatta

SEQ ID NO: 1199013 - DNA, 25 bp, Homo sapien
agatattctgataaagcaacgatag

SEQ ID NO: 1199014 - DNA, 25 bp, Homo sapien
cgatagatattaatcagaaacttca

SEQ ID NO: 1199015 - DNA, 25 bp, Homo sapien
taaagcaacgatagatattaatcag

SEQ ID NO: 1199016 - DNA, 25 bp, Homo sapien
cacaatatacttaggagttgcggtc

SEQ ID NO: 1199017 - DNA, 25 bp, Homo sapien
gactctagagattactattgcgtct

SEQ ID NO: 1199018 - DNA, 25 bp, Homo sapien
actgtctggtgtcattgtttactcc

SEQ ID NO: 1199019 - DNA, 25 bp, Homo sapien
gagtttcgtagtgatgactctagag

SEQ ID NO: 1199020 - DNA, 25 bp, Homo sapien
cttgcaactttcgagatgccttcaa

SEQ ID NO: 1199021 - DNA, 25 bp, Homo sapien
gcaactttcgagatgccttcaagat

SEQ ID NO: 1199022 - DNA, 25 bp, Homo sapien
tgcaactttcgagatgccttcaaga

SEQ ID NO: 1199023 - DNA, 25 bp, Homo sapien
ttgcaactttcgagatgccttcaag

SEQ ID NO: 1199024 - DNA, 25 bp, Homo sapien
gaatcagactccactatggccaaag

SEQ ID NO: 1199025 - DNA, 25 bp, Homo sapien
taatagactattgtagaatcagact

SEQ ID NO: 1199026 - DNA, 25 bp, Homo sapien
agtaaaagacatcggcaaatctgga

SEQ ID NO: 1199027 - DNA, 25 bp, Homo sapien
caaagtaaaagacatcggcaaatct

SEQ ID NO: 1199028 - DNA, 25 bp, Homo sapien
tacttcttgctgtcagttacctcaa

SEQ ID NO: 1199029 - DNA, 25 bp, Homo sapien
acttcttgctgtcagttacctcaaa

SEQ ID NO: 1199030 - DNA, 25 bp, Homo sapien
ttcttgctgtcagttacctcaaaac

SEQ ID NO: 1199031 - DNA, 25 bp, Homo sapien
tgtacttcttgctgtcagttacctc

SEQ ID NO: 1199032 - DNA, 25 bp, Homo sapien
cagttctgtgactgacttgagtcac

SEQ ID NO: 1199033 - DNA, 25 bp, Homo sapien
tgactgacttgagtcacacttaaaa

SEQ ID NO: 1199034 - DNA, 25 bp, Homo sapien
tggcagttctgtgactgacttgagt

SEQ ID NO: 1199035 - DNA, 25 bp, Homo sapien
tctgtgactgacttgagtcacactt

SEQ ID NO: 1199036 - DNA, 25 bp, Homo sapien
gcatgatgacttcataaaatacttt

SEQ ID NO: 1199037 - DNA, 25 bp, Homo sapien
tccaaattataccaacaaagtatgt

SEQ ID NO: 1199038 - DNA, 25 bp, Homo sapien
cagctactcactaaataattaaatg

SEQ ID NO: 1199039 - DNA, 25 bp, Homo sapien
ggatggacttttctccgataaacaa

SEQ ID NO: 1199040 - DNA, 25 bp, Homo sapien
tattgactatttcctagacccaggg

SEQ ID NO: 1199041 - DNA, 25 bp, Homo sapien
gcagtctgatgggtctcaaatccaa

SEQ ID NO: 1199042 - DNA, 25 bp, Homo sapien
ttactggaacaaagccacgcccgta

SEQ ID NO: 1199043 - DNA, 25 bp, Homo sapien
tacggtagctgcagtggccaaaagg

SEQ ID NO: 1199044 - DNA, 25 bp, Homo sapien
cacatatctcagactcttaggatct

SEQ ID NO: 1199045 - DNA, 25 bp, Homo sapien
aagcacatatggctgggaaagtgta

SEQ ID NO: 1199046 - DNA, 25 bp, Homo sapien
aggatctttcttcaacatgctatga

SEQ ID NO: 1199047 - DNA, 25 bp, Homo sapien
catactccacatatctcagactctt

SEQ ID NO: 1199048 - DNA, 25 bp, Homo sapien
gctaagataactccgcagtgtggct

SEQ ID NO: 1199049 - DNA, 25 bp, Homo sapien
ctgaggtggctccggtctttcttcc

SEQ ID NO: 1199050 - DNA, 25 bp, Homo sapien
tccctcgctgctaaatagccggtca

SEQ ID NO: 1199051 - DNA, 25 bp, Homo sapien
taaatagccggtcattctgggccag

SEQ ID NO: 1199052 - DNA, 25 bp, Homo sapien
cacagcctgcccagggagctcctac

SEQ ID NO: 1199053 - DNA, 25 bp, Homo sapien
tcacagcctgcccagggagctccta

SEQ ID NO: 1199054 - DNA, 25 bp, Homo sapien
tccatctccgatagtctctcaaaca

SEQ ID NO: 1199055 - DNA, 25 bp, Homo sapien
tctgccaggggaatatgccattttc

SEQ ID NO: 1199056 - DNA, 25 bp, Homo sapien
ccatatggtctgctgttttaggtgc

SEQ ID NO: 1199057 - DNA, 25 bp, Homo sapien
tgtggccagttgcaccagggtcact

SEQ ID NO: 1199058 - DNA, 25 bp, Homo sapien
ggatttggatctgattcacaagaag

SEQ ID NO: 1199059 - DNA, 25 bp, Homo sapien
gggatttggatctgattcacaagaa

SEQ ID NO: 1199060 - DNA, 25 bp, Homo sapien
gatttggatctgattcacaagaagg

SEQ ID NO: 1199061 - DNA, 25 bp, Homo sapien
tttggatctgattcacaagaaggtg

SEQ ID NO: 1199062 - DNA, 25 bp, Homo sapien
gagggacacaatcagtccacaagaa

SEQ ID NO: 1199063 - DNA, 25 bp, Homo sapien
tggagattagagcttcagtgtgtga

SEQ ID NO: 1199064 - DNA, 25 bp, Homo sapien
aatttgattacctccatatagggcc

SEQ ID NO: 1199065 - DNA, 25 bp, Homo sapien
gagatagagatctctggtatcctgt

SEQ ID NO: 1199066 - DNA, 25 bp, Homo sapien
gaaatccagaccgaagtgcaggaac

SEQ ID NO: 1199067 - DNA, 25 bp, Homo sapien
ggaacattccatctctgatgaggcc

SEQ ID NO: 1199068 - DNA, 25 bp, Homo sapien
gaacattccatctctgatgaggcct

SEQ ID NO: 1199069 - DNA, 25 bp, Homo sapien
cagaccgaagtgcaggaacattcca

SEQ ID NO: 1199070 - DNA, 25 bp, Homo sapien
catcctgtgagttaagggcagcgga

SEQ ID NO: 1199071 - DNA, 25 bp, Homo sapien
taacagcaagggacaatacagattt

SEQ ID NO: 1199072 - DNA, 25 bp, Homo sapien
gcagcggagaggcagtaacagcaag

SEQ ID NO: 1199073 - DNA, 25 bp, Homo sapien
cagatttcaactgtgccttatgtag

SEQ ID NO: 1199074 - DNA, 25 bp, Homo sapien
tgtagggttgatgtgagacaatata

SEQ ID NO: 1199075 - DNA, 25 bp, Homo sapien
tgtgagacaatatattaagtaaagt

SEQ ID NO: 1199076 - DNA, 25 bp, Homo sapien
cttgtagggttgatgtgagacaata

SEQ ID NO: 1199077 - DNA, 25 bp, Homo sapien
tgagacaatatattaagtaaagtac

SEQ ID NO: 1199078 - DNA, 25 bp, Homo sapien
cggggtcagcggtaacattgccttt

SEQ ID NO: 1199079 - DNA, 25 bp, Homo sapien
gtagtttctgatggtcatttttact

SEQ ID NO: 1199080 - DNA, 25 bp, Homo sapien
catttttacttctgcggggtcagcg

SEQ ID NO: 1199081 - DNA, 25 bp, Homo sapien
gctagtggcctatttatactattaa

SEQ ID NO: 1199082 - DNA, 25 bp, Homo sapien
gcagggagctggacgtgtttacaaa

SEQ ID NO: 1199083 - DNA, 25 bp, Homo sapien
gcagacacatcatcagagcagggag

SEQ ID NO: 1199084 - DNA, 25 bp, Homo sapien
gcagtttgagtttcatgcctttcac

SEQ ID NO: 1199085 - DNA, 25 bp, Homo sapien
gaaagactaagccacatctacccct

SEQ ID NO: 1199086 - DNA, 25 bp, Homo sapien
gtttcatgtttatatgcctccagtg

SEQ ID NO: 1199087 - DNA, 25 bp, Homo sapien
tctgaaggaattcccctatgcactc

SEQ ID NO: 1199088 - DNA, 25 bp, Homo sapien
catcagtcaagtcaactaaagtttc

SEQ ID NO: 1199089 - DNA, 25 bp, Homo sapien
ctgtcctatctgaaggaattcccct

SEQ ID NO: 1199090 - DNA, 25 bp, Homo sapien
ctctctcgacatccttttaaatatg

SEQ ID NO: 1199091 - DNA, 25 bp, Homo sapien
gtcccagcagcagtcgtagctgcac

SEQ ID NO: 1199092 - DNA, 25 bp, Homo sapien
gtctcatcacagtatcgcggtccca

SEQ ID NO: 1199093 - DNA, 25 bp, Homo sapien
cagcagcagtcgtagctgcacttgt

SEQ ID NO: 1199094 - DNA, 25 bp, Homo sapien
acaatgatctcggagttggagtgga

SEQ ID NO: 1199095 - DNA, 25 bp, Homo sapien
tatgttaaggctgcaagagtctgga

SEQ ID NO: 1199096 - DNA, 25 bp, Homo sapien
ctgctggataggagtcctgggcttt

SEQ ID NO: 1199097 - DNA, 25 bp, Homo sapien
ggataaggccatcactttgccttgg

SEQ ID NO: 1199098 - DNA, 25 bp, Homo sapien
aggaggaggtggccaatgcttccca

SEQ ID NO: 1199099 - DNA, 25 bp, Homo sapien
ggaggaggtggccaatgcttcccat

SEQ ID NO: 1199100 - DNA, 25 bp, Homo sapien
tggagcccagtctcaggaggaggtg

SEQ ID NO: 1199101 - DNA, 25 bp, Homo sapien
taccaagcagggcttggagcccagt

SEQ ID NO: 1199102 - DNA, 25 bp, Homo sapien
ctgtctgaatcacatgcttttgcct

SEQ ID NO: 1199103 - DNA, 25 bp, Homo sapien
gactttgaacttggcgtgccgttct

SEQ ID NO: 1199104 - DNA, 25 bp, Homo sapien
ttgctgctgtctgaatcacatgctt

SEQ ID NO: 1199105 - DNA, 25 bp, Homo sapien
tgctgtctgaatcacatgcttttgc

SEQ ID NO: 1199106 - DNA, 25 bp, Homo sapien
tgtctgccccgaagagcagccttgg

SEQ ID NO: 1199107 - DNA, 25 bp, Homo sapien
tcccagccttggctgatccagcagt

SEQ ID NO: 1199108 - DNA, 25 bp, Homo sapien
gcggagctcccggtacattttgtct

SEQ ID NO: 1199109 - DNA, 25 bp, Homo sapien
tgagaacctcaatcatgatcacgag

SEQ ID NO: 1199110 - DNA, 25 bp, Homo sapien
tctgttgaactaggctagagtgaga

SEQ ID NO: 1199111 - DNA, 25 bp, Homo sapien
gagtgaacatcaagagcagtaaaga

SEQ ID NO: 1199112 - DNA, 25 bp, Homo sapien
agagtgagagcttgataattttgga

SEQ ID NO: 1199113 - DNA, 25 bp, Homo sapien
aaatgtttctgttgaactaggctag

SEQ ID NO: 1199114 - DNA, 25 bp, Homo sapien
ccagtaatgggctgggccttttgct

SEQ ID NO: 1199115 - DNA, 25 bp, Homo sapien
gcccctgtgcaccagtaatgggctg

SEQ ID NO: 1199116 - DNA, 25 bp, Homo sapien
ccttcagaagggcaatgaggccaag

SEQ ID NO: 1199117 - DNA, 25 bp, Homo sapien
cccgtcaaacaggacaagccaagct

SEQ ID NO: 1199118 - DNA, 25 bp, Homo sapien
ggggcttcgaggagaccgcagctgt

SEQ ID NO: 1199119 - DNA, 25 bp, Homo sapien
aaccggggcttcgaggagaccgcag

SEQ ID NO: 1199120 - DNA, 25 bp, Homo sapien
gcttcgaggagaccgcagctgtctt

SEQ ID NO: 1199121 - DNA, 25 bp, Homo sapien
ccggggcttcgaggagaccgcagct

SEQ ID NO: 1199122 - DNA, 25 bp, Homo sapien
cagtggttgcaatctgagccttggg

SEQ ID NO: 1199123 - DNA, 25 bp, Homo sapien
aatggtgtccctactccctctgcat

SEQ ID NO: 1199124 - DNA, 25 bp, Homo sapien
cagtttttgtaatgtgccacctgtg

SEQ ID NO: 1199125 - DNA, 25 bp, Homo sapien
gcatgctcacgtgccaagccattgg

SEQ ID NO: 1199126 - DNA, 25 bp, Homo sapien
aactcatgattccttgatgtccttg

SEQ ID NO: 1199127 - DNA, 25 bp, Homo sapien
gcccagaactcatgattccttgatg

SEQ ID NO: 1199128 - DNA, 25 bp, Homo sapien
caggcccagaactcatgattccttg

SEQ ID NO: 1199129 - DNA, 25 bp, Homo sapien
cagaactcatgattccttgatgtcc

SEQ ID NO: 1199130 - DNA, 25 bp, Homo sapien
ttcctggcttctttatttagttgga

SEQ ID NO: 1199131 - DNA, 25 bp, Homo sapien
ctggcttctttatttagttggaaga

SEQ ID NO: 1199132 - DNA, 25 bp, Homo sapien
cctggcttctttatttagttggaag

SEQ ID NO: 1199133 - DNA, 25 bp, Homo sapien
tcctggcttctttatttagttggaa

SEQ ID NO: 1199134 - DNA, 25 bp, Homo sapien
tcctcatcttcaaagcagtccttta

SEQ ID NO: 1199135 - DNA, 25 bp, Homo sapien
ctcatcttcaaagcagtcctttaag

SEQ ID NO: 1199136 - DNA, 25 bp, Homo sapien
agcagtcctttaagatacaagtgta

SEQ ID NO: 1199137 - DNA, 25 bp, Homo sapien
agtcctttaagatacaagtgtaggg

SEQ ID NO: 1199138 - DNA, 25 bp, Homo sapien
agtgtcaacacactcagctttcttt

SEQ ID NO: 1199139 - DNA, 25 bp, Homo sapien
gtcaacacactcagctttctttgga

SEQ ID NO: 1199140 - DNA, 25 bp, Homo sapien
gtgtcaacacactcagctttctttg

SEQ ID NO: 1199141 - DNA, 25 bp, Homo sapien
tgtcaacacactcagctttctttgg

SEQ ID NO: 1199142 - DNA, 25 bp, Homo sapien
taggactgtgcatcttgatgccaca

SEQ ID NO: 1199143 - DNA, 25 bp, Homo sapien
gccagatgccccattcgtaggactg

SEQ ID NO: 1199144 - DNA, 25 bp, Homo sapien
gatgccccattcgtaggactgtgca

SEQ ID NO: 1199145 - DNA, 25 bp, Homo sapien
tgatgccacatcaccaatgctgtta

SEQ ID NO: 1199146 - DNA, 25 bp, Homo sapien
ggcatcaataattcagcagaggctg

SEQ ID NO: 1199147 - DNA, 25 bp, Homo sapien
caggtgtttccacgactcagagagt

SEQ ID NO: 1199148 - DNA, 25 bp, Homo sapien
tgtcaggctgcaaatagccccacgg

SEQ ID NO: 1199149 - DNA, 25 bp, Homo sapien
cttaaaacttagagctcagatggca

SEQ ID NO: 1199150 - DNA, 25 bp, Homo sapien
caacaacaaatttggaccacaactt

SEQ ID NO: 1199151 - DNA, 25 bp, Homo sapien
acaacaacaaatttggaccacaact

SEQ ID NO: 1199152 - DNA, 25 bp, Homo sapien
ataattaatctaggtagtaaaacag

SEQ ID NO: 1199153 - DNA, 25 bp, Homo sapien
taacggacagggaactaccaggcca

SEQ ID NO: 1199154 - DNA, 25 bp, Homo sapien
catgatctgcttacttccagagagg

SEQ ID NO: 1199155 - DNA, 25 bp, Homo sapien
gcttgttcatttcggctggctcgca

SEQ ID NO: 1199156 - DNA, 25 bp, Homo sapien
caactcatcatgtactgcctcgtga

SEQ ID NO: 1199157 - DNA, 25 bp, Homo sapien
gacagccagcgttggcaaagccatg

SEQ ID NO: 1199158 - DNA, 25 bp, Homo sapien
gcaaagccatggtgacagccaagag

SEQ ID NO: 1199159 - DNA, 25 bp, Homo sapien
gacagccaagagcttgtcatcaggg

SEQ ID NO: 1199160 - DNA, 25 bp, Homo sapien
caagagcttgtcatcaggggtggtt

SEQ ID NO: 1199161 - DNA, 25 bp, Homo sapien
gctaaggatgtttctacttgggaac

SEQ ID NO: 1199162 - DNA, 25 bp, Homo sapien
ctgttcagataagctgctaaggatg

SEQ ID NO: 1199163 - DNA, 25 bp, Homo sapien
gataagctgctaaggatgtttctac

SEQ ID NO: 1199164 - DNA, 25 bp, Homo sapien
ggatgtttctacttgggaacagtaa

SEQ ID NO: 1199165 - DNA, 25 bp, Homo sapien
catctcataagtttttccttgcacc

SEQ ID NO: 1199166 - DNA, 25 bp, Homo sapien
tctcataagtttttccttgcaccct

SEQ ID NO: 1199167 - DNA, 25 bp, Homo sapien
cataagtttttccttgcacccttgg

SEQ ID NO: 1199168 - DNA, 25 bp, Homo sapien
gcacccttgggaccatcgggcccat

SEQ ID NO: 1199169 - DNA, 25 bp, Homo sapien
gcatatttttatgtgggctgggaac

SEQ ID NO: 1199170 - DNA, 25 bp, Homo sapien
gctggttattgctgcactagaacga

SEQ ID NO: 1199171 - DNA, 25 bp, Homo sapien
gctgcactagaacgacctgagtttg

SEQ ID NO: 1199172 - DNA, 25 bp, Homo sapien
cttgctgatttgcacccttcttgtg

SEQ ID NO: 1199173 - DNA, 25 bp, Homo sapien
gaacaaggacttcgatctgtgaccg

SEQ ID NO: 1199174 - DNA, 25 bp, Homo sapien
caaggacttcgatctgtgaccgtga

SEQ ID NO: 1199175 - DNA, 25 bp, Homo sapien
ggacttcgatctgtgaccgtgaaca

SEQ ID NO: 1199176 - DNA, 25 bp, Homo sapien
aacaaggacttcgatctgtgaccgt

SEQ ID NO: 1199177 - DNA, 25 bp, Homo sapien
ttatcccataggtcacacacaatca

SEQ ID NO: 1199178 - DNA, 25 bp, Homo sapien
cttatcccataggtcacacacaatc

SEQ ID NO: 1199179 - DNA, 25 bp, Homo sapien
tatcccataggtcacacacaatcat

SEQ ID NO: 1199180 - DNA, 25 bp, Homo sapien
ggggggaacacagtcagagtggcgg

SEQ ID NO: 1199181 - DNA, 25 bp, Homo sapien
gggggaacacagtcagagtggcgga

SEQ ID NO: 1199182 - DNA, 25 bp, Homo sapien
acacttgggatcagggctgttggag

SEQ ID NO: 1199183 - DNA, 25 bp, Homo sapien
tctgttgcctttccgctaaccaaga

SEQ ID NO: 1199184 - DNA, 25 bp, Homo sapien
ctaaccaagaccagacaggatgtcc

SEQ ID NO: 1199185 - DNA, 25 bp, Homo sapien
ttgggatcagggctgttggagtgcc

SEQ ID NO: 1199186 - DNA, 25 bp, Homo sapien
aatacagcatgatctgttcttcaaa

SEQ ID NO: 1199187 - DNA, 25 bp, Homo sapien
cttttgataatacagcatgatctgt

SEQ ID NO: 1199188 - DNA, 25 bp, Homo sapien
tttgataatacagcatgatctgttc

SEQ ID NO: 1199189 - DNA, 25 bp, Homo sapien
tgataatacagcatgatctgttctt

SEQ ID NO: 1199190 - DNA, 25 bp, Homo sapien
gtctcgccggcaggaacaatacatt

SEQ ID NO: 1199191 - DNA, 25 bp, Homo sapien
cataaataacgtttcaagtgtctcg

SEQ ID NO: 1199192 - DNA, 25 bp, Homo sapien
ggaacaatacattgatgctctgttc

SEQ ID NO: 1199193 - DNA, 25 bp, Homo sapien
taaagctcgtagctgcaaatttcag

SEQ ID NO: 1199194 - DNA, 25 bp, Homo sapien
gtatggatactcaatcggcatagca

SEQ ID NO: 1199195 - DNA, 25 bp, Homo sapien
gcacgcttcggcccagaacttctgg

SEQ ID NO: 1199196 - DNA, 25 bp, Homo sapien
tgaacttagtatggatactcaatcg

SEQ ID NO: 1199197 - DNA, 25 bp, Homo sapien
taggcaatctaatggtccacccact

SEQ ID NO: 1199198 - DNA, 25 bp, Homo sapien
tacttgctgacttgtatcggtaggt

SEQ ID NO: 1199199 - DNA, 25 bp, Homo sapien
ggtgtgagaatatcccaagcctggt

SEQ ID NO: 1199200 - DNA, 25 bp, Homo sapien
tctgcagggcgtggagattggtgtg

SEQ ID NO: 1199201 - DNA, 25 bp, Homo sapien
tatactgagggccaaccattacttg

SEQ ID NO: 1199202 - DNA, 25 bp, Homo sapien
gcaggccactttgaagattgttcac

SEQ ID NO: 1199203 - DNA, 25 bp, Homo sapien
tattctggacagcatatccctactt

SEQ ID NO: 1199204 - DNA, 25 bp, Homo sapien
gattgggcattggttcatgcaggcc

SEQ ID NO: 1199205 - DNA, 25 bp, Homo sapien
gattgttcacttggcctattctgga

SEQ ID NO: 1199206 - DNA, 25 bp, Homo sapien
agttcactcatccttaagcaaccta

SEQ ID NO: 1199207 - DNA, 25 bp, Homo sapien
ggtcctcttctcctggaggtcacca

SEQ ID NO: 1199208 - DNA, 25 bp, Homo sapien
ttcactcatccttaagcaacctagt

SEQ ID NO: 1199209 - DNA, 25 bp, Homo sapien
acctagtggtcctcttctcctggag

SEQ ID NO: 1199210 - DNA, 25 bp, Homo sapien
ctgctcctatcgctgctcccacagt

SEQ ID NO: 1199211 - DNA, 25 bp, Homo sapien
ttctctgctcctatcgctgctccca

SEQ ID NO: 1199212 - DNA, 25 bp, Homo sapien
aacattctggatgcaatcctgagca

SEQ ID NO: 1199213 - DNA, 25 bp, Homo sapien
gattctttcatcgtgctctctaggc

SEQ ID NO: 1199214 - DNA, 25 bp, Homo sapien
tccatgctgataccacattgttgtg

SEQ ID NO: 1199215 - DNA, 25 bp, Homo sapien
ttattcggcaccatgaacattctgg

SEQ ID NO: 1199216 - DNA, 25 bp, Homo sapien
gattaatgaagcatccgcgattcgg

SEQ ID NO: 1199217 - DNA, 25 bp, Homo sapien
cctaaaggcgtaggctgcgtctgct

SEQ ID NO: 1199218 - DNA, 25 bp, Homo sapien
tagacacgcgaggaatgtcaggccc

SEQ ID NO: 1199219 - DNA, 25 bp, Homo sapien
gctgcggcgcctgcaagattaatga

SEQ ID NO: 1199220 - DNA, 25 bp, Homo sapien
cggcgcgcagctcccaactaaagtg

SEQ ID NO: 1199221 - DNA, 25 bp, Homo sapien
gcgcgcagctcccaactaaagtgtg

SEQ ID NO: 1199222 - DNA, 25 bp, Homo sapien
gcggcgcgcagctcccaactaaagt

SEQ ID NO: 1199223 - DNA, 25 bp, Homo sapien
ggcgcgcagctcccaactaaagtgt

SEQ ID NO: 1199224 - DNA, 25 bp, Homo sapien
cggcggcgcgcggccagctctccag

SEQ ID NO: 1199225 - DNA, 25 bp, Homo sapien
gcggcgcgcggccagctctccagta

SEQ ID NO: 1199226 - DNA, 25 bp, Homo sapien
ggcgcgcggccagctctccagtaac

SEQ ID NO: 1199227 - DNA, 25 bp, Homo sapien
gtgcaagcgtgcgggaggcggcggc

SEQ ID NO: 1199228 - DNA, 25 bp, Homo sapien
tcctccccgccgcttggagtaagaa

SEQ ID NO: 1199229 - DNA, 25 bp, Homo sapien
gttcgcgggggggctgaaggtggca

SEQ ID NO: 1199230 - DNA, 25 bp, Homo sapien
ttcgcgggggggctgaaggtggcaa

SEQ ID NO: 1199231 - DNA, 25 bp, Homo sapien
cgcgggggggctgaaggtggcaagc

SEQ ID NO: 1199232 - DNA, 25 bp, Homo sapien
tcgcgggggggctgaaggtggcaag

SEQ ID NO: 1199233 - DNA, 25 bp, Homo sapien
tctgcctagccaaagatggactttt

SEQ ID NO: 1199234 - DNA, 25 bp, Homo sapien
tacagatgactgtctctacaactgc

SEQ ID NO: 1199235 - DNA, 25 bp, Homo sapien
tacaactgcactgtccaaaatggta

SEQ ID NO: 1199236 - DNA, 25 bp, Homo sapien
ttgtgatgccagatagccatgttgc

SEQ ID NO: 1199237 - DNA, 25 bp, Homo sapien
gctggccgtctatttaatgaaaagt

SEQ ID NO: 1199238 - DNA, 25 bp, Homo sapien
attcggctggccgtctatttaatga

SEQ ID NO: 1199239 - DNA, 25 bp, Homo sapien
gttcattcggctggccgtctattta

SEQ ID NO: 1199240 - DNA, 25 bp, Homo sapien
tctctgttcattcggctggccgtct

SEQ ID NO: 1199241 - DNA, 25 bp, Homo sapien
agacagaggtagattgtaaagcctt

SEQ ID NO: 1199242 - DNA, 25 bp, Homo sapien
acagaggtagattgtaaagcctttt

SEQ ID NO: 1199243 - DNA, 25 bp, Homo sapien
gacagaggtagattgtaaagccttt

SEQ ID NO: 1199244 - DNA, 25 bp, Homo sapien
ggaaacaggttcacattaccctgag

SEQ ID NO: 1199245 - DNA, 25 bp, Homo sapien
aggctttgcttatcctacctgaggc

SEQ ID NO: 1199246 - DNA, 25 bp, Homo sapien
taatgcagtcttctcactaagtaga

SEQ ID NO: 1199247 - DNA, 25 bp, Homo sapien
taagggatgtccatcacctgggagg

SEQ ID NO: 1199248 - DNA, 25 bp, Homo sapien
tgagcaactcttaactctggtccgg

SEQ ID NO: 1199249 - DNA, 25 bp, Homo sapien
gaaaagaggcctgaagataacccca

SEQ ID NO: 1199250 - DNA, 25 bp, Homo sapien
ggagtaacggcaaagctgacagtct

SEQ ID NO: 1199251 - DNA, 25 bp, Homo sapien
tacagactcaatgcctcgggttcct

SEQ ID NO: 1199252 - DNA, 25 bp, Homo sapien
tagtctagacacttaccgagtaagg

SEQ ID NO: 1199253 - DNA, 25 bp, Homo sapien
gaaccaaaggaaggtatgtctcatc

SEQ ID NO: 1199254 - DNA, 25 bp, Homo sapien
ggaaagcactgacctacgccatgtg

SEQ ID NO: 1199255 - DNA, 25 bp, Homo sapien
tagtaaagccaacaggagaggtcct

SEQ ID NO: 1199256 - DNA, 25 bp, Homo sapien
caagccttctgtagtgcctgaggat

SEQ ID NO: 1199257 - DNA, 25 bp, Homo sapien
tactccctgcatggtaaactggtaa

SEQ ID NO: 1199258 - DNA, 25 bp, Homo sapien
gaagacctgctacatgaccaggaga

SEQ ID NO: 1199259 - DNA, 25 bp, Homo sapien
gaaagaccccttggacatattatgg

SEQ ID NO: 1199260 - DNA, 25 bp, Homo sapien
ccctcattgcctgtttttatcaggt

SEQ ID NO: 1199261 - DNA, 25 bp, Homo sapien
gaatcctgccctcattgcctgtttt

SEQ ID NO: 1199262 - DNA, 25 bp, Homo sapien
cctgccctcattgcctgtttttatc

SEQ ID NO: 1199263 - DNA, 25 bp, Homo sapien
ggaatcctgccctcattgcctgttt

SEQ ID NO: 1199264 - DNA, 25 bp, Homo sapien
ttttgaccatctttgtaactccaaa

SEQ ID NO: 1199265 - DNA, 25 bp, Homo sapien
ccatctttgtaactccaaaacataa

SEQ ID NO: 1199266 - DNA, 25 bp, Homo sapien
actccaaaacataagacaatagccc

SEQ ID NO: 1199267 - DNA, 25 bp, Homo sapien
tccaaaacataagacaatagcccat

SEQ ID NO: 1199268 - DNA, 25 bp, Homo sapien
agggggaagttcagtactgtccctg

SEQ ID NO: 1199269 - DNA, 25 bp, Homo sapien
tactgtccctgcaggcttgagggag

SEQ ID NO: 1199270 - DNA, 25 bp, Homo sapien
gaagttcagtactgtccctgcaggc

SEQ ID NO: 1199271 - DNA, 25 bp, Homo sapien
tctgtagctctatccttcccttccc

SEQ ID NO: 1199272 - DNA, 25 bp, Homo sapien
caggatatgcttggtatccagtgcc

SEQ ID NO: 1199273 - DNA, 25 bp, Homo sapien
caatgggatcttggcctgctatcat

SEQ ID NO: 1199274 - DNA, 25 bp, Homo sapien
gaggctctaaacagtgcaatccagt

SEQ ID NO: 1199275 - DNA, 25 bp, Homo sapien
cagtgcctcatgaccccatttcagg

SEQ ID NO: 1199276 - DNA, 25 bp, Homo sapien
tctggtcgctatggaaaacactgcc

SEQ ID NO: 1199277 - DNA, 25 bp, Homo sapien
ctaggcaagagtcttataattgaaa

SEQ ID NO: 1199278 - DNA, 25 bp, Homo sapien
tgcttctggtcgctatggaaaacac

SEQ ID NO: 1199279 - DNA, 25 bp, Homo sapien
caatgaccagctcattctcaaaggc

SEQ ID NO: 1199280 - DNA, 25 bp, Homo sapien
cagtatggaaactaacgtcagtcct

SEQ ID NO: 1199281 - DNA, 25 bp, Homo sapien
agcttcccacatgccagtatggaaa

SEQ ID NO: 1199282 - DNA, 25 bp, Homo sapien
tcccacatgccagtatggaaactaa

SEQ ID NO: 1199283 - DNA, 25 bp, Homo sapien
catgccagtatggaaactaacgtca

SEQ ID NO: 1199284 - DNA, 25 bp, Homo sapien
ggcagaatcagacctgtaaggctcc

SEQ ID NO: 1199285 - DNA, 25 bp, Homo sapien
ttttgatagttggaacagcaaaaca

SEQ ID NO: 1199286 - DNA, 25 bp, Homo sapien
gaatcagacctgtaaggctccttct

SEQ ID NO: 1199287 - DNA, 25 bp, Homo sapien
ttgtttttgatagttggaacagcaa

SEQ ID NO: 1199288 - DNA, 25 bp, Homo sapien
actcaaccaccccttattagaagct

SEQ ID NO: 1199289 - DNA, 25 bp, Homo sapien
caaccaccccttattagaagctgaa

SEQ ID NO: 1199290 - DNA, 25 bp, Homo sapien
ccccttattagaagctgaaagctga

SEQ ID NO: 1199291 - DNA, 25 bp, Homo sapien
caccccttattagaagctgaaagct

SEQ ID NO: 1199292 - DNA, 25 bp, Homo sapien
cattcctgcatacgacaaaggtaca

SEQ ID NO: 1199293 - DNA, 25 bp, Homo sapien
caaaggtacagctggcaaactgctt

SEQ ID NO: 1199294 - DNA, 25 bp, Homo sapien
gtctgtctctgtgagccctccattg

SEQ ID NO: 1199295 - DNA, 25 bp, Homo sapien
cacattctattctaaggagcccttt

SEQ ID NO: 1199296 - DNA, 25 bp, Homo sapien
tgattttgtagcacttggccaaaaa

SEQ ID NO: 1199297 - DNA, 25 bp, Homo sapien
ctcaagaaatgcacaagacttttgg

SEQ ID NO: 1199298 - DNA, 25 bp, Homo sapien
gattttgtagcacttggccaaaaac

SEQ ID NO: 1199299 - DNA, 25 bp, Homo sapien
tcattcggtcagcttcagccgggct

SEQ ID NO: 1199300 - DNA, 25 bp, Homo sapien
agtctcattcggtcagcttcagccg

SEQ ID NO: 1199301 - DNA, 25 bp, Homo sapien
tcagccgggctgaactgcaaatcat

SEQ ID NO: 1199302 - DNA, 25 bp, Homo sapien
gctgaactgcaaatcatctctacag

SEQ ID NO: 1199303 - DNA, 25 bp, Homo sapien
gccaaacacatctccgttctggtag

SEQ ID NO: 1199304 - DNA, 25 bp, Homo sapien
cacatctccgttctggtagtttttc

SEQ ID NO: 1199305 - DNA, 25 bp, Homo sapien
ttcattttgaacagtggcaacatgc

SEQ ID NO: 1199306 - DNA, 25 bp, Homo sapien
tggcaacatgcttggcggaggcaca

SEQ ID NO: 1199307 - DNA, 25 bp, Homo sapien
ggacgctctccttattaactatgtg

SEQ ID NO: 1199308 - DNA, 25 bp, Homo sapien
caagtgcttccatgctaattgtgca

SEQ ID NO: 1199309 - DNA, 25 bp, Homo sapien
tgtgcactggccttgttctggacgc

SEQ ID NO: 1199310 - DNA, 25 bp, Homo sapien
tcagaactccaagtggtggatacca

SEQ ID NO: 1199311 - DNA, 25 bp, Homo sapien
gcatcaaggcggcatctagcatggt

SEQ ID NO: 1199312 - DNA, 25 bp, Homo sapien
caaggcggcatctagcatggtatct

SEQ ID NO: 1199313 - DNA, 25 bp, Homo sapien
aaacttggcatcaaggcggcatcta

SEQ ID NO: 1199314 - DNA, 25 bp, Homo sapien
acttggcatcaaggcggcatctagc

SEQ ID NO: 1199315 - DNA, 25 bp, Homo sapien
cagcaggtctccactgctacagaca

SEQ ID NO: 1199316 - DNA, 25 bp, Homo sapien
tacagacaatacaagcacttgaagg

SEQ ID NO: 1199317 - DNA, 25 bp, Homo sapien
gagggccctgccagcgtgtccctgc

SEQ ID NO: 1199318 - DNA, 25 bp, Homo sapien
gcaagggagtaattgaagaaaacca

SEQ ID NO: 1199319 - DNA, 25 bp, Homo sapien
aaccagtcacatgtaaagttccaag

SEQ ID NO: 1199320 - DNA, 25 bp, Homo sapien
tcatacaccgtaaagcacaaatcca

SEQ ID NO: 1199321 - DNA, 25 bp, Homo sapien
caaatccaagttgtaacggttcagg

SEQ ID NO: 1199322 - DNA, 25 bp, Homo sapien
accagtcacatgtaaagttccaagt

SEQ ID NO: 1199323 - DNA, 25 bp, Homo sapien
gacacgcatggttgttctgagagac

SEQ ID NO: 1199324 - DNA, 25 bp, Homo sapien
tagatacagcgaggcactgaaagcc

SEQ ID NO: 1199325 - DNA, 25 bp, Homo sapien
tttatcagtgggagaataccagccc

SEQ ID NO: 1199326 - DNA, 25 bp, Homo sapien
gactcttgaagtcgcaggtcagcta

SEQ ID NO: 1199327 - DNA, 25 bp, Homo sapien
tcatttcatcattcccgaggccaga

SEQ ID NO: 1199328 - DNA, 25 bp, Homo sapien
tgacaagctccgacaaaagacacaa

SEQ ID NO: 1199329 - DNA, 25 bp, Homo sapien
tccagcctggactcttttaggaagg

SEQ ID NO: 1199330 - DNA, 25 bp, Homo sapien
attatccagtcattaagggccctgg

SEQ ID NO: 1199331 - DNA, 25 bp, Homo sapien
tgtgaaggcacaagcggactctcat

SEQ ID NO: 1199332 - DNA, 25 bp, Homo sapien
tgaaggtgatatggcctccctggcc

SEQ ID NO: 1199333 - DNA, 25 bp, Homo sapien
gagagcacaagatgaaaggcgccct

SEQ ID NO: 1199334 - DNA, 25 bp, Homo sapien
tgaattacaacgaacacagcactgg

SEQ ID NO: 1199335 - DNA, 25 bp, Homo sapien
tccactggtttgatcctatactcat

SEQ ID NO: 1199336 - DNA, 25 bp, Homo sapien
ggttcctggctgctattttctgctc

SEQ ID NO: 1199337 - DNA, 25 bp, Homo sapien
ttcttggttcctggctgctattttc

SEQ ID NO: 1199338 - DNA, 25 bp, Homo sapien
gttttcttggttcctggctgctatt

SEQ ID NO: 1199339 - DNA, 25 bp, Homo sapien
tggttcctggctgctattttctgct

SEQ ID NO: 1199340 - DNA, 25 bp, Homo sapien
cagtgcctatattatgcctaaatgg

SEQ ID NO: 1199341 - DNA, 25 bp, Homo sapien
agtgagagtacactgaaatagaaat

SEQ ID NO: 1199342 - DNA, 25 bp, Homo sapien
gttgcaactgtgcattgtcaatcct

SEQ ID NO: 1199343 - DNA, 25 bp, Homo sapien
tgtcaatccttacacactttcagtg

SEQ ID NO: 1199344 - DNA, 25 bp, Homo sapien
ccaaggacagtagctggcaggtagc

SEQ ID NO: 1199345 - DNA, 25 bp, Homo sapien
gacagtgagccccttaaggacggga

SEQ ID NO: 1199346 - DNA, 25 bp, Homo sapien
ttataatacccagaaccaaggacag

SEQ ID NO: 1199347 - DNA, 25 bp, Homo sapien
gatgggaggatgcttcaaaaatacc

SEQ ID NO: 1199348 - DNA, 25 bp, Homo sapien
tgctagtaagggtatcaattctgcc

SEQ ID NO: 1199349 - DNA, 25 bp, Homo sapien
gaaggcaccaggcaatatatgtcca

SEQ ID NO: 1199350 - DNA, 25 bp, Homo sapien
ggaaatagactaatacccaacagca

SEQ ID NO: 1199351 - DNA, 25 bp, Homo sapien
ggatctggtgcaaagtaaacactca

SEQ ID NO: 1199352 - DNA, 25 bp, Homo sapien
cagctcttagagtgtgtacgccaac

SEQ ID NO: 1199353 - DNA, 25 bp, Homo sapien
agcagcagactcaaccacagggtga

SEQ ID NO: 1199354 - DNA, 25 bp, Homo sapien
acaagatagcaagaacctgggtccc

SEQ ID NO: 1199355 - DNA, 25 bp, Homo sapien
aactactggacatgacgtgacagcc

SEQ ID NO: 1199356 - DNA, 25 bp, Homo sapien
aaatcaaacttccatatggtccagc

SEQ ID NO: 1199357 - DNA, 25 bp, Homo sapien
tgggaatgcgaaaagttacagcgac

SEQ ID NO: 1199358 - DNA, 25 bp, Homo sapien
aaattagggtctaggtgcggtagct

SEQ ID NO: 1199359 - DNA, 25 bp, Homo sapien
aaacccagaaaatatcgtgttggtg

SEQ ID NO: 1199360 - DNA, 25 bp, Homo sapien
ttagtttggttatgttgtagtaaca

SEQ ID NO: 1199361 - DNA, 25 bp, Homo sapien
cattatccataggtgaggtatttta

SEQ ID NO: 1199362 - DNA, 25 bp, Homo sapien
ctgacatgttaccactcattatcca

SEQ ID NO: 1199363 - DNA, 25 bp, Homo sapien
tggttatgttgtagtaacaaacatc

SEQ ID NO: 1199364 - DNA, 25 bp, Homo sapien
cttgatatccccacatctggtagga

SEQ ID NO: 1199365 - DNA, 25 bp, Homo sapien
caagctaaagatgactgcacccggt

SEQ ID NO: 1199366 - DNA, 25 bp, Homo sapien
ggatgttcacgtgagaccctgcaga

SEQ ID NO: 1199367 - DNA, 25 bp, Homo sapien
taggcaactctatgtggctaagctg

SEQ ID NO: 1199368 - DNA, 25 bp, Homo sapien
ttctcatccagtggcagctcagaat

SEQ ID NO: 1199369 - DNA, 25 bp, Homo sapien
tctgacatgcttgccaggtacttca

SEQ ID NO: 1199370 - DNA, 25 bp, Homo sapien
agaattctgacatgcttgccaggta

SEQ ID NO: 1199371 - DNA, 25 bp, Homo sapien
gagaaaggattctctgacatggaag

SEQ ID NO: 1199372 - DNA, 25 bp, Homo sapien
aaatcaggatttgacagatagtaag

SEQ ID NO: 1199373 - DNA, 25 bp, Homo sapien
tagtaagaaggaaaagttggcagac

SEQ ID NO: 1199374 - DNA, 25 bp, Homo sapien
gaccgaaggacagactttgcaactt

SEQ ID NO: 1199375 - DNA, 25 bp, Homo sapien
cataatcgaaggagaatttccactg

SEQ ID NO: 1199376 - DNA, 25 bp, Homo sapien
atggtggccaagacggtggagggtt

SEQ ID NO: 1199377 - DNA, 25 bp, Homo sapien
tggtggccaagacggtggagggttc

SEQ ID NO: 1199378 - DNA, 25 bp, Homo sapien
aatggtggccaagacggtggagggt

SEQ ID NO: 1199379 - DNA, 25 bp, Homo sapien
agccttctggaacagaacttccttc

SEQ ID NO: 1199380 - DNA, 25 bp, Homo sapien
caaaagagctgtgaccaacctggtg

SEQ ID NO: 1199381 - DNA, 25 bp, Homo sapien
tgaaatccacctctcagggttgagg

SEQ ID NO: 1199382 - DNA, 25 bp, Homo sapien
tgaacacggcagctgtccgacatgt

SEQ ID NO: 1199383 - DNA, 25 bp, Homo sapien
taggactcttctcttaatgcttgcc

SEQ ID NO: 1199384 - DNA, 25 bp, Homo sapien
cctcagatttgggtgcagctgttgt

SEQ ID NO: 1199385 - DNA, 25 bp, Homo sapien
gatgacaggagatggtattatagga

SEQ ID NO: 1199386 - DNA, 25 bp, Homo sapien
agacaatacagcccctcagatttgg

SEQ ID NO: 1199387 - DNA, 25 bp, Homo sapien
tgttgtcacattgactccatcgagc

SEQ ID NO: 1199388 - DNA, 25 bp, Homo sapien
gccacctgactgtctttctcaagga

SEQ ID NO: 1199389 - DNA, 25 bp, Homo sapien
ttcatagtactgtgccacctgactg

SEQ ID NO: 1199390 - DNA, 25 bp, Homo sapien
tgtgccttaggctattggtgtggac

SEQ ID NO: 1199391 - DNA, 25 bp, Homo sapien
cacaccagtaaccaccttcatgaag

SEQ ID NO: 1199392 - DNA, 25 bp, Homo sapien
ggaagtcaggtgaagtcaagtcaca

SEQ ID NO: 1199393 - DNA, 25 bp, Homo sapien
caaacaagagctggtaggtggactg

SEQ ID NO: 1199394 - DNA, 25 bp, Homo sapien
ttaaagatatgaggttccccaaaca

SEQ ID NO: 1199395 - DNA, 25 bp, Homo sapien
ggtgttagagttcactgcactcagc

SEQ ID NO: 1199396 - DNA, 25 bp, Homo sapien
tgatccagagggaggctgatcacac

SEQ ID NO: 1199397 - DNA, 25 bp, Homo sapien
ctgatccagagggaggctgatcaca

SEQ ID NO: 1199398 - DNA, 25 bp, Homo sapien
caacgaaatcccaaggacctgcgat

SEQ ID NO: 1199399 - DNA, 25 bp, Homo sapien
gaaatcccaaggacctgcgatgtag

SEQ ID NO: 1199400 - DNA, 25 bp, Homo sapien
aacgaaatcccaaggacctgcgatg

SEQ ID NO: 1199401 - DNA, 25 bp, Homo sapien
cgaaatcccaaggacctgcgatgta

SEQ ID NO: 1199402 - DNA, 25 bp, Homo sapien
cagtatgaaactcaaagctggtgat

SEQ ID NO: 1199403 - DNA, 25 bp, Homo sapien
tgaaactcaaagctggtgatgccat

SEQ ID NO: 1199404 - DNA, 25 bp, Homo sapien
ttgaccagtatgaaactcaaagctg

SEQ ID NO: 1199405 - DNA, 25 bp, Homo sapien
gaccagtatgaaactcaaagctggt

SEQ ID NO: 1199406 - DNA, 25 bp, Homo sapien
tcacatagcaacaattaactgtcca

SEQ ID NO: 1199407 - DNA, 25 bp, Homo sapien
cacatagcaacaattaactgtccat

SEQ ID NO: 1199408 - DNA, 25 bp, Homo sapien
acatagcaacaattaactgtccata

SEQ ID NO: 1199409 - DNA, 25 bp, Homo sapien
agaacttctctaaaatgcacagcag

SEQ ID NO: 1199410 - DNA, 25 bp, Homo sapien
agtatcacataagaacttctctaaa

SEQ ID NO: 1199411 - DNA, 25 bp, Homo sapien
aacttctctaaaatgcacagcagcc

SEQ ID NO: 1199412 - DNA, 25 bp, Homo sapien
acataagaacttctctaaaatgcac

SEQ ID NO: 1199413 - DNA, 25 bp, Homo sapien
cctaagacacccgagctgagctcgt

SEQ ID NO: 1199414 - DNA, 25 bp, Homo sapien
tttctttcttcacacttgccctcga

SEQ ID NO: 1199415 - DNA, 25 bp, Homo sapien
gaatttggtgtgcattcccctaaga

SEQ ID NO: 1199416 - DNA, 25 bp, Homo sapien
tcgtcctgtggatgcgggatagtga

SEQ ID NO: 1199417 - DNA, 25 bp, Homo sapien
agtcaggcgcctacactgtattaag

SEQ ID NO: 1199418 - DNA, 25 bp, Homo sapien
gtatcaattacaagcatcccaggga

SEQ ID NO: 1199419 - DNA, 25 bp, Homo sapien
tgtggcccaacaggcaagagggtct

SEQ ID NO: 1199420 - DNA, 25 bp, Homo sapien
gaaacactggttagcctagctttag

SEQ ID NO: 1199421 - DNA, 25 bp, Homo sapien
acaacacccatgttcaggatgccga

SEQ ID NO: 1199422 - DNA, 25 bp, Homo sapien
aatactaaagggaacaacacccatg

SEQ ID NO: 1199423 - DNA, 25 bp, Homo sapien
aaagggaacaacacccatgttcagg

SEQ ID NO: 1199424 - DNA, 25 bp, Homo sapien
catgttcaggatgccgactaaaagc

SEQ ID NO: 1199425 - DNA, 25 bp, Homo sapien
tgagatgtaaagtttgctgaaggcc

SEQ ID NO: 1199426 - DNA, 25 bp, Homo sapien
gttgatgaactaatcccggaacctc

SEQ ID NO: 1199427 - DNA, 25 bp, Homo sapien
tctgggttgatgaactaatcccgga

SEQ ID NO: 1199428 - DNA, 25 bp, Homo sapien
tttgctctgggttgatgaactaatc

SEQ ID NO: 1199429 - DNA, 25 bp, Homo sapien
tgatgaactaatcccggaacctctt

SEQ ID NO: 1199430 - DNA, 25 bp, Homo sapien
gagacagagtcgtctcgcactttcg

SEQ ID NO: 1199431 - DNA, 25 bp, Homo sapien
tccagggacctcataaaaaacggca

SEQ ID NO: 1199432 - DNA, 25 bp, Homo sapien
ccgtatgtatatgttgccccagaaa

SEQ ID NO: 1199433 - DNA, 25 bp, Homo sapien
tataggtaactggatagataaccgt

SEQ ID NO: 1199434 - DNA, 25 bp, Homo sapien
catccagcattctgaagaattcttg

SEQ ID NO: 1199435 - DNA, 25 bp, Homo sapien
cttgttggctttcagagatgtgcat

SEQ ID NO: 1199436 - DNA, 25 bp, Homo sapien
caattttttcatccagcattctgaa

SEQ ID NO: 1199437 - DNA, 25 bp, Homo sapien
gaagaattcttgttggctttcagag

SEQ ID NO: 1199438 - DNA, 25 bp, Homo sapien
tatgcatctctaagcaagcctccaa

SEQ ID NO: 1199439 - DNA, 25 bp, Homo sapien
gatactgaccatgatactcatccgg

SEQ ID NO: 1199440 - DNA, 25 bp, Homo sapien
tccggcccattaataaggtagatac

SEQ ID NO: 1199441 - DNA, 25 bp, Homo sapien
taccggtttgcactaatattacttc

SEQ ID NO: 1199442 - DNA, 25 bp, Homo sapien
atttttagtagagacaggatttcat

SEQ ID NO: 1199443 - DNA, 25 bp, Homo sapien
caccatgcccatctaaatttttttg

SEQ ID NO: 1199444 - DNA, 25 bp, Homo sapien
accatgcccatctaaatttttttgt

SEQ ID NO: 1199445 - DNA, 25 bp, Homo sapien
ccgagctggcttgtcttggtcaaaa

SEQ ID NO: 1199446 - DNA, 25 bp, Homo sapien
tctacagacagcatacaatccaggg

SEQ ID NO: 1199447 - DNA, 25 bp, Homo sapien
tgatgtatatgtgcccatgcccgtg

SEQ ID NO: 1199448 - DNA, 25 bp, Homo sapien
gacaggccagaaaccgatgtacatg

SEQ ID NO: 1199449 - DNA, 25 bp, Homo sapien
tcttcttccgaacagtaatcccgac

SEQ ID NO: 1199450 - DNA, 25 bp, Homo sapien
ctcttcttccgaacagtaatcccga

SEQ ID NO: 1199451 - DNA, 25 bp, Homo sapien
tcctcttcttccgaacagtaatccc

SEQ ID NO: 1199452 - DNA, 25 bp, Homo sapien
atatcctcttcttccgaacagtaat

SEQ ID NO: 1199453 - DNA, 25 bp, Homo sapien
tgctgcatacctggacacaagagaa

SEQ ID NO: 1199454 - DNA, 25 bp, Homo sapien
gaagcaaggctcagtccatctctag

SEQ ID NO: 1199455 - DNA, 25 bp, Homo sapien
gaatagaaccgacctttgcaaagat

SEQ ID NO: 1199456 - DNA, 25 bp, Homo sapien
aaggcttggcatagcaaccatccca

SEQ ID NO: 1199457 - DNA, 25 bp, Homo sapien
aaatcgaggctcatcttttcggcaa

SEQ ID NO: 1199458 - DNA, 25 bp, Homo sapien
gccgtcccaggtctaaaaggagata

SEQ ID NO: 1199459 - DNA, 25 bp, Homo sapien
tgtcaatgcaaaggagggctcaact

SEQ ID NO: 1199460 - DNA, 25 bp, Homo sapien
gaacggtaagcaaagtccccagtga

SEQ ID NO: 1199461 - DNA, 25 bp, Homo sapien
taatcaagcatttcgtgcggaccca

SEQ ID NO: 1199462 - DNA, 25 bp, Homo sapien
tcttgcccagtgtcaaagcaggact

SEQ ID NO: 1199463 - DNA, 25 bp, Homo sapien
taaagaacgtgtcagagtcccgaag

SEQ ID NO: 1199464 - DNA, 25 bp, Homo sapien
tacaactcagaggacataaggcatg

SEQ ID NO: 1199465 - DNA, 25 bp, Homo sapien
cacagtgttgcgaagggcatagtca

SEQ ID NO: 1199466 - DNA, 25 bp, Homo sapien
gatgcagatccccagtccaaagatg

SEQ ID NO: 1199467 - DNA, 25 bp, Homo sapien
tggagatcggattgtcccagacccc

SEQ ID NO: 1199468 - DNA, 25 bp, Homo sapien
ttcaatgcaagtcagtggtccaggc

SEQ ID NO: 1199469 - DNA, 25 bp, Homo sapien
ggaagcccctgattgccaaaactgg

SEQ ID NO: 1199470 - DNA, 25 bp, Homo sapien
tcttgaagggacatgacagctgcca

SEQ ID NO: 1199471 - DNA, 25 bp, Homo sapien
ggtgttcagaagagcaatgccccaa

SEQ ID NO: 1199472 - DNA, 25 bp, Homo sapien
tgaaatgccagtcaagtccacatgg

SEQ ID NO: 1199473 - DNA, 25 bp, Homo sapien
tcctctgctgaataaggacagctgg

SEQ ID NO: 1199474 - DNA, 25 bp, Homo sapien
ctctgctgaataaggacagctggac

SEQ ID NO: 1199475 - DNA, 25 bp, Homo sapien
cctctgctgaataaggacagctgga

SEQ ID NO: 1199476 - DNA, 25 bp, Homo sapien
tctgctgaataaggacagctggaca

SEQ ID NO: 1199477 - DNA, 25 bp, Homo sapien
tggacagtgcccacatcctctgtgg

SEQ ID NO: 1199478 - DNA, 25 bp, Homo sapien
ggatcctaccagctgcagaagtcgc

SEQ ID NO: 1199479 - DNA, 25 bp, Homo sapien
agaagtcgcgagtaatgccagccgg

SEQ ID NO: 1199480 - DNA, 25 bp, Homo sapien
tctcgcagctgtagaagacaggcac

SEQ ID NO: 1199481 - DNA, 25 bp, Homo sapien
tcagagccaacactgagtggggaca

SEQ ID NO: 1199482 - DNA, 25 bp, Homo sapien
actcagagccaacactgagtgggga

SEQ ID NO: 1199483 - DNA, 25 bp, Homo sapien
agagccaacactgagtggggacagc

SEQ ID NO: 1199484 - DNA, 25 bp, Homo sapien
ttactcagagccaacactgagtggg

SEQ ID NO: 1199485 - DNA, 25 bp, Homo sapien
tgaaaaagatgtctgtactaacagg

SEQ ID NO: 1199486 - DNA, 25 bp, Homo sapien
tgtgatgtaaaagtctgggcaaaat

SEQ ID NO: 1199487 - DNA, 25 bp, Homo sapien
aaagcccaatttacagccgtatatt

SEQ ID NO: 1199488 - DNA, 25 bp, Homo sapien
gtgctgtaacactactgttgttgga

SEQ ID NO: 1199489 - DNA, 25 bp, Homo sapien
tctggaatcaaggattttagctgaa

SEQ ID NO: 1199490 - DNA, 25 bp, Homo sapien
aatatagctgaagtgatcaccacag

SEQ ID NO: 1199491 - DNA, 25 bp, Homo sapien
tactagatatgtttggtatgggata

SEQ ID NO: 1199492 - DNA, 25 bp, Homo sapien
aaaagttcattgaaatgatatgccc

SEQ ID NO: 1199493 - DNA, 25 bp, Homo sapien
tcttcctttggccattagagggagg

SEQ ID NO: 1199494 - DNA, 25 bp, Homo sapien
tgtgtgacacattggaaaagccagc

SEQ ID NO: 1199495 - DNA, 25 bp, Homo sapien
ggtatgcaatttgagccacaaggct

SEQ ID NO: 1199496 - DNA, 25 bp, Homo sapien
tatagcttaatgagacttccacccc

SEQ ID NO: 1199497 - DNA, 25 bp, Homo sapien
tctaactcttgtatgtacctaccag

SEQ ID NO: 1199498 - DNA, 25 bp, Homo sapien
gccattgtaatattctctcattcta

SEQ ID NO: 1199499 - DNA, 25 bp, Homo sapien
tttgttgttcacacatgccctctgg

SEQ ID NO: 1199500 - DNA, 25 bp, Homo sapien
taccagctagggagattttgtcact

SEQ ID NO: 1199501 - DNA, 25 bp, Homo sapien
gacatgtgcaggctccttgaagcca

SEQ ID NO: 1199502 - DNA, 25 bp, Homo sapien
ccaggcgcggtgtgtcaacgcggct

SEQ ID NO: 1199503 - DNA, 25 bp, Homo sapien
ccctggccgccggtgacatgtgcag

SEQ ID NO: 1199504 - DNA, 25 bp, Homo sapien
cgcggtgtgtcaacgcggctgccat

SEQ ID NO: 1199505 - DNA, 25 bp, Homo sapien
tctcctgtcgcgattggaacggctc

SEQ ID NO: 1199506 - DNA, 25 bp, Homo sapien
cccagcgagcgcgatggagactagt

SEQ ID NO: 1199507 - DNA, 25 bp, Homo sapien
tggtgtcggccacctccgtgtggac

SEQ ID NO: 1199508 - DNA, 25 bp, Homo sapien
aaacagaagcttgggtaagggtgct

SEQ ID NO: 1199509 - DNA, 25 bp, Homo sapien
ggaggcggtttcctagactacgaca

SEQ ID NO: 1199510 - DNA, 25 bp, Homo sapien
gaggcgctccgggatactgagggcg

SEQ ID NO: 1199511 - DNA, 25 bp, Homo sapien
tagactacgacaccggaaagctggg

SEQ ID NO: 1199512 - DNA, 25 bp, Homo sapien
ttcctagactacgacaccggaaagc

SEQ ID NO: 1199513 - DNA, 25 bp, Homo sapien
gtcctgaggctctacggcttcggcc

SEQ ID NO: 1199514 - DNA, 25 bp, Homo sapien
ctccagtcgccggagacagcccctc

SEQ ID NO: 1199515 - DNA, 25 bp, Homo sapien
cattggtcctgaggctctacggctt

SEQ ID NO: 1199516 - DNA, 25 bp, Homo sapien
tctccattggtcctgaggctctacg

SEQ ID NO: 1199517 - DNA, 25 bp, Homo sapien
tcctcagggggcaactccgcgggtc

SEQ ID NO: 1199518 - DNA, 25 bp, Homo sapien
gtcgaagcgagagatcccttcccag

SEQ ID NO: 1199519 - DNA, 25 bp, Homo sapien
tggtagtcctcagggggcaactccg

SEQ ID NO: 1199520 - DNA, 25 bp, Homo sapien
tcggaggcgggtcgaagcgagagat

SEQ ID NO: 1199521 - DNA, 25 bp, Homo sapien
aagcgagagacacggctccgagtcg

SEQ ID NO: 1199522 - DNA, 25 bp, Homo sapien
gtagaagcgagagacacggctccga

SEQ ID NO: 1199523 - DNA, 25 bp, Homo sapien
agacacggctccgagtcggctcgcg

SEQ ID NO: 1199524 - DNA, 25 bp, Homo sapien
ccgggtagaagcgagagacacggct

SEQ ID NO: 1199525 - DNA, 25 bp, Homo sapien
agataaacagctgacgggtttcccg

SEQ ID NO: 1199526 - DNA, 25 bp, Homo sapien
gcaaccactggcgacctcggaggac

SEQ ID NO: 1199527 - DNA, 25 bp, Homo sapien
ctcggaggaccgcaagtcccagggt

SEQ ID NO: 1199528 - DNA, 25 bp, Homo sapien
gcagcccaccgagacagggttgact

SEQ ID NO: 1199529 - DNA, 25 bp, Homo sapien
aacactattccctaacgcagcagca

SEQ ID NO: 1199530 - DNA, 25 bp, Homo sapien
cctaacgcagcagcactgacatggg

SEQ ID NO: 1199531 - DNA, 25 bp, Homo sapien
catggggacagtgcgcctcattcag

SEQ ID NO: 1199532 - DNA, 25 bp, Homo sapien
ccctgagggtagacgactactccaa

SEQ ID NO: 1199533 - DNA, 25 bp, Homo sapien
gagttgctggcctaaagagggctac

SEQ ID NO: 1199534 - DNA, 25 bp, Homo sapien
tactctaatacagggatgaggcgct

SEQ ID NO: 1199535 - DNA, 25 bp, Homo sapien
ggcgctatagctcatacaaactgtg

SEQ ID NO: 1199536 - DNA, 25 bp, Homo sapien
cctgcaatggcagcacgaagtaagc

SEQ ID NO: 1199537 - DNA, 25 bp, Homo sapien
catgaagactgaagaaccccaaatc

SEQ ID NO: 1199538 - DNA, 25 bp, Homo sapien
ctgtgtctgaggctgtctcatctcc

SEQ ID NO: 1199539 - DNA, 25 bp, Homo sapien
tctgaggctgtctcatctcctattt

SEQ ID NO: 1199540 - DNA, 25 bp, Homo sapien
ccaaatccatctggcataattccca

SEQ ID NO: 1199541 - DNA, 25 bp, Homo sapien
caaaggttctagcagagtaggaccc

SEQ ID NO: 1199542 - DNA, 25 bp, Homo sapien
taccaatgtgggctacgactacacc

SEQ ID NO: 1199543 - DNA, 25 bp, Homo sapien
taggaccctccagagtcagtggtac

SEQ ID NO: 1199544 - DNA, 25 bp, Homo sapien
gatatccagctctcaatgtggcagt

SEQ ID NO: 1199545 - DNA, 25 bp, Homo sapien
cagggtaagattccaacttgtccaa

SEQ ID NO: 1199546 - DNA, 25 bp, Homo sapien
tatcagtcggtgcaacagttggcaa

SEQ ID NO: 1199547 - DNA, 25 bp, Homo sapien
tagaaatgcataaaacctcgagaca

SEQ ID NO: 1199548 - DNA, 25 bp, Homo sapien
gctttaagcagagacataagtgcct

SEQ ID NO: 1199549 - DNA, 25 bp, Homo sapien
ctcgggaaatgtgggaactggacac

SEQ ID NO: 1199550 - DNA, 25 bp, Homo sapien
cgactccctgggacagtagtgtgga

SEQ ID NO: 1199551 - DNA, 25 bp, Homo sapien
gatgcactgcccagtaaggcaggaa

SEQ ID NO: 1199552 - DNA, 25 bp, Homo sapien
acaccggagcttcctagcttccttt

SEQ ID NO: 1199553 - DNA, 25 bp, Homo sapien
caaggtgtatgctctcaagttccaa

SEQ ID NO: 1199554 - DNA, 25 bp, Homo sapien
ggaattacagccatgcggcaccatt

SEQ ID NO: 1199555 - DNA, 25 bp, Homo sapien
gataccatggcgaaaaacaactttg

SEQ ID NO: 1199556 - DNA, 25 bp, Homo sapien
tagtcctggttcattcccagaaggg

SEQ ID NO: 1199557 - DNA, 25 bp, Homo sapien
tattggcctgggtaagactgaaagc

SEQ ID NO: 1199558 - DNA, 25 bp, Homo sapien
ggtaggtcatgaacagtcacccgtg

SEQ ID NO: 1199559 - DNA, 25 bp, Homo sapien
tacagggcatgagcaactgaggcaa

SEQ ID NO: 1199560 - DNA, 25 bp, Homo sapien
tactgcatgccacgcactgtgttgg

SEQ ID NO: 1199561 - DNA, 25 bp, Homo sapien
ggtagcccgtattcatgagtgtcag

SEQ ID NO: 1199562 - DNA, 25 bp, Homo sapien
caagagggctgcaccttaggttctg

SEQ ID NO: 1199563 - DNA, 25 bp, Homo sapien
tgcagaggagatcaaggtagcccgt

SEQ ID NO: 1199564 - DNA, 25 bp, Homo sapien
ggaggatgctccaaacccggatgtc

SEQ ID NO: 1199565 - DNA, 25 bp, Homo sapien
tgctgacagcgtccgtggaagtacc

SEQ ID NO: 1199566 - DNA, 25 bp, Homo sapien
ggacccttgaggatgaagaacccgc

SEQ ID NO: 1199567 - DNA, 25 bp, Homo sapien
tttcaagagtggatgaccccgtggt

SEQ ID NO: 1199568 - DNA, 25 bp, Homo sapien
gaggtccctagctcgttggccaaag

SEQ ID NO: 1199569 - DNA, 25 bp, Homo sapien
cattaatcccctacagctggatttt

SEQ ID NO: 1199570 - DNA, 25 bp, Homo sapien
ggatttttataatctacatatgatg

SEQ ID NO: 1199571 - DNA, 25 bp, Homo sapien
taaagtatgttgtgtaacgacagcc

SEQ ID NO: 1199572 - DNA, 25 bp, Homo sapien
ctgtagggcctattatgagggagac

SEQ ID NO: 1199573 - DNA, 25 bp, Homo sapien
gaaaggagtccttcttaggccatag

SEQ ID NO: 1199574 - DNA, 25 bp, Homo sapien
atccacaaggacttatatatataag

SEQ ID NO: 1199575 - DNA, 25 bp, Homo sapien
gggtgcctcacggtcagaacaaatt

SEQ ID NO: 1199576 - DNA, 25 bp, Homo sapien
caaaaaagatcaagtgacatacagg

SEQ ID NO: 1199577 - DNA, 25 bp, Homo sapien
gacacagactaagatgcaagccacc

SEQ ID NO: 1199578 - DNA, 25 bp, Homo sapien
agatgtagccatcaccgactgaccg

SEQ ID NO: 1199579 - DNA, 25 bp, Homo sapien
tacctgggctctggtcggtctagac

SEQ ID NO: 1199580 - DNA, 25 bp, Homo sapien
tacagagttcatctggtccgggaca

SEQ ID NO: 1199581 - DNA, 25 bp, Homo sapien
tgggttctggctgtggagaagcagg

SEQ ID NO: 1199582 - DNA, 25 bp, Homo sapien
cttgggttctggctgtggagaagca

SEQ ID NO: 1199583 - DNA, 25 bp, Homo sapien
ttgggttctggctgtggagaagcag

SEQ ID NO: 1199584 - DNA, 25 bp, Homo sapien
ttaagatgcttcacttccaccacta

SEQ ID NO: 1199585 - DNA, 25 bp, Homo sapien
cttccaccactattacattggagct

SEQ ID NO: 1199586 - DNA, 25 bp, Homo sapien
gacttctgtctgacatccacatctc

SEQ ID NO: 1199587 - DNA, 25 bp, Homo sapien
ttgacttctgtctgacatccacatc

SEQ ID NO: 1199588 - DNA, 25 bp, Homo sapien
cagctgtccgctttcctgatgcaga

SEQ ID NO: 1199589 - DNA, 25 bp, Homo sapien
tccttgcatggacatgaccacttcc

SEQ ID NO: 1199590 - DNA, 25 bp, Homo sapien
tcagctagttcatgagtgggtctat

SEQ ID NO: 1199591 - DNA, 25 bp, Homo sapien
caggagtgcttggttgtaggctaac

SEQ ID NO: 1199592 - DNA, 25 bp, Homo sapien
tcctatggctttgattccaacccca

SEQ ID NO: 1199593 - DNA, 25 bp, Homo sapien
ttagtcctatggctttgattccaac

SEQ ID NO: 1199594 - DNA, 25 bp, Homo sapien
tatggctttgattccaaccccactc

SEQ ID NO: 1199595 - DNA, 25 bp, Homo sapien
ctatattagtcctatggctttgatt

SEQ ID NO: 1199596 - DNA, 25 bp, Homo sapien
gggagcattcggagataaacaaggg

SEQ ID NO: 1199597 - DNA, 25 bp, Homo sapien
gggcagggggagcattcggagataa

SEQ ID NO: 1199598 - DNA, 25 bp, Homo sapien
acgggacagtggctgctgttaaccg

SEQ ID NO: 1199599 - DNA, 25 bp, Homo sapien
tcacgggacagtggctgctgttaac

SEQ ID NO: 1199600 - DNA, 25 bp, Homo sapien
ccaaggctgattccagactgctttc

SEQ ID NO: 1199601 - DNA, 25 bp, Homo sapien
attcctatctaccatgtataagcat

SEQ ID NO: 1199602 - DNA, 25 bp, Homo sapien
cctatctaccatgtataagcattcc

SEQ ID NO: 1199603 - DNA, 25 bp, Homo sapien
ttacattcctatctaccatgtataa

SEQ ID NO: 1199604 - DNA, 25 bp, Homo sapien
agaaactattagactgccacactgt

SEQ ID NO: 1199605 - DNA, 25 bp, Homo sapien
cactgtcccgttgtgtgacacggga

SEQ ID NO: 1199606 - DNA, 25 bp, Homo sapien
ctagaaactattagactgccacact

SEQ ID NO: 1199607 - DNA, 25 bp, Homo sapien
ccacactgtcccgttgtgtgacacg

SEQ ID NO: 1199608 - DNA, 25 bp, Homo sapien
atatatttgccaccttgacagcggg

SEQ ID NO: 1199609 - DNA, 25 bp, Homo sapien
caccttgaccttgcgggaaatgact

SEQ ID NO: 1199610 - DNA, 25 bp, Homo sapien
gagtatgctatgctgctgaacacca

SEQ ID NO: 1199611 - DNA, 25 bp, Homo sapien
agttgtagagccattttagggatcc

SEQ ID NO: 1199612 - DNA, 25 bp, Homo sapien
tctgcgattgtacagatccaggcat

SEQ ID NO: 1199613 - DNA, 25 bp, Homo sapien
tttgaagttggtactttgataccag

SEQ ID NO: 1199614 - DNA, 25 bp, Homo sapien
ccagtgagcacgtatgttggtgcaa

SEQ ID NO: 1199615 - DNA, 25 bp, Homo sapien
tattctttagagggctttgaagttg

SEQ ID NO: 1199616 - DNA, 25 bp, Homo sapien
tatccctgggtaatgaattgcaaca

SEQ ID NO: 1199617 - DNA, 25 bp, Homo sapien
ccgataatttagtcatgggctctga

SEQ ID NO: 1199618 - DNA, 25 bp, Homo sapien
gtcttatgatcgcttcaaatagcca

SEQ ID NO: 1199619 - DNA, 25 bp, Homo sapien
ggatgtcaaattataaccaggaaga

SEQ ID NO: 1199620 - DNA, 25 bp, Homo sapien
agttggtggttgtatgattatatat

SEQ ID NO: 1199621 - DNA, 25 bp, Homo sapien
caagttggtggttgtatgattatat

SEQ ID NO: 1199622 - DNA, 25 bp, Homo sapien
aagttggtggttgtatgattatata

SEQ ID NO: 1199623 - DNA, 25 bp, Homo sapien
caacttccagtaaaggttcggtatg

SEQ ID NO: 1199624 - DNA, 25 bp, Homo sapien
ttcatctattaactgagaatgcaga

SEQ ID NO: 1199625 - DNA, 25 bp, Homo sapien
tatttcatctattaactgagaatgc

SEQ ID NO: 1199626 - DNA, 25 bp, Homo sapien
tcctcctcatatttttgcagcggtt

SEQ ID NO: 1199627 - DNA, 25 bp, Homo sapien
ttttgcagcggttatctatttcatc

SEQ ID NO: 1199628 - DNA, 25 bp, Homo sapien
cgcagaatgagtggccgaaaaattt

SEQ ID NO: 1199629 - DNA, 25 bp, Homo sapien
aattagggcaaatatggtctcctct

SEQ ID NO: 1199630 - DNA, 25 bp, Homo sapien
tgagtcaagattactcagagagtcg

SEQ ID NO: 1199631 - DNA, 25 bp, Homo sapien
ctgctactgaaccccggttgtagct

SEQ ID NO: 1199632 - DNA, 25 bp, Homo sapien
ttattgtgtttcttggcctgtataa

SEQ ID NO: 1199633 - DNA, 25 bp, Homo sapien
tattgtgtttcttggcctgtataac

SEQ ID NO: 1199634 - DNA, 25 bp, Homo sapien
attattgtgtttcttggcctgtata

SEQ ID NO: 1199635 - DNA, 25 bp, Homo sapien
gattttcgagtcacttggaggtccc

SEQ ID NO: 1199636 - DNA, 25 bp, Homo sapien
tctcatattcgatgtcacaaaccat

SEQ ID NO: 1199637 - DNA, 25 bp, Homo sapien
taagctctcattccgccactgatgt

SEQ ID NO: 1199638 - DNA, 25 bp, Homo sapien
taattgaggatttttatggaacatc

SEQ ID NO: 1199639 - DNA, 25 bp, Homo sapien
ctttttgcaagatcatcctatccat

SEQ ID NO: 1199640 - DNA, 25 bp, Homo sapien
gtctttttgcaagatcatcctatcc

SEQ ID NO: 1199641 - DNA, 25 bp, Homo sapien
tctttttgcaagatcatcctatcca

SEQ ID NO: 1199642 - DNA, 25 bp, Homo sapien
tccgtagaggtaattgtatagctgt

SEQ ID NO: 1199643 - DNA, 25 bp, Homo sapien
ttcttgatgctccatgtacacaaag

SEQ ID NO: 1199644 - DNA, 25 bp, Homo sapien
agacagcaatcagcaacgtccgtag

SEQ ID NO: 1199645 - DNA, 25 bp, Homo sapien
tcctttcactagtggtacttggata

SEQ ID NO: 1199646 - DNA, 25 bp, Homo sapien
ttggaaaacaggcacgataatttcc

SEQ ID NO: 1199647 - DNA, 25 bp, Homo sapien
ggactcgctgaatctgaagttggat

SEQ ID NO: 1199648 - DNA, 25 bp, Homo sapien
atctgaagttggattctctggagat

SEQ ID NO: 1199649 - DNA, 25 bp, Homo sapien
tctgaagttggattctctggagatt

SEQ ID NO: 1199650 - DNA, 25 bp, Homo sapien
gaactgaatgtacactgggagctgc

SEQ ID NO: 1199651 - DNA, 25 bp, Homo sapien
cagaatgtagctgtactgccctgct

SEQ ID NO: 1199652 - DNA, 25 bp, Homo sapien
tactgtgtttctgtagcctgctgga

SEQ ID NO: 1199653 - DNA, 25 bp, Homo sapien
gcctgctggaacatctaggcagaat

SEQ ID NO: 1199654 - DNA, 25 bp, Homo sapien
ttgcatctctcacgctgggagccgt

SEQ ID NO: 1199655 - DNA, 25 bp, Homo sapien
tcacccgtcttttgcatctctcacg

SEQ ID NO: 1199656 - DNA, 25 bp, Homo sapien
cgtcttttgcatctctcacgctggg

SEQ ID NO: 1199657 - DNA, 25 bp, Homo sapien
ttttgcatctctcacgctgggagcc

SEQ ID NO: 1199658 - DNA, 25 bp, Homo sapien
ggaactagttccatggtccccatct

SEQ ID NO: 1199659 - DNA, 25 bp, Homo sapien
taaacatatacgattggaccatgcc

SEQ ID NO: 1199660 - DNA, 25 bp, Homo sapien
tactgacatcctatacagaggcaag

SEQ ID NO: 1199661 - DNA, 25 bp, Homo sapien
tttgtcaggacaggataggctatgc

SEQ ID NO: 1199662 - DNA, 25 bp, Homo sapien
gtgatataatagttagttgctgtgg

SEQ ID NO: 1199663 - DNA, 25 bp, Homo sapien
aggcatagtcctttgtgatataata

SEQ ID NO: 1199664 - DNA, 25 bp, Homo sapien
gcatagtcctttgtgatataatagt

SEQ ID NO: 1199665 - DNA, 25 bp, Homo sapien
tataatagttagttgctgtggagat

SEQ ID NO: 1199666 - DNA, 25 bp, Homo sapien
tcatcaggctttggtttgcagaact

SEQ ID NO: 1199667 - DNA, 25 bp, Homo sapien
agaacttcacatgaacttcggcacc

SEQ ID NO: 1199668 - DNA, 25 bp, Homo sapien
gctctcgtacaacaaacatacactt

SEQ ID NO: 1199669 - DNA, 25 bp, Homo sapien
cttccgctctcgtacaacaaacata

SEQ ID NO: 1199670 - DNA, 25 bp, Homo sapien
gaggcgcgggacgaggacgtgcacg

SEQ ID NO: 1199671 - DNA, 25 bp, Homo sapien
gcgcgggacgaggacgtgcacggcg

SEQ ID NO: 1199672 - DNA, 25 bp, Homo sapien
cggaggcgcgggacgaggacgtgca

SEQ ID NO: 1199673 - DNA, 25 bp, Homo sapien
gcgggacgaggacgtgcacggcgcg

SEQ ID NO: 1199674 - DNA, 25 bp, Homo sapien
tcagcttccgcaatggagctcggga

SEQ ID NO: 1199675 - DNA, 25 bp, Homo sapien
acaatatggcgagcctcagcttccg

SEQ ID NO: 1199676 - DNA, 25 bp, Homo sapien
atggagctcgggaaatacaacaggg

SEQ ID NO: 1199677 - DNA, 25 bp, Homo sapien
ggggccgctcaatattcatgagaga

SEQ ID NO: 1199678 - DNA, 25 bp, Homo sapien
gaaccccgaggtcgaggagctcctc

SEQ ID NO: 1199679 - DNA, 25 bp, Homo sapien
aggcggcactccaggaatgtgtgaa

SEQ ID NO: 1199680 - DNA, 25 bp, Homo sapien
gaaggaaggagcgatatctgcacaa

SEQ ID NO: 1199681 - DNA, 25 bp, Homo sapien
gctcctctacactggaaccccgact

SEQ ID NO: 1199682 - DNA, 25 bp, Homo sapien
ccaattgtagatgtgtacgtgcgca

SEQ ID NO: 1199683 - DNA, 25 bp, Homo sapien
tctggacccttaaggaatggactgt

SEQ ID NO: 1199684 - DNA, 25 bp, Homo sapien
ccagaagacccagtagacacattag

SEQ ID NO: 1199685 - DNA, 25 bp, Homo sapien
ccagtaggcaaacagtcaggatatc

SEQ ID NO: 1199686 - DNA, 25 bp, Homo sapien
catacaactccactctatagcatag

SEQ ID NO: 1199687 - DNA, 25 bp, Homo sapien
ccccttgcagaagagcccgtaagta

SEQ ID NO: 1199688 - DNA, 25 bp, Homo sapien
tatgcatcgactttagaatctaacc

SEQ ID NO: 1199689 - DNA, 25 bp, Homo sapien
tcatttggctggttacttcacttaa

SEQ ID NO: 1199690 - DNA, 25 bp, Homo sapien
tttgaaaggcaacgttaacacagaa

SEQ ID NO: 1199691 - DNA, 25 bp, Homo sapien
tatgtgacgaaattgagacatctca

SEQ ID NO: 1199692 - DNA, 25 bp, Homo sapien
tatgtgcacagtactaagctaaaag

SEQ ID NO: 1199693 - DNA, 25 bp, Homo sapien
ggttgctgtcttttgggctcccaaa

SEQ ID NO: 1199694 - DNA, 25 bp, Homo sapien
caagaatcttgctagtagtggaacc

SEQ ID NO: 1199695 - DNA, 25 bp, Homo sapien
caatagcgaatagaggtagtggtca

SEQ ID NO: 1199696 - DNA, 25 bp, Homo sapien
aggaatgcctgtcaaaattgctggc

SEQ ID NO: 1199697 - DNA, 25 bp, Homo sapien
gacagccgtcccagactgaataaga

SEQ ID NO: 1199698 - DNA, 25 bp, Homo sapien
gaaggtcaagaacatatgctctgca

SEQ ID NO: 1199699 - DNA, 25 bp, Homo sapien
tgttaacaaactagctatggcacag

SEQ ID NO: 1199700 - DNA, 25 bp, Homo sapien
catcccaccgccacatgaataatgg

SEQ ID NO: 1199701 - DNA, 25 bp, Homo sapien
ggatccttagacactcctggactga

SEQ ID NO: 1199702 - DNA, 25 bp, Homo sapien
caatatttaggttcacaaaagcagc

SEQ ID NO: 1199703 - DNA, 25 bp, Homo sapien
tggccttgtcgccagatttctgcaa

SEQ ID NO: 1199704 - DNA, 25 bp, Homo sapien
tagctccagaggtttcaaaggctga

SEQ ID NO: 1199705 - DNA, 25 bp, Homo sapien
cttaatcctggcagaagtagctcca

SEQ ID NO: 1199706 - DNA, 25 bp, Homo sapien
gctgtaagacagacgctaatttctg

SEQ ID NO: 1199707 - DNA, 25 bp, Homo sapien
tatggaacatacaacagaaagcact

SEQ ID NO: 1199708 - DNA, 25 bp, Homo sapien
tgtaagcttctaaagacacaaagtg

SEQ ID NO: 1199709 - DNA, 25 bp, Homo sapien
gaaaagcttgtcactgtactgaaca

SEQ ID NO: 1199710 - DNA, 25 bp, Homo sapien
tccctaagcactatgaaacaaagaa

SEQ ID NO: 1199711 - DNA, 25 bp, Homo sapien
tagttactgtcccttctgaacacag

SEQ ID NO: 1199712 - DNA, 25 bp, Homo sapien
gtttgatatacacttccctaagcac

SEQ ID NO: 1199713 - DNA, 25 bp, Homo sapien
tgtttttctctcatagttactgtcc

SEQ ID NO: 1199714 - DNA, 25 bp, Homo sapien
ggcaaatgccagtatgccttggctt

SEQ ID NO: 1199715 - DNA, 25 bp, Homo sapien
aaagtactggcaggattgcacttgg

SEQ ID NO: 1199716 - DNA, 25 bp, Homo sapien
tcctaattcaatatcactgggccaa

SEQ ID NO: 1199717 - DNA, 25 bp, Homo sapien
tgcacttggcttccagaggccctag

SEQ ID NO: 1199718 - DNA, 25 bp, Homo sapien
ctagcagtcactagctgtggattca

SEQ ID NO: 1199719 - DNA, 25 bp, Homo sapien
gcaaatttctcaacctcttaaggct

SEQ ID NO: 1199720 - DNA, 25 bp, Homo sapien
cactagctgtggattcataggcaaa

SEQ ID NO: 1199721 - DNA, 25 bp, Homo sapien
ggattcataggcaaatttctcaacc

SEQ ID NO: 1199722 - DNA, 25 bp, Homo sapien
cgtttgtctgcacagcctgagacat

SEQ ID NO: 1199723 - DNA, 25 bp, Homo sapien
tgttttgcttaatggttgagttccg

SEQ ID NO: 1199724 - DNA, 25 bp, Homo sapien
ctcatataaactgagttcccatgtt

SEQ ID NO: 1199725 - DNA, 25 bp, Homo sapien
gaggtgttcgttgtaactcatataa

SEQ ID NO: 1199726 - DNA, 25 bp, Homo sapien
ccacaatttctaagccatctgttat

SEQ ID NO: 1199727 - DNA, 25 bp, Homo sapien
cacaatttctaagccatctgttatt

SEQ ID NO: 1199728 - DNA, 25 bp, Homo sapien
caatttctaagccatctgttattgc

SEQ ID NO: 1199729 - DNA, 25 bp, Homo sapien
aaccacaatttctaagccatctgtt

SEQ ID NO: 1199730 - DNA, 25 bp, Homo sapien
gcagtctgcacaaaaacgatgtaaa

SEQ ID NO: 1199731 - DNA, 25 bp, Homo sapien
taagggctgtgatgatgcagtctgc

SEQ ID NO: 1199732 - DNA, 25 bp, Homo sapien
ttctaagggctgtgatgatgcagtc

SEQ ID NO: 1199733 - DNA, 25 bp, Homo sapien
cgatgtaaacactcctttgtagtca

SEQ ID NO: 1199734 - DNA, 25 bp, Homo sapien
ctcaaaccctggaaagcactttcgt

SEQ ID NO: 1199735 - DNA, 25 bp, Homo sapien
gcactttcgtggtacaattaagtac

SEQ ID NO: 1199736 - DNA, 25 bp, Homo sapien
caattaagtacctagtataacaact

SEQ ID NO: 1199737 - DNA, 25 bp, Homo sapien
aaactagccggccacggtggcaatg

SEQ ID NO: 1199738 - DNA, 25 bp, Homo sapien
atactctctcttgatgagcttcata

SEQ ID NO: 1199739 - DNA, 25 bp, Homo sapien
ctaatactctctcttgatgagcttc

SEQ ID NO: 1199740 - DNA, 25 bp, Homo sapien
tgttattatcaagctctagcccaga

SEQ ID NO: 1199741 - DNA, 25 bp, Homo sapien
tactggatcaattgccattgctgca

SEQ ID NO: 1199742 - DNA, 25 bp, Homo sapien
tatgtgtggatgcattactgcagtg

SEQ ID NO: 1199743 - DNA, 25 bp, Homo sapien
tccgtttgttactagggcctgcttc

SEQ ID NO: 1199744 - DNA, 25 bp, Homo sapien
gattcacctttgcttcgaagttctt

SEQ ID NO: 1199745 - DNA, 25 bp, Homo sapien
cacctttgcttcgaagttcttctaa

SEQ ID NO: 1199746 - DNA, 25 bp, Homo sapien
ctttgcttcgaagttcttctaaagc

SEQ ID NO: 1199747 - DNA, 25 bp, Homo sapien
gtttgattcacctttgcttcgaagt

SEQ ID NO: 1199748 - DNA, 25 bp, Homo sapien
ctaaaatggaagtccacagaatctt

SEQ ID NO: 1199749 - DNA, 25 bp, Homo sapien
cagtgtgctcccagtttcaacagtc

SEQ ID NO: 1199750 - DNA, 25 bp, Homo sapien
cacttgccactcagttagttggtca

SEQ ID NO: 1199751 - DNA, 25 bp, Homo sapien
aactgcacaaaccacaataataatg

SEQ ID NO: 1199752 - DNA, 25 bp, Homo sapien
taataaagttccatgggtttgttca

SEQ ID NO: 1199753 - DNA, 25 bp, Homo sapien
ctcctttgtaggtgcgtaataaagt

SEQ ID NO: 1199754 - DNA, 25 bp, Homo sapien
ttgtaggtgcgtaataaagttccat

SEQ ID NO: 1199755 - DNA, 25 bp, Homo sapien
tttgtaggtgcgtaataaagttcca

SEQ ID NO: 1199756 - DNA, 25 bp, Homo sapien
cagtaaatttgagccttgggtcttc

SEQ ID NO: 1199757 - DNA, 25 bp, Homo sapien
gatctgtccataaaagtaatgccag

SEQ ID NO: 1199758 - DNA, 25 bp, Homo sapien
tcaaaatggtgctccaagtggaaac

SEQ ID NO: 1199759 - DNA, 25 bp, Homo sapien
tgaatagcgtaaactagtctggctc

SEQ ID NO: 1199760 - DNA, 25 bp, Homo sapien
aatgactttaccctactggctgacg

SEQ ID NO: 1199761 - DNA, 25 bp, Homo sapien
aaaccagggttatattcagtgggca

SEQ ID NO: 1199762 - DNA, 25 bp, Homo sapien
cataccgggctgaagatttaaaaca

SEQ ID NO: 1199763 - DNA, 25 bp, Homo sapien
aaaccctggttggtagtgatggcca

SEQ ID NO: 1199764 - DNA, 25 bp, Homo sapien
ggttgggtgatcttaagtgcctcag

SEQ ID NO: 1199765 - DNA, 25 bp, Homo sapien
ggttggttgtactacctctcagaag

SEQ ID NO: 1199766 - DNA, 25 bp, Homo sapien
gaagctgaaggctcacatgttaaaa

SEQ ID NO: 1199767 - DNA, 25 bp, Homo sapien
gcctcagttaatgcacgtacagtat

SEQ ID NO: 1199768 - DNA, 25 bp, Homo sapien
acttgataagtgataactataaagc

SEQ ID NO: 1199769 - DNA, 25 bp, Homo sapien
aaagaagtcatctcattcagaattt

SEQ ID NO: 1199770 - DNA, 25 bp, Homo sapien
tatcaatttgtaatacatagtttaa

SEQ ID NO: 1199771 - DNA, 25 bp, Homo sapien
gataagtgataactataaagcaatg

SEQ ID NO: 1199772 - DNA, 25 bp, Homo sapien
tgcctgtagttagaaagagctttcc

SEQ ID NO: 1199773 - DNA, 25 bp, Homo sapien
tgtttatgtagtctggattttgcct

SEQ ID NO: 1199774 - DNA, 25 bp, Homo sapien
ttccacatgtatttgagtttgcttc

SEQ ID NO: 1199775 - DNA, 25 bp, Homo sapien
cctccactgatttgagaataccttc

SEQ ID NO: 1199776 - DNA, 25 bp, Homo sapien
ggcttggcacggaggcggtaactat

SEQ ID NO: 1199777 - DNA, 25 bp, Homo sapien
ttttgtctgttgcacgcatcccgcc

SEQ ID NO: 1199778 - DNA, 25 bp, Homo sapien
tgtgggcattcacgtcagttctctg

SEQ ID NO: 1199779 - DNA, 25 bp, Homo sapien
cggtaactatggagaatatggcgga

SEQ ID NO: 1199780 - DNA, 25 bp, Homo sapien
tacttcctccgaggcttgaactccg

SEQ ID NO: 1199781 - DNA, 25 bp, Homo sapien
gcatttacttcctccgaggcttgaa

SEQ ID NO: 1199782 - DNA, 25 bp, Homo sapien
gcgctcgcttagatttgcatttact

SEQ ID NO: 1199783 - DNA, 25 bp, Homo sapien
gccccacagcgctcgcttagatttg

SEQ ID NO: 1199784 - DNA, 25 bp, Homo sapien
gcccgcatccgcactacctactcac

SEQ ID NO: 1199785 - DNA, 25 bp, Homo sapien
ccaactgtatgcctgctgggaaacg

SEQ ID NO: 1199786 - DNA, 25 bp, Homo sapien
gcagtggcaactccggagccccaag

SEQ ID NO: 1199787 - DNA, 25 bp, Homo sapien
ggaaacgtagttctgcgcccgcatc

SEQ ID NO: 1199788 - DNA, 25 bp, Homo sapien
cctaattccaagtcagctggatgga

SEQ ID NO: 1199789 - DNA, 25 bp, Homo sapien
tcagctgctagtaaaccgccgcggg

SEQ ID NO: 1199790 - DNA, 25 bp, Homo sapien
ccaagtcagctggatggacaggcaa

SEQ ID NO: 1199791 - DNA, 25 bp, Homo sapien
tggacaggcaagctcgtcagctgct

SEQ ID NO: 1199792 - DNA, 25 bp, Homo sapien
caccaaaattgggtgatgaggtggt

SEQ ID NO: 1199793 - DNA, 25 bp, Homo sapien
accaaaattgggtgatgaggtggtg

SEQ ID NO: 1199794 - DNA, 25 bp, Homo sapien
tttctgatgaaactgatcttataga

SEQ ID NO: 1199795 - DNA, 25 bp, Homo sapien
atagaagatgaactagtagaacttg

SEQ ID NO: 1199796 - DNA, 25 bp, Homo sapien
ttctgatgaaactgatcttatagaa

SEQ ID NO: 1199797 - DNA, 25 bp, Homo sapien
agatgaactagtagaacttgctggg

SEQ ID NO: 1199798 - DNA, 25 bp, Homo sapien
ttttatattatagtacagaacatct

SEQ ID NO: 1199799 - DNA, 25 bp, Homo sapien
ttatattatagtacagaacatctgt

SEQ ID NO: 1199800 - DNA, 25 bp, Homo sapien
tttatattatagtacagaacatctg

SEQ ID NO: 1199801 - DNA, 25 bp, Homo sapien
atattatagtacagaacatctgtat

SEQ ID NO: 1199802 - DNA, 25 bp, Homo sapien
aatttcacttatggtaacggctcta

SEQ ID NO: 1199803 - DNA, 25 bp, Homo sapien
ttcacttatggtaacggctctagca

SEQ ID NO: 1199804 - DNA, 25 bp, Homo sapien
tatggtaacggctctagcattttct

SEQ ID NO: 1199805 - DNA, 25 bp, Homo sapien
cacttatggtaacggctctagcatt

SEQ ID NO: 1199806 - DNA, 25 bp, Homo sapien
tagaagacggatcatggatgctgcc

SEQ ID NO: 1199807 - DNA, 25 bp, Homo sapien
tgcgtacaaaggctagagaaccacc

SEQ ID NO: 1199808 - DNA, 25 bp, Homo sapien
tcaaagggcttcattcgggatgcca

SEQ ID NO: 1199809 - DNA, 25 bp, Homo sapien
catgccaaggagacatgaggtaccc

SEQ ID NO: 1199810 - DNA, 25 bp, Homo sapien
catcactggcaatcttaggactact

SEQ ID NO: 1199811 - DNA, 25 bp, Homo sapien
gttccatttgaagaaggactctgca

SEQ ID NO: 1199812 - DNA, 25 bp, Homo sapien
tggtcaagcttgctcccagcatttg

SEQ ID NO: 1199813 - DNA, 25 bp, Homo sapien
tcggctttaggtttcacatcactgg

SEQ ID NO: 1199814 - DNA, 25 bp, Homo sapien
aactctcagttaaaacctatattct

SEQ ID NO: 1199815 - DNA, 25 bp, Homo sapien
ttaactatattaataaactctcagt

SEQ ID NO: 1199816 - DNA, 25 bp, Homo sapien
tcagttaaaacctatattcttcatt

SEQ ID NO: 1199817 - DNA, 25 bp, Homo sapien
ataaactctcagttaaaacctatat

SEQ ID NO: 1199818 - DNA, 25 bp, Homo sapien
gttgagacccgtctcggtatgttgc

SEQ ID NO: 1199819 - DNA, 25 bp, Homo sapien
ttgtatccagtcccctccagtatac

SEQ ID NO: 1199820 - DNA, 25 bp, Homo sapien
ttttgttgagacccgtctcggtatg

SEQ ID NO: 1199821 - DNA, 25 bp, Homo sapien
cagtcccctccagtatacctttcta

SEQ ID NO: 1199822 - DNA, 25 bp, Homo sapien
cggaacaacatggtgcttcaaaact

SEQ ID NO: 1199823 - DNA, 25 bp, Homo sapien
tcagatgacacggaacaacatggtg

SEQ ID NO: 1199824 - DNA, 25 bp, Homo sapien
cagatgacacggaacaacatggtgc

SEQ ID NO: 1199825 - DNA, 25 bp, Homo sapien
agatgacacggaacaacatggtgct

SEQ ID NO: 1199826 - DNA, 25 bp, Homo sapien
cagaggaggaatgtacatcatcttc

SEQ ID NO: 1199827 - DNA, 25 bp, Homo sapien
catgaagctcttctactatctgcat

SEQ ID NO: 1199828 - DNA, 25 bp, Homo sapien
actttttcccacacgtgcagcatga

SEQ ID NO: 1199829 - DNA, 25 bp, Homo sapien
ttaactctccaggtaaatccacact

SEQ ID NO: 1199830 - DNA, 25 bp, Homo sapien
gaagctttctgtctgaagtattatt

SEQ ID NO: 1199831 - DNA, 25 bp, Homo sapien
taacaaatttgagatgattcatcag

SEQ ID NO: 1199832 - DNA, 25 bp, Homo sapien
gattcatcagaatatttgtgtcaat

SEQ ID NO: 1199833 - DNA, 25 bp, Homo sapien
tgtcaataacaattagaagctttct

SEQ ID NO: 1199834 - DNA, 25 bp, Homo sapien
gatgcaagttgtattgactgacccc

SEQ ID NO: 1199835 - DNA, 25 bp, Homo sapien
tcttgcataacgacccagggaatta

SEQ ID NO: 1199836 - DNA, 25 bp, Homo sapien
tgatgaaatgaactgcaggtatagc

SEQ ID NO: 1199837 - DNA, 25 bp, Homo sapien
tgtgctgggcacgttttagtagttt

SEQ ID NO: 1199838 - DNA, 25 bp, Homo sapien
ttagtaaaggcaacagtcagtaagt

SEQ ID NO: 1199839 - DNA, 25 bp, Homo sapien
tggagacagcattttagtactcgat

SEQ ID NO: 1199840 - DNA, 25 bp, Homo sapien
gcattttagtactcgatcatcattg

SEQ ID NO: 1199841 - DNA, 25 bp, Homo sapien
gacagcattttagtactcgatcatc

SEQ ID NO: 1199842 - DNA, 25 bp, Homo sapien
ttagtactcgatcatcattgttctc

SEQ ID NO: 1199843 - DNA, 25 bp, Homo sapien
tcttctttactgagtgacttcacac

SEQ ID NO: 1199844 - DNA, 25 bp, Homo sapien
tctgtgttcagagataagtgtaata

SEQ ID NO: 1199845 - DNA, 25 bp, Homo sapien
taataactctgcactcaattcttct

SEQ ID NO: 1199846 - DNA, 25 bp, Homo sapien
gacttcacaccacttattaggcctt

SEQ ID NO: 1199847 - DNA, 25 bp, Homo sapien
ctttcaactgttgcttaggaataca

SEQ ID NO: 1199848 - DNA, 25 bp, Homo sapien
gctttcaactgttgcttaggaatac

SEQ ID NO: 1199849 - DNA, 25 bp, Homo sapien
ttcaactgttgcttaggaatacaag

SEQ ID NO: 1199850 - DNA, 25 bp, Homo sapien
caactgttgcttaggaatacaaggc

SEQ ID NO: 1199851 - DNA, 25 bp, Homo sapien
tgtagattcctccttatagctctct

SEQ ID NO: 1199852 - DNA, 25 bp, Homo sapien
gaatggacagtccagaatttgtaga

SEQ ID NO: 1199853 - DNA, 25 bp, Homo sapien
gctctcaagcagaatggacagtcca

SEQ ID NO: 1199854 - DNA, 25 bp, Homo sapien
agatcagatacaatgctctcaagca

SEQ ID NO: 1199855 - DNA, 25 bp, Homo sapien
atttctgtttctaatattgaagata

SEQ ID NO: 1199856 - DNA, 25 bp, Homo sapien
ctccatccaaaggtttccaaaagca

SEQ ID NO: 1199857 - DNA, 25 bp, Homo sapien
tctgtttctaatattgaagataaac

SEQ ID NO: 1199858 - DNA, 25 bp, Homo sapien
catccaaaggtttccaaaagcaatt

SEQ ID NO: 1199859 - DNA, 25 bp, Homo sapien
tacggagatttttgtataggctctc

SEQ ID NO: 1199860 - DNA, 25 bp, Homo sapien
taaagcactgtagtaaatgtagtag

SEQ ID NO: 1199861 - DNA, 25 bp, Homo sapien
tccatggtggtttcaggtacaggat

SEQ ID NO: 1199862 - DNA, 25 bp, Homo sapien
taactaatccaaatacagccaacca

SEQ ID NO: 1199863 - DNA, 25 bp, Homo sapien
ctgggctcccccttcaatctttcca

SEQ ID NO: 1199864 - DNA, 25 bp, Homo sapien
ctactgggctcccccttcaatcttt

SEQ ID NO: 1199865 - DNA, 25 bp, Homo sapien
tcccccttcaatctttccatcatcc

SEQ ID NO: 1199866 - DNA, 25 bp, Homo sapien
ccccttcaatctttccatcatccat

SEQ ID NO: 1199867 - DNA, 25 bp, Homo sapien
caaaggtctgtggaagaataccatc

SEQ ID NO: 1199868 - DNA, 25 bp, Homo sapien
gaataccatcataatttgaccttgt

SEQ ID NO: 1199869 - DNA, 25 bp, Homo sapien
tgaccttgtactgaaagcatgtaac

SEQ ID NO: 1199870 - DNA, 25 bp, Homo sapien
ctgaagcaagaatttgactgttgta

SEQ ID NO: 1199871 - DNA, 25 bp, Homo sapien
tagttctaaaaatcacgcttgccat

SEQ ID NO: 1199872 - DNA, 25 bp, Homo sapien
cacaatcaaggtacaatactcatgc

SEQ ID NO: 1199873 - DNA, 25 bp, Homo sapien
ccaatgttttggtcatctcaaacca

SEQ ID NO: 1199874 - DNA, 25 bp, Homo sapien
ctcaattttgtgacgggaaaggaga

SEQ ID NO: 1199875 - DNA, 25 bp, Homo sapien
taatccaaacactctctaggataga

SEQ ID NO: 1199876 - DNA, 25 bp, Homo sapien
gatgagaactcgagaaaacagtgat

SEQ ID NO: 1199877 - DNA, 25 bp, Homo sapien
gatagaccagatttcttgatgcctg

SEQ ID NO: 1199878 - DNA, 25 bp, Homo sapien
tcttcaatgaagtaccttcctgctt

SEQ ID NO: 1199879 - DNA, 25 bp, Homo sapien
gaggtgtggttgtgagagagtggct

SEQ ID NO: 1199880 - DNA, 25 bp, Homo sapien
gcaggaggagaccgagagagaaaac

SEQ ID NO: 1199881 - DNA, 25 bp, Homo sapien
aggtgtggttgtgagagagtggcta

SEQ ID NO: 1199882 - DNA, 25 bp, Homo sapien
ggtgtggttgtgagagagtggctag

SEQ ID NO: 1199883 - DNA, 25 bp, Homo sapien
gccattaacttttgaagacatataa

SEQ ID NO: 1199884 - DNA, 25 bp, Homo sapien
gctgccattaacttttgaagacata

SEQ ID NO: 1199885 - DNA, 25 bp, Homo sapien
cacagctgccattaacttttgaaga

SEQ ID NO: 1199886 - DNA, 25 bp, Homo sapien
cctcacagctgccattaacttttga

SEQ ID NO: 1199887 - DNA, 25 bp, Homo sapien
tatacgggaaatacattacagggtc

SEQ ID NO: 1199888 - DNA, 25 bp, Homo sapien
tgttggcctggatcataaaatcgta

SEQ ID NO: 1199889 - DNA, 25 bp, Homo sapien
catacatactgaagcaaagtgcagg

SEQ ID NO: 1199890 - DNA, 25 bp, Homo sapien
actgtgatcctatattgcagaggga

SEQ ID NO: 1199891 - DNA, 25 bp, Homo sapien
gaacaaaagaatctgtaactgtctg

SEQ ID NO: 1199892 - DNA, 25 bp, Homo sapien
cagttagttgtaaacaccactgcac

SEQ ID NO: 1199893 - DNA, 25 bp, Homo sapien
acaaaagaatctgtaactgtctgtg

SEQ ID NO: 1199894 - DNA, 25 bp, Homo sapien
aaaagaatctgtaactgtctgtgat

SEQ ID NO: 1199895 - DNA, 25 bp, Homo sapien
gagtggagaaggaacaaagaaatct

SEQ ID NO: 1199896 - DNA, 25 bp, Homo sapien
aagaaatctgtaactggttgtgata

SEQ ID NO: 1199897 - DNA, 25 bp, Homo sapien
aaatctgtaactggttgtgataaac

SEQ ID NO: 1199898 - DNA, 25 bp, Homo sapien
aaatgccagtcaaaggaagcagtgg

SEQ ID NO: 1199899 - DNA, 25 bp, Homo sapien
ggtctcaacatcttgataattactg

SEQ ID NO: 1199900 - DNA, 25 bp, Homo sapien
gtctcaacatcttgataattactgt

SEQ ID NO: 1199901 - DNA, 25 bp, Homo sapien
atttcctgggcagtaaatttgacat

SEQ ID NO: 1199902 - DNA, 25 bp, Homo sapien
aatttcctgggcagtaaatttgaca

SEQ ID NO: 1199903 - DNA, 25 bp, Homo sapien
cataaatttcctgggcagtaaattt

SEQ ID NO: 1199904 - DNA, 25 bp, Homo sapien
taaatttcctgggcagtaaatttga

SEQ ID NO: 1199905 - DNA, 25 bp, Homo sapien
tttcatcttccacaattggccccat

SEQ ID NO: 1199906 - DNA, 25 bp, Homo sapien
ctttcatcttccacaattggcccca

SEQ ID NO: 1199907 - DNA, 25 bp, Homo sapien
tggtcggtcttcaggtgaaaggcct

SEQ ID NO: 1199908 - DNA, 25 bp, Homo sapien
tttggtggtcggtcttcaggtgaaa

SEQ ID NO: 1199909 - DNA, 25 bp, Homo sapien
ccatttggtggtcggtcttcaggtg

SEQ ID NO: 1199910 - DNA, 25 bp, Homo sapien
ggtggtcggtcttcaggtgaaaggc

SEQ ID NO: 1199911 - DNA, 25 bp, Homo sapien
tatatgctaaaatgtggataaacct

SEQ ID NO: 1199912 - DNA, 25 bp, Homo sapien
tgttgtgatgagtttcagagcaaga

SEQ ID NO: 1199913 - DNA, 25 bp, Homo sapien
acagtttggtttggtatccgtctca

SEQ ID NO: 1199914 - DNA, 25 bp, Homo sapien
ggtcacatgtatacatcggagatgg

SEQ ID NO: 1199915 - DNA, 25 bp, Homo sapien
gggcacactgtctcactgctgagaa

SEQ ID NO: 1199916 - DNA, 25 bp, Homo sapien
cttcttgccacagtataagcaaggg

SEQ ID NO: 1199917 - DNA, 25 bp, Homo sapien
gaaataccttagtcaaagcctccaa

SEQ ID NO: 1199918 - DNA, 25 bp, Homo sapien
ccctaggaaagggtgagataaatat

SEQ ID NO: 1199919 - DNA, 25 bp, Homo sapien
ccaaatctcgggtcaaaataactag

SEQ ID NO: 1199920 - DNA, 25 bp, Homo sapien
tcctgatcctttcgagaacagagct

SEQ ID NO: 1199921 - DNA, 25 bp, Homo sapien
gattcctttcgcataaccaatttgg

SEQ ID NO: 1199922 - DNA, 25 bp, Homo sapien
caatttggtcaaagtggcatggtac

SEQ ID NO: 1199923 - DNA, 25 bp, Homo sapien
gatcatggtgataggcattcttaag

SEQ ID NO: 1199924 - DNA, 25 bp, Homo sapien
catggtgataggcattcttaagttc

SEQ ID NO: 1199925 - DNA, 25 bp, Homo sapien
tattagatcatggtgataggcattc

SEQ ID NO: 1199926 - DNA, 25 bp, Homo sapien
tggtgataggcattcttaagttcct

SEQ ID NO: 1199927 - DNA, 25 bp, Homo sapien
ctggctgagaaaagtattggctgtt

SEQ ID NO: 1199928 - DNA, 25 bp, Homo sapien
ctgtagcaagttccgtcatcactgg

SEQ ID NO: 1199929 - DNA, 25 bp, Homo sapien
cactggctgagaaaagtattggctg

SEQ ID NO: 1199930 - DNA, 25 bp, Homo sapien
tcctgtagcaagttccgtcatcact

SEQ ID NO: 1199931 - DNA, 25 bp, Homo sapien
tcttaattcacgtgagttagtattc

SEQ ID NO: 1199932 - DNA, 25 bp, Homo sapien
tcctctcaccccttgtaattaagaa

SEQ ID NO: 1199933 - DNA, 25 bp, Homo sapien
cacgtgagttagtattctggacaat

SEQ ID NO: 1199934 - DNA, 25 bp, Homo sapien
tttgtttcttaattcacgtgagtta

SEQ ID NO: 1199935 - DNA, 25 bp, Homo sapien
gcccatttcctactaagagaggtcc

SEQ ID NO: 1199936 - DNA, 25 bp, Homo sapien
taaaacatcttaacataagcccatt

SEQ ID NO: 1199937 - DNA, 25 bp, Homo sapien
ttccaactgtgtggcttaccccttg

SEQ ID NO: 1199938 - DNA, 25 bp, Homo sapien
gagtaaggtagaactagattgttca

SEQ ID NO: 1199939 - DNA, 25 bp, Homo sapien
aacagatgcattgcactgctgcatg

SEQ ID NO: 1199940 - DNA, 25 bp, Homo sapien
ggcggcatccaatggttaacttttc

SEQ ID NO: 1199941 - DNA, 25 bp, Homo sapien
ttccatctcaaccagctggcggcat

SEQ ID NO: 1199942 - DNA, 25 bp, Homo sapien
gcactgctgcatggtatattccatc

SEQ ID NO: 1199943 - DNA, 25 bp, Homo sapien
ttatatcctatagttgagcatgtct

SEQ ID NO: 1199944 - DNA, 25 bp, Homo sapien
tcctatagttgagcatgtcttcaca

SEQ ID NO: 1199945 - DNA, 25 bp, Homo sapien
atcctatagttgagcatgtcttcac

SEQ ID NO: 1199946 - DNA, 25 bp, Homo sapien
cctatagttgagcatgtcttcacac

SEQ ID NO: 1199947 - DNA, 25 bp, Homo sapien
gaaatatggtgagcatgatcatgcc

SEQ ID NO: 1199948 - DNA, 25 bp, Homo sapien
gaaatgctaatactgtaccctgggt

SEQ ID NO: 1199949 - DNA, 25 bp, Homo sapien
gactgtcagtaataggcgatcacct

SEQ ID NO: 1199950 - DNA, 25 bp, Homo sapien
cagtgtctctggtcacatgcccata

SEQ ID NO: 1199951 - DNA, 25 bp, Homo sapien
actagaaatgtactgaaaagtgaca

SEQ ID NO: 1199952 - DNA, 25 bp, Homo sapien
aaggaaaggctgtataaggaagtag

SEQ ID NO: 1199953 - DNA, 25 bp, Homo sapien
aaggctgtataaggaagtaggagct

SEQ ID NO: 1199954 - DNA, 25 bp, Homo sapien
agtgacaagcccacagaaggaaagg

SEQ ID NO: 1199955 - DNA, 25 bp, Homo sapien
tatattccagtaaacaaggacttcc

SEQ ID NO: 1199956 - DNA, 25 bp, Homo sapien
ttaacaaaagcataatatattccag

SEQ ID NO: 1199957 - DNA, 25 bp, Homo sapien
aaacagttggttttagctagagaca

SEQ ID NO: 1199958 - DNA, 25 bp, Homo sapien
ggacttccaacttatcctataacta

SEQ ID NO: 1199959 - DNA, 25 bp, Homo sapien
ctcttttattgcagacagtcacttt

SEQ ID NO: 1199960 - DNA, 25 bp, Homo sapien
tgaacaagttctcttttattgcaga

SEQ ID NO: 1199961 - DNA, 25 bp, Homo sapien
gtcacttttataatcataccttatg

SEQ ID NO: 1199962 - DNA, 25 bp, Homo sapien
cataccttatgtacatatcagaaac

SEQ ID NO: 1199963 - DNA, 25 bp, Homo sapien
aaaactacagggaaggcaaacacat

SEQ ID NO: 1199964 - DNA, 25 bp, Homo sapien
aaggcaaacacatcaatggcctcct

SEQ ID NO: 1199965 - DNA, 25 bp, Homo sapien
cctgagctgggaatgggagttaatt

SEQ ID NO: 1199966 - DNA, 25 bp, Homo sapien
cctcctgagctgggaatgggagtta

SEQ ID NO: 1199967 - DNA, 25 bp, Homo sapien
tatggataagtctcaagcatcatgc

SEQ ID NO: 1199968 - DNA, 25 bp, Homo sapien
tgacaaagcaatcccattcgtaggt

SEQ ID NO: 1199969 - DNA, 25 bp, Homo sapien
ccatggcaatgcaatacttcttggg

SEQ ID NO: 1199970 - DNA, 25 bp, Homo sapien
caaaagcctccattagctgggcata

SEQ ID NO: 1199971 - DNA, 25 bp, Homo sapien
taactggaacactctataacaaagg

SEQ ID NO: 1199972 - DNA, 25 bp, Homo sapien
ggaagcttacatgcctaccaatatt

SEQ ID NO: 1199973 - DNA, 25 bp, Homo sapien
gagttattgaagcagagtggcagtc

SEQ ID NO: 1199974 - DNA, 25 bp, Homo sapien
cagcagagtgctttaccaattgaag

SEQ ID NO: 1199975 - DNA, 25 bp, Homo sapien
tattttagttgtattgccttgggca

SEQ ID NO: 1199976 - DNA, 25 bp, Homo sapien
cttgtcatagtataaaaaggatggg

SEQ ID NO: 1199977 - DNA, 25 bp, Homo sapien
gcctgtcatagtgtaaatctgtttt

SEQ ID NO: 1199978 - DNA, 25 bp, Homo sapien
cattcacaactttagtaacagtgga

SEQ ID NO: 1199979 - DNA, 25 bp, Homo sapien
tcataccctgacgaagtgcaccttt

SEQ ID NO: 1199980 - DNA, 25 bp, Homo sapien
ccattagagcttaagacacacctgc

SEQ ID NO: 1199981 - DNA, 25 bp, Homo sapien
cacagaagaaattcgtgtctatagc

SEQ ID NO: 1199982 - DNA, 25 bp, Homo sapien
cattttcaagcctgatagttttgga

SEQ ID NO: 1199983 - DNA, 25 bp, Homo sapien
ttcttgctgtcaggaacggacgcct

SEQ ID NO: 1199984 - DNA, 25 bp, Homo sapien
cctttgctacactggcgcgggtgag

SEQ ID NO: 1199985 - DNA, 25 bp, Homo sapien
gaagagctctcgagactcggctcgt

SEQ ID NO: 1199986 - DNA, 25 bp, Homo sapien
caggctgggaggaacaagagttttt

SEQ ID NO: 1199987 - DNA, 25 bp, Homo sapien
cccatcgaagctctagaaatgaatg

SEQ ID NO: 1199988 - DNA, 25 bp, Homo sapien
tggcgctttccgttgggccgattcc

SEQ ID NO: 1199989 - DNA, 25 bp, Homo sapien
ctgtatcggcgagcgagcgagttcc

SEQ ID NO: 1199990 - DNA, 25 bp, Homo sapien
tgggcgcagtttctccgcctgctgc

SEQ ID NO: 1199991 - DNA, 25 bp, Homo sapien
caaacacaaggttaggcctagacag

SEQ ID NO: 1199992 - DNA, 25 bp, Homo sapien
tgccagatcccagcttaaatcacgt

SEQ ID NO: 1199993 - DNA, 25 bp, Homo sapien
tcagagtccacgaagttgctgccag

SEQ ID NO: 1199994 - DNA, 25 bp, Homo sapien
ttggcacctggtataaagggcccca

SEQ ID NO: 1199995 - DNA, 25 bp, Homo sapien
cctgcttctataagcataaatagtt

SEQ ID NO: 1199996 - DNA, 25 bp, Homo sapien
ttcctgcttctataagcataaatag

SEQ ID NO: 1199997 - DNA, 25 bp, Homo sapien
gcttctataagcataaatagttaat

SEQ ID NO: 1199998 - DNA, 25 bp, Homo sapien
tgcttctataagcataaatagttaa

SEQ ID NO: 1199999 - DNA, 25 bp, Homo sapien
cgtaccctgatagtttcatttgtaa

SEQ ID NO: 1200000 - DNA, 25 bp, Homo sapien
gatataaaaaatcactcgaatagac

SEQ ID NO: 1200001 - DNA, 25 bp, Homo sapien
agacatcttagttcttgtttcctcc

SEQ ID NO: 1200002 - DNA, 25 bp, Homo sapien
agagcttaaaagtacgtaccctgat

SEQ ID NO: 1200003 - DNA, 25 bp, Homo sapien
tctttcagtctcaggtcaaatccca

SEQ ID NO: 1200004 - DNA, 25 bp, Homo sapien
ggaatcttccctgatcactggctca

SEQ ID NO: 1200005 - DNA, 25 bp, Homo sapien
catactctatttaggagtcctcaaa

SEQ ID NO: 1200006 - DNA, 25 bp, Homo sapien
ggtaaactcatacccatctttcagt

SEQ ID NO: 1200007 - DNA, 25 bp, Homo sapien
gtcctgccttacagaaaagtagctg

SEQ ID NO: 1200008 - DNA, 25 bp, Homo sapien
ttctagaactacaatacagccaact

SEQ ID NO: 1200009 - DNA, 25 bp, Homo sapien
cagccaactgagctatttaaactgt

SEQ ID NO: 1200010 - DNA, 25 bp, Homo sapien
agtagctgtggaatgactaatatcc

SEQ ID NO: 1200011 - DNA, 25 bp, Homo sapien
gttcccctgagagctaattgttaga

SEQ ID NO: 1200012 - DNA, 25 bp, Homo sapien
agaattccagcaagagttcccctga

SEQ ID NO: 1200013 - DNA, 25 bp, Homo sapien
taaaggctatgaaagaactgctggc

SEQ ID NO: 1200014 - DNA, 25 bp, Homo sapien
gatgtatccctcacaaatggcttgg

SEQ ID NO: 1200015 - DNA, 25 bp, Homo sapien
aaacacatgatgaggctggatactg

SEQ ID NO: 1200016 - DNA, 25 bp, Homo sapien
cagaatatcctgcaagttgtgaggg

SEQ ID NO: 1200017 - DNA, 25 bp, Homo sapien
ctttagtaaaggtattgctggctgc

SEQ ID NO: 1200018 - DNA, 25 bp, Homo sapien
aatggtcaagggcagtttcaagaac

SEQ ID NO: 1200019 - DNA, 25 bp, Homo sapien
cctatatctggtgcaaaaggcaaaa

SEQ ID NO: 1200020 - DNA, 25 bp, Homo sapien
ccctatatctggtgcaaaaggcaaa

SEQ ID NO: 1200021 - DNA, 25 bp, Homo sapien
tccctatatctggtgcaaaaggcaa

SEQ ID NO: 1200022 - DNA, 25 bp, Homo sapien
tttccctatatctggtgcaaaaggc

SEQ ID NO: 1200023 - DNA, 25 bp, Homo sapien
tagactcatttaatgcagccattgg

SEQ ID NO: 1200024 - DNA, 25 bp, Homo sapien
gatactgccacacgttcctccaatt

SEQ ID NO: 1200025 - DNA, 25 bp, Homo sapien
acgttcctccaattagagctctgca

SEQ ID NO: 1200026 - DNA, 25 bp, Homo sapien
ctgcaattagacatgtccagagatg

SEQ ID NO: 1200027 - DNA, 25 bp, Homo sapien
gaaagacacctcttttgcaaacagg

SEQ ID NO: 1200028 - DNA, 25 bp, Homo sapien
tttgcaaacaggaaatgtatggctc

SEQ ID NO: 1200029 - DNA, 25 bp, Homo sapien
aagaaagacacctcttttgcaaaca

SEQ ID NO: 1200030 - DNA, 25 bp, Homo sapien
ataaagaaagacacctcttttgcaa

SEQ ID NO: 1200031 - DNA, 25 bp, Homo sapien
agctggctcacttgcctggtgactt

SEQ ID NO: 1200032 - DNA, 25 bp, Homo sapien
tgcctggtgactttcagcaaacaga

SEQ ID NO: 1200033 - DNA, 25 bp, Homo sapien
tggtgactttcagcaaacagaaagg

SEQ ID NO: 1200034 - DNA, 25 bp, Homo sapien
tcacttgcctggtgactttcagcaa

SEQ ID NO: 1200035 - DNA, 25 bp, Homo sapien
ctctctggcaactggtcctgttgct

SEQ ID NO: 1200036 - DNA, 25 bp, Homo sapien
tctctggcaactggtcctgttgctt

SEQ ID NO: 1200037 - DNA, 25 bp, Homo sapien
ctctctatctgcagaagaataagaa

SEQ ID NO: 1200038 - DNA, 25 bp, Homo sapien
gaagaataagaacaatcctgtgtac

SEQ ID NO: 1200039 - DNA, 25 bp, Homo sapien
ataagaacaatcctgtgtactaaac

SEQ ID NO: 1200040 - DNA, 25 bp, Homo sapien
tatctgcagaagaataagaacaatc

SEQ ID NO: 1200041 - DNA, 25 bp, Homo sapien
tggtggcaagagttacagggaaaac

SEQ ID NO: 1200042 - DNA, 25 bp, Homo sapien
atcatgccaagcttgagaagccctg

SEQ ID NO: 1200043 - DNA, 25 bp, Homo sapien
ctggctgtcacaacctagggaggaa

SEQ ID NO: 1200044 - DNA, 25 bp, Homo sapien
taatagcccgcaacaaagaactgtc

SEQ ID NO: 1200045 - DNA, 25 bp, Homo sapien
cagagacctgcgaatagagctttcc

SEQ ID NO: 1200046 - DNA, 25 bp, Homo sapien
cagggaagcctctctaagcaggtgt

SEQ ID NO: 1200047 - DNA, 25 bp, Homo sapien
taacaatatagacagtgactctggc

SEQ ID NO: 1200048 - DNA, 25 bp, Homo sapien
taagggagcaagatgtacacctgcc

SEQ ID NO: 1200049 - DNA, 25 bp, Homo sapien
gctcactgtggaggatgttgctgca

SEQ ID NO: 1200050 - DNA, 25 bp, Homo sapien
ctcccactcttcaaagaaaggctct

SEQ ID NO: 1200051 - DNA, 25 bp, Homo sapien
tgtgtgttccttggtcgaagttcag

SEQ ID NO: 1200052 - DNA, 25 bp, Homo sapien
tcccactcttcaaagaaaggctctc

SEQ ID NO: 1200053 - DNA, 25 bp, Homo sapien
ctcccctgtgtgttccttggtcgaa

SEQ ID NO: 1200054 - DNA, 25 bp, Homo sapien
catcttccaatgcagactcatttgc

SEQ ID NO: 1200055 - DNA, 25 bp, Homo sapien
gcaagtgagtaacccttggaaagtc

SEQ ID NO: 1200056 - DNA, 25 bp, Homo sapien
acatcttccaatgcagactcatttg

SEQ ID NO: 1200057 - DNA, 25 bp, Homo sapien
ttgaaagcaagtgagtaacccttgg

SEQ ID NO: 1200058 - DNA, 25 bp, Homo sapien
gatgatgctttggaacatccatcag

SEQ ID NO: 1200059 - DNA, 25 bp, Homo sapien
caggcgttcaataaatccatagtga

SEQ ID NO: 1200060 - DNA, 25 bp, Homo sapien
gctgattgattaaacctggaattca

SEQ ID NO: 1200061 - DNA, 25 bp, Homo sapien
tgattgacagctgattgattaaacc

SEQ ID NO: 1200062 - DNA, 25 bp, Homo sapien
ttaatctgattttaccacactttta

SEQ ID NO: 1200063 - DNA, 25 bp, Homo sapien
aatctgattttaccacacttttata

SEQ ID NO: 1200064 - DNA, 25 bp, Homo sapien
tctgattttaccacacttttataca

SEQ ID NO: 1200065 - DNA, 25 bp, Homo sapien
ctgattttaccacacttttatacat

SEQ ID NO: 1200066 - DNA, 25 bp, Homo sapien
gagacaaaggagccctatctctggg

SEQ ID NO: 1200067 - DNA, 25 bp, Homo sapien
gccctatctctgggctagttcccat

SEQ ID NO: 1200068 - DNA, 25 bp, Homo sapien
gaaataacccgaacttagctgttca

SEQ ID NO: 1200069 - DNA, 25 bp, Homo sapien
taacccgaacttagctgttcatcaa

SEQ ID NO: 1200070 - DNA, 25 bp, Homo sapien
cagaaataacccgaacttagctgtt

SEQ ID NO: 1200071 - DNA, 25 bp, Homo sapien
gaacttagctgttcatcaaaaattc

SEQ ID NO: 1200072 - DNA, 25 bp, Homo sapien
tctgtgaacctgggttaaccccagc

SEQ ID NO: 1200073 - DNA, 25 bp, Homo sapien
ctctgtgaacctgggttaaccccag

SEQ ID NO: 1200074 - DNA, 25 bp, Homo sapien
ctgtgaacctgggttaaccccagct

SEQ ID NO: 1200075 - DNA, 25 bp, Homo sapien
tgtgaacctgggttaaccccagctc

SEQ ID NO: 1200076 - DNA, 25 bp, Homo sapien
ctgaaaccaagtgacccggcagctg

SEQ ID NO: 1200077 - DNA, 25 bp, Homo sapien
agcaccataagtgccgtatctcctg

SEQ ID NO: 1200078 - DNA, 25 bp, Homo sapien
gcttcatcagagagcaccataagtg

SEQ ID NO: 1200079 - DNA, 25 bp, Homo sapien
tgcgggctcctccattgactcaggc

SEQ ID NO: 1200080 - DNA, 25 bp, Homo sapien
cctgtcagttcatgagctttgctca

SEQ ID NO: 1200081 - DNA, 25 bp, Homo sapien
tgagtgctaatgagacaatagcccc

SEQ ID NO: 1200082 - DNA, 25 bp, Homo sapien
tctcaggcctcctgtcagttcatga

SEQ ID NO: 1200083 - DNA, 25 bp, Homo sapien
cagatagaactgagtgctaatgaga

SEQ ID NO: 1200084 - DNA, 25 bp, Homo sapien
gaacacttgagccatcatcatgact

SEQ ID NO: 1200085 - DNA, 25 bp, Homo sapien
tcagaccacataaggaagttccaaa

SEQ ID NO: 1200086 - DNA, 25 bp, Homo sapien
aagttttagccaagtgctctagcag

SEQ ID NO: 1200087 - DNA, 25 bp, Homo sapien
agtaatatctggaaagttttagcca

SEQ ID NO: 1200088 - DNA, 25 bp, Homo sapien
tacacaaagggataaggcagcagaa

SEQ ID NO: 1200089 - DNA, 25 bp, Homo sapien
aggtattttcctataatggcaatac

SEQ ID NO: 1200090 - DNA, 25 bp, Homo sapien
tttccaggacagctgttacacaaag

SEQ ID NO: 1200091 - DNA, 25 bp, Homo sapien
gcagaaataattgcacaaccgcttt

SEQ ID NO: 1200092 - DNA, 25 bp, Homo sapien
tccagttcttcccacaaggggcagt

SEQ ID NO: 1200093 - DNA, 25 bp, Homo sapien
gcatttcctggagcatccatgaccc

SEQ ID NO: 1200094 - DNA, 25 bp, Homo sapien
ggattctgtcgcatccccagcatct

SEQ ID NO: 1200095 - DNA, 25 bp, Homo sapien
tggttttggtgacggcagcatgcct

SEQ ID NO: 1200096 - DNA, 25 bp, Homo sapien
acattctcactgtgcttgtctgtct

SEQ ID NO: 1200097 - DNA, 25 bp, Homo sapien
gtctcctcaccaatggccacatggg

SEQ ID NO: 1200098 - DNA, 25 bp, Homo sapien
taagcacattctcactgtgcttgtc

SEQ ID NO: 1200099 - DNA, 25 bp, Homo sapien
tctgtctcctcaccaatggccacat

SEQ ID NO: 1200100 - DNA, 25 bp, Homo sapien
taacatattccagctatcatggcaa

SEQ ID NO: 1200101 - DNA, 25 bp, Homo sapien
tattccagctatcatggcaaagaag

SEQ ID NO: 1200102 - DNA, 25 bp, Homo sapien
ctaacatattccagctatcatggca

SEQ ID NO: 1200103 - DNA, 25 bp, Homo sapien
catattccagctatcatggcaaaga

SEQ ID NO: 1200104 - DNA, 25 bp, Homo sapien
gacatgaccatcactgtgaagtgac

SEQ ID NO: 1200105 - DNA, 25 bp, Homo sapien
cagcaatttcaagtatctgtattgc

SEQ ID NO: 1200106 - DNA, 25 bp, Homo sapien
tgtattgcattacaccaagttccca

SEQ ID NO: 1200107 - DNA, 25 bp, Homo sapien
acagacatgaccatcactgtgaagt

SEQ ID NO: 1200108 - DNA, 25 bp, Homo sapien
aaccaccccagctgctaaaaggaca

SEQ ID NO: 1200109 - DNA, 25 bp, Homo sapien
ccccagctgctaaaaggacacgtct

SEQ ID NO: 1200110 - DNA, 25 bp, Homo sapien
tgctaaaaggacacgtctgggccca

SEQ ID NO: 1200111 - DNA, 25 bp, Homo sapien
aaaggacacgtctgggcccacacct

SEQ ID NO: 1200112 - DNA, 25 bp, Homo sapien
ttgtcgcaggaccattttttccagc

SEQ ID NO: 1200113 - DNA, 25 bp, Homo sapien
tatgccgctgtactttgtcgcagga

SEQ ID NO: 1200114 - DNA, 25 bp, Homo sapien
gctgtactttgtcgcaggaccattt

SEQ ID NO: 1200115 - DNA, 25 bp, Homo sapien
ctcattatgccgctgtactttgtcg

SEQ ID NO: 1200116 - DNA, 25 bp, Homo sapien
ctaggctggcgttaaagcctgaatc

SEQ ID NO: 1200117 - DNA, 25 bp, Homo sapien
gggaaatagagcatctgtagactct

SEQ ID NO: 1200118 - DNA, 25 bp, Homo sapien
gcctgaatcgaagaaagagttaaag

SEQ ID NO: 1200119 - DNA, 25 bp, Homo sapien
tcttccttgccgaagcttggccttg

SEQ ID NO: 1200120 - DNA, 25 bp, Homo sapien
tattcccttagtaaccctgcagctg

SEQ ID NO: 1200121 - DNA, 25 bp, Homo sapien
ccagtagagggcagtgatggttcca

SEQ ID NO: 1200122 - DNA, 25 bp, Homo sapien
tatgcaaggactccccaatgaaggc

SEQ ID NO: 1200123 - DNA, 25 bp, Homo sapien
catttcatcagaaggacccactggg

SEQ ID NO: 1200124 - DNA, 25 bp, Homo sapien
caccatacagaacctctcagcatgc

SEQ ID NO: 1200125 - DNA, 25 bp, Homo sapien
tgtatcttatggacactgattcact

SEQ ID NO: 1200126 - DNA, 25 bp, Homo sapien
cttcatacaaagaagcattgagctt

SEQ ID NO: 1200127 - DNA, 25 bp, Homo sapien
tctggcactggcttgttgtatctta

SEQ ID NO: 1200128 - DNA, 25 bp, Homo sapien
tgtgcttgcattcccaacgttgaca

SEQ ID NO: 1200129 - DNA, 25 bp, Homo sapien
cagccacacggcagagtgaattcca

SEQ ID NO: 1200130 - DNA, 25 bp, Homo sapien
ggttccggacataatcagccacacg

SEQ ID NO: 1200131 - DNA, 25 bp, Homo sapien
gaggtatgtgtcaggcaggatccca

SEQ ID NO: 1200132 - DNA, 25 bp, Homo sapien
cttgtgattcaagggtctcagagga

SEQ ID NO: 1200133 - DNA, 25 bp, Homo sapien
ggtagagctggctttcaccacggtc

SEQ ID NO: 1200134 - DNA, 25 bp, Homo sapien
tatgaacatgaggacagaacatgac

SEQ ID NO: 1200135 - DNA, 25 bp, Homo sapien
gaacctgagcttctgtttaagccca

SEQ ID NO: 1200136 - DNA, 25 bp, Homo sapien
actgcagataaggtggaacaaagcc

SEQ ID NO: 1200137 - DNA, 25 bp, Homo sapien
ccactgcagataaggtggaacaaag

SEQ ID NO: 1200138 - DNA, 25 bp, Homo sapien
ttggccactgcagataaggtggaac

SEQ ID NO: 1200139 - DNA, 25 bp, Homo sapien
ggccactgcagataaggtggaacaa

SEQ ID NO: 1200140 - DNA, 25 bp, Homo sapien
ggttctgcattatagctctctgagc

SEQ ID NO: 1200141 - DNA, 25 bp, Homo sapien
tctctgagctgtgaagataggactt

SEQ ID NO: 1200142 - DNA, 25 bp, Homo sapien
actccctgacacataaggttctgca

SEQ ID NO: 1200143 - DNA, 25 bp, Homo sapien
cctgaggtaccagcacgtgctgggc

SEQ ID NO: 1200144 - DNA, 25 bp, Homo sapien
tttcagggtctgctaattgtccatc

SEQ ID NO: 1200145 - DNA, 25 bp, Homo sapien
ttttcagggtctgctaattgtccat

SEQ ID NO: 1200146 - DNA, 25 bp, Homo sapien
tatttcatggcagcttccttggtaa

SEQ ID NO: 1200147 - DNA, 25 bp, Homo sapien
agcttccttggtaaatttctggtag

SEQ ID NO: 1200148 - DNA, 25 bp, Homo sapien
ggcagcttccttggtaaatttctgg

SEQ ID NO: 1200149 - DNA, 25 bp, Homo sapien
ttatttcatggcagcttccttggta

SEQ ID NO: 1200150 - DNA, 25 bp, Homo sapien
ttggattgatcaaatcaagacctct

SEQ ID NO: 1200151 - DNA, 25 bp, Homo sapien
aattccagtgggcagcaaaagttga

SEQ ID NO: 1200152 - DNA, 25 bp, Homo sapien
cagcaaaagttgaacacttctgaac

SEQ ID NO: 1200153 - DNA, 25 bp, Homo sapien
tggagtgccaagaaaatgtagctct

SEQ ID NO: 1200154 - DNA, 25 bp, Homo sapien
taagttgttgaaccgcactgcatca

SEQ ID NO: 1200155 - DNA, 25 bp, Homo sapien
aacacctttgggagaagccaactgg

SEQ ID NO: 1200156 - DNA, 25 bp, Homo sapien
tgcagactcctgatccgtgaggcca

SEQ ID NO: 1200157 - DNA, 25 bp, Homo sapien
cacagcagtcttgggttactcaaac

SEQ ID NO: 1200158 - DNA, 25 bp, Homo sapien
aggcagacttgactgacacattcat

SEQ ID NO: 1200159 - DNA, 25 bp, Homo sapien
agaggcagacttgactgacacattc

SEQ ID NO: 1200160 - DNA, 25 bp, Homo sapien
gcagaggcagacttgactgacacat

SEQ ID NO: 1200161 - DNA, 25 bp, Homo sapien
gtggcagaggcagacttgactgaca

SEQ ID NO: 1200162 - DNA, 25 bp, Homo sapien
taagccacaactttcaaattgggat

SEQ ID NO: 1200163 - DNA, 25 bp, Homo sapien
atgacactgaccagcagagacacgg

SEQ ID NO: 1200164 - DNA, 25 bp, Homo sapien
ctttcaaattgggatatcatgacac

SEQ ID NO: 1200165 - DNA, 25 bp, Homo sapien
gtaacctgatctcccaataagccac

SEQ ID NO: 1200166 - DNA, 25 bp, Homo sapien
tctttacagggctgagtatccgtaa

SEQ ID NO: 1200167 - DNA, 25 bp, Homo sapien
tacagggctgagtatccgtaagatc

SEQ ID NO: 1200168 - DNA, 25 bp, Homo sapien
ttatctctttacagggctgagtatc

SEQ ID NO: 1200169 - DNA, 25 bp, Homo sapien
tttacagggctgagtatccgtaaga

SEQ ID NO: 1200170 - DNA, 25 bp, Homo sapien
tctatagcacaatgttgacccttca

SEQ ID NO: 1200171 - DNA, 25 bp, Homo sapien
ttttgtttctatagcacaatgttga

SEQ ID NO: 1200172 - DNA, 25 bp, Homo sapien
gtttctatagcacaatgttgaccct

SEQ ID NO: 1200173 - DNA, 25 bp, Homo sapien
ttgtttctatagcacaatgttgacc

SEQ ID NO: 1200174 - DNA, 25 bp, Homo sapien
caggagccaggcttgttgaggccat

SEQ ID NO: 1200175 - DNA, 25 bp, Homo sapien
aagttcacattcatcctggcacagg

SEQ ID NO: 1200176 - DNA, 25 bp, Homo sapien
catccttgaataaagagcattctca

SEQ ID NO: 1200177 - DNA, 25 bp, Homo sapien
ccctgggctgtagagaccacaagtt

SEQ ID NO: 1200178 - DNA, 25 bp, Homo sapien
aaaatccttaaaggtgcctgcagga

SEQ ID NO: 1200179 - DNA, 25 bp, Homo sapien
gaaaatccttaaaggtgcctgcagg

SEQ ID NO: 1200180 - DNA, 25 bp, Homo sapien
gaaagaaactctgagaaaatcctta

SEQ ID NO: 1200181 - DNA, 25 bp, Homo sapien
acaagctgtatcttctggctcatct

SEQ ID NO: 1200182 - DNA, 25 bp, Homo sapien
gtcacaagctgtatcttctggctca

SEQ ID NO: 1200183 - DNA, 25 bp, Homo sapien
ctgtcacaagctgtatcttctggct

SEQ ID NO: 1200184 - DNA, 25 bp, Homo sapien
cacaagctgtatcttctggctcatc

SEQ ID NO: 1200185 - DNA, 25 bp, Homo sapien
tctgcatttccactctacccgcata

SEQ ID NO: 1200186 - DNA, 25 bp, Homo sapien
tcatctgcatttccactctacccgc

SEQ ID NO: 1200187 - DNA, 25 bp, Homo sapien
catctgcatttccactctacccgca

SEQ ID NO: 1200188 - DNA, 25 bp, Homo sapien
ctgcatttccactctacccgcatac

SEQ ID NO: 1200189 - DNA, 25 bp, Homo sapien
ttggaactctcctatggaaagttca

SEQ ID NO: 1200190 - DNA, 25 bp, Homo sapien
ttaagtaagatttggaactctccta

SEQ ID NO: 1200191 - DNA, 25 bp, Homo sapien
tattaagtaagatttggaactctcc

SEQ ID NO: 1200192 - DNA, 25 bp, Homo sapien
gaactctcctatggaaagttcagca

SEQ ID NO: 1200193 - DNA, 25 bp, Homo sapien
aaagtttggcgctgagaatcagacg

SEQ ID NO: 1200194 - DNA, 25 bp, Homo sapien
tgtgctcagtcctcctcaacaacag

SEQ ID NO: 1200195 - DNA, 25 bp, Homo sapien
cggcagcttttgtctggatgcggct

SEQ ID NO: 1200196 - DNA, 25 bp, Homo sapien
ggacaagcaccaaactcgaatccct

SEQ ID NO: 1200197 - DNA, 25 bp, Homo sapien
aagaagagcaaacaggaatactgta

SEQ ID NO: 1200198 - DNA, 25 bp, Homo sapien
taaagaagagcaaacaggaatactg

SEQ ID NO: 1200199 - DNA, 25 bp, Homo sapien
aaagaagagcaaacaggaatactgt

SEQ ID NO: 1200200 - DNA, 25 bp, Homo sapien
gaactaaatcatcatacatagaacc

SEQ ID NO: 1200201 - DNA, 25 bp, Homo sapien
catcatacatagaaccagtcacatc

SEQ ID NO: 1200202 - DNA, 25 bp, Homo sapien
ccttcaatcacctgaactaaatcat

SEQ ID NO: 1200203 - DNA, 25 bp, Homo sapien
tggaagccccttcaatcacctgaac

SEQ ID NO: 1200204 - DNA, 25 bp, Homo sapien
tatcacactctcgttgtgaagaggt

SEQ ID NO: 1200205 - DNA, 25 bp, Homo sapien
tctcgttgtgaagaggttgtgtcaa

SEQ ID NO: 1200206 - DNA, 25 bp, Homo sapien
gattgccgatatcacactctcgttg

SEQ ID NO: 1200207 - DNA, 25 bp, Homo sapien
aggaatttcagattgccgatatcac

SEQ ID NO: 1200208 - DNA, 25 bp, Homo sapien
tgctccctctcctcctgtctctggt

SEQ ID NO: 1200209 - DNA, 25 bp, Homo sapien
ttaaaacacactgtcctgctccctc

SEQ ID NO: 1200210 - DNA, 25 bp, Homo sapien
ctctcctcctgtctctggtacctgc

SEQ ID NO: 1200211 - DNA, 25 bp, Homo sapien
taaaacacactgtcctgctccctct

SEQ ID NO: 1200212 - DNA, 25 bp, Homo sapien
cagatctggtatcagctctccctca

SEQ ID NO: 1200213 - DNA, 25 bp, Homo sapien
tctccggtgtctgctttaatgtcgc

SEQ ID NO: 1200214 - DNA, 25 bp, Homo sapien
ttaatgtcgccatgtgcctttgtgc

SEQ ID NO: 1200215 - DNA, 25 bp, Homo sapien
gcctgtctctggtggtcccagtgtt

SEQ ID NO: 1200216 - DNA, 25 bp, Homo sapien
cctgtaattcctgccagcccttgac

SEQ ID NO: 1200217 - DNA, 25 bp, Homo sapien
taattcctgccagcccttgacccca

SEQ ID NO: 1200218 - DNA, 25 bp, Homo sapien
tcctgccagcccttgaccccaaact

SEQ ID NO: 1200219 - DNA, 25 bp, Homo sapien
ctgccagcccttgaccccaaacttc

SEQ ID NO: 1200220 - DNA, 25 bp, Homo sapien
attgcaccacagaggggatttttgt

SEQ ID NO: 1200221 - DNA, 25 bp, Homo sapien
tattgcaccacagaggggatttttg

SEQ ID NO: 1200222 - DNA, 25 bp, Homo sapien
ttgcaccacagaggggatttttgtt

SEQ ID NO: 1200223 - DNA, 25 bp, Homo sapien
taattcatacaactgtcatataatg

SEQ ID NO: 1200224 - DNA, 25 bp, Homo sapien
agtctccctattcccaaagtatttg

SEQ ID NO: 1200225 - DNA, 25 bp, Homo sapien
taaagtcttacaatgcaacacaaaa

SEQ ID NO: 1200226 - DNA, 25 bp, Homo sapien
ccttttaggattttaacctgctatg

SEQ ID NO: 1200227 - DNA, 25 bp, Homo sapien
tatattgcaactacccaattgtggt

SEQ ID NO: 1200228 - DNA, 25 bp, Homo sapien
tagaactcacttccctactgtagaa

SEQ ID NO: 1200229 - DNA, 25 bp, Homo sapien
tccctttgactctggactggtcatg

SEQ ID NO: 1200230 - DNA, 25 bp, Homo sapien
gctggaactgtctatatgcataccc

SEQ ID NO: 1200231 - DNA, 25 bp, Homo sapien
caacatatagaacagtcaatgtaac

SEQ ID NO: 1200232 - DNA, 25 bp, Homo sapien
tcaacatatagaacagtcaatgtaa

SEQ ID NO: 1200233 - DNA, 25 bp, Homo sapien
tgcattgatgccttcgaacagggga

SEQ ID NO: 1200234 - DNA, 25 bp, Homo sapien
cttatagaggtataagaagataaaa

SEQ ID NO: 1200235 - DNA, 25 bp, Homo sapien
tgatgccttcgaacaggggaagatg

SEQ ID NO: 1200236 - DNA, 25 bp, Homo sapien
gcacgaaatttccatctacactctt

SEQ ID NO: 1200237 - DNA, 25 bp, Homo sapien
tttcttattggccaaataatgagct

SEQ ID NO: 1200238 - DNA, 25 bp, Homo sapien
caaaatcaggtttcttattggccaa

SEQ ID NO: 1200239 - DNA, 25 bp, Homo sapien
catcccaaaacaaaatcaggtttct

SEQ ID NO: 1200240 - DNA, 25 bp, Homo sapien
tcttattggccaaataatgagctcc

SEQ ID NO: 1200241 - DNA, 25 bp, Homo sapien
tctgaactgtgagtcgttttttagg

SEQ ID NO: 1200242 - DNA, 25 bp, Homo sapien
ttaggtcttcatatagttcatctgc

SEQ ID NO: 1200243 - DNA, 25 bp, Homo sapien
gagtcgttttttaggtcttcatata

SEQ ID NO: 1200244 - DNA, 25 bp, Homo sapien
ctgtgagtcgttttttaggtcttca

SEQ ID NO: 1200245 - DNA, 25 bp, Homo sapien
ttttagatgtatccaaaacatctca

SEQ ID NO: 1200246 - DNA, 25 bp, Homo sapien
gtatccaaaacatctcatcttttgc

SEQ ID NO: 1200247 - DNA, 25 bp, Homo sapien
ggtgttgtggcactgtgcttgttca

SEQ ID NO: 1200248 - DNA, 25 bp, Homo sapien
gcttgttcattgtcaaagttttgtt

SEQ ID NO: 1200249 - DNA, 25 bp, Homo sapien
gaactcatcaagaaaatgtctctat

SEQ ID NO: 1200250 - DNA, 25 bp, Homo sapien
cagcaatagtacatcctgtgactta

SEQ ID NO: 1200251 - DNA, 25 bp, Homo sapien
taaaatgagtgttctaatatctaca

SEQ ID NO: 1200252 - DNA, 25 bp, Homo sapien
gcagtagaggtagatggtccatttc

SEQ ID NO: 1200253 - DNA, 25 bp, Homo sapien
tcccagggcaaagcacactatctct

SEQ ID NO: 1200254 - DNA, 25 bp, Homo sapien
tctcagcaagtctaaaaaagcagag

SEQ ID NO: 1200255 - DNA, 25 bp, Homo sapien
gaagagaaccatgagcaggccttgc

SEQ ID NO: 1200256 - DNA, 25 bp, Homo sapien
taagatacaagactggctccatacc

SEQ ID NO: 1200257 - DNA, 25 bp, Homo sapien
tttccttaaggagtacatcagccat

SEQ ID NO: 1200258 - DNA, 25 bp, Homo sapien
tccgaaacgaagaaagcactgcaca

SEQ ID NO: 1200259 - DNA, 25 bp, Homo sapien
tacacttggaagtacccctcctcag

SEQ ID NO: 1200260 - DNA, 25 bp, Homo sapien
tttggccgcaataatagagttaacc

SEQ ID NO: 1200261 - DNA, 25 bp, Homo sapien
agctgccaccacaggtataagccac

SEQ ID NO: 1200262 - DNA, 25 bp, Homo sapien
cggcctcgacctcccaatgctcaag

SEQ ID NO: 1200263 - DNA, 25 bp, Homo sapien
caagtagctgccaccacaggtataa

SEQ ID NO: 1200264 - DNA, 25 bp, Homo sapien
gtagctgccaccacaggtataagcc

SEQ ID NO: 1200265 - DNA, 25 bp, Homo sapien
tggtttcatcccctgccaagccttt

SEQ ID NO: 1200266 - DNA, 25 bp, Homo sapien
tcagcaggtacaactttgtcctctc

SEQ ID NO: 1200267 - DNA, 25 bp, Homo sapien
acattcagcaggtacaactttgtcc

SEQ ID NO: 1200268 - DNA, 25 bp, Homo sapien
atcccctgccaagcctttgatgaca

SEQ ID NO: 1200269 - DNA, 25 bp, Homo sapien
gtggtaattgtcactgggccaattt

SEQ ID NO: 1200270 - DNA, 25 bp, Homo sapien
tgggatctgtggtaattgtcactgg

SEQ ID NO: 1200271 - DNA, 25 bp, Homo sapien
ctgtggtaattgtcactgggccaat

SEQ ID NO: 1200272 - DNA, 25 bp, Homo sapien
atctgtggtaattgtcactgggcca

SEQ ID NO: 1200273 - DNA, 25 bp, Homo sapien
aaacatagatgaaagaaccaggaag

SEQ ID NO: 1200274 - DNA, 25 bp, Homo sapien
ctttggaccgagcatcagtgaaaac

SEQ ID NO: 1200275 - DNA, 25 bp, Homo sapien
cacctcatgggtgagccggtaatct

SEQ ID NO: 1200276 - DNA, 25 bp, Homo sapien
aatactcatttctgggcaatcacca

SEQ ID NO: 1200277 - DNA, 25 bp, Homo sapien
cacttgaccagaacttgtagaggca

SEQ ID NO: 1200278 - DNA, 25 bp, Homo sapien
tgtagaggcaatttcttcatagact

SEQ ID NO: 1200279 - DNA, 25 bp, Homo sapien
tatccaatatgggtcctgtcatcac

SEQ ID NO: 1200280 - DNA, 25 bp, Homo sapien
caatctccagtcagaacaaatacga

SEQ ID NO: 1200281 - DNA, 25 bp, Homo sapien
taactgattttgataaggcagctgg

SEQ ID NO: 1200282 - DNA, 25 bp, Homo sapien
tgattttgataaggcagctggtaat

SEQ ID NO: 1200283 - DNA, 25 bp, Homo sapien
ctaactgattttgataaggcagctg

SEQ ID NO: 1200284 - DNA, 25 bp, Homo sapien
actgattttgataaggcagctggta

SEQ ID NO: 1200285 - DNA, 25 bp, Homo sapien
taagtaggcctcaacaatgttatgg

SEQ ID NO: 1200286 - DNA, 25 bp, Homo sapien
ttcccaaggccaaccaatgaacttg

SEQ ID NO: 1200287 - DNA, 25 bp, Homo sapien
gaacctgccctaatctacttttgct

SEQ ID NO: 1200288 - DNA, 25 bp, Homo sapien
catgagtcaggcaaggtgattcaca

SEQ ID NO: 1200289 - DNA, 25 bp, Homo sapien
gaagtaacttagtaatgtatcttca

SEQ ID NO: 1200290 - DNA, 25 bp, Homo sapien
gaaatcctccaacttttcacagttc

SEQ ID NO: 1200291 - DNA, 25 bp, Homo sapien
tttttcctgtacagtatctttatga

SEQ ID NO: 1200292 - DNA, 25 bp, Homo sapien
tattcttgtacttcctcggatgagt

SEQ ID NO: 1200293 - DNA, 25 bp, Homo sapien
gtgtattctttacccaatgacaatg

SEQ ID NO: 1200294 - DNA, 25 bp, Homo sapien
atcctaacactgtgtattctttacc

SEQ ID NO: 1200295 - DNA, 25 bp, Homo sapien
attctttacccaatgacaatgtaag

SEQ ID NO: 1200296 - DNA, 25 bp, Homo sapien
cactgtgtattctttacccaatgac

SEQ ID NO: 1200297 - DNA, 25 bp, Homo sapien
tccaaatgaatttccccaggacatc

SEQ ID NO: 1200298 - DNA, 25 bp, Homo sapien
aatgaatttccccaggacatccttt

SEQ ID NO: 1200299 - DNA, 25 bp, Homo sapien
gaatttccccaggacatcctttgtc

SEQ ID NO: 1200300 - DNA, 25 bp, Homo sapien
atttccccaggacatcctttgtctt

SEQ ID NO: 1200301 - DNA, 25 bp, Homo sapien
tattcgtgaacagaacttgaagaat

SEQ ID NO: 1200302 - DNA, 25 bp, Homo sapien
atacatattcgtgaacagaacttga

SEQ ID NO: 1200303 - DNA, 25 bp, Homo sapien
ggaagagcatttcttatgtaatgca

SEQ ID NO: 1200304 - DNA, 25 bp, Homo sapien
ttggaagagcatttcttatgtaatg

SEQ ID NO: 1200305 - DNA, 25 bp, Homo sapien
ggctgggatcaaaaggaattctcca

SEQ ID NO: 1200306 - DNA, 25 bp, Homo sapien
gaatttcaatcattggagaaggccc

SEQ ID NO: 1200307 - DNA, 25 bp, Homo sapien
tctccaagtatttacagcctgttcc

SEQ ID NO: 1200308 - DNA, 25 bp, Homo sapien
agacacagtgacctctttcaggctg

SEQ ID NO: 1200309 - DNA, 25 bp, Homo sapien
gatatttaatagctcatgcaggcca

SEQ ID NO: 1200310 - DNA, 25 bp, Homo sapien
ggcagagttatggatatttaatagc

SEQ ID NO: 1200311 - DNA, 25 bp, Homo sapien
tttcacattcactactttggcagag

SEQ ID NO: 1200312 - DNA, 25 bp, Homo sapien
cattcactactttggcagagttatg

SEQ ID NO: 1200313 - DNA, 25 bp, Homo sapien
tccagggtgggctttcgagaaaagc

SEQ ID NO: 1200314 - DNA, 25 bp, Homo sapien
taatgcgaacagagtgccttccact

SEQ ID NO: 1200315 - DNA, 25 bp, Homo sapien
caatagtactgaggccagtaatgcg

SEQ ID NO: 1200316 - DNA, 25 bp, Homo sapien
gagaaaagccagctcggaaatcaat

SEQ ID NO: 1200317 - DNA, 25 bp, Homo sapien
gaagtattgagcagtacataggtag

SEQ ID NO: 1200318 - DNA, 25 bp, Homo sapien
aattccagaagtattgagcagtaca

SEQ ID NO: 1200319 - DNA, 25 bp, Homo sapien
ttgagcagtacataggtaggtattc

SEQ ID NO: 1200320 - DNA, 25 bp, Homo sapien
tccagaagtattgagcagtacatag

SEQ ID NO: 1200321 - DNA, 25 bp, Homo sapien
tatgccataaggttttcgatgtggg

SEQ ID NO: 1200322 - DNA, 25 bp, Homo sapien
gaatagtcttaagagaacttcctga

SEQ ID NO: 1200323 - DNA, 25 bp, Homo sapien
ggaaacacttgatactctctggaag

SEQ ID NO: 1200324 - DNA, 25 bp, Homo sapien
tggtggtacaaagtcagaaatattc

SEQ ID NO: 1200325 - DNA, 25 bp, Homo sapien
caacagagcagggaatttggcccgg

SEQ ID NO: 1200326 - DNA, 25 bp, Homo sapien
tttggcccggctgcagatagtatcc

SEQ ID NO: 1200327 - DNA, 25 bp, Homo sapien
ggtctactccaagtgtaactccatt

SEQ ID NO: 1200328 - DNA, 25 bp, Homo sapien
tcaggcatcgtaactttgggagcat

SEQ ID NO: 1200329 - DNA, 25 bp, Homo sapien
tgcaatatctaagttcacactggca

SEQ ID NO: 1200330 - DNA, 25 bp, Homo sapien
gaaaccttcgtcagacaaagtgacc

SEQ ID NO: 1200331 - DNA, 25 bp, Homo sapien
caaagtgacctttgcaatatctaag

SEQ ID NO: 1200332 - DNA, 25 bp, Homo sapien
aatgcattcatagaaaccttcgtca

SEQ ID NO: 1200333 - DNA, 25 bp, Homo sapien
aaaaatgtctgtgcccgtccagtac

SEQ ID NO: 1200334 - DNA, 25 bp, Homo sapien
caaaaaatgtctgtgcccgtccagt

SEQ ID NO: 1200335 - DNA, 25 bp, Homo sapien
tcaaaaaatgtctgtgcccgtccag

SEQ ID NO: 1200336 - DNA, 25 bp, Homo sapien
gtcaaaaaatgtctgtgcccgtcca

SEQ ID NO: 1200337 - DNA, 25 bp, Homo sapien
tccaatgacagattagccaaggtcc

SEQ ID NO: 1200338 - DNA, 25 bp, Homo sapien
tgtaatccaccgcactgatgatgag

SEQ ID NO: 1200339 - DNA, 25 bp, Homo sapien
tgtgaggaaaactgaagcggctgat

SEQ ID NO: 1200340 - DNA, 25 bp, Homo sapien
cattgttaggcacttggatgaccgg

SEQ ID NO: 1200341 - DNA, 25 bp, Homo sapien
tgaaagcgataaggcacattctcaa

SEQ ID NO: 1200342 - DNA, 25 bp, Homo sapien
ttaaatatgaaagcgataaggcaca

SEQ ID NO: 1200343 - DNA, 25 bp, Homo sapien
aatatgaaagcgataaggcacattc

SEQ ID NO: 1200344 - DNA, 25 bp, Homo sapien
aagcgataaggcacattctcaatat

SEQ ID NO: 1200345 - DNA, 25 bp, Homo sapien
ggattcaccaaactgttgccatata

SEQ ID NO: 1200346 - DNA, 25 bp, Homo sapien
tatacctgggccattctataaagct

SEQ ID NO: 1200347 - DNA, 25 bp, Homo sapien
ttaagtcaaaggattcaccaaactg

SEQ ID NO: 1200348 - DNA, 25 bp, Homo sapien
aactgttgccatatacctgggccat

SEQ ID NO: 1200349 - DNA, 25 bp, Homo sapien
tacaatagctcatttacactgatcc

SEQ ID NO: 1200350 - DNA, 25 bp, Homo sapien
tgatccctatcagcaatgccaagca

SEQ ID NO: 1200351 - DNA, 25 bp, Homo sapien
gaggattctaatagcttagtttgag

SEQ ID NO: 1200352 - DNA, 25 bp, Homo sapien
tagggaaaattcactcggttgccca

SEQ ID NO: 1200353 - DNA, 25 bp, Homo sapien
tctgatgtcagaagtgaagttcggt

SEQ ID NO: 1200354 - DNA, 25 bp, Homo sapien
ggcatcagaagtgggtggaccatct

SEQ ID NO: 1200355 - DNA, 25 bp, Homo sapien
tcttgcaggacggagccttcaatct

SEQ ID NO: 1200356 - DNA, 25 bp, Homo sapien
agatcacaacctacagtttgcaatt

SEQ ID NO: 1200357 - DNA, 25 bp, Homo sapien
taactgctgatgtgattcaaataac

SEQ ID NO: 1200358 - DNA, 25 bp, Homo sapien
tttctaactgctgatgtgattcaaa

SEQ ID NO: 1200359 - DNA, 25 bp, Homo sapien
tctaactgctgatgtgattcaaata

SEQ ID NO: 1200360 - DNA, 25 bp, Homo sapien
atttctaactgctgatgtgattcaa

SEQ ID NO: 1200361 - DNA, 25 bp, Homo sapien
agaccctcctgtgaaagactgattc

SEQ ID NO: 1200362 - DNA, 25 bp, Homo sapien
ctgtgaaagactgattcttgggcat

SEQ ID NO: 1200363 - DNA, 25 bp, Homo sapien
ctcagaccctcctgtgaaagactga

SEQ ID NO: 1200364 - DNA, 25 bp, Homo sapien
cctgtgaaagactgattcttgggca

SEQ ID NO: 1200365 - DNA, 25 bp, Homo sapien
taaacatatcgttaacggtccaggc

SEQ ID NO: 1200366 - DNA, 25 bp, Homo sapien
tatcgttaacggtccaggcaatctt

SEQ ID NO: 1200367 - DNA, 25 bp, Homo sapien
cggtccaggcaatctttggtttggg

SEQ ID NO: 1200368 - DNA, 25 bp, Homo sapien
ccacgataaacatatcgttaacggt

SEQ ID NO: 1200369 - DNA, 25 bp, Homo sapien
gatccctgcatctttgggagctgca

SEQ ID NO: 1200370 - DNA, 25 bp, Homo sapien
catagatccctgcatctttgggagc

SEQ ID NO: 1200371 - DNA, 25 bp, Homo sapien
gctaggcaaccatagatccctgcat

SEQ ID NO: 1200372 - DNA, 25 bp, Homo sapien
tgctaggcaaccatagatccctgca

SEQ ID NO: 1200373 - DNA, 25 bp, Homo sapien
atgtatctgagagtagaattctgtt

SEQ ID NO: 1200374 - DNA, 25 bp, Homo sapien
aatgtatctgagagtagaattctgt

SEQ ID NO: 1200375 - DNA, 25 bp, Homo sapien
tctgagagtagaattctgtttatct

SEQ ID NO: 1200376 - DNA, 25 bp, Homo sapien
caatgtatctgagagtagaattctg

SEQ ID NO: 1200377 - DNA, 25 bp, Homo sapien
actctgaactaccatcaacttaggg

SEQ ID NO: 1200378 - DNA, 25 bp, Homo sapien
gtggaggaataccagaggttttgca

SEQ ID NO: 1200379 - DNA, 25 bp, Homo sapien
cataacggttatatccccaagggca

SEQ ID NO: 1200380 - DNA, 25 bp, Homo sapien
ggttttgcattccataacggttata

SEQ ID NO: 1200381 - DNA, 25 bp, Homo sapien
ggtataatcgccagcatccagatct

SEQ ID NO: 1200382 - DNA, 25 bp, Homo sapien
ctacacaggtataatcgccagcatc

SEQ ID NO: 1200383 - DNA, 25 bp, Homo sapien
tccagagttatcttgccagttgctc

SEQ ID NO: 1200384 - DNA, 25 bp, Homo sapien
tccagcctcattgatggctacacag

SEQ ID NO: 1200385 - DNA, 25 bp, Homo sapien
tggcctataagatctggaggcttac

SEQ ID NO: 1200386 - DNA, 25 bp, Homo sapien
aattggcctataagatctggaggct

SEQ ID NO: 1200387 - DNA, 25 bp, Homo sapien
aacaaattggcctataagatctgga

SEQ ID NO: 1200388 - DNA, 25 bp, Homo sapien
ctaaacaaattggcctataagatct

SEQ ID NO: 1200389 - DNA, 25 bp, Homo sapien
tagtcatggttcaaacacgtgttac

SEQ ID NO: 1200390 - DNA, 25 bp, Homo sapien
cccaagggcataatcaccaagaatg

SEQ ID NO: 1200391 - DNA, 25 bp, Homo sapien
tcttgcttgctagtagattcagagc

SEQ ID NO: 1200392 - DNA, 25 bp, Homo sapien
tttgggccttacatgtctaaaagca

SEQ ID NO: 1200393 - DNA, 25 bp, Homo sapien
gacacatcagcaggttcttgtatga

SEQ ID NO: 1200394 - DNA, 25 bp, Homo sapien
tgttggttctggataaccctgaaca

SEQ ID NO: 1200395 - DNA, 25 bp, Homo sapien
aaaaggtcttgagaaaattggcatg

SEQ ID NO: 1200396 - DNA, 25 bp, Homo sapien
gagccaatttccatagacacatcag

SEQ ID NO: 1200397 - DNA, 25 bp, Homo sapien
tgtgttggcaagattaatatactat

SEQ ID NO: 1200398 - DNA, 25 bp, Homo sapien
taaatagcaatacctatgtataaaa

SEQ ID NO: 1200399 - DNA, 25 bp, Homo sapien
acatattcgtacaaaatatatttcc

SEQ ID NO: 1200400 - DNA, 25 bp, Homo sapien
cataaaagtacatattcgtacaaaa

SEQ ID NO: 1200401 - DNA, 25 bp, Homo sapien
ggttcctttatcacttgcccataag

SEQ ID NO: 1200402 - DNA, 25 bp, Homo sapien
taggttcctttatcacttgcccata

SEQ ID NO: 1200403 - DNA, 25 bp, Homo sapien
tctctgactggatctttccaaactg

SEQ ID NO: 1200404 - DNA, 25 bp, Homo sapien
cactgttactgttgtctctgactgg

SEQ ID NO: 1200405 - DNA, 25 bp, Homo sapien
tcaagagagagcacaggcactttca

SEQ ID NO: 1200406 - DNA, 25 bp, Homo sapien
taaatcaagagagagcacaggcact

SEQ ID NO: 1200407 - DNA, 25 bp, Homo sapien
ctaaatcaagagagagcacaggcac

SEQ ID NO: 1200408 - DNA, 25 bp, Homo sapien
agagagagcacaggcactttcaact

SEQ ID NO: 1200409 - DNA, 25 bp, Homo sapien
gatttccagctaacagagtacaggg

SEQ ID NO: 1200410 - DNA, 25 bp, Homo sapien
tacagggcaaagtaagctgctgtcc

SEQ ID NO: 1200411 - DNA, 25 bp, Homo sapien
ccactgaagggctgattccaataag

SEQ ID NO: 1200412 - DNA, 25 bp, Homo sapien
caccgacgttctggaatgggatttc

SEQ ID NO: 1200413 - DNA, 25 bp, Homo sapien
ggccacacaagtatattcaccacca

SEQ ID NO: 1200414 - DNA, 25 bp, Homo sapien
catgcacaaccacagaggtagtttt

SEQ ID NO: 1200415 - DNA, 25 bp, Homo sapien
ctgaagctgaactctttcaatatgg

SEQ ID NO: 1200416 - DNA, 25 bp, Homo sapien
tgttattggtcccagcaacgttact

SEQ ID NO: 1200417 - DNA, 25 bp, Homo sapien
tctatactcaggaatcacttagtga

SEQ ID NO: 1200418 - DNA, 25 bp, Homo sapien
gctgacataagcctacatacagaga

SEQ ID NO: 1200419 - DNA, 25 bp, Homo sapien
aaatgggctgtttaaccactacata

SEQ ID NO: 1200420 - DNA, 25 bp, Homo sapien
taatgcatgtctccaatcactgtcc

SEQ ID NO: 1200421 - DNA, 25 bp, Homo sapien
tgtactgagtatctgctgcccatgc

SEQ ID NO: 1200422 - DNA, 25 bp, Homo sapien
ctgcccatgctgaatggttggcaga

SEQ ID NO: 1200423 - DNA, 25 bp, Homo sapien
gatgacagacggtttgggatttcca

SEQ ID NO: 1200424 - DNA, 25 bp, Homo sapien
acttgctttgcatggtaaagttact

SEQ ID NO: 1200425 - DNA, 25 bp, Homo sapien
tttccttttggcgtagccggctgta

SEQ ID NO: 1200426 - DNA, 25 bp, Homo sapien
gataccacatacagactaccatcag

SEQ ID NO: 1200427 - DNA, 25 bp, Homo sapien
tgtattggtggcagtgcagacatac

SEQ ID NO: 1200428 - DNA, 25 bp, Homo sapien
cctgctgaaaacttagcactgctgg

SEQ ID NO: 1200429 - DNA, 25 bp, Homo sapien
cggagatctcaacaggcttatcctg

SEQ ID NO: 1200430 - DNA, 25 bp, Homo sapien
tcctcgttgatctccaaacactctg

SEQ ID NO: 1200431 - DNA, 25 bp, Homo sapien
ggcttatcctgggacagtcctcgtt

SEQ ID NO: 1200432 - DNA, 25 bp, Homo sapien
tgggacagtcctcgttgatctccaa

SEQ ID NO: 1200433 - DNA, 25 bp, Homo sapien
tctttggcccaagtaattatgggtg

SEQ ID NO: 1200434 - DNA, 25 bp, Homo sapien
ggtggaggtaagctcttcacttcac

SEQ ID NO: 1200435 - DNA, 25 bp, Homo sapien
agtaattatgggtggaggtaagctc

SEQ ID NO: 1200436 - DNA, 25 bp, Homo sapien
gcccaagtaattatgggtggaggta

SEQ ID NO: 1200437 - DNA, 25 bp, Homo sapien
gatcttcattgaaccagaagggagg

SEQ ID NO: 1200438 - DNA, 25 bp, Homo sapien
atcccactatctgaagtgcgggttt

SEQ ID NO: 1200439 - DNA, 25 bp, Homo sapien
tctgaagtgcgggtttcagtgatct

SEQ ID NO: 1200440 - DNA, 25 bp, Homo sapien
atttaatttgacagcctgagtcaca

SEQ ID NO: 1200441 - DNA, 25 bp, Homo sapien
cagggttgtcatatgttctcatttc

SEQ ID NO: 1200442 - DNA, 25 bp, Homo sapien
ttctttaatcactctatatacaatt

SEQ ID NO: 1200443 - DNA, 25 bp, Homo sapien
ctttgagatgtttaggtccacgctg

SEQ ID NO: 1200444 - DNA, 25 bp, Homo sapien
gaggagtcccttgagcattacatgg

SEQ ID NO: 1200445 - DNA, 25 bp, Homo sapien
ttccgtctggattgctaacatggtg

SEQ ID NO: 1200446 - DNA, 25 bp, Homo sapien
caggtgattacaggaagaggagtcc

SEQ ID NO: 1200447 - DNA, 25 bp, Homo sapien
aaagtagtgttatatggaggttcta

SEQ ID NO: 1200448 - DNA, 25 bp, Homo sapien
ttgcaggacatggaaattcaatgcg

SEQ ID NO: 1200449 - DNA, 25 bp, Homo sapien
gaaattcaatgcgttgattggccac

SEQ ID NO: 1200450 - DNA, 25 bp, Homo sapien
tgttatatggaggttctagatcttc

SEQ ID NO: 1200451 - DNA, 25 bp, Homo sapien
gcttcattgactgccacacagatgt

SEQ ID NO: 1200452 - DNA, 25 bp, Homo sapien
tcttccaagatagaaatgccaggct

SEQ ID NO: 1200453 - DNA, 25 bp, Homo sapien
gatgtactccccattgtcatagggt

SEQ ID NO: 1200454 - DNA, 25 bp, Homo sapien
gcctgtcaactctctaccattgtgt

SEQ ID NO: 1200455 - DNA, 25 bp, Homo sapien
ctggacattatctttataccacata

SEQ ID NO: 1200456 - DNA, 25 bp, Homo sapien
tgatttaacaacaccgacacatttg

SEQ ID NO: 1200457 - DNA, 25 bp, Homo sapien
caccgacacatttgtaacttgttct

SEQ ID NO: 1200458 - DNA, 25 bp, Homo sapien
cagaagagattggtcagctgattta

SEQ ID NO: 1200459 - DNA, 25 bp, Homo sapien
catcaatgttaaagtacttctgaga

SEQ ID NO: 1200460 - DNA, 25 bp, Homo sapien
ctagcacatcaatgttaaagtactt

SEQ ID NO: 1200461 - DNA, 25 bp, Homo sapien
ttaattgctttgcaggaatatcttc

SEQ ID NO: 1200462 - DNA, 25 bp, Homo sapien
tatcttcccattgttcacagtctga

SEQ ID NO: 1200463 - DNA, 25 bp, Homo sapien
cacggttgaggacaactgagacttc

SEQ ID NO: 1200464 - DNA, 25 bp, Homo sapien
gagtgcctttgacctggcattcaag

SEQ ID NO: 1200465 - DNA, 25 bp, Homo sapien
gcattcaagggcgacgtcacggttg

SEQ ID NO: 1200466 - DNA, 25 bp, Homo sapien
tgaatatcaggaaagggagtgcctt

SEQ ID NO: 1200467 - DNA, 25 bp, Homo sapien
tcaacattaggatcgcccaaaaata

SEQ ID NO: 1200468 - DNA, 25 bp, Homo sapien
gttcaacattaggatcgcccaaaaa

SEQ ID NO: 1200469 - DNA, 25 bp, Homo sapien
gaagttcaacattaggatcgcccaa

SEQ ID NO: 1200470 - DNA, 25 bp, Homo sapien
ctagaagttcaacattaggatcgcc

SEQ ID NO: 1200471 - DNA, 25 bp, Homo sapien
tagcgccccttgtcatttctccgtg

SEQ ID NO: 1200472 - DNA, 25 bp, Homo sapien
tatagatagtcagttttatatcctt

SEQ ID NO: 1200473 - DNA, 25 bp, Homo sapien
tagacacagtacattggtagcgccc

SEQ ID NO: 1200474 - DNA, 25 bp, Homo sapien
tctccgtgcattctttaaatgtaag

SEQ ID NO: 1200475 - DNA, 25 bp, Homo sapien
ctgtggtgacatttcctcctttaat

SEQ ID NO: 1200476 - DNA, 25 bp, Homo sapien
tgtggtgacatttcctcctttaata

SEQ ID NO: 1200477 - DNA, 25 bp, Homo sapien
cagcaacattggctacgtgacacgt

SEQ ID NO: 1200478 - DNA, 25 bp, Homo sapien
caggcattggaagtccccgtgtttc

SEQ ID NO: 1200479 - DNA, 25 bp, Homo sapien
gacacgtatatgttgctgaatcaga

SEQ ID NO: 1200480 - DNA, 25 bp, Homo sapien
ccttataccaagtaatggcaggcat

SEQ ID NO: 1200481 - DNA, 25 bp, Homo sapien
tattcaaaggcgtggccaagttgcc

SEQ ID NO: 1200482 - DNA, 25 bp, Homo sapien
caccagcttctatgcggatattgtc

SEQ ID NO: 1200483 - DNA, 25 bp, Homo sapien
tagccacgcatatgtactgtcctcg

SEQ ID NO: 1200484 - DNA, 25 bp, Homo sapien
gtcattagctttcacaggtacacca

SEQ ID NO: 1200485 - DNA, 25 bp, Homo sapien
catctcctccttctatagctggtgg

SEQ ID NO: 1200486 - DNA, 25 bp, Homo sapien
gggagagcctgtcacatgacaatct

SEQ ID NO: 1200487 - DNA, 25 bp, Homo sapien
tagctccagtaagttattaaccatc

SEQ ID NO: 1200488 - DNA, 25 bp, Homo sapien
taaccatcacaatgaagtaagatgt

SEQ ID NO: 1200489 - DNA, 25 bp, Homo sapien
tacgcatgcatacctgaataaaaat

SEQ ID NO: 1200490 - DNA, 25 bp, Homo sapien
gagctggcatattgttggaacccaa

SEQ ID NO: 1200491 - DNA, 25 bp, Homo sapien
ttgtccaatttcctagttgcttact

SEQ ID NO: 1200492 - DNA, 25 bp, Homo sapien
cccaataattatgggttgagttctt

SEQ ID NO: 1200493 - DNA, 25 bp, Homo sapien
ttgagcctgagcaataaccagtttg

SEQ ID NO: 1200494 - DNA, 25 bp, Homo sapien
taaaggcctgtgtttgacacttgag

SEQ ID NO: 1200495 - DNA, 25 bp, Homo sapien
agcagtatttgctgccatgcaccga

SEQ ID NO: 1200496 - DNA, 25 bp, Homo sapien
taaccagtttgcgtccatttaataa

SEQ ID NO: 1200497 - DNA, 25 bp, Homo sapien
ccttgggcagtgttcacaggctggt

SEQ ID NO: 1200498 - DNA, 25 bp, Homo sapien
tatgcactgcaaggcgacaggcttg

SEQ ID NO: 1200499 - DNA, 25 bp, Homo sapien
ttaccacaactctctcagaaaggcc

SEQ ID NO: 1200500 - DNA, 25 bp, Homo sapien
gtaatggaaggatttggaatcccat

SEQ ID NO: 1200501 - DNA, 25 bp, Homo sapien
tccagctgcgttggtagccacacat

SEQ ID NO: 1200502 - DNA, 25 bp, Homo sapien
caatttgtagaactcgaccagaaga

SEQ ID NO: 1200503 - DNA, 25 bp, Homo sapien
cttccaacagggttttggcaatttg

SEQ ID NO: 1200504 - DNA, 25 bp, Homo sapien
catgaacatgcagttgaatgtgctg

SEQ ID NO: 1200505 - DNA, 25 bp, Homo sapien
ccagcatcttccagactaggtggtt

SEQ ID NO: 1200506 - DNA, 25 bp, Homo sapien
tttccagcatcttccagactaggtg

SEQ ID NO: 1200507 - DNA, 25 bp, Homo sapien
tccagcatcttccagactaggtggt

SEQ ID NO: 1200508 - DNA, 25 bp, Homo sapien
ttttccagcatcttccagactaggt

SEQ ID NO: 1200509 - DNA, 25 bp, Homo sapien
gggttgctcaccaacacagtctcat

SEQ ID NO: 1200510 - DNA, 25 bp, Homo sapien
ctccagctgtacagggttgctcacc

SEQ ID NO: 1200511 - DNA, 25 bp, Homo sapien
tgccttacactccagctgtacaggg

SEQ ID NO: 1200512 - DNA, 25 bp, Homo sapien
caggcacaggatttccagctgcctt

SEQ ID NO: 1200513 - DNA, 25 bp, Homo sapien
agctgagttgatggccacgcattta

SEQ ID NO: 1200514 - DNA, 25 bp, Homo sapien
cagcatctgagatctgggcactttc

SEQ ID NO: 1200515 - DNA, 25 bp, Homo sapien
gggcactttcaatatcaatgatctg

SEQ ID NO: 1200516 - DNA, 25 bp, Homo sapien
gaaagtcatgctggtggaacctgag

SEQ ID NO: 1200517 - DNA, 25 bp, Homo sapien
ggcttcacattctaacctcaccggg

SEQ ID NO: 1200518 - DNA, 25 bp, Homo sapien
actgccaccatgttattgctgccag

SEQ ID NO: 1200519 - DNA, 25 bp, Homo sapien
tcaccgggttattaaccaccactgc

SEQ ID NO: 1200520 - DNA, 25 bp, Homo sapien
catctttcaaccaggtcagacttgg

SEQ ID NO: 1200521 - DNA, 25 bp, Homo sapien
tgtcgctgatttgtgcactggtcaa

SEQ ID NO: 1200522 - DNA, 25 bp, Homo sapien
tactcggaggtcaatgtccctttgc

SEQ ID NO: 1200523 - DNA, 25 bp, Homo sapien
gctaggattcgaccaccagagagaa

SEQ ID NO: 1200524 - DNA, 25 bp, Homo sapien
agcagcattcactgccacgcaggtg

SEQ ID NO: 1200525 - DNA, 25 bp, Homo sapien
ttctgttcttctcccataatatttg

SEQ ID NO: 1200526 - DNA, 25 bp, Homo sapien
tcagcaaggggtggccgtcttttaa

SEQ ID NO: 1200527 - DNA, 25 bp, Homo sapien
tcttctcccataatatttggcggaa

SEQ ID NO: 1200528 - DNA, 25 bp, Homo sapien
ggggaatagcatcactttgacatag

SEQ ID NO: 1200529 - DNA, 25 bp, Homo sapien
caagtgtaacgaccagtgtcttgaa

SEQ ID NO: 1200530 - DNA, 25 bp, Homo sapien
gcaacatttgttgcttcacaagtgt

SEQ ID NO: 1200531 - DNA, 25 bp, Homo sapien
catttgttgcttcacaagtgtaacg

SEQ ID NO: 1200532 - DNA, 25 bp, Homo sapien
gcttcacaagtgtaacgaccagtgt

SEQ ID NO: 1200533 - DNA, 25 bp, Homo sapien
cacacaacagactaatgagattccc

SEQ ID NO: 1200534 - DNA, 25 bp, Homo sapien
atttgggggtggaataccacttgat

SEQ ID NO: 1200535 - DNA, 25 bp, Homo sapien
ggtggaataccacttgattcacaca

SEQ ID NO: 1200536 - DNA, 25 bp, Homo sapien
gactgtaagttgagtaagttcatca

SEQ ID NO: 1200537 - DNA, 25 bp, Homo sapien
atagagtgctgcatcagacttttca

SEQ ID NO: 1200538 - DNA, 25 bp, Homo sapien
agcaacattcgacgccacacatgaa

SEQ ID NO: 1200539 - DNA, 25 bp, Homo sapien
taaaattctaactcgccccatggaa

SEQ ID NO: 1200540 - DNA, 25 bp, Homo sapien
aattgaaatttgtaattgcctgccc

SEQ ID NO: 1200541 - DNA, 25 bp, Homo sapien
ttccctcgggtcacaataatttcag

SEQ ID NO: 1200542 - DNA, 25 bp, Homo sapien
agcaacacacacataacggcctgtg

SEQ ID NO: 1200543 - DNA, 25 bp, Homo sapien
cactgttggtggtggaataccctgc

SEQ ID NO: 1200544 - DNA, 25 bp, Homo sapien
ccactgttggttatggttggtctaa

SEQ ID NO: 1200545 - DNA, 25 bp, Homo sapien
tttgaaccaggttatggaaggcagg

SEQ ID NO: 1200546 - DNA, 25 bp, Homo sapien
ggtgacctgtggtttcctatgatgc

SEQ ID NO: 1200547 - DNA, 25 bp, Homo sapien
gaattccagaagcttcacaagtcaa

SEQ ID NO: 1200548 - DNA, 25 bp, Homo sapien
ttgctaaggctgacaggccacccat

SEQ ID NO: 1200549 - DNA, 25 bp, Homo sapien
gaagcaaaccatctttttaagataa

SEQ ID NO: 1200550 - DNA, 25 bp, Homo sapien
tgcagaagcaaaccatctttttaag

SEQ ID NO: 1200551 - DNA, 25 bp, Homo sapien
ctgcagaagcaaaccatctttttaa

SEQ ID NO: 1200552 - DNA, 25 bp, Homo sapien
cagaagcaaaccatctttttaagat

SEQ ID NO: 1200553 - DNA, 25 bp, Homo sapien
ttcaccagctgcattccttacaacg

SEQ ID NO: 1200554 - DNA, 25 bp, Homo sapien
cgcaagtatattggccagcatcttc

SEQ ID NO: 1200555 - DNA, 25 bp, Homo sapien
ccattgtggtctgcatcagccgtag

SEQ ID NO: 1200556 - DNA, 25 bp, Homo sapien
atactgaaagcccaaagatttttct

SEQ ID NO: 1200557 - DNA, 25 bp, Homo sapien
tattttcacccacaatatgaggtgg

SEQ ID NO: 1200558 - DNA, 25 bp, Homo sapien
aatgtattttcacccacaatatgag

SEQ ID NO: 1200559 - DNA, 25 bp, Homo sapien
ttttcacccacaatatgaggtggta

SEQ ID NO: 1200560 - DNA, 25 bp, Homo sapien
tccaatgtattttcacccacaatat

SEQ ID NO: 1200561 - DNA, 25 bp, Homo sapien
ctgtcacttcacaagtcagcgtaac

SEQ ID NO: 1200562 - DNA, 25 bp, Homo sapien
tcacttcacaagtcagcgtaacact

SEQ ID NO: 1200563 - DNA, 25 bp, Homo sapien
cttcacaagtcagcgtaacactctg

SEQ ID NO: 1200564 - DNA, 25 bp, Homo sapien
acaagtcagcgtaacactctgtttc

SEQ ID NO: 1200565 - DNA, 25 bp, Homo sapien
gtggcacctggacattggtaatttg

SEQ ID NO: 1200566 - DNA, 25 bp, Homo sapien
cacctggacattggtaatttgaaga

SEQ ID NO: 1200567 - DNA, 25 bp, Homo sapien
gaaaacggccaccagatataatgtg

SEQ ID NO: 1200568 - DNA, 25 bp, Homo sapien
tcttgtggccagctggactggaagc

SEQ ID NO: 1200569 - DNA, 25 bp, Homo sapien
gttagattctaaaggagtgccatcc

SEQ ID NO: 1200570 - DNA, 25 bp, Homo sapien
catcactacctacaccagcaattgt

SEQ ID NO: 1200571 - DNA, 25 bp, Homo sapien
gaagaatacgaatatttcggttaga

SEQ ID NO: 1200572 - DNA, 25 bp, Homo sapien
cttcacagaccaaagatgtagggct

SEQ ID NO: 1200573 - DNA, 25 bp, Homo sapien
ttgaggatctgcagagttctgcctc

SEQ ID NO: 1200574 - DNA, 25 bp, Homo sapien
cagcctcattcgtggctacacaaga

SEQ ID NO: 1200575 - DNA, 25 bp, Homo sapien
agagtatcttccagcattgtcctcc

SEQ ID NO: 1200576 - DNA, 25 bp, Homo sapien
tcacttcatagtgctttatcatttc

SEQ ID NO: 1200577 - DNA, 25 bp, Homo sapien
aggtcccctttattgattatgggtg

SEQ ID NO: 1200578 - DNA, 25 bp, Homo sapien
tcccctttattgattatgggtggaa

SEQ ID NO: 1200579 - DNA, 25 bp, Homo sapien
ccaaaggtcccctttattgattatg

SEQ ID NO: 1200580 - DNA, 25 bp, Homo sapien
caaaggtcccctttattgattatgg

SEQ ID NO: 1200581 - DNA, 25 bp, Homo sapien
ttcacattccaaggtcagagtgttg

SEQ ID NO: 1200582 - DNA, 25 bp, Homo sapien
cattccaaggtcagagtgttgttta

SEQ ID NO: 1200583 - DNA, 25 bp, Homo sapien
attccaaggtcagagtgttgtttac

SEQ ID NO: 1200584 - DNA, 25 bp, Homo sapien
cacattccaaggtcagagtgttgtt

SEQ ID NO: 1200585 - DNA, 25 bp, Homo sapien
gctgagggaggcagaaggaattgca

SEQ ID NO: 1200586 - DNA, 25 bp, Homo sapien
gagggaggcagaaggaattgcatac

SEQ ID NO: 1200587 - DNA, 25 bp, Homo sapien
cagctgagggaggcagaaggaattg

SEQ ID NO: 1200588 - DNA, 25 bp, Homo sapien
ctgagggaggcagaaggaattgcat

SEQ ID NO: 1200589 - DNA, 25 bp, Homo sapien
ctgtgattcaattataacaatgtta

SEQ ID NO: 1200590 - DNA, 25 bp, Homo sapien
gtgattcaattataacaatgttagc

SEQ ID NO: 1200591 - DNA, 25 bp, Homo sapien
tgtgattcaattataacaatgttag

SEQ ID NO: 1200592 - DNA, 25 bp, Homo sapien
tgtgtccattcgcagcaatattaac

SEQ ID NO: 1200593 - DNA, 25 bp, Homo sapien
tcacctgcaatgttagatgctacac

SEQ ID NO: 1200594 - DNA, 25 bp, Homo sapien
ttaacatgatcatcggatttaaggg

SEQ ID NO: 1200595 - DNA, 25 bp, Homo sapien
gatgctacacaagtatatcgtccgg

SEQ ID NO: 1200596 - DNA, 25 bp, Homo sapien
ggtggccatctttgtaccatgtcag

SEQ ID NO: 1200597 - DNA, 25 bp, Homo sapien
gtggccatctttgtaccatgtcagt

SEQ ID NO: 1200598 - DNA, 25 bp, Homo sapien
aaatgggattgttgatgatcacatc

SEQ ID NO: 1200599 - DNA, 25 bp, Homo sapien
aatgggattgttgatgatcacatct

SEQ ID NO: 1200600 - DNA, 25 bp, Homo sapien
gccacacatgtgtatctcccagcat

SEQ ID NO: 1200601 - DNA, 25 bp, Homo sapien
catcatattgaagggaatcttctcc

SEQ ID NO: 1200602 - DNA, 25 bp, Homo sapien
cgagtacacggacatcatattgaag

SEQ ID NO: 1200603 - DNA, 25 bp, Homo sapien
tactttagcccgaggaatctgcaac

SEQ ID NO: 1200604 - DNA, 25 bp, Homo sapien
catcttctagcaagggctgtccatc

SEQ ID NO: 1200605 - DNA, 25 bp, Homo sapien
cacggtgacctcttcagggagatca

SEQ ID NO: 1200606 - DNA, 25 bp, Homo sapien
gcagaattcgtccattagatagaaa

SEQ ID NO: 1200607 - DNA, 25 bp, Homo sapien
tgcactcttgttcaccagcacggtg

SEQ ID NO: 1200608 - DNA, 25 bp, Homo sapien
cacacacatacctgccgatatctgt

SEQ ID NO: 1200609 - DNA, 25 bp, Homo sapien
tacctgccgatatctgttatttgag

SEQ ID NO: 1200610 - DNA, 25 bp, Homo sapien
cacatacctgccgatatctgttatt

SEQ ID NO: 1200611 - DNA, 25 bp, Homo sapien
cctgccgatatctgttatttgagta

SEQ ID NO: 1200612 - DNA, 25 bp, Homo sapien
taaaacctaagatgccaacagactg

SEQ ID NO: 1200613 - DNA, 25 bp, Homo sapien
tcagccatggtgagctacctaagtg

SEQ ID NO: 1200614 - DNA, 25 bp, Homo sapien
taaactgcctacattgaaatcctgg

SEQ ID NO: 1200615 - DNA, 25 bp, Homo sapien
catttggcacagcacctggtaggtt

SEQ ID NO: 1200616 - DNA, 25 bp, Homo sapien
gacctcacaggtcaaagagatgaaa

SEQ ID NO: 1200617 - DNA, 25 bp, Homo sapien
gagatgaaattgttcaccacgacgg

SEQ ID NO: 1200618 - DNA, 25 bp, Homo sapien
ttaggaccaatgacacttggaggaa

SEQ ID NO: 1200619 - DNA, 25 bp, Homo sapien
gatgggctgttcattcttgagccag

SEQ ID NO: 1200620 - DNA, 25 bp, Homo sapien
tattcaccaccatctgataccttgg

SEQ ID NO: 1200621 - DNA, 25 bp, Homo sapien
tagctatacaagtgtattcaccacc

SEQ ID NO: 1200622 - DNA, 25 bp, Homo sapien
ccttggcccgaataatctgtagagt

SEQ ID NO: 1200623 - DNA, 25 bp, Homo sapien
cgccagcttgattgatagctataca

SEQ ID NO: 1200624 - DNA, 25 bp, Homo sapien
tggaggtggcacagcgttcgactca

SEQ ID NO: 1200625 - DNA, 25 bp, Homo sapien
gagtagactctgttatcatccgccc

SEQ ID NO: 1200626 - DNA, 25 bp, Homo sapien
tcttataccaagtgatgactggagg

SEQ ID NO: 1200627 - DNA, 25 bp, Homo sapien
cactgtcatggtctttaatgcttgg

SEQ ID NO: 1200628 - DNA, 25 bp, Homo sapien
gtcatgacactcaaacaagaataaa

SEQ ID NO: 1200629 - DNA, 25 bp, Homo sapien
aggtgtcatgacactcaaacaagaa

SEQ ID NO: 1200630 - DNA, 25 bp, Homo sapien
gtgtcatgacactcaaacaagaata

SEQ ID NO: 1200631 - DNA, 25 bp, Homo sapien
caaggtgtcatgacactcaaacaag

SEQ ID NO: 1200632 - DNA, 25 bp, Homo sapien
tacatacatactggcctgtgtcaga

SEQ ID NO: 1200633 - DNA, 25 bp, Homo sapien
cccgtcctgctacatttatagctct

SEQ ID NO: 1200634 - DNA, 25 bp, Homo sapien
gctctacatacatactggcctgtgt

SEQ ID NO: 1200635 - DNA, 25 bp, Homo sapien
aaatttttatcatcccgtcctgcta

SEQ ID NO: 1200636 - DNA, 25 bp, Homo sapien
tgctgatcgtctccacaatcacttc

SEQ ID NO: 1200637 - DNA, 25 bp, Homo sapien
ggttctttaaccatgctatcgtggg

SEQ ID NO: 1200638 - DNA, 25 bp, Homo sapien
ggcatcacatgttaatgtcacagga

SEQ ID NO: 1200639 - DNA, 25 bp, Homo sapien
tgtcacaggattgctgatcgtctcc

SEQ ID NO: 1200640 - DNA, 25 bp, Homo sapien
gaccgggcaatctggagtttgctac

SEQ ID NO: 1200641 - DNA, 25 bp, Homo sapien
gcaatacatgtatagtttccactat

SEQ ID NO: 1200642 - DNA, 25 bp, Homo sapien
ccctccatatttgaagcaatacatg

SEQ ID NO: 1200643 - DNA, 25 bp, Homo sapien
aatacgaacttccagtgagtcagaa

SEQ ID NO: 1200644 - DNA, 25 bp, Homo sapien
tctgtttcaccactagctatgggct

SEQ ID NO: 1200645 - DNA, 25 bp, Homo sapien
gccattgaataagtggagtaggaat

SEQ ID NO: 1200646 - DNA, 25 bp, Homo sapien
gaatgccatttgcattgcagaccag

SEQ ID NO: 1200647 - DNA, 25 bp, Homo sapien
cagctcaacattttctcctagaagg

SEQ ID NO: 1200648 - DNA, 25 bp, Homo sapien
ctacggaaaagatcataacagaggg

SEQ ID NO: 1200649 - DNA, 25 bp, Homo sapien
gctgagatgagattgaatctatttc

SEQ ID NO: 1200650 - DNA, 25 bp, Homo sapien
agaggggctgagatgagattgaatc

SEQ ID NO: 1200651 - DNA, 25 bp, Homo sapien
gggctgagatgagattgaatctatt

SEQ ID NO: 1200652 - DNA, 25 bp, Homo sapien
ccgtgtcagatgtaagagctccata

SEQ ID NO: 1200653 - DNA, 25 bp, Homo sapien
taaatgtttaatgtgctgccatttg

SEQ ID NO: 1200654 - DNA, 25 bp, Homo sapien
acatgtgtatttccccgtgtcagat

SEQ ID NO: 1200655 - DNA, 25 bp, Homo sapien
tctccagcgggattagtagcaacac

SEQ ID NO: 1200656 - DNA, 25 bp, Homo sapien
tgctgccagtaaccggatatgggag

SEQ ID NO: 1200657 - DNA, 25 bp, Homo sapien
gtcctgctgccagtaaccggatatg

SEQ ID NO: 1200658 - DNA, 25 bp, Homo sapien
cctgctgccagtaaccggatatggg

SEQ ID NO: 1200659 - DNA, 25 bp, Homo sapien
tcatctttattacccctaattgtag

SEQ ID NO: 1200660 - DNA, 25 bp, Homo sapien
tacacagcgacatcagacacctgag

SEQ ID NO: 1200661 - DNA, 25 bp, Homo sapien
ctgttggaggccacacaagtataca

SEQ ID NO: 1200662 - DNA, 25 bp, Homo sapien
tgttggaggccacacaagtatacac

SEQ ID NO: 1200663 - DNA, 25 bp, Homo sapien
acacaagtatacacagcgacatcag

SEQ ID NO: 1200664 - DNA, 25 bp, Homo sapien
gagctgcaggaccattccatgggtg

SEQ ID NO: 1200665 - DNA, 25 bp, Homo sapien
cagatgggcatcaagccccagaggc

SEQ ID NO: 1200666 - DNA, 25 bp, Homo sapien
gcaatgcaggtgtactttcccgaat

SEQ ID NO: 1200667 - DNA, 25 bp, Homo sapien
tcagtaatgcatgccatagaggtgg

SEQ ID NO: 1200668 - DNA, 25 bp, Homo sapien
tgcacttgatccgtctgtggaaggg

SEQ ID NO: 1200669 - DNA, 25 bp, Homo sapien
aatgcaggtaagttcaagtgggtta

SEQ ID NO: 1200670 - DNA, 25 bp, Homo sapien
tcctcctagagtttgcacttgatcc

SEQ ID NO: 1200671 - DNA, 25 bp, Homo sapien
tcagatccattaatgtgaggtggtt

SEQ ID NO: 1200672 - DNA, 25 bp, Homo sapien
ggatgccagacatgtatatcttcct

SEQ ID NO: 1200673 - DNA, 25 bp, Homo sapien
cagacatgtatatcttcctgtatcc

SEQ ID NO: 1200674 - DNA, 25 bp, Homo sapien
ctctcactagatattccttatcatc

SEQ ID NO: 1200675 - DNA, 25 bp, Homo sapien
gccagacatgtatatcttcctgtat

SEQ ID NO: 1200676 - DNA, 25 bp, Homo sapien
tgcattccaatgtcacttgtctgtt

SEQ ID NO: 1200677 - DNA, 25 bp, Homo sapien
ttccgtaacacagtgatatcccggg

SEQ ID NO: 1200678 - DNA, 25 bp, Homo sapien
ggcactgcatctgacttgcattcca

SEQ ID NO: 1200679 - DNA, 25 bp, Homo sapien
tctgagccaagtaattacaggtggg

SEQ ID NO: 1200680 - DNA, 25 bp, Homo sapien
tataattggctgtatcacctaggtc

SEQ ID NO: 1200681 - DNA, 25 bp, Homo sapien
tccagataggattcgcactcgaggt

SEQ ID NO: 1200682 - DNA, 25 bp, Homo sapien
ttgatttgcaagtatctccctccag

SEQ ID NO: 1200683 - DNA, 25 bp, Homo sapien
tgctggcaacacaggtataattggc

SEQ ID NO: 1200684 - DNA, 25 bp, Homo sapien
gagttggcacaccttcagcgatgca

SEQ ID NO: 1200685 - DNA, 25 bp, Homo sapien
ttgcatgattcccagctagaacagc

SEQ ID NO: 1200686 - DNA, 25 bp, Homo sapien
gatgcattccaatacagttgactta

SEQ ID NO: 1200687 - DNA, 25 bp, Homo sapien
ttctccatgttatccttggagttgg

SEQ ID NO: 1200688 - DNA, 25 bp, Homo sapien
gaatatgaaggaatccattttccaa

SEQ ID NO: 1200689 - DNA, 25 bp, Homo sapien
ttggtggccatacacaaataccgtc

SEQ ID NO: 1200690 - DNA, 25 bp, Homo sapien
gacatgtgctgattgaatatgaagg

SEQ ID NO: 1200691 - DNA, 25 bp, Homo sapien
ggacctgtaaatctattcgcctgcg

SEQ ID NO: 1200692 - DNA, 25 bp, Homo sapien
ccggatgttgtctataaacggatat

SEQ ID NO: 1200693 - DNA, 25 bp, Homo sapien
tagtttaggcaatcaaagagcattt

SEQ ID NO: 1200694 - DNA, 25 bp, Homo sapien
caatcaaagagcatttgacacagag

SEQ ID NO: 1200695 - DNA, 25 bp, Homo sapien
catttgacacagagaccggatgttg

SEQ ID NO: 1200696 - DNA, 25 bp, Homo sapien
catgttggtaggacccggagcaata

SEQ ID NO: 1200697 - DNA, 25 bp, Homo sapien
gccagagtagtttgaacatttacta

SEQ ID NO: 1200698 - DNA, 25 bp, Homo sapien
acattaagaagatgcccattttttc

SEQ ID NO: 1200699 - DNA, 25 bp, Homo sapien
tggttttggtatcccagtagcctca

SEQ ID NO: 1200700 - DNA, 25 bp, Homo sapien
gtcacagtacattcataggttgcag

SEQ ID NO: 1200701 - DNA, 25 bp, Homo sapien
cattcataggttgcagtgtcatcca

SEQ ID NO: 1200702 - DNA, 25 bp, Homo sapien
ggttgcagtgtcatccacagaaggg

SEQ ID NO: 1200703 - DNA, 25 bp, Homo sapien
atctccagcaccgtttgtcacagta

SEQ ID NO: 1200704 - DNA, 25 bp, Homo sapien
tgaattgagggaaatggaactcccg

SEQ ID NO: 1200705 - DNA, 25 bp, Homo sapien
ggaactcccgaagcagtgcaggtaa

SEQ ID NO: 1200706 - DNA, 25 bp, Homo sapien
gaattctatagccatctcccctggg

SEQ ID NO: 1200707 - DNA, 25 bp, Homo sapien
tgtaggctcatcagctatggaaggt

SEQ ID NO: 1200708 - DNA, 25 bp, Homo sapien
agagccagccgcattcctagcgaca

SEQ ID NO: 1200709 - DNA, 25 bp, Homo sapien
attgggtggcaagtatttcaattgc

SEQ ID NO: 1200710 - DNA, 25 bp, Homo sapien
gtcacgtgtcgatgtgcagagccag

SEQ ID NO: 1200711 - DNA, 25 bp, Homo sapien
tagcgacacaagtgtatcttccagc

SEQ ID NO: 1200712 - DNA, 25 bp, Homo sapien
tttgaatgagtaaatagccttccat

SEQ ID NO: 1200713 - DNA, 25 bp, Homo sapien
ttgaatgagtaaatagccttccata

SEQ ID NO: 1200714 - DNA, 25 bp, Homo sapien
tgaatgagtaaatagccttccatac

SEQ ID NO: 1200715 - DNA, 25 bp, Homo sapien
tttgccaagtaatgaaaggactggg

SEQ ID NO: 1200716 - DNA, 25 bp, Homo sapien
ctgaagtgttaacattgatgccttc

SEQ ID NO: 1200717 - DNA, 25 bp, Homo sapien
ggtgtccctgttgcttcacatggta

SEQ ID NO: 1200718 - DNA, 25 bp, Homo sapien
cagaatgacgtgtagttcacttggt

SEQ ID NO: 1200719 - DNA, 25 bp, Homo sapien
ttaacttgattttgcccaaggctgt

SEQ ID NO: 1200720 - DNA, 25 bp, Homo sapien
tgggccacacacatgtaagtgccag

SEQ ID NO: 1200721 - DNA, 25 bp, Homo sapien
ccactaggaagaactgcatggtttc

SEQ ID NO: 1200722 - DNA, 25 bp, Homo sapien
tctggagatctgtaagccgccacta

SEQ ID NO: 1200723 - DNA, 25 bp, Homo sapien
gcttgatcctgctacattggctgcc

SEQ ID NO: 1200724 - DNA, 25 bp, Homo sapien
gacgcgctggcggatagattccaca

SEQ ID NO: 1200725 - DNA, 25 bp, Homo sapien
cacaggataacgtgatgggcttgtc

SEQ ID NO: 1200726 - DNA, 25 bp, Homo sapien
catgcacgtgtaatggccagcatca

SEQ ID NO: 1200727 - DNA, 25 bp, Homo sapien
tctccatatggttcagcagtgtatt

SEQ ID NO: 1200728 - DNA, 25 bp, Homo sapien
tggaagaatggcttgtgaattctca

SEQ ID NO: 1200729 - DNA, 25 bp, Homo sapien
gggattccatcagctacgcatggaa

SEQ ID NO: 1200730 - DNA, 25 bp, Homo sapien
cattgaccgtgtagtgtccttctgt

SEQ ID NO: 1200731 - DNA, 25 bp, Homo sapien
gcaatggaataccagtagctttaca

SEQ ID NO: 1200732 - DNA, 25 bp, Homo sapien
cacctgcagcattgttagcaacaca

SEQ ID NO: 1200733 - DNA, 25 bp, Homo sapien
tatttaatgacacgtctccaggaag

SEQ ID NO: 1200734 - DNA, 25 bp, Homo sapien
cacaggtatagaagccagaatcctc

SEQ ID NO: 1200735 - DNA, 25 bp, Homo sapien
tacctgaatcctcttttgacactct

SEQ ID NO: 1200736 - DNA, 25 bp, Homo sapien
aattgccttcacaaagccaacgctg

SEQ ID NO: 1200737 - DNA, 25 bp, Homo sapien
ctttcaataacaagttcactgtgtc

SEQ ID NO: 1200738 - DNA, 25 bp, Homo sapien
tctgcggtgcacacataagtacctg

SEQ ID NO: 1200739 - DNA, 25 bp, Homo sapien
tgccggattctgtggctaatttcaa

SEQ ID NO: 1200740 - DNA, 25 bp, Homo sapien
gagccattgcccagttgccggattc

SEQ ID NO: 1200741 - DNA, 25 bp, Homo sapien
caccaagtggttcaatccagttaga

SEQ ID NO: 1200742 - DNA, 25 bp, Homo sapien
ttcaggattgcattcccaccaagtg

SEQ ID NO: 1200743 - DNA, 25 bp, Homo sapien
caccccagcttcattggtagctaca

SEQ ID NO: 1200744 - DNA, 25 bp, Homo sapien
catgtatagtcaccggcatcttcat

SEQ ID NO: 1200745 - DNA, 25 bp, Homo sapien
tagctacacatgtatagtcaccggc

SEQ ID NO: 1200746 - DNA, 25 bp, Homo sapien
agagtcagactcatgctgcgctcca

SEQ ID NO: 1200747 - DNA, 25 bp, Homo sapien
gacagaacccattaagtttcgagca

SEQ ID NO: 1200748 - DNA, 25 bp, Homo sapien
tcatcccaggaaatagagtgccctt

SEQ ID NO: 1200749 - DNA, 25 bp, Homo sapien
tatgactggcactctgacaaggaca

SEQ ID NO: 1200750 - DNA, 25 bp, Homo sapien
gagtgcccttgacgggaccatgtaa

SEQ ID NO: 1200751 - DNA, 25 bp, Homo sapien
actatgaatattcctctgatcacac

SEQ ID NO: 1200752 - DNA, 25 bp, Homo sapien
actgtttactatgaatattcctctg

SEQ ID NO: 1200753 - DNA, 25 bp, Homo sapien
gtttactatgaatattcctctgatc

SEQ ID NO: 1200754 - DNA, 25 bp, Homo sapien
ttactatgaatattcctctgatcac

SEQ ID NO: 1200755 - DNA, 25 bp, Homo sapien
cttttggacataagtcattctttgc

SEQ ID NO: 1200756 - DNA, 25 bp, Homo sapien
tttgcagcaaaacatatacattgat

SEQ ID NO: 1200757 - DNA, 25 bp, Homo sapien
tggacataagtcattctttgcagca

SEQ ID NO: 1200758 - DNA, 25 bp, Homo sapien
ttgcagcaaaacatatacattgatt

SEQ ID NO: 1200759 - DNA, 25 bp, Homo sapien
tcgcatttccaaatctgaaccttgg

SEQ ID NO: 1200760 - DNA, 25 bp, Homo sapien
ggctggttgcacagacgactcctct

SEQ ID NO: 1200761 - DNA, 25 bp, Homo sapien
ctggacaaggcttattttgacagtt

SEQ ID NO: 1200762 - DNA, 25 bp, Homo sapien
cagggcttcccaccattggctggaa

SEQ ID NO: 1200763 - DNA, 25 bp, Homo sapien
cagaaatgaaggtctattaaacaca

SEQ ID NO: 1200764 - DNA, 25 bp, Homo sapien
actggggcaatccataggtagaaga

SEQ ID NO: 1200765 - DNA, 25 bp, Homo sapien
ggtctattaaacacatgcctatcag

SEQ ID NO: 1200766 - DNA, 25 bp, Homo sapien
gggcaatccataggtagaagacaga

SEQ ID NO: 1200767 - DNA, 25 bp, Homo sapien
cctggtttggttgccgcgtccacag

SEQ ID NO: 1200768 - DNA, 25 bp, Homo sapien
ggattattgcaagtcctggtcctgg

SEQ ID NO: 1200769 - DNA, 25 bp, Homo sapien
tgatggattattgcaagtcctggtc

SEQ ID NO: 1200770 - DNA, 25 bp, Homo sapien
ggtcctggtttggttgccgcgtcca

SEQ ID NO: 1200771 - DNA, 25 bp, Homo sapien
ctgggcaaggcctaatgttgcacat

SEQ ID NO: 1200772 - DNA, 25 bp, Homo sapien
gggcaaggcctaatgttgcacataa

SEQ ID NO: 1200773 - DNA, 25 bp, Homo sapien
tgggcaaggcctaatgttgcacata

SEQ ID NO: 1200774 - DNA, 25 bp, Homo sapien
caaacgctggtggtgggttattaca

SEQ ID NO: 1200775 - DNA, 25 bp, Homo sapien
tgctccatcacagtaggacccacca

SEQ ID NO: 1200776 - DNA, 25 bp, Homo sapien
tgtctgagtacctttcccacaactt

SEQ ID NO: 1200777 - DNA, 25 bp, Homo sapien
ggctgccaagcgctccatgctccat

SEQ ID NO: 1200778 - DNA, 25 bp, Homo sapien
tctggacatcactcccttcgcattt

SEQ ID NO: 1200779 - DNA, 25 bp, Homo sapien
gtcggagcagccccttgttctctgt

SEQ ID NO: 1200780 - DNA, 25 bp, Homo sapien
caagggtcactgttgcaaaaatcac

SEQ ID NO: 1200781 - DNA, 25 bp, Homo sapien
tccacatgacacagaacaggcactc

SEQ ID NO: 1200782 - DNA, 25 bp, Homo sapien
ctccgttacacgtccggctgcatgt

SEQ ID NO: 1200783 - DNA, 25 bp, Homo sapien
ctgccctccgttacacgtccggctg

SEQ ID NO: 1200784 - DNA, 25 bp, Homo sapien
tccgttacacgtccggctgcatgtt

SEQ ID NO: 1200785 - DNA, 25 bp, Homo sapien
ccctccgttacacgtccggctgcat

SEQ ID NO: 1200786 - DNA, 25 bp, Homo sapien
ggttatcacatgtgcggtaccgccg

SEQ ID NO: 1200787 - DNA, 25 bp, Homo sapien
caggacacatgtcagtgttgcacct

SEQ ID NO: 1200788 - DNA, 25 bp, Homo sapien
cagtgttgcacctctggatctggga

SEQ ID NO: 1200789 - DNA, 25 bp, Homo sapien
atctgggagtctggtcccccacaag

SEQ ID NO: 1200790 - DNA, 25 bp, Homo sapien
cagccgcttccgagtcttttcacct

SEQ ID NO: 1200791 - DNA, 25 bp, Homo sapien
acaggatggtcgcacagccgcttcc

SEQ ID NO: 1200792 - DNA, 25 bp, Homo sapien
ggccacctttaactggcacaggatg

SEQ ID NO: 1200793 - DNA, 25 bp, Homo sapien
tgtctccgggacagggacggccacc

SEQ ID NO: 1200794 - DNA, 25 bp, Homo sapien
ctggacatgcttgtacattgcacct

SEQ ID NO: 1200795 - DNA, 25 bp, Homo sapien
ccaggactatatccttttaccagga

SEQ ID NO: 1200796 - DNA, 25 bp, Homo sapien
caatgccaggactatatccttttac

SEQ ID NO: 1200797 - DNA, 25 bp, Homo sapien
ttttcctgtcaatgccaggactata

SEQ ID NO: 1200798 - DNA, 25 bp, Homo sapien
tgtcaatgccaggactatatccttt

SEQ ID NO: 1200799 - DNA, 25 bp, Homo sapien
tatttggacctcctgatgccactgg

SEQ ID NO: 1200800 - DNA, 25 bp, Homo sapien
cctctgccagattctgcaacccaaa

SEQ ID NO: 1200801 - DNA, 25 bp, Homo sapien
ctggggccctgctactaccagaggc

SEQ ID NO: 1200802 - DNA, 25 bp, Homo sapien
caaactgtcaacctatttggacctc

SEQ ID NO: 1200803 - DNA, 25 bp, Homo sapien
cagttattgtggcattaaggaaagc

SEQ ID NO: 1200804 - DNA, 25 bp, Homo sapien
ggcacgtattattctagtatcagag

SEQ ID NO: 1200805 - DNA, 25 bp, Homo sapien
caagactacgaggtacattggtaat

SEQ ID NO: 1200806 - DNA, 25 bp, Homo sapien
agtatcagagttagggctatcagtt

SEQ ID NO: 1200807 - DNA, 25 bp, Homo sapien
gttgtccaataaatgggatttagaa

SEQ ID NO: 1200808 - DNA, 25 bp, Homo sapien
gagggtaaagccattgactgcttct

SEQ ID NO: 1200809 - DNA, 25 bp, Homo sapien
tcttttgaagactgcattggtgagg

SEQ ID NO: 1200810 - DNA, 25 bp, Homo sapien
gaatagaaactatctttctcattgc

SEQ ID NO: 1200811 - DNA, 25 bp, Homo sapien
cactcacaacgatatctagcagcaa

SEQ ID NO: 1200812 - DNA, 25 bp, Homo sapien
gtaggacatagccactcacaacgat

SEQ ID NO: 1200813 - DNA, 25 bp, Homo sapien
aagaaccatcggaatccaagccccg

SEQ ID NO: 1200814 - DNA, 25 bp, Homo sapien
caagccccgggcaatatgactcatc

SEQ ID NO: 1200815 - DNA, 25 bp, Homo sapien
gcctgatcatagaaaacggtgtggt

SEQ ID NO: 1200816 - DNA, 25 bp, Homo sapien
tgcccaggacctgtttgaatgtagt

SEQ ID NO: 1200817 - DNA, 25 bp, Homo sapien
ccatgtgtatgggatgctgatgcca

SEQ ID NO: 1200818 - DNA, 25 bp, Homo sapien
ttgagtaggcgtacagctgcccagg

SEQ ID NO: 1200819 - DNA, 25 bp, Homo sapien
gttatagtcagattccacagaggat

SEQ ID NO: 1200820 - DNA, 25 bp, Homo sapien
tttaaaacccagtgtctcttctatc

SEQ ID NO: 1200821 - DNA, 25 bp, Homo sapien
gtgtttcaaccaagaaaggcattct

SEQ ID NO: 1200822 - DNA, 25 bp, Homo sapien
atgaagtgtttcaaccaagaaaggc

SEQ ID NO: 1200823 - DNA, 25 bp, Homo sapien
cccggaggggcactgattactgcga

SEQ ID NO: 1200824 - DNA, 25 bp, Homo sapien
cggaggggcactgattactgcgatc

SEQ ID NO: 1200825 - DNA, 25 bp, Homo sapien
gaggggcactgattactgcgatctc

SEQ ID NO: 1200826 - DNA, 25 bp, Homo sapien
aacccggaggggcactgattactgc

SEQ ID NO: 1200827 - DNA, 25 bp, Homo sapien
tccatctgcagctatggtgaggcct

SEQ ID NO: 1200828 - DNA, 25 bp, Homo sapien
tcttccatctgcagctatggtgagg

SEQ ID NO: 1200829 - DNA, 25 bp, Homo sapien
ccatggcattgtggcagctatggga

SEQ ID NO: 1200830 - DNA, 25 bp, Homo sapien
gtagtaagtccccatggcattgtgg

SEQ ID NO: 1200831 - DNA, 25 bp, Homo sapien
tccaatcgtattgtcacagtcctga

SEQ ID NO: 1200832 - DNA, 25 bp, Homo sapien
caacggaccacacagcgataagatc

SEQ ID NO: 1200833 - DNA, 25 bp, Homo sapien
aactcagcccatcagaggttcttcg

SEQ ID NO: 1200834 - DNA, 25 bp, Homo sapien
ttcgaaagccacttccacaacggac

SEQ ID NO: 1200835 - DNA, 25 bp, Homo sapien
cacaatggaaacttcctatggcatt

SEQ ID NO: 1200836 - DNA, 25 bp, Homo sapien
gagctgatacccaggttcacatcca

SEQ ID NO: 1200837 - DNA, 25 bp, Homo sapien
tggcattgaaacagcgctggtgaca

SEQ ID NO: 1200838 - DNA, 25 bp, Homo sapien
ctttgagctgatacccaggttcaca

SEQ ID NO: 1200839 - DNA, 25 bp, Homo sapien
accacgggtgttcttacagtgctga

SEQ ID NO: 1200840 - DNA, 25 bp, Homo sapien
ccttggtcattccatttggacaaag

SEQ ID NO: 1200841 - DNA, 25 bp, Homo sapien
acagtgctgatctggtctgcataca

SEQ ID NO: 1200842 - DNA, 25 bp, Homo sapien
aatgcacttatagccaccacgggtg

SEQ ID NO: 1200843 - DNA, 25 bp, Homo sapien
tcagtcacggaaacagccagacact

SEQ ID NO: 1200844 - DNA, 25 bp, Homo sapien
aactgatctcagtcacggaaacagc

SEQ ID NO: 1200845 - DNA, 25 bp, Homo sapien
ttgacttgttgacggcaaactgatc

SEQ ID NO: 1200846 - DNA, 25 bp, Homo sapien
tgttgacggcaaactgatctcagtc

SEQ ID NO: 1200847 - DNA, 25 bp, Homo sapien
gacatggaggcaatgagaagtaaca

SEQ ID NO: 1200848 - DNA, 25 bp, Homo sapien
tacagacatggaggcaatgagaagt

SEQ ID NO: 1200849 - DNA, 25 bp, Homo sapien
cagacatggaggcaatgagaagtaa

SEQ ID NO: 1200850 - DNA, 25 bp, Homo sapien
ctacagacatggaggcaatgagaag

SEQ ID NO: 1200851 - DNA, 25 bp, Homo sapien
gcctcttgtattctcacatatctgg

SEQ ID NO: 1200852 - DNA, 25 bp, Homo sapien
tccttgagaccgataacctcttggg

SEQ ID NO: 1200853 - DNA, 25 bp, Homo sapien
catacacaacgatagctgcctcttg

SEQ ID NO: 1200854 - DNA, 25 bp, Homo sapien
acatatctggttatatctgcactga

SEQ ID NO: 1200855 - DNA, 25 bp, Homo sapien
tgatgtgcacaaggtttaggcactt

SEQ ID NO: 1200856 - DNA, 25 bp, Homo sapien
gatgtgcacaaggtttaggcacttg

SEQ ID NO: 1200857 - DNA, 25 bp, Homo sapien
ctgatgtgcacaaggtttaggcact

SEQ ID NO: 1200858 - DNA, 25 bp, Homo sapien
atgtgcacaaggtttaggcacttgt

SEQ ID NO: 1200859 - DNA, 25 bp, Homo sapien
gaaccgtgcaaggttatagctactg

SEQ ID NO: 1200860 - DNA, 25 bp, Homo sapien
tcctggtggacagatacacttgaag

SEQ ID NO: 1200861 - DNA, 25 bp, Homo sapien
tcagggcaagttttcctaatagtcc

SEQ ID NO: 1200862 - DNA, 25 bp, Homo sapien
taatagtccttctagtcctggagag

SEQ ID NO: 1200863 - DNA, 25 bp, Homo sapien
aggtgggcagatgcactgataactt

SEQ ID NO: 1200864 - DNA, 25 bp, Homo sapien
cagatgcactgataacttccaaagg

SEQ ID NO: 1200865 - DNA, 25 bp, Homo sapien
aaggtattcttacactcatgctggc

SEQ ID NO: 1200866 - DNA, 25 bp, Homo sapien
ttccaaaggtattcttacactcatg

SEQ ID NO: 1200867 - DNA, 25 bp, Homo sapien
tccactctctgtagcacaactgaaa

SEQ ID NO: 1200868 - DNA, 25 bp, Homo sapien
tttctgatttgaccacgtcattttc

SEQ ID NO: 1200869 - DNA, 25 bp, Homo sapien
ccactctctgtagcacaactgaaag

SEQ ID NO: 1200870 - DNA, 25 bp, Homo sapien
ttctgatttgaccacgtcattttcc

SEQ ID NO: 1200871 - DNA, 25 bp, Homo sapien
tgttgaagcacatgcgattgggtcc

SEQ ID NO: 1200872 - DNA, 25 bp, Homo sapien
cacagtgcacattctgctccagaca

SEQ ID NO: 1200873 - DNA, 25 bp, Homo sapien
cagggtgtatcgatgcactggtagc

SEQ ID NO: 1200874 - DNA, 25 bp, Homo sapien
cactggtagcttcctctcatgttga

SEQ ID NO: 1200875 - DNA, 25 bp, Homo sapien
cactggcagccaagagtgagcttgg

SEQ ID NO: 1200876 - DNA, 25 bp, Homo sapien
agagaatacttactgtaaccccaca

SEQ ID NO: 1200877 - DNA, 25 bp, Homo sapien
acatgttatattctgggaagactgc

SEQ ID NO: 1200878 - DNA, 25 bp, Homo sapien
cagccaagagtgagcttgggtggca

SEQ ID NO: 1200879 - DNA, 25 bp, Homo sapien
aatacacatagttatctggaagtag

SEQ ID NO: 1200880 - DNA, 25 bp, Homo sapien
ttagtatggataggcggacacagct

SEQ ID NO: 1200881 - DNA, 25 bp, Homo sapien
ggcatatgggctcaaggcacattcc

SEQ ID NO: 1200882 - DNA, 25 bp, Homo sapien
caatggtcccattggcactgtagga

SEQ ID NO: 1200883 - DNA, 25 bp, Homo sapien
tgcaaccagccggattaaatcttga

SEQ ID NO: 1200884 - DNA, 25 bp, Homo sapien
ccaaggaaggcacacaaaacagagt

SEQ ID NO: 1200885 - DNA, 25 bp, Homo sapien
ccatgtacaactgacgtgagggcaa

SEQ ID NO: 1200886 - DNA, 25 bp, Homo sapien
gcaccatttgggatcaaacaagcct

SEQ ID NO: 1200887 - DNA, 25 bp, Homo sapien
tcaagatatgaccatggtgggatca

SEQ ID NO: 1200888 - DNA, 25 bp, Homo sapien
tgtggtggttacttcaataatgcca

SEQ ID NO: 1200889 - DNA, 25 bp, Homo sapien
aggggcgagtgggaagccttcctca

SEQ ID NO: 1200890 - DNA, 25 bp, Homo sapien
tcctgtcctatctgaatcctgatga

SEQ ID NO: 1200891 - DNA, 25 bp, Homo sapien
ttagagtcctgtcctatctgaatcc

SEQ ID NO: 1200892 - DNA, 25 bp, Homo sapien
ctcatcagctgtggtaccataggga

SEQ ID NO: 1200893 - DNA, 25 bp, Homo sapien
ctagggagtatttgcgaagagtgct

SEQ ID NO: 1200894 - DNA, 25 bp, Homo sapien
caaggcgggtagagaaagaactcca

SEQ ID NO: 1200895 - DNA, 25 bp, Homo sapien
gagtgaactggactcccttagggtc

SEQ ID NO: 1200896 - DNA, 25 bp, Homo sapien
gaaggttttagccatttgggaatgc

SEQ ID NO: 1200897 - DNA, 25 bp, Homo sapien
attcctgccgaactatgagggtttc

SEQ ID NO: 1200898 - DNA, 25 bp, Homo sapien
tctgttcacacgcttctgacatttc

SEQ ID NO: 1200899 - DNA, 25 bp, Homo sapien
tgacttagaaggttttagccatttg

SEQ ID NO: 1200900 - DNA, 25 bp, Homo sapien
gaatatcacagttgagtccagagcc

SEQ ID NO: 1200901 - DNA, 25 bp, Homo sapien
gttaaaaatatcagtggaatatcac

SEQ ID NO: 1200902 - DNA, 25 bp, Homo sapien
aaaatatcagtggaatatcacagtt

SEQ ID NO: 1200903 - DNA, 25 bp, Homo sapien
ggaatatcacagttgagtccagagc

SEQ ID NO: 1200904 - DNA, 25 bp, Homo sapien
catcactggcaaggaattggcttcc

SEQ ID NO: 1200905 - DNA, 25 bp, Homo sapien
caaacttgttgaaagatgaccactg

SEQ ID NO: 1200906 - DNA, 25 bp, Homo sapien
caggaacccatttgttaaggtgcaa

SEQ ID NO: 1200907 - DNA, 25 bp, Homo sapien
tggtgagtgtgccaccctgcatctg

SEQ ID NO: 1200908 - DNA, 25 bp, Homo sapien
attgttccaactttacgcattgaac

SEQ ID NO: 1200909 - DNA, 25 bp, Homo sapien
ctttagtttctgtgagggccatcca

SEQ ID NO: 1200910 - DNA, 25 bp, Homo sapien
tttacgcattgaactaatttgaagc

SEQ ID NO: 1200911 - DNA, 25 bp, Homo sapien
cagttcactctgctcctaggaggga

SEQ ID NO: 1200912 - DNA, 25 bp, Homo sapien
acttggctaacgtggtatctgccag

SEQ ID NO: 1200913 - DNA, 25 bp, Homo sapien
cagaaatgatgttgtattcttctca

SEQ ID NO: 1200914 - DNA, 25 bp, Homo sapien
attcttctcagtatatcatatcagg

SEQ ID NO: 1200915 - DNA, 25 bp, Homo sapien
ggaggcacgttttaccaatttgatc

SEQ ID NO: 1200916 - DNA, 25 bp, Homo sapien
ttcctgataacgtggctttttcttc

SEQ ID NO: 1200917 - DNA, 25 bp, Homo sapien
tagttcctgataacgtggctttttc

SEQ ID NO: 1200918 - DNA, 25 bp, Homo sapien
agttcctgataacgtggctttttct

SEQ ID NO: 1200919 - DNA, 25 bp, Homo sapien
ctacaggtagattattgacactgga

SEQ ID NO: 1200920 - DNA, 25 bp, Homo sapien
tagatccttcctttaagataagcat

SEQ ID NO: 1200921 - DNA, 25 bp, Homo sapien
ttccttagatccttcctttaagata

SEQ ID NO: 1200922 - DNA, 25 bp, Homo sapien
ggtagattattgacactggattttc

SEQ ID NO: 1200923 - DNA, 25 bp, Homo sapien
ataaaagtatcagaaaacagctctt

SEQ ID NO: 1200924 - DNA, 25 bp, Homo sapien
gcaacaacaggtaaatgggaagtgt

SEQ ID NO: 1200925 - DNA, 25 bp, Homo sapien
gatgaaacttgctgaatcacgaaaa

SEQ ID NO: 1200926 - DNA, 25 bp, Homo sapien
cttgctgaatcacgaaaacagacag

SEQ ID NO: 1200927 - DNA, 25 bp, Homo sapien
gaatcacgaaaacagacagcagcaa

SEQ ID NO: 1200928 - DNA, 25 bp, Homo sapien
tctcttgaaatcagggcagcactcc

SEQ ID NO: 1200929 - DNA, 25 bp, Homo sapien
ggtggcatctctagaatacccttcc

SEQ ID NO: 1200930 - DNA, 25 bp, Homo sapien
ctccatgtagtgttgacagttataa

SEQ ID NO: 1200931 - DNA, 25 bp, Homo sapien
gaaatcagggcagcactccatgtag

SEQ ID NO: 1200932 - DNA, 25 bp, Homo sapien
gtcatacttcttacattgggcgtcg

SEQ ID NO: 1200933 - DNA, 25 bp, Homo sapien
aagcagcggcctttacaggaaagct

SEQ ID NO: 1200934 - DNA, 25 bp, Homo sapien
tacattgggcgtcgcagtcacactc

SEQ ID NO: 1200935 - DNA, 25 bp, Homo sapien
tctcataatcgggacagcacttgtc

SEQ ID NO: 1200936 - DNA, 25 bp, Homo sapien
acatcttgtttatgttcatcagcag

SEQ ID NO: 1200937 - DNA, 25 bp, Homo sapien
ctgaggccaagtaagacaagtcagt

SEQ ID NO: 1200938 - DNA, 25 bp, Homo sapien
caagtaagacaagtcagttaacatc

SEQ ID NO: 1200939 - DNA, 25 bp, Homo sapien
taacatcttgtttatgttcatcagc

SEQ ID NO: 1200940 - DNA, 25 bp, Homo sapien
tatttcctctgattctataactttc

SEQ ID NO: 1200941 - DNA, 25 bp, Homo sapien
gtggaggtgctttctttgaagatgg

SEQ ID NO: 1200942 - DNA, 25 bp, Homo sapien
atttcctctgattctataactttct

SEQ ID NO: 1200943 - DNA, 25 bp, Homo sapien
gctcctttgattatatctgtcatct

SEQ ID NO: 1200944 - DNA, 25 bp, Homo sapien
atctaagaaagctcctttgattata

SEQ ID NO: 1200945 - DNA, 25 bp, Homo sapien
aagaaagctcctttgattatatctg

SEQ ID NO: 1200946 - DNA, 25 bp, Homo sapien
aaagctcctttgattatatctgtca

SEQ ID NO: 1200947 - DNA, 25 bp, Homo sapien
cttgattttccgaattgttgaagaa

SEQ ID NO: 1200948 - DNA, 25 bp, Homo sapien
cttctgtaattctctattagcagct

SEQ ID NO: 1200949 - DNA, 25 bp, Homo sapien
tgtaattctctattagcagctgaat

SEQ ID NO: 1200950 - DNA, 25 bp, Homo sapien
tggaagacttgattttccgaattgt

SEQ ID NO: 1200951 - DNA, 25 bp, Homo sapien
cttcatctacaactggtggtttggg

SEQ ID NO: 1200952 - DNA, 25 bp, Homo sapien
tgtgtctctttagcggaagtagtct

SEQ ID NO: 1200953 - DNA, 25 bp, Homo sapien
tcagaattaggtggaagactgggtc

SEQ ID NO: 1200954 - DNA, 25 bp, Homo sapien
gatcttgggagatgtgctgacttta

SEQ ID NO: 1200955 - DNA, 25 bp, Homo sapien
gagcagggcctttggttgtagtttc

SEQ ID NO: 1200956 - DNA, 25 bp, Homo sapien
tctttagcagatgttttctctatac

SEQ ID NO: 1200957 - DNA, 25 bp, Homo sapien
tagccagcactttagatgtgggtgc

SEQ ID NO: 1200958 - DNA, 25 bp, Homo sapien
tcagctttgggtgtaggtttagcca

SEQ ID NO: 1200959 - DNA, 25 bp, Homo sapien
agtggtgggtgcagacttggtggtg

SEQ ID NO: 1200960 - DNA, 25 bp, Homo sapien
gagtggtgggtgcagacttggtggt

SEQ ID NO: 1200961 - DNA, 25 bp, Homo sapien
caggctccttgggagtggtgggtga

SEQ ID NO: 1200962 - DNA, 25 bp, Homo sapien
ggcagtgggtgcaggctctttggga

SEQ ID NO: 1200963 - DNA, 25 bp, Homo sapien
gagtggtgggtgtaggctccttggg

SEQ ID NO: 1200964 - DNA, 25 bp, Homo sapien
ggtgggtgaaggctccttggtggtg

SEQ ID NO: 1200965 - DNA, 25 bp, Homo sapien
tccttgagggtagttggagcagtcc

SEQ ID NO: 1200966 - DNA, 25 bp, Homo sapien
ggtggtggtgggtgcaagctccttg

SEQ ID NO: 1200967 - DNA, 25 bp, Homo sapien
aggcttcttgggagtagtgggtgca

SEQ ID NO: 1200968 - DNA, 25 bp, Homo sapien
ttccttgagggtagttggagcagtc

SEQ ID NO: 1200969 - DNA, 25 bp, Homo sapien
caggtttagtcgctgcaggagtctt

SEQ ID NO: 1200970 - DNA, 25 bp, Homo sapien
tgtcatcttaggtgcagcagttgta

SEQ ID NO: 1200971 - DNA, 25 bp, Homo sapien
caggtgtagtacgtaagtctctttc

SEQ ID NO: 1200972 - DNA, 25 bp, Homo sapien
gcttttgtggatagtggtaggctcc

SEQ ID NO: 1200973 - DNA, 25 bp, Homo sapien
tgagaagcatatgaggtgtttctcc

SEQ ID NO: 1200974 - DNA, 25 bp, Homo sapien
gtcgggagtaacttcaggcatgaac

SEQ ID NO: 1200975 - DNA, 25 bp, Homo sapien
gggtactctcggtaagtaatccatg

SEQ ID NO: 1200976 - DNA, 25 bp, Homo sapien
taatgccttgattgggtactctcgg

SEQ ID NO: 1200977 - DNA, 25 bp, Homo sapien
taaaaatgaaaataactgattctta

SEQ ID NO: 1200978 - DNA, 25 bp, Homo sapien
cagctttaaaaatgaaaataactga

SEQ ID NO: 1200979 - DNA, 25 bp, Homo sapien
aatgaaaataactgattcttaatac

SEQ ID NO: 1200980 - DNA, 25 bp, Homo sapien
agctttaaaaatgaaaataactgat

SEQ ID NO: 1200981 - DNA, 25 bp, Homo sapien
gcttaccattgcatatattggtctc

SEQ ID NO: 1200982 - DNA, 25 bp, Homo sapien
tgcgcaaagtagtcagtccatctac

SEQ ID NO: 1200983 - DNA, 25 bp, Homo sapien
agtccatctactggcttaccattgc

SEQ ID NO: 1200984 - DNA, 25 bp, Homo sapien
ctcggaatgcaactaatgtcccatt

SEQ ID NO: 1200985 - DNA, 25 bp, Homo sapien
ccttcacagttgcacctagtaaaaa

SEQ ID NO: 1200986 - DNA, 25 bp, Homo sapien
cagtaattctgcgagctggagatgg

SEQ ID NO: 1200987 - DNA, 25 bp, Homo sapien
taccccaaacttcagtaattctgcg

SEQ ID NO: 1200988 - DNA, 25 bp, Homo sapien
agatggtggactgaatggacttagc

SEQ ID NO: 1200989 - DNA, 25 bp, Homo sapien
tggtaaaacgccagtactgagaatc

SEQ ID NO: 1200990 - DNA, 25 bp, Homo sapien
gaaagcgctgccactatttgtccag

SEQ ID NO: 1200991 - DNA, 25 bp, Homo sapien
tacacagattcaggccagttcttat

SEQ ID NO: 1200992 - DNA, 25 bp, Homo sapien
tgtccagttagtcctccaaatcctt

SEQ ID NO: 1200993 - DNA, 25 bp, Homo sapien
tccagggcacttctgtacaggttcc

SEQ ID NO: 1200994 - DNA, 25 bp, Homo sapien
tacactggataatttagagcaggcc

SEQ ID NO: 1200995 - DNA, 25 bp, Homo sapien
aaggtcctatagcacgttcaaagcg

SEQ ID NO: 1200996 - DNA, 25 bp, Homo sapien
tcaaagcgacgtctcctaacctgtg

SEQ ID NO: 1200997 - DNA, 25 bp, Homo sapien
tagccgtcaggttttctgatgttgg

SEQ ID NO: 1200998 - DNA, 25 bp, Homo sapien
ggtaaccacatttggaagtcctctc

SEQ ID NO: 1200999 - DNA, 25 bp, Homo sapien
cagtgatatagctgaggtaaccaca

SEQ ID NO: 1201000 - DNA, 25 bp, Homo sapien
agaaaaggcatagtaatcatagccg

SEQ ID NO: 1201001 - DNA, 25 bp, Homo sapien
agatttctgggcatttcaaagaaaa

SEQ ID NO: 1201002 - DNA, 25 bp, Homo sapien
tctgggcatttcaaagaaaagcatc

SEQ ID NO: 1201003 - DNA, 25 bp, Homo sapien
ttagatttctgggcatttcaaagaa

SEQ ID NO: 1201004 - DNA, 25 bp, Homo sapien
tttctgggcatttcaaagaaaagca

SEQ ID NO: 1201005 - DNA, 25 bp, Homo sapien
gagatgtttttactaattaatttga

SEQ ID NO: 1201006 - DNA, 25 bp, Homo sapien
ttatgctcaaagacaatgtttatca

SEQ ID NO: 1201007 - DNA, 25 bp, Homo sapien
aaacaattgcctagacttttcagct

SEQ ID NO: 1201008 - DNA, 25 bp, Homo sapien
aaataacttatgttgactattatgc

SEQ ID NO: 1201009 - DNA, 25 bp, Homo sapien
ggtctgcccagaacgagtagtaatt

SEQ ID NO: 1201010 - DNA, 25 bp, Homo sapien
ctaaggacagttgtaccagactttg

SEQ ID NO: 1201011 - DNA, 25 bp, Homo sapien
tgctcttgctgttctactaggcaca

SEQ ID NO: 1201012 - DNA, 25 bp, Homo sapien
cagaacgagtagtaattgctcttgc

SEQ ID NO: 1201013 - DNA, 25 bp, Homo sapien
tccattgaagttgtagaatacccaa

SEQ ID NO: 1201014 - DNA, 25 bp, Homo sapien
tgaactagggtaagtgaatacacta

SEQ ID NO: 1201015 - DNA, 25 bp, Homo sapien
catgttgagcaggtgatatttacca

SEQ ID NO: 1201016 - DNA, 25 bp, Homo sapien
tgtgtcacaaaaagagggattaatc

SEQ ID NO: 1201017 - DNA, 25 bp, Homo sapien
tcacacctcactactttacttctga

SEQ ID NO: 1201018 - DNA, 25 bp, Homo sapien
caaagccacacagcgaataagtaca

SEQ ID NO: 1201019 - DNA, 25 bp, Homo sapien
gatttatacttctagggattgtcca

SEQ ID NO: 1201020 - DNA, 25 bp, Homo sapien
tctgaaaatattcgtacggtgaaca

SEQ ID NO: 1201021 - DNA, 25 bp, Homo sapien
tctgaatcgcagaagtaaagtgact

SEQ ID NO: 1201022 - DNA, 25 bp, Homo sapien
gcaaaaataggcctagtgccctgaa

SEQ ID NO: 1201023 - DNA, 25 bp, Homo sapien
taaaatgtagttgtaaggcttctcc

SEQ ID NO: 1201024 - DNA, 25 bp, Homo sapien
aaagtgacttgaggtgtcgcatagc

SEQ ID NO: 1201025 - DNA, 25 bp, Homo sapien
gagatggggtgccttcagggtggtc

SEQ ID NO: 1201026 - DNA, 25 bp, Homo sapien
agatggggtgccttcagggtggtct

SEQ ID NO: 1201027 - DNA, 25 bp, Homo sapien
ccttctgggcgccatagagagcgtg

SEQ ID NO: 1201028 - DNA, 25 bp, Homo sapien
tgcgcaagaggatcagggatagcct

SEQ ID NO: 1201029 - DNA, 25 bp, Homo sapien
cgcagattgatgacgtaaaagcccc

SEQ ID NO: 1201030 - DNA, 25 bp, Homo sapien
gcagcattgggctcccggaaaagaa

SEQ ID NO: 1201031 - DNA, 25 bp, Homo sapien
tggcagacaattacctcggacggtc

SEQ ID NO: 1201032 - DNA, 25 bp, Homo sapien
cagaatgtgcactcgtggcagacaa

SEQ ID NO: 1201033 - DNA, 25 bp, Homo sapien
gattccctccggtctcaattcactg

SEQ ID NO: 1201034 - DNA, 25 bp, Homo sapien
gaattcatcagaaagcgacctactt

SEQ ID NO: 1201035 - DNA, 25 bp, Homo sapien
taggctacactcaaagtgctaccgg

SEQ ID NO: 1201036 - DNA, 25 bp, Homo sapien
aagtgtgtgccggagtgactgtcca

SEQ ID NO: 1201037 - DNA, 25 bp, Homo sapien
taggtacgccgtttcacacaaggta

SEQ ID NO: 1201038 - DNA, 25 bp, Homo sapien
aattcccgggtactgaatcactcag

SEQ ID NO: 1201039 - DNA, 25 bp, Homo sapien
taaaactacagaattatgatctgga

SEQ ID NO: 1201040 - DNA, 25 bp, Homo sapien
aaattctttcataagagtaaacacg

SEQ ID NO: 1201041 - DNA, 25 bp, Homo sapien
cacgaaacaatctacggattgagct

SEQ ID NO: 1201042 - DNA, 25 bp, Homo sapien
gaattatgatctggaaccatacaag

SEQ ID NO: 1201043 - DNA, 25 bp, Homo sapien
tgcaaagttcagatgcagttccaga

SEQ ID NO: 1201044 - DNA, 25 bp, Homo sapien
gaggctatctcatgccttgcagcaa

SEQ ID NO: 1201045 - DNA, 25 bp, Homo sapien
caaaccttttactcatacctgggat

SEQ ID NO: 1201046 - DNA, 25 bp, Homo sapien
tacctgggataagggagaggatact

SEQ ID NO: 1201047 - DNA, 25 bp, Homo sapien
ctattaaaaggccagagacaaaagc

SEQ ID NO: 1201048 - DNA, 25 bp, Homo sapien
tcttctacaatgtaggttcttccca

SEQ ID NO: 1201049 - DNA, 25 bp, Homo sapien
ctgtcctattaaaaggccagagaca

SEQ ID NO: 1201050 - DNA, 25 bp, Homo sapien
ttgaaagatactggccaacagtctc

SEQ ID NO: 1201051 - DNA, 25 bp, Homo sapien
caagttatccaacttagctttggga

SEQ ID NO: 1201052 - DNA, 25 bp, Homo sapien
gatgtttgaggttctcactttgctc

SEQ ID NO: 1201053 - DNA, 25 bp, Homo sapien
gtggcccattcttcatccaagttat

SEQ ID NO: 1201054 - DNA, 25 bp, Homo sapien
tctgtggcccattcttcatccaagt

SEQ ID NO: 1201055 - DNA, 25 bp, Homo sapien
aatcatttgccagttctaaagtagt

SEQ ID NO: 1201056 - DNA, 25 bp, Homo sapien
aaaatcatttgccagttctaaagta

SEQ ID NO: 1201057 - DNA, 25 bp, Homo sapien
tcatttgccagttctaaagtagtaa

SEQ ID NO: 1201058 - DNA, 25 bp, Homo sapien
catttgccagttctaaagtagtaat

SEQ ID NO: 1201059 - DNA, 25 bp, Homo sapien
tcgttctgagacttcctcctctgtg

SEQ ID NO: 1201060 - DNA, 25 bp, Homo sapien
gttctgagacttcctcctctgtgaa

SEQ ID NO: 1201061 - DNA, 25 bp, Homo sapien
ctctttctatttatagacttttcca

SEQ ID NO: 1201062 - DNA, 25 bp, Homo sapien
cgttctgagacttcctcctctgtga

SEQ ID NO: 1201063 - DNA, 25 bp, Homo sapien
tttgtagaagcacaaatgtgaagtg

SEQ ID NO: 1201064 - DNA, 25 bp, Homo sapien
gtagaagcacaaatgtgaagtgtca

SEQ ID NO: 1201065 - DNA, 25 bp, Homo sapien
ttttttgtagaagcacaaatgtgaa

SEQ ID NO: 1201066 - DNA, 25 bp, Homo sapien
tgtagaagcacaaatgtgaagtgtc

SEQ ID NO: 1201067 - DNA, 25 bp, Homo sapien
aggcattattggtaactaaaagaat

SEQ ID NO: 1201068 - DNA, 25 bp, Homo sapien
ggcattattggtaactaaaagaata

SEQ ID NO: 1201069 - DNA, 25 bp, Homo sapien
catggatatcataagttcgacaaaa

SEQ ID NO: 1201070 - DNA, 25 bp, Homo sapien
gatcatggatatcataagttcgaca

SEQ ID NO: 1201071 - DNA, 25 bp, Homo sapien
tggatatcataagttcgacaaaata

SEQ ID NO: 1201072 - DNA, 25 bp, Homo sapien
tggatcatggatatcataagttcga

SEQ ID NO: 1201073 - DNA, 25 bp, Homo sapien
ggcatcaataggaagtgatggcaat

SEQ ID NO: 1201074 - DNA, 25 bp, Homo sapien
catcaataggaagtgatggcaatgg

SEQ ID NO: 1201075 - DNA, 25 bp, Homo sapien
gaagtgatggcaatggaaattatta

SEQ ID NO: 1201076 - DNA, 25 bp, Homo sapien
ttgtaggcatcaataggaagtgatg

SEQ ID NO: 1201077 - DNA, 25 bp, Homo sapien
tccagagtatagctgacagaagtag

SEQ ID NO: 1201078 - DNA, 25 bp, Homo sapien
tgtgaactgtacactctaaagaaag

SEQ ID NO: 1201079 - DNA, 25 bp, Homo sapien
catgaggatgataatccactttgat

SEQ ID NO: 1201080 - DNA, 25 bp, Homo sapien
aatccactttgatacttccaatctg

SEQ ID NO: 1201081 - DNA, 25 bp, Homo sapien
acttgtccattaatcaaataaacac

SEQ ID NO: 1201082 - DNA, 25 bp, Homo sapien
ctaataggtcacaatcttcatcttt

SEQ ID NO: 1201083 - DNA, 25 bp, Homo sapien
ctttaacttgtccattaatcaaata

SEQ ID NO: 1201084 - DNA, 25 bp, Homo sapien
taggtcacaatcttcatctttaact

SEQ ID NO: 1201085 - DNA, 25 bp, Homo sapien
caaaagaatgactagttgcttgagt

SEQ ID NO: 1201086 - DNA, 25 bp, Homo sapien
tctgacatcaaaagaatgactagtt

SEQ ID NO: 1201087 - DNA, 25 bp, Homo sapien
tgactagttgcttgagtatttcctc

SEQ ID NO: 1201088 - DNA, 25 bp, Homo sapien
caactgcgttagcactctgacatca

SEQ ID NO: 1201089 - DNA, 25 bp, Homo sapien
tcacagcacccttaaggtttacaga

SEQ ID NO: 1201090 - DNA, 25 bp, Homo sapien
tactgctgtggatataagctctgca

SEQ ID NO: 1201091 - DNA, 25 bp, Homo sapien
gaaccgctacatatctggactgtgg

SEQ ID NO: 1201092 - DNA, 25 bp, Homo sapien
gctgtggatctgtggtctgaattca

SEQ ID NO: 1201093 - DNA, 25 bp, Homo sapien
actgtgttcaatatatccctcttta

SEQ ID NO: 1201094 - DNA, 25 bp, Homo sapien
tttcacaacgatcagcaactgtgtt

SEQ ID NO: 1201095 - DNA, 25 bp, Homo sapien
atagcatttcacaacgatcagcaac

SEQ ID NO: 1201096 - DNA, 25 bp, Homo sapien
tgttcaatatatccctctttactgc

SEQ ID NO: 1201097 - DNA, 25 bp, Homo sapien
caaatcctgaaacctgcaatgcagc

SEQ ID NO: 1201098 - DNA, 25 bp, Homo sapien
gcaatgatttacaccacaggagtta

SEQ ID NO: 1201099 - DNA, 25 bp, Homo sapien
aaatctgccaatcatagaatccagc

SEQ ID NO: 1201100 - DNA, 25 bp, Homo sapien
gctagactgatggactatgtgaaca

SEQ ID NO: 1201101 - DNA, 25 bp, Homo sapien
tatactaatgtgtctgctaaggtaa

SEQ ID NO: 1201102 - DNA, 25 bp, Homo sapien
tagaagagtatactaatgtgtctgc

SEQ ID NO: 1201103 - DNA, 25 bp, Homo sapien
taacaatatgaaagaataccaggat

SEQ ID NO: 1201104 - DNA, 25 bp, Homo sapien
ggatagccatataataccactttta

SEQ ID NO: 1201105 - DNA, 25 bp, Homo sapien
gtctatgctcttcacacaggtccca

SEQ ID NO: 1201106 - DNA, 25 bp, Homo sapien
gaatacacacagaatccgagaactt

SEQ ID NO: 1201107 - DNA, 25 bp, Homo sapien
tctttccaccaaactacagtctatg

SEQ ID NO: 1201108 - DNA, 25 bp, Homo sapien
caaggccacccaattgccagtaaaa

SEQ ID NO: 1201109 - DNA, 25 bp, Homo sapien
actccaagactggatggttttacca

SEQ ID NO: 1201110 - DNA, 25 bp, Homo sapien
ttactctgctagcagcagaatagac

SEQ ID NO: 1201111 - DNA, 25 bp, Homo sapien
cagagaacttgtcttcgtagaaaga

SEQ ID NO: 1201112 - DNA, 25 bp, Homo sapien
tgagatcagcataaccttaatacca

SEQ ID NO: 1201113 - DNA, 25 bp, Homo sapien
tatcttgatacctaagatcaactaa

SEQ ID NO: 1201114 - DNA, 25 bp, Homo sapien
atcttgatacctaagatcaactaat

SEQ ID NO: 1201115 - DNA, 25 bp, Homo sapien
aagatcaactaatatgttgttggaa

SEQ ID NO: 1201116 - DNA, 25 bp, Homo sapien
taagatcaactaatatgttgttgga

SEQ ID NO: 1201117 - DNA, 25 bp, Homo sapien
tatatcacatgattgtaacaaaaca

SEQ ID NO: 1201118 - DNA, 25 bp, Homo sapien
tatggcatacattctacattttact

SEQ ID NO: 1201119 - DNA, 25 bp, Homo sapien
cagcatctataagatcttaccagta

SEQ ID NO: 1201120 - DNA, 25 bp, Homo sapien
tttggtgtataaattcaacatcaga

SEQ ID NO: 1201121 - DNA, 25 bp, Homo sapien
catctatgagaataagttgagcagg

SEQ ID NO: 1201122 - DNA, 25 bp, Homo sapien
gagagtggaatcataggcacagaca

SEQ ID NO: 1201123 - DNA, 25 bp, Homo sapien
gattacaaatgttctgggaagacag

SEQ ID NO: 1201124 - DNA, 25 bp, Homo sapien
gaataggtgatagcacagttgaagc

SEQ ID NO: 1201125 - DNA, 25 bp, Homo sapien
gaacaaagactcgataagggaggac

SEQ ID NO: 1201126 - DNA, 25 bp, Homo sapien
tcgataagggaggacgtggaactct

SEQ ID NO: 1201127 - DNA, 25 bp, Homo sapien
gaggacgtggaactctttttcagaa

SEQ ID NO: 1201128 - DNA, 25 bp, Homo sapien
caaagactcgataagggaggacgtg

SEQ ID NO: 1201129 - DNA, 25 bp, Homo sapien
aattgtgtgatccaacatctccata

SEQ ID NO: 1201130 - DNA, 25 bp, Homo sapien
tttgaattgtgtgatccaacatctc

SEQ ID NO: 1201131 - DNA, 25 bp, Homo sapien
cagctgactcatcgtcaaatttata

SEQ ID NO: 1201132 - DNA, 25 bp, Homo sapien
gactcatcgtcaaatttataatcac

SEQ ID NO: 1201133 - DNA, 25 bp, Homo sapien
tagctgtaatctaaccaggttctta

SEQ ID NO: 1201134 - DNA, 25 bp, Homo sapien
aaccaggttcttaaatagcatcata

SEQ ID NO: 1201135 - DNA, 25 bp, Homo sapien
atcttagctgtaatctaaccaggtt

SEQ ID NO: 1201136 - DNA, 25 bp, Homo sapien
ggttcttaaatagcatcatataatg

SEQ ID NO: 1201137 - DNA, 25 bp, Homo sapien
caaaacctggatagtaaagcaaatc

SEQ ID NO: 1201138 - DNA, 25 bp, Homo sapien
gtcatctaatttctggaactgccca

SEQ ID NO: 1201139 - DNA, 25 bp, Homo sapien
tctgttctgacatgatgctttacca

SEQ ID NO: 1201140 - DNA, 25 bp, Homo sapien
tgcccattttggcttagtatcccaa

SEQ ID NO: 1201141 - DNA, 25 bp, Homo sapien
ttgttcttgtaatattaaactcttc

SEQ ID NO: 1201142 - DNA, 25 bp, Homo sapien
taaactcttcctactgttaatccat

SEQ ID NO: 1201143 - DNA, 25 bp, Homo sapien
tactgttaatccatctctatactag

SEQ ID NO: 1201144 - DNA, 25 bp, Homo sapien
ctttgttcttgtaatattaaactct

SEQ ID NO: 1201145 - DNA, 25 bp, Homo sapien
aactatacgatcatcaccattttct

SEQ ID NO: 1201146 - DNA, 25 bp, Homo sapien
aaataaggattaacacatgaaactg

SEQ ID NO: 1201147 - DNA, 25 bp, Homo sapien
aaggattaacacatgaaactgagct

SEQ ID NO: 1201148 - DNA, 25 bp, Homo sapien
cataaaataaggattaacacatgaa

SEQ ID NO: 1201149 - DNA, 25 bp, Homo sapien
atctgtgttgtccaatgaagcttga

SEQ ID NO: 1201150 - DNA, 25 bp, Homo sapien
ccaatgaagcttgactattcataga

SEQ ID NO: 1201151 - DNA, 25 bp, Homo sapien
gactattcatagaagaactcataca

SEQ ID NO: 1201152 - DNA, 25 bp, Homo sapien
gaagcttgactattcatagaagaac

SEQ ID NO: 1201153 - DNA, 25 bp, Homo sapien
gaaaggagatacccgcagcaaggac

SEQ ID NO: 1201154 - DNA, 25 bp, Homo sapien
taatgaaaggagatacccgcagcaa

SEQ ID NO: 1201155 - DNA, 25 bp, Homo sapien
gtaatgaaaggagatacccgcagca

SEQ ID NO: 1201156 - DNA, 25 bp, Homo sapien
atgaaaggagatacccgcagcaagg

SEQ ID NO: 1201157 - DNA, 25 bp, Homo sapien
cagatctggctgctagtgttttaaa

SEQ ID NO: 1201158 - DNA, 25 bp, Homo sapien
tattcataattgtctgtcaatgttc

SEQ ID NO: 1201159 - DNA, 25 bp, Homo sapien
attgtctgtcaatgttctctggatg

SEQ ID NO: 1201160 - DNA, 25 bp, Homo sapien
taaatacagatggattgttaacatc

SEQ ID NO: 1201161 - DNA, 25 bp, Homo sapien
ggaactgagtgcacattagaaagct

SEQ ID NO: 1201162 - DNA, 25 bp, Homo sapien
ttatttctggaaatgcgggccacct

SEQ ID NO: 1201163 - DNA, 25 bp, Homo sapien
tagttgggactagagctgattgcca

SEQ ID NO: 1201164 - DNA, 25 bp, Homo sapien
tacaataccttgagtctaggcctgg

SEQ ID NO: 1201165 - DNA, 25 bp, Homo sapien
tcatgcttaaaatacagggtccagt

SEQ ID NO: 1201166 - DNA, 25 bp, Homo sapien
gatgttttgtgacttgcctcatgct

SEQ ID NO: 1201167 - DNA, 25 bp, Homo sapien
tattactgacctctacttgcttctg

SEQ ID NO: 1201168 - DNA, 25 bp, Homo sapien
cctcaaagtgctgtttcagctacaa

SEQ ID NO: 1201169 - DNA, 25 bp, Homo sapien
tgtgaaagactgaggcacatcatct

SEQ ID NO: 1201170 - DNA, 25 bp, Homo sapien
tgttgtcaacggacatttgagtaat

SEQ ID NO: 1201171 - DNA, 25 bp, Homo sapien
cagagtctatcagttcaaaatccta

SEQ ID NO: 1201172 - DNA, 25 bp, Homo sapien
tgtactcttgaggtacacatatcca

SEQ ID NO: 1201173 - DNA, 25 bp, Homo sapien
gccataaatgatagcaagcccagcc

SEQ ID NO: 1201174 - DNA, 25 bp, Homo sapien
gctgatagccaccattaactgccaa

SEQ ID NO: 1201175 - DNA, 25 bp, Homo sapien
tcagatgtttcaagcccaatccagc

SEQ ID NO: 1201176 - DNA, 25 bp, Homo sapien
catcatgtggcgcaaaaccacccag

SEQ ID NO: 1201177 - DNA, 25 bp, Homo sapien
tgccagattcactgcagggggtgtg

SEQ ID NO: 1201178 - DNA, 25 bp, Homo sapien
cctggtgtgttgccatgcgcctgta

SEQ ID NO: 1201179 - DNA, 25 bp, Homo sapien
agcctggtgtgttgccatgcgcctg

SEQ ID NO: 1201180 - DNA, 25 bp, Homo sapien
gcctggtgtgttgccatgcgcctgt

SEQ ID NO: 1201181 - DNA, 25 bp, Homo sapien
tcagtaaacctagggtggtgcccaa

SEQ ID NO: 1201182 - DNA, 25 bp, Homo sapien
tattccaactgcaatgaaaagtagc

SEQ ID NO: 1201183 - DNA, 25 bp, Homo sapien
gattacttagcctcactcttatagg

SEQ ID NO: 1201184 - DNA, 25 bp, Homo sapien
gtagctattatggaaggccctgcag

SEQ ID NO: 1201185 - DNA, 25 bp, Homo sapien
ggcaaagacatttgacctccagtga

SEQ ID NO: 1201186 - DNA, 25 bp, Homo sapien
tgattctggatagggattgcaaaaa

SEQ ID NO: 1201187 - DNA, 25 bp, Homo sapien
gattggctttcccttgacagtcttt

SEQ ID NO: 1201188 - DNA, 25 bp, Homo sapien
caggaccagtccaagtgttgagacc

SEQ ID NO: 1201189 - DNA, 25 bp, Homo sapien
gtcaactaggtaaacaacaagcaat

SEQ ID NO: 1201190 - DNA, 25 bp, Homo sapien
cagtagattgtcaactaggtaaaca

SEQ ID NO: 1201191 - DNA, 25 bp, Homo sapien
tttcccagtagattgtcaactaggt

SEQ ID NO: 1201192 - DNA, 25 bp, Homo sapien
gaagctgtgccctgtatcttcagca

SEQ ID NO: 1201193 - DNA, 25 bp, Homo sapien
tgcgcccggccactggcctatattt

SEQ ID NO: 1201194 - DNA, 25 bp, Homo sapien
gcatcccaggattgggggtccacag

SEQ ID NO: 1201195 - DNA, 25 bp, Homo sapien
ctggcctatatttttgtgggctctt

SEQ ID NO: 1201196 - DNA, 25 bp, Homo sapien
tcttctgtggcatcccaggattggg

SEQ ID NO: 1201197 - DNA, 25 bp, Homo sapien
actccgcctcccaggtctacgccat

SEQ ID NO: 1201198 - DNA, 25 bp, Homo sapien
caaactccgcctcccaggtctacgc

SEQ ID NO: 1201199 - DNA, 25 bp, Homo sapien
aactccgcctcccaggtctacgcca

SEQ ID NO: 1201200 - DNA, 25 bp, Homo sapien
tgtttcctctacctctagctccatt

SEQ ID NO: 1201201 - DNA, 25 bp, Homo sapien
gtttcctctacctctagctccattt

SEQ ID NO: 1201202 - DNA, 25 bp, Homo sapien
gcccagtacattccttgagtcttcc

SEQ ID NO: 1201203 - DNA, 25 bp, Homo sapien
ggcccagtacattccttgagtcttc

SEQ ID NO: 1201204 - DNA, 25 bp, Homo sapien
aggcccagtacattccttgagtctt

SEQ ID NO: 1201205 - DNA, 25 bp, Homo sapien
cccagtacattccttgagtcttccc

SEQ ID NO: 1201206 - DNA, 25 bp, Homo sapien
tagaacaagtttaggttcagctgct

SEQ ID NO: 1201207 - DNA, 25 bp, Homo sapien
agtttaggttcagctgcttaggtag

SEQ ID NO: 1201208 - DNA, 25 bp, Homo sapien
aacaagtttaggttcagctgcttag

SEQ ID NO: 1201209 - DNA, 25 bp, Homo sapien
tttgtagaacaagtttaggttcagc

SEQ ID NO: 1201210 - DNA, 25 bp, Homo sapien
cagttttcctgttgaagttgatgcc

SEQ ID NO: 1201211 - DNA, 25 bp, Homo sapien
tgtactatacaactagtcacttcaa

SEQ ID NO: 1201212 - DNA, 25 bp, Homo sapien
tgtcaacagttaacacaacctccat

SEQ ID NO: 1201213 - DNA, 25 bp, Homo sapien
aagatttggtaagttgaagggtcag

SEQ ID NO: 1201214 - DNA, 25 bp, Homo sapien
tactcatgagtcatagtggaaggac

SEQ ID NO: 1201215 - DNA, 25 bp, Homo sapien
gacatgagcacccaagtacactgac

SEQ ID NO: 1201216 - DNA, 25 bp, Homo sapien
cagcatataaaaggatttggtcccc

SEQ ID NO: 1201217 - DNA, 25 bp, Homo sapien
tagtttccctttatgtgcaccctga

SEQ ID NO: 1201218 - DNA, 25 bp, Homo sapien
gggattacaacccagttagcagcca

SEQ ID NO: 1201219 - DNA, 25 bp, Homo sapien
tctgaagatggctaagaaacatagc

SEQ ID NO: 1201220 - DNA, 25 bp, Homo sapien
gcgttcaaactttcagacttgcaat

SEQ ID NO: 1201221 - DNA, 25 bp, Homo sapien
gcctggtggcaagagctataatctc

SEQ ID NO: 1201222 - DNA, 25 bp, Homo sapien
tattaggtaaaagcactgaatctag

SEQ ID NO: 1201223 - DNA, 25 bp, Homo sapien
cagcagagcatatcaaagggtgttc

SEQ ID NO: 1201224 - DNA, 25 bp, Homo sapien
tagctgaatacgcaaaaactgactg

SEQ ID NO: 1201225 - DNA, 25 bp, Homo sapien
gagatagagaaaggcgattccctgg

SEQ ID NO: 1201226 - DNA, 25 bp, Homo sapien
tgagtcaggtttcacctatggccag

SEQ ID NO: 1201227 - DNA, 25 bp, Homo sapien
cttggtgctgtatatctggcaccat

SEQ ID NO: 1201228 - DNA, 25 bp, Homo sapien
cgacaagccctcattgcctgatcca

SEQ ID NO: 1201229 - DNA, 25 bp, Homo sapien
cattgcctgatccactgggcctttt

SEQ ID NO: 1201230 - DNA, 25 bp, Homo sapien
ttacattttcatttgcttgaccttg

SEQ ID NO: 1201231 - DNA, 25 bp, Homo sapien
cttggttacggttgtgttatccctg

SEQ ID NO: 1201232 - DNA, 25 bp, Homo sapien
aaatttcccttaacccacagcactg

SEQ ID NO: 1201233 - DNA, 25 bp, Homo sapien
tccacaactcaacctgctccaaaag

SEQ ID NO: 1201234 - DNA, 25 bp, Homo sapien
cctgagtgtgacattctgtcctgtt

SEQ ID NO: 1201235 - DNA, 25 bp, Homo sapien
gagtttatcatatttatgcttcaca

SEQ ID NO: 1201236 - DNA, 25 bp, Homo sapien
ttatgcttcacaattggctctctgg

SEQ ID NO: 1201237 - DNA, 25 bp, Homo sapien
tctctggtaccacaaggctttctcc

SEQ ID NO: 1201238 - DNA, 25 bp, Homo sapien
cttcacaattggctctctggtacca

SEQ ID NO: 1201239 - DNA, 25 bp, Homo sapien
ggaagtgacattatccacttttcta

SEQ ID NO: 1201240 - DNA, 25 bp, Homo sapien
gcctggcctacatctaaatttttaa

SEQ ID NO: 1201241 - DNA, 25 bp, Homo sapien
tagcagtggagcatttctccagaaa

SEQ ID NO: 1201242 - DNA, 25 bp, Homo sapien
ggaacacagcactatgccagtctaa

SEQ ID NO: 1201243 - DNA, 25 bp, Homo sapien
tgtgtgtttgcagctaaaggcacta

SEQ ID NO: 1201244 - DNA, 25 bp, Homo sapien
agtgtgtgtttgcagctaaaggcac

SEQ ID NO: 1201245 - DNA, 25 bp, Homo sapien
ttgcagctaaaggcactatccccat

SEQ ID NO: 1201246 - DNA, 25 bp, Homo sapien
gtgtgtttgcagctaaaggcactat

SEQ ID NO: 1201247 - DNA, 25 bp, Homo sapien
tgttgactctgtgatgcatgagtga

SEQ ID NO: 1201248 - DNA, 25 bp, Homo sapien
gctgaattccttcccacgtctactg

SEQ ID NO: 1201249 - DNA, 25 bp, Homo sapien
caaaatgccgtcttccagggtggac

SEQ ID NO: 1201250 - DNA, 25 bp, Homo sapien
gcatgagtgaggatttgtagctgaa

SEQ ID NO: 1201251 - DNA, 25 bp, Homo sapien
ctacacacataaaggctttcaccat

SEQ ID NO: 1201252 - DNA, 25 bp, Homo sapien
acaccttgtgccagtatgatttctc

SEQ ID NO: 1201253 - DNA, 25 bp, Homo sapien
caagtgtgaactgtccaatgttcgc

SEQ ID NO: 1201254 - DNA, 25 bp, Homo sapien
cagcaaggagatttctttgggtaaa

SEQ ID NO: 1201255 - DNA, 25 bp, Homo sapien
catgaggttgtgctcctgtgtgaac

SEQ ID NO: 1201256 - DNA, 25 bp, Homo sapien
cattcactgcattcaaagggctttt

SEQ ID NO: 1201257 - DNA, 25 bp, Homo sapien
tctctacaggatttcctacattcac

SEQ ID NO: 1201258 - DNA, 25 bp, Homo sapien
ctacattcactgcattcaaagggct

SEQ ID NO: 1201259 - DNA, 25 bp, Homo sapien
cttctctacaggatttcctacattc

SEQ ID NO: 1201260 - DNA, 25 bp, Homo sapien
gatgcatactttgtggttctaccag

SEQ ID NO: 1201261 - DNA, 25 bp, Homo sapien
cagggttgccgcactgaacaggaaa

SEQ ID NO: 1201262 - DNA, 25 bp, Homo sapien
tatagggtatctccccactgtgaac

SEQ ID NO: 1201263 - DNA, 25 bp, Homo sapien
tactgccatcaatcaaatgggaggg

SEQ ID NO: 1201264 - DNA, 25 bp, Homo sapien
caccaaaacaatgtgcagctggcag

SEQ ID NO: 1201265 - DNA, 25 bp, Homo sapien
agtaaggctttcattattgtccaca

SEQ ID NO: 1201266 - DNA, 25 bp, Homo sapien
caatgtgcagctggcagttcttggg

SEQ ID NO: 1201267 - DNA, 25 bp, Homo sapien
aaggctttcattattgtccacacca

SEQ ID NO: 1201268 - DNA, 25 bp, Homo sapien
tatttttgtatattctagccccaaa

SEQ ID NO: 1201269 - DNA, 25 bp, Homo sapien
aatcacctaagcaatgaatagagcc

SEQ ID NO: 1201270 - DNA, 25 bp, Homo sapien
tattacaacttgttaaaagtgtctg

SEQ ID NO: 1201271 - DNA, 25 bp, Homo sapien
gtgtctgaactttaggtgttaattc

SEQ ID NO: 1201272 - DNA, 25 bp, Homo sapien
tcgctgaacctctgctgttagtctc

SEQ ID NO: 1201273 - DNA, 25 bp, Homo sapien
gcctcgctgaacctctgctgttagt

SEQ ID NO: 1201274 - DNA, 25 bp, Homo sapien
aaagcctcgctgaacctctgctgtt

SEQ ID NO: 1201275 - DNA, 25 bp, Homo sapien
aagcctcgctgaacctctgctgtta

SEQ ID NO: 1201276 - DNA, 25 bp, Homo sapien
caagctgctttcgatcccttaacca

SEQ ID NO: 1201277 - DNA, 25 bp, Homo sapien
tcacctgctgaacgctgtgacactg

SEQ ID NO: 1201278 - DNA, 25 bp, Homo sapien
cctattaagagtgtctcacctgctg

SEQ ID NO: 1201279 - DNA, 25 bp, Homo sapien
tactgcacgttgtgcgttcagaggc

SEQ ID NO: 1201280 - DNA, 25 bp, Homo sapien
ggccaagtcccgttcctcctgtgtg

SEQ ID NO: 1201281 - DNA, 25 bp, Homo sapien
gaggccaagtcccgttcctcctgtg

SEQ ID NO: 1201282 - DNA, 25 bp, Homo sapien
agtgaggccaagtcccgttcctcct

SEQ ID NO: 1201283 - DNA, 25 bp, Homo sapien
ctgttcctggaagtgaggccaagtc

SEQ ID NO: 1201284 - DNA, 25 bp, Homo sapien
atcacatatgcatcacttccacttc

SEQ ID NO: 1201285 - DNA, 25 bp, Homo sapien
gatgatcacatatgcatcacttcca

SEQ ID NO: 1201286 - DNA, 25 bp, Homo sapien
tgatcacatatgcatcacttccact

SEQ ID NO: 1201287 - DNA, 25 bp, Homo sapien
agatgatcacatatgcatcacttcc

SEQ ID NO: 1201288 - DNA, 25 bp, Homo sapien
ctagcccacaaagaatattgtctca

SEQ ID NO: 1201289 - DNA, 25 bp, Homo sapien
gatgcttcgttaatttgttcagcca

SEQ ID NO: 1201290 - DNA, 25 bp, Homo sapien
caaacgctgattacagataatagta

SEQ ID NO: 1201291 - DNA, 25 bp, Homo sapien
taggataggcctatgtgctagccca

SEQ ID NO: 1201292 - DNA, 25 bp, Homo sapien
tcttccatgatgcattagaagtaac

SEQ ID NO: 1201293 - DNA, 25 bp, Homo sapien
acctgtaaaagcttgtttgatttct

SEQ ID NO: 1201294 - DNA, 25 bp, Homo sapien
aacaaaaacaggtatcagtgcatta

SEQ ID NO: 1201295 - DNA, 25 bp, Homo sapien
tacactgtcgatgtttccaatgcat

SEQ ID NO: 1201296 - DNA, 25 bp, Homo sapien
taaagacgtacagaccagacacggc

SEQ ID NO: 1201297 - DNA, 25 bp, Homo sapien
tccagaactggctctcggaagcgct

SEQ ID NO: 1201298 - DNA, 25 bp, Homo sapien
tttagcgtccctgcaaattctggcc

SEQ ID NO: 1201299 - DNA, 25 bp, Homo sapien
gaaaagacatctggcggaaacctgt

SEQ ID NO: 1201300 - DNA, 25 bp, Homo sapien
cagcatcccaaatgtacctatccgt

SEQ ID NO: 1201301 - DNA, 25 bp, Homo sapien
ggcaatcttcctagcatcttaggaa

SEQ ID NO: 1201302 - DNA, 25 bp, Homo sapien
ttttatggtacacaatagtcacagt

SEQ ID NO: 1201303 - DNA, 25 bp, Homo sapien
taactcacatgaatggcttatcact

SEQ ID NO: 1201304 - DNA, 25 bp, Homo sapien
caattccaggacaaagttcctactt

SEQ ID NO: 1201305 - DNA, 25 bp, Homo sapien
acaattccaggacaaagttcctact

SEQ ID NO: 1201306 - DNA, 25 bp, Homo sapien
cctagtttgagttgttgtgggtgct

SEQ ID NO: 1201307 - DNA, 25 bp, Homo sapien
taagggcctagtttgagttgttgtg

SEQ ID NO: 1201308 - DNA, 25 bp, Homo sapien
actccgataataagggcctagtttg

SEQ ID NO: 1201309 - DNA, 25 bp, Homo sapien
gttggctgactgaaactccgataat

SEQ ID NO: 1201310 - DNA, 25 bp, Homo sapien
tgggggcagcttaggaaatgtctgt

SEQ ID NO: 1201311 - DNA, 25 bp, Homo sapien
atgtctgttgaataagctttgcaat

SEQ ID NO: 1201312 - DNA, 25 bp, Homo sapien
tttgcaatgaaggctctgtccctgt

SEQ ID NO: 1201313 - DNA, 25 bp, Homo sapien
gtctgttgaataagctttgcaatga

SEQ ID NO: 1201314 - DNA, 25 bp, Homo sapien
taaggacagaccatcaatccttatt

SEQ ID NO: 1201315 - DNA, 25 bp, Homo sapien
cctaaggacagaccatcaatcctta

SEQ ID NO: 1201316 - DNA, 25 bp, Homo sapien
ctaaggacagaccatcaatccttat

SEQ ID NO: 1201317 - DNA, 25 bp, Homo sapien
aaatcaatctgagaatgagcagtag

SEQ ID NO: 1201318 - DNA, 25 bp, Homo sapien
gacaggcaggacatcatcttcttgg

SEQ ID NO: 1201319 - DNA, 25 bp, Homo sapien
taaagcagccacgtcttaggaacaa

SEQ ID NO: 1201320 - DNA, 25 bp, Homo sapien
tacacagggtcaagtaggtccaggt

SEQ ID NO: 1201321 - DNA, 25 bp, Homo sapien
tggaccctgtgcttcagtaccgaga

SEQ ID NO: 1201322 - DNA, 25 bp, Homo sapien
cctctagctttcagtcaggatcctt

SEQ ID NO: 1201323 - DNA, 25 bp, Homo sapien
gatcctttttcagctccggacttag

SEQ ID NO: 1201324 - DNA, 25 bp, Homo sapien
aggatcctttttcagctccggactt

SEQ ID NO: 1201325 - DNA, 25 bp, Homo sapien
ctagctttcagtcaggatccttttt

SEQ ID NO: 1201326 - DNA, 25 bp, Homo sapien
tcatcacgtggaacgctaataagcg

SEQ ID NO: 1201327 - DNA, 25 bp, Homo sapien
tcagtaaccattgggtgtcatcacg

SEQ ID NO: 1201328 - DNA, 25 bp, Homo sapien
gactccacagtgcatttagatccag

SEQ ID NO: 1201329 - DNA, 25 bp, Homo sapien
tcaccgccgttttgaatgctaactt

SEQ ID NO: 1201330 - DNA, 25 bp, Homo sapien
ccaggaaagcgtcccataagtaaca

SEQ ID NO: 1201331 - DNA, 25 bp, Homo sapien
tcttggcaagccaagtaacttaggg

SEQ ID NO: 1201332 - DNA, 25 bp, Homo sapien
aattgacacccattcagacagtacg

SEQ ID NO: 1201333 - DNA, 25 bp, Homo sapien
tggatcatcagaacaccagtccgtt

SEQ ID NO: 1201334 - DNA, 25 bp, Homo sapien
gcacagactcactgcttccacccat

SEQ ID NO: 1201335 - DNA, 25 bp, Homo sapien
gcctgacttgacccgcacagactca

SEQ ID NO: 1201336 - DNA, 25 bp, Homo sapien
tgacttgacccgcacagactcactg

SEQ ID NO: 1201337 - DNA, 25 bp, Homo sapien
gacccgcacagactcactgcttcca

SEQ ID NO: 1201338 - DNA, 25 bp, Homo sapien
aacgtttagtcatgttgtcagggca

SEQ ID NO: 1201339 - DNA, 25 bp, Homo sapien
taaccagtcttagtgagtgtacaaa

SEQ ID NO: 1201340 - DNA, 25 bp, Homo sapien
ttcccgatgcaatgtaactgttggc

SEQ ID NO: 1201341 - DNA, 25 bp, Homo sapien
gaaaccttactgcaactagttggca

SEQ ID NO: 1201342 - DNA, 25 bp, Homo sapien
cagggttctctttagtccatggaca

SEQ ID NO: 1201343 - DNA, 25 bp, Homo sapien
gaggttctttcatgttaccaggcaa

SEQ ID NO: 1201344 - DNA, 25 bp, Homo sapien
caggcaaacgccttgtataggattt

SEQ ID NO: 1201345 - DNA, 25 bp, Homo sapien
agccccagtgcatcttgtggtccac

SEQ ID NO: 1201346 - DNA, 25 bp, Homo sapien
agatgctttttgtggattcttctga

SEQ ID NO: 1201347 - DNA, 25 bp, Homo sapien
ttgagatttcttccttgtgttccct

SEQ ID NO: 1201348 - DNA, 25 bp, Homo sapien
agatttcttccttgtgttccctgac

SEQ ID NO: 1201349 - DNA, 25 bp, Homo sapien
catagatgctttttgtggattcttc

SEQ ID NO: 1201350 - DNA, 25 bp, Homo sapien
tacaggaaatgttttcacacttcaa

SEQ ID NO: 1201351 - DNA, 25 bp, Homo sapien
caaagtcttctttggcactctagcg

SEQ ID NO: 1201352 - DNA, 25 bp, Homo sapien
tttggcactctagcgtctttaaaac

SEQ ID NO: 1201353 - DNA, 25 bp, Homo sapien
gtttcaattacaggaaatgttttca

SEQ ID NO: 1201354 - DNA, 25 bp, Homo sapien
tataatgtgctggtaaggatctata

SEQ ID NO: 1201355 - DNA, 25 bp, Homo sapien
gtgctggtaaggatctataaatgac

SEQ ID NO: 1201356 - DNA, 25 bp, Homo sapien
taatgtgctggtaaggatctataaa

SEQ ID NO: 1201357 - DNA, 25 bp, Homo sapien
tgtgctggtaaggatctataaatga

SEQ ID NO: 1201358 - DNA, 25 bp, Homo sapien
ggactgcaggtattctaggagcaca

SEQ ID NO: 1201359 - DNA, 25 bp, Homo sapien
cagaaacattctttgatgtaaggct

SEQ ID NO: 1201360 - DNA, 25 bp, Homo sapien
tacagcttgactatgagcacttctt

SEQ ID NO: 1201361 - DNA, 25 bp, Homo sapien
tctttgcagtccagtttaccaagca

SEQ ID NO: 1201362 - DNA, 25 bp, Homo sapien
tttggtggcacgtaacaccactacc

SEQ ID NO: 1201363 - DNA, 25 bp, Homo sapien
tggcacgtaacaccactaccgtaaa

SEQ ID NO: 1201364 - DNA, 25 bp, Homo sapien
ctaccgtaaacttgtgggaatactg

SEQ ID NO: 1201365 - DNA, 25 bp, Homo sapien
ccgtaaacttgtgggaatactggtg

SEQ ID NO: 1201366 - DNA, 25 bp, Homo sapien
gaggacacaattcagactcacactt

SEQ ID NO: 1201367 - DNA, 25 bp, Homo sapien
aggacacaattcagactcacacttc

SEQ ID NO: 1201368 - DNA, 25 bp, Homo sapien
ggttgtagagataaaaagttccaca

SEQ ID NO: 1201369 - DNA, 25 bp, Homo sapien
ttcaaaggtctcattccacacaggg

SEQ ID NO: 1201370 - DNA, 25 bp, Homo sapien
tccacatagggatctggagtatcaa

SEQ ID NO: 1201371 - DNA, 25 bp, Homo sapien
ccacacagggtttatgtcattattg

SEQ ID NO: 1201372 - DNA, 25 bp, Homo sapien
gaagatacagtaaatgttgctgtcc

SEQ ID NO: 1201373 - DNA, 25 bp, Homo sapien
tcatccatgacataattggcatcca

SEQ ID NO: 1201374 - DNA, 25 bp, Homo sapien
cataattggcatccattaacgtaat

SEQ ID NO: 1201375 - DNA, 25 bp, Homo sapien
gctgtccctagagtttcatccatga

SEQ ID NO: 1201376 - DNA, 25 bp, Homo sapien
caaacttcaagagacatttctagaa

SEQ ID NO: 1201377 - DNA, 25 bp, Homo sapien
aagagacatttctagaaccatttca

SEQ ID NO: 1201378 - DNA, 25 bp, Homo sapien
caagagacatttctagaaccatttc

SEQ ID NO: 1201379 - DNA, 25 bp, Homo sapien
acttcaagagacatttctagaacca

SEQ ID NO: 1201380 - DNA, 25 bp, Homo sapien
gcagaatgcaatccttcactattct

SEQ ID NO: 1201381 - DNA, 25 bp, Homo sapien
ccttcactattctttggacccaaga

SEQ ID NO: 1201382 - DNA, 25 bp, Homo sapien
ctgatcacacagagccatactaaat

SEQ ID NO: 1201383 - DNA, 25 bp, Homo sapien
actaaatcgtaggtctgggcatgag

SEQ ID NO: 1201384 - DNA, 25 bp, Homo sapien
tgcagcaagagggagcgctgtacag

SEQ ID NO: 1201385 - DNA, 25 bp, Homo sapien
gctgtacaggagacctccaaccggg

SEQ ID NO: 1201386 - DNA, 25 bp, Homo sapien
tataggggaagcctattgcagcaag

SEQ ID NO: 1201387 - DNA, 25 bp, Homo sapien
tgaagtggagacagggattgtatag

SEQ ID NO: 1201388 - DNA, 25 bp, Homo sapien
tgttcctatactccactaaagggag

SEQ ID NO: 1201389 - DNA, 25 bp, Homo sapien
actgcctgcctttcgacctttacca

SEQ ID NO: 1201390 - DNA, 25 bp, Homo sapien
tatactccactaaagggagccctcc

SEQ ID NO: 1201391 - DNA, 25 bp, Homo sapien
tcagttcatgttcctatactccact

SEQ ID NO: 1201392 - DNA, 25 bp, Homo sapien
tcagagtgcaccaccttgctgagtg

SEQ ID NO: 1201393 - DNA, 25 bp, Homo sapien
gaccagttaggccagtttccagctc

SEQ ID NO: 1201394 - DNA, 25 bp, Homo sapien
cacctcttgattcctgaaacctgac

SEQ ID NO: 1201395 - DNA, 25 bp, Homo sapien
tcagcggtcaagagctttgggcccc

SEQ ID NO: 1201396 - DNA, 25 bp, Homo sapien
ccacctgaacccaatatggctacca

SEQ ID NO: 1201397 - DNA, 25 bp, Homo sapien
cagaattcctgattcgtataatgcc

SEQ ID NO: 1201398 - DNA, 25 bp, Homo sapien
cagcaacgtaggtagcacaatccag

SEQ ID NO: 1201399 - DNA, 25 bp, Homo sapien
agaatcccaccatggctcggaaacc

SEQ ID NO: 1201400 - DNA, 25 bp, Homo sapien
ctgtgaaccaatacctctagtatgg

SEQ ID NO: 1201401 - DNA, 25 bp, Homo sapien
ccaatacctctagtatggtagatct

SEQ ID NO: 1201402 - DNA, 25 bp, Homo sapien
gaaccaatacctctagtatggtaga

SEQ ID NO: 1201403 - DNA, 25 bp, Homo sapien
aatacctctagtatggtagatctca

SEQ ID NO: 1201404 - DNA, 25 bp, Homo sapien
ttggccacttctggtaaaactggaa

SEQ ID NO: 1201405 - DNA, 25 bp, Homo sapien
tggccacttctggtaaaactggaaa

SEQ ID NO: 1201406 - DNA, 25 bp, Homo sapien
ttagtgtttctcctattaacatccc

SEQ ID NO: 1201407 - DNA, 25 bp, Homo sapien
ttcttccataaagactcaacatatc

SEQ ID NO: 1201408 - DNA, 25 bp, Homo sapien
tcttcttccataaagactcaacata

SEQ ID NO: 1201409 - DNA, 25 bp, Homo sapien
tgtggtgtgagaagtaaaaggggat

SEQ ID NO: 1201410 - DNA, 25 bp, Homo sapien
cagctctgaaacgtcaggtttgaca

SEQ ID NO: 1201411 - DNA, 25 bp, Homo sapien
gcattgtgcagtattaactttttcc

SEQ ID NO: 1201412 - DNA, 25 bp, Homo sapien
ttttccttcaaactgctcagagtag

SEQ ID NO: 1201413 - DNA, 25 bp, Homo sapien
caggtgaaaagaggtaaagggcatt

SEQ ID NO: 1201414 - DNA, 25 bp, Homo sapien
tttgcttccaaataagtcgggagcc

SEQ ID NO: 1201415 - DNA, 25 bp, Homo sapien
taaaagtaccatatttagccatgcc

SEQ ID NO: 1201416 - DNA, 25 bp, Homo sapien
tcatacttcttaacgactgttccca

SEQ ID NO: 1201417 - DNA, 25 bp, Homo sapien
tcgtatggactaaattcaacccaat

SEQ ID NO: 1201418 - DNA, 25 bp, Homo sapien
tctgctttgtgaaccagaaacgccc

SEQ ID NO: 1201419 - DNA, 25 bp, Homo sapien
gcctctgctttgtgaaccagaaacg

SEQ ID NO: 1201420 - DNA, 25 bp, Homo sapien
gctttgtgaaccagaaacgcccaaa

SEQ ID NO: 1201421 - DNA, 25 bp, Homo sapien
agcctctgctttgtgaaccagaaac

SEQ ID NO: 1201422 - DNA, 25 bp, Homo sapien
catgggtgccacctaccttgtttgc

SEQ ID NO: 1201423 - DNA, 25 bp, Homo sapien
tactcttaggagaatgtgccccgtg

SEQ ID NO: 1201424 - DNA, 25 bp, Homo sapien
taactgggtgatgatcagaggacag

SEQ ID NO: 1201425 - DNA, 25 bp, Homo sapien
tgccccgtggtaaatgtcacagcag

SEQ ID NO: 1201426 - DNA, 25 bp, Homo sapien
gaagggttaataaatgcttaaggca

SEQ ID NO: 1201427 - DNA, 25 bp, Homo sapien
aattttgttacacagaggtgtggga

SEQ ID NO: 1201428 - DNA, 25 bp, Homo sapien
gaatgagcaagagttagtaatggaa

SEQ ID NO: 1201429 - DNA, 25 bp, Homo sapien
caagtaaaatgtgcgtgaatgagca

SEQ ID NO: 1201430 - DNA, 25 bp, Homo sapien
acaatatgctttgtggtaatatttt

SEQ ID NO: 1201431 - DNA, 25 bp, Homo sapien
cgagctatcattactcacaatatgc

SEQ ID NO: 1201432 - DNA, 25 bp, Homo sapien
tcatcatcactgtccgagctatcat

SEQ ID NO: 1201433 - DNA, 25 bp, Homo sapien
tcactgtccgagctatcattactca

SEQ ID NO: 1201434 - DNA, 25 bp, Homo sapien
tatgcatacaccattactcctggga

SEQ ID NO: 1201435 - DNA, 25 bp, Homo sapien
cagcaatcaccccaaagaagcagtt

SEQ ID NO: 1201436 - DNA, 25 bp, Homo sapien
ggtcatttatagcactgcctccaga

SEQ ID NO: 1201437 - DNA, 25 bp, Homo sapien
gaatcagaatccttgggtctcaacc

SEQ ID NO: 1201438 - DNA, 25 bp, Homo sapien
caagcccagcatgaagttgtgtacc

SEQ ID NO: 1201439 - DNA, 25 bp, Homo sapien
gttgtgtaccttcccagcacgtcct

SEQ ID NO: 1201440 - DNA, 25 bp, Homo sapien
gctacagctgcatccagttcatcat

SEQ ID NO: 1201441 - DNA, 25 bp, Homo sapien
tcaccaaggccattatcatacgatg

SEQ ID NO: 1201442 - DNA, 25 bp, Homo sapien
gaggactagagtcacttggccttgc

SEQ ID NO: 1201443 - DNA, 25 bp, Homo sapien
cagaggctcatatattcgctcaaat

SEQ ID NO: 1201444 - DNA, 25 bp, Homo sapien
caagggatacggcaggttaaatgtg

SEQ ID NO: 1201445 - DNA, 25 bp, Homo sapien
caaaggagattatgagatcaacccc

SEQ ID NO: 1201446 - DNA, 25 bp, Homo sapien
cagtcagctacggagattcgaggtt

SEQ ID NO: 1201447 - DNA, 25 bp, Homo sapien
caagaaatacgtgttcgcagtcagc

SEQ ID NO: 1201448 - DNA, 25 bp, Homo sapien
ggtaagctggttatacattcccgcc

SEQ ID NO: 1201449 - DNA, 25 bp, Homo sapien
tatgactgctggcatgtaagtggcc

SEQ ID NO: 1201450 - DNA, 25 bp, Homo sapien
cataaggatcaatctttggaaaggg

SEQ ID NO: 1201451 - DNA, 25 bp, Homo sapien
agcccttcccgatcaaacacataag

SEQ ID NO: 1201452 - DNA, 25 bp, Homo sapien
tagcccacttttctgcaagtagaag

SEQ ID NO: 1201453 - DNA, 25 bp, Homo sapien
ggtttaaagacatagcactccttca

SEQ ID NO: 1201454 - DNA, 25 bp, Homo sapien
caatgttgttcagagtattgaagtg

SEQ ID NO: 1201455 - DNA, 25 bp, Homo sapien
tattgaagtgcataagatcatgtag

SEQ ID NO: 1201456 - DNA, 25 bp, Homo sapien
caaagtcagcgatttctttctcttc

SEQ ID NO: 1201457 - DNA, 25 bp, Homo sapien
gaaaattgaaggttgaaaatggtga

SEQ ID NO: 1201458 - DNA, 25 bp, Homo sapien
gagataatgtatcacgtggatttca

SEQ ID NO: 1201459 - DNA, 25 bp, Homo sapien
gtggatttcagatgtccactgcttg

SEQ ID NO: 1201460 - DNA, 25 bp, Homo sapien
ccatcaccatagagataatgtatca

SEQ ID NO: 1201461 - DNA, 25 bp, Homo sapien
tgtatcacgtggatttcagatgtcc

SEQ ID NO: 1201462 - DNA, 25 bp, Homo sapien
acagagcaacgagatggattctgtc

SEQ ID NO: 1201463 - DNA, 25 bp, Homo sapien
tattcaatgctttcaaccatggctt

SEQ ID NO: 1201464 - DNA, 25 bp, Homo sapien
atattcaatgctttcaaccatggct

SEQ ID NO: 1201465 - DNA, 25 bp, Homo sapien
taagggaaacagagcaacgagatgg

SEQ ID NO: 1201466 - DNA, 25 bp, Homo sapien
tctcatgatcagtacgactatctgt

SEQ ID NO: 1201467 - DNA, 25 bp, Homo sapien
ccctacatttgtatcaggaagttca

SEQ ID NO: 1201468 - DNA, 25 bp, Homo sapien
tattattctcatgcagctaagtaac

SEQ ID NO: 1201469 - DNA, 25 bp, Homo sapien
cattcatacataatgcgaggtctta

SEQ ID NO: 1201470 - DNA, 25 bp, Homo sapien
caacttttgcgtttgaaagcagtga

SEQ ID NO: 1201471 - DNA, 25 bp, Homo sapien
ggatgaacaacttttgcgtttgaaa

SEQ ID NO: 1201472 - DNA, 25 bp, Homo sapien
aaagtttcacacttgagtttaggat

SEQ ID NO: 1201473 - DNA, 25 bp, Homo sapien
gagtttaggatgaacaacttttgcg

SEQ ID NO: 1201474 - DNA, 25 bp, Homo sapien
tattctctgaggtcaactacactgg

SEQ ID NO: 1201475 - DNA, 25 bp, Homo sapien
taacagttcagctgcaactgcagcc

SEQ ID NO: 1201476 - DNA, 25 bp, Homo sapien
caagaggtaggccacttattaagct

SEQ ID NO: 1201477 - DNA, 25 bp, Homo sapien
tcatacagtgttcccaagacaaatc

SEQ ID NO: 1201478 - DNA, 25 bp, Homo sapien
tggtcacagctggggttctcataga

SEQ ID NO: 1201479 - DNA, 25 bp, Homo sapien
gtcacagctggggttctcatagaaa

SEQ ID NO: 1201480 - DNA, 25 bp, Homo sapien
cttggtcacagctggggttctcata

SEQ ID NO: 1201481 - DNA, 25 bp, Homo sapien
ttggtcacagctggggttctcatag

SEQ ID NO: 1201482 - DNA, 25 bp, Homo sapien
ggaagactgattcttggaccagcac

SEQ ID NO: 1201483 - DNA, 25 bp, Homo sapien
ccagacttgggcttagtgcagagga

SEQ ID NO: 1201484 - DNA, 25 bp, Homo sapien
taagctgcttatggctgtgaaacca

SEQ ID NO: 1201485 - DNA, 25 bp, Homo sapien
caagcaactgtgtgggatcctggca

SEQ ID NO: 1201486 - DNA, 25 bp, Homo sapien
tgaggcagatggagacttgcgctaa

SEQ ID NO: 1201487 - DNA, 25 bp, Homo sapien
gaggcagatggagacttgcgctaac

SEQ ID NO: 1201488 - DNA, 25 bp, Homo sapien
cattgagaaggagagtacagagttg

SEQ ID NO: 1201489 - DNA, 25 bp, Homo sapien
attgagaaggagagtacagagttga

SEQ ID NO: 1201490 - DNA, 25 bp, Homo sapien
aaggagagtacagagttgagcatat

SEQ ID NO: 1201491 - DNA, 25 bp, Homo sapien
gagaaggagagtacagagttgagca

SEQ ID NO: 1201492 - DNA, 25 bp, Homo sapien
cctatatctagaccccggaactgat

SEQ ID NO: 1201493 - DNA, 25 bp, Homo sapien
tccctatatctagaccccggaactg

SEQ ID NO: 1201494 - DNA, 25 bp, Homo sapien
tgcttccctatatctagaccccgga

SEQ ID NO: 1201495 - DNA, 25 bp, Homo sapien
tcagaagtgtgaacgggcaaaggga

SEQ ID NO: 1201496 - DNA, 25 bp, Homo sapien
atggattgggaagtactcttgttca

SEQ ID NO: 1201497 - DNA, 25 bp, Homo sapien
ggattgggaagtactcttgttcatc

SEQ ID NO: 1201498 - DNA, 25 bp, Homo sapien
tgttcatctttaacatcggacagag

SEQ ID NO: 1201499 - DNA, 25 bp, Homo sapien
ttcatctttaacatcggacagagaa

SEQ ID NO: 1201500 - DNA, 25 bp, Homo sapien
tgcctcaaggttccccgaaaaatga

SEQ ID NO: 1201501 - DNA, 25 bp, Homo sapien
gaaaagtctttactttggtgcagca

SEQ ID NO: 1201502 - DNA, 25 bp, Homo sapien
gatgggagcctatagggacacatta

SEQ ID NO: 1201503 - DNA, 25 bp, Homo sapien
tgttctactttgtaaagccgaatgg

SEQ ID NO: 1201504 - DNA, 25 bp, Homo sapien
catcatcgagagtttgaaattctcc

SEQ ID NO: 1201505 - DNA, 25 bp, Homo sapien
cctttatcatgatccccatgggaaa

SEQ ID NO: 1201506 - DNA, 25 bp, Homo sapien
tctcatcatcgagagtttgaaattc

SEQ ID NO: 1201507 - DNA, 25 bp, Homo sapien
tttgctctcatcatcgagagtttga

SEQ ID NO: 1201508 - DNA, 25 bp, Homo sapien
actgtgcttctgagctctttctcca

SEQ ID NO: 1201509 - DNA, 25 bp, Homo sapien
ccactgtgcttctgagctctttctc

SEQ ID NO: 1201510 - DNA, 25 bp, Homo sapien
ctgtgcttctgagctctttctccat

SEQ ID NO: 1201511 - DNA, 25 bp, Homo sapien
cactgtgcttctgagctctttctcc

SEQ ID NO: 1201512 - DNA, 25 bp, Homo sapien
tattgagatgtcctgtgtcacaacc

SEQ ID NO: 1201513 - DNA, 25 bp, Homo sapien
gtcatggagccacacactattgaga

SEQ ID NO: 1201514 - DNA, 25 bp, Homo sapien
caaagttcccctggttctagaacag

SEQ ID NO: 1201515 - DNA, 25 bp, Homo sapien
ggaagagcactttgcaccgctgata

SEQ ID NO: 1201516 - DNA, 25 bp, Homo sapien
actcctgagccagcgagatcacgaa

SEQ ID NO: 1201517 - DNA, 25 bp, Homo sapien
cactcctgagccagcgagatcacga

SEQ ID NO: 1201518 - DNA, 25 bp, Homo sapien
tcctgagccagcgagatcacgaacc

SEQ ID NO: 1201519 - DNA, 25 bp, Homo sapien
tgagccagcgagatcacgaacccac

SEQ ID NO: 1201520 - DNA, 25 bp, Homo sapien
tggcaaatcagcactggagcactgc

SEQ ID NO: 1201521 - DNA, 25 bp, Homo sapien
aaacctgcccgtaatcatggaggag

SEQ ID NO: 1201522 - DNA, 25 bp, Homo sapien
caaagagaagctatcaaataggagc

SEQ ID NO: 1201523 - DNA, 25 bp, Homo sapien
taatctcagccggaaatctcacctt

SEQ ID NO: 1201524 - DNA, 25 bp, Homo sapien
ttcttatctactagcttcctaccac

SEQ ID NO: 1201525 - DNA, 25 bp, Homo sapien
tcttatctactagcttcctaccacc

SEQ ID NO: 1201526 - DNA, 25 bp, Homo sapien
tttcttatctactagcttcctacca

SEQ ID NO: 1201527 - DNA, 25 bp, Homo sapien
ttttcttatctactagcttcctacc

SEQ ID NO: 1201528 - DNA, 25 bp, Homo sapien
caaaatttagagtcctgctggtcca

SEQ ID NO: 1201529 - DNA, 25 bp, Homo sapien
gtggtatggacctcttaaaatggga

SEQ ID NO: 1201530 - DNA, 25 bp, Homo sapien
gatcccatgactgacaatctacaga

SEQ ID NO: 1201531 - DNA, 25 bp, Homo sapien
ggcaaagccttgaatacaatgggaa

SEQ ID NO: 1201532 - DNA, 25 bp, Homo sapien
caggaagaactttcatgatggcaga

SEQ ID NO: 1201533 - DNA, 25 bp, Homo sapien
tgacagaatgcacttatcctatggc

SEQ ID NO: 1201534 - DNA, 25 bp, Homo sapien
caaaaacactctgtggtgtggtgac

SEQ ID NO: 1201535 - DNA, 25 bp, Homo sapien
ccaagaaagtgttgggcgaccagaa

SEQ ID NO: 1201536 - DNA, 25 bp, Homo sapien
tcaggactgaggcagttctccaaat

SEQ ID NO: 1201537 - DNA, 25 bp, Homo sapien
ttggcatagctcaggttttataaca

SEQ ID NO: 1201538 - DNA, 25 bp, Homo sapien
cctcttggcatagctcaggttttat

SEQ ID NO: 1201539 - DNA, 25 bp, Homo sapien
tttttaactcagactcctcttggca

SEQ ID NO: 1201540 - DNA, 25 bp, Homo sapien
tcagactcctcttggcatagctcag

SEQ ID NO: 1201541 - DNA, 25 bp, Homo sapien
ttgtctttgtcgtatgcttttcaaa

SEQ ID NO: 1201542 - DNA, 25 bp, Homo sapien
tttgtctttgtcgtatgcttttcaa

SEQ ID NO: 1201543 - DNA, 25 bp, Homo sapien
actaggtttgtctttgtcgtatgct

SEQ ID NO: 1201544 - DNA, 25 bp, Homo sapien
taggtttgtctttgtcgtatgcttt

SEQ ID NO: 1201545 - DNA, 25 bp, Homo sapien
cttttgttaatgaagttcctactct

SEQ ID NO: 1201546 - DNA, 25 bp, Homo sapien
gcttggatcagttgatgactctcat

SEQ ID NO: 1201547 - DNA, 25 bp, Homo sapien
atcttcacttggcttatctaacctt

SEQ ID NO: 1201548 - DNA, 25 bp, Homo sapien
tctgttgtttatatcctgttgcttg

SEQ ID NO: 1201549 - DNA, 25 bp, Homo sapien
aagggcccatgaattttgaatttat

SEQ ID NO: 1201550 - DNA, 25 bp, Homo sapien
gaattttgaatttatgccaatttac

SEQ ID NO: 1201551 - DNA, 25 bp, Homo sapien
tttgaaagggcccatgaattttgaa

SEQ ID NO: 1201552 - DNA, 25 bp, Homo sapien
tgaattttgaatttatgccaattta

SEQ ID NO: 1201553 - DNA, 25 bp, Homo sapien
ggccaggtgcagacaattggatcag

SEQ ID NO: 1201554 - DNA, 25 bp, Homo sapien
gaagggttatttgagtccaaactca

SEQ ID NO: 1201555 - DNA, 25 bp, Homo sapien
gacgtgactttgcttcacattggcc

SEQ ID NO: 1201556 - DNA, 25 bp, Homo sapien
ttgcctcccgccatttaagacgtga

SEQ ID NO: 1201557 - DNA, 25 bp, Homo sapien
cattgttaactattggcactgcctt

SEQ ID NO: 1201558 - DNA, 25 bp, Homo sapien
tgccttttatagtgaatctctagaa

SEQ ID NO: 1201559 - DNA, 25 bp, Homo sapien
cagcttggtcttgcattccagggct

SEQ ID NO: 1201560 - DNA, 25 bp, Homo sapien
gaacacttaccaagagatgtcctct

SEQ ID NO: 1201561 - DNA, 25 bp, Homo sapien
tagtctcaggttcacttactcaaca

SEQ ID NO: 1201562 - DNA, 25 bp, Homo sapien
gcttgttgatagtctcaggttcact

SEQ ID NO: 1201563 - DNA, 25 bp, Homo sapien
tgatagtctcaggttcacttactca

SEQ ID NO: 1201564 - DNA, 25 bp, Homo sapien
aaataatgcttgttgatagtctcag

SEQ ID NO: 1201565 - DNA, 25 bp, Homo sapien
gtaatgtaaacacatcttctggtca

SEQ ID NO: 1201566 - DNA, 25 bp, Homo sapien
agtaatgtaaacacatcttctggtc

SEQ ID NO: 1201567 - DNA, 25 bp, Homo sapien
taatgtaaacacatcttctggtcat

SEQ ID NO: 1201568 - DNA, 25 bp, Homo sapien
cagtaatgtaaacacatcttctggt

SEQ ID NO: 1201569 - DNA, 25 bp, Homo sapien
gggacacttaactcctgcttcaaca

SEQ ID NO: 1201570 - DNA, 25 bp, Homo sapien
tttacctgggacacttaactcctgc

SEQ ID NO: 1201571 - DNA, 25 bp, Homo sapien
gatatctctcagttgtgcagcagca

SEQ ID NO: 1201572 - DNA, 25 bp, Homo sapien
tcacttgatatctctcagttgtgca

SEQ ID NO: 1201573 - DNA, 25 bp, Homo sapien
ggaggtgacttagatatacttcctg

SEQ ID NO: 1201574 - DNA, 25 bp, Homo sapien
caaggtagagttacggctactggag

SEQ ID NO: 1201575 - DNA, 25 bp, Homo sapien
ttactggacaaggtagagttacggc

SEQ ID NO: 1201576 - DNA, 25 bp, Homo sapien
tacggctactggaggtgacttagat

SEQ ID NO: 1201577 - DNA, 25 bp, Homo sapien
gtgtggtttgacttagctggctttc

SEQ ID NO: 1201578 - DNA, 25 bp, Homo sapien
agctggctttcagtctactattaca

SEQ ID NO: 1201579 - DNA, 25 bp, Homo sapien
tgtggtttgacttagctggctttca

SEQ ID NO: 1201580 - DNA, 25 bp, Homo sapien
ttagctggctttcagtctactatta

SEQ ID NO: 1201581 - DNA, 25 bp, Homo sapien
agttgaggtgtaggcatgcattgtg

SEQ ID NO: 1201582 - DNA, 25 bp, Homo sapien
gctctgtttggttgaatcctcttca

SEQ ID NO: 1201583 - DNA, 25 bp, Homo sapien
tcagtagatctgtgagtgatgttag

SEQ ID NO: 1201584 - DNA, 25 bp, Homo sapien
ctgtctattgtttgaagttgaggtg

SEQ ID NO: 1201585 - DNA, 25 bp, Homo sapien
agctaccaactatgcactgagtatc

SEQ ID NO: 1201586 - DNA, 25 bp, Homo sapien
caactatgcactgagtatcctttcc

SEQ ID NO: 1201587 - DNA, 25 bp, Homo sapien
taccaactatgcactgagtatcctt

SEQ ID NO: 1201588 - DNA, 25 bp, Homo sapien
gttttcttaagctaccaactatgca

SEQ ID NO: 1201589 - DNA, 25 bp, Homo sapien
ggtctgtcaaagttgaaaacaccca

SEQ ID NO: 1201590 - DNA, 25 bp, Homo sapien
taacattactattctggaagccgca

SEQ ID NO: 1201591 - DNA, 25 bp, Homo sapien
gcacaaagcccaccagctataggta

SEQ ID NO: 1201592 - DNA, 25 bp, Homo sapien
ccagatacgaaagggtacattctgt

SEQ ID NO: 1201593 - DNA, 25 bp, Homo sapien
caaatctatatgtgttacacttgtc

SEQ ID NO: 1201594 - DNA, 25 bp, Homo sapien
aatctatatgtgttacacttgtcat

SEQ ID NO: 1201595 - DNA, 25 bp, Homo sapien
ttcaaatctatatgtgttacacttg

SEQ ID NO: 1201596 - DNA, 25 bp, Homo sapien
tcaaatctatatgtgttacacttgt

SEQ ID NO: 1201597 - DNA, 25 bp, Homo sapien
tgtccaacccagagtgacagacagc

SEQ ID NO: 1201598 - DNA, 25 bp, Homo sapien
tgaaatgatagcctttgttcccctg

SEQ ID NO: 1201599 - DNA, 25 bp, Homo sapien
gagtgacagacagctgcaattagta

SEQ ID NO: 1201600 - DNA, 25 bp, Homo sapien
aatgatagcctttgttcccctgtcc

SEQ ID NO: 1201601 - DNA, 25 bp, Homo sapien
ttgcagccttgcatgtcatcatatt

SEQ ID NO: 1201602 - DNA, 25 bp, Homo sapien
gcagccttgcatgtcatcatattca

SEQ ID NO: 1201603 - DNA, 25 bp, Homo sapien
ctttgcagccttgcatgtcatcata

SEQ ID NO: 1201604 - DNA, 25 bp, Homo sapien
tcatggtgcctctttgcagccttgc

SEQ ID NO: 1201605 - DNA, 25 bp, Homo sapien
aaatcatgggcatagagtcctgcca

SEQ ID NO: 1201606 - DNA, 25 bp, Homo sapien
atatagttaattcctagaagaagta

SEQ ID NO: 1201607 - DNA, 25 bp, Homo sapien
agaagtatcctgaaatcatgggcat

SEQ ID NO: 1201608 - DNA, 25 bp, Homo sapien
tagttaattcctagaagaagtatcc

SEQ ID NO: 1201609 - DNA, 25 bp, Homo sapien
atttctgattaatcatcctacagga

SEQ ID NO: 1201610 - DNA, 25 bp, Homo sapien
taatttctgattaatcatcctacag

SEQ ID NO: 1201611 - DNA, 25 bp, Homo sapien
ttctgattaatcatcctacaggatg

SEQ ID NO: 1201612 - DNA, 25 bp, Homo sapien
catcctacaggatgtttcagtcaac

SEQ ID NO: 1201613 - DNA, 25 bp, Homo sapien
gctgatacagtttgaccttgatctt

SEQ ID NO: 1201614 - DNA, 25 bp, Homo sapien
ggctgatacagtttgaccttgatct

SEQ ID NO: 1201615 - DNA, 25 bp, Homo sapien
gatacagtttgaccttgatcttcat

SEQ ID NO: 1201616 - DNA, 25 bp, Homo sapien
tgatacagtttgaccttgatcttca

SEQ ID NO: 1201617 - DNA, 25 bp, Homo sapien
tgatgtttgggcagaaacgtcagca

SEQ ID NO: 1201618 - DNA, 25 bp, Homo sapien
tgggcagaaacgtcagcaacaagca

SEQ ID NO: 1201619 - DNA, 25 bp, Homo sapien
atttcatgatgtttgggcagaaacg

SEQ ID NO: 1201620 - DNA, 25 bp, Homo sapien
gcagaaacgtcagcaacaagcagca

SEQ ID NO: 1201621 - DNA, 25 bp, Homo sapien
ctgacaccaaggatatcaatatggg

SEQ ID NO: 1201622 - DNA, 25 bp, Homo sapien
ttcaatttatttgctctgacaccaa

SEQ ID NO: 1201623 - DNA, 25 bp, Homo sapien
tcaatatggggggacctgaaggcat

SEQ ID NO: 1201624 - DNA, 25 bp, Homo sapien
aaggcattgttcacggaagacaaca

SEQ ID NO: 1201625 - DNA, 25 bp, Homo sapien
caagtcgaatatagagttggtcaaa

SEQ ID NO: 1201626 - DNA, 25 bp, Homo sapien
ccccataattggaagctttccttcg

SEQ ID NO: 1201627 - DNA, 25 bp, Homo sapien
gaagctttccttcggatttgttcaa

SEQ ID NO: 1201628 - DNA, 25 bp, Homo sapien
cggatttgttcaagtcgaatataga

SEQ ID NO: 1201629 - DNA, 25 bp, Homo sapien
tcactacaacattggccatggccag

SEQ ID NO: 1201630 - DNA, 25 bp, Homo sapien
tccaggctacgtgctctcagggaca

SEQ ID NO: 1201631 - DNA, 25 bp, Homo sapien
taataatgcgtaaccatttggctgc

SEQ ID NO: 1201632 - DNA, 25 bp, Homo sapien
tcagggacacaactatcaatactgc

SEQ ID NO: 1201633 - DNA, 25 bp, Homo sapien
gtgtttctatttactcgtctacaac

SEQ ID NO: 1201634 - DNA, 25 bp, Homo sapien
tcaaatcctgacacttctactcaaa

SEQ ID NO: 1201635 - DNA, 25 bp, Homo sapien
gggcaatttacttactctttctgtg

SEQ ID NO: 1201636 - DNA, 25 bp, Homo sapien
gcctttaattcactactctatgtcc

SEQ ID NO: 1201637 - DNA, 25 bp, Homo sapien
aaattccagttgctctcttatccat

SEQ ID NO: 1201638 - DNA, 25 bp, Homo sapien
catctggcctaagcaatttatctgg

SEQ ID NO: 1201639 - DNA, 25 bp, Homo sapien
ccaaggctctcttgatatgtagaca

SEQ ID NO: 1201640 - DNA, 25 bp, Homo sapien
ggcttgataaaccaaccatctggcc

SEQ ID NO: 1201641 - DNA, 25 bp, Homo sapien
gcctgagctaacagatgagagatac

SEQ ID NO: 1201642 - DNA, 25 bp, Homo sapien
actcaattatctggtggtcctgggc

SEQ ID NO: 1201643 - DNA, 25 bp, Homo sapien
tcctgagccagagcacattgtttag

SEQ ID NO: 1201644 - DNA, 25 bp, Homo sapien
tcagaagcttttgtacaggactcaa

SEQ ID NO: 1201645 - DNA, 25 bp, Homo sapien
ttaccaatcagcacaaaacggcagg

SEQ ID NO: 1201646 - DNA, 25 bp, Homo sapien
tagctgtaacctcacattgcttggc

SEQ ID NO: 1201647 - DNA, 25 bp, Homo sapien
ggacaaagtcttctgtgacccagct

SEQ ID NO: 1201648 - DNA, 25 bp, Homo sapien
aaacggcaggctgtgtctatagtct

SEQ ID NO: 1201649 - DNA, 25 bp, Homo sapien
gatctccaaggacggtattaccaga

SEQ ID NO: 1201650 - DNA, 25 bp, Homo sapien
ggtgtccatccccaataattgcttg

SEQ ID NO: 1201651 - DNA, 25 bp, Homo sapien
caacttgtcagaacacgatggctca

SEQ ID NO: 1201652 - DNA, 25 bp, Homo sapien
tagagagtgcaattccagcaaagtc

SEQ ID NO: 1201653 - DNA, 25 bp, Homo sapien
ttgagaagtgaaccccactgggctt

SEQ ID NO: 1201654 - DNA, 25 bp, Homo sapien
gaaaaacggcccaatcagctctctg

SEQ ID NO: 1201655 - DNA, 25 bp, Homo sapien
tctcactagctaaagggttgtaaac

SEQ ID NO: 1201656 - DNA, 25 bp, Homo sapien
tcctgcagggagtaccattgagaag

SEQ ID NO: 1201657 - DNA, 25 bp, Homo sapien
tgagatatcattggattatatgtta

SEQ ID NO: 1201658 - DNA, 25 bp, Homo sapien
tgttaagacctgacttgctacttct

SEQ ID NO: 1201659 - DNA, 25 bp, Homo sapien
gccatccatgttaagacctgacttg

SEQ ID NO: 1201660 - DNA, 25 bp, Homo sapien
tccatgttaagacctgacttgctac

SEQ ID NO: 1201661 - DNA, 25 bp, Homo sapien
gggcccattggagactatgagcaac

SEQ ID NO: 1201662 - DNA, 25 bp, Homo sapien
cagggcccattggagactatgagca

SEQ ID NO: 1201663 - DNA, 25 bp, Homo sapien
gcccattggagactatgagcaacct

SEQ ID NO: 1201664 - DNA, 25 bp, Homo sapien
agtcagggcccattggagactatga

SEQ ID NO: 1201665 - DNA, 25 bp, Homo sapien
agatctgtccccggcaggtgaagga

SEQ ID NO: 1201666 - DNA, 25 bp, Homo sapien
cagcaggtggtagatgcaatagatc

SEQ ID NO: 1201667 - DNA, 25 bp, Homo sapien
ggtggtagatgcaatagatcttcag

SEQ ID NO: 1201668 - DNA, 25 bp, Homo sapien
atctgtccccggcaggtgaaggatg

SEQ ID NO: 1201669 - DNA, 25 bp, Homo sapien
aggtaatcatcctgaacctgaagga

SEQ ID NO: 1201670 - DNA, 25 bp, Homo sapien
taatcatcctgaacctgaaggaact

SEQ ID NO: 1201671 - DNA, 25 bp, Homo sapien
tccccaaagaggtcaaggtaatcat

SEQ ID NO: 1201672 - DNA, 25 bp, Homo sapien
tcatcctgaacctgaaggaactctc

SEQ ID NO: 1201673 - DNA, 25 bp, Homo sapien
ggatgtcagtgccaactttgccggt

SEQ ID NO: 1201674 - DNA, 25 bp, Homo sapien
tcagtgccaactttgccggtcacac

SEQ ID NO: 1201675 - DNA, 25 bp, Homo sapien
ctggatgtcagtgccaactttgccg

SEQ ID NO: 1201676 - DNA, 25 bp, Homo sapien
tgtcagtgccaactttgccggtcac

SEQ ID NO: 1201677 - DNA, 25 bp, Homo sapien
gcctgaattttccttcaggatctgg

SEQ ID NO: 1201678 - DNA, 25 bp, Homo sapien
tctgcctgaattttccttcaggatc

SEQ ID NO: 1201679 - DNA, 25 bp, Homo sapien
cttctgcctgaattttccttcagga

SEQ ID NO: 1201680 - DNA, 25 bp, Homo sapien
tgcctgaattttccttcaggatctg

SEQ ID NO: 1201681 - DNA, 25 bp, Homo sapien
gcaggagcgctgcatactgttcgat

SEQ ID NO: 1201682 - DNA, 25 bp, Homo sapien
tgcatactgttcgatgagacccatg

SEQ ID NO: 1201683 - DNA, 25 bp, Homo sapien
catattgcaagaaaacggctggtag

SEQ ID NO: 1201684 - DNA, 25 bp, Homo sapien
catgatgtgactgtaagtgtcttcc

SEQ ID NO: 1201685 - DNA, 25 bp, Homo sapien
tttaggttggataccagaactccag

SEQ ID NO: 1201686 - DNA, 25 bp, Homo sapien
tctgtgatttaggttggataccaga

SEQ ID NO: 1201687 - DNA, 25 bp, Homo sapien
taggttggataccagaactccaggg

SEQ ID NO: 1201688 - DNA, 25 bp, Homo sapien
aggttggataccagaactccagggt

SEQ ID NO: 1201689 - DNA, 25 bp, Homo sapien
tatgtatttatcccctgttgatcca

SEQ ID NO: 1201690 - DNA, 25 bp, Homo sapien
atatgtatttatcccctgttgatcc

SEQ ID NO: 1201691 - DNA, 25 bp, Homo sapien
catatgtatttatcccctgttgatc

SEQ ID NO: 1201692 - DNA, 25 bp, Homo sapien
acagctttggtaaaccagtaacatc

SEQ ID NO: 1201693 - DNA, 25 bp, Homo sapien
ccacaaatccagctacagctttggt

SEQ ID NO: 1201694 - DNA, 25 bp, Homo sapien
tacagctttggtaaaccagtaacat

SEQ ID NO: 1201695 - DNA, 25 bp, Homo sapien
cagcaaagaaaattctcaatccata

SEQ ID NO: 1201696 - DNA, 25 bp, Homo sapien
gggagtttcctagcagagtggcagt

SEQ ID NO: 1201697 - DNA, 25 bp, Homo sapien
gagtttcctagcagagtggcagttc

SEQ ID NO: 1201698 - DNA, 25 bp, Homo sapien
gtttcctagcagagtggcagttccc

SEQ ID NO: 1201699 - DNA, 25 bp, Homo sapien
tttcctagcagagtggcagttccct

SEQ ID NO: 1201700 - DNA, 25 bp, Homo sapien
tttttgaatcgcagtttacacccag

SEQ ID NO: 1201701 - DNA, 25 bp, Homo sapien
ctggctttttgaatcgcagtttaca

SEQ ID NO: 1201702 - DNA, 25 bp, Homo sapien
tgaatcgcagtttacacccaggaag

SEQ ID NO: 1201703 - DNA, 25 bp, Homo sapien
ggctttttgaatcgcagtttacacc

SEQ ID NO: 1201704 - DNA, 25 bp, Homo sapien
acaatttgaaccgtgagtaaaacag

SEQ ID NO: 1201705 - DNA, 25 bp, Homo sapien
gccaaacaatttgaaccgtgagtaa

SEQ ID NO: 1201706 - DNA, 25 bp, Homo sapien
caatttgaaccgtgagtaaaacagg

SEQ ID NO: 1201707 - DNA, 25 bp, Homo sapien
ctgccaaacaatttgaaccgtgagt

SEQ ID NO: 1201708 - DNA, 25 bp, Homo sapien
tgagcccccaagttgcacgtcaaaa

SEQ ID NO: 1201709 - DNA, 25 bp, Homo sapien
ccccaagttgcacgtcaaaaatgtt

SEQ ID NO: 1201710 - DNA, 25 bp, Homo sapien
gcttgagcccccaagttgcacgtca

SEQ ID NO: 1201711 - DNA, 25 bp, Homo sapien
caagttgcacgtcaaaaatgttgca

SEQ ID NO: 1201712 - DNA, 25 bp, Homo sapien
ccagaagcctatatttgagagtgcc

SEQ ID NO: 1201713 - DNA, 25 bp, Homo sapien
acacagtacccacacagagaggcag

SEQ ID NO: 1201714 - DNA, 25 bp, Homo sapien
gacacaggaagcataccagattggc

SEQ ID NO: 1201715 - DNA, 25 bp, Homo sapien
ggccatgtccccaggatgtgtaaaa

SEQ ID NO: 1201716 - DNA, 25 bp, Homo sapien
taaaatgtctatgagaagttctatg

SEQ ID NO: 1201717 - DNA, 25 bp, Homo sapien
gaggaattaaaatgtctatgagaag

SEQ ID NO: 1201718 - DNA, 25 bp, Homo sapien
aatttgctattgaggaattaaaatg

SEQ ID NO: 1201719 - DNA, 25 bp, Homo sapien
gtctatgagaagttctatgctgcat

SEQ ID NO: 1201720 - DNA, 25 bp, Homo sapien
ccaatataggctctgtggtcccagt

SEQ ID NO: 1201721 - DNA, 25 bp, Homo sapien
tacccagtctgtaactgtgccacca

SEQ ID NO: 1201722 - DNA, 25 bp, Homo sapien
catttgtgtccctagtactggttgc

SEQ ID NO: 1201723 - DNA, 25 bp, Homo sapien
cagttgcactacctggttcggtact

SEQ ID NO: 1201724 - DNA, 25 bp, Homo sapien
ctattgttgacacatatgtgagttt

SEQ ID NO: 1201725 - DNA, 25 bp, Homo sapien
ttgacacatatgtgagttttccagg

SEQ ID NO: 1201726 - DNA, 25 bp, Homo sapien
ttgttgacacatatgtgagttttcc

SEQ ID NO: 1201727 - DNA, 25 bp, Homo sapien
gttgacacatatgtgagttttccag

SEQ ID NO: 1201728 - DNA, 25 bp, Homo sapien
cttttatgtgcttctctgtcccctt

SEQ ID NO: 1201729 - DNA, 25 bp, Homo sapien
tatgtgcttctctgtcccctttgcc

SEQ ID NO: 1201730 - DNA, 25 bp, Homo sapien
gtgcttctctgtcccctttgcccat

SEQ ID NO: 1201731 - DNA, 25 bp, Homo sapien
tttatgtgcttctctgtcccctttg

SEQ ID NO: 1201732 - DNA, 25 bp, Homo sapien
tataagttcaggtagtcttgagtca

SEQ ID NO: 1201733 - DNA, 25 bp, Homo sapien
ctgaaagttgtataagttcaggtag

SEQ ID NO: 1201734 - DNA, 25 bp, Homo sapien
gaaagttgtataagttcaggtagtc

SEQ ID NO: 1201735 - DNA, 25 bp, Homo sapien
ttgtataagttcaggtagtcttgag

SEQ ID NO: 1201736 - DNA, 25 bp, Homo sapien
ctttcctactgttggtggcattatc

SEQ ID NO: 1201737 - DNA, 25 bp, Homo sapien
tttcctactgttggtggcattatca

SEQ ID NO: 1201738 - DNA, 25 bp, Homo sapien
ttcctactgttggtggcattatcat

SEQ ID NO: 1201739 - DNA, 25 bp, Homo sapien
cacctccttcagactgcagacaggg

SEQ ID NO: 1201740 - DNA, 25 bp, Homo sapien
cagactgcagacagggttagcagat

SEQ ID NO: 1201741 - DNA, 25 bp, Homo sapien
gcagcccagaatccatctccataaa

SEQ ID NO: 1201742 - DNA, 25 bp, Homo sapien
taaacatcttcctgtaactccacct

SEQ ID NO: 1201743 - DNA, 25 bp, Homo sapien
gcttcagcctggcgttgttttccag

SEQ ID NO: 1201744 - DNA, 25 bp, Homo sapien
ggcttcagcctggcgttgttttcca

SEQ ID NO: 1201745 - DNA, 25 bp, Homo sapien
tggcttcagcctggcgttgttttcc

SEQ ID NO: 1201746 - DNA, 25 bp, Homo sapien
atggcttcagcctggcgttgttttc

SEQ ID NO: 1201747 - DNA, 25 bp, Homo sapien
aatcttcccagcctttataatttga

SEQ ID NO: 1201748 - DNA, 25 bp, Homo sapien
gattcagacacttctcaaccaggtc

SEQ ID NO: 1201749 - DNA, 25 bp, Homo sapien
cagcctttataatttgattcagaca

SEQ ID NO: 1201750 - DNA, 25 bp, Homo sapien
tgcaaccagtaatgcaaaggtctct

SEQ ID NO: 1201751 - DNA, 25 bp, Homo sapien
tgttgagaatgaggttgtcaaaata

SEQ ID NO: 1201752 - DNA, 25 bp, Homo sapien
tgagaatgaggttgtcaaaatagat

SEQ ID NO: 1201753 - DNA, 25 bp, Homo sapien
tataaattgctgagatagttatcat

SEQ ID NO: 1201754 - DNA, 25 bp, Homo sapien
atataaattgctgagatagttatca

SEQ ID NO: 1201755 - DNA, 25 bp, Homo sapien
tggacagccacgtacacttttggtt

SEQ ID NO: 1201756 - DNA, 25 bp, Homo sapien
ttttggacagccacgtacacttttg

SEQ ID NO: 1201757 - DNA, 25 bp, Homo sapien
tttggacagccacgtacacttttgg

SEQ ID NO: 1201758 - DNA, 25 bp, Homo sapien
ctttttggacagccacgtacacttt

SEQ ID NO: 1201759 - DNA, 25 bp, Homo sapien
ctgcctatgccactgtctccagaag

SEQ ID NO: 1201760 - DNA, 25 bp, Homo sapien
cctgctgctgcctatgccactgtct

SEQ ID NO: 1201761 - DNA, 25 bp, Homo sapien
tgctgcctatgccactgtctccaga

SEQ ID NO: 1201762 - DNA, 25 bp, Homo sapien
tgagccccacgaaattcctgctgct

SEQ ID NO: 1201763 - DNA, 25 bp, Homo sapien
ttcattatttgaagatttgacttac

SEQ ID NO: 1201764 - DNA, 25 bp, Homo sapien
gaaggacgaagagttacaatttgaa

SEQ ID NO: 1201765 - DNA, 25 bp, Homo sapien
agtttgtgtgaaggacgaagagtta

SEQ ID NO: 1201766 - DNA, 25 bp, Homo sapien
gagttacaatttgaagagcattcat

SEQ ID NO: 1201767 - DNA, 25 bp, Homo sapien
taatctcctaaatgtaattgcaggt

SEQ ID NO: 1201768 - DNA, 25 bp, Homo sapien
ctcctaaatgtaattgcaggttgct

SEQ ID NO: 1201769 - DNA, 25 bp, Homo sapien
gcttttaatctcctaaatgtaattg

SEQ ID NO: 1201770 - DNA, 25 bp, Homo sapien
tttaatctcctaaatgtaattgcag

SEQ ID NO: 1201771 - DNA, 25 bp, Homo sapien
catgctgtgacaattgtgatgccca

SEQ ID NO: 1201772 - DNA, 25 bp, Homo sapien
tcgtctgagaacaaggagctttact

SEQ ID NO: 1201773 - DNA, 25 bp, Homo sapien
tactatgatgcagatgtgcagctgc

SEQ ID NO: 1201774 - DNA, 25 bp, Homo sapien
gaaaaacatagctagaatccccagt

SEQ ID NO: 1201775 - DNA, 25 bp, Homo sapien
tgtttggtacagcatgagactgcag

SEQ ID NO: 1201776 - DNA, 25 bp, Homo sapien
tgaggtaatcagttgcaggacctga

SEQ ID NO: 1201777 - DNA, 25 bp, Homo sapien
cctgattgatggtcaaagtgcatga

SEQ ID NO: 1201778 - DNA, 25 bp, Homo sapien
taaactgcccagacatagccttatg

SEQ ID NO: 1201779 - DNA, 25 bp, Homo sapien
cagtggtctcctgcataacatgttt

SEQ ID NO: 1201780 - DNA, 25 bp, Homo sapien
ttcatctgtgttctgcgtaactgca

SEQ ID NO: 1201781 - DNA, 25 bp, Homo sapien
cataacatgtttaagtgaatgcatt

SEQ ID NO: 1201782 - DNA, 25 bp, Homo sapien
tgtgttctgcgtaactgcatcttgg

SEQ ID NO: 1201783 - DNA, 25 bp, Homo sapien
aaggttacatgctctccaaggcaca

SEQ ID NO: 1201784 - DNA, 25 bp, Homo sapien
ggttacatgctctccaaggcacatt

SEQ ID NO: 1201785 - DNA, 25 bp, Homo sapien
ttacatgctctccaaggcacattag

SEQ ID NO: 1201786 - DNA, 25 bp, Homo sapien
tacatgctctccaaggcacattagt

SEQ ID NO: 1201787 - DNA, 25 bp, Homo sapien
tcctaacagtaatcttaggatcttg

SEQ ID NO: 1201788 - DNA, 25 bp, Homo sapien
ctccaatcctaacagtaatcttagg

SEQ ID NO: 1201789 - DNA, 25 bp, Homo sapien
cagtaatcttaggatcttggatatt

SEQ ID NO: 1201790 - DNA, 25 bp, Homo sapien
taacagtaatcttaggatcttggat

SEQ ID NO: 1201791 - DNA, 25 bp, Homo sapien
acagcgtaagatgcctgctgcattg

SEQ ID NO: 1201792 - DNA, 25 bp, Homo sapien
taacggtgtgacagcgtaagatgcc

SEQ ID NO: 1201793 - DNA, 25 bp, Homo sapien
attcgacgaaatgtatgcatttgtg

SEQ ID NO: 1201794 - DNA, 25 bp, Homo sapien
tatgatagtaaaataacggtgtgac

SEQ ID NO: 1201795 - DNA, 25 bp, Homo sapien
cacattagaagatgagaacttgcat

SEQ ID NO: 1201796 - DNA, 25 bp, Homo sapien
aattagcacattagaagatgagaac

SEQ ID NO: 1201797 - DNA, 25 bp, Homo sapien
cagggattgaattagcacattagaa

SEQ ID NO: 1201798 - DNA, 25 bp, Homo sapien
ttgaattagcacattagaagatgag

SEQ ID NO: 1201799 - DNA, 25 bp, Homo sapien
caccaaatctattggcaccttgagc

SEQ ID NO: 1201800 - DNA, 25 bp, Homo sapien
caaatctattggcaccttgagcttg

SEQ ID NO: 1201801 - DNA, 25 bp, Homo sapien
accaaatctattggcaccttgagct

SEQ ID NO: 1201802 - DNA, 25 bp, Homo sapien
aaatctattggcaccttgagcttgg

SEQ ID NO: 1201803 - DNA, 25 bp, Homo sapien
ttggatgatttggatggacacagct

SEQ ID NO: 1201804 - DNA, 25 bp, Homo sapien
gacacagctgacataactttcagaa

SEQ ID NO: 1201805 - DNA, 25 bp, Homo sapien
atggacacagctgacataactttca

SEQ ID NO: 1201806 - DNA, 25 bp, Homo sapien
cttggatgatttggatggacacagc

SEQ ID NO: 1201807 - DNA, 25 bp, Homo sapien
atccaaataagatagggtactccct

SEQ ID NO: 1201808 - DNA, 25 bp, Homo sapien
aattttcatctgagctaatttctct

SEQ ID NO: 1201809 - DNA, 25 bp, Homo sapien
tgtggacaatccaaataagataggg

SEQ ID NO: 1201810 - DNA, 25 bp, Homo sapien
cttttggatctagaggcaggctggt

SEQ ID NO: 1201811 - DNA, 25 bp, Homo sapien
ggatattcattatcgtgcataatcc

SEQ ID NO: 1201812 - DNA, 25 bp, Homo sapien
taaagttgtacgctgttgaagggtg

SEQ ID NO: 1201813 - DNA, 25 bp, Homo sapien
tccattaaatccatggaaggtcaca

SEQ ID NO: 1201814 - DNA, 25 bp, Homo sapien
tcgtgcataatccactgactgcaaa

SEQ ID NO: 1201815 - DNA, 25 bp, Homo sapien
atagggtaatttatcctcaactagg

SEQ ID NO: 1201816 - DNA, 25 bp, Homo sapien
gtgatagggtaatttatcctcaact

SEQ ID NO: 1201817 - DNA, 25 bp, Homo sapien
tgatagggtaatttatcctcaacta

SEQ ID NO: 1201818 - DNA, 25 bp, Homo sapien
gatagggtaatttatcctcaactag

SEQ ID NO: 1201819 - DNA, 25 bp, Homo sapien
gctgggtaagcataacaaatactga

SEQ ID NO: 1201820 - DNA, 25 bp, Homo sapien
tttaccactggagatagatatgagg

SEQ ID NO: 1201821 - DNA, 25 bp, Homo sapien
tctgcaaatgattggcactaataag

SEQ ID NO: 1201822 - DNA, 25 bp, Homo sapien
caatttccacggtgttgtgctgggt

SEQ ID NO: 1201823 - DNA, 25 bp, Homo sapien
gaagagtgagttgcaagctgtaaac

SEQ ID NO: 1201824 - DNA, 25 bp, Homo sapien
gagtgagttgcaagctgtaaactca

SEQ ID NO: 1201825 - DNA, 25 bp, Homo sapien
gagttgcaagctgtaaactcataat

SEQ ID NO: 1201826 - DNA, 25 bp, Homo sapien
agagaagagtgagttgcaagctgta

SEQ ID NO: 1201827 - DNA, 25 bp, Homo sapien
tgtgggttaagatgtagaatcatat

SEQ ID NO: 1201828 - DNA, 25 bp, Homo sapien
aggctcccgacgagaactccactga

SEQ ID NO: 1201829 - DNA, 25 bp, Homo sapien
tccattgaagcctgggtatttcgag

SEQ ID NO: 1201830 - DNA, 25 bp, Homo sapien
cctgattcttggtgtagtaagtgat

SEQ ID NO: 1201831 - DNA, 25 bp, Homo sapien
tttaaaagcattaacgtggtctgca

SEQ ID NO: 1201832 - DNA, 25 bp, Homo sapien
ttttaaagtgatgcacagttttacc

SEQ ID NO: 1201833 - DNA, 25 bp, Homo sapien
taacgtggtctgcattaaaccaaca

SEQ ID NO: 1201834 - DNA, 25 bp, Homo sapien
aatgttttaaagtgatgcacagttt

SEQ ID NO: 1201835 - DNA, 25 bp, Homo sapien
gagtacttgattaaggcaataaggc

SEQ ID NO: 1201836 - DNA, 25 bp, Homo sapien
cttgattaaggcaataaggctacat

SEQ ID NO: 1201837 - DNA, 25 bp, Homo sapien
ttcagaatcctgtgtagagtacttg

SEQ ID NO: 1201838 - DNA, 25 bp, Homo sapien
cagaatcctgtgtagagtacttgat

SEQ ID NO: 1201839 - DNA, 25 bp, Homo sapien
tggcttcctggtcatccaggtcttg

SEQ ID NO: 1201840 - DNA, 25 bp, Homo sapien
tctgaagctcaccaaatgacttctt

SEQ ID NO: 1201841 - DNA, 25 bp, Homo sapien
cacagcctgccattctggtcgagtt

SEQ ID NO: 1201842 - DNA, 25 bp, Homo sapien
gccattctggtcgagttgctggctt

SEQ ID NO: 1201843 - DNA, 25 bp, Homo sapien
tgatgaatataggcagagccttggt

SEQ ID NO: 1201844 - DNA, 25 bp, Homo sapien
ctaatgatgaatataggcagagcct

SEQ ID NO: 1201845 - DNA, 25 bp, Homo sapien
taatgatgaatataggcagagcctt

SEQ ID NO: 1201846 - DNA, 25 bp, Homo sapien
aatgatgaatataggcagagccttg

SEQ ID NO: 1201847 - DNA, 25 bp, Homo sapien
cttactgccaaacccatgtcaaaat

SEQ ID NO: 1201848 - DNA, 25 bp, Homo sapien
aacccatgtcaaaatagccaccagc

SEQ ID NO: 1201849 - DNA, 25 bp, Homo sapien
ccatgtcaaaatagccaccagctga

SEQ ID NO: 1201850 - DNA, 25 bp, Homo sapien
actgccaaacccatgtcaaaatagc

SEQ ID NO: 1201851 - DNA, 25 bp, Homo sapien
ccagggaattgagtgtagaaagccc

SEQ ID NO: 1201852 - DNA, 25 bp, Homo sapien
tcatagcctaaactcctaatgcagg

SEQ ID NO: 1201853 - DNA, 25 bp, Homo sapien
tactccggatccctggagatctgcc

SEQ ID NO: 1201854 - DNA, 25 bp, Homo sapien
ctaatgcaggagagtgggtactccg

SEQ ID NO: 1201855 - DNA, 25 bp, Homo sapien
tgaactcaggtggtatcgaagaaag

SEQ ID NO: 1201856 - DNA, 25 bp, Homo sapien
aagaaagcttctagtagatgtcttt

SEQ ID NO: 1201857 - DNA, 25 bp, Homo sapien
ctcaggtggtatcgaagaaagcttc

SEQ ID NO: 1201858 - DNA, 25 bp, Homo sapien
ctacagtgaactcaggtggtatcga

SEQ ID NO: 1201859 - DNA, 25 bp, Homo sapien
cacataccagcaatctcgatactga

SEQ ID NO: 1201860 - DNA, 25 bp, Homo sapien
caaaccaatggagactgtgtcacat

SEQ ID NO: 1201861 - DNA, 25 bp, Homo sapien
gagtctatcacatgggaggagaaat

SEQ ID NO: 1201862 - DNA, 25 bp, Homo sapien
tcgatactgagtctatcacatggga

SEQ ID NO: 1201863 - DNA, 25 bp, Homo sapien
actttgtaagacctgtgggcctgaa

SEQ ID NO: 1201864 - DNA, 25 bp, Homo sapien
cactgcactttgtaagacctgtggg

SEQ ID NO: 1201865 - DNA, 25 bp, Homo sapien
aaatgaaagaagtgcatccctctgg

SEQ ID NO: 1201866 - DNA, 25 bp, Homo sapien
gaccatgggtgtgctacccaacacc

SEQ ID NO: 1201867 - DNA, 25 bp, Homo sapien
gatgaaaccgttgatatcactgata

SEQ ID NO: 1201868 - DNA, 25 bp, Homo sapien
tgccaaatgtgactggaggcatatt

SEQ ID NO: 1201869 - DNA, 25 bp, Homo sapien
actggaggcatattgtactggaatc

SEQ ID NO: 1201870 - DNA, 25 bp, Homo sapien
ctaaatttgcttgatgaaaccgttg

SEQ ID NO: 1201871 - DNA, 25 bp, Homo sapien
taaaattacacgttcaatctcactg

SEQ ID NO: 1201872 - DNA, 25 bp, Homo sapien
tagtttcaggattggcactagtttt

SEQ ID NO: 1201873 - DNA, 25 bp, Homo sapien
ggaggattcattcctcctcaatgtt

SEQ ID NO: 1201874 - DNA, 25 bp, Homo sapien
tctagtagcatttgcctgtgaatcc

SEQ ID NO: 1201875 - DNA, 25 bp, Homo sapien
aaggtgacacttgcaatagcagctt

SEQ ID NO: 1201876 - DNA, 25 bp, Homo sapien
tttgtcacctaaatcagtgtgagca

SEQ ID NO: 1201877 - DNA, 25 bp, Homo sapien
aggtgacacttgcaatagcagcttt

SEQ ID NO: 1201878 - DNA, 25 bp, Homo sapien
tgagcattgtctctgttgaccagta

SEQ ID NO: 1201879 - DNA, 25 bp, Homo sapien
tatgcctagataccagagagagaca

SEQ ID NO: 1201880 - DNA, 25 bp, Homo sapien
taggcctcaatgttctgtggtcgaa

SEQ ID NO: 1201881 - DNA, 25 bp, Homo sapien
caaaatctgttaggactgcatgtga

SEQ ID NO: 1201882 - DNA, 25 bp, Homo sapien
tgtgtgtacccctgagaaatgaaag

SEQ ID NO: 1201883 - DNA, 25 bp, Homo sapien
gccttctcgttggtcaaaaaattga

SEQ ID NO: 1201884 - DNA, 25 bp, Homo sapien
catgtaattgttccactaataccga

SEQ ID NO: 1201885 - DNA, 25 bp, Homo sapien
aatacattgacacttactatagtgc

SEQ ID NO: 1201886 - DNA, 25 bp, Homo sapien
ctatagtgctcagaatatcaatttc

SEQ ID NO: 1201887 - DNA, 25 bp, Homo sapien
aacttgtggtaaaggcacaaccttg

SEQ ID NO: 1201888 - DNA, 25 bp, Homo sapien
catgttggtctatgggttgaagtga

SEQ ID NO: 1201889 - DNA, 25 bp, Homo sapien
cacggatcactgaaccatgttggtc

SEQ ID NO: 1201890 - DNA, 25 bp, Homo sapien
taacccaggcagaactaacaacttg

SEQ ID NO: 1201891 - DNA, 25 bp, Homo sapien
cttgcatacagtccctaatttcgaa

SEQ ID NO: 1201892 - DNA, 25 bp, Homo sapien
agtgtttgttgactggatatgtaat

SEQ ID NO: 1201893 - DNA, 25 bp, Homo sapien
catacagtccctaatttcgaagtgt

SEQ ID NO: 1201894 - DNA, 25 bp, Homo sapien
gtgtttgttgactggatatgtaatt

SEQ ID NO: 1201895 - DNA, 25 bp, Homo sapien
cttgtgagctgtacaccaaatcaga

SEQ ID NO: 1201896 - DNA, 25 bp, Homo sapien
catcaaaagtctttcctttaggagc

SEQ ID NO: 1201897 - DNA, 25 bp, Homo sapien
caaatcagagtcatcagtcttaaag

SEQ ID NO: 1201898 - DNA, 25 bp, Homo sapien
ctttcctttaggagcttgtgagctg

SEQ ID NO: 1201899 - DNA, 25 bp, Homo sapien
ggaagatgttgtcatcgaccttcat

SEQ ID NO: 1201900 - DNA, 25 bp, Homo sapien
ctggaagatgttgtcatcgaccttc

SEQ ID NO: 1201901 - DNA, 25 bp, Homo sapien
gctggaagatgttgtcatcgacctt

SEQ ID NO: 1201902 - DNA, 25 bp, Homo sapien
tggaagatgttgtcatcgaccttca

SEQ ID NO: 1201903 - DNA, 25 bp, Homo sapien
caggattgaggatatcaggattatc

SEQ ID NO: 1201904 - DNA, 25 bp, Homo sapien
tagcacagctcgttgaaaaatcacc

SEQ ID NO: 1201905 - DNA, 25 bp, Homo sapien
cttagtggaaagatatcaggattga

SEQ ID NO: 1201906 - DNA, 25 bp, Homo sapien
catggaacacttttggccaaaaagg

SEQ ID NO: 1201907 - DNA, 25 bp, Homo sapien
tttcctccagatagtgtctccccag

SEQ ID NO: 1201908 - DNA, 25 bp, Homo sapien
agtcctagattcacaccgctgcatc

SEQ ID NO: 1201909 - DNA, 25 bp, Homo sapien
acccagtcctagattcacaccgctg

SEQ ID NO: 1201910 - DNA, 25 bp, Homo sapien
tgtcccacccagtcctagattcaca

SEQ ID NO: 1201911 - DNA, 25 bp, Homo sapien
gctgattttctcagttttatgacca

SEQ ID NO: 1201912 - DNA, 25 bp, Homo sapien
gattttctcagttttatgaccagta

SEQ ID NO: 1201913 - DNA, 25 bp, Homo sapien
ttttctcagttttatgaccagtaac

SEQ ID NO: 1201914 - DNA, 25 bp, Homo sapien
tgagctgattttctcagttttatga

SEQ ID NO: 1201915 - DNA, 25 bp, Homo sapien
tcagttatagcccacagctgctctt

SEQ ID NO: 1201916 - DNA, 25 bp, Homo sapien
cagttatagcccacagctgctcttg

SEQ ID NO: 1201917 - DNA, 25 bp, Homo sapien
tagcccacagctgctcttgtacttc

SEQ ID NO: 1201918 - DNA, 25 bp, Homo sapien
ttatagcccacagctgctcttgtac

SEQ ID NO: 1201919 - DNA, 25 bp, Homo sapien
tcaaatggtgtaacagtgatattgt

SEQ ID NO: 1201920 - DNA, 25 bp, Homo sapien
tatactggatattaaaggcttctca

SEQ ID NO: 1201921 - DNA, 25 bp, Homo sapien
taaagctcaaaggttggtggtagag

SEQ ID NO: 1201922 - DNA, 25 bp, Homo sapien
tattgtagccccaaagttcagttta

SEQ ID NO: 1201923 - DNA, 25 bp, Homo sapien
acatctattgcaatttgcagacagc

SEQ ID NO: 1201924 - DNA, 25 bp, Homo sapien
acagcataggtttagactgtttaca

SEQ ID NO: 1201925 - DNA, 25 bp, Homo sapien
tggcagtccataagcagctttagca

SEQ ID NO: 1201926 - DNA, 25 bp, Homo sapien
cataagcagctttagcaaaattctg

SEQ ID NO: 1201927 - DNA, 25 bp, Homo sapien
tgctctgtcttataatgttagaggg

SEQ ID NO: 1201928 - DNA, 25 bp, Homo sapien
cagtgaaaaaattcatgtaggttac

SEQ ID NO: 1201929 - DNA, 25 bp, Homo sapien
gttagagggccagtgaaaaaattca

SEQ ID NO: 1201930 - DNA, 25 bp, Homo sapien
ggatgagttactccacttgctctgt

SEQ ID NO: 1201931 - DNA, 25 bp, Homo sapien
ctcctcttcctctttatcttgacca

SEQ ID NO: 1201932 - DNA, 25 bp, Homo sapien
tctcctccttcttcttttcgtctcc

SEQ ID NO: 1201933 - DNA, 25 bp, Homo sapien
tcctcttcctctttatcttgaccat

SEQ ID NO: 1201934 - DNA, 25 bp, Homo sapien
tccttcttcttttcgtctcctcctc

SEQ ID NO: 1201935 - DNA, 25 bp, Homo sapien
gagtggtggtgaatatcccctggtt

SEQ ID NO: 1201936 - DNA, 25 bp, Homo sapien
gagaatccagtactcgaactctcct

SEQ ID NO: 1201937 - DNA, 25 bp, Homo sapien
gaattcttgaaggatcacctctgca

SEQ ID NO: 1201938 - DNA, 25 bp, Homo sapien
catacattgaaaacgattctgctga

SEQ ID NO: 1201939 - DNA, 25 bp, Homo sapien
gaagacaatgatcaaggtagcaatg

SEQ ID NO: 1201940 - DNA, 25 bp, Homo sapien
cacgtatccagggaaaggcaatccc

SEQ ID NO: 1201941 - DNA, 25 bp, Homo sapien
tcaaggtagcaatgcacgtatccag

SEQ ID NO: 1201942 - DNA, 25 bp, Homo sapien
tagcaatgcacgtatccagggaaag

SEQ ID NO: 1201943 - DNA, 25 bp, Homo sapien
gatccacactaatcaagcaacaggg

SEQ ID NO: 1201944 - DNA, 25 bp, Homo sapien
caaagatgccgttgttctccacaga

SEQ ID NO: 1201945 - DNA, 25 bp, Homo sapien
taggcgatgaatccatccagtgtcc

SEQ ID NO: 1201946 - DNA, 25 bp, Homo sapien
caagagtccaaccaatgatgtagcc

SEQ ID NO: 1201947 - DNA, 25 bp, Homo sapien
tggaaatccatgtcattatccaaca

SEQ ID NO: 1201948 - DNA, 25 bp, Homo sapien
ctggaaatccatgtcattatccaac

SEQ ID NO: 1201949 - DNA, 25 bp, Homo sapien
ggaaatccatgtcattatccaacat

SEQ ID NO: 1201950 - DNA, 25 bp, Homo sapien
tagtaaagacatacaagccaaagaa

SEQ ID NO: 1201951 - DNA, 25 bp, Homo sapien
tttgattggcaattagtaaagacat

SEQ ID NO: 1201952 - DNA, 25 bp, Homo sapien
caagccaaagaaccagtatccccca

SEQ ID NO: 1201953 - DNA, 25 bp, Homo sapien
tgattggcaattagtaaagacatac

SEQ ID NO: 1201954 - DNA, 25 bp, Homo sapien
tgttccttgtcccgcttttactata

SEQ ID NO: 1201955 - DNA, 25 bp, Homo sapien
ctgtcaagtgccggctcatccagag

SEQ ID NO: 1201956 - DNA, 25 bp, Homo sapien
tcaagtgccggctcatccagagcac

SEQ ID NO: 1201957 - DNA, 25 bp, Homo sapien
tgtcaagtgccggctcatccagagc

SEQ ID NO: 1201958 - DNA, 25 bp, Homo sapien
gtcaagtgccggctcatccagagca

SEQ ID NO: 1201959 - DNA, 25 bp, Homo sapien
tggctcagttctttggctcagtacc

SEQ ID NO: 1201960 - DNA, 25 bp, Homo sapien
gctcagttctttggctcagtaccag

SEQ ID NO: 1201961 - DNA, 25 bp, Homo sapien
gttctttggctcagtaccagataac

SEQ ID NO: 1201962 - DNA, 25 bp, Homo sapien
cagttctttggctcagtaccagata

SEQ ID NO: 1201963 - DNA, 25 bp, Homo sapien
cgatgctggctgacaagtaatggcc

SEQ ID NO: 1201964 - DNA, 25 bp, Homo sapien
aagaaaacataacccggtagcgatg

SEQ ID NO: 1201965 - DNA, 25 bp, Homo sapien
caagtaatggccttggtgtacaaca

SEQ ID NO: 1201966 - DNA, 25 bp, Homo sapien
ctgctgtaagtaagggcaaagaaaa

SEQ ID NO: 1201967 - DNA, 25 bp, Homo sapien
tatttgcagctattgacagtttagt

SEQ ID NO: 1201968 - DNA, 25 bp, Homo sapien
gacagtttagtatactgttgtgtca

SEQ ID NO: 1201969 - DNA, 25 bp, Homo sapien
tactgttgtgtcaagtatcttaaat

SEQ ID NO: 1201970 - DNA, 25 bp, Homo sapien
tagtatactgttgtgtcaagtatct

SEQ ID NO: 1201971 - DNA, 25 bp, Homo sapien
gactttgattctgtggcctttgctg

SEQ ID NO: 1201972 - DNA, 25 bp, Homo sapien
tgctgctcctcccttgaaataagca

SEQ ID NO: 1201973 - DNA, 25 bp, Homo sapien
cctcccttgaaataagcaatactta

SEQ ID NO: 1201974 - DNA, 25 bp, Homo sapien
actttgattctgtggcctttgctgc

SEQ ID NO: 1201975 - DNA, 25 bp, Homo sapien
ccctggtgatgacagattaagcatc

SEQ ID NO: 1201976 - DNA, 25 bp, Homo sapien
tgactgagtttctctaaagtgaaga

SEQ ID NO: 1201977 - DNA, 25 bp, Homo sapien
aagttatcaatcagaacccagaagg

SEQ ID NO: 1201978 - DNA, 25 bp, Homo sapien
taaacatagctatcctcagggtcat

SEQ ID NO: 1201979 - DNA, 25 bp, Homo sapien
taaatgtcagactatagtttcaatt

SEQ ID NO: 1201980 - DNA, 25 bp, Homo sapien
ctagactctattatatcccattaac

SEQ ID NO: 1201981 - DNA, 25 bp, Homo sapien
aatggtttacaatagtcatggcata

SEQ ID NO: 1201982 - DNA, 25 bp, Homo sapien
aaagatcacagtatgtcccttaaga

SEQ ID NO: 1201983 - DNA, 25 bp, Homo sapien
taaactgctttttggggatcagaga

SEQ ID NO: 1201984 - DNA, 25 bp, Homo sapien
tagtttccattattgcttttaagga

SEQ ID NO: 1201985 - DNA, 25 bp, Homo sapien
gagccaaaattgttgttgataataa

SEQ ID NO: 1201986 - DNA, 25 bp, Homo sapien
gccaaaattgttgttgataataaca

SEQ ID NO: 1201987 - DNA, 25 bp, Homo sapien
tacatggcggtcatttttaagactc

SEQ ID NO: 1201988 - DNA, 25 bp, Homo sapien
tatctttgatatcagttctgtaatt

SEQ ID NO: 1201989 - DNA, 25 bp, Homo sapien
gatatcagttctgtaatttaggaga

SEQ ID NO: 1201990 - DNA, 25 bp, Homo sapien
ttgttttgtacatggcggtcatttt

SEQ ID NO: 1201991 - DNA, 25 bp, Homo sapien
tacaaggggcactgattatgcacac

SEQ ID NO: 1201992 - DNA, 25 bp, Homo sapien
cagaagacaaaatgcggatcccttc

SEQ ID NO: 1201993 - DNA, 25 bp, Homo sapien
caaaatgcggatcccttcagtctgc

SEQ ID NO: 1201994 - DNA, 25 bp, Homo sapien
cactgattatgcacacctgagactg

SEQ ID NO: 1201995 - DNA, 25 bp, Homo sapien
cctcaatatcccctatttccaatgt

SEQ ID NO: 1201996 - DNA, 25 bp, Homo sapien
tcaatatcccctatttccaatgttt

SEQ ID NO: 1201997 - DNA, 25 bp, Homo sapien
ctcaatatcccctatttccaatgtt

SEQ ID NO: 1201998 - DNA, 25 bp, Homo sapien
tccctcaatatcccctatttccaat

SEQ ID NO: 1201999 - DNA, 25 bp, Homo sapien
gcaatgagtccacagtgatcctggc

SEQ ID NO: 1202000 - DNA, 25 bp, Homo sapien
ctgcaatgagtccacagtgatcctg

SEQ ID NO: 1202001 - DNA, 25 bp, Homo sapien
tgcaatgagtccacagtgatcctgg

SEQ ID NO: 1202002 - DNA, 25 bp, Homo sapien
caatgagtccacagtgatcctggcc

SEQ ID NO: 1202003 - DNA, 25 bp, Homo sapien
gcgagtccacaactagcagcaagtt

SEQ ID NO: 1202004 - DNA, 25 bp, Homo sapien
agcaagttcagaaccagcgaaccag

SEQ ID NO: 1202005 - DNA, 25 bp, Homo sapien
agaatgtggtattgtcaccggcagc

SEQ ID NO: 1202006 - DNA, 25 bp, Homo sapien
agttcagaaccagcgaaccagtcca

SEQ ID NO: 1202007 - DNA, 25 bp, Homo sapien
tagagatgcctttcgtgtcagtgcc

SEQ ID NO: 1202008 - DNA, 25 bp, Homo sapien
tgccagggcaaccagtgtgtggtcc

SEQ ID NO: 1202009 - DNA, 25 bp, Homo sapien
cagggtcatcaggattcttggttcc

SEQ ID NO: 1202010 - DNA, 25 bp, Homo sapien
tggttccattattgatatcagaaag

SEQ ID NO: 1202011 - DNA, 25 bp, Homo sapien
gtcttctctgctgctatggaagcca

SEQ ID NO: 1202012 - DNA, 25 bp, Homo sapien
attgttgtcttctctgctgctatgg

SEQ ID NO: 1202013 - DNA, 25 bp, Homo sapien
cttctctgctgctatggaagccaat

SEQ ID NO: 1202014 - DNA, 25 bp, Homo sapien
tctccattgttgtcttctctgctgc

SEQ ID NO: 1202015 - DNA, 25 bp, Homo sapien
ggtgcttgtttttgccaaccaccat

SEQ ID NO: 1202016 - DNA, 25 bp, Homo sapien
cttttgtgaggtgcttgtttttgcc

SEQ ID NO: 1202017 - DNA, 25 bp, Homo sapien
tgaggtgcttgtttttgccaaccac

SEQ ID NO: 1202018 - DNA, 25 bp, Homo sapien
ttttgtgaggtgcttgtttttgcca

SEQ ID NO: 1202019 - DNA, 25 bp, Homo sapien
aaatgaatcaaccacttcctccttg

SEQ ID NO: 1202020 - DNA, 25 bp, Homo sapien
gcaaatgaatcaaccacttcctcct

SEQ ID NO: 1202021 - DNA, 25 bp, Homo sapien
tagcaaatgaatcaaccacttcctc

SEQ ID NO: 1202022 - DNA, 25 bp, Homo sapien
cttagcaaatgaatcaaccacttcc

SEQ ID NO: 1202023 - DNA, 25 bp, Homo sapien
cccctgatgctgtcggatgcagttt

SEQ ID NO: 1202024 - DNA, 25 bp, Homo sapien
tgatgctgtcggatgcagttttatt

SEQ ID NO: 1202025 - DNA, 25 bp, Homo sapien
ccctgatgctgtcggatgcagtttt

SEQ ID NO: 1202026 - DNA, 25 bp, Homo sapien
gacccctgatgctgtcggatgcagt

SEQ ID NO: 1202027 - DNA, 25 bp, Homo sapien
tggaagttaggaagtttttgacatg

SEQ ID NO: 1202028 - DNA, 25 bp, Homo sapien
agttaggaagtttttgacatgaaca

SEQ ID NO: 1202029 - DNA, 25 bp, Homo sapien
gacatgaacatcttcaagaatcagc

SEQ ID NO: 1202030 - DNA, 25 bp, Homo sapien
tttgacatgaacatcttcaagaatc

SEQ ID NO: 1202031 - DNA, 25 bp, Homo sapien
caacctcatccagattccctagttt

SEQ ID NO: 1202032 - DNA, 25 bp, Homo sapien
cctcatccagattccctagttttgt

SEQ ID NO: 1202033 - DNA, 25 bp, Homo sapien
tccagattccctagttttgtttcca

SEQ ID NO: 1202034 - DNA, 25 bp, Homo sapien
agattccctagttttgtttccacag

SEQ ID NO: 1202035 - DNA, 25 bp, Homo sapien
cactccacagaagaggagagttctc

SEQ ID NO: 1202036 - DNA, 25 bp, Homo sapien
ctcctcccactccacagaagaggag

SEQ ID NO: 1202037 - DNA, 25 bp, Homo sapien
ctctcttctgataactgtgtgccat

SEQ ID NO: 1202038 - DNA, 25 bp, Homo sapien
ttctctcttctgataactgtgtgcc

SEQ ID NO: 1202039 - DNA, 25 bp, Homo sapien
ttccaatataaacataagcaggcat

SEQ ID NO: 1202040 - DNA, 25 bp, Homo sapien
cactccaaggtcttgtgggtgatag

SEQ ID NO: 1202041 - DNA, 25 bp, Homo sapien
ggtgataggtacaggcctttccaat

SEQ ID NO: 1202042 - DNA, 25 bp, Homo sapien
ccaatataaacataagcaggcattt

SEQ ID NO: 1202043 - DNA, 25 bp, Homo sapien
aaatggcattcatccggtgttaaac

SEQ ID NO: 1202044 - DNA, 25 bp, Homo sapien
tgagaaatctacacttaaaatggca

SEQ ID NO: 1202045 - DNA, 25 bp, Homo sapien
aatacttaagttccattccacattg

SEQ ID NO: 1202046 - DNA, 25 bp, Homo sapien
ggcattcatccggtgttaaacaagt

SEQ ID NO: 1202047 - DNA, 25 bp, Homo sapien
gttgaatttcctctaacgctttgct

SEQ ID NO: 1202048 - DNA, 25 bp, Homo sapien
cctctaacgctttgctgttgtttat

SEQ ID NO: 1202049 - DNA, 25 bp, Homo sapien
gagtgaaagtgaaggttgaatttcc

SEQ ID NO: 1202050 - DNA, 25 bp, Homo sapien
tgaaagtgaaggttgaatttcctct

SEQ ID NO: 1202051 - DNA, 25 bp, Homo sapien
tatcgtgggaagcagcaacataaaa

SEQ ID NO: 1202052 - DNA, 25 bp, Homo sapien
gatacagttctcgtgtatgtgctac

SEQ ID NO: 1202053 - DNA, 25 bp, Homo sapien
taaaattcatctagaggtgcttgta

SEQ ID NO: 1202054 - DNA, 25 bp, Homo sapien
gtatcttcccataggatacagttct

SEQ ID NO: 1202055 - DNA, 25 bp, Homo sapien
tacttcacagcgaaagcatcagatt

SEQ ID NO: 1202056 - DNA, 25 bp, Homo sapien
aacatacttcacagcgaaagcatca

SEQ ID NO: 1202057 - DNA, 25 bp, Homo sapien
cttcacagcgaaagcatcagatttg

SEQ ID NO: 1202058 - DNA, 25 bp, Homo sapien
tcacagcgaaagcatcagatttgtt

SEQ ID NO: 1202059 - DNA, 25 bp, Homo sapien
gaagaccagaataatcacttttgcc

SEQ ID NO: 1202060 - DNA, 25 bp, Homo sapien
aatcaccatacaaaaacgagttgct

SEQ ID NO: 1202061 - DNA, 25 bp, Homo sapien
tgcgatatatatcaagctcacagct

SEQ ID NO: 1202062 - DNA, 25 bp, Homo sapien
caatttggatttagccaaggaatgc

SEQ ID NO: 1202063 - DNA, 25 bp, Homo sapien
tactctgatgcaacaaacaagggca

SEQ ID NO: 1202064 - DNA, 25 bp, Homo sapien
gatgcttctcatgattgggcttgga

SEQ ID NO: 1202065 - DNA, 25 bp, Homo sapien
gatttgccctgtagcttgattatac

SEQ ID NO: 1202066 - DNA, 25 bp, Homo sapien
tgggcttggattccagtgcacctcc

SEQ ID NO: 1202067 - DNA, 25 bp, Homo sapien
ctgaaagaatattctccacaagcta

SEQ ID NO: 1202068 - DNA, 25 bp, Homo sapien
tgaaagaatattctccacaagctac

SEQ ID NO: 1202069 - DNA, 25 bp, Homo sapien
aaactctcctctgaaagaatattct

SEQ ID NO: 1202070 - DNA, 25 bp, Homo sapien
tcactctaaaactctcctctgaaag

SEQ ID NO: 1202071 - DNA, 25 bp, Homo sapien
tagtcatgaacttcatgattcctat

SEQ ID NO: 1202072 - DNA, 25 bp, Homo sapien
ttagtcatgaacttcatgattccta

SEQ ID NO: 1202073 - DNA, 25 bp, Homo sapien
tggttgaagagtcccaaagagtcct

SEQ ID NO: 1202074 - DNA, 25 bp, Homo sapien
tctgtggttgaagagtcccaaagag

SEQ ID NO: 1202075 - DNA, 25 bp, Homo sapien
gtccaatgttgaggttaggaagcat

SEQ ID NO: 1202076 - DNA, 25 bp, Homo sapien
ttggagtccaatgttgaggttagga

SEQ ID NO: 1202077 - DNA, 25 bp, Homo sapien
aattttcagactttccgtatcgcat

SEQ ID NO: 1202078 - DNA, 25 bp, Homo sapien
gataattttcagactttccgtatcg

SEQ ID NO: 1202079 - DNA, 25 bp, Homo sapien
taattttcagactttccgtatcgca

SEQ ID NO: 1202080 - DNA, 25 bp, Homo sapien
tgataattttcagactttccgtatc

SEQ ID NO: 1202081 - DNA, 25 bp, Homo sapien
tggtgcctgttgactgttcagaaac

SEQ ID NO: 1202082 - DNA, 25 bp, Homo sapien
ctggtgcctgttgactgttcagaaa

SEQ ID NO: 1202083 - DNA, 25 bp, Homo sapien
tcagtagtttcatcacagttgttaa

SEQ ID NO: 1202084 - DNA, 25 bp, Homo sapien
agtttcatcacagttgttaaaatgc

SEQ ID NO: 1202085 - DNA, 25 bp, Homo sapien
cctcagtagtttcatcacagttgtt

SEQ ID NO: 1202086 - DNA, 25 bp, Homo sapien
gtagtttcatcacagttgttaaaat

SEQ ID NO: 1202087 - DNA, 25 bp, Homo sapien
taactttaaccatattccagtggtg

SEQ ID NO: 1202088 - DNA, 25 bp, Homo sapien
actttaaccatattccagtggtggt

SEQ ID NO: 1202089 - DNA, 25 bp, Homo sapien
cactttgcatctgatggttggctgg

SEQ ID NO: 1202090 - DNA, 25 bp, Homo sapien
actttgcatctgatggttggctggt

SEQ ID NO: 1202091 - DNA, 25 bp, Homo sapien
tgaggcatggttccacgacaggaga

SEQ ID NO: 1202092 - DNA, 25 bp, Homo sapien
tctatgatgacagcatgaggcgttc

SEQ ID NO: 1202093 - DNA, 25 bp, Homo sapien
tatacttattgcgtctctcctgtgc

SEQ ID NO: 1202094 - DNA, 25 bp, Homo sapien
tcatgcagtaagcagagagtactct

SEQ ID NO: 1202095 - DNA, 25 bp, Homo sapien
aattaagagctacatgataactcca

SEQ ID NO: 1202096 - DNA, 25 bp, Homo sapien
taggctcttgttaactctgaattag

SEQ ID NO: 1202097 - DNA, 25 bp, Homo sapien
aaatgaagctatttcagggcaaaaa

SEQ ID NO: 1202098 - DNA, 25 bp, Homo sapien
tttgaagttgctctagaaatgcact

SEQ ID NO: 1202099 - DNA, 25 bp, Homo sapien
tttctttagtggagtcagatagcgg

SEQ ID NO: 1202100 - DNA, 25 bp, Homo sapien
cagatagcggtgtattctcttggaa

SEQ ID NO: 1202101 - DNA, 25 bp, Homo sapien
cttggaatacaccaagagaattggt

SEQ ID NO: 1202102 - DNA, 25 bp, Homo sapien
ttttgcaggatatcttccttgactg

SEQ ID NO: 1202103 - DNA, 25 bp, Homo sapien
tatctctaacggactgaggaatgac

SEQ ID NO: 1202104 - DNA, 25 bp, Homo sapien
cagttgattgctgaaagctaccctc

SEQ ID NO: 1202105 - DNA, 25 bp, Homo sapien
ggctttctggtagaatatctctaac

SEQ ID NO: 1202106 - DNA, 25 bp, Homo sapien
tcctgaagctcaagaatacattcca

SEQ ID NO: 1202107 - DNA, 25 bp, Homo sapien
tacatgggtgccagaatattcatgg

SEQ ID NO: 1202108 - DNA, 25 bp, Homo sapien
cagtgtgcaacattcatggtaatca

SEQ ID NO: 1202109 - DNA, 25 bp, Homo sapien
gattaaaaggtataggcaagcacag

SEQ ID NO: 1202110 - DNA, 25 bp, Homo sapien
cagaactattctcgacagtgtgcaa

SEQ ID NO: 1202111 - DNA, 25 bp, Homo sapien
gatactcttccacaatttgaatttt

SEQ ID NO: 1202112 - DNA, 25 bp, Homo sapien
agatactcttccacaatttgaattt

SEQ ID NO: 1202113 - DNA, 25 bp, Homo sapien
cagatactcttccacaatttgaatt

SEQ ID NO: 1202114 - DNA, 25 bp, Homo sapien
tctgtgataggtagacgtttttccc

SEQ ID NO: 1202115 - DNA, 25 bp, Homo sapien
tgtgataggtagacgtttttcccca

SEQ ID NO: 1202116 - DNA, 25 bp, Homo sapien
ttattactataactaataattatgg

SEQ ID NO: 1202117 - DNA, 25 bp, Homo sapien
ttactataactaataattatggcca

SEQ ID NO: 1202118 - DNA, 25 bp, Homo sapien
attactataactaataattatggcc

SEQ ID NO: 1202119 - DNA, 25 bp, Homo sapien
tactataactaataattatggccat

SEQ ID NO: 1202120 - DNA, 25 bp, Homo sapien
gctctggtgcatgtcataaaacatg

SEQ ID NO: 1202121 - DNA, 25 bp, Homo sapien
tgctgcagatatttagtgaccaaag

SEQ ID NO: 1202122 - DNA, 25 bp, Homo sapien
ggatgctttgcaagataacttttga

SEQ ID NO: 1202123 - DNA, 25 bp, Homo sapien
cacaggctggttcacatccatggcc

SEQ ID NO: 1202124 - DNA, 25 bp, Homo sapien
ctgtctttggagttgtaggagattt

SEQ ID NO: 1202125 - DNA, 25 bp, Homo sapien
caaatcaaactgtctttggagttgt

SEQ ID NO: 1202126 - DNA, 25 bp, Homo sapien
ccacaaatcaaactgtctttggagt

SEQ ID NO: 1202127 - DNA, 25 bp, Homo sapien
caaactgtctttggagttgtaggag

SEQ ID NO: 1202128 - DNA, 25 bp, Homo sapien
ttttcacaatgagaagcactaatga

SEQ ID NO: 1202129 - DNA, 25 bp, Homo sapien
tacagcaacagagtggtggaccttg

SEQ ID NO: 1202130 - DNA, 25 bp, Homo sapien
tggtggaccttgtggtctacatgac

SEQ ID NO: 1202131 - DNA, 25 bp, Homo sapien
gagtggtggaccttgtggtctacat

SEQ ID NO: 1202132 - DNA, 25 bp, Homo sapien
cagagtggtggaccttgtggtctac

SEQ ID NO: 1202133 - DNA, 25 bp, Homo sapien
aacatctcactcatggacctaacct

SEQ ID NO: 1202134 - DNA, 25 bp, Homo sapien
catggcaacttcagcatcatggaga

SEQ ID NO: 1202135 - DNA, 25 bp, Homo sapien
ctcatgaccacagtatatgccatca

SEQ ID NO: 1202136 - DNA, 25 bp, Homo sapien
tgtggtcaaggtcaaacctcactgg

SEQ ID NO: 1202137 - DNA, 25 bp, Homo sapien
tcttttggacaattacttacaccat

SEQ ID NO: 1202138 - DNA, 25 bp, Homo sapien
tacaccatcacgataagcacttaaa

SEQ ID NO: 1202139 - DNA, 25 bp, Homo sapien
tctgatacctggtacatcaagtttc

SEQ ID NO: 1202140 - DNA, 25 bp, Homo sapien
aaaaatggaacagaaggaatcggcg

SEQ ID NO: 1202141 - DNA, 25 bp, Homo sapien
caagttacttgaacaactcaataac

SEQ ID NO: 1202142 - DNA, 25 bp, Homo sapien
tgcctctaacgagggactaatatcc

SEQ ID NO: 1202143 - DNA, 25 bp, Homo sapien
tttaatcaagctaaaagtcttctac

SEQ ID NO: 1202144 - DNA, 25 bp, Homo sapien
aaaatattcgcaaattatgcctcta

SEQ ID NO: 1202145 - DNA, 25 bp, Homo sapien
aaagtgtctcacagcatactgtaca

SEQ ID NO: 1202146 - DNA, 25 bp, Homo sapien
taattatcaatacggcagtgagcca

SEQ ID NO: 1202147 - DNA, 25 bp, Homo sapien
taaggcagctgtatctactaatgca

SEQ ID NO: 1202148 - DNA, 25 bp, Homo sapien
cagatttgtactggctactacagat

SEQ ID NO: 1202149 - DNA, 25 bp, Homo sapien
gtattatccatactcttatcctggt

SEQ ID NO: 1202150 - DNA, 25 bp, Homo sapien
catgatgaagagtattatccatact

SEQ ID NO: 1202151 - DNA, 25 bp, Homo sapien
tccatactcttatcctggtaagcag

SEQ ID NO: 1202152 - DNA, 25 bp, Homo sapien
tatcctggtaagcagttataaaagt

SEQ ID NO: 1202153 - DNA, 25 bp, Homo sapien
gcccactacagtgaatacatccaca

SEQ ID NO: 1202154 - DNA, 25 bp, Homo sapien
ccactacagtgaatacatccacatt

SEQ ID NO: 1202155 - DNA, 25 bp, Homo sapien
gttgcccactacagtgaatacatcc

SEQ ID NO: 1202156 - DNA, 25 bp, Homo sapien
cttgttgcccactacagtgaataca

SEQ ID NO: 1202157 - DNA, 25 bp, Homo sapien
tgcctgccgaatatgcctcatagct

SEQ ID NO: 1202158 - DNA, 25 bp, Homo sapien
ttctgttgacactttggtatgagac

SEQ ID NO: 1202159 - DNA, 25 bp, Homo sapien
tcatgcctgccgaatatgcctcata

SEQ ID NO: 1202160 - DNA, 25 bp, Homo sapien
cactttggtatgagacaatgggtcc

SEQ ID NO: 1202161 - DNA, 25 bp, Homo sapien
ctaaatgatataacaaagacatgca

SEQ ID NO: 1202162 - DNA, 25 bp, Homo sapien
aaatgatataacaaagacatgcatc

SEQ ID NO: 1202163 - DNA, 25 bp, Homo sapien
tcctaaatgatataacaaagacatg

SEQ ID NO: 1202164 - DNA, 25 bp, Homo sapien
cctaaatgatataacaaagacatgc

SEQ ID NO: 1202165 - DNA, 25 bp, Homo sapien
gatttagttagcttattttgtggaa

SEQ ID NO: 1202166 - DNA, 25 bp, Homo sapien
aattctggaaaattgcagtagttgc

SEQ ID NO: 1202167 - DNA, 25 bp, Homo sapien
taatgggaaatctattgtaattgct

SEQ ID NO: 1202168 - DNA, 25 bp, Homo sapien
cctgtagtagtttcttctaatggga

SEQ ID NO: 1202169 - DNA, 25 bp, Homo sapien
taggacactgtcaagaatcggttgt

SEQ ID NO: 1202170 - DNA, 25 bp, Homo sapien
gatcgcattgctgactgggagctgc

SEQ ID NO: 1202171 - DNA, 25 bp, Homo sapien
gccatggtccaacgtcacaaaagag

SEQ ID NO: 1202172 - DNA, 25 bp, Homo sapien
aatcgactggcaacataggacactg

SEQ ID NO: 1202173 - DNA, 25 bp, Homo sapien
tgcaagagcaaatcatgtggatagc

SEQ ID NO: 1202174 - DNA, 25 bp, Homo sapien
tagcatgcaagagcaaatcatgtgg

SEQ ID NO: 1202175 - DNA, 25 bp, Homo sapien
cgaactgtagcatgcaagagcaaat

SEQ ID NO: 1202176 - DNA, 25 bp, Homo sapien
gagcaaatcatgtggatagcagaga

SEQ ID NO: 1202177 - DNA, 25 bp, Homo sapien
cattaagactggagccactgtaatc

SEQ ID NO: 1202178 - DNA, 25 bp, Homo sapien
tgacatctgtattccaggcgttgga

SEQ ID NO: 1202179 - DNA, 25 bp, Homo sapien
tccttcctgacatctgtattccagg

SEQ ID NO: 1202180 - DNA, 25 bp, Homo sapien
ggcgttggaaacacttagacaatca

SEQ ID NO: 1202181 - DNA, 25 bp, Homo sapien
tgacaatgaatgttatgtttctgaa

SEQ ID NO: 1202182 - DNA, 25 bp, Homo sapien
gtcaatgacaatgaatgttatgttt

SEQ ID NO: 1202183 - DNA, 25 bp, Homo sapien
caatgacaatgaatgttatgtttct

SEQ ID NO: 1202184 - DNA, 25 bp, Homo sapien
aaatgcctgatttttgacacaaagc

SEQ ID NO: 1202185 - DNA, 25 bp, Homo sapien
tccagtacttttagagtttgaggtc

SEQ ID NO: 1202186 - DNA, 25 bp, Homo sapien
cctatgttaaaaagtaggtgtccag

SEQ ID NO: 1202187 - DNA, 25 bp, Homo sapien
tatgacagctagttattccagcacc

SEQ ID NO: 1202188 - DNA, 25 bp, Homo sapien
tataattcggtgtagagtgacactg

SEQ ID NO: 1202189 - DNA, 25 bp, Homo sapien
tcaacacaacccaaccaaattcagt

SEQ ID NO: 1202190 - DNA, 25 bp, Homo sapien
ctacccctaatctgtctgtcaatgg

SEQ ID NO: 1202191 - DNA, 25 bp, Homo sapien
ggatataatccattgtaattactct

SEQ ID NO: 1202192 - DNA, 25 bp, Homo sapien
aatctgtctgtcctctacttgtaag

SEQ ID NO: 1202193 - DNA, 25 bp, Homo sapien
cctgtgtgtctgagtatacgggaat

SEQ ID NO: 1202194 - DNA, 25 bp, Homo sapien
tgtgtctgagtatacgggaatgtgc

SEQ ID NO: 1202195 - DNA, 25 bp, Homo sapien
tgtctgagtatacgggaatgtgctc

SEQ ID NO: 1202196 - DNA, 25 bp, Homo sapien
gagtatacgggaatgtgctcacatt

SEQ ID NO: 1202197 - DNA, 25 bp, Homo sapien
tggtaacaggtacattgtgatttat

SEQ ID NO: 1202198 - DNA, 25 bp, Homo sapien
ccagtttagattggtcctaagtcat

SEQ ID NO: 1202199 - DNA, 25 bp, Homo sapien
cctaagtcatatggtaacaggtaca

SEQ ID NO: 1202200 - DNA, 25 bp, Homo sapien
aattagttcgctctttttggtactg

SEQ ID NO: 1202201 - DNA, 25 bp, Homo sapien
aactctctatctgcttcaatcatca

SEQ ID NO: 1202202 - DNA, 25 bp, Homo sapien
taactctctatctgcttcaatcatc

SEQ ID NO: 1202203 - DNA, 25 bp, Homo sapien
actctctatctgcttcaatcatcat

SEQ ID NO: 1202204 - DNA, 25 bp, Homo sapien
cttaactctctatctgcttcaatca

SEQ ID NO: 1202205 - DNA, 25 bp, Homo sapien
tgtctgagggaagcatttacataac

SEQ ID NO: 1202206 - DNA, 25 bp, Homo sapien
gagtacctcaaatgatgagccatac

SEQ ID NO: 1202207 - DNA, 25 bp, Homo sapien
cacacatgtaagcataggtatagat

SEQ ID NO: 1202208 - DNA, 25 bp, Homo sapien
caagttatatagtcagagtacctca

SEQ ID NO: 1202209 - DNA, 25 bp, Homo sapien
cactggtctatttcattactcagag

SEQ ID NO: 1202210 - DNA, 25 bp, Homo sapien
tggtctatttcattactcagagata

SEQ ID NO: 1202211 - DNA, 25 bp, Homo sapien
actggtctatttcattactcagaga

SEQ ID NO: 1202212 - DNA, 25 bp, Homo sapien
gtctatttcattactcagagatagc

SEQ ID NO: 1202213 - DNA, 25 bp, Homo sapien
cacacaccaggaacatccacaggtc

SEQ ID NO: 1202214 - DNA, 25 bp, Homo sapien
cacaccaggaacatccacaggtcac

SEQ ID NO: 1202215 - DNA, 25 bp, Homo sapien
acaccaggaacatccacaggtcaca

SEQ ID NO: 1202216 - DNA, 25 bp, Homo sapien
acacaccaggaacatccacaggtca

SEQ ID NO: 1202217 - DNA, 25 bp, Homo sapien
gaaatggctatttgaagttgttttg

SEQ ID NO: 1202218 - DNA, 25 bp, Homo sapien
ctcacagcagtgaaggaaatggcta

SEQ ID NO: 1202219 - DNA, 25 bp, Homo sapien
ctgtctacatctgctcacagcagtg

SEQ ID NO: 1202220 - DNA, 25 bp, Homo sapien
agtgaaggaaatggctatttgaagt

SEQ ID NO: 1202221 - DNA, 25 bp, Homo sapien
tttgatatagttcctcccttatcac

SEQ ID NO: 1202222 - DNA, 25 bp, Homo sapien
taaagtagtttgatatagttcctcc

SEQ ID NO: 1202223 - DNA, 25 bp, Homo sapien
gtagtttgatatagttcctccctta

SEQ ID NO: 1202224 - DNA, 25 bp, Homo sapien
gctcaggagtgttgaggcctctgga

SEQ ID NO: 1202225 - DNA, 25 bp, Homo sapien
tcccaacatgtaagaggcctttaaa

SEQ ID NO: 1202226 - DNA, 25 bp, Homo sapien
ccatctgctgttaaatagctgggct

SEQ ID NO: 1202227 - DNA, 25 bp, Homo sapien
ctcctttgatttgtgagtgatagat

SEQ ID NO: 1202228 - DNA, 25 bp, Homo sapien
gcacaggttctatgtatcatcccaa

SEQ ID NO: 1202229 - DNA, 25 bp, Homo sapien
tgccagcaccttgataactttgcaa

SEQ ID NO: 1202230 - DNA, 25 bp, Homo sapien
cttcctccccttgtatgtagactag

SEQ ID NO: 1202231 - DNA, 25 bp, Homo sapien
atgtagactagaaagtggataccta

SEQ ID NO: 1202232 - DNA, 25 bp, Homo sapien
tacctaatgcattgttgccagcacc

SEQ ID NO: 1202233 - DNA, 25 bp, Homo sapien
attatgggaaagtagattgtactga

SEQ ID NO: 1202234 - DNA, 25 bp, Homo sapien
ttatgggaaagtagattgtactgac

SEQ ID NO: 1202235 - DNA, 25 bp, Homo sapien
ctaatctggaccaagaaatgcatga

SEQ ID NO: 1202236 - DNA, 25 bp, Homo sapien
aaagtccttgatttcgtctgctcca

SEQ ID NO: 1202237 - DNA, 25 bp, Homo sapien
agtccttgatttcgtctgctccacc

SEQ ID NO: 1202238 - DNA, 25 bp, Homo sapien
ccttgatttcgtctgctccacctgc

SEQ ID NO: 1202239 - DNA, 25 bp, Homo sapien
tccttgatttcgtctgctccacctg

SEQ ID NO: 1202240 - DNA, 25 bp, Homo sapien
tcttacatttaacggggacctctga

SEQ ID NO: 1202241 - DNA, 25 bp, Homo sapien
gactttcaatttcaagtggtccata

SEQ ID NO: 1202242 - DNA, 25 bp, Homo sapien
ggacctctgagagcacgacttgact

SEQ ID NO: 1202243 - DNA, 25 bp, Homo sapien
ggtccataatgtagactaaaaggtg

SEQ ID NO: 1202244 - DNA, 25 bp, Homo sapien
attctttaccctgccataagtcaca

SEQ ID NO: 1202245 - DNA, 25 bp, Homo sapien
cagttttgtcctggttgtgataatg

SEQ ID NO: 1202246 - DNA, 25 bp, Homo sapien
tcctcttatattgggagtttggact

SEQ ID NO: 1202247 - DNA, 25 bp, Homo sapien
caggacagaatctcctcttatattg

SEQ ID NO: 1202248 - DNA, 25 bp, Homo sapien
tgagttagtttatataccattgcat

SEQ ID NO: 1202249 - DNA, 25 bp, Homo sapien
gacagaatctcctcttatattggga

SEQ ID NO: 1202250 - DNA, 25 bp, Homo sapien
tgcctctttggtcccaggctggtac

SEQ ID NO: 1202251 - DNA, 25 bp, Homo sapien
cattgtttgctctgtaggcatggtt

SEQ ID NO: 1202252 - DNA, 25 bp, Homo sapien
tgatacaactgctgccaacccaata

SEQ ID NO: 1202253 - DNA, 25 bp, Homo sapien
caacccaatactacaggtgtttgaa

SEQ ID NO: 1202254 - DNA, 25 bp, Homo sapien
cctggtttgaccagctatggtcatt

SEQ ID NO: 1202255 - DNA, 25 bp, Homo sapien
ccagctatggtcatttttaagaaag

SEQ ID NO: 1202256 - DNA, 25 bp, Homo sapien
gaccagctatggtcatttttaagaa

SEQ ID NO: 1202257 - DNA, 25 bp, Homo sapien
tagaaccctggtttgaccagctatg

SEQ ID NO: 1202258 - DNA, 25 bp, Homo sapien
tcaggtctgcctgtagacgaaggcc

SEQ ID NO: 1202259 - DNA, 25 bp, Homo sapien
tctgcctgtagacgaaggcctttca

SEQ ID NO: 1202260 - DNA, 25 bp, Homo sapien
cttcaggtctgcctgtagacgaagg

SEQ ID NO: 1202261 - DNA, 25 bp, Homo sapien
ggtctgcctgtagacgaaggccttt

SEQ ID NO: 1202262 - DNA, 25 bp, Homo sapien
cagttgacactggatcagcaaacaa

SEQ ID NO: 1202263 - DNA, 25 bp, Homo sapien
tcagttgacactggatcagcaaaca

SEQ ID NO: 1202264 - DNA, 25 bp, Homo sapien
agttgacactggatcagcaaacaat

SEQ ID NO: 1202265 - DNA, 25 bp, Homo sapien
taaaggaagctatcatctatttttc

SEQ ID NO: 1202266 - DNA, 25 bp, Homo sapien
gtaaaatagtacatcaaatccttga

SEQ ID NO: 1202267 - DNA, 25 bp, Homo sapien
gctaaagcacttctggacagaaaag

SEQ ID NO: 1202268 - DNA, 25 bp, Homo sapien
aaagtaaaatagtacatcaaatcct

SEQ ID NO: 1202269 - DNA, 25 bp, Homo sapien
gattccttggtgtttgctaaagcac

SEQ ID NO: 1202270 - DNA, 25 bp, Homo sapien
gagaagacctttaatgcgtgagatg

SEQ ID NO: 1202271 - DNA, 25 bp, Homo sapien
agaagacctttaatgcgtgagatga

SEQ ID NO: 1202272 - DNA, 25 bp, Homo sapien
agacctttaatgcgtgagatgatga

SEQ ID NO: 1202273 - DNA, 25 bp, Homo sapien
gaagacctttaatgcgtgagatgat

SEQ ID NO: 1202274 - DNA, 25 bp, Homo sapien
aacagtgtagagaatagagtgctga

SEQ ID NO: 1202275 - DNA, 25 bp, Homo sapien
gaatagagtgctgagacaagttgat

SEQ ID NO: 1202276 - DNA, 25 bp, Homo sapien
tgagacaagttgatgcaaacaggat

SEQ ID NO: 1202277 - DNA, 25 bp, Homo sapien
gatgcaaacaggatacccatgagga

SEQ ID NO: 1202278 - DNA, 25 bp, Homo sapien
gagtatgtccaatttaatctttcca

SEQ ID NO: 1202279 - DNA, 25 bp, Homo sapien
attccagaaaaagttgtagagctga

SEQ ID NO: 1202280 - DNA, 25 bp, Homo sapien
acacgtcagtggatgagtcattcta

SEQ ID NO: 1202281 - DNA, 25 bp, Homo sapien
aatctttccaaacacgtcagtggat

SEQ ID NO: 1202282 - DNA, 25 bp, Homo sapien
gacttgttaagtgaaccactgattt

SEQ ID NO: 1202283 - DNA, 25 bp, Homo sapien
tagcacagccaagtggacttgttaa

SEQ ID NO: 1202284 - DNA, 25 bp, Homo sapien
caggcaatgatggtggaattctttt

SEQ ID NO: 1202285 - DNA, 25 bp, Homo sapien
cacaggcaatgatggtggaattctt

SEQ ID NO: 1202286 - DNA, 25 bp, Homo sapien
aacatgcagaataattaatgatgtc

SEQ ID NO: 1202287 - DNA, 25 bp, Homo sapien
tccatagcacatatcttagaacatg

SEQ ID NO: 1202288 - DNA, 25 bp, Homo sapien
gcacatatcttagaacatgcagaat

SEQ ID NO: 1202289 - DNA, 25 bp, Homo sapien
tagcacatatcttagaacatgcaga

SEQ ID NO: 1202290 - DNA, 25 bp, Homo sapien
agcctgaaggcagacggcaagagtt

SEQ ID NO: 1202291 - DNA, 25 bp, Homo sapien
aagtctactccgccagccatgaact

SEQ ID NO: 1202292 - DNA, 25 bp, Homo sapien
gagggtattcttggcatctgctgcc

SEQ ID NO: 1202293 - DNA, 25 bp, Homo sapien
catgaactccactgaggctttgctt

SEQ ID NO: 1202294 - DNA, 25 bp, Homo sapien
cctaaggtgagaggtacaagcttct

SEQ ID NO: 1202295 - DNA, 25 bp, Homo sapien
gctgtgcataactgtaaccatggaa

SEQ ID NO: 1202296 - DNA, 25 bp, Homo sapien
gctgttctccattcccctaaggtga

SEQ ID NO: 1202297 - DNA, 25 bp, Homo sapien
gcttctggatacaggtagtagggca

SEQ ID NO: 1202298 - DNA, 25 bp, Homo sapien
taatgtcagcgtgttcaatcttatt

SEQ ID NO: 1202299 - DNA, 25 bp, Homo sapien
tttaatgtcagcgtgttcaatctta

SEQ ID NO: 1202300 - DNA, 25 bp, Homo sapien
taattttaatgtcagcgtgttcaat

SEQ ID NO: 1202301 - DNA, 25 bp, Homo sapien
tcagcgtgttcaatcttatttatgc

SEQ ID NO: 1202302 - DNA, 25 bp, Homo sapien
tttttaatatccagttgtacagaga

SEQ ID NO: 1202303 - DNA, 25 bp, Homo sapien
tctcaatgatgagtctataaagagg

SEQ ID NO: 1202304 - DNA, 25 bp, Homo sapien
catgggtgataatttggcatctcaa

SEQ ID NO: 1202305 - DNA, 25 bp, Homo sapien
cagagaacatgggtgataatttggc

SEQ ID NO: 1202306 - DNA, 25 bp, Homo sapien
atataagaacacattgaatgctctt

SEQ ID NO: 1202307 - DNA, 25 bp, Homo sapien
tataagaacacattgaatgctcttg

SEQ ID NO: 1202308 - DNA, 25 bp, Homo sapien
ataagaacacattgaatgctcttgg

SEQ ID NO: 1202309 - DNA, 25 bp, Homo sapien
taagaacacattgaatgctcttggg

SEQ ID NO: 1202310 - DNA, 25 bp, Homo sapien
gagaactgcaattgactgactcctg

SEQ ID NO: 1202311 - DNA, 25 bp, Homo sapien
gatttttgccagagcccctaatgag

SEQ ID NO: 1202312 - DNA, 25 bp, Homo sapien
tagctattagattcagactccaccc

SEQ ID NO: 1202313 - DNA, 25 bp, Homo sapien
ggcccactctctggtgaaggtgcta

SEQ ID NO: 1202314 - DNA, 25 bp, Homo sapien
ggctttatctatgctcaatttttga

SEQ ID NO: 1202315 - DNA, 25 bp, Homo sapien
gaaatagcatttgaagcttgggacc

SEQ ID NO: 1202316 - DNA, 25 bp, Homo sapien
gaagcttgggaccataaattctcct

SEQ ID NO: 1202317 - DNA, 25 bp, Homo sapien
ccctgttcagggtagattgagtagg

SEQ ID NO: 1202318 - DNA, 25 bp, Homo sapien
tcatctgagatacaaagcacagcag

SEQ ID NO: 1202319 - DNA, 25 bp, Homo sapien
ttatcatctgagatacaaagcacag

SEQ ID NO: 1202320 - DNA, 25 bp, Homo sapien
acaaagcacagcagtgttactctct

SEQ ID NO: 1202321 - DNA, 25 bp, Homo sapien
caaagcacagcagtgttactctctc

SEQ ID NO: 1202322 - DNA, 25 bp, Homo sapien
agtgttagactgctccgatttgatc

SEQ ID NO: 1202323 - DNA, 25 bp, Homo sapien
ctgctcctcatgctttgcgctgtta

SEQ ID NO: 1202324 - DNA, 25 bp, Homo sapien
tatgggcttgctggtatcttgtccc

SEQ ID NO: 1202325 - DNA, 25 bp, Homo sapien
gatcattttctcagttcggttctgc

SEQ ID NO: 1202326 - DNA, 25 bp, Homo sapien
tttggccatggtggattcagaccac

SEQ ID NO: 1202327 - DNA, 25 bp, Homo sapien
gatgatgcagatcttgcaaaatcag

SEQ ID NO: 1202328 - DNA, 25 bp, Homo sapien
tgtatgtcaagactggcaagacgct

SEQ ID NO: 1202329 - DNA, 25 bp, Homo sapien
gacccagtggcaacactagctgcag

SEQ ID NO: 1202330 - DNA, 25 bp, Homo sapien
gacgggtagcgctattccagatatt

SEQ ID NO: 1202331 - DNA, 25 bp, Homo sapien
cgggtagcgctattccagatattga

SEQ ID NO: 1202332 - DNA, 25 bp, Homo sapien
ttgcagagacgggtagcgctattcc

SEQ ID NO: 1202333 - DNA, 25 bp, Homo sapien
cagagacgggtagcgctattccaga

SEQ ID NO: 1202334 - DNA, 25 bp, Homo sapien
agccggtgtccaggcctccctcccg

SEQ ID NO: 1202335 - DNA, 25 bp, Homo sapien
cggtgtccaggcctccctcccgaca

SEQ ID NO: 1202336 - DNA, 25 bp, Homo sapien
ggtgtccaggcctccctcccgacac

SEQ ID NO: 1202337 - DNA, 25 bp, Homo sapien
tgtccaggcctccctcccgacaccg

SEQ ID NO: 1202338 - DNA, 25 bp, Homo sapien
tgctttcagagccaaatcaaccact

SEQ ID NO: 1202339 - DNA, 25 bp, Homo sapien
aacactggcggcaaggacaagaaac

SEQ ID NO: 1202340 - DNA, 25 bp, Homo sapien
acaggagccaggaaatgtgaagagc

SEQ ID NO: 1202341 - DNA, 25 bp, Homo sapien
ggcctgcaccgcgaatgatcttctg

SEQ ID NO: 1202342 - DNA, 25 bp, Homo sapien
gttagaagaagaaatctgagacatc

SEQ ID NO: 1202343 - DNA, 25 bp, Homo sapien
cagggtgagccagaattatatcagc

SEQ ID NO: 1202344 - DNA, 25 bp, Homo sapien
ctagcataaagaaataggcatagac

SEQ ID NO: 1202345 - DNA, 25 bp, Homo sapien
tatcagcataatacacagtcaacta

SEQ ID NO: 1202346 - DNA, 25 bp, Homo sapien
aagtaactctaacagcatctaccag

SEQ ID NO: 1202347 - DNA, 25 bp, Homo sapien
cagaacatcagacataaaatatgca

SEQ ID NO: 1202348 - DNA, 25 bp, Homo sapien
tcaataaataacagtgactgccatt

SEQ ID NO: 1202349 - DNA, 25 bp, Homo sapien
aaatatgcagaaaacgtggattcaa

SEQ ID NO: 1202350 - DNA, 25 bp, Homo sapien
gaagagacatgcagtggaatccacc

SEQ ID NO: 1202351 - DNA, 25 bp, Homo sapien
gcactgagacgtgtatacaaaaacg

SEQ ID NO: 1202352 - DNA, 25 bp, Homo sapien
tacaaaaacgtacatgctccctcaa

SEQ ID NO: 1202353 - DNA, 25 bp, Homo sapien
gaacaaaactgtgtcactacctgaa

SEQ ID NO: 1202354 - DNA, 25 bp, Homo sapien
tccttcaatgccgtaaagatgccag

SEQ ID NO: 1202355 - DNA, 25 bp, Homo sapien
gataaaagtctattccttcaatgcc

SEQ ID NO: 1202356 - DNA, 25 bp, Homo sapien
gatgccagaactctgtacttatttg

SEQ ID NO: 1202357 - DNA, 25 bp, Homo sapien
agtctattccttcaatgccgtaaag

SEQ ID NO: 1202358 - DNA, 25 bp, Homo sapien
acttaatcggataaattcagggatt

SEQ ID NO: 1202359 - DNA, 25 bp, Homo sapien
aggctctagctcacttaatcggata

SEQ ID NO: 1202360 - DNA, 25 bp, Homo sapien
cagggattttggatgacacaaccaa

SEQ ID NO: 1202361 - DNA, 25 bp, Homo sapien
aaattcagggattttggatgacaca

SEQ ID NO: 1202362 - DNA, 25 bp, Homo sapien
tagtctgttggaaaattatccttcc

SEQ ID NO: 1202363 - DNA, 25 bp, Homo sapien
tgccaatacagcactcggagatact

SEQ ID NO: 1202364 - DNA, 25 bp, Homo sapien
tgtccctatcctatagacaaatgcc

SEQ ID NO: 1202365 - DNA, 25 bp, Homo sapien
cagcactcggagatactagcattcc

SEQ ID NO: 1202366 - DNA, 25 bp, Homo sapien
ttatttctcattttcaatgacaact

SEQ ID NO: 1202367 - DNA, 25 bp, Homo sapien
atttctcattttcaatgacaactat

SEQ ID NO: 1202368 - DNA, 25 bp, Homo sapien
tatttctcattttcaatgacaacta

SEQ ID NO: 1202369 - DNA, 25 bp, Homo sapien
tagctcttcggtcactctggagacg

SEQ ID NO: 1202370 - DNA, 25 bp, Homo sapien
tctggagacgctacatcagctagcc

SEQ ID NO: 1202371 - DNA, 25 bp, Homo sapien
gaagttgagcaaacgagctgaagga

SEQ ID NO: 1202372 - DNA, 25 bp, Homo sapien
gctgaaggaagtgattccaccacca

SEQ ID NO: 1202373 - DNA, 25 bp, Homo sapien
ggaccatatgagtgttatgctaaac

SEQ ID NO: 1202374 - DNA, 25 bp, Homo sapien
tacgtgtttaaagtgaccaatatcc

SEQ ID NO: 1202375 - DNA, 25 bp, Homo sapien
tctgacattcagtaactacgtgttt

SEQ ID NO: 1202376 - DNA, 25 bp, Homo sapien
gaggtacttgagaaatatctgtgac

SEQ ID NO: 1202377 - DNA, 25 bp, Homo sapien
cacatatgagaaaggtcaagtggaa

SEQ ID NO: 1202378 - DNA, 25 bp, Homo sapien
tattatggctgataagtactccatt

SEQ ID NO: 1202379 - DNA, 25 bp, Homo sapien
ctctctgcttttatgggatcaactt

SEQ ID NO: 1202380 - DNA, 25 bp, Homo sapien
taattgccatgctctacaatggacc

SEQ ID NO: 1202381 - DNA, 25 bp, Homo sapien
tgaaagttattcttaatgtagagga

SEQ ID NO: 1202382 - DNA, 25 bp, Homo sapien
ctgaaagttattcttaatgtagagg

SEQ ID NO: 1202383 - DNA, 25 bp, Homo sapien
ttctgtaactcctgcctattttcac

SEQ ID NO: 1202384 - DNA, 25 bp, Homo sapien
tgtaactcctgcctattttcacatt

SEQ ID NO: 1202385 - DNA, 25 bp, Homo sapien
cagttgaatattgccaacaaaacag

SEQ ID NO: 1202386 - DNA, 25 bp, Homo sapien
gaaatgtttcatattgggcagatat

SEQ ID NO: 1202387 - DNA, 25 bp, Homo sapien
cattgtttttacagggtgtcagttg

SEQ ID NO: 1202388 - DNA, 25 bp, Homo sapien
tataagtatgtgcatgtgataggac

SEQ ID NO: 1202389 - DNA, 25 bp, Homo sapien
tttttaccacttgcaggatactgcc

SEQ ID NO: 1202390 - DNA, 25 bp, Homo sapien
ccaccacccttcacgctgacttctg

SEQ ID NO: 1202391 - DNA, 25 bp, Homo sapien
cacccttcacgctgacttctgcttt

SEQ ID NO: 1202392 - DNA, 25 bp, Homo sapien
taccacttgcaggatactgcctgcc

SEQ ID NO: 1202393 - DNA, 25 bp, Homo sapien
gcaatggccattccactaggtcgaa

SEQ ID NO: 1202394 - DNA, 25 bp, Homo sapien
gccattccactaggtcgaatttcct

SEQ ID NO: 1202395 - DNA, 25 bp, Homo sapien
ttgctctctgtgaccatatctgcaa

SEQ ID NO: 1202396 - DNA, 25 bp, Homo sapien
tgaccatatctgcaatggccattcc

SEQ ID NO: 1202397 - DNA, 25 bp, Homo sapien
cattaactagtgtaaccttggacaa

SEQ ID NO: 1202398 - DNA, 25 bp, Homo sapien
ccttatgcattatagcactgaggct

SEQ ID NO: 1202399 - DNA, 25 bp, Homo sapien
tgagattttagaggtcccacaggtc

SEQ ID NO: 1202400 - DNA, 25 bp, Homo sapien
tctttcaggacttagattcagcatg

SEQ ID NO: 1202401 - DNA, 25 bp, Homo sapien
gaccatggtttgactggatctagaa

SEQ ID NO: 1202402 - DNA, 25 bp, Homo sapien
cattacaattaagaccatggtttga

SEQ ID NO: 1202403 - DNA, 25 bp, Homo sapien
aacaagttagaagcttgcattacaa

SEQ ID NO: 1202404 - DNA, 25 bp, Homo sapien
caaaacaagttagaagcttgcatta

SEQ ID NO: 1202405 - DNA, 25 bp, Homo sapien
attagatttttgtttatcgagctcc

SEQ ID NO: 1202406 - DNA, 25 bp, Homo sapien
ttatcgagctccacaagtttttgac

SEQ ID NO: 1202407 - DNA, 25 bp, Homo sapien
cgagctccacaagtttttgactctt

SEQ ID NO: 1202408 - DNA, 25 bp, Homo sapien
tttttgtttatcgagctccacaagt

SEQ ID NO: 1202409 - DNA, 25 bp, Homo sapien
atgtcttttggggagtgtcctccat

SEQ ID NO: 1202410 - DNA, 25 bp, Homo sapien
ctgtggaaaaacattcagaatcttt

SEQ ID NO: 1202411 - DNA, 25 bp, Homo sapien
ggaaaaacattcagaatctttataa

SEQ ID NO: 1202412 - DNA, 25 bp, Homo sapien
aaacattcagaatctttataaccca

SEQ ID NO: 1202413 - DNA, 25 bp, Homo sapien
aacattcagaatctttataacccat

SEQ ID NO: 1202414 - DNA, 25 bp, Homo sapien
gagacatgtttcaatactcttcgta

SEQ ID NO: 1202415 - DNA, 25 bp, Homo sapien
tagcaaaagactccaggttaaacac

SEQ ID NO: 1202416 - DNA, 25 bp, Homo sapien
aaacaccagtaggatgtaaaaagca

SEQ ID NO: 1202417 - DNA, 25 bp, Homo sapien
atatttgactccagagagacatgtt

SEQ ID NO: 1202418 - DNA, 25 bp, Homo sapien
atttatttcccttagctcagccctt

SEQ ID NO: 1202419 - DNA, 25 bp, Homo sapien
tagattgacatcataaagggaggtg

SEQ ID NO: 1202420 - DNA, 25 bp, Homo sapien
ttagattgacatcataaagggaggt

SEQ ID NO: 1202421 - DNA, 25 bp, Homo sapien
cttagctcagcccttagattgacat

SEQ ID NO: 1202422 - DNA, 25 bp, Homo sapien
acctgttacctccagaacatagctg

SEQ ID NO: 1202423 - DNA, 25 bp, Homo sapien
ctcctctggtgactgttagctgaga

SEQ ID NO: 1202424 - DNA, 25 bp, Homo sapien
tgtttttctggacctgttacctcca

SEQ ID NO: 1202425 - DNA, 25 bp, Homo sapien
gactgttagctgagaaatatgctgt

SEQ ID NO: 1202426 - DNA, 25 bp, Homo sapien
tggactttgttgtgacagcagtaag

SEQ ID NO: 1202427 - DNA, 25 bp, Homo sapien
ctttgttgtgacagcagtaaggtgt

SEQ ID NO: 1202428 - DNA, 25 bp, Homo sapien
gaaagtatacgatcagatttgtgtt

SEQ ID NO: 1202429 - DNA, 25 bp, Homo sapien
gcagtaaggtgtcattgagggattc

SEQ ID NO: 1202430 - DNA, 25 bp, Homo sapien
cacattgccataacaaaatgtgaca

SEQ ID NO: 1202431 - DNA, 25 bp, Homo sapien
tgtttctggcttacaggctgctgcc

SEQ ID NO: 1202432 - DNA, 25 bp, Homo sapien
attagttagctcacattgccataac

SEQ ID NO: 1202433 - DNA, 25 bp, Homo sapien
gccatctcactgtatgccctcataa

SEQ ID NO: 1202434 - DNA, 25 bp, Homo sapien
tcagtggcaggttctagttctgtgg

SEQ ID NO: 1202435 - DNA, 25 bp, Homo sapien
tagtagaacatgaaactggtatttt

SEQ ID NO: 1202436 - DNA, 25 bp, Homo sapien
tgcaaatggtatgcaaaaggccaga

SEQ ID NO: 1202437 - DNA, 25 bp, Homo sapien
cagaagtccccacttgctaagtagg

SEQ ID NO: 1202438 - DNA, 25 bp, Homo sapien
catctatgaacaattccgatgtgac

SEQ ID NO: 1202439 - DNA, 25 bp, Homo sapien
gctatctttagttgttagttccatg

SEQ ID NO: 1202440 - DNA, 25 bp, Homo sapien
gatttgaatgcttctcagagctatc

SEQ ID NO: 1202441 - DNA, 25 bp, Homo sapien
tggcaacaaatgtcatgacagcagc

SEQ ID NO: 1202442 - DNA, 25 bp, Homo sapien
gattactagaggtataagattggca

SEQ ID NO: 1202443 - DNA, 25 bp, Homo sapien
tttcagcatatgtcctaaatgtgtc

SEQ ID NO: 1202444 - DNA, 25 bp, Homo sapien
cagcatatgtcctaaatgtgtcatc

SEQ ID NO: 1202445 - DNA, 25 bp, Homo sapien
aattttcagcatatgtcctaaatgt

SEQ ID NO: 1202446 - DNA, 25 bp, Homo sapien
gcatatgtcctaaatgtgtcatctt

SEQ ID NO: 1202447 - DNA, 25 bp, Homo sapien
ttctgagacttgacatctcttaatg

SEQ ID NO: 1202448 - DNA, 25 bp, Homo sapien
tgagacttgacatctcttaatgggc

SEQ ID NO: 1202449 - DNA, 25 bp, Homo sapien
ctgagacttgacatctcttaatggg

SEQ ID NO: 1202450 - DNA, 25 bp, Homo sapien
tctgagacttgacatctcttaatgg

SEQ ID NO: 1202451 - DNA, 25 bp, Homo sapien
cctttgtacaaagactctacctcca

SEQ ID NO: 1202452 - DNA, 25 bp, Homo sapien
tttgtacaaagactctacctccaat

SEQ ID NO: 1202453 - DNA, 25 bp, Homo sapien
tccctttgtacaaagactctacctc

SEQ ID NO: 1202454 - DNA, 25 bp, Homo sapien
ctttgtacaaagactctacctccaa

SEQ ID NO: 1202455 - DNA, 25 bp, Homo sapien
acgcctctcgccttttgggtcatct

SEQ ID NO: 1202456 - DNA, 25 bp, Homo sapien
tacgcctctcgccttttgggtcatc

SEQ ID NO: 1202457 - DNA, 25 bp, Homo sapien
ctacgcctctcgccttttgggtcat

SEQ ID NO: 1202458 - DNA, 25 bp, Homo sapien
cgcctctcgccttttgggtcatctc

SEQ ID NO: 1202459 - DNA, 25 bp, Homo sapien
cttatgagcaacacttttttctctc

SEQ ID NO: 1202460 - DNA, 25 bp, Homo sapien
acttatgagcaacacttttttctct

SEQ ID NO: 1202461 - DNA, 25 bp, Homo sapien
cactacctccgaagataagatgcat

SEQ ID NO: 1202462 - DNA, 25 bp, Homo sapien
tgggaaacgccgtgtaggcactacc

SEQ ID NO: 1202463 - DNA, 25 bp, Homo sapien
gtaacaggaattctgctgggaaacg

SEQ ID NO: 1202464 - DNA, 25 bp, Homo sapien
taacaggaattctgctgggaaacgc

SEQ ID NO: 1202465 - DNA, 25 bp, Homo sapien
aggctctgtgttaaagtattattgc

SEQ ID NO: 1202466 - DNA, 25 bp, Homo sapien
taatcactgtccttgtctgactgcg

SEQ ID NO: 1202467 - DNA, 25 bp, Homo sapien
gactgcgaagtagggtttagaactg

SEQ ID NO: 1202468 - DNA, 25 bp, Homo sapien
ttgctgacggtcactccttcctttc

SEQ ID NO: 1202469 - DNA, 25 bp, Homo sapien
caccgcctcgtgcaaatcgctgatg

SEQ ID NO: 1202470 - DNA, 25 bp, Homo sapien
ccgaaagcgcctagcgactcggcct

SEQ ID NO: 1202471 - DNA, 25 bp, Homo sapien
gcatcttcagcccttcgatcaccgc

SEQ ID NO: 1202472 - DNA, 25 bp, Homo sapien
agcgactcggcctcctccgcatctt

SEQ ID NO: 1202473 - DNA, 25 bp, Homo sapien
gccgctgctgcatctaaccacggtt

SEQ ID NO: 1202474 - DNA, 25 bp, Homo sapien
ccgccgctgctgcatctaaccacgg

SEQ ID NO: 1202475 - DNA, 25 bp, Homo sapien
tgcatctaaccacggttccccgtcc

SEQ ID NO: 1202476 - DNA, 25 bp, Homo sapien
tgctgcatctaaccacggttccccg

SEQ ID NO: 1202477 - DNA, 25 bp, Homo sapien
cacaggcagcaggaacgccaaagaa

SEQ ID NO: 1202478 - DNA, 25 bp, Homo sapien
tcaattgtcttgagtcacaggcagc

SEQ ID NO: 1202479 - DNA, 25 bp, Homo sapien
caattgtcttgagtcacaggcagca

SEQ ID NO: 1202480 - DNA, 25 bp, Homo sapien
agcaggaacgccaaagaagtgggac

SEQ ID NO: 1202481 - DNA, 25 bp, Homo sapien
gatcgatcaggcgatcgtttgttca

SEQ ID NO: 1202482 - DNA, 25 bp, Homo sapien
cagtattgggacacgaaaatggcaa

SEQ ID NO: 1202483 - DNA, 25 bp, Homo sapien
agataatgcattcggcagcaaagcc

SEQ ID NO: 1202484 - DNA, 25 bp, Homo sapien
aatggcaagataatgcattcggcag

SEQ ID NO: 1202485 - DNA, 25 bp, Homo sapien
cagggcaaatgtttattccctctat

SEQ ID NO: 1202486 - DNA, 25 bp, Homo sapien
tctatcattcagcgcctcagtctct

SEQ ID NO: 1202487 - DNA, 25 bp, Homo sapien
agaaatcaatttccactctaccttt

SEQ ID NO: 1202488 - DNA, 25 bp, Homo sapien
tctctgcaagaaatcaatttccact

SEQ ID NO: 1202489 - DNA, 25 bp, Homo sapien
acagacatcatcctcttgttaaaat

SEQ ID NO: 1202490 - DNA, 25 bp, Homo sapien
aaatgagacatcagaagaaacactt

SEQ ID NO: 1202491 - DNA, 25 bp, Homo sapien
tcttgttaaaatgagacatcagaag

SEQ ID NO: 1202492 - DNA, 25 bp, Homo sapien
gaaacacttctgctctaggacatca

SEQ ID NO: 1202493 - DNA, 25 bp, Homo sapien
tttaggcagcataccaaagtcttat

SEQ ID NO: 1202494 - DNA, 25 bp, Homo sapien
gaacctcagatcctcttagcagcat

SEQ ID NO: 1202495 - DNA, 25 bp, Homo sapien
aattatgtaagtagctttaggcagc

SEQ ID NO: 1202496 - DNA, 25 bp, Homo sapien
gcagcatttgccagcctctctaaaa

SEQ ID NO: 1202497 - DNA, 25 bp, Homo sapien
acctcagcctcaaccggaggttggg

SEQ ID NO: 1202498 - DNA, 25 bp, Homo sapien
ctcaaccggaggttgggaccacagg

SEQ ID NO: 1202499 - DNA, 25 bp, Homo sapien
gcctcaaccggaggttgggaccaca

SEQ ID NO: 1202500 - DNA, 25 bp, Homo sapien
cagcctcaaccggaggttgggacca

SEQ ID NO: 1202501 - DNA, 25 bp, Homo sapien
gagtcccaaccagtcttattcagtg

SEQ ID NO: 1202502 - DNA, 25 bp, Homo sapien
tgctgctgctaccagaactgcaaac

SEQ ID NO: 1202503 - DNA, 25 bp, Homo sapien
actgcaaagttcatgcggtaagcaa

SEQ ID NO: 1202504 - DNA, 25 bp, Homo sapien
tctcttaacctcgaagccctctgtg

SEQ ID NO: 1202505 - DNA, 25 bp, Homo sapien
tcagtatgctgagtatccgttccct

SEQ ID NO: 1202506 - DNA, 25 bp, Homo sapien
tccgttccctttttagatatcttca

SEQ ID NO: 1202507 - DNA, 25 bp, Homo sapien
cagtatgctgagtatccgttccctt

SEQ ID NO: 1202508 - DNA, 25 bp, Homo sapien
aaatgctgagtacttcttgataaat

SEQ ID NO: 1202509 - DNA, 25 bp, Homo sapien
tgctgagtacttcttgataaatgca

SEQ ID NO: 1202510 - DNA, 25 bp, Homo sapien
aagtgatgtcgtttaaatattaggt

SEQ ID NO: 1202511 - DNA, 25 bp, Homo sapien
cctttttgcaaattaaagactggtg

SEQ ID NO: 1202512 - DNA, 25 bp, Homo sapien
cagtgtttcttctagaaataagcct

SEQ ID NO: 1202513 - DNA, 25 bp, Homo sapien
tgtttcttctagaaataagcctaaa

SEQ ID NO: 1202514 - DNA, 25 bp, Homo sapien
gtgtttcttctagaaataagcctaa

SEQ ID NO: 1202515 - DNA, 25 bp, Homo sapien
ttcagtgtttcttctagaaataagc

SEQ ID NO: 1202516 - DNA, 25 bp, Homo sapien
tcactagctccgattttttccagag

SEQ ID NO: 1202517 - DNA, 25 bp, Homo sapien
catcagtgctgcttcactagctccg

SEQ ID NO: 1202518 - DNA, 25 bp, Homo sapien
tttgctctgggataagaagtcacaa

SEQ ID NO: 1202519 - DNA, 25 bp, Homo sapien
aatttctgtgattcgtaggatgccc

SEQ ID NO: 1202520 - DNA, 25 bp, Homo sapien
tttctgcggcattgtcgaggagaag

SEQ ID NO: 1202521 - DNA, 25 bp, Homo sapien
ggaattcattgcttaatttgatgag

SEQ ID NO: 1202522 - DNA, 25 bp, Homo sapien
gcttaatttgatgagtagtttctgc

SEQ ID NO: 1202523 - DNA, 25 bp, Homo sapien
gatgagtagtttctgcggcattgtc

SEQ ID NO: 1202524 - DNA, 25 bp, Homo sapien
gtatcaaatgctacaatcacataga

SEQ ID NO: 1202525 - DNA, 25 bp, Homo sapien
cccagatgaggtcattacgtagctt

SEQ ID NO: 1202526 - DNA, 25 bp, Homo sapien
ccatagttttagaattttaagcaag

SEQ ID NO: 1202527 - DNA, 25 bp, Homo sapien
caatcacatagaatgatttaacccc

SEQ ID NO: 1202528 - DNA, 25 bp, Homo sapien
taatgataatagagtggcatttcac

SEQ ID NO: 1202529 - DNA, 25 bp, Homo sapien
cctataatgataatagagtggcatt

SEQ ID NO: 1202530 - DNA, 25 bp, Homo sapien
atagagtggcatttcaccacctcca

SEQ ID NO: 1202531 - DNA, 25 bp, Homo sapien
ctggtcctataatgataatagagtg

SEQ ID NO: 1202532 - DNA, 25 bp, Homo sapien
ctttgaaatattctggactctttac

SEQ ID NO: 1202533 - DNA, 25 bp, Homo sapien
ggactctttacttagatgttcttct

SEQ ID NO: 1202534 - DNA, 25 bp, Homo sapien
gaaatattctggactctttacttag

SEQ ID NO: 1202535 - DNA, 25 bp, Homo sapien
tattctggactctttacttagatgt

SEQ ID NO: 1202536 - DNA, 25 bp, Homo sapien
tataccattcacctcatgtgtgagg

SEQ ID NO: 1202537 - DNA, 25 bp, Homo sapien
taccattcacctcatgtgtgaggct

SEQ ID NO: 1202538 - DNA, 25 bp, Homo sapien
ccattcacctcatgtgtgaggctga

SEQ ID NO: 1202539 - DNA, 25 bp, Homo sapien
accattcacctcatgtgtgaggctg

SEQ ID NO: 1202540 - DNA, 25 bp, Homo sapien
ttgtcgtttttcactatttgtctaa

SEQ ID NO: 1202541 - DNA, 25 bp, Homo sapien
cttgtcgtttttcactatttgtcta

SEQ ID NO: 1202542 - DNA, 25 bp, Homo sapien
tgtcgtttttcactatttgtctaaa

SEQ ID NO: 1202543 - DNA, 25 bp, Homo sapien
acggcaacatatctgggattggcag

SEQ ID NO: 1202544 - DNA, 25 bp, Homo sapien
tatctgggattggcagcacaaaatg

SEQ ID NO: 1202545 - DNA, 25 bp, Homo sapien
cggcaacatatctgggattggcagc

SEQ ID NO: 1202546 - DNA, 25 bp, Homo sapien
atatctgggattggcagcacaaaat

SEQ ID NO: 1202547 - DNA, 25 bp, Homo sapien
aggcagggccacacaaggattgcaa

SEQ ID NO: 1202548 - DNA, 25 bp, Homo sapien
ggcagggccacacaaggattgcaac

SEQ ID NO: 1202549 - DNA, 25 bp, Homo sapien
tccttcactcttcttcctgtatcta

SEQ ID NO: 1202550 - DNA, 25 bp, Homo sapien
cttcactcttcttcctgtatctact

SEQ ID NO: 1202551 - DNA, 25 bp, Homo sapien
cttccttcactcttcttcctgtatc

SEQ ID NO: 1202552 - DNA, 25 bp, Homo sapien
cctcttccttcactcttcttcctgt

SEQ ID NO: 1202553 - DNA, 25 bp, Homo sapien
cccagtacctggaggcttagaggct

SEQ ID NO: 1202554 - DNA, 25 bp, Homo sapien
ccagtacctggaggcttagaggctt

SEQ ID NO: 1202555 - DNA, 25 bp, Homo sapien
tacctggaggcttagaggcttccat

SEQ ID NO: 1202556 - DNA, 25 bp, Homo sapien
agtacctggaggcttagaggcttcc

SEQ ID NO: 1202557 - DNA, 25 bp, Homo sapien
tgcaagagcttctttaattttggtt

SEQ ID NO: 1202558 - DNA, 25 bp, Homo sapien
ttgacaagtgctggattttctgcaa

SEQ ID NO: 1202559 - DNA, 25 bp, Homo sapien
caagagcttctttaattttggttgc

SEQ ID NO: 1202560 - DNA, 25 bp, Homo sapien
ttctgcaagagcttctttaattttg

SEQ ID NO: 1202561 - DNA, 25 bp, Homo sapien
tgagaggtccagttgatccacactt

SEQ ID NO: 1202562 - DNA, 25 bp, Homo sapien
caaacagggaggttctatgcactag

SEQ ID NO: 1202563 - DNA, 25 bp, Homo sapien
tactatcttagagcttttgtgccag

SEQ ID NO: 1202564 - DNA, 25 bp, Homo sapien
tatctgctgggtaaatatctgggag

SEQ ID NO: 1202565 - DNA, 25 bp, Homo sapien
agtttgactaggaggttcaactggg

SEQ ID NO: 1202566 - DNA, 25 bp, Homo sapien
caactgggtttttaacagcccagag

SEQ ID NO: 1202567 - DNA, 25 bp, Homo sapien
tattgattttacaccatttcccatt

SEQ ID NO: 1202568 - DNA, 25 bp, Homo sapien
tcaactgggtttttaacagcccaga

SEQ ID NO: 1202569 - DNA, 25 bp, Homo sapien
ctggtgtttctgaacccccagcaaa

SEQ ID NO: 1202570 - DNA, 25 bp, Homo sapien
tgttcagaagttgcttgcattgtca

SEQ ID NO: 1202571 - DNA, 25 bp, Homo sapien
caaaataatgccgtagaggacgtta

SEQ ID NO: 1202572 - DNA, 25 bp, Homo sapien
ctcaaggttggagttgttttcctgg

SEQ ID NO: 1202573 - DNA, 25 bp, Homo sapien
tcattttgactatgaagcatttcaa

SEQ ID NO: 1202574 - DNA, 25 bp, Homo sapien
aggcttcattttgactatgaagcat

SEQ ID NO: 1202575 - DNA, 25 bp, Homo sapien
cttcattttgactatgaagcatttc

SEQ ID NO: 1202576 - DNA, 25 bp, Homo sapien
ttggccctctagaatagacttttca

SEQ ID NO: 1202577 - DNA, 25 bp, Homo sapien
tgggtagactgcccatgtaactata

SEQ ID NO: 1202578 - DNA, 25 bp, Homo sapien
gggtagactgcccatgtaactatat

SEQ ID NO: 1202579 - DNA, 25 bp, Homo sapien
agactgcccatgtaactatatttct

SEQ ID NO: 1202580 - DNA, 25 bp, Homo sapien
ctgcccatgtaactatatttctcca

SEQ ID NO: 1202581 - DNA, 25 bp, Homo sapien
ctaacgtattcttctcacgtattct

SEQ ID NO: 1202582 - DNA, 25 bp, Homo sapien
gtattcttctcacgtattcttatca

SEQ ID NO: 1202583 - DNA, 25 bp, Homo sapien
tctcacgtattcttatcagaaccat

SEQ ID NO: 1202584 - DNA, 25 bp, Homo sapien
cttctaacgtattcttctcacgtat

SEQ ID NO: 1202585 - DNA, 25 bp, Homo sapien
aatagctgtctttcctggacaccat

SEQ ID NO: 1202586 - DNA, 25 bp, Homo sapien
gcatgtgcttgaagtgtacttcatc

SEQ ID NO: 1202587 - DNA, 25 bp, Homo sapien
acttccacatagagttgccactctg

SEQ ID NO: 1202588 - DNA, 25 bp, Homo sapien
ttccacatagagttgccactctgat

SEQ ID NO: 1202589 - DNA, 25 bp, Homo sapien
tcacttccacatagagttgccactc

SEQ ID NO: 1202590 - DNA, 25 bp, Homo sapien
cacttccacatagagttgccactct

SEQ ID NO: 1202591 - DNA, 25 bp, Homo sapien
tctcagtgaagtatgaagatgaaag

SEQ ID NO: 1202592 - DNA, 25 bp, Homo sapien
cttttaagtctcagtgaagtatgaa

SEQ ID NO: 1202593 - DNA, 25 bp, Homo sapien
atttccactcacacgatgacgtcct

SEQ ID NO: 1202594 - DNA, 25 bp, Homo sapien
cacacgatgacgtccttttaagtct

SEQ ID NO: 1202595 - DNA, 25 bp, Homo sapien
tcagtgccagaaatggggcctgtcc

SEQ ID NO: 1202596 - DNA, 25 bp, Homo sapien
tcattttctacaccgttctatcatg

SEQ ID NO: 1202597 - DNA, 25 bp, Homo sapien
caccgttctatcatgctcagtgcca

SEQ ID NO: 1202598 - DNA, 25 bp, Homo sapien
tctacaccgttctatcatgctcagt

SEQ ID NO: 1202599 - DNA, 25 bp, Homo sapien
aaaatatatttgaactttggctgat

SEQ ID NO: 1202600 - DNA, 25 bp, Homo sapien
tgaatgaataactcctaattcaaac

SEQ ID NO: 1202601 - DNA, 25 bp, Homo sapien
taaagaagagcaataggataaaaat

SEQ ID NO: 1202602 - DNA, 25 bp, Homo sapien
gacttaaagctagaaattgaagaac

SEQ ID NO: 1202603 - DNA, 25 bp, Homo sapien
gggcactgacctgataccagtaaga

SEQ ID NO: 1202604 - DNA, 25 bp, Homo sapien
cctggcaatgtcactcgaggagttt

SEQ ID NO: 1202605 - DNA, 25 bp, Homo sapien
tatccctaggagctcagtcccaggg

SEQ ID NO: 1202606 - DNA, 25 bp, Homo sapien
ctggtaagttcccacgcctggcaat

SEQ ID NO: 1202607 - DNA, 25 bp, Homo sapien
tgtacacaatacctaatgagaagtt

SEQ ID NO: 1202608 - DNA, 25 bp, Homo sapien
taatcaacaggttataatagatact

SEQ ID NO: 1202609 - DNA, 25 bp, Homo sapien
tatcagcataaattctgccagatat

SEQ ID NO: 1202610 - DNA, 25 bp, Homo sapien
gccagatatcatagattgagatgaa

SEQ ID NO: 1202611 - DNA, 25 bp, Homo sapien
taatagtctgatcatgatgctgaat

SEQ ID NO: 1202612 - DNA, 25 bp, Homo sapien
tagtctgatcatgatgctgaataaa

SEQ ID NO: 1202613 - DNA, 25 bp, Homo sapien
tctgatcatgatgctgaataaatga

SEQ ID NO: 1202614 - DNA, 25 bp, Homo sapien
tgtaatagtctgatcatgatgctga

SEQ ID NO: 1202615 - DNA, 25 bp, Homo sapien
gagaccaatacgttgccaaaccaca

SEQ ID NO: 1202616 - DNA, 25 bp, Homo sapien
gaccaatacgttgccaaaccacaaa

SEQ ID NO: 1202617 - DNA, 25 bp, Homo sapien
ggtggagaccaatacgttgccaaac

SEQ ID NO: 1202618 - DNA, 25 bp, Homo sapien
tggagaccaatacgttgccaaacca

SEQ ID NO: 1202619 - DNA, 25 bp, Homo sapien
aatggatatggtaaaaatggaagca

SEQ ID NO: 1202620 - DNA, 25 bp, Homo sapien
gaagcaattttggacatggtggaag

SEQ ID NO: 1202621 - DNA, 25 bp, Homo sapien
aatggaagcaattttggacatggtg

SEQ ID NO: 1202622 - DNA, 25 bp, Homo sapien
aaaatggaagcaattttggacatgg

SEQ ID NO: 1202623 - DNA, 25 bp, Homo sapien
gcaactgtgttggtggtggatatgg

SEQ ID NO: 1202624 - DNA, 25 bp, Homo sapien
tggctttggtggcaactgtgttggt

SEQ ID NO: 1202625 - DNA, 25 bp, Homo sapien
ctttggtggcaactgtgttggtggt

SEQ ID NO: 1202626 - DNA, 25 bp, Homo sapien
tggtggcaactgtgttggtggtgga

SEQ ID NO: 1202627 - DNA, 25 bp, Homo sapien
aaccgatgagtgtttgaggagccat

SEQ ID NO: 1202628 - DNA, 25 bp, Homo sapien
caaccgatgagtgtttgaggagcca

SEQ ID NO: 1202629 - DNA, 25 bp, Homo sapien
aaacaaccgatgagtgtttgaggag

SEQ ID NO: 1202630 - DNA, 25 bp, Homo sapien
gaaacaaccgatgagtgtttgagga

SEQ ID NO: 1202631 - DNA, 25 bp, Homo sapien
tataggtgcaggtcgaccttcaggc

SEQ ID NO: 1202632 - DNA, 25 bp, Homo sapien
tttacacaaccacctgcaagtaggg

SEQ ID NO: 1202633 - DNA, 25 bp, Homo sapien
gacctaatgtgtaaccacctggaga

SEQ ID NO: 1202634 - DNA, 25 bp, Homo sapien
tccctgtagggacactgcacattgt

SEQ ID NO: 1202635 - DNA, 25 bp, Homo sapien
agggtaggcctagaagtgtacgcaa

SEQ ID NO: 1202636 - DNA, 25 bp, Homo sapien
gtaggcctagaagtgtacgcaaatg

SEQ ID NO: 1202637 - DNA, 25 bp, Homo sapien
taggcctagaagtgtacgcaaatgt

SEQ ID NO: 1202638 - DNA, 25 bp, Homo sapien
tttctgagggtaggcctagaagtgt

SEQ ID NO: 1202639 - DNA, 25 bp, Homo sapien
tttattataggagttcatgttgcct

SEQ ID NO: 1202640 - DNA, 25 bp, Homo sapien
tattataggagttcatgttgccttt

SEQ ID NO: 1202641 - DNA, 25 bp, Homo sapien
ttattataggagttcatgttgcctt

SEQ ID NO: 1202642 - DNA, 25 bp, Homo sapien
ggtaggagtaccgctctgccacctg

SEQ ID NO: 1202643 - DNA, 25 bp, Homo sapien
catgatacgttaaattcctttaaca

SEQ ID NO: 1202644 - DNA, 25 bp, Homo sapien
ttaacaactgccattttgccatttt

SEQ ID NO: 1202645 - DNA, 25 bp, Homo sapien
taggagtaccgctctgccacctgat

SEQ ID NO: 1202646 - DNA, 25 bp, Homo sapien
catgtttgcatgtgacccagctgta

SEQ ID NO: 1202647 - DNA, 25 bp, Homo sapien
gagttccctgggcatgtttgcatgt

SEQ ID NO: 1202648 - DNA, 25 bp, Homo sapien
tccctgggcatgtttgcatgtgacc

SEQ ID NO: 1202649 - DNA, 25 bp, Homo sapien
gggcatgtttgcatgtgacccagct

SEQ ID NO: 1202650 - DNA, 25 bp, Homo sapien
gaaactggaccgactttagcttgtg

SEQ ID NO: 1202651 - DNA, 25 bp, Homo sapien
tgggtatagtagaaactggaccgac

SEQ ID NO: 1202652 - DNA, 25 bp, Homo sapien
gcccttgaagactgcgtgggtatag

SEQ ID NO: 1202653 - DNA, 25 bp, Homo sapien
tagcttgtgtgggaccaagtctgtg

SEQ ID NO: 1202654 - DNA, 25 bp, Homo sapien
gatacataatcttatgccatgaaaa

SEQ ID NO: 1202655 - DNA, 25 bp, Homo sapien
tatataggtaatccccttgatatgg

SEQ ID NO: 1202656 - DNA, 25 bp, Homo sapien
aaactaatacacccctcataatggg

SEQ ID NO: 1202657 - DNA, 25 bp, Homo sapien
tgaaaatgaacgactccagtaaatg

SEQ ID NO: 1202658 - DNA, 25 bp, Homo sapien
gacttcccacaacatgtatctttac

SEQ ID NO: 1202659 - DNA, 25 bp, Homo sapien
gaggtgacacacatcctcagtttac

SEQ ID NO: 1202660 - DNA, 25 bp, Homo sapien
gagattaaagtaagacaggtgtaag

SEQ ID NO: 1202661 - DNA, 25 bp, Homo sapien
cacatcctcagtttacaaagataac

SEQ ID NO: 1202662 - DNA, 25 bp, Homo sapien
tcactgcaagtgaatggcatgagag

SEQ ID NO: 1202663 - DNA, 25 bp, Homo sapien
gagaatgagttacccattagtgaca

SEQ ID NO: 1202664 - DNA, 25 bp, Homo sapien
tatagacaaaactgggtgtacacag

SEQ ID NO: 1202665 - DNA, 25 bp, Homo sapien
tattatatgtagtgccagccctaag

SEQ ID NO: 1202666 - DNA, 25 bp, Homo sapien
aaaggcaagggcttaggtgtcattc

SEQ ID NO: 1202667 - DNA, 25 bp, Homo sapien
ttattagctatcaacaacaggcaga

SEQ ID NO: 1202668 - DNA, 25 bp, Homo sapien
tactggattgtatcacggaaagaat

SEQ ID NO: 1202669 - DNA, 25 bp, Homo sapien
catatctggattacttctcgtgaag

SEQ ID NO: 1202670 - DNA, 25 bp, Homo sapien
gaccaagagtgagctcatcatctcc

SEQ ID NO: 1202671 - DNA, 25 bp, Homo sapien
aagagtgagctcatcatctccatcc

SEQ ID NO: 1202672 - DNA, 25 bp, Homo sapien
ctgaccaagagtgagctcatcatct

SEQ ID NO: 1202673 - DNA, 25 bp, Homo sapien
ccaagagtgagctcatcatctccat

SEQ ID NO: 1202674 - DNA, 25 bp, Homo sapien
atgtcattcctaggagcactcattt

SEQ ID NO: 1202675 - DNA, 25 bp, Homo sapien
gatgtcattcctaggagcactcatt

SEQ ID NO: 1202676 - DNA, 25 bp, Homo sapien
agatgtcattcctaggagcactcat

SEQ ID NO: 1202677 - DNA, 25 bp, Homo sapien
tagatgtcattcctaggagcactca

SEQ ID NO: 1202678 - DNA, 25 bp, Homo sapien
cagcagttatatcaccatgctgctt

SEQ ID NO: 1202679 - DNA, 25 bp, Homo sapien
gacagtgaagctcatccttttggtg

SEQ ID NO: 1202680 - DNA, 25 bp, Homo sapien
aacatctcttgtgagtaacttccag

SEQ ID NO: 1202681 - DNA, 25 bp, Homo sapien
ttaccaccaaggagaatggctttct

SEQ ID NO: 1202682 - DNA, 25 bp, Homo sapien
tctctgcaggactagcacctcttac

SEQ ID NO: 1202683 - DNA, 25 bp, Homo sapien
ttctctgcaggactagcacctctta

SEQ ID NO: 1202684 - DNA, 25 bp, Homo sapien
tttctctgcaggactagcacctctt

SEQ ID NO: 1202685 - DNA, 25 bp, Homo sapien
agtttgaatcttatatcttgtggcc

SEQ ID NO: 1202686 - DNA, 25 bp, Homo sapien
tggtcatgagtattaagtttgaatc

SEQ ID NO: 1202687 - DNA, 25 bp, Homo sapien
tctcagtaagcacacattgacaaat

SEQ ID NO: 1202688 - DNA, 25 bp, Homo sapien
gacaaatatttgcattagtgcagag

SEQ ID NO: 1202689 - DNA, 25 bp, Homo sapien
caagtgatacttgctcacatgagaa

SEQ ID NO: 1202690 - DNA, 25 bp, Homo sapien
acagtcttatctttcccaggcaaaa

SEQ ID NO: 1202691 - DNA, 25 bp, Homo sapien
gcttgactcaagacctaatgtagga

SEQ ID NO: 1202692 - DNA, 25 bp, Homo sapien
tagcaagtatttactaactgggcct

SEQ ID NO: 1202693 - DNA, 25 bp, Homo sapien
ttttctgctcggaagagaaagaccc

SEQ ID NO: 1202694 - DNA, 25 bp, Homo sapien
catgtccggtccactcagaagagct

SEQ ID NO: 1202695 - DNA, 25 bp, Homo sapien
gatagtgagatcagtagtgaactcc

SEQ ID NO: 1202696 - DNA, 25 bp, Homo sapien
gtttgagctgctgtggtgaatccat

SEQ ID NO: 1202697 - DNA, 25 bp, Homo sapien
tgactagagtctcagtccctgaatg

SEQ ID NO: 1202698 - DNA, 25 bp, Homo sapien
ccctgaatgtctttcacctttgaga

SEQ ID NO: 1202699 - DNA, 25 bp, Homo sapien
tgcttgacagccaacttgaagacca

SEQ ID NO: 1202700 - DNA, 25 bp, Homo sapien
attaggcttcctggagcaaacttcc

SEQ ID NO: 1202701 - DNA, 25 bp, Homo sapien
gaagcagaaagtgtcactaattgtt

SEQ ID NO: 1202702 - DNA, 25 bp, Homo sapien
tggaagcagaaagtgtcactaattg

SEQ ID NO: 1202703 - DNA, 25 bp, Homo sapien
gcagaaagtgtcactaattgtttcc

SEQ ID NO: 1202704 - DNA, 25 bp, Homo sapien
cctggaagcagaaagtgtcactaat

SEQ ID NO: 1202705 - DNA, 25 bp, Homo sapien
gcaataatcgcagatgttttgtgca

SEQ ID NO: 1202706 - DNA, 25 bp, Homo sapien
ccatcagctacatagtggcaataat

SEQ ID NO: 1202707 - DNA, 25 bp, Homo sapien
cagatgttttgtgcatggtagaagc

SEQ ID NO: 1202708 - DNA, 25 bp, Homo sapien
tacatagtggcaataatcgcagatg

SEQ ID NO: 1202709 - DNA, 25 bp, Homo sapien
ccactttctatcctcatgctttttc

SEQ ID NO: 1202710 - DNA, 25 bp, Homo sapien
cactttctatcctcatgctttttct

SEQ ID NO: 1202711 - DNA, 25 bp, Homo sapien
gagattgatatttagaaactggcca

SEQ ID NO: 1202712 - DNA, 25 bp, Homo sapien
ccaagtgaggagatagcagtgtgca

SEQ ID NO: 1202713 - DNA, 25 bp, Homo sapien
catgacacccattgtattgagtgga

SEQ ID NO: 1202714 - DNA, 25 bp, Homo sapien
tagtttcagtattgccagcagtgtc

SEQ ID NO: 1202715 - DNA, 25 bp, Homo sapien
tcatccacatccgtgcttttgcaaa

SEQ ID NO: 1202716 - DNA, 25 bp, Homo sapien
tgtagtattgtataagtgtatgaag

SEQ ID NO: 1202717 - DNA, 25 bp, Homo sapien
tactcatagactctaaggcttccaa

SEQ ID NO: 1202718 - DNA, 25 bp, Homo sapien
tcatagactctaaggcttccaataa

SEQ ID NO: 1202719 - DNA, 25 bp, Homo sapien
ccagagtactcatagactctaaggc

SEQ ID NO: 1202720 - DNA, 25 bp, Homo sapien
ttacaaactgagtaatggaacttct

SEQ ID NO: 1202721 - DNA, 25 bp, Homo sapien
tgttttcattacaaactgagtaatg

SEQ ID NO: 1202722 - DNA, 25 bp, Homo sapien
tcagatgtattcaaagtaattcacc

SEQ ID NO: 1202723 - DNA, 25 bp, Homo sapien
cagatgtattcaaagtaattcaccc

SEQ ID NO: 1202724 - DNA, 25 bp, Homo sapien
tagttgtcatccgatagcttcttag

SEQ ID NO: 1202725 - DNA, 25 bp, Homo sapien
tgtcatccgatagcttcttagtctg

SEQ ID NO: 1202726 - DNA, 25 bp, Homo sapien
catccgatagcttcttagtctgttt

SEQ ID NO: 1202727 - DNA, 25 bp, Homo sapien
ccgatagcttcttagtctgtttagt

SEQ ID NO: 1202728 - DNA, 25 bp, Homo sapien
ataacttcaggggttataagttcag

SEQ ID NO: 1202729 - DNA, 25 bp, Homo sapien
cagctgcctgagcaataacttcagg

SEQ ID NO: 1202730 - DNA, 25 bp, Homo sapien
agctgcctgagcaataacttcaggg

SEQ ID NO: 1202731 - DNA, 25 bp, Homo sapien
cttcaggggttataagttcagaagt

SEQ ID NO: 1202732 - DNA, 25 bp, Homo sapien
attatgaagtctccacccttctctc

SEQ ID NO: 1202733 - DNA, 25 bp, Homo sapien
ggtttgaatgatgatgttcccttca

SEQ ID NO: 1202734 - DNA, 25 bp, Homo sapien
cactcattcatgagaagggcttgag

SEQ ID NO: 1202735 - DNA, 25 bp, Homo sapien
ggatggaggatttcaatggtttgaa

SEQ ID NO: 1202736 - DNA, 25 bp, Homo sapien
ccactggcaattccatgagtgagct

SEQ ID NO: 1202737 - DNA, 25 bp, Homo sapien
cttggttgtactgaaacatccatgc

SEQ ID NO: 1202738 - DNA, 25 bp, Homo sapien
tactgaaacatccatgctccatggg

SEQ ID NO: 1202739 - DNA, 25 bp, Homo sapien
cactggcaattccatgagtgagctt

SEQ ID NO: 1202740 - DNA, 25 bp, Homo sapien
ttaaattgcattgccatttaaggtt

SEQ ID NO: 1202741 - DNA, 25 bp, Homo sapien
aaatgaagtgaattttcaagatata

SEQ ID NO: 1202742 - DNA, 25 bp, Homo sapien
caaatgaagtgaattttcaagatat

SEQ ID NO: 1202743 - DNA, 25 bp, Homo sapien
ttctcatgtctttctctaaaatttt

SEQ ID NO: 1202744 - DNA, 25 bp, Homo sapien
attttgagcgcaatgaacagatttt

SEQ ID NO: 1202745 - DNA, 25 bp, Homo sapien
ttctctaaaattttgagcgcaatga

SEQ ID NO: 1202746 - DNA, 25 bp, Homo sapien
ctaaaattttgagcgcaatgaacag

SEQ ID NO: 1202747 - DNA, 25 bp, Homo sapien
atgggaccccctcatccagctaagg

SEQ ID NO: 1202748 - DNA, 25 bp, Homo sapien
gctaaggctgctaggcccactcctg

SEQ ID NO: 1202749 - DNA, 25 bp, Homo sapien
gccctctatattagacatcctctca

SEQ ID NO: 1202750 - DNA, 25 bp, Homo sapien
cctggagtgccctctatattagaca

SEQ ID NO: 1202751 - DNA, 25 bp, Homo sapien
gatgatgacatttcggatatggtcc

SEQ ID NO: 1202752 - DNA, 25 bp, Homo sapien
gagaaacacattcgcgggtctgtaa

SEQ ID NO: 1202753 - DNA, 25 bp, Homo sapien
tatggtccccaggtcgttgagaaac

SEQ ID NO: 1202754 - DNA, 25 bp, Homo sapien
gtgccatctccattgatgatgacat

SEQ ID NO: 1202755 - DNA, 25 bp, Homo sapien
aatagtaggtactatttctatccca

SEQ ID NO: 1202756 - DNA, 25 bp, Homo sapien
gcctggataaccaggcccatcaaaa

SEQ ID NO: 1202757 - DNA, 25 bp, Homo sapien
catattttggaagtatctgtgataa

SEQ ID NO: 1202758 - DNA, 25 bp, Homo sapien
gagtaatcgggctatcaatcacctt

SEQ ID NO: 1202759 - DNA, 25 bp, Homo sapien
ttgggtcaacgacaggccgcataga

SEQ ID NO: 1202760 - DNA, 25 bp, Homo sapien
aatgatcctgttgctgccagtgcag

SEQ ID NO: 1202761 - DNA, 25 bp, Homo sapien
tatcttaatgtcctagcccaatgca

SEQ ID NO: 1202762 - DNA, 25 bp, Homo sapien
taaagggcttgtgaaaccacaggct

SEQ ID NO: 1202763 - DNA, 25 bp, Homo sapien
tcaccgaaaggctaaaagatgttct

SEQ ID NO: 1202764 - DNA, 25 bp, Homo sapien
ctctcactgcaatttgagaaagctg

SEQ ID NO: 1202765 - DNA, 25 bp, Homo sapien
caatttgagaaagctgatgtagatg

SEQ ID NO: 1202766 - DNA, 25 bp, Homo sapien
gctgtctccctgttatagcctgtta

SEQ ID NO: 1202767 - DNA, 25 bp, Homo sapien
ctgctgagaggaacacagtgagctt

SEQ ID NO: 1202768 - DNA, 25 bp, Homo sapien
cattctgaacgccagttgctccttc

SEQ ID NO: 1202769 - DNA, 25 bp, Homo sapien
ctgcattctgaacgccagttgctcc

SEQ ID NO: 1202770 - DNA, 25 bp, Homo sapien
cagctgctgagaggaacacagtgag

SEQ ID NO: 1202771 - DNA, 25 bp, Homo sapien
caaccagaatgatgctttaatagac

SEQ ID NO: 1202772 - DNA, 25 bp, Homo sapien
gatgctttaatagactcaaataaca

SEQ ID NO: 1202773 - DNA, 25 bp, Homo sapien
caagtttgcgcaaccagaatgatgc

SEQ ID NO: 1202774 - DNA, 25 bp, Homo sapien
cagtgcaacttctcgttcaagtttg

SEQ ID NO: 1202775 - DNA, 25 bp, Homo sapien
gtcaagagctgcgtttctttctgtc

SEQ ID NO: 1202776 - DNA, 25 bp, Homo sapien
aagtcaagagctgcgtttctttctg

SEQ ID NO: 1202777 - DNA, 25 bp, Homo sapien
aaaagaagtcaagagctgcgtttct

SEQ ID NO: 1202778 - DNA, 25 bp, Homo sapien
agaagtcaagagctgcgtttctttc

SEQ ID NO: 1202779 - DNA, 25 bp, Homo sapien
gaataaaaagttatcacaactctta

SEQ ID NO: 1202780 - DNA, 25 bp, Homo sapien
tactattccatacatatacatagta

SEQ ID NO: 1202781 - DNA, 25 bp, Homo sapien
ctaaaatgaagagatgtctaattta

SEQ ID NO: 1202782 - DNA, 25 bp, Homo sapien
gtctaatttattacatccttcccta

SEQ ID NO: 1202783 - DNA, 25 bp, Homo sapien
gagaaaagaaaagcaatgttgtttc

SEQ ID NO: 1202784 - DNA, 25 bp, Homo sapien
gaaaagaaaagcaatgttgtttcca

SEQ ID NO: 1202785 - DNA, 25 bp, Homo sapien
aaaagaaaagcaatgttgtttccat

SEQ ID NO: 1202786 - DNA, 25 bp, Homo sapien
tgagaaaagaaaagcaatgttgttt

SEQ ID NO: 1202787 - DNA, 25 bp, Homo sapien
tcttcttttcctgaaccatgtatta

SEQ ID NO: 1202788 - DNA, 25 bp, Homo sapien
tcttttcctgaaccatgtattaact

SEQ ID NO: 1202789 - DNA, 25 bp, Homo sapien
tttcctgaaccatgtattaacttga

SEQ ID NO: 1202790 - DNA, 25 bp, Homo sapien
cctgaaccatgtattaacttgaaaa

SEQ ID NO: 1202791 - DNA, 25 bp, Homo sapien
ggagcgggtgtcttcatgaaactca

SEQ ID NO: 1202792 - DNA, 25 bp, Homo sapien
cccagatctactggagcgggtgtct

SEQ ID NO: 1202793 - DNA, 25 bp, Homo sapien
ctgcacaagaagacttagtctattt

SEQ ID NO: 1202794 - DNA, 25 bp, Homo sapien
ctactggagcgggtgtcttcatgaa

SEQ ID NO: 1202795 - DNA, 25 bp, Homo sapien
aaagcagtttgtcaaatgattcacc

SEQ ID NO: 1202796 - DNA, 25 bp, Homo sapien
aagcagtttgtcaaatgattcaccc

SEQ ID NO: 1202797 - DNA, 25 bp, Homo sapien
cacaaagtatttggtgaaagtacca

SEQ ID NO: 1202798 - DNA, 25 bp, Homo sapien
tcatccacagtaggtaattctaaac

SEQ ID NO: 1202799 - DNA, 25 bp, Homo sapien
aattttgtgacctattgtttcggat

SEQ ID NO: 1202800 - DNA, 25 bp, Homo sapien
ttcggataattacatgcatagtttg

SEQ ID NO: 1202801 - DNA, 25 bp, Homo sapien
ctagctgcatcacctgctcagttga

SEQ ID NO: 1202802 - DNA, 25 bp, Homo sapien
gaaagattacagaatgctaggtgag

SEQ ID NO: 1202803 - DNA, 25 bp, Homo sapien
ggattttctgtaggactaatcatcc

SEQ ID NO: 1202804 - DNA, 25 bp, Homo sapien
gaaatcctgtctatatgttattgtc

SEQ ID NO: 1202805 - DNA, 25 bp, Homo sapien
gagagtagcaaattcgattttgtcc

SEQ ID NO: 1202806 - DNA, 25 bp, Homo sapien
gcttgggtgtatggtagttgcacta

SEQ ID NO: 1202807 - DNA, 25 bp, Homo sapien
gaaatatcatgagtcccatctggac

SEQ ID NO: 1202808 - DNA, 25 bp, Homo sapien
cactatagaaatgttgagggaaggg

SEQ ID NO: 1202809 - DNA, 25 bp, Homo sapien
tctgccattgaaggaaacatgggtt

SEQ ID NO: 1202810 - DNA, 25 bp, Homo sapien
tttcttgaaatcttcacaggctatc

SEQ ID NO: 1202811 - DNA, 25 bp, Homo sapien
tcttgaaatcttcacaggctatcca

SEQ ID NO: 1202812 - DNA, 25 bp, Homo sapien
tcttttggggcatcagtctgtataa

SEQ ID NO: 1202813 - DNA, 25 bp, Homo sapien
tgaaatcttcacaggctatccaaaa

SEQ ID NO: 1202814 - DNA, 25 bp, Homo sapien
aaaagtgtgattatagttaatatgc

SEQ ID NO: 1202815 - DNA, 25 bp, Homo sapien
actgatgcaatgttggagtgggcat

SEQ ID NO: 1202816 - DNA, 25 bp, Homo sapien
tatataaacaactttgagaaacagc

SEQ ID NO: 1202817 - DNA, 25 bp, Homo sapien
gaaacagcacaggactgatgcaatg

SEQ ID NO: 1202818 - DNA, 25 bp, Homo sapien
tgtgcagcatcaaaactgtggaggg

SEQ ID NO: 1202819 - DNA, 25 bp, Homo sapien
gatttgttggtctctgaggtcttcc

SEQ ID NO: 1202820 - DNA, 25 bp, Homo sapien
tgcaggtaaatgagcgtgatcgtct

SEQ ID NO: 1202821 - DNA, 25 bp, Homo sapien
gtgatcgtctcctaagatttgttgg

SEQ ID NO: 1202822 - DNA, 25 bp, Homo sapien
aatcgctagggccttagactccttg

SEQ ID NO: 1202823 - DNA, 25 bp, Homo sapien
tctaaagggccaaacatgagacgtc

SEQ ID NO: 1202824 - DNA, 25 bp, Homo sapien
caatgtggcagatgcccaaatcgct

SEQ ID NO: 1202825 - DNA, 25 bp, Homo sapien
tgggtacgtccatgttcacttagga

SEQ ID NO: 1202826 - DNA, 25 bp, Homo sapien
caaagtttgtgtcgagtcttaagtc

SEQ ID NO: 1202827 - DNA, 25 bp, Homo sapien
catgttgtctcctccagagagtgca

SEQ ID NO: 1202828 - DNA, 25 bp, Homo sapien
taaattctatggaaagagactgcca

SEQ ID NO: 1202829 - DNA, 25 bp, Homo sapien
gatacatatttgtggtaccagaaca

SEQ ID NO: 1202830 - DNA, 25 bp, Homo sapien
tgctgaaatactactctgacttcct

SEQ ID NO: 1202831 - DNA, 25 bp, Homo sapien
tttaggtagctttctcaacatagta

SEQ ID NO: 1202832 - DNA, 25 bp, Homo sapien
gcttcaaaaagtgccccaaattatc

SEQ ID NO: 1202833 - DNA, 25 bp, Homo sapien
tagtacacttggtagctagtagaga

SEQ ID NO: 1202834 - DNA, 25 bp, Homo sapien
gaacttgatcaaacaaaccgttctg

SEQ ID NO: 1202835 - DNA, 25 bp, Homo sapien
caaacaaaccgttctgtatctttgc

SEQ ID NO: 1202836 - DNA, 25 bp, Homo sapien
acttgatcaaacaaaccgttctgta

SEQ ID NO: 1202837 - DNA, 25 bp, Homo sapien
tgatcaaacaaaccgttctgtatct

SEQ ID NO: 1202838 - DNA, 25 bp, Homo sapien
taagtagattgctgagagtgaagat

SEQ ID NO: 1202839 - DNA, 25 bp, Homo sapien
gagcctaatgttgcgtggaagacaa

SEQ ID NO: 1202840 - DNA, 25 bp, Homo sapien
ctttagagcctaatgttgcgtggaa

SEQ ID NO: 1202841 - DNA, 25 bp, Homo sapien
aataaaagttctctaagtagattgc

SEQ ID NO: 1202842 - DNA, 25 bp, Homo sapien
ccaagattctggtaagcctttcttc

SEQ ID NO: 1202843 - DNA, 25 bp, Homo sapien
ttcttacagcttctgggagcatctc

SEQ ID NO: 1202844 - DNA, 25 bp, Homo sapien
tctgcaggacctgcaaggtatatta

SEQ ID NO: 1202845 - DNA, 25 bp, Homo sapien
ggtatattaacttctccaccacaat

SEQ ID NO: 1202846 - DNA, 25 bp, Homo sapien
ttctctgcactcgacatctctctcc

SEQ ID NO: 1202847 - DNA, 25 bp, Homo sapien
ctctgcactcgacatctctctccca

SEQ ID NO: 1202848 - DNA, 25 bp, Homo sapien
ttgccattctctgcactcgacatct

SEQ ID NO: 1202849 - DNA, 25 bp, Homo sapien
cattctctgcactcgacatctctct

SEQ ID NO: 1202850 - DNA, 25 bp, Homo sapien
tttactatcaagatatctggcctct

SEQ ID NO: 1202851 - DNA, 25 bp, Homo sapien
tttttactatcaagatatctggcct

SEQ ID NO: 1202852 - DNA, 25 bp, Homo sapien
tactatcaagatatctggcctcttc

SEQ ID NO: 1202853 - DNA, 25 bp, Homo sapien
ctatcaagatatctggcctcttcta

SEQ ID NO: 1202854 - DNA, 25 bp, Homo sapien
tcatcttcctgtggcatacattcag

SEQ ID NO: 1202855 - DNA, 25 bp, Homo sapien
catttgctcttgaaaccagtggctt

SEQ ID NO: 1202856 - DNA, 25 bp, Homo sapien
gattttcagtgaggatacctctggt

SEQ ID NO: 1202857 - DNA, 25 bp, Homo sapien
tgccttccagggcttggattttcag

SEQ ID NO: 1202858 - DNA, 25 bp, Homo sapien
tgagagatccttgctttgtgaaaca

SEQ ID NO: 1202859 - DNA, 25 bp, Homo sapien
taagagatttttcaacgtacaacaa

SEQ ID NO: 1202860 - DNA, 25 bp, Homo sapien
cactgccgaagctggtttatttata

SEQ ID NO: 1202861 - DNA, 25 bp, Homo sapien
gaagagcattgggtacacttgggtc

SEQ ID NO: 1202862 - DNA, 25 bp, Homo sapien
ttctcatcgttgttgataacaccat

SEQ ID NO: 1202863 - DNA, 25 bp, Homo sapien
ggctttctcatcgttgttgataaca

SEQ ID NO: 1202864 - DNA, 25 bp, Homo sapien
ttctgataaggctttctcatcgttg

SEQ ID NO: 1202865 - DNA, 25 bp, Homo sapien
tgataaggctttctcatcgttgttg

SEQ ID NO: 1202866 - DNA, 25 bp, Homo sapien
cagagagtttagctcagcgtaaaac

SEQ ID NO: 1202867 - DNA, 25 bp, Homo sapien
agtttagctcagcgtaaaacttctg

SEQ ID NO: 1202868 - DNA, 25 bp, Homo sapien
gagtttagctcagcgtaaaacttct

SEQ ID NO: 1202869 - DNA, 25 bp, Homo sapien
gagagtttagctcagcgtaaaactt

SEQ ID NO: 1202870 - DNA, 25 bp, Homo sapien
ctgctggaagataaatcttgggcga

SEQ ID NO: 1202871 - DNA, 25 bp, Homo sapien
tagatacgacattctccctgttctt

SEQ ID NO: 1202872 - DNA, 25 bp, Homo sapien
ggaatttctcctttagatacgacat

SEQ ID NO: 1202873 - DNA, 25 bp, Homo sapien
tcttgggcgaggacaacatcgcata

SEQ ID NO: 1202874 - DNA, 25 bp, Homo sapien
tcatgcttctatattcaaatgaatc

SEQ ID NO: 1202875 - DNA, 25 bp, Homo sapien
ctaaaggaactgagtatacctttct

SEQ ID NO: 1202876 - DNA, 25 bp, Homo sapien
tgggtagttgtcaatttccctggaa

SEQ ID NO: 1202877 - DNA, 25 bp, Homo sapien
tgagtatacctttcttgtgaagtca

SEQ ID NO: 1202878 - DNA, 25 bp, Homo sapien
ccttgacaatagcattgtgatcttt

SEQ ID NO: 1202879 - DNA, 25 bp, Homo sapien
aaccttgacaatagcattgtgatct

SEQ ID NO: 1202880 - DNA, 25 bp, Homo sapien
tctaaccttgacaatagcattgtga

SEQ ID NO: 1202881 - DNA, 25 bp, Homo sapien
taaccttgacaatagcattgtgatc

SEQ ID NO: 1202882 - DNA, 25 bp, Homo sapien
cttggttggctaaaagcgtgtccat

SEQ ID NO: 1202883 - DNA, 25 bp, Homo sapien
tcgctggctgtctctatttttgaga

SEQ ID NO: 1202884 - DNA, 25 bp, Homo sapien
tgagaatgtatatctctgaggagta

SEQ ID NO: 1202885 - DNA, 25 bp, Homo sapien
cctttcgctggctgtctctattttt

SEQ ID NO: 1202886 - DNA, 25 bp, Homo sapien
gccagcactttttccactcagagaa

SEQ ID NO: 1202887 - DNA, 25 bp, Homo sapien
ttttagaaatattcgaaaagcatct

SEQ ID NO: 1202888 - DNA, 25 bp, Homo sapien
aatattcgaaaagcatctagaccag

SEQ ID NO: 1202889 - DNA, 25 bp, Homo sapien
acaggcaagccagaactcaacattt

SEQ ID NO: 1202890 - DNA, 25 bp, Homo sapien
acaggatgactcttcactgttctga

SEQ ID NO: 1202891 - DNA, 25 bp, Homo sapien
ttgggagcagatctgctacaggatg

SEQ ID NO: 1202892 - DNA, 25 bp, Homo sapien
ctgttttcctgcctaaactgagctg

SEQ ID NO: 1202893 - DNA, 25 bp, Homo sapien
ttttcctgcctaaactgagctgctc

SEQ ID NO: 1202894 - DNA, 25 bp, Homo sapien
tgttttcctgcctaaactgagctgc

SEQ ID NO: 1202895 - DNA, 25 bp, Homo sapien
tatctgttttcctgcctaaactgag

SEQ ID NO: 1202896 - DNA, 25 bp, Homo sapien
aggtctctggtaccgaagtcaatgt

SEQ ID NO: 1202897 - DNA, 25 bp, Homo sapien
cagaaatcgagggaaagaatccttg

SEQ ID NO: 1202898 - DNA, 25 bp, Homo sapien
cttggccatgagacaatagattaat

SEQ ID NO: 1202899 - DNA, 25 bp, Homo sapien
gcatttgagtgttggttcagcaata

SEQ ID NO: 1202900 - DNA, 25 bp, Homo sapien
gatttggaacctgttggctatttac

SEQ ID NO: 1202901 - DNA, 25 bp, Homo sapien
cttagtatgtcatgaaactcaacag

SEQ ID NO: 1202902 - DNA, 25 bp, Homo sapien
aacaaaagtattgagcttcatgtct

SEQ ID NO: 1202903 - DNA, 25 bp, Homo sapien
cagtgttagtgtagaatataagtag

SEQ ID NO: 1202904 - DNA, 25 bp, Homo sapien
aagtagcttgagattccagtcaaca

SEQ ID NO: 1202905 - DNA, 25 bp, Homo sapien
ccctggtgaagcatcacgcattgtc

SEQ ID NO: 1202906 - DNA, 25 bp, Homo sapien
gaagcatcacgcattgtcctttgac

SEQ ID NO: 1202907 - DNA, 25 bp, Homo sapien
ggtgaagcatcacgcattgtccttt

SEQ ID NO: 1202908 - DNA, 25 bp, Homo sapien
agcatcacgcattgtcctttgaccc

SEQ ID NO: 1202909 - DNA, 25 bp, Homo sapien
aattcaatcatttctgtttcggtca

SEQ ID NO: 1202910 - DNA, 25 bp, Homo sapien
tctgtttcggtcaactctttatcag

SEQ ID NO: 1202911 - DNA, 25 bp, Homo sapien
tgaatagctccagcgaatatcccgg

SEQ ID NO: 1202912 - DNA, 25 bp, Homo sapien
aactatttgatgaatagctccagcg

SEQ ID NO: 1202913 - DNA, 25 bp, Homo sapien
tggggtgccatcactttctcccttg

SEQ ID NO: 1202914 - DNA, 25 bp, Homo sapien
ggtgccatcactttctcccttgcat

SEQ ID NO: 1202915 - DNA, 25 bp, Homo sapien
cttgcattgctggtctgtacttcct

SEQ ID NO: 1202916 - DNA, 25 bp, Homo sapien
cccttgcattgctggtctgtacttc

SEQ ID NO: 1202917 - DNA, 25 bp, Homo sapien
tgttaattttactgaaggtgtagtg

SEQ ID NO: 1202918 - DNA, 25 bp, Homo sapien
cagggttatgagcttttgttaattt

SEQ ID NO: 1202919 - DNA, 25 bp, Homo sapien
attcagggttatgagcttttgttaa

SEQ ID NO: 1202920 - DNA, 25 bp, Homo sapien
aaggtgtagtggtcttttctgttct

SEQ ID NO: 1202921 - DNA, 25 bp, Homo sapien
ccttccacttcagaaggataccgga

SEQ ID NO: 1202922 - DNA, 25 bp, Homo sapien
tccacttcagaaggataccggatcc

SEQ ID NO: 1202923 - DNA, 25 bp, Homo sapien
ccacttcagaaggataccggatcct

SEQ ID NO: 1202924 - DNA, 25 bp, Homo sapien
acttcagaaggataccggatcctca

SEQ ID NO: 1202925 - DNA, 25 bp, Homo sapien
tgggaggaggtctgaactccatggc

SEQ ID NO: 1202926 - DNA, 25 bp, Homo sapien
tctgaactccatggctttgcattca

SEQ ID NO: 1202927 - DNA, 25 bp, Homo sapien
ctgaactccatggctttgcattcat

SEQ ID NO: 1202928 - DNA, 25 bp, Homo sapien
gtctgaactccatggctttgcattc

SEQ ID NO: 1202929 - DNA, 25 bp, Homo sapien
catgggtcagtagcagttctctggt

SEQ ID NO: 1202930 - DNA, 25 bp, Homo sapien
ctaaaagtttgcatgggtcagtagc

SEQ ID NO: 1202931 - DNA, 25 bp, Homo sapien
ggcaagttctgtaaccacatcatgt

SEQ ID NO: 1202932 - DNA, 25 bp, Homo sapien
tggtactggccactcacaggttccc

SEQ ID NO: 1202933 - DNA, 25 bp, Homo sapien
caagttctttcacgtgtcttccagg

SEQ ID NO: 1202934 - DNA, 25 bp, Homo sapien
tggcaagttctttcacgtgtcttcc

SEQ ID NO: 1202935 - DNA, 25 bp, Homo sapien
tgtcttccaggacaaacctggttta

SEQ ID NO: 1202936 - DNA, 25 bp, Homo sapien
acctggtttacctttgacttcactg

SEQ ID NO: 1202937 - DNA, 25 bp, Homo sapien
tataatgtctgagtctggacagcac

SEQ ID NO: 1202938 - DNA, 25 bp, Homo sapien
ttaagtgaggctctgagtacgtggc

SEQ ID NO: 1202939 - DNA, 25 bp, Homo sapien
tcttcagcccttgtacagaagtttg

SEQ ID NO: 1202940 - DNA, 25 bp, Homo sapien
catctcttcacgattatgctgcaga

SEQ ID NO: 1202941 - DNA, 25 bp, Homo sapien
cctcttggttgaccggttgaccagg

SEQ ID NO: 1202942 - DNA, 25 bp, Homo sapien
ctgccactgtcagatacactggcat

SEQ ID NO: 1202943 - DNA, 25 bp, Homo sapien
tcttggttgaccggttgaccaggat

SEQ ID NO: 1202944 - DNA, 25 bp, Homo sapien
tgggcctcttggttgaccggttgac

SEQ ID NO: 1202945 - DNA, 25 bp, Homo sapien
ctttcctatactgctccagctggct

SEQ ID NO: 1202946 - DNA, 25 bp, Homo sapien
tagactggactatattacttggcct

SEQ ID NO: 1202947 - DNA, 25 bp, Homo sapien
tctcggtgcctaactagaactagta

SEQ ID NO: 1202948 - DNA, 25 bp, Homo sapien
tccagctgttaccaaactgagggta

SEQ ID NO: 1202949 - DNA, 25 bp, Homo sapien
aacagctgacaaatatctcggtgcc

SEQ ID NO: 1202950 - DNA, 25 bp, Homo sapien
tacatctgttttggtacaggtacca

SEQ ID NO: 1202951 - DNA, 25 bp, Homo sapien
cagaggttgtatcagtgtggtcccc

SEQ ID NO: 1202952 - DNA, 25 bp, Homo sapien
tacaagtactgcaagaagtcggaga

SEQ ID NO: 1202953 - DNA, 25 bp, Homo sapien
gactaggacttgtacttggaaagac

SEQ ID NO: 1202954 - DNA, 25 bp, Homo sapien
gactgaagggaacattgctccaggt

SEQ ID NO: 1202955 - DNA, 25 bp, Homo sapien
acattttccctctaagcttccaact

SEQ ID NO: 1202956 - DNA, 25 bp, Homo sapien
caatgagagtcaatatctgctttct

SEQ ID NO: 1202957 - DNA, 25 bp, Homo sapien
gaattagatctaggccaatgagagt

SEQ ID NO: 1202958 - DNA, 25 bp, Homo sapien
ctctaagtataaggccgtgacccct

SEQ ID NO: 1202959 - DNA, 25 bp, Homo sapien
tggcttaaaagaggcttgcgatttc

SEQ ID NO: 1202960 - DNA, 25 bp, Homo sapien
tctgttggcttaaaagaggcttgcg

SEQ ID NO: 1202961 - DNA, 25 bp, Homo sapien
taaaagaggcttgcgatttctaagt

SEQ ID NO: 1202962 - DNA, 25 bp, Homo sapien
aaagaggcttgcgatttctaagtaa

SEQ ID NO: 1202963 - DNA, 25 bp, Homo sapien
tgtgtctggctattacaattcactt

SEQ ID NO: 1202964 - DNA, 25 bp, Homo sapien
catgtgtctggctattacaattcac

SEQ ID NO: 1202965 - DNA, 25 bp, Homo sapien
cacatgtgtctggctattacaattc

SEQ ID NO: 1202966 - DNA, 25 bp, Homo sapien
gtctggctattacaattcacttttt

SEQ ID NO: 1202967 - DNA, 25 bp, Homo sapien
gcaaatatgcgctagtcaacgtctc

SEQ ID NO: 1202968 - DNA, 25 bp, Homo sapien
gcgctagtcaacgtctctgctgctt

SEQ ID NO: 1202969 - DNA, 25 bp, Homo sapien
gctcttagcaaatatgcgctagtca

SEQ ID NO: 1202970 - DNA, 25 bp, Homo sapien
tatgcgctagtcaacgtctctgctg

SEQ ID NO: 1202971 - DNA, 25 bp, Homo sapien
gtctaactttggagtggagatggct

SEQ ID NO: 1202972 - DNA, 25 bp, Homo sapien
gagtggagatggctgctgcgcgcat

SEQ ID NO: 1202973 - DNA, 25 bp, Homo sapien
ggagtggagatggctgctgcgcgca

SEQ ID NO: 1202974 - DNA, 25 bp, Homo sapien
tttgtctaactttggagtggagatg

SEQ ID NO: 1202975 - DNA, 25 bp, Homo sapien
tcctttgggttagcagagaagaaca

SEQ ID NO: 1202976 - DNA, 25 bp, Homo sapien
gaatgagtggttcctttcaattcct

SEQ ID NO: 1202977 - DNA, 25 bp, Homo sapien
ttgggttagcagagaagaacattcc

SEQ ID NO: 1202978 - DNA, 25 bp, Homo sapien
tgcattttgtcgtctagaagtgaat

SEQ ID NO: 1202979 - DNA, 25 bp, Homo sapien
acaacattttgctatagaacccatt

SEQ ID NO: 1202980 - DNA, 25 bp, Homo sapien
taaactaaatgctcacactctcttc

SEQ ID NO: 1202981 - DNA, 25 bp, Homo sapien
gcaattaactcctctgatctggcta

SEQ ID NO: 1202982 - DNA, 25 bp, Homo sapien
ttctctaaggaataaggcaatacta

SEQ ID NO: 1202983 - DNA, 25 bp, Homo sapien
gatgtgggatcatagatctcaggta

SEQ ID NO: 1202984 - DNA, 25 bp, Homo sapien
cagattccagatgtgggatcataga

SEQ ID NO: 1202985 - DNA, 25 bp, Homo sapien
gggatcatagatctcaggtatgctt

SEQ ID NO: 1202986 - DNA, 25 bp, Homo sapien
ttccagatgtgggatcatagatctc

SEQ ID NO: 1202987 - DNA, 25 bp, Homo sapien
aatgcataggcttctcttgtaaatg

SEQ ID NO: 1202988 - DNA, 25 bp, Homo sapien
ccttgctgggatatagagataatgc

SEQ ID NO: 1202989 - DNA, 25 bp, Homo sapien
aagaaatgaagtctactgtgcgcag

SEQ ID NO: 1202990 - DNA, 25 bp, Homo sapien
tgcgcagtatttatcccttgctggg

SEQ ID NO: 1202991 - DNA, 25 bp, Homo sapien
agattgagaccattgcattacttca

SEQ ID NO: 1202992 - DNA, 25 bp, Homo sapien
ccttcaaggcagtaagagactgtct

SEQ ID NO: 1202993 - DNA, 25 bp, Homo sapien
caatgtgattcccaagtaaagctcc

SEQ ID NO: 1202994 - DNA, 25 bp, Homo sapien
tctttagagatagagaccacactgc

SEQ ID NO: 1202995 - DNA, 25 bp, Homo sapien
tcactgagacttttatatggcacca

SEQ ID NO: 1202996 - DNA, 25 bp, Homo sapien
acaagccagccagaactcaatattc

SEQ ID NO: 1202997 - DNA, 25 bp, Homo sapien
cagggcaaaagatcagactctgttt

SEQ ID NO: 1202998 - DNA, 25 bp, Homo sapien
gccagccagaactcaatattctcct

SEQ ID NO: 1202999 - DNA, 25 bp, Homo sapien
tacagggcaaaagatcagactctgt

SEQ ID NO: 1203000 - DNA, 25 bp, Homo sapien
gacatgcagttctggtcagtaacaa

SEQ ID NO: 1203001 - DNA, 25 bp, Homo sapien
tcctcatagtatagttaggagaggc

SEQ ID NO: 1203002 - DNA, 25 bp, Homo sapien
tcagctctatactaggtgtgaagga

SEQ ID NO: 1203003 - DNA, 25 bp, Homo sapien
gagcactcattaaggactccctgac

SEQ ID NO: 1203004 - DNA, 25 bp, Homo sapien
gcctgcaggtcatttagaagattta

SEQ ID NO: 1203005 - DNA, 25 bp, Homo sapien
aaatatctgatttgaggaacctggg

SEQ ID NO: 1203006 - DNA, 25 bp, Homo sapien
tatgactttttgtgcttcatcaaaa

SEQ ID NO: 1203007 - DNA, 25 bp, Homo sapien
tctcgagtgcggaagtcaatattga

SEQ ID NO: 1203008 - DNA, 25 bp, Homo sapien
tatgcttcttcaactctgcgcctgg

SEQ ID NO: 1203009 - DNA, 25 bp, Homo sapien
ggcacattccttctgcgcttgatac

SEQ ID NO: 1203010 - DNA, 25 bp, Homo sapien
aaaaaaggccaagctgttcacccag

SEQ ID NO: 1203011 - DNA, 25 bp, Homo sapien
agttaatgggacttcaatagctcag

SEQ ID NO: 1203012 - DNA, 25 bp, Homo sapien
tccacatttattattagcaccaatg

SEQ ID NO: 1203013 - DNA, 25 bp, Homo sapien
caccgacaagcaatagtagcaatgg

SEQ ID NO: 1203014 - DNA, 25 bp, Homo sapien
gagcaatagcttaagttaaatacac

SEQ ID NO: 1203015 - DNA, 25 bp, Homo sapien
tattattagcaccaatgatttaact

SEQ ID NO: 1203016 - DNA, 25 bp, Homo sapien
ttaaaagtagcaaggacatgtaaac

SEQ ID NO: 1203017 - DNA, 25 bp, Homo sapien
tttaaaagtagcaaggacatgtaaa

SEQ ID NO: 1203018 - DNA, 25 bp, Homo sapien
ttttaaaagtagcaaggacatgtaa

SEQ ID NO: 1203019 - DNA, 25 bp, Homo sapien
ttccttcaggacagaacaaactact

SEQ ID NO: 1203020 - DNA, 25 bp, Homo sapien
cttcaggacagaacaaactactctc

SEQ ID NO: 1203021 - DNA, 25 bp, Homo sapien
gccataaacttccttcaggacagaa

SEQ ID NO: 1203022 - DNA, 25 bp, Homo sapien
tacttctctgaagccataaacttcc

SEQ ID NO: 1203023 - DNA, 25 bp, Homo sapien
cactgtcacttcaggaaccagaggt

SEQ ID NO: 1203024 - DNA, 25 bp, Homo sapien
ttgattcccctgtttcagttcctat

SEQ ID NO: 1203025 - DNA, 25 bp, Homo sapien
tcaggaaccagaggtttcccctcac

SEQ ID NO: 1203026 - DNA, 25 bp, Homo sapien
tgtttcagttcctattccttctcct

SEQ ID NO: 1203027 - DNA, 25 bp, Homo sapien
catcgtctgcaagcttaaagctggg

SEQ ID NO: 1203028 - DNA, 25 bp, Homo sapien
ctccaaaggcaatggtgaaacatct

SEQ ID NO: 1203029 - DNA, 25 bp, Homo sapien
taaaggttgtagcaaagagactcca

SEQ ID NO: 1203030 - DNA, 25 bp, Homo sapien
tacttcccaaggtcatccagggacc

SEQ ID NO: 1203031 - DNA, 25 bp, Homo sapien
aaagacccaggtgctgcccttgata

SEQ ID NO: 1203032 - DNA, 25 bp, Homo sapien
gaaaaacacgatgcctacattgtga

SEQ ID NO: 1203033 - DNA, 25 bp, Homo sapien
cttctgggcctcctagagatgatga

SEQ ID NO: 1203034 - DNA, 25 bp, Homo sapien
gacagtttcgcagcaggatttggga

SEQ ID NO: 1203035 - DNA, 25 bp, Homo sapien
ccacttgcatgttgctttgtcacga

SEQ ID NO: 1203036 - DNA, 25 bp, Homo sapien
gaggcaatagttctgcaggcttgaa

SEQ ID NO: 1203037 - DNA, 25 bp, Homo sapien
tttgtcacgaaagagaaggttgcgg

SEQ ID NO: 1203038 - DNA, 25 bp, Homo sapien
ttgcgggtagacacaagatcagccg

SEQ ID NO: 1203039 - DNA, 25 bp, Homo sapien
gaaaggatccaaaagggcttgcaag

SEQ ID NO: 1203040 - DNA, 25 bp, Homo sapien
ttaagtttctgttcagttgatgtag

SEQ ID NO: 1203041 - DNA, 25 bp, Homo sapien
tatctggtcccataaatgggttaaa

SEQ ID NO: 1203042 - DNA, 25 bp, Homo sapien
tcaaatataggtggccagcagtcca

SEQ ID NO: 1203043 - DNA, 25 bp, Homo sapien
tctggtgattgagggcagtagatgg

SEQ ID NO: 1203044 - DNA, 25 bp, Homo sapien
tggtgtctggtgattgagggcagta

SEQ ID NO: 1203045 - DNA, 25 bp, Homo sapien
tgtctggtgattgagggcagtagat

SEQ ID NO: 1203046 - DNA, 25 bp, Homo sapien
gtggtgtctggtgattgagggcagt

SEQ ID NO: 1203047 - DNA, 25 bp, Homo sapien
tagtgtttgccatttgttcagaggg

SEQ ID NO: 1203048 - DNA, 25 bp, Homo sapien
gacgctgatctgtccctcttagcct

SEQ ID NO: 1203049 - DNA, 25 bp, Homo sapien
ggtgaaatgtatccagtaggcagtg

SEQ ID NO: 1203050 - DNA, 25 bp, Homo sapien
tgctcctgctttccatggacgctga

SEQ ID NO: 1203051 - DNA, 25 bp, Homo sapien
gagcagtccaccatgctaaatttga

SEQ ID NO: 1203052 - DNA, 25 bp, Homo sapien
aaattttgtgagacacccagcattt

SEQ ID NO: 1203053 - DNA, 25 bp, Homo sapien
taattaccttcgatggcactctggc

SEQ ID NO: 1203054 - DNA, 25 bp, Homo sapien
cacacacgtatctatgcaaagagag

SEQ ID NO: 1203055 - DNA, 25 bp, Homo sapien
tgttggtggtataatatgtggaaac

SEQ ID NO: 1203056 - DNA, 25 bp, Homo sapien
atttttttctcatgttggtggtata

SEQ ID NO: 1203057 - DNA, 25 bp, Homo sapien
ggtggtataatatgtggaaacattc

SEQ ID NO: 1203058 - DNA, 25 bp, Homo sapien
tataatatgtggaaacattccattg

SEQ ID NO: 1203059 - DNA, 25 bp, Homo sapien
tgagaagagaaaaggcagcgttaga

SEQ ID NO: 1203060 - DNA, 25 bp, Homo sapien
gaagagaaaaggcagcgttagaata

SEQ ID NO: 1203061 - DNA, 25 bp, Homo sapien
agaaaaggcagcgttagaatatcat

SEQ ID NO: 1203062 - DNA, 25 bp, Homo sapien
agagaaaaggcagcgttagaatatc

SEQ ID NO: 1203063 - DNA, 25 bp, Homo sapien
caggcatggttgagtgttacagaaa

SEQ ID NO: 1203064 - DNA, 25 bp, Homo sapien
tgagtcccagctttagaattagttg

SEQ ID NO: 1203065 - DNA, 25 bp, Homo sapien
gatgcctggtccaaaaggagagaca

SEQ ID NO: 1203066 - DNA, 25 bp, Homo sapien
gtgtgtgtatcacccagatggttgg

SEQ ID NO: 1203067 - DNA, 25 bp, Homo sapien
taaagttggcaaaaggtacatagac

SEQ ID NO: 1203068 - DNA, 25 bp, Homo sapien
tctctaggaggcatcgttacaataa

SEQ ID NO: 1203069 - DNA, 25 bp, Homo sapien
tagaaagacgtaataatgacagaga

SEQ ID NO: 1203070 - DNA, 25 bp, Homo sapien
atttgatgattctggcctgcatgtc

SEQ ID NO: 1203071 - DNA, 25 bp, Homo sapien
aaatccaacaattccgcctgctcat

SEQ ID NO: 1203072 - DNA, 25 bp, Homo sapien
ttgaagggggcctcttagattcatc

SEQ ID NO: 1203073 - DNA, 25 bp, Homo sapien
gggggcctcttagattcatctctgc

SEQ ID NO: 1203074 - DNA, 25 bp, Homo sapien
gcctcttagattcatctctgcacat

SEQ ID NO: 1203075 - DNA, 25 bp, Homo sapien
gaagggggcctcttagattcatctc

SEQ ID NO: 1203076 - DNA, 25 bp, Homo sapien
ggacatggactatgttaggcactca

SEQ ID NO: 1203077 - DNA, 25 bp, Homo sapien
taggcactcatggttaatctaacag

SEQ ID NO: 1203078 - DNA, 25 bp, Homo sapien
tctgaccatacaaaaaggtgtggcc

SEQ ID NO: 1203079 - DNA, 25 bp, Homo sapien
cttcgtatgtggagggttggaacca

SEQ ID NO: 1203080 - DNA, 25 bp, Homo sapien
gccacacagtagcttgtaagccttt

SEQ ID NO: 1203081 - DNA, 25 bp, Homo sapien
acacagtagcttgtaagcctttttg

SEQ ID NO: 1203082 - DNA, 25 bp, Homo sapien
tcctctgaccaccattgcagcatcc

SEQ ID NO: 1203083 - DNA, 25 bp, Homo sapien
cttgccacacagtagcttgtaagcc

SEQ ID NO: 1203084 - DNA, 25 bp, Homo sapien
taaaaattcagacggatcctgccag

SEQ ID NO: 1203085 - DNA, 25 bp, Homo sapien
gaagatggctatagacacgcaagca

SEQ ID NO: 1203086 - DNA, 25 bp, Homo sapien
tcattcgaagaaaggagagctgtcc

SEQ ID NO: 1203087 - DNA, 25 bp, Homo sapien
gaaaggcgagctctgacagtgatcc

SEQ ID NO: 1203088 - DNA, 25 bp, Homo sapien
attttcaaaagactgggcccactgt

SEQ ID NO: 1203089 - DNA, 25 bp, Homo sapien
aaagactgggcccactgtaatactt

SEQ ID NO: 1203090 - DNA, 25 bp, Homo sapien
gggcccactgtaatacttcctccaa

SEQ ID NO: 1203091 - DNA, 25 bp, Homo sapien
gactgggcccactgtaatacttcct

SEQ ID NO: 1203092 - DNA, 25 bp, Homo sapien
cctctaagaatggaactcgctagtt

SEQ ID NO: 1203093 - DNA, 25 bp, Homo sapien
gttattcaaagatgacagatacgca

SEQ ID NO: 1203094 - DNA, 25 bp, Homo sapien
aagatgacagatacgcaatactcac

SEQ ID NO: 1203095 - DNA, 25 bp, Homo sapien
tggaactcgctagttattcaaagat

SEQ ID NO: 1203096 - DNA, 25 bp, Homo sapien
tacaacggaccagcttttctgaccc

SEQ ID NO: 1203097 - DNA, 25 bp, Homo sapien
tcttttgaatgcacgtcctccttta

SEQ ID NO: 1203098 - DNA, 25 bp, Homo sapien
tgagcccatgactttgtctctgtca

SEQ ID NO: 1203099 - DNA, 25 bp, Homo sapien
tgaccccaaacgcaattgactattc

SEQ ID NO: 1203100 - DNA, 25 bp, Homo sapien
gacttgttggtaggcagcagagaaa

SEQ ID NO: 1203101 - DNA, 25 bp, Homo sapien
tatgtgacaggtcatagctagagac

SEQ ID NO: 1203102 - DNA, 25 bp, Homo sapien
gactttgaacaaaagcctggaggag

SEQ ID NO: 1203103 - DNA, 25 bp, Homo sapien
tacaagtagaaaatgaagtgaccca

SEQ ID NO: 1203104 - DNA, 25 bp, Homo sapien
gattgaagcaaactctgtgattcag

SEQ ID NO: 1203105 - DNA, 25 bp, Homo sapien
attgaagcaaactctgtgattcaga

SEQ ID NO: 1203106 - DNA, 25 bp, Homo sapien
agattgaagcaaactctgtgattca

SEQ ID NO: 1203107 - DNA, 25 bp, Homo sapien
ttgaagcaaactctgtgattcagag

SEQ ID NO: 1203108 - DNA, 25 bp, Homo sapien
gctgaggaagatgcaccagcccaca

SEQ ID NO: 1203109 - DNA, 25 bp, Homo sapien
cactgtttaactggcatttctaagg

SEQ ID NO: 1203110 - DNA, 25 bp, Homo sapien
agcccacacagatggttcatgatat

SEQ ID NO: 1203111 - DNA, 25 bp, Homo sapien
ggttcatgatatggagcggccttca

SEQ ID NO: 1203112 - DNA, 25 bp, Homo sapien
tctgggatcaggatgtacaaaaggg

SEQ ID NO: 1203113 - DNA, 25 bp, Homo sapien
ggatcaggatgtacaaaagggagca

SEQ ID NO: 1203114 - DNA, 25 bp, Homo sapien
gtacaaaagggagcaacaataacca

SEQ ID NO: 1203115 - DNA, 25 bp, Homo sapien
ggatgtacaaaagggagcaacaata

SEQ ID NO: 1203116 - DNA, 25 bp, Homo sapien
gattcatctatctgatcctgctttc

SEQ ID NO: 1203117 - DNA, 25 bp, Homo sapien
ctttattgcgttaccttctgttctc

SEQ ID NO: 1203118 - DNA, 25 bp, Homo sapien
taaaggccacccctctttgctgtgg

SEQ ID NO: 1203119 - DNA, 25 bp, Homo sapien
tcaacatttcccattgcccaagtga

SEQ ID NO: 1203120 - DNA, 25 bp, Homo sapien
gatacacactggaatgatcctatgg

SEQ ID NO: 1203121 - DNA, 25 bp, Homo sapien
gggtaggccataacatatttagcca

SEQ ID NO: 1203122 - DNA, 25 bp, Homo sapien
tcatagttaatagcacatagggaac

SEQ ID NO: 1203123 - DNA, 25 bp, Homo sapien
tgaataattgcctacctaactagaa

SEQ ID NO: 1203124 - DNA, 25 bp, Homo sapien
attccataatggcatacagtcagcc

SEQ ID NO: 1203125 - DNA, 25 bp, Homo sapien
agccctctgaatccttgagttccat

SEQ ID NO: 1203126 - DNA, 25 bp, Homo sapien
tctatggaatcagtcctctgtggat

SEQ ID NO: 1203127 - DNA, 25 bp, Homo sapien
aaatattccataatggcatacagtc

SEQ ID NO: 1203128 - DNA, 25 bp, Homo sapien
gaccctagctgttgtgtatcatgaa

SEQ ID NO: 1203129 - DNA, 25 bp, Homo sapien
tgcaaaagtgctatggacacgttca

SEQ ID NO: 1203130 - DNA, 25 bp, Homo sapien
gacacgttcaagcagagggtttaag

SEQ ID NO: 1203131 - DNA, 25 bp, Homo sapien
aagagctgctcctttagcccgaagg

SEQ ID NO: 1203132 - DNA, 25 bp, Homo sapien
ggcacactgagtaataaccacctag

SEQ ID NO: 1203133 - DNA, 25 bp, Homo sapien
agaaattctcttcgcatatccaagg

SEQ ID NO: 1203134 - DNA, 25 bp, Homo sapien
gacactgcatgggatacggttcaac

SEQ ID NO: 1203135 - DNA, 25 bp, Homo sapien
tatctatcacctccaaaagcgtagg

SEQ ID NO: 1203136 - DNA, 25 bp, Homo sapien
gctccaccgtgaggcaattttctta

SEQ ID NO: 1203137 - DNA, 25 bp, Homo sapien
ggtttcacatgccatccagaattga

SEQ ID NO: 1203138 - DNA, 25 bp, Homo sapien
gaattgaatattctcgtcactgtgc

SEQ ID NO: 1203139 - DNA, 25 bp, Homo sapien
gggactgtggctggatgtaaatctt

SEQ ID NO: 1203140 - DNA, 25 bp, Homo sapien
tgtccacaatgtaggcttgccctgt

SEQ ID NO: 1203141 - DNA, 25 bp, Homo sapien
gcttactcaggaagatgcagtggtt

SEQ ID NO: 1203142 - DNA, 25 bp, Homo sapien
acagatattaatgcccttgcaggga

SEQ ID NO: 1203143 - DNA, 25 bp, Homo sapien
gaaggccaatgctttcgccacagac

SEQ ID NO: 1203144 - DNA, 25 bp, Homo sapien
tgttgttggactgcatagttttcaa

SEQ ID NO: 1203145 - DNA, 25 bp, Homo sapien
gggtaggaatccctttccatatgca

SEQ ID NO: 1203146 - DNA, 25 bp, Homo sapien
gatagtctctcttgtcgaactgtca

SEQ ID NO: 1203147 - DNA, 25 bp, Homo sapien
catatgcatatagactattttctga

SEQ ID NO: 1203148 - DNA, 25 bp, Homo sapien
tagaacattcatgctagaaacacaa

SEQ ID NO: 1203149 - DNA, 25 bp, Homo sapien
cacgatgagttcacattgtaaggaa

SEQ ID NO: 1203150 - DNA, 25 bp, Homo sapien
gaactacataggcttgctgtacatt

SEQ ID NO: 1203151 - DNA, 25 bp, Homo sapien
caattgattgtactgtgagtagcat

SEQ ID NO: 1203152 - DNA, 25 bp, Homo sapien
tattctcactgtataccaactttgg

SEQ ID NO: 1203153 - DNA, 25 bp, Homo sapien
tatatattctcactgtataccaact

SEQ ID NO: 1203154 - DNA, 25 bp, Homo sapien
tcactgtataccaactttggccctt

SEQ ID NO: 1203155 - DNA, 25 bp, Homo sapien
tgtataccaactttggcccttttga

SEQ ID NO: 1203156 - DNA, 25 bp, Homo sapien
gatgagcttctgattatggatgtcg

SEQ ID NO: 1203157 - DNA, 25 bp, Homo sapien
taagattggctgtgtagttactcac

SEQ ID NO: 1203158 - DNA, 25 bp, Homo sapien
tttagtgacttagcccttcttagca

SEQ ID NO: 1203159 - DNA, 25 bp, Homo sapien
ttttaaaagtggacagcgctacgga

SEQ ID NO: 1203160 - DNA, 25 bp, Homo sapien
ttttgtttcatgacaccacatggca

SEQ ID NO: 1203161 - DNA, 25 bp, Homo sapien
accacatggcatcttctttgttcac

SEQ ID NO: 1203162 - DNA, 25 bp, Homo sapien
atgacaccacatggcatcttctttg

SEQ ID NO: 1203163 - DNA, 25 bp, Homo sapien
agctttttgtttcatgacaccacat

SEQ ID NO: 1203164 - DNA, 25 bp, Homo sapien
tggcggctccactgcagatggcgga

SEQ ID NO: 1203165 - DNA, 25 bp, Homo sapien
ggtggcggctccactgcagatggcg

SEQ ID NO: 1203166 - DNA, 25 bp, Homo sapien
gcggctccactgcagatggcggatc

SEQ ID NO: 1203167 - DNA, 25 bp, Homo sapien
tttggtggcggctccactgcagatg

SEQ ID NO: 1203168 - DNA, 25 bp, Homo sapien
tatctattgtatccgagagttcaac

SEQ ID NO: 1203169 - DNA, 25 bp, Homo sapien
cattatctattgtatccgagagttc

SEQ ID NO: 1203170 - DNA, 25 bp, Homo sapien
ttatctattgtatccgagagttcaa

SEQ ID NO: 1203171 - DNA, 25 bp, Homo sapien
ttacattatctattgtatccgagag

SEQ ID NO: 1203172 - DNA, 25 bp, Homo sapien
tcatgtcttttattaagtcatacag

SEQ ID NO: 1203173 - DNA, 25 bp, Homo sapien
gtcttttattaagtcatacagttac

SEQ ID NO: 1203174 - DNA, 25 bp, Homo sapien
catgtcttttattaagtcatacagt

SEQ ID NO: 1203175 - DNA, 25 bp, Homo sapien
agttcatgtcttttattaagtcata

SEQ ID NO: 1203176 - DNA, 25 bp, Homo sapien
ttgacaccagcttgaatacgttttg

SEQ ID NO: 1203177 - DNA, 25 bp, Homo sapien
gcctcaagaggtgcgcatggcagct

SEQ ID NO: 1203178 - DNA, 25 bp, Homo sapien
cagcttggtgtccatacggcatcca

SEQ ID NO: 1203179 - DNA, 25 bp, Homo sapien
ggttctgaggaataagccccatttg

SEQ ID NO: 1203180 - DNA, 25 bp, Homo sapien
ggggatttaatcgacaatagaaagc

SEQ ID NO: 1203181 - DNA, 25 bp, Homo sapien
tcttgtggggatttaatcgacaata

SEQ ID NO: 1203182 - DNA, 25 bp, Homo sapien
tgtggggatttaatcgacaatagaa

SEQ ID NO: 1203183 - DNA, 25 bp, Homo sapien
gatttaatcgacaatagaaagcaac

SEQ ID NO: 1203184 - DNA, 25 bp, Homo sapien
ttgaactgcatggagtcacacaaga

SEQ ID NO: 1203185 - DNA, 25 bp, Homo sapien
gtcacacaagaactctgccactgtg

SEQ ID NO: 1203186 - DNA, 25 bp, Homo sapien
agacactgcaaatctgaaaaatcct

SEQ ID NO: 1203187 - DNA, 25 bp, Homo sapien
gaaaaatccttaggccccaggatca

SEQ ID NO: 1203188 - DNA, 25 bp, Homo sapien
acatctggtagtagattgtgttgaa

SEQ ID NO: 1203189 - DNA, 25 bp, Homo sapien
cagaagacatctggtagtagattgt

SEQ ID NO: 1203190 - DNA, 25 bp, Homo sapien
gaagacatctggtagtagattgtgt

SEQ ID NO: 1203191 - DNA, 25 bp, Homo sapien
aacagaagacatctggtagtagatt

SEQ ID NO: 1203192 - DNA, 25 bp, Homo sapien
ttgattatggtaataccacctgatt

SEQ ID NO: 1203193 - DNA, 25 bp, Homo sapien
gattatggtaataccacctgattcc

SEQ ID NO: 1203194 - DNA, 25 bp, Homo sapien
tgattatggtaataccacctgattc

SEQ ID NO: 1203195 - DNA, 25 bp, Homo sapien
gggtttgacatagttcactgcaata

SEQ ID NO: 1203196 - DNA, 25 bp, Homo sapien
catgggtttgacatagttcactgca

SEQ ID NO: 1203197 - DNA, 25 bp, Homo sapien
tttgacatagttcactgcaataaga

SEQ ID NO: 1203198 - DNA, 25 bp, Homo sapien
ttgtttcatgggtttgacatagttc

SEQ ID NO: 1203199 - DNA, 25 bp, Homo sapien
gctcaaaatcattggcatgcagtat

SEQ ID NO: 1203200 - DNA, 25 bp, Homo sapien
ctcaaaatcattggcatgcagtata

SEQ ID NO: 1203201 - DNA, 25 bp, Homo sapien
gggtgatcggtagcttatcatacac

SEQ ID NO: 1203202 - DNA, 25 bp, Homo sapien
ccttggggtgatcggtagcttatca

SEQ ID NO: 1203203 - DNA, 25 bp, Homo sapien
cagggtagcgacatccttagattcc

SEQ ID NO: 1203204 - DNA, 25 bp, Homo sapien
tgagagtggtgtattgtcacgatgc

SEQ ID NO: 1203205 - DNA, 25 bp, Homo sapien
cttagattccgttaggtgagagtgg

SEQ ID NO: 1203206 - DNA, 25 bp, Homo sapien
gcacacgaagtctgaaaggacagcc

SEQ ID NO: 1203207 - DNA, 25 bp, Homo sapien
agcagcaattaagagctccagaatt

SEQ ID NO: 1203208 - DNA, 25 bp, Homo sapien
agctgataagccattacgtcttgtc

SEQ ID NO: 1203209 - DNA, 25 bp, Homo sapien
aaaagctgataagccattacgtctt

SEQ ID NO: 1203210 - DNA, 25 bp, Homo sapien
aagctgataagccattacgtcttgt

SEQ ID NO: 1203211 - DNA, 25 bp, Homo sapien
caaaagctgataagccattacgtct

SEQ ID NO: 1203212 - DNA, 25 bp, Homo sapien
cttataacctgtgttataagcctgg

SEQ ID NO: 1203213 - DNA, 25 bp, Homo sapien
taacctgtgttataagcctggtctt

SEQ ID NO: 1203214 - DNA, 25 bp, Homo sapien
tataacctgtgttataagcctggtc

SEQ ID NO: 1203215 - DNA, 25 bp, Homo sapien
aacctgtgttataagcctggtcttt

SEQ ID NO: 1203216 - DNA, 25 bp, Homo sapien
aagtacccatactctgatgcatcca

SEQ ID NO: 1203217 - DNA, 25 bp, Homo sapien
tcaggattccactgttcgtgttttc

SEQ ID NO: 1203218 - DNA, 25 bp, Homo sapien
caagtacccatactctgatgcatcc

SEQ ID NO: 1203219 - DNA, 25 bp, Homo sapien
atatctaatttcaggattccactgt

SEQ ID NO: 1203220 - DNA, 25 bp, Homo sapien
cgcctcaagaggacgcggattggtc

SEQ ID NO: 1203221 - DNA, 25 bp, Homo sapien
gcgtgcgtcgcagcatttatgaggc

SEQ ID NO: 1203222 - DNA, 25 bp, Homo sapien
ggcttcttgcgcactcgggccacat

SEQ ID NO: 1203223 - DNA, 25 bp, Homo sapien
gctgctgccgaagggtctcgaagcc

SEQ ID NO: 1203224 - DNA, 25 bp, Homo sapien
tatcgttctcccgctggagccccgg

SEQ ID NO: 1203225 - DNA, 25 bp, Homo sapien
tgcagtcgtgttgaacagccaagaa

SEQ ID NO: 1203226 - DNA, 25 bp, Homo sapien
cagtcgtgttgaacagccaagaaca

SEQ ID NO: 1203227 - DNA, 25 bp, Homo sapien
gggtctgcagtcgtgttgaacagcc

SEQ ID NO: 1203228 - DNA, 25 bp, Homo sapien
tctgcagtcgtgttgaacagccaag

SEQ ID NO: 1203229 - DNA, 25 bp, Homo sapien
catcttttctcgcttctcctcgctc

SEQ ID NO: 1203230 - DNA, 25 bp, Homo sapien
tcttttctcgcttctcctcgctctt

SEQ ID NO: 1203231 - DNA, 25 bp, Homo sapien
tccgtttcatcttttctcgcttctc

SEQ ID NO: 1203232 - DNA, 25 bp, Homo sapien
ttttctcgcttctcctcgctcttgt

SEQ ID NO: 1203233 - DNA, 25 bp, Homo sapien
cactatttctggctcacaaagggca

SEQ ID NO: 1203234 - DNA, 25 bp, Homo sapien
taactagagacaaaccgcataaggc

SEQ ID NO: 1203235 - DNA, 25 bp, Homo sapien
cattcggactgggtgagatctgctc

SEQ ID NO: 1203236 - DNA, 25 bp, Homo sapien
tatattcagaaccagcaagagcatc

SEQ ID NO: 1203237 - DNA, 25 bp, Homo sapien
cccaggagtagaggaattttgtaag

SEQ ID NO: 1203238 - DNA, 25 bp, Homo sapien
taagaagtagctcaaacgggtcttc

SEQ ID NO: 1203239 - DNA, 25 bp, Homo sapien
tgggcttcccaggagtagaggaatt

SEQ ID NO: 1203240 - DNA, 25 bp, Homo sapien
ttgtaagaagtagctcaaacgggtc

SEQ ID NO: 1203241 - DNA, 25 bp, Homo sapien
tcagttcagcagctaactattgata

SEQ ID NO: 1203242 - DNA, 25 bp, Homo sapien
tgcaagcacaggattctcaacttac

SEQ ID NO: 1203243 - DNA, 25 bp, Homo sapien
tagcttacgcacatcagagttcccc

SEQ ID NO: 1203244 - DNA, 25 bp, Homo sapien
tgcaagagaggttctgtatgttagc

SEQ ID NO: 1203245 - DNA, 25 bp, Homo sapien
atttgctggctagcagctcgtcaaa

SEQ ID NO: 1203246 - DNA, 25 bp, Homo sapien
gtcaaatgcttctgaccacagctgt

SEQ ID NO: 1203247 - DNA, 25 bp, Homo sapien
gcagctcgtcaaatgcttctgacca

SEQ ID NO: 1203248 - DNA, 25 bp, Homo sapien
ggctagcagctcgtcaaatgcttct

SEQ ID NO: 1203249 - DNA, 25 bp, Homo sapien
gctcttttgttaggtggacgcagcc

SEQ ID NO: 1203250 - DNA, 25 bp, Homo sapien
aaaggcttatgttggcactctgctg

SEQ ID NO: 1203251 - DNA, 25 bp, Homo sapien
aattctctgggaactaagcctcttg

SEQ ID NO: 1203252 - DNA, 25 bp, Homo sapien
tagcaatggctcaagctcaagagtt

SEQ ID NO: 1203253 - DNA, 25 bp, Homo sapien
tttgaagtcttcacaggccagccag

SEQ ID NO: 1203254 - DNA, 25 bp, Homo sapien
ttaaaaaagccctgaatgcagcaag

SEQ ID NO: 1203255 - DNA, 25 bp, Homo sapien
tgaagtcagtatatattttccttgc

SEQ ID NO: 1203256 - DNA, 25 bp, Homo sapien
tcttcacagaattccgactttaaaa

SEQ ID NO: 1203257 - DNA, 25 bp, Homo sapien
attatgtgtgattagctttactagc

SEQ ID NO: 1203258 - DNA, 25 bp, Homo sapien
ctgaaagctacaacgtggagggact

SEQ ID NO: 1203259 - DNA, 25 bp, Homo sapien
ttactagctaagtcacaggagaact

SEQ ID NO: 1203260 - DNA, 25 bp, Homo sapien
cctagcccgctttgtccttgattac

SEQ ID NO: 1203261 - DNA, 25 bp, Homo sapien
taaagcagccacttgtagcttcttg

SEQ ID NO: 1203262 - DNA, 25 bp, Homo sapien
ttttctgggcagttgtaaagcagcc

SEQ ID NO: 1203263 - DNA, 25 bp, Homo sapien
gaaacgaggataagagttgttctcc

SEQ ID NO: 1203264 - DNA, 25 bp, Homo sapien
caagtcctggtagaattctgactcc

SEQ ID NO: 1203265 - DNA, 25 bp, Homo sapien
tgcttttcagagtgagacaccacgt

SEQ ID NO: 1203266 - DNA, 25 bp, Homo sapien
gagtgatgtttcctgaacacccagg

SEQ ID NO: 1203267 - DNA, 25 bp, Homo sapien
gatgtacaaccagctacctaaggcc

SEQ ID NO: 1203268 - DNA, 25 bp, Homo sapien
ttttggcactcataacggacactgc

SEQ ID NO: 1203269 - DNA, 25 bp, Homo sapien
catatttagctggtacttagataca

SEQ ID NO: 1203270 - DNA, 25 bp, Homo sapien
gaagactgtcaattctcactgggca

SEQ ID NO: 1203271 - DNA, 25 bp, Homo sapien
aataaaatcacatctagactccaag

SEQ ID NO: 1203272 - DNA, 25 bp, Homo sapien
cagtggttctaaggatgtgacttcc

SEQ ID NO: 1203273 - DNA, 25 bp, Homo sapien
taaggattatgctagacctgacaca

SEQ ID NO: 1203274 - DNA, 25 bp, Homo sapien
tgatacagtagacaaggcagtctct

SEQ ID NO: 1203275 - DNA, 25 bp, Homo sapien
tatgtatcttggaagcccatgctgg

SEQ ID NO: 1203276 - DNA, 25 bp, Homo sapien
ttaagtctaagaaacgaaagcgcac

SEQ ID NO: 1203277 - DNA, 25 bp, Homo sapien
caagccatgcaggtgttaggccata

SEQ ID NO: 1203278 - DNA, 25 bp, Homo sapien
catggcacctgctaggaaagtagga

SEQ ID NO: 1203279 - DNA, 25 bp, Homo sapien
taggtgctaaggtcctgtgaggcca

SEQ ID NO: 1203280 - DNA, 25 bp, Homo sapien
tccatgcagaggaactattaggtgc

SEQ ID NO: 1203281 - DNA, 25 bp, Homo sapien
ccttcaggaccagggagggtcctca

SEQ ID NO: 1203282 - DNA, 25 bp, Homo sapien
ttcaccttcaggaccagggagggtc

SEQ ID NO: 1203283 - DNA, 25 bp, Homo sapien
cattttaggcctgacttcaccttca

SEQ ID NO: 1203284 - DNA, 25 bp, Homo sapien
acttcaccttcaggaccagggaggg

SEQ ID NO: 1203285 - DNA, 25 bp, Homo sapien
acggactgctgccagacttgatatt

SEQ ID NO: 1203286 - DNA, 25 bp, Homo sapien
gctgccagacttgatatttccattc

SEQ ID NO: 1203287 - DNA, 25 bp, Homo sapien
actgctgccagacttgatatttcca

SEQ ID NO: 1203288 - DNA, 25 bp, Homo sapien
gactgctgccagacttgatatttcc

SEQ ID NO: 1203289 - DNA, 25 bp, Homo sapien
gtgaccaagtgcaatctggtttcca

SEQ ID NO: 1203290 - DNA, 25 bp, Homo sapien
gcttctgatgtgatgattagcatat

SEQ ID NO: 1203291 - DNA, 25 bp, Homo sapien
attagcatatccattgaggggtcac

SEQ ID NO: 1203292 - DNA, 25 bp, Homo sapien
catttgaagctagttgtgcttctga

SEQ ID NO: 1203293 - DNA, 25 bp, Homo sapien
ggcaccattgagcacggagtgaatg

SEQ ID NO: 1203294 - DNA, 25 bp, Homo sapien
aatcccggcacctcaggatgccgag

SEQ ID NO: 1203295 - DNA, 25 bp, Homo sapien
ccattgagcacggagtgaatgagac

SEQ ID NO: 1203296 - DNA, 25 bp, Homo sapien
caccattgagcacggagtgaatgag

SEQ ID NO: 1203297 - DNA, 25 bp, Homo sapien
gatacagggcatgtttcagatagca

SEQ ID NO: 1203298 - DNA, 25 bp, Homo sapien
agtggatacagggcatgtttcagat

SEQ ID NO: 1203299 - DNA, 25 bp, Homo sapien
atacagggcatgtttcagatagcac

SEQ ID NO: 1203300 - DNA, 25 bp, Homo sapien
tggatacagggcatgtttcagatag

SEQ ID NO: 1203301 - DNA, 25 bp, Homo sapien
tggcttgtcttcgtctcctcagtgt

SEQ ID NO: 1203302 - DNA, 25 bp, Homo sapien
ccagaagtgggtggtcatattggct

SEQ ID NO: 1203303 - DNA, 25 bp, Homo sapien
tattggctgattatttccatacaac

SEQ ID NO: 1203304 - DNA, 25 bp, Homo sapien
tcttggcttgtcttcgtctcctcag

SEQ ID NO: 1203305 - DNA, 25 bp, Homo sapien
tatctctttgtggtaaagcttgatg

SEQ ID NO: 1203306 - DNA, 25 bp, Homo sapien
ctttatctctttgtggtaaagcttg

SEQ ID NO: 1203307 - DNA, 25 bp, Homo sapien
tttgtggtaaagcttgatggcatct

SEQ ID NO: 1203308 - DNA, 25 bp, Homo sapien
ctctttgtggtaaagcttgatggca

SEQ ID NO: 1203309 - DNA, 25 bp, Homo sapien
tgggactctacaggaactcaactgc

SEQ ID NO: 1203310 - DNA, 25 bp, Homo sapien
tataacttgaatgtgggacgcagcc

SEQ ID NO: 1203311 - DNA, 25 bp, Homo sapien
gagagaccctctgttataggaactg

SEQ ID NO: 1203312 - DNA, 25 bp, Homo sapien
gagccgacggatgtattccacactg

SEQ ID NO: 1203313 - DNA, 25 bp, Homo sapien
tcttaaagttgatcaagtatgccat

SEQ ID NO: 1203314 - DNA, 25 bp, Homo sapien
tctggcatggtatggactatgaaag

SEQ ID NO: 1203315 - DNA, 25 bp, Homo sapien
ccatatgtgcaaggtattctgctaa

SEQ ID NO: 1203316 - DNA, 25 bp, Homo sapien
aagcagtaaatctggcatggtatgg

SEQ ID NO: 1203317 - DNA, 25 bp, Homo sapien
tagtgaaactacacaactgtagtcc

SEQ ID NO: 1203318 - DNA, 25 bp, Homo sapien
tcctttttctggctagtttcagcgt

SEQ ID NO: 1203319 - DNA, 25 bp, Homo sapien
tcagcgtctagtgaaactacacaac

SEQ ID NO: 1203320 - DNA, 25 bp, Homo sapien
tctaactctttgattgctcgcttgt

SEQ ID NO: 1203321 - DNA, 25 bp, Homo sapien
tcaaaggcatctaaatgacagtctc

SEQ ID NO: 1203322 - DNA, 25 bp, Homo sapien
aaaggcatctaaatgacagtctcca

SEQ ID NO: 1203323 - DNA, 25 bp, Homo sapien
agtcaaaggcatctaaatgacagtc

SEQ ID NO: 1203324 - DNA, 25 bp, Homo sapien
atctaaatgacagtctccaaaattc

SEQ ID NO: 1203325 - DNA, 25 bp, Homo sapien
tccatcaacccaatgcaaattcttt

SEQ ID NO: 1203326 - DNA, 25 bp, Homo sapien
ttccatcaacccaatgcaaattctt

SEQ ID NO: 1203327 - DNA, 25 bp, Homo sapien
atttaaagattccatcaacccaatg

SEQ ID NO: 1203328 - DNA, 25 bp, Homo sapien
gaagaccttgatggctaaaggtaag

SEQ ID NO: 1203329 - DNA, 25 bp, Homo sapien
ttggagtggaagaccttgatggcta

SEQ ID NO: 1203330 - DNA, 25 bp, Homo sapien
tattcgactgactgtgctctagtct

SEQ ID NO: 1203331 - DNA, 25 bp, Homo sapien
ttgatggctaaaggtaagatgttgc

SEQ ID NO: 1203332 - DNA, 25 bp, Homo sapien
gcctcgaacgcccggcctcaggtga

SEQ ID NO: 1203333 - DNA, 25 bp, Homo sapien
gctggcctcgaacgcccggcctcag

SEQ ID NO: 1203334 - DNA, 25 bp, Homo sapien
tggcctcgaacgcccggcctcaggt

SEQ ID NO: 1203335 - DNA, 25 bp, Homo sapien
aggctggcctcgaacgcccggcctc

SEQ ID NO: 1203336 - DNA, 25 bp, Homo sapien
gagtggtactcccattagtccagga

SEQ ID NO: 1203337 - DNA, 25 bp, Homo sapien
cacttgaatgcaatcctagcagcta

SEQ ID NO: 1203338 - DNA, 25 bp, Homo sapien
tacctctttaacattgcatcagtcc

SEQ ID NO: 1203339 - DNA, 25 bp, Homo sapien
tagcagctacactcaacatatctct

SEQ ID NO: 1203340 - DNA, 25 bp, Homo sapien
gccttgaatggttttccaaattgat

SEQ ID NO: 1203341 - DNA, 25 bp, Homo sapien
ggccttgaatggttttccaaattga

SEQ ID NO: 1203342 - DNA, 25 bp, Homo sapien
cccaaggatcttttggactggaatc

SEQ ID NO: 1203343 - DNA, 25 bp, Homo sapien
ccaaggatcttttggactggaatct

SEQ ID NO: 1203344 - DNA, 25 bp, Homo sapien
aggatcttttggactggaatctgag

SEQ ID NO: 1203345 - DNA, 25 bp, Homo sapien
caaggatcttttggactggaatctg

SEQ ID NO: 1203346 - DNA, 25 bp, Homo sapien
tgtaatcggtgagtagacaggtcac

SEQ ID NO: 1203347 - DNA, 25 bp, Homo sapien
gtgactttctgaaactccacaatcc

SEQ ID NO: 1203348 - DNA, 25 bp, Homo sapien
tatatgcatgaggattagggcagtg

SEQ ID NO: 1203349 - DNA, 25 bp, Homo sapien
cactggctttgtccacggaaggctt

SEQ ID NO: 1203350 - DNA, 25 bp, Homo sapien
tgctgccaccctaaccctggcaggg

SEQ ID NO: 1203351 - DNA, 25 bp, Homo sapien
ctgcgatgactcatcatcaccttct

SEQ ID NO: 1203352 - DNA, 25 bp, Homo sapien
ctctgcgatgactcatcatcacctt

SEQ ID NO: 1203353 - DNA, 25 bp, Homo sapien
gccaccctaaccctggcagggccat

SEQ ID NO: 1203354 - DNA, 25 bp, Homo sapien
aatgagaagtagcaaggctttaatc

SEQ ID NO: 1203355 - DNA, 25 bp, Homo sapien
tacacataatgagaagtagcaaggc

SEQ ID NO: 1203356 - DNA, 25 bp, Homo sapien
cataatgagaagtagcaaggcttta

SEQ ID NO: 1203357 - DNA, 25 bp, Homo sapien
cacataatgagaagtagcaaggctt

SEQ ID NO: 1203358 - DNA, 25 bp, Homo sapien
tcagctatgaacagtgctaatttta

SEQ ID NO: 1203359 - DNA, 25 bp, Homo sapien
gcaggacttgcaatattacgttgaa

SEQ ID NO: 1203360 - DNA, 25 bp, Homo sapien
tctcttgcctggttgctctaggcag

SEQ ID NO: 1203361 - DNA, 25 bp, Homo sapien
ttttctaagattatgtcagctatga

SEQ ID NO: 1203362 - DNA, 25 bp, Homo sapien
aggctttataggaagcctggtgctg

SEQ ID NO: 1203363 - DNA, 25 bp, Homo sapien
ttctgcaggctttataggaagcctg

SEQ ID NO: 1203364 - DNA, 25 bp, Homo sapien
aagcttttactcatggtggtaggca

SEQ ID NO: 1203365 - DNA, 25 bp, Homo sapien
agcttttactcatggtggtaggcaa

SEQ ID NO: 1203366 - DNA, 25 bp, Homo sapien
gatagatgctaaattgaatactgtg

SEQ ID NO: 1203367 - DNA, 25 bp, Homo sapien
gatgaagcacgtaaatatccttgtt

SEQ ID NO: 1203368 - DNA, 25 bp, Homo sapien
gatgtaggtctctggaatcagcgct

SEQ ID NO: 1203369 - DNA, 25 bp, Homo sapien
ggttaagacctttacgacagtgctg

SEQ ID NO: 1203370 - DNA, 25 bp, Homo sapien
cgagacagtcgcgtttccacagtaa

SEQ ID NO: 1203371 - DNA, 25 bp, Homo sapien
aatttgtagagccacaccacgaggg

SEQ ID NO: 1203372 - DNA, 25 bp, Homo sapien
tgaatagctcttcgggacgtccaca

SEQ ID NO: 1203373 - DNA, 25 bp, Homo sapien
tgggaaacgacaaaagaaggcagcc

SEQ ID NO: 1203374 - DNA, 25 bp, Homo sapien
tggtcagaatttgcgcgtccctggg

SEQ ID NO: 1203375 - DNA, 25 bp, Homo sapien
tagcgaggatgtccctaccgcgatg

SEQ ID NO: 1203376 - DNA, 25 bp, Homo sapien
accgcgatgctggttccgttaccca

SEQ ID NO: 1203377 - DNA, 25 bp, Homo sapien
gcctcaacccctgggatgcgggtga

SEQ ID NO: 1203378 - DNA, 25 bp, Homo sapien
gcttctaccccatagcgtactcagg

SEQ ID NO: 1203379 - DNA, 25 bp, Homo sapien
tcctagtctccaagttgagggcaga

SEQ ID NO: 1203380 - DNA, 25 bp, Homo sapien
gaaggagtcagagttttacccacta

SEQ ID NO: 1203381 - DNA, 25 bp, Homo sapien
tataagagcctgctgaatgagggca

SEQ ID NO: 1203382 - DNA, 25 bp, Homo sapien
ctgtaacctccgccctccgagttca

SEQ ID NO: 1203383 - DNA, 25 bp, Homo sapien
cactgtaacctccgccctccgagtt

SEQ ID NO: 1203384 - DNA, 25 bp, Homo sapien
gtgagccacggtgcccggccaagca

SEQ ID NO: 1203385 - DNA, 25 bp, Homo sapien
gcgtgagccacggtgcccggccaag

SEQ ID NO: 1203386 - DNA, 25 bp, Homo sapien
tttagaaggcaattgggcagtgagt

SEQ ID NO: 1203387 - DNA, 25 bp, Homo sapien
tgagtgaggtcagaacctggtcatc

SEQ ID NO: 1203388 - DNA, 25 bp, Homo sapien
ggatgggcctgacctatctatctag

SEQ ID NO: 1203389 - DNA, 25 bp, Homo sapien
tggtcatcagttaatccattcctgg

SEQ ID NO: 1203390 - DNA, 25 bp, Homo sapien
tctatatcagaatggagagcaccaa

SEQ ID NO: 1203391 - DNA, 25 bp, Homo sapien
cattagtctaaggttgtcagaggct

SEQ ID NO: 1203392 - DNA, 25 bp, Homo sapien
caactccgtgaatatactagaaccc

SEQ ID NO: 1203393 - DNA, 25 bp, Homo sapien
tttaaaagcaatttgagatacccac

SEQ ID NO: 1203394 - DNA, 25 bp, Homo sapien
aaagatgacgaacatcattagtcat

SEQ ID NO: 1203395 - DNA, 25 bp, Homo sapien
ataggcaaaagatgtgaatattact

SEQ ID NO: 1203396 - DNA, 25 bp, Homo sapien
taggcaaaagatgtgaatattactc

SEQ ID NO: 1203397 - DNA, 25 bp, Homo sapien
ggcaaaagatgtgaatattactcca

SEQ ID NO: 1203398 - DNA, 25 bp, Homo sapien
agcaatacatacttaaagccaaata

SEQ ID NO: 1203399 - DNA, 25 bp, Homo sapien
tttccttgtattattcattgtgacc

SEQ ID NO: 1203400 - DNA, 25 bp, Homo sapien
acattattggttcccttgaaagtag

SEQ ID NO: 1203401 - DNA, 25 bp, Homo sapien
tgcttttatgtaattagcaatacat

SEQ ID NO: 1203402 - DNA, 25 bp, Homo sapien
tctctcccattaaagagactaaaaa

SEQ ID NO: 1203403 - DNA, 25 bp, Homo sapien
catactatgtgtaagacatgaagac

SEQ ID NO: 1203404 - DNA, 25 bp, Homo sapien
tgttatttcggtgcactgggcttct

SEQ ID NO: 1203405 - DNA, 25 bp, Homo sapien
gacatgaagacaatttctctcccat

SEQ ID NO: 1203406 - DNA, 25 bp, Homo sapien
ttacaactagatgggcacaataaaa

SEQ ID NO: 1203407 - DNA, 25 bp, Homo sapien
tattacaactagatgggcacaataa

SEQ ID NO: 1203408 - DNA, 25 bp, Homo sapien
gttattacaactagatgggcacaat

SEQ ID NO: 1203409 - DNA, 25 bp, Homo sapien
atgttattacaactagatgggcaca

SEQ ID NO: 1203410 - DNA, 25 bp, Homo sapien
gaaccggtgtagtcgattcatgtca

SEQ ID NO: 1203411 - DNA, 25 bp, Homo sapien
taataagtcccaccttcagaaccga

SEQ ID NO: 1203412 - DNA, 25 bp, Homo sapien
cgctatagccttccggagggcacga

SEQ ID NO: 1203413 - DNA, 25 bp, Homo sapien
gcttatgtcggagcactgggaacaa

SEQ ID NO: 1203414 - DNA, 25 bp, Homo sapien
cccacccttcttcccaatgaagatc

SEQ ID NO: 1203415 - DNA, 25 bp, Homo sapien
tcttcccaatgaagatcttatgctt

SEQ ID NO: 1203416 - DNA, 25 bp, Homo sapien
cttcttcccaatgaagatcttatgc

SEQ ID NO: 1203417 - DNA, 25 bp, Homo sapien
acccttcttcccaatgaagatctta

SEQ ID NO: 1203418 - DNA, 25 bp, Homo sapien
ttttacaaacgattatactgagacc

SEQ ID NO: 1203419 - DNA, 25 bp, Homo sapien
aacagctgtgtacagttacctaagt

SEQ ID NO: 1203420 - DNA, 25 bp, Homo sapien
tctagtgactgtacccatatccaag

SEQ ID NO: 1203421 - DNA, 25 bp, Homo sapien
ccaaggcttattgcaacttttagtc

SEQ ID NO: 1203422 - DNA, 25 bp, Homo sapien
gaactgaggaggcagaggttacagt

SEQ ID NO: 1203423 - DNA, 25 bp, Homo sapien
ctgaggaggcagaggttacagtggg

SEQ ID NO: 1203424 - DNA, 25 bp, Homo sapien
actgaggaggcagaggttacagtgg

SEQ ID NO: 1203425 - DNA, 25 bp, Homo sapien
ttgaactgaggaggcagaggttaca

SEQ ID NO: 1203426 - DNA, 25 bp, Homo sapien
catggacacaggaaggggaacatca

SEQ ID NO: 1203427 - DNA, 25 bp, Homo sapien
catgttctcactcataggtgggaat

SEQ ID NO: 1203428 - DNA, 25 bp, Homo sapien
tgaacaatgagaacacatggacaca

SEQ ID NO: 1203429 - DNA, 25 bp, Homo sapien
cgcaaggacaaaaaacgaaacactg

SEQ ID NO: 1203430 - DNA, 25 bp, Homo sapien
tctttccagccctttgtaatatatt

SEQ ID NO: 1203431 - DNA, 25 bp, Homo sapien
tgtgcgcttcactttctctacagcc

SEQ ID NO: 1203432 - DNA, 25 bp, Homo sapien
gacttctagctcatctcttgtgcgc

SEQ ID NO: 1203433 - DNA, 25 bp, Homo sapien
aagatgttctctaactaatctatgt

SEQ ID NO: 1203434 - DNA, 25 bp, Homo sapien
tctggagtgaaactaacacaaatgc

SEQ ID NO: 1203435 - DNA, 25 bp, Homo sapien
ggtgttttaaacagacatcaatttc

SEQ ID NO: 1203436 - DNA, 25 bp, Homo sapien
catgctgtaacatataattcactca

SEQ ID NO: 1203437 - DNA, 25 bp, Homo sapien
aatatatagctaccccaagtttatc

SEQ ID NO: 1203438 - DNA, 25 bp, Homo sapien
ggttcaagtactgaattagcagtca

SEQ ID NO: 1203439 - DNA, 25 bp, Homo sapien
tttcattacacagtttttcacatac

SEQ ID NO: 1203440 - DNA, 25 bp, Homo sapien
tgcagtaagcggcatttcttgtaac

SEQ ID NO: 1203441 - DNA, 25 bp, Homo sapien
tttcctagattccttagtaatgcag

SEQ ID NO: 1203442 - DNA, 25 bp, Homo sapien
tcatcagggcgccacttcagtttcc

SEQ ID NO: 1203443 - DNA, 25 bp, Homo sapien
tcttgtaagtttctaatgcgatcaa

SEQ ID NO: 1203444 - DNA, 25 bp, Homo sapien
aaatatgaaatggatgtatacgagc

SEQ ID NO: 1203445 - DNA, 25 bp, Homo sapien
agtttccctctgagaccatgacctg

SEQ ID NO: 1203446 - DNA, 25 bp, Homo sapien
taaattgggtttgtacttttgctga

SEQ ID NO: 1203447 - DNA, 25 bp, Homo sapien
aattgggtttgtacttttgctgaat

SEQ ID NO: 1203448 - DNA, 25 bp, Homo sapien
cagctagtaagaaacgttttccagt

SEQ ID NO: 1203449 - DNA, 25 bp, Homo sapien
gcaactgtactagcgttgagtatac

SEQ ID NO: 1203450 - DNA, 25 bp, Homo sapien
gtactagcgttgagtatactaccca

SEQ ID NO: 1203451 - DNA, 25 bp, Homo sapien
gaagcactgacatcaacagctagta

SEQ ID NO: 1203452 - DNA, 25 bp, Homo sapien
tctgcttgttctttagacatacttt

SEQ ID NO: 1203453 - DNA, 25 bp, Homo sapien
cattattaatcttatagttttgctc

SEQ ID NO: 1203454 - DNA, 25 bp, Homo sapien
tctaagcattatctacttcctaaaa

SEQ ID NO: 1203455 - DNA, 25 bp, Homo sapien
aacactctggctttacacaattatc

SEQ ID NO: 1203456 - DNA, 25 bp, Homo sapien
gacactcctattagttcccagatct

SEQ ID NO: 1203457 - DNA, 25 bp, Homo sapien
ctcctattagttcccagatctttta

SEQ ID NO: 1203458 - DNA, 25 bp, Homo sapien
aagtctctagacactcctattagtt

SEQ ID NO: 1203459 - DNA, 25 bp, Homo sapien
tctagacactcctattagttcccag

SEQ ID NO: 1203460 - DNA, 25 bp, Homo sapien
gcaaatacagtaaatattcttctca

SEQ ID NO: 1203461 - DNA, 25 bp, Homo sapien
tacagtaaatattcttctcatttca

SEQ ID NO: 1203462 - DNA, 25 bp, Homo sapien
tttcattagataagaaataaagccc

SEQ ID NO: 1203463 - DNA, 25 bp, Homo sapien
tagataagaaataaagccccagtaa

SEQ ID NO: 1203464 - DNA, 25 bp, Homo sapien
ttagtgtgttttagaactatacatt

SEQ ID NO: 1203465 - DNA, 25 bp, Homo sapien
tagtgtgttttagaactatacatta

SEQ ID NO: 1203466 - DNA, 25 bp, Homo sapien
taaggtcatatctgtagtcactgga

SEQ ID NO: 1203467 - DNA, 25 bp, Homo sapien
ttaaaacctgttgtaaggtcatatc

SEQ ID NO: 1203468 - DNA, 25 bp, Homo sapien
aatctttttctgttcgtgtgacaac

SEQ ID NO: 1203469 - DNA, 25 bp, Homo sapien
cggaaaaagcaactacataagaatc

SEQ ID NO: 1203470 - DNA, 25 bp, Homo sapien
tccagcaaaggtctcattatcagtg

SEQ ID NO: 1203471 - DNA, 25 bp, Homo sapien
tgagcccagatcattggaagagagc

SEQ ID NO: 1203472 - DNA, 25 bp, Homo sapien
tcagagcaatagcaggatggacacc

SEQ ID NO: 1203473 - DNA, 25 bp, Homo sapien
ggaagagagcaatcagttccacctg

SEQ ID NO: 1203474 - DNA, 25 bp, Homo sapien
ctgggtctgcaatggtgaaaccatt

SEQ ID NO: 1203475 - DNA, 25 bp, Homo sapien
tccagtatcaaagccgcacatatcc

SEQ ID NO: 1203476 - DNA, 25 bp, Homo sapien
gagctccagtatcaaagccgcacat

SEQ ID NO: 1203477 - DNA, 25 bp, Homo sapien
atccagagctccagtatcaaagccg

SEQ ID NO: 1203478 - DNA, 25 bp, Homo sapien
tcaaagccgcacatatccaacatgc

SEQ ID NO: 1203479 - DNA, 25 bp, Homo sapien
aatcatatctaatgtgaaatttcga

SEQ ID NO: 1203480 - DNA, 25 bp, Homo sapien
tcatatctaatgtgaaatttcgaat

SEQ ID NO: 1203481 - DNA, 25 bp, Homo sapien
tatctaatgtgaaatttcgaattac

SEQ ID NO: 1203482 - DNA, 25 bp, Homo sapien
catatctaatgtgaaatttcgaatt

SEQ ID NO: 1203483 - DNA, 25 bp, Homo sapien
gatctctggatcgtgctgctgctta

SEQ ID NO: 1203484 - DNA, 25 bp, Homo sapien
tatcctgaagctatttccccaagag

SEQ ID NO: 1203485 - DNA, 25 bp, Homo sapien
cattcattgggtggagattagctgg

SEQ ID NO: 1203486 - DNA, 25 bp, Homo sapien
tcactgatggcaatggatctctgga

SEQ ID NO: 1203487 - DNA, 25 bp, Homo sapien
tcttttaggtacacacgtattattc

SEQ ID NO: 1203488 - DNA, 25 bp, Homo sapien
tttaggtacacacgtattattcaac

SEQ ID NO: 1203489 - DNA, 25 bp, Homo sapien
ttaggtacacacgtattattcaaca

SEQ ID NO: 1203490 - DNA, 25 bp, Homo sapien
cttttaggtacacacgtattattca

SEQ ID NO: 1203491 - DNA, 25 bp, Homo sapien
gctgtcctttcccaatgaaaacatt

SEQ ID NO: 1203492 - DNA, 25 bp, Homo sapien
catttcagagtatttggacattatc

SEQ ID NO: 1203493 - DNA, 25 bp, Homo sapien
gaaaacgttaagcacttctcaagta

SEQ ID NO: 1203494 - DNA, 25 bp, Homo sapien
catcacagttatatggtctagtgca

SEQ ID NO: 1203495 - DNA, 25 bp, Homo sapien
ggaaatcattatcaagtcacacccc

SEQ ID NO: 1203496 - DNA, 25 bp, Homo sapien
taatggtaacatattccacaagtgc

SEQ ID NO: 1203497 - DNA, 25 bp, Homo sapien
aaattcctagtgactggctagctgg

SEQ ID NO: 1203498 - DNA, 25 bp, Homo sapien
aaaacagtgtgagactacatctggc

SEQ ID NO: 1203499 - DNA, 25 bp, Homo sapien
tatgtgtaagctaccttagacggcc

SEQ ID NO: 1203500 - DNA, 25 bp, Homo sapien
tcaatgcttgacagggttaaaaacg

SEQ ID NO: 1203501 - DNA, 25 bp, Homo sapien
gagggtgctatgagctttgctgaac

SEQ ID NO: 1203502 - DNA, 25 bp, Homo sapien
gagaacaacagatacgcaaacaggt

SEQ ID NO: 1203503 - DNA, 25 bp, Homo sapien
gcaaaggaggtgtcaaagggtaaca

SEQ ID NO: 1203504 - DNA, 25 bp, Homo sapien
gttaaactggttgtctacagtcaca

SEQ ID NO: 1203505 - DNA, 25 bp, Homo sapien
gaattctaacttgtattgcaagccc

SEQ ID NO: 1203506 - DNA, 25 bp, Homo sapien
taaattccattcactagcatcttgc

SEQ ID NO: 1203507 - DNA, 25 bp, Homo sapien
cagtcacgccataccagatatagag

SEQ ID NO: 1203508 - DNA, 25 bp, Homo sapien
tatcaacagacctaggaagctccct

SEQ ID NO: 1203509 - DNA, 25 bp, Homo sapien
gagtccatattcagagtaacagtgc

SEQ ID NO: 1203510 - DNA, 25 bp, Homo sapien
tatccacatcgaagtgaaaccagca

SEQ ID NO: 1203511 - DNA, 25 bp, Homo sapien
tttatttggtacatctatcaatttc

SEQ ID NO: 1203512 - DNA, 25 bp, Homo sapien
actttgattctgttttggatggtca

SEQ ID NO: 1203513 - DNA, 25 bp, Homo sapien
caagtgcctgggagcctttatgagc

SEQ ID NO: 1203514 - DNA, 25 bp, Homo sapien
aaacatctgaggcaccactttgatt

SEQ ID NO: 1203515 - DNA, 25 bp, Homo sapien
tgtgtaacaggtagttggaaacatc

SEQ ID NO: 1203516 - DNA, 25 bp, Homo sapien
cttcgccgccgcgacgaaccaacag

SEQ ID NO: 1203517 - DNA, 25 bp, Homo sapien
gcagcagcactaacagccgtcctcg

SEQ ID NO: 1203518 - DNA, 25 bp, Homo sapien
taacagccgtcctcgcctacgacag

SEQ ID NO: 1203519 - DNA, 25 bp, Homo sapien
gtcctcgcctacgacagcagcaggg

SEQ ID NO: 1203520 - DNA, 25 bp, Homo sapien
cgccgcgcctgcctccttcttctct

SEQ ID NO: 1203521 - DNA, 25 bp, Homo sapien
ccttcttctcttgtcgcctcgccct

SEQ ID NO: 1203522 - DNA, 25 bp, Homo sapien
ccctcgcctccgccggctcggggcg

SEQ ID NO: 1203523 - DNA, 25 bp, Homo sapien
ctcgcctccgccggctcggggcgcc

SEQ ID NO: 1203524 - DNA, 25 bp, Homo sapien
ggagaactccccgaagatcacttcg

SEQ ID NO: 1203525 - DNA, 25 bp, Homo sapien
tggtcttcacattcttgggccagga

SEQ ID NO: 1203526 - DNA, 25 bp, Homo sapien
tggatgttgtactgtcgcaggacgc

SEQ ID NO: 1203527 - DNA, 25 bp, Homo sapien
cccaaacaacatagttggtcttcac

SEQ ID NO: 1203528 - DNA, 25 bp, Homo sapien
attttaagtgatgaactgctctaga

SEQ ID NO: 1203529 - DNA, 25 bp, Homo sapien
taagtgatgaactgctctagagctc

SEQ ID NO: 1203530 - DNA, 25 bp, Homo sapien
agtgatgaactgctctagagctccg

SEQ ID NO: 1203531 - DNA, 25 bp, Homo sapien
gatgaactgctctagagctccgccc

SEQ ID NO: 1203532 - DNA, 25 bp, Homo sapien
ccagcggagatagttacatagcagc

SEQ ID NO: 1203533 - DNA, 25 bp, Homo sapien
gaaataaaccaggagttgcaaagac

SEQ ID NO: 1203534 - DNA, 25 bp, Homo sapien
caggagttgcaaagaccagcggaga

SEQ ID NO: 1203535 - DNA, 25 bp, Homo sapien
ttttctcttctacaggaatcacccc

SEQ ID NO: 1203536 - DNA, 25 bp, Homo sapien
ctctaacacagacttttatgactct

SEQ ID NO: 1203537 - DNA, 25 bp, Homo sapien
tctctaacacagacttttatgactc

SEQ ID NO: 1203538 - DNA, 25 bp, Homo sapien
ctctctaacacagacttttatgact

SEQ ID NO: 1203539 - DNA, 25 bp, Homo sapien
gcacgtcggacataaacaggatgag

SEQ ID NO: 1203540 - DNA, 25 bp, Homo sapien
agtactctctgggttggccttcctt

SEQ ID NO: 1203541 - DNA, 25 bp, Homo sapien
gaaaggtgcacgttattaagtagaa

SEQ ID NO: 1203542 - DNA, 25 bp, Homo sapien
tggaatccaatgtgtagtactctct

SEQ ID NO: 1203543 - DNA, 25 bp, Homo sapien
aataggaactaaggatcaggaatct

SEQ ID NO: 1203544 - DNA, 25 bp, Homo sapien
taggaactaaggatcaggaatctgt

SEQ ID NO: 1203545 - DNA, 25 bp, Homo sapien
agtggtctgctcagccggacgcagt

SEQ ID NO: 1203546 - DNA, 25 bp, Homo sapien
tcagagtggtctgctcagccggacg

SEQ ID NO: 1203547 - DNA, 25 bp, Homo sapien
ttctaaccacaggaatattttcagt

SEQ ID NO: 1203548 - DNA, 25 bp, Homo sapien
gtcttctaaccacaggaatattttc

SEQ ID NO: 1203549 - DNA, 25 bp, Homo sapien
gatcttttcgatcaggtcttctaac

SEQ ID NO: 1203550 - DNA, 25 bp, Homo sapien
acgcttcaccattgagatatccaag

SEQ ID NO: 1203551 - DNA, 25 bp, Homo sapien
gtagatcgctgaagacctatttcta

SEQ ID NO: 1203552 - DNA, 25 bp, Homo sapien
agacctatttctaagggagcgcttc

SEQ ID NO: 1203553 - DNA, 25 bp, Homo sapien
cttctgtctatacttgccgatgttg

SEQ ID NO: 1203554 - DNA, 25 bp, Homo sapien
tctaagggagcgcttctgtctatac

SEQ ID NO: 1203555 - DNA, 25 bp, Homo sapien
tttgcttctgctaaaacttcatctg

SEQ ID NO: 1203556 - DNA, 25 bp, Homo sapien
gcttctgctaaaacttcatctgcag

SEQ ID NO: 1203557 - DNA, 25 bp, Homo sapien
ttgcttctgctaaaacttcatctgc

SEQ ID NO: 1203558 - DNA, 25 bp, Homo sapien
tgcttctgctaaaacttcatctgca

SEQ ID NO: 1203559 - DNA, 25 bp, Homo sapien
taatctgttcagtctgtacaatccc

SEQ ID NO: 1203560 - DNA, 25 bp, Homo sapien
tgtacaatcccttctttgtgaccct

SEQ ID NO: 1203561 - DNA, 25 bp, Homo sapien
tccaaacgggcagccaatctctctt

SEQ ID NO: 1203562 - DNA, 25 bp, Homo sapien
tctctttatcaaggcgcacacactc

SEQ ID NO: 1203563 - DNA, 25 bp, Homo sapien
tctgctgacaatatctcgggtcaca

SEQ ID NO: 1203564 - DNA, 25 bp, Homo sapien
gatagttgttcgtgtcctccatact

SEQ ID NO: 1203565 - DNA, 25 bp, Homo sapien
tagtagatcttttcttagccataat

SEQ ID NO: 1203566 - DNA, 25 bp, Homo sapien
aagggcagttatgtcatcatctaga

SEQ ID NO: 1203567 - DNA, 25 bp, Homo sapien
gcaggtcgctgttcaggtgcacgcc

SEQ ID NO: 1203568 - DNA, 25 bp, Homo sapien
tgttcaggtgcacgcccttcttctc

SEQ ID NO: 1203569 - DNA, 25 bp, Homo sapien
tgcatttggggcaggtcgctgttca

SEQ ID NO: 1203570 - DNA, 25 bp, Homo sapien
tcgctgttcaggtgcacgcccttct

SEQ ID NO: 1203571 - DNA, 25 bp, Homo sapien
cgtatctgttataggcagctgggat

SEQ ID NO: 1203572 - DNA, 25 bp, Homo sapien
ttataggcagctgggataggctgtt

SEQ ID NO: 1203573 - DNA, 25 bp, Homo sapien
gaatctttcctgatcgtatctgtta

SEQ ID NO: 1203574 - DNA, 25 bp, Homo sapien
taggctgtttggtgcgcaaagtggg

SEQ ID NO: 1203575 - DNA, 25 bp, Homo sapien
taaggggaagataagaattaagcaa

SEQ ID NO: 1203576 - DNA, 25 bp, Homo sapien
cctctcaagttcaacacaaccacac

SEQ ID NO: 1203577 - DNA, 25 bp, Homo sapien
gcctctcaagttcaacacaaccaca

SEQ ID NO: 1203578 - DNA, 25 bp, Homo sapien
catagtgtcaattttgaagccttcc

SEQ ID NO: 1203579 - DNA, 25 bp, Homo sapien
agtgtcaattttgaagccttccgtt

SEQ ID NO: 1203580 - DNA, 25 bp, Homo sapien
gtcataccatggtaggttcccatag

SEQ ID NO: 1203581 - DNA, 25 bp, Homo sapien
tagtgtcaattttgaagccttccgt

SEQ ID NO: 1203582 - DNA, 25 bp, Homo sapien
gcattaactccatagtcatcggcag

SEQ ID NO: 1203583 - DNA, 25 bp, Homo sapien
caaaatgtatcaaccagtgtgcaat

SEQ ID NO: 1203584 - DNA, 25 bp, Homo sapien
gagttgaattgtacaggcttacaca

SEQ ID NO: 1203585 - DNA, 25 bp, Homo sapien
gattactctgatatacgtggcaaca

SEQ ID NO: 1203586 - DNA, 25 bp, Homo sapien
tcaccagcagttatttctcctttga

SEQ ID NO: 1203587 - DNA, 25 bp, Homo sapien
cactgctgttcatcaccagcagtta

SEQ ID NO: 1203588 - DNA, 25 bp, Homo sapien
tcaaccataggcaacaaaacctcca

SEQ ID NO: 1203589 - DNA, 25 bp, Homo sapien
tgttcatcaccagcagttatttctc

SEQ ID NO: 1203590 - DNA, 25 bp, Homo sapien
caggtttagttagcactgccagttg

SEQ ID NO: 1203591 - DNA, 25 bp, Homo sapien
ccttatgtggtactctcaggtttag

SEQ ID NO: 1203592 - DNA, 25 bp, Homo sapien
catggacaacagaaaccttatgtgg

SEQ ID NO: 1203593 - DNA, 25 bp, Homo sapien
gccagttggcacaatacaaatcaca

SEQ ID NO: 1203594 - DNA, 25 bp, Homo sapien
tttagacattaatcccagaaggcag

SEQ ID NO: 1203595 - DNA, 25 bp, Homo sapien
gcctgggcctgatacaatgcaaaat

SEQ ID NO: 1203596 - DNA, 25 bp, Homo sapien
cccggccgaggatcatgttcttaat

SEQ ID NO: 1203597 - DNA, 25 bp, Homo sapien
gctgagcaaaaatggtctgtccctt

SEQ ID NO: 1203598 - DNA, 25 bp, Homo sapien
gaatccttccctcagtgtagaataa

SEQ ID NO: 1203599 - DNA, 25 bp, Homo sapien
tgacagaagacaaaaggaatccttc

SEQ ID NO: 1203600 - DNA, 25 bp, Homo sapien
caaatcagatcagcatgtttgacag

SEQ ID NO: 1203601 - DNA, 25 bp, Homo sapien
gatcagcatgtttgacagaagacaa

SEQ ID NO: 1203602 - DNA, 25 bp, Homo sapien
tttcaaatcagtagcctaagtgttc

SEQ ID NO: 1203603 - DNA, 25 bp, Homo sapien
aacacaattctaggatgaacaatgt

SEQ ID NO: 1203604 - DNA, 25 bp, Homo sapien
taagtgttctactctaaatcaagtg

SEQ ID NO: 1203605 - DNA, 25 bp, Homo sapien
gagtgccaagtttgcaaacctgcag

SEQ ID NO: 1203606 - DNA, 25 bp, Homo sapien
taactttctaggactgaattactgt

SEQ ID NO: 1203607 - DNA, 25 bp, Homo sapien
tacaaagcacatttcatcagcaaag

SEQ ID NO: 1203608 - DNA, 25 bp, Homo sapien
gaattactgtccctagagtcacaga

SEQ ID NO: 1203609 - DNA, 25 bp, Homo sapien
tagcatatattaatggtggaggcag

SEQ ID NO: 1203610 - DNA, 25 bp, Homo sapien
tctttttaccaaggacatattgttg

SEQ ID NO: 1203611 - DNA, 25 bp, Homo sapien
ttttaccaaggacatattgttgaat

SEQ ID NO: 1203612 - DNA, 25 bp, Homo sapien
atctttttaccaaggacatattgtt

SEQ ID NO: 1203613 - DNA, 25 bp, Homo sapien
ctttttaccaaggacatattgttga

SEQ ID NO: 1203614 - DNA, 25 bp, Homo sapien
aaggagaccaatataagaagaccag

SEQ ID NO: 1203615 - DNA, 25 bp, Homo sapien
gggaccaaccactcataataaagca

SEQ ID NO: 1203616 - DNA, 25 bp, Homo sapien
cctagctgaaattaattccttgaat

SEQ ID NO: 1203617 - DNA, 25 bp, Homo sapien
tctggtaagtcctagctgaaattaa

SEQ ID NO: 1203618 - DNA, 25 bp, Homo sapien
ctctccagcggagggtgaccagatt

SEQ ID NO: 1203619 - DNA, 25 bp, Homo sapien
tgaccagattaattaaccacacacg

SEQ ID NO: 1203620 - DNA, 25 bp, Homo sapien
accacacacgtgttgactcaatgcc

SEQ ID NO: 1203621 - DNA, 25 bp, Homo sapien
cccttatacagcctaagaagttggg

SEQ ID NO: 1203622 - DNA, 25 bp, Homo sapien
gatctgggcctttttgaatccaaag

SEQ ID NO: 1203623 - DNA, 25 bp, Homo sapien
caggtcacatgcctagtaagcagaa

SEQ ID NO: 1203624 - DNA, 25 bp, Homo sapien
taaccacttaaacggctgagacatg

SEQ ID NO: 1203625 - DNA, 25 bp, Homo sapien
catttgtaaagaccatgccctcatg

SEQ ID NO: 1203626 - DNA, 25 bp, Homo sapien
ggtgcgcaccatcaatgtccggcta

SEQ ID NO: 1203627 - DNA, 25 bp, Homo sapien
agtctcctgcttgagccactcaagt

SEQ ID NO: 1203628 - DNA, 25 bp, Homo sapien
tcccaagctcgagagtctcctgctt

SEQ ID NO: 1203629 - DNA, 25 bp, Homo sapien
aggtgcgcaccatcaatgtccggct

SEQ ID NO: 1203630 - DNA, 25 bp, Homo sapien
gtctgagtcttccgggcagatgcac

SEQ ID NO: 1203631 - DNA, 25 bp, Homo sapien
ctggtcttggtactggctgggctgc

SEQ ID NO: 1203632 - DNA, 25 bp, Homo sapien
tggtcttggtactggctgggctgca

SEQ ID NO: 1203633 - DNA, 25 bp, Homo sapien
gagtcttccgggcagatgcaccctc

SEQ ID NO: 1203634 - DNA, 25 bp, Homo sapien
gttccctagtatgtaaggacccaga

SEQ ID NO: 1203635 - DNA, 25 bp, Homo sapien
gctgattaactttgctcggcctcag

SEQ ID NO: 1203636 - DNA, 25 bp, Homo sapien
tgaatcctgcaactacagtagatgc

SEQ ID NO: 1203637 - DNA, 25 bp, Homo sapien
tgacagagtgatcaacagcaaaggt

SEQ ID NO: 1203638 - DNA, 25 bp, Homo sapien
aatcctttatatagctctctcattg

SEQ ID NO: 1203639 - DNA, 25 bp, Homo sapien
tatagctctctcattgtgataaact

SEQ ID NO: 1203640 - DNA, 25 bp, Homo sapien
tgtgataaactgtcataggattcag

SEQ ID NO: 1203641 - DNA, 25 bp, Homo sapien
tcataggattcagtagtatgacctt

SEQ ID NO: 1203642 - DNA, 25 bp, Homo sapien
aatcagtcatgtatatgtgaaggtc

SEQ ID NO: 1203643 - DNA, 25 bp, Homo sapien
gaaaatgaccatatgattgattgtg

SEQ ID NO: 1203644 - DNA, 25 bp, Homo sapien
ggtgagaaatacagcattacaggta

SEQ ID NO: 1203645 - DNA, 25 bp, Homo sapien
taactcaatgtgctacaagctgtgc

SEQ ID NO: 1203646 - DNA, 25 bp, Homo sapien
cttctgatttgggggaggtcttgct

SEQ ID NO: 1203647 - DNA, 25 bp, Homo sapien
tttgggggaggtcttgcttgagaaa

SEQ ID NO: 1203648 - DNA, 25 bp, Homo sapien
ctgatttgggggaggtcttgcttga

SEQ ID NO: 1203649 - DNA, 25 bp, Homo sapien
gatttgggggaggtcttgcttgaga

SEQ ID NO: 1203650 - DNA, 25 bp, Homo sapien
ggttattaaagaggtggtagctgca

SEQ ID NO: 1203651 - DNA, 25 bp, Homo sapien
gaattatgataatgggtgttcgaga

SEQ ID NO: 1203652 - DNA, 25 bp, Homo sapien
gtggtagctgcaggaattatgataa

SEQ ID NO: 1203653 - DNA, 25 bp, Homo sapien
tattaaagaggtggtagctgcagga

SEQ ID NO: 1203654 - DNA, 25 bp, Homo sapien
ggtcctgtagaaggtcttttgcatt

SEQ ID NO: 1203655 - DNA, 25 bp, Homo sapien
tcaggtcctgtagaaggtcttttgc

SEQ ID NO: 1203656 - DNA, 25 bp, Homo sapien
tcctgtagaaggtcttttgcattaa

SEQ ID NO: 1203657 - DNA, 25 bp, Homo sapien
gtagaaggtcttttgcattaagcat

SEQ ID NO: 1203658 - DNA, 25 bp, Homo sapien
ggacaacagttttcttgaaggcaaa

SEQ ID NO: 1203659 - DNA, 25 bp, Homo sapien
cacgccagacctggacaacagtttt

SEQ ID NO: 1203660 - DNA, 25 bp, Homo sapien
tgaaggcaaagccaatcgctcagat

SEQ ID NO: 1203661 - DNA, 25 bp, Homo sapien
aatcgctcagatatatggcacacca

SEQ ID NO: 1203662 - DNA, 25 bp, Homo sapien
gcaatctggatagctattaccacct

SEQ ID NO: 1203663 - DNA, 25 bp, Homo sapien
tacgacttagcctatccaggagctt

SEQ ID NO: 1203664 - DNA, 25 bp, Homo sapien
gaaaaagttgttgtggctagtaggc

SEQ ID NO: 1203665 - DNA, 25 bp, Homo sapien
caggagaacttgcactaattagagt

SEQ ID NO: 1203666 - DNA, 25 bp, Homo sapien
tactgtaacactaattgcagtgccc

SEQ ID NO: 1203667 - DNA, 25 bp, Homo sapien
gggctggtctactactctataaggt

SEQ ID NO: 1203668 - DNA, 25 bp, Homo sapien
cccctggttgcatctggtcttttct

SEQ ID NO: 1203669 - DNA, 25 bp, Homo sapien
ttcattttctcgttgacaaccttgt

SEQ ID NO: 1203670 - DNA, 25 bp, Homo sapien
ggctggtctactactctataagata

SEQ ID NO: 1203671 - DNA, 25 bp, Homo sapien
gggctggtctactactctataagat

SEQ ID NO: 1203672 - DNA, 25 bp, Homo sapien
ggggctggtctactactctataaga

SEQ ID NO: 1203673 - DNA, 25 bp, Homo sapien
gaatgacctgaggtctgcagaccac

SEQ ID NO: 1203674 - DNA, 25 bp, Homo sapien
taaccactgcaattaatgacgactg

SEQ ID NO: 1203675 - DNA, 25 bp, Homo sapien
taaattactatgctagggcactggg

SEQ ID NO: 1203676 - DNA, 25 bp, Homo sapien
ggcactgggtatgctactgttccta

SEQ ID NO: 1203677 - DNA, 25 bp, Homo sapien
tggtgatccatcaggcaaaagccat

SEQ ID NO: 1203678 - DNA, 25 bp, Homo sapien
aggaccctgcacaaaaacggctaca

SEQ ID NO: 1203679 - DNA, 25 bp, Homo sapien
tttagcaaatatatcaactggtgat

SEQ ID NO: 1203680 - DNA, 25 bp, Homo sapien
caggaccctgcacaaaaacggctac

SEQ ID NO: 1203681 - DNA, 25 bp, Homo sapien
ataaagttcttttgtaagaagccag

SEQ ID NO: 1203682 - DNA, 25 bp, Homo sapien
cttgaacctgggggttgcagggagc

SEQ ID NO: 1203683 - DNA, 25 bp, Homo sapien
ttgaacctgggggttgcagggagcc

SEQ ID NO: 1203684 - DNA, 25 bp, Homo sapien
ctgcttgaacctgggggttgcaggg

SEQ ID NO: 1203685 - DNA, 25 bp, Homo sapien
ttctgatagctattttatggattgc

SEQ ID NO: 1203686 - DNA, 25 bp, Homo sapien
tcagtatcaacctggtataagaggt

SEQ ID NO: 1203687 - DNA, 25 bp, Homo sapien
tcatattgcttgctagcatattggc

SEQ ID NO: 1203688 - DNA, 25 bp, Homo sapien
catattggcttttgatgttaacaac

SEQ ID NO: 1203689 - DNA, 25 bp, Homo sapien
tatatatacattctcagctacagtg

SEQ ID NO: 1203690 - DNA, 25 bp, Homo sapien
gttgaatcatcccagctagtttatc

SEQ ID NO: 1203691 - DNA, 25 bp, Homo sapien
tattccacatgtgatagtaagccac

SEQ ID NO: 1203692 - DNA, 25 bp, Homo sapien
tcggcaggtgatataatctagggca

SEQ ID NO: 1203693 - DNA, 25 bp, Homo sapien
cattcagggtttatacacgccagcc

SEQ ID NO: 1203694 - DNA, 25 bp, Homo sapien
tctttattccaccaactgaagccgt

SEQ ID NO: 1203695 - DNA, 25 bp, Homo sapien
taaggttggtacgttatcacagaaa

SEQ ID NO: 1203696 - DNA, 25 bp, Homo sapien
gcatcttcacgaaagtgctcactgg

SEQ ID NO: 1203697 - DNA, 25 bp, Homo sapien
atccaaatgacgtttgtgatagctg

SEQ ID NO: 1203698 - DNA, 25 bp, Homo sapien
caaaaccgtaagaacactggtctat

SEQ ID NO: 1203699 - DNA, 25 bp, Homo sapien
tcatcatacttcagatggaaggctt

SEQ ID NO: 1203700 - DNA, 25 bp, Homo sapien
catttggatccagacgaacttcatc

SEQ ID NO: 1203701 - DNA, 25 bp, Homo sapien
tctcaagtgcgatttatgctttacc

SEQ ID NO: 1203702 - DNA, 25 bp, Homo sapien
caagtgcgatttatgctttaccatg

SEQ ID NO: 1203703 - DNA, 25 bp, Homo sapien
tcagaatctcaagtgcgatttatgc

SEQ ID NO: 1203704 - DNA, 25 bp, Homo sapien
gtgcgatttatgctttaccatgtac

SEQ ID NO: 1203705 - DNA, 25 bp, Homo sapien
tccagaaatggaggagccaaataat

SEQ ID NO: 1203706 - DNA, 25 bp, Homo sapien
tttccattacagactagaaggctaa

SEQ ID NO: 1203707 - DNA, 25 bp, Homo sapien
tataaaagatcaatctgtgaccttc

SEQ ID NO: 1203708 - DNA, 25 bp, Homo sapien
aaagtttgcttatatggatgacagg

SEQ ID NO: 1203709 - DNA, 25 bp, Homo sapien
cagatagaaacacatcattctaggt

SEQ ID NO: 1203710 - DNA, 25 bp, Homo sapien
taggtttcaaaatcaccaaagtcag

SEQ ID NO: 1203711 - DNA, 25 bp, Homo sapien
ggctcagagagccttataatctcta

SEQ ID NO: 1203712 - DNA, 25 bp, Homo sapien
aaatcttgaaaaggctgaacagttc

SEQ ID NO: 1203713 - DNA, 25 bp, Homo sapien
atcaaggttcaaggcaaatggtcac

SEQ ID NO: 1203714 - DNA, 25 bp, Homo sapien
taaagttatactgcaatagggctga

SEQ ID NO: 1203715 - DNA, 25 bp, Homo sapien
gaagataagaactccaagactgaca

SEQ ID NO: 1203716 - DNA, 25 bp, Homo sapien
cacttgatgtaccttggatgcaaca

SEQ ID NO: 1203717 - DNA, 25 bp, Homo sapien
tatgctaagaaagcctaatgtaaac

SEQ ID NO: 1203718 - DNA, 25 bp, Homo sapien
tttatatgctaagaaagcctaatgt

SEQ ID NO: 1203719 - DNA, 25 bp, Homo sapien
atatttatatgctaagaaagcctaa

SEQ ID NO: 1203720 - DNA, 25 bp, Homo sapien
gctaagaaagcctaatgtaaacaaa

SEQ ID NO: 1203721 - DNA, 25 bp, Homo sapien
caagaccaagaagagtcgaactaca

SEQ ID NO: 1203722 - DNA, 25 bp, Homo sapien
ggttgggcatacaagggtatctcca

SEQ ID NO: 1203723 - DNA, 25 bp, Homo sapien
tactgttccttgactgagaagaatg

SEQ ID NO: 1203724 - DNA, 25 bp, Homo sapien
cctgcacattcaaattacctggaga

SEQ ID NO: 1203725 - DNA, 25 bp, Homo sapien
ggattactgttgtgctgctaaaaac

SEQ ID NO: 1203726 - DNA, 25 bp, Homo sapien
gtatttgtctcattctacatggcag

SEQ ID NO: 1203727 - DNA, 25 bp, Homo sapien
caatgggaatataggccaataccac

SEQ ID NO: 1203728 - DNA, 25 bp, Homo sapien
taaaagggatggtctagtgcaaagg

SEQ ID NO: 1203729 - DNA, 25 bp, Homo sapien
tatatggactttaaccagacaaacc

SEQ ID NO: 1203730 - DNA, 25 bp, Homo sapien
tagctgggtgaatctcaaacacaag

SEQ ID NO: 1203731 - DNA, 25 bp, Homo sapien
tccaacagatataaacaatgctggg

SEQ ID NO: 1203732 - DNA, 25 bp, Homo sapien
ggacatggcatttcaaaattcccac

SEQ ID NO: 1203733 - DNA, 25 bp, Homo sapien
gaacttgctaccattacgaactatg

SEQ ID NO: 1203734 - DNA, 25 bp, Homo sapien
taatgtaatttaccaggacacactc

SEQ ID NO: 1203735 - DNA, 25 bp, Homo sapien
aataattctgtgtcaaaggatccac

SEQ ID NO: 1203736 - DNA, 25 bp, Homo sapien
gctatgcagatgctcactgaaaagc

SEQ ID NO: 1203737 - DNA, 25 bp, Homo sapien
cagttcttctgtgagtatccattac

SEQ ID NO: 1203738 - DNA, 25 bp, Homo sapien
gaaatagatggccattacacttaga

SEQ ID NO: 1203739 - DNA, 25 bp, Homo sapien
tgtgctaaaacaactgaatgagcca

SEQ ID NO: 1203740 - DNA, 25 bp, Homo sapien
tgagccacaaggaagttcacttgat

SEQ ID NO: 1203741 - DNA, 25 bp, Homo sapien
ccatcttctggtaaaatcaagggac

SEQ ID NO: 1203742 - DNA, 25 bp, Homo sapien
tgggtcatagctggatcataacatc

SEQ ID NO: 1203743 - DNA, 25 bp, Homo sapien
ttatttgcccaaaggctccaggctc

SEQ ID NO: 1203744 - DNA, 25 bp, Homo sapien
tctgtcatgaaaaggtgaggtcact

SEQ ID NO: 1203745 - DNA, 25 bp, Homo sapien
tatttagtccccaatagtggccatg

SEQ ID NO: 1203746 - DNA, 25 bp, Homo sapien
taattgtgccctcctgtatcgtttc

SEQ ID NO: 1203747 - DNA, 25 bp, Homo sapien
tattagagtgagagccctttcgaac

SEQ ID NO: 1203748 - DNA, 25 bp, Homo sapien
tcttgagcggaaacaaacttgtgag

SEQ ID NO: 1203749 - DNA, 25 bp, Homo sapien
catatgtatcagcaaattaaagcca

SEQ ID NO: 1203750 - DNA, 25 bp, Homo sapien
ttcccatatgtatcagcaaattaaa

SEQ ID NO: 1203751 - DNA, 25 bp, Homo sapien
cccatatgtatcagcaaattaaagc

SEQ ID NO: 1203752 - DNA, 25 bp, Homo sapien
ccatatgtatcagcaaattaaagcc

SEQ ID NO: 1203753 - DNA, 25 bp, Homo sapien
gatcccaaggctataacccacaaag

SEQ ID NO: 1203754 - DNA, 25 bp, Homo sapien
aaattgattcctccagctgctacca

SEQ ID NO: 1203755 - DNA, 25 bp, Homo sapien
actataggtctccaaagtaaggcac

SEQ ID NO: 1203756 - DNA, 25 bp, Homo sapien
tatgtggcgctcacgtctttgggag

SEQ ID NO: 1203757 - DNA, 25 bp, Homo sapien
caacagttaggaatgccgtgatgac

SEQ ID NO: 1203758 - DNA, 25 bp, Homo sapien
tccacaggattactttgccacaatg

SEQ ID NO: 1203759 - DNA, 25 bp, Homo sapien
cagccataggttgacagggtatgca

SEQ ID NO: 1203760 - DNA, 25 bp, Homo sapien
tctagaaagagaaactgggtgccct

SEQ ID NO: 1203761 - DNA, 25 bp, Homo sapien
gaaaaacaatcatacaataccatac

SEQ ID NO: 1203762 - DNA, 25 bp, Homo sapien
tacttgccacagtcaaaacttagaa

SEQ ID NO: 1203763 - DNA, 25 bp, Homo sapien
agctaataagaatgtacagtggtac

SEQ ID NO: 1203764 - DNA, 25 bp, Homo sapien
acatctctcatacatagctaataag

SEQ ID NO: 1203765 - DNA, 25 bp, Homo sapien
tgaaccatttaagccatggcaagtg

SEQ ID NO: 1203766 - DNA, 25 bp, Homo sapien
gagggagtacttcatgcaatcacag

SEQ ID NO: 1203767 - DNA, 25 bp, Homo sapien
ggcaagtggaagtcatacatactga

SEQ ID NO: 1203768 - DNA, 25 bp, Homo sapien
taagagatgtgcaatggtcagtcat

SEQ ID NO: 1203769 - DNA, 25 bp, Homo sapien
tctggctggatgcatatgtagagtc

SEQ ID NO: 1203770 - DNA, 25 bp, Homo sapien
gagtctcgtttgaatggcagcagga

SEQ ID NO: 1203771 - DNA, 25 bp, Homo sapien
aagcagtgccttctcatgatgtaac

SEQ ID NO: 1203772 - DNA, 25 bp, Homo sapien
tatttccttatttatgccaacagtt

SEQ ID NO: 1203773 - DNA, 25 bp, Homo sapien
ccaagtgaagcccaatgcaaggaaa

SEQ ID NO: 1203774 - DNA, 25 bp, Homo sapien
ctctgtaatatgacaaagcaaggct

SEQ ID NO: 1203775 - DNA, 25 bp, Homo sapien
ttccttctgacagagcccatccaaa

SEQ ID NO: 1203776 - DNA, 25 bp, Homo sapien
caggcaacattggacacacttatag

SEQ ID NO: 1203777 - DNA, 25 bp, Homo sapien
cttttaagggaattagcacatcctc

SEQ ID NO: 1203778 - DNA, 25 bp, Homo sapien
ataaaagtgatgttgatacaggagc

SEQ ID NO: 1203779 - DNA, 25 bp, Homo sapien
tattcaataagggcccttgtagtta

SEQ ID NO: 1203780 - DNA, 25 bp, Homo sapien
gaatgacaataaaagtgatgttgat

SEQ ID NO: 1203781 - DNA, 25 bp, Homo sapien
tcatctcaccccatatgtatttcaa

SEQ ID NO: 1203782 - DNA, 25 bp, Homo sapien
tgtatttcaacttagcactctcttc

SEQ ID NO: 1203783 - DNA, 25 bp, Homo sapien
taatcataggattcattgctaatct

SEQ ID NO: 1203784 - DNA, 25 bp, Homo sapien
ttgctaatctctccaaatgatgatg

SEQ ID NO: 1203785 - DNA, 25 bp, Homo sapien
aacgagcatgctatttgcacactca

SEQ ID NO: 1203786 - DNA, 25 bp, Homo sapien
agccaagcggtagaatcaacccaaa

SEQ ID NO: 1203787 - DNA, 25 bp, Homo sapien
tgttagcgctctttcatgctgcaag

SEQ ID NO: 1203788 - DNA, 25 bp, Homo sapien
ttcaagcacagcgtctcctcacaaa

SEQ ID NO: 1203789 - DNA, 25 bp, Homo sapien
cagaccactgtaaatggcccagctg

SEQ ID NO: 1203790 - DNA, 25 bp, Homo sapien
tccagctgccttagatgaccagaag

SEQ ID NO: 1203791 - DNA, 25 bp, Homo sapien
gctttcagcggacacacaggaactg

SEQ ID NO: 1203792 - DNA, 25 bp, Homo sapien
cagctgcccgcagataagatagtta

SEQ ID NO: 1203793 - DNA, 25 bp, Homo sapien
ggaggcttcctgaccctagactggg

SEQ ID NO: 1203794 - DNA, 25 bp, Homo sapien
ggagtctgtatagcccaccactgct

SEQ ID NO: 1203795 - DNA, 25 bp, Homo sapien
catgtgccactctctacctggaggt

SEQ ID NO: 1203796 - DNA, 25 bp, Homo sapien
ggaggtacaaccatgtgcagcaaca

SEQ ID NO: 1203797 - DNA, 25 bp, Homo sapien
cttcagcccctgcttgctaaaactg

SEQ ID NO: 1203798 - DNA, 25 bp, Homo sapien
cagcccctgcttgctaaaactgcca

SEQ ID NO: 1203799 - DNA, 25 bp, Homo sapien
gcccctgcttgctaaaactgccagt

SEQ ID NO: 1203800 - DNA, 25 bp, Homo sapien
agcttcagcccctgcttgctaaaac

SEQ ID NO: 1203801 - DNA, 25 bp, Homo sapien
gaaaacagacaaggacatgtcttta

SEQ ID NO: 1203802 - DNA, 25 bp, Homo sapien
caatattataggcatcactatctga

SEQ ID NO: 1203803 - DNA, 25 bp, Homo sapien
tattataggcatcactatctgagag

SEQ ID NO: 1203804 - DNA, 25 bp, Homo sapien
tataggcatcactatctgagagatt

SEQ ID NO: 1203805 - DNA, 25 bp, Homo sapien
attccggacacaatcccacacgtat

SEQ ID NO: 1203806 - DNA, 25 bp, Homo sapien
tccggacacaatcccacacgtatac

SEQ ID NO: 1203807 - DNA, 25 bp, Homo sapien
ttccggacacaatcccacacgtata

SEQ ID NO: 1203808 - DNA, 25 bp, Homo sapien
aattccggacacaatcccacacgta

SEQ ID NO: 1203809 - DNA, 25 bp, Homo sapien
caaaggatgccagtatctattgcag

SEQ ID NO: 1203810 - DNA, 25 bp, Homo sapien
gtcaaagcagctgagtgattggcaa

SEQ ID NO: 1203811 - DNA, 25 bp, Homo sapien
tgattggcaataggcaggcaagaga

SEQ ID NO: 1203812 - DNA, 25 bp, Homo sapien
cagtcatttgccagtataacgtagg

SEQ ID NO: 1203813 - DNA, 25 bp, Homo sapien
ctctgaaggataacatctacaattc

SEQ ID NO: 1203814 - DNA, 25 bp, Homo sapien
gaaggataacatctacaattcccat

SEQ ID NO: 1203815 - DNA, 25 bp, Homo sapien
agtaatgagtaatttctctctgaag

SEQ ID NO: 1203816 - DNA, 25 bp, Homo sapien
tgaaggataacatctacaattccca

SEQ ID NO: 1203817 - DNA, 25 bp, Homo sapien
tcttgatgtcgattgtctcttcatt

SEQ ID NO: 1203818 - DNA, 25 bp, Homo sapien
tcacggtcaatggaactcttgatgt

SEQ ID NO: 1203819 - DNA, 25 bp, Homo sapien
gtcgattgtctcttcatttaccaca

SEQ ID NO: 1203820 - DNA, 25 bp, Homo sapien
agcttcttatcacggtcaatggaac

SEQ ID NO: 1203821 - DNA, 25 bp, Homo sapien
ttggacctagtgtcattcagtagca

SEQ ID NO: 1203822 - DNA, 25 bp, Homo sapien
gcatctgagataacagggagaaaat

SEQ ID NO: 1203823 - DNA, 25 bp, Homo sapien
ccatcctgaatgttgaaaccagcat

SEQ ID NO: 1203824 - DNA, 25 bp, Homo sapien
ttcagtagcatacacaacagtttct

SEQ ID NO: 1203825 - DNA, 25 bp, Homo sapien
ctgtgactagtagtatcaagttatc

SEQ ID NO: 1203826 - DNA, 25 bp, Homo sapien
aatttcattctctgtgactagtagt

SEQ ID NO: 1203827 - DNA, 25 bp, Homo sapien
cattctctgtgactagtagtatcaa

SEQ ID NO: 1203828 - DNA, 25 bp, Homo sapien
tagtagtatcaagttatctctatcc

SEQ ID NO: 1203829 - DNA, 25 bp, Homo sapien
tagcaggggtttcctcaaagatccc

SEQ ID NO: 1203830 - DNA, 25 bp, Homo sapien
taactacaaacagtggctcctttga

SEQ ID NO: 1203831 - DNA, 25 bp, Homo sapien
gcaagccaaccagacagaataggaa

SEQ ID NO: 1203832 - DNA, 25 bp, Homo sapien
gatcccaaataactacaaacagtgg

SEQ ID NO: 1203833 - DNA, 25 bp, Homo sapien
ttggtccagactaaggaaaatctcc

SEQ ID NO: 1203834 - DNA, 25 bp, Homo sapien
gattgattactagctgaccatctgt

SEQ ID NO: 1203835 - DNA, 25 bp, Homo sapien
caataatgggaaggtttggtccaga

SEQ ID NO: 1203836 - DNA, 25 bp, Homo sapien
tagctttgactacaagtcgagggtc

SEQ ID NO: 1203837 - DNA, 25 bp, Homo sapien
gagcatcttcaaaatccttccactt

SEQ ID NO: 1203838 - DNA, 25 bp, Homo sapien
ctgagcatcttcaaaatccttccac

SEQ ID NO: 1203839 - DNA, 25 bp, Homo sapien
gcatcttcaaaatccttccacttca

SEQ ID NO: 1203840 - DNA, 25 bp, Homo sapien
catcttcaaaatccttccacttcat

SEQ ID NO: 1203841 - DNA, 25 bp, Homo sapien
cttgttgcacaatatcatgactcat

SEQ ID NO: 1203842 - DNA, 25 bp, Homo sapien
cctctataagagtccaaagtccaaa

SEQ ID NO: 1203843 - DNA, 25 bp, Homo sapien
attcttgttgcacaatatcatgact

SEQ ID NO: 1203844 - DNA, 25 bp, Homo sapien
cttcctctataagagtccaaagtcc

SEQ ID NO: 1203845 - DNA, 25 bp, Homo sapien
agagcatcagggtcatttaaagcca

SEQ ID NO: 1203846 - DNA, 25 bp, Homo sapien
tgccaagatatgagttctgctttct

SEQ ID NO: 1203847 - DNA, 25 bp, Homo sapien
cctgtttcctgccaagatatgagtt

SEQ ID NO: 1203848 - DNA, 25 bp, Homo sapien
tgaggccagagcatcagggtcattt

SEQ ID NO: 1203849 - DNA, 25 bp, Homo sapien
gctctttggaatacccctaaagcag

SEQ ID NO: 1203850 - DNA, 25 bp, Homo sapien
cctaaagcagcatacttggtgatgt

SEQ ID NO: 1203851 - DNA, 25 bp, Homo sapien
tccggagtgatttcgcagctctttg

SEQ ID NO: 1203852 - DNA, 25 bp, Homo sapien
ctgtgtctccggagtgatttcgcag

SEQ ID NO: 1203853 - DNA, 25 bp, Homo sapien
tactggcctcgtccaatcctgggaa

SEQ ID NO: 1203854 - DNA, 25 bp, Homo sapien
tctgaccaatattatgccaggtgct

SEQ ID NO: 1203855 - DNA, 25 bp, Homo sapien
gaagttgttactagctctctggaat

SEQ ID NO: 1203856 - DNA, 25 bp, Homo sapien
taaggagcttactgaattcatgtcc

SEQ ID NO: 1203857 - DNA, 25 bp, Homo sapien
ggaattccttgtgatacaagcattc

SEQ ID NO: 1203858 - DNA, 25 bp, Homo sapien
aaggaattccttgtgatacaagcat

SEQ ID NO: 1203859 - DNA, 25 bp, Homo sapien
aggaattccttgtgatacaagcatt

SEQ ID NO: 1203860 - DNA, 25 bp, Homo sapien
tgtcatcttctggggggggcgaaat

SEQ ID NO: 1203861 - DNA, 25 bp, Homo sapien
cttcaagaaacttaaggatgtcatc

SEQ ID NO: 1203862 - DNA, 25 bp, Homo sapien
catcttctggggggggcgaaataat

SEQ ID NO: 1203863 - DNA, 25 bp, Homo sapien
tcaagaaacttaaggatgtcatctt

SEQ ID NO: 1203864 - DNA, 25 bp, Homo sapien
gagcaacttgatgccactgacattg

SEQ ID NO: 1203865 - DNA, 25 bp, Homo sapien
tgtttgaaagccagtgatctccatt

SEQ ID NO: 1203866 - DNA, 25 bp, Homo sapien
tatgagcaacttgatgccactgaca

SEQ ID NO: 1203867 - DNA, 25 bp, Homo sapien
tccattgacctgatatatgagcaac

SEQ ID NO: 1203868 - DNA, 25 bp, Homo sapien
acgtctgagccacaaccacataaac

SEQ ID NO: 1203869 - DNA, 25 bp, Homo sapien
gtgacgtctgagccacaaccacata

SEQ ID NO: 1203870 - DNA, 25 bp, Homo sapien
cacaaccacataaacccactgacca

SEQ ID NO: 1203871 - DNA, 25 bp, Homo sapien
agccacaaccacataaacccactga

SEQ ID NO: 1203872 - DNA, 25 bp, Homo sapien
ttgtggaagttccacttccactcac

SEQ ID NO: 1203873 - DNA, 25 bp, Homo sapien
tttgtggaagttccacttccactca

SEQ ID NO: 1203874 - DNA, 25 bp, Homo sapien
tccggcgccatgatgtccgctgaaa

SEQ ID NO: 1203875 - DNA, 25 bp, Homo sapien
tgtgcctgcactaaataaaagctag

SEQ ID NO: 1203876 - DNA, 25 bp, Homo sapien
aactgacctttgatcttccggcgcc

SEQ ID NO: 1203877 - DNA, 25 bp, Homo sapien
tatttcatccgtcggtcagggtctg

SEQ ID NO: 1203878 - DNA, 25 bp, Homo sapien
tgaactcacctagctgatggttgcc

SEQ ID NO: 1203879 - DNA, 25 bp, Homo sapien
gaaaaaggccatccctgacatttca

SEQ ID NO: 1203880 - DNA, 25 bp, Homo sapien
ttcttaccgcggtctacaaggcgct

SEQ ID NO: 1203881 - DNA, 25 bp, Homo sapien
tgttgaagccccacatccatgcaag

SEQ ID NO: 1203882 - DNA, 25 bp, Homo sapien
aagtcttctgctaattcactgctct

SEQ ID NO: 1203883 - DNA, 25 bp, Homo sapien
tccaagtcttctgctaattcactgc

SEQ ID NO: 1203884 - DNA, 25 bp, Homo sapien
caagtcttctgctaattcactgctc

SEQ ID NO: 1203885 - DNA, 25 bp, Homo sapien
gtcttctgctaattcactgctctca

SEQ ID NO: 1203886 - DNA, 25 bp, Homo sapien
ctctaaaagctgaacaataacatta

SEQ ID NO: 1203887 - DNA, 25 bp, Homo sapien
atggcatagagctgtcaagtgtgat

SEQ ID NO: 1203888 - DNA, 25 bp, Homo sapien
taatcgaatgaatggcatagagctg

SEQ ID NO: 1203889 - DNA, 25 bp, Homo sapien
gagctgtcaagtgtgatgctagaaa

SEQ ID NO: 1203890 - DNA, 25 bp, Homo sapien
caagtgtgatgctagaaaattccat

SEQ ID NO: 1203891 - DNA, 25 bp, Homo sapien
gggggaacttaggacatcagctgca

SEQ ID NO: 1203892 - DNA, 25 bp, Homo sapien
tccttgggggaacttaggacatcag

SEQ ID NO: 1203893 - DNA, 25 bp, Homo sapien
atgtgggccaatcttttgcctctac

SEQ ID NO: 1203894 - DNA, 25 bp, Homo sapien
tgggccaatcttttgcctctactct

SEQ ID NO: 1203895 - DNA, 25 bp, Homo sapien
taatgagtatagatgagtctccatt

SEQ ID NO: 1203896 - DNA, 25 bp, Homo sapien
ttaatgagtatagatgagtctccat

SEQ ID NO: 1203897 - DNA, 25 bp, Homo sapien
tgatgtccacagacttcctccaatt

SEQ ID NO: 1203898 - DNA, 25 bp, Homo sapien
ttcatctgatgtccacagacttcct

SEQ ID NO: 1203899 - DNA, 25 bp, Homo sapien
cagtatatagacagcattattcttt

SEQ ID NO: 1203900 - DNA, 25 bp, Homo sapien
tttgcttttaatgagttccttctca

SEQ ID NO: 1203901 - DNA, 25 bp, Homo sapien
tagtatcaagagatattctttgtct

SEQ ID NO: 1203902 - DNA, 25 bp, Homo sapien
tttaatagtatcaagagatattctt

SEQ ID NO: 1203903 - DNA, 25 bp, Homo sapien
taatagtatcaagagatattctttg

SEQ ID NO: 1203904 - DNA, 25 bp, Homo sapien
tatcaagagatattctttgtcttgg

SEQ ID NO: 1203905 - DNA, 25 bp, Homo sapien
gactgcaattgtcgtgtaagctcaa

SEQ ID NO: 1203906 - DNA, 25 bp, Homo sapien
tgtaagctcaattcagtccagacat

SEQ ID NO: 1203907 - DNA, 25 bp, Homo sapien
tggtttgcccgttctgagttgcaga

SEQ ID NO: 1203908 - DNA, 25 bp, Homo sapien
aatcttgactgcaattgtcgtgtaa

SEQ ID NO: 1203909 - DNA, 25 bp, Homo sapien
tgatttccgccaacaaaacagccac

SEQ ID NO: 1203910 - DNA, 25 bp, Homo sapien
actgatttccgccaacaaaacagcc

SEQ ID NO: 1203911 - DNA, 25 bp, Homo sapien
tgcttcaggcatcgtcttgcctctg

SEQ ID NO: 1203912 - DNA, 25 bp, Homo sapien
tctgctgtaaactgaactagacaca

SEQ ID NO: 1203913 - DNA, 25 bp, Homo sapien
aatactgaaataatgatggtcccag

SEQ ID NO: 1203914 - DNA, 25 bp, Homo sapien
tggtcccagagagccatgcacattg

SEQ ID NO: 1203915 - DNA, 25 bp, Homo sapien
gagagccatgcacattgcccaatcc

SEQ ID NO: 1203916 - DNA, 25 bp, Homo sapien
tcagcatttttctccgtgtttgact

SEQ ID NO: 1203917 - DNA, 25 bp, Homo sapien
aacaggctatgctgctggaagttgg

SEQ ID NO: 1203918 - DNA, 25 bp, Homo sapien
ggatagcagtcacccttgggagaga

SEQ ID NO: 1203919 - DNA, 25 bp, Homo sapien
caaaaaacaggctatgctgctggaa

SEQ ID NO: 1203920 - DNA, 25 bp, Homo sapien
ttgggatagcagtcacccttgggag

SEQ ID NO: 1203921 - DNA, 25 bp, Homo sapien
ggtgagcatccatgtctgaagaaag

SEQ ID NO: 1203922 - DNA, 25 bp, Homo sapien
aagccaaaacgggttcataagcact

SEQ ID NO: 1203923 - DNA, 25 bp, Homo sapien
tcaactgttcgctgagcattactac

SEQ ID NO: 1203924 - DNA, 25 bp, Homo sapien
cataagcacttcaggtggcatagtc

SEQ ID NO: 1203925 - DNA, 25 bp, Homo sapien
caaatgcaggcctgaatctccacct

SEQ ID NO: 1203926 - DNA, 25 bp, Homo sapien
ccccttcttgtgatgacagctattc

SEQ ID NO: 1203927 - DNA, 25 bp, Homo sapien
ttcttgggcccccttcttgtgatga

SEQ ID NO: 1203928 - DNA, 25 bp, Homo sapien
ttcttgtgatgacagctattcccat

SEQ ID NO: 1203929 - DNA, 25 bp, Homo sapien
ggcttctccttcacactttagaacc

SEQ ID NO: 1203930 - DNA, 25 bp, Homo sapien
gcaagttgtgcctctatttccaagg

SEQ ID NO: 1203931 - DNA, 25 bp, Homo sapien
tgctttactgtctactttgaggcag

SEQ ID NO: 1203932 - DNA, 25 bp, Homo sapien
cctctatttccaaggcttgggcttc

SEQ ID NO: 1203933 - DNA, 25 bp, Homo sapien
taaaagtgtcatgtaatagttaaaa

SEQ ID NO: 1203934 - DNA, 25 bp, Homo sapien
aaaagtgtcatgtaatagttaaaat

SEQ ID NO: 1203935 - DNA, 25 bp, Homo sapien
ttaaaagtgtcatgtaatagttaaa

SEQ ID NO: 1203936 - DNA, 25 bp, Homo sapien
gagttcaggcagagctcagatcagc

SEQ ID NO: 1203937 - DNA, 25 bp, Homo sapien
gacagaggtttctcggcaggattca

SEQ ID NO: 1203938 - DNA, 25 bp, Homo sapien
caggagggcctcagatggcttcgta

SEQ ID NO: 1203939 - DNA, 25 bp, Homo sapien
tcatgacctagcattggcagtccca

SEQ ID NO: 1203940 - DNA, 25 bp, Homo sapien
cagggagacctaccagtgtcgtaag

SEQ ID NO: 1203941 - DNA, 25 bp, Homo sapien
caagggattgaaaaagcataagcag

SEQ ID NO: 1203942 - DNA, 25 bp, Homo sapien
agcccaagttcccattgctatgaga

SEQ ID NO: 1203943 - DNA, 25 bp, Homo sapien
tctctcagcatatcctcttaccaag

SEQ ID NO: 1203944 - DNA, 25 bp, Homo sapien
tctgttttgcatgagccagccctgc

SEQ ID NO: 1203945 - DNA, 25 bp, Homo sapien
caagaaactagggatgctgaaaagg

SEQ ID NO: 1203946 - DNA, 25 bp, Homo sapien
gaataatccttgatggttgaggcac

SEQ ID NO: 1203947 - DNA, 25 bp, Homo sapien
actgccagagataaattgcccgtat

SEQ ID NO: 1203948 - DNA, 25 bp, Homo sapien
gtagccttcttttggtggcacttcc

SEQ ID NO: 1203949 - DNA, 25 bp, Homo sapien
tgtttcttgtaatcgccatttcccg

SEQ ID NO: 1203950 - DNA, 25 bp, Homo sapien
gagtccctaacaccctgtcatcatg

SEQ ID NO: 1203951 - DNA, 25 bp, Homo sapien
ctccattacagggttgagtgtttca

SEQ ID NO: 1203952 - DNA, 25 bp, Homo sapien
agctgtcctttctttatgttgtgga

SEQ ID NO: 1203953 - DNA, 25 bp, Homo sapien
taaatctggtagggctatggggtca

SEQ ID NO: 1203954 - DNA, 25 bp, Homo sapien
tcatggtaaatctggtagggctatg

SEQ ID NO: 1203955 - DNA, 25 bp, Homo sapien
atggtaaatctggtagggctatggg

SEQ ID NO: 1203956 - DNA, 25 bp, Homo sapien
cgctcgcatcagcagctattggata

SEQ ID NO: 1203957 - DNA, 25 bp, Homo sapien
gcagctattggatatgaaagactcc

SEQ ID NO: 1203958 - DNA, 25 bp, Homo sapien
tcagcagctattggatatgaaagac

SEQ ID NO: 1203959 - DNA, 25 bp, Homo sapien
tcgcatcagcagctattggatatga

SEQ ID NO: 1203960 - DNA, 25 bp, Homo sapien
tcagggacaataacactcttggagc

SEQ ID NO: 1203961 - DNA, 25 bp, Homo sapien
cacaatagtgtaggcctgcaaggat

SEQ ID NO: 1203962 - DNA, 25 bp, Homo sapien
gaaggagctgcctaaggctctttac

SEQ ID NO: 1203963 - DNA, 25 bp, Homo sapien
tacaacagctactacgccattaggc

SEQ ID NO: 1203964 - DNA, 25 bp, Homo sapien
ttgggcctaattctggacattccgt

SEQ ID NO: 1203965 - DNA, 25 bp, Homo sapien
tactaaactcccacatgcatttggg

SEQ ID NO: 1203966 - DNA, 25 bp, Homo sapien
atttgggcctaattctggacattcc

SEQ ID NO: 1203967 - DNA, 25 bp, Homo sapien
ggattatatactaaactcccacatg

SEQ ID NO: 1203968 - DNA, 25 bp, Homo sapien
tgcctgtgttttacttgtcccatct

SEQ ID NO: 1203969 - DNA, 25 bp, Homo sapien
aaatatgtttcatctcttactctga

SEQ ID NO: 1203970 - DNA, 25 bp, Homo sapien
gctgaatacatgtttctacctcact

SEQ ID NO: 1203971 - DNA, 25 bp, Homo sapien
actgcaaagatcaccacgtccaaca

SEQ ID NO: 1203972 - DNA, 25 bp, Homo sapien
gctgtgcaatgcttttcattacttg

SEQ ID NO: 1203973 - DNA, 25 bp, Homo sapien
ttaaagaagtaagctgtgcaatgct

SEQ ID NO: 1203974 - DNA, 25 bp, Homo sapien
gcttttcattacttgccaagccttc

SEQ ID NO: 1203975 - DNA, 25 bp, Homo sapien
cattacttgccaagccttcttttgt

SEQ ID NO: 1203976 - DNA, 25 bp, Homo sapien
cctgcatcacagtgcttgcaagtgg

SEQ ID NO: 1203977 - DNA, 25 bp, Homo sapien
gaactggaagcttttagtggagtta

SEQ ID NO: 1203978 - DNA, 25 bp, Homo sapien
tgaagtaaaagaagaagttcatcca

SEQ ID NO: 1203979 - DNA, 25 bp, Homo sapien
catcacagtgcttgcaagtggtgag

SEQ ID NO: 1203980 - DNA, 25 bp, Homo sapien
tgaagatccagagggaaacctttct

SEQ ID NO: 1203981 - DNA, 25 bp, Homo sapien
gaagatccagagggaaacctttctg

SEQ ID NO: 1203982 - DNA, 25 bp, Homo sapien
cctaggttgttcacactgggccacg

SEQ ID NO: 1203983 - DNA, 25 bp, Homo sapien
gacagcgtatcaccttctaaaactc

SEQ ID NO: 1203984 - DNA, 25 bp, Homo sapien
aagggcatcctttcatgaggccaga

SEQ ID NO: 1203985 - DNA, 25 bp, Homo sapien
tcaacctgcatagaacagacccgag

SEQ ID NO: 1203986 - DNA, 25 bp, Homo sapien
taatttaaggctctggtacacaatg

SEQ ID NO: 1203987 - DNA, 25 bp, Homo sapien
cacaatgttgaagggtcaatcacct

SEQ ID NO: 1203988 - DNA, 25 bp, Homo sapien
tgtttgggctgctaatctgtcttct

SEQ ID NO: 1203989 - DNA, 25 bp, Homo sapien
tatcctggcacccactagacaatac

SEQ ID NO: 1203990 - DNA, 25 bp, Homo sapien
ttaaaactcctttggccagcctgaa

SEQ ID NO: 1203991 - DNA, 25 bp, Homo sapien
ttgctggctcctgaataaacctgct

SEQ ID NO: 1203992 - DNA, 25 bp, Homo sapien
tgcagtttagctgatgccagtcaga

SEQ ID NO: 1203993 - DNA, 25 bp, Homo sapien
ccaccaggaggcctattgcttaaga

SEQ ID NO: 1203994 - DNA, 25 bp, Homo sapien
tgttagtggcaagcacaattcctag

SEQ ID NO: 1203995 - DNA, 25 bp, Homo sapien
taatggccagtgtattagacagtgt

SEQ ID NO: 1203996 - DNA, 25 bp, Homo sapien
taacagtcacatgtgcttaatggcc

SEQ ID NO: 1203997 - DNA, 25 bp, Homo sapien
caattcctagattctggtccagcat

SEQ ID NO: 1203998 - DNA, 25 bp, Homo sapien
cactgggcacatgccgatcgttcca

SEQ ID NO: 1203999 - DNA, 25 bp, Homo sapien
actgggcacatgccgatcgttccat

SEQ ID NO: 1204000 - DNA, 25 bp, Homo sapien
gcactgggcacatgccgatcgttcc

SEQ ID NO: 1204001 - DNA, 25 bp, Homo sapien
ttggagttccctccggttattgtca

SEQ ID NO: 1204002 - DNA, 25 bp, Homo sapien
ggtgacaccaaaacacttggagttc

SEQ ID NO: 1204003 - DNA, 25 bp, Homo sapien
caattgtgtccattgaccacaaaca

SEQ ID NO: 1204004 - DNA, 25 bp, Homo sapien
tgtcaactggttactgcaattgtgt

SEQ ID NO: 1204005 - DNA, 25 bp, Homo sapien
taaatgctgacactgtgactcttat

SEQ ID NO: 1204006 - DNA, 25 bp, Homo sapien
caaatgaagtccacgtaatcactgg

SEQ ID NO: 1204007 - DNA, 25 bp, Homo sapien
tttgataaggttaagaaagcagctg

SEQ ID NO: 1204008 - DNA, 25 bp, Homo sapien
tgggttcctggcagtttctgtacaa

SEQ ID NO: 1204009 - DNA, 25 bp, Homo sapien
tttttcatgacaactttatagcctg

SEQ ID NO: 1204010 - DNA, 25 bp, Homo sapien
tgacaactttatagcctgcaacagg

SEQ ID NO: 1204011 - DNA, 25 bp, Homo sapien
tttcatgacaactttatagcctgca

SEQ ID NO: 1204012 - DNA, 25 bp, Homo sapien
catgacaactttatagcctgcaaca

SEQ ID NO: 1204013 - DNA, 25 bp, Homo sapien
gagaagtttgatcattgaagctttc

SEQ ID NO: 1204014 - DNA, 25 bp, Homo sapien
ctaatgaccagttatttctggtcac

SEQ ID NO: 1204015 - DNA, 25 bp, Homo sapien
aatcattggagctgaatgtaactaa

SEQ ID NO: 1204016 - DNA, 25 bp, Homo sapien
gaatgtaactaatgaccagttattt

SEQ ID NO: 1204017 - DNA, 25 bp, Homo sapien
aagattgtaaatcattggagctgaa

SEQ ID NO: 1204018 - DNA, 25 bp, Homo sapien
gcctctcaaatccaatcctggccat

SEQ ID NO: 1204019 - DNA, 25 bp, Homo sapien
ctgtaataagtctgaatcctgcagc

SEQ ID NO: 1204020 - DNA, 25 bp, Homo sapien
ctgccttcctgcctctcaaatccaa

SEQ ID NO: 1204021 - DNA, 25 bp, Homo sapien
tgtaataagtctgaatcctgcagca

SEQ ID NO: 1204022 - DNA, 25 bp, Homo sapien
taggactgtggactaagatgagatc

SEQ ID NO: 1204023 - DNA, 25 bp, Homo sapien
taaccataggattttctgagcaaca

SEQ ID NO: 1204024 - DNA, 25 bp, Homo sapien
tgtcaactgaatcccaaaagatggc

SEQ ID NO: 1204025 - DNA, 25 bp, Homo sapien
aagaatgcaacaccaagcaacttgt

SEQ ID NO: 1204026 - DNA, 25 bp, Homo sapien
ttggttccaacacctaacactctgg

SEQ ID NO: 1204027 - DNA, 25 bp, Homo sapien
tgcagtaggacaagatcacaaggtt

SEQ ID NO: 1204028 - DNA, 25 bp, Homo sapien
ggatccataggaacgcactgtgcaa

SEQ ID NO: 1204029 - DNA, 25 bp, Homo sapien
taagcattgggaattccagcacaac

SEQ ID NO: 1204030 - DNA, 25 bp, Homo sapien
gttcactgcaacctctgcctcctgg

SEQ ID NO: 1204031 - DNA, 25 bp, Homo sapien
tgggttcaagcaattctcttgcctc

SEQ ID NO: 1204032 - DNA, 25 bp, Homo sapien
ggctagaatgcagtgcgtgatctca

SEQ ID NO: 1204033 - DNA, 25 bp, Homo sapien
cctcgtgatctatcctcctcagctt

SEQ ID NO: 1204034 - DNA, 25 bp, Homo sapien
tgaattccctgaacgtaggtaacta

SEQ ID NO: 1204035 - DNA, 25 bp, Homo sapien
ccctgaacgtaggtaactatccgat

SEQ ID NO: 1204036 - DNA, 25 bp, Homo sapien
taactgcgcagctatcccctgattc

SEQ ID NO: 1204037 - DNA, 25 bp, Homo sapien
actatccgatcttcagttaactgcg

SEQ ID NO: 1204038 - DNA, 25 bp, Homo sapien
gaaaatccaactaggaattcaagcc

SEQ ID NO: 1204039 - DNA, 25 bp, Homo sapien
tgtggaaaatccaactaggaattca

SEQ ID NO: 1204040 - DNA, 25 bp, Homo sapien
ttgtggaaaatccaactaggaattc

SEQ ID NO: 1204041 - DNA, 25 bp, Homo sapien
tggaaaatccaactaggaattcaag

SEQ ID NO: 1204042 - DNA, 25 bp, Homo sapien
gaggccaggtgaagactctacataa

SEQ ID NO: 1204043 - DNA, 25 bp, Homo sapien
tgttttgaggccaggtgaagactct

SEQ ID NO: 1204044 - DNA, 25 bp, Homo sapien
ccaggtgaagactctacataagcac

SEQ ID NO: 1204045 - DNA, 25 bp, Homo sapien
ttttgaggccaggtgaagactctac

SEQ ID NO: 1204046 - DNA, 25 bp, Homo sapien
cagggatcaccacaaatttttcagc

SEQ ID NO: 1204047 - DNA, 25 bp, Homo sapien
cttcagggatcaccacaaatttttc

SEQ ID NO: 1204048 - DNA, 25 bp, Homo sapien
tcagggatcaccacaaatttttcag

SEQ ID NO: 1204049 - DNA, 25 bp, Homo sapien
ttcagggatcaccacaaatttttca

SEQ ID NO: 1204050 - DNA, 25 bp, Homo sapien
acatttttctctgaattttctttca

SEQ ID NO: 1204051 - DNA, 25 bp, Homo sapien
cttttatctaagtccacatttttct

SEQ ID NO: 1204052 - DNA, 25 bp, Homo sapien
tttctctgaattttctttcattctt

SEQ ID NO: 1204053 - DNA, 25 bp, Homo sapien
tttttctctgaattttctttcattc

SEQ ID NO: 1204054 - DNA, 25 bp, Homo sapien
gctcctgctgccattgctaccactg

SEQ ID NO: 1204055 - DNA, 25 bp, Homo sapien
gactgagcaccttcatgtactctaa

SEQ ID NO: 1204056 - DNA, 25 bp, Homo sapien
tcatgtactctaatagcagaataca

SEQ ID NO: 1204057 - DNA, 25 bp, Homo sapien
cccactgccgtcagtgctcctgctg

SEQ ID NO: 1204058 - DNA, 25 bp, Homo sapien
accacagaaggccacattcttgtac

SEQ ID NO: 1204059 - DNA, 25 bp, Homo sapien
caccacagaaggccacattcttgta

SEQ ID NO: 1204060 - DNA, 25 bp, Homo sapien
ctcagacctagagagcctgaaggac

SEQ ID NO: 1204061 - DNA, 25 bp, Homo sapien
ggtcatggagatagccatcttcaca

SEQ ID NO: 1204062 - DNA, 25 bp, Homo sapien
tgggtcatggagatagccatcttca

SEQ ID NO: 1204063 - DNA, 25 bp, Homo sapien
gggtcatggagatagccatcttcac

SEQ ID NO: 1204064 - DNA, 25 bp, Homo sapien
accagtagccttgacaaagccaaga

SEQ ID NO: 1204065 - DNA, 25 bp, Homo sapien
aaaaaagtctcaggtcaaggatgaa

SEQ ID NO: 1204066 - DNA, 25 bp, Homo sapien
ctcaaaaggatacattgatgtcagg

SEQ ID NO: 1204067 - DNA, 25 bp, Homo sapien
tgttaagagatacgataatatactc

SEQ ID NO: 1204068 - DNA, 25 bp, Homo sapien
agctctgtaatgacaacagacactt

SEQ ID NO: 1204069 - DNA, 25 bp, Homo sapien
aagctctgtaatgacaacagacact

SEQ ID NO: 1204070 - DNA, 25 bp, Homo sapien
acaagctctgtaatgacaacagaca

SEQ ID NO: 1204071 - DNA, 25 bp, Homo sapien
caagctctgtaatgacaacagacac

SEQ ID NO: 1204072 - DNA, 25 bp, Homo sapien
taaaggagatttccaatggggcgat

SEQ ID NO: 1204073 - DNA, 25 bp, Homo sapien
ctaaaggagatttccaatggggcga

SEQ ID NO: 1204074 - DNA, 25 bp, Homo sapien
caatggtgatgccaccttcatgctc

SEQ ID NO: 1204075 - DNA, 25 bp, Homo sapien
ggtgatgccaccttcatgctcagca

SEQ ID NO: 1204076 - DNA, 25 bp, Homo sapien
aatggtgatgccaccttcatgctca

SEQ ID NO: 1204077 - DNA, 25 bp, Homo sapien
gatgccaccttcatgctcagcattc

SEQ ID NO: 1204078 - DNA, 25 bp, Homo sapien
tcaataatagtcacatagtacttac

SEQ ID NO: 1204079 - DNA, 25 bp, Homo sapien
ggggcatcaataatagtcacatagt

SEQ ID NO: 1204080 - DNA, 25 bp, Homo sapien
catcaataatagtcacatagtactt

SEQ ID NO: 1204081 - DNA, 25 bp, Homo sapien
ggcatcaataatagtcacatagtac

SEQ ID NO: 1204082 - DNA, 25 bp, Homo sapien
caggacagcagagtcagcctgagat

SEQ ID NO: 1204083 - DNA, 25 bp, Homo sapien
atgtttttgatgaagactctgtgtc

SEQ ID NO: 1204084 - DNA, 25 bp, Homo sapien
cagcaacaatcaggacagcagagtc

SEQ ID NO: 1204085 - DNA, 25 bp, Homo sapien
aacaatcaggacagcagagtcagcc

SEQ ID NO: 1204086 - DNA, 25 bp, Homo sapien
cagagggcatgctctcgtgtctgcc

SEQ ID NO: 1204087 - DNA, 25 bp, Homo sapien
tgtctgcccattcctggggatgcta

SEQ ID NO: 1204088 - DNA, 25 bp, Homo sapien
gtctgcccattcctggggatgctac

SEQ ID NO: 1204089 - DNA, 25 bp, Homo sapien
ttgattgcctcatatctcttctagc

SEQ ID NO: 1204090 - DNA, 25 bp, Homo sapien
attgattgcctcatatctcttctag

SEQ ID NO: 1204091 - DNA, 25 bp, Homo sapien
ctgaattgattgcctcatatctctt

SEQ ID NO: 1204092 - DNA, 25 bp, Homo sapien
gaattgattgcctcatatctcttct

SEQ ID NO: 1204093 - DNA, 25 bp, Homo sapien
ggttgtagccaattttcttaatgaa

SEQ ID NO: 1204094 - DNA, 25 bp, Homo sapien
ctattgtgttggggttgtagccaat

SEQ ID NO: 1204095 - DNA, 25 bp, Homo sapien
ttgtagccaattttcttaatgaagg

SEQ ID NO: 1204096 - DNA, 25 bp, Homo sapien
gtagccaattttcttaatgaaggtg

SEQ ID NO: 1204097 - DNA, 25 bp, Homo sapien
gttgtcaccattccaaccagaaatt

SEQ ID NO: 1204098 - DNA, 25 bp, Homo sapien
tgtcaccattccaaccagaaattgg

SEQ ID NO: 1204099 - DNA, 25 bp, Homo sapien
ttccaaccagaaattggcacaaatg

SEQ ID NO: 1204100 - DNA, 25 bp, Homo sapien
cattccaaccagaaattggcacaaa

SEQ ID NO: 1204101 - DNA, 25 bp, Homo sapien
gtatgttagcagttggctccaacat

SEQ ID NO: 1204102 - DNA, 25 bp, Homo sapien
cacaagagcttgttagttggacgat

SEQ ID NO: 1204103 - DNA, 25 bp, Homo sapien
caagagcttgttagttggacgattt

SEQ ID NO: 1204104 - DNA, 25 bp, Homo sapien
agcttgttagttggacgatttggtg

SEQ ID NO: 1204105 - DNA, 25 bp, Homo sapien
gggaggcaggcacaagagcttgtta

SEQ ID NO: 1204106 - DNA, 25 bp, Homo sapien
aacattgccacaacaaacgtccttg

SEQ ID NO: 1204107 - DNA, 25 bp, Homo sapien
caacattgccacaacaaacgtcctt

SEQ ID NO: 1204108 - DNA, 25 bp, Homo sapien
tgcatgcaacgtgaaccatgtggct

SEQ ID NO: 1204109 - DNA, 25 bp, Homo sapien
gcatgcaacgtgaaccatgtggcta

SEQ ID NO: 1204110 - DNA, 25 bp, Homo sapien
atagtctgataaactctcaacacaa

SEQ ID NO: 1204111 - DNA, 25 bp, Homo sapien
tagccttctgggcagactaggtgac

SEQ ID NO: 1204112 - DNA, 25 bp, Homo sapien
gccttctgggcagactaggtgactt

SEQ ID NO: 1204113 - DNA, 25 bp, Homo sapien
ttagccttctgggcagactaggtga

SEQ ID NO: 1204114 - DNA, 25 bp, Homo sapien
ccttctgggcagactaggtgacttt

SEQ ID NO: 1204115 - DNA, 25 bp, Homo sapien
taaacattcttagtgggtctcaaaa

SEQ ID NO: 1204116 - DNA, 25 bp, Homo sapien
aacattcttagtgggtctcaaaatt

SEQ ID NO: 1204117 - DNA, 25 bp, Homo sapien
tcattaaacattcttagtgggtctc

SEQ ID NO: 1204118 - DNA, 25 bp, Homo sapien
cattaaacattcttagtgggtctca

SEQ ID NO: 1204119 - DNA, 25 bp, Homo sapien
attcataacattgttacatgctttc

SEQ ID NO: 1204120 - DNA, 25 bp, Homo sapien
gaaaatgttatcagaggtctcaaac

SEQ ID NO: 1204121 - DNA, 25 bp, Homo sapien
ttacatgctttcaaatctattcctt

SEQ ID NO: 1204122 - DNA, 25 bp, Homo sapien
gctttcaaatctattcctttatgaa

SEQ ID NO: 1204123 - DNA, 25 bp, Homo sapien
tctttggtggaaaaagcactctgca

SEQ ID NO: 1204124 - DNA, 25 bp, Homo sapien
ctttggtggaaaaagcactctgcac

SEQ ID NO: 1204125 - DNA, 25 bp, Homo sapien
gatattgaagattcccataacccca

SEQ ID NO: 1204126 - DNA, 25 bp, Homo sapien
aaggagacacatcttgccaatgatt

SEQ ID NO: 1204127 - DNA, 25 bp, Homo sapien
caaaagacagatggcattgaggagg

SEQ ID NO: 1204128 - DNA, 25 bp, Homo sapien
tgactaacatcagggagaccaaaca

SEQ ID NO: 1204129 - DNA, 25 bp, Homo sapien
atgtgacatgtgttgcacctcctca

SEQ ID NO: 1204130 - DNA, 25 bp, Homo sapien
aatgtgacatgtgttgcacctcctc

SEQ ID NO: 1204131 - DNA, 25 bp, Homo sapien
cagcaaaactccaattttggttccg

SEQ ID NO: 1204132 - DNA, 25 bp, Homo sapien
actccagggtgacaatggtttcttt

SEQ ID NO: 1204133 - DNA, 25 bp, Homo sapien
tcatagctctagataccagatgtct

SEQ ID NO: 1204134 - DNA, 25 bp, Homo sapien
tagctgccacaagaaatggcctcaa

SEQ ID NO: 1204135 - DNA, 25 bp, Homo sapien
ttcaaccgtgtataaaaatattcca

SEQ ID NO: 1204136 - DNA, 25 bp, Homo sapien
catattgtagataatctagaggtga

SEQ ID NO: 1204137 - DNA, 25 bp, Homo sapien
gatgaccctttgtatctgcacattc

SEQ ID NO: 1204138 - DNA, 25 bp, Homo sapien
ttttagaataatacagatgaccctt

SEQ ID NO: 1204139 - DNA, 25 bp, Homo sapien
tgtgtggtccagtcctctcaagaga

SEQ ID NO: 1204140 - DNA, 25 bp, Homo sapien
ccggattatacagccacttgagcat

SEQ ID NO: 1204141 - DNA, 25 bp, Homo sapien
cctctcaagagaaccggattataca

SEQ ID NO: 1204142 - DNA, 25 bp, Homo sapien
atatagcaaatcgaatgtgtggtcc

SEQ ID NO: 1204143 - DNA, 25 bp, Homo sapien
cctgtagcagcacagtaaatgtgat

SEQ ID NO: 1204144 - DNA, 25 bp, Homo sapien
tcaagttccctgtagcagcacagta

SEQ ID NO: 1204145 - DNA, 25 bp, Homo sapien
tccctgtagcagcacagtaaatgtg

SEQ ID NO: 1204146 - DNA, 25 bp, Homo sapien
aagttccctgtagcagcacagtaaa

SEQ ID NO: 1204147 - DNA, 25 bp, Homo sapien
tgtcattgaggacagcctctgtatg

SEQ ID NO: 1204148 - DNA, 25 bp, Homo sapien
gggttcacaccaaatacgcagtctg

SEQ ID NO: 1204149 - DNA, 25 bp, Homo sapien
tcaaagatccaagatttagtaatct

SEQ ID NO: 1204150 - DNA, 25 bp, Homo sapien
gtctgttccactgtagttagtcttg

SEQ ID NO: 1204151 - DNA, 25 bp, Homo sapien
ttttatcaggtcttggggatgcctg

SEQ ID NO: 1204152 - DNA, 25 bp, Homo sapien
tatcaggtcttggggatgcctgacc

SEQ ID NO: 1204153 - DNA, 25 bp, Homo sapien
tcaggtcttggggatgcctgaccat

SEQ ID NO: 1204154 - DNA, 25 bp, Homo sapien
ttatcaggtcttggggatgcctgac

SEQ ID NO: 1204155 - DNA, 25 bp, Homo sapien
gcttctgcagacgtcttggccatgg

SEQ ID NO: 1204156 - DNA, 25 bp, Homo sapien
gagcttctgcagacgtcttggccat

SEQ ID NO: 1204157 - DNA, 25 bp, Homo sapien
gcagagcttctgcagacgtcttggc

SEQ ID NO: 1204158 - DNA, 25 bp, Homo sapien
agcttctgcagacgtcttggccatg

SEQ ID NO: 1204159 - DNA, 25 bp, Homo sapien
ccttttccatgccttctttgcggat

SEQ ID NO: 1204160 - DNA, 25 bp, Homo sapien
gcagatccttttccatgccttcttt

SEQ ID NO: 1204161 - DNA, 25 bp, Homo sapien
ctgcagatccttttccatgccttct

SEQ ID NO: 1204162 - DNA, 25 bp, Homo sapien
tccatgccttctttgcggatttcca

SEQ ID NO: 1204163 - DNA, 25 bp, Homo sapien
tgctgctgccaacagtaagtgcccg

SEQ ID NO: 1204164 - DNA, 25 bp, Homo sapien
gccaacagtaagtgcccggtgctag

SEQ ID NO: 1204165 - DNA, 25 bp, Homo sapien
ccggtgctagccctaattgacctac

SEQ ID NO: 1204166 - DNA, 25 bp, Homo sapien
gtaagtgcccggtgctagccctaat

SEQ ID NO: 1204167 - DNA, 25 bp, Homo sapien
catccaaaagcttgaacatctgctg

SEQ ID NO: 1204168 - DNA, 25 bp, Homo sapien
tcatccaaaagcttgaacatctgct

SEQ ID NO: 1204169 - DNA, 25 bp, Homo sapien
tcaaaaacttgggacttcataagcc

SEQ ID NO: 1204170 - DNA, 25 bp, Homo sapien
gagtatctcaggcacttaatccaag

SEQ ID NO: 1204171 - DNA, 25 bp, Homo sapien
tctttggagcaattcaggcataact

SEQ ID NO: 1204172 - DNA, 25 bp, Homo sapien
gatggtttgcatgttcctataaagg

SEQ ID NO: 1204173 - DNA, 25 bp, Homo sapien
cccatcatgatataccatagtcact

SEQ ID NO: 1204174 - DNA, 25 bp, Homo sapien
tgaactctagaataccccatcatga

SEQ ID NO: 1204175 - DNA, 25 bp, Homo sapien
aaacaaccatatgcaatgagactcc

SEQ ID NO: 1204176 - DNA, 25 bp, Homo sapien
cgcagtgtaactataggttggtgca

SEQ ID NO: 1204177 - DNA, 25 bp, Homo sapien
ttaattcacgtagcggatgggggca

SEQ ID NO: 1204178 - DNA, 25 bp, Homo sapien
atgggggcaagtttggtgctatcaa

SEQ ID NO: 1204179 - DNA, 25 bp, Homo sapien
agtttggtgctatcaaattttatgg

SEQ ID NO: 1204180 - DNA, 25 bp, Homo sapien
gggcaagtttggtgctatcaaattt

SEQ ID NO: 1204181 - DNA, 25 bp, Homo sapien
tcaaatctgattcaggatagccttc

SEQ ID NO: 1204182 - DNA, 25 bp, Homo sapien
aggatagccttctgtagacgttgaa

SEQ ID NO: 1204183 - DNA, 25 bp, Homo sapien
tagacgttgaatgtgaccacaaaaa

SEQ ID NO: 1204184 - DNA, 25 bp, Homo sapien
tgacagcagtaacatctgtctccag

SEQ ID NO: 1204185 - DNA, 25 bp, Homo sapien
tcagtccaagcaaaattcaccgcca

SEQ ID NO: 1204186 - DNA, 25 bp, Homo sapien
tcaccgccaagttcaatactaacag

SEQ ID NO: 1204187 - DNA, 25 bp, Homo sapien
aaaattcaccgccaagttcaatact

SEQ ID NO: 1204188 - DNA, 25 bp, Homo sapien
tgctgctgacttttatcagtccaag

SEQ ID NO: 1204189 - DNA, 25 bp, Homo sapien
aatgtcgttaggctccaatgtagac

SEQ ID NO: 1204190 - DNA, 25 bp, Homo sapien
catatgaagaatgtcgttaggctcc

SEQ ID NO: 1204191 - DNA, 25 bp, Homo sapien
ttaggctccaatgtagacacagctc

SEQ ID NO: 1204192 - DNA, 25 bp, Homo sapien
tatgccatatgaagaatgtcgttag

SEQ ID NO: 1204193 - DNA, 25 bp, Homo sapien
ttaagctttgttggcagtgttgtag

SEQ ID NO: 1204194 - DNA, 25 bp, Homo sapien
gttgcatgatacgacactgttaagc

SEQ ID NO: 1204195 - DNA, 25 bp, Homo sapien
ttggcagtgttgtagaggctcctct

SEQ ID NO: 1204196 - DNA, 25 bp, Homo sapien
tcacagtgatcaagacaagggatca

SEQ ID NO: 1204197 - DNA, 25 bp, Homo sapien
aaaggattaagggcggctctgccat

SEQ ID NO: 1204198 - DNA, 25 bp, Homo sapien
aggattaagggcggctctgccatcc

SEQ ID NO: 1204199 - DNA, 25 bp, Homo sapien
caaaaggattaagggcggctctgcc

SEQ ID NO: 1204200 - DNA, 25 bp, Homo sapien
agcaaaaggattaagggcggctctg

SEQ ID NO: 1204201 - DNA, 25 bp, Homo sapien
atgcatattccttatgtattaaaat

SEQ ID NO: 1204202 - DNA, 25 bp, Homo sapien
catgcatattccttatgtattaaaa

SEQ ID NO: 1204203 - DNA, 25 bp, Homo sapien
tcatgcatattccttatgtattaaa

SEQ ID NO: 1204204 - DNA, 25 bp, Homo sapien
cgtcttgatttgcaaacagagccat

SEQ ID NO: 1204205 - DNA, 25 bp, Homo sapien
aatcgtcttgatttgcaaacagagc

SEQ ID NO: 1204206 - DNA, 25 bp, Homo sapien
caagcaatcgtcttgatttgcaaac

SEQ ID NO: 1204207 - DNA, 25 bp, Homo sapien
tgttcaagcaatcgtcttgatttgc

SEQ ID NO: 1204208 - DNA, 25 bp, Homo sapien
ttttactagctttggactgcctgcc

SEQ ID NO: 1204209 - DNA, 25 bp, Homo sapien
ctattcagtgtgttcgagttttggt

SEQ ID NO: 1204210 - DNA, 25 bp, Homo sapien
tctgagagcagaaaaatagcactat

SEQ ID NO: 1204211 - DNA, 25 bp, Homo sapien
gaatgagtccctaacagtaaagtca

SEQ ID NO: 1204212 - DNA, 25 bp, Homo sapien
tgaggaaagccttgtaaagccttta

SEQ ID NO: 1204213 - DNA, 25 bp, Homo sapien
tttataagcaaggtgaggaaagcct

SEQ ID NO: 1204214 - DNA, 25 bp, Homo sapien
cgtaagactcaatggcccttcttta

SEQ ID NO: 1204215 - DNA, 25 bp, Homo sapien
caatggcccttctttataagcaagg

SEQ ID NO: 1204216 - DNA, 25 bp, Homo sapien
aactttgcatctgacactcttgcca

SEQ ID NO: 1204217 - DNA, 25 bp, Homo sapien
tgccagtgttcagcaactttgcatc

SEQ ID NO: 1204218 - DNA, 25 bp, Homo sapien
gcaactttgcatctgacactcttgc

SEQ ID NO: 1204219 - DNA, 25 bp, Homo sapien
tagagctgccagtgttcagcaactt

SEQ ID NO: 1204220 - DNA, 25 bp, Homo sapien
tcaggagaaacgcttcaccagagcg

SEQ ID NO: 1204221 - DNA, 25 bp, Homo sapien
tcaccagagcgttcccggattggag

SEQ ID NO: 1204222 - DNA, 25 bp, Homo sapien
caaattgacagtattcaggagaaac

SEQ ID NO: 1204223 - DNA, 25 bp, Homo sapien
cacccacaagggttaaccgaatgtg

SEQ ID NO: 1204224 - DNA, 25 bp, Homo sapien
tctgaacatcaagagctgtaggctt

SEQ ID NO: 1204225 - DNA, 25 bp, Homo sapien
tgtatggtaaggcttcaaaagtgca

SEQ ID NO: 1204226 - DNA, 25 bp, Homo sapien
taaagggccgctgtcatcaaggaca

SEQ ID NO: 1204227 - DNA, 25 bp, Homo sapien
cagctgtcctgtctagagcagcagt

SEQ ID NO: 1204228 - DNA, 25 bp, Homo sapien
gctagaagaatgttactcatcgcag

SEQ ID NO: 1204229 - DNA, 25 bp, Homo sapien
cccgttatggcaccacttgtaatag

SEQ ID NO: 1204230 - DNA, 25 bp, Homo sapien
tcatcgcagctgacccaactatagc

SEQ ID NO: 1204231 - DNA, 25 bp, Homo sapien
tatggcaccacttgtaatagagttc

SEQ ID NO: 1204232 - DNA, 25 bp, Homo sapien
gcagtctatcttcttctgagaattc

SEQ ID NO: 1204233 - DNA, 25 bp, Homo sapien
tgagttcccgtgaagaccagttcag

SEQ ID NO: 1204234 - DNA, 25 bp, Homo sapien
cagttcagcgagcagtctagcagtc

SEQ ID NO: 1204235 - DNA, 25 bp, Homo sapien
tctagcagtctatcttcttctgaga

SEQ ID NO: 1204236 - DNA, 25 bp, Homo sapien
tactcaacttcatagtagcctctat

SEQ ID NO: 1204237 - DNA, 25 bp, Homo sapien
ttactcaacttcatagtagcctcta

SEQ ID NO: 1204238 - DNA, 25 bp, Homo sapien
ctcaacttcatagtagcctctattt

SEQ ID NO: 1204239 - DNA, 25 bp, Homo sapien
actcaacttcatagtagcctctatt

SEQ ID NO: 1204240 - DNA, 25 bp, Homo sapien
tcagaccttctctaagtcggagaaa

SEQ ID NO: 1204241 - DNA, 25 bp, Homo sapien
gaccttctctaagtcggagaaatgg

SEQ ID NO: 1204242 - DNA, 25 bp, Homo sapien
gagaaatggatgtaatgacctccag

SEQ ID NO: 1204243 - DNA, 25 bp, Homo sapien
tctctaagtcggagaaatggatgta

SEQ ID NO: 1204244 - DNA, 25 bp, Homo sapien
ggatgtatttatgcatttcatcaaa

SEQ ID NO: 1204245 - DNA, 25 bp, Homo sapien
atgtatttatgcatttcatcaaaga

SEQ ID NO: 1204246 - DNA, 25 bp, Homo sapien
caaaaacctcttgactttgctgtac

SEQ ID NO: 1204247 - DNA, 25 bp, Homo sapien
taagaatcagggcaaaatcctgcag

SEQ ID NO: 1204248 - DNA, 25 bp, Homo sapien
ctttcaggctcaaggtatttggata

SEQ ID NO: 1204249 - DNA, 25 bp, Homo sapien
tttcaccattttatcggcaatcagt

SEQ ID NO: 1204250 - DNA, 25 bp, Homo sapien
cagtataggatttcttggttgaaac

SEQ ID NO: 1204251 - DNA, 25 bp, Homo sapien
cggcaatcagtataggatttcttgg

SEQ ID NO: 1204252 - DNA, 25 bp, Homo sapien
catgcaggcactccaagtacttcac

SEQ ID NO: 1204253 - DNA, 25 bp, Homo sapien
catgcattagtaaatgcgtttctac

SEQ ID NO: 1204254 - DNA, 25 bp, Homo sapien
acatcaaggctattgcaacatcttc

SEQ ID NO: 1204255 - DNA, 25 bp, Homo sapien
ttctagcctttagacttctcaagca

SEQ ID NO: 1204256 - DNA, 25 bp, Homo sapien
gctttagctataatctggacagcca

SEQ ID NO: 1204257 - DNA, 25 bp, Homo sapien
ctttagctataatctggacagccat

SEQ ID NO: 1204258 - DNA, 25 bp, Homo sapien
catcatactggtcctcaattaaccg

SEQ ID NO: 1204259 - DNA, 25 bp, Homo sapien
ggtcctcaattaaccgaacatattc

SEQ ID NO: 1204260 - DNA, 25 bp, Homo sapien
catactggtcctcaattaaccgaac

SEQ ID NO: 1204261 - DNA, 25 bp, Homo sapien
tactggtcctcaattaaccgaacat

SEQ ID NO: 1204262 - DNA, 25 bp, Homo sapien
ttgcagtttgggccagctttaacac

SEQ ID NO: 1204263 - DNA, 25 bp, Homo sapien
ttaacaccttttcattttgcagcat

SEQ ID NO: 1204264 - DNA, 25 bp, Homo sapien
tttaacaccttttcattttgcagca

SEQ ID NO: 1204265 - DNA, 25 bp, Homo sapien
cagtttgggccagctttaacacctt

SEQ ID NO: 1204266 - DNA, 25 bp, Homo sapien
ctgctctttcctctagagatgtagg

SEQ ID NO: 1204267 - DNA, 25 bp, Homo sapien
acagtgactggcgaaaagtgctcgt

SEQ ID NO: 1204268 - DNA, 25 bp, Homo sapien
gctcgtattaaagtttgcttttcta

SEQ ID NO: 1204269 - DNA, 25 bp, Homo sapien
tgctctttcctctagagatgtaggc

SEQ ID NO: 1204270 - DNA, 25 bp, Homo sapien
agttggtctttctgcatgatccttc

SEQ ID NO: 1204271 - DNA, 25 bp, Homo sapien
gttggtctttctgcatgatccttca

SEQ ID NO: 1204272 - DNA, 25 bp, Homo sapien
ttggtctttctgcatgatccttcat

SEQ ID NO: 1204273 - DNA, 25 bp, Homo sapien
aagttggtctttctgcatgatcctt

SEQ ID NO: 1204274 - DNA, 25 bp, Homo sapien
gagcagcaactgagtccaggaactc

SEQ ID NO: 1204275 - DNA, 25 bp, Homo sapien
cgagcagcaactgagtccaggaact

SEQ ID NO: 1204276 - DNA, 25 bp, Homo sapien
cagcaactgagtccaggaactcttt

SEQ ID NO: 1204277 - DNA, 25 bp, Homo sapien
ctgatcgagcagcaactgagtccag

SEQ ID NO: 1204278 - DNA, 25 bp, Homo sapien
ttacaatcatcctccataaccttga

SEQ ID NO: 1204279 - DNA, 25 bp, Homo sapien
ctccataaccttgaataagggcgaa

SEQ ID NO: 1204280 - DNA, 25 bp, Homo sapien
gaataagggcgaatctgtatttcta

SEQ ID NO: 1204281 - DNA, 25 bp, Homo sapien
tatattacaatcatcctccataacc

SEQ ID NO: 1204282 - DNA, 25 bp, Homo sapien
tttcttccgaaatgacggtgacagc

SEQ ID NO: 1204283 - DNA, 25 bp, Homo sapien
tcttccgaaatgacggtgacagctg

SEQ ID NO: 1204284 - DNA, 25 bp, Homo sapien
ttcttccgaaatgacggtgacagct

SEQ ID NO: 1204285 - DNA, 25 bp, Homo sapien
tagacctatgttcgatttcatacat

SEQ ID NO: 1204286 - DNA, 25 bp, Homo sapien
tctttagccttagacctatgttcga

SEQ ID NO: 1204287 - DNA, 25 bp, Homo sapien
tctatctttagccttagacctatgt

SEQ ID NO: 1204288 - DNA, 25 bp, Homo sapien
tagccttagacctatgttcgatttc

SEQ ID NO: 1204289 - DNA, 25 bp, Homo sapien
tttgtgaactggacatttccaattc

SEQ ID NO: 1204290 - DNA, 25 bp, Homo sapien
cactatcttaaccatccatgtggac

SEQ ID NO: 1204291 - DNA, 25 bp, Homo sapien
tatttgcacataagtacgtaacagc

SEQ ID NO: 1204292 - DNA, 25 bp, Homo sapien
ggaataagatttgcatattgaacca

SEQ ID NO: 1204293 - DNA, 25 bp, Homo sapien
cagacagccaaatgttgcttcaact

SEQ ID NO: 1204294 - DNA, 25 bp, Homo sapien
tgcttcaacttctataattgtgatg

SEQ ID NO: 1204295 - DNA, 25 bp, Homo sapien
ccccagtaaatcattgggtctctgg

SEQ ID NO: 1204296 - DNA, 25 bp, Homo sapien
gatgtcttgtaagcatgagccccag

SEQ ID NO: 1204297 - DNA, 25 bp, Homo sapien
gccaggttttgttctgaggctttct

SEQ ID NO: 1204298 - DNA, 25 bp, Homo sapien
gaggctttcttgattttgctgcatt

SEQ ID NO: 1204299 - DNA, 25 bp, Homo sapien
tttgctgcatttcatcaatatttac

SEQ ID NO: 1204300 - DNA, 25 bp, Homo sapien
tatttgccaggttttgttctgaggc

SEQ ID NO: 1204301 - DNA, 25 bp, Homo sapien
cagcagcaaagtcatgaggtcccag

SEQ ID NO: 1204302 - DNA, 25 bp, Homo sapien
ggttatatgtatccagaaagttgtc

SEQ ID NO: 1204303 - DNA, 25 bp, Homo sapien
taattagtttgagtagaactgctat

SEQ ID NO: 1204304 - DNA, 25 bp, Homo sapien
gtagccactaatgattctgtcacta

SEQ ID NO: 1204305 - DNA, 25 bp, Homo sapien
gtgactgtatccacaggtgctgcct

SEQ ID NO: 1204306 - DNA, 25 bp, Homo sapien
tgctgtggaagacactctggacccc

SEQ ID NO: 1204307 - DNA, 25 bp, Homo sapien
cctgagcaagtgtgaagggccttca

SEQ ID NO: 1204308 - DNA, 25 bp, Homo sapien
ggctgctggtgactgtatccacagg

SEQ ID NO: 1204309 - DNA, 25 bp, Homo sapien
atcaggcaggctttgttgtcttctg

SEQ ID NO: 1204310 - DNA, 25 bp, Homo sapien
ggttggagttggtcaatgagaccac

SEQ ID NO: 1204311 - DNA, 25 bp, Homo sapien
tctggttggagttggtcaatgagac

SEQ ID NO: 1204312 - DNA, 25 bp, Homo sapien
ttgtcttctggttggagttggtcaa

SEQ ID NO: 1204313 - DNA, 25 bp, Homo sapien
ctgcaacaacagggacaacattttc

SEQ ID NO: 1204314 - DNA, 25 bp, Homo sapien
aacaacagggacaacattttctcct

SEQ ID NO: 1204315 - DNA, 25 bp, Homo sapien
tttctcctgttttgtcaaaagagat

SEQ ID NO: 1204316 - DNA, 25 bp, Homo sapien
gcaacaacagggacaacattttctc

SEQ ID NO: 1204317 - DNA, 25 bp, Homo sapien
catttagccctggcaacagcttcat

SEQ ID NO: 1204318 - DNA, 25 bp, Homo sapien
ttcaagtgtggaaacagacttgttc

SEQ ID NO: 1204319 - DNA, 25 bp, Homo sapien
tacactgttcaagtgtggaaacaga

SEQ ID NO: 1204320 - DNA, 25 bp, Homo sapien
cactgttcaagtgtggaaacagact

SEQ ID NO: 1204321 - DNA, 25 bp, Homo sapien
caagtgtggaaacagacttgttcat

SEQ ID NO: 1204322 - DNA, 25 bp, Homo sapien
tcatctgatgtcttgatgtcaagta

SEQ ID NO: 1204323 - DNA, 25 bp, Homo sapien
cttgatgtcaagtattcttcttgcc

SEQ ID NO: 1204324 - DNA, 25 bp, Homo sapien
tattcttcttgccaactcattcgta

SEQ ID NO: 1204325 - DNA, 25 bp, Homo sapien
cttcttgccaactcattcgtatttc

SEQ ID NO: 1204326 - DNA, 25 bp, Homo sapien
gactgttttgagaccacctgaagca

SEQ ID NO: 1204327 - DNA, 25 bp, Homo sapien
gcaaaaacactcttaatctgatctt

SEQ ID NO: 1204328 - DNA, 25 bp, Homo sapien
caccacctgaccgatgactgttttg

SEQ ID NO: 1204329 - DNA, 25 bp, Homo sapien
tctttactagtatgctggctgctga

SEQ ID NO: 1204330 - DNA, 25 bp, Homo sapien
tctaaggtgggcactgagaagtatg

SEQ ID NO: 1204331 - DNA, 25 bp, Homo sapien
cagtaagcttcgtggctgtatctaa

SEQ ID NO: 1204332 - DNA, 25 bp, Homo sapien
ttacataacccgtataacctatgtc

SEQ ID NO: 1204333 - DNA, 25 bp, Homo sapien
agtatgactgtcttgatggttacat

SEQ ID NO: 1204334 - DNA, 25 bp, Homo sapien
tcatagatctatggattcattttca

SEQ ID NO: 1204335 - DNA, 25 bp, Homo sapien
gatctatggattcattttcatactg

SEQ ID NO: 1204336 - DNA, 25 bp, Homo sapien
tagatctatggattcattttcatac

SEQ ID NO: 1204337 - DNA, 25 bp, Homo sapien
catagatctatggattcattttcat

SEQ ID NO: 1204338 - DNA, 25 bp, Homo sapien
gacccagcaaatcatggtttttccc

SEQ ID NO: 1204339 - DNA, 25 bp, Homo sapien
tgacccagcaaatcatggtttttcc

SEQ ID NO: 1204340 - DNA, 25 bp, Homo sapien
ttcccttgattctgccatcagacct

SEQ ID NO: 1204341 - DNA, 25 bp, Homo sapien
ctgagtagtcgcttcacacaggtgc

SEQ ID NO: 1204342 - DNA, 25 bp, Homo sapien
tttgaaagaagtccgccaccagaga

SEQ ID NO: 1204343 - DNA, 25 bp, Homo sapien
ctgggaagctgagtagtcgcttcac

SEQ ID NO: 1204344 - DNA, 25 bp, Homo sapien
gcactttaatagctccttgaaagtc

SEQ ID NO: 1204345 - DNA, 25 bp, Homo sapien
cttccttagtaaagtgagtgcaggc

SEQ ID NO: 1204346 - DNA, 25 bp, Homo sapien
caggcagtaagtcagcaaatcccca

SEQ ID NO: 1204347 - DNA, 25 bp, Homo sapien
tgccctgcaggaatcacaatcttca

SEQ ID NO: 1204348 - DNA, 25 bp, Homo sapien
aagatggacaagacaatcccctgcc

SEQ ID NO: 1204349 - DNA, 25 bp, Homo sapien
ttccacaaaaatttccgcataacac

SEQ ID NO: 1204350 - DNA, 25 bp, Homo sapien
ccacaaaaatttccgcataacacat

SEQ ID NO: 1204351 - DNA, 25 bp, Homo sapien
cttccacaaaaatttccgcataaca

SEQ ID NO: 1204352 - DNA, 25 bp, Homo sapien
tccacaaaaatttccgcataacaca

SEQ ID NO: 1204353 - DNA, 25 bp, Homo sapien
ttcccactcatgaatttgccttttt

SEQ ID NO: 1204354 - DNA, 25 bp, Homo sapien
caaaggtagaagaatgagctgcaga

SEQ ID NO: 1204355 - DNA, 25 bp, Homo sapien
tcaagcatcctcaaaggtagaagaa

SEQ ID NO: 1204356 - DNA, 25 bp, Homo sapien
agaagaatgagctgcagataagatg

SEQ ID NO: 1204357 - DNA, 25 bp, Homo sapien
cagtgtttcacaatgaggtcctcag

SEQ ID NO: 1204358 - DNA, 25 bp, Homo sapien
taacctgtggaaacctgcttcagtg

SEQ ID NO: 1204359 - DNA, 25 bp, Homo sapien
ttaaagtggctctgtattcctgacc

SEQ ID NO: 1204360 - DNA, 25 bp, Homo sapien
gcctgtagtatgctggcatcaaaaa

SEQ ID NO: 1204361 - DNA, 25 bp, Homo sapien
tggctttaaatcctttccacaaata

SEQ ID NO: 1204362 - DNA, 25 bp, Homo sapien
tccacaaataagctttaagttctgc

SEQ ID NO: 1204363 - DNA, 25 bp, Homo sapien
tattcatggttatgctggctttaaa

SEQ ID NO: 1204364 - DNA, 25 bp, Homo sapien
ttgtcttattcatggttatgctggc

SEQ ID NO: 1204365 - DNA, 25 bp, Homo sapien
cttctgggcccttgttcacttgctc

SEQ ID NO: 1204366 - DNA, 25 bp, Homo sapien
tcttctgggcccttgttcacttgct

SEQ ID NO: 1204367 - DNA, 25 bp, Homo sapien
gtcttctgggcccttgttcacttgc

SEQ ID NO: 1204368 - DNA, 25 bp, Homo sapien
ctgtcttctgggcccttgttcactt

SEQ ID NO: 1204369 - DNA, 25 bp, Homo sapien
ttgtttacattcttcctgaatatac

SEQ ID NO: 1204370 - DNA, 25 bp, Homo sapien
ttacattcttcctgaatatacaaca

SEQ ID NO: 1204371 - DNA, 25 bp, Homo sapien
tacattcttcctgaatatacaacaa

SEQ ID NO: 1204372 - DNA, 25 bp, Homo sapien
gtttacattcttcctgaatatacaa

SEQ ID NO: 1204373 - DNA, 25 bp, Homo sapien
gaaacaaatggagtactggtgacaa

SEQ ID NO: 1204374 - DNA, 25 bp, Homo sapien
tgggccaaaactggactgaagaaac

SEQ ID NO: 1204375 - DNA, 25 bp, Homo sapien
agaggtttgggccaaaactggactg

SEQ ID NO: 1204376 - DNA, 25 bp, Homo sapien
agaaacaaatggagtactggtgaca

SEQ ID NO: 1204377 - DNA, 25 bp, Homo sapien
ccccggtgttgagattataaccttg

SEQ ID NO: 1204378 - DNA, 25 bp, Homo sapien
ggtgttgagattataaccttgtcag

SEQ ID NO: 1204379 - DNA, 25 bp, Homo sapien
tcagctccccggtgttgagattata

SEQ ID NO: 1204380 - DNA, 25 bp, Homo sapien
gctccccggtgttgagattataacc

SEQ ID NO: 1204381 - DNA, 25 bp, Homo sapien
cttgatggtgctctttacagctgtt

SEQ ID NO: 1204382 - DNA, 25 bp, Homo sapien
ggtgctctttacagctgttagtttc

SEQ ID NO: 1204383 - DNA, 25 bp, Homo sapien
ctttacagctgttagtttcatttgc

SEQ ID NO: 1204384 - DNA, 25 bp, Homo sapien
gatggtgctctttacagctgttagt

SEQ ID NO: 1204385 - DNA, 25 bp, Homo sapien
aaaggccctctgcatcctatcccct

SEQ ID NO: 1204386 - DNA, 25 bp, Homo sapien
tccatttctttccacaaaggccctc

SEQ ID NO: 1204387 - DNA, 25 bp, Homo sapien
ctctgcatcctatcccctctcttgg

SEQ ID NO: 1204388 - DNA, 25 bp, Homo sapien
atcccctctcttgggcctaaagcct

SEQ ID NO: 1204389 - DNA, 25 bp, Homo sapien
agttctttcataaccagggatgccg

SEQ ID NO: 1204390 - DNA, 25 bp, Homo sapien
ggatgccgtagttgattctaaagta

SEQ ID NO: 1204391 - DNA, 25 bp, Homo sapien
tcctctagttctttcataaccaggg

SEQ ID NO: 1204392 - DNA, 25 bp, Homo sapien
ttcataaccagggatgccgtagttg

SEQ ID NO: 1204393 - DNA, 25 bp, Homo sapien
aaaatgatcacaaaccacatacccc

SEQ ID NO: 1204394 - DNA, 25 bp, Homo sapien
cttgaggaatccacactgaaagata

SEQ ID NO: 1204395 - DNA, 25 bp, Homo sapien
gctgctggcaaatgttccaaaatga

SEQ ID NO: 1204396 - DNA, 25 bp, Homo sapien
taaacaaaattctgctgctggcaaa

SEQ ID NO: 1204397 - DNA, 25 bp, Homo sapien
gctgtcatgagatgctatatcagag

SEQ ID NO: 1204398 - DNA, 25 bp, Homo sapien
caccttcaaggagtatgctctgtga

SEQ ID NO: 1204399 - DNA, 25 bp, Homo sapien
tgtgtctaaactccgaagaaaagag

SEQ ID NO: 1204400 - DNA, 25 bp, Homo sapien
tattgctcatcctatccaaaattgc

SEQ ID NO: 1204401 - DNA, 25 bp, Homo sapien
tattgaaattgttggcaaaatctgt

SEQ ID NO: 1204402 - DNA, 25 bp, Homo sapien
aaatattgaaattgttggcaaaatc

SEQ ID NO: 1204403 - DNA, 25 bp, Homo sapien
tagaaatattgaaattgttggcaaa

SEQ ID NO: 1204404 - DNA, 25 bp, Homo sapien
aaattgttggcaaaatctgttggaa

SEQ ID NO: 1204405 - DNA, 25 bp, Homo sapien
ggtgctcatgataacagcaaaatta

SEQ ID NO: 1204406 - DNA, 25 bp, Homo sapien
gtgctcatgataacagcaaaattat

SEQ ID NO: 1204407 - DNA, 25 bp, Homo sapien
tggtgctcatgataacagcaaaatt

SEQ ID NO: 1204408 - DNA, 25 bp, Homo sapien
atggcctgaacacctacacgcttgt

SEQ ID NO: 1204409 - DNA, 25 bp, Homo sapien
atgcatggcctgaacacctacacgc

SEQ ID NO: 1204410 - DNA, 25 bp, Homo sapien
gcatggcctgaacacctacacgctt

SEQ ID NO: 1204411 - DNA, 25 bp, Homo sapien
tggcctgaacacctacacgcttgtt

SEQ ID NO: 1204412 - DNA, 25 bp, Homo sapien
gtaaattattttggtcacattaatc

SEQ ID NO: 1204413 - DNA, 25 bp, Homo sapien
cattgtcatcgggtaaattattttg

SEQ ID NO: 1204414 - DNA, 25 bp, Homo sapien
aattcatttcccattgtcatcgggt

SEQ ID NO: 1204415 - DNA, 25 bp, Homo sapien
agaattcatttcccattgtcatcgg

SEQ ID NO: 1204416 - DNA, 25 bp, Homo sapien
cacaagtaaagtttttgccagcctc

SEQ ID NO: 1204417 - DNA, 25 bp, Homo sapien
ctttctctaaaccctcaccatttag

SEQ ID NO: 1204418 - DNA, 25 bp, Homo sapien
gagatgattaaacagctgcaaagct

SEQ ID NO: 1204419 - DNA, 25 bp, Homo sapien
gctcaaactctccaacattcagttg

SEQ ID NO: 1204420 - DNA, 25 bp, Homo sapien
aatcactttgattatgtgtgatagg

SEQ ID NO: 1204421 - DNA, 25 bp, Homo sapien
atcactttgattatgtgtgataggg

SEQ ID NO: 1204422 - DNA, 25 bp, Homo sapien
tcactttgattatgtgtgataggga

SEQ ID NO: 1204423 - DNA, 25 bp, Homo sapien
atttctgcagttctgactgagtcat

SEQ ID NO: 1204424 - DNA, 25 bp, Homo sapien
tgcagttgcctacaattgtattacc

SEQ ID NO: 1204425 - DNA, 25 bp, Homo sapien
gcctacaattgtattaccttcttca

SEQ ID NO: 1204426 - DNA, 25 bp, Homo sapien
ctacattgctcttgcagttgcctac

SEQ ID NO: 1204427 - DNA, 25 bp, Homo sapien
gctcttgcagttgcctacaattgta

SEQ ID NO: 1204428 - DNA, 25 bp, Homo sapien
aagcagcaaaatcaattatgactgt

SEQ ID NO: 1204429 - DNA, 25 bp, Homo sapien
aatcaattatgactgtatagaacag

SEQ ID NO: 1204430 - DNA, 25 bp, Homo sapien
gcaaaatcaattatgactgtataga

SEQ ID NO: 1204431 - DNA, 25 bp, Homo sapien
gcagcaaaatcaattatgactgtat

SEQ ID NO: 1204432 - DNA, 25 bp, Homo sapien
gattaatgcgatattggactcccgc

SEQ ID NO: 1204433 - DNA, 25 bp, Homo sapien
cttcttcctggattaatgcgatatt

SEQ ID NO: 1204434 - DNA, 25 bp, Homo sapien
cgatattggactcccgcatgtgtcc

SEQ ID NO: 1204435 - DNA, 25 bp, Homo sapien
gactcccgcatgtgtcctatttcca

SEQ ID NO: 1204436 - DNA, 25 bp, Homo sapien
taaagtgatgtcaaatctgttgaca

SEQ ID NO: 1204437 - DNA, 25 bp, Homo sapien
caacatcgtcaatgcagttctgagc

SEQ ID NO: 1204438 - DNA, 25 bp, Homo sapien
ctggttggaagaataagtgatataa

SEQ ID NO: 1204439 - DNA, 25 bp, Homo sapien
tgatagattttgataagccagaact

SEQ ID NO: 1204440 - DNA, 25 bp, Homo sapien
gcaaagcacttcagttaaggtcaca

SEQ ID NO: 1204441 - DNA, 25 bp, Homo sapien
tagcctctgggtagtatttgcatgg

SEQ ID NO: 1204442 - DNA, 25 bp, Homo sapien
tcaggcacagggatgttagcctctg

SEQ ID NO: 1204443 - DNA, 25 bp, Homo sapien
gcctgactcggttaacagcatgata

SEQ ID NO: 1204444 - DNA, 25 bp, Homo sapien
acagcatgataaacaggaagctcca

SEQ ID NO: 1204445 - DNA, 25 bp, Homo sapien
tagcaccttcccatggaagataaat

SEQ ID NO: 1204446 - DNA, 25 bp, Homo sapien
gagtaatctcatgaacagacacaag

SEQ ID NO: 1204447 - DNA, 25 bp, Homo sapien
gaagtagaatgaagtgagtaatctc

SEQ ID NO: 1204448 - DNA, 25 bp, Homo sapien
cacaagtactgcagcacgcaaggtg

SEQ ID NO: 1204449 - DNA, 25 bp, Homo sapien
aagtcgtgattgaaaccaggtgcag

SEQ ID NO: 1204450 - DNA, 25 bp, Homo sapien
taatgacttttcagtatccggaaag

SEQ ID NO: 1204451 - DNA, 25 bp, Homo sapien
caggtgcagatcattatccttaata

SEQ ID NO: 1204452 - DNA, 25 bp, Homo sapien
tattccaagttggttgatgcttcgg

SEQ ID NO: 1204453 - DNA, 25 bp, Homo sapien
ccaagggatgtatgtctctcttttc

SEQ ID NO: 1204454 - DNA, 25 bp, Homo sapien
aagggatgtatgtctctcttttcaa

SEQ ID NO: 1204455 - DNA, 25 bp, Homo sapien
cagatcttgccaagggatgtatgtc

SEQ ID NO: 1204456 - DNA, 25 bp, Homo sapien
cttgccaagggatgtatgtctctct

SEQ ID NO: 1204457 - DNA, 25 bp, Homo sapien
ttaagcaatctctttaattgtattt

SEQ ID NO: 1204458 - DNA, 25 bp, Homo sapien
tctctttaattgtatttgcaaaaat

SEQ ID NO: 1204459 - DNA, 25 bp, Homo sapien
aatctctttaattgtatttgcaaaa

SEQ ID NO: 1204460 - DNA, 25 bp, Homo sapien
aagcaatctctttaattgtatttgc

SEQ ID NO: 1204461 - DNA, 25 bp, Homo sapien
gaaagagtcccataagtcataagct

SEQ ID NO: 1204462 - DNA, 25 bp, Homo sapien
aaacatgtctataaacccagctcac

SEQ ID NO: 1204463 - DNA, 25 bp, Homo sapien
ttttactggagcattcctatcagca

SEQ ID NO: 1204464 - DNA, 25 bp, Homo sapien
ttccccaaggaatatgactctagag

SEQ ID NO: 1204465 - DNA, 25 bp, Homo sapien
gggtccttaatagctgcatagtcca

SEQ ID NO: 1204466 - DNA, 25 bp, Homo sapien
ggctgtgctccctttgcattgaact

SEQ ID NO: 1204467 - DNA, 25 bp, Homo sapien
tatcaagcaacccagggctgtgctc

SEQ ID NO: 1204468 - DNA, 25 bp, Homo sapien
catgtccacagcctcggtacttcta

SEQ ID NO: 1204469 - DNA, 25 bp, Homo sapien
cacgatattgggaggaatgcgaaca

SEQ ID NO: 1204470 - DNA, 25 bp, Homo sapien
tacacctgtcacgatattgggagga

SEQ ID NO: 1204471 - DNA, 25 bp, Homo sapien
cctgtggggtcagcacttcaaggtt

SEQ ID NO: 1204472 - DNA, 25 bp, Homo sapien
aggtggctacacctgtcacgatatt

SEQ ID NO: 1204473 - DNA, 25 bp, Homo sapien
ccttcattatcatctgcattgggat

SEQ ID NO: 1204474 - DNA, 25 bp, Homo sapien
taataattgtactagatctacacat

SEQ ID NO: 1204475 - DNA, 25 bp, Homo sapien
ttttaatgtgtagtcagtatgtgat

SEQ ID NO: 1204476 - DNA, 25 bp, Homo sapien
agatctacacataaatgccaacatt

SEQ ID NO: 1204477 - DNA, 25 bp, Homo sapien
ttcctgagtgagggtctttgtccag

SEQ ID NO: 1204478 - DNA, 25 bp, Homo sapien
cttcctgagtgagggtctttgtcca

SEQ ID NO: 1204479 - DNA, 25 bp, Homo sapien
tcttcctgagtgagggtctttgtcc

SEQ ID NO: 1204480 - DNA, 25 bp, Homo sapien
tcctgagtgagggtctttgtccagg

SEQ ID NO: 1204481 - DNA, 25 bp, Homo sapien
tccaacactcacatagatgaacaga

SEQ ID NO: 1204482 - DNA, 25 bp, Homo sapien
tcacacgcagagcaggattggattt

SEQ ID NO: 1204483 - DNA, 25 bp, Homo sapien
tttgccttgcaaaagggcttaatgc

SEQ ID NO: 1204484 - DNA, 25 bp, Homo sapien
aatgccagtgccattaatcatctcc

SEQ ID NO: 1204485 - DNA, 25 bp, Homo sapien
tgaatagaccctgttttaaggctca

SEQ ID NO: 1204486 - DNA, 25 bp, Homo sapien
tgccataaaagggtgaacgtaatat

SEQ ID NO: 1204487 - DNA, 25 bp, Homo sapien
taaccgcttggagggccattgtcat

SEQ ID NO: 1204488 - DNA, 25 bp, Homo sapien
gcagaggtctcagtgtctctacaga

SEQ ID NO: 1204489 - DNA, 25 bp, Homo sapien
actgagaatgttcttcataatgctg

SEQ ID NO: 1204490 - DNA, 25 bp, Homo sapien
cactttccacacccagtgtacttac

SEQ ID NO: 1204491 - DNA, 25 bp, Homo sapien
tcactttccacacccagtgtactta

SEQ ID NO: 1204492 - DNA, 25 bp, Homo sapien
ctcactttccacacccagtgtactt

SEQ ID NO: 1204493 - DNA, 25 bp, Homo sapien
gacaccgtagcctagtatctttcct

SEQ ID NO: 1204494 - DNA, 25 bp, Homo sapien
cgttcaggtttcagccaagttttct

SEQ ID NO: 1204495 - DNA, 25 bp, Homo sapien
tatctttcctctagcacgttcaggt

SEQ ID NO: 1204496 - DNA, 25 bp, Homo sapien
ctatgtcatagccaatatatcagta

SEQ ID NO: 1204497 - DNA, 25 bp, Homo sapien
ctaagtccaatacggttttatcgct

SEQ ID NO: 1204498 - DNA, 25 bp, Homo sapien
ggatgctcagctagagttgcaagcc

SEQ ID NO: 1204499 - DNA, 25 bp, Homo sapien
cgctgtaatgggtaatgtttttagc

SEQ ID NO: 1204500 - DNA, 25 bp, Homo sapien
caggatgctcagctagagttgcaag

SEQ ID NO: 1204501 - DNA, 25 bp, Homo sapien
ccttacactcattcttcacaatttt

SEQ ID NO: 1204502 - DNA, 25 bp, Homo sapien
ccccttacactcattcttcacaatt

SEQ ID NO: 1204503 - DNA, 25 bp, Homo sapien
ctcattcttcacaattttctcagac

SEQ ID NO: 1204504 - DNA, 25 bp, Homo sapien
cattcttcacaattttctcagacat

SEQ ID NO: 1204505 - DNA, 25 bp, Homo sapien
tcctctgataggcaattcagattat

SEQ ID NO: 1204506 - DNA, 25 bp, Homo sapien
gcactttcctctgataggcaattca

SEQ ID NO: 1204507 - DNA, 25 bp, Homo sapien
atggtgacaccttgggttattgggt

SEQ ID NO: 1204508 - DNA, 25 bp, Homo sapien
gataggcaattcagattattactta

SEQ ID NO: 1204509 - DNA, 25 bp, Homo sapien
tacgagtttctctgatacccttgaa

SEQ ID NO: 1204510 - DNA, 25 bp, Homo sapien
gggtaggagtaaagttcagagcaat

SEQ ID NO: 1204511 - DNA, 25 bp, Homo sapien
gaagctctgatagaagccaagcctc

SEQ ID NO: 1204512 - DNA, 25 bp, Homo sapien
gttcagagcaataggatcttccttt

SEQ ID NO: 1204513 - DNA, 25 bp, Homo sapien
caatgtcactggtcaagattctcgg

SEQ ID NO: 1204514 - DNA, 25 bp, Homo sapien
tctgcaatgtcactggtcaagattc

SEQ ID NO: 1204515 - DNA, 25 bp, Homo sapien
ctaccttccaaacagtgagcccagt

SEQ ID NO: 1204516 - DNA, 25 bp, Homo sapien
gcccagtcgaagaaacagcatctgc

SEQ ID NO: 1204517 - DNA, 25 bp, Homo sapien
ctctcctacatcctgattaacccat

SEQ ID NO: 1204518 - DNA, 25 bp, Homo sapien
tcctacatcctgattaacccatctc

SEQ ID NO: 1204519 - DNA, 25 bp, Homo sapien
tcctgattaacccatctccagatac

SEQ ID NO: 1204520 - DNA, 25 bp, Homo sapien
tacatcctgattaacccatctccag

SEQ ID NO: 1204521 - DNA, 25 bp, Homo sapien
gctcagcctaaagtcttaaattttg

SEQ ID NO: 1204522 - DNA, 25 bp, Homo sapien
actgtgctcagcctaaagtcttaaa

SEQ ID NO: 1204523 - DNA, 25 bp, Homo sapien
gtgctcagcctaaagtcttaaattt

SEQ ID NO: 1204524 - DNA, 25 bp, Homo sapien
ctgtgctcagcctaaagtcttaaat

SEQ ID NO: 1204525 - DNA, 25 bp, Homo sapien
caagtgaagacgctcttatagtgat

SEQ ID NO: 1204526 - DNA, 25 bp, Homo sapien
gaagacgctcttatagtgatagtca

SEQ ID NO: 1204527 - DNA, 25 bp, Homo sapien
cttctccctgtatctcaagtgaaga

SEQ ID NO: 1204528 - DNA, 25 bp, Homo sapien
cctgtatctcaagtgaagacgctct

SEQ ID NO: 1204529 - DNA, 25 bp, Homo sapien
ttacacctcgagaactaggtttgtc

SEQ ID NO: 1204530 - DNA, 25 bp, Homo sapien
tacttgttacacctcgagaactagg

SEQ ID NO: 1204531 - DNA, 25 bp, Homo sapien
tccaggatacttgttacacctcgag

SEQ ID NO: 1204532 - DNA, 25 bp, Homo sapien
tggtcttctccaggatacttgttac

SEQ ID NO: 1204533 - DNA, 25 bp, Homo sapien
ggtaaaaactcgtctgtaatgctgg

SEQ ID NO: 1204534 - DNA, 25 bp, Homo sapien
gagcagtagggtgggcacactctcc

SEQ ID NO: 1204535 - DNA, 25 bp, Homo sapien
gcatgtaccacatcaagcactcggg

SEQ ID NO: 1204536 - DNA, 25 bp, Homo sapien
caggagggagcattcctggcaaatc

SEQ ID NO: 1204537 - DNA, 25 bp, Homo sapien
ttcctttccctagaagtgctgccac

SEQ ID NO: 1204538 - DNA, 25 bp, Homo sapien
ttgtaacatagctgaattcatgtaa

SEQ ID NO: 1204539 - DNA, 25 bp, Homo sapien
cttgtaacatagctgaattcatgta

SEQ ID NO: 1204540 - DNA, 25 bp, Homo sapien
tgcttgccaattagctgcctcccaa

SEQ ID NO: 1204541 - DNA, 25 bp, Homo sapien
gacaatgtatttaggtcagctggca

SEQ ID NO: 1204542 - DNA, 25 bp, Homo sapien
cccaatgtaaaggttgtgcttgcca

SEQ ID NO: 1204543 - DNA, 25 bp, Homo sapien
tactaaacaggtcggtgccatgaac

SEQ ID NO: 1204544 - DNA, 25 bp, Homo sapien
gggacataatgtaggaaaaggacat

SEQ ID NO: 1204545 - DNA, 25 bp, Homo sapien
taaatctgtcaatcattgtcaccac

SEQ ID NO: 1204546 - DNA, 25 bp, Homo sapien
taatgagctatgtagttaaatctgt

SEQ ID NO: 1204547 - DNA, 25 bp, Homo sapien
tgtatatttattcttccctggatct

SEQ ID NO: 1204548 - DNA, 25 bp, Homo sapien
ctgtgtgagttcaaatgtgtcagct

SEQ ID NO: 1204549 - DNA, 25 bp, Homo sapien
gagggatgcctaactgtgtgagttc

SEQ ID NO: 1204550 - DNA, 25 bp, Homo sapien
tctgaagcatctctgctaggaagct

SEQ ID NO: 1204551 - DNA, 25 bp, Homo sapien
ggaagctccaagaaattggctgagc

SEQ ID NO: 1204552 - DNA, 25 bp, Homo sapien
gccttgccactctacacttaattct

SEQ ID NO: 1204553 - DNA, 25 bp, Homo sapien
caaatcacctgctttatactaccca

SEQ ID NO: 1204554 - DNA, 25 bp, Homo sapien
tactctgcagtatcctagtttagaa

SEQ ID NO: 1204555 - DNA, 25 bp, Homo sapien
tgaactgcaggatcaacaaccttgt

SEQ ID NO: 1204556 - DNA, 25 bp, Homo sapien
ttttttatgaatgggctcctgggat

SEQ ID NO: 1204557 - DNA, 25 bp, Homo sapien
ggctcctgggatccaactgcttctc

SEQ ID NO: 1204558 - DNA, 25 bp, Homo sapien
ctttatcaatgggtccatgactcat

SEQ ID NO: 1204559 - DNA, 25 bp, Homo sapien
gaagcgccctttatcaatgggtcca

SEQ ID NO: 1204560 - DNA, 25 bp, Homo sapien
tggggaagcgccctttatcaatggg

SEQ ID NO: 1204561 - DNA, 25 bp, Homo sapien
gcgccctttatcaatgggtccatga

SEQ ID NO: 1204562 - DNA, 25 bp, Homo sapien
ggcatccagaatctccaattctaaa

SEQ ID NO: 1204563 - DNA, 25 bp, Homo sapien
tcatgctccggcatccagaatctcc

SEQ ID NO: 1204564 - DNA, 25 bp, Homo sapien
gctccggcatccagaatctccaatt

SEQ ID NO: 1204565 - DNA, 25 bp, Homo sapien
ccggcatccagaatctccaattcta

SEQ ID NO: 1204566 - DNA, 25 bp, Homo sapien
gagccattaggctcagctgaaatca

SEQ ID NO: 1204567 - DNA, 25 bp, Homo sapien
ccattaggctcagctgaaatcattt

SEQ ID NO: 1204568 - DNA, 25 bp, Homo sapien
tagtatatttggtaatacagtaaat

SEQ ID NO: 1204569 - DNA, 25 bp, Homo sapien
ttttagtatatttggtaatacagta

SEQ ID NO: 1204570 - DNA, 25 bp, Homo sapien
aaattgtttttattcccggctcatg

SEQ ID NO: 1204571 - DNA, 25 bp, Homo sapien
gagaaactttgaggcatcttaggta

SEQ ID NO: 1204572 - DNA, 25 bp, Homo sapien
agaggcctacagtcaggaggaaacc

SEQ ID NO: 1204573 - DNA, 25 bp, Homo sapien
taggtatttgactcccaaggcttta

SEQ ID NO: 1204574 - DNA, 25 bp, Homo sapien
aagcaagctgcgttttgcaaccgaa

SEQ ID NO: 1204575 - DNA, 25 bp, Homo sapien
caaagcagatagatgagtgtcaaca

SEQ ID NO: 1204576 - DNA, 25 bp, Homo sapien
cctatagggacaacagatttggtag

SEQ ID NO: 1204577 - DNA, 25 bp, Homo sapien
tgcaaccgaacctcaacagtctcag

SEQ ID NO: 1204578 - DNA, 25 bp, Homo sapien
gccttcctgctccgataaattcatg

SEQ ID NO: 1204579 - DNA, 25 bp, Homo sapien
ggccttcctgctccgataaattcat

SEQ ID NO: 1204580 - DNA, 25 bp, Homo sapien
tggccttcctgctccgataaattca

SEQ ID NO: 1204581 - DNA, 25 bp, Homo sapien
aaacgagggcgattttgctgggcca

SEQ ID NO: 1204582 - DNA, 25 bp, Homo sapien
taaaacgagggcgattttgctgggc

SEQ ID NO: 1204583 - DNA, 25 bp, Homo sapien
aatttgtaagcataaaacgagggcg

SEQ ID NO: 1204584 - DNA, 25 bp, Homo sapien
taagcataaaacgagggcgattttg

SEQ ID NO: 1204585 - DNA, 25 bp, Homo sapien
gttgaagttgcctgactggcacagt

SEQ ID NO: 1204586 - DNA, 25 bp, Homo sapien
ttatttgatgccctttaaggctgag

SEQ ID NO: 1204587 - DNA, 25 bp, Homo sapien
gaattatcatgggaggcctatctga

SEQ ID NO: 1204588 - DNA, 25 bp, Homo sapien
gaagaacagggaatgaagtgcagtc

SEQ ID NO: 1204589 - DNA, 25 bp, Homo sapien
taccaggctaagtcagttaaggaac

SEQ ID NO: 1204590 - DNA, 25 bp, Homo sapien
caatccatgtctgtaggtgtcacca

SEQ ID NO: 1204591 - DNA, 25 bp, Homo sapien
tgtgaaatttaaggatggctgccca

SEQ ID NO: 1204592 - DNA, 25 bp, Homo sapien
taatttaaaggtagatgcatggctc

SEQ ID NO: 1204593 - DNA, 25 bp, Homo sapien
ccaggtttcggaagacactagacat

SEQ ID NO: 1204594 - DNA, 25 bp, Homo sapien
ttactggccaggtttcggaagacac

SEQ ID NO: 1204595 - DNA, 25 bp, Homo sapien
ctggccaggtttcggaagacactag

SEQ ID NO: 1204596 - DNA, 25 bp, Homo sapien
ggccaggtttcggaagacactagac

SEQ ID NO: 1204597 - DNA, 25 bp, Homo sapien
aacccatttgattaatcttgcacac

SEQ ID NO: 1204598 - DNA, 25 bp, Homo sapien
catttgattaatcttgcacacaatt

SEQ ID NO: 1204599 - DNA, 25 bp, Homo sapien
ttgattaatcttgcacacaattgcc

SEQ ID NO: 1204600 - DNA, 25 bp, Homo sapien
tccaacccatttgattaatcttgca

SEQ ID NO: 1204601 - DNA, 25 bp, Homo sapien
gagtcaagggacatagtttagcgct

SEQ ID NO: 1204602 - DNA, 25 bp, Homo sapien
ggttcacagctctgctagagtcaag

SEQ ID NO: 1204603 - DNA, 25 bp, Homo sapien
ccattagacgttaggtgggttcaca

SEQ ID NO: 1204604 - DNA, 25 bp, Homo sapien
tctgttggtttgcacgatgaatgtc

SEQ ID NO: 1204605 - DNA, 25 bp, Homo sapien
gaagaaaggaatgaggctagtgcca

SEQ ID NO: 1204606 - DNA, 25 bp, Homo sapien
tacattatctggaagggcagtgaag

SEQ ID NO: 1204607 - DNA, 25 bp, Homo sapien
gggctgtcacctgaaacccgtcctc

SEQ ID NO: 1204608 - DNA, 25 bp, Homo sapien
ggaggagcatgtcctacattatctg

SEQ ID NO: 1204609 - DNA, 25 bp, Homo sapien
gctgatgtctgctttagtgcctttg

SEQ ID NO: 1204610 - DNA, 25 bp, Homo sapien
gaggctgtctggtatcatgtcaccc

SEQ ID NO: 1204611 - DNA, 25 bp, Homo sapien
tgtcataccatgatctgaggctgtc

SEQ ID NO: 1204612 - DNA, 25 bp, Homo sapien
gcctttgcttgtgtcataccatgat

SEQ ID NO: 1204613 - DNA, 25 bp, Homo sapien
gctccgcctatcagaaacttttgca

SEQ ID NO: 1204614 - DNA, 25 bp, Homo sapien
gttttcacaatcagcacccagacaa

SEQ ID NO: 1204615 - DNA, 25 bp, Homo sapien
gaagttgaaactagatgctccgcct

SEQ ID NO: 1204616 - DNA, 25 bp, Homo sapien
ttaatgctgtgaccggctcttggac

SEQ ID NO: 1204617 - DNA, 25 bp, Homo sapien
caaatagcccataacataaggcaaa

SEQ ID NO: 1204618 - DNA, 25 bp, Homo sapien
aaatagcccataacataaggcaaat

SEQ ID NO: 1204619 - DNA, 25 bp, Homo sapien
acaaatagcccataacataaggcaa

SEQ ID NO: 1204620 - DNA, 25 bp, Homo sapien
gccactcaattgtcaagttacagaa

SEQ ID NO: 1204621 - DNA, 25 bp, Homo sapien
cattttggttatactcctaagcaaa

SEQ ID NO: 1204622 - DNA, 25 bp, Homo sapien
tcctgtgaaaagcatcattagcaaa

SEQ ID NO: 1204623 - DNA, 25 bp, Homo sapien
tccagatcatagtttttcagaaatg

SEQ ID NO: 1204624 - DNA, 25 bp, Homo sapien
tatagatagcctgggtgccttctgg

SEQ ID NO: 1204625 - DNA, 25 bp, Homo sapien
ggtcagaccaggaacctgtcagaat

SEQ ID NO: 1204626 - DNA, 25 bp, Homo sapien
tccaagagatctatatccagggcgg

SEQ ID NO: 1204627 - DNA, 25 bp, Homo sapien
ccttaatggattaagagcaacccat

SEQ ID NO: 1204628 - DNA, 25 bp, Homo sapien
tcaggcataattgctacaatattaa

SEQ ID NO: 1204629 - DNA, 25 bp, Homo sapien
gcaatagtgatataattcaggcata

SEQ ID NO: 1204630 - DNA, 25 bp, Homo sapien
taattcaggcataattgctacaata

SEQ ID NO: 1204631 - DNA, 25 bp, Homo sapien
gactggcaatagtgatataattcag

SEQ ID NO: 1204632 - DNA, 25 bp, Homo sapien
atacacagcttttacaccatattca

SEQ ID NO: 1204633 - DNA, 25 bp, Homo sapien
aaaaggagtatctccaggatgtcca

SEQ ID NO: 1204634 - DNA, 25 bp, Homo sapien
tgtatacacagcttttacaccatat

SEQ ID NO: 1204635 - DNA, 25 bp, Homo sapien
tatacacagcttttacaccatattc

SEQ ID NO: 1204636 - DNA, 25 bp, Homo sapien
ttctctccttcttggtgcatggact

SEQ ID NO: 1204637 - DNA, 25 bp, Homo sapien
tccttggttcacgacaaaatcatta

SEQ ID NO: 1204638 - DNA, 25 bp, Homo sapien
taagctccatgaactatcaccaaaa

SEQ ID NO: 1204639 - DNA, 25 bp, Homo sapien
gcagttttaaactcgatgccattct

SEQ ID NO: 1204640 - DNA, 25 bp, Homo sapien
ggtccatccatctgtgtcacattca

SEQ ID NO: 1204641 - DNA, 25 bp, Homo sapien
tgtgtcacattcacggtaattaatc

SEQ ID NO: 1204642 - DNA, 25 bp, Homo sapien
attggtccatccatctgtgtcacat

SEQ ID NO: 1204643 - DNA, 25 bp, Homo sapien
ggtaattaatctcacctagcaattg

SEQ ID NO: 1204644 - DNA, 25 bp, Homo sapien
gatctggttccattgcactactgac

SEQ ID NO: 1204645 - DNA, 25 bp, Homo sapien
aaaccgtactgcttgtccaaaatgg

SEQ ID NO: 1204646 - DNA, 25 bp, Homo sapien
tccaaaaaccatcgtctgaacaatg

SEQ ID NO: 1204647 - DNA, 25 bp, Homo sapien
caaaatggtattcccgatctggttc

SEQ ID NO: 1204648 - DNA, 25 bp, Homo sapien
gcaaattaaaggactgtgaccagga

SEQ ID NO: 1204649 - DNA, 25 bp, Homo sapien
cactgaatgacctgcaaaaaataac

SEQ ID NO: 1204650 - DNA, 25 bp, Homo sapien
cactatttagccaagatttcctcag

SEQ ID NO: 1204651 - DNA, 25 bp, Homo sapien
taagacaggaattatcaacaggact

SEQ ID NO: 1204652 - DNA, 25 bp, Homo sapien
gccatccagattcagtgcatacagc

SEQ ID NO: 1204653 - DNA, 25 bp, Homo sapien
tcttctgagatataggagatccatt

SEQ ID NO: 1204654 - DNA, 25 bp, Homo sapien
gaaatcgttcattctccttataaat

SEQ ID NO: 1204655 - DNA, 25 bp, Homo sapien
ttcacatgaaggcaacggacgccat

SEQ ID NO: 1204656 - DNA, 25 bp, Homo sapien
aatatgtgataaatttataaagatc

SEQ ID NO: 1204657 - DNA, 25 bp, Homo sapien
atgtgataaatttataaagatccag

SEQ ID NO: 1204658 - DNA, 25 bp, Homo sapien
atatgtgataaatttataaagatcc

SEQ ID NO: 1204659 - DNA, 25 bp, Homo sapien
tatgtgataaatttataaagatcca

SEQ ID NO: 1204660 - DNA, 25 bp, Homo sapien
ccttaaaggtgagtagtcaccattt

SEQ ID NO: 1204661 - DNA, 25 bp, Homo sapien
tacactggtacgtgatttcatctcc

SEQ ID NO: 1204662 - DNA, 25 bp, Homo sapien
gccagtacttgtgcattttgctgta

SEQ ID NO: 1204663 - DNA, 25 bp, Homo sapien
atctcggagcaggtatccagccagt

SEQ ID NO: 1204664 - DNA, 25 bp, Homo sapien
gggagctgtgccttaaaggcctcaa

SEQ ID NO: 1204665 - DNA, 25 bp, Homo sapien
cagagagtctcatcagcgctgagaa

SEQ ID NO: 1204666 - DNA, 25 bp, Homo sapien
tataacattaccacaggctcgagct

SEQ ID NO: 1204667 - DNA, 25 bp, Homo sapien
gtatagtttcttggcctacaatcca

SEQ ID NO: 1204668 - DNA, 25 bp, Homo sapien
tgaattgagattgtgtctttgcact

SEQ ID NO: 1204669 - DNA, 25 bp, Homo sapien
gttttagattgaattcatgggctgg

SEQ ID NO: 1204670 - DNA, 25 bp, Homo sapien
ctcagaacaattcaatgtaaggaag

SEQ ID NO: 1204671 - DNA, 25 bp, Homo sapien
caatgtaaggaagtagtattttgag

SEQ ID NO: 1204672 - DNA, 25 bp, Homo sapien
ctggcgaccatccatcttgtgtgca

SEQ ID NO: 1204673 - DNA, 25 bp, Homo sapien
tacgcatattctcatgatatagacc

SEQ ID NO: 1204674 - DNA, 25 bp, Homo sapien
ctacgcatattctcatgatatagac

SEQ ID NO: 1204675 - DNA, 25 bp, Homo sapien
tggtactgctggcgaccatccatct

SEQ ID NO: 1204676 - DNA, 25 bp, Homo sapien
tggcaggcaacgtctatagatttac

SEQ ID NO: 1204677 - DNA, 25 bp, Homo sapien
ctgtggtctgcgcttttggaagagc

SEQ ID NO: 1204678 - DNA, 25 bp, Homo sapien
cgtctatagatttaccctgtacaaa

SEQ ID NO: 1204679 - DNA, 25 bp, Homo sapien
gcaacgtctatagatttaccctgta

SEQ ID NO: 1204680 - DNA, 25 bp, Homo sapien
acacggatgcatctgggagtaggag

SEQ ID NO: 1204681 - DNA, 25 bp, Homo sapien
ggatgcatctgggagtaggagacca

SEQ ID NO: 1204682 - DNA, 25 bp, Homo sapien
tgcatctgggagtaggagaccagcc

SEQ ID NO: 1204683 - DNA, 25 bp, Homo sapien
catctgggagtaggagaccagccat

SEQ ID NO: 1204684 - DNA, 25 bp, Homo sapien
gaaagacatgaacatgctaggattt

SEQ ID NO: 1204685 - DNA, 25 bp, Homo sapien
ctaatgcccattaataggagaattt

SEQ ID NO: 1204686 - DNA, 25 bp, Homo sapien
catgaacatgctaggatttcagagt

SEQ ID NO: 1204687 - DNA, 25 bp, Homo sapien
aatatagatgagtcttagaatgtca

SEQ ID NO: 1204688 - DNA, 25 bp, Homo sapien
gaacctcagatatttacccagacaa

SEQ ID NO: 1204689 - DNA, 25 bp, Homo sapien
ttggtgtgagataacgaacctcaga

SEQ ID NO: 1204690 - DNA, 25 bp, Homo sapien
acaatgatgccgcttcaatacgact

SEQ ID NO: 1204691 - DNA, 25 bp, Homo sapien
cttcatttaaccaacaagtattgtg

SEQ ID NO: 1204692 - DNA, 25 bp, Homo sapien
tctcagaatacccatttgtacttac

SEQ ID NO: 1204693 - DNA, 25 bp, Homo sapien
ctgtaggaaaccttctagagtagaa

SEQ ID NO: 1204694 - DNA, 25 bp, Homo sapien
tagagaaagtcaaatagctttactg

SEQ ID NO: 1204695 - DNA, 25 bp, Homo sapien
gagtagaatatgcacaagatctcag

SEQ ID NO: 1204696 - DNA, 25 bp, Homo sapien
tagtagtattccaagttatcaggtg

SEQ ID NO: 1204697 - DNA, 25 bp, Homo sapien
catgaatggattaacagaccgtgat

SEQ ID NO: 1204698 - DNA, 25 bp, Homo sapien
tactttcttgtctagtgcatccaca

SEQ ID NO: 1204699 - DNA, 25 bp, Homo sapien
tcgtctagtgtatgcaccagcctgt

SEQ ID NO: 1204700 - DNA, 25 bp, Homo sapien
tgctaagcagcattagtcactaggg

SEQ ID NO: 1204701 - DNA, 25 bp, Homo sapien
cacattatctcaaaggctggcaagg

SEQ ID NO: 1204702 - DNA, 25 bp, Homo sapien
gaaacaactcaatggaaagtgggca

SEQ ID NO: 1204703 - DNA, 25 bp, Homo sapien
cagtgttcaccaaaggaggtacata

SEQ ID NO: 1204704 - DNA, 25 bp, Homo sapien
ggtcatcaattgattcgggtaaggg

SEQ ID NO: 1204705 - DNA, 25 bp, Homo sapien
cagaatggctggcatcagtagtttt

SEQ ID NO: 1204706 - DNA, 25 bp, Homo sapien
tcaggatatggaaagtacattcttc

SEQ ID NO: 1204707 - DNA, 25 bp, Homo sapien
agtttcttgtcaagcctttcagaat

SEQ ID NO: 1204708 - DNA, 25 bp, Homo sapien
gggtgcttgccatgaatttttataa

SEQ ID NO: 1204709 - DNA, 25 bp, Homo sapien
catgtctgggtgcttgccatgaatt

SEQ ID NO: 1204710 - DNA, 25 bp, Homo sapien
gcttgccatgaatttttataagatt

SEQ ID NO: 1204711 - DNA, 25 bp, Homo sapien
agccatcatgtctgggtgcttgcca

SEQ ID NO: 1204712 - DNA, 25 bp, Homo sapien
tgagacttcttctgagaccagaaat

SEQ ID NO: 1204713 - DNA, 25 bp, Homo sapien
gacttcttctgagaccagaaatggt

SEQ ID NO: 1204714 - DNA, 25 bp, Homo sapien
agacttcttctgagaccagaaatgg

SEQ ID NO: 1204715 - DNA, 25 bp, Homo sapien
gagacttcttctgagaccagaaatg

SEQ ID NO: 1204716 - DNA, 25 bp, Homo sapien
gagcagatgattaccctgagttagg

SEQ ID NO: 1204717 - DNA, 25 bp, Homo sapien
aagattgaagagcagatgattaccc

SEQ ID NO: 1204718 - DNA, 25 bp, Homo sapien
gctgagattccactagcaactcctt

SEQ ID NO: 1204719 - DNA, 25 bp, Homo sapien
cctgagttaggcttgctgagattcc

SEQ ID NO: 1204720 - DNA, 25 bp, Homo sapien
gagagggatgaccttcgatcagaag

SEQ ID NO: 1204721 - DNA, 25 bp, Homo sapien
tagtcaccatactcaggacccaagt

SEQ ID NO: 1204722 - DNA, 25 bp, Homo sapien
cctggaggagctgaattagcatttc

SEQ ID NO: 1204723 - DNA, 25 bp, Homo sapien
ggacccaagtattgacctggcaaga

SEQ ID NO: 1204724 - DNA, 25 bp, Homo sapien
gggacagcccttagttcatgagagc

SEQ ID NO: 1204725 - DNA, 25 bp, Homo sapien
tactttgggagaactaagggacagc

SEQ ID NO: 1204726 - DNA, 25 bp, Homo sapien
ggcttgccacaaatagttacgagat

SEQ ID NO: 1204727 - DNA, 25 bp, Homo sapien
gatcgtactgtaagcatgagaacca

SEQ ID NO: 1204728 - DNA, 25 bp, Homo sapien
gtgacaccctgcctaaatggagtcc

SEQ ID NO: 1204729 - DNA, 25 bp, Homo sapien
tataagaagtgacaccctgcctaaa

SEQ ID NO: 1204730 - DNA, 25 bp, Homo sapien
gggtataagaagtgacaccctgcct

SEQ ID NO: 1204731 - DNA, 25 bp, Homo sapien
tgacaccctgcctaaatggagtccc

SEQ ID NO: 1204732 - DNA, 25 bp, Homo sapien
caatgcctcagctacgttttgtaac

SEQ ID NO: 1204733 - DNA, 25 bp, Homo sapien
gccacagataacaagtcagcttgcc

SEQ ID NO: 1204734 - DNA, 25 bp, Homo sapien
gaccatcctggaccttactgagact

SEQ ID NO: 1204735 - DNA, 25 bp, Homo sapien
tcattaggcttctgcttgaccatcc

SEQ ID NO: 1204736 - DNA, 25 bp, Homo sapien
ggttctaccatagatggagtgtctg

SEQ ID NO: 1204737 - DNA, 25 bp, Homo sapien
tagatggagtgtctgatgacggccc

SEQ ID NO: 1204738 - DNA, 25 bp, Homo sapien
atgggatgtccgtttttattggcct

SEQ ID NO: 1204739 - DNA, 25 bp, Homo sapien
gagtgtctgatgacggcccttgttg

SEQ ID NO: 1204740 - DNA, 25 bp, Homo sapien
tttaacatcaggctttgtagggcat

SEQ ID NO: 1204741 - DNA, 25 bp, Homo sapien
ttaacatcaggctttgtagggcatg

SEQ ID NO: 1204742 - DNA, 25 bp, Homo sapien
gctcagagataagaagtccaaccca

SEQ ID NO: 1204743 - DNA, 25 bp, Homo sapien
tctagaggtaagtcagtagctccac

SEQ ID NO: 1204744 - DNA, 25 bp, Homo sapien
tctggccaccctgacaagagcttct

SEQ ID NO: 1204745 - DNA, 25 bp, Homo sapien
gaagatcacaagtggtgccagtggc

SEQ ID NO: 1204746 - DNA, 25 bp, Homo sapien
atcctgatgtttcaccatctgctgt

SEQ ID NO: 1204747 - DNA, 25 bp, Homo sapien
tcctgatgtttcaccatctgctgtt

SEQ ID NO: 1204748 - DNA, 25 bp, Homo sapien
gaccaaccattgtaaccacacacta

SEQ ID NO: 1204749 - DNA, 25 bp, Homo sapien
gaaccagtggtgcttccagtattgc

SEQ ID NO: 1204750 - DNA, 25 bp, Homo sapien
cataacatatgggtaaatcagacca

SEQ ID NO: 1204751 - DNA, 25 bp, Homo sapien
actatggaaccagtggtgcttccag

SEQ ID NO: 1204752 - DNA, 25 bp, Homo sapien
tacatattgggaggtcaggagacaa

SEQ ID NO: 1204753 - DNA, 25 bp, Homo sapien
caatccaaagtggtagcactgaacg

SEQ ID NO: 1204754 - DNA, 25 bp, Homo sapien
cactgaacggaattaggtccaacta

SEQ ID NO: 1204755 - DNA, 25 bp, Homo sapien
tatactggtctttcttgcgatcagg

SEQ ID NO: 1204756 - DNA, 25 bp, Homo sapien
gctctcactgaatgcagatgcccga

SEQ ID NO: 1204757 - DNA, 25 bp, Homo sapien
gggaatacttccagcacatcgttca

SEQ ID NO: 1204758 - DNA, 25 bp, Homo sapien
tagactaagaccgacaacacctgtg

SEQ ID NO: 1204759 - DNA, 25 bp, Homo sapien
tagattacaggcaatgggagcccaa

SEQ ID NO: 1204760 - DNA, 25 bp, Homo sapien
catggaaacattttatcataacatt

SEQ ID NO: 1204761 - DNA, 25 bp, Homo sapien
aacattttatcataacattttggaa

SEQ ID NO: 1204762 - DNA, 25 bp, Homo sapien
gaaacattttatcataacattttgg

SEQ ID NO: 1204763 - DNA, 25 bp, Homo sapien
tttcatggaaacattttatcataac

SEQ ID NO: 1204764 - DNA, 25 bp, Homo sapien
agaaatactatgtaaataatggtta

SEQ ID NO: 1204765 - DNA, 25 bp, Homo sapien
ctatagtagaaatactatgtaaata

SEQ ID NO: 1204766 - DNA, 25 bp, Homo sapien
tactatgtaaataatggttaaattg

SEQ ID NO: 1204767 - DNA, 25 bp, Homo sapien
tatagtagaaatactatgtaaataa

SEQ ID NO: 1204768 - DNA, 25 bp, Homo sapien
ctaggattgcaataatattccacca

SEQ ID NO: 1204769 - DNA, 25 bp, Homo sapien
cacttcactgtgtccatattcttct

SEQ ID NO: 1204770 - DNA, 25 bp, Homo sapien
ggtggaccacatgattgtacttgct

SEQ ID NO: 1204771 - DNA, 25 bp, Homo sapien
acattcccattgaggagttcaggag

SEQ ID NO: 1204772 - DNA, 25 bp, Homo sapien
tgaattttattaggtcccttcatta

SEQ ID NO: 1204773 - DNA, 25 bp, Homo sapien
tcaagttcaggtatatctccacagg

SEQ ID NO: 1204774 - DNA, 25 bp, Homo sapien
cacgtaattgatctgtgtccaatca

SEQ ID NO: 1204775 - DNA, 25 bp, Homo sapien
gggaagttgggtccatactccatga

SEQ ID NO: 1204776 - DNA, 25 bp, Homo sapien
gaattccactgaatctccatagtaa

SEQ ID NO: 1204777 - DNA, 25 bp, Homo sapien
aatgttgatttaagaagggtattct

SEQ ID NO: 1204778 - DNA, 25 bp, Homo sapien
gttgatttaagaagggtattctcac

SEQ ID NO: 1204779 - DNA, 25 bp, Homo sapien
tgttgatttaagaagggtattctca

SEQ ID NO: 1204780 - DNA, 25 bp, Homo sapien
ctttgttaaatgttgatttaagaag

SEQ ID NO: 1204781 - DNA, 25 bp, Homo sapien
tcctctacatctgtaccttatgtta

SEQ ID NO: 1204782 - DNA, 25 bp, Homo sapien
aatttgatgatttgcacttcttaag

SEQ ID NO: 1204783 - DNA, 25 bp, Homo sapien
gaattatgatcgaattccttcttgt

SEQ ID NO: 1204784 - DNA, 25 bp, Homo sapien
tgcagactgtgtgtatccatccttc

SEQ ID NO: 1204785 - DNA, 25 bp, Homo sapien
ggtgggcataattgtatttgtgcca

SEQ ID NO: 1204786 - DNA, 25 bp, Homo sapien
tggaggtgggcataattgtatttgt

SEQ ID NO: 1204787 - DNA, 25 bp, Homo sapien
aggtggaggtgggcataattgtatt

SEQ ID NO: 1204788 - DNA, 25 bp, Homo sapien
gaggtgggcataattgtatttgtgc

SEQ ID NO: 1204789 - DNA, 25 bp, Homo sapien
cagagtggtattgactgccatcttc

SEQ ID NO: 1204790 - DNA, 25 bp, Homo sapien
taatggttccgtgttctatctgagg

SEQ ID NO: 1204791 - DNA, 25 bp, Homo sapien
tgaaaccaccctcacaagtataact

SEQ ID NO: 1204792 - DNA, 25 bp, Homo sapien
actttcttgtgaagacctggatgaa

SEQ ID NO: 1204793 - DNA, 25 bp, Homo sapien
tataactcaatttagtcccatgtgc

SEQ ID NO: 1204794 - DNA, 25 bp, Homo sapien
acatttgtacgtaacttcttctcca

SEQ ID NO: 1204795 - DNA, 25 bp, Homo sapien
gtgagctacaacaccatgagaaatc

SEQ ID NO: 1204796 - DNA, 25 bp, Homo sapien
ttttctcctaagcattttgcaattg

SEQ ID NO: 1204797 - DNA, 25 bp, Homo sapien
caattgcaggcccatcaattccaaa

SEQ ID NO: 1204798 - DNA, 25 bp, Homo sapien
accttatgaatttctagagtccctg

SEQ ID NO: 1204799 - DNA, 25 bp, Homo sapien
ccacttacactttgaatgaagaata

SEQ ID NO: 1204800 - DNA, 25 bp, Homo sapien
ctttcttattggtaccacttacact

SEQ ID NO: 1204801 - DNA, 25 bp, Homo sapien
aattactacagctataatttcccac

SEQ ID NO: 1204802 - DNA, 25 bp, Homo sapien
catcagaggatgcttaaagttcaca

SEQ ID NO: 1204803 - DNA, 25 bp, Homo sapien
ctgaagaaatattggtagccgtagc

SEQ ID NO: 1204804 - DNA, 25 bp, Homo sapien
gcagctgtgccctaagaacagagat

SEQ ID NO: 1204805 - DNA, 25 bp, Homo sapien
ccttcagcggtaatggtaagtttca

SEQ ID NO: 1204806 - DNA, 25 bp, Homo sapien
ttcaaagctaggtaaactgagacaa

SEQ ID NO: 1204807 - DNA, 25 bp, Homo sapien
tcaaagctaggtaaactgagacaat

SEQ ID NO: 1204808 - DNA, 25 bp, Homo sapien
aagctaggtaaactgagacaatctg

SEQ ID NO: 1204809 - DNA, 25 bp, Homo sapien
caaagctaggtaaactgagacaatc

SEQ ID NO: 1204810 - DNA, 25 bp, Homo sapien
atgttgcacaagtgtaagtcacttg

SEQ ID NO: 1204811 - DNA, 25 bp, Homo sapien
tcctgtccatctgctattaatgcat

SEQ ID NO: 1204812 - DNA, 25 bp, Homo sapien
ccatctgctattaatgcatgttaca

SEQ ID NO: 1204813 - DNA, 25 bp, Homo sapien
gttgcacaagtgtaagtcacttgct

SEQ ID NO: 1204814 - DNA, 25 bp, Homo sapien
taggcatacgactactttgtcctgc

SEQ ID NO: 1204815 - DNA, 25 bp, Homo sapien
gaagtgtaaatagaattccctggag

SEQ ID NO: 1204816 - DNA, 25 bp, Homo sapien
taccggtttagcgaccacactttga

SEQ ID NO: 1204817 - DNA, 25 bp, Homo sapien
tatagcaatgcttctcactcggaag

SEQ ID NO: 1204818 - DNA, 25 bp, Homo sapien
tgtgggcggattcacacaggaggtg

SEQ ID NO: 1204819 - DNA, 25 bp, Homo sapien
gtgggcggattcacacaggaggtgt

SEQ ID NO: 1204820 - DNA, 25 bp, Homo sapien
ctgtgggcggattcacacaggaggt

SEQ ID NO: 1204821 - DNA, 25 bp, Homo sapien
ataagggctcctacattgataacgt

SEQ ID NO: 1204822 - DNA, 25 bp, Homo sapien
acatttcataagggctcctacattg

SEQ ID NO: 1204823 - DNA, 25 bp, Homo sapien
tttcataagggctcctacattgata

SEQ ID NO: 1204824 - DNA, 25 bp, Homo sapien
tcataagggctcctacattgataac

SEQ ID NO: 1204825 - DNA, 25 bp, Homo sapien
gaagaattgaattttaagcaccatc

SEQ ID NO: 1204826 - DNA, 25 bp, Homo sapien
ttattacacgtattcctgagaagga

SEQ ID NO: 1204827 - DNA, 25 bp, Homo sapien
caatttggtcgaatctttctggaaa

SEQ ID NO: 1204828 - DNA, 25 bp, Homo sapien
gaatgcacatcacttatggctgtca

SEQ ID NO: 1204829 - DNA, 25 bp, Homo sapien
gctggagcatatactgacaacggga

SEQ ID NO: 1204830 - DNA, 25 bp, Homo sapien
tacaagttctggcattggtactcaa

SEQ ID NO: 1204831 - DNA, 25 bp, Homo sapien
tattcgcttgttaccctcaagttga

SEQ ID NO: 1204832 - DNA, 25 bp, Homo sapien
ggtactcaactgatgaagctggagc

SEQ ID NO: 1204833 - DNA, 25 bp, Homo sapien
gatttttccagccacgtgaatatta

SEQ ID NO: 1204834 - DNA, 25 bp, Homo sapien
cagaaatatttggtaggcaagcatt

SEQ ID NO: 1204835 - DNA, 25 bp, Homo sapien
tcagcagaatggttgttcaataatc

SEQ ID NO: 1204836 - DNA, 25 bp, Homo sapien
ccagccacgtgaatattaaagtact

SEQ ID NO: 1204837 - DNA, 25 bp, Homo sapien
tgtccaccttaatgctatgttataa

SEQ ID NO: 1204838 - DNA, 25 bp, Homo sapien
ttggctgtccaccttaatgctatgt

SEQ ID NO: 1204839 - DNA, 25 bp, Homo sapien
ataatttctcgggatattacacacg

SEQ ID NO: 1204840 - DNA, 25 bp, Homo sapien
aatttctcgggatattacacacgga

SEQ ID NO: 1204841 - DNA, 25 bp, Homo sapien
tatccccgtttacacacaaattcaa

SEQ ID NO: 1204842 - DNA, 25 bp, Homo sapien
ttttgcacaagttggatactccagt

SEQ ID NO: 1204843 - DNA, 25 bp, Homo sapien
tttgcacaagttggatactccagtt

SEQ ID NO: 1204844 - DNA, 25 bp, Homo sapien
ccaccggtctcagcttataattaca

SEQ ID NO: 1204845 - DNA, 25 bp, Homo sapien
gatttaatactaaagttctgaataa

SEQ ID NO: 1204846 - DNA, 25 bp, Homo sapien
taatccaaaattttacgtatgaata

SEQ ID NO: 1204847 - DNA, 25 bp, Homo sapien
atggtgcttttaagaagagagccac

SEQ ID NO: 1204848 - DNA, 25 bp, Homo sapien
tcagagacaatgatatgctttccat

SEQ ID NO: 1204849 - DNA, 25 bp, Homo sapien
acattttatgaactggacacaaccg

SEQ ID NO: 1204850 - DNA, 25 bp, Homo sapien
taccaacatgagttaagacttgact

SEQ ID NO: 1204851 - DNA, 25 bp, Homo sapien
aaaacagtgagcctcagaagctgtg

SEQ ID NO: 1204852 - DNA, 25 bp, Homo sapien
ttgtttccattaggttatccaacag

SEQ ID NO: 1204853 - DNA, 25 bp, Homo sapien
cattatgtttcagtaatcgtggtag

SEQ ID NO: 1204854 - DNA, 25 bp, Homo sapien
ggttatccaacagttatatgttggc

SEQ ID NO: 1204855 - DNA, 25 bp, Homo sapien
taactgttcatagcggtctcttctg

SEQ ID NO: 1204856 - DNA, 25 bp, Homo sapien
agaaaacatcatggcaacagtttat

SEQ ID NO: 1204857 - DNA, 25 bp, Homo sapien
gatggccaaggcattttactagttg

SEQ ID NO: 1204858 - DNA, 25 bp, Homo sapien
caagtgggaataagaacctgaaaca

SEQ ID NO: 1204859 - DNA, 25 bp, Homo sapien
caacagtttatgagatggccaaggc

SEQ ID NO: 1204860 - DNA, 25 bp, Homo sapien
catgagaagcaatgaggagccagtt

SEQ ID NO: 1204861 - DNA, 25 bp, Homo sapien
gaataaatcaaaatacacgactcca

SEQ ID NO: 1204862 - DNA, 25 bp, Homo sapien
ccaaagtattggacattcccatcta

SEQ ID NO: 1204863 - DNA, 25 bp, Homo sapien
gagccagtttccagagatatccaga

SEQ ID NO: 1204864 - DNA, 25 bp, Homo sapien
caaaagtttcagttgcactgtttgg

SEQ ID NO: 1204865 - DNA, 25 bp, Homo sapien
caggaaacccacaaggtcagaatga

SEQ ID NO: 1204866 - DNA, 25 bp, Homo sapien
ggaaacccacaaggtcagaatgaca

SEQ ID NO: 1204867 - DNA, 25 bp, Homo sapien
aacccacaaggtcagaatgacattg

SEQ ID NO: 1204868 - DNA, 25 bp, Homo sapien
cacaaggtcagaatgacattgatta

SEQ ID NO: 1204869 - DNA, 25 bp, Homo sapien
catgtggttccactgctaatgttac

SEQ ID NO: 1204870 - DNA, 25 bp, Homo sapien
tattaccctccattacattggctga

SEQ ID NO: 1204871 - DNA, 25 bp, Homo sapien
taaagtggcatagcttcgcgaagag

SEQ ID NO: 1204872 - DNA, 25 bp, Homo sapien
gacacacacccttgattgtccatga

SEQ ID NO: 1204873 - DNA, 25 bp, Homo sapien
tctcatgaaatagacctccatgttt

SEQ ID NO: 1204874 - DNA, 25 bp, Homo sapien
tcatgaaatagacctccatgtttaa

SEQ ID NO: 1204875 - DNA, 25 bp, Homo sapien
atgaaatagacctccatgtttaatg

SEQ ID NO: 1204876 - DNA, 25 bp, Homo sapien
ttctcatgaaatagacctccatgtt

SEQ ID NO: 1204877 - DNA, 25 bp, Homo sapien
ctggtgaccacccattttgtgtgca

SEQ ID NO: 1204878 - DNA, 25 bp, Homo sapien
gagacatggtactgctggtgaccac

SEQ ID NO: 1204879 - DNA, 25 bp, Homo sapien
gctggtgaccacccattttgtgtgc

SEQ ID NO: 1204880 - DNA, 25 bp, Homo sapien
gtctgcgcttttggaagaccgtagc

SEQ ID NO: 1204881 - DNA, 25 bp, Homo sapien
tctgcgcttttggaagaccgtagcc

SEQ ID NO: 1204882 - DNA, 25 bp, Homo sapien
tggtctgcgcttttggaagaccgta

SEQ ID NO: 1204883 - DNA, 25 bp, Homo sapien
tgtggtctgcgcttttggaagaccg

SEQ ID NO: 1204884 - DNA, 25 bp, Homo sapien
tcaatttctatatctgattttgagc

SEQ ID NO: 1204885 - DNA, 25 bp, Homo sapien
ctgctgttgcatatcctggtttaca

SEQ ID NO: 1204886 - DNA, 25 bp, Homo sapien
tctatatctgattttgagcatgttc

SEQ ID NO: 1204887 - DNA, 25 bp, Homo sapien
tctgctgttgcatatcctggtttac

SEQ ID NO: 1204888 - DNA, 25 bp, Homo sapien
tggttgtgctgaccatccattttgc

SEQ ID NO: 1204889 - DNA, 25 bp, Homo sapien
gcaaattggttgtgctgaccatcca

SEQ ID NO: 1204890 - DNA, 25 bp, Homo sapien
gttgtgctgaccatccattttgcaa

SEQ ID NO: 1204891 - DNA, 25 bp, Homo sapien
taatgcaaattggttgtgctgacca

SEQ ID NO: 1204892 - DNA, 25 bp, Homo sapien
taagattgcttttatgtaaaggcag

SEQ ID NO: 1204893 - DNA, 25 bp, Homo sapien
gcaactaacatattttgctgatact

SEQ ID NO: 1204894 - DNA, 25 bp, Homo sapien
tcatgcagctccctaactagtctgt

SEQ ID NO: 1204895 - DNA, 25 bp, Homo sapien
caaagtttttattggcaactaacat

SEQ ID NO: 1204896 - DNA, 25 bp, Homo sapien
tcccccgacatgtacaacttttctg

SEQ ID NO: 1204897 - DNA, 25 bp, Homo sapien
gtacaacttttctgagcgtgagcac

SEQ ID NO: 1204898 - DNA, 25 bp, Homo sapien
aattcagaattaagcactcatttct

SEQ ID NO: 1204899 - DNA, 25 bp, Homo sapien
tgagcacggaatgcaatacaagcag

SEQ ID NO: 1204900 - DNA, 25 bp, Homo sapien
ttattaaggtctgattctcctgacg

SEQ ID NO: 1204901 - DNA, 25 bp, Homo sapien
tgattggatatcctcagtagcatca

SEQ ID NO: 1204902 - DNA, 25 bp, Homo sapien
ctgtagtaaacaatagggtagagat

SEQ ID NO: 1204903 - DNA, 25 bp, Homo sapien
aattttttgattggatatcctcagt

SEQ ID NO: 1204904 - DNA, 25 bp, Homo sapien
tgtgtcacggagcttaaaccgcttt

SEQ ID NO: 1204905 - DNA, 25 bp, Homo sapien
tactaagtaaaggtcgagcacgttc

SEQ ID NO: 1204906 - DNA, 25 bp, Homo sapien
taacatgttgggaaatgggactacc

SEQ ID NO: 1204907 - DNA, 25 bp, Homo sapien
cacagagcccttgataagtatagaa

SEQ ID NO: 1204908 - DNA, 25 bp, Homo sapien
gaaccctgaagttcatagtagggct

SEQ ID NO: 1204909 - DNA, 25 bp, Homo sapien
cctgaagttcatagtagggctggca

SEQ ID NO: 1204910 - DNA, 25 bp, Homo sapien
ccctgaagttcatagtagggctggc

SEQ ID NO: 1204911 - DNA, 25 bp, Homo sapien
tagaaccctgaagttcatagtaggg

SEQ ID NO: 1204912 - DNA, 25 bp, Homo sapien
acataaattcaatggtatcccctgt

SEQ ID NO: 1204913 - DNA, 25 bp, Homo sapien
aattcaatggtatcccctgtttttg

SEQ ID NO: 1204914 - DNA, 25 bp, Homo sapien
aatggtatcccctgtttttgcataa

SEQ ID NO: 1204915 - DNA, 25 bp, Homo sapien
caatggtatcccctgtttttgcata

SEQ ID NO: 1204916 - DNA, 25 bp, Homo sapien
ttattcgcatctggggtattccact

SEQ ID NO: 1204917 - DNA, 25 bp, Homo sapien
cataagagtgagaagtggaaaagtg

SEQ ID NO: 1204918 - DNA, 25 bp, Homo sapien
accataagagtgagaagtggaaaag

SEQ ID NO: 1204919 - DNA, 25 bp, Homo sapien
ccataagagtgagaagtggaaaagt

SEQ ID NO: 1204920 - DNA, 25 bp, Homo sapien
ataagagtgagaagtggaaaagtgg

SEQ ID NO: 1204921 - DNA, 25 bp, Homo sapien
tcctaaagtgtcaacattgcccaag

SEQ ID NO: 1204922 - DNA, 25 bp, Homo sapien
cccaatgctctgaaagggttagcaa

SEQ ID NO: 1204923 - DNA, 25 bp, Homo sapien
ttaactgcatctagaggaccatggc

SEQ ID NO: 1204924 - DNA, 25 bp, Homo sapien
ggaccatggctacaataagggaata

SEQ ID NO: 1204925 - DNA, 25 bp, Homo sapien
aagaaatgcaaaaaaccatatatga

SEQ ID NO: 1204926 - DNA, 25 bp, Homo sapien
aatgcaaaaaaccatatatgaagaa

SEQ ID NO: 1204927 - DNA, 25 bp, Homo sapien
gaaatgcaaaaaaccatatatgaag

SEQ ID NO: 1204928 - DNA, 25 bp, Homo sapien
taagaaatgcaaaaaaccatatatg

SEQ ID NO: 1204929 - DNA, 25 bp, Homo sapien
gagtgaaggcaattaacaggagaaa

SEQ ID NO: 1204930 - DNA, 25 bp, Homo sapien
aagttattcctagctttagccacca

SEQ ID NO: 1204931 - DNA, 25 bp, Homo sapien
ctataatcaggaaaagtgttgggaa

SEQ ID NO: 1204932 - DNA, 25 bp, Homo sapien
gtacaggactagatcattatacaag

SEQ ID NO: 1204933 - DNA, 25 bp, Homo sapien
tttctggtgcttctgttggtttagg

SEQ ID NO: 1204934 - DNA, 25 bp, Homo sapien
gcttctgttggtttaggtccttctg

SEQ ID NO: 1204935 - DNA, 25 bp, Homo sapien
tctggtgcttctgttggtttaggtc

SEQ ID NO: 1204936 - DNA, 25 bp, Homo sapien
gtgcttctgttggtttaggtccttc

SEQ ID NO: 1204937 - DNA, 25 bp, Homo sapien
ggttgttcgttgagggatccatcca

SEQ ID NO: 1204938 - DNA, 25 bp, Homo sapien
gacttctttgtcctaccaccactgg

SEQ ID NO: 1204939 - DNA, 25 bp, Homo sapien
cactgggtcatacaggatgcatttt

SEQ ID NO: 1204940 - DNA, 25 bp, Homo sapien
tccatagaactcacacgcagacttc

SEQ ID NO: 1204941 - DNA, 25 bp, Homo sapien
gatgtctcaaatagtgctgctccta

SEQ ID NO: 1204942 - DNA, 25 bp, Homo sapien
aaaccgtggtccgtctgtctatgca

SEQ ID NO: 1204943 - DNA, 25 bp, Homo sapien
cacacggtagaaactgatgtctcaa

SEQ ID NO: 1204944 - DNA, 25 bp, Homo sapien
ggatattacaaatcacacacggtag

SEQ ID NO: 1204945 - DNA, 25 bp, Homo sapien
ggtggtggtgttgctttgaatctgc

SEQ ID NO: 1204946 - DNA, 25 bp, Homo sapien
gcttggtagttccaatcttatataa

SEQ ID NO: 1204947 - DNA, 25 bp, Homo sapien
cttggtagttccaatcttatataac

SEQ ID NO: 1204948 - DNA, 25 bp, Homo sapien
gaggatatccgtgagattagaatta

SEQ ID NO: 1204949 - DNA, 25 bp, Homo sapien
tatccgtgagattagaattacactg

SEQ ID NO: 1204950 - DNA, 25 bp, Homo sapien
ggatatccgtgagattagaattaca

SEQ ID NO: 1204951 - DNA, 25 bp, Homo sapien
cagaggatatccgtgagattagaat

SEQ ID NO: 1204952 - DNA, 25 bp, Homo sapien
cactaactaggagtacatgactatt

SEQ ID NO: 1204953 - DNA, 25 bp, Homo sapien
gagtacatgactatttgaggaggta

SEQ ID NO: 1204954 - DNA, 25 bp, Homo sapien
aagcatcactaactaggagtacatg

SEQ ID NO: 1204955 - DNA, 25 bp, Homo sapien
ggaggtaattgttaatgaatataaa

SEQ ID NO: 1204956 - DNA, 25 bp, Homo sapien
tcatatagaattccatggtttattt

SEQ ID NO: 1204957 - DNA, 25 bp, Homo sapien
gtgcatgttatgcgagtccaaaatg

SEQ ID NO: 1204958 - DNA, 25 bp, Homo sapien
tgcatgttatgcgagtccaaaatga

SEQ ID NO: 1204959 - DNA, 25 bp, Homo sapien
tgtgcatgttatgcgagtccaaaat

SEQ ID NO: 1204960 - DNA, 25 bp, Homo sapien
actttggtgttggtgaccatccttc

SEQ ID NO: 1204961 - DNA, 25 bp, Homo sapien
ctttggtgttggtgaccatccttct

SEQ ID NO: 1204962 - DNA, 25 bp, Homo sapien
ggaccagccccgttctacacatgaa

SEQ ID NO: 1204963 - DNA, 25 bp, Homo sapien
gtggaccagccccgttctacacatg

SEQ ID NO: 1204964 - DNA, 25 bp, Homo sapien
gaccagccccgttctacacatgaaa

SEQ ID NO: 1204965 - DNA, 25 bp, Homo sapien
accagccccgttctacacatgaaat

SEQ ID NO: 1204966 - DNA, 25 bp, Homo sapien
ctgtgggcggattcacacaggaagt

SEQ ID NO: 1204967 - DNA, 25 bp, Homo sapien
ataagggctcctacattcataacgt

SEQ ID NO: 1204968 - DNA, 25 bp, Homo sapien
tcataagggctcctacattcataac

SEQ ID NO: 1204969 - DNA, 25 bp, Homo sapien
acatttcataagggctcctacattc

SEQ ID NO: 1204970 - DNA, 25 bp, Homo sapien
tttcataagggctcctacattcata

SEQ ID NO: 1204971 - DNA, 25 bp, Homo sapien
tattcgcttgttaccctcaagttga

SEQ ID NO: 1204972 - DNA, 25 bp, Homo sapien
ggtactcaactgatgaagctggagc

SEQ ID NO: 1204973 - DNA, 25 bp, Homo sapien
gctggagcatatactgacaacggga

SEQ ID NO: 1204974 - DNA, 25 bp, Homo sapien
tacaagttctggcattggtactcaa

SEQ ID NO: 1204975 - DNA, 25 bp, Homo sapien
tccccgtttacacacaaattcagct

SEQ ID NO: 1204976 - DNA, 25 bp, Homo sapien
tatccccgtttacacacaaattcag

SEQ ID NO: 1204977 - DNA, 25 bp, Homo sapien
ccccgtttacacacaaattcagctg

SEQ ID NO: 1204978 - DNA, 25 bp, Homo sapien
atccccgtttacacacaaattcagc

SEQ ID NO: 1204979 - DNA, 25 bp, Homo sapien
tttgcacaagttggatactccagtt

SEQ ID NO: 1204980 - DNA, 25 bp, Homo sapien
ttttgcacaagttggatactccagt

SEQ ID NO: 1204981 - DNA, 25 bp, Homo sapien
gatttaatactaaagttctgaataa

SEQ ID NO: 1204982 - DNA, 25 bp, Homo sapien
tgatttaatactaaagttctgaata

SEQ ID NO: 1204983 - DNA, 25 bp, Homo sapien
tttaatatggtgcttttaagaagag

SEQ ID NO: 1204984 - DNA, 25 bp, Homo sapien
ccaccggtctcagcttataattaca

SEQ ID NO: 1204985 - DNA, 25 bp, Homo sapien
gcttttaagaagagagccaccggtc

SEQ ID NO: 1204986 - DNA, 25 bp, Homo sapien
taatccaaaattttacgtatgaata

SEQ ID NO: 1204987 - DNA, 25 bp, Homo sapien
gaataaatcaaaatacacgactcca

SEQ ID NO: 1204988 - DNA, 25 bp, Homo sapien
ccaaagtattggacattcccatcta

SEQ ID NO: 1204989 - DNA, 25 bp, Homo sapien
gagccagtttccagagatatccaga

SEQ ID NO: 1204990 - DNA, 25 bp, Homo sapien
catgagaagcaatgaggagccagtt

SEQ ID NO: 1204991 - DNA, 25 bp, Homo sapien
ccattagcataggaaacccacaagg

SEQ ID NO: 1204992 - DNA, 25 bp, Homo sapien
cttgtccattagcataggaaaccca

SEQ ID NO: 1204993 - DNA, 25 bp, Homo sapien
gagaatgacattaattagtaacaac

SEQ ID NO: 1204994 - DNA, 25 bp, Homo sapien
ccacaaggtgagaatgacattaatt

SEQ ID NO: 1204995 - DNA, 25 bp, Homo sapien
cctccactacatttgttgaaatatt

SEQ ID NO: 1204996 - DNA, 25 bp, Homo sapien
ttatattcttcattaatggccacaa

SEQ ID NO: 1204997 - DNA, 25 bp, Homo sapien
tggccacaaacccttgattgtccat

SEQ ID NO: 1204998 - DNA, 25 bp, Homo sapien
atattatgaagtttcggataattac

SEQ ID NO: 1204999 - DNA, 25 bp, Homo sapien
tgcttcactgactgtgacagtcctc

SEQ ID NO: 1205000 - DNA, 25 bp, Homo sapien
cttcactgactgtgacagtcctcat

SEQ ID NO: 1205001 - DNA, 25 bp, Homo sapien
ctgcttcactgactgtgacagtcct

SEQ ID NO: 1205002 - DNA, 25 bp, Homo sapien
gcttcactgactgtgacagtcctca

SEQ ID NO: 1205003 - DNA, 25 bp, Homo sapien
ctgattcgatgttggataatactgt

SEQ ID NO: 1205004 - DNA, 25 bp, Homo sapien
gattcgatgttggataatactgtta

SEQ ID NO: 1205005 - DNA, 25 bp, Homo sapien
attcgatgttggataatactgttac

SEQ ID NO: 1205006 - DNA, 25 bp, Homo sapien
ctctgattcgatgttggataatact

SEQ ID NO: 1205007 - DNA, 25 bp, Homo sapien
ttcctacagctactggaaagtatgg

SEQ ID NO: 1205008 - DNA, 25 bp, Homo sapien
tcctacagctactggaaagtatggt

SEQ ID NO: 1205009 - DNA, 25 bp, Homo sapien
tgagacatggtactgctggcgacca

SEQ ID NO: 1205010 - DNA, 25 bp, Homo sapien
gacatggtactgctggcgaccaccc

SEQ ID NO: 1205011 - DNA, 25 bp, Homo sapien
gagacatggtactgctggcgaccac

SEQ ID NO: 1205012 - DNA, 25 bp, Homo sapien
catggtactgctggcgaccacccat

SEQ ID NO: 1205013 - DNA, 25 bp, Homo sapien
cttagtgacacggatgcatctgcaa

SEQ ID NO: 1205014 - DNA, 25 bp, Homo sapien
caggaaggaaggcaacttctacaga

SEQ ID NO: 1205015 - DNA, 25 bp, Homo sapien
ctaaataggtccgatggcgaagcaa

SEQ ID NO: 1205016 - DNA, 25 bp, Homo sapien
tctgctcatttggaagaccacagcc

SEQ ID NO: 1205017 - DNA, 25 bp, Homo sapien
accacaaatggtttctctgctgcag

SEQ ID NO: 1205018 - DNA, 25 bp, Homo sapien
ccacaaatggtttctctgctgcaga

SEQ ID NO: 1205019 - DNA, 25 bp, Homo sapien
gaccacaaatggtttctctgctgca

SEQ ID NO: 1205020 - DNA, 25 bp, Homo sapien
caaattttaggtatctgctcaggta

SEQ ID NO: 1205021 - DNA, 25 bp, Homo sapien
gatctcctggaccttactgaggccg

SEQ ID NO: 1205022 - DNA, 25 bp, Homo sapien
caaaggcacactcattaggcttctg

SEQ ID NO: 1205023 - DNA, 25 bp, Homo sapien
cattttgtaactttccctgcatagc

SEQ ID NO: 1205024 - DNA, 25 bp, Homo sapien
cagggactactagggtcagagccac

SEQ ID NO: 1205025 - DNA, 25 bp, Homo sapien
tggtccagggactactagggtcaga

SEQ ID NO: 1205026 - DNA, 25 bp, Homo sapien
ttgtggtccagggactactagggtc

SEQ ID NO: 1205027 - DNA, 25 bp, Homo sapien
ttgttgtggtccagggactactagg

SEQ ID NO: 1205028 - DNA, 25 bp, Homo sapien
caggctttgtaaggcatgggcaatt

SEQ ID NO: 1205029 - DNA, 25 bp, Homo sapien
tatcccaggcatttggtgggcagaa

SEQ ID NO: 1205030 - DNA, 25 bp, Homo sapien
ttgggacctgcaatgggatgtccct

SEQ ID NO: 1205031 - DNA, 25 bp, Homo sapien
tggtgggcagaagactgactgtgtt

SEQ ID NO: 1205032 - DNA, 25 bp, Homo sapien
ggacttccagttgtaataatgtggc

SEQ ID NO: 1205033 - DNA, 25 bp, Homo sapien
ttggagtatctcttcagggatgagg

SEQ ID NO: 1205034 - DNA, 25 bp, Homo sapien
aaaacttgacttgtactggagatgc

SEQ ID NO: 1205035 - DNA, 25 bp, Homo sapien
catgctcccggactaacattttgga

SEQ ID NO: 1205036 - DNA, 25 bp, Homo sapien
ctccctcactcattttttgaggctc

SEQ ID NO: 1205037 - DNA, 25 bp, Homo sapien
cctccctcactcattttttgaggct

SEQ ID NO: 1205038 - DNA, 25 bp, Homo sapien
aggaagagaataagaaaaagacaag

SEQ ID NO: 1205039 - DNA, 25 bp, Homo sapien
ggaagagaataagaaaaagacaagc

SEQ ID NO: 1205040 - DNA, 25 bp, Homo sapien
aagagaataagaaaaagacaagcat

SEQ ID NO: 1205041 - DNA, 25 bp, Homo sapien
gaagagaataagaaaaagacaagca

SEQ ID NO: 1205042 - DNA, 25 bp, Homo sapien
aataaacccattctcaatatcgata

SEQ ID NO: 1205043 - DNA, 25 bp, Homo sapien
aaataaacccattctcaatatcgat

SEQ ID NO: 1205044 - DNA, 25 bp, Homo sapien
aacccattctcaatatcgatacttg

SEQ ID NO: 1205045 - DNA, 25 bp, Homo sapien
taaacccattctcaatatcgatact

SEQ ID NO: 1205046 - DNA, 25 bp, Homo sapien
catgtgggttgagctgaccatccat

SEQ ID NO: 1205047 - DNA, 25 bp, Homo sapien
gcatgtgggttgagctgaccatcca

SEQ ID NO: 1205048 - DNA, 25 bp, Homo sapien
aaggaaagctactgttggtgatctc

SEQ ID NO: 1205049 - DNA, 25 bp, Homo sapien
tgatgccctcactaattatccatgg

SEQ ID NO: 1205050 - DNA, 25 bp, Homo sapien
tttaatacagggaatgaaaggcttc

SEQ ID NO: 1205051 - DNA, 25 bp, Homo sapien
cagctgctgacagataatgccttgt

SEQ ID NO: 1205052 - DNA, 25 bp, Homo sapien
tatagtaatgcaaaagtttcagttg

SEQ ID NO: 1205053 - DNA, 25 bp, Homo sapien
tctcagtagtatagtaatgcaaaag

SEQ ID NO: 1205054 - DNA, 25 bp, Homo sapien
gatattctcagtagtatagtaatgc

SEQ ID NO: 1205055 - DNA, 25 bp, Homo sapien
tagtatagtaatgcaaaagtttcag

SEQ ID NO: 1205056 - DNA, 25 bp, Homo sapien
caggaaacccacaaggtcagaatga

SEQ ID NO: 1205057 - DNA, 25 bp, Homo sapien
aacccacaaggtcagaatgacattg

SEQ ID NO: 1205058 - DNA, 25 bp, Homo sapien
ggaaacccacaaggtcagaatgaca

SEQ ID NO: 1205059 - DNA, 25 bp, Homo sapien
cacaaggtcagaatgacattgatta

SEQ ID NO: 1205060 - DNA, 25 bp, Homo sapien
tgcttcactgactgtgacagtcctc

SEQ ID NO: 1205061 - DNA, 25 bp, Homo sapien
cttcactgactgtgacagtcctcat

SEQ ID NO: 1205062 - DNA, 25 bp, Homo sapien
gcttcactgactgtgacagtcctca

SEQ ID NO: 1205063 - DNA, 25 bp, Homo sapien
ctgcttcactgactgtgacagtcct

SEQ ID NO: 1205064 - DNA, 25 bp, Homo sapien
tactagtgcatttgccctgtttccc

SEQ ID NO: 1205065 - DNA, 25 bp, Homo sapien
cattttgaatataaggaggattaca

SEQ ID NO: 1205066 - DNA, 25 bp, Homo sapien
caggtgtgtagacatcattttgaat

SEQ ID NO: 1205067 - DNA, 25 bp, Homo sapien
aaagccatctataaactcacatatg

SEQ ID NO: 1205068 - DNA, 25 bp, Homo sapien
tgctacatcctggagcacgtaggta

SEQ ID NO: 1205069 - DNA, 25 bp, Homo sapien
catcctggagcacgtaggtacccac

SEQ ID NO: 1205070 - DNA, 25 bp, Homo sapien
tacatcctggagcacgtaggtaccc

SEQ ID NO: 1205071 - DNA, 25 bp, Homo sapien
gctacatcctggagcacgtaggtac

SEQ ID NO: 1205072 - DNA, 25 bp, Homo sapien
gatcagcctaagcatcacagcaaga

SEQ ID NO: 1205073 - DNA, 25 bp, Homo sapien
tcatgcttttgacaattcatctggg

SEQ ID NO: 1205074 - DNA, 25 bp, Homo sapien
gcgacgtatactgcgctgctgcact

SEQ ID NO: 1205075 - DNA, 25 bp, Homo sapien
cacgataatccgaacaccttgggag

SEQ ID NO: 1205076 - DNA, 25 bp, Homo sapien
gtatagtctacgcaaactcttataa

SEQ ID NO: 1205077 - DNA, 25 bp, Homo sapien
ctgctggaaagtatagtctacgcaa

SEQ ID NO: 1205078 - DNA, 25 bp, Homo sapien
cttataatatagacctccatgttga

SEQ ID NO: 1205079 - DNA, 25 bp, Homo sapien
cctgaaggagtcacaaaattttgat

SEQ ID NO: 1205080 - DNA, 25 bp, Homo sapien
aatgcaaattggttgtgttgaccat

SEQ ID NO: 1205081 - DNA, 25 bp, Homo sapien
taatgcaaattggttgtgttgacca

SEQ ID NO: 1205082 - DNA, 25 bp, Homo sapien
gctgttgcatatcctggtttacaat

SEQ ID NO: 1205083 - DNA, 25 bp, Homo sapien
tgctgttgcatatcctggtttacaa

SEQ ID NO: 1205084 - DNA, 25 bp, Homo sapien
gtcatggagcttaaaccacatgcca

SEQ ID NO: 1205085 - DNA, 25 bp, Homo sapien
cagatacactttttgcgggaaggac

SEQ ID NO: 1205086 - DNA, 25 bp, Homo sapien
actcttgaccatggcagatacactt

SEQ ID NO: 1205087 - DNA, 25 bp, Homo sapien
gaaggacgtggtatctccattgcta

SEQ ID NO: 1205088 - DNA, 25 bp, Homo sapien
tctccattactacatgttacatatt

SEQ ID NO: 1205089 - DNA, 25 bp, Homo sapien
tctggaaactcacaaggtttcattg

SEQ ID NO: 1205090 - DNA, 25 bp, Homo sapien
gaaagtatggtctacgcgtattctc

SEQ ID NO: 1205091 - DNA, 25 bp, Homo sapien
gaggcatgggactgttggcaaccac

SEQ ID NO: 1205092 - DNA, 25 bp, Homo sapien
tggaaagtatggtctacgcgtattc

SEQ ID NO: 1205093 - DNA, 25 bp, Homo sapien
tctgctgttgcatatcctggtttac

SEQ ID NO: 1205094 - DNA, 25 bp, Homo sapien
tctatatctgattttgagcatgttc

SEQ ID NO: 1205095 - DNA, 25 bp, Homo sapien
ggttgtgctgaccatccattttgca

SEQ ID NO: 1205096 - DNA, 25 bp, Homo sapien
taatgcaaattggttgtgctgacca

SEQ ID NO: 1205097 - DNA, 25 bp, Homo sapien
gtcatggagcttaaaccgcatgcca

SEQ ID NO: 1205098 - DNA, 25 bp, Homo sapien
taacatgttgggaaatgggaccacc

SEQ ID NO: 1205099 - DNA, 25 bp, Homo sapien
ataacatgttgggaaatgggaccac

SEQ ID NO: 1205100 - DNA, 25 bp, Homo sapien
acatgttgggaaatgggaccaccca

SEQ ID NO: 1205101 - DNA, 25 bp, Homo sapien
aattcacactcataggaggactaca

SEQ ID NO: 1205102 - DNA, 25 bp, Homo sapien
aagataattcacactcataggagga

SEQ ID NO: 1205103 - DNA, 25 bp, Homo sapien
ttttaagtctcaagataattcacac

SEQ ID NO: 1205104 - DNA, 25 bp, Homo sapien
ttatttgatttcttaggaagacatc

SEQ ID NO: 1205105 - DNA, 25 bp, Homo sapien
tatgcatcttggtggttccgaccac

SEQ ID NO: 1205106 - DNA, 25 bp, Homo sapien
gaaccctgaagttcatagtaggact

SEQ ID NO: 1205107 - DNA, 25 bp, Homo sapien
ctggcattggtactcgactcttgac

SEQ ID NO: 1205108 - DNA, 25 bp, Homo sapien
gaaaggaggtggtatcaccattgct

SEQ ID NO: 1205109 - DNA, 25 bp, Homo sapien
agtttggagctcaaacttggacatg

SEQ ID NO: 1205110 - DNA, 25 bp, Homo sapien
tggacatgatcatctacagaagtgg

SEQ ID NO: 1205111 - DNA, 25 bp, Homo sapien
ttcttcagtcttgccacttgcatag

SEQ ID NO: 1205112 - DNA, 25 bp, Homo sapien
catgatcatctacagaagtggatac

SEQ ID NO: 1205113 - DNA, 25 bp, Homo sapien
taagcctaattcttacatgataaaa

SEQ ID NO: 1205114 - DNA, 25 bp, Homo sapien
tgttacttccacatatgggttttct

SEQ ID NO: 1205115 - DNA, 25 bp, Homo sapien
taacatagtacatatcacttttgag

SEQ ID NO: 1205116 - DNA, 25 bp, Homo sapien
aagtattctgcattctagtttagcc

SEQ ID NO: 1205117 - DNA, 25 bp, Homo sapien
aattcaatggtatcccctgtttttg

SEQ ID NO: 1205118 - DNA, 25 bp, Homo sapien
acataaattcaatggtatcccctgt

SEQ ID NO: 1205119 - DNA, 25 bp, Homo sapien
aatggtatcccctgtttttgcataa

SEQ ID NO: 1205120 - DNA, 25 bp, Homo sapien
caatggtatcccctgtttttgcata

SEQ ID NO: 1205121 - DNA, 25 bp, Homo sapien
tctggggtattccactatgccttcc

SEQ ID NO: 1205122 - DNA, 25 bp, Homo sapien
cgcatctggggtattccactatgcc

SEQ ID NO: 1205123 - DNA, 25 bp, Homo sapien
catctggggtattccactatgcctt

SEQ ID NO: 1205124 - DNA, 25 bp, Homo sapien
ttcgcatctggggtattccactatg

SEQ ID NO: 1205125 - DNA, 25 bp, Homo sapien
catacatttagggtaacaatgctgc

SEQ ID NO: 1205126 - DNA, 25 bp, Homo sapien
gcaagctttgagaccataagagtga

SEQ ID NO: 1205127 - DNA, 25 bp, Homo sapien
caacaatatcagaagctatctttgc

SEQ ID NO: 1205128 - DNA, 25 bp, Homo sapien
tttagtacaagcataagcaataatt

SEQ ID NO: 1205129 - DNA, 25 bp, Homo sapien
gcttggtagttccaatcttatataa

SEQ ID NO: 1205130 - DNA, 25 bp, Homo sapien
cttggtagttccaatcttatataac

SEQ ID NO: 1205131 - DNA, 25 bp, Homo sapien
ggtggtggtgttgctttgaatctgc

SEQ ID NO: 1205132 - DNA, 25 bp, Homo sapien
ggatatccgtgagattagaattaca

SEQ ID NO: 1205133 - DNA, 25 bp, Homo sapien
gaggatatccgtgagattagaatta

SEQ ID NO: 1205134 - DNA, 25 bp, Homo sapien
cagaggatatccgtgagattagaat

SEQ ID NO: 1205135 - DNA, 25 bp, Homo sapien
tatccgtgagattagaattacactg

SEQ ID NO: 1205136 - DNA, 25 bp, Homo sapien
aaacaccatcctgggggcgacagag

SEQ ID NO: 1205137 - DNA, 25 bp, Homo sapien
ccactaaacaccatcctgggggcga

SEQ ID NO: 1205138 - DNA, 25 bp, Homo sapien
actaaacaccatcctgggggcgaca

SEQ ID NO: 1205139 - DNA, 25 bp, Homo sapien
tcatgccactaaacaccatcctggg

SEQ ID NO: 1205140 - DNA, 25 bp, Homo sapien
tcatatagaattccatggtttattt

SEQ ID NO: 1205141 - DNA, 25 bp, Homo sapien
ctttggtgttggtgaccatccttct

SEQ ID NO: 1205142 - DNA, 25 bp, Homo sapien
actttggtgttggtgaccatccttc

SEQ ID NO: 1205143 - DNA, 25 bp, Homo sapien
ctgaagattcagaatgaccattttc

SEQ ID NO: 1205144 - DNA, 25 bp, Homo sapien
gaagattcagaatgaccattttcca

SEQ ID NO: 1205145 - DNA, 25 bp, Homo sapien
agattcagaatgaccattttccaca

SEQ ID NO: 1205146 - DNA, 25 bp, Homo sapien
tccacaaaaggaaagaaacacagtc

SEQ ID NO: 1205147 - DNA, 25 bp, Homo sapien
gaggagtggaccagccccgttctac

SEQ ID NO: 1205148 - DNA, 25 bp, Homo sapien
tggaccagccccgttctacacatga

SEQ ID NO: 1205149 - DNA, 25 bp, Homo sapien
gaccagccccgttctacacatgaaa

SEQ ID NO: 1205150 - DNA, 25 bp, Homo sapien
gcaaataatttgtacagtatcacct

SEQ ID NO: 1205151 - DNA, 25 bp, Homo sapien
cttaccagtggctgagactagaggc

SEQ ID NO: 1205152 - DNA, 25 bp, Homo sapien
catcttttgaaaggcataccacgga

SEQ ID NO: 1205153 - DNA, 25 bp, Homo sapien
aagaggctatgacttaactgtttac

SEQ ID NO: 1205154 - DNA, 25 bp, Homo sapien
cccctagtaatagaaagaggctatg

SEQ ID NO: 1205155 - DNA, 25 bp, Homo sapien
ggttctgaccattgtccgtttctac

SEQ ID NO: 1205156 - DNA, 25 bp, Homo sapien
ctggagcatatactgacaacaggaa

SEQ ID NO: 1205157 - DNA, 25 bp, Homo sapien
gagcatatactgacaacaggaatga

SEQ ID NO: 1205158 - DNA, 25 bp, Homo sapien
tttggtggttctgaccattgtccgt

SEQ ID NO: 1205159 - DNA, 25 bp, Homo sapien
atttcttgtgatattacacatggat

SEQ ID NO: 1205160 - DNA, 25 bp, Homo sapien
aatgagattttgttggatgatatcc

SEQ ID NO: 1205161 - DNA, 25 bp, Homo sapien
aactgggatataccagtttcccatt

SEQ ID NO: 1205162 - DNA, 25 bp, Homo sapien
gacacattgctcgaaatgaatgaga

SEQ ID NO: 1205163 - DNA, 25 bp, Homo sapien
gtttcccattctgacacattgctcg

SEQ ID NO: 1205164 - DNA, 25 bp, Homo sapien
gtaaattcagaaaaaggtgtgcatt

SEQ ID NO: 1205165 - DNA, 25 bp, Homo sapien
taaattcagaaaaaggtgtgcattt

SEQ ID NO: 1205166 - DNA, 25 bp, Homo sapien
atagtaaattcagaaaaaggtgtgc

SEQ ID NO: 1205167 - DNA, 25 bp, Homo sapien
tagtaaattcagaaaaaggtgtgca

SEQ ID NO: 1205168 - DNA, 25 bp, Homo sapien
taatttgtgggtatatgcaagtcca

SEQ ID NO: 1205169 - DNA, 25 bp, Homo sapien
caattgactgaatgtgacccaccca

SEQ ID NO: 1205170 - DNA, 25 bp, Homo sapien
tacagtcttgaggtagaacttcttc

SEQ ID NO: 1205171 - DNA, 25 bp, Homo sapien
tcagacaagggttgatgttacagtc

SEQ ID NO: 1205172 - DNA, 25 bp, Homo sapien
ggaagatacagtttaaatcatggca

SEQ ID NO: 1205173 - DNA, 25 bp, Homo sapien
ggagatttgggaagatacagtttaa

SEQ ID NO: 1205174 - DNA, 25 bp, Homo sapien
tggagatttgggaagatacagttta

SEQ ID NO: 1205175 - DNA, 25 bp, Homo sapien
ttgggaagatacagtttaaatcatg

SEQ ID NO: 1205176 - DNA, 25 bp, Homo sapien
gactgataatgtgacccttgttaaa

SEQ ID NO: 1205177 - DNA, 25 bp, Homo sapien
tgtacaccagatccaagataaataa

SEQ ID NO: 1205178 - DNA, 25 bp, Homo sapien
tgggttaaggtgctcaaatcatgct

SEQ ID NO: 1205179 - DNA, 25 bp, Homo sapien
gagaaacttgtacaccagatccaag

SEQ ID NO: 1205180 - DNA, 25 bp, Homo sapien
ggtagtctcaatcgtatataactaa

SEQ ID NO: 1205181 - DNA, 25 bp, Homo sapien
gcttggtagtctcaatcgtatataa

SEQ ID NO: 1205182 - DNA, 25 bp, Homo sapien
gtctcaatcgtatataactaaaaat

SEQ ID NO: 1205183 - DNA, 25 bp, Homo sapien
cttggtagtctcaatcgtatataac

SEQ ID NO: 1205184 - DNA, 25 bp, Homo sapien
tcccccaacagtggatacccatgag

SEQ ID NO: 1205185 - DNA, 25 bp, Homo sapien
ccaacagtggatacccatgagatta

SEQ ID NO: 1205186 - DNA, 25 bp, Homo sapien
cagtggatacccatgagattaggat

SEQ ID NO: 1205187 - DNA, 25 bp, Homo sapien
ccccaacagtggatacccatgagat

SEQ ID NO: 1205188 - DNA, 25 bp, Homo sapien
tctgtgcatgttatgcgagtccaaa

SEQ ID NO: 1205189 - DNA, 25 bp, Homo sapien
ctgtgcatgttatgcgagtccaaaa

SEQ ID NO: 1205190 - DNA, 25 bp, Homo sapien
tcttctgtgcatgttatgcgagtcc

SEQ ID NO: 1205191 - DNA, 25 bp, Homo sapien
cttctgtgcatgttatgcgagtcca

SEQ ID NO: 1205192 - DNA, 25 bp, Homo sapien
aggagtggaccagccccgttctaca

SEQ ID NO: 1205193 - DNA, 25 bp, Homo sapien
gaggagtggaccagccccgttctac

SEQ ID NO: 1205194 - DNA, 25 bp, Homo sapien
gcaaataatttgtacagtatcacct

SEQ ID NO: 1205195 - DNA, 25 bp, Homo sapien
gccaatattcgacattcctaaagac

SEQ ID NO: 1205196 - DNA, 25 bp, Homo sapien
agaattttcaacccagaatctcata

SEQ ID NO: 1205197 - DNA, 25 bp, Homo sapien
cactaaacatgaaaaagaacaaccg

SEQ ID NO: 1205198 - DNA, 25 bp, Homo sapien
tgaagaagaattaaaatcctttaca

SEQ ID NO: 1205199 - DNA, 25 bp, Homo sapien
acacgtctccaactttgtagctttc

SEQ ID NO: 1205200 - DNA, 25 bp, Homo sapien
ttctgcaggagaatttcaacacgtc

SEQ ID NO: 1205201 - DNA, 25 bp, Homo sapien
tctacattggcttctaaaattggaa

SEQ ID NO: 1205202 - DNA, 25 bp, Homo sapien
tttcaacacgtctccaactttgtag

SEQ ID NO: 1205203 - DNA, 25 bp, Homo sapien
tgttggaaagttaggtgaccaccca

SEQ ID NO: 1205204 - DNA, 25 bp, Homo sapien
caaattggtaacattgaactgagtc

SEQ ID NO: 1205205 - DNA, 25 bp, Homo sapien
ctttgcatgttggaaagttaggtga

SEQ ID NO: 1205206 - DNA, 25 bp, Homo sapien
taggtgaccacccaaattggtaaca

SEQ ID NO: 1205207 - DNA, 25 bp, Homo sapien
caacacaagtgggtaaagttgtcca

SEQ ID NO: 1205208 - DNA, 25 bp, Homo sapien
ttcaccattggagagttgaggaggt

SEQ ID NO: 1205209 - DNA, 25 bp, Homo sapien
gaggtggaccacatgatcgtacttg

SEQ ID NO: 1205210 - DNA, 25 bp, Homo sapien
tcattgtgtccatattcctcttttc

SEQ ID NO: 1205211 - DNA, 25 bp, Homo sapien
cacctcgactgaaactccatgttga

SEQ ID NO: 1205212 - DNA, 25 bp, Homo sapien
tgtccatattccattaatacaggta

SEQ ID NO: 1205213 - DNA, 25 bp, Homo sapien
actcgagttcaggtatgtatccaca

SEQ ID NO: 1205214 - DNA, 25 bp, Homo sapien
gacagacggctgaacataaccgtac

SEQ ID NO: 1205215 - DNA, 25 bp, Homo sapien
caatgagtgggccagttgattatcc

SEQ ID NO: 1205216 - DNA, 25 bp, Homo sapien
atttgctgggacaacggctggcaac

SEQ ID NO: 1205217 - DNA, 25 bp, Homo sapien
agagagaggcggttctgtttcagtt

SEQ ID NO: 1205218 - DNA, 25 bp, Homo sapien
ggctggcaacacctacagtaatttt

SEQ ID NO: 1205219 - DNA, 25 bp, Homo sapien
tgctattttgcacctcttaagttgg

SEQ ID NO: 1205220 - DNA, 25 bp, Homo sapien
ttcccagatagcttgagtaatgttt

SEQ ID NO: 1205221 - DNA, 25 bp, Homo sapien
aggattccatttcccgtttatacag

SEQ ID NO: 1205222 - DNA, 25 bp, Homo sapien
tgtgcagtctacttcaggattccat

SEQ ID NO: 1205223 - DNA, 25 bp, Homo sapien
aggtggcggtgggcagaattgttcc

SEQ ID NO: 1205224 - DNA, 25 bp, Homo sapien
ggtggcggtgggcagaattgttccc

SEQ ID NO: 1205225 - DNA, 25 bp, Homo sapien
cacagcgtggtaatgattgccatcg

SEQ ID NO: 1205226 - DNA, 25 bp, Homo sapien
gtggtaatgattgccatcgtccatc

SEQ ID NO: 1205227 - DNA, 25 bp, Homo sapien
caacacagcgtggtaatgattgcca

SEQ ID NO: 1205228 - DNA, 25 bp, Homo sapien
gcgtggtaatgattgccatcgtcca

SEQ ID NO: 1205229 - DNA, 25 bp, Homo sapien
ggcatcttggtggttctgaccactg

SEQ ID NO: 1205230 - DNA, 25 bp, Homo sapien
tctgcatgttacagttacagagccc

SEQ ID NO: 1205231 - DNA, 25 bp, Homo sapien
tatagaaggactggcaacggtacgt

SEQ ID NO: 1205232 - DNA, 25 bp, Homo sapien
tgaccctggaggatatactgataat

SEQ ID NO: 1205233 - DNA, 25 bp, Homo sapien
atgatatcatcgctttatgtgggaa

SEQ ID NO: 1205234 - DNA, 25 bp, Homo sapien
catagagttttccatcgtttctcca

SEQ ID NO: 1205235 - DNA, 25 bp, Homo sapien
cactggaattcaacagcatcccctg

SEQ ID NO: 1205236 - DNA, 25 bp, Homo sapien
tcctgacagattgctcgaaatggtg

SEQ ID NO: 1205237 - DNA, 25 bp, Homo sapien
gatgcttcgagaagaccctcaccag

SEQ ID NO: 1205238 - DNA, 25 bp, Homo sapien
attccccatgttgtgatttgcccag

SEQ ID NO: 1205239 - DNA, 25 bp, Homo sapien
tacatgctcttttgccacgtgatcc

SEQ ID NO: 1205240 - DNA, 25 bp, Homo sapien
taaaggatgagtttgcgctcctccc

SEQ ID NO: 1205241 - DNA, 25 bp, Homo sapien
tgtggtagcatcagggtggaaaaaa

SEQ ID NO: 1205242 - DNA, 25 bp, Homo sapien
ccctcaagcactctgtcttatcaag

SEQ ID NO: 1205243 - DNA, 25 bp, Homo sapien
gaaagaggagtcatatttcaataca

SEQ ID NO: 1205244 - DNA, 25 bp, Homo sapien
gagattgtaattaacacctgactgc

SEQ ID NO: 1205245 - DNA, 25 bp, Homo sapien
acaaacaactggaagtggtaatcaa

SEQ ID NO: 1205246 - DNA, 25 bp, Homo sapien
ctgaagtgaaagcaacgtttgccat

SEQ ID NO: 1205247 - DNA, 25 bp, Homo sapien
aagtggtaatcaattcaacaggcct

SEQ ID NO: 1205248 - DNA, 25 bp, Homo sapien
gaaagcaacgtttgccatttgatat

SEQ ID NO: 1205249 - DNA, 25 bp, Homo sapien
tatccaagatgtattccaagacaaa

SEQ ID NO: 1205250 - DNA, 25 bp, Homo sapien
atccaagatgtattccaagacaaag

SEQ ID NO: 1205251 - DNA, 25 bp, Homo sapien
ggtacatcaatgttatgtccagaaa

SEQ ID NO: 1205252 - DNA, 25 bp, Homo sapien
tgatgtctcagaataggagttggga

SEQ ID NO: 1205253 - DNA, 25 bp, Homo sapien
tgtccagaaaccttgtctcctatcc

SEQ ID NO: 1205254 - DNA, 25 bp, Homo sapien
tatcaaacattgaaataacactttt

SEQ ID NO: 1205255 - DNA, 25 bp, Homo sapien
gacaccactcaaagaaggccgagta

SEQ ID NO: 1205256 - DNA, 25 bp, Homo sapien
tatttctgttaactggacaccactc

SEQ ID NO: 1205257 - DNA, 25 bp, Homo sapien
taactggacaccactcaaagaaggc

SEQ ID NO: 1205258 - DNA, 25 bp, Homo sapien
aattgttatttctgttaactggaca

SEQ ID NO: 1205259 - DNA, 25 bp, Homo sapien
tagacaaccctaacgaggaggtggc

SEQ ID NO: 1205260 - DNA, 25 bp, Homo sapien
gaagcggtcagcgtaagtcccggat

SEQ ID NO: 1205261 - DNA, 25 bp, Homo sapien
ggcttcagtgtgtcgcagcgctgtt

SEQ ID NO: 1205262 - DNA, 25 bp, Homo sapien
tctcgaatctgccatggcgaaccgg

SEQ ID NO: 1205263 - DNA, 25 bp, Homo sapien
tcctgcttgcattaaagctggacaa

SEQ ID NO: 1205264 - DNA, 25 bp, Homo sapien
ctgtgaagagtaggaagtgtactgt

SEQ ID NO: 1205265 - DNA, 25 bp, Homo sapien
taacgattgaactcttcttatccct

SEQ ID NO: 1205266 - DNA, 25 bp, Homo sapien
ctgtattacaattgatgagtgtggc

SEQ ID NO: 1205267 - DNA, 25 bp, Homo sapien
taaaatgagtagtgtgtctgcatct

SEQ ID NO: 1205268 - DNA, 25 bp, Homo sapien
gtaaccataactacacagccctgca

SEQ ID NO: 1205269 - DNA, 25 bp, Homo sapien
cagccctgcactgaatgaccttatt

SEQ ID NO: 1205270 - DNA, 25 bp, Homo sapien
tgtgaagccactcttgggcctgtct

SEQ ID NO: 1205271 - DNA, 25 bp, Homo sapien
gattttcatcataaagactggcaat

SEQ ID NO: 1205272 - DNA, 25 bp, Homo sapien
agcctgccttacatataagctaatg

SEQ ID NO: 1205273 - DNA, 25 bp, Homo sapien
gggtacttacatgattgaggttgac

SEQ ID NO: 1205274 - DNA, 25 bp, Homo sapien
ctatatgaggtactgttagtctgtt

SEQ ID NO: 1205275 - DNA, 25 bp, Homo sapien
gtgggtaggcgcaggagcgagcgcg

SEQ ID NO: 1205276 - DNA, 25 bp, Homo sapien
agcgagcgcgcccagagtggagctc

SEQ ID NO: 1205277 - DNA, 25 bp, Homo sapien
gagcgagcgcgcccagagtggagct

SEQ ID NO: 1205278 - DNA, 25 bp, Homo sapien
aggagcgagcgcgcccagagtggag

SEQ ID NO: 1205279 - DNA, 25 bp, Homo sapien
taggaccttgcgcttcataatacga

SEQ ID NO: 1205280 - DNA, 25 bp, Homo sapien
gagttcttccatggagtgcggccct

SEQ ID NO: 1205281 - DNA, 25 bp, Homo sapien
tttcgtgcacgccagtaggttagct

SEQ ID NO: 1205282 - DNA, 25 bp, Homo sapien
tgtaaaatcacacgctctaggacct

SEQ ID NO: 1205283 - DNA, 25 bp, Homo sapien
cacataattgggcaccacagcctag

SEQ ID NO: 1205284 - DNA, 25 bp, Homo sapien
tgactgactggaaggaattggctca

SEQ ID NO: 1205285 - DNA, 25 bp, Homo sapien
tcttgagactgaattccgcaggaca

SEQ ID NO: 1205286 - DNA, 25 bp, Homo sapien
caataggctcttagataggtagact

SEQ ID NO: 1205287 - DNA, 25 bp, Homo sapien
aggagcacggcaaacacaatcatgg

SEQ ID NO: 1205288 - DNA, 25 bp, Homo sapien
aacgacaggagcacggcaaacacaa

SEQ ID NO: 1205289 - DNA, 25 bp, Homo sapien
gcacggcaaacacaatcatggtgcc

SEQ ID NO: 1205290 - DNA, 25 bp, Homo sapien
aaacacaatcatggtgccgctgcgg

SEQ ID NO: 1205291 - DNA, 25 bp, Homo sapien
taggtcacctactgcaagtcctggc

SEQ ID NO: 1205292 - DNA, 25 bp, Homo sapien
ctgccaagaccaaacggaactgcat

SEQ ID NO: 1205293 - DNA, 25 bp, Homo sapien
aagaccaaacggaactgcattctcc

SEQ ID NO: 1205294 - DNA, 25 bp, Homo sapien
ccgaggacgatgaaataggtcacct

SEQ ID NO: 1205295 - DNA, 25 bp, Homo sapien
gcttatgacaagacaccaagcttga

SEQ ID NO: 1205296 - DNA, 25 bp, Homo sapien
atggagctgtcctaaggtgactgaa

SEQ ID NO: 1205297 - DNA, 25 bp, Homo sapien
gaaagagcaagtcaactccattgtt

SEQ ID NO: 1205298 - DNA, 25 bp, Homo sapien
agatgcttatgacaagacaccaagc

SEQ ID NO: 1205299 - DNA, 25 bp, Homo sapien
cccactgtaaagattgtacatgtta

SEQ ID NO: 1205300 - DNA, 25 bp, Homo sapien
tgcagagcgtcaacaggattttaga

SEQ ID NO: 1205301 - DNA, 25 bp, Homo sapien
gcagagcgtcaacaggattttagaa

SEQ ID NO: 1205302 - DNA, 25 bp, Homo sapien
cattcccactgtaaagattgtacat

SEQ ID NO: 1205303 - DNA, 25 bp, Homo sapien
gatgctatcatatccaggatccatg

SEQ ID NO: 1205304 - DNA, 25 bp, Homo sapien
tcctataaatgatgctatcatatcc

SEQ ID NO: 1205305 - DNA, 25 bp, Homo sapien
tataaatgatgctatcatatccagg

SEQ ID NO: 1205306 - DNA, 25 bp, Homo sapien
aatgatgctatcatatccaggatcc

SEQ ID NO: 1205307 - DNA, 25 bp, Homo sapien
tgtcagcatcgtcaggttctcggag

SEQ ID NO: 1205308 - DNA, 25 bp, Homo sapien
gactgggtggcacacataacaccta

SEQ ID NO: 1205309 - DNA, 25 bp, Homo sapien
gagctactacgacagaatatcacag

SEQ ID NO: 1205310 - DNA, 25 bp, Homo sapien
caagaagagtacaccacagtgcctg

SEQ ID NO: 1205311 - DNA, 25 bp, Homo sapien
ttgatgaattcctccacgaaaaaca

SEQ ID NO: 1205312 - DNA, 25 bp, Homo sapien
tgatgaattcctccacgaaaaacat

SEQ ID NO: 1205313 - DNA, 25 bp, Homo sapien
ttttgatgaattcctccacgaaaaa

SEQ ID NO: 1205314 - DNA, 25 bp, Homo sapien
tttgatgaattcctccacgaaaaac

SEQ ID NO: 1205315 - DNA, 25 bp, Homo sapien
agaggagcgggtgcctcagaacccc

SEQ ID NO: 1205316 - DNA, 25 bp, Homo sapien
gaacatcctctggtgtgttgctggt

SEQ ID NO: 1205317 - DNA, 25 bp, Homo sapien
gaaaatacagggacttagattcaaa

SEQ ID NO: 1205318 - DNA, 25 bp, Homo sapien
aaaatgcagtttgtgcttcttagca

SEQ ID NO: 1205319 - DNA, 25 bp, Homo sapien
ggtagttaatgttcttaagtgccat

SEQ ID NO: 1205320 - DNA, 25 bp, Homo sapien
gatgagaaggtagttaatgttctta

SEQ ID NO: 1205321 - DNA, 25 bp, Homo sapien
gaagatgagaaggtagttaatgttc

SEQ ID NO: 1205322 - DNA, 25 bp, Homo sapien
gaaggtagttaatgttcttaagtgc

SEQ ID NO: 1205323 - DNA, 25 bp, Homo sapien
tacctgcacaactaaacacagcact

SEQ ID NO: 1205324 - DNA, 25 bp, Homo sapien
cattgaatgacaaagctgtttgcca

SEQ ID NO: 1205325 - DNA, 25 bp, Homo sapien
atatgtgccatcagctacctaccca

SEQ ID NO: 1205326 - DNA, 25 bp, Homo sapien
aaatcttttgtgagtgtgcgttgca

SEQ ID NO: 1205327 - DNA, 25 bp, Homo sapien
gaagactagacctctgatttgcagc

SEQ ID NO: 1205328 - DNA, 25 bp, Homo sapien
tataccgaaaaaggactaacagctg

SEQ ID NO: 1205329 - DNA, 25 bp, Homo sapien
gactactcagtcacaaacacatggc

SEQ ID NO: 1205330 - DNA, 25 bp, Homo sapien
tgactgggacatccaaagctgtgtc

SEQ ID NO: 1205331 - DNA, 25 bp, Homo sapien
caggctttgccttccattttttggc

SEQ ID NO: 1205332 - DNA, 25 bp, Homo sapien
tgcaggctttgccttccattttttg

SEQ ID NO: 1205333 - DNA, 25 bp, Homo sapien
attgcaggctttgccttccattttt

SEQ ID NO: 1205334 - DNA, 25 bp, Homo sapien
cattgcaggctttgccttccatttt

SEQ ID NO: 1205335 - DNA, 25 bp, Homo sapien
tccctgaacattcacaaagcaagtg

SEQ ID NO: 1205336 - DNA, 25 bp, Homo sapien
caggctgaagctggaattgtcgaat

SEQ ID NO: 1205337 - DNA, 25 bp, Homo sapien
gcagggccttccagtaatgactaac

SEQ ID NO: 1205338 - DNA, 25 bp, Homo sapien
gatccaaggattaggactgcctctg

SEQ ID NO: 1205339 - DNA, 25 bp, Homo sapien
ctttaccaatattaggactgaacac

SEQ ID NO: 1205340 - DNA, 25 bp, Homo sapien
ctattcctctgcttacattccttgg

SEQ ID NO: 1205341 - DNA, 25 bp, Homo sapien
ggactgaacactatacttccttttc

SEQ ID NO: 1205342 - DNA, 25 bp, Homo sapien
ggtgctgttcgtttccaggcactct

SEQ ID NO: 1205343 - DNA, 25 bp, Homo sapien
tttggtgagggcgaagacaaaagac

SEQ ID NO: 1205344 - DNA, 25 bp, Homo sapien
tgccacaacattctgcataggtttg

SEQ ID NO: 1205345 - DNA, 25 bp, Homo sapien
aagagataatgctgagtctccagcc

SEQ ID NO: 1205346 - DNA, 25 bp, Homo sapien
cagatgcagggatctgacaacttcc

SEQ ID NO: 1205347 - DNA, 25 bp, Homo sapien
cccaccagcagagtgtaaaatttct

SEQ ID NO: 1205348 - DNA, 25 bp, Homo sapien
tgacagtagtcattctaattggaat

SEQ ID NO: 1205349 - DNA, 25 bp, Homo sapien
gaaatatctactcaagtctttcgct

SEQ ID NO: 1205350 - DNA, 25 bp, Homo sapien
gaatgaggtgaaaatttctgtcatc

SEQ ID NO: 1205351 - DNA, 25 bp, Homo sapien
tacccaggaggacatttgcacagaa

SEQ ID NO: 1205352 - DNA, 25 bp, Homo sapien
ggtagtttcacagattgtcccactg

SEQ ID NO: 1205353 - DNA, 25 bp, Homo sapien
ttcttgccacaggaaccaatggtag

SEQ ID NO: 1205354 - DNA, 25 bp, Homo sapien
gcatgtagcctcgttcttgcaggga

SEQ ID NO: 1205355 - DNA, 25 bp, Homo sapien
gaaagagacacctcagtatggcata

SEQ ID NO: 1205356 - DNA, 25 bp, Homo sapien
tatggcatacaaacaaggagctttt

SEQ ID NO: 1205357 - DNA, 25 bp, Homo sapien
gcattttagcatcatagagtataca

SEQ ID NO: 1205358 - DNA, 25 bp, Homo sapien
tgccataactccaccaaagaaagag

SEQ ID NO: 1205359 - DNA, 25 bp, Homo sapien
ctgggaccaacattcgtcaatttcc

SEQ ID NO: 1205360 - DNA, 25 bp, Homo sapien
ccaacattcgtcaatttccaattca

SEQ ID NO: 1205361 - DNA, 25 bp, Homo sapien
gggaccaacattcgtcaatttccaa

SEQ ID NO: 1205362 - DNA, 25 bp, Homo sapien
cattcgtcaatttccaattcacagt

SEQ ID NO: 1205363 - DNA, 25 bp, Homo sapien
gggcacagtcgcagaaataggcccc

SEQ ID NO: 1205364 - DNA, 25 bp, Homo sapien
tggagacaaggttgactggcacact

SEQ ID NO: 1205365 - DNA, 25 bp, Homo sapien
cagagcatcctgacaagttgcacca

SEQ ID NO: 1205366 - DNA, 25 bp, Homo sapien
cactcatcagtgttgagttcacagt

SEQ ID NO: 1205367 - DNA, 25 bp, Homo sapien
aggcatcaaggtctcacagtgtgtc

SEQ ID NO: 1205368 - DNA, 25 bp, Homo sapien
cctgtgaatccactacccgtgcagt

SEQ ID NO: 1205369 - DNA, 25 bp, Homo sapien
caaggttttgaccaacaaagaggca

SEQ ID NO: 1205370 - DNA, 25 bp, Homo sapien
cagcagtgacaagtgtaattgtcaa

SEQ ID NO: 1205371 - DNA, 25 bp, Homo sapien
caacagcaagataggttacaagggt

SEQ ID NO: 1205372 - DNA, 25 bp, Homo sapien
tccatgcagtaacccaaggcagaaa

SEQ ID NO: 1205373 - DNA, 25 bp, Homo sapien
tgtcttcgttctagcaaacaggctc

SEQ ID NO: 1205374 - DNA, 25 bp, Homo sapien
tatgtgactctcaggactacccctc

SEQ ID NO: 1205375 - DNA, 25 bp, Homo sapien
tgcattcattgaggtcgatctcaca

SEQ ID NO: 1205376 - DNA, 25 bp, Homo sapien
cacattccccattggactggcaggg

SEQ ID NO: 1205377 - DNA, 25 bp, Homo sapien
cagacataacctgaggcttcatggt

SEQ ID NO: 1205378 - DNA, 25 bp, Homo sapien
gaaggcagtccagtgatgcgtccat

SEQ ID NO: 1205379 - DNA, 25 bp, Homo sapien
gtcaagtcatatcccatctccttgg

SEQ ID NO: 1205380 - DNA, 25 bp, Homo sapien
ataccagaaagtcaagtcatatccc

SEQ ID NO: 1205381 - DNA, 25 bp, Homo sapien
gaaagtcaagtcatatcccatctcc

SEQ ID NO: 1205382 - DNA, 25 bp, Homo sapien
ccagaaagtcaagtcatatcccatc

SEQ ID NO: 1205383 - DNA, 25 bp, Homo sapien
tacaccatttggttaaagccatggt

SEQ ID NO: 1205384 - DNA, 25 bp, Homo sapien
ctaatacaccatttggttaaagcca

SEQ ID NO: 1205385 - DNA, 25 bp, Homo sapien
atacaccatttggttaaagccatgg

SEQ ID NO: 1205386 - DNA, 25 bp, Homo sapien
aatacaccatttggttaaagccatg

SEQ ID NO: 1205387 - DNA, 25 bp, Homo sapien
catgaacttgggtttaaatctccat

SEQ ID NO: 1205388 - DNA, 25 bp, Homo sapien
cagatgttttgccatgaacttgggt

SEQ ID NO: 1205389 - DNA, 25 bp, Homo sapien
tcctggtgatgaacttcagatgttt

SEQ ID NO: 1205390 - DNA, 25 bp, Homo sapien
ttgccatgaacttgggtttaaatct

SEQ ID NO: 1205391 - DNA, 25 bp, Homo sapien
ctcataataccgccgaagcttaatg

SEQ ID NO: 1205392 - DNA, 25 bp, Homo sapien
tcagtgagcccatccgtagtgagga

SEQ ID NO: 1205393 - DNA, 25 bp, Homo sapien
gaagcttaatgtcctcagtgagccc

SEQ ID NO: 1205394 - DNA, 25 bp, Homo sapien
tctgtttagggtcctctatgcacct

SEQ ID NO: 1205395 - DNA, 25 bp, Homo sapien
tgattctttcgcatcaagaagttga

SEQ ID NO: 1205396 - DNA, 25 bp, Homo sapien
gatcttgtgagccatttccatactg

SEQ ID NO: 1205397 - DNA, 25 bp, Homo sapien
tgcctgattctttcgcatcaagaag

SEQ ID NO: 1205398 - DNA, 25 bp, Homo sapien
gatccgccggcacttttcatagctt

SEQ ID NO: 1205399 - DNA, 25 bp, Homo sapien
gggtttcatactgggtgtcccatcc

SEQ ID NO: 1205400 - DNA, 25 bp, Homo sapien
cactactgggggaatttgtacagga

SEQ ID NO: 1205401 - DNA, 25 bp, Homo sapien
ctactgggggaatttgtacaggaat

SEQ ID NO: 1205402 - DNA, 25 bp, Homo sapien
tctgtatgctgggtcaaaccttgga

SEQ ID NO: 1205403 - DNA, 25 bp, Homo sapien
tattctgtatgctgggtcaaacctt

SEQ ID NO: 1205404 - DNA, 25 bp, Homo sapien
tctattctgtatgctgggtcaaacc

SEQ ID NO: 1205405 - DNA, 25 bp, Homo sapien
tttctattctgtatgctgggtcaaa

SEQ ID NO: 1205406 - DNA, 25 bp, Homo sapien
gtaaggcccgacattcaaggccctc

SEQ ID NO: 1205407 - DNA, 25 bp, Homo sapien
aggcccgacattcaaggccctccac

SEQ ID NO: 1205408 - DNA, 25 bp, Homo sapien
tggtaaggcccgacattcaaggccc

SEQ ID NO: 1205409 - DNA, 25 bp, Homo sapien
ctggtaaggcccgacattcaaggcc

SEQ ID NO: 1205410 - DNA, 25 bp, Homo sapien
aaaccatgtgtcctggctccaaaca

SEQ ID NO: 1205411 - DNA, 25 bp, Homo sapien
catatccagaagtgtgggcttgttc

SEQ ID NO: 1205412 - DNA, 25 bp, Homo sapien
ggtatccatccaaacacctactagg

SEQ ID NO: 1205413 - DNA, 25 bp, Homo sapien
tgagcattgccattaaaatgtgaaa

SEQ ID NO: 1205414 - DNA, 25 bp, Homo sapien
ctctctttcctgacacctcgggtta

SEQ ID NO: 1205415 - DNA, 25 bp, Homo sapien
tttactttccaacacagcacagcag

SEQ ID NO: 1205416 - DNA, 25 bp, Homo sapien
ttcctgacacctcgggttaagagtc

SEQ ID NO: 1205417 - DNA, 25 bp, Homo sapien
ttactttccaacacagcacagcagc

SEQ ID NO: 1205418 - DNA, 25 bp, Homo sapien
tgcgatttcacacagggacccggtg

SEQ ID NO: 1205419 - DNA, 25 bp, Homo sapien
cattgacgtcttcttcgcagtggat

SEQ ID NO: 1205420 - DNA, 25 bp, Homo sapien
taattcccaggcaagttctcacaag

SEQ ID NO: 1205421 - DNA, 25 bp, Homo sapien
gaaatgccactctccatcgctggtg

SEQ ID NO: 1205422 - DNA, 25 bp, Homo sapien
gccacaagttgatgcagcgtcctct

SEQ ID NO: 1205423 - DNA, 25 bp, Homo sapien
tgttctccagggtaatgtgattcca

SEQ ID NO: 1205424 - DNA, 25 bp, Homo sapien
taatgatgagccagacgagatgttc

SEQ ID NO: 1205425 - DNA, 25 bp, Homo sapien
tatagaagttaagcagagcaacacc

SEQ ID NO: 1205426 - DNA, 25 bp, Homo sapien
gcagcagaagtcttgtggggtcatt

SEQ ID NO: 1205427 - DNA, 25 bp, Homo sapien
tctgctctgaggcatggcactccta

SEQ ID NO: 1205428 - DNA, 25 bp, Homo sapien
ttgtggggtcattatgtttcatagc

SEQ ID NO: 1205429 - DNA, 25 bp, Homo sapien
gcatggcactcctagccatagcact

SEQ ID NO: 1205430 - DNA, 25 bp, Homo sapien
gaaactgatgtcctatgaatccact

SEQ ID NO: 1205431 - DNA, 25 bp, Homo sapien
taccgagaatttactatgcacaaga

SEQ ID NO: 1205432 - DNA, 25 bp, Homo sapien
aaaattaattaacgcacatcactgc

SEQ ID NO: 1205433 - DNA, 25 bp, Homo sapien
caagatatcatgctagtatgtggca

SEQ ID NO: 1205434 - DNA, 25 bp, Homo sapien
tgtttagtcagccaccaaaatcctc

SEQ ID NO: 1205435 - DNA, 25 bp, Homo sapien
tacaaacagtcaacacaagatatgc

SEQ ID NO: 1205436 - DNA, 25 bp, Homo sapien
gatatgctgagagaaccttatggac

SEQ ID NO: 1205437 - DNA, 25 bp, Homo sapien
tcatgaatgggctgaagtttgcctt

SEQ ID NO: 1205438 - DNA, 25 bp, Homo sapien
agcagctgatgaagtgtcggaaaac

SEQ ID NO: 1205439 - DNA, 25 bp, Homo sapien
gaggttatggccctgtgtgtcactg

SEQ ID NO: 1205440 - DNA, 25 bp, Homo sapien
gacgcaatcacgaagtgtggctgcc

SEQ ID NO: 1205441 - DNA, 25 bp, Homo sapien
ggtcaatgaaggaaagctacgggca

SEQ ID NO: 1205442 - DNA, 25 bp, Homo sapien
ggtgtctccatagctctcatcaaga

SEQ ID NO: 1205443 - DNA, 25 bp, Homo sapien
agtaaagatgacataaccagtggag

SEQ ID NO: 1205444 - DNA, 25 bp, Homo sapien
tgatggtgtctccatagctctcatc

SEQ ID NO: 1205445 - DNA, 25 bp, Homo sapien
tgacataaccagtggagtcatcctg

SEQ ID NO: 1205446 - DNA, 25 bp, Homo sapien
taagcctgatggttgaagcgttcgg

SEQ ID NO: 1205447 - DNA, 25 bp, Homo sapien
agtctcttgcttgtcaggtaggcca

SEQ ID NO: 1205448 - DNA, 25 bp, Homo sapien
gagtcagcattgctagtctgccgcg

SEQ ID NO: 1205449 - DNA, 25 bp, Homo sapien
gcgctctagccagacacggatatat

SEQ ID NO: 1205450 - DNA, 25 bp, Homo sapien
aaatcaaaggtataaaaagcactgg

SEQ ID NO: 1205451 - DNA, 25 bp, Homo sapien
agaaatcaaaggtataaaaagcact

SEQ ID NO: 1205452 - DNA, 25 bp, Homo sapien
aatcaaaggtataaaaagcactggc

SEQ ID NO: 1205453 - DNA, 25 bp, Homo sapien
tcaaaggtataaaaagcactggcaa

SEQ ID NO: 1205454 - DNA, 25 bp, Homo sapien
ggcaaacacctccattgtgacaggg

SEQ ID NO: 1205455 - DNA, 25 bp, Homo sapien
gagaagtcatcccaccgggaatggc

SEQ ID NO: 1205456 - DNA, 25 bp, Homo sapien
aaatccttgaagcaccggctggcac

SEQ ID NO: 1205457 - DNA, 25 bp, Homo sapien
gctccgtgaggacacgggctgaatc

SEQ ID NO: 1205458 - DNA, 25 bp, Homo sapien
tgggtctgtcatggaaagggtcact

SEQ ID NO: 1205459 - DNA, 25 bp, Homo sapien
aagggtcacttcgtgccatgtgcca

SEQ ID NO: 1205460 - DNA, 25 bp, Homo sapien
ggtaggctgcaactctgtcagagca

SEQ ID NO: 1205461 - DNA, 25 bp, Homo sapien
tcccaagggacaggagcaatgataa

SEQ ID NO: 1205462 - DNA, 25 bp, Homo sapien
tccattgtagcaagtgagatttgtc

SEQ ID NO: 1205463 - DNA, 25 bp, Homo sapien
tcccacagactgttgagggtaatct

SEQ ID NO: 1205464 - DNA, 25 bp, Homo sapien
cagtctggaactctgtgcagttgcc

SEQ ID NO: 1205465 - DNA, 25 bp, Homo sapien
aaacctggccggcacatacatttta

SEQ ID NO: 1205466 - DNA, 25 bp, Homo sapien
tattttcagcaggtcacagattgcc

SEQ ID NO: 1205467 - DNA, 25 bp, Homo sapien
tgcagcaaacgtgtggataggccct

SEQ ID NO: 1205468 - DNA, 25 bp, Homo sapien
taaaacttgcacgtatgggtcagag

SEQ ID NO: 1205469 - DNA, 25 bp, Homo sapien
tatcaggatcctcatgcatcagagc

SEQ ID NO: 1205470 - DNA, 25 bp, Homo sapien
cagcaaaggcaacatcacagaggca

SEQ ID NO: 1205471 - DNA, 25 bp, Homo sapien
gcaaaggcaacatcacagaggcact

SEQ ID NO: 1205472 - DNA, 25 bp, Homo sapien
cctccattgacacacggatcagagg

SEQ ID NO: 1205473 - DNA, 25 bp, Homo sapien
ttgacacacggatcagaggcacact

SEQ ID NO: 1205474 - DNA, 25 bp, Homo sapien
agacataaaaggagaggctgcttac

SEQ ID NO: 1205475 - DNA, 25 bp, Homo sapien
agagagacataaaaggagaggctgc

SEQ ID NO: 1205476 - DNA, 25 bp, Homo sapien
gagagacataaaaggagaggctgct

SEQ ID NO: 1205477 - DNA, 25 bp, Homo sapien
ctgccagaataagagagagacataa

SEQ ID NO: 1205478 - DNA, 25 bp, Homo sapien
tcgtcattcatacgcaaaatgaggt

SEQ ID NO: 1205479 - DNA, 25 bp, Homo sapien
cactcaacaactggctcgtcattca

SEQ ID NO: 1205480 - DNA, 25 bp, Homo sapien
aactggctcgtcattcatacgcaaa

SEQ ID NO: 1205481 - DNA, 25 bp, Homo sapien
caacaactggctcgtcattcatacg

SEQ ID NO: 1205482 - DNA, 25 bp, Homo sapien
agatctaaaatgaatcaaggcattt

SEQ ID NO: 1205483 - DNA, 25 bp, Homo sapien
gatctaaaatgaatcaaggcatttc

SEQ ID NO: 1205484 - DNA, 25 bp, Homo sapien
taaaatgaatcaaggcatttcttga

SEQ ID NO: 1205485 - DNA, 25 bp, Homo sapien
tctaaaatgaatcaaggcatttctt

SEQ ID NO: 1205486 - DNA, 25 bp, Homo sapien
caggacagctcctaaagtcatagac

SEQ ID NO: 1205487 - DNA, 25 bp, Homo sapien
gaaatgattgtcactactccaaagg

SEQ ID NO: 1205488 - DNA, 25 bp, Homo sapien
gcataaatgataacgtactggtgga

SEQ ID NO: 1205489 - DNA, 25 bp, Homo sapien
gcatccaatggataaactgtcctca

SEQ ID NO: 1205490 - DNA, 25 bp, Homo sapien
ggtgtttacaccttgtgtgcccctc

SEQ ID NO: 1205491 - DNA, 25 bp, Homo sapien
ccctctcgctttcagtgtagataga

SEQ ID NO: 1205492 - DNA, 25 bp, Homo sapien
ctatgacaaaggtgaggagaagtat

SEQ ID NO: 1205493 - DNA, 25 bp, Homo sapien
tggcagacacccttttaagtgaacc

SEQ ID NO: 1205494 - DNA, 25 bp, Homo sapien
ccagagaaaagagggttcaccacag

SEQ ID NO: 1205495 - DNA, 25 bp, Homo sapien
tgattcagctaagagactgcctgcc

SEQ ID NO: 1205496 - DNA, 25 bp, Homo sapien
ggttcacccttgtaatatgcccatg

SEQ ID NO: 1205497 - DNA, 25 bp, Homo sapien
gacgtttgcaatcttacaggcttga

SEQ ID NO: 1205498 - DNA, 25 bp, Homo sapien
ttacaaaggtgtgcattttctccat

SEQ ID NO: 1205499 - DNA, 25 bp, Homo sapien
tctccatcagagtagtcctctgtct

SEQ ID NO: 1205500 - DNA, 25 bp, Homo sapien
cagagtagtcctctgtcttccccag

SEQ ID NO: 1205501 - DNA, 25 bp, Homo sapien
tctttccatcccagagtgcctcttt

SEQ ID NO: 1205502 - DNA, 25 bp, Homo sapien
cagttgcagcctagctagtgccggg

SEQ ID NO: 1205503 - DNA, 25 bp, Homo sapien
aggaatcacctgttcctccaaacca

SEQ ID NO: 1205504 - DNA, 25 bp, Homo sapien
taagttgaggctctttattaatgag

SEQ ID NO: 1205505 - DNA, 25 bp, Homo sapien
caaacaggaatcacctgttcctcca

SEQ ID NO: 1205506 - DNA, 25 bp, Homo sapien
gaagtcgtgggaacgaactatatca

SEQ ID NO: 1205507 - DNA, 25 bp, Homo sapien
tgactaggaagtcgtgggaacgaac

SEQ ID NO: 1205508 - DNA, 25 bp, Homo sapien
gaacgaactatatcaaacctgtcca

SEQ ID NO: 1205509 - DNA, 25 bp, Homo sapien
tcgtgggaacgaactatatcaaacc

SEQ ID NO: 1205510 - DNA, 25 bp, Homo sapien
gattcagagcgtgtaactcattcag

SEQ ID NO: 1205511 - DNA, 25 bp, Homo sapien
tatgcccagacccatttgtaaccaa

SEQ ID NO: 1205512 - DNA, 25 bp, Homo sapien
ggcccaattatcctctccctaggta

SEQ ID NO: 1205513 - DNA, 25 bp, Homo sapien
gtggttgctaactaaagattcagag

SEQ ID NO: 1205514 - DNA, 25 bp, Homo sapien
gggataatatgaccaaggagccaac

SEQ ID NO: 1205515 - DNA, 25 bp, Homo sapien
tcctgcagaggaacggaagcagcaa

SEQ ID NO: 1205516 - DNA, 25 bp, Homo sapien
aattggagtggcagataagggataa

SEQ ID NO: 1205517 - DNA, 25 bp, Homo sapien
gaggtgccatctctgaggtgctgct

SEQ ID NO: 1205518 - DNA, 25 bp, Homo sapien
tcagggccatccttgtgaacaagga

SEQ ID NO: 1205519 - DNA, 25 bp, Homo sapien
caaggaggcgcttcgggttatcact

SEQ ID NO: 1205520 - DNA, 25 bp, Homo sapien
caactgttactaattgcttgagagt

SEQ ID NO: 1205521 - DNA, 25 bp, Homo sapien
gcaacctgggcctatcagaatcaac

SEQ ID NO: 1205522 - DNA, 25 bp, Homo sapien
gaaccaagtccttcatctacagttg

SEQ ID NO: 1205523 - DNA, 25 bp, Homo sapien
agtccttcatctacagttgctttgc

SEQ ID NO: 1205524 - DNA, 25 bp, Homo sapien
cctgaggaaccaagtccttcatcta

SEQ ID NO: 1205525 - DNA, 25 bp, Homo sapien
ggactcctgaggaaccaagtccttc

SEQ ID NO: 1205526 - DNA, 25 bp, Homo sapien
tgaagaccaaccagagcaagctggt

SEQ ID NO: 1205527 - DNA, 25 bp, Homo sapien
aaagattgaaatcattgggatgcga

SEQ ID NO: 1205528 - DNA, 25 bp, Homo sapien
ttcaggacaatggaactactcagga

SEQ ID NO: 1205529 - DNA, 25 bp, Homo sapien
gggatgcgaattctatagcaaaggc

SEQ ID NO: 1205530 - DNA, 25 bp, Homo sapien
gaggatcagtaacaaggcgacagtc

SEQ ID NO: 1205531 - DNA, 25 bp, Homo sapien
gctgtaggttccctgagttgccctt

SEQ ID NO: 1205532 - DNA, 25 bp, Homo sapien
agtcactgagccaatagtggtgaaa

SEQ ID NO: 1205533 - DNA, 25 bp, Homo sapien
caacaatggccagcaagaggatcag

SEQ ID NO: 1205534 - DNA, 25 bp, Homo sapien
ccccatctcgaagggacacaatgct

SEQ ID NO: 1205535 - DNA, 25 bp, Homo sapien
taaaacaatggtgtcgagcggaacc

SEQ ID NO: 1205536 - DNA, 25 bp, Homo sapien
tcagtgatagccactaaagccacag

SEQ ID NO: 1205537 - DNA, 25 bp, Homo sapien
cacattcacagtgtgtggatcccca

SEQ ID NO: 1205538 - DNA, 25 bp, Homo sapien
gattgagctggtggttcctttgctg

SEQ ID NO: 1205539 - DNA, 25 bp, Homo sapien
gtcactaagtgattgcatccagcag

SEQ ID NO: 1205540 - DNA, 25 bp, Homo sapien
cacagtatggcaatctcagggtcgc

SEQ ID NO: 1205541 - DNA, 25 bp, Homo sapien
gctgttctcacgtgggtcactaagt

SEQ ID NO: 1205542 - DNA, 25 bp, Homo sapien
ccaggttgggtgaagggagcaatgc

SEQ ID NO: 1205543 - DNA, 25 bp, Homo sapien
ttgtccagcagtggcctctgaaagt

SEQ ID NO: 1205544 - DNA, 25 bp, Homo sapien
caatgctaagttgtgcagctgctac

SEQ ID NO: 1205545 - DNA, 25 bp, Homo sapien
cctagggtagttgataggatgcaag

SEQ ID NO: 1205546 - DNA, 25 bp, Homo sapien
tagtttagtacttacagcagtgcct

SEQ ID NO: 1205547 - DNA, 25 bp, Homo sapien
tagtgcatcacatgtcaagtcacca

SEQ ID NO: 1205548 - DNA, 25 bp, Homo sapien
ccataacgttattttgagagccatt

SEQ ID NO: 1205549 - DNA, 25 bp, Homo sapien
tatatgatgtttaggacaaggcaga

SEQ ID NO: 1205550 - DNA, 25 bp, Homo sapien
tatctcttagaggacatatacattc

SEQ ID NO: 1205551 - DNA, 25 bp, Homo sapien
taacatgtgtctagaccactaaggg

SEQ ID NO: 1205552 - DNA, 25 bp, Homo sapien
caatgctggaaatacactgactggt

SEQ ID NO: 1205553 - DNA, 25 bp, Homo sapien
tatacattcctaccagtttactggc

SEQ ID NO: 1205554 - DNA, 25 bp, Homo sapien
gatggatatcgcatcttggtccacc

SEQ ID NO: 1205555 - DNA, 25 bp, Homo sapien
gtgaccatggatggatatcgcatct

SEQ ID NO: 1205556 - DNA, 25 bp, Homo sapien
aaagccttgctactttgttgattca

SEQ ID NO: 1205557 - DNA, 25 bp, Homo sapien
catggatggatatcgcatcttggtc

SEQ ID NO: 1205558 - DNA, 25 bp, Homo sapien
tgtgggttggactgtggagagccgt

SEQ ID NO: 1205559 - DNA, 25 bp, Homo sapien
ctgtttttgcaactggtagctctgg

SEQ ID NO: 1205560 - DNA, 25 bp, Homo sapien
tggtagctctggtgtgggttggact

SEQ ID NO: 1205561 - DNA, 25 bp, Homo sapien
ggactgtggagagccgtaatgccat

SEQ ID NO: 1205562 - DNA, 25 bp, Homo sapien
ttgagttctaagagcttgcatgcca

SEQ ID NO: 1205563 - DNA, 25 bp, Homo sapien
cctttgggttgagttctaagagctt

SEQ ID NO: 1205564 - DNA, 25 bp, Homo sapien
ctagtgtctaatgtctgaaatagcc

SEQ ID NO: 1205565 - DNA, 25 bp, Homo sapien
gtgtctaatgtctgaaatagccttt

SEQ ID NO: 1205566 - DNA, 25 bp, Homo sapien
tactgaagctccaactgtcgaacat

SEQ ID NO: 1205567 - DNA, 25 bp, Homo sapien
gagtctcttgataccgtaacccgca

SEQ ID NO: 1205568 - DNA, 25 bp, Homo sapien
caagcttgggcagtttgctggtcaa

SEQ ID NO: 1205569 - DNA, 25 bp, Homo sapien
tctatgtgtcagtgaacagagtctc

SEQ ID NO: 1205570 - DNA, 25 bp, Homo sapien
tgctgtgtccatgggaatctgataa

SEQ ID NO: 1205571 - DNA, 25 bp, Homo sapien
tgtatcacaaagcaggacaactttg

SEQ ID NO: 1205572 - DNA, 25 bp, Homo sapien
tatatgatacctttacctgtaaggc

SEQ ID NO: 1205573 - DNA, 25 bp, Homo sapien
cctgtaaggcatgctagttaaaatt

SEQ ID NO: 1205574 - DNA, 25 bp, Homo sapien
ttattgtaaacaccccgttccagca

SEQ ID NO: 1205575 - DNA, 25 bp, Homo sapien
ttccaggcttccaggcaaagttgtc

SEQ ID NO: 1205576 - DNA, 25 bp, Homo sapien
ccaggcaaagttgtcaatatgctta

SEQ ID NO: 1205577 - DNA, 25 bp, Homo sapien
gcttccaggcaaagttgtcaatatg

SEQ ID NO: 1205578 - DNA, 25 bp, Homo sapien
ctttggtcaattccaccacatttat

SEQ ID NO: 1205579 - DNA, 25 bp, Homo sapien
ccacatttatagactggatggcaag

SEQ ID NO: 1205580 - DNA, 25 bp, Homo sapien
caagtagtaatggacttgaatgaat

SEQ ID NO: 1205581 - DNA, 25 bp, Homo sapien
gcagtcttgtcctcacattttttaa

SEQ ID NO: 1205582 - DNA, 25 bp, Homo sapien
catgctcaaactcagctttcaattt

SEQ ID NO: 1205583 - DNA, 25 bp, Homo sapien
caatttatccaagacccaggcatac

SEQ ID NO: 1205584 - DNA, 25 bp, Homo sapien
atgctcaaactcagctttcaattta

SEQ ID NO: 1205585 - DNA, 25 bp, Homo sapien
tttcaatttatccaagacccaggca

SEQ ID NO: 1205586 - DNA, 25 bp, Homo sapien
catgtggagatatcagtggtgatac

SEQ ID NO: 1205587 - DNA, 25 bp, Homo sapien
gattcccatgtggagatatcagtgg

SEQ ID NO: 1205588 - DNA, 25 bp, Homo sapien
gtctcagattcccatgtggagatat

SEQ ID NO: 1205589 - DNA, 25 bp, Homo sapien
gatagtcacatagtagtatttggtg

SEQ ID NO: 1205590 - DNA, 25 bp, Homo sapien
ttcttggagataccaagttcagatt

SEQ ID NO: 1205591 - DNA, 25 bp, Homo sapien
ccagagggatatgctcatgagtctg

SEQ ID NO: 1205592 - DNA, 25 bp, Homo sapien
gtaaggatagcacagtcaatttgat

SEQ ID NO: 1205593 - DNA, 25 bp, Homo sapien
tcttggagataccaagttcagattc

SEQ ID NO: 1205594 - DNA, 25 bp, Homo sapien
tactgtagcaggtccgtagccagtt

SEQ ID NO: 1205595 - DNA, 25 bp, Homo sapien
agcaggtccgtagccagttttctta

SEQ ID NO: 1205596 - DNA, 25 bp, Homo sapien
ccagttttcttaatatgggtgctga

SEQ ID NO: 1205597 - DNA, 25 bp, Homo sapien
acaaatgctactgtagcaggtccgt

SEQ ID NO: 1205598 - DNA, 25 bp, Homo sapien
caagagcttgtcaactgaatgaatt

SEQ ID NO: 1205599 - DNA, 25 bp, Homo sapien
ggacaatgccaatatcaccaatttg

SEQ ID NO: 1205600 - DNA, 25 bp, Homo sapien
tagacatcaggtaggggcagacaca

SEQ ID NO: 1205601 - DNA, 25 bp, Homo sapien
ctccactagccccaaagggacaatg

SEQ ID NO: 1205602 - DNA, 25 bp, Homo sapien
caagtataggaggataaccagaacc

SEQ ID NO: 1205603 - DNA, 25 bp, Homo sapien
gccatgacgagtatctttgacagac

SEQ ID NO: 1205604 - DNA, 25 bp, Homo sapien
gtgttaactggtgcaaaagtagacc

SEQ ID NO: 1205605 - DNA, 25 bp, Homo sapien
ggcctggttggctcaagataatcat

SEQ ID NO: 1205606 - DNA, 25 bp, Homo sapien
gcaaccatctgaacgatggcagcat

SEQ ID NO: 1205607 - DNA, 25 bp, Homo sapien
caaccatctgaacgatggcagcatc

SEQ ID NO: 1205608 - DNA, 25 bp, Homo sapien
cagtaaaatgaccaagagggagatg

SEQ ID NO: 1205609 - DNA, 25 bp, Homo sapien
ccagcaaccatctgaacgatggcag

SEQ ID NO: 1205610 - DNA, 25 bp, Homo sapien
ctgttaggagaaggaagattggact

SEQ ID NO: 1205611 - DNA, 25 bp, Homo sapien
actcgtagagtactttgaaaggtgc

SEQ ID NO: 1205612 - DNA, 25 bp, Homo sapien
gcttgtctggcacaataaagctgta

SEQ ID NO: 1205613 - DNA, 25 bp, Homo sapien
agaagacgatgtggttcttgccctc

SEQ ID NO: 1205614 - DNA, 25 bp, Homo sapien
caccaattgagagaaatgccacttt

SEQ ID NO: 1205615 - DNA, 25 bp, Homo sapien
cccgacagaatccaccaattgagag

SEQ ID NO: 1205616 - DNA, 25 bp, Homo sapien
gaatccaccaattgagagaaatgcc

SEQ ID NO: 1205617 - DNA, 25 bp, Homo sapien
cgacagaatccaccaattgagagaa

SEQ ID NO: 1205618 - DNA, 25 bp, Homo sapien
aaatggcaaaagtgtcgatcttctg

SEQ ID NO: 1205619 - DNA, 25 bp, Homo sapien
taaaattatggtaagtctgagtatg

SEQ ID NO: 1205620 - DNA, 25 bp, Homo sapien
aagtctgagtatgttggctcgcacc

SEQ ID NO: 1205621 - DNA, 25 bp, Homo sapien
agtgtcgatcttctgaatctctggc

SEQ ID NO: 1205622 - DNA, 25 bp, Homo sapien
tagcagtttaacctctgaccgtaaa

SEQ ID NO: 1205623 - DNA, 25 bp, Homo sapien
ctggaaggtgaagggttagcagttt

SEQ ID NO: 1205624 - DNA, 25 bp, Homo sapien
gttagcagtttaacctctgaccgta

SEQ ID NO: 1205625 - DNA, 25 bp, Homo sapien
tgaagggttagcagtttaacctctg

SEQ ID NO: 1205626 - DNA, 25 bp, Homo sapien
tgagagtctagacactgagaggcca

SEQ ID NO: 1205627 - DNA, 25 bp, Homo sapien
agagcttttgttctcgaagagaaga

SEQ ID NO: 1205628 - DNA, 25 bp, Homo sapien
gggctccatgcccaaacaacgaaga

SEQ ID NO: 1205629 - DNA, 25 bp, Homo sapien
taatccgactgctgcacactgtgaa

SEQ ID NO: 1205630 - DNA, 25 bp, Homo sapien
accttgtaccggctgaaaccgcata

SEQ ID NO: 1205631 - DNA, 25 bp, Homo sapien
ccctggaaaagtacgccgattcgca

SEQ ID NO: 1205632 - DNA, 25 bp, Homo sapien
cattatatcagcaggagaggcacct

SEQ ID NO: 1205633 - DNA, 25 bp, Homo sapien
tgaaaccgcatagctcgaccttcat

SEQ ID NO: 1205634 - DNA, 25 bp, Homo sapien
tagatactttgcttagccttttttg

SEQ ID NO: 1205635 - DNA, 25 bp, Homo sapien
tttgcttccttagcagccctgatac

SEQ ID NO: 1205636 - DNA, 25 bp, Homo sapien
cttttttgcttccttagcagccctg

SEQ ID NO: 1205637 - DNA, 25 bp, Homo sapien
ttttttgcttccttagcagccctga

SEQ ID NO: 1205638 - DNA, 25 bp, Homo sapien
ctgtcaggtttattggtgtgctgcc

SEQ ID NO: 1205639 - DNA, 25 bp, Homo sapien
tagatccaaccacttcgacataggg

SEQ ID NO: 1205640 - DNA, 25 bp, Homo sapien
tgatatgccctatgtgtgcaattgg

SEQ ID NO: 1205641 - DNA, 25 bp, Homo sapien
aaggagcagtgtctctgatatgccc

SEQ ID NO: 1205642 - DNA, 25 bp, Homo sapien
tattctctatgtgactactttgtaa

SEQ ID NO: 1205643 - DNA, 25 bp, Homo sapien
gaagaactagcctgatgccattggt

SEQ ID NO: 1205644 - DNA, 25 bp, Homo sapien
taactactgatatgggttggctctg

SEQ ID NO: 1205645 - DNA, 25 bp, Homo sapien
acagaagatgtgagttgctctacct

SEQ ID NO: 1205646 - DNA, 25 bp, Homo sapien
ttatggtttctttggtgagactggc

SEQ ID NO: 1205647 - DNA, 25 bp, Homo sapien
ggatgttctctttatggtttctttg

SEQ ID NO: 1205648 - DNA, 25 bp, Homo sapien
attagagaggcacaggctgggatgt

SEQ ID NO: 1205649 - DNA, 25 bp, Homo sapien
ggctgggatgttctctttatggttt

SEQ ID NO: 1205650 - DNA, 25 bp, Homo sapien
tttgtcatcacaagcaacgggcact

SEQ ID NO: 1205651 - DNA, 25 bp, Homo sapien
actgtaactttgtaggcagaactgg

SEQ ID NO: 1205652 - DNA, 25 bp, Homo sapien
taaatagagctgttgaaaaaccaca

SEQ ID NO: 1205653 - DNA, 25 bp, Homo sapien
gatcaagatagagccttttcctttt

SEQ ID NO: 1205654 - DNA, 25 bp, Homo sapien
attatcctgaaaatggtctcagttt

SEQ ID NO: 1205655 - DNA, 25 bp, Homo sapien
acatatttaaccacttggttgtaat

SEQ ID NO: 1205656 - DNA, 25 bp, Homo sapien
tatttaaccacttggttgtaataga

SEQ ID NO: 1205657 - DNA, 25 bp, Homo sapien
atagatgcttacacttttcttgctt

SEQ ID NO: 1205658 - DNA, 25 bp, Homo sapien
taatagatgcttacacttttcttgc

SEQ ID NO: 1205659 - DNA, 25 bp, Homo sapien
aacttccaattcttgacagcctgtg

SEQ ID NO: 1205660 - DNA, 25 bp, Homo sapien
tgtggtcttcaatcgttcgcaacgt

SEQ ID NO: 1205661 - DNA, 25 bp, Homo sapien
caatgctaggccatctggcaaaagc

SEQ ID NO: 1205662 - DNA, 25 bp, Homo sapien
cccataagtagttggctgtaataca

SEQ ID NO: 1205663 - DNA, 25 bp, Homo sapien
catatatccttgtgtacccgatagg

SEQ ID NO: 1205664 - DNA, 25 bp, Homo sapien
ttacatatatccttgtgtacccgat

SEQ ID NO: 1205665 - DNA, 25 bp, Homo sapien
acatatatccttgtgtacccgatag

SEQ ID NO: 1205666 - DNA, 25 bp, Homo sapien
tatatccttgtgtacccgatagggt

SEQ ID NO: 1205667 - DNA, 25 bp, Homo sapien
cgctggtgatatccgggcaaacggt

SEQ ID NO: 1205668 - DNA, 25 bp, Homo sapien
atatccgggcaaacggtctggcgtg

SEQ ID NO: 1205669 - DNA, 25 bp, Homo sapien
gtgatatccgggcaaacggtctggc

SEQ ID NO: 1205670 - DNA, 25 bp, Homo sapien
ccgctggtgatatccgggcaaacgg

SEQ ID NO: 1205671 - DNA, 25 bp, Homo sapien
cttgggcagctcgtggccatcgctg

SEQ ID NO: 1205672 - DNA, 25 bp, Homo sapien
aggcggacggactgagccttctgcc

SEQ ID NO: 1205673 - DNA, 25 bp, Homo sapien
gagccttctgccttcaccagcgggc

SEQ ID NO: 1205674 - DNA, 25 bp, Homo sapien
gtcggttcgcgctgccgtggcagca

SEQ ID NO: 1205675 - DNA, 25 bp, Homo sapien
gcagagcgcggcacccgtccgtgcc

SEQ ID NO: 1205676 - DNA, 25 bp, Homo sapien
gcggggcggcggaaggttgcctgca

SEQ ID NO: 1205677 - DNA, 25 bp, Homo sapien
cagagcgcggcacccgtccgtgccc

SEQ ID NO: 1205678 - DNA, 25 bp, Homo sapien
cggcggggcggcggaaggttgcctg

SEQ ID NO: 1205679 - DNA, 25 bp, Homo sapien
cagtttccctcgttagcagggcaga

SEQ ID NO: 1205680 - DNA, 25 bp, Homo sapien
ctaccgggcgtgctgggcgcggagc

SEQ ID NO: 1205681 - DNA, 25 bp, Homo sapien
agccgccgcagtttccctcgttagc

SEQ ID NO: 1205682 - DNA, 25 bp, Homo sapien
ttccctcgttagcagggcagagggt

SEQ ID NO: 1205683 - DNA, 25 bp, Homo sapien
cgaaggcctcgccgctctctccggc

SEQ ID NO: 1205684 - DNA, 25 bp, Homo sapien
cgatctgtcgctccgccgcggttaa

SEQ ID NO: 1205685 - DNA, 25 bp, Homo sapien
gcgcaggcggcagcgtgcagctccg

SEQ ID NO: 1205686 - DNA, 25 bp, Homo sapien
cagcgtgcagctccgcgatctgtcg

SEQ ID NO: 1205687 - DNA, 25 bp, Homo sapien
tccgccgcggttaactcttcgctca

SEQ ID NO: 1205688 - DNA, 25 bp, Homo sapien
aagacagacacaggtttcccgcgaa

SEQ ID NO: 1205689 - DNA, 25 bp, Homo sapien
tgggtcccacactgcgaccggagtt

SEQ ID NO: 1205690 - DNA, 25 bp, Homo sapien
gaccggagtttagctcggacgctga

SEQ ID NO: 1205691 - DNA, 25 bp, Homo sapien
tgtagttccctctgctccgttaaga

SEQ ID NO: 1205692 - DNA, 25 bp, Homo sapien
gatgctcagtgatgcgcatcggtac

SEQ ID NO: 1205693 - DNA, 25 bp, Homo sapien
tgcgcatcggtacccggagaaaggt

SEQ ID NO: 1205694 - DNA, 25 bp, Homo sapien
gacagtttgactggagagcaagatg

SEQ ID NO: 1205695 - DNA, 25 bp, Homo sapien
gtttgactggagagcaagatgctca

SEQ ID NO: 1205696 - DNA, 25 bp, Homo sapien
tgtctgcacgcagagccacaacatt

SEQ ID NO: 1205697 - DNA, 25 bp, Homo sapien
tgtgagcaccacatagccagtagct

SEQ ID NO: 1205698 - DNA, 25 bp, Homo sapien
gatccacatagtttagctggccagc

SEQ ID NO: 1205699 - DNA, 25 bp, Homo sapien
caagtgggcaatctgtgtgagcacc

SEQ ID NO: 1205700 - DNA, 25 bp, Homo sapien
gatctttaacattgacttgaccata

SEQ ID NO: 1205701 - DNA, 25 bp, Homo sapien
taacattgacttgaccatatggaca

SEQ ID NO: 1205702 - DNA, 25 bp, Homo sapien
tagatggatctttaacattgacttg

SEQ ID NO: 1205703 - DNA, 25 bp, Homo sapien
gatggatctttaacattgacttgac

SEQ ID NO: 1205704 - DNA, 25 bp, Homo sapien
acaagcacagttagggaacagagat

SEQ ID NO: 1205705 - DNA, 25 bp, Homo sapien
agtgttcaagtactaataatccagc

SEQ ID NO: 1205706 - DNA, 25 bp, Homo sapien
atttaggattaaactagtgttcaag

SEQ ID NO: 1205707 - DNA, 25 bp, Homo sapien
taaaaaatacaagcacagttaggga

SEQ ID NO: 1205708 - DNA, 25 bp, Homo sapien
ggcaagagctgcgggtaggaaggag

SEQ ID NO: 1205709 - DNA, 25 bp, Homo sapien
gcaagagctgcgggtaggaaggagg

SEQ ID NO: 1205710 - DNA, 25 bp, Homo sapien
caagagctgcgggtaggaaggaggc

SEQ ID NO: 1205711 - DNA, 25 bp, Homo sapien
aggcaagagctgcgggtaggaagga

SEQ ID NO: 1205712 - DNA, 25 bp, Homo sapien
cagcggctcctttgctgttcttgcc

SEQ ID NO: 1205713 - DNA, 25 bp, Homo sapien
acatcagggtcctccgtgacaaaca

SEQ ID NO: 1205714 - DNA, 25 bp, Homo sapien
agaattacgaacgtcccacatcagg

SEQ ID NO: 1205715 - DNA, 25 bp, Homo sapien
gaagaattgcgggtaagaattacga

SEQ ID NO: 1205716 - DNA, 25 bp, Homo sapien
ccaactagaactcggttctcggcgg

SEQ ID NO: 1205717 - DNA, 25 bp, Homo sapien
actagaactcggttctcggcgggag

SEQ ID NO: 1205718 - DNA, 25 bp, Homo sapien
tgtccagatgtcagacgtttcccca

SEQ ID NO: 1205719 - DNA, 25 bp, Homo sapien
cttgatgtccagatgtcagacgttt

SEQ ID NO: 1205720 - DNA, 25 bp, Homo sapien
ggtaccgttcagcattcttagagga

SEQ ID NO: 1205721 - DNA, 25 bp, Homo sapien
ggatcacgccgtaatggtggttgca

SEQ ID NO: 1205722 - DNA, 25 bp, Homo sapien
ctgcctctagagtggtaccgttcag

SEQ ID NO: 1205723 - DNA, 25 bp, Homo sapien
aaggagtggatcacgccgtaatggt

SEQ ID NO: 1205724 - DNA, 25 bp, Homo sapien
aaagggagaagtcccgcactgcgtc

SEQ ID NO: 1205725 - DNA, 25 bp, Homo sapien
gcactgcgtccgctgagatcaggcg

SEQ ID NO: 1205726 - DNA, 25 bp, Homo sapien
ctgagatttgttgcgccgcctgccc

SEQ ID NO: 1205727 - DNA, 25 bp, Homo sapien
tccgctgagatcaggcgcagaaacg

SEQ ID NO: 1205728 - DNA, 25 bp, Homo sapien
caggtgggtctacatgggcaaagaa

SEQ ID NO: 1205729 - DNA, 25 bp, Homo sapien
gtgggtctacatgggcaaagaaccc

SEQ ID NO: 1205730 - DNA, 25 bp, Homo sapien
tcaggtgggtctacatgggcaaaga

SEQ ID NO: 1205731 - DNA, 25 bp, Homo sapien
caaagaacccgagcccagtagaatt

SEQ ID NO: 1205732 - DNA, 25 bp, Homo sapien
tcttgagggccggagaccctactag

SEQ ID NO: 1205733 - DNA, 25 bp, Homo sapien
cttcatccgaagtggagagggcgtt

SEQ ID NO: 1205734 - DNA, 25 bp, Homo sapien
gagggccggagaccctactagatgc

SEQ ID NO: 1205735 - DNA, 25 bp, Homo sapien
agggcgtttggagcgtctgcatttc

SEQ ID NO: 1205736 - DNA, 25 bp, Homo sapien
ggaggagttctctccccggagctgc

SEQ ID NO: 1205737 - DNA, 25 bp, Homo sapien
tctccccggagctgccacggatttt

SEQ ID NO: 1205738 - DNA, 25 bp, Homo sapien
caaagacctgtcatactcctctcaa

SEQ ID NO: 1205739 - DNA, 25 bp, Homo sapien
gccacggatttttattcagacaaca

SEQ ID NO: 1205740 - DNA, 25 bp, Homo sapien
tgcaagttcccagtgcctgtagatt

SEQ ID NO: 1205741 - DNA, 25 bp, Homo sapien
gaaaaagacgtgctattttcagcgt

SEQ ID NO: 1205742 - DNA, 25 bp, Homo sapien
tcagcgttccctggctgcttgcaag

SEQ ID NO: 1205743 - DNA, 25 bp, Homo sapien
tcgagttactaatgggaaacaactg

SEQ ID NO: 1205744 - DNA, 25 bp, Homo sapien
ttcagctcatccgagtgaaggaggc

SEQ ID NO: 1205745 - DNA, 25 bp, Homo sapien
gaaaaagaggcgtagaaggcgaatc

SEQ ID NO: 1205746 - DNA, 25 bp, Homo sapien
tgccctgtaggagcgcagagacgct

SEQ ID NO: 1205747 - DNA, 25 bp, Homo sapien
gcctcagcggctccctgaaggagat

SEQ ID NO: 1205748 - DNA, 25 bp, Homo sapien
ggcggaaaggacacgagttgtcttc

SEQ ID NO: 1205749 - DNA, 25 bp, Homo sapien
gagttgtcttctgctcggcacccca

SEQ ID NO: 1205750 - DNA, 25 bp, Homo sapien
cacgagttgtcttctgctcggcacc

SEQ ID NO: 1205751 - DNA, 25 bp, Homo sapien
aggacacgagttgtcttctgctcgg

SEQ ID NO: 1205752 - DNA, 25 bp, Homo sapien
agtcttggatctgcgctccatctcc

SEQ ID NO: 1205753 - DNA, 25 bp, Homo sapien
ccggagatcccgtgaaagagcatgg

SEQ ID NO: 1205754 - DNA, 25 bp, Homo sapien
ggcgcctttggccagacgggcctca

SEQ ID NO: 1205755 - DNA, 25 bp, Homo sapien
tgatgccttggatgtggcctccgga

SEQ ID NO: 1205756 - DNA, 25 bp, Homo sapien
ggaatctactccacaggtccggtca

SEQ ID NO: 1205757 - DNA, 25 bp, Homo sapien
tcctggcgctaaacgtagtgctgtc

SEQ ID NO: 1205758 - DNA, 25 bp, Homo sapien
gccccgagcgtctagagaactggaa

SEQ ID NO: 1205759 - DNA, 25 bp, Homo sapien
ggaaatgacccagtcgcgtcggaat

SEQ ID NO: 1205760 - DNA, 25 bp, Homo sapien
gatagtacctgtccgagatcttgcc

SEQ ID NO: 1205761 - DNA, 25 bp, Homo sapien
ggactcgagggccagcttacattca

SEQ ID NO: 1205762 - DNA, 25 bp, Homo sapien
taccgtccttggcaaagcaggtgag

SEQ ID NO: 1205763 - DNA, 25 bp, Homo sapien
tagtaatcctccttgcagtaaatgc

SEQ ID NO: 1205764 - DNA, 25 bp, Homo sapien
ccgaaatgataacagcacccggaat

SEQ ID NO: 1205765 - DNA, 25 bp, Homo sapien
ctccaggtgtactcgggcgtaggaa

SEQ ID NO: 1205766 - DNA, 25 bp, Homo sapien
cgtcggtcagggagattacagcttg

SEQ ID NO: 1205767 - DNA, 25 bp, Homo sapien
agtgggtttgcctggtctccgaaat

SEQ ID NO: 1205768 - DNA, 25 bp, Homo sapien
tctcggtagacggagaccacgtcca

SEQ ID NO: 1205769 - DNA, 25 bp, Homo sapien
tgctgcccgagccactagttcagtt

SEQ ID NO: 1205770 - DNA, 25 bp, Homo sapien
gtagcaagcggaaaacaaacaccca

SEQ ID NO: 1205771 - DNA, 25 bp, Homo sapien
agtttcaaggcgcagaacttgccca

SEQ ID NO: 1205772 - DNA, 25 bp, Homo sapien
tggaaggaaagagttgagtcagggc

SEQ ID NO: 1205773 - DNA, 25 bp, Homo sapien
ggaaggaaagagttgagtcagggcg

SEQ ID NO: 1205774 - DNA, 25 bp, Homo sapien
ctggaaggaaagagttgagtcaggg

SEQ ID NO: 1205775 - DNA, 25 bp, Homo sapien
gtggcagcgggcacatctctgcaca

SEQ ID NO: 1205776 - DNA, 25 bp, Homo sapien
ggcagcgggcacatctctgcacaga

SEQ ID NO: 1205777 - DNA, 25 bp, Homo sapien
tggcagcgggcacatctctgcacag

SEQ ID NO: 1205778 - DNA, 25 bp, Homo sapien
ggtggcagcgggcacatctctgcac

SEQ ID NO: 1205779 - DNA, 25 bp, Homo sapien
tcagagtcttgttgcaagtggagca

SEQ ID NO: 1205780 - DNA, 25 bp, Homo sapien
agctcagctgcggtggatactctcc

SEQ ID NO: 1205781 - DNA, 25 bp, Homo sapien
tactctccttgcaagagggtctcga

SEQ ID NO: 1205782 - DNA, 25 bp, Homo sapien
ctgagttgtaattgacgatgtccac

SEQ ID NO: 1205783 - DNA, 25 bp, Homo sapien
tttggcctccacaaagaaattgccc

SEQ ID NO: 1205784 - DNA, 25 bp, Homo sapien
ctaatgggcaacaaggatttggctc

SEQ ID NO: 1205785 - DNA, 25 bp, Homo sapien
gaacagaggcattgggcaaaacaca

SEQ ID NO: 1205786 - DNA, 25 bp, Homo sapien
gggaaagtcactacagccccatagt

SEQ ID NO: 1205787 - DNA, 25 bp, Homo sapien
tgtgagtgggatgtgagctgtgccc

SEQ ID NO: 1205788 - DNA, 25 bp, Homo sapien
tgtgtgagtgggatgtgagctgtgc

SEQ ID NO: 1205789 - DNA, 25 bp, Homo sapien
tgtgtgtgagtgggatgtgagctgt

SEQ ID NO: 1205790 - DNA, 25 bp, Homo sapien
tgggatgtgagctgtgcccctggct

SEQ ID NO: 1205791 - DNA, 25 bp, Homo sapien
tattcctagagctccgtcagtcagg

SEQ ID NO: 1205792 - DNA, 25 bp, Homo sapien
catctaggtcaattctaagggttag

SEQ ID NO: 1205793 - DNA, 25 bp, Homo sapien
cacagggctataccagaaagaaaat

SEQ ID NO: 1205794 - DNA, 25 bp, Homo sapien
cagcttttagctatgactggttaac

SEQ ID NO: 1205795 - DNA, 25 bp, Homo sapien
ttgctttttgtcatgagacgtagag

SEQ ID NO: 1205796 - DNA, 25 bp, Homo sapien
ctgtctgaaggtattgctttttgtc

SEQ ID NO: 1205797 - DNA, 25 bp, Homo sapien
cacactgtctgaaggtattgctttt

SEQ ID NO: 1205798 - DNA, 25 bp, Homo sapien
tgctttttgtcatgagacgtagaga

SEQ ID NO: 1205799 - DNA, 25 bp, Homo sapien
gtttaatggttgctagaagaatttg

SEQ ID NO: 1205800 - DNA, 25 bp, Homo sapien
gctaaagtaagctgaactcttctgt

SEQ ID NO: 1205801 - DNA, 25 bp, Homo sapien
cacaaccaaagtttatgcaatagaa

SEQ ID NO: 1205802 - DNA, 25 bp, Homo sapien
agtgagagagacctacgagagtgag

SEQ ID NO: 1205803 - DNA, 25 bp, Homo sapien
ggttgtcaacccaattatgagtagt

SEQ ID NO: 1205804 - DNA, 25 bp, Homo sapien
gcagtgaaaaaggttgtcaacccaa

SEQ ID NO: 1205805 - DNA, 25 bp, Homo sapien
aaaggttgtcaacccaattatgagt

SEQ ID NO: 1205806 - DNA, 25 bp, Homo sapien
gcagcagtgaaaaaggttgtcaacc

SEQ ID NO: 1205807 - DNA, 25 bp, Homo sapien
ttagctgacatgatggcaggctgta

SEQ ID NO: 1205808 - DNA, 25 bp, Homo sapien
ctgctcagtggaaattcttgcatta

SEQ ID NO: 1205809 - DNA, 25 bp, Homo sapien
ggaaattcttgcattagctgacatg

SEQ ID NO: 1205810 - DNA, 25 bp, Homo sapien
gacatgatggcaggctgtatgacac

SEQ ID NO: 1205811 - DNA, 25 bp, Homo sapien
ctgttttctgggcaagctgcttgag

SEQ ID NO: 1205812 - DNA, 25 bp, Homo sapien
gaaagaggttcgcatgcgcttggtc

SEQ ID NO: 1205813 - DNA, 25 bp, Homo sapien
tgctggtcccggtccaagtggtctg

SEQ ID NO: 1205814 - DNA, 25 bp, Homo sapien
gcaaaactcttttggtcagacctgt

SEQ ID NO: 1205815 - DNA, 25 bp, Homo sapien
aatatctgcgtcactctaaccaggg

SEQ ID NO: 1205816 - DNA, 25 bp, Homo sapien
gacttcaagccattcgtgagcccaa

SEQ ID NO: 1205817 - DNA, 25 bp, Homo sapien
gagtgaggctgccaaaagtttgccg

SEQ ID NO: 1205818 - DNA, 25 bp, Homo sapien
ggaaatcgataaagccacggcctgt

SEQ ID NO: 1205819 - DNA, 25 bp, Homo sapien
tcgtggctgtccatgttagaggtca

SEQ ID NO: 1205820 - DNA, 25 bp, Homo sapien
tagaggtcacggatgtcactacagt

SEQ ID NO: 1205821 - DNA, 25 bp, Homo sapien
tctgttaaagtggtcgcagtgccgg

SEQ ID NO: 1205822 - DNA, 25 bp, Homo sapien
cgacgtgccgtcagctttatcaaca

SEQ ID NO: 1205823 - DNA, 25 bp, Homo sapien
tgcagatgctacacaccaagctgtt

SEQ ID NO: 1205824 - DNA, 25 bp, Homo sapien
tagccacttcgaccaccaaaggaga

SEQ ID NO: 1205825 - DNA, 25 bp, Homo sapien
taagatctcagccttaccaaggttg

SEQ ID NO: 1205826 - DNA, 25 bp, Homo sapien
tagagttgtacacccctaagagaag

SEQ ID NO: 1205827 - DNA, 25 bp, Homo sapien
caagttgtaaatgtactgtgctgcc

SEQ ID NO: 1205828 - DNA, 25 bp, Homo sapien
gctgtaatgccccaagatttgttct

SEQ ID NO: 1205829 - DNA, 25 bp, Homo sapien
tcatacagaggtgtacactagaggt

SEQ ID NO: 1205830 - DNA, 25 bp, Homo sapien
cactgcagtggatttccgatcaaac

SEQ ID NO: 1205831 - DNA, 25 bp, Homo sapien
ttaatacatgtggcaattgaataca

SEQ ID NO: 1205832 - DNA, 25 bp, Homo sapien
tctaaatgaaattgccacaggtgac

SEQ ID NO: 1205833 - DNA, 25 bp, Homo sapien
gtctgtaaaaccaggcgaagttcca

SEQ ID NO: 1205834 - DNA, 25 bp, Homo sapien
tagtctacttgtcatggtgcattgc

SEQ ID NO: 1205835 - DNA, 25 bp, Homo sapien
gaaagaaggcaagactgtagggcaa

SEQ ID NO: 1205836 - DNA, 25 bp, Homo sapien
gcagggctgtggctttacattagag

SEQ ID NO: 1205837 - DNA, 25 bp, Homo sapien
gaatgtgtggtagattccactggga

SEQ ID NO: 1205838 - DNA, 25 bp, Homo sapien
tttgccctgttgtggaagagactac

SEQ ID NO: 1205839 - DNA, 25 bp, Homo sapien
gagcctagaatgacacgattccaaa

SEQ ID NO: 1205840 - DNA, 25 bp, Homo sapien
gacattatcatattctgcaacacag

SEQ ID NO: 1205841 - DNA, 25 bp, Homo sapien
cacagaaatgcacaccaggaacttt

SEQ ID NO: 1205842 - DNA, 25 bp, Homo sapien
tgagggcagagcactattattaaaa

SEQ ID NO: 1205843 - DNA, 25 bp, Homo sapien
gacttttccttgagtatcatgcaca

SEQ ID NO: 1205844 - DNA, 25 bp, Homo sapien
tgctgggtccacgtcattgcctttc

SEQ ID NO: 1205845 - DNA, 25 bp, Homo sapien
aagtcctgctgggtccacgtcattg

SEQ ID NO: 1205846 - DNA, 25 bp, Homo sapien
gaaagtaagacttgaacaagtcctg

SEQ ID NO: 1205847 - DNA, 25 bp, Homo sapien
aatggtaagtgccagcagtagctct

SEQ ID NO: 1205848 - DNA, 25 bp, Homo sapien
aagaagttgagggaaggactctatg

SEQ ID NO: 1205849 - DNA, 25 bp, Homo sapien
aggtctgcggatagcagaaaccaga

SEQ ID NO: 1205850 - DNA, 25 bp, Homo sapien
tctatgataagggagttcccacagt

SEQ ID NO: 1205851 - DNA, 25 bp, Homo sapien
tcaaggtctgcggatagcagaaacc

SEQ ID NO: 1205852 - DNA, 25 bp, Homo sapien
cacttaagagtattggaatttttag

SEQ ID NO: 1205853 - DNA, 25 bp, Homo sapien
tttagttgcccccatcatctgatgt

SEQ ID NO: 1205854 - DNA, 25 bp, Homo sapien
cagacacaataagcttgctgaggct

SEQ ID NO: 1205855 - DNA, 25 bp, Homo sapien
aaagcaggcaaatgcaactctgatc

SEQ ID NO: 1205856 - DNA, 25 bp, Homo sapien
ctcctccactctctggaacccagac

SEQ ID NO: 1205857 - DNA, 25 bp, Homo sapien
gaacccagacttctctctcagatgc

SEQ ID NO: 1205858 - DNA, 25 bp, Homo sapien
agatgctgctgtgactctctgctcc

SEQ ID NO: 1205859 - DNA, 25 bp, Homo sapien
ttgtccctgaactttgtctcctcca

SEQ ID NO: 1205860 - DNA, 25 bp, Homo sapien
gtttgctttttctcccctctctgac

SEQ ID NO: 1205861 - DNA, 25 bp, Homo sapien
tcctgtttgctttttctcccctctc

SEQ ID NO: 1205862 - DNA, 25 bp, Homo sapien
tcactcctgtttgctttttctcccc

SEQ ID NO: 1205863 - DNA, 25 bp, Homo sapien
ctgtttgctttttctcccctctctg

SEQ ID NO: 1205864 - DNA, 25 bp, Homo sapien
gagaataaaacacaggtttaaagca

SEQ ID NO: 1205865 - DNA, 25 bp, Homo sapien
cagagaataaaacacaggtttaaag

SEQ ID NO: 1205866 - DNA, 25 bp, Homo sapien
aaacaatcacagctgttgttttgcc

SEQ ID NO: 1205867 - DNA, 25 bp, Homo sapien
acaatcacagctgttgttttgccac

SEQ ID NO: 1205868 - DNA, 25 bp, Homo sapien
ctaaaacaatcacagctgttgtttt

SEQ ID NO: 1205869 - DNA, 25 bp, Homo sapien
agctgttgttttgccacacacatca

SEQ ID NO: 1205870 - DNA, 25 bp, Homo sapien
gactgtgataatcgatgtaaaccaa

SEQ ID NO: 1205871 - DNA, 25 bp, Homo sapien
ctgtgataatcgatgtaaaccaaga

SEQ ID NO: 1205872 - DNA, 25 bp, Homo sapien
actgtgataatcgatgtaaaccaag

SEQ ID NO: 1205873 - DNA, 25 bp, Homo sapien
tcgtaatcagagcacttgtccaggt

SEQ ID NO: 1205874 - DNA, 25 bp, Homo sapien
gactgatgtcatgccctttatctgt

SEQ ID NO: 1205875 - DNA, 25 bp, Homo sapien
caggactgatgtcatgccctttatc

SEQ ID NO: 1205876 - DNA, 25 bp, Homo sapien
aaattgtcgtaatcagagcacttgt

SEQ ID NO: 1205877 - DNA, 25 bp, Homo sapien
cttgcaaggtgaggctaagcacagt

SEQ ID NO: 1205878 - DNA, 25 bp, Homo sapien
gatagaacgtagaagccatgcaacc

SEQ ID NO: 1205879 - DNA, 25 bp, Homo sapien
gaaaactgattttctctgaaggcta

SEQ ID NO: 1205880 - DNA, 25 bp, Homo sapien
tctgaaggctatgttttgaatgaag

SEQ ID NO: 1205881 - DNA, 25 bp, Homo sapien
gccaagccctcagtttgtctccagt

SEQ ID NO: 1205882 - DNA, 25 bp, Homo sapien
tccagtgtaattcaccagggcaacc

SEQ ID NO: 1205883 - DNA, 25 bp, Homo sapien
gatccagctgattacatatccatga

SEQ ID NO: 1205884 - DNA, 25 bp, Homo sapien
tgatggataacctcaagcccacagt

SEQ ID NO: 1205885 - DNA, 25 bp, Homo sapien
atttccaagccactgagagttactg

SEQ ID NO: 1205886 - DNA, 25 bp, Homo sapien
cactgagagttactggtttaagtcc

SEQ ID NO: 1205887 - DNA, 25 bp, Homo sapien
ccaagccactgagagttactggttt

SEQ ID NO: 1205888 - DNA, 25 bp, Homo sapien
tgagagttactggtttaagtcccat

SEQ ID NO: 1205889 - DNA, 25 bp, Homo sapien
cgtgggacagaccagtaaagtgtga

SEQ ID NO: 1205890 - DNA, 25 bp, Homo sapien
tgctagcgtgggacagaccagtaaa

SEQ ID NO: 1205891 - DNA, 25 bp, Homo sapien
ttttgtgctagcgtgggacagacca

SEQ ID NO: 1205892 - DNA, 25 bp, Homo sapien
gggacagaccagtaaagtgtgaaca

SEQ ID NO: 1205893 - DNA, 25 bp, Homo sapien
taaatatcatgaccgttaaatcagg

SEQ ID NO: 1205894 - DNA, 25 bp, Homo sapien
tccgtttcttcctccttctagccaa

SEQ ID NO: 1205895 - DNA, 25 bp, Homo sapien
ctctgctgctaaatatcatgaccgt

SEQ ID NO: 1205896 - DNA, 25 bp, Homo sapien
gctgctaaatatcatgaccgttaaa

SEQ ID NO: 1205897 - DNA, 25 bp, Homo sapien
agtgtcatttccaaagcttgataac

SEQ ID NO: 1205898 - DNA, 25 bp, Homo sapien
ccgccgctgtcaggagtgtaaacat

SEQ ID NO: 1205899 - DNA, 25 bp, Homo sapien
agtgcgagcctagcggcggcccatc

SEQ ID NO: 1205900 - DNA, 25 bp, Homo sapien
gctgccgccgctgtcaggagtgtaa

SEQ ID NO: 1205901 - DNA, 25 bp, Homo sapien
tgcgcactgcgaggcgcgtccggag

SEQ ID NO: 1205902 - DNA, 25 bp, Homo sapien
gccgccccggcggacgctgcaggcg

SEQ ID NO: 1205903 - DNA, 25 bp, Homo sapien
aggctgcgaggcccggagcctgtcg

SEQ ID NO: 1205904 - DNA, 25 bp, Homo sapien
gcggacgctgcaggcgcggggcacc

SEQ ID NO: 1205905 - DNA, 25 bp, Homo sapien
gaggcccggagcctgtcggccacct

SEQ ID NO: 1205906 - DNA, 25 bp, Homo sapien
tctcccgcccgcgagagaccttggg

SEQ ID NO: 1205907 - DNA, 25 bp, Homo sapien
gcgagagaccttgggcgggcgggtg

SEQ ID NO: 1205908 - DNA, 25 bp, Homo sapien
gcgccgccgtcggaaagcgcgctgg

SEQ ID NO: 1205909 - DNA, 25 bp, Homo sapien
tttccgttctcccgcccgcgagaga

SEQ ID NO: 1205910 - DNA, 25 bp, Homo sapien
taaataaccgacgtcgccaatgagc

SEQ ID NO: 1205911 - DNA, 25 bp, Homo sapien
cgaaaccaaagacctgttgccgccg

SEQ ID NO: 1205912 - DNA, 25 bp, Homo sapien
gccaatgagcatccgccggaaggcg

SEQ ID NO: 1205913 - DNA, 25 bp, Homo sapien
ccaatccgcgagagataaataaccg

SEQ ID NO: 1205914 - DNA, 25 bp, Homo sapien
ttccccgtgcgagaccaaatagagg

SEQ ID NO: 1205915 - DNA, 25 bp, Homo sapien
tcagcggccattcaacaagagttgc

SEQ ID NO: 1205916 - DNA, 25 bp, Homo sapien
gcttttgagtgcaaggactatgcca

SEQ ID NO: 1205917 - DNA, 25 bp, Homo sapien
tgttacaaaccaagaatactcagcg

SEQ ID NO: 1205918 - DNA, 25 bp, Homo sapien
aagaactaacgcggccttctccgag

SEQ ID NO: 1205919 - DNA, 25 bp, Homo sapien
acaccggccccgagaaggcaactag

SEQ ID NO: 1205920 - DNA, 25 bp, Homo sapien
aacgcgaggtcctggctgcgcattg

SEQ ID NO: 1205921 - DNA, 25 bp, Homo sapien
cgcattggctgcgaaggccgtcagt

SEQ ID NO: 1205922 - DNA, 25 bp, Homo sapien
attttaagcatgctaggaagaacat

SEQ ID NO: 1205923 - DNA, 25 bp, Homo sapien
tatttgtagtccataatataacccc

SEQ ID NO: 1205924 - DNA, 25 bp, Homo sapien
gagaaactatggcttgctggctctc

SEQ ID NO: 1205925 - DNA, 25 bp, Homo sapien
aaactaactcaaatgtaggaaccat

SEQ ID NO: 1205926 - DNA, 25 bp, Homo sapien
catatcactttactatatggtccag

SEQ ID NO: 1205927 - DNA, 25 bp, Homo sapien
tcatatcactttactatatggtcca

SEQ ID NO: 1205928 - DNA, 25 bp, Homo sapien
gccactgtgccggtatcatatcact

SEQ ID NO: 1205929 - DNA, 25 bp, Homo sapien
ctgtgccggtatcatatcactttac

SEQ ID NO: 1205930 - DNA, 25 bp, Homo sapien
ttggcaaataaacctggcacctcca

SEQ ID NO: 1205931 - DNA, 25 bp, Homo sapien
cagtggtgatccaaagtgctttcta

SEQ ID NO: 1205932 - DNA, 25 bp, Homo sapien
gactgaaaaattgaccttccttcca

SEQ ID NO: 1205933 - DNA, 25 bp, Homo sapien
gaaggagttactactgtgcagcagt

SEQ ID NO: 1205934 - DNA, 25 bp, Homo sapien
ggcaaatagatagtcatacctttaa

SEQ ID NO: 1205935 - DNA, 25 bp, Homo sapien
tcaagtattcgtccagttatttcct

SEQ ID NO: 1205936 - DNA, 25 bp, Homo sapien
gaggttcaatcattttagcatggta

SEQ ID NO: 1205937 - DNA, 25 bp, Homo sapien
tttgatgcgagtttctgatgtgcca

SEQ ID NO: 1205938 - DNA, 25 bp, Homo sapien
caccttctttagacagactcctctg

SEQ ID NO: 1205939 - DNA, 25 bp, Homo sapien
tactgatgacaccagagctctactc

SEQ ID NO: 1205940 - DNA, 25 bp, Homo sapien
tagacagtgttagctacatatccca

SEQ ID NO: 1205941 - DNA, 25 bp, Homo sapien
taaactctttgcttaaataggactc

SEQ ID NO: 1205942 - DNA, 25 bp, Homo sapien
tcaattctgacctgcactatcttgc

SEQ ID NO: 1205943 - DNA, 25 bp, Homo sapien
gaactatgctttgaatggatggtgc

SEQ ID NO: 1205944 - DNA, 25 bp, Homo sapien
tgcaaagttaacctaggcagctgct

SEQ ID NO: 1205945 - DNA, 25 bp, Homo sapien
gctaagcaagctttctcaccaaact

SEQ ID NO: 1205946 - DNA, 25 bp, Homo sapien
aacatcatcactctgtttatcccag

SEQ ID NO: 1205947 - DNA, 25 bp, Homo sapien
tctacgtaagtcctcaactcctact

SEQ ID NO: 1205948 - DNA, 25 bp, Homo sapien
catcatcactctgtttatcccagac

SEQ ID NO: 1205949 - DNA, 25 bp, Homo sapien
aactcctactaattctgcctcacaa

SEQ ID NO: 1205950 - DNA, 25 bp, Homo sapien
gacagggagaacattggaactacta

SEQ ID NO: 1205951 - DNA, 25 bp, Homo sapien
gagatccaagcttattgaaagggca

SEQ ID NO: 1205952 - DNA, 25 bp, Homo sapien
gggcctttcctaaatagagatccaa

SEQ ID NO: 1205953 - DNA, 25 bp, Homo sapien
taaaacaaggatatggaacagctgg

SEQ ID NO: 1205954 - DNA, 25 bp, Homo sapien
tttgctgagaagtactacacatctt

SEQ ID NO: 1205955 - DNA, 25 bp, Homo sapien
tagactgtgatctaagagactgttt

SEQ ID NO: 1205956 - DNA, 25 bp, Homo sapien
ttctaatttgactagactgtgatct

SEQ ID NO: 1205957 - DNA, 25 bp, Homo sapien
ggtaaataccaccatctacctggtc

SEQ ID NO: 1205958 - DNA, 25 bp, Homo sapien
tggccgctctcatctctaaagtttt

SEQ ID NO: 1205959 - DNA, 25 bp, Homo sapien
tttctaggccacaggtcaaaccaat

SEQ ID NO: 1205960 - DNA, 25 bp, Homo sapien
tctgtcactttctaggccacaggtc

SEQ ID NO: 1205961 - DNA, 25 bp, Homo sapien
gagcccctgcaactggccgctctca

SEQ ID NO: 1205962 - DNA, 25 bp, Homo sapien
cctgccaaaactgccgctgtttttg

SEQ ID NO: 1205963 - DNA, 25 bp, Homo sapien
taaagctgttttagactcaggcaaa

SEQ ID NO: 1205964 - DNA, 25 bp, Homo sapien
gacactgaatgattacttagtggaa

SEQ ID NO: 1205965 - DNA, 25 bp, Homo sapien
gaagcagctcatgctcagtgccttt

SEQ ID NO: 1205966 - DNA, 25 bp, Homo sapien
ctgggcgacatagggagacacggtc

SEQ ID NO: 1205967 - DNA, 25 bp, Homo sapien
gcgacatagggagacacggtctcta

SEQ ID NO: 1205968 - DNA, 25 bp, Homo sapien
gggcgacatagggagacacggtctc

SEQ ID NO: 1205969 - DNA, 25 bp, Homo sapien
gacatagggagacacggtctctaca

SEQ ID NO: 1205970 - DNA, 25 bp, Homo sapien
gccacacataaactaatgacagctg

SEQ ID NO: 1205971 - DNA, 25 bp, Homo sapien
catgggatgtggattggacaagctt

SEQ ID NO: 1205972 - DNA, 25 bp, Homo sapien
gatatcctaggcaacatgtagtgca

SEQ ID NO: 1205973 - DNA, 25 bp, Homo sapien
ttaagtccataagaatcctcacgtg

SEQ ID NO: 1205974 - DNA, 25 bp, Homo sapien
tacacttgtactaattcttccttga

SEQ ID NO: 1205975 - DNA, 25 bp, Homo sapien
gtgttttacagatacttgtccgcag

SEQ ID NO: 1205976 - DNA, 25 bp, Homo sapien
ggctttgatatcagggtgacactag

SEQ ID NO: 1205977 - DNA, 25 bp, Homo sapien
tggccctgggcttatttttcttggc

SEQ ID NO: 1205978 - DNA, 25 bp, Homo sapien
tccgtctcttgcctgatagctcggg

SEQ ID NO: 1205979 - DNA, 25 bp, Homo sapien
tgattattaacctgttcattgttgg

SEQ ID NO: 1205980 - DNA, 25 bp, Homo sapien
aatcagcatacagagatagtttggc

SEQ ID NO: 1205981 - DNA, 25 bp, Homo sapien
ggtataagatcatataatcagcata

SEQ ID NO: 1205982 - DNA, 25 bp, Homo sapien
tctacaggttgtctattctgatgat

SEQ ID NO: 1205983 - DNA, 25 bp, Homo sapien
tatcagtcctttgttgggttcataa

SEQ ID NO: 1205984 - DNA, 25 bp, Homo sapien
gctgatttatttgtatattccgcat

SEQ ID NO: 1205985 - DNA, 25 bp, Homo sapien
ttctttacctagatcaatgtccaga

SEQ ID NO: 1205986 - DNA, 25 bp, Homo sapien
tagagttgaagcatattcgtccaag

SEQ ID NO: 1205987 - DNA, 25 bp, Homo sapien
tcgtccaagcttattaatagtttcc

SEQ ID NO: 1205988 - DNA, 25 bp, Homo sapien
aattctagagttgaagcatattcgt

SEQ ID NO: 1205989 - DNA, 25 bp, Homo sapien
gaagcatattcgtccaagcttatta

SEQ ID NO: 1205990 - DNA, 25 bp, Homo sapien
cagtgggttcttaatgttattatag

SEQ ID NO: 1205991 - DNA, 25 bp, Homo sapien
catcacgcccagacttcagtgggtt

SEQ ID NO: 1205992 - DNA, 25 bp, Homo sapien
tattatagaatatgtcagtgtttac

SEQ ID NO: 1205993 - DNA, 25 bp, Homo sapien
accattacttatcatgccctcagaa

SEQ ID NO: 1205994 - DNA, 25 bp, Homo sapien
ctgaagcaacaggaactttagaact

SEQ ID NO: 1205995 - DNA, 25 bp, Homo sapien
tctgaagcaacaggaactttagaac

SEQ ID NO: 1205996 - DNA, 25 bp, Homo sapien
gtctgaagcaacaggaactttagaa

SEQ ID NO: 1205997 - DNA, 25 bp, Homo sapien
tgtctgaagcaacaggaactttaga

SEQ ID NO: 1205998 - DNA, 25 bp, Homo sapien
ttgcattccttgtgattgctcatcc

SEQ ID NO: 1205999 - DNA, 25 bp, Homo sapien
tgcattccttgtgattgctcatcca

SEQ ID NO: 1206000 - DNA, 25 bp, Homo sapien
gcattccttgtgattgctcatccat

SEQ ID NO: 1206001 - DNA, 25 bp, Homo sapien
aagaagtccacccacacaggagcag

SEQ ID NO: 1206002 - DNA, 25 bp, Homo sapien
gaacctgggacgacacttgcctgtt

SEQ ID NO: 1206003 - DNA, 25 bp, Homo sapien
acctgggacgacacttgcctgtttc

SEQ ID NO: 1206004 - DNA, 25 bp, Homo sapien
tagaacctgggacgacacttgcctg

SEQ ID NO: 1206005 - DNA, 25 bp, Homo sapien
ttcacaaagaaagtaactccagaag

SEQ ID NO: 1206006 - DNA, 25 bp, Homo sapien
tcacaaagaaagtaactccagaaga

SEQ ID NO: 1206007 - DNA, 25 bp, Homo sapien
caaagaaagtaactccagaagataa

SEQ ID NO: 1206008 - DNA, 25 bp, Homo sapien
cacaaagaaagtaactccagaagat

SEQ ID NO: 1206009 - DNA, 25 bp, Homo sapien
gcaatgttatctgaaatggtaagca

SEQ ID NO: 1206010 - DNA, 25 bp, Homo sapien
ggagataagactgttcaaggaatgt

SEQ ID NO: 1206011 - DNA, 25 bp, Homo sapien
gctatgtgacgatggacaagttagt

SEQ ID NO: 1206012 - DNA, 25 bp, Homo sapien
gcagtactactgtccagaatgaagg

SEQ ID NO: 1206013 - DNA, 25 bp, Homo sapien
aggttgggcaactctagataagtac

SEQ ID NO: 1206014 - DNA, 25 bp, Homo sapien
taagtactaatcacaagcaaaagtg

SEQ ID NO: 1206015 - DNA, 25 bp, Homo sapien
agccaggacatagggaattcgcaga

SEQ ID NO: 1206016 - DNA, 25 bp, Homo sapien
gaaaactgtaagtatgaggtaccta

SEQ ID NO: 1206017 - DNA, 25 bp, Homo sapien
gaagcatgctaatatagtcacccat

SEQ ID NO: 1206018 - DNA, 25 bp, Homo sapien
gaatccctgatgttaggtgactcgg

SEQ ID NO: 1206019 - DNA, 25 bp, Homo sapien
caaagaacttgcctgacaatgcagt

SEQ ID NO: 1206020 - DNA, 25 bp, Homo sapien
gactcgggactgtacagttaactaa

SEQ ID NO: 1206021 - DNA, 25 bp, Homo sapien
tatgaggtactctcactcgtaagta

SEQ ID NO: 1206022 - DNA, 25 bp, Homo sapien
tctttgccccatcgctctgaacaga

SEQ ID NO: 1206023 - DNA, 25 bp, Homo sapien
gaagtcattccccaatttgacagtt

SEQ ID NO: 1206024 - DNA, 25 bp, Homo sapien
ctaatgacatttcagccaacaccag

SEQ ID NO: 1206025 - DNA, 25 bp, Homo sapien
ctacttctcccttccatgagacagc

SEQ ID NO: 1206026 - DNA, 25 bp, Homo sapien
acatgagaaggagcatagctgcaca

SEQ ID NO: 1206027 - DNA, 25 bp, Homo sapien
agaaggagcatagctgcacatctcc

SEQ ID NO: 1206028 - DNA, 25 bp, Homo sapien
agcatagctgcacatctccaactac

SEQ ID NO: 1206029 - DNA, 25 bp, Homo sapien
aggagcatagctgcacatctccaac

SEQ ID NO: 1206030 - DNA, 25 bp, Homo sapien
gtaaacttcacagcccatttgcggc

SEQ ID NO: 1206031 - DNA, 25 bp, Homo sapien
ggatgaactgccaccaaggattagg

SEQ ID NO: 1206032 - DNA, 25 bp, Homo sapien
cccatgtcctgtcacccagtgtaga

SEQ ID NO: 1206033 - DNA, 25 bp, Homo sapien
tatggcctgagcattagacacttca

SEQ ID NO: 1206034 - DNA, 25 bp, Homo sapien
cagatcacacactgtcttggtttat

SEQ ID NO: 1206035 - DNA, 25 bp, Homo sapien
agatcacacactgtcttggtttatt

SEQ ID NO: 1206036 - DNA, 25 bp, Homo sapien
tcagatcacacactgtcttggttta

SEQ ID NO: 1206037 - DNA, 25 bp, Homo sapien
gatcacacactgtcttggtttatta

SEQ ID NO: 1206038 - DNA, 25 bp, Homo sapien
tataaacttcactaaattgtccgcg

SEQ ID NO: 1206039 - DNA, 25 bp, Homo sapien
tatagcccatatccggtcgtaaggc

SEQ ID NO: 1206040 - DNA, 25 bp, Homo sapien
tcttttctattcgaaagttggctaa

SEQ ID NO: 1206041 - DNA, 25 bp, Homo sapien
tttttaaagctactggtactccatc

SEQ ID NO: 1206042 - DNA, 25 bp, Homo sapien
tgtaggctctcagatccctttatga

SEQ ID NO: 1206043 - DNA, 25 bp, Homo sapien
taatgttgccatatactgtaggctc

SEQ ID NO: 1206044 - DNA, 25 bp, Homo sapien
ttgcaaatgaaccatgatgggatac

SEQ ID NO: 1206045 - DNA, 25 bp, Homo sapien
agtaacatgcatttagcgcacacac

SEQ ID NO: 1206046 - DNA, 25 bp, Homo sapien
caatggctgccacacagtaaaatag

SEQ ID NO: 1206047 - DNA, 25 bp, Homo sapien
catgcagaatctaaacttaagatga

SEQ ID NO: 1206048 - DNA, 25 bp, Homo sapien
taagtaaataaaaggtaagcattca

SEQ ID NO: 1206049 - DNA, 25 bp, Homo sapien
ggtaaatctgaacaatattatcact

SEQ ID NO: 1206050 - DNA, 25 bp, Homo sapien
gctggaaccttcctgtcactaccct

SEQ ID NO: 1206051 - DNA, 25 bp, Homo sapien
tcagatgactgactccttatcctcc

SEQ ID NO: 1206052 - DNA, 25 bp, Homo sapien
taaatttcacatcctcggagaggcc

SEQ ID NO: 1206053 - DNA, 25 bp, Homo sapien
tatcctccacctacgcttaaatttc

SEQ ID NO: 1206054 - DNA, 25 bp, Homo sapien
cacgtgctttggcatccattaaatc

SEQ ID NO: 1206055 - DNA, 25 bp, Homo sapien
gcacgtgctttggcatccattaaat

SEQ ID NO: 1206056 - DNA, 25 bp, Homo sapien
cgtgctttggcatccattaaatcaa

SEQ ID NO: 1206057 - DNA, 25 bp, Homo sapien
gctttggcatccattaaatcaaata

SEQ ID NO: 1206058 - DNA, 25 bp, Homo sapien
agcatctgctagttccaaaactatg

SEQ ID NO: 1206059 - DNA, 25 bp, Homo sapien
tggataggtcgccagcatctgctag

SEQ ID NO: 1206060 - DNA, 25 bp, Homo sapien
cttcaatgaatgatgcataatattt

SEQ ID NO: 1206061 - DNA, 25 bp, Homo sapien
cttgatcattctggataggtcgcca

SEQ ID NO: 1206062 - DNA, 25 bp, Homo sapien
ccttttactcatgtccagagacaca

SEQ ID NO: 1206063 - DNA, 25 bp, Homo sapien
acctccttttactcatgtccagaga

SEQ ID NO: 1206064 - DNA, 25 bp, Homo sapien
ctccttttactcatgtccagagaca

SEQ ID NO: 1206065 - DNA, 25 bp, Homo sapien
ctacctccttttactcatgtccaga

SEQ ID NO: 1206066 - DNA, 25 bp, Homo sapien
gcttttaattctctgccaagatgca

SEQ ID NO: 1206067 - DNA, 25 bp, Homo sapien
gcaagtgatgactggctgactccct

SEQ ID NO: 1206068 - DNA, 25 bp, Homo sapien
ttgtttctagatggttcaacttgtc

SEQ ID NO: 1206069 - DNA, 25 bp, Homo sapien
gccggtctatagcttctctatgtca

SEQ ID NO: 1206070 - DNA, 25 bp, Homo sapien
ggatgatgagttccaaaaagccatg

SEQ ID NO: 1206071 - DNA, 25 bp, Homo sapien
gtagaaactggctcaatcattaaga

SEQ ID NO: 1206072 - DNA, 25 bp, Homo sapien
tcagagatcctgttataatcatccc

SEQ ID NO: 1206073 - DNA, 25 bp, Homo sapien
ttcaccagtgtagtttcagagatcc

SEQ ID NO: 1206074 - DNA, 25 bp, Homo sapien
tgcatacaggcacagatggatgggt

SEQ ID NO: 1206075 - DNA, 25 bp, Homo sapien
gacacaagtaggtctagcaggttca

SEQ ID NO: 1206076 - DNA, 25 bp, Homo sapien
ggtgctcctgtctagtgacttctaa

SEQ ID NO: 1206077 - DNA, 25 bp, Homo sapien
caagaatacggtaacaggagagaag

SEQ ID NO: 1206078 - DNA, 25 bp, Homo sapien
aggtgagggtggtaggacttaagag

SEQ ID NO: 1206079 - DNA, 25 bp, Homo sapien
gagggtcttctgagatcatcttact

SEQ ID NO: 1206080 - DNA, 25 bp, Homo sapien
tcttacttaaaatagcaacacacag

SEQ ID NO: 1206081 - DNA, 25 bp, Homo sapien
tcgagatcaccctgatcaatatggg

SEQ ID NO: 1206082 - DNA, 25 bp, Homo sapien
ctctatgaaacgagagcataaagca

SEQ ID NO: 1206083 - DNA, 25 bp, Homo sapien
caggaaattgctgtgacagttatac

SEQ ID NO: 1206084 - DNA, 25 bp, Homo sapien
acaaccacccatgttatctactgag

SEQ ID NO: 1206085 - DNA, 25 bp, Homo sapien
caactctctatgaaacgagagcata

SEQ ID NO: 1206086 - DNA, 25 bp, Homo sapien
ttgcaattgtgtagccaacccaggg

SEQ ID NO: 1206087 - DNA, 25 bp, Homo sapien
tatctggtaaaacccatctgcgtca

SEQ ID NO: 1206088 - DNA, 25 bp, Homo sapien
actatcagggtcagcttcatgggca

SEQ ID NO: 1206089 - DNA, 25 bp, Homo sapien
aagagcttcagtgatattacccagc

SEQ ID NO: 1206090 - DNA, 25 bp, Homo sapien
gactcttcgagaatgcatgtgttcc

SEQ ID NO: 1206091 - DNA, 25 bp, Homo sapien
caatgcactgcaaagctgaacaaaa

SEQ ID NO: 1206092 - DNA, 25 bp, Homo sapien
tttcaggaattagcctcttttgctt

SEQ ID NO: 1206093 - DNA, 25 bp, Homo sapien
cgagaatgcatgtgttccaatgcac

SEQ ID NO: 1206094 - DNA, 25 bp, Homo sapien
ggttagtaagatgctcaaaagagtc

SEQ ID NO: 1206095 - DNA, 25 bp, Homo sapien
gagttctcgattctctgctagacag

SEQ ID NO: 1206096 - DNA, 25 bp, Homo sapien
gctagacagctaatcatcaatgtag

SEQ ID NO: 1206097 - DNA, 25 bp, Homo sapien
tcacacttcagtatcagcggatcaa

SEQ ID NO: 1206098 - DNA, 25 bp, Homo sapien
tgagctgaaaaaccggccaagccca

SEQ ID NO: 1206099 - DNA, 25 bp, Homo sapien
atgaacacattagctggttttatat

SEQ ID NO: 1206100 - DNA, 25 bp, Homo sapien
tgaaaaaccggccaagcccaagatc

SEQ ID NO: 1206101 - DNA, 25 bp, Homo sapien
ttttgagctgaaaaaccggccaagc

SEQ ID NO: 1206102 - DNA, 25 bp, Homo sapien
cccctttctttctctgcatcttcat

SEQ ID NO: 1206103 - DNA, 25 bp, Homo sapien
tccccctttctttctctgcatcttc

SEQ ID NO: 1206104 - DNA, 25 bp, Homo sapien
tccacttccccctttctttctctgc

SEQ ID NO: 1206105 - DNA, 25 bp, Homo sapien
cttccccctttctttctctgcatct

SEQ ID NO: 1206106 - DNA, 25 bp, Homo sapien
tagctgtcgcgtccattaaaatgtc

SEQ ID NO: 1206107 - DNA, 25 bp, Homo sapien
tacggtagtggcaagagactttgca

SEQ ID NO: 1206108 - DNA, 25 bp, Homo sapien
cagccagtgaggaaacaagaacgtc

SEQ ID NO: 1206109 - DNA, 25 bp, Homo sapien
gatatgaatgtctccctagctgtcg

SEQ ID NO: 1206110 - DNA, 25 bp, Homo sapien
tgtctacgattactgttgcctcaag

SEQ ID NO: 1206111 - DNA, 25 bp, Homo sapien
ttctggacaaggactcacgctgact

SEQ ID NO: 1206112 - DNA, 25 bp, Homo sapien
cataattcactagggaacacaggcc

SEQ ID NO: 1206113 - DNA, 25 bp, Homo sapien
tgagcaaagaggttcagccccatca

SEQ ID NO: 1206114 - DNA, 25 bp, Homo sapien
cagccaagagaccagatgtcagatt

SEQ ID NO: 1206115 - DNA, 25 bp, Homo sapien
gagaccagatgtcagatttgaagtt

SEQ ID NO: 1206116 - DNA, 25 bp, Homo sapien
caagagaccagatgtcagatttgaa

SEQ ID NO: 1206117 - DNA, 25 bp, Homo sapien
tagacagccaagagaccagatgtca

SEQ ID NO: 1206118 - DNA, 25 bp, Homo sapien
ttttgaactgtaagccaccaaccta

SEQ ID NO: 1206119 - DNA, 25 bp, Homo sapien
tgtcggagggacgaaagcccactgt

SEQ ID NO: 1206120 - DNA, 25 bp, Homo sapien
ctacaaccctgtaaggatgcaattg

SEQ ID NO: 1206121 - DNA, 25 bp, Homo sapien
cgaaagcccactgtctgtcttcggg

SEQ ID NO: 1206122 - DNA, 25 bp, Homo sapien
gtcaccatagaaaggactttgtaat

SEQ ID NO: 1206123 - DNA, 25 bp, Homo sapien
tttgtcaccatagaaaggactttgt

SEQ ID NO: 1206124 - DNA, 25 bp, Homo sapien
tgtcaccatagaaaggactttgtaa

SEQ ID NO: 1206125 - DNA, 25 bp, Homo sapien
ttgtcaccatagaaaggactttgta

SEQ ID NO: 1206126 - DNA, 25 bp, Homo sapien
tcttacacagtgagtataaattcat

SEQ ID NO: 1206127 - DNA, 25 bp, Homo sapien
gaaggaagaggtgggtagtcacact

SEQ ID NO: 1206128 - DNA, 25 bp, Homo sapien
tcttcttacacagtgagtataaatt

SEQ ID NO: 1206129 - DNA, 25 bp, Homo sapien
cttctgaatagtgatctgaaggaag

SEQ ID NO: 1206130 - DNA, 25 bp, Homo sapien
aagactgacatgattacctaataag

SEQ ID NO: 1206131 - DNA, 25 bp, Homo sapien
tattattcaagttacacgaactcaa

SEQ ID NO: 1206132 - DNA, 25 bp, Homo sapien
tactaagaccctatgctattcgttt

SEQ ID NO: 1206133 - DNA, 25 bp, Homo sapien
gaactcaaatttccttacataatac

SEQ ID NO: 1206134 - DNA, 25 bp, Homo sapien
tatttgccccttggctgagaatccg

SEQ ID NO: 1206135 - DNA, 25 bp, Homo sapien
ggccgacttcaacgaaccactagtg

SEQ ID NO: 1206136 - DNA, 25 bp, Homo sapien
aactctaagaccttctatctgggcc

SEQ ID NO: 1206137 - DNA, 25 bp, Homo sapien
acttagctgcagtgaagtagccctg

SEQ ID NO: 1206138 - DNA, 25 bp, Homo sapien
gagttcctgcttaaggagagaaaat

SEQ ID NO: 1206139 - DNA, 25 bp, Homo sapien
tattagcacatctgcatttcaaagc

SEQ ID NO: 1206140 - DNA, 25 bp, Homo sapien
cattatagcactaccaaatttggga

SEQ ID NO: 1206141 - DNA, 25 bp, Homo sapien
tccacatttacctagaaactacagc

SEQ ID NO: 1206142 - DNA, 25 bp, Homo sapien
tcacctaaaaaagcgttaatcagac

SEQ ID NO: 1206143 - DNA, 25 bp, Homo sapien
tcagatcggcaagcactattgtaat

SEQ ID NO: 1206144 - DNA, 25 bp, Homo sapien
tgccatagccactagttcagatcgg

SEQ ID NO: 1206145 - DNA, 25 bp, Homo sapien
ttcatctgcaaaccctgtactcaac

SEQ ID NO: 1206146 - DNA, 25 bp, Homo sapien
tgaaatataggacaccgttttggat

SEQ ID NO: 1206147 - DNA, 25 bp, Homo sapien
tgtgaaatataggacaccgttttgg

SEQ ID NO: 1206148 - DNA, 25 bp, Homo sapien
atataggacaccgttttggattcat

SEQ ID NO: 1206149 - DNA, 25 bp, Homo sapien
catgtgaaatataggacaccgtttt

SEQ ID NO: 1206150 - DNA, 25 bp, Homo sapien
tggctcggagggtcctacgcccatg

SEQ ID NO: 1206151 - DNA, 25 bp, Homo sapien
gcaccaggagactatatcccgcatc

SEQ ID NO: 1206152 - DNA, 25 bp, Homo sapien
cgcaccaggagactatatcccgcat

SEQ ID NO: 1206153 - DNA, 25 bp, Homo sapien
gggtcctacgcccatggagtctccc

SEQ ID NO: 1206154 - DNA, 25 bp, Homo sapien
agctaaggcccaccatagatgggga

SEQ ID NO: 1206155 - DNA, 25 bp, Homo sapien
gctaaggcccaccatagatggggag

SEQ ID NO: 1206156 - DNA, 25 bp, Homo sapien
aagctaaggcccaccatagatgggg

SEQ ID NO: 1206157 - DNA, 25 bp, Homo sapien
taaggcccaccatagatggggagga

SEQ ID NO: 1206158 - DNA, 25 bp, Homo sapien
cagctgacagtatccttctccattc

SEQ ID NO: 1206159 - DNA, 25 bp, Homo sapien
tctccattccaagtactgcaaccct

SEQ ID NO: 1206160 - DNA, 25 bp, Homo sapien
cggaggtatcgatacccacacagct

SEQ ID NO: 1206161 - DNA, 25 bp, Homo sapien
ctcgtacacggaggtatcgataccc

SEQ ID NO: 1206162 - DNA, 25 bp, Homo sapien
tctaatgggtcatctagctgtcaga

SEQ ID NO: 1206163 - DNA, 25 bp, Homo sapien
tattccttccaaaagagcagagaac

SEQ ID NO: 1206164 - DNA, 25 bp, Homo sapien
ggtaagtcactgtctctggaggttc

SEQ ID NO: 1206165 - DNA, 25 bp, Homo sapien
tagtaatgttacacccactgggaga

SEQ ID NO: 1206166 - DNA, 25 bp, Homo sapien
cataggtgacgtctggtcgcttctc

SEQ ID NO: 1206167 - DNA, 25 bp, Homo sapien
tctggatctgggttgatgcacatat

SEQ ID NO: 1206168 - DNA, 25 bp, Homo sapien
tgcatgcatgcatcctctttgctac

SEQ ID NO: 1206169 - DNA, 25 bp, Homo sapien
ctttgctacgtcataaacataggtg

SEQ ID NO: 1206170 - DNA, 25 bp, Homo sapien
aattctgtgagaaactggtcgccac

SEQ ID NO: 1206171 - DNA, 25 bp, Homo sapien
caaacatatgcatacagagtggccc

SEQ ID NO: 1206172 - DNA, 25 bp, Homo sapien
cagcagttacatcggctaaagggaa

SEQ ID NO: 1206173 - DNA, 25 bp, Homo sapien
gagtctattctgatgtgtgccaagc

SEQ ID NO: 1206174 - DNA, 25 bp, Homo sapien
gatttgtgtaatctctgttatcacc

SEQ ID NO: 1206175 - DNA, 25 bp, Homo sapien
aaatgcgtaagaactgtttctgtac

SEQ ID NO: 1206176 - DNA, 25 bp, Homo sapien
gaagatgtccttagtttaatgcatg

SEQ ID NO: 1206177 - DNA, 25 bp, Homo sapien
tgttatcacccttgtctattccaat

SEQ ID NO: 1206178 - DNA, 25 bp, Homo sapien
ttagcagcccattacaatgacagga

SEQ ID NO: 1206179 - DNA, 25 bp, Homo sapien
acacccctgctctaaagattcaaag

SEQ ID NO: 1206180 - DNA, 25 bp, Homo sapien
ttttcaggtatagcagtaaccttca

SEQ ID NO: 1206181 - DNA, 25 bp, Homo sapien
ccatgagccgcatgcggcccagaat

SEQ ID NO: 1206182 - DNA, 25 bp, Homo sapien
taaaaattcataactagccccactg

SEQ ID NO: 1206183 - DNA, 25 bp, Homo sapien
ctcaagggattcactgcagttgtct

SEQ ID NO: 1206184 - DNA, 25 bp, Homo sapien
cagtctggtaggtttcatcccgcta

SEQ ID NO: 1206185 - DNA, 25 bp, Homo sapien
ggaagtctttcgataactcaaggga

SEQ ID NO: 1206186 - DNA, 25 bp, Homo sapien
aaacattcacatatttgtctgttaa

SEQ ID NO: 1206187 - DNA, 25 bp, Homo sapien
gcaaacattcacatatttgtctgtt

SEQ ID NO: 1206188 - DNA, 25 bp, Homo sapien
caaacattcacatatttgtctgtta

SEQ ID NO: 1206189 - DNA, 25 bp, Homo sapien
tgtagaagagaatatgcagcattgc

SEQ ID NO: 1206190 - DNA, 25 bp, Homo sapien
tatgtgagaaagtgaggatatgagc

SEQ ID NO: 1206191 - DNA, 25 bp, Homo sapien
gatttcctatgcattgtaacactca

SEQ ID NO: 1206192 - DNA, 25 bp, Homo sapien
tgtagagttaggaaatgatatccct

SEQ ID NO: 1206193 - DNA, 25 bp, Homo sapien
gaaatatagcgagagaagaaacaca

SEQ ID NO: 1206194 - DNA, 25 bp, Homo sapien
aacacacaaattctcaacactcgtg

SEQ ID NO: 1206195 - DNA, 25 bp, Homo sapien
tgggactaatggagagaacaaggca

SEQ ID NO: 1206196 - DNA, 25 bp, Homo sapien
gaacaaggcaaaagtagatggaaat

SEQ ID NO: 1206197 - DNA, 25 bp, Homo sapien
tacactgttcctaatgtgagaaaga

SEQ ID NO: 1206198 - DNA, 25 bp, Homo sapien
agctacactgttcctaatgtgagaa

SEQ ID NO: 1206199 - DNA, 25 bp, Homo sapien
aggagccatttaagctacactgttc

SEQ ID NO: 1206200 - DNA, 25 bp, Homo sapien
gaggagccatttaagctacactgtt

SEQ ID NO: 1206201 - DNA, 25 bp, Homo sapien
tcagcagggctctatttaatgaagc

SEQ ID NO: 1206202 - DNA, 25 bp, Homo sapien
taatgaagcgtacaccagtgtcacc

SEQ ID NO: 1206203 - DNA, 25 bp, Homo sapien
acaacagtgggtagcgctggtgcca

SEQ ID NO: 1206204 - DNA, 25 bp, Homo sapien
gagctagctgctggatcaatggtca

SEQ ID NO: 1206205 - DNA, 25 bp, Homo sapien
gatgccagtcttaaggtaggtttcc

SEQ ID NO: 1206206 - DNA, 25 bp, Homo sapien
ggcattccaataaaccccaagtgat

SEQ ID NO: 1206207 - DNA, 25 bp, Homo sapien
tgttgattgtagtccctctgctgtg

SEQ ID NO: 1206208 - DNA, 25 bp, Homo sapien
tactgggtgtcagaccatgtgctgg

SEQ ID NO: 1206209 - DNA, 25 bp, Homo sapien
ctggacaaagagacatttgaaggac

SEQ ID NO: 1206210 - DNA, 25 bp, Homo sapien
accacccaagggcaaaatcatgatg

SEQ ID NO: 1206211 - DNA, 25 bp, Homo sapien
ctggaagtaagaataccatcagtgc

SEQ ID NO: 1206212 - DNA, 25 bp, Homo sapien
ccacccaagggcaaaatcatgatgc

SEQ ID NO: 1206213 - DNA, 25 bp, Homo sapien
ataccatcagtgcaccacccaaggg

SEQ ID NO: 1206214 - DNA, 25 bp, Homo sapien
tctgtgcaaatatggtacctgagaa

SEQ ID NO: 1206215 - DNA, 25 bp, Homo sapien
caaacatgcactgggaatcacctca

SEQ ID NO: 1206216 - DNA, 25 bp, Homo sapien
tacctgagaagatggaacatccttc

SEQ ID NO: 1206217 - DNA, 25 bp, Homo sapien
tagctttagcaacatagatctgtgc

SEQ ID NO: 1206218 - DNA, 25 bp, Homo sapien
gagacttaggtctcacttgatgacc

SEQ ID NO: 1206219 - DNA, 25 bp, Homo sapien
atgataccttaacaatgattctggc

SEQ ID NO: 1206220 - DNA, 25 bp, Homo sapien
gggcatggtgcccagtggactgctt

SEQ ID NO: 1206221 - DNA, 25 bp, Homo sapien
ggcactgggatgtctcaatttcact

SEQ ID NO: 1206222 - DNA, 25 bp, Homo sapien
tccagggtcatcaatgggtagttca

SEQ ID NO: 1206223 - DNA, 25 bp, Homo sapien
ggtcatcaatgggtagttcaactga

SEQ ID NO: 1206224 - DNA, 25 bp, Homo sapien
catcaatgggtagttcaactgaatg

SEQ ID NO: 1206225 - DNA, 25 bp, Homo sapien
attctccagggtcatcaatgggtag

SEQ ID NO: 1206226 - DNA, 25 bp, Homo sapien
taggtctggctcttagcaccttctc

SEQ ID NO: 1206227 - DNA, 25 bp, Homo sapien
ctggctcttagcaccttctctttga

SEQ ID NO: 1206228 - DNA, 25 bp, Homo sapien
gctcttagcaccttctctttgatac

SEQ ID NO: 1206229 - DNA, 25 bp, Homo sapien
ctaggtctggctcttagcaccttct

SEQ ID NO: 1206230 - DNA, 25 bp, Homo sapien
ccggaaacatatgctgtctgtgcag

SEQ ID NO: 1206231 - DNA, 25 bp, Homo sapien
tcagacagcaaactgtgctccaagg

SEQ ID NO: 1206232 - DNA, 25 bp, Homo sapien
tctctgaccagaagtccggaaacat

SEQ ID NO: 1206233 - DNA, 25 bp, Homo sapien
gagaatatcctgcagtcagtgaaga

SEQ ID NO: 1206234 - DNA, 25 bp, Homo sapien
ctatatttttcctggtcttgtcttt

SEQ ID NO: 1206235 - DNA, 25 bp, Homo sapien
ggtcttgtctttttaaatccatgag

SEQ ID NO: 1206236 - DNA, 25 bp, Homo sapien
cttgtctttttaaatccatgaggct

SEQ ID NO: 1206237 - DNA, 25 bp, Homo sapien
tcctggtcttgtctttttaaatcca

SEQ ID NO: 1206238 - DNA, 25 bp, Homo sapien
tcagtcagataattggaatgttccc

SEQ ID NO: 1206239 - DNA, 25 bp, Homo sapien
gcacctctgtggaagagctaaactt

SEQ ID NO: 1206240 - DNA, 25 bp, Homo sapien
taaggttgggaagaaggacgatcaa

SEQ ID NO: 1206241 - DNA, 25 bp, Homo sapien
tcaagtgggtagctagctccttgca

SEQ ID NO: 1206242 - DNA, 25 bp, Homo sapien
tagagtgctcccttaatctttgttc

SEQ ID NO: 1206243 - DNA, 25 bp, Homo sapien
cagatatcggcagctgtgtttctaa

SEQ ID NO: 1206244 - DNA, 25 bp, Homo sapien
tagacctgcagttgttacagcccca

SEQ ID NO: 1206245 - DNA, 25 bp, Homo sapien
ggcttgataacccaaccatgaactt

SEQ ID NO: 1206246 - DNA, 25 bp, Homo sapien
taacacggagtaatcatggcagttt

SEQ ID NO: 1206247 - DNA, 25 bp, Homo sapien
cactttcaattaacacggagtaatc

SEQ ID NO: 1206248 - DNA, 25 bp, Homo sapien
tcaattaacacggagtaatcatggc

SEQ ID NO: 1206249 - DNA, 25 bp, Homo sapien
ccactttcaattaacacggagtaat

SEQ ID NO: 1206250 - DNA, 25 bp, Homo sapien
tttgagcgccacagatccatgacct

SEQ ID NO: 1206251 - DNA, 25 bp, Homo sapien
cctagctgggtggtgcaactgcaaa

SEQ ID NO: 1206252 - DNA, 25 bp, Homo sapien
gaaagtgtcaccttggcctacaaga

SEQ ID NO: 1206253 - DNA, 25 bp, Homo sapien
ccttgtgagcgaacatttgagcgcc

SEQ ID NO: 1206254 - DNA, 25 bp, Homo sapien
cataaggatacagcatttacctgac

SEQ ID NO: 1206255 - DNA, 25 bp, Homo sapien
catttacctgaccagaaaaattggt

SEQ ID NO: 1206256 - DNA, 25 bp, Homo sapien
ggcacaggtctaagcccataaggat

SEQ ID NO: 1206257 - DNA, 25 bp, Homo sapien
aagttgtttatagaggtggggcaca

SEQ ID NO: 1206258 - DNA, 25 bp, Homo sapien
gggccttgcttatcttgtccatcaa

SEQ ID NO: 1206259 - DNA, 25 bp, Homo sapien
tcttcccacttaacagtaaactcca

SEQ ID NO: 1206260 - DNA, 25 bp, Homo sapien
tcacttgtgccaggaacggtgcctt

SEQ ID NO: 1206261 - DNA, 25 bp, Homo sapien
aactccataagagcaagggccttgc

SEQ ID NO: 1206262 - DNA, 25 bp, Homo sapien
ttgagcactagaatcttaactttcc

SEQ ID NO: 1206263 - DNA, 25 bp, Homo sapien
tttgagcactagaatcttaactttc

SEQ ID NO: 1206264 - DNA, 25 bp, Homo sapien
actggcaaattgaccaaggtgggag

SEQ ID NO: 1206265 - DNA, 25 bp, Homo sapien
ggcaaattgaccaaggtgggaggtg

SEQ ID NO: 1206266 - DNA, 25 bp, Homo sapien
tggcaaattgaccaaggtgggaggt

SEQ ID NO: 1206267 - DNA, 25 bp, Homo sapien
cactggcaaattgaccaaggtggga

SEQ ID NO: 1206268 - DNA, 25 bp, Homo sapien
cagacatccaggaaggactccgggt

SEQ ID NO: 1206269 - DNA, 25 bp, Homo sapien
tgtatcacatacaggcctggcatcc

SEQ ID NO: 1206270 - DNA, 25 bp, Homo sapien
gacatactgatgtgatccactctca

SEQ ID NO: 1206271 - DNA, 25 bp, Homo sapien
gggtattttgcaaagaacaactgag

SEQ ID NO: 1206272 - DNA, 25 bp, Homo sapien
caagatgacttagtagaaagtatca

SEQ ID NO: 1206273 - DNA, 25 bp, Homo sapien
gttggcaagatgacttagtagaaag

SEQ ID NO: 1206274 - DNA, 25 bp, Homo sapien
tgggtgttggcaagatgacttagta

SEQ ID NO: 1206275 - DNA, 25 bp, Homo sapien
caaacagattcagcataagtataac

SEQ ID NO: 1206276 - DNA, 25 bp, Homo sapien
tctccactgttgtcttatcagacga

SEQ ID NO: 1206277 - DNA, 25 bp, Homo sapien
cttgctagctgcatgaactgctagg

SEQ ID NO: 1206278 - DNA, 25 bp, Homo sapien
taccctaagaacaaaccacttgcta

SEQ ID NO: 1206279 - DNA, 25 bp, Homo sapien
tgttgtcttatcagacgaggaacaa

SEQ ID NO: 1206280 - DNA, 25 bp, Homo sapien
taattgttatctctgtagaagtttt

SEQ ID NO: 1206281 - DNA, 25 bp, Homo sapien
aaataattgttatctctgtagaagt

SEQ ID NO: 1206282 - DNA, 25 bp, Homo sapien
agcaaaataattgttatctctgtag

SEQ ID NO: 1206283 - DNA, 25 bp, Homo sapien
caaaataattgttatctctgtagaa

SEQ ID NO: 1206284 - DNA, 25 bp, Homo sapien
gtccctaagaaacagcatgcgtcct

SEQ ID NO: 1206285 - DNA, 25 bp, Homo sapien
tccctaagaaacagcatgcgtcctt

SEQ ID NO: 1206286 - DNA, 25 bp, Homo sapien
atgccaagagtttaagccacaaata

SEQ ID NO: 1206287 - DNA, 25 bp, Homo sapien
tgccaagagtttaagccacaaatac

SEQ ID NO: 1206288 - DNA, 25 bp, Homo sapien
aatgccaagagtttaagccacaaat

SEQ ID NO: 1206289 - DNA, 25 bp, Homo sapien
aggtagtaagttccgtgtttctgag

SEQ ID NO: 1206290 - DNA, 25 bp, Homo sapien
agtaagttccgtgtttctgagggat

SEQ ID NO: 1206291 - DNA, 25 bp, Homo sapien
tagtaagttccgtgtttctgaggga

SEQ ID NO: 1206292 - DNA, 25 bp, Homo sapien
gacagaccattcgtttgttcagcaa

SEQ ID NO: 1206293 - DNA, 25 bp, Homo sapien
taagcagagacccagtgatagccta

SEQ ID NO: 1206294 - DNA, 25 bp, Homo sapien
taagtgccttctacatacagagttg

SEQ ID NO: 1206295 - DNA, 25 bp, Homo sapien
gatagcctacatgagctcaccagtt

SEQ ID NO: 1206296 - DNA, 25 bp, Homo sapien
tcagtcctgctgtgatttgcccatc

SEQ ID NO: 1206297 - DNA, 25 bp, Homo sapien
aaatctggttgtaacagggacctgg

SEQ ID NO: 1206298 - DNA, 25 bp, Homo sapien
tatgtcacacaaacaacctctgaga

SEQ ID NO: 1206299 - DNA, 25 bp, Homo sapien
ctaaagatatagaagcagctcagtg

SEQ ID NO: 1206300 - DNA, 25 bp, Homo sapien
gaaatgactgccttacacagttgca

SEQ ID NO: 1206301 - DNA, 25 bp, Homo sapien
ggaagcaacaataccttttaagtca

SEQ ID NO: 1206302 - DNA, 25 bp, Homo sapien
tgtaacctctggtaggtacaattcg

SEQ ID NO: 1206303 - DNA, 25 bp, Homo sapien
tctatgattggaaataagtccctgt

SEQ ID NO: 1206304 - DNA, 25 bp, Homo sapien
tcttcagaaaatagtggtggcttac

SEQ ID NO: 1206305 - DNA, 25 bp, Homo sapien
ctgctctagtaagtgaatattttgg

SEQ ID NO: 1206306 - DNA, 25 bp, Homo sapien
gaaagcacgagtaatctgatgataa

SEQ ID NO: 1206307 - DNA, 25 bp, Homo sapien
tctacactgtgatcagcataaatgc

SEQ ID NO: 1206308 - DNA, 25 bp, Homo sapien
gacctgcagtagagatacaatcctg

SEQ ID NO: 1206309 - DNA, 25 bp, Homo sapien
taaaacgtcatagaagacctgcagt

SEQ ID NO: 1206310 - DNA, 25 bp, Homo sapien
ccatatgggtggagattgaagaaaa

SEQ ID NO: 1206311 - DNA, 25 bp, Homo sapien
gaaagaggccagctgtaaaacgtca

SEQ ID NO: 1206312 - DNA, 25 bp, Homo sapien
cagagccggcatagaaaacttgtta

SEQ ID NO: 1206313 - DNA, 25 bp, Homo sapien
gaaaactgtgctacactctctaagg

SEQ ID NO: 1206314 - DNA, 25 bp, Homo sapien
gttaccacttcaggacaagaaatat

SEQ ID NO: 1206315 - DNA, 25 bp, Homo sapien
gagcaagcaaaagacttcaccaaag

SEQ ID NO: 1206316 - DNA, 25 bp, Homo sapien
tcaggaggatggaaactagagtcca

SEQ ID NO: 1206317 - DNA, 25 bp, Homo sapien
taagcctggtgtgaaagttagcagc

SEQ ID NO: 1206318 - DNA, 25 bp, Homo sapien
caaaaagtgaagaactccagtgcaa

SEQ ID NO: 1206319 - DNA, 25 bp, Homo sapien
ggtaagttgatagatgcccacacag

SEQ ID NO: 1206320 - DNA, 25 bp, Homo sapien
gcaaaaaagtgacactattcctatt

SEQ ID NO: 1206321 - DNA, 25 bp, Homo sapien
tatataatattacaacagatagaga

SEQ ID NO: 1206322 - DNA, 25 bp, Homo sapien
tatataacccacatagacaaaacct

SEQ ID NO: 1206323 - DNA, 25 bp, Homo sapien
cagctatctattattcagacagaca

SEQ ID NO: 1206324 - DNA, 25 bp, Homo sapien
taccctcagggtctcaataatgact

SEQ ID NO: 1206325 - DNA, 25 bp, Homo sapien
tcatgtttaccacccagatggtgag

SEQ ID NO: 1206326 - DNA, 25 bp, Homo sapien
gaagtctgggtcagacaaccacggg

SEQ ID NO: 1206327 - DNA, 25 bp, Homo sapien
gacatgctccctagtctgtgctaaa

SEQ ID NO: 1206328 - DNA, 25 bp, Homo sapien
aagcaggaaagagcaatagggagta

SEQ ID NO: 1206329 - DNA, 25 bp, Homo sapien
aatacagatggccagctatattgta

SEQ ID NO: 1206330 - DNA, 25 bp, Homo sapien
gagtatttataaggtacaatgtgac

SEQ ID NO: 1206331 - DNA, 25 bp, Homo sapien
tgtacatcacctaagtatattttcc

SEQ ID NO: 1206332 - DNA, 25 bp, Homo sapien
gtgaataacatctcagaggatcatt

SEQ ID NO: 1206333 - DNA, 25 bp, Homo sapien
aataaatgcaacatgaggtcctaga

SEQ ID NO: 1206334 - DNA, 25 bp, Homo sapien
gaggatcattaaactaacagaggca

SEQ ID NO: 1206335 - DNA, 25 bp, Homo sapien
cagaaaaccgtcacaaatcctaggg

SEQ ID NO: 1206336 - DNA, 25 bp, Homo sapien
ttgcatgtataatagatttctcctc

SEQ ID NO: 1206337 - DNA, 25 bp, Homo sapien
gtgttgcatgtataatagatttctc

SEQ ID NO: 1206338 - DNA, 25 bp, Homo sapien
tgttgcatgtataatagatttctcc

SEQ ID NO: 1206339 - DNA, 25 bp, Homo sapien
gcatgtataatagatttctcctctt

SEQ ID NO: 1206340 - DNA, 25 bp, Homo sapien
gctcgtgctcgtggccccagtggcc

SEQ ID NO: 1206341 - DNA, 25 bp, Homo sapien
agctcgtgctcgtggccccagtggc

SEQ ID NO: 1206342 - DNA, 25 bp, Homo sapien
gagctcgtgctcgtggccccagtgg

SEQ ID NO: 1206343 - DNA, 25 bp, Homo sapien
ggacgctcccggcaggaagaagccc

SEQ ID NO: 1206344 - DNA, 25 bp, Homo sapien
caaggaaactctacaccttggtcct

SEQ ID NO: 1206345 - DNA, 25 bp, Homo sapien
cttggtcctaacagacccggacgct

SEQ ID NO: 1206346 - DNA, 25 bp, Homo sapien
catttcatgggatgatcttgagtca

SEQ ID NO: 1206347 - DNA, 25 bp, Homo sapien
acgccagggcgacggtggacgagct

SEQ ID NO: 1206348 - DNA, 25 bp, Homo sapien
gacgagctgggcaaagtgctgacgc

SEQ ID NO: 1206349 - DNA, 25 bp, Homo sapien
ctacgccagggcgacggtggacgag

SEQ ID NO: 1206350 - DNA, 25 bp, Homo sapien
gagctgggcaaagtgctgacgccca

SEQ ID NO: 1206351 - DNA, 25 bp, Homo sapien
tagtggcactcccagctgcgcgctg

SEQ ID NO: 1206352 - DNA, 25 bp, Homo sapien
cgcctgcgccttgcctagtggcact

SEQ ID NO: 1206353 - DNA, 25 bp, Homo sapien
tcagaggctgccgagtcgccgctgc

SEQ ID NO: 1206354 - DNA, 25 bp, Homo sapien
gcgcgctgcgttcttgcacagccat

SEQ ID NO: 1206355 - DNA, 25 bp, Homo sapien
cggcctcccaatgttgtggctatta

SEQ ID NO: 1206356 - DNA, 25 bp, Homo sapien
gcctcccaatgttgtggctattaaa

SEQ ID NO: 1206357 - DNA, 25 bp, Homo sapien
ggcctcccaatgttgtggctattaa

SEQ ID NO: 1206358 - DNA, 25 bp, Homo sapien
cctcccaatgttgtggctattaaac

SEQ ID NO: 1206359 - DNA, 25 bp, Homo sapien
cagtgggggaaggtgttgggctttg

SEQ ID NO: 1206360 - DNA, 25 bp, Homo sapien
tacatagacagctgttaacctgctt

SEQ ID NO: 1206361 - DNA, 25 bp, Homo sapien
ccttcttaatgcatactgtcaacca

SEQ ID NO: 1206362 - DNA, 25 bp, Homo sapien
gaaacctgttgtgtgatttactgtc

SEQ ID NO: 1206363 - DNA, 25 bp, Homo sapien
acgttagttggaattgtgcattacc

SEQ ID NO: 1206364 - DNA, 25 bp, Homo sapien
gcaactgccagcacggctagaaaaa

SEQ ID NO: 1206365 - DNA, 25 bp, Homo sapien
tacccataatgacatgccagcatag

SEQ ID NO: 1206366 - DNA, 25 bp, Homo sapien
gccagcatagccaactaagtacagt

SEQ ID NO: 1206367 - DNA, 25 bp, Homo sapien
tgtgagcgtattgccaagggagatt

SEQ ID NO: 1206368 - DNA, 25 bp, Homo sapien
gaagtattgtctggactaagagaag

SEQ ID NO: 1206369 - DNA, 25 bp, Homo sapien
actagcattatccaaagagtccggg

SEQ ID NO: 1206370 - DNA, 25 bp, Homo sapien
tctctttcaaaggtgcttgcgggtg

SEQ ID NO: 1206371 - DNA, 25 bp, Homo sapien
ggtattaaaagcactagcattatcc

SEQ ID NO: 1206372 - DNA, 25 bp, Homo sapien
gagttttgcattggcggcggagccg

SEQ ID NO: 1206373 - DNA, 25 bp, Homo sapien
gtctgcgagtctgcgtgcgtgggaa

SEQ ID NO: 1206374 - DNA, 25 bp, Homo sapien
tgtcagttccagcagagggcgtctg

SEQ ID NO: 1206375 - DNA, 25 bp, Homo sapien
agccgctgaatgtctgcgtgtcagt

SEQ ID NO: 1206376 - DNA, 25 bp, Homo sapien
gaataagtggttagatttcctcaca

SEQ ID NO: 1206377 - DNA, 25 bp, Homo sapien
tcttaaatacaggtagtcgtcatgt

SEQ ID NO: 1206378 - DNA, 25 bp, Homo sapien
attcatcaactagcaatagctgcac

SEQ ID NO: 1206379 - DNA, 25 bp, Homo sapien
ttgtggttacaatttctcactgccc

SEQ ID NO: 1206380 - DNA, 25 bp, Homo sapien
gtcacgcaagggcaatagccagata

SEQ ID NO: 1206381 - DNA, 25 bp, Homo sapien
agcacttctgctataccacgacaca

SEQ ID NO: 1206382 - DNA, 25 bp, Homo sapien
aacataaacacaattactaaagata

SEQ ID NO: 1206383 - DNA, 25 bp, Homo sapien
gcaagggcaatagccagatagccaa

SEQ ID NO: 1206384 - DNA, 25 bp, Homo sapien
gtgcgtgcaggtaaggcagcagagc

SEQ ID NO: 1206385 - DNA, 25 bp, Homo sapien
gcgtgcaggtaaggcagcagagctg

SEQ ID NO: 1206386 - DNA, 25 bp, Homo sapien
tggaggtgcgtgcaggtaaggcagc

SEQ ID NO: 1206387 - DNA, 25 bp, Homo sapien
gtggtgttggaggtgcgtgcaggta

SEQ ID NO: 1206388 - DNA, 25 bp, Homo sapien
gatttgatcccagagctatatgaca

SEQ ID NO: 1206389 - DNA, 25 bp, Homo sapien
cagacatcacgttaattattttgac

SEQ ID NO: 1206390 - DNA, 25 bp, Homo sapien
cagctacgaagttgaagaaattgga

SEQ ID NO: 1206391 - DNA, 25 bp, Homo sapien
taatttgccctgtaatcagctacga

SEQ ID NO: 1206392 - DNA, 25 bp, Homo sapien
agtggttgtttcagaggcattaagg

SEQ ID NO: 1206393 - DNA, 25 bp, Homo sapien
aatgacagcgcttccagaagggctc

SEQ ID NO: 1206394 - DNA, 25 bp, Homo sapien
tggttgaaatgacagcgcttccaga

SEQ ID NO: 1206395 - DNA, 25 bp, Homo sapien
aagggctcagagtggttgtttcaga

SEQ ID NO: 1206396 - DNA, 25 bp, Homo sapien
tctcactgcttaacgggaactctgc

SEQ ID NO: 1206397 - DNA, 25 bp, Homo sapien
tcatcagctgttgcactgctaagca

SEQ ID NO: 1206398 - DNA, 25 bp, Homo sapien
ggctgcctgactgagggtaatatca

SEQ ID NO: 1206399 - DNA, 25 bp, Homo sapien
gaaggcccttgtgagagcacatcac

SEQ ID NO: 1206400 - DNA, 25 bp, Homo sapien
cacatctactagatccagggtaaca

SEQ ID NO: 1206401 - DNA, 25 bp, Homo sapien
taattggcggtatggcaacatggct

SEQ ID NO: 1206402 - DNA, 25 bp, Homo sapien
ttttaggtacgcatctaattggcgg

SEQ ID NO: 1206403 - DNA, 25 bp, Homo sapien
aggatttgcctagtacaggttttca

SEQ ID NO: 1206404 - DNA, 25 bp, Homo sapien
acatgttggcttagatggagtagta

SEQ ID NO: 1206405 - DNA, 25 bp, Homo sapien
catgttggcttagatggagtagtag

SEQ ID NO: 1206406 - DNA, 25 bp, Homo sapien
cacatgttggcttagatggagtagt

SEQ ID NO: 1206407 - DNA, 25 bp, Homo sapien
gcaagtattgtttccacattccaca

SEQ ID NO: 1206408 - DNA, 25 bp, Homo sapien
cacctcattgtttgtgcaagtattg

SEQ ID NO: 1206409 - DNA, 25 bp, Homo sapien
tgttatataagtaatccacagtgat

SEQ ID NO: 1206410 - DNA, 25 bp, Homo sapien
tatataagtaatccacagtgatgtt

SEQ ID NO: 1206411 - DNA, 25 bp, Homo sapien
tattaatgtcttatcaggagcagta

SEQ ID NO: 1206412 - DNA, 25 bp, Homo sapien
ggagcagtacatgaattatgagata

SEQ ID NO: 1206413 - DNA, 25 bp, Homo sapien
gatatggaaacagacgcatttttac

SEQ ID NO: 1206414 - DNA, 25 bp, Homo sapien
attatgagatatggaaacagacgca

SEQ ID NO: 1206415 - DNA, 25 bp, Homo sapien
ttcataatgtgtatcctaagccctc

SEQ ID NO: 1206416 - DNA, 25 bp, Homo sapien
gccactgaaattatgctaatgacat

SEQ ID NO: 1206417 - DNA, 25 bp, Homo sapien
cattcattcctaacatgtcagttaa

SEQ ID NO: 1206418 - DNA, 25 bp, Homo sapien
taaagccactgaaattatgctaatg

SEQ ID NO: 1206419 - DNA, 25 bp, Homo sapien
tcaacttgtgtacaatcatgtaact

SEQ ID NO: 1206420 - DNA, 25 bp, Homo sapien
tcatgtaactgaaacttttcaaccc

SEQ ID NO: 1206421 - DNA, 25 bp, Homo sapien
tctgtaggtaatattctgtgtatca

SEQ ID NO: 1206422 - DNA, 25 bp, Homo sapien
tattctgtgtatcacaagtaaaggt

SEQ ID NO: 1206423 - DNA, 25 bp, Homo sapien
tagggatgcccaatctgtatatagc

SEQ ID NO: 1206424 - DNA, 25 bp, Homo sapien
gtgatgattacacccagcgcaatgc

SEQ ID NO: 1206425 - DNA, 25 bp, Homo sapien
tctgtctgtcatgccagctatggcc

SEQ ID NO: 1206426 - DNA, 25 bp, Homo sapien
tccttgtctgcttgcctgatggcca

SEQ ID NO: 1206427 - DNA, 25 bp, Homo sapien
cacttatactcatgttcgggttcaa

SEQ ID NO: 1206428 - DNA, 25 bp, Homo sapien
gtatttctgagtcacacttatactc

SEQ ID NO: 1206429 - DNA, 25 bp, Homo sapien
acttgtggttattatagagtatttc

SEQ ID NO: 1206430 - DNA, 25 bp, Homo sapien
tcatgttcgggttcaaggttttcta

SEQ ID NO: 1206431 - DNA, 25 bp, Homo sapien
gacatggataaagcattcttcatat

SEQ ID NO: 1206432 - DNA, 25 bp, Homo sapien
agacatggataaagcattcttcata

SEQ ID NO: 1206433 - DNA, 25 bp, Homo sapien
acatggataaagcattcttcatatt

SEQ ID NO: 1206434 - DNA, 25 bp, Homo sapien
gatgtgcagcttcacttctacaaaa

SEQ ID NO: 1206435 - DNA, 25 bp, Homo sapien
ctgtctcttttatataacagagggt

SEQ ID NO: 1206436 - DNA, 25 bp, Homo sapien
caggtaattactccttgatgtgcag

SEQ ID NO: 1206437 - DNA, 25 bp, Homo sapien
aaatgatctttgagggggattccag

SEQ ID NO: 1206438 - DNA, 25 bp, Homo sapien
tgagtgttgtcatccagaggttttc

SEQ ID NO: 1206439 - DNA, 25 bp, Homo sapien
ctgtctctaggctttggagcacaaa

SEQ ID NO: 1206440 - DNA, 25 bp, Homo sapien
tgctcccaagattacaccaaactgg

SEQ ID NO: 1206441 - DNA, 25 bp, Homo sapien
gggagtatactatgcctatgcagtc

SEQ ID NO: 1206442 - DNA, 25 bp, Homo sapien
caaagagccctttatgcagtgtcag

SEQ ID NO: 1206443 - DNA, 25 bp, Homo sapien
tagagtagagctggctccaaagagc

SEQ ID NO: 1206444 - DNA, 25 bp, Homo sapien
cagtgtcagggcatggtccaaagct

SEQ ID NO: 1206445 - DNA, 25 bp, Homo sapien
gcattcagtcaccaatcggcagctt

SEQ ID NO: 1206446 - DNA, 25 bp, Homo sapien
gtgaaatgacacattgcagcacttc

SEQ ID NO: 1206447 - DNA, 25 bp, Homo sapien
gcagcacttccattacgttgcactt

SEQ ID NO: 1206448 - DNA, 25 bp, Homo sapien
tgatgtaggcatgtaatgataaaac

SEQ ID NO: 1206449 - DNA, 25 bp, Homo sapien
ggtttttatccagattgaggcaatc

SEQ ID NO: 1206450 - DNA, 25 bp, Homo sapien
agaagcattaaaacatataacttac

SEQ ID NO: 1206451 - DNA, 25 bp, Homo sapien
accatttatggaaagaagcattaaa

SEQ ID NO: 1206452 - DNA, 25 bp, Homo sapien
tttaccatttatggaaagaagcatt

SEQ ID NO: 1206453 - DNA, 25 bp, Homo sapien
cttgctttttaccatttatggaaag

SEQ ID NO: 1206454 - DNA, 25 bp, Homo sapien
aagatcttttacacggaaatcgcaa

SEQ ID NO: 1206455 - DNA, 25 bp, Homo sapien
tgggaggcctacacttgacatgcat

SEQ ID NO: 1206456 - DNA, 25 bp, Homo sapien
acttccaaatggtaacgttcatggg

SEQ ID NO: 1206457 - DNA, 25 bp, Homo sapien
gacagtcatgttccagacctggctt

SEQ ID NO: 1206458 - DNA, 25 bp, Homo sapien
tttaccaaagtacaatccatagcct

SEQ ID NO: 1206459 - DNA, 25 bp, Homo sapien
tattaaccagagatcacaatggtga

SEQ ID NO: 1206460 - DNA, 25 bp, Homo sapien
tccgaaagccacctgaagagcatca

SEQ ID NO: 1206461 - DNA, 25 bp, Homo sapien
tagtgacaaacgatatagacatggg

SEQ ID NO: 1206462 - DNA, 25 bp, Homo sapien
agagcagtaagaatccttgaccaaa

SEQ ID NO: 1206463 - DNA, 25 bp, Homo sapien
aagagcaaaagagcagtaagaatcc

SEQ ID NO: 1206464 - DNA, 25 bp, Homo sapien
tgcataaacacctgtgtctcataaa

SEQ ID NO: 1206465 - DNA, 25 bp, Homo sapien
cacctgtgtctcataaaatgtaata

SEQ ID NO: 1206466 - DNA, 25 bp, Homo sapien
aggatagtctccattgtgaaaatag

SEQ ID NO: 1206467 - DNA, 25 bp, Homo sapien
ggatagtctccattgtgaaaatagg

SEQ ID NO: 1206468 - DNA, 25 bp, Homo sapien
caggatagtctccattgtgaaaata

SEQ ID NO: 1206469 - DNA, 25 bp, Homo sapien
tgaactctattgtcctcatgggaag

SEQ ID NO: 1206470 - DNA, 25 bp, Homo sapien
taactgagcacacccctgttggcat

SEQ ID NO: 1206471 - DNA, 25 bp, Homo sapien
tgcagtgcccgctcataactgagca

SEQ ID NO: 1206472 - DNA, 25 bp, Homo sapien
tgaacagggagtgctatatgtgaac

SEQ ID NO: 1206473 - DNA, 25 bp, Homo sapien
tttcaagatggcatgtgagagtcca

SEQ ID NO: 1206474 - DNA, 25 bp, Homo sapien
gtagctgtaccctagcaattcacag

SEQ ID NO: 1206475 - DNA, 25 bp, Homo sapien
gagagtccagatcagagcaagaaga

SEQ ID NO: 1206476 - DNA, 25 bp, Homo sapien
agcccaagtcctttcctggaacaga

SEQ ID NO: 1206477 - DNA, 25 bp, Homo sapien
tagctctaccacttcttagttggga

SEQ ID NO: 1206478 - DNA, 25 bp, Homo sapien
taatgcggtgacttaagagcctcag

SEQ ID NO: 1206479 - DNA, 25 bp, Homo sapien
gattcacagtaaacacgtagcacgg

SEQ ID NO: 1206480 - DNA, 25 bp, Homo sapien
ttagttgggaacttggccagattcc

SEQ ID NO: 1206481 - DNA, 25 bp, Homo sapien
acttaaatattcactaagtttaatg

SEQ ID NO: 1206482 - DNA, 25 bp, Homo sapien
tgacttaaatattcactaagtttaa

SEQ ID NO: 1206483 - DNA, 25 bp, Homo sapien
ctgacttaaatattcactaagttta

SEQ ID NO: 1206484 - DNA, 25 bp, Homo sapien
taaatattcactaagtttaatgtga

SEQ ID NO: 1206485 - DNA, 25 bp, Homo sapien
tcactgaggtgtaaaatccattcac

SEQ ID NO: 1206486 - DNA, 25 bp, Homo sapien
tgcagaagtgggtagcctcttaagg

SEQ ID NO: 1206487 - DNA, 25 bp, Homo sapien
aaaccctcttacctgttcactgagg

SEQ ID NO: 1206488 - DNA, 25 bp, Homo sapien
gatcaaggaggtaatccagttatta

SEQ ID NO: 1206489 - DNA, 25 bp, Homo sapien
ggatcttttcttatgtagatcatag

SEQ ID NO: 1206490 - DNA, 25 bp, Homo sapien
agaacaacaagcagggctattgatg

SEQ ID NO: 1206491 - DNA, 25 bp, Homo sapien
caagcagggctattgatgtcacaat

SEQ ID NO: 1206492 - DNA, 25 bp, Homo sapien
tagatcatagattttgtagagaaca

SEQ ID NO: 1206493 - DNA, 25 bp, Homo sapien
ccctttcaacaagctcctgctgttc

SEQ ID NO: 1206494 - DNA, 25 bp, Homo sapien
acaagctcctgctgttcatctaaat

SEQ ID NO: 1206495 - DNA, 25 bp, Homo sapien
tcaacaagctcctgctgttcatcta

SEQ ID NO: 1206496 - DNA, 25 bp, Homo sapien
aagctcctgctgttcatctaaattg

SEQ ID NO: 1206497 - DNA, 25 bp, Homo sapien
aagaagttatccatgagggtgaccc

SEQ ID NO: 1206498 - DNA, 25 bp, Homo sapien
cagctctcaaactggctatgtgcaa

SEQ ID NO: 1206499 - DNA, 25 bp, Homo sapien
tgagggccacattcagggtttcatg

SEQ ID NO: 1206500 - DNA, 25 bp, Homo sapien
taatacccttatacccatgactcag

SEQ ID NO: 1206501 - DNA, 25 bp, Homo sapien
atcttcctcttataagtttccaaca

SEQ ID NO: 1206502 - DNA, 25 bp, Homo sapien
caatcttcctcttataagtttccaa

SEQ ID NO: 1206503 - DNA, 25 bp, Homo sapien
catggattggctccacattcatcag

SEQ ID NO: 1206504 - DNA, 25 bp, Homo sapien
tgcatggattggctccacattcatc

SEQ ID NO: 1206505 - DNA, 25 bp, Homo sapien
gggctttcgagcttcctttatagga

SEQ ID NO: 1206506 - DNA, 25 bp, Homo sapien
acttgctgaacacccgcgggatgct

SEQ ID NO: 1206507 - DNA, 25 bp, Homo sapien
ataggaaacttgctgaacacccgcg

SEQ ID NO: 1206508 - DNA, 25 bp, Homo sapien
agaatgtcaacataacggtttttat

SEQ ID NO: 1206509 - DNA, 25 bp, Homo sapien
agtttgaccctgcatctccgtttat

SEQ ID NO: 1206510 - DNA, 25 bp, Homo sapien
tccgtttatctcagagagttcaaca

SEQ ID NO: 1206511 - DNA, 25 bp, Homo sapien
atcaatatagctggcatttatgtag

SEQ ID NO: 1206512 - DNA, 25 bp, Homo sapien
tctcagagagttcaacacggttata

SEQ ID NO: 1206513 - DNA, 25 bp, Homo sapien
tcagtaactaaaggagctcttcaga

SEQ ID NO: 1206514 - DNA, 25 bp, Homo sapien
taccaagataaaggagtacagaggc

SEQ ID NO: 1206515 - DNA, 25 bp, Homo sapien
catctgcgatgctgtggtaatttac

SEQ ID NO: 1206516 - DNA, 25 bp, Homo sapien
caagagtgctctagacatttcaaca

SEQ ID NO: 1206517 - DNA, 25 bp, Homo sapien
cttgtgcagcaatgtatttcctggg

SEQ ID NO: 1206518 - DNA, 25 bp, Homo sapien
ttgtgcagcaatgtatttcctgggt

SEQ ID NO: 1206519 - DNA, 25 bp, Homo sapien
tgtgcagcaatgtatttcctgggtt

SEQ ID NO: 1206520 - DNA, 25 bp, Homo sapien
gtttccttcttcacatcgagtgacc

SEQ ID NO: 1206521 - DNA, 25 bp, Homo sapien
tcacatcgagtgaccatgacaataa

SEQ ID NO: 1206522 - DNA, 25 bp, Homo sapien
catgacaataactgtggctttctgt

SEQ ID NO: 1206523 - DNA, 25 bp, Homo sapien
gagtgaccatgacaataactgtggc

SEQ ID NO: 1206524 - DNA, 25 bp, Homo sapien
tttgtgctggttgatctttacaaca

SEQ ID NO: 1206525 - DNA, 25 bp, Homo sapien
tgaatgatgtaatctggacatcttt

SEQ ID NO: 1206526 - DNA, 25 bp, Homo sapien
cattgacggccagtattctgcacac

SEQ ID NO: 1206527 - DNA, 25 bp, Homo sapien
aaaagcccgagtgccctcttccatt

SEQ ID NO: 1206528 - DNA, 25 bp, Homo sapien
tagtgatttcctcattgaatcagtg

SEQ ID NO: 1206529 - DNA, 25 bp, Homo sapien
cactctccatgagtttgtatagttt

SEQ ID NO: 1206530 - DNA, 25 bp, Homo sapien
ggtcattgaggaatatattgttcac

SEQ ID NO: 1206531 - DNA, 25 bp, Homo sapien
tcctcattgaatcagtggtcattga

SEQ ID NO: 1206532 - DNA, 25 bp, Homo sapien
tctaggaacttgcatgctgtcaagc

SEQ ID NO: 1206533 - DNA, 25 bp, Homo sapien
tggtaaaggtcattctcacaactgt

SEQ ID NO: 1206534 - DNA, 25 bp, Homo sapien
ggacttgcatgtactaccctgtaag

SEQ ID NO: 1206535 - DNA, 25 bp, Homo sapien
agtaccagtacaaagtctcctcgtg

SEQ ID NO: 1206536 - DNA, 25 bp, Homo sapien
aggagcaagtgaggatcctcaggca

SEQ ID NO: 1206537 - DNA, 25 bp, Homo sapien
tctccttctcagtttgaggagcaag

SEQ ID NO: 1206538 - DNA, 25 bp, Homo sapien
cagctggtgaactgaatgtgagtca

SEQ ID NO: 1206539 - DNA, 25 bp, Homo sapien
gaagaaattgctgaaggcattcact

SEQ ID NO: 1206540 - DNA, 25 bp, Homo sapien
aaaaaaagcagaggcatgatcatgg

SEQ ID NO: 1206541 - DNA, 25 bp, Homo sapien
ctggcaaaccaagcaaaaaaaagca

SEQ ID NO: 1206542 - DNA, 25 bp, Homo sapien
caaaaaaaagcagaggcatgatcat

SEQ ID NO: 1206543 - DNA, 25 bp, Homo sapien
aaaagcagaggcatgatcatggaaa

SEQ ID NO: 1206544 - DNA, 25 bp, Homo sapien
cataaacatccactttgttctcggc

SEQ ID NO: 1206545 - DNA, 25 bp, Homo sapien
ggcttccaggccttctagcatggca

SEQ ID NO: 1206546 - DNA, 25 bp, Homo sapien
aggcatctctgtcgccttagcttga

SEQ ID NO: 1206547 - DNA, 25 bp, Homo sapien
tcaattccgatataggttcctgtgc

SEQ ID NO: 1206548 - DNA, 25 bp, Homo sapien
caatcaccaaatgcatagcatgggc

SEQ ID NO: 1206549 - DNA, 25 bp, Homo sapien
caagatttgaaacctgtaagtgtag

SEQ ID NO: 1206550 - DNA, 25 bp, Homo sapien
taataaacaataccactcaccctcg

SEQ ID NO: 1206551 - DNA, 25 bp, Homo sapien
aatgtttcgtatggcagctttactc

SEQ ID NO: 1206552 - DNA, 25 bp, Homo sapien
cctgatggatcaagatgtactgggc

SEQ ID NO: 1206553 - DNA, 25 bp, Homo sapien
ggctcactgggtggatcccttttct

SEQ ID NO: 1206554 - DNA, 25 bp, Homo sapien
gcctctagtggagacggctcactgg

SEQ ID NO: 1206555 - DNA, 25 bp, Homo sapien
gatgtaattcagacaaattcacttc

SEQ ID NO: 1206556 - DNA, 25 bp, Homo sapien
tccagctcctatatgaaggaagtct

SEQ ID NO: 1206557 - DNA, 25 bp, Homo sapien
ctccagctcctatatgaaggaagtc

SEQ ID NO: 1206558 - DNA, 25 bp, Homo sapien
tgtcctccagctcctatatgaagga

SEQ ID NO: 1206559 - DNA, 25 bp, Homo sapien
atgggatgacattagaattcctgtt

SEQ ID NO: 1206560 - DNA, 25 bp, Homo sapien
gggatgacattagaattcctgtttt

SEQ ID NO: 1206561 - DNA, 25 bp, Homo sapien
gatgacattagaattcctgttttta

SEQ ID NO: 1206562 - DNA, 25 bp, Homo sapien
atgacattagaattcctgtttttac

SEQ ID NO: 1206563 - DNA, 25 bp, Homo sapien
gctttgattaattatttagcccaga

SEQ ID NO: 1206564 - DNA, 25 bp, Homo sapien
ttaaactacattcataaggactcct

SEQ ID NO: 1206565 - DNA, 25 bp, Homo sapien
ttgacctataatttctcactgtttc

SEQ ID NO: 1206566 - DNA, 25 bp, Homo sapien
gattaaccatatcaccatcaattcc

SEQ ID NO: 1206567 - DNA, 25 bp, Homo sapien
atgtgaaataaatcagtagtaagtc

SEQ ID NO: 1206568 - DNA, 25 bp, Homo sapien
ctatgtgaaataaatcagtagtaag

SEQ ID NO: 1206569 - DNA, 25 bp, Homo sapien
tgaaataaatcagtagtaagtcttc

SEQ ID NO: 1206570 - DNA, 25 bp, Homo sapien
tgtgaaataaatcagtagtaagtct

SEQ ID NO: 1206571 - DNA, 25 bp, Homo sapien
gatgtatttgcttggttcctctgaa

SEQ ID NO: 1206572 - DNA, 25 bp, Homo sapien
tactcatttccagctcatgtttaag

SEQ ID NO: 1206573 - DNA, 25 bp, Homo sapien
ttcatctgaatcatgctcactctct

SEQ ID NO: 1206574 - DNA, 25 bp, Homo sapien
tgtcatcatcagaggattcatctga

SEQ ID NO: 1206575 - DNA, 25 bp, Homo sapien
ccaaaagtcaccaatggtctccttc

SEQ ID NO: 1206576 - DNA, 25 bp, Homo sapien
ttcagttctgtcagcataacaataa

SEQ ID NO: 1206577 - DNA, 25 bp, Homo sapien
gccaaaagtcaccaatggtctcctt

SEQ ID NO: 1206578 - DNA, 25 bp, Homo sapien
ggtcaacttcaatatctccatatgt

SEQ ID NO: 1206579 - DNA, 25 bp, Homo sapien
tataagttgaagatttgtctgtgtc

SEQ ID NO: 1206580 - DNA, 25 bp, Homo sapien
ttcaggtcaacttcaatatctccat

SEQ ID NO: 1206581 - DNA, 25 bp, Homo sapien
ggtataagttgaagatttgtctgtg

SEQ ID NO: 1206582 - DNA, 25 bp, Homo sapien
tggtacacagttcgagagtctttcc

SEQ ID NO: 1206583 - DNA, 25 bp, Homo sapien
agtttgtatattggtactggtacac

SEQ ID NO: 1206584 - DNA, 25 bp, Homo sapien
tgtttgacgacctgaatcatagaga

SEQ ID NO: 1206585 - DNA, 25 bp, Homo sapien
gaagctgctccacactccagtttgt

SEQ ID NO: 1206586 - DNA, 25 bp, Homo sapien
gtaatacctagtagaattattcact

SEQ ID NO: 1206587 - DNA, 25 bp, Homo sapien
tgaaaccaatatcagaatgccagta

SEQ ID NO: 1206588 - DNA, 25 bp, Homo sapien
gcctctctaccacgtttcacaaatg

SEQ ID NO: 1206589 - DNA, 25 bp, Homo sapien
gagaaagctgatgtaatcagaaata

SEQ ID NO: 1206590 - DNA, 25 bp, Homo sapien
agcacaaaatattcccgtttgctga

SEQ ID NO: 1206591 - DNA, 25 bp, Homo sapien
gtttccgcactttctaagagattta

SEQ ID NO: 1206592 - DNA, 25 bp, Homo sapien
gcacaaaatattcccgtttgctgag

SEQ ID NO: 1206593 - DNA, 25 bp, Homo sapien
cttctgtttccgcactttctaagag

SEQ ID NO: 1206594 - DNA, 25 bp, Homo sapien
gcctagctttgcgtagagcttttac

SEQ ID NO: 1206595 - DNA, 25 bp, Homo sapien
ggcctagctttgcgtagagctttta

SEQ ID NO: 1206596 - DNA, 25 bp, Homo sapien
gccagatgaagattagcaagaacta

SEQ ID NO: 1206597 - DNA, 25 bp, Homo sapien
gctaaagggttgactgcaggatact

SEQ ID NO: 1206598 - DNA, 25 bp, Homo sapien
ttctttatggtgctaaagggttgac

SEQ ID NO: 1206599 - DNA, 25 bp, Homo sapien
tttgatatgttctcataaaaacatc

SEQ ID NO: 1206600 - DNA, 25 bp, Homo sapien
cgtcatataggaattgatattgctc

SEQ ID NO: 1206601 - DNA, 25 bp, Homo sapien
aattagcatcctgctttactttgtc

SEQ ID NO: 1206602 - DNA, 25 bp, Homo sapien
taggtgctggcaatgacgtcatata

SEQ ID NO: 1206603 - DNA, 25 bp, Homo sapien
tagcatcctgctttactttgtccac

SEQ ID NO: 1206604 - DNA, 25 bp, Homo sapien
tatgaaccttgatttaaagctggac

SEQ ID NO: 1206605 - DNA, 25 bp, Homo sapien
gctggacttgcaggaccattgacag

SEQ ID NO: 1206606 - DNA, 25 bp, Homo sapien
cattgacagaatgttctggcccctc

SEQ ID NO: 1206607 - DNA, 25 bp, Homo sapien
cgtgggttcagaaccttcagcctgt

SEQ ID NO: 1206608 - DNA, 25 bp, Homo sapien
taacagctaacaggaggtttggagt

SEQ ID NO: 1206609 - DNA, 25 bp, Homo sapien
aatccactgtatacctattttcact

SEQ ID NO: 1206610 - DNA, 25 bp, Homo sapien
tctacaaatattggttcgctgcatt

SEQ ID NO: 1206611 - DNA, 25 bp, Homo sapien
tacaaactgttctggcaaaactatc

SEQ ID NO: 1206612 - DNA, 25 bp, Homo sapien
tattgagtctgcacacagtttatga

SEQ ID NO: 1206613 - DNA, 25 bp, Homo sapien
tccttcaagctaagttaacacttct

SEQ ID NO: 1206614 - DNA, 25 bp, Homo sapien
gtacatgattttattgagtctgcac

SEQ ID NO: 1206615 - DNA, 25 bp, Homo sapien
gttaacacttctaatataaaatgta

SEQ ID NO: 1206616 - DNA, 25 bp, Homo sapien
caacttttttgtagtagcatacaca

SEQ ID NO: 1206617 - DNA, 25 bp, Homo sapien
attgaaaaccccatgtaaagacagc

SEQ ID NO: 1206618 - DNA, 25 bp, Homo sapien
taccacctttatgtactatctctag

SEQ ID NO: 1206619 - DNA, 25 bp, Homo sapien
cagggaataatcgagcatgcaaaat

SEQ ID NO: 1206620 - DNA, 25 bp, Homo sapien
acatgggaactatgcatatgcaata

SEQ ID NO: 1206621 - DNA, 25 bp, Homo sapien
ggaactatgcatatgcaatatcata

SEQ ID NO: 1206622 - DNA, 25 bp, Homo sapien
agttatgaatgggatttaacatggg

SEQ ID NO: 1206623 - DNA, 25 bp, Homo sapien
gatttaacatgggaactatgcatat

SEQ ID NO: 1206624 - DNA, 25 bp, Homo sapien
catccattcctggtaaaaacattct

SEQ ID NO: 1206625 - DNA, 25 bp, Homo sapien
attttattatgattagcgacatcca

SEQ ID NO: 1206626 - DNA, 25 bp, Homo sapien
ttattatgattagcgacatccattc

SEQ ID NO: 1206627 - DNA, 25 bp, Homo sapien
tggtaaaaacattctaagcattgga

SEQ ID NO: 1206628 - DNA, 25 bp, Homo sapien
acatatttcaataggtgcatacaca

SEQ ID NO: 1206629 - DNA, 25 bp, Homo sapien
ggcctgtaaaagtgtcctgcaaatg

SEQ ID NO: 1206630 - DNA, 25 bp, Homo sapien
tctagatcttaaacaattattagac

SEQ ID NO: 1206631 - DNA, 25 bp, Homo sapien
tgaaaaataccactattcttgattt

SEQ ID NO: 1206632 - DNA, 25 bp, Homo sapien
taggaatcacttttgatttgggcaa

SEQ ID NO: 1206633 - DNA, 25 bp, Homo sapien
gaagaaccttcagatcattccagat

SEQ ID NO: 1206634 - DNA, 25 bp, Homo sapien
catgctgcaattagctaggagcaaa

SEQ ID NO: 1206635 - DNA, 25 bp, Homo sapien
aggagattgaaagcatagccttttc

SEQ ID NO: 1206636 - DNA, 25 bp, Homo sapien
tccttggaaggtttcagattctatt

SEQ ID NO: 1206637 - DNA, 25 bp, Homo sapien
cttggtcggtgtggtaagatgcttc

SEQ ID NO: 1206638 - DNA, 25 bp, Homo sapien
ctctggtttcctgtcttggtcggtg

SEQ ID NO: 1206639 - DNA, 25 bp, Homo sapien
tggtcggtgtggtaagatgcttctt

SEQ ID NO: 1206640 - DNA, 25 bp, Homo sapien
tcctgtcttggtcggtgtggtaaga

SEQ ID NO: 1206641 - DNA, 25 bp, Homo sapien
ggccctttcttgtgcgtttgtactg

SEQ ID NO: 1206642 - DNA, 25 bp, Homo sapien
tgaagtgaagccagtggatggccct

SEQ ID NO: 1206643 - DNA, 25 bp, Homo sapien
gagaaataacttggattcaggagat

SEQ ID NO: 1206644 - DNA, 25 bp, Homo sapien
tgtactgccgctttgccttttgtgg

SEQ ID NO: 1206645 - DNA, 25 bp, Homo sapien
ggagcaatgccctttactgacatag

SEQ ID NO: 1206646 - DNA, 25 bp, Homo sapien
cacaggacaaggaatgagccggagc

SEQ ID NO: 1206647 - DNA, 25 bp, Homo sapien
tcagatgggacctcgaaaggcaagg

SEQ ID NO: 1206648 - DNA, 25 bp, Homo sapien
tagcttgggagtcatgaccatggac

SEQ ID NO: 1206649 - DNA, 25 bp, Homo sapien
gtaaaaggtctgtgtcgtagacatg

SEQ ID NO: 1206650 - DNA, 25 bp, Homo sapien
cactagctgagcaccatacgcatac

SEQ ID NO: 1206651 - DNA, 25 bp, Homo sapien
tagacatgagcagccactagctgag

SEQ ID NO: 1206652 - DNA, 25 bp, Homo sapien
catacaggtgatggtgaaatctgca

SEQ ID NO: 1206653 - DNA, 25 bp, Homo sapien
aatgtaacatgcacacttcctatat

SEQ ID NO: 1206654 - DNA, 25 bp, Homo sapien
tctctaatgtaacatgcacacttcc

SEQ ID NO: 1206655 - DNA, 25 bp, Homo sapien
taatgtaacatgcacacttcctata

SEQ ID NO: 1206656 - DNA, 25 bp, Homo sapien
tctaatgtaacatgcacacttccta

SEQ ID NO: 1206657 - DNA, 25 bp, Homo sapien
gacataaagacttagctagtggcgc

SEQ ID NO: 1206658 - DNA, 25 bp, Homo sapien
gacttagctagtggcgccaaatccc

SEQ ID NO: 1206659 - DNA, 25 bp, Homo sapien
ccagcttggacccatggacataaag

SEQ ID NO: 1206660 - DNA, 25 bp, Homo sapien
gtggcgccaaatcccacaaagccat

SEQ ID NO: 1206661 - DNA, 25 bp, Homo sapien
catctactccatggtgctcagaatt

SEQ ID NO: 1206662 - DNA, 25 bp, Homo sapien
atctactccatggtgctcagaattc

SEQ ID NO: 1206663 - DNA, 25 bp, Homo sapien
tctactccatggtgctcagaattcg

SEQ ID NO: 1206664 - DNA, 25 bp, Homo sapien
tcagtgaacattcaacgctgtcggt

SEQ ID NO: 1206665 - DNA, 25 bp, Homo sapien
atcgaccgttgattgtaccctatgg

SEQ ID NO: 1206666 - DNA, 25 bp, Homo sapien
tagaattctgagttttgaggttgct

SEQ ID NO: 1206667 - DNA, 25 bp, Homo sapien
cgctgtcggtgagtttggaattaaa

SEQ ID NO: 1206668 - DNA, 25 bp, Homo sapien
tgatactaattccatcccgttcatc

SEQ ID NO: 1206669 - DNA, 25 bp, Homo sapien
aattccatcccgttcatcaatgtca

SEQ ID NO: 1206670 - DNA, 25 bp, Homo sapien
tactaattccatcccgttcatcaat

SEQ ID NO: 1206671 - DNA, 25 bp, Homo sapien
taattccatcccgttcatcaatgtc

SEQ ID NO: 1206672 - DNA, 25 bp, Homo sapien
tccggcatgaaaacagggattctgc

SEQ ID NO: 1206673 - DNA, 25 bp, Homo sapien
tctccggcatgaaaacagggattct

SEQ ID NO: 1206674 - DNA, 25 bp, Homo sapien
cctctccggcatgaaaacagggatt

SEQ ID NO: 1206675 - DNA, 25 bp, Homo sapien
cttcctctccggcatgaaaacaggg

SEQ ID NO: 1206676 - DNA, 25 bp, Homo sapien
tattattgcattgtatgtttgggat

SEQ ID NO: 1206677 - DNA, 25 bp, Homo sapien
tattgcattgtatgtttgggatgcc

SEQ ID NO: 1206678 - DNA, 25 bp, Homo sapien
gcattgtatgtttgggatgccctca

SEQ ID NO: 1206679 - DNA, 25 bp, Homo sapien
tgcattgtatgtttgggatgccctc

SEQ ID NO: 1206680 - DNA, 25 bp, Homo sapien
tagtatgcaagtttgaggtcaaatt

SEQ ID NO: 1206681 - DNA, 25 bp, Homo sapien
gctatttctacaatcattctcccct

SEQ ID NO: 1206682 - DNA, 25 bp, Homo sapien
caaattagaaatcttaacataatcc

SEQ ID NO: 1206683 - DNA, 25 bp, Homo sapien
tcattctcccctttagtatgcaagt

SEQ ID NO: 1206684 - DNA, 25 bp, Homo sapien
ccagggacttggtcgaactccgcgg

SEQ ID NO: 1206685 - DNA, 25 bp, Homo sapien
ccgccccgccttcccgctgcatctg

SEQ ID NO: 1206686 - DNA, 25 bp, Homo sapien
ggacttggtcgaactccgcggcctc

SEQ ID NO: 1206687 - DNA, 25 bp, Homo sapien
acttggtcgaactccgcggcctccg

SEQ ID NO: 1206688 - DNA, 25 bp, Homo sapien
tgatgggcagggagaagagacagat

SEQ ID NO: 1206689 - DNA, 25 bp, Homo sapien
gatgggcagggagaagagacagatt

SEQ ID NO: 1206690 - DNA, 25 bp, Homo sapien
tgggcagggagaagagacagatttc

SEQ ID NO: 1206691 - DNA, 25 bp, Homo sapien
cttgatgggcagggagaagagacag

SEQ ID NO: 1206692 - DNA, 25 bp, Homo sapien
tgagagagacccccaggaaaaagtc

SEQ ID NO: 1206693 - DNA, 25 bp, Homo sapien
cccaggaaaaagtcaatgacctcag

SEQ ID NO: 1206694 - DNA, 25 bp, Homo sapien
ggaaaaagtcaatgacctcagattc

SEQ ID NO: 1206695 - DNA, 25 bp, Homo sapien
cttgagagagacccccaggaaaaag

SEQ ID NO: 1206696 - DNA, 25 bp, Homo sapien
aacctagtgcactggctggcgcgga

SEQ ID NO: 1206697 - DNA, 25 bp, Homo sapien
cttggagcacttaacacccagaccg

SEQ ID NO: 1206698 - DNA, 25 bp, Homo sapien
tggagcacttaacacccagaccgac

SEQ ID NO: 1206699 - DNA, 25 bp, Homo sapien
ttggagcacttaacacccagaccga

SEQ ID NO: 1206700 - DNA, 25 bp, Homo sapien
aggcgcacaagcacaaagagggagc

SEQ ID NO: 1206701 - DNA, 25 bp, Homo sapien
tgaggggattgcagatcttgttccc

SEQ ID NO: 1206702 - DNA, 25 bp, Homo sapien
caagcacaaagagggagcggcctgt

SEQ ID NO: 1206703 - DNA, 25 bp, Homo sapien
gcacaaagagggagcggcctgtcac

SEQ ID NO: 1206704 - DNA, 25 bp, Homo sapien
gaatacagtcttcttccagagtcgg

SEQ ID NO: 1206705 - DNA, 25 bp, Homo sapien
taggtcttagaaacagcatcaaagg

SEQ ID NO: 1206706 - DNA, 25 bp, Homo sapien
gctgtaggtcttagaaacagcatca

SEQ ID NO: 1206707 - DNA, 25 bp, Homo sapien
tcttagaaacagcatcaaaggtggc

SEQ ID NO: 1206708 - DNA, 25 bp, Homo sapien
taacgaatcatggaactgagtctca

SEQ ID NO: 1206709 - DNA, 25 bp, Homo sapien
tgagtctcaagtatgttaagtggcc

SEQ ID NO: 1206710 - DNA, 25 bp, Homo sapien
ttaagtggcctgctaaacatcagtc

SEQ ID NO: 1206711 - DNA, 25 bp, Homo sapien
taatcctcgtatggaaagaagggag

SEQ ID NO: 1206712 - DNA, 25 bp, Homo sapien
catcagctacaggtcagctgctgtc

SEQ ID NO: 1206713 - DNA, 25 bp, Homo sapien
tagccattggctgggacacggtaga

SEQ ID NO: 1206714 - DNA, 25 bp, Homo sapien
tattctgagaattaggctgcaggaa

SEQ ID NO: 1206715 - DNA, 25 bp, Homo sapien
gggcacagacttcctacgttttaca

SEQ ID NO: 1206716 - DNA, 25 bp, Homo sapien
gagtgtttacaacaactatttatta

SEQ ID NO: 1206717 - DNA, 25 bp, Homo sapien
tattattcacataaataaattgttt

SEQ ID NO: 1206718 - DNA, 25 bp, Homo sapien
tgagtgtttacaacaactatttatt

SEQ ID NO: 1206719 - DNA, 25 bp, Homo sapien
acataaataaattgtttacagatac

SEQ ID NO: 1206720 - DNA, 25 bp, Homo sapien
gtttgcagtgagccaggctcgcgcc

SEQ ID NO: 1206721 - DNA, 25 bp, Homo sapien
tgagccaggctcgcgccactgcagt

SEQ ID NO: 1206722 - DNA, 25 bp, Homo sapien
ccagcttgggcaacaagagcgaaac

SEQ ID NO: 1206723 - DNA, 25 bp, Homo sapien
cgcttgaaaccggaaggcagagttt

SEQ ID NO: 1206724 - DNA, 25 bp, Homo sapien
aacccaggcccagttgacttcaagc

SEQ ID NO: 1206725 - DNA, 25 bp, Homo sapien
caagacttagaaatagagactgtac

SEQ ID NO: 1206726 - DNA, 25 bp, Homo sapien
taaaatacatgtgatccccagttgc

SEQ ID NO: 1206727 - DNA, 25 bp, Homo sapien
caaaaagttgtcttgggtgccgtgc

SEQ ID NO: 1206728 - DNA, 25 bp, Homo sapien
ggcactagcccaatctggttgaaag

SEQ ID NO: 1206729 - DNA, 25 bp, Homo sapien
taaatgcctcttgaatatgccttgg

SEQ ID NO: 1206730 - DNA, 25 bp, Homo sapien
tacattacatcaccaaggcactagc

SEQ ID NO: 1206731 - DNA, 25 bp, Homo sapien
caccaatttagagtaagaacgaatc

SEQ ID NO: 1206732 - DNA, 25 bp, Homo sapien
cattctcaaagtatgctctgcatgg

SEQ ID NO: 1206733 - DNA, 25 bp, Homo sapien
cattggaacctaatgttgccagaca

SEQ ID NO: 1206734 - DNA, 25 bp, Homo sapien
taccacacataggagctcgtcaata

SEQ ID NO: 1206735 - DNA, 25 bp, Homo sapien
cttagagacaccagatttccgtttc

SEQ ID NO: 1206736 - DNA, 25 bp, Homo sapien
gcctctgtctcggtaagaaaagcca

SEQ ID NO: 1206737 - DNA, 25 bp, Homo sapien
gaaggtgcaatcttcctatgatcaa

SEQ ID NO: 1206738 - DNA, 25 bp, Homo sapien
tacttaaagtccctggaaggtgcaa

SEQ ID NO: 1206739 - DNA, 25 bp, Homo sapien
aaaagccaatgtccgcaccaagggc

SEQ ID NO: 1206740 - DNA, 25 bp, Homo sapien
tgtcaagtatactcacagcagatgt

SEQ ID NO: 1206741 - DNA, 25 bp, Homo sapien
taccaccctggtaagtatgaataaa

SEQ ID NO: 1206742 - DNA, 25 bp, Homo sapien
ccaaatatgacttctaaaggcagac

SEQ ID NO: 1206743 - DNA, 25 bp, Homo sapien
cataaatgccaggttgtgaaactat

SEQ ID NO: 1206744 - DNA, 25 bp, Homo sapien
tcctgcacagttgtggaatggatgg

SEQ ID NO: 1206745 - DNA, 25 bp, Homo sapien
gaagacatgagtcctgcacagttgt

SEQ ID NO: 1206746 - DNA, 25 bp, Homo sapien
cttgggaaggcgatgagaagttatt

SEQ ID NO: 1206747 - DNA, 25 bp, Homo sapien
aaggcgatgagaagttattaaaggg

SEQ ID NO: 1206748 - DNA, 25 bp, Homo sapien
tgcagcctacaacatggcagtgtag

SEQ ID NO: 1206749 - DNA, 25 bp, Homo sapien
gatgttcaactggagaccatcctca

SEQ ID NO: 1206750 - DNA, 25 bp, Homo sapien
caccctaagttccttgtcacaatgg

SEQ ID NO: 1206751 - DNA, 25 bp, Homo sapien
aatggtcacccaacatgcagcctac

SEQ ID NO: 1206752 - DNA, 25 bp, Homo sapien
caccaaatttagagtgtgttttcca

SEQ ID NO: 1206753 - DNA, 25 bp, Homo sapien
aaatacttgttcactgggctgttca

SEQ ID NO: 1206754 - DNA, 25 bp, Homo sapien
tgataacgtctcttgggacttgaac

SEQ ID NO: 1206755 - DNA, 25 bp, Homo sapien
tctcttgggacttgaacattgatgc

SEQ ID NO: 1206756 - DNA, 25 bp, Homo sapien
gggctgttcagactgataacgtctc

SEQ ID NO: 1206757 - DNA, 25 bp, Homo sapien
acagcttgtaagtcttgtaacttta

SEQ ID NO: 1206758 - DNA, 25 bp, Homo sapien
tgtgatttgcaaaatgcacagcttg

SEQ ID NO: 1206759 - DNA, 25 bp, Homo sapien
gatttgcaaaatgcacagcttgtaa

SEQ ID NO: 1206760 - DNA, 25 bp, Homo sapien
cagcttgtaagtcttgtaactttaa

SEQ ID NO: 1206761 - DNA, 25 bp, Homo sapien
tagactgggtacctagcaaacgcga

SEQ ID NO: 1206762 - DNA, 25 bp, Homo sapien
gtacaaatcagatagcacctgcctg

SEQ ID NO: 1206763 - DNA, 25 bp, Homo sapien
aactgggctttcttgctagactggg

SEQ ID NO: 1206764 - DNA, 25 bp, Homo sapien
caaacgcgatcccatgaaataggca

SEQ ID NO: 1206765 - DNA, 25 bp, Homo sapien
actggaccaaaataatatgatcatc

SEQ ID NO: 1206766 - DNA, 25 bp, Homo sapien
caactggaccaaaataatatgatca

SEQ ID NO: 1206767 - DNA, 25 bp, Homo sapien
ggaccaaaataatatgatcatcttt

SEQ ID NO: 1206768 - DNA, 25 bp, Homo sapien
ctggaccaaaataatatgatcatct

SEQ ID NO: 1206769 - DNA, 25 bp, Homo sapien
tgtgctgagggatctgatgtgctct

SEQ ID NO: 1206770 - DNA, 25 bp, Homo sapien
gttaccaggaaagtattcttgtgga

SEQ ID NO: 1206771 - DNA, 25 bp, Homo sapien
tgcagaggcctcactgtgaactttt

SEQ ID NO: 1206772 - DNA, 25 bp, Homo sapien
tgtggaacaatgcactcagactgga

SEQ ID NO: 1206773 - DNA, 25 bp, Homo sapien
gcccactactatgttagcttttgca

SEQ ID NO: 1206774 - DNA, 25 bp, Homo sapien
tttaacgtagcccactactatgtta

SEQ ID NO: 1206775 - DNA, 25 bp, Homo sapien
tctccaaagtatgacaaaagcatat

SEQ ID NO: 1206776 - DNA, 25 bp, Homo sapien
aaagcatatttagaggactccccat

SEQ ID NO: 1206777 - DNA, 25 bp, Homo sapien
cagtccaagtgtacaaagattattc

SEQ ID NO: 1206778 - DNA, 25 bp, Homo sapien
tcaaaatgcagtccaagtgtacaaa

SEQ ID NO: 1206779 - DNA, 25 bp, Homo sapien
ggctgaagtagaggtggttaggtaa

SEQ ID NO: 1206780 - DNA, 25 bp, Homo sapien
caaagattattcacctgatcatggc

SEQ ID NO: 1206781 - DNA, 25 bp, Homo sapien
tttattttgctgagtacaaaactcc

SEQ ID NO: 1206782 - DNA, 25 bp, Homo sapien
ctccatgttgatagaagtggaggga

SEQ ID NO: 1206783 - DNA, 25 bp, Homo sapien
tgctaccaacaaagtctctcggttt

SEQ ID NO: 1206784 - DNA, 25 bp, Homo sapien
tttaatttgctaccaacaaagtctc

SEQ ID NO: 1206785 - DNA, 25 bp, Homo sapien
caagaagagttcaaagctaaaaatt

SEQ ID NO: 1206786 - DNA, 25 bp, Homo sapien
acaagaagagttcaaagctaaaaat

SEQ ID NO: 1206787 - DNA, 25 bp, Homo sapien
cacaagaagagttcaaagctaaaaa

SEQ ID NO: 1206788 - DNA, 25 bp, Homo sapien
gaagctgggactctatttgctaaga

SEQ ID NO: 1206789 - DNA, 25 bp, Homo sapien
gatgccacgtatacattgaagacct

SEQ ID NO: 1206790 - DNA, 25 bp, Homo sapien
taatcttgagggactgagttggcaa

SEQ ID NO: 1206791 - DNA, 25 bp, Homo sapien
cagaattctgtaggactcgaggcca

SEQ ID NO: 1206792 - DNA, 25 bp, Homo sapien
gaatcaaagttcgacaacttggcag

SEQ ID NO: 1206793 - DNA, 25 bp, Homo sapien
atcaaagttcgacaacttggcagct

SEQ ID NO: 1206794 - DNA, 25 bp, Homo sapien
cacaagaatcaaagttcgacaactt

SEQ ID NO: 1206795 - DNA, 25 bp, Homo sapien
caagaatcaaagttcgacaacttgg

SEQ ID NO: 1206796 - DNA, 25 bp, Homo sapien
cactttttcctctgcgaattcctgg

SEQ ID NO: 1206797 - DNA, 25 bp, Homo sapien
aactgggagggatcgggctctgcat

SEQ ID NO: 1206798 - DNA, 25 bp, Homo sapien
tgaactgtagaaaggtgaactggga

SEQ ID NO: 1206799 - DNA, 25 bp, Homo sapien
tgggcaaattgcatagacatacaca

SEQ ID NO: 1206800 - DNA, 25 bp, Homo sapien
tcatttgcatcaatgcattgatcta

SEQ ID NO: 1206801 - DNA, 25 bp, Homo sapien
caacaaggatccagatccttggaag

SEQ ID NO: 1206802 - DNA, 25 bp, Homo sapien
ctacaccaacaaggatccagatcct

SEQ ID NO: 1206803 - DNA, 25 bp, Homo sapien
cctcatttgcatcaatgcattgatc

SEQ ID NO: 1206804 - DNA, 25 bp, Homo sapien
ataaactcctggtggtcctggatga

SEQ ID NO: 1206805 - DNA, 25 bp, Homo sapien
gataaactcctggtggtcctggatg

SEQ ID NO: 1206806 - DNA, 25 bp, Homo sapien
aatctgagtcaatattcctaaaacc

SEQ ID NO: 1206807 - DNA, 25 bp, Homo sapien
ccttcactgcttggagcccaaggta

SEQ ID NO: 1206808 - DNA, 25 bp, Homo sapien
gagggtatgaggactcaattgctgc

SEQ ID NO: 1206809 - DNA, 25 bp, Homo sapien
tgagacttatggaagagtttgtgac

SEQ ID NO: 1206810 - DNA, 25 bp, Homo sapien
catttattctagtctcttgaagtta

SEQ ID NO: 1206811 - DNA, 25 bp, Homo sapien
gctaatcattcatgggtattgtttt

SEQ ID NO: 1206812 - DNA, 25 bp, Homo sapien
agaaatttgctaatcattcatgggt

SEQ ID NO: 1206813 - DNA, 25 bp, Homo sapien
tcatttattctagtctcttgaagtt

SEQ ID NO: 1206814 - DNA, 25 bp, Homo sapien
ttccctgaggcattcagcacagagc

SEQ ID NO: 1206815 - DNA, 25 bp, Homo sapien
ccttccctgaggcattcagcacaga

SEQ ID NO: 1206816 - DNA, 25 bp, Homo sapien
cattccttccctgaggcattcagca

SEQ ID NO: 1206817 - DNA, 25 bp, Homo sapien
ccctgaggcattcagcacagagctg

SEQ ID NO: 1206818 - DNA, 25 bp, Homo sapien
cctgggtagcagagcgaaacaccat

SEQ ID NO: 1206819 - DNA, 25 bp, Homo sapien
aggctgcagtgagaaataatgacac

SEQ ID NO: 1206820 - DNA, 25 bp, Homo sapien
cagtgagaaataatgacaccactgc

SEQ ID NO: 1206821 - DNA, 25 bp, Homo sapien
gctgcagtgagaaataatgacacca

SEQ ID NO: 1206822 - DNA, 25 bp, Homo sapien
ttttttccaccgatatcctagcctc

SEQ ID NO: 1206823 - DNA, 25 bp, Homo sapien
tcctagcctctctgaggaactcctt

SEQ ID NO: 1206824 - DNA, 25 bp, Homo sapien
gcctctctgaggaactccttgtaga

SEQ ID NO: 1206825 - DNA, 25 bp, Homo sapien
caccgatatcctagcctctctgagg

SEQ ID NO: 1206826 - DNA, 25 bp, Homo sapien
ggaatatggtgggacatttcagccc

SEQ ID NO: 1206827 - DNA, 25 bp, Homo sapien
taaagcacaatacagtacacctttg

SEQ ID NO: 1206828 - DNA, 25 bp, Homo sapien
tgaaaaactaacagacaaaccacat

SEQ ID NO: 1206829 - DNA, 25 bp, Homo sapien
cagctccacttgtatgcagactttt

SEQ ID NO: 1206830 - DNA, 25 bp, Homo sapien
gaagatgtacctctcagattcccct

SEQ ID NO: 1206831 - DNA, 25 bp, Homo sapien
tgtcagatgttttagaacctgcctc

SEQ ID NO: 1206832 - DNA, 25 bp, Homo sapien
caatggtcctgttgtgttgatgagc

SEQ ID NO: 1206833 - DNA, 25 bp, Homo sapien
tgagcttggcgacacattcttgatt

SEQ ID NO: 1206834 - DNA, 25 bp, Homo sapien
tgtcccttgaatggcccacatttga

SEQ ID NO: 1206835 - DNA, 25 bp, Homo sapien
tcccttgaatggcccacatttgacc

SEQ ID NO: 1206836 - DNA, 25 bp, Homo sapien
ccttgaatggcccacatttgaccat

SEQ ID NO: 1206837 - DNA, 25 bp, Homo sapien
cccttgaatggcccacatttgacca

SEQ ID NO: 1206838 - DNA, 25 bp, Homo sapien
cctctccttccacctagccttctag

SEQ ID NO: 1206839 - DNA, 25 bp, Homo sapien
tctcctgcctcaacaagccctggca

SEQ ID NO: 1206840 - DNA, 25 bp, Homo sapien
tagccttctagcctggtctcctacc

SEQ ID NO: 1206841 - DNA, 25 bp, Homo sapien
acccaagggtaccacatgcaaaaga

SEQ ID NO: 1206842 - DNA, 25 bp, Homo sapien
ccctttgggcctcgtaagatcctca

SEQ ID NO: 1206843 - DNA, 25 bp, Homo sapien
gtaagatcctcacgggagccctgga

SEQ ID NO: 1206844 - DNA, 25 bp, Homo sapien
cagataactgggctcttgactttac

SEQ ID NO: 1206845 - DNA, 25 bp, Homo sapien
ggccctgacaggtgatgacttctct

SEQ ID NO: 1206846 - DNA, 25 bp, Homo sapien
tgcccagagcctgtgctgcagccat

SEQ ID NO: 1206847 - DNA, 25 bp, Homo sapien
gagcctgtgctgcagccatgccact

SEQ ID NO: 1206848 - DNA, 25 bp, Homo sapien
ccagagcctgtgctgcagccatgcc

SEQ ID NO: 1206849 - DNA, 25 bp, Homo sapien
gtgcccagagcctgtgctgcagcca

SEQ ID NO: 1206850 - DNA, 25 bp, Homo sapien
ttcactttcgccttggtgcctgtct

SEQ ID NO: 1206851 - DNA, 25 bp, Homo sapien
agccttcactttcgccttggtgcct

SEQ ID NO: 1206852 - DNA, 25 bp, Homo sapien
cttcactttcgccttggtgcctgtc

SEQ ID NO: 1206853 - DNA, 25 bp, Homo sapien
ggtgcctgtctgcaacatctgagca

SEQ ID NO: 1206854 - DNA, 25 bp, Homo sapien
taatctgagcgggtatcagtaactg

SEQ ID NO: 1206855 - DNA, 25 bp, Homo sapien
tatgaccaaagcacccaaaaatagg

SEQ ID NO: 1206856 - DNA, 25 bp, Homo sapien
taactgactcctcagtatgaccaaa

SEQ ID NO: 1206857 - DNA, 25 bp, Homo sapien
aaaagggttatagaagaatgtgaag

SEQ ID NO: 1206858 - DNA, 25 bp, Homo sapien
taactacattgataggccgtgtggc

SEQ ID NO: 1206859 - DNA, 25 bp, Homo sapien
ccgtgtggcttcaaggtaatggcat

SEQ ID NO: 1206860 - DNA, 25 bp, Homo sapien
taatggcattccagcatgtcaggtg

SEQ ID NO: 1206861 - DNA, 25 bp, Homo sapien
ccctcttagataatgatgcactagc

SEQ ID NO: 1206862 - DNA, 25 bp, Homo sapien
tcaaaataactcagctctccactca

SEQ ID NO: 1206863 - DNA, 25 bp, Homo sapien
tattctcctgtttcaaaataactca

SEQ ID NO: 1206864 - DNA, 25 bp, Homo sapien
gactcatattctcctgtttcaaaat

SEQ ID NO: 1206865 - DNA, 25 bp, Homo sapien
tcctgtttcaaaataactcagctct

SEQ ID NO: 1206866 - DNA, 25 bp, Homo sapien
acacctgatgggctgtagcaggtga

SEQ ID NO: 1206867 - DNA, 25 bp, Homo sapien
cacctgatgggctgtagcaggtgac

SEQ ID NO: 1206868 - DNA, 25 bp, Homo sapien
agctggacggagaacacctgatggg

SEQ ID NO: 1206869 - DNA, 25 bp, Homo sapien
ctggacggagaacacctgatgggct

SEQ ID NO: 1206870 - DNA, 25 bp, Homo sapien
ccagaggcagctctatgttttagtt

SEQ ID NO: 1206871 - DNA, 25 bp, Homo sapien
cccagaggcagctctatgttttagt

SEQ ID NO: 1206872 - DNA, 25 bp, Homo sapien
ccccagaggcagctctatgttttag

SEQ ID NO: 1206873 - DNA, 25 bp, Homo sapien
tccccagaggcagctctatgtttta

SEQ ID NO: 1206874 - DNA, 25 bp, Homo sapien
acacgctgtggaaggttgggagtga

SEQ ID NO: 1206875 - DNA, 25 bp, Homo sapien
gaaactgtgggctgatacccagcca

SEQ ID NO: 1206876 - DNA, 25 bp, Homo sapien
tgtctgataccaactcagaaactgt

SEQ ID NO: 1206877 - DNA, 25 bp, Homo sapien
cacagaagtttgtagtgaaggacac

SEQ ID NO: 1206878 - DNA, 25 bp, Homo sapien
ggcacacacaggcaatgaaaaatat

SEQ ID NO: 1206879 - DNA, 25 bp, Homo sapien
tttcacctggtatttttggatagca

SEQ ID NO: 1206880 - DNA, 25 bp, Homo sapien
tagcaggactgctgccacacttttg

SEQ ID NO: 1206881 - DNA, 25 bp, Homo sapien
atatctggctgtctgctatttcacc

SEQ ID NO: 1206882 - DNA, 25 bp, Homo sapien
caatcacttgtagtaagttaaacgt

SEQ ID NO: 1206883 - DNA, 25 bp, Homo sapien
gggctaaggagactttgtcattttc

SEQ ID NO: 1206884 - DNA, 25 bp, Homo sapien
tttccatacccagggctaaggagac

SEQ ID NO: 1206885 - DNA, 25 bp, Homo sapien
catggtacctgaaacttttgtttct

SEQ ID NO: 1206886 - DNA, 25 bp, Homo sapien
tcattttcatcatggtacctgaaac

SEQ ID NO: 1206887 - DNA, 25 bp, Homo sapien
cagctggatagtgcccctgccactt

SEQ ID NO: 1206888 - DNA, 25 bp, Homo sapien
cattgacagaggatcccaaggattt

SEQ ID NO: 1206889 - DNA, 25 bp, Homo sapien
ctccaaacagctggatagtgcccct

SEQ ID NO: 1206890 - DNA, 25 bp, Homo sapien
ccctgccacttgcattgacagagga

SEQ ID NO: 1206891 - DNA, 25 bp, Homo sapien
cttgatgttggcatagtagccaagg

SEQ ID NO: 1206892 - DNA, 25 bp, Homo sapien
gatgttggcatagtagccaaggttg

SEQ ID NO: 1206893 - DNA, 25 bp, Homo sapien
ggaacttgatgttggcatagtagcc

SEQ ID NO: 1206894 - DNA, 25 bp, Homo sapien
tgttggcatagtagccaaggttgtt

SEQ ID NO: 1206895 - DNA, 25 bp, Homo sapien
ttcataccctgtttgacctggtgct

SEQ ID NO: 1206896 - DNA, 25 bp, Homo sapien
tcttcataccctgtttgacctggtg

SEQ ID NO: 1206897 - DNA, 25 bp, Homo sapien
cttcataccctgtttgacctggtgc

SEQ ID NO: 1206898 - DNA, 25 bp, Homo sapien
tttcttctctccatgaggctgatca

SEQ ID NO: 1206899 - DNA, 25 bp, Homo sapien
ctccatgaggctgatcagggtgttg

SEQ ID NO: 1206900 - DNA, 25 bp, Homo sapien
tctctccatgaggctgatcagggtg

SEQ ID NO: 1206901 - DNA, 25 bp, Homo sapien
ttcttctctccatgaggctgatcag

SEQ ID NO: 1206902 - DNA, 25 bp, Homo sapien
aaccagttgacagttgaaaatatac

SEQ ID NO: 1206903 - DNA, 25 bp, Homo sapien
taatcaggaaccagttgacagttga

SEQ ID NO: 1206904 - DNA, 25 bp, Homo sapien
ggaaccagttgacagttgaaaatat

SEQ ID NO: 1206905 - DNA, 25 bp, Homo sapien
gcatcataatcaggaaccagttgac

SEQ ID NO: 1206906 - DNA, 25 bp, Homo sapien
caagatactccagtgaccaacagat

SEQ ID NO: 1206907 - DNA, 25 bp, Homo sapien
ttatttggcaagatactccagtgac

SEQ ID NO: 1206908 - DNA, 25 bp, Homo sapien
tttggcaagatactccagtgaccaa

SEQ ID NO: 1206909 - DNA, 25 bp, Homo sapien
ggcaagatactccagtgaccaacag

SEQ ID NO: 1206910 - DNA, 25 bp, Homo sapien
catgtcagcagcctcattctcaaaa

SEQ ID NO: 1206911 - DNA, 25 bp, Homo sapien
tttgtcaatgctactacatttatag

SEQ ID NO: 1206912 - DNA, 25 bp, Homo sapien
caatgctactacatttatagatcag

SEQ ID NO: 1206913 - DNA, 25 bp, Homo sapien
gtcagcagcctcattctcaaaattt

SEQ ID NO: 1206914 - DNA, 25 bp, Homo sapien
cagatttccagaggggaatatcaat

SEQ ID NO: 1206915 - DNA, 25 bp, Homo sapien
tccagaggggaatatcaatggtgac

SEQ ID NO: 1206916 - DNA, 25 bp, Homo sapien
cagaggggaatatcaatggtgacat

SEQ ID NO: 1206917 - DNA, 25 bp, Homo sapien
tttccagaggggaatatcaatggtg

SEQ ID NO: 1206918 - DNA, 25 bp, Homo sapien
atcaatgatagtcgtatctgatggt

SEQ ID NO: 1206919 - DNA, 25 bp, Homo sapien
gcatcaatgatagtcgtatctgatg

SEQ ID NO: 1206920 - DNA, 25 bp, Homo sapien
catcaatgatagtcgtatctgatgg

SEQ ID NO: 1206921 - DNA, 25 bp, Homo sapien
tcatctactgtgatgtatatgtgag

SEQ ID NO: 1206922 - DNA, 25 bp, Homo sapien
agcacagccagcttgagatgtggct

SEQ ID NO: 1206923 - DNA, 25 bp, Homo sapien
ccagcttgagatgtggctgtaatca

SEQ ID NO: 1206924 - DNA, 25 bp, Homo sapien
atatgtgagcagtaacaataaggac

SEQ ID NO: 1206925 - DNA, 25 bp, Homo sapien
ctgtagagtggctcagcagaatcca

SEQ ID NO: 1206926 - DNA, 25 bp, Homo sapien
gctcagcagaatccattttgctaac

SEQ ID NO: 1206927 - DNA, 25 bp, Homo sapien
agagtggctcagcagaatccatttt

SEQ ID NO: 1206928 - DNA, 25 bp, Homo sapien
ggctcagcagaatccattttgctaa

SEQ ID NO: 1206929 - DNA, 25 bp, Homo sapien
gctactatggcaggtttgtaaccaa

SEQ ID NO: 1206930 - DNA, 25 bp, Homo sapien
tggctctggcatgttgtctctattc

SEQ ID NO: 1206931 - DNA, 25 bp, Homo sapien
caattactgtaagtgctaacttcct

SEQ ID NO: 1206932 - DNA, 25 bp, Homo sapien
aaatgctactatggcaggtttgtaa

SEQ ID NO: 1206933 - DNA, 25 bp, Homo sapien
ttgtcagttgaaggcattggtttgg

SEQ ID NO: 1206934 - DNA, 25 bp, Homo sapien
tggtttggatggatgcaatccagag

SEQ ID NO: 1206935 - DNA, 25 bp, Homo sapien
aacttgtcagttgaaggcattggtt

SEQ ID NO: 1206936 - DNA, 25 bp, Homo sapien
ggcattggtttggatggatgcaatc

SEQ ID NO: 1206937 - DNA, 25 bp, Homo sapien
caatactaccaattttgtagacatc

SEQ ID NO: 1206938 - DNA, 25 bp, Homo sapien
aacaccagtttccactcagcccaaa

SEQ ID NO: 1206939 - DNA, 25 bp, Homo sapien
ttccactcagcccaaaggcacatta

SEQ ID NO: 1206940 - DNA, 25 bp, Homo sapien
cagtttccactcagcccaaaggcac

SEQ ID NO: 1206941 - DNA, 25 bp, Homo sapien
gaacaccagtttccactcagcccaa

SEQ ID NO: 1206942 - DNA, 25 bp, Homo sapien
cattcttgatattgaagcccatgct

SEQ ID NO: 1206943 - DNA, 25 bp, Homo sapien
ttcttgatattgaagcccatgctgt

SEQ ID NO: 1206944 - DNA, 25 bp, Homo sapien
cacattcttgatattgaagcccatg

SEQ ID NO: 1206945 - DNA, 25 bp, Homo sapien
tgatattgaagcccatgctgtcccc

SEQ ID NO: 1206946 - DNA, 25 bp, Homo sapien
gcaaacttgcaagtaaggtgagctg

SEQ ID NO: 1206947 - DNA, 25 bp, Homo sapien
ggcactgccaacagggatttggcct

SEQ ID NO: 1206948 - DNA, 25 bp, Homo sapien
agtacaggggcactgccaacaggga

SEQ ID NO: 1206949 - DNA, 25 bp, Homo sapien
aagtaaggtgagctgtgtgacaatc

SEQ ID NO: 1206950 - DNA, 25 bp, Homo sapien
agatttcaagaatttagggccattt

SEQ ID NO: 1206951 - DNA, 25 bp, Homo sapien
aacaaatggcagcatcaccagattt

SEQ ID NO: 1206952 - DNA, 25 bp, Homo sapien
tcaacaaatggcagcatcaccagat

SEQ ID NO: 1206953 - DNA, 25 bp, Homo sapien
aatttagggccattttccagcttct

SEQ ID NO: 1206954 - DNA, 25 bp, Homo sapien
ctacgaaggtgtgacaggagttacc

SEQ ID NO: 1206955 - DNA, 25 bp, Homo sapien
cagcaaagaaatgggccgcaagttc

SEQ ID NO: 1206956 - DNA, 25 bp, Homo sapien
tgccagtgcggccagaatagaaagt

SEQ ID NO: 1206957 - DNA, 25 bp, Homo sapien
gatggcatcatcctatctgggagga

SEQ ID NO: 1206958 - DNA, 25 bp, Homo sapien
catgttgtagcatttcacactctgt

SEQ ID NO: 1206959 - DNA, 25 bp, Homo sapien
tctttttctgtctttgattgtgcat

SEQ ID NO: 1206960 - DNA, 25 bp, Homo sapien
atgttgtagcatttcacactctgtt

SEQ ID NO: 1206961 - DNA, 25 bp, Homo sapien
ttttctttttctgtctttgattgtg

SEQ ID NO: 1206962 - DNA, 25 bp, Homo sapien
tacatgatagtaagatgcccaccag

SEQ ID NO: 1206963 - DNA, 25 bp, Homo sapien
gacttgggacatgtgaccatcctgg

SEQ ID NO: 1206964 - DNA, 25 bp, Homo sapien
agttgcaagtagcagagatcctggc

SEQ ID NO: 1206965 - DNA, 25 bp, Homo sapien
ggcttcaactacatcaagggtttca

SEQ ID NO: 1206966 - DNA, 25 bp, Homo sapien
ctttaccaatgccttgggcatgtga

SEQ ID NO: 1206967 - DNA, 25 bp, Homo sapien
caggggaactcacattatcctttga

SEQ ID NO: 1206968 - DNA, 25 bp, Homo sapien
gtcaggcagatgttcaactcccggg

SEQ ID NO: 1206969 - DNA, 25 bp, Homo sapien
gggaaccctactgccagcatcttct

SEQ ID NO: 1206970 - DNA, 25 bp, Homo sapien
cagcattagaagagcccagtaggag

SEQ ID NO: 1206971 - DNA, 25 bp, Homo sapien
atagtagcagaaacctgtgcccctg

SEQ ID NO: 1206972 - DNA, 25 bp, Homo sapien
agtagcagaaacctgtgcccctgca

SEQ ID NO: 1206973 - DNA, 25 bp, Homo sapien
tagtagcagaaacctgtgcccctgc

SEQ ID NO: 1206974 - DNA, 25 bp, Homo sapien
aatagtagcagaaacctgtgcccct

SEQ ID NO: 1206975 - DNA, 25 bp, Homo sapien
ttggcacaccaaaacctcagtctgg

SEQ ID NO: 1206976 - DNA, 25 bp, Homo sapien
tctactgtaggctgaaacttggcac

SEQ ID NO: 1206977 - DNA, 25 bp, Homo sapien
cggagattcgtaagtttgccacaaa

SEQ ID NO: 1206978 - DNA, 25 bp, Homo sapien
tctaccagtgccagaagcagcacca

SEQ ID NO: 1206979 - DNA, 25 bp, Homo sapien
cacgatgaaagctttgaagaatgct

SEQ ID NO: 1206980 - DNA, 25 bp, Homo sapien
tagatcacagaaagctgcattctcc

SEQ ID NO: 1206981 - DNA, 25 bp, Homo sapien
cactgttgtgcttggagagtctatg

SEQ ID NO: 1206982 - DNA, 25 bp, Homo sapien
ctatggaaatggttagccttagatc

SEQ ID NO: 1206983 - DNA, 25 bp, Homo sapien
gtctttctctgcttatggcctattg

SEQ ID NO: 1206984 - DNA, 25 bp, Homo sapien
cctattgcagtgaactctctaaggg

SEQ ID NO: 1206985 - DNA, 25 bp, Homo sapien
tatggcctattgcagtgaactctct

SEQ ID NO: 1206986 - DNA, 25 bp, Homo sapien
tctgcttatggcctattgcagtgaa

SEQ ID NO: 1206987 - DNA, 25 bp, Homo sapien
tctgctaaagacaccctcaggtaga

SEQ ID NO: 1206988 - DNA, 25 bp, Homo sapien
cgtccatggctggtcagaaattttc

SEQ ID NO: 1206989 - DNA, 25 bp, Homo sapien
tagccgtaacttaactgctcccagg

SEQ ID NO: 1206990 - DNA, 25 bp, Homo sapien
gggacttaggtagtaatcagccaga

SEQ ID NO: 1206991 - DNA, 25 bp, Homo sapien
atctcacaatgaccagtagatacat

SEQ ID NO: 1206992 - DNA, 25 bp, Homo sapien
cataaatccgtaactggctgtgatt

SEQ ID NO: 1206993 - DNA, 25 bp, Homo sapien
aattagctgtaaactccattccact

SEQ ID NO: 1206994 - DNA, 25 bp, Homo sapien
gtgattaattagctgtaaactccat

SEQ ID NO: 1206995 - DNA, 25 bp, Homo sapien
aaaaacataaatccgtaactggctg

SEQ ID NO: 1206996 - DNA, 25 bp, Homo sapien
gctttgatgaaagggccgatcctcc

SEQ ID NO: 1206997 - DNA, 25 bp, Homo sapien
atctgcccgataagcttccccgtat

SEQ ID NO: 1206998 - DNA, 25 bp, Homo sapien
ccccgtatggggctttgatgaaagg

SEQ ID NO: 1206999 - DNA, 25 bp, Homo sapien
tgcccgataagcttccccgtatggg

SEQ ID NO: 1207000 - DNA, 25 bp, Homo sapien
gccttgttctcgaatgcatcaccaa

SEQ ID NO: 1207001 - DNA, 25 bp, Homo sapien
ttttctggacattggtaggattgac

SEQ ID NO: 1207002 - DNA, 25 bp, Homo sapien
ggtaggattgactgccttgttctcg

SEQ ID NO: 1207003 - DNA, 25 bp, Homo sapien
ttctcgaatgcatcaccaaaggtga

SEQ ID NO: 1207004 - DNA, 25 bp, Homo sapien
aagatgatactctggcactaatgct

SEQ ID NO: 1207005 - DNA, 25 bp, Homo sapien
aaagatgatactctggcactaatgc

SEQ ID NO: 1207006 - DNA, 25 bp, Homo sapien
agatgatactctggcactaatgctg

SEQ ID NO: 1207007 - DNA, 25 bp, Homo sapien
ttgtgggttgagacagtggttgtca

SEQ ID NO: 1207008 - DNA, 25 bp, Homo sapien
cttgtgggttgagacagtggttgtc

SEQ ID NO: 1207009 - DNA, 25 bp, Homo sapien
tctggcttcgcagcagtacaagacc

SEQ ID NO: 1207010 - DNA, 25 bp, Homo sapien
tcaggaatgacgaagaagcgagtta

SEQ ID NO: 1207011 - DNA, 25 bp, Homo sapien
gaagaagcgagttatcaaaatctgg

SEQ ID NO: 1207012 - DNA, 25 bp, Homo sapien
gagttatcaaaatctggcttcgcag

SEQ ID NO: 1207013 - DNA, 25 bp, Homo sapien
gaagcagcagttacagctcgtggag

SEQ ID NO: 1207014 - DNA, 25 bp, Homo sapien
cagttacagctcgtggaggagggaa

SEQ ID NO: 1207015 - DNA, 25 bp, Homo sapien
gcagttacagctcgtggaggaggga

SEQ ID NO: 1207016 - DNA, 25 bp, Homo sapien
ttacagctcgtggaggagggaaaag

SEQ ID NO: 1207017 - DNA, 25 bp, Homo sapien
gctgtagttaacaaggctccctgac

SEQ ID NO: 1207018 - DNA, 25 bp, Homo sapien
tgagtaatgatttataaagtggtgt

SEQ ID NO: 1207019 - DNA, 25 bp, Homo sapien
cccctgctgtttggtaatgttaatg

SEQ ID NO: 1207020 - DNA, 25 bp, Homo sapien
taatgttaatggacaggaagtgagt

SEQ ID NO: 1207021 - DNA, 25 bp, Homo sapien
atagccataatcaatagcttgtaaa

SEQ ID NO: 1207022 - DNA, 25 bp, Homo sapien
tgtaatggaaacaagactggtgtgc

SEQ ID NO: 1207023 - DNA, 25 bp, Homo sapien
tgtgctgagccattgaggtgagtct

SEQ ID NO: 1207024 - DNA, 25 bp, Homo sapien
taaggtcagcattgtaaagattcag

SEQ ID NO: 1207025 - DNA, 25 bp, Homo sapien
tagagagggcccattcgcttctcgc

SEQ ID NO: 1207026 - DNA, 25 bp, Homo sapien
ttcgcttctcgctgacctccccttt

SEQ ID NO: 1207027 - DNA, 25 bp, Homo sapien
agagggcccattcgcttctcgctga

SEQ ID NO: 1207028 - DNA, 25 bp, Homo sapien
ctagagagggcccattcgcttctcg

SEQ ID NO: 1207029 - DNA, 25 bp, Homo sapien
tgtgtgtcagtaactctataatcat

SEQ ID NO: 1207030 - DNA, 25 bp, Homo sapien
ctatctcttgccaaagggtatgtca

SEQ ID NO: 1207031 - DNA, 25 bp, Homo sapien
gttgtggattgtgatacatgccatt

SEQ ID NO: 1207032 - DNA, 25 bp, Homo sapien
cttcctaaaagttgtggattgtgat

SEQ ID NO: 1207033 - DNA, 25 bp, Homo sapien
ggacagccgtgtcactaaaatgcat

SEQ ID NO: 1207034 - DNA, 25 bp, Homo sapien
aagacactggacagccgtgtcacta

SEQ ID NO: 1207035 - DNA, 25 bp, Homo sapien
tgacaatgacgatgactggaagaca

SEQ ID NO: 1207036 - DNA, 25 bp, Homo sapien
cagtgacaatgacgatgactggaag

SEQ ID NO: 1207037 - DNA, 25 bp, Homo sapien
gcagcaaccaggtaagcagcacttg

SEQ ID NO: 1207038 - DNA, 25 bp, Homo sapien
cagcttggcctcctttgggcaaagc

SEQ ID NO: 1207039 - DNA, 25 bp, Homo sapien
gtttttactgcattagtgaagtcac

SEQ ID NO: 1207040 - DNA, 25 bp, Homo sapien
ggtgcttggtcagttacttcctcaa

SEQ ID NO: 1207041 - DNA, 25 bp, Homo sapien
atggtccgtgcagctcagtaagaaa

SEQ ID NO: 1207042 - DNA, 25 bp, Homo sapien
tgggcaacattgttggaggcagctg

SEQ ID NO: 1207043 - DNA, 25 bp, Homo sapien
ggtccgtgcagctcagtaagaaaat

SEQ ID NO: 1207044 - DNA, 25 bp, Homo sapien
tggtccgtgcagctcagtaagaaaa

SEQ ID NO: 1207045 - DNA, 25 bp, Homo sapien
ctttaggaaaggagcacgaagtact

SEQ ID NO: 1207046 - DNA, 25 bp, Homo sapien
aaggagcacgaagtactctttttat

SEQ ID NO: 1207047 - DNA, 25 bp, Homo sapien
taggaaaggagcacgaagtactctt

SEQ ID NO: 1207048 - DNA, 25 bp, Homo sapien
ggagcacgaagtactctttttatag

SEQ ID NO: 1207049 - DNA, 25 bp, Homo sapien
gagaagcatggtccatttggtcacc

SEQ ID NO: 1207050 - DNA, 25 bp, Homo sapien
gctgagaagcatggtccatttggtc

SEQ ID NO: 1207051 - DNA, 25 bp, Homo sapien
tgctgagaagcatggtccatttggt

SEQ ID NO: 1207052 - DNA, 25 bp, Homo sapien
aataattaatgttttgccctgtttg

SEQ ID NO: 1207053 - DNA, 25 bp, Homo sapien
tgtttgtttccagctttaagatatc

SEQ ID NO: 1207054 - DNA, 25 bp, Homo sapien
gagggtgcaacagctggatcagcca

SEQ ID NO: 1207055 - DNA, 25 bp, Homo sapien
catgcacttcggtcaactcatcttc

SEQ ID NO: 1207056 - DNA, 25 bp, Homo sapien
aaaagttatactggatggagggtgc

SEQ ID NO: 1207057 - DNA, 25 bp, Homo sapien
gggttgcaccaaaggcaacggcaca

SEQ ID NO: 1207058 - DNA, 25 bp, Homo sapien
gaaagtgctgtgaaatgtgggatac

SEQ ID NO: 1207059 - DNA, 25 bp, Homo sapien
cattcactctgcttattggaagaac

SEQ ID NO: 1207060 - DNA, 25 bp, Homo sapien
gattgctggtgcagcattgtctagc

SEQ ID NO: 1207061 - DNA, 25 bp, Homo sapien
gccactactcctgcagagttggaaa

SEQ ID NO: 1207062 - DNA, 25 bp, Homo sapien
atgaaagtgaattagcagaaacatc

SEQ ID NO: 1207063 - DNA, 25 bp, Homo sapien
catgaaagtgaattagcagaaacat

SEQ ID NO: 1207064 - DNA, 25 bp, Homo sapien
caaggtgactactctgagaatcact

SEQ ID NO: 1207065 - DNA, 25 bp, Homo sapien
ggtgactactctgagaatcactcat

SEQ ID NO: 1207066 - DNA, 25 bp, Homo sapien
tcttccaaggtgactactctgagaa

SEQ ID NO: 1207067 - DNA, 25 bp, Homo sapien
tccaaggtgactactctgagaatca

SEQ ID NO: 1207068 - DNA, 25 bp, Homo sapien
aagttggtttaggtggcgaatacat

SEQ ID NO: 1207069 - DNA, 25 bp, Homo sapien
tggcgaatacatggtgttgatgaag

SEQ ID NO: 1207070 - DNA, 25 bp, Homo sapien
ttctgaaagttggtttaggtggcga

SEQ ID NO: 1207071 - DNA, 25 bp, Homo sapien
gtttaggtggcgaatacatggtgtt

SEQ ID NO: 1207072 - DNA, 25 bp, Homo sapien
ccagtaccttcatgggtagcctctt

SEQ ID NO: 1207073 - DNA, 25 bp, Homo sapien
aaccagtaccttcatgggtagcctc

SEQ ID NO: 1207074 - DNA, 25 bp, Homo sapien
accagtaccttcatgggtagcctct

SEQ ID NO: 1207075 - DNA, 25 bp, Homo sapien
tgaaggagattaaatgggtgctagg

SEQ ID NO: 1207076 - DNA, 25 bp, Homo sapien
atgcacactatccacggaagtgaag

SEQ ID NO: 1207077 - DNA, 25 bp, Homo sapien
atgggtgctaggcagcatcagcttc

SEQ ID NO: 1207078 - DNA, 25 bp, Homo sapien
tatccacggaagtgaaggagattaa

SEQ ID NO: 1207079 - DNA, 25 bp, Homo sapien
aaacagctgctccataacactcctg

SEQ ID NO: 1207080 - DNA, 25 bp, Homo sapien
gctccataacactcctgcaggtata

SEQ ID NO: 1207081 - DNA, 25 bp, Homo sapien
tatattgcaattcgctgtccctcag

SEQ ID NO: 1207082 - DNA, 25 bp, Homo sapien
tcctgcaggtatattgcaattcgct

SEQ ID NO: 1207083 - DNA, 25 bp, Homo sapien
tcttctctgcttcttgagagcactg

SEQ ID NO: 1207084 - DNA, 25 bp, Homo sapien
cttcttgagagcactgcagggcaga

SEQ ID NO: 1207085 - DNA, 25 bp, Homo sapien
tcttgagagcactgcagggcagaaa

SEQ ID NO: 1207086 - DNA, 25 bp, Homo sapien
ctctgcttcttgagagcactgcagg

SEQ ID NO: 1207087 - DNA, 25 bp, Homo sapien
tgaaatcaagggttctcaagcccat

SEQ ID NO: 1207088 - DNA, 25 bp, Homo sapien
tccttctcgatattttctggtaacc

SEQ ID NO: 1207089 - DNA, 25 bp, Homo sapien
taacccgtgaaatcaagggttctca

SEQ ID NO: 1207090 - DNA, 25 bp, Homo sapien
tattttctggtaacccgtgaaatca

SEQ ID NO: 1207091 - DNA, 25 bp, Homo sapien
agagggattaacctcgggtgcttct

SEQ ID NO: 1207092 - DNA, 25 bp, Homo sapien
gagagggattaacctcgggtgcttc

SEQ ID NO: 1207093 - DNA, 25 bp, Homo sapien
gaatagagcttgtatcaatcattgg

SEQ ID NO: 1207094 - DNA, 25 bp, Homo sapien
agcttgtatcaatcattgggaccca

SEQ ID NO: 1207095 - DNA, 25 bp, Homo sapien
tcactgaatagagcttgtatcaatc

SEQ ID NO: 1207096 - DNA, 25 bp, Homo sapien
tagagcttgtatcaatcattgggac

SEQ ID NO: 1207097 - DNA, 25 bp, Homo sapien
cttgcgtaggagccaagctaatttt

SEQ ID NO: 1207098 - DNA, 25 bp, Homo sapien
ccttgcgtaggagccaagctaattt

SEQ ID NO: 1207099 - DNA, 25 bp, Homo sapien
tccttgcgtaggagccaagctaatt

SEQ ID NO: 1207100 - DNA, 25 bp, Homo sapien
tatttgcatggcagaaattgcatca

SEQ ID NO: 1207101 - DNA, 25 bp, Homo sapien
ccataggaagtaggttctatttgca

SEQ ID NO: 1207102 - DNA, 25 bp, Homo sapien
cactgatatcagatactccatagga

SEQ ID NO: 1207103 - DNA, 25 bp, Homo sapien
tgctgaatacttgacatgggaactg

SEQ ID NO: 1207104 - DNA, 25 bp, Homo sapien
tttcttaagtccttccagcgtgtcc

SEQ ID NO: 1207105 - DNA, 25 bp, Homo sapien
accatagtctctggtcctgtggctg

SEQ ID NO: 1207106 - DNA, 25 bp, Homo sapien
tgctgagcttggactccaccatagt

SEQ ID NO: 1207107 - DNA, 25 bp, Homo sapien
gcattctgcctcaaagtccctgcca

SEQ ID NO: 1207108 - DNA, 25 bp, Homo sapien
cattgaagctagtgctacttcctaa

SEQ ID NO: 1207109 - DNA, 25 bp, Homo sapien
tggagaaacgaagcacttaaataat

SEQ ID NO: 1207110 - DNA, 25 bp, Homo sapien
cttcaaattgtggagaaacgaagca

SEQ ID NO: 1207111 - DNA, 25 bp, Homo sapien
taatttccattgaagctagtgctac

SEQ ID NO: 1207112 - DNA, 25 bp, Homo sapien
atgtctaaagcacagccacaagttc

SEQ ID NO: 1207113 - DNA, 25 bp, Homo sapien
tggcactaactgtgaccaactgaat

SEQ ID NO: 1207114 - DNA, 25 bp, Homo sapien
tgtatcaatccaatagaagctgcta

SEQ ID NO: 1207115 - DNA, 25 bp, Homo sapien
gaccaactgaattgtgaaagctgat

SEQ ID NO: 1207116 - DNA, 25 bp, Homo sapien
ctgaattgtgaaagctgattgcagt

SEQ ID NO: 1207117 - DNA, 25 bp, Homo sapien
aggaaagttctgcaaaagagatctt

SEQ ID NO: 1207118 - DNA, 25 bp, Homo sapien
tgcaaaagagatcttccccacttcc

SEQ ID NO: 1207119 - DNA, 25 bp, Homo sapien
ccaggaaagttctgcaaaagagatc

SEQ ID NO: 1207120 - DNA, 25 bp, Homo sapien
ctccaggaaagttctgcaaaagaga

SEQ ID NO: 1207121 - DNA, 25 bp, Homo sapien
aactcctggaacaaggggttcatgg

SEQ ID NO: 1207122 - DNA, 25 bp, Homo sapien
agtgcctgtcgggagtccccatcca

SEQ ID NO: 1207123 - DNA, 25 bp, Homo sapien
ggagtccccatccaaactcctggaa

SEQ ID NO: 1207124 - DNA, 25 bp, Homo sapien
tgcctgtcgggagtccccatccaaa

SEQ ID NO: 1207125 - DNA, 25 bp, Homo sapien
aataaagcaaacgtctctttctagg

SEQ ID NO: 1207126 - DNA, 25 bp, Homo sapien
ataaagcaaacgtctctttctaggt

SEQ ID NO: 1207127 - DNA, 25 bp, Homo sapien
atctgaagagtatgtgccaagtaca

SEQ ID NO: 1207128 - DNA, 25 bp, Homo sapien
tatttgggacctgacagcaattcag

SEQ ID NO: 1207129 - DNA, 25 bp, Homo sapien
aagcatgagtgttactggggcagac

SEQ ID NO: 1207130 - DNA, 25 bp, Homo sapien
tgccaagtacattcagggtggcttt

SEQ ID NO: 1207131 - DNA, 25 bp, Homo sapien
caatttctaaccaaatccttttgtg

SEQ ID NO: 1207132 - DNA, 25 bp, Homo sapien
tccttttgtgcactatcttcttctt

SEQ ID NO: 1207133 - DNA, 25 bp, Homo sapien
tcttcttctattctaagtggaatct

SEQ ID NO: 1207134 - DNA, 25 bp, Homo sapien
ttttgtgcactatcttcttcttcta

SEQ ID NO: 1207135 - DNA, 25 bp, Homo sapien
aggaacctcacactgttgattattt

SEQ ID NO: 1207136 - DNA, 25 bp, Homo sapien
tgtgctctggatcaccttgcttccc

SEQ ID NO: 1207137 - DNA, 25 bp, Homo sapien
ctgtgctctggatcaccttgcttcc

SEQ ID NO: 1207138 - DNA, 25 bp, Homo sapien
acctcacactgttgattatttctat

SEQ ID NO: 1207139 - DNA, 25 bp, Homo sapien
atttgtggcactttatcttcttcct

SEQ ID NO: 1207140 - DNA, 25 bp, Homo sapien
atcccacatcagccttatacctcct

SEQ ID NO: 1207141 - DNA, 25 bp, Homo sapien
tcccacatcagccttatacctccta

SEQ ID NO: 1207142 - DNA, 25 bp, Homo sapien
tatttgtggcactttatcttcttcc

SEQ ID NO: 1207143 - DNA, 25 bp, Homo sapien
ctacgtttccttagaggtcagtggg

SEQ ID NO: 1207144 - DNA, 25 bp, Homo sapien
agaacgtgctcctatcactcagcaa

SEQ ID NO: 1207145 - DNA, 25 bp, Homo sapien
aaagttctaccccataatcactggg

SEQ ID NO: 1207146 - DNA, 25 bp, Homo sapien
taggtgctgtatgccagaaactggg

SEQ ID NO: 1207147 - DNA, 25 bp, Homo sapien
cagcttcaatccagagaaacgtggg

SEQ ID NO: 1207148 - DNA, 25 bp, Homo sapien
aaacgtgggaatgcccactctacca

SEQ ID NO: 1207149 - DNA, 25 bp, Homo sapien
ggcagtgtgacttaaacctaagtac

SEQ ID NO: 1207150 - DNA, 25 bp, Homo sapien
taaacctaagtactgtcctcccagc

SEQ ID NO: 1207151 - DNA, 25 bp, Homo sapien
gcagaatcgaaacacaaagtcagag

SEQ ID NO: 1207152 - DNA, 25 bp, Homo sapien
gtctctgctaaaggccggtggcaga

SEQ ID NO: 1207153 - DNA, 25 bp, Homo sapien
tgagtaggcaacaccaccaagaagc

SEQ ID NO: 1207154 - DNA, 25 bp, Homo sapien
tcaggaaccaattcatgagtaggca

SEQ ID NO: 1207155 - DNA, 25 bp, Homo sapien
gactcaaggggtttgtaatgagacc

SEQ ID NO: 1207156 - DNA, 25 bp, Homo sapien
tgagaaaattcaggcccacagttca

SEQ ID NO: 1207157 - DNA, 25 bp, Homo sapien
tgtaatgagacctaagaggtggcaa

SEQ ID NO: 1207158 - DNA, 25 bp, Homo sapien
aatgagacctaagaggtggcaaagg

SEQ ID NO: 1207159 - DNA, 25 bp, Homo sapien
caacatttggcaagctgatgcagag

SEQ ID NO: 1207160 - DNA, 25 bp, Homo sapien
atggtaaattacatagccagtttgg

SEQ ID NO: 1207161 - DNA, 25 bp, Homo sapien
ccttttatagtttggcagatggtta

SEQ ID NO: 1207162 - DNA, 25 bp, Homo sapien
gccagtttggctcctagtcttttct

SEQ ID NO: 1207163 - DNA, 25 bp, Homo sapien
cagatggttattgacattcttgtag

SEQ ID NO: 1207164 - DNA, 25 bp, Homo sapien
tcattgagcaaaagaaaagtgcagc

SEQ ID NO: 1207165 - DNA, 25 bp, Homo sapien
gacacatcagactacagtaaccctt

SEQ ID NO: 1207166 - DNA, 25 bp, Homo sapien
caagcaagtctttccctggactctg

SEQ ID NO: 1207167 - DNA, 25 bp, Homo sapien
ctttttccaacattagtgacctgct

SEQ ID NO: 1207168 - DNA, 25 bp, Homo sapien
caataggtgtaagtccgtgctttaa

SEQ ID NO: 1207169 - DNA, 25 bp, Homo sapien
tccgtgctttaaagactcttgtaaa

SEQ ID NO: 1207170 - DNA, 25 bp, Homo sapien
taagtccgtgctttaaagactcttg

SEQ ID NO: 1207171 - DNA, 25 bp, Homo sapien
gtgtaagtccgtgctttaaagactc

SEQ ID NO: 1207172 - DNA, 25 bp, Homo sapien
aaagatgcgaaatggttgtgtgctg

SEQ ID NO: 1207173 - DNA, 25 bp, Homo sapien
gagctgccgggaaggactccttgcc

SEQ ID NO: 1207174 - DNA, 25 bp, Homo sapien
gcggttctgcccgacgaaaaagatg

SEQ ID NO: 1207175 - DNA, 25 bp, Homo sapien
gcggaaccggagctgcgcggagctg

SEQ ID NO: 1207176 - DNA, 25 bp, Homo sapien
cttaccctctttaattcacccatgg

SEQ ID NO: 1207177 - DNA, 25 bp, Homo sapien
gatcggcgtgcgtggtctcccgacc

SEQ ID NO: 1207178 - DNA, 25 bp, Homo sapien
tctcccgacccagctcaactctatt

SEQ ID NO: 1207179 - DNA, 25 bp, Homo sapien
gggagactgtgagggatcggcgtgc

SEQ ID NO: 1207180 - DNA, 25 bp, Homo sapien
ggttgcagagaaaagtgcaacagcg

SEQ ID NO: 1207181 - DNA, 25 bp, Homo sapien
gcagagaaaagtgcaacagcgtctc

SEQ ID NO: 1207182 - DNA, 25 bp, Homo sapien
gaaaagtgcaacagcgtctctttcc

SEQ ID NO: 1207183 - DNA, 25 bp, Homo sapien
agtgcaacagcgtctctttccccta

SEQ ID NO: 1207184 - DNA, 25 bp, Homo sapien
tttacgctcagagtgtaccgcctcg

SEQ ID NO: 1207185 - DNA, 25 bp, Homo sapien
gccccttatgggctggaccgacagt

SEQ ID NO: 1207186 - DNA, 25 bp, Homo sapien
gcctcggtcccttgcgatgtgagtt

SEQ ID NO: 1207187 - DNA, 25 bp, Homo sapien
tcttgaggtttagtccccagcagcc

SEQ ID NO: 1207188 - DNA, 25 bp, Homo sapien
gaatccggcgcccggaagtgcctgc

SEQ ID NO: 1207189 - DNA, 25 bp, Homo sapien
atccggcgcccggaagtgcctgcac

SEQ ID NO: 1207190 - DNA, 25 bp, Homo sapien
cggaatccggcgcccggaagtgcct

SEQ ID NO: 1207191 - DNA, 25 bp, Homo sapien
cggcgcccggaagtgcctgcacagg

SEQ ID NO: 1207192 - DNA, 25 bp, Homo sapien
gagcttgctggaggttatcactgaa

SEQ ID NO: 1207193 - DNA, 25 bp, Homo sapien
tgttaactctggtcactacctgtgg

SEQ ID NO: 1207194 - DNA, 25 bp, Homo sapien
taagccccaactatgagaatcagaa

SEQ ID NO: 1207195 - DNA, 25 bp, Homo sapien
cattctaaataaagctcgctggagg

SEQ ID NO: 1207196 - DNA, 25 bp, Homo sapien
cttgcaataccttcctccttcgaaa

SEQ ID NO: 1207197 - DNA, 25 bp, Homo sapien
acttgcacaaaacttgcaatacctt

SEQ ID NO: 1207198 - DNA, 25 bp, Homo sapien
caaaacttgcaataccttcctcctt

SEQ ID NO: 1207199 - DNA, 25 bp, Homo sapien
gcaataccttcctccttcgaaacaa

SEQ ID NO: 1207200 - DNA, 25 bp, Homo sapien
ccggttctgactttgtcttaaagtg

SEQ ID NO: 1207201 - DNA, 25 bp, Homo sapien
ttctttccgacgagacaggtctcca

SEQ ID NO: 1207202 - DNA, 25 bp, Homo sapien
tcccgcagccttgatgagccggaga

SEQ ID NO: 1207203 - DNA, 25 bp, Homo sapien
ggttgcaattacgaaggatgatggc

SEQ ID NO: 1207204 - DNA, 25 bp, Homo sapien
tatttgagaatggttctgggttccc

SEQ ID NO: 1207205 - DNA, 25 bp, Homo sapien
cagaaagccctctccgaaaggaagc

SEQ ID NO: 1207206 - DNA, 25 bp, Homo sapien
gccacaatatgaagacagccaagtg

SEQ ID NO: 1207207 - DNA, 25 bp, Homo sapien
gaggaacccgagtttgcggtgtcta

SEQ ID NO: 1207208 - DNA, 25 bp, Homo sapien
gctctgcaagggatttaaggaagca

SEQ ID NO: 1207209 - DNA, 25 bp, Homo sapien
tgcaagggatttaaggaagcagctg

SEQ ID NO: 1207210 - DNA, 25 bp, Homo sapien
caggtagctctgcaagggatttaag

SEQ ID NO: 1207211 - DNA, 25 bp, Homo sapien
ttcctcaggtagctctgcaagggat

SEQ ID NO: 1207212 - DNA, 25 bp, Homo sapien
tgtgaccatgctcataacgccagct

SEQ ID NO: 1207213 - DNA, 25 bp, Homo sapien
tggcaaaaggccagctggcactcat

SEQ ID NO: 1207214 - DNA, 25 bp, Homo sapien
gggacttgcttaggccacactagcg

SEQ ID NO: 1207215 - DNA, 25 bp, Homo sapien
ccacatccccgaaagatggagagtg

SEQ ID NO: 1207216 - DNA, 25 bp, Homo sapien
atgagaggcgggccacaagccaaga

SEQ ID NO: 1207217 - DNA, 25 bp, Homo sapien
aaggggccgagggtcagctcaatga

SEQ ID NO: 1207218 - DNA, 25 bp, Homo sapien
agggtcagctcaatgagaggcgggc

SEQ ID NO: 1207219 - DNA, 25 bp, Homo sapien
gccgagggtcagctcaatgagaggc

SEQ ID NO: 1207220 - DNA, 25 bp, Homo sapien
ctgaagaggcgacacgtgggccccg

SEQ ID NO: 1207221 - DNA, 25 bp, Homo sapien
tgaagaggcgacacgtgggccccgg

SEQ ID NO: 1207222 - DNA, 25 bp, Homo sapien
gaggcgacacgtgggccccggcgcc

SEQ ID NO: 1207223 - DNA, 25 bp, Homo sapien
aagaggcgacacgtgggccccggcg

SEQ ID NO: 1207224 - DNA, 25 bp, Homo sapien
gcttcaactccccagggcactgaga

SEQ ID NO: 1207225 - DNA, 25 bp, Homo sapien
agttggtctgcggtcaagggtcctc

SEQ ID NO: 1207226 - DNA, 25 bp, Homo sapien
atgcagagttggtctgcggtcaagg

SEQ ID NO: 1207227 - DNA, 25 bp, Homo sapien
cggtcaagggtcctccagcttcaac

SEQ ID NO: 1207228 - DNA, 25 bp, Homo sapien
tgagcgtggcggcgaaggagaagca

SEQ ID NO: 1207229 - DNA, 25 bp, Homo sapien
aagcgacctctgtctgagcgtggcg

SEQ ID NO: 1207230 - DNA, 25 bp, Homo sapien
agctagtcagaagcgacctctgtct

SEQ ID NO: 1207231 - DNA, 25 bp, Homo sapien
tcagaagcgacctctgtctgagcgt

SEQ ID NO: 1207232 - DNA, 25 bp, Homo sapien
cgccctctggctcaggatcggcagg

SEQ ID NO: 1207233 - DNA, 25 bp, Homo sapien
tctggttcggctccgcaagggcgca

SEQ ID NO: 1207234 - DNA, 25 bp, Homo sapien
gagttgtgaagttccaacctccctc

SEQ ID NO: 1207235 - DNA, 25 bp, Homo sapien
tgctcactatcgcaagtgtggagtt

SEQ ID NO: 1207236 - DNA, 25 bp, Homo sapien
gggcgaccgggatgcctgctaaccc

SEQ ID NO: 1207237 - DNA, 25 bp, Homo sapien
ggctgccgggcaggacctctgagcc

SEQ ID NO: 1207238 - DNA, 25 bp, Homo sapien
acagattcaactccggcgaaaagaa

SEQ ID NO: 1207239 - DNA, 25 bp, Homo sapien
ctctgagccctgtccggtctcgcag

SEQ ID NO: 1207240 - DNA, 25 bp, Homo sapien
gatgggggatccgtgtcggtccgga

SEQ ID NO: 1207241 - DNA, 25 bp, Homo sapien
caaggcgaccgcgggcggggatggg

SEQ ID NO: 1207242 - DNA, 25 bp, Homo sapien
gatccgtgtcggtccggaagcccag

SEQ ID NO: 1207243 - DNA, 25 bp, Homo sapien
gacaaggcgaccgcgggcggggatg

SEQ ID NO: 1207244 - DNA, 25 bp, Homo sapien
tgttccccatgcgatcgagccagtc

SEQ ID NO: 1207245 - DNA, 25 bp, Homo sapien
agggcttccgtctccactttgggca

SEQ ID NO: 1207246 - DNA, 25 bp, Homo sapien
tggccctgttccccatgcgatcgag

SEQ ID NO: 1207247 - DNA, 25 bp, Homo sapien
ccagggcttccgtctccactttggg

SEQ ID NO: 1207248 - DNA, 25 bp, Homo sapien
tgtggtcacatgtattctaatagcg

SEQ ID NO: 1207249 - DNA, 25 bp, Homo sapien
taagacaatcctttcggaggtcacc

SEQ ID NO: 1207250 - DNA, 25 bp, Homo sapien
tgtagttgactttcctagactgggt

SEQ ID NO: 1207251 - DNA, 25 bp, Homo sapien
gactttcctagactgggtcgcctcc

SEQ ID NO: 1207252 - DNA, 25 bp, Homo sapien
gcaatgttgaattgtccaaatccga

SEQ ID NO: 1207253 - DNA, 25 bp, Homo sapien
gttgaattgtccaaatccgagctgg

SEQ ID NO: 1207254 - DNA, 25 bp, Homo sapien
tctgccagcaatgttgaattgtcca

SEQ ID NO: 1207255 - DNA, 25 bp, Homo sapien
gccagcaatgttgaattgtccaaat

SEQ ID NO: 1207256 - DNA, 25 bp, Homo sapien
cgaagaaagaccgaggcatgaggta

SEQ ID NO: 1207257 - DNA, 25 bp, Homo sapien
ccgacatcgaagaaagaccgaggca

SEQ ID NO: 1207258 - DNA, 25 bp, Homo sapien
agaccgaggcatgaggtagagactc

SEQ ID NO: 1207259 - DNA, 25 bp, Homo sapien
ctcggggacccgacatcgaagaaag

SEQ ID NO: 1207260 - DNA, 25 bp, Homo sapien
cagacccacgaaggcgtcttcgcag

SEQ ID NO: 1207261 - DNA, 25 bp, Homo sapien
tgccgggatcgggtaaccgccttgc

SEQ ID NO: 1207262 - DNA, 25 bp, Homo sapien
ggacgcagacccacgaaggcgtctt

SEQ ID NO: 1207263 - DNA, 25 bp, Homo sapien
ttgctccggacgcagacccacgaag

SEQ ID NO: 1207264 - DNA, 25 bp, Homo sapien
cacacgggacaaagctcttccagat

SEQ ID NO: 1207265 - DNA, 25 bp, Homo sapien
cagatcttcatcataggagtaattc

SEQ ID NO: 1207266 - DNA, 25 bp, Homo sapien
aggtgaggagcccataatggtaccc

SEQ ID NO: 1207267 - DNA, 25 bp, Homo sapien
gacactttatctccacacacgggac

SEQ ID NO: 1207268 - DNA, 25 bp, Homo sapien
ttttcaggtagcaatgtgtgagcaa

SEQ ID NO: 1207269 - DNA, 25 bp, Homo sapien
aatcacacagttgggaatttaggct

SEQ ID NO: 1207270 - DNA, 25 bp, Homo sapien
gacttatagcacagaaatactctga

SEQ ID NO: 1207271 - DNA, 25 bp, Homo sapien
tattccctttcaagaacaacgatgc

SEQ ID NO: 1207272 - DNA, 25 bp, Homo sapien
ggcagttctggttttctatacatgt

SEQ ID NO: 1207273 - DNA, 25 bp, Homo sapien
taaggacaacgctttctctgtgttt

SEQ ID NO: 1207274 - DNA, 25 bp, Homo sapien
ctagcttcattccaacacttagaca

SEQ ID NO: 1207275 - DNA, 25 bp, Homo sapien
agacatttttgaaaacgacagtaag

SEQ ID NO: 1207276 - DNA, 25 bp, Homo sapien
taggcagtagtctttagaagaatct

SEQ ID NO: 1207277 - DNA, 25 bp, Homo sapien
ataggcagtagtctttagaagaatc

SEQ ID NO: 1207278 - DNA, 25 bp, Homo sapien
tagcccattatggactcgggtgagc

SEQ ID NO: 1207279 - DNA, 25 bp, Homo sapien
tagcttggatcacctgagacatggc

SEQ ID NO: 1207280 - DNA, 25 bp, Homo sapien
taagtccattggctcggatgagggc

SEQ ID NO: 1207281 - DNA, 25 bp, Homo sapien
gaagaagatactactcctggcccac

SEQ ID NO: 1207282 - DNA, 25 bp, Homo sapien
aaaggggtgctgtaagttgtaatag

SEQ ID NO: 1207283 - DNA, 25 bp, Homo sapien
ctcttaaaaggggtgctgtaagttg

SEQ ID NO: 1207284 - DNA, 25 bp, Homo sapien
cccaaactaagagctacacaaaatc

SEQ ID NO: 1207285 - DNA, 25 bp, Homo sapien
atactttatgttaaatgccagcccc

SEQ ID NO: 1207286 - DNA, 25 bp, Homo sapien
gccccataaatttaagctgccacag

SEQ ID NO: 1207287 - DNA, 25 bp, Homo sapien
gctgccacagtcctgaagtcaaggt

SEQ ID NO: 1207288 - DNA, 25 bp, Homo sapien
aaactaagagactataattgcattg

SEQ ID NO: 1207289 - DNA, 25 bp, Homo sapien
taggtccttaattagtactgattaa

SEQ ID NO: 1207290 - DNA, 25 bp, Homo sapien
acacatgtaatagtttttgccaatg

SEQ ID NO: 1207291 - DNA, 25 bp, Homo sapien
tataaaaattatgtagattctgcac

SEQ ID NO: 1207292 - DNA, 25 bp, Homo sapien
tattctctgcggctgtctttatttt

SEQ ID NO: 1207293 - DNA, 25 bp, Homo sapien
tcttaatgccttacagccgctagct

SEQ ID NO: 1207294 - DNA, 25 bp, Homo sapien
aagtcactgtaaaatttatccacag

SEQ ID NO: 1207295 - DNA, 25 bp, Homo sapien
aacaccgtaattgattgaaaaatgc

SEQ ID NO: 1207296 - DNA, 25 bp, Homo sapien
gcacagcccatatgccgtcactgaa

SEQ ID NO: 1207297 - DNA, 25 bp, Homo sapien
caggatataatcgtgtttggccgct

SEQ ID NO: 1207298 - DNA, 25 bp, Homo sapien
taaactatccgcagagggtagggca

SEQ ID NO: 1207299 - DNA, 25 bp, Homo sapien
ggcccagaagtgctgaatccactgt

SEQ ID NO: 1207300 - DNA, 25 bp, Homo sapien
gacagtttcatgaatgcctgtgtca

SEQ ID NO: 1207301 - DNA, 25 bp, Homo sapien
tatggacagtttcatgaatgcctgt

SEQ ID NO: 1207302 - DNA, 25 bp, Homo sapien
ctttccaattttattgtatatgctg

SEQ ID NO: 1207303 - DNA, 25 bp, Homo sapien
atctttccaattttattgtatatgc

SEQ ID NO: 1207304 - DNA, 25 bp, Homo sapien
caaaagtctcgaattagctcttaat

SEQ ID NO: 1207305 - DNA, 25 bp, Homo sapien
tacaaaagtctcgaattagctctta

SEQ ID NO: 1207306 - DNA, 25 bp, Homo sapien
agaatacaaaagtctcgaattagct

SEQ ID NO: 1207307 - DNA, 25 bp, Homo sapien
aatacaaaagtctcgaattagctct

SEQ ID NO: 1207308 - DNA, 25 bp, Homo sapien
tagagaccatgaatcaaacctgctg

SEQ ID NO: 1207309 - DNA, 25 bp, Homo sapien
tgcttaacacctgaagagaccttag

SEQ ID NO: 1207310 - DNA, 25 bp, Homo sapien
tgagttggccatagcacaaacaggc

SEQ ID NO: 1207311 - DNA, 25 bp, Homo sapien
caaacaggcattgactgagaagagc

SEQ ID NO: 1207312 - DNA, 25 bp, Homo sapien
gctgaaaccataagtttcagggagc

SEQ ID NO: 1207313 - DNA, 25 bp, Homo sapien
cgccccatggaggatatgtttccat

SEQ ID NO: 1207314 - DNA, 25 bp, Homo sapien
tccatggaaactattagtgctcaac

SEQ ID NO: 1207315 - DNA, 25 bp, Homo sapien
tgctcaactacgctgaaaccataag

SEQ ID NO: 1207316 - DNA, 25 bp, Homo sapien
aacagggcatttagacaggtgatag

SEQ ID NO: 1207317 - DNA, 25 bp, Homo sapien
gctcttgcaggtacaacatgctgta

SEQ ID NO: 1207318 - DNA, 25 bp, Homo sapien
tgaaaggccagttacatccatgctc

SEQ ID NO: 1207319 - DNA, 25 bp, Homo sapien
aaagcacaattacggccaggcgcag

SEQ ID NO: 1207320 - DNA, 25 bp, Homo sapien
ccaagctgcagaagaataggtcaga

SEQ ID NO: 1207321 - DNA, 25 bp, Homo sapien
catataggttcagagggcaaagtcc

SEQ ID NO: 1207322 - DNA, 25 bp, Homo sapien
tgactttgtatgacagtgtgcagac

SEQ ID NO: 1207323 - DNA, 25 bp, Homo sapien
tgtatgatctacttcccaagctgca

SEQ ID NO: 1207324 - DNA, 25 bp, Homo sapien
acaaggtaatgcctaagcgtgcttc

SEQ ID NO: 1207325 - DNA, 25 bp, Homo sapien
aggacaaggtaatgcctaagcgtgc

SEQ ID NO: 1207326 - DNA, 25 bp, Homo sapien
ggacaaggtaatgcctaagcgtgct

SEQ ID NO: 1207327 - DNA, 25 bp, Homo sapien
tgaggacaaggtaatgcctaagcgt

SEQ ID NO: 1207328 - DNA, 25 bp, Homo sapien
tgtcatggacagaaacccttacacc

SEQ ID NO: 1207329 - DNA, 25 bp, Homo sapien
tgaagtagaacagccttgtcatgga

SEQ ID NO: 1207330 - DNA, 25 bp, Homo sapien
tcctggtaggtcaagaacgtagcat

SEQ ID NO: 1207331 - DNA, 25 bp, Homo sapien
gaagacactagtgaccatctctggg

SEQ ID NO: 1207332 - DNA, 25 bp, Homo sapien
cagatttgccttatactcaagtgta

SEQ ID NO: 1207333 - DNA, 25 bp, Homo sapien
tcctaaggtgaaatgagacagggct

SEQ ID NO: 1207334 - DNA, 25 bp, Homo sapien
caaaagtgggagcaattatgtaaac

SEQ ID NO: 1207335 - DNA, 25 bp, Homo sapien
tgtgcagcagagtgttttcaggtct

SEQ ID NO: 1207336 - DNA, 25 bp, Homo sapien
gctatttatagtcctgaaagcagca

SEQ ID NO: 1207337 - DNA, 25 bp, Homo sapien
gcaaattgacagcatggaaatgtcc

SEQ ID NO: 1207338 - DNA, 25 bp, Homo sapien
aaacagatttcaatggtgggtaggg

SEQ ID NO: 1207339 - DNA, 25 bp, Homo sapien
gaaagcagcatgactctgtgcacac

SEQ ID NO: 1207340 - DNA, 25 bp, Homo sapien
caaaaaggcaagcaatcaacgctga

SEQ ID NO: 1207341 - DNA, 25 bp, Homo sapien
gcaatcaacgctgattttcgtaagg

SEQ ID NO: 1207342 - DNA, 25 bp, Homo sapien
aatcaacgctgattttcgtaaggaa

SEQ ID NO: 1207343 - DNA, 25 bp, Homo sapien
ggcaagcaatcaacgctgattttcg

SEQ ID NO: 1207344 - DNA, 25 bp, Homo sapien
tcccagcagtgcgaggctagtaagc

SEQ ID NO: 1207345 - DNA, 25 bp, Homo sapien
tcacgaggaccaagtatagccattt

SEQ ID NO: 1207346 - DNA, 25 bp, Homo sapien
caaggactgggtatcttaaccgact

SEQ ID NO: 1207347 - DNA, 25 bp, Homo sapien
tatgtcattgattcctcacgaggac

SEQ ID NO: 1207348 - DNA, 25 bp, Homo sapien
gaacccttcaagtgcacgcaacaga

SEQ ID NO: 1207349 - DNA, 25 bp, Homo sapien
gatataaggctcgtaaagactcttg

SEQ ID NO: 1207350 - DNA, 25 bp, Homo sapien
gctgctcaacttgtgctacaacggt

SEQ ID NO: 1207351 - DNA, 25 bp, Homo sapien
cctcagcccacagtgttaaaaggag

SEQ ID NO: 1207352 - DNA, 25 bp, Homo sapien
tggaaatcactggtacgttgaggtt

SEQ ID NO: 1207353 - DNA, 25 bp, Homo sapien
ctggaaatcactggtacgttgaggt

SEQ ID NO: 1207354 - DNA, 25 bp, Homo sapien
atactgcaggctgggtacttaggac

SEQ ID NO: 1207355 - DNA, 25 bp, Homo sapien
gacaacaaatggcattgtcccgtga

SEQ ID NO: 1207356 - DNA, 25 bp, Homo sapien
gaaagttgccacatagtatcgacag

SEQ ID NO: 1207357 - DNA, 25 bp, Homo sapien
gtttccgactcccacactgatactg

SEQ ID NO: 1207358 - DNA, 25 bp, Homo sapien
cttgtggaatcgctccagggccatt

SEQ ID NO: 1207359 - DNA, 25 bp, Homo sapien
tccttcaggatgagaccctgccctt

SEQ ID NO: 1207360 - DNA, 25 bp, Homo sapien
ttgaaagccaatgcccgttttaggc

SEQ ID NO: 1207361 - DNA, 25 bp, Homo sapien
cgacagagtgtaaatgtaaagcagc

SEQ ID NO: 1207362 - DNA, 25 bp, Homo sapien
taagaatatctgacctaccctatgg

SEQ ID NO: 1207363 - DNA, 25 bp, Homo sapien
tctaagtcctataatgttacctggc

SEQ ID NO: 1207364 - DNA, 25 bp, Homo sapien
gctagcttgccagattataagtgct

SEQ ID NO: 1207365 - DNA, 25 bp, Homo sapien
tacctggcatacgactaatacttga

SEQ ID NO: 1207366 - DNA, 25 bp, Homo sapien
gccagttgggaaaactggtatgatc

SEQ ID NO: 1207367 - DNA, 25 bp, Homo sapien
tgccagttgggaaaactggtatgat

SEQ ID NO: 1207368 - DNA, 25 bp, Homo sapien
aagataatccctgagcatatgtggg

SEQ ID NO: 1207369 - DNA, 25 bp, Homo sapien
taagataatccctgagcatatgtgg

SEQ ID NO: 1207370 - DNA, 25 bp, Homo sapien
ttaagataatccctgagcatatgtg

SEQ ID NO: 1207371 - DNA, 25 bp, Homo sapien
gataatccctgagcatatgtgggaa

SEQ ID NO: 1207372 - DNA, 25 bp, Homo sapien
gaagttacatgctgagcttatggga

SEQ ID NO: 1207373 - DNA, 25 bp, Homo sapien
atttgaagccaagtgtgactccaag

SEQ ID NO: 1207374 - DNA, 25 bp, Homo sapien
gggaagtaactgtatagccagtgcc

SEQ ID NO: 1207375 - DNA, 25 bp, Homo sapien
tgtgccaagcccaagtatttgttga

SEQ ID NO: 1207376 - DNA, 25 bp, Homo sapien
cacgtagttagcctgataatctcca

SEQ ID NO: 1207377 - DNA, 25 bp, Homo sapien
tccaaacgactcacgagtaaaaaca

SEQ ID NO: 1207378 - DNA, 25 bp, Homo sapien
tgataatctccaaacgactcacgag

SEQ ID NO: 1207379 - DNA, 25 bp, Homo sapien
tcagcatcttttatcacgtagttag

SEQ ID NO: 1207380 - DNA, 25 bp, Homo sapien
tatgtgtctatgcaggaaaccctac

SEQ ID NO: 1207381 - DNA, 25 bp, Homo sapien
ggtacaaattagactccaccgcaga

SEQ ID NO: 1207382 - DNA, 25 bp, Homo sapien
tcatcccggagtaagtgcattaacg

SEQ ID NO: 1207383 - DNA, 25 bp, Homo sapien
tgagctaaccagttcacggagggaa

SEQ ID NO: 1207384 - DNA, 25 bp, Homo sapien
tgaaaatatcaagtcttggcggctt

SEQ ID NO: 1207385 - DNA, 25 bp, Homo sapien
tctatagactacaaagccacctgct

SEQ ID NO: 1207386 - DNA, 25 bp, Homo sapien
gattcaaggatgaaccggaaacact

SEQ ID NO: 1207387 - DNA, 25 bp, Homo sapien
ggaaacacttttcaacgagcttgta

SEQ ID NO: 1207388 - DNA, 25 bp, Homo sapien
tctgaaagttattttggtgcctggt

SEQ ID NO: 1207389 - DNA, 25 bp, Homo sapien
ggtgcctggtgtctaaaaaggctat

SEQ ID NO: 1207390 - DNA, 25 bp, Homo sapien
tcaaagtggcatttggccaggcgcg

SEQ ID NO: 1207391 - DNA, 25 bp, Homo sapien
gaagaacagtcatattttgacattc

SEQ ID NO: 1207392 - DNA, 25 bp, Homo sapien
caaaccccagttttcattcatttca

SEQ ID NO: 1207393 - DNA, 25 bp, Homo sapien
aaaccccagttttcattcatttcat

SEQ ID NO: 1207394 - DNA, 25 bp, Homo sapien
ggttataagtgccaggccctagcat

SEQ ID NO: 1207395 - DNA, 25 bp, Homo sapien
tctggtgcgggagaatgttcaccca

SEQ ID NO: 1207396 - DNA, 25 bp, Homo sapien
taagggtggacaagataaacgcagt

SEQ ID NO: 1207397 - DNA, 25 bp, Homo sapien
ggagctgtggcctaacgtcctagca

SEQ ID NO: 1207398 - DNA, 25 bp, Homo sapien
tataaacaagaaagtctccacccat

SEQ ID NO: 1207399 - DNA, 25 bp, Homo sapien
gacacacgtaggtacttaagctaag

SEQ ID NO: 1207400 - DNA, 25 bp, Homo sapien
caatgaactgctaggagaatgcact

SEQ ID NO: 1207401 - DNA, 25 bp, Homo sapien
gcacaggtgcccagaattcatatca

SEQ ID NO: 1207402 - DNA, 25 bp, Homo sapien
ttcctttccatgtaccacttgtcgg

SEQ ID NO: 1207403 - DNA, 25 bp, Homo sapien
gattaagagctcactccagcagttc

SEQ ID NO: 1207404 - DNA, 25 bp, Homo sapien
tgttgcccagtaaccaggaagatgg

SEQ ID NO: 1207405 - DNA, 25 bp, Homo sapien
cacttgtcggtaaatgtggtcgagg

SEQ ID NO: 1207406 - DNA, 25 bp, Homo sapien
gttcactaatatacaccaaagcccc

SEQ ID NO: 1207407 - DNA, 25 bp, Homo sapien
tgctacaacattaagttccgcaggg

SEQ ID NO: 1207408 - DNA, 25 bp, Homo sapien
catctgttcagaaaggtgtaggacc

SEQ ID NO: 1207409 - DNA, 25 bp, Homo sapien
ttgttgatcgaacaaacatctgttc

SEQ ID NO: 1207410 - DNA, 25 bp, Homo sapien
ggctccggcttgtgatgctattatg

SEQ ID NO: 1207411 - DNA, 25 bp, Homo sapien
gttttgccactaactcctgtgcatg

SEQ ID NO: 1207412 - DNA, 25 bp, Homo sapien
taactcctgtgcatgactcatgagg

SEQ ID NO: 1207413 - DNA, 25 bp, Homo sapien
gaactctcgttgatcaaactggaga

SEQ ID NO: 1207414 - DNA, 25 bp, Homo sapien
agagcaccaagaatttcagacatac

SEQ ID NO: 1207415 - DNA, 25 bp, Homo sapien
ctaaactaaagagcaccaagaattt

SEQ ID NO: 1207416 - DNA, 25 bp, Homo sapien
aaagagcaccaagaatttcagacat

SEQ ID NO: 1207417 - DNA, 25 bp, Homo sapien
ctaaagagcaccaagaatttcagac

SEQ ID NO: 1207418 - DNA, 25 bp, Homo sapien
ggaccacaagatatttgaacttcaa

SEQ ID NO: 1207419 - DNA, 25 bp, Homo sapien
catcatttagcaatcgttggttgag

SEQ ID NO: 1207420 - DNA, 25 bp, Homo sapien
aatcgttggttgagcacagcatgag

SEQ ID NO: 1207421 - DNA, 25 bp, Homo sapien
atggaccacaagatatttgaacttc

SEQ ID NO: 1207422 - DNA, 25 bp, Homo sapien
aactgatgtctgctcatggatacaa

SEQ ID NO: 1207423 - DNA, 25 bp, Homo sapien
caactgatgtctgctcatggataca

SEQ ID NO: 1207424 - DNA, 25 bp, Homo sapien
actgatgtctgctcatggatacaat

SEQ ID NO: 1207425 - DNA, 25 bp, Homo sapien
ccaactgatgtctgctcatggatac

SEQ ID NO: 1207426 - DNA, 25 bp, Homo sapien
ttttataagagagcacatgccagcc

SEQ ID NO: 1207427 - DNA, 25 bp, Homo sapien
gggttcatcgcttagcaaaggcaaa

SEQ ID NO: 1207428 - DNA, 25 bp, Homo sapien
cactctatagggagctttgacagca

SEQ ID NO: 1207429 - DNA, 25 bp, Homo sapien
tcaaaagtgatgagacagagttccc

SEQ ID NO: 1207430 - DNA, 25 bp, Homo sapien
catatagcaaatggtacacctggta

SEQ ID NO: 1207431 - DNA, 25 bp, Homo sapien
gagcagctgtagatttgccatatag

SEQ ID NO: 1207432 - DNA, 25 bp, Homo sapien
caactaagggataagaacaggcact

SEQ ID NO: 1207433 - DNA, 25 bp, Homo sapien
tccagtgatgaggtagtcaactaag

SEQ ID NO: 1207434 - DNA, 25 bp, Homo sapien
tctggtcattgctaaactgctttgc

SEQ ID NO: 1207435 - DNA, 25 bp, Homo sapien
aatgataatcacttcttccatggct

SEQ ID NO: 1207436 - DNA, 25 bp, Homo sapien
ttcttgtgccagcaaataacaaatg

SEQ ID NO: 1207437 - DNA, 25 bp, Homo sapien
gaactccaaaatgaattacatctgg

SEQ ID NO: 1207438 - DNA, 25 bp, Homo sapien
ctgcgcctacaagcaggtggccata

SEQ ID NO: 1207439 - DNA, 25 bp, Homo sapien
ctacaagcaggtggccatactgctc

SEQ ID NO: 1207440 - DNA, 25 bp, Homo sapien
gcaacaccaacaccggcgaagcgct

SEQ ID NO: 1207441 - DNA, 25 bp, Homo sapien
accggcgaagcgctgcaccacatca

SEQ ID NO: 1207442 - DNA, 25 bp, Homo sapien
tccgagggaatgctgtggccggctt

SEQ ID NO: 1207443 - DNA, 25 bp, Homo sapien
actgcgtctttcttggcctaaatgg

SEQ ID NO: 1207444 - DNA, 25 bp, Homo sapien
caagaaaagcctgtccccaagaaca

SEQ ID NO: 1207445 - DNA, 25 bp, Homo sapien
tgcagtaggccctaactgcgtcttt

SEQ ID NO: 1207446 - DNA, 25 bp, Homo sapien
gaagggcaaggcataactacacggt

SEQ ID NO: 1207447 - DNA, 25 bp, Homo sapien
tccctgttgatgaggagcccacaat

SEQ ID NO: 1207448 - DNA, 25 bp, Homo sapien
caagtactagtgagtcagtggccaa

SEQ ID NO: 1207449 - DNA, 25 bp, Homo sapien
cacggtagccagtgcagaagataca

SEQ ID NO: 1207450 - DNA, 25 bp, Homo sapien
ccattaattactggagctttgagca

SEQ ID NO: 1207451 - DNA, 25 bp, Homo sapien
tggtactgataatcatccagagtct

SEQ ID NO: 1207452 - DNA, 25 bp, Homo sapien
gaagctctaattctaagtggtactg

SEQ ID NO: 1207453 - DNA, 25 bp, Homo sapien
tacaagcatctcgtaattagcccat

SEQ ID NO: 1207454 - DNA, 25 bp, Homo sapien
gcgattaggctgaaaggacttgcac

SEQ ID NO: 1207455 - DNA, 25 bp, Homo sapien
taagagtacccagagtcctatgact

SEQ ID NO: 1207456 - DNA, 25 bp, Homo sapien
taactcccacgggtcctggaatgaa

SEQ ID NO: 1207457 - DNA, 25 bp, Homo sapien
gaaacagagcactcttgtggaacct

SEQ ID NO: 1207458 - DNA, 25 bp, Homo sapien
tagatggttcctgctaacttgaaac

SEQ ID NO: 1207459 - DNA, 25 bp, Homo sapien
gcataatcttaagaattgatagatg

SEQ ID NO: 1207460 - DNA, 25 bp, Homo sapien
tggttcctgctaacttgaaacccat

SEQ ID NO: 1207461 - DNA, 25 bp, Homo sapien
tcttaagaattgatagatggttcct

SEQ ID NO: 1207462 - DNA, 25 bp, Homo sapien
gtgcccatgaatacaaagcatatgc

SEQ ID NO: 1207463 - DNA, 25 bp, Homo sapien
ccccagctattagactcttaagcaa

SEQ ID NO: 1207464 - DNA, 25 bp, Homo sapien
caaagctcttttcctataatgtgtc

SEQ ID NO: 1207465 - DNA, 25 bp, Homo sapien
gctaatttgtattcagtgcccatga

SEQ ID NO: 1207466 - DNA, 25 bp, Homo sapien
ctatcttaacccagtatattacaca

SEQ ID NO: 1207467 - DNA, 25 bp, Homo sapien
tattaatttttctgacccaaggtga

SEQ ID NO: 1207468 - DNA, 25 bp, Homo sapien
tctgaaagtctttgacttgtctagc

SEQ ID NO: 1207469 - DNA, 25 bp, Homo sapien
ggtgaaatctgtgtccagggtatga

SEQ ID NO: 1207470 - DNA, 25 bp, Homo sapien
cagcctgcatactgatggcccggat

SEQ ID NO: 1207471 - DNA, 25 bp, Homo sapien
tatagggcacatccccgttcaggtg

SEQ ID NO: 1207472 - DNA, 25 bp, Homo sapien
ggcggcattgacttgttcctggaca

SEQ ID NO: 1207473 - DNA, 25 bp, Homo sapien
tagtagaggtattcttcagcctgca

SEQ ID NO: 1207474 - DNA, 25 bp, Homo sapien
tcagctttaccatggaggaatcctg

SEQ ID NO: 1207475 - DNA, 25 bp, Homo sapien
cataagatgagggatactgcctgca

SEQ ID NO: 1207476 - DNA, 25 bp, Homo sapien
ttagtacagattcggtgaccacagg

SEQ ID NO: 1207477 - DNA, 25 bp, Homo sapien
gaccgtgttggtatccatctgtgag

SEQ ID NO: 1207478 - DNA, 25 bp, Homo sapien
taagagtcaacgtagccaggtatgc

SEQ ID NO: 1207479 - DNA, 25 bp, Homo sapien
tcaaccttgggtgaacagacgctgg

SEQ ID NO: 1207480 - DNA, 25 bp, Homo sapien
gatcagcagtgtggatgtaacccgc

SEQ ID NO: 1207481 - DNA, 25 bp, Homo sapien
ataacacgggtgactgagactgcgc

SEQ ID NO: 1207482 - DNA, 25 bp, Homo sapien
actttgttgcatgtcacattatatt

SEQ ID NO: 1207483 - DNA, 25 bp, Homo sapien
gactttgttgcatgtcacattatat

SEQ ID NO: 1207484 - DNA, 25 bp, Homo sapien
gttttaggtcctctctcatatcttt

SEQ ID NO: 1207485 - DNA, 25 bp, Homo sapien
tgtgttttaggtcctctctcatatc

SEQ ID NO: 1207486 - DNA, 25 bp, Homo sapien
ggatggatgattggagctgttttcc

SEQ ID NO: 1207487 - DNA, 25 bp, Homo sapien
cactgatgggatggatgattggagc

SEQ ID NO: 1207488 - DNA, 25 bp, Homo sapien
ccacccccgtgtaggcactgatggg

SEQ ID NO: 1207489 - DNA, 25 bp, Homo sapien
ccgtgtaggcactgatgggatggat

SEQ ID NO: 1207490 - DNA, 25 bp, Homo sapien
tataaagccactgtcaatcccatct

SEQ ID NO: 1207491 - DNA, 25 bp, Homo sapien
gatggtttctctggggtgttcccag

SEQ ID NO: 1207492 - DNA, 25 bp, Homo sapien
tcccagatatataagtggcagatgc

SEQ ID NO: 1207493 - DNA, 25 bp, Homo sapien
tccatccctgggagccggatggttt

SEQ ID NO: 1207494 - DNA, 25 bp, Homo sapien
tggttggtgccgtgatcctgccatg

SEQ ID NO: 1207495 - DNA, 25 bp, Homo sapien
gcattcgggcttccggaacgtggct

SEQ ID NO: 1207496 - DNA, 25 bp, Homo sapien
ttggaatggttggtgccgtgatcct

SEQ ID NO: 1207497 - DNA, 25 bp, Homo sapien
tgccatggcctgagcattcgggctt

SEQ ID NO: 1207498 - DNA, 25 bp, Homo sapien
atgccgtttttttcaggatggtctt

SEQ ID NO: 1207499 - DNA, 25 bp, Homo sapien
tggtctttctagttatgcacctcat

SEQ ID NO: 1207500 - DNA, 25 bp, Homo sapien
caggatggtctttctagttatgcac

SEQ ID NO: 1207501 - DNA, 25 bp, Homo sapien
tttttcaggatggtctttctagtta

SEQ ID NO: 1207502 - DNA, 25 bp, Homo sapien
ctccttgctgcccatcgtctgcttc

SEQ ID NO: 1207503 - DNA, 25 bp, Homo sapien
agtcctccttgctgcccatcgtctg

SEQ ID NO: 1207504 - DNA, 25 bp, Homo sapien
caccctccccccaaggcacttgcct

SEQ ID NO: 1207505 - DNA, 25 bp, Homo sapien
ttgccttccagtctggctgaacaac

SEQ ID NO: 1207506 - DNA, 25 bp, Homo sapien
agaagctggtagaggatagcagctc

SEQ ID NO: 1207507 - DNA, 25 bp, Homo sapien
tgagaagctggtagaggatagcagc

SEQ ID NO: 1207508 - DNA, 25 bp, Homo sapien
ctgagaagctggtagaggatagcag

SEQ ID NO: 1207509 - DNA, 25 bp, Homo sapien
actgagaagctggtagaggatagca

SEQ ID NO: 1207510 - DNA, 25 bp, Homo sapien
aaagtccagcttgcgtgtcgtttct

SEQ ID NO: 1207511 - DNA, 25 bp, Homo sapien
cgtgtcgtttctgtgactctttctg

SEQ ID NO: 1207512 - DNA, 25 bp, Homo sapien
tcttcaaagtccagcttgcgtgtcg

SEQ ID NO: 1207513 - DNA, 25 bp, Homo sapien
ccagcttgcgtgtcgtttctgtgac

SEQ ID NO: 1207514 - DNA, 25 bp, Homo sapien
ggaagcgcagaactctcagcatgag

SEQ ID NO: 1207515 - DNA, 25 bp, Homo sapien
tggaagcgcagaactctcagcatga

SEQ ID NO: 1207516 - DNA, 25 bp, Homo sapien
ggtaaatggtgcaagcagtggcaat

SEQ ID NO: 1207517 - DNA, 25 bp, Homo sapien
gaagcgcagaactctcagcatgaga

SEQ ID NO: 1207518 - DNA, 25 bp, Homo sapien
ctttgccagggcgaatcttcttgtc

SEQ ID NO: 1207519 - DNA, 25 bp, Homo sapien
ttgccagggcgaatcttcttgtccc

SEQ ID NO: 1207520 - DNA, 25 bp, Homo sapien
gccagggcgaatcttcttgtccctt

SEQ ID NO: 1207521 - DNA, 25 bp, Homo sapien
tttgccagggcgaatcttcttgtcc

SEQ ID NO: 1207522 - DNA, 25 bp, Homo sapien
tctgaacctgttggttgatttgaga

SEQ ID NO: 1207523 - DNA, 25 bp, Homo sapien
tctccatagttcttcttgctaagaa

SEQ ID NO: 1207524 - DNA, 25 bp, Homo sapien
gatactctggtaaaactcaagtcct

SEQ ID NO: 1207525 - DNA, 25 bp, Homo sapien
ccttttggctcctgtaagaactcaa

SEQ ID NO: 1207526 - DNA, 25 bp, Homo sapien
gaaatttaggatatcgtaatatgga

SEQ ID NO: 1207527 - DNA, 25 bp, Homo sapien
aaggtttgttaaagccaattccatg

SEQ ID NO: 1207528 - DNA, 25 bp, Homo sapien
tctgcaaaaagcagctaattcctat

SEQ ID NO: 1207529 - DNA, 25 bp, Homo sapien
tccatgtgaatttgtttgccataat

SEQ ID NO: 1207530 - DNA, 25 bp, Homo sapien
tcaagtgactcagctgtctcggcat

SEQ ID NO: 1207531 - DNA, 25 bp, Homo sapien
aaagccctccataggaagtggtggg

SEQ ID NO: 1207532 - DNA, 25 bp, Homo sapien
cttcttggaggcgatcggcaggtct

SEQ ID NO: 1207533 - DNA, 25 bp, Homo sapien
tcttggtccagagaatgatgcgtta

SEQ ID NO: 1207534 - DNA, 25 bp, Homo sapien
tctttctaactcataggtatccagg

SEQ ID NO: 1207535 - DNA, 25 bp, Homo sapien
caggttcttcgttatttctgtccca

SEQ ID NO: 1207536 - DNA, 25 bp, Homo sapien
gttcatctcgtctctttctaactca

SEQ ID NO: 1207537 - DNA, 25 bp, Homo sapien
gtatccaggttcttcgttatttctg

SEQ ID NO: 1207538 - DNA, 25 bp, Homo sapien
tctcctccatattggaaatcattcc

SEQ ID NO: 1207539 - DNA, 25 bp, Homo sapien
cctccatattggaaatcattcctgt

SEQ ID NO: 1207540 - DNA, 25 bp, Homo sapien
taggatccaaggtcctctttattct

SEQ ID NO: 1207541 - DNA, 25 bp, Homo sapien
ttcctgtcagctcgtgctctccaag

SEQ ID NO: 1207542 - DNA, 25 bp, Homo sapien
gattgaggaaaagagaagtaaattc

SEQ ID NO: 1207543 - DNA, 25 bp, Homo sapien
atgattgaggaaaagagaagtaaat

SEQ ID NO: 1207544 - DNA, 25 bp, Homo sapien
ctgttgatgattgaggaaaagagaa

SEQ ID NO: 1207545 - DNA, 25 bp, Homo sapien
ttgaggaaaagagaagtaaattcat

SEQ ID NO: 1207546 - DNA, 25 bp, Homo sapien
gatcttgttataggagtcagaacgg

SEQ ID NO: 1207547 - DNA, 25 bp, Homo sapien
tgtaaatttttcaggcagcgacagg

SEQ ID NO: 1207548 - DNA, 25 bp, Homo sapien
agtcgacgcgactgtaaatttttca

SEQ ID NO: 1207549 - DNA, 25 bp, Homo sapien
tcgaactcaatgagaagtcgacgcg

SEQ ID NO: 1207550 - DNA, 25 bp, Homo sapien
ggcattggctcttaactgtagacaa

SEQ ID NO: 1207551 - DNA, 25 bp, Homo sapien
gctcttaactgtagacaatttgcag

SEQ ID NO: 1207552 - DNA, 25 bp, Homo sapien
cattggctcttaactgtagacaatt

SEQ ID NO: 1207553 - DNA, 25 bp, Homo sapien
ttggctcttaactgtagacaatttg

SEQ ID NO: 1207554 - DNA, 25 bp, Homo sapien
cgagtcgtgacgtcctttcctcttt

SEQ ID NO: 1207555 - DNA, 25 bp, Homo sapien
ctgcgagtcgtgacgtcctttcctc

SEQ ID NO: 1207556 - DNA, 25 bp, Homo sapien
gggtgtgagcctatctataaaggca

SEQ ID NO: 1207557 - DNA, 25 bp, Homo sapien
ctttcttcccaattatgggtgtgag

SEQ ID NO: 1207558 - DNA, 25 bp, Homo sapien
tttagctatgggttgttgaatatgc

SEQ ID NO: 1207559 - DNA, 25 bp, Homo sapien
gctgcttaggctttgcaaccaccat

SEQ ID NO: 1207560 - DNA, 25 bp, Homo sapien
agctgcttaggctttgcaaccacca

SEQ ID NO: 1207561 - DNA, 25 bp, Homo sapien
ggttgttgaatatgccaactgcatt

SEQ ID NO: 1207562 - DNA, 25 bp, Homo sapien
ctgccattaatacctttcgaaagct

SEQ ID NO: 1207563 - DNA, 25 bp, Homo sapien
aactcactgccattaatacctttcg

SEQ ID NO: 1207564 - DNA, 25 bp, Homo sapien
tctcaaactcactgccattaatacc

SEQ ID NO: 1207565 - DNA, 25 bp, Homo sapien
caggaaatacaatctcaaactcact

SEQ ID NO: 1207566 - DNA, 25 bp, Homo sapien
ttgccctttggatccagtccagact

SEQ ID NO: 1207567 - DNA, 25 bp, Homo sapien
cagtccagactccttatcacagcac

SEQ ID NO: 1207568 - DNA, 25 bp, Homo sapien
tccagactccttatcacagcactta

SEQ ID NO: 1207569 - DNA, 25 bp, Homo sapien
tatcacagcacttaaggctcttcat

SEQ ID NO: 1207570 - DNA, 25 bp, Homo sapien
gaaacctggagtgtctagggttcca

SEQ ID NO: 1207571 - DNA, 25 bp, Homo sapien
tattggggtaatgcctgctggagtc

SEQ ID NO: 1207572 - DNA, 25 bp, Homo sapien
ttctgctgactattggggtaatgcc

SEQ ID NO: 1207573 - DNA, 25 bp, Homo sapien
cctggagtgtctagggttccaaatc

SEQ ID NO: 1207574 - DNA, 25 bp, Homo sapien
gctggaacgcatcctatatatgaca

SEQ ID NO: 1207575 - DNA, 25 bp, Homo sapien
agttaatgggctgttagcttttcca

SEQ ID NO: 1207576 - DNA, 25 bp, Homo sapien
gggttgctcaaagaccgagataaca

SEQ ID NO: 1207577 - DNA, 25 bp, Homo sapien
cgaccatccttgtcatgagcccggg

SEQ ID NO: 1207578 - DNA, 25 bp, Homo sapien
tcacatataacggcagagtggtttg

SEQ ID NO: 1207579 - DNA, 25 bp, Homo sapien
catataacggcagagtggtttgtcc

SEQ ID NO: 1207580 - DNA, 25 bp, Homo sapien
tataacggcagagtggtttgtcctg

SEQ ID NO: 1207581 - DNA, 25 bp, Homo sapien
gtttgtcctgtcgggagggtctcac

SEQ ID NO: 1207582 - DNA, 25 bp, Homo sapien
cttgcaagcagatctattttcatcc

SEQ ID NO: 1207583 - DNA, 25 bp, Homo sapien
caggtatggagagttcctcaacttc

SEQ ID NO: 1207584 - DNA, 25 bp, Homo sapien
ggtatggagagttcctcaacttctc

SEQ ID NO: 1207585 - DNA, 25 bp, Homo sapien
ctgagacagcgaaagcacaccaggt

SEQ ID NO: 1207586 - DNA, 25 bp, Homo sapien
aacttgggagcctgcgctcagtggc

SEQ ID NO: 1207587 - DNA, 25 bp, Homo sapien
gagcctgcgctcagtggctacttgg

SEQ ID NO: 1207588 - DNA, 25 bp, Homo sapien
cccttccattcctgcgtgtaacttg

SEQ ID NO: 1207589 - DNA, 25 bp, Homo sapien
cattcctgcgtgtaacttgggagcc

SEQ ID NO: 1207590 - DNA, 25 bp, Homo sapien
gaagctgtaggacacggaaactgca

SEQ ID NO: 1207591 - DNA, 25 bp, Homo sapien
gtaggacacggaaactgcagaaact

SEQ ID NO: 1207592 - DNA, 25 bp, Homo sapien
tgggaagctgtaggacacggaaact

SEQ ID NO: 1207593 - DNA, 25 bp, Homo sapien
agctgtaggacacggaaactgcaga

SEQ ID NO: 1207594 - DNA, 25 bp, Homo sapien
cccctcccgggtcgcagcagccggg

SEQ ID NO: 1207595 - DNA, 25 bp, Homo sapien
gcgccacggtgaggttgcatctcat

SEQ ID NO: 1207596 - DNA, 25 bp, Homo sapien
gcggagctgcgccacggtgaggttg

SEQ ID NO: 1207597 - DNA, 25 bp, Homo sapien
gcgcgcggagctgcgccacggtgag

SEQ ID NO: 1207598 - DNA, 25 bp, Homo sapien
catgctccggacaggtattctttga

SEQ ID NO: 1207599 - DNA, 25 bp, Homo sapien
gaccggacttgtgtacctaatggga

SEQ ID NO: 1207600 - DNA, 25 bp, Homo sapien
gagttgaacttccttcggagagagc

SEQ ID NO: 1207601 - DNA, 25 bp, Homo sapien
ttttgactccccacgggcgataggc

SEQ ID NO: 1207602 - DNA, 25 bp, Homo sapien
ttcccttgaaatgtaagataatctc

SEQ ID NO: 1207603 - DNA, 25 bp, Homo sapien
tccagttcaatctgtgaagttccct

SEQ ID NO: 1207604 - DNA, 25 bp, Homo sapien
tttttcatagtccagttcaatctgt

SEQ ID NO: 1207605 - DNA, 25 bp, Homo sapien
tcatagtccagttcaatctgtgaag

SEQ ID NO: 1207606 - DNA, 25 bp, Homo sapien
gctgccgggatccaacggaaccaaa

SEQ ID NO: 1207607 - DNA, 25 bp, Homo sapien
cctgatgccgtgttcctggaagtaa

SEQ ID NO: 1207608 - DNA, 25 bp, Homo sapien
tcagaaagccacacctgatgccgtg

SEQ ID NO: 1207609 - DNA, 25 bp, Homo sapien
gctgctgccgggatccaacggaacc

SEQ ID NO: 1207610 - DNA, 25 bp, Homo sapien
gcatcttgaccttgacaaccacggt

SEQ ID NO: 1207611 - DNA, 25 bp, Homo sapien
atgatgttctcgtccccactcaggc

SEQ ID NO: 1207612 - DNA, 25 bp, Homo sapien
cgtcacagaggacatagtggcagtc

SEQ ID NO: 1207613 - DNA, 25 bp, Homo sapien
ccacggtgtaggagttgtcaacagc

SEQ ID NO: 1207614 - DNA, 25 bp, Homo sapien
ctactcttaggggtgcagactgagg

SEQ ID NO: 1207615 - DNA, 25 bp, Homo sapien
cttggagctgccatagatcattcta

SEQ ID NO: 1207616 - DNA, 25 bp, Homo sapien
ggtaattcatgcaggatccctgtca

SEQ ID NO: 1207617 - DNA, 25 bp, Homo sapien
tttgctggtaattcatgcaggatcc

SEQ ID NO: 1207618 - DNA, 25 bp, Homo sapien
cagaacttgtgtgtaggattggcct

SEQ ID NO: 1207619 - DNA, 25 bp, Homo sapien
atgaaatagtaatgccttgaaggca

SEQ ID NO: 1207620 - DNA, 25 bp, Homo sapien
tgattttagcgtgtttagagacccc

SEQ ID NO: 1207621 - DNA, 25 bp, Homo sapien
cctttggatgagtatttttggcata

SEQ ID NO: 1207622 - DNA, 25 bp, Homo sapien
gagcacaggcttgagcagagattca

SEQ ID NO: 1207623 - DNA, 25 bp, Homo sapien
agcacaggcttgagcagagattcag

SEQ ID NO: 1207624 - DNA, 25 bp, Homo sapien
cacaggcttgagcagagattcaggg

SEQ ID NO: 1207625 - DNA, 25 bp, Homo sapien
gcacaggcttgagcagagattcagg

SEQ ID NO: 1207626 - DNA, 25 bp, Homo sapien
ccccagggtcccctgctggacatgg

SEQ ID NO: 1207627 - DNA, 25 bp, Homo sapien
agggtcccctgctggacatggcagg

SEQ ID NO: 1207628 - DNA, 25 bp, Homo sapien
ggtcccctgctggacatggcaggcc

SEQ ID NO: 1207629 - DNA, 25 bp, Homo sapien
ccagggtcccctgctggacatggca

SEQ ID NO: 1207630 - DNA, 25 bp, Homo sapien
gggatcttacaatgttgcctggtct

SEQ ID NO: 1207631 - DNA, 25 bp, Homo sapien
tgggatcttacaatgttgcctggtc

SEQ ID NO: 1207632 - DNA, 25 bp, Homo sapien
caagagtaatggaccgagattgagt

SEQ ID NO: 1207633 - DNA, 25 bp, Homo sapien
accgagattgagtgatgaatttgtg

SEQ ID NO: 1207634 - DNA, 25 bp, Homo sapien
taatggaccgagattgagtgatgaa

SEQ ID NO: 1207635 - DNA, 25 bp, Homo sapien
cttggcaagagtaatggaccgagat

SEQ ID NO: 1207636 - DNA, 25 bp, Homo sapien
tttagcagctaaagggtcaccaact

SEQ ID NO: 1207637 - DNA, 25 bp, Homo sapien
ggagaggacctttaccactgtatct

SEQ ID NO: 1207638 - DNA, 25 bp, Homo sapien
tgtgtaatcagcctaccgcaggctt

SEQ ID NO: 1207639 - DNA, 25 bp, Homo sapien
ctgtaatcaaaggatggagaggacc

SEQ ID NO: 1207640 - DNA, 25 bp, Homo sapien
tcctgtgagggataagaatgtgtct

SEQ ID NO: 1207641 - DNA, 25 bp, Homo sapien
tccagtaggtaattcactatgcgct

SEQ ID NO: 1207642 - DNA, 25 bp, Homo sapien
tatgcgctttatatgccttagggca

SEQ ID NO: 1207643 - DNA, 25 bp, Homo sapien
caactggtgacataactcctgtgag

SEQ ID NO: 1207644 - DNA, 25 bp, Homo sapien
agatatttaccaactgccagcagca

SEQ ID NO: 1207645 - DNA, 25 bp, Homo sapien
tataaacgtaggacacatggtctcc

SEQ ID NO: 1207646 - DNA, 25 bp, Homo sapien
aatgcctaccgtgtcttccagtgga

SEQ ID NO: 1207647 - DNA, 25 bp, Homo sapien
tagattgttgaagcacaggcgcaca

SEQ ID NO: 1207648 - DNA, 25 bp, Homo sapien
agcttccacgccctttccgggtgcg

SEQ ID NO: 1207649 - DNA, 25 bp, Homo sapien
cattacaaaggctatcgatgaacac

SEQ ID NO: 1207650 - DNA, 25 bp, Homo sapien
ccttcacgggttcgcttacaggaag

SEQ ID NO: 1207651 - DNA, 25 bp, Homo sapien
ttccgggtgcgccatcctcctggaa

SEQ ID NO: 1207652 - DNA, 25 bp, Homo sapien
tctgactgaccagctgtaaatcggg

SEQ ID NO: 1207653 - DNA, 25 bp, Homo sapien
actggccggccgcatttcagatgcc

SEQ ID NO: 1207654 - DNA, 25 bp, Homo sapien
gatttctgcgaccaaatgtgtaggg

SEQ ID NO: 1207655 - DNA, 25 bp, Homo sapien
cacaccgagcaagcaatcaattctg

SEQ ID NO: 1207656 - DNA, 25 bp, Homo sapien
caacacagaggtaagtctgcttgga

SEQ ID NO: 1207657 - DNA, 25 bp, Homo sapien
tggagtatctcaaggctgacagagt

SEQ ID NO: 1207658 - DNA, 25 bp, Homo sapien
tcatataaatgctcaaggtacacct

SEQ ID NO: 1207659 - DNA, 25 bp, Homo sapien
tgattagcgttaacagcttttcccc

SEQ ID NO: 1207660 - DNA, 25 bp, Homo sapien
gcctgagtactatcttatcaatttt

SEQ ID NO: 1207661 - DNA, 25 bp, Homo sapien
tatacaatctctttgttctgggatt

SEQ ID NO: 1207662 - DNA, 25 bp, Homo sapien
caatctctttgttctgggattgttt

SEQ ID NO: 1207663 - DNA, 25 bp, Homo sapien
ccagcctgagtactatcttatcaat

SEQ ID NO: 1207664 - DNA, 25 bp, Homo sapien
ttcaggtttcagactccctcatggt

SEQ ID NO: 1207665 - DNA, 25 bp, Homo sapien
gttgtggcagcatcagatagacacc

SEQ ID NO: 1207666 - DNA, 25 bp, Homo sapien
tatacgtttcaactggttgtggcag

SEQ ID NO: 1207667 - DNA, 25 bp, Homo sapien
tggtctttagaaacatccttctggg

SEQ ID NO: 1207668 - DNA, 25 bp, Homo sapien
gtcaatagcaggaacacaagaagga

SEQ ID NO: 1207669 - DNA, 25 bp, Homo sapien
taaaatgtccggctctgatctctac

SEQ ID NO: 1207670 - DNA, 25 bp, Homo sapien
gatgcccacacttaaactggattgg

SEQ ID NO: 1207671 - DNA, 25 bp, Homo sapien
tggattggctcttcatgcttgatgc

SEQ ID NO: 1207672 - DNA, 25 bp, Homo sapien
tatgtagtgctacctgaaattggca

SEQ ID NO: 1207673 - DNA, 25 bp, Homo sapien
tggaaatgaatcctgctgggcaacc

SEQ ID NO: 1207674 - DNA, 25 bp, Homo sapien
ggtaggtctgctttgactgtgccat

SEQ ID NO: 1207675 - DNA, 25 bp, Homo sapien
tccactgatgatgcaaaggccatta

SEQ ID NO: 1207676 - DNA, 25 bp, Homo sapien
tgagatgatcaggtttaaatcagcc

SEQ ID NO: 1207677 - DNA, 25 bp, Homo sapien
agcctttacctcagtgactttgcag

SEQ ID NO: 1207678 - DNA, 25 bp, Homo sapien
gaaccaatgacttaactgcaaccaa

SEQ ID NO: 1207679 - DNA, 25 bp, Homo sapien
catggcatgctgtgggaatttgtcc

SEQ ID NO: 1207680 - DNA, 25 bp, Homo sapien
accgcatccagccaagattgcatta

SEQ ID NO: 1207681 - DNA, 25 bp, Homo sapien
ttacaagtgttagtcaccgcatcca

SEQ ID NO: 1207682 - DNA, 25 bp, Homo sapien
tccagccaagattgcattacatttt

SEQ ID NO: 1207683 - DNA, 25 bp, Homo sapien
attacaagtgttagtcaccgcatcc

SEQ ID NO: 1207684 - DNA, 25 bp, Homo sapien
tcctggagttacgtgtgaaagacaa

SEQ ID NO: 1207685 - DNA, 25 bp, Homo sapien
caggacctctaaatacgatatgtgg

SEQ ID NO: 1207686 - DNA, 25 bp, Homo sapien
taatgctttgcccatgcatccgctg

SEQ ID NO: 1207687 - DNA, 25 bp, Homo sapien
caaggctcattgtcacttccatgga

SEQ ID NO: 1207688 - DNA, 25 bp, Homo sapien
tgactgatcacagtgatgttcgccg

SEQ ID NO: 1207689 - DNA, 25 bp, Homo sapien
tgatgttcgccgtggccacttatca

SEQ ID NO: 1207690 - DNA, 25 bp, Homo sapien
gctcctttgggagggtgctcttctt

SEQ ID NO: 1207691 - DNA, 25 bp, Homo sapien
gccacttatcatgcgggctcctttg

SEQ ID NO: 1207692 - DNA, 25 bp, Homo sapien
cagccagggtctgttaaccatcacc

SEQ ID NO: 1207693 - DNA, 25 bp, Homo sapien
gcacatcctggtagctggaacatct

SEQ ID NO: 1207694 - DNA, 25 bp, Homo sapien
cattaagtaggaggttcagggctaa

SEQ ID NO: 1207695 - DNA, 25 bp, Homo sapien
catgttcaggttaaatgcgtgcaca

SEQ ID NO: 1207696 - DNA, 25 bp, Homo sapien
gcaatacaggcttaggcagtcaccc

SEQ ID NO: 1207697 - DNA, 25 bp, Homo sapien
cagtcaccctaagagctggctagga

SEQ ID NO: 1207698 - DNA, 25 bp, Homo sapien
tgtgggcacaagactaaatcaaggc

SEQ ID NO: 1207699 - DNA, 25 bp, Homo sapien
tagctcacggagctggttaagcacc

SEQ ID NO: 1207700 - DNA, 25 bp, Homo sapien
tattaagtattcgtcagctacggac

SEQ ID NO: 1207701 - DNA, 25 bp, Homo sapien
gctacggacttcgtgcccatggaat

SEQ ID NO: 1207702 - DNA, 25 bp, Homo sapien
ggacttgccaactttcactgtgaaa

SEQ ID NO: 1207703 - DNA, 25 bp, Homo sapien
caaggtgagtcaatgcggctgcctc

SEQ ID NO: 1207704 - DNA, 25 bp, Homo sapien
ccggcaccacgagcagttcagtaaa

SEQ ID NO: 1207705 - DNA, 25 bp, Homo sapien
tggctaagctaatgatcaggactgg

SEQ ID NO: 1207706 - DNA, 25 bp, Homo sapien
ggttggtccctgtatcctatcccag

SEQ ID NO: 1207707 - DNA, 25 bp, Homo sapien
tccatagtaattgatccctggcaga

SEQ ID NO: 1207708 - DNA, 25 bp, Homo sapien
taaaacgagctccttgtgtccaaat

SEQ ID NO: 1207709 - DNA, 25 bp, Homo sapien
aaaggatattggtgtcgctaaaacg

SEQ ID NO: 1207710 - DNA, 25 bp, Homo sapien
ctggcggcatccaggcaacaggagc

SEQ ID NO: 1207711 - DNA, 25 bp, Homo sapien
cattgcaaactcccaaaaggatatt

SEQ ID NO: 1207712 - DNA, 25 bp, Homo sapien
ttggtctttgttctgtacaattagg

SEQ ID NO: 1207713 - DNA, 25 bp, Homo sapien
ttgttctgtacaattaggagatgac

SEQ ID NO: 1207714 - DNA, 25 bp, Homo sapien
tcactcgtcgctctggtcagacatt

SEQ ID NO: 1207715 - DNA, 25 bp, Homo sapien
cgtcgctctggtcagacattggtct

SEQ ID NO: 1207716 - DNA, 25 bp, Homo sapien
ggcagaattgcggttgggggatccc

SEQ ID NO: 1207717 - DNA, 25 bp, Homo sapien
aagaagagagggctgccattatggt

SEQ ID NO: 1207718 - DNA, 25 bp, Homo sapien
ggttgtgtagtttggaggacacttc

SEQ ID NO: 1207719 - DNA, 25 bp, Homo sapien
tgtgtagtttggaggacacttcctg

SEQ ID NO: 1207720 - DNA, 25 bp, Homo sapien
gaaacgttcatcaacaaactggcct

SEQ ID NO: 1207721 - DNA, 25 bp, Homo sapien
atctcagacattcttatgggtaagc

SEQ ID NO: 1207722 - DNA, 25 bp, Homo sapien
gacttcataggtgaataaccatgca

SEQ ID NO: 1207723 - DNA, 25 bp, Homo sapien
atgggtaagctcttttaaactgcca

SEQ ID NO: 1207724 - DNA, 25 bp, Homo sapien
acgaagggcgcaaggcagcgtctct

SEQ ID NO: 1207725 - DNA, 25 bp, Homo sapien
ctctgcgggcgggtggtcttagctc

SEQ ID NO: 1207726 - DNA, 25 bp, Homo sapien
cgagtcggttggcattaagaggtaa

SEQ ID NO: 1207727 - DNA, 25 bp, Homo sapien
tgctgggaccgggaagccggacttc

SEQ ID NO: 1207728 - DNA, 25 bp, Homo sapien
tcactcttttcagaggcagtgagag

SEQ ID NO: 1207729 - DNA, 25 bp, Homo sapien
tgtttgcattccttgctgtccagtc

SEQ ID NO: 1207730 - DNA, 25 bp, Homo sapien
agctgccactgcagatctttttcac

SEQ ID NO: 1207731 - DNA, 25 bp, Homo sapien
tcagaggcagtgagagaacaggtct

SEQ ID NO: 1207732 - DNA, 25 bp, Homo sapien
ggtcttaaatcacaacttgaagaaa

SEQ ID NO: 1207733 - DNA, 25 bp, Homo sapien
attgtagtctccctgaggtcttaaa

SEQ ID NO: 1207734 - DNA, 25 bp, Homo sapien
tattgactttgaacattgtagtctc

SEQ ID NO: 1207735 - DNA, 25 bp, Homo sapien
cctgaggtcttaaatcacaacttga

SEQ ID NO: 1207736 - DNA, 25 bp, Homo sapien
caatagacaggcacatcagcgaatc

SEQ ID NO: 1207737 - DNA, 25 bp, Homo sapien
tcattttccaaaacacagcgctggg

SEQ ID NO: 1207738 - DNA, 25 bp, Homo sapien
gatgttcccgttgatgctgtagcta

SEQ ID NO: 1207739 - DNA, 25 bp, Homo sapien
tcattcagtaagtcccgagcagggt

SEQ ID NO: 1207740 - DNA, 25 bp, Homo sapien
gtgccgccgggcgtgggtgggaggc

SEQ ID NO: 1207741 - DNA, 25 bp, Homo sapien
agctccgtgacgtgaagcgcctcgg

SEQ ID NO: 1207742 - DNA, 25 bp, Homo sapien
cctagcagctccgtgacgtgaagcg

SEQ ID NO: 1207743 - DNA, 25 bp, Homo sapien
cgtctcctagcagctccgtgacgtg

SEQ ID NO: 1207744 - DNA, 25 bp, Homo sapien
gtcccagcccattcgattacgtaaa

SEQ ID NO: 1207745 - DNA, 25 bp, Homo sapien
gaagtggattctactctacgctccg

SEQ ID NO: 1207746 - DNA, 25 bp, Homo sapien
tcctgcttctttccggacggtccaa

SEQ ID NO: 1207747 - DNA, 25 bp, Homo sapien
gaccagttccgagatttaccaccag

SEQ ID NO: 1207748 - DNA, 25 bp, Homo sapien
ccgcagtgctaatcctaggttcaaa

SEQ ID NO: 1207749 - DNA, 25 bp, Homo sapien
ggttcaaattagagtccagcgcatg

SEQ ID NO: 1207750 - DNA, 25 bp, Homo sapien
gaagatatctgcaacacctacaatt

SEQ ID NO: 1207751 - DNA, 25 bp, Homo sapien
gaacaagaatgctcctactagcctt

SEQ ID NO: 1207752 - DNA, 25 bp, Homo sapien
tttagatctcagtttagatgccatt

SEQ ID NO: 1207753 - DNA, 25 bp, Homo sapien
cttatccgcacttactgtggaattg

SEQ ID NO: 1207754 - DNA, 25 bp, Homo sapien
cattcctatgaaaccctgtaattcc

SEQ ID NO: 1207755 - DNA, 25 bp, Homo sapien
cagcaggtctggcttatgtacccat

SEQ ID NO: 1207756 - DNA, 25 bp, Homo sapien
cctgggtgacagagtgagattccgt

SEQ ID NO: 1207757 - DNA, 25 bp, Homo sapien
tgcagtgagctgagattgtgccact

SEQ ID NO: 1207758 - DNA, 25 bp, Homo sapien
agaattgcttgtacctgggaggtcg

SEQ ID NO: 1207759 - DNA, 25 bp, Homo sapien
gcactccagcctgggtgacagagtg

SEQ ID NO: 1207760 - DNA, 25 bp, Homo sapien
gagggcttactggatcttgtgccta

SEQ ID NO: 1207761 - DNA, 25 bp, Homo sapien
cgctgagatcgctgaggtcgcacca

SEQ ID NO: 1207762 - DNA, 25 bp, Homo sapien
cagttaggactctttctgttgcagg

SEQ ID NO: 1207763 - DNA, 25 bp, Homo sapien
taagaagcccaagtgtaggctgggc

SEQ ID NO: 1207764 - DNA, 25 bp, Homo sapien
tagcttcagtgtcaccgaaagggtg

SEQ ID NO: 1207765 - DNA, 25 bp, Homo sapien
cagtgtcaccgaaagggtgaaagac

SEQ ID NO: 1207766 - DNA, 25 bp, Homo sapien
cttggaagtagcttcagtgtcaccg

SEQ ID NO: 1207767 - DNA, 25 bp, Homo sapien
cgaaagggtgaaagacagcagtgtc

SEQ ID NO: 1207768 - DNA, 25 bp, Homo sapien
gtagatagcgccgatctctaaagta

SEQ ID NO: 1207769 - DNA, 25 bp, Homo sapien
gatcatttggatcccttccaagtgg

SEQ ID NO: 1207770 - DNA, 25 bp, Homo sapien
cagcaagacatccagcttccagatg

SEQ ID NO: 1207771 - DNA, 25 bp, Homo sapien
tctaaagtagatcatttggatccct

SEQ ID NO: 1207772 - DNA, 25 bp, Homo sapien
tttgtcactgctggtatccagagga

SEQ ID NO: 1207773 - DNA, 25 bp, Homo sapien
cactgctggtatccagaggattcac

SEQ ID NO: 1207774 - DNA, 25 bp, Homo sapien
cagaaactgagtcatcactatcttc

SEQ ID NO: 1207775 - DNA, 25 bp, Homo sapien
gaaactgagtcatcactatcttcaa

SEQ ID NO: 1207776 - DNA, 25 bp, Homo sapien
ctcagttcctgtcttatcagtaatg

SEQ ID NO: 1207777 - DNA, 25 bp, Homo sapien
ttctgcagctcgctggatcgttccc

SEQ ID NO: 1207778 - DNA, 25 bp, Homo sapien
gggagaggccgcgaatcccaagctc

SEQ ID NO: 1207779 - DNA, 25 bp, Homo sapien
tgtcttatcagtaatgtccttgtaa

SEQ ID NO: 1207780 - DNA, 25 bp, Homo sapien
ccggagacgcagcagcggaaaacgt

SEQ ID NO: 1207781 - DNA, 25 bp, Homo sapien
cgtcaaaatcactgcggctcacagg

SEQ ID NO: 1207782 - DNA, 25 bp, Homo sapien
gcagcggaaaacgtcaaaatcactg

SEQ ID NO: 1207783 - DNA, 25 bp, Homo sapien
gtcaaaatcactgcggctcacaggc

SEQ ID NO: 1207784 - DNA, 25 bp, Homo sapien
tcccctttgtctcggtttagtcaca

SEQ ID NO: 1207785 - DNA, 25 bp, Homo sapien
ttgtggaaaatgtccccgccatcgc

SEQ ID NO: 1207786 - DNA, 25 bp, Homo sapien
gggagccttcaacaatcacgttgtg

SEQ ID NO: 1207787 - DNA, 25 bp, Homo sapien
ctcggtttagtcacacgggcttggg

SEQ ID NO: 1207788 - DNA, 25 bp, Homo sapien
taaccttcacatggcgtggcctcgc

SEQ ID NO: 1207789 - DNA, 25 bp, Homo sapien
ccgctcccgggcataggaatgtggc

SEQ ID NO: 1207790 - DNA, 25 bp, Homo sapien
ctttcaccgcggctcctcgggatgt

SEQ ID NO: 1207791 - DNA, 25 bp, Homo sapien
ggagaagcaagctcaaaccatcggg

SEQ ID NO: 1207792 - DNA, 25 bp, Homo sapien
caggccagattgcaggcgattttgg

SEQ ID NO: 1207793 - DNA, 25 bp, Homo sapien
gccctggagaaatcatagtggtcaa

SEQ ID NO: 1207794 - DNA, 25 bp, Homo sapien
ggctggaacaatgaacgtctttctc

SEQ ID NO: 1207795 - DNA, 25 bp, Homo sapien
ctgtcccaaaggctttggccaccag

SEQ ID NO: 1207796 - DNA, 25 bp, Homo sapien
tagataccggcttcagtgtgctgct

SEQ ID NO: 1207797 - DNA, 25 bp, Homo sapien
gaatctacgaacctgcctgacacat

SEQ ID NO: 1207798 - DNA, 25 bp, Homo sapien
gatttgccatccaaatagataccgg

SEQ ID NO: 1207799 - DNA, 25 bp, Homo sapien
taagtatcctctcagttccagatgg

SEQ ID NO: 1207800 - DNA, 25 bp, Homo sapien
tcagagtgctgggtatctaacagca

SEQ ID NO: 1207801 - DNA, 25 bp, Homo sapien
tgttactaagtcactcaaggtcttc

SEQ ID NO: 1207802 - DNA, 25 bp, Homo sapien
cacctgcagataaaacggttactct

SEQ ID NO: 1207803 - DNA, 25 bp, Homo sapien
cggttactctgcagaacggtataga

SEQ ID NO: 1207804 - DNA, 25 bp, Homo sapien
cagaccttatacaggactttgacag

SEQ ID NO: 1207805 - DNA, 25 bp, Homo sapien
gacacaggaccttatcttttgccca

SEQ ID NO: 1207806 - DNA, 25 bp, Homo sapien
catatatgcacaagagtcagacctt

SEQ ID NO: 1207807 - DNA, 25 bp, Homo sapien
gaaaaggcacagatagttgaactac

SEQ ID NO: 1207808 - DNA, 25 bp, Homo sapien
catcaatctggtctatgttgtttca

SEQ ID NO: 1207809 - DNA, 25 bp, Homo sapien
ttcaagctggctctctcactgcttc

SEQ ID NO: 1207810 - DNA, 25 bp, Homo sapien
taaataccacctccactagagaggt

SEQ ID NO: 1207811 - DNA, 25 bp, Homo sapien
taccatgcctactttcaattcagcc

SEQ ID NO: 1207812 - DNA, 25 bp, Homo sapien
actaaatgcaaagcatgatcctgaa

SEQ ID NO: 1207813 - DNA, 25 bp, Homo sapien
ctaaatgcaaagcatgatcctgaat

SEQ ID NO: 1207814 - DNA, 25 bp, Homo sapien
taaatgcaaagcatgatcctgaatt

SEQ ID NO: 1207815 - DNA, 25 bp, Homo sapien
aaaggcagactgaagaactattcca

SEQ ID NO: 1207816 - DNA, 25 bp, Homo sapien
cagactgaagaactattccaggtta

SEQ ID NO: 1207817 - DNA, 25 bp, Homo sapien
tatcttcagaagtgttaatatcatt

SEQ ID NO: 1207818 - DNA, 25 bp, Homo sapien
tgaagaactattccaggttaaagga

SEQ ID NO: 1207819 - DNA, 25 bp, Homo sapien
ggaaccacaagcacggaccaagtaa

SEQ ID NO: 1207820 - DNA, 25 bp, Homo sapien
acaagcacggaccaagtaactggaa

SEQ ID NO: 1207821 - DNA, 25 bp, Homo sapien
accacaagcacggaccaagtaactg

SEQ ID NO: 1207822 - DNA, 25 bp, Homo sapien
gctggaaccacaagcacggaccaag

SEQ ID NO: 1207823 - DNA, 25 bp, Homo sapien
tgtaaggatctcatcattgtcccag

SEQ ID NO: 1207824 - DNA, 25 bp, Homo sapien
tatcaataccagcacccatgtaagg

SEQ ID NO: 1207825 - DNA, 25 bp, Homo sapien
agtaaagaggaacacaaagaaggag

SEQ ID NO: 1207826 - DNA, 25 bp, Homo sapien
tctccatcagctcttgtttgagggc

SEQ ID NO: 1207827 - DNA, 25 bp, Homo sapien
ccaaaagatagggtgcaccagaggg

SEQ ID NO: 1207828 - DNA, 25 bp, Homo sapien
aaaagatagggtgcaccagagggca

SEQ ID NO: 1207829 - DNA, 25 bp, Homo sapien
agccaaaagatagggtgcaccagag

SEQ ID NO: 1207830 - DNA, 25 bp, Homo sapien
aaagccaaaagatagggtgcaccag

SEQ ID NO: 1207831 - DNA, 25 bp, Homo sapien
gacagagagacaactggtggtcgtg

SEQ ID NO: 1207832 - DNA, 25 bp, Homo sapien
acaactggtggtcgtggtagtggca

SEQ ID NO: 1207833 - DNA, 25 bp, Homo sapien
aggcaacacggcacatctgctgaca

SEQ ID NO: 1207834 - DNA, 25 bp, Homo sapien
gagaggcaacacggcacatctgctg

SEQ ID NO: 1207835 - DNA, 25 bp, Homo sapien
gcctggctgccacgtgatttgtctc

SEQ ID NO: 1207836 - DNA, 25 bp, Homo sapien
cactgtgtatgaaggagtatgtcaa

SEQ ID NO: 1207837 - DNA, 25 bp, Homo sapien
gacattttgcaggtactgggaagga

SEQ ID NO: 1207838 - DNA, 25 bp, Homo sapien
tatgtcaagctgttctgatcttgga

SEQ ID NO: 1207839 - DNA, 25 bp, Homo sapien
gcatcactcttgagaatgagactcc

SEQ ID NO: 1207840 - DNA, 25 bp, Homo sapien
ggattacagcatcatggcccaaaag

SEQ ID NO: 1207841 - DNA, 25 bp, Homo sapien
cagtatagttcagccgatagaagca

SEQ ID NO: 1207842 - DNA, 25 bp, Homo sapien
tgagactcccagcacgacagtatag

SEQ ID NO: 1207843 - DNA, 25 bp, Homo sapien
cagcaatggccaaaagcaaagtgag

SEQ ID NO: 1207844 - DNA, 25 bp, Homo sapien
ttctataagacagggtggttccaac

SEQ ID NO: 1207845 - DNA, 25 bp, Homo sapien
tctagtcagcccatcttacatctga

SEQ ID NO: 1207846 - DNA, 25 bp, Homo sapien
agatttctccctagggcactgcttc

SEQ ID NO: 1207847 - DNA, 25 bp, Homo sapien
gctaaaatgttttcttggtcttgct

SEQ ID NO: 1207848 - DNA, 25 bp, Homo sapien
atttctccacaaagcaacctgaagg

SEQ ID NO: 1207849 - DNA, 25 bp, Homo sapien
ctgagctaatgctaaaatgttttct

SEQ ID NO: 1207850 - DNA, 25 bp, Homo sapien
tttctgtgcctagttctctcaagta

SEQ ID NO: 1207851 - DNA, 25 bp, Homo sapien
aaacaggcaggatgaacattgaccc

SEQ ID NO: 1207852 - DNA, 25 bp, Homo sapien
gcaggatgaacattgaccctatttt

SEQ ID NO: 1207853 - DNA, 25 bp, Homo sapien
gatgaacattgaccctatttttgga

SEQ ID NO: 1207854 - DNA, 25 bp, Homo sapien
gaacattgaccctatttttggaaga

SEQ ID NO: 1207855 - DNA, 25 bp, Homo sapien
ttcacttcgaaacatgccctccctg

SEQ ID NO: 1207856 - DNA, 25 bp, Homo sapien
tttcacttcgaaacatgccctccct

SEQ ID NO: 1207857 - DNA, 25 bp, Homo sapien
cacttcgaaacatgccctccctggg

SEQ ID NO: 1207858 - DNA, 25 bp, Homo sapien
cttttcacttcgaaacatgccctcc

SEQ ID NO: 1207859 - DNA, 25 bp, Homo sapien
taaaaaccccaataagacactgaga

SEQ ID NO: 1207860 - DNA, 25 bp, Homo sapien
taaataactcctacagtaataagaa

SEQ ID NO: 1207861 - DNA, 25 bp, Homo sapien
tgaaccacagattaggagaaactat

SEQ ID NO: 1207862 - DNA, 25 bp, Homo sapien
gatagaggctaggaagtcgaggctg

SEQ ID NO: 1207863 - DNA, 25 bp, Homo sapien
cttgtaggaggcaactgcggcagca

SEQ ID NO: 1207864 - DNA, 25 bp, Homo sapien
ttgtaggaggcaactgcggcagcaa

SEQ ID NO: 1207865 - DNA, 25 bp, Homo sapien
tgacagcgtcctcaatatcataggg

SEQ ID NO: 1207866 - DNA, 25 bp, Homo sapien
gggtatcgatcatggccaaatgtgc

SEQ ID NO: 1207867 - DNA, 25 bp, Homo sapien
tatcatagggcagatctgtggcttg

SEQ ID NO: 1207868 - DNA, 25 bp, Homo sapien
tatttatccagtacatgacagcgtc

SEQ ID NO: 1207869 - DNA, 25 bp, Homo sapien
gaagagcaggctaacgaaatagcaa

SEQ ID NO: 1207870 - DNA, 25 bp, Homo sapien
tgaccaactcaggaacaatttcggg

SEQ ID NO: 1207871 - DNA, 25 bp, Homo sapien
tcttaggatggaagacactagagca

SEQ ID NO: 1207872 - DNA, 25 bp, Homo sapien
gaaatagcaaacaactcttgagaga

SEQ ID NO: 1207873 - DNA, 25 bp, Homo sapien
agtcgtaattgatctgccagtttgg

SEQ ID NO: 1207874 - DNA, 25 bp, Homo sapien
gatctcgacttactacaacctttgt

SEQ ID NO: 1207875 - DNA, 25 bp, Homo sapien
tctgattctgtccaaaaagcaaagt

SEQ ID NO: 1207876 - DNA, 25 bp, Homo sapien
gtatgtgcacattcaacagatatct

SEQ ID NO: 1207877 - DNA, 25 bp, Homo sapien
ttttctatcatggtaatacattgtg

SEQ ID NO: 1207878 - DNA, 25 bp, Homo sapien
cagttttataacacccatgtatctt

SEQ ID NO: 1207879 - DNA, 25 bp, Homo sapien
taatacattgtgttacaaagcagtt

SEQ ID NO: 1207880 - DNA, 25 bp, Homo sapien
catggtaatacattgtgttacaaag

SEQ ID NO: 1207881 - DNA, 25 bp, Homo sapien
cctggagcttcaactgtgtgatgtt

SEQ ID NO: 1207882 - DNA, 25 bp, Homo sapien
ttttgttcttgttccattatgtctt

SEQ ID NO: 1207883 - DNA, 25 bp, Homo sapien
cttgttccattatgtctttcaaatg

SEQ ID NO: 1207884 - DNA, 25 bp, Homo sapien
tttgacctcctggagcttcaactgt

SEQ ID NO: 1207885 - DNA, 25 bp, Homo sapien
ttgttgaagtgaaccaaagtaaata

SEQ ID NO: 1207886 - DNA, 25 bp, Homo sapien
aaatgtcacctgaagaatcagaaac

SEQ ID NO: 1207887 - DNA, 25 bp, Homo sapien
accaaagtaaatagaatctgagtta

SEQ ID NO: 1207888 - DNA, 25 bp, Homo sapien
ttagaaaaatgtcacctgaagaatc

SEQ ID NO: 1207889 - DNA, 25 bp, Homo sapien
ataaataagtaccaaataacgcata

SEQ ID NO: 1207890 - DNA, 25 bp, Homo sapien
aataaataagtaccaaataacgcat

SEQ ID NO: 1207891 - DNA, 25 bp, Homo sapien
caatgtttgctctttccgataacga

SEQ ID NO: 1207892 - DNA, 25 bp, Homo sapien
gcagttgcttaagcaatgtttgctc

SEQ ID NO: 1207893 - DNA, 25 bp, Homo sapien
tctaccaatggaatgcaaggcagtt

SEQ ID NO: 1207894 - DNA, 25 bp, Homo sapien
gaataagggcagctaatgcacagcc

SEQ ID NO: 1207895 - DNA, 25 bp, Homo sapien
ctttatggatgaagcagcatagagc

SEQ ID NO: 1207896 - DNA, 25 bp, Homo sapien
gcagattatacaggctatcagccaa

SEQ ID NO: 1207897 - DNA, 25 bp, Homo sapien
gagcatatcttccagagtgaaatgg

SEQ ID NO: 1207898 - DNA, 25 bp, Homo sapien
aaaattcttgaatcagctgcagatt

SEQ ID NO: 1207899 - DNA, 25 bp, Homo sapien
actatcccagtgtgcaaaccagaaa

SEQ ID NO: 1207900 - DNA, 25 bp, Homo sapien
cttactatggcttacaagaggctac

SEQ ID NO: 1207901 - DNA, 25 bp, Homo sapien
ttatatatgcagtggcctaccgagc

SEQ ID NO: 1207902 - DNA, 25 bp, Homo sapien
tctcaaaggcctatgtccaaaattg

SEQ ID NO: 1207903 - DNA, 25 bp, Homo sapien
ctccttgtggacgaacaacacgagg

SEQ ID NO: 1207904 - DNA, 25 bp, Homo sapien
caaaagacggcttcaccacttcaaa

SEQ ID NO: 1207905 - DNA, 25 bp, Homo sapien
cacgaggctgtacaaaagacggctt

SEQ ID NO: 1207906 - DNA, 25 bp, Homo sapien
gaacagttccgccatgaacaccaaa

SEQ ID NO: 1207907 - DNA, 25 bp, Homo sapien
acctctagttttataatgggagcca

SEQ ID NO: 1207908 - DNA, 25 bp, Homo sapien
cctctagttttataatgggagccaa

SEQ ID NO: 1207909 - DNA, 25 bp, Homo sapien
caagacaggaattgaaggcatatct

SEQ ID NO: 1207910 - DNA, 25 bp, Homo sapien
gaaggcatatcttttacaggttcag

SEQ ID NO: 1207911 - DNA, 25 bp, Homo sapien
gaagtcagaactactatctaagaca

SEQ ID NO: 1207912 - DNA, 25 bp, Homo sapien
tttggcagcattcaagacaggaatt

SEQ ID NO: 1207913 - DNA, 25 bp, Homo sapien
ctaccacctctcattctacaaccta

SEQ ID NO: 1207914 - DNA, 25 bp, Homo sapien
taccacctctcattctacaacctaa

SEQ ID NO: 1207915 - DNA, 25 bp, Homo sapien
atttaggtagaatgtcttaagttag

SEQ ID NO: 1207916 - DNA, 25 bp, Homo sapien
acactaccacctctcattctacaac

SEQ ID NO: 1207917 - DNA, 25 bp, Homo sapien
tgatgatgagactgtgtaaatgtag

SEQ ID NO: 1207918 - DNA, 25 bp, Homo sapien
aaggcaaatgatgatgagactgtgt

SEQ ID NO: 1207919 - DNA, 25 bp, Homo sapien
gatgatgagactgtgtaaatgtagc

SEQ ID NO: 1207920 - DNA, 25 bp, Homo sapien
caaatgatgatgagactgtgtaaat

SEQ ID NO: 1207921 - DNA, 25 bp, Homo sapien
tgaggctgaagaatgagcctgggga

SEQ ID NO: 1207922 - DNA, 25 bp, Homo sapien
gctgaagaatgagcctggggacgtg

SEQ ID NO: 1207923 - DNA, 25 bp, Homo sapien
gaagaatgagcctggggacgtgaat

SEQ ID NO: 1207924 - DNA, 25 bp, Homo sapien
aagaatgagcctggggacgtgaata

SEQ ID NO: 1207925 - DNA, 25 bp, Homo sapien
aataggtacataaggagaattagag

SEQ ID NO: 1207926 - DNA, 25 bp, Homo sapien
tacaaattaaataggtacataagga

SEQ ID NO: 1207927 - DNA, 25 bp, Homo sapien
aaaagcaaccacagtgaaactgacc

SEQ ID NO: 1207928 - DNA, 25 bp, Homo sapien
gaaactgaccatgcttttagtgtgt

SEQ ID NO: 1207929 - DNA, 25 bp, Homo sapien
ctatgaagccatcaacataagacat

SEQ ID NO: 1207930 - DNA, 25 bp, Homo sapien
tctctttgggccatgtccctatgaa

SEQ ID NO: 1207931 - DNA, 25 bp, Homo sapien
gaagccatcaacataagacatagat

SEQ ID NO: 1207932 - DNA, 25 bp, Homo sapien
aagacatagatgaagaccttctaat

SEQ ID NO: 1207933 - DNA, 25 bp, Homo sapien
tttacatctctatcatctgcctata

SEQ ID NO: 1207934 - DNA, 25 bp, Homo sapien
tgcctatactgcctttttcaaattt

SEQ ID NO: 1207935 - DNA, 25 bp, Homo sapien
catctgcctatactgcctttttcaa

SEQ ID NO: 1207936 - DNA, 25 bp, Homo sapien
aagttttagcaatttggttatcaat

SEQ ID NO: 1207937 - DNA, 25 bp, Homo sapien
caaatgatacgccatgcactgatga

SEQ ID NO: 1207938 - DNA, 25 bp, Homo sapien
ggcacacaagatttgaggtcactgt

SEQ ID NO: 1207939 - DNA, 25 bp, Homo sapien
tctgattgccaaactcgtcaagaag

SEQ ID NO: 1207940 - DNA, 25 bp, Homo sapien
tgcttggtgtctcgatctgattgcc

SEQ ID NO: 1207941 - DNA, 25 bp, Homo sapien
gccaacagctgggtagtgtcccgtc

SEQ ID NO: 1207942 - DNA, 25 bp, Homo sapien
tatccacagaccgaggaggtgtcaa

SEQ ID NO: 1207943 - DNA, 25 bp, Homo sapien
gatgcaccatttcagaggccaacag

SEQ ID NO: 1207944 - DNA, 25 bp, Homo sapien
ttgtgcccaagcaaccacatgagga

SEQ ID NO: 1207945 - DNA, 25 bp, Homo sapien
tgctactgaaagaagcaagcatgtc

SEQ ID NO: 1207946 - DNA, 25 bp, Homo sapien
tgaagatgcccaaaactatgcagat

SEQ ID NO: 1207947 - DNA, 25 bp, Homo sapien
gaaaccacagtgtgcttgaatgtta

SEQ ID NO: 1207948 - DNA, 25 bp, Homo sapien
cttgtatcaaaagggactgctactg

SEQ ID NO: 1207949 - DNA, 25 bp, Homo sapien
caaagctgcccgtttcattgccata

SEQ ID NO: 1207950 - DNA, 25 bp, Homo sapien
tctgcttccaactgttgtttccgga

SEQ ID NO: 1207951 - DNA, 25 bp, Homo sapien
ctgttgtttccggagctgagtttcc

SEQ ID NO: 1207952 - DNA, 25 bp, Homo sapien
ttcttaatcttttctccaacaaagc

SEQ ID NO: 1207953 - DNA, 25 bp, Homo sapien
ggttacagttcttattctgcatacc

SEQ ID NO: 1207954 - DNA, 25 bp, Homo sapien
aaatggttacagttcttattctgca

SEQ ID NO: 1207955 - DNA, 25 bp, Homo sapien
agaaatcaaatggttacagttctta

SEQ ID NO: 1207956 - DNA, 25 bp, Homo sapien
ctaagaaatcaaatggttacagttc

SEQ ID NO: 1207957 - DNA, 25 bp, Homo sapien
tcttgcctaataaattctctgcgtg

SEQ ID NO: 1207958 - DNA, 25 bp, Homo sapien
aataaattctctgcgtgctctctca

SEQ ID NO: 1207959 - DNA, 25 bp, Homo sapien
gttgtttccgcctcatatattcttg

SEQ ID NO: 1207960 - DNA, 25 bp, Homo sapien
gggtttaattactgtatccatatct

SEQ ID NO: 1207961 - DNA, 25 bp, Homo sapien
gtgttttgggggattcaatatgatc

SEQ ID NO: 1207962 - DNA, 25 bp, Homo sapien
ctgtgaatagattttggtcgctgtt

SEQ ID NO: 1207963 - DNA, 25 bp, Homo sapien
gggattcaatatgatctctgtgaat

SEQ ID NO: 1207964 - DNA, 25 bp, Homo sapien
tttgggggattcaatatgatctctg

SEQ ID NO: 1207965 - DNA, 25 bp, Homo sapien
caaccaagttagtatgacaaaccaa

SEQ ID NO: 1207966 - DNA, 25 bp, Homo sapien
gggcagttaatagttcaaggagatt

SEQ ID NO: 1207967 - DNA, 25 bp, Homo sapien
ccaaaagggagcatgcacaatctca

SEQ ID NO: 1207968 - DNA, 25 bp, Homo sapien
gattatatctgagggcacagttccc

SEQ ID NO: 1207969 - DNA, 25 bp, Homo sapien
gagtctgttcattagataacaccag

SEQ ID NO: 1207970 - DNA, 25 bp, Homo sapien
taaacacataatatgcttgcatgca

SEQ ID NO: 1207971 - DNA, 25 bp, Homo sapien
tgataaaactaacttgcgttccaaa

SEQ ID NO: 1207972 - DNA, 25 bp, Homo sapien
aatatgagacgtgatactgtgatcc

SEQ ID NO: 1207973 - DNA, 25 bp, Homo sapien
tgaaaaaacacgataaattcatgat

SEQ ID NO: 1207974 - DNA, 25 bp, Homo sapien
gaaaaaacacgataaattcatgatc

SEQ ID NO: 1207975 - DNA, 25 bp, Homo sapien
cccgtgttcagcgatgccaaagaaa

SEQ ID NO: 1207976 - DNA, 25 bp, Homo sapien
cgtgttcagcgatgccaaagaaagg

SEQ ID NO: 1207977 - DNA, 25 bp, Homo sapien
ttgcctgaatgtacactctcgttat

SEQ ID NO: 1207978 - DNA, 25 bp, Homo sapien
cactctcgttatcacccgtgttcag

SEQ ID NO: 1207979 - DNA, 25 bp, Homo sapien
tccatttcgactgccacaacgactt

SEQ ID NO: 1207980 - DNA, 25 bp, Homo sapien
taagaagccttctacagactctgat

SEQ ID NO: 1207981 - DNA, 25 bp, Homo sapien
tggagataagaagccttctacagac

SEQ ID NO: 1207982 - DNA, 25 bp, Homo sapien
cacaacgacttggagataagaagcc

SEQ ID NO: 1207983 - DNA, 25 bp, Homo sapien
tttgcactgggttctttgtagagct

SEQ ID NO: 1207984 - DNA, 25 bp, Homo sapien
cagcaatgagctaaagcattttgta

SEQ ID NO: 1207985 - DNA, 25 bp, Homo sapien
cattttgtattatgtgcttattgga

SEQ ID NO: 1207986 - DNA, 25 bp, Homo sapien
agccaaacagcaatgagctaaagca

SEQ ID NO: 1207987 - DNA, 25 bp, Homo sapien
gataattaaaacatctagctacaga

SEQ ID NO: 1207988 - DNA, 25 bp, Homo sapien
aaatcttaaagcctattgctagtct

SEQ ID NO: 1207989 - DNA, 25 bp, Homo sapien
taattatgttacgtttcttagtcac

SEQ ID NO: 1207990 - DNA, 25 bp, Homo sapien
acatgctgttgaaagtctaggccca

SEQ ID NO: 1207991 - DNA, 25 bp, Homo sapien
tggcatcctgaatcccggaacaaga

SEQ ID NO: 1207992 - DNA, 25 bp, Homo sapien
gaatggtaattgcatcaacactggc

SEQ ID NO: 1207993 - DNA, 25 bp, Homo sapien
gggcctatcccagtcagtttattga

SEQ ID NO: 1207994 - DNA, 25 bp, Homo sapien
tataaagatctgaactggcatcctg

SEQ ID NO: 1207995 - DNA, 25 bp, Homo sapien
catcataagaaaggtgcgagttact

SEQ ID NO: 1207996 - DNA, 25 bp, Homo sapien
cagatgcactgatgcctaaaggcct

SEQ ID NO: 1207997 - DNA, 25 bp, Homo sapien
tgttctgcactccaaaatactgtgg

SEQ ID NO: 1207998 - DNA, 25 bp, Homo sapien
tggccagaagtggtgtaaaaacagc

SEQ ID NO: 1207999 - DNA, 25 bp, Homo sapien
actggtaaccacgacaaatgtttgg

SEQ ID NO: 1208000 - DNA, 25 bp, Homo sapien
ggtaagcacaccatacactgtacat

SEQ ID NO: 1208001 - DNA, 25 bp, Homo sapien
gctcaacagtgtccatgaaaccata

SEQ ID NO: 1208002 - DNA, 25 bp, Homo sapien
taagcaatgctctagagtggacagg

SEQ ID NO: 1208003 - DNA, 25 bp, Homo sapien
tacattttattcaagaaacagaaaa

SEQ ID NO: 1208004 - DNA, 25 bp, Homo sapien
acattttattcaagaaacagaaaag

SEQ ID NO: 1208005 - DNA, 25 bp, Homo sapien
cattttattcaagaaacagaaaagg

SEQ ID NO: 1208006 - DNA, 25 bp, Homo sapien
gtaggaaagcctatgacagtatgtc

SEQ ID NO: 1208007 - DNA, 25 bp, Homo sapien
ttgtaggaaagcctatgacagtatg

SEQ ID NO: 1208008 - DNA, 25 bp, Homo sapien
agcctatgacagtatgtcaaatgct

SEQ ID NO: 1208009 - DNA, 25 bp, Homo sapien
ctatgacagtatgtcaaatgctgga

SEQ ID NO: 1208010 - DNA, 25 bp, Homo sapien
aacccttcaaagtctgcctgggcac

SEQ ID NO: 1208011 - DNA, 25 bp, Homo sapien
caaacccttcaaagtctgcctgggc

SEQ ID NO: 1208012 - DNA, 25 bp, Homo sapien
cccttcaaagtctgcctgggcacac

SEQ ID NO: 1208013 - DNA, 25 bp, Homo sapien
cttacagcacaaacccttcaaagtc

SEQ ID NO: 1208014 - DNA, 25 bp, Homo sapien
cacgcttgatcctgtcacaaacaca

SEQ ID NO: 1208015 - DNA, 25 bp, Homo sapien
aacaattttctgctccttgataagg

SEQ ID NO: 1208016 - DNA, 25 bp, Homo sapien
tttctttgttttggacaacctcata

SEQ ID NO: 1208017 - DNA, 25 bp, Homo sapien
acatggaaccaacataggccctgct

SEQ ID NO: 1208018 - DNA, 25 bp, Homo sapien
tttctgactctgcttgtgccttcaa

SEQ ID NO: 1208019 - DNA, 25 bp, Homo sapien
tagctttctgactctgcttgtgcct

SEQ ID NO: 1208020 - DNA, 25 bp, Homo sapien
ctttctgactctgcttgtgccttca

SEQ ID NO: 1208021 - DNA, 25 bp, Homo sapien
tatttagctttctgactctgcttgt

SEQ ID NO: 1208022 - DNA, 25 bp, Homo sapien
tgcagctgtgtgattgtcccagggc

SEQ ID NO: 1208023 - DNA, 25 bp, Homo sapien
atctaccccggacatcattgatgcc

SEQ ID NO: 1208024 - DNA, 25 bp, Homo sapien
gactcaatgtgaaagccttgtggcc

SEQ ID NO: 1208025 - DNA, 25 bp, Homo sapien
agcccacactgctaaggagatgact

SEQ ID NO: 1208026 - DNA, 25 bp, Homo sapien
ctgtccatgggccttactgaacttg

SEQ ID NO: 1208027 - DNA, 25 bp, Homo sapien
ccaagggaagtctgtggcccagagc

SEQ ID NO: 1208028 - DNA, 25 bp, Homo sapien
tgtccatgggccttactgaacttgt

SEQ ID NO: 1208029 - DNA, 25 bp, Homo sapien
taatgtctgagcatgtggttgctgg

SEQ ID NO: 1208030 - DNA, 25 bp, Homo sapien
cttttctaatgtctgagcatgtggt

SEQ ID NO: 1208031 - DNA, 25 bp, Homo sapien
tcctcccctagaaggctagcagggg

SEQ ID NO: 1208032 - DNA, 25 bp, Homo sapien
gttgctggtgagcggtgcccacatc

SEQ ID NO: 1208033 - DNA, 25 bp, Homo sapien
caaaggcgttgcccagcaggcccac

SEQ ID NO: 1208034 - DNA, 25 bp, Homo sapien
tagagcgcggggatgtagacgtagc

SEQ ID NO: 1208035 - DNA, 25 bp, Homo sapien
ctccaggccgtccaaccccgagtag

SEQ ID NO: 1208036 - DNA, 25 bp, Homo sapien
tagacgtagccgtagggcaggtccc

SEQ ID NO: 1208037 - DNA, 25 bp, Homo sapien
agaggccatcgccgaacggccagcg

SEQ ID NO: 1208038 - DNA, 25 bp, Homo sapien
gaaggtatccaccagccgccgcggg

SEQ ID NO: 1208039 - DNA, 25 bp, Homo sapien
ccaggtgcagcacgaaggtatccac

SEQ ID NO: 1208040 - DNA, 25 bp, Homo sapien
agctgccgccaggtgcagcacgaag

SEQ ID NO: 1208041 - DNA, 25 bp, Homo sapien
tgcccgccagcgcgaagctgctgag

SEQ ID NO: 1208042 - DNA, 25 bp, Homo sapien
ggtccacgctcatgcccgccagcag

SEQ ID NO: 1208043 - DNA, 25 bp, Homo sapien
agcgcgcccgcgcagcgcgtgcccg

SEQ ID NO: 1208044 - DNA, 25 bp, Homo sapien
cgcgtgcccgccagcgcgaagctgc

SEQ ID NO: 1208045 - DNA, 25 bp, Homo sapien
agatgatgcgcagcgagttcctccg

SEQ ID NO: 1208046 - DNA, 25 bp, Homo sapien
tgcgcagtggcctcgcctcgagcag

SEQ ID NO: 1208047 - DNA, 25 bp, Homo sapien
ctgcaacccccggtagaccagggag

SEQ ID NO: 1208048 - DNA, 25 bp, Homo sapien
gcggcgcgagatgcggcagtagcag

SEQ ID NO: 1208049 - DNA, 25 bp, Homo sapien
ccccagacgcgccaggtggaagacg

SEQ ID NO: 1208050 - DNA, 25 bp, Homo sapien
gaggctgagctgatccttcgcgcca

SEQ ID NO: 1208051 - DNA, 25 bp, Homo sapien
cgcagctgttgacgaaggccaggca

SEQ ID NO: 1208052 - DNA, 25 bp, Homo sapien
cggcaacggaacacggaactgtcgt

SEQ ID NO: 1208053 - DNA, 25 bp, Homo sapien
ggagacctcaaaaaacgcctggtga

SEQ ID NO: 1208054 - DNA, 25 bp, Homo sapien
gaagtgtcaccagattcaatgcaag

SEQ ID NO: 1208055 - DNA, 25 bp, Homo sapien
tggtgagcgatttcaggaccttctg

SEQ ID NO: 1208056 - DNA, 25 bp, Homo sapien
aaagcaacggctattgtgggagacg

SEQ ID NO: 1208057 - DNA, 25 bp, Homo sapien
gggaagacgcaagaagggactgaag

SEQ ID NO: 1208058 - DNA, 25 bp, Homo sapien
gaagagtccgatccaagagtcggga

SEQ ID NO: 1208059 - DNA, 25 bp, Homo sapien
gacatctgtcccctggggcatacca

SEQ ID NO: 1208060 - DNA, 25 bp, Homo sapien
acgcgggagtgacgacgtacccgca

SEQ ID NO: 1208061 - DNA, 25 bp, Homo sapien
tcatttaacttcggcatttgcagca

SEQ ID NO: 1208062 - DNA, 25 bp, Homo sapien
ttcatttaacttcggcatttgcagc

SEQ ID NO: 1208063 - DNA, 25 bp, Homo sapien
atttcatttaacttcggcatttgca

SEQ ID NO: 1208064 - DNA, 25 bp, Homo sapien
ctgccctccccggaggtatttcatt

SEQ ID NO: 1208065 - DNA, 25 bp, Homo sapien
tgctcactaggaaaggtgttcgcct

SEQ ID NO: 1208066 - DNA, 25 bp, Homo sapien
tggaatgcgccctgaaatgagacct

SEQ ID NO: 1208067 - DNA, 25 bp, Homo sapien
tggccagcgctagagacaacagtga

SEQ ID NO: 1208068 - DNA, 25 bp, Homo sapien
tgttcgcctccactaagcaaaggtg

SEQ ID NO: 1208069 - DNA, 25 bp, Homo sapien
tcgcctcagggtctcccaagccaca

SEQ ID NO: 1208070 - DNA, 25 bp, Homo sapien
tagtccaggagttgaaaaacagccc

SEQ ID NO: 1208071 - DNA, 25 bp, Homo sapien
tttagtccaggagttgaaaaacagc

SEQ ID NO: 1208072 - DNA, 25 bp, Homo sapien
agggccctcacatgtcgcctcaggg

SEQ ID NO: 1208073 - DNA, 25 bp, Homo sapien
ccaggttgtgtaggtagcctggagc

SEQ ID NO: 1208074 - DNA, 25 bp, Homo sapien
ctgggccaggttgtgtaggtagcct

SEQ ID NO: 1208075 - DNA, 25 bp, Homo sapien
ggccaggttgtgtaggtagcctgga

SEQ ID NO: 1208076 - DNA, 25 bp, Homo sapien
gttgtgtaggtagcctggagcttcc

SEQ ID NO: 1208077 - DNA, 25 bp, Homo sapien
gtgtcgctgacctcatccttactct

SEQ ID NO: 1208078 - DNA, 25 bp, Homo sapien
atgccactgtcggtgtcgctgacct

SEQ ID NO: 1208079 - DNA, 25 bp, Homo sapien
tcggtgtcgctgacctcatccttac

SEQ ID NO: 1208080 - DNA, 25 bp, Homo sapien
gccactgtcggtgtcgctgacctca

SEQ ID NO: 1208081 - DNA, 25 bp, Homo sapien
ctgcttgtgcactgcatgggtcagc

SEQ ID NO: 1208082 - DNA, 25 bp, Homo sapien
caggcctccagcctcgcttccaggg

SEQ ID NO: 1208083 - DNA, 25 bp, Homo sapien
ctccttcattggggagaccgggctg

SEQ ID NO: 1208084 - DNA, 25 bp, Homo sapien
cttgtgcactgcatgggtcagctcc

SEQ ID NO: 1208085 - DNA, 25 bp, Homo sapien
gggatactccgctggcaaggtgccc

SEQ ID NO: 1208086 - DNA, 25 bp, Homo sapien
taagccgctccgatcctgcggcgaa

SEQ ID NO: 1208087 - DNA, 25 bp, Homo sapien
cagtcatccagtttgtaagccgctc

SEQ ID NO: 1208088 - DNA, 25 bp, Homo sapien
tccgctggcaaggtgcccgtcagct

SEQ ID NO: 1208089 - DNA, 25 bp, Homo sapien
cgccgctcgaccaggcagcgctgga

SEQ ID NO: 1208090 - DNA, 25 bp, Homo sapien
ggtggctcgctattgcgccgccgct

SEQ ID NO: 1208091 - DNA, 25 bp, Homo sapien
aggcacagccgacgggctgcctctg

SEQ ID NO: 1208092 - DNA, 25 bp, Homo sapien
ccgagcctgcctgctgaggttctcc

SEQ ID NO: 1208093 - DNA, 25 bp, Homo sapien
tggcacggggctgtgcgcccaccat

SEQ ID NO: 1208094 - DNA, 25 bp, Homo sapien
ggaagccttgctggagttggagaga

SEQ ID NO: 1208095 - DNA, 25 bp, Homo sapien
tcaaaagctcatttaaggagcatgg

SEQ ID NO: 1208096 - DNA, 25 bp, Homo sapien
ccaagaatcagctttacccagctgg

SEQ ID NO: 1208097 - DNA, 25 bp, Homo sapien
gagaaatatctctgtgtaggaagtc

SEQ ID NO: 1208098 - DNA, 25 bp, Homo sapien
tggaaggatcccacccttgaccagg

SEQ ID NO: 1208099 - DNA, 25 bp, Homo sapien
tgtgggcccctgaaacaattcagtg

SEQ ID NO: 1208100 - DNA, 25 bp, Homo sapien
tagcaatcgtcaaaccctttgctgc

SEQ ID NO: 1208101 - DNA, 25 bp, Homo sapien
caattcagtgatcagtaacacatag

SEQ ID NO: 1208102 - DNA, 25 bp, Homo sapien
cacggccactagtctctgggccaag

SEQ ID NO: 1208103 - DNA, 25 bp, Homo sapien
ccacggccactagtctctgggccaa

SEQ ID NO: 1208104 - DNA, 25 bp, Homo sapien
cccacggccactagtctctgggcca

SEQ ID NO: 1208105 - DNA, 25 bp, Homo sapien
cctgttggaagctaacctgtggtgg

SEQ ID NO: 1208106 - DNA, 25 bp, Homo sapien
ctggccttgggtcaggacaaaggaa

SEQ ID NO: 1208107 - DNA, 25 bp, Homo sapien
cctgtggtggacacactgatgtgat

SEQ ID NO: 1208108 - DNA, 25 bp, Homo sapien
gaaaacagtcacacctaagggctca

SEQ ID NO: 1208109 - DNA, 25 bp, Homo sapien
gcaaaaagccaacacgatatgcagg

SEQ ID NO: 1208110 - DNA, 25 bp, Homo sapien
aaagccaacacgatatgcagggatg

SEQ ID NO: 1208111 - DNA, 25 bp, Homo sapien
cagggactagcaagggctttccagc

SEQ ID NO: 1208112 - DNA, 25 bp, Homo sapien
ggcacagggactagcaagggctttc

SEQ ID NO: 1208113 - DNA, 25 bp, Homo sapien
ggagtgttgttctgcggccaagcca

SEQ ID NO: 1208114 - DNA, 25 bp, Homo sapien
ttaactgtcacatggaggcacctcc

SEQ ID NO: 1208115 - DNA, 25 bp, Homo sapien
tatcacctactcttggctgcgggag

SEQ ID NO: 1208116 - DNA, 25 bp, Homo sapien
caacaggactttagatcccagggcc

SEQ ID NO: 1208117 - DNA, 25 bp, Homo sapien
ggctgatgactctcacctagcagtt

SEQ ID NO: 1208118 - DNA, 25 bp, Homo sapien
caaagtatggctgatgactctcacc

SEQ ID NO: 1208119 - DNA, 25 bp, Homo sapien
cctgccactgcaaagtatggctgat

SEQ ID NO: 1208120 - DNA, 25 bp, Homo sapien
taaatgagctcaacacctgactgct

SEQ ID NO: 1208121 - DNA, 25 bp, Homo sapien
cagttgaggaaaccacgtctcagag

SEQ ID NO: 1208122 - DNA, 25 bp, Homo sapien
tattatcacctgcaagtgacagttg

SEQ ID NO: 1208123 - DNA, 25 bp, Homo sapien
taaagtgacctggatggaactcacg

SEQ ID NO: 1208124 - DNA, 25 bp, Homo sapien
tcttgagaataagcctaaagtgacc

SEQ ID NO: 1208125 - DNA, 25 bp, Homo sapien
caaagatcccaatgtgagacctcct

SEQ ID NO: 1208126 - DNA, 25 bp, Homo sapien
tataatcatctcacatcacaaacac

SEQ ID NO: 1208127 - DNA, 25 bp, Homo sapien
tcaaagatcccaatgtgagacctcc

SEQ ID NO: 1208128 - DNA, 25 bp, Homo sapien
gaatttcactctaacttttgtataa

SEQ ID NO: 1208129 - DNA, 25 bp, Homo sapien
tgtgtgctaaatacacattgggagt

SEQ ID NO: 1208130 - DNA, 25 bp, Homo sapien
gtgtgctaaatacacattgggagtg

SEQ ID NO: 1208131 - DNA, 25 bp, Homo sapien
tgctaaatacacattgggagtgatt

SEQ ID NO: 1208132 - DNA, 25 bp, Homo sapien
tgtgctaaatacacattgggagtga

SEQ ID NO: 1208133 - DNA, 25 bp, Homo sapien
gagctgtcatcagaggcactgagct

SEQ ID NO: 1208134 - DNA, 25 bp, Homo sapien
gggagctgtcatcagaggcactgag

SEQ ID NO: 1208135 - DNA, 25 bp, Homo sapien
ggagctgtcatcagaggcactgagc

SEQ ID NO: 1208136 - DNA, 25 bp, Homo sapien
agggagctgtcatcagaggcactga

SEQ ID NO: 1208137 - DNA, 25 bp, Homo sapien
cttcctccaggaggagcccatctga

SEQ ID NO: 1208138 - DNA, 25 bp, Homo sapien
ttcctccaggaggagcccatctgac

SEQ ID NO: 1208139 - DNA, 25 bp, Homo sapien
gactctggaggaggttttggcactt

SEQ ID NO: 1208140 - DNA, 25 bp, Homo sapien
tcctgggcttctcataggggtggtc

SEQ ID NO: 1208141 - DNA, 25 bp, Homo sapien
tgttctggactggagcccgttctgg

SEQ ID NO: 1208142 - DNA, 25 bp, Homo sapien
ttggctgcagaccctcaagggtttg

SEQ ID NO: 1208143 - DNA, 25 bp, Homo sapien
tgggaaccacgtggtaggaggcagg

SEQ ID NO: 1208144 - DNA, 25 bp, Homo sapien
ggcccatcctgtggtgtggtggctg

SEQ ID NO: 1208145 - DNA, 25 bp, Homo sapien
ctggccaggaacaccacggatggga

SEQ ID NO: 1208146 - DNA, 25 bp, Homo sapien
gaacaccacggatgggaaccacgtg

SEQ ID NO: 1208147 - DNA, 25 bp, Homo sapien
gaggctgcagaaaggagatgtcggg

SEQ ID NO: 1208148 - DNA, 25 bp, Homo sapien
aagcaggaatctggcactgtcaccg

SEQ ID NO: 1208149 - DNA, 25 bp, Homo sapien
tcaggacccgcccggaaggaatcca

SEQ ID NO: 1208150 - DNA, 25 bp, Homo sapien
cccgcggtgacgatgggtcttggga

SEQ ID NO: 1208151 - DNA, 25 bp, Homo sapien
ggtacaaagacttgcacaggggccc

SEQ ID NO: 1208152 - DNA, 25 bp, Homo sapien
gtacaaagacttgcacaggggcccc

SEQ ID NO: 1208153 - DNA, 25 bp, Homo sapien
aggtacaaagacttgcacaggggcc

SEQ ID NO: 1208154 - DNA, 25 bp, Homo sapien
agctccaggtcatcggcctgcgatg

SEQ ID NO: 1208155 - DNA, 25 bp, Homo sapien
gctccaggtcatcggcctgcgatgg

SEQ ID NO: 1208156 - DNA, 25 bp, Homo sapien
acagttttttccagcgtggggcgca

SEQ ID NO: 1208157 - DNA, 25 bp, Homo sapien
atccttaggtcagggcttctgaaaa

SEQ ID NO: 1208158 - DNA, 25 bp, Homo sapien
gccacttgtcttatataaggagata

SEQ ID NO: 1208159 - DNA, 25 bp, Homo sapien
tgtcagtcagacaggcaaggcctta

SEQ ID NO: 1208160 - DNA, 25 bp, Homo sapien
caaggccttaagtccagtaggccaa

SEQ ID NO: 1208161 - DNA, 25 bp, Homo sapien
cctccagcaatagtgggacaggagg

SEQ ID NO: 1208162 - DNA, 25 bp, Homo sapien
agctgtcaaagggtggctgctgtcc

SEQ ID NO: 1208163 - DNA, 25 bp, Homo sapien
gtctagcaagacaatacaccaccgg

SEQ ID NO: 1208164 - DNA, 25 bp, Homo sapien
tactgacctttgacctaccacttgg

SEQ ID NO: 1208165 - DNA, 25 bp, Homo sapien
caagcccttgagatgcccagaggta

SEQ ID NO: 1208166 - DNA, 25 bp, Homo sapien
agccgaaatcttgctacagcattcc

SEQ ID NO: 1208167 - DNA, 25 bp, Homo sapien
agtgagccgaaatcttgctacagca

SEQ ID NO: 1208168 - DNA, 25 bp, Homo sapien
tgagccgaaatcttgctacagcatt

SEQ ID NO: 1208169 - DNA, 25 bp, Homo sapien
gaaatcttgctacagcattccagcc

SEQ ID NO: 1208170 - DNA, 25 bp, Homo sapien
aattcagcatctcatcagcccttgg

SEQ ID NO: 1208171 - DNA, 25 bp, Homo sapien
gccacaaaagtggtgcctttccaaa

SEQ ID NO: 1208172 - DNA, 25 bp, Homo sapien
caaagaaggccctaggatgagaacc

SEQ ID NO: 1208173 - DNA, 25 bp, Homo sapien
tatgatgaaaaaacgttagaagggc

SEQ ID NO: 1208174 - DNA, 25 bp, Homo sapien
ggcaccaggtgttatacaagaccaa

SEQ ID NO: 1208175 - DNA, 25 bp, Homo sapien
tattcacagtctgttccagtccagg

SEQ ID NO: 1208176 - DNA, 25 bp, Homo sapien
tccaagcagggtattcacgcatggg

SEQ ID NO: 1208177 - DNA, 25 bp, Homo sapien
gaaatgccaggtgcatcccttcagc

SEQ ID NO: 1208178 - DNA, 25 bp, Homo sapien
tgacacgccggcgcctcaggtccgg

SEQ ID NO: 1208179 - DNA, 25 bp, Homo sapien
gacacgccggcgcctcaggtccggg

SEQ ID NO: 1208180 - DNA, 25 bp, Homo sapien
gcctcaggtccgggcacagcctctc

SEQ ID NO: 1208181 - DNA, 25 bp, Homo sapien
ctgacacgccggcgcctcaggtccg

SEQ ID NO: 1208182 - DNA, 25 bp, Homo sapien
aatgtcgatggttcaaaggttactc

SEQ ID NO: 1208183 - DNA, 25 bp, Homo sapien
ccggtaagctggacttccaagagat

SEQ ID NO: 1208184 - DNA, 25 bp, Homo sapien
actcggattcatctgtacacttggg

SEQ ID NO: 1208185 - DNA, 25 bp, Homo sapien
cagcctgcagcttgcgatgagaaca

SEQ ID NO: 1208186 - DNA, 25 bp, Homo sapien
ggggagtttagctgattccaccaga

SEQ ID NO: 1208187 - DNA, 25 bp, Homo sapien
agctgattccaccagatggaacagg

SEQ ID NO: 1208188 - DNA, 25 bp, Homo sapien
ggatgtagttgggggagtttagctg

SEQ ID NO: 1208189 - DNA, 25 bp, Homo sapien
ctgattccaccagatggaacaggaa

SEQ ID NO: 1208190 - DNA, 25 bp, Homo sapien
agaaagtccactatgaactcatagg

SEQ ID NO: 1208191 - DNA, 25 bp, Homo sapien
gaaagtccactatgaactcataggc

SEQ ID NO: 1208192 - DNA, 25 bp, Homo sapien
tatgaactcataggcttctctttct

SEQ ID NO: 1208193 - DNA, 25 bp, Homo sapien
tccactatgaactcataggcttctc

SEQ ID NO: 1208194 - DNA, 25 bp, Homo sapien
gatggctttgggatagtaatcgtcc

SEQ ID NO: 1208195 - DNA, 25 bp, Homo sapien
aggaacttcagcttggtgaactcag

SEQ ID NO: 1208196 - DNA, 25 bp, Homo sapien
tgggatagtaatcgtccatattgcc

SEQ ID NO: 1208197 - DNA, 25 bp, Homo sapien
ccatattgccgtctgcttggccatg

SEQ ID NO: 1208198 - DNA, 25 bp, Homo sapien
tcagcgccacgatgcagagcatggc

SEQ ID NO: 1208199 - DNA, 25 bp, Homo sapien
gcagagcatggcttgctgacgcatg

SEQ ID NO: 1208200 - DNA, 25 bp, Homo sapien
gcatgttgcccatcaaaatctcagt

SEQ ID NO: 1208201 - DNA, 25 bp, Homo sapien
aaatctcagtggattcttcaagaat

SEQ ID NO: 1208202 - DNA, 25 bp, Homo sapien
ccagtttctgggacaagtggaatgg

SEQ ID NO: 1208203 - DNA, 25 bp, Homo sapien
cagtttctgggacaagtggaatggt

SEQ ID NO: 1208204 - DNA, 25 bp, Homo sapien
ttctgggacaagtggaatggtggat

SEQ ID NO: 1208205 - DNA, 25 bp, Homo sapien
gtttctgggacaagtggaatggtgg

SEQ ID NO: 1208206 - DNA, 25 bp, Homo sapien
tgtctcttcggtacaggctgggcac

SEQ ID NO: 1208207 - DNA, 25 bp, Homo sapien
agaacaggctggagacgcccacatt

SEQ ID NO: 1208208 - DNA, 25 bp, Homo sapien
ctgggcacgataggcggcagagaga

SEQ ID NO: 1208209 - DNA, 25 bp, Homo sapien
agactcgcattgtctcttcggtaca

SEQ ID NO: 1208210 - DNA, 25 bp, Homo sapien
gacaagtgaagagacagggagtgtc

SEQ ID NO: 1208211 - DNA, 25 bp, Homo sapien
caagtgaagagacagggagtgtcca

SEQ ID NO: 1208212 - DNA, 25 bp, Homo sapien
tccctgggggcactccatctccttg

SEQ ID NO: 1208213 - DNA, 25 bp, Homo sapien
agtgaagagacagggagtgtccaga

SEQ ID NO: 1208214 - DNA, 25 bp, Homo sapien
tccaggaagttttgtagtatgagca

SEQ ID NO: 1208215 - DNA, 25 bp, Homo sapien
cacaagagcctgcaacatgttgtct

SEQ ID NO: 1208216 - DNA, 25 bp, Homo sapien
ctgtccatcacaagagcctgcaaca

SEQ ID NO: 1208217 - DNA, 25 bp, Homo sapien
aacatgttgtctaaggcctggaccc

SEQ ID NO: 1208218 - DNA, 25 bp, Homo sapien
cagccaggaaatagtgcccaaggcc

SEQ ID NO: 1208219 - DNA, 25 bp, Homo sapien
ggcccgcatctgttcatacactttg

SEQ ID NO: 1208220 - DNA, 25 bp, Homo sapien
tgcccaaggcccgcatctgttcata

SEQ ID NO: 1208221 - DNA, 25 bp, Homo sapien
agcagccaggaaatagtgcccaagg

SEQ ID NO: 1208222 - DNA, 25 bp, Homo sapien
tgatgcctctatgctgatctcgtgg

SEQ ID NO: 1208223 - DNA, 25 bp, Homo sapien
ttgcagcccatgacgaacaggccga

SEQ ID NO: 1208224 - DNA, 25 bp, Homo sapien
gacgaacaggccgaagatgctcatc

SEQ ID NO: 1208225 - DNA, 25 bp, Homo sapien
catcagtttcccactcattgagaat

SEQ ID NO: 1208226 - DNA, 25 bp, Homo sapien
aggattttgaacaggtaatgcaacg

SEQ ID NO: 1208227 - DNA, 25 bp, Homo sapien
ttctctgaaacacaaggattttgaa

SEQ ID NO: 1208228 - DNA, 25 bp, Homo sapien
ggattttgaacaggtaatgcaacgc

SEQ ID NO: 1208229 - DNA, 25 bp, Homo sapien
tctgaaacacaaggattttgaacag

SEQ ID NO: 1208230 - DNA, 25 bp, Homo sapien
ggccactcaggctcatgttgcttac

SEQ ID NO: 1208231 - DNA, 25 bp, Homo sapien
cagtggccactcaggctcatgttgc

SEQ ID NO: 1208232 - DNA, 25 bp, Homo sapien
tccccacggctgtagcccagtggcc

SEQ ID NO: 1208233 - DNA, 25 bp, Homo sapien
gtccccacggctgtagcccagtggc

SEQ ID NO: 1208234 - DNA, 25 bp, Homo sapien
cttcaatccaaaaacaacaattaag

SEQ ID NO: 1208235 - DNA, 25 bp, Homo sapien
cagtgttagatcctggaggctggca

SEQ ID NO: 1208236 - DNA, 25 bp, Homo sapien
tggcaagccatgctccatggaaatg

SEQ ID NO: 1208237 - DNA, 25 bp, Homo sapien
ccttcaggatagtctctgtcttttg

SEQ ID NO: 1208238 - DNA, 25 bp, Homo sapien
aatgcttctgcaaatccttcaggat

SEQ ID NO: 1208239 - DNA, 25 bp, Homo sapien
ttctcagggttcaggtatttcttga

SEQ ID NO: 1208240 - DNA, 25 bp, Homo sapien
ctcagggttcaggtatttcttgaag

SEQ ID NO: 1208241 - DNA, 25 bp, Homo sapien
cagggttcaggtatttcttgaagaa

SEQ ID NO: 1208242 - DNA, 25 bp, Homo sapien
cttctcagggttcaggtatttcttg

SEQ ID NO: 1208243 - DNA, 25 bp, Homo sapien
agctgcagagatgtcacgcctgctg

SEQ ID NO: 1208244 - DNA, 25 bp, Homo sapien
cgatctctggaatcgtgtacttcag

SEQ ID NO: 1208245 - DNA, 25 bp, Homo sapien
aagctgcagagatgtcacgcctgct

SEQ ID NO: 1208246 - DNA, 25 bp, Homo sapien
cttcccgatctctggaatcgtgtac

SEQ ID NO: 1208247 - DNA, 25 bp, Homo sapien
tctcggttcccagaatacctctaag

SEQ ID NO: 1208248 - DNA, 25 bp, Homo sapien
gattaatctcggttcccagaatacc

SEQ ID NO: 1208249 - DNA, 25 bp, Homo sapien
cggttcccagaatacctctaagatt

SEQ ID NO: 1208250 - DNA, 25 bp, Homo sapien
tgacttctgattaatctcggttccc

SEQ ID NO: 1208251 - DNA, 25 bp, Homo sapien
cttctatcttcaatactgtcaggat

SEQ ID NO: 1208252 - DNA, 25 bp, Homo sapien
gacagcagatacaggatcttcttaa

SEQ ID NO: 1208253 - DNA, 25 bp, Homo sapien
tgtcaggataacttcagtgtagtac

SEQ ID NO: 1208254 - DNA, 25 bp, Homo sapien
tctgtaatgctgttcatgtggtagt

SEQ ID NO: 1208255 - DNA, 25 bp, Homo sapien
gcaggtagtccacgatcatttcgta

SEQ ID NO: 1208256 - DNA, 25 bp, Homo sapien
ccacgatcatttcgtagcctttggg

SEQ ID NO: 1208257 - DNA, 25 bp, Homo sapien
ggtagtccacgatcatttcgtagcc

SEQ ID NO: 1208258 - DNA, 25 bp, Homo sapien
tgaagcaggtagtccacgatcattt

SEQ ID NO: 1208259 - DNA, 25 bp, Homo sapien
gcccccctcttctggcctttccata

SEQ ID NO: 1208260 - DNA, 25 bp, Homo sapien
agatctggaacagcagggccatgaa

SEQ ID NO: 1208261 - DNA, 25 bp, Homo sapien
aggagatctggaacagcagggccat

SEQ ID NO: 1208262 - DNA, 25 bp, Homo sapien
gagatctggaacagcagggccatga

SEQ ID NO: 1208263 - DNA, 25 bp, Homo sapien
ggagatctggaacagcagggccatg

SEQ ID NO: 1208264 - DNA, 25 bp, Homo sapien
tatgtgttgctgatcccggcttgtt

SEQ ID NO: 1208265 - DNA, 25 bp, Homo sapien
gggtccatccattcagctatgtgtt

SEQ ID NO: 1208266 - DNA, 25 bp, Homo sapien
catccattcagctatgtgttgctga

SEQ ID NO: 1208267 - DNA, 25 bp, Homo sapien
cggcttgtttcagcgtccccttcaa

SEQ ID NO: 1208268 - DNA, 25 bp, Homo sapien
tggccggcagagtgactccgccata

SEQ ID NO: 1208269 - DNA, 25 bp, Homo sapien
gaccccatgtctctgaatagaagac

SEQ ID NO: 1208270 - DNA, 25 bp, Homo sapien
cagtccccatatccagaactttgaa

SEQ ID NO: 1208271 - DNA, 25 bp, Homo sapien
tccgccatagtgtctttcaggattg

SEQ ID NO: 1208272 - DNA, 25 bp, Homo sapien
gggccgttaagtgattcttgcaggt

SEQ ID NO: 1208273 - DNA, 25 bp, Homo sapien
gggcggttgtgccaacagttattga

SEQ ID NO: 1208274 - DNA, 25 bp, Homo sapien
ccaacagttattgatgacaacggac

SEQ ID NO: 1208275 - DNA, 25 bp, Homo sapien
aacacaagggccgttaagtgattct

SEQ ID NO: 1208276 - DNA, 25 bp, Homo sapien
aagaacactgcaaagcacgtattag

SEQ ID NO: 1208277 - DNA, 25 bp, Homo sapien
gcacgtattagtcagatttactgac

SEQ ID NO: 1208278 - DNA, 25 bp, Homo sapien
aacactgcaaagcacgtattagtca

SEQ ID NO: 1208279 - DNA, 25 bp, Homo sapien
cgtattagtcagatttactgacgtg

SEQ ID NO: 1208280 - DNA, 25 bp, Homo sapien
cactcttgaaccagtttgccagaat

SEQ ID NO: 1208281 - DNA, 25 bp, Homo sapien
catgttttcatgcttcgcaaagacc

SEQ ID NO: 1208282 - DNA, 25 bp, Homo sapien
tgccagaatgcaggtggtgaagtca

SEQ ID NO: 1208283 - DNA, 25 bp, Homo sapien
caaagacctctagcatctgcagcaa

SEQ ID NO: 1208284 - DNA, 25 bp, Homo sapien
accagcaaagtctccagtacgatgt

SEQ ID NO: 1208285 - DNA, 25 bp, Homo sapien
tgttcgaggagtagcagcagttcag

SEQ ID NO: 1208286 - DNA, 25 bp, Homo sapien
aagggcaccagcgtgaaggtgagct

SEQ ID NO: 1208287 - DNA, 25 bp, Homo sapien
ccagtacgatgtcgctgttcgagga

SEQ ID NO: 1208288 - DNA, 25 bp, Homo sapien
tcaaaggctgccaaccgcagatgct

SEQ ID NO: 1208289 - DNA, 25 bp, Homo sapien
gaccttggtcaagagactcccatag

SEQ ID NO: 1208290 - DNA, 25 bp, Homo sapien
acatcggtattcacgtccctcaggt

SEQ ID NO: 1208291 - DNA, 25 bp, Homo sapien
tagcaagttgaggatctggtgtttc

SEQ ID NO: 1208292 - DNA, 25 bp, Homo sapien
tcccatgaaaacggggactgaaggc

SEQ ID NO: 1208293 - DNA, 25 bp, Homo sapien
ctcccatgaaaacggggactgaagg

SEQ ID NO: 1208294 - DNA, 25 bp, Homo sapien
ccatgaaaacggggactgaaggcca

SEQ ID NO: 1208295 - DNA, 25 bp, Homo sapien
catgaaaacggggactgaaggccag

SEQ ID NO: 1208296 - DNA, 25 bp, Homo sapien
agacaaggaggctcagcatgaggag

SEQ ID NO: 1208297 - DNA, 25 bp, Homo sapien
ggagacaaggaggctcagcatgagg

SEQ ID NO: 1208298 - DNA, 25 bp, Homo sapien
gggagacaaggaggctcagcatgag

SEQ ID NO: 1208299 - DNA, 25 bp, Homo sapien
gagacaaggaggctcagcatgagga

SEQ ID NO: 1208300 - DNA, 25 bp, Homo sapien
gaatgttccacacatctttctctgc

SEQ ID NO: 1208301 - DNA, 25 bp, Homo sapien
agcccagcacggcagcagtgtggca

SEQ ID NO: 1208302 - DNA, 25 bp, Homo sapien
tgctttcagctttgaccagcccagc

SEQ ID NO: 1208303 - DNA, 25 bp, Homo sapien
cagggctccaagaatgttccacaca

SEQ ID NO: 1208304 - DNA, 25 bp, Homo sapien
accagagggctttgtttgtctcctg

SEQ ID NO: 1208305 - DNA, 25 bp, Homo sapien
gggctttgtttgtctcctgatccag

SEQ ID NO: 1208306 - DNA, 25 bp, Homo sapien
acacactgcttcagaaaccagaggg

SEQ ID NO: 1208307 - DNA, 25 bp, Homo sapien
cagagggctttgtttgtctcctgat

SEQ ID NO: 1208308 - DNA, 25 bp, Homo sapien
ctcctcaatttcatcgatctcttcc

SEQ ID NO: 1208309 - DNA, 25 bp, Homo sapien
cctcctcaatttcatcgatctcttc

SEQ ID NO: 1208310 - DNA, 25 bp, Homo sapien
gcctcctcaatttcatcgatctctt

SEQ ID NO: 1208311 - DNA, 25 bp, Homo sapien
tcctcaatttcatcgatctcttcca

SEQ ID NO: 1208312 - DNA, 25 bp, Homo sapien
taatggccaggcctacatctgagac

SEQ ID NO: 1208313 - DNA, 25 bp, Homo sapien
cattgtcacagggtctaatggccag

SEQ ID NO: 1208314 - DNA, 25 bp, Homo sapien
tccatttctagtgcaggacccagga

SEQ ID NO: 1208315 - DNA, 25 bp, Homo sapien
tacaaagattctgcagggatacacc

SEQ ID NO: 1208316 - DNA, 25 bp, Homo sapien
gaactcgctctgtaaccttcggtag

SEQ ID NO: 1208317 - DNA, 25 bp, Homo sapien
catttatgaaatgagggtcccattg

SEQ ID NO: 1208318 - DNA, 25 bp, Homo sapien
gaggttctgctactccaggagccga

SEQ ID NO: 1208319 - DNA, 25 bp, Homo sapien
aatgagggtcccattgaagccgagg

SEQ ID NO: 1208320 - DNA, 25 bp, Homo sapien
gcagaactcggcttagtctccaggt

SEQ ID NO: 1208321 - DNA, 25 bp, Homo sapien
tgatggaagccccaagatacctggg

SEQ ID NO: 1208322 - DNA, 25 bp, Homo sapien
catggaaccatgcatagctgctggg

SEQ ID NO: 1208323 - DNA, 25 bp, Homo sapien
ttctgagtagccgaagtcctgaggc

SEQ ID NO: 1208324 - DNA, 25 bp, Homo sapien
tctcatttacactctatgaacaaca

SEQ ID NO: 1208325 - DNA, 25 bp, Homo sapien
tgtgagggtgccagagtcttaatgc

SEQ ID NO: 1208326 - DNA, 25 bp, Homo sapien
tgaacaacataggtgtgagggtgcc

SEQ ID NO: 1208327 - DNA, 25 bp, Homo sapien
taatgcttccactagagctgacgca

SEQ ID NO: 1208328 - DNA, 25 bp, Homo sapien
gaaattgccaatattctatgccttc

SEQ ID NO: 1208329 - DNA, 25 bp, Homo sapien
caagggcgggcattgaatctttatc

SEQ ID NO: 1208330 - DNA, 25 bp, Homo sapien
gcaaaagactgctacatagaacata

SEQ ID NO: 1208331 - DNA, 25 bp, Homo sapien
tatatttcacctggtataatgaggg

SEQ ID NO: 1208332 - DNA, 25 bp, Homo sapien
ctgtccatctagaccaagaggaggc

SEQ ID NO: 1208333 - DNA, 25 bp, Homo sapien
gtgacaagctagactccacggtgca

SEQ ID NO: 1208334 - DNA, 25 bp, Homo sapien
acaggcaggagggagtactcgacac

SEQ ID NO: 1208335 - DNA, 25 bp, Homo sapien
tctgcctccggagggtgacaagcta

SEQ ID NO: 1208336 - DNA, 25 bp, Homo sapien
cctcaggtgatcctatgtgtggcca

SEQ ID NO: 1208337 - DNA, 25 bp, Homo sapien
caggtgatcctatgtgtggccaaga

SEQ ID NO: 1208338 - DNA, 25 bp, Homo sapien
tcaggtgatcctatgtgtggccaag

SEQ ID NO: 1208339 - DNA, 25 bp, Homo sapien
gctcctcaggtgatcctatgtgtgg

SEQ ID NO: 1208340 - DNA, 25 bp, Homo sapien
tattccgtcggcttcagcaagtcta

SEQ ID NO: 1208341 - DNA, 25 bp, Homo sapien
catgataggttaggagaggatcttc

SEQ ID NO: 1208342 - DNA, 25 bp, Homo sapien
aggatcttcggtggtagcacatacc

SEQ ID NO: 1208343 - DNA, 25 bp, Homo sapien
tgagacgtattgaacacatgatagg

SEQ ID NO: 1208344 - DNA, 25 bp, Homo sapien
tgaggcttacaatcccgtttgcggg

SEQ ID NO: 1208345 - DNA, 25 bp, Homo sapien
tctcaagggacatgacaaaactggg

SEQ ID NO: 1208346 - DNA, 25 bp, Homo sapien
tctagatgtaagaccccggaaggga

SEQ ID NO: 1208347 - DNA, 25 bp, Homo sapien
gagtggtcacccgactattaaggag

SEQ ID NO: 1208348 - DNA, 25 bp, Homo sapien
ccatgacgcttagaatcattgttga

SEQ ID NO: 1208349 - DNA, 25 bp, Homo sapien
ggtcctcatttagtgtggaggacaa

SEQ ID NO: 1208350 - DNA, 25 bp, Homo sapien
acttttgagagcatacctaagtctc

SEQ ID NO: 1208351 - DNA, 25 bp, Homo sapien
tggaggacaaagctagctggaaaca

SEQ ID NO: 1208352 - DNA, 25 bp, Homo sapien
tctaacagtaaagacagaattggct

SEQ ID NO: 1208353 - DNA, 25 bp, Homo sapien
gacagaattggcttaagaaatacat

SEQ ID NO: 1208354 - DNA, 25 bp, Homo sapien
tttctaacagtaaagacagaattgg

SEQ ID NO: 1208355 - DNA, 25 bp, Homo sapien
ttaagaaatacatagtcctgctgtg

SEQ ID NO: 1208356 - DNA, 25 bp, Homo sapien
ttggaatcttcagcgggacatcccc

SEQ ID NO: 1208357 - DNA, 25 bp, Homo sapien
cttagccgatgagtaggttccctgc

SEQ ID NO: 1208358 - DNA, 25 bp, Homo sapien
aagtgatgacttcgacacccgtggg

SEQ ID NO: 1208359 - DNA, 25 bp, Homo sapien
gaattgcttcacaaacacagggaga

SEQ ID NO: 1208360 - DNA, 25 bp, Homo sapien
aaatgttcccagtttttggcggcag

SEQ ID NO: 1208361 - DNA, 25 bp, Homo sapien
ccctgttgctgcccaaaagcagcat

SEQ ID NO: 1208362 - DNA, 25 bp, Homo sapien
ggctatggaagcagtctccctgttg

SEQ ID NO: 1208363 - DNA, 25 bp, Homo sapien
agtttttggcggcagtgggtagagg

SEQ ID NO: 1208364 - DNA, 25 bp, Homo sapien
cattttcccatggacttgctcgtcg

SEQ ID NO: 1208365 - DNA, 25 bp, Homo sapien
tcccatggacttgctcgtcgtgaag

SEQ ID NO: 1208366 - DNA, 25 bp, Homo sapien
catggacttgctcgtcgtgaagggt

SEQ ID NO: 1208367 - DNA, 25 bp, Homo sapien
tgggagaaggcgagatcagctgtgc

SEQ ID NO: 1208368 - DNA, 25 bp, Homo sapien
ctcccggtgctgtggcaggaaagcc

SEQ ID NO: 1208369 - DNA, 25 bp, Homo sapien
cgggcagccccggagattccgcagt

SEQ ID NO: 1208370 - DNA, 25 bp, Homo sapien
gagattccgcagtccccccaggagg

SEQ ID NO: 1208371 - DNA, 25 bp, Homo sapien
caggaggttcaagagccactgatca

SEQ ID NO: 1208372 - DNA, 25 bp, Homo sapien
tgtcactctgcgtgttgaccgactg

SEQ ID NO: 1208373 - DNA, 25 bp, Homo sapien
agatgtcactctgcgtgttgaccga

SEQ ID NO: 1208374 - DNA, 25 bp, Homo sapien
ctagatgtcactctgcgtgttgacc

SEQ ID NO: 1208375 - DNA, 25 bp, Homo sapien
tcactctgcgtgttgaccgactggg

SEQ ID NO: 1208376 - DNA, 25 bp, Homo sapien
tcctcctcctctcgtttcctggcat

SEQ ID NO: 1208377 - DNA, 25 bp, Homo sapien
cctcctctcgtttcctggcatccat

SEQ ID NO: 1208378 - DNA, 25 bp, Homo sapien
ctagcccgacttggtcctcctcctc

SEQ ID NO: 1208379 - DNA, 25 bp, Homo sapien
tagcccgacttggtcctcctcctcc

SEQ ID NO: 1208380 - DNA, 25 bp, Homo sapien
gccacggcttgctggaagtcctcct

SEQ ID NO: 1208381 - DNA, 25 bp, Homo sapien
aggccacggcttgctggaagtcctc

SEQ ID NO: 1208382 - DNA, 25 bp, Homo sapien
ccaaggccacggcttgctggaagtc

SEQ ID NO: 1208383 - DNA, 25 bp, Homo sapien
caaggccacggcttgctggaagtcc

SEQ ID NO: 1208384 - DNA, 25 bp, Homo sapien
tcgaggctgagcgtggatctgaaca

SEQ ID NO: 1208385 - DNA, 25 bp, Homo sapien
cactgagccagacggtcggttggaa

SEQ ID NO: 1208386 - DNA, 25 bp, Homo sapien
gaacttcgttgtaccagtgcatgga

SEQ ID NO: 1208387 - DNA, 25 bp, Homo sapien
cggttggaacatgagactcgaggct

SEQ ID NO: 1208388 - DNA, 25 bp, Homo sapien
ctgtctcgggcacaacaagccttgt

SEQ ID NO: 1208389 - DNA, 25 bp, Homo sapien
gagaatctcaatcttactcaggtaa

SEQ ID NO: 1208390 - DNA, 25 bp, Homo sapien
gaatctgagctgtgcctgtctcggg

SEQ ID NO: 1208391 - DNA, 25 bp, Homo sapien
cttgtcgcctggtgagagaatctca

SEQ ID NO: 1208392 - DNA, 25 bp, Homo sapien
gagccttattgtagtccttccaatc

SEQ ID NO: 1208393 - DNA, 25 bp, Homo sapien
aggagccttattgtagtccttccaa

SEQ ID NO: 1208394 - DNA, 25 bp, Homo sapien
gccttattgtagtccttccaatcaa

SEQ ID NO: 1208395 - DNA, 25 bp, Homo sapien
ggagccttattgtagtccttccaat

SEQ ID NO: 1208396 - DNA, 25 bp, Homo sapien
caggccatcacccaccatccctgtc

SEQ ID NO: 1208397 - DNA, 25 bp, Homo sapien
ctgtcttcagcagggattcacacat

SEQ ID NO: 1208398 - DNA, 25 bp, Homo sapien
tccctgtcttcagcagggattcaca

SEQ ID NO: 1208399 - DNA, 25 bp, Homo sapien
ggccatcacccaccatccctgtctt

SEQ ID NO: 1208400 - DNA, 25 bp, Homo sapien
tgtgccccctaagccaactctctct

SEQ ID NO: 1208401 - DNA, 25 bp, Homo sapien
acatcttgacaagccgtgtctgctg

SEQ ID NO: 1208402 - DNA, 25 bp, Homo sapien
tccacagcaaagtgacaggttggtt

SEQ ID NO: 1208403 - DNA, 25 bp, Homo sapien
ctgaacatcttgacaagccgtgtct

SEQ ID NO: 1208404 - DNA, 25 bp, Homo sapien
gcgccagtacagtggcttcacagaa

SEQ ID NO: 1208405 - DNA, 25 bp, Homo sapien
gactgatttgtgttcctggaggaac

SEQ ID NO: 1208406 - DNA, 25 bp, Homo sapien
ggaggaactcgatcaggaaccgctt

SEQ ID NO: 1208407 - DNA, 25 bp, Homo sapien
tttgctgcctggtgactgatttgtg

SEQ ID NO: 1208408 - DNA, 25 bp, Homo sapien
gattgacggagccggctggatctca

SEQ ID NO: 1208409 - DNA, 25 bp, Homo sapien
ggttgttagatgcttgctcctggga

SEQ ID NO: 1208410 - DNA, 25 bp, Homo sapien
tcagcctaggttgttagatgcttgc

SEQ ID NO: 1208411 - DNA, 25 bp, Homo sapien
ttgctcctgggagattgacggagcc

SEQ ID NO: 1208412 - DNA, 25 bp, Homo sapien
catcgattaggggaatatccatgtc

SEQ ID NO: 1208413 - DNA, 25 bp, Homo sapien
cttcatcgattaggggaatatccat

SEQ ID NO: 1208414 - DNA, 25 bp, Homo sapien
cgattaggggaatatccatgtcaaa

SEQ ID NO: 1208415 - DNA, 25 bp, Homo sapien
tcgattaggggaatatccatgtcaa

SEQ ID NO: 1208416 - DNA, 25 bp, Homo sapien
gggtgtacagctgacctcccgcttc

SEQ ID NO: 1208417 - DNA, 25 bp, Homo sapien
tgggtgtacagctgacctcccgctt

SEQ ID NO: 1208418 - DNA, 25 bp, Homo sapien
ctgggtgtacagctgacctcccgct

SEQ ID NO: 1208419 - DNA, 25 bp, Homo sapien
tgcaagtgcactggtgccagtcggt

SEQ ID NO: 1208420 - DNA, 25 bp, Homo sapien
cagcctcctggtagatgcaagtgca

SEQ ID NO: 1208421 - DNA, 25 bp, Homo sapien
tgcactggtgccagtcggtgacccc

SEQ ID NO: 1208422 - DNA, 25 bp, Homo sapien
cctcctggtagatgcaagtgcactg

SEQ ID NO: 1208423 - DNA, 25 bp, Homo sapien
ggaatgccatggtacgccaactgcg

SEQ ID NO: 1208424 - DNA, 25 bp, Homo sapien
ctacgccgaagggagtcacgaggaa

SEQ ID NO: 1208425 - DNA, 25 bp, Homo sapien
agccgctgcaccctagcgtgctgga

SEQ ID NO: 1208426 - DNA, 25 bp, Homo sapien
gtggtcacgggtgccacaggcacta

SEQ ID NO: 1208427 - DNA, 25 bp, Homo sapien
gggatgtgggacttccggagctttc

SEQ ID NO: 1208428 - DNA, 25 bp, Homo sapien
tctgctcaaagtccggcgtgctgca

SEQ ID NO: 1208429 - DNA, 25 bp, Homo sapien
caaagtccggcgtgctgcagccttc

SEQ ID NO: 1208430 - DNA, 25 bp, Homo sapien
cttctgctcaaagtccggcgtgctg

SEQ ID NO: 1208431 - DNA, 25 bp, Homo sapien
acttgctggaatcactgaggtcacc

SEQ ID NO: 1208432 - DNA, 25 bp, Homo sapien
ttggagttctgccaacgcacctcgg

SEQ ID NO: 1208433 - DNA, 25 bp, Homo sapien
ctggaatcactgaggtcacctttgg

SEQ ID NO: 1208434 - DNA, 25 bp, Homo sapien
tgctggaatcactgaggtcaccttt

SEQ ID NO: 1208435 - DNA, 25 bp, Homo sapien
caagcggcctctccgtacgcattta

SEQ ID NO: 1208436 - DNA, 25 bp, Homo sapien
acagatccgtgtcctcgcctgtcag

SEQ ID NO: 1208437 - DNA, 25 bp, Homo sapien
tacgcatttactgctgtgcagcggt

SEQ ID NO: 1208438 - DNA, 25 bp, Homo sapien
tgacagtgagtctcactgagcaagc

SEQ ID NO: 1208439 - DNA, 25 bp, Homo sapien
tgcctcttccgattcttccgaaagc

SEQ ID NO: 1208440 - DNA, 25 bp, Homo sapien
ctcttccgattcttccgaaagccaa

SEQ ID NO: 1208441 - DNA, 25 bp, Homo sapien
tcctgcggttccctgtgcctcttcc

SEQ ID NO: 1208442 - DNA, 25 bp, Homo sapien
gcggttccctgtgcctcttccgatt

SEQ ID NO: 1208443 - DNA, 25 bp, Homo sapien
ttccggaagtccatcagctccttcc

SEQ ID NO: 1208444 - DNA, 25 bp, Homo sapien
tcagcaacttccggaagtccatcag

SEQ ID NO: 1208445 - DNA, 25 bp, Homo sapien
ttcagcaacttccggaagtccatca

SEQ ID NO: 1208446 - DNA, 25 bp, Homo sapien
cacggtagtcgacgatgccatactt

SEQ ID NO: 1208447 - DNA, 25 bp, Homo sapien
atctgctcaaggtccatctttttct

SEQ ID NO: 1208448 - DNA, 25 bp, Homo sapien
agcctgcgcaacatgccacggtagt

SEQ ID NO: 1208449 - DNA, 25 bp, Homo sapien
ttctcgtagtccttcctgtctgctg

SEQ ID NO: 1208450 - DNA, 25 bp, Homo sapien
tgaggcacctatggtccaggtgtgt

SEQ ID NO: 1208451 - DNA, 25 bp, Homo sapien
aggtgtgaggcacctatggtccagg

SEQ ID NO: 1208452 - DNA, 25 bp, Homo sapien
tgtgaggcacctatggtccaggtgt

SEQ ID NO: 1208453 - DNA, 25 bp, Homo sapien
ggtgtgaggcacctatggtccaggt

SEQ ID NO: 1208454 - DNA, 25 bp, Homo sapien
tgtcttaagctggagatggtgttga

SEQ ID NO: 1208455 - DNA, 25 bp, Homo sapien
ctgagaatccttgagatccagctcc

SEQ ID NO: 1208456 - DNA, 25 bp, Homo sapien
tggtgaccctgatgtgtcttaagct

SEQ ID NO: 1208457 - DNA, 25 bp, Homo sapien
gagaatccttgagatccagctccaa

SEQ ID NO: 1208458 - DNA, 25 bp, Homo sapien
taaatgccagagtcctcaggcctca

SEQ ID NO: 1208459 - DNA, 25 bp, Homo sapien
tggcctccagttctgtggagaagac

SEQ ID NO: 1208460 - DNA, 25 bp, Homo sapien
gaatctggaactcatagcgcttccc

SEQ ID NO: 1208461 - DNA, 25 bp, Homo sapien
ccagccggcgcagacagtgcttggt

SEQ ID NO: 1208462 - DNA, 25 bp, Homo sapien
ggcccatgtctgagaaacgtgcccc

SEQ ID NO: 1208463 - DNA, 25 bp, Homo sapien
cattcaaagactgcgtcaccctgct

SEQ ID NO: 1208464 - DNA, 25 bp, Homo sapien
ctggaagtgtagagcccggtgccca

SEQ ID NO: 1208465 - DNA, 25 bp, Homo sapien
tagccggtgccggaaatgccaggct

SEQ ID NO: 1208466 - DNA, 25 bp, Homo sapien
tgcttccctctgctactggaaagcc

SEQ ID NO: 1208467 - DNA, 25 bp, Homo sapien
ccatcaaggagtagccatgtctgcc

SEQ ID NO: 1208468 - DNA, 25 bp, Homo sapien
tggctctcgatgctcccagactctt

SEQ ID NO: 1208469 - DNA, 25 bp, Homo sapien
tgtggtcagcacttgtggactgaag

SEQ ID NO: 1208470 - DNA, 25 bp, Homo sapien
tttcctccagcattcatcactgttg

SEQ ID NO: 1208471 - DNA, 25 bp, Homo sapien
ctgaagccgactggacccagcctcc

SEQ ID NO: 1208472 - DNA, 25 bp, Homo sapien
gtctctgccacgatcttgctgttgt

SEQ ID NO: 1208473 - DNA, 25 bp, Homo sapien
ctccagcctgaagccgactggaccc

SEQ ID NO: 1208474 - DNA, 25 bp, Homo sapien
gatgctacccaatatcctgacctgt

SEQ ID NO: 1208475 - DNA, 25 bp, Homo sapien
gacccatggctttatggcctctggg

SEQ ID NO: 1208476 - DNA, 25 bp, Homo sapien
gagttcgtgtcaccctctgatgcta

SEQ ID NO: 1208477 - DNA, 25 bp, Homo sapien
ccagtgagcctggtactccaagcct

SEQ ID NO: 1208478 - DNA, 25 bp, Homo sapien
ctgaaagagtctgtcgccctccctg

SEQ ID NO: 1208479 - DNA, 25 bp, Homo sapien
aagagtctgtcgccctccctgagac

SEQ ID NO: 1208480 - DNA, 25 bp, Homo sapien
gaaagagtctgtcgccctccctgag

SEQ ID NO: 1208481 - DNA, 25 bp, Homo sapien
gagtctgtcgccctccctgagaccc

SEQ ID NO: 1208482 - DNA, 25 bp, Homo sapien
caatcaggagcccaagcattgctcg

SEQ ID NO: 1208483 - DNA, 25 bp, Homo sapien
tctcctgcagagaaccggaagctct

SEQ ID NO: 1208484 - DNA, 25 bp, Homo sapien
cctttgctatccagggaccatgggc

SEQ ID NO: 1208485 - DNA, 25 bp, Homo sapien
tgctgccttggctaaacccctggtt

SEQ ID NO: 1208486 - DNA, 25 bp, Homo sapien
gctcctgagtgagccaggcctcctg

SEQ ID NO: 1208487 - DNA, 25 bp, Homo sapien
gcttccagcctcgtctgctcccctt

SEQ ID NO: 1208488 - DNA, 25 bp, Homo sapien
caacctcagcccctgactgtgcctg

SEQ ID NO: 1208489 - DNA, 25 bp, Homo sapien
tgtgcctgagacctgctcctgagtg

SEQ ID NO: 1208490 - DNA, 25 bp, Homo sapien
ccagttctctcccataggctgccac

SEQ ID NO: 1208491 - DNA, 25 bp, Homo sapien
agggggctcccggctctgatcttca

SEQ ID NO: 1208492 - DNA, 25 bp, Homo sapien
ggctctgatcttcattcagcatctc

SEQ ID NO: 1208493 - DNA, 25 bp, Homo sapien
tcccggctctgatcttcattcagca

SEQ ID NO: 1208494 - DNA, 25 bp, Homo sapien
ccagtgccaggcttgtatctggatg

SEQ ID NO: 1208495 - DNA, 25 bp, Homo sapien
ggaactccgggtagcatctctcctc

SEQ ID NO: 1208496 - DNA, 25 bp, Homo sapien
gatgtccaacctgccgtctttgcca

SEQ ID NO: 1208497 - DNA, 25 bp, Homo sapien
tctccatagatgtccaacctgccgt

SEQ ID NO: 1208498 - DNA, 25 bp, Homo sapien
cccccggctgcacttccatgtcagc

SEQ ID NO: 1208499 - DNA, 25 bp, Homo sapien
tcccccggctgcacttccatgtcag

SEQ ID NO: 1208500 - DNA, 25 bp, Homo sapien
agggtacaggagagtgtggcggcct

SEQ ID NO: 1208501 - DNA, 25 bp, Homo sapien
caggtcactggtgagggtacaggag

SEQ ID NO: 1208502 - DNA, 25 bp, Homo sapien
ctgtccctcccactggtaaagagaa

SEQ ID NO: 1208503 - DNA, 25 bp, Homo sapien
gagacgatggcatttgtacgaggcc

SEQ ID NO: 1208504 - DNA, 25 bp, Homo sapien
taggattcagcaggtatgggtatag

SEQ ID NO: 1208505 - DNA, 25 bp, Homo sapien
agaggattgtgcagggagacgaggg

SEQ ID NO: 1208506 - DNA, 25 bp, Homo sapien
tatgggtatagaagaggcattttgg

SEQ ID NO: 1208507 - DNA, 25 bp, Homo sapien
tcaggccagctaaccagagcccttt

SEQ ID NO: 1208508 - DNA, 25 bp, Homo sapien
ttccttcaggccagctaaccagagc

SEQ ID NO: 1208509 - DNA, 25 bp, Homo sapien
tccttcaggccagctaaccagagcc

SEQ ID NO: 1208510 - DNA, 25 bp, Homo sapien
cttcaggccagctaaccagagccct

SEQ ID NO: 1208511 - DNA, 25 bp, Homo sapien
ccgtcttgcttaaagatgactccat

SEQ ID NO: 1208512 - DNA, 25 bp, Homo sapien
agctacaaaggtgtacctcccagct

SEQ ID NO: 1208513 - DNA, 25 bp, Homo sapien
atgaagaggctgtgcacgagaccgt

SEQ ID NO: 1208514 - DNA, 25 bp, Homo sapien
cttgggtcccctgcacatgcgtgat

SEQ ID NO: 1208515 - DNA, 25 bp, Homo sapien
gaccaccagtggctctctcagtttc

SEQ ID NO: 1208516 - DNA, 25 bp, Homo sapien
tgtcacgctgtactggccacagtcc

SEQ ID NO: 1208517 - DNA, 25 bp, Homo sapien
gatcttcactatcaccggcttccca

SEQ ID NO: 1208518 - DNA, 25 bp, Homo sapien
gaggcacagccgcgtgtagccatcc

SEQ ID NO: 1208519 - DNA, 25 bp, Homo sapien
tgacttgcagagtgagctcggcctg

SEQ ID NO: 1208520 - DNA, 25 bp, Homo sapien
agtgagctcggcctgcacagagcct

SEQ ID NO: 1208521 - DNA, 25 bp, Homo sapien
tgcagagtgagctcggcctgcacag

SEQ ID NO: 1208522 - DNA, 25 bp, Homo sapien
ctatgacttgcagagtgagctcggc

SEQ ID NO: 1208523 - DNA, 25 bp, Homo sapien
tctgagcagagttagtggtaggtct

SEQ ID NO: 1208524 - DNA, 25 bp, Homo sapien
ccagcagagatcatatcccaggcct

SEQ ID NO: 1208525 - DNA, 25 bp, Homo sapien
gcttcttcctaagcagtctgagcag

SEQ ID NO: 1208526 - DNA, 25 bp, Homo sapien
ggtcagagaagcataaccggctcct

SEQ ID NO: 1208527 - DNA, 25 bp, Homo sapien
caccacgtagcactctacagtccgg

SEQ ID NO: 1208528 - DNA, 25 bp, Homo sapien
tcggaaggtatacttcctgcctggc

SEQ ID NO: 1208529 - DNA, 25 bp, Homo sapien
gtcacagcccgcactcggaaggtat

SEQ ID NO: 1208530 - DNA, 25 bp, Homo sapien
tatggcaatcctgaacctccatggg

SEQ ID NO: 1208531 - DNA, 25 bp, Homo sapien
tggcgcggaaggggccttggggaga

SEQ ID NO: 1208532 - DNA, 25 bp, Homo sapien
ccttcttacgcctctcgatcaggta

SEQ ID NO: 1208533 - DNA, 25 bp, Homo sapien
ttcttacgcctctcgatcaggtagc

SEQ ID NO: 1208534 - DNA, 25 bp, Homo sapien
tcgttcactgccgtccaggtgttgc

SEQ ID NO: 1208535 - DNA, 25 bp, Homo sapien
caggcaccggctggtcgttcactgc

SEQ ID NO: 1208536 - DNA, 25 bp, Homo sapien
ctgccgcacgtccgccaccgtccac

SEQ ID NO: 1208537 - DNA, 25 bp, Homo sapien
tgccgcacgtccgccaccgtccacc

SEQ ID NO: 1208538 - DNA, 25 bp, Homo sapien
gggtcccgagcaaagacagcatccg

SEQ ID NO: 1208539 - DNA, 25 bp, Homo sapien
gccacagctgtgacccggaactcat

SEQ ID NO: 1208540 - DNA, 25 bp, Homo sapien
gacagcatccgatggaggtccaggc

SEQ ID NO: 1208541 - DNA, 25 bp, Homo sapien
ctctccgggacctgagggagccaca

SEQ ID NO: 1208542 - DNA, 25 bp, Homo sapien
gtgatgctggtgttcgatctgtctg

SEQ ID NO: 1208543 - DNA, 25 bp, Homo sapien
ccccttggccgtgtaggtggtgact

SEQ ID NO: 1208544 - DNA, 25 bp, Homo sapien
acttggagattcctcaccagcccag

SEQ ID NO: 1208545 - DNA, 25 bp, Homo sapien
ttaactgctgtcacccgcacgaagt

SEQ ID NO: 1208546 - DNA, 25 bp, Homo sapien
ccgaccttgactgtcagcaagtcct

SEQ ID NO: 1208547 - DNA, 25 bp, Homo sapien
caagtccttggtgctggagtccacg

SEQ ID NO: 1208548 - DNA, 25 bp, Homo sapien
tggagtccacgaggaacttgggaca

SEQ ID NO: 1208549 - DNA, 25 bp, Homo sapien
gacgggcacacgaactgtgtccccg

SEQ ID NO: 1208550 - DNA, 25 bp, Homo sapien
acaagcccagtcagtgatttccaca

SEQ ID NO: 1208551 - DNA, 25 bp, Homo sapien
ctgatttccacaagcccagtcagtg

SEQ ID NO: 1208552 - DNA, 25 bp, Homo sapien
tccacaagcccagtcagtgatttcc

SEQ ID NO: 1208553 - DNA, 25 bp, Homo sapien
tttccacaagcccagtcagtgattt

SEQ ID NO: 1208554 - DNA, 25 bp, Homo sapien
gaatccttcctgcctcatgtctctc

SEQ ID NO: 1208555 - DNA, 25 bp, Homo sapien
cttcaaggaggacctgaatccttcc

SEQ ID NO: 1208556 - DNA, 25 bp, Homo sapien
atccttcctgcctcatgtctctcac

SEQ ID NO: 1208557 - DNA, 25 bp, Homo sapien
tcaaggaggacctgaatccttcctg

SEQ ID NO: 1208558 - DNA, 25 bp, Homo sapien
tcttttgggcaagggcaagccatcc

SEQ ID NO: 1208559 - DNA, 25 bp, Homo sapien
tgtagagaccactgtctgagagtcc

SEQ ID NO: 1208560 - DNA, 25 bp, Homo sapien
acttcttttgggcaagggcaagcca

SEQ ID NO: 1208561 - DNA, 25 bp, Homo sapien
ctgccaccctgatacggaagctgtg

SEQ ID NO: 1208562 - DNA, 25 bp, Homo sapien
ctgaggagcgtgtgaacaccgcgta

SEQ ID NO: 1208563 - DNA, 25 bp, Homo sapien
accctgaagtggtattcgtggccgg

SEQ ID NO: 1208564 - DNA, 25 bp, Homo sapien
gacatcctgggcctcgtcaggagag

SEQ ID NO: 1208565 - DNA, 25 bp, Homo sapien
accgcgtagtgcagcgggacatcct

SEQ ID NO: 1208566 - DNA, 25 bp, Homo sapien
agcaggtcagtgctgtacaccgcgg

SEQ ID NO: 1208567 - DNA, 25 bp, Homo sapien
cggtagcacggagccttcactgtga

SEQ ID NO: 1208568 - DNA, 25 bp, Homo sapien
tcattcttgaaccaggtgacgtggg

SEQ ID NO: 1208569 - DNA, 25 bp, Homo sapien
atggtgagggagcacacgcccagca

SEQ ID NO: 1208570 - DNA, 25 bp, Homo sapien
tgttgagtgacttagcttggagcca

SEQ ID NO: 1208571 - DNA, 25 bp, Homo sapien
gaaacccatatggtgagggtccagg

SEQ ID NO: 1208572 - DNA, 25 bp, Homo sapien
tggatctcctgaagcgaagaagaaa

SEQ ID NO: 1208573 - DNA, 25 bp, Homo sapien
aaagcacttgctgcacccctggaat

SEQ ID NO: 1208574 - DNA, 25 bp, Homo sapien
tcgcccttgcaatcaactatgtagg

SEQ ID NO: 1208575 - DNA, 25 bp, Homo sapien
ttgcaatcaactatgtaggcctggg

SEQ ID NO: 1208576 - DNA, 25 bp, Homo sapien
tttctcgcccttgcaatcaactatg

SEQ ID NO: 1208577 - DNA, 25 bp, Homo sapien
ccttgcaatcaactatgtaggcctg

SEQ ID NO: 1208578 - DNA, 25 bp, Homo sapien
gcctcagagctgatgccctgggaga

SEQ ID NO: 1208579 - DNA, 25 bp, Homo sapien
ggagcctgagagtttgggggccatg

SEQ ID NO: 1208580 - DNA, 25 bp, Homo sapien
tttcttttggctcctggaaactctg

SEQ ID NO: 1208581 - DNA, 25 bp, Homo sapien
aactctggaatatttcctgggagcc

SEQ ID NO: 1208582 - DNA, 25 bp, Homo sapien
ggtgtaacaacttttatcctgtgca

SEQ ID NO: 1208583 - DNA, 25 bp, Homo sapien
cagtgcaggtgtaacaacttttatc

SEQ ID NO: 1208584 - DNA, 25 bp, Homo sapien
ttatatgtcagtgcaggtgtaacaa

SEQ ID NO: 1208585 - DNA, 25 bp, Homo sapien
taacaacttttatcctgtgcagagt

SEQ ID NO: 1208586 - DNA, 25 bp, Homo sapien
cctgcaccatccgaagctcatccag

SEQ ID NO: 1208587 - DNA, 25 bp, Homo sapien
ggcctgcaccatccgaagctcatcc

SEQ ID NO: 1208588 - DNA, 25 bp, Homo sapien
tgcaccatccgaagctcatccagtt

SEQ ID NO: 1208589 - DNA, 25 bp, Homo sapien
ctgggcctgcaccatccgaagctca

SEQ ID NO: 1208590 - DNA, 25 bp, Homo sapien
tctccagggcttggagcatctcctg

SEQ ID NO: 1208591 - DNA, 25 bp, Homo sapien
ctctccagggcttggagcatctcct

SEQ ID NO: 1208592 - DNA, 25 bp, Homo sapien
cctctctccagggcttggagcatct

SEQ ID NO: 1208593 - DNA, 25 bp, Homo sapien
ctctctccagggcttggagcatctc

SEQ ID NO: 1208594 - DNA, 25 bp, Homo sapien
catctaagacaggtcctgagggagc

SEQ ID NO: 1208595 - DNA, 25 bp, Homo sapien
agggtccgacgccatcttccaagga

SEQ ID NO: 1208596 - DNA, 25 bp, Homo sapien
tcctaggagtgcgacagtgctgtca

SEQ ID NO: 1208597 - DNA, 25 bp, Homo sapien
gtaccttgatgggacactctgcggt

SEQ ID NO: 1208598 - DNA, 25 bp, Homo sapien
gtgccccatatcccaggcgcctcac

SEQ ID NO: 1208599 - DNA, 25 bp, Homo sapien
tgtgccccatatcccaggcgcctca

SEQ ID NO: 1208600 - DNA, 25 bp, Homo sapien
cctgaatatggaatcgggactctgt

SEQ ID NO: 1208601 - DNA, 25 bp, Homo sapien
ccttttcagaaagcgcgtgccctgg

SEQ ID NO: 1208602 - DNA, 25 bp, Homo sapien
gattctcactcaggtagactcgcag

SEQ ID NO: 1208603 - DNA, 25 bp, Homo sapien
gacagcaccccgtttaccagataat

SEQ ID NO: 1208604 - DNA, 25 bp, Homo sapien
tacggccatagagtgcgtggtccgc

SEQ ID NO: 1208605 - DNA, 25 bp, Homo sapien
cgtcagacaggatataccacccctg

SEQ ID NO: 1208606 - DNA, 25 bp, Homo sapien
agcggctccctacggccatagagtg

SEQ ID NO: 1208607 - DNA, 25 bp, Homo sapien
caggagcgtgctcttctcgctctca

SEQ ID NO: 1208608 - DNA, 25 bp, Homo sapien
cgggaggcgggtggcgcgcggccgg

SEQ ID NO: 1208609 - DNA, 25 bp, Homo sapien
ggtggcgggaggcgggtggcgcgcg

SEQ ID NO: 1208610 - DNA, 25 bp, Homo sapien
gaggcgggtggcgcgcggccggggc

SEQ ID NO: 1208611 - DNA, 25 bp, Homo sapien
ggcgggaggcgggtggcgcgcggcc

SEQ ID NO: 1208612 - DNA, 25 bp, Homo sapien
gctgcctgccagacgtgcctgtttt

SEQ ID NO: 1208613 - DNA, 25 bp, Homo sapien
gacttggacttctgccgcttgacgg

SEQ ID NO: 1208614 - DNA, 25 bp, Homo sapien
caacgtggagttgtcctggtcctgg

SEQ ID NO: 1208615 - DNA, 25 bp, Homo sapien
tcatcttttggtccgacggcaaagc

SEQ ID NO: 1208616 - DNA, 25 bp, Homo sapien
tcatccccggggatgcgtgcgtctc

SEQ ID NO: 1208617 - DNA, 25 bp, Homo sapien
gcgcacggaccacgcgggggccgag

SEQ ID NO: 1208618 - DNA, 25 bp, Homo sapien
atccccggggatgcgtgcgtctctt

SEQ ID NO: 1208619 - DNA, 25 bp, Homo sapien
gcgtctcttggtccccgccactggg

SEQ ID NO: 1208620 - DNA, 25 bp, Homo sapien
caaagtgtttacttggtctataagc

SEQ ID NO: 1208621 - DNA, 25 bp, Homo sapien
tgtttacttggtctataagctctcc

SEQ ID NO: 1208622 - DNA, 25 bp, Homo sapien
ttggtctataagctctcccctgtca

SEQ ID NO: 1208623 - DNA, 25 bp, Homo sapien
caggcatcctttgtatcaaagtgtt

SEQ ID NO: 1208624 - DNA, 25 bp, Homo sapien
tacacatcttgtaagggtcacggcc

SEQ ID NO: 1208625 - DNA, 25 bp, Homo sapien
gacactcagccaatatcccgatagg

SEQ ID NO: 1208626 - DNA, 25 bp, Homo sapien
cagacaggcattttgtgacaggctc

SEQ ID NO: 1208627 - DNA, 25 bp, Homo sapien
ccctgatgagggctgaatagacaca

SEQ ID NO: 1208628 - DNA, 25 bp, Homo sapien
tgtacgtactgaacagaaatgctga

SEQ ID NO: 1208629 - DNA, 25 bp, Homo sapien
tttggtgtggctcttgaccttttcc

SEQ ID NO: 1208630 - DNA, 25 bp, Homo sapien
aacaaactgggttgctgtggcctgt

SEQ ID NO: 1208631 - DNA, 25 bp, Homo sapien
tgggacgcgttcagacctagctctg

SEQ ID NO: 1208632 - DNA, 25 bp, Homo sapien
catcactccatgttccacaaggata

SEQ ID NO: 1208633 - DNA, 25 bp, Homo sapien
agggccttggagcacggccattcca

SEQ ID NO: 1208634 - DNA, 25 bp, Homo sapien
tcaggacttggtctggagggccttg

SEQ ID NO: 1208635 - DNA, 25 bp, Homo sapien
gagacaggcaggattccgacattcc

SEQ ID NO: 1208636 - DNA, 25 bp, Homo sapien
gtcccatagttgtaattgtcagcca

SEQ ID NO: 1208637 - DNA, 25 bp, Homo sapien
ctggtggtcccatagttgtaattgt

SEQ ID NO: 1208638 - DNA, 25 bp, Homo sapien
ggaacttggagtagtagctgctcct

SEQ ID NO: 1208639 - DNA, 25 bp, Homo sapien
gttgtaattgtcagccaagccatca

SEQ ID NO: 1208640 - DNA, 25 bp, Homo sapien
gccaaatcttcatgtgtgctcagtt

SEQ ID NO: 1208641 - DNA, 25 bp, Homo sapien
tgccaaatcttcatgtgtgctcagt

SEQ ID NO: 1208642 - DNA, 25 bp, Homo sapien
tctccctgaggtctgtggggctctg

SEQ ID NO: 1208643 - DNA, 25 bp, Homo sapien
gctctgaggttccaacattgtcctc

SEQ ID NO: 1208644 - DNA, 25 bp, Homo sapien
tgaggttccaacattgtcctccagc

SEQ ID NO: 1208645 - DNA, 25 bp, Homo sapien
gggctctgaggttccaacattgtcc

SEQ ID NO: 1208646 - DNA, 25 bp, Homo sapien
ggcactgccgaaggaacccagctca

SEQ ID NO: 1208647 - DNA, 25 bp, Homo sapien
aggcccggcaggcactgccgaagga

SEQ ID NO: 1208648 - DNA, 25 bp, Homo sapien
ttcaagaaaagacgagaggcccggc

SEQ ID NO: 1208649 - DNA, 25 bp, Homo sapien
gcaggcactgccgaaggaacccagc

SEQ ID NO: 1208650 - DNA, 25 bp, Homo sapien
aggatcattgcctcttcttgttggg

SEQ ID NO: 1208651 - DNA, 25 bp, Homo sapien
agaggcacattctgtcccttggcaa

SEQ ID NO: 1208652 - DNA, 25 bp, Homo sapien
ccttggcaagtaggatcattgcctc

SEQ ID NO: 1208653 - DNA, 25 bp, Homo sapien
gggcccttgtaggactctcctatct

SEQ ID NO: 1208654 - DNA, 25 bp, Homo sapien
gttacaaggaggtggtctgagccac

SEQ ID NO: 1208655 - DNA, 25 bp, Homo sapien
ttgttcactggaaccgtgtcctcct

SEQ ID NO: 1208656 - DNA, 25 bp, Homo sapien
cccttggaggacaccacttgcattt

SEQ ID NO: 1208657 - DNA, 25 bp, Homo sapien
gacacagaagccagacgtcagagtt

SEQ ID NO: 1208658 - DNA, 25 bp, Homo sapien
gacggctcttccacccgcttgggaa

SEQ ID NO: 1208659 - DNA, 25 bp, Homo sapien
tggggacggctcttccacccgcttg

SEQ ID NO: 1208660 - DNA, 25 bp, Homo sapien
ttccacccgcttgggaaattctgct

SEQ ID NO: 1208661 - DNA, 25 bp, Homo sapien
ttctgctgcatttgtctcgctgagt

SEQ ID NO: 1208662 - DNA, 25 bp, Homo sapien
aggcagagacatccccgtgggactg

SEQ ID NO: 1208663 - DNA, 25 bp, Homo sapien
gaaggcagagacatccccgtgggac

SEQ ID NO: 1208664 - DNA, 25 bp, Homo sapien
cagagacatccccgtgggactgcat

SEQ ID NO: 1208665 - DNA, 25 bp, Homo sapien
gcagagacatccccgtgggactgca

SEQ ID NO: 1208666 - DNA, 25 bp, Homo sapien
cccgcttgagggttccattgtagat

SEQ ID NO: 1208667 - DNA, 25 bp, Homo sapien
ggcgggatatacacagggtcctgct

SEQ ID NO: 1208668 - DNA, 25 bp, Homo sapien
tgtaggagctgaagcgcctgttgtc

SEQ ID NO: 1208669 - DNA, 25 bp, Homo sapien
ggtcacagtagaggtcgggctcact

SEQ ID NO: 1208670 - DNA, 25 bp, Homo sapien
ctggaagcaggtatgctggatgtaa

SEQ ID NO: 1208671 - DNA, 25 bp, Homo sapien
ccttggggatggtcagcccactgca

SEQ ID NO: 1208672 - DNA, 25 bp, Homo sapien
aatggcctggtatttctcatcctgg

SEQ ID NO: 1208673 - DNA, 25 bp, Homo sapien
ctggatgtaataggccccaatggcc

SEQ ID NO: 1208674 - DNA, 25 bp, Homo sapien
aggaggaaggtatgcaaccagctac

SEQ ID NO: 1208675 - DNA, 25 bp, Homo sapien
caaggaggaaggtatgcaaccagct

SEQ ID NO: 1208676 - DNA, 25 bp, Homo sapien
aaggaggaaggtatgcaaccagcta

SEQ ID NO: 1208677 - DNA, 25 bp, Homo sapien
tggatctcggcgttcccggttctcc

SEQ ID NO: 1208678 - DNA, 25 bp, Homo sapien
gaggctgactgcctcgcggatccca

SEQ ID NO: 1208679 - DNA, 25 bp, Homo sapien
tgcggaggaggtccaccagcttgca

SEQ ID NO: 1208680 - DNA, 25 bp, Homo sapien
cttgttggtggtgctcctgaacacc

SEQ ID NO: 1208681 - DNA, 25 bp, Homo sapien
tgttgctattgccatcgcaccagcc

SEQ ID NO: 1208682 - DNA, 25 bp, Homo sapien
cagggcgtcggcaatgagttcctcc

SEQ ID NO: 1208683 - DNA, 25 bp, Homo sapien
ttcagctcgtcagtggaagacaggt

SEQ ID NO: 1208684 - DNA, 25 bp, Homo sapien
cattgaagaagacctcagggtccac

SEQ ID NO: 1208685 - DNA, 25 bp, Homo sapien
ctactagtggccctttgcggaacaa

SEQ ID NO: 1208686 - DNA, 25 bp, Homo sapien
aagctcccgcatgcccagtctcttt

SEQ ID NO: 1208687 - DNA, 25 bp, Homo sapien
accctgctactagtggccctttgcg

SEQ ID NO: 1208688 - DNA, 25 bp, Homo sapien
ccctttgcggaacaagagccagaag

SEQ ID NO: 1208689 - DNA, 25 bp, Homo sapien
aaaccatttagccaattccgcctgg

SEQ ID NO: 1208690 - DNA, 25 bp, Homo sapien
gaaatgaggtctcatttgcactcag

SEQ ID NO: 1208691 - DNA, 25 bp, Homo sapien
cactctgcccagtaactttataact

SEQ ID NO: 1208692 - DNA, 25 bp, Homo sapien
tccatgtggcaacggtccctccgca

SEQ ID NO: 1208693 - DNA, 25 bp, Homo sapien
gagggaatcaatgagccctgagtag

SEQ ID NO: 1208694 - DNA, 25 bp, Homo sapien
cacagttctggacataggccatgag

SEQ ID NO: 1208695 - DNA, 25 bp, Homo sapien
cttgtcgtcacagcggctggccgct

SEQ ID NO: 1208696 - DNA, 25 bp, Homo sapien
cctgagtagttacgcatggtctggc

SEQ ID NO: 1208697 - DNA, 25 bp, Homo sapien
cagccagtggaggacttctcggtgt

SEQ ID NO: 1208698 - DNA, 25 bp, Homo sapien
ggcgttgcgggcgttatactccagc

SEQ ID NO: 1208699 - DNA, 25 bp, Homo sapien
tatactccagctggcggtagcgggt

SEQ ID NO: 1208700 - DNA, 25 bp, Homo sapien
tcttgttgctgaagcagccagtgga

SEQ ID NO: 1208701 - DNA, 25 bp, Homo sapien
tctgaatggtacaaccagccgctgc

SEQ ID NO: 1208702 - DNA, 25 bp, Homo sapien
ggtaggtgcggatggcatctgaatg

SEQ ID NO: 1208703 - DNA, 25 bp, Homo sapien
gctcttgcccatgaggttcaggtag

SEQ ID NO: 1208704 - DNA, 25 bp, Homo sapien
ttgctggctgtcaggttctgcaggg

SEQ ID NO: 1208705 - DNA, 25 bp, Homo sapien
tcagcccaatcaactggctcatgcc

SEQ ID NO: 1208706 - DNA, 25 bp, Homo sapien
gcccttttccttcagcccaatcaac

SEQ ID NO: 1208707 - DNA, 25 bp, Homo sapien
tcagagttgccagattgcaggaggc

SEQ ID NO: 1208708 - DNA, 25 bp, Homo sapien
ccaatcaactggctcatgccactgg

SEQ ID NO: 1208709 - DNA, 25 bp, Homo sapien
gttgctcaggagggaggctccggac

SEQ ID NO: 1208710 - DNA, 25 bp, Homo sapien
actctgtgcagcagagggtggcggg

SEQ ID NO: 1208711 - DNA, 25 bp, Homo sapien
ccatcactctgtgcagcagagggtg

SEQ ID NO: 1208712 - DNA, 25 bp, Homo sapien
tctgtgcagcagagggtggcgggac

SEQ ID NO: 1208713 - DNA, 25 bp, Homo sapien
tgtgcagcagagggtggcgggacat

SEQ ID NO: 1208714 - DNA, 25 bp, Homo sapien
gccagttgtggctgcgaggccatca

SEQ ID NO: 1208715 - DNA, 25 bp, Homo sapien
ggagcctggtcacctccgggaacac

SEQ ID NO: 1208716 - DNA, 25 bp, Homo sapien
tgtagcaggccgaggacaagatgtc

SEQ ID NO: 1208717 - DNA, 25 bp, Homo sapien
gcttcggcacaggttgatgatgttg

SEQ ID NO: 1208718 - DNA, 25 bp, Homo sapien
cttgctggaccacatgtcagacagg

SEQ ID NO: 1208719 - DNA, 25 bp, Homo sapien
agaagccgggcagcttctgcggcct

SEQ ID NO: 1208720 - DNA, 25 bp, Homo sapien
aagccgggcagcttctgcggccttg

SEQ ID NO: 1208721 - DNA, 25 bp, Homo sapien
caggagaagccgggcagcttctgcg

SEQ ID NO: 1208722 - DNA, 25 bp, Homo sapien
tcagcatccctcgcagatctcagag

SEQ ID NO: 1208723 - DNA, 25 bp, Homo sapien
gatctcagagcccagagacttgatc

SEQ ID NO: 1208724 - DNA, 25 bp, Homo sapien
tgatcagaacgttcatcacattcat

SEQ ID NO: 1208725 - DNA, 25 bp, Homo sapien
cattttcacgtagacgctgtctttg

SEQ ID NO: 1208726 - DNA, 25 bp, Homo sapien
caccgtgcgttcatgagtctcccta

SEQ ID NO: 1208727 - DNA, 25 bp, Homo sapien
ttcaatgcagtgctgttggaaagga

SEQ ID NO: 1208728 - DNA, 25 bp, Homo sapien
gatttccccaatcatctttggacac

SEQ ID NO: 1208729 - DNA, 25 bp, Homo sapien
agctctggattgtcacatggagaac

SEQ ID NO: 1208730 - DNA, 25 bp, Homo sapien
gggagatggcataggggatccgaaa

SEQ ID NO: 1208731 - DNA, 25 bp, Homo sapien
ggaggggagatggcataggggatcc

SEQ ID NO: 1208732 - DNA, 25 bp, Homo sapien
aggggagatggcataggggatccga

SEQ ID NO: 1208733 - DNA, 25 bp, Homo sapien
caggaggggagatggcataggggat

SEQ ID NO: 1208734 - DNA, 25 bp, Homo sapien
ggacagcatgatttgaatgcagcaa

SEQ ID NO: 1208735 - DNA, 25 bp, Homo sapien
aatgcagcaataggccaaggtgccc

SEQ ID NO: 1208736 - DNA, 25 bp, Homo sapien
tgaatgtggacagcatgatttgaat

SEQ ID NO: 1208737 - DNA, 25 bp, Homo sapien
tgagagccaagccagccatcaccga

SEQ ID NO: 1208738 - DNA, 25 bp, Homo sapien
agagtgagtcttattcctgttattt

SEQ ID NO: 1208739 - DNA, 25 bp, Homo sapien
gagagtgagtcttattcctgttatt

SEQ ID NO: 1208740 - DNA, 25 bp, Homo sapien
tggagagtgagtcttattcctgtta

SEQ ID NO: 1208741 - DNA, 25 bp, Homo sapien
ggagagtgagtcttattcctgttat

SEQ ID NO: 1208742 - DNA, 25 bp, Homo sapien
tgtgtcagggcgaaaactggcctca

SEQ ID NO: 1208743 - DNA, 25 bp, Homo sapien
gctcgcactggtaagaagccgctgt

SEQ ID NO: 1208744 - DNA, 25 bp, Homo sapien
taataactctccatgagtcggtgca

SEQ ID NO: 1208745 - DNA, 25 bp, Homo sapien
tttgcagaaacctgagtcaaggcgt

SEQ ID NO: 1208746 - DNA, 25 bp, Homo sapien
gctgttggccccagctaaggttccc

SEQ ID NO: 1208747 - DNA, 25 bp, Homo sapien
tagaatcgggaggtgaagttcctga

SEQ ID NO: 1208748 - DNA, 25 bp, Homo sapien
ccagcatgttcctatcgaaaccttg

SEQ ID NO: 1208749 - DNA, 25 bp, Homo sapien
ccagctaaggttcccagcatgttcc

SEQ ID NO: 1208750 - DNA, 25 bp, Homo sapien
ctgcaagcctaacttgcttggacag

SEQ ID NO: 1208751 - DNA, 25 bp, Homo sapien
caaatactgcataggatggacagaa

SEQ ID NO: 1208752 - DNA, 25 bp, Homo sapien
atactgcataggatggacagaaaac

SEQ ID NO: 1208753 - DNA, 25 bp, Homo sapien
ttcttgtgaactttcccaaatactg

SEQ ID NO: 1208754 - DNA, 25 bp, Homo sapien
gaaaaccccatccagcgaggcctga

SEQ ID NO: 1208755 - DNA, 25 bp, Homo sapien
tcattggccgctagcacaggagatc

SEQ ID NO: 1208756 - DNA, 25 bp, Homo sapien
tccgcctgggctggtaaggttcaca

SEQ ID NO: 1208757 - DNA, 25 bp, Homo sapien
gtgggcctcccagtgtgaacagaag

SEQ ID NO: 1208758 - DNA, 25 bp, Homo sapien
tagaagccggaataggtatatgccc

SEQ ID NO: 1208759 - DNA, 25 bp, Homo sapien
tagtctcatcgttcaaaagcccttg

SEQ ID NO: 1208760 - DNA, 25 bp, Homo sapien
ctttaatcaaagatatgtggcccca

SEQ ID NO: 1208761 - DNA, 25 bp, Homo sapien
gatgctggtccttaccaagcctctg

SEQ ID NO: 1208762 - DNA, 25 bp, Homo sapien
tcctggtcaccaaagctaaggcttc

SEQ ID NO: 1208763 - DNA, 25 bp, Homo sapien
gaagctgatctatcggctctggaga

SEQ ID NO: 1208764 - DNA, 25 bp, Homo sapien
tttcccaatactaacatacgccatg

SEQ ID NO: 1208765 - DNA, 25 bp, Homo sapien
gagaataaatttatcccgaagctga

SEQ ID NO: 1208766 - DNA, 25 bp, Homo sapien
taggatccaccatgggctgaaggtg

SEQ ID NO: 1208767 - DNA, 25 bp, Homo sapien
ctagtcctgtagttgaagttcctgc

SEQ ID NO: 1208768 - DNA, 25 bp, Homo sapien
ttctacgaatccagtgcttgggctc

SEQ ID NO: 1208769 - DNA, 25 bp, Homo sapien
tcattgtaaaaggtgtcctccccag

SEQ ID NO: 1208770 - DNA, 25 bp, Homo sapien
gcttgggctcagtttatgcagggaa

SEQ ID NO: 1208771 - DNA, 25 bp, Homo sapien
tttctaagtgagaagctgagtcttg

SEQ ID NO: 1208772 - DNA, 25 bp, Homo sapien
taagtgagaagctgagtcttgtggt

SEQ ID NO: 1208773 - DNA, 25 bp, Homo sapien
tctaagtgagaagctgagtcttgtg

SEQ ID NO: 1208774 - DNA, 25 bp, Homo sapien
tcttgtggtgttggagaggatctgc

SEQ ID NO: 1208775 - DNA, 25 bp, Homo sapien
tccctagggaatacatgtagttggt

SEQ ID NO: 1208776 - DNA, 25 bp, Homo sapien
gaagagcataagaacctggccctcc

SEQ ID NO: 1208777 - DNA, 25 bp, Homo sapien
agagactgacgtgatccttcttgcc

SEQ ID NO: 1208778 - DNA, 25 bp, Homo sapien
cctccagacagagcggaaaagtggg

SEQ ID NO: 1208779 - DNA, 25 bp, Homo sapien
gagcagcggaaggaccactctgctg

SEQ ID NO: 1208780 - DNA, 25 bp, Homo sapien
agcagagggagcagcggaaggacca

SEQ ID NO: 1208781 - DNA, 25 bp, Homo sapien
gagggagcagcggaaggaccactct

SEQ ID NO: 1208782 - DNA, 25 bp, Homo sapien
ggagcagcggaaggaccactctgct

SEQ ID NO: 1208783 - DNA, 25 bp, Homo sapien
ttgtaaacaaggctcctccctcact

SEQ ID NO: 1208784 - DNA, 25 bp, Homo sapien
agctccttgtaaacaaggctcctcc

SEQ ID NO: 1208785 - DNA, 25 bp, Homo sapien
cagagctccttgtaaacaaggctcc

SEQ ID NO: 1208786 - DNA, 25 bp, Homo sapien
ttcagagctccttgtaaacaaggct

SEQ ID NO: 1208787 - DNA, 25 bp, Homo sapien
gcatcaggtcctgcctttgagccac

SEQ ID NO: 1208788 - DNA, 25 bp, Homo sapien
agccactggcatggtggtgtcctct

SEQ ID NO: 1208789 - DNA, 25 bp, Homo sapien
tgggctggctgaaagccctcctcca

SEQ ID NO: 1208790 - DNA, 25 bp, Homo sapien
tttcccctgcatcaggtcctgcctt

SEQ ID NO: 1208791 - DNA, 25 bp, Homo sapien
ctgagactgagcagacgcctccagg

SEQ ID NO: 1208792 - DNA, 25 bp, Homo sapien
agacgcctccaggatctgtcggcag

SEQ ID NO: 1208793 - DNA, 25 bp, Homo sapien
tgagcagacgcctccaggatctgtc

SEQ ID NO: 1208794 - DNA, 25 bp, Homo sapien
acgcctccaggatctgtcggcagct

SEQ ID NO: 1208795 - DNA, 25 bp, Homo sapien
cgcctgttcaaggttcttgactgga

SEQ ID NO: 1208796 - DNA, 25 bp, Homo sapien
tcttgactggaagttctaccttgta

SEQ ID NO: 1208797 - DNA, 25 bp, Homo sapien
gaagttctaccttgtatctggcctc

SEQ ID NO: 1208798 - DNA, 25 bp, Homo sapien
cgagcgcctgttcaaggttcttgac

SEQ ID NO: 1208799 - DNA, 25 bp, Homo sapien
ggtcacagcacaagtgcacatcagc

SEQ ID NO: 1208800 - DNA, 25 bp, Homo sapien
ctgtctcatcggctcccagcaagtg

SEQ ID NO: 1208801 - DNA, 25 bp, Homo sapien
cggcaggcacaacagatgctgggac

SEQ ID NO: 1208802 - DNA, 25 bp, Homo sapien
tatttgcaagactcagccagctcct

SEQ ID NO: 1208803 - DNA, 25 bp, Homo sapien
gaagaacattcagtaggtccctagg

SEQ ID NO: 1208804 - DNA, 25 bp, Homo sapien
gagccccgggaaatggatgcactga

SEQ ID NO: 1208805 - DNA, 25 bp, Homo sapien
ccttcgtgaagtgtccctggcatga

SEQ ID NO: 1208806 - DNA, 25 bp, Homo sapien
tttgtggcacttcatcacgggagcc

SEQ ID NO: 1208807 - DNA, 25 bp, Homo sapien
tcctgaggtcaggaaccgagtcctt

SEQ ID NO: 1208808 - DNA, 25 bp, Homo sapien
cgagtccttatcatctttgtgtcac

SEQ ID NO: 1208809 - DNA, 25 bp, Homo sapien
aattataatgggtagaacacatccc

SEQ ID NO: 1208810 - DNA, 25 bp, Homo sapien
gccacttgtgattatagtgggtaga

SEQ ID NO: 1208811 - DNA, 25 bp, Homo sapien
gctgagaaaccctcggtggtctaaa

SEQ ID NO: 1208812 - DNA, 25 bp, Homo sapien
gaaatggccataatgctgaggctga

SEQ ID NO: 1208813 - DNA, 25 bp, Homo sapien
gataacttgaactccaacctcgctg

SEQ ID NO: 1208814 - DNA, 25 bp, Homo sapien
taagctgtctcccttccagtgtgat

SEQ ID NO: 1208815 - DNA, 25 bp, Homo sapien
ggaagtaaccaggacacgcatacgt

SEQ ID NO: 1208816 - DNA, 25 bp, Homo sapien
tcaagagcttctctacccaggagtg

SEQ ID NO: 1208817 - DNA, 25 bp, Homo sapien
tatcaggatgtgacctcgagccagc

SEQ ID NO: 1208818 - DNA, 25 bp, Homo sapien
tctttagggcgtgggtcttatcacc

SEQ ID NO: 1208819 - DNA, 25 bp, Homo sapien
tagggtgctacttgggggatatcta

SEQ ID NO: 1208820 - DNA, 25 bp, Homo sapien
tgagagtggagggatagggtgctac

SEQ ID NO: 1208821 - DNA, 25 bp, Homo sapien
gctgagagtggagggatagggtgct

SEQ ID NO: 1208822 - DNA, 25 bp, Homo sapien
ggggatatctattactaatcagcac

SEQ ID NO: 1208823 - DNA, 25 bp, Homo sapien
gggaaacattcaaaggagatgcagg

SEQ ID NO: 1208824 - DNA, 25 bp, Homo sapien
ctaaggtgaggccttcctccaacat

SEQ ID NO: 1208825 - DNA, 25 bp, Homo sapien
cgcaccaaaggggaaacattcaaag

SEQ ID NO: 1208826 - DNA, 25 bp, Homo sapien
tgacatacagatgggctaaggtgag

SEQ ID NO: 1208827 - DNA, 25 bp, Homo sapien
gatcagactggccttaacagagccc

SEQ ID NO: 1208828 - DNA, 25 bp, Homo sapien
gtagctcactctaagttacagggtt

SEQ ID NO: 1208829 - DNA, 25 bp, Homo sapien
ggtttgctagctgcagactggagac

SEQ ID NO: 1208830 - DNA, 25 bp, Homo sapien
gcctggagagttcaagtagctcact

SEQ ID NO: 1208831 - DNA, 25 bp, Homo sapien
atatctggagcgcaaggattgagag

SEQ ID NO: 1208832 - DNA, 25 bp, Homo sapien
gcaagggcgaatataggcatagaca

SEQ ID NO: 1208833 - DNA, 25 bp, Homo sapien
tgtgaggatggagcaagggcgaata

SEQ ID NO: 1208834 - DNA, 25 bp, Homo sapien
tataggcatagacatatctggagcg

SEQ ID NO: 1208835 - DNA, 25 bp, Homo sapien
ggcacttgtcttgtcctagaccaga

SEQ ID NO: 1208836 - DNA, 25 bp, Homo sapien
ggcttcagcccctaggtcaaggtag

SEQ ID NO: 1208837 - DNA, 25 bp, Homo sapien
aaggaggtgcctgtagaagccatgt

SEQ ID NO: 1208838 - DNA, 25 bp, Homo sapien
taaagatagagaacgctggctggca

SEQ ID NO: 1208839 - DNA, 25 bp, Homo sapien
ctcactgatttaacccctaattttg

SEQ ID NO: 1208840 - DNA, 25 bp, Homo sapien
gaaagacagactagggtgaacacgg

SEQ ID NO: 1208841 - DNA, 25 bp, Homo sapien
ggtgaacacgggatttgccctgcct

SEQ ID NO: 1208842 - DNA, 25 bp, Homo sapien
ttgccctgccttgcggcttattctc

SEQ ID NO: 1208843 - DNA, 25 bp, Homo sapien
agttgctgctggacacagttttcat

SEQ ID NO: 1208844 - DNA, 25 bp, Homo sapien
cagttgctgctggacacagttttca

SEQ ID NO: 1208845 - DNA, 25 bp, Homo sapien
cagccagttgctgctggacacagtt

SEQ ID NO: 1208846 - DNA, 25 bp, Homo sapien
gccagttgctgctggacacagtttt

SEQ ID NO: 1208847 - DNA, 25 bp, Homo sapien
cagccggaaccatgaagtccagggc

SEQ ID NO: 1208848 - DNA, 25 bp, Homo sapien
tctcggcaagatcagagctggcttt

SEQ ID NO: 1208849 - DNA, 25 bp, Homo sapien
tgactggtcctaagcacagccggaa

SEQ ID NO: 1208850 - DNA, 25 bp, Homo sapien
tcccaggtcactgttttcctgactg

SEQ ID NO: 1208851 - DNA, 25 bp, Homo sapien
tggaccctcgtcatccaaccgaagt

SEQ ID NO: 1208852 - DNA, 25 bp, Homo sapien
tccatgactgccgtgattttgccat

SEQ ID NO: 1208853 - DNA, 25 bp, Homo sapien
gacagatgctgcgtcctgcaatggc

SEQ ID NO: 1208854 - DNA, 25 bp, Homo sapien
tgtcactcccagaggttgcttccac

SEQ ID NO: 1208855 - DNA, 25 bp, Homo sapien
tgctgcttaggtccttttgggaccc

SEQ ID NO: 1208856 - DNA, 25 bp, Homo sapien
agctgctgggcctaaagcccactcc

SEQ ID NO: 1208857 - DNA, 25 bp, Homo sapien
gaatggcctctggactcaccttgag

SEQ ID NO: 1208858 - DNA, 25 bp, Homo sapien
agactgctcttagccccctggcttt

SEQ ID NO: 1208859 - DNA, 25 bp, Homo sapien
tccctgcttgatgggaggatcctaa

SEQ ID NO: 1208860 - DNA, 25 bp, Homo sapien
tcttaaggaccccaaagtcaggatg

SEQ ID NO: 1208861 - DNA, 25 bp, Homo sapien
gaatggatagcctcccactaggact

SEQ ID NO: 1208862 - DNA, 25 bp, Homo sapien
cagagtaagcctgaggagtcccagc

SEQ ID NO: 1208863 - DNA, 25 bp, Homo sapien
aactggctgcggagaagtctgtctg

SEQ ID NO: 1208864 - DNA, 25 bp, Homo sapien
tcctgggttaagcagagctgtctac

SEQ ID NO: 1208865 - DNA, 25 bp, Homo sapien
cactgtgtacaaactcgggcctcac

SEQ ID NO: 1208866 - DNA, 25 bp, Homo sapien
tgactattgaggttgcaccagcact

SEQ ID NO: 1208867 - DNA, 25 bp, Homo sapien
gaagatgtcaacttgcaggccctga

SEQ ID NO: 1208868 - DNA, 25 bp, Homo sapien
tctcagtatatcacctggatggagg

SEQ ID NO: 1208869 - DNA, 25 bp, Homo sapien
tcaattgggatcttacaggaaaaca

SEQ ID NO: 1208870 - DNA, 25 bp, Homo sapien
tctcctactggagagatcagccaaa

SEQ ID NO: 1208871 - DNA, 25 bp, Homo sapien
gttgggtccccaaaagcagttgtga

SEQ ID NO: 1208872 - DNA, 25 bp, Homo sapien
tgcccacctacatgcctgtattagt

SEQ ID NO: 1208873 - DNA, 25 bp, Homo sapien
gccaagggcagtaagggccatctcc

SEQ ID NO: 1208874 - DNA, 25 bp, Homo sapien
tgataagtgttcaccccattcaggg

SEQ ID NO: 1208875 - DNA, 25 bp, Homo sapien
tgatacaaagaagccctcaccaggg

SEQ ID NO: 1208876 - DNA, 25 bp, Homo sapien
gatctgtagcaagatggtgtgatac

SEQ ID NO: 1208877 - DNA, 25 bp, Homo sapien
gaaagaagcttgtaagacaaagcac

SEQ ID NO: 1208878 - DNA, 25 bp, Homo sapien
tgttgaagaaatgatatgcacacac

SEQ ID NO: 1208879 - DNA, 25 bp, Homo sapien
tgcaagccctgttaccaggagggtg

SEQ ID NO: 1208880 - DNA, 25 bp, Homo sapien
tggtgcaagccctgttaccaggagg

SEQ ID NO: 1208881 - DNA, 25 bp, Homo sapien
tgggagctctccagtaatggagact

SEQ ID NO: 1208882 - DNA, 25 bp, Homo sapien
tgaggcccgtgtcaccctcaaatgg

SEQ ID NO: 1208883 - DNA, 25 bp, Homo sapien
tgcccctcgcacgtgcaagacgttt

SEQ ID NO: 1208884 - DNA, 25 bp, Homo sapien
ctgaaatgcccctcgcacgtgcaag

SEQ ID NO: 1208885 - DNA, 25 bp, Homo sapien
cgtgcaagacgttttccgcggtggc

SEQ ID NO: 1208886 - DNA, 25 bp, Homo sapien
cctcgcacgtgcaagacgttttccg

SEQ ID NO: 1208887 - DNA, 25 bp, Homo sapien
ggaacaattaactgaggctctgaca

SEQ ID NO: 1208888 - DNA, 25 bp, Homo sapien
cctcaagatggtatgggccgagaat

SEQ ID NO: 1208889 - DNA, 25 bp, Homo sapien
tgagccattgcgagcggcgagtcaa

SEQ ID NO: 1208890 - DNA, 25 bp, Homo sapien
tgagacagctgttcaaagggccttg

SEQ ID NO: 1208891 - DNA, 25 bp, Homo sapien
ctcggtggctgtagggtccgggtgg

SEQ ID NO: 1208892 - DNA, 25 bp, Homo sapien
taaatggcaatccagttcttcttag

SEQ ID NO: 1208893 - DNA, 25 bp, Homo sapien
aggagttcataaatggcaatccagt

SEQ ID NO: 1208894 - DNA, 25 bp, Homo sapien
aaggagttcataaatggcaatccag

SEQ ID NO: 1208895 - DNA, 25 bp, Homo sapien
ttcataaatggcaatccagttcttc

SEQ ID NO: 1208896 - DNA, 25 bp, Homo sapien
ggccttcatgacacgaaggttgggc

SEQ ID NO: 1208897 - DNA, 25 bp, Homo sapien
catgacacgaaggttgggcgcattc

SEQ ID NO: 1208898 - DNA, 25 bp, Homo sapien
atgacacgaaggttgggcgcattct

SEQ ID NO: 1208899 - DNA, 25 bp, Homo sapien
cttcatgacacgaaggttgggcgca

SEQ ID NO: 1208900 - DNA, 25 bp, Homo sapien
ctccgagggcagatgaaggtaatca

SEQ ID NO: 1208901 - DNA, 25 bp, Homo sapien
ggtaatcacagagatactggatacc

SEQ ID NO: 1208902 - DNA, 25 bp, Homo sapien
gaaggtaatcacagagatactggat

SEQ ID NO: 1208903 - DNA, 25 bp, Homo sapien
gtaatcacagagatactggataccc

SEQ ID NO: 1208904 - DNA, 25 bp, Homo sapien
agctgcggtgtaaggtggcaggcac

SEQ ID NO: 1208905 - DNA, 25 bp, Homo sapien
ctccagactttaggccaaggcctgc

SEQ ID NO: 1208906 - DNA, 25 bp, Homo sapien
ggccaaggcctgccagtctctggac

SEQ ID NO: 1208907 - DNA, 25 bp, Homo sapien
cagactttaggccaaggcctgccag

SEQ ID NO: 1208908 - DNA, 25 bp, Homo sapien
aggccaaggcctgccagtctctgga

SEQ ID NO: 1208909 - DNA, 25 bp, Homo sapien
aatccatctctgaactggaatttgg

SEQ ID NO: 1208910 - DNA, 25 bp, Homo sapien
ggcacctcactgcactcttctgcag

SEQ ID NO: 1208911 - DNA, 25 bp, Homo sapien
tctcatgctgaggcacctcactgca

SEQ ID NO: 1208912 - DNA, 25 bp, Homo sapien
aagtttattcatcgcataataatcc

SEQ ID NO: 1208913 - DNA, 25 bp, Homo sapien
tgtaagtttattcatcgcataataa

SEQ ID NO: 1208914 - DNA, 25 bp, Homo sapien
gcatgttgaaactcgttgtgcagcc

SEQ ID NO: 1208915 - DNA, 25 bp, Homo sapien
tggctaatatggtccacattactcc

SEQ ID NO: 1208916 - DNA, 25 bp, Homo sapien
cctatgtggctaatatggtccacat

SEQ ID NO: 1208917 - DNA, 25 bp, Homo sapien
taaggaaaagtctgccgtggcgcac

SEQ ID NO: 1208918 - DNA, 25 bp, Homo sapien
ccagactgggcatcagaacaaggca

SEQ ID NO: 1208919 - DNA, 25 bp, Homo sapien
atcgctggaacccagtgggtggagg

SEQ ID NO: 1208920 - DNA, 25 bp, Homo sapien
ctccagactgggcatcagaacaagg

SEQ ID NO: 1208921 - DNA, 25 bp, Homo sapien
cgctggaacccagtgggtggaggtt

SEQ ID NO: 1208922 - DNA, 25 bp, Homo sapien
cccttagactaagatgtaatcatca

SEQ ID NO: 1208923 - DNA, 25 bp, Homo sapien
aatcatcatgggtttaatacttttc

SEQ ID NO: 1208924 - DNA, 25 bp, Homo sapien
catgagagacagtagcactgtgctc

SEQ ID NO: 1208925 - DNA, 25 bp, Homo sapien
aaatctttactaagaccaggtgtgg

SEQ ID NO: 1208926 - DNA, 25 bp, Homo sapien
taactgtactcctgggaaagcaggc

SEQ ID NO: 1208927 - DNA, 25 bp, Homo sapien
ctgtgacacggagcccacacctgtt

SEQ ID NO: 1208928 - DNA, 25 bp, Homo sapien
aagtcgggcatctgcctgtcatagc

SEQ ID NO: 1208929 - DNA, 25 bp, Homo sapien
cctgttccctagatcagctgctgta

SEQ ID NO: 1208930 - DNA, 25 bp, Homo sapien
aggccctgctgcagctgcagcctcc

SEQ ID NO: 1208931 - DNA, 25 bp, Homo sapien
ggccctgctgcagctgcagcctcct

SEQ ID NO: 1208932 - DNA, 25 bp, Homo sapien
gccctgctgcagctgcagcctcctc

SEQ ID NO: 1208933 - DNA, 25 bp, Homo sapien
cctgctgcagctgcagcctcctcac

SEQ ID NO: 1208934 - DNA, 25 bp, Homo sapien
tgaggtggaggtaggcaggtgattc

SEQ ID NO: 1208935 - DNA, 25 bp, Homo sapien
atgaggtggaggtaggcaggtgatt

SEQ ID NO: 1208936 - DNA, 25 bp, Homo sapien
gaggtggaggtaggcaggtgattcc

SEQ ID NO: 1208937 - DNA, 25 bp, Homo sapien
tcagctccgttcagatttagaggct

SEQ ID NO: 1208938 - DNA, 25 bp, Homo sapien
tgcgatgtccactttggtgagggta

SEQ ID NO: 1208939 - DNA, 25 bp, Homo sapien
gctggaaaaggatgaattgccaaat

SEQ ID NO: 1208940 - DNA, 25 bp, Homo sapien
ccaaatacgactggaggtaaaggct

SEQ ID NO: 1208941 - DNA, 25 bp, Homo sapien
gccctagcaaggaatagtgtctctc

SEQ ID NO: 1208942 - DNA, 25 bp, Homo sapien
aattatgtagctggttttgcccatg

SEQ ID NO: 1208943 - DNA, 25 bp, Homo sapien
taccgagcattagaagaatcaaagc

SEQ ID NO: 1208944 - DNA, 25 bp, Homo sapien
cagtcatagagtcttaataccgagc

SEQ ID NO: 1208945 - DNA, 25 bp, Homo sapien
tctgcagccatgaccagaaccaagt

SEQ ID NO: 1208946 - DNA, 25 bp, Homo sapien
cagtgcctgcctcatacggttgtta

SEQ ID NO: 1208947 - DNA, 25 bp, Homo sapien
gagagactttccactcgaggcacag

SEQ ID NO: 1208948 - DNA, 25 bp, Homo sapien
tgctggaatacatagagctctggct

SEQ ID NO: 1208949 - DNA, 25 bp, Homo sapien
gccgcagccgcgcagagtcgcgcat

SEQ ID NO: 1208950 - DNA, 25 bp, Homo sapien
gtccgcgccgcagccgcgcagagtc

SEQ ID NO: 1208951 - DNA, 25 bp, Homo sapien
gcgccgcagccgcgcagagtcgcgc

SEQ ID NO: 1208952 - DNA, 25 bp, Homo sapien
ccgcgccgcagccgcgcagagtcgc

SEQ ID NO: 1208953 - DNA, 25 bp, Homo sapien
catgggcaaatcaacatttttatga

SEQ ID NO: 1208954 - DNA, 25 bp, Homo sapien
ccatgggcaaatcaacatttttatg

SEQ ID NO: 1208955 - DNA, 25 bp, Homo sapien
tgggcaaatcaacatttttatgaac

SEQ ID NO: 1208956 - DNA, 25 bp, Homo sapien
gggcaaatcaacatttttatgaact

SEQ ID NO: 1208957 - DNA, 25 bp, Homo sapien
aaagccagggtccaacgggcagcac

SEQ ID NO: 1208958 - DNA, 25 bp, Homo sapien
gtatgccgtgcaatccagccctctt

SEQ ID NO: 1208959 - DNA, 25 bp, Homo sapien
ccagagggcgatgaagagcacaaaa

SEQ ID NO: 1208960 - DNA, 25 bp, Homo sapien
cgcaatagtgcagggtatgccgtgc

SEQ ID NO: 1208961 - DNA, 25 bp, Homo sapien
gaggatacagaatgtgtggaatgta

SEQ ID NO: 1208962 - DNA, 25 bp, Homo sapien
acctagtgaagaggatacagaatgt

SEQ ID NO: 1208963 - DNA, 25 bp, Homo sapien
tgaagaggatacagaatgtgtggaa

SEQ ID NO: 1208964 - DNA, 25 bp, Homo sapien
cctagtgaagaggatacagaatgtg

SEQ ID NO: 1208965 - DNA, 25 bp, Homo sapien
ttcagggttaccaagaaatagccaa

SEQ ID NO: 1208966 - DNA, 25 bp, Homo sapien
aggccaaggttgggagcaatcctga

SEQ ID NO: 1208967 - DNA, 25 bp, Homo sapien
tctgcatatgttcagggttaccaag

SEQ ID NO: 1208968 - DNA, 25 bp, Homo sapien
tcttctgatccagtaatttctgcat

SEQ ID NO: 1208969 - DNA, 25 bp, Homo sapien
ttttcccacatcaccctttaggctg

SEQ ID NO: 1208970 - DNA, 25 bp, Homo sapien
tttaggctgggagctagttcttgtt

SEQ ID NO: 1208971 - DNA, 25 bp, Homo sapien
tcccacatcaccctttaggctggga

SEQ ID NO: 1208972 - DNA, 25 bp, Homo sapien
aggctgggagctagttcttgtttcc

SEQ ID NO: 1208973 - DNA, 25 bp, Homo sapien
ctctgatgtggagggatcctgcagg

SEQ ID NO: 1208974 - DNA, 25 bp, Homo sapien
gggattgtggtctcgtatgcttttc

SEQ ID NO: 1208975 - DNA, 25 bp, Homo sapien
ttgaagcagacatgtggggtacccc

SEQ ID NO: 1208976 - DNA, 25 bp, Homo sapien
cgtatgcttttctctgggcccagtt

SEQ ID NO: 1208977 - DNA, 25 bp, Homo sapien
ttctcgcataaggacaggtactccc

SEQ ID NO: 1208978 - DNA, 25 bp, Homo sapien
ctattctcgcataaggacaggtact

SEQ ID NO: 1208979 - DNA, 25 bp, Homo sapien
tctcgcataaggacaggtactccca

SEQ ID NO: 1208980 - DNA, 25 bp, Homo sapien
tattctcgcataaggacaggtactc

SEQ ID NO: 1208981 - DNA, 25 bp, Homo sapien
accatccccagcttatcagcttatt

SEQ ID NO: 1208982 - DNA, 25 bp, Homo sapien
agcttatcagcttattcttaatagc

SEQ ID NO: 1208983 - DNA, 25 bp, Homo sapien
caacccatgtctttcaataatgaat

SEQ ID NO: 1208984 - DNA, 25 bp, Homo sapien
acaacccatgtctttcaataatgaa

SEQ ID NO: 1208985 - DNA, 25 bp, Homo sapien
aactccttctatgatccagtctcta

SEQ ID NO: 1208986 - DNA, 25 bp, Homo sapien
caacctgtgaatcttgtctcctaaa

SEQ ID NO: 1208987 - DNA, 25 bp, Homo sapien
taacaaaaacctgctcgctggtctc

SEQ ID NO: 1208988 - DNA, 25 bp, Homo sapien
ctcagaaagcctttaagggtaagca

SEQ ID NO: 1208989 - DNA, 25 bp, Homo sapien
tcccccatcatcgtattctcacaga

SEQ ID NO: 1208990 - DNA, 25 bp, Homo sapien
atcaagattccaaaagacagatgat

SEQ ID NO: 1208991 - DNA, 25 bp, Homo sapien
taattttgttgaagtccgatttgtc

SEQ ID NO: 1208992 - DNA, 25 bp, Homo sapien
ctcagagcctttcctatgttcatgt

SEQ ID NO: 1208993 - DNA, 25 bp, Homo sapien
cactgatggtggtcccactaccctg

SEQ ID NO: 1208994 - DNA, 25 bp, Homo sapien
tgaaggcagagtcttaacacctgct

SEQ ID NO: 1208995 - DNA, 25 bp, Homo sapien
ctgcactgatggtggtcccactacc

SEQ ID NO: 1208996 - DNA, 25 bp, Homo sapien
ttaacacctgctcttgattcatccc

SEQ ID NO: 1208997 - DNA, 25 bp, Homo sapien
cccttggactaatgagagatacacg

SEQ ID NO: 1208998 - DNA, 25 bp, Homo sapien
gagagatacacgaaggtgcccttgg

SEQ ID NO: 1208999 - DNA, 25 bp, Homo sapien
aggaagcccttggactaatgagaga

SEQ ID NO: 1209000 - DNA, 25 bp, Homo sapien
gactaatgagagatacacgaaggtg

SEQ ID NO: 1209001 - DNA, 25 bp, Homo sapien
gggccaggacatcacgggcacagca

SEQ ID NO: 1209002 - DNA, 25 bp, Homo sapien
aacagaccaggaaatcttccccgcg

SEQ ID NO: 1209003 - DNA, 25 bp, Homo sapien
ccaggaaatcttccccgcggaacag

SEQ ID NO: 1209004 - DNA, 25 bp, Homo sapien
ctcgtcacactgggccaggacatca

SEQ ID NO: 1209005 - DNA, 25 bp, Homo sapien
catgacttgagcatcgaagtgggcc

SEQ ID NO: 1209006 - DNA, 25 bp, Homo sapien
tcagagcaggcgctcggaagcctgc

SEQ ID NO: 1209007 - DNA, 25 bp, Homo sapien
gggctcatgacagacgcaaaattca

SEQ ID NO: 1209008 - DNA, 25 bp, Homo sapien
atggagagaagctcccatgacttga

SEQ ID NO: 1209009 - DNA, 25 bp, Homo sapien
gaagaatgaggtatcccgagtcaca

SEQ ID NO: 1209010 - DNA, 25 bp, Homo sapien
gcctacgtcccaggagttggaagaa

SEQ ID NO: 1209011 - DNA, 25 bp, Homo sapien
tagggcagataaccgggcccaagct

SEQ ID NO: 1209012 - DNA, 25 bp, Homo sapien
agatgagccgctttgcttaagaccc

SEQ ID NO: 1209013 - DNA, 25 bp, Homo sapien
aagcgcccggtgtaggaatcctggt

SEQ ID NO: 1209014 - DNA, 25 bp, Homo sapien
gcttggaggcttccgaccttccgga

SEQ ID NO: 1209015 - DNA, 25 bp, Homo sapien
agtttctccgtgaaagctcgtccga

SEQ ID NO: 1209016 - DNA, 25 bp, Homo sapien
cggctggcgggattcacattggcca

SEQ ID NO: 1209017 - DNA, 25 bp, Homo sapien
tgaattgggtgagactgacactgcc

SEQ ID NO: 1209018 - DNA, 25 bp, Homo sapien
tccccacagtcgagaaagatcagag

SEQ ID NO: 1209019 - DNA, 25 bp, Homo sapien
aagatcagagcttcagtcagcgtcc

SEQ ID NO: 1209020 - DNA, 25 bp, Homo sapien
cttactaagtaaaggcgcagtgccc

SEQ ID NO: 1209021 - DNA, 25 bp, Homo sapien
gacgtaagtgagttgccccttagga

SEQ ID NO: 1209022 - DNA, 25 bp, Homo sapien
gaactaacttctaaccaccatggtg

SEQ ID NO: 1209023 - DNA, 25 bp, Homo sapien
gagtcaggtctttggagctgcacca

SEQ ID NO: 1209024 - DNA, 25 bp, Homo sapien
aacagggagttcactgccttccggt

SEQ ID NO: 1209025 - DNA, 25 bp, Homo sapien
catgcaggagaagctctcctcagtc

SEQ ID NO: 1209026 - DNA, 25 bp, Homo sapien
gcatagccatcaaggggccagctgc

SEQ ID NO: 1209027 - DNA, 25 bp, Homo sapien
ccatgcaggagaagctctcctcagt

SEQ ID NO: 1209028 - DNA, 25 bp, Homo sapien
tcctcagtctcatggaggggctcag

SEQ ID NO: 1209029 - DNA, 25 bp, Homo sapien
ccacttccctatgctgcccctaaaa

SEQ ID NO: 1209030 - DNA, 25 bp, Homo sapien
ctggccacttccctatgctgcccct

SEQ ID NO: 1209031 - DNA, 25 bp, Homo sapien
ggctcctgggtttgatggaccaacc

SEQ ID NO: 1209032 - DNA, 25 bp, Homo sapien
aaaggctcctgggtttgatggacca

SEQ ID NO: 1209033 - DNA, 25 bp, Homo sapien
atccaacccatcaaagagctcggcg

SEQ ID NO: 1209034 - DNA, 25 bp, Homo sapien
agctcggcgtatcctcggcagagat

SEQ ID NO: 1209035 - DNA, 25 bp, Homo sapien
cacaaggcaggcaaatccgaaatct

SEQ ID NO: 1209036 - DNA, 25 bp, Homo sapien
aaggcaggcaaatccgaaatctctc

SEQ ID NO: 1209037 - DNA, 25 bp, Homo sapien
caaatttctacaccaacagggcaag

SEQ ID NO: 1209038 - DNA, 25 bp, Homo sapien
gctgcctggacacaaatttctacac

SEQ ID NO: 1209039 - DNA, 25 bp, Homo sapien
tggacacaaatttctacaccaacag

SEQ ID NO: 1209040 - DNA, 25 bp, Homo sapien
cagctgcctggacacaaatttctac

SEQ ID NO: 1209041 - DNA, 25 bp, Homo sapien
ttctccagggcattggtagttgaga

SEQ ID NO: 1209042 - DNA, 25 bp, Homo sapien
ccagggcattggtagttgagatatt

SEQ ID NO: 1209043 - DNA, 25 bp, Homo sapien
gggcattggtagttgagatatttct

SEQ ID NO: 1209044 - DNA, 25 bp, Homo sapien
cattggtagttgagatatttctgtg

SEQ ID NO: 1209045 - DNA, 25 bp, Homo sapien
gataaaaccagtatgtgcagaatgg

SEQ ID NO: 1209046 - DNA, 25 bp, Homo sapien
tccagcatcagttgataaaaccagt

SEQ ID NO: 1209047 - DNA, 25 bp, Homo sapien
aaccagtatgtgcagaatggttcct

SEQ ID NO: 1209048 - DNA, 25 bp, Homo sapien
tgtggcaacagccattccagcatca

SEQ ID NO: 1209049 - DNA, 25 bp, Homo sapien
tgcttttgctttggtgtccggatcc

SEQ ID NO: 1209050 - DNA, 25 bp, Homo sapien
aagagcagggaagccggggagcgat

SEQ ID NO: 1209051 - DNA, 25 bp, Homo sapien
ttggtgtccggatcccagcccgcgg

SEQ ID NO: 1209052 - DNA, 25 bp, Homo sapien
ggagagaggcaagccgagggcgcag

SEQ ID NO: 1209053 - DNA, 25 bp, Homo sapien
tgcccgcgaggagcgcatggacgat

SEQ ID NO: 1209054 - DNA, 25 bp, Homo sapien
gcgaggagcgcatggacgatccgcg

SEQ ID NO: 1209055 - DNA, 25 bp, Homo sapien
aggagcgcatggacgatccgcgcgt

SEQ ID NO: 1209056 - DNA, 25 bp, Homo sapien
tctgcccgcgaggagcgcatggacg

SEQ ID NO: 1209057 - DNA, 25 bp, Homo sapien
tccgcatagggtcctcgagggatcc

SEQ ID NO: 1209058 - DNA, 25 bp, Homo sapien
catatcgtcgctccattcgggctca

SEQ ID NO: 1209059 - DNA, 25 bp, Homo sapien
tcttggacatcagcggagcttcacg

SEQ ID NO: 1209060 - DNA, 25 bp, Homo sapien
tttgggcgccttggccatatcgtcg

SEQ ID NO: 1209061 - DNA, 25 bp, Homo sapien
gctcgtcgtccgatttgccatcttc

SEQ ID NO: 1209062 - DNA, 25 bp, Homo sapien
gtcgtccgatttgccatcttcgctc

SEQ ID NO: 1209063 - DNA, 25 bp, Homo sapien
ggagagcagctcgtcgtccgatttg

SEQ ID NO: 1209064 - DNA, 25 bp, Homo sapien
cttgctggagagcagctcgtcgtcc

SEQ ID NO: 1209065 - DNA, 25 bp, Homo sapien
ggcccagagctcttttgcgccttgg

SEQ ID NO: 1209066 - DNA, 25 bp, Homo sapien
caccttgaggaaggcgcgctcctcc

SEQ ID NO: 1209067 - DNA, 25 bp, Homo sapien
ggacaggcccagagctcttttgcgc

SEQ ID NO: 1209068 - DNA, 25 bp, Homo sapien
accagctcggggtccaccttgagga

SEQ ID NO: 1209069 - DNA, 25 bp, Homo sapien
tccccagcagctggttaggagaaag

SEQ ID NO: 1209070 - DNA, 25 bp, Homo sapien
cttccccagcagctggttaggagaa

SEQ ID NO: 1209071 - DNA, 25 bp, Homo sapien
gcagctggttaggagaaagccaggg

SEQ ID NO: 1209072 - DNA, 25 bp, Homo sapien
cagcagctggttaggagaaagccag

SEQ ID NO: 1209073 - DNA, 25 bp, Homo sapien
cagaatcctcacaccgcggggaaat

SEQ ID NO: 1209074 - DNA, 25 bp, Homo sapien
cacatctgtcctctagatccgggct

SEQ ID NO: 1209075 - DNA, 25 bp, Homo sapien
ggaaatccgacttgcgctcccactc

SEQ ID NO: 1209076 - DNA, 25 bp, Homo sapien
tggacgctccccttgcaatgcggga

SEQ ID NO: 1209077 - DNA, 25 bp, Homo sapien
gagctttcgacacgccctaaaagac

SEQ ID NO: 1209078 - DNA, 25 bp, Homo sapien
gcccagagctttcgacacgccctaa

SEQ ID NO: 1209079 - DNA, 25 bp, Homo sapien
ccagagctttcgacacgccctaaaa

SEQ ID NO: 1209080 - DNA, 25 bp, Homo sapien
ctaacgcccagagctttcgacacgc

SEQ ID NO: 1209081 - DNA, 25 bp, Homo sapien
gagggcctgtctgatacctgaacac

SEQ ID NO: 1209082 - DNA, 25 bp, Homo sapien
caccatcattggctctggaagacga

SEQ ID NO: 1209083 - DNA, 25 bp, Homo sapien
gaaaagcttagtttggaggtcacca

SEQ ID NO: 1209084 - DNA, 25 bp, Homo sapien
gaaattgattcttggcagcctcttg

SEQ ID NO: 1209085 - DNA, 25 bp, Homo sapien
ggcagtcttagctgtctcactttgc

SEQ ID NO: 1209086 - DNA, 25 bp, Homo sapien
tgggcagtcttagctgtctcacttt

SEQ ID NO: 1209087 - DNA, 25 bp, Homo sapien
cttgggcagtcttagctgtctcact

SEQ ID NO: 1209088 - DNA, 25 bp, Homo sapien
agtcttagctgtctcactttgcccc

SEQ ID NO: 1209089 - DNA, 25 bp, Homo sapien
gaggctgtgaggtgcggtatatgtg

SEQ ID NO: 1209090 - DNA, 25 bp, Homo sapien
cagcttgcaccttcaccctcagggt

SEQ ID NO: 1209091 - DNA, 25 bp, Homo sapien
ttgcaccttcaccctcagggtcaga

SEQ ID NO: 1209092 - DNA, 25 bp, Homo sapien
ctgtgaggtgcggtatatgtgtgtg

SEQ ID NO: 1209093 - DNA, 25 bp, Homo sapien
tgtactggaatgagcctggacactt

SEQ ID NO: 1209094 - DNA, 25 bp, Homo sapien
ctttctggcttcttcgcagcatgct

SEQ ID NO: 1209095 - DNA, 25 bp, Homo sapien
gcagcatgctgcattctgcttgtac

SEQ ID NO: 1209096 - DNA, 25 bp, Homo sapien
tgatgccaattccagctggccgagc

SEQ ID NO: 1209097 - DNA, 25 bp, Homo sapien
acaaacaaagctggataactggaat

SEQ ID NO: 1209098 - DNA, 25 bp, Homo sapien
aacaaacaaagctggataactggaa

SEQ ID NO: 1209099 - DNA, 25 bp, Homo sapien
ggataactggaatgtcttctcccat

SEQ ID NO: 1209100 - DNA, 25 bp, Homo sapien
gcagataggatgactgctctagtca

SEQ ID NO: 1209101 - DNA, 25 bp, Homo sapien
cctctgaagttgcagataggatgac

SEQ ID NO: 1209102 - DNA, 25 bp, Homo sapien
tgctctagtcatcaccattggtgct

SEQ ID NO: 1209103 - DNA, 25 bp, Homo sapien
ccagcaccaaaaccattgccgtcat

SEQ ID NO: 1209104 - DNA, 25 bp, Homo sapien
ccacagggcagtcgagcttgagcgt

SEQ ID NO: 1209105 - DNA, 25 bp, Homo sapien
ttcggtactgcttgctgattggcca

SEQ ID NO: 1209106 - DNA, 25 bp, Homo sapien
cagagttctacatgtgggcctaaca

SEQ ID NO: 1209107 - DNA, 25 bp, Homo sapien
catcagtctatgtgcgtccacaggg

SEQ ID NO: 1209108 - DNA, 25 bp, Homo sapien
gaagagatcacttttgagacgcaga

SEQ ID NO: 1209109 - DNA, 25 bp, Homo sapien
caatagggtaggaagcagaaccggc

SEQ ID NO: 1209110 - DNA, 25 bp, Homo sapien
aatgatgatttatgaggccggccac

SEQ ID NO: 1209111 - DNA, 25 bp, Homo sapien
tgtgcctaggaagccgactctgtgt

SEQ ID NO: 1209112 - DNA, 25 bp, Homo sapien
cagcactcggcccttggctaatttt

SEQ ID NO: 1209113 - DNA, 25 bp, Homo sapien
ggatcccatggacaaacacgctggg

SEQ ID NO: 1209114 - DNA, 25 bp, Homo sapien
ggccctaccagtgttctgccaaagc

SEQ ID NO: 1209115 - DNA, 25 bp, Homo sapien
agtccagctggaccgaacaggaagc

SEQ ID NO: 1209116 - DNA, 25 bp, Homo sapien
ccacagaggaaaaatgtactggctg

SEQ ID NO: 1209117 - DNA, 25 bp, Homo sapien
ggacttggtttagagtcacatacat

SEQ ID NO: 1209118 - DNA, 25 bp, Homo sapien
tttagagtcacatacatgccctgat

SEQ ID NO: 1209119 - DNA, 25 bp, Homo sapien
caccacagaggaaaaatgtactggc

SEQ ID NO: 1209120 - DNA, 25 bp, Homo sapien
taatgttagagcatggtaccctggg

SEQ ID NO: 1209121 - DNA, 25 bp, Homo sapien
ggcagctgtccctcggtgcttatta

SEQ ID NO: 1209122 - DNA, 25 bp, Homo sapien
gactgctgtccaaacaccttgacta

SEQ ID NO: 1209123 - DNA, 25 bp, Homo sapien
ggatttctctgaggaccaacatgac

SEQ ID NO: 1209124 - DNA, 25 bp, Homo sapien
gagaacatatcctgtgccaccttcc

SEQ ID NO: 1209125 - DNA, 25 bp, Homo sapien
ccttggttgagtggtaatatgattt

SEQ ID NO: 1209126 - DNA, 25 bp, Homo sapien
taagagagaacatatcctgtgccac

SEQ ID NO: 1209127 - DNA, 25 bp, Homo sapien
gatgtatccttggttgagtggtaat

SEQ ID NO: 1209128 - DNA, 25 bp, Homo sapien
gcgcccggcaatgtgctacattttc

SEQ ID NO: 1209129 - DNA, 25 bp, Homo sapien
ttgcgcccggcaatgtgctacattt

SEQ ID NO: 1209130 - DNA, 25 bp, Homo sapien
tgcgcccggcaatgtgctacatttt

SEQ ID NO: 1209131 - DNA, 25 bp, Homo sapien
cattgcgcccggcaatgtgctacat

SEQ ID NO: 1209132 - DNA, 25 bp, Homo sapien
cccggatggggtgaaggtatctagg

SEQ ID NO: 1209133 - DNA, 25 bp, Homo sapien
ccggatggggtgaaggtatctaggg

SEQ ID NO: 1209134 - DNA, 25 bp, Homo sapien
gaaggtatctagggcttccgctact

SEQ ID NO: 1209135 - DNA, 25 bp, Homo sapien
tgaccaccaacccataactaagctt

SEQ ID NO: 1209136 - DNA, 25 bp, Homo sapien
caacccataactaagcttcacccct

SEQ ID NO: 1209137 - DNA, 25 bp, Homo sapien
ctctgaccaccaacccataactaag

SEQ ID NO: 1209138 - DNA, 25 bp, Homo sapien
caccaacccataactaagcttcacc

SEQ ID NO: 1209139 - DNA, 25 bp, Homo sapien
gaatccaggcctccatgctggtggc

SEQ ID NO: 1209140 - DNA, 25 bp, Homo sapien
tggcaaggatcagggacaaatggca

SEQ ID NO: 1209141 - DNA, 25 bp, Homo sapien
ccaggcctccatgctggtggcaagg

SEQ ID NO: 1209142 - DNA, 25 bp, Homo sapien
tggtggcaaggatcagggacaaatg

SEQ ID NO: 1209143 - DNA, 25 bp, Homo sapien
gaccctcgcaggctggacatggtct

SEQ ID NO: 1209144 - DNA, 25 bp, Homo sapien
aggttctgccggagatccaggacat

SEQ ID NO: 1209145 - DNA, 25 bp, Homo sapien
caggctggacatggtctcttccagg

SEQ ID NO: 1209146 - DNA, 25 bp, Homo sapien
ttccaggttctgccggagatccagg

SEQ ID NO: 1209147 - DNA, 25 bp, Homo sapien
tcatgtagccggacttgaggtccac

SEQ ID NO: 1209148 - DNA, 25 bp, Homo sapien
gactggactggccatagcgccatga

SEQ ID NO: 1209149 - DNA, 25 bp, Homo sapien
tgtcgtagcaggtcatctccaggga

SEQ ID NO: 1209150 - DNA, 25 bp, Homo sapien
tccgagtccagggattcgaccagct

SEQ ID NO: 1209151 - DNA, 25 bp, Homo sapien
gctccttggatgtaggccctgccta

SEQ ID NO: 1209152 - DNA, 25 bp, Homo sapien
gggaggcgccttcattgaccaatca

SEQ ID NO: 1209153 - DNA, 25 bp, Homo sapien
tgtccagggtctacacagagttcgc

SEQ ID NO: 1209154 - DNA, 25 bp, Homo sapien
ttaaggcgtcgcatcccagtggtct

SEQ ID NO: 1209155 - DNA, 25 bp, Homo sapien
ggaaaagctgcatggcgttagattt

SEQ ID NO: 1209156 - DNA, 25 bp, Homo sapien
gctaataagtacataaagctgctcc

SEQ ID NO: 1209157 - DNA, 25 bp, Homo sapien
gagataaccacttcgcctccatcag

SEQ ID NO: 1209158 - DNA, 25 bp, Homo sapien
tgtatttccaaaaaaccccatcagc

SEQ ID NO: 1209159 - DNA, 25 bp, Homo sapien
ccctgctgggtttgaacagacactg

SEQ ID NO: 1209160 - DNA, 25 bp, Homo sapien
tccagcagctcaattgtaggttact

SEQ ID NO: 1209161 - DNA, 25 bp, Homo sapien
ggagcactccttagctagcattagt

SEQ ID NO: 1209162 - DNA, 25 bp, Homo sapien
cagattaatgctgcacagactgagg

SEQ ID NO: 1209163 - DNA, 25 bp, Homo sapien
tgtgcctggccaccaagtgtattac

SEQ ID NO: 1209164 - DNA, 25 bp, Homo sapien
catgctaagaacaatactattgccg

SEQ ID NO: 1209165 - DNA, 25 bp, Homo sapien
gcctggccaccaagtgtattacata

SEQ ID NO: 1209166 - DNA, 25 bp, Homo sapien
ttgccgtattcgtattcttgcttaa

SEQ ID NO: 1209167 - DNA, 25 bp, Homo sapien
tcattggtcagtcgacagcatggcc

SEQ ID NO: 1209168 - DNA, 25 bp, Homo sapien
tgagaatatactcgccctgctctgg

SEQ ID NO: 1209169 - DNA, 25 bp, Homo sapien
tatgtgctttcggtctctatgggcc

SEQ ID NO: 1209170 - DNA, 25 bp, Homo sapien
gaccccttttagtaggagctggcca

SEQ ID NO: 1209171 - DNA, 25 bp, Homo sapien
aaatatagaaggcttcacagatttg

SEQ ID NO: 1209172 - DNA, 25 bp, Homo sapien
tagaaggcttcacagatttgggtgt

SEQ ID NO: 1209173 - DNA, 25 bp, Homo sapien
tatagaaggcttcacagatttgggt

SEQ ID NO: 1209174 - DNA, 25 bp, Homo sapien
agaaggcttcacagatttgggtgtc

SEQ ID NO: 1209175 - DNA, 25 bp, Homo sapien
ctccttcttgggattgattcctgag

SEQ ID NO: 1209176 - DNA, 25 bp, Homo sapien
gacgtgccataagggattctcttta

SEQ ID NO: 1209177 - DNA, 25 bp, Homo sapien
cctttgtggttttctcagcagggag

SEQ ID NO: 1209178 - DNA, 25 bp, Homo sapien
gccagcatggaatcctgagtaaaat

SEQ ID NO: 1209179 - DNA, 25 bp, Homo sapien
gactttgtctcagccaaaggaatgt

SEQ ID NO: 1209180 - DNA, 25 bp, Homo sapien
gctgctccgaaattaacccctggga

SEQ ID NO: 1209181 - DNA, 25 bp, Homo sapien
ggtgtgagcagcgagccacttctct

SEQ ID NO: 1209182 - DNA, 25 bp, Homo sapien
ttctaaaaatcggagcatgggtcag

SEQ ID NO: 1209183 - DNA, 25 bp, Homo sapien
cattgcctaaaacaaggtccgtgga

SEQ ID NO: 1209184 - DNA, 25 bp, Homo sapien
ttaacacccagagcaggtagacaaa

SEQ ID NO: 1209185 - DNA, 25 bp, Homo sapien
agcctcctccgttccggtggcctcg

SEQ ID NO: 1209186 - DNA, 25 bp, Homo sapien
cgctgacttctgtcccgagccccgg

SEQ ID NO: 1209187 - DNA, 25 bp, Homo sapien
tgcaggctgcgagcgggctctttaa

SEQ ID NO: 1209188 - DNA, 25 bp, Homo sapien
tgtgggccacgcggagggtcggaaa

SEQ ID NO: 1209189 - DNA, 25 bp, Homo sapien
acctaaccctcgcctgccctccgct

SEQ ID NO: 1209190 - DNA, 25 bp, Homo sapien
ctgtgggccacgcggagggtcggaa

SEQ ID NO: 1209191 - DNA, 25 bp, Homo sapien
cctaaccctcgcctgccctccgctc

SEQ ID NO: 1209192 - DNA, 25 bp, Homo sapien
ccattcaccgggtgggcacccagcg

SEQ ID NO: 1209193 - DNA, 25 bp, Homo sapien
cggctcaggcggccattcaccgggt

SEQ ID NO: 1209194 - DNA, 25 bp, Homo sapien
aggcggccattcaccgggtgggcac

SEQ ID NO: 1209195 - DNA, 25 bp, Homo sapien
caggaccgctctcgcctgacacccg

SEQ ID NO: 1209196 - DNA, 25 bp, Homo sapien
cagccattttggcaaagtgacccca

SEQ ID NO: 1209197 - DNA, 25 bp, Homo sapien
gagtattcaatagctatggccccag

SEQ ID NO: 1209198 - DNA, 25 bp, Homo sapien
tagggcactaagctctctttataag

SEQ ID NO: 1209199 - DNA, 25 bp, Homo sapien
ggtaatgagctaggtgagtattcaa

SEQ ID NO: 1209200 - DNA, 25 bp, Homo sapien
tctttataagggcaggttcccatga

SEQ ID NO: 1209201 - DNA, 25 bp, Homo sapien
gatgggccatatgttccgatttctt

SEQ ID NO: 1209202 - DNA, 25 bp, Homo sapien
tgtgtgcatgcactagggcaactgc

SEQ ID NO: 1209203 - DNA, 25 bp, Homo sapien
tacattacctattgatccactgccc

SEQ ID NO: 1209204 - DNA, 25 bp, Homo sapien
actgcccgcacagccacgagaatgg

SEQ ID NO: 1209205 - DNA, 25 bp, Homo sapien
ttcggcatgaatcccatatattggg

SEQ ID NO: 1209206 - DNA, 25 bp, Homo sapien
tgcaaagttgttcggcatgaatccc

SEQ ID NO: 1209207 - DNA, 25 bp, Homo sapien
atatattggggacccattccggtgg

SEQ ID NO: 1209208 - DNA, 25 bp, Homo sapien
ctagaaggtgtctgcaaagttgttc

SEQ ID NO: 1209209 - DNA, 25 bp, Homo sapien
aaatatctttgttgagggctctgaa

SEQ ID NO: 1209210 - DNA, 25 bp, Homo sapien
tcttggtgaaatatctttgttgagg

SEQ ID NO: 1209211 - DNA, 25 bp, Homo sapien
agaacaggacagctgaataccacat

SEQ ID NO: 1209212 - DNA, 25 bp, Homo sapien
ttttcacttcagagaacaggacagc

SEQ ID NO: 1209213 - DNA, 25 bp, Homo sapien
aaattcttccctctgttagcctcgg

SEQ ID NO: 1209214 - DNA, 25 bp, Homo sapien
tgaaatctctttggcaagggttacc

SEQ ID NO: 1209215 - DNA, 25 bp, Homo sapien
gacttctgcgttgcatttaacactg

SEQ ID NO: 1209216 - DNA, 25 bp, Homo sapien
caaacatgatggcagagtatcttcc

SEQ ID NO: 1209217 - DNA, 25 bp, Homo sapien
ctttccagacataaagcaactaatg

SEQ ID NO: 1209218 - DNA, 25 bp, Homo sapien
aattgccaaatctcacaaaccacac

SEQ ID NO: 1209219 - DNA, 25 bp, Homo sapien
cataaagcaactaatgtgtaagtgc

SEQ ID NO: 1209220 - DNA, 25 bp, Homo sapien
agcaactaatgtgtaagtgcattaa

SEQ ID NO: 1209221 - DNA, 25 bp, Homo sapien
taaacgaagacgttgccattcatct

SEQ ID NO: 1209222 - DNA, 25 bp, Homo sapien
catcttcagatctcagatcaccctg

SEQ ID NO: 1209223 - DNA, 25 bp, Homo sapien
ttattaaacgaagacgttgccattc

SEQ ID NO: 1209224 - DNA, 25 bp, Homo sapien
gatcaccctgtgagcgcaaagtgag

SEQ ID NO: 1209225 - DNA, 25 bp, Homo sapien
catgagagactgtttccaagccgtc

SEQ ID NO: 1209226 - DNA, 25 bp, Homo sapien
aacaaaatggatgcaattggattag

SEQ ID NO: 1209227 - DNA, 25 bp, Homo sapien
tcttaatgtgggaaagggtaattgc

SEQ ID NO: 1209228 - DNA, 25 bp, Homo sapien
tattcagccctgcaaacagcttgga

SEQ ID NO: 1209229 - DNA, 25 bp, Homo sapien
tgacttaaactcttaatagggagag

SEQ ID NO: 1209230 - DNA, 25 bp, Homo sapien
tgcccagctgacttaaactcttaat

SEQ ID NO: 1209231 - DNA, 25 bp, Homo sapien
ggagagaccaagttacaaaaatcca

SEQ ID NO: 1209232 - DNA, 25 bp, Homo sapien
cttaatagggagagaccaagttaca

SEQ ID NO: 1209233 - DNA, 25 bp, Homo sapien
caaagtgtgaatttgacccagggac

SEQ ID NO: 1209234 - DNA, 25 bp, Homo sapien
gatatctcatgacatttgcccctga

SEQ ID NO: 1209235 - DNA, 25 bp, Homo sapien
ccttattggctagaaatggactgag

SEQ ID NO: 1209236 - DNA, 25 bp, Homo sapien
ccagttctaggtttgccaagggcta

SEQ ID NO: 1209237 - DNA, 25 bp, Homo sapien
tcttggctaggattggctacccctc

SEQ ID NO: 1209238 - DNA, 25 bp, Homo sapien
gagtggaccagcttgtgactacata

SEQ ID NO: 1209239 - DNA, 25 bp, Homo sapien
caagggtgtgggctaactaactgga

SEQ ID NO: 1209240 - DNA, 25 bp, Homo sapien
catagtctaaggaacactctgatgc

SEQ ID NO: 1209241 - DNA, 25 bp, Homo sapien
gaagccctcatgagaacgatttagg

SEQ ID NO: 1209242 - DNA, 25 bp, Homo sapien
taccctaggaggaaaacagccatgt

SEQ ID NO: 1209243 - DNA, 25 bp, Homo sapien
taattagggctccttatggccagcc

SEQ ID NO: 1209244 - DNA, 25 bp, Homo sapien
agatctgatcatagtgagtccccag

SEQ ID NO: 1209245 - DNA, 25 bp, Homo sapien
taaaagtgtggcaataggtatatcc

SEQ ID NO: 1209246 - DNA, 25 bp, Homo sapien
cccttccgctgttaggctgctagga

SEQ ID NO: 1209247 - DNA, 25 bp, Homo sapien
cagaaaaggacatgtcccttccgct

SEQ ID NO: 1209248 - DNA, 25 bp, Homo sapien
agagctgagtcagtctagcctgtca

SEQ ID NO: 1209249 - DNA, 25 bp, Homo sapien
tgcatatatgcaaggactaaaaggc

SEQ ID NO: 1209250 - DNA, 25 bp, Homo sapien
caagtcatctaagtggttggcccag

SEQ ID NO: 1209251 - DNA, 25 bp, Homo sapien
taaatccttgttatctgtgtgcaga

SEQ ID NO: 1209252 - DNA, 25 bp, Homo sapien
gagtatttgtttgtgccggtaggaa

SEQ ID NO: 1209253 - DNA, 25 bp, Homo sapien
tcagtcagaaagtttacccttagcc

SEQ ID NO: 1209254 - DNA, 25 bp, Homo sapien
tcacatttcttttcgatcacatgca

SEQ ID NO: 1209255 - DNA, 25 bp, Homo sapien
taagctcgaattctgtctcctgtaa

SEQ ID NO: 1209256 - DNA, 25 bp, Homo sapien
ttagcctcaaaactagcctcctcta

SEQ ID NO: 1209257 - DNA, 25 bp, Homo sapien
aacctccatatctttgtagcttgag

SEQ ID NO: 1209258 - DNA, 25 bp, Homo sapien
tatctttgtagcttgagctctacaa

SEQ ID NO: 1209259 - DNA, 25 bp, Homo sapien
tccatatctttgtagcttgagctct

SEQ ID NO: 1209260 - DNA, 25 bp, Homo sapien
ctttgtagcttgagctctacaaaca

SEQ ID NO: 1209261 - DNA, 25 bp, Homo sapien
tgttcttctgttaagtgaaccaaat

SEQ ID NO: 1209262 - DNA, 25 bp, Homo sapien
aaccaaatctaaggtgctgtggcca

SEQ ID NO: 1209263 - DNA, 25 bp, Homo sapien
agtgaaccaaatctaaggtgctgtg

SEQ ID NO: 1209264 - DNA, 25 bp, Homo sapien
tgtagaggggccaaatttgtgctga

SEQ ID NO: 1209265 - DNA, 25 bp, Homo sapien
ccactactgatggagctgctttcat

SEQ ID NO: 1209266 - DNA, 25 bp, Homo sapien
gaactgagattgtctgaggcatcgc

SEQ ID NO: 1209267 - DNA, 25 bp, Homo sapien
ctggcattgaattcttctgaactga

SEQ ID NO: 1209268 - DNA, 25 bp, Homo sapien
gaggcatcgctgagtccactactga

SEQ ID NO: 1209269 - DNA, 25 bp, Homo sapien
attgttgagttcctgcgagaagcag

SEQ ID NO: 1209270 - DNA, 25 bp, Homo sapien
cactattgttgagttcctgcgagaa

SEQ ID NO: 1209271 - DNA, 25 bp, Homo sapien
ctattgttgagttcctgcgagaagc

SEQ ID NO: 1209272 - DNA, 25 bp, Homo sapien
tgttgagttcctgcgagaagcagtg

SEQ ID NO: 1209273 - DNA, 25 bp, Homo sapien
tcagcccactttctgccagtgagcg

SEQ ID NO: 1209274 - DNA, 25 bp, Homo sapien
tcaggctaccactgtcgtactccag

SEQ ID NO: 1209275 - DNA, 25 bp, Homo sapien
cagtgagcgcttctctgagtctgtg

SEQ ID NO: 1209276 - DNA, 25 bp, Homo sapien
gctttttcagttctccacccttgga

SEQ ID NO: 1209277 - DNA, 25 bp, Homo sapien
tagccaaaggatcccgaagtggagg

SEQ ID NO: 1209278 - DNA, 25 bp, Homo sapien
ggcttcttagcatcactcaggcggt

SEQ ID NO: 1209279 - DNA, 25 bp, Homo sapien
cgaccagcatcagaggaggagcgtt

SEQ ID NO: 1209280 - DNA, 25 bp, Homo sapien
gatcttgctgagagtggctgaacca

SEQ ID NO: 1209281 - DNA, 25 bp, Homo sapien
caggctgcggtactggatgttagaa

SEQ ID NO: 1209282 - DNA, 25 bp, Homo sapien
gggcaggctgcggtactggatgtta

SEQ ID NO: 1209283 - DNA, 25 bp, Homo sapien
cggtactggatgttagaacgggctc

SEQ ID NO: 1209284 - DNA, 25 bp, Homo sapien
ctggatgttagaacgggctccagga

SEQ ID NO: 1209285 - DNA, 25 bp, Homo sapien
tcaaggagatgttgtctgagtccaa

SEQ ID NO: 1209286 - DNA, 25 bp, Homo sapien
cgccggtcacgctcatagaacttga

SEQ ID NO: 1209287 - DNA, 25 bp, Homo sapien
tggaaggcgtaaggcctccctgctt

SEQ ID NO: 1209288 - DNA, 25 bp, Homo sapien
gggagccaatactcttcaaggagat

SEQ ID NO: 1209289 - DNA, 25 bp, Homo sapien
tacatgcgggtctcttttggcacac

SEQ ID NO: 1209290 - DNA, 25 bp, Homo sapien
agcatgcagatctgggacctttgaa

SEQ ID NO: 1209291 - DNA, 25 bp, Homo sapien
cagactgttggagttgaccttgtca

SEQ ID NO: 1209292 - DNA, 25 bp, Homo sapien
cctttgaagcatgggtggtatcact

SEQ ID NO: 1209293 - DNA, 25 bp, Homo sapien
gaagagtgttccgatcccgctgatt

SEQ ID NO: 1209294 - DNA, 25 bp, Homo sapien
aagagtgttccgatcccgctgatta

SEQ ID NO: 1209295 - DNA, 25 bp, Homo sapien
ggaagagtgttccgatcccgctgat

SEQ ID NO: 1209296 - DNA, 25 bp, Homo sapien
gactggtcatcggattcaggcagcc

SEQ ID NO: 1209297 - DNA, 25 bp, Homo sapien
ctcctcctgggactgaagctggtac

SEQ ID NO: 1209298 - DNA, 25 bp, Homo sapien
caatggtatgggaatgtcgcctctc

SEQ ID NO: 1209299 - DNA, 25 bp, Homo sapien
taagttggccctttgcactcagaga

SEQ ID NO: 1209300 - DNA, 25 bp, Homo sapien
gggatgctgttggagcgggtgattc

SEQ ID NO: 1209301 - DNA, 25 bp, Homo sapien
ttggagcgggtgattcttggcgtgg

SEQ ID NO: 1209302 - DNA, 25 bp, Homo sapien
ctgttggagcgggtgattcttggcg

SEQ ID NO: 1209303 - DNA, 25 bp, Homo sapien
gatgctgttggagcgggtgattctt

SEQ ID NO: 1209304 - DNA, 25 bp, Homo sapien
ttgggagccgctgtacagctcgaag

SEQ ID NO: 1209305 - DNA, 25 bp, Homo sapien
tgctccccatttgggagccgctgta

SEQ ID NO: 1209306 - DNA, 25 bp, Homo sapien
cagggtgctccccatttgggagccg

SEQ ID NO: 1209307 - DNA, 25 bp, Homo sapien
tccccatttgggagccgctgtacag

SEQ ID NO: 1209308 - DNA, 25 bp, Homo sapien
cgtggggtctcggaaggatcctgac

SEQ ID NO: 1209309 - DNA, 25 bp, Homo sapien
tccgtggggtctcggaaggatcctg

SEQ ID NO: 1209310 - DNA, 25 bp, Homo sapien
tcgtccgtggggtctcggaaggatc

SEQ ID NO: 1209311 - DNA, 25 bp, Homo sapien
catcgtccgtggggtctcggaagga

SEQ ID NO: 1209312 - DNA, 25 bp, Homo sapien
gagagctaacctgccataagcctgg

SEQ ID NO: 1209313 - DNA, 25 bp, Homo sapien
aatactgaaattctgcccgcgcctc

SEQ ID NO: 1209314 - DNA, 25 bp, Homo sapien
aggaaagcaccttagccgcaggaga

SEQ ID NO: 1209315 - DNA, 25 bp, Homo sapien
tatggcagtcccttgcttagcccgc

SEQ ID NO: 1209316 - DNA, 25 bp, Homo sapien
gaggccagggacagcactgagccgt

SEQ ID NO: 1209317 - DNA, 25 bp, Homo sapien
tgaggagtaggtggaggaggcactg

SEQ ID NO: 1209318 - DNA, 25 bp, Homo sapien
gaggagtaggtggaggaggcactgg

SEQ ID NO: 1209319 - DNA, 25 bp, Homo sapien
gccagggacagcactgagccgtgaa

SEQ ID NO: 1209320 - DNA, 25 bp, Homo sapien
cagttccctacgaagcttccggatt

SEQ ID NO: 1209321 - DNA, 25 bp, Homo sapien
gagacgtcaaggtggccactttttc

SEQ ID NO: 1209322 - DNA, 25 bp, Homo sapien
cagaaagctgagacgtcaaggtggc

SEQ ID NO: 1209323 - DNA, 25 bp, Homo sapien
tttttcctgggatgattccagttcc

SEQ ID NO: 1209324 - DNA, 25 bp, Homo sapien
tctaacgatagtcaaaataactgcc

SEQ ID NO: 1209325 - DNA, 25 bp, Homo sapien
tcctcccttggctgaacttgtctaa

SEQ ID NO: 1209326 - DNA, 25 bp, Homo sapien
tgatctttccgtacttcatggcact

SEQ ID NO: 1209327 - DNA, 25 bp, Homo sapien
tgccttgatctttccgtacttcatg

SEQ ID NO: 1209328 - DNA, 25 bp, Homo sapien
actaggtgtcaggtctgtttcatga

SEQ ID NO: 1209329 - DNA, 25 bp, Homo sapien
gcagctgctccttgttcccggattc

SEQ ID NO: 1209330 - DNA, 25 bp, Homo sapien
actgcagaggcattccaccgtttgg

SEQ ID NO: 1209331 - DNA, 25 bp, Homo sapien
tgaaggataccaaagggctctctgg

SEQ ID NO: 1209332 - DNA, 25 bp, Homo sapien
tgtcgcaggcgggatgtcatattca

SEQ ID NO: 1209333 - DNA, 25 bp, Homo sapien
aggcgggatgtcatattcaccaggc

SEQ ID NO: 1209334 - DNA, 25 bp, Homo sapien
gccgtctctgccaggtgtcgcaggc

SEQ ID NO: 1209335 - DNA, 25 bp, Homo sapien
tcgcaggcgggatgtcatattcacc

SEQ ID NO: 1209336 - DNA, 25 bp, Homo sapien
cctgggtgacaagaacgaaactcca

SEQ ID NO: 1209337 - DNA, 25 bp, Homo sapien
ctgggtgacaagaacgaaactccat

SEQ ID NO: 1209338 - DNA, 25 bp, Homo sapien
tgtggtttctgaggcattaagggct

SEQ ID NO: 1209339 - DNA, 25 bp, Homo sapien
tctgaggcattaagggctccctgaa

SEQ ID NO: 1209340 - DNA, 25 bp, Homo sapien
tctatggtttctcgcaaatccagca

SEQ ID NO: 1209341 - DNA, 25 bp, Homo sapien
tcagaaagtctatggtttctcgcaa

SEQ ID NO: 1209342 - DNA, 25 bp, Homo sapien
gaatgtggagatatcggcaccctca

SEQ ID NO: 1209343 - DNA, 25 bp, Homo sapien
tatggttgctaaagagggcatccca

SEQ ID NO: 1209344 - DNA, 25 bp, Homo sapien
gataagcggtcactcttggccagaa

SEQ ID NO: 1209345 - DNA, 25 bp, Homo sapien
tattagaggcttgggcaaccaggca

SEQ ID NO: 1209346 - DNA, 25 bp, Homo sapien
ggctatttgcaattgtcctcctaga

SEQ ID NO: 1209347 - DNA, 25 bp, Homo sapien
gaaatgcacagggaggtcctctgca

SEQ ID NO: 1209348 - DNA, 25 bp, Homo sapien
gattttttaggcttggctcagtggc

SEQ ID NO: 1209349 - DNA, 25 bp, Homo sapien
aaacatcttgcctaactatggtgca

SEQ ID NO: 1209350 - DNA, 25 bp, Homo sapien
tgctgttgaggcttgagatgctatc

SEQ ID NO: 1209351 - DNA, 25 bp, Homo sapien
tgctggaatggctagtgatgctgtt

SEQ ID NO: 1209352 - DNA, 25 bp, Homo sapien
tgagatgctatctgaggagttttgt

SEQ ID NO: 1209353 - DNA, 25 bp, Homo sapien
tgctgccgatgctggaatggctagt

SEQ ID NO: 1209354 - DNA, 25 bp, Homo sapien
gaatctgggagaccatgctctgagc

SEQ ID NO: 1209355 - DNA, 25 bp, Homo sapien
tctgagcggacatcacactagggct

SEQ ID NO: 1209356 - DNA, 25 bp, Homo sapien
tatgctgaggtgaaggcggtccacc

SEQ ID NO: 1209357 - DNA, 25 bp, Homo sapien
actagggctcagtgttagacgggac

SEQ ID NO: 1209358 - DNA, 25 bp, Homo sapien
cagaggagcaggacgtgtccacctg

SEQ ID NO: 1209359 - DNA, 25 bp, Homo sapien
tcagaaaggtcatacgaagtcagtt

SEQ ID NO: 1209360 - DNA, 25 bp, Homo sapien
tgtctgcattatacaaaggtctggg

SEQ ID NO: 1209361 - DNA, 25 bp, Homo sapien
ctccaggagtctagaatgaacagct

SEQ ID NO: 1209362 - DNA, 25 bp, Homo sapien
gctctggaaatagggaaggtatggc

SEQ ID NO: 1209363 - DNA, 25 bp, Homo sapien
ctggaaatagggaaggtatggcaaa

SEQ ID NO: 1209364 - DNA, 25 bp, Homo sapien
aagggagttgctctggaaataggga

SEQ ID NO: 1209365 - DNA, 25 bp, Homo sapien
gagttgctctggaaatagggaaggt

SEQ ID NO: 1209366 - DNA, 25 bp, Homo sapien
tataccctactcagtcagtgctcta

SEQ ID NO: 1209367 - DNA, 25 bp, Homo sapien
ttctcttctgcacagacagtgtctg

SEQ ID NO: 1209368 - DNA, 25 bp, Homo sapien
ggctcttcctatgtgtactataccc

SEQ ID NO: 1209369 - DNA, 25 bp, Homo sapien
catctcaatgggctggcaatcagtg

SEQ ID NO: 1209370 - DNA, 25 bp, Homo sapien
cctctatatccgagtatgaggaagc

SEQ ID NO: 1209371 - DNA, 25 bp, Homo sapien
tgaagagtcgggtgtagcaatctcc

SEQ ID NO: 1209372 - DNA, 25 bp, Homo sapien
gaacgctttgttgaaggaacttcga

SEQ ID NO: 1209373 - DNA, 25 bp, Homo sapien
tatgaggaagctgacttgggcccct

SEQ ID NO: 1209374 - DNA, 25 bp, Homo sapien
gtgtggggggctgggtgagcagggc

SEQ ID NO: 1209375 - DNA, 25 bp, Homo sapien
ctagtgtggggggctgggtgagcag

SEQ ID NO: 1209376 - DNA, 25 bp, Homo sapien
gtggggggctgggtgagcagggccc

SEQ ID NO: 1209377 - DNA, 25 bp, Homo sapien
tagtgtggggggctgggtgagcagg

SEQ ID NO: 1209378 - DNA, 25 bp, Homo sapien
ccatagctcagagcgcagctccgat

SEQ ID NO: 1209379 - DNA, 25 bp, Homo sapien
tcccatagctcagagcgcagctccg

SEQ ID NO: 1209380 - DNA, 25 bp, Homo sapien
agctccgatacctccttcttctctg

SEQ ID NO: 1209381 - DNA, 25 bp, Homo sapien
agctcagagcgcagctccgatacct

SEQ ID NO: 1209382 - DNA, 25 bp, Homo sapien
tgtgcatggtctcccgaagctgatc

SEQ ID NO: 1209383 - DNA, 25 bp, Homo sapien
gttgtgcatggtctcccgaagctga

SEQ ID NO: 1209384 - DNA, 25 bp, Homo sapien
agttgagggcctccaagcggatgtc

SEQ ID NO: 1209385 - DNA, 25 bp, Homo sapien
cctccaagcggatgtctgtaagctt

SEQ ID NO: 1209386 - DNA, 25 bp, Homo sapien
ccgaaggaatgggtgagtgccaggc

SEQ ID NO: 1209387 - DNA, 25 bp, Homo sapien
attctctgctttcagcaggtccacc

SEQ ID NO: 1209388 - DNA, 25 bp, Homo sapien
taccttcagtcggtcattctctgct

SEQ ID NO: 1209389 - DNA, 25 bp, Homo sapien
tctgcaagactggggccgaaggaat

SEQ ID NO: 1209390 - DNA, 25 bp, Homo sapien
ggaccacaagtactgatgccatcca

SEQ ID NO: 1209391 - DNA, 25 bp, Homo sapien
gaccacaagtactgatgccatccat

SEQ ID NO: 1209392 - DNA, 25 bp, Homo sapien
accacaagtactgatgccatccatg

SEQ ID NO: 1209393 - DNA, 25 bp, Homo sapien
ggaaaacagcttcatccagcatctt

SEQ ID NO: 1209394 - DNA, 25 bp, Homo sapien
gcatcttccagtcaacttttccact

SEQ ID NO: 1209395 - DNA, 25 bp, Homo sapien
ggaagaattcctgctgcttcaagtc

SEQ ID NO: 1209396 - DNA, 25 bp, Homo sapien
ttccactgaccttgctacagcccag

SEQ ID NO: 1209397 - DNA, 25 bp, Homo sapien
tgttattgacacctcgacggcaagg

SEQ ID NO: 1209398 - DNA, 25 bp, Homo sapien
tgtagccatggatggactcagtgct

SEQ ID NO: 1209399 - DNA, 25 bp, Homo sapien
actcagtgcttagtcccagggtaga

SEQ ID NO: 1209400 - DNA, 25 bp, Homo sapien
cgtttcacgtggctgatgctgtagc

SEQ ID NO: 1209401 - DNA, 25 bp, Homo sapien
tgtagtgctgcatcatcggcttggg

SEQ ID NO: 1209402 - DNA, 25 bp, Homo sapien
catgttgaaggtgctgacgatgccc

SEQ ID NO: 1209403 - DNA, 25 bp, Homo sapien
caggtactcggccaagcgattggtc

SEQ ID NO: 1209404 - DNA, 25 bp, Homo sapien
tggtcaggtaggtcttgcccgtgcc

SEQ ID NO: 1209405 - DNA, 25 bp, Homo sapien
tcggccttggaaatcaggattttga

SEQ ID NO: 1209406 - DNA, 25 bp, Homo sapien
tggatcggccttggaaatcaggatt

SEQ ID NO: 1209407 - DNA, 25 bp, Homo sapien
gcagctggatcggccttggaaatca

SEQ ID NO: 1209408 - DNA, 25 bp, Homo sapien
gctggatcggccttggaaatcagga

SEQ ID NO: 1209409 - DNA, 25 bp, Homo sapien
accaactcactgatggagcctgctt

SEQ ID NO: 1209410 - DNA, 25 bp, Homo sapien
gttggctaggttggaaagatacagt

SEQ ID NO: 1209411 - DNA, 25 bp, Homo sapien
ctatctggttggctaggttggaaag

SEQ ID NO: 1209412 - DNA, 25 bp, Homo sapien
tcccggtctatctggttggctaggt

SEQ ID NO: 1209413 - DNA, 25 bp, Homo sapien
acaactcataggttgtcctggactg

SEQ ID NO: 1209414 - DNA, 25 bp, Homo sapien
ttttgtcttgatcccagcttactta

SEQ ID NO: 1209415 - DNA, 25 bp, Homo sapien
cctcctcccacttcgatgaattttg

SEQ ID NO: 1209416 - DNA, 25 bp, Homo sapien
agattcacttagacttgccttcaca

SEQ ID NO: 1209417 - DNA, 25 bp, Homo sapien
ttttacaggctgattggtggtacct

SEQ ID NO: 1209418 - DNA, 25 bp, Homo sapien
gctgattggtggtacctataatata

SEQ ID NO: 1209419 - DNA, 25 bp, Homo sapien
ctgaagctcaagtgcaagccatggt

SEQ ID NO: 1209420 - DNA, 25 bp, Homo sapien
caagccatggttgggtgtcattttt

SEQ ID NO: 1209421 - DNA, 25 bp, Homo sapien
gggacatcggaactcagagcagcag

SEQ ID NO: 1209422 - DNA, 25 bp, Homo sapien
tagggtcagaaggttcatccagagc

SEQ ID NO: 1209423 - DNA, 25 bp, Homo sapien
acccagatcagcgtgtgcgggcaga

SEQ ID NO: 1209424 - DNA, 25 bp, Homo sapien
tctgcttagagcaacctacctggct

SEQ ID NO: 1209425 - DNA, 25 bp, Homo sapien
tgatgtcgctgtctgactctaccag

SEQ ID NO: 1209426 - DNA, 25 bp, Homo sapien
gatgataccacagcttgggtaccca

SEQ ID NO: 1209427 - DNA, 25 bp, Homo sapien
tcaggtaacgaaccaggaagccatt

SEQ ID NO: 1209428 - DNA, 25 bp, Homo sapien
cattggctggctccacgttgttgga

SEQ ID NO: 1209429 - DNA, 25 bp, Homo sapien
tgcagctcctttacatgccgaagac

SEQ ID NO: 1209430 - DNA, 25 bp, Homo sapien
tggttctaagtctgaagccacaagg

SEQ ID NO: 1209431 - DNA, 25 bp, Homo sapien
tgctaactgtgttgggaaggctcgt

SEQ ID NO: 1209432 - DNA, 25 bp, Homo sapien
caagactagtgggtgctgactgcct

SEQ ID NO: 1209433 - DNA, 25 bp, Homo sapien
tcccggttgtgtgcctcttttactc

SEQ ID NO: 1209434 - DNA, 25 bp, Homo sapien
gaacctagatcttcccggttgtgtg

SEQ ID NO: 1209435 - DNA, 25 bp, Homo sapien
aagatggctgggaacctagatcttc

SEQ ID NO: 1209436 - DNA, 25 bp, Homo sapien
tggctgggaacctagatcttcccgg

SEQ ID NO: 1209437 - DNA, 25 bp, Homo sapien
atgatagagttgttccacaggtcaa

SEQ ID NO: 1209438 - DNA, 25 bp, Homo sapien
ccaatgggacacgacagaaagaagc

SEQ ID NO: 1209439 - DNA, 25 bp, Homo sapien
tccggaagtcctcaatgccaatggg

SEQ ID NO: 1209440 - DNA, 25 bp, Homo sapien
tccacaggtcaatgaaccaggtccg

SEQ ID NO: 1209441 - DNA, 25 bp, Homo sapien
aggcctaggactggagagatggccc

SEQ ID NO: 1209442 - DNA, 25 bp, Homo sapien
gtggtttaaattgggcttagagcca

SEQ ID NO: 1209443 - DNA, 25 bp, Homo sapien
ttgtaccatttgctgaatggcagct

SEQ ID NO: 1209444 - DNA, 25 bp, Homo sapien
ttttacttacttcttagctcaatta

SEQ ID NO: 1209445 - DNA, 25 bp, Homo sapien
cgagagctaccaggcccagccttat

SEQ ID NO: 1209446 - DNA, 25 bp, Homo sapien
ctaccaggcccagccttattttaag

SEQ ID NO: 1209447 - DNA, 25 bp, Homo sapien
ggcgagagctaccaggcccagcctt

SEQ ID NO: 1209448 - DNA, 25 bp, Homo sapien
agctaccaggcccagccttatttta

SEQ ID NO: 1209449 - DNA, 25 bp, Homo sapien
tccactgggtcctcccaagcagctt

SEQ ID NO: 1209450 - DNA, 25 bp, Homo sapien
tgggtcctcccaagcagctttctgt

SEQ ID NO: 1209451 - DNA, 25 bp, Homo sapien
gtgtgtcccggacccattccactgg

SEQ ID NO: 1209452 - DNA, 25 bp, Homo sapien
ctgatggccagggaagtgtgtcccg

SEQ ID NO: 1209453 - DNA, 25 bp, Homo sapien
gtctttgactgtcctatcctcggga

SEQ ID NO: 1209454 - DNA, 25 bp, Homo sapien
aggcaatgctgtgagggcccacggt

SEQ ID NO: 1209455 - DNA, 25 bp, Homo sapien
ggaggtgaggcaatgctgtgagggc

SEQ ID NO: 1209456 - DNA, 25 bp, Homo sapien
actgtcctatcctcgggaggtgagg

SEQ ID NO: 1209457 - DNA, 25 bp, Homo sapien
gatctgagtccagagaacttggggt

SEQ ID NO: 1209458 - DNA, 25 bp, Homo sapien
ggatggtttctcgatctggagactc

SEQ ID NO: 1209459 - DNA, 25 bp, Homo sapien
gatctggagactcaatgtagttggc

SEQ ID NO: 1209460 - DNA, 25 bp, Homo sapien
tggggtccaggatggtttctcgatc

SEQ ID NO: 1209461 - DNA, 25 bp, Homo sapien
caatgtagttggcagcttcttgaag

SEQ ID NO: 1209462 - DNA, 25 bp, Homo sapien
tgacttctcaggttggcagccgtct

SEQ ID NO: 1209463 - DNA, 25 bp, Homo sapien
agcgggcagctctctaccttggcaa

SEQ ID NO: 1209464 - DNA, 25 bp, Homo sapien
gacagagctggtagtctttccctga

SEQ ID NO: 1209465 - DNA, 25 bp, Homo sapien
gatagctgatgccagcgttctgctg

SEQ ID NO: 1209466 - DNA, 25 bp, Homo sapien
gatatttggattcagtcaggcacca

SEQ ID NO: 1209467 - DNA, 25 bp, Homo sapien
tcctctggtccatgataaagctcgg

SEQ ID NO: 1209468 - DNA, 25 bp, Homo sapien
gcaattgagctacccagcagaacgt

SEQ ID NO: 1209469 - DNA, 25 bp, Homo sapien
taagccccatggatgccaaagatag

SEQ ID NO: 1209470 - DNA, 25 bp, Homo sapien
gacgggaacacactttctggaggaa

SEQ ID NO: 1209471 - DNA, 25 bp, Homo sapien
tatagcaccatgaggaggctcagcc

SEQ ID NO: 1209472 - DNA, 25 bp, Homo sapien
tagaagaggcctagatcccaagcag

SEQ ID NO: 1209473 - DNA, 25 bp, Homo sapien
tctcaaccaagaagcaggacgtagg

SEQ ID NO: 1209474 - DNA, 25 bp, Homo sapien
ccttgatttggaggactgagtcccc

SEQ ID NO: 1209475 - DNA, 25 bp, Homo sapien
ggtggccccatatatccgtagtcag

SEQ ID NO: 1209476 - DNA, 25 bp, Homo sapien
tgttgaagcccctttgtgtgccagg

SEQ ID NO: 1209477 - DNA, 25 bp, Homo sapien
gagataagcaccgtagagctgccac

SEQ ID NO: 1209478 - DNA, 25 bp, Homo sapien
gactctgtcacataaacggtgctgc

SEQ ID NO: 1209479 - DNA, 25 bp, Homo sapien
aacacttagttccagggcgcaggag

SEQ ID NO: 1209480 - DNA, 25 bp, Homo sapien
catttgagaaacacggactctgtca

SEQ ID NO: 1209481 - DNA, 25 bp, Homo sapien
gatactggagccctacactgttagc

SEQ ID NO: 1209482 - DNA, 25 bp, Homo sapien
cctatttactttcttgaagtggcca

SEQ ID NO: 1209483 - DNA, 25 bp, Homo sapien
gtcacctcccatgttaagagggcag

SEQ ID NO: 1209484 - DNA, 25 bp, Homo sapien
tagggaaaagattgcttcttggacc

SEQ ID NO: 1209485 - DNA, 25 bp, Homo sapien
aaatttagcaaagtcaagagggtgg

SEQ ID NO: 1209486 - DNA, 25 bp, Homo sapien
cgcgcgcggccaatccgcgaagccg

SEQ ID NO: 1209487 - DNA, 25 bp, Homo sapien
gccaccgaatgacggcccccgcgcg

SEQ ID NO: 1209488 - DNA, 25 bp, Homo sapien
gcggccgggacccgccaccgaatga

SEQ ID NO: 1209489 - DNA, 25 bp, Homo sapien
cccgcgcgcggccaatccgcgaagc

SEQ ID NO: 1209490 - DNA, 25 bp, Homo sapien
taggatcccggtgagcgtatccact

SEQ ID NO: 1209491 - DNA, 25 bp, Homo sapien
gcgtatccactaacgcttcctttaa

SEQ ID NO: 1209492 - DNA, 25 bp, Homo sapien
gcttcctttaatccttgtgccactg

SEQ ID NO: 1209493 - DNA, 25 bp, Homo sapien
cacctcctgtactggggataggatc

SEQ ID NO: 1209494 - DNA, 25 bp, Homo sapien
gtctggatccttgaggggcgccctt

SEQ ID NO: 1209495 - DNA, 25 bp, Homo sapien
cgcaggtggacagtgcttacgctat

SEQ ID NO: 1209496 - DNA, 25 bp, Homo sapien
ttttccgagcgtggccgccttccgc

SEQ ID NO: 1209497 - DNA, 25 bp, Homo sapien
cacatgcccaggagtgcgtctggat

SEQ ID NO: 1209498 - DNA, 25 bp, Homo sapien
tatagctgtagggtaatactgaggc

SEQ ID NO: 1209499 - DNA, 25 bp, Homo sapien
tgaacaactgtccttccaatgaaag

SEQ ID NO: 1209500 - DNA, 25 bp, Homo sapien
ggcaaactttacacataggtcctat

SEQ ID NO: 1209501 - DNA, 25 bp, Homo sapien
taggtcctatcacagcttaagggtc

SEQ ID NO: 1209502 - DNA, 25 bp, Homo sapien
tcttgtctcaaaaagtttcctctag

SEQ ID NO: 1209503 - DNA, 25 bp, Homo sapien
gtctcaaaaagtttcctctaggctg

SEQ ID NO: 1209504 - DNA, 25 bp, Homo sapien
caaaaagtttcctctaggctgggcg

SEQ ID NO: 1209505 - DNA, 25 bp, Homo sapien
aaagtttcctctaggctgggcgcag

SEQ ID NO: 1209506 - DNA, 25 bp, Homo sapien
ttcctgaagtagctcctgaaggata

SEQ ID NO: 1209507 - DNA, 25 bp, Homo sapien
ccttggttcctgaagtagctcctga

SEQ ID NO: 1209508 - DNA, 25 bp, Homo sapien
tccttggttcctgaagtagctcctg

SEQ ID NO: 1209509 - DNA, 25 bp, Homo sapien
aagtagctcctgaaggataaaggtg

SEQ ID NO: 1209510 - DNA, 25 bp, Homo sapien
agttctgccaagtgaacaccaaatt

SEQ ID NO: 1209511 - DNA, 25 bp, Homo sapien
gggatctacagtcagttctgccaag

SEQ ID NO: 1209512 - DNA, 25 bp, Homo sapien
ctgacggattgccagtgccccctgg

SEQ ID NO: 1209513 - DNA, 25 bp, Homo sapien
tgacggattgccagtgccccctggg

SEQ ID NO: 1209514 - DNA, 25 bp, Homo sapien
tattgtttcaagatgactgatgcca

SEQ ID NO: 1209515 - DNA, 25 bp, Homo sapien
cagtgagtctccacatattgtttca

SEQ ID NO: 1209516 - DNA, 25 bp, Homo sapien
tctctgattgggcacaccagtgagt

SEQ ID NO: 1209517 - DNA, 25 bp, Homo sapien
tgtagtttcaggaggcctaaatttc

SEQ ID NO: 1209518 - DNA, 25 bp, Homo sapien
tatcgattctctcaacccattaggc

SEQ ID NO: 1209519 - DNA, 25 bp, Homo sapien
catggacggcatttaagtctccgct

SEQ ID NO: 1209520 - DNA, 25 bp, Homo sapien
cccattaggcaatagctcccggata

SEQ ID NO: 1209521 - DNA, 25 bp, Homo sapien
cactggagcgcactttgcttatcga

SEQ ID NO: 1209522 - DNA, 25 bp, Homo sapien
atactcctgtcgcttgagatccaag

SEQ ID NO: 1209523 - DNA, 25 bp, Homo sapien
gagatccaagtaccaataccaggga

SEQ ID NO: 1209524 - DNA, 25 bp, Homo sapien
acatagcttctggtaatactcctgt

SEQ ID NO: 1209525 - DNA, 25 bp, Homo sapien
tggtccaggccattatatcacatag

SEQ ID NO: 1209526 - DNA, 25 bp, Homo sapien
tgaggtgattcagcaagtcagaaaa

SEQ ID NO: 1209527 - DNA, 25 bp, Homo sapien
caccatgagccttagttggttctca

SEQ ID NO: 1209528 - DNA, 25 bp, Homo sapien
tttactctcctatactcatccctgg

SEQ ID NO: 1209529 - DNA, 25 bp, Homo sapien
gtatctggtggatcaaatcttctaa

SEQ ID NO: 1209530 - DNA, 25 bp, Homo sapien
caagtggcatctgtgtgtctgttac

SEQ ID NO: 1209531 - DNA, 25 bp, Homo sapien
gacaggagcaacaagtggcatctgt

SEQ ID NO: 1209532 - DNA, 25 bp, Homo sapien
gcaacaagtggcatctgtgtgtctg

SEQ ID NO: 1209533 - DNA, 25 bp, Homo sapien
ggagcaacaagtggcatctgtgtgt

SEQ ID NO: 1209534 - DNA, 25 bp, Homo sapien
gccatggtgaagatcttatacatct

SEQ ID NO: 1209535 - DNA, 25 bp, Homo sapien
tgggcacaagtggtaaaaatctcca

SEQ ID NO: 1209536 - DNA, 25 bp, Homo sapien
catgttacagatcatatgggcacaa

SEQ ID NO: 1209537 - DNA, 25 bp, Homo sapien
ctccatgttacagatcatatgggca

SEQ ID NO: 1209538 - DNA, 25 bp, Homo sapien
tcatatgggcacaagtggtaaaaat

SEQ ID NO: 1209539 - DNA, 25 bp, Homo sapien
tctacaaatataaattcattaggct

SEQ ID NO: 1209540 - DNA, 25 bp, Homo sapien
aatataaattcattaggctgggcat

SEQ ID NO: 1209541 - DNA, 25 bp, Homo sapien
tctctacaaatataaattcattagg

SEQ ID NO: 1209542 - DNA, 25 bp, Homo sapien
acaaatataaattcattaggctggg

SEQ ID NO: 1209543 - DNA, 25 bp, Homo sapien
gacaaacccctaatccatggcttca

SEQ ID NO: 1209544 - DNA, 25 bp, Homo sapien
ttgaaaggcacctaaagctctcttc

SEQ ID NO: 1209545 - DNA, 25 bp, Homo sapien
cagaaaccaaagtcaatactggaca

SEQ ID NO: 1209546 - DNA, 25 bp, Homo sapien
tatttgaaaggcacctaaagctctc

SEQ ID NO: 1209547 - DNA, 25 bp, Homo sapien
taccacgggaaagatcaggactttg

SEQ ID NO: 1209548 - DNA, 25 bp, Homo sapien
aggcctctgtgaactgctgtaccac

SEQ ID NO: 1209549 - DNA, 25 bp, Homo sapien
tatctggagggcctgaacaaaggcc

SEQ ID NO: 1209550 - DNA, 25 bp, Homo sapien
catcttaaacccactgtcagatgtg

SEQ ID NO: 1209551 - DNA, 25 bp, Homo sapien
tgggaagtttttcactagggctgtc

SEQ ID NO: 1209552 - DNA, 25 bp, Homo sapien
caaacaataggcagaatctgctgca

SEQ ID NO: 1209553 - DNA, 25 bp, Homo sapien
gaggacaccatgtgctttgggaagt

SEQ ID NO: 1209554 - DNA, 25 bp, Homo sapien
agtttttcactagggctgtcactgc

SEQ ID NO: 1209555 - DNA, 25 bp, Homo sapien
agagtaaagaaatagaatttggagt

SEQ ID NO: 1209556 - DNA, 25 bp, Homo sapien
gtatgatgaagagtaaagaaataga

SEQ ID NO: 1209557 - DNA, 25 bp, Homo sapien
tgatgaagagtaaagaaatagaatt

SEQ ID NO: 1209558 - DNA, 25 bp, Homo sapien
gaagagtaaagaaatagaatttgga

SEQ ID NO: 1209559 - DNA, 25 bp, Homo sapien
cagaatccacaggatcttctacttc

SEQ ID NO: 1209560 - DNA, 25 bp, Homo sapien
acaggatcttctacttcttctgtgt

SEQ ID NO: 1209561 - DNA, 25 bp, Homo sapien
gatcttctacttcttctgtgtaatt

SEQ ID NO: 1209562 - DNA, 25 bp, Homo sapien
aggatcttctacttcttctgtgtaa

SEQ ID NO: 1209563 - DNA, 25 bp, Homo sapien
tgctaaagacgagattttcaaagcc

SEQ ID NO: 1209564 - DNA, 25 bp, Homo sapien
gctcctcagtgatttgcatgtacag

SEQ ID NO: 1209565 - DNA, 25 bp, Homo sapien
cttaacagtgcttttgaatttgcta

SEQ ID NO: 1209566 - DNA, 25 bp, Homo sapien
tttctagtagagcatggacaaattc

SEQ ID NO: 1209567 - DNA, 25 bp, Homo sapien
atcttctacaaattgttgggggttg

SEQ ID NO: 1209568 - DNA, 25 bp, Homo sapien
tcatcttctacaaattgttgggggt

SEQ ID NO: 1209569 - DNA, 25 bp, Homo sapien
cagtataggagaatgtatcatcatc

SEQ ID NO: 1209570 - DNA, 25 bp, Homo sapien
ctgctattctaacagtataggagaa

SEQ ID NO: 1209571 - DNA, 25 bp, Homo sapien
cttcttgtaaatgtcgagtggctgc

SEQ ID NO: 1209572 - DNA, 25 bp, Homo sapien
attggtcaggaacccatgcatgtca

SEQ ID NO: 1209573 - DNA, 25 bp, Homo sapien
ttcactgagcctagggcaagcatgc

SEQ ID NO: 1209574 - DNA, 25 bp, Homo sapien
aacccatgcatgtcaaaatgaatcc

SEQ ID NO: 1209575 - DNA, 25 bp, Homo sapien
tagggcaagcatgcatgcctcatgg

SEQ ID NO: 1209576 - DNA, 25 bp, Homo sapien
acttaacaatgggagcagtactcga

SEQ ID NO: 1209577 - DNA, 25 bp, Homo sapien
gcctgagggcattctggacttaaca

SEQ ID NO: 1209578 - DNA, 25 bp, Homo sapien
catgaatgggaacgccaatttggga

SEQ ID NO: 1209579 - DNA, 25 bp, Homo sapien
cgataattctcaaggtacagcaacc

SEQ ID NO: 1209580 - DNA, 25 bp, Homo sapien
tagcgtaaagttgggcaaactcacg

SEQ ID NO: 1209581 - DNA, 25 bp, Homo sapien
cataagtccaaccactgtaagtgag

SEQ ID NO: 1209582 - DNA, 25 bp, Homo sapien
tcaaattacgcaatacagatgctcc

SEQ ID NO: 1209583 - DNA, 25 bp, Homo sapien
gcagttcccaaaggatggtccagaa

SEQ ID NO: 1209584 - DNA, 25 bp, Homo sapien
tgagccatggtacccgcccacttaa

SEQ ID NO: 1209585 - DNA, 25 bp, Homo sapien
tgccatctccattgctagtttattc

SEQ ID NO: 1209586 - DNA, 25 bp, Homo sapien
tggtacccgcccacttaatcttcta

SEQ ID NO: 1209587 - DNA, 25 bp, Homo sapien
taatcttctaagttgccatctccat

SEQ ID NO: 1209588 - DNA, 25 bp, Homo sapien
gatggctctcactgcagaaattcga

SEQ ID NO: 1209589 - DNA, 25 bp, Homo sapien
agtgaaccgactggcagcccaaagt

SEQ ID NO: 1209590 - DNA, 25 bp, Homo sapien
taactgttgcctgtaggaactgctg

SEQ ID NO: 1209591 - DNA, 25 bp, Homo sapien
ggctgtgtctcgtgaagaccactaa

SEQ ID NO: 1209592 - DNA, 25 bp, Homo sapien
gggtctactgtacaaacgatgcaca

SEQ ID NO: 1209593 - DNA, 25 bp, Homo sapien
gctggagcacgtgggtactctctga

SEQ ID NO: 1209594 - DNA, 25 bp, Homo sapien
aactgggctgctaggtgaattaagc

SEQ ID NO: 1209595 - DNA, 25 bp, Homo sapien
gaattaagccatcaaggatgctggg

SEQ ID NO: 1209596 - DNA, 25 bp, Homo sapien
tagggactagtcattaacagctact

SEQ ID NO: 1209597 - DNA, 25 bp, Homo sapien
gcttcattaaagtagggactagtca

SEQ ID NO: 1209598 - DNA, 25 bp, Homo sapien
agtggggccacatgaataacctgaa

SEQ ID NO: 1209599 - DNA, 25 bp, Homo sapien
ctttgtatggcttcattaaagtagg

SEQ ID NO: 1209600 - DNA, 25 bp, Homo sapien
cctgacaggcttcaatctgggacag

SEQ ID NO: 1209601 - DNA, 25 bp, Homo sapien
ctgagccagtgaggcgacgacggga

SEQ ID NO: 1209602 - DNA, 25 bp, Homo sapien
cagagtgggaatcagcctcatttgc

SEQ ID NO: 1209603 - DNA, 25 bp, Homo sapien
aagccctgcaggaatcttgtctgct

SEQ ID NO: 1209604 - DNA, 25 bp, Homo sapien
tgtcatctgtgtgaagggtacactg

SEQ ID NO: 1209605 - DNA, 25 bp, Homo sapien
tactgttgtcaggatatcaatggct

SEQ ID NO: 1209606 - DNA, 25 bp, Homo sapien
ggaggctttgtatttcgtactactg

SEQ ID NO: 1209607 - DNA, 25 bp, Homo sapien
gtgaagggtacactgtgccacagca

SEQ ID NO: 1209608 - DNA, 25 bp, Homo sapien
tctggtctagattctccccgagttc

SEQ ID NO: 1209609 - DNA, 25 bp, Homo sapien
ttgcatcacataccacagtccattg

SEQ ID NO: 1209610 - DNA, 25 bp, Homo sapien
atgccactgggctacttgttccagg

SEQ ID NO: 1209611 - DNA, 25 bp, Homo sapien
tactgaggatggcacgaagaatctg

SEQ ID NO: 1209612 - DNA, 25 bp, Homo sapien
ttctatcagccagggagtaggaagc

SEQ ID NO: 1209613 - DNA, 25 bp, Homo sapien
ttcatttctatcagccagggagtag

SEQ ID NO: 1209614 - DNA, 25 bp, Homo sapien
tttcatttctatcagccagggagta

SEQ ID NO: 1209615 - DNA, 25 bp, Homo sapien
catttctatcagccagggagtagga

SEQ ID NO: 1209616 - DNA, 25 bp, Homo sapien
gaacaggtgctgtcggcttgtccac

SEQ ID NO: 1209617 - DNA, 25 bp, Homo sapien
tgcaccagatgagcgaacaccatga

SEQ ID NO: 1209618 - DNA, 25 bp, Homo sapien
cagccatcacaaactctagagcagg

SEQ ID NO: 1209619 - DNA, 25 bp, Homo sapien
ggttctagctgagtgtgcaccagat

SEQ ID NO: 1209620 - DNA, 25 bp, Homo sapien
tctcccttcacacggatatcctgta

SEQ ID NO: 1209621 - DNA, 25 bp, Homo sapien
tgatgccatgctggagcagcttaca

SEQ ID NO: 1209622 - DNA, 25 bp, Homo sapien
acttagagcgggtgcggatgccctc

SEQ ID NO: 1209623 - DNA, 25 bp, Homo sapien
tatcctgtagccgtttgtcatctgc

SEQ ID NO: 1209624 - DNA, 25 bp, Homo sapien
ccatgacgttggagagctcgttgat

SEQ ID NO: 1209625 - DNA, 25 bp, Homo sapien
ctttaggatcttgaccagcaaagga

SEQ ID NO: 1209626 - DNA, 25 bp, Homo sapien
tggcgagcggcattagcctccatga

SEQ ID NO: 1209627 - DNA, 25 bp, Homo sapien
gagctcgttgatgatcagctttagg

SEQ ID NO: 1209628 - DNA, 25 bp, Homo sapien
caaagaagggctatgttagcttgcc

SEQ ID NO: 1209629 - DNA, 25 bp, Homo sapien
caatttgtaacttgatctgccaggc

SEQ ID NO: 1209630 - DNA, 25 bp, Homo sapien
ccctcctggttagtctcaatgaaag

SEQ ID NO: 1209631 - DNA, 25 bp, Homo sapien
tctgcaatgtggcttgtagtcccca

SEQ ID NO: 1209632 - DNA, 25 bp, Homo sapien
gtcctcccacatatcattggagtca

SEQ ID NO: 1209633 - DNA, 25 bp, Homo sapien
tcctcccacatatcattggagtcat

SEQ ID NO: 1209634 - DNA, 25 bp, Homo sapien
tacttgtagcaagaatgtcagataa

SEQ ID NO: 1209635 - DNA, 25 bp, Homo sapien
agaatgtcagataaaagttggccag

SEQ ID NO: 1209636 - DNA, 25 bp, Homo sapien
catatttacttgtagcaagaatgtc

SEQ ID NO: 1209637 - DNA, 25 bp, Homo sapien
gtagcaagaatgtcagataaaagtt

SEQ ID NO: 1209638 - DNA, 25 bp, Homo sapien
tcatcatcctcgtagtaatcctcct

SEQ ID NO: 1209639 - DNA, 25 bp, Homo sapien
atagagaggatccttcagggcatca

SEQ ID NO: 1209640 - DNA, 25 bp, Homo sapien
ctcatcatcctcgtagtaatcctcc

SEQ ID NO: 1209641 - DNA, 25 bp, Homo sapien
cctcatcatcctcgtagtaatcctc

SEQ ID NO: 1209642 - DNA, 25 bp, Homo sapien
ttgagcccatattcctgtttccatg

SEQ ID NO: 1209643 - DNA, 25 bp, Homo sapien
tgggacattgtcatttgcaagatat

SEQ ID NO: 1209644 - DNA, 25 bp, Homo sapien
gacattgtcatttgcaagatatctc

SEQ ID NO: 1209645 - DNA, 25 bp, Homo sapien
tgcaagatatctctggacaccctca

SEQ ID NO: 1209646 - DNA, 25 bp, Homo sapien
ccctgagggatggtctttcatgttc

SEQ ID NO: 1209647 - DNA, 25 bp, Homo sapien
gcattagtgagacattgcaagtcac

SEQ ID NO: 1209648 - DNA, 25 bp, Homo sapien
ggtttttagacaaatgccagctccc

SEQ ID NO: 1209649 - DNA, 25 bp, Homo sapien
ggaccttcacaacatagcctctaga

SEQ ID NO: 1209650 - DNA, 25 bp, Homo sapien
acattatgtagcagggctgctgagc

SEQ ID NO: 1209651 - DNA, 25 bp, Homo sapien
actggcagaggaaatctgtgagata

SEQ ID NO: 1209652 - DNA, 25 bp, Homo sapien
ctgaaaacattatgtagcagggctg

SEQ ID NO: 1209653 - DNA, 25 bp, Homo sapien
ggcagaggaaatctgtgagatatgc

SEQ ID NO: 1209654 - DNA, 25 bp, Homo sapien
atggtctgtagaactcgcctctcat

SEQ ID NO: 1209655 - DNA, 25 bp, Homo sapien
cgcctctcattgtcattaaggtggc

SEQ ID NO: 1209656 - DNA, 25 bp, Homo sapien
gcaaaatggtttgcggctggcccag

SEQ ID NO: 1209657 - DNA, 25 bp, Homo sapien
gcaataatgtttctggactcgccag

SEQ ID NO: 1209658 - DNA, 25 bp, Homo sapien
tggtccagggcacaaagcataatga

SEQ ID NO: 1209659 - DNA, 25 bp, Homo sapien
cattcctaagtgacggcaccggtga

SEQ ID NO: 1209660 - DNA, 25 bp, Homo sapien
caagcagttagcctcagaacctggc

SEQ ID NO: 1209661 - DNA, 25 bp, Homo sapien
aaactatggagtctgcaaggccgag

SEQ ID NO: 1209662 - DNA, 25 bp, Homo sapien
tgcctttagcaccaaatccgactgg

SEQ ID NO: 1209663 - DNA, 25 bp, Homo sapien
ggcaccagatgtgggcactaccaaa

SEQ ID NO: 1209664 - DNA, 25 bp, Homo sapien
taaaagctcgacaaactcctgggag

SEQ ID NO: 1209665 - DNA, 25 bp, Homo sapien
ctaattagcagacgcagagggaccc

SEQ ID NO: 1209666 - DNA, 25 bp, Homo sapien
ttaccaggtcaacccacaatgggtg

SEQ ID NO: 1209667 - DNA, 25 bp, Homo sapien
caattaagtacctgcacatcgaggg

SEQ ID NO: 1209668 - DNA, 25 bp, Homo sapien
gcaatgaggatcactgataggcaca

SEQ ID NO: 1209669 - DNA, 25 bp, Homo sapien
tcatcctagaaccacactggagttt

SEQ ID NO: 1209670 - DNA, 25 bp, Homo sapien
actcatctgtcagggagcctccggt

SEQ ID NO: 1209671 - DNA, 25 bp, Homo sapien
caccggccttgcatatctaatagag

SEQ ID NO: 1209672 - DNA, 25 bp, Homo sapien
catttattatactacagatgctttt

SEQ ID NO: 1209673 - DNA, 25 bp, Homo sapien
tatttctggccaggactcccgtgaa

SEQ ID NO: 1209674 - DNA, 25 bp, Homo sapien
gaaggaaacgtcacttgccgcagct

SEQ ID NO: 1209675 - DNA, 25 bp, Homo sapien
cagtgcaaaacattgaggtgagccc

SEQ ID NO: 1209676 - DNA, 25 bp, Homo sapien
taaaggtctagcctctgatcgagca

SEQ ID NO: 1209677 - DNA, 25 bp, Homo sapien
taactagatatgagtcctgctctgc

SEQ ID NO: 1209678 - DNA, 25 bp, Homo sapien
tgctcttgctgtgaacctccctgtg

SEQ ID NO: 1209679 - DNA, 25 bp, Homo sapien
tcagcggagctgacgagggatatta

SEQ ID NO: 1209680 - DNA, 25 bp, Homo sapien
ctagaatccccaagttagaactggc

SEQ ID NO: 1209681 - DNA, 25 bp, Homo sapien
tctggagctgggtgcccctcaccca

SEQ ID NO: 1209682 - DNA, 25 bp, Homo sapien
ccggctccgcggtggttcctcccat

SEQ ID NO: 1209683 - DNA, 25 bp, Homo sapien
tcacccagcagagcactgccctgct

SEQ ID NO: 1209684 - DNA, 25 bp, Homo sapien
cggctccgcggtggttcctcccatc

SEQ ID NO: 1209685 - DNA, 25 bp, Homo sapien
gagaagggaccgcaggaccaagccg

SEQ ID NO: 1209686 - DNA, 25 bp, Homo sapien
ggagtccacccaccagcgacgccca

SEQ ID NO: 1209687 - DNA, 25 bp, Homo sapien
ccgcgctaacccagccggcgcggct

SEQ ID NO: 1209688 - DNA, 25 bp, Homo sapien
ccaggctcgggctcctcttccgcct

SEQ ID NO: 1209689 - DNA, 25 bp, Homo sapien
cgattgcggtgagcggcgcggcccg

SEQ ID NO: 1209690 - DNA, 25 bp, Homo sapien
agcaccaacagagcgattgcggtga

SEQ ID NO: 1209691 - DNA, 25 bp, Homo sapien
accaacagagcgattgcggtgagcg

SEQ ID NO: 1209692 - DNA, 25 bp, Homo sapien
cccagcaccaacagagcgattgcgg

SEQ ID NO: 1209693 - DNA, 25 bp, Homo sapien
acactgagggttgccccttgtctcc

SEQ ID NO: 1209694 - DNA, 25 bp, Homo sapien
gacggctcccgaacactgagggttg

SEQ ID NO: 1209695 - DNA, 25 bp, Homo sapien
cctcttcccgcttcttgaggaccca

SEQ ID NO: 1209696 - DNA, 25 bp, Homo sapien
agcctgacggctcccgaacactgag

SEQ ID NO: 1209697 - DNA, 25 bp, Homo sapien
cagcagtaccgatggtagcaggtcc

SEQ ID NO: 1209698 - DNA, 25 bp, Homo sapien
tgataagcaaggtcaggtccctgca

SEQ ID NO: 1209699 - DNA, 25 bp, Homo sapien
atgccaggagccattccggtccagg

SEQ ID NO: 1209700 - DNA, 25 bp, Homo sapien
agaactcgcagttaaaccccggatg

SEQ ID NO: 1209701 - DNA, 25 bp, Homo sapien
tggcaagcaatgacccatagaaggc

SEQ ID NO: 1209702 - DNA, 25 bp, Homo sapien
cctggctggctagtgtgaagcatac

SEQ ID NO: 1209703 - DNA, 25 bp, Homo sapien
tccaacactcataggacggagtcct

SEQ ID NO: 1209704 - DNA, 25 bp, Homo sapien
cacaaagctacactgtcgtccgggt

SEQ ID NO: 1209705 - DNA, 25 bp, Homo sapien
aaccacagcaacaaagaggatcaca

SEQ ID NO: 1209706 - DNA, 25 bp, Homo sapien
aagaggatcacagctgaggcgatgc

SEQ ID NO: 1209707 - DNA, 25 bp, Homo sapien
accacagcaacaaagaggatcacag

SEQ ID NO: 1209708 - DNA, 25 bp, Homo sapien
gctgcccattattggacttagccca

SEQ ID NO: 1209709 - DNA, 25 bp, Homo sapien
attattggacttagcccagcccatc

SEQ ID NO: 1209710 - DNA, 25 bp, Homo sapien
tctctgctgcccattattggactta

SEQ ID NO: 1209711 - DNA, 25 bp, Homo sapien
tgcccattattggacttagcccagc

SEQ ID NO: 1209712 - DNA, 25 bp, Homo sapien
ggcccagctgggtagagtggatatt

SEQ ID NO: 1209713 - DNA, 25 bp, Homo sapien
tatgggtatactggctgcactggga

SEQ ID NO: 1209714 - DNA, 25 bp, Homo sapien
ctaggtgggtatatgaagccaggct

SEQ ID NO: 1209715 - DNA, 25 bp, Homo sapien
cactgggatgcctgtcattggaatc

SEQ ID NO: 1209716 - DNA, 25 bp, Homo sapien
gcataggtggacgaaaagtaacacc

SEQ ID NO: 1209717 - DNA, 25 bp, Homo sapien
cagacaggacccatagggaagagtg

SEQ ID NO: 1209718 - DNA, 25 bp, Homo sapien
gcagacaggacccatagggaagagt

SEQ ID NO: 1209719 - DNA, 25 bp, Homo sapien
tgagtggtggcataggtggacgaaa

SEQ ID NO: 1209720 - DNA, 25 bp, Homo sapien
tcaggctcccgggtaagagggctgt

SEQ ID NO: 1209721 - DNA, 25 bp, Homo sapien
gggctgtggtggcatatagggagga

SEQ ID NO: 1209722 - DNA, 25 bp, Homo sapien
ctgtggtggcatatagggaggagga

SEQ ID NO: 1209723 - DNA, 25 bp, Homo sapien
gagggctgtggtggcatatagggag

SEQ ID NO: 1209724 - DNA, 25 bp, Homo sapien
tgaaggggcagcagagacatggctg

SEQ ID NO: 1209725 - DNA, 25 bp, Homo sapien
ctgaaggggcagcagagacatggct

SEQ ID NO: 1209726 - DNA, 25 bp, Homo sapien
aaggggcagcagagacatggctggt

SEQ ID NO: 1209727 - DNA, 25 bp, Homo sapien
gggcagcagagacatggctggttcc

SEQ ID NO: 1209728 - DNA, 25 bp, Homo sapien
agggcatctcccaaggttggcatca

SEQ ID NO: 1209729 - DNA, 25 bp, Homo sapien
ggtacaggatgagggcatctcccaa

SEQ ID NO: 1209730 - DNA, 25 bp, Homo sapien
caggtacaggatgagggcatctccc

SEQ ID NO: 1209731 - DNA, 25 bp, Homo sapien
gatgagggcatctcccaaggttggc

SEQ ID NO: 1209732 - DNA, 25 bp, Homo sapien
ggctactgccagctgctgacggaac

SEQ ID NO: 1209733 - DNA, 25 bp, Homo sapien
agctgctgacggaacctcctccctc

SEQ ID NO: 1209734 - DNA, 25 bp, Homo sapien
agcccagaggggacaaacagtaggg

SEQ ID NO: 1209735 - DNA, 25 bp, Homo sapien
aaaatagcccataattccaagccct

SEQ ID NO: 1209736 - DNA, 25 bp, Homo sapien
tgggaacctttggagacatggccaa

SEQ ID NO: 1209737 - DNA, 25 bp, Homo sapien
ggaatatctgtagtgcaaacgagca

SEQ ID NO: 1209738 - DNA, 25 bp, Homo sapien
tagcagtgcctcagctgttgtagag

SEQ ID NO: 1209739 - DNA, 25 bp, Homo sapien
tctaagggtacctgaatgggaactg

SEQ ID NO: 1209740 - DNA, 25 bp, Homo sapien
tcagctctgtctctaccagcatcag

SEQ ID NO: 1209741 - DNA, 25 bp, Homo sapien
gctctgtctctaccagcatcagcag

SEQ ID NO: 1209742 - DNA, 25 bp, Homo sapien
agctctgtctctaccagcatcagca

SEQ ID NO: 1209743 - DNA, 25 bp, Homo sapien
ctgtctctaccagcatcagcagccc

SEQ ID NO: 1209744 - DNA, 25 bp, Homo sapien
cctattctgccatgggagagtccag

SEQ ID NO: 1209745 - DNA, 25 bp, Homo sapien
atggagctcaggtttctggacaaga

SEQ ID NO: 1209746 - DNA, 25 bp, Homo sapien
tgtccagggcccatgtagctggcaa

SEQ ID NO: 1209747 - DNA, 25 bp, Homo sapien
gtccttttagcacatcactgagaag

SEQ ID NO: 1209748 - DNA, 25 bp, Homo sapien
gatgggagacaaagtcctccctgcc

SEQ ID NO: 1209749 - DNA, 25 bp, Homo sapien
agaactcccgtgaccagctattggc

SEQ ID NO: 1209750 - DNA, 25 bp, Homo sapien
caacctcaagcagctcaagaagtta

SEQ ID NO: 1209751 - DNA, 25 bp, Homo sapien
agttaagtagttgtgggcatgagcc

SEQ ID NO: 1209752 - DNA, 25 bp, Homo sapien
caacactgtggttaagctgttcgcc

SEQ ID NO: 1209753 - DNA, 25 bp, Homo sapien
catgctcaaggccaacaagaccatc

SEQ ID NO: 1209754 - DNA, 25 bp, Homo sapien
cgatgaccacgtggcctttgccatt

SEQ ID NO: 1209755 - DNA, 25 bp, Homo sapien
ccttggccaacacgcgagccgatga

SEQ ID NO: 1209756 - DNA, 25 bp, Homo sapien
ggcattgacaagggccgggtcaggg

SEQ ID NO: 1209757 - DNA, 25 bp, Homo sapien
aagctggtggcaagagtggcgagaa

SEQ ID NO: 1209758 - DNA, 25 bp, Homo sapien
gaagatcatccggggcattgacaag

SEQ ID NO: 1209759 - DNA, 25 bp, Homo sapien
gctgcagtggataagaaggaggcag

SEQ ID NO: 1209760 - DNA, 25 bp, Homo sapien
caagggcagttatgtaagcgctccc

SEQ ID NO: 1209761 - DNA, 25 bp, Homo sapien
caattctgggtctgagaatactcca

SEQ ID NO: 1209762 - DNA, 25 bp, Homo sapien
catgataggaaagggcaattctggg

SEQ ID NO: 1209763 - DNA, 25 bp, Homo sapien
aactgtccttcagaggctcaagggc

SEQ ID NO: 1209764 - DNA, 25 bp, Homo sapien
ccagtctgggactattacaaacaat

SEQ ID NO: 1209765 - DNA, 25 bp, Homo sapien
cggacatttttagtgcacttctgac

SEQ ID NO: 1209766 - DNA, 25 bp, Homo sapien
aggatgataccacctaatttgaagg

SEQ ID NO: 1209767 - DNA, 25 bp, Homo sapien
gaatggaatttctgcgtcgtagaga

SEQ ID NO: 1209768 - DNA, 25 bp, Homo sapien
actggaactgtttgggccatctgga

SEQ ID NO: 1209769 - DNA, 25 bp, Homo sapien
aatacacgtagctcctttagggcaa

SEQ ID NO: 1209770 - DNA, 25 bp, Homo sapien
tgcctgtagccctgactgttcggga

SEQ ID NO: 1209771 - DNA, 25 bp, Homo sapien
tttcagggacattgacaccagagcc

SEQ ID NO: 1209772 - DNA, 25 bp, Homo sapien
aaggctctcgcgcgtactcctccat

SEQ ID NO: 1209773 - DNA, 25 bp, Homo sapien
caaggctctcgcgcgtactcctcca

SEQ ID NO: 1209774 - DNA, 25 bp, Homo sapien
caaggccccacgcaataaagaagct

SEQ ID NO: 1209775 - DNA, 25 bp, Homo sapien
cataaagtcgattacgccctgcgtt

SEQ ID NO: 1209776 - DNA, 25 bp, Homo sapien
ttaccaggcccaagtcgacgaggct

SEQ ID NO: 1209777 - DNA, 25 bp, Homo sapien
gaagcttatccagaccccttggcta

SEQ ID NO: 1209778 - DNA, 25 bp, Homo sapien
ctggagaattgcgaaaacctttgat

SEQ ID NO: 1209779 - DNA, 25 bp, Homo sapien
tgattgcttgaaagataccaccacc

SEQ ID NO: 1209780 - DNA, 25 bp, Homo sapien
ccaccaatggtacccatcgtaaagg

SEQ ID NO: 1209781 - DNA, 25 bp, Homo sapien
tgcgaaaacctttgattgcttgaaa

SEQ ID NO: 1209782 - DNA, 25 bp, Homo sapien
caaactccctcgtagtctgtggttt

SEQ ID NO: 1209783 - DNA, 25 bp, Homo sapien
actccctcgtagtctgtggtttact

SEQ ID NO: 1209784 - DNA, 25 bp, Homo sapien
ctgtcaaactccctcgtagtctgtg

SEQ ID NO: 1209785 - DNA, 25 bp, Homo sapien
tccctcgtagtctgtggtttactcc

SEQ ID NO: 1209786 - DNA, 25 bp, Homo sapien
aaatcaccgagtgtctgaaggacag

SEQ ID NO: 1209787 - DNA, 25 bp, Homo sapien
tgtgacaaaccgttagaccaaacta

SEQ ID NO: 1209788 - DNA, 25 bp, Homo sapien
tgggtatcataattcaggttaattt

SEQ ID NO: 1209789 - DNA, 25 bp, Homo sapien
aatcaagaagaaactatagggatat

SEQ ID NO: 1209790 - DNA, 25 bp, Homo sapien
cctgagctttaaataactgtctttc

SEQ ID NO: 1209791 - DNA, 25 bp, Homo sapien
tcacacctgagctttaaataactgt

SEQ ID NO: 1209792 - DNA, 25 bp, Homo sapien
acacctgagctttaaataactgtct

SEQ ID NO: 1209793 - DNA, 25 bp, Homo sapien
tgagctttaaataactgtctttctt

SEQ ID NO: 1209794 - DNA, 25 bp, Homo sapien
caatgtcccaaaaccaaccttggag

SEQ ID NO: 1209795 - DNA, 25 bp, Homo sapien
caatcggcttgatgggtttctcctg

SEQ ID NO: 1209796 - DNA, 25 bp, Homo sapien
gcccaaccctgactatacctttgta

SEQ ID NO: 1209797 - DNA, 25 bp, Homo sapien
ttcagctttatgttacctcagaagc

SEQ ID NO: 1209798 - DNA, 25 bp, Homo sapien
taataatagtactaacttcttcatt

SEQ ID NO: 1209799 - DNA, 25 bp, Homo sapien
aataatagtactaacttcttcatta

SEQ ID NO: 1209800 - DNA, 25 bp, Homo sapien
ttaactcactgaaaatgcgtaaggt

SEQ ID NO: 1209801 - DNA, 25 bp, Homo sapien
gcaaaaacctatatggcttctgcat

SEQ ID NO: 1209802 - DNA, 25 bp, Homo sapien
caggcttcttttggcagtgacagtt

SEQ ID NO: 1209803 - DNA, 25 bp, Homo sapien
gcttctgcatatactagaggttctg

SEQ ID NO: 1209804 - DNA, 25 bp, Homo sapien
ccattctcaactaaaaggaactggg

SEQ ID NO: 1209805 - DNA, 25 bp, Homo sapien
ctctctaagttgtcaagggtgttga

SEQ ID NO: 1209806 - DNA, 25 bp, Homo sapien
gatgagcctgaaacgtcttcttcca

SEQ ID NO: 1209807 - DNA, 25 bp, Homo sapien
gaaagtggtcaaagagtaacaggga

SEQ ID NO: 1209808 - DNA, 25 bp, Homo sapien
tcagctggaaaattagcaacggccc

SEQ ID NO: 1209809 - DNA, 25 bp, Homo sapien
taccagtggagtatagcataagcat

SEQ ID NO: 1209810 - DNA, 25 bp, Homo sapien
tactctatgaaaatcaccgatggga

SEQ ID NO: 1209811 - DNA, 25 bp, Homo sapien
gctagaactatggaacatcaaaggg

SEQ ID NO: 1209812 - DNA, 25 bp, Homo sapien
aaggcaccacttgtgatggagttcc

SEQ ID NO: 1209813 - DNA, 25 bp, Homo sapien
taaggcaccacttgtgatggagttc

SEQ ID NO: 1209814 - DNA, 25 bp, Homo sapien
cccgttaaggcaccacttgtgatgg

SEQ ID NO: 1209815 - DNA, 25 bp, Homo sapien
gttaaggcaccacttgtgatggagt

SEQ ID NO: 1209816 - DNA, 25 bp, Homo sapien
tgggaaactgtgcagaggcaaatct

SEQ ID NO: 1209817 - DNA, 25 bp, Homo sapien
cagctccttcaattaaagctaggag

SEQ ID NO: 1209818 - DNA, 25 bp, Homo sapien
ttgtcaacaagataccagctccttc

SEQ ID NO: 1209819 - DNA, 25 bp, Homo sapien
gagaatgccacccattgcggctgac

SEQ ID NO: 1209820 - DNA, 25 bp, Homo sapien
gatattgtcgatagtctccaaaagg

SEQ ID NO: 1209821 - DNA, 25 bp, Homo sapien
aaaggtgaggaaggtaactgagttg

SEQ ID NO: 1209822 - DNA, 25 bp, Homo sapien
tattgtcgatagtctccaaaaggtg

SEQ ID NO: 1209823 - DNA, 25 bp, Homo sapien
taactgagttgaaggcaactgggag

SEQ ID NO: 1209824 - DNA, 25 bp, Homo sapien
tctttatagcctattggccatagct

SEQ ID NO: 1209825 - DNA, 25 bp, Homo sapien
aaagtgctaaatgtctctttatagc

SEQ ID NO: 1209826 - DNA, 25 bp, Homo sapien
gaaatccttctcgaaccacaactcg

SEQ ID NO: 1209827 - DNA, 25 bp, Homo sapien
gactgtaacttgatcttctgaaatc

SEQ ID NO: 1209828 - DNA, 25 bp, Homo sapien
ttgtttgaataacagaacacacaaa

SEQ ID NO: 1209829 - DNA, 25 bp, Homo sapien
tttattgtttgaataacagaacaca

SEQ ID NO: 1209830 - DNA, 25 bp, Homo sapien
ttattgtttgaataacagaacacac

SEQ ID NO: 1209831 - DNA, 25 bp, Homo sapien
tattgtttgaataacagaacacaca

SEQ ID NO: 1209832 - DNA, 25 bp, Homo sapien
caagactcagtagccctaaaggaag

SEQ ID NO: 1209833 - DNA, 25 bp, Homo sapien
gcatgaaacatcgaagtctacaact

SEQ ID NO: 1209834 - DNA, 25 bp, Homo sapien
gaaatgatccatgttgactctgcat

SEQ ID NO: 1209835 - DNA, 25 bp, Homo sapien
tcacttcaagtgatgagggactaac

SEQ ID NO: 1209836 - DNA, 25 bp, Homo sapien
caaaatacatcgtttatgcagagga

SEQ ID NO: 1209837 - DNA, 25 bp, Homo sapien
taacatcatgcctcctatagggcca

SEQ ID NO: 1209838 - DNA, 25 bp, Homo sapien
taccatatgtatggcattgggccaa

SEQ ID NO: 1209839 - DNA, 25 bp, Homo sapien
gataaacgtgtgtttacagtaccca

SEQ ID NO: 1209840 - DNA, 25 bp, Homo sapien
gggcccccatgaggaaaggaactca

SEQ ID NO: 1209841 - DNA, 25 bp, Homo sapien
gaactcagtcggcttaattggctgc

SEQ ID NO: 1209842 - DNA, 25 bp, Homo sapien
ctgctatttacagccattgcacact

SEQ ID NO: 1209843 - DNA, 25 bp, Homo sapien
accaaggaagctgctatttacagcc

SEQ ID NO: 1209844 - DNA, 25 bp, Homo sapien
ctacattggggtagtgtaaggtcag

SEQ ID NO: 1209845 - DNA, 25 bp, Homo sapien
tgtaaggtcagaaacatgaacatcc

SEQ ID NO: 1209846 - DNA, 25 bp, Homo sapien
gtgtaaggtcagaaacatgaacatc

SEQ ID NO: 1209847 - DNA, 25 bp, Homo sapien
cattggggtagtgtaaggtcagaaa

SEQ ID NO: 1209848 - DNA, 25 bp, Homo sapien
gcttggtgtggatggacataacttg

SEQ ID NO: 1209849 - DNA, 25 bp, Homo sapien
tggtgtggatggacataacttggcc

SEQ ID NO: 1209850 - DNA, 25 bp, Homo sapien
ttggtgtggatggacataacttggc

SEQ ID NO: 1209851 - DNA, 25 bp, Homo sapien
gcagcttggtgtggatggacataac

SEQ ID NO: 1209852 - DNA, 25 bp, Homo sapien
gaacttggccctgcgcagggcctca

SEQ ID NO: 1209853 - DNA, 25 bp, Homo sapien
ttgaacttggccctgcgcagggcct

SEQ ID NO: 1209854 - DNA, 25 bp, Homo sapien
acttggccctgcgcagggcctcaat

SEQ ID NO: 1209855 - DNA, 25 bp, Homo sapien
ttggccctgcgcagggcctcaatca

SEQ ID NO: 1209856 - DNA, 25 bp, Homo sapien
atgtggatcttctggcggccagaaa

SEQ ID NO: 1209857 - DNA, 25 bp, Homo sapien
tggtgaagccccatttctttgagat

SEQ ID NO: 1209858 - DNA, 25 bp, Homo sapien
ttaattggcattgaacttggtgaag

SEQ ID NO: 1209859 - DNA, 25 bp, Homo sapien
gtgaagccccatttctttgagatgt

SEQ ID NO: 1209860 - DNA, 25 bp, Homo sapien
tgttccagtcgtcccggtggggcac

SEQ ID NO: 1209861 - DNA, 25 bp, Homo sapien
tgaggtgttccagtcgtcccggtgg

SEQ ID NO: 1209862 - DNA, 25 bp, Homo sapien
gtgttccagtcgtcccggtggggca

SEQ ID NO: 1209863 - DNA, 25 bp, Homo sapien
ggccgcagagccgttgctcaccggc

SEQ ID NO: 1209864 - DNA, 25 bp, Homo sapien
cgcagagccgttgctcaccggccgg

SEQ ID NO: 1209865 - DNA, 25 bp, Homo sapien
gcagagccgttgctcaccggccggg

SEQ ID NO: 1209866 - DNA, 25 bp, Homo sapien
gccgcagagccgttgctcaccggcc

SEQ ID NO: 1209867 - DNA, 25 bp, Homo sapien
gcgcggagtgcagcggccgccgggc

SEQ ID NO: 1209868 - DNA, 25 bp, Homo sapien
cgggggaatgctcgccgctcgccat

SEQ ID NO: 1209869 - DNA, 25 bp, Homo sapien
tgcgcggagtgcagcggccgccggg

SEQ ID NO: 1209870 - DNA, 25 bp, Homo sapien
cgcgccgctgccgggggaatgctcg

SEQ ID NO: 1209871 - DNA, 25 bp, Homo sapien
agctcaaaggcccggaagttggagg

SEQ ID NO: 1209872 - DNA, 25 bp, Homo sapien
gctcaaaggcccggaagttggaggc

SEQ ID NO: 1209873 - DNA, 25 bp, Homo sapien
cggctccctgcgccgggccctggag

SEQ ID NO: 1209874 - DNA, 25 bp, Homo sapien
ggaggcccgaactcagcccgcaggt

SEQ ID NO: 1209875 - DNA, 25 bp, Homo sapien
caggaccgcggtgccgctcagcccc

SEQ ID NO: 1209876 - DNA, 25 bp, Homo sapien
ccgggccctggaggcccgaactcag

SEQ ID NO: 1209877 - DNA, 25 bp, Homo sapien
gctgcgtgtagaagctcacgggctc

SEQ ID NO: 1209878 - DNA, 25 bp, Homo sapien
cagggcctggccatagtgcgagaag

SEQ ID NO: 1209879 - DNA, 25 bp, Homo sapien
ccatagtgcgagaagggctgcgtgt

SEQ ID NO: 1209880 - DNA, 25 bp, Homo sapien
gtcacctccaggcacgggtgcgagt

SEQ ID NO: 1209881 - DNA, 25 bp, Homo sapien
ccacggaaaatgttagaaacggcag

SEQ ID NO: 1209882 - DNA, 25 bp, Homo sapien
taagtgaagtgcatgaacaacaggt

SEQ ID NO: 1209883 - DNA, 25 bp, Homo sapien
ggaatgcggcgcaatctggacaagc

SEQ ID NO: 1209884 - DNA, 25 bp, Homo sapien
ttagaaacggcagtgtgcgatgagc

SEQ ID NO: 1209885 - DNA, 25 bp, Homo sapien
tgtatttaacagcaggcgtgtcgaa

SEQ ID NO: 1209886 - DNA, 25 bp, Homo sapien
gtctgctcgggagccaaccagcaaa

SEQ ID NO: 1209887 - DNA, 25 bp, Homo sapien
ctgggtgtacacgaagggcttcttc

SEQ ID NO: 1209888 - DNA, 25 bp, Homo sapien
ttaacagcaggcgtgtcgaagcaag

SEQ ID NO: 1209889 - DNA, 25 bp, Homo sapien
aatttaccactgaaacgtgacctga

SEQ ID NO: 1209890 - DNA, 25 bp, Homo sapien
gagaaagcttaggagattttacctg

SEQ ID NO: 1209891 - DNA, 25 bp, Homo sapien
cgtgacctgattgatagatctgaaa

SEQ ID NO: 1209892 - DNA, 25 bp, Homo sapien
gcatgaccggccacctgtgtgtgat

SEQ ID NO: 1209893 - DNA, 25 bp, Homo sapien
cgatggccaaagctatcagatagga

SEQ ID NO: 1209894 - DNA, 25 bp, Homo sapien
tgggtccaacttcagccgaaaccag

SEQ ID NO: 1209895 - DNA, 25 bp, Homo sapien
caggtgctagcactcatcacagctg

SEQ ID NO: 1209896 - DNA, 25 bp, Homo sapien
aagaagaacttatttggacctctct

SEQ ID NO: 1209897 - DNA, 25 bp, Homo sapien
taaattccaacatccctctgtaagg

SEQ ID NO: 1209898 - DNA, 25 bp, Homo sapien
gaggccaatccaaccttgcctgtgg

SEQ ID NO: 1209899 - DNA, 25 bp, Homo sapien
cagacagaggatccaagactgccca

SEQ ID NO: 1209900 - DNA, 25 bp, Homo sapien
cagcgctactgctagcagggatgat

SEQ ID NO: 1209901 - DNA, 25 bp, Homo sapien
gaaaacttcctctgcgtttgctgaa

SEQ ID NO: 1209902 - DNA, 25 bp, Homo sapien
gcatgtgaggaagcaccgagagtct

SEQ ID NO: 1209903 - DNA, 25 bp, Homo sapien
tatcaaaagcaaagacgtagccatg

SEQ ID NO: 1209904 - DNA, 25 bp, Homo sapien
tacagggaaaccagtatcaggtact

SEQ ID NO: 1209905 - DNA, 25 bp, Homo sapien
tgtgtccgacccaaacctactaatg

SEQ ID NO: 1209906 - DNA, 25 bp, Homo sapien
ccctggctgcgcttagaactgcttt

SEQ ID NO: 1209907 - DNA, 25 bp, Homo sapien
taactgccttaggtacaataatggg

SEQ ID NO: 1209908 - DNA, 25 bp, Homo sapien
cacagacatatgaatgagactggct

SEQ ID NO: 1209909 - DNA, 25 bp, Homo sapien
tccgccaagtgaatgtgacaatgca

SEQ ID NO: 1209910 - DNA, 25 bp, Homo sapien
tgtttagagaccatcgcagtgacct

SEQ ID NO: 1209911 - DNA, 25 bp, Homo sapien
tggaaccgtgctacgcagttatggc

SEQ ID NO: 1209912 - DNA, 25 bp, Homo sapien
cagtgacggagtgcaagatcggatc

SEQ ID NO: 1209913 - DNA, 25 bp, Homo sapien
caaaaattcttctatcaccccgttg

SEQ ID NO: 1209914 - DNA, 25 bp, Homo sapien
tatcaccccgttgtactcctccttg

SEQ ID NO: 1209915 - DNA, 25 bp, Homo sapien
tggcagcatcaatcaggcagggctc

SEQ ID NO: 1209916 - DNA, 25 bp, Homo sapien
gcagcatcaatcaggcagggctcag

SEQ ID NO: 1209917 - DNA, 25 bp, Homo sapien
taacaggagacactagagtcaatgt

SEQ ID NO: 1209918 - DNA, 25 bp, Homo sapien
ccagtgactcagtttaacaggagac

SEQ ID NO: 1209919 - DNA, 25 bp, Homo sapien
cactagagtcaatgtgataccacac

SEQ ID NO: 1209920 - DNA, 25 bp, Homo sapien
ggaggtggaaaagccacacgaagag

SEQ ID NO: 1209921 - DNA, 25 bp, Homo sapien
tccaaatggaaaggacggtggcatg

SEQ ID NO: 1209922 - DNA, 25 bp, Homo sapien
cctcctctgggcgtacatggtgaaa

SEQ ID NO: 1209923 - DNA, 25 bp, Homo sapien
ttgagccagaattcaccccagttgg

SEQ ID NO: 1209924 - DNA, 25 bp, Homo sapien
ccccagttggcgttggtgaccaggt

SEQ ID NO: 1209925 - DNA, 25 bp, Homo sapien
atgtgctgacgcagcagagcccgcc

SEQ ID NO: 1209926 - DNA, 25 bp, Homo sapien
ctggttcaatcttcacgcggagctt

SEQ ID NO: 1209927 - DNA, 25 bp, Homo sapien
cgcggagcttgttgagtgggttttc

SEQ ID NO: 1209928 - DNA, 25 bp, Homo sapien
tccagtgatgtccatgtgctgacgc

SEQ ID NO: 1209929 - DNA, 25 bp, Homo sapien
gaggacccggatctcagttgcagtc

SEQ ID NO: 1209930 - DNA, 25 bp, Homo sapien
tgaagtcatcacgaaccgcacagac

SEQ ID NO: 1209931 - DNA, 25 bp, Homo sapien
tcctatctggctgcaatggcttggg

SEQ ID NO: 1209932 - DNA, 25 bp, Homo sapien
cttaacggcatcaaggaacatgagc

SEQ ID NO: 1209933 - DNA, 25 bp, Homo sapien
ttgtagcctgtcacccgtaacgttc

SEQ ID NO: 1209934 - DNA, 25 bp, Homo sapien
tgtcacccgtaacgttcttctctag

SEQ ID NO: 1209935 - DNA, 25 bp, Homo sapien
ggagaaagcagacaagatttgagct

SEQ ID NO: 1209936 - DNA, 25 bp, Homo sapien
cacagtcaaagactagcgatggaag

SEQ ID NO: 1209937 - DNA, 25 bp, Homo sapien
gggtctcattataggtgtcgtccgg

SEQ ID NO: 1209938 - DNA, 25 bp, Homo sapien
cattataggtgtcgtccgggtcaac

SEQ ID NO: 1209939 - DNA, 25 bp, Homo sapien
tgggccaggtatgaaacaaagcaga

SEQ ID NO: 1209940 - DNA, 25 bp, Homo sapien
caagtgggccaggtatgaaacaaag

SEQ ID NO: 1209941 - DNA, 25 bp, Homo sapien
cttgagaaaactgtcaaactgatcc

SEQ ID NO: 1209942 - DNA, 25 bp, Homo sapien
aaactgtcaaactgatcctgatcac

SEQ ID NO: 1209943 - DNA, 25 bp, Homo sapien
tgtcaaactgatcctgatcacccac

SEQ ID NO: 1209944 - DNA, 25 bp, Homo sapien
gagaaaactgtcaaactgatcctga

SEQ ID NO: 1209945 - DNA, 25 bp, Homo sapien
ggctttatccgctcctcttccttct

SEQ ID NO: 1209946 - DNA, 25 bp, Homo sapien
gagggaaagctctttagaccctctc

SEQ ID NO: 1209947 - DNA, 25 bp, Homo sapien
aaagctctttagaccctctctggcc

SEQ ID NO: 1209948 - DNA, 25 bp, Homo sapien
gcccagtggctttatccgctcctct

SEQ ID NO: 1209949 - DNA, 25 bp, Homo sapien
tcggctaagatgcttcggaatttga

SEQ ID NO: 1209950 - DNA, 25 bp, Homo sapien
gtccagaaagtcatcggctaagatg

SEQ ID NO: 1209951 - DNA, 25 bp, Homo sapien
taagatgcttcggaatttgaattca

SEQ ID NO: 1209952 - DNA, 25 bp, Homo sapien
agtcatcggctaagatgcttcggaa

SEQ ID NO: 1209953 - DNA, 25 bp, Homo sapien
gccacggcttcaatggccttcatgt

SEQ ID NO: 1209954 - DNA, 25 bp, Homo sapien
tagaccagctggtaggtcttccagg

SEQ ID NO: 1209955 - DNA, 25 bp, Homo sapien
ggtattcagccatcgatcaaactca

SEQ ID NO: 1209956 - DNA, 25 bp, Homo sapien
caggcttcatgagtgagtccccagg

SEQ ID NO: 1209957 - DNA, 25 bp, Homo sapien
tggtcgttcttaaggacgatttggc

SEQ ID NO: 1209958 - DNA, 25 bp, Homo sapien
ggagctctgcattccgggcatttga

SEQ ID NO: 1209959 - DNA, 25 bp, Homo sapien
tccagaaatcttcctggtggtcgtt

SEQ ID NO: 1209960 - DNA, 25 bp, Homo sapien
catttgagatacttgggtatgtgtc

SEQ ID NO: 1209961 - DNA, 25 bp, Homo sapien
gaggcggtggatgcaaaagtctcct

SEQ ID NO: 1209962 - DNA, 25 bp, Homo sapien
tctccttggcgagggtctgggccac

SEQ ID NO: 1209963 - DNA, 25 bp, Homo sapien
cccatcattgcgtggtacagcggaa

SEQ ID NO: 1209964 - DNA, 25 bp, Homo sapien
tgggtgccacgatctgctggacata

SEQ ID NO: 1209965 - DNA, 25 bp, Homo sapien
gagaagtaagttcccaccagagcag

SEQ ID NO: 1209966 - DNA, 25 bp, Homo sapien
tccaggaagttgatcagggaacagg

SEQ ID NO: 1209967 - DNA, 25 bp, Homo sapien
ggctcagtgggctatagagaagtaa

SEQ ID NO: 1209968 - DNA, 25 bp, Homo sapien
gagtcacagatacctaagctagaga

SEQ ID NO: 1209969 - DNA, 25 bp, Homo sapien
gcttcacggagaactggaatgctat

SEQ ID NO: 1209970 - DNA, 25 bp, Homo sapien
tgcttcacggagaactggaatgcta

SEQ ID NO: 1209971 - DNA, 25 bp, Homo sapien
agctgcttcacggagaactggaatg

SEQ ID NO: 1209972 - DNA, 25 bp, Homo sapien
agataatgggaatgctgctgcagat

SEQ ID NO: 1209973 - DNA, 25 bp, Homo sapien
aaaaatgtaggatctgtgtgacccc

SEQ ID NO: 1209974 - DNA, 25 bp, Homo sapien
ccaggaatgtgggagaaccggcttc

SEQ ID NO: 1209975 - DNA, 25 bp, Homo sapien
gagttgccagaatccacacgggtaa

SEQ ID NO: 1209976 - DNA, 25 bp, Homo sapien
gagagagttaatgtccaggatcccc

SEQ ID NO: 1209977 - DNA, 25 bp, Homo sapien
attccagagattcagcaacaaagag

SEQ ID NO: 1209978 - DNA, 25 bp, Homo sapien
ttccagagattcagcaacaaagagg

SEQ ID NO: 1209979 - DNA, 25 bp, Homo sapien
aaattccagagattcagcaacaaag

SEQ ID NO: 1209980 - DNA, 25 bp, Homo sapien
tccagagattcagcaacaaagaggc

SEQ ID NO: 1209981 - DNA, 25 bp, Homo sapien
ggcccggctggtttaatgattgtca

SEQ ID NO: 1209982 - DNA, 25 bp, Homo sapien
cacttggcccggatcttagcaggca

SEQ ID NO: 1209983 - DNA, 25 bp, Homo sapien
gagaaatccagttccgccaggtagc

SEQ ID NO: 1209984 - DNA, 25 bp, Homo sapien
tgtgtcccctgcagtaacctgagct

SEQ ID NO: 1209985 - DNA, 25 bp, Homo sapien
gctcttgctcggagatcctagactg

SEQ ID NO: 1209986 - DNA, 25 bp, Homo sapien
tcagaactgcaaatcctctggaccc

SEQ ID NO: 1209987 - DNA, 25 bp, Homo sapien
ctcttgctcggagatcctagactgg

SEQ ID NO: 1209988 - DNA, 25 bp, Homo sapien
cctagactggagtgtgcaggttcag

SEQ ID NO: 1209989 - DNA, 25 bp, Homo sapien
cagactagcggcgtcatggccattc

SEQ ID NO: 1209990 - DNA, 25 bp, Homo sapien
ttgcccaaccctgggcaagagtagc

SEQ ID NO: 1209991 - DNA, 25 bp, Homo sapien
agcaactctgcggacaccgtctctt

SEQ ID NO: 1209992 - DNA, 25 bp, Homo sapien
gcggacaccgtctcttcaagaaggg

SEQ ID NO: 1209993 - DNA, 25 bp, Homo sapien
ctgtacatcgcactgaagtagttgc

SEQ ID NO: 1209994 - DNA, 25 bp, Homo sapien
tgttgctaatctcacaggttgcagc

SEQ ID NO: 1209995 - DNA, 25 bp, Homo sapien
tcagggtcagtaccaagtcatcggc

SEQ ID NO: 1209996 - DNA, 25 bp, Homo sapien
gtggagtcctccgagctgtacatcg

SEQ ID NO: 1209997 - DNA, 25 bp, Homo sapien
ggaggtagcattcacaacacccttg

SEQ ID NO: 1209998 - DNA, 25 bp, Homo sapien
cccatttgtctaacaggcccttaga

SEQ ID NO: 1209999 - DNA, 25 bp, Homo sapien
cctggaatttgcctagagaccctcc

SEQ ID NO: 1210000 - DNA, 25 bp, Homo sapien
aacacccttgtcctggtatctgaca

SEQ ID NO: 1210001 - DNA, 25 bp, Homo sapien
ctcaagggcacaattgcagagggtg

SEQ ID NO: 1210002 - DNA, 25 bp, Homo sapien
gaacctgcgtcttcgaccagaactg

SEQ ID NO: 1210003 - DNA, 25 bp, Homo sapien
gagggtggcgccatccatgtcacat

SEQ ID NO: 1210004 - DNA, 25 bp, Homo sapien
tggtagctgatccagtccagaacct

SEQ ID NO: 1210005 - DNA, 25 bp, Homo sapien
tacggccacactgaactcgactcag

SEQ ID NO: 1210006 - DNA, 25 bp, Homo sapien
ctgcctacggccacactgaactcga

SEQ ID NO: 1210007 - DNA, 25 bp, Homo sapien
gaactcgactcagctcaacatgtgg

SEQ ID NO: 1210008 - DNA, 25 bp, Homo sapien
acactgaactcgactcagctcaaca

SEQ ID NO: 1210009 - DNA, 25 bp, Homo sapien
tgatccaactgagctcatcagaaga

SEQ ID NO: 1210010 - DNA, 25 bp, Homo sapien
actgagctcatcagaagagctggaa

SEQ ID NO: 1210011 - DNA, 25 bp, Homo sapien
tccagcagctcaatgatccaactga

SEQ ID NO: 1210012 - DNA, 25 bp, Homo sapien
tcaatgatccaactgagctcatcag

SEQ ID NO: 1210013 - DNA, 25 bp, Homo sapien
gtcatctctagcactctgtggaggg

SEQ ID NO: 1210014 - DNA, 25 bp, Homo sapien
ggagggggtcatctctagcactctg

SEQ ID NO: 1210015 - DNA, 25 bp, Homo sapien
tttctaattgagggaggaagaagtc

SEQ ID NO: 1210016 - DNA, 25 bp, Homo sapien
gggggtcatctctagcactctgtgg

SEQ ID NO: 1210017 - DNA, 25 bp, Homo sapien
gcagctcctgggcaaaggggctgcc

SEQ ID NO: 1210018 - DNA, 25 bp, Homo sapien
cagcagctcctgggcaaaggggctg

SEQ ID NO: 1210019 - DNA, 25 bp, Homo sapien
cagctcctgggcaaaggggctgccc

SEQ ID NO: 1210020 - DNA, 25 bp, Homo sapien
tccagcagctcctgggcaaaggggc

SEQ ID NO: 1210021 - DNA, 25 bp, Homo sapien
gagggggctcctgcgccacagctgc

SEQ ID NO: 1210022 - DNA, 25 bp, Homo sapien
ggagggggctcctgcgccacagctg

SEQ ID NO: 1210023 - DNA, 25 bp, Homo sapien
ccctctgctcaaccacgctgctggc

SEQ ID NO: 1210024 - DNA, 25 bp, Homo sapien
cggggtcagagtaagtcccctgccg

SEQ ID NO: 1210025 - DNA, 25 bp, Homo sapien
gcggggtcagagtaagtcccctgcc

SEQ ID NO: 1210026 - DNA, 25 bp, Homo sapien
tgctcaaccacgctgctggctctca

SEQ ID NO: 1210027 - DNA, 25 bp, Homo sapien
tcacttccaccggagtctgaggagt

SEQ ID NO: 1210028 - DNA, 25 bp, Homo sapien
ggagtgggagctccgagaagcacca

SEQ ID NO: 1210029 - DNA, 25 bp, Homo sapien
gagcttgccatcagtgggatccagg

SEQ ID NO: 1210030 - DNA, 25 bp, Homo sapien
atcagtgggatccaggtccacgtca

SEQ ID NO: 1210031 - DNA, 25 bp, Homo sapien
tgctcttcttgccctcgagacagtc

SEQ ID NO: 1210032 - DNA, 25 bp, Homo sapien
cccttcttgcagtcacgaaaaccat

SEQ ID NO: 1210033 - DNA, 25 bp, Homo sapien
gcctcgtttccgcttcccgtgcttg

SEQ ID NO: 1210034 - DNA, 25 bp, Homo sapien
tttccgcttcccgtgcttgggatcc

SEQ ID NO: 1210035 - DNA, 25 bp, Homo sapien
tgcaacaacccgcagtgccccagga

SEQ ID NO: 1210036 - DNA, 25 bp, Homo sapien
gcgcagggaggacccacgtgccccc

SEQ ID NO: 1210037 - DNA, 25 bp, Homo sapien
ggaagccgctcagcccggcgcaggg

SEQ ID NO: 1210038 - DNA, 25 bp, Homo sapien
gaggacccacgtgcccccggagctc

SEQ ID NO: 1210039 - DNA, 25 bp, Homo sapien
agcctccatcagtttgccatccagg

SEQ ID NO: 1210040 - DNA, 25 bp, Homo sapien
ctccatcagtttgccatccaggtgt

SEQ ID NO: 1210041 - DNA, 25 bp, Homo sapien
agtttgccatccaggtgtcccctct

SEQ ID NO: 1210042 - DNA, 25 bp, Homo sapien
catcagtttgccatccaggtgtccc

SEQ ID NO: 1210043 - DNA, 25 bp, Homo sapien
tcccggatgaactcccacaggtggg

SEQ ID NO: 1210044 - DNA, 25 bp, Homo sapien
gaagacgccttcatgccgattctcc

SEQ ID NO: 1210045 - DNA, 25 bp, Homo sapien
ccctcgttgagctccgggtggatga

SEQ ID NO: 1210046 - DNA, 25 bp, Homo sapien
tcccacttcatgaggccctcgttga

SEQ ID NO: 1210047 - DNA, 25 bp, Homo sapien
tcacactggcaagcagaagctcttt

SEQ ID NO: 1210048 - DNA, 25 bp, Homo sapien
aagatgatctagtgtactcctggac

SEQ ID NO: 1210049 - DNA, 25 bp, Homo sapien
tgtaaccgtgcccaggacacagggc

SEQ ID NO: 1210050 - DNA, 25 bp, Homo sapien
tctctgcctgactaagctgagcctg

SEQ ID NO: 1210051 - DNA, 25 bp, Homo sapien
tcagttccgactctggagaacctct

SEQ ID NO: 1210052 - DNA, 25 bp, Homo sapien
aaacttgtagacgagtcgccggcca

SEQ ID NO: 1210053 - DNA, 25 bp, Homo sapien
cttccagccgcttgagtttttgcca

SEQ ID NO: 1210054 - DNA, 25 bp, Homo sapien
caggatctcccgtttgtagtagtac

SEQ ID NO: 1210055 - DNA, 25 bp, Homo sapien
agtcagcttcaaaccccagggcttg

SEQ ID NO: 1210056 - DNA, 25 bp, Homo sapien
tttgcaggcctcgagtggtccgtga

SEQ ID NO: 1210057 - DNA, 25 bp, Homo sapien
gaggtgaacgccagtccagaaagaa

SEQ ID NO: 1210058 - DNA, 25 bp, Homo sapien
catagtctccgagtcccaggacgat

SEQ ID NO: 1210059 - DNA, 25 bp, Homo sapien
tcttgaccatattcgatccaaaggc

SEQ ID NO: 1210060 - DNA, 25 bp, Homo sapien
gaccatattcgatccaaaggcccaa

SEQ ID NO: 1210061 - DNA, 25 bp, Homo sapien
ccaacctcttgaccatattcgatcc

SEQ ID NO: 1210062 - DNA, 25 bp, Homo sapien
tattcgatccaaaggcccaaatttc

SEQ ID NO: 1210063 - DNA, 25 bp, Homo sapien
tttaggacagaatcaaggcacacct

SEQ ID NO: 1210064 - DNA, 25 bp, Homo sapien
gatatacagtttacagcacacttgg

SEQ ID NO: 1210065 - DNA, 25 bp, Homo sapien
tcactcgagcggtgtcatgacagca

SEQ ID NO: 1210066 - DNA, 25 bp, Homo sapien
gaggattaggttagaagcgcccaca

SEQ ID NO: 1210067 - DNA, 25 bp, Homo sapien
cagccaacaatctgattggtatttc

SEQ ID NO: 1210068 - DNA, 25 bp, Homo sapien
cacatcacttcagccaacaatctga

SEQ ID NO: 1210069 - DNA, 25 bp, Homo sapien
cacttcagccaacaatctgattggt

SEQ ID NO: 1210070 - DNA, 25 bp, Homo sapien
gccaacaatctgattggtatttcca

SEQ ID NO: 1210071 - DNA, 25 bp, Homo sapien
agcagtgataatacttagggcagga

SEQ ID NO: 1210072 - DNA, 25 bp, Homo sapien
gcagtgataatacttagggcaggat

SEQ ID NO: 1210073 - DNA, 25 bp, Homo sapien
tagaacccaatgactagatgtccca

SEQ ID NO: 1210074 - DNA, 25 bp, Homo sapien
cagcaggcttggaatgtgcccaaac

SEQ ID NO: 1210075 - DNA, 25 bp, Homo sapien
tctgtgggctgcattagaagcctgc

SEQ ID NO: 1210076 - DNA, 25 bp, Homo sapien
caagggacctcgtactgttgtggat

SEQ ID NO: 1210077 - DNA, 25 bp, Homo sapien
ctgtcttgcagccgtttttaaacac

SEQ ID NO: 1210078 - DNA, 25 bp, Homo sapien
cttgcagccgtttttaaacacttgg

SEQ ID NO: 1210079 - DNA, 25 bp, Homo sapien
tctgtcttgcagccgtttttaaaca

SEQ ID NO: 1210080 - DNA, 25 bp, Homo sapien
caagctggtgacgaacatgaaggtg

SEQ ID NO: 1210081 - DNA, 25 bp, Homo sapien
tgtcatgcgaagacccaagctggtg

SEQ ID NO: 1210082 - DNA, 25 bp, Homo sapien
tggtgaaacccaatcaaaatgttag

SEQ ID NO: 1210083 - DNA, 25 bp, Homo sapien
tgccgggcaagtgaatgactgctat

SEQ ID NO: 1210084 - DNA, 25 bp, Homo sapien
cgggggcagggttgacacctcttct

SEQ ID NO: 1210085 - DNA, 25 bp, Homo sapien
tgtgtgctaatctcctgtccagaga

SEQ ID NO: 1210086 - DNA, 25 bp, Homo sapien
ctgagcaggactgggaccgccagca

SEQ ID NO: 1210087 - DNA, 25 bp, Homo sapien
gggcagggttgacacctcttctact

SEQ ID NO: 1210088 - DNA, 25 bp, Homo sapien
tgaccctgaccagatcaaggcagga

SEQ ID NO: 1210089 - DNA, 25 bp, Homo sapien
taaccccttgtagtatagtagagct

SEQ ID NO: 1210090 - DNA, 25 bp, Homo sapien
gttgcccagctgagcgctttgttag

SEQ ID NO: 1210091 - DNA, 25 bp, Homo sapien
caggaggcactaggcagcactgtgc

SEQ ID NO: 1210092 - DNA, 25 bp, Homo sapien
agtgaaggaacaaagaaatctgtaa

SEQ ID NO: 1210093 - DNA, 25 bp, Homo sapien
ctgcttgtgatcaattagttgtaaa

SEQ ID NO: 1210094 - DNA, 25 bp, Homo sapien
gtgatcaattagttgtaaacaccaa

SEQ ID NO: 1210095 - DNA, 25 bp, Homo sapien
aaggccattcaagtgaaacagtggg

SEQ ID NO: 1210096 - DNA, 25 bp, Homo sapien
ttccagaacgcaacaaaaacaagtc

SEQ ID NO: 1210097 - DNA, 25 bp, Homo sapien
catcaagccaacgtaaccaggcctg

SEQ ID NO: 1210098 - DNA, 25 bp, Homo sapien
gccaacgtaaccaggcctggaggct

SEQ ID NO: 1210099 - DNA, 25 bp, Homo sapien
tctccatcaagccaacgtaaccagg

SEQ ID NO: 1210100 - DNA, 25 bp, Homo sapien
gaggctgaaaacatgcaggctccag

SEQ ID NO: 1210101 - DNA, 25 bp, Homo sapien
ctgagaacaccatttcttccatggg

SEQ ID NO: 1210102 - DNA, 25 bp, Homo sapien
aacaccatttcttccatgggctggg

SEQ ID NO: 1210103 - DNA, 25 bp, Homo sapien
gagaacaccatttcttccatgggct

SEQ ID NO: 1210104 - DNA, 25 bp, Homo sapien
cactgagaacaccatttcttccatg

SEQ ID NO: 1210105 - DNA, 25 bp, Homo sapien
ggcccagtgtcagtttcaagccctt

SEQ ID NO: 1210106 - DNA, 25 bp, Homo sapien
agccatggccggcctgagcaggact

SEQ ID NO: 1210107 - DNA, 25 bp, Homo sapien
ggactgggttgggaacatctccagc

SEQ ID NO: 1210108 - DNA, 25 bp, Homo sapien
ccttcatggcccagtgtcagtttca

SEQ ID NO: 1210109 - DNA, 25 bp, Homo sapien
tcctgccttggcctataagaacaga

SEQ ID NO: 1210110 - DNA, 25 bp, Homo sapien
ggcctataagaacagaaacctacat

SEQ ID NO: 1210111 - DNA, 25 bp, Homo sapien
gcaggataacctggatgggtgccgt

SEQ ID NO: 1210112 - DNA, 25 bp, Homo sapien
taacctggatgggtgccgtggctta

SEQ ID NO: 1210113 - DNA, 25 bp, Homo sapien
tcaacctcctaggcttaggcaatcc

SEQ ID NO: 1210114 - DNA, 25 bp, Homo sapien
ctcaacctcctaggcttaggcaatc

SEQ ID NO: 1210115 - DNA, 25 bp, Homo sapien
cagcctcaacctcctaggcttaggc

SEQ ID NO: 1210116 - DNA, 25 bp, Homo sapien
gcctcaacctcctaggcttaggcaa

SEQ ID NO: 1210117 - DNA, 25 bp, Homo sapien
gctgttttatgctccccaagtgcct

SEQ ID NO: 1210118 - DNA, 25 bp, Homo sapien
tttctagagagctccaacccctgtg

SEQ ID NO: 1210119 - DNA, 25 bp, Homo sapien
ctccttcctgcggtgaggtgaccca

SEQ ID NO: 1210120 - DNA, 25 bp, Homo sapien
gaaggacagattagggccatgacag

SEQ ID NO: 1210121 - DNA, 25 bp, Homo sapien
agcccaggaagagcaggtgagtgca

SEQ ID NO: 1210122 - DNA, 25 bp, Homo sapien
gcaggtgagtgcagggggcccaaga

SEQ ID NO: 1210123 - DNA, 25 bp, Homo sapien
tccagagaggcagctggccggctgg

SEQ ID NO: 1210124 - DNA, 25 bp, Homo sapien
atgagcaggagacagccagcccagg

SEQ ID NO: 1210125 - DNA, 25 bp, Homo sapien
cagagaccctgcttagccccacagc

SEQ ID NO: 1210126 - DNA, 25 bp, Homo sapien
ccctgcttagccccacagccaaaat

SEQ ID NO: 1210127 - DNA, 25 bp, Homo sapien
cctgcttagccccacagccaaaatc

SEQ ID NO: 1210128 - DNA, 25 bp, Homo sapien
agaccctgcttagccccacagccaa

SEQ ID NO: 1210129 - DNA, 25 bp, Homo sapien
catgaccgacaggttgcccacaatg

SEQ ID NO: 1210130 - DNA, 25 bp, Homo sapien
gcataggcactgtaggagctctcgg

SEQ ID NO: 1210131 - DNA, 25 bp, Homo sapien
ggtagtagctgtgccacacgatgca

SEQ ID NO: 1210132 - DNA, 25 bp, Homo sapien
aagggcacggcacgacaagaaacgt

SEQ ID NO: 1210133 - DNA, 25 bp, Homo sapien
taccactgttagtcagtctccctgg

SEQ ID NO: 1210134 - DNA, 25 bp, Homo sapien
cctgtgtccgtaatgctgatcctga

SEQ ID NO: 1210135 - DNA, 25 bp, Homo sapien
gagacacagggagtctgtccaacta

SEQ ID NO: 1210136 - DNA, 25 bp, Homo sapien
cagaccttggaataggacctgtgtc

SEQ ID NO: 1210137 - DNA, 25 bp, Homo sapien
tgaaagtcgtgactcccagagagga

SEQ ID NO: 1210138 - DNA, 25 bp, Homo sapien
gccaggatggattggcaccgctcga

SEQ ID NO: 1210139 - DNA, 25 bp, Homo sapien
ccagtgaatacagggactcgggcag

SEQ ID NO: 1210140 - DNA, 25 bp, Homo sapien
tgcgggcgttctggtaggtcatcac

SEQ ID NO: 1210141 - DNA, 25 bp, Homo sapien
ggagggtgcagaaggcgtagaccac

SEQ ID NO: 1210142 - DNA, 25 bp, Homo sapien
gtgcagaaggcgtagaccacggtca

SEQ ID NO: 1210143 - DNA, 25 bp, Homo sapien
ctgggagggtgcagaaggcgtagac

SEQ ID NO: 1210144 - DNA, 25 bp, Homo sapien
aaggcgtagaccacggtcaggccca

SEQ ID NO: 1210145 - DNA, 25 bp, Homo sapien
gaggtccagggtctggcgggtcagc

SEQ ID NO: 1210146 - DNA, 25 bp, Homo sapien
agggtctggcgggtcagctcggtgg

SEQ ID NO: 1210147 - DNA, 25 bp, Homo sapien
ggtctggcgggtcagctcggtggag

SEQ ID NO: 1210148 - DNA, 25 bp, Homo sapien
ggtccagggtctggcgggtcagctc

SEQ ID NO: 1210149 - DNA, 25 bp, Homo sapien
ccagcggcctgcagatgcaaaggag

SEQ ID NO: 1210150 - DNA, 25 bp, Homo sapien
cagcggcctgcagatgcaaaggagc

SEQ ID NO: 1210151 - DNA, 25 bp, Homo sapien
gcttgttgtccgacccattggcagc

SEQ ID NO: 1210152 - DNA, 25 bp, Homo sapien
agtagatggaagaggacacctcggt

SEQ ID NO: 1210153 - DNA, 25 bp, Homo sapien
gacccattggcagcagaggcctccg

SEQ ID NO: 1210154 - DNA, 25 bp, Homo sapien
cacctcggtcttgagcttgttgtcc

SEQ ID NO: 1210155 - DNA, 25 bp, Homo sapien
ttgggacagggcaacccagggatcc

SEQ ID NO: 1210156 - DNA, 25 bp, Homo sapien
aaagtatggtcaggttccaaggcag

SEQ ID NO: 1210157 - DNA, 25 bp, Homo sapien
tctaaggacctagaagcatcaccgc

SEQ ID NO: 1210158 - DNA, 25 bp, Homo sapien
caagaagggcctcctatgggaaagc

SEQ ID NO: 1210159 - DNA, 25 bp, Homo sapien
tgagaaacgggtgggtgtcactccc

SEQ ID NO: 1210160 - DNA, 25 bp, Homo sapien
aaggccgttaagatccccaggagag

SEQ ID NO: 1210161 - DNA, 25 bp, Homo sapien
tggtctgaagtctgccctcgggtga

SEQ ID NO: 1210162 - DNA, 25 bp, Homo sapien
cccatgtggatgctgtaggtaggcc

SEQ ID NO: 1210163 - DNA, 25 bp, Homo sapien
caatgctatgggtttcctggtagga

SEQ ID NO: 1210164 - DNA, 25 bp, Homo sapien
gctgttgtgtgcgaactgagctgca

SEQ ID NO: 1210165 - DNA, 25 bp, Homo sapien
caagcatggctaggttttcctgggc

SEQ ID NO: 1210166 - DNA, 25 bp, Homo sapien
gctaagtgattctagggtacctccc

SEQ ID NO: 1210167 - DNA, 25 bp, Homo sapien
tagtcccagctttgagccagcagct

SEQ ID NO: 1210168 - DNA, 25 bp, Homo sapien
gtcccagctttgagccagcagctgc

SEQ ID NO: 1210169 - DNA, 25 bp, Homo sapien
ttggcatgggttgccctacaggccc

SEQ ID NO: 1210170 - DNA, 25 bp, Homo sapien
agcacaatggcgctgcacaaaacgg

SEQ ID NO: 1210171 - DNA, 25 bp, Homo sapien
tgggcaccaacagagccacggagcg

SEQ ID NO: 1210172 - DNA, 25 bp, Homo sapien
gttacttttccgcagttggcatggg

SEQ ID NO: 1210173 - DNA, 25 bp, Homo sapien
aagacacgttttggtggcctgccca

SEQ ID NO: 1210174 - DNA, 25 bp, Homo sapien
cacagtgggaagtctaggaagctct

SEQ ID NO: 1210175 - DNA, 25 bp, Homo sapien
tattaaccagccagatgcacctgtg

SEQ ID NO: 1210176 - DNA, 25 bp, Homo sapien
tgactatcaaggtgagggcccagaa

SEQ ID NO: 1210177 - DNA, 25 bp, Homo sapien
caatgctgcggttttggcacagtaa

SEQ ID NO: 1210178 - DNA, 25 bp, Homo sapien
cacagtaattttcggagctaacacc

SEQ ID NO: 1210179 - DNA, 25 bp, Homo sapien
taacacctggactctgacctgactc

SEQ ID NO: 1210180 - DNA, 25 bp, Homo sapien
cttggcattgacttaggctcttgga

SEQ ID NO: 1210181 - DNA, 25 bp, Homo sapien
ccctcagaggtgccttataacagta

SEQ ID NO: 1210182 - DNA, 25 bp, Homo sapien
ccccctcagaggtgccttataacag

SEQ ID NO: 1210183 - DNA, 25 bp, Homo sapien
cccctcagaggtgccttataacagt

SEQ ID NO: 1210184 - DNA, 25 bp, Homo sapien
tggcttccaaatgtgaactggcctg

SEQ ID NO: 1210185 - DNA, 25 bp, Homo sapien
gcttccaaatgtgaactggcctggc

SEQ ID NO: 1210186 - DNA, 25 bp, Homo sapien
caaatgtgaactggcctggcctaca

SEQ ID NO: 1210187 - DNA, 25 bp, Homo sapien
ttccaaatgtgaactggcctggcct

SEQ ID NO: 1210188 - DNA, 25 bp, Homo sapien
agaggcggggtggaggcgccctaat

SEQ ID NO: 1210189 - DNA, 25 bp, Homo sapien
ttctggtagccttgatcagcaacca

SEQ ID NO: 1210190 - DNA, 25 bp, Homo sapien
tttctggtagccttgatcagcaacc

SEQ ID NO: 1210191 - DNA, 25 bp, Homo sapien
tggtagccttgatcagcaaccaaga

SEQ ID NO: 1210192 - DNA, 25 bp, Homo sapien
tctggtagccttgatcagcaaccaa

SEQ ID NO: 1210193 - DNA, 25 bp, Homo sapien
gtgctcccacctacagacagctgag

SEQ ID NO: 1210194 - DNA, 25 bp, Homo sapien
tgctcccacctacagacagctgagg

SEQ ID NO: 1210195 - DNA, 25 bp, Homo sapien
gatgaggagtgagaatggaagaaaa

SEQ ID NO: 1210196 - DNA, 25 bp, Homo sapien
caggtgctcccacctacagacagct

SEQ ID NO: 1210197 - DNA, 25 bp, Homo sapien
ccagagcagggcagcgaacaggatt

SEQ ID NO: 1210198 - DNA, 25 bp, Homo sapien
cagaaaaccccggaaccagagcagg

SEQ ID NO: 1210199 - DNA, 25 bp, Homo sapien
cggaaccagagcagggcagcgaaca

SEQ ID NO: 1210200 - DNA, 25 bp, Homo sapien
gcgaacaggattgggagcctcatcc

SEQ ID NO: 1210201 - DNA, 25 bp, Homo sapien
cttccagggagaggcatgcttcctc

SEQ ID NO: 1210202 - DNA, 25 bp, Homo sapien
tcccttccagggagaggcatgcttc

SEQ ID NO: 1210203 - DNA, 25 bp, Homo sapien
gactcccttccagggagaggcatgc

SEQ ID NO: 1210204 - DNA, 25 bp, Homo sapien
ggactcccttccagggagaggcatg

SEQ ID NO: 1210205 - DNA, 25 bp, Homo sapien
ccagctcagaaagaggctagtaggt

SEQ ID NO: 1210206 - DNA, 25 bp, Homo sapien
gaaagaggctagtaggtctcccctg

SEQ ID NO: 1210207 - DNA, 25 bp, Homo sapien
gaggctagtaggtctcccctggctg

SEQ ID NO: 1210208 - DNA, 25 bp, Homo sapien
ctcagacatgtgaggcggagggcat

SEQ ID NO: 1210209 - DNA, 25 bp, Homo sapien
tggaacttaaagctggatgcattgg

SEQ ID NO: 1210210 - DNA, 25 bp, Homo sapien
gaccccctgacaccagatcttggaa

SEQ ID NO: 1210211 - DNA, 25 bp, Homo sapien
gtcgcagggcagtcacttccagctg

SEQ ID NO: 1210212 - DNA, 25 bp, Homo sapien
gatgcattggtgtgggcctggagct

SEQ ID NO: 1210213 - DNA, 25 bp, Homo sapien
agtgcgagcagtgagggtgatggtg

SEQ ID NO: 1210214 - DNA, 25 bp, Homo sapien
gctgcagtccatggacagttgacgg

SEQ ID NO: 1210215 - DNA, 25 bp, Homo sapien
tgcagtccatggacagttgacgggg

SEQ ID NO: 1210216 - DNA, 25 bp, Homo sapien
ctgcagtccatggacagttgacggg

SEQ ID NO: 1210217 - DNA, 25 bp, Homo sapien
tgcttcccgggggcatcaccccatg

SEQ ID NO: 1210218 - DNA, 25 bp, Homo sapien
ccgggggcatcaccccatgaggcct

SEQ ID NO: 1210219 - DNA, 25 bp, Homo sapien
gggcatcaccccatgaggcctccag

SEQ ID NO: 1210220 - DNA, 25 bp, Homo sapien
ttcccgggggcatcaccccatgagg

SEQ ID NO: 1210221 - DNA, 25 bp, Homo sapien
ctaggtggtagaggagaaggcagta

SEQ ID NO: 1210222 - DNA, 25 bp, Homo sapien
gccagcccaggtgttaacttccaaa

SEQ ID NO: 1210223 - DNA, 25 bp, Homo sapien
tgccaaaattgtaggacagggtgcc

SEQ ID NO: 1210224 - DNA, 25 bp, Homo sapien
gagatattatgtgccaatgtctggg

SEQ ID NO: 1210225 - DNA, 25 bp, Homo sapien
tccaaaatatactcaatacctggca

SEQ ID NO: 1210226 - DNA, 25 bp, Homo sapien
tactgcagtcagattggtgccacct

SEQ ID NO: 1210227 - DNA, 25 bp, Homo sapien
cactggtgcccagggtatgcagtac

SEQ ID NO: 1210228 - DNA, 25 bp, Homo sapien
cgttccaggaggcttgcaaggcact

SEQ ID NO: 1210229 - DNA, 25 bp, Homo sapien
gccacctaggaggtctgtgagcacc

SEQ ID NO: 1210230 - DNA, 25 bp, Homo sapien
tgagcgtcagctcatagggggggcc

SEQ ID NO: 1210231 - DNA, 25 bp, Homo sapien
cactgcccgatggggcctggcagca

SEQ ID NO: 1210232 - DNA, 25 bp, Homo sapien
gcagcactgagcgtcagctcatagg

SEQ ID NO: 1210233 - DNA, 25 bp, Homo sapien
aggtccactctgtggcattgggccc

SEQ ID NO: 1210234 - DNA, 25 bp, Homo sapien
gacattgtgggcctcagggcctaga

SEQ ID NO: 1210235 - DNA, 25 bp, Homo sapien
ggcctagagtgatattcttctccac

SEQ ID NO: 1210236 - DNA, 25 bp, Homo sapien
ttaacttcagcaggaagtcatcctg

SEQ ID NO: 1210237 - DNA, 25 bp, Homo sapien
gggcctcagggcctagagtgatatt

SEQ ID NO: 1210238 - DNA, 25 bp, Homo sapien
catatggccccgctaggaccttcag

SEQ ID NO: 1210239 - DNA, 25 bp, Homo sapien
gcctgggcccaggcgtcatatggcc

SEQ ID NO: 1210240 - DNA, 25 bp, Homo sapien
ccaggcgtcatatggccccgctagg

SEQ ID NO: 1210241 - DNA, 25 bp, Homo sapien
tatggccccgctaggaccttcagct

SEQ ID NO: 1210242 - DNA, 25 bp, Homo sapien
tgccgcttggcaccactgccttgtc

SEQ ID NO: 1210243 - DNA, 25 bp, Homo sapien
caggcactggcccatagaaggtgat

SEQ ID NO: 1210244 - DNA, 25 bp, Homo sapien
aatgtccacacagtagcgggcccca

SEQ ID NO: 1210245 - DNA, 25 bp, Homo sapien
gaggctgtaagtgatgattcccaga

SEQ ID NO: 1210246 - DNA, 25 bp, Homo sapien
ctgctgataacctccagggactgtg

SEQ ID NO: 1210247 - DNA, 25 bp, Homo sapien
aagtcaacaagactgcccggtgacc

SEQ ID NO: 1210248 - DNA, 25 bp, Homo sapien
agtcaggctggaattgtccgggccc

SEQ ID NO: 1210249 - DNA, 25 bp, Homo sapien
gctagagccaaggttctctgcccag

SEQ ID NO: 1210250 - DNA, 25 bp, Homo sapien
caggaactcagtgcccggtgacagc

SEQ ID NO: 1210251 - DNA, 25 bp, Homo sapien
gacagctaggcccaggagaagttct

SEQ ID NO: 1210252 - DNA, 25 bp, Homo sapien
tgtccgccctttccagagtcagagg

SEQ ID NO: 1210253 - DNA, 25 bp, Homo sapien
tcaggctcaagttggcaggaggagc

SEQ ID NO: 1210254 - DNA, 25 bp, Homo sapien
tgggtgggaccttcactcgtcacat

SEQ ID NO: 1210255 - DNA, 25 bp, Homo sapien
ggtcaccgggtagctgtctcggccc

SEQ ID NO: 1210256 - DNA, 25 bp, Homo sapien
cttgtacttcgtgcctggagtcaga

SEQ ID NO: 1210257 - DNA, 25 bp, Homo sapien
tcagacttgaaaagcttgtgctggc

SEQ ID NO: 1210258 - DNA, 25 bp, Homo sapien
gtgttggctgctgcaatgtggtggg

SEQ ID NO: 1210259 - DNA, 25 bp, Homo sapien
ccagaggtgttggctgctgcaatgt

SEQ ID NO: 1210260 - DNA, 25 bp, Homo sapien
agccagaggtgttggctgctgcaat

SEQ ID NO: 1210261 - DNA, 25 bp, Homo sapien
gaggtgttggctgctgcaatgtggt

SEQ ID NO: 1210262 - DNA, 25 bp, Homo sapien
tctcctgcatcgctgccttccccat

SEQ ID NO: 1210263 - DNA, 25 bp, Homo sapien
atcgctgccttccccatgcctcatg

SEQ ID NO: 1210264 - DNA, 25 bp, Homo sapien
gctgccttccccatgcctcatgggt

SEQ ID NO: 1210265 - DNA, 25 bp, Homo sapien
tcctgcatcgctgccttccccatgc

SEQ ID NO: 1210266 - DNA, 25 bp, Homo sapien
aacaagcagtaccacgcgctgagtg

SEQ ID NO: 1210267 - DNA, 25 bp, Homo sapien
gctcgcatgcatggacaccaactca

SEQ ID NO: 1210268 - DNA, 25 bp, Homo sapien
gagaggttgcatccaggtgtgaggc

SEQ ID NO: 1210269 - DNA, 25 bp, Homo sapien
gccaggttgaccacagcggtgctcg

SEQ ID NO: 1210270 - DNA, 25 bp, Homo sapien
ctggagaagcgtaaggggcataacc

SEQ ID NO: 1210271 - DNA, 25 bp, Homo sapien
gggcataaccccgagcagagtgggt

SEQ ID NO: 1210272 - DNA, 25 bp, Homo sapien
cataaccccgagcagagtgggtgca

SEQ ID NO: 1210273 - DNA, 25 bp, Homo sapien
gcgtaaggggcataaccccgagcag

SEQ ID NO: 1210274 - DNA, 25 bp, Homo sapien
gcttctgggtgaagggctctcgaaa

SEQ ID NO: 1210275 - DNA, 25 bp, Homo sapien
tcagccaggcggaaaaacatctcct

SEQ ID NO: 1210276 - DNA, 25 bp, Homo sapien
ggactggacatttatgcccatggaa

SEQ ID NO: 1210277 - DNA, 25 bp, Homo sapien
tccgcaggcatagagggactggaca

SEQ ID NO: 1210278 - DNA, 25 bp, Homo sapien
tgtcggcctggaacacaaggtgagc

SEQ ID NO: 1210279 - DNA, 25 bp, Homo sapien
tggcgggcactgtccagttcagggc

SEQ ID NO: 1210280 - DNA, 25 bp, Homo sapien
gtgaccacccgactccacagaccgt

SEQ ID NO: 1210281 - DNA, 25 bp, Homo sapien
caggttgggcaacaggactgcattt

SEQ ID NO: 1210282 - DNA, 25 bp, Homo sapien
gcgggatcatcactcccatttctgt

SEQ ID NO: 1210283 - DNA, 25 bp, Homo sapien
gggatcatcactcccatttctgtcc

SEQ ID NO: 1210284 - DNA, 25 bp, Homo sapien
ggccggggctaacgctgggggatgc

SEQ ID NO: 1210285 - DNA, 25 bp, Homo sapien
cccgcgggatcatcactcccatttc

SEQ ID NO: 1210286 - DNA, 25 bp, Homo sapien
tggatctgcccatcatccttgccaa

SEQ ID NO: 1210287 - DNA, 25 bp, Homo sapien
ccactggatctgcccatcatccttg

SEQ ID NO: 1210288 - DNA, 25 bp, Homo sapien
ggatctgcccatcatccttgccaaa

SEQ ID NO: 1210289 - DNA, 25 bp, Homo sapien
actggatctgcccatcatccttgcc

SEQ ID NO: 1210290 - DNA, 25 bp, Homo sapien
catgttggtggtggcaatgatgccg

SEQ ID NO: 1210291 - DNA, 25 bp, Homo sapien
tgttggtggtggcaatgatgccgta

SEQ ID NO: 1210292 - DNA, 25 bp, Homo sapien
gacatgttggtggtggcaatgatgc

SEQ ID NO: 1210293 - DNA, 25 bp, Homo sapien
gtgacatgttggtggtggcaatgat

SEQ ID NO: 1210294 - DNA, 25 bp, Homo sapien
gtcatgtcctctgtagtagtggtca

SEQ ID NO: 1210295 - DNA, 25 bp, Homo sapien
gcatatctctttggtgtggccacag

SEQ ID NO: 1210296 - DNA, 25 bp, Homo sapien
cacagcccagggatccgggtagaag

SEQ ID NO: 1210297 - DNA, 25 bp, Homo sapien
catgtggttgatggcttcccaggaa

SEQ ID NO: 1210298 - DNA, 25 bp, Homo sapien
tcactcccttcagccttagtgctcg

SEQ ID NO: 1210299 - DNA, 25 bp, Homo sapien
ttgtaagtttcatcactcccttcag

SEQ ID NO: 1210300 - DNA, 25 bp, Homo sapien
cttcagccttagtgctcgcctatac

SEQ ID NO: 1210301 - DNA, 25 bp, Homo sapien
tcccttcagccttagtgctcgccta

SEQ ID NO: 1210302 - DNA, 25 bp, Homo sapien
gttaatggtctcaggagggctgtac

SEQ ID NO: 1210303 - DNA, 25 bp, Homo sapien
aggagttaatggtctcaggagggct

SEQ ID NO: 1210304 - DNA, 25 bp, Homo sapien
gagttaatggtctcaggagggctgt

SEQ ID NO: 1210305 - DNA, 25 bp, Homo sapien
aaggagttaatggtctcaggagggc

SEQ ID NO: 1210306 - DNA, 25 bp, Homo sapien
ccattaccggcaggggcactgatgc

SEQ ID NO: 1210307 - DNA, 25 bp, Homo sapien
tccattaccggcaggggcactgatg

SEQ ID NO: 1210308 - DNA, 25 bp, Homo sapien
acgaggccctccattaccggcaggg

SEQ ID NO: 1210309 - DNA, 25 bp, Homo sapien
caccacgaggccctccattaccggc

SEQ ID NO: 1210310 - DNA, 25 bp, Homo sapien
agctcttgggaaaatggattcttcc

SEQ ID NO: 1210311 - DNA, 25 bp, Homo sapien
cgcaggttgtaagctgtcagctctt

SEQ ID NO: 1210312 - DNA, 25 bp, Homo sapien
caggttgtaagctgtcagctcttgg

SEQ ID NO: 1210313 - DNA, 25 bp, Homo sapien
ggttgtaagctgtcagctcttggga

SEQ ID NO: 1210314 - DNA, 25 bp, Homo sapien
tggatagggatgggccggtgggtct

SEQ ID NO: 1210315 - DNA, 25 bp, Homo sapien
gatagggatgggccggtgggtctac

SEQ ID NO: 1210316 - DNA, 25 bp, Homo sapien
ctgtggatagggatgggccggtggg

SEQ ID NO: 1210317 - DNA, 25 bp, Homo sapien
gtggatagggatgggccggtgggtc

SEQ ID NO: 1210318 - DNA, 25 bp, Homo sapien
tgcaaaaagaaagcctggtgtgcgt

SEQ ID NO: 1210319 - DNA, 25 bp, Homo sapien
aaagaaagcctggtgtgcgtgagca

SEQ ID NO: 1210320 - DNA, 25 bp, Homo sapien
ggtgtgcgtgagcactcttggcctc

SEQ ID NO: 1210321 - DNA, 25 bp, Homo sapien
aaagcctggtgtgcgtgagcactct

SEQ ID NO: 1210322 - DNA, 25 bp, Homo sapien
gtggtgttggcagcgtactcagcct

SEQ ID NO: 1210323 - DNA, 25 bp, Homo sapien
gtgttggcagcgtactcagcctcca

SEQ ID NO: 1210324 - DNA, 25 bp, Homo sapien
tggtggtgttggcagcgtactcagc

SEQ ID NO: 1210325 - DNA, 25 bp, Homo sapien
cttggtggtgttggcagcgtactca

SEQ ID NO: 1210326 - DNA, 25 bp, Homo sapien
ttgatgtagtcagaatgaggctctc

SEQ ID NO: 1210327 - DNA, 25 bp, Homo sapien
attgatgtagtcagaatgaggctct

SEQ ID NO: 1210328 - DNA, 25 bp, Homo sapien
tgatgtagtcagaatgaggctctcc

SEQ ID NO: 1210329 - DNA, 25 bp, Homo sapien
tgtgggtgggtgggtgggtgtagcc

SEQ ID NO: 1210330 - DNA, 25 bp, Homo sapien
ctgtgggtgggtgggtgggtgtagc

SEQ ID NO: 1210331 - DNA, 25 bp, Homo sapien
agaagttctccagcgttttcttgag

SEQ ID NO: 1210332 - DNA, 25 bp, Homo sapien
cagccgccagaagttctccagcgtt

SEQ ID NO: 1210333 - DNA, 25 bp, Homo sapien
cgttttcttgagaggcgcctgagag

SEQ ID NO: 1210334 - DNA, 25 bp, Homo sapien
gaggcgcctgagaggcaatgaattc

SEQ ID NO: 1210335 - DNA, 25 bp, Homo sapien
tgatgcggacctgctactcccgcac

SEQ ID NO: 1210336 - DNA, 25 bp, Homo sapien
gatgatgatgcggacctgctactcc

SEQ ID NO: 1210337 - DNA, 25 bp, Homo sapien
tgatgatgcggacctgctactcccg

SEQ ID NO: 1210338 - DNA, 25 bp, Homo sapien
gatgatgcggacctgctactcccgc

SEQ ID NO: 1210339 - DNA, 25 bp, Homo sapien
tgttctccatgccgacggtcagcat

SEQ ID NO: 1210340 - DNA, 25 bp, Homo sapien
tcctgttctccatgccgacggtcag

SEQ ID NO: 1210341 - DNA, 25 bp, Homo sapien
ctgttctccatgccgacggtcagca

SEQ ID NO: 1210342 - DNA, 25 bp, Homo sapien
cctcctgttctccatgccgacggtc

SEQ ID NO: 1210343 - DNA, 25 bp, Homo sapien
gagtcggtcagccagtaatgctcac

SEQ ID NO: 1210344 - DNA, 25 bp, Homo sapien
gggtagagtcggtcagccagtaatg

SEQ ID NO: 1210345 - DNA, 25 bp, Homo sapien
cagctggaattcccgcttggtccac

SEQ ID NO: 1210346 - DNA, 25 bp, Homo sapien
tagagtcggtcagccagtaatgctc

SEQ ID NO: 1210347 - DNA, 25 bp, Homo sapien
tcaggtggtgaattgcagttactcc

SEQ ID NO: 1210348 - DNA, 25 bp, Homo sapien
gtggtgaattgcagttactccaccc

SEQ ID NO: 1210349 - DNA, 25 bp, Homo sapien
caggtggtgaattgcagttactcca

SEQ ID NO: 1210350 - DNA, 25 bp, Homo sapien
tgaattgcagttactccaccctccg

SEQ ID NO: 1210351 - DNA, 25 bp, Homo sapien
cagctccataaaggtaagcagggag

SEQ ID NO: 1210352 - DNA, 25 bp, Homo sapien
tgtaccagctccataaaggtaagca

SEQ ID NO: 1210353 - DNA, 25 bp, Homo sapien
taccagctccataaaggtaagcagg

SEQ ID NO: 1210354 - DNA, 25 bp, Homo sapien
cctgtaccagctccataaaggtaag

SEQ ID NO: 1210355 - DNA, 25 bp, Homo sapien
cccgtgcatccagaatgcaaacaca

SEQ ID NO: 1210356 - DNA, 25 bp, Homo sapien
agcagcctcaacagggccacgaagg

SEQ ID NO: 1210357 - DNA, 25 bp, Homo sapien
acgaaggtgcccgtctggcccatgc

SEQ ID NO: 1210358 - DNA, 25 bp, Homo sapien
catgaggggcccgtgcatccagaat

SEQ ID NO: 1210359 - DNA, 25 bp, Homo sapien
gcaaggcagggatcgggtaggaggg

SEQ ID NO: 1210360 - DNA, 25 bp, Homo sapien
cctccaccgctctatggtgtcaaag

SEQ ID NO: 1210361 - DNA, 25 bp, Homo sapien
tatggtgtcaaagctgacagggtcc

SEQ ID NO: 1210362 - DNA, 25 bp, Homo sapien
tcaaagctgacagggtcctgtccca

SEQ ID NO: 1210363 - DNA, 25 bp, Homo sapien
atcttgttcagtaggcagctgtgca

SEQ ID NO: 1210364 - DNA, 25 bp, Homo sapien
agaatcttgttcagtaggcagctgt

SEQ ID NO: 1210365 - DNA, 25 bp, Homo sapien
tccagaatcttgttcagtaggcagc

SEQ ID NO: 1210366 - DNA, 25 bp, Homo sapien
ccagaatcttgttcagtaggcagct

SEQ ID NO: 1210367 - DNA, 25 bp, Homo sapien
acacgcctgtgcgaagttcatcaca

SEQ ID NO: 1210368 - DNA, 25 bp, Homo sapien
ggcacacgcctgtgcgaagttcatc

SEQ ID NO: 1210369 - DNA, 25 bp, Homo sapien
gcacacgcctgtgcgaagttcatca

SEQ ID NO: 1210370 - DNA, 25 bp, Homo sapien
cacgcctgtgcgaagttcatcacag

SEQ ID NO: 1210371 - DNA, 25 bp, Homo sapien
gtaagagccagcctcgtccttgatg

SEQ ID NO: 1210372 - DNA, 25 bp, Homo sapien
gggctgtcctgctcatagccaggca

SEQ ID NO: 1210373 - DNA, 25 bp, Homo sapien
ccaggcaggggtgcgtaagagccag

SEQ ID NO: 1210374 - DNA, 25 bp, Homo sapien
ctgtcctgctcatagccaggcaggg

SEQ ID NO: 1210375 - DNA, 25 bp, Homo sapien
gtcaggggtgctctcctacactgga

SEQ ID NO: 1210376 - DNA, 25 bp, Homo sapien
tcaggggtgctctcctacactggag

SEQ ID NO: 1210377 - DNA, 25 bp, Homo sapien
cgtcaggggtgctctcctacactgg

SEQ ID NO: 1210378 - DNA, 25 bp, Homo sapien
gtcgtcaggggtgctctcctacact

SEQ ID NO: 1210379 - DNA, 25 bp, Homo sapien
ctgcagagcacagctcattggcttc

SEQ ID NO: 1210380 - DNA, 25 bp, Homo sapien
cccagcccacaactctgggagcccc

SEQ ID NO: 1210381 - DNA, 25 bp, Homo sapien
tccagagactgagggtgtcccctgc

SEQ ID NO: 1210382 - DNA, 25 bp, Homo sapien
attggcttccagagactgagggtgt

SEQ ID NO: 1210383 - DNA, 25 bp, Homo sapien
gtcagcaccatatgatcacagccag

SEQ ID NO: 1210384 - DNA, 25 bp, Homo sapien
gcaccatatgatcacagccagaggg

SEQ ID NO: 1210385 - DNA, 25 bp, Homo sapien
agtcagcaccatatgatcacagcca

SEQ ID NO: 1210386 - DNA, 25 bp, Homo sapien
catatgatcacagccagagggccca

SEQ ID NO: 1210387 - DNA, 25 bp, Homo sapien
cttctccatggcatcgagtgggcac

SEQ ID NO: 1210388 - DNA, 25 bp, Homo sapien
tctccatggcatcgagtgggcacag

SEQ ID NO: 1210389 - DNA, 25 bp, Homo sapien
ccatggcatcgagtgggcacagaga

SEQ ID NO: 1210390 - DNA, 25 bp, Homo sapien
gcatcgagtgggcacagagagacaa

SEQ ID NO: 1210391 - DNA, 25 bp, Homo sapien
ccctggttagacagcaccacaaact

SEQ ID NO: 1210392 - DNA, 25 bp, Homo sapien
gcccctgccctggttagacagcacc

SEQ ID NO: 1210393 - DNA, 25 bp, Homo sapien
ctgccctggttagacagcaccacaa

SEQ ID NO: 1210394 - DNA, 25 bp, Homo sapien
caaactacccgcctccaacctcagc

SEQ ID NO: 1210395 - DNA, 25 bp, Homo sapien
tgtcaccatgtctgtgactatgggc

SEQ ID NO: 1210396 - DNA, 25 bp, Homo sapien
tgtgtgaccctgaagagggcacaga

SEQ ID NO: 1210397 - DNA, 25 bp, Homo sapien
gccacccagtgcactgtcaccatgt

SEQ ID NO: 1210398 - DNA, 25 bp, Homo sapien
catgtctgtgactatgggctgcatc

SEQ ID NO: 1210399 - DNA, 25 bp, Homo sapien
acacaccaccccatgccctgtggcc

SEQ ID NO: 1210400 - DNA, 25 bp, Homo sapien
gcagagggagcccacacaggactct

SEQ ID NO: 1210401 - DNA, 25 bp, Homo sapien
agagggagcccacacaggactcttc

SEQ ID NO: 1210402 - DNA, 25 bp, Homo sapien
agggagcccacacaggactcttctc

SEQ ID NO: 1210403 - DNA, 25 bp, Homo sapien
tccccctcgggcaaagacatgatcg

SEQ ID NO: 1210404 - DNA, 25 bp, Homo sapien
ggcaaagacatgatcggcattggtg

SEQ ID NO: 1210405 - DNA, 25 bp, Homo sapien
tcgggcaaagacatgatcggcattg

SEQ ID NO: 1210406 - DNA, 25 bp, Homo sapien
cctcgggcaaagacatgatcggcat

SEQ ID NO: 1210407 - DNA, 25 bp, Homo sapien
gctgagcagtgtgcccggcttcttg

SEQ ID NO: 1210408 - DNA, 25 bp, Homo sapien
tcccccaagaccattgtccagcaac

SEQ ID NO: 1210409 - DNA, 25 bp, Homo sapien
gtccttttggcccataacccaagca

SEQ ID NO: 1210410 - DNA, 25 bp, Homo sapien
ggagatctgaggctatgccagaggg

SEQ ID NO: 1210411 - DNA, 25 bp, Homo sapien
ggaggggcttccagtgtccactccc

SEQ ID NO: 1210412 - DNA, 25 bp, Homo sapien
atctgcaaaaatccaacctgggtgc

SEQ ID NO: 1210413 - DNA, 25 bp, Homo sapien
gggtgtccggggatctgcaaaaatc

SEQ ID NO: 1210414 - DNA, 25 bp, Homo sapien
ggtgtccggggatctgcaaaaatcc

SEQ ID NO: 1210415 - DNA, 25 bp, Homo sapien
tgaggtacctaaagggggtgtggca

SEQ ID NO: 1210416 - DNA, 25 bp, Homo sapien
cacgttaaagacatccacggtgcac

SEQ ID NO: 1210417 - DNA, 25 bp, Homo sapien
aagacatccacggtgcactcagacc

SEQ ID NO: 1210418 - DNA, 25 bp, Homo sapien
gcagggccacgttaaagacatccac

SEQ ID NO: 1210419 - DNA, 25 bp, Homo sapien
gttaaagacatccacggtgcactca

SEQ ID NO: 1210420 - DNA, 25 bp, Homo sapien
acctggtggctacccgggtggtgct

SEQ ID NO: 1210421 - DNA, 25 bp, Homo sapien
ggagaatgcacagaggtccacagcg

SEQ ID NO: 1210422 - DNA, 25 bp, Homo sapien
gacatagggttaggaggctcgcccc

SEQ ID NO: 1210423 - DNA, 25 bp, Homo sapien
gcctgccccaatctaacagaaaagg

SEQ ID NO: 1210424 - DNA, 25 bp, Homo sapien
agtgccgactcaggggcagcccgtc

SEQ ID NO: 1210425 - DNA, 25 bp, Homo sapien
tctgccagtgcgctgttcagacaat

SEQ ID NO: 1210426 - DNA, 25 bp, Homo sapien
cagacaattgtagaggtagatatac

SEQ ID NO: 1210427 - DNA, 25 bp, Homo sapien
cagtgccgactcaggggcagcccgt

SEQ ID NO: 1210428 - DNA, 25 bp, Homo sapien
tccaagaccctttacctttgcagca

SEQ ID NO: 1210429 - DNA, 25 bp, Homo sapien
tattccaagaccctttacctttgca

SEQ ID NO: 1210430 - DNA, 25 bp, Homo sapien
gaccctttacctttgcagcacaggg

SEQ ID NO: 1210431 - DNA, 25 bp, Homo sapien
cccacgtggatgtgtcaggaatgct

SEQ ID NO: 1210432 - DNA, 25 bp, Homo sapien
ctactgcatacagcgtggtgcgtac

SEQ ID NO: 1210433 - DNA, 25 bp, Homo sapien
ctgcatacagcgtggtgcgtacagg

SEQ ID NO: 1210434 - DNA, 25 bp, Homo sapien
gacgaacaatttggagctgtgattc

SEQ ID NO: 1210435 - DNA, 25 bp, Homo sapien
gcagaggacgaacaatttggagctg

SEQ ID NO: 1210436 - DNA, 25 bp, Homo sapien
tgcaccgtcggtggggaccgcccca

SEQ ID NO: 1210437 - DNA, 25 bp, Homo sapien
cccggcgggctgcaccgtcggtggg

SEQ ID NO: 1210438 - DNA, 25 bp, Homo sapien
ttcctcccggtcccggcgggctgca

SEQ ID NO: 1210439 - DNA, 25 bp, Homo sapien
ggcgcgatggccgcagctgcttcct

SEQ ID NO: 1210440 - DNA, 25 bp, Homo sapien
tcggcggtcgggctactggggcacc

SEQ ID NO: 1210441 - DNA, 25 bp, Homo sapien
gcggtcgggctactggggcacctgg

SEQ ID NO: 1210442 - DNA, 25 bp, Homo sapien
cggcggtcgggctactggggcacct

SEQ ID NO: 1210443 - DNA, 25 bp, Homo sapien
ggtcgggctactggggcacctggcg

SEQ ID NO: 1210444 - DNA, 25 bp, Homo sapien
cgcacagcgcggcgcaaagccatag

SEQ ID NO: 1210445 - DNA, 25 bp, Homo sapien
ggcgcaaagccatagcgcccggagc

SEQ ID NO: 1210446 - DNA, 25 bp, Homo sapien
acagcgcggcgcaaagccatagcgc

SEQ ID NO: 1210447 - DNA, 25 bp, Homo sapien
ccggccctccgggaagcgcacagcg

SEQ ID NO: 1210448 - DNA, 25 bp, Homo sapien
cccggaacggcggacagcccgagct

SEQ ID NO: 1210449 - DNA, 25 bp, Homo sapien
gcccgagctcagagcagtcggcaga

SEQ ID NO: 1210450 - DNA, 25 bp, Homo sapien
cggaacggcggacagcccgagctca

SEQ ID NO: 1210451 - DNA, 25 bp, Homo sapien
acagcccgagctcagagcagtcggc

SEQ ID NO: 1210452 - DNA, 25 bp, Homo sapien
gccttttggagtggagggggacatc

SEQ ID NO: 1210453 - DNA, 25 bp, Homo sapien
cagcctgtgccttttggagtggagg

SEQ ID NO: 1210454 - DNA, 25 bp, Homo sapien
tggcccacagcctgtgccttttgga

SEQ ID NO: 1210455 - DNA, 25 bp, Homo sapien
cccacagcctgtgccttttggagtg

SEQ ID NO: 1210456 - DNA, 25 bp, Homo sapien
cctcctgggacctgttctcccatgt

SEQ ID NO: 1210457 - DNA, 25 bp, Homo sapien
tcctcctgggacctgttctcccatg

SEQ ID NO: 1210458 - DNA, 25 bp, Homo sapien
tccttttgctgattccaaaataact

SEQ ID NO: 1210459 - DNA, 25 bp, Homo sapien
tgctgattccaaaataactctctgc

SEQ ID NO: 1210460 - DNA, 25 bp, Homo sapien
atgtccttttgctgattccaaaata

SEQ ID NO: 1210461 - DNA, 25 bp, Homo sapien
tttgctgattccaaaataactctct

SEQ ID NO: 1210462 - DNA, 25 bp, Homo sapien
gggcttccgcattaggagcatcagt

SEQ ID NO: 1210463 - DNA, 25 bp, Homo sapien
ttcctttgcaccacaaccgcctttc

SEQ ID NO: 1210464 - DNA, 25 bp, Homo sapien
catcagttagacacaagcgttccct

SEQ ID NO: 1210465 - DNA, 25 bp, Homo sapien
aaccgcctttcaggggcttccgcat

SEQ ID NO: 1210466 - DNA, 25 bp, Homo sapien
gcagagatgattattgacacttgac

SEQ ID NO: 1210467 - DNA, 25 bp, Homo sapien
tgttcgtcctagcttgtttggaatt

SEQ ID NO: 1210468 - DNA, 25 bp, Homo sapien
ctttgttcgtcctagcttgtttgga

SEQ ID NO: 1210469 - DNA, 25 bp, Homo sapien
cgtcctagcttgtttggaattggat

SEQ ID NO: 1210470 - DNA, 25 bp, Homo sapien
cctagcttgtttggaattggatgga

SEQ ID NO: 1210471 - DNA, 25 bp, Homo sapien
ctgggcgcaccgcgccgtgcactcc

SEQ ID NO: 1210472 - DNA, 25 bp, Homo sapien
gcgcaccgcgccgtgcactcccagc

SEQ ID NO: 1210473 - DNA, 25 bp, Homo sapien
gagaggttctgtcccgccctcgctg

SEQ ID NO: 1210474 - DNA, 25 bp, Homo sapien
gccctcgctgagcggccctctccct

SEQ ID NO: 1210475 - DNA, 25 bp, Homo sapien
aaatataaaacacagtgctggccgg

SEQ ID NO: 1210476 - DNA, 25 bp, Homo sapien
tataaaacacagtgctggccgggcg

SEQ ID NO: 1210477 - DNA, 25 bp, Homo sapien
actccgaacgggacgacagaatgag

SEQ ID NO: 1210478 - DNA, 25 bp, Homo sapien
cactgcactccgaacgggacgacag

SEQ ID NO: 1210479 - DNA, 25 bp, Homo sapien
ttggcatcttcttcacagtttgtgc

SEQ ID NO: 1210480 - DNA, 25 bp, Homo sapien
tgttggcatcttcttcacagtttgt

SEQ ID NO: 1210481 - DNA, 25 bp, Homo sapien
cctgtgttggcatcttcttcacagt

SEQ ID NO: 1210482 - DNA, 25 bp, Homo sapien
tgtgttggcatcttcttcacagttt

SEQ ID NO: 1210483 - DNA, 25 bp, Homo sapien
agctcctccaagaagcgcaggtggt

SEQ ID NO: 1210484 - DNA, 25 bp, Homo sapien
tccaagaagcgcaggtggtggaaga

SEQ ID NO: 1210485 - DNA, 25 bp, Homo sapien
gctgaagctctgtgaggttgttcat

SEQ ID NO: 1210486 - DNA, 25 bp, Homo sapien
ggccaggctgaagctctgtgaggtt

SEQ ID NO: 1210487 - DNA, 25 bp, Homo sapien
ttttcaggctgtagagaccagagaa

SEQ ID NO: 1210488 - DNA, 25 bp, Homo sapien
tgtcctgggatgtgtgagagatggt

SEQ ID NO: 1210489 - DNA, 25 bp, Homo sapien
tgtagagaccagagaatgcttgtcc

SEQ ID NO: 1210490 - DNA, 25 bp, Homo sapien
gaccagagaatgcttgtcctgggat

SEQ ID NO: 1210491 - DNA, 25 bp, Homo sapien
ggtggcacatcacacgtatgagtgt

SEQ ID NO: 1210492 - DNA, 25 bp, Homo sapien
acacgtatgagtgtgaacaccgatc

SEQ ID NO: 1210493 - DNA, 25 bp, Homo sapien
gggtggcacatcacacgtatgagtg

SEQ ID NO: 1210494 - DNA, 25 bp, Homo sapien
agggtggcacatcacacgtatgagt

SEQ ID NO: 1210495 - DNA, 25 bp, Homo sapien
tcccagctgattgttctgcagcatc

SEQ ID NO: 1210496 - DNA, 25 bp, Homo sapien
tgcggggattcctcccagctgattg

SEQ ID NO: 1210497 - DNA, 25 bp, Homo sapien
ccacagcgcctctgcggggattcct

SEQ ID NO: 1210498 - DNA, 25 bp, Homo sapien
ctcccagctgattgttctgcagcat

SEQ ID NO: 1210499 - DNA, 25 bp, Homo sapien
cgagacgccccctgtttataggaga

SEQ ID NO: 1210500 - DNA, 25 bp, Homo sapien
gcagttacgtcagaccgagacgccc

SEQ ID NO: 1210501 - DNA, 25 bp, Homo sapien
ggctgacgccattttgggggctgac

SEQ ID NO: 1210502 - DNA, 25 bp, Homo sapien
gtcagaccgagacgccccctgttta

SEQ ID NO: 1210503 - DNA, 25 bp, Homo sapien
ttgtgctgttcattcgttctttcat

SEQ ID NO: 1210504 - DNA, 25 bp, Homo sapien
gagctccccaggacccagaccagcg

SEQ ID NO: 1210505 - DNA, 25 bp, Homo sapien
agcgcagcccccacttcttctgctt

SEQ ID NO: 1210506 - DNA, 25 bp, Homo sapien
ccaggacccagaccagcgcagcccc

SEQ ID NO: 1210507 - DNA, 25 bp, Homo sapien
ctccccaggacccagaccagcgcag

SEQ ID NO: 1210508 - DNA, 25 bp, Homo sapien
gcaataaaggcaggacaccttctgg

SEQ ID NO: 1210509 - DNA, 25 bp, Homo sapien
ctcaccaggcaataaaggcaggaca

SEQ ID NO: 1210510 - DNA, 25 bp, Homo sapien
ccagaaaggtgctgcactccccact

SEQ ID NO: 1210511 - DNA, 25 bp, Homo sapien
ccaggcaataaaggcaggacacctt

SEQ ID NO: 1210512 - DNA, 25 bp, Homo sapien
ggtaagaatgcttcgcctgtagatg

SEQ ID NO: 1210513 - DNA, 25 bp, Homo sapien
gcttcgcctgtagatgaagaactga

SEQ ID NO: 1210514 - DNA, 25 bp, Homo sapien
cctgtagatgaagaactgatggaca

SEQ ID NO: 1210515 - DNA, 25 bp, Homo sapien
tcagaagggtaagaatgcttcgcct

SEQ ID NO: 1210516 - DNA, 25 bp, Homo sapien
tggatttcctatacaatcagtcacc

SEQ ID NO: 1210517 - DNA, 25 bp, Homo sapien
ttcctatacaatcagtcaccaggtc

SEQ ID NO: 1210518 - DNA, 25 bp, Homo sapien
ggatttcctatacaatcagtcacca

SEQ ID NO: 1210519 - DNA, 25 bp, Homo sapien
cctggatttcctatacaatcagtca

SEQ ID NO: 1210520 - DNA, 25 bp, Homo sapien
tctgcagcctgagcggggaagggcg

SEQ ID NO: 1210521 - DNA, 25 bp, Homo sapien
ctctgcagcctgagcggggaagggc

SEQ ID NO: 1210522 - DNA, 25 bp, Homo sapien
cggcaagggagtgctccacggactc

SEQ ID NO: 1210523 - DNA, 25 bp, Homo sapien
gattggtccacaagtacccaccaca

SEQ ID NO: 1210524 - DNA, 25 bp, Homo sapien
cccacacccccgtgctgaagccata

SEQ ID NO: 1210525 - DNA, 25 bp, Homo sapien
acccccgtgctgaagccataatccc

SEQ ID NO: 1210526 - DNA, 25 bp, Homo sapien
tgattggtccacaagtacccaccac

SEQ ID NO: 1210527 - DNA, 25 bp, Homo sapien
gctgttccctcctatactcagcatc

SEQ ID NO: 1210528 - DNA, 25 bp, Homo sapien
tgttccctcctatactcagcatctt

SEQ ID NO: 1210529 - DNA, 25 bp, Homo sapien
tccctcctatactcagcatcttcca

SEQ ID NO: 1210530 - DNA, 25 bp, Homo sapien
gtgctgttccctcctatactcagca

SEQ ID NO: 1210531 - DNA, 25 bp, Homo sapien
atctttggatctttgtataggttga

SEQ ID NO: 1210532 - DNA, 25 bp, Homo sapien
gatctttgtataggttgatgcccct

SEQ ID NO: 1210533 - DNA, 25 bp, Homo sapien
ttggatctttgtataggttgatgcc

SEQ ID NO: 1210534 - DNA, 25 bp, Homo sapien
ctttggatctttgtataggttgatg

SEQ ID NO: 1210535 - DNA, 25 bp, Homo sapien
agagcccaaaagtgacaactctggg

SEQ ID NO: 1210536 - DNA, 25 bp, Homo sapien
gagtcggagcctgagtactcctggt

SEQ ID NO: 1210537 - DNA, 25 bp, Homo sapien
cctgaagagcccaaaagtgacaact

SEQ ID NO: 1210538 - DNA, 25 bp, Homo sapien
gagtactcctggtgggacagtccca

SEQ ID NO: 1210539 - DNA, 25 bp, Homo sapien
gattgcctggagggaccaacggccc

SEQ ID NO: 1210540 - DNA, 25 bp, Homo sapien
ctggagggaccaacggccctgaccg

SEQ ID NO: 1210541 - DNA, 25 bp, Homo sapien
tgcctggagggaccaacggccctga

SEQ ID NO: 1210542 - DNA, 25 bp, Homo sapien
tggagggaccaacggccctgaccga

SEQ ID NO: 1210543 - DNA, 25 bp, Homo sapien
cacaggccagttcgggcttgcttag

SEQ ID NO: 1210544 - DNA, 25 bp, Homo sapien
tgcttaggctctggggaaacagctt

SEQ ID NO: 1210545 - DNA, 25 bp, Homo sapien
gaaacagcttaacctgtcgagggcc

SEQ ID NO: 1210546 - DNA, 25 bp, Homo sapien
tggggcagattagcagggacctcac

SEQ ID NO: 1210547 - DNA, 25 bp, Homo sapien
gacccaaggctgaacccatagcctg

SEQ ID NO: 1210548 - DNA, 25 bp, Homo sapien
gctgaacccatagcctgtttgtgga

SEQ ID NO: 1210549 - DNA, 25 bp, Homo sapien
catagcctgtttgtggatagccagt

SEQ ID NO: 1210550 - DNA, 25 bp, Homo sapien
gatagccagtatttcccttcacatc

SEQ ID NO: 1210551 - DNA, 25 bp, Homo sapien
gcattgtcgtccagccagaggtggc

SEQ ID NO: 1210552 - DNA, 25 bp, Homo sapien
ggccctgacagggatctccgtgagt

SEQ ID NO: 1210553 - DNA, 25 bp, Homo sapien
tgagattctggaacgcgtagtcggg

SEQ ID NO: 1210554 - DNA, 25 bp, Homo sapien
tgatgcggttgagggccagggtcat

SEQ ID NO: 1210555 - DNA, 25 bp, Homo sapien
ctgtgggtccccagatgctggatgc

SEQ ID NO: 1210556 - DNA, 25 bp, Homo sapien
ctggatgcggttgttatgcaaatgc

SEQ ID NO: 1210557 - DNA, 25 bp, Homo sapien
attgtgcagcccctcgaagctgtgg

SEQ ID NO: 1210558 - DNA, 25 bp, Homo sapien
tgcagcccctcgaagctgtgggtcc

SEQ ID NO: 1210559 - DNA, 25 bp, Homo sapien
gcccacactccagggttcatggcat

SEQ ID NO: 1210560 - DNA, 25 bp, Homo sapien
aactccaaacactgccctaaaagct

SEQ ID NO: 1210561 - DNA, 25 bp, Homo sapien
agcgcccacactccagggttcatgg

SEQ ID NO: 1210562 - DNA, 25 bp, Homo sapien
aaagctcttatatctcctgagggaa

SEQ ID NO: 1210563 - DNA, 25 bp, Homo sapien
agctccagccaaaccgcagcttggg

SEQ ID NO: 1210564 - DNA, 25 bp, Homo sapien
ttagaggagtctgcagaggagccaa

SEQ ID NO: 1210565 - DNA, 25 bp, Homo sapien
tgggccgcaggggtttgatcttccc

SEQ ID NO: 1210566 - DNA, 25 bp, Homo sapien
agaggagccaaaccacagctccagc

SEQ ID NO: 1210567 - DNA, 25 bp, Homo sapien
gtatggctgggggccgctttcccca

SEQ ID NO: 1210568 - DNA, 25 bp, Homo sapien
cccctcctccccaggtggtatggct

SEQ ID NO: 1210569 - DNA, 25 bp, Homo sapien
ctcctccccaggtggtatggctggg

SEQ ID NO: 1210570 - DNA, 25 bp, Homo sapien
caggtggtatggctgggggccgctt

SEQ ID NO: 1210571 - DNA, 25 bp, Homo sapien
tcctgtcccaggcccctgttgaatg

SEQ ID NO: 1210572 - DNA, 25 bp, Homo sapien
cccaggcccctgttgaatgctggtc

SEQ ID NO: 1210573 - DNA, 25 bp, Homo sapien
tcccaggcccctgttgaatgctggt

SEQ ID NO: 1210574 - DNA, 25 bp, Homo sapien
tgtcccaggcccctgttgaatgctg

SEQ ID NO: 1210575 - DNA, 25 bp, Homo sapien
ggtcacagaacgcaacacaaactca

SEQ ID NO: 1210576 - DNA, 25 bp, Homo sapien
cacaaactcattgggcagctcaatt

SEQ ID NO: 1210577 - DNA, 25 bp, Homo sapien
ctcattgggcagctcaattttctgc

SEQ ID NO: 1210578 - DNA, 25 bp, Homo sapien
taactcgtcacggtcacagaacgca

SEQ ID NO: 1210579 - DNA, 25 bp, Homo sapien
aagttttgtccccattgccagcagg

SEQ ID NO: 1210580 - DNA, 25 bp, Homo sapien
cagagggggtagagttcacagtgga

SEQ ID NO: 1210581 - DNA, 25 bp, Homo sapien
gggtgcctggagcagtcggcagagg

SEQ ID NO: 1210582 - DNA, 25 bp, Homo sapien
tcggcagagggggtagagttcacag

SEQ ID NO: 1210583 - DNA, 25 bp, Homo sapien
aaagctggggtcttgcagttctgaa

SEQ ID NO: 1210584 - DNA, 25 bp, Homo sapien
tggtcaaaagctggggtcttgcagt

SEQ ID NO: 1210585 - DNA, 25 bp, Homo sapien
tgttggtcaaaagctggggtcttgc

SEQ ID NO: 1210586 - DNA, 25 bp, Homo sapien
tcaaaagctggggtcttgcagttct

SEQ ID NO: 1210587 - DNA, 25 bp, Homo sapien
tggcccgataatctttcccagagac

SEQ ID NO: 1210588 - DNA, 25 bp, Homo sapien
acagcagaatgtggcccgataatct

SEQ ID NO: 1210589 - DNA, 25 bp, Homo sapien
agaatgtggcccgataatctttccc

SEQ ID NO: 1210590 - DNA, 25 bp, Homo sapien
aatgtggcccgataatctttcccag

SEQ ID NO: 1210591 - DNA, 25 bp, Homo sapien
tggatgtttggggcccgttaatgca

SEQ ID NO: 1210592 - DNA, 25 bp, Homo sapien
ctggatgtttggggcccgttaatgc

SEQ ID NO: 1210593 - DNA, 25 bp, Homo sapien
ttttctgggattttcgtcctctgca

SEQ ID NO: 1210594 - DNA, 25 bp, Homo sapien
ttctgggattttcgtcctctgcatg

SEQ ID NO: 1210595 - DNA, 25 bp, Homo sapien
tgggattttcgtcctctgcatgcat

SEQ ID NO: 1210596 - DNA, 25 bp, Homo sapien
acttttctgggattttcgtcctctg

SEQ ID NO: 1210597 - DNA, 25 bp, Homo sapien
acatcctcagctgttaaaatcctag

SEQ ID NO: 1210598 - DNA, 25 bp, Homo sapien
ttccccacatcctcagctgttaaaa

SEQ ID NO: 1210599 - DNA, 25 bp, Homo sapien
cctcagctgttaaaatcctagtcat

SEQ ID NO: 1210600 - DNA, 25 bp, Homo sapien
ccacatcctcagctgttaaaatcct

SEQ ID NO: 1210601 - DNA, 25 bp, Homo sapien
tggccacagggaactcctgcagctt

SEQ ID NO: 1210602 - DNA, 25 bp, Homo sapien
ctcctgcagcttgttataattcagg

SEQ ID NO: 1210603 - DNA, 25 bp, Homo sapien
agtctgcccagggtccggatggcca

SEQ ID NO: 1210604 - DNA, 25 bp, Homo sapien
agttcctgcagtctgcccagggtcc

SEQ ID NO: 1210605 - DNA, 25 bp, Homo sapien
cttgatgttgttgttatggaacccc

SEQ ID NO: 1210606 - DNA, 25 bp, Homo sapien
atcgtctgtagcagagggttcccca

SEQ ID NO: 1210607 - DNA, 25 bp, Homo sapien
agtgtgtggagtttaggcaggtact

SEQ ID NO: 1210608 - DNA, 25 bp, Homo sapien
gaatgccgatcttcccacaaactgg

SEQ ID NO: 1210609 - DNA, 25 bp, Homo sapien
cacaaactggattgggttatcataa

SEQ ID NO: 1210610 - DNA, 25 bp, Homo sapien
aggcaggtactggaatgccgatctt

SEQ ID NO: 1210611 - DNA, 25 bp, Homo sapien
cctgcatgcaacagcagcgcagaaa

SEQ ID NO: 1210612 - DNA, 25 bp, Homo sapien
gggcctgcatgcaacagcagcgcag

SEQ ID NO: 1210613 - DNA, 25 bp, Homo sapien
gcagcgcagaaaattgagtgttgtg

SEQ ID NO: 1210614 - DNA, 25 bp, Homo sapien
caacagcagcgcagaaaattgagtg

SEQ ID NO: 1210615 - DNA, 25 bp, Homo sapien
tcctggatgtccatggcaccattca

SEQ ID NO: 1210616 - DNA, 25 bp, Homo sapien
ctcctggatgtccatggcaccattc

SEQ ID NO: 1210617 - DNA, 25 bp, Homo sapien
gcacatccccgatgggagcagccgg

SEQ ID NO: 1210618 - DNA, 25 bp, Homo sapien
agctgttggcacatccccgatggga

SEQ ID NO: 1210619 - DNA, 25 bp, Homo sapien
ctgttggcacatccccgatgggagc

SEQ ID NO: 1210620 - DNA, 25 bp, Homo sapien
agccggatgcctgcgcgggtcaggg

SEQ ID NO: 1210621 - DNA, 25 bp, Homo sapien
agctcctcaatttgattgtgagaca

SEQ ID NO: 1210622 - DNA, 25 bp, Homo sapien
ggcagctcctcaatttgattgtgag

SEQ ID NO: 1210623 - DNA, 25 bp, Homo sapien
ctcaatttgattgtgagacagttcc

SEQ ID NO: 1210624 - DNA, 25 bp, Homo sapien
tcctcaatttgattgtgagacagtt

SEQ ID NO: 1210625 - DNA, 25 bp, Homo sapien
gaggctggatgagccggcaggctca

SEQ ID NO: 1210626 - DNA, 25 bp, Homo sapien
gccccccgagcactgggaggaagaa

SEQ ID NO: 1210627 - DNA, 25 bp, Homo sapien
catgccccccgagcactgggaggaa

SEQ ID NO: 1210628 - DNA, 25 bp, Homo sapien
tcagaccctggctccgctccatgcc

SEQ ID NO: 1210629 - DNA, 25 bp, Homo sapien
ccaatttcccagatgcggttgtgtt

SEQ ID NO: 1210630 - DNA, 25 bp, Homo sapien
tcccagatgcggttgtgttggaggc

SEQ ID NO: 1210631 - DNA, 25 bp, Homo sapien
aatttcccagatgcggttgtgttgg

SEQ ID NO: 1210632 - DNA, 25 bp, Homo sapien
tttcccagatgcggttgtgttggag

SEQ ID NO: 1210633 - DNA, 25 bp, Homo sapien
ggatggaccggatggcgttccagct

SEQ ID NO: 1210634 - DNA, 25 bp, Homo sapien
ggaccggatggcgttccagctaaga

SEQ ID NO: 1210635 - DNA, 25 bp, Homo sapien
gatggaccggatggcgttccagcta

SEQ ID NO: 1210636 - DNA, 25 bp, Homo sapien
ccggatggcgttccagctaagatcc

SEQ ID NO: 1210637 - DNA, 25 bp, Homo sapien
ctcagttttgggaaactgtccttgg

SEQ ID NO: 1210638 - DNA, 25 bp, Homo sapien
tccctttgagcttcagatgcatcaa

SEQ ID NO: 1210639 - DNA, 25 bp, Homo sapien
ttccctttgagcttcagatgcatca

SEQ ID NO: 1210640 - DNA, 25 bp, Homo sapien
cagttttgggaaactgtccttggag

SEQ ID NO: 1210641 - DNA, 25 bp, Homo sapien
tgcccagaggccttgaagaagctgg

SEQ ID NO: 1210642 - DNA, 25 bp, Homo sapien
acacatcccatagggacagcactgg

SEQ ID NO: 1210643 - DNA, 25 bp, Homo sapien
gctggcacacatcccatagggacag

SEQ ID NO: 1210644 - DNA, 25 bp, Homo sapien
tagggacagcactggtaggcataag

SEQ ID NO: 1210645 - DNA, 25 bp, Homo sapien
ctggagtagggctacactggacact

SEQ ID NO: 1210646 - DNA, 25 bp, Homo sapien
ggagtagggctacactggacactgg

SEQ ID NO: 1210647 - DNA, 25 bp, Homo sapien
tggagtagggctacactggacactg

SEQ ID NO: 1210648 - DNA, 25 bp, Homo sapien
gagtagggctacactggacactggg

SEQ ID NO: 1210649 - DNA, 25 bp, Homo sapien
ggtgacctgttggagtcccacctgg

SEQ ID NO: 1210650 - DNA, 25 bp, Homo sapien
taacagagactgtaatcttcctggg

SEQ ID NO: 1210651 - DNA, 25 bp, Homo sapien
ttactcaaaagcagtcccacgtgcc

SEQ ID NO: 1210652 - DNA, 25 bp, Homo sapien
ttagatgctaaaggaggcttccgca

SEQ ID NO: 1210653 - DNA, 25 bp, Homo sapien
gagcccgtctgcgaagatgagccag

SEQ ID NO: 1210654 - DNA, 25 bp, Homo sapien
cacgaccaggaaacagaaggagttc

SEQ ID NO: 1210655 - DNA, 25 bp, Homo sapien
gcgggctccgtactcagagaactga

SEQ ID NO: 1210656 - DNA, 25 bp, Homo sapien
cagtccattgcagagcacggagagc

SEQ ID NO: 1210657 - DNA, 25 bp, Homo sapien
gaagccataggtctccagcccaggg

SEQ ID NO: 1210658 - DNA, 25 bp, Homo sapien
tgaggggaagccataggtctccagc

SEQ ID NO: 1210659 - DNA, 25 bp, Homo sapien
gaagcttccagaatgagatccacat

SEQ ID NO: 1210660 - DNA, 25 bp, Homo sapien
acctgctggcgtagatccctctgcc

SEQ ID NO: 1210661 - DNA, 25 bp, Homo sapien
caagccagagggctgaaagccgcca

SEQ ID NO: 1210662 - DNA, 25 bp, Homo sapien
aagccagagggctgaaagccgccac

SEQ ID NO: 1210663 - DNA, 25 bp, Homo sapien
tcccttaagcagacaaaagtccagg

SEQ ID NO: 1210664 - DNA, 25 bp, Homo sapien
gaggcacccgttggtgatggtcaca

SEQ ID NO: 1210665 - DNA, 25 bp, Homo sapien
ggtccacagcttcagacatgacaag

SEQ ID NO: 1210666 - DNA, 25 bp, Homo sapien
gactgggccatcctgctatagatca

SEQ ID NO: 1210667 - DNA, 25 bp, Homo sapien
ggacttatctctttattacactaac

SEQ ID NO: 1210668 - DNA, 25 bp, Homo sapien
gtaggacttatctctttattacact

SEQ ID NO: 1210669 - DNA, 25 bp, Homo sapien
tgtaggacttatctctttattacac

SEQ ID NO: 1210670 - DNA, 25 bp, Homo sapien
aggacttatctctttattacactaa

SEQ ID NO: 1210671 - DNA, 25 bp, Homo sapien
ctgggtaaacaaagttcaatagatt

SEQ ID NO: 1210672 - DNA, 25 bp, Homo sapien
actgggtaaacaaagttcaatagat

SEQ ID NO: 1210673 - DNA, 25 bp, Homo sapien
gacagtggtgctacccttcagcttg

SEQ ID NO: 1210674 - DNA, 25 bp, Homo sapien
cagacgtctggatctttagaagcag

SEQ ID NO: 1210675 - DNA, 25 bp, Homo sapien
gccacctgtagggagcagttcctgt

SEQ ID NO: 1210676 - DNA, 25 bp, Homo sapien
tatttcgggtaagtgtacatcgacc

SEQ ID NO: 1210677 - DNA, 25 bp, Homo sapien
ccgctgccgcctctctcagagcgct

SEQ ID NO: 1210678 - DNA, 25 bp, Homo sapien
gagcagagggcggagaccctcgcgc

SEQ ID NO: 1210679 - DNA, 25 bp, Homo sapien
gccatctttactcctcccgccagta

SEQ ID NO: 1210680 - DNA, 25 bp, Homo sapien
cactaaattactgttggggctcgag

SEQ ID NO: 1210681 - DNA, 25 bp, Homo sapien
gtgtccccgctagagcaggcggcca

SEQ ID NO: 1210682 - DNA, 25 bp, Homo sapien
tcagcacctcttgccagaagctttc

SEQ ID NO: 1210683 - DNA, 25 bp, Homo sapien
tggtgcagggctgtcaagccgtcca

SEQ ID NO: 1210684 - DNA, 25 bp, Homo sapien
cacgttgaccgtgttgatatcagca

SEQ ID NO: 1210685 - DNA, 25 bp, Homo sapien
tataagatattctataacggggaca

SEQ ID NO: 1210686 - DNA, 25 bp, Homo sapien
tgatataagatattctataacgggg

SEQ ID NO: 1210687 - DNA, 25 bp, Homo sapien
gatattctataacggggacacacaa

SEQ ID NO: 1210688 - DNA, 25 bp, Homo sapien
taagatattctataacggggacaca

SEQ ID NO: 1210689 - DNA, 25 bp, Homo sapien
gttaaggactctaggacaacacatg

SEQ ID NO: 1210690 - DNA, 25 bp, Homo sapien
cacagttggtcaagtggccatggcc

SEQ ID NO: 1210691 - DNA, 25 bp, Homo sapien
ggtggttcagctaccaacagctcca

SEQ ID NO: 1210692 - DNA, 25 bp, Homo sapien
tatctttgactcaagcacctcgtgg

SEQ ID NO: 1210693 - DNA, 25 bp, Homo sapien
ctcttcacaggagatctgattgttt

SEQ ID NO: 1210694 - DNA, 25 bp, Homo sapien
taagaaaccatattactgaactgga

SEQ ID NO: 1210695 - DNA, 25 bp, Homo sapien
ggctggcagttgacttagggaataa

SEQ ID NO: 1210696 - DNA, 25 bp, Homo sapien
aaagagtatggtacctcccacctct

SEQ ID NO: 1210697 - DNA, 25 bp, Homo sapien
cactgatggagtatttgcagaatcc

SEQ ID NO: 1210698 - DNA, 25 bp, Homo sapien
ggaacaaaaatgaccattgtcagca

SEQ ID NO: 1210699 - DNA, 25 bp, Homo sapien
agacgccaatgagaacaaaggcatc

SEQ ID NO: 1210700 - DNA, 25 bp, Homo sapien
caaaggcatcacctgaggagaggag

SEQ ID NO: 1210701 - DNA, 25 bp, Homo sapien
gacaataaggattgtggaagtagga

SEQ ID NO: 1210702 - DNA, 25 bp, Homo sapien
gtaggagaaggaaatgtattaagac

SEQ ID NO: 1210703 - DNA, 25 bp, Homo sapien
gtgaaaaatgatcagtgtggctgaa

SEQ ID NO: 1210704 - DNA, 25 bp, Homo sapien
gcatagaattcaaaaacgggaacaa

SEQ ID NO: 1210705 - DNA, 25 bp, Homo sapien
aagaggtgggtatacagcttgaaca

SEQ ID NO: 1210706 - DNA, 25 bp, Homo sapien
tctgtaaccaaagcaggcaacagcg

SEQ ID NO: 1210707 - DNA, 25 bp, Homo sapien
aagcttcagggctctactctcaggg

SEQ ID NO: 1210708 - DNA, 25 bp, Homo sapien
gagagaaggtatctattgacactga

SEQ ID NO: 1210709 - DNA, 25 bp, Homo sapien
cactcccacgctcatcaatacaaag

SEQ ID NO: 1210710 - DNA, 25 bp, Homo sapien
actcccacgctcatcaatacaaagg

SEQ ID NO: 1210711 - DNA, 25 bp, Homo sapien
ctcccacgctcatcaatacaaagga

SEQ ID NO: 1210712 - DNA, 25 bp, Homo sapien
cagtgtgtgatgtcccccttccagt

SEQ ID NO: 1210713 - DNA, 25 bp, Homo sapien
tttgtccttgccacagtttgctcag

SEQ ID NO: 1210714 - DNA, 25 bp, Homo sapien
agtgtgtgatgtcccccttccagtg

SEQ ID NO: 1210715 - DNA, 25 bp, Homo sapien
ccagtgtgtgatgtcccccttccag

SEQ ID NO: 1210716 - DNA, 25 bp, Homo sapien
aagactaagcagagatgatccccat

SEQ ID NO: 1210717 - DNA, 25 bp, Homo sapien
gagtagccaaatagctagccggcac

SEQ ID NO: 1210718 - DNA, 25 bp, Homo sapien
aaatagcagtataccaacagagacc

SEQ ID NO: 1210719 - DNA, 25 bp, Homo sapien
gacctcactccttaggctttcaggg

SEQ ID NO: 1210720 - DNA, 25 bp, Homo sapien
tcatttatcttcagtacacctgaag

SEQ ID NO: 1210721 - DNA, 25 bp, Homo sapien
tcagtacacctgaagataattcatt

SEQ ID NO: 1210722 - DNA, 25 bp, Homo sapien
cttcagtacacctgaagataattca

SEQ ID NO: 1210723 - DNA, 25 bp, Homo sapien
ttcagtacacctgaagataattcat

SEQ ID NO: 1210724 - DNA, 25 bp, Homo sapien
gaatttggcatactgtctcctaaaa

SEQ ID NO: 1210725 - DNA, 25 bp, Homo sapien
gctgagaactatccatttttccagt

SEQ ID NO: 1210726 - DNA, 25 bp, Homo sapien
tcagagcatgagatcatatactatg

SEQ ID NO: 1210727 - DNA, 25 bp, Homo sapien
tgcgtgtaatgcactagctgagaac

SEQ ID NO: 1210728 - DNA, 25 bp, Homo sapien
gatggtgagaactatatctgattat

SEQ ID NO: 1210729 - DNA, 25 bp, Homo sapien
tctcagatggtgagaactatatctg

SEQ ID NO: 1210730 - DNA, 25 bp, Homo sapien
tatctgattatgtactcagtggtca

SEQ ID NO: 1210731 - DNA, 25 bp, Homo sapien
attatgtactcagtggtcaggcagg

SEQ ID NO: 1210732 - DNA, 25 bp, Homo sapien
aattgatgaggtccctgtgaaaccc

SEQ ID NO: 1210733 - DNA, 25 bp, Homo sapien
gaatcagaacctagagagtctgcca

SEQ ID NO: 1210734 - DNA, 25 bp, Homo sapien
tgccccaactagacggccaagaaat

SEQ ID NO: 1210735 - DNA, 25 bp, Homo sapien
tgccaagaaattatacagctgtccc

SEQ ID NO: 1210736 - DNA, 25 bp, Homo sapien
gatttttcagcccacgctttccttg

SEQ ID NO: 1210737 - DNA, 25 bp, Homo sapien
caatacagagattggcatggcccct

SEQ ID NO: 1210738 - DNA, 25 bp, Homo sapien
tctgggcatatgttagaagctgggc

SEQ ID NO: 1210739 - DNA, 25 bp, Homo sapien
gaagctgggcttagtgcagcctaac

SEQ ID NO: 1210740 - DNA, 25 bp, Homo sapien
aacaacgtgttctaagctccttaag

SEQ ID NO: 1210741 - DNA, 25 bp, Homo sapien
tacacagagctatgctaaaccttcc

SEQ ID NO: 1210742 - DNA, 25 bp, Homo sapien
catggatgagagacatatagtccct

SEQ ID NO: 1210743 - DNA, 25 bp, Homo sapien
gcatggtagatgagcagattcgccc

SEQ ID NO: 1210744 - DNA, 25 bp, Homo sapien
tctgacttttatagccagtattcat

SEQ ID NO: 1210745 - DNA, 25 bp, Homo sapien
aatctgacttttatagccagtattc

SEQ ID NO: 1210746 - DNA, 25 bp, Homo sapien
ggccaatctgacttttatagccagt

SEQ ID NO: 1210747 - DNA, 25 bp, Homo sapien
ccaatctgacttttatagccagtat

SEQ ID NO: 1210748 - DNA, 25 bp, Homo sapien
aaacagaaacagtcacaaacagcaa

SEQ ID NO: 1210749 - DNA, 25 bp, Homo sapien
cataagacaaacagaaacagtcaca

SEQ ID NO: 1210750 - DNA, 25 bp, Homo sapien
acagaaacagtcacaaacagcaatg

SEQ ID NO: 1210751 - DNA, 25 bp, Homo sapien
taagacaaacagaaacagtcacaaa

SEQ ID NO: 1210752 - DNA, 25 bp, Homo sapien
tctgctatgttgagatagccacagg

SEQ ID NO: 1210753 - DNA, 25 bp, Homo sapien
tatgttgagatagccacaggaagct

SEQ ID NO: 1210754 - DNA, 25 bp, Homo sapien
gggtgtccagccctcgttgtcttgc

SEQ ID NO: 1210755 - DNA, 25 bp, Homo sapien
tgctggtttacattggctctgttct

SEQ ID NO: 1210756 - DNA, 25 bp, Homo sapien
gaagaagatccttcatggctggctc

SEQ ID NO: 1210757 - DNA, 25 bp, Homo sapien
agaagaagatccttcatggctggct

SEQ ID NO: 1210758 - DNA, 25 bp, Homo sapien
cagaagaagatccttcatggctggc

SEQ ID NO: 1210759 - DNA, 25 bp, Homo sapien
ccagaagaagatccttcatggctgg

SEQ ID NO: 1210760 - DNA, 25 bp, Homo sapien
ctgaggacttcagagtagcccttgg

SEQ ID NO: 1210761 - DNA, 25 bp, Homo sapien
gaggacttcagagtagcccttggca

SEQ ID NO: 1210762 - DNA, 25 bp, Homo sapien
tgaggacttcagagtagcccttggc

SEQ ID NO: 1210763 - DNA, 25 bp, Homo sapien
aggacttcagagtagcccttggcag

SEQ ID NO: 1210764 - DNA, 25 bp, Homo sapien
ggagtccagccatcataatcctgaa

SEQ ID NO: 1210765 - DNA, 25 bp, Homo sapien
cagccatcataatcctgaacattga

SEQ ID NO: 1210766 - DNA, 25 bp, Homo sapien
catcataatcctgaacattgagttc

SEQ ID NO: 1210767 - DNA, 25 bp, Homo sapien
gaggggagtccagccatcataatcc

SEQ ID NO: 1210768 - DNA, 25 bp, Homo sapien
gccacctggcaaataatcaagtgaa

SEQ ID NO: 1210769 - DNA, 25 bp, Homo sapien
cacacaggacacataacaagaaaca

SEQ ID NO: 1210770 - DNA, 25 bp, Homo sapien
aaaaggagcaccatgactgatagaa

SEQ ID NO: 1210771 - DNA, 25 bp, Homo sapien
tttctaatccttactgccacctggc

SEQ ID NO: 1210772 - DNA, 25 bp, Homo sapien
tccaaatgctccacgagaccctcat

SEQ ID NO: 1210773 - DNA, 25 bp, Homo sapien
ctccaaatgctccacgagaccctca

SEQ ID NO: 1210774 - DNA, 25 bp, Homo sapien
aaatgctccacgagaccctcatcag

SEQ ID NO: 1210775 - DNA, 25 bp, Homo sapien
caaatgctccacgagaccctcatca

SEQ ID NO: 1210776 - DNA, 25 bp, Homo sapien
tgctgttcagatctgactcaatgag

SEQ ID NO: 1210777 - DNA, 25 bp, Homo sapien
ttaaagaacccactctgaatcttgc

SEQ ID NO: 1210778 - DNA, 25 bp, Homo sapien
gactcaatgagtttattccgtgtct

SEQ ID NO: 1210779 - DNA, 25 bp, Homo sapien
gaatcttgctgttcagatctgactc

SEQ ID NO: 1210780 - DNA, 25 bp, Homo sapien
tcttgggacttaggtgtctcctcct

SEQ ID NO: 1210781 - DNA, 25 bp, Homo sapien
taggcagtgctagagggacataaac

SEQ ID NO: 1210782 - DNA, 25 bp, Homo sapien
gagttcccagccaaaatgatgagtg

SEQ ID NO: 1210783 - DNA, 25 bp, Homo sapien
tcctgaaggccagactatggagctt

SEQ ID NO: 1210784 - DNA, 25 bp, Homo sapien
caagagatctgacgcaagggtacaa

SEQ ID NO: 1210785 - DNA, 25 bp, Homo sapien
tggaatgattgacaaaggcttctgg

SEQ ID NO: 1210786 - DNA, 25 bp, Homo sapien
cagagaaggtattttgagctggtgc

SEQ ID NO: 1210787 - DNA, 25 bp, Homo sapien
cagagttggaatgattgacaaaggc

SEQ ID NO: 1210788 - DNA, 25 bp, Homo sapien
tttcagagttggaatgattgacaaa

SEQ ID NO: 1210789 - DNA, 25 bp, Homo sapien
gatggaagagcctcggtcccttata

SEQ ID NO: 1210790 - DNA, 25 bp, Homo sapien
tataggttccctggaattggccacc

SEQ ID NO: 1210791 - DNA, 25 bp, Homo sapien
gtttttctcagtcccaatctccatg

SEQ ID NO: 1210792 - DNA, 25 bp, Homo sapien
ttgtccagtagagcagaaatccgag

SEQ ID NO: 1210793 - DNA, 25 bp, Homo sapien
ttttttggtcaagcaaacaatagca

SEQ ID NO: 1210794 - DNA, 25 bp, Homo sapien
tccaaaatcaacttaaggactagaa

SEQ ID NO: 1210795 - DNA, 25 bp, Homo sapien
catttgttcctaagattgaattttc

SEQ ID NO: 1210796 - DNA, 25 bp, Homo sapien
aagcaaatagctacttgaataaact

SEQ ID NO: 1210797 - DNA, 25 bp, Homo sapien
gcgggggcagctctttcaggtcatc

SEQ ID NO: 1210798 - DNA, 25 bp, Homo sapien
gggggcagctctttcaggtcatctt

SEQ ID NO: 1210799 - DNA, 25 bp, Homo sapien
cgggggcagctctttcaggtcatct

SEQ ID NO: 1210800 - DNA, 25 bp, Homo sapien
gcgggctcaggctccatggcagcga

SEQ ID NO: 1210801 - DNA, 25 bp, Homo sapien
gctcaggctccatggcagcgaggaa

SEQ ID NO: 1210802 - DNA, 25 bp, Homo sapien
ccagggacggggcgggctcaggctc

SEQ ID NO: 1210803 - DNA, 25 bp, Homo sapien
gggacggggcgggctcaggctccat

SEQ ID NO: 1210804 - DNA, 25 bp, Homo sapien
ccttgactgggcggcttgaacccgg

SEQ ID NO: 1210805 - DNA, 25 bp, Homo sapien
gcccttgactgggcggcttgaaccc

SEQ ID NO: 1210806 - DNA, 25 bp, Homo sapien
tgactgggcggcttgaacccggcgg

SEQ ID NO: 1210807 - DNA, 25 bp, Homo sapien
ttgactgggcggcttgaacccggcg

SEQ ID NO: 1210808 - DNA, 25 bp, Homo sapien
cgtgcggtggatgtatgggctcctg

SEQ ID NO: 1210809 - DNA, 25 bp, Homo sapien
cgcgtgcggtggatgtatgggctcc

SEQ ID NO: 1210810 - DNA, 25 bp, Homo sapien
gggccgcgtgcggtggatgtatggg

SEQ ID NO: 1210811 - DNA, 25 bp, Homo sapien
cacagggccgcgtgcggtggatgta

SEQ ID NO: 1210812 - DNA, 25 bp, Homo sapien
tggtcttgatggcaaggtcatagga

SEQ ID NO: 1210813 - DNA, 25 bp, Homo sapien
ctgcttccggttggccagggccatg

SEQ ID NO: 1210814 - DNA, 25 bp, Homo sapien
gtagtgggcactgccgcactcctgc

SEQ ID NO: 1210815 - DNA, 25 bp, Homo sapien
tgaagtccgcccactggtagtgggc

SEQ ID NO: 1210816 - DNA, 25 bp, Homo sapien
ctgcgaggccgccaggttgttcaga

SEQ ID NO: 1210817 - DNA, 25 bp, Homo sapien
gcttcagctgcgaggccgccaggtt

SEQ ID NO: 1210818 - DNA, 25 bp, Homo sapien
tgcgaggccgccaggttgttcagac

SEQ ID NO: 1210819 - DNA, 25 bp, Homo sapien
cagctgcgaggccgccaggttgttc

SEQ ID NO: 1210820 - DNA, 25 bp, Homo sapien
ggaggacagccttgatattgtctgg

SEQ ID NO: 1210821 - DNA, 25 bp, Homo sapien
gtggaggacagccttgatattgtct

SEQ ID NO: 1210822 - DNA, 25 bp, Homo sapien
ctgtggaggacagccttgatattgt

SEQ ID NO: 1210823 - DNA, 25 bp, Homo sapien
gaggacagccttgatattgtctgga

SEQ ID NO: 1210824 - DNA, 25 bp, Homo sapien
accctgctgggccagtatcttgcct

SEQ ID NO: 1210825 - DNA, 25 bp, Homo sapien
agcttcaagagttctgcgtggatcg

SEQ ID NO: 1210826 - DNA, 25 bp, Homo sapien
cgtggatcgtcttgttggaaggttc

SEQ ID NO: 1210827 - DNA, 25 bp, Homo sapien
cattttccagtacagggcggtctcc

SEQ ID NO: 1210828 - DNA, 25 bp, Homo sapien
aaggcaacagcagtcgccccaaaca

SEQ ID NO: 1210829 - DNA, 25 bp, Homo sapien
ccccaaggcaacagcagtcgcccca

SEQ ID NO: 1210830 - DNA, 25 bp, Homo sapien
ccaaggcaacagcagtcgccccaaa

SEQ ID NO: 1210831 - DNA, 25 bp, Homo sapien
aggcaacagcagtcgccccaaacag

SEQ ID NO: 1210832 - DNA, 25 bp, Homo sapien
gctgtccccaaacctgttgaggaga

SEQ ID NO: 1210833 - DNA, 25 bp, Homo sapien
cactctgcgcattcctcctagaggg

SEQ ID NO: 1210834 - DNA, 25 bp, Homo sapien
taggaggctttattacactgtggca

SEQ ID NO: 1210835 - DNA, 25 bp, Homo sapien
gtccttgctgcctccaacttggaga

SEQ ID NO: 1210836 - DNA, 25 bp, Homo sapien
atcacttgtgctgttgagcttccgg

SEQ ID NO: 1210837 - DNA, 25 bp, Homo sapien
gctagtgaactaatatagcttttgt

SEQ ID NO: 1210838 - DNA, 25 bp, Homo sapien
tcacttgtgctgttgagcttccggg

SEQ ID NO: 1210839 - DNA, 25 bp, Homo sapien
gcttccggggtgctagtgaactaat

SEQ ID NO: 1210840 - DNA, 25 bp, Homo sapien
gagcaattgtctgtgggatttcatt

SEQ ID NO: 1210841 - DNA, 25 bp, Homo sapien
tataggagccactcctcactagatt

SEQ ID NO: 1210842 - DNA, 25 bp, Homo sapien
caagtaagttgatacataggtggag

SEQ ID NO: 1210843 - DNA, 25 bp, Homo sapien
tcatccctccatagctgccgggtat

SEQ ID NO: 1210844 - DNA, 25 bp, Homo sapien
tctctgcaccaaacttgcgagtttc

SEQ ID NO: 1210845 - DNA, 25 bp, Homo sapien
tctgcaccaaacttgcgagtttcac

SEQ ID NO: 1210846 - DNA, 25 bp, Homo sapien
ctgcaccaaacttgcgagtttcaca

SEQ ID NO: 1210847 - DNA, 25 bp, Homo sapien
cttctctgcaccaaacttgcgagtt

SEQ ID NO: 1210848 - DNA, 25 bp, Homo sapien
gtctttttggtcaatcatccaaaag

SEQ ID NO: 1210849 - DNA, 25 bp, Homo sapien
agtcactggcagcaagcaggcaatc

SEQ ID NO: 1210850 - DNA, 25 bp, Homo sapien
tgggaagtgaagtgatcaactccag

SEQ ID NO: 1210851 - DNA, 25 bp, Homo sapien
gcaagcaggcaatcatccaaaagaa

SEQ ID NO: 1210852 - DNA, 25 bp, Homo sapien
aatgaatatagaccaaagaaagggt

SEQ ID NO: 1210853 - DNA, 25 bp, Homo sapien
cttcccacccagattgtgcacttga

SEQ ID NO: 1210854 - DNA, 25 bp, Homo sapien
cacccagattgtgcacttgaaatga

SEQ ID NO: 1210855 - DNA, 25 bp, Homo sapien
gattgtgcacttgaaatgaatatag

SEQ ID NO: 1210856 - DNA, 25 bp, Homo sapien
gcaaaacagcacacagtcactttct

SEQ ID NO: 1210857 - DNA, 25 bp, Homo sapien
tgcaaaacagcacacagtcactttc

SEQ ID NO: 1210858 - DNA, 25 bp, Homo sapien
caaaacagcacacagtcactttctt

SEQ ID NO: 1210859 - DNA, 25 bp, Homo sapien
tggctgccccgagaggtagatgaac

SEQ ID NO: 1210860 - DNA, 25 bp, Homo sapien
ttgcgattggctgaaatgtagggac

SEQ ID NO: 1210861 - DNA, 25 bp, Homo sapien
gccatgatgtacagatgcagtagtg

SEQ ID NO: 1210862 - DNA, 25 bp, Homo sapien
cagtagtgtttgcactgattggtgc

SEQ ID NO: 1210863 - DNA, 25 bp, Homo sapien
cctttgtttcttatcgaagagttgg

SEQ ID NO: 1210864 - DNA, 25 bp, Homo sapien
aagacctttgtttcttatcgaagag

SEQ ID NO: 1210865 - DNA, 25 bp, Homo sapien
tttgtttcttatcgaagagttggga

SEQ ID NO: 1210866 - DNA, 25 bp, Homo sapien
tttcttatcgaagagttgggagcaa

SEQ ID NO: 1210867 - DNA, 25 bp, Homo sapien
ctgttccttaattcttggcagtggg

SEQ ID NO: 1210868 - DNA, 25 bp, Homo sapien
gtggtagtcctcagcctagatttga

SEQ ID NO: 1210869 - DNA, 25 bp, Homo sapien
cagtctcagtatgcttagttctccc

SEQ ID NO: 1210870 - DNA, 25 bp, Homo sapien
gacaactgatactctacagtctcag

SEQ ID NO: 1210871 - DNA, 25 bp, Homo sapien
ttccagtaatggagagcacaggagt

SEQ ID NO: 1210872 - DNA, 25 bp, Homo sapien
tggcttccacagaggaatctgttcc

SEQ ID NO: 1210873 - DNA, 25 bp, Homo sapien
gttccagtaatggagagcacaggag

SEQ ID NO: 1210874 - DNA, 25 bp, Homo sapien
tccagtaatggagagcacaggagta

SEQ ID NO: 1210875 - DNA, 25 bp, Homo sapien
tgcttaggcctagggggaataagga

SEQ ID NO: 1210876 - DNA, 25 bp, Homo sapien
gggatagctacagggtacaggattt

SEQ ID NO: 1210877 - DNA, 25 bp, Homo sapien
tatatgtatatagctcctacctact

SEQ ID NO: 1210878 - DNA, 25 bp, Homo sapien
attgtgggggatagctacagggtac

SEQ ID NO: 1210879 - DNA, 25 bp, Homo sapien
aaaactataggtcacgtcatggtac

SEQ ID NO: 1210880 - DNA, 25 bp, Homo sapien
tcttctagtggcatatgacccagaa

SEQ ID NO: 1210881 - DNA, 25 bp, Homo sapien
tccaattcatatgtaaaactgcagc

SEQ ID NO: 1210882 - DNA, 25 bp, Homo sapien
cagatgtccacacgaaaacttctac

SEQ ID NO: 1210883 - DNA, 25 bp, Homo sapien
tctcaataaatggttgttaggtgct

SEQ ID NO: 1210884 - DNA, 25 bp, Homo sapien
caaactgttcctatacgtgtgtcta

SEQ ID NO: 1210885 - DNA, 25 bp, Homo sapien
tacagctggtcaactgtaattcttg

SEQ ID NO: 1210886 - DNA, 25 bp, Homo sapien
ggtgctttatatatgtgggttccca

SEQ ID NO: 1210887 - DNA, 25 bp, Homo sapien
caaatgactctatgctcttagggcc

SEQ ID NO: 1210888 - DNA, 25 bp, Homo sapien
gaatggcagttatcagaaagcccta

SEQ ID NO: 1210889 - DNA, 25 bp, Homo sapien
tggactggcccctgagtcaaaacct

SEQ ID NO: 1210890 - DNA, 25 bp, Homo sapien
aaaagaaggcctaggtgatggtctc

SEQ ID NO: 1210891 - DNA, 25 bp, Homo sapien
taagtgtggtatatatgactcagcc

SEQ ID NO: 1210892 - DNA, 25 bp, Homo sapien
caaaactggagaaagattggagtcg

SEQ ID NO: 1210893 - DNA, 25 bp, Homo sapien
gccagtctttagcttggacacaggg

SEQ ID NO: 1210894 - DNA, 25 bp, Homo sapien
cactaccctattgtgacagctgctg

SEQ ID NO: 1210895 - DNA, 25 bp, Homo sapien
gactgtccttctctaaacactggag

SEQ ID NO: 1210896 - DNA, 25 bp, Homo sapien
caaactatggcagaggcttgtctca

SEQ ID NO: 1210897 - DNA, 25 bp, Homo sapien
tattgccagatcaaatcattccagg

SEQ ID NO: 1210898 - DNA, 25 bp, Homo sapien
ccaggtgaaagcaggtcaagctatc

SEQ ID NO: 1210899 - DNA, 25 bp, Homo sapien
tgctgcttctgacattccaggccca

SEQ ID NO: 1210900 - DNA, 25 bp, Homo sapien
tccaggcccagcacttgctgatgtc

SEQ ID NO: 1210901 - DNA, 25 bp, Homo sapien
ttccaggcccagcacttgctgatgt

SEQ ID NO: 1210902 - DNA, 25 bp, Homo sapien
tgcttctgacattccaggcccagca

SEQ ID NO: 1210903 - DNA, 25 bp, Homo sapien
gaggaagcagcactaaaagcactct

SEQ ID NO: 1210904 - DNA, 25 bp, Homo sapien
agtgggaaaccatctcaataaacac

SEQ ID NO: 1210905 - DNA, 25 bp, Homo sapien
agatgagtgggaaaccatctcaata

SEQ ID NO: 1210906 - DNA, 25 bp, Homo sapien
tctgagtcaagatgagtgggaaacc

SEQ ID NO: 1210907 - DNA, 25 bp, Homo sapien
aacacaagaagaaacgcctggtgca

SEQ ID NO: 1210908 - DNA, 25 bp, Homo sapien
agaagaaacgcctggtgcagagccc

SEQ ID NO: 1210909 - DNA, 25 bp, Homo sapien
acacaagaagaaacgcctggtgcag

SEQ ID NO: 1210910 - DNA, 25 bp, Homo sapien
caagaagaaacgcctggtgcagagc

SEQ ID NO: 1210911 - DNA, 25 bp, Homo sapien
acgaaggtcaagagatgcgtggaaa

SEQ ID NO: 1210912 - DNA, 25 bp, Homo sapien
cagaacgaaggtcaagagatgcgtg

SEQ ID NO: 1210913 - DNA, 25 bp, Homo sapien
aacgaaggtcaagagatgcgtggaa

SEQ ID NO: 1210914 - DNA, 25 bp, Homo sapien
gaacgaaggtcaagagatgcgtgga

SEQ ID NO: 1210915 - DNA, 25 bp, Homo sapien
tctggagcgtgctttccgtaaagac

SEQ ID NO: 1210916 - DNA, 25 bp, Homo sapien
gtgctttccgtaaagactctgcttc

SEQ ID NO: 1210917 - DNA, 25 bp, Homo sapien
ggagcgtgctttccgtaaagactct

SEQ ID NO: 1210918 - DNA, 25 bp, Homo sapien
tgtctggagcgtgctttccgtaaag

SEQ ID NO: 1210919 - DNA, 25 bp, Homo sapien
aactgctgagggctcatgcttctca

SEQ ID NO: 1210920 - DNA, 25 bp, Homo sapien
tctgttgctggaactgctgagggct

SEQ ID NO: 1210921 - DNA, 25 bp, Homo sapien
tcttcatccagactcctgccccagg

SEQ ID NO: 1210922 - DNA, 25 bp, Homo sapien
cttgaaggtctgttagggtgacacc

SEQ ID NO: 1210923 - DNA, 25 bp, Homo sapien
gcataaagtaagcatgtattgagta

SEQ ID NO: 1210924 - DNA, 25 bp, Homo sapien
ggattaaatgcattaatacacaaga

SEQ ID NO: 1210925 - DNA, 25 bp, Homo sapien
gacctctccttttagactagaagga

SEQ ID NO: 1210926 - DNA, 25 bp, Homo sapien
cattttgttatactatgacctctcc

SEQ ID NO: 1210927 - DNA, 25 bp, Homo sapien
gaagactcagagatagataaatcct

SEQ ID NO: 1210928 - DNA, 25 bp, Homo sapien
gagatacctttcttctataaccaca

SEQ ID NO: 1210929 - DNA, 25 bp, Homo sapien
tagaatctagccattcagagtcaaa

SEQ ID NO: 1210930 - DNA, 25 bp, Homo sapien
aacagagataacaccttcttcagag

SEQ ID NO: 1210931 - DNA, 25 bp, Homo sapien
atgctggcgtggtgggtttgtctgg

SEQ ID NO: 1210932 - DNA, 25 bp, Homo sapien
tgctggcgtggtgggtttgtctggc

SEQ ID NO: 1210933 - DNA, 25 bp, Homo sapien
tggcgtggtgggtttgtctggctga

SEQ ID NO: 1210934 - DNA, 25 bp, Homo sapien
ctggcgtggtgggtttgtctggctg

SEQ ID NO: 1210935 - DNA, 25 bp, Homo sapien
gccagagataaaataaagtatgaac

SEQ ID NO: 1210936 - DNA, 25 bp, Homo sapien
ctggccagagataaaataaagtatg

SEQ ID NO: 1210937 - DNA, 25 bp, Homo sapien
tggccagagataaaataaagtatga

SEQ ID NO: 1210938 - DNA, 25 bp, Homo sapien
ccagagataaaataaagtatgaact

SEQ ID NO: 1210939 - DNA, 25 bp, Homo sapien
ctctctcggatggacagcctcttag

SEQ ID NO: 1210940 - DNA, 25 bp, Homo sapien
ctctcggatggacagcctcttagag

SEQ ID NO: 1210941 - DNA, 25 bp, Homo sapien
cgcctcctctctcggatggacagcc

SEQ ID NO: 1210942 - DNA, 25 bp, Homo sapien
tcctctctcggatggacagcctctt

SEQ ID NO: 1210943 - DNA, 25 bp, Homo sapien
cacgtttctttgacctcttcagagc

SEQ ID NO: 1210944 - DNA, 25 bp, Homo sapien
ccacgtttctttgacctcttcagag

SEQ ID NO: 1210945 - DNA, 25 bp, Homo sapien
tctttgacctcttcagagccatcag

SEQ ID NO: 1210946 - DNA, 25 bp, Homo sapien
ttgacctcttcagagccatcagttt

SEQ ID NO: 1210947 - DNA, 25 bp, Homo sapien
tgcagagctgagtcaactgtactgc

SEQ ID NO: 1210948 - DNA, 25 bp, Homo sapien
tagtggttatactggtacatacaag

SEQ ID NO: 1210949 - DNA, 25 bp, Homo sapien
gcatgacctcaatagcagatatagt

SEQ ID NO: 1210950 - DNA, 25 bp, Homo sapien
tattcttgagcgttaatgatgaaac

SEQ ID NO: 1210951 - DNA, 25 bp, Homo sapien
tattataattctcaaggagtggact

SEQ ID NO: 1210952 - DNA, 25 bp, Homo sapien
acccactgaatcttgatactctgag

SEQ ID NO: 1210953 - DNA, 25 bp, Homo sapien
taagttgtccttcaagaagacgttc

SEQ ID NO: 1210954 - DNA, 25 bp, Homo sapien
gcagaagaatgctgatgctctaccc

SEQ ID NO: 1210955 - DNA, 25 bp, Homo sapien
caagaagacgttccttcactcaagg

SEQ ID NO: 1210956 - DNA, 25 bp, Homo sapien
taaaacatcaaatcctgctgagttt

SEQ ID NO: 1210957 - DNA, 25 bp, Homo sapien
ttgggactgctctttatgcttttat

SEQ ID NO: 1210958 - DNA, 25 bp, Homo sapien
cttgggactgctctttatgctttta

SEQ ID NO: 1210959 - DNA, 25 bp, Homo sapien
gtaaaacatcaaatcctgctgagtt

SEQ ID NO: 1210960 - DNA, 25 bp, Homo sapien
ggagaggagactggtgaaatactac

SEQ ID NO: 1210961 - DNA, 25 bp, Homo sapien
ttactgctgttccttgtatcaagcc

SEQ ID NO: 1210962 - DNA, 25 bp, Homo sapien
aaaaatttaccaaatgtaggcactg

SEQ ID NO: 1210963 - DNA, 25 bp, Homo sapien
gaaatactaccatatgagctgcctt

SEQ ID NO: 1210964 - DNA, 25 bp, Homo sapien
acacagtgagtacctcatatccatc

SEQ ID NO: 1210965 - DNA, 25 bp, Homo sapien
agtgagtacctcatatccatcagaa

SEQ ID NO: 1210966 - DNA, 25 bp, Homo sapien
ttacacagtgagtacctcatatcca

SEQ ID NO: 1210967 - DNA, 25 bp, Homo sapien
tgagtacctcatatccatcagaatt

SEQ ID NO: 1210968 - DNA, 25 bp, Homo sapien
ataccaaaattagaggggcatgata

SEQ ID NO: 1210969 - DNA, 25 bp, Homo sapien
taccaaaattagaggggcatgatag

SEQ ID NO: 1210970 - DNA, 25 bp, Homo sapien
cagatgtatgttagagctcctcagg

SEQ ID NO: 1210971 - DNA, 25 bp, Homo sapien
taagaaacttgggacagcagcagac

SEQ ID NO: 1210972 - DNA, 25 bp, Homo sapien
gataagttagattagcccagctcct

SEQ ID NO: 1210973 - DNA, 25 bp, Homo sapien
tacttctggtcaggaacaagcagct

SEQ ID NO: 1210974 - DNA, 25 bp, Homo sapien
gatacagtctcattgctttaaatat

SEQ ID NO: 1210975 - DNA, 25 bp, Homo sapien
gcattttggcagatctgtataacca

SEQ ID NO: 1210976 - DNA, 25 bp, Homo sapien
aaatttccagttggaaatctaacag

SEQ ID NO: 1210977 - DNA, 25 bp, Homo sapien
aaaactggattctggccacgtgtgg

SEQ ID NO: 1210978 - DNA, 25 bp, Homo sapien
agctggtccacacagaaggatgagc

SEQ ID NO: 1210979 - DNA, 25 bp, Homo sapien
taccgactgagagtgtccaaaaccc

SEQ ID NO: 1210980 - DNA, 25 bp, Homo sapien
tattagtgacctagctatcttacgg

SEQ ID NO: 1210981 - DNA, 25 bp, Homo sapien
tacatgctgttggtcataataccga

SEQ ID NO: 1210982 - DNA, 25 bp, Homo sapien
ttcccagggtacatgttagtggtcc

SEQ ID NO: 1210983 - DNA, 25 bp, Homo sapien
taaacacaattatgctgaggcaaac

SEQ ID NO: 1210984 - DNA, 25 bp, Homo sapien
gaggcaaacacttgcagagtatgag

SEQ ID NO: 1210985 - DNA, 25 bp, Homo sapien
gcaatgccagtgcaattccacataa

SEQ ID NO: 1210986 - DNA, 25 bp, Homo sapien
cagacccacatagtgaagaattacc

SEQ ID NO: 1210987 - DNA, 25 bp, Homo sapien
tgcttgctattctagaaacagaccc

SEQ ID NO: 1210988 - DNA, 25 bp, Homo sapien
tagtgaagaattaccctgccaaatg

SEQ ID NO: 1210989 - DNA, 25 bp, Homo sapien
gctgaatgcttgctattctagaaac

SEQ ID NO: 1210990 - DNA, 25 bp, Homo sapien
gcaacacttaccacaagagcttttg

SEQ ID NO: 1210991 - DNA, 25 bp, Homo sapien
aggccacataggctagaaacatcag

SEQ ID NO: 1210992 - DNA, 25 bp, Homo sapien
tcacaatgattggagggtgctactg

SEQ ID NO: 1210993 - DNA, 25 bp, Homo sapien
taatgtgaacaacatagcttttccc

SEQ ID NO: 1210994 - DNA, 25 bp, Homo sapien
tcagggtaatagattataaaggtcc

SEQ ID NO: 1210995 - DNA, 25 bp, Homo sapien
agtgttacgaatgttaagtctcaga

SEQ ID NO: 1210996 - DNA, 25 bp, Homo sapien
tgctcccatatatttaatcatgccc

SEQ ID NO: 1210997 - DNA, 25 bp, Homo sapien
tctgcaaacctgtcctagaattggt

SEQ ID NO: 1210998 - DNA, 25 bp, Homo sapien
taacccactgactaggaacccatga

SEQ ID NO: 1210999 - DNA, 25 bp, Homo sapien
tagcgtacctagtgcccagatcatt

SEQ ID NO: 1211000 - DNA, 25 bp, Homo sapien
gaaagaaccccatgttggtatgaac

SEQ ID NO: 1211001 - DNA, 25 bp, Homo sapien
tgtactaagaggaacagggctccct

SEQ ID NO: 1211002 - DNA, 25 bp, Homo sapien
ggtgcattcattcacggtaaatgcc

SEQ ID NO: 1211003 - DNA, 25 bp, Homo sapien
gctaagtattactgcaaaagggtca

SEQ ID NO: 1211004 - DNA, 25 bp, Homo sapien
gagatattccgaagaaggcattgtt

SEQ ID NO: 1211005 - DNA, 25 bp, Homo sapien
caacttctagtcctgtaaggtgcat

SEQ ID NO: 1211006 - DNA, 25 bp, Homo sapien
ggaaagacgaccttggatcctgccg

SEQ ID NO: 1211007 - DNA, 25 bp, Homo sapien
tactatcactttatccagagggaag

SEQ ID NO: 1211008 - DNA, 25 bp, Homo sapien
gatgacaccagattaaatcccggag

SEQ ID NO: 1211009 - DNA, 25 bp, Homo sapien
tgaaccagtccccagttacacagag

SEQ ID NO: 1211010 - DNA, 25 bp, Homo sapien
tgaattctttacttcgggtatataa

SEQ ID NO: 1211011 - DNA, 25 bp, Homo sapien
gtgaattctttacttcgggtatata

SEQ ID NO: 1211012 - DNA, 25 bp, Homo sapien
agtgaattctttacttcgggtatat

SEQ ID NO: 1211013 - DNA, 25 bp, Homo sapien
tcattatttaggatcaacagagacc

SEQ ID NO: 1211014 - DNA, 25 bp, Homo sapien
aatagcaatattaggagcataccac

SEQ ID NO: 1211015 - DNA, 25 bp, Homo sapien
cattcttactgtcggtaggagcgag

SEQ ID NO: 1211016 - DNA, 25 bp, Homo sapien
tacctggtgtggttcccattagaaa

SEQ ID NO: 1211017 - DNA, 25 bp, Homo sapien
aagaaacagttcttactccattgcc

SEQ ID NO: 1211018 - DNA, 25 bp, Homo sapien
tttgaagaaacagttcttactccat

SEQ ID NO: 1211019 - DNA, 25 bp, Homo sapien
tgaagaaacagttcttactccattg

SEQ ID NO: 1211020 - DNA, 25 bp, Homo sapien
ttttgaagaaacagttcttactcca

SEQ ID NO: 1211021 - DNA, 25 bp, Homo sapien
tgtaattcaagaaagttggccgggc

SEQ ID NO: 1211022 - DNA, 25 bp, Homo sapien
tacaaaggaattagtgaggctctcc

SEQ ID NO: 1211023 - DNA, 25 bp, Homo sapien
cagcagcctgtttgggtagcagtaa

SEQ ID NO: 1211024 - DNA, 25 bp, Homo sapien
gaggtttcaggtacccactgccttg

SEQ ID NO: 1211025 - DNA, 25 bp, Homo sapien
tcagatggcaatcctagaaagggac

SEQ ID NO: 1211026 - DNA, 25 bp, Homo sapien
gaagtcatggcttgaccccacagtg

SEQ ID NO: 1211027 - DNA, 25 bp, Homo sapien
gcaaggacccttcaaattttcagag

SEQ ID NO: 1211028 - DNA, 25 bp, Homo sapien
tgtgtagggccctcaaaacaccaga

SEQ ID NO: 1211029 - DNA, 25 bp, Homo sapien
ctcttgaaattctcccgtaataatc

SEQ ID NO: 1211030 - DNA, 25 bp, Homo sapien
tctcccgtaataatctcattgcttg

SEQ ID NO: 1211031 - DNA, 25 bp, Homo sapien
ccgtaataatctcattgcttgggcc

SEQ ID NO: 1211032 - DNA, 25 bp, Homo sapien
gaaattctcccgtaataatctcatt

SEQ ID NO: 1211033 - DNA, 25 bp, Homo sapien
ttcttgataccctagataatccggg

SEQ ID NO: 1211034 - DNA, 25 bp, Homo sapien
ccctgcagggagactactaagtaaa

SEQ ID NO: 1211035 - DNA, 25 bp, Homo sapien
gcttagggactccagccaaatcgat

SEQ ID NO: 1211036 - DNA, 25 bp, Homo sapien
ggtggaatacctctagaaactagtg

SEQ ID NO: 1211037 - DNA, 25 bp, Homo sapien
aaaatgcgtaggtgatgagtgatcc

SEQ ID NO: 1211038 - DNA, 25 bp, Homo sapien
caggagtaactgaaagcaaacacca

SEQ ID NO: 1211039 - DNA, 25 bp, Homo sapien
gcagacaaggcggtagacaattttc

SEQ ID NO: 1211040 - DNA, 25 bp, Homo sapien
tgggtagccttttataaaatgcgta

SEQ ID NO: 1211041 - DNA, 25 bp, Homo sapien
taggcttactgtaggaggtgttccc

SEQ ID NO: 1211042 - DNA, 25 bp, Homo sapien
tgcctctatggtgacgaaacaagct

SEQ ID NO: 1211043 - DNA, 25 bp, Homo sapien
gattccatagggttttcgagaggcc

SEQ ID NO: 1211044 - DNA, 25 bp, Homo sapien
ggaagttgatgacctacgctcttac

SEQ ID NO: 1211045 - DNA, 25 bp, Homo sapien
gatcctgggctatgggctatgtcac

SEQ ID NO: 1211046 - DNA, 25 bp, Homo sapien
tatatttttagtacctacagggcca

SEQ ID NO: 1211047 - DNA, 25 bp, Homo sapien
tatccaagtgaagctgagatcctgg

SEQ ID NO: 1211048 - DNA, 25 bp, Homo sapien
caagttgcacgacagaaccaggaga

SEQ ID NO: 1211049 - DNA, 25 bp, Homo sapien
gccatgattcactagatttgaggca

SEQ ID NO: 1211050 - DNA, 25 bp, Homo sapien
tgacttagccctagttcacacttct

SEQ ID NO: 1211051 - DNA, 25 bp, Homo sapien
tcaaattgactacacaaaggtgact

SEQ ID NO: 1211052 - DNA, 25 bp, Homo sapien
aaaacagcattagcaagagactgat

SEQ ID NO: 1211053 - DNA, 25 bp, Homo sapien
gattacggcaaaataccactctcca

SEQ ID NO: 1211054 - DNA, 25 bp, Homo sapien
cccttagatactaggtgaaaaactg

SEQ ID NO: 1211055 - DNA, 25 bp, Homo sapien
tattaataagacagaaccagctcaa

SEQ ID NO: 1211056 - DNA, 25 bp, Homo sapien
ctattataatacgagagagttcaca

SEQ ID NO: 1211057 - DNA, 25 bp, Homo sapien
cataaaaacgggcaaccagctgctc

SEQ ID NO: 1211058 - DNA, 25 bp, Homo sapien
caggaagttacaacatatggtctaa

SEQ ID NO: 1211059 - DNA, 25 bp, Homo sapien
ttttaagtcactgaatgagatagga

SEQ ID NO: 1211060 - DNA, 25 bp, Homo sapien
tctttatggtattgtcagagacatt

SEQ ID NO: 1211061 - DNA, 25 bp, Homo sapien
ggacatcttgccatctaagtaaaaa

SEQ ID NO: 1211062 - DNA, 25 bp, Homo sapien
gggtcaccccataatcctgcctaag

SEQ ID NO: 1211063 - DNA, 25 bp, Homo sapien
gagatgctaagtcccacattcttca

SEQ ID NO: 1211064 - DNA, 25 bp, Homo sapien
tctatacttaccactatgaccgtgg

SEQ ID NO: 1211065 - DNA, 25 bp, Homo sapien
tcattaagggaaggatctctcagct

SEQ ID NO: 1211066 - DNA, 25 bp, Homo sapien
gccctgcagagtgctacatcctgaa

SEQ ID NO: 1211067 - DNA, 25 bp, Homo sapien
tctgatgtatctgtcctgtggtagc

SEQ ID NO: 1211068 - DNA, 25 bp, Homo sapien
ttagctcctaatgacaatggtggcc

SEQ ID NO: 1211069 - DNA, 25 bp, Homo sapien
caccgtaagaatcactggttgtagg

SEQ ID NO: 1211070 - DNA, 25 bp, Homo sapien
tctacacggctggtcagggtggcta

SEQ ID NO: 1211071 - DNA, 25 bp, Homo sapien
cttctacacggctggtcagggtggc

SEQ ID NO: 1211072 - DNA, 25 bp, Homo sapien
cgacgggctcttgctgaagcccggt

SEQ ID NO: 1211073 - DNA, 25 bp, Homo sapien
gtatttagttgatattcacaggacc

SEQ ID NO: 1211074 - DNA, 25 bp, Homo sapien
tcagagagacagcattaggtttttc

SEQ ID NO: 1211075 - DNA, 25 bp, Homo sapien
ttactgcactaaaagcaacatatgg

SEQ ID NO: 1211076 - DNA, 25 bp, Homo sapien
gattctaactatacacttactgcac

SEQ ID NO: 1211077 - DNA, 25 bp, Homo sapien
ttttcagtcagagcactctcataga

SEQ ID NO: 1211078 - DNA, 25 bp, Homo sapien
tttcagtcagagcactctcatagag

SEQ ID NO: 1211079 - DNA, 25 bp, Homo sapien
tggactttatatctgctagctctag

SEQ ID NO: 1211080 - DNA, 25 bp, Homo sapien
accttctcaagcttggactttatat

SEQ ID NO: 1211081 - DNA, 25 bp, Homo sapien
tctccagaaagtgagtgtcctggct

SEQ ID NO: 1211082 - DNA, 25 bp, Homo sapien
tgtcttccaagtgttggcaccctcc

SEQ ID NO: 1211083 - DNA, 25 bp, Homo sapien
gctggagtcctacgcagctctgtgg

SEQ ID NO: 1211084 - DNA, 25 bp, Homo sapien
tatttgtgttgcagtaagtctcaga

SEQ ID NO: 1211085 - DNA, 25 bp, Homo sapien
cactgatgatcggtcagaggtcttt

SEQ ID NO: 1211086 - DNA, 25 bp, Homo sapien
gatcggtcagaggtcttttcttgtt

SEQ ID NO: 1211087 - DNA, 25 bp, Homo sapien
catctccagcactgatgatcggtca

SEQ ID NO: 1211088 - DNA, 25 bp, Homo sapien
tccagcactgatgatcggtcagagg

SEQ ID NO: 1211089 - DNA, 25 bp, Homo sapien
gacattttgcgctccaaggctcgcc

SEQ ID NO: 1211090 - DNA, 25 bp, Homo sapien
catttctgacattttgcgctccaag

SEQ ID NO: 1211091 - DNA, 25 bp, Homo sapien
attttgcgctccaaggctcgcctct

SEQ ID NO: 1211092 - DNA, 25 bp, Homo sapien
ttctgacattttgcgctccaaggct

SEQ ID NO: 1211093 - DNA, 25 bp, Homo sapien
tatgctcaaatatccagtcttggca

SEQ ID NO: 1211094 - DNA, 25 bp, Homo sapien
ggcctatgctcaaatatccagtctt

SEQ ID NO: 1211095 - DNA, 25 bp, Homo sapien
gagggggcaggcctatgctcaaata

SEQ ID NO: 1211096 - DNA, 25 bp, Homo sapien
gggcaggcctatgctcaaatatcca

SEQ ID NO: 1211097 - DNA, 25 bp, Homo sapien
tagggatgcttgctcatagaaagac

SEQ ID NO: 1211098 - DNA, 25 bp, Homo sapien
gaataaccctgtctcaccaaatgaa

SEQ ID NO: 1211099 - DNA, 25 bp, Homo sapien
agtaacaggattgattatgagcacc

SEQ ID NO: 1211100 - DNA, 25 bp, Homo sapien
aatgttacagttacagccttgggat

SEQ ID NO: 1211101 - DNA, 25 bp, Homo sapien
tatctcaacctacagaattgagggc

SEQ ID NO: 1211102 - DNA, 25 bp, Homo sapien
cagagccccatgactggtgagtgga

SEQ ID NO: 1211103 - DNA, 25 bp, Homo sapien
gagggcaactagaaccactgaaggg

SEQ ID NO: 1211104 - DNA, 25 bp, Homo sapien
tgctttgatgtgacacagagcccca

SEQ ID NO: 1211105 - DNA, 25 bp, Homo sapien
tccctactgattgctccaaggaggt

SEQ ID NO: 1211106 - DNA, 25 bp, Homo sapien
tcacatctgatgtgggcgccaagac

SEQ ID NO: 1211107 - DNA, 25 bp, Homo sapien
caatctaggatctgggtggagtttc

SEQ ID NO: 1211108 - DNA, 25 bp, Homo sapien
ccaaggaggtttgagcatctgtaca

SEQ ID NO: 1211109 - DNA, 25 bp, Homo sapien
taatgaaactagctggaccaatgtg

SEQ ID NO: 1211110 - DNA, 25 bp, Homo sapien
taatgactacaaaaaggtggccagg

SEQ ID NO: 1211111 - DNA, 25 bp, Homo sapien
gaattatatcaaaggcctgccgact

SEQ ID NO: 1211112 - DNA, 25 bp, Homo sapien
ttgcaagcggaacagaataaccagc

SEQ ID NO: 1211113 - DNA, 25 bp, Homo sapien
cgagagtctggccaccactcgggtc

SEQ ID NO: 1211114 - DNA, 25 bp, Homo sapien
ggtgtccgaggactcgatggactcc

SEQ ID NO: 1211115 - DNA, 25 bp, Homo sapien
tgaatctgttttagctggtggaggt

SEQ ID NO: 1211116 - DNA, 25 bp, Homo sapien
accactcgggtcagggccctgttct

SEQ ID NO: 1211117 - DNA, 25 bp, Homo sapien
ggaagtgagttggagagtaggggca

SEQ ID NO: 1211118 - DNA, 25 bp, Homo sapien
gagggaagtgagttggagagtaggg

SEQ ID NO: 1211119 - DNA, 25 bp, Homo sapien
aggagggaagtgagttggagagtag

SEQ ID NO: 1211120 - DNA, 25 bp, Homo sapien
gtgagttggagagtaggggcaagaa

SEQ ID NO: 1211121 - DNA, 25 bp, Homo sapien
aaaggatccagtttgccaagcacat

SEQ ID NO: 1211122 - DNA, 25 bp, Homo sapien
gaaaggatccagtttgccaagcaca

SEQ ID NO: 1211123 - DNA, 25 bp, Homo sapien
ttgagatagaaaaaccagttgtctg

SEQ ID NO: 1211124 - DNA, 25 bp, Homo sapien
gtctgtgagcttgtctttcagatcc

SEQ ID NO: 1211125 - DNA, 25 bp, Homo sapien
ttgtctgtgagcttgtctttcagat

SEQ ID NO: 1211126 - DNA, 25 bp, Homo sapien
tagaaaaaccagttgtctgtgagct

SEQ ID NO: 1211127 - DNA, 25 bp, Homo sapien
aaagcatgagatctagttttgcccc

SEQ ID NO: 1211128 - DNA, 25 bp, Homo sapien
cagccaggccatggtagaacttgcc

SEQ ID NO: 1211129 - DNA, 25 bp, Homo sapien
tagctcagccctatgataattcggg

SEQ ID NO: 1211130 - DNA, 25 bp, Homo sapien
catggagtctggacctaacagtggc

SEQ ID NO: 1211131 - DNA, 25 bp, Homo sapien
gggccacatgcttaacaaatggtga

SEQ ID NO: 1211132 - DNA, 25 bp, Homo sapien
tgctatggtcatgtaccaggcaatg

SEQ ID NO: 1211133 - DNA, 25 bp, Homo sapien
gacaaggaagtcacagtgctcagaa

SEQ ID NO: 1211134 - DNA, 25 bp, Homo sapien
tgcagacagcttatattacagtggt

SEQ ID NO: 1211135 - DNA, 25 bp, Homo sapien
gcagcttgggtataagtgagacgaa

SEQ ID NO: 1211136 - DNA, 25 bp, Homo sapien
aaagccacatttccataataggtag

SEQ ID NO: 1211137 - DNA, 25 bp, Homo sapien
taggtaggaagaagctatatatggc

SEQ ID NO: 1211138 - DNA, 25 bp, Homo sapien
atctgctctttaacgccccatgctg

SEQ ID NO: 1211139 - DNA, 25 bp, Homo sapien
tgcttggaaactcatttcaatgaga

SEQ ID NO: 1211140 - DNA, 25 bp, Homo sapien
tgaatgcttggaaactcatttcaat

SEQ ID NO: 1211141 - DNA, 25 bp, Homo sapien
aatgcttggaaactcatttcaatga

SEQ ID NO: 1211142 - DNA, 25 bp, Homo sapien
gcttggaaactcatttcaatgagat

SEQ ID NO: 1211143 - DNA, 25 bp, Homo sapien
cgttcctctatccctgtagccttgc

SEQ ID NO: 1211144 - DNA, 25 bp, Homo sapien
tcctctatccctgtagccttgccta

SEQ ID NO: 1211145 - DNA, 25 bp, Homo sapien
cctctatccctgtagccttgcctac

SEQ ID NO: 1211146 - DNA, 25 bp, Homo sapien
gttcctctatccctgtagccttgcc

SEQ ID NO: 1211147 - DNA, 25 bp, Homo sapien
tgtggaagtgtgttgacatacataa

SEQ ID NO: 1211148 - DNA, 25 bp, Homo sapien
ctttgcgatactgagtgttcctaca

SEQ ID NO: 1211149 - DNA, 25 bp, Homo sapien
cataatgagctttgcgatactgagt

SEQ ID NO: 1211150 - DNA, 25 bp, Homo sapien
gttgacatacataatgagctttgcg

SEQ ID NO: 1211151 - DNA, 25 bp, Homo sapien
tttaggcagatcactcgccttctct

SEQ ID NO: 1211152 - DNA, 25 bp, Homo sapien
actctctcgtatggtagggactctg

SEQ ID NO: 1211153 - DNA, 25 bp, Homo sapien
tgtactttcgtaagaacaacagtcc

SEQ ID NO: 1211154 - DNA, 25 bp, Homo sapien
agtccctgtcctactctctcgtatg

SEQ ID NO: 1211155 - DNA, 25 bp, Homo sapien
tcttcataggcagacctcacatttc

SEQ ID NO: 1211156 - DNA, 25 bp, Homo sapien
cttttgagctggcatatttagcagt

SEQ ID NO: 1211157 - DNA, 25 bp, Homo sapien
tctttagggagattatagccactcc

SEQ ID NO: 1211158 - DNA, 25 bp, Homo sapien
ggaataaactctcatggtcccttct

SEQ ID NO: 1211159 - DNA, 25 bp, Homo sapien
ctacttggacagtttgctgatgact

SEQ ID NO: 1211160 - DNA, 25 bp, Homo sapien
tacttggacagtttgctgatgactc

SEQ ID NO: 1211161 - DNA, 25 bp, Homo sapien
ctttcagcctctggttgtcggattt

SEQ ID NO: 1211162 - DNA, 25 bp, Homo sapien
gcctctggttgtcggatttcagttc

SEQ ID NO: 1211163 - DNA, 25 bp, Homo sapien
aatgtggacaaagtagctgagcagc

SEQ ID NO: 1211164 - DNA, 25 bp, Homo sapien
aaagctggacctaatgacctctggg

SEQ ID NO: 1211165 - DNA, 25 bp, Homo sapien
cacaatggccaaagacaactgaggt

SEQ ID NO: 1211166 - DNA, 25 bp, Homo sapien
aatcaggatcctggagtggctacca

SEQ ID NO: 1211167 - DNA, 25 bp, Homo sapien
tcatcttagggttgaaaggccactc

SEQ ID NO: 1211168 - DNA, 25 bp, Homo sapien
taagtgacagacctgagccccatgt

SEQ ID NO: 1211169 - DNA, 25 bp, Homo sapien
tcaagacaatgaaccagacggtgct

SEQ ID NO: 1211170 - DNA, 25 bp, Homo sapien
gcataaccctttcgctagagattgg

SEQ ID NO: 1211171 - DNA, 25 bp, Homo sapien
tgcagaccttactacaaccagtggg

SEQ ID NO: 1211172 - DNA, 25 bp, Homo sapien
tgctgcttcagtccctaaggctggg

SEQ ID NO: 1211173 - DNA, 25 bp, Homo sapien
tccttgaggatagaccagcagctac

SEQ ID NO: 1211174 - DNA, 25 bp, Homo sapien
tgagcctttcagcagacggactggg

SEQ ID NO: 1211175 - DNA, 25 bp, Homo sapien
taaagcacagtgagacgacagcttc

SEQ ID NO: 1211176 - DNA, 25 bp, Homo sapien
ggagggcaccagtaaacagtctagt

SEQ ID NO: 1211177 - DNA, 25 bp, Homo sapien
cggaggactgtagtgaggcttccca

SEQ ID NO: 1211178 - DNA, 25 bp, Homo sapien
tcttaaagtcgtcaggagtccccta

SEQ ID NO: 1211179 - DNA, 25 bp, Homo sapien
ctctctcagttacatctctagtata

SEQ ID NO: 1211180 - DNA, 25 bp, Homo sapien
tctcagttacatctctagtataaca

SEQ ID NO: 1211181 - DNA, 25 bp, Homo sapien
agtataacaccgtctacctggaggc

SEQ ID NO: 1211182 - DNA, 25 bp, Homo sapien
ctctagtataacaccgtctacctgg

SEQ ID NO: 1211183 - DNA, 25 bp, Homo sapien
ccacactggcgggagatggtgcttc

SEQ ID NO: 1211184 - DNA, 25 bp, Homo sapien
ctcaaggagcttggcctgcctatct

SEQ ID NO: 1211185 - DNA, 25 bp, Homo sapien
gcagaggctgtataggagacaccag

SEQ ID NO: 1211186 - DNA, 25 bp, Homo sapien
caaagcccagcagcagtctaggtct

SEQ ID NO: 1211187 - DNA, 25 bp, Homo sapien
tagaatggaggagctaggctcaact

SEQ ID NO: 1211188 - DNA, 25 bp, Homo sapien
ttctagccacggcaattagggaaga

SEQ ID NO: 1211189 - DNA, 25 bp, Homo sapien
ccaatccagcggcaagggtagaatg

SEQ ID NO: 1211190 - DNA, 25 bp, Homo sapien
tggcattcttgggactacattcagc

SEQ ID NO: 1211191 - DNA, 25 bp, Homo sapien
ggaaggacctcaagtgcaagcctga

SEQ ID NO: 1211192 - DNA, 25 bp, Homo sapien
caaccgaaggaggagtagtcacagt

SEQ ID NO: 1211193 - DNA, 25 bp, Homo sapien
tgatgtgataaactggactggtcca

SEQ ID NO: 1211194 - DNA, 25 bp, Homo sapien
tacaaagagctacttcagcagaggg

SEQ ID NO: 1211195 - DNA, 25 bp, Homo sapien
agagaagccgcggtgccttagcgct

SEQ ID NO: 1211196 - DNA, 25 bp, Homo sapien
actcgccgcagagaagccgtgggaa

SEQ ID NO: 1211197 - DNA, 25 bp, Homo sapien
catgaagtgggcgtgcggagagaag

SEQ ID NO: 1211198 - DNA, 25 bp, Homo sapien
acctgcggtgaagcgaaggcgactc

SEQ ID NO: 1211199 - DNA, 25 bp, Homo sapien
gaggtgtcctgaattatttcgggaa

SEQ ID NO: 1211200 - DNA, 25 bp, Homo sapien
ggaggtgtcctgaattatttcggga

SEQ ID NO: 1211201 - DNA, 25 bp, Homo sapien
gctagacccgggggaggtgtcctga

SEQ ID NO: 1211202 - DNA, 25 bp, Homo sapien
tcgggtccgtggcagagcccttctg

SEQ ID NO: 1211203 - DNA, 25 bp, Homo sapien
cttttcccaagtgggagaaagcaga

SEQ ID NO: 1211204 - DNA, 25 bp, Homo sapien
tgggtgtcagcctcgcttttcccaa

SEQ ID NO: 1211205 - DNA, 25 bp, Homo sapien
tcctgtgccagcagacgctcttcct

SEQ ID NO: 1211206 - DNA, 25 bp, Homo sapien
tcttcgggagtgaggtctatgtcct

SEQ ID NO: 1211207 - DNA, 25 bp, Homo sapien
aagaagggggattcactgcgggtat

SEQ ID NO: 1211208 - DNA, 25 bp, Homo sapien
gattcactgcgggtattgggaattt

SEQ ID NO: 1211209 - DNA, 25 bp, Homo sapien
cttcgggagtgaggtctatgtcctg

SEQ ID NO: 1211210 - DNA, 25 bp, Homo sapien
gatttcaggagccactaagtgaggt

SEQ ID NO: 1211211 - DNA, 25 bp, Homo sapien
ggatttcaggagccactaagtgagg

SEQ ID NO: 1211212 - DNA, 25 bp, Homo sapien
agctgctgtccaccttgtccaggaa

SEQ ID NO: 1211213 - DNA, 25 bp, Homo sapien
ctgctgtccaccttgtccaggaagc

SEQ ID NO: 1211214 - DNA, 25 bp, Homo sapien
gctgctgtccaccttgtccaggaag

SEQ ID NO: 1211215 - DNA, 25 bp, Homo sapien
tcagctgctgtccaccttgtccagg

SEQ ID NO: 1211216 - DNA, 25 bp, Homo sapien
gaatgattggctgcgataggcacca

SEQ ID NO: 1211217 - DNA, 25 bp, Homo sapien
caaggcaaagggacgatggctgttc

SEQ ID NO: 1211218 - DNA, 25 bp, Homo sapien
tctcccagagatagttgaatgattg

SEQ ID NO: 1211219 - DNA, 25 bp, Homo sapien
gctgttccctcaacagatgcacaca

SEQ ID NO: 1211220 - DNA, 25 bp, Homo sapien
ggcccagcactttttgccccaagca

SEQ ID NO: 1211221 - DNA, 25 bp, Homo sapien
ggtcaccttgcgcatgatcaccctt

SEQ ID NO: 1211222 - DNA, 25 bp, Homo sapien
aagcaggcccactcgctccatggtc

SEQ ID NO: 1211223 - DNA, 25 bp, Homo sapien
cagccctggaccagtgggaggacat

SEQ ID NO: 1211224 - DNA, 25 bp, Homo sapien
cccagggaaatggacttcagatctc

SEQ ID NO: 1211225 - DNA, 25 bp, Homo sapien
tcccagggaaatggacttcagatct

SEQ ID NO: 1211226 - DNA, 25 bp, Homo sapien
ccagggaaatggacttcagatctca

SEQ ID NO: 1211227 - DNA, 25 bp, Homo sapien
ctcccagggaaatggacttcagatc

SEQ ID NO: 1211228 - DNA, 25 bp, Homo sapien
gtggtagcccccagtcactgcatgc

SEQ ID NO: 1211229 - DNA, 25 bp, Homo sapien
cattttcccgctcacagagctgtct

SEQ ID NO: 1211230 - DNA, 25 bp, Homo sapien
tccctaaggcgatctcacagctctc

SEQ ID NO: 1211231 - DNA, 25 bp, Homo sapien
gcagtgaccgccacaccaacatttt

SEQ ID NO: 1211232 - DNA, 25 bp, Homo sapien
ctatgctgactgcactcagtttctg

SEQ ID NO: 1211233 - DNA, 25 bp, Homo sapien
tatgctgactgcactcagtttctgg

SEQ ID NO: 1211234 - DNA, 25 bp, Homo sapien
atgctgactgcactcagtttctgga

SEQ ID NO: 1211235 - DNA, 25 bp, Homo sapien
cagggcaggatccaagaggcatcag

SEQ ID NO: 1211236 - DNA, 25 bp, Homo sapien
agctgctgtcatagcctgggggcca

SEQ ID NO: 1211237 - DNA, 25 bp, Homo sapien
tgccctgagcatcattactaattag

SEQ ID NO: 1211238 - DNA, 25 bp, Homo sapien
tggaagggtagcacttggccctgcc

SEQ ID NO: 1211239 - DNA, 25 bp, Homo sapien
tagtccaggtagactatggaggagc

SEQ ID NO: 1211240 - DNA, 25 bp, Homo sapien
ccagtatctgcgctgtcatagtcca

SEQ ID NO: 1211241 - DNA, 25 bp, Homo sapien
cgttgcctcttggttaatgatgtac

SEQ ID NO: 1211242 - DNA, 25 bp, Homo sapien
agaggatggagtacatagggtcttt

SEQ ID NO: 1211243 - DNA, 25 bp, Homo sapien
ctagagaggatggagtacatagggt

SEQ ID NO: 1211244 - DNA, 25 bp, Homo sapien
accccgctccatccgttgcctcttg

SEQ ID NO: 1211245 - DNA, 25 bp, Homo sapien
tcaggaagaggagccggtttgaagg

SEQ ID NO: 1211246 - DNA, 25 bp, Homo sapien
ggtgcagatggtgacgcccagcaac

SEQ ID NO: 1211247 - DNA, 25 bp, Homo sapien
gaagaggagccggtttgaaggcaaa

SEQ ID NO: 1211248 - DNA, 25 bp, Homo sapien
ggaagtattgtgtacttggtgcaga

SEQ ID NO: 1211249 - DNA, 25 bp, Homo sapien
gctttgtattcatcacgccctctgc

SEQ ID NO: 1211250 - DNA, 25 bp, Homo sapien
atgacagtgcctcggttatgcccag

SEQ ID NO: 1211251 - DNA, 25 bp, Homo sapien
tgttcaatggatctggacctgcaag

SEQ ID NO: 1211252 - DNA, 25 bp, Homo sapien
cgtgtctttctactcaactatggtc

SEQ ID NO: 1211253 - DNA, 25 bp, Homo sapien
gctgatagcattagtggtattctct

SEQ ID NO: 1211254 - DNA, 25 bp, Homo sapien
ggctgatagcattagtggtattctc

SEQ ID NO: 1211255 - DNA, 25 bp, Homo sapien
gtaagccatcacaggtaaagctaaa

SEQ ID NO: 1211256 - DNA, 25 bp, Homo sapien
gccatcacaggtaaagctaaaatcc

SEQ ID NO: 1211257 - DNA, 25 bp, Homo sapien
tttggagattttactccttatccac

SEQ ID NO: 1211258 - DNA, 25 bp, Homo sapien
catcacaggtaaagctaaaatccct

SEQ ID NO: 1211259 - DNA, 25 bp, Homo sapien
tctccaaatcacagacgctaaatct

SEQ ID NO: 1211260 - DNA, 25 bp, Homo sapien
acagagcagaaaagtacaagcatcc

SEQ ID NO: 1211261 - DNA, 25 bp, Homo sapien
catgaacattaagggagccgtatga

SEQ ID NO: 1211262 - DNA, 25 bp, Homo sapien
cagtcatagaatctttgcagtgcca

SEQ ID NO: 1211263 - DNA, 25 bp, Homo sapien
ggtcacggtcttggatctgatcccc

SEQ ID NO: 1211264 - DNA, 25 bp, Homo sapien
cagcagctccatggttggctttttg

SEQ ID NO: 1211265 - DNA, 25 bp, Homo sapien
cagctccatggttggctttttgaag

SEQ ID NO: 1211266 - DNA, 25 bp, Homo sapien
ggatctgatccccacggaggctcat

SEQ ID NO: 1211267 - DNA, 25 bp, Homo sapien
gggcatttcatcagaacatcatggc

SEQ ID NO: 1211268 - DNA, 25 bp, Homo sapien
gatcagtcaggatggggcatttcat

SEQ ID NO: 1211269 - DNA, 25 bp, Homo sapien
caggatggggcatttcatcagaaca

SEQ ID NO: 1211270 - DNA, 25 bp, Homo sapien
ggatcagtcaggatggggcatttca

SEQ ID NO: 1211271 - DNA, 25 bp, Homo sapien
agagcagtagctgttgtctgtccag

SEQ ID NO: 1211272 - DNA, 25 bp, Homo sapien
tcagagcagtagctgttgtctgtcc

SEQ ID NO: 1211273 - DNA, 25 bp, Homo sapien
gagcagtagctgttgtctgtccagg

SEQ ID NO: 1211274 - DNA, 25 bp, Homo sapien
agcagtagctgttgtctgtccaggc

SEQ ID NO: 1211275 - DNA, 25 bp, Homo sapien
taattgatggtgactaatggatcat

SEQ ID NO: 1211276 - DNA, 25 bp, Homo sapien
ggactgtggcaggtttgtgtaatca

SEQ ID NO: 1211277 - DNA, 25 bp, Homo sapien
ctgttccgttgctgcgtccccagct

SEQ ID NO: 1211278 - DNA, 25 bp, Homo sapien
ggatcattgctcctgtatgaaatat

SEQ ID NO: 1211279 - DNA, 25 bp, Homo sapien
tgctccatgtgagatcctgggctgg

SEQ ID NO: 1211280 - DNA, 25 bp, Homo sapien
attgctgcctttccagaccctgtgg

SEQ ID NO: 1211281 - DNA, 25 bp, Homo sapien
tttcttgcagactttggacctgtgg

SEQ ID NO: 1211282 - DNA, 25 bp, Homo sapien
ggacctgtggcttccccaaccattg

SEQ ID NO: 1211283 - DNA, 25 bp, Homo sapien
taattgattgccctggcacgtggct

SEQ ID NO: 1211284 - DNA, 25 bp, Homo sapien
ctctgctcttcagcgggcacagggc

SEQ ID NO: 1211285 - DNA, 25 bp, Homo sapien
ttgactgtactgctgtccaggtacc

SEQ ID NO: 1211286 - DNA, 25 bp, Homo sapien
tctagcacccattttagaccaggca

SEQ ID NO: 1211287 - DNA, 25 bp, Homo sapien
gaagtccagagtcagcctggcagcc

SEQ ID NO: 1211288 - DNA, 25 bp, Homo sapien
tgcggggcttcgtgtcacagggcag

SEQ ID NO: 1211289 - DNA, 25 bp, Homo sapien
tctcagaagtccagagtcagcctgg

SEQ ID NO: 1211290 - DNA, 25 bp, Homo sapien
tcatgctcccctagagtgcggggct

SEQ ID NO: 1211291 - DNA, 25 bp, Homo sapien
actgtgctggttgctgctgctgcag

SEQ ID NO: 1211292 - DNA, 25 bp, Homo sapien
agctctttgatgctgggaactgtgc

SEQ ID NO: 1211293 - DNA, 25 bp, Homo sapien
ttagctctttgatgctgggaactgt

SEQ ID NO: 1211294 - DNA, 25 bp, Homo sapien
ggaactgtgctggttgctgctgctg

SEQ ID NO: 1211295 - DNA, 25 bp, Homo sapien
gctgaggtggcagagtaggtgctct

SEQ ID NO: 1211296 - DNA, 25 bp, Homo sapien
tcctttcctgctactgagtcgaggg

SEQ ID NO: 1211297 - DNA, 25 bp, Homo sapien
ggtcgctctccggtaagtccatacc

SEQ ID NO: 1211298 - DNA, 25 bp, Homo sapien
ctccttcgggtcgctctccggtaag

SEQ ID NO: 1211299 - DNA, 25 bp, Homo sapien
gatctctcccgcctccttcgggtcg

SEQ ID NO: 1211300 - DNA, 25 bp, Homo sapien
agccacgcgtccttgccgtccgacg

SEQ ID NO: 1211301 - DNA, 25 bp, Homo sapien
ggcaaaggcacttcggagccgagtt

SEQ ID NO: 1211302 - DNA, 25 bp, Homo sapien
cgcagactgctaagctcagcaagtc

SEQ ID NO: 1211303 - DNA, 25 bp, Homo sapien
tcagcaagtcttgcggcaaaggcac

SEQ ID NO: 1211304 - DNA, 25 bp, Homo sapien
ggtggccaatataggtagcggtgac

SEQ ID NO: 1211305 - DNA, 25 bp, Homo sapien
ccaggtggccaatataggtagcggt

SEQ ID NO: 1211306 - DNA, 25 bp, Homo sapien
caggtggccaatataggtagcggtg

SEQ ID NO: 1211307 - DNA, 25 bp, Homo sapien
tccaggtggccaatataggtagcgg

SEQ ID NO: 1211308 - DNA, 25 bp, Homo sapien
caacctttaggctcagaagccccca

SEQ ID NO: 1211309 - DNA, 25 bp, Homo sapien
aactgtgactggtacttcattgcag

SEQ ID NO: 1211310 - DNA, 25 bp, Homo sapien
aagggtctgctctggtgttgtaggt

SEQ ID NO: 1211311 - DNA, 25 bp, Homo sapien
gactggtacttcattgcagaaggaa

SEQ ID NO: 1211312 - DNA, 25 bp, Homo sapien
ctgggacataaaactgtgactggta

SEQ ID NO: 1211313 - DNA, 25 bp, Homo sapien
cttgttccagtgtgcgtgcacattg

SEQ ID NO: 1211314 - DNA, 25 bp, Homo sapien
tcttgttccagtgtgcgtgcacatt

SEQ ID NO: 1211315 - DNA, 25 bp, Homo sapien
ttgttccagtgtgcgtgcacattgt

SEQ ID NO: 1211316 - DNA, 25 bp, Homo sapien
tcctcttgccatattgatggctggt

SEQ ID NO: 1211317 - DNA, 25 bp, Homo sapien
agcaccattcggtttccataagggc

SEQ ID NO: 1211318 - DNA, 25 bp, Homo sapien
gtatcctcttgccatattgatggct

SEQ ID NO: 1211319 - DNA, 25 bp, Homo sapien
ttccataagggccatgtatcctctt

SEQ ID NO: 1211320 - DNA, 25 bp, Homo sapien
tgttagcctgcaaacaacattaggg

SEQ ID NO: 1211321 - DNA, 25 bp, Homo sapien
caaccaggttgcagtagcagtggat

SEQ ID NO: 1211322 - DNA, 25 bp, Homo sapien
gacttctctgtaagtaattgccaca

SEQ ID NO: 1211323 - DNA, 25 bp, Homo sapien
cctctactgttgcacagccagaagg

SEQ ID NO: 1211324 - DNA, 25 bp, Homo sapien
gggagtctttcataacaaacttgag

SEQ ID NO: 1211325 - DNA, 25 bp, Homo sapien
tatttaaagcttagacagtgtcacc

SEQ ID NO: 1211326 - DNA, 25 bp, Homo sapien
gagtacttgactgcagattgaagca

SEQ ID NO: 1211327 - DNA, 25 bp, Homo sapien
tatatgactaaatgcccagctaagc

SEQ ID NO: 1211328 - DNA, 25 bp, Homo sapien
tcaaactcgaactcatgtggcatgc

SEQ ID NO: 1211329 - DNA, 25 bp, Homo sapien
gtagatcaaactcgaactcatgtgg

SEQ ID NO: 1211330 - DNA, 25 bp, Homo sapien
tcgaactcatgtggcatgctagata

SEQ ID NO: 1211331 - DNA, 25 bp, Homo sapien
gaagtagatcaaactcgaactcatg

SEQ ID NO: 1211332 - DNA, 25 bp, Homo sapien
tgcgaggctggtcaggcccattaca

SEQ ID NO: 1211333 - DNA, 25 bp, Homo sapien
ctagattggtgcttgtacagtgcga

SEQ ID NO: 1211334 - DNA, 25 bp, Homo sapien
gaaacgtgagaccaccatttgttgg

SEQ ID NO: 1211335 - DNA, 25 bp, Homo sapien
tgtcacgaggaaggaggtgaccaca

SEQ ID NO: 1211336 - DNA, 25 bp, Homo sapien
ccttgagttggttgtaggcagtgaa

SEQ ID NO: 1211337 - DNA, 25 bp, Homo sapien
ggccttgagttggttgtaggcagtg

SEQ ID NO: 1211338 - DNA, 25 bp, Homo sapien
caggccttgagttggttgtaggcag

SEQ ID NO: 1211339 - DNA, 25 bp, Homo sapien
cttgagttggttgtaggcagtgaag

SEQ ID NO: 1211340 - DNA, 25 bp, Homo sapien
tctgagcaaccaggtagagtccgca

SEQ ID NO: 1211341 - DNA, 25 bp, Homo sapien
gagtcttcatcacgacaaaggttag

SEQ ID NO: 1211342 - DNA, 25 bp, Homo sapien
caaaggttagggtcagcactgtagc

SEQ ID NO: 1211343 - DNA, 25 bp, Homo sapien
catgggaccatggagttcctttggc

SEQ ID NO: 1211344 - DNA, 25 bp, Homo sapien
agcccgtgcccctaaaatgaaagtg

SEQ ID NO: 1211345 - DNA, 25 bp, Homo sapien
gggttttttgaagcctatgcgtgta

SEQ ID NO: 1211346 - DNA, 25 bp, Homo sapien
gagtaccttgctttcatccttggac

SEQ ID NO: 1211347 - DNA, 25 bp, Homo sapien
aattggaccccattaaggttggctg

SEQ ID NO: 1211348 - DNA, 25 bp, Homo sapien
ctccaacgttcgctgaggagagccc

SEQ ID NO: 1211349 - DNA, 25 bp, Homo sapien
ccaacgttcgctgaggagagcccgg

SEQ ID NO: 1211350 - DNA, 25 bp, Homo sapien
cgttcgctgaggagagcccggccaa

SEQ ID NO: 1211351 - DNA, 25 bp, Homo sapien
ggctccaacgttcgctgaggagagc

SEQ ID NO: 1211352 - DNA, 25 bp, Homo sapien
ggcttcggcggtgccatgggagggc

SEQ ID NO: 1211353 - DNA, 25 bp, Homo sapien
agtttcctcacggagcctggcggag

SEQ ID NO: 1211354 - DNA, 25 bp, Homo sapien
ttcggttccggatggagtgatggca

SEQ ID NO: 1211355 - DNA, 25 bp, Homo sapien
cctagaaggtcggagttgaggccgg

SEQ ID NO: 1211356 - DNA, 25 bp, Homo sapien
ggtgagtcacgccagcaccccggat

SEQ ID NO: 1211357 - DNA, 25 bp, Homo sapien
catagccgagcagactggcatctgt

SEQ ID NO: 1211358 - DNA, 25 bp, Homo sapien
agctgggaagagttcgcggacccct

SEQ ID NO: 1211359 - DNA, 25 bp, Homo sapien
ttcatccacaagatccggcccatag

SEQ ID NO: 1211360 - DNA, 25 bp, Homo sapien
ccgctgggcgagttcctgcctccac

SEQ ID NO: 1211361 - DNA, 25 bp, Homo sapien
cccgggcccgctgggcgagttcctg

SEQ ID NO: 1211362 - DNA, 25 bp, Homo sapien
gatggaggcggccaccacactgcac

SEQ ID NO: 1211363 - DNA, 25 bp, Homo sapien
ctgcggtgatggaggcggccaccac

SEQ ID NO: 1211364 - DNA, 25 bp, Homo sapien
tcgtcggaggctgaaaaagcccaag

SEQ ID NO: 1211365 - DNA, 25 bp, Homo sapien
tcggaccgagcggagctcgcagcct

SEQ ID NO: 1211366 - DNA, 25 bp, Homo sapien
gacttgctgttgctcgagccgcgtc

SEQ ID NO: 1211367 - DNA, 25 bp, Homo sapien
tgcccgtacaactcggacttgctgt

SEQ ID NO: 1211368 - DNA, 25 bp, Homo sapien
ggctcaactgaaaccctaaggataa

SEQ ID NO: 1211369 - DNA, 25 bp, Homo sapien
tagcatctactcaggcaggtacgcc

SEQ ID NO: 1211370 - DNA, 25 bp, Homo sapien
cagtgcctaggatatgaaagtgccc

SEQ ID NO: 1211371 - DNA, 25 bp, Homo sapien
tgttccagcaatgccaacgggctag

SEQ ID NO: 1211372 - DNA, 25 bp, Homo sapien
ggggttcctggagacgtggcactcg

SEQ ID NO: 1211373 - DNA, 25 bp, Homo sapien
ctatggcctaggaacccgaacctga

SEQ ID NO: 1211374 - DNA, 25 bp, Homo sapien
ctccgctatggcctaggaacccgaa

SEQ ID NO: 1211375 - DNA, 25 bp, Homo sapien
ctgcagctccgctatggcctaggaa

SEQ ID NO: 1211376 - DNA, 25 bp, Homo sapien
gagttggatggaccgaatgaggatg

SEQ ID NO: 1211377 - DNA, 25 bp, Homo sapien
ggtgcagccggttgacgtgaggtct

SEQ ID NO: 1211378 - DNA, 25 bp, Homo sapien
cgtgaggtctgggagttggatggac

SEQ ID NO: 1211379 - DNA, 25 bp, Homo sapien
gagacacctagggatgtgtccgaag

SEQ ID NO: 1211380 - DNA, 25 bp, Homo sapien
aaggaacgcgaggagcgcctcatca

SEQ ID NO: 1211381 - DNA, 25 bp, Homo sapien
gaaggaacgcgaggagcgcctcatc

SEQ ID NO: 1211382 - DNA, 25 bp, Homo sapien
aggaacgcgaggagcgcctcatcac

SEQ ID NO: 1211383 - DNA, 25 bp, Homo sapien
cggaaggaacgcgaggagcgcctca

SEQ ID NO: 1211384 - DNA, 25 bp, Homo sapien
gggagcggaccctacacgtgcgcta

SEQ ID NO: 1211385 - DNA, 25 bp, Homo sapien
ccaagtttgcaacccggcagcgtgg

SEQ ID NO: 1211386 - DNA, 25 bp, Homo sapien
tacacgtgcgctacgtgctgcgccg

SEQ ID NO: 1211387 - DNA, 25 bp, Homo sapien
ccggcagcgtggtcttcgcaacgcg

SEQ ID NO: 1211388 - DNA, 25 bp, Homo sapien
ggagacgagaggatccaccgggttg

SEQ ID NO: 1211389 - DNA, 25 bp, Homo sapien
agaagcacgagcaaggcagagaccg

SEQ ID NO: 1211390 - DNA, 25 bp, Homo sapien
cgagaggatccaccgggttgggagg

SEQ ID NO: 1211391 - DNA, 25 bp, Homo sapien
agggtggtggtagaagcacgagcaa

SEQ ID NO: 1211392 - DNA, 25 bp, Homo sapien
cattgaattggagagatgagctgag

SEQ ID NO: 1211393 - DNA, 25 bp, Homo sapien
ggactgcgcagaggacgagggaaag

SEQ ID NO: 1211394 - DNA, 25 bp, Homo sapien
agctgagatggactgcgcagaggac

SEQ ID NO: 1211395 - DNA, 25 bp, Homo sapien
atggcattgaattggagagatgagc

SEQ ID NO: 1211396 - DNA, 25 bp, Homo sapien
aataaaacaaggaggccaaatcgca

SEQ ID NO: 1211397 - DNA, 25 bp, Homo sapien
gacgttgtaggactacacaaaataa

SEQ ID NO: 1211398 - DNA, 25 bp, Homo sapien
gccaaatcgcaagcgtttgtgggtt

SEQ ID NO: 1211399 - DNA, 25 bp, Homo sapien
tagtaacaagacgttgtaggactac

SEQ ID NO: 1211400 - DNA, 25 bp, Homo sapien
cttgagctaagctccctctgtgatg

SEQ ID NO: 1211401 - DNA, 25 bp, Homo sapien
tttctatccttgagctaagctccct

SEQ ID NO: 1211402 - DNA, 25 bp, Homo sapien
cagttttctatccttgagctaagct

SEQ ID NO: 1211403 - DNA, 25 bp, Homo sapien
tatccttgagctaagctccctctgt

SEQ ID NO: 1211404 - DNA, 25 bp, Homo sapien
ctctaggagtaatgaacagagggtg

SEQ ID NO: 1211405 - DNA, 25 bp, Homo sapien
cctttgagttcaacagacttctgga

SEQ ID NO: 1211406 - DNA, 25 bp, Homo sapien
gggtgataaggaccagtcactctag

SEQ ID NO: 1211407 - DNA, 25 bp, Homo sapien
ttcccagtcacggagggaagactgc

SEQ ID NO: 1211408 - DNA, 25 bp, Homo sapien
gaagggccacaggaatacgatgccc

SEQ ID NO: 1211409 - DNA, 25 bp, Homo sapien
gaagcatttcctgatggaacaccgc

SEQ ID NO: 1211410 - DNA, 25 bp, Homo sapien
cgatgcccactgagagtatgaagca

SEQ ID NO: 1211411 - DNA, 25 bp, Homo sapien
gtatgaagcatttcctgatggaaca

SEQ ID NO: 1211412 - DNA, 25 bp, Homo sapien
tacagcttcttcatggactaatagg

SEQ ID NO: 1211413 - DNA, 25 bp, Homo sapien
gactaataggcccaggtccataccc

SEQ ID NO: 1211414 - DNA, 25 bp, Homo sapien
tctccctagagtgagcctggcacat

SEQ ID NO: 1211415 - DNA, 25 bp, Homo sapien
ggtggagtgaaccattctccctaga

SEQ ID NO: 1211416 - DNA, 25 bp, Homo sapien
gaggttctgccagtcttctagtgat

SEQ ID NO: 1211417 - DNA, 25 bp, Homo sapien
ccggctgttataactggcctccggg

SEQ ID NO: 1211418 - DNA, 25 bp, Homo sapien
ggtccttccggctgttataactggc

SEQ ID NO: 1211419 - DNA, 25 bp, Homo sapien
cttctagtgatcttgggtccttccg

SEQ ID NO: 1211420 - DNA, 25 bp, Homo sapien
attcctccttcttgttggtactcac

SEQ ID NO: 1211421 - DNA, 25 bp, Homo sapien
cttagaagaaacacggaacagggag

SEQ ID NO: 1211422 - DNA, 25 bp, Homo sapien
gaaacacggaacagggagaccaatg

SEQ ID NO: 1211423 - DNA, 25 bp, Homo sapien
cagggagaccaatgtgtacaagagg

SEQ ID NO: 1211424 - DNA, 25 bp, Homo sapien
gtgtacaagaggctgcttccatccc

SEQ ID NO: 1211425 - DNA, 25 bp, Homo sapien
ttgtggcaaagctcatgaggaaggc

SEQ ID NO: 1211426 - DNA, 25 bp, Homo sapien
tgaagcatggatcagtagcaactgc

SEQ ID NO: 1211427 - DNA, 25 bp, Homo sapien
ggtggaccagcaccgtgagacgttt

SEQ ID NO: 1211428 - DNA, 25 bp, Homo sapien
tagaattcgccatgaaaggcctcat

SEQ ID NO: 1211429 - DNA, 25 bp, Homo sapien
gggaaatgcacatcggaaacctgca

SEQ ID NO: 1211430 - DNA, 25 bp, Homo sapien
ggagaactccattagcacccacgag

SEQ ID NO: 1211431 - DNA, 25 bp, Homo sapien
gaatgactcatccagagtgtaggcc

SEQ ID NO: 1211432 - DNA, 25 bp, Homo sapien
tcctggaccaggagcgtatggaaat

SEQ ID NO: 1211433 - DNA, 25 bp, Homo sapien
cacctgccccttctccagggcgtac

SEQ ID NO: 1211434 - DNA, 25 bp, Homo sapien
tccacctgccccttctccagggcgt

SEQ ID NO: 1211435 - DNA, 25 bp, Homo sapien
tcaggttggtagcccagctccacct

SEQ ID NO: 1211436 - DNA, 25 bp, Homo sapien
agctccacctgccccttctccaggg

SEQ ID NO: 1211437 - DNA, 25 bp, Homo sapien
ttggcggcaccaacagactgatagt

SEQ ID NO: 1211438 - DNA, 25 bp, Homo sapien
aagtctcctgacatcttggcggcac

SEQ ID NO: 1211439 - DNA, 25 bp, Homo sapien
gatgtcaattctagggattcagccg

SEQ ID NO: 1211440 - DNA, 25 bp, Homo sapien
tacacagggacaccttgatttgggc

SEQ ID NO: 1211441 - DNA, 25 bp, Homo sapien
gggactgtctctgcgtacttcctgg

SEQ ID NO: 1211442 - DNA, 25 bp, Homo sapien
tgatgctggcttcaccggggacttg

SEQ ID NO: 1211443 - DNA, 25 bp, Homo sapien
tacttcctggggcactctgggcagc

SEQ ID NO: 1211444 - DNA, 25 bp, Homo sapien
ctagtgaaagttcagggtgtcgagc

SEQ ID NO: 1211445 - DNA, 25 bp, Homo sapien
gggtggttactttggtgatgcagaa

SEQ ID NO: 1211446 - DNA, 25 bp, Homo sapien
ttataactgcccgaagacccaggtc

SEQ ID NO: 1211447 - DNA, 25 bp, Homo sapien
catttataactgcccgaagacccag

SEQ ID NO: 1211448 - DNA, 25 bp, Homo sapien
tgacttcctgcaggtcccattggct

SEQ ID NO: 1211449 - DNA, 25 bp, Homo sapien
gctctcagtggcagagatctccagt

SEQ ID NO: 1211450 - DNA, 25 bp, Homo sapien
ttgggacgggtgacatgccatctac

SEQ ID NO: 1211451 - DNA, 25 bp, Homo sapien
tttgatggtgccctcaacgtggacc

SEQ ID NO: 1211452 - DNA, 25 bp, Homo sapien
aatgatgttattgcctgctccagac

SEQ ID NO: 1211453 - DNA, 25 bp, Homo sapien
gagcggtaaagcgtgggcgagaaca

SEQ ID NO: 1211454 - DNA, 25 bp, Homo sapien
ccagaagcgctgagggactagggag

SEQ ID NO: 1211455 - DNA, 25 bp, Homo sapien
ctagaaacgttctgagcgccccaga

SEQ ID NO: 1211456 - DNA, 25 bp, Homo sapien
actagggaggctggcgagcggtaaa

SEQ ID NO: 1211457 - DNA, 25 bp, Homo sapien
ggtcggtgggaagggcccgcagcgc

SEQ ID NO: 1211458 - DNA, 25 bp, Homo sapien
gctctgcagaaagcccggggacgcc

SEQ ID NO: 1211459 - DNA, 25 bp, Homo sapien
tgtttgggcgttcagggcgaaggtg

SEQ ID NO: 1211460 - DNA, 25 bp, Homo sapien
cagcgcaaaacggaagggcgccccg

SEQ ID NO: 1211461 - DNA, 25 bp, Homo sapien
tgtccagctgcgacccaatgggagt

SEQ ID NO: 1211462 - DNA, 25 bp, Homo sapien
gagacccgtatggtgtctgcagtca

SEQ ID NO: 1211463 - DNA, 25 bp, Homo sapien
gctgtttcgtaagcggctggccaat

SEQ ID NO: 1211464 - DNA, 25 bp, Homo sapien
ggatttataaggtcccgccagcaac

SEQ ID NO: 1211465 - DNA, 25 bp, Homo sapien
acgcccgactctgcctccctttggc

SEQ ID NO: 1211466 - DNA, 25 bp, Homo sapien
caatagagaagacggtcgagctggc

SEQ ID NO: 1211467 - DNA, 25 bp, Homo sapien
ggaggacgcggacgcccgactctgc

SEQ ID NO: 1211468 - DNA, 25 bp, Homo sapien
cccaatagagaagacggtcgagctg

SEQ ID NO: 1211469 - DNA, 25 bp, Homo sapien
agaggagagtgagcaactccatggg

SEQ ID NO: 1211470 - DNA, 25 bp, Homo sapien
tgcctcaaggaggtaagaggagagt

SEQ ID NO: 1211471 - DNA, 25 bp, Homo sapien
tgggtttatacatcatcccttctcc

SEQ ID NO: 1211472 - DNA, 25 bp, Homo sapien
agtgagcaactccatgggtttatac

SEQ ID NO: 1211473 - DNA, 25 bp, Homo sapien
tcttccattgtgatcagccgaggag

SEQ ID NO: 1211474 - DNA, 25 bp, Homo sapien
cagtggagtgataggagaacccaga

SEQ ID NO: 1211475 - DNA, 25 bp, Homo sapien
catttctgatacaggaatagtcggg

SEQ ID NO: 1211476 - DNA, 25 bp, Homo sapien
cctggtgccagggatacccagtgat

SEQ ID NO: 1211477 - DNA, 25 bp, Homo sapien
cacggggcactttcagggtcaggat

SEQ ID NO: 1211478 - DNA, 25 bp, Homo sapien
ggtccacggggcactttcagggtca

SEQ ID NO: 1211479 - DNA, 25 bp, Homo sapien
agttggtgatgatgcggtggtccac

SEQ ID NO: 1211480 - DNA, 25 bp, Homo sapien
gttggtgatgatgcggtggtccacg

SEQ ID NO: 1211481 - DNA, 25 bp, Homo sapien
aggtctcaatccgagtcatcttctt

SEQ ID NO: 1211482 - DNA, 25 bp, Homo sapien
gaaggtctcaatccgagtcatcttc

SEQ ID NO: 1211483 - DNA, 25 bp, Homo sapien
tgttgaaggtctcaatccgagtcat

SEQ ID NO: 1211484 - DNA, 25 bp, Homo sapien
ttgaaggtctcaatccgagtcatct

SEQ ID NO: 1211485 - DNA, 25 bp, Homo sapien
tggttggtcaggtgccagtcatcca

SEQ ID NO: 1211486 - DNA, 25 bp, Homo sapien
ggaggaggacgctgtggtggccatt

SEQ ID NO: 1211487 - DNA, 25 bp, Homo sapien
tgtagacgggcaccgtgtgggtctc

SEQ ID NO: 1211488 - DNA, 25 bp, Homo sapien
aagatctcccgtttggctgtggtgg

SEQ ID NO: 1211489 - DNA, 25 bp, Homo sapien
ccagacactggaaccacttggacag

SEQ ID NO: 1211490 - DNA, 25 bp, Homo sapien
aggcctggaacagcgcctccagaca

SEQ ID NO: 1211491 - DNA, 25 bp, Homo sapien
cctccagacactggaaccacttgga

SEQ ID NO: 1211492 - DNA, 25 bp, Homo sapien
gaggcctggaacagcgcctccagac

SEQ ID NO: 1211493 - DNA, 25 bp, Homo sapien
tggtggatgccacaagattccatac

SEQ ID NO: 1211494 - DNA, 25 bp, Homo sapien
ctggtggatgccacaagattccata

SEQ ID NO: 1211495 - DNA, 25 bp, Homo sapien
tgatcttctgcatcatgtaggtgat

SEQ ID NO: 1211496 - DNA, 25 bp, Homo sapien
aggtccttgcggatgtgcacatcac

SEQ ID NO: 1211497 - DNA, 25 bp, Homo sapien
atcttctgcatcatgtaggtgatgc

SEQ ID NO: 1211498 - DNA, 25 bp, Homo sapien
gtccttgcggatgtgcacatcacac

SEQ ID NO: 1211499 - DNA, 25 bp, Homo sapien
catctgctggaaggcggccaggatg

SEQ ID NO: 1211500 - DNA, 25 bp, Homo sapien
cacatctgctggaaggcggccagga

SEQ ID NO: 1211501 - DNA, 25 bp, Homo sapien
atccacatctgctggaaggcggcca

SEQ ID NO: 1211502 - DNA, 25 bp, Homo sapien
tccacatctgctggaaggcggccag

SEQ ID NO: 1211503 - DNA, 25 bp, Homo sapien
acttctgcattaatccatgaagcac

SEQ ID NO: 1211504 - DNA, 25 bp, Homo sapien
catgacacgcgtctgcttgcagtcc

SEQ ID NO: 1211505 - DNA, 25 bp, Homo sapien
acgcgtctgcttgcagtccatttag

SEQ ID NO: 1211506 - DNA, 25 bp, Homo sapien
attaatccatgaagcacatgacacg

SEQ ID NO: 1211507 - DNA, 25 bp, Homo sapien
tctggtttattgaggctagcatgag

SEQ ID NO: 1211508 - DNA, 25 bp, Homo sapien
attctggtttattgaggctagcatg

SEQ ID NO: 1211509 - DNA, 25 bp, Homo sapien
ttctggtttattgaggctagcatga

SEQ ID NO: 1211510 - DNA, 25 bp, Homo sapien
cagataaggagactgcaggtcacac

SEQ ID NO: 1211511 - DNA, 25 bp, Homo sapien
aatccggtgctgatatacaagcttc

SEQ ID NO: 1211512 - DNA, 25 bp, Homo sapien
tgaagttactgagccacatgtacta

SEQ ID NO: 1211513 - DNA, 25 bp, Homo sapien
tgtactaagggtataaatcaaagat

SEQ ID NO: 1211514 - DNA, 25 bp, Homo sapien
ggcacagtgcatcacctaaggtcgg

SEQ ID NO: 1211515 - DNA, 25 bp, Homo sapien
tgccaggctctagaaaaatcctgga

SEQ ID NO: 1211516 - DNA, 25 bp, Homo sapien
tgtaaaccgcttctagctcaagact

SEQ ID NO: 1211517 - DNA, 25 bp, Homo sapien
taacactaatagaccagcaagacag

SEQ ID NO: 1211518 - DNA, 25 bp, Homo sapien
gcccacagagcttagaatacttatc

SEQ ID NO: 1211519 - DNA, 25 bp, Homo sapien
ttaactctgttacctagcctagagt

SEQ ID NO: 1211520 - DNA, 25 bp, Homo sapien
taatactgttaacaatctcaacttc

SEQ ID NO: 1211521 - DNA, 25 bp, Homo sapien
caatctcaacttcaaactgatgtat

SEQ ID NO: 1211522 - DNA, 25 bp, Homo sapien
gcccagcctccgattacggatctta

SEQ ID NO: 1211523 - DNA, 25 bp, Homo sapien
tatcctgagtacaacaagatgtaac

SEQ ID NO: 1211524 - DNA, 25 bp, Homo sapien
gatgtaaccaggcacgtgagacaag

SEQ ID NO: 1211525 - DNA, 25 bp, Homo sapien
gattaaggtgatcccagagtggtag

SEQ ID NO: 1211526 - DNA, 25 bp, Homo sapien
cagtacatacttgtgaatcagctgc

SEQ ID NO: 1211527 - DNA, 25 bp, Homo sapien
tgctgtgggtagatagaggcaacct

SEQ ID NO: 1211528 - DNA, 25 bp, Homo sapien
cacctaataggctctcagtacatac

SEQ ID NO: 1211529 - DNA, 25 bp, Homo sapien
tctgctccgagtatagaaacttccg

SEQ ID NO: 1211530 - DNA, 25 bp, Homo sapien
tcaggttgctattctgccttttcag

SEQ ID NO: 1211531 - DNA, 25 bp, Homo sapien
tgagaactgccaaatgttgccctag

SEQ ID NO: 1211532 - DNA, 25 bp, Homo sapien
cctagtagccaaaaatatcaggttg

SEQ ID NO: 1211533 - DNA, 25 bp, Homo sapien
gaaacttttatatacgtatcggtca

SEQ ID NO: 1211534 - DNA, 25 bp, Homo sapien
gcctgcgcagagacatagtgaccgt

SEQ ID NO: 1211535 - DNA, 25 bp, Homo sapien
tctaggttttaagtgaagcccagtg

SEQ ID NO: 1211536 - DNA, 25 bp, Homo sapien
ctggtgccaagaagtgtccctgtca

SEQ ID NO: 1211537 - DNA, 25 bp, Homo sapien
aacttgatgggaagtccgacccaga

SEQ ID NO: 1211538 - DNA, 25 bp, Homo sapien
gagactcatctgacacttcttttgg

SEQ ID NO: 1211539 - DNA, 25 bp, Homo sapien
gaggtctttcgcactggagacagca

SEQ ID NO: 1211540 - DNA, 25 bp, Homo sapien
gattgtgagtgaacctagaacagca

SEQ ID NO: 1211541 - DNA, 25 bp, Homo sapien
tctgccaaggagtggtttgtactgc

SEQ ID NO: 1211542 - DNA, 25 bp, Homo sapien
tatgaccctatcatcgacagctggg

SEQ ID NO: 1211543 - DNA, 25 bp, Homo sapien
tgtttctcactatgtgcaccgggtg

SEQ ID NO: 1211544 - DNA, 25 bp, Homo sapien
tctccgcgagaagtgaccattgttg

SEQ ID NO: 1211545 - DNA, 25 bp, Homo sapien
catgggaacccagcgctgtgatgct

SEQ ID NO: 1211546 - DNA, 25 bp, Homo sapien
cagaagctagaaggcataggaagcc

SEQ ID NO: 1211547 - DNA, 25 bp, Homo sapien
accttgacctttggttgggctgatc

SEQ ID NO: 1211548 - DNA, 25 bp, Homo sapien
taggaagccctattgacacagttca

SEQ ID NO: 1211549 - DNA, 25 bp, Homo sapien
cactgccttgagagaaaccttgacc

SEQ ID NO: 1211550 - DNA, 25 bp, Homo sapien
gctgtttacaaaggcgcaagttcag

SEQ ID NO: 1211551 - DNA, 25 bp, Homo sapien
aattagagctgtgtcctttagggtc

SEQ ID NO: 1211552 - DNA, 25 bp, Homo sapien
ggtcaggttaatagaggtgccattt

SEQ ID NO: 1211553 - DNA, 25 bp, Homo sapien
caggaaacagatgctatactcaaaa

SEQ ID NO: 1211554 - DNA, 25 bp, Homo sapien
tttgggctctttaggagactctgac

SEQ ID NO: 1211555 - DNA, 25 bp, Homo sapien
ttgggctctttaggagactctgact

SEQ ID NO: 1211556 - DNA, 25 bp, Homo sapien
ctttaggagactctgacttagacat

SEQ ID NO: 1211557 - DNA, 25 bp, Homo sapien
ctgtttgggctctttaggagactct

SEQ ID NO: 1211558 - DNA, 25 bp, Homo sapien
tagctcctcaggctttcttcattgg

SEQ ID NO: 1211559 - DNA, 25 bp, Homo sapien
tcaaaatagctcctcaggctttctt

SEQ ID NO: 1211560 - DNA, 25 bp, Homo sapien
ggctttcttcattggttatttcaaa

SEQ ID NO: 1211561 - DNA, 25 bp, Homo sapien
tcaggctttcttcattggttatttc

SEQ ID NO: 1211562 - DNA, 25 bp, Homo sapien
tccaaactgttcaaattatctctta

SEQ ID NO: 1211563 - DNA, 25 bp, Homo sapien
caaactgttcaaattatctcttagg

SEQ ID NO: 1211564 - DNA, 25 bp, Homo sapien
tttccaaactgttcaaattatctct

SEQ ID NO: 1211565 - DNA, 25 bp, Homo sapien
aaactgttcaaattatctcttaggt

SEQ ID NO: 1211566 - DNA, 25 bp, Homo sapien
gttatggccattcgtaggatggtat

SEQ ID NO: 1211567 - DNA, 25 bp, Homo sapien
cagttatggccattcgtaggatggt

SEQ ID NO: 1211568 - DNA, 25 bp, Homo sapien
ttatggccattcgtaggatggtatt

SEQ ID NO: 1211569 - DNA, 25 bp, Homo sapien
agttatggccattcgtaggatggta

SEQ ID NO: 1211570 - DNA, 25 bp, Homo sapien
cttctccggctctcctctccagcta

SEQ ID NO: 1211571 - DNA, 25 bp, Homo sapien
tgtctcctttgtagcagttaggccc

SEQ ID NO: 1211572 - DNA, 25 bp, Homo sapien
tcacttctccggctctcctctccag

SEQ ID NO: 1211573 - DNA, 25 bp, Homo sapien
aaaacatgtctcctttgtagcagtt

SEQ ID NO: 1211574 - DNA, 25 bp, Homo sapien
caatatcttaagcaagtgtaagtcc

SEQ ID NO: 1211575 - DNA, 25 bp, Homo sapien
tatcgattctttaacagtaatggac

SEQ ID NO: 1211576 - DNA, 25 bp, Homo sapien
tcacagatgtagagtaggaataccc

SEQ ID NO: 1211577 - DNA, 25 bp, Homo sapien
tgtgacttgtggacttttggagacc

SEQ ID NO: 1211578 - DNA, 25 bp, Homo sapien
cgcggaagtgatggcagtcagccct

SEQ ID NO: 1211579 - DNA, 25 bp, Homo sapien
gaagtggaatccctccattcagatg

SEQ ID NO: 1211580 - DNA, 25 bp, Homo sapien
tgccccgaatctcccgaagtggaat

SEQ ID NO: 1211581 - DNA, 25 bp, Homo sapien
tcctgtccgtcaactccgggttatg

SEQ ID NO: 1211582 - DNA, 25 bp, Homo sapien
gcaggaagaataaagccaccaactt

SEQ ID NO: 1211583 - DNA, 25 bp, Homo sapien
tagcccggctaatcatggaagtgtg

SEQ ID NO: 1211584 - DNA, 25 bp, Homo sapien
ggtcccatctttctagggcctggat

SEQ ID NO: 1211585 - DNA, 25 bp, Homo sapien
gggcctggatctgcttatagagcag

SEQ ID NO: 1211586 - DNA, 25 bp, Homo sapien
gaagaaacctcttagagaattcagt

SEQ ID NO: 1211587 - DNA, 25 bp, Homo sapien
cacccactgggcaataaactttcca

SEQ ID NO: 1211588 - DNA, 25 bp, Homo sapien
attcagtaccaaccaagcttcagcc

SEQ ID NO: 1211589 - DNA, 25 bp, Homo sapien
gcatggtcaaacttagccatcccct

SEQ ID NO: 1211590 - DNA, 25 bp, Homo sapien
tggaggaggaacttcccaagtgctt

SEQ ID NO: 1211591 - DNA, 25 bp, Homo sapien
acttctttgctgaagtgagaggaag

SEQ ID NO: 1211592 - DNA, 25 bp, Homo sapien
tgcggggtggaggaggaacttccca

SEQ ID NO: 1211593 - DNA, 25 bp, Homo sapien
tttgctgaagtgagaggaagagtct

SEQ ID NO: 1211594 - DNA, 25 bp, Homo sapien
tctttttattcctacagttccagtc

SEQ ID NO: 1211595 - DNA, 25 bp, Homo sapien
tagaaggcggctgtactgatgacac

SEQ ID NO: 1211596 - DNA, 25 bp, Homo sapien
ttctatggagtctccaaccttcagg

SEQ ID NO: 1211597 - DNA, 25 bp, Homo sapien
caggaattccgttacggcctagaag

SEQ ID NO: 1211598 - DNA, 25 bp, Homo sapien
gcccaggctagagggaaacagctac

SEQ ID NO: 1211599 - DNA, 25 bp, Homo sapien
tgctgtttgtggcaggaacccctgg

SEQ ID NO: 1211600 - DNA, 25 bp, Homo sapien
gaacccctggctgtgcaaataaatg

SEQ ID NO: 1211601 - DNA, 25 bp, Homo sapien
gataatcgaaaactgctgtttgtgg

SEQ ID NO: 1211602 - DNA, 25 bp, Homo sapien
gaagggagcatgtacgcttggtcca

SEQ ID NO: 1211603 - DNA, 25 bp, Homo sapien
cagcaagggctttgtgactgccgac

SEQ ID NO: 1211604 - DNA, 25 bp, Homo sapien
tcctgtagccatggaagagggccaa

SEQ ID NO: 1211605 - DNA, 25 bp, Homo sapien
aactgggctactcacaaaagatgcg

SEQ ID NO: 1211606 - DNA, 25 bp, Homo sapien
tcgctttaagctctggttcactctg

SEQ ID NO: 1211607 - DNA, 25 bp, Homo sapien
taagctctggttcactctggatcat

SEQ ID NO: 1211608 - DNA, 25 bp, Homo sapien
gctctggttcactctggatcatccc

SEQ ID NO: 1211609 - DNA, 25 bp, Homo sapien
gctttaagctctggttcactctgga

SEQ ID NO: 1211610 - DNA, 25 bp, Homo sapien
ctggagcacagaaacttagatcttc

SEQ ID NO: 1211611 - DNA, 25 bp, Homo sapien
catcttgcgggaggacttagaggaa

SEQ ID NO: 1211612 - DNA, 25 bp, Homo sapien
tgagaagactcctaaagactttcct

SEQ ID NO: 1211613 - DNA, 25 bp, Homo sapien
ttttaaggtatctagtctggagcac

SEQ ID NO: 1211614 - DNA, 25 bp, Homo sapien
tgtaaggtctacctgaagggtgtgc

SEQ ID NO: 1211615 - DNA, 25 bp, Homo sapien
ggtgtgcaccccaaatttcctgagg

SEQ ID NO: 1211616 - DNA, 25 bp, Homo sapien
gcgggttgctcacttacactggaaa

SEQ ID NO: 1211617 - DNA, 25 bp, Homo sapien
gcctcagggaggtttagtcaacatg

SEQ ID NO: 1211618 - DNA, 25 bp, Homo sapien
accggaggccgctaactctcgcgag

SEQ ID NO: 1211619 - DNA, 25 bp, Homo sapien
gaggccgctaactctcgcgagaaca

SEQ ID NO: 1211620 - DNA, 25 bp, Homo sapien
ctccgcggccatcccacaccggagg

SEQ ID NO: 1211621 - DNA, 25 bp, Homo sapien
gccgctaactctcgcgagaacatag

SEQ ID NO: 1211622 - DNA, 25 bp, Homo sapien
ttgggcatggcgaccgtatcggggc

SEQ ID NO: 1211623 - DNA, 25 bp, Homo sapien
ggcatggcgaccgtatcggggcgag

SEQ ID NO: 1211624 - DNA, 25 bp, Homo sapien
catggcgaccgtatcggggcgaggc

SEQ ID NO: 1211625 - DNA, 25 bp, Homo sapien
ctcttgggcatggcgaccgtatcgg

SEQ ID NO: 1211626 - DNA, 25 bp, Homo sapien
caaaatgtttcagcgcccctgcccc

SEQ ID NO: 1211627 - DNA, 25 bp, Homo sapien
gagcgctcacctcggcacggtccag

SEQ ID NO: 1211628 - DNA, 25 bp, Homo sapien
tccagccgcgggcacgcgagcgctc

SEQ ID NO: 1211629 - DNA, 25 bp, Homo sapien
cgcgggcacgcgagcgctcacctcg

SEQ ID NO: 1211630 - DNA, 25 bp, Homo sapien
caaggaagaggccttctctcgtcag

SEQ ID NO: 1211631 - DNA, 25 bp, Homo sapien
cagcaccaaccctcaaggaagaggc

SEQ ID NO: 1211632 - DNA, 25 bp, Homo sapien
gaggccttctctcgtcagcgtcttc

SEQ ID NO: 1211633 - DNA, 25 bp, Homo sapien
aaccctcaaggaagaggccttctct

SEQ ID NO: 1211634 - DNA, 25 bp, Homo sapien
gaacagcgttggctacggctttctt

SEQ ID NO: 1211635 - DNA, 25 bp, Homo sapien
tacggctttcttgactcgtccagac

SEQ ID NO: 1211636 - DNA, 25 bp, Homo sapien
cgttggctacggctttcttgactcg

SEQ ID NO: 1211637 - DNA, 25 bp, Homo sapien
tttcttgactcgtccagacctcacg

SEQ ID NO: 1211638 - DNA, 25 bp, Homo sapien
tcgatgatgtcacagggctcaccag

SEQ ID NO: 1211639 - DNA, 25 bp, Homo sapien
gcatccatctcatcactgctgtcga

SEQ ID NO: 1211640 - DNA, 25 bp, Homo sapien
gacagttctctcatggatgctttcc

SEQ ID NO: 1211641 - DNA, 25 bp, Homo sapien
tctgcaggaacctgagaggcttcca

SEQ ID NO: 1211642 - DNA, 25 bp, Homo sapien
tcttacaaatcagggaaaaattcac

SEQ ID NO: 1211643 - DNA, 25 bp, Homo sapien
ttcttacaaatcagggaaaaattca

SEQ ID NO: 1211644 - DNA, 25 bp, Homo sapien
tgaaaagaggtcaccatccagtgag

SEQ ID NO: 1211645 - DNA, 25 bp, Homo sapien
aaagagtgagctctctgtggtcgca

SEQ ID NO: 1211646 - DNA, 25 bp, Homo sapien
taatccagctggaaagatgagcaga

SEQ ID NO: 1211647 - DNA, 25 bp, Homo sapien
gctcaaggagtccaaagctgggtca

SEQ ID NO: 1211648 - DNA, 25 bp, Homo sapien
actcctggtctctgtatgaacttta

SEQ ID NO: 1211649 - DNA, 25 bp, Homo sapien
cctaccaatatgtgacctgtctctc

SEQ ID NO: 1211650 - DNA, 25 bp, Homo sapien
ggtctctgtatgaactttactgcac

SEQ ID NO: 1211651 - DNA, 25 bp, Homo sapien
agttttctaagactcctggtctctg

SEQ ID NO: 1211652 - DNA, 25 bp, Homo sapien
tcggatcacacaagcccggagacag

SEQ ID NO: 1211653 - DNA, 25 bp, Homo sapien
agagatcggatcacacaagcccgga

SEQ ID NO: 1211654 - DNA, 25 bp, Homo sapien
gactctggtcgcagacgcaaaggca

SEQ ID NO: 1211655 - DNA, 25 bp, Homo sapien
ctccattgactctggtcgcagacgc

SEQ ID NO: 1211656 - DNA, 25 bp, Homo sapien
agtcaaaccccaacacaaattctca

SEQ ID NO: 1211657 - DNA, 25 bp, Homo sapien
tagtcaaaccccaacacaaattctc

SEQ ID NO: 1211658 - DNA, 25 bp, Homo sapien
tcattagtcaaaccccaacacaaat

SEQ ID NO: 1211659 - DNA, 25 bp, Homo sapien
agagttcattagtcaaaccccaaca

SEQ ID NO: 1211660 - DNA, 25 bp, Homo sapien
cagggcacttccaaatgctacagaa

SEQ ID NO: 1211661 - DNA, 25 bp, Homo sapien
gggcacttccaaatgctacagaagt

SEQ ID NO: 1211662 - DNA, 25 bp, Homo sapien
agggcacttccaaatgctacagaag

SEQ ID NO: 1211663 - DNA, 25 bp, Homo sapien
ggcacttccaaatgctacagaagtc

SEQ ID NO: 1211664 - DNA, 25 bp, Homo sapien
gtcgtccgccgtgccagctgtcctg

SEQ ID NO: 1211665 - DNA, 25 bp, Homo sapien
catcaaaattaatgggcttggcttt

SEQ ID NO: 1211666 - DNA, 25 bp, Homo sapien
cttcagacatgccctgtacgtcctg

SEQ ID NO: 1211667 - DNA, 25 bp, Homo sapien
catcacaacggctccagtgtcccac

SEQ ID NO: 1211668 - DNA, 25 bp, Homo sapien
cttgaagttgaattcccacattggt

SEQ ID NO: 1211669 - DNA, 25 bp, Homo sapien
aagttgaattcccacattggttcct

SEQ ID NO: 1211670 - DNA, 25 bp, Homo sapien
attggttcctgtctgttcccaacaa

SEQ ID NO: 1211671 - DNA, 25 bp, Homo sapien
ttcctgtctgttcccaacaatcttt

SEQ ID NO: 1211672 - DNA, 25 bp, Homo sapien
ttttcatggcacttcggattgagta

SEQ ID NO: 1211673 - DNA, 25 bp, Homo sapien
ttgttttcatggcacttcggattga

SEQ ID NO: 1211674 - DNA, 25 bp, Homo sapien
catggcacttcggattgagtatccc

SEQ ID NO: 1211675 - DNA, 25 bp, Homo sapien
tggcacttcggattgagtatccctt

SEQ ID NO: 1211676 - DNA, 25 bp, Homo sapien
tcctcctgtacacttgctctttaac

SEQ ID NO: 1211677 - DNA, 25 bp, Homo sapien
aatcctcctgtacacttgctcttta

SEQ ID NO: 1211678 - DNA, 25 bp, Homo sapien
gctgcaatcctcctgtacacttgct

SEQ ID NO: 1211679 - DNA, 25 bp, Homo sapien
tgcaatcctcctgtacacttgctct

SEQ ID NO: 1211680 - DNA, 25 bp, Homo sapien
gcagtttccgaccaccatggacagg

SEQ ID NO: 1211681 - DNA, 25 bp, Homo sapien
atgccaccagtcaaagagccgaacg

SEQ ID NO: 1211682 - DNA, 25 bp, Homo sapien
actgcgcagtttccgaccaccatgg

SEQ ID NO: 1211683 - DNA, 25 bp, Homo sapien
gaggatgccaccagtcaaagagccg

SEQ ID NO: 1211684 - DNA, 25 bp, Homo sapien
tctgattactaatggactacactcg

SEQ ID NO: 1211685 - DNA, 25 bp, Homo sapien
gagatatacaatccagccaccctgt

SEQ ID NO: 1211686 - DNA, 25 bp, Homo sapien
gccaccctgtccaaactggaatctg

SEQ ID NO: 1211687 - DNA, 25 bp, Homo sapien
ctaatggactacactcgaggctgcc

SEQ ID NO: 1211688 - DNA, 25 bp, Homo sapien
aagggaaaatattcacttgaatttg

SEQ ID NO: 1211689 - DNA, 25 bp, Homo sapien
aatttcaggcctctaaggttcctct

SEQ ID NO: 1211690 - DNA, 25 bp, Homo sapien
ggcagctaaactggaagcaacaatt

SEQ ID NO: 1211691 - DNA, 25 bp, Homo sapien
tcctctgatccataagggaatgctg

SEQ ID NO: 1211692 - DNA, 25 bp, Homo sapien
tgcatggacggaagaccaggcttct

SEQ ID NO: 1211693 - DNA, 25 bp, Homo sapien
tctaacagttcaaggaaagggtcac

SEQ ID NO: 1211694 - DNA, 25 bp, Homo sapien
catggcatctttagttcaggcaacc

SEQ ID NO: 1211695 - DNA, 25 bp, Homo sapien
taggagtcatctaaacaacaggagg

SEQ ID NO: 1211696 - DNA, 25 bp, Homo sapien
tgaagccaagataacgactggtaac

SEQ ID NO: 1211697 - DNA, 25 bp, Homo sapien
catgtatcatgctagaaacggcaac

SEQ ID NO: 1211698 - DNA, 25 bp, Homo sapien
tgtgtccataactctcacagcgttc

SEQ ID NO: 1211699 - DNA, 25 bp, Homo sapien
cacagcgttcaaggatcaatttatg

SEQ ID NO: 1211700 - DNA, 25 bp, Homo sapien
aaatgccgaaggccaggcggctagg

SEQ ID NO: 1211701 - DNA, 25 bp, Homo sapien
gcaaatgccgaaggccaggcggcta

SEQ ID NO: 1211702 - DNA, 25 bp, Homo sapien
caaatgccgaaggccaggcggctag

SEQ ID NO: 1211703 - DNA, 25 bp, Homo sapien
aatgccgaaggccaggcggctaggc

SEQ ID NO: 1211704 - DNA, 25 bp, Homo sapien
gttggcagggccttctcagcgtcag

SEQ ID NO: 1211705 - DNA, 25 bp, Homo sapien
catgcagacagcagccgaatgtggc

SEQ ID NO: 1211706 - DNA, 25 bp, Homo sapien
tagcgacacccatcgtttctggagg

SEQ ID NO: 1211707 - DNA, 25 bp, Homo sapien
tctcttagactgagtgccggaggct

SEQ ID NO: 1211708 - DNA, 25 bp, Homo sapien
gtctcctgactctcccgaagagact

SEQ ID NO: 1211709 - DNA, 25 bp, Homo sapien
gaagttggcgtcagcatcggcgcca

SEQ ID NO: 1211710 - DNA, 25 bp, Homo sapien
cgtgtatggcatcctggagccggct

SEQ ID NO: 1211711 - DNA, 25 bp, Homo sapien
caggcggtccccctcattgattgtg

SEQ ID NO: 1211712 - DNA, 25 bp, Homo sapien
ttcaggattcacccccaaagcagtg

SEQ ID NO: 1211713 - DNA, 25 bp, Homo sapien
tcaggattcacccccaaagcagtgt

SEQ ID NO: 1211714 - DNA, 25 bp, Homo sapien
cttcaggattcacccccaaagcagt

SEQ ID NO: 1211715 - DNA, 25 bp, Homo sapien
caggattcacccccaaagcagtgtc

SEQ ID NO: 1211716 - DNA, 25 bp, Homo sapien
agttctgatatctcttcctcccgct

SEQ ID NO: 1211717 - DNA, 25 bp, Homo sapien
ctctagaagctgctcccgacacatg

SEQ ID NO: 1211718 - DNA, 25 bp, Homo sapien
tgctttcagttctgatatctcttcc

SEQ ID NO: 1211719 - DNA, 25 bp, Homo sapien
ctcagctcccgggttaaggtggcaa

SEQ ID NO: 1211720 - DNA, 25 bp, Homo sapien
cacagtcatccgcagtgaccgttca

SEQ ID NO: 1211721 - DNA, 25 bp, Homo sapien
agacccccgaaggtgactgggcctg

SEQ ID NO: 1211722 - DNA, 25 bp, Homo sapien
cctcactggagacccccgaaggtga

SEQ ID NO: 1211723 - DNA, 25 bp, Homo sapien
gttcatggcgggacaccaggcactc

SEQ ID NO: 1211724 - DNA, 25 bp, Homo sapien
cagagaagggatacatgggaggctc

SEQ ID NO: 1211725 - DNA, 25 bp, Homo sapien
aatctcagagaagggatacatggga

SEQ ID NO: 1211726 - DNA, 25 bp, Homo sapien
ggaaatctcagagaagggatacatg

SEQ ID NO: 1211727 - DNA, 25 bp, Homo sapien
ctcagagaagggatacatgggaggc

SEQ ID NO: 1211728 - DNA, 25 bp, Homo sapien
gcgctgcccggagccgctctcgcac

SEQ ID NO: 1211729 - DNA, 25 bp, Homo sapien
caaggtggtgactcgctccagcgct

SEQ ID NO: 1211730 - DNA, 25 bp, Homo sapien
ggtggtgactcgctccagcgctgcc

SEQ ID NO: 1211731 - DNA, 25 bp, Homo sapien
gctcctccaaggtggtgactcgctc

SEQ ID NO: 1211732 - DNA, 25 bp, Homo sapien
tccaggagctgcagactgagggtga

SEQ ID NO: 1211733 - DNA, 25 bp, Homo sapien
tgcagactgagggtgagcaggcaga

SEQ ID NO: 1211734 - DNA, 25 bp, Homo sapien
aggagctgcagactgagggtgagca

SEQ ID NO: 1211735 - DNA, 25 bp, Homo sapien
gctgcagactgagggtgagcaggca

SEQ ID NO: 1211736 - DNA, 25 bp, Homo sapien
cttccacaggcgtttcggccccagc

SEQ ID NO: 1211737 - DNA, 25 bp, Homo sapien
ttccacaggcgtttcggccccagct

SEQ ID NO: 1211738 - DNA, 25 bp, Homo sapien
gggaacacatgacccctgctacaca

SEQ ID NO: 1211739 - DNA, 25 bp, Homo sapien
tggggaacacatgacccctgctaca

SEQ ID NO: 1211740 - DNA, 25 bp, Homo sapien
cttggggaacacatgacccctgcta

SEQ ID NO: 1211741 - DNA, 25 bp, Homo sapien
ggaacacatgacccctgctacacag

SEQ ID NO: 1211742 - DNA, 25 bp, Homo sapien
aggtcccgctgatgcttgctgctca

SEQ ID NO: 1211743 - DNA, 25 bp, Homo sapien
cacggttgttgttagggtgaccagt

SEQ ID NO: 1211744 - DNA, 25 bp, Homo sapien
caggtcctcctcgagttcagtcacg

SEQ ID NO: 1211745 - DNA, 25 bp, Homo sapien
tcctccgacttgatgaggtcccggc

SEQ ID NO: 1211746 - DNA, 25 bp, Homo sapien
cggtgcagggactccttgttggcca

SEQ ID NO: 1211747 - DNA, 25 bp, Homo sapien
gatggatgttgcctcacgctgagca

SEQ ID NO: 1211748 - DNA, 25 bp, Homo sapien
gcttgtcattgaggtcatggatgga

SEQ ID NO: 1211749 - DNA, 25 bp, Homo sapien
cagtgtagtaatccgctcttccatg

SEQ ID NO: 1211750 - DNA, 25 bp, Homo sapien
tctgccttgcgcatcgtctgctgca

SEQ ID NO: 1211751 - DNA, 25 bp, Homo sapien
tctctgccttgcgcatcgtctgctg

SEQ ID NO: 1211752 - DNA, 25 bp, Homo sapien
ctgccttgcgcatcgtctgctgcag

SEQ ID NO: 1211753 - DNA, 25 bp, Homo sapien
cgtctctgccttgcgcatcgtctgc

SEQ ID NO: 1211754 - DNA, 25 bp, Homo sapien
gagggctgcaattctctgggccagc

SEQ ID NO: 1211755 - DNA, 25 bp, Homo sapien
cttggtgagggctgcaattctctgg

SEQ ID NO: 1211756 - DNA, 25 bp, Homo sapien
ttgccttggtgagggctgcaattct

SEQ ID NO: 1211757 - DNA, 25 bp, Homo sapien
tgagggctgcaattctctgggccag

SEQ ID NO: 1211758 - DNA, 25 bp, Homo sapien
agaacatgggggacagaggcagatc

SEQ ID NO: 1211759 - DNA, 25 bp, Homo sapien
tcagaacatgggggacagaggcaga

SEQ ID NO: 1211760 - DNA, 25 bp, Homo sapien
cagaacatgggggacagaggcagat

SEQ ID NO: 1211761 - DNA, 25 bp, Homo sapien
caggtacttcaatacctgccaggtc

SEQ ID NO: 1211762 - DNA, 25 bp, Homo sapien
gtgacgctcagcctccacttatcat

SEQ ID NO: 1211763 - DNA, 25 bp, Homo sapien
cttatcatcttggagcaggaccacc

SEQ ID NO: 1211764 - DNA, 25 bp, Homo sapien
cccaggtacttcaatacctgccagg

SEQ ID NO: 1211765 - DNA, 25 bp, Homo sapien
tcaatgttgccatgccgttcttcag

SEQ ID NO: 1211766 - DNA, 25 bp, Homo sapien
gctcctcaatgttgccatgccgttc

SEQ ID NO: 1211767 - DNA, 25 bp, Homo sapien
cctcaatgttgccatgccgttcttc

SEQ ID NO: 1211768 - DNA, 25 bp, Homo sapien
caatgttgccatgccgttcttcagc

SEQ ID NO: 1211769 - DNA, 25 bp, Homo sapien
cttccacagaccgccctgggagcct

SEQ ID NO: 1211770 - DNA, 25 bp, Homo sapien
ccagtctcctgaccacctccccctt

SEQ ID NO: 1211771 - DNA, 25 bp, Homo sapien
ccttccacagaccgccctgggagcc

SEQ ID NO: 1211772 - DNA, 25 bp, Homo sapien
tcctgctggggtttgactccctccc

SEQ ID NO: 1211773 - DNA, 25 bp, Homo sapien
ctgctggggtttgactccctcccct

SEQ ID NO: 1211774 - DNA, 25 bp, Homo sapien
tgctggggtttgactccctcccctg

SEQ ID NO: 1211775 - DNA, 25 bp, Homo sapien
actcgctgagcagccggtccactgt

SEQ ID NO: 1211776 - DNA, 25 bp, Homo sapien
ggtccactgtgtccgacagccgctt

SEQ ID NO: 1211777 - DNA, 25 bp, Homo sapien
gccgcttgttgtggtcctcattcat

SEQ ID NO: 1211778 - DNA, 25 bp, Homo sapien
gagctgcagacgctcgttggactcg

SEQ ID NO: 1211779 - DNA, 25 bp, Homo sapien
tcaatctgccgctgggagctctcca

SEQ ID NO: 1211780 - DNA, 25 bp, Homo sapien
cctcaatctgccgctgggagctctc

SEQ ID NO: 1211781 - DNA, 25 bp, Homo sapien
ctcaatctgccgctgggagctctcc

SEQ ID NO: 1211782 - DNA, 25 bp, Homo sapien
cttctcaatctcttcagacaggcgg

SEQ ID NO: 1211783 - DNA, 25 bp, Homo sapien
tcagctggtccacctcttggcgcag

SEQ ID NO: 1211784 - DNA, 25 bp, Homo sapien
tctcaatctcttcagacaggcggcc

SEQ ID NO: 1211785 - DNA, 25 bp, Homo sapien
cccttcagctggtccacctcttggc

SEQ ID NO: 1211786 - DNA, 25 bp, Homo sapien
ggtccatcaggaccccgtcctggca

SEQ ID NO: 1211787 - DNA, 25 bp, Homo sapien
tcaggaccccgtcctggcatgccca

SEQ ID NO: 1211788 - DNA, 25 bp, Homo sapien
atgcccagcctctggcgctgcagta

SEQ ID NO: 1211789 - DNA, 25 bp, Homo sapien
ttcctcacggtccatcaggaccccg

SEQ ID NO: 1211790 - DNA, 25 bp, Homo sapien
caaccctgagattttaggacccaag

SEQ ID NO: 1211791 - DNA, 25 bp, Homo sapien
aatgattctatagtcgaacccaagc

SEQ ID NO: 1211792 - DNA, 25 bp, Homo sapien
cagagtgaagggacacagtgagcct

SEQ ID NO: 1211793 - DNA, 25 bp, Homo sapien
gtgagcctacaacagaccatacgag

SEQ ID NO: 1211794 - DNA, 25 bp, Homo sapien
caaatgtctgaagggctgccgtgta

SEQ ID NO: 1211795 - DNA, 25 bp, Homo sapien
gaagagacatcttagcaggacacag

SEQ ID NO: 1211796 - DNA, 25 bp, Homo sapien
tcaaagaggtattcgagcagaggct

SEQ ID NO: 1211797 - DNA, 25 bp, Homo sapien
taagcaagagagcagacgtatgccc

SEQ ID NO: 1211798 - DNA, 25 bp, Homo sapien
caatgccgagtagcggcgatgcacg

SEQ ID NO: 1211799 - DNA, 25 bp, Homo sapien
gggtgcgtgtgtggttgtgcccagg

SEQ ID NO: 1211800 - DNA, 25 bp, Homo sapien
ggagaaccgcacgtctgctgcactg

SEQ ID NO: 1211801 - DNA, 25 bp, Homo sapien
ttggcagactcttccctcaatgccg

SEQ ID NO: 1211802 - DNA, 25 bp, Homo sapien
ggagtcgtaataagacacccagata

SEQ ID NO: 1211803 - DNA, 25 bp, Homo sapien
aaaggagtcgtaataagacacccag

SEQ ID NO: 1211804 - DNA, 25 bp, Homo sapien
taaaggagtcgtaataagacaccca

SEQ ID NO: 1211805 - DNA, 25 bp, Homo sapien
aaggagtcgtaataagacacccaga

SEQ ID NO: 1211806 - DNA, 25 bp, Homo sapien
tcatcctcatccacgtcggagatct

SEQ ID NO: 1211807 - DNA, 25 bp, Homo sapien
tggctcatcctcatccacgtcggag

SEQ ID NO: 1211808 - DNA, 25 bp, Homo sapien
ccacgtcggagatctcagggtcact

SEQ ID NO: 1211809 - DNA, 25 bp, Homo sapien
tcatccacgtcggagatctcagggt

SEQ ID NO: 1211810 - DNA, 25 bp, Homo sapien
agggtctgggcatctgagtggccgc

SEQ ID NO: 1211811 - DNA, 25 bp, Homo sapien
ggggagacaacatccgcagagccca

SEQ ID NO: 1211812 - DNA, 25 bp, Homo sapien
gccgctgggggagacaacatccgca

SEQ ID NO: 1211813 - DNA, 25 bp, Homo sapien
gtctgggcatctgagtggccgctgg

SEQ ID NO: 1211814 - DNA, 25 bp, Homo sapien
agagttgggcaaacccatatagggt

SEQ ID NO: 1211815 - DNA, 25 bp, Homo sapien
gcagctataagagttgggcaaaccc

SEQ ID NO: 1211816 - DNA, 25 bp, Homo sapien
catatagggtttttccaacacaaag

SEQ ID NO: 1211817 - DNA, 25 bp, Homo sapien
cctgcccttcaatgcacttcccaag

SEQ ID NO: 1211818 - DNA, 25 bp, Homo sapien
ccatgctgccactggttacacgcgt

SEQ ID NO: 1211819 - DNA, 25 bp, Homo sapien
ccacgcttgcgcagctgcttcaggt

SEQ ID NO: 1211820 - DNA, 25 bp, Homo sapien
gctgcttcaggtttagggcttccat

SEQ ID NO: 1211821 - DNA, 25 bp, Homo sapien
gcgcggagctccgtggactccttct

SEQ ID NO: 1211822 - DNA, 25 bp, Homo sapien
agggacagggccgtcagagaggtgg

SEQ ID NO: 1211823 - DNA, 25 bp, Homo sapien
cgggaggtgagcttaggtgtggagc

SEQ ID NO: 1211824 - DNA, 25 bp, Homo sapien
ggtcatgacccccattcggtccagg

SEQ ID NO: 1211825 - DNA, 25 bp, Homo sapien
tgtggagcggccgctgagtggtggg

SEQ ID NO: 1211826 - DNA, 25 bp, Homo sapien
gcttcctcctatgctttcttaagtc

SEQ ID NO: 1211827 - DNA, 25 bp, Homo sapien
agcttcctcctatgctttcttaagt

SEQ ID NO: 1211828 - DNA, 25 bp, Homo sapien
tcctatgctttcttaagtcactggg

SEQ ID NO: 1211829 - DNA, 25 bp, Homo sapien
tcctcctatgctttcttaagtcact

SEQ ID NO: 1211830 - DNA, 25 bp, Homo sapien
ggccaagcttctctagccgcagcgt

SEQ ID NO: 1211831 - DNA, 25 bp, Homo sapien
ctcggttctcttcccgagacactgg

SEQ ID NO: 1211832 - DNA, 25 bp, Homo sapien
gggtggccaagcttctctagccgca

SEQ ID NO: 1211833 - DNA, 25 bp, Homo sapien
ggttctcttcccgagacactggcga

SEQ ID NO: 1211834 - DNA, 25 bp, Homo sapien
gcgcttggcgcccttgtgcagggag

SEQ ID NO: 1211835 - DNA, 25 bp, Homo sapien
atcccgactcagctggatcagcctg

SEQ ID NO: 1211836 - DNA, 25 bp, Homo sapien
aatggacgacttgatgcccttgcgc

SEQ ID NO: 1211837 - DNA, 25 bp, Homo sapien
gggttgctgccctgatcctccaagg

SEQ ID NO: 1211838 - DNA, 25 bp, Homo sapien
ctgaattcggagtctgttagcagaa

SEQ ID NO: 1211839 - DNA, 25 bp, Homo sapien
ttctttagccgccggtccttctctg

SEQ ID NO: 1211840 - DNA, 25 bp, Homo sapien
tggcaggcaccataggctcctgcat

SEQ ID NO: 1211841 - DNA, 25 bp, Homo sapien
tcctgcatactgaattcggagtctg

SEQ ID NO: 1211842 - DNA, 25 bp, Homo sapien
gctccccaccctggacttcctctgc

SEQ ID NO: 1211843 - DNA, 25 bp, Homo sapien
ccttgctccccaccctggacttcct

SEQ ID NO: 1211844 - DNA, 25 bp, Homo sapien
ttgctccccaccctggacttcctct

SEQ ID NO: 1211845 - DNA, 25 bp, Homo sapien
ccccaccctggacttcctctgctct

SEQ ID NO: 1211846 - DNA, 25 bp, Homo sapien
aactgttcttgctccagggaccact

SEQ ID NO: 1211847 - DNA, 25 bp, Homo sapien
ttccttctcccttaactgttcttgc

SEQ ID NO: 1211848 - DNA, 25 bp, Homo sapien
ggctgtgcaagagctggagacccac

SEQ ID NO: 1211849 - DNA, 25 bp, Homo sapien
ctgttcttgctccagggaccactgg

SEQ ID NO: 1211850 - DNA, 25 bp, Homo sapien
ataggaagaggaacaacagactcac

SEQ ID NO: 1211851 - DNA, 25 bp, Homo sapien
tataggaagaggaacaacagactca

SEQ ID NO: 1211852 - DNA, 25 bp, Homo sapien
ttataggaagaggaacaacagactc

SEQ ID NO: 1211853 - DNA, 25 bp, Homo sapien
cttataggaagaggaacaacagact

SEQ ID NO: 1211854 - DNA, 25 bp, Homo sapien
ctccaaccaggagaccacagtagga

SEQ ID NO: 1211855 - DNA, 25 bp, Homo sapien
aagggcattcctttcctgcgggcat

SEQ ID NO: 1211856 - DNA, 25 bp, Homo sapien
ctgcgggcatcttcaagcagctggt

SEQ ID NO: 1211857 - DNA, 25 bp, Homo sapien
gagaccacagtaggaccatcccact

SEQ ID NO: 1211858 - DNA, 25 bp, Homo sapien
gacaccgggcacagggaggtaattc

SEQ ID NO: 1211859 - DNA, 25 bp, Homo sapien
ctgcagacaccgggcacagggaggt

SEQ ID NO: 1211860 - DNA, 25 bp, Homo sapien
cagacaccgggcacagggaggtaat

SEQ ID NO: 1211861 - DNA, 25 bp, Homo sapien
gcagacaccgggcacagggaggtaa

SEQ ID NO: 1211862 - DNA, 25 bp, Homo sapien
gtgcagggcattgctgatgccgatc

SEQ ID NO: 1211863 - DNA, 25 bp, Homo sapien
gcagaggggctggtcaatgacacca

SEQ ID NO: 1211864 - DNA, 25 bp, Homo sapien
cgacagagcggacatgatggcacca

SEQ ID NO: 1211865 - DNA, 25 bp, Homo sapien
aatggccaggcggagcttgagccgg

SEQ ID NO: 1211866 - DNA, 25 bp, Homo sapien
tcctgggcaaaggaggggccactca

SEQ ID NO: 1211867 - DNA, 25 bp, Homo sapien
ctgaaaatgtcctgggcaaaggagg

SEQ ID NO: 1211868 - DNA, 25 bp, Homo sapien
gttccaggacctctgaaaatgtcct

SEQ ID NO: 1211869 - DNA, 25 bp, Homo sapien
tatgttccaggacctctgaaaatgt

SEQ ID NO: 1211870 - DNA, 25 bp, Homo sapien
tgggtgacccagacattcccagaag

SEQ ID NO: 1211871 - DNA, 25 bp, Homo sapien
gggtgacccagacattcccagaaga

SEQ ID NO: 1211872 - DNA, 25 bp, Homo sapien
catgggtgacccagacattcccaga

SEQ ID NO: 1211873 - DNA, 25 bp, Homo sapien
tcatgggtgacccagacattcccag

SEQ ID NO: 1211874 - DNA, 25 bp, Homo sapien
caggaacgagtgcagcgtgttaggg

SEQ ID NO: 1211875 - DNA, 25 bp, Homo sapien
agcaggaacgagtgcagcgtgttag

SEQ ID NO: 1211876 - DNA, 25 bp, Homo sapien
ctagcaggaacgagtgcagcgtgtt

SEQ ID NO: 1211877 - DNA, 25 bp, Homo sapien
aggaacgagtgcagcgtgttagggg

SEQ ID NO: 1211878 - DNA, 25 bp, Homo sapien
tgagcccagctgccctcctcactgt

SEQ ID NO: 1211879 - DNA, 25 bp, Homo sapien
gagcccagctgccctcctcactgtc

SEQ ID NO: 1211880 - DNA, 25 bp, Homo sapien
ctgagcccagctgccctcctcactg

SEQ ID NO: 1211881 - DNA, 25 bp, Homo sapien
tgcggtattgtgcagcagacgtgcc

SEQ ID NO: 1211882 - DNA, 25 bp, Homo sapien
tctcactccgggacaaggctggctt

SEQ ID NO: 1211883 - DNA, 25 bp, Homo sapien
taatgaacagaagtagctatcccgg

SEQ ID NO: 1211884 - DNA, 25 bp, Homo sapien
tgtgttacagaggacctgcagcgtg

SEQ ID NO: 1211885 - DNA, 25 bp, Homo sapien
gtggtccagcatgcgggcgtccacc

SEQ ID NO: 1211886 - DNA, 25 bp, Homo sapien
gggcgtccaccaggcactccatgaa

SEQ ID NO: 1211887 - DNA, 25 bp, Homo sapien
ccaggctgggtagccattcattccc

SEQ ID NO: 1211888 - DNA, 25 bp, Homo sapien
tcccaatccactcatggttcatgtc

SEQ ID NO: 1211889 - DNA, 25 bp, Homo sapien
acacatgatgccatactgaagactg

SEQ ID NO: 1211890 - DNA, 25 bp, Homo sapien
gctccttccggtcataattcagcct

SEQ ID NO: 1211891 - DNA, 25 bp, Homo sapien
catgatgccatactgaagactggtt

SEQ ID NO: 1211892 - DNA, 25 bp, Homo sapien
tccggtcataattcagcctcttcag

SEQ ID NO: 1211893 - DNA, 25 bp, Homo sapien
gtggtcgaagttctcgtccagggcc

SEQ ID NO: 1211894 - DNA, 25 bp, Homo sapien
cgtagtcccggagcccaatagactg

SEQ ID NO: 1211895 - DNA, 25 bp, Homo sapien
tgcaggtttcctgcgtagtcccgga

SEQ ID NO: 1211896 - DNA, 25 bp, Homo sapien
tagactggacccaatgaaccacctg

SEQ ID NO: 1211897 - DNA, 25 bp, Homo sapien
acagggagagactcaagttgactga

SEQ ID NO: 1211898 - DNA, 25 bp, Homo sapien
cctttgtgtatgagggaaagaaaga

SEQ ID NO: 1211899 - DNA, 25 bp, Homo sapien
tacagggagagactcaagttgactg

SEQ ID NO: 1211900 - DNA, 25 bp, Homo sapien
ctaagcctttgtgtatgagggaaag

SEQ ID NO: 1211901 - DNA, 25 bp, Homo sapien
taaaccatcaagaggaggtagttcc

SEQ ID NO: 1211902 - DNA, 25 bp, Homo sapien
aaccatcaagaggaggtagttcctt

SEQ ID NO: 1211903 - DNA, 25 bp, Homo sapien
catcaagaggaggtagttccttccc

SEQ ID NO: 1211904 - DNA, 25 bp, Homo sapien
caaacctaaaccatcaagaggaggt

SEQ ID NO: 1211905 - DNA, 25 bp, Homo sapien
gtcatccagcttccggtctgtgccc

SEQ ID NO: 1211906 - DNA, 25 bp, Homo sapien
cccaaggccaacaggttattgaact

SEQ ID NO: 1211907 - DNA, 25 bp, Homo sapien
caggttattgaactctctttccatc

SEQ ID NO: 1211908 - DNA, 25 bp, Homo sapien
atccagcttccggtctgtgcccaag

SEQ ID NO: 1211909 - DNA, 25 bp, Homo sapien
cctgttggaattgccatcctcacgc

SEQ ID NO: 1211910 - DNA, 25 bp, Homo sapien
gagggccctgttggaattgccatcc

SEQ ID NO: 1211911 - DNA, 25 bp, Homo sapien
gcccgagggccctgttggaattgcc

SEQ ID NO: 1211912 - DNA, 25 bp, Homo sapien
atgggggacaccagaggcccgaggg

SEQ ID NO: 1211913 - DNA, 25 bp, Homo sapien
agggcgcgcggcgaaacaccttgtc

SEQ ID NO: 1211914 - DNA, 25 bp, Homo sapien
ggagggcgcgcggcgaaacaccttg

SEQ ID NO: 1211915 - DNA, 25 bp, Homo sapien
gcgcgcggcgaaacaccttgtcatc

SEQ ID NO: 1211916 - DNA, 25 bp, Homo sapien
gcgaccgtggtgctcccgcggccgg

SEQ ID NO: 1211917 - DNA, 25 bp, Homo sapien
ccgggagggtctccgcggaagcgct

SEQ ID NO: 1211918 - DNA, 25 bp, Homo sapien
ttcaggcatgatcttctttggcggg

SEQ ID NO: 1211919 - DNA, 25 bp, Homo sapien
tggacacacggaagcccgccgggag

SEQ ID NO: 1211920 - DNA, 25 bp, Homo sapien
tccgcggaagcgctgagcatgccgc

SEQ ID NO: 1211921 - DNA, 25 bp, Homo sapien
ggaagaagcccgcgctcggctgggc

SEQ ID NO: 1211922 - DNA, 25 bp, Homo sapien
gccatgcccagcccgcctgttactc

SEQ ID NO: 1211923 - DNA, 25 bp, Homo sapien
catgcccagcccgcctgttactcac

SEQ ID NO: 1211924 - DNA, 25 bp, Homo sapien
caggaagaagcccgcgctcggctgg

SEQ ID NO: 1211925 - DNA, 25 bp, Homo sapien
cggcgggttagtgcgcacacacgct

SEQ ID NO: 1211926 - DNA, 25 bp, Homo sapien
cagccgcgggagaacacacagagcg

SEQ ID NO: 1211927 - DNA, 25 bp, Homo sapien
gtcagcaggagtaggtccgaaccgt

SEQ ID NO: 1211928 - DNA, 25 bp, Homo sapien
cgtggaggtctccagtctctgcgac

SEQ ID NO: 1211929 - DNA, 25 bp, Homo sapien
agagaggttgtaggatgtgtgcgac

SEQ ID NO: 1211930 - DNA, 25 bp, Homo sapien
gcgccccaggccagacgaagcagga

SEQ ID NO: 1211931 - DNA, 25 bp, Homo sapien
tgcgacagcggcaacgcagcgtgct

SEQ ID NO: 1211932 - DNA, 25 bp, Homo sapien
gcagcgtgctccaagcgcaaagcgc

SEQ ID NO: 1211933 - DNA, 25 bp, Homo sapien
agagacaggcatcgcactgtgaggc

SEQ ID NO: 1211934 - DNA, 25 bp, Homo sapien
gagacaggcatcgcactgtgaggca

SEQ ID NO: 1211935 - DNA, 25 bp, Homo sapien
ctagtcccggaaggcggagagcatg

SEQ ID NO: 1211936 - DNA, 25 bp, Homo sapien
tgtccgtagagatagtgggagtgag

SEQ ID NO: 1211937 - DNA, 25 bp, Homo sapien
agagcatgtgtccgtagagatagtg

SEQ ID NO: 1211938 - DNA, 25 bp, Homo sapien
cccggaaggcggagagcatgtgtcc

SEQ ID NO: 1211939 - DNA, 25 bp, Homo sapien
cggaaggaaggggaacgagcaagag

SEQ ID NO: 1211940 - DNA, 25 bp, Homo sapien
gagcctgtgaaacccagaaggagga

SEQ ID NO: 1211941 - DNA, 25 bp, Homo sapien
agaggagcctgtgaaacccagaagg

SEQ ID NO: 1211942 - DNA, 25 bp, Homo sapien
ccagaggagcctgtgaaacccagaa

SEQ ID NO: 1211943 - DNA, 25 bp, Homo sapien
tgagatccagggcaaccggaaagtc

SEQ ID NO: 1211944 - DNA, 25 bp, Homo sapien
tatattctgagatccagggcaaccg

SEQ ID NO: 1211945 - DNA, 25 bp, Homo sapien
gggtggacgaatatattctgagatc

SEQ ID NO: 1211946 - DNA, 25 bp, Homo sapien
cggaaagtcacggacgagactagga

SEQ ID NO: 1211947 - DNA, 25 bp, Homo sapien
gattcagcttatgccagggcctgga

SEQ ID NO: 1211948 - DNA, 25 bp, Homo sapien
tgggtgcctccacaataccaggaaa

SEQ ID NO: 1211949 - DNA, 25 bp, Homo sapien
gcagctgggcggatcttaggaattc

SEQ ID NO: 1211950 - DNA, 25 bp, Homo sapien
ggctcagagctcagggatccatttc

SEQ ID NO: 1211951 - DNA, 25 bp, Homo sapien
tcctttcctctcactttgatgaagc

SEQ ID NO: 1211952 - DNA, 25 bp, Homo sapien
agccacctgtaggatggcactgcac

SEQ ID NO: 1211953 - DNA, 25 bp, Homo sapien
tgcactggcccctatccaagaaaca

SEQ ID NO: 1211954 - DNA, 25 bp, Homo sapien
tgatgaagccctcggttccatcatc

SEQ ID NO: 1211955 - DNA, 25 bp, Homo sapien
cagaactcaaggtgatcaggttgca

SEQ ID NO: 1211956 - DNA, 25 bp, Homo sapien
ccctgctcagaactcaaggtgatca

SEQ ID NO: 1211957 - DNA, 25 bp, Homo sapien
gcaagcctagtccctgctcagaact

SEQ ID NO: 1211958 - DNA, 25 bp, Homo sapien
tgctcagaactcaaggtgatcaggt

SEQ ID NO: 1211959 - DNA, 25 bp, Homo sapien
gagcagcgggctttaagccctggca

SEQ ID NO: 1211960 - DNA, 25 bp, Homo sapien
ccagggaacactaagggagagcaag

SEQ ID NO: 1211961 - DNA, 25 bp, Homo sapien
tcctctaccgaaaaggagcagcggg

SEQ ID NO: 1211962 - DNA, 25 bp, Homo sapien
ttgcccaagcctaagggagagccca

SEQ ID NO: 1211963 - DNA, 25 bp, Homo sapien
cccagggatgggagctgtttatctc

SEQ ID NO: 1211964 - DNA, 25 bp, Homo sapien
tcagatggctatgcattgcccaact

SEQ ID NO: 1211965 - DNA, 25 bp, Homo sapien
tcatcttaccatccattacccaggg

SEQ ID NO: 1211966 - DNA, 25 bp, Homo sapien
gagctgtttatctccatccaactca

SEQ ID NO: 1211967 - DNA, 25 bp, Homo sapien
tgtttattggtacgtacacacccac

SEQ ID NO: 1211968 - DNA, 25 bp, Homo sapien
tgccttacgacatggccaacagtgg

SEQ ID NO: 1211969 - DNA, 25 bp, Homo sapien
tcaaggtgctctgaatggacccagc

SEQ ID NO: 1211970 - DNA, 25 bp, Homo sapien
cacccattcctgatgcactgagcaa

SEQ ID NO: 1211971 - DNA, 25 bp, Homo sapien
catccgaccaaggtctcctgtgctg

SEQ ID NO: 1211972 - DNA, 25 bp, Homo sapien
aggtctcctgtgctgaagttgccgg

SEQ ID NO: 1211973 - DNA, 25 bp, Homo sapien
gccatccgaccaaggtctcctgtgc

SEQ ID NO: 1211974 - DNA, 25 bp, Homo sapien
caaggtctcctgtgctgaagttgcc

SEQ ID NO: 1211975 - DNA, 25 bp, Homo sapien
ttcagaacaggcacccttcacactt

SEQ ID NO: 1211976 - DNA, 25 bp, Homo sapien
attcagaacaggcacccttcacact

SEQ ID NO: 1211977 - DNA, 25 bp, Homo sapien
ggattcagaacaggcacccttcaca

SEQ ID NO: 1211978 - DNA, 25 bp, Homo sapien
tgggattcagaacaggcacccttca

SEQ ID NO: 1211979 - DNA, 25 bp, Homo sapien
caacagggtactcagcacagctctc

SEQ ID NO: 1211980 - DNA, 25 bp, Homo sapien
tcagcacagctctctgcagggtgcc

SEQ ID NO: 1211981 - DNA, 25 bp, Homo sapien
ccaacagggtactcagcacagctct

SEQ ID NO: 1211982 - DNA, 25 bp, Homo sapien
gcacagctctctgcagggtgcccat

SEQ ID NO: 1211983 - DNA, 25 bp, Homo sapien
tccaggtgggccaatgacagttggt

SEQ ID NO: 1211984 - DNA, 25 bp, Homo sapien
gataacagaagaatagtgttgcagg

SEQ ID NO: 1211985 - DNA, 25 bp, Homo sapien
tgcaacatctggacctggatccaca

SEQ ID NO: 1211986 - DNA, 25 bp, Homo sapien
ggtttggtctgataaggctgcctaa

SEQ ID NO: 1211987 - DNA, 25 bp, Homo sapien
ccttgtggacttcactgatgttctc

SEQ ID NO: 1211988 - DNA, 25 bp, Homo sapien
ttgtggacttcactgatgttctcaa

SEQ ID NO: 1211989 - DNA, 25 bp, Homo sapien
ctgtccttgtggacttcactgatgt

SEQ ID NO: 1211990 - DNA, 25 bp, Homo sapien
gtccttgtggacttcactgatgttc

SEQ ID NO: 1211991 - DNA, 25 bp, Homo sapien
catcatgggccagaacagacgaaac

SEQ ID NO: 1211992 - DNA, 25 bp, Homo sapien
tgagatgcttcacccgacatcatgg

SEQ ID NO: 1211993 - DNA, 25 bp, Homo sapien
agacgaaacaggcagcgcctcagct

SEQ ID NO: 1211994 - DNA, 25 bp, Homo sapien
gagcactgcgcaaggcttcagctga

SEQ ID NO: 1211995 - DNA, 25 bp, Homo sapien
cacaaggccagcagttggccagcca

SEQ ID NO: 1211996 - DNA, 25 bp, Homo sapien
ctgacacaaggccagcagttggcca

SEQ ID NO: 1211997 - DNA, 25 bp, Homo sapien
gacacaaggccagcagttggccagc

SEQ ID NO: 1211998 - DNA, 25 bp, Homo sapien
acaaggccagcagttggccagccat

SEQ ID NO: 1211999 - DNA, 25 bp, Homo sapien
taagccataaggcatccagtccaat

SEQ ID NO: 1212000 - DNA, 25 bp, Homo sapien
agctgagtgacaatcgggctccgca

SEQ ID NO: 1212001 - DNA, 25 bp, Homo sapien
gaagtgacctagcttcccaggatct

SEQ ID NO: 1212002 - DNA, 25 bp, Homo sapien
tgggatctcccaaagcagtcggtag

SEQ ID NO: 1212003 - DNA, 25 bp, Homo sapien
ggtcaccaaagctggcagagctccc

SEQ ID NO: 1212004 - DNA, 25 bp, Homo sapien
acacctcgacgccttcagcagccgc

SEQ ID NO: 1212005 - DNA, 25 bp, Homo sapien
cagagctcccggctgcctgactgtt

SEQ ID NO: 1212006 - DNA, 25 bp, Homo sapien
gagctcccggctgcctgactgttct

SEQ ID NO: 1212007 - DNA, 25 bp, Homo sapien
ctcagccccggacgcttttaaagag

SEQ ID NO: 1212008 - DNA, 25 bp, Homo sapien
tgcctggatcttagcagtcctctgg

SEQ ID NO: 1212009 - DNA, 25 bp, Homo sapien
acttgagacccgtctggtgcctgga

SEQ ID NO: 1212010 - DNA, 25 bp, Homo sapien
aatcacatggtacggcagagactca

SEQ ID NO: 1212011 - DNA, 25 bp, Homo sapien
gctgggctctggacaacgcgcggca

SEQ ID NO: 1212012 - DNA, 25 bp, Homo sapien
tgggctgggctctggacaacgcgcg

SEQ ID NO: 1212013 - DNA, 25 bp, Homo sapien
acaacgcgcggcagctcatagtcct

SEQ ID NO: 1212014 - DNA, 25 bp, Homo sapien
ctctggacaacgcgcggcagctcat

SEQ ID NO: 1212015 - DNA, 25 bp, Homo sapien
cattcccagaggttccattcagcaa

SEQ ID NO: 1212016 - DNA, 25 bp, Homo sapien
tgatgtgtcccacttgtcacatgca

SEQ ID NO: 1212017 - DNA, 25 bp, Homo sapien
ggaactccaggtaccctgtgatgtg

SEQ ID NO: 1212018 - DNA, 25 bp, Homo sapien
gcaacttaaaatagcagcgctcact

SEQ ID NO: 1212019 - DNA, 25 bp, Homo sapien
gggcacatcagcagacgggcaccaa

SEQ ID NO: 1212020 - DNA, 25 bp, Homo sapien
cacaggctgggcacatcagcagacg

SEQ ID NO: 1212021 - DNA, 25 bp, Homo sapien
atcagcagacgggcaccaaggggca

SEQ ID NO: 1212022 - DNA, 25 bp, Homo sapien
gcaccaaggggcacgaggcaagcac

SEQ ID NO: 1212023 - DNA, 25 bp, Homo sapien
tcgatgccgatgtaggcggcctgga

SEQ ID NO: 1212024 - DNA, 25 bp, Homo sapien
cacctcgatgccgatgtaggcggcc

SEQ ID NO: 1212025 - DNA, 25 bp, Homo sapien
cctcgatgccgatgtaggcggcctg

SEQ ID NO: 1212026 - DNA, 25 bp, Homo sapien
gatgccgatgtaggcggcctggaaa

SEQ ID NO: 1212027 - DNA, 25 bp, Homo sapien
ccggaggtagcggtccacagcaatt

SEQ ID NO: 1212028 - DNA, 25 bp, Homo sapien
tgtggaagtaggtctgtggcccaat

SEQ ID NO: 1212029 - DNA, 25 bp, Homo sapien
ccagcgacacgatgaagcagaaggt

SEQ ID NO: 1212030 - DNA, 25 bp, Homo sapien
ggatgaggaccggacaggcaaccat

SEQ ID NO: 1212031 - DNA, 25 bp, Homo sapien
agccagccatcatgtggtgctgcga

SEQ ID NO: 1212032 - DNA, 25 bp, Homo sapien
tgcgagtaccttcggcgctgtggac

SEQ ID NO: 1212033 - DNA, 25 bp, Homo sapien
gccatcatgtggtgctgcgagtacc

SEQ ID NO: 1212034 - DNA, 25 bp, Homo sapien
tctagatggccctcaagccagccat

SEQ ID NO: 1212035 - DNA, 25 bp, Homo sapien
ggtaagttcacagtacagtcctcca

SEQ ID NO: 1212036 - DNA, 25 bp, Homo sapien
gctctgaggtcatgggcactggtaa

SEQ ID NO: 1212037 - DNA, 25 bp, Homo sapien
gacaggcagcctcaggttccctggc

SEQ ID NO: 1212038 - DNA, 25 bp, Homo sapien
ggttccctggctgcaagagcttcag

SEQ ID NO: 1212039 - DNA, 25 bp, Homo sapien
agagccaaagcgtgcctttgggaag

SEQ ID NO: 1212040 - DNA, 25 bp, Homo sapien
gagagccaaagcgtgcctttgggaa

SEQ ID NO: 1212041 - DNA, 25 bp, Homo sapien
gagccaaagcgtgcctttgggaagc

SEQ ID NO: 1212042 - DNA, 25 bp, Homo sapien
gggccagtccctggcaatatgccca

SEQ ID NO: 1212043 - DNA, 25 bp, Homo sapien
agggccagtccctggcaatatgccc

SEQ ID NO: 1212044 - DNA, 25 bp, Homo sapien
ggccagtccctggcaatatgcccag

SEQ ID NO: 1212045 - DNA, 25 bp, Homo sapien
gccagtccctggcaatatgcccagg

SEQ ID NO: 1212046 - DNA, 25 bp, Homo sapien
tggccaagaggagtttcgtagaccc

SEQ ID NO: 1212047 - DNA, 25 bp, Homo sapien
gggccacatctacctttgactggca

SEQ ID NO: 1212048 - DNA, 25 bp, Homo sapien
tcagtacgactctctgtgcccaggg

SEQ ID NO: 1212049 - DNA, 25 bp, Homo sapien
actggcatgtcagggcagcaagcct

SEQ ID NO: 1212050 - DNA, 25 bp, Homo sapien
taaaggcatctgttaggcctagagt

SEQ ID NO: 1212051 - DNA, 25 bp, Homo sapien
cacatgggcttactggttaaaggca

SEQ ID NO: 1212052 - DNA, 25 bp, Homo sapien
tgggctgacgcaagatacacatggg

SEQ ID NO: 1212053 - DNA, 25 bp, Homo sapien
aaaatcctacagcttcttgggctga

SEQ ID NO: 1212054 - DNA, 25 bp, Homo sapien
gaaggcatgacctgagagcaactgt

SEQ ID NO: 1212055 - DNA, 25 bp, Homo sapien
actgttctgggacccagaagccaca

SEQ ID NO: 1212056 - DNA, 25 bp, Homo sapien
gagagcaactgttctgggacccaga

SEQ ID NO: 1212057 - DNA, 25 bp, Homo sapien
tctctgaaagcagaaggcatgacct

SEQ ID NO: 1212058 - DNA, 25 bp, Homo sapien
agtccttcccagagtctaacttcag

SEQ ID NO: 1212059 - DNA, 25 bp, Homo sapien
ctgctgcatcagaactcaagaagac

SEQ ID NO: 1212060 - DNA, 25 bp, Homo sapien
tcagctccgcattccacagcttgtg

SEQ ID NO: 1212061 - DNA, 25 bp, Homo sapien
ttgtgcttccacattagaaagtcct

SEQ ID NO: 1212062 - DNA, 25 bp, Homo sapien
cagtaaatgcaggaaaactggaccc

SEQ ID NO: 1212063 - DNA, 25 bp, Homo sapien
ctggacagtaaatgcaggaaaactg

SEQ ID NO: 1212064 - DNA, 25 bp, Homo sapien
ttggcattctcagctctttctgcac

SEQ ID NO: 1212065 - DNA, 25 bp, Homo sapien
gacagtaaatgcaggaaaactggac

SEQ ID NO: 1212066 - DNA, 25 bp, Homo sapien
gatagtcagggattgaatcttccct

SEQ ID NO: 1212067 - DNA, 25 bp, Homo sapien
cggtttggatagtcagggattgaat

SEQ ID NO: 1212068 - DNA, 25 bp, Homo sapien
ggattgaatcttccctcttccgttc

SEQ ID NO: 1212069 - DNA, 25 bp, Homo sapien
cctgcggtttggatagtcagggatt

SEQ ID NO: 1212070 - DNA, 25 bp, Homo sapien
cctcatggaagcactggacatggga

SEQ ID NO: 1212071 - DNA, 25 bp, Homo sapien
ctcctcatggaagcactggacatgg

SEQ ID NO: 1212072 - DNA, 25 bp, Homo sapien
gggtggcagaggtccacgtctttcc

SEQ ID NO: 1212073 - DNA, 25 bp, Homo sapien
gcagaggtccacgtctttccaccat

SEQ ID NO: 1212074 - DNA, 25 bp, Homo sapien
catgggaccaaccagcgaagacaca

SEQ ID NO: 1212075 - DNA, 25 bp, Homo sapien
atgggaccaaccagcgaagacacat

SEQ ID NO: 1212076 - DNA, 25 bp, Homo sapien
tctaagatttagtgcttgccatgca

SEQ ID NO: 1212077 - DNA, 25 bp, Homo sapien
gggctgagtcttcaggatctaagat

SEQ ID NO: 1212078 - DNA, 25 bp, Homo sapien
gggcctctaagaggagcaccctcct

SEQ ID NO: 1212079 - DNA, 25 bp, Homo sapien
agctgcctcgaaaggcccctctgag

SEQ ID NO: 1212080 - DNA, 25 bp, Homo sapien
catagtacttctgcgggtcgccgga

SEQ ID NO: 1212081 - DNA, 25 bp, Homo sapien
tcgaactcgcacttgatcacgggct

SEQ ID NO: 1212082 - DNA, 25 bp, Homo sapien
tcagtcccaccacgaaggagaggat

SEQ ID NO: 1212083 - DNA, 25 bp, Homo sapien
cttgcggattaggtagaagacctcc

SEQ ID NO: 1212084 - DNA, 25 bp, Homo sapien
cgggcatgtgaggactggactgaga

SEQ ID NO: 1212085 - DNA, 25 bp, Homo sapien
cagaggtgtagggtagttaactcct

SEQ ID NO: 1212086 - DNA, 25 bp, Homo sapien
accacactctgtgggtatctcttca

SEQ ID NO: 1212087 - DNA, 25 bp, Homo sapien
gatgtgggctggtgggagcggaagg

SEQ ID NO: 1212088 - DNA, 25 bp, Homo sapien
tgagggattcacatgacagcaaggc

SEQ ID NO: 1212089 - DNA, 25 bp, Homo sapien
tgttcagaaggtcaactcgacggcc

SEQ ID NO: 1212090 - DNA, 25 bp, Homo sapien
gaagctctggactgctcatgggatg

SEQ ID NO: 1212091 - DNA, 25 bp, Homo sapien
caggcagaatgctcccgagttggca

SEQ ID NO: 1212092 - DNA, 25 bp, Homo sapien
ttctgatcagggtttgctaccgcca

SEQ ID NO: 1212093 - DNA, 25 bp, Homo sapien
ccgtcattgcttcctgtctgctgaa

SEQ ID NO: 1212094 - DNA, 25 bp, Homo sapien
ccgccagtgcgtaactatggaaaca

SEQ ID NO: 1212095 - DNA, 25 bp, Homo sapien
gatgggcgcccagcaatgtgctctc

SEQ ID NO: 1212096 - DNA, 25 bp, Homo sapien
cacacagatttgagctcagccctgg

SEQ ID NO: 1212097 - DNA, 25 bp, Homo sapien
gaacgtaatcgtgtcccctatccta

SEQ ID NO: 1212098 - DNA, 25 bp, Homo sapien
tgaggcatcgcaatgtaagactcgg

SEQ ID NO: 1212099 - DNA, 25 bp, Homo sapien
gggcctatgcagaggtccacaacac

SEQ ID NO: 1212100 - DNA, 25 bp, Homo sapien
gcacgggggccaaggatgccccgtc

SEQ ID NO: 1212101 - DNA, 25 bp, Homo sapien
gcacctgtgcactaactgctcacgt

SEQ ID NO: 1212102 - DNA, 25 bp, Homo sapien
aattgctcaaccttccgcacctgtg

SEQ ID NO: 1212103 - DNA, 25 bp, Homo sapien
cagtaagctggtgatgggcatcccc

SEQ ID NO: 1212104 - DNA, 25 bp, Homo sapien
acatgatccgttcccggagggacag

SEQ ID NO: 1212105 - DNA, 25 bp, Homo sapien
aaggattttgagatttcttggagtt

SEQ ID NO: 1212106 - DNA, 25 bp, Homo sapien
tgaagaagttgtttggagtctctgt

SEQ ID NO: 1212107 - DNA, 25 bp, Homo sapien
tggaatctgactcccctcgtagtat

SEQ ID NO: 1212108 - DNA, 25 bp, Homo sapien
tgactcccctcgtagtattttctgg

SEQ ID NO: 1212109 - DNA, 25 bp, Homo sapien
aatctaggtttgatgctgctatggc

SEQ ID NO: 1212110 - DNA, 25 bp, Homo sapien
tctggttctgatggtgcatggccaa

SEQ ID NO: 1212111 - DNA, 25 bp, Homo sapien
gtcttctgtgcgacaatagagctaa

SEQ ID NO: 1212112 - DNA, 25 bp, Homo sapien
caattgtgtccacattggtagcagc

SEQ ID NO: 1212113 - DNA, 25 bp, Homo sapien
tgcactcaggtttgccttgggccat

SEQ ID NO: 1212114 - DNA, 25 bp, Homo sapien
ccctgcactcaggtttgccttgggc

SEQ ID NO: 1212115 - DNA, 25 bp, Homo sapien
ctccctgcactcaggtttgccttgg

SEQ ID NO: 1212116 - DNA, 25 bp, Homo sapien
cctgcactcaggtttgccttgggcc

SEQ ID NO: 1212117 - DNA, 25 bp, Homo sapien
gggcattgaagaccacgcaggtttc

SEQ ID NO: 1212118 - DNA, 25 bp, Homo sapien
cagggaggtcttcatccagtgccaa

SEQ ID NO: 1212119 - DNA, 25 bp, Homo sapien
gacagggtagggatcatgcaatcca

SEQ ID NO: 1212120 - DNA, 25 bp, Homo sapien
catcttggtgaatccgagggacagg

SEQ ID NO: 1212121 - DNA, 25 bp, Homo sapien
gaagatgccgcttttcctacagtat

SEQ ID NO: 1212122 - DNA, 25 bp, Homo sapien
gccattgaagatgccgcttttccta

SEQ ID NO: 1212123 - DNA, 25 bp, Homo sapien
taaatgccattgaagatgccgcttt

SEQ ID NO: 1212124 - DNA, 25 bp, Homo sapien
ttgaagatgccgcttttcctacagt

SEQ ID NO: 1212125 - DNA, 25 bp, Homo sapien
catcttcgtcctaagtgctgtccac

SEQ ID NO: 1212126 - DNA, 25 bp, Homo sapien
gctctgcatcttcgtcctaagtgct

SEQ ID NO: 1212127 - DNA, 25 bp, Homo sapien
tgcatcttcgtcctaagtgctgtcc

SEQ ID NO: 1212128 - DNA, 25 bp, Homo sapien
tctggctctgcatcttcgtcctaag

SEQ ID NO: 1212129 - DNA, 25 bp, Homo sapien
ctcgtacctagtctcagcaaggaag

SEQ ID NO: 1212130 - DNA, 25 bp, Homo sapien
ggtgtatcctcgtacctagtctcag

SEQ ID NO: 1212131 - DNA, 25 bp, Homo sapien
ctgataggaggtgtatcctcgtacc

SEQ ID NO: 1212132 - DNA, 25 bp, Homo sapien
tcagcaaggaaggttgccagcttca

SEQ ID NO: 1212133 - DNA, 25 bp, Homo sapien
gtaggggccctctttatccttgaga

SEQ ID NO: 1212134 - DNA, 25 bp, Homo sapien
gttcgtgtcttgcttttttgggctg

SEQ ID NO: 1212135 - DNA, 25 bp, Homo sapien
ccttgagaacgtacaggttgagaca

SEQ ID NO: 1212136 - DNA, 25 bp, Homo sapien
tacaggttgagacagtgttcgtgtc

SEQ ID NO: 1212137 - DNA, 25 bp, Homo sapien
gtagatgttaaccagttctggtgtc

SEQ ID NO: 1212138 - DNA, 25 bp, Homo sapien
ggcctgtagatgttaaccagttctg

SEQ ID NO: 1212139 - DNA, 25 bp, Homo sapien
agccaggcctgtagatgttaaccag

SEQ ID NO: 1212140 - DNA, 25 bp, Homo sapien
caggcctgtagatgttaaccagttc

SEQ ID NO: 1212141 - DNA, 25 bp, Homo sapien
gtgagggctgatgcggtgccatgga

SEQ ID NO: 1212142 - DNA, 25 bp, Homo sapien
ggctgatgcggtgccatggagatac

SEQ ID NO: 1212143 - DNA, 25 bp, Homo sapien
ctctgtgagggctgatgcggtgcca

SEQ ID NO: 1212144 - DNA, 25 bp, Homo sapien
agggctgatgcggtgccatggagat

SEQ ID NO: 1212145 - DNA, 25 bp, Homo sapien
catagggtgacatggtgctgactgg

SEQ ID NO: 1212146 - DNA, 25 bp, Homo sapien
atagggtgacatggtgctgactggt

SEQ ID NO: 1212147 - DNA, 25 bp, Homo sapien
catggctttgggcattttgttcaca

SEQ ID NO: 1212148 - DNA, 25 bp, Homo sapien
tagtaggagctcagtcagcgctgat

SEQ ID NO: 1212149 - DNA, 25 bp, Homo sapien
taattccgacttcccctatagacgc

SEQ ID NO: 1212150 - DNA, 25 bp, Homo sapien
aattctggaggtgccttaattccga

SEQ ID NO: 1212151 - DNA, 25 bp, Homo sapien
accaggtgaattctcccctctcatc

SEQ ID NO: 1212152 - DNA, 25 bp, Homo sapien
caccaggtgaattctcccctctcat

SEQ ID NO: 1212153 - DNA, 25 bp, Homo sapien
tctggctggcttcgtttattgtgag

SEQ ID NO: 1212154 - DNA, 25 bp, Homo sapien
tgtggaagcacaagaccgatgcttc

SEQ ID NO: 1212155 - DNA, 25 bp, Homo sapien
tcgtttattgtgagagtcaagagaa

SEQ ID NO: 1212156 - DNA, 25 bp, Homo sapien
caagagaataaacgtttgtgaaaat

SEQ ID NO: 1212157 - DNA, 25 bp, Homo sapien
aagtttgcctttggcggtctcctgc

SEQ ID NO: 1212158 - DNA, 25 bp, Homo sapien
tggtagcagtatcataaaagtcctc

SEQ ID NO: 1212159 - DNA, 25 bp, Homo sapien
agtcctcaaggacaccacatggaga

SEQ ID NO: 1212160 - DNA, 25 bp, Homo sapien
cacatggagagttagtcggagtcac

SEQ ID NO: 1212161 - DNA, 25 bp, Homo sapien
tatgttcactctttccacaatattt

SEQ ID NO: 1212162 - DNA, 25 bp, Homo sapien
atgttcactctttccacaatatttg

SEQ ID NO: 1212163 - DNA, 25 bp, Homo sapien
gataaaaggagatcacgtttattaa

SEQ ID NO: 1212164 - DNA, 25 bp, Homo sapien
aaaggagatcacgtttattaagcat

SEQ ID NO: 1212165 - DNA, 25 bp, Homo sapien
ctattgaaactcaatctcttctgtc

SEQ ID NO: 1212166 - DNA, 25 bp, Homo sapien
cagggatccgtgtggtttggaggaa

SEQ ID NO: 1212167 - DNA, 25 bp, Homo sapien
gaggtacttctctactgcaccatgg

SEQ ID NO: 1212168 - DNA, 25 bp, Homo sapien
ttctctactgcaccatgggttcagg

SEQ ID NO: 1212169 - DNA, 25 bp, Homo sapien
caccatgggttcaggtccagggatc

SEQ ID NO: 1212170 - DNA, 25 bp, Homo sapien
cagagccgtaatggggctgggcctc

SEQ ID NO: 1212171 - DNA, 25 bp, Homo sapien
tggggctgagtgtctggggcaagca

SEQ ID NO: 1212172 - DNA, 25 bp, Homo sapien
ggagcttccccagatgttgttttgg

SEQ ID NO: 1212173 - DNA, 25 bp, Homo sapien
ggaagctggcatcacagctgtgaca

SEQ ID NO: 1212174 - DNA, 25 bp, Homo sapien
tggcctctttcaccggcttctcccc

SEQ ID NO: 1212175 - DNA, 25 bp, Homo sapien
tccccaaatgctggatcaggccaga

SEQ ID NO: 1212176 - DNA, 25 bp, Homo sapien
ttagatggcctctttcaccggcttc

SEQ ID NO: 1212177 - DNA, 25 bp, Homo sapien
ccagatgaggccattacttctgctc

SEQ ID NO: 1212178 - DNA, 25 bp, Homo sapien
cagtgagaggtctcgggtgggaagt

SEQ ID NO: 1212179 - DNA, 25 bp, Homo sapien
gggtccacaagacagcgttaccctg

SEQ ID NO: 1212180 - DNA, 25 bp, Homo sapien
gcggctcgggctcagtgagaggtct

SEQ ID NO: 1212181 - DNA, 25 bp, Homo sapien
gaagtgcgggtccacaagacagcgt

SEQ ID NO: 1212182 - DNA, 25 bp, Homo sapien
gatctccgggagcatgtcggttccc

SEQ ID NO: 1212183 - DNA, 25 bp, Homo sapien
tggagcgccccgctgaagaccttaa

SEQ ID NO: 1212184 - DNA, 25 bp, Homo sapien
gcggcggcgatctccgggagcatgt

SEQ ID NO: 1212185 - DNA, 25 bp, Homo sapien
ccgctgaagaccttaagcctctgct

SEQ ID NO: 1212186 - DNA, 25 bp, Homo sapien
gagacgagcccgtaatgagacaggg

SEQ ID NO: 1212187 - DNA, 25 bp, Homo sapien
ttaagatctcgagggtccagcgagg

SEQ ID NO: 1212188 - DNA, 25 bp, Homo sapien
cagggtctgcgcctccgagagcgta

SEQ ID NO: 1212189 - DNA, 25 bp, Homo sapien
ggcccgcaacaacatccatcgaggg

SEQ ID NO: 1212190 - DNA, 25 bp, Homo sapien
gaaaaggctcgactgcaccttcttc

SEQ ID NO: 1212191 - DNA, 25 bp, Homo sapien
ccgaccggcaggaagaaccgcactg

SEQ ID NO: 1212192 - DNA, 25 bp, Homo sapien
ccaaattgttgaaaaggctcgactg

SEQ ID NO: 1212193 - DNA, 25 bp, Homo sapien
aggaagaaccgcactgggactccaa

SEQ ID NO: 1212194 - DNA, 25 bp, Homo sapien
ggtcacgagctacgaggctctcctc

SEQ ID NO: 1212195 - DNA, 25 bp, Homo sapien
gcagggtcacgagctacgaggctct

SEQ ID NO: 1212196 - DNA, 25 bp, Homo sapien
tcctccctaccacaataggtggcag

SEQ ID NO: 1212197 - DNA, 25 bp, Homo sapien
tccctaccacaataggtggcagatg

SEQ ID NO: 1212198 - DNA, 25 bp, Homo sapien
gatggctatcgcttcccaaaactga

SEQ ID NO: 1212199 - DNA, 25 bp, Homo sapien
ctgtgtgggtgcgttccgagatggc

SEQ ID NO: 1212200 - DNA, 25 bp, Homo sapien
ctgacagtaaccagctagaaacagc

SEQ ID NO: 1212201 - DNA, 25 bp, Homo sapien
caaaactgacagtaaccagctagaa

SEQ ID NO: 1212202 - DNA, 25 bp, Homo sapien
caatgcggtaggacacctcataggg

SEQ ID NO: 1212203 - DNA, 25 bp, Homo sapien
tagctggagactgccatcacgtagt

SEQ ID NO: 1212204 - DNA, 25 bp, Homo sapien
tcctcgtacaagacgcagatggagc

SEQ ID NO: 1212205 - DNA, 25 bp, Homo sapien
cagcacttggttcttgcaggtgagg

SEQ ID NO: 1212206 - DNA, 25 bp, Homo sapien
cagttccccaggttgaggtatgtgg

SEQ ID NO: 1212207 - DNA, 25 bp, Homo sapien
ctgttgtcacggcagcatgagcacg

SEQ ID NO: 1212208 - DNA, 25 bp, Homo sapien
tcaagcacgcaacagttctctccaa

SEQ ID NO: 1212209 - DNA, 25 bp, Homo sapien
tcacagactcaagcacgcaacagtt

SEQ ID NO: 1212210 - DNA, 25 bp, Homo sapien
cagtggatactctttgggtcccaaa

SEQ ID NO: 1212211 - DNA, 25 bp, Homo sapien
tggaaagcaacatctacaggcccct

SEQ ID NO: 1212212 - DNA, 25 bp, Homo sapien
tagtgtcggccctacaagaatacca

SEQ ID NO: 1212213 - DNA, 25 bp, Homo sapien
gctctatgacccgaccagaagggaa

SEQ ID NO: 1212214 - DNA, 25 bp, Homo sapien
gattaagcatgagaccatgaggctg

SEQ ID NO: 1212215 - DNA, 25 bp, Homo sapien
ggcctgctcaacagtccagctcagg

SEQ ID NO: 1212216 - DNA, 25 bp, Homo sapien
tgaggctgcttctaaaaaggcaggg

SEQ ID NO: 1212217 - DNA, 25 bp, Homo sapien
tacttaataggagagacaggcctgc

SEQ ID NO: 1212218 - DNA, 25 bp, Homo sapien
aaacactatcatacaattagtaacc

SEQ ID NO: 1212219 - DNA, 25 bp, Homo sapien
taacaaaaaggtgtacatttgtcca

SEQ ID NO: 1212220 - DNA, 25 bp, Homo sapien
tcttccatataaaaacactatcata

SEQ ID NO: 1212221 - DNA, 25 bp, Homo sapien
tgtccataagctgtacattcttcca

SEQ ID NO: 1212222 - DNA, 25 bp, Homo sapien
gtatggtggatagcaaatgacagcc

SEQ ID NO: 1212223 - DNA, 25 bp, Homo sapien
cttagcctgggaaggagttcattac

SEQ ID NO: 1212224 - DNA, 25 bp, Homo sapien
cagtgcatagatcctgaggcctagc

SEQ ID NO: 1212225 - DNA, 25 bp, Homo sapien
tctgggaattgccaacaatcctgcc

SEQ ID NO: 1212226 - DNA, 25 bp, Homo sapien
ctcacatggctagttaagaagtacc

SEQ ID NO: 1212227 - DNA, 25 bp, Homo sapien
tgtccagactcacatggctagttaa

SEQ ID NO: 1212228 - DNA, 25 bp, Homo sapien
ggaccacaacccatacattcttcct

SEQ ID NO: 1212229 - DNA, 25 bp, Homo sapien
gctagttaagaagtaccaggaccac

SEQ ID NO: 1212230 - DNA, 25 bp, Homo sapien
tttgctggaaggtccaggatggacc

SEQ ID NO: 1212231 - DNA, 25 bp, Homo sapien
tctgcaccgtggtggacgtcgtgaa

SEQ ID NO: 1212232 - DNA, 25 bp, Homo sapien
gccttgccagcctcatcgagatctg

SEQ ID NO: 1212233 - DNA, 25 bp, Homo sapien
ctggacgggaacgagatcaagcgca

SEQ ID NO: 1212234 - DNA, 25 bp, Homo sapien
tgagctagacctctcctacaaccag

SEQ ID NO: 1212235 - DNA, 25 bp, Homo sapien
cctctacctccaaggcaataggatc

SEQ ID NO: 1212236 - DNA, 25 bp, Homo sapien
cagcctccttgagctagacctctcc

SEQ ID NO: 1212237 - DNA, 25 bp, Homo sapien
tacctccaaggcaataggatcaatg

SEQ ID NO: 1212238 - DNA, 25 bp, Homo sapien
ttagacgatggctccttcgtgtctc

SEQ ID NO: 1212239 - DNA, 25 bp, Homo sapien
gacggctgtaccaaactcaatggct

SEQ ID NO: 1212240 - DNA, 25 bp, Homo sapien
ccaggcctgggaggtactgaggctt

SEQ ID NO: 1212241 - DNA, 25 bp, Homo sapien
attcccggatgccatgggccttaga

SEQ ID NO: 1212242 - DNA, 25 bp, Homo sapien
gtttggacccctctgatgcattgga

SEQ ID NO: 1212243 - DNA, 25 bp, Homo sapien
agtttggacccctctgatgcattgg

SEQ ID NO: 1212244 - DNA, 25 bp, Homo sapien
tttggacccctctgatgcattggac

SEQ ID NO: 1212245 - DNA, 25 bp, Homo sapien
cagtttggacccctctgatgcattg

SEQ ID NO: 1212246 - DNA, 25 bp, Homo sapien
ccacccaagtgtcgatggaggaatg

SEQ ID NO: 1212247 - DNA, 25 bp, Homo sapien
aaccacccaagtgtcgatggaggaa

SEQ ID NO: 1212248 - DNA, 25 bp, Homo sapien
ggaaccacccaagtgtcgatggagg

SEQ ID NO: 1212249 - DNA, 25 bp, Homo sapien
cacccaagtgtcgatggaggaatgg

SEQ ID NO: 1212250 - DNA, 25 bp, Homo sapien
caccacatccaactggcaatgattt

SEQ ID NO: 1212251 - DNA, 25 bp, Homo sapien
ttggagatcgcagcaaaagctcagg

SEQ ID NO: 1212252 - DNA, 25 bp, Homo sapien
tgattttttggagatcgcagcaaaa

SEQ ID NO: 1212253 - DNA, 25 bp, Homo sapien
ccacatccaactggcaatgattttt

SEQ ID NO: 1212254 - DNA, 25 bp, Homo sapien
gaaatatcacagtatagttcacagg

SEQ ID NO: 1212255 - DNA, 25 bp, Homo sapien
ttcacaggttgtgtcataatctccc

SEQ ID NO: 1212256 - DNA, 25 bp, Homo sapien
cctgactggtgtctgcagatgttgt

SEQ ID NO: 1212257 - DNA, 25 bp, Homo sapien
tagaagcagcgcttaagtttacact

SEQ ID NO: 1212258 - DNA, 25 bp, Homo sapien
tgtcccgatgtgtcaggcagagtgc

SEQ ID NO: 1212259 - DNA, 25 bp, Homo sapien
gagccgccagagtggtatgaacttg

SEQ ID NO: 1212260 - DNA, 25 bp, Homo sapien
caagggctgaatccctatcctcttc

SEQ ID NO: 1212261 - DNA, 25 bp, Homo sapien
tctctgtccagacagtggtcagttg

SEQ ID NO: 1212262 - DNA, 25 bp, Homo sapien
agttgttccacgtaagaaatgagag

SEQ ID NO: 1212263 - DNA, 25 bp, Homo sapien
gttccacgtaagaaatgagaggaat

SEQ ID NO: 1212264 - DNA, 25 bp, Homo sapien
tcacgagccacgtttggcagcagag

SEQ ID NO: 1212265 - DNA, 25 bp, Homo sapien
gcagagattggagaaagttgttcca

SEQ ID NO: 1212266 - DNA, 25 bp, Homo sapien
gaacttgagagtatgccaggccatc

SEQ ID NO: 1212267 - DNA, 25 bp, Homo sapien
tgatatccttggttggtccacatcc

SEQ ID NO: 1212268 - DNA, 25 bp, Homo sapien
tacaggatagccacgattatagctc

SEQ ID NO: 1212269 - DNA, 25 bp, Homo sapien
caaaggagtcgatctggcattcaaa

SEQ ID NO: 1212270 - DNA, 25 bp, Homo sapien
ttcccggtttggttactgctcgctg

SEQ ID NO: 1212271 - DNA, 25 bp, Homo sapien
agggtaccggcagtgtccctccagg

SEQ ID NO: 1212272 - DNA, 25 bp, Homo sapien
tccagcttagcctccttggtagggt

SEQ ID NO: 1212273 - DNA, 25 bp, Homo sapien
tcctccttgtctctaatcctgtgtc

SEQ ID NO: 1212274 - DNA, 25 bp, Homo sapien
ttcagcagcctgatgctcaatccca

SEQ ID NO: 1212275 - DNA, 25 bp, Homo sapien
tgctcaatcccaaaggcctttacct

SEQ ID NO: 1212276 - DNA, 25 bp, Homo sapien
tttgcttgaagcctcaagcctgatg

SEQ ID NO: 1212277 - DNA, 25 bp, Homo sapien
agcctgatgtttcagcagcctgatg

SEQ ID NO: 1212278 - DNA, 25 bp, Homo sapien
tgggtcttggtgactcatcctcttt

SEQ ID NO: 1212279 - DNA, 25 bp, Homo sapien
gggtcttggtgactcatcctctttc

SEQ ID NO: 1212280 - DNA, 25 bp, Homo sapien
gcagtactcgtatgaattatctcca

SEQ ID NO: 1212281 - DNA, 25 bp, Homo sapien
gaagggcatcctatccagcaaacac

SEQ ID NO: 1212282 - DNA, 25 bp, Homo sapien
gagattctgaaccttcgtaagaagg

SEQ ID NO: 1212283 - DNA, 25 bp, Homo sapien
ttaccattgacagaagcagtactcg

SEQ ID NO: 1212284 - DNA, 25 bp, Homo sapien
attcctgcgcttcccattgaccatg

SEQ ID NO: 1212285 - DNA, 25 bp, Homo sapien
tcctgatcttcctgtgaggtccagg

SEQ ID NO: 1212286 - DNA, 25 bp, Homo sapien
aggcctccattcctgcgcttcccat

SEQ ID NO: 1212287 - DNA, 25 bp, Homo sapien
cctgatcttcctgtgaggtccaggc

SEQ ID NO: 1212288 - DNA, 25 bp, Homo sapien
tgctgagtgtgggtggtcttctaca

SEQ ID NO: 1212289 - DNA, 25 bp, Homo sapien
acttcctggaattcctgtgagagga

SEQ ID NO: 1212290 - DNA, 25 bp, Homo sapien
cacttcctggaattcctgtgagagg

SEQ ID NO: 1212291 - DNA, 25 bp, Homo sapien
tctacacttgacaagcaacaatttc

SEQ ID NO: 1212292 - DNA, 25 bp, Homo sapien
tgttccaggtgaaaaacccagtgaa

SEQ ID NO: 1212293 - DNA, 25 bp, Homo sapien
cagtgaaagtttagcgaaggaaagc

SEQ ID NO: 1212294 - DNA, 25 bp, Homo sapien
gagactccagttggacttttcgatt

SEQ ID NO: 1212295 - DNA, 25 bp, Homo sapien
gcttcttagagttggtgagactcca

SEQ ID NO: 1212296 - DNA, 25 bp, Homo sapien
caatcctctcccctgtcggctttct

SEQ ID NO: 1212297 - DNA, 25 bp, Homo sapien
aatcctctcccctgtcggctttctt

SEQ ID NO: 1212298 - DNA, 25 bp, Homo sapien
tactctactgttaaggtggcccgat

SEQ ID NO: 1212299 - DNA, 25 bp, Homo sapien
aaagatccaggtttcttcaggcggg

SEQ ID NO: 1212300 - DNA, 25 bp, Homo sapien
tgtggcaaccaagctagagacgctg

SEQ ID NO: 1212301 - DNA, 25 bp, Homo sapien
tggcgcgaggccaaaccattactct

SEQ ID NO: 1212302 - DNA, 25 bp, Homo sapien
tgcaacagttttccatcctgcgtct

SEQ ID NO: 1212303 - DNA, 25 bp, Homo sapien
tagcccaggaatgacaagaactagg

SEQ ID NO: 1212304 - DNA, 25 bp, Homo sapien
cgactatatggtttctcagaactga

SEQ ID NO: 1212305 - DNA, 25 bp, Homo sapien
aacccagtcgcatgaaatattctag

SEQ ID NO: 1212306 - DNA, 25 bp, Homo sapien
tatgtgccctaggaaactttgtgaa

SEQ ID NO: 1212307 - DNA, 25 bp, Homo sapien
cgcacccagccgtatattggcattt

SEQ ID NO: 1212308 - DNA, 25 bp, Homo sapien
tctacctctagctaatattccttag

SEQ ID NO: 1212309 - DNA, 25 bp, Homo sapien
ggcattttcatatggttcaatataa

SEQ ID NO: 1212310 - DNA, 25 bp, Homo sapien
caagagaaggaactgagatgaagag

SEQ ID NO: 1212311 - DNA, 25 bp, Homo sapien
tctcaaaaaaggatgcaacaagtgt

SEQ ID NO: 1212312 - DNA, 25 bp, Homo sapien
tcaccggaataataagctttacgta

SEQ ID NO: 1212313 - DNA, 25 bp, Homo sapien
tttgtctgtcataacactctatggg

SEQ ID NO: 1212314 - DNA, 25 bp, Homo sapien
gccaaagactgtgctaaacaccgag

SEQ ID NO: 1212315 - DNA, 25 bp, Homo sapien
aaaccaacaagtcgctgcatctcag

SEQ ID NO: 1212316 - DNA, 25 bp, Homo sapien
agaaaccatgctgccataagcctgt

SEQ ID NO: 1212317 - DNA, 25 bp, Homo sapien
gctcagtgaaaacgctgcagccaaa

SEQ ID NO: 1212318 - DNA, 25 bp, Homo sapien
tatcgcccaagatggattcaaactc

SEQ ID NO: 1212319 - DNA, 25 bp, Homo sapien
cattatatcgcccaagatggattca

SEQ ID NO: 1212320 - DNA, 25 bp, Homo sapien
tatatcgcccaagatggattcaaac

SEQ ID NO: 1212321 - DNA, 25 bp, Homo sapien
cacccttggactctgaagtttgaga

SEQ ID NO: 1212322 - DNA, 25 bp, Homo sapien
catgctgatagaaaaatggcgtcaa

SEQ ID NO: 1212323 - DNA, 25 bp, Homo sapien
aaaggcagtgtctgaagtacaataa

SEQ ID NO: 1212324 - DNA, 25 bp, Homo sapien
gctgccttatatgggcaccatttgt

SEQ ID NO: 1212325 - DNA, 25 bp, Homo sapien
gaagttgctttagtaggcctcgcat

SEQ ID NO: 1212326 - DNA, 25 bp, Homo sapien
ttcctgtcagcaaataaagctgttt

SEQ ID NO: 1212327 - DNA, 25 bp, Homo sapien
tttcaacacgacttcctcagtaggc

SEQ ID NO: 1212328 - DNA, 25 bp, Homo sapien
gatcttctaatcagaccacttgaac

SEQ ID NO: 1212329 - DNA, 25 bp, Homo sapien
tttctagtgagagacctgtgactct

SEQ ID NO: 1212330 - DNA, 25 bp, Homo sapien
aatagattttgtgttagcaagcatg

SEQ ID NO: 1212331 - DNA, 25 bp, Homo sapien
cagaatagattttgtgttagcaagc

SEQ ID NO: 1212332 - DNA, 25 bp, Homo sapien
tagattttgtgttagcaagcatgaa

SEQ ID NO: 1212333 - DNA, 25 bp, Homo sapien
agaatagattttgtgttagcaagca

SEQ ID NO: 1212334 - DNA, 25 bp, Homo sapien
aagaattagtttaagcagctccagc

SEQ ID NO: 1212335 - DNA, 25 bp, Homo sapien
taccgcaaaggtctagtgaattcac

SEQ ID NO: 1212336 - DNA, 25 bp, Homo sapien
tgtgagaagacgcaaagttcagaac

SEQ ID NO: 1212337 - DNA, 25 bp, Homo sapien
gcatttatgcgtgggtattcagcaa

SEQ ID NO: 1212338 - DNA, 25 bp, Homo sapien
aaaattgagagtgttttcgcacctc

SEQ ID NO: 1212339 - DNA, 25 bp, Homo sapien
aaatgctaatgatcggccgtggttc

SEQ ID NO: 1212340 - DNA, 25 bp, Homo sapien
tgtcaccatgccacagaacgaatat

SEQ ID NO: 1212341 - DNA, 25 bp, Homo sapien
ctgagaggcttatgaacgagaggct

SEQ ID NO: 1212342 - DNA, 25 bp, Homo sapien
tagagcagccataagtatccagcat

SEQ ID NO: 1212343 - DNA, 25 bp, Homo sapien
agcagccataagtatccagcatctg

SEQ ID NO: 1212344 - DNA, 25 bp, Homo sapien
cagccataagtatccagcatctgca

SEQ ID NO: 1212345 - DNA, 25 bp, Homo sapien
gagcagccataagtatccagcatct

SEQ ID NO: 1212346 - DNA, 25 bp, Homo sapien
tcttgtgcaataagctcccgagtag

SEQ ID NO: 1212347 - DNA, 25 bp, Homo sapien
gagcttcctggataccgatgacaac

SEQ ID NO: 1212348 - DNA, 25 bp, Homo sapien
gagtagccgtccgaagtctagatcc

SEQ ID NO: 1212349 - DNA, 25 bp, Homo sapien
ccagcaactgtagtagtagacgtca

SEQ ID NO: 1212350 - DNA, 25 bp, Homo sapien
gagattctgtacacctccatagtgg

SEQ ID NO: 1212351 - DNA, 25 bp, Homo sapien
gtcagtgcatcccttgaacgcagct

SEQ ID NO: 1212352 - DNA, 25 bp, Homo sapien
cgagttggcaggcaagacacggtct

SEQ ID NO: 1212353 - DNA, 25 bp, Homo sapien
ccatagtggacattaatctgggtca

SEQ ID NO: 1212354 - DNA, 25 bp, Homo sapien
gataggcagaattattctcagtgct

SEQ ID NO: 1212355 - DNA, 25 bp, Homo sapien
ggacaagagataggcagaattattc

SEQ ID NO: 1212356 - DNA, 25 bp, Homo sapien
gagggacaagagataggcagaatta

SEQ ID NO: 1212357 - DNA, 25 bp, Homo sapien
caagagataggcagaattattctca

SEQ ID NO: 1212358 - DNA, 25 bp, Homo sapien
ggatcacgttgtgtccaaacacctg

SEQ ID NO: 1212359 - DNA, 25 bp, Homo sapien
tgataagcgtgacatcttgaagagc

SEQ ID NO: 1212360 - DNA, 25 bp, Homo sapien
tcttcaccagcagggcgataaaagg

SEQ ID NO: 1212361 - DNA, 25 bp, Homo sapien
tctccagatctgcagggttcccaga

SEQ ID NO: 1212362 - DNA, 25 bp, Homo sapien
gctccaatcattaaaggcagtcact

SEQ ID NO: 1212363 - DNA, 25 bp, Homo sapien
agctggatgagttgaccgtttcgga

SEQ ID NO: 1212364 - DNA, 25 bp, Homo sapien
gctcctgttcaatgcggcactgcag

SEQ ID NO: 1212365 - DNA, 25 bp, Homo sapien
ggcagtcactaacaccacgatgatc

SEQ ID NO: 1212366 - DNA, 25 bp, Homo sapien
ccctcatgccaaaggacctatccct

SEQ ID NO: 1212367 - DNA, 25 bp, Homo sapien
tgccaaaggacctatcccttaaatg

SEQ ID NO: 1212368 - DNA, 25 bp, Homo sapien
tcatgccaaaggacctatcccttaa

SEQ ID NO: 1212369 - DNA, 25 bp, Homo sapien
ctcatgccaaaggacctatccctta

SEQ ID NO: 1212370 - DNA, 25 bp, Homo sapien
ccagggacttcttgacatggtcaga

SEQ ID NO: 1212371 - DNA, 25 bp, Homo sapien
tcagatcattcccttggatcaggat

SEQ ID NO: 1212372 - DNA, 25 bp, Homo sapien
gattccatctgcaggcagcagatca

SEQ ID NO: 1212373 - DNA, 25 bp, Homo sapien
gagagctctcatcaatcttcagatc

SEQ ID NO: 1212374 - DNA, 25 bp, Homo sapien
gtctgagagttgacaccaacagctg

SEQ ID NO: 1212375 - DNA, 25 bp, Homo sapien
tttctccccttcgtcatcctcattg

SEQ ID NO: 1212376 - DNA, 25 bp, Homo sapien
tcatcctcattgacccccaagagag

SEQ ID NO: 1212377 - DNA, 25 bp, Homo sapien
ccccaagagagtaaggatgattcca

SEQ ID NO: 1212378 - DNA, 25 bp, Homo sapien
ctttgttgcgattttcagggactcc

SEQ ID NO: 1212379 - DNA, 25 bp, Homo sapien
aataggacaggtgagcaggcaaggt

SEQ ID NO: 1212380 - DNA, 25 bp, Homo sapien
gtgtacacacaaataggacaggtga

SEQ ID NO: 1212381 - DNA, 25 bp, Homo sapien
gacaggtgagcaggcaaggtggtag

SEQ ID NO: 1212382 - DNA, 25 bp, Homo sapien
cacaaataggacaggtgagcaggca

SEQ ID NO: 1212383 - DNA, 25 bp, Homo sapien
tccagggccactccgtcttgggtct

SEQ ID NO: 1212384 - DNA, 25 bp, Homo sapien
tgtcgattccctcctggctgttgag

SEQ ID NO: 1212385 - DNA, 25 bp, Homo sapien
taggcaccttgactgccttcttgtc

SEQ ID NO: 1212386 - DNA, 25 bp, Homo sapien
tctgaacagccaggcgagtcagctt

SEQ ID NO: 1212387 - DNA, 25 bp, Homo sapien
tgtgtgcaaactgaatcagcggtgc

SEQ ID NO: 1212388 - DNA, 25 bp, Homo sapien
gcatagatccctgccatccaatgtg

SEQ ID NO: 1212389 - DNA, 25 bp, Homo sapien
gaacccgaggtaagttgtatacagc

SEQ ID NO: 1212390 - DNA, 25 bp, Homo sapien
tgaactgaatctacactttaacaag

SEQ ID NO: 1212391 - DNA, 25 bp, Homo sapien
tacagtgatgccgatgatgaagaac

SEQ ID NO: 1212392 - DNA, 25 bp, Homo sapien
tagatgggagtacactcagggagcc

SEQ ID NO: 1212393 - DNA, 25 bp, Homo sapien
aaaaccgtgagagcagacatgagca

SEQ ID NO: 1212394 - DNA, 25 bp, Homo sapien
gagccatggtctgcgatttatcaca

SEQ ID NO: 1212395 - DNA, 25 bp, Homo sapien
cagaatcttggaggtataagcactg

SEQ ID NO: 1212396 - DNA, 25 bp, Homo sapien
caatgaggtccaggactttgggcag

SEQ ID NO: 1212397 - DNA, 25 bp, Homo sapien
catgcggttcatggtcaacgtgcct

SEQ ID NO: 1212398 - DNA, 25 bp, Homo sapien
ggtctcacaagcatccaagtgccgt

SEQ ID NO: 1212399 - DNA, 25 bp, Homo sapien
cagtggtaaccgtgatccttgtgcc

SEQ ID NO: 1212400 - DNA, 25 bp, Homo sapien
ggtgtctcgccttgtgtgggtctta

SEQ ID NO: 1212401 - DNA, 25 bp, Homo sapien
catccagggcttagggattttgtag

SEQ ID NO: 1212402 - DNA, 25 bp, Homo sapien
tctagtggtagtgctggtgtctcgc

SEQ ID NO: 1212403 - DNA, 25 bp, Homo sapien
gaagccaccgttgggattcctgatg

SEQ ID NO: 1212404 - DNA, 25 bp, Homo sapien
gcctagcagagcacactcggtcttg

SEQ ID NO: 1212405 - DNA, 25 bp, Homo sapien
tcctcgggcacttcattacgcacag

SEQ ID NO: 1212406 - DNA, 25 bp, Homo sapien
ggcgcccttgctgtacatacggaag

SEQ ID NO: 1212407 - DNA, 25 bp, Homo sapien
gaaacttaggatcgtccaggtctga

SEQ ID NO: 1212408 - DNA, 25 bp, Homo sapien
gcgcctggccgaatagtcactttta

SEQ ID NO: 1212409 - DNA, 25 bp, Homo sapien
taggagctgagtatggctatctctg

SEQ ID NO: 1212410 - DNA, 25 bp, Homo sapien
cctggctgtgccactattagctgta

SEQ ID NO: 1212411 - DNA, 25 bp, Homo sapien
gctctgtgtcatcgaagtcccggta

SEQ ID NO: 1212412 - DNA, 25 bp, Homo sapien
accaccgcgatacaggtcagttcgg

SEQ ID NO: 1212413 - DNA, 25 bp, Homo sapien
ggctcgatgacagtgcgtaccatat

SEQ ID NO: 1212414 - DNA, 25 bp, Homo sapien
tcagttcggtgaggatctcattctc

SEQ ID NO: 1212415 - DNA, 25 bp, Homo sapien
tctcgttgcggatgagccggttgaa

SEQ ID NO: 1212416 - DNA, 25 bp, Homo sapien
tccccaggtgtcagaatgccacatt

SEQ ID NO: 1212417 - DNA, 25 bp, Homo sapien
taatgccagcttgtttgcatttggc

SEQ ID NO: 1212418 - DNA, 25 bp, Homo sapien
gatgttgtcacctgtcaccattctg

SEQ ID NO: 1212419 - DNA, 25 bp, Homo sapien
cttgtcagtgggagaagatcgcgcc

SEQ ID NO: 1212420 - DNA, 25 bp, Homo sapien
gaagatcgcgccaggacccgaagct

SEQ ID NO: 1212421 - DNA, 25 bp, Homo sapien
cttaggccagatcttgtccagcttt

SEQ ID NO: 1212422 - DNA, 25 bp, Homo sapien
caggacccgaagcttaggccagatc

SEQ ID NO: 1212423 - DNA, 25 bp, Homo sapien
ggtgttccccaacagtgctgtcaat

SEQ ID NO: 1212424 - DNA, 25 bp, Homo sapien
gtgacagccacgacctgccggtgtt

SEQ ID NO: 1212425 - DNA, 25 bp, Homo sapien
aggcccgtcatttgtgccatcacca

SEQ ID NO: 1212426 - DNA, 25 bp, Homo sapien
agagcaggcccgtcatttgtgccat

SEQ ID NO: 1212427 - DNA, 25 bp, Homo sapien
aaagtgttgcgattgattacgggtg

SEQ ID NO: 1212428 - DNA, 25 bp, Homo sapien
caaagtgttgcgattgattacgggt

SEQ ID NO: 1212429 - DNA, 25 bp, Homo sapien
gtgttgcgattgattacgggtgtga

SEQ ID NO: 1212430 - DNA, 25 bp, Homo sapien
agtgttgcgattgattacgggtgtg

SEQ ID NO: 1212431 - DNA, 25 bp, Homo sapien
cagtgagggagtggataaagcccag

SEQ ID NO: 1212432 - DNA, 25 bp, Homo sapien
ctccagtgaaggctacaatcacggc

SEQ ID NO: 1212433 - DNA, 25 bp, Homo sapien
ctgagtgatacaggctccagtgaag

SEQ ID NO: 1212434 - DNA, 25 bp, Homo sapien
tcatctgttaggatgatgtctgaag

SEQ ID NO: 1212435 - DNA, 25 bp, Homo sapien
gttgtcatctgttaggatgatgtct

SEQ ID NO: 1212436 - DNA, 25 bp, Homo sapien
ctggcggggagaagaaccagtcctt

SEQ ID NO: 1212437 - DNA, 25 bp, Homo sapien
caatgagctgatagaatgcatggcc

SEQ ID NO: 1212438 - DNA, 25 bp, Homo sapien
tcttcatcatagtgcgtgagatcag

SEQ ID NO: 1212439 - DNA, 25 bp, Homo sapien
tcagaggcttatttcggccataggg

SEQ ID NO: 1212440 - DNA, 25 bp, Homo sapien
gccgcttcaacagagattccgtagg

SEQ ID NO: 1212441 - DNA, 25 bp, Homo sapien
ccatggatctttcgggagttgattt

SEQ ID NO: 1212442 - DNA, 25 bp, Homo sapien
ggtgaatgtagaggtgccttcctcc

SEQ ID NO: 1212443 - DNA, 25 bp, Homo sapien
tgttgcggtagatgcctgaaaagac

SEQ ID NO: 1212444 - DNA, 25 bp, Homo sapien
aaaacaatggtatagtgctggctgg

SEQ ID NO: 1212445 - DNA, 25 bp, Homo sapien
gaggcttgtacaactgaagggttta

SEQ ID NO: 1212446 - DNA, 25 bp, Homo sapien
tctccaatcccaatgaagagacacc

SEQ ID NO: 1212447 - DNA, 25 bp, Homo sapien
caatcccaatgaagagacaccacag

SEQ ID NO: 1212448 - DNA, 25 bp, Homo sapien
atcccaatgaagagacaccacagcc

SEQ ID NO: 1212449 - DNA, 25 bp, Homo sapien
tccaatcccaatgaagagacaccac

SEQ ID NO: 1212450 - DNA, 25 bp, Homo sapien
agtctggatacggttcaggccccgg

SEQ ID NO: 1212451 - DNA, 25 bp, Homo sapien
ctctttggtggtgccatgcccagcc

SEQ ID NO: 1212452 - DNA, 25 bp, Homo sapien
tcagggatcgggtaggtattgcgga

SEQ ID NO: 1212453 - DNA, 25 bp, Homo sapien
cagtccctcggcatccttggtgatc

SEQ ID NO: 1212454 - DNA, 25 bp, Homo sapien
gaaggacagaccactatcagagtac

SEQ ID NO: 1212455 - DNA, 25 bp, Homo sapien
tgcttctcccaagggaaggacagac

SEQ ID NO: 1212456 - DNA, 25 bp, Homo sapien
atgctggccgacaagaactgctacc

SEQ ID NO: 1212457 - DNA, 25 bp, Homo sapien
caacaccttccaagatgggaagctg

SEQ ID NO: 1212458 - DNA, 25 bp, Homo sapien
ggatctagggctgcccatcagtagt

SEQ ID NO: 1212459 - DNA, 25 bp, Homo sapien
ggagatataacaaggtgagtttctt

SEQ ID NO: 1212460 - DNA, 25 bp, Homo sapien
tgaaaccatcagattccccaccatg

SEQ ID NO: 1212461 - DNA, 25 bp, Homo sapien
tataacaaggtgagtttcttttaca

SEQ ID NO: 1212462 - DNA, 25 bp, Homo sapien
ctttgaatgggggagatataacaag

SEQ ID NO: 1212463 - DNA, 25 bp, Homo sapien
gatcagcgcattcacccaggagaaa

SEQ ID NO: 1212464 - DNA, 25 bp, Homo sapien
aaatacgcctgttttctggagacca

SEQ ID NO: 1212465 - DNA, 25 bp, Homo sapien
catttgcaaggccagttttagacag

SEQ ID NO: 1212466 - DNA, 25 bp, Homo sapien
tgaagatctctagccaatcagcaga

SEQ ID NO: 1212467 - DNA, 25 bp, Homo sapien
tagaatattcactccatctatctct

SEQ ID NO: 1212468 - DNA, 25 bp, Homo sapien
tattcactccatctatctctcctat

SEQ ID NO: 1212469 - DNA, 25 bp, Homo sapien
tgttgtcttgcctataggggataag

SEQ ID NO: 1212470 - DNA, 25 bp, Homo sapien
gttcctaccaggtatatagtttaga

SEQ ID NO: 1212471 - DNA, 25 bp, Homo sapien
ctgcatcgccctggataggtgaggc

SEQ ID NO: 1212472 - DNA, 25 bp, Homo sapien
tgcatcgccctggataggtgaggca

SEQ ID NO: 1212473 - DNA, 25 bp, Homo sapien
cagggagctgcatcgccctggatag

SEQ ID NO: 1212474 - DNA, 25 bp, Homo sapien
gagctgcatcgccctggataggtga

SEQ ID NO: 1212475 - DNA, 25 bp, Homo sapien
atctggtcacttgccaccacagctg

SEQ ID NO: 1212476 - DNA, 25 bp, Homo sapien
catctggtcacttgccaccacagct

SEQ ID NO: 1212477 - DNA, 25 bp, Homo sapien
gacatctggtcacttgccaccacag

SEQ ID NO: 1212478 - DNA, 25 bp, Homo sapien
gaagccaagtggatgcatccaagca

SEQ ID NO: 1212479 - DNA, 25 bp, Homo sapien
caaaggaagccaagtggatgcatcc

SEQ ID NO: 1212480 - DNA, 25 bp, Homo sapien
ggccaagccgtctcctggagtttct

SEQ ID NO: 1212481 - DNA, 25 bp, Homo sapien
caagccgtctcctggagtttctctt

SEQ ID NO: 1212482 - DNA, 25 bp, Homo sapien
cctccttcactgagagaccttcaag

SEQ ID NO: 1212483 - DNA, 25 bp, Homo sapien
tcactgagagaccttcaagcttttc

SEQ ID NO: 1212484 - DNA, 25 bp, Homo sapien
tccttcactgagagaccttcaagct

SEQ ID NO: 1212485 - DNA, 25 bp, Homo sapien
cttcactgagagaccttcaagcttt

SEQ ID NO: 1212486 - DNA, 25 bp, Homo sapien
actgcctcatgctccaacaatgcgg

SEQ ID NO: 1212487 - DNA, 25 bp, Homo sapien
tgcggaaaggtagtatacctaaagc

SEQ ID NO: 1212488 - DNA, 25 bp, Homo sapien
caaaaagaccttgtagagaggggca

SEQ ID NO: 1212489 - DNA, 25 bp, Homo sapien
gggcatagtcaaggaaatagaaatt

SEQ ID NO: 1212490 - DNA, 25 bp, Homo sapien
tcctggatggcgtgaatttggtcac

SEQ ID NO: 1212491 - DNA, 25 bp, Homo sapien
aggatacacgttagcatcattagcc

SEQ ID NO: 1212492 - DNA, 25 bp, Homo sapien
tagcctcatcagcttccagagtcag

SEQ ID NO: 1212493 - DNA, 25 bp, Homo sapien
gagcggacctcagggatccaggata

SEQ ID NO: 1212494 - DNA, 25 bp, Homo sapien
aacaaagatcaacgtggaggtggca

SEQ ID NO: 1212495 - DNA, 25 bp, Homo sapien
taatgccaagggttaatctaccagg

SEQ ID NO: 1212496 - DNA, 25 bp, Homo sapien
tgcttattggagttacaaggtccca

SEQ ID NO: 1212497 - DNA, 25 bp, Homo sapien
tggaagaagggactgtagagacacc

SEQ ID NO: 1212498 - DNA, 25 bp, Homo sapien
tggccatgatggaaagacccctggg

SEQ ID NO: 1212499 - DNA, 25 bp, Homo sapien
tctgggtatcttgtctgagctatcc

SEQ ID NO: 1212500 - DNA, 25 bp, Homo sapien
ggccatgagttgctgggctcatcct

SEQ ID NO: 1212501 - DNA, 25 bp, Homo sapien
ccctgggctgaagtaggtaggctcc

SEQ ID NO: 1212502 - DNA, 25 bp, Homo sapien
tcctaacagctagacagcgattgtt

SEQ ID NO: 1212503 - DNA, 25 bp, Homo sapien
ttccctactccatcactcctaacag

SEQ ID NO: 1212504 - DNA, 25 bp, Homo sapien
cactcctaacagctagacagcgatt

SEQ ID NO: 1212505 - DNA, 25 bp, Homo sapien
catcactcctaacagctagacagcg

SEQ ID NO: 1212506 - DNA, 25 bp, Homo sapien
cagtcagtccgagagaggtgaagaa

SEQ ID NO: 1212507 - DNA, 25 bp, Homo sapien
ttgctccacagtcagtccgagagag

SEQ ID NO: 1212508 - DNA, 25 bp, Homo sapien
agagcaagagagagcttccctccca

SEQ ID NO: 1212509 - DNA, 25 bp, Homo sapien
gagaaggagaaaaacgttaattgca

SEQ ID NO: 1212510 - DNA, 25 bp, Homo sapien
tctgtcgccttaggactcccttaaa

SEQ ID NO: 1212511 - DNA, 25 bp, Homo sapien
atgttctgtcgccttaggactccct

SEQ ID NO: 1212512 - DNA, 25 bp, Homo sapien
tctggaatgtgttaattacgtcgat

SEQ ID NO: 1212513 - DNA, 25 bp, Homo sapien
ggctcccgtctggaatgtgttaatt

SEQ ID NO: 1212514 - DNA, 25 bp, Homo sapien
taggatgaactaggaacaagtttta

SEQ ID NO: 1212515 - DNA, 25 bp, Homo sapien
ataggatgaactaggaacaagtttt

SEQ ID NO: 1212516 - DNA, 25 bp, Homo sapien
gaagatttgactggtgcaactgcta

SEQ ID NO: 1212517 - DNA, 25 bp, Homo sapien
aagatttgactggtgcaactgctac

SEQ ID NO: 1212518 - DNA, 25 bp, Homo sapien
cagtctggttttagagtaggatttt

SEQ ID NO: 1212519 - DNA, 25 bp, Homo sapien
gatgccacgtgctctcttgtggtca

SEQ ID NO: 1212520 - DNA, 25 bp, Homo sapien
tgtggtcattttagcaaatcatgca

SEQ ID NO: 1212521 - DNA, 25 bp, Homo sapien
agataaccatggttggttaaagtgg

SEQ ID NO: 1212522 - DNA, 25 bp, Homo sapien
ggctcaattatgacaggtccactag

SEQ ID NO: 1212523 - DNA, 25 bp, Homo sapien
catctaagcttaggaggtagagttc

SEQ ID NO: 1212524 - DNA, 25 bp, Homo sapien
tatcccagcaaagcaacaaacagac

SEQ ID NO: 1212525 - DNA, 25 bp, Homo sapien
gagaggaacaacaacatatcccagc

SEQ ID NO: 1212526 - DNA, 25 bp, Homo sapien
tagggcctccctatgcagggaaatc

SEQ ID NO: 1212527 - DNA, 25 bp, Homo sapien
tactccaattgcaagtccggctgag

SEQ ID NO: 1212528 - DNA, 25 bp, Homo sapien
taggagctccaactaaaaaggcaca

SEQ ID NO: 1212529 - DNA, 25 bp, Homo sapien
tcttgagcccctttgcagaggtcgg

SEQ ID NO: 1212530 - DNA, 25 bp, Homo sapien
aacagtcatccagctagactgcagg

SEQ ID NO: 1212531 - DNA, 25 bp, Homo sapien
ggaaaccagccacctgtaaggaagc

SEQ ID NO: 1212532 - DNA, 25 bp, Homo sapien
agagctagggagcaccagctggctt

SEQ ID NO: 1212533 - DNA, 25 bp, Homo sapien
acctgtaaggaagctcacgtgaaga

SEQ ID NO: 1212534 - DNA, 25 bp, Homo sapien
ggcaccagcaattttggcagctctg

SEQ ID NO: 1212535 - DNA, 25 bp, Homo sapien
ctgacaataattgatgcctgtgaac

SEQ ID NO: 1212536 - DNA, 25 bp, Homo sapien
ttcggtcagttcagagtcatcaaga

SEQ ID NO: 1212537 - DNA, 25 bp, Homo sapien
gaactgcaggtctctctgaggcgtg

SEQ ID NO: 1212538 - DNA, 25 bp, Homo sapien
gaattggccggcagaacaaggagat

SEQ ID NO: 1212539 - DNA, 25 bp, Homo sapien
aatacaggttgggtgacgagtgacc

SEQ ID NO: 1212540 - DNA, 25 bp, Homo sapien
catggctcaactttcaagcagtggg

SEQ ID NO: 1212541 - DNA, 25 bp, Homo sapien
tgaccatgaaaactgtgcagccagg

SEQ ID NO: 1212542 - DNA, 25 bp, Homo sapien
tatggaacgctttgaccactttgat

SEQ ID NO: 1212543 - DNA, 25 bp, Homo sapien
ctatggaacgctttgaccactttga

SEQ ID NO: 1212544 - DNA, 25 bp, Homo sapien
tttctgaatgctttcgtggagggaa

SEQ ID NO: 1212545 - DNA, 25 bp, Homo sapien
gtttctgaatgctttcgtggaggga

SEQ ID NO: 1212546 - DNA, 25 bp, Homo sapien
gagtggtgttcgtggcaactcctcc

SEQ ID NO: 1212547 - DNA, 25 bp, Homo sapien
gagcaccctagtcccaaacttagaa

SEQ ID NO: 1212548 - DNA, 25 bp, Homo sapien
gaagccttgtcaggattttcctcct

SEQ ID NO: 1212549 - DNA, 25 bp, Homo sapien
caggagtggtgttcgtggcaactcc

SEQ ID NO: 1212550 - DNA, 25 bp, Homo sapien
gcacttggttgcaatccaccgcatt

SEQ ID NO: 1212551 - DNA, 25 bp, Homo sapien
ccaccgcattgttgtttgtattggc

SEQ ID NO: 1212552 - DNA, 25 bp, Homo sapien
agctgcacttggttgcaatccaccg

SEQ ID NO: 1212553 - DNA, 25 bp, Homo sapien
caatccaccgcattgttgtttgtat

SEQ ID NO: 1212554 - DNA, 25 bp, Homo sapien
cagaaagagttagaggcctacaggc

SEQ ID NO: 1212555 - DNA, 25 bp, Homo sapien
tggagagaatgtcgaagctggtccc

SEQ ID NO: 1212556 - DNA, 25 bp, Homo sapien
ggctgatctccctggcacttaagaa

SEQ ID NO: 1212557 - DNA, 25 bp, Homo sapien
tagattctaccatgacctgaatggg

SEQ ID NO: 1212558 - DNA, 25 bp, Homo sapien
gctccacgttgtcccagtaaggaac

SEQ ID NO: 1212559 - DNA, 25 bp, Homo sapien
gtggctccacgttgtcccagtaagg

SEQ ID NO: 1212560 - DNA, 25 bp, Homo sapien
aggcacagggctttactgggcagca

SEQ ID NO: 1212561 - DNA, 25 bp, Homo sapien
aaaggcacagggctttactgggcag

SEQ ID NO: 1212562 - DNA, 25 bp, Homo sapien
agagtcagggacatgaactggcccc

SEQ ID NO: 1212563 - DNA, 25 bp, Homo sapien
aaaaggctaggtggatcaggtcatc

SEQ ID NO: 1212564 - DNA, 25 bp, Homo sapien
aaaagtagacacaagccctcaaggg

SEQ ID NO: 1212565 - DNA, 25 bp, Homo sapien
tccacagggctacatgacggcactt

SEQ ID NO: 1212566 - DNA, 25 bp, Homo sapien
tttttattctcagtgcacagcagta

SEQ ID NO: 1212567 - DNA, 25 bp, Homo sapien
gagtttttattctcagtgcacagca

SEQ ID NO: 1212568 - DNA, 25 bp, Homo sapien
tattctcagtgcacagcagtattgg

SEQ ID NO: 1212569 - DNA, 25 bp, Homo sapien
ttattctcagtgcacagcagtattg

SEQ ID NO: 1212570 - DNA, 25 bp, Homo sapien
ctgtggattctaaccaaggtgggtg

SEQ ID NO: 1212571 - DNA, 25 bp, Homo sapien
tgaactgtggattctaaccaaggtg

SEQ ID NO: 1212572 - DNA, 25 bp, Homo sapien
aactgtggattctaaccaaggtggg

SEQ ID NO: 1212573 - DNA, 25 bp, Homo sapien
tcctgaactgtggattctaaccaag

SEQ ID NO: 1212574 - DNA, 25 bp, Homo sapien
aactgatgaccgcagggagacgata

SEQ ID NO: 1212575 - DNA, 25 bp, Homo sapien
ctgatgaccgcagggagacgatatg

SEQ ID NO: 1212576 - DNA, 25 bp, Homo sapien
tcaaactgatgaccgcagggagacg

SEQ ID NO: 1212577 - DNA, 25 bp, Homo sapien
caaactgatgaccgcagggagacga

SEQ ID NO: 1212578 - DNA, 25 bp, Homo sapien
gcacagcgtgtctccatggaggtga

SEQ ID NO: 1212579 - DNA, 25 bp, Homo sapien
ttagatgagggcacagcgtgtctcc

SEQ ID NO: 1212580 - DNA, 25 bp, Homo sapien
tgagggcacagcgtgtctccatgga

SEQ ID NO: 1212581 - DNA, 25 bp, Homo sapien
cacagcgtgtctccatggaggtgag

SEQ ID NO: 1212582 - DNA, 25 bp, Homo sapien
ttccccatggggcaaaatccaatca

SEQ ID NO: 1212583 - DNA, 25 bp, Homo sapien
ccccatggggcaaaatccaatcaaa

SEQ ID NO: 1212584 - DNA, 25 bp, Homo sapien
cccatggggcaaaatccaatcaaac

SEQ ID NO: 1212585 - DNA, 25 bp, Homo sapien
catggggcaaaatccaatcaaactg

SEQ ID NO: 1212586 - DNA, 25 bp, Homo sapien
cagactgcaggtgagtgccaggatt

SEQ ID NO: 1212587 - DNA, 25 bp, Homo sapien
gaggctccgtgagaagctcgtcttc

SEQ ID NO: 1212588 - DNA, 25 bp, Homo sapien
catggtgcttccaagtgaggtggct

SEQ ID NO: 1212589 - DNA, 25 bp, Homo sapien
gatctcatccggacatggtgcttcc

SEQ ID NO: 1212590 - DNA, 25 bp, Homo sapien
tggacgtggctaatgcccactgcag

SEQ ID NO: 1212591 - DNA, 25 bp, Homo sapien
tctgaaacgtcaggccaagttgacc

SEQ ID NO: 1212592 - DNA, 25 bp, Homo sapien
tccctatctcgtgtctacctctgaa

SEQ ID NO: 1212593 - DNA, 25 bp, Homo sapien
tatcaggaacctttgagatgctctc

SEQ ID NO: 1212594 - DNA, 25 bp, Homo sapien
tcagttagccagcatgtctaccact

SEQ ID NO: 1212595 - DNA, 25 bp, Homo sapien
gaaagggttggagtgacaccatcca

SEQ ID NO: 1212596 - DNA, 25 bp, Homo sapien
ccaaggtcctccctctgattgtcga

SEQ ID NO: 1212597 - DNA, 25 bp, Homo sapien
cctctgattgtcgaaagggttggag

SEQ ID NO: 1212598 - DNA, 25 bp, Homo sapien
ttgtcgaaagggttggagtgacacc

SEQ ID NO: 1212599 - DNA, 25 bp, Homo sapien
gctcggttttgcttgggtgttgaaa

SEQ ID NO: 1212600 - DNA, 25 bp, Homo sapien
cactgctcggttttgcttgggtgtt

SEQ ID NO: 1212601 - DNA, 25 bp, Homo sapien
ggcgtcactgctcggttttgcttgg

SEQ ID NO: 1212602 - DNA, 25 bp, Homo sapien
cagggctggcgtcactgctcggttt

SEQ ID NO: 1212603 - DNA, 25 bp, Homo sapien
cccggaaaagatgttggtgatctgg

SEQ ID NO: 1212604 - DNA, 25 bp, Homo sapien
aggatggcgaggagtcccgcaaacc

SEQ ID NO: 1212605 - DNA, 25 bp, Homo sapien
gcttcttccgtttattccaattcca

SEQ ID NO: 1212606 - DNA, 25 bp, Homo sapien
caagatgcagaaaaccgcaacgacc

SEQ ID NO: 1212607 - DNA, 25 bp, Homo sapien
tcgccaaggcaagatgtcataaata

SEQ ID NO: 1212608 - DNA, 25 bp, Homo sapien
tcctgtcgccaaggcaagatgtcat

SEQ ID NO: 1212609 - DNA, 25 bp, Homo sapien
tctggtttgtggcaaagtcagcaag

SEQ ID NO: 1212610 - DNA, 25 bp, Homo sapien
tttgtggcaaagtcagcaagggcat

SEQ ID NO: 1212611 - DNA, 25 bp, Homo sapien
gaaaatgcgcatactcctcgactca

SEQ ID NO: 1212612 - DNA, 25 bp, Homo sapien
ctgaaaatgcgcatactcctcgact

SEQ ID NO: 1212613 - DNA, 25 bp, Homo sapien
aaatgcgcatactcctcgactcatg

SEQ ID NO: 1212614 - DNA, 25 bp, Homo sapien
tgcgcatactcctcgactcatgtct

SEQ ID NO: 1212615 - DNA, 25 bp, Homo sapien
ctcagaatttctggagaggaggctc

SEQ ID NO: 1212616 - DNA, 25 bp, Homo sapien
acatgctccgggctctcagaatttc

SEQ ID NO: 1212617 - DNA, 25 bp, Homo sapien
cagaatttctggagaggaggctctc

SEQ ID NO: 1212618 - DNA, 25 bp, Homo sapien
atgctccgggctctcagaatttctg

SEQ ID NO: 1212619 - DNA, 25 bp, Homo sapien
cacattggacatgggtcccgggatc

SEQ ID NO: 1212620 - DNA, 25 bp, Homo sapien
gaaagtctgcataatcccctgaagc

SEQ ID NO: 1212621 - DNA, 25 bp, Homo sapien
gaagaaatgcttgcgcagtctctgg

SEQ ID NO: 1212622 - DNA, 25 bp, Homo sapien
ctcctggagaatacaaactggtgca

SEQ ID NO: 1212623 - DNA, 25 bp, Homo sapien
ctgctcagagtccctgcctcctaac

SEQ ID NO: 1212624 - DNA, 25 bp, Homo sapien
tcattcatcaggaaggagctgagtg

SEQ ID NO: 1212625 - DNA, 25 bp, Homo sapien
aaggagctgagtgccaggcccctgc

SEQ ID NO: 1212626 - DNA, 25 bp, Homo sapien
tcatcaggaaggagctgagtgccag

SEQ ID NO: 1212627 - DNA, 25 bp, Homo sapien
catcagccaccagtgagagttcctg

SEQ ID NO: 1212628 - DNA, 25 bp, Homo sapien
caatgtggctttatggctgggtacc

SEQ ID NO: 1212629 - DNA, 25 bp, Homo sapien
tatgggatagactactcaatgtggc

SEQ ID NO: 1212630 - DNA, 25 bp, Homo sapien
cactaaggtgatcacgggtctgcac

SEQ ID NO: 1212631 - DNA, 25 bp, Homo sapien
tgccctggctaaccctgcatggtca

SEQ ID NO: 1212632 - DNA, 25 bp, Homo sapien
gcttagtttattccaggacctgccc

SEQ ID NO: 1212633 - DNA, 25 bp, Homo sapien
tgggattgtcctttcgatgcgcttg

SEQ ID NO: 1212634 - DNA, 25 bp, Homo sapien
gactgtcatggttccctctgtgtgg

SEQ ID NO: 1212635 - DNA, 25 bp, Homo sapien
atcaaaatgggttagttatctttgt

SEQ ID NO: 1212636 - DNA, 25 bp, Homo sapien
aggaatcaaaatgggttagttatct

SEQ ID NO: 1212637 - DNA, 25 bp, Homo sapien
tgctccgggtcacagggtcacgtga

SEQ ID NO: 1212638 - DNA, 25 bp, Homo sapien
cagcgtcaaagatggcgcctggcta

SEQ ID NO: 1212639 - DNA, 25 bp, Homo sapien
tcagaggaatgcctcgaagccggct

SEQ ID NO: 1212640 - DNA, 25 bp, Homo sapien
gcagcactagcagaaaaccaagact

SEQ ID NO: 1212641 - DNA, 25 bp, Homo sapien
gagtaggtaaattcagcgcccggca

SEQ ID NO: 1212642 - DNA, 25 bp, Homo sapien
tcgttacggcgaagctgaaggatcc

SEQ ID NO: 1212643 - DNA, 25 bp, Homo sapien
tagagaaactgttgccccgaagaaa

SEQ ID NO: 1212644 - DNA, 25 bp, Homo sapien
gctcctcgagattagcgaacaccgg

SEQ ID NO: 1212645 - DNA, 25 bp, Homo sapien
aatgggtgtaggataccggaataag

SEQ ID NO: 1212646 - DNA, 25 bp, Homo sapien
gaatgggtgtaggataccggaataa

SEQ ID NO: 1212647 - DNA, 25 bp, Homo sapien
ggaatgggtgtaggataccggaata

SEQ ID NO: 1212648 - DNA, 25 bp, Homo sapien
tggggaatgggtgtaggataccgga

SEQ ID NO: 1212649 - DNA, 25 bp, Homo sapien
atgggagtttaggggtgttcttcat

SEQ ID NO: 1212650 - DNA, 25 bp, Homo sapien
ggtgttcttcattacggtttcacca

SEQ ID NO: 1212651 - DNA, 25 bp, Homo sapien
gttcttcattacggtttcaccagtc

SEQ ID NO: 1212652 - DNA, 25 bp, Homo sapien
tatgggagtttaggggtgttcttca

SEQ ID NO: 1212653 - DNA, 25 bp, Homo sapien
ggtccagaaccaaggcctggaagat

SEQ ID NO: 1212654 - DNA, 25 bp, Homo sapien
cctaaaaagcatcgctatctctagt

SEQ ID NO: 1212655 - DNA, 25 bp, Homo sapien
cctggaagatgtcaacaatataggc

SEQ ID NO: 1212656 - DNA, 25 bp, Homo sapien
acagcctctttctcaaggtccagaa

SEQ ID NO: 1212657 - DNA, 25 bp, Homo sapien
tggaccaataacttccaagccaggt

SEQ ID NO: 1212658 - DNA, 25 bp, Homo sapien
cacagcaaatgctagttgagccctt

SEQ ID NO: 1212659 - DNA, 25 bp, Homo sapien
gactccgcatactggtcacagcaaa

SEQ ID NO: 1212660 - DNA, 25 bp, Homo sapien
tagtagcagctagaagccaggtctt

SEQ ID NO: 1212661 - DNA, 25 bp, Homo sapien
tttatgtctccacaattcgtaccag

SEQ ID NO: 1212662 - DNA, 25 bp, Homo sapien
tctctttatgtctccacaattcgta

SEQ ID NO: 1212663 - DNA, 25 bp, Homo sapien
tctttatgtctccacaattcgtacc

SEQ ID NO: 1212664 - DNA, 25 bp, Homo sapien
tatgtctccacaattcgtaccagaa

SEQ ID NO: 1212665 - DNA, 25 bp, Homo sapien
tggtacacttagagtacatacactc

SEQ ID NO: 1212666 - DNA, 25 bp, Homo sapien
gtacacttagagtacatacactcat

SEQ ID NO: 1212667 - DNA, 25 bp, Homo sapien
ggtacacttagagtacatacactca

SEQ ID NO: 1212668 - DNA, 25 bp, Homo sapien
ataggaacacatcccagaatcccag

SEQ ID NO: 1212669 - DNA, 25 bp, Homo sapien
ctgttttgcctctttattcactcct

SEQ ID NO: 1212670 - DNA, 25 bp, Homo sapien
tattagaattaataggaacacatcc

SEQ ID NO: 1212671 - DNA, 25 bp, Homo sapien
tattcactccttctgctaccatctt

SEQ ID NO: 1212672 - DNA, 25 bp, Homo sapien
tagatgtaccaagatggctacctgg

SEQ ID NO: 1212673 - DNA, 25 bp, Homo sapien
cagggtcattggaagctaacaaagc

SEQ ID NO: 1212674 - DNA, 25 bp, Homo sapien
ccctggtccaatgaggtgaatgcct

SEQ ID NO: 1212675 - DNA, 25 bp, Homo sapien
ggtcaacatgaaagaagtgccacac

SEQ ID NO: 1212676 - DNA, 25 bp, Homo sapien
catgcaaggtatcactcaagagatc

SEQ ID NO: 1212677 - DNA, 25 bp, Homo sapien
caatggataggatgtgtggcttgca

SEQ ID NO: 1212678 - DNA, 25 bp, Homo sapien
tctgaatcagagtcactaaggtcct

SEQ ID NO: 1212679 - DNA, 25 bp, Homo sapien
caggtgtcgttgaagtgttgaagtc

SEQ ID NO: 1212680 - DNA, 25 bp, Homo sapien
tctctcctgcgcacgcatcagagtg

SEQ ID NO: 1212681 - DNA, 25 bp, Homo sapien
tgcgcacgcatcagagtgccttgct

SEQ ID NO: 1212682 - DNA, 25 bp, Homo sapien
acgcatcagagtgccttgctctgca

SEQ ID NO: 1212683 - DNA, 25 bp, Homo sapien
acatgttgtttctctctcctgcgca

SEQ ID NO: 1212684 - DNA, 25 bp, Homo sapien
taaagggtcatcacctcctgagaac

SEQ ID NO: 1212685 - DNA, 25 bp, Homo sapien
gaactcttgcagtatctgacgggcc

SEQ ID NO: 1212686 - DNA, 25 bp, Homo sapien
taaactatccaccagattgagggcc

SEQ ID NO: 1212687 - DNA, 25 bp, Homo sapien
taacaaagtagccaagatacagggc

SEQ ID NO: 1212688 - DNA, 25 bp, Homo sapien
gatccaattctaaagggtaacacta

SEQ ID NO: 1212689 - DNA, 25 bp, Homo sapien
aatctaccaggaagaaagcctaagg

SEQ ID NO: 1212690 - DNA, 25 bp, Homo sapien
cagtggccaaaacaaccgcacagtt

SEQ ID NO: 1212691 - DNA, 25 bp, Homo sapien
tgctagcgccacagttatagctatg

SEQ ID NO: 1212692 - DNA, 25 bp, Homo sapien
atactagtcaattttccaggaattt

SEQ ID NO: 1212693 - DNA, 25 bp, Homo sapien
taatactagtcaattttccaggaat

SEQ ID NO: 1212694 - DNA, 25 bp, Homo sapien
acttaatactagtcaattttccagg

SEQ ID NO: 1212695 - DNA, 25 bp, Homo sapien
caggaattttttgggcagggaatat

SEQ ID NO: 1212696 - DNA, 25 bp, Homo sapien
tctaaactggcactgtcaaaacaca

SEQ ID NO: 1212697 - DNA, 25 bp, Homo sapien
tatatatccatcatcgtcatcaggg

SEQ ID NO: 1212698 - DNA, 25 bp, Homo sapien
taactacagagtggtgcagcaagct

SEQ ID NO: 1212699 - DNA, 25 bp, Homo sapien
tacgcagcctaggtccaaattcttt

SEQ ID NO: 1212700 - DNA, 25 bp, Homo sapien
ggtcgaaccaacactcaatccatga

SEQ ID NO: 1212701 - DNA, 25 bp, Homo sapien
tcagccacaattcaaacacagcatg

SEQ ID NO: 1212702 - DNA, 25 bp, Homo sapien
tttgtcagactggagacagctaggg

SEQ ID NO: 1212703 - DNA, 25 bp, Homo sapien
cagctagggttagttatctcctcaa

SEQ ID NO: 1212704 - DNA, 25 bp, Homo sapien
gtcttcactgagttccaatctatta

SEQ ID NO: 1212705 - DNA, 25 bp, Homo sapien
ccaggcatagtgagtcacatttgta

SEQ ID NO: 1212706 - DNA, 25 bp, Homo sapien
agggggctgacgctggaggaagcct

SEQ ID NO: 1212707 - DNA, 25 bp, Homo sapien
ctgacgctggaggaagccttgagcc

SEQ ID NO: 1212708 - DNA, 25 bp, Homo sapien
agccaggcatagtgagtcacatttg

SEQ ID NO: 1212709 - DNA, 25 bp, Homo sapien
gtttcactcttctacccaggctgct

SEQ ID NO: 1212710 - DNA, 25 bp, Homo sapien
ggattacaggcgcctaccaccatac

SEQ ID NO: 1212711 - DNA, 25 bp, Homo sapien
gggattacaggcgcctaccaccata

SEQ ID NO: 1212712 - DNA, 25 bp, Homo sapien
tcactcttctacccaggctgctgga

SEQ ID NO: 1212713 - DNA, 25 bp, Homo sapien
gctactcaggagcctaaggtaggga

SEQ ID NO: 1212714 - DNA, 25 bp, Homo sapien
ctactcaggagcctaaggtagggaa

SEQ ID NO: 1212715 - DNA, 25 bp, Homo sapien
tactcaggagcctaaggtagggaaa

SEQ ID NO: 1212716 - DNA, 25 bp, Homo sapien
ctcaggagcctaaggtagggaaact

SEQ ID NO: 1212717 - DNA, 25 bp, Homo sapien
tgggtttaatcttccaaatgacaac

SEQ ID NO: 1212718 - DNA, 25 bp, Homo sapien
tccaagtcctcgtgaaatgggttta

SEQ ID NO: 1212719 - DNA, 25 bp, Homo sapien
gctgggtagattcttagatcagaag

SEQ ID NO: 1212720 - DNA, 25 bp, Homo sapien
caggctccaagtcctcgtgaaatgg

SEQ ID NO: 1212721 - DNA, 25 bp, Homo sapien
aatagcagtcttctccttgattagg

SEQ ID NO: 1212722 - DNA, 25 bp, Homo sapien
atagcagtcttctccttgattaggc

SEQ ID NO: 1212723 - DNA, 25 bp, Homo sapien
tagcagtcttctccttgattaggca

SEQ ID NO: 1212724 - DNA, 25 bp, Homo sapien
tctattaagcaaattgtagaaagaa

SEQ ID NO: 1212725 - DNA, 25 bp, Homo sapien
aatgttgggaaaatcttatccaatt

SEQ ID NO: 1212726 - DNA, 25 bp, Homo sapien
aaaaaactgacagccaataataaag

SEQ ID NO: 1212727 - DNA, 25 bp, Homo sapien
tgggaaaatcttatccaattctatt

SEQ ID NO: 1212728 - DNA, 25 bp, Homo sapien
cactctatttgtagcattgaaatac

SEQ ID NO: 1212729 - DNA, 25 bp, Homo sapien
ttgaaatacatcctaggtaaaatat

SEQ ID NO: 1212730 - DNA, 25 bp, Homo sapien
gaaatacatcctaggtaaaatatcc

SEQ ID NO: 1212731 - DNA, 25 bp, Homo sapien
ctgtaaacaaatagagaacactcta

SEQ ID NO: 1212732 - DNA, 25 bp, Homo sapien
caatctccatgtgccgaaacctgca

SEQ ID NO: 1212733 - DNA, 25 bp, Homo sapien
cgaaaacagcgcccttcttgccata

SEQ ID NO: 1212734 - DNA, 25 bp, Homo sapien
atcaatctccatgtgccgaaacctg

SEQ ID NO: 1212735 - DNA, 25 bp, Homo sapien
gtcgaaaacagcgcccttcttgcca

SEQ ID NO: 1212736 - DNA, 25 bp, Homo sapien
cagaaggagacaaaactagtcgtga

SEQ ID NO: 1212737 - DNA, 25 bp, Homo sapien
tatagctaccataagtgttaagggc

SEQ ID NO: 1212738 - DNA, 25 bp, Homo sapien
gacaactatgtgcaacacttgaatt

SEQ ID NO: 1212739 - DNA, 25 bp, Homo sapien
caatgaaacgcaaggcaggactgag

SEQ ID NO: 1212740 - DNA, 25 bp, Homo sapien
caaatctgggtcaatcggagcataa

SEQ ID NO: 1212741 - DNA, 25 bp, Homo sapien
cgcgagcaaagggagtcccacactt

SEQ ID NO: 1212742 - DNA, 25 bp, Homo sapien
tgaacaggacgcaagacacaaacaa

SEQ ID NO: 1212743 - DNA, 25 bp, Homo sapien
gatagtaacagagtacgacacactg

SEQ ID NO: 1212744 - DNA, 25 bp, Homo sapien
tcttggctagcatctgggaccttgg

SEQ ID NO: 1212745 - DNA, 25 bp, Homo sapien
aaaacaggcacacggattcttccag

SEQ ID NO: 1212746 - DNA, 25 bp, Homo sapien
tcatgactaggaaaagagtgtgctc

SEQ ID NO: 1212747 - DNA, 25 bp, Homo sapien
gggaccttggcttttagacgctcca

SEQ ID NO: 1212748 - DNA, 25 bp, Homo sapien
tcacttgacaatatatcctgattat

SEQ ID NO: 1212749 - DNA, 25 bp, Homo sapien
actacatggctgcgtcaccacgccc

SEQ ID NO: 1212750 - DNA, 25 bp, Homo sapien
gactacatggctgcgtcaccacgcc

SEQ ID NO: 1212751 - DNA, 25 bp, Homo sapien
ttcacttgacaatatatcctgatta

SEQ ID NO: 1212752 - DNA, 25 bp, Homo sapien
catatcgtcctctattgtgatggaa

SEQ ID NO: 1212753 - DNA, 25 bp, Homo sapien
tgacatcctgttggctgattttccc

SEQ ID NO: 1212754 - DNA, 25 bp, Homo sapien
aaggccatcaacatatcgtcctcta

SEQ ID NO: 1212755 - DNA, 25 bp, Homo sapien
tcccaataacaaggaatttcactgc

SEQ ID NO: 1212756 - DNA, 25 bp, Homo sapien
cctatgaaaactatagtgtatttgt

SEQ ID NO: 1212757 - DNA, 25 bp, Homo sapien
taaacgcacaaaatcagtcataaat

SEQ ID NO: 1212758 - DNA, 25 bp, Homo sapien
cagaagatacaaccccaacttacca

SEQ ID NO: 1212759 - DNA, 25 bp, Homo sapien
tgtcttatgagcatttatactaaat

SEQ ID NO: 1212760 - DNA, 25 bp, Homo sapien
gaaagttggctagccttcacttcct

SEQ ID NO: 1212761 - DNA, 25 bp, Homo sapien
actttcataacgctccgcagctgag

SEQ ID NO: 1212762 - DNA, 25 bp, Homo sapien
ttcctcttctggtgactcaggcaca

SEQ ID NO: 1212763 - DNA, 25 bp, Homo sapien
tttctactttcataacgctccgcag

SEQ ID NO: 1212764 - DNA, 25 bp, Homo sapien
tcactcgtaatccattgtgaacttc

SEQ ID NO: 1212765 - DNA, 25 bp, Homo sapien
ggtttccggacagaagtcactcgta

SEQ ID NO: 1212766 - DNA, 25 bp, Homo sapien
tgactgcaggtttccggacagaagt

SEQ ID NO: 1212767 - DNA, 25 bp, Homo sapien
gacagaagtcactcgtaatccattg

SEQ ID NO: 1212768 - DNA, 25 bp, Homo sapien
ttttattccaaaattcaaacattca

SEQ ID NO: 1212769 - DNA, 25 bp, Homo sapien
tttattccaaaattcaaacattcac

SEQ ID NO: 1212770 - DNA, 25 bp, Homo sapien
tcaagagtttttattccaaaattca

SEQ ID NO: 1212771 - DNA, 25 bp, Homo sapien
ttgcttcttagatttttccttcatt

SEQ ID NO: 1212772 - DNA, 25 bp, Homo sapien
cttgcttcttagatttttccttcat

SEQ ID NO: 1212773 - DNA, 25 bp, Homo sapien
tgcttcttagatttttccttcattt

SEQ ID NO: 1212774 - DNA, 25 bp, Homo sapien
tggagtaaaagactggaaactcctg

SEQ ID NO: 1212775 - DNA, 25 bp, Homo sapien
agactggaaactcctgaagaaccct

SEQ ID NO: 1212776 - DNA, 25 bp, Homo sapien
gagtaaaagactggaaactcctgaa

SEQ ID NO: 1212777 - DNA, 25 bp, Homo sapien
taaaagactggaaactcctgaagaa

SEQ ID NO: 1212778 - DNA, 25 bp, Homo sapien
tgtttggtggagagagttactgtcc

SEQ ID NO: 1212779 - DNA, 25 bp, Homo sapien
ttggtggagagagttactgtcctca

SEQ ID NO: 1212780 - DNA, 25 bp, Homo sapien
cttgtttggtggagagagttactgt

SEQ ID NO: 1212781 - DNA, 25 bp, Homo sapien
tttggtggagagagttactgtcctc

SEQ ID NO: 1212782 - DNA, 25 bp, Homo sapien
ccccagtctctcagtaagactcaat

SEQ ID NO: 1212783 - DNA, 25 bp, Homo sapien
tggctataagtggggtctccggaaa

SEQ ID NO: 1212784 - DNA, 25 bp, Homo sapien
tgccccagatgaaacaaaattctat

SEQ ID NO: 1212785 - DNA, 25 bp, Homo sapien
gctggctataagtggggtctccgga

SEQ ID NO: 1212786 - DNA, 25 bp, Homo sapien
ccccaccatcttggatcctgtggag

SEQ ID NO: 1212787 - DNA, 25 bp, Homo sapien
tctttggtgttttgtcaatgttagt

SEQ ID NO: 1212788 - DNA, 25 bp, Homo sapien
tgtcaatgttagtttctggagcttc

SEQ ID NO: 1212789 - DNA, 25 bp, Homo sapien
acgctttaatggaggatcactgtca

SEQ ID NO: 1212790 - DNA, 25 bp, Homo sapien
tctgtgccaggctacgctttaatgg

SEQ ID NO: 1212791 - DNA, 25 bp, Homo sapien
ttatgatctagtcaccacactcttc

SEQ ID NO: 1212792 - DNA, 25 bp, Homo sapien
tgttactatcttagaataagtccaa

SEQ ID NO: 1212793 - DNA, 25 bp, Homo sapien
aagactatattatgatctagtcacc

SEQ ID NO: 1212794 - DNA, 25 bp, Homo sapien
ggcttaaagactatattatgatcta

SEQ ID NO: 1212795 - DNA, 25 bp, Homo sapien
taatcgctccttaagagacttggaa

SEQ ID NO: 1212796 - DNA, 25 bp, Homo sapien
gcctaatcgctccttaagagacttg

SEQ ID NO: 1212797 - DNA, 25 bp, Homo sapien
catgcctaatcgctccttaagagac

SEQ ID NO: 1212798 - DNA, 25 bp, Homo sapien
ctgacatgcctaatcgctccttaag

SEQ ID NO: 1212799 - DNA, 25 bp, Homo sapien
aacatgtaatgaacactgggctaga

SEQ ID NO: 1212800 - DNA, 25 bp, Homo sapien
ggacacagcaggaacacctacactt

SEQ ID NO: 1212801 - DNA, 25 bp, Homo sapien
tttagattactgcaagttccaggca

SEQ ID NO: 1212802 - DNA, 25 bp, Homo sapien
ttggcatgccactgaagagctattt

SEQ ID NO: 1212803 - DNA, 25 bp, Homo sapien
aattctccacgtttctgactggctc

SEQ ID NO: 1212804 - DNA, 25 bp, Homo sapien
tagtttgcaattctccacgtttctg

SEQ ID NO: 1212805 - DNA, 25 bp, Homo sapien
tcctgctgccgatgttttttttcag

SEQ ID NO: 1212806 - DNA, 25 bp, Homo sapien
ttgcaattctccacgtttctgactg

SEQ ID NO: 1212807 - DNA, 25 bp, Homo sapien
ggacgtggtactagagaccaagttc

SEQ ID NO: 1212808 - DNA, 25 bp, Homo sapien
tattatgtggggacgtggtactaga

SEQ ID NO: 1212809 - DNA, 25 bp, Homo sapien
caacgttatctgagtaaagaaaggt

SEQ ID NO: 1212810 - DNA, 25 bp, Homo sapien
agatcccacggaacactcctctgga

SEQ ID NO: 1212811 - DNA, 25 bp, Homo sapien
tctttagcttctgttctaatactgc

SEQ ID NO: 1212812 - DNA, 25 bp, Homo sapien
tactgctctgagaatcaacttcatt

SEQ ID NO: 1212813 - DNA, 25 bp, Homo sapien
taatactgctctgagaatcaacttc

SEQ ID NO: 1212814 - DNA, 25 bp, Homo sapien
gttctaatactgctctgagaatcaa

SEQ ID NO: 1212815 - DNA, 25 bp, Homo sapien
agtgatgtcaactcctgtggtctca

SEQ ID NO: 1212816 - DNA, 25 bp, Homo sapien
tagtgatgtcaactcctgtggtctc

SEQ ID NO: 1212817 - DNA, 25 bp, Homo sapien
attttagtgatgtcaactcctgtgg

SEQ ID NO: 1212818 - DNA, 25 bp, Homo sapien
tttagtgatgtcaactcctgtggtc

SEQ ID NO: 1212819 - DNA, 25 bp, Homo sapien
ccttctgggatgactttgtgggaag

SEQ ID NO: 1212820 - DNA, 25 bp, Homo sapien
cttctgggatgactttgtgggaagc

SEQ ID NO: 1212821 - DNA, 25 bp, Homo sapien
ataatgagtctccaatccctgaggt

SEQ ID NO: 1212822 - DNA, 25 bp, Homo sapien
gctgcacatttcacattcaataatg

SEQ ID NO: 1212823 - DNA, 25 bp, Homo sapien
ttcaataatgagtctccaatccctg

SEQ ID NO: 1212824 - DNA, 25 bp, Homo sapien
aaggtctgtgctgcacatttcacat

SEQ ID NO: 1212825 - DNA, 25 bp, Homo sapien
ccaggaagttactggcaacaattgg

SEQ ID NO: 1212826 - DNA, 25 bp, Homo sapien
aaatgaaattcaacccaattgttgc

SEQ ID NO: 1212827 - DNA, 25 bp, Homo sapien
ctggcaacaattgggttgaatttgg

SEQ ID NO: 1212828 - DNA, 25 bp, Homo sapien
ttcaacccaattgttgccaggaagt

SEQ ID NO: 1212829 - DNA, 25 bp, Homo sapien
gcaccatagaaagttttacacaaag

SEQ ID NO: 1212830 - DNA, 25 bp, Homo sapien
gactgaaaacgattcaaaggcaatt

SEQ ID NO: 1212831 - DNA, 25 bp, Homo sapien
ggtcaccatgtagatacaataccac

SEQ ID NO: 1212832 - DNA, 25 bp, Homo sapien
tggtcacatggtggtcactacaggt

SEQ ID NO: 1212833 - DNA, 25 bp, Homo sapien
gggggatgacacaactttaaccaca

SEQ ID NO: 1212834 - DNA, 25 bp, Homo sapien
gtgcatctccactgccttacgtttt

SEQ ID NO: 1212835 - DNA, 25 bp, Homo sapien
catctccactgccttacgttttggg

SEQ ID NO: 1212836 - DNA, 25 bp, Homo sapien
ggagctgagtggcttcacagcggca

SEQ ID NO: 1212837 - DNA, 25 bp, Homo sapien
aggcacagtgactgatttgtcctca

SEQ ID NO: 1212838 - DNA, 25 bp, Homo sapien
tcaggcacagtgactgatttgtcct

SEQ ID NO: 1212839 - DNA, 25 bp, Homo sapien
caggcacagtgactgatttgtcctc

SEQ ID NO: 1212840 - DNA, 25 bp, Homo sapien
ttcaggcacagtgactgatttgtcc

SEQ ID NO: 1212841 - DNA, 25 bp, Homo sapien
ttggctgaatcacctagtctcacgg

SEQ ID NO: 1212842 - DNA, 25 bp, Homo sapien
aaatagttggctgaatcacctagtc

SEQ ID NO: 1212843 - DNA, 25 bp, Homo sapien
ttaaaaatagttggctgaatcacct

SEQ ID NO: 1212844 - DNA, 25 bp, Homo sapien
gctgaatcacctagtctcacggaca

SEQ ID NO: 1212845 - DNA, 25 bp, Homo sapien
cacctccgggggtgaggaatctgaa

SEQ ID NO: 1212846 - DNA, 25 bp, Homo sapien
tgaggaagggccagacacctccggg

SEQ ID NO: 1212847 - DNA, 25 bp, Homo sapien
caatttgcctcctgaaatctcccat

SEQ ID NO: 1212848 - DNA, 25 bp, Homo sapien
ggcgagttttcatgctcatttggga

SEQ ID NO: 1212849 - DNA, 25 bp, Homo sapien
tgttaattcaatgccagcaaggagg

SEQ ID NO: 1212850 - DNA, 25 bp, Homo sapien
tctgaccccaaggaatccaggacac

SEQ ID NO: 1212851 - DNA, 25 bp, Homo sapien
catataatgaatccagggaatccca

SEQ ID NO: 1212852 - DNA, 25 bp, Homo sapien
cagcagaagcatcaagatcaggtcc

SEQ ID NO: 1212853 - DNA, 25 bp, Homo sapien
aggtgtgtctatacataaacttcag

SEQ ID NO: 1212854 - DNA, 25 bp, Homo sapien
tgtaagggcaaatggttcaaataat

SEQ ID NO: 1212855 - DNA, 25 bp, Homo sapien
ctgtaagggcaaatggttcaaataa

SEQ ID NO: 1212856 - DNA, 25 bp, Homo sapien
tctgtaagggcaaatggttcaaata

SEQ ID NO: 1212857 - DNA, 25 bp, Homo sapien
atggttcaaataatgcggaacacga

SEQ ID NO: 1212858 - DNA, 25 bp, Homo sapien
tgaaattcgggcacttacacgaaag

SEQ ID NO: 1212859 - DNA, 25 bp, Homo sapien
gcatatgcagctaaaattgagcaca

SEQ ID NO: 1212860 - DNA, 25 bp, Homo sapien
cactaaggagtaagtatccgtgtca

SEQ ID NO: 1212861 - DNA, 25 bp, Homo sapien
cattgcttgagttacaacactaagg

SEQ ID NO: 1212862 - DNA, 25 bp, Homo sapien
cacatggctaaagtatctctggaag

SEQ ID NO: 1212863 - DNA, 25 bp, Homo sapien
gaagcttcacaacttgctgaatggc

SEQ ID NO: 1212864 - DNA, 25 bp, Homo sapien
cctgagaaaggagtctgccaaacct

SEQ ID NO: 1212865 - DNA, 25 bp, Homo sapien
gaatacctgagacacggataatgga

SEQ ID NO: 1212866 - DNA, 25 bp, Homo sapien
atttcacaaagagcacacccgcacg

SEQ ID NO: 1212867 - DNA, 25 bp, Homo sapien
acaaagagcacacccgcacgctgcc

SEQ ID NO: 1212868 - DNA, 25 bp, Homo sapien
gagcacacccgcacgctgcctctga

SEQ ID NO: 1212869 - DNA, 25 bp, Homo sapien
tcacaaagagcacacccgcacgctg

SEQ ID NO: 1212870 - DNA, 25 bp, Homo sapien
tctgaccctggccacggtacgccat

SEQ ID NO: 1212871 - DNA, 25 bp, Homo sapien
cttctgcactttctgaccctggcca

SEQ ID NO: 1212872 - DNA, 25 bp, Homo sapien
tttctgaccctggccacggtacgcc

SEQ ID NO: 1212873 - DNA, 25 bp, Homo sapien
cactttctgaccctggccacggtac

SEQ ID NO: 1212874 - DNA, 25 bp, Homo sapien
ctcctagtcctgacatcctgcgtag

SEQ ID NO: 1212875 - DNA, 25 bp, Homo sapien
ctagtcctgacatcctgcgtaggat

SEQ ID NO: 1212876 - DNA, 25 bp, Homo sapien
agtcctgacatcctgcgtaggatac

SEQ ID NO: 1212877 - DNA, 25 bp, Homo sapien
cctagtcctgacatcctgcgtagga

SEQ ID NO: 1212878 - DNA, 25 bp, Homo sapien
tggatccgtactccactatcccagg

SEQ ID NO: 1212879 - DNA, 25 bp, Homo sapien
ttttgccgcgtccattcctgcattc

SEQ ID NO: 1212880 - DNA, 25 bp, Homo sapien
atcacggttcaactacccgcgcttt

SEQ ID NO: 1212881 - DNA, 25 bp, Homo sapien
ttcgcaccccgtattctgacccgaa

SEQ ID NO: 1212882 - DNA, 25 bp, Homo sapien
tggtgcttacgcaaacaacaagtgc

SEQ ID NO: 1212883 - DNA, 25 bp, Homo sapien
tgaaacaaccggacgacgctattcc

SEQ ID NO: 1212884 - DNA, 25 bp, Homo sapien
ccagctgggcattcgttacgggtct

SEQ ID NO: 1212885 - DNA, 25 bp, Homo sapien
tactaaacgcgaggtctggtgctta

SEQ ID NO: 1212886 - DNA, 25 bp, Homo sapien
tggtgaaaccccatctctactaaaa

SEQ ID NO: 1212887 - DNA, 25 bp, Homo sapien
gatagagaccatcctcgttaacatg

SEQ ID NO: 1212888 - DNA, 25 bp, Homo sapien
gtggcgcacgcctgtagtcccagct

SEQ ID NO: 1212889 - DNA, 25 bp, Homo sapien
atacaaaaaaaattagctgggcgtg

SEQ ID NO: 1212890 - DNA, 25 bp, Homo sapien
tcatagagccacacctgaatccgcg

SEQ ID NO: 1212891 - DNA, 25 bp, Homo sapien
tacagccttctatccgcatattcac

SEQ ID NO: 1212892 - DNA, 25 bp, Homo sapien
tgctcatagagccacacctgaatcc

SEQ ID NO: 1212893 - DNA, 25 bp, Homo sapien
agagccacacctgaatccgcgatct

SEQ ID NO: 1212894 - DNA, 25 bp, Homo sapien
attcatcatgctcggcctccctaag

SEQ ID NO: 1212895 - DNA, 25 bp, Homo sapien
cgaactctggagctaaagtgattca

SEQ ID NO: 1212896 - DNA, 25 bp, Homo sapien
tacctatgcagataaaaactccaac

SEQ ID NO: 1212897 - DNA, 25 bp, Homo sapien
aactccaactaacttcaaagattca

SEQ ID NO: 1212898 - DNA, 25 bp, Homo sapien
aatacaaggttcatatactcatcaa

SEQ ID NO: 1212899 - DNA, 25 bp, Homo sapien
tacaaggttcatatactcatcaaaa

SEQ ID NO: 1212900 - DNA, 25 bp, Homo sapien
tcttctgcatcatctaatacaaggt

SEQ ID NO: 1212901 - DNA, 25 bp, Homo sapien
tctcttctgcatcatctaatacaag

SEQ ID NO: 1212902 - DNA, 25 bp, Homo sapien
ctcagacacgggaacaaagcgcttt

SEQ ID NO: 1212903 - DNA, 25 bp, Homo sapien
tgaactgaacttgacgactctgagc

SEQ ID NO: 1212904 - DNA, 25 bp, Homo sapien
gcagagggcacaaaagcttcgcatc

SEQ ID NO: 1212905 - DNA, 25 bp, Homo sapien
gagctgatgtccactgccgaactga

SEQ ID NO: 1212906 - DNA, 25 bp, Homo sapien
agacactttgtagcagagtaatatt

SEQ ID NO: 1212907 - DNA, 25 bp, Homo sapien
tattatctccttttagcatgatccg

SEQ ID NO: 1212908 - DNA, 25 bp, Homo sapien
agttggagacactttgtagcagagt

SEQ ID NO: 1212909 - DNA, 25 bp, Homo sapien
tttgtagcagagtaatattatctcc

SEQ ID NO: 1212910 - DNA, 25 bp, Homo sapien
ctgtatccttctcaacaatttctca

SEQ ID NO: 1212911 - DNA, 25 bp, Homo sapien
gtatccttctcaacaatttctcact

SEQ ID NO: 1212912 - DNA, 25 bp, Homo sapien
tgtatccttctcaacaatttctcac

SEQ ID NO: 1212913 - DNA, 25 bp, Homo sapien
ttattgccatcttgtagtaacacga

SEQ ID NO: 1212914 - DNA, 25 bp, Homo sapien
acaaacaatcccatagtatttattg

SEQ ID NO: 1212915 - DNA, 25 bp, Homo sapien
tttattgccatcttgtagtaacacg

SEQ ID NO: 1212916 - DNA, 25 bp, Homo sapien
aacaatcccatagtatttattgcca

SEQ ID NO: 1212917 - DNA, 25 bp, Homo sapien
taccaagtgctcaaggcaactgcga

SEQ ID NO: 1212918 - DNA, 25 bp, Homo sapien
ggtccaagctctgcgaataccaagt

SEQ ID NO: 1212919 - DNA, 25 bp, Homo sapien
caatactggaagcttacccatcagg

SEQ ID NO: 1212920 - DNA, 25 bp, Homo sapien
gcaactgcgacccttcagaaaacta

SEQ ID NO: 1212921 - DNA, 25 bp, Homo sapien
gaactacaagtgatgaagacttttg

SEQ ID NO: 1212922 - DNA, 25 bp, Homo sapien
tgttgagcaatactgaccccattaa

SEQ ID NO: 1212923 - DNA, 25 bp, Homo sapien
cagtgactcaatgagagtgttgagc

SEQ ID NO: 1212924 - DNA, 25 bp, Homo sapien
aattcacaaagacctcacagtgact

SEQ ID NO: 1212925 - DNA, 25 bp, Homo sapien
gaatgaggcattaaaaccacctgct

SEQ ID NO: 1212926 - DNA, 25 bp, Homo sapien
taactagaaccatgtgcgatactgg

SEQ ID NO: 1212927 - DNA, 25 bp, Homo sapien
taacaacatggcctttagcagaact

SEQ ID NO: 1212928 - DNA, 25 bp, Homo sapien
tgcatggttcaaagctggatacact

SEQ ID NO: 1212929 - DNA, 25 bp, Homo sapien
ttttagtatttaatcactttgctca

SEQ ID NO: 1212930 - DNA, 25 bp, Homo sapien
attttagtatttaatcactttgctc

SEQ ID NO: 1212931 - DNA, 25 bp, Homo sapien
cattttagtatttaatcactttgct

SEQ ID NO: 1212932 - DNA, 25 bp, Homo sapien
ggcatcaacgtgaaactgcccattc

SEQ ID NO: 1212933 - DNA, 25 bp, Homo sapien
catcaacgtgaaactgcccattcca

SEQ ID NO: 1212934 - DNA, 25 bp, Homo sapien
caacgtgaaactgcccattccactg

SEQ ID NO: 1212935 - DNA, 25 bp, Homo sapien
ccagttagagtgaaagttgaagata

SEQ ID NO: 1212936 - DNA, 25 bp, Homo sapien
tagaaatgagtcaccttgctcaaag

SEQ ID NO: 1212937 - DNA, 25 bp, Homo sapien
gccatgccatctaggtttatgccag

SEQ ID NO: 1212938 - DNA, 25 bp, Homo sapien
tctgtaggtttgtatcttaggagca

SEQ ID NO: 1212939 - DNA, 25 bp, Homo sapien
ggagcaataaactatatcacacagc

SEQ ID NO: 1212940 - DNA, 25 bp, Homo sapien
aaagggtgacactactcagagcagt

SEQ ID NO: 1212941 - DNA, 25 bp, Homo sapien
agggtgacactactcagagcagtgc

SEQ ID NO: 1212942 - DNA, 25 bp, Homo sapien
gggtgacactactcagagcagtgcc

SEQ ID NO: 1212943 - DNA, 25 bp, Homo sapien
ggtgacactactcagagcagtgccc

SEQ ID NO: 1212944 - DNA, 25 bp, Homo sapien
ttcctccacttctagagcctcctcc

SEQ ID NO: 1212945 - DNA, 25 bp, Homo sapien
cctccacagtcaagaactttttcca

SEQ ID NO: 1212946 - DNA, 25 bp, Homo sapien
tccacagtcaagaactttttccacc

SEQ ID NO: 1212947 - DNA, 25 bp, Homo sapien
ctcttcctccacttctagagcctcc

SEQ ID NO: 1212948 - DNA, 25 bp, Homo sapien
gtcatcgggatcatgagctctccac

SEQ ID NO: 1212949 - DNA, 25 bp, Homo sapien
ttccatgtcatcgggatcatgagct

SEQ ID NO: 1212950 - DNA, 25 bp, Homo sapien
tgtcatcgggatcatgagctctcca

SEQ ID NO: 1212951 - DNA, 25 bp, Homo sapien
catgtcatcgggatcatgagctctc

SEQ ID NO: 1212952 - DNA, 25 bp, Homo sapien
gggtaggaatgcctttcctcataga

SEQ ID NO: 1212953 - DNA, 25 bp, Homo sapien
cctgtgggcacttgatgctggcttc

SEQ ID NO: 1212954 - DNA, 25 bp, Homo sapien
atcctccttcttggggtaggaatgc

SEQ ID NO: 1212955 - DNA, 25 bp, Homo sapien
gaaagatatgacaacctgtgggcac

SEQ ID NO: 1212956 - DNA, 25 bp, Homo sapien
ttagcagctttccatgaagtctttc

SEQ ID NO: 1212957 - DNA, 25 bp, Homo sapien
attttgatggtgagtgttttatcca

SEQ ID NO: 1212958 - DNA, 25 bp, Homo sapien
gctgccaaccactgcctgagataac

SEQ ID NO: 1212959 - DNA, 25 bp, Homo sapien
tgtcagtgtccctattgttcccgag

SEQ ID NO: 1212960 - DNA, 25 bp, Homo sapien
caaggaatattgttcagcatggcac

SEQ ID NO: 1212961 - DNA, 25 bp, Homo sapien
tgagataacgtctacttggagacac

SEQ ID NO: 1212962 - DNA, 25 bp, Homo sapien
cagcctctagagtggagactggtaa

SEQ ID NO: 1212963 - DNA, 25 bp, Homo sapien
ggatggtgccagatacatctgtccc

SEQ ID NO: 1212964 - DNA, 25 bp, Homo sapien
tgttccctacagctacagaagatga

SEQ ID NO: 1212965 - DNA, 25 bp, Homo sapien
ggtatcacatccctattcaaggcag

SEQ ID NO: 1212966 - DNA, 25 bp, Homo sapien
aacagagtcgtaaatgccgtgcaga

SEQ ID NO: 1212967 - DNA, 25 bp, Homo sapien
acttcaagtcctgcagagtatgaca

SEQ ID NO: 1212968 - DNA, 25 bp, Homo sapien
cctgctgctggaagaatccttctag

SEQ ID NO: 1212969 - DNA, 25 bp, Homo sapien
cagaaaatgagagccattgggctca

SEQ ID NO: 1212970 - DNA, 25 bp, Homo sapien
gaaagactgaggcatggaattcaca

SEQ ID NO: 1212971 - DNA, 25 bp, Homo sapien
acttggagacaatggcttggccaga

SEQ ID NO: 1212972 - DNA, 25 bp, Homo sapien
tgacctcccacttttggaaggcaaa

SEQ ID NO: 1212973 - DNA, 25 bp, Homo sapien
ggagctatagctctttgccctggct

SEQ ID NO: 1212974 - DNA, 25 bp, Homo sapien
ctacgaggctgaccgctgagctctg

SEQ ID NO: 1212975 - DNA, 25 bp, Homo sapien
tcgattccgagtcagggcctacgag

SEQ ID NO: 1212976 - DNA, 25 bp, Homo sapien
ggacccgtgctcacacagttcagtt

SEQ ID NO: 1212977 - DNA, 25 bp, Homo sapien
cagttcagttccaagccgggactgg

SEQ ID NO: 1212978 - DNA, 25 bp, Homo sapien
ggtgtccagtacttaaccaacctgc

SEQ ID NO: 1212979 - DNA, 25 bp, Homo sapien
cattcttgaccagcgaactcccata

SEQ ID NO: 1212980 - DNA, 25 bp, Homo sapien
taatatgctctcaagaagagggaca

SEQ ID NO: 1212981 - DNA, 25 bp, Homo sapien
cagggcatcctagagaccttggaca

SEQ ID NO: 1212982 - DNA, 25 bp, Homo sapien
agagaggaaggggacgctattgctt

SEQ ID NO: 1212983 - DNA, 25 bp, Homo sapien
taacagtcagtggacctcgcccctg

SEQ ID NO: 1212984 - DNA, 25 bp, Homo sapien
ctctgcaatgcagaggcacgtatca

SEQ ID NO: 1212985 - DNA, 25 bp, Homo sapien
tcatacccaagaggatggctattat

SEQ ID NO: 1212986 - DNA, 25 bp, Homo sapien
cagaggcacgtatcagtgtttctca

SEQ ID NO: 1212987 - DNA, 25 bp, Homo sapien
tttagcaagggagtcatgggcactg

SEQ ID NO: 1212988 - DNA, 25 bp, Homo sapien
gcaggaccacatcaaccaagacttg

SEQ ID NO: 1212989 - DNA, 25 bp, Homo sapien
tgggcactgaccaatccactgaggc

SEQ ID NO: 1212990 - DNA, 25 bp, Homo sapien
cactgaggctcttgggacaatcaga

SEQ ID NO: 1212991 - DNA, 25 bp, Homo sapien
gggatggtgaacgaccatccatccc

SEQ ID NO: 1212992 - DNA, 25 bp, Homo sapien
cagatgaacaggacacaaaagtcca

SEQ ID NO: 1212993 - DNA, 25 bp, Homo sapien
ggtcagatgaacaggacacaaaagt

SEQ ID NO: 1212994 - DNA, 25 bp, Homo sapien
tggtgaacgaccatccatccctgga

SEQ ID NO: 1212995 - DNA, 25 bp, Homo sapien
aaagccttcctgctgcagcccagaa

SEQ ID NO: 1212996 - DNA, 25 bp, Homo sapien
tcctgctgcagcccagaaatcccag

SEQ ID NO: 1212997 - DNA, 25 bp, Homo sapien
ctcaaagccttcctgctgcagccca

SEQ ID NO: 1212998 - DNA, 25 bp, Homo sapien
cttcctgctgcagcccagaaatccc

SEQ ID NO: 1212999 - DNA, 25 bp, Homo sapien
ttgggtcctaagggtctctccttca

SEQ ID NO: 1213000 - DNA, 25 bp, Homo sapien
tgggtcctaagggtctctccttcat

SEQ ID NO: 1213001 - DNA, 25 bp, Homo sapien
cctccatgaccataagtacaaaggc

SEQ ID NO: 1213002 - DNA, 25 bp, Homo sapien
ggcctccatgaccataagtacaaag

SEQ ID NO: 1213003 - DNA, 25 bp, Homo sapien
caaagtgtagggttccccagaggct

SEQ ID NO: 1213004 - DNA, 25 bp, Homo sapien
tgggtcccaagacagggcactgcag

SEQ ID NO: 1213005 - DNA, 25 bp, Homo sapien
agaaagggcaagcttacttgtgaac

SEQ ID NO: 1213006 - DNA, 25 bp, Homo sapien
cagcaaagcctcttgtatccctcat

SEQ ID NO: 1213007 - DNA, 25 bp, Homo sapien
gcaagcttacttgtgaacccacaga

SEQ ID NO: 1213008 - DNA, 25 bp, Homo sapien
aatcagcaaagcctcttgtatccct

SEQ ID NO: 1213009 - DNA, 25 bp, Homo sapien
gggcagagatggggctcctcatgga

SEQ ID NO: 1213010 - DNA, 25 bp, Homo sapien
gtgccaacgccatccagggccagct

SEQ ID NO: 1213011 - DNA, 25 bp, Homo sapien
ggtgccaacgccatccagggccagc

SEQ ID NO: 1213012 - DNA, 25 bp, Homo sapien
cagagatggggctcctcatggacat

SEQ ID NO: 1213013 - DNA, 25 bp, Homo sapien
gcctcgtggcaaggctctttcttct

SEQ ID NO: 1213014 - DNA, 25 bp, Homo sapien
tgggctggagcttgggggtcagcac

SEQ ID NO: 1213015 - DNA, 25 bp, Homo sapien
tcagcactatcctgggaggcccggg

SEQ ID NO: 1213016 - DNA, 25 bp, Homo sapien
cctctgacttgatggtgcagttcac

SEQ ID NO: 1213017 - DNA, 25 bp, Homo sapien
gcaagacatactgaattgtcaccat

SEQ ID NO: 1213018 - DNA, 25 bp, Homo sapien
tgcaagacatactgaattgtcacca

SEQ ID NO: 1213019 - DNA, 25 bp, Homo sapien
ctgcaagacatactgaattgtcacc

SEQ ID NO: 1213020 - DNA, 25 bp, Homo sapien
agaggcagcctccgacactcctggt

SEQ ID NO: 1213021 - DNA, 25 bp, Homo sapien
tctttcaaatttcggttgaagtcca

SEQ ID NO: 1213022 - DNA, 25 bp, Homo sapien
caaatttcggttgaagtccagcttc

SEQ ID NO: 1213023 - DNA, 25 bp, Homo sapien
tctggggacccattaccctctggag

SEQ ID NO: 1213024 - DNA, 25 bp, Homo sapien
cactggacaacagcttctctatggc

SEQ ID NO: 1213025 - DNA, 25 bp, Homo sapien
ccttccagtcactggacaacagctt

SEQ ID NO: 1213026 - DNA, 25 bp, Homo sapien
ggcttccatagagttccttcctaga

SEQ ID NO: 1213027 - DNA, 25 bp, Homo sapien
catctttggcttccatagagttcct

SEQ ID NO: 1213028 - DNA, 25 bp, Homo sapien
cctgggcatctgtacggttttaaag

SEQ ID NO: 1213029 - DNA, 25 bp, Homo sapien
tccctctgtgggtgtgatcaatgac

SEQ ID NO: 1213030 - DNA, 25 bp, Homo sapien
gaatcactcatggatcctttgagaa

SEQ ID NO: 1213031 - DNA, 25 bp, Homo sapien
tttgagaagtatagaggcccaggcc

SEQ ID NO: 1213032 - DNA, 25 bp, Homo sapien
ttctctgctaggctctcttgggtcc

SEQ ID NO: 1213033 - DNA, 25 bp, Homo sapien
agctggtcccgcagggtggacagct

SEQ ID NO: 1213034 - DNA, 25 bp, Homo sapien
ggtgaatcatgaccagaagctggag

SEQ ID NO: 1213035 - DNA, 25 bp, Homo sapien
catgttcttctgctccgagtgggct

SEQ ID NO: 1213036 - DNA, 25 bp, Homo sapien
tgctgctgaaggaggttgatcttat

SEQ ID NO: 1213037 - DNA, 25 bp, Homo sapien
gctgctgaaggaggttgatcttatg

SEQ ID NO: 1213038 - DNA, 25 bp, Homo sapien
ggaatgggctgaatgggtaaggcca

SEQ ID NO: 1213039 - DNA, 25 bp, Homo sapien
gaaggctgggatcatgacataaggc

SEQ ID NO: 1213040 - DNA, 25 bp, Homo sapien
ggtgacaggcagaggttggtggctt

SEQ ID NO: 1213041 - DNA, 25 bp, Homo sapien
gctgaatgggtaaggccagctggga

SEQ ID NO: 1213042 - DNA, 25 bp, Homo sapien
agtgagagacgccatctgtgaacca

SEQ ID NO: 1213043 - DNA, 25 bp, Homo sapien
tagaatcacctagcaggtcctgctt

SEQ ID NO: 1213044 - DNA, 25 bp, Homo sapien
gaggatgattcttctaccagacaga

SEQ ID NO: 1213045 - DNA, 25 bp, Homo sapien
ggaggatgatctagcacgtgttgcc

SEQ ID NO: 1213046 - DNA, 25 bp, Homo sapien
atggaaaaggcagcaaggagaaaag

SEQ ID NO: 1213047 - DNA, 25 bp, Homo sapien
ctatggaaaaggcagcaaggagaaa

SEQ ID NO: 1213048 - DNA, 25 bp, Homo sapien
tatggaaaaggcagcaaggagaaaa

SEQ ID NO: 1213049 - DNA, 25 bp, Homo sapien
tgcagcagctgcagcggatactcca

SEQ ID NO: 1213050 - DNA, 25 bp, Homo sapien
ggccccaggcctcttcaccactggg

SEQ ID NO: 1213051 - DNA, 25 bp, Homo sapien
gtggtgggtggccatggccccaggc

SEQ ID NO: 1213052 - DNA, 25 bp, Homo sapien
aggcctcttcaccactggggcaggg

SEQ ID NO: 1213053 - DNA, 25 bp, Homo sapien
acagctgctcatcttcaggcttggg

SEQ ID NO: 1213054 - DNA, 25 bp, Homo sapien
aggtgttgggcagctcgggggcctt

SEQ ID NO: 1213055 - DNA, 25 bp, Homo sapien
gcttggctgtgaggttcaggggctg

SEQ ID NO: 1213056 - DNA, 25 bp, Homo sapien
gctggactgcaggtcccgcgtgggg

SEQ ID NO: 1213057 - DNA, 25 bp, Homo sapien
gcagctgccgagcatcctggatggc

SEQ ID NO: 1213058 - DNA, 25 bp, Homo sapien
ctggatggctttggtgacagcgtcc

SEQ ID NO: 1213059 - DNA, 25 bp, Homo sapien
tggatggctttggtgacagcgtccc

SEQ ID NO: 1213060 - DNA, 25 bp, Homo sapien
tgccgagcatcctggatggctttgg

SEQ ID NO: 1213061 - DNA, 25 bp, Homo sapien
gctggggatgagtccaggctgatga

SEQ ID NO: 1213062 - DNA, 25 bp, Homo sapien
catccatgtcgcagctcagcatggc

SEQ ID NO: 1213063 - DNA, 25 bp, Homo sapien
tgggtgcacacagccgtcctccagc

SEQ ID NO: 1213064 - DNA, 25 bp, Homo sapien
ttcctccagtgggtgcacacagccg

SEQ ID NO: 1213065 - DNA, 25 bp, Homo sapien
gcttgcaggatcttcctccgctcat

SEQ ID NO: 1213066 - DNA, 25 bp, Homo sapien
tgtggctgctgtttcgggactcggg

SEQ ID NO: 1213067 - DNA, 25 bp, Homo sapien
gaaggcttgcaggatcttcctccgc

SEQ ID NO: 1213068 - DNA, 25 bp, Homo sapien
tgggaaggcttgcaggatcttcctc

SEQ ID NO: 1213069 - DNA, 25 bp, Homo sapien
acccctgtcgtcagattccactgga

SEQ ID NO: 1213070 - DNA, 25 bp, Homo sapien
tggaatatcaccaagcaagccctga

SEQ ID NO: 1213071 - DNA, 25 bp, Homo sapien
ggagtccaacacagtatggaatatc

SEQ ID NO: 1213072 - DNA, 25 bp, Homo sapien
ctgaatagacccagctggctcctgc

SEQ ID NO: 1213073 - DNA, 25 bp, Homo sapien
tccacgatgcaggtgcgcttgggcc

SEQ ID NO: 1213074 - DNA, 25 bp, Homo sapien
ttgggccgcggcttgtacttgtagt

SEQ ID NO: 1213075 - DNA, 25 bp, Homo sapien
ggatcacgtagctctggcgggcatc

SEQ ID NO: 1213076 - DNA, 25 bp, Homo sapien
agccgcgcctgttcctcatagtagg

SEQ ID NO: 1213077 - DNA, 25 bp, Homo sapien
gctgcctgcgggggggcctgctcac

SEQ ID NO: 1213078 - DNA, 25 bp, Homo sapien
catgtacacacagtctcctggctgc

SEQ ID NO: 1213079 - DNA, 25 bp, Homo sapien
gagagctacacatgtacacacagtc

SEQ ID NO: 1213080 - DNA, 25 bp, Homo sapien
acacatgtacacacagtctcctggc

SEQ ID NO: 1213081 - DNA, 25 bp, Homo sapien
cagccaccgagtgcctgtcatctgt

SEQ ID NO: 1213082 - DNA, 25 bp, Homo sapien
ggacatagtgctccaccagtggctg

SEQ ID NO: 1213083 - DNA, 25 bp, Homo sapien
tgcccgagggtacaggacatctgag

SEQ ID NO: 1213084 - DNA, 25 bp, Homo sapien
gctgtaccggtacatctcgccatca

SEQ ID NO: 1213085 - DNA, 25 bp, Homo sapien
tgcacaaagtacaaagcgatcctgg

SEQ ID NO: 1213086 - DNA, 25 bp, Homo sapien
tcatgagggaggaataaagaccagc

SEQ ID NO: 1213087 - DNA, 25 bp, Homo sapien
aaaatggctccgtgggaaccgactg

SEQ ID NO: 1213088 - DNA, 25 bp, Homo sapien
ccatcgagttgggacaaggtcttcc

SEQ ID NO: 1213089 - DNA, 25 bp, Homo sapien
tagagagaccccgagcttcatgact

SEQ ID NO: 1213090 - DNA, 25 bp, Homo sapien
tatttgggaattctggacttaggcc

SEQ ID NO: 1213091 - DNA, 25 bp, Homo sapien
ccatgtggccagttctagagagacc

SEQ ID NO: 1213092 - DNA, 25 bp, Homo sapien
tgtgtcactcacaagcttggcctgg

SEQ ID NO: 1213093 - DNA, 25 bp, Homo sapien
ttctgcagatgtccctaaggtagag

SEQ ID NO: 1213094 - DNA, 25 bp, Homo sapien
tgcagatgtccctaaggtagaggtg

SEQ ID NO: 1213095 - DNA, 25 bp, Homo sapien
ctttctgcagatgtccctaaggtag

SEQ ID NO: 1213096 - DNA, 25 bp, Homo sapien
cagatgtccctaaggtagaggtgtt

SEQ ID NO: 1213097 - DNA, 25 bp, Homo sapien
tcctttcacaaagtagcagggatgc

SEQ ID NO: 1213098 - DNA, 25 bp, Homo sapien
ggtgcataccaggacatacctctgc

SEQ ID NO: 1213099 - DNA, 25 bp, Homo sapien
gacaggacgcctcagtgccatttta

SEQ ID NO: 1213100 - DNA, 25 bp, Homo sapien
cataaccagaggagtcagaaggaca

SEQ ID NO: 1213101 - DNA, 25 bp, Homo sapien
aagtaaaggatccagcagtgcaaga

SEQ ID NO: 1213102 - DNA, 25 bp, Homo sapien
ttggacgggccaaggactgctttcc

SEQ ID NO: 1213103 - DNA, 25 bp, Homo sapien
gggctggactagataacctcagatc

SEQ ID NO: 1213104 - DNA, 25 bp, Homo sapien
gagagagggccggtctcatcctcat

SEQ ID NO: 1213105 - DNA, 25 bp, Homo sapien
cttttctaagagaaccatcaatatt

SEQ ID NO: 1213106 - DNA, 25 bp, Homo sapien
acttttctaagagaaccatcaatat

SEQ ID NO: 1213107 - DNA, 25 bp, Homo sapien
ttttctaagagaaccatcaatattt

SEQ ID NO: 1213108 - DNA, 25 bp, Homo sapien
tttacttttgaattcgactggttca

SEQ ID NO: 1213109 - DNA, 25 bp, Homo sapien
ctctttacttttgaattcgactggt

SEQ ID NO: 1213110 - DNA, 25 bp, Homo sapien
ctgaactctttacttttgaattcga

SEQ ID NO: 1213111 - DNA, 25 bp, Homo sapien
aactctttacttttgaattcgactg

SEQ ID NO: 1213112 - DNA, 25 bp, Homo sapien
agaaagcttaatgttatcaatggtg

SEQ ID NO: 1213113 - DNA, 25 bp, Homo sapien
ttgccagactatccaaaacttcagt

SEQ ID NO: 1213114 - DNA, 25 bp, Homo sapien
ttagaaagcttaatgttatcaatgg

SEQ ID NO: 1213115 - DNA, 25 bp, Homo sapien
tgccagactatccaaaacttcagtc

SEQ ID NO: 1213116 - DNA, 25 bp, Homo sapien
attgtaaatattgaggttgtttttg

SEQ ID NO: 1213117 - DNA, 25 bp, Homo sapien
cgaactacaactggaactccttcgg

SEQ ID NO: 1213118 - DNA, 25 bp, Homo sapien
accccaaaggagtcagagcatgcgg

SEQ ID NO: 1213119 - DNA, 25 bp, Homo sapien
gggagaaggacctgccgaactacaa

SEQ ID NO: 1213120 - DNA, 25 bp, Homo sapien
tggagcttccaacccgaggcaataa

SEQ ID NO: 1213121 - DNA, 25 bp, Homo sapien
caatgttagtgtcccaattttgatg

SEQ ID NO: 1213122 - DNA, 25 bp, Homo sapien
tgaaacttaaatggagtctgagggt

SEQ ID NO: 1213123 - DNA, 25 bp, Homo sapien
taaatgatgctactggagtaactga

SEQ ID NO: 1213124 - DNA, 25 bp, Homo sapien
gctgtatgttggctgtttaggagaa

SEQ ID NO: 1213125 - DNA, 25 bp, Homo sapien
cctgggaggattccaccgatcttca

SEQ ID NO: 1213126 - DNA, 25 bp, Homo sapien
cattccctcggaagtcctggcctaa

SEQ ID NO: 1213127 - DNA, 25 bp, Homo sapien
caagaaataatgtctgcgcctctgc

SEQ ID NO: 1213128 - DNA, 25 bp, Homo sapien
tagagttgccgctcagaggcttcag

SEQ ID NO: 1213129 - DNA, 25 bp, Homo sapien
gcctgacagcccctgaggtctcaat

SEQ ID NO: 1213130 - DNA, 25 bp, Homo sapien
ttcatgcctgacagcccctgaggtc

SEQ ID NO: 1213131 - DNA, 25 bp, Homo sapien
cttcatgcctgacagcccctgaggt

SEQ ID NO: 1213132 - DNA, 25 bp, Homo sapien
tgacagcccctgaggtctcaatgac

SEQ ID NO: 1213133 - DNA, 25 bp, Homo sapien
aagtttcgggctgatcgacgggtca

SEQ ID NO: 1213134 - DNA, 25 bp, Homo sapien
ccggcgggtcctctgaggctgccaa

SEQ ID NO: 1213135 - DNA, 25 bp, Homo sapien
ccaagtcaagtcagagcaagctgag

SEQ ID NO: 1213136 - DNA, 25 bp, Homo sapien
tgtcttccacggatcatgagccaag

SEQ ID NO: 1213137 - DNA, 25 bp, Homo sapien
cacagccttacgagttggaccagag

SEQ ID NO: 1213138 - DNA, 25 bp, Homo sapien
tctccctacaggtcgggctggcatg

SEQ ID NO: 1213139 - DNA, 25 bp, Homo sapien
cagtagcattctggccgaataccag

SEQ ID NO: 1213140 - DNA, 25 bp, Homo sapien
ggtcggactacctgggagtgctaca

SEQ ID NO: 1213141 - DNA, 25 bp, Homo sapien
ttaatattgcctgagcagccccatc

SEQ ID NO: 1213142 - DNA, 25 bp, Homo sapien
taacagcagatgaatcgggagcttc

SEQ ID NO: 1213143 - DNA, 25 bp, Homo sapien
ctgaccgaagagaagggagaactgc

SEQ ID NO: 1213144 - DNA, 25 bp, Homo sapien
ggtcgacttgcttctcatcggtagg

SEQ ID NO: 1213145 - DNA, 25 bp, Homo sapien
aatgaagcagcttggtgtacagcag

SEQ ID NO: 1213146 - DNA, 25 bp, Homo sapien
gagcatggacagtctcggcttggaa

SEQ ID NO: 1213147 - DNA, 25 bp, Homo sapien
tgtaatgctggaagccaaggcgtcc

SEQ ID NO: 1213148 - DNA, 25 bp, Homo sapien
gtcagcagattctcaggagctatgg

SEQ ID NO: 1213149 - DNA, 25 bp, Homo sapien
tattaccagtgaaagagtttgtggc

SEQ ID NO: 1213150 - DNA, 25 bp, Homo sapien
tgtctccttcagccgctattcagca

SEQ ID NO: 1213151 - DNA, 25 bp, Homo sapien
caaacagttattcagttcccctgtg

SEQ ID NO: 1213152 - DNA, 25 bp, Homo sapien
gtggctttcattactgtgttcttgg

SEQ ID NO: 1213153 - DNA, 25 bp, Homo sapien
tctgctttgtagactcttatcagag

SEQ ID NO: 1213154 - DNA, 25 bp, Homo sapien
cttctgctttgtagactcttatcag

SEQ ID NO: 1213155 - DNA, 25 bp, Homo sapien
ttctgctttgtagactcttatcaga

SEQ ID NO: 1213156 - DNA, 25 bp, Homo sapien
tgaggagcagcactacattagagcc

SEQ ID NO: 1213157 - DNA, 25 bp, Homo sapien
cagcagtgcagggatatcgctttgc

SEQ ID NO: 1213158 - DNA, 25 bp, Homo sapien
gagaacatcagctgagccctccttg

SEQ ID NO: 1213159 - DNA, 25 bp, Homo sapien
caaaggatcgtctcagtctgcagca

SEQ ID NO: 1213160 - DNA, 25 bp, Homo sapien
taaggacaatccacacgctgtccat

SEQ ID NO: 1213161 - DNA, 25 bp, Homo sapien
ttccttaaggacaatccacacgctg

SEQ ID NO: 1213162 - DNA, 25 bp, Homo sapien
ttttccttaaggacaatccacacgc

SEQ ID NO: 1213163 - DNA, 25 bp, Homo sapien
ccttaaggacaatccacacgctgtc

SEQ ID NO: 1213164 - DNA, 25 bp, Homo sapien
aaagggacagtgactcagtagtggt

SEQ ID NO: 1213165 - DNA, 25 bp, Homo sapien
gtggtcagttaccaagactcctgac

SEQ ID NO: 1213166 - DNA, 25 bp, Homo sapien
ccagtatcgttacatgttgcaggtg

SEQ ID NO: 1213167 - DNA, 25 bp, Homo sapien
aagactcctgactctgagaccaccg

SEQ ID NO: 1213168 - DNA, 25 bp, Homo sapien
tttccataggatccaggtctggatg

SEQ ID NO: 1213169 - DNA, 25 bp, Homo sapien
tgatttccataggatccaggtctgg

SEQ ID NO: 1213170 - DNA, 25 bp, Homo sapien
cataggatccaggtctggatgagtg

SEQ ID NO: 1213171 - DNA, 25 bp, Homo sapien
tgtgatttccataggatccaggtct

SEQ ID NO: 1213172 - DNA, 25 bp, Homo sapien
cagaagcagcgtcggcctctcttgt

SEQ ID NO: 1213173 - DNA, 25 bp, Homo sapien
tctccagagaggcgctcggtagctc

SEQ ID NO: 1213174 - DNA, 25 bp, Homo sapien
gcgctcggtagctctggtcagaagc

SEQ ID NO: 1213175 - DNA, 25 bp, Homo sapien
gtcagaagcagcgtcggcctctctt

SEQ ID NO: 1213176 - DNA, 25 bp, Homo sapien
tggccaccctgagcacaaagctgga

SEQ ID NO: 1213177 - DNA, 25 bp, Homo sapien
agaagccagagatacaaaccattgt

SEQ ID NO: 1213178 - DNA, 25 bp, Homo sapien
cagagatacaaaccattgtctgtcc

SEQ ID NO: 1213179 - DNA, 25 bp, Homo sapien
tgtcaagacaatggttttgtgtggc

SEQ ID NO: 1213180 - DNA, 25 bp, Homo sapien
tatcttagtccaagggagtgaactg

SEQ ID NO: 1213181 - DNA, 25 bp, Homo sapien
aaattatcttagtccaagggagtga

SEQ ID NO: 1213182 - DNA, 25 bp, Homo sapien
atcttagtccaagggagtgaactgc

SEQ ID NO: 1213183 - DNA, 25 bp, Homo sapien
attatcttagtccaagggagtgaac

SEQ ID NO: 1213184 - DNA, 25 bp, Homo sapien
tccccttcactctgcgatgcctcaa

SEQ ID NO: 1213185 - DNA, 25 bp, Homo sapien
tcatttccgtccacgctctctgcag

SEQ ID NO: 1213186 - DNA, 25 bp, Homo sapien
tctgcgatgcctcaaacctctcatt

SEQ ID NO: 1213187 - DNA, 25 bp, Homo sapien
tcaggtcaaattgcataagctttcc

SEQ ID NO: 1213188 - DNA, 25 bp, Homo sapien
agcacgtggagggagcagttgatgt

SEQ ID NO: 1213189 - DNA, 25 bp, Homo sapien
cgtggagggagcagttgatgtatga

SEQ ID NO: 1213190 - DNA, 25 bp, Homo sapien
cacgtggagggagcagttgatgtat

SEQ ID NO: 1213191 - DNA, 25 bp, Homo sapien
gagggagcagttgatgtatgagcaa

SEQ ID NO: 1213192 - DNA, 25 bp, Homo sapien
agcttttgtgacttctggaatagtc

SEQ ID NO: 1213193 - DNA, 25 bp, Homo sapien
tgttttaagtcttcgtactgatgga

SEQ ID NO: 1213194 - DNA, 25 bp, Homo sapien
cttcgtactgatggagggagtcaga

SEQ ID NO: 1213195 - DNA, 25 bp, Homo sapien
ggactggtaagacatgggccccatg

SEQ ID NO: 1213196 - DNA, 25 bp, Homo sapien
gactggtaagacatgggccccatga

SEQ ID NO: 1213197 - DNA, 25 bp, Homo sapien
agtgagctctaacttgtcacagttg

SEQ ID NO: 1213198 - DNA, 25 bp, Homo sapien
tgagctctaacttgtcacagttgtt

SEQ ID NO: 1213199 - DNA, 25 bp, Homo sapien
gtcaaaggctctgaggggatctggc

SEQ ID NO: 1213200 - DNA, 25 bp, Homo sapien
gatctggctatagaaagtgagctct

SEQ ID NO: 1213201 - DNA, 25 bp, Homo sapien
gagagatgggatccccttcagactc

SEQ ID NO: 1213202 - DNA, 25 bp, Homo sapien
ctgcggcgtaaagatgcctttgaga

SEQ ID NO: 1213203 - DNA, 25 bp, Homo sapien
ttctctagccctgaagtgcagcctc

SEQ ID NO: 1213204 - DNA, 25 bp, Homo sapien
agactcttctctagccctgaagtgc

SEQ ID NO: 1213205 - DNA, 25 bp, Homo sapien
ttgccttaacccagttgctctggca

SEQ ID NO: 1213206 - DNA, 25 bp, Homo sapien
tcaatgtcttcttgccttaacccag

SEQ ID NO: 1213207 - DNA, 25 bp, Homo sapien
catggtgttccctcaatgtcttctt

SEQ ID NO: 1213208 - DNA, 25 bp, Homo sapien
ggtgttccctcaatgtcttcttgcc

SEQ ID NO: 1213209 - DNA, 25 bp, Homo sapien
ttggggacctgtgtcttagggtaga

SEQ ID NO: 1213210 - DNA, 25 bp, Homo sapien
acctgtgtcttagggtagagttggt

SEQ ID NO: 1213211 - DNA, 25 bp, Homo sapien
ctgtgtcttagggtagagttggtga

SEQ ID NO: 1213212 - DNA, 25 bp, Homo sapien
ggacctgtgtcttagggtagagttg

SEQ ID NO: 1213213 - DNA, 25 bp, Homo sapien
tccttacctccaactctagctcctc

SEQ ID NO: 1213214 - DNA, 25 bp, Homo sapien
ttccttacctccaactctagctcct

SEQ ID NO: 1213215 - DNA, 25 bp, Homo sapien
caggtgcccagacccgtgttctgga

SEQ ID NO: 1213216 - DNA, 25 bp, Homo sapien
ccagacccgtgttctggaagaggca

SEQ ID NO: 1213217 - DNA, 25 bp, Homo sapien
cagctgctctaggtataatcgaggg

SEQ ID NO: 1213218 - DNA, 25 bp, Homo sapien
tgagagtgagagtgtttgctgctct

SEQ ID NO: 1213219 - DNA, 25 bp, Homo sapien
tggaaacaagcgagtttctgtgtct

SEQ ID NO: 1213220 - DNA, 25 bp, Homo sapien
tgcattttagcttcagcaggacatg

SEQ ID NO: 1213221 - DNA, 25 bp, Homo sapien
ggctttccttatggaaacaagcgag

SEQ ID NO: 1213222 - DNA, 25 bp, Homo sapien
ggcactgccactgggctttccttat

SEQ ID NO: 1213223 - DNA, 25 bp, Homo sapien
atccacaagagggctccagagcaca

SEQ ID NO: 1213224 - DNA, 25 bp, Homo sapien
cacaagagggctccagagcacacat

SEQ ID NO: 1213225 - DNA, 25 bp, Homo sapien
cgcaagaatccacaagagggctcca

SEQ ID NO: 1213226 - DNA, 25 bp, Homo sapien
gcaagaatccacaagagggctccag

SEQ ID NO: 1213227 - DNA, 25 bp, Homo sapien
tgtgattggctaggaggtgccgagg

SEQ ID NO: 1213228 - DNA, 25 bp, Homo sapien
gtgattggctaggaggtgccgaggc

SEQ ID NO: 1213229 - DNA, 25 bp, Homo sapien
ctgtgattggctaggaggtgccgag

SEQ ID NO: 1213230 - DNA, 25 bp, Homo sapien
tcctcacaggtttgcccaagggctg

SEQ ID NO: 1213231 - DNA, 25 bp, Homo sapien
tatttcatcaagtgagtaagacgca

SEQ ID NO: 1213232 - DNA, 25 bp, Homo sapien
gagagatggttaaagtgtctggttt

SEQ ID NO: 1213233 - DNA, 25 bp, Homo sapien
cgcagtttcctttctgatgtcgctg

SEQ ID NO: 1213234 - DNA, 25 bp, Homo sapien
tggctgcagccaactggttgtctaa

SEQ ID NO: 1213235 - DNA, 25 bp, Homo sapien
ggaagatgaataccagcctgtgagc

SEQ ID NO: 1213236 - DNA, 25 bp, Homo sapien
ggcactccgcctggatgggaatata

SEQ ID NO: 1213237 - DNA, 25 bp, Homo sapien
gggacataatccatactggcctctt

SEQ ID NO: 1213238 - DNA, 25 bp, Homo sapien
gggttaagcgcttgcctgctccctg

SEQ ID NO: 1213239 - DNA, 25 bp, Homo sapien
tcaggaaacggtccgaagaggagct

SEQ ID NO: 1213240 - DNA, 25 bp, Homo sapien
cagggttaagcgcttgcctgctccc

SEQ ID NO: 1213241 - DNA, 25 bp, Homo sapien
ccgagtcgacgaggaggcaggtggt

SEQ ID NO: 1213242 - DNA, 25 bp, Homo sapien
agacccagcgctgcccgttaacagt

SEQ ID NO: 1213243 - DNA, 25 bp, Homo sapien
cccgttaacagtcccggcaggagag

SEQ ID NO: 1213244 - DNA, 25 bp, Homo sapien
gaacggagacccagcgctgcccgtt

SEQ ID NO: 1213245 - DNA, 25 bp, Homo sapien
ccagcttctgctctccgggctccgc

SEQ ID NO: 1213246 - DNA, 25 bp, Homo sapien
aagctttctctactagaaatttgta

SEQ ID NO: 1213247 - DNA, 25 bp, Homo sapien
gctttctctactagaaatttgtagg

SEQ ID NO: 1213248 - DNA, 25 bp, Homo sapien
gggcacctagaccttcatctgtgct

SEQ ID NO: 1213249 - DNA, 25 bp, Homo sapien
caattcagaaacgaaggggcaccta

SEQ ID NO: 1213250 - DNA, 25 bp, Homo sapien
aagtcctaggttggccaagaagcag

SEQ ID NO: 1213251 - DNA, 25 bp, Homo sapien
ggtcctgtgagtagactggatcgaa

SEQ ID NO: 1213252 - DNA, 25 bp, Homo sapien
ttcagagatgaaaatggcatggagt

SEQ ID NO: 1213253 - DNA, 25 bp, Homo sapien
tagactggatcgaaagtttgctccc

SEQ ID NO: 1213254 - DNA, 25 bp, Homo sapien
gcaggtccagaaccactgagcttta

SEQ ID NO: 1213255 - DNA, 25 bp, Homo sapien
tggctgccaaataggagtgtcaccc

SEQ ID NO: 1213256 - DNA, 25 bp, Homo sapien
cctgttaatccactgaggaaatatt

SEQ ID NO: 1213257 - DNA, 25 bp, Homo sapien
gaatgttgcgggctatttgccaccg

SEQ ID NO: 1213258 - DNA, 25 bp, Homo sapien
gcaagctgcatgttcatatagccat

SEQ ID NO: 1213259 - DNA, 25 bp, Homo sapien
aacttcacctagatgtccaggcaat

SEQ ID NO: 1213260 - DNA, 25 bp, Homo sapien
tatgaattctgtatctgcaagctgc

SEQ ID NO: 1213261 - DNA, 25 bp, Homo sapien
tgtccaggcaatgcctcatttatga

SEQ ID NO: 1213262 - DNA, 25 bp, Homo sapien
aatctttattgtctagaaatacata

SEQ ID NO: 1213263 - DNA, 25 bp, Homo sapien
atcctcttcaaaagatgctattcac

SEQ ID NO: 1213264 - DNA, 25 bp, Homo sapien
ttaaaaaatcctcttcaaaagatgc

SEQ ID NO: 1213265 - DNA, 25 bp, Homo sapien
aaatcctcttcaaaagatgctattc

SEQ ID NO: 1213266 - DNA, 25 bp, Homo sapien
catggacccttctgtggtgggcttc

SEQ ID NO: 1213267 - DNA, 25 bp, Homo sapien
accacgtctggcctttgatctgctt

SEQ ID NO: 1213268 - DNA, 25 bp, Homo sapien
tcagaaaaatggtatcggatgtaca

SEQ ID NO: 1213269 - DNA, 25 bp, Homo sapien
gtgtctctgcagtccattccttctg

SEQ ID NO: 1213270 - DNA, 25 bp, Homo sapien
cagcaatgtcggttggaaagcaggc

SEQ ID NO: 1213271 - DNA, 25 bp, Homo sapien
gaaagcaggcgtcatttgccttgaa

SEQ ID NO: 1213272 - DNA, 25 bp, Homo sapien
gtttcttaaacctagcacctctgtg

SEQ ID NO: 1213273 - DNA, 25 bp, Homo sapien
cactttaggtaatcatagggagcac

SEQ ID NO: 1213274 - DNA, 25 bp, Homo sapien
tgtcctttgcctgcatgaggtggaa

SEQ ID NO: 1213275 - DNA, 25 bp, Homo sapien
tgtgtatgctaccaacttaaagtgc

SEQ ID NO: 1213276 - DNA, 25 bp, Homo sapien
aacattcaggtttgaagccagccct

SEQ ID NO: 1213277 - DNA, 25 bp, Homo sapien
tgtgtgcctatctgaaaactttggg

SEQ ID NO: 1213278 - DNA, 25 bp, Homo sapien
gggaagtgctttggaccctgcagca

SEQ ID NO: 1213279 - DNA, 25 bp, Homo sapien
gaaatagcgaggtagtcggcttcca

SEQ ID NO: 1213280 - DNA, 25 bp, Homo sapien
ccatcttcgcatgaaacggctggaa

SEQ ID NO: 1213281 - DNA, 25 bp, Homo sapien
gaatgtttccgaccagatggctaga

SEQ ID NO: 1213282 - DNA, 25 bp, Homo sapien
gtaggcttcctccgaatcccgtcga

SEQ ID NO: 1213283 - DNA, 25 bp, Homo sapien
caaggccgagactctgtaggcttcc

SEQ ID NO: 1213284 - DNA, 25 bp, Homo sapien
atcccgtcgacctccagccgctgag

SEQ ID NO: 1213285 - DNA, 25 bp, Homo sapien
agcagcgacgccaccgctgggcaag

SEQ ID NO: 1213286 - DNA, 25 bp, Homo sapien
gcttttcaaccctctgtcagtcgga

SEQ ID NO: 1213287 - DNA, 25 bp, Homo sapien
tatccatggtgttgaagcgtcgagc

SEQ ID NO: 1213288 - DNA, 25 bp, Homo sapien
aaatctggcaaaaccaatcggcggc

SEQ ID NO: 1213289 - DNA, 25 bp, Homo sapien
tcagtcggaaaaccatcgccgaggc

SEQ ID NO: 1213290 - DNA, 25 bp, Homo sapien
agaaaagtatgatcagtgtcctggg

SEQ ID NO: 1213291 - DNA, 25 bp, Homo sapien
gagcagatcaatggtgtcctggcaa

SEQ ID NO: 1213292 - DNA, 25 bp, Homo sapien
gattgaggccaacatttagaggagg

SEQ ID NO: 1213293 - DNA, 25 bp, Homo sapien
ggcttatatatgcatcaacccagtc

SEQ ID NO: 1213294 - DNA, 25 bp, Homo sapien
taattccaaggatcagaaactcccc

SEQ ID NO: 1213295 - DNA, 25 bp, Homo sapien
gaaactccccgttttgctgactcat

SEQ ID NO: 1213296 - DNA, 25 bp, Homo sapien
aagctccattgaccgaagccacagg

SEQ ID NO: 1213297 - DNA, 25 bp, Homo sapien
cagatgaacggaccataaatgtgtt

SEQ ID NO: 1213298 - DNA, 25 bp, Homo sapien
ggagggactttgaatttgatatgaa

SEQ ID NO: 1213299 - DNA, 25 bp, Homo sapien
tgctcttttgtgtttcgctccaaag

SEQ ID NO: 1213300 - DNA, 25 bp, Homo sapien
tccaaagggttgtcttcctcgccaa

SEQ ID NO: 1213301 - DNA, 25 bp, Homo sapien
tgatatgaatctttaaaaccagaat

SEQ ID NO: 1213302 - DNA, 25 bp, Homo sapien
gccttgcgagaagggacgtacctat

SEQ ID NO: 1213303 - DNA, 25 bp, Homo sapien
gattttgcctccaaaggagagcgct

SEQ ID NO: 1213304 - DNA, 25 bp, Homo sapien
gagagcgctgtgatacctacatgtg

SEQ ID NO: 1213305 - DNA, 25 bp, Homo sapien
cctacatgtgtaaggaagggccttc

SEQ ID NO: 1213306 - DNA, 25 bp, Homo sapien
tatagtaattataagggagaggccc

SEQ ID NO: 1213307 - DNA, 25 bp, Homo sapien
cagtctactgagcatccaccatgga

SEQ ID NO: 1213308 - DNA, 25 bp, Homo sapien
tgactaggcaatacatgagacagct

SEQ ID NO: 1213309 - DNA, 25 bp, Homo sapien
gagcagccacgtgacatcctttgaa

SEQ ID NO: 1213310 - DNA, 25 bp, Homo sapien
tgaaggcaggagtggtctatttcct

SEQ ID NO: 1213311 - DNA, 25 bp, Homo sapien
taaacctcacgaagaggattttgaa

SEQ ID NO: 1213312 - DNA, 25 bp, Homo sapien
taggaattctataaacctcacgaag

SEQ ID NO: 1213313 - DNA, 25 bp, Homo sapien
tatgacgatcattgctctctgctga

SEQ ID NO: 1213314 - DNA, 25 bp, Homo sapien
gaacagatctgtaaaccccatggga

SEQ ID NO: 1213315 - DNA, 25 bp, Homo sapien
tgtaattcgacaagtagctgggtgg

SEQ ID NO: 1213316 - DNA, 25 bp, Homo sapien
ggagctagttttgcaataggcattg

SEQ ID NO: 1213317 - DNA, 25 bp, Homo sapien
tagtttctggtggatccatcatcag

SEQ ID NO: 1213318 - DNA, 25 bp, Homo sapien
gacatgcgcatggtcatcttccgct

SEQ ID NO: 1213319 - DNA, 25 bp, Homo sapien
tgattcgcatcatgagcaagatctg

SEQ ID NO: 1213320 - DNA, 25 bp, Homo sapien
tgctaacgctgcagatgattcgcat

SEQ ID NO: 1213321 - DNA, 25 bp, Homo sapien
gacgaccttcgccaggacatgctaa

SEQ ID NO: 1213322 - DNA, 25 bp, Homo sapien
cgcccgaacagggacttgaaccctg

SEQ ID NO: 1213323 - DNA, 25 bp, Homo sapien
ctctaccgactgagctatccgggcg

SEQ ID NO: 1213324 - DNA, 25 bp, Homo sapien
cctcagattaaaagtctgatgctct

SEQ ID NO: 1213325 - DNA, 25 bp, Homo sapien
ttgaaccctggaccctcagattaaa

SEQ ID NO: 1213326 - DNA, 25 bp, Homo sapien
tgaattcaacttgaaatgtaagggt

SEQ ID NO: 1213327 - DNA, 25 bp, Homo sapien
cttgatgggataatttagcaggtta

SEQ ID NO: 1213328 - DNA, 25 bp, Homo sapien
aatgtaagggtttacgatgtccgct

SEQ ID NO: 1213329 - DNA, 25 bp, Homo sapien
gatgtccgctcttgggacttgatgg

SEQ ID NO: 1213330 - DNA, 25 bp, Homo sapien
tacggcagctccatgagtcgctccc

SEQ ID NO: 1213331 - DNA, 25 bp, Homo sapien
agcattttgaaatggcgagtaatga

SEQ ID NO: 1213332 - DNA, 25 bp, Homo sapien
ggtggcagtcacagatcctagggcc

SEQ ID NO: 1213333 - DNA, 25 bp, Homo sapien
taatgaagccgcaacttccggcctc

SEQ ID NO: 1213334 - DNA, 25 bp, Homo sapien
aagaaactgcagtctgttggtaaaa

SEQ ID NO: 1213335 - DNA, 25 bp, Homo sapien
cactgtcagatgttgaacactgagc

SEQ ID NO: 1213336 - DNA, 25 bp, Homo sapien
gagatcctgcaagcactgtcagatg

SEQ ID NO: 1213337 - DNA, 25 bp, Homo sapien
ctgtcagatgttgaacactgagcag

SEQ ID NO: 1213338 - DNA, 25 bp, Homo sapien
gatcctgcaagcactgtcagatgtt

SEQ ID NO: 1213339 - DNA, 25 bp, Homo sapien
gcaaaatcttcaaaagcggcagttt

SEQ ID NO: 1213340 - DNA, 25 bp, Homo sapien
aaaatcttcaaaagcggcagttttg

SEQ ID NO: 1213341 - DNA, 25 bp, Homo sapien
caaaatcttcaaaagcggcagtttt

SEQ ID NO: 1213342 - DNA, 25 bp, Homo sapien
tgcaaaatcttcaaaagcggcagtt

SEQ ID NO: 1213343 - DNA, 25 bp, Homo sapien
acagtgaacatttcaccttgcgcac

SEQ ID NO: 1213344 - DNA, 25 bp, Homo sapien
ttaacagtgaacatttcaccttgcg

SEQ ID NO: 1213345 - DNA, 25 bp, Homo sapien
ctttaacagtgaacatttcaccttg

SEQ ID NO: 1213346 - DNA, 25 bp, Homo sapien
taacagtgaacatttcaccttgcgc

SEQ ID NO: 1213347 - DNA, 25 bp, Homo sapien
tacaaggcaacattcggctcagctt

SEQ ID NO: 1213348 - DNA, 25 bp, Homo sapien
acaaggcaacattcggctcagcttc

SEQ ID NO: 1213349 - DNA, 25 bp, Homo sapien
atgtactgacctaaatagtgcatga

SEQ ID NO: 1213350 - DNA, 25 bp, Homo sapien
tgtactgacctaaatagtgcatgac

SEQ ID NO: 1213351 - DNA, 25 bp, Homo sapien
tatgtactgacctaaatagtgcatg

SEQ ID NO: 1213352 - DNA, 25 bp, Homo sapien
cagtagttctcccaaaagatctcca

SEQ ID NO: 1213353 - DNA, 25 bp, Homo sapien
gctgctcctgctgatcataaagttg

SEQ ID NO: 1213354 - DNA, 25 bp, Homo sapien
gaagctctgacgtcccagtagttct

SEQ ID NO: 1213355 - DNA, 25 bp, Homo sapien
cttgggtctttcacggagaagctct

SEQ ID NO: 1213356 - DNA, 25 bp, Homo sapien
taaagtgacaagattctttcttagc

SEQ ID NO: 1213357 - DNA, 25 bp, Homo sapien
cagtggctaaagtgacaagattctt

SEQ ID NO: 1213358 - DNA, 25 bp, Homo sapien
agtagcagtggctaaagtgacaaga

SEQ ID NO: 1213359 - DNA, 25 bp, Homo sapien
tggctaaagtgacaagattctttct

SEQ ID NO: 1213360 - DNA, 25 bp, Homo sapien
gtgacaggtagtatgtatttctccc

SEQ ID NO: 1213361 - DNA, 25 bp, Homo sapien
ccttgaactcaaagctgtgatacag

SEQ ID NO: 1213362 - DNA, 25 bp, Homo sapien
gttaacagtacgtctagaaagtgga

SEQ ID NO: 1213363 - DNA, 25 bp, Homo sapien
tttctcccagtcatgccaaagatag

SEQ ID NO: 1213364 - DNA, 25 bp, Homo sapien
caactctagagcgtgggaaattcta

SEQ ID NO: 1213365 - DNA, 25 bp, Homo sapien
gggaaattctacagaacaaatgacc

SEQ ID NO: 1213366 - DNA, 25 bp, Homo sapien
gagcgtgggaaattctacagaacaa

SEQ ID NO: 1213367 - DNA, 25 bp, Homo sapien
aatctgccaactctagagcgtggga

SEQ ID NO: 1213368 - DNA, 25 bp, Homo sapien
caagcagaaaacctgtacctacaaa

SEQ ID NO: 1213369 - DNA, 25 bp, Homo sapien
aaaaataaaaatgggccacgcatgg

SEQ ID NO: 1213370 - DNA, 25 bp, Homo sapien
gactgcttgtgccacggaggcggag

SEQ ID NO: 1213371 - DNA, 25 bp, Homo sapien
gcaacaagcagaaaacctgtaccta

SEQ ID NO: 1213372 - DNA, 25 bp, Homo sapien
caccatctgataaaggctgctagag

SEQ ID NO: 1213373 - DNA, 25 bp, Homo sapien
tacaactgatctgtcaatgcggttc

SEQ ID NO: 1213374 - DNA, 25 bp, Homo sapien
cagtggtcttcaaagcgaagttgga

SEQ ID NO: 1213375 - DNA, 25 bp, Homo sapien
tgtgggtcaggttcaccaaccacta

SEQ ID NO: 1213376 - DNA, 25 bp, Homo sapien
caaagaccaagacaggccatatcca

SEQ ID NO: 1213377 - DNA, 25 bp, Homo sapien
ccatgttggctggacaaagctctca

SEQ ID NO: 1213378 - DNA, 25 bp, Homo sapien
catacagggttatgggatcttgaaa

SEQ ID NO: 1213379 - DNA, 25 bp, Homo sapien
tggttccaagcaggacataatggag

SEQ ID NO: 1213380 - DNA, 25 bp, Homo sapien
cagcaaacaacccgggagccaggtt

SEQ ID NO: 1213381 - DNA, 25 bp, Homo sapien
gagccaggtttagtccctagaaatg

SEQ ID NO: 1213382 - DNA, 25 bp, Homo sapien
ctcagcaaacaacccgggagccagg

SEQ ID NO: 1213383 - DNA, 25 bp, Homo sapien
gccaggtttagtccctagaaatgta

SEQ ID NO: 1213384 - DNA, 25 bp, Homo sapien
tggatagcaagtaaaacaaaaggaa

SEQ ID NO: 1213385 - DNA, 25 bp, Homo sapien
ctggatagcaagtaaaacaaaagga

SEQ ID NO: 1213386 - DNA, 25 bp, Homo sapien
tgtgcgagagcgagagtctgagcag

SEQ ID NO: 1213387 - DNA, 25 bp, Homo sapien
tgcgagagcgagagtctgagcagca

SEQ ID NO: 1213388 - DNA, 25 bp, Homo sapien
gcgagagcgagagtctgagcagcat

SEQ ID NO: 1213389 - DNA, 25 bp, Homo sapien
ctgtgcgagagcgagagtctgagca

SEQ ID NO: 1213390 - DNA, 25 bp, Homo sapien
cttcagttggtcttgacttggaata

SEQ ID NO: 1213391 - DNA, 25 bp, Homo sapien
tcttgacttggaatatccatactgt

SEQ ID NO: 1213392 - DNA, 25 bp, Homo sapien
ggtcttgacttggaatatccatact

SEQ ID NO: 1213393 - DNA, 25 bp, Homo sapien
agttggtcttgacttggaatatcca

SEQ ID NO: 1213394 - DNA, 25 bp, Homo sapien
aaagaagtcaccgtgtggtgatttt

SEQ ID NO: 1213395 - DNA, 25 bp, Homo sapien
agaagtcaccgtgtggtgattttac

SEQ ID NO: 1213396 - DNA, 25 bp, Homo sapien
aagaagtcaccgtgtggtgatttta

SEQ ID NO: 1213397 - DNA, 25 bp, Homo sapien
cacattcagggaaaggtcttgggag

SEQ ID NO: 1213398 - DNA, 25 bp, Homo sapien
acattcagggaaaggtcttgggagt

SEQ ID NO: 1213399 - DNA, 25 bp, Homo sapien
aaatctactgttaaaaacaggctat

SEQ ID NO: 1213400 - DNA, 25 bp, Homo sapien
tacaaaattaggcataattcagaaa

SEQ ID NO: 1213401 - DNA, 25 bp, Homo sapien
tgtataaaccctccagtctactaca

SEQ ID NO: 1213402 - DNA, 25 bp, Homo sapien
atatgaaaccctcgccacgtaccaa

SEQ ID NO: 1213403 - DNA, 25 bp, Homo sapien
gggatgtagcagttccattctggct

SEQ ID NO: 1213404 - DNA, 25 bp, Homo sapien
tagcagttccattctggctcaccag

SEQ ID NO: 1213405 - DNA, 25 bp, Homo sapien
tcaccagttagtgtgcaacacaatg

SEQ ID NO: 1213406 - DNA, 25 bp, Homo sapien
gagcaaagctagaagaatcccaaac

SEQ ID NO: 1213407 - DNA, 25 bp, Homo sapien
aaagaagggaaaggtgtccatcagt

SEQ ID NO: 1213408 - DNA, 25 bp, Homo sapien
tgaaagaagggaaaggtgtccatca

SEQ ID NO: 1213409 - DNA, 25 bp, Homo sapien
gaagggaaaggtgtccatcagtgca

SEQ ID NO: 1213410 - DNA, 25 bp, Homo sapien
agaagggaaaggtgtccatcagtgc

SEQ ID NO: 1213411 - DNA, 25 bp, Homo sapien
gcagtgtggggatatcgtcttctgt

SEQ ID NO: 1213412 - DNA, 25 bp, Homo sapien
aggcagtgtggggatatcgtcttct

SEQ ID NO: 1213413 - DNA, 25 bp, Homo sapien
agtgtggggatatcgtcttctgtag

SEQ ID NO: 1213414 - DNA, 25 bp, Homo sapien
gtggggatatcgtcttctgtagttc

SEQ ID NO: 1213415 - DNA, 25 bp, Homo sapien
tctaggtgtatagttgcttctcaag

SEQ ID NO: 1213416 - DNA, 25 bp, Homo sapien
cctcaaatccaaggtccagcctaga

SEQ ID NO: 1213417 - DNA, 25 bp, Homo sapien
tcagttgagccattacttctaggtg

SEQ ID NO: 1213418 - DNA, 25 bp, Homo sapien
cctagatgtttcatcttgggctaaa

SEQ ID NO: 1213419 - DNA, 25 bp, Homo sapien
ctgctctgatactgactcattcaaa

SEQ ID NO: 1213420 - DNA, 25 bp, Homo sapien
catctgtagtatctgaaacaatggc

SEQ ID NO: 1213421 - DNA, 25 bp, Homo sapien
gatactgactcattcaaaaaccaca

SEQ ID NO: 1213422 - DNA, 25 bp, Homo sapien
aaaccacaagtcatctgtagtatct

SEQ ID NO: 1213423 - DNA, 25 bp, Homo sapien
ctcagaggtaacctctacatcggta

SEQ ID NO: 1213424 - DNA, 25 bp, Homo sapien
ggacttagagtcctccaggtcatca

SEQ ID NO: 1213425 - DNA, 25 bp, Homo sapien
gaggtaacctctacatcggtatcat

SEQ ID NO: 1213426 - DNA, 25 bp, Homo sapien
tcggtatcatcacttaaggacttag

SEQ ID NO: 1213427 - DNA, 25 bp, Homo sapien
ggttcttcgacaatcagggacatca

SEQ ID NO: 1213428 - DNA, 25 bp, Homo sapien
tatggcagtgatatcagacgtggag

SEQ ID NO: 1213429 - DNA, 25 bp, Homo sapien
tctttaggtctaacgacaggagccg

SEQ ID NO: 1213430 - DNA, 25 bp, Homo sapien
tcaaggcccaacaacgaaaacagta

SEQ ID NO: 1213431 - DNA, 25 bp, Homo sapien
gatggcccgtccttccatgaataat

SEQ ID NO: 1213432 - DNA, 25 bp, Homo sapien
accagctgaatctctttcttgcaaa

SEQ ID NO: 1213433 - DNA, 25 bp, Homo sapien
catgaataatgttcccgtctcgtgg

SEQ ID NO: 1213434 - DNA, 25 bp, Homo sapien
tgaaaacaagtgacaagatggcccg

SEQ ID NO: 1213435 - DNA, 25 bp, Homo sapien
ctacaactcgttagaaggaaacact

SEQ ID NO: 1213436 - DNA, 25 bp, Homo sapien
cagctaccttggattttgatgccta

SEQ ID NO: 1213437 - DNA, 25 bp, Homo sapien
actagggtgagagccatgaaatagc

SEQ ID NO: 1213438 - DNA, 25 bp, Homo sapien
cacctaactatgtacctgactgctg

SEQ ID NO: 1213439 - DNA, 25 bp, Homo sapien
taaaacttgcatagagattccagga

SEQ ID NO: 1213440 - DNA, 25 bp, Homo sapien
caaaagggccagactaggtgcctca

SEQ ID NO: 1213441 - DNA, 25 bp, Homo sapien
tcagctaaatctatagtcccagggc

SEQ ID NO: 1213442 - DNA, 25 bp, Homo sapien
tcaaccatccagtatatcaaggcgt

SEQ ID NO: 1213443 - DNA, 25 bp, Homo sapien
actcccgacctaggtgatctcccaa

SEQ ID NO: 1213444 - DNA, 25 bp, Homo sapien
tcccgacctaggtgatctcccaaag

SEQ ID NO: 1213445 - DNA, 25 bp, Homo sapien
tcaccgcaatctccccctctcaggt

SEQ ID NO: 1213446 - DNA, 25 bp, Homo sapien
gctcaccgcaatctccccctctcag

SEQ ID NO: 1213447 - DNA, 25 bp, Homo sapien
aaaaaatctgtaccgcagtggcaag

SEQ ID NO: 1213448 - DNA, 25 bp, Homo sapien
cacgtttggtacatgagacagctta

SEQ ID NO: 1213449 - DNA, 25 bp, Homo sapien
ttcatagtctacagcacgttgcagc

SEQ ID NO: 1213450 - DNA, 25 bp, Homo sapien
gatatcaactcgaacaaggcttacc

SEQ ID NO: 1213451 - DNA, 25 bp, Homo sapien
tttaactatgctgtattcaccaata

SEQ ID NO: 1213452 - DNA, 25 bp, Homo sapien
gaaaatgctaatgggacatttccca

SEQ ID NO: 1213453 - DNA, 25 bp, Homo sapien
cattaccaataatggcattagtgca

SEQ ID NO: 1213454 - DNA, 25 bp, Homo sapien
cattagtgcacatcaaaagatctga

SEQ ID NO: 1213455 - DNA, 25 bp, Homo sapien
tcaaaaggctattggtagaggtgca

SEQ ID NO: 1213456 - DNA, 25 bp, Homo sapien
tcgtaagaaggaaaacaacctgcag

SEQ ID NO: 1213457 - DNA, 25 bp, Homo sapien
tattagctatctctttctgcagaca

SEQ ID NO: 1213458 - DNA, 25 bp, Homo sapien
gagagttctactaactgtcctgtgc

SEQ ID NO: 1213459 - DNA, 25 bp, Homo sapien
atcaatcttcgataaagcatttgcc

SEQ ID NO: 1213460 - DNA, 25 bp, Homo sapien
gtctgttgacatcagtacttaactg

SEQ ID NO: 1213461 - DNA, 25 bp, Homo sapien
cttaagaaatggagagttccggccg

SEQ ID NO: 1213462 - DNA, 25 bp, Homo sapien
tgctcttctagcattatttgaccct

SEQ ID NO: 1213463 - DNA, 25 bp, Homo sapien
taaagatactgtagttacaagggct

SEQ ID NO: 1213464 - DNA, 25 bp, Homo sapien
tagatagtagctctgccatcacagc

SEQ ID NO: 1213465 - DNA, 25 bp, Homo sapien
tctaccgcctaactctgcaacagaa

SEQ ID NO: 1213466 - DNA, 25 bp, Homo sapien
gaaaggaagcctcaactacgagttg

SEQ ID NO: 1213467 - DNA, 25 bp, Homo sapien
taaaagggcctgcagtaatcaaaca

SEQ ID NO: 1213468 - DNA, 25 bp, Homo sapien
ggacgtcaagactggcactcaatac

SEQ ID NO: 1213469 - DNA, 25 bp, Homo sapien
cacagcaaggtggttttatcaggat

SEQ ID NO: 1213470 - DNA, 25 bp, Homo sapien
aaaactgaggcatacggacgtcaag

SEQ ID NO: 1213471 - DNA, 25 bp, Homo sapien
tattgacagtgcattttatgccacc

SEQ ID NO: 1213472 - DNA, 25 bp, Homo sapien
gatgaaaccacatttgctgctcttg

SEQ ID NO: 1213473 - DNA, 25 bp, Homo sapien
gacagagctattaacttagtggtgc

SEQ ID NO: 1213474 - DNA, 25 bp, Homo sapien
tcatctagtgagctggccacattca

SEQ ID NO: 1213475 - DNA, 25 bp, Homo sapien
tactaacaattgtgccaggcaaaag

SEQ ID NO: 1213476 - DNA, 25 bp, Homo sapien
aacaaacagtgatgtgaaatttacc

SEQ ID NO: 1213477 - DNA, 25 bp, Homo sapien
gatggacttgtgtaactccaccaaa

SEQ ID NO: 1213478 - DNA, 25 bp, Homo sapien
gatgtacatcacaaggttaaccctg

SEQ ID NO: 1213479 - DNA, 25 bp, Homo sapien
tcctcgtggaggtctgccgccgcag

SEQ ID NO: 1213480 - DNA, 25 bp, Homo sapien
gtggaggtctgccgccgcagcaccg

SEQ ID NO: 1213481 - DNA, 25 bp, Homo sapien
ctcgtggaggtctgccgccgcagca

SEQ ID NO: 1213482 - DNA, 25 bp, Homo sapien
cccgcggtagcccaggacctcctcg

SEQ ID NO: 1213483 - DNA, 25 bp, Homo sapien
ctgagcttcctgtttttcccgccca

SEQ ID NO: 1213484 - DNA, 25 bp, Homo sapien
tgagcttcctgtttttcccgcccag

SEQ ID NO: 1213485 - DNA, 25 bp, Homo sapien
ctgtttttcccgcccagcagagatg

SEQ ID NO: 1213486 - DNA, 25 bp, Homo sapien
ttttcccgcccagcagagatgctgc

SEQ ID NO: 1213487 - DNA, 25 bp, Homo sapien
aagcacatggagagattctagggac

SEQ ID NO: 1213488 - DNA, 25 bp, Homo sapien
cagggaaatcacatgcagaacctgg

SEQ ID NO: 1213489 - DNA, 25 bp, Homo sapien
gaactctgttgagaccccacaggca

SEQ ID NO: 1213490 - DNA, 25 bp, Homo sapien
caggcagctctggtgaatgaccagc

SEQ ID NO: 1213491 - DNA, 25 bp, Homo sapien
caggctgtcccttctaggtggaact

SEQ ID NO: 1213492 - DNA, 25 bp, Homo sapien
ggtgacttgagagtagccttccagc

SEQ ID NO: 1213493 - DNA, 25 bp, Homo sapien
ctgcaagtggagaggatttggctat

SEQ ID NO: 1213494 - DNA, 25 bp, Homo sapien
caagtggagaggatttggctatcac

SEQ ID NO: 1213495 - DNA, 25 bp, Homo sapien
gtggagaggatttggctatcactca

SEQ ID NO: 1213496 - DNA, 25 bp, Homo sapien
gcaagtggagaggatttggctatca

SEQ ID NO: 1213497 - DNA, 25 bp, Homo sapien
atccccttgtgctgtcctcccaagg

SEQ ID NO: 1213498 - DNA, 25 bp, Homo sapien
gggctgcatccccttgtgctgtcct

SEQ ID NO: 1213499 - DNA, 25 bp, Homo sapien
tccagggctgcatccccttgtgctg

SEQ ID NO: 1213500 - DNA, 25 bp, Homo sapien
ttgtgctgtcctcccaaggctacat

SEQ ID NO: 1213501 - DNA, 25 bp, Homo sapien
cttggttccatttgtcctgtagcct

SEQ ID NO: 1213502 - DNA, 25 bp, Homo sapien
ccttctgggtctcctcttggttcca

SEQ ID NO: 1213503 - DNA, 25 bp, Homo sapien
tgccttctgggtctcctcttggttc

SEQ ID NO: 1213504 - DNA, 25 bp, Homo sapien
gttccatttgtcctgtagcctctcc

SEQ ID NO: 1213505 - DNA, 25 bp, Homo sapien
tgtccaccccagttagcactccagc

SEQ ID NO: 1213506 - DNA, 25 bp, Homo sapien
ctgtctgtccaccccagttagcact

SEQ ID NO: 1213507 - DNA, 25 bp, Homo sapien
tgtctgtccaccccagttagcactc

SEQ ID NO: 1213508 - DNA, 25 bp, Homo sapien
ccaccccagttagcactccagctag

SEQ ID NO: 1213509 - DNA, 25 bp, Homo sapien
tatggttaagtcttggtcacatggc

SEQ ID NO: 1213510 - DNA, 25 bp, Homo sapien
tgtgaataggcagacaaggccactg

SEQ ID NO: 1213511 - DNA, 25 bp, Homo sapien
taccatgtgctagacggacattgtg

SEQ ID NO: 1213512 - DNA, 25 bp, Homo sapien
cattatctctgcataacaccccgaa

SEQ ID NO: 1213513 - DNA, 25 bp, Homo sapien
atggcaacgggacatagcgctggct

SEQ ID NO: 1213514 - DNA, 25 bp, Homo sapien
gtgggaaagggagcttcttcgcaaa

SEQ ID NO: 1213515 - DNA, 25 bp, Homo sapien
catgtatgagtgtacgttgcaggta

SEQ ID NO: 1213516 - DNA, 25 bp, Homo sapien
caaatatccgacacatgtatgagtg

SEQ ID NO: 1213517 - DNA, 25 bp, Homo sapien
tgtctgtcaggtggaccagctctaa

SEQ ID NO: 1213518 - DNA, 25 bp, Homo sapien
ctcgtggctgtctgtcaggtggacc

SEQ ID NO: 1213519 - DNA, 25 bp, Homo sapien
caggtggaccagctctaactctctc

SEQ ID NO: 1213520 - DNA, 25 bp, Homo sapien
tggctgtctgtcaggtggaccagct

SEQ ID NO: 1213521 - DNA, 25 bp, Homo sapien
gacagaatgtatgctggaccctgaa

SEQ ID NO: 1213522 - DNA, 25 bp, Homo sapien
tcagagactgcctcactacctcact

SEQ ID NO: 1213523 - DNA, 25 bp, Homo sapien
tcactcattccttgccttaaagcca

SEQ ID NO: 1213524 - DNA, 25 bp, Homo sapien
ccaacaaatgaaactacccctgtga

SEQ ID NO: 1213525 - DNA, 25 bp, Homo sapien
tgcaagacggttttcccagtgaaat

SEQ ID NO: 1213526 - DNA, 25 bp, Homo sapien
aggtgagtcctcacaggcgtgctgc

SEQ ID NO: 1213527 - DNA, 25 bp, Homo sapien
ggagccatctcgtgcgcagagttag

SEQ ID NO: 1213528 - DNA, 25 bp, Homo sapien
caaggccatttccatgggaggagag

SEQ ID NO: 1213529 - DNA, 25 bp, Homo sapien
atctggttagttctactcatccttt

SEQ ID NO: 1213530 - DNA, 25 bp, Homo sapien
tctggttagttctactcatccttta

SEQ ID NO: 1213531 - DNA, 25 bp, Homo sapien
ctggttagttctactcatcctttag

SEQ ID NO: 1213532 - DNA, 25 bp, Homo sapien
ggccattatccagcccctgaggagt

SEQ ID NO: 1213533 - DNA, 25 bp, Homo sapien
tgaggagtcatgacctccagcaggc

SEQ ID NO: 1213534 - DNA, 25 bp, Homo sapien
gcccctgaggagtcatgacctccag

SEQ ID NO: 1213535 - DNA, 25 bp, Homo sapien
ggagaaatctcatggccattatcca

SEQ ID NO: 1213536 - DNA, 25 bp, Homo sapien
cagaagtcccaaggctttagatccc

SEQ ID NO: 1213537 - DNA, 25 bp, Homo sapien
cctcgtcagtcaatagctaccaaaa

SEQ ID NO: 1213538 - DNA, 25 bp, Homo sapien
caaaacagggaccacttgcagatcc

SEQ ID NO: 1213539 - DNA, 25 bp, Homo sapien
cgaagagcccctcgtcagtcaatag

SEQ ID NO: 1213540 - DNA, 25 bp, Homo sapien
ctgtaacaccctcccatcatcacct

SEQ ID NO: 1213541 - DNA, 25 bp, Homo sapien
tcacctaagcgagggtagtgtccct

SEQ ID NO: 1213542 - DNA, 25 bp, Homo sapien
catcagcaaacagccacggtaggag

SEQ ID NO: 1213543 - DNA, 25 bp, Homo sapien
gaggtcctcactcaaggctacagca

SEQ ID NO: 1213544 - DNA, 25 bp, Homo sapien
caaatgtatacatgggcggaagcca

SEQ ID NO: 1213545 - DNA, 25 bp, Homo sapien
ggtctccatcgacaagtttgccctg

SEQ ID NO: 1213546 - DNA, 25 bp, Homo sapien
gggagatctccgactatgccctgga

SEQ ID NO: 1213547 - DNA, 25 bp, Homo sapien
cttctatgacaaccagctggcccgg

SEQ ID NO: 1213548 - DNA, 25 bp, Homo sapien
gccaacctgcgtagcctggtgctag

SEQ ID NO: 1213549 - DNA, 25 bp, Homo sapien
gggttgctgacccttaccctgcaaa

SEQ ID NO: 1213550 - DNA, 25 bp, Homo sapien
tgacgcccggtgtagaatgactgcc

SEQ ID NO: 1213551 - DNA, 25 bp, Homo sapien
ctcttcttgtgaatggtcccctgcc

SEQ ID NO: 1213552 - DNA, 25 bp, Homo sapien
tcgtggccccactcttgctagcttg

SEQ ID NO: 1213553 - DNA, 25 bp, Homo sapien
cagtcaagtagctttgcctcaggta

SEQ ID NO: 1213554 - DNA, 25 bp, Homo sapien
tagggccgcgatttgggtcctgatc

SEQ ID NO: 1213555 - DNA, 25 bp, Homo sapien
taggtctgctctctcacagcaggtc

SEQ ID NO: 1213556 - DNA, 25 bp, Homo sapien
cctgatctatttgccggtaggtctg

SEQ ID NO: 1213557 - DNA, 25 bp, Homo sapien
ccaggtatgcagatggaggactggc

SEQ ID NO: 1213558 - DNA, 25 bp, Homo sapien
ggccaggtatgcagatggaggactg

SEQ ID NO: 1213559 - DNA, 25 bp, Homo sapien
aggccaggtatgcagatggaggact

SEQ ID NO: 1213560 - DNA, 25 bp, Homo sapien
aggtatgcagatggaggactggcct

SEQ ID NO: 1213561 - DNA, 25 bp, Homo sapien
tttttaatgtagatcgtgacccacg

SEQ ID NO: 1213562 - DNA, 25 bp, Homo sapien
tgaaaagtatgtccctcacagaagg

SEQ ID NO: 1213563 - DNA, 25 bp, Homo sapien
cggaatcatggaactggcaagggct

SEQ ID NO: 1213564 - DNA, 25 bp, Homo sapien
tcatgtcccagtgcacaaatgcgtg

SEQ ID NO: 1213565 - DNA, 25 bp, Homo sapien
atgccctccagtcccttcccaccat

SEQ ID NO: 1213566 - DNA, 25 bp, Homo sapien
gcagatgccctccagtcccttccca

SEQ ID NO: 1213567 - DNA, 25 bp, Homo sapien
ctttgcccagcagatgccctccagt

SEQ ID NO: 1213568 - DNA, 25 bp, Homo sapien
agatgccctccagtcccttcccacc

SEQ ID NO: 1213569 - DNA, 25 bp, Homo sapien
tctggagtggcccgggtattgccca

SEQ ID NO: 1213570 - DNA, 25 bp, Homo sapien
taaagacgccatgtctggagtggcc

SEQ ID NO: 1213571 - DNA, 25 bp, Homo sapien
aggaagggctaaagacgccatgtct

SEQ ID NO: 1213572 - DNA, 25 bp, Homo sapien
gagtggcccgggtattgcccaggga

SEQ ID NO: 1213573 - DNA, 25 bp, Homo sapien
tagagaccaagtaccctgataggcc

SEQ ID NO: 1213574 - DNA, 25 bp, Homo sapien
tatagttgacatcggacagggcagc

SEQ ID NO: 1213575 - DNA, 25 bp, Homo sapien
gaattccccagatatgcaggtgagg

SEQ ID NO: 1213576 - DNA, 25 bp, Homo sapien
gtacaaagatggtctcgaagcgccc

SEQ ID NO: 1213577 - DNA, 25 bp, Homo sapien
gccactgtccccgtgctcgagcagc

SEQ ID NO: 1213578 - DNA, 25 bp, Homo sapien
tccccgtgctcgagcagcttgcagt

SEQ ID NO: 1213579 - DNA, 25 bp, Homo sapien
actgtccccgtgctcgagcagcttg

SEQ ID NO: 1213580 - DNA, 25 bp, Homo sapien
tgtccccgtgctcgagcagcttgca

SEQ ID NO: 1213581 - DNA, 25 bp, Homo sapien
gagtgcagtgatgtggtctcgactc

SEQ ID NO: 1213582 - DNA, 25 bp, Homo sapien
tggagtgcagtgatgtggtctcgac

SEQ ID NO: 1213583 - DNA, 25 bp, Homo sapien
gctggagtgcagtgatgtggtctcg

SEQ ID NO: 1213584 - DNA, 25 bp, Homo sapien
ggctggagtgcagtgatgtggtctc

SEQ ID NO: 1213585 - DNA, 25 bp, Homo sapien
ctcttttgtacttgccgcagtcatt

SEQ ID NO: 1213586 - DNA, 25 bp, Homo sapien
attgaattatgcctgttattgatca

SEQ ID NO: 1213587 - DNA, 25 bp, Homo sapien
gtcattgaattatgcctgttattga

SEQ ID NO: 1213588 - DNA, 25 bp, Homo sapien
gaattatgcctgttattgatcacag

SEQ ID NO: 1213589 - DNA, 25 bp, Homo sapien
gcagcgatgctcgtcctggaagaat

SEQ ID NO: 1213590 - DNA, 25 bp, Homo sapien
tgatgaccaggattgtgacagtggc

SEQ ID NO: 1213591 - DNA, 25 bp, Homo sapien
gctgcaggtgtgctgaccatagtga

SEQ ID NO: 1213592 - DNA, 25 bp, Homo sapien
tccatttgggattgtcactgctgca

SEQ ID NO: 1213593 - DNA, 25 bp, Homo sapien
tgtcttctttcctggatactgcttt

SEQ ID NO: 1213594 - DNA, 25 bp, Homo sapien
tttcctggatactgctttcctctct

SEQ ID NO: 1213595 - DNA, 25 bp, Homo sapien
tctcattccccaagccattgcccag

SEQ ID NO: 1213596 - DNA, 25 bp, Homo sapien
ctcattccccaagccattgcccagg

SEQ ID NO: 1213597 - DNA, 25 bp, Homo sapien
tcgaaacagcgctgggaggtgacca

SEQ ID NO: 1213598 - DNA, 25 bp, Homo sapien
ctgactcgaaacagcgctgggaggt

SEQ ID NO: 1213599 - DNA, 25 bp, Homo sapien
tgactcgaaacagcgctgggaggtg

SEQ ID NO: 1213600 - DNA, 25 bp, Homo sapien
actcgaaacagcgctgggaggtgac

SEQ ID NO: 1213601 - DNA, 25 bp, Homo sapien
tcagctgggtccagccacctgtgtc

SEQ ID NO: 1213602 - DNA, 25 bp, Homo sapien
gtgtcccactgccactcagctgttt

SEQ ID NO: 1213603 - DNA, 25 bp, Homo sapien
cagctgtttcttcaggcaaggcctg

SEQ ID NO: 1213604 - DNA, 25 bp, Homo sapien
cctgggggagcttggaatgtccaca

SEQ ID NO: 1213605 - DNA, 25 bp, Homo sapien
tggagcacttcaggccgggctccat

SEQ ID NO: 1213606 - DNA, 25 bp, Homo sapien
ctggagcacttcaggccgggctcca

SEQ ID NO: 1213607 - DNA, 25 bp, Homo sapien
gctggagcacttcaggccgggctcc

SEQ ID NO: 1213608 - DNA, 25 bp, Homo sapien
tgttgtgtgttaactcctttccggc

SEQ ID NO: 1213609 - DNA, 25 bp, Homo sapien
tctctgttccttgctgatatgctcc

SEQ ID NO: 1213610 - DNA, 25 bp, Homo sapien
ggtccatgagctgatgcctccaggt

SEQ ID NO: 1213611 - DNA, 25 bp, Homo sapien
ttctcatgagtagtgccagggtggt

SEQ ID NO: 1213612 - DNA, 25 bp, Homo sapien
gatcttgcgacagcagcgtaatagc

SEQ ID NO: 1213613 - DNA, 25 bp, Homo sapien
tggatccggttctaaaagagtccca

SEQ ID NO: 1213614 - DNA, 25 bp, Homo sapien
gcgtaatagcctccgagagggtcag

SEQ ID NO: 1213615 - DNA, 25 bp, Homo sapien
ccttggcctgacgtatcagtggatc

SEQ ID NO: 1213616 - DNA, 25 bp, Homo sapien
aatgacctcagtaaccttcctctca

SEQ ID NO: 1213617 - DNA, 25 bp, Homo sapien
gacctcagtaaccttcctctcattt

SEQ ID NO: 1213618 - DNA, 25 bp, Homo sapien
gcaatgacctcagtaaccttcctct

SEQ ID NO: 1213619 - DNA, 25 bp, Homo sapien
agcaatgacctcagtaaccttcctc

SEQ ID NO: 1213620 - DNA, 25 bp, Homo sapien
aaggcaatctgttctgaggacggcg

SEQ ID NO: 1213621 - DNA, 25 bp, Homo sapien
aatctgttctgaggacggcgtgcag

SEQ ID NO: 1213622 - DNA, 25 bp, Homo sapien
cacggtgaggggcagattcagaaaa

SEQ ID NO: 1213623 - DNA, 25 bp, Homo sapien
gcaatctgttctgaggacggcgtgc

SEQ ID NO: 1213624 - DNA, 25 bp, Homo sapien
acatcaccatctccgtcggcctcag

SEQ ID NO: 1213625 - DNA, 25 bp, Homo sapien
tcacatcaccatctccgtcggcctc

SEQ ID NO: 1213626 - DNA, 25 bp, Homo sapien
caccatctccgtcggcctcaggagg

SEQ ID NO: 1213627 - DNA, 25 bp, Homo sapien
atcaccatctccgtcggcctcagga

SEQ ID NO: 1213628 - DNA, 25 bp, Homo sapien
gctgcgcagaggtgtgggaggcaca

SEQ ID NO: 1213629 - DNA, 25 bp, Homo sapien
tggagagagggtaagcaaaggagtg

SEQ ID NO: 1213630 - DNA, 25 bp, Homo sapien
gggagagagaatgaacgagctgcgc

SEQ ID NO: 1213631 - DNA, 25 bp, Homo sapien
taagcaaaggagtgagtttcctgag

SEQ ID NO: 1213632 - DNA, 25 bp, Homo sapien
agcagatcacagctccctcaactag

SEQ ID NO: 1213633 - DNA, 25 bp, Homo sapien
gcagatcacagctccctcaactagt

SEQ ID NO: 1213634 - DNA, 25 bp, Homo sapien
cagatcacagctccctcaactagtg

SEQ ID NO: 1213635 - DNA, 25 bp, Homo sapien
tgagcagatcacagctccctcaact

SEQ ID NO: 1213636 - DNA, 25 bp, Homo sapien
ccagctccccggtgttggtctccat

SEQ ID NO: 1213637 - DNA, 25 bp, Homo sapien
tgccagctccccggtgttggtctcc

SEQ ID NO: 1213638 - DNA, 25 bp, Homo sapien
gctgccagctccccggtgttggtct

SEQ ID NO: 1213639 - DNA, 25 bp, Homo sapien
ggctgccagctccccggtgttggtc

SEQ ID NO: 1213640 - DNA, 25 bp, Homo sapien
gttctttgtcctggaactggtcacc

SEQ ID NO: 1213641 - DNA, 25 bp, Homo sapien
gctttctccaaacatccgcagccag

SEQ ID NO: 1213642 - DNA, 25 bp, Homo sapien
ccagcccaggttgctcagatctgtc

SEQ ID NO: 1213643 - DNA, 25 bp, Homo sapien
gatctgtccgtgttctttgtcctgg

SEQ ID NO: 1213644 - DNA, 25 bp, Homo sapien
aagggtggcgcaggctctggctgcc

SEQ ID NO: 1213645 - DNA, 25 bp, Homo sapien
tgctggcaaagggtggcgcaggctc

SEQ ID NO: 1213646 - DNA, 25 bp, Homo sapien
tgcccagccggcgaggagccgcggg

SEQ ID NO: 1213647 - DNA, 25 bp, Homo sapien
cacaggtgggccgtctgtcctgctg

SEQ ID NO: 1213648 - DNA, 25 bp, Homo sapien
cggccgctgccttccgccgagacgc

SEQ ID NO: 1213649 - DNA, 25 bp, Homo sapien
cgtggccgaggcgtacgcggcggga

SEQ ID NO: 1213650 - DNA, 25 bp, Homo sapien
gccgccgccggggaatcgtggacac

SEQ ID NO: 1213651 - DNA, 25 bp, Homo sapien
tggccgaggcgtacgcggcgggagc

SEQ ID NO: 1213652 - DNA, 25 bp, Homo sapien
acaccgaggtcgctggcgtggccga

SEQ ID NO: 1213653 - DNA, 25 bp, Homo sapien
tcccaggataactccacgttgggga

SEQ ID NO: 1213654 - DNA, 25 bp, Homo sapien
tcctggcctttgcaagagggtccga

SEQ ID NO: 1213655 - DNA, 25 bp, Homo sapien
gctgaattccccattcgtctcctgg

SEQ ID NO: 1213656 - DNA, 25 bp, Homo sapien
tgctgaattccccattcgtctcctg

SEQ ID NO: 1213657 - DNA, 25 bp, Homo sapien
tttgcaagagggtccgaggcagtat

SEQ ID NO: 1213658 - DNA, 25 bp, Homo sapien
ggcctgccatggagccgagtttgtg

SEQ ID NO: 1213659 - DNA, 25 bp, Homo sapien
cagacccatcagtagggtgtggcct

SEQ ID NO: 1213660 - DNA, 25 bp, Homo sapien
catcagtagggtgtggcctgccatg

SEQ ID NO: 1213661 - DNA, 25 bp, Homo sapien
ctctggtccagacccatcagtaggg

SEQ ID NO: 1213662 - DNA, 25 bp, Homo sapien
caatagtttttacgattcacttctt

SEQ ID NO: 1213663 - DNA, 25 bp, Homo sapien
tcaatagtttttacgattcacttct

SEQ ID NO: 1213664 - DNA, 25 bp, Homo sapien
cccccgtgttggtggatttgtcagg

SEQ ID NO: 1213665 - DNA, 25 bp, Homo sapien
tcagcatgaagcattcccttcgcca

SEQ ID NO: 1213666 - DNA, 25 bp, Homo sapien
aggaagtaggcagcaggagaccaca

SEQ ID NO: 1213667 - DNA, 25 bp, Homo sapien
tcgccaaatgcggtagtaggagagc

SEQ ID NO: 1213668 - DNA, 25 bp, Homo sapien
caggagcacgtcacgggatcaagga

SEQ ID NO: 1213669 - DNA, 25 bp, Homo sapien
ttccttaaacttgaaggtgaagctg

SEQ ID NO: 1213670 - DNA, 25 bp, Homo sapien
gaaggcaagtcctatagtaattgaa

SEQ ID NO: 1213671 - DNA, 25 bp, Homo sapien
caaggaacgcagacttggcccaaaa

SEQ ID NO: 1213672 - DNA, 25 bp, Homo sapien
gccttctctctatttaaatggatac

SEQ ID NO: 1213673 - DNA, 25 bp, Homo sapien
ggagtaggtggaaaaatactgcact

SEQ ID NO: 1213674 - DNA, 25 bp, Homo sapien
ctctatttaaatggatactgaagcc

SEQ ID NO: 1213675 - DNA, 25 bp, Homo sapien
atggatactgaagccagaggagtag

SEQ ID NO: 1213676 - DNA, 25 bp, Homo sapien
gatataaataaccagccgttggcag

SEQ ID NO: 1213677 - DNA, 25 bp, Homo sapien
cagctgctcagggatataaataacc

SEQ ID NO: 1213678 - DNA, 25 bp, Homo sapien
ataaccagccgttggcagaagcgcc

SEQ ID NO: 1213679 - DNA, 25 bp, Homo sapien
ctcagggatataaataaccagccgt

SEQ ID NO: 1213680 - DNA, 25 bp, Homo sapien
acagtcaaagcaccgggacaccttg

SEQ ID NO: 1213681 - DNA, 25 bp, Homo sapien
caccttggtgctgttattgtaatgg

SEQ ID NO: 1213682 - DNA, 25 bp, Homo sapien
ggagagaacagtcaaagcaccggga

SEQ ID NO: 1213683 - DNA, 25 bp, Homo sapien
caccgggacaccttggtgctgttat

SEQ ID NO: 1213684 - DNA, 25 bp, Homo sapien
ttcccagaacggtgacactgtctca

SEQ ID NO: 1213685 - DNA, 25 bp, Homo sapien
tagtatcctgactccttctcccaga

SEQ ID NO: 1213686 - DNA, 25 bp, Homo sapien
actagctcttcccagaacggtgaca

SEQ ID NO: 1213687 - DNA, 25 bp, Homo sapien
agaacggtgacactgtctcaccaag

SEQ ID NO: 1213688 - DNA, 25 bp, Homo sapien
cagtttgacttggaatctgtcagcc

SEQ ID NO: 1213689 - DNA, 25 bp, Homo sapien
tttagaatcccagacatgagcttgg

SEQ ID NO: 1213690 - DNA, 25 bp, Homo sapien
atgtagacagtggtactgcagccag

SEQ ID NO: 1213691 - DNA, 25 bp, Homo sapien
tgcatatacatcagtggcagctgtg

SEQ ID NO: 1213692 - DNA, 25 bp, Homo sapien
tgtggagctcctgctgcatcaagaa

SEQ ID NO: 1213693 - DNA, 25 bp, Homo sapien
tgcatcaagaattccagggaggctg

SEQ ID NO: 1213694 - DNA, 25 bp, Homo sapien
atcaagaattccagggaggctgtca

SEQ ID NO: 1213695 - DNA, 25 bp, Homo sapien
ggagctcctgctgcatcaagaattc

SEQ ID NO: 1213696 - DNA, 25 bp, Homo sapien
cttaatcaggccacatggatcactt

SEQ ID NO: 1213697 - DNA, 25 bp, Homo sapien
taatcaggccacatggatcacttgg

SEQ ID NO: 1213698 - DNA, 25 bp, Homo sapien
aatcaggccacatggatcacttgga

SEQ ID NO: 1213699 - DNA, 25 bp, Homo sapien
ttaatcaggccacatggatcacttg

SEQ ID NO: 1213700 - DNA, 25 bp, Homo sapien
tggccacagtgaacatcaaactttc

SEQ ID NO: 1213701 - DNA, 25 bp, Homo sapien
tgggtacaccagttctcatgatctt

SEQ ID NO: 1213702 - DNA, 25 bp, Homo sapien
atcaaactttcctcatcaacttcca

SEQ ID NO: 1213703 - DNA, 25 bp, Homo sapien
gatctttacctttatgaccattcaa

SEQ ID NO: 1213704 - DNA, 25 bp, Homo sapien
gcacagcctagtgagcatggttgat

SEQ ID NO: 1213705 - DNA, 25 bp, Homo sapien
tatctctctgaaacgtctgactctg

SEQ ID NO: 1213706 - DNA, 25 bp, Homo sapien
gaccaagtctcaaggtgataatgta

SEQ ID NO: 1213707 - DNA, 25 bp, Homo sapien
gaactgcacaggacagaagttactt

SEQ ID NO: 1213708 - DNA, 25 bp, Homo sapien
gatggagagctagtggaaggtgcag

SEQ ID NO: 1213709 - DNA, 25 bp, Homo sapien
gatgtaggatggagagctagtggaa

SEQ ID NO: 1213710 - DNA, 25 bp, Homo sapien
tattactgatggtgatgtaggatgg

SEQ ID NO: 1213711 - DNA, 25 bp, Homo sapien
attattactgatggtgatgtaggat

SEQ ID NO: 1213712 - DNA, 25 bp, Homo sapien
cactgtgccgtgtgtggacagtacg

SEQ ID NO: 1213713 - DNA, 25 bp, Homo sapien
tctggagagtaccaaggctgggact

SEQ ID NO: 1213714 - DNA, 25 bp, Homo sapien
ggaaggaacctcaccagatctgaca

SEQ ID NO: 1213715 - DNA, 25 bp, Homo sapien
tctgacaccctgattgggagcacgg

SEQ ID NO: 1213716 - DNA, 25 bp, Homo sapien
acttcgccgcggcactgcagagggc

SEQ ID NO: 1213717 - DNA, 25 bp, Homo sapien
agaggcactaggtggcgccacagtg

SEQ ID NO: 1213718 - DNA, 25 bp, Homo sapien
aaaccacgattctgggatggacaag

SEQ ID NO: 1213719 - DNA, 25 bp, Homo sapien
acagtgccgggctcatcacttcgcc

SEQ ID NO: 1213720 - DNA, 25 bp, Homo sapien
tttttccttccaactatcaaggcca

SEQ ID NO: 1213721 - DNA, 25 bp, Homo sapien
aactgcccagagcctattttctcct

SEQ ID NO: 1213722 - DNA, 25 bp, Homo sapien
gaactgcccagagcctattttctcc

SEQ ID NO: 1213723 - DNA, 25 bp, Homo sapien
ctgcccagagcctattttctccttt

SEQ ID NO: 1213724 - DNA, 25 bp, Homo sapien
tgaggcacttgagatggtggagcgc

SEQ ID NO: 1213725 - DNA, 25 bp, Homo sapien
ttgaggcacttgagatggtggagcg

SEQ ID NO: 1213726 - DNA, 25 bp, Homo sapien
ccccagtcgtggggatgaagagact

SEQ ID NO: 1213727 - DNA, 25 bp, Homo sapien
gagactggctgccatggcacactga

SEQ ID NO: 1213728 - DNA, 25 bp, Homo sapien
tgaagagactggctgccatggcaca

SEQ ID NO: 1213729 - DNA, 25 bp, Homo sapien
cccctggccccagtcgtggggatga

SEQ ID NO: 1213730 - DNA, 25 bp, Homo sapien
acggaactctgtgacccggtgcaga

SEQ ID NO: 1213731 - DNA, 25 bp, Homo sapien
gaagccagaaatagacacggaactc

SEQ ID NO: 1213732 - DNA, 25 bp, Homo sapien
ccataattggacttcttgttggaaa

SEQ ID NO: 1213733 - DNA, 25 bp, Homo sapien
tgtgacccggtgcagatggaacact

SEQ ID NO: 1213734 - DNA, 25 bp, Homo sapien
ccatagactgtgactttagggagca

SEQ ID NO: 1213735 - DNA, 25 bp, Homo sapien
cgggcttgcctggagagtgataact

SEQ ID NO: 1213736 - DNA, 25 bp, Homo sapien
gactcaggcctcagtcgtggctgga

SEQ ID NO: 1213737 - DNA, 25 bp, Homo sapien
caggaggaagtaccctgaagcccca

SEQ ID NO: 1213738 - DNA, 25 bp, Homo sapien
cgccagccgccgcattagggcagag

SEQ ID NO: 1213739 - DNA, 25 bp, Homo sapien
gggcagagaccagcccgtgcgcgtc

SEQ ID NO: 1213740 - DNA, 25 bp, Homo sapien
gcgcccccgacaccctgcgtgcgcg

SEQ ID NO: 1213741 - DNA, 25 bp, Homo sapien
tgggcgctgtccgagctgtccgctg

SEQ ID NO: 1213742 - DNA, 25 bp, Homo sapien
tggtcttgaagatctcagggtgcct

SEQ ID NO: 1213743 - DNA, 25 bp, Homo sapien
tccatggtcttgaagatctcagggt

SEQ ID NO: 1213744 - DNA, 25 bp, Homo sapien
tcttgaagatctcagggtgcctctg

SEQ ID NO: 1213745 - DNA, 25 bp, Homo sapien
catggtcttgaagatctcagggtgc

SEQ ID NO: 1213746 - DNA, 25 bp, Homo sapien
tgagctaccattccggatagcatca

SEQ ID NO: 1213747 - DNA, 25 bp, Homo sapien
ggtcagccctgagctaccattccgg

SEQ ID NO: 1213748 - DNA, 25 bp, Homo sapien
taccattccggatagcatcagccaa

SEQ ID NO: 1213749 - DNA, 25 bp, Homo sapien
attccggatagcatcagccaagccc

SEQ ID NO: 1213750 - DNA, 25 bp, Homo sapien
ccctctagcccttcaagctggggat

SEQ ID NO: 1213751 - DNA, 25 bp, Homo sapien
gctggggatctgacaacaccttgaa

SEQ ID NO: 1213752 - DNA, 25 bp, Homo sapien
gatctgacaacaccttgaacctcat

SEQ ID NO: 1213753 - DNA, 25 bp, Homo sapien
tagcccttcaagctggggatctgac

SEQ ID NO: 1213754 - DNA, 25 bp, Homo sapien
cagccagtggtgatgcaagaagaca

SEQ ID NO: 1213755 - DNA, 25 bp, Homo sapien
ggccaccaagtcccgtggctgttga

SEQ ID NO: 1213756 - DNA, 25 bp, Homo sapien
cagtggtgatgcaagaagacaatgg

SEQ ID NO: 1213757 - DNA, 25 bp, Homo sapien
cccgtggctgttgagaccagggctt

SEQ ID NO: 1213758 - DNA, 25 bp, Homo sapien
ccagatgaggcaagcccaggaggct

SEQ ID NO: 1213759 - DNA, 25 bp, Homo sapien
caagcccaggaggctggtgagagct

SEQ ID NO: 1213760 - DNA, 25 bp, Homo sapien
cccaggaggctggtgagagctccat

SEQ ID NO: 1213761 - DNA, 25 bp, Homo sapien
gcccaggaggctggtgagagctcca

SEQ ID NO: 1213762 - DNA, 25 bp, Homo sapien
acagaaaagtagtgatggttacaca

SEQ ID NO: 1213763 - DNA, 25 bp, Homo sapien
ttctgtctggggtgaaaacgttctg

SEQ ID NO: 1213764 - DNA, 25 bp, Homo sapien
tgcgcctggctggttacagagtttc

SEQ ID NO: 1213765 - DNA, 25 bp, Homo sapien
cgttctggaaacagaaaagtagtga

SEQ ID NO: 1213766 - DNA, 25 bp, Homo sapien
cgctgggtctccctcatgcataatg

SEQ ID NO: 1213767 - DNA, 25 bp, Homo sapien
ggaagagttgtgtggcccatgacac

SEQ ID NO: 1213768 - DNA, 25 bp, Homo sapien
gctgggtctccctcatgcataatgg

SEQ ID NO: 1213769 - DNA, 25 bp, Homo sapien
gggtctccctcatgcataatggaag

SEQ ID NO: 1213770 - DNA, 25 bp, Homo sapien
ccctccctcggccggcttgctcact

SEQ ID NO: 1213771 - DNA, 25 bp, Homo sapien
ctccctcggccggcttgctcactcg

SEQ ID NO: 1213772 - DNA, 25 bp, Homo sapien
ccctcggccggcttgctcactcgct

SEQ ID NO: 1213773 - DNA, 25 bp, Homo sapien
tccctcggccggcttgctcactcgc

SEQ ID NO: 1213774 - DNA, 25 bp, Homo sapien
tcccagctggcagacttaggcctga

SEQ ID NO: 1213775 - DNA, 25 bp, Homo sapien
gagcaaaatcccagcaagatccttc

SEQ ID NO: 1213776 - DNA, 25 bp, Homo sapien
agctaggcatttcttaggccccagg

SEQ ID NO: 1213777 - DNA, 25 bp, Homo sapien
ccagccctccgtggcataaacaggg

SEQ ID NO: 1213778 - DNA, 25 bp, Homo sapien
tagtcactgctccttcagaccgtgg

SEQ ID NO: 1213779 - DNA, 25 bp, Homo sapien
gtcactgctccttcagaccgtggga

SEQ ID NO: 1213780 - DNA, 25 bp, Homo sapien
aaaatagtcactgctccttcagacc

SEQ ID NO: 1213781 - DNA, 25 bp, Homo sapien
ctaaaaatagtcactgctccttcag

SEQ ID NO: 1213782 - DNA, 25 bp, Homo sapien
aatgacaatgttacaacagagccag

SEQ ID NO: 1213783 - DNA, 25 bp, Homo sapien
ttgagttgaccacacacaagcctgc

SEQ ID NO: 1213784 - DNA, 25 bp, Homo sapien
cccaactctatgatgaaggccctca

SEQ ID NO: 1213785 - DNA, 25 bp, Homo sapien
tgtccaaggatgactcagcctgccc

SEQ ID NO: 1213786 - DNA, 25 bp, Homo sapien
cagaagcctggcgtacaccagaaga

SEQ ID NO: 1213787 - DNA, 25 bp, Homo sapien
tggaatttagcatgtggtcttgcac

SEQ ID NO: 1213788 - DNA, 25 bp, Homo sapien
gaagaactggaatttagcatgtggt

SEQ ID NO: 1213789 - DNA, 25 bp, Homo sapien
cagaagacgatgctcacctccagag

SEQ ID NO: 1213790 - DNA, 25 bp, Homo sapien
atcttctcctacaaagaacccacag

SEQ ID NO: 1213791 - DNA, 25 bp, Homo sapien
tctcctacaaagaacccacagcagg

SEQ ID NO: 1213792 - DNA, 25 bp, Homo sapien
ctacaaagaacccacagcaggggac

SEQ ID NO: 1213793 - DNA, 25 bp, Homo sapien
ttctcctacaaagaacccacagcag

SEQ ID NO: 1213794 - DNA, 25 bp, Homo sapien
ggctggtatctaccgttggcttctg

SEQ ID NO: 1213795 - DNA, 25 bp, Homo sapien
acagggtggctggtatctaccgttg

SEQ ID NO: 1213796 - DNA, 25 bp, Homo sapien
tgtgcttagggccattaccatgtca

SEQ ID NO: 1213797 - DNA, 25 bp, Homo sapien
taataacatcctgtcttggttggag

SEQ ID NO: 1213798 - DNA, 25 bp, Homo sapien
cctggttaaacaaaggactgcaagc

SEQ ID NO: 1213799 - DNA, 25 bp, Homo sapien
ctctggcctgctaggttcctggtta

SEQ ID NO: 1213800 - DNA, 25 bp, Homo sapien
gttcctggttaaacaaaggactgca

SEQ ID NO: 1213801 - DNA, 25 bp, Homo sapien
gcctgctaggttcctggttaaacaa

SEQ ID NO: 1213802 - DNA, 25 bp, Homo sapien
ctgcttcacttttcctgttaacctg

SEQ ID NO: 1213803 - DNA, 25 bp, Homo sapien
ctatcaccaaaagggtaatttctga

SEQ ID NO: 1213804 - DNA, 25 bp, Homo sapien
ttcctgttaacctgcgtaatgaagc

SEQ ID NO: 1213805 - DNA, 25 bp, Homo sapien
gcgtaatgaagcacttgtactatca

SEQ ID NO: 1213806 - DNA, 25 bp, Homo sapien
tggccttcccggactgtttctggga

SEQ ID NO: 1213807 - DNA, 25 bp, Homo sapien
cagtacattggccttcccggactgt

SEQ ID NO: 1213808 - DNA, 25 bp, Homo sapien
ctgggatctgggatctctgagaagc

SEQ ID NO: 1213809 - DNA, 25 bp, Homo sapien
gatctgggatctctgagaagcctcc

SEQ ID NO: 1213810 - DNA, 25 bp, Homo sapien
aggttttcacatagtgccgtctgga

SEQ ID NO: 1213811 - DNA, 25 bp, Homo sapien
cgtctggatccctcaatcacatggg

SEQ ID NO: 1213812 - DNA, 25 bp, Homo sapien
cagcatgagcacatgtgcagccaac

SEQ ID NO: 1213813 - DNA, 25 bp, Homo sapien
tgagcacatgtgcagccaacacaac

SEQ ID NO: 1213814 - DNA, 25 bp, Homo sapien
aacaagtcaccaaaacagaacctgc

SEQ ID NO: 1213815 - DNA, 25 bp, Homo sapien
tcttgggtaagtgccttgtttattc

SEQ ID NO: 1213816 - DNA, 25 bp, Homo sapien
tcacgcatccgtctgcctgcctttg

SEQ ID NO: 1213817 - DNA, 25 bp, Homo sapien
ttctctccattaccgcgggtgagct

SEQ ID NO: 1213818 - DNA, 25 bp, Homo sapien
cctgcagggctataagaaactacca

SEQ ID NO: 1213819 - DNA, 25 bp, Homo sapien
caaactgccacatttcccaatatgt

SEQ ID NO: 1213820 - DNA, 25 bp, Homo sapien
caggccagatggtttctctagagaa

SEQ ID NO: 1213821 - DNA, 25 bp, Homo sapien
tgaatgagggatgccactgtagccc

SEQ ID NO: 1213822 - DNA, 25 bp, Homo sapien
actccagcgtcccaaattgcacata

SEQ ID NO: 1213823 - DNA, 25 bp, Homo sapien
gcgtcccaaattgcacataagtcaa

SEQ ID NO: 1213824 - DNA, 25 bp, Homo sapien
cccaaattgcacataagtcaatcaa

SEQ ID NO: 1213825 - DNA, 25 bp, Homo sapien
tccagcgtcccaaattgcacataag

SEQ ID NO: 1213826 - DNA, 25 bp, Homo sapien
agcctcttccttgcaacaccagagg

SEQ ID NO: 1213827 - DNA, 25 bp, Homo sapien
ctcattcagcctcttccttgcaaca

SEQ ID NO: 1213828 - DNA, 25 bp, Homo sapien
ctcttccttgcaacaccagaggagg

SEQ ID NO: 1213829 - DNA, 25 bp, Homo sapien
cttccttgcaacaccagaggaggct

SEQ ID NO: 1213830 - DNA, 25 bp, Homo sapien
caccccacactctttcaacaagacc

SEQ ID NO: 1213831 - DNA, 25 bp, Homo sapien
cagacaccccacactctttcaacaa

SEQ ID NO: 1213832 - DNA, 25 bp, Homo sapien
gacaccccacactctttcaacaaga

SEQ ID NO: 1213833 - DNA, 25 bp, Homo sapien
agacaccccacactctttcaacaag

SEQ ID NO: 1213834 - DNA, 25 bp, Homo sapien
gagctgtcgccatcgggagctcctc

SEQ ID NO: 1213835 - DNA, 25 bp, Homo sapien
gggcccgtggtgttgattccacaag

SEQ ID NO: 1213836 - DNA, 25 bp, Homo sapien
gatggatgagatcccgtggctccca

SEQ ID NO: 1213837 - DNA, 25 bp, Homo sapien
gctgtaataatgacgcatccatggt

SEQ ID NO: 1213838 - DNA, 25 bp, Homo sapien
aagggatgagggaagcattctgtcc

SEQ ID NO: 1213839 - DNA, 25 bp, Homo sapien
aaagggatgagggaagcattctgtc

SEQ ID NO: 1213840 - DNA, 25 bp, Homo sapien
tcaaagggatgagggaagcattctg

SEQ ID NO: 1213841 - DNA, 25 bp, Homo sapien
gggatgagggaagcattctgtccac

SEQ ID NO: 1213842 - DNA, 25 bp, Homo sapien
atccgggctccacgaccaccatgtt

SEQ ID NO: 1213843 - DNA, 25 bp, Homo sapien
gggctccacgaccaccatgtttggt

SEQ ID NO: 1213844 - DNA, 25 bp, Homo sapien
cgggctccacgaccaccatgtttgg

SEQ ID NO: 1213845 - DNA, 25 bp, Homo sapien
agggatggctcccatccgggctcca

SEQ ID NO: 1213846 - DNA, 25 bp, Homo sapien
ggtcttgtcacctcgagccgcttta

SEQ ID NO: 1213847 - DNA, 25 bp, Homo sapien
tgctccccagcactcggggtcttgt

SEQ ID NO: 1213848 - DNA, 25 bp, Homo sapien
acctcgagccgctttaactgggcct

SEQ ID NO: 1213849 - DNA, 25 bp, Homo sapien
ctttaactgggcctcctggacagca

SEQ ID NO: 1213850 - DNA, 25 bp, Homo sapien
aggctgcatggacccagggcggcgg

SEQ ID NO: 1213851 - DNA, 25 bp, Homo sapien
ggaaggctgcatggacccagggcgg

SEQ ID NO: 1213852 - DNA, 25 bp, Homo sapien
aaggctgcatggacccagggcggcg

SEQ ID NO: 1213853 - DNA, 25 bp, Homo sapien
gctgcatggacccagggcggcggtg

SEQ ID NO: 1213854 - DNA, 25 bp, Homo sapien
cataggaatttcgatggctccgcca

SEQ ID NO: 1213855 - DNA, 25 bp, Homo sapien
taggaatttcgatggctccgccaag

SEQ ID NO: 1213856 - DNA, 25 bp, Homo sapien
tccataggaatttcgatggctccgc

SEQ ID NO: 1213857 - DNA, 25 bp, Homo sapien
gatccataggaatttcgatggctcc

SEQ ID NO: 1213858 - DNA, 25 bp, Homo sapien
caaagataattctgctcccagccct

SEQ ID NO: 1213859 - DNA, 25 bp, Homo sapien
gactgctttcatgggcaagtcaaga

SEQ ID NO: 1213860 - DNA, 25 bp, Homo sapien
cccgaagggtgtggatttgaatata

SEQ ID NO: 1213861 - DNA, 25 bp, Homo sapien
gcctggttctcccatgcggcatgat

SEQ ID NO: 1213862 - DNA, 25 bp, Homo sapien
gattctgatggtcaaataatgcccc

SEQ ID NO: 1213863 - DNA, 25 bp, Homo sapien
ttctgatggtcaaataatgccccct

SEQ ID NO: 1213864 - DNA, 25 bp, Homo sapien
tttatgattctgatggtcaaataat

SEQ ID NO: 1213865 - DNA, 25 bp, Homo sapien
atgattctgatggtcaaataatgcc

SEQ ID NO: 1213866 - DNA, 25 bp, Homo sapien
ttgcagggacccctcacccactggc

SEQ ID NO: 1213867 - DNA, 25 bp, Homo sapien
tgcagggacccctcacccactggcc

SEQ ID NO: 1213868 - DNA, 25 bp, Homo sapien
cttgcagggacccctcacccactgg

SEQ ID NO: 1213869 - DNA, 25 bp, Homo sapien
tgagtttccgcgaacacaacgtggg

SEQ ID NO: 1213870 - DNA, 25 bp, Homo sapien
tgctgtgtgactctaagctagcaaa

SEQ ID NO: 1213871 - DNA, 25 bp, Homo sapien
taagctagcaaaggcttgagtttcc

SEQ ID NO: 1213872 - DNA, 25 bp, Homo sapien
aaaggcttgagtttccgcgaacaca

SEQ ID NO: 1213873 - DNA, 25 bp, Homo sapien
ctgcgattccagtggtttctttttt

SEQ ID NO: 1213874 - DNA, 25 bp, Homo sapien
tgcgattccagtggtttcttttttg

SEQ ID NO: 1213875 - DNA, 25 bp, Homo sapien
ccctgtcatcttcggtggccactgg

SEQ ID NO: 1213876 - DNA, 25 bp, Homo sapien
cactgggaaagtgtgttcagtttct

SEQ ID NO: 1213877 - DNA, 25 bp, Homo sapien
ctttttggacacgttgccagggcca

SEQ ID NO: 1213878 - DNA, 25 bp, Homo sapien
cctcggccatagagtgccaggacct

SEQ ID NO: 1213879 - DNA, 25 bp, Homo sapien
aaatgccaatgccctcgccgtacat

SEQ ID NO: 1213880 - DNA, 25 bp, Homo sapien
agaaatgccaatgccctcgccgtac

SEQ ID NO: 1213881 - DNA, 25 bp, Homo sapien
atgccaatgccctcgccgtacatga

SEQ ID NO: 1213882 - DNA, 25 bp, Homo sapien
cagaaatgccaatgccctcgccgta

SEQ ID NO: 1213883 - DNA, 25 bp, Homo sapien
cttgtggggtagcatgccccgtggg

SEQ ID NO: 1213884 - DNA, 25 bp, Homo sapien
gtcttgtggggtagcatgccccgtg

SEQ ID NO: 1213885 - DNA, 25 bp, Homo sapien
catgaggcggtccagggcggctggc

SEQ ID NO: 1213886 - DNA, 25 bp, Homo sapien
ttggtcttgtggggtagcatgcccc

SEQ ID NO: 1213887 - DNA, 25 bp, Homo sapien
caggggcggtgggatcccatcacac

SEQ ID NO: 1213888 - DNA, 25 bp, Homo sapien
agcagggatcaccatctgcttgttt

SEQ ID NO: 1213889 - DNA, 25 bp, Homo sapien
cagggatcaccatctgcttgtttgt

SEQ ID NO: 1213890 - DNA, 25 bp, Homo sapien
gggatcaccatctgcttgtttgtgt

SEQ ID NO: 1213891 - DNA, 25 bp, Homo sapien
ggtacttccagtcaaccttatgaga

SEQ ID NO: 1213892 - DNA, 25 bp, Homo sapien
tcaaccttatgagacaggtgcccca

SEQ ID NO: 1213893 - DNA, 25 bp, Homo sapien
ggacccctgtgaacttgcaattttc

SEQ ID NO: 1213894 - DNA, 25 bp, Homo sapien
tctttatgggctcagaccagaagcc

SEQ ID NO: 1213895 - DNA, 25 bp, Homo sapien
tgagatgtggcgaggattctggggg

SEQ ID NO: 1213896 - DNA, 25 bp, Homo sapien
gagatgtggcgaggattctgggggc

SEQ ID NO: 1213897 - DNA, 25 bp, Homo sapien
cggacccagtgagtgccttatggag

SEQ ID NO: 1213898 - DNA, 25 bp, Homo sapien
gggaacggacccagtgagtgcctta

SEQ ID NO: 1213899 - DNA, 25 bp, Homo sapien
gaacggacccagtgagtgccttatg

SEQ ID NO: 1213900 - DNA, 25 bp, Homo sapien
gacccagtgagtgccttatggagaa

SEQ ID NO: 1213901 - DNA, 25 bp, Homo sapien
cagtaagatacctcactacagggct

SEQ ID NO: 1213902 - DNA, 25 bp, Homo sapien
gaaacagctgtggtgcacatgagct

SEQ ID NO: 1213903 - DNA, 25 bp, Homo sapien
cacatgagcttcgatccaatgaccc

SEQ ID NO: 1213904 - DNA, 25 bp, Homo sapien
aagagaatgctgcaggcaagcctcc

SEQ ID NO: 1213905 - DNA, 25 bp, Homo sapien
ggcagggttcccttttgcttcacac

SEQ ID NO: 1213906 - DNA, 25 bp, Homo sapien
gggtccacgatgtgatccttcgctg

SEQ ID NO: 1213907 - DNA, 25 bp, Homo sapien
ttttgcttcacactcaatcaggatg

SEQ ID NO: 1213908 - DNA, 25 bp, Homo sapien
cttggtgatggttggcggctgcgtc

SEQ ID NO: 1213909 - DNA, 25 bp, Homo sapien
tagacacctgcaggcggatcctatt

SEQ ID NO: 1213910 - DNA, 25 bp, Homo sapien
tgcggaagtcaatcaccagggtccc

SEQ ID NO: 1213911 - DNA, 25 bp, Homo sapien
tctgctgtttcgtgtccagtggaag

SEQ ID NO: 1213912 - DNA, 25 bp, Homo sapien
gccaaatttgttgcgggcgaagcac

SEQ ID NO: 1213913 - DNA, 25 bp, Homo sapien
caaagaggataaagtgagggtgatg

SEQ ID NO: 1213914 - DNA, 25 bp, Homo sapien
cacgacagggtctaggttttccttg

SEQ ID NO: 1213915 - DNA, 25 bp, Homo sapien
catccagaagatgaccggggatgga

SEQ ID NO: 1213916 - DNA, 25 bp, Homo sapien
gcgccctcttggaccacgacagggt

SEQ ID NO: 1213917 - DNA, 25 bp, Homo sapien
ttgcactggagcgtcaaaggagcgc

SEQ ID NO: 1213918 - DNA, 25 bp, Homo sapien
actgtagtcggtctgcatgtcctgc

SEQ ID NO: 1213919 - DNA, 25 bp, Homo sapien
tggaagcgggcgttacaactgtagt

SEQ ID NO: 1213920 - DNA, 25 bp, Homo sapien
gcatcacgttggagaagtataggtc

SEQ ID NO: 1213921 - DNA, 25 bp, Homo sapien
cgttatggccctgagagacacgttt

SEQ ID NO: 1213922 - DNA, 25 bp, Homo sapien
catgtcagggtggtttcttaaggac

SEQ ID NO: 1213923 - DNA, 25 bp, Homo sapien
actgtacatgtcagggtggtttctt

SEQ ID NO: 1213924 - DNA, 25 bp, Homo sapien
taaggacgagtcattataagggtgg

SEQ ID NO: 1213925 - DNA, 25 bp, Homo sapien
gtggtttcttaaggacgagtcatta

SEQ ID NO: 1213926 - DNA, 25 bp, Homo sapien
tagaacaaggcccattccataccag

SEQ ID NO: 1213927 - DNA, 25 bp, Homo sapien
gggctctggggctcttaacacaata

SEQ ID NO: 1213928 - DNA, 25 bp, Homo sapien
tctggggctcttaacacaatagtag

SEQ ID NO: 1213929 - DNA, 25 bp, Homo sapien
acacaatagtagttggccccattat

SEQ ID NO: 1213930 - DNA, 25 bp, Homo sapien
tgttgtcaggttggtgaatccgtca

SEQ ID NO: 1213931 - DNA, 25 bp, Homo sapien
ggtcccagctaagtcgtcatactcc

SEQ ID NO: 1213932 - DNA, 25 bp, Homo sapien
tcacggaatcaccaaaacaaccaag

SEQ ID NO: 1213933 - DNA, 25 bp, Homo sapien
aatccgtcaagagctgggaaccctg

SEQ ID NO: 1213934 - DNA, 25 bp, Homo sapien
ggctgtctgagcagtgcgagatcta

SEQ ID NO: 1213935 - DNA, 25 bp, Homo sapien
gaggagctctaggttctgaaaggat

SEQ ID NO: 1213936 - DNA, 25 bp, Homo sapien
tcaggttcagggaatctccccttcc

SEQ ID NO: 1213937 - DNA, 25 bp, Homo sapien
gagatctactccagagcagcttgtg

SEQ ID NO: 1213938 - DNA, 25 bp, Homo sapien
gaagcaccatctggctgctcgcggt

SEQ ID NO: 1213939 - DNA, 25 bp, Homo sapien
ccggaggcgatgcattccagcagga

SEQ ID NO: 1213940 - DNA, 25 bp, Homo sapien
agcaggaggtccatgccacgaagca

SEQ ID NO: 1213941 - DNA, 25 bp, Homo sapien
gatacatgaagcttggtgttctttc

SEQ ID NO: 1213942 - DNA, 25 bp, Homo sapien
ttttgctgtgctactggtatgcact

SEQ ID NO: 1213943 - DNA, 25 bp, Homo sapien
cactaaatgtggcattaacaagagc

SEQ ID NO: 1213944 - DNA, 25 bp, Homo sapien
ctactggtatgcactaaatgtggca

SEQ ID NO: 1213945 - DNA, 25 bp, Homo sapien
cattaacaagagcatgaacaagctc

SEQ ID NO: 1213946 - DNA, 25 bp, Homo sapien
cagagacatttgtgatacgcagggc

SEQ ID NO: 1213947 - DNA, 25 bp, Homo sapien
caggcagaaatactccccggagtct

SEQ ID NO: 1213948 - DNA, 25 bp, Homo sapien
tacgcagggccttattaaagttctc

SEQ ID NO: 1213949 - DNA, 25 bp, Homo sapien
caaacttggccttatcagatgggag

SEQ ID NO: 1213950 - DNA, 25 bp, Homo sapien
gggacccatgacgacacgtgctctg

SEQ ID NO: 1213951 - DNA, 25 bp, Homo sapien
caatcactcgggtgggccctctttg

SEQ ID NO: 1213952 - DNA, 25 bp, Homo sapien
gtgcctgcaatcactcgggtgggcc

SEQ ID NO: 1213953 - DNA, 25 bp, Homo sapien
tgacgacacgtgctctggtgcctgc

SEQ ID NO: 1213954 - DNA, 25 bp, Homo sapien
attgcaaaggttccccattcaccat

SEQ ID NO: 1213955 - DNA, 25 bp, Homo sapien
cttgggttcgtccagccagtaggga

SEQ ID NO: 1213956 - DNA, 25 bp, Homo sapien
ggtttccattggctcgacacaccag

SEQ ID NO: 1213957 - DNA, 25 bp, Homo sapien
caggagccagaataaggttcttggg

SEQ ID NO: 1213958 - DNA, 25 bp, Homo sapien
ccatgctcgttggaggtgttgcact

SEQ ID NO: 1213959 - DNA, 25 bp, Homo sapien
tgctgatctgggtgtcccggaagat

SEQ ID NO: 1213960 - DNA, 25 bp, Homo sapien
gcaggtagccatgctcgttggaggt

SEQ ID NO: 1213961 - DNA, 25 bp, Homo sapien
ctgctgctgatctgggtgtcccgga

SEQ ID NO: 1213962 - DNA, 25 bp, Homo sapien
atcactcgaatgagctggttccggg

SEQ ID NO: 1213963 - DNA, 25 bp, Homo sapien
gccgcgtccggttgtaaagaatcac

SEQ ID NO: 1213964 - DNA, 25 bp, Homo sapien
aagggcagtccagccgcgtccggtt

SEQ ID NO: 1213965 - DNA, 25 bp, Homo sapien
gagacccaaagaaagggcagtccag

SEQ ID NO: 1213966 - DNA, 25 bp, Homo sapien
aacagagcagcagaacacacagcat

SEQ ID NO: 1213967 - DNA, 25 bp, Homo sapien
ctcacaacagagcagcagaacacac

SEQ ID NO: 1213968 - DNA, 25 bp, Homo sapien
acaacagagcagcagaacacacagc

SEQ ID NO: 1213969 - DNA, 25 bp, Homo sapien
acagagcagcagaacacacagcatc

SEQ ID NO: 1213970 - DNA, 25 bp, Homo sapien
ctggtcctctttgcggatcatctta

SEQ ID NO: 1213971 - DNA, 25 bp, Homo sapien
taaacatggtagttgccaccatcca

SEQ ID NO: 1213972 - DNA, 25 bp, Homo sapien
cagactgccgttctcataaacatgg

SEQ ID NO: 1213973 - DNA, 25 bp, Homo sapien
gacctccaggcggacttggttttca

SEQ ID NO: 1213974 - DNA, 25 bp, Homo sapien
gaggggtcgtgcttcacccgacact

SEQ ID NO: 1213975 - DNA, 25 bp, Homo sapien
ctcgggcatccggtagatcctggtg

SEQ ID NO: 1213976 - DNA, 25 bp, Homo sapien
gccaggagacggtgagtttcaggga

SEQ ID NO: 1213977 - DNA, 25 bp, Homo sapien
tgtttccaatatagagcggctcgtc

SEQ ID NO: 1213978 - DNA, 25 bp, Homo sapien
tcttggtctagctcggtgctggcga

SEQ ID NO: 1213979 - DNA, 25 bp, Homo sapien
ggcgacacacgtgtaactgccctgg

SEQ ID NO: 1213980 - DNA, 25 bp, Homo sapien
tagcacggtgaggtaggccttggcc

SEQ ID NO: 1213981 - DNA, 25 bp, Homo sapien
cccaaagatggtcagggagtcgtct

SEQ ID NO: 1213982 - DNA, 25 bp, Homo sapien
agtgccagggtgagcatgggcagtt

SEQ ID NO: 1213983 - DNA, 25 bp, Homo sapien
tgccagggtgagcatgggcagttac

SEQ ID NO: 1213984 - DNA, 25 bp, Homo sapien
gtgccagggtgagcatgggcagtta

SEQ ID NO: 1213985 - DNA, 25 bp, Homo sapien
tcggaactgccccgggccactgctt

SEQ ID NO: 1213986 - DNA, 25 bp, Homo sapien
ctcggaactgccccgggccactgct

SEQ ID NO: 1213987 - DNA, 25 bp, Homo sapien
cctcggaactgccccgggccactgc

SEQ ID NO: 1213988 - DNA, 25 bp, Homo sapien
ggcaagaagagatcaccacgcctga

SEQ ID NO: 1213989 - DNA, 25 bp, Homo sapien
taaaatgatcacaacgagaaacccc

SEQ ID NO: 1213990 - DNA, 25 bp, Homo sapien
gaggtaacctgtccagcacagcttg

SEQ ID NO: 1213991 - DNA, 25 bp, Homo sapien
actcaggcccctttcagttgagacg

SEQ ID NO: 1213992 - DNA, 25 bp, Homo sapien
tgcaaaggtaagacgggttatccag

SEQ ID NO: 1213993 - DNA, 25 bp, Homo sapien
ctgcaaaggtaagacgggttatcca

SEQ ID NO: 1213994 - DNA, 25 bp, Homo sapien
cagccaaacggttagttggagtggc

SEQ ID NO: 1213995 - DNA, 25 bp, Homo sapien
acggttagttggagtggcctgatca

SEQ ID NO: 1213996 - DNA, 25 bp, Homo sapien
ggcagggcagccaaacggttagttg

SEQ ID NO: 1213997 - DNA, 25 bp, Homo sapien
caaacggttagttggagtggcctga

SEQ ID NO: 1213998 - DNA, 25 bp, Homo sapien
cgcacgctcctctcggccaggtcgg

SEQ ID NO: 1213999 - DNA, 25 bp, Homo sapien
tagcatccccggggatccaggtcag

SEQ ID NO: 1214000 - DNA, 25 bp, Homo sapien
ccaggtcagccgcacgctcctctcg

SEQ ID NO: 1214001 - DNA, 25 bp, Homo sapien
tgtgatggggctgttgttagcatcc

SEQ ID NO: 1214002 - DNA, 25 bp, Homo sapien
ggtcttcttcaaactggacgacgta

SEQ ID NO: 1214003 - DNA, 25 bp, Homo sapien
tgatggcaatgacacggaactggta

SEQ ID NO: 1214004 - DNA, 25 bp, Homo sapien
tgctccactggttcggtagcgctcg

SEQ ID NO: 1214005 - DNA, 25 bp, Homo sapien
ggtggctgctcccaacctcgttgat

SEQ ID NO: 1214006 - DNA, 25 bp, Homo sapien
atgttgttctttctggtcccctctc

SEQ ID NO: 1214007 - DNA, 25 bp, Homo sapien
tcacgtcaccaggattggactcggg

SEQ ID NO: 1214008 - DNA, 25 bp, Homo sapien
cgtccacgtgatctccatgttgttc

SEQ ID NO: 1214009 - DNA, 25 bp, Homo sapien
tctcccttcacgtcaccaggattgg

SEQ ID NO: 1214010 - DNA, 25 bp, Homo sapien
acttgacaatgtagcgcaggttggg

SEQ ID NO: 1214011 - DNA, 25 bp, Homo sapien
ggccaaaggccgaggtggcattcat

SEQ ID NO: 1214012 - DNA, 25 bp, Homo sapien
tcagcctggactcggatctcatagg

SEQ ID NO: 1214013 - DNA, 25 bp, Homo sapien
taaccgatgacggactctggctcag

SEQ ID NO: 1214014 - DNA, 25 bp, Homo sapien
atctcccttgtgagtccaatccata

SEQ ID NO: 1214015 - DNA, 25 bp, Homo sapien
gagtgggatggacagaggacctgct

SEQ ID NO: 1214016 - DNA, 25 bp, Homo sapien
ttgtgagtccaatccataatcacct

SEQ ID NO: 1214017 - DNA, 25 bp, Homo sapien
cccttgtgagtccaatccataatca

SEQ ID NO: 1214018 - DNA, 25 bp, Homo sapien
catccagtggtcccatcgggctcct

SEQ ID NO: 1214019 - DNA, 25 bp, Homo sapien
atccagtggtcccatcgggctcctg

SEQ ID NO: 1214020 - DNA, 25 bp, Homo sapien
tccagtggtcccatcgggctcctgt

SEQ ID NO: 1214021 - DNA, 25 bp, Homo sapien
ctttaacttcagtgggcgcagccct

SEQ ID NO: 1214022 - DNA, 25 bp, Homo sapien
ccgtgtcggagtagacgcggttcca

SEQ ID NO: 1214023 - DNA, 25 bp, Homo sapien
cgcggttccactgaaggctgatggc

SEQ ID NO: 1214024 - DNA, 25 bp, Homo sapien
ggctgtgctgttcatgactcggact

SEQ ID NO: 1214025 - DNA, 25 bp, Homo sapien
taggtgagtccggagctggcttcct

SEQ ID NO: 1214026 - DNA, 25 bp, Homo sapien
tacccctggccctggttagtgagct

SEQ ID NO: 1214027 - DNA, 25 bp, Homo sapien
tatagcccgcatttgctacccctgg

SEQ ID NO: 1214028 - DNA, 25 bp, Homo sapien
tggattcaataaacaacgctagggt

SEQ ID NO: 1214029 - DNA, 25 bp, Homo sapien
ggcagggctgggttagttgttagtg

SEQ ID NO: 1214030 - DNA, 25 bp, Homo sapien
gcagggctgggttagttgttagtgg

SEQ ID NO: 1214031 - DNA, 25 bp, Homo sapien
cagggctgggttagttgttagtggt

SEQ ID NO: 1214032 - DNA, 25 bp, Homo sapien
agggctgggttagttgttagtggtg

SEQ ID NO: 1214033 - DNA, 25 bp, Homo sapien
cacaaccatctccagcttgtagtta

SEQ ID NO: 1214034 - DNA, 25 bp, Homo sapien
ggacaccacgccacggaggcggtca

SEQ ID NO: 1214035 - DNA, 25 bp, Homo sapien
cttggtctcactgcgaggcccatca

SEQ ID NO: 1214036 - DNA, 25 bp, Homo sapien
tctccagcttgtagttactgtaggg

SEQ ID NO: 1214037 - DNA, 25 bp, Homo sapien
tctccaggcccaaggtgtgtgccac

SEQ ID NO: 1214038 - DNA, 25 bp, Homo sapien
ggagtttctccaggcccaaggtgtg

SEQ ID NO: 1214039 - DNA, 25 bp, Homo sapien
catgctgagccacgctggagtttct

SEQ ID NO: 1214040 - DNA, 25 bp, Homo sapien
catccatgctgagccacgctggagt

SEQ ID NO: 1214041 - DNA, 25 bp, Homo sapien
ttgagatacaacctcctcgcagggc

SEQ ID NO: 1214042 - DNA, 25 bp, Homo sapien
gaattatgtcagcagacctcacagg

SEQ ID NO: 1214043 - DNA, 25 bp, Homo sapien
ggcttgcaggtcatccgctcctgga

SEQ ID NO: 1214044 - DNA, 25 bp, Homo sapien
aatggctgtagtggctcggcttgca

SEQ ID NO: 1214045 - DNA, 25 bp, Homo sapien
cagtcaggatggacgtgctgccttc

SEQ ID NO: 1214046 - DNA, 25 bp, Homo sapien
gatggacgtgctgccttctgcctcg

SEQ ID NO: 1214047 - DNA, 25 bp, Homo sapien
cgtgctgccttctgcctcggaaggt

SEQ ID NO: 1214048 - DNA, 25 bp, Homo sapien
gccctcggggatcagtctgcataac

SEQ ID NO: 1214049 - DNA, 25 bp, Homo sapien
ccgactatttcagtgacggcttctt

SEQ ID NO: 1214050 - DNA, 25 bp, Homo sapien
ctatttcagtgacggcttcttgaga

SEQ ID NO: 1214051 - DNA, 25 bp, Homo sapien
aggccgactatttcagtgacggctt

SEQ ID NO: 1214052 - DNA, 25 bp, Homo sapien
cagtgacggcttcttgagaacgtgg

SEQ ID NO: 1214053 - DNA, 25 bp, Homo sapien
gctatacttgggtatccctctgcag

SEQ ID NO: 1214054 - DNA, 25 bp, Homo sapien
cccagggccatgtgaaaccataggc

SEQ ID NO: 1214055 - DNA, 25 bp, Homo sapien
catgtgaaaccataggcctgcagaa

SEQ ID NO: 1214056 - DNA, 25 bp, Homo sapien
ggctatacttgggtatccctctgca

SEQ ID NO: 1214057 - DNA, 25 bp, Homo sapien
gatacctcgaaattgggcagagcca

SEQ ID NO: 1214058 - DNA, 25 bp, Homo sapien
taaactgaagcctgggagaaccgtg

SEQ ID NO: 1214059 - DNA, 25 bp, Homo sapien
gataaggattctcatcactgggtcc

SEQ ID NO: 1214060 - DNA, 25 bp, Homo sapien
ggcagagccattcctaggtagagaa

SEQ ID NO: 1214061 - DNA, 25 bp, Homo sapien
cattccaggttgattgtctccaggt

SEQ ID NO: 1214062 - DNA, 25 bp, Homo sapien
gagagtgtatccaatcatgatccca

SEQ ID NO: 1214063 - DNA, 25 bp, Homo sapien
tgatcccatttggatgctcaggatg

SEQ ID NO: 1214064 - DNA, 25 bp, Homo sapien
tggatgctcaggatgatcccattcc

SEQ ID NO: 1214065 - DNA, 25 bp, Homo sapien
cacctgcgtcctggcgctgagggta

SEQ ID NO: 1214066 - DNA, 25 bp, Homo sapien
ggagagaagttttccactatctgct

SEQ ID NO: 1214067 - DNA, 25 bp, Homo sapien
ggtgactcctctgtgacggcttccc

SEQ ID NO: 1214068 - DNA, 25 bp, Homo sapien
ccgtgaacttggtctgattgggaga

SEQ ID NO: 1214069 - DNA, 25 bp, Homo sapien
taatcaagaaagtgcatcatggcct

SEQ ID NO: 1214070 - DNA, 25 bp, Homo sapien
tgtggaaagcaccagacacgatgac

SEQ ID NO: 1214071 - DNA, 25 bp, Homo sapien
ggcctttggtgacagacacacatca

SEQ ID NO: 1214072 - DNA, 25 bp, Homo sapien
agtgtctggcacctcacattgtggg

SEQ ID NO: 1214073 - DNA, 25 bp, Homo sapien
acacagcgcccaagatggccagaca

SEQ ID NO: 1214074 - DNA, 25 bp, Homo sapien
cccaagatggccagacagagggaga

SEQ ID NO: 1214075 - DNA, 25 bp, Homo sapien
cttcagaacacagcgcccaagatgg

SEQ ID NO: 1214076 - DNA, 25 bp, Homo sapien
agcgcccaagatggccagacagagg

SEQ ID NO: 1214077 - DNA, 25 bp, Homo sapien
tctggagcatgctttcagcctgagc

SEQ ID NO: 1214078 - DNA, 25 bp, Homo sapien
tgagccattctcctactcagcaggg

SEQ ID NO: 1214079 - DNA, 25 bp, Homo sapien
tggcttcccaaccactgaaagggtg

SEQ ID NO: 1214080 - DNA, 25 bp, Homo sapien
atgcccattacctccgcggctggta

SEQ ID NO: 1214081 - DNA, 25 bp, Homo sapien
acagcatgttcaccctttcaggaga

SEQ ID NO: 1214082 - DNA, 25 bp, Homo sapien
ctctgagctgtcaagcccaggcaag

SEQ ID NO: 1214083 - DNA, 25 bp, Homo sapien
cataccccgagagtggagactgttc

SEQ ID NO: 1214084 - DNA, 25 bp, Homo sapien
cccatgcagcatgcgaagctggcat

SEQ ID NO: 1214085 - DNA, 25 bp, Homo sapien
tcgaattgggcaaggtggcatcccc

SEQ ID NO: 1214086 - DNA, 25 bp, Homo sapien
tggccgcaaaacatacacaaactga

SEQ ID NO: 1214087 - DNA, 25 bp, Homo sapien
cactgcctggcatgtaaggaggctc

SEQ ID NO: 1214088 - DNA, 25 bp, Homo sapien
tgattagcaggtcctaagcccagag

SEQ ID NO: 1214089 - DNA, 25 bp, Homo sapien
aggcctgggatcacctctctgcctc

SEQ ID NO: 1214090 - DNA, 25 bp, Homo sapien
gttcagaccttgtggggaggcactg

SEQ ID NO: 1214091 - DNA, 25 bp, Homo sapien
cctcacatcttcacaggggtgttca

SEQ ID NO: 1214092 - DNA, 25 bp, Homo sapien
cccaggcctgggatcacctctctgc

SEQ ID NO: 1214093 - DNA, 25 bp, Homo sapien
gctgggcagacacatgactgggcta

SEQ ID NO: 1214094 - DNA, 25 bp, Homo sapien
tacaggtttggaagcaatcctggcc

SEQ ID NO: 1214095 - DNA, 25 bp, Homo sapien
gaaacatttgattgagaccgtgagc

SEQ ID NO: 1214096 - DNA, 25 bp, Homo sapien
cagattgtcagacagacgggcagca

SEQ ID NO: 1214097 - DNA, 25 bp, Homo sapien
ccccgcgtgcaaggcaggcagcccg

SEQ ID NO: 1214098 - DNA, 25 bp, Homo sapien
cagcccggtgaggagacggggctta

SEQ ID NO: 1214099 - DNA, 25 bp, Homo sapien
aatgtaaaacagccgagtctggttg

SEQ ID NO: 1214100 - DNA, 25 bp, Homo sapien
aaacagccgagtctggttggtttgg

SEQ ID NO: 1214101 - DNA, 25 bp, Homo sapien
ccacggtagtcgggggcaatgtggg

SEQ ID NO: 1214102 - DNA, 25 bp, Homo sapien
cggattcgtgtatcttagtcccgga

SEQ ID NO: 1214103 - DNA, 25 bp, Homo sapien
cagtggttgtagtagttgtggcgac

SEQ ID NO: 1214104 - DNA, 25 bp, Homo sapien
agcaatggcagtagcatcggtactg

SEQ ID NO: 1214105 - DNA, 25 bp, Homo sapien
tggcgatggtggtaggtgcgacagt

SEQ ID NO: 1214106 - DNA, 25 bp, Homo sapien
gaggggatggggagcatgggcgatg

SEQ ID NO: 1214107 - DNA, 25 bp, Homo sapien
gatggggagcatgggcgatgcgcag

SEQ ID NO: 1214108 - DNA, 25 bp, Homo sapien
ggccaggaggggatggggagcatgg

SEQ ID NO: 1214109 - DNA, 25 bp, Homo sapien
ggggagcatgggcgatgcgcagtac

SEQ ID NO: 1214110 - DNA, 25 bp, Homo sapien
ctcctcgctgggggagcctgtgggt

SEQ ID NO: 1214111 - DNA, 25 bp, Homo sapien
cagtcacgggtgagtttccaaagga

SEQ ID NO: 1214112 - DNA, 25 bp, Homo sapien
ccttctggagtgctcggctctgagc

SEQ ID NO: 1214113 - DNA, 25 bp, Homo sapien
cctgacatgtagctggaggcggtcc

SEQ ID NO: 1214114 - DNA, 25 bp, Homo sapien
caggctacgggactgagcatccagt

SEQ ID NO: 1214115 - DNA, 25 bp, Homo sapien
ggaagtatcgctgaattcccctggg

SEQ ID NO: 1214116 - DNA, 25 bp, Homo sapien
gagtttggcattaagggcctccttg

SEQ ID NO: 1214117 - DNA, 25 bp, Homo sapien
gagaatgcccgtaattttccctcca

SEQ ID NO: 1214118 - DNA, 25 bp, Homo sapien
ggaacagtgcattctcgtggctcag

SEQ ID NO: 1214119 - DNA, 25 bp, Homo sapien
tcctggctgcctcacgctgatttta

SEQ ID NO: 1214120 - DNA, 25 bp, Homo sapien
tattaagcctccatcctcattcagg

SEQ ID NO: 1214121 - DNA, 25 bp, Homo sapien
cctacaattctacaactgtggcaga

SEQ ID NO: 1214122 - DNA, 25 bp, Homo sapien
gcattttcagggtctcaggagctca

SEQ ID NO: 1214123 - DNA, 25 bp, Homo sapien
aaagaacatcaatcaccaacccgct

SEQ ID NO: 1214124 - DNA, 25 bp, Homo sapien
atcaatcaccaacccgctggtggca

SEQ ID NO: 1214125 - DNA, 25 bp, Homo sapien
aagtgcctgttaagttctagatggc

SEQ ID NO: 1214126 - DNA, 25 bp, Homo sapien
ttccgaaagtgcctgttaagttcta

SEQ ID NO: 1214127 - DNA, 25 bp, Homo sapien
tgatgacccggaagcactaaaaagt

SEQ ID NO: 1214128 - DNA, 25 bp, Homo sapien
cgtaatcattttgcaagagtcccag

SEQ ID NO: 1214129 - DNA, 25 bp, Homo sapien
tctgtcaggcgttggttgccccagg

SEQ ID NO: 1214130 - DNA, 25 bp, Homo sapien
gacgcttcaattgtactggccactt

SEQ ID NO: 1214131 - DNA, 25 bp, Homo sapien
agtggtccagacaccagaagaatcc

SEQ ID NO: 1214132 - DNA, 25 bp, Homo sapien
gagaagataactccttgacaaccag

SEQ ID NO: 1214133 - DNA, 25 bp, Homo sapien
gactaggtgcgaccaagagaagata

SEQ ID NO: 1214134 - DNA, 25 bp, Homo sapien
agaagaatcctgttctgttggcgtc

SEQ ID NO: 1214135 - DNA, 25 bp, Homo sapien
gccccttgggttgtccttggtcaga

SEQ ID NO: 1214136 - DNA, 25 bp, Homo sapien
gaagcctggctgataggtctaacag

SEQ ID NO: 1214137 - DNA, 25 bp, Homo sapien
aatggtgatccagacaggtgaggct

SEQ ID NO: 1214138 - DNA, 25 bp, Homo sapien
ggttatctttaagagccgcgagtct

SEQ ID NO: 1214139 - DNA, 25 bp, Homo sapien
acacacagtcatctaggaaagggga

SEQ ID NO: 1214140 - DNA, 25 bp, Homo sapien
atgcacgcacatgcccacactcgcg

SEQ ID NO: 1214141 - DNA, 25 bp, Homo sapien
ctgtccagggacaagcaggtacagt

SEQ ID NO: 1214142 - DNA, 25 bp, Homo sapien
aagcaggtacagtcgggaggacttc

SEQ ID NO: 1214143 - DNA, 25 bp, Homo sapien
tgatgttggcccatttactgttggg

SEQ ID NO: 1214144 - DNA, 25 bp, Homo sapien
tcaaccacaaagtcagttccgggcc

SEQ ID NO: 1214145 - DNA, 25 bp, Homo sapien
ggagcaccgtgacgttccatatgga

SEQ ID NO: 1214146 - DNA, 25 bp, Homo sapien
ccgaaattgtgcttccaggtgatgt

SEQ ID NO: 1214147 - DNA, 25 bp, Homo sapien
agcctgggccttaactgggacagtt

SEQ ID NO: 1214148 - DNA, 25 bp, Homo sapien
ctgtcagctgtataggctgagcctg

SEQ ID NO: 1214149 - DNA, 25 bp, Homo sapien
tgtcagctgtataggctgagcctgg

SEQ ID NO: 1214150 - DNA, 25 bp, Homo sapien
ctgagcctgggccttaactgggaca

SEQ ID NO: 1214151 - DNA, 25 bp, Homo sapien
tgtactggtcataaaggtgatgacg

SEQ ID NO: 1214152 - DNA, 25 bp, Homo sapien
ggtgatgacggtactgctgatgccc

SEQ ID NO: 1214153 - DNA, 25 bp, Homo sapien
gatgccctcgttgtcccgggaataa

SEQ ID NO: 1214154 - DNA, 25 bp, Homo sapien
aacgtgtatgtcatcccgggataga

SEQ ID NO: 1214155 - DNA, 25 bp, Homo sapien
agaacctttccggttctggagagct

SEQ ID NO: 1214156 - DNA, 25 bp, Homo sapien
tggcctgttcatttggcacaaggaa

SEQ ID NO: 1214157 - DNA, 25 bp, Homo sapien
tttgctgagccccagttggcctgtt

SEQ ID NO: 1214158 - DNA, 25 bp, Homo sapien
tccacagctaaagccgctatagagc

SEQ ID NO: 1214159 - DNA, 25 bp, Homo sapien
cagggagtgccctgtaagtatccag

SEQ ID NO: 1214160 - DNA, 25 bp, Homo sapien
gccctgtaagtatccagactgccag

SEQ ID NO: 1214161 - DNA, 25 bp, Homo sapien
tgccagctacccctactagcacaga

SEQ ID NO: 1214162 - DNA, 25 bp, Homo sapien
taagtatccagactgccagctaccc

SEQ ID NO: 1214163 - DNA, 25 bp, Homo sapien
cctgctcggctgagtttaaagctac

SEQ ID NO: 1214164 - DNA, 25 bp, Homo sapien
cagcctgctcggctgagtttaaagc

SEQ ID NO: 1214165 - DNA, 25 bp, Homo sapien
tgctcggctgagtttaaagctacac

SEQ ID NO: 1214166 - DNA, 25 bp, Homo sapien
tcggctgagtttaaagctacactca

SEQ ID NO: 1214167 - DNA, 25 bp, Homo sapien
tcatctgagctagacagagtccagc

SEQ ID NO: 1214168 - DNA, 25 bp, Homo sapien
ggttatgtgtttgtagcccctcagg

SEQ ID NO: 1214169 - DNA, 25 bp, Homo sapien
cagattaggacatccctgagggcag

SEQ ID NO: 1214170 - DNA, 25 bp, Homo sapien
gagcaacagcttgggacctcatctg

SEQ ID NO: 1214171 - DNA, 25 bp, Homo sapien
gttctagaaatagggatagattaac

SEQ ID NO: 1214172 - DNA, 25 bp, Homo sapien
aggccagtcactcaaagtctgcaga

SEQ ID NO: 1214173 - DNA, 25 bp, Homo sapien
cacttaagcaccatttgacacctct

SEQ ID NO: 1214174 - DNA, 25 bp, Homo sapien
catgactcctaattctaactgggag

SEQ ID NO: 1214175 - DNA, 25 bp, Homo sapien
ttgccgccgcgactcctcttgatga

SEQ ID NO: 1214176 - DNA, 25 bp, Homo sapien
cgatgtccgcttggttgttggtgta

SEQ ID NO: 1214177 - DNA, 25 bp, Homo sapien
tggcgcacataagcccaatgaacca

SEQ ID NO: 1214178 - DNA, 25 bp, Homo sapien
gactcctcttgatgaaacagacgat

SEQ ID NO: 1214179 - DNA, 25 bp, Homo sapien
tgcaagcccacgcctcttgcacatc

SEQ ID NO: 1214180 - DNA, 25 bp, Homo sapien
gcaagcccacgcctcttgcacatct

SEQ ID NO: 1214181 - DNA, 25 bp, Homo sapien
ctgcaagcccacgcctcttgcacat

SEQ ID NO: 1214182 - DNA, 25 bp, Homo sapien
cctgcaagcccacgcctcttgcaca

SEQ ID NO: 1214183 - DNA, 25 bp, Homo sapien
cacattccccggatctggctggaga

SEQ ID NO: 1214184 - DNA, 25 bp, Homo sapien
cattcttaataggagccagggttcc

SEQ ID NO: 1214185 - DNA, 25 bp, Homo sapien
ttgtatttccaatccgggcaagggc

SEQ ID NO: 1214186 - DNA, 25 bp, Homo sapien
ttaattaactcaagtgctcgctggc

SEQ ID NO: 1214187 - DNA, 25 bp, Homo sapien
agtcaaatgagccatcctcttcctt

SEQ ID NO: 1214188 - DNA, 25 bp, Homo sapien
caaatgagccatcctcttccttggg

SEQ ID NO: 1214189 - DNA, 25 bp, Homo sapien
ctatagtcaaatgagccatcctctt

SEQ ID NO: 1214190 - DNA, 25 bp, Homo sapien
cagggccaaggggaacatccttctt

SEQ ID NO: 1214191 - DNA, 25 bp, Homo sapien
gaagcaactcctcgcagtacaggct

SEQ ID NO: 1214192 - DNA, 25 bp, Homo sapien
gcataaggaagcaactcctcgcagt

SEQ ID NO: 1214193 - DNA, 25 bp, Homo sapien
agaggtgcataaggaagcaactcct

SEQ ID NO: 1214194 - DNA, 25 bp, Homo sapien
taaggaagcaactcctcgcagtaca

SEQ ID NO: 1214195 - DNA, 25 bp, Homo sapien
tgctcctgtgcgtgtagacccaggg

SEQ ID NO: 1214196 - DNA, 25 bp, Homo sapien
ctgtgcgtgtagacccagggtcagt

SEQ ID NO: 1214197 - DNA, 25 bp, Homo sapien
cccaggcatgctcctgtgcgtgtag

SEQ ID NO: 1214198 - DNA, 25 bp, Homo sapien
gcatgctcctgtgcgtgtagaccca

SEQ ID NO: 1214199 - DNA, 25 bp, Homo sapien
tactggccgatgaaggagccgtctt

SEQ ID NO: 1214200 - DNA, 25 bp, Homo sapien
tagatagcattgacaggtgacgtgg

SEQ ID NO: 1214201 - DNA, 25 bp, Homo sapien
tcctttttgaccgtgtactggccga

SEQ ID NO: 1214202 - DNA, 25 bp, Homo sapien
tggtgccgtccagagatgtctgact

SEQ ID NO: 1214203 - DNA, 25 bp, Homo sapien
tcaaatcggaggctgtgcccatggc

SEQ ID NO: 1214204 - DNA, 25 bp, Homo sapien
gaactccagggacagatcagcgctg

SEQ ID NO: 1214205 - DNA, 25 bp, Homo sapien
tacctttgcggcttaaacatgtggc

SEQ ID NO: 1214206 - DNA, 25 bp, Homo sapien
tggtcctgccggaacacttgcatag

SEQ ID NO: 1214207 - DNA, 25 bp, Homo sapien
catgggctccatggaaaatgcaccc

SEQ ID NO: 1214208 - DNA, 25 bp, Homo sapien
cctgctgagctggagtggactctga

SEQ ID NO: 1214209 - DNA, 25 bp, Homo sapien
taagggcctgctttcggtgcaatgg

SEQ ID NO: 1214210 - DNA, 25 bp, Homo sapien
gacccttacgagagaagcagccctt

SEQ ID NO: 1214211 - DNA, 25 bp, Homo sapien
cgcaacttggatgtggactaaccct

SEQ ID NO: 1214212 - DNA, 25 bp, Homo sapien
tgggtgaaccacacacaggctgatc

SEQ ID NO: 1214213 - DNA, 25 bp, Homo sapien
tgaaggcccgatgtgttacaaagca

SEQ ID NO: 1214214 - DNA, 25 bp, Homo sapien
ggtgtagatgcaaccgcaaccatgg

SEQ ID NO: 1214215 - DNA, 25 bp, Homo sapien
gtggccacgtcacaggcgactgatg

SEQ ID NO: 1214216 - DNA, 25 bp, Homo sapien
tataagtccatgtattagacggccc

SEQ ID NO: 1214217 - DNA, 25 bp, Homo sapien
ccctgctgaaggtcgtgtgtgacac

SEQ ID NO: 1214218 - DNA, 25 bp, Homo sapien
tgtgtgacaccctcagatacgcatc

SEQ ID NO: 1214219 - DNA, 25 bp, Homo sapien
tgtgtgtgagcgcgcccggagccac

SEQ ID NO: 1214220 - DNA, 25 bp, Homo sapien
tggcgggtgagggcgcgtgtgtgtg

SEQ ID NO: 1214221 - DNA, 25 bp, Homo sapien
agcgcgcccggagccactgcagcat

SEQ ID NO: 1214222 - DNA, 25 bp, Homo sapien
tctgcatcaagatgtgctcctccct

SEQ ID NO: 1214223 - DNA, 25 bp, Homo sapien
gatgctgcccgagtcggtgagccgg

SEQ ID NO: 1214224 - DNA, 25 bp, Homo sapien
ggtggatgctgcccgagtcggtgag

SEQ ID NO: 1214225 - DNA, 25 bp, Homo sapien
caggtggatgctgcccgagtcggtg

SEQ ID NO: 1214226 - DNA, 25 bp, Homo sapien
tggatgctgcccgagtcggtgagcc

SEQ ID NO: 1214227 - DNA, 25 bp, Homo sapien
agaaactcccataaatgttccaggt

SEQ ID NO: 1214228 - DNA, 25 bp, Homo sapien
taaatgttccaggttagcaacagcc

SEQ ID NO: 1214229 - DNA, 25 bp, Homo sapien
aggatggttaccgtcaggatacgga

SEQ ID NO: 1214230 - DNA, 25 bp, Homo sapien
ggatacggagcccacagaaactccc

SEQ ID NO: 1214231 - DNA, 25 bp, Homo sapien
cggaggagaagagcctcagctcagc

SEQ ID NO: 1214232 - DNA, 25 bp, Homo sapien
gcagaggtggggatcggaggagaag

SEQ ID NO: 1214233 - DNA, 25 bp, Homo sapien
gatcggaggagaagagcctcagctc

SEQ ID NO: 1214234 - DNA, 25 bp, Homo sapien
cagaggtggggatcggaggagaaga

SEQ ID NO: 1214235 - DNA, 25 bp, Homo sapien
agacaagggccacagcagctaccag

SEQ ID NO: 1214236 - DNA, 25 bp, Homo sapien
aagggccacagcagctaccagcagc

SEQ ID NO: 1214237 - DNA, 25 bp, Homo sapien
tgaagaggagacaagggccacagca

SEQ ID NO: 1214238 - DNA, 25 bp, Homo sapien
cagcagctaccagcagcaggtgtgg

SEQ ID NO: 1214239 - DNA, 25 bp, Homo sapien
tcttcaaagacaggcccgaaggtgg

SEQ ID NO: 1214240 - DNA, 25 bp, Homo sapien
gtcttcaaagacaggcccgaaggtg

SEQ ID NO: 1214241 - DNA, 25 bp, Homo sapien
tcctctgggaatagcacactgaggg

SEQ ID NO: 1214242 - DNA, 25 bp, Homo sapien
tccgtggactcctctgggaatagca

SEQ ID NO: 1214243 - DNA, 25 bp, Homo sapien
ggtagaccccggcatcctgtgcctt

SEQ ID NO: 1214244 - DNA, 25 bp, Homo sapien
ctgctgacaacggtgcccactgggt

SEQ ID NO: 1214245 - DNA, 25 bp, Homo sapien
tggtgacgggaacctggctccagct

SEQ ID NO: 1214246 - DNA, 25 bp, Homo sapien
agccgaagcggaggatggcctccct

SEQ ID NO: 1214247 - DNA, 25 bp, Homo sapien
gtgggttacagggcaacatcacccc

SEQ ID NO: 1214248 - DNA, 25 bp, Homo sapien
ttcactgggtctcgctcctccttgg

SEQ ID NO: 1214249 - DNA, 25 bp, Homo sapien
tgggttacagggcaacatcaccccc

SEQ ID NO: 1214250 - DNA, 25 bp, Homo sapien
agctttcactgggtctcgctcctcc

SEQ ID NO: 1214251 - DNA, 25 bp, Homo sapien
gaagcagggcacaacgatggaaagt

SEQ ID NO: 1214252 - DNA, 25 bp, Homo sapien
tgccctcagggagcgctaagtctgc

SEQ ID NO: 1214253 - DNA, 25 bp, Homo sapien
gtgcttctaagggtcatttccaggg

SEQ ID NO: 1214254 - DNA, 25 bp, Homo sapien
cacccagtttgaaggcggaagcagg

SEQ ID NO: 1214255 - DNA, 25 bp, Homo sapien
tgacgcccgtccgtcgggatgaagt

SEQ ID NO: 1214256 - DNA, 25 bp, Homo sapien
tggtctgggacacgaagtgacgccc

SEQ ID NO: 1214257 - DNA, 25 bp, Homo sapien
tggttcgggcaatgtacaggttccc

SEQ ID NO: 1214258 - DNA, 25 bp, Homo sapien
tgctgaagacgctcttggtggagaa

SEQ ID NO: 1214259 - DNA, 25 bp, Homo sapien
aaggcgaagcactccagggtgacct

SEQ ID NO: 1214260 - DNA, 25 bp, Homo sapien
ctgctgggaaccgggccttgatgct

SEQ ID NO: 1214261 - DNA, 25 bp, Homo sapien
ttcccaaaggcgaagcactccaggg

SEQ ID NO: 1214262 - DNA, 25 bp, Homo sapien
tgccccaccagtgcataggtctctg

SEQ ID NO: 1214263 - DNA, 25 bp, Homo sapien
tccactttgcgccacttgatccggg

SEQ ID NO: 1214264 - DNA, 25 bp, Homo sapien
tgcacggtgtctcggcccttggagt

SEQ ID NO: 1214265 - DNA, 25 bp, Homo sapien
ctcgtaggtgccctcatcctcaaag

SEQ ID NO: 1214266 - DNA, 25 bp, Homo sapien
cctcaaagctgacgctggggatctg

SEQ ID NO: 1214267 - DNA, 25 bp, Homo sapien
aacgcaggttggagccaatgtcagc

SEQ ID NO: 1214268 - DNA, 25 bp, Homo sapien
tgtccgagatcacttttagccactc

SEQ ID NO: 1214269 - DNA, 25 bp, Homo sapien
cagccccaacgcaggttggagccaa

SEQ ID NO: 1214270 - DNA, 25 bp, Homo sapien
tgtcagcctctgtgtccgagatcac

SEQ ID NO: 1214271 - DNA, 25 bp, Homo sapien
cttgcacggctagctcggcgctggc

SEQ ID NO: 1214272 - DNA, 25 bp, Homo sapien
cgctggcgtagatggtaccgtgctt

SEQ ID NO: 1214273 - DNA, 25 bp, Homo sapien
cgtgcttattctctgccacacactg

SEQ ID NO: 1214274 - DNA, 25 bp, Homo sapien
cacacactggtacatgcccgagtct

SEQ ID NO: 1214275 - DNA, 25 bp, Homo sapien
gggattcagcctgaagtcaggggcg

SEQ ID NO: 1214276 - DNA, 25 bp, Homo sapien
ttcagcctgaagtcaggggcgagtg

SEQ ID NO: 1214277 - DNA, 25 bp, Homo sapien
gattcagcctgaagtcaggggcgag

SEQ ID NO: 1214278 - DNA, 25 bp, Homo sapien
attcagcctgaagtcaggggcgagt

SEQ ID NO: 1214279 - DNA, 25 bp, Homo sapien
tggcaggggataaggatctctcccc

SEQ ID NO: 1214280 - DNA, 25 bp, Homo sapien
aggggataaggatctctcccccgcg

SEQ ID NO: 1214281 - DNA, 25 bp, Homo sapien
ctggcaggggataaggatctctccc

SEQ ID NO: 1214282 - DNA, 25 bp, Homo sapien
gcaggggataaggatctctcccccg

SEQ ID NO: 1214283 - DNA, 25 bp, Homo sapien
accacggcctttggagctgcccggg

SEQ ID NO: 1214284 - DNA, 25 bp, Homo sapien
gcctttgctccagagcaccacggcc

SEQ ID NO: 1214285 - DNA, 25 bp, Homo sapien
gttgaccaaaatctccgtgcctttg

SEQ ID NO: 1214286 - DNA, 25 bp, Homo sapien
tgctgctgttgaccaaaatctccgt

SEQ ID NO: 1214287 - DNA, 25 bp, Homo sapien
tcacaggaggggaattggcctccat

SEQ ID NO: 1214288 - DNA, 25 bp, Homo sapien
caactcaggcatggttgtccctggg

SEQ ID NO: 1214289 - DNA, 25 bp, Homo sapien
gaggaggagcaggaactgtgcaggg

SEQ ID NO: 1214290 - DNA, 25 bp, Homo sapien
aattggcctccatggagaatgagga

SEQ ID NO: 1214291 - DNA, 25 bp, Homo sapien
tttgccttcatctgaccggctgatg

SEQ ID NO: 1214292 - DNA, 25 bp, Homo sapien
aaagcaggtgtatttgccttcatct

SEQ ID NO: 1214293 - DNA, 25 bp, Homo sapien
gatgtttcttatgatcaaggtgcca

SEQ ID NO: 1214294 - DNA, 25 bp, Homo sapien
tctgaccggctgatgtttcttatga

SEQ ID NO: 1214295 - DNA, 25 bp, Homo sapien
catggcactgtagggtcaggttgtc

SEQ ID NO: 1214296 - DNA, 25 bp, Homo sapien
ttagttctccggtagtgccctccag

SEQ ID NO: 1214297 - DNA, 25 bp, Homo sapien
ggttgtcacccaagttgatgtcggc

SEQ ID NO: 1214298 - DNA, 25 bp, Homo sapien
tccaggtgaaggtgaggtccatggt

SEQ ID NO: 1214299 - DNA, 25 bp, Homo sapien
gtctgggccatgcacgtgtacttcc

SEQ ID NO: 1214300 - DNA, 25 bp, Homo sapien
tgtggcctccttggacgcgctgtcc

SEQ ID NO: 1214301 - DNA, 25 bp, Homo sapien
ccccatggcgcagctgggcgttcag

SEQ ID NO: 1214302 - DNA, 25 bp, Homo sapien
ttcaggatggtcagatccccaatgg

SEQ ID NO: 1214303 - DNA, 25 bp, Homo sapien
ggatggtggtgtcgccaatgtccct

SEQ ID NO: 1214304 - DNA, 25 bp, Homo sapien
tggtggtgtcgccaatgtccctcac

SEQ ID NO: 1214305 - DNA, 25 bp, Homo sapien
agcttgcagggtgtacttagcgatg

SEQ ID NO: 1214306 - DNA, 25 bp, Homo sapien
cctgcaggtggagtgcgagcttgca

SEQ ID NO: 1214307 - DNA, 25 bp, Homo sapien
cagcacctgtgcagtctcggcattg

SEQ ID NO: 1214308 - DNA, 25 bp, Homo sapien
cggaactcatagtccatccaggggg

SEQ ID NO: 1214309 - DNA, 25 bp, Homo sapien
acctgtgcagtctcggcattgccct

SEQ ID NO: 1214310 - DNA, 25 bp, Homo sapien
gaactcatagtccatccagggggtg

SEQ ID NO: 1214311 - DNA, 25 bp, Homo sapien
gattttgctggagggcccactaggc

SEQ ID NO: 1214312 - DNA, 25 bp, Homo sapien
ctgcttccctggtccggattttgct

SEQ ID NO: 1214313 - DNA, 25 bp, Homo sapien
tccctggtccggattttgctggagg

SEQ ID NO: 1214314 - DNA, 25 bp, Homo sapien
gtccggattttgctggagggcccac

SEQ ID NO: 1214315 - DNA, 25 bp, Homo sapien
gcataattgcggctggcttggcatt

SEQ ID NO: 1214316 - DNA, 25 bp, Homo sapien
cagggttggaactcagcataattgc

SEQ ID NO: 1214317 - DNA, 25 bp, Homo sapien
agagtctgaaccctgtgagcagggt

SEQ ID NO: 1214318 - DNA, 25 bp, Homo sapien
cattccctataagtggtgccagggt

SEQ ID NO: 1214319 - DNA, 25 bp, Homo sapien
cattggccatttgatcctgtgaggt

SEQ ID NO: 1214320 - DNA, 25 bp, Homo sapien
tttccgtagagaatccagcagctgg

SEQ ID NO: 1214321 - DNA, 25 bp, Homo sapien
tctttgtgctcctcagctactggga

SEQ ID NO: 1214322 - DNA, 25 bp, Homo sapien
caagaggtacttaaacacattggcc

SEQ ID NO: 1214323 - DNA, 25 bp, Homo sapien
gacgatgagctctccgggggctcca

SEQ ID NO: 1214324 - DNA, 25 bp, Homo sapien
cgtccagttgacgatgagctctccg

SEQ ID NO: 1214325 - DNA, 25 bp, Homo sapien
ttgacgatgagctctccgggggctc

SEQ ID NO: 1214326 - DNA, 25 bp, Homo sapien
tccagttgacgatgagctctccggg

SEQ ID NO: 1214327 - DNA, 25 bp, Homo sapien
aagttatccgcgtttgagtcagagc

SEQ ID NO: 1214328 - DNA, 25 bp, Homo sapien
ctttgccaagagtagcggccctgga

SEQ ID NO: 1214329 - DNA, 25 bp, Homo sapien
cgcctgcagcgtggattcgcgtaag

SEQ ID NO: 1214330 - DNA, 25 bp, Homo sapien
cagagctgtgcagtggtcctttctg

SEQ ID NO: 1214331 - DNA, 25 bp, Homo sapien
ggacgctctcgttgctgtagacaaa

SEQ ID NO: 1214332 - DNA, 25 bp, Homo sapien
tagacaaagtactgggcatcggcgc

SEQ ID NO: 1214333 - DNA, 25 bp, Homo sapien
tagctgcggatcttgacctcaaagg

SEQ ID NO: 1214334 - DNA, 25 bp, Homo sapien
cctcagctgagtacacgagtgcagt

SEQ ID NO: 1214335 - DNA, 25 bp, Homo sapien
tcataccccaggaggataccattca

SEQ ID NO: 1214336 - DNA, 25 bp, Homo sapien
ccaggtcacgttcatctctgaggat

SEQ ID NO: 1214337 - DNA, 25 bp, Homo sapien
tctgaggatgagacccctttggccc

SEQ ID NO: 1214338 - DNA, 25 bp, Homo sapien
gctgcacgggttcccaggtcacgtt

SEQ ID NO: 1214339 - DNA, 25 bp, Homo sapien
acatggtacttggtgttgggatgca

SEQ ID NO: 1214340 - DNA, 25 bp, Homo sapien
tgctgtcctcactcggtccgcagct

SEQ ID NO: 1214341 - DNA, 25 bp, Homo sapien
ggttgtaggccctcacggtcacatg

SEQ ID NO: 1214342 - DNA, 25 bp, Homo sapien
cttcatggtcgtggcgttggcagaa

SEQ ID NO: 1214343 - DNA, 25 bp, Homo sapien
ctcatttcggaaagggaccacaggg

SEQ ID NO: 1214344 - DNA, 25 bp, Homo sapien
gactgcagactcatttcggaaaggg

SEQ ID NO: 1214345 - DNA, 25 bp, Homo sapien
cacagggtcccacttaatgctaaga

SEQ ID NO: 1214346 - DNA, 25 bp, Homo sapien
aaagtccaggagatgttgccaggag

SEQ ID NO: 1214347 - DNA, 25 bp, Homo sapien
ccaatgtcttcaggcactgggattt

SEQ ID NO: 1214348 - DNA, 25 bp, Homo sapien
gccctgtggtccgaatttgtaccag

SEQ ID NO: 1214349 - DNA, 25 bp, Homo sapien
tccgaatttgtaccagggcatggcc

SEQ ID NO: 1214350 - DNA, 25 bp, Homo sapien
gagtcaggtgtaagtcattctggta

SEQ ID NO: 1214351 - DNA, 25 bp, Homo sapien
acggagtgggaaatgacggtgccag

SEQ ID NO: 1214352 - DNA, 25 bp, Homo sapien
gctgggcggactgccatgttctcca

SEQ ID NO: 1214353 - DNA, 25 bp, Homo sapien
ccacggagtgggaaatgacggtgcc

SEQ ID NO: 1214354 - DNA, 25 bp, Homo sapien
ggagcctatgaggatcagcatcgcc

SEQ ID NO: 1214355 - DNA, 25 bp, Homo sapien
tgcggcgcagagggaggggttccag

SEQ ID NO: 1214356 - DNA, 25 bp, Homo sapien
gcggcgcagagggaggggttccagg

SEQ ID NO: 1214357 - DNA, 25 bp, Homo sapien
cggcgcagagggaggggttccagga

SEQ ID NO: 1214358 - DNA, 25 bp, Homo sapien
ctgcggcgcagagggaggggttcca

SEQ ID NO: 1214359 - DNA, 25 bp, Homo sapien
tggctgtgtccgtcggaggtggcgt

SEQ ID NO: 1214360 - DNA, 25 bp, Homo sapien
ggctgtgtccgtcggaggtggcgtc

SEQ ID NO: 1214361 - DNA, 25 bp, Homo sapien
ctgtgtccgtcggaggtggcgtcca

SEQ ID NO: 1214362 - DNA, 25 bp, Homo sapien
tgtgtccgtcggaggtggcgtccag

SEQ ID NO: 1214363 - DNA, 25 bp, Homo sapien
gcctggtgcctctcaatttaaagaa

SEQ ID NO: 1214364 - DNA, 25 bp, Homo sapien
tatcctacctcctacaaaaagggca

SEQ ID NO: 1214365 - DNA, 25 bp, Homo sapien
cgtgggttctatcctgcggcagaat

SEQ ID NO: 1214366 - DNA, 25 bp, Homo sapien
agctcaggtataggcgtcagtgtca

SEQ ID NO: 1214367 - DNA, 25 bp, Homo sapien
aaatgcaagcagtccaaggccgtct

SEQ ID NO: 1214368 - DNA, 25 bp, Homo sapien
ctgagagggcatcgtcacctgggtt

SEQ ID NO: 1214369 - DNA, 25 bp, Homo sapien
ttgtgactatctcagaccaaggctg

SEQ ID NO: 1214370 - DNA, 25 bp, Homo sapien
aataccaggacacacagcatgaatg

SEQ ID NO: 1214371 - DNA, 25 bp, Homo sapien
tcggagcttccgaggacatatgccc

SEQ ID NO: 1214372 - DNA, 25 bp, Homo sapien
tcctctgggtagacaaacagccttg

SEQ ID NO: 1214373 - DNA, 25 bp, Homo sapien
tgctcttgcctagggaatctgctct

SEQ ID NO: 1214374 - DNA, 25 bp, Homo sapien
tatgcccttcaagatgcctgtcccg

SEQ ID NO: 1214375 - DNA, 25 bp, Homo sapien
gaatggtcgtatagctgagccccta

SEQ ID NO: 1214376 - DNA, 25 bp, Homo sapien
cactaagtgtcataggccccaaagg

SEQ ID NO: 1214377 - DNA, 25 bp, Homo sapien
tgtacaagtcactctagcaggaggc

SEQ ID NO: 1214378 - DNA, 25 bp, Homo sapien
taatggcttcccataaggtgcaggg

SEQ ID NO: 1214379 - DNA, 25 bp, Homo sapien
taaatggttatcgaatgtgtgagaa

SEQ ID NO: 1214380 - DNA, 25 bp, Homo sapien
tggctggaaagtgactagtaattca

SEQ ID NO: 1214381 - DNA, 25 bp, Homo sapien
gtaattcacacccttgtggctgctg

SEQ ID NO: 1214382 - DNA, 25 bp, Homo sapien
tgctgtgaaccaagagtagaggcag

SEQ ID NO: 1214383 - DNA, 25 bp, Homo sapien
gtcacagacattgcaactcttaact

SEQ ID NO: 1214384 - DNA, 25 bp, Homo sapien
ctgaaagtaccaaaaatcagcctgg

SEQ ID NO: 1214385 - DNA, 25 bp, Homo sapien
ccacaatatctttatcacactaaga

SEQ ID NO: 1214386 - DNA, 25 bp, Homo sapien
cctaataaggatgttctctgtaacc

SEQ ID NO: 1214387 - DNA, 25 bp, Homo sapien
ctagtccagagttcttaatcctttt

SEQ ID NO: 1214388 - DNA, 25 bp, Homo sapien
agttacttgcctcctagtccagagt

SEQ ID NO: 1214389 - DNA, 25 bp, Homo sapien
cctagtccagagttcttaatccttt

SEQ ID NO: 1214390 - DNA, 25 bp, Homo sapien
ggtaagttacttgcctcctagtcca

SEQ ID NO: 1214391 - DNA, 25 bp, Homo sapien
gacctacgtgaataatgagctctat

SEQ ID NO: 1214392 - DNA, 25 bp, Homo sapien
tgagctctattctgtaggataaagg

SEQ ID NO: 1214393 - DNA, 25 bp, Homo sapien
ataaagggagtaggccaagagtcag

SEQ ID NO: 1214394 - DNA, 25 bp, Homo sapien
gcatcatgcatcctctcactcaaaa

SEQ ID NO: 1214395 - DNA, 25 bp, Homo sapien
gagacttagccttgggtacttcttg

SEQ ID NO: 1214396 - DNA, 25 bp, Homo sapien
tgtacaagatgagacttagccttgg

SEQ ID NO: 1214397 - DNA, 25 bp, Homo sapien
ttttgtacaagatgagacttagcct

SEQ ID NO: 1214398 - DNA, 25 bp, Homo sapien
caagatgagacttagccttgggtac

SEQ ID NO: 1214399 - DNA, 25 bp, Homo sapien
tagtagatggctcactagacatgtt

SEQ ID NO: 1214400 - DNA, 25 bp, Homo sapien
tctttccacgtgtgaagtagcttgg

SEQ ID NO: 1214401 - DNA, 25 bp, Homo sapien
tagaccagtggttgagattagtaga

SEQ ID NO: 1214402 - DNA, 25 bp, Homo sapien
tgtgcaaactatgggacttagaggg

SEQ ID NO: 1214403 - DNA, 25 bp, Homo sapien
tgaaatatatcagttggtgagccgg

SEQ ID NO: 1214404 - DNA, 25 bp, Homo sapien
atatatcagttggtgagccgggcgt

SEQ ID NO: 1214405 - DNA, 25 bp, Homo sapien
aaatatatcagttggtgagccgggc

SEQ ID NO: 1214406 - DNA, 25 bp, Homo sapien
tgtgaaatatatcagttggtgagcc

SEQ ID NO: 1214407 - DNA, 25 bp, Homo sapien
tgacaagaggcattgctaaaataat

SEQ ID NO: 1214408 - DNA, 25 bp, Homo sapien
cgaattgtcatctgggatttcttga

SEQ ID NO: 1214409 - DNA, 25 bp, Homo sapien
gatttcttgacaagaggcattgcta

SEQ ID NO: 1214410 - DNA, 25 bp, Homo sapien
cttgcagttggctgtaatgatggcc

SEQ ID NO: 1214411 - DNA, 25 bp, Homo sapien
ctgcgttttagagaagcgttgggta

SEQ ID NO: 1214412 - DNA, 25 bp, Homo sapien
gcggcgtccaccacttagacgcaag

SEQ ID NO: 1214413 - DNA, 25 bp, Homo sapien
taaggccgaaagtcttcggagcttg

SEQ ID NO: 1214414 - DNA, 25 bp, Homo sapien
ggagcttgcgccagtctcttcgcgg

SEQ ID NO: 1214415 - DNA, 25 bp, Homo sapien
tagacgcaagttgctgaagccggcc

SEQ ID NO: 1214416 - DNA, 25 bp, Homo sapien
cattgttgtacctcagcaaagatca

SEQ ID NO: 1214417 - DNA, 25 bp, Homo sapien
tcaggcatatatttgggcagcccac

SEQ ID NO: 1214418 - DNA, 25 bp, Homo sapien
taattgtttccgagagagtgtatgc

SEQ ID NO: 1214419 - DNA, 25 bp, Homo sapien
agtgtatgcttgattttggtcaggc

SEQ ID NO: 1214420 - DNA, 25 bp, Homo sapien
ttcttggtgcagatgacacggcagc

SEQ ID NO: 1214421 - DNA, 25 bp, Homo sapien
tcttggtgcagatgacacggcagca

SEQ ID NO: 1214422 - DNA, 25 bp, Homo sapien
catttgttcaactagcttttgtccc

SEQ ID NO: 1214423 - DNA, 25 bp, Homo sapien
gcttttgtcccttgtaatctattcg

SEQ ID NO: 1214424 - DNA, 25 bp, Homo sapien
agcaagctcatatgctccaacatga

SEQ ID NO: 1214425 - DNA, 25 bp, Homo sapien
taatctattcgtatgggcagcaagc

SEQ ID NO: 1214426 - DNA, 25 bp, Homo sapien
tattgttacagcaggaccgtcttaa

SEQ ID NO: 1214427 - DNA, 25 bp, Homo sapien
tcctttcttgtgctacctggctctt

SEQ ID NO: 1214428 - DNA, 25 bp, Homo sapien
gaagagatgcgactctgggttaatc

SEQ ID NO: 1214429 - DNA, 25 bp, Homo sapien
caatgactttggcacacacttcagt

SEQ ID NO: 1214430 - DNA, 25 bp, Homo sapien
taactgactcagtgtctttgggctc

SEQ ID NO: 1214431 - DNA, 25 bp, Homo sapien
tcaagggagtcaggtgtcaagaaag

SEQ ID NO: 1214432 - DNA, 25 bp, Homo sapien
catagtagctccctaaactcttgga

SEQ ID NO: 1214433 - DNA, 25 bp, Homo sapien
aggtcacattcctagcattcttggg

SEQ ID NO: 1214434 - DNA, 25 bp, Homo sapien
cagtggaagtgagtagtctccctcc

SEQ ID NO: 1214435 - DNA, 25 bp, Homo sapien
tcagcccgagagtttgtaaaacagg

SEQ ID NO: 1214436 - DNA, 25 bp, Homo sapien
tgtgctagtgtctgggaagtttccc

SEQ ID NO: 1214437 - DNA, 25 bp, Homo sapien
tagattccgaaaaacaggtagacga

SEQ ID NO: 1214438 - DNA, 25 bp, Homo sapien
gcctgagaagtgtcatgagtattct

SEQ ID NO: 1214439 - DNA, 25 bp, Homo sapien
ggcctgagaagtgtcatgagtattc

SEQ ID NO: 1214440 - DNA, 25 bp, Homo sapien
ttcgtggcttttcgtatatgcatac

SEQ ID NO: 1214441 - DNA, 25 bp, Homo sapien
gctgtttctgtaaagtggtagcttt

SEQ ID NO: 1214442 - DNA, 25 bp, Homo sapien
tctgtaaagtggtagctttcagata

SEQ ID NO: 1214443 - DNA, 25 bp, Homo sapien
gtttctgtaaagtggtagctttcag

SEQ ID NO: 1214444 - DNA, 25 bp, Homo sapien
ctgtaaagtggtagctttcagatac

SEQ ID NO: 1214445 - DNA, 25 bp, Homo sapien
gtagcaaaaattcagcaagcttttt

SEQ ID NO: 1214446 - DNA, 25 bp, Homo sapien
gtgtagcaaaaattcagcaagcttt

SEQ ID NO: 1214447 - DNA, 25 bp, Homo sapien
agcaagctttttgggccactgacct

SEQ ID NO: 1214448 - DNA, 25 bp, Homo sapien
tttgggccactgaccttgtccagcc

SEQ ID NO: 1214449 - DNA, 25 bp, Homo sapien
tcactttgatatgcccaacgaccag

SEQ ID NO: 1214450 - DNA, 25 bp, Homo sapien
tgatatgcccaacgaccagagaatc

SEQ ID NO: 1214451 - DNA, 25 bp, Homo sapien
ctttgatatgcccaacgaccagaga

SEQ ID NO: 1214452 - DNA, 25 bp, Homo sapien
gttcactttgatatgcccaacgacc

SEQ ID NO: 1214453 - DNA, 25 bp, Homo sapien
ccatgagctctgcaggtccagcggc

SEQ ID NO: 1214454 - DNA, 25 bp, Homo sapien
ttactcctgtgtcataagtttttgt

SEQ ID NO: 1214455 - DNA, 25 bp, Homo sapien
gcagagagagctcacgtatgggtta

SEQ ID NO: 1214456 - DNA, 25 bp, Homo sapien
tgagctctgcaggtccagcggcgca

SEQ ID NO: 1214457 - DNA, 25 bp, Homo sapien
tatatcctttgcaccatttgaattt

SEQ ID NO: 1214458 - DNA, 25 bp, Homo sapien
cagaagtctgcaaggccataatcaa

SEQ ID NO: 1214459 - DNA, 25 bp, Homo sapien
caaatatgtattacgtatgctatca

SEQ ID NO: 1214460 - DNA, 25 bp, Homo sapien
gatttatatctacaacagtggttgc

SEQ ID NO: 1214461 - DNA, 25 bp, Homo sapien
agagtccttgggcagtcattgcagg

SEQ ID NO: 1214462 - DNA, 25 bp, Homo sapien
ccttggttatagcttggaatagttc

SEQ ID NO: 1214463 - DNA, 25 bp, Homo sapien
gatggcagaccacaatttcttgaat

SEQ ID NO: 1214464 - DNA, 25 bp, Homo sapien
agcgaagacaggtcacagtcgaggc

SEQ ID NO: 1214465 - DNA, 25 bp, Homo sapien
agttagcacccgtggtctccccagg

SEQ ID NO: 1214466 - DNA, 25 bp, Homo sapien
cagcgccggcgtctgaagttggccc

SEQ ID NO: 1214467 - DNA, 25 bp, Homo sapien
gtgggaagcggcatcttccagccca

SEQ ID NO: 1214468 - DNA, 25 bp, Homo sapien
agttggcccgccagcagagttagca

SEQ ID NO: 1214469 - DNA, 25 bp, Homo sapien
taaatcaggaggcttgcttcgggga

SEQ ID NO: 1214470 - DNA, 25 bp, Homo sapien
ctttaaatcaggaggcttgcttcgg

SEQ ID NO: 1214471 - DNA, 25 bp, Homo sapien
aaatcaggaggcttgcttcggggac

SEQ ID NO: 1214472 - DNA, 25 bp, Homo sapien
tttaaatcaggaggcttgcttcggg

SEQ ID NO: 1214473 - DNA, 25 bp, Homo sapien
ggtggcgagagctaagtcgcgggct

SEQ ID NO: 1214474 - DNA, 25 bp, Homo sapien
ttaaagcacttctgcgtggggtggc

SEQ ID NO: 1214475 - DNA, 25 bp, Homo sapien
taagtcgcgggctgggcttgccggg

SEQ ID NO: 1214476 - DNA, 25 bp, Homo sapien
gcttgccggggggatggtctgcgct

SEQ ID NO: 1214477 - DNA, 25 bp, Homo sapien
tggggtgccagcaaagcatccgctc

SEQ ID NO: 1214478 - DNA, 25 bp, Homo sapien
ggtgccagcaaagcatccgctcatc

SEQ ID NO: 1214479 - DNA, 25 bp, Homo sapien
atcctctctgacctttgcctggctt

SEQ ID NO: 1214480 - DNA, 25 bp, Homo sapien
gcaaagcatccgctcatcctctctg

SEQ ID NO: 1214481 - DNA, 25 bp, Homo sapien
agcactatcttaacctctggctcca

SEQ ID NO: 1214482 - DNA, 25 bp, Homo sapien
tctccaagcactatcttaacctctg

SEQ ID NO: 1214483 - DNA, 25 bp, Homo sapien
tccaagcactatcttaacctctggc

SEQ ID NO: 1214484 - DNA, 25 bp, Homo sapien
caagcactatcttaacctctggctc

SEQ ID NO: 1214485 - DNA, 25 bp, Homo sapien
tattctggtgagctccttagtggct

SEQ ID NO: 1214486 - DNA, 25 bp, Homo sapien
gcttctggttctagctgctggctca

SEQ ID NO: 1214487 - DNA, 25 bp, Homo sapien
gacagctcgccaattgtctcggcaa

SEQ ID NO: 1214488 - DNA, 25 bp, Homo sapien
ggcagttccggcaaaggtgcattat

SEQ ID NO: 1214489 - DNA, 25 bp, Homo sapien
caggcccaagctgatgtgagacctc

SEQ ID NO: 1214490 - DNA, 25 bp, Homo sapien
cagcattttgcaaagtgcgttccga

SEQ ID NO: 1214491 - DNA, 25 bp, Homo sapien
gggagaaccaagatgtcaactctgc

SEQ ID NO: 1214492 - DNA, 25 bp, Homo sapien
gacactagcctaatctcaggagcta

SEQ ID NO: 1214493 - DNA, 25 bp, Homo sapien
gcttgaggcagggtcacaaggctca

SEQ ID NO: 1214494 - DNA, 25 bp, Homo sapien
tgcgcttacagctggatacaataac

SEQ ID NO: 1214495 - DNA, 25 bp, Homo sapien
tccttaaagtagatgaggcccttac

SEQ ID NO: 1214496 - DNA, 25 bp, Homo sapien
gggcagccctcgagatcttaagtta

SEQ ID NO: 1214497 - DNA, 25 bp, Homo sapien
aaaatctagaccatatagaaaccaa

SEQ ID NO: 1214498 - DNA, 25 bp, Homo sapien
gaaaatctagaccatatagaaacca

SEQ ID NO: 1214499 - DNA, 25 bp, Homo sapien
gggagagatgaagaaccctggtgag

SEQ ID NO: 1214500 - DNA, 25 bp, Homo sapien
tggtgagtggaaagctcttgattgc

SEQ ID NO: 1214501 - DNA, 25 bp, Homo sapien
accctggtgagtggaaagctcttga

SEQ ID NO: 1214502 - DNA, 25 bp, Homo sapien
gagagatgaagaaccctggtgagtg

SEQ ID NO: 1214503 - DNA, 25 bp, Homo sapien
tcagaccgtggccaaacatggagcc

SEQ ID NO: 1214504 - DNA, 25 bp, Homo sapien
aatcctgagacgtctggtgctccct

SEQ ID NO: 1214505 - DNA, 25 bp, Homo sapien
caggtgcttcagaccgtggccaaac

SEQ ID NO: 1214506 - DNA, 25 bp, Homo sapien
tttcccgagaccgacggcggctgtg

SEQ ID NO: 1214507 - DNA, 25 bp, Homo sapien
acatggcgtaggagacgcgatgcat

SEQ ID NO: 1214508 - DNA, 25 bp, Homo sapien
taggagacgcgatgcatctccggag

SEQ ID NO: 1214509 - DNA, 25 bp, Homo sapien
acgcgatgcatctccggagagcgct

SEQ ID NO: 1214510 - DNA, 25 bp, Homo sapien
tcgtgcagggacatggcgtaggaga

SEQ ID NO: 1214511 - DNA, 25 bp, Homo sapien
cccgcttgatggagggccgggagcg

SEQ ID NO: 1214512 - DNA, 25 bp, Homo sapien
tgcaggctggcgccccgcttgatgg

SEQ ID NO: 1214513 - DNA, 25 bp, Homo sapien
gctggcgccccgcttgatggagggc

SEQ ID NO: 1214514 - DNA, 25 bp, Homo sapien
agctactcttggtgcgccggctgct

SEQ ID NO: 1214515 - DNA, 25 bp, Homo sapien
tggggggccttgcgcagcaggtgag

SEQ ID NO: 1214516 - DNA, 25 bp, Homo sapien
ggggccttgcgcagcaggtgagggc

SEQ ID NO: 1214517 - DNA, 25 bp, Homo sapien
ctggggggccttgcgcagcaggtga

SEQ ID NO: 1214518 - DNA, 25 bp, Homo sapien
gggggccttgcgcagcaggtgaggg

SEQ ID NO: 1214519 - DNA, 25 bp, Homo sapien
cttgtccccgatgccttcggcctcc

SEQ ID NO: 1214520 - DNA, 25 bp, Homo sapien
gaagagcggggacggcactggtgct

SEQ ID NO: 1214521 - DNA, 25 bp, Homo sapien
tccccgatgccttcggcctcctcag

SEQ ID NO: 1214522 - DNA, 25 bp, Homo sapien
gcagcagagcagtgtcggtggtgga

SEQ ID NO: 1214523 - DNA, 25 bp, Homo sapien
gctcctccagctctcaatttcacaa

SEQ ID NO: 1214524 - DNA, 25 bp, Homo sapien
gccacgccacccttttagccaacgc

SEQ ID NO: 1214525 - DNA, 25 bp, Homo sapien
tttagccaacgcgtgcagagctcct

SEQ ID NO: 1214526 - DNA, 25 bp, Homo sapien
acgccacccttttagccaacgcgtg

SEQ ID NO: 1214527 - DNA, 25 bp, Homo sapien
gagtgtctgctcattaagggctgaa

SEQ ID NO: 1214528 - DNA, 25 bp, Homo sapien
cattaagggctgaacaacctggttc

SEQ ID NO: 1214529 - DNA, 25 bp, Homo sapien
ttaagggctgaacaacctggttcat

SEQ ID NO: 1214530 - DNA, 25 bp, Homo sapien
ctctacatgcagagtgtctgctcat

SEQ ID NO: 1214531 - DNA, 25 bp, Homo sapien
agggccacgcccattcctggaagga

SEQ ID NO: 1214532 - DNA, 25 bp, Homo sapien
cctggaaggacagctccaggtcagg

SEQ ID NO: 1214533 - DNA, 25 bp, Homo sapien
cagggccacgcccattcctggaagg

SEQ ID NO: 1214534 - DNA, 25 bp, Homo sapien
ggacagctccaggtcaggaaatcta

SEQ ID NO: 1214535 - DNA, 25 bp, Homo sapien
tgctctggtccgaaagccagctggt

SEQ ID NO: 1214536 - DNA, 25 bp, Homo sapien
agctgaggaaatttagctgcctcca

SEQ ID NO: 1214537 - DNA, 25 bp, Homo sapien
gggctgctctggtccgaaagccagc

SEQ ID NO: 1214538 - DNA, 25 bp, Homo sapien
gcctccagggtgtttcggtaactca

SEQ ID NO: 1214539 - DNA, 25 bp, Homo sapien
gcctgctctcaaagtggggcctgtc

SEQ ID NO: 1214540 - DNA, 25 bp, Homo sapien
tgcctgctctcaaagtggggcctgt

SEQ ID NO: 1214541 - DNA, 25 bp, Homo sapien
gcctgtcataagagtcctcctgtcc

SEQ ID NO: 1214542 - DNA, 25 bp, Homo sapien
gtggggcctgtcataagagtcctcc

SEQ ID NO: 1214543 - DNA, 25 bp, Homo sapien
tgggaaatgggctaggggtccaaga

SEQ ID NO: 1214544 - DNA, 25 bp, Homo sapien
caggaggcctctaggttggcctctg

SEQ ID NO: 1214545 - DNA, 25 bp, Homo sapien
aggcctctaggttggcctctggaag

SEQ ID NO: 1214546 - DNA, 25 bp, Homo sapien
aaatgggctaggggtccaagagcct

SEQ ID NO: 1214547 - DNA, 25 bp, Homo sapien
aatttcaggccccaaatgtgctgtg

SEQ ID NO: 1214548 - DNA, 25 bp, Homo sapien
tgaggactcctctttgaaaggctgg

SEQ ID NO: 1214549 - DNA, 25 bp, Homo sapien
aactggagaagtcataggctttagg

SEQ ID NO: 1214550 - DNA, 25 bp, Homo sapien
gtgaaaatctgccagtgaggactcc

SEQ ID NO: 1214551 - DNA, 25 bp, Homo sapien
gggcctgctggatctctctaatggc

SEQ ID NO: 1214552 - DNA, 25 bp, Homo sapien
cacttgagtctggtgaggaactcca

SEQ ID NO: 1214553 - DNA, 25 bp, Homo sapien
tgagcagtgagcagtgtcaccggct

SEQ ID NO: 1214554 - DNA, 25 bp, Homo sapien
tgtcgttcagaaagacatggattct

SEQ ID NO: 1214555 - DNA, 25 bp, Homo sapien
caggaaattctgtgagtggccagca

SEQ ID NO: 1214556 - DNA, 25 bp, Homo sapien
cctccttggacttcatcttgacagt

SEQ ID NO: 1214557 - DNA, 25 bp, Homo sapien
cttggacttcatcttgacagtgcca

SEQ ID NO: 1214558 - DNA, 25 bp, Homo sapien
ggacttcatcttgacagtgccagca

SEQ ID NO: 1214559 - DNA, 25 bp, Homo sapien
aacacccaagataaagcacagatgg

SEQ ID NO: 1214560 - DNA, 25 bp, Homo sapien
aaaacacccaagataaagcacagat

SEQ ID NO: 1214561 - DNA, 25 bp, Homo sapien
cacccaagataaagcacagatggga

SEQ ID NO: 1214562 - DNA, 25 bp, Homo sapien
caaaaacacccaagataaagcacag

SEQ ID NO: 1214563 - DNA, 25 bp, Homo sapien
caggggaattcttctgccctgagat

SEQ ID NO: 1214564 - DNA, 25 bp, Homo sapien
ggacaccaatggccacttctgcact

SEQ ID NO: 1214565 - DNA, 25 bp, Homo sapien
acaccaatggccacttctgcactag

SEQ ID NO: 1214566 - DNA, 25 bp, Homo sapien
gggaattcttctgccctgagatcct

SEQ ID NO: 1214567 - DNA, 25 bp, Homo sapien
ttctctactccaataaccacctgga

SEQ ID NO: 1214568 - DNA, 25 bp, Homo sapien
ggcagtttctctactccaataacca

SEQ ID NO: 1214569 - DNA, 25 bp, Homo sapien
ttccaaggcagtttctctactccaa

SEQ ID NO: 1214570 - DNA, 25 bp, Homo sapien
caaggcagtttctctactccaataa

SEQ ID NO: 1214571 - DNA, 25 bp, Homo sapien
gccccagctgtctgcggactgtgtc

SEQ ID NO: 1214572 - DNA, 25 bp, Homo sapien
ctgtctgcggactgtgtcaggcccc

SEQ ID NO: 1214573 - DNA, 25 bp, Homo sapien
ccgtgccggcgatgaggtacccggg

SEQ ID NO: 1214574 - DNA, 25 bp, Homo sapien
ctgtttcccgaagccgtgccggcga

SEQ ID NO: 1214575 - DNA, 25 bp, Homo sapien
acacacagcacaccccaagcaaggc

SEQ ID NO: 1214576 - DNA, 25 bp, Homo sapien
ttacacacagcacaccccaagcaag

SEQ ID NO: 1214577 - DNA, 25 bp, Homo sapien
gtatttttacacacagcacacccca

SEQ ID NO: 1214578 - DNA, 25 bp, Homo sapien
atttttacacacagcacaccccaag

SEQ ID NO: 1214579 - DNA, 25 bp, Homo sapien
catacaacaacggaagcagcaggaa

SEQ ID NO: 1214580 - DNA, 25 bp, Homo sapien
gcttcccgagtgcatcagggtggca

SEQ ID NO: 1214581 - DNA, 25 bp, Homo sapien
gagtccccagtgtcttatcgccata

SEQ ID NO: 1214582 - DNA, 25 bp, Homo sapien
ggtggcaccaaagtcggagagacaa

SEQ ID NO: 1214583 - DNA, 25 bp, Homo sapien
atccgagaattgggagaggagcatg

SEQ ID NO: 1214584 - DNA, 25 bp, Homo sapien
tatccgagaattgggagaggagcat

SEQ ID NO: 1214585 - DNA, 25 bp, Homo sapien
tccagagtcattggtaaccttttcc

SEQ ID NO: 1214586 - DNA, 25 bp, Homo sapien
cagagtcattggtaaccttttccgc

SEQ ID NO: 1214587 - DNA, 25 bp, Homo sapien
tcattggtaaccttttccgcttcat

SEQ ID NO: 1214588 - DNA, 25 bp, Homo sapien
ctctccagagtcattggtaaccttt

SEQ ID NO: 1214589 - DNA, 25 bp, Homo sapien
tcactaacaacgcagctcagcgggc

SEQ ID NO: 1214590 - DNA, 25 bp, Homo sapien
tgaggaatgagacaaattttctctc

SEQ ID NO: 1214591 - DNA, 25 bp, Homo sapien
agggctgaccgcctacactttgtgc

SEQ ID NO: 1214592 - DNA, 25 bp, Homo sapien
tcataaggctcctgccttgagcagg

SEQ ID NO: 1214593 - DNA, 25 bp, Homo sapien
ccaaaatgcagtctaggcagagctg

SEQ ID NO: 1214594 - DNA, 25 bp, Homo sapien
ggaccataggagtgcccctggatgc

SEQ ID NO: 1214595 - DNA, 25 bp, Homo sapien
gaagacaaccaccacaagagcagta

SEQ ID NO: 1214596 - DNA, 25 bp, Homo sapien
acaagttgttcagggacacacggcc

SEQ ID NO: 1214597 - DNA, 25 bp, Homo sapien
aaacttgttgcggatgaggctggca

SEQ ID NO: 1214598 - DNA, 25 bp, Homo sapien
tacagtgcattggacttagggctcc

SEQ ID NO: 1214599 - DNA, 25 bp, Homo sapien
taggtgtagtccctctgcagctgag

SEQ ID NO: 1214600 - DNA, 25 bp, Homo sapien
cttcaggtgggcgatgttgtcagca

SEQ ID NO: 1214601 - DNA, 25 bp, Homo sapien
agcacttcttaggtgtaggcactgt

SEQ ID NO: 1214602 - DNA, 25 bp, Homo sapien
tctctcccacagttgattcattcat

SEQ ID NO: 1214603 - DNA, 25 bp, Homo sapien
gcaacaacaatagaagctactattt

SEQ ID NO: 1214604 - DNA, 25 bp, Homo sapien
gagagagtgacaccagtcctggctc

SEQ ID NO: 1214605 - DNA, 25 bp, Homo sapien
aagctcagtcaggtcgttgagctgc

SEQ ID NO: 1214606 - DNA, 25 bp, Homo sapien
tcgtcatctcgttctgatgaagctc

SEQ ID NO: 1214607 - DNA, 25 bp, Homo sapien
gcttcaggttcgtcatctcgttctg

SEQ ID NO: 1214608 - DNA, 25 bp, Homo sapien
ctcctgcttcaggttcgtcatctcg

SEQ ID NO: 1214609 - DNA, 25 bp, Homo sapien
tgtcccgtgccctctcataggactg

SEQ ID NO: 1214610 - DNA, 25 bp, Homo sapien
cgtgccctctcataggactggtagg

SEQ ID NO: 1214611 - DNA, 25 bp, Homo sapien
ctggatgtcccgtgccctctcatag

SEQ ID NO: 1214612 - DNA, 25 bp, Homo sapien
tctcataggactggtaggccacctt

SEQ ID NO: 1214613 - DNA, 25 bp, Homo sapien
agaaggtgcctataacgaagtctcc

SEQ ID NO: 1214614 - DNA, 25 bp, Homo sapien
caaatactcatttgcgaagctgcca

SEQ ID NO: 1214615 - DNA, 25 bp, Homo sapien
tgggcaggacccctaggctgaaaac

SEQ ID NO: 1214616 - DNA, 25 bp, Homo sapien
tgacaagaaccctaaccctctggct

SEQ ID NO: 1214617 - DNA, 25 bp, Homo sapien
agttggcgatggtggacacgaacac

SEQ ID NO: 1214618 - DNA, 25 bp, Homo sapien
cgttgatgaacttgcccagcagcgc

SEQ ID NO: 1214619 - DNA, 25 bp, Homo sapien
agctgggcagcaacacgtgctccag

SEQ ID NO: 1214620 - DNA, 25 bp, Homo sapien
ggccatgagcgccaggatcacgttg

SEQ ID NO: 1214621 - DNA, 25 bp, Homo sapien
agcacagggttggtgtggctggcca

SEQ ID NO: 1214622 - DNA, 25 bp, Homo sapien
gagcacagggttggtgtggctggcc

SEQ ID NO: 1214623 - DNA, 25 bp, Homo sapien
gcacagggttggtgtggctggccac

SEQ ID NO: 1214624 - DNA, 25 bp, Homo sapien
agagcacagggttggtgtggctggc

SEQ ID NO: 1214625 - DNA, 25 bp, Homo sapien
ggtgtcagacagaagcaagtacaga

SEQ ID NO: 1214626 - DNA, 25 bp, Homo sapien
aggaggccaaactggacacacaaag

SEQ ID NO: 1214627 - DNA, 25 bp, Homo sapien
gggctgcattctaagctcccttcag

SEQ ID NO: 1214628 - DNA, 25 bp, Homo sapien
gccaaactggacacacaaagaagtc

SEQ ID NO: 1214629 - DNA, 25 bp, Homo sapien
tcctaggaaagttgaggcagagccc

SEQ ID NO: 1214630 - DNA, 25 bp, Homo sapien
tttctcaggaaggtgcacaacagct

SEQ ID NO: 1214631 - DNA, 25 bp, Homo sapien
gaaaaccgtagctatctccgaggtg

SEQ ID NO: 1214632 - DNA, 25 bp, Homo sapien
tagaacccaacagcactctcagagg

SEQ ID NO: 1214633 - DNA, 25 bp, Homo sapien
gaaaggatgtccagttacatttgaa

SEQ ID NO: 1214634 - DNA, 25 bp, Homo sapien
cacaggacatgcttaactaaaaagt

SEQ ID NO: 1214635 - DNA, 25 bp, Homo sapien
tagtataatattacacaggacatgc

SEQ ID NO: 1214636 - DNA, 25 bp, Homo sapien
aagaaaggatgtccagttacatttg

SEQ ID NO: 1214637 - DNA, 25 bp, Homo sapien
gagatattactgttatcttaattcc

SEQ ID NO: 1214638 - DNA, 25 bp, Homo sapien
tgagatattactgttatcttaattc

SEQ ID NO: 1214639 - DNA, 25 bp, Homo sapien
agatattactgttatcttaattcct

SEQ ID NO: 1214640 - DNA, 25 bp, Homo sapien
tccagagattcacggtgtgtgatat

SEQ ID NO: 1214641 - DNA, 25 bp, Homo sapien
aatgcagcagttggaggtataagaa

SEQ ID NO: 1214642 - DNA, 25 bp, Homo sapien
tgaccttctggtctcaattgatgaa

SEQ ID NO: 1214643 - DNA, 25 bp, Homo sapien
tattacaacataccaaatgcagcag

SEQ ID NO: 1214644 - DNA, 25 bp, Homo sapien
atcctccacctcagcgcccccctgc

SEQ ID NO: 1214645 - DNA, 25 bp, Homo sapien
cccccctgctcctccagtagctggg

SEQ ID NO: 1214646 - DNA, 25 bp, Homo sapien
ctccacctcagcgcccccctgctcc

SEQ ID NO: 1214647 - DNA, 25 bp, Homo sapien
cgcccccctgctcctccagtagctg

SEQ ID NO: 1214648 - DNA, 25 bp, Homo sapien
gagtggcttgcaaggattgtttgtc

SEQ ID NO: 1214649 - DNA, 25 bp, Homo sapien
tgccgaggacggagatttgatcatc

SEQ ID NO: 1214650 - DNA, 25 bp, Homo sapien
ccttcctgaagctcgtgaagggtga

SEQ ID NO: 1214651 - DNA, 25 bp, Homo sapien
gtcaagccctgcgagttggtgccga

SEQ ID NO: 1214652 - DNA, 25 bp, Homo sapien
atgggcagccgctggaatctccttg

SEQ ID NO: 1214653 - DNA, 25 bp, Homo sapien
aacagtatgggcagccgctggaatc

SEQ ID NO: 1214654 - DNA, 25 bp, Homo sapien
ctgcctggcacaaacagtatgggca

SEQ ID NO: 1214655 - DNA, 25 bp, Homo sapien
gtatgggcagccgctggaatctcct

SEQ ID NO: 1214656 - DNA, 25 bp, Homo sapien
tctaatttgacaggcaccagaatgg

SEQ ID NO: 1214657 - DNA, 25 bp, Homo sapien
ccatagttgcacagcccggttacaa

SEQ ID NO: 1214658 - DNA, 25 bp, Homo sapien
agacctctgcgatcgtatcacctgg

SEQ ID NO: 1214659 - DNA, 25 bp, Homo sapien
tacaacaaaacgtaggctggaggtc

SEQ ID NO: 1214660 - DNA, 25 bp, Homo sapien
gtccataaattttttcagctcggga

SEQ ID NO: 1214661 - DNA, 25 bp, Homo sapien
gttctgttgtccactagtcgccatt

SEQ ID NO: 1214662 - DNA, 25 bp, Homo sapien
cataaattttttcagctcgggaggg

SEQ ID NO: 1214663 - DNA, 25 bp, Homo sapien
gttgtccactagtcgccatttccac

SEQ ID NO: 1214664 - DNA, 25 bp, Homo sapien
cattccaaggcttctaacatgatga

SEQ ID NO: 1214665 - DNA, 25 bp, Homo sapien
taacatgatgatactatttcctcat

SEQ ID NO: 1214666 - DNA, 25 bp, Homo sapien
ttctaacatgatgatactatttcct

SEQ ID NO: 1214667 - DNA, 25 bp, Homo sapien
ctcattccaaggcttctaacatgat

SEQ ID NO: 1214668 - DNA, 25 bp, Homo sapien
tttgactattacagaagtttattta

SEQ ID NO: 1214669 - DNA, 25 bp, Homo sapien
agagcatgggtttctctgctgacca

SEQ ID NO: 1214670 - DNA, 25 bp, Homo sapien
tacatcatagtaaaacaggacctat

SEQ ID NO: 1214671 - DNA, 25 bp, Homo sapien
aacaggacctatggagagagagcat

SEQ ID NO: 1214672 - DNA, 25 bp, Homo sapien
aaaaattatgaggaggtgttggagc

SEQ ID NO: 1214673 - DNA, 25 bp, Homo sapien
acaagatcgccagcatttacaggac

SEQ ID NO: 1214674 - DNA, 25 bp, Homo sapien
gctaatcagcactgctacaagatcg

SEQ ID NO: 1214675 - DNA, 25 bp, Homo sapien
gtgttggagcaactcgctaatcagc

SEQ ID NO: 1214676 - DNA, 25 bp, Homo sapien
ggaactgccgaaattccatgaagga

SEQ ID NO: 1214677 - DNA, 25 bp, Homo sapien
ggcaggacgtaaggactaaccatgt

SEQ ID NO: 1214678 - DNA, 25 bp, Homo sapien
gacactggcctgacacgttggaact

SEQ ID NO: 1214679 - DNA, 25 bp, Homo sapien
tcacatcatcatttaaggcaggacg

SEQ ID NO: 1214680 - DNA, 25 bp, Homo sapien
agaggcagacgtgggaggatgtctt

SEQ ID NO: 1214681 - DNA, 25 bp, Homo sapien
cgagaggcagacgtgggaggatgtc

SEQ ID NO: 1214682 - DNA, 25 bp, Homo sapien
ccgagctactcgagaggcagacgtg

SEQ ID NO: 1214683 - DNA, 25 bp, Homo sapien
tggtccgagctactcgagaggcaga

SEQ ID NO: 1214684 - DNA, 25 bp, Homo sapien
gaaatatctcttggtgagcatgcca

SEQ ID NO: 1214685 - DNA, 25 bp, Homo sapien
tagacggcaagttaccagtggcccc

SEQ ID NO: 1214686 - DNA, 25 bp, Homo sapien
tctgaaatcttcacagccggcgtca

SEQ ID NO: 1214687 - DNA, 25 bp, Homo sapien
ttgggcctgccataagtcatagtcc

SEQ ID NO: 1214688 - DNA, 25 bp, Homo sapien
tcttgactacccttaattgcaggtg

SEQ ID NO: 1214689 - DNA, 25 bp, Homo sapien
gaaagggtaggaaactgggctctca

SEQ ID NO: 1214690 - DNA, 25 bp, Homo sapien
tctccaagtccagcggtaaggagtc

SEQ ID NO: 1214691 - DNA, 25 bp, Homo sapien
agagaatgccatccctaagcttcag

SEQ ID NO: 1214692 - DNA, 25 bp, Homo sapien
tgagtagtgtttcggaatgtcacct

SEQ ID NO: 1214693 - DNA, 25 bp, Homo sapien
acctctgttaatggggaagcgacac

SEQ ID NO: 1214694 - DNA, 25 bp, Homo sapien
aagcgacacctgtgcacagccggaa

SEQ ID NO: 1214695 - DNA, 25 bp, Homo sapien
tctgctctgtaatgagtagtgtttc

SEQ ID NO: 1214696 - DNA, 25 bp, Homo sapien
cctcagacttatgtgccagggaaga

SEQ ID NO: 1214697 - DNA, 25 bp, Homo sapien
catgtctttacccttttgtatctac

SEQ ID NO: 1214698 - DNA, 25 bp, Homo sapien
ttgtatctacctctcaaccctttgc

SEQ ID NO: 1214699 - DNA, 25 bp, Homo sapien
gcccagcataggtgctaaataaaag

SEQ ID NO: 1214700 - DNA, 25 bp, Homo sapien
gcaacagataccagagcggcccctg

SEQ ID NO: 1214701 - DNA, 25 bp, Homo sapien
ctgcaacagataccagagcggcccc

SEQ ID NO: 1214702 - DNA, 25 bp, Homo sapien
tgcaacagataccagagcggcccct

SEQ ID NO: 1214703 - DNA, 25 bp, Homo sapien
tctccgcttgagtggcttgagtgca

SEQ ID NO: 1214704 - DNA, 25 bp, Homo sapien
tgcacttctgctccctttccatagg

SEQ ID NO: 1214705 - DNA, 25 bp, Homo sapien
aggagtgattcagaccaggccccgg

SEQ ID NO: 1214706 - DNA, 25 bp, Homo sapien
cacgcagggcgctttccttcctttg

SEQ ID NO: 1214707 - DNA, 25 bp, Homo sapien
ctatgcaatctctattgcttgaggg

SEQ ID NO: 1214708 - DNA, 25 bp, Homo sapien
gggtaacccaggacatcctatgcaa

SEQ ID NO: 1214709 - DNA, 25 bp, Homo sapien
tctgggccatgccacattcctcaaa

SEQ ID NO: 1214710 - DNA, 25 bp, Homo sapien
gaagggaggcgcctcatgcttccct

SEQ ID NO: 1214711 - DNA, 25 bp, Homo sapien
tctctgactcactgccccatttttg

SEQ ID NO: 1214712 - DNA, 25 bp, Homo sapien
cctaggagtttgtggtctgcaagcc

SEQ ID NO: 1214713 - DNA, 25 bp, Homo sapien
ctctgatgaaggacattgccaaaat

SEQ ID NO: 1214714 - DNA, 25 bp, Homo sapien
ccaaaattcgagacacctaggagtt

SEQ ID NO: 1214715 - DNA, 25 bp, Homo sapien
taattactgagacgcggtgctaagg

SEQ ID NO: 1214716 - DNA, 25 bp, Homo sapien
aggcgtcgagggcacaccctcctta

SEQ ID NO: 1214717 - DNA, 25 bp, Homo sapien
gctcagctttgttctagaggcgtcg

SEQ ID NO: 1214718 - DNA, 25 bp, Homo sapien
tccttactgggtcacttctcttttg

SEQ ID NO: 1214719 - DNA, 25 bp, Homo sapien
gcagaaaggttgtggtggccccaga

SEQ ID NO: 1214720 - DNA, 25 bp, Homo sapien
ctgaaagctgaccggcggcgggctg

SEQ ID NO: 1214721 - DNA, 25 bp, Homo sapien
cggcggcgggctgcgtcagccgccg

SEQ ID NO: 1214722 - DNA, 25 bp, Homo sapien
ctgaccggcggcgggctgcgtcagc

SEQ ID NO: 1214723 - DNA, 25 bp, Homo sapien
aaagctgaccggcggcgggctgcgt

SEQ ID NO: 1214724 - DNA, 25 bp, Homo sapien
gccccgtgctaacccattgaagaat

SEQ ID NO: 1214725 - DNA, 25 bp, Homo sapien
taaagggaccccgaagatttgtgca

SEQ ID NO: 1214726 - DNA, 25 bp, Homo sapien
taggcttcataattaactcccggag

SEQ ID NO: 1214727 - DNA, 25 bp, Homo sapien
tgtgcattgattgggtacctcggcg

SEQ ID NO: 1214728 - DNA, 25 bp, Homo sapien
tcctccgagtactgagctcggagtt

SEQ ID NO: 1214729 - DNA, 25 bp, Homo sapien
cggattgggagttgaatcgcgtccc

SEQ ID NO: 1214730 - DNA, 25 bp, Homo sapien
ctttctagctgtgcccggaaatcgg

SEQ ID NO: 1214731 - DNA, 25 bp, Homo sapien
tttgttcacaggctgagcccgtgct

SEQ ID NO: 1214732 - DNA, 25 bp, Homo sapien
cggcggcgccgcagcttttgtctcc

SEQ ID NO: 1214733 - DNA, 25 bp, Homo sapien
gctgctccggaatgccggctgaccg

SEQ ID NO: 1214734 - DNA, 25 bp, Homo sapien
ccgggctgcgaggtgcgggcgctta

SEQ ID NO: 1214735 - DNA, 25 bp, Homo sapien
cgcttaggcgcgaagttgcagctcc

SEQ ID NO: 1214736 - DNA, 25 bp, Homo sapien
tcccctagtatcttcgtccccaaga

SEQ ID NO: 1214737 - DNA, 25 bp, Homo sapien
aggaggaaagatactgggatcttcg

SEQ ID NO: 1214738 - DNA, 25 bp, Homo sapien
gaggaaagatactgggatcttcggc

SEQ ID NO: 1214739 - DNA, 25 bp, Homo sapien
tagtatcttcgtccccaagacccaa

SEQ ID NO: 1214740 - DNA, 25 bp, Homo sapien
ggaagctgctttgaaccagagggca

SEQ ID NO: 1214741 - DNA, 25 bp, Homo sapien
taatgagctgtctgccaaggtgggc

SEQ ID NO: 1214742 - DNA, 25 bp, Homo sapien
aaagcaaagatccttagtgccatct

SEQ ID NO: 1214743 - DNA, 25 bp, Homo sapien
aacaatattggactgcagttgaggg

SEQ ID NO: 1214744 - DNA, 25 bp, Homo sapien
tttctcatgagccagttactagcag

SEQ ID NO: 1214745 - DNA, 25 bp, Homo sapien
tctctgcaagctggacgattcactg

SEQ ID NO: 1214746 - DNA, 25 bp, Homo sapien
tacacctgcaaatactactctgggc

SEQ ID NO: 1214747 - DNA, 25 bp, Homo sapien
gctcagaaagagcaacacacaggta

SEQ ID NO: 1214748 - DNA, 25 bp, Homo sapien
ttgggccaattgcaaccatcagaca

SEQ ID NO: 1214749 - DNA, 25 bp, Homo sapien
gaaacagggatgtcatcatctatgt

SEQ ID NO: 1214750 - DNA, 25 bp, Homo sapien
tcttcagcagggacaaagttgggcc

SEQ ID NO: 1214751 - DNA, 25 bp, Homo sapien
gaaggccagtggtcactaaatgagg

SEQ ID NO: 1214752 - DNA, 25 bp, Homo sapien
ccatcctcagagataatgttgctaa

SEQ ID NO: 1214753 - DNA, 25 bp, Homo sapien
taatgttgctaacaagttgttcagc

SEQ ID NO: 1214754 - DNA, 25 bp, Homo sapien
tgttgctaacaagttgttcagcacc

SEQ ID NO: 1214755 - DNA, 25 bp, Homo sapien
cctcagagataatgttgctaacaag

SEQ ID NO: 1214756 - DNA, 25 bp, Homo sapien
ttttccccagtgcaatcagtgagct

SEQ ID NO: 1214757 - DNA, 25 bp, Homo sapien
tggaactcaacctagcgcgaatggt

SEQ ID NO: 1214758 - DNA, 25 bp, Homo sapien
tctcagaagacgttgtgcccatgtg

SEQ ID NO: 1214759 - DNA, 25 bp, Homo sapien
tggtcacattgcatactcaggcgag

SEQ ID NO: 1214760 - DNA, 25 bp, Homo sapien
tacatcccagagagcagagggctcc

SEQ ID NO: 1214761 - DNA, 25 bp, Homo sapien
acatcccagagagcagagggctcca

SEQ ID NO: 1214762 - DNA, 25 bp, Homo sapien
ttacatcccagagagcagagggctc

SEQ ID NO: 1214763 - DNA, 25 bp, Homo sapien
catcccagagagcagagggctccat

SEQ ID NO: 1214764 - DNA, 25 bp, Homo sapien
gctggcacaaatggttctaaaacac

SEQ ID NO: 1214765 - DNA, 25 bp, Homo sapien
aatacttgcgaatggactttgtgaa

SEQ ID NO: 1214766 - DNA, 25 bp, Homo sapien
cacttggccaccgtggtagggccat

SEQ ID NO: 1214767 - DNA, 25 bp, Homo sapien
tggtagggccatagattccatgaga

SEQ ID NO: 1214768 - DNA, 25 bp, Homo sapien
cctggagcggaggactcgggtgtgc

SEQ ID NO: 1214769 - DNA, 25 bp, Homo sapien
gggagggccctggttggatctgccg

SEQ ID NO: 1214770 - DNA, 25 bp, Homo sapien
cctggttggatctgccgaggagaga

SEQ ID NO: 1214771 - DNA, 25 bp, Homo sapien
ggaggactcgggtgtgctcatcaga

SEQ ID NO: 1214772 - DNA, 25 bp, Homo sapien
gatgctctacccactgagctctccg

SEQ ID NO: 1214773 - DNA, 25 bp, Homo sapien
ctctacccactgagctctccgggct

SEQ ID NO: 1214774 - DNA, 25 bp, Homo sapien
tgctctacccactgagctctccggg

SEQ ID NO: 1214775 - DNA, 25 bp, Homo sapien
tgcccgaacgaggacttgaaccctg

SEQ ID NO: 1214776 - DNA, 25 bp, Homo sapien
atacagcttcgcaggcacacctggg

SEQ ID NO: 1214777 - DNA, 25 bp, Homo sapien
cccacatacagcttcgcaggcacac

SEQ ID NO: 1214778 - DNA, 25 bp, Homo sapien
catacagcttcgcaggcacacctgg

SEQ ID NO: 1214779 - DNA, 25 bp, Homo sapien
cacatacagcttcgcaggcacacct

SEQ ID NO: 1214780 - DNA, 25 bp, Homo sapien
aggataagggtcatgggccacaggt

SEQ ID NO: 1214781 - DNA, 25 bp, Homo sapien
gaggataagggtcatgggccacagg

SEQ ID NO: 1214782 - DNA, 25 bp, Homo sapien
ctggcacttcctgcggccgactgtg

SEQ ID NO: 1214783 - DNA, 25 bp, Homo sapien
acttcctgcggccgactgtgacaat

SEQ ID NO: 1214784 - DNA, 25 bp, Homo sapien
gtgctggcacttcctgcggccgact

SEQ ID NO: 1214785 - DNA, 25 bp, Homo sapien
tgtgctggcacttcctgcggccgac

SEQ ID NO: 1214786 - DNA, 25 bp, Homo sapien
gtgtgaggcaagctgaaggatgggt

SEQ ID NO: 1214787 - DNA, 25 bp, Homo sapien
gaggtgaggtgtgaggcaagctgaa

SEQ ID NO: 1214788 - DNA, 25 bp, Homo sapien
tgttgaggtgaggtgtgaggcaagc

SEQ ID NO: 1214789 - DNA, 25 bp, Homo sapien
agatgttgaggtgaggtgtgaggca

SEQ ID NO: 1214790 - DNA, 25 bp, Homo sapien
atccactgacccctgagaagcatcg

SEQ ID NO: 1214791 - DNA, 25 bp, Homo sapien
tgttctcagactcctattcccaggg

SEQ ID NO: 1214792 - DNA, 25 bp, Homo sapien
gggcccaggcgtttgctaaattggc

SEQ ID NO: 1214793 - DNA, 25 bp, Homo sapien
ggcagttttgacccatccactgacc

SEQ ID NO: 1214794 - DNA, 25 bp, Homo sapien
ttggggtgcttcaaaagcagcaggc

SEQ ID NO: 1214795 - DNA, 25 bp, Homo sapien
gaatttggggtgcttcaaaagcagc

SEQ ID NO: 1214796 - DNA, 25 bp, Homo sapien
ctagggacagtgaatttggggtgct

SEQ ID NO: 1214797 - DNA, 25 bp, Homo sapien
gtgcttcaaaagcagcaggcccagg

SEQ ID NO: 1214798 - DNA, 25 bp, Homo sapien
gagaaaatcgtgcaagcaggcgagt

SEQ ID NO: 1214799 - DNA, 25 bp, Homo sapien
ctgagagaaaatcgtgcaagcaggc

SEQ ID NO: 1214800 - DNA, 25 bp, Homo sapien
aaaatcgtgcaagcaggcgagttta

SEQ ID NO: 1214801 - DNA, 25 bp, Homo sapien
tgagagaaaatcgtgcaagcaggcg

SEQ ID NO: 1214802 - DNA, 25 bp, Homo sapien
tctgagttctctggtcgtcccgcct

SEQ ID NO: 1214803 - DNA, 25 bp, Homo sapien
ccagccgctggatcttgatagggaa

SEQ ID NO: 1214804 - DNA, 25 bp, Homo sapien
ctggatcttgatagggaaggacaga

SEQ ID NO: 1214805 - DNA, 25 bp, Homo sapien
tggtcgtcccgcctgggcagcttgg

SEQ ID NO: 1214806 - DNA, 25 bp, Homo sapien
agctggtgggactggctgcacagca

SEQ ID NO: 1214807 - DNA, 25 bp, Homo sapien
gtgacttctctaatgacaagctggt

SEQ ID NO: 1214808 - DNA, 25 bp, Homo sapien
agtggtgacttctctaatgacaagc

SEQ ID NO: 1214809 - DNA, 25 bp, Homo sapien
acaagctggtgggactggctgcaca

SEQ ID NO: 1214810 - DNA, 25 bp, Homo sapien
ccaacctcgtggaggcacccgccgc

SEQ ID NO: 1214811 - DNA, 25 bp, Homo sapien
gttcctgctccataattaaacacaa

SEQ ID NO: 1214812 - DNA, 25 bp, Homo sapien
ccaagttcctgctccataattaaac

SEQ ID NO: 1214813 - DNA, 25 bp, Homo sapien
caagttcctgctccataattaaaca

SEQ ID NO: 1214814 - DNA, 25 bp, Homo sapien
tggctgaccgggaaagaccttgctc

SEQ ID NO: 1214815 - DNA, 25 bp, Homo sapien
ctgaccgggaaagaccttgctcagg

SEQ ID NO: 1214816 - DNA, 25 bp, Homo sapien
tgggcctggagacaagtgctctgga

SEQ ID NO: 1214817 - DNA, 25 bp, Homo sapien
tgttggatgggcctggagacaagtg

SEQ ID NO: 1214818 - DNA, 25 bp, Homo sapien
ggtagcccttgaggagccagttgaa

SEQ ID NO: 1214819 - DNA, 25 bp, Homo sapien
tcaatatctgccatgggccaagcac

SEQ ID NO: 1214820 - DNA, 25 bp, Homo sapien
aagacttttagaaatgctccagagg

SEQ ID NO: 1214821 - DNA, 25 bp, Homo sapien
ttactcaatatctgccatgggccaa

SEQ ID NO: 1214822 - DNA, 25 bp, Homo sapien
ctgctccggaaaggtgagcagttcc

SEQ ID NO: 1214823 - DNA, 25 bp, Homo sapien
agagaagctgcaacctgagctggcc

SEQ ID NO: 1214824 - DNA, 25 bp, Homo sapien
gaagctgcaacctgagctggccgag

SEQ ID NO: 1214825 - DNA, 25 bp, Homo sapien
gctccggaaaggtgagcagttcccc

SEQ ID NO: 1214826 - DNA, 25 bp, Homo sapien
ttgctccttatacccggcgccgcgg

SEQ ID NO: 1214827 - DNA, 25 bp, Homo sapien
ctttgctccttatacccggcgccgc

SEQ ID NO: 1214828 - DNA, 25 bp, Homo sapien
cttcctcccaggcgcaccgcccgcg

SEQ ID NO: 1214829 - DNA, 25 bp, Homo sapien
caggcgcaccgcccgcgggactcac

SEQ ID NO: 1214830 - DNA, 25 bp, Homo sapien
ttacgagtggcctttcgagggcacc

SEQ ID NO: 1214831 - DNA, 25 bp, Homo sapien
aacctctcgcctcagggcaaaagca

SEQ ID NO: 1214832 - DNA, 25 bp, Homo sapien
gggtctgagattgcaaaataaccct

SEQ ID NO: 1214833 - DNA, 25 bp, Homo sapien
gcgcctttaagagccgttccgctta

SEQ ID NO: 1214834 - DNA, 25 bp, Homo sapien
ctggtcctgggcgtacagaacatcc

SEQ ID NO: 1214835 - DNA, 25 bp, Homo sapien
caaggagcccttctgtcagttctgg

SEQ ID NO: 1214836 - DNA, 25 bp, Homo sapien
gctaaagctggtctgcactctctga

SEQ ID NO: 1214837 - DNA, 25 bp, Homo sapien
agaacatcccagatcagagaccaga

SEQ ID NO: 1214838 - DNA, 25 bp, Homo sapien
tagggcaggtgcactactcaggctc

SEQ ID NO: 1214839 - DNA, 25 bp, Homo sapien
ctcaggctcagatgttggccttgac

SEQ ID NO: 1214840 - DNA, 25 bp, Homo sapien
tgtgtggctccacttcagtcctact

SEQ ID NO: 1214841 - DNA, 25 bp, Homo sapien
tatcactcagggaagattctcagag

SEQ ID NO: 1214842 - DNA, 25 bp, Homo sapien
gctttctgatgatgtcgcttgccca

SEQ ID NO: 1214843 - DNA, 25 bp, Homo sapien
gaacacacggtgtctagccttgctc

SEQ ID NO: 1214844 - DNA, 25 bp, Homo sapien
gaaatgaggatagccaggcctgcag

SEQ ID NO: 1214845 - DNA, 25 bp, Homo sapien
gccttccgggagcaatttgggcaaa

SEQ ID NO: 1214846 - DNA, 25 bp, Homo sapien
tccgtggctctgtgcaatgtctcag

SEQ ID NO: 1214847 - DNA, 25 bp, Homo sapien
tcctccgtggctctgtgcaatgtct

SEQ ID NO: 1214848 - DNA, 25 bp, Homo sapien
ctccgtggctctgtgcaatgtctca

SEQ ID NO: 1214849 - DNA, 25 bp, Homo sapien
cgtggctctgtgcaatgtctcaggc

SEQ ID NO: 1214850 - DNA, 25 bp, Homo sapien
aagagtgcatcagagctggccagct

SEQ ID NO: 1214851 - DNA, 25 bp, Homo sapien
caaggcccgtaaactgaatgtcagc

SEQ ID NO: 1214852 - DNA, 25 bp, Homo sapien
cacccttgggacatgattgggtcca

SEQ ID NO: 1214853 - DNA, 25 bp, Homo sapien
tgacacctgaaggtctctgctctgg

SEQ ID NO: 1214854 - DNA, 25 bp, Homo sapien
tcttcaatggtctcagtgcggggca

SEQ ID NO: 1214855 - DNA, 25 bp, Homo sapien
aattgctccgtgaattcagccaagg

SEQ ID NO: 1214856 - DNA, 25 bp, Homo sapien
ctgacagggagaaacggcgcttaaa

SEQ ID NO: 1214857 - DNA, 25 bp, Homo sapien
tcattccgccggttgtggagctggt

SEQ ID NO: 1214858 - DNA, 25 bp, Homo sapien
ctgccaagaggaccgagctgcaagt

SEQ ID NO: 1214859 - DNA, 25 bp, Homo sapien
ggagaaggtgctgcactcctgcggg

SEQ ID NO: 1214860 - DNA, 25 bp, Homo sapien
ggtgctgcactcctgcggggggtct

SEQ ID NO: 1214861 - DNA, 25 bp, Homo sapien
ttggggagaaggtgctgcactcctg

SEQ ID NO: 1214862 - DNA, 25 bp, Homo sapien
gaaggtgctgcactcctgcgggggg

SEQ ID NO: 1214863 - DNA, 25 bp, Homo sapien
aagcggcgctggttctgccgccgct

SEQ ID NO: 1214864 - DNA, 25 bp, Homo sapien
cgctggttctgccgccgctggaact

SEQ ID NO: 1214865 - DNA, 25 bp, Homo sapien
ggaactgcacgccaggggagagctg

SEQ ID NO: 1214866 - DNA, 25 bp, Homo sapien
cgctggaactgcacgccaggggaga

SEQ ID NO: 1214867 - DNA, 25 bp, Homo sapien
tgcacacccttgtgcgtgcatcctg

SEQ ID NO: 1214868 - DNA, 25 bp, Homo sapien
aaagtctggctgtaaggcagctgcc

SEQ ID NO: 1214869 - DNA, 25 bp, Homo sapien
cacctgccggggcagagctccagag

SEQ ID NO: 1214870 - DNA, 25 bp, Homo sapien
ccggggcagagctccagaggccctt

SEQ ID NO: 1214871 - DNA, 25 bp, Homo sapien
tttaaagacaaggagaccatggtgc

SEQ ID NO: 1214872 - DNA, 25 bp, Homo sapien
ttaaagacaaggagaccatggtgca

SEQ ID NO: 1214873 - DNA, 25 bp, Homo sapien
taaagacaaggagaccatggtgcac

SEQ ID NO: 1214874 - DNA, 25 bp, Homo sapien
ggcggatatccatgggcagagagag

SEQ ID NO: 1214875 - DNA, 25 bp, Homo sapien
ggctgagcggcttgggcagatctgg

SEQ ID NO: 1214876 - DNA, 25 bp, Homo sapien
cgggacatgcggctgagcggcttgg

SEQ ID NO: 1214877 - DNA, 25 bp, Homo sapien
gggcaggcggatatccatgggcaga

SEQ ID NO: 1214878 - DNA, 25 bp, Homo sapien
cagtttcacgtatgtttccagtttc

SEQ ID NO: 1214879 - DNA, 25 bp, Homo sapien
ctcccagtttgtccagtttcacgta

SEQ ID NO: 1214880 - DNA, 25 bp, Homo sapien
tgtccagtttcacgtatgtttccag

SEQ ID NO: 1214881 - DNA, 25 bp, Homo sapien
agtttgtccagtttcacgtatgttt

SEQ ID NO: 1214882 - DNA, 25 bp, Homo sapien
gtgctccagccggatctctttcagg

SEQ ID NO: 1214883 - DNA, 25 bp, Homo sapien
ccgtcagtttgctgcgccctttgaa

SEQ ID NO: 1214884 - DNA, 25 bp, Homo sapien
ctttgaagactgtggcataggtgcc

SEQ ID NO: 1214885 - DNA, 25 bp, Homo sapien
ttcagggccacaaggttctccgtca

SEQ ID NO: 1214886 - DNA, 25 bp, Homo sapien
gatgaggtcatgcagggtcacaata

SEQ ID NO: 1214887 - DNA, 25 bp, Homo sapien
gggtgagggaccgatctgtgtggat

SEQ ID NO: 1214888 - DNA, 25 bp, Homo sapien
ggtcacaatattggcgtgcttcagg

SEQ ID NO: 1214889 - DNA, 25 bp, Homo sapien
cgatctgtgtggatgaggtcatgca

SEQ ID NO: 1214890 - DNA, 25 bp, Homo sapien
ttccaccacaagagggagaggcggc

SEQ ID NO: 1214891 - DNA, 25 bp, Homo sapien
cccgtttccaccacaagagggagag

SEQ ID NO: 1214892 - DNA, 25 bp, Homo sapien
tttccaccacaagagggagaggcgg

SEQ ID NO: 1214893 - DNA, 25 bp, Homo sapien
cgtttccaccacaagagggagaggc

SEQ ID NO: 1214894 - DNA, 25 bp, Homo sapien
tggaacacagagcgtggctcagtcc

SEQ ID NO: 1214895 - DNA, 25 bp, Homo sapien
ggaacacagagcgtggctcagtcct

SEQ ID NO: 1214896 - DNA, 25 bp, Homo sapien
ctggaacacagagcgtggctcagtc

SEQ ID NO: 1214897 - DNA, 25 bp, Homo sapien
gttgtgcatgctcatgaggttccca

SEQ ID NO: 1214898 - DNA, 25 bp, Homo sapien
tgtgcatgctcatgaggttcccaca

SEQ ID NO: 1214899 - DNA, 25 bp, Homo sapien
gacgttgtgcatgctcatgaggttc

SEQ ID NO: 1214900 - DNA, 25 bp, Homo sapien
gcatgctcatgaggttcccacagtg

SEQ ID NO: 1214901 - DNA, 25 bp, Homo sapien
ccctggtggtgagagtgggtcccca

SEQ ID NO: 1214902 - DNA, 25 bp, Homo sapien
ctggtggtgagagtgggtccccaca

SEQ ID NO: 1214903 - DNA, 25 bp, Homo sapien
cctggtggtgagagtgggtccccac

SEQ ID NO: 1214904 - DNA, 25 bp, Homo sapien
gagaggtcattcataaccccgagct

SEQ ID NO: 1214905 - DNA, 25 bp, Homo sapien
caggatgcccgcctatgtggagaca

SEQ ID NO: 1214906 - DNA, 25 bp, Homo sapien
cagcgaagtctcagtcaggagcacg

SEQ ID NO: 1214907 - DNA, 25 bp, Homo sapien
ggcaggtagctcacactcccatttg

SEQ ID NO: 1214908 - DNA, 25 bp, Homo sapien
tcttgcggtggtgacagtaggcgag

SEQ ID NO: 1214909 - DNA, 25 bp, Homo sapien
gtgcaggatcttgcggtggtgacag

SEQ ID NO: 1214910 - DNA, 25 bp, Homo sapien
caggatcttgcggtggtgacagtag

SEQ ID NO: 1214911 - DNA, 25 bp, Homo sapien
gtggtgacagtaggcgaggccccgg

SEQ ID NO: 1214912 - DNA, 25 bp, Homo sapien
tcggggggcctgtaccacagggtca

SEQ ID NO: 1214913 - DNA, 25 bp, Homo sapien
tctttgtgggcactgacttggccct

SEQ ID NO: 1214914 - DNA, 25 bp, Homo sapien
tcccagcagcacatcggggggcctg

SEQ ID NO: 1214915 - DNA, 25 bp, Homo sapien
gggtggagtactctgtggatcccag

SEQ ID NO: 1214916 - DNA, 25 bp, Homo sapien
ttcactctgtgaggaaagtcccctt

SEQ ID NO: 1214917 - DNA, 25 bp, Homo sapien
agtggaggctcctagaactgcccag

SEQ ID NO: 1214918 - DNA, 25 bp, Homo sapien
cattcataaccaccggcggcttggc

SEQ ID NO: 1214919 - DNA, 25 bp, Homo sapien
tgccccactggaagagaagtacata

SEQ ID NO: 1214920 - DNA, 25 bp, Homo sapien
cgaggaggcgaaagatgaggtgcag

SEQ ID NO: 1214921 - DNA, 25 bp, Homo sapien
tctcgtagtggatgcagcccacgcc

SEQ ID NO: 1214922 - DNA, 25 bp, Homo sapien
tccctgtggccatctcgtagtggat

SEQ ID NO: 1214923 - DNA, 25 bp, Homo sapien
aggcgaaagatgaggtgcagctcct

SEQ ID NO: 1214924 - DNA, 25 bp, Homo sapien
ccagggccaaggccgacttgaaagg

SEQ ID NO: 1214925 - DNA, 25 bp, Homo sapien
acgccgggccacgtctcttctgtgg

SEQ ID NO: 1214926 - DNA, 25 bp, Homo sapien
tcagagaaggcggtcacgccgggcc

SEQ ID NO: 1214927 - DNA, 25 bp, Homo sapien
gcgtggttgatgagcggctgcggga

SEQ ID NO: 1214928 - DNA, 25 bp, Homo sapien
gggaagctgtaggtgcggaactcag

SEQ ID NO: 1214929 - DNA, 25 bp, Homo sapien
agaaggcgcggacacaggctgtgcc

SEQ ID NO: 1214930 - DNA, 25 bp, Homo sapien
gagaaggcgcggacacaggctgtgc

SEQ ID NO: 1214931 - DNA, 25 bp, Homo sapien
gaggtggatgccatccgtatccaac

SEQ ID NO: 1214932 - DNA, 25 bp, Homo sapien
ggaggtggatgccatccgtatccaa

SEQ ID NO: 1214933 - DNA, 25 bp, Homo sapien
agatgtttcaaagacgtgtaagcac

SEQ ID NO: 1214934 - DNA, 25 bp, Homo sapien
gatgtgtatggaggccaccccttgg

SEQ ID NO: 1214935 - DNA, 25 bp, Homo sapien
gtgtaagcacacgagccacagaagt

SEQ ID NO: 1214936 - DNA, 25 bp, Homo sapien
actccagaggatgtgtatggaggcc

SEQ ID NO: 1214937 - DNA, 25 bp, Homo sapien
catccgtaacaggaagcgtagtgcc

SEQ ID NO: 1214938 - DNA, 25 bp, Homo sapien
cactaagtgtgtcccgtcatctcaa

SEQ ID NO: 1214939 - DNA, 25 bp, Homo sapien
gcttgaggctaacaggagaagcccc

SEQ ID NO: 1214940 - DNA, 25 bp, Homo sapien
gcgtagtgccgataacaacccttca

SEQ ID NO: 1214941 - DNA, 25 bp, Homo sapien
agcctctgctgacatgcgactcttg

SEQ ID NO: 1214942 - DNA, 25 bp, Homo sapien
acacgctctcccagagaccggaagt

SEQ ID NO: 1214943 - DNA, 25 bp, Homo sapien
tgtcttcaagctggtgcacacgctc

SEQ ID NO: 1214944 - DNA, 25 bp, Homo sapien
cggaagtaggagtgactcagggcag

SEQ ID NO: 1214945 - DNA, 25 bp, Homo sapien
agctggcctccagtaaggactggcc

SEQ ID NO: 1214946 - DNA, 25 bp, Homo sapien
ctgtttgccccctcaatttggaatg

SEQ ID NO: 1214947 - DNA, 25 bp, Homo sapien
gaagtgcatagtctggagagggctg

SEQ ID NO: 1214948 - DNA, 25 bp, Homo sapien
tccagtaaggactggcccagaagga

SEQ ID NO: 1214949 - DNA, 25 bp, Homo sapien
cctgggtccttctggagctggatct

SEQ ID NO: 1214950 - DNA, 25 bp, Homo sapien
tgggtccttctggagctggatctcc

SEQ ID NO: 1214951 - DNA, 25 bp, Homo sapien
ctgggtccttctggagctggatctc

SEQ ID NO: 1214952 - DNA, 25 bp, Homo sapien
gggtccttctggagctggatctcct

SEQ ID NO: 1214953 - DNA, 25 bp, Homo sapien
tcagaagatgctctgccgcctgttc

SEQ ID NO: 1214954 - DNA, 25 bp, Homo sapien
tccaagggcagtgagtacggtacca

SEQ ID NO: 1214955 - DNA, 25 bp, Homo sapien
gatcagcccagtgttgaggagacct

SEQ ID NO: 1214956 - DNA, 25 bp, Homo sapien
gactaccaaactggcactaggcagg

SEQ ID NO: 1214957 - DNA, 25 bp, Homo sapien
aaagatgaaacgtgtgtgggctcca

SEQ ID NO: 1214958 - DNA, 25 bp, Homo sapien
tgtattcgaggtctgcagcaattct

SEQ ID NO: 1214959 - DNA, 25 bp, Homo sapien
cagcagcaggaggtgtattcgaggt

SEQ ID NO: 1214960 - DNA, 25 bp, Homo sapien
gaggtctgcagcaattcttgcagag

SEQ ID NO: 1214961 - DNA, 25 bp, Homo sapien
gaggtgtattcgaggtctgcagcaa

SEQ ID NO: 1214962 - DNA, 25 bp, Homo sapien
gggttgtgtccagatcaaaggtggg

SEQ ID NO: 1214963 - DNA, 25 bp, Homo sapien
ctttgggagctgtgtatgatgtgtt

SEQ ID NO: 1214964 - DNA, 25 bp, Homo sapien
gtgggttgtgtccagatcaaaggtg

SEQ ID NO: 1214965 - DNA, 25 bp, Homo sapien
ctggacaccgaactggacaacagca

SEQ ID NO: 1214966 - DNA, 25 bp, Homo sapien
tccttataggggctgacatctccta

SEQ ID NO: 1214967 - DNA, 25 bp, Homo sapien
ccatcaccctccttataggggctga

SEQ ID NO: 1214968 - DNA, 25 bp, Homo sapien
ggctgacatctcctatttgaccctc

SEQ ID NO: 1214969 - DNA, 25 bp, Homo sapien
cacctgggggatccttcctctccct

SEQ ID NO: 1214970 - DNA, 25 bp, Homo sapien
tggtgcccaatgatgcttttagttg

SEQ ID NO: 1214971 - DNA, 25 bp, Homo sapien
gcccaatgatgcttttagttggcag

SEQ ID NO: 1214972 - DNA, 25 bp, Homo sapien
ccaatgatgcttttagttggcagat

SEQ ID NO: 1214973 - DNA, 25 bp, Homo sapien
ggccctggtgcccaatgatgctttt

SEQ ID NO: 1214974 - DNA, 25 bp, Homo sapien
tatcctgggtactgaaaacagagcc

SEQ ID NO: 1214975 - DNA, 25 bp, Homo sapien
gtttgcgtcacatcaccaggaaggg

SEQ ID NO: 1214976 - DNA, 25 bp, Homo sapien
gaaaagattatcctagccgcctctg

SEQ ID NO: 1214977 - DNA, 25 bp, Homo sapien
gggccgcccactgagtaatacctag

SEQ ID NO: 1214978 - DNA, 25 bp, Homo sapien
ggtgtgagtaccggacctggaccca

SEQ ID NO: 1214979 - DNA, 25 bp, Homo sapien
acaggtgtgagtaccggacctggac

SEQ ID NO: 1214980 - DNA, 25 bp, Homo sapien
caggtgtgagtaccggacctggacc

SEQ ID NO: 1214981 - DNA, 25 bp, Homo sapien
tgtgagtaccggacctggacccagg

SEQ ID NO: 1214982 - DNA, 25 bp, Homo sapien
ttccagcaagttcctaatgtagcag

SEQ ID NO: 1214983 - DNA, 25 bp, Homo sapien
gctatgagcctagcagtgaggccca

SEQ ID NO: 1214984 - DNA, 25 bp, Homo sapien
tgaggcccaactcagtttacaaggc

SEQ ID NO: 1214985 - DNA, 25 bp, Homo sapien
tacaaggcttgcaaaccaggtaggt

SEQ ID NO: 1214986 - DNA, 25 bp, Homo sapien
ggagcccattgatggcattgcctag

SEQ ID NO: 1214987 - DNA, 25 bp, Homo sapien
cattgatggcattgcctagagccac

SEQ ID NO: 1214988 - DNA, 25 bp, Homo sapien
gcgctgttcattcggagctgcggca

SEQ ID NO: 1214989 - DNA, 25 bp, Homo sapien
tcctggcagcacaagcccgcgctgt

SEQ ID NO: 1214990 - DNA, 25 bp, Homo sapien
gctggaagtcttggacatctggctc

SEQ ID NO: 1214991 - DNA, 25 bp, Homo sapien
gtcttggacatctggctccattttc

SEQ ID NO: 1214992 - DNA, 25 bp, Homo sapien
cagccagggagaaacttggatgtgg

SEQ ID NO: 1214993 - DNA, 25 bp, Homo sapien
aacttggatgtggagggcacacagc

SEQ ID NO: 1214994 - DNA, 25 bp, Homo sapien
tcctaatctggctgtcgttgctttc

SEQ ID NO: 1214995 - DNA, 25 bp, Homo sapien
gatacttcctaatctggctgtcgtt

SEQ ID NO: 1214996 - DNA, 25 bp, Homo sapien
aatctggctgtcgttgctttcatcc

SEQ ID NO: 1214997 - DNA, 25 bp, Homo sapien
tggctgtcgttgctttcatccttat

SEQ ID NO: 1214998 - DNA, 25 bp, Homo sapien
gacctttgcttcctcacctccaaat

SEQ ID NO: 1214999 - DNA, 25 bp, Homo sapien
acctttgcttcctcacctccaaatg

SEQ ID NO: 1215000 - DNA, 25 bp, Homo sapien
agacctttgcttcctcacctccaaa

SEQ ID NO: 1215001 - DNA, 25 bp, Homo sapien
cggagtgtcgccttttttgcccagg

SEQ ID NO: 1215002 - DNA, 25 bp, Homo sapien
ttatagagacggagtgtcgcctttt

SEQ ID NO: 1215003 - DNA, 25 bp, Homo sapien
cagtggcgtgaccactgcttactac

SEQ ID NO: 1215004 - DNA, 25 bp, Homo sapien
tggcgtgaccactgcttactacacc

SEQ ID NO: 1215005 - DNA, 25 bp, Homo sapien
cttgtctctttttcatgctaaggtc

SEQ ID NO: 1215006 - DNA, 25 bp, Homo sapien
tgtccttgtttagggatgtaacacc

SEQ ID NO: 1215007 - DNA, 25 bp, Homo sapien
aatctatctgacaaatgcctgaaat

SEQ ID NO: 1215008 - DNA, 25 bp, Homo sapien
ccagtagttcacacttattctctga

SEQ ID NO: 1215009 - DNA, 25 bp, Homo sapien
gactctggtgtcctacctgaatcag

SEQ ID NO: 1215010 - DNA, 25 bp, Homo sapien
cctgcaagggatttcatgactctgg

SEQ ID NO: 1215011 - DNA, 25 bp, Homo sapien
gaacagaagagcttacagtccccta

SEQ ID NO: 1215012 - DNA, 25 bp, Homo sapien
tcatctatggccacaaaaggtctgc

SEQ ID NO: 1215013 - DNA, 25 bp, Homo sapien
cagataccaatatctgataagaaca

SEQ ID NO: 1215014 - DNA, 25 bp, Homo sapien
agataccaatatctgataagaacag

SEQ ID NO: 1215015 - DNA, 25 bp, Homo sapien
ggctcgcggatctggtcccggcgag

SEQ ID NO: 1215016 - DNA, 25 bp, Homo sapien
gtgcccgagtgccgcccgcgggagg

SEQ ID NO: 1215017 - DNA, 25 bp, Homo sapien
tctggtcccggcgagcccggtgccc

SEQ ID NO: 1215018 - DNA, 25 bp, Homo sapien
aggctgacgggctcgcggatctggt

SEQ ID NO: 1215019 - DNA, 25 bp, Homo sapien
tgcacaggccgaagctgaagaagac

SEQ ID NO: 1215020 - DNA, 25 bp, Homo sapien
gaagaagacgctccagtaggtgagc

SEQ ID NO: 1215021 - DNA, 25 bp, Homo sapien
tgagcgtgggctgcaggttgcggcg

SEQ ID NO: 1215022 - DNA, 25 bp, Homo sapien
caggaaggcgatgcacaggccgaag

SEQ ID NO: 1215023 - DNA, 25 bp, Homo sapien
gggcagcgagctgtgcgtctgacag

SEQ ID NO: 1215024 - DNA, 25 bp, Homo sapien
tgctgcgagaagaagacccaggaga

SEQ ID NO: 1215025 - DNA, 25 bp, Homo sapien
tgcgagaagaagacccaggagatct

SEQ ID NO: 1215026 - DNA, 25 bp, Homo sapien
ctgtgcgtctgacagcgcaggtcca

SEQ ID NO: 1215027 - DNA, 25 bp, Homo sapien
atcactttgacctggccttgccttg

SEQ ID NO: 1215028 - DNA, 25 bp, Homo sapien
atacatgatcactttgacctggcct

SEQ ID NO: 1215029 - DNA, 25 bp, Homo sapien
tggccttgccttgagcacctgttct

SEQ ID NO: 1215030 - DNA, 25 bp, Homo sapien
catgatcactttgacctggccttgc

SEQ ID NO: 1215031 - DNA, 25 bp, Homo sapien
agcaccttcacgtcgcggcagaagg

SEQ ID NO: 1215032 - DNA, 25 bp, Homo sapien
tgttggccacggtgtcgatgcagcc

SEQ ID NO: 1215033 - DNA, 25 bp, Homo sapien
ggtacatccttaccagctgcatgtt

SEQ ID NO: 1215034 - DNA, 25 bp, Homo sapien
ggaagacggccgagtccttctggta

SEQ ID NO: 1215035 - DNA, 25 bp, Homo sapien
tggccgtgctattggcaggcaagca

SEQ ID NO: 1215036 - DNA, 25 bp, Homo sapien
gcttggcatctacgtggtgctggcc

SEQ ID NO: 1215037 - DNA, 25 bp, Homo sapien
cctgggaacgtctggttggaccaag

SEQ ID NO: 1215038 - DNA, 25 bp, Homo sapien
cagaaggcataggacactcgggtcc

SEQ ID NO: 1215039 - DNA, 25 bp, Homo sapien
atcagcacagccatgggcactggaa

SEQ ID NO: 1215040 - DNA, 25 bp, Homo sapien
tctcaggaggctgtgtctccaaggc

SEQ ID NO: 1215041 - DNA, 25 bp, Homo sapien
taggtgtgactgaaactttgggggc

SEQ ID NO: 1215042 - DNA, 25 bp, Homo sapien
agcaggtcagcagccgctccttgga

SEQ ID NO: 1215043 - DNA, 25 bp, Homo sapien
tgaacagtaccagggcgcccgtgat

SEQ ID NO: 1215044 - DNA, 25 bp, Homo sapien
aacccatccgtcatgaacagtacca

SEQ ID NO: 1215045 - DNA, 25 bp, Homo sapien
cgcccgtgatgtggatggcaaagaa

SEQ ID NO: 1215046 - DNA, 25 bp, Homo sapien
tggcaaagaaggaataaggggctcc

SEQ ID NO: 1215047 - DNA, 25 bp, Homo sapien
agaggagccggcccagtgtgatgaa

SEQ ID NO: 1215048 - DNA, 25 bp, Homo sapien
gccaccttgtgtcccacagacaggg

SEQ ID NO: 1215049 - DNA, 25 bp, Homo sapien
acagcatagctgtacacgaaggcgg

SEQ ID NO: 1215050 - DNA, 25 bp, Homo sapien
gctgtacacgaaggcggaataggca

SEQ ID NO: 1215051 - DNA, 25 bp, Homo sapien
tactcctgcacacatcaagtgaggg

SEQ ID NO: 1215052 - DNA, 25 bp, Homo sapien
gacttgcacctaaagctgccccttg

SEQ ID NO: 1215053 - DNA, 25 bp, Homo sapien
cacagaacatggtccctgagatcca

SEQ ID NO: 1215054 - DNA, 25 bp, Homo sapien
cccttggatatagtcagtccctgga

SEQ ID NO: 1215055 - DNA, 25 bp, Homo sapien
gagcatcggtggtgaggaaccgcca

SEQ ID NO: 1215056 - DNA, 25 bp, Homo sapien
ttgcgaaaagctgagcatcggtggt

SEQ ID NO: 1215057 - DNA, 25 bp, Homo sapien
aggcggttaggaattgcgaaaagct

SEQ ID NO: 1215058 - DNA, 25 bp, Homo sapien
ggaaccgccaggagtcggcgtctcc

SEQ ID NO: 1215059 - DNA, 25 bp, Homo sapien
gaagacgacgttgtaggagaaaata

SEQ ID NO: 1215060 - DNA, 25 bp, Homo sapien
agaaacaggcccaggcttgccgtcc

SEQ ID NO: 1215061 - DNA, 25 bp, Homo sapien
cttgccgtccccacgaacaggaaga

SEQ ID NO: 1215062 - DNA, 25 bp, Homo sapien
gtcctccgtgtaggccagcatgctg

SEQ ID NO: 1215063 - DNA, 25 bp, Homo sapien
tttgctataggcactcgggaggcta

SEQ ID NO: 1215064 - DNA, 25 bp, Homo sapien
gcctctagtgcgtctctggtgatgt

SEQ ID NO: 1215065 - DNA, 25 bp, Homo sapien
gagattagtcgagagaattagagat

SEQ ID NO: 1215066 - DNA, 25 bp, Homo sapien
ccgcgcggccagaaatcgcttatct

SEQ ID NO: 1215067 - DNA, 25 bp, Homo sapien
cccttgaggcttggagactgatgcg

SEQ ID NO: 1215068 - DNA, 25 bp, Homo sapien
aactctcgagttgtactgtgtgaca

SEQ ID NO: 1215069 - DNA, 25 bp, Homo sapien
ctgtgtgacatgtgatagctacctt

SEQ ID NO: 1215070 - DNA, 25 bp, Homo sapien
cagcatgatgtcctgagtagcagaa

SEQ ID NO: 1215071 - DNA, 25 bp, Homo sapien
tcatcatctctgtgttggtccaatt

SEQ ID NO: 1215072 - DNA, 25 bp, Homo sapien
catctctgtgttggtccaattatag

SEQ ID NO: 1215073 - DNA, 25 bp, Homo sapien
catcatctctgtgttggtccaatta

SEQ ID NO: 1215074 - DNA, 25 bp, Homo sapien
tctgtgttggtccaattatagtaca

SEQ ID NO: 1215075 - DNA, 25 bp, Homo sapien
cacacgccctgatgagtctggcagt

SEQ ID NO: 1215076 - DNA, 25 bp, Homo sapien
caggttgtcacctactggccatgtg

SEQ ID NO: 1215077 - DNA, 25 bp, Homo sapien
tgtggtgcacaccttcagagcccaa

SEQ ID NO: 1215078 - DNA, 25 bp, Homo sapien
gatgtaagacatgccaagagcctgg

SEQ ID NO: 1215079 - DNA, 25 bp, Homo sapien
gcagcaccatctcgccaactcctgc

SEQ ID NO: 1215080 - DNA, 25 bp, Homo sapien
tgcagcaccatctcgccaactcctg

SEQ ID NO: 1215081 - DNA, 25 bp, Homo sapien
caagttgatgtgtctggagaaggcc

SEQ ID NO: 1215082 - DNA, 25 bp, Homo sapien
tagcagtcagcaccggtttcattgg

SEQ ID NO: 1215083 - DNA, 25 bp, Homo sapien
gagagctaaacagcattcccacggg

SEQ ID NO: 1215084 - DNA, 25 bp, Homo sapien
tttcagctaagttgaggcccgtcac

SEQ ID NO: 1215085 - DNA, 25 bp, Homo sapien
aaagccagacaaccaaagatcacgc

SEQ ID NO: 1215086 - DNA, 25 bp, Homo sapien
caggagcaagatatagaaggtaaaa

SEQ ID NO: 1215087 - DNA, 25 bp, Homo sapien
agatcacgccacagaccaggaaact

SEQ ID NO: 1215088 - DNA, 25 bp, Homo sapien
caagatatagaaggtaaaagccaga

SEQ ID NO: 1215089 - DNA, 25 bp, Homo sapien
tttgtttctctgccattctgtggct

SEQ ID NO: 1215090 - DNA, 25 bp, Homo sapien
tgtttgtttctctgccattctgtgg

SEQ ID NO: 1215091 - DNA, 25 bp, Homo sapien
ccaggctgtttgtttctctgccatt

SEQ ID NO: 1215092 - DNA, 25 bp, Homo sapien
ggctgtttgtttctctgccattctg

SEQ ID NO: 1215093 - DNA, 25 bp, Homo sapien
gttttccattccaattgatctgtct

SEQ ID NO: 1215094 - DNA, 25 bp, Homo sapien
ccattccaattgatctgtcttgggt

SEQ ID NO: 1215095 - DNA, 25 bp, Homo sapien
tttccattccaattgatctgtcttg

SEQ ID NO: 1215096 - DNA, 25 bp, Homo sapien
agagttttccattccaattgatctg

SEQ ID NO: 1215097 - DNA, 25 bp, Homo sapien
gaccaggtaccaggactcaatttaa

SEQ ID NO: 1215098 - DNA, 25 bp, Homo sapien
agtatggtcgtgctggtgatcaaga

SEQ ID NO: 1215099 - DNA, 25 bp, Homo sapien
ttgaatagccattgagagagcgcct

SEQ ID NO: 1215100 - DNA, 25 bp, Homo sapien
tgatcaagaggctgaaagtcttctc

SEQ ID NO: 1215101 - DNA, 25 bp, Homo sapien
cattgcccaggtcagttactcgcta

SEQ ID NO: 1215102 - DNA, 25 bp, Homo sapien
tgagccagcacttgagccacgtttc

SEQ ID NO: 1215103 - DNA, 25 bp, Homo sapien
cagtaggcccagctttttgtgaaag

SEQ ID NO: 1215104 - DNA, 25 bp, Homo sapien
gaatcacagcacttgggacaggtta

SEQ ID NO: 1215105 - DNA, 25 bp, Homo sapien
cacaatcaacttcgatatagccatt

SEQ ID NO: 1215106 - DNA, 25 bp, Homo sapien
caatcaacttcgatatagccattga

SEQ ID NO: 1215107 - DNA, 25 bp, Homo sapien
gtcacaatcaacttcgatatagcca

SEQ ID NO: 1215108 - DNA, 25 bp, Homo sapien
aatcaacttcgatatagccattgat

SEQ ID NO: 1215109 - DNA, 25 bp, Homo sapien
tcttttagtgaatccgatgtgcctg

SEQ ID NO: 1215110 - DNA, 25 bp, Homo sapien
gatttccatatacaagtagcagagg

SEQ ID NO: 1215111 - DNA, 25 bp, Homo sapien
tatgtcactgtgtcttcttttagtg

SEQ ID NO: 1215112 - DNA, 25 bp, Homo sapien
cgatgtgcctgatgggttagatttc

SEQ ID NO: 1215113 - DNA, 25 bp, Homo sapien
aatgcaggctggctttacaaaagca

SEQ ID NO: 1215114 - DNA, 25 bp, Homo sapien
tatgtgcaactagatatggacagca

SEQ ID NO: 1215115 - DNA, 25 bp, Homo sapien
gaagctgccacatctcctagctaag

SEQ ID NO: 1215116 - DNA, 25 bp, Homo sapien
agcagtctgacttacctgttgggaa

SEQ ID NO: 1215117 - DNA, 25 bp, Homo sapien
tagtttgggatatgtggtagtaaga

SEQ ID NO: 1215118 - DNA, 25 bp, Homo sapien
agtttgggatatgtggtagtaagaa

SEQ ID NO: 1215119 - DNA, 25 bp, Homo sapien
gcagtttctgaaccgtcaagtatga

SEQ ID NO: 1215120 - DNA, 25 bp, Homo sapien
tttaaattccatacaccaagtgatt

SEQ ID NO: 1215121 - DNA, 25 bp, Homo sapien
taagagacaattagggatgagtttg

SEQ ID NO: 1215122 - DNA, 25 bp, Homo sapien
agtgatttaaccacagtggcagtgg

SEQ ID NO: 1215123 - DNA, 25 bp, Homo sapien
tactcgatcttctttaaagaagacc

SEQ ID NO: 1215124 - DNA, 25 bp, Homo sapien
ctcgatcttctttaaagaagacctt

SEQ ID NO: 1215125 - DNA, 25 bp, Homo sapien
tcgatcttctttaaagaagaccttc

SEQ ID NO: 1215126 - DNA, 25 bp, Homo sapien
ctactcgatcttctttaaagaagac

SEQ ID NO: 1215127 - DNA, 25 bp, Homo sapien
cagtattagtgaaattgacagatgc

SEQ ID NO: 1215128 - DNA, 25 bp, Homo sapien
taaaattatgcccttgctttaccaa

SEQ ID NO: 1215129 - DNA, 25 bp, Homo sapien
ttggccctggatcttttctaatcac

SEQ ID NO: 1215130 - DNA, 25 bp, Homo sapien
gacagatgcgtatatgtaaagatag

SEQ ID NO: 1215131 - DNA, 25 bp, Homo sapien
caaagaggaggtttatactggaagc

SEQ ID NO: 1215132 - DNA, 25 bp, Homo sapien
tcttgggctgaatgatcttctcaac

SEQ ID NO: 1215133 - DNA, 25 bp, Homo sapien
ttccaaggattgtgagtcatgctca

SEQ ID NO: 1215134 - DNA, 25 bp, Homo sapien
taaagtacagagattcgaccatgga

SEQ ID NO: 1215135 - DNA, 25 bp, Homo sapien
caatctggattttgaggagtacggt

SEQ ID NO: 1215136 - DNA, 25 bp, Homo sapien
aaggtcaaccgtaagcttcttagag

SEQ ID NO: 1215137 - DNA, 25 bp, Homo sapien
ctttatgtgttcgaacaaaggtgga

SEQ ID NO: 1215138 - DNA, 25 bp, Homo sapien
gaattagaggcccttgaaaggtcaa

SEQ ID NO: 1215139 - DNA, 25 bp, Homo sapien
gaagagcagagttcatttgggaatg

SEQ ID NO: 1215140 - DNA, 25 bp, Homo sapien
gggattggattgttcatattagtag

SEQ ID NO: 1215141 - DNA, 25 bp, Homo sapien
caaaggcgcaggctcagatgtgctt

SEQ ID NO: 1215142 - DNA, 25 bp, Homo sapien
gaatgcttatacatagggattggat

SEQ ID NO: 1215143 - DNA, 25 bp, Homo sapien
cccgtttcttgaacggatgctcttc

SEQ ID NO: 1215144 - DNA, 25 bp, Homo sapien
ttcttgctctcggagccgcccgttt

SEQ ID NO: 1215145 - DNA, 25 bp, Homo sapien
gagccgcccgtttcttgaacggatg

SEQ ID NO: 1215146 - DNA, 25 bp, Homo sapien
ttccagtcttcttgctctcggagcc

SEQ ID NO: 1215147 - DNA, 25 bp, Homo sapien
gtccaggtctcctatccgagctttg

SEQ ID NO: 1215148 - DNA, 25 bp, Homo sapien
caggtctcctatccgagctttggga

SEQ ID NO: 1215149 - DNA, 25 bp, Homo sapien
ccaggtctcctatccgagctttggg

SEQ ID NO: 1215150 - DNA, 25 bp, Homo sapien
gtctcctatccgagctttgggagcc

SEQ ID NO: 1215151 - DNA, 25 bp, Homo sapien
tgaccagctgtgagatcagaaggca

SEQ ID NO: 1215152 - DNA, 25 bp, Homo sapien
ctgaccagctgtgagatcagaaggc

SEQ ID NO: 1215153 - DNA, 25 bp, Homo sapien
gaccagctgtgagatcagaaggcac

SEQ ID NO: 1215154 - DNA, 25 bp, Homo sapien
ggtgggcagaatgacattgttgaca

SEQ ID NO: 1215155 - DNA, 25 bp, Homo sapien
cacagactgtagacactttggtcac

SEQ ID NO: 1215156 - DNA, 25 bp, Homo sapien
tgttcctggtagagctgacccattg

SEQ ID NO: 1215157 - DNA, 25 bp, Homo sapien
ggtcactgtaggcaacgtagagaaa

SEQ ID NO: 1215158 - DNA, 25 bp, Homo sapien
ttattgatgtgcctcctaccttccc

SEQ ID NO: 1215159 - DNA, 25 bp, Homo sapien
agaagtgccggtcctgaataaggga

SEQ ID NO: 1215160 - DNA, 25 bp, Homo sapien
cattacccctcctaagagaggctgg

SEQ ID NO: 1215161 - DNA, 25 bp, Homo sapien
aaacattaagaagtgccggtcctga

SEQ ID NO: 1215162 - DNA, 25 bp, Homo sapien
ctgagggcggagaggcgcatcgtgt

SEQ ID NO: 1215163 - DNA, 25 bp, Homo sapien
tcctcgagtttccagcgtgaggagg

SEQ ID NO: 1215164 - DNA, 25 bp, Homo sapien
catcgtgttcgaggcggagaccgag

SEQ ID NO: 1215165 - DNA, 25 bp, Homo sapien
gcgccgtcctcgagtttccagcgtg

SEQ ID NO: 1215166 - DNA, 25 bp, Homo sapien
caaagcttagcaccaacagaagtgg

SEQ ID NO: 1215167 - DNA, 25 bp, Homo sapien
caagcgtttgtagtgtcctgggatc

SEQ ID NO: 1215168 - DNA, 25 bp, Homo sapien
aaagtggcgcgcctttgaggagtcc

SEQ ID NO: 1215169 - DNA, 25 bp, Homo sapien
tctaacagcgagtggtaaggaggac

SEQ ID NO: 1215170 - DNA, 25 bp, Homo sapien
tcaagtagcctcttgtatcaagtgt

SEQ ID NO: 1215171 - DNA, 25 bp, Homo sapien
caagtgtgacctgattccttaagaa

SEQ ID NO: 1215172 - DNA, 25 bp, Homo sapien
tctggtgctaaactgctcaagtagc

SEQ ID NO: 1215173 - DNA, 25 bp, Homo sapien
gaacctctaagctagaaactcttgc

SEQ ID NO: 1215174 - DNA, 25 bp, Homo sapien
catattagacagttgctatgcctca

SEQ ID NO: 1215175 - DNA, 25 bp, Homo sapien
tgtgacaggtcatcaaacatattag

SEQ ID NO: 1215176 - DNA, 25 bp, Homo sapien
gaagctattttctgacctgtgtttg

SEQ ID NO: 1215177 - DNA, 25 bp, Homo sapien
tctgcaaggagctggtccaaacacc

SEQ ID NO: 1215178 - DNA, 25 bp, Homo sapien
aattcaacagtacacatccagaggg

SEQ ID NO: 1215179 - DNA, 25 bp, Homo sapien
tactctgttgagagctggcccagac

SEQ ID NO: 1215180 - DNA, 25 bp, Homo sapien
aatagtcttctagcagtagcactgc

SEQ ID NO: 1215181 - DNA, 25 bp, Homo sapien
gatacagtccctatcctctcggaga

SEQ ID NO: 1215182 - DNA, 25 bp, Homo sapien
atacctggtaggtataaggcaccat

SEQ ID NO: 1215183 - DNA, 25 bp, Homo sapien
aaccagtcaaccagccattgctgtt

SEQ ID NO: 1215184 - DNA, 25 bp, Homo sapien
ctggatacctggtaggtataaggca

SEQ ID NO: 1215185 - DNA, 25 bp, Homo sapien
ttctgatacacaccaaccaaccagt

SEQ ID NO: 1215186 - DNA, 25 bp, Homo sapien
ttaaatcacattcctcatagaaaca

SEQ ID NO: 1215187 - DNA, 25 bp, Homo sapien
cacattcctcatagaaacatcaact

SEQ ID NO: 1215188 - DNA, 25 bp, Homo sapien
atcacattcctcatagaaacatcaa

SEQ ID NO: 1215189 - DNA, 25 bp, Homo sapien
aaatcacattcctcatagaaacatc

SEQ ID NO: 1215190 - DNA, 25 bp, Homo sapien
taccatgatgatacctaagaatagt

SEQ ID NO: 1215191 - DNA, 25 bp, Homo sapien
tctggaatccctaacctcgggtgat

SEQ ID NO: 1215192 - DNA, 25 bp, Homo sapien
gaatagtaattctttaagataagca

SEQ ID NO: 1215193 - DNA, 25 bp, Homo sapien
tttttaagtagtcacgctaccatga

SEQ ID NO: 1215194 - DNA, 25 bp, Homo sapien
taattccaaatgctgttacccaagg

SEQ ID NO: 1215195 - DNA, 25 bp, Homo sapien
cccctgagatagctggtcattgggc

SEQ ID NO: 1215196 - DNA, 25 bp, Homo sapien
tctaggactgggctgatgaaggcac

SEQ ID NO: 1215197 - DNA, 25 bp, Homo sapien
ggaatccattgctagcttttctgtg

SEQ ID NO: 1215198 - DNA, 25 bp, Homo sapien
aaataatctcaccagcgccttccag

SEQ ID NO: 1215199 - DNA, 25 bp, Homo sapien
tatggccagctgtctttgtgttccc

SEQ ID NO: 1215200 - DNA, 25 bp, Homo sapien
gaagcgtcttgaagcctatggccag

SEQ ID NO: 1215201 - DNA, 25 bp, Homo sapien
gccttccagctcaggcgtcctagaa

SEQ ID NO: 1215202 - DNA, 25 bp, Homo sapien
acttcttagttgctccatgcctcag

SEQ ID NO: 1215203 - DNA, 25 bp, Homo sapien
catctgtaatgcctgtgttatgagg

SEQ ID NO: 1215204 - DNA, 25 bp, Homo sapien
cgcctttgaataagtatcacttctt

SEQ ID NO: 1215205 - DNA, 25 bp, Homo sapien
tcttaccctccctaggtctgcgcct

SEQ ID NO: 1215206 - DNA, 25 bp, Homo sapien
tcccagaggccttaggtttcctcca

SEQ ID NO: 1215207 - DNA, 25 bp, Homo sapien
cagaggccttaggtttcctccagct

SEQ ID NO: 1215208 - DNA, 25 bp, Homo sapien
ccagaggccttaggtttcctccagc

SEQ ID NO: 1215209 - DNA, 25 bp, Homo sapien
agaggccttaggtttcctccagctt

SEQ ID NO: 1215210 - DNA, 25 bp, Homo sapien
ccaccccttgctcttagccattcat

SEQ ID NO: 1215211 - DNA, 25 bp, Homo sapien
tgggcctgcaaagtcctcggtgtgt

SEQ ID NO: 1215212 - DNA, 25 bp, Homo sapien
aaagtcctcggtgtgtggcgagcac

SEQ ID NO: 1215213 - DNA, 25 bp, Homo sapien
tgtggcgagcacgtgggaggaggag

SEQ ID NO: 1215214 - DNA, 25 bp, Homo sapien
aaaggcagctcagcagggcgaactc

SEQ ID NO: 1215215 - DNA, 25 bp, Homo sapien
ctgacaagctgctaagcagaaggct

SEQ ID NO: 1215216 - DNA, 25 bp, Homo sapien
cagaaggcttccagtaacggtgaag

SEQ ID NO: 1215217 - DNA, 25 bp, Homo sapien
gggcgaactctaaatccctggcctc

SEQ ID NO: 1215218 - DNA, 25 bp, Homo sapien
gccgctcctgtttgggaatgagaaa

SEQ ID NO: 1215219 - DNA, 25 bp, Homo sapien
cacagccgctcctgtttgggaatga

SEQ ID NO: 1215220 - DNA, 25 bp, Homo sapien
gaatggaaaccgagaagaaagtgta

SEQ ID NO: 1215221 - DNA, 25 bp, Homo sapien
ttggtctcccctaaccacagccgct

SEQ ID NO: 1215222 - DNA, 25 bp, Homo sapien
cttggcattcctcttgctgctaggg

SEQ ID NO: 1215223 - DNA, 25 bp, Homo sapien
ctcttgctgctaggggctgaaagag

SEQ ID NO: 1215224 - DNA, 25 bp, Homo sapien
ggggaggcagttgcattcttggcat

SEQ ID NO: 1215225 - DNA, 25 bp, Homo sapien
ggcagttgcattcttggcattcctc

SEQ ID NO: 1215226 - DNA, 25 bp, Homo sapien
cctccagcaggcaggtctgctgcag

SEQ ID NO: 1215227 - DNA, 25 bp, Homo sapien
gccttcctccagcaggcaggtctgc

SEQ ID NO: 1215228 - DNA, 25 bp, Homo sapien
tcagccttcctccagcaggcaggtc

SEQ ID NO: 1215229 - DNA, 25 bp, Homo sapien
ttcctccagcaggcaggtctgctgc

SEQ ID NO: 1215230 - DNA, 25 bp, Homo sapien
gctgacccttggcactgtgttggta

SEQ ID NO: 1215231 - DNA, 25 bp, Homo sapien
gtcctggttattcggcttagtttca

SEQ ID NO: 1215232 - DNA, 25 bp, Homo sapien
gcttagtttcaggtgaccgctgacc

SEQ ID NO: 1215233 - DNA, 25 bp, Homo sapien
ccccagatgtcctggttattcggct

SEQ ID NO: 1215234 - DNA, 25 bp, Homo sapien
ggtacctactcttctcagggcctgt

SEQ ID NO: 1215235 - DNA, 25 bp, Homo sapien
gggtacctactcttctcagggcctg

SEQ ID NO: 1215236 - DNA, 25 bp, Homo sapien
agcatcacatttaggattctataca

SEQ ID NO: 1215237 - DNA, 25 bp, Homo sapien
cattcattgtgaccaagcaaggtgg

SEQ ID NO: 1215238 - DNA, 25 bp, Homo sapien
aaactgtatcttgtatgatcttccc

SEQ ID NO: 1215239 - DNA, 25 bp, Homo sapien
tatcttgtatgatcttccccattgc

SEQ ID NO: 1215240 - DNA, 25 bp, Homo sapien
tcttgaagtcagagagtcagcccta

SEQ ID NO: 1215241 - DNA, 25 bp, Homo sapien
tgggaagtccctcctctagtgtgat

SEQ ID NO: 1215242 - DNA, 25 bp, Homo sapien
tcaggctgtattgcactggactcag

SEQ ID NO: 1215243 - DNA, 25 bp, Homo sapien
ttacaccttacctcagatgccctgg

SEQ ID NO: 1215244 - DNA, 25 bp, Homo sapien
tacagtagtaaatcctgccaaaagt

SEQ ID NO: 1215245 - DNA, 25 bp, Homo sapien
catcaggaccgtgagaatggcttta

SEQ ID NO: 1215246 - DNA, 25 bp, Homo sapien
ccttggagcaagaggttagttcaca

SEQ ID NO: 1215247 - DNA, 25 bp, Homo sapien
cacattcaggacatcccttccagaa

SEQ ID NO: 1215248 - DNA, 25 bp, Homo sapien
aaacctgcctgttgccatgccaatg

SEQ ID NO: 1215249 - DNA, 25 bp, Homo sapien
tgtattaactagtccatgggctgag

SEQ ID NO: 1215250 - DNA, 25 bp, Homo sapien
tagccaagtttcagtcgcaaccagt

SEQ ID NO: 1215251 - DNA, 25 bp, Homo sapien
gacttgccaggttaagcaacagcca

SEQ ID NO: 1215252 - DNA, 25 bp, Homo sapien
gatacaggtgctcaatagtcaggct

SEQ ID NO: 1215253 - DNA, 25 bp, Homo sapien
gctgtaagccgatactgactggcca

SEQ ID NO: 1215254 - DNA, 25 bp, Homo sapien
cagatcggaatcaatggagtgggcc

SEQ ID NO: 1215255 - DNA, 25 bp, Homo sapien
gatgtcaggacgcattacaagctgt

SEQ ID NO: 1215256 - DNA, 25 bp, Homo sapien
cagtcaggagatagatccgtaggtt

SEQ ID NO: 1215257 - DNA, 25 bp, Homo sapien
taataccaggcgctaatgggaacaa

SEQ ID NO: 1215258 - DNA, 25 bp, Homo sapien
taaagggtcctggtatgctaataaa

SEQ ID NO: 1215259 - DNA, 25 bp, Homo sapien
caaccacctctgctataggacacta

SEQ ID NO: 1215260 - DNA, 25 bp, Homo sapien
caagatcagtctacaggtcacagtg

SEQ ID NO: 1215261 - DNA, 25 bp, Homo sapien
caaagagactcggagccagtgatcc

SEQ ID NO: 1215262 - DNA, 25 bp, Homo sapien
cagtgatccttttatcctgctacag

SEQ ID NO: 1215263 - DNA, 25 bp, Homo sapien
gtgcattcaggtcccattaaccatg

SEQ ID NO: 1215264 - DNA, 25 bp, Homo sapien
tttaaacttccaccgatgaggcagg

SEQ ID NO: 1215265 - DNA, 25 bp, Homo sapien
gatgaacactattgaaacttcgctt

SEQ ID NO: 1215266 - DNA, 25 bp, Homo sapien
taatgaaaggtgtaccacggttgta

SEQ ID NO: 1215267 - DNA, 25 bp, Homo sapien
gaaagccatgtcaaattaatcactg

SEQ ID NO: 1215268 - DNA, 25 bp, Homo sapien
ggcttgactcatgggctttcagtgc

SEQ ID NO: 1215269 - DNA, 25 bp, Homo sapien
cttgactcatgggctttcagtgctt

SEQ ID NO: 1215270 - DNA, 25 bp, Homo sapien
actcatgggctttcagtgctttttt

SEQ ID NO: 1215271 - DNA, 25 bp, Homo sapien
tgactcatgggctttcagtgctttt

SEQ ID NO: 1215272 - DNA, 25 bp, Homo sapien
caaattggtagtacagctccaaata

SEQ ID NO: 1215273 - DNA, 25 bp, Homo sapien
tgaggccagtgatgactccagtcaa

SEQ ID NO: 1215274 - DNA, 25 bp, Homo sapien
catgtaactctctcatgtaaggtgc

SEQ ID NO: 1215275 - DNA, 25 bp, Homo sapien
tccaagggtgtttgactcccaaatc

SEQ ID NO: 1215276 - DNA, 25 bp, Homo sapien
gatcatctccccgagaagctaaaaa

SEQ ID NO: 1215277 - DNA, 25 bp, Homo sapien
taagaaaattcgatcatctccccga

SEQ ID NO: 1215278 - DNA, 25 bp, Homo sapien
gccctcccactaagaaaattcgatc

SEQ ID NO: 1215279 - DNA, 25 bp, Homo sapien
ttatggaagagattcgggccctccc

SEQ ID NO: 1215280 - DNA, 25 bp, Homo sapien
gaagcttacatgtatatctctagag

SEQ ID NO: 1215281 - DNA, 25 bp, Homo sapien
tttgggtactaacatggaagcttac

SEQ ID NO: 1215282 - DNA, 25 bp, Homo sapien
ttaggcctacagtaacagtgcattt

SEQ ID NO: 1215283 - DNA, 25 bp, Homo sapien
ttgtaatagtcaggacaggctaacc

SEQ ID NO: 1215284 - DNA, 25 bp, Homo sapien
caagaccatgggactctactcagta

SEQ ID NO: 1215285 - DNA, 25 bp, Homo sapien
cagtttggaagacaccaccgaggtt

SEQ ID NO: 1215286 - DNA, 25 bp, Homo sapien
gtccctagcgattgagttacacagt

SEQ ID NO: 1215287 - DNA, 25 bp, Homo sapien
tcaggctacaggtttgtccctagcg

SEQ ID NO: 1215288 - DNA, 25 bp, Homo sapien
ccgcgtacgcgtctcgggatatttt

SEQ ID NO: 1215289 - DNA, 25 bp, Homo sapien
ggctaggttcgggtaaccatcagac

SEQ ID NO: 1215290 - DNA, 25 bp, Homo sapien
ggttcgggtaaccatcagacttcat

SEQ ID NO: 1215291 - DNA, 25 bp, Homo sapien
tgtccccgagtgactttagtaataa

SEQ ID NO: 1215292 - DNA, 25 bp, Homo sapien
caaatcccgtgtggttctcgttcca

SEQ ID NO: 1215293 - DNA, 25 bp, Homo sapien
aacagcacggcccaaatcccgtgtg

SEQ ID NO: 1215294 - DNA, 25 bp, Homo sapien
cgtgtggttctcgttccactctcac

SEQ ID NO: 1215295 - DNA, 25 bp, Homo sapien
aggtgcgggttaacagcacggccca

SEQ ID NO: 1215296 - DNA, 25 bp, Homo sapien
ccccttcccccagcgactggcgcgg

SEQ ID NO: 1215297 - DNA, 25 bp, Homo sapien
gcggaggcacccgtattgccccttc

SEQ ID NO: 1215298 - DNA, 25 bp, Homo sapien
gagccctctctgtagcggacggggg

SEQ ID NO: 1215299 - DNA, 25 bp, Homo sapien
ctctctgtagcggacgggggtgttc

SEQ ID NO: 1215300 - DNA, 25 bp, Homo sapien
ctgtttcgacagcgaacatgtcgcg

SEQ ID NO: 1215301 - DNA, 25 bp, Homo sapien
gtttcgacagcgaacatgtcgcggc

SEQ ID NO: 1215302 - DNA, 25 bp, Homo sapien
tgtttcgacagcgaacatgtcgcgg

SEQ ID NO: 1215303 - DNA, 25 bp, Homo sapien
cctgaaccaaagagcagcggagttt

SEQ ID NO: 1215304 - DNA, 25 bp, Homo sapien
cattttcggctggtttgattcatcc

SEQ ID NO: 1215305 - DNA, 25 bp, Homo sapien
gttgcacggcggctttggcgcattt

SEQ ID NO: 1215306 - DNA, 25 bp, Homo sapien
tggtctttggcttctcgactcggtc

SEQ ID NO: 1215307 - DNA, 25 bp, Homo sapien
cagagcatcttgactaacaggaccc

SEQ ID NO: 1215308 - DNA, 25 bp, Homo sapien
cagaagtctccaatgagcaggcgtg

SEQ ID NO: 1215309 - DNA, 25 bp, Homo sapien
tctgggcgcatctggcagaagtctc

SEQ ID NO: 1215310 - DNA, 25 bp, Homo sapien
caaacggactaatgatctgggcgca

SEQ ID NO: 1215311 - DNA, 25 bp, Homo sapien
agttctgtacttgtccactaaaaag

SEQ ID NO: 1215312 - DNA, 25 bp, Homo sapien
ggcactactggccatagttctgtac

SEQ ID NO: 1215313 - DNA, 25 bp, Homo sapien
tccctgagagacgatgttgattgca

SEQ ID NO: 1215314 - DNA, 25 bp, Homo sapien
aatggaaggaagatgttagctgaag

SEQ ID NO: 1215315 - DNA, 25 bp, Homo sapien
gacctggttggttgactttcatgag

SEQ ID NO: 1215316 - DNA, 25 bp, Homo sapien
cagtctctgtctttagacctggttg

SEQ ID NO: 1215317 - DNA, 25 bp, Homo sapien
cagcatctccaaagagtggtaccct

SEQ ID NO: 1215318 - DNA, 25 bp, Homo sapien
tgtggtcctgttctctgtggaagca

SEQ ID NO: 1215319 - DNA, 25 bp, Homo sapien
atagtcaagttttttggccgggcat

SEQ ID NO: 1215320 - DNA, 25 bp, Homo sapien
ccaggcgtgatggcacgtgtctgta

SEQ ID NO: 1215321 - DNA, 25 bp, Homo sapien
aggcgtgatggcacgtgtctgtaat

SEQ ID NO: 1215322 - DNA, 25 bp, Homo sapien
tcgagaccaacctggtcagcatggc

SEQ ID NO: 1215323 - DNA, 25 bp, Homo sapien
ttcagtttgaagagggtccggatcc

SEQ ID NO: 1215324 - DNA, 25 bp, Homo sapien
agcttcagcaaacactacaagtcca

SEQ ID NO: 1215325 - DNA, 25 bp, Homo sapien
tggtgcagcgatattcccaggacag

SEQ ID NO: 1215326 - DNA, 25 bp, Homo sapien
tgctttctcgtcagagcagcccaga

SEQ ID NO: 1215327 - DNA, 25 bp, Homo sapien
gggccaatgaaaagggcacctgatc

SEQ ID NO: 1215328 - DNA, 25 bp, Homo sapien
tacgctggccatgggataaattcag

SEQ ID NO: 1215329 - DNA, 25 bp, Homo sapien
gcacctgatcaaggcttgggagtca

SEQ ID NO: 1215330 - DNA, 25 bp, Homo sapien
gacgaaggccagtgactaggtcatg

SEQ ID NO: 1215331 - DNA, 25 bp, Homo sapien
tgcacatgcctcttgttcaatggcc

SEQ ID NO: 1215332 - DNA, 25 bp, Homo sapien
catacttttgtagaagtggaccaac

SEQ ID NO: 1215333 - DNA, 25 bp, Homo sapien
tttgagacaatcaccaagtgcagtt

SEQ ID NO: 1215334 - DNA, 25 bp, Homo sapien
tttggctttagcaacctgtcttggc

SEQ ID NO: 1215335 - DNA, 25 bp, Homo sapien
aggttgtgttcggacatcttggcag

SEQ ID NO: 1215336 - DNA, 25 bp, Homo sapien
tcgccagtcctgtattgattaacac

SEQ ID NO: 1215337 - DNA, 25 bp, Homo sapien
cataaagagaacaacaccctgattt

SEQ ID NO: 1215338 - DNA, 25 bp, Homo sapien
cacattccattgctagtgggttcca

SEQ ID NO: 1215339 - DNA, 25 bp, Homo sapien
taatggcataccgtacggcaatgaa

SEQ ID NO: 1215340 - DNA, 25 bp, Homo sapien
ttttatacacaggtagctgagctgt

SEQ ID NO: 1215341 - DNA, 25 bp, Homo sapien
tcgtgttcctttcctaaatgcctgg

SEQ ID NO: 1215342 - DNA, 25 bp, Homo sapien
aacatagtattgagtgagagaagcc

SEQ ID NO: 1215343 - DNA, 25 bp, Homo sapien
tggatcacgaaggaagacgcagcag

SEQ ID NO: 1215344 - DNA, 25 bp, Homo sapien
tactgtttcttggagctcgggcttc

SEQ ID NO: 1215345 - DNA, 25 bp, Homo sapien
gaatctgctcagtagctgccaggtg

SEQ ID NO: 1215346 - DNA, 25 bp, Homo sapien
tgggactcgagagacaccctcttct

SEQ ID NO: 1215347 - DNA, 25 bp, Homo sapien
tgaaatgaagatactggccaccctg

SEQ ID NO: 1215348 - DNA, 25 bp, Homo sapien
tatgaaatgaagatactggccaccc

SEQ ID NO: 1215349 - DNA, 25 bp, Homo sapien
gaaatgaagatactggccaccctgg

SEQ ID NO: 1215350 - DNA, 25 bp, Homo sapien
aatgaagatactggccaccctgggc

SEQ ID NO: 1215351 - DNA, 25 bp, Homo sapien
gagagcaggctctatgtgtcccttt

SEQ ID NO: 1215352 - DNA, 25 bp, Homo sapien
ttacagcattgacagtcctcaaatc

SEQ ID NO: 1215353 - DNA, 25 bp, Homo sapien
aaggaatggtaaagaagtgatcttt

SEQ ID NO: 1215354 - DNA, 25 bp, Homo sapien
taaatctgtcactatgagaggccag

SEQ ID NO: 1215355 - DNA, 25 bp, Homo sapien
ggtgcctgattgttacctggagaga

SEQ ID NO: 1215356 - DNA, 25 bp, Homo sapien
ccccatataattatccgccctttga

SEQ ID NO: 1215357 - DNA, 25 bp, Homo sapien
catcactcatatcaggagctctggc

SEQ ID NO: 1215358 - DNA, 25 bp, Homo sapien
agttggtctttagtcacattttgaa

SEQ ID NO: 1215359 - DNA, 25 bp, Homo sapien
tgtgctatggagatgttacgttcag

SEQ ID NO: 1215360 - DNA, 25 bp, Homo sapien
actgggaggtgaacacccattagct

SEQ ID NO: 1215361 - DNA, 25 bp, Homo sapien
tgaatcattatgcaacacctctgct

SEQ ID NO: 1215362 - DNA, 25 bp, Homo sapien
gaccatgtctagtccactttacaga

SEQ ID NO: 1215363 - DNA, 25 bp, Homo sapien
tttattggtaactatagctgggcgc

SEQ ID NO: 1215364 - DNA, 25 bp, Homo sapien
cagaggtggcttccgcatctacaga

SEQ ID NO: 1215365 - DNA, 25 bp, Homo sapien
taactatatgatctcctagccacat

SEQ ID NO: 1215366 - DNA, 25 bp, Homo sapien
ttttttgcaaaaccgccacagctat

SEQ ID NO: 1215367 - DNA, 25 bp, Homo sapien
cagacttccccgaggcttacagagt

SEQ ID NO: 1215368 - DNA, 25 bp, Homo sapien
cagagtgacaatggccctgctttca

SEQ ID NO: 1215369 - DNA, 25 bp, Homo sapien
tacactatgactggaggccacgatc

SEQ ID NO: 1215370 - DNA, 25 bp, Homo sapien
tcactggttgggtggacgcttttcc

SEQ ID NO: 1215371 - DNA, 25 bp, Homo sapien
tttggcccagtcagagtgtatgtac

SEQ ID NO: 1215372 - DNA, 25 bp, Homo sapien
ggcaatctctggtatctcagtcagg

SEQ ID NO: 1215373 - DNA, 25 bp, Homo sapien
tcattgggacgcagaatcagaacat

SEQ ID NO: 1215374 - DNA, 25 bp, Homo sapien
aagagaacaattccctacaggccag

SEQ ID NO: 1215375 - DNA, 25 bp, Homo sapien
tctttttggactcaactcgtctgca

SEQ ID NO: 1215376 - DNA, 25 bp, Homo sapien
catggatgcatgacacatttggtgc

SEQ ID NO: 1215377 - DNA, 25 bp, Homo sapien
ggatgcctgcctgattattcaccca

SEQ ID NO: 1215378 - DNA, 25 bp, Homo sapien
cacattcccttggtggcaagtcaat

SEQ ID NO: 1215379 - DNA, 25 bp, Homo sapien
tagaggagtgaagtaggaaatcaag

SEQ ID NO: 1215380 - DNA, 25 bp, Homo sapien
tagaatgctagatgtaagtactcac

SEQ ID NO: 1215381 - DNA, 25 bp, Homo sapien
cagaaaactgcccaaccacaaaagt

SEQ ID NO: 1215382 - DNA, 25 bp, Homo sapien
cactggtaaagctaacacataggga

SEQ ID NO: 1215383 - DNA, 25 bp, Homo sapien
tcctccagctagttccatgttctcc

SEQ ID NO: 1215384 - DNA, 25 bp, Homo sapien
gtcctccagctagttccatgttctc

SEQ ID NO: 1215385 - DNA, 25 bp, Homo sapien
gggcagtgtagtctaacagggaact

SEQ ID NO: 1215386 - DNA, 25 bp, Homo sapien
tcctgcgtgttgtgagaagcctgaa

SEQ ID NO: 1215387 - DNA, 25 bp, Homo sapien
cagtcgctcgaggtgctgcttgaac

SEQ ID NO: 1215388 - DNA, 25 bp, Homo sapien
ggtggcctgatgcagattacctctg

SEQ ID NO: 1215389 - DNA, 25 bp, Homo sapien
gctagattcaattgtatatgggctg

SEQ ID NO: 1215390 - DNA, 25 bp, Homo sapien
tgtatatgggctgtcccataatccc

SEQ ID NO: 1215391 - DNA, 25 bp, Homo sapien
ttgtatatgggctgtcccataatcc

SEQ ID NO: 1215392 - DNA, 25 bp, Homo sapien
gaatcattgcgtagcatctctgcct

SEQ ID NO: 1215393 - DNA, 25 bp, Homo sapien
aactgtgccatagagtgaaatcatc

SEQ ID NO: 1215394 - DNA, 25 bp, Homo sapien
gcagcagtagcacagccttaaggca

SEQ ID NO: 1215395 - DNA, 25 bp, Homo sapien
gatagatcaccaaattactcattgt

SEQ ID NO: 1215396 - DNA, 25 bp, Homo sapien
aagtttgtgtatgcctcatgaagtt

SEQ ID NO: 1215397 - DNA, 25 bp, Homo sapien
cagctattgaagtttgtgtatgcct

SEQ ID NO: 1215398 - DNA, 25 bp, Homo sapien
tcaaatcagctattgaagtttgtgt

SEQ ID NO: 1215399 - DNA, 25 bp, Homo sapien
tattgaagtttgtgtatgcctcatg

SEQ ID NO: 1215400 - DNA, 25 bp, Homo sapien
gtaaaccctaggcataaagagtgga

SEQ ID NO: 1215401 - DNA, 25 bp, Homo sapien
gagcatgcagaccttttgggtaaac

SEQ ID NO: 1215402 - DNA, 25 bp, Homo sapien
tcctcctggcattagggctttgcag

SEQ ID NO: 1215403 - DNA, 25 bp, Homo sapien
gggtggactcgtcagttccgcattc

SEQ ID NO: 1215404 - DNA, 25 bp, Homo sapien
taatacccagagaagcaaggagcag

SEQ ID NO: 1215405 - DNA, 25 bp, Homo sapien
ggcagtcctgtggaagccttcaaca

SEQ ID NO: 1215406 - DNA, 25 bp, Homo sapien
caaggagcagagcaaaggttcaaac

SEQ ID NO: 1215407 - DNA, 25 bp, Homo sapien
gagttcaggcaacaatcttcttggg

SEQ ID NO: 1215408 - DNA, 25 bp, Homo sapien
tgaagagtcctcacacattccggtg

SEQ ID NO: 1215409 - DNA, 25 bp, Homo sapien
aagagtcctcacacattccggtgct

SEQ ID NO: 1215410 - DNA, 25 bp, Homo sapien
ctctgaagagtcctcacacattccg

SEQ ID NO: 1215411 - DNA, 25 bp, Homo sapien
tctgaagagtcctcacacattccgg

SEQ ID NO: 1215412 - DNA, 25 bp, Homo sapien
agttgttcatttcccaggacgtggt

SEQ ID NO: 1215413 - DNA, 25 bp, Homo sapien
ttcccaggacgtggtaaccaaagca

SEQ ID NO: 1215414 - DNA, 25 bp, Homo sapien
tcatttcccaggacgtggtaaccaa

SEQ ID NO: 1215415 - DNA, 25 bp, Homo sapien
cccaggacgtggtaaccaaagcatt

SEQ ID NO: 1215416 - DNA, 25 bp, Homo sapien
ctttagaatcgagaggaagaggctc

SEQ ID NO: 1215417 - DNA, 25 bp, Homo sapien
tccagtgagttatgaagacagcatt

SEQ ID NO: 1215418 - DNA, 25 bp, Homo sapien
gagagatctgtgtagttttagaaca

SEQ ID NO: 1215419 - DNA, 25 bp, Homo sapien
acactgggagtagcctttagaatcg

SEQ ID NO: 1215420 - DNA, 25 bp, Homo sapien
ccagtttcagtaagaactaaatgac

SEQ ID NO: 1215421 - DNA, 25 bp, Homo sapien
gtaagaactaaatgactctgtaaga

SEQ ID NO: 1215422 - DNA, 25 bp, Homo sapien
ttcccaggcaggattgtagctgaat

SEQ ID NO: 1215423 - DNA, 25 bp, Homo sapien
ccaggcaggattgtagctgaattcc

SEQ ID NO: 1215424 - DNA, 25 bp, Homo sapien
tctctcagctaacttgggccaccaa

SEQ ID NO: 1215425 - DNA, 25 bp, Homo sapien
caaaataggtggtacagtgtgaggc

SEQ ID NO: 1215426 - DNA, 25 bp, Homo sapien
ggctaaaaggaatgactgtttggta

SEQ ID NO: 1215427 - DNA, 25 bp, Homo sapien
gctaggtgatggtgggcactgtgtc

SEQ ID NO: 1215428 - DNA, 25 bp, Homo sapien
ttggagctgctggccgacttcttta

SEQ ID NO: 1215429 - DNA, 25 bp, Homo sapien
ggagctgctggccgacttctttact

SEQ ID NO: 1215430 - DNA, 25 bp, Homo sapien
tcaggaccttcatcaaatcatcttg

SEQ ID NO: 1215431 - DNA, 25 bp, Homo sapien
tggagctgctggccgacttctttac

SEQ ID NO: 1215432 - DNA, 25 bp, Homo sapien
agagccaagcaacccatctgattta

SEQ ID NO: 1215433 - DNA, 25 bp, Homo sapien
aagagccaagcaacccatctgattt

SEQ ID NO: 1215434 - DNA, 25 bp, Homo sapien
ggccccgctcttgaatgaactactg

SEQ ID NO: 1215435 - DNA, 25 bp, Homo sapien
tccaaacatagcctaaatggctctt

SEQ ID NO: 1215436 - DNA, 25 bp, Homo sapien
ggcaaatctgtccatggcactctct

SEQ ID NO: 1215437 - DNA, 25 bp, Homo sapien
tctatagcacaaaatgtaaaccctg

SEQ ID NO: 1215438 - DNA, 25 bp, Homo sapien
aagagtcctcacacattccggtgct

SEQ ID NO: 1215439 - DNA, 25 bp, Homo sapien
tgaagagtcctcacacattccggtg

SEQ ID NO: 1215440 - DNA, 25 bp, Homo sapien
ctctgaagagtcctcacacattccg

SEQ ID NO: 1215441 - DNA, 25 bp, Homo sapien
tctgaagagtcctcacacattccgg

SEQ ID NO: 1215442 - DNA, 25 bp, Homo sapien
agttgttcatttcccaggacgtggt

SEQ ID NO: 1215443 - DNA, 25 bp, Homo sapien
tcatttcccaggacgtggtaaccaa

SEQ ID NO: 1215444 - DNA, 25 bp, Homo sapien
ttcccaggacgtggtaaccaaagca

SEQ ID NO: 1215445 - DNA, 25 bp, Homo sapien
cccaggacgtggtaaccaaagcatt

SEQ ID NO: 1215446 - DNA, 25 bp, Homo sapien
ttaacaccattactaggatctcctg

SEQ ID NO: 1215447 - DNA, 25 bp, Homo sapien
taggtctaggatgatagtatcttcc

SEQ ID NO: 1215448 - DNA, 25 bp, Homo sapien
tctcctgtgggtctagctgtttctc

SEQ ID NO: 1215449 - DNA, 25 bp, Homo sapien
ttataactgagtgccaaacatcatg

SEQ ID NO: 1215450 - DNA, 25 bp, Homo sapien
ccagtttcagtaagaactaaatgac

SEQ ID NO: 1215451 - DNA, 25 bp, Homo sapien
ttcccaggcaggattgtagctgaat

SEQ ID NO: 1215452 - DNA, 25 bp, Homo sapien
gtaagaactaaatgactctgtaaga

SEQ ID NO: 1215453 - DNA, 25 bp, Homo sapien
ccaggcaggattgtagctgaattcc

SEQ ID NO: 1215454 - DNA, 25 bp, Homo sapien
caacaaaacctgatgaggccgagta

SEQ ID NO: 1215455 - DNA, 25 bp, Homo sapien
tgggaacaacaaaacctgatgaggc

SEQ ID NO: 1215456 - DNA, 25 bp, Homo sapien
aacaacaaaacctgatgaggccgag

SEQ ID NO: 1215457 - DNA, 25 bp, Homo sapien
aaaacctgatgaggccgagtacatg

SEQ ID NO: 1215458 - DNA, 25 bp, Homo sapien
atgagtatcacttcccaccgccctg

SEQ ID NO: 1215459 - DNA, 25 bp, Homo sapien
agcaacagggtcaggaagtgaccat

SEQ ID NO: 1215460 - DNA, 25 bp, Homo sapien
tgaccatgagtatcacttcccaccg

SEQ ID NO: 1215461 - DNA, 25 bp, Homo sapien
agtgaccatgagtatcacttcccac

SEQ ID NO: 1215462 - DNA, 25 bp, Homo sapien
ttggagctgctggccgacttcttta

SEQ ID NO: 1215463 - DNA, 25 bp, Homo sapien
ggagctgctggccgacttctttact

SEQ ID NO: 1215464 - DNA, 25 bp, Homo sapien
tcaggaccttcatcaaatcatcttg

SEQ ID NO: 1215465 - DNA, 25 bp, Homo sapien
tggagctgctggccgacttctttac

SEQ ID NO: 1215466 - DNA, 25 bp, Homo sapien
agagccaagcaacccatctgattta

SEQ ID NO: 1215467 - DNA, 25 bp, Homo sapien
aagagccaagcaacccatctgattt

SEQ ID NO: 1215468 - DNA, 25 bp, Homo sapien
tgtatgcagacaccaaggtcataga

SEQ ID NO: 1215469 - DNA, 25 bp, Homo sapien
tatagaaataccagtgcatggagtg

SEQ ID NO: 1215470 - DNA, 25 bp, Homo sapien
tactccaccccctaggatatagaaa

SEQ ID NO: 1215471 - DNA, 25 bp, Homo sapien
cagtgcatggagtgtatgcagacac

SEQ ID NO: 1215472 - DNA, 25 bp, Homo sapien
cctcaatgcgaacgttggccgtgga

SEQ ID NO: 1215473 - DNA, 25 bp, Homo sapien
tgccggtcctcctgctttaccgatt

SEQ ID NO: 1215474 - DNA, 25 bp, Homo sapien
gatgctgtcggcattgtacatgtga

SEQ ID NO: 1215475 - DNA, 25 bp, Homo sapien
tccgcctcctttagtttgctctgag

SEQ ID NO: 1215476 - DNA, 25 bp, Homo sapien
ctgaaaaggaaacagaagttcactt

SEQ ID NO: 1215477 - DNA, 25 bp, Homo sapien
agatgcattggttgcctccaaagcc

SEQ ID NO: 1215478 - DNA, 25 bp, Homo sapien
aaggtcagataggtcatggatgtag

SEQ ID NO: 1215479 - DNA, 25 bp, Homo sapien
acagatgcattggttgcctccaaag

SEQ ID NO: 1215480 - DNA, 25 bp, Homo sapien
ataaggtcagataggtcatggatgt

SEQ ID NO: 1215481 - DNA, 25 bp, Homo sapien
gatataacagcaagactcggaccca

SEQ ID NO: 1215482 - DNA, 25 bp, Homo sapien
gggctttgacctccattgaaggaca

SEQ ID NO: 1215483 - DNA, 25 bp, Homo sapien
ggagcaaggctctactaacccagtg

SEQ ID NO: 1215484 - DNA, 25 bp, Homo sapien
caagcaactcttacgtgaggccaga

SEQ ID NO: 1215485 - DNA, 25 bp, Homo sapien
ttgcatggtagcctaagtcacaaca

SEQ ID NO: 1215486 - DNA, 25 bp, Homo sapien
gtagagcccggttcagacttgcatg

SEQ ID NO: 1215487 - DNA, 25 bp, Homo sapien
gaccctcatgcttcgactgttccag

SEQ ID NO: 1215488 - DNA, 25 bp, Homo sapien
tgcttgtcactggtggcatccaggt

SEQ ID NO: 1215489 - DNA, 25 bp, Homo sapien
cagagttcccattactggcaatgaa

SEQ ID NO: 1215490 - DNA, 25 bp, Homo sapien
cccaaagccaacttgtgtgagcctc

SEQ ID NO: 1215491 - DNA, 25 bp, Homo sapien
catattcaaggtataaggctcgtgg

SEQ ID NO: 1215492 - DNA, 25 bp, Homo sapien
ctggagaagagtgcctcaggcagct

SEQ ID NO: 1215493 - DNA, 25 bp, Homo sapien
agcgagactgcagttgttggcatct

SEQ ID NO: 1215494 - DNA, 25 bp, Homo sapien
tttagagtggataagcgagactgca

SEQ ID NO: 1215495 - DNA, 25 bp, Homo sapien
tggataagcgagactgcagttgttg

SEQ ID NO: 1215496 - DNA, 25 bp, Homo sapien
tagagtggataagcgagactgcagt

SEQ ID NO: 1215497 - DNA, 25 bp, Homo sapien
tcccagacgggcagcagcaaaagtt

SEQ ID NO: 1215498 - DNA, 25 bp, Homo sapien
cagggaaactaagagtgtggctttg

SEQ ID NO: 1215499 - DNA, 25 bp, Homo sapien
agtttcaacagggaaactaagagtg

SEQ ID NO: 1215500 - DNA, 25 bp, Homo sapien
tggctttgagcctcctaaggaagaa

SEQ ID NO: 1215501 - DNA, 25 bp, Homo sapien
atgaaggtttcagagaccgtggact

SEQ ID NO: 1215502 - DNA, 25 bp, Homo sapien
gacttgacggactccatggagttgc

SEQ ID NO: 1215503 - DNA, 25 bp, Homo sapien
tggagttgctgtactggaagcagtc

SEQ ID NO: 1215504 - DNA, 25 bp, Homo sapien
tcaaagtcctcgacagtcacaatgt

SEQ ID NO: 1215505 - DNA, 25 bp, Homo sapien
aacgctaactacaaaccagggagtg

SEQ ID NO: 1215506 - DNA, 25 bp, Homo sapien
tggtctctgagtatgcccacattcg

SEQ ID NO: 1215507 - DNA, 25 bp, Homo sapien
caatagatcctacttggcaagctca

SEQ ID NO: 1215508 - DNA, 25 bp, Homo sapien
ggcggatccctgttagacatataca

SEQ ID NO: 1215509 - DNA, 25 bp, Homo sapien
tatatctaagcagtccagacagacc

SEQ ID NO: 1215510 - DNA, 25 bp, Homo sapien
ggcactagagccacataagacagga

SEQ ID NO: 1215511 - DNA, 25 bp, Homo sapien
catgtgagccaggttattgcgtgca

SEQ ID NO: 1215512 - DNA, 25 bp, Homo sapien
ttgaagggcatagagaaacacacgg

SEQ ID NO: 1215513 - DNA, 25 bp, Homo sapien
ttgtactcactagcacacgtttacc

SEQ ID NO: 1215514 - DNA, 25 bp, Homo sapien
ctcactagcacacgtttaccaaggg

SEQ ID NO: 1215515 - DNA, 25 bp, Homo sapien
tactcactagcacacgtttaccaag

SEQ ID NO: 1215516 - DNA, 25 bp, Homo sapien
tcactagcacacgtttaccaagggc

SEQ ID NO: 1215517 - DNA, 25 bp, Homo sapien
ctcgttggggataagtgaccttgtc

SEQ ID NO: 1215518 - DNA, 25 bp, Homo sapien
tgaccttgtctttaattggtggaag

SEQ ID NO: 1215519 - DNA, 25 bp, Homo sapien
tggaagtgagttagaaggtttctgt

SEQ ID NO: 1215520 - DNA, 25 bp, Homo sapien
ttatccatatgagagactcgttggg

SEQ ID NO: 1215521 - DNA, 25 bp, Homo sapien
gagcagtgccaatggcaggctcagt

SEQ ID NO: 1215522 - DNA, 25 bp, Homo sapien
aggagcagtgccaatggcaggctca

SEQ ID NO: 1215523 - DNA, 25 bp, Homo sapien
ggagcagtgccaatggcaggctcag

SEQ ID NO: 1215524 - DNA, 25 bp, Homo sapien
caggagcagtgccaatggcaggctc

SEQ ID NO: 1215525 - DNA, 25 bp, Homo sapien
ggtcatgcttggcttgtaacttggt

SEQ ID NO: 1215526 - DNA, 25 bp, Homo sapien
cagaaggtcatgcttggcttgtaac

SEQ ID NO: 1215527 - DNA, 25 bp, Homo sapien
tctgcagaaggtcatgcttggcttg

SEQ ID NO: 1215528 - DNA, 25 bp, Homo sapien
cttggcttgtaacttggtgatgagg

SEQ ID NO: 1215529 - DNA, 25 bp, Homo sapien
caagcctctagcagagggttcccac

SEQ ID NO: 1215530 - DNA, 25 bp, Homo sapien
aagcctctagcagagggttcccaca

SEQ ID NO: 1215531 - DNA, 25 bp, Homo sapien
tcaagcctctagcagagggttccca

SEQ ID NO: 1215532 - DNA, 25 bp, Homo sapien
ccattaatcataggatgctgagagt

SEQ ID NO: 1215533 - DNA, 25 bp, Homo sapien
ctgggaatcccattaatcataggat

SEQ ID NO: 1215534 - DNA, 25 bp, Homo sapien
ttaatcataggatgctgagagttgg

SEQ ID NO: 1215535 - DNA, 25 bp, Homo sapien
gaatcccattaatcataggatgctg

SEQ ID NO: 1215536 - DNA, 25 bp, Homo sapien
ccataagattgtgctgggcccggtg

SEQ ID NO: 1215537 - DNA, 25 bp, Homo sapien
tctccatggagtgatgtgataaccc

SEQ ID NO: 1215538 - DNA, 25 bp, Homo sapien
taagcaaagtttggccctcaatgcc

SEQ ID NO: 1215539 - DNA, 25 bp, Homo sapien
gaatgcatttgtatggccccaaggc

SEQ ID NO: 1215540 - DNA, 25 bp, Homo sapien
tggctagactgcaatctgtccgctg

SEQ ID NO: 1215541 - DNA, 25 bp, Homo sapien
ctggctagactgcaatctgtccgct

SEQ ID NO: 1215542 - DNA, 25 bp, Homo sapien
ggctagactgcaatctgtccgctga

SEQ ID NO: 1215543 - DNA, 25 bp, Homo sapien
gctagactgcaatctgtccgctgac

SEQ ID NO: 1215544 - DNA, 25 bp, Homo sapien
tctccgacagctcacaaattttctc

SEQ ID NO: 1215545 - DNA, 25 bp, Homo sapien
ctctccgacagctcacaaattttct

SEQ ID NO: 1215546 - DNA, 25 bp, Homo sapien
tctcaaagggaatctgactcagagg

SEQ ID NO: 1215547 - DNA, 25 bp, Homo sapien
gaaaagagcggcctaaggtctcaca

SEQ ID NO: 1215548 - DNA, 25 bp, Homo sapien
cctttggaatcctaggacaccttga

SEQ ID NO: 1215549 - DNA, 25 bp, Homo sapien
tcagcaccgggaaattcaactcagc

SEQ ID NO: 1215550 - DNA, 25 bp, Homo sapien
cagcaaagctgagacaagcgaggcc

SEQ ID NO: 1215551 - DNA, 25 bp, Homo sapien
agcgaggcctgtatcatccaagttc

SEQ ID NO: 1215552 - DNA, 25 bp, Homo sapien
gagctgaagaaatgccggtgctgcc

SEQ ID NO: 1215553 - DNA, 25 bp, Homo sapien
cagcttaatggtccaccctgtcaga

SEQ ID NO: 1215554 - DNA, 25 bp, Homo sapien
tgtatgtgccaagttggagctggtg

SEQ ID NO: 1215555 - DNA, 25 bp, Homo sapien
aggacggtcgcagcgacccaaatgc

SEQ ID NO: 1215556 - DNA, 25 bp, Homo sapien
tatgtgccaagttggagctggtgtc

SEQ ID NO: 1215557 - DNA, 25 bp, Homo sapien
gagctggtgtcaggacggtcgcagc

SEQ ID NO: 1215558 - DNA, 25 bp, Homo sapien
ttcatgcctttctcctgcctcagct

SEQ ID NO: 1215559 - DNA, 25 bp, Homo sapien
acagagtgcagtggtgcgatctcag

SEQ ID NO: 1215560 - DNA, 25 bp, Homo sapien
agagtctcaatcagtcgcccaggcc

SEQ ID NO: 1215561 - DNA, 25 bp, Homo sapien
gtcactgcaagctctgcctcccagg

SEQ ID NO: 1215562 - DNA, 25 bp, Homo sapien
taagtagctgctatggtcacacagc

SEQ ID NO: 1215563 - DNA, 25 bp, Homo sapien
aaacccaggcaatctccctcggaga

SEQ ID NO: 1215564 - DNA, 25 bp, Homo sapien
gaaggcttagtgaggttaagtagct

SEQ ID NO: 1215565 - DNA, 25 bp, Homo sapien
ggagacctaacactttgccactacc

SEQ ID NO: 1215566 - DNA, 25 bp, Homo sapien
ccaccagaggaattgcctggctgga

SEQ ID NO: 1215567 - DNA, 25 bp, Homo sapien
cgtgtctgctgataaaccggataca

SEQ ID NO: 1215568 - DNA, 25 bp, Homo sapien
accaccagaggaattgcctggctgg

SEQ ID NO: 1215569 - DNA, 25 bp, Homo sapien
ctgataaaccggatacagctttcca

SEQ ID NO: 1215570 - DNA, 25 bp, Homo sapien
agttggtgaagccattgcacaaatt

SEQ ID NO: 1215571 - DNA, 25 bp, Homo sapien
gaagccattgcacaaattcttgaaa

SEQ ID NO: 1215572 - DNA, 25 bp, Homo sapien
taggttaggacaccaaggaaaagca

SEQ ID NO: 1215573 - DNA, 25 bp, Homo sapien
tcttgaaagagcgtcatcatcttga

SEQ ID NO: 1215574 - DNA, 25 bp, Homo sapien
ccggaaaattccttcatgctgtagt

SEQ ID NO: 1215575 - DNA, 25 bp, Homo sapien
gacacccggaaaattccttcatgct

SEQ ID NO: 1215576 - DNA, 25 bp, Homo sapien
tgggatcctgacacccggaaaattc

SEQ ID NO: 1215577 - DNA, 25 bp, Homo sapien
tcctgacacccggaaaattccttca

SEQ ID NO: 1215578 - DNA, 25 bp, Homo sapien
cagctatggaatccatgtcatggtc

SEQ ID NO: 1215579 - DNA, 25 bp, Homo sapien
tgacgcaggccatcaggtcatgaaa

SEQ ID NO: 1215580 - DNA, 25 bp, Homo sapien
tggtcgttctggtccccagccaggg

SEQ ID NO: 1215581 - DNA, 25 bp, Homo sapien
ccagcccccggaagtaaagcttcag

SEQ ID NO: 1215582 - DNA, 25 bp, Homo sapien
ctaccggtgctgtagcccagaagcc

SEQ ID NO: 1215583 - DNA, 25 bp, Homo sapien
agaagccaatctgaagccagaatgg

SEQ ID NO: 1215584 - DNA, 25 bp, Homo sapien
cccagaagccaatctgaagccagaa

SEQ ID NO: 1215585 - DNA, 25 bp, Homo sapien
agccaatctgaagccagaatggtac

SEQ ID NO: 1215586 - DNA, 25 bp, Homo sapien
taatcagagtggttttgggcaggac

SEQ ID NO: 1215587 - DNA, 25 bp, Homo sapien
tttgggcaggactaggaggactttc

SEQ ID NO: 1215588 - DNA, 25 bp, Homo sapien
gactttccggatgtgcagagctctc

SEQ ID NO: 1215589 - DNA, 25 bp, Homo sapien
gaggtatctcatgataatcagagtg

SEQ ID NO: 1215590 - DNA, 25 bp, Homo sapien
gcagagctgaatatggctgctacac

SEQ ID NO: 1215591 - DNA, 25 bp, Homo sapien
ctgaatatggctgctacacaccaac

SEQ ID NO: 1215592 - DNA, 25 bp, Homo sapien
agctgaatatggctgctacacacca

SEQ ID NO: 1215593 - DNA, 25 bp, Homo sapien
agagctgaatatggctgctacacac

SEQ ID NO: 1215594 - DNA, 25 bp, Homo sapien
gctcattcacgtgggcttggcagga

SEQ ID NO: 1215595 - DNA, 25 bp, Homo sapien
ctctggcactgacattagcgagggc

SEQ ID NO: 1215596 - DNA, 25 bp, Homo sapien
gggaagatgttctcatgctggatga

SEQ ID NO: 1215597 - DNA, 25 bp, Homo sapien
tggcaggacacctggtcgtggccct

SEQ ID NO: 1215598 - DNA, 25 bp, Homo sapien
cacttgagactacttggaacttaga

SEQ ID NO: 1215599 - DNA, 25 bp, Homo sapien
tagagaacaactcaactcctcaagg

SEQ ID NO: 1215600 - DNA, 25 bp, Homo sapien
aaacactgggtttcggcatcagata

SEQ ID NO: 1215601 - DNA, 25 bp, Homo sapien
gaaaaccagctctgatacttggtag

SEQ ID NO: 1215602 - DNA, 25 bp, Homo sapien
tcttcaaccgaggtagtctctccat

SEQ ID NO: 1215603 - DNA, 25 bp, Homo sapien
gctcgtgtggtgctctgcggtcaca

SEQ ID NO: 1215604 - DNA, 25 bp, Homo sapien
gcggtcacatcctgggttgagtctt

SEQ ID NO: 1215605 - DNA, 25 bp, Homo sapien
cgtcatcgctcgtgtggtgctctgc

SEQ ID NO: 1215606 - DNA, 25 bp, Homo sapien
ccactgaccaggaagcagggcctcg

SEQ ID NO: 1215607 - DNA, 25 bp, Homo sapien
ctgaccaggaagcagggcctcgtac

SEQ ID NO: 1215608 - DNA, 25 bp, Homo sapien
cctggcgtccccactgaccaggaag

SEQ ID NO: 1215609 - DNA, 25 bp, Homo sapien
ccctggcgtccccactgaccaggaa

SEQ ID NO: 1215610 - DNA, 25 bp, Homo sapien
tctatttgagaaggtgggctacctc

SEQ ID NO: 1215611 - DNA, 25 bp, Homo sapien
gaaaggcctagttcctcacctctgg

SEQ ID NO: 1215612 - DNA, 25 bp, Homo sapien
gctgtctggcaggagtctaggctat

SEQ ID NO: 1215613 - DNA, 25 bp, Homo sapien
gataagggaccaacatcatgctgca

SEQ ID NO: 1215614 - DNA, 25 bp, Homo sapien
tgtcttggaccacgatgtactgatg

SEQ ID NO: 1215615 - DNA, 25 bp, Homo sapien
tgagtccgtcgatgccattgtgccg

SEQ ID NO: 1215616 - DNA, 25 bp, Homo sapien
tggcaatggcctcgatgggctcaca

SEQ ID NO: 1215617 - DNA, 25 bp, Homo sapien
cttcttaaaggacagctctcgggct

SEQ ID NO: 1215618 - DNA, 25 bp, Homo sapien
tcagatgagatctctctgggaccag

SEQ ID NO: 1215619 - DNA, 25 bp, Homo sapien
gagaatcaaccaacagcctatcaga

SEQ ID NO: 1215620 - DNA, 25 bp, Homo sapien
gcccacgggacaactgcttcaaagt

SEQ ID NO: 1215621 - DNA, 25 bp, Homo sapien
tcccagcctgatctttcgagaaaag

SEQ ID NO: 1215622 - DNA, 25 bp, Homo sapien
tgcgatgctatcaacagagggagga

SEQ ID NO: 1215623 - DNA, 25 bp, Homo sapien
tctggctactgatgacaaagaaagc

SEQ ID NO: 1215624 - DNA, 25 bp, Homo sapien
gcagcgttaaatcggcaagatggcc

SEQ ID NO: 1215625 - DNA, 25 bp, Homo sapien
gtccacgcacagattgccaccaggt

SEQ ID NO: 1215626 - DNA, 25 bp, Homo sapien
tgtttgcaagataaatatcggctac

SEQ ID NO: 1215627 - DNA, 25 bp, Homo sapien
ctcaatctcagacttggggctggac

SEQ ID NO: 1215628 - DNA, 25 bp, Homo sapien
ggacctctccacgacaccgtcctcg

SEQ ID NO: 1215629 - DNA, 25 bp, Homo sapien
caagataaatatcggctacatgacc

SEQ ID NO: 1215630 - DNA, 25 bp, Homo sapien
gatatctcaataaacccacctggtg

SEQ ID NO: 1215631 - DNA, 25 bp, Homo sapien
tttccttagggacatcgtggcctcc

SEQ ID NO: 1215632 - DNA, 25 bp, Homo sapien
tgtaagactgccacaaaggtctggg

SEQ ID NO: 1215633 - DNA, 25 bp, Homo sapien
tctgaatctttgcacgaacacgggt

SEQ ID NO: 1215634 - DNA, 25 bp, Homo sapien
tctggccccttgagatgagattagt

SEQ ID NO: 1215635 - DNA, 25 bp, Homo sapien
gaatccctctagacagccagatcgg

SEQ ID NO: 1215636 - DNA, 25 bp, Homo sapien
tcagtgtccagaggctacggttaac

SEQ ID NO: 1215637 - DNA, 25 bp, Homo sapien
tccatattcatcaggagcgccctgg

SEQ ID NO: 1215638 - DNA, 25 bp, Homo sapien
cacagttacttgatattggcttgcc

SEQ ID NO: 1215639 - DNA, 25 bp, Homo sapien
caatttctatgcacaaatggcatca

SEQ ID NO: 1215640 - DNA, 25 bp, Homo sapien
ggatcacgaccttttgattgtaggg

SEQ ID NO: 1215641 - DNA, 25 bp, Homo sapien
taactacactgagtaagtgatctga

SEQ ID NO: 1215642 - DNA, 25 bp, Homo sapien
caaggatttccctggcaccactaac

SEQ ID NO: 1215643 - DNA, 25 bp, Homo sapien
aatgcagcataagggcacctcactc

SEQ ID NO: 1215644 - DNA, 25 bp, Homo sapien
gatctgagtgaagcgtgagtaccaa

SEQ ID NO: 1215645 - DNA, 25 bp, Homo sapien
ctaactccagttgcaggaagaatgg

SEQ ID NO: 1215646 - DNA, 25 bp, Homo sapien
ttggtggtcacgggctttgtgttgt

SEQ ID NO: 1215647 - DNA, 25 bp, Homo sapien
ctttgtgttgtcaagatgtaagttg

SEQ ID NO: 1215648 - DNA, 25 bp, Homo sapien
gtggtcacgggctttgtgttgtcaa

SEQ ID NO: 1215649 - DNA, 25 bp, Homo sapien
ggtggtcacgggctttgtgttgtca

SEQ ID NO: 1215650 - DNA, 25 bp, Homo sapien
gatggaacacttatctggcccttct

SEQ ID NO: 1215651 - DNA, 25 bp, Homo sapien
aaaagttttccggatgctcccagat

SEQ ID NO: 1215652 - DNA, 25 bp, Homo sapien
catggctgtcactccgaaaagtttt

SEQ ID NO: 1215653 - DNA, 25 bp, Homo sapien
gtcagtcagggaactgctcagccca

SEQ ID NO: 1215654 - DNA, 25 bp, Homo sapien
tgagttgacaccagggctagtggca

SEQ ID NO: 1215655 - DNA, 25 bp, Homo sapien
tctagttcccgtagctcattcaggg

SEQ ID NO: 1215656 - DNA, 25 bp, Homo sapien
tcttgacagacttgacaggccggaa

SEQ ID NO: 1215657 - DNA, 25 bp, Homo sapien
cattcagggccgagttcattgttgc

SEQ ID NO: 1215658 - DNA, 25 bp, Homo sapien
tctatgaccaggagaggctacacat

SEQ ID NO: 1215659 - DNA, 25 bp, Homo sapien
caaattagcgcggatggacactgat

SEQ ID NO: 1215660 - DNA, 25 bp, Homo sapien
tctaaattgggatgctagtagcccc

SEQ ID NO: 1215661 - DNA, 25 bp, Homo sapien
catcagagacaaaggtaggaacccg

SEQ ID NO: 1215662 - DNA, 25 bp, Homo sapien
gcagaggtccgagagcaagcgcggg

SEQ ID NO: 1215663 - DNA, 25 bp, Homo sapien
gcctgcagaggtccgagagcaagcg

SEQ ID NO: 1215664 - DNA, 25 bp, Homo sapien
ctgcagaggtccgagagcaagcgcg

SEQ ID NO: 1215665 - DNA, 25 bp, Homo sapien
gaggcctgcagaggtccgagagcaa

SEQ ID NO: 1215666 - DNA, 25 bp, Homo sapien
gtgggacaccaagctcagcactgag

SEQ ID NO: 1215667 - DNA, 25 bp, Homo sapien
ttgtggcggtgggacaccaagctca

SEQ ID NO: 1215668 - DNA, 25 bp, Homo sapien
gcacttcctgatttccgtctctcgc

SEQ ID NO: 1215669 - DNA, 25 bp, Homo sapien
ctgcctccttgtggcggtgggacac

SEQ ID NO: 1215670 - DNA, 25 bp, Homo sapien
tcctggtagccaagggcccctagga

SEQ ID NO: 1215671 - DNA, 25 bp, Homo sapien
gtcattcatgagcagtgttcttagc

SEQ ID NO: 1215672 - DNA, 25 bp, Homo sapien
ttgtgggactgggtgacacccccag

SEQ ID NO: 1215673 - DNA, 25 bp, Homo sapien
cattcatgagcagtgttcttagcct

SEQ ID NO: 1215674 - DNA, 25 bp, Homo sapien
cgagtgtatgttatgctttctgtct

SEQ ID NO: 1215675 - DNA, 25 bp, Homo sapien
gctcttcctggcgagtgtatgttat

SEQ ID NO: 1215676 - DNA, 25 bp, Homo sapien
tgagtcaggcaaaggctcttcctgg

SEQ ID NO: 1215677 - DNA, 25 bp, Homo sapien
ctttctgtctgtggcacgtccagga

SEQ ID NO: 1215678 - DNA, 25 bp, Homo sapien
cagtgaggtgcaaagcgcagacccc

SEQ ID NO: 1215679 - DNA, 25 bp, Homo sapien
gagtgggtctggttttccccgctga

SEQ ID NO: 1215680 - DNA, 25 bp, Homo sapien
atgaatgagtgggtctggttttccc

SEQ ID NO: 1215681 - DNA, 25 bp, Homo sapien
cgcagacccccagacaagcggtgtg

SEQ ID NO: 1215682 - DNA, 25 bp, Homo sapien
ggtaggagcggacattacacagaag

SEQ ID NO: 1215683 - DNA, 25 bp, Homo sapien
caggtaggagcggacattacacaga

SEQ ID NO: 1215684 - DNA, 25 bp, Homo sapien
atcaggtaggagcggacattacaca

SEQ ID NO: 1215685 - DNA, 25 bp, Homo sapien
aggtaggagcggacattacacagaa

SEQ ID NO: 1215686 - DNA, 25 bp, Homo sapien
ggaatcctatgttccttcgctctga

SEQ ID NO: 1215687 - DNA, 25 bp, Homo sapien
cctgaggagcttaggaccataggtg

SEQ ID NO: 1215688 - DNA, 25 bp, Homo sapien
ccagaggccccttgaagagatcggt

SEQ ID NO: 1215689 - DNA, 25 bp, Homo sapien
tcaaactgagggttgccatgcctgg

SEQ ID NO: 1215690 - DNA, 25 bp, Homo sapien
tcttgtctctaccacctctccccag

SEQ ID NO: 1215691 - DNA, 25 bp, Homo sapien
ccagcactgaagattctggggtttt

SEQ ID NO: 1215692 - DNA, 25 bp, Homo sapien
ctctccccagcactgaagattctgg

SEQ ID NO: 1215693 - DNA, 25 bp, Homo sapien
agcactgaagattctggggttttgg

SEQ ID NO: 1215694 - DNA, 25 bp, Homo sapien
cctgccctgagctggctggtcacct

SEQ ID NO: 1215695 - DNA, 25 bp, Homo sapien
ctcctgccctgagctggctggtcac

SEQ ID NO: 1215696 - DNA, 25 bp, Homo sapien
ctgccctgagctggctggtcacctt

SEQ ID NO: 1215697 - DNA, 25 bp, Homo sapien
tcctgccctgagctggctggtcacc

SEQ ID NO: 1215698 - DNA, 25 bp, Homo sapien
gggccttgtacacactggcagtggc

SEQ ID NO: 1215699 - DNA, 25 bp, Homo sapien
tgtgccacaggtaattggctgtgct

SEQ ID NO: 1215700 - DNA, 25 bp, Homo sapien
cttgttgcgggccttgtacacactg

SEQ ID NO: 1215701 - DNA, 25 bp, Homo sapien
ctgtgtgccacaggtaattggctgt

SEQ ID NO: 1215702 - DNA, 25 bp, Homo sapien
caaagagcttgacaatgttctggtg

SEQ ID NO: 1215703 - DNA, 25 bp, Homo sapien
gcaggacctcaaactccctcacttg

SEQ ID NO: 1215704 - DNA, 25 bp, Homo sapien
tcacagcaaccagctctccggattt

SEQ ID NO: 1215705 - DNA, 25 bp, Homo sapien
caggtagctggtagtgttgaagacc

SEQ ID NO: 1215706 - DNA, 25 bp, Homo sapien
cagcaccaccaggaactcatcctca

SEQ ID NO: 1215707 - DNA, 25 bp, Homo sapien
aggctcccactggagcagtactcca

SEQ ID NO: 1215708 - DNA, 25 bp, Homo sapien
gcaccaccaggaactcatcctcagg

SEQ ID NO: 1215709 - DNA, 25 bp, Homo sapien
ccagtaccttctgccggcttccgcc

SEQ ID NO: 1215710 - DNA, 25 bp, Homo sapien
atggaatgattagcaggagtcagac

SEQ ID NO: 1215711 - DNA, 25 bp, Homo sapien
ttgatgtcgcgatgcacaatgccgt

SEQ ID NO: 1215712 - DNA, 25 bp, Homo sapien
acaatgccgttctcccgcaggtggt

SEQ ID NO: 1215713 - DNA, 25 bp, Homo sapien
ggcgcatgatgttccccggcttgat

SEQ ID NO: 1215714 - DNA, 25 bp, Homo sapien
tcagtcccatagaccgagacgaact

SEQ ID NO: 1215715 - DNA, 25 bp, Homo sapien
tggggtacaggggagagacataact

SEQ ID NO: 1215716 - DNA, 25 bp, Homo sapien
ggggtacaggggagagacataactc

SEQ ID NO: 1215717 - DNA, 25 bp, Homo sapien
atcttagagaacagaatgcattctt

SEQ ID NO: 1215718 - DNA, 25 bp, Homo sapien
tccatcttagagaacagaatgcatt

SEQ ID NO: 1215719 - DNA, 25 bp, Homo sapien
ttttccatcttagagaacagaatgc

SEQ ID NO: 1215720 - DNA, 25 bp, Homo sapien
ccatcttagagaacagaatgcattc

SEQ ID NO: 1215721 - DNA, 25 bp, Homo sapien
gaaccagaatgaggccatggagccg

SEQ ID NO: 1215722 - DNA, 25 bp, Homo sapien
gagagaaccagaatgaggccatgga

SEQ ID NO: 1215723 - DNA, 25 bp, Homo sapien
gctggcaagggcctgagacctgtca

SEQ ID NO: 1215724 - DNA, 25 bp, Homo sapien
ctgccggagagaaccagaatgaggc

SEQ ID NO: 1215725 - DNA, 25 bp, Homo sapien
agtcaccccgaacgctttttgctgg

SEQ ID NO: 1215726 - DNA, 25 bp, Homo sapien
atgatctccttgttccgccgtggcc

SEQ ID NO: 1215727 - DNA, 25 bp, Homo sapien
gtcactccaatgctccagagatcca

SEQ ID NO: 1215728 - DNA, 25 bp, Homo sapien
ccgcccgctcatacatgtcgggatg

SEQ ID NO: 1215729 - DNA, 25 bp, Homo sapien
ctgcaatggccccagccggcttctc

SEQ ID NO: 1215730 - DNA, 25 bp, Homo sapien
cagccggcttctccgtggtgatccg

SEQ ID NO: 1215731 - DNA, 25 bp, Homo sapien
cgttctcccgcctctgggcacctgc

SEQ ID NO: 1215732 - DNA, 25 bp, Homo sapien
cggcttctccgtggtgatccggtac

SEQ ID NO: 1215733 - DNA, 25 bp, Homo sapien
cagctggcaggtgatggggagggtg

SEQ ID NO: 1215734 - DNA, 25 bp, Homo sapien
ctggcaggtgatggggagggtgtag

SEQ ID NO: 1215735 - DNA, 25 bp, Homo sapien
acagctggcaggtgatggggagggt

SEQ ID NO: 1215736 - DNA, 25 bp, Homo sapien
agtgacagctggcaggtgatgggga

SEQ ID NO: 1215737 - DNA, 25 bp, Homo sapien
cttaagcaggcaataggagcgttct

SEQ ID NO: 1215738 - DNA, 25 bp, Homo sapien
gaactcgttccagcaaccagatggg

SEQ ID NO: 1215739 - DNA, 25 bp, Homo sapien
gaatatcctgaagagctaggaccaa

SEQ ID NO: 1215740 - DNA, 25 bp, Homo sapien
cctcccaggacatggagactgtcag

SEQ ID NO: 1215741 - DNA, 25 bp, Homo sapien
catggacgacaactcgctgcaggat

SEQ ID NO: 1215742 - DNA, 25 bp, Homo sapien
gatatagatgtggtgcaggactgcc

SEQ ID NO: 1215743 - DNA, 25 bp, Homo sapien
tggtctccgcaaagaactggtcgaa

SEQ ID NO: 1215744 - DNA, 25 bp, Homo sapien
tggtcgaagccccagcacttggcct

SEQ ID NO: 1215745 - DNA, 25 bp, Homo sapien
tgcttgccgtcgtgtgggcgatgtg

SEQ ID NO: 1215746 - DNA, 25 bp, Homo sapien
tgctgagacgctgggctcgaggaca

SEQ ID NO: 1215747 - DNA, 25 bp, Homo sapien
gccacactggtctgcttgtgcacgg

SEQ ID NO: 1215748 - DNA, 25 bp, Homo sapien
tgtgggcgatgtgctgtgctgagac

SEQ ID NO: 1215749 - DNA, 25 bp, Homo sapien
tgcaggtccactttggggacgaact

SEQ ID NO: 1215750 - DNA, 25 bp, Homo sapien
caggtccactttggggacgaacttg

SEQ ID NO: 1215751 - DNA, 25 bp, Homo sapien
ggacgaacttggggacgtccagagc

SEQ ID NO: 1215752 - DNA, 25 bp, Homo sapien
acgaacttggggacgtccagagcag

SEQ ID NO: 1215753 - DNA, 25 bp, Homo sapien
gggcctggtagccggcgcccaacac

SEQ ID NO: 1215754 - DNA, 25 bp, Homo sapien
gcagcccccgaaacattagctcctg

SEQ ID NO: 1215755 - DNA, 25 bp, Homo sapien
gaaacattagctcctgcccatccag

SEQ ID NO: 1215756 - DNA, 25 bp, Homo sapien
ccccgaaacattagctcctgcccat

SEQ ID NO: 1215757 - DNA, 25 bp, Homo sapien
ccacttccagagtccgtctgcatgt

SEQ ID NO: 1215758 - DNA, 25 bp, Homo sapien
tagaggagggatgtccttgccactt

SEQ ID NO: 1215759 - DNA, 25 bp, Homo sapien
tgctgctgaggtagaggagggatgt

SEQ ID NO: 1215760 - DNA, 25 bp, Homo sapien
cttccagagtccgtctgcatgtggc

SEQ ID NO: 1215761 - DNA, 25 bp, Homo sapien
gttcctggatctcaggcgttccagc

SEQ ID NO: 1215762 - DNA, 25 bp, Homo sapien
tctgcagccgccttcagttcctgga

SEQ ID NO: 1215763 - DNA, 25 bp, Homo sapien
tcttcaccagctcccggttcaggct

SEQ ID NO: 1215764 - DNA, 25 bp, Homo sapien
ggtctccgtgatattttgggagcat

SEQ ID NO: 1215765 - DNA, 25 bp, Homo sapien
cagctcccggttcaggctgctcagg

SEQ ID NO: 1215766 - DNA, 25 bp, Homo sapien
tcctgggtctccgtgatattttggg

SEQ ID NO: 1215767 - DNA, 25 bp, Homo sapien
cacaaagaaggaaaatcccacagac

SEQ ID NO: 1215768 - DNA, 25 bp, Homo sapien
ccacaaagaaggaaaatcccacaga

SEQ ID NO: 1215769 - DNA, 25 bp, Homo sapien
cccacaaagaaggaaaatcccacag

SEQ ID NO: 1215770 - DNA, 25 bp, Homo sapien
ccacaggcctatgtagctccacttc

SEQ ID NO: 1215771 - DNA, 25 bp, Homo sapien
ggagcttgactctgaacagagcaca

SEQ ID NO: 1215772 - DNA, 25 bp, Homo sapien
tggagcttgactctgaacagagcac

SEQ ID NO: 1215773 - DNA, 25 bp, Homo sapien
agcttgactctgaacagagcacagg

SEQ ID NO: 1215774 - DNA, 25 bp, Homo sapien
gacagggaccaggtgttggaagaat

SEQ ID NO: 1215775 - DNA, 25 bp, Homo sapien
gcaggagacagggaccaggtgttgg

SEQ ID NO: 1215776 - DNA, 25 bp, Homo sapien
gagacagggaccaggtgttggaaga

SEQ ID NO: 1215777 - DNA, 25 bp, Homo sapien
aggagacagggaccaggtgttggaa

SEQ ID NO: 1215778 - DNA, 25 bp, Homo sapien
gaactgtttgtagatgaagttcatc

SEQ ID NO: 1215779 - DNA, 25 bp, Homo sapien
gatgaagttcatcttgtccaaacag

SEQ ID NO: 1215780 - DNA, 25 bp, Homo sapien
agttcatcttgtccaaacagcactg

SEQ ID NO: 1215781 - DNA, 25 bp, Homo sapien
tgtagatgaagttcatcttgtccaa

SEQ ID NO: 1215782 - DNA, 25 bp, Homo sapien
gaatctgctcctcgttgtagccaag

SEQ ID NO: 1215783 - DNA, 25 bp, Homo sapien
atctgctcctcgttgtagccaagcc

SEQ ID NO: 1215784 - DNA, 25 bp, Homo sapien
gtgaatctgctcctcgttgtagcca

SEQ ID NO: 1215785 - DNA, 25 bp, Homo sapien
tgaatctgctcctcgttgtagccaa

SEQ ID NO: 1215786 - DNA, 25 bp, Homo sapien
taaggacgcttgatacttctgcacg

SEQ ID NO: 1215787 - DNA, 25 bp, Homo sapien
tgtgactaaggacgcttgatacttc

SEQ ID NO: 1215788 - DNA, 25 bp, Homo sapien
gccgtgtgtgactaaggacgcttga

SEQ ID NO: 1215789 - DNA, 25 bp, Homo sapien
ctcttgccgtgtgtgactaaggacg

SEQ ID NO: 1215790 - DNA, 25 bp, Homo sapien
ctgggcttctgtgttacaggcagcc

SEQ ID NO: 1215791 - DNA, 25 bp, Homo sapien
acagaacagccaaccaggcgcaggt

SEQ ID NO: 1215792 - DNA, 25 bp, Homo sapien
ggcttctgtgttacaggcagccaca

SEQ ID NO: 1215793 - DNA, 25 bp, Homo sapien
gccaaccaggcgcaggtggttcctg

SEQ ID NO: 1215794 - DNA, 25 bp, Homo sapien
tggtcagcaattagtagccagctta

SEQ ID NO: 1215795 - DNA, 25 bp, Homo sapien
actttggtcagcaattagtagccag

SEQ ID NO: 1215796 - DNA, 25 bp, Homo sapien
ccagcttatgtgtggctgggtaggg

SEQ ID NO: 1215797 - DNA, 25 bp, Homo sapien
caattagtagccagcttatgtgtgg

SEQ ID NO: 1215798 - DNA, 25 bp, Homo sapien
gagctggtgagatagctcttccagg

SEQ ID NO: 1215799 - DNA, 25 bp, Homo sapien
tttgctcggtcctgaaggagctggt

SEQ ID NO: 1215800 - DNA, 25 bp, Homo sapien
aagcaggtcctttcgtgtagggctg

SEQ ID NO: 1215801 - DNA, 25 bp, Homo sapien
gtaaggagctatgggaggcggcgag

SEQ ID NO: 1215802 - DNA, 25 bp, Homo sapien
cgttcgatgatgcggttgttgtcca

SEQ ID NO: 1215803 - DNA, 25 bp, Homo sapien
gttgttgtccaggaggtcagatgcc

SEQ ID NO: 1215804 - DNA, 25 bp, Homo sapien
tgccagcagcttcatcccctcgcag

SEQ ID NO: 1215805 - DNA, 25 bp, Homo sapien
cagcagcttcatcccctcgcagagc

SEQ ID NO: 1215806 - DNA, 25 bp, Homo sapien
tcaggaggtgctgggactctattta

SEQ ID NO: 1215807 - DNA, 25 bp, Homo sapien
gacatcaggaggtgctgggactcta

SEQ ID NO: 1215808 - DNA, 25 bp, Homo sapien
tcagacatcaggaggtgctgggact

SEQ ID NO: 1215809 - DNA, 25 bp, Homo sapien
aggaggtgctgggactctatttagc

SEQ ID NO: 1215810 - DNA, 25 bp, Homo sapien
aatgcttcaggatgcctcatgtgcc

SEQ ID NO: 1215811 - DNA, 25 bp, Homo sapien
cctgggttggtctcatggtgcagaa

SEQ ID NO: 1215812 - DNA, 25 bp, Homo sapien
agaagatagaaaggtcagccaggca

SEQ ID NO: 1215813 - DNA, 25 bp, Homo sapien
gtaatgctggcgacatcctggccag

SEQ ID NO: 1215814 - DNA, 25 bp, Homo sapien
tatgagagcttcttctccccacggc

SEQ ID NO: 1215815 - DNA, 25 bp, Homo sapien
ctataaaccagagggagtgggaagg

SEQ ID NO: 1215816 - DNA, 25 bp, Homo sapien
ccacggcccagccatgggcatggag

SEQ ID NO: 1215817 - DNA, 25 bp, Homo sapien
ccatgggcatggaggagcagtacct

SEQ ID NO: 1215818 - DNA, 25 bp, Homo sapien
cggagagagctgtgttcaacatgaa

SEQ ID NO: 1215819 - DNA, 25 bp, Homo sapien
taggctcagtcagaccaagcataga

SEQ ID NO: 1215820 - DNA, 25 bp, Homo sapien
caacatgaaacgcttgaagaggaag

SEQ ID NO: 1215821 - DNA, 25 bp, Homo sapien
tcagaaatcacaagggagcggagag

SEQ ID NO: 1215822 - DNA, 25 bp, Homo sapien
aggccagcagagtggacgagaggtg

SEQ ID NO: 1215823 - DNA, 25 bp, Homo sapien
tcaggccagcagagtggacgagagg

SEQ ID NO: 1215824 - DNA, 25 bp, Homo sapien
gccagcagagtggacgagaggtggt

SEQ ID NO: 1215825 - DNA, 25 bp, Homo sapien
cactcatgggctggaagtgttggcc

SEQ ID NO: 1215826 - DNA, 25 bp, Homo sapien
tacagcctggatcatatcatctccc

SEQ ID NO: 1215827 - DNA, 25 bp, Homo sapien
atatcatctcccaaaaatctgtatt

SEQ ID NO: 1215828 - DNA, 25 bp, Homo sapien
tcatacagcctggatcatatcatct

SEQ ID NO: 1215829 - DNA, 25 bp, Homo sapien
catatcatctcccaaaaatctgtat

SEQ ID NO: 1215830 - DNA, 25 bp, Homo sapien
gagagaaatcccttgtaaagtgcca

SEQ ID NO: 1215831 - DNA, 25 bp, Homo sapien
taagcagatctgaatgaagcaagcc

SEQ ID NO: 1215832 - DNA, 25 bp, Homo sapien
gaagcaagccctttgtcaatctgga

SEQ ID NO: 1215833 - DNA, 25 bp, Homo sapien
tgtcccagactaagagaacaacagg

SEQ ID NO: 1215834 - DNA, 25 bp, Homo sapien
gaagtcgcctgaaatccccgaagct

SEQ ID NO: 1215835 - DNA, 25 bp, Homo sapien
tccaggctacaagggtaagaccgca

SEQ ID NO: 1215836 - DNA, 25 bp, Homo sapien
gagttgtttaactgctgccgcccag

SEQ ID NO: 1215837 - DNA, 25 bp, Homo sapien
gaaaacggaaggacagaacatggcc

SEQ ID NO: 1215838 - DNA, 25 bp, Homo sapien
gaggagcgcctctgtacagtacagc

SEQ ID NO: 1215839 - DNA, 25 bp, Homo sapien
tccgtgccaggcgacgtctgcgcga

SEQ ID NO: 1215840 - DNA, 25 bp, Homo sapien
acgtctgcgcgagtgtggatttggg

SEQ ID NO: 1215841 - DNA, 25 bp, Homo sapien
tgcaggattccgcagaggagcgcct

SEQ ID NO: 1215842 - DNA, 25 bp, Homo sapien
ccacaccagcgcgcctttaaaggaa

SEQ ID NO: 1215843 - DNA, 25 bp, Homo sapien
ggcggctttggcgactgcgctactc

SEQ ID NO: 1215844 - DNA, 25 bp, Homo sapien
gctttggcgactgcgctactcccga

SEQ ID NO: 1215845 - DNA, 25 bp, Homo sapien
cctttaaaggaaccgcagcctgctg

SEQ ID NO: 1215846 - DNA, 25 bp, Homo sapien
agtctctgctgcagaccaggccgga

SEQ ID NO: 1215847 - DNA, 25 bp, Homo sapien
tccaatagtagcgggtacgggcgct

SEQ ID NO: 1215848 - DNA, 25 bp, Homo sapien
acacagaggcgcgaggaccggtcgg

SEQ ID NO: 1215849 - DNA, 25 bp, Homo sapien
ctcaggctctgtagatagcgcggcg

SEQ ID NO: 1215850 - DNA, 25 bp, Homo sapien
ggactctgggatcctgcggctgctc

SEQ ID NO: 1215851 - DNA, 25 bp, Homo sapien
gtccgcacaggtcacaccagccggg

SEQ ID NO: 1215852 - DNA, 25 bp, Homo sapien
aagcagtgcccctcgcctcgctccg

SEQ ID NO: 1215853 - DNA, 25 bp, Homo sapien
cagcaccaactcggcgaagcagtgc

SEQ ID NO: 1215854 - DNA, 25 bp, Homo sapien
taaacacgcaagagcaaatgccggg

SEQ ID NO: 1215855 - DNA, 25 bp, Homo sapien
gggcctttgctgaaagatgcaaacc

SEQ ID NO: 1215856 - DNA, 25 bp, Homo sapien
atatccatgtaaacacatgaacaca

SEQ ID NO: 1215857 - DNA, 25 bp, Homo sapien
cacatggctgtggatatcctctgat

SEQ ID NO: 1215858 - DNA, 25 bp, Homo sapien
tgcagcgggcagcacattgaacagc

SEQ ID NO: 1215859 - DNA, 25 bp, Homo sapien
agtgtctgagttctatttccctgca

SEQ ID NO: 1215860 - DNA, 25 bp, Homo sapien
cttcttaattagcacctgaactggg

SEQ ID NO: 1215861 - DNA, 25 bp, Homo sapien
aacagcctccgctgcagactgcagg

SEQ ID NO: 1215862 - DNA, 25 bp, Homo sapien
gtgggtgtgggagccagagagaacc

SEQ ID NO: 1215863 - DNA, 25 bp, Homo sapien
ggggtgggtgtgggagccagagaga

SEQ ID NO: 1215864 - DNA, 25 bp, Homo sapien
tgaggaatgaggggtgggtgtggga

SEQ ID NO: 1215865 - DNA, 25 bp, Homo sapien
ctgaggaatgaggggtgggtgtggg

SEQ ID NO: 1215866 - DNA, 25 bp, Homo sapien
tgccatctgaggaatgcgaacagga

SEQ ID NO: 1215867 - DNA, 25 bp, Homo sapien
tgtgtttacaggttcctcagcagcc

SEQ ID NO: 1215868 - DNA, 25 bp, Homo sapien
tgggcagagcaagaatgccagcagc

SEQ ID NO: 1215869 - DNA, 25 bp, Homo sapien
ccttcatagtaagcctgggcagagc

SEQ ID NO: 1215870 - DNA, 25 bp, Homo sapien
catcactagggtagacattcatgga

SEQ ID NO: 1215871 - DNA, 25 bp, Homo sapien
aatgactcaatgacctccatgctgg

SEQ ID NO: 1215872 - DNA, 25 bp, Homo sapien
cataattctttcagcagagaccacc

SEQ ID NO: 1215873 - DNA, 25 bp, Homo sapien
tcaaaactctcatgttacagctgga

SEQ ID NO: 1215874 - DNA, 25 bp, Homo sapien
gccccgttgcggaacctctgcagga

SEQ ID NO: 1215875 - DNA, 25 bp, Homo sapien
ccgagcggctcttcgggagcctgca

SEQ ID NO: 1215876 - DNA, 25 bp, Homo sapien
ctgcaggatctggtgctttttggag

SEQ ID NO: 1215877 - DNA, 25 bp, Homo sapien
tttttggagaccgagcggctcttcg

SEQ ID NO: 1215878 - DNA, 25 bp, Homo sapien
tagcaaaggagcgaggaaatgatct

SEQ ID NO: 1215879 - DNA, 25 bp, Homo sapien
ctgaatagcaaaggagcgaggaaat

SEQ ID NO: 1215880 - DNA, 25 bp, Homo sapien
ggagcgaggaaatgatctgctgaat

SEQ ID NO: 1215881 - DNA, 25 bp, Homo sapien
caaaggagcgaggaaatgatctgct

SEQ ID NO: 1215882 - DNA, 25 bp, Homo sapien
cagtgtggagctgccagataccctc

SEQ ID NO: 1215883 - DNA, 25 bp, Homo sapien
gcccatgatatccaaagccagtgtg

SEQ ID NO: 1215884 - DNA, 25 bp, Homo sapien
ttaagggaactcaacaaatagcaac

SEQ ID NO: 1215885 - DNA, 25 bp, Homo sapien
gggcccctcgtctaggcatgtgtca

SEQ ID NO: 1215886 - DNA, 25 bp, Homo sapien
gcttcttcacgacaggagccacctt

SEQ ID NO: 1215887 - DNA, 25 bp, Homo sapien
ccagctgagctttcttattctccac

SEQ ID NO: 1215888 - DNA, 25 bp, Homo sapien
ctcaatgggatccacgtcatgtgca

SEQ ID NO: 1215889 - DNA, 25 bp, Homo sapien
tcaatgggatccacgtcatgtgcaa

SEQ ID NO: 1215890 - DNA, 25 bp, Homo sapien
caccaccagctgagctttcttattc

SEQ ID NO: 1215891 - DNA, 25 bp, Homo sapien
tttgaatttggcgatgtgagccaca

SEQ ID NO: 1215892 - DNA, 25 bp, Homo sapien
ttgaatttggcgatgtgagccacag

SEQ ID NO: 1215893 - DNA, 25 bp, Homo sapien
ttttgaatttggcgatgtgagccac

SEQ ID NO: 1215894 - DNA, 25 bp, Homo sapien
ctttttgaatttggcgatgtgagcc

SEQ ID NO: 1215895 - DNA, 25 bp, Homo sapien
cagtgacgtgaacatggctcgcttc

SEQ ID NO: 1215896 - DNA, 25 bp, Homo sapien
gaaaaatcacgtacccacactgtga

SEQ ID NO: 1215897 - DNA, 25 bp, Homo sapien
tctggaaggcaggtcacatgtttgc

SEQ ID NO: 1215898 - DNA, 25 bp, Homo sapien
gatgacatcaggtaccattactcag

SEQ ID NO: 1215899 - DNA, 25 bp, Homo sapien
ctcgctaacatccaagtctgtctgg

SEQ ID NO: 1215900 - DNA, 25 bp, Homo sapien
cgctaacatccaagtctgtctggcc

SEQ ID NO: 1215901 - DNA, 25 bp, Homo sapien
ccaagtctgtctggccagtggccac

SEQ ID NO: 1215902 - DNA, 25 bp, Homo sapien
catccaagtctgtctggccagtggc

SEQ ID NO: 1215903 - DNA, 25 bp, Homo sapien
ggctgcagcaaaacctctgaagcac

SEQ ID NO: 1215904 - DNA, 25 bp, Homo sapien
cagcaaaacctctgaagcacatctt

SEQ ID NO: 1215905 - DNA, 25 bp, Homo sapien
aggctgcagcaaaacctctgaagca

SEQ ID NO: 1215906 - DNA, 25 bp, Homo sapien
caaaacctctgaagcacatcttcat

SEQ ID NO: 1215907 - DNA, 25 bp, Homo sapien
agagctctgagcgatgaagaatgct

SEQ ID NO: 1215908 - DNA, 25 bp, Homo sapien
ctgtatggctctggtagagctctga

SEQ ID NO: 1215909 - DNA, 25 bp, Homo sapien
tggctctggtagagctctgagcgat

SEQ ID NO: 1215910 - DNA, 25 bp, Homo sapien
tctggtagagctctgagcgatgaag

SEQ ID NO: 1215911 - DNA, 25 bp, Homo sapien
ctggctgaaggtcacggtgagggtg

SEQ ID NO: 1215912 - DNA, 25 bp, Homo sapien
ctgcggcattctgggtgacaggtga

SEQ ID NO: 1215913 - DNA, 25 bp, Homo sapien
tgagggtgctttctggagagggtct

SEQ ID NO: 1215914 - DNA, 25 bp, Homo sapien
ggctgcggcattctgggtgacaggt

SEQ ID NO: 1215915 - DNA, 25 bp, Homo sapien
tattgatagagggctgggtcctgcc

SEQ ID NO: 1215916 - DNA, 25 bp, Homo sapien
ttattgatagagggctgggtcctgc

SEQ ID NO: 1215917 - DNA, 25 bp, Homo sapien
gggtcctgccccagttctgctgaag

SEQ ID NO: 1215918 - DNA, 25 bp, Homo sapien
cagttctgctgaagcatgcaggcag

SEQ ID NO: 1215919 - DNA, 25 bp, Homo sapien
gaaggaatagtgcttatgtttctct

SEQ ID NO: 1215920 - DNA, 25 bp, Homo sapien
caaaccatatcagggactctagagg

SEQ ID NO: 1215921 - DNA, 25 bp, Homo sapien
gctgcaagggattggagtagaagga

SEQ ID NO: 1215922 - DNA, 25 bp, Homo sapien
ttggaggccacacatcaacatgaga

SEQ ID NO: 1215923 - DNA, 25 bp, Homo sapien
tggcgtaagcccctagctctgagcc

SEQ ID NO: 1215924 - DNA, 25 bp, Homo sapien
ggcggcccggtaacctgctcctgtc

SEQ ID NO: 1215925 - DNA, 25 bp, Homo sapien
cctgcgtttctttcagcggggtgcg

SEQ ID NO: 1215926 - DNA, 25 bp, Homo sapien
tgactcgtccgggctctgcggtttc

SEQ ID NO: 1215927 - DNA, 25 bp, Homo sapien
gatgtttgctctgcgcatttctgaa

SEQ ID NO: 1215928 - DNA, 25 bp, Homo sapien
caggctgcagtacccactgctcatg

SEQ ID NO: 1215929 - DNA, 25 bp, Homo sapien
ctgaaaaaggtagtcttagcagtga

SEQ ID NO: 1215930 - DNA, 25 bp, Homo sapien
agcagtcttccagttcctcgtccag

SEQ ID NO: 1215931 - DNA, 25 bp, Homo sapien
gacaagggtgtttgttgagaaggac

SEQ ID NO: 1215932 - DNA, 25 bp, Homo sapien
aaatgacttggccataacctcttag

SEQ ID NO: 1215933 - DNA, 25 bp, Homo sapien
acctgagtctgatgattgaaatgac

SEQ ID NO: 1215934 - DNA, 25 bp, Homo sapien
gacaggatgaagtacctgagtctga

SEQ ID NO: 1215935 - DNA, 25 bp, Homo sapien
tgaaggggttgatttccacaggtcc

SEQ ID NO: 1215936 - DNA, 25 bp, Homo sapien
acaggtccctctatggcactgtcca

SEQ ID NO: 1215937 - DNA, 25 bp, Homo sapien
caggtccctctatggcactgtccat

SEQ ID NO: 1215938 - DNA, 25 bp, Homo sapien
tgtgttctgaaatggactccacaga

SEQ ID NO: 1215939 - DNA, 25 bp, Homo sapien
ctgtgttctgaaatggactccacag

SEQ ID NO: 1215940 - DNA, 25 bp, Homo sapien
caggtcttcgaaggcctgtgttctg

SEQ ID NO: 1215941 - DNA, 25 bp, Homo sapien
cctcccaggtcttcgaaggcctgtg

SEQ ID NO: 1215942 - DNA, 25 bp, Homo sapien
agaagacaaaggcttgggcacttcc

SEQ ID NO: 1215943 - DNA, 25 bp, Homo sapien
aggcttgggcacttccttggatttt

SEQ ID NO: 1215944 - DNA, 25 bp, Homo sapien
agacaaaggcttgggcacttccttg

SEQ ID NO: 1215945 - DNA, 25 bp, Homo sapien
tggattttgctcactttactccatt

SEQ ID NO: 1215946 - DNA, 25 bp, Homo sapien
tgattggggaacagccatgtaaaga

SEQ ID NO: 1215947 - DNA, 25 bp, Homo sapien
gaacagccatgtaaagaggctgggt

SEQ ID NO: 1215948 - DNA, 25 bp, Homo sapien
ctggaggtgattggggaacagccat

SEQ ID NO: 1215949 - DNA, 25 bp, Homo sapien
tggggaacagccatgtaaagaggct

SEQ ID NO: 1215950 - DNA, 25 bp, Homo sapien
tctattccgattaagcccctggcat

SEQ ID NO: 1215951 - DNA, 25 bp, Homo sapien
tgtcctatgcggtggaaaagggcaa

SEQ ID NO: 1215952 - DNA, 25 bp, Homo sapien
tccagggcactggtgaaaaacaggt

SEQ ID NO: 1215953 - DNA, 25 bp, Homo sapien
caatgcacttggcatgtccagggca

SEQ ID NO: 1215954 - DNA, 25 bp, Homo sapien
gttcatctaagatgagtctaagcag

SEQ ID NO: 1215955 - DNA, 25 bp, Homo sapien
taagatgagtctaagcagcgggtca

SEQ ID NO: 1215956 - DNA, 25 bp, Homo sapien
ctgatctgtgaaatgttcatctaag

SEQ ID NO: 1215957 - DNA, 25 bp, Homo sapien
ctgtgaaatgttcatctaagatgag

SEQ ID NO: 1215958 - DNA, 25 bp, Homo sapien
atctcctgcagtgtgggcgggcgct

SEQ ID NO: 1215959 - DNA, 25 bp, Homo sapien
tgtagctgtcgatcttctgcttgat

SEQ ID NO: 1215960 - DNA, 25 bp, Homo sapien
aggcagttcttctctcgcgtgttgt

SEQ ID NO: 1215961 - DNA, 25 bp, Homo sapien
ttctctcgcgtgttgtagctgtcga

SEQ ID NO: 1215962 - DNA, 25 bp, Homo sapien
gatgtccgcttgtccgtggtagccg

SEQ ID NO: 1215963 - DNA, 25 bp, Homo sapien
gaaacccgtgtaggtgccgtcttca

SEQ ID NO: 1215964 - DNA, 25 bp, Homo sapien
cctggatgacctcactgacggtggt

SEQ ID NO: 1215965 - DNA, 25 bp, Homo sapien
tcagatgcactttgatgaaacccgt

SEQ ID NO: 1215966 - DNA, 25 bp, Homo sapien
cggtctggttgggttcactctttct

SEQ ID NO: 1215967 - DNA, 25 bp, Homo sapien
tgcccggattccacagatctgaaca

SEQ ID NO: 1215968 - DNA, 25 bp, Homo sapien
tttcctgaagtcacatgcagagtca

SEQ ID NO: 1215969 - DNA, 25 bp, Homo sapien
tacaactggaagtagacacgggcct

SEQ ID NO: 1215970 - DNA, 25 bp, Homo sapien
acaaagctgaggacctccgtgtcag

SEQ ID NO: 1215971 - DNA, 25 bp, Homo sapien
ttcattctcctttagcacaaagctg

SEQ ID NO: 1215972 - DNA, 25 bp, Homo sapien
tagcacaaagctgaggacctccgtg

SEQ ID NO: 1215973 - DNA, 25 bp, Homo sapien
tcctttagcacaaagctgaggacct

SEQ ID NO: 1215974 - DNA, 25 bp, Homo sapien
gatcttgacggtgatgctggaacca

SEQ ID NO: 1215975 - DNA, 25 bp, Homo sapien
gaaacctcaagtccacacagggaag

SEQ ID NO: 1215976 - DNA, 25 bp, Homo sapien
agttgacacgacctgagagaccctg

SEQ ID NO: 1215977 - DNA, 25 bp, Homo sapien
cattctcaggccatgggtgtcaccg

SEQ ID NO: 1215978 - DNA, 25 bp, Homo sapien
ccagtttctgcctaaacttgtcata

SEQ ID NO: 1215979 - DNA, 25 bp, Homo sapien
gctcctctttttccaggattgttag

SEQ ID NO: 1215980 - DNA, 25 bp, Homo sapien
tgggattctcttaaggcctcctcca

SEQ ID NO: 1215981 - DNA, 25 bp, Homo sapien
acttgttggattttgtcctgctcct

SEQ ID NO: 1215982 - DNA, 25 bp, Homo sapien
aataaatctgaatgcaccaggagga

SEQ ID NO: 1215983 - DNA, 25 bp, Homo sapien
aaataatggtcctgtacgtggcaag

SEQ ID NO: 1215984 - DNA, 25 bp, Homo sapien
ccagtttggtgacgagagaggcaac

SEQ ID NO: 1215985 - DNA, 25 bp, Homo sapien
tgcagatcgagagaggacgtcagct

SEQ ID NO: 1215986 - DNA, 25 bp, Homo sapien
ggaagagacttttgccacagctgga

SEQ ID NO: 1215987 - DNA, 25 bp, Homo sapien
acacatgacgatgatgacaacatta

SEQ ID NO: 1215988 - DNA, 25 bp, Homo sapien
atttccatacttagcaggagacttt

SEQ ID NO: 1215989 - DNA, 25 bp, Homo sapien
ccatacttagcaggagactttttaa

SEQ ID NO: 1215990 - DNA, 25 bp, Homo sapien
tttggggaaacacatgacgatgatg

SEQ ID NO: 1215991 - DNA, 25 bp, Homo sapien
gaggctcccctctctgtaatcaagg

SEQ ID NO: 1215992 - DNA, 25 bp, Homo sapien
caagttggccgaattggaggctccc

SEQ ID NO: 1215993 - DNA, 25 bp, Homo sapien
tttagacctcagcataggccttggg

SEQ ID NO: 1215994 - DNA, 25 bp, Homo sapien
ataaaatagccatccccatagaggg

SEQ ID NO: 1215995 - DNA, 25 bp, Homo sapien
ttccagtaacggtgacacatttgca

SEQ ID NO: 1215996 - DNA, 25 bp, Homo sapien
tccagacctgtgcattgagtggttt

SEQ ID NO: 1215997 - DNA, 25 bp, Homo sapien
tggtttttccagtaacggtgacaca

SEQ ID NO: 1215998 - DNA, 25 bp, Homo sapien
cctgtgcattgagtggtttttccag

SEQ ID NO: 1215999 - DNA, 25 bp, Homo sapien
taaactaccagatgaagagagttcc

SEQ ID NO: 1216000 - DNA, 25 bp, Homo sapien
ctttaatggccggacactgtggctt

SEQ ID NO: 1216001 - DNA, 25 bp, Homo sapien
tgcacagagtgtataacgatcaagg

SEQ ID NO: 1216002 - DNA, 25 bp, Homo sapien
taccatttctatgtgtcgggaacac

SEQ ID NO: 1216003 - DNA, 25 bp, Homo sapien
gtactctcgaccagacactgcagct

SEQ ID NO: 1216004 - DNA, 25 bp, Homo sapien
gcgacgctcccacgggtactctcga

SEQ ID NO: 1216005 - DNA, 25 bp, Homo sapien
acctacgccgggacggctgcctccg

SEQ ID NO: 1216006 - DNA, 25 bp, Homo sapien
cactgcagctcagcgcactttcgct

SEQ ID NO: 1216007 - DNA, 25 bp, Homo sapien
cccaggcggccccgcatccttccgc

SEQ ID NO: 1216008 - DNA, 25 bp, Homo sapien
ccaggcggccccgcatccttccgcc

SEQ ID NO: 1216009 - DNA, 25 bp, Homo sapien
aggcggccccgcatccttccgccca

SEQ ID NO: 1216010 - DNA, 25 bp, Homo sapien
caggcggccccgcatccttccgccc

SEQ ID NO: 1216011 - DNA, 25 bp, Homo sapien
gcaaaccccaagagttcagccgttg

SEQ ID NO: 1216012 - DNA, 25 bp, Homo sapien
ccttaacatataccccgatctaggg

SEQ ID NO: 1216013 - DNA, 25 bp, Homo sapien
tttccaaggtattgctcccgggctc

SEQ ID NO: 1216014 - DNA, 25 bp, Homo sapien
tggttatccgctctaagcaacaggg

SEQ ID NO: 1216015 - DNA, 25 bp, Homo sapien
atctctcaaaataggatccggagaa

SEQ ID NO: 1216016 - DNA, 25 bp, Homo sapien
tcttctctccatttaggtgtaaaat

SEQ ID NO: 1216017 - DNA, 25 bp, Homo sapien
ccggagaaagccgtacccagcatag

SEQ ID NO: 1216018 - DNA, 25 bp, Homo sapien
taggtgtaaaatacaacgcaaggtg

SEQ ID NO: 1216019 - DNA, 25 bp, Homo sapien
ctaaatgattaaggatcacttctct

SEQ ID NO: 1216020 - DNA, 25 bp, Homo sapien
taaatgattaaggatcacttctctg

SEQ ID NO: 1216021 - DNA, 25 bp, Homo sapien
aaatgattaaggatcacttctctgt

SEQ ID NO: 1216022 - DNA, 25 bp, Homo sapien
atgattaaggatcacttctctgttc

SEQ ID NO: 1216023 - DNA, 25 bp, Homo sapien
aaggtgtcatagacaccatccccca

SEQ ID NO: 1216024 - DNA, 25 bp, Homo sapien
gaaggtgtcatagacaccatccccc

SEQ ID NO: 1216025 - DNA, 25 bp, Homo sapien
aggtgtcatagacaccatcccccaa

SEQ ID NO: 1216026 - DNA, 25 bp, Homo sapien
ggtgtcatagacaccatcccccaac

SEQ ID NO: 1216027 - DNA, 25 bp, Homo sapien
tacatttgaacaggggggacatttg

SEQ ID NO: 1216028 - DNA, 25 bp, Homo sapien
gtggttcagaaggattgcagagtac

SEQ ID NO: 1216029 - DNA, 25 bp, Homo sapien
ggtggaggtggttcagaaggattgc

SEQ ID NO: 1216030 - DNA, 25 bp, Homo sapien
gattgcagagtacatttgaacaggg

SEQ ID NO: 1216031 - DNA, 25 bp, Homo sapien
ggaggttgcaatgagctgacatgac

SEQ ID NO: 1216032 - DNA, 25 bp, Homo sapien
ggttgcaatgagctgacatgacacc

SEQ ID NO: 1216033 - DNA, 25 bp, Homo sapien
gaggttgcaatgagctgacatgaca

SEQ ID NO: 1216034 - DNA, 25 bp, Homo sapien
ttgcaatgagctgacatgacaccac

SEQ ID NO: 1216035 - DNA, 25 bp, Homo sapien
tcttaaacaaagtcaaggagccagt

SEQ ID NO: 1216036 - DNA, 25 bp, Homo sapien
taaacaggcccacatatagaatcta

SEQ ID NO: 1216037 - DNA, 25 bp, Homo sapien
gagccagttcaaatgtagccacagc

SEQ ID NO: 1216038 - DNA, 25 bp, Homo sapien
tgcccaagtacatatagtctctctg

SEQ ID NO: 1216039 - DNA, 25 bp, Homo sapien
aagtttgtgatcatagaccctggcc

SEQ ID NO: 1216040 - DNA, 25 bp, Homo sapien
gaactgcgcccgtggtgtttcagga

SEQ ID NO: 1216041 - DNA, 25 bp, Homo sapien
tctcgaggtacatgaatataggccc

SEQ ID NO: 1216042 - DNA, 25 bp, Homo sapien
caattggtgtgctgtagcggcttcc

SEQ ID NO: 1216043 - DNA, 25 bp, Homo sapien
ctttcagtgctgtcccccagtcttt

SEQ ID NO: 1216044 - DNA, 25 bp, Homo sapien
tctttgctgcctgggggaccccgct

SEQ ID NO: 1216045 - DNA, 25 bp, Homo sapien
agtgctgtcccccagtctttgctgc

SEQ ID NO: 1216046 - DNA, 25 bp, Homo sapien
gtctttgctgcctgggggaccccgc

SEQ ID NO: 1216047 - DNA, 25 bp, Homo sapien
ggacagacttgctaatccaagggtg

SEQ ID NO: 1216048 - DNA, 25 bp, Homo sapien
ttattggctattccaacaactggag

SEQ ID NO: 1216049 - DNA, 25 bp, Homo sapien
ccttgtctatggtggtgagaggtct

SEQ ID NO: 1216050 - DNA, 25 bp, Homo sapien
gcacttgcaggattaactacccgtt

SEQ ID NO: 1216051 - DNA, 25 bp, Homo sapien
ggcaatacactgcataggggtatac

SEQ ID NO: 1216052 - DNA, 25 bp, Homo sapien
aatacactgcataggggtatactac

SEQ ID NO: 1216053 - DNA, 25 bp, Homo sapien
cagttttggcaatacactgcatagg

SEQ ID NO: 1216054 - DNA, 25 bp, Homo sapien
agttttggcaatacactgcataggg

SEQ ID NO: 1216055 - DNA, 25 bp, Homo sapien
gcatattccagatggccaatacaag

SEQ ID NO: 1216056 - DNA, 25 bp, Homo sapien
cacatatgcatctctgggcatatct

SEQ ID NO: 1216057 - DNA, 25 bp, Homo sapien
tacaagctggttaggtaattagccc

SEQ ID NO: 1216058 - DNA, 25 bp, Homo sapien
ccatttgcaggtttgtaagatcata

SEQ ID NO: 1216059 - DNA, 25 bp, Homo sapien
agatgccgagggacactagaagcga

SEQ ID NO: 1216060 - DNA, 25 bp, Homo sapien
tctttcacctagaatgagcctagag

SEQ ID NO: 1216061 - DNA, 25 bp, Homo sapien
gacaccagttgtccaggtcaccaac

SEQ ID NO: 1216062 - DNA, 25 bp, Homo sapien
ccaaattacccctccagaacagatg

SEQ ID NO: 1216063 - DNA, 25 bp, Homo sapien
cacccttgtaagtaggacactggct

SEQ ID NO: 1216064 - DNA, 25 bp, Homo sapien
caaaacccagtagcagtgagttagc

SEQ ID NO: 1216065 - DNA, 25 bp, Homo sapien
gattctctatctttaccactctggg

SEQ ID NO: 1216066 - DNA, 25 bp, Homo sapien
gaggctggtccgtggagtaccacaa

SEQ ID NO: 1216067 - DNA, 25 bp, Homo sapien
tccagtttcttagtcaccaaaagta

SEQ ID NO: 1216068 - DNA, 25 bp, Homo sapien
tgccttctgtaaaccaggagtaaag

SEQ ID NO: 1216069 - DNA, 25 bp, Homo sapien
caaaagtaccaagacttcctcctat

SEQ ID NO: 1216070 - DNA, 25 bp, Homo sapien
tcctattaatgaggctgaaggctca

SEQ ID NO: 1216071 - DNA, 25 bp, Homo sapien
aattcaggacaacagcaatatggtg

SEQ ID NO: 1216072 - DNA, 25 bp, Homo sapien
gcttacaggagcagttcttcaacac

SEQ ID NO: 1216073 - DNA, 25 bp, Homo sapien
gctgccacctaaagatgtgctcgcc

SEQ ID NO: 1216074 - DNA, 25 bp, Homo sapien
tctatgatgtggtaccagagcccaa

SEQ ID NO: 1216075 - DNA, 25 bp, Homo sapien
catctgcacatgatcagcgggcatc

SEQ ID NO: 1216076 - DNA, 25 bp, Homo sapien
aaaagaagaggcgagcatgctcctg

SEQ ID NO: 1216077 - DNA, 25 bp, Homo sapien
ggtcataagtcaaacttcctctggg

SEQ ID NO: 1216078 - DNA, 25 bp, Homo sapien
agatccaggctagactctttcagag

SEQ ID NO: 1216079 - DNA, 25 bp, Homo sapien
tctaggcttgacttagcgatgggtg

SEQ ID NO: 1216080 - DNA, 25 bp, Homo sapien
tttatggatgggttcactgtgactc

SEQ ID NO: 1216081 - DNA, 25 bp, Homo sapien
cacttggcctgatgtgggactctcc

SEQ ID NO: 1216082 - DNA, 25 bp, Homo sapien
tgaaatagccacaggtcaccacttg

SEQ ID NO: 1216083 - DNA, 25 bp, Homo sapien
acaagcatgggcgaagtatctccct

SEQ ID NO: 1216084 - DNA, 25 bp, Homo sapien
agagagtcacaagcatgggcgaagt

SEQ ID NO: 1216085 - DNA, 25 bp, Homo sapien
atctcccttagggagaacaagaatt

SEQ ID NO: 1216086 - DNA, 25 bp, Homo sapien
tgggcgaagtatctcccttagggag

SEQ ID NO: 1216087 - DNA, 25 bp, Homo sapien
tgttaaagcttgtggcagggctaca

SEQ ID NO: 1216088 - DNA, 25 bp, Homo sapien
acagggtcagccacatatcactggg

SEQ ID NO: 1216089 - DNA, 25 bp, Homo sapien
agggtcagccacatatcactgggca

SEQ ID NO: 1216090 - DNA, 25 bp, Homo sapien
cagaagttgttaaagcttgtggcag

SEQ ID NO: 1216091 - DNA, 25 bp, Homo sapien
tcccggagctgcaagagccaaatag

SEQ ID NO: 1216092 - DNA, 25 bp, Homo sapien
ccggagctgcaagagccaaataggc

SEQ ID NO: 1216093 - DNA, 25 bp, Homo sapien
ctcccggagctgcaagagccaaata

SEQ ID NO: 1216094 - DNA, 25 bp, Homo sapien
cccggagctgcaagagccaaatagg

SEQ ID NO: 1216095 - DNA, 25 bp, Homo sapien
atagatacggttagacagctcccca

SEQ ID NO: 1216096 - DNA, 25 bp, Homo sapien
caaagacactatctaaggccacggg

SEQ ID NO: 1216097 - DNA, 25 bp, Homo sapien
tagctccatgtacaaggtgccgtgc

SEQ ID NO: 1216098 - DNA, 25 bp, Homo sapien
gggttagccccgtgtatctcaggaa

SEQ ID NO: 1216099 - DNA, 25 bp, Homo sapien
ggctccgtgggtcccaccgcgcgcc

SEQ ID NO: 1216100 - DNA, 25 bp, Homo sapien
ggcctggcgctctggggaccgcggg

SEQ ID NO: 1216101 - DNA, 25 bp, Homo sapien
agcggccgcgcgacaatgtacccag

SEQ ID NO: 1216102 - DNA, 25 bp, Homo sapien
cgggctgcgaagttcgctccgggct

SEQ ID NO: 1216103 - DNA, 25 bp, Homo sapien
ggaacggcaccggcgggctctggcc

SEQ ID NO: 1216104 - DNA, 25 bp, Homo sapien
gaacggcaccggcgggctctggccc

SEQ ID NO: 1216105 - DNA, 25 bp, Homo sapien
cggggaacggcaccggcgggctctg

SEQ ID NO: 1216106 - DNA, 25 bp, Homo sapien
gggaacggcaccggcgggctctggc

SEQ ID NO: 1216107 - DNA, 25 bp, Homo sapien
tgcgggaactgctgcgggggcggcg

SEQ ID NO: 1216108 - DNA, 25 bp, Homo sapien
ctgcgggaactgctgcgggggcggc

SEQ ID NO: 1216109 - DNA, 25 bp, Homo sapien
ggaactgctgcgggggcggcggcgg

SEQ ID NO: 1216110 - DNA, 25 bp, Homo sapien
actgctgcgggggcggcggcggcgg

SEQ ID NO: 1216111 - DNA, 25 bp, Homo sapien
cttgttgaagatctgcaaaactttg

SEQ ID NO: 1216112 - DNA, 25 bp, Homo sapien
tttgccgttgatgcccagccccagg

SEQ ID NO: 1216113 - DNA, 25 bp, Homo sapien
gaccttgtagtcatcgatgatggcg

SEQ ID NO: 1216114 - DNA, 25 bp, Homo sapien
cttgtagtcatcgatgatggcgttc

SEQ ID NO: 1216115 - DNA, 25 bp, Homo sapien
tctgaagtcgatattctcacttgaa

SEQ ID NO: 1216116 - DNA, 25 bp, Homo sapien
gtcgatattctcacttgaatcctta

SEQ ID NO: 1216117 - DNA, 25 bp, Homo sapien
ttctcacttgaatccttattctccc

SEQ ID NO: 1216118 - DNA, 25 bp, Homo sapien
ttaacttctgaagtcgatattctca

SEQ ID NO: 1216119 - DNA, 25 bp, Homo sapien
ggcaggagtacacggtaggtagcat

SEQ ID NO: 1216120 - DNA, 25 bp, Homo sapien
taggtagcatgctcggtgacagggc

SEQ ID NO: 1216121 - DNA, 25 bp, Homo sapien
gaatataacgtagcaacagggcagg

SEQ ID NO: 1216122 - DNA, 25 bp, Homo sapien
ctgcggaggtggagaatataacgta

SEQ ID NO: 1216123 - DNA, 25 bp, Homo sapien
gaggtcacacttttgaatgtggtag

SEQ ID NO: 1216124 - DNA, 25 bp, Homo sapien
atgaggtcacacttttgaatgtggt

SEQ ID NO: 1216125 - DNA, 25 bp, Homo sapien
ggtcacacttttgaatgtggtagcc

SEQ ID NO: 1216126 - DNA, 25 bp, Homo sapien
tcacacttttgaatgtggtagccca

SEQ ID NO: 1216127 - DNA, 25 bp, Homo sapien
ggcccagttattcttggacgctgac

SEQ ID NO: 1216128 - DNA, 25 bp, Homo sapien
cagaggtgccatggcctgactcagg

SEQ ID NO: 1216129 - DNA, 25 bp, Homo sapien
gggcccagttattcttggacgctga

SEQ ID NO: 1216130 - DNA, 25 bp, Homo sapien
cacacctccatggacacacatcaat

SEQ ID NO: 1216131 - DNA, 25 bp, Homo sapien
cccatgcactcggtgacattctgca

SEQ ID NO: 1216132 - DNA, 25 bp, Homo sapien
tagaagaaacccatgcactcggtga

SEQ ID NO: 1216133 - DNA, 25 bp, Homo sapien
gaaacccatgcactcggtgacattc

SEQ ID NO: 1216134 - DNA, 25 bp, Homo sapien
acatagagccctcctaggccacgat

SEQ ID NO: 1216135 - DNA, 25 bp, Homo sapien
gtcattgccatcactctccaccata

SEQ ID NO: 1216136 - DNA, 25 bp, Homo sapien
tcctatgtcttggttgtcattgcca

SEQ ID NO: 1216137 - DNA, 25 bp, Homo sapien
tcctaggccacgattagtatcaaca

SEQ ID NO: 1216138 - DNA, 25 bp, Homo sapien
gccttgcgttcctgtgcggagtctg

SEQ ID NO: 1216139 - DNA, 25 bp, Homo sapien
cggagtctggaaacaacatgcagaa

SEQ ID NO: 1216140 - DNA, 25 bp, Homo sapien
ctaaagaggtgccttgcgttcctgt

SEQ ID NO: 1216141 - DNA, 25 bp, Homo sapien
tgtgcggagtctggaaacaacatgc

SEQ ID NO: 1216142 - DNA, 25 bp, Homo sapien
cagttatcacacctttattcagcag

SEQ ID NO: 1216143 - DNA, 25 bp, Homo sapien
tgagagatcatcactctaccccagc

SEQ ID NO: 1216144 - DNA, 25 bp, Homo sapien
aatgcacagtgccaaaatactctag

SEQ ID NO: 1216145 - DNA, 25 bp, Homo sapien
cacatttaatatcggtggcatccac

SEQ ID NO: 1216146 - DNA, 25 bp, Homo sapien
tattttcccagcagtgcggatgcaa

SEQ ID NO: 1216147 - DNA, 25 bp, Homo sapien
tgtggcatggagttaagcagcccca

SEQ ID NO: 1216148 - DNA, 25 bp, Homo sapien
cacacaggtagagttagtagccagg

SEQ ID NO: 1216149 - DNA, 25 bp, Homo sapien
gatgatggctcttagtccccgaggc

SEQ ID NO: 1216150 - DNA, 25 bp, Homo sapien
agacaaaatacggagccccagtgga

SEQ ID NO: 1216151 - DNA, 25 bp, Homo sapien
ggaggataaaaagggctctgccaca

SEQ ID NO: 1216152 - DNA, 25 bp, Homo sapien
tagaaaccatcccactggacgtatt

SEQ ID NO: 1216153 - DNA, 25 bp, Homo sapien
tctcctggctctatgtgatgcgttg

SEQ ID NO: 1216154 - DNA, 25 bp, Homo sapien
acatgctcaggaacaaacagacccg

SEQ ID NO: 1216155 - DNA, 25 bp, Homo sapien
cactccttcacctagaaggctaaac

SEQ ID NO: 1216156 - DNA, 25 bp, Homo sapien
ccatctgcactaacggtcagctcca

SEQ ID NO: 1216157 - DNA, 25 bp, Homo sapien
cagacccgacccattgcttcacttt

SEQ ID NO: 1216158 - DNA, 25 bp, Homo sapien
gaagatggttttacctgcttctttc

SEQ ID NO: 1216159 - DNA, 25 bp, Homo sapien
aagatggttttacctgcttctttct

SEQ ID NO: 1216160 - DNA, 25 bp, Homo sapien
agatggttttacctgcttctttctt

SEQ ID NO: 1216161 - DNA, 25 bp, Homo sapien
ttaaattcaaagaagactgcaggca

SEQ ID NO: 1216162 - DNA, 25 bp, Homo sapien
cactggatcacagggagattaaatt

SEQ ID NO: 1216163 - DNA, 25 bp, Homo sapien
attcaaagaagactgcaggcaagga

SEQ ID NO: 1216164 - DNA, 25 bp, Homo sapien
ggagattaaattcaaagaagactgc

SEQ ID NO: 1216165 - DNA, 25 bp, Homo sapien
agctccccgccctcacaagaagcct

SEQ ID NO: 1216166 - DNA, 25 bp, Homo sapien
gccactgactgttcctggcctgcat

SEQ ID NO: 1216167 - DNA, 25 bp, Homo sapien
aagcctctgcctctttagcaggctg

SEQ ID NO: 1216168 - DNA, 25 bp, Homo sapien
cactgactgttcctggcctgcatgt

SEQ ID NO: 1216169 - DNA, 25 bp, Homo sapien
cctcccctagctccttctgggaaca

SEQ ID NO: 1216170 - DNA, 25 bp, Homo sapien
tgggagatgaaggacacctccccta

SEQ ID NO: 1216171 - DNA, 25 bp, Homo sapien
tctgggaacagactaactcctgtcc

SEQ ID NO: 1216172 - DNA, 25 bp, Homo sapien
agatgaaggacacctcccctagctc

SEQ ID NO: 1216173 - DNA, 25 bp, Homo sapien
tcctgcagggtggtcgggataactg

SEQ ID NO: 1216174 - DNA, 25 bp, Homo sapien
gggtggtcgggataactgcagagca

SEQ ID NO: 1216175 - DNA, 25 bp, Homo sapien
caaagaggcaatgatcagagggact

SEQ ID NO: 1216176 - DNA, 25 bp, Homo sapien
ccactaacaaagaggcaatgatcag

SEQ ID NO: 1216177 - DNA, 25 bp, Homo sapien
agtacaagcccagttggcagctgca

SEQ ID NO: 1216178 - DNA, 25 bp, Homo sapien
acagcaagcccacgggggtcagagc

SEQ ID NO: 1216179 - DNA, 25 bp, Homo sapien
tgggagtctgcaagtacaagcccag

SEQ ID NO: 1216180 - DNA, 25 bp, Homo sapien
ggcagctgcagctaatactcccgat

SEQ ID NO: 1216181 - DNA, 25 bp, Homo sapien
gagctcagaggttcttggcaagggc

SEQ ID NO: 1216182 - DNA, 25 bp, Homo sapien
cggtgagctcagaggttcttggcaa

SEQ ID NO: 1216183 - DNA, 25 bp, Homo sapien
gctcagaggttcttggcaagggctt

SEQ ID NO: 1216184 - DNA, 25 bp, Homo sapien
tcagaggttcttggcaagggcttgc

SEQ ID NO: 1216185 - DNA, 25 bp, Homo sapien
gaaaccagagtctggtgcttctggc

SEQ ID NO: 1216186 - DNA, 25 bp, Homo sapien
taatattagtttaccgctggcctct

SEQ ID NO: 1216187 - DNA, 25 bp, Homo sapien
tattcacagcaaaggaggctttgac

SEQ ID NO: 1216188 - DNA, 25 bp, Homo sapien
tacaaggcatctttccctaggagac

SEQ ID NO: 1216189 - DNA, 25 bp, Homo sapien
caattaaatgggcagactgtacacc

SEQ ID NO: 1216190 - DNA, 25 bp, Homo sapien
gagatgtgccccaaatgtaggccaa

SEQ ID NO: 1216191 - DNA, 25 bp, Homo sapien
gaggccttgcataactctaggtcag

SEQ ID NO: 1216192 - DNA, 25 bp, Homo sapien
taagcttcctagcagccctacagaa

SEQ ID NO: 1216193 - DNA, 25 bp, Homo sapien
cagtgatgtcaaccacacaggagtc

SEQ ID NO: 1216194 - DNA, 25 bp, Homo sapien
caaaatctgcccaagactgtccaca

SEQ ID NO: 1216195 - DNA, 25 bp, Homo sapien
gagtttgaaccctgctctggctgct

SEQ ID NO: 1216196 - DNA, 25 bp, Homo sapien
gccttaaagtgcaaaccctttgatg

SEQ ID NO: 1216197 - DNA, 25 bp, Homo sapien
cattagttcacgaccttttggccag

SEQ ID NO: 1216198 - DNA, 25 bp, Homo sapien
cttgtggccatatgaggacacctca

SEQ ID NO: 1216199 - DNA, 25 bp, Homo sapien
agtttactttcccatgctctaaggg

SEQ ID NO: 1216200 - DNA, 25 bp, Homo sapien
aatagttgcaggaggcaaggttccc

SEQ ID NO: 1216201 - DNA, 25 bp, Homo sapien
caggtggccggagccaatagttgca

SEQ ID NO: 1216202 - DNA, 25 bp, Homo sapien
atcttcatgggaagtcaagatgagc

SEQ ID NO: 1216203 - DNA, 25 bp, Homo sapien
tacacagtccacactccaactgctt

SEQ ID NO: 1216204 - DNA, 25 bp, Homo sapien
cactccaactgctttggacattcag

SEQ ID NO: 1216205 - DNA, 25 bp, Homo sapien
aagtcaagatgagccctacacagtc

SEQ ID NO: 1216206 - DNA, 25 bp, Homo sapien
tgtcacatgggcctgctctaagccc

SEQ ID NO: 1216207 - DNA, 25 bp, Homo sapien
agtaactgcgctgtcacatgggcct

SEQ ID NO: 1216208 - DNA, 25 bp, Homo sapien
ctgcgctgtcacatgggcctgctct

SEQ ID NO: 1216209 - DNA, 25 bp, Homo sapien
acatgggcctgctctaagcccctgg

SEQ ID NO: 1216210 - DNA, 25 bp, Homo sapien
tcctccctgcgtacagattctcgta

SEQ ID NO: 1216211 - DNA, 25 bp, Homo sapien
gtacagattctcgtacacatccacg

SEQ ID NO: 1216212 - DNA, 25 bp, Homo sapien
cacgatccgtacgatgtgcgggcac

SEQ ID NO: 1216213 - DNA, 25 bp, Homo sapien
tccatgacaatcagcaggcacttcc

SEQ ID NO: 1216214 - DNA, 25 bp, Homo sapien
ctggtctcctcgatcctggattcgg

SEQ ID NO: 1216215 - DNA, 25 bp, Homo sapien
ttctgtgaatgcctggtctcctcga

SEQ ID NO: 1216216 - DNA, 25 bp, Homo sapien
aatgcctggtctcctcgatcctgga

SEQ ID NO: 1216217 - DNA, 25 bp, Homo sapien
tgtgaatgcctggtctcctcgatcc

SEQ ID NO: 1216218 - DNA, 25 bp, Homo sapien
gatgctcttcatgatttcggatgct

SEQ ID NO: 1216219 - DNA, 25 bp, Homo sapien
cttgacatcccgatgggcaatgttg

SEQ ID NO: 1216220 - DNA, 25 bp, Homo sapien
atactggatggcctcaccgatgctc

SEQ ID NO: 1216221 - DNA, 25 bp, Homo sapien
cgatgggcaatgttgattgaatgca

SEQ ID NO: 1216222 - DNA, 25 bp, Homo sapien
gtggcctggcaaccatctctggggt

SEQ ID NO: 1216223 - DNA, 25 bp, Homo sapien
acagcactcgggctcagggttatga

SEQ ID NO: 1216224 - DNA, 25 bp, Homo sapien
aaccaggcagcaaggacgcagggtg

SEQ ID NO: 1216225 - DNA, 25 bp, Homo sapien
gctcagggttatgaacagctggcac

SEQ ID NO: 1216226 - DNA, 25 bp, Homo sapien
ccacatagtacggtgtataacaagg

SEQ ID NO: 1216227 - DNA, 25 bp, Homo sapien
tttcaggatggcgttgggccttttg

SEQ ID NO: 1216228 - DNA, 25 bp, Homo sapien
aaagagttgtggctggtggtttcct

SEQ ID NO: 1216229 - DNA, 25 bp, Homo sapien
taacaaggagtggtcaaagagttgt

SEQ ID NO: 1216230 - DNA, 25 bp, Homo sapien
tgtacatgatgacacccagggacca

SEQ ID NO: 1216231 - DNA, 25 bp, Homo sapien
ttgtcatacttctctggacccagca

SEQ ID NO: 1216232 - DNA, 25 bp, Homo sapien
gtcacaggacttgtcatacttctct

SEQ ID NO: 1216233 - DNA, 25 bp, Homo sapien
cttctctggacccagcacttctgga

SEQ ID NO: 1216234 - DNA, 25 bp, Homo sapien
ggcacaatatacaaagtcaagcccg

SEQ ID NO: 1216235 - DNA, 25 bp, Homo sapien
gcacaatatacaaagtcaagcccgg

SEQ ID NO: 1216236 - DNA, 25 bp, Homo sapien
caatatacaaagtcaagcccggggc

SEQ ID NO: 1216237 - DNA, 25 bp, Homo sapien
cacaatatacaaagtcaagcccggg

SEQ ID NO: 1216238 - DNA, 25 bp, Homo sapien
agagatggcaaggccgtggttggag

SEQ ID NO: 1216239 - DNA, 25 bp, Homo sapien
gcaaggccgtggttggagtagaagg

SEQ ID NO: 1216240 - DNA, 25 bp, Homo sapien
tggcaaggccgtggttggagtagaa

SEQ ID NO: 1216241 - DNA, 25 bp, Homo sapien
gatggcaaggccgtggttggagtag

SEQ ID NO: 1216242 - DNA, 25 bp, Homo sapien
gggttgggaaattcatactggccca

SEQ ID NO: 1216243 - DNA, 25 bp, Homo sapien
tcctctgatacttctgaccattctg

SEQ ID NO: 1216244 - DNA, 25 bp, Homo sapien
tctgatacttctgaccattctgggt

SEQ ID NO: 1216245 - DNA, 25 bp, Homo sapien
ggcccattcggatgcgagtcttcat

SEQ ID NO: 1216246 - DNA, 25 bp, Homo sapien
gatggaggcccatacatgtgtctgc

SEQ ID NO: 1216247 - DNA, 25 bp, Homo sapien
tacggctgtaccacttgagaggccc

SEQ ID NO: 1216248 - DNA, 25 bp, Homo sapien
tacaccacgcacatgagatggaggc

SEQ ID NO: 1216249 - DNA, 25 bp, Homo sapien
caggcgtgggcataggtgctaaccc

SEQ ID NO: 1216250 - DNA, 25 bp, Homo sapien
gttttcagcagattccgaatgagca

SEQ ID NO: 1216251 - DNA, 25 bp, Homo sapien
catgatccaagggtggttcataaac

SEQ ID NO: 1216252 - DNA, 25 bp, Homo sapien
ggttcataaactcggtgatggtcat

SEQ ID NO: 1216253 - DNA, 25 bp, Homo sapien
agcagattccgaatgagcatcttca

SEQ ID NO: 1216254 - DNA, 25 bp, Homo sapien
ctgtggaatagtcccgtgagaccca

SEQ ID NO: 1216255 - DNA, 25 bp, Homo sapien
ggtcctggctaagactctgtcctgt

SEQ ID NO: 1216256 - DNA, 25 bp, Homo sapien
gtagggtcctggctaagactctgtc

SEQ ID NO: 1216257 - DNA, 25 bp, Homo sapien
gactctgtcctgtggaatagtcccg

SEQ ID NO: 1216258 - DNA, 25 bp, Homo sapien
agaagagagaaaaggggtccgagtg

SEQ ID NO: 1216259 - DNA, 25 bp, Homo sapien
ctgagaagagagaaaaggggtccga

SEQ ID NO: 1216260 - DNA, 25 bp, Homo sapien
gaagagagaaaaggggtccgagtga

SEQ ID NO: 1216261 - DNA, 25 bp, Homo sapien
tgagaagagagaaaaggggtccgag

SEQ ID NO: 1216262 - DNA, 25 bp, Homo sapien
cttgacatcctcccaccgctccttg

SEQ ID NO: 1216263 - DNA, 25 bp, Homo sapien
ttgtcctccttcaggacccggctgg

SEQ ID NO: 1216264 - DNA, 25 bp, Homo sapien
tccttcaggacccggctggtgtgca

SEQ ID NO: 1216265 - DNA, 25 bp, Homo sapien
ttcaggacccggctggtgtgcagtg

SEQ ID NO: 1216266 - DNA, 25 bp, Homo sapien
cagcaccacgcctcacacctgggca

SEQ ID NO: 1216267 - DNA, 25 bp, Homo sapien
ctaccagcaccacgcctcacacctg

SEQ ID NO: 1216268 - DNA, 25 bp, Homo sapien
tctcccctaccagcaccacgcctca

SEQ ID NO: 1216269 - DNA, 25 bp, Homo sapien
gatgagagaggcagaatcaagctct

SEQ ID NO: 1216270 - DNA, 25 bp, Homo sapien
cgctgttcttgtcatgaagacaccc

SEQ ID NO: 1216271 - DNA, 25 bp, Homo sapien
agccaagtggcctggtcgctgttct

SEQ ID NO: 1216272 - DNA, 25 bp, Homo sapien
cacaacctggtcagccaagtggcct

SEQ ID NO: 1216273 - DNA, 25 bp, Homo sapien
gtcgctgttcttgtcatgaagacac

SEQ ID NO: 1216274 - DNA, 25 bp, Homo sapien
cccgcaggataggaggaagagactt

SEQ ID NO: 1216275 - DNA, 25 bp, Homo sapien
taaggtcccattagagacccaggga

SEQ ID NO: 1216276 - DNA, 25 bp, Homo sapien
cagagagcctggctatggcactgct

SEQ ID NO: 1216277 - DNA, 25 bp, Homo sapien
acagcactgagtttggacaggaaca

SEQ ID NO: 1216278 - DNA, 25 bp, Homo sapien
cttttttatcttgatctgctcgtag

SEQ ID NO: 1216279 - DNA, 25 bp, Homo sapien
gtagtcaacgcgcattgtggccaag

SEQ ID NO: 1216280 - DNA, 25 bp, Homo sapien
cagcagcagagggttggatgcatct

SEQ ID NO: 1216281 - DNA, 25 bp, Homo sapien
cagcagagggttggatgcatcttca

SEQ ID NO: 1216282 - DNA, 25 bp, Homo sapien
tgagcacaggttcaagagcaccttg

SEQ ID NO: 1216283 - DNA, 25 bp, Homo sapien
aaactctaagtcaaattactgataa

SEQ ID NO: 1216284 - DNA, 25 bp, Homo sapien
tagagagttattgcttgtcctcccg

SEQ ID NO: 1216285 - DNA, 25 bp, Homo sapien
aggctccatgcagctgaggaggaga

SEQ ID NO: 1216286 - DNA, 25 bp, Homo sapien
cccagctaatagagacaggccacag

SEQ ID NO: 1216287 - DNA, 25 bp, Homo sapien
cactggagatgtctgagggctccga

SEQ ID NO: 1216288 - DNA, 25 bp, Homo sapien
gaggacctaggaccagcactaagtg

SEQ ID NO: 1216289 - DNA, 25 bp, Homo sapien
tacaacaatcgagtgctggacacac

SEQ ID NO: 1216290 - DNA, 25 bp, Homo sapien
gaagtgccaactaacctcctctagg

SEQ ID NO: 1216291 - DNA, 25 bp, Homo sapien
cccttgtggaggttacatgctagcc

SEQ ID NO: 1216292 - DNA, 25 bp, Homo sapien
tgttgggcttcatgacaagtgccag

SEQ ID NO: 1216293 - DNA, 25 bp, Homo sapien
tctccacgaaactgtcaagtcaggg

SEQ ID NO: 1216294 - DNA, 25 bp, Homo sapien
ccaggctcgtggtaaggattgtaag

SEQ ID NO: 1216295 - DNA, 25 bp, Homo sapien
gtaagagatactgtgctgtgggccc

SEQ ID NO: 1216296 - DNA, 25 bp, Homo sapien
gtttgataagtacaggtctaagcca

SEQ ID NO: 1216297 - DNA, 25 bp, Homo sapien
gagacatacactggacaaacactta

SEQ ID NO: 1216298 - DNA, 25 bp, Homo sapien
gcagaaaggtgaagaactagcagaa

SEQ ID NO: 1216299 - DNA, 25 bp, Homo sapien
gccactggagttgtcccattgctga

SEQ ID NO: 1216300 - DNA, 25 bp, Homo sapien
tgatgcagaaaggtgaagaactagc

SEQ ID NO: 1216301 - DNA, 25 bp, Homo sapien
cagcaagctcagaacctgctgccac

SEQ ID NO: 1216302 - DNA, 25 bp, Homo sapien
gaccgtgttgcccaacaagctgtct

SEQ ID NO: 1216303 - DNA, 25 bp, Homo sapien
ctgcatcgtcaacctgcctgctctc

SEQ ID NO: 1216304 - DNA, 25 bp, Homo sapien
tgtctaaacccagagtccagcaagc

SEQ ID NO: 1216305 - DNA, 25 bp, Homo sapien
tcacaaggctgctagcctgctcccc

SEQ ID NO: 1216306 - DNA, 25 bp, Homo sapien
ctgggactgaaccagcacccagact

SEQ ID NO: 1216307 - DNA, 25 bp, Homo sapien
gggactgaaccagcacccagactgg

SEQ ID NO: 1216308 - DNA, 25 bp, Homo sapien
ccagcacccagactggcctcactgt

SEQ ID NO: 1216309 - DNA, 25 bp, Homo sapien
agcacccagactggcctcactgtgc

SEQ ID NO: 1216310 - DNA, 25 bp, Homo sapien
tgacccgagtattcatccacagtgg

SEQ ID NO: 1216311 - DNA, 25 bp, Homo sapien
taatacttcaaagcccgtagcagct

SEQ ID NO: 1216312 - DNA, 25 bp, Homo sapien
gatccaagaatctgctgatccagag

SEQ ID NO: 1216313 - DNA, 25 bp, Homo sapien
tgcatggaccctccttcaaggatcc

SEQ ID NO: 1216314 - DNA, 25 bp, Homo sapien
gacttaacttgaccatgcaaaagcc

SEQ ID NO: 1216315 - DNA, 25 bp, Homo sapien
aagccaaggatgttcacatcctgtc

SEQ ID NO: 1216316 - DNA, 25 bp, Homo sapien
tggcaatgattgtgtcactatgacc

SEQ ID NO: 1216317 - DNA, 25 bp, Homo sapien
actatgaccccggacaagtgactta

SEQ ID NO: 1216318 - DNA, 25 bp, Homo sapien
ctcctgtcagtgtgtgcaagcaccg

SEQ ID NO: 1216319 - DNA, 25 bp, Homo sapien
tcctgtcagtgtgtgcaagcaccgc

SEQ ID NO: 1216320 - DNA, 25 bp, Homo sapien
cctgtcagtgtgtgcaagcaccgct

SEQ ID NO: 1216321 - DNA, 25 bp, Homo sapien
gtgcggaaacgctccctcagtgcac

SEQ ID NO: 1216322 - DNA, 25 bp, Homo sapien
aacacgcagatctgtgcggaaacgc

SEQ ID NO: 1216323 - DNA, 25 bp, Homo sapien
catgtgtgagtggtaaggaacacgc

SEQ ID NO: 1216324 - DNA, 25 bp, Homo sapien
cccgtggaacagagccccaaagcac

SEQ ID NO: 1216325 - DNA, 25 bp, Homo sapien
gctctttcacaatgcctaaaatctt

SEQ ID NO: 1216326 - DNA, 25 bp, Homo sapien
agcagctctttcacaatgcctaaaa

SEQ ID NO: 1216327 - DNA, 25 bp, Homo sapien
tgacttcatctggaagggcttgatc

SEQ ID NO: 1216328 - DNA, 25 bp, Homo sapien
cttcatctggaagggcttgatcacc

SEQ ID NO: 1216329 - DNA, 25 bp, Homo sapien
agcatccagcttgtactctttgttg

SEQ ID NO: 1216330 - DNA, 25 bp, Homo sapien
ttcacccatgcagttagcacccatt

SEQ ID NO: 1216331 - DNA, 25 bp, Homo sapien
agttagcacccattctatccttgaa

SEQ ID NO: 1216332 - DNA, 25 bp, Homo sapien
tcagataatttcacccatgcagtta

SEQ ID NO: 1216333 - DNA, 25 bp, Homo sapien
catgcagttagcacccattctatcc

SEQ ID NO: 1216334 - DNA, 25 bp, Homo sapien
gagaaatattctacccagttggcca

SEQ ID NO: 1216335 - DNA, 25 bp, Homo sapien
gccaacagagtcttcccttgaagct

SEQ ID NO: 1216336 - DNA, 25 bp, Homo sapien
gcagagaaatattctacccagttgg

SEQ ID NO: 1216337 - DNA, 25 bp, Homo sapien
gttggccaacagagtcttcccttga

SEQ ID NO: 1216338 - DNA, 25 bp, Homo sapien
catagctatggctcttcgtgggccc

SEQ ID NO: 1216339 - DNA, 25 bp, Homo sapien
ggtgtttccctatcgcccttctcca

SEQ ID NO: 1216340 - DNA, 25 bp, Homo sapien
ttgcccatagctatggctcttcgtg

SEQ ID NO: 1216341 - DNA, 25 bp, Homo sapien
ctatggctcttcgtgggccctgcag

SEQ ID NO: 1216342 - DNA, 25 bp, Homo sapien
tactaaagcggtaagggcaggccag

SEQ ID NO: 1216343 - DNA, 25 bp, Homo sapien
gcagagttacagaaagcaggtggca

SEQ ID NO: 1216344 - DNA, 25 bp, Homo sapien
aagccagcggtgtagttcagacttc

SEQ ID NO: 1216345 - DNA, 25 bp, Homo sapien
ccagggacgaggactgcatcttgca

SEQ ID NO: 1216346 - DNA, 25 bp, Homo sapien
ttctcccatgggtactgggagccag

SEQ ID NO: 1216347 - DNA, 25 bp, Homo sapien
ctcccatgggtactgggagccaggg

SEQ ID NO: 1216348 - DNA, 25 bp, Homo sapien
tctcccatgggtactgggagccagg

SEQ ID NO: 1216349 - DNA, 25 bp, Homo sapien
gcttctcccatgggtactgggagcc

SEQ ID NO: 1216350 - DNA, 25 bp, Homo sapien
ggtgggagatgtcctatatagccat

SEQ ID NO: 1216351 - DNA, 25 bp, Homo sapien
cattagagagtagggcatgcccaga

SEQ ID NO: 1216352 - DNA, 25 bp, Homo sapien
catactcaagatgttgccagaaaag

SEQ ID NO: 1216353 - DNA, 25 bp, Homo sapien
taaagtgggctgtacttgggacatc

SEQ ID NO: 1216354 - DNA, 25 bp, Homo sapien
gcacacctgtagtcaggaagttgag

SEQ ID NO: 1216355 - DNA, 25 bp, Homo sapien
tcctgagagctgtggcacgttacca

SEQ ID NO: 1216356 - DNA, 25 bp, Homo sapien
cgatccagttctccaatgccttagg

SEQ ID NO: 1216357 - DNA, 25 bp, Homo sapien
tctcacttggtgcttgcgggctgct

SEQ ID NO: 1216358 - DNA, 25 bp, Homo sapien
gttaccaagtgtaccctgcaggcca

SEQ ID NO: 1216359 - DNA, 25 bp, Homo sapien
aatcagacatctcctgagaccgtgg

SEQ ID NO: 1216360 - DNA, 25 bp, Homo sapien
gttgtctactgagcacaatatcagt

SEQ ID NO: 1216361 - DNA, 25 bp, Homo sapien
caatatcagtattgtacccaggagc

SEQ ID NO: 1216362 - DNA, 25 bp, Homo sapien
cctgagaccgtggttgtctactgag

SEQ ID NO: 1216363 - DNA, 25 bp, Homo sapien
ggaaactctcttctatatggtgcat

SEQ ID NO: 1216364 - DNA, 25 bp, Homo sapien
tcttggaaactctcttctatatggt

SEQ ID NO: 1216365 - DNA, 25 bp, Homo sapien
tgatttcttggaaactctcttctat

SEQ ID NO: 1216366 - DNA, 25 bp, Homo sapien
gatttcttggaaactctcttctata

SEQ ID NO: 1216367 - DNA, 25 bp, Homo sapien
catttgggaaggtgtccttagcttg

SEQ ID NO: 1216368 - DNA, 25 bp, Homo sapien
tccaatgtggacaggatagtgacat

SEQ ID NO: 1216369 - DNA, 25 bp, Homo sapien
tctccaatgtggacaggatagtgac

SEQ ID NO: 1216370 - DNA, 25 bp, Homo sapien
tgacatttgggaaggtgtccttagc

SEQ ID NO: 1216371 - DNA, 25 bp, Homo sapien
aggaggttcttggtcacgcagcaca

SEQ ID NO: 1216372 - DNA, 25 bp, Homo sapien
tgatgatccttgaacaccctgtcca

SEQ ID NO: 1216373 - DNA, 25 bp, Homo sapien
ggttcttggtcacgcagcacacatc

SEQ ID NO: 1216374 - DNA, 25 bp, Homo sapien
tgtccacgtagaacgccaggaggtt

SEQ ID NO: 1216375 - DNA, 25 bp, Homo sapien
catctgaggagttgtcagcaggcag

SEQ ID NO: 1216376 - DNA, 25 bp, Homo sapien
tatgttgacataagttggtcacccc

SEQ ID NO: 1216377 - DNA, 25 bp, Homo sapien
ttatctaggaggagaccatctgagg

SEQ ID NO: 1216378 - DNA, 25 bp, Homo sapien
tgtggacgtgcgcagagaatttcct

SEQ ID NO: 1216379 - DNA, 25 bp, Homo sapien
catggatgactctggtggcattggt

SEQ ID NO: 1216380 - DNA, 25 bp, Homo sapien
agctctcccagggatttaatggcag

SEQ ID NO: 1216381 - DNA, 25 bp, Homo sapien
tcttattaatccaggctagaaagac

SEQ ID NO: 1216382 - DNA, 25 bp, Homo sapien
ggctagaaagacgtcgagctctccc

SEQ ID NO: 1216383 - DNA, 25 bp, Homo sapien
cccagggatttaatggcagcagcgt

SEQ ID NO: 1216384 - DNA, 25 bp, Homo sapien
ggccctttcagcagatagagtttat

SEQ ID NO: 1216385 - DNA, 25 bp, Homo sapien
gtctcccacagtaaaccgcacaggg

SEQ ID NO: 1216386 - DNA, 25 bp, Homo sapien
caagcggaataagacagcctgaggc

SEQ ID NO: 1216387 - DNA, 25 bp, Homo sapien
tgtactacaggatatcacttggctc

SEQ ID NO: 1216388 - DNA, 25 bp, Homo sapien
ttgttcagctttgtcaccatgacaa

SEQ ID NO: 1216389 - DNA, 25 bp, Homo sapien
gcttgttcagctttgtcaccatgac

SEQ ID NO: 1216390 - DNA, 25 bp, Homo sapien
cttgttcagctttgtcaccatgaca

SEQ ID NO: 1216391 - DNA, 25 bp, Homo sapien
ctcaaaaagcattgggacatattct

SEQ ID NO: 1216392 - DNA, 25 bp, Homo sapien
gaactactgcgaactcaaaaagcat

SEQ ID NO: 1216393 - DNA, 25 bp, Homo sapien
ctatgccagaactactgcgaactca

SEQ ID NO: 1216394 - DNA, 25 bp, Homo sapien
tgccagaactactgcgaactcaaaa

SEQ ID NO: 1216395 - DNA, 25 bp, Homo sapien
gccatgcagaaactacaagagccat

SEQ ID NO: 1216396 - DNA, 25 bp, Homo sapien
ctggagcctggttggccatgcagaa

SEQ ID NO: 1216397 - DNA, 25 bp, Homo sapien
catgcagaaactacaagagccattg

SEQ ID NO: 1216398 - DNA, 25 bp, Homo sapien
tggccatgcagaaactacaagagcc

SEQ ID NO: 1216399 - DNA, 25 bp, Homo sapien
ccacaactccccagttgtgacacac

SEQ ID NO: 1216400 - DNA, 25 bp, Homo sapien
caactccccagttgtgacacacagt

SEQ ID NO: 1216401 - DNA, 25 bp, Homo sapien
ggtgaccacaactccccagttgtga

SEQ ID NO: 1216402 - DNA, 25 bp, Homo sapien
gtgaccacaactccccagttgtgac

SEQ ID NO: 1216403 - DNA, 25 bp, Homo sapien
gattcgagagtacacgctttcctgg

SEQ ID NO: 1216404 - DNA, 25 bp, Homo sapien
ctgggtggattcgagagtacacgct

SEQ ID NO: 1216405 - DNA, 25 bp, Homo sapien
gagagtacacgctttcctggacctg

SEQ ID NO: 1216406 - DNA, 25 bp, Homo sapien
tacacgctttcctggacctgcaact

SEQ ID NO: 1216407 - DNA, 25 bp, Homo sapien
cgtgatgggcaatcagcccgattcc

SEQ ID NO: 1216408 - DNA, 25 bp, Homo sapien
cagggaaaggcaagacgtgatgggc

SEQ ID NO: 1216409 - DNA, 25 bp, Homo sapien
ccagggaaaggcaagacgtgatggg

SEQ ID NO: 1216410 - DNA, 25 bp, Homo sapien
gaaagccaacgtagctcacccttct

SEQ ID NO: 1216411 - DNA, 25 bp, Homo sapien
gaaatcgaatctcacagaagctgtg

SEQ ID NO: 1216412 - DNA, 25 bp, Homo sapien
gaattgacgcatatagcctcccctt

SEQ ID NO: 1216413 - DNA, 25 bp, Homo sapien
ttccagaaagccaacgtagctcacc

SEQ ID NO: 1216414 - DNA, 25 bp, Homo sapien
ttgcagtgaatagatagagaatgac

SEQ ID NO: 1216415 - DNA, 25 bp, Homo sapien
tgcagtgaatagatagagaatgaca

SEQ ID NO: 1216416 - DNA, 25 bp, Homo sapien
gcagtgaatagatagagaatgacat

SEQ ID NO: 1216417 - DNA, 25 bp, Homo sapien
cttgcagtgaatagatagagaatga

SEQ ID NO: 1216418 - DNA, 25 bp, Homo sapien
gcctcccgtgaagagaagatttcag

SEQ ID NO: 1216419 - DNA, 25 bp, Homo sapien
gagttggtggcacaggtcgtggctc

SEQ ID NO: 1216420 - DNA, 25 bp, Homo sapien
aagaaaaactgccaagcctcccgtg

SEQ ID NO: 1216421 - DNA, 25 bp, Homo sapien
gccgttagtgcccagcaggtaaggc

SEQ ID NO: 1216422 - DNA, 25 bp, Homo sapien
aacagccttatctggcctcagacag

SEQ ID NO: 1216423 - DNA, 25 bp, Homo sapien
tcctccaagtgtccacggggtgagg

SEQ ID NO: 1216424 - DNA, 25 bp, Homo sapien
aaagaagagagcatgacttactgag

SEQ ID NO: 1216425 - DNA, 25 bp, Homo sapien
agtgtggcccatccacgcaacttac

SEQ ID NO: 1216426 - DNA, 25 bp, Homo sapien
ggcctgaaatctggagaccacagga

SEQ ID NO: 1216427 - DNA, 25 bp, Homo sapien
cttaggcctgaaatctggagaccac

SEQ ID NO: 1216428 - DNA, 25 bp, Homo sapien
gcctgaaatctggagaccacaggag

SEQ ID NO: 1216429 - DNA, 25 bp, Homo sapien
taggcctgaaatctggagaccacag

SEQ ID NO: 1216430 - DNA, 25 bp, Homo sapien
agataaaacgcagcagagagaaggc

SEQ ID NO: 1216431 - DNA, 25 bp, Homo sapien
cacactgccccgtatctcagaaaat

SEQ ID NO: 1216432 - DNA, 25 bp, Homo sapien
aattgagtgtcttcagtccagtgga

SEQ ID NO: 1216433 - DNA, 25 bp, Homo sapien
ttcctgaaggtttgtggcgatcaca

SEQ ID NO: 1216434 - DNA, 25 bp, Homo sapien
aagactcagtcctccttaagattct

SEQ ID NO: 1216435 - DNA, 25 bp, Homo sapien
tgtcttgcaaagactcagtcctcct

SEQ ID NO: 1216436 - DNA, 25 bp, Homo sapien
cctccttaagattctgatgtcaatg

SEQ ID NO: 1216437 - DNA, 25 bp, Homo sapien
ctttgtgtcttgcaaagactcagtc

SEQ ID NO: 1216438 - DNA, 25 bp, Homo sapien
ccggaggtccttcttgatggtaaga

SEQ ID NO: 1216439 - DNA, 25 bp, Homo sapien
tcttccggagagtataatggtcagg

SEQ ID NO: 1216440 - DNA, 25 bp, Homo sapien
gtcttagcaaatggcgcaggaggca

SEQ ID NO: 1216441 - DNA, 25 bp, Homo sapien
taccctgtccagatagagtcttagc

SEQ ID NO: 1216442 - DNA, 25 bp, Homo sapien
ttcctccccacaatggcatgtcatg

SEQ ID NO: 1216443 - DNA, 25 bp, Homo sapien
caaagtgactcagaatctggctgta

SEQ ID NO: 1216444 - DNA, 25 bp, Homo sapien
cttttcaaagtgactcagaatctgg

SEQ ID NO: 1216445 - DNA, 25 bp, Homo sapien
cctccccacaatggcatgtcatgtg

SEQ ID NO: 1216446 - DNA, 25 bp, Homo sapien
caatcaatgccaaagtcgcatatac

SEQ ID NO: 1216447 - DNA, 25 bp, Homo sapien
gcagaagaatgtctagttcccccaa

SEQ ID NO: 1216448 - DNA, 25 bp, Homo sapien
ccttcacaactgctgcctgaggttc

SEQ ID NO: 1216449 - DNA, 25 bp, Homo sapien
aaagccttcacaactgctgcctgag

SEQ ID NO: 1216450 - DNA, 25 bp, Homo sapien
agaagaatgtctagttcccccaaag

SEQ ID NO: 1216451 - DNA, 25 bp, Homo sapien
gaagactggagctcttgacctcgaa

SEQ ID NO: 1216452 - DNA, 25 bp, Homo sapien
catgctggccgtgtaggattcctgg

SEQ ID NO: 1216453 - DNA, 25 bp, Homo sapien
cctggctggaagatacacaattatg

SEQ ID NO: 1216454 - DNA, 25 bp, Homo sapien
gtgaccagcacaagactagtacagt

SEQ ID NO: 1216455 - DNA, 25 bp, Homo sapien
tagcactgagttccatgtggttgac

SEQ ID NO: 1216456 - DNA, 25 bp, Homo sapien
gttgtttatcagattggtcagagag

SEQ ID NO: 1216457 - DNA, 25 bp, Homo sapien
ccatgtggttgacttctgaacactg

SEQ ID NO: 1216458 - DNA, 25 bp, Homo sapien
agagaatcaggaaatatgcaactga

SEQ ID NO: 1216459 - DNA, 25 bp, Homo sapien
taaccccctgtaatctggattctgt

SEQ ID NO: 1216460 - DNA, 25 bp, Homo sapien
gttgccattaaccccctgtaatctg

SEQ ID NO: 1216461 - DNA, 25 bp, Homo sapien
cattaaccccctgtaatctggattc

SEQ ID NO: 1216462 - DNA, 25 bp, Homo sapien
gccattaaccccctgtaatctggat

SEQ ID NO: 1216463 - DNA, 25 bp, Homo sapien
catgggactggaattcatcaatatc

SEQ ID NO: 1216464 - DNA, 25 bp, Homo sapien
tgagcacagctcacatgtcacactc

SEQ ID NO: 1216465 - DNA, 25 bp, Homo sapien
tggttcctgttactgagcacagctc

SEQ ID NO: 1216466 - DNA, 25 bp, Homo sapien
agtttctcgtaacatgggactggaa

SEQ ID NO: 1216467 - DNA, 25 bp, Homo sapien
agggctggctgagctagctattgca

SEQ ID NO: 1216468 - DNA, 25 bp, Homo sapien
gcaagctccatgtgtgaccccactg

SEQ ID NO: 1216469 - DNA, 25 bp, Homo sapien
ggtgagaagagggttctcctcagca

SEQ ID NO: 1216470 - DNA, 25 bp, Homo sapien
atgtttcttccaagcccatgaggca

SEQ ID NO: 1216471 - DNA, 25 bp, Homo sapien
tcatgcccagtagatgcctaaaact

SEQ ID NO: 1216472 - DNA, 25 bp, Homo sapien
gaaataacatcccattctcaggcat

SEQ ID NO: 1216473 - DNA, 25 bp, Homo sapien
aatagtaccaaaccccatgtatccg

SEQ ID NO: 1216474 - DNA, 25 bp, Homo sapien
ggcagacacgttccaagaccattga

SEQ ID NO: 1216475 - DNA, 25 bp, Homo sapien
gagttaactgcagtcattccaggag

SEQ ID NO: 1216476 - DNA, 25 bp, Homo sapien
aatgacataaccaggcctagagtgc

SEQ ID NO: 1216477 - DNA, 25 bp, Homo sapien
atttcctaagcacctactgaatggc

SEQ ID NO: 1216478 - DNA, 25 bp, Homo sapien
tacagactagaaagctgagagtcag

SEQ ID NO: 1216479 - DNA, 25 bp, Homo sapien
agtcatttcagaagtaaaggtttgc

SEQ ID NO: 1216480 - DNA, 25 bp, Homo sapien
tctggtcctgtaagtgatgcttgag

SEQ ID NO: 1216481 - DNA, 25 bp, Homo sapien
caccattcaccaatcagaggcatag

SEQ ID NO: 1216482 - DNA, 25 bp, Homo sapien
cccgtcccagccgtggaagtcattt

SEQ ID NO: 1216483 - DNA, 25 bp, Homo sapien
tcttcttggtgttaaattggcgaaa

SEQ ID NO: 1216484 - DNA, 25 bp, Homo sapien
ttaaattggcgaaagcagctcctca

SEQ ID NO: 1216485 - DNA, 25 bp, Homo sapien
tggtgttaaattggcgaaagcagct

SEQ ID NO: 1216486 - DNA, 25 bp, Homo sapien
aattggcgaaagcagctcctcatca

SEQ ID NO: 1216487 - DNA, 25 bp, Homo sapien
ctggctaaagtccacaggctttgca

SEQ ID NO: 1216488 - DNA, 25 bp, Homo sapien
tggctaaagtccacaggctttgcag

SEQ ID NO: 1216489 - DNA, 25 bp, Homo sapien
gaccagagaagacccggttctgctg

SEQ ID NO: 1216490 - DNA, 25 bp, Homo sapien
agaccagagaagacccggttctgct

SEQ ID NO: 1216491 - DNA, 25 bp, Homo sapien
ccacacgccctgcacctcctccttc

SEQ ID NO: 1216492 - DNA, 25 bp, Homo sapien
cacgccctgcacctcctccttctcc

SEQ ID NO: 1216493 - DNA, 25 bp, Homo sapien
cttgcccgtccacacccacacgccc

SEQ ID NO: 1216494 - DNA, 25 bp, Homo sapien
cgccctgcacctcctccttctccat

SEQ ID NO: 1216495 - DNA, 25 bp, Homo sapien
catttgagaggctgtcgccagcaaa

SEQ ID NO: 1216496 - DNA, 25 bp, Homo sapien
ggctgtcgccagcaaaggagggcag

SEQ ID NO: 1216497 - DNA, 25 bp, Homo sapien
tgcatttgagaggctgtcgccagca

SEQ ID NO: 1216498 - DNA, 25 bp, Homo sapien
ttgagaggctgtcgccagcaaagga

SEQ ID NO: 1216499 - DNA, 25 bp, Homo sapien
gagaagcagggtaaaacccaggcaa

SEQ ID NO: 1216500 - DNA, 25 bp, Homo sapien
cagagaagcagggtaaaacccaggc

SEQ ID NO: 1216501 - DNA, 25 bp, Homo sapien
agaagcagggtaaaacccaggcaag

SEQ ID NO: 1216502 - DNA, 25 bp, Homo sapien
tccagagaagcagggtaaaacccag

SEQ ID NO: 1216503 - DNA, 25 bp, Homo sapien
cagggcccaaagtggaattcttggc

SEQ ID NO: 1216504 - DNA, 25 bp, Homo sapien
cccttcacttggcagggcccaaagt

SEQ ID NO: 1216505 - DNA, 25 bp, Homo sapien
cagaaggcttcccacagtttctggg

SEQ ID NO: 1216506 - DNA, 25 bp, Homo sapien
cagcccagaaggcttcccacagttt

SEQ ID NO: 1216507 - DNA, 25 bp, Homo sapien
agcagccgggcactcgtgatgttat

SEQ ID NO: 1216508 - DNA, 25 bp, Homo sapien
gcagccgggcactcgtgatgttatc

SEQ ID NO: 1216509 - DNA, 25 bp, Homo sapien
tgtgacacgatgagaacaaagttgt

SEQ ID NO: 1216510 - DNA, 25 bp, Homo sapien
agttgttggccagagtagagaatga

SEQ ID NO: 1216511 - DNA, 25 bp, Homo sapien
tcaagtagaactccagcagggtgtg

SEQ ID NO: 1216512 - DNA, 25 bp, Homo sapien
tggacaaggtaacagctctcagcat

SEQ ID NO: 1216513 - DNA, 25 bp, Homo sapien
tccggaatagcagaaaccgcctgtg

SEQ ID NO: 1216514 - DNA, 25 bp, Homo sapien
ctgtgtgcactgtctctgatggaaa

SEQ ID NO: 1216515 - DNA, 25 bp, Homo sapien
ctgtttgaatgctctccggaatagc

SEQ ID NO: 1216516 - DNA, 25 bp, Homo sapien
gaaaccgcctgtgtgcactgtctct

SEQ ID NO: 1216517 - DNA, 25 bp, Homo sapien
ttctgcatccaggtcagaagaatgt

SEQ ID NO: 1216518 - DNA, 25 bp, Homo sapien
tctgcatccaggtcagaagaatgtc

SEQ ID NO: 1216519 - DNA, 25 bp, Homo sapien
tgcatccaggtcagaagaatgtcca

SEQ ID NO: 1216520 - DNA, 25 bp, Homo sapien
atttctgcatccaggtcagaagaat

SEQ ID NO: 1216521 - DNA, 25 bp, Homo sapien
gtcactggcgctgcttaaagaatga

SEQ ID NO: 1216522 - DNA, 25 bp, Homo sapien
cttctttgacaataatcctgggcca

SEQ ID NO: 1216523 - DNA, 25 bp, Homo sapien
tcttcacagcatccagaggcacctt

SEQ ID NO: 1216524 - DNA, 25 bp, Homo sapien
ccaagggcgtgaagtgtccagtgaa

SEQ ID NO: 1216525 - DNA, 25 bp, Homo sapien
tttttaacaatccaaagacaggcca

SEQ ID NO: 1216526 - DNA, 25 bp, Homo sapien
gctctgtccctgcagatatcagaag

SEQ ID NO: 1216527 - DNA, 25 bp, Homo sapien
caaggtcagcttgacactcaagtgg

SEQ ID NO: 1216528 - DNA, 25 bp, Homo sapien
tcatcacagattggatagtacatcc

SEQ ID NO: 1216529 - DNA, 25 bp, Homo sapien
gattgatgtcgaccacaaagttcag

SEQ ID NO: 1216530 - DNA, 25 bp, Homo sapien
ttatgtcatggaagtgatatcccac

SEQ ID NO: 1216531 - DNA, 25 bp, Homo sapien
ggccacggctctgcaatagcactta

SEQ ID NO: 1216532 - DNA, 25 bp, Homo sapien
gatgcacagccttgctattgggaag

SEQ ID NO: 1216533 - DNA, 25 bp, Homo sapien
ctgcctctctacttgaaactctcat

SEQ ID NO: 1216534 - DNA, 25 bp, Homo sapien
gcaccaggacctgcacccccgccat

SEQ ID NO: 1216535 - DNA, 25 bp, Homo sapien
catcaagcaccaggacctgcacccc

SEQ ID NO: 1216536 - DNA, 25 bp, Homo sapien
tcaagcaccaggacctgcacccccg

SEQ ID NO: 1216537 - DNA, 25 bp, Homo sapien
aagcaccaggacctgcacccccgcc

SEQ ID NO: 1216538 - DNA, 25 bp, Homo sapien
ccagggggcccaggagatggcctcc

SEQ ID NO: 1216539 - DNA, 25 bp, Homo sapien
gatggccgccagggggcccaggaga

SEQ ID NO: 1216540 - DNA, 25 bp, Homo sapien
agggggcccaggagatggcctccac

SEQ ID NO: 1216541 - DNA, 25 bp, Homo sapien
gccgccagggggcccaggagatggc

SEQ ID NO: 1216542 - DNA, 25 bp, Homo sapien
ccagcgtacgacaaccaccttccag

SEQ ID NO: 1216543 - DNA, 25 bp, Homo sapien
cctcccagcgtacgacaaccacctt

SEQ ID NO: 1216544 - DNA, 25 bp, Homo sapien
ttgatgccctcccagcgtacgacaa

SEQ ID NO: 1216545 - DNA, 25 bp, Homo sapien
gttgatgccctcccagcgtacgaca

SEQ ID NO: 1216546 - DNA, 25 bp, Homo sapien
tcacttggtctcttggggcagcaag

SEQ ID NO: 1216547 - DNA, 25 bp, Homo sapien
ctggcctcacttggtctcttggggc

SEQ ID NO: 1216548 - DNA, 25 bp, Homo sapien
cctcacttggtctcttggggcagca

SEQ ID NO: 1216549 - DNA, 25 bp, Homo sapien
gcctcacttggtctcttggggcagc

SEQ ID NO: 1216550 - DNA, 25 bp, Homo sapien
ccatcgtgagccaggcgctccagat

SEQ ID NO: 1216551 - DNA, 25 bp, Homo sapien
cgtagggcagtaggatgccgtcaaa

SEQ ID NO: 1216552 - DNA, 25 bp, Homo sapien
ccaccatcgtgagccaggcgctcca

SEQ ID NO: 1216553 - DNA, 25 bp, Homo sapien
cagccaccatcgtgagccaggcgct

SEQ ID NO: 1216554 - DNA, 25 bp, Homo sapien
ttcttcttcctgtagtggaacttgg

SEQ ID NO: 1216555 - DNA, 25 bp, Homo sapien
ttcctgtagtggaacttggccttct

SEQ ID NO: 1216556 - DNA, 25 bp, Homo sapien
tcttcctgtagtggaacttggcctt

SEQ ID NO: 1216557 - DNA, 25 bp, Homo sapien
cttcttcctgtagtggaacttggcc

SEQ ID NO: 1216558 - DNA, 25 bp, Homo sapien
ttcacctccttattgtagacattcc

SEQ ID NO: 1216559 - DNA, 25 bp, Homo sapien
tgagcccaatggctgccttgtatta

SEQ ID NO: 1216560 - DNA, 25 bp, Homo sapien
cacctccttattgtagacattcctg

SEQ ID NO: 1216561 - DNA, 25 bp, Homo sapien
caatggctgccttgtattatgttca

SEQ ID NO: 1216562 - DNA, 25 bp, Homo sapien
tgtacttcaaccagcctacaagctg

SEQ ID NO: 1216563 - DNA, 25 bp, Homo sapien
gggccagggatctctctacaagagc

SEQ ID NO: 1216564 - DNA, 25 bp, Homo sapien
caagctggcacttgctaacaaatca

SEQ ID NO: 1216565 - DNA, 25 bp, Homo sapien
gaagcgtttttctcaaaggccctca

SEQ ID NO: 1216566 - DNA, 25 bp, Homo sapien
gatgtcacagaaactctaaggtcaa

SEQ ID NO: 1216567 - DNA, 25 bp, Homo sapien
taaggtcaactagtcttggaagaca

SEQ ID NO: 1216568 - DNA, 25 bp, Homo sapien
aatgctgctcttcgtgctcacctgc

SEQ ID NO: 1216569 - DNA, 25 bp, Homo sapien
cattgcacaggagaagtcggcctga

SEQ ID NO: 1216570 - DNA, 25 bp, Homo sapien
ccagcagtgggaccgtccggcacaa

SEQ ID NO: 1216571 - DNA, 25 bp, Homo sapien
gggaccgtccggcacaagggcagca

SEQ ID NO: 1216572 - DNA, 25 bp, Homo sapien
agcagtgggaccgtccggcacaagg

SEQ ID NO: 1216573 - DNA, 25 bp, Homo sapien
cagtgggaccgtccggcacaagggc

SEQ ID NO: 1216574 - DNA, 25 bp, Homo sapien
acaggcagcatgatcaactcctgct

SEQ ID NO: 1216575 - DNA, 25 bp, Homo sapien
agcatgatcaactcctgctgttcct

SEQ ID NO: 1216576 - DNA, 25 bp, Homo sapien
caggcagcatgatcaactcctgctg

SEQ ID NO: 1216577 - DNA, 25 bp, Homo sapien
ggcagcatgatcaactcctgctgtt

SEQ ID NO: 1216578 - DNA, 25 bp, Homo sapien
aggtgtgggtcaaacactgagcaga

SEQ ID NO: 1216579 - DNA, 25 bp, Homo sapien
ttggcagcagcgtccagtgccctgc

SEQ ID NO: 1216580 - DNA, 25 bp, Homo sapien
taagagcccaggtgtgggtcaaaca

SEQ ID NO: 1216581 - DNA, 25 bp, Homo sapien
agagtttcagttttggcagcagcgt

SEQ ID NO: 1216582 - DNA, 25 bp, Homo sapien
cagctatgttctggatcgccgtgcc

SEQ ID NO: 1216583 - DNA, 25 bp, Homo sapien
tcctattcaaccaatgagggagcag

SEQ ID NO: 1216584 - DNA, 25 bp, Homo sapien
caggctctgcaaggtgtgtacttca

SEQ ID NO: 1216585 - DNA, 25 bp, Homo sapien
tgtaacggagataggacagacatca

SEQ ID NO: 1216586 - DNA, 25 bp, Homo sapien
tcccagagcacaaggagaagctcct

SEQ ID NO: 1216587 - DNA, 25 bp, Homo sapien
tacttacgtgtcaatggcatcccag

SEQ ID NO: 1216588 - DNA, 25 bp, Homo sapien
taagcaaccctcacagcagagagca

SEQ ID NO: 1216589 - DNA, 25 bp, Homo sapien
tgagagcaacatgcccaggtttaag

SEQ ID NO: 1216590 - DNA, 25 bp, Homo sapien
tagggagaatcaaggacatctgagc

SEQ ID NO: 1216591 - DNA, 25 bp, Homo sapien
caaggacccgcgtgtatgcatagtg

SEQ ID NO: 1216592 - DNA, 25 bp, Homo sapien
atgcccatggaccagatcaaaccag

SEQ ID NO: 1216593 - DNA, 25 bp, Homo sapien
cagagtatggagctcttgtcaccag

SEQ ID NO: 1216594 - DNA, 25 bp, Homo sapien
ctccgtacggatggctaaagagggc

SEQ ID NO: 1216595 - DNA, 25 bp, Homo sapien
gacacgggcacaatatgctgaagat

SEQ ID NO: 1216596 - DNA, 25 bp, Homo sapien
gagtaaggcgcgcttgcttgagaca

SEQ ID NO: 1216597 - DNA, 25 bp, Homo sapien
tgctgaagatgaagccacctccgta

SEQ ID NO: 1216598 - DNA, 25 bp, Homo sapien
agaagaaacgccacggaaagacgag

SEQ ID NO: 1216599 - DNA, 25 bp, Homo sapien
gaagacaggcattgcgcccttggaa

SEQ ID NO: 1216600 - DNA, 25 bp, Homo sapien
cttggaaagcattccagtgccagag

SEQ ID NO: 1216601 - DNA, 25 bp, Homo sapien
gaaagacgagggcaaatgaacgcac

SEQ ID NO: 1216602 - DNA, 25 bp, Homo sapien
ttccccaggagagtgatgatggagc

SEQ ID NO: 1216603 - DNA, 25 bp, Homo sapien
tgtgtaggctaagaaggaaggaccc

SEQ ID NO: 1216604 - DNA, 25 bp, Homo sapien
tgagtgtgtgagatgaacccttcca

SEQ ID NO: 1216605 - DNA, 25 bp, Homo sapien
ggaaccctggcgatatcactttaac

SEQ ID NO: 1216606 - DNA, 25 bp, Homo sapien
gaggacatccgcctccctgaaagtg

SEQ ID NO: 1216607 - DNA, 25 bp, Homo sapien
tcacacagaggtcaaccgatgagcc

SEQ ID NO: 1216608 - DNA, 25 bp, Homo sapien
cctgaaagtggtgctagacagagct

SEQ ID NO: 1216609 - DNA, 25 bp, Homo sapien
tgactctgcagggtaggaccacgtg

SEQ ID NO: 1216610 - DNA, 25 bp, Homo sapien
tcttggacaagatctcgcccagtgt

SEQ ID NO: 1216611 - DNA, 25 bp, Homo sapien
tcagtgtcaagatctccccaaaggg

SEQ ID NO: 1216612 - DNA, 25 bp, Homo sapien
ggagtagactctgcgaccagtacag

SEQ ID NO: 1216613 - DNA, 25 bp, Homo sapien
gaagagacacatgctccacttggga

SEQ ID NO: 1216614 - DNA, 25 bp, Homo sapien
aagagcagagaaaagcacgtaaaga

SEQ ID NO: 1216615 - DNA, 25 bp, Homo sapien
aaagcacgtaaagaagctctagaga

SEQ ID NO: 1216616 - DNA, 25 bp, Homo sapien
gatctcctgttcactgcaagagcag

SEQ ID NO: 1216617 - DNA, 25 bp, Homo sapien
ggagattctggcctgatctcctgtt

SEQ ID NO: 1216618 - DNA, 25 bp, Homo sapien
tggatcaacttcattgacttcatcc

SEQ ID NO: 1216619 - DNA, 25 bp, Homo sapien
ggatcaacttcattgacttcatcca

SEQ ID NO: 1216620 - DNA, 25 bp, Homo sapien
acttcattgacttcatccatgggtg

SEQ ID NO: 1216621 - DNA, 25 bp, Homo sapien
tcaacttcattgacttcatccatgg

SEQ ID NO: 1216622 - DNA, 25 bp, Homo sapien
ttccagtcacattggtgccattcag

SEQ ID NO: 1216623 - DNA, 25 bp, Homo sapien
tagagacagaggttcctaacgcaaa

SEQ ID NO: 1216624 - DNA, 25 bp, Homo sapien
tgaagtaatacactgctgctacctg

SEQ ID NO: 1216625 - DNA, 25 bp, Homo sapien
gaaaggatcatcttaggctcagaat

SEQ ID NO: 1216626 - DNA, 25 bp, Homo sapien
tgatgtcaaccgcttcaccctgaga

SEQ ID NO: 1216627 - DNA, 25 bp, Homo sapien
gacagaataggtgatccttgccacc

SEQ ID NO: 1216628 - DNA, 25 bp, Homo sapien
gagtccactgggcatacgattgaga

SEQ ID NO: 1216629 - DNA, 25 bp, Homo sapien
gagacaggccataccaactttggag

SEQ ID NO: 1216630 - DNA, 25 bp, Homo sapien
gagtcttgaatccagcttgtgcccc

SEQ ID NO: 1216631 - DNA, 25 bp, Homo sapien
tgagacgcctcatagcacaaattgt

SEQ ID NO: 1216632 - DNA, 25 bp, Homo sapien
cttgtgcccctgagatgagacgcct

SEQ ID NO: 1216633 - DNA, 25 bp, Homo sapien
cacaaattgtagcaagcgatccaga

SEQ ID NO: 1216634 - DNA, 25 bp, Homo sapien
gccacgagtctagtcacaagtgtga

SEQ ID NO: 1216635 - DNA, 25 bp, Homo sapien
gaatctgatgacacgcgttacacga

SEQ ID NO: 1216636 - DNA, 25 bp, Homo sapien
tcaatgtttaatgcagccacgagtc

SEQ ID NO: 1216637 - DNA, 25 bp, Homo sapien
taataatttccgacctcactaagtg

SEQ ID NO: 1216638 - DNA, 25 bp, Homo sapien
gcgcctgccctgtaacgcgaccgaa

SEQ ID NO: 1216639 - DNA, 25 bp, Homo sapien
tgtaacgcgaccgaaccgagccgac

SEQ ID NO: 1216640 - DNA, 25 bp, Homo sapien
cgatctctcctaagatccctccctg

SEQ ID NO: 1216641 - DNA, 25 bp, Homo sapien
gaaccgagccgacagcttgtggccg

SEQ ID NO: 1216642 - DNA, 25 bp, Homo sapien
ggtttcatagctgttgttgttctgt

SEQ ID NO: 1216643 - DNA, 25 bp, Homo sapien
tcttctctgacattcgaagatttgg

SEQ ID NO: 1216644 - DNA, 25 bp, Homo sapien
ggttttggtttcatagctgttgttg

SEQ ID NO: 1216645 - DNA, 25 bp, Homo sapien
cttctctgacattcgaagatttggg

SEQ ID NO: 1216646 - DNA, 25 bp, Homo sapien
taattatttatcactcccaccaagc

SEQ ID NO: 1216647 - DNA, 25 bp, Homo sapien
ttatcactcccaccaagcagcagag

SEQ ID NO: 1216648 - DNA, 25 bp, Homo sapien
taactatattcccaagataaaatgc

SEQ ID NO: 1216649 - DNA, 25 bp, Homo sapien
gacaggacattctaccctggagact

SEQ ID NO: 1216650 - DNA, 25 bp, Homo sapien
tgagcagcaagggaacaacggttaa

SEQ ID NO: 1216651 - DNA, 25 bp, Homo sapien
aaatcacagtggctttaggacacct

SEQ ID NO: 1216652 - DNA, 25 bp, Homo sapien
tgatgtgaacactaagctgccaggt

SEQ ID NO: 1216653 - DNA, 25 bp, Homo sapien
gagtcaaagttagccaacacaggtg

SEQ ID NO: 1216654 - DNA, 25 bp, Homo sapien
cagtgagccatgatcccgtcactgc

SEQ ID NO: 1216655 - DNA, 25 bp, Homo sapien
gagccatgatcccgtcactgcactc

SEQ ID NO: 1216656 - DNA, 25 bp, Homo sapien
tgcagtgagccatgatcccgtcact

SEQ ID NO: 1216657 - DNA, 25 bp, Homo sapien
gttgcagtgagccatgatcccgtca

SEQ ID NO: 1216658 - DNA, 25 bp, Homo sapien
gagttggtcatgtaggaggcccatg

SEQ ID NO: 1216659 - DNA, 25 bp, Homo sapien
accaatcataacgatcagagtcggg

SEQ ID NO: 1216660 - DNA, 25 bp, Homo sapien
ttaccccgggctggcaaaccaatca

SEQ ID NO: 1216661 - DNA, 25 bp, Homo sapien
ccagttgaggtagcgtgttagtttc

SEQ ID NO: 1216662 - DNA, 25 bp, Homo sapien
tcacgccgatacaccccaagattaa

SEQ ID NO: 1216663 - DNA, 25 bp, Homo sapien
cgtaggacttataggacttgactgc

SEQ ID NO: 1216664 - DNA, 25 bp, Homo sapien
tcctcattgtcatgccgaaagaagt

SEQ ID NO: 1216665 - DNA, 25 bp, Homo sapien
tcatgccgaaagaagtcgtaggact

SEQ ID NO: 1216666 - DNA, 25 bp, Homo sapien
cctcagtgagatacgccttaacatc

SEQ ID NO: 1216667 - DNA, 25 bp, Homo sapien
gtgagatacgccttaacatcttcca

SEQ ID NO: 1216668 - DNA, 25 bp, Homo sapien
ccattctcctcagtgagatacgcct

SEQ ID NO: 1216669 - DNA, 25 bp, Homo sapien
tctcctcagtgagatacgccttaac

SEQ ID NO: 1216670 - DNA, 25 bp, Homo sapien
attctgttcagcaaagttcaaaatc

SEQ ID NO: 1216671 - DNA, 25 bp, Homo sapien
ccgggttgtattggtggcatcaaac

SEQ ID NO: 1216672 - DNA, 25 bp, Homo sapien
ctcctctcccgggttgtattggtgg

SEQ ID NO: 1216673 - DNA, 25 bp, Homo sapien
tctgttcagcaaagttcaaaatcat

SEQ ID NO: 1216674 - DNA, 25 bp, Homo sapien
catcacagacggattccacaaagaa

SEQ ID NO: 1216675 - DNA, 25 bp, Homo sapien
ggatcatcacagacggattccacaa

SEQ ID NO: 1216676 - DNA, 25 bp, Homo sapien
caggatcatcacagacggattccac

SEQ ID NO: 1216677 - DNA, 25 bp, Homo sapien
gatcatcacagacggattccacaaa

SEQ ID NO: 1216678 - DNA, 25 bp, Homo sapien
gtagcattcaattctcttcaggaag

SEQ ID NO: 1216679 - DNA, 25 bp, Homo sapien
gaggtcggtaggtaactttgtagca

SEQ ID NO: 1216680 - DNA, 25 bp, Homo sapien
tctgttcctttcaggatagtcaggg

SEQ ID NO: 1216681 - DNA, 25 bp, Homo sapien
agttgtctgggtcaagaggtcggta

SEQ ID NO: 1216682 - DNA, 25 bp, Homo sapien
tctgttgactaaaaatcgctggccc

SEQ ID NO: 1216683 - DNA, 25 bp, Homo sapien
cgaggctggacgtggatattcatga

SEQ ID NO: 1216684 - DNA, 25 bp, Homo sapien
gctggcccacgtttatcaccttgat

SEQ ID NO: 1216685 - DNA, 25 bp, Homo sapien
catgccggcaaaggtaaatggtgcg

SEQ ID NO: 1216686 - DNA, 25 bp, Homo sapien
cacactttgaggtctgttatttcct

SEQ ID NO: 1216687 - DNA, 25 bp, Homo sapien
gcttgtccacactttgaggtctgtt

SEQ ID NO: 1216688 - DNA, 25 bp, Homo sapien
ttcagcagtctgtatggtcctcttc

SEQ ID NO: 1216689 - DNA, 25 bp, Homo sapien
ctgctcatagggcaccccgagagat

SEQ ID NO: 1216690 - DNA, 25 bp, Homo sapien
gatacagatacttctcttgatctcg

SEQ ID NO: 1216691 - DNA, 25 bp, Homo sapien
tccccaccaggatatcgatacagat

SEQ ID NO: 1216692 - DNA, 25 bp, Homo sapien
gatctcgaagtgcaaactcttctgg

SEQ ID NO: 1216693 - DNA, 25 bp, Homo sapien
tgggtaccgtttctcaatctctgca

SEQ ID NO: 1216694 - DNA, 25 bp, Homo sapien
tgcgcccttatccaagaagtaggcc

SEQ ID NO: 1216695 - DNA, 25 bp, Homo sapien
tgggagatgacgaggacattgccct

SEQ ID NO: 1216696 - DNA, 25 bp, Homo sapien
cagccgctgcaccaggtcctggtat

SEQ ID NO: 1216697 - DNA, 25 bp, Homo sapien
gccctgacgttccagctccatgatg

SEQ ID NO: 1216698 - DNA, 25 bp, Homo sapien
caactgctgctcctaagataccacc

SEQ ID NO: 1216699 - DNA, 25 bp, Homo sapien
accctcctagtaggcagcgtggcag

SEQ ID NO: 1216700 - DNA, 25 bp, Homo sapien
taccaccctcctagtaggcagcgtg

SEQ ID NO: 1216701 - DNA, 25 bp, Homo sapien
tcctaagataccaccctcctagtag

SEQ ID NO: 1216702 - DNA, 25 bp, Homo sapien
gggcatctcaagtatggtagctcat

SEQ ID NO: 1216703 - DNA, 25 bp, Homo sapien
atggagagggcatctcaagtatggt

SEQ ID NO: 1216704 - DNA, 25 bp, Homo sapien
caggagtaagtttgaagatggtatg

SEQ ID NO: 1216705 - DNA, 25 bp, Homo sapien
gagagggcatctcaagtatggtagc

SEQ ID NO: 1216706 - DNA, 25 bp, Homo sapien
tgccagcccctatgtgcatagttac

SEQ ID NO: 1216707 - DNA, 25 bp, Homo sapien
cctgccagcccctatgtgcatagtt

SEQ ID NO: 1216708 - DNA, 25 bp, Homo sapien
ctgccagcccctatgtgcatagtta

SEQ ID NO: 1216709 - DNA, 25 bp, Homo sapien
agttggcttgtcacggtgcgtgttc

SEQ ID NO: 1216710 - DNA, 25 bp, Homo sapien
acagcctccacgttaagtttaattg

SEQ ID NO: 1216711 - DNA, 25 bp, Homo sapien
tggcttgtcacggtgcgtgttcaca

SEQ ID NO: 1216712 - DNA, 25 bp, Homo sapien
gtgcgtgttcacagcctccacgtta

SEQ ID NO: 1216713 - DNA, 25 bp, Homo sapien
ggccggctcccaacactgtaatttc

SEQ ID NO: 1216714 - DNA, 25 bp, Homo sapien
tcttggacgccttattgtattcgaa

SEQ ID NO: 1216715 - DNA, 25 bp, Homo sapien
gacagaggcgtaaagctgttccttc

SEQ ID NO: 1216716 - DNA, 25 bp, Homo sapien
tattgtattcgaactggacagaggc

SEQ ID NO: 1216717 - DNA, 25 bp, Homo sapien
acagttacaccaccggaatgctgac

SEQ ID NO: 1216718 - DNA, 25 bp, Homo sapien
ccttggtgattagtgacaagggcag

SEQ ID NO: 1216719 - DNA, 25 bp, Homo sapien
tctgtgttaagattaatggtgaagt

SEQ ID NO: 1216720 - DNA, 25 bp, Homo sapien
ggtgggcatagagggaggaagttaa

SEQ ID NO: 1216721 - DNA, 25 bp, Homo sapien
gcccctgggtgaaaagatgtttcaa

SEQ ID NO: 1216722 - DNA, 25 bp, Homo sapien
aagaacagcttaagttgtcctataa

SEQ ID NO: 1216723 - DNA, 25 bp, Homo sapien
ttgcccctgggtgaaaagatgtttc

SEQ ID NO: 1216724 - DNA, 25 bp, Homo sapien
gaagaacagcttaagttgtcctata

SEQ ID NO: 1216725 - DNA, 25 bp, Homo sapien
cagccccaagggagtgtatcttttt

SEQ ID NO: 1216726 - DNA, 25 bp, Homo sapien
caacatgaggacattagtgaagaca

SEQ ID NO: 1216727 - DNA, 25 bp, Homo sapien
gatccatttagacccactgcagaaa

SEQ ID NO: 1216728 - DNA, 25 bp, Homo sapien
tcctagacagacaccacaatgccat

SEQ ID NO: 1216729 - DNA, 25 bp, Homo sapien
ctgtagtctgggctggcccttacag

SEQ ID NO: 1216730 - DNA, 25 bp, Homo sapien
aatattctgtggatgtcctgtagtc

SEQ ID NO: 1216731 - DNA, 25 bp, Homo sapien
ctgggctggcccttacaggacctgg

SEQ ID NO: 1216732 - DNA, 25 bp, Homo sapien
tacttgcaagctccagaatattctg

SEQ ID NO: 1216733 - DNA, 25 bp, Homo sapien
agttacgagctagatcccacagggt

SEQ ID NO: 1216734 - DNA, 25 bp, Homo sapien
taaacagccccagaggatactggct

SEQ ID NO: 1216735 - DNA, 25 bp, Homo sapien
ggttacctctaaaagaccagcagat

SEQ ID NO: 1216736 - DNA, 25 bp, Homo sapien
taagagccctgcaagagctagagcc

SEQ ID NO: 1216737 - DNA, 25 bp, Homo sapien
gaagctgcctatggtatcctacttg

SEQ ID NO: 1216738 - DNA, 25 bp, Homo sapien
tcctacttgggacatacgagtaaag

SEQ ID NO: 1216739 - DNA, 25 bp, Homo sapien
caggagtcagttgccagtgatgaca

SEQ ID NO: 1216740 - DNA, 25 bp, Homo sapien
gacaacctttatcatcctggcaggg

SEQ ID NO: 1216741 - DNA, 25 bp, Homo sapien
caacagaaaagtcaggagaagcgat

SEQ ID NO: 1216742 - DNA, 25 bp, Homo sapien
ggttgaacacttctagactcagact

SEQ ID NO: 1216743 - DNA, 25 bp, Homo sapien
gacaggttaacacaatgctagcttg

SEQ ID NO: 1216744 - DNA, 25 bp, Homo sapien
cagtgacctgtctctaatgctgggt

SEQ ID NO: 1216745 - DNA, 25 bp, Homo sapien
cctgctagacttctctgaagggatc

SEQ ID NO: 1216746 - DNA, 25 bp, Homo sapien
tcatgtcctatctgaggataagacc

SEQ ID NO: 1216747 - DNA, 25 bp, Homo sapien
tacagattaccaacatgcattcaag

SEQ ID NO: 1216748 - DNA, 25 bp, Homo sapien
ggataagaccacctcagctcctctt

SEQ ID NO: 1216749 - DNA, 25 bp, Homo sapien
attttgtaggacttgtgatagacac

SEQ ID NO: 1216750 - DNA, 25 bp, Homo sapien
ttttgtaggacttgtgatagacaca

SEQ ID NO: 1216751 - DNA, 25 bp, Homo sapien
ggcagatccctagcacaatgcaagt

SEQ ID NO: 1216752 - DNA, 25 bp, Homo sapien
tagaccgttagtcaggcaacaccca

SEQ ID NO: 1216753 - DNA, 25 bp, Homo sapien
tcagcacagagatccaactagagac

SEQ ID NO: 1216754 - DNA, 25 bp, Homo sapien
caccagaggcaaagatatagggcag

SEQ ID NO: 1216755 - DNA, 25 bp, Homo sapien
cctataaagaaaacacgtggagtgc

SEQ ID NO: 1216756 - DNA, 25 bp, Homo sapien
cagagcagtgcctaggaaatctaca

SEQ ID NO: 1216757 - DNA, 25 bp, Homo sapien
tgaacaggcattcccttagctgagt

SEQ ID NO: 1216758 - DNA, 25 bp, Homo sapien
tcccaaagggcaccatgtatgatca

SEQ ID NO: 1216759 - DNA, 25 bp, Homo sapien
cgaacttctgttggcttgtctgagt

SEQ ID NO: 1216760 - DNA, 25 bp, Homo sapien
cagtgcgaacttctgttggcttgtc

SEQ ID NO: 1216761 - DNA, 25 bp, Homo sapien
cttcaattacagtgcgaacttctgt

SEQ ID NO: 1216762 - DNA, 25 bp, Homo sapien
aattacagtgcgaacttctgttggc

SEQ ID NO: 1216763 - DNA, 25 bp, Homo sapien
tacccgaatggcgtagtcatggtct

SEQ ID NO: 1216764 - DNA, 25 bp, Homo sapien
tgacctcgtgaccatattggaccag

SEQ ID NO: 1216765 - DNA, 25 bp, Homo sapien
gaatcacctggtcgtcctagtaaaa

SEQ ID NO: 1216766 - DNA, 25 bp, Homo sapien
tacccaagatatgaagcaggagcag

SEQ ID NO: 1216767 - DNA, 25 bp, Homo sapien
tgcggaggggcgtctgcgcacagcc

SEQ ID NO: 1216768 - DNA, 25 bp, Homo sapien
gcaaggcaacatgagggacgctgcg

SEQ ID NO: 1216769 - DNA, 25 bp, Homo sapien
gcaacatgagggacgctgcggaggg

SEQ ID NO: 1216770 - DNA, 25 bp, Homo sapien
aaggcaacatgagggacgctgcgga

SEQ ID NO: 1216771 - DNA, 25 bp, Homo sapien
caagcttttcagtagatcccagtcg

SEQ ID NO: 1216772 - DNA, 25 bp, Homo sapien
actaatgcactgaggcgctggtcca

SEQ ID NO: 1216773 - DNA, 25 bp, Homo sapien
tagttgctggatgctgaaccgcctg

SEQ ID NO: 1216774 - DNA, 25 bp, Homo sapien
tatagtacagcatgcggtaggcagc

SEQ ID NO: 1216775 - DNA, 25 bp, Homo sapien
tattttatgttcttattacaaaagc

SEQ ID NO: 1216776 - DNA, 25 bp, Homo sapien
acaaaagcaatacatattactcgca

SEQ ID NO: 1216777 - DNA, 25 bp, Homo sapien
tattacaaaagcaatacatattact

SEQ ID NO: 1216778 - DNA, 25 bp, Homo sapien
ttacaaaagcaatacatattactcg

SEQ ID NO: 1216779 - DNA, 25 bp, Homo sapien
atcatcttaaagaagctagtttcaa

SEQ ID NO: 1216780 - DNA, 25 bp, Homo sapien
tcatcttaaagaagctagtttcaaa

SEQ ID NO: 1216781 - DNA, 25 bp, Homo sapien
tcaaattggagaattcataagtcat

SEQ ID NO: 1216782 - DNA, 25 bp, Homo sapien
ctccccacaggatgagcaagagcat

SEQ ID NO: 1216783 - DNA, 25 bp, Homo sapien
tctccccacaggatgagcaagagca

SEQ ID NO: 1216784 - DNA, 25 bp, Homo sapien
gctccaaagtcctgcagtgacacat

SEQ ID NO: 1216785 - DNA, 25 bp, Homo sapien
cttcccagcaaggaactggtcttaa

SEQ ID NO: 1216786 - DNA, 25 bp, Homo sapien
cttaactgactccaaagctgagagc

SEQ ID NO: 1216787 - DNA, 25 bp, Homo sapien
ctggtcttaactgactccaaagctg

SEQ ID NO: 1216788 - DNA, 25 bp, Homo sapien
acagctgtaaggaagctggtatagg

SEQ ID NO: 1216789 - DNA, 25 bp, Homo sapien
gctggtatagggaggaactgcaaaa

SEQ ID NO: 1216790 - DNA, 25 bp, Homo sapien
tggtatagggaggaactgcaaaaat

SEQ ID NO: 1216791 - DNA, 25 bp, Homo sapien
ctggtatagggaggaactgcaaaaa

SEQ ID NO: 1216792 - DNA, 25 bp, Homo sapien
tattgatttaccctccctggagaaa

SEQ ID NO: 1216793 - DNA, 25 bp, Homo sapien
ctctagagaagaggttatattgatt

SEQ ID NO: 1216794 - DNA, 25 bp, Homo sapien
gaagaggttatattgatttaccctc

SEQ ID NO: 1216795 - DNA, 25 bp, Homo sapien
cctaaccacctcctctctagagaag

SEQ ID NO: 1216796 - DNA, 25 bp, Homo sapien
tggtgatcaaagtcctctccccagg

SEQ ID NO: 1216797 - DNA, 25 bp, Homo sapien
ctggtgatcaaagtcctctccccag

SEQ ID NO: 1216798 - DNA, 25 bp, Homo sapien
ccaggctggaattcacccagctcag

SEQ ID NO: 1216799 - DNA, 25 bp, Homo sapien
ggctggaattcacccagctcagaca

SEQ ID NO: 1216800 - DNA, 25 bp, Homo sapien
cataagacagcacgcacaccaaaaa

SEQ ID NO: 1216801 - DNA, 25 bp, Homo sapien
gaagcagaaactcgccacgcaacca

SEQ ID NO: 1216802 - DNA, 25 bp, Homo sapien
aactcgccacgcaaccataagacag

SEQ ID NO: 1216803 - DNA, 25 bp, Homo sapien
acgcaaccataagacagcacgcaca

SEQ ID NO: 1216804 - DNA, 25 bp, Homo sapien
tacaaacgtaagtccccagaatctg

SEQ ID NO: 1216805 - DNA, 25 bp, Homo sapien
gaggcattgcaaaaaagggtcttct

SEQ ID NO: 1216806 - DNA, 25 bp, Homo sapien
ggtggtagcccttgatacaaacgta

SEQ ID NO: 1216807 - DNA, 25 bp, Homo sapien
tcctttgcgacaaatatgctattgt

SEQ ID NO: 1216808 - DNA, 25 bp, Homo sapien
agcggcactcagtagtggtgttatc

SEQ ID NO: 1216809 - DNA, 25 bp, Homo sapien
tccattcaccagcacaggatcagga

SEQ ID NO: 1216810 - DNA, 25 bp, Homo sapien
ccattcaccagcacaggatcaggac

SEQ ID NO: 1216811 - DNA, 25 bp, Homo sapien
tgcccttgaggatgtagtggtcatt

SEQ ID NO: 1216812 - DNA, 25 bp, Homo sapien
gcccaggtgtggtcctctagacact

SEQ ID NO: 1216813 - DNA, 25 bp, Homo sapien
tggtcattgcacataaacgtgattt

SEQ ID NO: 1216814 - DNA, 25 bp, Homo sapien
tctagacactggctccgattgctgc

SEQ ID NO: 1216815 - DNA, 25 bp, Homo sapien
taatagtaagtctgcccatccagga

SEQ ID NO: 1216816 - DNA, 25 bp, Homo sapien
ggtgtgagctagagccctaactttg

SEQ ID NO: 1216817 - DNA, 25 bp, Homo sapien
aaataatagcatcctgtgatccagc

SEQ ID NO: 1216818 - DNA, 25 bp, Homo sapien
taaatggctatttcctcaggtcatg

SEQ ID NO: 1216819 - DNA, 25 bp, Homo sapien
gtgacataaaaagacagggatcctg

SEQ ID NO: 1216820 - DNA, 25 bp, Homo sapien
ttcagaaacctagggagctcatcct

SEQ ID NO: 1216821 - DNA, 25 bp, Homo sapien
gggattccagtccaccagagttctg

SEQ ID NO: 1216822 - DNA, 25 bp, Homo sapien
ctcaaaggctgaatagaggaaagca

SEQ ID NO: 1216823 - DNA, 25 bp, Homo sapien
tctaaggtcccagtcagctctgaga

SEQ ID NO: 1216824 - DNA, 25 bp, Homo sapien
tgtttatgccagcacctgacagcct

SEQ ID NO: 1216825 - DNA, 25 bp, Homo sapien
cccctgtggataagagttgtgaaac

SEQ ID NO: 1216826 - DNA, 25 bp, Homo sapien
aacacctgcgggatctggaaacctg

SEQ ID NO: 1216827 - DNA, 25 bp, Homo sapien
taataactaatggtggatcctaagg

SEQ ID NO: 1216828 - DNA, 25 bp, Homo sapien
tggtggatcctaaggtgaagttatt

SEQ ID NO: 1216829 - DNA, 25 bp, Homo sapien
ctgtcttcacagtaataactaatgg

SEQ ID NO: 1216830 - DNA, 25 bp, Homo sapien
cacagtaataactaatggtggatcc

SEQ ID NO: 1216831 - DNA, 25 bp, Homo sapien
cagcagtaggaaatcagatgaccag

SEQ ID NO: 1216832 - DNA, 25 bp, Homo sapien
aatcagaatgagcttagaatcctgc

SEQ ID NO: 1216833 - DNA, 25 bp, Homo sapien
tgagcttagaatcctgcagcagtag

SEQ ID NO: 1216834 - DNA, 25 bp, Homo sapien
gaccaggtggacacagactgggtta

SEQ ID NO: 1216835 - DNA, 25 bp, Homo sapien
aattccagcactttccaggactttg

SEQ ID NO: 1216836 - DNA, 25 bp, Homo sapien
attccagcactttccaggactttgg

SEQ ID NO: 1216837 - DNA, 25 bp, Homo sapien
ttccagcactttccaggactttggg

SEQ ID NO: 1216838 - DNA, 25 bp, Homo sapien
ctgcaaataaatcttagcgaagggg

SEQ ID NO: 1216839 - DNA, 25 bp, Homo sapien
gggagagtgatagaagcactttatc

SEQ ID NO: 1216840 - DNA, 25 bp, Homo sapien
taggagaggacccaagtgatgagtc

SEQ ID NO: 1216841 - DNA, 25 bp, Homo sapien
gaatcaggtgtttacacacccaggt

SEQ ID NO: 1216842 - DNA, 25 bp, Homo sapien
tgagtcaacccataaaacatagaga

SEQ ID NO: 1216843 - DNA, 25 bp, Homo sapien
ttcatgctgtgatggaatccacctc

SEQ ID NO: 1216844 - DNA, 25 bp, Homo sapien
ccttgagcctcaatgcatgcttaag

SEQ ID NO: 1216845 - DNA, 25 bp, Homo sapien
gaacagaaattagaacaaggcttag

SEQ ID NO: 1216846 - DNA, 25 bp, Homo sapien
actttctgaattgggtaatggagac

SEQ ID NO: 1216847 - DNA, 25 bp, Homo sapien
ttcctggatcaacttgcagactgga

SEQ ID NO: 1216848 - DNA, 25 bp, Homo sapien
cttctcacactctggtttgggagct

SEQ ID NO: 1216849 - DNA, 25 bp, Homo sapien
atcaacgcattgctgctcctgcacg

SEQ ID NO: 1216850 - DNA, 25 bp, Homo sapien
ctcctgcacgcccactaagtagtac

SEQ ID NO: 1216851 - DNA, 25 bp, Homo sapien
agctcctccattgtcatgccacttt

SEQ ID NO: 1216852 - DNA, 25 bp, Homo sapien
catggcttcgcagaggttcttactc

SEQ ID NO: 1216853 - DNA, 25 bp, Homo sapien
taattgttgcataaagttctccatg

SEQ ID NO: 1216854 - DNA, 25 bp, Homo sapien
caattttgccttcaactcagctttc

SEQ ID NO: 1216855 - DNA, 25 bp, Homo sapien
ctattacatctgctcagctgtagtg

SEQ ID NO: 1216856 - DNA, 25 bp, Homo sapien
tctattacatctgctcagctgtagt

SEQ ID NO: 1216857 - DNA, 25 bp, Homo sapien
cgcaatgaaggaccggccatgtttc

SEQ ID NO: 1216858 - DNA, 25 bp, Homo sapien
gagggcctccaaaaattgatctatc

SEQ ID NO: 1216859 - DNA, 25 bp, Homo sapien
tatccagtgcgctcagaagaacgca

SEQ ID NO: 1216860 - DNA, 25 bp, Homo sapien
cagaagaacgcaatgaaggaccggc

SEQ ID NO: 1216861 - DNA, 25 bp, Homo sapien
tcataataccctgaagttgactggt

SEQ ID NO: 1216862 - DNA, 25 bp, Homo sapien
aaaactgccttgatctatgtagtcc

SEQ ID NO: 1216863 - DNA, 25 bp, Homo sapien
ctccccagatcagagtttatcataa

SEQ ID NO: 1216864 - DNA, 25 bp, Homo sapien
gaagactctatgatgatatctggga

SEQ ID NO: 1216865 - DNA, 25 bp, Homo sapien
tggaaatgtgttcacagactttgta

SEQ ID NO: 1216866 - DNA, 25 bp, Homo sapien
gaaatgtgttcacagactttgtact

SEQ ID NO: 1216867 - DNA, 25 bp, Homo sapien
atgtgttcacagactttgtactgaa

SEQ ID NO: 1216868 - DNA, 25 bp, Homo sapien
actttgtactgaatgaatccaggtg

SEQ ID NO: 1216869 - DNA, 25 bp, Homo sapien
ggcctgctgcttcgctgatgttttt

SEQ ID NO: 1216870 - DNA, 25 bp, Homo sapien
cctttttctatgaagagccccagat

SEQ ID NO: 1216871 - DNA, 25 bp, Homo sapien
ctttttctatgaagagccccagatg

SEQ ID NO: 1216872 - DNA, 25 bp, Homo sapien
aagagccccagatggagtttttggg

SEQ ID NO: 1216873 - DNA, 25 bp, Homo sapien
tcctttttctatgaagagccccaga

SEQ ID NO: 1216874 - DNA, 25 bp, Homo sapien
aattggatcagagactttccacagc

SEQ ID NO: 1216875 - DNA, 25 bp, Homo sapien
gagaattggatcagagactttccac

SEQ ID NO: 1216876 - DNA, 25 bp, Homo sapien
tggaagagaattggatcagagactt

SEQ ID NO: 1216877 - DNA, 25 bp, Homo sapien
ttggaagagaattggatcagagact

SEQ ID NO: 1216878 - DNA, 25 bp, Homo sapien
caggcaacagagcagcgatcaaggt

SEQ ID NO: 1216879 - DNA, 25 bp, Homo sapien
aagaacagcaggcaacagagcagcg

SEQ ID NO: 1216880 - DNA, 25 bp, Homo sapien
caagaacagcaggcaacagagcagc

SEQ ID NO: 1216881 - DNA, 25 bp, Homo sapien
gcaacagagcagcgatcaaggtcat

SEQ ID NO: 1216882 - DNA, 25 bp, Homo sapien
cggggcagcaaatgataaagtgggt

SEQ ID NO: 1216883 - DNA, 25 bp, Homo sapien
gggcagcaaatgataaagtgggtgg

SEQ ID NO: 1216884 - DNA, 25 bp, Homo sapien
gcagcaaatgataaagtgggtggag

SEQ ID NO: 1216885 - DNA, 25 bp, Homo sapien
aaagtgggtggaggaccacaattgc

SEQ ID NO: 1216886 - DNA, 25 bp, Homo sapien
tcgccatcagaattacaggtaagcg

SEQ ID NO: 1216887 - DNA, 25 bp, Homo sapien
gtgttatacacccattcgccatcag

SEQ ID NO: 1216888 - DNA, 25 bp, Homo sapien
gagttgaatgggatctgacgtagcc

SEQ ID NO: 1216889 - DNA, 25 bp, Homo sapien
tccagttttgaagcgtgtctcagtc

SEQ ID NO: 1216890 - DNA, 25 bp, Homo sapien
gcccattacgtaactctcctgggtg

SEQ ID NO: 1216891 - DNA, 25 bp, Homo sapien
gatccaaaagataaatctgtcttaa

SEQ ID NO: 1216892 - DNA, 25 bp, Homo sapien
aatctgtcttaatctctacttgccc

SEQ ID NO: 1216893 - DNA, 25 bp, Homo sapien
tctcctgggtgtctgcatcgtttgt

SEQ ID NO: 1216894 - DNA, 25 bp, Homo sapien
tcttggacttcacaacgactagtgg

SEQ ID NO: 1216895 - DNA, 25 bp, Homo sapien
ttcacaacgactagtggttgagcca

SEQ ID NO: 1216896 - DNA, 25 bp, Homo sapien
cacaacgactagtggttgagccaat

SEQ ID NO: 1216897 - DNA, 25 bp, Homo sapien
tggacttcacaacgactagtggttg

SEQ ID NO: 1216898 - DNA, 25 bp, Homo sapien
ggtgacagaaaagccgtatgcgtag

SEQ ID NO: 1216899 - DNA, 25 bp, Homo sapien
cattctccacagtgcaagaaatgga

SEQ ID NO: 1216900 - DNA, 25 bp, Homo sapien
aggcatggcccaagagtgagaagcg

SEQ ID NO: 1216901 - DNA, 25 bp, Homo sapien
gccgtatgcgtagaaattttcttca

SEQ ID NO: 1216902 - DNA, 25 bp, Homo sapien
cctttttggcacttaaacacaatag

SEQ ID NO: 1216903 - DNA, 25 bp, Homo sapien
atagatgggtccaaatccagagacc

SEQ ID NO: 1216904 - DNA, 25 bp, Homo sapien
gaaacatctggcttgcgacaggtga

SEQ ID NO: 1216905 - DNA, 25 bp, Homo sapien
gagaaggattccatttgctatcagc

SEQ ID NO: 1216906 - DNA, 25 bp, Homo sapien
tttcccaatgctactgattcatatg

SEQ ID NO: 1216907 - DNA, 25 bp, Homo sapien
gataccaggaatgacttggcaagaa

SEQ ID NO: 1216908 - DNA, 25 bp, Homo sapien
cattttttgagcctgggccttggat

SEQ ID NO: 1216909 - DNA, 25 bp, Homo sapien
tataatgcaaacatctaccacgttg

SEQ ID NO: 1216910 - DNA, 25 bp, Homo sapien
ggatgacagcggtaccttaacacag

SEQ ID NO: 1216911 - DNA, 25 bp, Homo sapien
gaagcatgtggaatgtctggtaaat

SEQ ID NO: 1216912 - DNA, 25 bp, Homo sapien
tttctgacaaatcacagtcgtaggc

SEQ ID NO: 1216913 - DNA, 25 bp, Homo sapien
cggcctaggatatgtttcccaggaa

SEQ ID NO: 1216914 - DNA, 25 bp, Homo sapien
cagtgattggcaggacgacttttcc

SEQ ID NO: 1216915 - DNA, 25 bp, Homo sapien
gggactccacgtgccatctccttgg

SEQ ID NO: 1216916 - DNA, 25 bp, Homo sapien
tagctgaaaacctactggtctcatg

SEQ ID NO: 1216917 - DNA, 25 bp, Homo sapien
ttttcctgtgttgagtgatttcacc

SEQ ID NO: 1216918 - DNA, 25 bp, Homo sapien
gatggatgatcaagggaccaacagc

SEQ ID NO: 1216919 - DNA, 25 bp, Homo sapien
cagggcttgagttgacattgatacc

SEQ ID NO: 1216920 - DNA, 25 bp, Homo sapien
gccagttgccaggagtgaagatgct

SEQ ID NO: 1216921 - DNA, 25 bp, Homo sapien
taagagccatcttatgcaggaagac

SEQ ID NO: 1216922 - DNA, 25 bp, Homo sapien
cgaccagaatgtagcctttatcaca

SEQ ID NO: 1216923 - DNA, 25 bp, Homo sapien
taactgcaggagagtttcgcctgtc

SEQ ID NO: 1216924 - DNA, 25 bp, Homo sapien
tatgaactagattgtttataatgcc

SEQ ID NO: 1216925 - DNA, 25 bp, Homo sapien
ttataatgcccatgggcaattttag

SEQ ID NO: 1216926 - DNA, 25 bp, Homo sapien
cagaatcacattggatggtgacatt

SEQ ID NO: 1216927 - DNA, 25 bp, Homo sapien
gccagaatcacattggatggtgaca

SEQ ID NO: 1216928 - DNA, 25 bp, Homo sapien
atcacattggatggtgacattttca

SEQ ID NO: 1216929 - DNA, 25 bp, Homo sapien
gaatcacattggatggtgacatttt

SEQ ID NO: 1216930 - DNA, 25 bp, Homo sapien
gtgagcacttgttcacagccttcgg

SEQ ID NO: 1216931 - DNA, 25 bp, Homo sapien
tgagcacttgttcacagccttcggg

SEQ ID NO: 1216932 - DNA, 25 bp, Homo sapien
ctttatccaaagtggattgtcttgc

SEQ ID NO: 1216933 - DNA, 25 bp, Homo sapien
aaagtggattgtcttgcgctgtctc

SEQ ID NO: 1216934 - DNA, 25 bp, Homo sapien
tgacagtagatttgctaaactgatc

SEQ ID NO: 1216935 - DNA, 25 bp, Homo sapien
ctgatctgtattgaattgcaagagg

SEQ ID NO: 1216936 - DNA, 25 bp, Homo sapien
ttcacaatctcaaagcactaaactt

SEQ ID NO: 1216937 - DNA, 25 bp, Homo sapien
aaaaatttgtgctttgtgtgttgaa

SEQ ID NO: 1216938 - DNA, 25 bp, Homo sapien
gtcctaaatgaccacaaagacaaaa

SEQ ID NO: 1216939 - DNA, 25 bp, Homo sapien
agtcctaaatgaccacaaagacaaa

SEQ ID NO: 1216940 - DNA, 25 bp, Homo sapien
aaacaaatgtattaatgtattaact

SEQ ID NO: 1216941 - DNA, 25 bp, Homo sapien
aacagtaaaacaaatgtattaatgt

SEQ ID NO: 1216942 - DNA, 25 bp, Homo sapien
caaacagtaaaacaaatgtattaat

SEQ ID NO: 1216943 - DNA, 25 bp, Homo sapien
agtaaaacaaatgtattaatgtatt

SEQ ID NO: 1216944 - DNA, 25 bp, Homo sapien
cacaggaagcaagagtcagaaaaag

SEQ ID NO: 1216945 - DNA, 25 bp, Homo sapien
gggcagttgctcaacctgttttaac

SEQ ID NO: 1216946 - DNA, 25 bp, Homo sapien
actgtggagtaaaggcagtctgtcc

SEQ ID NO: 1216947 - DNA, 25 bp, Homo sapien
catgagtcaaagagacaacgtgcac

SEQ ID NO: 1216948 - DNA, 25 bp, Homo sapien
gaaatagatgcgtttctaacatggt

SEQ ID NO: 1216949 - DNA, 25 bp, Homo sapien
gaactgtgtgcaccagataatatgc

SEQ ID NO: 1216950 - DNA, 25 bp, Homo sapien
tgggtaatataatggaggtaagctc

SEQ ID NO: 1216951 - DNA, 25 bp, Homo sapien
caagatatgacagtggttctctggg

SEQ ID NO: 1216952 - DNA, 25 bp, Homo sapien
attagtgaaaataagctcctctttc

SEQ ID NO: 1216953 - DNA, 25 bp, Homo sapien
ttagtgaaaataagctcctctttca

SEQ ID NO: 1216954 - DNA, 25 bp, Homo sapien
tagtgaaaataagctcctctttcag

SEQ ID NO: 1216955 - DNA, 25 bp, Homo sapien
aacagagttgaattggagactttcc

SEQ ID NO: 1216956 - DNA, 25 bp, Homo sapien
cacagcctagagacgagtgaagctg

SEQ ID NO: 1216957 - DNA, 25 bp, Homo sapien
ctcaaggagtgcaagtggaggtctc

SEQ ID NO: 1216958 - DNA, 25 bp, Homo sapien
ccttttctatcgagggtggagccct

SEQ ID NO: 1216959 - DNA, 25 bp, Homo sapien
tagccaacaaaacagtgaccagcat

SEQ ID NO: 1216960 - DNA, 25 bp, Homo sapien
caagaatggtagccaacaaaacagt

SEQ ID NO: 1216961 - DNA, 25 bp, Homo sapien
ccaacaaaacagtgaccagcatcat

SEQ ID NO: 1216962 - DNA, 25 bp, Homo sapien
gtagccaacaaaacagtgaccagca

SEQ ID NO: 1216963 - DNA, 25 bp, Homo sapien
tccgagtactaagttttctagagca

SEQ ID NO: 1216964 - DNA, 25 bp, Homo sapien
tcaatgagcgcagtaagtgatcaat

SEQ ID NO: 1216965 - DNA, 25 bp, Homo sapien
tatcataactcctattgtgtcattg

SEQ ID NO: 1216966 - DNA, 25 bp, Homo sapien
tatatcttgggacacaatgtctcga

SEQ ID NO: 1216967 - DNA, 25 bp, Homo sapien
tactatagttccacgagtctttggc

SEQ ID NO: 1216968 - DNA, 25 bp, Homo sapien
gcatcacaaatcagtcgacttgaat

SEQ ID NO: 1216969 - DNA, 25 bp, Homo sapien
gacttgaattgattttaccatgccc

SEQ ID NO: 1216970 - DNA, 25 bp, Homo sapien
catacaacggatttattggaaaagc

SEQ ID NO: 1216971 - DNA, 25 bp, Homo sapien
tatatggttgaaccaaggagaagat

SEQ ID NO: 1216972 - DNA, 25 bp, Homo sapien
attatatggttgaaccaaggagaag

SEQ ID NO: 1216973 - DNA, 25 bp, Homo sapien
tttttaacttccactatcccattga

SEQ ID NO: 1216974 - DNA, 25 bp, Homo sapien
cactatcccattgattaattctgga

SEQ ID NO: 1216975 - DNA, 25 bp, Homo sapien
ctggtggttgagccaattaagaaaa

SEQ ID NO: 1216976 - DNA, 25 bp, Homo sapien
tggtggttgagccaattaagaaaaa

SEQ ID NO: 1216977 - DNA, 25 bp, Homo sapien
actcctttaccttggatctgacaat

SEQ ID NO: 1216978 - DNA, 25 bp, Homo sapien
ggatcactccaatcaactcctttac

SEQ ID NO: 1216979 - DNA, 25 bp, Homo sapien
tcctttaccttggatctgacaatga

SEQ ID NO: 1216980 - DNA, 25 bp, Homo sapien
tctgggagaggatcactccaatcaa

SEQ ID NO: 1216981 - DNA, 25 bp, Homo sapien
tggagacgttgcctatgagtgagaa

SEQ ID NO: 1216982 - DNA, 25 bp, Homo sapien
ggtttgggctccagacacctattgt

SEQ ID NO: 1216983 - DNA, 25 bp, Homo sapien
cagaggaggcatatgtgtagaattc

SEQ ID NO: 1216984 - DNA, 25 bp, Homo sapien
gaattcttgatctccaccgctgtgc

SEQ ID NO: 1216985 - DNA, 25 bp, Homo sapien
aatagagtctttgtaagtatagagg

SEQ ID NO: 1216986 - DNA, 25 bp, Homo sapien
taaccataatagagtctttgtaagt

SEQ ID NO: 1216987 - DNA, 25 bp, Homo sapien
gaatctgtggtcgacgacagacaat

SEQ ID NO: 1216988 - DNA, 25 bp, Homo sapien
agaaacaaagattgcctttggaatc

SEQ ID NO: 1216989 - DNA, 25 bp, Homo sapien
cgtttcacaatagattaaactgctg

SEQ ID NO: 1216990 - DNA, 25 bp, Homo sapien
gagggaacagaaggataccactcat

SEQ ID NO: 1216991 - DNA, 25 bp, Homo sapien
ttcacaatagattaaactgctgcct

SEQ ID NO: 1216992 - DNA, 25 bp, Homo sapien
gaaggataccactcattattcgttt

SEQ ID NO: 1216993 - DNA, 25 bp, Homo sapien
ggaactccatcgtagtccatactca

SEQ ID NO: 1216994 - DNA, 25 bp, Homo sapien
caaatattggaactccatcgtagtc

SEQ ID NO: 1216995 - DNA, 25 bp, Homo sapien
gatccaaatattggaactccatcgt

SEQ ID NO: 1216996 - DNA, 25 bp, Homo sapien
tattggaactccatcgtagtccata

SEQ ID NO: 1216997 - DNA, 25 bp, Homo sapien
ttattgggagtagagttggcttgtg

SEQ ID NO: 1216998 - DNA, 25 bp, Homo sapien
ttgggagtagagttggcttgtgcct

SEQ ID NO: 1216999 - DNA, 25 bp, Homo sapien
gggagtagagttggcttgtgcctgt

SEQ ID NO: 1217000 - DNA, 25 bp, Homo sapien
tattgggagtagagttggcttgtgc

SEQ ID NO: 1217001 - DNA, 25 bp, Homo sapien
tccggtaggacagtgcaaccattca

SEQ ID NO: 1217002 - DNA, 25 bp, Homo sapien
gaagcataggaaatgtccggtagga

SEQ ID NO: 1217003 - DNA, 25 bp, Homo sapien
aattttcctgacaagtcacagtcag

SEQ ID NO: 1217004 - DNA, 25 bp, Homo sapien
aacaggtctatagccaggtttgcat

SEQ ID NO: 1217005 - DNA, 25 bp, Homo sapien
ctaccagtgaaatacctcctttcat

SEQ ID NO: 1217006 - DNA, 25 bp, Homo sapien
ccagtgaaatacctcctttcattta

SEQ ID NO: 1217007 - DNA, 25 bp, Homo sapien
catttatgattctgatattctccag

SEQ ID NO: 1217008 - DNA, 25 bp, Homo sapien
ttcatttatgattctgatattctcc

SEQ ID NO: 1217009 - DNA, 25 bp, Homo sapien
aatatagtctccataggcatagaca

SEQ ID NO: 1217010 - DNA, 25 bp, Homo sapien
tatagtctccataggcatagacaca

SEQ ID NO: 1217011 - DNA, 25 bp, Homo sapien
atagtctccataggcatagacacat

SEQ ID NO: 1217012 - DNA, 25 bp, Homo sapien
aaatatagtctccataggcatagac

SEQ ID NO: 1217013 - DNA, 25 bp, Homo sapien
tagggtaatagccttcatcacacat

SEQ ID NO: 1217014 - DNA, 25 bp, Homo sapien
gctggcattttaggcttccatgtgc

SEQ ID NO: 1217015 - DNA, 25 bp, Homo sapien
actctccccgtcaacagaaataggg

SEQ ID NO: 1217016 - DNA, 25 bp, Homo sapien
gtggcaggaactctccccgtcaaca

SEQ ID NO: 1217017 - DNA, 25 bp, Homo sapien
caacagagaggtggttcagtaggtc

SEQ ID NO: 1217018 - DNA, 25 bp, Homo sapien
tctccttcgtggtatttcaacagag

SEQ ID NO: 1217019 - DNA, 25 bp, Homo sapien
gagtaatcaccatcgtgttgatgtg

SEQ ID NO: 1217020 - DNA, 25 bp, Homo sapien
cttatcctgataagagacagatgtt

SEQ ID NO: 1217021 - DNA, 25 bp, Homo sapien
aatccagccaaaacatatccttcat

SEQ ID NO: 1217022 - DNA, 25 bp, Homo sapien
cagtagattgtagcaaatccagcca

SEQ ID NO: 1217023 - DNA, 25 bp, Homo sapien
tacattgaggaggtgcaagttgcca

SEQ ID NO: 1217024 - DNA, 25 bp, Homo sapien
agttgccagtgaaaagacttgcagt

SEQ ID NO: 1217025 - DNA, 25 bp, Homo sapien
aatgtatttttgatcacactgtttc

SEQ ID NO: 1217026 - DNA, 25 bp, Homo sapien
aaaatgtatttttgatcacactgtt

SEQ ID NO: 1217027 - DNA, 25 bp, Homo sapien
atgaaaatgtatttttgatcacact

SEQ ID NO: 1217028 - DNA, 25 bp, Homo sapien
gaaaatgtatttttgatcacactgt

SEQ ID NO: 1217029 - DNA, 25 bp, Homo sapien
acatactgatccttatccacagaca

SEQ ID NO: 1217030 - DNA, 25 bp, Homo sapien
caacatactgatccttatccacaga

SEQ ID NO: 1217031 - DNA, 25 bp, Homo sapien
tcaacatactgatccttatccacag

SEQ ID NO: 1217032 - DNA, 25 bp, Homo sapien
ctcaacatactgatccttatccaca

SEQ ID NO: 1217033 - DNA, 25 bp, Homo sapien
tgttcatcaatttgtctctctcttt

SEQ ID NO: 1217034 - DNA, 25 bp, Homo sapien
gatgggtgttcatcaatttgtctct

SEQ ID NO: 1217035 - DNA, 25 bp, Homo sapien
ggtgttcatcaatttgtctctctct

SEQ ID NO: 1217036 - DNA, 25 bp, Homo sapien
tgggtgttcatcaatttgtctctct

SEQ ID NO: 1217037 - DNA, 25 bp, Homo sapien
taagaaagttctcctagcccagacc

SEQ ID NO: 1217038 - DNA, 25 bp, Homo sapien
tctggcagtaataagaaagttctcc

SEQ ID NO: 1217039 - DNA, 25 bp, Homo sapien
gctacaaaaggctagattaccaata

SEQ ID NO: 1217040 - DNA, 25 bp, Homo sapien
cagacccttatgagagtgatggtgc

SEQ ID NO: 1217041 - DNA, 25 bp, Homo sapien
tctgatgggcttatggctgccctta

SEQ ID NO: 1217042 - DNA, 25 bp, Homo sapien
ctgatgggcttatggctgcccttaa

SEQ ID NO: 1217043 - DNA, 25 bp, Homo sapien
agtctgatgggcttatggctgccct

SEQ ID NO: 1217044 - DNA, 25 bp, Homo sapien
gtctgatgggcttatggctgccctt

SEQ ID NO: 1217045 - DNA, 25 bp, Homo sapien
catagatggggaagatgcactggct

SEQ ID NO: 1217046 - DNA, 25 bp, Homo sapien
gatggggaagatgcactggcttgtg

SEQ ID NO: 1217047 - DNA, 25 bp, Homo sapien
tagatggggaagatgcactggcttg

SEQ ID NO: 1217048 - DNA, 25 bp, Homo sapien
atggggaagatgcactggcttgtgc

SEQ ID NO: 1217049 - DNA, 25 bp, Homo sapien
agccaactggcaatcaagaccccat

SEQ ID NO: 1217050 - DNA, 25 bp, Homo sapien
agccccgtttgctgtagcagggcaa

SEQ ID NO: 1217051 - DNA, 25 bp, Homo sapien
gtggggtatcgatagccccgtttgc

SEQ ID NO: 1217052 - DNA, 25 bp, Homo sapien
ccgtttgctgtagcagggcaactat

SEQ ID NO: 1217053 - DNA, 25 bp, Homo sapien
ggcattgttcgtcttcaagtctcac

SEQ ID NO: 1217054 - DNA, 25 bp, Homo sapien
gaattgtttcatgtgatcggtgcca

SEQ ID NO: 1217055 - DNA, 25 bp, Homo sapien
tgttccagtcgtttaatctccagag

SEQ ID NO: 1217056 - DNA, 25 bp, Homo sapien
tagtacttgagaaacacagaattgc

SEQ ID NO: 1217057 - DNA, 25 bp, Homo sapien
gatttacccaagcatctgatgtccg

SEQ ID NO: 1217058 - DNA, 25 bp, Homo sapien
tactatcattgcatagacattggga

SEQ ID NO: 1217059 - DNA, 25 bp, Homo sapien
cagagcctcctcttgacgtttgtca

SEQ ID NO: 1217060 - DNA, 25 bp, Homo sapien
gaccccatgcccgttatagccaagt

SEQ ID NO: 1217061 - DNA, 25 bp, Homo sapien
aggcatgagatacagggatgggagg

SEQ ID NO: 1217062 - DNA, 25 bp, Homo sapien
ctgacgcaggcctcatggtacatgt

SEQ ID NO: 1217063 - DNA, 25 bp, Homo sapien
gacagaagcccgaaggtcacagatt

SEQ ID NO: 1217064 - DNA, 25 bp, Homo sapien
gagggtggtttgctccctgacgcag

SEQ ID NO: 1217065 - DNA, 25 bp, Homo sapien
ttattgtctgttaccataggctctt

SEQ ID NO: 1217066 - DNA, 25 bp, Homo sapien
ttgtctgttaccataggctcttctt

SEQ ID NO: 1217067 - DNA, 25 bp, Homo sapien
cttcttcctgtactgattagctgag

SEQ ID NO: 1217068 - DNA, 25 bp, Homo sapien
tcttcttcctgtactgattagctga

SEQ ID NO: 1217069 - DNA, 25 bp, Homo sapien
aggcaaagtctcacgataggccgtc

SEQ ID NO: 1217070 - DNA, 25 bp, Homo sapien
cacaaggcaaagtctcacgataggc

SEQ ID NO: 1217071 - DNA, 25 bp, Homo sapien
caaggcaaagtctcacgataggccg

SEQ ID NO: 1217072 - DNA, 25 bp, Homo sapien
tgatcacaaggcaaagtctcacgat

SEQ ID NO: 1217073 - DNA, 25 bp, Homo sapien
cctacagaagacaacaaccttttct

SEQ ID NO: 1217074 - DNA, 25 bp, Homo sapien
tctcctgaggtttgagtatcaacag

SEQ ID NO: 1217075 - DNA, 25 bp, Homo sapien
cagtgacggctaatcttttttcaga

SEQ ID NO: 1217076 - DNA, 25 bp, Homo sapien
taaaataatcatgtcagtgacggct

SEQ ID NO: 1217077 - DNA, 25 bp, Homo sapien
cagagagcatgccttttggcaggct

SEQ ID NO: 1217078 - DNA, 25 bp, Homo sapien
cgtattttgaaatcttgtggagttg

SEQ ID NO: 1217079 - DNA, 25 bp, Homo sapien
gagttgatacgttcctttttctgca

SEQ ID NO: 1217080 - DNA, 25 bp, Homo sapien
tcaactctgcccagtttcacatgga

SEQ ID NO: 1217081 - DNA, 25 bp, Homo sapien
ggaggtcatgtctatcttattcagt

SEQ ID NO: 1217082 - DNA, 25 bp, Homo sapien
gaaggaacaattgtcaggtccagga

SEQ ID NO: 1217083 - DNA, 25 bp, Homo sapien
caatgcatgtgtggaagtgatttga

SEQ ID NO: 1217084 - DNA, 25 bp, Homo sapien
tttggtctggccatgggatccagac

SEQ ID NO: 1217085 - DNA, 25 bp, Homo sapien
catcatcctgagaattaccttgcct

SEQ ID NO: 1217086 - DNA, 25 bp, Homo sapien
tatatttctccgcatttcgaaggtg

SEQ ID NO: 1217087 - DNA, 25 bp, Homo sapien
tcttcattgtcattcaccagtctgg

SEQ ID NO: 1217088 - DNA, 25 bp, Homo sapien
catatacttccttgaaacatggtca

SEQ ID NO: 1217089 - DNA, 25 bp, Homo sapien
gctacaagctggaaacaattcataa

SEQ ID NO: 1217090 - DNA, 25 bp, Homo sapien
gaatttcaaaaacttgctgagcaga

SEQ ID NO: 1217091 - DNA, 25 bp, Homo sapien
ggaaactaggcacatagagtggata

SEQ ID NO: 1217092 - DNA, 25 bp, Homo sapien
tcaaagtaatgactatcgggagtgg

SEQ ID NO: 1217093 - DNA, 25 bp, Homo sapien
cggtcagagggctccggcgtcatac

SEQ ID NO: 1217094 - DNA, 25 bp, Homo sapien
gtggctccgcaataccagttaaatg

SEQ ID NO: 1217095 - DNA, 25 bp, Homo sapien
ccggagcgagttgcagtaagcagaa

SEQ ID NO: 1217096 - DNA, 25 bp, Homo sapien
caccaagggtgggacaaacaagacg

SEQ ID NO: 1217097 - DNA, 25 bp, Homo sapien
gccgccgggactccgccgagtcgca

SEQ ID NO: 1217098 - DNA, 25 bp, Homo sapien
ttagaacaaggacgcgccgccggga

SEQ ID NO: 1217099 - DNA, 25 bp, Homo sapien
cgccgccgggactccgccgagtcgc

SEQ ID NO: 1217100 - DNA, 25 bp, Homo sapien
gcgcgccgggttagaacaaggacgc

SEQ ID NO: 1217101 - DNA, 25 bp, Homo sapien
ggccggcaggcacaacagcaccagc

SEQ ID NO: 1217102 - DNA, 25 bp, Homo sapien
acacggccggcaggcacaacagcac

SEQ ID NO: 1217103 - DNA, 25 bp, Homo sapien
gcacgctcggccgcgcgacggtcat

SEQ ID NO: 1217104 - DNA, 25 bp, Homo sapien
cgggcacgctcggccgcgcgacggt

SEQ ID NO: 1217105 - DNA, 25 bp, Homo sapien
gtctcagagaccgacttggacctcc

SEQ ID NO: 1217106 - DNA, 25 bp, Homo sapien
gccggcccctgtgcgtgtctcagag

SEQ ID NO: 1217107 - DNA, 25 bp, Homo sapien
cctgtgcgtgtctcagagaccgact

SEQ ID NO: 1217108 - DNA, 25 bp, Homo sapien
taaaggcacaggacggcgggaacca

SEQ ID NO: 1217109 - DNA, 25 bp, Homo sapien
catgcaagtttgcagcatcgtgtgc

SEQ ID NO: 1217110 - DNA, 25 bp, Homo sapien
tgaaagagatgacatgcaagtttgc

SEQ ID NO: 1217111 - DNA, 25 bp, Homo sapien
tgcagcatcgtgtgctccacacggc

SEQ ID NO: 1217112 - DNA, 25 bp, Homo sapien
gagatgacatgcaagtttgcagcat

SEQ ID NO: 1217113 - DNA, 25 bp, Homo sapien
ttgctgttttcaagacacaagcccc

SEQ ID NO: 1217114 - DNA, 25 bp, Homo sapien
gttgctgttttcaagacacaagccc

SEQ ID NO: 1217115 - DNA, 25 bp, Homo sapien
tgttttcaagacacaagcccccttg

SEQ ID NO: 1217116 - DNA, 25 bp, Homo sapien
ttcaagacacaagcccccttgaaat

SEQ ID NO: 1217117 - DNA, 25 bp, Homo sapien
ggcagatcactgagtccttctcgcc

SEQ ID NO: 1217118 - DNA, 25 bp, Homo sapien
tctgaccattgactgcccttaaggc

SEQ ID NO: 1217119 - DNA, 25 bp, Homo sapien
cagtatcctcgggaaaacttgtacg

SEQ ID NO: 1217120 - DNA, 25 bp, Homo sapien
ttctcgccaggaattttcacaaagc

SEQ ID NO: 1217121 - DNA, 25 bp, Homo sapien
gaaatcaaagggcacataaggtgtg

SEQ ID NO: 1217122 - DNA, 25 bp, Homo sapien
tactaggtatcagtatcaaacacgg

SEQ ID NO: 1217123 - DNA, 25 bp, Homo sapien
tatatctcaaagctaatacagggct

SEQ ID NO: 1217124 - DNA, 25 bp, Homo sapien
gttcaaagtcaggttatcgggtctc

SEQ ID NO: 1217125 - DNA, 25 bp, Homo sapien
gaagtagagttggtacacacatatc

SEQ ID NO: 1217126 - DNA, 25 bp, Homo sapien
tacaggaatagggtatttccagacc

SEQ ID NO: 1217127 - DNA, 25 bp, Homo sapien
tacacagcaccatacagtacaggaa

SEQ ID NO: 1217128 - DNA, 25 bp, Homo sapien
tattaatatcaccatggcacttgca

SEQ ID NO: 1217129 - DNA, 25 bp, Homo sapien
tcttctgtaacctggacggcactca

SEQ ID NO: 1217130 - DNA, 25 bp, Homo sapien
aatttagccttgttggcacctcgca

SEQ ID NO: 1217131 - DNA, 25 bp, Homo sapien
tacaaaattcgactgctgtggacca

SEQ ID NO: 1217132 - DNA, 25 bp, Homo sapien
taaggctgtttgagggatgcagaat

SEQ ID NO: 1217133 - DNA, 25 bp, Homo sapien
ttgaaaaagcaacgaatttagaata

SEQ ID NO: 1217134 - DNA, 25 bp, Homo sapien
tgacactcatggtcctatcaagaaa

SEQ ID NO: 1217135 - DNA, 25 bp, Homo sapien
tgaataagtattcctaccacataaa

SEQ ID NO: 1217136 - DNA, 25 bp, Homo sapien
gtaacctcaaactaattaaatgtga

SEQ ID NO: 1217137 - DNA, 25 bp, Homo sapien
tatgccacctggtacatcaatctga

SEQ ID NO: 1217138 - DNA, 25 bp, Homo sapien
cctgtgttacatgagaaggagatgg

SEQ ID NO: 1217139 - DNA, 25 bp, Homo sapien
tgaccatttcgtatttctcccggat

SEQ ID NO: 1217140 - DNA, 25 bp, Homo sapien
aaggagatggttgcaccaaataata

SEQ ID NO: 1217141 - DNA, 25 bp, Homo sapien
gagctgcctgaaataagacaaaaac

SEQ ID NO: 1217142 - DNA, 25 bp, Homo sapien
gcaacgggtcactccactggacaga

SEQ ID NO: 1217143 - DNA, 25 bp, Homo sapien
tctgcactctggcaacgggtcactc

SEQ ID NO: 1217144 - DNA, 25 bp, Homo sapien
actagaagtcgagccaaataatttg

SEQ ID NO: 1217145 - DNA, 25 bp, Homo sapien
tctcaaaaagaagggcacatggtgg

SEQ ID NO: 1217146 - DNA, 25 bp, Homo sapien
tgaccgtacacgttgcctaccagag

SEQ ID NO: 1217147 - DNA, 25 bp, Homo sapien
taccagagtgtcaatcgataaatgc

SEQ ID NO: 1217148 - DNA, 25 bp, Homo sapien
tctcttactggacaacgaaaatggg

SEQ ID NO: 1217149 - DNA, 25 bp, Homo sapien
cccgaagtagccagcctgggaatct

SEQ ID NO: 1217150 - DNA, 25 bp, Homo sapien
ttctgagtgcctaacacacgccagg

SEQ ID NO: 1217151 - DNA, 25 bp, Homo sapien
tctgatgggctagggaactaactct

SEQ ID NO: 1217152 - DNA, 25 bp, Homo sapien
taacttagagtgtgcagagacacac

SEQ ID NO: 1217153 - DNA, 25 bp, Homo sapien
aatagagtgctctccaatcatggtg

SEQ ID NO: 1217154 - DNA, 25 bp, Homo sapien
tattacatgcatacgttacagactg

SEQ ID NO: 1217155 - DNA, 25 bp, Homo sapien
tacagactgtctatatccataatgg

SEQ ID NO: 1217156 - DNA, 25 bp, Homo sapien
tccataatggtcacgttccccttga

SEQ ID NO: 1217157 - DNA, 25 bp, Homo sapien
cctttagtttctcattctgtgcatg

SEQ ID NO: 1217158 - DNA, 25 bp, Homo sapien
gcatgtttggtctgctagtgcaaag

SEQ ID NO: 1217159 - DNA, 25 bp, Homo sapien
tcttgaatctgttggctaatgtact

SEQ ID NO: 1217160 - DNA, 25 bp, Homo sapien
tttgctgagcagtaatcagttatac

SEQ ID NO: 1217161 - DNA, 25 bp, Homo sapien
tctgagaagttggtgagacttctgt

SEQ ID NO: 1217162 - DNA, 25 bp, Homo sapien
ctgaactgttggtgggaccttggaa

SEQ ID NO: 1217163 - DNA, 25 bp, Homo sapien
agacttctgtagttggaacatttac

SEQ ID NO: 1217164 - DNA, 25 bp, Homo sapien
catttactgtggtaggtttctgaac

SEQ ID NO: 1217165 - DNA, 25 bp, Homo sapien
gttcttgtagctgaaacattttctg

SEQ ID NO: 1217166 - DNA, 25 bp, Homo sapien
tttttgaagaactgatggagtctct

SEQ ID NO: 1217167 - DNA, 25 bp, Homo sapien
ctgtggtgtgtttttgaagaactga

SEQ ID NO: 1217168 - DNA, 25 bp, Homo sapien
gctgaaacattttctgtggtgtgtt

SEQ ID NO: 1217169 - DNA, 25 bp, Homo sapien
gtgtgactattgtagctgggacatt

SEQ ID NO: 1217170 - DNA, 25 bp, Homo sapien
tggtgtgactattgtagctgggaca

SEQ ID NO: 1217171 - DNA, 25 bp, Homo sapien
tgttggtgtgactattgtagctggg

SEQ ID NO: 1217172 - DNA, 25 bp, Homo sapien
ggtgttggtgtgactattgtagctg

SEQ ID NO: 1217173 - DNA, 25 bp, Homo sapien
gttcctgtagctgaaacatttacta

SEQ ID NO: 1217174 - DNA, 25 bp, Homo sapien
catttactatggtgtgtctttgagg

SEQ ID NO: 1217175 - DNA, 25 bp, Homo sapien
tgaggtgttgatgagactcctgtag

SEQ ID NO: 1217176 - DNA, 25 bp, Homo sapien
gaagagttggtagggttcctgtagc

SEQ ID NO: 1217177 - DNA, 25 bp, Homo sapien
atttggtggctgaatcatttgctct

SEQ ID NO: 1217178 - DNA, 25 bp, Homo sapien
tggggatttggtggctgaatcattt

SEQ ID NO: 1217179 - DNA, 25 bp, Homo sapien
gatttggtggctgaatcatttgctc

SEQ ID NO: 1217180 - DNA, 25 bp, Homo sapien
gggatttggtggctgaatcatttgc

SEQ ID NO: 1217181 - DNA, 25 bp, Homo sapien
tttgatatgaaagatgtctgagctg

SEQ ID NO: 1217182 - DNA, 25 bp, Homo sapien
tagggtttttgatatgaaagatgtc

SEQ ID NO: 1217183 - DNA, 25 bp, Homo sapien
tgtagatagggtttttgatatgaaa

SEQ ID NO: 1217184 - DNA, 25 bp, Homo sapien
ggtttttgatatgaaagatgtctga

SEQ ID NO: 1217185 - DNA, 25 bp, Homo sapien
ctgctgaaggactctgcgtaaatgc

SEQ ID NO: 1217186 - DNA, 25 bp, Homo sapien
tttttgggctgttagtgtggcctgt

SEQ ID NO: 1217187 - DNA, 25 bp, Homo sapien
ttagtgtggcctgtgtagcagaagc

SEQ ID NO: 1217188 - DNA, 25 bp, Homo sapien
taaatgcaacttttgctgtggtgaa

SEQ ID NO: 1217189 - DNA, 25 bp, Homo sapien
tactcttgagaccattagtcactgg

SEQ ID NO: 1217190 - DNA, 25 bp, Homo sapien
cactggggaatgtacattagtggac

SEQ ID NO: 1217191 - DNA, 25 bp, Homo sapien
tgtaatatgagcagaagggaatctt

SEQ ID NO: 1217192 - DNA, 25 bp, Homo sapien
tttgtgtactcttgagaccattagt

SEQ ID NO: 1217193 - DNA, 25 bp, Homo sapien
ctggaaacaggtgtactccgtgttg

SEQ ID NO: 1217194 - DNA, 25 bp, Homo sapien
tcagtaaacctgaacagtgtcaact

SEQ ID NO: 1217195 - DNA, 25 bp, Homo sapien
tagtacaatccaagtccgcttccaa

SEQ ID NO: 1217196 - DNA, 25 bp, Homo sapien
aaaccctggctacaataaattagag

SEQ ID NO: 1217197 - DNA, 25 bp, Homo sapien
catatttccaccatagcacattaga

SEQ ID NO: 1217198 - DNA, 25 bp, Homo sapien
tgaataccccaaataccaacttgag

SEQ ID NO: 1217199 - DNA, 25 bp, Homo sapien
gaatcacacagtccatgcatgtaac

SEQ ID NO: 1217200 - DNA, 25 bp, Homo sapien
gagactttggccgatgggtataaac

SEQ ID NO: 1217201 - DNA, 25 bp, Homo sapien
gagaagaatgttagataccagaggc

SEQ ID NO: 1217202 - DNA, 25 bp, Homo sapien
ctacgatcacaccaccgcataccag

SEQ ID NO: 1217203 - DNA, 25 bp, Homo sapien
ctcacacttataatcgcaacgtttt

SEQ ID NO: 1217204 - DNA, 25 bp, Homo sapien
aagtgtccatcaatgtacaaatgga

SEQ ID NO: 1217205 - DNA, 25 bp, Homo sapien
cttataatcgcaacgttttgggagg

SEQ ID NO: 1217206 - DNA, 25 bp, Homo sapien
cggaaaaatcgcttacggccaggag

SEQ ID NO: 1217207 - DNA, 25 bp, Homo sapien
gtcacttataaaggaaacccatcag

SEQ ID NO: 1217208 - DNA, 25 bp, Homo sapien
gaaagctgatggaattaatcaccat

SEQ ID NO: 1217209 - DNA, 25 bp, Homo sapien
caaactatactcaaactgtcaaaag

SEQ ID NO: 1217210 - DNA, 25 bp, Homo sapien
aggagagaacgggatgatatactca

SEQ ID NO: 1217211 - DNA, 25 bp, Homo sapien
taagacagtatcatggggagtggct

SEQ ID NO: 1217212 - DNA, 25 bp, Homo sapien
ttcctaagacagtatcatggggagt

SEQ ID NO: 1217213 - DNA, 25 bp, Homo sapien
agacagtatcatggggagtggcttc

SEQ ID NO: 1217214 - DNA, 25 bp, Homo sapien
cctaagacagtatcatggggagtgg

SEQ ID NO: 1217215 - DNA, 25 bp, Homo sapien
ataacacggtgaaacaccgtctcta

SEQ ID NO: 1217216 - DNA, 25 bp, Homo sapien
gcaggcagatctcgaggccaggaga

SEQ ID NO: 1217217 - DNA, 25 bp, Homo sapien
aagaccatcctggataacacggtga

SEQ ID NO: 1217218 - DNA, 25 bp, Homo sapien
aggcagatctcgaggccaggagatc

SEQ ID NO: 1217219 - DNA, 25 bp, Homo sapien
caatgttagacacataatcaaggca

SEQ ID NO: 1217220 - DNA, 25 bp, Homo sapien
tactctaagattgaccacatgctca

SEQ ID NO: 1217221 - DNA, 25 bp, Homo sapien
taacattacacccaagaacaacagg

SEQ ID NO: 1217222 - DNA, 25 bp, Homo sapien
tggaaataaccacacaatatagtgg

SEQ ID NO: 1217223 - DNA, 25 bp, Homo sapien
tttttaacacaagctggaatgccga

SEQ ID NO: 1217224 - DNA, 25 bp, Homo sapien
cattgagtgccattgagcaggtgag

SEQ ID NO: 1217225 - DNA, 25 bp, Homo sapien
cacttatacaaagccaacggaagaa

SEQ ID NO: 1217226 - DNA, 25 bp, Homo sapien
ttgccatatgtccagtttaagaagg

SEQ ID NO: 1217227 - DNA, 25 bp, Homo sapien
gggttgtattgtctcttggtctgtc

SEQ ID NO: 1217228 - DNA, 25 bp, Homo sapien
tcttggtctgtcactaggatgagca

SEQ ID NO: 1217229 - DNA, 25 bp, Homo sapien
gatgagcatctttctatcttttaaa

SEQ ID NO: 1217230 - DNA, 25 bp, Homo sapien
gtccaatttgggttgtattgtctct

SEQ ID NO: 1217231 - DNA, 25 bp, Homo sapien
ctaactgtgagtttttgctaggctc

SEQ ID NO: 1217232 - DNA, 25 bp, Homo sapien
gagggtaaaaaggagataggtcaca

SEQ ID NO: 1217233 - DNA, 25 bp, Homo sapien
gaaaaacggacaggcattagggcag

SEQ ID NO: 1217234 - DNA, 25 bp, Homo sapien
gggcagcttagaaataactcaagtt

SEQ ID NO: 1217235 - DNA, 25 bp, Homo sapien
cagtcacacttaaatggtcaaacac

SEQ ID NO: 1217236 - DNA, 25 bp, Homo sapien
cttatttctgaggtaccaccagtca

SEQ ID NO: 1217237 - DNA, 25 bp, Homo sapien
tatttctgaggtaccaccagtcaca

SEQ ID NO: 1217238 - DNA, 25 bp, Homo sapien
aacattgagtactttgttgctctca

SEQ ID NO: 1217239 - DNA, 25 bp, Homo sapien
tcagcaagcccatggttactagcgt

SEQ ID NO: 1217240 - DNA, 25 bp, Homo sapien
cctgtcaacgtgaaacacgtgtgcc

SEQ ID NO: 1217241 - DNA, 25 bp, Homo sapien
tcccaagcaaacctgtcaacgtgaa

SEQ ID NO: 1217242 - DNA, 25 bp, Homo sapien
ccatggttactagcgtcccaagcaa

SEQ ID NO: 1217243 - DNA, 25 bp, Homo sapien
ggaacagtctgtatacttgtgtgta

SEQ ID NO: 1217244 - DNA, 25 bp, Homo sapien
gaaactaggaacagtctgtatactt

SEQ ID NO: 1217245 - DNA, 25 bp, Homo sapien
aagaaactaggaacagtctgtatac

SEQ ID NO: 1217246 - DNA, 25 bp, Homo sapien
actaggaacagtctgtatacttgtg

SEQ ID NO: 1217247 - DNA, 25 bp, Homo sapien
gcatttattttatccaatatgcaga

SEQ ID NO: 1217248 - DNA, 25 bp, Homo sapien
ttattttatccaatatgcagataag

SEQ ID NO: 1217249 - DNA, 25 bp, Homo sapien
tattttatccaatatgcagataagt

SEQ ID NO: 1217250 - DNA, 25 bp, Homo sapien
atttattttatccaatatgcagata

SEQ ID NO: 1217251 - DNA, 25 bp, Homo sapien
gactatggacatctcgattcagaaa

SEQ ID NO: 1217252 - DNA, 25 bp, Homo sapien
ctaagaatgtgattccaggactgcc

SEQ ID NO: 1217253 - DNA, 25 bp, Homo sapien
ttttgccaacccgaaggaaagatga

SEQ ID NO: 1217254 - DNA, 25 bp, Homo sapien
tcaaagaagacacctttcacaggct

SEQ ID NO: 1217255 - DNA, 25 bp, Homo sapien
tctaataggaaaggatatgacatgc

SEQ ID NO: 1217256 - DNA, 25 bp, Homo sapien
ccaaggcatggcattctgaactgct

SEQ ID NO: 1217257 - DNA, 25 bp, Homo sapien
gccttcaggtaaatcagtaacaagt

SEQ ID NO: 1217258 - DNA, 25 bp, Homo sapien
tattcacactaggacaaccaaggca

SEQ ID NO: 1217259 - DNA, 25 bp, Homo sapien
gagcaagtcctacatatgagcattt

SEQ ID NO: 1217260 - DNA, 25 bp, Homo sapien
caataggaagtctggtcacatgaaa

SEQ ID NO: 1217261 - DNA, 25 bp, Homo sapien
gacaaagcacctacttcaaattgcc

SEQ ID NO: 1217262 - DNA, 25 bp, Homo sapien
tttctagatgtgagactggtggatc

SEQ ID NO: 1217263 - DNA, 25 bp, Homo sapien
attcttgtctttagccctttgtttg

SEQ ID NO: 1217264 - DNA, 25 bp, Homo sapien
tttgagaggccgaacacttgaggtc

SEQ ID NO: 1217265 - DNA, 25 bp, Homo sapien
caaaatactgtgttccgaggttaat

SEQ ID NO: 1217266 - DNA, 25 bp, Homo sapien
cacagctccctcttaactgtggtcg

SEQ ID NO: 1217267 - DNA, 25 bp, Homo sapien
tgagcatcgttcagtccattgaggg

SEQ ID NO: 1217268 - DNA, 25 bp, Homo sapien
tgtgataccacaagatatttccagg

SEQ ID NO: 1217269 - DNA, 25 bp, Homo sapien
taagccctagattgggagttacacc

SEQ ID NO: 1217270 - DNA, 25 bp, Homo sapien
tggattgaataaagaagaccagccc

SEQ ID NO: 1217271 - DNA, 25 bp, Homo sapien
tatactcaatactgtgtgcctctag

SEQ ID NO: 1217272 - DNA, 25 bp, Homo sapien
tgtaaaacaaaaataggcaggtctg

SEQ ID NO: 1217273 - DNA, 25 bp, Homo sapien
gctactttcagtaagtgtggtctgc

SEQ ID NO: 1217274 - DNA, 25 bp, Homo sapien
ggtctgaagtacaaactgtcagata

SEQ ID NO: 1217275 - DNA, 25 bp, Homo sapien
gaagtactcactgtcgcctattaat

SEQ ID NO: 1217276 - DNA, 25 bp, Homo sapien
cttcctatgatgaggtgcacacatt

SEQ ID NO: 1217277 - DNA, 25 bp, Homo sapien
aaatgcaatgccatgagagagagcc

SEQ ID NO: 1217278 - DNA, 25 bp, Homo sapien
gcacacattgtggttaggaattcca

SEQ ID NO: 1217279 - DNA, 25 bp, Homo sapien
tataaagcaaaacgggtacatgacc

SEQ ID NO: 1217280 - DNA, 25 bp, Homo sapien
cccctggccaattgactgttttagt

SEQ ID NO: 1217281 - DNA, 25 bp, Homo sapien
gaccaacttttataccaggcatctg

SEQ ID NO: 1217282 - DNA, 25 bp, Homo sapien
tgatacacagcccaacttagggaat

SEQ ID NO: 1217283 - DNA, 25 bp, Homo sapien
cattggccaagcaggtgagatgaat

SEQ ID NO: 1217284 - DNA, 25 bp, Homo sapien
ttattggctctaattggattcaggc

SEQ ID NO: 1217285 - DNA, 25 bp, Homo sapien
gctgcattgcaggtagaagggtaca

SEQ ID NO: 1217286 - DNA, 25 bp, Homo sapien
tgtattccaactatgcattcctgaa

SEQ ID NO: 1217287 - DNA, 25 bp, Homo sapien
ggcacacgtgctagttctgagcgca

SEQ ID NO: 1217288 - DNA, 25 bp, Homo sapien
gagaggcgggcccttaaatagtgtc

SEQ ID NO: 1217289 - DNA, 25 bp, Homo sapien
tgagcgcacacctgcaggcggcctg

SEQ ID NO: 1217290 - DNA, 25 bp, Homo sapien
gatgcgttccgagacccgcgagcgt

SEQ ID NO: 1217291 - DNA, 25 bp, Homo sapien
cgaggacccccggtgcgacgagagc

SEQ ID NO: 1217292 - DNA, 25 bp, Homo sapien
agagccaagaaaaccccgagcaggc

SEQ ID NO: 1217293 - DNA, 25 bp, Homo sapien
ccccggtgcgacgagagccaagaaa

SEQ ID NO: 1217294 - DNA, 25 bp, Homo sapien
gagccaagaaaaccccgagcaggcc

SEQ ID NO: 1217295 - DNA, 25 bp, Homo sapien
ctccgtgctccccctcccagctcac

SEQ ID NO: 1217296 - DNA, 25 bp, Homo sapien
gccgaccagacagcgcccctctgtg

SEQ ID NO: 1217297 - DNA, 25 bp, Homo sapien
ctgtggcgcagcctccaattctgga

SEQ ID NO: 1217298 - DNA, 25 bp, Homo sapien
ggagcccggcaggagaccgcgagca

SEQ ID NO: 1217299 - DNA, 25 bp, Homo sapien
ccacaccgggccgaccagacagcgc

SEQ ID NO: 1217300 - DNA, 25 bp, Homo sapien
ctgaccgccggccagagagcgatga

SEQ ID NO: 1217301 - DNA, 25 bp, Homo sapien
taggtttcccgtggcgagcggtagc

SEQ ID NO: 1217302 - DNA, 25 bp, Homo sapien
gtggcgagcggtagcgctgaccgcc

SEQ ID NO: 1217303 - DNA, 25 bp, Homo sapien
gcggtagcgctgaccgccggccaga

SEQ ID NO: 1217304 - DNA, 25 bp, Homo sapien
aagagcgcggttcgggtgtacagaa

SEQ ID NO: 1217305 - DNA, 25 bp, Homo sapien
tctgccgcttttgctgggcaagagc

SEQ ID NO: 1217306 - DNA, 25 bp, Homo sapien
cttttgctgggcaagagcgcggttc

SEQ ID NO: 1217307 - DNA, 25 bp, Homo sapien
agcgcggttcgggtgtacagaaaca

SEQ ID NO: 1217308 - DNA, 25 bp, Homo sapien
tatcaaatttataatctcctttttc

SEQ ID NO: 1217309 - DNA, 25 bp, Homo sapien
ttaaatatcaaatttataatctcct

SEQ ID NO: 1217310 - DNA, 25 bp, Homo sapien
tcaaatttataatctcctttttcaa

SEQ ID NO: 1217311 - DNA, 25 bp, Homo sapien
atttataatctcctttttcaaacag

SEQ ID NO: 1217312 - DNA, 25 bp, Homo sapien
tacacttagggatatagctggaaaa

SEQ ID NO: 1217313 - DNA, 25 bp, Homo sapien
caaactttcccaggatagcataaga

SEQ ID NO: 1217314 - DNA, 25 bp, Homo sapien
agtagagtaatatgccaccaaagag

SEQ ID NO: 1217315 - DNA, 25 bp, Homo sapien
taaaccgttaatgcctagagaggag

SEQ ID NO: 1217316 - DNA, 25 bp, Homo sapien
agaactgctgagcatctgaccactt

SEQ ID NO: 1217317 - DNA, 25 bp, Homo sapien
ctttacagaactgctgagcatctga

SEQ ID NO: 1217318 - DNA, 25 bp, Homo sapien
acagaactgctgagcatctgaccac

SEQ ID NO: 1217319 - DNA, 25 bp, Homo sapien
ttacagaactgctgagcatctgacc

SEQ ID NO: 1217320 - DNA, 25 bp, Homo sapien
caggttacaatattgtctgagataa

SEQ ID NO: 1217321 - DNA, 25 bp, Homo sapien
aaaggcatgtcattatcccaggtta

SEQ ID NO: 1217322 - DNA, 25 bp, Homo sapien
gtcattatcccaggttacaatattg

SEQ ID NO: 1217323 - DNA, 25 bp, Homo sapien
agatgagtcaccaaagagtagatat

SEQ ID NO: 1217324 - DNA, 25 bp, Homo sapien
tcatcttgaccaaacaataataatg

SEQ ID NO: 1217325 - DNA, 25 bp, Homo sapien
ttttcttgatcctcagcaaacagat

SEQ ID NO: 1217326 - DNA, 25 bp, Homo sapien
tccaaaagttctgagtctaatcaat

SEQ ID NO: 1217327 - DNA, 25 bp, Homo sapien
tagtggcatgatagttacatgtggg

SEQ ID NO: 1217328 - DNA, 25 bp, Homo sapien
aaaaggaacttggtaggcatactga

SEQ ID NO: 1217329 - DNA, 25 bp, Homo sapien
tcaaatgtaggtaaaatatccaaat

SEQ ID NO: 1217330 - DNA, 25 bp, Homo sapien
tcagaaacagacttagaaatatgta

SEQ ID NO: 1217331 - DNA, 25 bp, Homo sapien
tgcttactcccaaactcctaaattc

SEQ ID NO: 1217332 - DNA, 25 bp, Homo sapien
cacaggttggtagtcgtgtcggccc

SEQ ID NO: 1217333 - DNA, 25 bp, Homo sapien
ttatcacggtaccaacagcaatggg

SEQ ID NO: 1217334 - DNA, 25 bp, Homo sapien
catgtctgtagggtgtagagcctct

SEQ ID NO: 1217335 - DNA, 25 bp, Homo sapien
ccaatgaggcggaaggtacctgaac

SEQ ID NO: 1217336 - DNA, 25 bp, Homo sapien
tttcaagggctatcctggtagatat

SEQ ID NO: 1217337 - DNA, 25 bp, Homo sapien
tagtttattgggatcctatgcatga

SEQ ID NO: 1217338 - DNA, 25 bp, Homo sapien
tctgttccaaaagtagcatgctatc

SEQ ID NO: 1217339 - DNA, 25 bp, Homo sapien
gcgacatgtatacgatatccttcca

SEQ ID NO: 1217340 - DNA, 25 bp, Homo sapien
caggaaaaaaaagccgtcagatgat

SEQ ID NO: 1217341 - DNA, 25 bp, Homo sapien
agaatcaagggggtccaatcttttg

SEQ ID NO: 1217342 - DNA, 25 bp, Homo sapien
aaaaagccgtcagatgatgcatcct

SEQ ID NO: 1217343 - DNA, 25 bp, Homo sapien
tctagaatcaagggggtccaatctt

SEQ ID NO: 1217344 - DNA, 25 bp, Homo sapien
ttttctccaacaagcaagtaaccag

SEQ ID NO: 1217345 - DNA, 25 bp, Homo sapien
gctgtaagtcacagacaatcctgga

SEQ ID NO: 1217346 - DNA, 25 bp, Homo sapien
ttgtggatcataggaagtgctggac

SEQ ID NO: 1217347 - DNA, 25 bp, Homo sapien
tcctggagcaatggagccaacattc

SEQ ID NO: 1217348 - DNA, 25 bp, Homo sapien
agtttgcagttacaccaacccggag

SEQ ID NO: 1217349 - DNA, 25 bp, Homo sapien
tgggaaatcgtcctagagatttaca

SEQ ID NO: 1217350 - DNA, 25 bp, Homo sapien
gagaattggaggctcctttaccttc

SEQ ID NO: 1217351 - DNA, 25 bp, Homo sapien
cttcccattgggaaatcgtcctaga

SEQ ID NO: 1217352 - DNA, 25 bp, Homo sapien
aattacacaccgactagaaggtggg

SEQ ID NO: 1217353 - DNA, 25 bp, Homo sapien
caattacacaccgactagaaggtgg

SEQ ID NO: 1217354 - DNA, 25 bp, Homo sapien
actggcattttggtccaagcaactc

SEQ ID NO: 1217355 - DNA, 25 bp, Homo sapien
gcaattacacaccgactagaaggtg

SEQ ID NO: 1217356 - DNA, 25 bp, Homo sapien
tataatgaatcagtcaaggcagcta

SEQ ID NO: 1217357 - DNA, 25 bp, Homo sapien
gcttgataccactatcctaggacag

SEQ ID NO: 1217358 - DNA, 25 bp, Homo sapien
tctgcatagctttcagaggagggaa

SEQ ID NO: 1217359 - DNA, 25 bp, Homo sapien
gtgctgtcagaccatagttgcctag

SEQ ID NO: 1217360 - DNA, 25 bp, Homo sapien
caagatcataggtgtattgaaaaca

SEQ ID NO: 1217361 - DNA, 25 bp, Homo sapien
ctaggggaattgcagaaagaaatga

SEQ ID NO: 1217362 - DNA, 25 bp, Homo sapien
tgacaagatcataggtgtattgaaa

SEQ ID NO: 1217363 - DNA, 25 bp, Homo sapien
aaagaaatgacaagatcataggtgt

SEQ ID NO: 1217364 - DNA, 25 bp, Homo sapien
taggtatatcgatctttctgcccag

SEQ ID NO: 1217365 - DNA, 25 bp, Homo sapien
tcaactgtacaacggagagtgctct

SEQ ID NO: 1217366 - DNA, 25 bp, Homo sapien
ggatgtggacactgaaccgcagaag

SEQ ID NO: 1217367 - DNA, 25 bp, Homo sapien
taccattcggcctcttaggatctgg

SEQ ID NO: 1217368 - DNA, 25 bp, Homo sapien
caaagcggaccatgtgtctatcttc

SEQ ID NO: 1217369 - DNA, 25 bp, Homo sapien
cccctcagaggtacactgtatggat

SEQ ID NO: 1217370 - DNA, 25 bp, Homo sapien
agcacatagccagggttacagctat

SEQ ID NO: 1217371 - DNA, 25 bp, Homo sapien
tatagatgttccagggtcaaagcgg

SEQ ID NO: 1217372 - DNA, 25 bp, Homo sapien
gaagagttgacatctggtctaacaa

SEQ ID NO: 1217373 - DNA, 25 bp, Homo sapien
tcaagagttgccttcctgtagcttc

SEQ ID NO: 1217374 - DNA, 25 bp, Homo sapien
tggtctaacaaattggtgctggggt

SEQ ID NO: 1217375 - DNA, 25 bp, Homo sapien
cttcaccacaagaagagttgacatc

SEQ ID NO: 1217376 - DNA, 25 bp, Homo sapien
caaagacgaatctccataaaccaag

SEQ ID NO: 1217377 - DNA, 25 bp, Homo sapien
tccataaaccaaggaattgtgcctt

SEQ ID NO: 1217378 - DNA, 25 bp, Homo sapien
aaggaattgtgccttgacactcctg

SEQ ID NO: 1217379 - DNA, 25 bp, Homo sapien
ttgacactcctgataaacactccca

SEQ ID NO: 1217380 - DNA, 25 bp, Homo sapien
tatggacatgtgagcactggacagc

SEQ ID NO: 1217381 - DNA, 25 bp, Homo sapien
gcttgtacaacggatggtgctctct

SEQ ID NO: 1217382 - DNA, 25 bp, Homo sapien
ttctaaggaactcccggtgtgtgcc

SEQ ID NO: 1217383 - DNA, 25 bp, Homo sapien
tacatgtgtaagtgaccgtggttcc

SEQ ID NO: 1217384 - DNA, 25 bp, Homo sapien
ctgtatgacgaccatggtggagccc

SEQ ID NO: 1217385 - DNA, 25 bp, Homo sapien
agaaggactccaatttcctgaaggc

SEQ ID NO: 1217386 - DNA, 25 bp, Homo sapien
gaatggatttgtttcccacaagcaa

SEQ ID NO: 1217387 - DNA, 25 bp, Homo sapien
gtgtagtctacagtcatcccagaga

SEQ ID NO: 1217388 - DNA, 25 bp, Homo sapien
cacaagcaaatagccagggtcacaa

SEQ ID NO: 1217389 - DNA, 25 bp, Homo sapien
gacgtattaactagctccacacgtg

SEQ ID NO: 1217390 - DNA, 25 bp, Homo sapien
ccatcttggcaggacgtattaacta

SEQ ID NO: 1217391 - DNA, 25 bp, Homo sapien
tagctccacacgtgaaccagctgga

SEQ ID NO: 1217392 - DNA, 25 bp, Homo sapien
tccacacgtgaaccagctggaagtt

SEQ ID NO: 1217393 - DNA, 25 bp, Homo sapien
catctgataagcatgtccagtcaac

SEQ ID NO: 1217394 - DNA, 25 bp, Homo sapien
gataagcatgtccagtcaactggta

SEQ ID NO: 1217395 - DNA, 25 bp, Homo sapien
tctgataagcatgtccagtcaactg

SEQ ID NO: 1217396 - DNA, 25 bp, Homo sapien
acacatctgataagcatgtccagtc

SEQ ID NO: 1217397 - DNA, 25 bp, Homo sapien
ttagaatcacttctgcactgcaatt

SEQ ID NO: 1217398 - DNA, 25 bp, Homo sapien
ggaaggcccgctccaagatccatgt

SEQ ID NO: 1217399 - DNA, 25 bp, Homo sapien
tctctcccaggagatagaatccttg

SEQ ID NO: 1217400 - DNA, 25 bp, Homo sapien
cacaggaggagatcgtaagcactgt

SEQ ID NO: 1217401 - DNA, 25 bp, Homo sapien
cacgcgactaccattcatgatgaag

SEQ ID NO: 1217402 - DNA, 25 bp, Homo sapien
tttgatacaagttggcacacctggc

SEQ ID NO: 1217403 - DNA, 25 bp, Homo sapien
tattgagcttgtacccatgtttgac

SEQ ID NO: 1217404 - DNA, 25 bp, Homo sapien
tcagtatgacacctaatcacgcgac

SEQ ID NO: 1217405 - DNA, 25 bp, Homo sapien
ccaccagcaggtagccttggtcaca

SEQ ID NO: 1217406 - DNA, 25 bp, Homo sapien
gttggctccaggttccctcatgtgt

SEQ ID NO: 1217407 - DNA, 25 bp, Homo sapien
gctgtacaggattgacattccagga

SEQ ID NO: 1217408 - DNA, 25 bp, Homo sapien
ttccaggagaaaatcgagctatgtt

SEQ ID NO: 1217409 - DNA, 25 bp, Homo sapien
cactctcagtaaggaaagctgcact

SEQ ID NO: 1217410 - DNA, 25 bp, Homo sapien
tggccttttaccaagaaagcagaaa

SEQ ID NO: 1217411 - DNA, 25 bp, Homo sapien
tctaattcttcatacatgtgcgtgc

SEQ ID NO: 1217412 - DNA, 25 bp, Homo sapien
tcagtttctatccaaacagtgatgg

SEQ ID NO: 1217413 - DNA, 25 bp, Homo sapien
tactgatacattttccttggttcca

SEQ ID NO: 1217414 - DNA, 25 bp, Homo sapien
gagttacaacagctccatactgata

SEQ ID NO: 1217415 - DNA, 25 bp, Homo sapien
tctgcaaaccgccaggggagggttc

SEQ ID NO: 1217416 - DNA, 25 bp, Homo sapien
ggtgatccgattggcactggctctg

SEQ ID NO: 1217417 - DNA, 25 bp, Homo sapien
aagcggcggtgaagcccttggtact

SEQ ID NO: 1217418 - DNA, 25 bp, Homo sapien
agcggcggtgaagcccttggtactt

SEQ ID NO: 1217419 - DNA, 25 bp, Homo sapien
gcggcggtgaagcccttggtactta

SEQ ID NO: 1217420 - DNA, 25 bp, Homo sapien
gtgcacacctccatgcctggttatt

SEQ ID NO: 1217421 - DNA, 25 bp, Homo sapien
ggtgcacacctccatgcctggttat

SEQ ID NO: 1217422 - DNA, 25 bp, Homo sapien
gcacacctccatgcctggttattat

SEQ ID NO: 1217423 - DNA, 25 bp, Homo sapien
cacctccatgcctggttattattat

SEQ ID NO: 1217424 - DNA, 25 bp, Homo sapien
tatgtgactcatacttaactcttct

SEQ ID NO: 1217425 - DNA, 25 bp, Homo sapien
tgtgactcatacttaactcttcttg

SEQ ID NO: 1217426 - DNA, 25 bp, Homo sapien
aatgttatgtgactcatacttaact

SEQ ID NO: 1217427 - DNA, 25 bp, Homo sapien
gtggtggggaaaatgttatgtgact

SEQ ID NO: 1217428 - DNA, 25 bp, Homo sapien
gccagaagacgatcacctacattgt

SEQ ID NO: 1217429 - DNA, 25 bp, Homo sapien
tacattgttctgactgattgcaggg

SEQ ID NO: 1217430 - DNA, 25 bp, Homo sapien
gcaagtatcaaatgccagaagacga

SEQ ID NO: 1217431 - DNA, 25 bp, Homo sapien
acctacattgttctgactgattgca

SEQ ID NO: 1217432 - DNA, 25 bp, Homo sapien
tctgtgttttgatatcacgtataag

SEQ ID NO: 1217433 - DNA, 25 bp, Homo sapien
atgacaatcaagaaggtaagaagta

SEQ ID NO: 1217434 - DNA, 25 bp, Homo sapien
gatatcacgtataaggtaatgacaa

SEQ ID NO: 1217435 - DNA, 25 bp, Homo sapien
gacaatcaagaaggtaagaagtatc

SEQ ID NO: 1217436 - DNA, 25 bp, Homo sapien
caagaagccgaaaccacttgtgcat

SEQ ID NO: 1217437 - DNA, 25 bp, Homo sapien
tatagcacgagatacttcatttagt

SEQ ID NO: 1217438 - DNA, 25 bp, Homo sapien
gtgtttgatatctcttaagtcctac

SEQ ID NO: 1217439 - DNA, 25 bp, Homo sapien
ctgtgtttagtttcagacaagaagc

SEQ ID NO: 1217440 - DNA, 25 bp, Homo sapien
aatcacctataggaacaaacagaag

SEQ ID NO: 1217441 - DNA, 25 bp, Homo sapien
aaaggtttagccagaggtgctactc

SEQ ID NO: 1217442 - DNA, 25 bp, Homo sapien
ggttgagaaacacgacatatcccag

SEQ ID NO: 1217443 - DNA, 25 bp, Homo sapien
atattactaagaacaaacttcctgg

SEQ ID NO: 1217444 - DNA, 25 bp, Homo sapien
acagaatatacttctcgtgcttcta

SEQ ID NO: 1217445 - DNA, 25 bp, Homo sapien
tacttctcgtgcttctaaatgaaaa

SEQ ID NO: 1217446 - DNA, 25 bp, Homo sapien
aatatacttctcgtgcttctaaatg

SEQ ID NO: 1217447 - DNA, 25 bp, Homo sapien
cagaatatacttctcgtgcttctaa

SEQ ID NO: 1217448 - DNA, 25 bp, Homo sapien
catgacttctaatgttggaggatcc

SEQ ID NO: 1217449 - DNA, 25 bp, Homo sapien
tcacttcttagtgggtgccttctca

SEQ ID NO: 1217450 - DNA, 25 bp, Homo sapien
tgtacaaccacatgatgacaaagcc

SEQ ID NO: 1217451 - DNA, 25 bp, Homo sapien
gatccagggctcagtacttggacct

SEQ ID NO: 1217452 - DNA, 25 bp, Homo sapien
gaagatatcattctattgaaaggcc

SEQ ID NO: 1217453 - DNA, 25 bp, Homo sapien
tctttacataccagttacagctggt

SEQ ID NO: 1217454 - DNA, 25 bp, Homo sapien
gctggtataaccaacaaagcatcaa

SEQ ID NO: 1217455 - DNA, 25 bp, Homo sapien
gcagcggtgcaactcgaagtttaaa

SEQ ID NO: 1217456 - DNA, 25 bp, Homo sapien
tcataagtgaggcttcagaaagtcc

SEQ ID NO: 1217457 - DNA, 25 bp, Homo sapien
gtatatggcagtgaaactgggctcc

SEQ ID NO: 1217458 - DNA, 25 bp, Homo sapien
tgaaatgattaacaccaccagagga

SEQ ID NO: 1217459 - DNA, 25 bp, Homo sapien
taccaggacagctctttttagtgcc

SEQ ID NO: 1217460 - DNA, 25 bp, Homo sapien
cttccagacaaaggcggtggatgat

SEQ ID NO: 1217461 - DNA, 25 bp, Homo sapien
gatgatggcagctcgcctccaaaca

SEQ ID NO: 1217462 - DNA, 25 bp, Homo sapien
cagagcttgacaatgctcgggcttc

SEQ ID NO: 1217463 - DNA, 25 bp, Homo sapien
tgaggccctgcgcttccagacaaag

SEQ ID NO: 1217464 - DNA, 25 bp, Homo sapien
agctcagcgaaaataggagtgacca

SEQ ID NO: 1217465 - DNA, 25 bp, Homo sapien
ggcgaggtcatgtttactccccatt

SEQ ID NO: 1217466 - DNA, 25 bp, Homo sapien
gagtgaccaatcattgtgctccgcg

SEQ ID NO: 1217467 - DNA, 25 bp, Homo sapien
tctaacgagtttcgctggcagagcc

SEQ ID NO: 1217468 - DNA, 25 bp, Homo sapien
tacaaaccagatttgatctcgaaga

SEQ ID NO: 1217469 - DNA, 25 bp, Homo sapien
caaaccagatttgatctcgaagaaa

SEQ ID NO: 1217470 - DNA, 25 bp, Homo sapien
ctacaaaccagatttgatctcgaag

SEQ ID NO: 1217471 - DNA, 25 bp, Homo sapien
aaaccagatttgatctcgaagaaaa

SEQ ID NO: 1217472 - DNA, 25 bp, Homo sapien
gcggcccgacaggctccgggcttct

SEQ ID NO: 1217473 - DNA, 25 bp, Homo sapien
gccggcggcccgacaggctccgggc

SEQ ID NO: 1217474 - DNA, 25 bp, Homo sapien
gcccgacaggctccgggcttcttgg

SEQ ID NO: 1217475 - DNA, 25 bp, Homo sapien
cggcggcccgacaggctccgggctt

SEQ ID NO: 1217476 - DNA, 25 bp, Homo sapien
gcgcctccccacgcccgcccgcctc

SEQ ID NO: 1217477 - DNA, 25 bp, Homo sapien
cgcctccccacgcccgcccgcctct

SEQ ID NO: 1217478 - DNA, 25 bp, Homo sapien
gcctccccacgcccgcccgcctctc

SEQ ID NO: 1217479 - DNA, 25 bp, Homo sapien
ctccccacgcccgcccgcctctcac

SEQ ID NO: 1217480 - DNA, 25 bp, Homo sapien
cgccctgccgggtcgcgcgctcagc

SEQ ID NO: 1217481 - DNA, 25 bp, Homo sapien
agggtctccagtgcgcagaaggatc

SEQ ID NO: 1217482 - DNA, 25 bp, Homo sapien
gaagcagcgagggtctccagtgcgc

SEQ ID NO: 1217483 - DNA, 25 bp, Homo sapien
gcagaaggatcctacacccgccgcc

SEQ ID NO: 1217484 - DNA, 25 bp, Homo sapien
cttcaggcatctgctaaaatgtcac

SEQ ID NO: 1217485 - DNA, 25 bp, Homo sapien
gaagcccttgtctatgttccctgcc

SEQ ID NO: 1217486 - DNA, 25 bp, Homo sapien
attaagccagcagttgttaagcaag

SEQ ID NO: 1217487 - DNA, 25 bp, Homo sapien
tactgaagcaaaggatgatgctcca

SEQ ID NO: 1217488 - DNA, 25 bp, Homo sapien
tacaaaaagagaatggtatatagta

SEQ ID NO: 1217489 - DNA, 25 bp, Homo sapien
atctattttagacgtcagcctccag

SEQ ID NO: 1217490 - DNA, 25 bp, Homo sapien
ccaagagccaaaggacggaagcagc

SEQ ID NO: 1217491 - DNA, 25 bp, Homo sapien
gaaggatattcagagacactatggt

SEQ ID NO: 1217492 - DNA, 25 bp, Homo sapien
taaaggataaggtgcatttcacagc

SEQ ID NO: 1217493 - DNA, 25 bp, Homo sapien
tcttgtaacaaggtcagtgaatcca

SEQ ID NO: 1217494 - DNA, 25 bp, Homo sapien
taatcagtaagtgcctgtgctgtgg

SEQ ID NO: 1217495 - DNA, 25 bp, Homo sapien
taacaggccactggacagtatcagt

SEQ ID NO: 1217496 - DNA, 25 bp, Homo sapien
gtcccaatgggaaactcaaattcat

SEQ ID NO: 1217497 - DNA, 25 bp, Homo sapien
gcacctgtccttagcaccagtccag

SEQ ID NO: 1217498 - DNA, 25 bp, Homo sapien
cacctgtccttagcaccagtccaga

SEQ ID NO: 1217499 - DNA, 25 bp, Homo sapien
ccaatgggaaactcaaattcatcag

SEQ ID NO: 1217500 - DNA, 25 bp, Homo sapien
tgatcacatgcaccatgccattcac

SEQ ID NO: 1217501 - DNA, 25 bp, Homo sapien
gatctggaggattacgacatgattt

SEQ ID NO: 1217502 - DNA, 25 bp, Homo sapien
ggatctggaggattacgacatgatt

SEQ ID NO: 1217503 - DNA, 25 bp, Homo sapien
tctggaggattacgacatgatttac

SEQ ID NO: 1217504 - DNA, 25 bp, Homo sapien
gaaggataactgctggataacatgg

SEQ ID NO: 1217505 - DNA, 25 bp, Homo sapien
tatggtctttggagaggcaatccag

SEQ ID NO: 1217506 - DNA, 25 bp, Homo sapien
ccccttaccccgaaatatattgatg

SEQ ID NO: 1217507 - DNA, 25 bp, Homo sapien
ggtcgttagtgtgggcgctaatcca

SEQ ID NO: 1217508 - DNA, 25 bp, Homo sapien
tcaccagggtggtacgtttttcgca

SEQ ID NO: 1217509 - DNA, 25 bp, Homo sapien
tatgacatgtacctactgttatggc

SEQ ID NO: 1217510 - DNA, 25 bp, Homo sapien
agataatcagattcacatgcaggga

SEQ ID NO: 1217511 - DNA, 25 bp, Homo sapien
tttcgcaattgaggaacctacactg

SEQ ID NO: 1217512 - DNA, 25 bp, Homo sapien
cagacgaggaaccaatgagtcggta

SEQ ID NO: 1217513 - DNA, 25 bp, Homo sapien
tgcatgtggcagacgaggaaccaat

SEQ ID NO: 1217514 - DNA, 25 bp, Homo sapien
tgatgcatgtggcagacgaggaacc

SEQ ID NO: 1217515 - DNA, 25 bp, Homo sapien
tgtggcagacgaggaaccaatgagt

SEQ ID NO: 1217516 - DNA, 25 bp, Homo sapien
tgtcacaaataggtgtttcattatc

SEQ ID NO: 1217517 - DNA, 25 bp, Homo sapien
cacaaataggtgtttcattatccca

SEQ ID NO: 1217518 - DNA, 25 bp, Homo sapien
ggtgtttcattatcccaaatgacag

SEQ ID NO: 1217519 - DNA, 25 bp, Homo sapien
tcattatcccaaatgacagtatcac

SEQ ID NO: 1217520 - DNA, 25 bp, Homo sapien
gagaaaaattagaatgtgtcggtaa

SEQ ID NO: 1217521 - DNA, 25 bp, Homo sapien
cattcctgggccatgatctaggaga

SEQ ID NO: 1217522 - DNA, 25 bp, Homo sapien
agctgggtatttgggcttggcaact

SEQ ID NO: 1217523 - DNA, 25 bp, Homo sapien
aagaaaggctagaaatactggagaa

SEQ ID NO: 1217524 - DNA, 25 bp, Homo sapien
tgagaatccagttgagagctgggta

SEQ ID NO: 1217525 - DNA, 25 bp, Homo sapien
gatgcccacttgatcgtcattgctg

SEQ ID NO: 1217526 - DNA, 25 bp, Homo sapien
gtagctccggctcccatttgttcag

SEQ ID NO: 1217527 - DNA, 25 bp, Homo sapien
ctctgttggtgctaatgaaatctcc

SEQ ID NO: 1217528 - DNA, 25 bp, Homo sapien
gcagtatatggagggctcacccaca

SEQ ID NO: 1217529 - DNA, 25 bp, Homo sapien
tacgctcagcatgcaggacatctgg

SEQ ID NO: 1217530 - DNA, 25 bp, Homo sapien
tgtagaacacttcctgcccaggtga

SEQ ID NO: 1217531 - DNA, 25 bp, Homo sapien
ggtgtgcagcgcatagacgcagccc

SEQ ID NO: 1217532 - DNA, 25 bp, Homo sapien
tccttgtccctttgggtacgctcag

SEQ ID NO: 1217533 - DNA, 25 bp, Homo sapien
ctggagatttactggaaatagcaca

SEQ ID NO: 1217534 - DNA, 25 bp, Homo sapien
atagcacacggccattaagaagttg

SEQ ID NO: 1217535 - DNA, 25 bp, Homo sapien
tagcacacggccattaagaagttgg

SEQ ID NO: 1217536 - DNA, 25 bp, Homo sapien
tgctccaagctggagatttactgga

SEQ ID NO: 1217537 - DNA, 25 bp, Homo sapien
cacactggaacactgctattccaaa

SEQ ID NO: 1217538 - DNA, 25 bp, Homo sapien
actggaacactgctattccaaaggc

SEQ ID NO: 1217539 - DNA, 25 bp, Homo sapien
gacacagtaactagcagagctgcct

SEQ ID NO: 1217540 - DNA, 25 bp, Homo sapien
acacagtaactagcagagctgcctt

SEQ ID NO: 1217541 - DNA, 25 bp, Homo sapien
caaaaattgtagactgcacctgatg

SEQ ID NO: 1217542 - DNA, 25 bp, Homo sapien
gggacagggaattcattcatcttgt

SEQ ID NO: 1217543 - DNA, 25 bp, Homo sapien
aaagcaaattgttaaggcttcacat

SEQ ID NO: 1217544 - DNA, 25 bp, Homo sapien
catcaggcacaaagtatgtgatcaa

SEQ ID NO: 1217545 - DNA, 25 bp, Homo sapien
ttaggaataactggaggacttggac

SEQ ID NO: 1217546 - DNA, 25 bp, Homo sapien
ggtgggggtcgcatgtgtaatttac

SEQ ID NO: 1217547 - DNA, 25 bp, Homo sapien
ggaataactggaggacttggacaaa

SEQ ID NO: 1217548 - DNA, 25 bp, Homo sapien
tcccattaggaataactggaggact

SEQ ID NO: 1217549 - DNA, 25 bp, Homo sapien
tgctctctccaatgaggtcgaagct

SEQ ID NO: 1217550 - DNA, 25 bp, Homo sapien
cttgtgcagcggatggtgctctctc

SEQ ID NO: 1217551 - DNA, 25 bp, Homo sapien
accccattcccttgagggtcacttg

SEQ ID NO: 1217552 - DNA, 25 bp, Homo sapien
aatgaggtcgaagctcgtccctctg

SEQ ID NO: 1217553 - DNA, 25 bp, Homo sapien
tgtgatagagaatggcctcccgtag

SEQ ID NO: 1217554 - DNA, 25 bp, Homo sapien
gaccagaccaggttatctagacatg

SEQ ID NO: 1217555 - DNA, 25 bp, Homo sapien
ggcattcgtactttaaagatgtccc

SEQ ID NO: 1217556 - DNA, 25 bp, Homo sapien
cgtagtactcaggacggcattcgta

SEQ ID NO: 1217557 - DNA, 25 bp, Homo sapien
tgtgatcacatgcaccatgccattc

SEQ ID NO: 1217558 - DNA, 25 bp, Homo sapien
cctgtagtacaagaatagttgattc

SEQ ID NO: 1217559 - DNA, 25 bp, Homo sapien
catgccattcactggatctggagga

SEQ ID NO: 1217560 - DNA, 25 bp, Homo sapien
tctggatccaacctggatgtctgtg

SEQ ID NO: 1217561 - DNA, 25 bp, Homo sapien
tttgtcgcaattcagtcacgtcttc

SEQ ID NO: 1217562 - DNA, 25 bp, Homo sapien
ctgctgattcatgagaagcaactcc

SEQ ID NO: 1217563 - DNA, 25 bp, Homo sapien
taatattctgtatcctttgtggtca

SEQ ID NO: 1217564 - DNA, 25 bp, Homo sapien
gttaatcctcccgatactgctgctg

SEQ ID NO: 1217565 - DNA, 25 bp, Homo sapien
caatgggcagcattgcccgagagga

SEQ ID NO: 1217566 - DNA, 25 bp, Homo sapien
agatgagtgaccaatgagtcggtgc

SEQ ID NO: 1217567 - DNA, 25 bp, Homo sapien
tggcggcttcgtgctccaatgggca

SEQ ID NO: 1217568 - DNA, 25 bp, Homo sapien
aggatacattcagcagatgagtgac

SEQ ID NO: 1217569 - DNA, 25 bp, Homo sapien
aatgaaatctccattggcgatggtg

SEQ ID NO: 1217570 - DNA, 25 bp, Homo sapien
ctaatgaaatctccattggcgatgg

SEQ ID NO: 1217571 - DNA, 25 bp, Homo sapien
tgaaatctccattggcgatggtggg

SEQ ID NO: 1217572 - DNA, 25 bp, Homo sapien
taatgaaatctccattggcgatggt

SEQ ID NO: 1217573 - DNA, 25 bp, Homo sapien
actgatccatagtgaaaattctctc

SEQ ID NO: 1217574 - DNA, 25 bp, Homo sapien
ttccaggattgcagcggtaggtcac

SEQ ID NO: 1217575 - DNA, 25 bp, Homo sapien
ccactgatccatagtgaaaattctc

SEQ ID NO: 1217576 - DNA, 25 bp, Homo sapien
gcagcggtaggtcaccactgatcca

SEQ ID NO: 1217577 - DNA, 25 bp, Homo sapien
ctggtgcagtatatggagggctcac

SEQ ID NO: 1217578 - DNA, 25 bp, Homo sapien
gatgcccacttgatcgtcattgctg

SEQ ID NO: 1217579 - DNA, 25 bp, Homo sapien
ttttccacatttggaggcgtgcatt

SEQ ID NO: 1217580 - DNA, 25 bp, Homo sapien
gtagctccggctcccatttgttcag

SEQ ID NO: 1217581 - DNA, 25 bp, Homo sapien
ttccttgatagctaggctctggtta

SEQ ID NO: 1217582 - DNA, 25 bp, Homo sapien
ttgatagctaggctctggttaggtt

SEQ ID NO: 1217583 - DNA, 25 bp, Homo sapien
aaaaataaatcgttcatcttccttg

SEQ ID NO: 1217584 - DNA, 25 bp, Homo sapien
ccttgatagctaggctctggttagg

SEQ ID NO: 1217585 - DNA, 25 bp, Homo sapien
tacgctcagcatgcaggacatctgg

SEQ ID NO: 1217586 - DNA, 25 bp, Homo sapien
ggtgtgcagcgcatagacgcagccc

SEQ ID NO: 1217587 - DNA, 25 bp, Homo sapien
tgtagaacacttcctgcccgggtga

SEQ ID NO: 1217588 - DNA, 25 bp, Homo sapien
tccttgtccctttgggtacgctcag

SEQ ID NO: 1217589 - DNA, 25 bp, Homo sapien
ctggagatttactggaaatagcaca

SEQ ID NO: 1217590 - DNA, 25 bp, Homo sapien
atagcacacggccattaagaagttg

SEQ ID NO: 1217591 - DNA, 25 bp, Homo sapien
tagcacacggccattaagaagttgg

SEQ ID NO: 1217592 - DNA, 25 bp, Homo sapien
tgctccaagctggagatttactgga

SEQ ID NO: 1217593 - DNA, 25 bp, Homo sapien
gacacagtaactagcagagctgcct

SEQ ID NO: 1217594 - DNA, 25 bp, Homo sapien
actggaacactgctattccaaaggc

SEQ ID NO: 1217595 - DNA, 25 bp, Homo sapien
acacagtaactagcagagctgcctt

SEQ ID NO: 1217596 - DNA, 25 bp, Homo sapien
cacactggaacactgctattccaaa

SEQ ID NO: 1217597 - DNA, 25 bp, Homo sapien
aaagcaaattgttaaggcttcacat

SEQ ID NO: 1217598 - DNA, 25 bp, Homo sapien
caaaaattgtagactgcacctgatg

SEQ ID NO: 1217599 - DNA, 25 bp, Homo sapien
gggacagggaattcattcatcttgt

SEQ ID NO: 1217600 - DNA, 25 bp, Homo sapien
catcaggcacaaagtatgtgatcaa

SEQ ID NO: 1217601 - DNA, 25 bp, Homo sapien
ggtgggggtcgcatgtgtaatttac

SEQ ID NO: 1217602 - DNA, 25 bp, Homo sapien
ttaggaataactggaggacttggac

SEQ ID NO: 1217603 - DNA, 25 bp, Homo sapien
ggaataactggaggacttggacaaa

SEQ ID NO: 1217604 - DNA, 25 bp, Homo sapien
tcccattaggaataactggaggact

SEQ ID NO: 1217605 - DNA, 25 bp, Homo sapien
cttgtgcagcggatggtgctctctc

SEQ ID NO: 1217606 - DNA, 25 bp, Homo sapien
accccattcccttgagggtcacttg

SEQ ID NO: 1217607 - DNA, 25 bp, Homo sapien
tgctctctccaatgaggtcgaagct

SEQ ID NO: 1217608 - DNA, 25 bp, Homo sapien
aatgaggtcgaagctcgtccctctg

SEQ ID NO: 1217609 - DNA, 25 bp, Homo sapien
ggcattcgtactttaaagatgtccc

SEQ ID NO: 1217610 - DNA, 25 bp, Homo sapien
gaccagaccaggttatctagacatg

SEQ ID NO: 1217611 - DNA, 25 bp, Homo sapien
cgtagtactcaggacggcattcgta

SEQ ID NO: 1217612 - DNA, 25 bp, Homo sapien
tgtgatagagaatggcctcccgtag

SEQ ID NO: 1217613 - DNA, 25 bp, Homo sapien
tctggatccaacctggatgtctgtg

SEQ ID NO: 1217614 - DNA, 25 bp, Homo sapien
cctgtagtacaagaatagttgattc

SEQ ID NO: 1217615 - DNA, 25 bp, Homo sapien
catgccattcactggatctggagga

SEQ ID NO: 1217616 - DNA, 25 bp, Homo sapien
tgtgatcacatgcaccatgccattc

SEQ ID NO: 1217617 - DNA, 25 bp, Homo sapien
tttgtcgcaattcagtcacgtcttc

SEQ ID NO: 1217618 - DNA, 25 bp, Homo sapien
gttaatcctcccgatactgctgctg

SEQ ID NO: 1217619 - DNA, 25 bp, Homo sapien
taatattctgtatcctttgtggtca

SEQ ID NO: 1217620 - DNA, 25 bp, Homo sapien
ctgctgattcatgagaagcaactcc

SEQ ID NO: 1217621 - DNA, 25 bp, Homo sapien
caatgggcagcattgcccgagagga

SEQ ID NO: 1217622 - DNA, 25 bp, Homo sapien
agatgagtgaccaatgagtcggtgc

SEQ ID NO: 1217623 - DNA, 25 bp, Homo sapien
aggatacattcagcagatgagtgac

SEQ ID NO: 1217624 - DNA, 25 bp, Homo sapien
tggcggcttcgtgctccaatgggca

SEQ ID NO: 1217625 - DNA, 25 bp, Homo sapien
tgaaatctccattggcgatggtggg

SEQ ID NO: 1217626 - DNA, 25 bp, Homo sapien
aatgaaatctccattggcgatggtg

SEQ ID NO: 1217627 - DNA, 25 bp, Homo sapien
taatgaaatctccattggcgatggt

SEQ ID NO: 1217628 - DNA, 25 bp, Homo sapien
ctaatgaaatctccattggcgatgg

SEQ ID NO: 1217629 - DNA, 25 bp, Homo sapien
gatgcccacttgatcgtcattgctg

SEQ ID NO: 1217630 - DNA, 25 bp, Homo sapien
ctggtgcagtatatggagggctcac

SEQ ID NO: 1217631 - DNA, 25 bp, Homo sapien
atggagggctcacccacaagctcaa

SEQ ID NO: 1217632 - DNA, 25 bp, Homo sapien
gggccgctccagatgcccacttgat

SEQ ID NO: 1217633 - DNA, 25 bp, Homo sapien
aagccaggctgacacctaaactcca

SEQ ID NO: 1217634 - DNA, 25 bp, Homo sapien
taaactccacaacttcatttaagga

SEQ ID NO: 1217635 - DNA, 25 bp, Homo sapien
ttttccacatttggaggcgtgcatt

SEQ ID NO: 1217636 - DNA, 25 bp, Homo sapien
gtagctccggctcccatttgttcag

SEQ ID NO: 1217637 - DNA, 25 bp, Homo sapien
tacgctcagcatgcaggacatctgg

SEQ ID NO: 1217638 - DNA, 25 bp, Homo sapien
ggtgtgcagcgcatagacgcagccc

SEQ ID NO: 1217639 - DNA, 25 bp, Homo sapien
tgtagaacacttcctgcccgggtga

SEQ ID NO: 1217640 - DNA, 25 bp, Homo sapien
tccttgtccctttgggtacgctcag

SEQ ID NO: 1217641 - DNA, 25 bp, Homo sapien
tgctccaagctggagatttactgga

SEQ ID NO: 1217642 - DNA, 25 bp, Homo sapien
atagcacacggccattaagaagttg

SEQ ID NO: 1217643 - DNA, 25 bp, Homo sapien
ctggagatttactggaaatagcaca

SEQ ID NO: 1217644 - DNA, 25 bp, Homo sapien
tagcacacggccattaagaagttgg

SEQ ID NO: 1217645 - DNA, 25 bp, Homo sapien
acactggaacactgctattccaaag

SEQ ID NO: 1217646 - DNA, 25 bp, Homo sapien
actggaacactgctattccaaaggc

SEQ ID NO: 1217647 - DNA, 25 bp, Homo sapien
cactggaacactgctattccaaagg

SEQ ID NO: 1217648 - DNA, 25 bp, Homo sapien
cacactggaacactgctattccaaa

SEQ ID NO: 1217649 - DNA, 25 bp, Homo sapien
aagacttccagaggttttcctgtgt

SEQ ID NO: 1217650 - DNA, 25 bp, Homo sapien
gggtcgcatgtgtaatttactgctt

SEQ ID NO: 1217651 - DNA, 25 bp, Homo sapien
gtgtctcccattaggaataactgga

SEQ ID NO: 1217652 - DNA, 25 bp, Homo sapien
gggggtcgcatgtgtaatttactgc

SEQ ID NO: 1217653 - DNA, 25 bp, Homo sapien
cttgtgcagcggatggtgctctctc

SEQ ID NO: 1217654 - DNA, 25 bp, Homo sapien
accccattcccttgagggtcacttg

SEQ ID NO: 1217655 - DNA, 25 bp, Homo sapien
aatgaggtcgaagctcgtccctctg

SEQ ID NO: 1217656 - DNA, 25 bp, Homo sapien
tgctctctccaatgaggtcgaagct

SEQ ID NO: 1217657 - DNA, 25 bp, Homo sapien
gaaggagccaccgattttctaggtc

SEQ ID NO: 1217658 - DNA, 25 bp, Homo sapien
caatgagaggctgtcaagcatgggc

SEQ ID NO: 1217659 - DNA, 25 bp, Homo sapien
taatgaaggactttcccaccactca

SEQ ID NO: 1217660 - DNA, 25 bp, Homo sapien
gaactcaagacgtttcctggcagaa

SEQ ID NO: 1217661 - DNA, 25 bp, Homo sapien
gaccagaccaggttatctagacatg

SEQ ID NO: 1217662 - DNA, 25 bp, Homo sapien
ggcattcgtactttaaagatgtccc

SEQ ID NO: 1217663 - DNA, 25 bp, Homo sapien
tgtgatagagaatggcctcccgtag

SEQ ID NO: 1217664 - DNA, 25 bp, Homo sapien
cgtagtactcaggacggcattcgta

SEQ ID NO: 1217665 - DNA, 25 bp, Homo sapien
tgtgatcacatgcaccatgccattc

SEQ ID NO: 1217666 - DNA, 25 bp, Homo sapien
cctgtagtacaagaatagttgattc

SEQ ID NO: 1217667 - DNA, 25 bp, Homo sapien
tctggatccaacctggatgtctgtg

SEQ ID NO: 1217668 - DNA, 25 bp, Homo sapien
catgccattcactggatctggagga

SEQ ID NO: 1217669 - DNA, 25 bp, Homo sapien
gatgccgacgaacatgcttacacag

SEQ ID NO: 1217670 - DNA, 25 bp, Homo sapien
tatatgggtgcagttcgtagggacc

SEQ ID NO: 1217671 - DNA, 25 bp, Homo sapien
tactctttatatgtgcactgccctg

SEQ ID NO: 1217672 - DNA, 25 bp, Homo sapien
gagacacgaagtcaacacacgctgt

SEQ ID NO: 1217673 - DNA, 25 bp, Homo sapien
taaaaaatactaaagattatctgac

SEQ ID NO: 1217674 - DNA, 25 bp, Homo sapien
tcttaagctgagacagcaataaaat

SEQ ID NO: 1217675 - DNA, 25 bp, Homo sapien
aaattgctgtattgatggactcttc

SEQ ID NO: 1217676 - DNA, 25 bp, Homo sapien
gataacattttaccctctgaactgc

SEQ ID NO: 1217677 - DNA, 25 bp, Homo sapien
gttgacaaattggcggcttcgtgct

SEQ ID NO: 1217678 - DNA, 25 bp, Homo sapien
tggcggcttcgtgctccaatgggca

SEQ ID NO: 1217679 - DNA, 25 bp, Homo sapien
aggatacattcagcagatgagtgac

SEQ ID NO: 1217680 - DNA, 25 bp, Homo sapien
agatgagtgaccaatgagtcggtgc

SEQ ID NO: 1217681 - DNA, 25 bp, Homo sapien
taatgaaatctccattggcgatggt

SEQ ID NO: 1217682 - DNA, 25 bp, Homo sapien
ctaatgaaatctccattggcgatgg

SEQ ID NO: 1217683 - DNA, 25 bp, Homo sapien
gatgcccacttgatcgtcattgctg

SEQ ID NO: 1217684 - DNA, 25 bp, Homo sapien
gcagtatatggagggctcacccaca

SEQ ID NO: 1217685 - DNA, 25 bp, Homo sapien
ttttccacatttggaggcgtgcatt

SEQ ID NO: 1217686 - DNA, 25 bp, Homo sapien
agcagcttggtaactctggctccca

SEQ ID NO: 1217687 - DNA, 25 bp, Homo sapien
caggatttctggaggcggctgacac

SEQ ID NO: 1217688 - DNA, 25 bp, Homo sapien
catgcaggatttctggaggcggctg

SEQ ID NO: 1217689 - DNA, 25 bp, Homo sapien
tgcaggatttctggaggcggctgac

SEQ ID NO: 1217690 - DNA, 25 bp, Homo sapien
aggatttctggaggcggctgacaca

SEQ ID NO: 1217691 - DNA, 25 bp, Homo sapien
cttcctgcccaggtgaaaagttgtc

SEQ ID NO: 1217692 - DNA, 25 bp, Homo sapien
cacttcctgcccaggtgaaaagttg

SEQ ID NO: 1217693 - DNA, 25 bp, Homo sapien
tgtagaacacttcctgcccaggtga

SEQ ID NO: 1217694 - DNA, 25 bp, Homo sapien
agaacacttcctgcccaggtgaaaa

SEQ ID NO: 1217695 - DNA, 25 bp, Homo sapien
ttgacccaagaagtcatcacaggat

SEQ ID NO: 1217696 - DNA, 25 bp, Homo sapien
gattaagtggaaatagcacacggcc

SEQ ID NO: 1217697 - DNA, 25 bp, Homo sapien
ccatgagggagttgacccaagaagt

SEQ ID NO: 1217698 - DNA, 25 bp, Homo sapien
tagcacacggccatgagggagttga

SEQ ID NO: 1217699 - DNA, 25 bp, Homo sapien
catcacagacaaaggacacctttgc

SEQ ID NO: 1217700 - DNA, 25 bp, Homo sapien
ttcatcacagacaaaggacaccttt

SEQ ID NO: 1217701 - DNA, 25 bp, Homo sapien
ccttcatcacagacaaaggacacct

SEQ ID NO: 1217702 - DNA, 25 bp, Homo sapien
tcacagacaaaggacacctttgccc

SEQ ID NO: 1217703 - DNA, 25 bp, Homo sapien
caagacacaatgactaacggaactg

SEQ ID NO: 1217704 - DNA, 25 bp, Homo sapien
aaccaagacacaatgactaacggaa

SEQ ID NO: 1217705 - DNA, 25 bp, Homo sapien
gacacaatgactaacggaactgccc

SEQ ID NO: 1217706 - DNA, 25 bp, Homo sapien
cacaatgactaacggaactgccctt

SEQ ID NO: 1217707 - DNA, 25 bp, Homo sapien
tgagggtcacttgtgcagcggatgg

SEQ ID NO: 1217708 - DNA, 25 bp, Homo sapien
aacagaaagttcacagcgaggggca

SEQ ID NO: 1217709 - DNA, 25 bp, Homo sapien
gcggatggtgctctccccaatgagg

SEQ ID NO: 1217710 - DNA, 25 bp, Homo sapien
aggttgaaggtcatccctctgtctg

SEQ ID NO: 1217711 - DNA, 25 bp, Homo sapien
cattaattgggatcgtaggactggc

SEQ ID NO: 1217712 - DNA, 25 bp, Homo sapien
tgaccagaccaagttttctaggcag

SEQ ID NO: 1217713 - DNA, 25 bp, Homo sapien
ggactggcaaatggaaactgctctg

SEQ ID NO: 1217714 - DNA, 25 bp, Homo sapien
cataattcaaagatgtcccgactgg

SEQ ID NO: 1217715 - DNA, 25 bp, Homo sapien
gcaccattccattgaagggttctgg

SEQ ID NO: 1217716 - DNA, 25 bp, Homo sapien
tctgtgtttatatgcaccattccat

SEQ ID NO: 1217717 - DNA, 25 bp, Homo sapien
gggttctggtggaggtccacatgat

SEQ ID NO: 1217718 - DNA, 25 bp, Homo sapien
ccttcattacaagaataattaactg

SEQ ID NO: 1217719 - DNA, 25 bp, Homo sapien
ttcaaagcgcatgcttccagcattt

SEQ ID NO: 1217720 - DNA, 25 bp, Homo sapien
cagattacggatattttaagctgag

SEQ ID NO: 1217721 - DNA, 25 bp, Homo sapien
ttccaaggtagtttattcactttgc

SEQ ID NO: 1217722 - DNA, 25 bp, Homo sapien
ttcactttgcaggaatttagaatgg

SEQ ID NO: 1217723 - DNA, 25 bp, Homo sapien
tattcaacctactgctaatagaagg

SEQ ID NO: 1217724 - DNA, 25 bp, Homo sapien
tcctaggagtgggattagtagctaa

SEQ ID NO: 1217725 - DNA, 25 bp, Homo sapien
caaaatagttcatagtagacgtctt

SEQ ID NO: 1217726 - DNA, 25 bp, Homo sapien
caatgaaccactatgagagggctcc

SEQ ID NO: 1217727 - DNA, 25 bp, Homo sapien
gcctagtttctaacttctaggctta

SEQ ID NO: 1217728 - DNA, 25 bp, Homo sapien
cagcctagtttctaacttctaggct

SEQ ID NO: 1217729 - DNA, 25 bp, Homo sapien
accatgctgtggaatagatctctga

SEQ ID NO: 1217730 - DNA, 25 bp, Homo sapien
catgctgtggaatagatctctgaaa

SEQ ID NO: 1217731 - DNA, 25 bp, Homo sapien
tattgcctgagacgagacaagtagt

SEQ ID NO: 1217732 - DNA, 25 bp, Homo sapien
tagatggggaaccaatgagtcgaaa

SEQ ID NO: 1217733 - DNA, 25 bp, Homo sapien
cattattgcctgagacgagacaagt

SEQ ID NO: 1217734 - DNA, 25 bp, Homo sapien
ctgagacgagacaagtagtagatgg

SEQ ID NO: 1217735 - DNA, 25 bp, Homo sapien
tattgaccgttctcccacaagctca

SEQ ID NO: 1217736 - DNA, 25 bp, Homo sapien
ccagtgtggcactggtaagttacca

SEQ ID NO: 1217737 - DNA, 25 bp, Homo sapien
taagttaccaccgttccattgtgaa

SEQ ID NO: 1217738 - DNA, 25 bp, Homo sapien
gaagtctccattggatatggttgga

SEQ ID NO: 1217739 - DNA, 25 bp, Homo sapien
ctaaatctgatgatctcagtgaggg

SEQ ID NO: 1217740 - DNA, 25 bp, Homo sapien
ccgggctgacatctaaatctgatga

SEQ ID NO: 1217741 - DNA, 25 bp, Homo sapien
tctggagctgtgcatttattagtag

SEQ ID NO: 1217742 - DNA, 25 bp, Homo sapien
gacaaacccgggctgacatctaaat

SEQ ID NO: 1217743 - DNA, 25 bp, Homo sapien
ctgccattggtctggcactgcacag

SEQ ID NO: 1217744 - DNA, 25 bp, Homo sapien
tgccattggtctggcactgcacagt

SEQ ID NO: 1217745 - DNA, 25 bp, Homo sapien
agtgtggcagcttgggcccccatct

SEQ ID NO: 1217746 - DNA, 25 bp, Homo sapien
gtggcagcttgggcccccatctgcc

SEQ ID NO: 1217747 - DNA, 25 bp, Homo sapien
ttaaaaatcgtcattgcagagtgca

SEQ ID NO: 1217748 - DNA, 25 bp, Homo sapien
taaaaatcgtcattgcagagtgcag

SEQ ID NO: 1217749 - DNA, 25 bp, Homo sapien
aggatttctggaggcggctgacaca

SEQ ID NO: 1217750 - DNA, 25 bp, Homo sapien
catgcaggatttctggaggcggctg

SEQ ID NO: 1217751 - DNA, 25 bp, Homo sapien
caggatttctggaggcggctgacac

SEQ ID NO: 1217752 - DNA, 25 bp, Homo sapien
tgcaggatttctggaggcggctgac

SEQ ID NO: 1217753 - DNA, 25 bp, Homo sapien
aagttgtcctgatggcttagggtat

SEQ ID NO: 1217754 - DNA, 25 bp, Homo sapien
agttgtcctgatggcttagggtatg

SEQ ID NO: 1217755 - DNA, 25 bp, Homo sapien
ttcatcgcaaacaaaggacaccttt

SEQ ID NO: 1217756 - DNA, 25 bp, Homo sapien
acacggccatgagggagttggccca

SEQ ID NO: 1217757 - DNA, 25 bp, Homo sapien
cccaggaagtcatcacaggatttca

SEQ ID NO: 1217758 - DNA, 25 bp, Homo sapien
taagtggaagtagcacacggccatg

SEQ ID NO: 1217759 - DNA, 25 bp, Homo sapien
actagcagacctgccttttaatcgg

SEQ ID NO: 1217760 - DNA, 25 bp, Homo sapien
gactagcagacctgccttttaatcg

SEQ ID NO: 1217761 - DNA, 25 bp, Homo sapien
gagggtcacttgtgcagcggatgga

SEQ ID NO: 1217762 - DNA, 25 bp, Homo sapien
tgtcgcatgcgtaagatatttcttt

SEQ ID NO: 1217763 - DNA, 25 bp, Homo sapien
tctgggtgggtgtcgcatgcgtaag

SEQ ID NO: 1217764 - DNA, 25 bp, Homo sapien
gtcacttgtgcagcggatggagctc

SEQ ID NO: 1217765 - DNA, 25 bp, Homo sapien
ccagattccctggtctgtacagaaa

SEQ ID NO: 1217766 - DNA, 25 bp, Homo sapien
gcaataatgatccaattggctccag

SEQ ID NO: 1217767 - DNA, 25 bp, Homo sapien
tgattgtcatcccaggaagatatag

SEQ ID NO: 1217768 - DNA, 25 bp, Homo sapien
gaagatatagagatacgtgtcctcc

SEQ ID NO: 1217769 - DNA, 25 bp, Homo sapien
cataaacagtgggaagctacaattt

SEQ ID NO: 1217770 - DNA, 25 bp, Homo sapien
tcgagattccattcataaacagtgg

SEQ ID NO: 1217771 - DNA, 25 bp, Homo sapien
actccttcgagattccattcataaa

SEQ ID NO: 1217772 - DNA, 25 bp, Homo sapien
aacagtgggaagctacaatttactt

SEQ ID NO: 1217773 - DNA, 25 bp, Homo sapien
aggagggtcccatctgtcatccgcc

SEQ ID NO: 1217774 - DNA, 25 bp, Homo sapien
cacacttcaaagtcacataatctcc

SEQ ID NO: 1217775 - DNA, 25 bp, Homo sapien
cataatctccatagtgatatacttt

SEQ ID NO: 1217776 - DNA, 25 bp, Homo sapien
cagggactgccttccagagtatacc

SEQ ID NO: 1217777 - DNA, 25 bp, Homo sapien
gaccgggaagatcccacattccttg

SEQ ID NO: 1217778 - DNA, 25 bp, Homo sapien
gaatgaatgagcaataaccatgacc

SEQ ID NO: 1217779 - DNA, 25 bp, Homo sapien
caataaccatgaccgggaagatccc

SEQ ID NO: 1217780 - DNA, 25 bp, Homo sapien
cacttgatgccaatatggatgaatg

SEQ ID NO: 1217781 - DNA, 25 bp, Homo sapien
catagcatatgccataaacatcaca

SEQ ID NO: 1217782 - DNA, 25 bp, Homo sapien
catattgtactctatagctcatagc

SEQ ID NO: 1217783 - DNA, 25 bp, Homo sapien
tactctatagctcatagcatatgcc

SEQ ID NO: 1217784 - DNA, 25 bp, Homo sapien
aggtggatgctcatattgtactcta

SEQ ID NO: 1217785 - DNA, 25 bp, Homo sapien
taaaataaagaagatcgtaccagat

SEQ ID NO: 1217786 - DNA, 25 bp, Homo sapien
agaagatcgtaccagataaagtgcc

SEQ ID NO: 1217787 - DNA, 25 bp, Homo sapien
agtaaaataaagaagatcgtaccag

SEQ ID NO: 1217788 - DNA, 25 bp, Homo sapien
ataaagaagatcgtaccagataaag

SEQ ID NO: 1217789 - DNA, 25 bp, Homo sapien
atgtaaatggatagccacttcttta

SEQ ID NO: 1217790 - DNA, 25 bp, Homo sapien
tgtaaatggatagccacttctttag

SEQ ID NO: 1217791 - DNA, 25 bp, Homo sapien
ttgcagagttcggggatgaacgctg

SEQ ID NO: 1217792 - DNA, 25 bp, Homo sapien
cagagttcggggatgaacgctgctg

SEQ ID NO: 1217793 - DNA, 25 bp, Homo sapien
tgatatttgagttgttgaaaacatt

SEQ ID NO: 1217794 - DNA, 25 bp, Homo sapien
tttttgatatttgagttgttgaaaa

SEQ ID NO: 1217795 - DNA, 25 bp, Homo sapien
ttgatatttgagttgttgaaaacat

SEQ ID NO: 1217796 - DNA, 25 bp, Homo sapien
tttgatatttgagttgttgaaaaca

SEQ ID NO: 1217797 - DNA, 25 bp, Homo sapien
gaagcccgagagtctgaatgcctgt

SEQ ID NO: 1217798 - DNA, 25 bp, Homo sapien
gggaactagccagtgagaaatttct

SEQ ID NO: 1217799 - DNA, 25 bp, Homo sapien
caaaagagaggagtatccaatgaga

SEQ ID NO: 1217800 - DNA, 25 bp, Homo sapien
tctcatagtatgatatagttcaggg

SEQ ID NO: 1217801 - DNA, 25 bp, Homo sapien
ttttaaatggtgtagtcaggaaatg

SEQ ID NO: 1217802 - DNA, 25 bp, Homo sapien
tttgggagagcatcttggttgattg

SEQ ID NO: 1217803 - DNA, 25 bp, Homo sapien
ttaaatggtgtagtcaggaaatgtg

SEQ ID NO: 1217804 - DNA, 25 bp, Homo sapien
agatatcattttggactagagttgt

SEQ ID NO: 1217805 - DNA, 25 bp, Homo sapien
acacccctcctgatgaggcctccag

SEQ ID NO: 1217806 - DNA, 25 bp, Homo sapien
gctgaagcgtctccttttaaggccg

SEQ ID NO: 1217807 - DNA, 25 bp, Homo sapien
tgttccccggttattactgccacca

SEQ ID NO: 1217808 - DNA, 25 bp, Homo sapien
tagtacaaggtatccacgtgcttcc

SEQ ID NO: 1217809 - DNA, 25 bp, Homo sapien
agcgccaccgcggagatggaaacac

SEQ ID NO: 1217810 - DNA, 25 bp, Homo sapien
gaaaagcgccaccgcggagatggaa

SEQ ID NO: 1217811 - DNA, 25 bp, Homo sapien
gaacactcaaaactcagttaagcaa

SEQ ID NO: 1217812 - DNA, 25 bp, Homo sapien
accgcggagatggaaacaccagtca

SEQ ID NO: 1217813 - DNA, 25 bp, Homo sapien
tcttcaagtgcacatgtctgcgtct

SEQ ID NO: 1217814 - DNA, 25 bp, Homo sapien
tactgtgtgcgtttagcacgaggca

SEQ ID NO: 1217815 - DNA, 25 bp, Homo sapien
tagaaaatatcgaaagcggccaggc

SEQ ID NO: 1217816 - DNA, 25 bp, Homo sapien
ttcacagtgacgcacacaaagaggc

SEQ ID NO: 1217817 - DNA, 25 bp, Homo sapien
tagcatggcccataatatcataaca

SEQ ID NO: 1217818 - DNA, 25 bp, Homo sapien
gatgtggactggttaaagaacacaa

SEQ ID NO: 1217819 - DNA, 25 bp, Homo sapien
tgatgttttctagaggtcattagca

SEQ ID NO: 1217820 - DNA, 25 bp, Homo sapien
tggcccataatatcataacacattt

SEQ ID NO: 1217821 - DNA, 25 bp, Homo sapien
gtcacaggttagcagaattgcttaa

SEQ ID NO: 1217822 - DNA, 25 bp, Homo sapien
tagggcaattggtgtccagcccctg

SEQ ID NO: 1217823 - DNA, 25 bp, Homo sapien
aaaaacctttcagctttcttgcaat

SEQ ID NO: 1217824 - DNA, 25 bp, Homo sapien
gaatgttaggactagcaatagcttc

SEQ ID NO: 1217825 - DNA, 25 bp, Homo sapien
gtgagcagagaaaccgaaagccagc

SEQ ID NO: 1217826 - DNA, 25 bp, Homo sapien
gagcagggaagtcccttctgagtcc

SEQ ID NO: 1217827 - DNA, 25 bp, Homo sapien
gaccccgtgatttatccggaggtga

SEQ ID NO: 1217828 - DNA, 25 bp, Homo sapien
gaaggaaagggacgctcgagacgga

SEQ ID NO: 1217829 - DNA, 25 bp, Homo sapien
cacggcacccctcggagaaccctgg

SEQ ID NO: 1217830 - DNA, 25 bp, Homo sapien
cgggatctgagcacggcacccctcg

SEQ ID NO: 1217831 - DNA, 25 bp, Homo sapien
ccccgccacatacccccgggatctg

SEQ ID NO: 1217832 - DNA, 25 bp, Homo sapien
acatacccccgggatctgagcacgg

SEQ ID NO: 1217833 - DNA, 25 bp, Homo sapien
tcccgaaaacacgattcacgcttct

SEQ ID NO: 1217834 - DNA, 25 bp, Homo sapien
cttttgggaacgcagccagatcctg

SEQ ID NO: 1217835 - DNA, 25 bp, Homo sapien
tgctgactgggctcaatcccgaaaa

SEQ ID NO: 1217836 - DNA, 25 bp, Homo sapien
ccagatcctgcgtaaatgtcggccg

SEQ ID NO: 1217837 - DNA, 25 bp, Homo sapien
ggcttctttcattgaaaataaggaa

SEQ ID NO: 1217838 - DNA, 25 bp, Homo sapien
cttggcttctttcattgaaaataag

SEQ ID NO: 1217839 - DNA, 25 bp, Homo sapien
tggtcttggcttctttcattgaaaa

SEQ ID NO: 1217840 - DNA, 25 bp, Homo sapien
gtcttggcttctttcattgaaaata

SEQ ID NO: 1217841 - DNA, 25 bp, Homo sapien
aatattaagctacaatactatacct

SEQ ID NO: 1217842 - DNA, 25 bp, Homo sapien
tttatatatcatgtcctgcaatgca

SEQ ID NO: 1217843 - DNA, 25 bp, Homo sapien
agtgaaatctcaccttcatttcatg

SEQ ID NO: 1217844 - DNA, 25 bp, Homo sapien
catatatatactgtccaatattttc

SEQ ID NO: 1217845 - DNA, 25 bp, Homo sapien
taagtgaactgagcatctgacaagt

SEQ ID NO: 1217846 - DNA, 25 bp, Homo sapien
cctgaggtagctgttggattgttta

SEQ ID NO: 1217847 - DNA, 25 bp, Homo sapien
ctatcatttctactgcggcaactca

SEQ ID NO: 1217848 - DNA, 25 bp, Homo sapien
tcaaattatctgtgggcttgcaaaa

SEQ ID NO: 1217849 - DNA, 25 bp, Homo sapien
ccaatctcatagtagggttttggtt

SEQ ID NO: 1217850 - DNA, 25 bp, Homo sapien
taccaatgagctccatagcttcaaa

SEQ ID NO: 1217851 - DNA, 25 bp, Homo sapien
catagcttcaaatgttggtggctcc

SEQ ID NO: 1217852 - DNA, 25 bp, Homo sapien
tgagctccatagcttcaaatgttgg

SEQ ID NO: 1217853 - DNA, 25 bp, Homo sapien
tctgagacaggtagccatgtgtgat

SEQ ID NO: 1217854 - DNA, 25 bp, Homo sapien
tgagacaggtagccatgtgtgattc

SEQ ID NO: 1217855 - DNA, 25 bp, Homo sapien
tagtatgggtggcaagaggaggtac

SEQ ID NO: 1217856 - DNA, 25 bp, Homo sapien
ctgagacaggtagccatgtgtgatt

SEQ ID NO: 1217857 - DNA, 25 bp, Homo sapien
gctcataagtcccatttgcaaggac

SEQ ID NO: 1217858 - DNA, 25 bp, Homo sapien
tggccatgtaaaggatcacctatac

SEQ ID NO: 1217859 - DNA, 25 bp, Homo sapien
ctgcttggccatgtaaaggatcacc

SEQ ID NO: 1217860 - DNA, 25 bp, Homo sapien
taaagtgtatctgataacctagctc

SEQ ID NO: 1217861 - DNA, 25 bp, Homo sapien
ctttaagttcacaatatagaatttc

SEQ ID NO: 1217862 - DNA, 25 bp, Homo sapien
ctgatcctttaagttcacaatatag

SEQ ID NO: 1217863 - DNA, 25 bp, Homo sapien
tcctttaagttcacaatatagaatt

SEQ ID NO: 1217864 - DNA, 25 bp, Homo sapien
gatcctttaagttcacaatatagaa

SEQ ID NO: 1217865 - DNA, 25 bp, Homo sapien
aaaggtgacttttacactctggagc

SEQ ID NO: 1217866 - DNA, 25 bp, Homo sapien
ttgaaaggtgacttttacactctgg

SEQ ID NO: 1217867 - DNA, 25 bp, Homo sapien
atgaagaaggaaataaattgaaagg

SEQ ID NO: 1217868 - DNA, 25 bp, Homo sapien
aattgaaaggtgacttttacactct

SEQ ID NO: 1217869 - DNA, 25 bp, Homo sapien
gatgaggaccctgcggcagtggttg

SEQ ID NO: 1217870 - DNA, 25 bp, Homo sapien
ctgcggcagtggttgggctccacca

SEQ ID NO: 1217871 - DNA, 25 bp, Homo sapien
cctcttggatctgccaggcgtgttg

SEQ ID NO: 1217872 - DNA, 25 bp, Homo sapien
accctgcggcagtggttgggctcca

SEQ ID NO: 1217873 - DNA, 25 bp, Homo sapien
ggcacagggcactggcacaggatct

SEQ ID NO: 1217874 - DNA, 25 bp, Homo sapien
tggctcctgtgtggcgggcacaggg

SEQ ID NO: 1217875 - DNA, 25 bp, Homo sapien
ctctggctcctgtgtggcgggcaca

SEQ ID NO: 1217876 - DNA, 25 bp, Homo sapien
ccctctggctcctgtgtggcgggca

SEQ ID NO: 1217877 - DNA, 25 bp, Homo sapien
gccccttcgtgcagcagtctccgaa

SEQ ID NO: 1217878 - DNA, 25 bp, Homo sapien
cccttcgtgcagcagtctccgaagt

SEQ ID NO: 1217879 - DNA, 25 bp, Homo sapien
ttcgtgcagcagtctccgaagtggg

SEQ ID NO: 1217880 - DNA, 25 bp, Homo sapien
ctggccccttcgtgcagcagtctcc

SEQ ID NO: 1217881 - DNA, 25 bp, Homo sapien
aggtgagacagcaaaggtctgatac

SEQ ID NO: 1217882 - DNA, 25 bp, Homo sapien
tgaggtgagacagcaaaggtctgat

SEQ ID NO: 1217883 - DNA, 25 bp, Homo sapien
gaggtgagacagcaaaggtctgata

SEQ ID NO: 1217884 - DNA, 25 bp, Homo sapien
ctgaggtgagacagcaaaggtctga

SEQ ID NO: 1217885 - DNA, 25 bp, Homo sapien
tctcatctagccacttctgaaagct

SEQ ID NO: 1217886 - DNA, 25 bp, Homo sapien
tagttttcagtatttcaaatatctc

SEQ ID NO: 1217887 - DNA, 25 bp, Homo sapien
taagaactgaccacatctgaggcca

SEQ ID NO: 1217888 - DNA, 25 bp, Homo sapien
actgtgtgtccaggttgtcgtaaga

SEQ ID NO: 1217889 - DNA, 25 bp, Homo sapien
cagagcttgacaatgcttgggcttc

SEQ ID NO: 1217890 - DNA, 25 bp, Homo sapien
accgccagcagggatcctccgcagc

SEQ ID NO: 1217891 - DNA, 25 bp, Homo sapien
ccgccagcagggatcctccgcagca

SEQ ID NO: 1217892 - DNA, 25 bp, Homo sapien
tcccaatgggaaactcaaagtcatc

SEQ ID NO: 1217893 - DNA, 25 bp, Homo sapien
cccaatgggaaactcaaagtcatca

SEQ ID NO: 1217894 - DNA, 25 bp, Homo sapien
agccattccgggacattgcattgat

SEQ ID NO: 1217895 - DNA, 25 bp, Homo sapien
ctggatgtctttgatcacatgtgcc

SEQ ID NO: 1217896 - DNA, 25 bp, Homo sapien
actggatgtctttgatcacatgtgc

SEQ ID NO: 1217897 - DNA, 25 bp, Homo sapien
aactggatgtctttgatcacatgtg

SEQ ID NO: 1217898 - DNA, 25 bp, Homo sapien
gatgtgactagaaggtagtatggct

SEQ ID NO: 1217899 - DNA, 25 bp, Homo sapien
gttgaagcctttaaagagcagatgg

SEQ ID NO: 1217900 - DNA, 25 bp, Homo sapien
cctttctgagatgtgactagaaggt

SEQ ID NO: 1217901 - DNA, 25 bp, Homo sapien
agatggtaatagtttagttgtcctt

SEQ ID NO: 1217902 - DNA, 25 bp, Homo sapien
cagacgaggaaccaatgagtcggta

SEQ ID NO: 1217903 - DNA, 25 bp, Homo sapien
tgatgcatgtggcagacgaggaacc

SEQ ID NO: 1217904 - DNA, 25 bp, Homo sapien
tgcatgtggcagacgaggaaccaat

SEQ ID NO: 1217905 - DNA, 25 bp, Homo sapien
tgtggcagacgaggaaccaatgagt

SEQ ID NO: 1217906 - DNA, 25 bp, Homo sapien
attagaatgtatcggtaaaagaaat

SEQ ID NO: 1217907 - DNA, 25 bp, Homo sapien
gagaaaaattagaatgtatcggtaa

SEQ ID NO: 1217908 - DNA, 25 bp, Homo sapien
gaatgtatcggtaaaagaaatagga

SEQ ID NO: 1217909 - DNA, 25 bp, Homo sapien
tccagagaaaaattagaatgtatcg

SEQ ID NO: 1217910 - DNA, 25 bp, Homo sapien
ttcagaccgtaatatacaactttat

SEQ ID NO: 1217911 - DNA, 25 bp, Homo sapien
gaccgtaatatacaactttatgaat

SEQ ID NO: 1217912 - DNA, 25 bp, Homo sapien
acattcagaccgtaatatacaactt

SEQ ID NO: 1217913 - DNA, 25 bp, Homo sapien
cagaccgtaatatacaactttatga

SEQ ID NO: 1217914 - DNA, 25 bp, Homo sapien
taaactggttagctcatacacaaca

SEQ ID NO: 1217915 - DNA, 25 bp, Homo sapien
ttccaaaggcctcactccctaatgt

SEQ ID NO: 1217916 - DNA, 25 bp, Homo sapien
tagttgtggaggctaaggagttcag

SEQ ID NO: 1217917 - DNA, 25 bp, Homo sapien
ttaggacgctaatcccattcgtgac

SEQ ID NO: 1217918 - DNA, 25 bp, Homo sapien
aaagaatgataactagaagatctcc

SEQ ID NO: 1217919 - DNA, 25 bp, Homo sapien
cataactgagagaacaagtggaggg

SEQ ID NO: 1217920 - DNA, 25 bp, Homo sapien
tctgggccataaaccatgtctcaaa

SEQ ID NO: 1217921 - DNA, 25 bp, Homo sapien
cacatgcttctccataactgagaga

SEQ ID NO: 1217922 - DNA, 25 bp, Homo sapien
catatgatgtttataacagacaagc

SEQ ID NO: 1217923 - DNA, 25 bp, Homo sapien
gaagggctgaaagtaaaagatttga

SEQ ID NO: 1217924 - DNA, 25 bp, Homo sapien
gctgatatagctatattaatgtaca

SEQ ID NO: 1217925 - DNA, 25 bp, Homo sapien
ttttaaggcaagaagtattatgaga

SEQ ID NO: 1217926 - DNA, 25 bp, Homo sapien
gcgatggtggggggtagcccacaaa

SEQ ID NO: 1217927 - DNA, 25 bp, Homo sapien
attggcgatggtggggggtagccca

SEQ ID NO: 1217928 - DNA, 25 bp, Homo sapien
cgatggtggggggtagcccacaaat

SEQ ID NO: 1217929 - DNA, 25 bp, Homo sapien
tggcgatggtggggggtagcccaca

SEQ ID NO: 1217930 - DNA, 25 bp, Homo sapien
agggccctttcatgccaaagccagg

SEQ ID NO: 1217931 - DNA, 25 bp, Homo sapien
actccagatgcccacttgatcatct

SEQ ID NO: 1217932 - DNA, 25 bp, Homo sapien
ttaggtataatgcactgaggggctg

SEQ ID NO: 1217933 - DNA, 25 bp, Homo sapien
cacttcacatgggagggccctttca

SEQ ID NO: 1217934 - DNA, 25 bp, Homo sapien
agtgcaaatacgtagatcctctgag

SEQ ID NO: 1217935 - DNA, 25 bp, Homo sapien
ggtgtgcagtgcaaatacgtagatc

SEQ ID NO: 1217936 - DNA, 25 bp, Homo sapien
tgcagtgcaaatacgtagatcctct

SEQ ID NO: 1217937 - DNA, 25 bp, Homo sapien
tgcaaatacgtagatcctctgaggt

SEQ ID NO: 1217938 - DNA, 25 bp, Homo sapien
tggccattaggaagttggcccagga

SEQ ID NO: 1217939 - DNA, 25 bp, Homo sapien
catggccattaggaagttggcccag

SEQ ID NO: 1217940 - DNA, 25 bp, Homo sapien
atggccattaggaagttggcccagg

SEQ ID NO: 1217941 - DNA, 25 bp, Homo sapien
cactggaacactgctattccaaagg

SEQ ID NO: 1217942 - DNA, 25 bp, Homo sapien
cacactggaacactgctattccaaa

SEQ ID NO: 1217943 - DNA, 25 bp, Homo sapien
acacagtaactagcagagctgcctt

SEQ ID NO: 1217944 - DNA, 25 bp, Homo sapien
actggaacactgctattccaaaggc

SEQ ID NO: 1217945 - DNA, 25 bp, Homo sapien
tagttgattctggatccaacatgga

SEQ ID NO: 1217946 - DNA, 25 bp, Homo sapien
atagttgattctggatccaacatgg

SEQ ID NO: 1217947 - DNA, 25 bp, Homo sapien
ttgattctggatccaacatggatgt

SEQ ID NO: 1217948 - DNA, 25 bp, Homo sapien
gttgattctggatccaacatggatg

SEQ ID NO: 1217949 - DNA, 25 bp, Homo sapien
tcttgcctgattggatacaaagtca

SEQ ID NO: 1217950 - DNA, 25 bp, Homo sapien
gcaggcaggaaaactacatgcatct

SEQ ID NO: 1217951 - DNA, 25 bp, Homo sapien
tgagcactatatctcaacagtgagc

SEQ ID NO: 1217952 - DNA, 25 bp, Homo sapien
tcaaactcaccaacgagattagctc

SEQ ID NO: 1217953 - DNA, 25 bp, Homo sapien
tgagcaccaacagctggaccatgcg

SEQ ID NO: 1217954 - DNA, 25 bp, Homo sapien
tgtgagcacctgacacttgacattt

SEQ ID NO: 1217955 - DNA, 25 bp, Homo sapien
ccaacagctggaccatgcgctgtga

SEQ ID NO: 1217956 - DNA, 25 bp, Homo sapien
tggaccatgcgctgtgagcacctga

SEQ ID NO: 1217957 - DNA, 25 bp, Homo sapien
tatggtctctgaagcctaggctggc

SEQ ID NO: 1217958 - DNA, 25 bp, Homo sapien
gcacttattccacaatgcaagatga

SEQ ID NO: 1217959 - DNA, 25 bp, Homo sapien
tatgctggacaccacaagcttcctt

SEQ ID NO: 1217960 - DNA, 25 bp, Homo sapien
tcatgccgcagggaggttcgcactt

SEQ ID NO: 1217961 - DNA, 25 bp, Homo sapien
cttttcctgctttctcacattttct

SEQ ID NO: 1217962 - DNA, 25 bp, Homo sapien
ttcctgctttctcacattttctact

SEQ ID NO: 1217963 - DNA, 25 bp, Homo sapien
tcctgctttctcacattttctactt

SEQ ID NO: 1217964 - DNA, 25 bp, Homo sapien
tttcctgctttctcacattttctac

SEQ ID NO: 1217965 - DNA, 25 bp, Homo sapien
aagagatatttctgctctaacttct

SEQ ID NO: 1217966 - DNA, 25 bp, Homo sapien
ttctgctctcactattgaaaagaga

SEQ ID NO: 1217967 - DNA, 25 bp, Homo sapien
atcttgacttcattgtggactgtac

SEQ ID NO: 1217968 - DNA, 25 bp, Homo sapien
tatttctgctctaacttctcctggt

SEQ ID NO: 1217969 - DNA, 25 bp, Homo sapien
cattggtgatgttggggggtagccc

SEQ ID NO: 1217970 - DNA, 25 bp, Homo sapien
gatgttggggggtagcccacaagga

SEQ ID NO: 1217971 - DNA, 25 bp, Homo sapien
ctaatgaaatatccattggtgatgt

SEQ ID NO: 1217972 - DNA, 25 bp, Homo sapien
taatgaaatatccattggtgatgtt

SEQ ID NO: 1217973 - DNA, 25 bp, Homo sapien
caagattgcagtggtaggtcaccac

SEQ ID NO: 1217974 - DNA, 25 bp, Homo sapien
tccaagattgcagtggtaggtcacc

SEQ ID NO: 1217975 - DNA, 25 bp, Homo sapien
aagattgcagtggtaggtcaccact

SEQ ID NO: 1217976 - DNA, 25 bp, Homo sapien
ccaagattgcagtggtaggtcacca

SEQ ID NO: 1217977 - DNA, 25 bp, Homo sapien
tgttaggtataatgcactgagggac

SEQ ID NO: 1217978 - DNA, 25 bp, Homo sapien
gctccagacgaccacttgatcatct

SEQ ID NO: 1217979 - DNA, 25 bp, Homo sapien
gcctggcattgcacacggtgcgggg

SEQ ID NO: 1217980 - DNA, 25 bp, Homo sapien
gggactgggccgctccagacgacca

SEQ ID NO: 1217981 - DNA, 25 bp, Homo sapien
ggttgcacaaggctaacatgggttg

SEQ ID NO: 1217982 - DNA, 25 bp, Homo sapien
catcagtagacaagatgagccatca

SEQ ID NO: 1217983 - DNA, 25 bp, Homo sapien
gattgcagctggtactttgccctga

SEQ ID NO: 1217984 - DNA, 25 bp, Homo sapien
cgctgctaagccagctattgtggca

SEQ ID NO: 1217985 - DNA, 25 bp, Homo sapien
tggagttattagtattggtggattc

SEQ ID NO: 1217986 - DNA, 25 bp, Homo sapien
tattagtattggtggattctccatc

SEQ ID NO: 1217987 - DNA, 25 bp, Homo sapien
ggtggattctccatctacatatttc

SEQ ID NO: 1217988 - DNA, 25 bp, Homo sapien
ctggatatccagtgtggagttatta

SEQ ID NO: 1217989 - DNA, 25 bp, Homo sapien
catcacaaacaaaggataccttagc

SEQ ID NO: 1217990 - DNA, 25 bp, Homo sapien
tcacaaacaaaggataccttagccc

SEQ ID NO: 1217991 - DNA, 25 bp, Homo sapien
tcatcacaaacaaaggataccttag

SEQ ID NO: 1217992 - DNA, 25 bp, Homo sapien
ttcatcacaaacaaaggatacctta

SEQ ID NO: 1217993 - DNA, 25 bp, Homo sapien
caggaatatctgttcttctcgccac

SEQ ID NO: 1217994 - DNA, 25 bp, Homo sapien
ggaatatctgttcttctcgccactc

SEQ ID NO: 1217995 - DNA, 25 bp, Homo sapien
gccaggaatatctgttcttctcgcc

SEQ ID NO: 1217996 - DNA, 25 bp, Homo sapien
ccaggaatatctgttcttctcgcca

SEQ ID NO: 1217997 - DNA, 25 bp, Homo sapien
actagcagacctgccttttaatcag

SEQ ID NO: 1217998 - DNA, 25 bp, Homo sapien
ctagcagacctgccttttaatcaga

SEQ ID NO: 1217999 - DNA, 25 bp, Homo sapien
gactagcagacctgccttttaatca

SEQ ID NO: 1218000 - DNA, 25 bp, Homo sapien
ctgtgtgtctcccattaaggatagc

SEQ ID NO: 1218001 - DNA, 25 bp, Homo sapien
gcggatggtgctctccccaatgagg

SEQ ID NO: 1218002 - DNA, 25 bp, Homo sapien
aggttgaaggtcatccctctgtctg

SEQ ID NO: 1218003 - DNA, 25 bp, Homo sapien
gatagctggaggatttggacaaaag

SEQ ID NO: 1218004 - DNA, 25 bp, Homo sapien
aattcctcagcaaacacttcataaa

SEQ ID NO: 1218005 - DNA, 25 bp, Homo sapien
cagaattcctcagcaaacacttcat

SEQ ID NO: 1218006 - DNA, 25 bp, Homo sapien
tgacagaattcctcagcaaacactt

SEQ ID NO: 1218007 - DNA, 25 bp, Homo sapien
tcagcaaacacttcataaaacttac

SEQ ID NO: 1218008 - DNA, 25 bp, Homo sapien
tactatgccatagagattcccttgg

SEQ ID NO: 1218009 - DNA, 25 bp, Homo sapien
gaagcatactccaggttataaccca

SEQ ID NO: 1218010 - DNA, 25 bp, Homo sapien
tgggcacaatcaccatctggaagca

SEQ ID NO: 1218011 - DNA, 25 bp, Homo sapien
taggcagatcacagacatgggctcg

SEQ ID NO: 1218012 - DNA, 25 bp, Homo sapien
tctgctttactctgggtttctatag

SEQ ID NO: 1218013 - DNA, 25 bp, Homo sapien
gtcccactacagattgccaatgctt

SEQ ID NO: 1218014 - DNA, 25 bp, Homo sapien
tagcattagtctcactcccacaggg

SEQ ID NO: 1218015 - DNA, 25 bp, Homo sapien
caaggtaattaaatgcgtggaaaat

SEQ ID NO: 1218016 - DNA, 25 bp, Homo sapien
aagatgatcgtaccaagtaaagtgc

SEQ ID NO: 1218017 - DNA, 25 bp, Homo sapien
ataaagatgatcgtaccaagtaaag

SEQ ID NO: 1218018 - DNA, 25 bp, Homo sapien
taaagatgatcgtaccaagtaaagt

SEQ ID NO: 1218019 - DNA, 25 bp, Homo sapien
aaagatgatcgtaccaagtaaagtg

SEQ ID NO: 1218020 - DNA, 25 bp, Homo sapien
tgccatgaggccctttatgcccttc

SEQ ID NO: 1218021 - DNA, 25 bp, Homo sapien
gatactctccactcatattctgtgt

SEQ ID NO: 1218022 - DNA, 25 bp, Homo sapien
gctccaggataaacggctcttctta

SEQ ID NO: 1218023 - DNA, 25 bp, Homo sapien
tacttgatgaccactacgatactct

SEQ ID NO: 1218024 - DNA, 25 bp, Homo sapien
attttggcatgattttgcagtggct

SEQ ID NO: 1218025 - DNA, 25 bp, Homo sapien
ttttggcatgattttgcagtggctg

SEQ ID NO: 1218026 - DNA, 25 bp, Homo sapien
ccctcactctctcctggcttgtagg

SEQ ID NO: 1218027 - DNA, 25 bp, Homo sapien
cctcactctctcctggcttgtaggg

SEQ ID NO: 1218028 - DNA, 25 bp, Homo sapien
catattttgccacagatgattcact

SEQ ID NO: 1218029 - DNA, 25 bp, Homo sapien
atattttgccacagatgattcactt

SEQ ID NO: 1218030 - DNA, 25 bp, Homo sapien
tccacgcgtgatccagtttataaca

SEQ ID NO: 1218031 - DNA, 25 bp, Homo sapien
tagacccaatttctaatggccggta

SEQ ID NO: 1218032 - DNA, 25 bp, Homo sapien
ggaatcatcatgttgggtagaccca

SEQ ID NO: 1218033 - DNA, 25 bp, Homo sapien
catacctaaggttgcctgcttggct

SEQ ID NO: 1218034 - DNA, 25 bp, Homo sapien
taaccgagatgtactgaacaatttc

SEQ ID NO: 1218035 - DNA, 25 bp, Homo sapien
tctgggttcaccaaaccatggaatt

SEQ ID NO: 1218036 - DNA, 25 bp, Homo sapien
ctggatgctcagtgtataaacctaa

SEQ ID NO: 1218037 - DNA, 25 bp, Homo sapien
cacagggttaacctatgagaggacg

SEQ ID NO: 1218038 - DNA, 25 bp, Homo sapien
aaagcacttcgacctaaaaatagag

SEQ ID NO: 1218039 - DNA, 25 bp, Homo sapien
aatgcctgctactggatcgtctcgg

SEQ ID NO: 1218040 - DNA, 25 bp, Homo sapien
gactggctcgccgtcatatttgtga

SEQ ID NO: 1218041 - DNA, 25 bp, Homo sapien
cattagtcaggcattattgggaaca

SEQ ID NO: 1218042 - DNA, 25 bp, Homo sapien
tgcaggacaggtgggcgtggcccga

SEQ ID NO: 1218043 - DNA, 25 bp, Homo sapien
aaagcatccagtgctgcaggacagg

SEQ ID NO: 1218044 - DNA, 25 bp, Homo sapien
caggacaggtgggcgtggcccgagc

SEQ ID NO: 1218045 - DNA, 25 bp, Homo sapien
agcatccagtgctgcaggacaggtg

SEQ ID NO: 1218046 - DNA, 25 bp, Homo sapien
gagcagggaagtcccttctgggtcc

SEQ ID NO: 1218047 - DNA, 25 bp, Homo sapien
tatgggacgcaacaatccccaactc

SEQ ID NO: 1218048 - DNA, 25 bp, Homo sapien
ccgagcagggaagtcccttctgggt

SEQ ID NO: 1218049 - DNA, 25 bp, Homo sapien
cttctgggtccagatatgggacgca

SEQ ID NO: 1218050 - DNA, 25 bp, Homo sapien
cgcggcgcggaagacgctgttattt

SEQ ID NO: 1218051 - DNA, 25 bp, Homo sapien
gcgcggcgcggaagacgctgttatt

SEQ ID NO: 1218052 - DNA, 25 bp, Homo sapien
agaagcaacccaggaaagcgccagg

SEQ ID NO: 1218053 - DNA, 25 bp, Homo sapien
agaaggagtacagcagcaacaccat

SEQ ID NO: 1218054 - DNA, 25 bp, Homo sapien
ggagaaggagtacagcagcaacacc

SEQ ID NO: 1218055 - DNA, 25 bp, Homo sapien
cggagaaggagtacagcagcaacac

SEQ ID NO: 1218056 - DNA, 25 bp, Homo sapien
gagaaggagtacagcagcaacacca

SEQ ID NO: 1218057 - DNA, 25 bp, Homo sapien
tgaacttctagcactaagcctattc

SEQ ID NO: 1218058 - DNA, 25 bp, Homo sapien
catgttttgtataggtgaggtctgc

SEQ ID NO: 1218059 - DNA, 25 bp, Homo sapien
caagctggagtatgatcagggctca

SEQ ID NO: 1218060 - DNA, 25 bp, Homo sapien
ggtgaggtctgcttatgctgtccag

SEQ ID NO: 1218061 - DNA, 25 bp, Homo sapien
ttaatagttaacaaggccaactcca

SEQ ID NO: 1218062 - DNA, 25 bp, Homo sapien
ggatctctcaggtaactatcacatg

SEQ ID NO: 1218063 - DNA, 25 bp, Homo sapien
gctggtagctacaactcctgctcaa

SEQ ID NO: 1218064 - DNA, 25 bp, Homo sapien
tagcttggcagtccagtagtgtcac

SEQ ID NO: 1218065 - DNA, 25 bp, Homo sapien
tagtatgggtggcaagaggaggtat

SEQ ID NO: 1218066 - DNA, 25 bp, Homo sapien
ttttacacttataatctactcgttc

SEQ ID NO: 1218067 - DNA, 25 bp, Homo sapien
tctgagacaggtagccatgtatgat

SEQ ID NO: 1218068 - DNA, 25 bp, Homo sapien
caagaggaggtatatagaagtatcc

SEQ ID NO: 1218069 - DNA, 25 bp, Homo sapien
aaactcgtaagtcccatttgcaggg

SEQ ID NO: 1218070 - DNA, 25 bp, Homo sapien
ttggccatttaaaggatcccgtata

SEQ ID NO: 1218071 - DNA, 25 bp, Homo sapien
aaaggatcccgtatatatggacatg

SEQ ID NO: 1218072 - DNA, 25 bp, Homo sapien
aaataaagtgcatctgataaccaaa

SEQ ID NO: 1218073 - DNA, 25 bp, Homo sapien
ctttaagttcacaatatagaatttc

SEQ ID NO: 1218074 - DNA, 25 bp, Homo sapien
ctgatcctttaagttcacaatatag

SEQ ID NO: 1218075 - DNA, 25 bp, Homo sapien
gatcctttaagttcacaatatagaa

SEQ ID NO: 1218076 - DNA, 25 bp, Homo sapien
tcctttaagttcacaatatagaatt

SEQ ID NO: 1218077 - DNA, 25 bp, Homo sapien
tcttacaaattaatcaggccaggtg

SEQ ID NO: 1218078 - DNA, 25 bp, Homo sapien
ggaaatagcctgagaccgtgtctta

SEQ ID NO: 1218079 - DNA, 25 bp, Homo sapien
gaaaatatgcttaactcggtgctag

SEQ ID NO: 1218080 - DNA, 25 bp, Homo sapien
tctttagagcaatacgaaaacggcc

SEQ ID NO: 1218081 - DNA, 25 bp, Homo sapien
gagcagcacgactccacactgaatt

SEQ ID NO: 1218082 - DNA, 25 bp, Homo sapien
taaatcgtgctctctccaataagtg

SEQ ID NO: 1218083 - DNA, 25 bp, Homo sapien
aaatggatctggtccaggtgcagga

SEQ ID NO: 1218084 - DNA, 25 bp, Homo sapien
ggtgcaggatcacaactataagtta

SEQ ID NO: 1218085 - DNA, 25 bp, Homo sapien
gaaatagggaactctagctagaact

SEQ ID NO: 1218086 - DNA, 25 bp, Homo sapien
catgcaggtacacagtagttcacac

SEQ ID NO: 1218087 - DNA, 25 bp, Homo sapien
tagaaaccaattatacaggaggagg

SEQ ID NO: 1218088 - DNA, 25 bp, Homo sapien
gaggaagcacatacacctgctttgt

SEQ ID NO: 1218089 - DNA, 25 bp, Homo sapien
cctgtgtgtgccacgtctcatcctg

SEQ ID NO: 1218090 - DNA, 25 bp, Homo sapien
aaccaggcagtggaacaacgccaac

SEQ ID NO: 1218091 - DNA, 25 bp, Homo sapien
gcctgtgtgtgccacgtctcatcct

SEQ ID NO: 1218092 - DNA, 25 bp, Homo sapien
aggcagtggaacaacgccaacccca

SEQ ID NO: 1218093 - DNA, 25 bp, Homo sapien
tccaacatgtgtgcctaatagcttt

SEQ ID NO: 1218094 - DNA, 25 bp, Homo sapien
tacatttcggcctttccaataggta

SEQ ID NO: 1218095 - DNA, 25 bp, Homo sapien
ccttactgtactgggtgggatctcc

SEQ ID NO: 1218096 - DNA, 25 bp, Homo sapien
tggtaagagtggacatcctcactgt

SEQ ID NO: 1218097 - DNA, 25 bp, Homo sapien
tggtagtttttaccaaactactgca

SEQ ID NO: 1218098 - DNA, 25 bp, Homo sapien
cctgccctcctaaatgtaatacggg

SEQ ID NO: 1218099 - DNA, 25 bp, Homo sapien
ctgccctcctaaatgtaatacgggt

SEQ ID NO: 1218100 - DNA, 25 bp, Homo sapien
ttccattttcgactactggaaatcg

SEQ ID NO: 1218101 - DNA, 25 bp, Homo sapien
cattttcgactactggaaatcgaca

SEQ ID NO: 1218102 - DNA, 25 bp, Homo sapien
ccaaatcctgatatctgttttccat

SEQ ID NO: 1218103 - DNA, 25 bp, Homo sapien
gactactggaaatcgacatttgacc

SEQ ID NO: 1218104 - DNA, 25 bp, Homo sapien
tcacagacaattgtgtcgctgccat

SEQ ID NO: 1218105 - DNA, 25 bp, Homo sapien
taaaaacccttatcgcattcaaaca

SEQ ID NO: 1218106 - DNA, 25 bp, Homo sapien
gctgccatcgaggtaaaaaccctta

SEQ ID NO: 1218107 - DNA, 25 bp, Homo sapien
tgggggatcccaagtactgttactg

SEQ ID NO: 1218108 - DNA, 25 bp, Homo sapien
tatgccattgttgacttacttagat

SEQ ID NO: 1218109 - DNA, 25 bp, Homo sapien
caaccacttgggagttattgctctc

SEQ ID NO: 1218110 - DNA, 25 bp, Homo sapien
tgaatttcgtgtcattcatctggca

SEQ ID NO: 1218111 - DNA, 25 bp, Homo sapien
cataacgtgctaagaaccctggaaa

SEQ ID NO: 1218112 - DNA, 25 bp, Homo sapien
agctggaggttttgtactagatgga

SEQ ID NO: 1218113 - DNA, 25 bp, Homo sapien
ggttttgtactagatggaggcagca

SEQ ID NO: 1218114 - DNA, 25 bp, Homo sapien
aaagctggaggttttgtactagatg

SEQ ID NO: 1218115 - DNA, 25 bp, Homo sapien
ctgaatgactcaaagctggaggttt

SEQ ID NO: 1218116 - DNA, 25 bp, Homo sapien
ggagttattgctggcaatttctcca

SEQ ID NO: 1218117 - DNA, 25 bp, Homo sapien
agaagacatataaggaagaagctac

SEQ ID NO: 1218118 - DNA, 25 bp, Homo sapien
ggaattccttatatcttgtaacata

SEQ ID NO: 1218119 - DNA, 25 bp, Homo sapien
tgtagattggaccaaacacttggga

SEQ ID NO: 1218120 - DNA, 25 bp, Homo sapien
acgctggagattttgtagtggaaga

SEQ ID NO: 1218121 - DNA, 25 bp, Homo sapien
actggacgctggagattttgtagtg

SEQ ID NO: 1218122 - DNA, 25 bp, Homo sapien
tggacgctggagattttgtagtgga

SEQ ID NO: 1218123 - DNA, 25 bp, Homo sapien
gacgctggagattttgtagtggaag

SEQ ID NO: 1218124 - DNA, 25 bp, Homo sapien
tcatattggctagctctaagagctt

SEQ ID NO: 1218125 - DNA, 25 bp, Homo sapien
taagtgtaggataagtcatattggc

SEQ ID NO: 1218126 - DNA, 25 bp, Homo sapien
gactcaaactagttgcattccagga

SEQ ID NO: 1218127 - DNA, 25 bp, Homo sapien
caaactcagtaaaggtgtcaacaga

SEQ ID NO: 1218128 - DNA, 25 bp, Homo sapien
ttgagttgctattgccagataaaac

SEQ ID NO: 1218129 - DNA, 25 bp, Homo sapien
agttgctattgccagataaaactgc

SEQ ID NO: 1218130 - DNA, 25 bp, Homo sapien
ttgctattgccagataaaactgccc

SEQ ID NO: 1218131 - DNA, 25 bp, Homo sapien
tgagttgctattgccagataaaact

SEQ ID NO: 1218132 - DNA, 25 bp, Homo sapien
tcataagcacagtggttgaccagga

SEQ ID NO: 1218133 - DNA, 25 bp, Homo sapien
catgtgagttaagcccggatgcctc

SEQ ID NO: 1218134 - DNA, 25 bp, Homo sapien
catatacccactaggagcatgtgag

SEQ ID NO: 1218135 - DNA, 25 bp, Homo sapien
ggaggctaccagttaccaagctctt

SEQ ID NO: 1218136 - DNA, 25 bp, Homo sapien
agtttgattttataaattcaccagg

SEQ ID NO: 1218137 - DNA, 25 bp, Homo sapien
ttacaaactttgcaattccacatct

SEQ ID NO: 1218138 - DNA, 25 bp, Homo sapien
cacatcttagaatttaacctacata

SEQ ID NO: 1218139 - DNA, 25 bp, Homo sapien
aactttgcaattccacatcttagaa

SEQ ID NO: 1218140 - DNA, 25 bp, Homo sapien
tttgagactggaggcttgtaagtag

SEQ ID NO: 1218141 - DNA, 25 bp, Homo sapien
agactggaggcttgtaagtaggcct

SEQ ID NO: 1218142 - DNA, 25 bp, Homo sapien
actggaggcttgtaagtaggcctag

SEQ ID NO: 1218143 - DNA, 25 bp, Homo sapien
taatttgagactggaggcttgtaag

SEQ ID NO: 1218144 - DNA, 25 bp, Homo sapien
cctttgttaaaggttcccactgctg

SEQ ID NO: 1218145 - DNA, 25 bp, Homo sapien
tacttcatatctattaggacggtct

SEQ ID NO: 1218146 - DNA, 25 bp, Homo sapien
gatgcccatgccttgatattagact

SEQ ID NO: 1218147 - DNA, 25 bp, Homo sapien
ttgggtcattatggctctgtcctca

SEQ ID NO: 1218148 - DNA, 25 bp, Homo sapien
gcatatatggtcaaacggttttcaa

SEQ ID NO: 1218149 - DNA, 25 bp, Homo sapien
gagacctcggaaataaacccctgca

SEQ ID NO: 1218150 - DNA, 25 bp, Homo sapien
ttggatgtgactctaaaagcccagg

SEQ ID NO: 1218151 - DNA, 25 bp, Homo sapien
tcaacaagcgtgacaaggaacagtc

SEQ ID NO: 1218152 - DNA, 25 bp, Homo sapien
aggaacaagacagggtgtccatgtt

SEQ ID NO: 1218153 - DNA, 25 bp, Homo sapien
gtttgccacttctatctgacatagg

SEQ ID NO: 1218154 - DNA, 25 bp, Homo sapien
gaagaaataaaattcgctctgtttg

SEQ ID NO: 1218155 - DNA, 25 bp, Homo sapien
taaatgctttagagttgacctgaaa

SEQ ID NO: 1218156 - DNA, 25 bp, Homo sapien
aaactgtcaagtattccttcctcag

SEQ ID NO: 1218157 - DNA, 25 bp, Homo sapien
attccttcctcaggtttaggatatc

SEQ ID NO: 1218158 - DNA, 25 bp, Homo sapien
ccaaactgtcaagtattccttcctc

SEQ ID NO: 1218159 - DNA, 25 bp, Homo sapien
gtattccttcctcaggtttaggata

SEQ ID NO: 1218160 - DNA, 25 bp, Homo sapien
cattgtgtaaactgcgtaagcctac

SEQ ID NO: 1218161 - DNA, 25 bp, Homo sapien
cattggcctatatcacaactgcact

SEQ ID NO: 1218162 - DNA, 25 bp, Homo sapien
caaggatcctatgtttgggcacctc

SEQ ID NO: 1218163 - DNA, 25 bp, Homo sapien
caacagatttacttggaccacagat

SEQ ID NO: 1218164 - DNA, 25 bp, Homo sapien
ccacatcaggttatttagcggtaaa

SEQ ID NO: 1218165 - DNA, 25 bp, Homo sapien
cccatgagagttggtttagttcaac

SEQ ID NO: 1218166 - DNA, 25 bp, Homo sapien
tagcatgactgctagggcatccagg

SEQ ID NO: 1218167 - DNA, 25 bp, Homo sapien
ttgtgaaactcttaatgggaacctc

SEQ ID NO: 1218168 - DNA, 25 bp, Homo sapien
acaatcacagcaatgacccaaacat

SEQ ID NO: 1218169 - DNA, 25 bp, Homo sapien
tatggcaataacaatcacagcaatg

SEQ ID NO: 1218170 - DNA, 25 bp, Homo sapien
ctatggcaataacaatcacagcaat

SEQ ID NO: 1218171 - DNA, 25 bp, Homo sapien
ataacaatcacagcaatgacccaaa

SEQ ID NO: 1218172 - DNA, 25 bp, Homo sapien
gaaacaaatgacatataattctgaa

SEQ ID NO: 1218173 - DNA, 25 bp, Homo sapien
agattcaacatctagcagaagaaat

SEQ ID NO: 1218174 - DNA, 25 bp, Homo sapien
ggaaacaaatgacatataattctga

SEQ ID NO: 1218175 - DNA, 25 bp, Homo sapien
ccaagattcaacatctagcagaaga

SEQ ID NO: 1218176 - DNA, 25 bp, Homo sapien
ctgtacgggacaacacaaattactg

SEQ ID NO: 1218177 - DNA, 25 bp, Homo sapien
ctttcttcttcctcctttgaagata

SEQ ID NO: 1218178 - DNA, 25 bp, Homo sapien
tttcttcttcctcctttgaagatat

SEQ ID NO: 1218179 - DNA, 25 bp, Homo sapien
cctttcttcttcctcctttgaagat

SEQ ID NO: 1218180 - DNA, 25 bp, Homo sapien
aaaagatagcatgcaatacagatta

SEQ ID NO: 1218181 - DNA, 25 bp, Homo sapien
aagctgcacaaaagcatgttaagta

SEQ ID NO: 1218182 - DNA, 25 bp, Homo sapien
atacagattacaaactgaagctgca

SEQ ID NO: 1218183 - DNA, 25 bp, Homo sapien
gcatgttaagtataagaaggaccaa

SEQ ID NO: 1218184 - DNA, 25 bp, Homo sapien
gacttagcccaaacctgatgatcag

SEQ ID NO: 1218185 - DNA, 25 bp, Homo sapien
cataaaaccatgagtaccaaaagtc

SEQ ID NO: 1218186 - DNA, 25 bp, Homo sapien
tgtgttccaggattcattctaagtc

SEQ ID NO: 1218187 - DNA, 25 bp, Homo sapien
gcatatcgtgttccattaatacaag

SEQ ID NO: 1218188 - DNA, 25 bp, Homo sapien
cacatggatgaggaatcttaaaaac

SEQ ID NO: 1218189 - DNA, 25 bp, Homo sapien
tcagtagtgggcaacaccctggtca

SEQ ID NO: 1218190 - DNA, 25 bp, Homo sapien
ccaggcccggctggaaatctttgtt

SEQ ID NO: 1218191 - DNA, 25 bp, Homo sapien
ctttaacagatttccaggtgactaa

SEQ ID NO: 1218192 - DNA, 25 bp, Homo sapien
gagattatttgtgcctgctagcctg

SEQ ID NO: 1218193 - DNA, 25 bp, Homo sapien
ctaaggccacaacagccaatctggg

SEQ ID NO: 1218194 - DNA, 25 bp, Homo sapien
gaagtgcctccagacattttatagt

SEQ ID NO: 1218195 - DNA, 25 bp, Homo sapien
gctgcagaagagtaattacgttccc

SEQ ID NO: 1218196 - DNA, 25 bp, Homo sapien
tatatgccccaattacctgaactga

SEQ ID NO: 1218197 - DNA, 25 bp, Homo sapien
tattacatggcgtctcatatttctg

SEQ ID NO: 1218198 - DNA, 25 bp, Homo sapien
gatgtctctggacttttacattaag

SEQ ID NO: 1218199 - DNA, 25 bp, Homo sapien
tgttttcaacctgaggagacatcgt

SEQ ID NO: 1218200 - DNA, 25 bp, Homo sapien
gtgggtctcatcagttaggtatgtg

SEQ ID NO: 1218201 - DNA, 25 bp, Homo sapien
tgtgggtctcatcagttaggtatgt

SEQ ID NO: 1218202 - DNA, 25 bp, Homo sapien
gataaaagcaaacctttctctcatc

SEQ ID NO: 1218203 - DNA, 25 bp, Homo sapien
atgataaaagcaaacctttctctca

SEQ ID NO: 1218204 - DNA, 25 bp, Homo sapien
ttaatgataaaagcaaacctttctc

SEQ ID NO: 1218205 - DNA, 25 bp, Homo sapien
taaaagcaaacctttctctcatctc

SEQ ID NO: 1218206 - DNA, 25 bp, Homo sapien
tataggactgggtaggcccagaccg

SEQ ID NO: 1218207 - DNA, 25 bp, Homo sapien
ccaagggtttaaggcaatgcaatcc

SEQ ID NO: 1218208 - DNA, 25 bp, Homo sapien
tagtggcctcagagcacaagagtag

SEQ ID NO: 1218209 - DNA, 25 bp, Homo sapien
cactagaggttttggaatgtatccc

SEQ ID NO: 1218210 - DNA, 25 bp, Homo sapien
gaaacatttattggatataacaatg

SEQ ID NO: 1218211 - DNA, 25 bp, Homo sapien
caaaatattaactacagcattcatt

SEQ ID NO: 1218212 - DNA, 25 bp, Homo sapien
tatcttcaaatgtttacagataccc

SEQ ID NO: 1218213 - DNA, 25 bp, Homo sapien
ggatataacaatgaagctattttga

SEQ ID NO: 1218214 - DNA, 25 bp, Homo sapien
cgcatggctattgaactggacagca

SEQ ID NO: 1218215 - DNA, 25 bp, Homo sapien
gacattggactagccactttggaag

SEQ ID NO: 1218216 - DNA, 25 bp, Homo sapien
ggaagtccttagcagtcacgcatgg

SEQ ID NO: 1218217 - DNA, 25 bp, Homo sapien
tatttactagtatgtgtgccacagc

SEQ ID NO: 1218218 - DNA, 25 bp, Homo sapien
aatatagtaatgagccaccaacctg

SEQ ID NO: 1218219 - DNA, 25 bp, Homo sapien
ggagacaaacgcatgctttcctgat

SEQ ID NO: 1218220 - DNA, 25 bp, Homo sapien
ccaatgggaaagactggagacaaac

SEQ ID NO: 1218221 - DNA, 25 bp, Homo sapien
catgtattccactaagagtctccta

SEQ ID NO: 1218222 - DNA, 25 bp, Homo sapien
tctggtaagtggcatattcagctcc

SEQ ID NO: 1218223 - DNA, 25 bp, Homo sapien
taagtggcatattcagctccaccat

SEQ ID NO: 1218224 - DNA, 25 bp, Homo sapien
ctctgctggagtggttgatttagtc

SEQ ID NO: 1218225 - DNA, 25 bp, Homo sapien
gagtggttgatttagtctggtaagt

SEQ ID NO: 1218226 - DNA, 25 bp, Homo sapien
tttaatagagtcaaaagatgaactg

SEQ ID NO: 1218227 - DNA, 25 bp, Homo sapien
taatagagtcaaaagatgaactggc

SEQ ID NO: 1218228 - DNA, 25 bp, Homo sapien
atagagtcaaaagatgaactggcaa

SEQ ID NO: 1218229 - DNA, 25 bp, Homo sapien
agagtcaaaagatgaactggcaaac

SEQ ID NO: 1218230 - DNA, 25 bp, Homo sapien
gaagttaccttcctgagatacatgg

SEQ ID NO: 1218231 - DNA, 25 bp, Homo sapien
tgaagtggcactcctgttatggctg

SEQ ID NO: 1218232 - DNA, 25 bp, Homo sapien
tattagctaagccacagttgcactc

SEQ ID NO: 1218233 - DNA, 25 bp, Homo sapien
tatttaagggaaagcaggcaatctg

SEQ ID NO: 1218234 - DNA, 25 bp, Homo sapien
atttacagagcactataaacatgtc

SEQ ID NO: 1218235 - DNA, 25 bp, Homo sapien
ggaaaggaacatttacagagcacta

SEQ ID NO: 1218236 - DNA, 25 bp, Homo sapien
caaaggaaaggaacatttacagagc

SEQ ID NO: 1218237 - DNA, 25 bp, Homo sapien
catttacagagcactataaacatgt

SEQ ID NO: 1218238 - DNA, 25 bp, Homo sapien
catgtgaaacgggtataaacttcaa

SEQ ID NO: 1218239 - DNA, 25 bp, Homo sapien
gcttcttagtaattgcgacattctt

SEQ ID NO: 1218240 - DNA, 25 bp, Homo sapien
tgaatatacttcaattaggtttcta

SEQ ID NO: 1218241 - DNA, 25 bp, Homo sapien
tttggttgaatatacttcaattagg

SEQ ID NO: 1218242 - DNA, 25 bp, Homo sapien
aaatgagcaataaagaacctctatc

SEQ ID NO: 1218243 - DNA, 25 bp, Homo sapien
gaacctctatcagtgagacttctca

SEQ ID NO: 1218244 - DNA, 25 bp, Homo sapien
tcttgaattcatatacgcttctgtc

SEQ ID NO: 1218245 - DNA, 25 bp, Homo sapien
aaacttccagagaaaactggtctct

SEQ ID NO: 1218246 - DNA, 25 bp, Homo sapien
tgcaagttggactggaaaatcccac

SEQ ID NO: 1218247 - DNA, 25 bp, Homo sapien
tcaagactcatgcaagttggactgg

SEQ ID NO: 1218248 - DNA, 25 bp, Homo sapien
gactcatgcaagttggactggaaaa

SEQ ID NO: 1218249 - DNA, 25 bp, Homo sapien
tcatgcaagttggactggaaaatcc

SEQ ID NO: 1218250 - DNA, 25 bp, Homo sapien
tcaagcttgtaggatcttcaggaag

SEQ ID NO: 1218251 - DNA, 25 bp, Homo sapien
cctaggtgttgcaaatacagacgac

SEQ ID NO: 1218252 - DNA, 25 bp, Homo sapien
taggaagccatttctaagcccaacc

SEQ ID NO: 1218253 - DNA, 25 bp, Homo sapien
gatggcaaatcagccacctaggaag

SEQ ID NO: 1218254 - DNA, 25 bp, Homo sapien
caaggaactggtgctcaactaaaca

SEQ ID NO: 1218255 - DNA, 25 bp, Homo sapien
tcgaagcctcatgccaactctgggc

SEQ ID NO: 1218256 - DNA, 25 bp, Homo sapien
gagggatgctccctactgaatggga

SEQ ID NO: 1218257 - DNA, 25 bp, Homo sapien
tgaagtaggttacagccagccagac

SEQ ID NO: 1218258 - DNA, 25 bp, Homo sapien
gggcacccgaaatcagacttgccac

SEQ ID NO: 1218259 - DNA, 25 bp, Homo sapien
catcagtctgctcttagaggatgcc

SEQ ID NO: 1218260 - DNA, 25 bp, Homo sapien
attttgtccacatcgacaccatcag

SEQ ID NO: 1218261 - DNA, 25 bp, Homo sapien
gatgccctggagtattcggcgttga

SEQ ID NO: 1218262 - DNA, 25 bp, Homo sapien
ccagcatgaatgtgttcgtagggcc

SEQ ID NO: 1218263 - DNA, 25 bp, Homo sapien
tgttcgagaagtccagggaagaact

SEQ ID NO: 1218264 - DNA, 25 bp, Homo sapien
tatttctgttgactcctagcagcca

SEQ ID NO: 1218265 - DNA, 25 bp, Homo sapien
tcttgccacttgagtctgttcgaga

SEQ ID NO: 1218266 - DNA, 25 bp, Homo sapien
tggaagctggtttcacatggtggct

SEQ ID NO: 1218267 - DNA, 25 bp, Homo sapien
tcacatggtggcttagatttttcca

SEQ ID NO: 1218268 - DNA, 25 bp, Homo sapien
agaggctgggtcttccgattgaatc

SEQ ID NO: 1218269 - DNA, 25 bp, Homo sapien
aagaagatatttctcctcagggcag

SEQ ID NO: 1218270 - DNA, 25 bp, Homo sapien
tttgtagtgactggtgtgaagttaa

SEQ ID NO: 1218271 - DNA, 25 bp, Homo sapien
taatttgtagtgactggtgtgaagt

SEQ ID NO: 1218272 - DNA, 25 bp, Homo sapien
tgactggtgtgaagttaaatagaat

SEQ ID NO: 1218273 - DNA, 25 bp, Homo sapien
tataataatttgtagtgactggtgt

SEQ ID NO: 1218274 - DNA, 25 bp, Homo sapien
cacagccacatgctggggaaagacg

SEQ ID NO: 1218275 - DNA, 25 bp, Homo sapien
aggctagcaagtcccccgtgggctg

SEQ ID NO: 1218276 - DNA, 25 bp, Homo sapien
gcttgttgcaggttcatcttcagtg

SEQ ID NO: 1218277 - DNA, 25 bp, Homo sapien
tagagcctagcgctggtgtcagaat

SEQ ID NO: 1218278 - DNA, 25 bp, Homo sapien
cctgggaaatgcagtggtccctggg

SEQ ID NO: 1218279 - DNA, 25 bp, Homo sapien
tgtgggtttggaggatgtgattccc

SEQ ID NO: 1218280 - DNA, 25 bp, Homo sapien
gtgggtttggaggatgtgattccca

SEQ ID NO: 1218281 - DNA, 25 bp, Homo sapien
tgggtttggaggatgtgattcccac

SEQ ID NO: 1218282 - DNA, 25 bp, Homo sapien
tgatttgggctagacttctgggaga

SEQ ID NO: 1218283 - DNA, 25 bp, Homo sapien
tgccaggatctagagcaggcatttc

SEQ ID NO: 1218284 - DNA, 25 bp, Homo sapien
tttacagcggatttagccatgatgg

SEQ ID NO: 1218285 - DNA, 25 bp, Homo sapien
tatttcctgaatgcatccttggctc

SEQ ID NO: 1218286 - DNA, 25 bp, Homo sapien
gatgctcaatgctggccgtaactgg

SEQ ID NO: 1218287 - DNA, 25 bp, Homo sapien
caagcctgcaaggtgtactgtcccc

SEQ ID NO: 1218288 - DNA, 25 bp, Homo sapien
tgtgttccccaaataggctctgtct

SEQ ID NO: 1218289 - DNA, 25 bp, Homo sapien
aacagtgggccttgagttcttgacc

SEQ ID NO: 1218290 - DNA, 25 bp, Homo sapien
tgctggtctccgacatggtggcgtt

SEQ ID NO: 1218291 - DNA, 25 bp, Homo sapien
tgggtctctggcctaggacgagcac

SEQ ID NO: 1218292 - DNA, 25 bp, Homo sapien
ttacataactgagggcatggcacgc

SEQ ID NO: 1218293 - DNA, 25 bp, Homo sapien
tccctgggagggctaactcttgtct

SEQ ID NO: 1218294 - DNA, 25 bp, Homo sapien
tactactacgtggtgcttggaaagg

SEQ ID NO: 1218295 - DNA, 25 bp, Homo sapien
tgaccccaggaaattgctcgaaact

SEQ ID NO: 1218296 - DNA, 25 bp, Homo sapien
caacagatttgcattgacgtccggg

SEQ ID NO: 1218297 - DNA, 25 bp, Homo sapien
ctcgaaaaatcagggtcccggctct

SEQ ID NO: 1218298 - DNA, 25 bp, Homo sapien
aagaatgctagggagatgggtatgc

SEQ ID NO: 1218299 - DNA, 25 bp, Homo sapien
tgctagggagatgggtatgcagagg

SEQ ID NO: 1218300 - DNA, 25 bp, Homo sapien
aatgctagggagatgggtatgcaga

SEQ ID NO: 1218301 - DNA, 25 bp, Homo sapien
agggagatgggtatgcagagggttg

SEQ ID NO: 1218302 - DNA, 25 bp, Homo sapien
ttggaaagttgtttaccttgcgctc

SEQ ID NO: 1218303 - DNA, 25 bp, Homo sapien
tccatgttggctcccttccagttca

SEQ ID NO: 1218304 - DNA, 25 bp, Homo sapien
catcattaactaagtgactgagctg

SEQ ID NO: 1218305 - DNA, 25 bp, Homo sapien
taaatgtcatccttttggcgttgga

SEQ ID NO: 1218306 - DNA, 25 bp, Homo sapien
gtttgtcactgcgtagttgggaaaa

SEQ ID NO: 1218307 - DNA, 25 bp, Homo sapien
ggtaaagctggtaggtttgtcactg

SEQ ID NO: 1218308 - DNA, 25 bp, Homo sapien
tgcatctggttaggagctctatggg

SEQ ID NO: 1218309 - DNA, 25 bp, Homo sapien
gaatggtgacgcagtcactgttgca

SEQ ID NO: 1218310 - DNA, 25 bp, Homo sapien
gcttgctaagtaaacatcctcccat

SEQ ID NO: 1218311 - DNA, 25 bp, Homo sapien
aaactgcttccttgtaggctcgagc

SEQ ID NO: 1218312 - DNA, 25 bp, Homo sapien
ggctcgagcgtgcttgctaagtaaa

SEQ ID NO: 1218313 - DNA, 25 bp, Homo sapien
tccttgtaggctcgagcgtgcttgc

SEQ ID NO: 1218314 - DNA, 25 bp, Homo sapien
ttctgtcttttaaggcagagctgtt

SEQ ID NO: 1218315 - DNA, 25 bp, Homo sapien
tccaaagtatgtggcgttggagaaa

SEQ ID NO: 1218316 - DNA, 25 bp, Homo sapien
ggcgttggagaaatcttctaagtgt

SEQ ID NO: 1218317 - DNA, 25 bp, Homo sapien
tcttctaagtgtaatcttctgtctt

SEQ ID NO: 1218318 - DNA, 25 bp, Homo sapien
gaagaacaatcatggcaaacgtggg

SEQ ID NO: 1218319 - DNA, 25 bp, Homo sapien
aggggttaaactgttggcatctgga

SEQ ID NO: 1218320 - DNA, 25 bp, Homo sapien
gggcctgcaggattgctgtctatct

SEQ ID NO: 1218321 - DNA, 25 bp, Homo sapien
cttggctctaaattgtaacaagggg

SEQ ID NO: 1218322 - DNA, 25 bp, Homo sapien
tccatctaggaagcgttagcttcca

SEQ ID NO: 1218323 - DNA, 25 bp, Homo sapien
acatcttccatctaggaagcgttag

SEQ ID NO: 1218324 - DNA, 25 bp, Homo sapien
taggaagcgttagcttccaggatgg

SEQ ID NO: 1218325 - DNA, 25 bp, Homo sapien
caggatggcctcttggggaaataga

SEQ ID NO: 1218326 - DNA, 25 bp, Homo sapien
tgagaaagtggatgcctcgtctgct

SEQ ID NO: 1218327 - DNA, 25 bp, Homo sapien
acagatattgggctgaaaactgaga

SEQ ID NO: 1218328 - DNA, 25 bp, Homo sapien
cacagatattgggctgaaaactgag

SEQ ID NO: 1218329 - DNA, 25 bp, Homo sapien
aagtggatgcctcgtctgctcccat

SEQ ID NO: 1218330 - DNA, 25 bp, Homo sapien
tccgtagcttcagcttggacttcct

SEQ ID NO: 1218331 - DNA, 25 bp, Homo sapien
gagcttgtctttgagtccgtagctt

SEQ ID NO: 1218332 - DNA, 25 bp, Homo sapien
gcttccaggcccagagttacttcag

SEQ ID NO: 1218333 - DNA, 25 bp, Homo sapien
ttccaggcccagagttacttcaggg

SEQ ID NO: 1218334 - DNA, 25 bp, Homo sapien
ccacttgtcgtacctcaaatagagg

SEQ ID NO: 1218335 - DNA, 25 bp, Homo sapien
gcttacagcttgttgggtggccagc

SEQ ID NO: 1218336 - DNA, 25 bp, Homo sapien
ttaggacctttaatctgtaagaggc

SEQ ID NO: 1218337 - DNA, 25 bp, Homo sapien
tgcagagtgttgacccacttgtcgt

SEQ ID NO: 1218338 - DNA, 25 bp, Homo sapien
tatctgagatgtatgcttctcctcc

SEQ ID NO: 1218339 - DNA, 25 bp, Homo sapien
aaagtattggtgcagatatctgaga

SEQ ID NO: 1218340 - DNA, 25 bp, Homo sapien
tcttccatcagtttacatgctgaaa

SEQ ID NO: 1218341 - DNA, 25 bp, Homo sapien
gatgcattgtttgatgtcttccatc

SEQ ID NO: 1218342 - DNA, 25 bp, Homo sapien
tgaaagcttttgtgatattagagaa

SEQ ID NO: 1218343 - DNA, 25 bp, Homo sapien
caacaaagtccagtagcagatttct

SEQ ID NO: 1218344 - DNA, 25 bp, Homo sapien
tactgttggctgtgcatccttctgc

SEQ ID NO: 1218345 - DNA, 25 bp, Homo sapien
tctgtggtcctgttactgttggctg

SEQ ID NO: 1218346 - DNA, 25 bp, Homo sapien
gtaaaagcaatcacccttactgtgg

SEQ ID NO: 1218347 - DNA, 25 bp, Homo sapien
tattgccccttagaggctgtagtcc

SEQ ID NO: 1218348 - DNA, 25 bp, Homo sapien
taatgtaagctacacatgagggtca

SEQ ID NO: 1218349 - DNA, 25 bp, Homo sapien
tgttaagtcacatcatgctctgctg

SEQ ID NO: 1218350 - DNA, 25 bp, Homo sapien
atgacgatgagtgcctttaagtgac

SEQ ID NO: 1218351 - DNA, 25 bp, Homo sapien
ttggatgtatgacgatgagtgcctt

SEQ ID NO: 1218352 - DNA, 25 bp, Homo sapien
gatgtatgacgatgagtgcctttaa

SEQ ID NO: 1218353 - DNA, 25 bp, Homo sapien
acgatgagtgcctttaagtgactgc

SEQ ID NO: 1218354 - DNA, 25 bp, Homo sapien
taggaagtgagacacgttggtagca

SEQ ID NO: 1218355 - DNA, 25 bp, Homo sapien
tctgctcagataggaagtgagacac

SEQ ID NO: 1218356 - DNA, 25 bp, Homo sapien
taaagttctcgctgctgcagaacag

SEQ ID NO: 1218357 - DNA, 25 bp, Homo sapien
gggcagttctgctcagataggaagt

SEQ ID NO: 1218358 - DNA, 25 bp, Homo sapien
ccaaggctcgaggtattaatgcgta

SEQ ID NO: 1218359 - DNA, 25 bp, Homo sapien
ctggtgcgccaaggctcgaggtatt

SEQ ID NO: 1218360 - DNA, 25 bp, Homo sapien
ttctcctctccgcagtgggcgtggt

SEQ ID NO: 1218361 - DNA, 25 bp, Homo sapien
gagtttgattaagacctggcccaaa

SEQ ID NO: 1218362 - DNA, 25 bp, Homo sapien
cgcgctccggtcgcgccccaccccg

SEQ ID NO: 1218363 - DNA, 25 bp, Homo sapien
gccgcgctccggtcgcgccccaccc

SEQ ID NO: 1218364 - DNA, 25 bp, Homo sapien
tccctggggacgatgcccagggccc

SEQ ID NO: 1218365 - DNA, 25 bp, Homo sapien
ggctccctggggacgatgcccaggg

SEQ ID NO: 1218366 - DNA, 25 bp, Homo sapien
tgcagcggggcgcttggcgggcggg

SEQ ID NO: 1218367 - DNA, 25 bp, Homo sapien
cggaaggccgccgaggtaagagccg

SEQ ID NO: 1218368 - DNA, 25 bp, Homo sapien
ggagagcctgtttgcgcagtacccc

SEQ ID NO: 1218369 - DNA, 25 bp, Homo sapien
ggctgcgcatctcgggcctgcagcg

SEQ ID NO: 1218370 - DNA, 25 bp, Homo sapien
gggacgccgagcgtgggaagcgcgg

SEQ ID NO: 1218371 - DNA, 25 bp, Homo sapien
ttttcccggacacgagcgtgcagcg

SEQ ID NO: 1218372 - DNA, 25 bp, Homo sapien
cagattttcccggacacgagcgtgc

SEQ ID NO: 1218373 - DNA, 25 bp, Homo sapien
gctgcagattttcccggacacgagc

SEQ ID NO: 1218374 - DNA, 25 bp, Homo sapien
ccctggaagaaatatggcgaggcaa

SEQ ID NO: 1218375 - DNA, 25 bp, Homo sapien
tcttgcaaagactctggagtcccct

SEQ ID NO: 1218376 - DNA, 25 bp, Homo sapien
tctgccccgagtctagcgacggcca

SEQ ID NO: 1218377 - DNA, 25 bp, Homo sapien
gcgacggccacacggcctgacaggt

SEQ ID NO: 1218378 - DNA, 25 bp, Homo sapien
tcgattctccacccccattttacaa

SEQ ID NO: 1218379 - DNA, 25 bp, Homo sapien
cgattctccacccccattttacaag

SEQ ID NO: 1218380 - DNA, 25 bp, Homo sapien
ctcgattctccacccccattttaca

SEQ ID NO: 1218381 - DNA, 25 bp, Homo sapien
atttggtatgtgtgtcctgcatgaa

SEQ ID NO: 1218382 - DNA, 25 bp, Homo sapien
acattgcttgtgcaccaggcgggtg

SEQ ID NO: 1218383 - DNA, 25 bp, Homo sapien
ccacattgcttgtgcaccaggcggg

SEQ ID NO: 1218384 - DNA, 25 bp, Homo sapien
ttggtatgtgtgtcctgcatgaact

SEQ ID NO: 1218385 - DNA, 25 bp, Homo sapien
gacgttatcctagaagaatgagtgg

SEQ ID NO: 1218386 - DNA, 25 bp, Homo sapien
ccagctctaagcactcaagatggag

SEQ ID NO: 1218387 - DNA, 25 bp, Homo sapien
cagaattggtcatcagctggcttga

SEQ ID NO: 1218388 - DNA, 25 bp, Homo sapien
ggagtggcagtaggatcccaacact

SEQ ID NO: 1218389 - DNA, 25 bp, Homo sapien
tctggtatgacagagaagtagaatg

SEQ ID NO: 1218390 - DNA, 25 bp, Homo sapien
taccagaaagatccgggtgtcacag

SEQ ID NO: 1218391 - DNA, 25 bp, Homo sapien
taaggtactgtcaaaggacaatgtg

SEQ ID NO: 1218392 - DNA, 25 bp, Homo sapien
tttatccaatagaagaggagccaca

SEQ ID NO: 1218393 - DNA, 25 bp, Homo sapien
cccatatggtcatagcccagatcag

SEQ ID NO: 1218394 - DNA, 25 bp, Homo sapien
gaccatgggaccaggtcttggagct

SEQ ID NO: 1218395 - DNA, 25 bp, Homo sapien
caagacactgtggacttggtcacca

SEQ ID NO: 1218396 - DNA, 25 bp, Homo sapien
tggagcctagaacaggcctcccaag

SEQ ID NO: 1218397 - DNA, 25 bp, Homo sapien
gtgtggtagcagatgattcgtgtca

SEQ ID NO: 1218398 - DNA, 25 bp, Homo sapien
tgattcgtgtcatctattcattatg

SEQ ID NO: 1218399 - DNA, 25 bp, Homo sapien
cagcccacctactcggtgtggtagc

SEQ ID NO: 1218400 - DNA, 25 bp, Homo sapien
aatattatgtagcaaactggggagg

SEQ ID NO: 1218401 - DNA, 25 bp, Homo sapien
gccaccagagctattcccaaaagac

SEQ ID NO: 1218402 - DNA, 25 bp, Homo sapien
tatttcctgatgaatcgccgcagct

SEQ ID NO: 1218403 - DNA, 25 bp, Homo sapien
tagatttcactgagcaagatgttgc

SEQ ID NO: 1218404 - DNA, 25 bp, Homo sapien
tgattgcactggtcacctcgggagc

SEQ ID NO: 1218405 - DNA, 25 bp, Homo sapien
cattatcttccccagttctacctac

SEQ ID NO: 1218406 - DNA, 25 bp, Homo sapien
ctgagagggaatgccggggcagggg

SEQ ID NO: 1218407 - DNA, 25 bp, Homo sapien
ctggagtaaggggggaagtcattat

SEQ ID NO: 1218408 - DNA, 25 bp, Homo sapien
agtcttctcctttctagtcttgaac

SEQ ID NO: 1218409 - DNA, 25 bp, Homo sapien
tgtggaataatgcatgctgtcccca

SEQ ID NO: 1218410 - DNA, 25 bp, Homo sapien
cccagtctggttgaaggtaggacca

SEQ ID NO: 1218411 - DNA, 25 bp, Homo sapien
tgctaaccttaaccagacgtgtcct

SEQ ID NO: 1218412 - DNA, 25 bp, Homo sapien
caacaacctagtgtacagctgagga

SEQ ID NO: 1218413 - DNA, 25 bp, Homo sapien
gaggctggccgctattattcccttg

SEQ ID NO: 1218414 - DNA, 25 bp, Homo sapien
tattccaagtgtccggagaagcatt

SEQ ID NO: 1218415 - DNA, 25 bp, Homo sapien
tcactgatgcggttggattccagag

SEQ ID NO: 1218416 - DNA, 25 bp, Homo sapien
tggtgccacggttcatgcagtctgg

SEQ ID NO: 1218417 - DNA, 25 bp, Homo sapien
gtacagccctggtgttgcaagcgtg

SEQ ID NO: 1218418 - DNA, 25 bp, Homo sapien
ggccgagacagccaagcccggttcg

SEQ ID NO: 1218419 - DNA, 25 bp, Homo sapien
caaggctgacgggcggttctgaatc

SEQ ID NO: 1218420 - DNA, 25 bp, Homo sapien
gggtgcggcacgaggagcgcaggga

SEQ ID NO: 1218421 - DNA, 25 bp, Homo sapien
cacacaggtggaatgatcgagtagc

SEQ ID NO: 1218422 - DNA, 25 bp, Homo sapien
tagccaacatgcacttcagcaaggg

SEQ ID NO: 1218423 - DNA, 25 bp, Homo sapien
gagcattgtgccagatctacgatag

SEQ ID NO: 1218424 - DNA, 25 bp, Homo sapien
tacaagacacaagctctatacgggc

SEQ ID NO: 1218425 - DNA, 25 bp, Homo sapien
tcctggtccaaagttctcaagtctc

SEQ ID NO: 1218426 - DNA, 25 bp, Homo sapien
gacaacccctgacccagttactgtg

SEQ ID NO: 1218427 - DNA, 25 bp, Homo sapien
accaaaggccgtatgcaccctgggt

SEQ ID NO: 1218428 - DNA, 25 bp, Homo sapien
caggccagggtcttgtgcacatccc

SEQ ID NO: 1218429 - DNA, 25 bp, Homo sapien
ggttagcgtcatcctcaaacttcag

SEQ ID NO: 1218430 - DNA, 25 bp, Homo sapien
gtctggacaacctggttagcgtcat

SEQ ID NO: 1218431 - DNA, 25 bp, Homo sapien
cgggagtagcgtgcaccattggtac

SEQ ID NO: 1218432 - DNA, 25 bp, Homo sapien
tagcgtgcaccattggtacaaagag

SEQ ID NO: 1218433 - DNA, 25 bp, Homo sapien
gagagggagaagacatttcgaagac

SEQ ID NO: 1218434 - DNA, 25 bp, Homo sapien
gagggagaagacatttcgaagactg

SEQ ID NO: 1218435 - DNA, 25 bp, Homo sapien
gggagaagacatttcgaagactgag

SEQ ID NO: 1218436 - DNA, 25 bp, Homo sapien
agaagacatttcgaagactgagcat

SEQ ID NO: 1218437 - DNA, 25 bp, Homo sapien
caaggaactattcagagagtttgca

SEQ ID NO: 1218438 - DNA, 25 bp, Homo sapien
tcaaggaactattcagagagtttgc

SEQ ID NO: 1218439 - DNA, 25 bp, Homo sapien
ttcaaggaactattcagagagtttg

SEQ ID NO: 1218440 - DNA, 25 bp, Homo sapien
gttcaaggaactattcagagagttt

SEQ ID NO: 1218441 - DNA, 25 bp, Homo sapien
ggctgcaggaatgggcaggccaggc

SEQ ID NO: 1218442 - DNA, 25 bp, Homo sapien
ctgccaaagcaaagtggcaactgca

SEQ ID NO: 1218443 - DNA, 25 bp, Homo sapien
tggaaggcgactcgcattgccacca

SEQ ID NO: 1218444 - DNA, 25 bp, Homo sapien
gcaaaagccaagtaaggatcgtcct

SEQ ID NO: 1218445 - DNA, 25 bp, Homo sapien
ctcagggcccatagcagccactgca

SEQ ID NO: 1218446 - DNA, 25 bp, Homo sapien
aacccagcagcactacgtccctcat

SEQ ID NO: 1218447 - DNA, 25 bp, Homo sapien
cagaacccagcagcactacgtccct

SEQ ID NO: 1218448 - DNA, 25 bp, Homo sapien
tcagggcccacagcggccactgtgc

SEQ ID NO: 1218449 - DNA, 25 bp, Homo sapien
tcacagggctaccttgatggagaaa

SEQ ID NO: 1218450 - DNA, 25 bp, Homo sapien
cacagggctaccttgatggagaaat

SEQ ID NO: 1218451 - DNA, 25 bp, Homo sapien
acagggctaccttgatggagaaatc

SEQ ID NO: 1218452 - DNA, 25 bp, Homo sapien
agggctaccttgatggagaaatctt

SEQ ID NO: 1218453 - DNA, 25 bp, Homo sapien
ctggaactctccttttgccacaatc

SEQ ID NO: 1218454 - DNA, 25 bp, Homo sapien
gaactctccttttgccacaatcatt

SEQ ID NO: 1218455 - DNA, 25 bp, Homo sapien
tccttttgccacaatcattatcatc

SEQ ID NO: 1218456 - DNA, 25 bp, Homo sapien
ccttttgccacaatcattatcatca

SEQ ID NO: 1218457 - DNA, 25 bp, Homo sapien
gaaatagcagtcaagacccctggcc

SEQ ID NO: 1218458 - DNA, 25 bp, Homo sapien
aggacaggaaatagcagtcaagacc

SEQ ID NO: 1218459 - DNA, 25 bp, Homo sapien
cctcttcgctttgggccaccaagaa

SEQ ID NO: 1218460 - DNA, 25 bp, Homo sapien
gggccaccaagaaccaatgaagtcc

SEQ ID NO: 1218461 - DNA, 25 bp, Homo sapien
accaagaaccaatgaagtccacacc

SEQ ID NO: 1218462 - DNA, 25 bp, Homo sapien
tcctccacacctcttcgctttgggc

SEQ ID NO: 1218463 - DNA, 25 bp, Homo sapien
taggaggacaagtggaagcaaaggt

SEQ ID NO: 1218464 - DNA, 25 bp, Homo sapien
ggacaagtggaagcaaaggtgtggg

SEQ ID NO: 1218465 - DNA, 25 bp, Homo sapien
ctggagtcagggggtaggaggacaa

SEQ ID NO: 1218466 - DNA, 25 bp, Homo sapien
ctgcaagcagcactggagtcagggg

SEQ ID NO: 1218467 - DNA, 25 bp, Homo sapien
cccacattaccttggatccgagcag

SEQ ID NO: 1218468 - DNA, 25 bp, Homo sapien
tcaggaccttggtggccaggatagc

SEQ ID NO: 1218469 - DNA, 25 bp, Homo sapien
aaaggcgctctgtgagtgtcaggac

SEQ ID NO: 1218470 - DNA, 25 bp, Homo sapien
attaccttggatccgagcagccagc

SEQ ID NO: 1218471 - DNA, 25 bp, Homo sapien
caagaacaatatgcagaggctccac

SEQ ID NO: 1218472 - DNA, 25 bp, Homo sapien
caggacgctcgtgaaaacaaagcta

SEQ ID NO: 1218473 - DNA, 25 bp, Homo sapien
gaacactgaagcactatgaggtctg

SEQ ID NO: 1218474 - DNA, 25 bp, Homo sapien
gaaatttgacctgcagctagctact

SEQ ID NO: 1218475 - DNA, 25 bp, Homo sapien
ttgtgattctctctcgtggatgccg

SEQ ID NO: 1218476 - DNA, 25 bp, Homo sapien
gcagcttgagtgactggctcctaaa

SEQ ID NO: 1218477 - DNA, 25 bp, Homo sapien
ggctcctaaacagggacccatctgt

SEQ ID NO: 1218478 - DNA, 25 bp, Homo sapien
caagtttatgagttggcagcttgag

SEQ ID NO: 1218479 - DNA, 25 bp, Homo sapien
ctgagagaataaggccagggtcagg

SEQ ID NO: 1218480 - DNA, 25 bp, Homo sapien
aggactgggcctccccaaacattgg

SEQ ID NO: 1218481 - DNA, 25 bp, Homo sapien
ttctctgcctgagagaataaggcca

SEQ ID NO: 1218482 - DNA, 25 bp, Homo sapien
tgcctgagagaataaggccagggtc

SEQ ID NO: 1218483 - DNA, 25 bp, Homo sapien
atagctgttgacctggtgcagtgaa

SEQ ID NO: 1218484 - DNA, 25 bp, Homo sapien
tccctgcttccttgtgtacatagct

SEQ ID NO: 1218485 - DNA, 25 bp, Homo sapien
gcagtcaggctttgccaaatctgat

SEQ ID NO: 1218486 - DNA, 25 bp, Homo sapien
cactgtcctccttatgtaaagacga

SEQ ID NO: 1218487 - DNA, 25 bp, Homo sapien
ctcgtactcctgtgccacctcagca

SEQ ID NO: 1218488 - DNA, 25 bp, Homo sapien
agcctcgtactcctgtgccacctca

SEQ ID NO: 1218489 - DNA, 25 bp, Homo sapien
tactcctgtgccacctcagcacact

SEQ ID NO: 1218490 - DNA, 25 bp, Homo sapien
tcgtactcctgtgccacctcagcac

SEQ ID NO: 1218491 - DNA, 25 bp, Homo sapien
aatgtgtttgaatgccccttgcggc

SEQ ID NO: 1218492 - DNA, 25 bp, Homo sapien
gagtcaaggtcaactggagcctcat

SEQ ID NO: 1218493 - DNA, 25 bp, Homo sapien
ggcaatgacattgggtgcattcctt

SEQ ID NO: 1218494 - DNA, 25 bp, Homo sapien
tgccccttgcggcaatgacattggg

SEQ ID NO: 1218495 - DNA, 25 bp, Homo sapien
cacctgtgagttctggccagccact

SEQ ID NO: 1218496 - DNA, 25 bp, Homo sapien
cctgtgagttctggccagccactgg

SEQ ID NO: 1218497 - DNA, 25 bp, Homo sapien
agccactggcacatgctgtctgtca

SEQ ID NO: 1218498 - DNA, 25 bp, Homo sapien
ctgtcagataaggtttctcaatggg

SEQ ID NO: 1218499 - DNA, 25 bp, Homo sapien
gttgttttgatcaacacgaaagatg

SEQ ID NO: 1218500 - DNA, 25 bp, Homo sapien
tgaaaagttactgccatccactgat

SEQ ID NO: 1218501 - DNA, 25 bp, Homo sapien
gatggcaacatcagaggagccgtca

SEQ ID NO: 1218502 - DNA, 25 bp, Homo sapien
tcagatgccgagagtctgattcgtt

SEQ ID NO: 1218503 - DNA, 25 bp, Homo sapien
tcccccatgtcctgagctcactgca

SEQ ID NO: 1218504 - DNA, 25 bp, Homo sapien
gactgtgggcaaacctgatagccca

SEQ ID NO: 1218505 - DNA, 25 bp, Homo sapien
agtcgactgtgggcaaacctgatag

SEQ ID NO: 1218506 - DNA, 25 bp, Homo sapien
tcgactgtgggcaaacctgatagcc

SEQ ID NO: 1218507 - DNA, 25 bp, Homo sapien
taagagaatccgttagtgccgctag

SEQ ID NO: 1218508 - DNA, 25 bp, Homo sapien
gcagcgcctgctaagtacttcctca

SEQ ID NO: 1218509 - DNA, 25 bp, Homo sapien
ccttgcagctttgccgatctgcaga

SEQ ID NO: 1218510 - DNA, 25 bp, Homo sapien
agggtcccggcgagataagagaatc

SEQ ID NO: 1218511 - DNA, 25 bp, Homo sapien
tcctgggtaagagaacataagctat

SEQ ID NO: 1218512 - DNA, 25 bp, Homo sapien
cataagctataagatgaatgagggc

SEQ ID NO: 1218513 - DNA, 25 bp, Homo sapien
tgaatgagggcttgggtgcacccac

SEQ ID NO: 1218514 - DNA, 25 bp, Homo sapien
cagagatctgctggcatgccaagga

SEQ ID NO: 1218515 - DNA, 25 bp, Homo sapien
gagcgcagctgatggcactttggcc

SEQ ID NO: 1218516 - DNA, 25 bp, Homo sapien
gaagagcgcagctgatggcactttg

SEQ ID NO: 1218517 - DNA, 25 bp, Homo sapien
agctgatggcactttggcctgtggt

SEQ ID NO: 1218518 - DNA, 25 bp, Homo sapien
cgcagctgatggcactttggcctgt

SEQ ID NO: 1218519 - DNA, 25 bp, Homo sapien
ctcttcttactttaatgctggagcc

SEQ ID NO: 1218520 - DNA, 25 bp, Homo sapien
tccatgttcagaggatgtgccagcc

SEQ ID NO: 1218521 - DNA, 25 bp, Homo sapien
tgtgtccatgttcagaggatgtgcc

SEQ ID NO: 1218522 - DNA, 25 bp, Homo sapien
tcttactttaatgctggagcctttg

SEQ ID NO: 1218523 - DNA, 25 bp, Homo sapien
gttattggtgctattatcatcatta

SEQ ID NO: 1218524 - DNA, 25 bp, Homo sapien
aatttaccagcttcaatggcgagga

SEQ ID NO: 1218525 - DNA, 25 bp, Homo sapien
catcattattggtaatatcaccatc

SEQ ID NO: 1218526 - DNA, 25 bp, Homo sapien
cgaggatgcttaggcttcctctggg

SEQ ID NO: 1218527 - DNA, 25 bp, Homo sapien
accgaggacgggaaagtgcctgtct

SEQ ID NO: 1218528 - DNA, 25 bp, Homo sapien
ttgaccgaggacgggaaagtgcctg

SEQ ID NO: 1218529 - DNA, 25 bp, Homo sapien
cttgaccgaggacgggaaagtgcct

SEQ ID NO: 1218530 - DNA, 25 bp, Homo sapien
gaccgaggacgggaaagtgcctgtc

SEQ ID NO: 1218531 - DNA, 25 bp, Homo sapien
aaattactgggctgtctaaccctct

SEQ ID NO: 1218532 - DNA, 25 bp, Homo sapien
taaattactgggctgtctaaccctc

SEQ ID NO: 1218533 - DNA, 25 bp, Homo sapien
ctaaattactgggctgtctaaccct

SEQ ID NO: 1218534 - DNA, 25 bp, Homo sapien
aactgcggacatctggtttccctcc

SEQ ID NO: 1218535 - DNA, 25 bp, Homo sapien
gctgcaactgcggacatctggtttc

SEQ ID NO: 1218536 - DNA, 25 bp, Homo sapien
ggctctggcttctcgtctacagcag

SEQ ID NO: 1218537 - DNA, 25 bp, Homo sapien
gacgctgcgcagaatggtgctgcaa

SEQ ID NO: 1218538 - DNA, 25 bp, Homo sapien
ctgtgcgtgtacactggtgtttctt

SEQ ID NO: 1218539 - DNA, 25 bp, Homo sapien
tgaaagatgttcttgacactgtcat

SEQ ID NO: 1218540 - DNA, 25 bp, Homo sapien
ctgaaagatgttcttgacactgtca

SEQ ID NO: 1218541 - DNA, 25 bp, Homo sapien
gaaagatgttcttgacactgtcatt

SEQ ID NO: 1218542 - DNA, 25 bp, Homo sapien
tctgaaagatgttcttgacactgtc

SEQ ID NO: 1218543 - DNA, 25 bp, Homo sapien
tgcaggttttatcccgcaagtacat

SEQ ID NO: 1218544 - DNA, 25 bp, Homo sapien
aacacctgcaggttttatcccgcaa

SEQ ID NO: 1218545 - DNA, 25 bp, Homo sapien
gttttatcccgcaagtacatggcct

SEQ ID NO: 1218546 - DNA, 25 bp, Homo sapien
ctaacacctgcaggttttatcccgc

SEQ ID NO: 1218547 - DNA, 25 bp, Homo sapien
cattcatagagaacctgccatgcac

SEQ ID NO: 1218548 - DNA, 25 bp, Homo sapien
gggctggagtacataagcattgctc

SEQ ID NO: 1218549 - DNA, 25 bp, Homo sapien
catagcagcttgagaggttgggatt

SEQ ID NO: 1218550 - DNA, 25 bp, Homo sapien
gaaactgcagggtccagaagatcca

SEQ ID NO: 1218551 - DNA, 25 bp, Homo sapien
tggccatgggcaaagaacaaggttc

SEQ ID NO: 1218552 - DNA, 25 bp, Homo sapien
agtgctgcagccgaatccttttggg

SEQ ID NO: 1218553 - DNA, 25 bp, Homo sapien
tttagcctcacttagctcatagcct

SEQ ID NO: 1218554 - DNA, 25 bp, Homo sapien
ggagtgcacatgattcaggcagtca

SEQ ID NO: 1218555 - DNA, 25 bp, Homo sapien
atccctctcggcctgggtcacaatg

SEQ ID NO: 1218556 - DNA, 25 bp, Homo sapien
tctcggcctgggtcacaatgcgcgg

SEQ ID NO: 1218557 - DNA, 25 bp, Homo sapien
cttcccatccctctcggcctgggtc

SEQ ID NO: 1218558 - DNA, 25 bp, Homo sapien
acaatgcgcggggtggcagcctttt

SEQ ID NO: 1218559 - DNA, 25 bp, Homo sapien
tcaattgaacttctctacgcttcca

SEQ ID NO: 1218560 - DNA, 25 bp, Homo sapien
agactaccacttgcctgatggagag

SEQ ID NO: 1218561 - DNA, 25 bp, Homo sapien
catatgtccacgtgtagactaccac

SEQ ID NO: 1218562 - DNA, 25 bp, Homo sapien
ttctctacgcttccatatgtccacg

SEQ ID NO: 1218563 - DNA, 25 bp, Homo sapien
acttggctggttatcaggagtggcc

SEQ ID NO: 1218564 - DNA, 25 bp, Homo sapien
ggataggagtcctgatctttgccca

SEQ ID NO: 1218565 - DNA, 25 bp, Homo sapien
tggcctgtcccaaagcaaatgctgc

SEQ ID NO: 1218566 - DNA, 25 bp, Homo sapien
gatgaaggctctcaacgtgcccttg

SEQ ID NO: 1218567 - DNA, 25 bp, Homo sapien
catagaatggctaagtaccttgacc

SEQ ID NO: 1218568 - DNA, 25 bp, Homo sapien
tataggctccatttgcgtccaggca

SEQ ID NO: 1218569 - DNA, 25 bp, Homo sapien
cagtgtctaccaaactgaggatggg

SEQ ID NO: 1218570 - DNA, 25 bp, Homo sapien
tccaggcacctaagttcagagctca

SEQ ID NO: 1218571 - DNA, 25 bp, Homo sapien
agctactaacaggaactttgactca

SEQ ID NO: 1218572 - DNA, 25 bp, Homo sapien
gcccacgggtatgagagctactaac

SEQ ID NO: 1218573 - DNA, 25 bp, Homo sapien
tgttatgaaaactgtcagctccagg

SEQ ID NO: 1218574 - DNA, 25 bp, Homo sapien
cagtagtaatagtaggcaccctttg

SEQ ID NO: 1218575 - DNA, 25 bp, Homo sapien
tcttcactacctcctgaagatcagt

SEQ ID NO: 1218576 - DNA, 25 bp, Homo sapien
ttcttcactacctcctgaagatcag

SEQ ID NO: 1218577 - DNA, 25 bp, Homo sapien
ttcactacctcctgaagatcagtca

SEQ ID NO: 1218578 - DNA, 25 bp, Homo sapien
tcactacctcctgaagatcagtcat

SEQ ID NO: 1218579 - DNA, 25 bp, Homo sapien
catctgccggcccttagcacacacc

SEQ ID NO: 1218580 - DNA, 25 bp, Homo sapien
tgccggcccttagcacacaccacag

SEQ ID NO: 1218581 - DNA, 25 bp, Homo sapien
tctgccggcccttagcacacaccac

SEQ ID NO: 1218582 - DNA, 25 bp, Homo sapien
ctcttcccatctgccggcccttagc

SEQ ID NO: 1218583 - DNA, 25 bp, Homo sapien
ttcttttcggtctcttgtcccctgc

SEQ ID NO: 1218584 - DNA, 25 bp, Homo sapien
ttttcggtctcttgtcccctgcact

SEQ ID NO: 1218585 - DNA, 25 bp, Homo sapien
ttcggtctcttgtcccctgcactgt

SEQ ID NO: 1218586 - DNA, 25 bp, Homo sapien
ctgcactgtgcccagtgacctcccc

SEQ ID NO: 1218587 - DNA, 25 bp, Homo sapien
ctgcactgtgcccagtgacctcccc

SEQ ID NO: 1218588 - DNA, 25 bp, Homo sapien
tctttccagtctcttgtcccctgca

SEQ ID NO: 1218589 - DNA, 25 bp, Homo sapien
tccagtctcttgtcccctgcactgt

SEQ ID NO: 1218590 - DNA, 25 bp, Homo sapien
tttctttccagtctcttgtcccctg

SEQ ID NO: 1218591 - DNA, 25 bp, Homo sapien
ctgactgctccccggtttcccattt

SEQ ID NO: 1218592 - DNA, 25 bp, Homo sapien
ccctgactgctccccggtttcccat

SEQ ID NO: 1218593 - DNA, 25 bp, Homo sapien
cctgactgctccccggtttcccatt

SEQ ID NO: 1218594 - DNA, 25 bp, Homo sapien
gggttagagggagcagccggccagg

SEQ ID NO: 1218595 - DNA, 25 bp, Homo sapien
agccggccaggcagtgtgctccacc

SEQ ID NO: 1218596 - DNA, 25 bp, Homo sapien
ttgagcaggggttagagggagcagc

SEQ ID NO: 1218597 - DNA, 25 bp, Homo sapien
gcagccggccaggcagtgtgctcca

SEQ ID NO: 1218598 - DNA, 25 bp, Homo sapien
tagccgtcatttccgcttctgctct

SEQ ID NO: 1218599 - DNA, 25 bp, Homo sapien
tatcttcaagaatgatgtgggtatg

SEQ ID NO: 1218600 - DNA, 25 bp, Homo sapien
tagattccagtctctagagcctttc

SEQ ID NO: 1218601 - DNA, 25 bp, Homo sapien
tgtgaaaccttggagattctatatc

SEQ ID NO: 1218602 - DNA, 25 bp, Homo sapien
tgtgcttgctacctggagaaggagc

SEQ ID NO: 1218603 - DNA, 25 bp, Homo sapien
tgccatgtgcttgctacctggagaa

SEQ ID NO: 1218604 - DNA, 25 bp, Homo sapien
ttggctgtccactcctcgggctgcc

SEQ ID NO: 1218605 - DNA, 25 bp, Homo sapien
ctctgccatgtgcttgctacctgga

SEQ ID NO: 1218606 - DNA, 25 bp, Homo sapien
gagagggaagatttggattttatcc

SEQ ID NO: 1218607 - DNA, 25 bp, Homo sapien
ggaagatttggattttatccctaca

SEQ ID NO: 1218608 - DNA, 25 bp, Homo sapien
ctgagagggaagatttggattttat

SEQ ID NO: 1218609 - DNA, 25 bp, Homo sapien
gaagatttggattttatccctacac

SEQ ID NO: 1218610 - DNA, 25 bp, Homo sapien
atctctccttggtggtggcctggag

SEQ ID NO: 1218611 - DNA, 25 bp, Homo sapien
ctgggatctctccttggtggtggcc

SEQ ID NO: 1218612 - DNA, 25 bp, Homo sapien
tgggatctctccttggtggtggcct

SEQ ID NO: 1218613 - DNA, 25 bp, Homo sapien
ggatctctccttggtggtggcctgg

SEQ ID NO: 1218614 - DNA, 25 bp, Homo sapien
tcggtggcaccagcgagacagccca

SEQ ID NO: 1218615 - DNA, 25 bp, Homo sapien
gagggcctcggtggcaccagcgaga

SEQ ID NO: 1218616 - DNA, 25 bp, Homo sapien
cagcgatcgatttgggggcgttcac

SEQ ID NO: 1218617 - DNA, 25 bp, Homo sapien
gccacactggccagcgatcgatttg

SEQ ID NO: 1218618 - DNA, 25 bp, Homo sapien
tccctgattccgagctgcgggcagg

SEQ ID NO: 1218619 - DNA, 25 bp, Homo sapien
cggcggccgaggtagaccgagcggg

SEQ ID NO: 1218620 - DNA, 25 bp, Homo sapien
tccatgtggatttggtcgtctccct

SEQ ID NO: 1218621 - DNA, 25 bp, Homo sapien
gacggaaggacagaccgacgtcgcc

SEQ ID NO: 1218622 - DNA, 25 bp, Homo sapien
gactgtgaacgaaccggagagcaag

SEQ ID NO: 1218623 - DNA, 25 bp, Homo sapien
aagtcgcgctggaaaaatctgaaga

SEQ ID NO: 1218624 - DNA, 25 bp, Homo sapien
tgatgtcagaggagcccggaaagtc

SEQ ID NO: 1218625 - DNA, 25 bp, Homo sapien
cgccgggattgctgatgtcagagga

SEQ ID NO: 1218626 - DNA, 25 bp, Homo sapien
cttgggagcggtagggcgtgcgagc

SEQ ID NO: 1218627 - DNA, 25 bp, Homo sapien
ccgagagcttgggagcggtagggcg

SEQ ID NO: 1218628 - DNA, 25 bp, Homo sapien
gcggtagggcgtgcgagcgccgcag

SEQ ID NO: 1218629 - DNA, 25 bp, Homo sapien
agcttgggagcggtagggcgtgcga

SEQ ID NO: 1218630 - DNA, 25 bp, Homo sapien
gccaagccagctgggctcgcaaggc

SEQ ID NO: 1218631 - DNA, 25 bp, Homo sapien
tgcccccttggctacttaaggtggc

SEQ ID NO: 1218632 - DNA, 25 bp, Homo sapien
cttggctacttaaggtggccgatgg

SEQ ID NO: 1218633 - DNA, 25 bp, Homo sapien
cgcaaggcccgactcgaattcccgg

SEQ ID NO: 1218634 - DNA, 25 bp, Homo sapien
tgttctgagctcccccctaacccca

SEQ ID NO: 1218635 - DNA, 25 bp, Homo sapien
cgtgtctagaggctgcggagttact

SEQ ID NO: 1218636 - DNA, 25 bp, Homo sapien
gcttatcagaatacttggacaggag

SEQ ID NO: 1218637 - DNA, 25 bp, Homo sapien
tctaatcgcgagcagggactacgca

SEQ ID NO: 1218638 - DNA, 25 bp, Homo sapien
agtaaactcgtgtgcgctctaatcg

SEQ ID NO: 1218639 - DNA, 25 bp, Homo sapien
gaacaggtatggatcaggcaacaca

SEQ ID NO: 1218640 - DNA, 25 bp, Homo sapien
gatgttggagtaaagcctagatccc

SEQ ID NO: 1218641 - DNA, 25 bp, Homo sapien
ccagtcctgtgttgaatgtgcgatt

SEQ ID NO: 1218642 - DNA, 25 bp, Homo sapien
tgtggtcccacaggacaaaactagc

SEQ ID NO: 1218643 - DNA, 25 bp, Homo sapien
tactggcatctatttgtggggctgg

SEQ ID NO: 1218644 - DNA, 25 bp, Homo sapien
gctccccaaagtctaagagcttgct

SEQ ID NO: 1218645 - DNA, 25 bp, Homo sapien
tcccctagggatgggctagttgccc

SEQ ID NO: 1218646 - DNA, 25 bp, Homo sapien
tgtgacataaaggacttcccctagg

SEQ ID NO: 1218647 - DNA, 25 bp, Homo sapien
cactctggcatcccgcagtctctct

SEQ ID NO: 1218648 - DNA, 25 bp, Homo sapien
cattcacaggacttggcccacacac

SEQ ID NO: 1218649 - DNA, 25 bp, Homo sapien
catctgctggatgaaggtgaggtac

SEQ ID NO: 1218650 - DNA, 25 bp, Homo sapien
gctggcctgtctggaccaatccctt

SEQ ID NO: 1218651 - DNA, 25 bp, Homo sapien
aggtttgggactgcagttgcctggg

SEQ ID NO: 1218652 - DNA, 25 bp, Homo sapien
taggtttgggactgcagttgcctgg

SEQ ID NO: 1218653 - DNA, 25 bp, Homo sapien
ggtttgggactgcagttgcctgggc

SEQ ID NO: 1218654 - DNA, 25 bp, Homo sapien
gctgcttagtaatgaggaccaactc

SEQ ID NO: 1218655 - DNA, 25 bp, Homo sapien
gaccccataagcaaagggatatttc

SEQ ID NO: 1218656 - DNA, 25 bp, Homo sapien
ggaccccgaggtgatggacaacaat

SEQ ID NO: 1218657 - DNA, 25 bp, Homo sapien
gatgaaggtttgtggacagaatctc

SEQ ID NO: 1218658 - DNA, 25 bp, Homo sapien
agccttagaacccaactgtagttct

SEQ ID NO: 1218659 - DNA, 25 bp, Homo sapien
tcagaaagccttagaacccaactgt

SEQ ID NO: 1218660 - DNA, 25 bp, Homo sapien
cttagaacccaactgtagttctggc

SEQ ID NO: 1218661 - DNA, 25 bp, Homo sapien
ctgtagttctggcagcaactgtcct

SEQ ID NO: 1218662 - DNA, 25 bp, Homo sapien
cagctccccgtggatttccacaaag

SEQ ID NO: 1218663 - DNA, 25 bp, Homo sapien
ggatttccacaaagaccgactggca

SEQ ID NO: 1218664 - DNA, 25 bp, Homo sapien
ccgtggatttccacaaagaccgact

SEQ ID NO: 1218665 - DNA, 25 bp, Homo sapien
ccacaaagaccgactggcatgttct

SEQ ID NO: 1218666 - DNA, 25 bp, Homo sapien
agaaggctttctgccggcttctcca

SEQ ID NO: 1218667 - DNA, 25 bp, Homo sapien
cgaccttgtgcaacaatgccaaagt

SEQ ID NO: 1218668 - DNA, 25 bp, Homo sapien
gtttgctgtcatatcacgaccttgt

SEQ ID NO: 1218669 - DNA, 25 bp, Homo sapien
acagaaggctttctgccggcttctc

SEQ ID NO: 1218670 - DNA, 25 bp, Homo sapien
tctgtgattgtgcttcgtgaaaatg

SEQ ID NO: 1218671 - DNA, 25 bp, Homo sapien
tcttctgtgattgtgcttcgtgaaa

SEQ ID NO: 1218672 - DNA, 25 bp, Homo sapien
gattgtgcttcgtgaaaatgttctc

SEQ ID NO: 1218673 - DNA, 25 bp, Homo sapien
ctgttcttctgtgattgtgcttcgt

SEQ ID NO: 1218674 - DNA, 25 bp, Homo sapien
tgtgcccctgcccacagtttgaacc

SEQ ID NO: 1218675 - DNA, 25 bp, Homo sapien
caggtccacataatcctcaccattc

SEQ ID NO: 1218676 - DNA, 25 bp, Homo sapien
cctgcccacagtttgaaccaaaggc

SEQ ID NO: 1218677 - DNA, 25 bp, Homo sapien
tccacataatcctcaccattccctg

SEQ ID NO: 1218678 - DNA, 25 bp, Homo sapien
gaagtgaagcccctgaatgcatctt

SEQ ID NO: 1218679 - DNA, 25 bp, Homo sapien
gaacatggaccctacgaggaagtga

SEQ ID NO: 1218680 - DNA, 25 bp, Homo sapien
gctgcgtgtcacctagttctacttg

SEQ ID NO: 1218681 - DNA, 25 bp, Homo sapien
tctgaatgtcagcactaaccttgaa

SEQ ID NO: 1218682 - DNA, 25 bp, Homo sapien
aagagacaaatggtgccgacctgct

SEQ ID NO: 1218683 - DNA, 25 bp, Homo sapien
acaaatggtgccgacctgctccact

SEQ ID NO: 1218684 - DNA, 25 bp, Homo sapien
agagacaaatggtgccgacctgctc

SEQ ID NO: 1218685 - DNA, 25 bp, Homo sapien
atggtgccgacctgctccactcctg

SEQ ID NO: 1218686 - DNA, 25 bp, Homo sapien
ggcgtgaacacgcagcatgggcctt

SEQ ID NO: 1218687 - DNA, 25 bp, Homo sapien
gatggcctggaaggattgatgctcc

SEQ ID NO: 1218688 - DNA, 25 bp, Homo sapien
tggatacagcagacttcagaagagg

SEQ ID NO: 1218689 - DNA, 25 bp, Homo sapien
ttgatgctccaaaactccccagtgc

SEQ ID NO: 1218690 - DNA, 25 bp, Homo sapien
gtatacataacgatttgcatgccta

SEQ ID NO: 1218691 - DNA, 25 bp, Homo sapien
ttttgtatacataacgatttgcatg

SEQ ID NO: 1218692 - DNA, 25 bp, Homo sapien
tacataacgatttgcatgcctattt

SEQ ID NO: 1218693 - DNA, 25 bp, Homo sapien
ctaatgtaggtcccatttatcttta

SEQ ID NO: 1218694 - DNA, 25 bp, Homo sapien
tgggacccttcactagacgaacctg

SEQ ID NO: 1218695 - DNA, 25 bp, Homo sapien
tggagtgggacccttcactagacga

SEQ ID NO: 1218696 - DNA, 25 bp, Homo sapien
gagtgggacccttcactagacgaac

SEQ ID NO: 1218697 - DNA, 25 bp, Homo sapien
gaactggagtgggacccttcactag

SEQ ID NO: 1218698 - DNA, 25 bp, Homo sapien
ggcccaccgacttttcctgctataa

SEQ ID NO: 1218699 - DNA, 25 bp, Homo sapien
caacgtacagctgacttttgtgggt

SEQ ID NO: 1218700 - DNA, 25 bp, Homo sapien
tataacttcagacctggcacaacgt

SEQ ID NO: 1218701 - DNA, 25 bp, Homo sapien
tggtttctagtgacaggcccaccga

SEQ ID NO: 1218702 - DNA, 25 bp, Homo sapien
gtcagccacgtcacactgaaaccac

SEQ ID NO: 1218703 - DNA, 25 bp, Homo sapien
agtcagccacgtcacactgaaacca

SEQ ID NO: 1218704 - DNA, 25 bp, Homo sapien
tcagccacgtcacactgaaaccact

SEQ ID NO: 1218705 - DNA, 25 bp, Homo sapien
gcatttagggggatcttcctctcca

SEQ ID NO: 1218706 - DNA, 25 bp, Homo sapien
cccaggtggacttagatgccaagag

SEQ ID NO: 1218707 - DNA, 25 bp, Homo sapien
gtggacttagatgccaagagggtaa

SEQ ID NO: 1218708 - DNA, 25 bp, Homo sapien
gaactcaccaatagcttcagagagc

SEQ ID NO: 1218709 - DNA, 25 bp, Homo sapien
aatccaaaagaatcaggtaggctat

SEQ ID NO: 1218710 - DNA, 25 bp, Homo sapien
aaatccaaaagaatcaggtaggcta

SEQ ID NO: 1218711 - DNA, 25 bp, Homo sapien
tccaaaagaatcaggtaggctatac

SEQ ID NO: 1218712 - DNA, 25 bp, Homo sapien
aaaatccaaaagaatcaggtaggct

SEQ ID NO: 1218713 - DNA, 25 bp, Homo sapien
gctaagagaatttaatgattgcata

SEQ ID NO: 1218714 - DNA, 25 bp, Homo sapien
tgttcaggaagttgaagcgcgtgtc

SEQ ID NO: 1218715 - DNA, 25 bp, Homo sapien
ttgaagcgcgtgtctatctgacttc

SEQ ID NO: 1218716 - DNA, 25 bp, Homo sapien
ttggttccagctgtgttcaggaagt

SEQ ID NO: 1218717 - DNA, 25 bp, Homo sapien
gttaagacggatccctgctctgcca

SEQ ID NO: 1218718 - DNA, 25 bp, Homo sapien
tgttctcagaaagcttcgggttaag

SEQ ID NO: 1218719 - DNA, 25 bp, Homo sapien
agcttcgggttaagacggatccctg

SEQ ID NO: 1218720 - DNA, 25 bp, Homo sapien
tctcagaaagcttcgggttaagacg

SEQ ID NO: 1218721 - DNA, 25 bp, Homo sapien
ttgcctgcctttcggggcagctaag

SEQ ID NO: 1218722 - DNA, 25 bp, Homo sapien
cctgcctttcggggcagctaagcgg

SEQ ID NO: 1218723 - DNA, 25 bp, Homo sapien
tgcctgcctttcggggcagctaagc

SEQ ID NO: 1218724 - DNA, 25 bp, Homo sapien
tgcctttcggggcagctaagcggaa

SEQ ID NO: 1218725 - DNA, 25 bp, Homo sapien
gtgtgcctgcggctttcttttgtag

SEQ ID NO: 1218726 - DNA, 25 bp, Homo sapien
ttcttttgtagtaggcgccattcat

SEQ ID NO: 1218727 - DNA, 25 bp, Homo sapien
tgcctgcggctttcttttgtagtag

SEQ ID NO: 1218728 - DNA, 25 bp, Homo sapien
cggctttcttttgtagtaggcgcca

SEQ ID NO: 1218729 - DNA, 25 bp, Homo sapien
cgtgtggtgcggccttccctttgag

SEQ ID NO: 1218730 - DNA, 25 bp, Homo sapien
ctgacagaaacaacaccgggcccat

SEQ ID NO: 1218731 - DNA, 25 bp, Homo sapien
cctgacagaaacaacaccgggccca

SEQ ID NO: 1218732 - DNA, 25 bp, Homo sapien
gagacaatagttgcttaagaagagc

SEQ ID NO: 1218733 - DNA, 25 bp, Homo sapien
cgggcctgcccgctaatgagtggaa

SEQ ID NO: 1218734 - DNA, 25 bp, Homo sapien
aggccagcgcctgagaaacgggcct

SEQ ID NO: 1218735 - DNA, 25 bp, Homo sapien
cagcatcatagggaatgagctgaca

SEQ ID NO: 1218736 - DNA, 25 bp, Homo sapien
ccaggagagatgctatagcaatgct

SEQ ID NO: 1218737 - DNA, 25 bp, Homo sapien
ggagagatgctatagcaatgctgca

SEQ ID NO: 1218738 - DNA, 25 bp, Homo sapien
agatgctatagcaatgctgcagcca

SEQ ID NO: 1218739 - DNA, 25 bp, Homo sapien
tgcctccatcaccagcaagcccagg

SEQ ID NO: 1218740 - DNA, 25 bp, Homo sapien
caagtcacctggcatcatgaggctg

SEQ ID NO: 1218741 - DNA, 25 bp, Homo sapien
tgctgaacgggagcaagtcacctgg

SEQ ID NO: 1218742 - DNA, 25 bp, Homo sapien
cctggcatcatgaggctgattatct

SEQ ID NO: 1218743 - DNA, 25 bp, Homo sapien
tgaagactcaattatgctgaacggg

SEQ ID NO: 1218744 - DNA, 25 bp, Homo sapien
accaccttccacttgacatctgaca

SEQ ID NO: 1218745 - DNA, 25 bp, Homo sapien
ctgagggcctcgatttgtttttcca

SEQ ID NO: 1218746 - DNA, 25 bp, Homo sapien
gagtgctgagggcctcgatttgttt

SEQ ID NO: 1218747 - DNA, 25 bp, Homo sapien
tgctgagggcctcgatttgtttttc

SEQ ID NO: 1218748 - DNA, 25 bp, Homo sapien
gttcctggatgatatggctgctgag

SEQ ID NO: 1218749 - DNA, 25 bp, Homo sapien
gccagtagactgacaggagacatgg

SEQ ID NO: 1218750 - DNA, 25 bp, Homo sapien
tccatggcagagcaaaatgacccca

SEQ ID NO: 1218751 - DNA, 25 bp, Homo sapien
ggttgactaaaccactgccagttcc

SEQ ID NO: 1218752 - DNA, 25 bp, Homo sapien
tggagcggccctgatacatttgtct

SEQ ID NO: 1218753 - DNA, 25 bp, Homo sapien
caagttgcctgagcagtacaaccca

SEQ ID NO: 1218754 - DNA, 25 bp, Homo sapien
tgtgaaattcgaatgccagagcccc

SEQ ID NO: 1218755 - DNA, 25 bp, Homo sapien
tttttagtggacacctggagcggcc

SEQ ID NO: 1218756 - DNA, 25 bp, Homo sapien
ctagattactccaggtccgcatgcc

SEQ ID NO: 1218757 - DNA, 25 bp, Homo sapien
ccctagattactccaggtccgcatg

SEQ ID NO: 1218758 - DNA, 25 bp, Homo sapien
tgccctagattactccaggtccgca

SEQ ID NO: 1218759 - DNA, 25 bp, Homo sapien
tagattactccaggtccgcatgccc

SEQ ID NO: 1218760 - DNA, 25 bp, Homo sapien
ttcaatcctagtccatttagtagtg

SEQ ID NO: 1218761 - DNA, 25 bp, Homo sapien
acactcaggcactcagttacttctt

SEQ ID NO: 1218762 - DNA, 25 bp, Homo sapien
atcctagtccatttagtagtgagca

SEQ ID NO: 1218763 - DNA, 25 bp, Homo sapien
cagttacttcttcaatcctagtcca

SEQ ID NO: 1218764 - DNA, 25 bp, Homo sapien
ttgaggtcaagtccttctttctgag

SEQ ID NO: 1218765 - DNA, 25 bp, Homo sapien
gaggtcaagtccttctttctgagcc

SEQ ID NO: 1218766 - DNA, 25 bp, Homo sapien
gcaaacatttcatgttcgctaaaac

SEQ ID NO: 1218767 - DNA, 25 bp, Homo sapien
tcatgttcgctaaaacaagaaggaa

SEQ ID NO: 1218768 - DNA, 25 bp, Homo sapien
cagcttggatggctacagtgtctaa

SEQ ID NO: 1218769 - DNA, 25 bp, Homo sapien
aggtcttgacaagcccatgggtctt

SEQ ID NO: 1218770 - DNA, 25 bp, Homo sapien
gctacagtgtctaaggtcttgacaa

SEQ ID NO: 1218771 - DNA, 25 bp, Homo sapien
tctgggtgacagcttggatggctac

SEQ ID NO: 1218772 - DNA, 25 bp, Homo sapien
aaatgttcttagcttctgtccagat

SEQ ID NO: 1218773 - DNA, 25 bp, Homo sapien
cagatccagtccacaactccacatt

SEQ ID NO: 1218774 - DNA, 25 bp, Homo sapien
ttgattcagcaaacagttttgccaa

SEQ ID NO: 1218775 - DNA, 25 bp, Homo sapien
attcagcaaacagttttgccaaaag

SEQ ID NO: 1218776 - DNA, 25 bp, Homo sapien
gattcagcaaacagttttgccaaaa

SEQ ID NO: 1218777 - DNA, 25 bp, Homo sapien
tgattcagcaaacagttttgccaaa

SEQ ID NO: 1218778 - DNA, 25 bp, Homo sapien
agctcccacgaattcttgtcttgac

SEQ ID NO: 1218779 - DNA, 25 bp, Homo sapien
ccgtttgcagctcccacgaattctt

SEQ ID NO: 1218780 - DNA, 25 bp, Homo sapien
tgactgcgatttttatttgtccccg

SEQ ID NO: 1218781 - DNA, 25 bp, Homo sapien
tgtgactgcgatttttatttgtccc

SEQ ID NO: 1218782 - DNA, 25 bp, Homo sapien
gggctgaaatcaccaagggcaagag

SEQ ID NO: 1218783 - DNA, 25 bp, Homo sapien
atgggctgaaatcaccaagggcaag

SEQ ID NO: 1218784 - DNA, 25 bp, Homo sapien
ctgaaatcaccaagggcaagagacc

SEQ ID NO: 1218785 - DNA, 25 bp, Homo sapien
ggctgaaatcaccaagggcaagaga

SEQ ID NO: 1218786 - DNA, 25 bp, Homo sapien
agatggaccgagttcccagaaagcc

SEQ ID NO: 1218787 - DNA, 25 bp, Homo sapien
catctgatgatggaagtcgcatctt

SEQ ID NO: 1218788 - DNA, 25 bp, Homo sapien
gatggaagtcgcatcttctatcatc

SEQ ID NO: 1218789 - DNA, 25 bp, Homo sapien
acctctatgtagttaggaagatgga

SEQ ID NO: 1218790 - DNA, 25 bp, Homo sapien
tcttgcattctgcatacctgctttt

SEQ ID NO: 1218791 - DNA, 25 bp, Homo sapien
gagctgcagacccatactgggccat

SEQ ID NO: 1218792 - DNA, 25 bp, Homo sapien
gctgccgccattttagaacctgttg

SEQ ID NO: 1218793 - DNA, 25 bp, Homo sapien
ggccatgagctgccgccattttaga

SEQ ID NO: 1218794 - DNA, 25 bp, Homo sapien
tgcagacccatactgggccatgagc

SEQ ID NO: 1218795 - DNA, 25 bp, Homo sapien
gctggctacagctggcataagcagc

SEQ ID NO: 1218796 - DNA, 25 bp, Homo sapien
ttggaggatgcctcttagattcagc

SEQ ID NO: 1218797 - DNA, 25 bp, Homo sapien
tggtccacaactatccaaaatgact

SEQ ID NO: 1218798 - DNA, 25 bp, Homo sapien
catgggcctgcactccaattggagg

SEQ ID NO: 1218799 - DNA, 25 bp, Homo sapien
tttgaagatacatgcactggtccac

SEQ ID NO: 1218800 - DNA, 25 bp, Homo sapien
atgagtacgtttcccatcggttaat

SEQ ID NO: 1218801 - DNA, 25 bp, Homo sapien
gggtatgatgtataaatcatcagca

SEQ ID NO: 1218802 - DNA, 25 bp, Homo sapien
catgagtacgtttcccatcggttaa

SEQ ID NO: 1218803 - DNA, 25 bp, Homo sapien
tgagtacgtttcccatcggttaatg

SEQ ID NO: 1218804 - DNA, 25 bp, Homo sapien
tggccactagcctctctagctccat

SEQ ID NO: 1218805 - DNA, 25 bp, Homo sapien
cccacttggccactagcctctctag

SEQ ID NO: 1218806 - DNA, 25 bp, Homo sapien
tccccacttggccactagcctctct

SEQ ID NO: 1218807 - DNA, 25 bp, Homo sapien
acttggccactagcctctctagctc

SEQ ID NO: 1218808 - DNA, 25 bp, Homo sapien
tttactgtgacatccctctgcttct

SEQ ID NO: 1218809 - DNA, 25 bp, Homo sapien
gcttctcccattgccagtcgagctg

SEQ ID NO: 1218810 - DNA, 25 bp, Homo sapien
tcgagctgtgctcctccacgcctgg

SEQ ID NO: 1218811 - DNA, 25 bp, Homo sapien
tgcctgctgtcctattccgtctccc

SEQ ID NO: 1218812 - DNA, 25 bp, Homo sapien
tatttaccccagagggtcatctgaa

SEQ ID NO: 1218813 - DNA, 25 bp, Homo sapien
aatatttaccccagagggtcatctg

SEQ ID NO: 1218814 - DNA, 25 bp, Homo sapien
taccccagagggtcatctgaatttt

SEQ ID NO: 1218815 - DNA, 25 bp, Homo sapien
ttaccccagagggtcatctgaattt

SEQ ID NO: 1218816 - DNA, 25 bp, Homo sapien
cttggaaaaacagatggtaagaatt

SEQ ID NO: 1218817 - DNA, 25 bp, Homo sapien
tcctaaatgcacaaataagcccata

SEQ ID NO: 1218818 - DNA, 25 bp, Homo sapien
ttctgtgtatgtcctaaatgcacaa

SEQ ID NO: 1218819 - DNA, 25 bp, Homo sapien
tgtatgtcctaaatgcacaaataag

SEQ ID NO: 1218820 - DNA, 25 bp, Homo sapien
tgtcctaaatgcacaaataagccca

SEQ ID NO: 1218821 - DNA, 25 bp, Homo sapien
cctgtttctaagcaggcttcccttt

SEQ ID NO: 1218822 - DNA, 25 bp, Homo sapien
ttcctctttatgccacactcgcgtc

SEQ ID NO: 1218823 - DNA, 25 bp, Homo sapien
ctgttgttgggcctgtttctaagca

SEQ ID NO: 1218824 - DNA, 25 bp, Homo sapien
gaggcttctgttgttgggcctgttt

SEQ ID NO: 1218825 - DNA, 25 bp, Homo sapien
tttatcttctctcatctcgtagagg

SEQ ID NO: 1218826 - DNA, 25 bp, Homo sapien
cagttatgagtttatcttctctcat

SEQ ID NO: 1218827 - DNA, 25 bp, Homo sapien
ctttgcagttatgagtttatcttct

SEQ ID NO: 1218828 - DNA, 25 bp, Homo sapien
tgcagttatgagtttatcttctctc

SEQ ID NO: 1218829 - DNA, 25 bp, Homo sapien
ttatttgggtcggacaatgatcctg

SEQ ID NO: 1218830 - DNA, 25 bp, Homo sapien
cagattgttgctcagctctccactt

SEQ ID NO: 1218831 - DNA, 25 bp, Homo sapien
tttgggtcggacaatgatcctgatg

SEQ ID NO: 1218832 - DNA, 25 bp, Homo sapien
tcaaccagattgttgctcagctctc

SEQ ID NO: 1218833 - DNA, 25 bp, Homo sapien
ttcctcggaggtgcaccagaaaggg

SEQ ID NO: 1218834 - DNA, 25 bp, Homo sapien
accaaatttccaggacccttagcag

SEQ ID NO: 1218835 - DNA, 25 bp, Homo sapien
cagcttcagtaagaggagttacttt

SEQ ID NO: 1218836 - DNA, 25 bp, Homo sapien
tccctgaacatttcctcggaggtgc

SEQ ID NO: 1218837 - DNA, 25 bp, Homo sapien
ctgccgttcttcttacttggatttc

SEQ ID NO: 1218838 - DNA, 25 bp, Homo sapien
ccttattagtccataatcaatttca

SEQ ID NO: 1218839 - DNA, 25 bp, Homo sapien
gaacgttctgacttaggattcctta

SEQ ID NO: 1218840 - DNA, 25 bp, Homo sapien
ttgccaatagcctgtctgccgttct

SEQ ID NO: 1218841 - DNA, 25 bp, Homo sapien
ctctggcattggtctccatccttcc

SEQ ID NO: 1218842 - DNA, 25 bp, Homo sapien
ctggcattggtctccatccttccag

SEQ ID NO: 1218843 - DNA, 25 bp, Homo sapien
tctggcattggtctccatccttcca

SEQ ID NO: 1218844 - DNA, 25 bp, Homo sapien
ctctgatgctcatccctgggccaga

SEQ ID NO: 1218845 - DNA, 25 bp, Homo sapien
tggagcatgctctgagatcccatcc

SEQ ID NO: 1218846 - DNA, 25 bp, Homo sapien
cagttatgctcatagactccctctg

SEQ ID NO: 1218847 - DNA, 25 bp, Homo sapien
ctgttgaacgtaatcctgggagaga

SEQ ID NO: 1218848 - DNA, 25 bp, Homo sapien
ctgatggcctggctatgcttgttcc

SEQ ID NO: 1218849 - DNA, 25 bp, Homo sapien
gatggcctggctatgcttgttcctt

SEQ ID NO: 1218850 - DNA, 25 bp, Homo sapien
tggcctggctatgcttgttcctttt

SEQ ID NO: 1218851 - DNA, 25 bp, Homo sapien
ggcctggctatgcttgttccttttg

SEQ ID NO: 1218852 - DNA, 25 bp, Homo sapien
agaacaatactcccagggagatggg

SEQ ID NO: 1218853 - DNA, 25 bp, Homo sapien
aaaagccaaagatgatttccaaata

SEQ ID NO: 1218854 - DNA, 25 bp, Homo sapien
aaagccaaagatgatttccaaatat

SEQ ID NO: 1218855 - DNA, 25 bp, Homo sapien
catgaaaagccaaagatgatttcca

SEQ ID NO: 1218856 - DNA, 25 bp, Homo sapien
ctacatgaaaagccaaagatgattt

SEQ ID NO: 1218857 - DNA, 25 bp, Homo sapien
gaaccccagcagtagtctgtaactg

SEQ ID NO: 1218858 - DNA, 25 bp, Homo sapien
agcttccttgtactcgatggtccct

SEQ ID NO: 1218859 - DNA, 25 bp, Homo sapien
tcgatggtccctaatctcttcaggg

SEQ ID NO: 1218860 - DNA, 25 bp, Homo sapien
ccccagcagtagtctgtaactgtta

SEQ ID NO: 1218861 - DNA, 25 bp, Homo sapien
cacctatcagcttttgtttggactg

SEQ ID NO: 1218862 - DNA, 25 bp, Homo sapien
catctttcagccctttgtttggaag

SEQ ID NO: 1218863 - DNA, 25 bp, Homo sapien
tttggaaggagcacctatcagcttt

SEQ ID NO: 1218864 - DNA, 25 bp, Homo sapien
gccctttgtttggaaggagcaccta

SEQ ID NO: 1218865 - DNA, 25 bp, Homo sapien
tataattgagtttgcattatctgac

SEQ ID NO: 1218866 - DNA, 25 bp, Homo sapien
aattgagtttgcattatctgacagg

SEQ ID NO: 1218867 - DNA, 25 bp, Homo sapien
cctagagatataattgagtttgcat

SEQ ID NO: 1218868 - DNA, 25 bp, Homo sapien
tgagtttgcattatctgacaggtag

SEQ ID NO: 1218869 - DNA, 25 bp, Homo sapien
tttctggcataaatgtcttcagctc

SEQ ID NO: 1218870 - DNA, 25 bp, Homo sapien
tgcctatctggctgcacgagtgctg

SEQ ID NO: 1218871 - DNA, 25 bp, Homo sapien
taacaagtccctgtaggtccagctg

SEQ ID NO: 1218872 - DNA, 25 bp, Homo sapien
agtgctgtctgagggctacgtgaaa

SEQ ID NO: 1218873 - DNA, 25 bp, Homo sapien
gatgaacctcactcatgctcgatgc

SEQ ID NO: 1218874 - DNA, 25 bp, Homo sapien
gcacacgccagcactcaaggatatg

SEQ ID NO: 1218875 - DNA, 25 bp, Homo sapien
catctaacttaagatgtggcaccgg

SEQ ID NO: 1218876 - DNA, 25 bp, Homo sapien
caaggatatgcaagagtaggttgaa

SEQ ID NO: 1218877 - DNA, 25 bp, Homo sapien
tcagtaagtgcttggaggaagagag

SEQ ID NO: 1218878 - DNA, 25 bp, Homo sapien
tcagggaaaccttgcagggcattga

SEQ ID NO: 1218879 - DNA, 25 bp, Homo sapien
gctttgactggagccaaaggacagg

SEQ ID NO: 1218880 - DNA, 25 bp, Homo sapien
gaggaagagagtctcagggaaacct

SEQ ID NO: 1218881 - DNA, 25 bp, Homo sapien
aagctgcatgtgagctcagaagtac

SEQ ID NO: 1218882 - DNA, 25 bp, Homo sapien
aatgcaaaggggctgtacaaaagct

SEQ ID NO: 1218883 - DNA, 25 bp, Homo sapien
tgtacaaaagctgcatgtgagctca

SEQ ID NO: 1218884 - DNA, 25 bp, Homo sapien
tacaaaagctgcatgtgagctcaga

SEQ ID NO: 1218885 - DNA, 25 bp, Homo sapien
catctgagccttcgtcaagctggaa

SEQ ID NO: 1218886 - DNA, 25 bp, Homo sapien
gaagccgctccgtgtatcagtaaca

SEQ ID NO: 1218887 - DNA, 25 bp, Homo sapien
gagcacactggcatgcatgaggctg

SEQ ID NO: 1218888 - DNA, 25 bp, Homo sapien
tgccaaaactggctgagctcctggc

SEQ ID NO: 1218889 - DNA, 25 bp, Homo sapien
gaacaagcaatgatttgtgggcaca

SEQ ID NO: 1218890 - DNA, 25 bp, Homo sapien
tcctgttgtctcacaagcctgagct

SEQ ID NO: 1218891 - DNA, 25 bp, Homo sapien
gcacacagacattcgcagaacaagc

SEQ ID NO: 1218892 - DNA, 25 bp, Homo sapien
gggtgaagattatgcctgcagctcc

SEQ ID NO: 1218893 - DNA, 25 bp, Homo sapien
atcctgtgcctactcaggaccgtgg

SEQ ID NO: 1218894 - DNA, 25 bp, Homo sapien
tactcaggaccgtggggtttgtcat

SEQ ID NO: 1218895 - DNA, 25 bp, Homo sapien
tatcctgtgcctactcaggaccgtg

SEQ ID NO: 1218896 - DNA, 25 bp, Homo sapien
aactatcctgtgcctactcaggacc

SEQ ID NO: 1218897 - DNA, 25 bp, Homo sapien
ggaaagacatcttcagtaggaggca

SEQ ID NO: 1218898 - DNA, 25 bp, Homo sapien
acgatccacctgtttaattcctgca

SEQ ID NO: 1218899 - DNA, 25 bp, Homo sapien
aagtctctccatgtgactgaccctg

SEQ ID NO: 1218900 - DNA, 25 bp, Homo sapien
tgttgctgttggttctgtaaggctg

SEQ ID NO: 1218901 - DNA, 25 bp, Homo sapien
gctccttataggaatcccgaaagtc

SEQ ID NO: 1218902 - DNA, 25 bp, Homo sapien
tgtaaattagtctgctccttatagg

SEQ ID NO: 1218903 - DNA, 25 bp, Homo sapien
ctcctctgtaaattagtctgctcct

SEQ ID NO: 1218904 - DNA, 25 bp, Homo sapien
tagtctgctccttataggaatcccg

SEQ ID NO: 1218905 - DNA, 25 bp, Homo sapien
tgagagcttttgtgattcccccaag

SEQ ID NO: 1218906 - DNA, 25 bp, Homo sapien
gtgtctgagagcttttgtgattccc

SEQ ID NO: 1218907 - DNA, 25 bp, Homo sapien
tctgagagcttttgtgattccccca

SEQ ID NO: 1218908 - DNA, 25 bp, Homo sapien
tgtctgagagcttttgtgattcccc

SEQ ID NO: 1218909 - DNA, 25 bp, Homo sapien
aaatatgtaggaacctgcatggcag

SEQ ID NO: 1218910 - DNA, 25 bp, Homo sapien
gccacagaatcctggagattgtggg

SEQ ID NO: 1218911 - DNA, 25 bp, Homo sapien
gcaggaccgatagcaaaatatgtag

SEQ ID NO: 1218912 - DNA, 25 bp, Homo sapien
catggcagaaagtactttaccagcc

SEQ ID NO: 1218913 - DNA, 25 bp, Homo sapien
aatacaactgggctgggtcagacct

SEQ ID NO: 1218914 - DNA, 25 bp, Homo sapien
tctgcgatcatcaggtggtaaagcc

SEQ ID NO: 1218915 - DNA, 25 bp, Homo sapien
ttacagctgtgctggcactcaaacc

SEQ ID NO: 1218916 - DNA, 25 bp, Homo sapien
ccccaggcccaataatgctgtgatt

SEQ ID NO: 1218917 - DNA, 25 bp, Homo sapien
ctgagttcaccttcacttccaacat

SEQ ID NO: 1218918 - DNA, 25 bp, Homo sapien
ctctactgagttcaccttcacttcc

SEQ ID NO: 1218919 - DNA, 25 bp, Homo sapien
tactgagttcaccttcacttccaac

SEQ ID NO: 1218920 - DNA, 25 bp, Homo sapien
tctactgagttcaccttcacttcca

SEQ ID NO: 1218921 - DNA, 25 bp, Homo sapien
tctccaagacactggcaattgtgtg

SEQ ID NO: 1218922 - DNA, 25 bp, Homo sapien
gtctccaagacactggcaattgtgt

SEQ ID NO: 1218923 - DNA, 25 bp, Homo sapien
tccaagacactggcaattgtgtggc

SEQ ID NO: 1218924 - DNA, 25 bp, Homo sapien
ctccaagacactggcaattgtgtgg

SEQ ID NO: 1218925 - DNA, 25 bp, Homo sapien
taacttttccctctttatggtcaca

SEQ ID NO: 1218926 - DNA, 25 bp, Homo sapien
agtgctttagattagaacatatggc

SEQ ID NO: 1218927 - DNA, 25 bp, Homo sapien
acatttagttacagtacatgctgcc

SEQ ID NO: 1218928 - DNA, 25 bp, Homo sapien
aatttcccatatcgcagtgctttag

SEQ ID NO: 1218929 - DNA, 25 bp, Homo sapien
caaatgtactcaagtgcctcagaat

SEQ ID NO: 1218930 - DNA, 25 bp, Homo sapien
tggagcttgtaggaaaggatgccct

SEQ ID NO: 1218931 - DNA, 25 bp, Homo sapien
ctgaagtttggcttgctgacgtgac

SEQ ID NO: 1218932 - DNA, 25 bp, Homo sapien
caaatgcaggacgtaagcatctggg

SEQ ID NO: 1218933 - DNA, 25 bp, Homo sapien
tcttgtagatatgccttcccactgt

SEQ ID NO: 1218934 - DNA, 25 bp, Homo sapien
gtagatatgccttcccactgttctt

SEQ ID NO: 1218935 - DNA, 25 bp, Homo sapien
tcctcttgtagatatgccttcccac

SEQ ID NO: 1218936 - DNA, 25 bp, Homo sapien
ttctttcctcttgtagatatgcctt

SEQ ID NO: 1218937 - DNA, 25 bp, Homo sapien
gaagctgatcctctgctgaatgtac

SEQ ID NO: 1218938 - DNA, 25 bp, Homo sapien
cgtggttcaaagtcataacccctca

SEQ ID NO: 1218939 - DNA, 25 bp, Homo sapien
caggacttccaaataatgagggaca

SEQ ID NO: 1218940 - DNA, 25 bp, Homo sapien
gctgtggagcaatgtgtcatgttcc

SEQ ID NO: 1218941 - DNA, 25 bp, Homo sapien
tgctccaataaagacagtgactgca

SEQ ID NO: 1218942 - DNA, 25 bp, Homo sapien
tgactgcaggtttatctctgttttt

SEQ ID NO: 1218943 - DNA, 25 bp, Homo sapien
ttgctccaataaagacagtgactgc

SEQ ID NO: 1218944 - DNA, 25 bp, Homo sapien
gtggcttctcatttcattgttctcc

SEQ ID NO: 1218945 - DNA, 25 bp, Homo sapien
ttctgctccctggaagtggcttctc

SEQ ID NO: 1218946 - DNA, 25 bp, Homo sapien
ggcttctcatttcattgttctccat

SEQ ID NO: 1218947 - DNA, 25 bp, Homo sapien
gctccctggaagtggcttctcattt

SEQ ID NO: 1218948 - DNA, 25 bp, Homo sapien
cctgagaattctccagatagtcatt

SEQ ID NO: 1218949 - DNA, 25 bp, Homo sapien
gtgtttctggacttctcgttcctga

SEQ ID NO: 1218950 - DNA, 25 bp, Homo sapien
gcatggtgtttctggacttctcgtt

SEQ ID NO: 1218951 - DNA, 25 bp, Homo sapien
gagaattctccagatagtcattact

SEQ ID NO: 1218952 - DNA, 25 bp, Homo sapien
ctaactgtgcctgatgcatgcccaa

SEQ ID NO: 1218953 - DNA, 25 bp, Homo sapien
gaaaagaaggaacaatggtcgtgcc

SEQ ID NO: 1218954 - DNA, 25 bp, Homo sapien
catttgaaacatagtggaggccgca

SEQ ID NO: 1218955 - DNA, 25 bp, Homo sapien
gtgcagcctatttgctgcactaact

SEQ ID NO: 1218956 - DNA, 25 bp, Homo sapien
caatcagcaagactctgtgggcata

SEQ ID NO: 1218957 - DNA, 25 bp, Homo sapien
gcaagactctgtgggcataggaccc

SEQ ID NO: 1218958 - DNA, 25 bp, Homo sapien
cagcaagactctgtgggcataggac

SEQ ID NO: 1218959 - DNA, 25 bp, Homo sapien
agcaatcagcaagactctgtgggca

SEQ ID NO: 1218960 - DNA, 25 bp, Homo sapien
acttagttcttgaaaaactgaccat

SEQ ID NO: 1218961 - DNA, 25 bp, Homo sapien
ttcttactgatacttagttcttgaa

SEQ ID NO: 1218962 - DNA, 25 bp, Homo sapien
tcttgaaaaactgaccatgggcagg

SEQ ID NO: 1218963 - DNA, 25 bp, Homo sapien
gaaaaactgaccatgggcagggaga

SEQ ID NO: 1218964 - DNA, 25 bp, Homo sapien
gaaaagcaccgaacgctgatccaga

SEQ ID NO: 1218965 - DNA, 25 bp, Homo sapien
tatttggcggcttaaattgcagcag

SEQ ID NO: 1218966 - DNA, 25 bp, Homo sapien
gaaacactcttgactccagcatctg

SEQ ID NO: 1218967 - DNA, 25 bp, Homo sapien
gaatataaggaacagctcccgggct

SEQ ID NO: 1218968 - DNA, 25 bp, Homo sapien
tcattagtttctggtgtcgttcaga

SEQ ID NO: 1218969 - DNA, 25 bp, Homo sapien
tagtttgaatgctatcattgaatga

SEQ ID NO: 1218970 - DNA, 25 bp, Homo sapien
agtttctggtgtcgttcagactgtg

SEQ ID NO: 1218971 - DNA, 25 bp, Homo sapien
tgaatgctatcattgaatgatttca

SEQ ID NO: 1218972 - DNA, 25 bp, Homo sapien
ttttctaccttgttcagacactctc

SEQ ID NO: 1218973 - DNA, 25 bp, Homo sapien
ctatatcccaagtgtaggtgtaatg

SEQ ID NO: 1218974 - DNA, 25 bp, Homo sapien
tgtaggtgtaatgttgttgtttcgt

SEQ ID NO: 1218975 - DNA, 25 bp, Homo sapien
ttgttgtttcgtttcatgtgtctga

SEQ ID NO: 1218976 - DNA, 25 bp, Homo sapien
cactgggactcttctctcctcttga

SEQ ID NO: 1218977 - DNA, 25 bp, Homo sapien
tgggactcttctctcctcttgaatt

SEQ ID NO: 1218978 - DNA, 25 bp, Homo sapien
taggcactgggactcttctctcctc

SEQ ID NO: 1218979 - DNA, 25 bp, Homo sapien
ttaggcactgggactcttctctcct

SEQ ID NO: 1218980 - DNA, 25 bp, Homo sapien
gtaccaatgaaaacacatcctgggt

SEQ ID NO: 1218981 - DNA, 25 bp, Homo sapien
cgtaccaatgaaaacacatcctggg

SEQ ID NO: 1218982 - DNA, 25 bp, Homo sapien
taccaatgaaaacacatcctgggtg

SEQ ID NO: 1218983 - DNA, 25 bp, Homo sapien
agaaggacttcaaagttgtgttaat

SEQ ID NO: 1218984 - DNA, 25 bp, Homo sapien
tgacatcttggggtgttgctaactc

SEQ ID NO: 1218985 - DNA, 25 bp, Homo sapien
gaaggacttcaaagttgtgttaatc

SEQ ID NO: 1218986 - DNA, 25 bp, Homo sapien
gggtgttgctaactctggagggact

SEQ ID NO: 1218987 - DNA, 25 bp, Homo sapien
taccagagcctgaatctttgtgtct

SEQ ID NO: 1218988 - DNA, 25 bp, Homo sapien
caaccatgggttggcaataattcct

SEQ ID NO: 1218989 - DNA, 25 bp, Homo sapien
caagacatatggagacaaccatggg

SEQ ID NO: 1218990 - DNA, 25 bp, Homo sapien
tatgtcagccaatatagcctataca

SEQ ID NO: 1218991 - DNA, 25 bp, Homo sapien
taataagtcttaattatgtgatctt

SEQ ID NO: 1218992 - DNA, 25 bp, Homo sapien
attaataagtcttaattatgtgatc

SEQ ID NO: 1218993 - DNA, 25 bp, Homo sapien
tattaataagtcttaattatgtgat

SEQ ID NO: 1218994 - DNA, 25 bp, Homo sapien
ttaataagtcttaattatgtgatct

SEQ ID NO: 1218995 - DNA, 25 bp, Homo sapien
agcgaccgcggtaacatttctattc

SEQ ID NO: 1218996 - DNA, 25 bp, Homo sapien
tgctccaccgagcagtatgacagct

SEQ ID NO: 1218997 - DNA, 25 bp, Homo sapien
ttcacaaattcactaaaattccctg

SEQ ID NO: 1218998 - DNA, 25 bp, Homo sapien
aattcactaaaattccctgctccac

SEQ ID NO: 1218999 - DNA, 25 bp, Homo sapien
taaagcaaaaggattctctcggatg

SEQ ID NO: 1219000 - DNA, 25 bp, Homo sapien
cataaagcaaaaggattctctcgga

SEQ ID NO: 1219001 - DNA, 25 bp, Homo sapien
ttctgagcagagggtaagttctttg

SEQ ID NO: 1219002 - DNA, 25 bp, Homo sapien
agcaaaaggattctctcggatgtga

SEQ ID NO: 1219003 - DNA, 25 bp, Homo sapien
acagccctgggatgtagaacaggac

SEQ ID NO: 1219004 - DNA, 25 bp, Homo sapien
taatttgggatattctcactggaaa

SEQ ID NO: 1219005 - DNA, 25 bp, Homo sapien
tcctctgaactttcgcagagagatg

SEQ ID NO: 1219006 - DNA, 25 bp, Homo sapien
gaactttcgcagagagatgaccact

SEQ ID NO: 1219007 - DNA, 25 bp, Homo sapien
ctttgagaggtttccatacaggagc

SEQ ID NO: 1219008 - DNA, 25 bp, Homo sapien
gctctgaaagcctttgagaggtttc

SEQ ID NO: 1219009 - DNA, 25 bp, Homo sapien
tctgaaagcctttgagaggtttcca

SEQ ID NO: 1219010 - DNA, 25 bp, Homo sapien
aaagcctttgagaggtttccataca

SEQ ID NO: 1219011 - DNA, 25 bp, Homo sapien
cagcgaatacttgacaaggcagagc

SEQ ID NO: 1219012 - DNA, 25 bp, Homo sapien
gctgtaacaaatgtgtctctgggca

SEQ ID NO: 1219013 - DNA, 25 bp, Homo sapien
cagataccaaagttcagaggcagcg

SEQ ID NO: 1219014 - DNA, 25 bp, Homo sapien
tcaggacgtctgtccaggaaacctg

SEQ ID NO: 1219015 - DNA, 25 bp, Homo sapien
gaaagcacttttcagtcgtccttcc

SEQ ID NO: 1219016 - DNA, 25 bp, Homo sapien
ttgatcctaataaggttctggtgtg

SEQ ID NO: 1219017 - DNA, 25 bp, Homo sapien
gccagaagggattattgaaagcact

SEQ ID NO: 1219018 - DNA, 25 bp, Homo sapien
taaaaagagcattgcctctgacgga

SEQ ID NO: 1219019 - DNA, 25 bp, Homo sapien
tccttgctagaactatgactatcat

SEQ ID NO: 1219020 - DNA, 25 bp, Homo sapien
tatgactatcattgggcttaaatgg

SEQ ID NO: 1219021 - DNA, 25 bp, Homo sapien
cctccttgctagaactatgactatc

SEQ ID NO: 1219022 - DNA, 25 bp, Homo sapien
atgggattcattttaaccaggccac

SEQ ID NO: 1219023 - DNA, 25 bp, Homo sapien
ctagttgatttctgcgctgaggacc

SEQ ID NO: 1219024 - DNA, 25 bp, Homo sapien
cgactgtgtggtggctagagctgtt

SEQ ID NO: 1219025 - DNA, 25 bp, Homo sapien
ggaccttgacaacggtcactggtgc

SEQ ID NO: 1219026 - DNA, 25 bp, Homo sapien
gaaaggtggagtgctgaggcgactg

SEQ ID NO: 1219027 - DNA, 25 bp, Homo sapien
ctggacaggacctccatttctaatg

SEQ ID NO: 1219028 - DNA, 25 bp, Homo sapien
ctgcattgccatcacagctggacag

SEQ ID NO: 1219029 - DNA, 25 bp, Homo sapien
gatccacctgcattgccatcacagc

SEQ ID NO: 1219030 - DNA, 25 bp, Homo sapien
cacctgcattgccatcacagctgga

SEQ ID NO: 1219031 - DNA, 25 bp, Homo sapien
tcagctacttccagacaccagaccc

SEQ ID NO: 1219032 - DNA, 25 bp, Homo sapien
gtcagctacttccagacaccagacc

SEQ ID NO: 1219033 - DNA, 25 bp, Homo sapien
ctacttccagacaccagaccctcat

SEQ ID NO: 1219034 - DNA, 25 bp, Homo sapien
agctacttccagacaccagaccctc

SEQ ID NO: 1219035 - DNA, 25 bp, Homo sapien
tcccatctgcataccaattgtttct

SEQ ID NO: 1219036 - DNA, 25 bp, Homo sapien
tgcttctgctctccctacaagtgaa

SEQ ID NO: 1219037 - DNA, 25 bp, Homo sapien
caggtcggcatctctctcttactga

SEQ ID NO: 1219038 - DNA, 25 bp, Homo sapien
caggattttacaatggcagaagcgg

SEQ ID NO: 1219039 - DNA, 25 bp, Homo sapien
ctcattttcgtgaatgatcttctcc

SEQ ID NO: 1219040 - DNA, 25 bp, Homo sapien
cattttcgtgaatgatcttctccat

SEQ ID NO: 1219041 - DNA, 25 bp, Homo sapien
tttaaagacgaatgtcactgataat

SEQ ID NO: 1219042 - DNA, 25 bp, Homo sapien
tcattttcgtgaatgatcttctcca

SEQ ID NO: 1219043 - DNA, 25 bp, Homo sapien
agccagaatgaggggctccagaaag

SEQ ID NO: 1219044 - DNA, 25 bp, Homo sapien
agaatgtattatgggcagcccaggt

SEQ ID NO: 1219045 - DNA, 25 bp, Homo sapien
gagaatgtattatgggcagcccagg

SEQ ID NO: 1219046 - DNA, 25 bp, Homo sapien
aatgaggggctccagaaagatggaa

SEQ ID NO: 1219047 - DNA, 25 bp, Homo sapien
caatatatgggaatgatgaaactgt

SEQ ID NO: 1219048 - DNA, 25 bp, Homo sapien
gcaatatatgggaatgatgaaactg

SEQ ID NO: 1219049 - DNA, 25 bp, Homo sapien
ctgcaatatatgggaatgatgaaac

SEQ ID NO: 1219050 - DNA, 25 bp, Homo sapien
aatatatgggaatgatgaaactgta

SEQ ID NO: 1219051 - DNA, 25 bp, Homo sapien
aataataaaagtctgtaggcttaag

SEQ ID NO: 1219052 - DNA, 25 bp, Homo sapien
ataataaaagtctgtaggcttaaga

SEQ ID NO: 1219053 - DNA, 25 bp, Homo sapien
cattcagctgcgtgcttgcggatgt

SEQ ID NO: 1219054 - DNA, 25 bp, Homo sapien
gactgattcgtgcatgtccatgcaa

SEQ ID NO: 1219055 - DNA, 25 bp, Homo sapien
tccatgcaatttggcgcattcagct

SEQ ID NO: 1219056 - DNA, 25 bp, Homo sapien
tcacaggtggtgattgactgattcg

SEQ ID NO: 1219057 - DNA, 25 bp, Homo sapien
tttctgttcagctggttgatgaggg

SEQ ID NO: 1219058 - DNA, 25 bp, Homo sapien
ttttctgttcagctggttgatgagg

SEQ ID NO: 1219059 - DNA, 25 bp, Homo sapien
aatagttgggggcttcgttgcctga

SEQ ID NO: 1219060 - DNA, 25 bp, Homo sapien
gaggcagaggttctaataaatcagc

SEQ ID NO: 1219061 - DNA, 25 bp, Homo sapien
ctgcagagcaatagttgggggcttc

SEQ ID NO: 1219062 - DNA, 25 bp, Homo sapien
ttgcctgaggcagaggttctaataa

SEQ ID NO: 1219063 - DNA, 25 bp, Homo sapien
gatgaagcctgatctgatggatccc

SEQ ID NO: 1219064 - DNA, 25 bp, Homo sapien
ggagctggatgtttaggataatgcc

SEQ ID NO: 1219065 - DNA, 25 bp, Homo sapien
gatggatccccctcgccttgagaat

SEQ ID NO: 1219066 - DNA, 25 bp, Homo sapien
tgatactctgagacctggagctgga

SEQ ID NO: 1219067 - DNA, 25 bp, Homo sapien
ggctccatggccatagtagccagcg

SEQ ID NO: 1219068 - DNA, 25 bp, Homo sapien
tcagggaccggcatttagtctgcat

SEQ ID NO: 1219069 - DNA, 25 bp, Homo sapien
taaataatgccagacgtggctttcc

SEQ ID NO: 1219070 - DNA, 25 bp, Homo sapien
catttagtctgcatgatctggctcc

SEQ ID NO: 1219071 - DNA, 25 bp, Homo sapien
ccccaaacaaaagcgcaaagccttg

SEQ ID NO: 1219072 - DNA, 25 bp, Homo sapien
ccacagcagtggtggatccggattg

SEQ ID NO: 1219073 - DNA, 25 bp, Homo sapien
aacacgtaaatgatagcaaaccagt

SEQ ID NO: 1219074 - DNA, 25 bp, Homo sapien
gcaaaccagtaacctcctgctgctt

SEQ ID NO: 1219075 - DNA, 25 bp, Homo sapien
accctggaacagagcttagggtttg

SEQ ID NO: 1219076 - DNA, 25 bp, Homo sapien
ttgttttaccctggaacagagctta

SEQ ID NO: 1219077 - DNA, 25 bp, Homo sapien
ctcctagactgcttagagcttgttt

SEQ ID NO: 1219078 - DNA, 25 bp, Homo sapien
tcctagactgcttagagcttgtttt

SEQ ID NO: 1219079 - DNA, 25 bp, Homo sapien
ctcctgcattcagtttcaagcaatc

SEQ ID NO: 1219080 - DNA, 25 bp, Homo sapien
caagactcctgcattcagtttcaag

SEQ ID NO: 1219081 - DNA, 25 bp, Homo sapien
gactcctgcattcagtttcaagcaa

SEQ ID NO: 1219082 - DNA, 25 bp, Homo sapien
aagactcctgcattcagtttcaagc

SEQ ID NO: 1219083 - DNA, 25 bp, Homo sapien
catattttctccttcgtgtggcctc

SEQ ID NO: 1219084 - DNA, 25 bp, Homo sapien
tgatggaaaattgttccatattttc

SEQ ID NO: 1219085 - DNA, 25 bp, Homo sapien
tctccttcgtgtggcctcagaagca

SEQ ID NO: 1219086 - DNA, 25 bp, Homo sapien
ctgggactctctgaaaatgatggaa

SEQ ID NO: 1219087 - DNA, 25 bp, Homo sapien
ccctagtccagcgataaacttagca

SEQ ID NO: 1219088 - DNA, 25 bp, Homo sapien
gataaacttagcactccatacagag

SEQ ID NO: 1219089 - DNA, 25 bp, Homo sapien
ttagcactccatacagagacccata

SEQ ID NO: 1219090 - DNA, 25 bp, Homo sapien
tttccagcttccctagtccagcgat

SEQ ID NO: 1219091 - DNA, 25 bp, Homo sapien
ggctcttctgccaggactgaaaact

SEQ ID NO: 1219092 - DNA, 25 bp, Homo sapien
actgtccactctagacctggatcgg

SEQ ID NO: 1219093 - DNA, 25 bp, Homo sapien
tggctcttctgccaggactgaaaac

SEQ ID NO: 1219094 - DNA, 25 bp, Homo sapien
tctagacctggatcggctcccagag

SEQ ID NO: 1219095 - DNA, 25 bp, Homo sapien
caagttaggaagaattgccctccca

SEQ ID NO: 1219096 - DNA, 25 bp, Homo sapien
tctcttgtaaatgtcgacaggttcc

SEQ ID NO: 1219097 - DNA, 25 bp, Homo sapien
aaggagccagtgttgtaataataac

SEQ ID NO: 1219098 - DNA, 25 bp, Homo sapien
gaatctcctaaaggagccagtgttg

SEQ ID NO: 1219099 - DNA, 25 bp, Homo sapien
caaatcgttgttggtgtgtttcaaa

SEQ ID NO: 1219100 - DNA, 25 bp, Homo sapien
gctcagtctcaaatcgttgttggtg

SEQ ID NO: 1219101 - DNA, 25 bp, Homo sapien
tctggaaataataggctcagtctca

SEQ ID NO: 1219102 - DNA, 25 bp, Homo sapien
taataggctcagtctcaaatcgttg

SEQ ID NO: 1219103 - DNA, 25 bp, Homo sapien
gcctgtgggccacggtgagagtggc

SEQ ID NO: 1219104 - DNA, 25 bp, Homo sapien
atgggaacaggatggctcgagttgg

SEQ ID NO: 1219105 - DNA, 25 bp, Homo sapien
agcctgtgggccacggtgagagtgg

SEQ ID NO: 1219106 - DNA, 25 bp, Homo sapien
tcgagttggagaaaattctcagctt

SEQ ID NO: 1219107 - DNA, 25 bp, Homo sapien
gggctttacaggacaggacagccct

SEQ ID NO: 1219108 - DNA, 25 bp, Homo sapien
ggctttacaggacaggacagccctg

SEQ ID NO: 1219109 - DNA, 25 bp, Homo sapien
gacacgtcaatggttgtcacctgtg

SEQ ID NO: 1219110 - DNA, 25 bp, Homo sapien
cgtcaagcagctttctttaatgtct

SEQ ID NO: 1219111 - DNA, 25 bp, Homo sapien
tctggataaggcaagaagggccttg

SEQ ID NO: 1219112 - DNA, 25 bp, Homo sapien
gaaatcaatttgatgtccaacgtca

SEQ ID NO: 1219113 - DNA, 25 bp, Homo sapien
agtgagcgaggtgtgaagggattgg

SEQ ID NO: 1219114 - DNA, 25 bp, Homo sapien
ttcctgccaagcagctccggagagg

SEQ ID NO: 1219115 - DNA, 25 bp, Homo sapien
atgctttgaacaaagggctaggggt

SEQ ID NO: 1219116 - DNA, 25 bp, Homo sapien
cggagaggcatctacaaaccacagc

SEQ ID NO: 1219117 - DNA, 25 bp, Homo sapien
agctccggagaggcatctacaaacc

SEQ ID NO: 1219118 - DNA, 25 bp, Homo sapien
cctgctgaatttagcaaagcttgga

SEQ ID NO: 1219119 - DNA, 25 bp, Homo sapien
tccttgtcctacacaggacggattt

SEQ ID NO: 1219120 - DNA, 25 bp, Homo sapien
caaagcttggactctagactcttca

SEQ ID NO: 1219121 - DNA, 25 bp, Homo sapien
tcctacacaggacggatttagaggg

SEQ ID NO: 1219122 - DNA, 25 bp, Homo sapien
catttcatgcaaaacgtgaagatac

SEQ ID NO: 1219123 - DNA, 25 bp, Homo sapien
cccatgaaattgaccctgtgtatat

SEQ ID NO: 1219124 - DNA, 25 bp, Homo sapien
gagctatgccatattcctccaggct

SEQ ID NO: 1219125 - DNA, 25 bp, Homo sapien
ccttagacgagaaagcatgacccat

SEQ ID NO: 1219126 - DNA, 25 bp, Homo sapien
ggaataattacatcaaggagctggg

SEQ ID NO: 1219127 - DNA, 25 bp, Homo sapien
taggcgaaatgtgcctttattgtct

SEQ ID NO: 1219128 - DNA, 25 bp, Homo sapien
tgaagttctgatctggagttgttac

SEQ ID NO: 1219129 - DNA, 25 bp, Homo sapien
ttctgcaaaggtgctgtaggcgaaa

SEQ ID NO: 1219130 - DNA, 25 bp, Homo sapien
tggctaatgggtacagaaatctcct

SEQ ID NO: 1219131 - DNA, 25 bp, Homo sapien
tgtttcagacaatcttggctaatgg

SEQ ID NO: 1219132 - DNA, 25 bp, Homo sapien
cctctcaacatggaaacctcaagat

SEQ ID NO: 1219133 - DNA, 25 bp, Homo sapien
gagaaagatctagtatatgggagtt

SEQ ID NO: 1219134 - DNA, 25 bp, Homo sapien
tgagccagagcttctaattcagtgg

SEQ ID NO: 1219135 - DNA, 25 bp, Homo sapien
aatgaaattccaacccagtgtgtgc

SEQ ID NO: 1219136 - DNA, 25 bp, Homo sapien
tcactgtgtcatccgtgctgagcca

SEQ ID NO: 1219137 - DNA, 25 bp, Homo sapien
cgatgaagtctgtcagtgggaaacc

SEQ ID NO: 1219138 - DNA, 25 bp, Homo sapien
tcctataatggagaacccaagcctt

SEQ ID NO: 1219139 - DNA, 25 bp, Homo sapien
tcaagagataaattcctgtgaccga

SEQ ID NO: 1219140 - DNA, 25 bp, Homo sapien
gaccgaaagttatccaatcactcat

SEQ ID NO: 1219141 - DNA, 25 bp, Homo sapien
aagcctttcatcatacagctgcaga

SEQ ID NO: 1219142 - DNA, 25 bp, Homo sapien
ctggaagcgttcatgcatcagaaaa

SEQ ID NO: 1219143 - DNA, 25 bp, Homo sapien
ccagctcctggaagcgttcatgcat

SEQ ID NO: 1219144 - DNA, 25 bp, Homo sapien
gctcctggaagcgttcatgcatcag

SEQ ID NO: 1219145 - DNA, 25 bp, Homo sapien
tcctggaagcgttcatgcatcagaa

SEQ ID NO: 1219146 - DNA, 25 bp, Homo sapien
tgaaaatttaactggatattccctc

SEQ ID NO: 1219147 - DNA, 25 bp, Homo sapien
tttggaagtacatcgcaggagtttt

SEQ ID NO: 1219148 - DNA, 25 bp, Homo sapien
cctgatgttttttggaagtacatcg

SEQ ID NO: 1219149 - DNA, 25 bp, Homo sapien
tcttcccatgtggataaattctctg

SEQ ID NO: 1219150 - DNA, 25 bp, Homo sapien
ccacatgtactcaatcgtaggtcca

SEQ ID NO: 1219151 - DNA, 25 bp, Homo sapien
tctaaaggggcaattgtctgaaacc

SEQ ID NO: 1219152 - DNA, 25 bp, Homo sapien
catgtactcaatcgtaggtccagtg

SEQ ID NO: 1219153 - DNA, 25 bp, Homo sapien
gagccattgtcctccgtccacatgt

SEQ ID NO: 1219154 - DNA, 25 bp, Homo sapien
tgatctcagatgatccaccggcctt

SEQ ID NO: 1219155 - DNA, 25 bp, Homo sapien
gaatagcctgagtgctgtccacaca

SEQ ID NO: 1219156 - DNA, 25 bp, Homo sapien
cagaatagcctgagtgctgtccaca

SEQ ID NO: 1219157 - DNA, 25 bp, Homo sapien
tgtccacacaccagtcagttgtctg

SEQ ID NO: 1219158 - DNA, 25 bp, Homo sapien
ctgcagaatagcctgagtgctgtcc

SEQ ID NO: 1219159 - DNA, 25 bp, Homo sapien
actgctcaagagaatcagcttaaat

SEQ ID NO: 1219160 - DNA, 25 bp, Homo sapien
cagttttcggaatcagtggcagctc

SEQ ID NO: 1219161 - DNA, 25 bp, Homo sapien
cactctcttgtctgctacttctgga

SEQ ID NO: 1219162 - DNA, 25 bp, Homo sapien
tcctcctcgagcctgataactggtt

SEQ ID NO: 1219163 - DNA, 25 bp, Homo sapien
tttgatgaagtgagatgtcctaaag

SEQ ID NO: 1219164 - DNA, 25 bp, Homo sapien
ttttgatgaagtgagatgtcctaaa

SEQ ID NO: 1219165 - DNA, 25 bp, Homo sapien
tgatgaagtgagatgtcctaaagca

SEQ ID NO: 1219166 - DNA, 25 bp, Homo sapien
ttgatgaagtgagatgtcctaaagc

SEQ ID NO: 1219167 - DNA, 25 bp, Homo sapien
ccatagtcaggtctgaatttggtat

SEQ ID NO: 1219168 - DNA, 25 bp, Homo sapien
cttcaggatcgggaaaagatctaca

SEQ ID NO: 1219169 - DNA, 25 bp, Homo sapien
tttcccccataagagatagcctggc

SEQ ID NO: 1219170 - DNA, 25 bp, Homo sapien
taccatagtcaggtctgaatttggt

SEQ ID NO: 1219171 - DNA, 25 bp, Homo sapien
tgaactttggttctcatttgagttc

SEQ ID NO: 1219172 - DNA, 25 bp, Homo sapien
ttgaactttggttctcatttgagtt

SEQ ID NO: 1219173 - DNA, 25 bp, Homo sapien
tttgaactttggttctcatttgagt

SEQ ID NO: 1219174 - DNA, 25 bp, Homo sapien
tttctcagttgaaccagagtgggca

SEQ ID NO: 1219175 - DNA, 25 bp, Homo sapien
tagtagtgtgtttctgtccgtggtc

SEQ ID NO: 1219176 - DNA, 25 bp, Homo sapien
tagtgtgtttctgtccgtggtcctg

SEQ ID NO: 1219177 - DNA, 25 bp, Homo sapien
caatagcccatgttgccatatgcga

SEQ ID NO: 1219178 - DNA, 25 bp, Homo sapien
ccatatgcgatgaggagtttgctgc

SEQ ID NO: 1219179 - DNA, 25 bp, Homo sapien
aaaggacccggggcgacctcagatg

SEQ ID NO: 1219180 - DNA, 25 bp, Homo sapien
ggcgacctcagatggtggccgtccc

SEQ ID NO: 1219181 - DNA, 25 bp, Homo sapien
gatggtggccgtcccagcctggcat

SEQ ID NO: 1219182 - DNA, 25 bp, Homo sapien
acccggggcgacctcagatggtggc

SEQ ID NO: 1219183 - DNA, 25 bp, Homo sapien
ccagctcgttgagggagttgaactt

SEQ ID NO: 1219184 - DNA, 25 bp, Homo sapien
tgcggtagaagtcgaccagctcgtt

SEQ ID NO: 1219185 - DNA, 25 bp, Homo sapien
gaagtgctgcacctggtctccatag

SEQ ID NO: 1219186 - DNA, 25 bp, Homo sapien
ttgagcaagggctcctcgtcgcgca

SEQ ID NO: 1219187 - DNA, 25 bp, Homo sapien
ggaccccaatgatgtcgccatggca

SEQ ID NO: 1219188 - DNA, 25 bp, Homo sapien
gaccccaatgatgtcgccatggcag

SEQ ID NO: 1219189 - DNA, 25 bp, Homo sapien
ggaagaagccaacgcgcccgcagga

SEQ ID NO: 1219190 - DNA, 25 bp, Homo sapien
taaaatggcccattggccagatcgg

SEQ ID NO: 1219191 - DNA, 25 bp, Homo sapien
cattggccagatcggccgccgggct

SEQ ID NO: 1219192 - DNA, 25 bp, Homo sapien
tgtaaaatggcccattggccagatc

SEQ ID NO: 1219193 - DNA, 25 bp, Homo sapien
aaatggcccattggccagatcggcc

SEQ ID NO: 1219194 - DNA, 25 bp, Homo sapien
tttgtgcgaagtggccggaggcagt

SEQ ID NO: 1219195 - DNA, 25 bp, Homo sapien
gttagaagcccacggttcagtccaa

SEQ ID NO: 1219196 - DNA, 25 bp, Homo sapien
catcccagtttgtgcgaagtggccg

SEQ ID NO: 1219197 - DNA, 25 bp, Homo sapien
ggcagttagaagcccacggttcagt

SEQ ID NO: 1219198 - DNA, 25 bp, Homo sapien
agtcttgataggactctaggcccat

SEQ ID NO: 1219199 - DNA, 25 bp, Homo sapien
ttttctggtgatgaatgcaaccagc

SEQ ID NO: 1219200 - DNA, 25 bp, Homo sapien
tttctggtgatgaatgcaaccagcc

SEQ ID NO: 1219201 - DNA, 25 bp, Homo sapien
ttctggtgatgaatgcaaccagcct

SEQ ID NO: 1219202 - DNA, 25 bp, Homo sapien
tcaactttttgactgaaacgatgat

SEQ ID NO: 1219203 - DNA, 25 bp, Homo sapien
cgatgattttctcgactgtatttca

SEQ ID NO: 1219204 - DNA, 25 bp, Homo sapien
tgaaacgatgattttctcgactgta

SEQ ID NO: 1219205 - DNA, 25 bp, Homo sapien
caactttttgactgaaacgatgatt

SEQ ID NO: 1219206 - DNA, 25 bp, Homo sapien
tactcgcttgctaatctcatgggca

SEQ ID NO: 1219207 - DNA, 25 bp, Homo sapien
tttaattgatggtggagagcagtgc

SEQ ID NO: 1219208 - DNA, 25 bp, Homo sapien
tgggcacagtgaactaccgctgctt

SEQ ID NO: 1219209 - DNA, 25 bp, Homo sapien
caacggtttgctgtagtgcccttta

SEQ ID NO: 1219210 - DNA, 25 bp, Homo sapien
taaagtggatgcaaatggatcagca

SEQ ID NO: 1219211 - DNA, 25 bp, Homo sapien
aaatactgccattggttccaagacc

SEQ ID NO: 1219212 - DNA, 25 bp, Homo sapien
gtgtatgcattgttcatcagtataa

SEQ ID NO: 1219213 - DNA, 25 bp, Homo sapien
tccatataaagtggatgcaaatgga

SEQ ID NO: 1219214 - DNA, 25 bp, Homo sapien
gaagtgatgcctatcactagttgag

SEQ ID NO: 1219215 - DNA, 25 bp, Homo sapien
aagtgatgcctatcactagttgagt

SEQ ID NO: 1219216 - DNA, 25 bp, Homo sapien
gtgatgcctatcactagttgagtac

SEQ ID NO: 1219217 - DNA, 25 bp, Homo sapien
ctgaagtgatgcctatcactagttg

SEQ ID NO: 1219218 - DNA, 25 bp, Homo sapien
gtcttctacgatattacactcagag

SEQ ID NO: 1219219 - DNA, 25 bp, Homo sapien
acactcagagtcttcgccaagctct

SEQ ID NO: 1219220 - DNA, 25 bp, Homo sapien
acctcggtgtcttctacgatattac

SEQ ID NO: 1219221 - DNA, 25 bp, Homo sapien
gctctagtcgccagagggaaccctt

SEQ ID NO: 1219222 - DNA, 25 bp, Homo sapien
tgggcaagcaagcatccatggagtg

SEQ ID NO: 1219223 - DNA, 25 bp, Homo sapien
tgactgaactgcacaccagcgagtg

SEQ ID NO: 1219224 - DNA, 25 bp, Homo sapien
cagagttgcctatcttgggttcaaa

SEQ ID NO: 1219225 - DNA, 25 bp, Homo sapien
gattcacagagtctcgtgggctggc

SEQ ID NO: 1219226 - DNA, 25 bp, Homo sapien
tgctgccttctcatcgccttgtact

SEQ ID NO: 1219227 - DNA, 25 bp, Homo sapien
tactgacaatagtcgtaaataaccg

SEQ ID NO: 1219228 - DNA, 25 bp, Homo sapien
acaatagtcgtaaataaccgcagtg

SEQ ID NO: 1219229 - DNA, 25 bp, Homo sapien
catcgccttgtactgacaatagtcg

SEQ ID NO: 1219230 - DNA, 25 bp, Homo sapien
tctgcattatggatggatgagctcc

SEQ ID NO: 1219231 - DNA, 25 bp, Homo sapien
tatggatggatgagctccgaagccc

SEQ ID NO: 1219232 - DNA, 25 bp, Homo sapien
caatgggctctgcattatggatgga

SEQ ID NO: 1219233 - DNA, 25 bp, Homo sapien
gcaatgggctctgcattatggatgg

SEQ ID NO: 1219234 - DNA, 25 bp, Homo sapien
cacagctcctccgcaagggcgctca

SEQ ID NO: 1219235 - DNA, 25 bp, Homo sapien
gccacagctcctccgcaagggcgct

SEQ ID NO: 1219236 - DNA, 25 bp, Homo sapien
ggccacagctcctccgcaagggcgc

SEQ ID NO: 1219237 - DNA, 25 bp, Homo sapien
acagctcctccgcaagggcgctcac

SEQ ID NO: 1219238 - DNA, 25 bp, Homo sapien
gtgtgtctggcatggaacacagcca

SEQ ID NO: 1219239 - DNA, 25 bp, Homo sapien
gccttggctgcaagttgtttgtcag

SEQ ID NO: 1219240 - DNA, 25 bp, Homo sapien
tggtgtgtctggcatggaacacagc

SEQ ID NO: 1219241 - DNA, 25 bp, Homo sapien
ccttggctgcaagttgtttgtcaga

SEQ ID NO: 1219242 - DNA, 25 bp, Homo sapien
gggtgcctcatttagatctacagta

SEQ ID NO: 1219243 - DNA, 25 bp, Homo sapien
gagtaagccctaagttcccttgtga

SEQ ID NO: 1219244 - DNA, 25 bp, Homo sapien
tgtgatgctgttgtactagaaaagt

SEQ ID NO: 1219245 - DNA, 25 bp, Homo sapien
tcatctaaaggtcttagaactgccc

SEQ ID NO: 1219246 - DNA, 25 bp, Homo sapien
aatttggatgctgaactagggttgg

SEQ ID NO: 1219247 - DNA, 25 bp, Homo sapien
acttctctttatcacgaaggcttag

SEQ ID NO: 1219248 - DNA, 25 bp, Homo sapien
actagggttggcaggaacatggact

SEQ ID NO: 1219249 - DNA, 25 bp, Homo sapien
ctttatcacgaaggcttagtaatgc

SEQ ID NO: 1219250 - DNA, 25 bp, Homo sapien
ttgcttcaattagaccagcaacttt

SEQ ID NO: 1219251 - DNA, 25 bp, Homo sapien
tccgtttgcttcaattagaccagca

SEQ ID NO: 1219252 - DNA, 25 bp, Homo sapien
ccgtttgcttcaattagaccagcaa

SEQ ID NO: 1219253 - DNA, 25 bp, Homo sapien
gtttgcttcaattagaccagcaact

SEQ ID NO: 1219254 - DNA, 25 bp, Homo sapien
caccaatgccttttccgggactaag

SEQ ID NO: 1219255 - DNA, 25 bp, Homo sapien
gacaccaatgccttttccgggacta

SEQ ID NO: 1219256 - DNA, 25 bp, Homo sapien
ctatgagggacaccaatgccttttc

SEQ ID NO: 1219257 - DNA, 25 bp, Homo sapien
tgagggacaccaatgccttttccgg

SEQ ID NO: 1219258 - DNA, 25 bp, Homo sapien
tttcccgagcgggctgacgatggag

SEQ ID NO: 1219259 - DNA, 25 bp, Homo sapien
tgtttcccgagcgggctgacgatgg

SEQ ID NO: 1219260 - DNA, 25 bp, Homo sapien
gtttcccgagcgggctgacgatgga

SEQ ID NO: 1219261 - DNA, 25 bp, Homo sapien
ctgtttcccgagcgggctgacgatg

SEQ ID NO: 1219262 - DNA, 25 bp, Homo sapien
cttgcgggacaacgttgacattgga

SEQ ID NO: 1219263 - DNA, 25 bp, Homo sapien
tgcgggacaacgttgacattggact

SEQ ID NO: 1219264 - DNA, 25 bp, Homo sapien
cacttgcgggacaacgttgacattg

SEQ ID NO: 1219265 - DNA, 25 bp, Homo sapien
gcgggacaacgttgacattggactg

SEQ ID NO: 1219266 - DNA, 25 bp, Homo sapien
ctatcacgagggtgtttgacgctgc

SEQ ID NO: 1219267 - DNA, 25 bp, Homo sapien
gacgctgccggtctctgaggcgtac

SEQ ID NO: 1219268 - DNA, 25 bp, Homo sapien
ttgacgctgccggtctctgaggcgt

SEQ ID NO: 1219269 - DNA, 25 bp, Homo sapien
atcacgagggtgtttgacgctgccg

SEQ ID NO: 1219270 - DNA, 25 bp, Homo sapien
aaggtgaggagtcggaaggctggtt

SEQ ID NO: 1219271 - DNA, 25 bp, Homo sapien
caaggtgaggagtcggaaggctggt

SEQ ID NO: 1219272 - DNA, 25 bp, Homo sapien
ggtccctttccactgcaccttgtct

SEQ ID NO: 1219273 - DNA, 25 bp, Homo sapien
taaggcatagtagacgcgccatcga

SEQ ID NO: 1219274 - DNA, 25 bp, Homo sapien
aatgccacaggccttgccattcttc

SEQ ID NO: 1219275 - DNA, 25 bp, Homo sapien
gtccgccacctcgtgataggaagtg

SEQ ID NO: 1219276 - DNA, 25 bp, Homo sapien
cgagttggtgggcagaccaactcac

SEQ ID NO: 1219277 - DNA, 25 bp, Homo sapien
ctgagccgagttggtgggcagacca

SEQ ID NO: 1219278 - DNA, 25 bp, Homo sapien
tgagccgagttggtgggcagaccaa

SEQ ID NO: 1219279 - DNA, 25 bp, Homo sapien
agccgagttggtgggcagaccaact

SEQ ID NO: 1219280 - DNA, 25 bp, Homo sapien
tattctgtcaagtttcctctgtctt

SEQ ID NO: 1219281 - DNA, 25 bp, Homo sapien
tttattctgtcaagtttcctctgtc

SEQ ID NO: 1219282 - DNA, 25 bp, Homo sapien
tctgttttattctgtcaagtttcct

SEQ ID NO: 1219283 - DNA, 25 bp, Homo sapien
tctgtctttccacctctaagttctg

SEQ ID NO: 1219284 - DNA, 25 bp, Homo sapien
cttcaccaggttcttgaaggcaatt

SEQ ID NO: 1219285 - DNA, 25 bp, Homo sapien
aggcaatttgctgtcgaataagttt

SEQ ID NO: 1219286 - DNA, 25 bp, Homo sapien
tgaaggcaatttgctgtcgaataag

SEQ ID NO: 1219287 - DNA, 25 bp, Homo sapien
tcttcaccaggttcttgaaggcaat

SEQ ID NO: 1219288 - DNA, 25 bp, Homo sapien
acttctatgtcattgtagatttcag

SEQ ID NO: 1219289 - DNA, 25 bp, Homo sapien
gcagagagcttcttgccgttagaca

SEQ ID NO: 1219290 - DNA, 25 bp, Homo sapien
ttgccgttagacatggaacgtgccg

SEQ ID NO: 1219291 - DNA, 25 bp, Homo sapien
tggatgagccagctgggcgtcgttg

SEQ ID NO: 1219292 - DNA, 25 bp, Homo sapien
tgaggttggagcttgtggccagtat

SEQ ID NO: 1219293 - DNA, 25 bp, Homo sapien
ctgaggttggagcttgtggccagta

SEQ ID NO: 1219294 - DNA, 25 bp, Homo sapien
ttgttgttctcgttgaagtcgtcct

SEQ ID NO: 1219295 - DNA, 25 bp, Homo sapien
tcttctggcttgaaacaatctcttt

SEQ ID NO: 1219296 - DNA, 25 bp, Homo sapien
ttctactctgtagttcatcctggcc

SEQ ID NO: 1219297 - DNA, 25 bp, Homo sapien
tgacataatctttgtttccgaaatc

SEQ ID NO: 1219298 - DNA, 25 bp, Homo sapien
aactttgaagtccataatcttgact

SEQ ID NO: 1219299 - DNA, 25 bp, Homo sapien
gatggtttcataagtgagtaagagc

SEQ ID NO: 1219300 - DNA, 25 bp, Homo sapien
tggtttcataagtgagtaagagctt

SEQ ID NO: 1219301 - DNA, 25 bp, Homo sapien
ggtttcataagtgagtaagagctta

SEQ ID NO: 1219302 - DNA, 25 bp, Homo sapien
tgatggtttcataagtgagtaagag

SEQ ID NO: 1219303 - DNA, 25 bp, Homo sapien
tggagattcttgctccactttctgc

SEQ ID NO: 1219304 - DNA, 25 bp, Homo sapien
tctgcaggctaaagaagcaagattc

SEQ ID NO: 1219305 - DNA, 25 bp, Homo sapien
gagattcttgctccactttctgcag

SEQ ID NO: 1219306 - DNA, 25 bp, Homo sapien
agaagcaagattcttctaattgttt

SEQ ID NO: 1219307 - DNA, 25 bp, Homo sapien
aggttcctgtgcatccatcacccct

SEQ ID NO: 1219308 - DNA, 25 bp, Homo sapien
cttgcaagcttgaagatcacatggt

SEQ ID NO: 1219309 - DNA, 25 bp, Homo sapien
ggttcctgtgcatccatcacccctt

SEQ ID NO: 1219310 - DNA, 25 bp, Homo sapien
ctgcagcttccaaactagtgccatt

SEQ ID NO: 1219311 - DNA, 25 bp, Homo sapien
ggtgttgaaatgaccggagacaatg

SEQ ID NO: 1219312 - DNA, 25 bp, Homo sapien
aaatgaccggagacaatggcagatg

SEQ ID NO: 1219313 - DNA, 25 bp, Homo sapien
ccaaactagtgccatttcaagggac

SEQ ID NO: 1219314 - DNA, 25 bp, Homo sapien
aaggctttcgaattcttggccccag

SEQ ID NO: 1219315 - DNA, 25 bp, Homo sapien
ggtgtactccttagcaccataaggg

SEQ ID NO: 1219316 - DNA, 25 bp, Homo sapien
cataagggtcttctttagcatacag

SEQ ID NO: 1219317 - DNA, 25 bp, Homo sapien
tagcatacagcctcaatagataagg

SEQ ID NO: 1219318 - DNA, 25 bp, Homo sapien
caggagacacgtagatatagctgtg

SEQ ID NO: 1219319 - DNA, 25 bp, Homo sapien
cgtagatatagctgtgggttccaat

SEQ ID NO: 1219320 - DNA, 25 bp, Homo sapien
atgaaacaggagacacgtagatata

SEQ ID NO: 1219321 - DNA, 25 bp, Homo sapien
gagacacgtagatatagctgtgggt

SEQ ID NO: 1219322 - DNA, 25 bp, Homo sapien
tgccagagccccagtttttctggga

SEQ ID NO: 1219323 - DNA, 25 bp, Homo sapien
gttccatcgtgtcttgttgccctca

SEQ ID NO: 1219324 - DNA, 25 bp, Homo sapien
ggcaatttgcacctaaactgtcctt

SEQ ID NO: 1219325 - DNA, 25 bp, Homo sapien
tgatgttgaccctgcatgacaagca

SEQ ID NO: 1219326 - DNA, 25 bp, Homo sapien
caaaggtctcttgtgccggtagaaa

SEQ ID NO: 1219327 - DNA, 25 bp, Homo sapien
ctgcaacattactggatgccaggaa

SEQ ID NO: 1219328 - DNA, 25 bp, Homo sapien
gccggtagaaattggagccacttcc

SEQ ID NO: 1219329 - DNA, 25 bp, Homo sapien
gatgccaggaatctctgctcaaagg

SEQ ID NO: 1219330 - DNA, 25 bp, Homo sapien
agcctgtagaggcagagcacaatta

SEQ ID NO: 1219331 - DNA, 25 bp, Homo sapien
caaatgcggagccataggactgagc

SEQ ID NO: 1219332 - DNA, 25 bp, Homo sapien
tagaggcagagcacaattatgcttc

SEQ ID NO: 1219333 - DNA, 25 bp, Homo sapien
gacatctccatgaggggtgagagct

SEQ ID NO: 1219334 - DNA, 25 bp, Homo sapien
ccttcattatgcactctagagagag

SEQ ID NO: 1219335 - DNA, 25 bp, Homo sapien
cagctttctaggcaacatcctctga

SEQ ID NO: 1219336 - DNA, 25 bp, Homo sapien
tctgagtgctcagcgcttgggccca

SEQ ID NO: 1219337 - DNA, 25 bp, Homo sapien
accttgtctaggtcaagctccttca

SEQ ID NO: 1219338 - DNA, 25 bp, Homo sapien
tgaaaacttcattatccgggcctgg

SEQ ID NO: 1219339 - DNA, 25 bp, Homo sapien
ctctgaggatcccagcaaagatctt

SEQ ID NO: 1219340 - DNA, 25 bp, Homo sapien
aagatctttcatcttgacagaagtt

SEQ ID NO: 1219341 - DNA, 25 bp, Homo sapien
atgaaaacttcattatccgggcctg

SEQ ID NO: 1219342 - DNA, 25 bp, Homo sapien
gttagcatttccttgaggtgagata

SEQ ID NO: 1219343 - DNA, 25 bp, Homo sapien
ctgatggcgtatgttagcatttcct

SEQ ID NO: 1219344 - DNA, 25 bp, Homo sapien
ttccttgaggtgagataaagctgtg

SEQ ID NO: 1219345 - DNA, 25 bp, Homo sapien
catttccttgaggtgagataaagct

SEQ ID NO: 1219346 - DNA, 25 bp, Homo sapien
cacttctctgtcaatggtgtgctgg

SEQ ID NO: 1219347 - DNA, 25 bp, Homo sapien
gacagtcaagtcttcctcaagtggg

SEQ ID NO: 1219348 - DNA, 25 bp, Homo sapien
gccatatttactgaactgctgaacc

SEQ ID NO: 1219349 - DNA, 25 bp, Homo sapien
agtgtttcaggttgaccgccatatt

SEQ ID NO: 1219350 - DNA, 25 bp, Homo sapien
gggccctgaatatttacagcctgcc

SEQ ID NO: 1219351 - DNA, 25 bp, Homo sapien
tacttttgtaagtcactgggccctg

SEQ ID NO: 1219352 - DNA, 25 bp, Homo sapien
tgctactttccttacagatcaggta

SEQ ID NO: 1219353 - DNA, 25 bp, Homo sapien
ttaattaaatgcaatcagacttgct

SEQ ID NO: 1219354 - DNA, 25 bp, Homo sapien
tgttgtggaattagctcttgctccc

SEQ ID NO: 1219355 - DNA, 25 bp, Homo sapien
gactgtgagcttgctcttgttgtgg

SEQ ID NO: 1219356 - DNA, 25 bp, Homo sapien
ttcctctccctgtggtcgcagaagg

SEQ ID NO: 1219357 - DNA, 25 bp, Homo sapien
tctccctgtggtcgcagaaggagca

SEQ ID NO: 1219358 - DNA, 25 bp, Homo sapien
caagagggtagagtgggactctgac

SEQ ID NO: 1219359 - DNA, 25 bp, Homo sapien
cataggatcccaagagggtagagtg

SEQ ID NO: 1219360 - DNA, 25 bp, Homo sapien
tcagatacataggatcccaagaggg

SEQ ID NO: 1219361 - DNA, 25 bp, Homo sapien
gtatgcagcggtttaataaatattt

SEQ ID NO: 1219362 - DNA, 25 bp, Homo sapien
gagaggttacagcacatcagacagg

SEQ ID NO: 1219363 - DNA, 25 bp, Homo sapien
tcgggcatcgtcaaaatgatagttg

SEQ ID NO: 1219364 - DNA, 25 bp, Homo sapien
tgaatacctggtggcaaatgtatgg

SEQ ID NO: 1219365 - DNA, 25 bp, Homo sapien
tcatgctgattaaaacctggacaca

SEQ ID NO: 1219366 - DNA, 25 bp, Homo sapien
tagattttcttgtagacaagactca

SEQ ID NO: 1219367 - DNA, 25 bp, Homo sapien
gattttcttgtagacaagactcata

SEQ ID NO: 1219368 - DNA, 25 bp, Homo sapien
cagtagattttcttgtagacaagac

SEQ ID NO: 1219369 - DNA, 25 bp, Homo sapien
attttcttgtagacaagactcatag

SEQ ID NO: 1219370 - DNA, 25 bp, Homo sapien
ggttctccaaaaagctcagcagctg

SEQ ID NO: 1219371 - DNA, 25 bp, Homo sapien
aaaccgtccggtagtgcctctgtgg

SEQ ID NO: 1219372 - DNA, 25 bp, Homo sapien
gaacaactttcctgtaccaggctga

SEQ ID NO: 1219373 - DNA, 25 bp, Homo sapien
gctgacttagcctttaacctgcgag

SEQ ID NO: 1219374 - DNA, 25 bp, Homo sapien
gcttcttccaacatgaatttgccgg

SEQ ID NO: 1219375 - DNA, 25 bp, Homo sapien
tgaagctggttatgtttgcacctcc

SEQ ID NO: 1219376 - DNA, 25 bp, Homo sapien
tcgtataccaaggagttgcccgtcc

SEQ ID NO: 1219377 - DNA, 25 bp, Homo sapien
tttgtcctcatttaaatgaagctgg

SEQ ID NO: 1219378 - DNA, 25 bp, Homo sapien
aacaaaggtgtagaagcaggccttc

SEQ ID NO: 1219379 - DNA, 25 bp, Homo sapien
caaaggtgtagaagcaggccttcga

SEQ ID NO: 1219380 - DNA, 25 bp, Homo sapien
agagggaacggcataaacaaaggtg

SEQ ID NO: 1219381 - DNA, 25 bp, Homo sapien
atggagtaggtgcataggaaggcat

SEQ ID NO: 1219382 - DNA, 25 bp, Homo sapien
agaagctggagctttgggtatctcc

SEQ ID NO: 1219383 - DNA, 25 bp, Homo sapien
tgacacgctccattcctccagaagt

SEQ ID NO: 1219384 - DNA, 25 bp, Homo sapien
ttgcatttccgcagtgccccaggtt

SEQ ID NO: 1219385 - DNA, 25 bp, Homo sapien
ttgtgatgacctttgcaatttctcc

SEQ ID NO: 1219386 - DNA, 25 bp, Homo sapien
gcttcatccctctagatggtagcaa

SEQ ID NO: 1219387 - DNA, 25 bp, Homo sapien
tcctgattttccctagcggcctggg

SEQ ID NO: 1219388 - DNA, 25 bp, Homo sapien
tttgcccctggagacatgtcctgat

SEQ ID NO: 1219389 - DNA, 25 bp, Homo sapien
ggagcctaggcatttgcccctggag

SEQ ID NO: 1219390 - DNA, 25 bp, Homo sapien
aacttggatgggctgctttgcttct

SEQ ID NO: 1219391 - DNA, 25 bp, Homo sapien
aaacttggatgggctgctttgcttc

SEQ ID NO: 1219392 - DNA, 25 bp, Homo sapien
ggaaacttggatgggctgctttgct

SEQ ID NO: 1219393 - DNA, 25 bp, Homo sapien
cttggatgggctgctttgcttctct

SEQ ID NO: 1219394 - DNA, 25 bp, Homo sapien
aggcatcagtgaggggcacgttcat

SEQ ID NO: 1219395 - DNA, 25 bp, Homo sapien
aaaagtatggattgggccacatctg

SEQ ID NO: 1219396 - DNA, 25 bp, Homo sapien
ggggcacgttcatttgctgccccat

SEQ ID NO: 1219397 - DNA, 25 bp, Homo sapien
taaaaagtatggattgggccacatc

SEQ ID NO: 1219398 - DNA, 25 bp, Homo sapien
gtcaagtgttgggtattgccaagac

SEQ ID NO: 1219399 - DNA, 25 bp, Homo sapien
aagtcaagtgttgggtattgccaag

SEQ ID NO: 1219400 - DNA, 25 bp, Homo sapien
gaagtcaagtgttgggtattgccaa

SEQ ID NO: 1219401 - DNA, 25 bp, Homo sapien
tgaagtcaagtgttgggtattgcca

SEQ ID NO: 1219402 - DNA, 25 bp, Homo sapien
gcaaggctttgcacgtcttcactta

SEQ ID NO: 1219403 - DNA, 25 bp, Homo sapien
cccatgggtcctgtttagcaaggct

SEQ ID NO: 1219404 - DNA, 25 bp, Homo sapien
aatctgatggtattacactgtgtcc

SEQ ID NO: 1219405 - DNA, 25 bp, Homo sapien
gagcactctacaagttcactatttg

SEQ ID NO: 1219406 - DNA, 25 bp, Homo sapien
ctctgatagatcagactttcacagc

SEQ ID NO: 1219407 - DNA, 25 bp, Homo sapien
cctctgatagatcagactttcacag

SEQ ID NO: 1219408 - DNA, 25 bp, Homo sapien
gacattgagattccctcggtttcaa

SEQ ID NO: 1219409 - DNA, 25 bp, Homo sapien
caaggtggacattgagattccctcg

SEQ ID NO: 1219410 - DNA, 25 bp, Homo sapien
tcggtttcaagtgtcattctttgct

SEQ ID NO: 1219411 - DNA, 25 bp, Homo sapien
ttgctggtcatggaaatgcaaggtg

SEQ ID NO: 1219412 - DNA, 25 bp, Homo sapien
gatataggagcttgtgtatttgcat

SEQ ID NO: 1219413 - DNA, 25 bp, Homo sapien
ccctctttggtgagctgatatagga

SEQ ID NO: 1219414 - DNA, 25 bp, Homo sapien
ttgttggctccctctttggtgagct

SEQ ID NO: 1219415 - DNA, 25 bp, Homo sapien
tgtgtccctttatgggatacttttc

SEQ ID NO: 1219416 - DNA, 25 bp, Homo sapien
cagaaatagtccttgacctcaaaga

SEQ ID NO: 1219417 - DNA, 25 bp, Homo sapien
cagcctagattcatacacagttacc

SEQ ID NO: 1219418 - DNA, 25 bp, Homo sapien
tacctaccattaacacaagtcagag

SEQ ID NO: 1219419 - DNA, 25 bp, Homo sapien
gaaggatttagggagacacacagtg

SEQ ID NO: 1219420 - DNA, 25 bp, Homo sapien
tatgaagttgtttggcttccaacca

SEQ ID NO: 1219421 - DNA, 25 bp, Homo sapien
cctgtctgctgttgattagggtagc

SEQ ID NO: 1219422 - DNA, 25 bp, Homo sapien
gaaatgtgtttacatgaggttccat

SEQ ID NO: 1219423 - DNA, 25 bp, Homo sapien
gcccagggatccttcgtgaaatgtg

SEQ ID NO: 1219424 - DNA, 25 bp, Homo sapien
cgcaaaacagcaggacactctcctt

SEQ ID NO: 1219425 - DNA, 25 bp, Homo sapien
gacactgactgggagagtgtcccgc

SEQ ID NO: 1219426 - DNA, 25 bp, Homo sapien
ctgggagagtgtcccgcaaaacagc

SEQ ID NO: 1219427 - DNA, 25 bp, Homo sapien
gaaaaacagcgggacactgactggg

SEQ ID NO: 1219428 - DNA, 25 bp, Homo sapien
gattgcatggtgagtcaaaactctg

SEQ ID NO: 1219429 - DNA, 25 bp, Homo sapien
tgcaggggagggtaccagcacccca

SEQ ID NO: 1219430 - DNA, 25 bp, Homo sapien
ttccttaggtcatatctgcacttag

SEQ ID NO: 1219431 - DNA, 25 bp, Homo sapien
aaactctgagggtagaccgttgtgg

SEQ ID NO: 1219432 - DNA, 25 bp, Homo sapien
tttggcaagggagcaagacatagtc

SEQ ID NO: 1219433 - DNA, 25 bp, Homo sapien
ctgcttcctgtctgatgttgctgtc

SEQ ID NO: 1219434 - DNA, 25 bp, Homo sapien
tctgtgaaagcgctaagctgcttcc

SEQ ID NO: 1219435 - DNA, 25 bp, Homo sapien
gctgacacatgtttgtttggcccca

SEQ ID NO: 1219436 - DNA, 25 bp, Homo sapien
gcttgtagttaaaattgtgtcagcc

SEQ ID NO: 1219437 - DNA, 25 bp, Homo sapien
cttttgtcccttagaaaaggcagag

SEQ ID NO: 1219438 - DNA, 25 bp, Homo sapien
gctgtggttgcttgtagttaaaatt

SEQ ID NO: 1219439 - DNA, 25 bp, Homo sapien
gggataataatgacgccatttctgc

SEQ ID NO: 1219440 - DNA, 25 bp, Homo sapien
ttgaaatttagcctgactcacttcc

SEQ ID NO: 1219441 - DNA, 25 bp, Homo sapien
ctcacttcccggtgacctggtatta

SEQ ID NO: 1219442 - DNA, 25 bp, Homo sapien
tcttaggtatgcctgagctgtcctg

SEQ ID NO: 1219443 - DNA, 25 bp, Homo sapien
gacctggtattaaggtgattcttag

SEQ ID NO: 1219444 - DNA, 25 bp, Homo sapien
ctggattctggtgggtttactttgg

SEQ ID NO: 1219445 - DNA, 25 bp, Homo sapien
tgctgaggactgaggtgttgctgga

SEQ ID NO: 1219446 - DNA, 25 bp, Homo sapien
gcttcagtaagcttattccctcctc

SEQ ID NO: 1219447 - DNA, 25 bp, Homo sapien
tgccttgcttcagtaagcttattcc

SEQ ID NO: 1219448 - DNA, 25 bp, Homo sapien
gtcctgcctctgggaacgtgtctta

SEQ ID NO: 1219449 - DNA, 25 bp, Homo sapien
tcctgcctctgggaacgtgtcttac

SEQ ID NO: 1219450 - DNA, 25 bp, Homo sapien
tgatgagtcaattgggcccctcctt

SEQ ID NO: 1219451 - DNA, 25 bp, Homo sapien
tgaagtaaactgtctggaagtaccc

SEQ ID NO: 1219452 - DNA, 25 bp, Homo sapien
gcccctccttggagacaaggaattc

SEQ ID NO: 1219453 - DNA, 25 bp, Homo sapien
caaatcctcctgtacagctggggcc

SEQ ID NO: 1219454 - DNA, 25 bp, Homo sapien
cttctcataaggtaattcaaacttc

SEQ ID NO: 1219455 - DNA, 25 bp, Homo sapien
aggccagccagggtattggacaata

SEQ ID NO: 1219456 - DNA, 25 bp, Homo sapien
atcctttataggcaatgtggtcatc

SEQ ID NO: 1219457 - DNA, 25 bp, Homo sapien
gcaaatgtttcaagggatgtgatga

SEQ ID NO: 1219458 - DNA, 25 bp, Homo sapien
tgtggtcatcagttgcacgtcttca

SEQ ID NO: 1219459 - DNA, 25 bp, Homo sapien
gtcacagagctctgtcgctgcagca

SEQ ID NO: 1219460 - DNA, 25 bp, Homo sapien
agagctctgtcgctgcagcagaatg

SEQ ID NO: 1219461 - DNA, 25 bp, Homo sapien
cacagagctctgtcgctgcagcaga

SEQ ID NO: 1219462 - DNA, 25 bp, Homo sapien
acagagctctgtcgctgcagcagaa

SEQ ID NO: 1219463 - DNA, 25 bp, Homo sapien
ccttagacaaagcaattcgaaacct

SEQ ID NO: 1219464 - DNA, 25 bp, Homo sapien
tcctggagaagtgagctttggtgct

SEQ ID NO: 1219465 - DNA, 25 bp, Homo sapien
cgaaacctagatcttcagttggaga

SEQ ID NO: 1219466 - DNA, 25 bp, Homo sapien
tcagaacgtgctgacaggtgccagc

SEQ ID NO: 1219467 - DNA, 25 bp, Homo sapien
ttttgtatgtttcatgagataccag

SEQ ID NO: 1219468 - DNA, 25 bp, Homo sapien
tgtttcatgagataccagttagagt

SEQ ID NO: 1219469 - DNA, 25 bp, Homo sapien
tgtatgtttcatgagataccagtta

SEQ ID NO: 1219470 - DNA, 25 bp, Homo sapien
ttcatgagataccagttagagtttg

SEQ ID NO: 1219471 - DNA, 25 bp, Homo sapien
tctccccatcacgtatcattccatg

SEQ ID NO: 1219472 - DNA, 25 bp, Homo sapien
cccatcacgtatcattccatgagca

SEQ ID NO: 1219473 - DNA, 25 bp, Homo sapien
aggagctcccagcctagatggacat

SEQ ID NO: 1219474 - DNA, 25 bp, Homo sapien
agaggctgcgtttaccccctaggag

SEQ ID NO: 1219475 - DNA, 25 bp, Homo sapien
gttctggcggacctgaagcttgtct

SEQ ID NO: 1219476 - DNA, 25 bp, Homo sapien
tccccggttctggcggacctgaagc

SEQ ID NO: 1219477 - DNA, 25 bp, Homo sapien
ttgtctgaactattctggattcttc

SEQ ID NO: 1219478 - DNA, 25 bp, Homo sapien
gcggacctgaagcttgtctgaacta

SEQ ID NO: 1219479 - DNA, 25 bp, Homo sapien
gcagagataggccagtccatccagg

SEQ ID NO: 1219480 - DNA, 25 bp, Homo sapien
ctacacaatgcacttcgggaatcca

SEQ ID NO: 1219481 - DNA, 25 bp, Homo sapien
tgagttgctgtctctacacaatgca

SEQ ID NO: 1219482 - DNA, 25 bp, Homo sapien
agataggccagtccatccaggcaga

SEQ ID NO: 1219483 - DNA, 25 bp, Homo sapien
tttttccaagtcaagggtgagcaag

SEQ ID NO: 1219484 - DNA, 25 bp, Homo sapien
tggtttttccaagtcaagggtgagc

SEQ ID NO: 1219485 - DNA, 25 bp, Homo sapien
ctggtttttccaagtcaagggtgag

SEQ ID NO: 1219486 - DNA, 25 bp, Homo sapien
tttccaagtcaagggtgagcaagag

SEQ ID NO: 1219487 - DNA, 25 bp, Homo sapien
tttagaatagagattagtaacagac

SEQ ID NO: 1219488 - DNA, 25 bp, Homo sapien
gagtaaaggtagctggaaaagagag

SEQ ID NO: 1219489 - DNA, 25 bp, Homo sapien
agtaaaggtagctggaaaagagaga

SEQ ID NO: 1219490 - DNA, 25 bp, Homo sapien
ggagtatggttgagaattgagctga

SEQ ID NO: 1219491 - DNA, 25 bp, Homo sapien
gtcccagctacttgaggggctgagg

SEQ ID NO: 1219492 - DNA, 25 bp, Homo sapien
tcaggcgtggtggtgtgcgcttgta

SEQ ID NO: 1219493 - DNA, 25 bp, Homo sapien
agtcaggcgtggtggtgtgcgcttg

SEQ ID NO: 1219494 - DNA, 25 bp, Homo sapien
tacttgaggggctgaggcaggagaa

SEQ ID NO: 1219495 - DNA, 25 bp, Homo sapien
cctgaatagttgatttctctcttta

SEQ ID NO: 1219496 - DNA, 25 bp, Homo sapien
ggtcctgaatagttgatttctctct

SEQ ID NO: 1219497 - DNA, 25 bp, Homo sapien
gggccggtcctgaatagttgatttc

SEQ ID NO: 1219498 - DNA, 25 bp, Homo sapien
gccggtcctgaatagttgatttctc

SEQ ID NO: 1219499 - DNA, 25 bp, Homo sapien
tcagcaggcctgtgcggaacagaaa

SEQ ID NO: 1219500 - DNA, 25 bp, Homo sapien
atataaagcacccagttcagcaggc

SEQ ID NO: 1219501 - DNA, 25 bp, Homo sapien
cctatataaagcacccagttcagca

SEQ ID NO: 1219502 - DNA, 25 bp, Homo sapien
ggcctgtgcggaacagaaatgactc

SEQ ID NO: 1219503 - DNA, 25 bp, Homo sapien
taagtacgagtacctgtgccttgag

SEQ ID NO: 1219504 - DNA, 25 bp, Homo sapien
aatcttggatgtttcttttgcccct

SEQ ID NO: 1219505 - DNA, 25 bp, Homo sapien
catcaggacctagctttgagtttgc

SEQ ID NO: 1219506 - DNA, 25 bp, Homo sapien
gatggctacagccatgcagatgaga

SEQ ID NO: 1219507 - DNA, 25 bp, Homo sapien
cctgatctagccactcatctttgtt

SEQ ID NO: 1219508 - DNA, 25 bp, Homo sapien
ccaaagtggctgaggattggtttaa

SEQ ID NO: 1219509 - DNA, 25 bp, Homo sapien
taattgacttgcagtgaatatggca

SEQ ID NO: 1219510 - DNA, 25 bp, Homo sapien
tcagctattttagccttggaggaag

SEQ ID NO: 1219511 - DNA, 25 bp, Homo sapien
agcagaatttactgcctgggatccc

SEQ ID NO: 1219512 - DNA, 25 bp, Homo sapien
cacaccaattcctattatcagcaga

SEQ ID NO: 1219513 - DNA, 25 bp, Homo sapien
ttatcagcagaatttactgcctggg

SEQ ID NO: 1219514 - DNA, 25 bp, Homo sapien
ttatcacaccaattcctattatcag

SEQ ID NO: 1219515 - DNA, 25 bp, Homo sapien
catgcatgggctcgctacagggtaa

SEQ ID NO: 1219516 - DNA, 25 bp, Homo sapien
caatcttggtgcttaaactgctcag

SEQ ID NO: 1219517 - DNA, 25 bp, Homo sapien
tagagccaagcacatgcacgatcag

SEQ ID NO: 1219518 - DNA, 25 bp, Homo sapien
taaattttccagtacaggtgcaccc

SEQ ID NO: 1219519 - DNA, 25 bp, Homo sapien
ctgcccactatgcctttgccaactg

SEQ ID NO: 1219520 - DNA, 25 bp, Homo sapien
ttctgcccactatgcctttgccaac

SEQ ID NO: 1219521 - DNA, 25 bp, Homo sapien
ctggactccttgttcaagattcttc

SEQ ID NO: 1219522 - DNA, 25 bp, Homo sapien
ggactccttgttcaagattcttctg

SEQ ID NO: 1219523 - DNA, 25 bp, Homo sapien
tccccttgctttacagacctgtagc

SEQ ID NO: 1219524 - DNA, 25 bp, Homo sapien
cacaacctgtatcaggagacttgac

SEQ ID NO: 1219525 - DNA, 25 bp, Homo sapien
caaatgggaggtggcattaatgtca

SEQ ID NO: 1219526 - DNA, 25 bp, Homo sapien
tggcattaatgtcagagagccccag

SEQ ID NO: 1219527 - DNA, 25 bp, Homo sapien
atgggtacttgagagatgacagtgt

SEQ ID NO: 1219528 - DNA, 25 bp, Homo sapien
ccaagatgggtacttgagagatgac

SEQ ID NO: 1219529 - DNA, 25 bp, Homo sapien
ccgtaccctccaagatgggtacttg

SEQ ID NO: 1219530 - DNA, 25 bp, Homo sapien
catgtggggtccgtaccctccaaga

SEQ ID NO: 1219531 - DNA, 25 bp, Homo sapien
tcccaacatgtacagtccactagat

SEQ ID NO: 1219532 - DNA, 25 bp, Homo sapien
tgccaggaaggcaagattctttgcc

SEQ ID NO: 1219533 - DNA, 25 bp, Homo sapien
aggaaatgatgccaggaaggcaaga

SEQ ID NO: 1219534 - DNA, 25 bp, Homo sapien
tagatttctgcttaactccaagagc

SEQ ID NO: 1219535 - DNA, 25 bp, Homo sapien
gacccattcccagtcaaagggaaga

SEQ ID NO: 1219536 - DNA, 25 bp, Homo sapien
ctttgacccattcccagtcaaaggg

SEQ ID NO: 1219537 - DNA, 25 bp, Homo sapien
ttgacccattcccagtcaaagggaa

SEQ ID NO: 1219538 - DNA, 25 bp, Homo sapien
cattcccagtcaaagggaagaaaga

SEQ ID NO: 1219539 - DNA, 25 bp, Homo sapien
tcaataatgagaggaaaatgcaccc

SEQ ID NO: 1219540 - DNA, 25 bp, Homo sapien
tgggtctctctgaaaaaggccctta

SEQ ID NO: 1219541 - DNA, 25 bp, Homo sapien
ggctcagtgcaagccccataaaagg

SEQ ID NO: 1219542 - DNA, 25 bp, Homo sapien
cagtttctcgtatgtggctcctccc

SEQ ID NO: 1219543 - DNA, 25 bp, Homo sapien
gacttatctaggaaggacagcctcc

SEQ ID NO: 1219544 - DNA, 25 bp, Homo sapien
gctaacctggctttcatagactgag

SEQ ID NO: 1219545 - DNA, 25 bp, Homo sapien
ggcactgtccaaagagcacgaagag

SEQ ID NO: 1219546 - DNA, 25 bp, Homo sapien
gaagagcactttgcaaccccgtttg

SEQ ID NO: 1219547 - DNA, 25 bp, Homo sapien
cccactgtgtgtgccataactgagc

SEQ ID NO: 1219548 - DNA, 25 bp, Homo sapien
cataactgagctcggtgtggttggt

SEQ ID NO: 1219549 - DNA, 25 bp, Homo sapien
tagttgggatgtcggtcaccctctc

SEQ ID NO: 1219550 - DNA, 25 bp, Homo sapien
tccctttgtctaggtcccactgtgt

SEQ ID NO: 1219551 - DNA, 25 bp, Homo sapien
tggcatcccggaatcacacatttgg

SEQ ID NO: 1219552 - DNA, 25 bp, Homo sapien
tagacactgcattacctggccaaag

SEQ ID NO: 1219553 - DNA, 25 bp, Homo sapien
taagtccatgtggaacctcctctgt

SEQ ID NO: 1219554 - DNA, 25 bp, Homo sapien
cacatttgggagatgtcaaggacct

SEQ ID NO: 1219555 - DNA, 25 bp, Homo sapien
ggaatgaaggacaagagaagcacat

SEQ ID NO: 1219556 - DNA, 25 bp, Homo sapien
gacagactccggtggaatgaaggac

SEQ ID NO: 1219557 - DNA, 25 bp, Homo sapien
aatgaaggacaagagaagcacatgg

SEQ ID NO: 1219558 - DNA, 25 bp, Homo sapien
ctggttgggtatgagacagactccg

SEQ ID NO: 1219559 - DNA, 25 bp, Homo sapien
atgcctcctgaacttcactccactg

SEQ ID NO: 1219560 - DNA, 25 bp, Homo sapien
tccatgcctcctgaacttcactcca

SEQ ID NO: 1219561 - DNA, 25 bp, Homo sapien
ctcctgaacttcactccactgaaat

SEQ ID NO: 1219562 - DNA, 25 bp, Homo sapien
tgtcagctccatgcctcctgaactt

SEQ ID NO: 1219563 - DNA, 25 bp, Homo sapien
gattaaggttcccatctgcggtgct

SEQ ID NO: 1219564 - DNA, 25 bp, Homo sapien
catgtctcagttttagcctaaaggg

SEQ ID NO: 1219565 - DNA, 25 bp, Homo sapien
ccgggagttggcatccgatggtata

SEQ ID NO: 1219566 - DNA, 25 bp, Homo sapien
gaagaagcacgcacactccagatgt

SEQ ID NO: 1219567 - DNA, 25 bp, Homo sapien
ttctgcaagttctgcttgctctgtg

SEQ ID NO: 1219568 - DNA, 25 bp, Homo sapien
aatagagtgtttttaccccattctg

SEQ ID NO: 1219569 - DNA, 25 bp, Homo sapien
tgtttttaccccattctgcaagttc

SEQ ID NO: 1219570 - DNA, 25 bp, Homo sapien
ctgcaagttctgcttgctctgtggg

SEQ ID NO: 1219571 - DNA, 25 bp, Homo sapien
aagtgggcagttcagaccttggtgc

SEQ ID NO: 1219572 - DNA, 25 bp, Homo sapien
ggctagtgtttgacagtctaccctc

SEQ ID NO: 1219573 - DNA, 25 bp, Homo sapien
tgtttttggcgagtcatgctttgca

SEQ ID NO: 1219574 - DNA, 25 bp, Homo sapien
ggtagaaccttttgtagtcacagca

SEQ ID NO: 1219575 - DNA, 25 bp, Homo sapien
tatttgtctatccaggtttggctca

SEQ ID NO: 1219576 - DNA, 25 bp, Homo sapien
cctcttgggttgtatctacagtgta

SEQ ID NO: 1219577 - DNA, 25 bp, Homo sapien
tgtactgggaaactggagcccggat

SEQ ID NO: 1219578 - DNA, 25 bp, Homo sapien
gagcccggatgcgatatattattga

SEQ ID NO: 1219579 - DNA, 25 bp, Homo sapien
gcaaagtggaatgatgtgggcttct

SEQ ID NO: 1219580 - DNA, 25 bp, Homo sapien
tgaggcctttaacagttggattata

SEQ ID NO: 1219581 - DNA, 25 bp, Homo sapien
cagctaaaagccaggcgttcaggag

SEQ ID NO: 1219582 - DNA, 25 bp, Homo sapien
gccataatggcatagtaatgaaatg

SEQ ID NO: 1219583 - DNA, 25 bp, Homo sapien
tgctgtttcttacgtgagccttcca

SEQ ID NO: 1219584 - DNA, 25 bp, Homo sapien
tgtttcttacgtgagccttccacat

SEQ ID NO: 1219585 - DNA, 25 bp, Homo sapien
cccttgctgtttcttacgtgagcct

SEQ ID NO: 1219586 - DNA, 25 bp, Homo sapien
ctcctgtttgctccggggctacgcc

SEQ ID NO: 1219587 - DNA, 25 bp, Homo sapien
tcaatttaagagaaagctcctgacg

SEQ ID NO: 1219588 - DNA, 25 bp, Homo sapien
tcctgacgttgcagagaaggtgctt

SEQ ID NO: 1219589 - DNA, 25 bp, Homo sapien
tctatcttcctatagagaatggtgc

SEQ ID NO: 1219590 - DNA, 25 bp, Homo sapien
gacctgagtaaacactaatagactc

SEQ ID NO: 1219591 - DNA, 25 bp, Homo sapien
taagtgtttctgactcatccgtggc

SEQ ID NO: 1219592 - DNA, 25 bp, Homo sapien
taaccatggagcactgtgcactgaa

SEQ ID NO: 1219593 - DNA, 25 bp, Homo sapien
gctgtgagtcgtttttagctgctct

SEQ ID NO: 1219594 - DNA, 25 bp, Homo sapien
ggcccctgatcacagcttttaagtg

SEQ ID NO: 1219595 - DNA, 25 bp, Homo sapien
aaatctatcaccaaacaatcacagt

SEQ ID NO: 1219596 - DNA, 25 bp, Homo sapien
ccagaacatctacatacaagagtta

SEQ ID NO: 1219597 - DNA, 25 bp, Homo sapien
gccatgccatgttctgcacagcatt

SEQ ID NO: 1219598 - DNA, 25 bp, Homo sapien
caagagtctcttgacatgccatgcc

SEQ ID NO: 1219599 - DNA, 25 bp, Homo sapien
tgtcggtgaccagcaaatgaggcat

SEQ ID NO: 1219600 - DNA, 25 bp, Homo sapien
tgatggtgaacaggtccaagactgt

SEQ ID NO: 1219601 - DNA, 25 bp, Homo sapien
cattaggtggcgatacatgaatgcc

SEQ ID NO: 1219602 - DNA, 25 bp, Homo sapien
cgttttgagcgcgtgcatgcacata

SEQ ID NO: 1219603 - DNA, 25 bp, Homo sapien
tgcacatcttcctacttgctgagcc

SEQ ID NO: 1219604 - DNA, 25 bp, Homo sapien
tgtcacaggcatcgtctaaaaatgc

SEQ ID NO: 1219605 - DNA, 25 bp, Homo sapien
tgtatgcgtcagagaagagaatttc

SEQ ID NO: 1219606 - DNA, 25 bp, Homo sapien
tagagagtgtgtgaatctccgcctg

SEQ ID NO: 1219607 - DNA, 25 bp, Homo sapien
ccttgggctgtctggccttctcttt

SEQ ID NO: 1219608 - DNA, 25 bp, Homo sapien
atgcctgaagactctgcctccacag

SEQ ID NO: 1219609 - DNA, 25 bp, Homo sapien
gagatgcctgaagactctgcctcca

SEQ ID NO: 1219610 - DNA, 25 bp, Homo sapien
ccacaggcaggtcaatgtcctcagc

SEQ ID NO: 1219611 - DNA, 25 bp, Homo sapien
gagggagatgcctgaagactctgcc

SEQ ID NO: 1219612 - DNA, 25 bp, Homo sapien
tcacaggctgtctaatctcccttct

SEQ ID NO: 1219613 - DNA, 25 bp, Homo sapien
tctgggagagcagaccagagtggct

SEQ ID NO: 1219614 - DNA, 25 bp, Homo sapien
taggcccttgtaggacatgtgaatg

SEQ ID NO: 1219615 - DNA, 25 bp, Homo sapien
ccttgtaggacatgtgaatgccagt

SEQ ID NO: 1219616 - DNA, 25 bp, Homo sapien
ggcccttgtaggacatgtgaatgcc

SEQ ID NO: 1219617 - DNA, 25 bp, Homo sapien
cttcagcaccgttgcctctgaagaa

SEQ ID NO: 1219618 - DNA, 25 bp, Homo sapien
cttctcttcagcaccgttgcctctg

SEQ ID NO: 1219619 - DNA, 25 bp, Homo sapien
agcaccgttgcctctgaagaacagc

SEQ ID NO: 1219620 - DNA, 25 bp, Homo sapien
tcttcagcaccgttgcctctgaaga

SEQ ID NO: 1219621 - DNA, 25 bp, Homo sapien
aagctaagaagactctctgctgtcc

SEQ ID NO: 1219622 - DNA, 25 bp, Homo sapien
aagaagcagaatgattggaagctaa

SEQ ID NO: 1219623 - DNA, 25 bp, Homo sapien
tgcacttgaatggatcatgttcata

SEQ ID NO: 1219624 - DNA, 25 bp, Homo sapien
ggatcatgttcatagtaagaagcag

SEQ ID NO: 1219625 - DNA, 25 bp, Homo sapien
tccagagcctactggcatgaggaga

SEQ ID NO: 1219626 - DNA, 25 bp, Homo sapien
ctggggagtggctgacatttggaac

SEQ ID NO: 1219627 - DNA, 25 bp, Homo sapien
tgtggccccacagatgggatggcct

SEQ ID NO: 1219628 - DNA, 25 bp, Homo sapien
cagcatgaatccagagcctactggc

SEQ ID NO: 1219629 - DNA, 25 bp, Homo sapien
gatcttcccagttatgtctgaaacc

SEQ ID NO: 1219630 - DNA, 25 bp, Homo sapien
tctgaaaccatcaggttcattgcgc

SEQ ID NO: 1219631 - DNA, 25 bp, Homo sapien
ggtgaatgctttctagatcttccca

SEQ ID NO: 1219632 - DNA, 25 bp, Homo sapien
ctggaaataggttcagttgtagcct

SEQ ID NO: 1219633 - DNA, 25 bp, Homo sapien
tacttacaatgtatctgattgagcg

SEQ ID NO: 1219634 - DNA, 25 bp, Homo sapien
gagtcaaaggaagtgggtagtcata

SEQ ID NO: 1219635 - DNA, 25 bp, Homo sapien
ataagtatcccttgcctcatccaaa

SEQ ID NO: 1219636 - DNA, 25 bp, Homo sapien
caatgtatctgattgagcgattcca

SEQ ID NO: 1219637 - DNA, 25 bp, Homo sapien
gctggaggcatttgcgatgactctc

SEQ ID NO: 1219638 - DNA, 25 bp, Homo sapien
tttgcgatgactctccaaggtcacc

SEQ ID NO: 1219639 - DNA, 25 bp, Homo sapien
gtatccagagctggaggcatttgcg

SEQ ID NO: 1219640 - DNA, 25 bp, Homo sapien
ggcatttgcgatgactctccaaggt

SEQ ID NO: 1219641 - DNA, 25 bp, Homo sapien
cacttcctatgggaacctgcttctg

SEQ ID NO: 1219642 - DNA, 25 bp, Homo sapien
gtcacttcctatgggaacctgcttc

SEQ ID NO: 1219643 - DNA, 25 bp, Homo sapien
tcctatgggaacctgcttctgatcc

SEQ ID NO: 1219644 - DNA, 25 bp, Homo sapien
ctagtcacttcctatgggaacctgc

SEQ ID NO: 1219645 - DNA, 25 bp, Homo sapien
ggaggaaggtatcaactcttcccac

SEQ ID NO: 1219646 - DNA, 25 bp, Homo sapien
taggaggaaggtatcaactcttccc

SEQ ID NO: 1219647 - DNA, 25 bp, Homo sapien
gaggaaggtatcaactcttcccacc

SEQ ID NO: 1219648 - DNA, 25 bp, Homo sapien
ctaggaggaaggtatcaactcttcc

SEQ ID NO: 1219649 - DNA, 25 bp, Homo sapien
gctgcagagagttgtgtgtcagagg

SEQ ID NO: 1219650 - DNA, 25 bp, Homo sapien
agaatgtacaaaatggcccattgtt

SEQ ID NO: 1219651 - DNA, 25 bp, Homo sapien
tgggccattcatccaggatgtctgg

SEQ ID NO: 1219652 - DNA, 25 bp, Homo sapien
agagttgtgtgtcagaggtgggcca

SEQ ID NO: 1219653 - DNA, 25 bp, Homo sapien
tcaacatccaaatgcccactgtcac

SEQ ID NO: 1219654 - DNA, 25 bp, Homo sapien
cataagaatctcctcagtcaacacc

SEQ ID NO: 1219655 - DNA, 25 bp, Homo sapien
agtcaacaccccacctgggttatca

SEQ ID NO: 1219656 - DNA, 25 bp, Homo sapien
ggttatcatgctcaacctcaacatc

SEQ ID NO: 1219657 - DNA, 25 bp, Homo sapien
gaagaatcctgcttgagctcccact

SEQ ID NO: 1219658 - DNA, 25 bp, Homo sapien
gactcgggaagaatcctgcttgagc

SEQ ID NO: 1219659 - DNA, 25 bp, Homo sapien
cagggactcgggaagaatcctgctt

SEQ ID NO: 1219660 - DNA, 25 bp, Homo sapien
tcgggaagaatcctgcttgagctcc

SEQ ID NO: 1219661 - DNA, 25 bp, Homo sapien
caagaaaagaagcagggttgtctta

SEQ ID NO: 1219662 - DNA, 25 bp, Homo sapien
agccaagaaaagaagcagggttgtc

SEQ ID NO: 1219663 - DNA, 25 bp, Homo sapien
gccaagaaaagaagcagggttgtct

SEQ ID NO: 1219664 - DNA, 25 bp, Homo sapien
aaagccaagaaaagaagcagggttg

SEQ ID NO: 1219665 - DNA, 25 bp, Homo sapien
caagttgcttacaaagtggctcttc

SEQ ID NO: 1219666 - DNA, 25 bp, Homo sapien
tgctgcacgcttcccattaagcaag

SEQ ID NO: 1219667 - DNA, 25 bp, Homo sapien
ttcaaatccactcactaggtgctgc

SEQ ID NO: 1219668 - DNA, 25 bp, Homo sapien
ccttgatgccaaaagagtcagggaa

SEQ ID NO: 1219669 - DNA, 25 bp, Homo sapien
ctttcctcatgatcaatttatctga

SEQ ID NO: 1219670 - DNA, 25 bp, Homo sapien
catgatcaatttatctgactccaga

SEQ ID NO: 1219671 - DNA, 25 bp, Homo sapien
actctcttgacccttctcagaggct

SEQ ID NO: 1219672 - DNA, 25 bp, Homo sapien
gactctcttgacccttctcagaggc

SEQ ID NO: 1219673 - DNA, 25 bp, Homo sapien
tcattcactcgctggcgctggcagg

SEQ ID NO: 1219674 - DNA, 25 bp, Homo sapien
cgcgcgcactcgtgtggcaatttat

SEQ ID NO: 1219675 - DNA, 25 bp, Homo sapien
gctttttcacttccaggtagaatcg

SEQ ID NO: 1219676 - DNA, 25 bp, Homo sapien
gctcccaggctttatagtattcgct

SEQ ID NO: 1219677 - DNA, 25 bp, Homo sapien
gccggctcatgtcagctcatgagag

SEQ ID NO: 1219678 - DNA, 25 bp, Homo sapien
aaagtgaccacagtaggagtactgg

SEQ ID NO: 1219679 - DNA, 25 bp, Homo sapien
ggtgttaatgttggcagctagaaag

SEQ ID NO: 1219680 - DNA, 25 bp, Homo sapien
cagctgtgcacctctctggtgttaa

SEQ ID NO: 1219681 - DNA, 25 bp, Homo sapien
aggttttccggatgttggtggtctg

SEQ ID NO: 1219682 - DNA, 25 bp, Homo sapien
atgaaggttttccggatgttggtgg

SEQ ID NO: 1219683 - DNA, 25 bp, Homo sapien
aatgaaggttttccggatgttggtg

SEQ ID NO: 1219684 - DNA, 25 bp, Homo sapien
ccgacctcacagccccaggacttac

SEQ ID NO: 1219685 - DNA, 25 bp, Homo sapien
tctcctgacagaggcaagaacccac

SEQ ID NO: 1219686 - DNA, 25 bp, Homo sapien
ctgacagaggcaagaacccacaaac

SEQ ID NO: 1219687 - DNA, 25 bp, Homo sapien
acagaggcaagaacccacaaaccgg

SEQ ID NO: 1219688 - DNA, 25 bp, Homo sapien
ggcaagaacccacaaaccggcacag

SEQ ID NO: 1219689 - DNA, 25 bp, Homo sapien
ggtcactcccatcttggtaaaggcc

SEQ ID NO: 1219690 - DNA, 25 bp, Homo sapien
taaaggcctttgatggaaggccaat

SEQ ID NO: 1219691 - DNA, 25 bp, Homo sapien
acagtctgacaacctgcctgtgcca

SEQ ID NO: 1219692 - DNA, 25 bp, Homo sapien
ggaaggccaatgctctcatgaccag

SEQ ID NO: 1219693 - DNA, 25 bp, Homo sapien
caaagagcttcccagtcagtctttg

SEQ ID NO: 1219694 - DNA, 25 bp, Homo sapien
tgacttcttgatgcacttcagagca

SEQ ID NO: 1219695 - DNA, 25 bp, Homo sapien
tcccagtcagtctttgcttcaccag

SEQ ID NO: 1219696 - DNA, 25 bp, Homo sapien
tcttgatgcacttcagagcaaagag

SEQ ID NO: 1219697 - DNA, 25 bp, Homo sapien
tgggtggtgctctcatagatgtcct

SEQ ID NO: 1219698 - DNA, 25 bp, Homo sapien
gccattctcatgtaggtatttcact

SEQ ID NO: 1219699 - DNA, 25 bp, Homo sapien
atttcactgccgacaagacctgctg

SEQ ID NO: 1219700 - DNA, 25 bp, Homo sapien
gacctgctggatcaccagactggca

SEQ ID NO: 1219701 - DNA, 25 bp, Homo sapien
ggatcaccagactggcatccttctc

SEQ ID NO: 1219702 - DNA, 25 bp, Homo sapien
caggcagtggacatgatgccattct

SEQ ID NO: 1219703 - DNA, 25 bp, Homo sapien
cagtgatcatgatcttagagttctc

SEQ ID NO: 1219704 - DNA, 25 bp, Homo sapien
ggacatgatgccattctgttccatc

SEQ ID NO: 1219705 - DNA, 25 bp, Homo sapien
tctcttcaggggtaaggtaaagcag

SEQ ID NO: 1219706 - DNA, 25 bp, Homo sapien
gggatctccagggctatgtctccct

SEQ ID NO: 1219707 - DNA, 25 bp, Homo sapien
tctccctgattacactgagtattct

SEQ ID NO: 1219708 - DNA, 25 bp, Homo sapien
ctatgtctccctgattacactgagt

SEQ ID NO: 1219709 - DNA, 25 bp, Homo sapien
tggggatctccagggctatgtctcc

SEQ ID NO: 1219710 - DNA, 25 bp, Homo sapien
gagtcagggctggtggcaagaggag

SEQ ID NO: 1219711 - DNA, 25 bp, Homo sapien
ccaagggcagagtcagggctggtgg

SEQ ID NO: 1219712 - DNA, 25 bp, Homo sapien
ggcagagtcagggctggtggcaaga

SEQ ID NO: 1219713 - DNA, 25 bp, Homo sapien
agaccaagggcagagtcagggctgg

SEQ ID NO: 1219714 - DNA, 25 bp, Homo sapien
gtgatgacgccgatggaccagcaat

SEQ ID NO: 1219715 - DNA, 25 bp, Homo sapien
tgatgacgccgatggaccagcaatc

SEQ ID NO: 1219716 - DNA, 25 bp, Homo sapien
aggtgatgacgccgatggaccagca

SEQ ID NO: 1219717 - DNA, 25 bp, Homo sapien
gtaggtgatgacgccgatggaccag

SEQ ID NO: 1219718 - DNA, 25 bp, Homo sapien
tagactccgtttcttcatagaatgg

SEQ ID NO: 1219719 - DNA, 25 bp, Homo sapien
tcaaactcatagtagccctccttga

SEQ ID NO: 1219720 - DNA, 25 bp, Homo sapien
tcttctcgaaaagcttagactccgt

SEQ ID NO: 1219721 - DNA, 25 bp, Homo sapien
cagaaatgtcatcccagaatggaga

SEQ ID NO: 1219722 - DNA, 25 bp, Homo sapien
acaggtgtaccgctcgttcggatcc

SEQ ID NO: 1219723 - DNA, 25 bp, Homo sapien
ggatccttctcaagcaagtggcaaa

SEQ ID NO: 1219724 - DNA, 25 bp, Homo sapien
gctcgttcggatccttctcaagcaa

SEQ ID NO: 1219725 - DNA, 25 bp, Homo sapien
gtaccgctcgttcggatccttctca

SEQ ID NO: 1219726 - DNA, 25 bp, Homo sapien
ccaggcctatctggacagaggaggt

SEQ ID NO: 1219727 - DNA, 25 bp, Homo sapien
gggtgagacagatatagctcccagg

SEQ ID NO: 1219728 - DNA, 25 bp, Homo sapien
tctgatccaaggtgtagttaagaca

SEQ ID NO: 1219729 - DNA, 25 bp, Homo sapien
ggtgtagttaagacagagcttggta

SEQ ID NO: 1219730 - DNA, 25 bp, Homo sapien
ctgatgggtagatgtcccggtggag

SEQ ID NO: 1219731 - DNA, 25 bp, Homo sapien
tgatgggtagatgtcccggtggagg

SEQ ID NO: 1219732 - DNA, 25 bp, Homo sapien
actgatgggtagatgtcccggtgga

SEQ ID NO: 1219733 - DNA, 25 bp, Homo sapien
caggtgcctcggtgatggtgatctc

SEQ ID NO: 1219734 - DNA, 25 bp, Homo sapien
tcctttgctcccaatgttcaggcag

SEQ ID NO: 1219735 - DNA, 25 bp, Homo sapien
gcagggagtgctacactgtggtcca

SEQ ID NO: 1219736 - DNA, 25 bp, Homo sapien
tgtagcttcctcatgtggtgcacca

SEQ ID NO: 1219737 - DNA, 25 bp, Homo sapien
gctccatctttggctaaaaatacgt

SEQ ID NO: 1219738 - DNA, 25 bp, Homo sapien
ctccatctttggctaaaaatacgta

SEQ ID NO: 1219739 - DNA, 25 bp, Homo sapien
tccatctttggctaaaaatacgtac

SEQ ID NO: 1219740 - DNA, 25 bp, Homo sapien
tctcccctcatgaggttcagaaagt

SEQ ID NO: 1219741 - DNA, 25 bp, Homo sapien
aaactcggggaatctgatgctcacc

SEQ ID NO: 1219742 - DNA, 25 bp, Homo sapien
cagagacattgactcgtcaatggcc

SEQ ID NO: 1219743 - DNA, 25 bp, Homo sapien
gctaattgggtaaatagacttcaac

SEQ ID NO: 1219744 - DNA, 25 bp, Homo sapien
actggtaccatgacctccgacttga

SEQ ID NO: 1219745 - DNA, 25 bp, Homo sapien
ctgccactggctttaactggtacca

SEQ ID NO: 1219746 - DNA, 25 bp, Homo sapien
gctttaactggtaccatgacctccg

SEQ ID NO: 1219747 - DNA, 25 bp, Homo sapien
ggtaccatgacctccgacttgaagt

SEQ ID NO: 1219748 - DNA, 25 bp, Homo sapien
ttgcagtgacataggcacaggctcc

SEQ ID NO: 1219749 - DNA, 25 bp, Homo sapien
ctgaaaattgcagtgacataggcac

SEQ ID NO: 1219750 - DNA, 25 bp, Homo sapien
aaattgcagtgacataggcacaggc

SEQ ID NO: 1219751 - DNA, 25 bp, Homo sapien
tgcagtgacataggcacaggctcca

SEQ ID NO: 1219752 - DNA, 25 bp, Homo sapien
caagaatggtgtgctggactttcaa

SEQ ID NO: 1219753 - DNA, 25 bp, Homo sapien
gacccaggcgagagctatctacgta

SEQ ID NO: 1219754 - DNA, 25 bp, Homo sapien
taatgagcccaatctggccaagagg

SEQ ID NO: 1219755 - DNA, 25 bp, Homo sapien
tctgccggatagacaccaggtttgg

SEQ ID NO: 1219756 - DNA, 25 bp, Homo sapien
aatgggacagttacacttgacagac

SEQ ID NO: 1219757 - DNA, 25 bp, Homo sapien
tgatgctacagcttccagcccgttg

SEQ ID NO: 1219758 - DNA, 25 bp, Homo sapien
agtaagattaccctgagctgcagct

SEQ ID NO: 1219759 - DNA, 25 bp, Homo sapien
tttcatgcagcctaaagtacagcct

SEQ ID NO: 1219760 - DNA, 25 bp, Homo sapien
cagagtttactgagccacctgaggt

SEQ ID NO: 1219761 - DNA, 25 bp, Homo sapien
tggacttgaggcaaactttactttc

SEQ ID NO: 1219762 - DNA, 25 bp, Homo sapien
tactgtccaaacagagtgatcaagt

SEQ ID NO: 1219763 - DNA, 25 bp, Homo sapien
ctgaggtaacacttctaaaaacttg

SEQ ID NO: 1219764 - DNA, 25 bp, Homo sapien
agttgtataggtcaaggtccacttg

SEQ ID NO: 1219765 - DNA, 25 bp, Homo sapien
gaactgtttgccgatggagttgtat

SEQ ID NO: 1219766 - DNA, 25 bp, Homo sapien
tttgccgatggagttgtataggtca

SEQ ID NO: 1219767 - DNA, 25 bp, Homo sapien
aacagaatggaactgtttgccgatg

SEQ ID NO: 1219768 - DNA, 25 bp, Homo sapien
ttcacttccactcccaacttagtgt

SEQ ID NO: 1219769 - DNA, 25 bp, Homo sapien
ccaacttagtgtctgacattgtagc

SEQ ID NO: 1219770 - DNA, 25 bp, Homo sapien
cactcccaacttagtgtctgacatt

SEQ ID NO: 1219771 - DNA, 25 bp, Homo sapien
ctcccaacttagtgtctgacattgt

SEQ ID NO: 1219772 - DNA, 25 bp, Homo sapien
gctgagcacgctccgactgtgtgag

SEQ ID NO: 1219773 - DNA, 25 bp, Homo sapien
cacgctccgactgtgtgagctaggg

SEQ ID NO: 1219774 - DNA, 25 bp, Homo sapien
gagcacgctccgactgtgtgagcta

SEQ ID NO: 1219775 - DNA, 25 bp, Homo sapien
gcgctgagcacgctccgactgtgtg

SEQ ID NO: 1219776 - DNA, 25 bp, Homo sapien
ttggtccgaccgacctcagcgttct

SEQ ID NO: 1219777 - DNA, 25 bp, Homo sapien
cggtcagcgcgtccgttggtccgac

SEQ ID NO: 1219778 - DNA, 25 bp, Homo sapien
tcccagttggagactccgccgctgg

SEQ ID NO: 1219779 - DNA, 25 bp, Homo sapien
cgctggcaccgctttagcgtccggg

SEQ ID NO: 1219780 - DNA, 25 bp, Homo sapien
gagggctcatagaaaggcggactac

SEQ ID NO: 1219781 - DNA, 25 bp, Homo sapien
ccagctaatcttggggagggctcat

SEQ ID NO: 1219782 - DNA, 25 bp, Homo sapien
ggcttcagccaccaaagaacggctc

SEQ ID NO: 1219783 - DNA, 25 bp, Homo sapien
agaggggcttcagccaccaaagaac

SEQ ID NO: 1219784 - DNA, 25 bp, Homo sapien
ctgggctctcggaggcgggaatgac

SEQ ID NO: 1219785 - DNA, 25 bp, Homo sapien
agcaccacgccgaagagggccagca

SEQ ID NO: 1219786 - DNA, 25 bp, Homo sapien
taggaggcgtgctgccggttggaca

SEQ ID NO: 1219787 - DNA, 25 bp, Homo sapien
gcttgcttctggagagcctgtcgct

SEQ ID NO: 1219788 - DNA, 25 bp, Homo sapien
tcctggtcccgcagacgtctggcgg

SEQ ID NO: 1219789 - DNA, 25 bp, Homo sapien
tgtcagcggtttctctgaagttaag

SEQ ID NO: 1219790 - DNA, 25 bp, Homo sapien
caaactcctttggtggatgcttgtg

SEQ ID NO: 1219791 - DNA, 25 bp, Homo sapien
gatgcttgtggtaggtcagttctag

SEQ ID NO: 1219792 - DNA, 25 bp, Homo sapien
ctctcccagcggagtcaggctcctg

SEQ ID NO: 1219793 - DNA, 25 bp, Homo sapien
agtgttggaaatgtcatgacaatgc

SEQ ID NO: 1219794 - DNA, 25 bp, Homo sapien
ggtagacgcatttagataattcaca

SEQ ID NO: 1219795 - DNA, 25 bp, Homo sapien
tggtggtcattgtaataattaataa

SEQ ID NO: 1219796 - DNA, 25 bp, Homo sapien
tcatgacaatgcagtgctgcacagc

SEQ ID NO: 1219797 - DNA, 25 bp, Homo sapien
aggacaaatgcacttgggcacaagg

SEQ ID NO: 1219798 - DNA, 25 bp, Homo sapien
gtacctgttggtcccatgttccctg

SEQ ID NO: 1219799 - DNA, 25 bp, Homo sapien
ccctggaatattgccaagggaaggt

SEQ ID NO: 1219800 - DNA, 25 bp, Homo sapien
caggcagcagatctaaaggacaaat

SEQ ID NO: 1219801 - DNA, 25 bp, Homo sapien
gaagacctgatttgggactgaaacc

SEQ ID NO: 1219802 - DNA, 25 bp, Homo sapien
ccttatgctaggaccgagctggcag

SEQ ID NO: 1219803 - DNA, 25 bp, Homo sapien
tcgaggcagcccaagacaggaatgc

SEQ ID NO: 1219804 - DNA, 25 bp, Homo sapien
tagcaggtgcttactctcagattcc

SEQ ID NO: 1219805 - DNA, 25 bp, Homo sapien
gttggaaaagtcagaggagttggac

SEQ ID NO: 1219806 - DNA, 25 bp, Homo sapien
ctgttggaaaagtcagaggagttgg

SEQ ID NO: 1219807 - DNA, 25 bp, Homo sapien
ttggaaaagtcagaggagttggact

SEQ ID NO: 1219808 - DNA, 25 bp, Homo sapien
tgttggaaaagtcagaggagttgga

SEQ ID NO: 1219809 - DNA, 25 bp, Homo sapien
tctgaaggaaacacttcaattgtgt

SEQ ID NO: 1219810 - DNA, 25 bp, Homo sapien
ctcctttcagcttccgactctgatg

SEQ ID NO: 1219811 - DNA, 25 bp, Homo sapien
ttcagcttccgactctgatgaactc

SEQ ID NO: 1219812 - DNA, 25 bp, Homo sapien
tgaaggaaacacttcaattgtgtcc

SEQ ID NO: 1219813 - DNA, 25 bp, Homo sapien
tggcaatgccgtcagcagtccagag

SEQ ID NO: 1219814 - DNA, 25 bp, Homo sapien
gccgtcagcagtccagagggattta

SEQ ID NO: 1219815 - DNA, 25 bp, Homo sapien
gcagtccagagggatttatgggtta

SEQ ID NO: 1219816 - DNA, 25 bp, Homo sapien
taatttctggcaatgccgtcagcag

SEQ ID NO: 1219817 - DNA, 25 bp, Homo sapien
ttaccaaagtggagcccagcatcct

SEQ ID NO: 1219818 - DNA, 25 bp, Homo sapien
ctttaccaaagtggagcccagcatc

SEQ ID NO: 1219819 - DNA, 25 bp, Homo sapien
tttaccaaagtggagcccagcatcc

SEQ ID NO: 1219820 - DNA, 25 bp, Homo sapien
tacagagctttctacaacctcctaa

SEQ ID NO: 1219821 - DNA, 25 bp, Homo sapien
gcagcctctgaattgtgacatcagg

SEQ ID NO: 1219822 - DNA, 25 bp, Homo sapien
ctttctacaacctcctaagcaggca

SEQ ID NO: 1219823 - DNA, 25 bp, Homo sapien
ggcagcagcctctgaattgtgacat

SEQ ID NO: 1219824 - DNA, 25 bp, Homo sapien
ccgacagggagctggcctgaagact

SEQ ID NO: 1219825 - DNA, 25 bp, Homo sapien
cgacagggagctggcctgaagactc

SEQ ID NO: 1219826 - DNA, 25 bp, Homo sapien
cagaatggggaggagatattttttc

SEQ ID NO: 1219827 - DNA, 25 bp, Homo sapien
ccccagaatggggaggagatatttt

SEQ ID NO: 1219828 - DNA, 25 bp, Homo sapien
tggggaggagatattttttcataaa

SEQ ID NO: 1219829 - DNA, 25 bp, Homo sapien
gaatggggaggagatattttttcat

SEQ ID NO: 1219830 - DNA, 25 bp, Homo sapien
gtttgcagaatagtagtagtaggcc

SEQ ID NO: 1219831 - DNA, 25 bp, Homo sapien
tcctcgtttgcagaatagtagtagt

SEQ ID NO: 1219832 - DNA, 25 bp, Homo sapien
aattcctcgtttgcagaatagtagt

SEQ ID NO: 1219833 - DNA, 25 bp, Homo sapien
tcgtttgcagaatagtagtagtagg

SEQ ID NO: 1219834 - DNA, 25 bp, Homo sapien
tggcccctgtgacaatcactttctt

SEQ ID NO: 1219835 - DNA, 25 bp, Homo sapien
taagccatctctcttccgatccctt

SEQ ID NO: 1219836 - DNA, 25 bp, Homo sapien
tgtagagtttcttttgacctcgctg

SEQ ID NO: 1219837 - DNA, 25 bp, Homo sapien
gggctcccatcttcgccagatgata

SEQ ID NO: 1219838 - DNA, 25 bp, Homo sapien
ggcatcagtcttagctgcagatttt

SEQ ID NO: 1219839 - DNA, 25 bp, Homo sapien
aatggcatcagtcttagctgcagat

SEQ ID NO: 1219840 - DNA, 25 bp, Homo sapien
agaaatggcatcagtcttagctgca

SEQ ID NO: 1219841 - DNA, 25 bp, Homo sapien
tcagtcttagctgcagatttttggg

SEQ ID NO: 1219842 - DNA, 25 bp, Homo sapien
ccatggtgccagcaatgtagtgtgc

SEQ ID NO: 1219843 - DNA, 25 bp, Homo sapien
tgctctgcgaaggtcatgtcttcca

SEQ ID NO: 1219844 - DNA, 25 bp, Homo sapien
gggcaacaaattgctctgcgaaggt

SEQ ID NO: 1219845 - DNA, 25 bp, Homo sapien
cgaaggtcatgtcttccatggtgcc

SEQ ID NO: 1219846 - DNA, 25 bp, Homo sapien
tacagtcaggaccacgtaactgagg

SEQ ID NO: 1219847 - DNA, 25 bp, Homo sapien
taactgaggaagttgacttccatgc

SEQ ID NO: 1219848 - DNA, 25 bp, Homo sapien
cagccagagaggagacgacaacaat

SEQ ID NO: 1219849 - DNA, 25 bp, Homo sapien
cttcagcatgggcaaggcagctaca

SEQ ID NO: 1219850 - DNA, 25 bp, Homo sapien
taggtctctcacttaggaccaggac

SEQ ID NO: 1219851 - DNA, 25 bp, Homo sapien
tgtgactaggtctctcacttaggac

SEQ ID NO: 1219852 - DNA, 25 bp, Homo sapien
ggaccaggacaagctgtacctccag

SEQ ID NO: 1219853 - DNA, 25 bp, Homo sapien
tctctcacttaggaccaggacaagc

SEQ ID NO: 1219854 - DNA, 25 bp, Homo sapien
tagatggcggattttgatcctggtg

SEQ ID NO: 1219855 - DNA, 25 bp, Homo sapien
tttgatcctggtgtttgcactttcc

SEQ ID NO: 1219856 - DNA, 25 bp, Homo sapien
tttccagccacatccttctaactga

SEQ ID NO: 1219857 - DNA, 25 bp, Homo sapien
aagatgtgtggaacttgtctcctgg

SEQ ID NO: 1219858 - DNA, 25 bp, Homo sapien
cttccagcccagagagagtctgtgt

SEQ ID NO: 1219859 - DNA, 25 bp, Homo sapien
tcagtatgcatctggaagctctccc

SEQ ID NO: 1219860 - DNA, 25 bp, Homo sapien
agtatgcatctggaagctctccctt

SEQ ID NO: 1219861 - DNA, 25 bp, Homo sapien
tttcttccagcccagagagagtctg

SEQ ID NO: 1219862 - DNA, 25 bp, Homo sapien
agcaggttccagcttagcaagggga

SEQ ID NO: 1219863 - DNA, 25 bp, Homo sapien
ttccagcttagcaaggggagaagct

SEQ ID NO: 1219864 - DNA, 25 bp, Homo sapien
aggttccagcttagcaaggggagaa

SEQ ID NO: 1219865 - DNA, 25 bp, Homo sapien
caggttccagcttagcaaggggaga

SEQ ID NO: 1219866 - DNA, 25 bp, Homo sapien
gcaaccattggataagccactttcc

SEQ ID NO: 1219867 - DNA, 25 bp, Homo sapien
ttgatacattgaccctggacactga

SEQ ID NO: 1219868 - DNA, 25 bp, Homo sapien
caagaacacagagagtgattgatac

SEQ ID NO: 1219869 - DNA, 25 bp, Homo sapien
caaacttgcttgcagaataggcagc

SEQ ID NO: 1219870 - DNA, 25 bp, Homo sapien
tggactatcccagaaactgccttca

SEQ ID NO: 1219871 - DNA, 25 bp, Homo sapien
tgcatatggactatcccagaaactg

SEQ ID NO: 1219872 - DNA, 25 bp, Homo sapien
tatggactatcccagaaactgcctt

SEQ ID NO: 1219873 - DNA, 25 bp, Homo sapien
cttgcatatggactatcccagaaac

SEQ ID NO: 1219874 - DNA, 25 bp, Homo sapien
tttgatgatctccagggcacattcc

SEQ ID NO: 1219875 - DNA, 25 bp, Homo sapien
tgatgatctccagggcacattcctc

SEQ ID NO: 1219876 - DNA, 25 bp, Homo sapien
tccccctttgatgatctccagggca

SEQ ID NO: 1219877 - DNA, 25 bp, Homo sapien
cctttgatgatctccagggcacatt

SEQ ID NO: 1219878 - DNA, 25 bp, Homo sapien
caggatcttcctgcatggatttctg

SEQ ID NO: 1219879 - DNA, 25 bp, Homo sapien
gatttctgatcagaagagtggtcca

SEQ ID NO: 1219880 - DNA, 25 bp, Homo sapien
catattatagctcgttgagtagaga

SEQ ID NO: 1219881 - DNA, 25 bp, Homo sapien
atgaatctgtccatattatagctcg

SEQ ID NO: 1219882 - DNA, 25 bp, Homo sapien
tgacccatgacttgcatgtctctgg

SEQ ID NO: 1219883 - DNA, 25 bp, Homo sapien
tgcaaatgttagaggaactccttcc

SEQ ID NO: 1219884 - DNA, 25 bp, Homo sapien
aattttacaactgctggctgcagcg

SEQ ID NO: 1219885 - DNA, 25 bp, Homo sapien
tccatttgtcaggtgtgacccatga

SEQ ID NO: 1219886 - DNA, 25 bp, Homo sapien
ccgggtacctcgtgggctgtaacac

SEQ ID NO: 1219887 - DNA, 25 bp, Homo sapien
gtgttacagcccacgaggtacccgg

SEQ ID NO: 1219888 - DNA, 25 bp, Homo sapien
tgaataagctcaagttatagctacc

SEQ ID NO: 1219889 - DNA, 25 bp, Homo sapien
tcctgaataagctcaagttatagct

SEQ ID NO: 1219890 - DNA, 25 bp, Homo sapien
aataagctcaagttatagctaccag

SEQ ID NO: 1219891 - DNA, 25 bp, Homo sapien
catcctgaataagctcaagttatag

SEQ ID NO: 1219892 - DNA, 25 bp, Homo sapien
tgcatattgcaaacactaccttgct

SEQ ID NO: 1219893 - DNA, 25 bp, Homo sapien
ttaatatgggcgagaagtgagtgat

SEQ ID NO: 1219894 - DNA, 25 bp, Homo sapien
cgtaaggatgtgaaaatggacgtcc

SEQ ID NO: 1219895 - DNA, 25 bp, Homo sapien
tcccctctgagatatgctaccttgc

SEQ ID NO: 1219896 - DNA, 25 bp, Homo sapien
gcccagtcacgatggcccatgcctg

SEQ ID NO: 1219897 - DNA, 25 bp, Homo sapien
catctactagggcctcatctaccat

SEQ ID NO: 1219898 - DNA, 25 bp, Homo sapien
cccatctactagggcctcatctacc

SEQ ID NO: 1219899 - DNA, 25 bp, Homo sapien
ccatctactagggcctcatctacca

SEQ ID NO: 1219900 - DNA, 25 bp, Homo sapien
tgggcccatggcccatctactaggg

SEQ ID NO: 1219901 - DNA, 25 bp, Homo sapien
cagcagcatggcccggccagccagg

SEQ ID NO: 1219902 - DNA, 25 bp, Homo sapien
agcagcatggcccggccagccaggc

SEQ ID NO: 1219903 - DNA, 25 bp, Homo sapien
cagccaggctccaggcctcatctac

SEQ ID NO: 1219904 - DNA, 25 bp, Homo sapien
ctccagcagcatggcccggccagcc

SEQ ID NO: 1219905 - DNA, 25 bp, Homo sapien
ctgtggaagtcagtgcagaacccag

SEQ ID NO: 1219906 - DNA, 25 bp, Homo sapien
gatgatggcaaaggggaaggcgaac

SEQ ID NO: 1219907 - DNA, 25 bp, Homo sapien
gggaaggcgaacagccccacggcca

SEQ ID NO: 1219908 - DNA, 25 bp, Homo sapien
agtgcagaacccaggctgatgatga

SEQ ID NO: 1219909 - DNA, 25 bp, Homo sapien
gtgagcacaagcatgaagcaggcaa

SEQ ID NO: 1219910 - DNA, 25 bp, Homo sapien
cagttattagaggtactgtctttac

SEQ ID NO: 1219911 - DNA, 25 bp, Homo sapien
gactaaacttttatgcctgagccga

SEQ ID NO: 1219912 - DNA, 25 bp, Homo sapien
tgtggctggccaggtacctgttgat

SEQ ID NO: 1219913 - DNA, 25 bp, Homo sapien
catgtaactcatgggtaccgcattc

SEQ ID NO: 1219914 - DNA, 25 bp, Homo sapien
ttgagtggtccatcagctccgtgta

SEQ ID NO: 1219915 - DNA, 25 bp, Homo sapien
cttgagtggtccatcagctccgtgt

SEQ ID NO: 1219916 - DNA, 25 bp, Homo sapien
aagagtgacacagtccatggtgcgc

SEQ ID NO: 1219917 - DNA, 25 bp, Homo sapien
accatcacagccagcgacttggctg

SEQ ID NO: 1219918 - DNA, 25 bp, Homo sapien
tgcgcactggtagcgagcacagagc

SEQ ID NO: 1219919 - DNA, 25 bp, Homo sapien
acttggctgtgtatatctcccactg

SEQ ID NO: 1219920 - DNA, 25 bp, Homo sapien
tccagtggttatagacaatgggatt

SEQ ID NO: 1219921 - DNA, 25 bp, Homo sapien
caatgggattgacaatcaaatttgc

SEQ ID NO: 1219922 - DNA, 25 bp, Homo sapien
tgggcttatctttagcctgagctag

SEQ ID NO: 1219923 - DNA, 25 bp, Homo sapien
caagagaatggtcatcttccttgcc

SEQ ID NO: 1219924 - DNA, 25 bp, Homo sapien
gctcattcccattattgagttcaat

SEQ ID NO: 1219925 - DNA, 25 bp, Homo sapien
ctgctcattcccattattgagttca

SEQ ID NO: 1219926 - DNA, 25 bp, Homo sapien
tgctcattcccattattgagttcaa

SEQ ID NO: 1219927 - DNA, 25 bp, Homo sapien
ctcattcccattattgagttcaatc

SEQ ID NO: 1219928 - DNA, 25 bp, Homo sapien
acactgagaacaggctgtgccctga

SEQ ID NO: 1219929 - DNA, 25 bp, Homo sapien
ttatgtcttctcctcaaagagacca

SEQ ID NO: 1219930 - DNA, 25 bp, Homo sapien
tcctcaaagagaccagagcctgctt

SEQ ID NO: 1219931 - DNA, 25 bp, Homo sapien
gagcctgcttcacaggccacactga

SEQ ID NO: 1219932 - DNA, 25 bp, Homo sapien
tcattttcgaccataaaggaggcag

SEQ ID NO: 1219933 - DNA, 25 bp, Homo sapien
aagaacttaggagactatcatttcc

SEQ ID NO: 1219934 - DNA, 25 bp, Homo sapien
gcttaaaattattacgtgttgacaa

SEQ ID NO: 1219935 - DNA, 25 bp, Homo sapien
tcatttcctcaaattaatgtggcag

SEQ ID NO: 1219936 - DNA, 25 bp, Homo sapien
tgttgacaattctacttaagaactt

SEQ ID NO: 1219937 - DNA, 25 bp, Homo sapien
caaacttgaacgctggagagaagcg

SEQ ID NO: 1219938 - DNA, 25 bp, Homo sapien
gaagcgaaattcactccctagctct

SEQ ID NO: 1219939 - DNA, 25 bp, Homo sapien
tataattttgcttagtgaaaagttc

SEQ ID NO: 1219940 - DNA, 25 bp, Homo sapien
ggaatttggtagaagacggatctca

SEQ ID NO: 1219941 - DNA, 25 bp, Homo sapien
gtgagggagcccctgacgcacacca

SEQ ID NO: 1219942 - DNA, 25 bp, Homo sapien
gagagatgctcgaacgctctgtcat

SEQ ID NO: 1219943 - DNA, 25 bp, Homo sapien
ccttaggacagccttgctcttttgt

SEQ ID NO: 1219944 - DNA, 25 bp, Homo sapien
tgtggtccacggtactgttcaagga

SEQ ID NO: 1219945 - DNA, 25 bp, Homo sapien
gagattgcgtgaagcgtggtacacc

SEQ ID NO: 1219946 - DNA, 25 bp, Homo sapien
tgggcaaggagattgcgtgaagcgt

SEQ ID NO: 1219947 - DNA, 25 bp, Homo sapien
cgtgaagcgtggtacaccaccacat

SEQ ID NO: 1219948 - DNA, 25 bp, Homo sapien
attgcgtgaagcgtggtacaccacc

SEQ ID NO: 1219949 - DNA, 25 bp, Homo sapien
cgccctggggtagaacctgatacgc

SEQ ID NO: 1219950 - DNA, 25 bp, Homo sapien
tggccgccctggggtagaacctgat

SEQ ID NO: 1219951 - DNA, 25 bp, Homo sapien
gccgccctggggtagaacctgatac

SEQ ID NO: 1219952 - DNA, 25 bp, Homo sapien
gccctggggtagaacctgatacgca

SEQ ID NO: 1219953 - DNA, 25 bp, Homo sapien
tctgaagtaggtggtgtctttctca

SEQ ID NO: 1219954 - DNA, 25 bp, Homo sapien
tcccaatcctggtgttgtaaagagt

SEQ ID NO: 1219955 - DNA, 25 bp, Homo sapien
tggtaagacctagatgagatgttct

SEQ ID NO: 1219956 - DNA, 25 bp, Homo sapien
tttttggtggtaagacctagatgag

SEQ ID NO: 1219957 - DNA, 25 bp, Homo sapien
gacagcagatgggtaaagcacacgc

SEQ ID NO: 1219958 - DNA, 25 bp, Homo sapien
gacaaagccacaaggttcgcaaacc

SEQ ID NO: 1219959 - DNA, 25 bp, Homo sapien
tcgggaaagcattccagtcctgggc

SEQ ID NO: 1219960 - DNA, 25 bp, Homo sapien
tttcaatccataggtctgggcccca

SEQ ID NO: 1219961 - DNA, 25 bp, Homo sapien
tgtggcttgacatgcctttctgagt

SEQ ID NO: 1219962 - DNA, 25 bp, Homo sapien
ggcttcctgcatgggttggccttcc

SEQ ID NO: 1219963 - DNA, 25 bp, Homo sapien
cctggccatgtttgtaatggagaca

SEQ ID NO: 1219964 - DNA, 25 bp, Homo sapien
aaggcagtcttgtgttcagggatcc

SEQ ID NO: 1219965 - DNA, 25 bp, Homo sapien
tgcagcatgctgcatagaaccctac

SEQ ID NO: 1219966 - DNA, 25 bp, Homo sapien
catagaaccctacccaggtttctgg

SEQ ID NO: 1219967 - DNA, 25 bp, Homo sapien
gggatatctggaccctactgacttg

SEQ ID NO: 1219968 - DNA, 25 bp, Homo sapien
cctgctaggatttggtgcagcatgc

SEQ ID NO: 1219969 - DNA, 25 bp, Homo sapien
caggccaccaaccttagtccactga

SEQ ID NO: 1219970 - DNA, 25 bp, Homo sapien
ggccaccaaccttagtccactgaaa

SEQ ID NO: 1219971 - DNA, 25 bp, Homo sapien
accaaccttagtccactgaaacaca

SEQ ID NO: 1219972 - DNA, 25 bp, Homo sapien
ccaccaaccttagtccactgaaaca

SEQ ID NO: 1219973 - DNA, 25 bp, Homo sapien
aagaaagggtctgagagacccatgt

SEQ ID NO: 1219974 - DNA, 25 bp, Homo sapien
aaagaaagggtctgagagacccatg

SEQ ID NO: 1219975 - DNA, 25 bp, Homo sapien
cttctcggataagggtgggagtggg

SEQ ID NO: 1219976 - DNA, 25 bp, Homo sapien
ttcttcttctcggataagggtggga

SEQ ID NO: 1219977 - DNA, 25 bp, Homo sapien
cttcttctcggataagggtgggagt

SEQ ID NO: 1219978 - DNA, 25 bp, Homo sapien
tcttctcggataagggtgggagtgg

SEQ ID NO: 1219979 - DNA, 25 bp, Homo sapien
ttgtgtggtcaagccctggacactc

SEQ ID NO: 1219980 - DNA, 25 bp, Homo sapien
ttttgtgtggtcaagccctggacac

SEQ ID NO: 1219981 - DNA, 25 bp, Homo sapien
gagttttgtgtggtcaagccctgga

SEQ ID NO: 1219982 - DNA, 25 bp, Homo sapien
agaggagttttgtgtggtcaagccc

SEQ ID NO: 1219983 - DNA, 25 bp, Homo sapien
gctggatcctgagcgttggaaattc

SEQ ID NO: 1219984 - DNA, 25 bp, Homo sapien
gactcaacaggtagcagactctctg

SEQ ID NO: 1219985 - DNA, 25 bp, Homo sapien
aggagggtatctcagcttcaccaac

SEQ ID NO: 1219986 - DNA, 25 bp, Homo sapien
tgggacttcgctactctggctcagt

SEQ ID NO: 1219987 - DNA, 25 bp, Homo sapien
agattgtgccatccaaacccacaag

SEQ ID NO: 1219988 - DNA, 25 bp, Homo sapien
cacaagcacatgaattgtacctcaa

SEQ ID NO: 1219989 - DNA, 25 bp, Homo sapien
tgtcagggttaatgttggtgccaag

SEQ ID NO: 1219990 - DNA, 25 bp, Homo sapien
ccagacacagattgtgccatccaaa

SEQ ID NO: 1219991 - DNA, 25 bp, Homo sapien
gatgacctccaagcacctgttgcgc

SEQ ID NO: 1219992 - DNA, 25 bp, Homo sapien
tccaagcacctgttgcgcttggctt

SEQ ID NO: 1219993 - DNA, 25 bp, Homo sapien
gcacctgttgcgcttggcttccagt

SEQ ID NO: 1219994 - DNA, 25 bp, Homo sapien
acctgttgcgcttggcttccagttc

SEQ ID NO: 1219995 - DNA, 25 bp, Homo sapien
ggctttcacggatctcttgcctgcg

SEQ ID NO: 1219996 - DNA, 25 bp, Homo sapien
gatctcttgcctgcgctcacacttg

SEQ ID NO: 1219997 - DNA, 25 bp, Homo sapien
gcagcggcggctttcacggatctct

SEQ ID NO: 1219998 - DNA, 25 bp, Homo sapien
tggtcacattgggacggcagcggcg

SEQ ID NO: 1219999 - DNA, 25 bp, Homo sapien
agaactgctgcagtcgagctctctg

SEQ ID NO: 1220000 - DNA, 25 bp, Homo sapien
ctctctgttggatcctcagcgtctt

SEQ ID NO: 1220001 - DNA, 25 bp, Homo sapien
tctctctgttggatcctcagcgtct

SEQ ID NO: 1220002 - DNA, 25 bp, Homo sapien
tctctgttggatcctcagcgtcttc

SEQ ID NO: 1220003 - DNA, 25 bp, Homo sapien
cacaagacaagggttccttgaggac

SEQ ID NO: 1220004 - DNA, 25 bp, Homo sapien
acaagggttccttgaggacagtcac

SEQ ID NO: 1220005 - DNA, 25 bp, Homo sapien
agacaagggttccttgaggacagtc

SEQ ID NO: 1220006 - DNA, 25 bp, Homo sapien
caagacaagggttccttgaggacag

SEQ ID NO: 1220007 - DNA, 25 bp, Homo sapien
acagcagtatgtcccttgacacggc

SEQ ID NO: 1220008 - DNA, 25 bp, Homo sapien
caccctccttgtccagagagggtcc

SEQ ID NO: 1220009 - DNA, 25 bp, Homo sapien
gcagtatgtcccttgacacggccca

SEQ ID NO: 1220010 - DNA, 25 bp, Homo sapien
gagcacacagcagtatgtcccttga

SEQ ID NO: 1220011 - DNA, 25 bp, Homo sapien
tggcaactttactatatgactgagg

SEQ ID NO: 1220012 - DNA, 25 bp, Homo sapien
actttactatatgactgaggaagaa

SEQ ID NO: 1220013 - DNA, 25 bp, Homo sapien
gcaactttactataagtagctcttg

SEQ ID NO: 1220014 - DNA, 25 bp, Homo sapien
acttgatttaggtcactttttagtg

SEQ ID NO: 1220015 - DNA, 25 bp, Homo sapien
tggaacatagtggacacatccctgc

SEQ ID NO: 1220016 - DNA, 25 bp, Homo sapien
tcctattgagcataacagatccact

SEQ ID NO: 1220017 - DNA, 25 bp, Homo sapien
taagaagccctgatagagtacccac

SEQ ID NO: 1220018 - DNA, 25 bp, Homo sapien
gaacaatgccaagcattaccatgga

SEQ ID NO: 1220019 - DNA, 25 bp, Homo sapien
gctgggctggaaagacttcagagct

SEQ ID NO: 1220020 - DNA, 25 bp, Homo sapien
tgcagatgcctgagggaggaggatg

SEQ ID NO: 1220021 - DNA, 25 bp, Homo sapien
ggtggtcagacagatccctgcagat

SEQ ID NO: 1220022 - DNA, 25 bp, Homo sapien
aggagaggtggtcagacagatccct

SEQ ID NO: 1220023 - DNA, 25 bp, Homo sapien
ggtggcttcttgatgggagtgtcct

SEQ ID NO: 1220024 - DNA, 25 bp, Homo sapien
tggcttcttgatgggagtgtcctgt

SEQ ID NO: 1220025 - DNA, 25 bp, Homo sapien
tgggtggcttcttgatgggagtgtc

SEQ ID NO: 1220026 - DNA, 25 bp, Homo sapien
gcttcttgatgggagtgtcctgtgg

SEQ ID NO: 1220027 - DNA, 25 bp, Homo sapien
gagatggaggataagttgatttaga

SEQ ID NO: 1220028 - DNA, 25 bp, Homo sapien
agagatggaggataagttgatttag

SEQ ID NO: 1220029 - DNA, 25 bp, Homo sapien
catcgttcttaattgttggtccttc

SEQ ID NO: 1220030 - DNA, 25 bp, Homo sapien
taattgttggtccttctgcctttgt

SEQ ID NO: 1220031 - DNA, 25 bp, Homo sapien
gactggcatcgttcttaattgttgg

SEQ ID NO: 1220032 - DNA, 25 bp, Homo sapien
ttggtttgctgactggcatcgttct

SEQ ID NO: 1220033 - DNA, 25 bp, Homo sapien
cttatccagaactgcaactccgtaa

SEQ ID NO: 1220034 - DNA, 25 bp, Homo sapien
ggtccctttagtccccatgtctatg

SEQ ID NO: 1220035 - DNA, 25 bp, Homo sapien
gctggcttgtgtagagcaaacctct

SEQ ID NO: 1220036 - DNA, 25 bp, Homo sapien
tccagaatgtcagagcttaatactt

SEQ ID NO: 1220037 - DNA, 25 bp, Homo sapien
tgaaaccctgggatatagaaccaga

SEQ ID NO: 1220038 - DNA, 25 bp, Homo sapien
ttgaggtaatcagaaagctggatga

SEQ ID NO: 1220039 - DNA, 25 bp, Homo sapien
gaggtaatcagaaagctggatgatt

SEQ ID NO: 1220040 - DNA, 25 bp, Homo sapien
tttgaggtaatcagaaagctggatg

SEQ ID NO: 1220041 - DNA, 25 bp, Homo sapien
ggtaatcagaaagctggatgatttc

SEQ ID NO: 1220042 - DNA, 25 bp, Homo sapien
gacagtaggtcttggagaatcacca

SEQ ID NO: 1220043 - DNA, 25 bp, Homo sapien
ggtcttggagaatcaccattttctg

SEQ ID NO: 1220044 - DNA, 25 bp, Homo sapien
agtggacagtaggtcttggagaatc

SEQ ID NO: 1220045 - DNA, 25 bp, Homo sapien
cagtaggtcttggagaatcaccatt

SEQ ID NO: 1220046 - DNA, 25 bp, Homo sapien
tattcggactgagtgggtacatggc

SEQ ID NO: 1220047 - DNA, 25 bp, Homo sapien
tcgataaatatcagtgggaatccca

SEQ ID NO: 1220048 - DNA, 25 bp, Homo sapien
gaatggactaaaatcaaaggcctga

SEQ ID NO: 1220049 - DNA, 25 bp, Homo sapien
taggccagattgtctctaaggtccc

SEQ ID NO: 1220050 - DNA, 25 bp, Homo sapien
atccaaaaggcccagagacatccgg

SEQ ID NO: 1220051 - DNA, 25 bp, Homo sapien
cccagagcctatggtatccaaaagg

SEQ ID NO: 1220052 - DNA, 25 bp, Homo sapien
caggagtctcaatagtgccccagag

SEQ ID NO: 1220053 - DNA, 25 bp, Homo sapien
gaaggttggaccctcctcaggagtc

SEQ ID NO: 1220054 - DNA, 25 bp, Homo sapien
tgcctctgatctgctctccagaaac

SEQ ID NO: 1220055 - DNA, 25 bp, Homo sapien
ctgcttctgcgtggttttcccctgc

SEQ ID NO: 1220056 - DNA, 25 bp, Homo sapien
agctcctgcttctgcgtggttttcc

SEQ ID NO: 1220057 - DNA, 25 bp, Homo sapien
ctggtgccggtctgaggtcttcagc

SEQ ID NO: 1220058 - DNA, 25 bp, Homo sapien
ggtacaggtgtatagctggttttct

SEQ ID NO: 1220059 - DNA, 25 bp, Homo sapien
tacaggtgtatagctggttttctaa

SEQ ID NO: 1220060 - DNA, 25 bp, Homo sapien
gggtacaggtgtatagctggttttc

SEQ ID NO: 1220061 - DNA, 25 bp, Homo sapien
caggtgtatagctggttttctaagg

SEQ ID NO: 1220062 - DNA, 25 bp, Homo sapien
gattgtaaactccttcagggaggga

SEQ ID NO: 1220063 - DNA, 25 bp, Homo sapien
tggtgttcacatagtatcccctgca

SEQ ID NO: 1220064 - DNA, 25 bp, Homo sapien
catgctacttccacctaagctgaga

SEQ ID NO: 1220065 - DNA, 25 bp, Homo sapien
tatgtggattaatgcaacagcctcc

SEQ ID NO: 1220066 - DNA, 25 bp, Homo sapien
acattgagcttctgtgtgccaaatc

SEQ ID NO: 1220067 - DNA, 25 bp, Homo sapien
cacattgagcttctgtgtgccaaat

SEQ ID NO: 1220068 - DNA, 25 bp, Homo sapien
acacattgagcttctgtgtgccaaa

SEQ ID NO: 1220069 - DNA, 25 bp, Homo sapien
ggccttctgctcatagctgtttttc

SEQ ID NO: 1220070 - DNA, 25 bp, Homo sapien
tggccttctgctcatagctgttttt

SEQ ID NO: 1220071 - DNA, 25 bp, Homo sapien
tctgtagttgctgctctgcattcat

SEQ ID NO: 1220072 - DNA, 25 bp, Homo sapien
gtgtgctctgtagttgctgctctgc

SEQ ID NO: 1220073 - DNA, 25 bp, Homo sapien
gctctgtagttgctgctctgcattc

SEQ ID NO: 1220074 - DNA, 25 bp, Homo sapien
tagttgctgctctgcattcattttc

SEQ ID NO: 1220075 - DNA, 25 bp, Homo sapien
ccatgtctatgtggcatccccatac

SEQ ID NO: 1220076 - DNA, 25 bp, Homo sapien
ggagatcagagaggagagggctcca

SEQ ID NO: 1220077 - DNA, 25 bp, Homo sapien
aggagagggctccagggagttgtgc

SEQ ID NO: 1220078 - DNA, 25 bp, Homo sapien
gagttgtgcagctggctccccttgt

SEQ ID NO: 1220079 - DNA, 25 bp, Homo sapien
tgctgggtcccaagggtcctccagt

SEQ ID NO: 1220080 - DNA, 25 bp, Homo sapien
ggactgaagcacgtggagttggctc

SEQ ID NO: 1220081 - DNA, 25 bp, Homo sapien
ccttcagagcctcatactggctcct

SEQ ID NO: 1220082 - DNA, 25 bp, Homo sapien
agtttggactgaagcacgtggagtt

SEQ ID NO: 1220083 - DNA, 25 bp, Homo sapien
gcttctttcatcaccatccctcctc

SEQ ID NO: 1220084 - DNA, 25 bp, Homo sapien
tccagaacagcttctttcatcacca

SEQ ID NO: 1220085 - DNA, 25 bp, Homo sapien
cttccctccccacccccagtgcctg

SEQ ID NO: 1220086 - DNA, 25 bp, Homo sapien
ctcctccccataccctgtcttccct

SEQ ID NO: 1220087 - DNA, 25 bp, Homo sapien
gagatgacattagtaggctgatgaa

SEQ ID NO: 1220088 - DNA, 25 bp, Homo sapien
gatggtgtcattccaatgaacgctt

SEQ ID NO: 1220089 - DNA, 25 bp, Homo sapien
tctttgccaacagtgggcaattctg

SEQ ID NO: 1220090 - DNA, 25 bp, Homo sapien
tgaacgcttagttcatttgcatgag

SEQ ID NO: 1220091 - DNA, 25 bp, Homo sapien
gatgatggaacccttgaggatgcca

SEQ ID NO: 1220092 - DNA, 25 bp, Homo sapien
aaccatccctagtgacaggtctaag

SEQ ID NO: 1220093 - DNA, 25 bp, Homo sapien
tgatattcacaaggaactcgcgtct

SEQ ID NO: 1220094 - DNA, 25 bp, Homo sapien
gaccagctgggttcactcctttgat

SEQ ID NO: 1220095 - DNA, 25 bp, Homo sapien
ttgtaggtcctgggtatccaagctg

SEQ ID NO: 1220096 - DNA, 25 bp, Homo sapien
tctgtaagtccctgctatctgctcc

SEQ ID NO: 1220097 - DNA, 25 bp, Homo sapien
cattttccaaaaatcgcagggcctg

SEQ ID NO: 1220098 - DNA, 25 bp, Homo sapien
aagttgctctatcttcgtgtcccag

SEQ ID NO: 1220099 - DNA, 25 bp, Homo sapien
ggactgtggccttgacatatgtgac

SEQ ID NO: 1220100 - DNA, 25 bp, Homo sapien
ccagaagccaagtacctcaggtttt

SEQ ID NO: 1220101 - DNA, 25 bp, Homo sapien
tagtcctctctatcagcggacacag

SEQ ID NO: 1220102 - DNA, 25 bp, Homo sapien
ctgcaactgctgtactctggtcacc

SEQ ID NO: 1220103 - DNA, 25 bp, Homo sapien
tgcaactgctgtactctggtcacca

SEQ ID NO: 1220104 - DNA, 25 bp, Homo sapien
gcaactgctgtactctggtcaccag

SEQ ID NO: 1220105 - DNA, 25 bp, Homo sapien
tgaagcttctctatcaggtgtcaga

SEQ ID NO: 1220106 - DNA, 25 bp, Homo sapien
tattaattgagtcaggttctccagc

SEQ ID NO: 1220107 - DNA, 25 bp, Homo sapien
tctaatgacaggtctatgtgacaca

SEQ ID NO: 1220108 - DNA, 25 bp, Homo sapien
caaggaacttgtctatgctagcata

SEQ ID NO: 1220109 - DNA, 25 bp, Homo sapien
gaagctgtaaggattgattttgaag

SEQ ID NO: 1220110 - DNA, 25 bp, Homo sapien
cttgaagctgtaaggattgattttg

SEQ ID NO: 1220111 - DNA, 25 bp, Homo sapien
gctgtaaggattgattttgaagcaa

SEQ ID NO: 1220112 - DNA, 25 bp, Homo sapien
gttcttgaagctgtaaggattgatt

SEQ ID NO: 1220113 - DNA, 25 bp, Homo sapien
aatttgtggtaataaatttgctgac

SEQ ID NO: 1220114 - DNA, 25 bp, Homo sapien
ggtaagagaagagcaatatcttaga

SEQ ID NO: 1220115 - DNA, 25 bp, Homo sapien
gagaagagcaatatcttagaatttg

SEQ ID NO: 1220116 - DNA, 25 bp, Homo sapien
ttagaatttgtggtaataaatttgc

SEQ ID NO: 1220117 - DNA, 25 bp, Homo sapien
taactagttgaagtgtcctcagagc

SEQ ID NO: 1220118 - DNA, 25 bp, Homo sapien
gagccaatgatcagtccttaaaaag

SEQ ID NO: 1220119 - DNA, 25 bp, Homo sapien
gaggtcatgtagtccatcccgctgc

SEQ ID NO: 1220120 - DNA, 25 bp, Homo sapien
cggacttaacagactcccagaactg

SEQ ID NO: 1220121 - DNA, 25 bp, Homo sapien
cagtaggcccctgctaagcttggac

SEQ ID NO: 1220122 - DNA, 25 bp, Homo sapien
caggaaacatggacagtagactctc

SEQ ID NO: 1220123 - DNA, 25 bp, Homo sapien
tctctagggctaacagtgagttgac

SEQ ID NO: 1220124 - DNA, 25 bp, Homo sapien
gatggttttttagccaccctgcagt

SEQ ID NO: 1220125 - DNA, 25 bp, Homo sapien
gcagccagattcttggtgacagtga

SEQ ID NO: 1220126 - DNA, 25 bp, Homo sapien
gccagattcttggtgacagtgaggc

SEQ ID NO: 1220127 - DNA, 25 bp, Homo sapien
cagccagattcttggtgacagtgag

SEQ ID NO: 1220128 - DNA, 25 bp, Homo sapien
aagcagccagattcttggtgacagt

SEQ ID NO: 1220129 - DNA, 25 bp, Homo sapien
aggactttggactccacacgggcaa

SEQ ID NO: 1220130 - DNA, 25 bp, Homo sapien
caggctccacttcgttagggaagga

SEQ ID NO: 1220131 - DNA, 25 bp, Homo sapien
tttggactccacacgggcaaagcct

SEQ ID NO: 1220132 - DNA, 25 bp, Homo sapien
ctcaggctccacttcgttagggaag

SEQ ID NO: 1220133 - DNA, 25 bp, Homo sapien
gactgccctttgtaagtttcactca

SEQ ID NO: 1220134 - DNA, 25 bp, Homo sapien
ctgccctttgtaagtttcactcatt

SEQ ID NO: 1220135 - DNA, 25 bp, Homo sapien
actgccctttgtaagtttcactcat

SEQ ID NO: 1220136 - DNA, 25 bp, Homo sapien
agactgccctttgtaagtttcactc

SEQ ID NO: 1220137 - DNA, 25 bp, Homo sapien
caggagagatactcgtcactgaggt

SEQ ID NO: 1220138 - DNA, 25 bp, Homo sapien
cactgaggttgtctaattctgaatg

SEQ ID NO: 1220139 - DNA, 25 bp, Homo sapien
tggttcagctcttctcgacagtgct

SEQ ID NO: 1220140 - DNA, 25 bp, Homo sapien
gacagtgctgcagcttacgcaggca

SEQ ID NO: 1220141 - DNA, 25 bp, Homo sapien
gtgctgcagcaatcaccaccatcag

SEQ ID NO: 1220142 - DNA, 25 bp, Homo sapien
aggttgtctttattggccaggaaca

SEQ ID NO: 1220143 - DNA, 25 bp, Homo sapien
gttgtctttattggccaggaacact

SEQ ID NO: 1220144 - DNA, 25 bp, Homo sapien
actgggagccatcgcccacattgcc

SEQ ID NO: 1220145 - DNA, 25 bp, Homo sapien
ctgtaatgtacccaaaccttctgag

SEQ ID NO: 1220146 - DNA, 25 bp, Homo sapien
aagtcagaaatcctaagtcagttgg

SEQ ID NO: 1220147 - DNA, 25 bp, Homo sapien
ccaagctgtaatgtacccaaacctt

SEQ ID NO: 1220148 - DNA, 25 bp, Homo sapien
ctgagtttttcgctgagttgcttgc

SEQ ID NO: 1220149 - DNA, 25 bp, Homo sapien
gctaatctgtggttgcaagccccag

SEQ ID NO: 1220150 - DNA, 25 bp, Homo sapien
tcaggtgcccagcttcgaggaaaag

SEQ ID NO: 1220151 - DNA, 25 bp, Homo sapien
tgtgtcgggacatagtaaggaagcc

SEQ ID NO: 1220152 - DNA, 25 bp, Homo sapien
tagggaccgggaagcattaaaggca

SEQ ID NO: 1220153 - DNA, 25 bp, Homo sapien
gggacaacagtcgtgcactatgatg

SEQ ID NO: 1220154 - DNA, 25 bp, Homo sapien
tctctgactacaaaagggacagtat

SEQ ID NO: 1220155 - DNA, 25 bp, Homo sapien
ggtcttatctagaaacatctgctga

SEQ ID NO: 1220156 - DNA, 25 bp, Homo sapien
tctggaaaggctcacctagcacgaa

SEQ ID NO: 1220157 - DNA, 25 bp, Homo sapien
cggtcaagggaaagacaagccgact

SEQ ID NO: 1220158 - DNA, 25 bp, Homo sapien
tacagaatctttgagcggtcaaggg

SEQ ID NO: 1220159 - DNA, 25 bp, Homo sapien
cagactcagtagtggagacgtgttc

SEQ ID NO: 1220160 - DNA, 25 bp, Homo sapien
gttgtatggatagccagctgagacc

SEQ ID NO: 1220161 - DNA, 25 bp, Homo sapien
cccagcttccatccagcagaaggga

SEQ ID NO: 1220162 - DNA, 25 bp, Homo sapien
cagcttccatccagcagaagggaag

SEQ ID NO: 1220163 - DNA, 25 bp, Homo sapien
catcccccagcttccatccagcaga

SEQ ID NO: 1220164 - DNA, 25 bp, Homo sapien
cttgtaactcccattcgccatcccc

SEQ ID NO: 1220165 - DNA, 25 bp, Homo sapien
ttggcacagttaggcccttcgccct

SEQ ID NO: 1220166 - DNA, 25 bp, Homo sapien
gagcattggcggtttgtcttccctc

SEQ ID NO: 1220167 - DNA, 25 bp, Homo sapien
ccaggagctttggagcattggcggt

SEQ ID NO: 1220168 - DNA, 25 bp, Homo sapien
ttggatttccaaggagcggagctag

SEQ ID NO: 1220169 - DNA, 25 bp, Homo sapien
gacttcccaggtccgcaggtccttg

SEQ ID NO: 1220170 - DNA, 25 bp, Homo sapien
acttcccaggtccgcaggtccttga

SEQ ID NO: 1220171 - DNA, 25 bp, Homo sapien
ttcccaggtccgcaggtccttgatc

SEQ ID NO: 1220172 - DNA, 25 bp, Homo sapien
cttcccaggtccgcaggtccttgat

SEQ ID NO: 1220173 - DNA, 25 bp, Homo sapien
agtttgtagggggtgagagaacttg

SEQ ID NO: 1220174 - DNA, 25 bp, Homo sapien
gtttgtagggggtgagagaacttgc

SEQ ID NO: 1220175 - DNA, 25 bp, Homo sapien
cagattgagcaaaggtgggtacgcc

SEQ ID NO: 1220176 - DNA, 25 bp, Homo sapien
cagtccctacttgggtagagccagg

SEQ ID NO: 1220177 - DNA, 25 bp, Homo sapien
ccttggctaagacgtcgaggagcgt

SEQ ID NO: 1220178 - DNA, 25 bp, Homo sapien
cgacgggtgatcttcgctgcggact

SEQ ID NO: 1220179 - DNA, 25 bp, Homo sapien
gaggcgctgacgtgagctcggcgca

SEQ ID NO: 1220180 - DNA, 25 bp, Homo sapien
tagaagcggaggagtagggtgggac

SEQ ID NO: 1220181 - DNA, 25 bp, Homo sapien
gcagcccagaaacgcggagtgtcat

SEQ ID NO: 1220182 - DNA, 25 bp, Homo sapien
tatttcttgcaactcgccaatcccg

SEQ ID NO: 1220183 - DNA, 25 bp, Homo sapien
aaaagtctcatttactgttgcacag

SEQ ID NO: 1220184 - DNA, 25 bp, Homo sapien
ctacgacagctcagtggttgagggt

SEQ ID NO: 1220185 - DNA, 25 bp, Homo sapien
aaggtgagggcaatctcatcaagca

SEQ ID NO: 1220186 - DNA, 25 bp, Homo sapien
gcaaaccggtcctctagatagatga

SEQ ID NO: 1220187 - DNA, 25 bp, Homo sapien
tattggctgtaacgtgtagactccc

SEQ ID NO: 1220188 - DNA, 25 bp, Homo sapien
tcagctggtgcaaaagtgagtgcct

SEQ ID NO: 1220189 - DNA, 25 bp, Homo sapien
gcaatcagatgcctacagggtcagg

SEQ ID NO: 1220190 - DNA, 25 bp, Homo sapien
cagtggagcttgtttggtccccaga

SEQ ID NO: 1220191 - DNA, 25 bp, Homo sapien
ctgattatcaatggagggcaaaatg

SEQ ID NO: 1220192 - DNA, 25 bp, Homo sapien
gagggcaaaatgatgggagcattgc

SEQ ID NO: 1220193 - DNA, 25 bp, Homo sapien
attatcaatggagggcaaaatgatg

SEQ ID NO: 1220194 - DNA, 25 bp, Homo sapien
caatggagggcaaaatgatgggagc

SEQ ID NO: 1220195 - DNA, 25 bp, Homo sapien
aaactctccactgtatggagccttt

SEQ ID NO: 1220196 - DNA, 25 bp, Homo sapien
ctttgctatcaccaactccagtaac

SEQ ID NO: 1220197 - DNA, 25 bp, Homo sapien
ggagtcccagttgccacgctttctg

SEQ ID NO: 1220198 - DNA, 25 bp, Homo sapien
gactctttagcaactccaccaaagg

SEQ ID NO: 1220199 - DNA, 25 bp, Homo sapien
ctgtggccctgatgctttaagatac

SEQ ID NO: 1220200 - DNA, 25 bp, Homo sapien
tacttggatggagacagagataagc

SEQ ID NO: 1220201 - DNA, 25 bp, Homo sapien
tctgatttcctttgaaagcacagaa

SEQ ID NO: 1220202 - DNA, 25 bp, Homo sapien
aggaaggttggagtctgatttcctt

SEQ ID NO: 1220203 - DNA, 25 bp, Homo sapien
gagccaatgagaaagctctccatgc

SEQ ID NO: 1220204 - DNA, 25 bp, Homo sapien
cagagccaatgagaaagctctccat

SEQ ID NO: 1220205 - DNA, 25 bp, Homo sapien
caatgagaaagctctccatgctggg

SEQ ID NO: 1220206 - DNA, 25 bp, Homo sapien
ccaatgagaaagctctccatgctgg

SEQ ID NO: 1220207 - DNA, 25 bp, Homo sapien
gagagtcacacttgggccttgctct

SEQ ID NO: 1220208 - DNA, 25 bp, Homo sapien
gctcttaatccaatcagcagagaag

SEQ ID NO: 1220209 - DNA, 25 bp, Homo sapien
cttagccatatctcctcaagggaat

SEQ ID NO: 1220210 - DNA, 25 bp, Homo sapien
cagagaagagatactttgtgtcctc

SEQ ID NO: 1220211 - DNA, 25 bp, Homo sapien
cccatactgctggcatggaaattcc

SEQ ID NO: 1220212 - DNA, 25 bp, Homo sapien
ccatactgctggcatggaaattcct

SEQ ID NO: 1220213 - DNA, 25 bp, Homo sapien
actccatggctcttgtggcttaagg

SEQ ID NO: 1220214 - DNA, 25 bp, Homo sapien
ctccatggctcttgtggcttaaggg

SEQ ID NO: 1220215 - DNA, 25 bp, Homo sapien
ccactccatggctcttgtggcttaa

SEQ ID NO: 1220216 - DNA, 25 bp, Homo sapien
ctccactccatggctcttgtggctt

SEQ ID NO: 1220217 - DNA, 25 bp, Homo sapien
gcagcctgaggaatggactctctaa

SEQ ID NO: 1220218 - DNA, 25 bp, Homo sapien
gcctgaggaatggactctctaaatc

SEQ ID NO: 1220219 - DNA, 25 bp, Homo sapien
tgaggaatggactctctaaatcttc

SEQ ID NO: 1220220 - DNA, 25 bp, Homo sapien
cagcctgaggaatggactctctaaa

SEQ ID NO: 1220221 - DNA, 25 bp, Homo sapien
cctgcgggctcagaaacactgcatc

SEQ ID NO: 1220222 - DNA, 25 bp, Homo sapien
tatgatggaatcacatgggtgaacc

SEQ ID NO: 1220223 - DNA, 25 bp, Homo sapien
gctggtcactatgcgaatatggtta

SEQ ID NO: 1220224 - DNA, 25 bp, Homo sapien
catgggtgaacccaagggtccagct

SEQ ID NO: 1220225 - DNA, 25 bp, Homo sapien
tagtttgctttggatgctgcccacc

SEQ ID NO: 1220226 - DNA, 25 bp, Homo sapien
gtttgctttggatgctgcccaccat

SEQ ID NO: 1220227 - DNA, 25 bp, Homo sapien
ctgagcaattagtttgctttggatg

SEQ ID NO: 1220228 - DNA, 25 bp, Homo sapien
agcaattagtttgctttggatgctg

SEQ ID NO: 1220229 - DNA, 25 bp, Homo sapien
tcgcgctcgtacgacaggcttagaa

SEQ ID NO: 1220230 - DNA, 25 bp, Homo sapien
tagaacatccggttcccggttctgc

SEQ ID NO: 1220231 - DNA, 25 bp, Homo sapien
gttcgttcactagtgttctcagagc

SEQ ID NO: 1220232 - DNA, 25 bp, Homo sapien
gctctttgaaagcacgggagttcgt

SEQ ID NO: 1220233 - DNA, 25 bp, Homo sapien
aaggtgccataaagcagatccgctt

SEQ ID NO: 1220234 - DNA, 25 bp, Homo sapien
aagcaaggtgccataaagcagatcc

SEQ ID NO: 1220235 - DNA, 25 bp, Homo sapien
gcaaggtgccataaagcagatccgc

SEQ ID NO: 1220236 - DNA, 25 bp, Homo sapien
ctttacggcgaaagcaaggtgccat

SEQ ID NO: 1220237 - DNA, 25 bp, Homo sapien
caagcacgtgggctcgctgactgcg

SEQ ID NO: 1220238 - DNA, 25 bp, Homo sapien
agagtcgcggttttccaccaggaag

SEQ ID NO: 1220239 - DNA, 25 bp, Homo sapien
ggaagttgtccagtcaacacaagca

SEQ ID NO: 1220240 - DNA, 25 bp, Homo sapien
gcaagagtcgcggttttccaccagg

SEQ ID NO: 1220241 - DNA, 25 bp, Homo sapien
cgccgaaatctcgaagatgtttctt

SEQ ID NO: 1220242 - DNA, 25 bp, Homo sapien
tgtcatagaagggatgctcctcgcc

SEQ ID NO: 1220243 - DNA, 25 bp, Homo sapien
gaagggatgctcctcgccgaaatct

SEQ ID NO: 1220244 - DNA, 25 bp, Homo sapien
tgctcctcgccgaaatctcgaagat

SEQ ID NO: 1220245 - DNA, 25 bp, Homo sapien
gaccaaactcgaggatacatctctg

SEQ ID NO: 1220246 - DNA, 25 bp, Homo sapien
cgaggatacatctctggcgactggg

SEQ ID NO: 1220247 - DNA, 25 bp, Homo sapien
aactcgaggatacatctctggcgac

SEQ ID NO: 1220248 - DNA, 25 bp, Homo sapien
cagaggaccaaactcgaggatacat

SEQ ID NO: 1220249 - DNA, 25 bp, Homo sapien
gttgacaaatctgtggctttgcttc

SEQ ID NO: 1220250 - DNA, 25 bp, Homo sapien
cagttgacaaatctgtggctttgct

SEQ ID NO: 1220251 - DNA, 25 bp, Homo sapien
agttgacaaatctgtggctttgctt

SEQ ID NO: 1220252 - DNA, 25 bp, Homo sapien
tctctgagtcgctttcagaatctga

SEQ ID NO: 1220253 - DNA, 25 bp, Homo sapien
cattctttaatgtagcaagtagtct

SEQ ID NO: 1220254 - DNA, 25 bp, Homo sapien
caagtagtctgtggtagccagaaac

SEQ ID NO: 1220255 - DNA, 25 bp, Homo sapien
gtctgtggtagccagaaacttgttg

SEQ ID NO: 1220256 - DNA, 25 bp, Homo sapien
taatgtagcaagtagtctgtggtag

SEQ ID NO: 1220257 - DNA, 25 bp, Homo sapien
tctctggactttcagtagactctgc

SEQ ID NO: 1220258 - DNA, 25 bp, Homo sapien
gacatcgctaccaccatcttcatcg

SEQ ID NO: 1220259 - DNA, 25 bp, Homo sapien
ttccacactgacatcgctaccacca

SEQ ID NO: 1220260 - DNA, 25 bp, Homo sapien
gactttcagtagactctgcagccat

SEQ ID NO: 1220261 - DNA, 25 bp, Homo sapien
cctcagggtcagcagataaagctac

SEQ ID NO: 1220262 - DNA, 25 bp, Homo sapien
tcttttccctcagggtcagcagata

SEQ ID NO: 1220263 - DNA, 25 bp, Homo sapien
cttcttttccctcagggtcagcaga

SEQ ID NO: 1220264 - DNA, 25 bp, Homo sapien
tcagggtcagcagataaagctacat

SEQ ID NO: 1220265 - DNA, 25 bp, Homo sapien
gttttgcatctgtgaactcttcggg

SEQ ID NO: 1220266 - DNA, 25 bp, Homo sapien
tgatgtgcccggtggctcttcccca

SEQ ID NO: 1220267 - DNA, 25 bp, Homo sapien
ccaggctgaacagtgactcgtgttt

SEQ ID NO: 1220268 - DNA, 25 bp, Homo sapien
atgtttgtgatgtgcccggtggctc

SEQ ID NO: 1220269 - DNA, 25 bp, Homo sapien
aggagacacagggtagggctttttg

SEQ ID NO: 1220270 - DNA, 25 bp, Homo sapien
caggagacacagggtagggcttttt

SEQ ID NO: 1220271 - DNA, 25 bp, Homo sapien
cacgtgactgccatttggtcacagg

SEQ ID NO: 1220272 - DNA, 25 bp, Homo sapien
tcttgaccacgtgactgccatttgg

SEQ ID NO: 1220273 - DNA, 25 bp, Homo sapien
taggcacgtcttgaccacgtgactg

SEQ ID NO: 1220274 - DNA, 25 bp, Homo sapien
cgccataggcacgtcttgaccacgt

SEQ ID NO: 1220275 - DNA, 25 bp, Homo sapien
ctggaattcagagcactttaggata

SEQ ID NO: 1220276 - DNA, 25 bp, Homo sapien
catttctggactatatggccctcaa

SEQ ID NO: 1220277 - DNA, 25 bp, Homo sapien
tcccaggcttactgtgttaggcaca

SEQ ID NO: 1220278 - DNA, 25 bp, Homo sapien
tcccctgtgaaagacatgttgatct

SEQ ID NO: 1220279 - DNA, 25 bp, Homo sapien
agctcgtgggtagttttgggatttg

SEQ ID NO: 1220280 - DNA, 25 bp, Homo sapien
ttgttcacatgttgaagaaatggat

SEQ ID NO: 1220281 - DNA, 25 bp, Homo sapien
tttgggatttgtggcaacagcctga

SEQ ID NO: 1220282 - DNA, 25 bp, Homo sapien
aacagcctgaattgctttttctttc

SEQ ID NO: 1220283 - DNA, 25 bp, Homo sapien
tgcaggcaatacacatggcggatct

SEQ ID NO: 1220284 - DNA, 25 bp, Homo sapien
caaacttctggcttcggcgtctgct

SEQ ID NO: 1220285 - DNA, 25 bp, Homo sapien
gaacaggtcccggtaagaattcata

SEQ ID NO: 1220286 - DNA, 25 bp, Homo sapien
tcagagcagtcctttccgggtagaa

SEQ ID NO: 1220287 - DNA, 25 bp, Homo sapien
gaacaggatcttgaggtgaaactgc

SEQ ID NO: 1220288 - DNA, 25 bp, Homo sapien
gaaggaacaggatcttgaggtgaaa

SEQ ID NO: 1220289 - DNA, 25 bp, Homo sapien
agcagccttagtggggtaagaggaa

SEQ ID NO: 1220290 - DNA, 25 bp, Homo sapien
aggaacaggatcttgaggtgaaact

SEQ ID NO: 1220291 - DNA, 25 bp, Homo sapien
aatcctcaggcctcttcaagttggg

SEQ ID NO: 1220292 - DNA, 25 bp, Homo sapien
caaatacggcttcataatcctcagg

SEQ ID NO: 1220293 - DNA, 25 bp, Homo sapien
gcaaagcagcttcccggaatggcac

SEQ ID NO: 1220294 - DNA, 25 bp, Homo sapien
tgggtggtctctcctcgggatctga

SEQ ID NO: 1220295 - DNA, 25 bp, Homo sapien
gaaatgactcttgctaaggtcccca

SEQ ID NO: 1220296 - DNA, 25 bp, Homo sapien
ccgtcactatcaaactgctccagag

SEQ ID NO: 1220297 - DNA, 25 bp, Homo sapien
caccaacaggatgaacacttttgag

SEQ ID NO: 1220298 - DNA, 25 bp, Homo sapien
gcaatccggcctctgattctcagga

SEQ ID NO: 1220299 - DNA, 25 bp, Homo sapien
ccaatgatggtcctcaagcccaggg

SEQ ID NO: 1220300 - DNA, 25 bp, Homo sapien
gaagctcgatagaagacagaaagtc

SEQ ID NO: 1220301 - DNA, 25 bp, Homo sapien
gaagcaatgaggatatccgaggagt

SEQ ID NO: 1220302 - DNA, 25 bp, Homo sapien
catgctcccagttctgcatcaggta

SEQ ID NO: 1220303 - DNA, 25 bp, Homo sapien
aaagtctaccccatgtgagtccagg

SEQ ID NO: 1220304 - DNA, 25 bp, Homo sapien
caattattgaggctccacatccgca

SEQ ID NO: 1220305 - DNA, 25 bp, Homo sapien
gaacactgagttgatctgggcatcc

SEQ ID NO: 1220306 - DNA, 25 bp, Homo sapien
ggccccaaatagcagtgtctggcga

SEQ ID NO: 1220307 - DNA, 25 bp, Homo sapien
caaacaataaacagtgctcatgaag

SEQ ID NO: 1220308 - DNA, 25 bp, Homo sapien
tacctcaggacccaaacaataaaca

SEQ ID NO: 1220309 - DNA, 25 bp, Homo sapien
ccttcttgaccagaagctatcgcct

SEQ ID NO: 1220310 - DNA, 25 bp, Homo sapien
aggtggacagccatccccttcttga

SEQ ID NO: 1220311 - DNA, 25 bp, Homo sapien
caacaagagcgttaggtggacagcc

SEQ ID NO: 1220312 - DNA, 25 bp, Homo sapien
ctgccagtagtcaacaagagcgtta

SEQ ID NO: 1220313 - DNA, 25 bp, Homo sapien
tcattgggacattcctcacggccac

SEQ ID NO: 1220314 - DNA, 25 bp, Homo sapien
cactgaagctaggttttcagcttcc

SEQ ID NO: 1220315 - DNA, 25 bp, Homo sapien
ggcatcaatcactgaagctaggttt

SEQ ID NO: 1220316 - DNA, 25 bp, Homo sapien
caggacatgactgatagagcctgtc

SEQ ID NO: 1220317 - DNA, 25 bp, Homo sapien
taggaagtacacaccacactattca

SEQ ID NO: 1220318 - DNA, 25 bp, Homo sapien
tccccagaggccaatatgatttacc

SEQ ID NO: 1220319 - DNA, 25 bp, Homo sapien
ttatgagacctaggccaaagtcact

SEQ ID NO: 1220320 - DNA, 25 bp, Homo sapien
ccaattctaggtttgtatgcccaag

SEQ ID NO: 1220321 - DNA, 25 bp, Homo sapien
gaaactgtttctctccttgaaggaa

SEQ ID NO: 1220322 - DNA, 25 bp, Homo sapien
gatgagcgtgtgagacatgactgca

SEQ ID NO: 1220323 - DNA, 25 bp, Homo sapien
gaagtaatttcgaagacgcacgaag

SEQ ID NO: 1220324 - DNA, 25 bp, Homo sapien
catgactgcatcacgatactgtggc

SEQ ID NO: 1220325 - DNA, 25 bp, Homo sapien
tgcattcagagcaggccatgatttg

SEQ ID NO: 1220326 - DNA, 25 bp, Homo sapien
ggatgatctcaacaccacgaagcct

SEQ ID NO: 1220327 - DNA, 25 bp, Homo sapien
cttgcagtgtataaccacagctaca

SEQ ID NO: 1220328 - DNA, 25 bp, Homo sapien
tctggctactttgtaagagtgcgag

SEQ ID NO: 1220329 - DNA, 25 bp, Homo sapien
caggaacaccgcaactgtctggaaa

SEQ ID NO: 1220330 - DNA, 25 bp, Homo sapien
tcaggaacaccgcaactgtctggaa

SEQ ID NO: 1220331 - DNA, 25 bp, Homo sapien
ctcaggaacaccgcaactgtctgga

SEQ ID NO: 1220332 - DNA, 25 bp, Homo sapien
ctgcaaatgtcaaggagcccacggt

SEQ ID NO: 1220333 - DNA, 25 bp, Homo sapien
ccttggtagggagtatctgtgcata

SEQ ID NO: 1220334 - DNA, 25 bp, Homo sapien
aagtcacctggtaggaaatctaagc

SEQ ID NO: 1220335 - DNA, 25 bp, Homo sapien
tctaagcaaacgctgaaacccttca

SEQ ID NO: 1220336 - DNA, 25 bp, Homo sapien
cacaaatttaatcaatcctcaactc

SEQ ID NO: 1220337 - DNA, 25 bp, Homo sapien
acactctttggccaagcagccttct

SEQ ID NO: 1220338 - DNA, 25 bp, Homo sapien
gagcaaataatgagggcaacaagca

SEQ ID NO: 1220339 - DNA, 25 bp, Homo sapien
acaagcaggcattcattaacactct

SEQ ID NO: 1220340 - DNA, 25 bp, Homo sapien
agattgatagcacccacaccagtgg

SEQ ID NO: 1220341 - DNA, 25 bp, Homo sapien
aatcctgactagattgatagcaccc

SEQ ID NO: 1220342 - DNA, 25 bp, Homo sapien
ggtgttgggaaggtatctacagtaa

SEQ ID NO: 1220343 - DNA, 25 bp, Homo sapien
cagtaacaatcaaatcctgactaga

SEQ ID NO: 1220344 - DNA, 25 bp, Homo sapien
cagcttcagctcaccatggactgag

SEQ ID NO: 1220345 - DNA, 25 bp, Homo sapien
taataattggtcctcagtgggagaa

SEQ ID NO: 1220346 - DNA, 25 bp, Homo sapien
tgagcccaaagagctaccatcatga

SEQ ID NO: 1220347 - DNA, 25 bp, Homo sapien
ctgacccagagatgtgcagccaggt

SEQ ID NO: 1220348 - DNA, 25 bp, Homo sapien
aaacagtggcacaagtaacagaaca

SEQ ID NO: 1220349 - DNA, 25 bp, Homo sapien
cagaggcatagttcatgcttgttgc

SEQ ID NO: 1220350 - DNA, 25 bp, Homo sapien
ttgcttcctgctaatggagaaaaac

SEQ ID NO: 1220351 - DNA, 25 bp, Homo sapien
aaactacctaggagttgtacagagg

SEQ ID NO: 1220352 - DNA, 25 bp, Homo sapien
gagaacagtgcaggtccacgtggcc

SEQ ID NO: 1220353 - DNA, 25 bp, Homo sapien
ggtggctctcagcatattacagatt

SEQ ID NO: 1220354 - DNA, 25 bp, Homo sapien
ctgtaaaagtgtggatatgtcggca

SEQ ID NO: 1220355 - DNA, 25 bp, Homo sapien
gcatcatatttggagtagagaacag

SEQ ID NO: 1220356 - DNA, 25 bp, Homo sapien
gtgccgcccgctccacaccaaccac

SEQ ID NO: 1220357 - DNA, 25 bp, Homo sapien
gttggactgtagcatctgtgccgcc

SEQ ID NO: 1220358 - DNA, 25 bp, Homo sapien
gctccacaccaaccacggcagctaa

SEQ ID NO: 1220359 - DNA, 25 bp, Homo sapien
agtaatgaagaggtggacattcttg

SEQ ID NO: 1220360 - DNA, 25 bp, Homo sapien
tatgaagacactactgttgaagatg

SEQ ID NO: 1220361 - DNA, 25 bp, Homo sapien
tcttctaggctgaattaaggtagac

SEQ ID NO: 1220362 - DNA, 25 bp, Homo sapien
cagttctcgcaagcaatgtgtattc

SEQ ID NO: 1220363 - DNA, 25 bp, Homo sapien
tgtaagtaatcagaattgggtccaa

SEQ ID NO: 1220364 - DNA, 25 bp, Homo sapien
tattcacattatccttattggtggg

SEQ ID NO: 1220365 - DNA, 25 bp, Homo sapien
tgggttggcaactcactctcaaatg

SEQ ID NO: 1220366 - DNA, 25 bp, Homo sapien
caaatggttcaggttctgtacttgg

SEQ ID NO: 1220367 - DNA, 25 bp, Homo sapien
tggtggggcattcctaatcacaaac

SEQ ID NO: 1220368 - DNA, 25 bp, Homo sapien
caagttctgaccactgagcctggga

SEQ ID NO: 1220369 - DNA, 25 bp, Homo sapien
gagcctgggatgagtggcaccacaa

SEQ ID NO: 1220370 - DNA, 25 bp, Homo sapien
tctttgtagcatgggttcggtcggc

SEQ ID NO: 1220371 - DNA, 25 bp, Homo sapien
tacattgaggataatgggagccact

SEQ ID NO: 1220372 - DNA, 25 bp, Homo sapien
ttgaaatccagactcacatgtgagt

SEQ ID NO: 1220373 - DNA, 25 bp, Homo sapien
ggtttggctctatgccagcatgaaa

SEQ ID NO: 1220374 - DNA, 25 bp, Homo sapien
cagactcacatgtgagtggagagcc

SEQ ID NO: 1220375 - DNA, 25 bp, Homo sapien
gccaggaacaaagcaacactacttt

SEQ ID NO: 1220376 - DNA, 25 bp, Homo sapien
tgagaagcatccacgattcaaagct

SEQ ID NO: 1220377 - DNA, 25 bp, Homo sapien
ttttgaacactgcacgtggtgcagc

SEQ ID NO: 1220378 - DNA, 25 bp, Homo sapien
gtgctcaattataagccctttggaa

SEQ ID NO: 1220379 - DNA, 25 bp, Homo sapien
ggattgggaccatcctttgtctata

SEQ ID NO: 1220380 - DNA, 25 bp, Homo sapien
gaggagtcagcagggacacattccc

SEQ ID NO: 1220381 - DNA, 25 bp, Homo sapien
tgccctcacgagggcacaatcaggg

SEQ ID NO: 1220382 - DNA, 25 bp, Homo sapien
caatcagggctgagagccttcatga

SEQ ID NO: 1220383 - DNA, 25 bp, Homo sapien
agcatagctccttgccctcacgagg

SEQ ID NO: 1220384 - DNA, 25 bp, Homo sapien
tcagatggccaatagggtctggccc

SEQ ID NO: 1220385 - DNA, 25 bp, Homo sapien
agaagccgtgccctgaaaagagcca

SEQ ID NO: 1220386 - DNA, 25 bp, Homo sapien
gagaccctagatctgctcacgtggg

SEQ ID NO: 1220387 - DNA, 25 bp, Homo sapien
gacaatgaggctcttcagacaacta

SEQ ID NO: 1220388 - DNA, 25 bp, Homo sapien
tacatgtaatgcaagtggaggcggc

SEQ ID NO: 1220389 - DNA, 25 bp, Homo sapien
gcatagggctatactgagaaaacca

SEQ ID NO: 1220390 - DNA, 25 bp, Homo sapien
caaacagctccttatggcagtcaca

SEQ ID NO: 1220391 - DNA, 25 bp, Homo sapien
taatggcaacgtgaccagaggtgta

SEQ ID NO: 1220392 - DNA, 25 bp, Homo sapien
tagaaatgtgccatcccacacctga

SEQ ID NO: 1220393 - DNA, 25 bp, Homo sapien
agctcggcgaggagcacctagaaat

SEQ ID NO: 1220394 - DNA, 25 bp, Homo sapien
tgaagcccatgacagctcggcgagg

SEQ ID NO: 1220395 - DNA, 25 bp, Homo sapien
tgtgccatcccacacctgactgtga

SEQ ID NO: 1220396 - DNA, 25 bp, Homo sapien
ccttctctgggtcagccaaggctac

SEQ ID NO: 1220397 - DNA, 25 bp, Homo sapien
aatcagccaagcggcagactgcctc

SEQ ID NO: 1220398 - DNA, 25 bp, Homo sapien
ctaaatcagccaagcggcagactgc

SEQ ID NO: 1220399 - DNA, 25 bp, Homo sapien
cttctctgggtcagccaaggctaca

SEQ ID NO: 1220400 - DNA, 25 bp, Homo sapien
aatgagcaccccatccttgaaggaa

SEQ ID NO: 1220401 - DNA, 25 bp, Homo sapien
tgtggaatggacacgtcagaactgc

SEQ ID NO: 1220402 - DNA, 25 bp, Homo sapien
tacgtacagagcttatagcctcagg

SEQ ID NO: 1220403 - DNA, 25 bp, Homo sapien
tatagggcaaacaatagcagtctct

SEQ ID NO: 1220404 - DNA, 25 bp, Homo sapien
agaactctgtgacaggtgttccaca

SEQ ID NO: 1220405 - DNA, 25 bp, Homo sapien
ccattcgcctcctgttgacacctcc

SEQ ID NO: 1220406 - DNA, 25 bp, Homo sapien
aggtgttccacagccattcgcctcc

SEQ ID NO: 1220407 - DNA, 25 bp, Homo sapien
ggaagaactctgtgacaggtgttcc

SEQ ID NO: 1220408 - DNA, 25 bp, Homo sapien
gacccgggagttaagtcagtacagc

SEQ ID NO: 1220409 - DNA, 25 bp, Homo sapien
tctccgcaggtttcataacagatag

SEQ ID NO: 1220410 - DNA, 25 bp, Homo sapien
taacagatagaacaaaaccgggata

SEQ ID NO: 1220411 - DNA, 25 bp, Homo sapien
caagcagcttttttcgacccgggag

SEQ ID NO: 1220412 - DNA, 25 bp, Homo sapien
gttacagtaggtagcaaaaagcagg

SEQ ID NO: 1220413 - DNA, 25 bp, Homo sapien
cagtaggtagcaaaaagcaggtagc

SEQ ID NO: 1220414 - DNA, 25 bp, Homo sapien
tacagtaggtagcaaaaagcaggta

SEQ ID NO: 1220415 - DNA, 25 bp, Homo sapien
taggtagcaaaaagcaggtagctca

SEQ ID NO: 1220416 - DNA, 25 bp, Homo sapien
ctgatttgcagactcattccctcct

SEQ ID NO: 1220417 - DNA, 25 bp, Homo sapien
tgatttgcagactcattccctcctc

SEQ ID NO: 1220418 - DNA, 25 bp, Homo sapien
ggcttctctcaccagagagaaccat

SEQ ID NO: 1220419 - DNA, 25 bp, Homo sapien
cctcctccttgttaccctggcttct

SEQ ID NO: 1220420 - DNA, 25 bp, Homo sapien
cttgagcgctaaggctaatctgatt

SEQ ID NO: 1220421 - DNA, 25 bp, Homo sapien
ttgagcgctaaggctaatctgattt

SEQ ID NO: 1220422 - DNA, 25 bp, Homo sapien
taccacttgtctataaacacagccc

SEQ ID NO: 1220423 - DNA, 25 bp, Homo sapien
tgcagttgatgctattggcacaacc

SEQ ID NO: 1220424 - DNA, 25 bp, Homo sapien
cacctaaacttgagtgggatccaga

SEQ ID NO: 1220425 - DNA, 25 bp, Homo sapien
cttgtctataaacacagcccatgca

SEQ ID NO: 1220426 - DNA, 25 bp, Homo sapien
ggattgtgctatgtgcccatgtgga

SEQ ID NO: 1220427 - DNA, 25 bp, Homo sapien
gctatgtgcccatgtggagtgctcc

SEQ ID NO: 1220428 - DNA, 25 bp, Homo sapien
cagaggattgtgctatgtgcccatg

SEQ ID NO: 1220429 - DNA, 25 bp, Homo sapien
catgtggagtgctccttggggtgcc

SEQ ID NO: 1220430 - DNA, 25 bp, Homo sapien
gacagtgtctcaacttgaacctcaa

SEQ ID NO: 1220431 - DNA, 25 bp, Homo sapien
agacacccctgagcatatttggaga

SEQ ID NO: 1220432 - DNA, 25 bp, Homo sapien
gctggtgggtgatgttctattgtcc

SEQ ID NO: 1220433 - DNA, 25 bp, Homo sapien
tttatttactttggatccagacacc

SEQ ID NO: 1220434 - DNA, 25 bp, Homo sapien
tcagacggacgttttgacaaaggac

SEQ ID NO: 1220435 - DNA, 25 bp, Homo sapien
gaactctgagttggaatttgtctac

SEQ ID NO: 1220436 - DNA, 25 bp, Homo sapien
tgcaaacgcacatttgaagccacac

SEQ ID NO: 1220437 - DNA, 25 bp, Homo sapien
tggaaagcatgtcacacgcaggttt

SEQ ID NO: 1220438 - DNA, 25 bp, Homo sapien
gacgcgctgagtccgccagcgagag

SEQ ID NO: 1220439 - DNA, 25 bp, Homo sapien
ggcagcagacgcgagggctggcgga

SEQ ID NO: 1220440 - DNA, 25 bp, Homo sapien
gcagcagacgcgagggctggcggag

SEQ ID NO: 1220441 - DNA, 25 bp, Homo sapien
gcggaggacgcgctgagtccgccag

SEQ ID NO: 1220442 - DNA, 25 bp, Homo sapien
atgcgctcgccatggaccgcaccaa

SEQ ID NO: 1220443 - DNA, 25 bp, Homo sapien
gatgcgctcgccatggaccgcacca

SEQ ID NO: 1220444 - DNA, 25 bp, Homo sapien
tggtcccggtcctcgctccccgctg

SEQ ID NO: 1220445 - DNA, 25 bp, Homo sapien
aatatagacacttggtcccagttac

SEQ ID NO: 1220446 - DNA, 25 bp, Homo sapien
tctacagttatcattgaatttcaag

SEQ ID NO: 1220447 - DNA, 25 bp, Homo sapien
tctcttctacagttatcattgaatt

SEQ ID NO: 1220448 - DNA, 25 bp, Homo sapien
cttctacagttatcattgaatttca

SEQ ID NO: 1220449 - DNA, 25 bp, Homo sapien
tcttctacagttatcattgaatttc

SEQ ID NO: 1220450 - DNA, 25 bp, Homo sapien
tacagataagttcatgtactccaca

SEQ ID NO: 1220451 - DNA, 25 bp, Homo sapien
taatacagataagttcatgtactcc

SEQ ID NO: 1220452 - DNA, 25 bp, Homo sapien
ttctaatacagataagttcatgtac

SEQ ID NO: 1220453 - DNA, 25 bp, Homo sapien
cttttctaatacagataagttcatg

SEQ ID NO: 1220454 - DNA, 25 bp, Homo sapien
taaggaagcatagacagttgttggt

SEQ ID NO: 1220455 - DNA, 25 bp, Homo sapien
gatcagcatgcactcagattccaga

SEQ ID NO: 1220456 - DNA, 25 bp, Homo sapien
gaacagaagtcaatgggagatcagc

SEQ ID NO: 1220457 - DNA, 25 bp, Homo sapien
tttgttgaaccacccagttgtcagg

SEQ ID NO: 1220458 - DNA, 25 bp, Homo sapien
taaggtgcaatctctcgtgctccca

SEQ ID NO: 1220459 - DNA, 25 bp, Homo sapien
gaaaacttaccaaatcataaggtgc

SEQ ID NO: 1220460 - DNA, 25 bp, Homo sapien
gctttggtgtaaacaaaggaagaga

SEQ ID NO: 1220461 - DNA, 25 bp, Homo sapien
tcctcagaataatctgaatacagag

SEQ ID NO: 1220462 - DNA, 25 bp, Homo sapien
cactgttagggaataggtacattga

SEQ ID NO: 1220463 - DNA, 25 bp, Homo sapien
ctcttaaagtaacggaattgctatg

SEQ ID NO: 1220464 - DNA, 25 bp, Homo sapien
ttatatggaaaatcaaaggcccaga

SEQ ID NO: 1220465 - DNA, 25 bp, Homo sapien
gataaaaacttgacagaggtagcag

SEQ ID NO: 1220466 - DNA, 25 bp, Homo sapien
cagcctggccacagagaaataccct

SEQ ID NO: 1220467 - DNA, 25 bp, Homo sapien
ctccagcctggccacagagaaatac

SEQ ID NO: 1220468 - DNA, 25 bp, Homo sapien
tccagcctggccacagagaaatacc

SEQ ID NO: 1220469 - DNA, 25 bp, Homo sapien
gcctggccacagagaaataccctat

SEQ ID NO: 1220470 - DNA, 25 bp, Homo sapien
ctaaataatcaaatttctgtctcct

SEQ ID NO: 1220471 - DNA, 25 bp, Homo sapien
taaataatcaaatttctgtctcctc

SEQ ID NO: 1220472 - DNA, 25 bp, Homo sapien
atttctgtctcctcttaaatttcac

SEQ ID NO: 1220473 - DNA, 25 bp, Homo sapien
tctgtctcctcttaaatttcaccat

SEQ ID NO: 1220474 - DNA, 25 bp, Homo sapien
ctgaggaattacaagtgtttctggg

SEQ ID NO: 1220475 - DNA, 25 bp, Homo sapien
aggaattacaagtgtttctgggcca

SEQ ID NO: 1220476 - DNA, 25 bp, Homo sapien
tgaggaattacaagtgtttctgggc

SEQ ID NO: 1220477 - DNA, 25 bp, Homo sapien
gaggaattacaagtgtttctgggcc

SEQ ID NO: 1220478 - DNA, 25 bp, Homo sapien
gtacccagatgtcccgcagcttggg

SEQ ID NO: 1220479 - DNA, 25 bp, Homo sapien
tgctggccacagatcttggctgcag

SEQ ID NO: 1220480 - DNA, 25 bp, Homo sapien
ctggccacagatcttggctgcaggc

SEQ ID NO: 1220481 - DNA, 25 bp, Homo sapien
ggtacccagatgtcccgcagcttgg

SEQ ID NO: 1220482 - DNA, 25 bp, Homo sapien
ggtgctttcagaggactagggctcc

SEQ ID NO: 1220483 - DNA, 25 bp, Homo sapien
tagggctccgtacaacatctttagg

SEQ ID NO: 1220484 - DNA, 25 bp, Homo sapien
taaggagaaatgcatgtctggttcc

SEQ ID NO: 1220485 - DNA, 25 bp, Homo sapien
catgggcgcccatgcctgagtttct

SEQ ID NO: 1220486 - DNA, 25 bp, Homo sapien
taaagctttttctgtgtcgattgag

SEQ ID NO: 1220487 - DNA, 25 bp, Homo sapien
tggctatgagtctggcatagatgac

SEQ ID NO: 1220488 - DNA, 25 bp, Homo sapien
aaagaaggctacttaatcatcgtaa

SEQ ID NO: 1220489 - DNA, 25 bp, Homo sapien
tagtattttgccgaggattttcgtg

SEQ ID NO: 1220490 - DNA, 25 bp, Homo sapien
tcttcatgctgagctactatgagta

SEQ ID NO: 1220491 - DNA, 25 bp, Homo sapien
atcttcatgctgagctactatgagt

SEQ ID NO: 1220492 - DNA, 25 bp, Homo sapien
ctgtattctgaaccaagatctggaa

SEQ ID NO: 1220493 - DNA, 25 bp, Homo sapien
tgttggaaatttctgaaaaatgcca

SEQ ID NO: 1220494 - DNA, 25 bp, Homo sapien
gcagattctgttggaaatttctgaa

SEQ ID NO: 1220495 - DNA, 25 bp, Homo sapien
ctgaaggcagattctgttggaaatt

SEQ ID NO: 1220496 - DNA, 25 bp, Homo sapien
ctagagaggacactgaaggcagatt

SEQ ID NO: 1220497 - DNA, 25 bp, Homo sapien
aatgatctgaatgccctaaatcggg

SEQ ID NO: 1220498 - DNA, 25 bp, Homo sapien
ttggagacttctgttaacccggcat

SEQ ID NO: 1220499 - DNA, 25 bp, Homo sapien
tcttgacaaatagatccagcccttg

SEQ ID NO: 1220500 - DNA, 25 bp, Homo sapien
agttaaagcatagctgacctcccca

SEQ ID NO: 1220501 - DNA, 25 bp, Homo sapien
tattgatgcttcactactgtatcca

SEQ ID NO: 1220502 - DNA, 25 bp, Homo sapien
ctttgtctagaatctgccagtggta

SEQ ID NO: 1220503 - DNA, 25 bp, Homo sapien
catactctgccgatagaggactgta

SEQ ID NO: 1220504 - DNA, 25 bp, Homo sapien
tgtgttctggataaggcctcatgat

SEQ ID NO: 1220505 - DNA, 25 bp, Homo sapien
catcatacatgaggaaatcagtcat

SEQ ID NO: 1220506 - DNA, 25 bp, Homo sapien
ttatttttcctaaggctatggaagc

SEQ ID NO: 1220507 - DNA, 25 bp, Homo sapien
tcctaaggctatggaagcagctggt

SEQ ID NO: 1220508 - DNA, 25 bp, Homo sapien
gcagctggtatgctactgaaattca

SEQ ID NO: 1220509 - DNA, 25 bp, Homo sapien
aggtaatacaagagaccaaagtagg

SEQ ID NO: 1220510 - DNA, 25 bp, Homo sapien
ggtttaatactctaactcaagctag

SEQ ID NO: 1220511 - DNA, 25 bp, Homo sapien
agtaagagatacctggtgtgggaca

SEQ ID NO: 1220512 - DNA, 25 bp, Homo sapien
gaagcaggtatgaggagttaatatc

SEQ ID NO: 1220513 - DNA, 25 bp, Homo sapien
tggaaacttctagtggtaaagaatc

SEQ ID NO: 1220514 - DNA, 25 bp, Homo sapien
ggcaaatgttcaatgtccatctgtc

SEQ ID NO: 1220515 - DNA, 25 bp, Homo sapien
tacccaggttgaggccatctgctga

SEQ ID NO: 1220516 - DNA, 25 bp, Homo sapien
agacatctttggcaccggcatccca

SEQ ID NO: 1220517 - DNA, 25 bp, Homo sapien
ttgtgtagctccttatggtaactgc

SEQ ID NO: 1220518 - DNA, 25 bp, Homo sapien
gggtagggactgctgttaaactcac

SEQ ID NO: 1220519 - DNA, 25 bp, Homo sapien
ggtttgctggttgcctgattagccc

SEQ ID NO: 1220520 - DNA, 25 bp, Homo sapien
tgcagtcacggaggaactaccaaga

SEQ ID NO: 1220521 - DNA, 25 bp, Homo sapien
gcagccaagtcttcccctgtggtca

SEQ ID NO: 1220522 - DNA, 25 bp, Homo sapien
gggagcctcaaaaatatctccgtgt

SEQ ID NO: 1220523 - DNA, 25 bp, Homo sapien
cagtcactttctgttagtaaagaat

SEQ ID NO: 1220524 - DNA, 25 bp, Homo sapien
ttatcctgccaattctggcaatgca

SEQ ID NO: 1220525 - DNA, 25 bp, Homo sapien
atagataacgctgttgatcaaatct

SEQ ID NO: 1220526 - DNA, 25 bp, Homo sapien
tagataacgctgttgatcaaatcta

SEQ ID NO: 1220527 - DNA, 25 bp, Homo sapien
tgatcaaatctattcaccaagtatt

SEQ ID NO: 1220528 - DNA, 25 bp, Homo sapien
gttgatcaaatctattcaccaagta

SEQ ID NO: 1220529 - DNA, 25 bp, Homo sapien
ccttcacttgggcacttgttatatg

SEQ ID NO: 1220530 - DNA, 25 bp, Homo sapien
tatttcatgacctgtgcttccttca

SEQ ID NO: 1220531 - DNA, 25 bp, Homo sapien
ttatatgagcatcttggactgttgc

SEQ ID NO: 1220532 - DNA, 25 bp, Homo sapien
ttctgagggtgtacatgacagatgg

SEQ ID NO: 1220533 - DNA, 25 bp, Homo sapien
agaagcacaggattattatcctcca

SEQ ID NO: 1220534 - DNA, 25 bp, Homo sapien
gaagcacaggattattatcctccaa

SEQ ID NO: 1220535 - DNA, 25 bp, Homo sapien
aattcttcttaccaagaggagaagc

SEQ ID NO: 1220536 - DNA, 25 bp, Homo sapien
cttgtgaaacattgagtaacctccc

SEQ ID NO: 1220537 - DNA, 25 bp, Homo sapien
cacatttttgctccgaaacagtaag

SEQ ID NO: 1220538 - DNA, 25 bp, Homo sapien
taaacttaaagctcaaccaaccagc

SEQ ID NO: 1220539 - DNA, 25 bp, Homo sapien
cagctgaagactagttgggacattc

SEQ ID NO: 1220540 - DNA, 25 bp, Homo sapien
ccttgatcttataaatcttatatgc

SEQ ID NO: 1220541 - DNA, 25 bp, Homo sapien
gctagttggtataatgtatgcagga

SEQ ID NO: 1220542 - DNA, 25 bp, Homo sapien
agtccttgatcttataaatcttata

SEQ ID NO: 1220543 - DNA, 25 bp, Homo sapien
atatgctagttggtataatgtatgc

SEQ ID NO: 1220544 - DNA, 25 bp, Homo sapien
tttaggtcgggagagtgcttctttc

SEQ ID NO: 1220545 - DNA, 25 bp, Homo sapien
taccgtaactactgtatctactatg

SEQ ID NO: 1220546 - DNA, 25 bp, Homo sapien
ccctattttaggtcgggagagtgct

SEQ ID NO: 1220547 - DNA, 25 bp, Homo sapien
cagcttaacatgtaccgtaactact

SEQ ID NO: 1220548 - DNA, 25 bp, Homo sapien
caaacaggaagtgtgggtcagctca

SEQ ID NO: 1220549 - DNA, 25 bp, Homo sapien
tacgactacatgactcagctttggc

SEQ ID NO: 1220550 - DNA, 25 bp, Homo sapien
ggtcagctcagaccatgtggactag

SEQ ID NO: 1220551 - DNA, 25 bp, Homo sapien
tgtggactaggacaataccctaggg

SEQ ID NO: 1220552 - DNA, 25 bp, Homo sapien
taaaggtctcaaaatattagcggtc

SEQ ID NO: 1220553 - DNA, 25 bp, Homo sapien
agtataacgctatggaaaaatttgg

SEQ ID NO: 1220554 - DNA, 25 bp, Homo sapien
ggttccgttttcagagattgttcta

SEQ ID NO: 1220555 - DNA, 25 bp, Homo sapien
aacaatgtcaaacctacgtctctga

SEQ ID NO: 1220556 - DNA, 25 bp, Homo sapien
gaaagtgtgatgtatgtttttataa

SEQ ID NO: 1220557 - DNA, 25 bp, Homo sapien
tagtacaggcagtaagttaaattca

SEQ ID NO: 1220558 - DNA, 25 bp, Homo sapien
ccctatagagcgagattagtacagg

SEQ ID NO: 1220559 - DNA, 25 bp, Homo sapien
tacaaccaaaagctaccctatagag

SEQ ID NO: 1220560 - DNA, 25 bp, Homo sapien
tttctttagaagatgtgaaaacaat

SEQ ID NO: 1220561 - DNA, 25 bp, Homo sapien
ttaacctagcatgtaaataaatact

SEQ ID NO: 1220562 - DNA, 25 bp, Homo sapien
aactcaattatttaacctagcatgt

SEQ ID NO: 1220563 - DNA, 25 bp, Homo sapien
cctagcatgtaaataaatacttgat

SEQ ID NO: 1220564 - DNA, 25 bp, Homo sapien
ggctcaggatcaaaaggtttaggaa

SEQ ID NO: 1220565 - DNA, 25 bp, Homo sapien
catgagttgccacctgtcctgttat

SEQ ID NO: 1220566 - DNA, 25 bp, Homo sapien
ggtttaggaagctgcgaagatgatc

SEQ ID NO: 1220567 - DNA, 25 bp, Homo sapien
gaagcttctgttcttgtgagtcata

SEQ ID NO: 1220568 - DNA, 25 bp, Homo sapien
agacagggcatggtcctctctggat

SEQ ID NO: 1220569 - DNA, 25 bp, Homo sapien
tgtacaccatacagtctaaaccgaa

SEQ ID NO: 1220570 - DNA, 25 bp, Homo sapien
ttcttttttcatgcgatgtacacca

SEQ ID NO: 1220571 - DNA, 25 bp, Homo sapien
taagaaggttccaatatcacaggca

SEQ ID NO: 1220572 - DNA, 25 bp, Homo sapien
aacataaactgtattcaggccattt

SEQ ID NO: 1220573 - DNA, 25 bp, Homo sapien
tgaacataaactgtattcaggccat

SEQ ID NO: 1220574 - DNA, 25 bp, Homo sapien
ccatgaacataaactgtattcaggc

SEQ ID NO: 1220575 - DNA, 25 bp, Homo sapien
catgaacataaactgtattcaggcc

SEQ ID NO: 1220576 - DNA, 25 bp, Homo sapien
tctatccagggcttagatatttttg

SEQ ID NO: 1220577 - DNA, 25 bp, Homo sapien
ttgtaaaggcatgattactatgtaa

SEQ ID NO: 1220578 - DNA, 25 bp, Homo sapien
tcacaaattatcttcaagggcaact

SEQ ID NO: 1220579 - DNA, 25 bp, Homo sapien
tctatctatccagggcttagatatt

SEQ ID NO: 1220580 - DNA, 25 bp, Homo sapien
aatgtattgcctagttttaacctgg

SEQ ID NO: 1220581 - DNA, 25 bp, Homo sapien
gggctgatacttcttaatgtattgc

SEQ ID NO: 1220582 - DNA, 25 bp, Homo sapien
aatcctttctgccatacagcaaata

SEQ ID NO: 1220583 - DNA, 25 bp, Homo sapien
tgccatacagcaaataacatatggg

SEQ ID NO: 1220584 - DNA, 25 bp, Homo sapien
atttcacagaagttctggaaacata

SEQ ID NO: 1220585 - DNA, 25 bp, Homo sapien
aatttcacagaagttctggaaacat

SEQ ID NO: 1220586 - DNA, 25 bp, Homo sapien
tatgagtggcagagtctaggtcaca

SEQ ID NO: 1220587 - DNA, 25 bp, Homo sapien
tcctgccatatctaccagtgagacg

SEQ ID NO: 1220588 - DNA, 25 bp, Homo sapien
tgagaaacctgatgcccaaaataat

SEQ ID NO: 1220589 - DNA, 25 bp, Homo sapien
gagatcacttggtctaatcctctga

SEQ ID NO: 1220590 - DNA, 25 bp, Homo sapien
agaggagtggcacgtggcacaccag

SEQ ID NO: 1220591 - DNA, 25 bp, Homo sapien
cacaccagcagggtgaacaggatgt

SEQ ID NO: 1220592 - DNA, 25 bp, Homo sapien
aggagtggcacgtggcacaccagca

SEQ ID NO: 1220593 - DNA, 25 bp, Homo sapien
ccagcagggtgaacaggatgtccat

SEQ ID NO: 1220594 - DNA, 25 bp, Homo sapien
tactctgaagattatacttggtggc

SEQ ID NO: 1220595 - DNA, 25 bp, Homo sapien
tatatctagttgcaatactctgaag

SEQ ID NO: 1220596 - DNA, 25 bp, Homo sapien
gtaccatggacagttccaccactca

SEQ ID NO: 1220597 - DNA, 25 bp, Homo sapien
cagaaggccaaaaattatatctagt

SEQ ID NO: 1220598 - DNA, 25 bp, Homo sapien
catattgggttgctaaagactccgt

SEQ ID NO: 1220599 - DNA, 25 bp, Homo sapien
ttgggttgctaaagactccgtatcc

SEQ ID NO: 1220600 - DNA, 25 bp, Homo sapien
ttgctaaagactccgtatcccagaa

SEQ ID NO: 1220601 - DNA, 25 bp, Homo sapien
tctttctctgagatatctgagtcac

SEQ ID NO: 1220602 - DNA, 25 bp, Homo sapien
cattttatttgtgaccagacttcag

SEQ ID NO: 1220603 - DNA, 25 bp, Homo sapien
aatagtaaagactctgtatcccaga

SEQ ID NO: 1220604 - DNA, 25 bp, Homo sapien
cattatactgtagtacctaatacac

SEQ ID NO: 1220605 - DNA, 25 bp, Homo sapien
ctgctcacatatattgagttgctaa

SEQ ID NO: 1220606 - DNA, 25 bp, Homo sapien
gagccatgttcaagagactgacatg

SEQ ID NO: 1220607 - DNA, 25 bp, Homo sapien
ctgagccatgttcaagagactgaca

SEQ ID NO: 1220608 - DNA, 25 bp, Homo sapien
aactgagccatgttcaagagactga

SEQ ID NO: 1220609 - DNA, 25 bp, Homo sapien
actgagccatgttcaagagactgac

SEQ ID NO: 1220610 - DNA, 25 bp, Homo sapien
gtggcattataaagcaggccaataa

SEQ ID NO: 1220611 - DNA, 25 bp, Homo sapien
gatagtcttccagttgtggcattat

SEQ ID NO: 1220612 - DNA, 25 bp, Homo sapien
gaagtggctgccttttatcacttct

SEQ ID NO: 1220613 - DNA, 25 bp, Homo sapien
ttatcacttctgctgatagtcttcc

SEQ ID NO: 1220614 - DNA, 25 bp, Homo sapien
tcaaatttttctacttcccaaatga

SEQ ID NO: 1220615 - DNA, 25 bp, Homo sapien
ggattatataaacctgtccacctat

SEQ ID NO: 1220616 - DNA, 25 bp, Homo sapien
ctcggattatataaacctgtccacc

SEQ ID NO: 1220617 - DNA, 25 bp, Homo sapien
gattatataaacctgtccacctatc

SEQ ID NO: 1220618 - DNA, 25 bp, Homo sapien
cggattatataaacctgtccaccta

SEQ ID NO: 1220619 - DNA, 25 bp, Homo sapien
ttatatactggatttggctgccctc

SEQ ID NO: 1220620 - DNA, 25 bp, Homo sapien
tgccctctgcggatggatgtcttgc

SEQ ID NO: 1220621 - DNA, 25 bp, Homo sapien
gaaatagggccacttgaaagacaaa

SEQ ID NO: 1220622 - DNA, 25 bp, Homo sapien
cacagacagtatgagtgtcacatca

SEQ ID NO: 1220623 - DNA, 25 bp, Homo sapien
tctgaaaaagccagggcacctttgc

SEQ ID NO: 1220624 - DNA, 25 bp, Homo sapien
cataattccaggtttagaggctccc

SEQ ID NO: 1220625 - DNA, 25 bp, Homo sapien
catacattttgtttactgggcagca

SEQ ID NO: 1220626 - DNA, 25 bp, Homo sapien
cttgcaagggaccagtacagtgact

SEQ ID NO: 1220627 - DNA, 25 bp, Homo sapien
tatgagtgagatatgggctagacac

SEQ ID NO: 1220628 - DNA, 25 bp, Homo sapien
tagagtaatttacacctgggttcca

SEQ ID NO: 1220629 - DNA, 25 bp, Homo sapien
cctaaaagtggtcaaggagcagaac

SEQ ID NO: 1220630 - DNA, 25 bp, Homo sapien
gacacaggttatgcccttcatagag

SEQ ID NO: 1220631 - DNA, 25 bp, Homo sapien
tgccaaacctttgttagacgaataa

SEQ ID NO: 1220632 - DNA, 25 bp, Homo sapien
taggatacttcacactattcaaggt

SEQ ID NO: 1220633 - DNA, 25 bp, Homo sapien
cctatggtccagtacaggtgattaa

SEQ ID NO: 1220634 - DNA, 25 bp, Homo sapien
tgtacaactattgccaccacagtga

SEQ ID NO: 1220635 - DNA, 25 bp, Homo sapien
gttacagcaacatgtgaaattttaa

SEQ ID NO: 1220636 - DNA, 25 bp, Homo sapien
ggttacagcaacatgtgaaatttta

SEQ ID NO: 1220637 - DNA, 25 bp, Homo sapien
tgataagagttttgctcacggagca

SEQ ID NO: 1220638 - DNA, 25 bp, Homo sapien
caagagtattgatcagtgaggaacc

SEQ ID NO: 1220639 - DNA, 25 bp, Homo sapien
gagtaggtcccaacatttatcaaga

SEQ ID NO: 1220640 - DNA, 25 bp, Homo sapien
cagatgtttacccattccatgtgag

SEQ ID NO: 1220641 - DNA, 25 bp, Homo sapien
taaaacctcctagaaattggacatc

SEQ ID NO: 1220642 - DNA, 25 bp, Homo sapien
ggccatgcctaatctcaaggcaaga

SEQ ID NO: 1220643 - DNA, 25 bp, Homo sapien
catgggttctggtgaagaattggca

SEQ ID NO: 1220644 - DNA, 25 bp, Homo sapien
gacattagaaatagtaagctagcca

SEQ ID NO: 1220645 - DNA, 25 bp, Homo sapien
caaaatacggctacaggtttccagg

SEQ ID NO: 1220646 - DNA, 25 bp, Homo sapien
taatacttgggaatccagaagcagc

SEQ ID NO: 1220647 - DNA, 25 bp, Homo sapien
tatacaggcaactggttatccgtgc

SEQ ID NO: 1220648 - DNA, 25 bp, Homo sapien
tacactttcggtagttgcactgacc

SEQ ID NO: 1220649 - DNA, 25 bp, Homo sapien
ttattctcagtgatcccctgctctg

SEQ ID NO: 1220650 - DNA, 25 bp, Homo sapien
aggatgaaagttggcctggagttcc

SEQ ID NO: 1220651 - DNA, 25 bp, Homo sapien
tgaggagtccgaagactgttacatg

SEQ ID NO: 1220652 - DNA, 25 bp, Homo sapien
aggccacacaactttcatagcttgc

SEQ ID NO: 1220653 - DNA, 25 bp, Homo sapien
tctggatattctgatgagaattaac

SEQ ID NO: 1220654 - DNA, 25 bp, Homo sapien
gatattctgatgagaattaactgag

SEQ ID NO: 1220655 - DNA, 25 bp, Homo sapien
gaattaactgagctcaaggttgtgc

SEQ ID NO: 1220656 - DNA, 25 bp, Homo sapien
tgagctcaaggttgtgctgacacct

SEQ ID NO: 1220657 - DNA, 25 bp, Homo sapien
cagtaataggatcagcaaagcaacc

SEQ ID NO: 1220658 - DNA, 25 bp, Homo sapien
agtaataggatcagcaaagcaacca

SEQ ID NO: 1220659 - DNA, 25 bp, Homo sapien
ttacagtaataggatcagcaaagca

SEQ ID NO: 1220660 - DNA, 25 bp, Homo sapien
cctttacagtaataggatcagcaaa

SEQ ID NO: 1220661 - DNA, 25 bp, Homo sapien
ttgagattcaatacccaactgttga

SEQ ID NO: 1220662 - DNA, 25 bp, Homo sapien
aatcctaagcttaatgttttttgag

SEQ ID NO: 1220663 - DNA, 25 bp, Homo sapien
gattcaatacccaactgttgacaac

SEQ ID NO: 1220664 - DNA, 25 bp, Homo sapien
gaacctgtgtctacaagtacaagag

SEQ ID NO: 1220665 - DNA, 25 bp, Homo sapien
tgccatttccccgtggatttccgag

SEQ ID NO: 1220666 - DNA, 25 bp, Homo sapien
tgtgaaacccgtcaatcctgtttgc

SEQ ID NO: 1220667 - DNA, 25 bp, Homo sapien
agggaacatgacaagcgcgcccgct

SEQ ID NO: 1220668 - DNA, 25 bp, Homo sapien
ctagcgaggagcgtgtgaaacccgt

SEQ ID NO: 1220669 - DNA, 25 bp, Homo sapien
gcgccgccgtcgctgcagacggtta

SEQ ID NO: 1220670 - DNA, 25 bp, Homo sapien
tcggcggtgactgcgggtgcgcggc

SEQ ID NO: 1220671 - DNA, 25 bp, Homo sapien
agctgctgctggtccgctctgggct

SEQ ID NO: 1220672 - DNA, 25 bp, Homo sapien
acggttatggtaatgagcggctctg

SEQ ID NO: 1220673 - DNA, 25 bp, Homo sapien
ccacagctgggcactcggaaagttg

SEQ ID NO: 1220674 - DNA, 25 bp, Homo sapien
ttgccggccaaacccgctggaagcc

SEQ ID NO: 1220675 - DNA, 25 bp, Homo sapien
tggaagcccgcggttgcgggagcgc

SEQ ID NO: 1220676 - DNA, 25 bp, Homo sapien
aggacgcctattccctgcttctgcg

SEQ ID NO: 1220677 - DNA, 25 bp, Homo sapien
tgtctttctacggtgccgcagccgt

SEQ ID NO: 1220678 - DNA, 25 bp, Homo sapien
ctggatgggcggaacaaaattcttc

SEQ ID NO: 1220679 - DNA, 25 bp, Homo sapien
tcaatagcttgtccggctcctggtg

SEQ ID NO: 1220680 - DNA, 25 bp, Homo sapien
cccgatcgatgctgccagttttaaa

SEQ ID NO: 1220681 - DNA, 25 bp, Homo sapien
gccagttcctctacaacatgctggg

SEQ ID NO: 1220682 - DNA, 25 bp, Homo sapien
tgaggttcagtctgttccgctgccc

SEQ ID NO: 1220683 - DNA, 25 bp, Homo sapien
cgtaattccaactgatgctctgagg

SEQ ID NO: 1220684 - DNA, 25 bp, Homo sapien
cctgatcggcctgaactggatctgc

SEQ ID NO: 1220685 - DNA, 25 bp, Homo sapien
cggtctccctgcaaaggagcttgtg

SEQ ID NO: 1220686 - DNA, 25 bp, Homo sapien
tctattcatggacagaaccagagtc

SEQ ID NO: 1220687 - DNA, 25 bp, Homo sapien
acaatgggctcgcagaatctattca

SEQ ID NO: 1220688 - DNA, 25 bp, Homo sapien
gcctcccatagtgtttggtacccag

SEQ ID NO: 1220689 - DNA, 25 bp, Homo sapien
gtgggggggatgggcgcaggtcaag

SEQ ID NO: 1220690 - DNA, 25 bp, Homo sapien
gatgggcgcaggtcaagggcaatac

SEQ ID NO: 1220691 - DNA, 25 bp, Homo sapien
gggatgggcgcaggtcaagggcaat

SEQ ID NO: 1220692 - DNA, 25 bp, Homo sapien
gggggatgggcgcaggtcaagggca

SEQ ID NO: 1220693 - DNA, 25 bp, Homo sapien
tgttgttataggatttgaaattccc

SEQ ID NO: 1220694 - DNA, 25 bp, Homo sapien
cctcttaaagtatgtgatcttggat

SEQ ID NO: 1220695 - DNA, 25 bp, Homo sapien
gatgttgttataggatttgaaattc

SEQ ID NO: 1220696 - DNA, 25 bp, Homo sapien
cttggatgttgttataggatttgaa

SEQ ID NO: 1220697 - DNA, 25 bp, Homo sapien
catataaaggatgtgggctcgttcc

SEQ ID NO: 1220698 - DNA, 25 bp, Homo sapien
ggatgtgggctcgttcctcaaaaat

SEQ ID NO: 1220699 - DNA, 25 bp, Homo sapien
gggctcgttcctcaaaaattgagat

SEQ ID NO: 1220700 - DNA, 25 bp, Homo sapien
ctaaggacatataaaggatgtgggc

SEQ ID NO: 1220701 - DNA, 25 bp, Homo sapien
cagatcttcggaggtacacttcagg

SEQ ID NO: 1220702 - DNA, 25 bp, Homo sapien
cagttattctgcatgataatttctc

SEQ ID NO: 1220703 - DNA, 25 bp, Homo sapien
gtttataaggacagatcttcggagg

SEQ ID NO: 1220704 - DNA, 25 bp, Homo sapien
tcaggatcatcgataaactttagct

SEQ ID NO: 1220705 - DNA, 25 bp, Homo sapien
taagggcagtcttgagccataaacc

SEQ ID NO: 1220706 - DNA, 25 bp, Homo sapien
gtaaatttaggtagtggccaccaca

SEQ ID NO: 1220707 - DNA, 25 bp, Homo sapien
cagaggtgccattgaaagagcaggc

SEQ ID NO: 1220708 - DNA, 25 bp, Homo sapien
taaaccactcttgggcagaggtgcc

SEQ ID NO: 1220709 - DNA, 25 bp, Homo sapien
aagaagaggcggagggagaggaggc

SEQ ID NO: 1220710 - DNA, 25 bp, Homo sapien
ggagaggaggcagcagtggaggcac

SEQ ID NO: 1220711 - DNA, 25 bp, Homo sapien
agatgaggaggaagaagaggcggag

SEQ ID NO: 1220712 - DNA, 25 bp, Homo sapien
aggaagaagaggcggagggagagga

SEQ ID NO: 1220713 - DNA, 25 bp, Homo sapien
ggtatctggccatcactcttgtaaa

SEQ ID NO: 1220714 - DNA, 25 bp, Homo sapien
tcaaaagcaaggtcatttcccacag

SEQ ID NO: 1220715 - DNA, 25 bp, Homo sapien
cagtttgttacttggtggtgaagcc

SEQ ID NO: 1220716 - DNA, 25 bp, Homo sapien
ccaagtgatctgacattagtgacaa

SEQ ID NO: 1220717 - DNA, 25 bp, Homo sapien
tgattgccgcccctagacaggtgtg

SEQ ID NO: 1220718 - DNA, 25 bp, Homo sapien
gccagaaacttgcagggaataccct

SEQ ID NO: 1220719 - DNA, 25 bp, Homo sapien
ccatagaaaagctcgagcagcccgt

SEQ ID NO: 1220720 - DNA, 25 bp, Homo sapien
ttataagaagctcgctgatgcctgc

SEQ ID NO: 1220721 - DNA, 25 bp, Homo sapien
gcttccaggcgcgtagataccagtg

SEQ ID NO: 1220722 - DNA, 25 bp, Homo sapien
ttctaccgaacaggtgcaggcgctc

SEQ ID NO: 1220723 - DNA, 25 bp, Homo sapien
taataaaaggtcacgccaaagatgc

SEQ ID NO: 1220724 - DNA, 25 bp, Homo sapien
tactatgaagggtgtcctggccact

SEQ ID NO: 1220725 - DNA, 25 bp, Homo sapien
acagaaaggaagtcaccaagtggag

SEQ ID NO: 1220726 - DNA, 25 bp, Homo sapien
ctgatacacagaaaggaagtcacca

SEQ ID NO: 1220727 - DNA, 25 bp, Homo sapien
tacacagaaaggaagtcaccaagtg

SEQ ID NO: 1220728 - DNA, 25 bp, Homo sapien
gatacacagaaaggaagtcaccaag

SEQ ID NO: 1220729 - DNA, 25 bp, Homo sapien
atgtctcttaatggtcatgtcttct

SEQ ID NO: 1220730 - DNA, 25 bp, Homo sapien
ggaatccttgtatccttgtcttata

SEQ ID NO: 1220731 - DNA, 25 bp, Homo sapien
tatttgttgcgaagttgatgtctct

SEQ ID NO: 1220732 - DNA, 25 bp, Homo sapien
taaaaacctagctgcatcacatagg

SEQ ID NO: 1220733 - DNA, 25 bp, Homo sapien
cattactaatgccatgctgaatgct

SEQ ID NO: 1220734 - DNA, 25 bp, Homo sapien
tgcacctagtttaaaccatcattac

SEQ ID NO: 1220735 - DNA, 25 bp, Homo sapien
gcagggatgtgataaccttaactac

SEQ ID NO: 1220736 - DNA, 25 bp, Homo sapien
gaatcactataaaccatacattgtc

SEQ ID NO: 1220737 - DNA, 25 bp, Homo sapien
tcccttcgtttagtcatcgttcttc

SEQ ID NO: 1220738 - DNA, 25 bp, Homo sapien
ttcgtttagtcatcgttcttcagcc

SEQ ID NO: 1220739 - DNA, 25 bp, Homo sapien
gtttagtcatcgttcttcagcctgt

SEQ ID NO: 1220740 - DNA, 25 bp, Homo sapien
gtcatcgttcttcagcctgtcacag

SEQ ID NO: 1220741 - DNA, 25 bp, Homo sapien
agaatcatatgcctgatgcctggac

SEQ ID NO: 1220742 - DNA, 25 bp, Homo sapien
cctgatgcctggactcagctgcttc

SEQ ID NO: 1220743 - DNA, 25 bp, Homo sapien
ggactcagctgcttccatggaaaga

SEQ ID NO: 1220744 - DNA, 25 bp, Homo sapien
gaggcagtggagaatcatatgcctg

SEQ ID NO: 1220745 - DNA, 25 bp, Homo sapien
tcccataaacctcgagcaaataagg

SEQ ID NO: 1220746 - DNA, 25 bp, Homo sapien
gattcattccagtcgctagggctgc

SEQ ID NO: 1220747 - DNA, 25 bp, Homo sapien
gagccgtgaggatgaaagagaagca

SEQ ID NO: 1220748 - DNA, 25 bp, Homo sapien
tcctccgcggctcgagagccgtgag

SEQ ID NO: 1220749 - DNA, 25 bp, Homo sapien
ggtgctgagcagcccaataagcagc

SEQ ID NO: 1220750 - DNA, 25 bp, Homo sapien
gctgagcagcccaataagcagcctt

SEQ ID NO: 1220751 - DNA, 25 bp, Homo sapien
acagcgcagtctggccgggtgctga

SEQ ID NO: 1220752 - DNA, 25 bp, Homo sapien
cctcgccgtcccagcacagcgcagt

SEQ ID NO: 1220753 - DNA, 25 bp, Homo sapien
gctgcctgcacaatgagcgcccgga

SEQ ID NO: 1220754 - DNA, 25 bp, Homo sapien
cgctcgctccggctctttgttatgc

SEQ ID NO: 1220755 - DNA, 25 bp, Homo sapien
acagccgctgacagcgcggctcctc

SEQ ID NO: 1220756 - DNA, 25 bp, Homo sapien
cgctccggctctttgttatgctaat

SEQ ID NO: 1220757 - DNA, 25 bp, Homo sapien
acccactgcattctccgggcgagtc

SEQ ID NO: 1220758 - DNA, 25 bp, Homo sapien
ccacacccactgcattctccgggcg

SEQ ID NO: 1220759 - DNA, 25 bp, Homo sapien
ccactgcattctccgggcgagtcct

SEQ ID NO: 1220760 - DNA, 25 bp, Homo sapien
cacgctgtcccggacacacccacac

SEQ ID NO: 1220761 - DNA, 25 bp, Homo sapien
tccacgcggacgtctgaagaaacat

SEQ ID NO: 1220762 - DNA, 25 bp, Homo sapien
gtgattgaagaaccaccgcggtctc

SEQ ID NO: 1220763 - DNA, 25 bp, Homo sapien
tcagcagagtccaattcatcgcgag

SEQ ID NO: 1220764 - DNA, 25 bp, Homo sapien
acggttacacgcacgcttggacaca

SEQ ID NO: 1220765 - DNA, 25 bp, Homo sapien
ctcaaccagtgaaggcgaaggataa

SEQ ID NO: 1220766 - DNA, 25 bp, Homo sapien
cagtgaaggcgaaggataagcttcc

SEQ ID NO: 1220767 - DNA, 25 bp, Homo sapien
cggtctccttggcgctcgctggcgt

SEQ ID NO: 1220768 - DNA, 25 bp, Homo sapien
cttggcgctcgctggcgtccagggt

SEQ ID NO: 1220769 - DNA, 25 bp, Homo sapien
tgaggttgcccagtcggtagcctaa

SEQ ID NO: 1220770 - DNA, 25 bp, Homo sapien
gctttgtgaccctttgtgacactca

SEQ ID NO: 1220771 - DNA, 25 bp, Homo sapien
ggtagcctaagacccagcgctagtg

SEQ ID NO: 1220772 - DNA, 25 bp, Homo sapien
cactcaactgagcttcgtttcacga

SEQ ID NO: 1220773 - DNA, 25 bp, Homo sapien
ggtcttggcagcacttgaaaagcag

SEQ ID NO: 1220774 - DNA, 25 bp, Homo sapien
tgacgtcgtctaggccgtatctacc

SEQ ID NO: 1220775 - DNA, 25 bp, Homo sapien
gacgccccgggcaatttctagtgac

SEQ ID NO: 1220776 - DNA, 25 bp, Homo sapien
ggtcaggagtcttgctacaccctaa

SEQ ID NO: 1220777 - DNA, 25 bp, Homo sapien
gatggcgaacggcttgtgctgtcac

SEQ ID NO: 1220778 - DNA, 25 bp, Homo sapien
gctgttgaggagactcggagactct

SEQ ID NO: 1220779 - DNA, 25 bp, Homo sapien
tgaggcaagagactcctgtcgcgaa

SEQ ID NO: 1220780 - DNA, 25 bp, Homo sapien
tctgggctcccgctaggagcaagca

SEQ ID NO: 1220781 - DNA, 25 bp, Homo sapien
aatgtccccggtaagtaagcactga

SEQ ID NO: 1220782 - DNA, 25 bp, Homo sapien
acaggtttgcctgttaaagggtctg

SEQ ID NO: 1220783 - DNA, 25 bp, Homo sapien
atctcccctgctgtgagaagggtgg

SEQ ID NO: 1220784 - DNA, 25 bp, Homo sapien
ttggagcctgcactcgtggaaaccc

SEQ ID NO: 1220785 - DNA, 25 bp, Homo sapien
catttattgagaatgaacacagttg

SEQ ID NO: 1220786 - DNA, 25 bp, Homo sapien
agaaactcaaactgggtagtgctca

SEQ ID NO: 1220787 - DNA, 25 bp, Homo sapien
gaacctacgagaattctgaactctt

SEQ ID NO: 1220788 - DNA, 25 bp, Homo sapien
ccccagaaactcaaactgggtagtg

SEQ ID NO: 1220789 - DNA, 25 bp, Homo sapien
ataaaccactatcccatggacccga

SEQ ID NO: 1220790 - DNA, 25 bp, Homo sapien
aaccactatcccatggacccgaggg

SEQ ID NO: 1220791 - DNA, 25 bp, Homo sapien
agagccccttcctaggatttggaag

SEQ ID NO: 1220792 - DNA, 25 bp, Homo sapien
catggacccgagggtagagcccctt

SEQ ID NO: 1220793 - DNA, 25 bp, Homo sapien
tacaaaatcactgcagacctcgaac

SEQ ID NO: 1220794 - DNA, 25 bp, Homo sapien
aatgcgtctcgtctacaccatgcac

SEQ ID NO: 1220795 - DNA, 25 bp, Homo sapien
tcccggcaaagcacaaacaaccatg

SEQ ID NO: 1220796 - DNA, 25 bp, Homo sapien
caagttcaggagtcagcacttctca

SEQ ID NO: 1220797 - DNA, 25 bp, Homo sapien
catttcaaagatgggtgttatggca

SEQ ID NO: 1220798 - DNA, 25 bp, Homo sapien
gaaacagagggttgcctcccaagag

SEQ ID NO: 1220799 - DNA, 25 bp, Homo sapien
cattattacacgtccacaccatggc

SEQ ID NO: 1220800 - DNA, 25 bp, Homo sapien
caaagcaccaagcaaatagctgtgt

SEQ ID NO: 1220801 - DNA, 25 bp, Homo sapien
gggagaaggcactaaaatagctgta

SEQ ID NO: 1220802 - DNA, 25 bp, Homo sapien
tgcaagcaacgggtttgaaaatggc

SEQ ID NO: 1220803 - DNA, 25 bp, Homo sapien
tgtaacacatccattgacagttctg

SEQ ID NO: 1220804 - DNA, 25 bp, Homo sapien
catgaagccaaacaaatgcgcaatt

SEQ ID NO: 1220805 - DNA, 25 bp, Homo sapien
ccagtgaacttgagctgtgtgacct

SEQ ID NO: 1220806 - DNA, 25 bp, Homo sapien
aggaaaatctgaaccctgggctgag

SEQ ID NO: 1220807 - DNA, 25 bp, Homo sapien
gagtctggaaaggtacgtctgttgc

SEQ ID NO: 1220808 - DNA, 25 bp, Homo sapien
tgtacttaagacaatccgggcgctg

SEQ ID NO: 1220809 - DNA, 25 bp, Homo sapien
ctcggccagatgcgaatttgtggct

SEQ ID NO: 1220810 - DNA, 25 bp, Homo sapien
gcctcggccagatgcgaatttgtgg

SEQ ID NO: 1220811 - DNA, 25 bp, Homo sapien
tctgcctcggccagatgcgaatttg

SEQ ID NO: 1220812 - DNA, 25 bp, Homo sapien
tgcctcggccagatgcgaatttgtg

SEQ ID NO: 1220813 - DNA, 25 bp, Homo sapien
aggagggcatccgagcctctggcag

SEQ ID NO: 1220814 - DNA, 25 bp, Homo sapien
gagggcatccgagcctctggcagct

SEQ ID NO: 1220815 - DNA, 25 bp, Homo sapien
ggagggcatccgagcctctggcagc

SEQ ID NO: 1220816 - DNA, 25 bp, Homo sapien
gaagcacagtcctgacagatcctgc

SEQ ID NO: 1220817 - DNA, 25 bp, Homo sapien
gtggctcctcacacgtcatagacat

SEQ ID NO: 1220818 - DNA, 25 bp, Homo sapien
gagggctacaacagcaaccccatgt

SEQ ID NO: 1220819 - DNA, 25 bp, Homo sapien
agacctgacgtacgggaagcacagt

SEQ ID NO: 1220820 - DNA, 25 bp, Homo sapien
gaggctctctgcgttgaaaagtacc

SEQ ID NO: 1220821 - DNA, 25 bp, Homo sapien
gaaaagctaatatcatgcaggagag

SEQ ID NO: 1220822 - DNA, 25 bp, Homo sapien
tctctgcgttgaaaagtaccccgga

SEQ ID NO: 1220823 - DNA, 25 bp, Homo sapien
tctctcatgtccaatctctgaggct

SEQ ID NO: 1220824 - DNA, 25 bp, Homo sapien
cacatgaatctctgccagcgttggc

SEQ ID NO: 1220825 - DNA, 25 bp, Homo sapien
agtagcagagcctaactgggcgagc

SEQ ID NO: 1220826 - DNA, 25 bp, Homo sapien
cagcgttggcatctaacagcaccat

SEQ ID NO: 1220827 - DNA, 25 bp, Homo sapien
gctgtacagtaaacacatgaatctc

SEQ ID NO: 1220828 - DNA, 25 bp, Homo sapien
cctgattccacatcgatatcttgaa

SEQ ID NO: 1220829 - DNA, 25 bp, Homo sapien
tatacttcttggtagaccaccacca

SEQ ID NO: 1220830 - DNA, 25 bp, Homo sapien
catcgatatcttgaaaatgtgcttt

SEQ ID NO: 1220831 - DNA, 25 bp, Homo sapien
tgcttttactgagaaaccaagatca

SEQ ID NO: 1220832 - DNA, 25 bp, Homo sapien
aactgccgcctgtttccaagcaggc

SEQ ID NO: 1220833 - DNA, 25 bp, Homo sapien
tccaagggacgtggcataactgccg

SEQ ID NO: 1220834 - DNA, 25 bp, Homo sapien
caaagttgtccagaagagtctgatc

SEQ ID NO: 1220835 - DNA, 25 bp, Homo sapien
tgagttcttggcagcaacggtgctc

SEQ ID NO: 1220836 - DNA, 25 bp, Homo sapien
ggctttgcacaagactctgcacttt

SEQ ID NO: 1220837 - DNA, 25 bp, Homo sapien
tatgatttgcttcacaggctttgca

SEQ ID NO: 1220838 - DNA, 25 bp, Homo sapien
tcgaggtgccggctctatgatttgc

SEQ ID NO: 1220839 - DNA, 25 bp, Homo sapien
ggctttcatttgtgattcttgtaca

SEQ ID NO: 1220840 - DNA, 25 bp, Homo sapien
ctccgatgtaagaaaatgtctctgc

SEQ ID NO: 1220841 - DNA, 25 bp, Homo sapien
gatgtaagaaaatgtctctgctcac

SEQ ID NO: 1220842 - DNA, 25 bp, Homo sapien
tccgatgtaagaaaatgtctctgct

SEQ ID NO: 1220843 - DNA, 25 bp, Homo sapien
cgatgtaagaaaatgtctctgctca

SEQ ID NO: 1220844 - DNA, 25 bp, Homo sapien
cccagtaaacgtcagttcccactag

SEQ ID NO: 1220845 - DNA, 25 bp, Homo sapien
gtaaacgtcagttcccactagtgct

SEQ ID NO: 1220846 - DNA, 25 bp, Homo sapien
taaacgtcagttcccactagtgctc

SEQ ID NO: 1220847 - DNA, 25 bp, Homo sapien
cagtaaacgtcagttcccactagtg

SEQ ID NO: 1220848 - DNA, 25 bp, Homo sapien
tactatctgtgtacagaaccaattt

SEQ ID NO: 1220849 - DNA, 25 bp, Homo sapien
gcaaacatactatctgtgtacagaa

SEQ ID NO: 1220850 - DNA, 25 bp, Homo sapien
taccatttatagcaaacatactatc

SEQ ID NO: 1220851 - DNA, 25 bp, Homo sapien
tatagcaaacatactatctgtgtac

SEQ ID NO: 1220852 - DNA, 25 bp, Homo sapien
ttccctgtacttgtcttccacctgt

SEQ ID NO: 1220853 - DNA, 25 bp, Homo sapien
gtcttccacctgttcttcttcctac

SEQ ID NO: 1220854 - DNA, 25 bp, Homo sapien
ttgtcttccacctgttcttcttcct

SEQ ID NO: 1220855 - DNA, 25 bp, Homo sapien
tgtacttgtcttccacctgttcttc

SEQ ID NO: 1220856 - DNA, 25 bp, Homo sapien
agtgccacaaagtcctttttgttca

SEQ ID NO: 1220857 - DNA, 25 bp, Homo sapien
cttctccagtgccacaaagtccttt

SEQ ID NO: 1220858 - DNA, 25 bp, Homo sapien
gccttgactgagcttctccagtgcc

SEQ ID NO: 1220859 - DNA, 25 bp, Homo sapien
ccttgactgagcttctccagtgcca

SEQ ID NO: 1220860 - DNA, 25 bp, Homo sapien
cttcttcattgccaatacaccctgg

SEQ ID NO: 1220861 - DNA, 25 bp, Homo sapien
gaatgtttagctcctcttgctaatc

SEQ ID NO: 1220862 - DNA, 25 bp, Homo sapien
tcttcattgccaatacaccctggat

SEQ ID NO: 1220863 - DNA, 25 bp, Homo sapien
agcttcttcattgccaatacaccct

SEQ ID NO: 1220864 - DNA, 25 bp, Homo sapien
accgactcaacatcagccactattt

SEQ ID NO: 1220865 - DNA, 25 bp, Homo sapien
ttctaccaccgactcaacatcagcc

SEQ ID NO: 1220866 - DNA, 25 bp, Homo sapien
taccaccgactcaacatcagccact

SEQ ID NO: 1220867 - DNA, 25 bp, Homo sapien
cttctaccaccgactcaacatcagc

SEQ ID NO: 1220868 - DNA, 25 bp, Homo sapien
ggtgaagagacaccactaggtggct

SEQ ID NO: 1220869 - DNA, 25 bp, Homo sapien
gcggtcccagatgccttgagaagtg

SEQ ID NO: 1220870 - DNA, 25 bp, Homo sapien
ttcaaagtatctcagtgcctcccag

SEQ ID NO: 1220871 - DNA, 25 bp, Homo sapien
ggtggctgcacaagaccttgtttgt

SEQ ID NO: 1220872 - DNA, 25 bp, Homo sapien
ctacaagcaaagccaaggagagtcc

SEQ ID NO: 1220873 - DNA, 25 bp, Homo sapien
acaagcaaagccaaggagagtcctc

SEQ ID NO: 1220874 - DNA, 25 bp, Homo sapien
tacaagcaaagccaaggagagtcct

SEQ ID NO: 1220875 - DNA, 25 bp, Homo sapien
caagcaaagccaaggagagtcctcc

SEQ ID NO: 1220876 - DNA, 25 bp, Homo sapien
tggatcttcccgacttggagccgga

SEQ ID NO: 1220877 - DNA, 25 bp, Homo sapien
gtgtctgaacgttgaggatctctgc

SEQ ID NO: 1220878 - DNA, 25 bp, Homo sapien
taatgcttcacacaccggcagaagt

SEQ ID NO: 1220879 - DNA, 25 bp, Homo sapien
catgccttggcttgaaacgcttcag

SEQ ID NO: 1220880 - DNA, 25 bp, Homo sapien
ctctcattaaaacctcgggcttctg

SEQ ID NO: 1220881 - DNA, 25 bp, Homo sapien
ggctctcattaaaacctcgggcttc

SEQ ID NO: 1220882 - DNA, 25 bp, Homo sapien
gtggctctcattaaaacctcgggct

SEQ ID NO: 1220883 - DNA, 25 bp, Homo sapien
tctcattaaaacctcgggcttctgg

SEQ ID NO: 1220884 - DNA, 25 bp, Homo sapien
cctgaaactcgaggtgggccgtcat

SEQ ID NO: 1220885 - DNA, 25 bp, Homo sapien
agtggaagtcacctgaaactcgagg

SEQ ID NO: 1220886 - DNA, 25 bp, Homo sapien
caagttaattgcagagtggaagtca

SEQ ID NO: 1220887 - DNA, 25 bp, Homo sapien
tcgaggtgggccgtcattccaacac

SEQ ID NO: 1220888 - DNA, 25 bp, Homo sapien
ccccacccgtgtgttcattgcaggt

SEQ ID NO: 1220889 - DNA, 25 bp, Homo sapien
cccgtgtgttcattgcaggtctggg

SEQ ID NO: 1220890 - DNA, 25 bp, Homo sapien
gtgcatatctctcccccacccgtgt

SEQ ID NO: 1220891 - DNA, 25 bp, Homo sapien
cacccgtgtgttcattgcaggtctg

SEQ ID NO: 1220892 - DNA, 25 bp, Homo sapien
ccctcggctgttggttcccactgac

SEQ ID NO: 1220893 - DNA, 25 bp, Homo sapien
cagcgcgcgtcctccgagcacgccc

SEQ ID NO: 1220894 - DNA, 25 bp, Homo sapien
ttccgagtcccagcgacatcggcgg

SEQ ID NO: 1220895 - DNA, 25 bp, Homo sapien
cggcggcgacggcaacgttcacgcg

SEQ ID NO: 1220896 - DNA, 25 bp, Homo sapien
tctttcggcacttccgagtcccagc

SEQ ID NO: 1220897 - DNA, 25 bp, Homo sapien
gcgccgcgagttcccaacacccctc

SEQ ID NO: 1220898 - DNA, 25 bp, Homo sapien
gtgcgcggacttgtcccggcgccta

SEQ ID NO: 1220899 - DNA, 25 bp, Homo sapien
cagggccgtgcgcggacttgtcccg

SEQ ID NO: 1220900 - DNA, 25 bp, Homo sapien
gcgcggacttgtcccggcgcctaga

SEQ ID NO: 1220901 - DNA, 25 bp, Homo sapien
ggccgtgcgcggacttgtcccggcg

SEQ ID NO: 1220902 - DNA, 25 bp, Homo sapien
cgccgatactgccaagaggaccaga

SEQ ID NO: 1220903 - DNA, 25 bp, Homo sapien
gccgatactgccaagaggaccagag

SEQ ID NO: 1220904 - DNA, 25 bp, Homo sapien
cagagttcgcaactccccgcagcag

SEQ ID NO: 1220905 - DNA, 25 bp, Homo sapien
aagaggaccagagttcgcaactccc

SEQ ID NO: 1220906 - DNA, 25 bp, Homo sapien
catttcttaacaccaatgctacccg

SEQ ID NO: 1220907 - DNA, 25 bp, Homo sapien
tacctctggtgaggattagcgggag

SEQ ID NO: 1220908 - DNA, 25 bp, Homo sapien
tccaagagcaatgtacacaggtagc

SEQ ID NO: 1220909 - DNA, 25 bp, Homo sapien
tgctacccgtaaagtacctctggtg

SEQ ID NO: 1220910 - DNA, 25 bp, Homo sapien
caatgccaggctagttttttattgt

SEQ ID NO: 1220911 - DNA, 25 bp, Homo sapien
atgccaggctagttttttattgttg

SEQ ID NO: 1220912 - DNA, 25 bp, Homo sapien
cacaatgccaggctagttttttatt

SEQ ID NO: 1220913 - DNA, 25 bp, Homo sapien
tgccaggctagttttttattgttgt

SEQ ID NO: 1220914 - DNA, 25 bp, Homo sapien
ggctccttggcacgaaggttcccga

SEQ ID NO: 1220915 - DNA, 25 bp, Homo sapien
ttcccgatgcctacgctgagagttt

SEQ ID NO: 1220916 - DNA, 25 bp, Homo sapien
aaggttcccgatgcctacgctgaga

SEQ ID NO: 1220917 - DNA, 25 bp, Homo sapien
ggcacgaaggttcccgatgcctacg

SEQ ID NO: 1220918 - DNA, 25 bp, Homo sapien
aagtggaagcctagtgaggcaagta

SEQ ID NO: 1220919 - DNA, 25 bp, Homo sapien
gtaaacttcatagaaggaatagaag

SEQ ID NO: 1220920 - DNA, 25 bp, Homo sapien
tagtgaggcaagtaggtaaagtgcc

SEQ ID NO: 1220921 - DNA, 25 bp, Homo sapien
agtaggtaaagtgccagttcccatc

SEQ ID NO: 1220922 - DNA, 25 bp, Homo sapien
gaccaccaggtgcttaatttgcatg

SEQ ID NO: 1220923 - DNA, 25 bp, Homo sapien
cagaccaccaggtgcttaatttgca

SEQ ID NO: 1220924 - DNA, 25 bp, Homo sapien
gggcagaccaccaggtgcttaattt

SEQ ID NO: 1220925 - DNA, 25 bp, Homo sapien
ggcagaccaccaggtgcttaatttg

SEQ ID NO: 1220926 - DNA, 25 bp, Homo sapien
tgtgcgtgcacgcacctatttgcgt

SEQ ID NO: 1220927 - DNA, 25 bp, Homo sapien
gtgacagctgcacgcaagaccattg

SEQ ID NO: 1220928 - DNA, 25 bp, Homo sapien
gcaatccaagtgatctgggtgtgcc

SEQ ID NO: 1220929 - DNA, 25 bp, Homo sapien
gccatggaggtgtgtgattgcagta

SEQ ID NO: 1220930 - DNA, 25 bp, Homo sapien
tgtcagtctccagctcaaattcctg

SEQ ID NO: 1220931 - DNA, 25 bp, Homo sapien
gtgtcagtctccagctcaaattcct

SEQ ID NO: 1220932 - DNA, 25 bp, Homo sapien
agtgtcagtctccagctcaaattcc

SEQ ID NO: 1220933 - DNA, 25 bp, Homo sapien
ggccatttgagacactaccatgtgg

SEQ ID NO: 1220934 - DNA, 25 bp, Homo sapien
gtgtggccatttgagacactaccat

SEQ ID NO: 1220935 - DNA, 25 bp, Homo sapien
gagacactaccatgtggccaaggag

SEQ ID NO: 1220936 - DNA, 25 bp, Homo sapien
catttgagacactaccatgtggcca

SEQ ID NO: 1220937 - DNA, 25 bp, Homo sapien
agccacaccaggggtccccagcaca

SEQ ID NO: 1220938 - DNA, 25 bp, Homo sapien
tccccagcacacaccagcaggccca

SEQ ID NO: 1220939 - DNA, 25 bp, Homo sapien
ccagcacacaccagcaggcccacat

SEQ ID NO: 1220940 - DNA, 25 bp, Homo sapien
gccacaccaggggtccccagcacac

SEQ ID NO: 1220941 - DNA, 25 bp, Homo sapien
ccacgcagaaagagatggtggtatg

SEQ ID NO: 1220942 - DNA, 25 bp, Homo sapien
agctgagaccggaactgggccacgc

SEQ ID NO: 1220943 - DNA, 25 bp, Homo sapien
gaacagagccacgtcaggagctgag

SEQ ID NO: 1220944 - DNA, 25 bp, Homo sapien
acagagccacgtcaggagctgagac

SEQ ID NO: 1220945 - DNA, 25 bp, Homo sapien
gacatcgtccagtcccactgcaggt

SEQ ID NO: 1220946 - DNA, 25 bp, Homo sapien
tggccagcagggacatcgtccagtc

SEQ ID NO: 1220947 - DNA, 25 bp, Homo sapien
gcagggccaccgtcatctgagaatc

SEQ ID NO: 1220948 - DNA, 25 bp, Homo sapien
gagagaacaacctttgagtggccag

SEQ ID NO: 1220949 - DNA, 25 bp, Homo sapien
ctgaagctggtgtagtacaggcagc

SEQ ID NO: 1220950 - DNA, 25 bp, Homo sapien
tcagcgtgaactgcagcaggtagta

SEQ ID NO: 1220951 - DNA, 25 bp, Homo sapien
acaggcagcgaacggtcagcgtgaa

SEQ ID NO: 1220952 - DNA, 25 bp, Homo sapien
gatgaactccgagaagctgaggatg

SEQ ID NO: 1220953 - DNA, 25 bp, Homo sapien
ctatagaatcccaatcccatcccca

SEQ ID NO: 1220954 - DNA, 25 bp, Homo sapien
gaatcccaatcccatccccagcggg

SEQ ID NO: 1220955 - DNA, 25 bp, Homo sapien
atcccaatcccatccccagcgggct

SEQ ID NO: 1220956 - DNA, 25 bp, Homo sapien
caatcccatccccagcgggctctac

SEQ ID NO: 1220957 - DNA, 25 bp, Homo sapien
cctgctagaggcctctaatattctt

SEQ ID NO: 1220958 - DNA, 25 bp, Homo sapien
tagaggcctctaatattcttactag

SEQ ID NO: 1220959 - DNA, 25 bp, Homo sapien
atcttaaagcgtgcctctgtgtgac

SEQ ID NO: 1220960 - DNA, 25 bp, Homo sapien
tggaagataatcttaaagcgtgcct

SEQ ID NO: 1220961 - DNA, 25 bp, Homo sapien
ctcgggcctccaagcagcatttggt

SEQ ID NO: 1220962 - DNA, 25 bp, Homo sapien
gggcctccaagcagcatttggtatg

SEQ ID NO: 1220963 - DNA, 25 bp, Homo sapien
ccaagcagcatttggtatggagccc

SEQ ID NO: 1220964 - DNA, 25 bp, Homo sapien
gcctccaagcagcatttggtatgga

SEQ ID NO: 1220965 - DNA, 25 bp, Homo sapien
aaatgagcttgatttagcatctgac

SEQ ID NO: 1220966 - DNA, 25 bp, Homo sapien
tgcatctgcacacattagccggtag

SEQ ID NO: 1220967 - DNA, 25 bp, Homo sapien
catctgactatcagggctcatgaca

SEQ ID NO: 1220968 - DNA, 25 bp, Homo sapien
cataaaggcccattccgtgaggtac

SEQ ID NO: 1220969 - DNA, 25 bp, Homo sapien
taaggtccaacaagagacagtctcc

SEQ ID NO: 1220970 - DNA, 25 bp, Homo sapien
tagatggcatgcatgtacatcaggt

SEQ ID NO: 1220971 - DNA, 25 bp, Homo sapien
tacatcaggtgagccatcagctcgg

SEQ ID NO: 1220972 - DNA, 25 bp, Homo sapien
ggatgctgctgtagatggcatgcat

SEQ ID NO: 1220973 - DNA, 25 bp, Homo sapien
cactccagctccattctgatgctaa

SEQ ID NO: 1220974 - DNA, 25 bp, Homo sapien
tgatgctaactgttggactattggg

SEQ ID NO: 1220975 - DNA, 25 bp, Homo sapien
gggctcatcccactgttggtgattc

SEQ ID NO: 1220976 - DNA, 25 bp, Homo sapien
catcccactgttggtgattcccaca

SEQ ID NO: 1220977 - DNA, 25 bp, Homo sapien
gtaaactgccaaggttacacaccag

SEQ ID NO: 1220978 - DNA, 25 bp, Homo sapien
gctgaaactcaaacctatggctgtg

SEQ ID NO: 1220979 - DNA, 25 bp, Homo sapien
tctatcccaagacagtgtacaaggt

SEQ ID NO: 1220980 - DNA, 25 bp, Homo sapien
caaggtacaccctcaatgtgcagcg

SEQ ID NO: 1220981 - DNA, 25 bp, Homo sapien
gagagcctgattacagcagctctaa

SEQ ID NO: 1220982 - DNA, 25 bp, Homo sapien
aagacccttttaatgaagtctcatg

SEQ ID NO: 1220983 - DNA, 25 bp, Homo sapien
gctcatcacgcctcactgtctagaa

SEQ ID NO: 1220984 - DNA, 25 bp, Homo sapien
tcatgaaggaattactttgcaagag

SEQ ID NO: 1220985 - DNA, 25 bp, Homo sapien
gggcctattacaaggctttcactcc

SEQ ID NO: 1220986 - DNA, 25 bp, Homo sapien
cgaatctcatcgtgtgtgtcaggca

SEQ ID NO: 1220987 - DNA, 25 bp, Homo sapien
caacataaggtggaagtgctacaac

SEQ ID NO: 1220988 - DNA, 25 bp, Homo sapien
gattggagagaggtgccccttagct

SEQ ID NO: 1220989 - DNA, 25 bp, Homo sapien
tatgcccctgtgtcagtccgtggcc

SEQ ID NO: 1220990 - DNA, 25 bp, Homo sapien
acatggctgaacatcaggacctcca

SEQ ID NO: 1220991 - DNA, 25 bp, Homo sapien
ggctgaacatcaggacctccaagca

SEQ ID NO: 1220992 - DNA, 25 bp, Homo sapien
ggacctccaagcaacaggcacacaa

SEQ ID NO: 1220993 - DNA, 25 bp, Homo sapien
catggctgaacatcaggacctccaa

SEQ ID NO: 1220994 - DNA, 25 bp, Homo sapien
gccagattacaggatgcccaaagcc

SEQ ID NO: 1220995 - DNA, 25 bp, Homo sapien
cttgctgatattgtctgccagatta

SEQ ID NO: 1220996 - DNA, 25 bp, Homo sapien
tgctgatattgtctgccagattaca

SEQ ID NO: 1220997 - DNA, 25 bp, Homo sapien
ccagattacaggatgcccaaagccc

SEQ ID NO: 1220998 - DNA, 25 bp, Homo sapien
gatggcaaccctggctgatgtctga

SEQ ID NO: 1220999 - DNA, 25 bp, Homo sapien
cagagggtacggcaaatggaatcac

SEQ ID NO: 1221000 - DNA, 25 bp, Homo sapien
gactgcaactataggagagatccca

SEQ ID NO: 1221001 - DNA, 25 bp, Homo sapien
cttggaatgcatcagtgggtacacc

SEQ ID NO: 1221002 - DNA, 25 bp, Homo sapien
gtggcagaccaggttatcttctggg

SEQ ID NO: 1221003 - DNA, 25 bp, Homo sapien
gtcgatgtggcagaccaggttatct

SEQ ID NO: 1221004 - DNA, 25 bp, Homo sapien
gatgtggcagaccaggttatcttct

SEQ ID NO: 1221005 - DNA, 25 bp, Homo sapien
tcgatgtggcagaccaggttatctt

SEQ ID NO: 1221006 - DNA, 25 bp, Homo sapien
cccactgtgcagaaaattactgcag

SEQ ID NO: 1221007 - DNA, 25 bp, Homo sapien
tgctctctcacctcaagattgcccg

SEQ ID NO: 1221008 - DNA, 25 bp, Homo sapien
aggccaagcctagaaggaacctcca

SEQ ID NO: 1221009 - DNA, 25 bp, Homo sapien
gggagacgataaatggccacatgct

SEQ ID NO: 1221010 - DNA, 25 bp, Homo sapien
gagcaccaagtacttcacgtagaaa

SEQ ID NO: 1221011 - DNA, 25 bp, Homo sapien
agggcgggtggagtgagtccatcca

SEQ ID NO: 1221012 - DNA, 25 bp, Homo sapien
gagcacctgggctaacgccagtcct

SEQ ID NO: 1221013 - DNA, 25 bp, Homo sapien
actgaacatggtgctcacgcagcgg

SEQ ID NO: 1221014 - DNA, 25 bp, Homo sapien
aactttagcaatcccagcgcctgac

SEQ ID NO: 1221015 - DNA, 25 bp, Homo sapien
caactttagcaatcccagcgcctga

SEQ ID NO: 1221016 - DNA, 25 bp, Homo sapien
gcaacaagtccatcacgtagaaaac

SEQ ID NO: 1221017 - DNA, 25 bp, Homo sapien
actaaggaaaagagactccacacca

SEQ ID NO: 1221018 - DNA, 25 bp, Homo sapien
tcacttgttacactctggaagcgat

SEQ ID NO: 1221019 - DNA, 25 bp, Homo sapien
ccaaccataagactatgggtcaaaa

SEQ ID NO: 1221020 - DNA, 25 bp, Homo sapien
gatccatgtgaatgtaagatattga

SEQ ID NO: 1221021 - DNA, 25 bp, Homo sapien
tccctgccttagagctggtcaacaa

SEQ ID NO: 1221022 - DNA, 25 bp, Homo sapien
agtccttttgtggtcccatcccctg

SEQ ID NO: 1221023 - DNA, 25 bp, Homo sapien
caagtttgttgtcacctgtctcttc

SEQ ID NO: 1221024 - DNA, 25 bp, Homo sapien
gctctgaagctgaacccaggtagac

SEQ ID NO: 1221025 - DNA, 25 bp, Homo sapien
aagctgaacccaggtagacagctgc

SEQ ID NO: 1221026 - DNA, 25 bp, Homo sapien
ctgcaggctctgaagctgaacccag

SEQ ID NO: 1221027 - DNA, 25 bp, Homo sapien
cagctgccaggtttctagaggcaga

SEQ ID NO: 1221028 - DNA, 25 bp, Homo sapien
tcttactctgcacatagccagcaat

SEQ ID NO: 1221029 - DNA, 25 bp, Homo sapien
caatgaccccaaatttatgtatgga

SEQ ID NO: 1221030 - DNA, 25 bp, Homo sapien
catcttactctgcacatagccagca

SEQ ID NO: 1221031 - DNA, 25 bp, Homo sapien
catagccagcaatgaccccaaattt

SEQ ID NO: 1221032 - DNA, 25 bp, Homo sapien
gaggcactctcataagaactgaagg

SEQ ID NO: 1221033 - DNA, 25 bp, Homo sapien
tgcagtgagggactcttgagacccc

SEQ ID NO: 1221034 - DNA, 25 bp, Homo sapien
aaggtctcggatgaagcaaggcagt

SEQ ID NO: 1221035 - DNA, 25 bp, Homo sapien
taagcactggcctgtacctcagagg

SEQ ID NO: 1221036 - DNA, 25 bp, Homo sapien
cataattcaggaaaaacgggattcg

SEQ ID NO: 1221037 - DNA, 25 bp, Homo sapien
tgattactgacactaagattccctg

SEQ ID NO: 1221038 - DNA, 25 bp, Homo sapien
tggtacctcgccacctgacatatga

SEQ ID NO: 1221039 - DNA, 25 bp, Homo sapien
gatctacctgtagggagagctgatg

SEQ ID NO: 1221040 - DNA, 25 bp, Homo sapien
ttaagaaattatgcagtccaacatc

SEQ ID NO: 1221041 - DNA, 25 bp, Homo sapien
cactggttaaggtgaccagttagag

SEQ ID NO: 1221042 - DNA, 25 bp, Homo sapien
gtgaccagttagagcatcttccagc

SEQ ID NO: 1221043 - DNA, 25 bp, Homo sapien
agaacactggttaaggtgaccagtt

SEQ ID NO: 1221044 - DNA, 25 bp, Homo sapien
gttaaggtgaccagttagagcatct

SEQ ID NO: 1221045 - DNA, 25 bp, Homo sapien
tatcctgctgaaaactactgcccca

SEQ ID NO: 1221046 - DNA, 25 bp, Homo sapien
tgttatcctgctcatgatgttatcc

SEQ ID NO: 1221047 - DNA, 25 bp, Homo sapien
catgatgttatcctgctgaaaacta

SEQ ID NO: 1221048 - DNA, 25 bp, Homo sapien
catgatgttatcctgctcatgatgt

SEQ ID NO: 1221049 - DNA, 25 bp, Homo sapien
gtggtccctcttcaacaccgagtcg

SEQ ID NO: 1221050 - DNA, 25 bp, Homo sapien
taatagcaaattacgggatacaatg

SEQ ID NO: 1221051 - DNA, 25 bp, Homo sapien
gaatccattctcataaaggtctgta

SEQ ID NO: 1221052 - DNA, 25 bp, Homo sapien
gatgagtcccttacattacagtgga

SEQ ID NO: 1221053 - DNA, 25 bp, Homo sapien
caacaactgctatctatcaatgagg

SEQ ID NO: 1221054 - DNA, 25 bp, Homo sapien
cattccctggaataagcgctgacgc

SEQ ID NO: 1221055 - DNA, 25 bp, Homo sapien
gccacactcacattgtcggcctggg

SEQ ID NO: 1221056 - DNA, 25 bp, Homo sapien
ggaataagcgctgacgctgatgaac

SEQ ID NO: 1221057 - DNA, 25 bp, Homo sapien
gaaacattctccaagggagaggcca

SEQ ID NO: 1221058 - DNA, 25 bp, Homo sapien
gtgcagaatcttcagaactgtgatg

SEQ ID NO: 1221059 - DNA, 25 bp, Homo sapien
tagcagggttagagttttcagaata

SEQ ID NO: 1221060 - DNA, 25 bp, Homo sapien
ttcagaataattgctaaatctgcac

SEQ ID NO: 1221061 - DNA, 25 bp, Homo sapien
actgtgatgagtcgcactggtcccc

SEQ ID NO: 1221062 - DNA, 25 bp, Homo sapien
tgttcttgctgtgcgccaggaagcc

SEQ ID NO: 1221063 - DNA, 25 bp, Homo sapien
aggacttggctgttcttgctgtgcg

SEQ ID NO: 1221064 - DNA, 25 bp, Homo sapien
tggagccactggatccaagacatag

SEQ ID NO: 1221065 - DNA, 25 bp, Homo sapien
ggttggaatgacatcaagaagatgc

SEQ ID NO: 1221066 - DNA, 25 bp, Homo sapien
ttcagggggaagggctgatcttcag

SEQ ID NO: 1221067 - DNA, 25 bp, Homo sapien
tcagggggaagggctgatcttcagc

SEQ ID NO: 1221068 - DNA, 25 bp, Homo sapien
cagggggaagggctgatcttcagcc

SEQ ID NO: 1221069 - DNA, 25 bp, Homo sapien
tgcacctttcccaaggatgccccat

SEQ ID NO: 1221070 - DNA, 25 bp, Homo sapien
ttaatttctctttgcacctttccca

SEQ ID NO: 1221071 - DNA, 25 bp, Homo sapien
aatttctctttgcacctttcccaag

SEQ ID NO: 1221072 - DNA, 25 bp, Homo sapien
tttctctttgcacctttcccaagga

SEQ ID NO: 1221073 - DNA, 25 bp, Homo sapien
gtgttgacttgaatctaacggccag

SEQ ID NO: 1221074 - DNA, 25 bp, Homo sapien
caggtctgggtctccaacatcatta

SEQ ID NO: 1221075 - DNA, 25 bp, Homo sapien
ggccagtaaccaaatcagcaggtct

SEQ ID NO: 1221076 - DNA, 25 bp, Homo sapien
tgggtctccaacatcattagctttc

SEQ ID NO: 1221077 - DNA, 25 bp, Homo sapien
gactgtcactccctgtaaacaaaag

SEQ ID NO: 1221078 - DNA, 25 bp, Homo sapien
cataagtgtcattgtttatgtctgc

SEQ ID NO: 1221079 - DNA, 25 bp, Homo sapien
tgtggcttcataagtgtcattgttt

SEQ ID NO: 1221080 - DNA, 25 bp, Homo sapien
gatgattctccagctagaaactgtg

SEQ ID NO: 1221081 - DNA, 25 bp, Homo sapien
caactccaaggaggacatgttttca

SEQ ID NO: 1221082 - DNA, 25 bp, Homo sapien
tttcaagcttgtgatcaggaagcat

SEQ ID NO: 1221083 - DNA, 25 bp, Homo sapien
tccacaccaatggtacttgatctta

SEQ ID NO: 1221084 - DNA, 25 bp, Homo sapien
catgttttcaagcttgtgatcagga

SEQ ID NO: 1221085 - DNA, 25 bp, Homo sapien
aatgcaaatgtcatcgccgtggaaa

SEQ ID NO: 1221086 - DNA, 25 bp, Homo sapien
cagcaccagaggtagtcgtagccgc

SEQ ID NO: 1221087 - DNA, 25 bp, Homo sapien
agtcgtagccgccatgccagtagct

SEQ ID NO: 1221088 - DNA, 25 bp, Homo sapien
ccgtggaaaacagtgtccccagcag

SEQ ID NO: 1221089 - DNA, 25 bp, Homo sapien
tggccccatccctaataaacctgat

SEQ ID NO: 1221090 - DNA, 25 bp, Homo sapien
tagaaagggcccatagtgggggcag

SEQ ID NO: 1221091 - DNA, 25 bp, Homo sapien
taataaacctgatctgcctagttcc

SEQ ID NO: 1221092 - DNA, 25 bp, Homo sapien
tctgcctagttccactgtcccctaa

SEQ ID NO: 1221093 - DNA, 25 bp, Homo sapien
tgcactgatttaacactgaggctca

SEQ ID NO: 1221094 - DNA, 25 bp, Homo sapien
gaagattctatgtctgggcaagtgg

SEQ ID NO: 1221095 - DNA, 25 bp, Homo sapien
tgtctttgagctaggacactggtct

SEQ ID NO: 1221096 - DNA, 25 bp, Homo sapien
tatttgtaaacctgactgggcccaa

SEQ ID NO: 1221097 - DNA, 25 bp, Homo sapien
actgagcagccgagcaaaggcagca

SEQ ID NO: 1221098 - DNA, 25 bp, Homo sapien
tccaggaataactgaaaatgggttc

SEQ ID NO: 1221099 - DNA, 25 bp, Homo sapien
gaagaaactgagcagccgagcaaag

SEQ ID NO: 1221100 - DNA, 25 bp, Homo sapien
cagtcctggcgctcatcagtccagg

SEQ ID NO: 1221101 - DNA, 25 bp, Homo sapien
tcagtactcgttcctgagattatgg

SEQ ID NO: 1221102 - DNA, 25 bp, Homo sapien
gagattatggtttctcaggtgagag

SEQ ID NO: 1221103 - DNA, 25 bp, Homo sapien
tgatagcagccgatgattggagcag

SEQ ID NO: 1221104 - DNA, 25 bp, Homo sapien
gggagaaggtataagaatgccatga

SEQ ID NO: 1221105 - DNA, 25 bp, Homo sapien
ccacccttccgcagacagtcagtgt

SEQ ID NO: 1221106 - DNA, 25 bp, Homo sapien
cagtgtctgttccagcaattactcc

SEQ ID NO: 1221107 - DNA, 25 bp, Homo sapien
tgtctgttccagcaattactccagc

SEQ ID NO: 1221108 - DNA, 25 bp, Homo sapien
ttatattatacccttgcttcccacc

SEQ ID NO: 1221109 - DNA, 25 bp, Homo sapien
cataaagagtcaaggcacatgggtg

SEQ ID NO: 1221110 - DNA, 25 bp, Homo sapien
gcagttttcaaacgcaggtgggcca

SEQ ID NO: 1221111 - DNA, 25 bp, Homo sapien
gacatggagtcaatctaaacgccca

SEQ ID NO: 1221112 - DNA, 25 bp, Homo sapien
tctaagaagctatcatgaaggccag

SEQ ID NO: 1221113 - DNA, 25 bp, Homo sapien
ggccaccaggcaagattacctctag

SEQ ID NO: 1221114 - DNA, 25 bp, Homo sapien
agtgagatgtctgcccgatcatggt

SEQ ID NO: 1221115 - DNA, 25 bp, Homo sapien
tgctctccagtgatgtagggtgtct

SEQ ID NO: 1221116 - DNA, 25 bp, Homo sapien
tcatggttgttctggaatgctctcc

SEQ ID NO: 1221117 - DNA, 25 bp, Homo sapien
taaagcaaacaaagcctttatcctg

SEQ ID NO: 1221118 - DNA, 25 bp, Homo sapien
tttatcctgactgttctgggagccc

SEQ ID NO: 1221119 - DNA, 25 bp, Homo sapien
tgtgctggagtgtgcgagccctatc

SEQ ID NO: 1221120 - DNA, 25 bp, Homo sapien
caccccaagggaccgtgtgttcaga

SEQ ID NO: 1221121 - DNA, 25 bp, Homo sapien
tggaacaagaagcaagggcagcgtg

SEQ ID NO: 1221122 - DNA, 25 bp, Homo sapien
tgtatgaagatcctattccagtagg

SEQ ID NO: 1221123 - DNA, 25 bp, Homo sapien
acaggatcagcatcgaggtggaaca

SEQ ID NO: 1221124 - DNA, 25 bp, Homo sapien
cccaagaaataccaggttggacagg

SEQ ID NO: 1221125 - DNA, 25 bp, Homo sapien
agcagaccgggttttcagagcccaa

SEQ ID NO: 1221126 - DNA, 25 bp, Homo sapien
taaacctggaaatctagacactgag

SEQ ID NO: 1221127 - DNA, 25 bp, Homo sapien
tccataggatgtcaggcaagtcaca

SEQ ID NO: 1221128 - DNA, 25 bp, Homo sapien
tcctcagtgtgtaaagatgggctct

SEQ ID NO: 1221129 - DNA, 25 bp, Homo sapien
gagtaacggctcctctagagatgcc

SEQ ID NO: 1221130 - DNA, 25 bp, Homo sapien
gattactctggactatccgggcagg

SEQ ID NO: 1221131 - DNA, 25 bp, Homo sapien
ggcaggcccagtggaatcacaaagg

SEQ ID NO: 1221132 - DNA, 25 bp, Homo sapien
agcatgctgcggtaggctgagtaac

SEQ ID NO: 1221133 - DNA, 25 bp, Homo sapien
gcgaccgggcatttgactactccca

SEQ ID NO: 1221134 - DNA, 25 bp, Homo sapien
catgtgacattgctgcgaccgggca

SEQ ID NO: 1221135 - DNA, 25 bp, Homo sapien
gacattgctgcgaccgggcatttga

SEQ ID NO: 1221136 - DNA, 25 bp, Homo sapien
ctggataaccatgtgacattgctgc

SEQ ID NO: 1221137 - DNA, 25 bp, Homo sapien
tacgtggaataagtggctcatctcc

SEQ ID NO: 1221138 - DNA, 25 bp, Homo sapien
tagtacgtggaataagtggctcatc

SEQ ID NO: 1221139 - DNA, 25 bp, Homo sapien
aagtggctcatctccgcaaagcgtc

SEQ ID NO: 1221140 - DNA, 25 bp, Homo sapien
gaataagtggctcatctccgcaaag

SEQ ID NO: 1221141 - DNA, 25 bp, Homo sapien
gctcctgccagagatgacataaaac

SEQ ID NO: 1221142 - DNA, 25 bp, Homo sapien
gtggctcctgccagagatgacataa

SEQ ID NO: 1221143 - DNA, 25 bp, Homo sapien
tggctcctgccagagatgacataaa

SEQ ID NO: 1221144 - DNA, 25 bp, Homo sapien
ggctcctgccagagatgacataaaa

SEQ ID NO: 1221145 - DNA, 25 bp, Homo sapien
ctgctttcccattacccgtaagtgg

SEQ ID NO: 1221146 - DNA, 25 bp, Homo sapien
taagtgggacatgagagttgacaac

SEQ ID NO: 1221147 - DNA, 25 bp, Homo sapien
caacacataggacaggtcaaggtca

SEQ ID NO: 1221148 - DNA, 25 bp, Homo sapien
ggtcaaggtcattctcgactctgat

SEQ ID NO: 1221149 - DNA, 25 bp, Homo sapien
tgatcagagtcacaattactccagg

SEQ ID NO: 1221150 - DNA, 25 bp, Homo sapien
gatcagagtcacaattactccaggc

SEQ ID NO: 1221151 - DNA, 25 bp, Homo sapien
tgtgatcagagtcacaattactcca

SEQ ID NO: 1221152 - DNA, 25 bp, Homo sapien
cagagtcacaattactccaggctcc

SEQ ID NO: 1221153 - DNA, 25 bp, Homo sapien
cagaatcaaacaccagtaaccaatt

SEQ ID NO: 1221154 - DNA, 25 bp, Homo sapien
atctgctcagaatcaaacaccagta

SEQ ID NO: 1221155 - DNA, 25 bp, Homo sapien
gaatcaaacaccagtaaccaattgt

SEQ ID NO: 1221156 - DNA, 25 bp, Homo sapien
tgctcagaatcaaacaccagtaacc

SEQ ID NO: 1221157 - DNA, 25 bp, Homo sapien
ctgtgcctgtggtgcagtaggtggc

SEQ ID NO: 1221158 - DNA, 25 bp, Homo sapien
tgtgactgcagtctattttgctcat

SEQ ID NO: 1221159 - DNA, 25 bp, Homo sapien
tgctcatcaacacactgaagattgg

SEQ ID NO: 1221160 - DNA, 25 bp, Homo sapien
tctgtgcataatcttccagcagcag

SEQ ID NO: 1221161 - DNA, 25 bp, Homo sapien
catccaggagtggactaggttgtcc

SEQ ID NO: 1221162 - DNA, 25 bp, Homo sapien
gaaatgttcctgcctgtcaaagatg

SEQ ID NO: 1221163 - DNA, 25 bp, Homo sapien
ggaaatgttcctgcctgtcaaagat

SEQ ID NO: 1221164 - DNA, 25 bp, Homo sapien
aaatgttcctgcctgtcaaagatgc

SEQ ID NO: 1221165 - DNA, 25 bp, Homo sapien
gatgagctaggattgccagccactg

SEQ ID NO: 1221166 - DNA, 25 bp, Homo sapien
gaagcgatgatgagctaggattgcc

SEQ ID NO: 1221167 - DNA, 25 bp, Homo sapien
atgatgagctaggattgccagccac

SEQ ID NO: 1221168 - DNA, 25 bp, Homo sapien
tgagctaggattgccagccactgct

SEQ ID NO: 1221169 - DNA, 25 bp, Homo sapien
ctaatttagactgtgagcattgaag

SEQ ID NO: 1221170 - DNA, 25 bp, Homo sapien
taaagccacaattatatggcccctg

SEQ ID NO: 1221171 - DNA, 25 bp, Homo sapien
cagtgcctgcatgaccctttattaa

SEQ ID NO: 1221172 - DNA, 25 bp, Homo sapien
tgaagagcatgttcccagtgcctgc

SEQ ID NO: 1221173 - DNA, 25 bp, Homo sapien
ttcattcactgagctggcactgaca

SEQ ID NO: 1221174 - DNA, 25 bp, Homo sapien
cattcactgagctggcactgacagc

SEQ ID NO: 1221175 - DNA, 25 bp, Homo sapien
caaactcttcttggtcaaagcctac

SEQ ID NO: 1221176 - DNA, 25 bp, Homo sapien
gacaaactcttcttggtcaaagcct

SEQ ID NO: 1221177 - DNA, 25 bp, Homo sapien
ctcctaagacaaactcttcttggtc

SEQ ID NO: 1221178 - DNA, 25 bp, Homo sapien
aactcttcttggtcaaagcctacgt

SEQ ID NO: 1221179 - DNA, 25 bp, Homo sapien
gggacttatcatgtgtaggactgaa

SEQ ID NO: 1221180 - DNA, 25 bp, Homo sapien
tcatgtgtaggactgaacactgggc

SEQ ID NO: 1221181 - DNA, 25 bp, Homo sapien
cctaatcacgccttcttcccctgag

SEQ ID NO: 1221182 - DNA, 25 bp, Homo sapien
tatcccaaggaagaaatcaatccat

SEQ ID NO: 1221183 - DNA, 25 bp, Homo sapien
tatatcagtctgaaaggaatggaaa

SEQ ID NO: 1221184 - DNA, 25 bp, Homo sapien
gaaagcctgcggtttgatactgacg

SEQ ID NO: 1221185 - DNA, 25 bp, Homo sapien
cacacagggccatgtgaagtcaaag

SEQ ID NO: 1221186 - DNA, 25 bp, Homo sapien
gatactgacggaaaagagcatcagc

SEQ ID NO: 1221187 - DNA, 25 bp, Homo sapien
gatcatgtgacgtggctgctgcata

SEQ ID NO: 1221188 - DNA, 25 bp, Homo sapien
acagggcccagctactagaggaaga

SEQ ID NO: 1221189 - DNA, 25 bp, Homo sapien
gaaagacacagtcccatgtcaaagg

SEQ ID NO: 1221190 - DNA, 25 bp, Homo sapien
tagaggaagaccaccttataggcca

SEQ ID NO: 1221191 - DNA, 25 bp, Homo sapien
tagtccgtggcgtaggtctgggccc

SEQ ID NO: 1221192 - DNA, 25 bp, Homo sapien
gagtagcagtacaggaatcccagga

SEQ ID NO: 1221193 - DNA, 25 bp, Homo sapien
tctgggcccaggcaatgcccacgtg

SEQ ID NO: 1221194 - DNA, 25 bp, Homo sapien
cccacgtgggagtagcagtacagga

SEQ ID NO: 1221195 - DNA, 25 bp, Homo sapien
gactccttgggtatagatgccttag

SEQ ID NO: 1221196 - DNA, 25 bp, Homo sapien
tgggtaagacacacgactgccctgg

SEQ ID NO: 1221197 - DNA, 25 bp, Homo sapien
tatgagatccagcatccagtcttgg

SEQ ID NO: 1221198 - DNA, 25 bp, Homo sapien
cgtaattcaaaagacagctgtggct

SEQ ID NO: 1221199 - DNA, 25 bp, Homo sapien
tcttagcaagccctttctttccaag

SEQ ID NO: 1221200 - DNA, 25 bp, Homo sapien
taaacttcagtcagactccctctgg

SEQ ID NO: 1221201 - DNA, 25 bp, Homo sapien
ctttccaagtaaacttcagtcagac

SEQ ID NO: 1221202 - DNA, 25 bp, Homo sapien
tcctcaatcactgttggtccatgaa

SEQ ID NO: 1221203 - DNA, 25 bp, Homo sapien
aatatatccactgacgcttccaaag

SEQ ID NO: 1221204 - DNA, 25 bp, Homo sapien
tgacgcttccaaagtagtttaatga

SEQ ID NO: 1221205 - DNA, 25 bp, Homo sapien
tataaatggtatacttggaagagct

SEQ ID NO: 1221206 - DNA, 25 bp, Homo sapien
cttttgtattacttatatgtgcaca

SEQ ID NO: 1221207 - DNA, 25 bp, Homo sapien
tcagaggatccaggcgctggaattg

SEQ ID NO: 1221208 - DNA, 25 bp, Homo sapien
ggaattgaccttgggaccttgtcta

SEQ ID NO: 1221209 - DNA, 25 bp, Homo sapien
ccttgggtagcatcttggcgattgt

SEQ ID NO: 1221210 - DNA, 25 bp, Homo sapien
tttgggtgtccttcaggtatcttgc

SEQ ID NO: 1221211 - DNA, 25 bp, Homo sapien
tttaggagccctggtggagatacac

SEQ ID NO: 1221212 - DNA, 25 bp, Homo sapien
tgtgatagagctgccaatgcccctt

SEQ ID NO: 1221213 - DNA, 25 bp, Homo sapien
aatgttaagaggaacgtgcaggccc

SEQ ID NO: 1221214 - DNA, 25 bp, Homo sapien
ggatgctgccaagaacaccactgta

SEQ ID NO: 1221215 - DNA, 25 bp, Homo sapien
tctgggttcccgagccaggaccatg

SEQ ID NO: 1221216 - DNA, 25 bp, Homo sapien
gaacttgaccgcaggctgctttgtg

SEQ ID NO: 1221217 - DNA, 25 bp, Homo sapien
atgccaggatgccactctgggttcc

SEQ ID NO: 1221218 - DNA, 25 bp, Homo sapien
tgtgcctcagataccagtgacctga

SEQ ID NO: 1221219 - DNA, 25 bp, Homo sapien
tcatcttgggtcacaggtgcacgtg

SEQ ID NO: 1221220 - DNA, 25 bp, Homo sapien
taggaatgcactcgtgaatcagcgc

SEQ ID NO: 1221221 - DNA, 25 bp, Homo sapien
gaatcagcgcaaactgggctcatga

SEQ ID NO: 1221222 - DNA, 25 bp, Homo sapien
gacggatgtccgtgaaatttctcag

SEQ ID NO: 1221223 - DNA, 25 bp, Homo sapien
ggcttcttgtctggcacccaacggt

SEQ ID NO: 1221224 - DNA, 25 bp, Homo sapien
tgtcaagaggccctgccatttccct

SEQ ID NO: 1221225 - DNA, 25 bp, Homo sapien
ggtcaatgtcaagaggccctgccat

SEQ ID NO: 1221226 - DNA, 25 bp, Homo sapien
cacccaacggtcaatgtcaagaggc

SEQ ID NO: 1221227 - DNA, 25 bp, Homo sapien
taaggccgagtcacaactatctgtg

SEQ ID NO: 1221228 - DNA, 25 bp, Homo sapien
caaccagtccttgggtaagaggccg

SEQ ID NO: 1221229 - DNA, 25 bp, Homo sapien
cctgcgagctcaagggagagtcctg

SEQ ID NO: 1221230 - DNA, 25 bp, Homo sapien
tagatttagcctcagatggcggcat

SEQ ID NO: 1221231 - DNA, 25 bp, Homo sapien
cctttgcctgtgttagacggtgacc

SEQ ID NO: 1221232 - DNA, 25 bp, Homo sapien
gacacgcaaggttagaagttcagct

SEQ ID NO: 1221233 - DNA, 25 bp, Homo sapien
catatgccctagagagaggtgtcag

SEQ ID NO: 1221234 - DNA, 25 bp, Homo sapien
tcacagaactgcgtatgggccatcc

SEQ ID NO: 1221235 - DNA, 25 bp, Homo sapien
tgagtgtctgaactgcccacgtcga

SEQ ID NO: 1221236 - DNA, 25 bp, Homo sapien
gggctgcctagcacacaggatgatg

SEQ ID NO: 1221237 - DNA, 25 bp, Homo sapien
agaacacctgaatacgctggctggt

SEQ ID NO: 1221238 - DNA, 25 bp, Homo sapien
ggcagcctaagatgacactttggaa

SEQ ID NO: 1221239 - DNA, 25 bp, Homo sapien
gcctctgagagccacaagttcccca

SEQ ID NO: 1221240 - DNA, 25 bp, Homo sapien
ctgagagccacaagttccccactgt

SEQ ID NO: 1221241 - DNA, 25 bp, Homo sapien
gagagccacaagttccccactgtgg

SEQ ID NO: 1221242 - DNA, 25 bp, Homo sapien
ctctgagagccacaagttccccact

SEQ ID NO: 1221243 - DNA, 25 bp, Homo sapien
gagtacactcctggctcgctgtcag

SEQ ID NO: 1221244 - DNA, 25 bp, Homo sapien
attccacctggtggccgatgtggcc

SEQ ID NO: 1221245 - DNA, 25 bp, Homo sapien
agctgtccttctgccgttgtggaca

SEQ ID NO: 1221246 - DNA, 25 bp, Homo sapien
taatggctgagcgttgtactcagag

SEQ ID NO: 1221247 - DNA, 25 bp, Homo sapien
tgtatattctgaccccttgtgtgga

SEQ ID NO: 1221248 - DNA, 25 bp, Homo sapien
acgtaccgttgtgttcagtcctcca

SEQ ID NO: 1221249 - DNA, 25 bp, Homo sapien
catgagcacctatcccaaaccaagt

SEQ ID NO: 1221250 - DNA, 25 bp, Homo sapien
gcacacaagcgccatgggttacctg

SEQ ID NO: 1221251 - DNA, 25 bp, Homo sapien
ccctttgggaggagatagtgtacat

SEQ ID NO: 1221252 - DNA, 25 bp, Homo sapien
taagtctgactattgagcctaaggc

SEQ ID NO: 1221253 - DNA, 25 bp, Homo sapien
tgtgccggtcagacatcaccatgga

SEQ ID NO: 1221254 - DNA, 25 bp, Homo sapien
tctgcccctgatggaagatagctgg

SEQ ID NO: 1221255 - DNA, 25 bp, Homo sapien
cctttgtgagcagaactcttgcgct

SEQ ID NO: 1221256 - DNA, 25 bp, Homo sapien
gattatcaggctagctcctcgtagg

SEQ ID NO: 1221257 - DNA, 25 bp, Homo sapien
actgctttgacagctagtggaagcc

SEQ ID NO: 1221258 - DNA, 25 bp, Homo sapien
gatacagtggagagaaccctgagct

SEQ ID NO: 1221259 - DNA, 25 bp, Homo sapien
ccatgtcatcaaggcaaaacgttaa

SEQ ID NO: 1221260 - DNA, 25 bp, Homo sapien
cattaagaattccttatgtgccagg

SEQ ID NO: 1221261 - DNA, 25 bp, Homo sapien
tgctgggtgcacatgggacctctgc

SEQ ID NO: 1221262 - DNA, 25 bp, Homo sapien
tggtctcaggctccaagattgtcac

SEQ ID NO: 1221263 - DNA, 25 bp, Homo sapien
tgatgatgctgagttgatgcccgag

SEQ ID NO: 1221264 - DNA, 25 bp, Homo sapien
ttgatgcccgagctggtggtgtacc

SEQ ID NO: 1221265 - DNA, 25 bp, Homo sapien
tgtgatgatgctgagttgatgcccg

SEQ ID NO: 1221266 - DNA, 25 bp, Homo sapien
atgctgagttgatgcccgagctggt

SEQ ID NO: 1221267 - DNA, 25 bp, Homo sapien
tgaggggaaagcaggtaccttgatc

SEQ ID NO: 1221268 - DNA, 25 bp, Homo sapien
aaatgaggggaaagcaggtaccttg

SEQ ID NO: 1221269 - DNA, 25 bp, Homo sapien
gaggggaaagcaggtaccttgatca

SEQ ID NO: 1221270 - DNA, 25 bp, Homo sapien
gggaaagcaggtaccttgatcagta

SEQ ID NO: 1221271 - DNA, 25 bp, Homo sapien
atttagtccttttagagacttgaat

SEQ ID NO: 1221272 - DNA, 25 bp, Homo sapien
tatttagtccttttagagacttgaa

SEQ ID NO: 1221273 - DNA, 25 bp, Homo sapien
ctaggtggaagatatttagtccttt

SEQ ID NO: 1221274 - DNA, 25 bp, Homo sapien
tcttatactcgatgatacgtactcc

SEQ ID NO: 1221275 - DNA, 25 bp, Homo sapien
tcattcgaaggatcctagtgaccac

SEQ ID NO: 1221276 - DNA, 25 bp, Homo sapien
ttatcatagcctgcagtggaccaat

SEQ ID NO: 1221277 - DNA, 25 bp, Homo sapien
tgacggcatcattcagaaagcactt

SEQ ID NO: 1221278 - DNA, 25 bp, Homo sapien
cagggctttcagtgagggccttcca

SEQ ID NO: 1221279 - DNA, 25 bp, Homo sapien
gcagcttggtgttaagattccccag

SEQ ID NO: 1221280 - DNA, 25 bp, Homo sapien
tatttccgcttggtacctgagacag

SEQ ID NO: 1221281 - DNA, 25 bp, Homo sapien
cacacagtttgggaggcacattctg

SEQ ID NO: 1221282 - DNA, 25 bp, Homo sapien
ggcttgggcatactctgagcctgca

SEQ ID NO: 1221283 - DNA, 25 bp, Homo sapien
tagacatgggttcctcattatctca

SEQ ID NO: 1221284 - DNA, 25 bp, Homo sapien
gcattccggtggagggaccacatcc

SEQ ID NO: 1221285 - DNA, 25 bp, Homo sapien
cgatggtcagtaagataagatagac

SEQ ID NO: 1221286 - DNA, 25 bp, Homo sapien
cgactactaatgtctccttctgcag

SEQ ID NO: 1221287 - DNA, 25 bp, Homo sapien
taaagcgtaagcagctgcccctttg

SEQ ID NO: 1221288 - DNA, 25 bp, Homo sapien
tgtcggtgactgctttgcatgcaca

SEQ ID NO: 1221289 - DNA, 25 bp, Homo sapien
tcactgcatgagcttcgactactaa

SEQ ID NO: 1221290 - DNA, 25 bp, Homo sapien
cattctgtgcccatgagcaggggca

SEQ ID NO: 1221291 - DNA, 25 bp, Homo sapien
agcaaagctgcattctgtgcccatg

SEQ ID NO: 1221292 - DNA, 25 bp, Homo sapien
aagctgcattctgtgcccatgagca

SEQ ID NO: 1221293 - DNA, 25 bp, Homo sapien
ttagcaaagctgcattctgtgccca

SEQ ID NO: 1221294 - DNA, 25 bp, Homo sapien
tgctgtgagtggaagccgctttctt

SEQ ID NO: 1221295 - DNA, 25 bp, Homo sapien
gttaaggatgtatgaatagtgctgc

SEQ ID NO: 1221296 - DNA, 25 bp, Homo sapien
ctagcagcgtgccatgcagtacgct

SEQ ID NO: 1221297 - DNA, 25 bp, Homo sapien
cgtaaagtcacgatttcaagcattt

SEQ ID NO: 1221298 - DNA, 25 bp, Homo sapien
tgtggtcttccgtggatctacatcg

SEQ ID NO: 1221299 - DNA, 25 bp, Homo sapien
cccaaatggtagtgatgggaaagag

SEQ ID NO: 1221300 - DNA, 25 bp, Homo sapien
gatctacatcgcctaccccaaatgg

SEQ ID NO: 1221301 - DNA, 25 bp, Homo sapien
tcttccgtggatctacatcgcctac

SEQ ID NO: 1221302 - DNA, 25 bp, Homo sapien
ggtaggtgttatccgcaggttctct

SEQ ID NO: 1221303 - DNA, 25 bp, Homo sapien
cagcaaaggagggatcagtcgctct

SEQ ID NO: 1221304 - DNA, 25 bp, Homo sapien
tattgccctgcgcaatgttctgtgg

SEQ ID NO: 1221305 - DNA, 25 bp, Homo sapien
tcatgcagggttattgccctgcgca

SEQ ID NO: 1221306 - DNA, 25 bp, Homo sapien
gattataatcagctttcagtgttgc

SEQ ID NO: 1221307 - DNA, 25 bp, Homo sapien
agtgttgctgataatataggttgaa

SEQ ID NO: 1221308 - DNA, 25 bp, Homo sapien
tcttcttggaataattgtggctcaa

SEQ ID NO: 1221309 - DNA, 25 bp, Homo sapien
tatttggaggagtaatcttcttgga

SEQ ID NO: 1221310 - DNA, 25 bp, Homo sapien
cggccttctcccattccttctcccg

SEQ ID NO: 1221311 - DNA, 25 bp, Homo sapien
gccttctcccattccttctcccgga

SEQ ID NO: 1221312 - DNA, 25 bp, Homo sapien
cacggccttctcccattccttctcc

SEQ ID NO: 1221313 - DNA, 25 bp, Homo sapien
ctacacggccttctcccattccttc

SEQ ID NO: 1221314 - DNA, 25 bp, Homo sapien
cctgtccagtagagtaaggttaact

SEQ ID NO: 1221315 - DNA, 25 bp, Homo sapien
catggccattgtcctgtccagtaga

SEQ ID NO: 1221316 - DNA, 25 bp, Homo sapien
ggcttcatggccattgtcctgtcca

SEQ ID NO: 1221317 - DNA, 25 bp, Homo sapien
cattgtcctgtccagtagagtaagg

SEQ ID NO: 1221318 - DNA, 25 bp, Homo sapien
tgtctatgtgccaactccgcaggca

SEQ ID NO: 1221319 - DNA, 25 bp, Homo sapien
aactagggctttgacggtgaacgtg

SEQ ID NO: 1221320 - DNA, 25 bp, Homo sapien
agccttggtacaggtgctgcccagg

SEQ ID NO: 1221321 - DNA, 25 bp, Homo sapien
catcagactccaggtgtctatgtgc

SEQ ID NO: 1221322 - DNA, 25 bp, Homo sapien
tctctcctatgagaccccagctcca

SEQ ID NO: 1221323 - DNA, 25 bp, Homo sapien
tgcggaagtgctgtgacttatacat

SEQ ID NO: 1221324 - DNA, 25 bp, Homo sapien
tcttggtattcactgcggaagtgct

SEQ ID NO: 1221325 - DNA, 25 bp, Homo sapien
gctccatgaggagagacgccatata

SEQ ID NO: 1221326 - DNA, 25 bp, Homo sapien
cactgctgaacatttgctccctcat

SEQ ID NO: 1221327 - DNA, 25 bp, Homo sapien
taccatccatgccactgctgaacat

SEQ ID NO: 1221328 - DNA, 25 bp, Homo sapien
ccatgccactgctgaacatttgctc

SEQ ID NO: 1221329 - DNA, 25 bp, Homo sapien
tctgcctaccatccatgccactgct

SEQ ID NO: 1221330 - DNA, 25 bp, Homo sapien
taagtatgaggaacaggtttttgca

SEQ ID NO: 1221331 - DNA, 25 bp, Homo sapien
tgtctactggcccacatttgtggga

SEQ ID NO: 1221332 - DNA, 25 bp, Homo sapien
ttttgcagaggctaccgctctgttt

SEQ ID NO: 1221333 - DNA, 25 bp, Homo sapien
gaggctaccgctctgttttgcccca

SEQ ID NO: 1221334 - DNA, 25 bp, Homo sapien
taggatattgaactaccttggcttc

SEQ ID NO: 1221335 - DNA, 25 bp, Homo sapien
tcactggatcttacagggggccttg

SEQ ID NO: 1221336 - DNA, 25 bp, Homo sapien
tggtattaataggatattgaactac

SEQ ID NO: 1221337 - DNA, 25 bp, Homo sapien
agttcactggatcttacagggggcc

SEQ ID NO: 1221338 - DNA, 25 bp, Homo sapien
tcaggagtcatcactttccaaaggc

SEQ ID NO: 1221339 - DNA, 25 bp, Homo sapien
agtcatcactttccaaaggctggca

SEQ ID NO: 1221340 - DNA, 25 bp, Homo sapien
caggagtcatcactttccaaaggct

SEQ ID NO: 1221341 - DNA, 25 bp, Homo sapien
ggagtcatcactttccaaaggctgg

SEQ ID NO: 1221342 - DNA, 25 bp, Homo sapien
gctggtgcaaccgattcattgcatt

SEQ ID NO: 1221343 - DNA, 25 bp, Homo sapien
ccgattcattgcatttatgaagtgc

SEQ ID NO: 1221344 - DNA, 25 bp, Homo sapien
tatgaagtgctgttttgcgtgttcc

SEQ ID NO: 1221345 - DNA, 25 bp, Homo sapien
tgttttgcgtgttcccctctaagag

SEQ ID NO: 1221346 - DNA, 25 bp, Homo sapien
tctagttttagaagtatactctgtt

SEQ ID NO: 1221347 - DNA, 25 bp, Homo sapien
tttgattaaagcaggtttcacatgg

SEQ ID NO: 1221348 - DNA, 25 bp, Homo sapien
cacatggttgatttgccgtttttcc

SEQ ID NO: 1221349 - DNA, 25 bp, Homo sapien
tggcttggcaatcttttcctcactg

SEQ ID NO: 1221350 - DNA, 25 bp, Homo sapien
tttgcatctgagtggatttttaagg

SEQ ID NO: 1221351 - DNA, 25 bp, Homo sapien
ggcatttgcatctgagtggattttt

SEQ ID NO: 1221352 - DNA, 25 bp, Homo sapien
catttgcatctgagtggatttttaa

SEQ ID NO: 1221353 - DNA, 25 bp, Homo sapien
gcatttgcatctgagtggattttta

SEQ ID NO: 1221354 - DNA, 25 bp, Homo sapien
ccagtgaagccaatttggtggcaag

SEQ ID NO: 1221355 - DNA, 25 bp, Homo sapien
gacagctgatactcctgagagatgg

SEQ ID NO: 1221356 - DNA, 25 bp, Homo sapien
tgagcactctgggaccagtgtcaaa

SEQ ID NO: 1221357 - DNA, 25 bp, Homo sapien
tcttgaggctgcaggtactggcgac

SEQ ID NO: 1221358 - DNA, 25 bp, Homo sapien
caaggtgggcaatatggctgtgact

SEQ ID NO: 1221359 - DNA, 25 bp, Homo sapien
gtagtggccgaaccagtgcatggcc

SEQ ID NO: 1221360 - DNA, 25 bp, Homo sapien
gacgaccgcttcatggtacattgaa

SEQ ID NO: 1221361 - DNA, 25 bp, Homo sapien
ctgtgactgtaggttgtaagtgtgc

SEQ ID NO: 1221362 - DNA, 25 bp, Homo sapien
aagtttgctcggctgacaagagcac

SEQ ID NO: 1221363 - DNA, 25 bp, Homo sapien
cagctggctccaagcgtgcaaaaag

SEQ ID NO: 1221364 - DNA, 25 bp, Homo sapien
tttgctcggctgacaagagcactga

SEQ ID NO: 1221365 - DNA, 25 bp, Homo sapien
ccaagcgtgcaaaaaggcgagaatg

SEQ ID NO: 1221366 - DNA, 25 bp, Homo sapien
catcctttttatgagctaggtaggc

SEQ ID NO: 1221367 - DNA, 25 bp, Homo sapien
atcctttttatgagctaggtaggcc

SEQ ID NO: 1221368 - DNA, 25 bp, Homo sapien
taggtgcctgcattcgatgctcatg

SEQ ID NO: 1221369 - DNA, 25 bp, Homo sapien
tgcctgcattcgatgctcatgaaac

SEQ ID NO: 1221370 - DNA, 25 bp, Homo sapien
aggtgcctgcattcgatgctcatga

SEQ ID NO: 1221371 - DNA, 25 bp, Homo sapien
ggtgcctgcattcgatgctcatgaa

SEQ ID NO: 1221372 - DNA, 25 bp, Homo sapien
ggctctgtggttgatttttcagctc

SEQ ID NO: 1221373 - DNA, 25 bp, Homo sapien
gctctgtggttgatttttcagctct

SEQ ID NO: 1221374 - DNA, 25 bp, Homo sapien
tttcagctctgctggagacctctgc

SEQ ID NO: 1221375 - DNA, 25 bp, Homo sapien
gctggagacctctgctccttgtggt

SEQ ID NO: 1221376 - DNA, 25 bp, Homo sapien
tctgagagatttgcactggccatcc

SEQ ID NO: 1221377 - DNA, 25 bp, Homo sapien
aaagctttcacactggatttgttgc

SEQ ID NO: 1221378 - DNA, 25 bp, Homo sapien
cacaagcccaagagggttgttacca

SEQ ID NO: 1221379 - DNA, 25 bp, Homo sapien
tactgttcgcttggtggtctgtgcc

SEQ ID NO: 1221380 - DNA, 25 bp, Homo sapien
cattgcttctaagatggtgtgtggg

SEQ ID NO: 1221381 - DNA, 25 bp, Homo sapien
gcctcagagccctggatggagagcc

SEQ ID NO: 1221382 - DNA, 25 bp, Homo sapien
ggctccagtccacagctggcgaact

SEQ ID NO: 1221383 - DNA, 25 bp, Homo sapien
ggtggaaacaagtggcccttgcata

SEQ ID NO: 1221384 - DNA, 25 bp, Homo sapien
taaagaagagaaacggccttccatc

SEQ ID NO: 1221385 - DNA, 25 bp, Homo sapien
tcttcccttaaagcaacgatgtaga

SEQ ID NO: 1221386 - DNA, 25 bp, Homo sapien
agagaaacggccttccatctccttt

SEQ ID NO: 1221387 - DNA, 25 bp, Homo sapien
cccttaaagcaacgatgtagacatc

SEQ ID NO: 1221388 - DNA, 25 bp, Homo sapien
aacagaggaatctatgacggaggcc

SEQ ID NO: 1221389 - DNA, 25 bp, Homo sapien
tgtgcccaatactgtgctaacaagt

SEQ ID NO: 1221390 - DNA, 25 bp, Homo sapien
gacggaggccaacatgctttgtaaa

SEQ ID NO: 1221391 - DNA, 25 bp, Homo sapien
gcaaaggctagcttacggttcagtt

SEQ ID NO: 1221392 - DNA, 25 bp, Homo sapien
cagctgctgagcaaagtactgggaa

SEQ ID NO: 1221393 - DNA, 25 bp, Homo sapien
tatctccaaggatgcgtgacagctg

SEQ ID NO: 1221394 - DNA, 25 bp, Homo sapien
tgcaactgaaaagtccgaggtgtcg

SEQ ID NO: 1221395 - DNA, 25 bp, Homo sapien
cagaatgggaggatccggctgcctc

SEQ ID NO: 1221396 - DNA, 25 bp, Homo sapien
tgttcccagagcctcacaggtcccg

SEQ ID NO: 1221397 - DNA, 25 bp, Homo sapien
tcccagagcctcacaggtcccgggg

SEQ ID NO: 1221398 - DNA, 25 bp, Homo sapien
aggaaggcaagaaggtgttcccaga

SEQ ID NO: 1221399 - DNA, 25 bp, Homo sapien
cagagcctcacaggtcccgggggcc

SEQ ID NO: 1221400 - DNA, 25 bp, Homo sapien
ctatagctggacaatcatttgtgtg

SEQ ID NO: 1221401 - DNA, 25 bp, Homo sapien
caatcatttgtgtggttgaggttat

SEQ ID NO: 1221402 - DNA, 25 bp, Homo sapien
catttgtgtggttgaggttataaaa

SEQ ID NO: 1221403 - DNA, 25 bp, Homo sapien
gctggacaatcatttgtgtggttga

SEQ ID NO: 1221404 - DNA, 25 bp, Homo sapien
tcaagatgatttatcagagtacttt

SEQ ID NO: 1221405 - DNA, 25 bp, Homo sapien
agatgatttatcagagtactttttt

SEQ ID NO: 1221406 - DNA, 25 bp, Homo sapien
atcaagatgatttatcagagtactt

SEQ ID NO: 1221407 - DNA, 25 bp, Homo sapien
caagatgatttatcagagtactttt

SEQ ID NO: 1221408 - DNA, 25 bp, Homo sapien
tcccctagaacatgcccgtaaaatc

SEQ ID NO: 1221409 - DNA, 25 bp, Homo sapien
acagaatcccctagaacatgcccgt

SEQ ID NO: 1221410 - DNA, 25 bp, Homo sapien
tagaacatgcccgtaaaatccacca

SEQ ID NO: 1221411 - DNA, 25 bp, Homo sapien
gaacatgcccgtaaaatccaccaac

SEQ ID NO: 1221412 - DNA, 25 bp, Homo sapien
tgcagcaactgagatatgtaattct

SEQ ID NO: 1221413 - DNA, 25 bp, Homo sapien
ttttagtgggttgtgactctgcagc

SEQ ID NO: 1221414 - DNA, 25 bp, Homo sapien
gtctctgtagggagcaccttttgca

SEQ ID NO: 1221415 - DNA, 25 bp, Homo sapien
cttctgggctcaggttttagtgggt

SEQ ID NO: 1221416 - DNA, 25 bp, Homo sapien
agagagcagcagcgaacactgcagc

SEQ ID NO: 1221417 - DNA, 25 bp, Homo sapien
cttgagcagtattgcaaaggtcaga

SEQ ID NO: 1221418 - DNA, 25 bp, Homo sapien
gagcagcagcgaacactgcagcctc

SEQ ID NO: 1221419 - DNA, 25 bp, Homo sapien
tgagcagtattgcaaaggtcagaga

SEQ ID NO: 1221420 - DNA, 25 bp, Homo sapien
ttggccaattttccagagtctttct

SEQ ID NO: 1221421 - DNA, 25 bp, Homo sapien
agactaagctattgagtttgtccca

SEQ ID NO: 1221422 - DNA, 25 bp, Homo sapien
ctaagctattgagtttgtcccaaac

SEQ ID NO: 1221423 - DNA, 25 bp, Homo sapien
ttcttggccaattttccagagtctt

SEQ ID NO: 1221424 - DNA, 25 bp, Homo sapien
ccaaatgtacagttggttggacata

SEQ ID NO: 1221425 - DNA, 25 bp, Homo sapien
caaatgtacagttggttggacatat

SEQ ID NO: 1221426 - DNA, 25 bp, Homo sapien
tgagtcagagaccacatgggaggaa

SEQ ID NO: 1221427 - DNA, 25 bp, Homo sapien
cccaagcagggtggtaaggtcacca

SEQ ID NO: 1221428 - DNA, 25 bp, Homo sapien
ggtagcgaggacattcatgaggagg

SEQ ID NO: 1221429 - DNA, 25 bp, Homo sapien
gcaggataaagagggcctctaggca

SEQ ID NO: 1221430 - DNA, 25 bp, Homo sapien
aagtttgagttcatcaattcagggg

SEQ ID NO: 1221431 - DNA, 25 bp, Homo sapien
gaagtttgagttcatcaattcaggg

SEQ ID NO: 1221432 - DNA, 25 bp, Homo sapien
agaagtttgagttcatcaattcagg

SEQ ID NO: 1221433 - DNA, 25 bp, Homo sapien
ggcttgtagctcagtcaccaccgca

SEQ ID NO: 1221434 - DNA, 25 bp, Homo sapien
tcagcacccgcgcagcatcgggggt

SEQ ID NO: 1221435 - DNA, 25 bp, Homo sapien
gtcccggccggagcgggctcagcac

SEQ ID NO: 1221436 - DNA, 25 bp, Homo sapien
ggcgcacacccgccgccaggcttgt

SEQ ID NO: 1221437 - DNA, 25 bp, Homo sapien
tggtcccaggagctccgttgcacgc

SEQ ID NO: 1221438 - DNA, 25 bp, Homo sapien
gcccagcagggcgtcctgttggtct

SEQ ID NO: 1221439 - DNA, 25 bp, Homo sapien
ccagcagggcgtcctgttggtcttg

SEQ ID NO: 1221440 - DNA, 25 bp, Homo sapien
aggagctccgttgcacgctctggcc

SEQ ID NO: 1221441 - DNA, 25 bp, Homo sapien
gatgtacaccgagtgatcaacattg

SEQ ID NO: 1221442 - DNA, 25 bp, Homo sapien
ccaggatgtacaccgagtgatcaac

SEQ ID NO: 1221443 - DNA, 25 bp, Homo sapien
ctccaggatgtacaccgagtgatca

SEQ ID NO: 1221444 - DNA, 25 bp, Homo sapien
aggatgtacaccgagtgatcaacat

SEQ ID NO: 1221445 - DNA, 25 bp, Homo sapien
tttcggtccggccactgttgtcaga

SEQ ID NO: 1221446 - DNA, 25 bp, Homo sapien
ccggccactgttgtcagagttcaca

SEQ ID NO: 1221447 - DNA, 25 bp, Homo sapien
gcggatttcggtccggccactgttg

SEQ ID NO: 1221448 - DNA, 25 bp, Homo sapien
ccggcggatttcggtccggccactg

SEQ ID NO: 1221449 - DNA, 25 bp, Homo sapien
ggtcacattgcttttgaaccaggca

SEQ ID NO: 1221450 - DNA, 25 bp, Homo sapien
tcgccttgcagctttgccaagatat

SEQ ID NO: 1221451 - DNA, 25 bp, Homo sapien
tggtcacattgcttttgaaccaggc

SEQ ID NO: 1221452 - DNA, 25 bp, Homo sapien
cacattgcttttgaaccaggcaaga

SEQ ID NO: 1221453 - DNA, 25 bp, Homo sapien
ccttctctgtagctgccagtgctgt

SEQ ID NO: 1221454 - DNA, 25 bp, Homo sapien
cttccttggctgtctcaacaagtgt

SEQ ID NO: 1221455 - DNA, 25 bp, Homo sapien
tgtctcaacaagtgttttggaaggg

SEQ ID NO: 1221456 - DNA, 25 bp, Homo sapien
tgccttgctggcgaggtccttggcc

SEQ ID NO: 1221457 - DNA, 25 bp, Homo sapien
ccagacagtagatagggctggaagt

SEQ ID NO: 1221458 - DNA, 25 bp, Homo sapien
caccacccagacagtagatagggct

SEQ ID NO: 1221459 - DNA, 25 bp, Homo sapien
accacccagacagtagatagggctg

SEQ ID NO: 1221460 - DNA, 25 bp, Homo sapien
cacccagacagtagatagggctgga

SEQ ID NO: 1221461 - DNA, 25 bp, Homo sapien
gttattctggttttggtcataacaa

SEQ ID NO: 1221462 - DNA, 25 bp, Homo sapien
caggcgtcagggtgaaggcggagat

SEQ ID NO: 1221463 - DNA, 25 bp, Homo sapien
tgttaatatggagccgccataaccg

SEQ ID NO: 1221464 - DNA, 25 bp, Homo sapien
agatggcttagagcgcgggcgggag

SEQ ID NO: 1221465 - DNA, 25 bp, Homo sapien
aggaggctgttaatatggagccgcc

SEQ ID NO: 1221466 - DNA, 25 bp, Homo sapien
ctgagtagtgcagcccgccgttggt

SEQ ID NO: 1221467 - DNA, 25 bp, Homo sapien
tggccgatcggttcttccccagtaa

SEQ ID NO: 1221468 - DNA, 25 bp, Homo sapien
cgtgctcgtcgtcgctgctgcagcc

SEQ ID NO: 1221469 - DNA, 25 bp, Homo sapien
cgccgttggtggacgaggcgccgct

SEQ ID NO: 1221470 - DNA, 25 bp, Homo sapien
aaataaaaatcgctagatggaggaa

SEQ ID NO: 1221471 - DNA, 25 bp, Homo sapien
aaaatcgctagatggaggaaagaag

SEQ ID NO: 1221472 - DNA, 25 bp, Homo sapien
taaaaatcgctagatggaggaaaga

SEQ ID NO: 1221473 - DNA, 25 bp, Homo sapien
aaaataaaaatcgctagatggagga

SEQ ID NO: 1221474 - DNA, 25 bp, Homo sapien
gcaaagcaatgccaaaaaatatata

SEQ ID NO: 1221475 - DNA, 25 bp, Homo sapien
tgcaaagcaatgccaaaaaatatat

SEQ ID NO: 1221476 - DNA, 25 bp, Homo sapien
ctgcaaagcaatgccaaaaaatata

SEQ ID NO: 1221477 - DNA, 25 bp, Homo sapien
caaattcagggatccgagcttggta

SEQ ID NO: 1221478 - DNA, 25 bp, Homo sapien
tggatcaaattcagggatccgagct

SEQ ID NO: 1221479 - DNA, 25 bp, Homo sapien
cttggtattcggctccgactctcat

SEQ ID NO: 1221480 - DNA, 25 bp, Homo sapien
gatccgagcttggtattcggctccg

SEQ ID NO: 1221481 - DNA, 25 bp, Homo sapien
agcgaggtgtgcctgccgctggcgt

SEQ ID NO: 1221482 - DNA, 25 bp, Homo sapien
ctggcgagcgaggtgtgcctgccgc

SEQ ID NO: 1221483 - DNA, 25 bp, Homo sapien
agagctgccgcgaccaaagctacac

SEQ ID NO: 1221484 - DNA, 25 bp, Homo sapien
ctgcactccgcagagctgccgcgac

SEQ ID NO: 1221485 - DNA, 25 bp, Homo sapien
gctggtcggggagaaaatgtctcct

SEQ ID NO: 1221486 - DNA, 25 bp, Homo sapien
ggagcccgcaagctgggttggcaga

SEQ ID NO: 1221487 - DNA, 25 bp, Homo sapien
tggtcggggagaaaatgtctccttg

SEQ ID NO: 1221488 - DNA, 25 bp, Homo sapien
agggagcccgcaagctgggttggca

SEQ ID NO: 1221489 - DNA, 25 bp, Homo sapien
ggaactctcgcccaatccctgcaca

SEQ ID NO: 1221490 - DNA, 25 bp, Homo sapien
tgcacaggctgaaatctcgtgaccg

SEQ ID NO: 1221491 - DNA, 25 bp, Homo sapien
ggcgcctccatatgcggaactctcg

SEQ ID NO: 1221492 - DNA, 25 bp, Homo sapien
cgagaggctccagcaagggcgcctc

SEQ ID NO: 1221493 - DNA, 25 bp, Homo sapien
tctcaggcagggtggggagaaggaa

SEQ ID NO: 1221494 - DNA, 25 bp, Homo sapien
ttaactgagaagggtctcaggcagg

SEQ ID NO: 1221495 - DNA, 25 bp, Homo sapien
ggtctcaggcagggtggggagaagg

SEQ ID NO: 1221496 - DNA, 25 bp, Homo sapien
tcaggcagggtggggagaaggaaac

SEQ ID NO: 1221497 - DNA, 25 bp, Homo sapien
tgtctgacacaaacgcaatattatg

SEQ ID NO: 1221498 - DNA, 25 bp, Homo sapien
tgggtccctttcaaagtctgtccaa

SEQ ID NO: 1221499 - DNA, 25 bp, Homo sapien
tctaacatagaaatccaatgtctga

SEQ ID NO: 1221500 - DNA, 25 bp, Homo sapien
atgggcactgggcaaaaattgacaa

SEQ ID NO: 1221501 - DNA, 25 bp, Homo sapien
tgtccttaggtttagcatgcttctg

SEQ ID NO: 1221502 - DNA, 25 bp, Homo sapien
ttcacacaacagcacaacacttata

SEQ ID NO: 1221503 - DNA, 25 bp, Homo sapien
taagattagcttttaccagataaga

SEQ ID NO: 1221504 - DNA, 25 bp, Homo sapien
aaggcacgcggatgacctgagacca

SEQ ID NO: 1221505 - DNA, 25 bp, Homo sapien
ccaaggagggcggatggcttgagcc

SEQ ID NO: 1221506 - DNA, 25 bp, Homo sapien
ggagtttgagaccagcctgggaaac

SEQ ID NO: 1221507 - DNA, 25 bp, Homo sapien
ggaaacatagcaagaccttgtctct

SEQ ID NO: 1221508 - DNA, 25 bp, Homo sapien
aaggagggcggatggcttgagcccc

SEQ ID NO: 1221509 - DNA, 25 bp, Homo sapien
ccattaatagccagaattccaaaat

SEQ ID NO: 1221510 - DNA, 25 bp, Homo sapien
tatgtggtaccgataattaccatta

SEQ ID NO: 1221511 - DNA, 25 bp, Homo sapien
ccgataattaccattaatagccaga

SEQ ID NO: 1221512 - DNA, 25 bp, Homo sapien
aatgacttttatgtggtaccgataa

SEQ ID NO: 1221513 - DNA, 25 bp, Homo sapien
caagttacgtgcctgtagattctat

SEQ ID NO: 1221514 - DNA, 25 bp, Homo sapien
gaatgaaggcctgagatagctatgc

SEQ ID NO: 1221515 - DNA, 25 bp, Homo sapien
ttaagaaacaatagcatgaatgaag

SEQ ID NO: 1221516 - DNA, 25 bp, Homo sapien
tatgccagagccaagttacgtgcct

SEQ ID NO: 1221517 - DNA, 25 bp, Homo sapien
aatctgaaagtctacttctaacctg

SEQ ID NO: 1221518 - DNA, 25 bp, Homo sapien
atctgaaagtctacttctaacctgg

SEQ ID NO: 1221519 - DNA, 25 bp, Homo sapien
ataatctgaaagtctacttctaacc

SEQ ID NO: 1221520 - DNA, 25 bp, Homo sapien
taatctgaaagtctacttctaacct

SEQ ID NO: 1221521 - DNA, 25 bp, Homo sapien
tatttcttgctaagggtctgccagc

SEQ ID NO: 1221522 - DNA, 25 bp, Homo sapien
gacttttaaacgagagagaatgcct

SEQ ID NO: 1221523 - DNA, 25 bp, Homo sapien
ctaaatgggccaagattgctgtaat

SEQ ID NO: 1221524 - DNA, 25 bp, Homo sapien
gaaattttgcaaatgccggtttatc

SEQ ID NO: 1221525 - DNA, 25 bp, Homo sapien
agataattactttgaatatgatgga

SEQ ID NO: 1221526 - DNA, 25 bp, Homo sapien
attactttgaatatgatggatttta

SEQ ID NO: 1221527 - DNA, 25 bp, Homo sapien
ttacactgaaaataagtagaaacaa

SEQ ID NO: 1221528 - DNA, 25 bp, Homo sapien
acactgaaaataagtagaaacaaag

SEQ ID NO: 1221529 - DNA, 25 bp, Homo sapien
gtctttatctgtgtactttgtagca

SEQ ID NO: 1221530 - DNA, 25 bp, Homo sapien
ccctccattgtctttatctgtgtac

SEQ ID NO: 1221531 - DNA, 25 bp, Homo sapien
ccattgtctttatctgtgtactttg

SEQ ID NO: 1221532 - DNA, 25 bp, Homo sapien
tctttatctgtgtactttgtagcac

SEQ ID NO: 1221533 - DNA, 25 bp, Homo sapien
tgtgatatggagaccatacaagcat

SEQ ID NO: 1221534 - DNA, 25 bp, Homo sapien
tctgggatactgtgatatggagacc

SEQ ID NO: 1221535 - DNA, 25 bp, Homo sapien
tgggatactgtgatatggagaccat

SEQ ID NO: 1221536 - DNA, 25 bp, Homo sapien
tactgtgatatggagaccatacaag

SEQ ID NO: 1221537 - DNA, 25 bp, Homo sapien
tttgaattggctgataaactcctgc

SEQ ID NO: 1221538 - DNA, 25 bp, Homo sapien
gacattaacattcaacttcagaaaa

SEQ ID NO: 1221539 - DNA, 25 bp, Homo sapien
gataaactcctgctgacattaacat

SEQ ID NO: 1221540 - DNA, 25 bp, Homo sapien
atattttgaattggctgataaactc

SEQ ID NO: 1221541 - DNA, 25 bp, Homo sapien
gatcaacccactatcttccaaaagg

SEQ ID NO: 1221542 - DNA, 25 bp, Homo sapien
gtctttaccgctccatatactgagg

SEQ ID NO: 1221543 - DNA, 25 bp, Homo sapien
tcttcatgggcctgacacaaattgg

SEQ ID NO: 1221544 - DNA, 25 bp, Homo sapien
gaaaagcctgggcagatgtctacat

SEQ ID NO: 1221545 - DNA, 25 bp, Homo sapien
aagtgcatggtcaatgatccagaag

SEQ ID NO: 1221546 - DNA, 25 bp, Homo sapien
cagaaggtctccgtccagaaatgga

SEQ ID NO: 1221547 - DNA, 25 bp, Homo sapien
ggtctccgtccagaaatggagagca

SEQ ID NO: 1221548 - DNA, 25 bp, Homo sapien
catgattcaagaagtgcatggtcaa

SEQ ID NO: 1221549 - DNA, 25 bp, Homo sapien
gatcaggtccgctacatcacattga

SEQ ID NO: 1221550 - DNA, 25 bp, Homo sapien
gctagaattaactgttcagtgtcgt

SEQ ID NO: 1221551 - DNA, 25 bp, Homo sapien
cgtttcctatatctgatgtgccgca

SEQ ID NO: 1221552 - DNA, 25 bp, Homo sapien
agtgttgttacctgcacgtttccta

SEQ ID NO: 1221553 - DNA, 25 bp, Homo sapien
tttctgttaggaatgcttcaagggc

SEQ ID NO: 1221554 - DNA, 25 bp, Homo sapien
gggcacacaatttctagattaccag

SEQ ID NO: 1221555 - DNA, 25 bp, Homo sapien
tgttaggaatgcttcaagggcacac

SEQ ID NO: 1221556 - DNA, 25 bp, Homo sapien
ccagctagacctttagctggtgttt

SEQ ID NO: 1221557 - DNA, 25 bp, Homo sapien
tgtctgtaatgaggattgaacctgg

SEQ ID NO: 1221558 - DNA, 25 bp, Homo sapien
ttccgcatgaacactacactaccag

SEQ ID NO: 1221559 - DNA, 25 bp, Homo sapien
gattccaatgcacacccagggttga

SEQ ID NO: 1221560 - DNA, 25 bp, Homo sapien
gaactaagccagcaaaattcaatga

SEQ ID NO: 1221561 - DNA, 25 bp, Homo sapien
tgctgagaagtctgacacattcacc

SEQ ID NO: 1221562 - DNA, 25 bp, Homo sapien
tatgcattacaatcagtgtgggagc

SEQ ID NO: 1221563 - DNA, 25 bp, Homo sapien
gtctacctgggtttgattatcggct

SEQ ID NO: 1221564 - DNA, 25 bp, Homo sapien
tgattctggaacagctagtctacct

SEQ ID NO: 1221565 - DNA, 25 bp, Homo sapien
tataacttatctctacgactacaca

SEQ ID NO: 1221566 - DNA, 25 bp, Homo sapien
gaaaaagaccaatctatgggtagcc

SEQ ID NO: 1221567 - DNA, 25 bp, Homo sapien
ggcacctcccatgaaatgttacaaa

SEQ ID NO: 1221568 - DNA, 25 bp, Homo sapien
tatcatagcaagatcagatgctcac

SEQ ID NO: 1221569 - DNA, 25 bp, Homo sapien
attgtagccatgcttttcctttgca

SEQ ID NO: 1221570 - DNA, 25 bp, Homo sapien
tgtagccatgcttttcctttgcaat

SEQ ID NO: 1221571 - DNA, 25 bp, Homo sapien
tcctttgcaattgcaatgtattcat

SEQ ID NO: 1221572 - DNA, 25 bp, Homo sapien
ccacattgtagccatgcttttcctt

SEQ ID NO: 1221573 - DNA, 25 bp, Homo sapien
attagggagatcagcaagggacttc

SEQ ID NO: 1221574 - DNA, 25 bp, Homo sapien
ctcatccggaaagggagtgaaatta

SEQ ID NO: 1221575 - DNA, 25 bp, Homo sapien
ctgaatcctgtgaaagctctttcca

SEQ ID NO: 1221576 - DNA, 25 bp, Homo sapien
tccactgtccactcatccggaaagg

SEQ ID NO: 1221577 - DNA, 25 bp, Homo sapien
catgtaagagtggttgcagaaaaca

SEQ ID NO: 1221578 - DNA, 25 bp, Homo sapien
aatagtagcttaagatatcattcac

SEQ ID NO: 1221579 - DNA, 25 bp, Homo sapien
catatgaaccacagtaagattaaaa

SEQ ID NO: 1221580 - DNA, 25 bp, Homo sapien
tataatgcaatagcacataactgtc

SEQ ID NO: 1221581 - DNA, 25 bp, Homo sapien
gagcctggcgatccatcaaacttgt

SEQ ID NO: 1221582 - DNA, 25 bp, Homo sapien
tgtcaccctgattatgtctattagc

SEQ ID NO: 1221583 - DNA, 25 bp, Homo sapien
tatgtctattagctagtttacgagc

SEQ ID NO: 1221584 - DNA, 25 bp, Homo sapien
catcaaacttgtcctagagcgagtt

SEQ ID NO: 1221585 - DNA, 25 bp, Homo sapien
cccatccattggatgtgtttcttct

SEQ ID NO: 1221586 - DNA, 25 bp, Homo sapien
gatcattgggaccacgtttctggga

SEQ ID NO: 1221587 - DNA, 25 bp, Homo sapien
gtcactaaactgaatgaggtcacat

SEQ ID NO: 1221588 - DNA, 25 bp, Homo sapien
aagagcttaaggtgatgaatggccc

SEQ ID NO: 1221589 - DNA, 25 bp, Homo sapien
gggttctaggtatgactgtattgct

SEQ ID NO: 1221590 - DNA, 25 bp, Homo sapien
cacttagaacgctgagaatgatggc

SEQ ID NO: 1221591 - DNA, 25 bp, Homo sapien
gcccttaggtggacggcacttagaa

SEQ ID NO: 1221592 - DNA, 25 bp, Homo sapien
tcttgctagtttggacaggttgttc

SEQ ID NO: 1221593 - DNA, 25 bp, Homo sapien
gaatgatggcgatgttgtaaactct

SEQ ID NO: 1221594 - DNA, 25 bp, Homo sapien
tggtgttggctgcattgggactaca

SEQ ID NO: 1221595 - DNA, 25 bp, Homo sapien
tgttggctgcattgggactacagga

SEQ ID NO: 1221596 - DNA, 25 bp, Homo sapien
ttgcctcaggatggtgttggctgca

SEQ ID NO: 1221597 - DNA, 25 bp, Homo sapien
ccatgtccagttgcctcaggatggt

SEQ ID NO: 1221598 - DNA, 25 bp, Homo sapien
aagagctcctctaaggttacacagg

SEQ ID NO: 1221599 - DNA, 25 bp, Homo sapien
tatctgattatgatgatgctgccct

SEQ ID NO: 1221600 - DNA, 25 bp, Homo sapien
tatagccagggttagaacttaacag

SEQ ID NO: 1221601 - DNA, 25 bp, Homo sapien
tgatgatgaagacaacaaccatcac

SEQ ID NO: 1221602 - DNA, 25 bp, Homo sapien
tgtcagcccataaatgatcttcgga

SEQ ID NO: 1221603 - DNA, 25 bp, Homo sapien
gatagagaatcttgatcccacacta

SEQ ID NO: 1221604 - DNA, 25 bp, Homo sapien
cagtagaactggaataccatacggg

SEQ ID NO: 1221605 - DNA, 25 bp, Homo sapien
caaatgtggcctatgttagagaacc

SEQ ID NO: 1221606 - DNA, 25 bp, Homo sapien
atggaagtgggagtcaaaatggttg

SEQ ID NO: 1221607 - DNA, 25 bp, Homo sapien
ttatggaagtgggagtcaaaatggt

SEQ ID NO: 1221608 - DNA, 25 bp, Homo sapien
cttatggaagtgggagtcaaaatgg

SEQ ID NO: 1221609 - DNA, 25 bp, Homo sapien
tatggaagtgggagtcaaaatggtt

SEQ ID NO: 1221610 - DNA, 25 bp, Homo sapien
agttttacacaatctaaatgatttg

SEQ ID NO: 1221611 - DNA, 25 bp, Homo sapien
cacagttttacacaatctaaatgat

SEQ ID NO: 1221612 - DNA, 25 bp, Homo sapien
cacataagacaggaacctaataaaa

SEQ ID NO: 1221613 - DNA, 25 bp, Homo sapien
aaatgctacaacaaagacagtactt

SEQ ID NO: 1221614 - DNA, 25 bp, Homo sapien
tgtttacttgcttagcattctgaac

SEQ ID NO: 1221615 - DNA, 25 bp, Homo sapien
actgtttacttgcttagcattctga

SEQ ID NO: 1221616 - DNA, 25 bp, Homo sapien
gtgcactgtttacttgcttagcatt

SEQ ID NO: 1221617 - DNA, 25 bp, Homo sapien
gcactgtttacttgcttagcattct

SEQ ID NO: 1221618 - DNA, 25 bp, Homo sapien
cacgcttagtgaattcggcattttc

SEQ ID NO: 1221619 - DNA, 25 bp, Homo sapien
tagaacgatctatgacacgcttagt

SEQ ID NO: 1221620 - DNA, 25 bp, Homo sapien
ggaatctaaaactgcgtggtagctg

SEQ ID NO: 1221621 - DNA, 25 bp, Homo sapien
ccataatgaaaggatgtcgtctacc

SEQ ID NO: 1221622 - DNA, 25 bp, Homo sapien
cagtgccaatgctaacctttataag

SEQ ID NO: 1221623 - DNA, 25 bp, Homo sapien
ggcagctccgtggaaaaatgcagaa

SEQ ID NO: 1221624 - DNA, 25 bp, Homo sapien
acctttataagaggcagctccgtgg

SEQ ID NO: 1221625 - DNA, 25 bp, Homo sapien
agttaaaagttgtggaatgtggtca

SEQ ID NO: 1221626 - DNA, 25 bp, Homo sapien
tagtagacagtggatacgcctcaag

SEQ ID NO: 1221627 - DNA, 25 bp, Homo sapien
taagagtttctatagcacacagagg

SEQ ID NO: 1221628 - DNA, 25 bp, Homo sapien
tacgataagggccatccacttttgg

SEQ ID NO: 1221629 - DNA, 25 bp, Homo sapien
caatctgatgctaccttggctgtgg

SEQ ID NO: 1221630 - DNA, 25 bp, Homo sapien
gaaataactacaccagcatgcaggg

SEQ ID NO: 1221631 - DNA, 25 bp, Homo sapien
gaaggaactgccaagataaagtggc

SEQ ID NO: 1221632 - DNA, 25 bp, Homo sapien
gacctttgacagtagatggacagaa

SEQ ID NO: 1221633 - DNA, 25 bp, Homo sapien
gagtggtaaatcaaggacctttgac

SEQ ID NO: 1221634 - DNA, 25 bp, Homo sapien
ttcctaatgaggatatgaagacaga

SEQ ID NO: 1221635 - DNA, 25 bp, Homo sapien
tacaactctgattcatgaagattcc

SEQ ID NO: 1221636 - DNA, 25 bp, Homo sapien
tgagttaccttttacccatgcagaa

SEQ ID NO: 1221637 - DNA, 25 bp, Homo sapien
tttgcaagaaggaacaacattcgca

SEQ ID NO: 1221638 - DNA, 25 bp, Homo sapien
ctgtggtccaacgggcattaatttt

SEQ ID NO: 1221639 - DNA, 25 bp, Homo sapien
cctctgtggtccaacgggcattaat

SEQ ID NO: 1221640 - DNA, 25 bp, Homo sapien
tcctctgtggtccaacgggcattaa

SEQ ID NO: 1221641 - DNA, 25 bp, Homo sapien
ctctgtggtccaacgggcattaatt

SEQ ID NO: 1221642 - DNA, 25 bp, Homo sapien
tgctgcataggccaaagcaagggct

SEQ ID NO: 1221643 - DNA, 25 bp, Homo sapien
caatcggaatgatgtctgcacagca

SEQ ID NO: 1221644 - DNA, 25 bp, Homo sapien
caggtttctaagcattcagtggtac

SEQ ID NO: 1221645 - DNA, 25 bp, Homo sapien
gcaagggctgacatcatcctgctgg

SEQ ID NO: 1221646 - DNA, 25 bp, Homo sapien
tagatacttagggttggaacacatg

SEQ ID NO: 1221647 - DNA, 25 bp, Homo sapien
tatttgatctgagcatggttcccct

SEQ ID NO: 1221648 - DNA, 25 bp, Homo sapien
ttaagccctacgaaaggaaatgatc

SEQ ID NO: 1221649 - DNA, 25 bp, Homo sapien
gtattaatgataccctacctggaga

SEQ ID NO: 1221650 - DNA, 25 bp, Homo sapien
ggtagaaaaggtagcaatagcagca

SEQ ID NO: 1221651 - DNA, 25 bp, Homo sapien
caaaagacgaaacatggtaagctgc

SEQ ID NO: 1221652 - DNA, 25 bp, Homo sapien
caataacatctagaaactccaggga

SEQ ID NO: 1221653 - DNA, 25 bp, Homo sapien
ccatttgggagcgtgtatttctttc

SEQ ID NO: 1221654 - DNA, 25 bp, Homo sapien
tgtttagctagaaaggatagcatgg

SEQ ID NO: 1221655 - DNA, 25 bp, Homo sapien
agccgagatactgacactgtgctcc

SEQ ID NO: 1221656 - DNA, 25 bp, Homo sapien
tgagccgagatactgacactgtgct

SEQ ID NO: 1221657 - DNA, 25 bp, Homo sapien
catggatagctacctttggtatgtt

SEQ ID NO: 1221658 - DNA, 25 bp, Homo sapien
caaaggttggtggaataaacaggca

SEQ ID NO: 1221659 - DNA, 25 bp, Homo sapien
gcatcagagctacccgagtttcagt

SEQ ID NO: 1221660 - DNA, 25 bp, Homo sapien
ttaaaagaatctccagtgaggcgtc

SEQ ID NO: 1221661 - DNA, 25 bp, Homo sapien
tctcacttctaggaaaagaggtcgt

SEQ ID NO: 1221662 - DNA, 25 bp, Homo sapien
gcactatcatgatgtaacaatccca

SEQ ID NO: 1221663 - DNA, 25 bp, Homo sapien
tcactaatgaaagagatgagaaagg

SEQ ID NO: 1221664 - DNA, 25 bp, Homo sapien
catgtatatgatcacagatgagaga

SEQ ID NO: 1221665 - DNA, 25 bp, Homo sapien
taccagaaaacagtaactcactaat

SEQ ID NO: 1221666 - DNA, 25 bp, Homo sapien
tattgtaaagcattgaattctttgt

SEQ ID NO: 1221667 - DNA, 25 bp, Homo sapien
ctcttgaactctcaaatacagtcca

SEQ ID NO: 1221668 - DNA, 25 bp, Homo sapien
tgaactctcaaatacagtccattta

SEQ ID NO: 1221669 - DNA, 25 bp, Homo sapien
tactcagttattttctccaatcctc

SEQ ID NO: 1221670 - DNA, 25 bp, Homo sapien
ctggaaggcaaagtaaataatacac

SEQ ID NO: 1221671 - DNA, 25 bp, Homo sapien
ctcctctaagttaaaccgacgcctg

SEQ ID NO: 1221672 - DNA, 25 bp, Homo sapien
caattacatctgcaatagcttgaaa

SEQ ID NO: 1221673 - DNA, 25 bp, Homo sapien
ttcacttggccaacagtcttgttgc

SEQ ID NO: 1221674 - DNA, 25 bp, Homo sapien
ccgacgcctgtagtttacaaagaag

SEQ ID NO: 1221675 - DNA, 25 bp, Homo sapien
tgctcttccctgatggcacattaga

SEQ ID NO: 1221676 - DNA, 25 bp, Homo sapien
tctcctcccctaaagtagaagcatc

SEQ ID NO: 1221677 - DNA, 25 bp, Homo sapien
cctaaagtagaagcatcaccattag

SEQ ID NO: 1221678 - DNA, 25 bp, Homo sapien
cttcatcagtgctcttccctgatgg

SEQ ID NO: 1221679 - DNA, 25 bp, Homo sapien
caatttagctagtcctcttgacaaa

SEQ ID NO: 1221680 - DNA, 25 bp, Homo sapien
cacgagagatgcaccactgaagaag

SEQ ID NO: 1221681 - DNA, 25 bp, Homo sapien
tgtcaacctttcatgctcaatttag

SEQ ID NO: 1221682 - DNA, 25 bp, Homo sapien
tctagaatcagaacttagcatgtca

SEQ ID NO: 1221683 - DNA, 25 bp, Homo sapien
tatgagatgtaagtcctaatgaact

SEQ ID NO: 1221684 - DNA, 25 bp, Homo sapien
gtcctaatgaacttaatacaatata

SEQ ID NO: 1221685 - DNA, 25 bp, Homo sapien
aaatacacgtatgagatgtaagtcc

SEQ ID NO: 1221686 - DNA, 25 bp, Homo sapien
ggaaacaaaaatacacgtatgagat

SEQ ID NO: 1221687 - DNA, 25 bp, Homo sapien
ggctggatgaaccgagcctgctgct

SEQ ID NO: 1221688 - DNA, 25 bp, Homo sapien
aggaggctgccggtgaagagccggg

SEQ ID NO: 1221689 - DNA, 25 bp, Homo sapien
ttagcagggcgaataagaggtggtg

SEQ ID NO: 1221690 - DNA, 25 bp, Homo sapien
gcagcaggcagtgttggacgaagaa

SEQ ID NO: 1221691 - DNA, 25 bp, Homo sapien
caccaaccgtggacaacaccggtct

SEQ ID NO: 1221692 - DNA, 25 bp, Homo sapien
tgttgaccaccaaccgtggacaaca

SEQ ID NO: 1221693 - DNA, 25 bp, Homo sapien
caaccgtggacaacaccggtcttgg

SEQ ID NO: 1221694 - DNA, 25 bp, Homo sapien
tcttgggtttagacggggtggcatg

SEQ ID NO: 1221695 - DNA, 25 bp, Homo sapien
tcaaaatcggaaatgctggctattc

SEQ ID NO: 1221696 - DNA, 25 bp, Homo sapien
ggtgctgaccaacttgactgacata

SEQ ID NO: 1221697 - DNA, 25 bp, Homo sapien
tttcaaatatgccagtacgtagggt

SEQ ID NO: 1221698 - DNA, 25 bp, Homo sapien
caggttggctgcaaggaatacacaa

SEQ ID NO: 1221699 - DNA, 25 bp, Homo sapien
atcctttgattaagcagcaagcata

SEQ ID NO: 1221700 - DNA, 25 bp, Homo sapien
aatcctttgattaagcagcaagcat

SEQ ID NO: 1221701 - DNA, 25 bp, Homo sapien
tcctttgattaagcagcaagcatat

SEQ ID NO: 1221702 - DNA, 25 bp, Homo sapien
cctttgattaagcagcaagcatatc

SEQ ID NO: 1221703 - DNA, 25 bp, Homo sapien
tcattatttcgaatttcacagtgaa

SEQ ID NO: 1221704 - DNA, 25 bp, Homo sapien
tcacagtgaagaggtactaaattcc

SEQ ID NO: 1221705 - DNA, 25 bp, Homo sapien
ataagatgtatccacagtgtggttt

SEQ ID NO: 1221706 - DNA, 25 bp, Homo sapien
ggtactaaattcctcatagaacatg

SEQ ID NO: 1221707 - DNA, 25 bp, Homo sapien
taacttactcttacctcatccatat

SEQ ID NO: 1221708 - DNA, 25 bp, Homo sapien
tccatattacactagaattaaatca

SEQ ID NO: 1221709 - DNA, 25 bp, Homo sapien
taaaaagtttgatcataacttactc

SEQ ID NO: 1221710 - DNA, 25 bp, Homo sapien
ttactcaattgcaagcttattaaga

SEQ ID NO: 1221711 - DNA, 25 bp, Homo sapien
cacaatatttcggtcagtgactgca

SEQ ID NO: 1221712 - DNA, 25 bp, Homo sapien
gcatgcacaaagagaaagatagatt

SEQ ID NO: 1221713 - DNA, 25 bp, Homo sapien
caccccagtgttaactagttagcag

SEQ ID NO: 1221714 - DNA, 25 bp, Homo sapien
gattcttcttagagttcgaagtcag

SEQ ID NO: 1221715 - DNA, 25 bp, Homo sapien
tagaagttatatctcctttcactgg

SEQ ID NO: 1221716 - DNA, 25 bp, Homo sapien
cctgggatagagaggtggatcttta

SEQ ID NO: 1221717 - DNA, 25 bp, Homo sapien
ggaacatcagtgtctagtatgcata

SEQ ID NO: 1221718 - DNA, 25 bp, Homo sapien
aaatgtgcaagccactacgtcccac

SEQ ID NO: 1221719 - DNA, 25 bp, Homo sapien
tgatttccctcacgtgcgtctgaat

SEQ ID NO: 1221720 - DNA, 25 bp, Homo sapien
catctgatttccctcacgtgcgtct

SEQ ID NO: 1221721 - DNA, 25 bp, Homo sapien
gcttcagaaccgttagtatctacaa

SEQ ID NO: 1221722 - DNA, 25 bp, Homo sapien
cgcttcagaaccgttagtatctaca

SEQ ID NO: 1221723 - DNA, 25 bp, Homo sapien
gacgcgcaggaaggggtcgggagga

SEQ ID NO: 1221724 - DNA, 25 bp, Homo sapien
cggcgaagcggaggcgaggcctggg

SEQ ID NO: 1221725 - DNA, 25 bp, Homo sapien
gctccgcgaggccggtctgcaggcg

SEQ ID NO: 1221726 - DNA, 25 bp, Homo sapien
ggcgcaggggaagagcggacgcgca

SEQ ID NO: 1221727 - DNA, 25 bp, Homo sapien
tgccccgccggtctcccgcaagccc

SEQ ID NO: 1221728 - DNA, 25 bp, Homo sapien
gccacacctctccccggctaagaaa

SEQ ID NO: 1221729 - DNA, 25 bp, Homo sapien
ctaagaaacccgctccgcaccgctc

SEQ ID NO: 1221730 - DNA, 25 bp, Homo sapien
gggaccggccggacgccagcaggcg

SEQ ID NO: 1221731 - DNA, 25 bp, Homo sapien
ccgccctctggaccagctccccagc

SEQ ID NO: 1221732 - DNA, 25 bp, Homo sapien
gccgccctctggaccagctccccag

SEQ ID NO: 1221733 - DNA, 25 bp, Homo sapien
cgccctctggaccagctccccagct

SEQ ID NO: 1221734 - DNA, 25 bp, Homo sapien
agctggtagaggcttccattccttg

SEQ ID NO: 1221735 - DNA, 25 bp, Homo sapien
gctttctaaaggaagacgcgcaaac

SEQ ID NO: 1221736 - DNA, 25 bp, Homo sapien
gagagggtgccttcgggtgcggaag

SEQ ID NO: 1221737 - DNA, 25 bp, Homo sapien
gctttgattggaaagccctgcaaag

SEQ ID NO: 1221738 - DNA, 25 bp, Homo sapien
tcctcagaaccatgtagagtctacc

SEQ ID NO: 1221739 - DNA, 25 bp, Homo sapien
gctggcctgacgaaagctgctgctg

SEQ ID NO: 1221740 - DNA, 25 bp, Homo sapien
taggaagccttgttctccactagga

SEQ ID NO: 1221741 - DNA, 25 bp, Homo sapien
tacagagatgcctttagtggaactc

SEQ ID NO: 1221742 - DNA, 25 bp, Homo sapien
ccccattctcctggcggtacagcaa

SEQ ID NO: 1221743 - DNA, 25 bp, Homo sapien
ccattctcctggcggtacagcaagc

SEQ ID NO: 1221744 - DNA, 25 bp, Homo sapien
attctcctggcggtacagcaagcac

SEQ ID NO: 1221745 - DNA, 25 bp, Homo sapien
ttctcctggcggtacagcaagcact

SEQ ID NO: 1221746 - DNA, 25 bp, Homo sapien
cagttctctctcaaggtcatggctg

SEQ ID NO: 1221747 - DNA, 25 bp, Homo sapien
tggctggcgttgaatcctgtgattc

SEQ ID NO: 1221748 - DNA, 25 bp, Homo sapien
gcagttctctctcaaggtcatggct

SEQ ID NO: 1221749 - DNA, 25 bp, Homo sapien
caaggtcatggctggcgttgaatcc

SEQ ID NO: 1221750 - DNA, 25 bp, Homo sapien
catccatgaaaccgtgagcaggaca

SEQ ID NO: 1221751 - DNA, 25 bp, Homo sapien
aaaccgtgagcaggacaccccacag

SEQ ID NO: 1221752 - DNA, 25 bp, Homo sapien
atgaaaccgtgagcaggacacccca

SEQ ID NO: 1221753 - DNA, 25 bp, Homo sapien
tccatgaaaccgtgagcaggacacc

SEQ ID NO: 1221754 - DNA, 25 bp, Homo sapien
ttggaaaccactgctctattagatg

SEQ ID NO: 1221755 - DNA, 25 bp, Homo sapien
gtgggcccatgtcttgtcagctttg

SEQ ID NO: 1221756 - DNA, 25 bp, Homo sapien
tgctctattagatggctgtgtgggc

SEQ ID NO: 1221757 - DNA, 25 bp, Homo sapien
tgtgactctcacagtctccttgctc

SEQ ID NO: 1221758 - DNA, 25 bp, Homo sapien
taggatggacactacccaacttcaa

SEQ ID NO: 1221759 - DNA, 25 bp, Homo sapien
cagcacctggtctaagataacactc

SEQ ID NO: 1221760 - DNA, 25 bp, Homo sapien
tatagtcaactgacccttggcaaaa

SEQ ID NO: 1221761 - DNA, 25 bp, Homo sapien
ggagccaaagatccataggatggac

SEQ ID NO: 1221762 - DNA, 25 bp, Homo sapien
attcctgcggaggttggcacttcgc

SEQ ID NO: 1221763 - DNA, 25 bp, Homo sapien
tcctgcggaggttggcacttcgcat

SEQ ID NO: 1221764 - DNA, 25 bp, Homo sapien
tcattcctgcggaggttggcacttc

SEQ ID NO: 1221765 - DNA, 25 bp, Homo sapien
accactttcaaactgccctgctctg

SEQ ID NO: 1221766 - DNA, 25 bp, Homo sapien
caaagctataaaactcctactagat

SEQ ID NO: 1221767 - DNA, 25 bp, Homo sapien
tactagataacataggataaaatct

SEQ ID NO: 1221768 - DNA, 25 bp, Homo sapien
aactgacctttgacaaaggagaaag

SEQ ID NO: 1221769 - DNA, 25 bp, Homo sapien
cacatcagaaaacgaagctagacac

SEQ ID NO: 1221770 - DNA, 25 bp, Homo sapien
gaggtaatataatcatggtctttcc

SEQ ID NO: 1221771 - DNA, 25 bp, Homo sapien
tctctctcattttgcctactgccat

SEQ ID NO: 1221772 - DNA, 25 bp, Homo sapien
agctctctctcattttgcctactgc

SEQ ID NO: 1221773 - DNA, 25 bp, Homo sapien
catgaaaacggactaccacagacag

SEQ ID NO: 1221774 - DNA, 25 bp, Homo sapien
cctttatgctcttctgaataagcca

SEQ ID NO: 1221775 - DNA, 25 bp, Homo sapien
ctttatgctcttctgaataagccat

SEQ ID NO: 1221776 - DNA, 25 bp, Homo sapien
gatgaaaccacagggcataccttta

SEQ ID NO: 1221777 - DNA, 25 bp, Homo sapien
accgctccacaaactggtactctat

SEQ ID NO: 1221778 - DNA, 25 bp, Homo sapien
ggtactctatactgggctcaaagtc

SEQ ID NO: 1221779 - DNA, 25 bp, Homo sapien
acatttgtagcgctcttccaaccgc

SEQ ID NO: 1221780 - DNA, 25 bp, Homo sapien
tgtgaagcaccgagtggcagaaggc

SEQ ID NO: 1221781 - DNA, 25 bp, Homo sapien
gaaaacagttgagtggccacagttg

SEQ ID NO: 1221782 - DNA, 25 bp, Homo sapien
cacagttgccacctggatgctagga

SEQ ID NO: 1221783 - DNA, 25 bp, Homo sapien
ttctgtggccaagtaaaacaactcc

SEQ ID NO: 1221784 - DNA, 25 bp, Homo sapien
acaactccaaaacccatgaaaacag

SEQ ID NO: 1221785 - DNA, 25 bp, Homo sapien
taggtctgctgtcccatgcaaagca

SEQ ID NO: 1221786 - DNA, 25 bp, Homo sapien
agtgtgtgtctaggtctgctgtccc

SEQ ID NO: 1221787 - DNA, 25 bp, Homo sapien
gcaggtacagtctgaattttaagaa

SEQ ID NO: 1221788 - DNA, 25 bp, Homo sapien
tggggtgactacaacacagacattg

SEQ ID NO: 1221789 - DNA, 25 bp, Homo sapien
cccaggagtggacagcatccatggc

SEQ ID NO: 1221790 - DNA, 25 bp, Homo sapien
ctctcctggtatcctccctcaacac

SEQ ID NO: 1221791 - DNA, 25 bp, Homo sapien
tctcctggtatcctccctcaacaca

SEQ ID NO: 1221792 - DNA, 25 bp, Homo sapien
caacacagtatgacccaggtcttac

SEQ ID NO: 1221793 - DNA, 25 bp, Homo sapien
tctttatctacagggcagattggca

SEQ ID NO: 1221794 - DNA, 25 bp, Homo sapien
cctgagatttgatgacctctttatc

SEQ ID NO: 1221795 - DNA, 25 bp, Homo sapien
ctcctgagatttgatgacctcttta

SEQ ID NO: 1221796 - DNA, 25 bp, Homo sapien
tgacctctttatctacagggcagat

SEQ ID NO: 1221797 - DNA, 25 bp, Homo sapien
tgcaatatacatataagttgaggac

SEQ ID NO: 1221798 - DNA, 25 bp, Homo sapien
caggagcattgctgcaatatacata

SEQ ID NO: 1221799 - DNA, 25 bp, Homo sapien
ctggtaccggcccagaataaccttg

SEQ ID NO: 1221800 - DNA, 25 bp, Homo sapien
tacatataagttgaggacttctctt

SEQ ID NO: 1221801 - DNA, 25 bp, Homo sapien
cacagttgctgggaaacacctacga

SEQ ID NO: 1221802 - DNA, 25 bp, Homo sapien
gatacaagatgtcctccatgcgctc

SEQ ID NO: 1221803 - DNA, 25 bp, Homo sapien
gaatccctgtaccatgcttagctca

SEQ ID NO: 1221804 - DNA, 25 bp, Homo sapien
tttctgtagtcatgccctgggtccc

SEQ ID NO: 1221805 - DNA, 25 bp, Homo sapien
ctgccaggcagcgccacacttccag

SEQ ID NO: 1221806 - DNA, 25 bp, Homo sapien
aggcagcgccacacttccagcttcc

SEQ ID NO: 1221807 - DNA, 25 bp, Homo sapien
cagtgtgatcaaacttgacatgggc

SEQ ID NO: 1221808 - DNA, 25 bp, Homo sapien
ttgcagtgtgatcaaacttgacatg

SEQ ID NO: 1221809 - DNA, 25 bp, Homo sapien
tgtgcaagcccaagagaagctagga

SEQ ID NO: 1221810 - DNA, 25 bp, Homo sapien
tgcaacagataacaacaggccagtg

SEQ ID NO: 1221811 - DNA, 25 bp, Homo sapien
aaaaggccttgctctaggactcgac

SEQ ID NO: 1221812 - DNA, 25 bp, Homo sapien
catagcagatggtaaaaggacacag

SEQ ID NO: 1221813 - DNA, 25 bp, Homo sapien
gaaataagcactgctgaaggtgatc

SEQ ID NO: 1221814 - DNA, 25 bp, Homo sapien
ctgcacaggttgaaataagcactgc

SEQ ID NO: 1221815 - DNA, 25 bp, Homo sapien
ggttgaaataagcactgctgaaggt

SEQ ID NO: 1221816 - DNA, 25 bp, Homo sapien
tgaaataagcactgctgaaggtgat

SEQ ID NO: 1221817 - DNA, 25 bp, Homo sapien
tcaggtctttccgtaggactggctc

SEQ ID NO: 1221818 - DNA, 25 bp, Homo sapien
aggatgcactcaaatgctctttcag

SEQ ID NO: 1221819 - DNA, 25 bp, Homo sapien
tgtagattgatgactaccacatcct

SEQ ID NO: 1221820 - DNA, 25 bp, Homo sapien
tttcctttcgaaactgacaggatgc

SEQ ID NO: 1221821 - DNA, 25 bp, Homo sapien
gagtgctaccaacaagaaggtttta

SEQ ID NO: 1221822 - DNA, 25 bp, Homo sapien
tcaggcataatttagctccataaag

SEQ ID NO: 1221823 - DNA, 25 bp, Homo sapien
taaagatgactgttgtatgtgttgt

SEQ ID NO: 1221824 - DNA, 25 bp, Homo sapien
tccttgtgactcagcacccagcatt

SEQ ID NO: 1221825 - DNA, 25 bp, Homo sapien
gaactgccagcatagctccttcggg

SEQ ID NO: 1221826 - DNA, 25 bp, Homo sapien
ccagctacactgcagaattcagaga

SEQ ID NO: 1221827 - DNA, 25 bp, Homo sapien
gggacatgtaaaaggtacccatgct

SEQ ID NO: 1221828 - DNA, 25 bp, Homo sapien
cacgtggcttactctctacaggaag

SEQ ID NO: 1221829 - DNA, 25 bp, Homo sapien
caattgttgggacaaaatactgggt

SEQ ID NO: 1221830 - DNA, 25 bp, Homo sapien
ggtattcaggacacaagttttcctc

SEQ ID NO: 1221831 - DNA, 25 bp, Homo sapien
tagaataatcttcgcacaattgttg

SEQ ID NO: 1221832 - DNA, 25 bp, Homo sapien
aaatactgggtattcaggacacaag

SEQ ID NO: 1221833 - DNA, 25 bp, Homo sapien
tacagcacagccatagtgcttaaaa

SEQ ID NO: 1221834 - DNA, 25 bp, Homo sapien
cacagccatagtgcttaaaaggaca

SEQ ID NO: 1221835 - DNA, 25 bp, Homo sapien
cgttacagcacagccatagtgctta

SEQ ID NO: 1221836 - DNA, 25 bp, Homo sapien
cagcacagccatagtgcttaaaagg

SEQ ID NO: 1221837 - DNA, 25 bp, Homo sapien
catcccaagctctggtgctgaggca

SEQ ID NO: 1221838 - DNA, 25 bp, Homo sapien
taggtgttcaaggtgatccatgcag

SEQ ID NO: 1221839 - DNA, 25 bp, Homo sapien
gctgtcctaaataaggttccggaga

SEQ ID NO: 1221840 - DNA, 25 bp, Homo sapien
gatttgggcctgactgtaaagatca

SEQ ID NO: 1221841 - DNA, 25 bp, Homo sapien
tgctcccgtaaggctgaatgctcat

SEQ ID NO: 1221842 - DNA, 25 bp, Homo sapien
gctgaatgctcatgttgctgcaggt

SEQ ID NO: 1221843 - DNA, 25 bp, Homo sapien
tctaaaaccaaacgcatgtgctccc

SEQ ID NO: 1221844 - DNA, 25 bp, Homo sapien
ccaaacgcatgtgctcccgtaaggc

SEQ ID NO: 1221845 - DNA, 25 bp, Homo sapien
aatgccacaggcactatggcaggca

SEQ ID NO: 1221846 - DNA, 25 bp, Homo sapien
catttattgggttgcaaagcttctg

SEQ ID NO: 1221847 - DNA, 25 bp, Homo sapien
ttattgaggttaataggaatgccac

SEQ ID NO: 1221848 - DNA, 25 bp, Homo sapien
gggagcatgccttctaccaaagtta

SEQ ID NO: 1221849 - DNA, 25 bp, Homo sapien
tgtttacatttatgttagttcttca

SEQ ID NO: 1221850 - DNA, 25 bp, Homo sapien
ctgtttacatttatgttagttcttc

SEQ ID NO: 1221851 - DNA, 25 bp, Homo sapien
tacacggaaggccactgcaatctgg

SEQ ID NO: 1221852 - DNA, 25 bp, Homo sapien
cagacagtccagatcgtaccagtgt

SEQ ID NO: 1221853 - DNA, 25 bp, Homo sapien
tcaaaacttcttaggctacacggaa

SEQ ID NO: 1221854 - DNA, 25 bp, Homo sapien
caattagctgaccaagtgttttcca

SEQ ID NO: 1221855 - DNA, 25 bp, Homo sapien
tccagcatacaagccagcaagtgat

SEQ ID NO: 1221856 - DNA, 25 bp, Homo sapien
tggacttattaagcaaccacagaag

SEQ ID NO: 1221857 - DNA, 25 bp, Homo sapien
caaagaaccctatgagttgcacgaa

SEQ ID NO: 1221858 - DNA, 25 bp, Homo sapien
tattcacaggtggttccaaaaagcc

SEQ ID NO: 1221859 - DNA, 25 bp, Homo sapien
tttgccaaacaactgtgcaaactgc

SEQ ID NO: 1221860 - DNA, 25 bp, Homo sapien
gccaaacaactgtgcaaactgcttg

SEQ ID NO: 1221861 - DNA, 25 bp, Homo sapien
aacaactgtgcaaactgcttgaact

SEQ ID NO: 1221862 - DNA, 25 bp, Homo sapien
aactgcttgaactccttttcaagtt

SEQ ID NO: 1221863 - DNA, 25 bp, Homo sapien
ttttctgtttcactgtatcaactgc

SEQ ID NO: 1221864 - DNA, 25 bp, Homo sapien
caaaggtctcaggtcaaatttattt

SEQ ID NO: 1221865 - DNA, 25 bp, Homo sapien
tgagcttctagccaagctgacttgt

SEQ ID NO: 1221866 - DNA, 25 bp, Homo sapien
tatcaactgcttccatcaaaggtct

SEQ ID NO: 1221867 - DNA, 25 bp, Homo sapien
ctcagctgtgctttatgaatattaa

SEQ ID NO: 1221868 - DNA, 25 bp, Homo sapien
caaatgagctttccattatagcaag

SEQ ID NO: 1221869 - DNA, 25 bp, Homo sapien
ttgtaatctgtcaccttccaaatga

SEQ ID NO: 1221870 - DNA, 25 bp, Homo sapien
tagcaagtaccctccagcagtttaa

SEQ ID NO: 1221871 - DNA, 25 bp, Homo sapien
aaaacagaatgagccacaaagcggg

SEQ ID NO: 1221872 - DNA, 25 bp, Homo sapien
tctggtccagaagcatcagggtcac

SEQ ID NO: 1221873 - DNA, 25 bp, Homo sapien
tcgcatgaccacaaagtatagggac

SEQ ID NO: 1221874 - DNA, 25 bp, Homo sapien
tatgctctagcacagagccggtagc

SEQ ID NO: 1221875 - DNA, 25 bp, Homo sapien
gagatcctccaggtcagttaagtcc

SEQ ID NO: 1221876 - DNA, 25 bp, Homo sapien
gatcctccaggtcagttaagtccac

SEQ ID NO: 1221877 - DNA, 25 bp, Homo sapien
tagagatcctccaggtcagttaagt

SEQ ID NO: 1221878 - DNA, 25 bp, Homo sapien
ctagagatcctccaggtcagttaag

SEQ ID NO: 1221879 - DNA, 25 bp, Homo sapien
cagaagggctcaggacaacttggca

SEQ ID NO: 1221880 - DNA, 25 bp, Homo sapien
gagagtacttctgacacccatagga

SEQ ID NO: 1221881 - DNA, 25 bp, Homo sapien
caaaactgtgcttgcaaactgctgg

SEQ ID NO: 1221882 - DNA, 25 bp, Homo sapien
tcaatatttagagtgcccgagacac

SEQ ID NO: 1221883 - DNA, 25 bp, Homo sapien
ggatctgtttagctactctccataa

SEQ ID NO: 1221884 - DNA, 25 bp, Homo sapien
gcatgggcctcttgaaagaaaaaag

SEQ ID NO: 1221885 - DNA, 25 bp, Homo sapien
tttagcatgggcctcttgaaagaaa

SEQ ID NO: 1221886 - DNA, 25 bp, Homo sapien
tctccccaatccttatgtggatctg

SEQ ID NO: 1221887 - DNA, 25 bp, Homo sapien
gagatttctccctgttaatactaac

SEQ ID NO: 1221888 - DNA, 25 bp, Homo sapien
taaaagcatgtacatgtccccctca

SEQ ID NO: 1221889 - DNA, 25 bp, Homo sapien
tctctgactataaagctaatgcagt

SEQ ID NO: 1221890 - DNA, 25 bp, Homo sapien
atgtttcctggtacacgtgtgcaag

SEQ ID NO: 1221891 - DNA, 25 bp, Homo sapien
aaggtgctgaacaaccagtgcggcg

SEQ ID NO: 1221892 - DNA, 25 bp, Homo sapien
caacctgtttggtccgacttgacaa

SEQ ID NO: 1221893 - DNA, 25 bp, Homo sapien
cttgacaacctcaaccggaccgaag

SEQ ID NO: 1221894 - DNA, 25 bp, Homo sapien
aactgcagagaaacaacctgtttgg

SEQ ID NO: 1221895 - DNA, 25 bp, Homo sapien
catgtgaatccaatttacagaggaa

SEQ ID NO: 1221896 - DNA, 25 bp, Homo sapien
ctgtcaggacacgaaaggtggagaa

SEQ ID NO: 1221897 - DNA, 25 bp, Homo sapien
gagccactgagcctaactattttca

SEQ ID NO: 1221898 - DNA, 25 bp, Homo sapien
gcaatcatagcttatgacagctcca

SEQ ID NO: 1221899 - DNA, 25 bp, Homo sapien
caggatttctgtgagtggacttctt

SEQ ID NO: 1221900 - DNA, 25 bp, Homo sapien
ggatttctgtgagtggacttcttat

SEQ ID NO: 1221901 - DNA, 25 bp, Homo sapien
atttctgtgagtggacttcttatcc

SEQ ID NO: 1221902 - DNA, 25 bp, Homo sapien
ttctgtgagtggacttcttatccat

SEQ ID NO: 1221903 - DNA, 25 bp, Homo sapien
cttgaatctgtctggcttcctgaag

SEQ ID NO: 1221904 - DNA, 25 bp, Homo sapien
tctatgtcgggatcggtgctggttt

SEQ ID NO: 1221905 - DNA, 25 bp, Homo sapien
aagaaaaagacgtcactgatctatg

SEQ ID NO: 1221906 - DNA, 25 bp, Homo sapien
tcaatacttgaatctgtctggcttc

SEQ ID NO: 1221907 - DNA, 25 bp, Homo sapien
ctaaatcacctaacttataaatatg

SEQ ID NO: 1221908 - DNA, 25 bp, Homo sapien
ggtacatagtgagtatgctcaataa

SEQ ID NO: 1221909 - DNA, 25 bp, Homo sapien
ggaccatggcatgtttaccattatg

SEQ ID NO: 1221910 - DNA, 25 bp, Homo sapien
aaagttccttgtctgaagggaccat

SEQ ID NO: 1221911 - DNA, 25 bp, Homo sapien
ttcttaatttttcccttggcagcat

SEQ ID NO: 1221912 - DNA, 25 bp, Homo sapien
tcttcttaatttttcccttggcagc

SEQ ID NO: 1221913 - DNA, 25 bp, Homo sapien
cttcttaatttttcccttggcagca

SEQ ID NO: 1221914 - DNA, 25 bp, Homo sapien
gataccagaacgatcgttaccagag

SEQ ID NO: 1221915 - DNA, 25 bp, Homo sapien
aaaaaatgagatgctgtcacttgca

SEQ ID NO: 1221916 - DNA, 25 bp, Homo sapien
ccagaggcttagaagggtagttgaa

SEQ ID NO: 1221917 - DNA, 25 bp, Homo sapien
acatgttgtcacctatttgtgggag

SEQ ID NO: 1221918 - DNA, 25 bp, Homo sapien
gaattcagcaacaatagccaagatc

SEQ ID NO: 1221919 - DNA, 25 bp, Homo sapien
tcaacagatgaatgtggtacaaata

SEQ ID NO: 1221920 - DNA, 25 bp, Homo sapien
ggtacaaatacacaacggagcacta

SEQ ID NO: 1221921 - DNA, 25 bp, Homo sapien
gtacaaatacacaacggagcactat

SEQ ID NO: 1221922 - DNA, 25 bp, Homo sapien
tctgtggaccaagccgattgatgtt

SEQ ID NO: 1221923 - DNA, 25 bp, Homo sapien
gattgatgtttcaccgcacctacca

SEQ ID NO: 1221924 - DNA, 25 bp, Homo sapien
cactcgtcggggagttgaacacgct

SEQ ID NO: 1221925 - DNA, 25 bp, Homo sapien
gagttgaacacgcttatctgtggac

SEQ ID NO: 1221926 - DNA, 25 bp, Homo sapien
tatagatccaatgccgtccctatca

SEQ ID NO: 1221927 - DNA, 25 bp, Homo sapien
agatccaatgccgtccctatcaagc

SEQ ID NO: 1221928 - DNA, 25 bp, Homo sapien
ccaatgccgtccctatcaagctacc

SEQ ID NO: 1221929 - DNA, 25 bp, Homo sapien
aatttatagatccaatgccgtccct

SEQ ID NO: 1221930 - DNA, 25 bp, Homo sapien
actgagctgactcatgtgagtttcc

SEQ ID NO: 1221931 - DNA, 25 bp, Homo sapien
tgactcatgtgagtttccatacaca

SEQ ID NO: 1221932 - DNA, 25 bp, Homo sapien
gagctgactcatgtgagtttccata

SEQ ID NO: 1221933 - DNA, 25 bp, Homo sapien
attatgagaaattactacccttcta

SEQ ID NO: 1221934 - DNA, 25 bp, Homo sapien
tcatgtctggcattagcacctttca

SEQ ID NO: 1221935 - DNA, 25 bp, Homo sapien
ttcatgtctggcattagcacctttc

SEQ ID NO: 1221936 - DNA, 25 bp, Homo sapien
gttcatgtctggcattagcaccttt

SEQ ID NO: 1221937 - DNA, 25 bp, Homo sapien
cagaacccgagaacacgtttgtaga

SEQ ID NO: 1221938 - DNA, 25 bp, Homo sapien
caaaacaccagaacccgagaacacg

SEQ ID NO: 1221939 - DNA, 25 bp, Homo sapien
ccagaacccgagaacacgtttgtag

SEQ ID NO: 1221940 - DNA, 25 bp, Homo sapien
acaccagaacccgagaacacgtttg

SEQ ID NO: 1221941 - DNA, 25 bp, Homo sapien
tctggattactcagtaactccacta

SEQ ID NO: 1221942 - DNA, 25 bp, Homo sapien
tgctgttaatgagcttgatgaagtc

SEQ ID NO: 1221943 - DNA, 25 bp, Homo sapien
tactcagtaactccactaccggctt

SEQ ID NO: 1221944 - DNA, 25 bp, Homo sapien
gcttcaagaactccacatcagagtt

SEQ ID NO: 1221945 - DNA, 25 bp, Homo sapien
gttgaaaacgaccagcacacatctt

SEQ ID NO: 1221946 - DNA, 25 bp, Homo sapien
gaaaacgaccagcacacatcttcta

SEQ ID NO: 1221947 - DNA, 25 bp, Homo sapien
tcttctctaccgttccttcaacaga

SEQ ID NO: 1221948 - DNA, 25 bp, Homo sapien
cactcttctctaccgttccttcaac

SEQ ID NO: 1221949 - DNA, 25 bp, Homo sapien
ctcttcatgttcctagccctcattg

SEQ ID NO: 1221950 - DNA, 25 bp, Homo sapien
atgttcctagccctcattgccgcag

SEQ ID NO: 1221951 - DNA, 25 bp, Homo sapien
ttcatgttcctagccctcattgccg

SEQ ID NO: 1221952 - DNA, 25 bp, Homo sapien
ttcctagccctcattgccgcagttt

SEQ ID NO: 1221953 - DNA, 25 bp, Homo sapien
cagaacaagaaactataaagttcta

SEQ ID NO: 1221954 - DNA, 25 bp, Homo sapien
tcagaacaagaaactataaagttct

SEQ ID NO: 1221955 - DNA, 25 bp, Homo sapien
gtggcctgcacacatgtcattttat

SEQ ID NO: 1221956 - DNA, 25 bp, Homo sapien
ttacccataagggtatctgcaggcc

SEQ ID NO: 1221957 - DNA, 25 bp, Homo sapien
caaaaccagagtgagtcatgcacgt

SEQ ID NO: 1221958 - DNA, 25 bp, Homo sapien
tctccagccgcttgactttctctgt

SEQ ID NO: 1221959 - DNA, 25 bp, Homo sapien
gaaaggtgacatatgtggttgtttc

SEQ ID NO: 1221960 - DNA, 25 bp, Homo sapien
tggaaaggtgacatatgtggttgtt

SEQ ID NO: 1221961 - DNA, 25 bp, Homo sapien
cttggaaaggtgacatatgtggttg

SEQ ID NO: 1221962 - DNA, 25 bp, Homo sapien
gacatatgtggttgtttcctccttt

SEQ ID NO: 1221963 - DNA, 25 bp, Homo sapien
aacgctgagcttggaaatcaaaagg

SEQ ID NO: 1221964 - DNA, 25 bp, Homo sapien
tggccgccttacaccaaaacgctga

SEQ ID NO: 1221965 - DNA, 25 bp, Homo sapien
tgctgggctccgcatccttctttgg

SEQ ID NO: 1221966 - DNA, 25 bp, Homo sapien
catcaatgtttttgtaggcttcaca

SEQ ID NO: 1221967 - DNA, 25 bp, Homo sapien
cattacatcatgctctaaaaacaaa

SEQ ID NO: 1221968 - DNA, 25 bp, Homo sapien
gtatactgcatgatgtgatcatttt

SEQ ID NO: 1221969 - DNA, 25 bp, Homo sapien
tgtaaacataagacgcgggaagaaa

SEQ ID NO: 1221970 - DNA, 25 bp, Homo sapien
tcagtgtacctaatgcaaaggaaca

SEQ ID NO: 1221971 - DNA, 25 bp, Homo sapien
aagatgcttaatttatctgcaatcc

SEQ ID NO: 1221972 - DNA, 25 bp, Homo sapien
gccaggactacaggttggcatcatc

SEQ ID NO: 1221973 - DNA, 25 bp, Homo sapien
tctgtaatcaaagataaagatgctt

SEQ ID NO: 1221974 - DNA, 25 bp, Homo sapien
caaaaatccctgtatcctctgctgg

SEQ ID NO: 1221975 - DNA, 25 bp, Homo sapien
gacttttgatagataagaatgccat

SEQ ID NO: 1221976 - DNA, 25 bp, Homo sapien
acttttgatagataagaatgccatg

SEQ ID NO: 1221977 - DNA, 25 bp, Homo sapien
tgacttttgatagataagaatgcca

SEQ ID NO: 1221978 - DNA, 25 bp, Homo sapien
gagaggtatatatatcaaggtcctg

SEQ ID NO: 1221979 - DNA, 25 bp, Homo sapien
tctggaattacacttttggagtttc

SEQ ID NO: 1221980 - DNA, 25 bp, Homo sapien
gacactcagaaatgtagagaggtat

SEQ ID NO: 1221981 - DNA, 25 bp, Homo sapien
accttggcttctggaattacacttt

SEQ ID NO: 1221982 - DNA, 25 bp, Homo sapien
cattaagtggaaaactaggctcttc

SEQ ID NO: 1221983 - DNA, 25 bp, Homo sapien
cataaattgcattaagtggaaaact

SEQ ID NO: 1221984 - DNA, 25 bp, Homo sapien
aaaactaggctcttcaggaacagga

SEQ ID NO: 1221985 - DNA, 25 bp, Homo sapien
aggaaaattattgattccctgtgta

SEQ ID NO: 1221986 - DNA, 25 bp, Homo sapien
gggttgatcattctgagggttgaaa

SEQ ID NO: 1221987 - DNA, 25 bp, Homo sapien
caagtccaccacgtgctgggttgat

SEQ ID NO: 1221988 - DNA, 25 bp, Homo sapien
agcaagtccaccacgtgctgggttg

SEQ ID NO: 1221989 - DNA, 25 bp, Homo sapien
tccaccacgtgctgggttgatcatt

SEQ ID NO: 1221990 - DNA, 25 bp, Homo sapien
agtcatccttccaccaagtaactga

SEQ ID NO: 1221991 - DNA, 25 bp, Homo sapien
agatgggaagatggtggggttcgcc

SEQ ID NO: 1221992 - DNA, 25 bp, Homo sapien
tgggaagatggtggggttcgccatg

SEQ ID NO: 1221993 - DNA, 25 bp, Homo sapien
catccttccaccaagtaactgagac

SEQ ID NO: 1221994 - DNA, 25 bp, Homo sapien
cctgtaccggagcagagtgcgctct

SEQ ID NO: 1221995 - DNA, 25 bp, Homo sapien
tcacgggcggctcagccagagagtc

SEQ ID NO: 1221996 - DNA, 25 bp, Homo sapien
gccagagagtccattgtgctggctg

SEQ ID NO: 1221997 - DNA, 25 bp, Homo sapien
tgtgggatccccatggatcagcgcc

SEQ ID NO: 1221998 - DNA, 25 bp, Homo sapien
tgcgagccggtcctgggaatcaagt

SEQ ID NO: 1221999 - DNA, 25 bp, Homo sapien
atttgcagaggtcccgtgaaggccc

SEQ ID NO: 1222000 - DNA, 25 bp, Homo sapien
tgacatgtttgaccgttgggcttaa

SEQ ID NO: 1222001 - DNA, 25 bp, Homo sapien
aagccatcttcagatgcgagccggt

SEQ ID NO: 1222002 - DNA, 25 bp, Homo sapien
ttttccagcacagctaacgagccac

SEQ ID NO: 1222003 - DNA, 25 bp, Homo sapien
acagctggtagtggcgcctcccagg

SEQ ID NO: 1222004 - DNA, 25 bp, Homo sapien
tgcccttgaggcacaacgcgagagt

SEQ ID NO: 1222005 - DNA, 25 bp, Homo sapien
tgttcccaccattgagacatccctg

SEQ ID NO: 1222006 - DNA, 25 bp, Homo sapien
agactgagcgtctggcgtcagcaga

SEQ ID NO: 1222007 - DNA, 25 bp, Homo sapien
cccagactgagcgtctggcgtcagc

SEQ ID NO: 1222008 - DNA, 25 bp, Homo sapien
cagactgagcgtctggcgtcagcag

SEQ ID NO: 1222009 - DNA, 25 bp, Homo sapien
tgcccagactgagcgtctggcgtca

SEQ ID NO: 1222010 - DNA, 25 bp, Homo sapien
tgttctggaactgcaagcctctcgg

SEQ ID NO: 1222011 - DNA, 25 bp, Homo sapien
ctgcaagcctctcggggaggaccca

SEQ ID NO: 1222012 - DNA, 25 bp, Homo sapien
tttgcctgttctggaactgcaagcc

SEQ ID NO: 1222013 - DNA, 25 bp, Homo sapien
tgtttttgcctgttctggaactgca

SEQ ID NO: 1222014 - DNA, 25 bp, Homo sapien
tgttttgtaaacctgtgggaagcca

SEQ ID NO: 1222015 - DNA, 25 bp, Homo sapien
gcttcctcggggctatagcctgctc

SEQ ID NO: 1222016 - DNA, 25 bp, Homo sapien
ttggaaccgatgagggtcctgcagc

SEQ ID NO: 1222017 - DNA, 25 bp, Homo sapien
tccacaggagttggaaccgatgagg

SEQ ID NO: 1222018 - DNA, 25 bp, Homo sapien
cacaggaaggcccctttagtcctca

SEQ ID NO: 1222019 - DNA, 25 bp, Homo sapien
ctccgggacccagatggccacagga

SEQ ID NO: 1222020 - DNA, 25 bp, Homo sapien
tggccacaggaaggcccctttagtc

SEQ ID NO: 1222021 - DNA, 25 bp, Homo sapien
agatggccacaggaaggccccttta

SEQ ID NO: 1222022 - DNA, 25 bp, Homo sapien
gccacactgagcaccggctggagga

SEQ ID NO: 1222023 - DNA, 25 bp, Homo sapien
tttgccaacagcaggtacacctagg

SEQ ID NO: 1222024 - DNA, 25 bp, Homo sapien
tacacctagggctcagcagagggtt

SEQ ID NO: 1222025 - DNA, 25 bp, Homo sapien
ttgggtgagaatggtcttgcccagt

SEQ ID NO: 1222026 - DNA, 25 bp, Homo sapien
tggcttctaggcagaacagtctaca

SEQ ID NO: 1222027 - DNA, 25 bp, Homo sapien
aatacctcaacgtcaatgctttctg

SEQ ID NO: 1222028 - DNA, 25 bp, Homo sapien
tgtctgttaggtgcaagctggccca

SEQ ID NO: 1222029 - DNA, 25 bp, Homo sapien
aagtgacagcgtgaccagagagcag

SEQ ID NO: 1222030 - DNA, 25 bp, Homo sapien
gagtactgggcccacttccgagctc

SEQ ID NO: 1222031 - DNA, 25 bp, Homo sapien
tagggtagccctgggagtactgggc

SEQ ID NO: 1222032 - DNA, 25 bp, Homo sapien
ttccctgttgcaaatgccccttcct

SEQ ID NO: 1222033 - DNA, 25 bp, Homo sapien
ttccgagctccagtggcagtgtctc

SEQ ID NO: 1222034 - DNA, 25 bp, Homo sapien
agaggtcgctggctgtgtggagaag

SEQ ID NO: 1222035 - DNA, 25 bp, Homo sapien
gggaacctggtgatggctggaggga

SEQ ID NO: 1222036 - DNA, 25 bp, Homo sapien
cttctctaaagctttcagcaccttc

SEQ ID NO: 1222037 - DNA, 25 bp, Homo sapien
tccaagggtaattgctggagtttac

SEQ ID NO: 1222038 - DNA, 25 bp, Homo sapien
ggaagtggccgccagcttcactctg

SEQ ID NO: 1222039 - DNA, 25 bp, Homo sapien
gccacaaggctcctagatgtgtgaa

SEQ ID NO: 1222040 - DNA, 25 bp, Homo sapien
cacattgctgggcttgcacaagcaa

SEQ ID NO: 1222041 - DNA, 25 bp, Homo sapien
tagaaaccttcaaagctatgctggc

SEQ ID NO: 1222042 - DNA, 25 bp, Homo sapien
cagagtccattcttggttgactcag

SEQ ID NO: 1222043 - DNA, 25 bp, Homo sapien
gtcccccagagtccattcttggttg

SEQ ID NO: 1222044 - DNA, 25 bp, Homo sapien
agtccattcttggttgactcaggtg

SEQ ID NO: 1222045 - DNA, 25 bp, Homo sapien
cattcttggttgactcaggtgccca

SEQ ID NO: 1222046 - DNA, 25 bp, Homo sapien
tttgcttcccttaccagctctttta

SEQ ID NO: 1222047 - DNA, 25 bp, Homo sapien
gggcttccgcctgatgtgtcagccc

SEQ ID NO: 1222048 - DNA, 25 bp, Homo sapien
gacggcatggtaacccactctgtac

SEQ ID NO: 1222049 - DNA, 25 bp, Homo sapien
taccagattttaagctttattccca

SEQ ID NO: 1222050 - DNA, 25 bp, Homo sapien
cctaacagggctgactggctggcct

SEQ ID NO: 1222051 - DNA, 25 bp, Homo sapien
aacagggctgactggctggcctctg

SEQ ID NO: 1222052 - DNA, 25 bp, Homo sapien
ctggctggcctctggctggaaccat

SEQ ID NO: 1222053 - DNA, 25 bp, Homo sapien
actggctggcctctggctggaacca

SEQ ID NO: 1222054 - DNA, 25 bp, Homo sapien
tgggagcgtgtgtaggcaccctctc

SEQ ID NO: 1222055 - DNA, 25 bp, Homo sapien
gacccaattcccagggaatggctga

SEQ ID NO: 1222056 - DNA, 25 bp, Homo sapien
gagagcagcccatggtctgttgacc

SEQ ID NO: 1222057 - DNA, 25 bp, Homo sapien
gcactgtccggaacactgacaagcc

SEQ ID NO: 1222058 - DNA, 25 bp, Homo sapien
agaagcggggagtccatcagggcca

SEQ ID NO: 1222059 - DNA, 25 bp, Homo sapien
agcggggagtccatcagggccaagg

SEQ ID NO: 1222060 - DNA, 25 bp, Homo sapien
ggggagtccatcagggccaaggcct

SEQ ID NO: 1222061 - DNA, 25 bp, Homo sapien
aagcggggagtccatcagggccaag

SEQ ID NO: 1222062 - DNA, 25 bp, Homo sapien
cttccagcaacacgccaagggttct

SEQ ID NO: 1222063 - DNA, 25 bp, Homo sapien
tgaggaccaggaaagattgggtgag

SEQ ID NO: 1222064 - DNA, 25 bp, Homo sapien
gttctaaggcttgaaatgcattccc

SEQ ID NO: 1222065 - DNA, 25 bp, Homo sapien
cacgccaagggttctaaggcttgaa

SEQ ID NO: 1222066 - DNA, 25 bp, Homo sapien
cattggttaaatccaagtggtttgc

SEQ ID NO: 1222067 - DNA, 25 bp, Homo sapien
aaatccaagtggtttgcaggcactg

SEQ ID NO: 1222068 - DNA, 25 bp, Homo sapien
gctctggggacacattggttaaatc

SEQ ID NO: 1222069 - DNA, 25 bp, Homo sapien
ggttaaatccaagtggtttgcaggc

SEQ ID NO: 1222070 - DNA, 25 bp, Homo sapien
ggacttgaggatctagacaggctgt

SEQ ID NO: 1222071 - DNA, 25 bp, Homo sapien
tgagaccaccccctgttagaactgg

SEQ ID NO: 1222072 - DNA, 25 bp, Homo sapien
aatataagcattgaggggcactggg

SEQ ID NO: 1222073 - DNA, 25 bp, Homo sapien
gtccacactacagagccccatgggt

SEQ ID NO: 1222074 - DNA, 25 bp, Homo sapien
atcccagcccatgcagtgctcaagg

SEQ ID NO: 1222075 - DNA, 25 bp, Homo sapien
tgctcaaggggccactgggagacca

SEQ ID NO: 1222076 - DNA, 25 bp, Homo sapien
aaacatctaataactgcaaggagcc

SEQ ID NO: 1222077 - DNA, 25 bp, Homo sapien
tctggtctgagatccctgggtcatc

SEQ ID NO: 1222078 - DNA, 25 bp, Homo sapien
gaaggagatgggtaaccaagcctgc

SEQ ID NO: 1222079 - DNA, 25 bp, Homo sapien
aagcgacctgcagcccatcggagga

SEQ ID NO: 1222080 - DNA, 25 bp, Homo sapien
gagatgggtaaccaagcctgccatc

SEQ ID NO: 1222081 - DNA, 25 bp, Homo sapien
tcagcagggcaaagcgacctgcagc

SEQ ID NO: 1222082 - DNA, 25 bp, Homo sapien
ggggcatgtggagcctttctgtcct

SEQ ID NO: 1222083 - DNA, 25 bp, Homo sapien
ggttccacttgcaaaaagcaggggc

SEQ ID NO: 1222084 - DNA, 25 bp, Homo sapien
tgtgggggttccacttgcaaaaagc

SEQ ID NO: 1222085 - DNA, 25 bp, Homo sapien
ggcagggggcatgtggagcctttct

SEQ ID NO: 1222086 - DNA, 25 bp, Homo sapien
ccccaggattgagcgtggctccttc

SEQ ID NO: 1222087 - DNA, 25 bp, Homo sapien
gtctgctcccattcccgatgctccc

SEQ ID NO: 1222088 - DNA, 25 bp, Homo sapien
tcagaagcggattcctgaaaggccc

SEQ ID NO: 1222089 - DNA, 25 bp, Homo sapien
gctccttctcagaagcggattcctg

SEQ ID NO: 1222090 - DNA, 25 bp, Homo sapien
cccagtccctatgggcacttggtaa

SEQ ID NO: 1222091 - DNA, 25 bp, Homo sapien
gggtccaccatctgctctcgagaag

SEQ ID NO: 1222092 - DNA, 25 bp, Homo sapien
ccgacggcagcgtctgtagggtcca

SEQ ID NO: 1222093 - DNA, 25 bp, Homo sapien
tgactgttctaaggccgacggcagc

SEQ ID NO: 1222094 - DNA, 25 bp, Homo sapien
tgccaacaggatgttgatgaaaggt

SEQ ID NO: 1222095 - DNA, 25 bp, Homo sapien
ggtgaacagccattcaccctcactg

SEQ ID NO: 1222096 - DNA, 25 bp, Homo sapien
gcctattgtgacacccattgccaac

SEQ ID NO: 1222097 - DNA, 25 bp, Homo sapien
agaggtggcagcctattgtgacacc

SEQ ID NO: 1222098 - DNA, 25 bp, Homo sapien
tggcaattgcccttataactcagtg

SEQ ID NO: 1222099 - DNA, 25 bp, Homo sapien
tgacaagctctagcctcaaggtttt

SEQ ID NO: 1222100 - DNA, 25 bp, Homo sapien
tctgtgggttgacaagctctagcct

SEQ ID NO: 1222101 - DNA, 25 bp, Homo sapien
gggttgaagcaaccccgaggagcag

SEQ ID NO: 1222102 - DNA, 25 bp, Homo sapien
cagtgtctttggcaaaaagatgctg

SEQ ID NO: 1222103 - DNA, 25 bp, Homo sapien
tatggttctgccttgaaacagcaca

SEQ ID NO: 1222104 - DNA, 25 bp, Homo sapien
ccaaaaattttatggtccagtgtct

SEQ ID NO: 1222105 - DNA, 25 bp, Homo sapien
gatgtgggccagttaaatgcagtta

SEQ ID NO: 1222106 - DNA, 25 bp, Homo sapien
gaaggctgtgttaaccgtttgtgtc

SEQ ID NO: 1222107 - DNA, 25 bp, Homo sapien
cacaaatatggagagtaattctaca

SEQ ID NO: 1222108 - DNA, 25 bp, Homo sapien
gaaaagacctatggaacctaatgtg

SEQ ID NO: 1222109 - DNA, 25 bp, Homo sapien
tggaaaatcacagtaggtagaaggc

SEQ ID NO: 1222110 - DNA, 25 bp, Homo sapien
taacccattgtagctatattagcat

SEQ ID NO: 1222111 - DNA, 25 bp, Homo sapien
tgactgtcggcagaaacagtgggca

SEQ ID NO: 1222112 - DNA, 25 bp, Homo sapien
taatggtggtaccataggattttct

SEQ ID NO: 1222113 - DNA, 25 bp, Homo sapien
tgctttgaagataacagcctttagg

SEQ ID NO: 1222114 - DNA, 25 bp, Homo sapien
gtgaacttgcctgcagaacccagtg

SEQ ID NO: 1222115 - DNA, 25 bp, Homo sapien
tagtaacaatctagagaagaagccc

SEQ ID NO: 1222116 - DNA, 25 bp, Homo sapien
catcatacatggaggtggctaaaac

SEQ ID NO: 1222117 - DNA, 25 bp, Homo sapien
gaagcaatgttgtgggacactacca

SEQ ID NO: 1222118 - DNA, 25 bp, Homo sapien
aggggcctcgcgttaagagcacccg

SEQ ID NO: 1222119 - DNA, 25 bp, Homo sapien
ctcgcgttaagagcacccgccccgg

SEQ ID NO: 1222120 - DNA, 25 bp, Homo sapien
ggcctcgcgttaagagcacccgccc

SEQ ID NO: 1222121 - DNA, 25 bp, Homo sapien
ggggcctcgcgttaagagcacccgc

SEQ ID NO: 1222122 - DNA, 25 bp, Homo sapien
ttcatcgagccgcacgagatgcagc

SEQ ID NO: 1222123 - DNA, 25 bp, Homo sapien
gaagaacacgttcggctggatccga

SEQ ID NO: 1222124 - DNA, 25 bp, Homo sapien
ggaggccatcgagcgcttcatcgag

SEQ ID NO: 1222125 - DNA, 25 bp, Homo sapien
acatgctgtcggacgtgctggcgct

SEQ ID NO: 1222126 - DNA, 25 bp, Homo sapien
tctgcaaaggcgggggggcgaagaa

SEQ ID NO: 1222127 - DNA, 25 bp, Homo sapien
accgggccgagtgcagctgccgtgg

SEQ ID NO: 1222128 - DNA, 25 bp, Homo sapien
tcacgctcgggtccgtgtgaaaacg

SEQ ID NO: 1222129 - DNA, 25 bp, Homo sapien
agaaggcgcccgagaccgggccgag

SEQ ID NO: 1222130 - DNA, 25 bp, Homo sapien
tgcctgaagtctgtaccctgaactg

SEQ ID NO: 1222131 - DNA, 25 bp, Homo sapien
cacacagctggctattgacaaggca

SEQ ID NO: 1222132 - DNA, 25 bp, Homo sapien
gtccagcagagtcccaagttacagt

SEQ ID NO: 1222133 - DNA, 25 bp, Homo sapien
catgtacaaagattcggtccacgcc

SEQ ID NO: 1222134 - DNA, 25 bp, Homo sapien
tgtcctgttcgtactgggtccccat

SEQ ID NO: 1222135 - DNA, 25 bp, Homo sapien
tcctctgtcctgttcgtactgggtc

SEQ ID NO: 1222136 - DNA, 25 bp, Homo sapien
agggaaggtcctctgtcctgttcgt

SEQ ID NO: 1222137 - DNA, 25 bp, Homo sapien
gaaggtcctctgtcctgttcgtact

SEQ ID NO: 1222138 - DNA, 25 bp, Homo sapien
ctggaaagccagggggatgccaaac

SEQ ID NO: 1222139 - DNA, 25 bp, Homo sapien
ggaaagccagggggatgccaaacag

SEQ ID NO: 1222140 - DNA, 25 bp, Homo sapien
tggaaagccagggggatgccaaaca

SEQ ID NO: 1222141 - DNA, 25 bp, Homo sapien
cgggcctgcaccaggaacagggaga

SEQ ID NO: 1222142 - DNA, 25 bp, Homo sapien
ctgcaccaggaacagggagaggctc

SEQ ID NO: 1222143 - DNA, 25 bp, Homo sapien
gcctgcaccaggaacagggagaggc

SEQ ID NO: 1222144 - DNA, 25 bp, Homo sapien
gcaccaggaacagggagaggctcct

SEQ ID NO: 1222145 - DNA, 25 bp, Homo sapien
ctgcgtggcccgaaataagttgtct

SEQ ID NO: 1222146 - DNA, 25 bp, Homo sapien
gtggcccgaaataagttgtctgcct

SEQ ID NO: 1222147 - DNA, 25 bp, Homo sapien
caggaggttggttggaagcatccac

SEQ ID NO: 1222148 - DNA, 25 bp, Homo sapien
tgcctcaggaggttggttggaagca

SEQ ID NO: 1222149 - DNA, 25 bp, Homo sapien
tgctccccgtgacaaccatccagac

SEQ ID NO: 1222150 - DNA, 25 bp, Homo sapien
agtgctccccgtgacaaccatccag

SEQ ID NO: 1222151 - DNA, 25 bp, Homo sapien
ctcagtgctccccgtgacaaccatc

SEQ ID NO: 1222152 - DNA, 25 bp, Homo sapien
tcagtgctccccgtgacaaccatcc

SEQ ID NO: 1222153 - DNA, 25 bp, Homo sapien
ttcccctaactcctttatgctcaag

SEQ ID NO: 1222154 - DNA, 25 bp, Homo sapien
tgataaacagaaagcttggcctaca

SEQ ID NO: 1222155 - DNA, 25 bp, Homo sapien
gctcaagtcaggattcagaaggctc

SEQ ID NO: 1222156 - DNA, 25 bp, Homo sapien
catgggagggctttgcgaaaaaggg

SEQ ID NO: 1222157 - DNA, 25 bp, Homo sapien
ggatctccacccagttgccagatga

SEQ ID NO: 1222158 - DNA, 25 bp, Homo sapien
agctgttggtagtggtgaggaggag

SEQ ID NO: 1222159 - DNA, 25 bp, Homo sapien
gaggaggatgcagaaccctcaaggc

SEQ ID NO: 1222160 - DNA, 25 bp, Homo sapien
atgcagaaccctcaaggcgcccagc

SEQ ID NO: 1222161 - DNA, 25 bp, Homo sapien
gagcccaaggagactctcttctggc

SEQ ID NO: 1222162 - DNA, 25 bp, Homo sapien
agcccaaggagactctcttctggct

SEQ ID NO: 1222163 - DNA, 25 bp, Homo sapien
gcccaaggagactctcttctggctc

SEQ ID NO: 1222164 - DNA, 25 bp, Homo sapien
tggcctactcccactggatgtgcca

SEQ ID NO: 1222165 - DNA, 25 bp, Homo sapien
cttggcctactcccactggatgtgc

SEQ ID NO: 1222166 - DNA, 25 bp, Homo sapien
ttggcctactcccactggatgtgcc

SEQ ID NO: 1222167 - DNA, 25 bp, Homo sapien
gagctttgtcaggactttgagtccc

SEQ ID NO: 1222168 - DNA, 25 bp, Homo sapien
ccagatataggagacattcgccttt

SEQ ID NO: 1222169 - DNA, 25 bp, Homo sapien
gactttgagtccctgacaggctcca

SEQ ID NO: 1222170 - DNA, 25 bp, Homo sapien
ggagacattcgcctttgagctttgt

SEQ ID NO: 1222171 - DNA, 25 bp, Homo sapien
agtgtgaacagagcatacgtctcac

SEQ ID NO: 1222172 - DNA, 25 bp, Homo sapien
gtgcacacaagtgcactgtgtagtc

SEQ ID NO: 1222173 - DNA, 25 bp, Homo sapien
caggtgcacacaagtgcactgtgta

SEQ ID NO: 1222174 - DNA, 25 bp, Homo sapien
ggtgcacacaagtgcactgtgtagt

SEQ ID NO: 1222175 - DNA, 25 bp, Homo sapien
aggtgcacacaagtgcactgtgtag

SEQ ID NO: 1222176 - DNA, 25 bp, Homo sapien
tgcagagactgtttccggaaggtcc

SEQ ID NO: 1222177 - DNA, 25 bp, Homo sapien
ttccatcccaagaatgtgcgtgtgc

SEQ ID NO: 1222178 - DNA, 25 bp, Homo sapien
taaagggactgatggcttccggcct

SEQ ID NO: 1222179 - DNA, 25 bp, Homo sapien
caattgcctagagagtggatccttt

SEQ ID NO: 1222180 - DNA, 25 bp, Homo sapien
caattccaagaagccgtgaccgggg

SEQ ID NO: 1222181 - DNA, 25 bp, Homo sapien
gactgtggtggtgtccagccccgac

SEQ ID NO: 1222182 - DNA, 25 bp, Homo sapien
agcaattccaagaagccgtgaccgg

SEQ ID NO: 1222183 - DNA, 25 bp, Homo sapien
ccagcaattccaagaagccgtgacc

SEQ ID NO: 1222184 - DNA, 25 bp, Homo sapien
tacaaaatacataggtcctatttgt

SEQ ID NO: 1222185 - DNA, 25 bp, Homo sapien
cctgaacgcagggtggcttgggcat

SEQ ID NO: 1222186 - DNA, 25 bp, Homo sapien
ttgggcatgcccagatggatgagtt

SEQ ID NO: 1222187 - DNA, 25 bp, Homo sapien
ctgtgaacatccagggaccatacaa

SEQ ID NO: 1222188 - DNA, 25 bp, Homo sapien
tggccgggaatccagaagcggaact

SEQ ID NO: 1222189 - DNA, 25 bp, Homo sapien
gatgcatgaagaagctatcggaacc

SEQ ID NO: 1222190 - DNA, 25 bp, Homo sapien
aacaatgggcggatgggcccagaca

SEQ ID NO: 1222191 - DNA, 25 bp, Homo sapien
acacagtcaggcaggaacaatgggc

SEQ ID NO: 1222192 - DNA, 25 bp, Homo sapien
cactctcttctccttgccctccagc

SEQ ID NO: 1222193 - DNA, 25 bp, Homo sapien
cccctccactctcttctccttgccc

SEQ ID NO: 1222194 - DNA, 25 bp, Homo sapien
cctccactctcttctccttgccctc

SEQ ID NO: 1222195 - DNA, 25 bp, Homo sapien
tctcttctccttgccctccagccat

SEQ ID NO: 1222196 - DNA, 25 bp, Homo sapien
tgtgctgttggtggcccttgccgag

SEQ ID NO: 1222197 - DNA, 25 bp, Homo sapien
aacaggaaggcgatgtcgggcagcc

SEQ ID NO: 1222198 - DNA, 25 bp, Homo sapien
agactccactggcagcaacttctgc

SEQ ID NO: 1222199 - DNA, 25 bp, Homo sapien
ctcggctgccagtacctatcttggc

SEQ ID NO: 1222200 - DNA, 25 bp, Homo sapien
gtgcctcggagcacagcccgacgaa

SEQ ID NO: 1222201 - DNA, 25 bp, Homo sapien
caacactgagcgttctccagccagg

SEQ ID NO: 1222202 - DNA, 25 bp, Homo sapien
aagcttctcaagcatgctgccaaca

SEQ ID NO: 1222203 - DNA, 25 bp, Homo sapien
ccaactgcacagtctgtggagccct

SEQ ID NO: 1222204 - DNA, 25 bp, Homo sapien
tgcatggatcgctgggccactggac

SEQ ID NO: 1222205 - DNA, 25 bp, Homo sapien
gctatgagccgcctagatgatgcat

SEQ ID NO: 1222206 - DNA, 25 bp, Homo sapien
ggcttgaaggagaacacggctgcat

SEQ ID NO: 1222207 - DNA, 25 bp, Homo sapien
tgctttgaaggtggcaatccacgaa

SEQ ID NO: 1222208 - DNA, 25 bp, Homo sapien
ggttgggacaggcagaaaccagcct

SEQ ID NO: 1222209 - DNA, 25 bp, Homo sapien
gcctgagaaaagcacggaaaacaat

SEQ ID NO: 1222210 - DNA, 25 bp, Homo sapien
tgggccccttgtcagccatggccag

SEQ ID NO: 1222211 - DNA, 25 bp, Homo sapien
gaaaacaatgtccagtgccatgatc

SEQ ID NO: 1222212 - DNA, 25 bp, Homo sapien
gatcagtccgctaaagttgacccga

SEQ ID NO: 1222213 - DNA, 25 bp, Homo sapien
gattacacagcaagccgagaggctg

SEQ ID NO: 1222214 - DNA, 25 bp, Homo sapien
tgggtttaaccctcgagctcctgtc

SEQ ID NO: 1222215 - DNA, 25 bp, Homo sapien
gacagatcaattagttcccaaggga

SEQ ID NO: 1222216 - DNA, 25 bp, Homo sapien
tgtgagagaggttcccccgctatca

SEQ ID NO: 1222217 - DNA, 25 bp, Homo sapien
ccttcaaagcttgtagtgatcagag

SEQ ID NO: 1222218 - DNA, 25 bp, Homo sapien
tgatcagaggtattaaactctggag

SEQ ID NO: 1222219 - DNA, 25 bp, Homo sapien
ctggagccaacagctaatatttgtt

SEQ ID NO: 1222220 - DNA, 25 bp, Homo sapien
ttgagcaatgccatgaggacttcca

SEQ ID NO: 1222221 - DNA, 25 bp, Homo sapien
cttgagcaatgccatgaggacttcc

SEQ ID NO: 1222222 - DNA, 25 bp, Homo sapien
ccttgagcaatgccatgaggacttc

SEQ ID NO: 1222223 - DNA, 25 bp, Homo sapien
cccttgagcaatgccatgaggactt

SEQ ID NO: 1222224 - DNA, 25 bp, Homo sapien
gcagatgtccccaggattgccagag

SEQ ID NO: 1222225 - DNA, 25 bp, Homo sapien
cagctcatggaccagacagtcacct

SEQ ID NO: 1222226 - DNA, 25 bp, Homo sapien
ggaccagacagtcacctagagcaga

SEQ ID NO: 1222227 - DNA, 25 bp, Homo sapien
cagagacagactgggccagcccagc

SEQ ID NO: 1222228 - DNA, 25 bp, Homo sapien
tgttggaccacaaatctgtctctaa

SEQ ID NO: 1222229 - DNA, 25 bp, Homo sapien
cgttgttggaccacaaatctgtctc

SEQ ID NO: 1222230 - DNA, 25 bp, Homo sapien
tggaccacaaatctgtctctaagct

SEQ ID NO: 1222231 - DNA, 25 bp, Homo sapien
ggaccacaaatctgtctctaagctt

SEQ ID NO: 1222232 - DNA, 25 bp, Homo sapien
tgagacacgtggcttactttacccc

SEQ ID NO: 1222233 - DNA, 25 bp, Homo sapien
gaaatcccagacaaccaaagctgct

SEQ ID NO: 1222234 - DNA, 25 bp, Homo sapien
gaaaggttgcattccacccggcatt

SEQ ID NO: 1222235 - DNA, 25 bp, Homo sapien
gatggatttcacaccaaggaggagg

SEQ ID NO: 1222236 - DNA, 25 bp, Homo sapien
gttagggccagtggcctttccagac

SEQ ID NO: 1222237 - DNA, 25 bp, Homo sapien
taagcgtcataacccatggctttat

SEQ ID NO: 1222238 - DNA, 25 bp, Homo sapien
ccagacttgcgtgccaggagagatg

SEQ ID NO: 1222239 - DNA, 25 bp, Homo sapien
cgcagagccagcatggttagggcca

SEQ ID NO: 1222240 - DNA, 25 bp, Homo sapien
tcagatattgagaaaaattaccaac

SEQ ID NO: 1222241 - DNA, 25 bp, Homo sapien
caagccctgtcagatattgagaaaa

SEQ ID NO: 1222242 - DNA, 25 bp, Homo sapien
acctgaagaaaaggcttcacgctgc

SEQ ID NO: 1222243 - DNA, 25 bp, Homo sapien
agaaaaggcttcacgctgcccagct

SEQ ID NO: 1222244 - DNA, 25 bp, Homo sapien
tatcagagggttagagttgccgaga

SEQ ID NO: 1222245 - DNA, 25 bp, Homo sapien
tctctcccgccctccgtttggctta

SEQ ID NO: 1222246 - DNA, 25 bp, Homo sapien
cttggcgatctctatcagagggtta

SEQ ID NO: 1222247 - DNA, 25 bp, Homo sapien
ttagagttgccgagaggcgccagct

SEQ ID NO: 1222248 - DNA, 25 bp, Homo sapien
cattaagaatagtttccaacacatg

SEQ ID NO: 1222249 - DNA, 25 bp, Homo sapien
cacttttgcattaagaatagtttcc

SEQ ID NO: 1222250 - DNA, 25 bp, Homo sapien
aaccacagcaagctctatggatacc

SEQ ID NO: 1222251 - DNA, 25 bp, Homo sapien
ccacagcaagctctatggataccaa

SEQ ID NO: 1222252 - DNA, 25 bp, Homo sapien
ccagcctcctgtgctactctttatt

SEQ ID NO: 1222253 - DNA, 25 bp, Homo sapien
cctgtgctactctttattattgtct

SEQ ID NO: 1222254 - DNA, 25 bp, Homo sapien
agcctcctgtgctactctttattat

SEQ ID NO: 1222255 - DNA, 25 bp, Homo sapien
cctcctgtgctactctttattattg

SEQ ID NO: 1222256 - DNA, 25 bp, Homo sapien
gatgagagcccgtttctcatagatg

SEQ ID NO: 1222257 - DNA, 25 bp, Homo sapien
atgagagcccgtttctcatagatgg

SEQ ID NO: 1222258 - DNA, 25 bp, Homo sapien
catcatggaccacttctgcattctg

SEQ ID NO: 1222259 - DNA, 25 bp, Homo sapien
tcatggaccacttctgcattctgga

SEQ ID NO: 1222260 - DNA, 25 bp, Homo sapien
catggaccacttctgcattctggaa

SEQ ID NO: 1222261 - DNA, 25 bp, Homo sapien
tggcatcatggaccacttctgcatt

SEQ ID NO: 1222262 - DNA, 25 bp, Homo sapien
taaggtactatgtcatgagcatgga

SEQ ID NO: 1222263 - DNA, 25 bp, Homo sapien
ctgatgccatgtgggtggtgccctc

SEQ ID NO: 1222264 - DNA, 25 bp, Homo sapien
gaaggcgtgagttgtgacatgtcct

SEQ ID NO: 1222265 - DNA, 25 bp, Homo sapien
gaaatcagctgcaggctgatgccat

SEQ ID NO: 1222266 - DNA, 25 bp, Homo sapien
ccttggctgtggaataggcccatgc

SEQ ID NO: 1222267 - DNA, 25 bp, Homo sapien
tcctggaccgaatgcacactcgagt

SEQ ID NO: 1222268 - DNA, 25 bp, Homo sapien
cagcaacaaaaaagggtgcgggctc

SEQ ID NO: 1222269 - DNA, 25 bp, Homo sapien
caccgaaggattaacactgaacagc

SEQ ID NO: 1222270 - DNA, 25 bp, Homo sapien
ccttcatcgaaaccctgtgaggcag

SEQ ID NO: 1222271 - DNA, 25 bp, Homo sapien
tgttgcagtggacaagctctccggg

SEQ ID NO: 1222272 - DNA, 25 bp, Homo sapien
cccttagcgtgttgcactgttgcag

SEQ ID NO: 1222273 - DNA, 25 bp, Homo sapien
tacagggaggtactgggtctcagca

SEQ ID NO: 1222274 - DNA, 25 bp, Homo sapien
ttcactggaggccatgtggcagatc

SEQ ID NO: 1222275 - DNA, 25 bp, Homo sapien
ggagtctacagttcactggaggcca

SEQ ID NO: 1222276 - DNA, 25 bp, Homo sapien
atattcaccaaatgaagaactttgg

SEQ ID NO: 1222277 - DNA, 25 bp, Homo sapien
ctatgcaggagtctacagttcactg

SEQ ID NO: 1222278 - DNA, 25 bp, Homo sapien
taagccacgtatttgggagaaagtc

SEQ ID NO: 1222279 - DNA, 25 bp, Homo sapien
ccttgccccaattactctgtgtggt

SEQ ID NO: 1222280 - DNA, 25 bp, Homo sapien
ggttttcaatgtaatcagtagcaag

SEQ ID NO: 1222281 - DNA, 25 bp, Homo sapien
catgcaccggtaattcgatctgaac

SEQ ID NO: 1222282 - DNA, 25 bp, Homo sapien
ccacagggatgtttcacagggcatg

SEQ ID NO: 1222283 - DNA, 25 bp, Homo sapien
gcagctgcctcgaccatgtgccagt

SEQ ID NO: 1222284 - DNA, 25 bp, Homo sapien
ggatgtttcacagggcatgcttaag

SEQ ID NO: 1222285 - DNA, 25 bp, Homo sapien
tgcttaagctgcctaagcagctgcc

SEQ ID NO: 1222286 - DNA, 25 bp, Homo sapien
gcatttggtccatctgcgggttacc

SEQ ID NO: 1222287 - DNA, 25 bp, Homo sapien
atttggtccatctgcgggttaccgg

SEQ ID NO: 1222288 - DNA, 25 bp, Homo sapien
catttggtccatctgcgggttaccg

SEQ ID NO: 1222289 - DNA, 25 bp, Homo sapien
ctaggttggctcgagtttttcttct

SEQ ID NO: 1222290 - DNA, 25 bp, Homo sapien
tggggtccttcctaggttggctcga

SEQ ID NO: 1222291 - DNA, 25 bp, Homo sapien
tgtatgcttgacaggctccaaggcc

SEQ ID NO: 1222292 - DNA, 25 bp, Homo sapien
acatgttttatggtcgggcttggcg

SEQ ID NO: 1222293 - DNA, 25 bp, Homo sapien
taaaccaatgcttcagtcctgggaa

SEQ ID NO: 1222294 - DNA, 25 bp, Homo sapien
tatcattccagctgtgtggaccaca

SEQ ID NO: 1222295 - DNA, 25 bp, Homo sapien
gacctccaagaatctgtagggtggg

SEQ ID NO: 1222296 - DNA, 25 bp, Homo sapien
gaagcactgttaccatctcgtggct

SEQ ID NO: 1222297 - DNA, 25 bp, Homo sapien
tttcttggagataagtgagccagac

SEQ ID NO: 1222298 - DNA, 25 bp, Homo sapien
aaggtcgatcagagcccctgcagag

SEQ ID NO: 1222299 - DNA, 25 bp, Homo sapien
agcatgcggtcatgcagtgtgagga

SEQ ID NO: 1222300 - DNA, 25 bp, Homo sapien
acagcatgcggtcatgcagtgtgag

SEQ ID NO: 1222301 - DNA, 25 bp, Homo sapien
catgcggtcatgcagtgtgaggagc

SEQ ID NO: 1222302 - DNA, 25 bp, Homo sapien
ccacagcatgcggtcatgcagtgtg

SEQ ID NO: 1222303 - DNA, 25 bp, Homo sapien
tgatccccgcctacactcgtttcct

SEQ ID NO: 1222304 - DNA, 25 bp, Homo sapien
cttgatccccgcctacactcgtttc

SEQ ID NO: 1222305 - DNA, 25 bp, Homo sapien
cctacactcgtttcctctgtgtgca

SEQ ID NO: 1222306 - DNA, 25 bp, Homo sapien
cccgcctacactcgtttcctctgtg

SEQ ID NO: 1222307 - DNA, 25 bp, Homo sapien
cttgcagtagtccagtggttcagtt

SEQ ID NO: 1222308 - DNA, 25 bp, Homo sapien
tgtggtgactgtctagcccacaagc

SEQ ID NO: 1222309 - DNA, 25 bp, Homo sapien
tggttcagttttggtctggcttcct

SEQ ID NO: 1222310 - DNA, 25 bp, Homo sapien
gtctagcccacaagctgagttatgg

SEQ ID NO: 1222311 - DNA, 25 bp, Homo sapien
ctaagtctgtttgcacgcatgtgcc

SEQ ID NO: 1222312 - DNA, 25 bp, Homo sapien
tgtgccctgcgtgtattctctgccg

SEQ ID NO: 1222313 - DNA, 25 bp, Homo sapien
ggaatcacggcttgctgaagccaga

SEQ ID NO: 1222314 - DNA, 25 bp, Homo sapien
tgaagccagagcacaaggcggagat

SEQ ID NO: 1222315 - DNA, 25 bp, Homo sapien
cattacctgttggtgaccccagatc

SEQ ID NO: 1222316 - DNA, 25 bp, Homo sapien
tccactgtcattacctgttggtgac

SEQ ID NO: 1222317 - DNA, 25 bp, Homo sapien
ggtgaccccagatctctaatgtctt

SEQ ID NO: 1222318 - DNA, 25 bp, Homo sapien
tgtcattacctgttggtgaccccag

SEQ ID NO: 1222319 - DNA, 25 bp, Homo sapien
aactgtctcttcccaagcggcatct

SEQ ID NO: 1222320 - DNA, 25 bp, Homo sapien
tgtctcttcccaagcggcatctgac

SEQ ID NO: 1222321 - DNA, 25 bp, Homo sapien
tgagaactctcagaggggcaaagca

SEQ ID NO: 1222322 - DNA, 25 bp, Homo sapien
gagaactctcagaggggcaaagcaa

SEQ ID NO: 1222323 - DNA, 25 bp, Homo sapien
gagagagcgtcagatccaacaggat

SEQ ID NO: 1222324 - DNA, 25 bp, Homo sapien
ttttgtgcgcggtgccataggctgc

SEQ ID NO: 1222325 - DNA, 25 bp, Homo sapien
taccaacagggattggcagcctaca

SEQ ID NO: 1222326 - DNA, 25 bp, Homo sapien
tcccgggacagaagtcacatggacc

SEQ ID NO: 1222327 - DNA, 25 bp, Homo sapien
acttcagggtgtcccctgagtttgt

SEQ ID NO: 1222328 - DNA, 25 bp, Homo sapien
tgcaatactgtggtgctgcccttca

SEQ ID NO: 1222329 - DNA, 25 bp, Homo sapien
actccaagggacacttcagggtgtc

SEQ ID NO: 1222330 - DNA, 25 bp, Homo sapien
ggacacttcagggtgtcccctgagt

SEQ ID NO: 1222331 - DNA, 25 bp, Homo sapien
aaacacactgagtgttcatgtacca

SEQ ID NO: 1222332 - DNA, 25 bp, Homo sapien
tgagtgtgcatagttgtgtgcactc

SEQ ID NO: 1222333 - DNA, 25 bp, Homo sapien
gtgtgcactctggatccttttttgc

SEQ ID NO: 1222334 - DNA, 25 bp, Homo sapien
tgagtgttcatgtaccaggttttaa

SEQ ID NO: 1222335 - DNA, 25 bp, Homo sapien
gttgttgttaccagacctaggagac

SEQ ID NO: 1222336 - DNA, 25 bp, Homo sapien
taccccaggataatgttcactgacg

SEQ ID NO: 1222337 - DNA, 25 bp, Homo sapien
ttcactgacgttgtccagggccctg

SEQ ID NO: 1222338 - DNA, 25 bp, Homo sapien
gctggccagagttcaaggtaatcct

SEQ ID NO: 1222339 - DNA, 25 bp, Homo sapien
tccaaccgtattagctaccaaagca

SEQ ID NO: 1222340 - DNA, 25 bp, Homo sapien
actgcgaggtgggcactaagacatt

SEQ ID NO: 1222341 - DNA, 25 bp, Homo sapien
gggacaaacatccaaccgtattagc

SEQ ID NO: 1222342 - DNA, 25 bp, Homo sapien
cttgtgaactaatagaatgagactc

SEQ ID NO: 1222343 - DNA, 25 bp, Homo sapien
ctgttaggggagagtgggaggagag

SEQ ID NO: 1222344 - DNA, 25 bp, Homo sapien
gtgggaggagaggaggggcaggcat

SEQ ID NO: 1222345 - DNA, 25 bp, Homo sapien
gagagtgggaggagaggaggggcag

SEQ ID NO: 1222346 - DNA, 25 bp, Homo sapien
gagtgggaggagaggaggggcaggc

SEQ ID NO: 1222347 - DNA, 25 bp, Homo sapien
ggagattctagcacagagggtgcca

SEQ ID NO: 1222348 - DNA, 25 bp, Homo sapien
gcagcaggagattctagcacagagg

SEQ ID NO: 1222349 - DNA, 25 bp, Homo sapien
caggagattctagcacagagggtgc

SEQ ID NO: 1222350 - DNA, 25 bp, Homo sapien
agagggtgccagcaagcaggggtgc

SEQ ID NO: 1222351 - DNA, 25 bp, Homo sapien
tatatacaggaagcacataagacac

SEQ ID NO: 1222352 - DNA, 25 bp, Homo sapien
tactgaatgtgcagtaaggaggctg

SEQ ID NO: 1222353 - DNA, 25 bp, Homo sapien
gcctaaactgcaagtgatgtgttcc

SEQ ID NO: 1222354 - DNA, 25 bp, Homo sapien
gatgtgttccatgcatacccaatgc

SEQ ID NO: 1222355 - DNA, 25 bp, Homo sapien
ggtacctagaagtggagagatcaga

SEQ ID NO: 1222356 - DNA, 25 bp, Homo sapien
ttcagtttcttagcagtgcacacta

SEQ ID NO: 1222357 - DNA, 25 bp, Homo sapien
cactatcagggccagctgatggaca

SEQ ID NO: 1222358 - DNA, 25 bp, Homo sapien
ccagctgatggacagttgagggaaa

SEQ ID NO: 1222359 - DNA, 25 bp, Homo sapien
ctgttttggtgagattctaatttct

SEQ ID NO: 1222360 - DNA, 25 bp, Homo sapien
ctatctgtatttaggctgctgtttt

SEQ ID NO: 1222361 - DNA, 25 bp, Homo sapien
tgctgttttggtgagattctaattt

SEQ ID NO: 1222362 - DNA, 25 bp, Homo sapien
ctgtatttaggctgctgttttggtg

SEQ ID NO: 1222363 - DNA, 25 bp, Homo sapien
cccaacaattaggaactggaccctg

SEQ ID NO: 1222364 - DNA, 25 bp, Homo sapien
tatttgggcattaatatctgcaggc

SEQ ID NO: 1222365 - DNA, 25 bp, Homo sapien
cacgtggatctggtttatgaatgca

SEQ ID NO: 1222366 - DNA, 25 bp, Homo sapien
tgtaatcattttgcgccaatcccca

SEQ ID NO: 1222367 - DNA, 25 bp, Homo sapien
tggagttctcctgcttgcactagag

SEQ ID NO: 1222368 - DNA, 25 bp, Homo sapien
tacagtgatggaacatgtgcttggc

SEQ ID NO: 1222369 - DNA, 25 bp, Homo sapien
tatgccactgtacaaaactgaagaa

SEQ ID NO: 1222370 - DNA, 25 bp, Homo sapien
cacagcagacaaggttgagaatcca

SEQ ID NO: 1222371 - DNA, 25 bp, Homo sapien
gaattcatttcatagagcagcgtgt

SEQ ID NO: 1222372 - DNA, 25 bp, Homo sapien
tggaaatagtggacctgacccaatt

SEQ ID NO: 1222373 - DNA, 25 bp, Homo sapien
caaggcataatctgaggagcatagc

SEQ ID NO: 1222374 - DNA, 25 bp, Homo sapien
aacacgaccttattgctacctcagg

SEQ ID NO: 1222375 - DNA, 25 bp, Homo sapien
accctattccctggcataatcatgg

SEQ ID NO: 1222376 - DNA, 25 bp, Homo sapien
gacatgaagcatgccagcagtgaca

SEQ ID NO: 1222377 - DNA, 25 bp, Homo sapien
gctgcaagggcatttatccaagttc

SEQ ID NO: 1222378 - DNA, 25 bp, Homo sapien
aacagtgcttaaccttttgtgcctc

SEQ ID NO: 1222379 - DNA, 25 bp, Homo sapien
ggaagtcattgcagaagtctaggca

SEQ ID NO: 1222380 - DNA, 25 bp, Homo sapien
gaagaattgcttcacccaaaatgcc

SEQ ID NO: 1222381 - DNA, 25 bp, Homo sapien
ccctaattcatgcttgacagtggtg

SEQ ID NO: 1222382 - DNA, 25 bp, Homo sapien
gattgtaacagactattggccaggc

SEQ ID NO: 1222383 - DNA, 25 bp, Homo sapien
ctgtagggtaatcttattggaatat

SEQ ID NO: 1222384 - DNA, 25 bp, Homo sapien
ttccctagaggagattgttccaaac

SEQ ID NO: 1222385 - DNA, 25 bp, Homo sapien
tttcctcttgaggtgatcaaattcc

SEQ ID NO: 1222386 - DNA, 25 bp, Homo sapien
gaggtgatcaaattccctagaggag

SEQ ID NO: 1222387 - DNA, 25 bp, Homo sapien
ggataacatagagcccttcacacat

SEQ ID NO: 1222388 - DNA, 25 bp, Homo sapien
tatcaggagggtaacttttgcatgg

SEQ ID NO: 1222389 - DNA, 25 bp, Homo sapien
cccattcctggtgataagaatattc

SEQ ID NO: 1222390 - DNA, 25 bp, Homo sapien
tacggtttgttgtgcagactcatcc

SEQ ID NO: 1222391 - DNA, 25 bp, Homo sapien
gtcttgccctataagctgctctcca

SEQ ID NO: 1222392 - DNA, 25 bp, Homo sapien
catagattgtatgccttgtttgatc

SEQ ID NO: 1222393 - DNA, 25 bp, Homo sapien
accgtgcgcggcaactcttttctta

SEQ ID NO: 1222394 - DNA, 25 bp, Homo sapien
tgtaataccatggtgcattccaact

SEQ ID NO: 1222395 - DNA, 25 bp, Homo sapien
cccgggtgacaggtccggcctctga

SEQ ID NO: 1222396 - DNA, 25 bp, Homo sapien
cctctgtccgcaggcagccgcgagg

SEQ ID NO: 1222397 - DNA, 25 bp, Homo sapien
gcgaggggagtagggcgccagcgcg

SEQ ID NO: 1222398 - DNA, 25 bp, Homo sapien
tgagtccccgccgtccctctgtccg

SEQ ID NO: 1222399 - DNA, 25 bp, Homo sapien
tggccgagcgtccaggtagccccga

SEQ ID NO: 1222400 - DNA, 25 bp, Homo sapien
gaggtcctggccgagcgtccaggta

SEQ ID NO: 1222401 - DNA, 25 bp, Homo sapien
ccaggcggggcaagcgggccaggca

SEQ ID NO: 1222402 - DNA, 25 bp, Homo sapien
agggccccgactcgctggcgcaggg

SEQ ID NO: 1222403 - DNA, 25 bp, Homo sapien
ggcgggggcgatgaatgggaaagtg

SEQ ID NO: 1222404 - DNA, 25 bp, Homo sapien
ctctgtgtagaccattcattcccac

SEQ ID NO: 1222405 - DNA, 25 bp, Homo sapien
tctctgtgtagaccattcattccca

SEQ ID NO: 1222406 - DNA, 25 bp, Homo sapien
gcgggggcgatgaatgggaaagtgg

SEQ ID NO: 1222407 - DNA, 25 bp, Homo sapien
taggacttgaagttacaacatgaaa

SEQ ID NO: 1222408 - DNA, 25 bp, Homo sapien
cttgagatgtgagattcagtggtct

SEQ ID NO: 1222409 - DNA, 25 bp, Homo sapien
cagaagttaggggcttgctgtcaat

SEQ ID NO: 1222410 - DNA, 25 bp, Homo sapien
gcttgctgtcaatgataggacttga

SEQ ID NO: 1222411 - DNA, 25 bp, Homo sapien
taaattctacccacactttactgat

SEQ ID NO: 1222412 - DNA, 25 bp, Homo sapien
acctctctgtttcccagacatatca

SEQ ID NO: 1222413 - DNA, 25 bp, Homo sapien
cattgccacaatgggccactcacct

SEQ ID NO: 1222414 - DNA, 25 bp, Homo sapien
actgattagctcattttagaggagg

SEQ ID NO: 1222415 - DNA, 25 bp, Homo sapien
gaaatacagtccatgcttttgttgt

SEQ ID NO: 1222416 - DNA, 25 bp, Homo sapien
catgcttttgttgtccataggctga

SEQ ID NO: 1222417 - DNA, 25 bp, Homo sapien
tacagtccatgcttttgttgtccat

SEQ ID NO: 1222418 - DNA, 25 bp, Homo sapien
gctgagaaatacagtccatgctttt

SEQ ID NO: 1222419 - DNA, 25 bp, Homo sapien
caagaaagtccaaagtacaatagtg

SEQ ID NO: 1222420 - DNA, 25 bp, Homo sapien
aattaggcttggctgtacatgacaa

SEQ ID NO: 1222421 - DNA, 25 bp, Homo sapien
tctctcctgttaaagagaccagagg

SEQ ID NO: 1222422 - DNA, 25 bp, Homo sapien
tgatcatcagggatccacacacgtg

SEQ ID NO: 1222423 - DNA, 25 bp, Homo sapien
ataagaagggtgagacgatgttgaa

SEQ ID NO: 1222424 - DNA, 25 bp, Homo sapien
acttgtgttattaataagaagggtg

SEQ ID NO: 1222425 - DNA, 25 bp, Homo sapien
gaccatccatgtcaattttcaagga

SEQ ID NO: 1222426 - DNA, 25 bp, Homo sapien
gtttacaagtggataacttgtgtta

SEQ ID NO: 1222427 - DNA, 25 bp, Homo sapien
caaaagtttatggtgacagtgcccc

SEQ ID NO: 1222428 - DNA, 25 bp, Homo sapien
tttatggtgcaaaagagtgctgcaa

SEQ ID NO: 1222429 - DNA, 25 bp, Homo sapien
tgcttggctcaacttcttaatggta

SEQ ID NO: 1222430 - DNA, 25 bp, Homo sapien
atcagttcgaaaagagcccctattg

SEQ ID NO: 1222431 - DNA, 25 bp, Homo sapien
tagccactaaacagaggctctcttg

SEQ ID NO: 1222432 - DNA, 25 bp, Homo sapien
gagcatggagctaggtagtacccgc

SEQ ID NO: 1222433 - DNA, 25 bp, Homo sapien
cgcaagctcttcgtaacaccagcgg

SEQ ID NO: 1222434 - DNA, 25 bp, Homo sapien
gccagagctgatccagggtaatagc

SEQ ID NO: 1222435 - DNA, 25 bp, Homo sapien
tgatatactgaactccctgcccagt

SEQ ID NO: 1222436 - DNA, 25 bp, Homo sapien
gcctgtgatatactgaactccctgc

SEQ ID NO: 1222437 - DNA, 25 bp, Homo sapien
cactaagcctgtgatatactgaact

SEQ ID NO: 1222438 - DNA, 25 bp, Homo sapien
gattgttggggacactaagcctgtg

SEQ ID NO: 1222439 - DNA, 25 bp, Homo sapien
tccccagtctggtagtcagcatttc

SEQ ID NO: 1222440 - DNA, 25 bp, Homo sapien
atttctgacagctgtttggcatggc

SEQ ID NO: 1222441 - DNA, 25 bp, Homo sapien
gccacagtccttgtctgcattcttc

SEQ ID NO: 1222442 - DNA, 25 bp, Homo sapien
ggcatggctttcaattagagacagc

SEQ ID NO: 1222443 - DNA, 25 bp, Homo sapien
tcaaatagggtgtatcccagaatgt

SEQ ID NO: 1222444 - DNA, 25 bp, Homo sapien
gagccatgtccctcatgcgcatata

SEQ ID NO: 1222445 - DNA, 25 bp, Homo sapien
gacaacacatcatggtcaaataggg

SEQ ID NO: 1222446 - DNA, 25 bp, Homo sapien
cattgctttcacttcgagccatgtc

SEQ ID NO: 1222447 - DNA, 25 bp, Homo sapien
tttcagggccaatctagcatccagg

SEQ ID NO: 1222448 - DNA, 25 bp, Homo sapien
cagtttgcagattgcgcttcagtgg

SEQ ID NO: 1222449 - DNA, 25 bp, Homo sapien
acctgtagctgatcggcagtttgca

SEQ ID NO: 1222450 - DNA, 25 bp, Homo sapien
tattaaggcccagttgagagcttct

SEQ ID NO: 1222451 - DNA, 25 bp, Homo sapien
tgaaagagccctacaaggagaatta

SEQ ID NO: 1222452 - DNA, 25 bp, Homo sapien
caaatcaagaatgcagttccattca

SEQ ID NO: 1222453 - DNA, 25 bp, Homo sapien
gttccattcacaataggcacaaaag

SEQ ID NO: 1222454 - DNA, 25 bp, Homo sapien
ccaatctcaaagccaaatcaagaat

SEQ ID NO: 1222455 - DNA, 25 bp, Homo sapien
tgccaatccaccaggggagtctgga

SEQ ID NO: 1222456 - DNA, 25 bp, Homo sapien
ggaaccaaggctttgcaacctctcc

SEQ ID NO: 1222457 - DNA, 25 bp, Homo sapien
gaagaggagtaaaatgccaatccac

SEQ ID NO: 1222458 - DNA, 25 bp, Homo sapien
ggggcagcaaggctaatcaagcaga

SEQ ID NO: 1222459 - DNA, 25 bp, Homo sapien
tgtccccatgtctatgatagccccg

SEQ ID NO: 1222460 - DNA, 25 bp, Homo sapien
gaaccttgtccccatgtctatgata

SEQ ID NO: 1222461 - DNA, 25 bp, Homo sapien
catgtctatgatagccccgatgaca

SEQ ID NO: 1222462 - DNA, 25 bp, Homo sapien
cttcgccaccgcttctcccaagcct

SEQ ID NO: 1222463 - DNA, 25 bp, Homo sapien
gacagcgtgctctttgcatcatcaa

SEQ ID NO: 1222464 - DNA, 25 bp, Homo sapien
cctgtgccaattaggtgtcaccagc

SEQ ID NO: 1222465 - DNA, 25 bp, Homo sapien
tcaaggtggcccctgtgccaattag

SEQ ID NO: 1222466 - DNA, 25 bp, Homo sapien
aggtctggtgagacagcgtgctctt

SEQ ID NO: 1222467 - DNA, 25 bp, Homo sapien
gatccacgctttccgtgggatggga

SEQ ID NO: 1222468 - DNA, 25 bp, Homo sapien
tcctagcaccctccattcagtgtga

SEQ ID NO: 1222469 - DNA, 25 bp, Homo sapien
cacatctggaattgtgtccaagaca

SEQ ID NO: 1222470 - DNA, 25 bp, Homo sapien
ccttgcccacagtggttgctcctag

SEQ ID NO: 1222471 - DNA, 25 bp, Homo sapien
tcctggttcgtggctcttccctcag

SEQ ID NO: 1222472 - DNA, 25 bp, Homo sapien
tggttcgtggctcttccctcagcca

SEQ ID NO: 1222473 - DNA, 25 bp, Homo sapien
ctggttcgtggctcttccctcagcc

SEQ ID NO: 1222474 - DNA, 25 bp, Homo sapien
tttctgaccactcctggttcgtggc

SEQ ID NO: 1222475 - DNA, 25 bp, Homo sapien
tttgaatgttggcagccttcagctg

SEQ ID NO: 1222476 - DNA, 25 bp, Homo sapien
gccgcatctcagtcagcaccacaca

SEQ ID NO: 1222477 - DNA, 25 bp, Homo sapien
aatgttggcagccttcagctgcatc

SEQ ID NO: 1222478 - DNA, 25 bp, Homo sapien
agccgcatctcagtcagcaccacac

SEQ ID NO: 1222479 - DNA, 25 bp, Homo sapien
gaaatgtgtctgtatcatctccctc

SEQ ID NO: 1222480 - DNA, 25 bp, Homo sapien
tttctaagaaatgtgtctgtatcat

SEQ ID NO: 1222481 - DNA, 25 bp, Homo sapien
aatgtgtctgtatcatctccctctc

SEQ ID NO: 1222482 - DNA, 25 bp, Homo sapien
tacagatttctaagaaatgtgtctg

SEQ ID NO: 1222483 - DNA, 25 bp, Homo sapien
ctagccttcatgcagtttccggtct

SEQ ID NO: 1222484 - DNA, 25 bp, Homo sapien
atgcagtttccggtctgagccttgc

SEQ ID NO: 1222485 - DNA, 25 bp, Homo sapien
tagccttcatgcagtttccggtctg

SEQ ID NO: 1222486 - DNA, 25 bp, Homo sapien
gtttccggtctgagccttgccactg

SEQ ID NO: 1222487 - DNA, 25 bp, Homo sapien
tgtgtcctcatactgcagtgagata

SEQ ID NO: 1222488 - DNA, 25 bp, Homo sapien
cctcatactgcagtgagatattcat

SEQ ID NO: 1222489 - DNA, 25 bp, Homo sapien
cttgtgtcctcatactgcagtgaga

SEQ ID NO: 1222490 - DNA, 25 bp, Homo sapien
tgtcctcatactgcagtgagatatt

SEQ ID NO: 1222491 - DNA, 25 bp, Homo sapien
tccctctggatgactggatctggac

SEQ ID NO: 1222492 - DNA, 25 bp, Homo sapien
gacaggtaaccttggaagctttcca

SEQ ID NO: 1222493 - DNA, 25 bp, Homo sapien
tctggacaggtaaccttggaagctt

SEQ ID NO: 1222494 - DNA, 25 bp, Homo sapien
tggatctggacaggtaaccttggaa

SEQ ID NO: 1222495 - DNA, 25 bp, Homo sapien
ctgccatgtgttttcatctatggat

SEQ ID NO: 1222496 - DNA, 25 bp, Homo sapien
ttcatctatggattctgcaacaagc

SEQ ID NO: 1222497 - DNA, 25 bp, Homo sapien
ctatggattctgcaacaagctttga

SEQ ID NO: 1222498 - DNA, 25 bp, Homo sapien
catctatggattctgcaacaagctt

SEQ ID NO: 1222499 - DNA, 25 bp, Homo sapien
gcttgaagcaatcctggctgatctg

SEQ ID NO: 1222500 - DNA, 25 bp, Homo sapien
ggaattcgaacacagattttccgga

SEQ ID NO: 1222501 - DNA, 25 bp, Homo sapien
tcatgcacgagatgtctgtcaaaca

SEQ ID NO: 1222502 - DNA, 25 bp, Homo sapien
tatgctaaaggcatggccagcaagg

SEQ ID NO: 1222503 - DNA, 25 bp, Homo sapien
gaaggtattctttgattcatgcacg

SEQ ID NO: 1222504 - DNA, 25 bp, Homo sapien
ctttatggaaggatctgtaaacaca

SEQ ID NO: 1222505 - DNA, 25 bp, Homo sapien
tgtctttatggaaggatctgtaaac

SEQ ID NO: 1222506 - DNA, 25 bp, Homo sapien
ccagattttgtctttatggaaggat

SEQ ID NO: 1222507 - DNA, 25 bp, Homo sapien
gctgcttcttgaaaagcgggggtct

SEQ ID NO: 1222508 - DNA, 25 bp, Homo sapien
gtgggcggctcacgaggagatcaag

SEQ ID NO: 1222509 - DNA, 25 bp, Homo sapien
tttcttaaaaattttgtctgacagc

SEQ ID NO: 1222510 - DNA, 25 bp, Homo sapien
aaattttgtctgacagctgggcgtg

SEQ ID NO: 1222511 - DNA, 25 bp, Homo sapien
gaggtgggcggctcacgaggagatc

SEQ ID NO: 1222512 - DNA, 25 bp, Homo sapien
tcctgcaatgctaagaatactcctg

SEQ ID NO: 1222513 - DNA, 25 bp, Homo sapien
cagtggacctcactcggagctgtgt

SEQ ID NO: 1222514 - DNA, 25 bp, Homo sapien
tatgattggcttttcccggattact

SEQ ID NO: 1222515 - DNA, 25 bp, Homo sapien
ttacagatttaaagtcctcccagca

SEQ ID NO: 1222516 - DNA, 25 bp, Homo sapien
gagttgtgcctagggaataattacc

SEQ ID NO: 1222517 - DNA, 25 bp, Homo sapien
cagtatgtagtgtgttgttgaccaa

SEQ ID NO: 1222518 - DNA, 25 bp, Homo sapien
tcaagacatctctggccaatatgaa

SEQ ID NO: 1222519 - DNA, 25 bp, Homo sapien
taccatctgattaccactgccaagg

SEQ ID NO: 1222520 - DNA, 25 bp, Homo sapien
tctgattggcttccgagcgacgtcc

SEQ ID NO: 1222521 - DNA, 25 bp, Homo sapien
actgacgtcacgctctctgattggc

SEQ ID NO: 1222522 - DNA, 25 bp, Homo sapien
cagggtcggaggaaaagcctcagct

SEQ ID NO: 1222523 - DNA, 25 bp, Homo sapien
cctcagctgagagaaaagtcgtaga

SEQ ID NO: 1222524 - DNA, 25 bp, Homo sapien
ttctcaggacgccaagctggggctg

SEQ ID NO: 1222525 - DNA, 25 bp, Homo sapien
gggctggcggagcaccgaattgaag

SEQ ID NO: 1222526 - DNA, 25 bp, Homo sapien
ggcggagcaccgaattgaagagcat

SEQ ID NO: 1222527 - DNA, 25 bp, Homo sapien
catttctcaggacgccaagctgggg

SEQ ID NO: 1222528 - DNA, 25 bp, Homo sapien
aataatatacttcaatctattaaca

SEQ ID NO: 1222529 - DNA, 25 bp, Homo sapien
ctctagcgtcgaaaacatctggaat

SEQ ID NO: 1222530 - DNA, 25 bp, Homo sapien
tctagcgtcgaaaacatctggaata

SEQ ID NO: 1222531 - DNA, 25 bp, Homo sapien
aatatacttcaatctattaacaggg

SEQ ID NO: 1222532 - DNA, 25 bp, Homo sapien
ggagacttcttacaatccagacaag

SEQ ID NO: 1222533 - DNA, 25 bp, Homo sapien
gagaataaaccgaagacagacaaac

SEQ ID NO: 1222534 - DNA, 25 bp, Homo sapien
gacagacaaactaggaggccatctg

SEQ ID NO: 1222535 - DNA, 25 bp, Homo sapien
ttttagaaggatcattagcagcaat

SEQ ID NO: 1222536 - DNA, 25 bp, Homo sapien
tattaatatctatggaagacaccat

SEQ ID NO: 1222537 - DNA, 25 bp, Homo sapien
gtgttcatcattaccactgcactga

SEQ ID NO: 1222538 - DNA, 25 bp, Homo sapien
gaggaactgggactcctgtttctcc

SEQ ID NO: 1222539 - DNA, 25 bp, Homo sapien
aagagaaggtacatccaaaaggagg

SEQ ID NO: 1222540 - DNA, 25 bp, Homo sapien
tgtttctccataagaagtgtgttca

SEQ ID NO: 1222541 - DNA, 25 bp, Homo sapien
caaagccttcttcattggcaactgc

SEQ ID NO: 1222542 - DNA, 25 bp, Homo sapien
gctagtacatgttccatattgggag

SEQ ID NO: 1222543 - DNA, 25 bp, Homo sapien
ttggcaactgctagtacatgttcca

SEQ ID NO: 1222544 - DNA, 25 bp, Homo sapien
gattctgtgttatacaatcgaacaa

SEQ ID NO: 1222545 - DNA, 25 bp, Homo sapien
aggccaggtcaaagacggcattcca

SEQ ID NO: 1222546 - DNA, 25 bp, Homo sapien
ccaggtcaaagacggcattccagtg

SEQ ID NO: 1222547 - DNA, 25 bp, Homo sapien
gacggcattccagtgagccatccat

SEQ ID NO: 1222548 - DNA, 25 bp, Homo sapien
tcaaagacggcattccagtgagcca

SEQ ID NO: 1222549 - DNA, 25 bp, Homo sapien
tagaaaaggcaactgacttgaggct

SEQ ID NO: 1222550 - DNA, 25 bp, Homo sapien
aatcagctcaccagcttttacgtcc

SEQ ID NO: 1222551 - DNA, 25 bp, Homo sapien
gaggctgcattgatgacctttgcat

SEQ ID NO: 1222552 - DNA, 25 bp, Homo sapien
gcattgatgacctttgcatgttcca

SEQ ID NO: 1222553 - DNA, 25 bp, Homo sapien
acaaaaatgtccttcgagaatgatg

SEQ ID NO: 1222554 - DNA, 25 bp, Homo sapien
caaaaatgtccttcgagaatgatga

SEQ ID NO: 1222555 - DNA, 25 bp, Homo sapien
gggaaaacctggagacagctagaga

SEQ ID NO: 1222556 - DNA, 25 bp, Homo sapien
tctggctgacccctgtaccatatgg

SEQ ID NO: 1222557 - DNA, 25 bp, Homo sapien
taccatatgggcaagagaaactgaa

SEQ ID NO: 1222558 - DNA, 25 bp, Homo sapien
tccgtgtttaaactcagtccaagtc

SEQ ID NO: 1222559 - DNA, 25 bp, Homo sapien
tctggatgcaagcagtagcatagtc

SEQ ID NO: 1222560 - DNA, 25 bp, Homo sapien
ctttggccccaaggcagcatacgct

SEQ ID NO: 1222561 - DNA, 25 bp, Homo sapien
cagaaattgaaataccaggtgggcc

SEQ ID NO: 1222562 - DNA, 25 bp, Homo sapien
cgctggcactggtgttaatggatcc

SEQ ID NO: 1222563 - DNA, 25 bp, Homo sapien
tctttggtagattcctcattcattt

SEQ ID NO: 1222564 - DNA, 25 bp, Homo sapien
cagtatgttggatcatttttccagg

SEQ ID NO: 1222565 - DNA, 25 bp, Homo sapien
aatttagctctattttatgatacct

SEQ ID NO: 1222566 - DNA, 25 bp, Homo sapien
gtatcagtatgttggatcatttttc

SEQ ID NO: 1222567 - DNA, 25 bp, Homo sapien
ttgtacacaatagtttctgatgatc

SEQ ID NO: 1222568 - DNA, 25 bp, Homo sapien
tagttgtacacaatagtttctgatg

SEQ ID NO: 1222569 - DNA, 25 bp, Homo sapien
tagtctagcaagtaccttattgatt

SEQ ID NO: 1222570 - DNA, 25 bp, Homo sapien
tttttcgtggttagtctagcaagta

SEQ ID NO: 1222571 - DNA, 25 bp, Homo sapien
gtatcccagaccataatgttgccat

SEQ ID NO: 1222572 - DNA, 25 bp, Homo sapien
ctggtatcccagaccataatgttgc

SEQ ID NO: 1222573 - DNA, 25 bp, Homo sapien
tggtatcccagaccataatgttgcc

SEQ ID NO: 1222574 - DNA, 25 bp, Homo sapien
ggtatcccagaccataatgttgcca

SEQ ID NO: 1222575 - DNA, 25 bp, Homo sapien
gagctccactgatttgattcacttg

SEQ ID NO: 1222576 - DNA, 25 bp, Homo sapien
aaggggtttgcttgtctgaggtatt

SEQ ID NO: 1222577 - DNA, 25 bp, Homo sapien
aggtattgtgagctccactgatttg

SEQ ID NO: 1222578 - DNA, 25 bp, Homo sapien
cactgatttgattcacttgcctata

SEQ ID NO: 1222579 - DNA, 25 bp, Homo sapien
tattctcgtcttgaaagaggaccac

SEQ ID NO: 1222580 - DNA, 25 bp, Homo sapien
agctcctgctgagactaaggtattc

SEQ ID NO: 1222581 - DNA, 25 bp, Homo sapien
ggaccacagtaacactttgctggaa

SEQ ID NO: 1222582 - DNA, 25 bp, Homo sapien
taaggtattctcgtcttgaaagagg

SEQ ID NO: 1222583 - DNA, 25 bp, Homo sapien
cagtataattcttacgtaaatccca

SEQ ID NO: 1222584 - DNA, 25 bp, Homo sapien
gctatgggttcttgtcgataagcag

SEQ ID NO: 1222585 - DNA, 25 bp, Homo sapien
caagttttcgagtgctgctacctgg

SEQ ID NO: 1222586 - DNA, 25 bp, Homo sapien
caggaaagacttggatgctatgggt

SEQ ID NO: 1222587 - DNA, 25 bp, Homo sapien
ctgtgcaattagcaaataaagtaga

SEQ ID NO: 1222588 - DNA, 25 bp, Homo sapien
catgtagatgttatcgtctgtgcaa

SEQ ID NO: 1222589 - DNA, 25 bp, Homo sapien
cccagtcatattaaacatgtagatg

SEQ ID NO: 1222590 - DNA, 25 bp, Homo sapien
gaatccaaaatcagacttgaatatc

SEQ ID NO: 1222591 - DNA, 25 bp, Homo sapien
tcacttgagccactgactaaaaact

SEQ ID NO: 1222592 - DNA, 25 bp, Homo sapien
tggtcatctggactaaggctggatt

SEQ ID NO: 1222593 - DNA, 25 bp, Homo sapien
ttctggtgtccattgaaaatagcca

SEQ ID NO: 1222594 - DNA, 25 bp, Homo sapien
ctggactaaggctggattttacata

SEQ ID NO: 1222595 - DNA, 25 bp, Homo sapien
gatgctattcagtggctatatcaga

SEQ ID NO: 1222596 - DNA, 25 bp, Homo sapien
gcagtagtgaggattaagaggccat

SEQ ID NO: 1222597 - DNA, 25 bp, Homo sapien
acttcctaaagtgtcaggctcaacg

SEQ ID NO: 1222598 - DNA, 25 bp, Homo sapien
ggctcaacgtttcaccagtcagtgg

SEQ ID NO: 1222599 - DNA, 25 bp, Homo sapien
cagtaggaggttgccagggtgtgga

SEQ ID NO: 1222600 - DNA, 25 bp, Homo sapien
agcacagtaggaggttgccagggtg

SEQ ID NO: 1222601 - DNA, 25 bp, Homo sapien
tttgtgaagtcagatggacaccagc

SEQ ID NO: 1222602 - DNA, 25 bp, Homo sapien
cagacgtgacctcttgagaatgacc

SEQ ID NO: 1222603 - DNA, 25 bp, Homo sapien
taaggccttgtgactggataattat

SEQ ID NO: 1222604 - DNA, 25 bp, Homo sapien
aaacaggtgtgtcttaaggccttgt

SEQ ID NO: 1222605 - DNA, 25 bp, Homo sapien
tccagatttccaacaaagctgactc

SEQ ID NO: 1222606 - DNA, 25 bp, Homo sapien
ttttgtctaataaacaggatataga

SEQ ID NO: 1222607 - DNA, 25 bp, Homo sapien
tctcctctaagcctctattcaagcg

SEQ ID NO: 1222608 - DNA, 25 bp, Homo sapien
ctctaagcctctattcaagcgccag

SEQ ID NO: 1222609 - DNA, 25 bp, Homo sapien
gcctctattcaagcgccagattttt

SEQ ID NO: 1222610 - DNA, 25 bp, Homo sapien
taagcctctattcaagcgccagatt

SEQ ID NO: 1222611 - DNA, 25 bp, Homo sapien
tgaacatttcccacattaatacaga

SEQ ID NO: 1222612 - DNA, 25 bp, Homo sapien
taacctgcttcttaatatattgtga

SEQ ID NO: 1222613 - DNA, 25 bp, Homo sapien
tagctacaatgtattctaaggtata

SEQ ID NO: 1222614 - DNA, 25 bp, Homo sapien
tctacaacacatttaacgctgccat

SEQ ID NO: 1222615 - DNA, 25 bp, Homo sapien
tcctggttaccagcaaggcagcaca

SEQ ID NO: 1222616 - DNA, 25 bp, Homo sapien
tgaagcatacggactgataggagac

SEQ ID NO: 1222617 - DNA, 25 bp, Homo sapien
gaggtagcgttccacagctttctga

SEQ ID NO: 1222618 - DNA, 25 bp, Homo sapien
tgatcttggtctccgaagcaggtgg

SEQ ID NO: 1222619 - DNA, 25 bp, Homo sapien
taggaaatgtatcttcccaccactg

SEQ ID NO: 1222620 - DNA, 25 bp, Homo sapien
ttaagttaggaaatgtatcttccca

SEQ ID NO: 1222621 - DNA, 25 bp, Homo sapien
catctgggtgtctggccccttttaa

SEQ ID NO: 1222622 - DNA, 25 bp, Homo sapien
tgagacatctgggtgtctggcccct

SEQ ID NO: 1222623 - DNA, 25 bp, Homo sapien
cctgacaggagggattttaatggga

SEQ ID NO: 1222624 - DNA, 25 bp, Homo sapien
ggcaactttcccatgaacaacagct

SEQ ID NO: 1222625 - DNA, 25 bp, Homo sapien
gatgaaggctttggtcaatcaggca

SEQ ID NO: 1222626 - DNA, 25 bp, Homo sapien
gatatcctggagcatgatgaaggct

SEQ ID NO: 1222627 - DNA, 25 bp, Homo sapien
caatgaaatgagtcctaaaaagata

SEQ ID NO: 1222628 - DNA, 25 bp, Homo sapien
gagtcctaaaaagataagtgacact

SEQ ID NO: 1222629 - DNA, 25 bp, Homo sapien
gtcagtcaatgaaatgagtcctaaa

SEQ ID NO: 1222630 - DNA, 25 bp, Homo sapien
ttaagtcagtcaatgaaatgagtcc

SEQ ID NO: 1222631 - DNA, 25 bp, Homo sapien
atagctcacccaatgcactcagcta

SEQ ID NO: 1222632 - DNA, 25 bp, Homo sapien
ccacaagagctactgtgaagtacag

SEQ ID NO: 1222633 - DNA, 25 bp, Homo sapien
cagtggaaacttccttaacccatct

SEQ ID NO: 1222634 - DNA, 25 bp, Homo sapien
taaggttggttatctagcttctgcc

SEQ ID NO: 1222635 - DNA, 25 bp, Homo sapien
ctataattctgttgagtgttcagga

SEQ ID NO: 1222636 - DNA, 25 bp, Homo sapien
ggactttctatggaagtatgtgcag

SEQ ID NO: 1222637 - DNA, 25 bp, Homo sapien
ctgttgagtgttcaggaccacagaa

SEQ ID NO: 1222638 - DNA, 25 bp, Homo sapien
tcctgggactttctatggaagtatg

SEQ ID NO: 1222639 - DNA, 25 bp, Homo sapien
taaagaactgatgactgcacctgaa

SEQ ID NO: 1222640 - DNA, 25 bp, Homo sapien
cattacagttgacctttggcaccca

SEQ ID NO: 1222641 - DNA, 25 bp, Homo sapien
tccaagtgagacatgttatacccag

SEQ ID NO: 1222642 - DNA, 25 bp, Homo sapien
cataaagtctacacagtcctcaggg

SEQ ID NO: 1222643 - DNA, 25 bp, Homo sapien
gcttctaggtaatgcaaaaagctca

SEQ ID NO: 1222644 - DNA, 25 bp, Homo sapien
tttgtagactgcttctaggtaatgc

SEQ ID NO: 1222645 - DNA, 25 bp, Homo sapien
gactactatagttcttttttgtaga

SEQ ID NO: 1222646 - DNA, 25 bp, Homo sapien
ctgcttctaggtaatgcaaaaagct

SEQ ID NO: 1222647 - DNA, 25 bp, Homo sapien
catcttaaatgctcaaagtctgatc

SEQ ID NO: 1222648 - DNA, 25 bp, Homo sapien
gccatcttaaatgctcaaagtctga

SEQ ID NO: 1222649 - DNA, 25 bp, Homo sapien
aagccatcttaaatgctcaaagtct

SEQ ID NO: 1222650 - DNA, 25 bp, Homo sapien
ccatcttaaatgctcaaagtctgat

SEQ ID NO: 1222651 - DNA, 25 bp, Homo sapien
tttgtgaagacctttgcagactgca

SEQ ID NO: 1222652 - DNA, 25 bp, Homo sapien
ctgtctaaatccaaaacggcttttg

SEQ ID NO: 1222653 - DNA, 25 bp, Homo sapien
tgtgaagacattgatttttggactc

SEQ ID NO: 1222654 - DNA, 25 bp, Homo sapien
catttccaacttgacattaacggtt

SEQ ID NO: 1222655 - DNA, 25 bp, Homo sapien
tcttactcccatataaaactgtcta

SEQ ID NO: 1222656 - DNA, 25 bp, Homo sapien
tggcctgccgtttccagggtgccca

SEQ ID NO: 1222657 - DNA, 25 bp, Homo sapien
gcctgccgtttccagggtgcccatg

SEQ ID NO: 1222658 - DNA, 25 bp, Homo sapien
ttggcctgccgtttccagggtgccc

SEQ ID NO: 1222659 - DNA, 25 bp, Homo sapien
ggcctgccgtttccagggtgcccat

SEQ ID NO: 1222660 - DNA, 25 bp, Homo sapien
gtctgcttcaggtaattcttcctca

SEQ ID NO: 1222661 - DNA, 25 bp, Homo sapien
tgtctgcttcaggtaattcttcctc

SEQ ID NO: 1222662 - DNA, 25 bp, Homo sapien
ctgtctgcttcaggtaattcttcct

SEQ ID NO: 1222663 - DNA, 25 bp, Homo sapien
tctgcttcaggtaattcttcctcac

SEQ ID NO: 1222664 - DNA, 25 bp, Homo sapien
tacttttctggtatcttagcttcac

SEQ ID NO: 1222665 - DNA, 25 bp, Homo sapien
cagtggcttaacacctgccttgtag

SEQ ID NO: 1222666 - DNA, 25 bp, Homo sapien
gctcagtccactcaactgttcgctg

SEQ ID NO: 1222667 - DNA, 25 bp, Homo sapien
tcatcctgttttactgctggctcag

SEQ ID NO: 1222668 - DNA, 25 bp, Homo sapien
tcgggctgagtcctgcaagcctgtc

SEQ ID NO: 1222669 - DNA, 25 bp, Homo sapien
cagaaataggatgctgctttgactc

SEQ ID NO: 1222670 - DNA, 25 bp, Homo sapien
ggagcccagattctttctcgggctg

SEQ ID NO: 1222671 - DNA, 25 bp, Homo sapien
gcattgcctttggagccattactca

SEQ ID NO: 1222672 - DNA, 25 bp, Homo sapien
tagagacaccagaggatggctgtct

SEQ ID NO: 1222673 - DNA, 25 bp, Homo sapien
aaactagcgtaatccacatccaaac

SEQ ID NO: 1222674 - DNA, 25 bp, Homo sapien
taatccacatccaaacgaataatag

SEQ ID NO: 1222675 - DNA, 25 bp, Homo sapien
atagagacaccagaggatggctgtc

SEQ ID NO: 1222676 - DNA, 25 bp, Homo sapien
aagcaatgggacttctctttcctat

SEQ ID NO: 1222677 - DNA, 25 bp, Homo sapien
tacagcccataagaagcaatgggac

SEQ ID NO: 1222678 - DNA, 25 bp, Homo sapien
tgggacttctctttcctatggccct

SEQ ID NO: 1222679 - DNA, 25 bp, Homo sapien
atgatactccaatacagcccataag

SEQ ID NO: 1222680 - DNA, 25 bp, Homo sapien
ccgtggtgatgcctctcacattgag

SEQ ID NO: 1222681 - DNA, 25 bp, Homo sapien
cttgccagtccgtggtgatgcctct

SEQ ID NO: 1222682 - DNA, 25 bp, Homo sapien
ccagagtgagcagagccttggccgg

SEQ ID NO: 1222683 - DNA, 25 bp, Homo sapien
tgagcagagccttggccggaagccc

SEQ ID NO: 1222684 - DNA, 25 bp, Homo sapien
cctgaccgatcagttccagggctgg

SEQ ID NO: 1222685 - DNA, 25 bp, Homo sapien
catcaggactggttttccgccaaag

SEQ ID NO: 1222686 - DNA, 25 bp, Homo sapien
ggccttggaaatggactccatcagg

SEQ ID NO: 1222687 - DNA, 25 bp, Homo sapien
agctccaggcctgaccgatcagttc

SEQ ID NO: 1222688 - DNA, 25 bp, Homo sapien
tcagccttctcttgccacctttctg

SEQ ID NO: 1222689 - DNA, 25 bp, Homo sapien
cacctttctggcactgacttctgct

SEQ ID NO: 1222690 - DNA, 25 bp, Homo sapien
tctcttgccacctttctggcactga

SEQ ID NO: 1222691 - DNA, 25 bp, Homo sapien
tgccacctttctggcactgacttct

SEQ ID NO: 1222692 - DNA, 25 bp, Homo sapien
tgtgtttgatccagcttctcagttg

SEQ ID NO: 1222693 - DNA, 25 bp, Homo sapien
tcagttgtttagcaggagaaagtaa

SEQ ID NO: 1222694 - DNA, 25 bp, Homo sapien
ctccataagtggaagcagagtctga

SEQ ID NO: 1222695 - DNA, 25 bp, Homo sapien
cagttatttctccataagtggaagc

SEQ ID NO: 1222696 - DNA, 25 bp, Homo sapien
agattacaggcgcacgctgcagcac

SEQ ID NO: 1222697 - DNA, 25 bp, Homo sapien
tgagattacaggcgcacgctgcagc

SEQ ID NO: 1222698 - DNA, 25 bp, Homo sapien
gagattacaggcgcacgctgcagca

SEQ ID NO: 1222699 - DNA, 25 bp, Homo sapien
gcactgttgcaggaactggagatat

SEQ ID NO: 1222700 - DNA, 25 bp, Homo sapien
gaagtcctagactatgaagtccctg

SEQ ID NO: 1222701 - DNA, 25 bp, Homo sapien
aagtccctgtcctcactcatgttac

SEQ ID NO: 1222702 - DNA, 25 bp, Homo sapien
tagtggaggcagatagatagtaaac

SEQ ID NO: 1222703 - DNA, 25 bp, Homo sapien
tttctttctcaggaacgagttcatg

SEQ ID NO: 1222704 - DNA, 25 bp, Homo sapien
tttctcaggaacgagttcatgctct

SEQ ID NO: 1222705 - DNA, 25 bp, Homo sapien
tcagtgggaataataaggacgagtt

SEQ ID NO: 1222706 - DNA, 25 bp, Homo sapien
taataaggacgagttcttcccaggc

SEQ ID NO: 1222707 - DNA, 25 bp, Homo sapien
tgttcaaccacgtttcctctcaggc

SEQ ID NO: 1222708 - DNA, 25 bp, Homo sapien
ttcttcaataacctcgatggccttg

SEQ ID NO: 1222709 - DNA, 25 bp, Homo sapien
tgcactgggccaaggccttgtaata

SEQ ID NO: 1222710 - DNA, 25 bp, Homo sapien
tagtctcaaaatcaatagggaaggc

SEQ ID NO: 1222711 - DNA, 25 bp, Homo sapien
tattctaaatactactgcaggacag

SEQ ID NO: 1222712 - DNA, 25 bp, Homo sapien
ggtcatatgtccacctacttcctga

SEQ ID NO: 1222713 - DNA, 25 bp, Homo sapien
tacttcctgaaaggaggtcacttcc

SEQ ID NO: 1222714 - DNA, 25 bp, Homo sapien
tattatgtccctgcctgagagcaag

SEQ ID NO: 1222715 - DNA, 25 bp, Homo sapien
gttgttagaaaaagagtctgcagct

SEQ ID NO: 1222716 - DNA, 25 bp, Homo sapien
gttagaaaaagagtctgcagctggt

SEQ ID NO: 1222717 - DNA, 25 bp, Homo sapien
tcaggctaaaaatgatgttgttaga

SEQ ID NO: 1222718 - DNA, 25 bp, Homo sapien
ttgcctgctttgataagtagatagc

SEQ ID NO: 1222719 - DNA, 25 bp, Homo sapien
aaagcaacgtgcttgcagaggccag

SEQ ID NO: 1222720 - DNA, 25 bp, Homo sapien
atcttctgtcaagaggcttcctgga

SEQ ID NO: 1222721 - DNA, 25 bp, Homo sapien
gaggaggtcctagggctaccttcaa

SEQ ID NO: 1222722 - DNA, 25 bp, Homo sapien
tgctcagggactgctaagagactca

SEQ ID NO: 1222723 - DNA, 25 bp, Homo sapien
ggaagtccaaaatcaagatgctggc

SEQ ID NO: 1222724 - DNA, 25 bp, Homo sapien
ggctgggaagtccaaaatcaagatg

SEQ ID NO: 1222725 - DNA, 25 bp, Homo sapien
ctgggaagtccaaaatcaagatgct

SEQ ID NO: 1222726 - DNA, 25 bp, Homo sapien
tgggaagtccaaaatcaagatgctg

SEQ ID NO: 1222727 - DNA, 25 bp, Homo sapien
caggagaatggcatgaacccaggag

SEQ ID NO: 1222728 - DNA, 25 bp, Homo sapien
cactccagcctgggggacagagcaa

SEQ ID NO: 1222729 - DNA, 25 bp, Homo sapien
gaggcggagcttgcagtgagccgag

SEQ ID NO: 1222730 - DNA, 25 bp, Homo sapien
aatcccagttactcgtgagactgag

SEQ ID NO: 1222731 - DNA, 25 bp, Homo sapien
tgaatcccaatgaagatcaaagttc

SEQ ID NO: 1222732 - DNA, 25 bp, Homo sapien
aagttcagaccgttttctcatatga

SEQ ID NO: 1222733 - DNA, 25 bp, Homo sapien
atatctgaatcccaatgaagatcaa

SEQ ID NO: 1222734 - DNA, 25 bp, Homo sapien
tcaaagttcagaccgttttctcata

SEQ ID NO: 1222735 - DNA, 25 bp, Homo sapien
taaattccatgttaaactgcttaat

SEQ ID NO: 1222736 - DNA, 25 bp, Homo sapien
tcaggtaactgaagctcactctctt

SEQ ID NO: 1222737 - DNA, 25 bp, Homo sapien
tgtatgcgtgagtttatggttttca

SEQ ID NO: 1222738 - DNA, 25 bp, Homo sapien
gagcttcttgtatgcgtgagtttat

SEQ ID NO: 1222739 - DNA, 25 bp, Homo sapien
aagtgaatctatttataccttttgg

SEQ ID NO: 1222740 - DNA, 25 bp, Homo sapien
gtggcaagtgaatctatttatacct

SEQ ID NO: 1222741 - DNA, 25 bp, Homo sapien
agtgaatctatttataccttttgga

SEQ ID NO: 1222742 - DNA, 25 bp, Homo sapien
ggcaagtgaatctatttataccttt

SEQ ID NO: 1222743 - DNA, 25 bp, Homo sapien
ttttctctcatatgcttcaccgtac

SEQ ID NO: 1222744 - DNA, 25 bp, Homo sapien
cctgatactggaaagaaccctccca

SEQ ID NO: 1222745 - DNA, 25 bp, Homo sapien
acagcacgttagtcccggcactttc

SEQ ID NO: 1222746 - DNA, 25 bp, Homo sapien
ggcactttccgcaacagacttgtta

SEQ ID NO: 1222747 - DNA, 25 bp, Homo sapien
gacattgtggcgaccaaggagagtc

SEQ ID NO: 1222748 - DNA, 25 bp, Homo sapien
gaccaaggagagtcgctcctcactt

SEQ ID NO: 1222749 - DNA, 25 bp, Homo sapien
cacttccccgatggtggggcgatca

SEQ ID NO: 1222750 - DNA, 25 bp, Homo sapien
acttcccagacattgtggcgaccaa

SEQ ID NO: 1222751 - DNA, 25 bp, Homo sapien
agcccagttgctcccaaggatgctc

SEQ ID NO: 1222752 - DNA, 25 bp, Homo sapien
tagaaaattcagttccattcagtgc

SEQ ID NO: 1222753 - DNA, 25 bp, Homo sapien
gacagcccagttgctcccaaggatg

SEQ ID NO: 1222754 - DNA, 25 bp, Homo sapien
gaaaattcagttccattcagtgcca

SEQ ID NO: 1222755 - DNA, 25 bp, Homo sapien
cgtcattaacaccttggttagtggg

SEQ ID NO: 1222756 - DNA, 25 bp, Homo sapien
ggtgttctgagttgtcgggattaac

SEQ ID NO: 1222757 - DNA, 25 bp, Homo sapien
cctgtgaggagagagttacgtcatt

SEQ ID NO: 1222758 - DNA, 25 bp, Homo sapien
tgttctgagttgtcgggattaacca

SEQ ID NO: 1222759 - DNA, 25 bp, Homo sapien
ccggaattcggcattagaacaaaag

SEQ ID NO: 1222760 - DNA, 25 bp, Homo sapien
ctccccggaattcggcattagaaca

SEQ ID NO: 1222761 - DNA, 25 bp, Homo sapien
cagcctccccggaattcggcattag

SEQ ID NO: 1222762 - DNA, 25 bp, Homo sapien
aattcggcattagaacaaaagccac

SEQ ID NO: 1222763 - DNA, 25 bp, Homo sapien
gcggagccaccatgtaatagtccag

SEQ ID NO: 1222764 - DNA, 25 bp, Homo sapien
tggcggagccaccatgtaatagtcc

SEQ ID NO: 1222765 - DNA, 25 bp, Homo sapien
ccaccatgtaatagtccagggtcaa

SEQ ID NO: 1222766 - DNA, 25 bp, Homo sapien
ggcggagccaccatgtaatagtcca

SEQ ID NO: 1222767 - DNA, 25 bp, Homo sapien
gcagttctgtgggacgaattaaagc

SEQ ID NO: 1222768 - DNA, 25 bp, Homo sapien
cagtcaatgctgttccacatcacta

SEQ ID NO: 1222769 - DNA, 25 bp, Homo sapien
taaagctgtaaagcaggtatttttg

SEQ ID NO: 1222770 - DNA, 25 bp, Homo sapien
tgcagtcaatgctgttccacatcac

SEQ ID NO: 1222771 - DNA, 25 bp, Homo sapien
gtaccagcagatgtgattcttggtg

SEQ ID NO: 1222772 - DNA, 25 bp, Homo sapien
aaagtaccagcagatgtgattcttg

SEQ ID NO: 1222773 - DNA, 25 bp, Homo sapien
accagcagatgtgattcttggtgag

SEQ ID NO: 1222774 - DNA, 25 bp, Homo sapien
aagtaccagcagatgtgattcttgg

SEQ ID NO: 1222775 - DNA, 25 bp, Homo sapien
taagtggaggttttcactcctcttc

SEQ ID NO: 1222776 - DNA, 25 bp, Homo sapien
cttgatcgagttctgagaagaggag

SEQ ID NO: 1222777 - DNA, 25 bp, Homo sapien
atcgagttctgagaagaggagtgat

SEQ ID NO: 1222778 - DNA, 25 bp, Homo sapien
gaataacatcttgatcgagttctga

SEQ ID NO: 1222779 - DNA, 25 bp, Homo sapien
gaccattagcttctttaacaaagga

SEQ ID NO: 1222780 - DNA, 25 bp, Homo sapien
cattagcttctttaacaaaggacaa

SEQ ID NO: 1222781 - DNA, 25 bp, Homo sapien
ccattagcttctttaacaaaggaca

SEQ ID NO: 1222782 - DNA, 25 bp, Homo sapien
tgatggaggaagttctgctgaggat

SEQ ID NO: 1222783 - DNA, 25 bp, Homo sapien
gggtaacagcagacttctgaataac

SEQ ID NO: 1222784 - DNA, 25 bp, Homo sapien
agacttctgaataactctgcacccc

SEQ ID NO: 1222785 - DNA, 25 bp, Homo sapien
gggtcagggtaacagcagacttctg

SEQ ID NO: 1222786 - DNA, 25 bp, Homo sapien
gttttagggactgcttccttcagga

SEQ ID NO: 1222787 - DNA, 25 bp, Homo sapien
aggcctgaaggacacgccgtggctt

SEQ ID NO: 1222788 - DNA, 25 bp, Homo sapien
caaaatgtagaggtgcaagtctgtt

SEQ ID NO: 1222789 - DNA, 25 bp, Homo sapien
ggaaagcctgcttcctgagaaggcc

SEQ ID NO: 1222790 - DNA, 25 bp, Homo sapien
cacaacctgggcttctacagtagag

SEQ ID NO: 1222791 - DNA, 25 bp, Homo sapien
tgatctggccggtaaacagaaggcc

SEQ ID NO: 1222792 - DNA, 25 bp, Homo sapien
tacagtagaggccacatcagccaca

SEQ ID NO: 1222793 - DNA, 25 bp, Homo sapien
caagggcagacaccattagaagctc

SEQ ID NO: 1222794 - DNA, 25 bp, Homo sapien
gaagagagcccgaagtttagacaac

SEQ ID NO: 1222795 - DNA, 25 bp, Homo sapien
aagttgttgactctgggcgcgcaga

SEQ ID NO: 1222796 - DNA, 25 bp, Homo sapien
cacatctcagcgctggaggttcctg

SEQ ID NO: 1222797 - DNA, 25 bp, Homo sapien
cgagcgaccgctacaacttgagaag

SEQ ID NO: 1222798 - DNA, 25 bp, Homo sapien
gggtgaagccgtccactttctccga

SEQ ID NO: 1222799 - DNA, 25 bp, Homo sapien
ttgcggaccgatttccgggtgaagc

SEQ ID NO: 1222800 - DNA, 25 bp, Homo sapien
tgggagcgcttctgcctctgcgcct

SEQ ID NO: 1222801 - DNA, 25 bp, Homo sapien
tgaagccgtccactttctccgaggc

SEQ ID NO: 1222802 - DNA, 25 bp, Homo sapien
gggcagcgggtgcagctctgcctgg

SEQ ID NO: 1222803 - DNA, 25 bp, Homo sapien
tttgagctggggcagcgggtgcagc

SEQ ID NO: 1222804 - DNA, 25 bp, Homo sapien
tgcctggctgccctggctgcgaaac

SEQ ID NO: 1222805 - DNA, 25 bp, Homo sapien
ctgcctggctgccctggctgcgaaa

SEQ ID NO: 1222806 - DNA, 25 bp, Homo sapien
gaaataacatcgaaaatcctctaaa

SEQ ID NO: 1222807 - DNA, 25 bp, Homo sapien
tagaacaccaggaaataacatcgaa

SEQ ID NO: 1222808 - DNA, 25 bp, Homo sapien
caccaggaaataacatcgaaaatcc

SEQ ID NO: 1222809 - DNA, 25 bp, Homo sapien
caggaaataacatcgaaaatcctct

SEQ ID NO: 1222810 - DNA, 25 bp, Homo sapien
gttgttcattgttaatcctctacat

SEQ ID NO: 1222811 - DNA, 25 bp, Homo sapien
gaaaacatccctaattactgctgct

SEQ ID NO: 1222812 - DNA, 25 bp, Homo sapien
taaccaagttatttcaagttgttca

SEQ ID NO: 1222813 - DNA, 25 bp, Homo sapien
taaacttctgaggtgataaccaagt

SEQ ID NO: 1222814 - DNA, 25 bp, Homo sapien
tccatcctgggtgaccgaggaagat

SEQ ID NO: 1222815 - DNA, 25 bp, Homo sapien
ccatcctgggtgaccgaggaagatt

SEQ ID NO: 1222816 - DNA, 25 bp, Homo sapien
gattcctacggtgacaacttgctca

SEQ ID NO: 1222817 - DNA, 25 bp, Homo sapien
taacgtccattctgattcctacggt

SEQ ID NO: 1222818 - DNA, 25 bp, Homo sapien
tacggatgataacgtccattctgat

SEQ ID NO: 1222819 - DNA, 25 bp, Homo sapien
ttctgattcctacggtgacaacttg

SEQ ID NO: 1222820 - DNA, 25 bp, Homo sapien
gatgttttagtctggcaattgggct

SEQ ID NO: 1222821 - DNA, 25 bp, Homo sapien
gcttctccgttttaagaattcttgc

SEQ ID NO: 1222822 - DNA, 25 bp, Homo sapien
gatgttgattatccatttgccattc

SEQ ID NO: 1222823 - DNA, 25 bp, Homo sapien
gcaaatgaagtctgtcataatgatg

SEQ ID NO: 1222824 - DNA, 25 bp, Homo sapien
tacaccacgattagttgaaacatac

SEQ ID NO: 1222825 - DNA, 25 bp, Homo sapien
tgctgcaacttctgacagaaaagct

SEQ ID NO: 1222826 - DNA, 25 bp, Homo sapien
tactcaaccagttcattcagtgttg

SEQ ID NO: 1222827 - DNA, 25 bp, Homo sapien
acagagtccatgaaatcaaacagta

SEQ ID NO: 1222828 - DNA, 25 bp, Homo sapien
actgtgcccagccaactctgtctcc

SEQ ID NO: 1222829 - DNA, 25 bp, Homo sapien
ccactgtgcccagccaactctgtct

SEQ ID NO: 1222830 - DNA, 25 bp, Homo sapien
tcctaattccttttgagaggtctta

SEQ ID NO: 1222831 - DNA, 25 bp, Homo sapien
tgtgcccagccaactctgtctccaa

SEQ ID NO: 1222832 - DNA, 25 bp, Homo sapien
ccaagaggcctcaagcgtgggttca

SEQ ID NO: 1222833 - DNA, 25 bp, Homo sapien
tcctcttctggatcaaaatctggat

SEQ ID NO: 1222834 - DNA, 25 bp, Homo sapien
tatcacttggaggaagtgtacggaa

SEQ ID NO: 1222835 - DNA, 25 bp, Homo sapien
gtgtacggaagatgttagcactgat

SEQ ID NO: 1222836 - DNA, 25 bp, Homo sapien
gacaaatgggatgacatgttcaaag

SEQ ID NO: 1222837 - DNA, 25 bp, Homo sapien
gaaaaccatggacgtaagaagacaa

SEQ ID NO: 1222838 - DNA, 25 bp, Homo sapien
gaatttgtcattaattgcacacctg

SEQ ID NO: 1222839 - DNA, 25 bp, Homo sapien
gctaacttgtcatcagaaaaccatg

SEQ ID NO: 1222840 - DNA, 25 bp, Homo sapien
cgaatttctgatcaatgtatcgttt

SEQ ID NO: 1222841 - DNA, 25 bp, Homo sapien
caatgctaggctggaaatcagggct

SEQ ID NO: 1222842 - DNA, 25 bp, Homo sapien
gtatcgttttgcaatgctaggctgg

SEQ ID NO: 1222843 - DNA, 25 bp, Homo sapien
cagggctctccaaaaatctcaagaa

SEQ ID NO: 1222844 - DNA, 25 bp, Homo sapien
agcatcaaattcctaaagaggcctg

SEQ ID NO: 1222845 - DNA, 25 bp, Homo sapien
ggccagccaattccatatagttaaa

SEQ ID NO: 1222846 - DNA, 25 bp, Homo sapien
tcaggcctagaaatgcctagaaagg

SEQ ID NO: 1222847 - DNA, 25 bp, Homo sapien
tagaaaggtttggtctacttcacaa

SEQ ID NO: 1222848 - DNA, 25 bp, Homo sapien
gtagaatttttatcatagggcacat

SEQ ID NO: 1222849 - DNA, 25 bp, Homo sapien
agaatttttatcatagggcacatac

SEQ ID NO: 1222850 - DNA, 25 bp, Homo sapien
tttatcatagggcacatacaaagcg

SEQ ID NO: 1222851 - DNA, 25 bp, Homo sapien
tatcatagggcacatacaaagcggt

SEQ ID NO: 1222852 - DNA, 25 bp, Homo sapien
agggatttgataccggcctggccaa

SEQ ID NO: 1222853 - DNA, 25 bp, Homo sapien
tgctaaaagcaattactgggcccta

SEQ ID NO: 1222854 - DNA, 25 bp, Homo sapien
tgttaaggccctcatgagactccag

SEQ ID NO: 1222855 - DNA, 25 bp, Homo sapien
taatgtatcccacacaagagctgca

SEQ ID NO: 1222856 - DNA, 25 bp, Homo sapien
aatcagtgtactcctatattctgca

SEQ ID NO: 1222857 - DNA, 25 bp, Homo sapien
tggcccaatcagtgtactcctatat

SEQ ID NO: 1222858 - DNA, 25 bp, Homo sapien
tcaattggcccaatcagtgtactcc

SEQ ID NO: 1222859 - DNA, 25 bp, Homo sapien
gtactcctatattctgcacaacttt

SEQ ID NO: 1222860 - DNA, 25 bp, Homo sapien
ttctgatgaatgctcttaatccaag

SEQ ID NO: 1222861 - DNA, 25 bp, Homo sapien
gaaatttcccataaattcggtgcag

SEQ ID NO: 1222862 - DNA, 25 bp, Homo sapien
ataaattcggtgcagaacagtcttc

SEQ ID NO: 1222863 - DNA, 25 bp, Homo sapien
gatgaatgctcttaatccaagaaat

SEQ ID NO: 1222864 - DNA, 25 bp, Homo sapien
aagaagttcagcaacaccattgaaa

SEQ ID NO: 1222865 - DNA, 25 bp, Homo sapien
gcaacaccattgaaatgttctgttt

SEQ ID NO: 1222866 - DNA, 25 bp, Homo sapien
tcctaatatttcaagaagttcagca

SEQ ID NO: 1222867 - DNA, 25 bp, Homo sapien
gaaatgttctgtttcatatataaac

SEQ ID NO: 1222868 - DNA, 25 bp, Homo sapien
gagcatgaaacaaagctaatccttt

SEQ ID NO: 1222869 - DNA, 25 bp, Homo sapien
cagtatgcataggaataagaacctt

SEQ ID NO: 1222870 - DNA, 25 bp, Homo sapien
gaataagaaccttcattagaaattg

SEQ ID NO: 1222871 - DNA, 25 bp, Homo sapien
aatccttttgcagtatgcataggaa

SEQ ID NO: 1222872 - DNA, 25 bp, Homo sapien
tctgttagtgttgtatctttctcca

SEQ ID NO: 1222873 - DNA, 25 bp, Homo sapien
tggctctgttagtgttgtatctttc

SEQ ID NO: 1222874 - DNA, 25 bp, Homo sapien
ggaactgtacaacacaatatgctag

SEQ ID NO: 1222875 - DNA, 25 bp, Homo sapien
tttctccaggaactgtacaacacaa

SEQ ID NO: 1222876 - DNA, 25 bp, Homo sapien
tcactgtggtcatctgatcctatca

SEQ ID NO: 1222877 - DNA, 25 bp, Homo sapien
gctattaatgcagaccaaaaacatg

SEQ ID NO: 1222878 - DNA, 25 bp, Homo sapien
tttgggaccctcgaagtatgcttta

SEQ ID NO: 1222879 - DNA, 25 bp, Homo sapien
tattcaagacataactcacgagaac

SEQ ID NO: 1222880 - DNA, 25 bp, Homo sapien
tacagcaaacagaactatgaccatc

SEQ ID NO: 1222881 - DNA, 25 bp, Homo sapien
aacagaactatgaccatcaaggaaa

SEQ ID NO: 1222882 - DNA, 25 bp, Homo sapien
gatcagttacagcaaacagaactat

SEQ ID NO: 1222883 - DNA, 25 bp, Homo sapien
gcaaacagaactatgaccatcaagg

SEQ ID NO: 1222884 - DNA, 25 bp, Homo sapien
gccaaaatttcagcagtcctctgat

SEQ ID NO: 1222885 - DNA, 25 bp, Homo sapien
tggccaaaatttcagcagtcctctg

SEQ ID NO: 1222886 - DNA, 25 bp, Homo sapien
aaaatttcagcagtcctctgatcac

SEQ ID NO: 1222887 - DNA, 25 bp, Homo sapien
caaaatttcagcagtcctctgatca

SEQ ID NO: 1222888 - DNA, 25 bp, Homo sapien
ttggatatctgcttgaaaagtggct

SEQ ID NO: 1222889 - DNA, 25 bp, Homo sapien
caatgacatctaagatttcttcaat

SEQ ID NO: 1222890 - DNA, 25 bp, Homo sapien
aatgagaactggatacacacttgga

SEQ ID NO: 1222891 - DNA, 25 bp, Homo sapien
ttttgaactgtgttggttcaatgac

SEQ ID NO: 1222892 - DNA, 25 bp, Homo sapien
aatgttctcctcaatcaaactaaga

SEQ ID NO: 1222893 - DNA, 25 bp, Homo sapien
cagaagtacaatgccctttctgcaa

SEQ ID NO: 1222894 - DNA, 25 bp, Homo sapien
cagtgttctttggaaattttgtaca

SEQ ID NO: 1222895 - DNA, 25 bp, Homo sapien
actaagaatatattcgttattccag

SEQ ID NO: 1222896 - DNA, 25 bp, Homo sapien
cacacacatttataacttgataaag

SEQ ID NO: 1222897 - DNA, 25 bp, Homo sapien
cacacatttataacttgataaaggt

SEQ ID NO: 1222898 - DNA, 25 bp, Homo sapien
aacacacacatttataacttgataa

SEQ ID NO: 1222899 - DNA, 25 bp, Homo sapien
cacatttataacttgataaaggtat

SEQ ID NO: 1222900 - DNA, 25 bp, Homo sapien
gagactatacactgagagtagacca

SEQ ID NO: 1222901 - DNA, 25 bp, Homo sapien
gcaaatgttcagttggtctccccaa

SEQ ID NO: 1222902 - DNA, 25 bp, Homo sapien
aatatattacccttagcacttcggc

SEQ ID NO: 1222903 - DNA, 25 bp, Homo sapien
gtttgaccacaacctccagggagat

SEQ ID NO: 1222904 - DNA, 25 bp, Homo sapien
tgagccagtcctgagttatgatact

SEQ ID NO: 1222905 - DNA, 25 bp, Homo sapien
tgtaacactatggtctctaaaatgg

SEQ ID NO: 1222906 - DNA, 25 bp, Homo sapien
tctaaaatgggttaaagcttggctg

SEQ ID NO: 1222907 - DNA, 25 bp, Homo sapien
cagcaagtggtggtagagacagtct

SEQ ID NO: 1222908 - DNA, 25 bp, Homo sapien
ctctgtctttcagctttgtatgagc

SEQ ID NO: 1222909 - DNA, 25 bp, Homo sapien
tcatttccattagggttttcagcac

SEQ ID NO: 1222910 - DNA, 25 bp, Homo sapien
attgtataccagtgctacaatggtc

SEQ ID NO: 1222911 - DNA, 25 bp, Homo sapien
gtaaggtcatcgaaaagcttgccat

SEQ ID NO: 1222912 - DNA, 25 bp, Homo sapien
tcacattgtaatgtttactataagg

SEQ ID NO: 1222913 - DNA, 25 bp, Homo sapien
gaaatgacttatatgttaagagact

SEQ ID NO: 1222914 - DNA, 25 bp, Homo sapien
tatgaaaatctgaactgagagaaga

SEQ ID NO: 1222915 - DNA, 25 bp, Homo sapien
gagagaagataccttcctgaactga

SEQ ID NO: 1222916 - DNA, 25 bp, Homo sapien
tagctttagctcctctaattttttc

SEQ ID NO: 1222917 - DNA, 25 bp, Homo sapien
atgttgtaagcactattctgttttt

SEQ ID NO: 1222918 - DNA, 25 bp, Homo sapien
tctttagctttagctcctctaattt

SEQ ID NO: 1222919 - DNA, 25 bp, Homo sapien
taattcttcacgttccaattccttc

SEQ ID NO: 1222920 - DNA, 25 bp, Homo sapien
ttattcggcacttgtattgctgaga

SEQ ID NO: 1222921 - DNA, 25 bp, Homo sapien
tattcggcacttgtattgctgagaa

SEQ ID NO: 1222922 - DNA, 25 bp, Homo sapien
tacagagcagactaccatatctatg

SEQ ID NO: 1222923 - DNA, 25 bp, Homo sapien
tactatggccatgatacagcacagg

SEQ ID NO: 1222924 - DNA, 25 bp, Homo sapien
agcacagggctacgtttagtccata

SEQ ID NO: 1222925 - DNA, 25 bp, Homo sapien
tgtaactaaggtttgcagcagtgtg

SEQ ID NO: 1222926 - DNA, 25 bp, Homo sapien
tgttaccactctggagaattgcaga

SEQ ID NO: 1222927 - DNA, 25 bp, Homo sapien
gccaggcagtgacaactagtgctct

SEQ ID NO: 1222928 - DNA, 25 bp, Homo sapien
gaggcaagctgggtaattcacctga

SEQ ID NO: 1222929 - DNA, 25 bp, Homo sapien
ttttcagagctctacagaggaagcc

SEQ ID NO: 1222930 - DNA, 25 bp, Homo sapien
aaattcctgagtatcaagacgtgca

SEQ ID NO: 1222931 - DNA, 25 bp, Homo sapien
cgtcccaaaagaggcggtgtagagc

SEQ ID NO: 1222932 - DNA, 25 bp, Homo sapien
tctactagggtaatgaaggctctac

SEQ ID NO: 1222933 - DNA, 25 bp, Homo sapien
gctttggagcctatgcactgtacac

SEQ ID NO: 1222934 - DNA, 25 bp, Homo sapien
cattgacctttggtcactaaggagc

SEQ ID NO: 1222935 - DNA, 25 bp, Homo sapien
tgacctttggtcactaaggagcatc

SEQ ID NO: 1222936 - DNA, 25 bp, Homo sapien
cttcattgacctttggtcactaagg

SEQ ID NO: 1222937 - DNA, 25 bp, Homo sapien
tttggtcactaaggagcatcatgtt

SEQ ID NO: 1222938 - DNA, 25 bp, Homo sapien
tattctgataaatttgggtttgttc

SEQ ID NO: 1222939 - DNA, 25 bp, Homo sapien
ttttctcgttctttgaggtgatcgt

SEQ ID NO: 1222940 - DNA, 25 bp, Homo sapien
gaggtgatcgttagcttatttgaaa

SEQ ID NO: 1222941 - DNA, 25 bp, Homo sapien
cggcctcaaacaactaacttttcat

SEQ ID NO: 1222942 - DNA, 25 bp, Homo sapien
tgctggccttgcagaaccgagtttg

SEQ ID NO: 1222943 - DNA, 25 bp, Homo sapien
ccatatccggcacattgagagtttt

SEQ ID NO: 1222944 - DNA, 25 bp, Homo sapien
tgagatggatccctcttgatcatgg

SEQ ID NO: 1222945 - DNA, 25 bp, Homo sapien
tagatagaatttagcaacgaagcca

SEQ ID NO: 1222946 - DNA, 25 bp, Homo sapien
ctgaagcttgtgcattcatcatgta

SEQ ID NO: 1222947 - DNA, 25 bp, Homo sapien
ccagttggttgaatcggctactgaa

SEQ ID NO: 1222948 - DNA, 25 bp, Homo sapien
ctttcttccagttggttgaatcggc

SEQ ID NO: 1222949 - DNA, 25 bp, Homo sapien
gaagcttgtgcattcatcatgtagt

SEQ ID NO: 1222950 - DNA, 25 bp, Homo sapien
tcctactaccctgagtttgcattca

SEQ ID NO: 1222951 - DNA, 25 bp, Homo sapien
catagtgcgtgggacattttatcaa

SEQ ID NO: 1222952 - DNA, 25 bp, Homo sapien
gttagttttctcactacatagtgcg

SEQ ID NO: 1222953 - DNA, 25 bp, Homo sapien
cacattcatccagtttgccacaaaa

SEQ ID NO: 1222954 - DNA, 25 bp, Homo sapien
cagccacatatatgatgccctttat

SEQ ID NO: 1222955 - DNA, 25 bp, Homo sapien
caccgcgcctagctgtatctcgaaa

SEQ ID NO: 1222956 - DNA, 25 bp, Homo sapien
gctgtatctcgaaaacatagtgaga

SEQ ID NO: 1222957 - DNA, 25 bp, Homo sapien
ggtggtggttatacatcttgtgaat

SEQ ID NO: 1222958 - DNA, 25 bp, Homo sapien
gacccgtaaccagcaggtgaatgat

SEQ ID NO: 1222959 - DNA, 25 bp, Homo sapien
aacccggcgttctttgcaacaagtg

SEQ ID NO: 1222960 - DNA, 25 bp, Homo sapien
cgttctccgtatgctgcgggttgca

SEQ ID NO: 1222961 - DNA, 25 bp, Homo sapien
gaatgattgaagctacctgaggccc

SEQ ID NO: 1222962 - DNA, 25 bp, Homo sapien
ccagtggagatgcaatgggaaaatg

SEQ ID NO: 1222963 - DNA, 25 bp, Homo sapien
gagggtctcacctcattaaggttcc

SEQ ID NO: 1222964 - DNA, 25 bp, Homo sapien
cctcattaaggttccagtggagatg

SEQ ID NO: 1222965 - DNA, 25 bp, Homo sapien
tcacctcattaaggttccagtggag

SEQ ID NO: 1222966 - DNA, 25 bp, Homo sapien
gctgttaccgatacgccctgaaata

SEQ ID NO: 1222967 - DNA, 25 bp, Homo sapien
ccaaggagatttttgcaaagggtag

SEQ ID NO: 1222968 - DNA, 25 bp, Homo sapien
cagtggttccttgatcaggtagaaa

SEQ ID NO: 1222969 - DNA, 25 bp, Homo sapien
gagcccaacataccagaacctagaa

SEQ ID NO: 1222970 - DNA, 25 bp, Homo sapien
tcctcggtgaaaagccgcactgggg

SEQ ID NO: 1222971 - DNA, 25 bp, Homo sapien
ctcctcctcggtgaaaagccgcact

SEQ ID NO: 1222972 - DNA, 25 bp, Homo sapien
aagccgcactgggggcccccgctcg

SEQ ID NO: 1222973 - DNA, 25 bp, Homo sapien
agggcgcggtgtctgcccggcccgg

SEQ ID NO: 1222974 - DNA, 25 bp, Homo sapien
gctccgactgttgaggactcgtcct

SEQ ID NO: 1222975 - DNA, 25 bp, Homo sapien
caaaaagttctgaggtctgtacgca

SEQ ID NO: 1222976 - DNA, 25 bp, Homo sapien
caaagcggagcgctccgactgttga

SEQ ID NO: 1222977 - DNA, 25 bp, Homo sapien
catcaacgaaaaggcggctagaggg

SEQ ID NO: 1222978 - DNA, 25 bp, Homo sapien
cagtaaacgcctcggctgatgctaa

SEQ ID NO: 1222979 - DNA, 25 bp, Homo sapien
ctatgcgtgggcacagtaaacgcct

SEQ ID NO: 1222980 - DNA, 25 bp, Homo sapien
tgggcacagtaaacgcctcggctga

SEQ ID NO: 1222981 - DNA, 25 bp, Homo sapien
tgcgtgggcacagtaaacgcctcgg

SEQ ID NO: 1222982 - DNA, 25 bp, Homo sapien
tgtttccatctcaaggtcctctctc

SEQ ID NO: 1222983 - DNA, 25 bp, Homo sapien
gatcatcgggtcagttggagagtcc

SEQ ID NO: 1222984 - DNA, 25 bp, Homo sapien
catcaacatcaaaaaaccaagggtc

SEQ ID NO: 1222985 - DNA, 25 bp, Homo sapien
cacctacagagatcctcaggctcca

SEQ ID NO: 1222986 - DNA, 25 bp, Homo sapien
gaggcctcagagtgacatagatacc

SEQ ID NO: 1222987 - DNA, 25 bp, Homo sapien
tctgacccagtgtagatgaacatcc

SEQ ID NO: 1222988 - DNA, 25 bp, Homo sapien
tgaacatccatggatagcacaaccc

SEQ ID NO: 1222989 - DNA, 25 bp, Homo sapien
actcccaacgtgaggtgatctaccc

SEQ ID NO: 1222990 - DNA, 25 bp, Homo sapien
tgcccagccgacacttattttctat

SEQ ID NO: 1222991 - DNA, 25 bp, Homo sapien
gacacttattttctatgggcaaaca

SEQ ID NO: 1222992 - DNA, 25 bp, Homo sapien
ccagccgacacttattttctatggg

SEQ ID NO: 1222993 - DNA, 25 bp, Homo sapien
cttattttctatgggcaaacagcca

SEQ ID NO: 1222994 - DNA, 25 bp, Homo sapien
tcccttcactgccaagtagatgggc

SEQ ID NO: 1222995 - DNA, 25 bp, Homo sapien
tcaaacaccactcccttcactgcca

SEQ ID NO: 1222996 - DNA, 25 bp, Homo sapien
cctttccggaggtgacatcaaacac

SEQ ID NO: 1222997 - DNA, 25 bp, Homo sapien
cactgccaagtagatgggctgatct

SEQ ID NO: 1222998 - DNA, 25 bp, Homo sapien
cattgtagggggctcctcgtccata

SEQ ID NO: 1222999 - DNA, 25 bp, Homo sapien
ccttccccgtcaaggcattgtaggg

SEQ ID NO: 1223000 - DNA, 25 bp, Homo sapien
tctagtggagtccttccccgtcaag

SEQ ID NO: 1223001 - DNA, 25 bp, Homo sapien
gacatcttggctacccctctagtgg

SEQ ID NO: 1223002 - DNA, 25 bp, Homo sapien
tctcaacaaaccaaataatggacaa

SEQ ID NO: 1223003 - DNA, 25 bp, Homo sapien
gacaaatggcttaagagacactgct

SEQ ID NO: 1223004 - DNA, 25 bp, Homo sapien
ccctaatgcaagagaaaagatatct

SEQ ID NO: 1223005 - DNA, 25 bp, Homo sapien
tggatagtgtttggcactggccttt

SEQ ID NO: 1223006 - DNA, 25 bp, Homo sapien
tccaggttagggctgccatcctcat

SEQ ID NO: 1223007 - DNA, 25 bp, Homo sapien
tcctcattgagaattctccgggcag

SEQ ID NO: 1223008 - DNA, 25 bp, Homo sapien
tctccgggcagtgtagccgacgatg

SEQ ID NO: 1223009 - DNA, 25 bp, Homo sapien
tccagttccttggccgtgagacccg

SEQ ID NO: 1223010 - DNA, 25 bp, Homo sapien
gtgtcttcctgcctcacgctcccaa

SEQ ID NO: 1223011 - DNA, 25 bp, Homo sapien
acctagtgtcttcctgcctcacgct

SEQ ID NO: 1223012 - DNA, 25 bp, Homo sapien
tcttcctgcctcacgctcccaagaa

SEQ ID NO: 1223013 - DNA, 25 bp, Homo sapien
cacctagtgtcttcctgcctcacgc

SEQ ID NO: 1223014 - DNA, 25 bp, Homo sapien
gcagccagttttgcaggagattcag

SEQ ID NO: 1223015 - DNA, 25 bp, Homo sapien
ggcagccagttttgcaggagattca

SEQ ID NO: 1223016 - DNA, 25 bp, Homo sapien
caggcagccagttttgcaggagatt

SEQ ID NO: 1223017 - DNA, 25 bp, Homo sapien
aggcagccagttttgcaggagattc

SEQ ID NO: 1223018 - DNA, 25 bp, Homo sapien
tctgttttattcagatctgggtggc

SEQ ID NO: 1223019 - DNA, 25 bp, Homo sapien
ttattcagatctgggtggctcaggg

SEQ ID NO: 1223020 - DNA, 25 bp, Homo sapien
cagggtaagcatctgttttattcag

SEQ ID NO: 1223021 - DNA, 25 bp, Homo sapien
agggtaagcatctgttttattcaga

SEQ ID NO: 1223022 - DNA, 25 bp, Homo sapien
taaaggtcgctcaaaattccactgc

SEQ ID NO: 1223023 - DNA, 25 bp, Homo sapien
cagctgatactgacatctaggaggt

SEQ ID NO: 1223024 - DNA, 25 bp, Homo sapien
ggctcttattgatccctggtgtgca

SEQ ID NO: 1223025 - DNA, 25 bp, Homo sapien
tctaggaggtgtcccactttggctc

SEQ ID NO: 1223026 - DNA, 25 bp, Homo sapien
gccagcaccactcgccagaaatgtg

SEQ ID NO: 1223027 - DNA, 25 bp, Homo sapien
catggagaggagtagagcttctggc

SEQ ID NO: 1223028 - DNA, 25 bp, Homo sapien
caggggcagaaaggcaatgcccact

SEQ ID NO: 1223029 - DNA, 25 bp, Homo sapien
tgtgacacccgccacagacatcagg

SEQ ID NO: 1223030 - DNA, 25 bp, Homo sapien
tacgagggagtcttccatcggagga

SEQ ID NO: 1223031 - DNA, 25 bp, Homo sapien
ggaaagctgtagagacccaaaccat

SEQ ID NO: 1223032 - DNA, 25 bp, Homo sapien
tctggagtcaggactagggcccaac

SEQ ID NO: 1223033 - DNA, 25 bp, Homo sapien
ctgggagaatctatagggcacctgg

SEQ ID NO: 1223034 - DNA, 25 bp, Homo sapien
gctaagatgactggaactgagatgg

SEQ ID NO: 1223035 - DNA, 25 bp, Homo sapien
gccacagctaaggtgcagatcagca

SEQ ID NO: 1223036 - DNA, 25 bp, Homo sapien
tagagcagttactaaccaccgaggg

SEQ ID NO: 1223037 - DNA, 25 bp, Homo sapien
cacagtccaggaaactcatgttagg

SEQ ID NO: 1223038 - DNA, 25 bp, Homo sapien
acaaggtcggtcagttcaggtggct

SEQ ID NO: 1223039 - DNA, 25 bp, Homo sapien
ccagcatagacagtgacttccctga

SEQ ID NO: 1223040 - DNA, 25 bp, Homo sapien
gcatagacagtgacttccctgactt

SEQ ID NO: 1223041 - DNA, 25 bp, Homo sapien
ccctgacttcctagtttggacaagg

SEQ ID NO: 1223042 - DNA, 25 bp, Homo sapien
ccaagataaccagattgtaaacata

SEQ ID NO: 1223043 - DNA, 25 bp, Homo sapien
agtttccaagataaccagattgtaa

SEQ ID NO: 1223044 - DNA, 25 bp, Homo sapien
tggggaagtttccaagataaccaga

SEQ ID NO: 1223045 - DNA, 25 bp, Homo sapien
ggaagtttccaagataaccagattg

SEQ ID NO: 1223046 - DNA, 25 bp, Homo sapien
cccttgctgattgcccaggtgtttc

SEQ ID NO: 1223047 - DNA, 25 bp, Homo sapien
tccggatgacatcacacccttgctg

SEQ ID NO: 1223048 - DNA, 25 bp, Homo sapien
tcttggttgtccatcagaaacactg

SEQ ID NO: 1223049 - DNA, 25 bp, Homo sapien
gtctgtgagccaagcatttctccgg

SEQ ID NO: 1223050 - DNA, 25 bp, Homo sapien
taaaccagtaatcattaaagcctcc

SEQ ID NO: 1223051 - DNA, 25 bp, Homo sapien
cttcctaaaattctcaacttgctac

SEQ ID NO: 1223052 - DNA, 25 bp, Homo sapien
caacttgctaccaggcattttctga

SEQ ID NO: 1223053 - DNA, 25 bp, Homo sapien
tttgtctgcaaaaatccataccctt

SEQ ID NO: 1223054 - DNA, 25 bp, Homo sapien
gccatgtccgtgtgggcttcgccgc

SEQ ID NO: 1223055 - DNA, 25 bp, Homo sapien
cagaacgccatgtccgtgtgggctt

SEQ ID NO: 1223056 - DNA, 25 bp, Homo sapien
tccacagaacgccatgtccgtgtgg

SEQ ID NO: 1223057 - DNA, 25 bp, Homo sapien
tccgtgtgggcttcgccgccagcag

SEQ ID NO: 1223058 - DNA, 25 bp, Homo sapien
gggccaggaggatgcagccacacac

SEQ ID NO: 1223059 - DNA, 25 bp, Homo sapien
agggccaggaggatgcagccacaca

SEQ ID NO: 1223060 - DNA, 25 bp, Homo sapien
atgagggccaggaggatgcagccac

SEQ ID NO: 1223061 - DNA, 25 bp, Homo sapien
ctatgagggccaggaggatgcagcc

SEQ ID NO: 1223062 - DNA, 25 bp, Homo sapien
accctctgaggatgttggctgtcct

SEQ ID NO: 1223063 - DNA, 25 bp, Homo sapien
ccctctgaggatgttggctgtcctc

SEQ ID NO: 1223064 - DNA, 25 bp, Homo sapien
caaggcatgggggcttgatagagaa

SEQ ID NO: 1223065 - DNA, 25 bp, Homo sapien
catgggggcttgatagagaagaggg

SEQ ID NO: 1223066 - DNA, 25 bp, Homo sapien
ggcatgggggcttgatagagaagag

SEQ ID NO: 1223067 - DNA, 25 bp, Homo sapien
tgaacaaggcatgggggcttgatag

SEQ ID NO: 1223068 - DNA, 25 bp, Homo sapien
ggcagcctgagagaggtatcctgac

SEQ ID NO: 1223069 - DNA, 25 bp, Homo sapien
gcagggctagttcctctcatttggg

SEQ ID NO: 1223070 - DNA, 25 bp, Homo sapien
atgcatgtggaacaatcccattggc

SEQ ID NO: 1223071 - DNA, 25 bp, Homo sapien
ctgacccatgcagtagaaatagagg

SEQ ID NO: 1223072 - DNA, 25 bp, Homo sapien
cacctccaggggatggatcaaaagc

SEQ ID NO: 1223073 - DNA, 25 bp, Homo sapien
cataaaggcccaattcatgcccagg

SEQ ID NO: 1223074 - DNA, 25 bp, Homo sapien
tgacacaatcatcccatacaataag

SEQ ID NO: 1223075 - DNA, 25 bp, Homo sapien
tccaagatgggcatttcgtgcaaag

SEQ ID NO: 1223076 - DNA, 25 bp, Homo sapien
gaagtctcgccaagtgacgatggga

SEQ ID NO: 1223077 - DNA, 25 bp, Homo sapien
agtaaaatctcagggcaaggagaga

SEQ ID NO: 1223078 - DNA, 25 bp, Homo sapien
tcagcctgaaacagtaggacagaga

SEQ ID NO: 1223079 - DNA, 25 bp, Homo sapien
tatggcatgtataagtagtgggaca

SEQ ID NO: 1223080 - DNA, 25 bp, Homo sapien
tggagactgtacaccagcaaacagc

SEQ ID NO: 1223081 - DNA, 25 bp, Homo sapien
caatgagaggatagagtgccacagg

SEQ ID NO: 1223082 - DNA, 25 bp, Homo sapien
tagcgatgctgagggaactacccgg

SEQ ID NO: 1223083 - DNA, 25 bp, Homo sapien
ggcactgtgctgaatctctacgcaa

SEQ ID NO: 1223084 - DNA, 25 bp, Homo sapien
accctgcatttcgttccaatgccaa

SEQ ID NO: 1223085 - DNA, 25 bp, Homo sapien
ctgcatttcgttccaatgccaacta

SEQ ID NO: 1223086 - DNA, 25 bp, Homo sapien
tgaaccctgcatttcgttccaatgc

SEQ ID NO: 1223087 - DNA, 25 bp, Homo sapien
gaaccctgcatttcgttccaatgcc

SEQ ID NO: 1223088 - DNA, 25 bp, Homo sapien
ctccattggatctggacagtacgag

SEQ ID NO: 1223089 - DNA, 25 bp, Homo sapien
tctccttgagctgccgaaggcactc

SEQ ID NO: 1223090 - DNA, 25 bp, Homo sapien
agcttctccttgagctgccgaaggc

SEQ ID NO: 1223091 - DNA, 25 bp, Homo sapien
tggatctggacagtacgagaaattc

SEQ ID NO: 1223092 - DNA, 25 bp, Homo sapien
tctgtgccgtgtgacaaagcactcc

SEQ ID NO: 1223093 - DNA, 25 bp, Homo sapien
gccgtgtgacaaagcactcctttga

SEQ ID NO: 1223094 - DNA, 25 bp, Homo sapien
aggtttttgggcacaagcttctgtg

SEQ ID NO: 1223095 - DNA, 25 bp, Homo sapien
tgtgccgtgtgacaaagcactcctt

SEQ ID NO: 1223096 - DNA, 25 bp, Homo sapien
acagattcagaggcagtcacactgc

SEQ ID NO: 1223097 - DNA, 25 bp, Homo sapien
cctggtcaacacagattcagaggca

SEQ ID NO: 1223098 - DNA, 25 bp, Homo sapien
cagattcagaggcagtcacactgct

SEQ ID NO: 1223099 - DNA, 25 bp, Homo sapien
cagcctggtcaacacagattcagag

SEQ ID NO: 1223100 - DNA, 25 bp, Homo sapien
ctcttttctaccctgaacgctggat

SEQ ID NO: 1223101 - DNA, 25 bp, Homo sapien
ccatagattatggttccatggattt

SEQ ID NO: 1223102 - DNA, 25 bp, Homo sapien
aaagccatccatagattatggttcc

SEQ ID NO: 1223103 - DNA, 25 bp, Homo sapien
catccatagattatggttccatgga

SEQ ID NO: 1223104 - DNA, 25 bp, Homo sapien
gccatccatagattatggttccatg

SEQ ID NO: 1223105 - DNA, 25 bp, Homo sapien
taatcattaccacaatcaagacaaa

SEQ ID NO: 1223106 - DNA, 25 bp, Homo sapien
gtcatgtgtttaggtataatttaca

SEQ ID NO: 1223107 - DNA, 25 bp, Homo sapien
taggtataaagttctggaattttga

SEQ ID NO: 1223108 - DNA, 25 bp, Homo sapien
gctgagtagttaagatttcaggcct

SEQ ID NO: 1223109 - DNA, 25 bp, Homo sapien
cagagggatccgttgtgtcacagtg

SEQ ID NO: 1223110 - DNA, 25 bp, Homo sapien
gaagctccgtcagcgtaaagtgaac

SEQ ID NO: 1223111 - DNA, 25 bp, Homo sapien
tccaggaaccagatgagagctgcgt

SEQ ID NO: 1223112 - DNA, 25 bp, Homo sapien
gacaccttgggaaatcgacactctc

SEQ ID NO: 1223113 - DNA, 25 bp, Homo sapien
ggcgcttaccgaggcgagaacctag

SEQ ID NO: 1223114 - DNA, 25 bp, Homo sapien
ctcggccttggacacagtcggcgct

SEQ ID NO: 1223115 - DNA, 25 bp, Homo sapien
gaggtgctggaacgcgggcgcttac

SEQ ID NO: 1223116 - DNA, 25 bp, Homo sapien
agtttcttcctggacggcgaccctg

SEQ ID NO: 1223117 - DNA, 25 bp, Homo sapien
agacacacatttcacagcccacctt

SEQ ID NO: 1223118 - DNA, 25 bp, Homo sapien
gaataagacacacatttcacagccc

SEQ ID NO: 1223119 - DNA, 25 bp, Homo sapien
aagacacacatttcacagcccacct

SEQ ID NO: 1223120 - DNA, 25 bp, Homo sapien
cacacatttcacagcccaccttcat

SEQ ID NO: 1223121 - DNA, 25 bp, Homo sapien
aaggcactgagattgtgttccaagt

SEQ ID NO: 1223122 - DNA, 25 bp, Homo sapien
caagtggaaaagttggttccagcgg

SEQ ID NO: 1223123 - DNA, 25 bp, Homo sapien
ctgctgaaaggcactgagattgtgt

SEQ ID NO: 1223124 - DNA, 25 bp, Homo sapien
gaaaagttggttccagcggactcac

SEQ ID NO: 1223125 - DNA, 25 bp, Homo sapien
gacgaaggggagccaagtggggtgc

SEQ ID NO: 1223126 - DNA, 25 bp, Homo sapien
ctgggacgaaggggagccaagtggg

SEQ ID NO: 1223127 - DNA, 25 bp, Homo sapien
tttttggcacaagcatgctgttccg

SEQ ID NO: 1223128 - DNA, 25 bp, Homo sapien
gggacgatgaaagaggagataacca

SEQ ID NO: 1223129 - DNA, 25 bp, Homo sapien
gaaatggcctctcgagtttccagaa

SEQ ID NO: 1223130 - DNA, 25 bp, Homo sapien
ccaggtgaggactctttaagtagaa

SEQ ID NO: 1223131 - DNA, 25 bp, Homo sapien
ctggggacaccaaggagagagcttg

SEQ ID NO: 1223132 - DNA, 25 bp, Homo sapien
caccaaggagagagcttgctggtgg

SEQ ID NO: 1223133 - DNA, 25 bp, Homo sapien
ggacaccaaggagagagcttgctgg

SEQ ID NO: 1223134 - DNA, 25 bp, Homo sapien
tggggacaccaaggagagagcttgc

SEQ ID NO: 1223135 - DNA, 25 bp, Homo sapien
gaacaggaagaacagcgggcaatgc

SEQ ID NO: 1223136 - DNA, 25 bp, Homo sapien
aacaggaagaacagcgggcaatgct

SEQ ID NO: 1223137 - DNA, 25 bp, Homo sapien
acaggaagaacagcgggcaatgctt

SEQ ID NO: 1223138 - DNA, 25 bp, Homo sapien
aggctgctagcggttttctctcctg

SEQ ID NO: 1223139 - DNA, 25 bp, Homo sapien
ctcctggggagcacacacaaggtgt

SEQ ID NO: 1223140 - DNA, 25 bp, Homo sapien
tcctggggagcacacacaaggtgtt

SEQ ID NO: 1223141 - DNA, 25 bp, Homo sapien
ctgaggctgctagcggttttctctc

SEQ ID NO: 1223142 - DNA, 25 bp, Homo sapien
cttttcacgggagaaagctgagtga

SEQ ID NO: 1223143 - DNA, 25 bp, Homo sapien
cagtgcatgtctggccttctgtagc

SEQ ID NO: 1223144 - DNA, 25 bp, Homo sapien
gggctccagtgcatgtctggccttc

SEQ ID NO: 1223145 - DNA, 25 bp, Homo sapien
tgagtgaggggcttgacactgatct

SEQ ID NO: 1223146 - DNA, 25 bp, Homo sapien
tttctcttcttgtcacatcttccca

SEQ ID NO: 1223147 - DNA, 25 bp, Homo sapien
tcctcaaggcatggttggtcaactg

SEQ ID NO: 1223148 - DNA, 25 bp, Homo sapien
acagcagagcatcctatatagagga

SEQ ID NO: 1223149 - DNA, 25 bp, Homo sapien
tttggggcaaggtgctgaaaatcct

SEQ ID NO: 1223150 - DNA, 25 bp, Homo sapien
aaagaagtggccaatttcgctttcg

SEQ ID NO: 1223151 - DNA, 25 bp, Homo sapien
aaagaacagcttcaaagaagtggcc

SEQ ID NO: 1223152 - DNA, 25 bp, Homo sapien
agcttcaaagaagtggccaatttcg

SEQ ID NO: 1223153 - DNA, 25 bp, Homo sapien
cttcaaagaagtggccaatttcgct

SEQ ID NO: 1223154 - DNA, 25 bp, Homo sapien
ctcccataatcgctgtcaccccaca

SEQ ID NO: 1223155 - DNA, 25 bp, Homo sapien
tcccataatcgctgtcaccccacat

SEQ ID NO: 1223156 - DNA, 25 bp, Homo sapien
aagcttaaacttacgtgccttacag

SEQ ID NO: 1223157 - DNA, 25 bp, Homo sapien
tctgagagctcaagaattccaggag

SEQ ID NO: 1223158 - DNA, 25 bp, Homo sapien
acagatgatctcactttggtgccca

SEQ ID NO: 1223159 - DNA, 25 bp, Homo sapien
ccctagggctaagaatggtgactga

SEQ ID NO: 1223160 - DNA, 25 bp, Homo sapien
caacatcacagattgaacagggact

SEQ ID NO: 1223161 - DNA, 25 bp, Homo sapien
ctgtaggcctgtaaggggcccagta

SEQ ID NO: 1223162 - DNA, 25 bp, Homo sapien
ctgtaaggggcccagtagcttcagc

SEQ ID NO: 1223163 - DNA, 25 bp, Homo sapien
gcctgtaaggggcccagtagcttca

SEQ ID NO: 1223164 - DNA, 25 bp, Homo sapien
taggcctgtaaggggcccagtagct

SEQ ID NO: 1223165 - DNA, 25 bp, Homo sapien
gtgctggcaacactctcttctttcc

SEQ ID NO: 1223166 - DNA, 25 bp, Homo sapien
aggtgctggcaacactctcttcttt

SEQ ID NO: 1223167 - DNA, 25 bp, Homo sapien
gcaacactctcttctttcccctgac

SEQ ID NO: 1223168 - DNA, 25 bp, Homo sapien
tggcaacactctcttctttcccctg

SEQ ID NO: 1223169 - DNA, 25 bp, Homo sapien
caggatccatgtagagccactgagc

SEQ ID NO: 1223170 - DNA, 25 bp, Homo sapien
tggaggcagctcactagctggactt

SEQ ID NO: 1223171 - DNA, 25 bp, Homo sapien
ccagggaccactgtggttggtccag

SEQ ID NO: 1223172 - DNA, 25 bp, Homo sapien
cagctcactagctggacttgaaggc

SEQ ID NO: 1223173 - DNA, 25 bp, Homo sapien
agatgtttggcggtgattctcagaa

SEQ ID NO: 1223174 - DNA, 25 bp, Homo sapien
aggtagctggtcacttcagtctgca

SEQ ID NO: 1223175 - DNA, 25 bp, Homo sapien
tgacatgagtggctaccaggtagct

SEQ ID NO: 1223176 - DNA, 25 bp, Homo sapien
tatgccagtttggtgacatgagtgg

SEQ ID NO: 1223177 - DNA, 25 bp, Homo sapien
gcatgaccaatggtgcccaagccag

SEQ ID NO: 1223178 - DNA, 25 bp, Homo sapien
cgctgctgcgtgttccaggcatgac

SEQ ID NO: 1223179 - DNA, 25 bp, Homo sapien
ccaggcatgaccaatggtgcccaag

SEQ ID NO: 1223180 - DNA, 25 bp, Homo sapien
gctgctgcgtgttccaggcatgacc

SEQ ID NO: 1223181 - DNA, 25 bp, Homo sapien
cccaggctgacgtaatgctattaat

SEQ ID NO: 1223182 - DNA, 25 bp, Homo sapien
gagcgttgcatcaccccttttatag

SEQ ID NO: 1223183 - DNA, 25 bp, Homo sapien
gtttactccgtgttgccagtcccag

SEQ ID NO: 1223184 - DNA, 25 bp, Homo sapien
ctggcggcgcggtcgtttactccgt

SEQ ID NO: 1223185 - DNA, 25 bp, Homo sapien
agaagagagctgtgcagtgcgcgcc

SEQ ID NO: 1223186 - DNA, 25 bp, Homo sapien
cggcgcgcgggctgaagggtgcgct

SEQ ID NO: 1223187 - DNA, 25 bp, Homo sapien
cgggcgagcaccgaggactcacggc

SEQ ID NO: 1223188 - DNA, 25 bp, Homo sapien
ggctgtttgtctggccggcgggcga

SEQ ID NO: 1223189 - DNA, 25 bp, Homo sapien
tgcgggaaacttttcgaagcgccga

SEQ ID NO: 1223190 - DNA, 25 bp, Homo sapien
tcgattgcagtgtaagcgctcagag

SEQ ID NO: 1223191 - DNA, 25 bp, Homo sapien
cgcgccccaagtcaaaagagaaagt

SEQ ID NO: 1223192 - DNA, 25 bp, Homo sapien
taagccagagttatttccaagccgg

SEQ ID NO: 1223193 - DNA, 25 bp, Homo sapien
ctggtaccaatcacagaggagactt

SEQ ID NO: 1223194 - DNA, 25 bp, Homo sapien
gggctatcgaagaaaacggccatgg

SEQ ID NO: 1223195 - DNA, 25 bp, Homo sapien
gactttgacaggactgagataggga

SEQ ID NO: 1223196 - DNA, 25 bp, Homo sapien
tatcgaagaaaacggccatggagaa

SEQ ID NO: 1223197 - DNA, 25 bp, Homo sapien
gagatctaacatacaccaatggagg

SEQ ID NO: 1223198 - DNA, 25 bp, Homo sapien
aagccagaggcttaagattctccca

SEQ ID NO: 1223199 - DNA, 25 bp, Homo sapien
ttgactagtcaaagaaacccaggct

SEQ ID NO: 1223200 - DNA, 25 bp, Homo sapien
gaggatacttgtcgctgtcaggcaa

SEQ ID NO: 1223201 - DNA, 25 bp, Homo sapien
ttatgtcacggtgcatacccaggct

SEQ ID NO: 1223202 - DNA, 25 bp, Homo sapien
gctgcttgctaactgccttctggga

SEQ ID NO: 1223203 - DNA, 25 bp, Homo sapien
gctaagtaaagattcctcgggataa

SEQ ID NO: 1223204 - DNA, 25 bp, Homo sapien
gaagaagccctctggcaagtctcga

SEQ ID NO: 1223205 - DNA, 25 bp, Homo sapien
caacttccgagggagaagcttcagt

SEQ ID NO: 1223206 - DNA, 25 bp, Homo sapien
tcattcccattgcttgggcccaact

SEQ ID NO: 1223207 - DNA, 25 bp, Homo sapien
cattcccattgcttgggcccaactt

SEQ ID NO: 1223208 - DNA, 25 bp, Homo sapien
tgggcccaacttccgagggagaagc

SEQ ID NO: 1223209 - DNA, 25 bp, Homo sapien
cgaagttgggcccaagcaatgggaa

SEQ ID NO: 1223210 - DNA, 25 bp, Homo sapien
tgacgtcaagctgaaactatcagtg

SEQ ID NO: 1223211 - DNA, 25 bp, Homo sapien
actatcagtgagtggaagtaaaagc

SEQ ID NO: 1223212 - DNA, 25 bp, Homo sapien
gaaaggtaactgtagccaggtgcgt

SEQ ID NO: 1223213 - DNA, 25 bp, Homo sapien
aagacacattgaaacccaaactgtt

SEQ ID NO: 1223214 - DNA, 25 bp, Homo sapien
ctgaaagacacattgaaacccaaac

SEQ ID NO: 1223215 - DNA, 25 bp, Homo sapien
gaaagacacattgaaacccaaactg

SEQ ID NO: 1223216 - DNA, 25 bp, Homo sapien
gacacattgaaacccaaactgtttc

SEQ ID NO: 1223217 - DNA, 25 bp, Homo sapien
tagcaaaatcctcaaacaccagtga

SEQ ID NO: 1223218 - DNA, 25 bp, Homo sapien
tgacaaagggcgtcaggttagcaaa

SEQ ID NO: 1223219 - DNA, 25 bp, Homo sapien
ggcgtcaggttagcaaaatcctcaa

SEQ ID NO: 1223220 - DNA, 25 bp, Homo sapien
ggttagcaaaatcctcaaacaccag

SEQ ID NO: 1223221 - DNA, 25 bp, Homo sapien
accccgaggggtctgtcgctgacag

SEQ ID NO: 1223222 - DNA, 25 bp, Homo sapien
gaggacatccggtggcagaggtgct

SEQ ID NO: 1223223 - DNA, 25 bp, Homo sapien
gtctgtcgctgacagtgactgattc

SEQ ID NO: 1223224 - DNA, 25 bp, Homo sapien
catccggtggcagaggtgcttgttc

SEQ ID NO: 1223225 - DNA, 25 bp, Homo sapien
tctgtaagacccaatatgaccagcc

SEQ ID NO: 1223226 - DNA, 25 bp, Homo sapien
aagacccaatatgaccagcccctat

SEQ ID NO: 1223227 - DNA, 25 bp, Homo sapien
taataatctgtaagacccaatatga

SEQ ID NO: 1223228 - DNA, 25 bp, Homo sapien
gtgtgttgaatcttgttgcttctct

SEQ ID NO: 1223229 - DNA, 25 bp, Homo sapien
tgtgaacattgctacagggaagggt

SEQ ID NO: 1223230 - DNA, 25 bp, Homo sapien
tcttacccaaggttgccaagcgtgg

SEQ ID NO: 1223231 - DNA, 25 bp, Homo sapien
gaacagtgcaagtgtgtcagacaga

SEQ ID NO: 1223232 - DNA, 25 bp, Homo sapien
tgcaagtggtgaactaggacagtct

SEQ ID NO: 1223233 - DNA, 25 bp, Homo sapien
cccaaatttgggagaagcccatgat

SEQ ID NO: 1223234 - DNA, 25 bp, Homo sapien
gaaaaggcacctaagcccattccca

SEQ ID NO: 1223235 - DNA, 25 bp, Homo sapien
catgatgctcctgtagaaaaggcac

SEQ ID NO: 1223236 - DNA, 25 bp, Homo sapien
ttcccaaccaaagcggcattaatcg

SEQ ID NO: 1223237 - DNA, 25 bp, Homo sapien
tcaggatcattacctagccacccac

SEQ ID NO: 1223238 - DNA, 25 bp, Homo sapien
cactcccggcctcttcttcaattca

SEQ ID NO: 1223239 - DNA, 25 bp, Homo sapien
gattctgtctggtaaacatctcctt

SEQ ID NO: 1223240 - DNA, 25 bp, Homo sapien
tattaactataatcatttaaagccg

SEQ ID NO: 1223241 - DNA, 25 bp, Homo sapien
ggcactttgcagctgcaatcttatt

SEQ ID NO: 1223242 - DNA, 25 bp, Homo sapien
tcttatttctttctcgtcgcctctt

SEQ ID NO: 1223243 - DNA, 25 bp, Homo sapien
ttctcgtcgcctctttttcctttca

SEQ ID NO: 1223244 - DNA, 25 bp, Homo sapien
ttcttcttgtttcggcactttgcag

SEQ ID NO: 1223245 - DNA, 25 bp, Homo sapien
gaatgcaaagcaagtgtaaccactg

SEQ ID NO: 1223246 - DNA, 25 bp, Homo sapien
tcaagtgaagcctctttaactgggc

SEQ ID NO: 1223247 - DNA, 25 bp, Homo sapien
gagtcaggcatcagacgaattcaca

SEQ ID NO: 1223248 - DNA, 25 bp, Homo sapien
ggacatgtatgaaccggccgaggct

SEQ ID NO: 1223249 - DNA, 25 bp, Homo sapien
gcccatatgcaggtcttctggaccc

SEQ ID NO: 1223250 - DNA, 25 bp, Homo sapien
catgagtcaacagcccatatgcagg

SEQ ID NO: 1223251 - DNA, 25 bp, Homo sapien
tttgcatgagtcaacagcccatatg

SEQ ID NO: 1223252 - DNA, 25 bp, Homo sapien
gcaggtcttctggacccaaaagggc

SEQ ID NO: 1223253 - DNA, 25 bp, Homo sapien
tgatgccacagaggcggcctgtggc

SEQ ID NO: 1223254 - DNA, 25 bp, Homo sapien
tgccacagaggcggcctgtggctct

SEQ ID NO: 1223255 - DNA, 25 bp, Homo sapien
tggtgatgccacagaggcggcctgt

SEQ ID NO: 1223256 - DNA, 25 bp, Homo sapien
ctggtgatgccacagaggcggcctg

SEQ ID NO: 1223257 - DNA, 25 bp, Homo sapien
gagagcagcactgggtttaggaaaa

SEQ ID NO: 1223258 - DNA, 25 bp, Homo sapien
tcatcaagctgcgagaggaagatgg

SEQ ID NO: 1223259 - DNA, 25 bp, Homo sapien
gatgggagagcagcactgggtttag

SEQ ID NO: 1223260 - DNA, 25 bp, Homo sapien
gggctcatcaagctgcgagaggaag

SEQ ID NO: 1223261 - DNA, 25 bp, Homo sapien
caagaaaggagccaagggccagtga

SEQ ID NO: 1223262 - DNA, 25 bp, Homo sapien
caacagaggcatcaagaaaggagcc

SEQ ID NO: 1223263 - DNA, 25 bp, Homo sapien
ggacaagcaacagaggcatcaagaa

SEQ ID NO: 1223264 - DNA, 25 bp, Homo sapien
tgggggacaagcaacagaggcatca

SEQ ID NO: 1223265 - DNA, 25 bp, Homo sapien
caaatgctgcttctcgttcttgagc

SEQ ID NO: 1223266 - DNA, 25 bp, Homo sapien
attctgagcccggacaatacacgtg

SEQ ID NO: 1223267 - DNA, 25 bp, Homo sapien
cacgtgggccgatgaaggttgagca

SEQ ID NO: 1223268 - DNA, 25 bp, Homo sapien
tagctctgcaatgttccttctttta

SEQ ID NO: 1223269 - DNA, 25 bp, Homo sapien
tcttgagatactgcacgtggtgaca

SEQ ID NO: 1223270 - DNA, 25 bp, Homo sapien
tgaatcctaacggtgggcatcctgg

SEQ ID NO: 1223271 - DNA, 25 bp, Homo sapien
ttttaatagacagtagccagcgtcc

SEQ ID NO: 1223272 - DNA, 25 bp, Homo sapien
gctgctgggattctagaggtacaca

SEQ ID NO: 1223273 - DNA, 25 bp, Homo sapien
taatgcatttgtgatagaccttcat

SEQ ID NO: 1223274 - DNA, 25 bp, Homo sapien
tgcgtttcataatggctggtggctg

SEQ ID NO: 1223275 - DNA, 25 bp, Homo sapien
gcttacaaattgtcttgcgtttcat

SEQ ID NO: 1223276 - DNA, 25 bp, Homo sapien
ggtgcctctacccataactagaagg

SEQ ID NO: 1223277 - DNA, 25 bp, Homo sapien
caagacgtagagatgcagggtgggc

SEQ ID NO: 1223278 - DNA, 25 bp, Homo sapien
agactacaaactgtagtcctagtga

SEQ ID NO: 1223279 - DNA, 25 bp, Homo sapien
tttgtagtctctctccctgagagag

SEQ ID NO: 1223280 - DNA, 25 bp, Homo sapien
gatgtctctgcagctggtctctcaa

SEQ ID NO: 1223281 - DNA, 25 bp, Homo sapien
ccactctgggccgtataatacggca

SEQ ID NO: 1223282 - DNA, 25 bp, Homo sapien
tgctggagccactctgggccgtata

SEQ ID NO: 1223283 - DNA, 25 bp, Homo sapien
gctcatgctggagccactctgggcc

SEQ ID NO: 1223284 - DNA, 25 bp, Homo sapien
gtataatacggcagcagaaaatcag

SEQ ID NO: 1223285 - DNA, 25 bp, Homo sapien
catacttgaatatatcgtactcccc

SEQ ID NO: 1223286 - DNA, 25 bp, Homo sapien
tcgctctcaaatatcggtgcatact

SEQ ID NO: 1223287 - DNA, 25 bp, Homo sapien
ccatggtcaccatacggacacggtt

SEQ ID NO: 1223288 - DNA, 25 bp, Homo sapien
gctggtacgtgcaatgcccatggtc

SEQ ID NO: 1223289 - DNA, 25 bp, Homo sapien
ggccatgtccagcatactcttcgca

SEQ ID NO: 1223290 - DNA, 25 bp, Homo sapien
tggccggtcgtgccagtagcatgac

SEQ ID NO: 1223291 - DNA, 25 bp, Homo sapien
ctggtgagctctaagttctttgctg

SEQ ID NO: 1223292 - DNA, 25 bp, Homo sapien
atactcttcgcagccggtggccggt

SEQ ID NO: 1223293 - DNA, 25 bp, Homo sapien
caagagcgggacacaattgcagata

SEQ ID NO: 1223294 - DNA, 25 bp, Homo sapien
catgggtggccgcaagaggtaaatt

SEQ ID NO: 1223295 - DNA, 25 bp, Homo sapien
gaggtcatcccgtgtgtcaagagcg

SEQ ID NO: 1223296 - DNA, 25 bp, Homo sapien
gatagcaagatctgccagtggcgaa

SEQ ID NO: 1223297 - DNA, 25 bp, Homo sapien
tttccttgaaggttcacggctccca

SEQ ID NO: 1223298 - DNA, 25 bp, Homo sapien
tccttgaaggttcacggctcccagg

SEQ ID NO: 1223299 - DNA, 25 bp, Homo sapien
acaggcatccacatcatgtcttcag

SEQ ID NO: 1223300 - DNA, 25 bp, Homo sapien
tggtcctgatccccctttccttgaa

SEQ ID NO: 1223301 - DNA, 25 bp, Homo sapien
ccatgtggaggctttggatgctgac

SEQ ID NO: 1223302 - DNA, 25 bp, Homo sapien
tcagagaccatgtggaggctttgga

SEQ ID NO: 1223303 - DNA, 25 bp, Homo sapien
cagagaccatgtggaggctttggat

SEQ ID NO: 1223304 - DNA, 25 bp, Homo sapien
agaccatgtggaggctttggatgct

SEQ ID NO: 1223305 - DNA, 25 bp, Homo sapien
gctggctcctcagcaagttctgtag

SEQ ID NO: 1223306 - DNA, 25 bp, Homo sapien
tacggtgcctgttgctgcccctgca

SEQ ID NO: 1223307 - DNA, 25 bp, Homo sapien
gatgcattgagcacattagtgggtt

SEQ ID NO: 1223308 - DNA, 25 bp, Homo sapien
cacactcaaggcacctgctacggtg

SEQ ID NO: 1223309 - DNA, 25 bp, Homo sapien
cctgctggaggacttttgggcaatc

SEQ ID NO: 1223310 - DNA, 25 bp, Homo sapien
tgtcctgcggcgatgggaactcctt

SEQ ID NO: 1223311 - DNA, 25 bp, Homo sapien
tcatggatgcgctggaaacatgctc

SEQ ID NO: 1223312 - DNA, 25 bp, Homo sapien
aacatgctctgaggacttgcctgca

SEQ ID NO: 1223313 - DNA, 25 bp, Homo sapien
ggtgtcatagaaccaaccgtctcca

SEQ ID NO: 1223314 - DNA, 25 bp, Homo sapien
taaggttggctctgacgttcctcag

SEQ ID NO: 1223315 - DNA, 25 bp, Homo sapien
gaaccggaactggtggtccataagc

SEQ ID NO: 1223316 - DNA, 25 bp, Homo sapien
gccaagtcccttgctggaaccggaa

SEQ ID NO: 1223317 - DNA, 25 bp, Homo sapien
atttaaacggcagtaaagaacgctg

SEQ ID NO: 1223318 - DNA, 25 bp, Homo sapien
cagtaaagaacgctggaataggctt

SEQ ID NO: 1223319 - DNA, 25 bp, Homo sapien
taaacggcagtaaagaacgctggaa

SEQ ID NO: 1223320 - DNA, 25 bp, Homo sapien
gtatgattctttatttaaacggcag

SEQ ID NO: 1223321 - DNA, 25 bp, Homo sapien
ccctcctctcaatccaggaattttg

SEQ ID NO: 1223322 - DNA, 25 bp, Homo sapien
tctcaatccaggaattttggtgctc

SEQ ID NO: 1223323 - DNA, 25 bp, Homo sapien
cctctcaatccaggaattttggtgc

SEQ ID NO: 1223324 - DNA, 25 bp, Homo sapien
ctcctctcaatccaggaattttggt

SEQ ID NO: 1223325 - DNA, 25 bp, Homo sapien
gtgtgacttttctcaaaagtagctt

SEQ ID NO: 1223326 - DNA, 25 bp, Homo sapien
aaatgtgtgacttttctcaaaagta

SEQ ID NO: 1223327 - DNA, 25 bp, Homo sapien
aatgaaatgtgtgacttttctcaaa

SEQ ID NO: 1223328 - DNA, 25 bp, Homo sapien
tctcaaaagtagctttaggaattaa

SEQ ID NO: 1223329 - DNA, 25 bp, Homo sapien
actggctctgtacctccatgtggga

SEQ ID NO: 1223330 - DNA, 25 bp, Homo sapien
tgcccgaaagctgttgcactggagt

SEQ ID NO: 1223331 - DNA, 25 bp, Homo sapien
tggccagcacacattggtggtgccc

SEQ ID NO: 1223332 - DNA, 25 bp, Homo sapien
ggtggtgcccgaaagctgttgcact

SEQ ID NO: 1223333 - DNA, 25 bp, Homo sapien
actgcctggatgacgctcatcttta

SEQ ID NO: 1223334 - DNA, 25 bp, Homo sapien
ctgccaggagactagagccacactg

SEQ ID NO: 1223335 - DNA, 25 bp, Homo sapien
tgtcttgcagccattccacgctctg

SEQ ID NO: 1223336 - DNA, 25 bp, Homo sapien
tcatctttaccagctcgcagctctg

SEQ ID NO: 1223337 - DNA, 25 bp, Homo sapien
acacactcctccttgctttcctgtg

SEQ ID NO: 1223338 - DNA, 25 bp, Homo sapien
cagcattcgggaatggagacctgga

SEQ ID NO: 1223339 - DNA, 25 bp, Homo sapien
actcaggggagttatgcagcattcg

SEQ ID NO: 1223340 - DNA, 25 bp, Homo sapien
cccatttgggtagtgaaaaatcaca

SEQ ID NO: 1223341 - DNA, 25 bp, Homo sapien
gtgcatgtctaggaagatgcttccc

SEQ ID NO: 1223342 - DNA, 25 bp, Homo sapien
tgcagaccatggcatacgcagaaaa

SEQ ID NO: 1223343 - DNA, 25 bp, Homo sapien
cagaaaatgacaacatcggaatggc

SEQ ID NO: 1223344 - DNA, 25 bp, Homo sapien
atggcacactggcataccagttggg

SEQ ID NO: 1223345 - DNA, 25 bp, Homo sapien
gagaggactctttttggcatgaatg

SEQ ID NO: 1223346 - DNA, 25 bp, Homo sapien
cgtggttcttggacgaaggtggtgg

SEQ ID NO: 1223347 - DNA, 25 bp, Homo sapien
gactctttttggcatgaatgctgaa

SEQ ID NO: 1223348 - DNA, 25 bp, Homo sapien
tctccagctctccaataacaacaaa

SEQ ID NO: 1223349 - DNA, 25 bp, Homo sapien
gattttaatccgtgctaagtgacct

SEQ ID NO: 1223350 - DNA, 25 bp, Homo sapien
gccagtgaaagtcctgaactggctg

SEQ ID NO: 1223351 - DNA, 25 bp, Homo sapien
agagggcagattcaatagggtatgt

SEQ ID NO: 1223352 - DNA, 25 bp, Homo sapien
ggtgccaggccagtgaaagtcctga

SEQ ID NO: 1223353 - DNA, 25 bp, Homo sapien
cccaaacacttgcagtcgcacagtg

SEQ ID NO: 1223354 - DNA, 25 bp, Homo sapien
gcccaaacacttgcagtcgcacagt

SEQ ID NO: 1223355 - DNA, 25 bp, Homo sapien
agcccaaacacttgcagtcgcacag

SEQ ID NO: 1223356 - DNA, 25 bp, Homo sapien
cagcccaaacacttgcagtcgcaca

SEQ ID NO: 1223357 - DNA, 25 bp, Homo sapien
ctcataatcatcttatagacatctc

SEQ ID NO: 1223358 - DNA, 25 bp, Homo sapien
cttagagtatgagttccatcctgtc

SEQ ID NO: 1223359 - DNA, 25 bp, Homo sapien
tcataatcatcttatagacatctcc

SEQ ID NO: 1223360 - DNA, 25 bp, Homo sapien
cctcataatcatcttatagacatct

SEQ ID NO: 1223361 - DNA, 25 bp, Homo sapien
cacgcaagtcgtttttgaagatacc

SEQ ID NO: 1223362 - DNA, 25 bp, Homo sapien
gaagatacccatgatatacgtttcc

SEQ ID NO: 1223363 - DNA, 25 bp, Homo sapien
tgaagatctcgccacgcaagtcgtt

SEQ ID NO: 1223364 - DNA, 25 bp, Homo sapien
catgatatacgtttccatggacttc

SEQ ID NO: 1223365 - DNA, 25 bp, Homo sapien
tggtaaatgtaggcgtttcttagct

SEQ ID NO: 1223366 - DNA, 25 bp, Homo sapien
gtaaatgtaggcgtttcttagcttc

SEQ ID NO: 1223367 - DNA, 25 bp, Homo sapien
taaatgtaggcgtttcttagcttcc

SEQ ID NO: 1223368 - DNA, 25 bp, Homo sapien
taagaaactggtacatataaactaa

SEQ ID NO: 1223369 - DNA, 25 bp, Homo sapien
aagaaactggtacatataaactaat

SEQ ID NO: 1223370 - DNA, 25 bp, Homo sapien
tctggcatcctttgttgcatgtcca

SEQ ID NO: 1223371 - DNA, 25 bp, Homo sapien
agcctctgctctggcatcctttgtt

SEQ ID NO: 1223372 - DNA, 25 bp, Homo sapien
tctgctctggcatcctttgttgcat

SEQ ID NO: 1223373 - DNA, 25 bp, Homo sapien
tgctctggcatcctttgttgcatgt

SEQ ID NO: 1223374 - DNA, 25 bp, Homo sapien
agcgccatctcgtggctgctggcag

SEQ ID NO: 1223375 - DNA, 25 bp, Homo sapien
agggcccggagtcgcctggatcgca

SEQ ID NO: 1223376 - DNA, 25 bp, Homo sapien
agtcgcctggatcgcagcgccatct

SEQ ID NO: 1223377 - DNA, 25 bp, Homo sapien
ccgccggcccgcagtgagtcccagg

SEQ ID NO: 1223378 - DNA, 25 bp, Homo sapien
tgtgggagcgcagtggcccaggact

SEQ ID NO: 1223379 - DNA, 25 bp, Homo sapien
ctgtgggagcgcagtggcccaggac

SEQ ID NO: 1223380 - DNA, 25 bp, Homo sapien
gagcgcagtggcccaggactggctg

SEQ ID NO: 1223381 - DNA, 25 bp, Homo sapien
cgcagtggcccaggactggctggcc

SEQ ID NO: 1223382 - DNA, 25 bp, Homo sapien
cagtcgttaagtctgcgagttgcga

SEQ ID NO: 1223383 - DNA, 25 bp, Homo sapien
tgatgtttagttgtgcagtcgttaa

SEQ ID NO: 1223384 - DNA, 25 bp, Homo sapien
tctgcgagttgcgatcctgcttcag

SEQ ID NO: 1223385 - DNA, 25 bp, Homo sapien
gggatgtcttctaacgaagagttca

SEQ ID NO: 1223386 - DNA, 25 bp, Homo sapien
aggatttctaaggaagagttaagag

SEQ ID NO: 1223387 - DNA, 25 bp, Homo sapien
tctaaggaagagttaagagggtaga

SEQ ID NO: 1223388 - DNA, 25 bp, Homo sapien
gctgcagacagtaggatttctaagg

SEQ ID NO: 1223389 - DNA, 25 bp, Homo sapien
ctgcagacagtaggatttctaagga

SEQ ID NO: 1223390 - DNA, 25 bp, Homo sapien
tcatttgcatgacgatttacacagc

SEQ ID NO: 1223391 - DNA, 25 bp, Homo sapien
tctttaggtgtgagaggacacaaat

SEQ ID NO: 1223392 - DNA, 25 bp, Homo sapien
cacagctgaggcttggacgctcaag

SEQ ID NO: 1223393 - DNA, 25 bp, Homo sapien
tgacgatttacacagctgaggcttg

SEQ ID NO: 1223394 - DNA, 25 bp, Homo sapien
ctgcagtgatccgtgttcatgcccc

SEQ ID NO: 1223395 - DNA, 25 bp, Homo sapien
cagtgatccgtgttcatgcccctgc

SEQ ID NO: 1223396 - DNA, 25 bp, Homo sapien
tgatccgtgttcatgcccctgcact

SEQ ID NO: 1223397 - DNA, 25 bp, Homo sapien
cgaagctgcagtgatccgtgttcat

SEQ ID NO: 1223398 - DNA, 25 bp, Homo sapien
tgggagcagctccactgtgtcatta

SEQ ID NO: 1223399 - DNA, 25 bp, Homo sapien
tgtgtcattaaaggcccaggctcat

SEQ ID NO: 1223400 - DNA, 25 bp, Homo sapien
tgggaagcgtaatctttcagctggg

SEQ ID NO: 1223401 - DNA, 25 bp, Homo sapien
gctacgtctagctgcaaggaaggct

SEQ ID NO: 1223402 - DNA, 25 bp, Homo sapien
ggctgccttgtcctgaattaggccc

SEQ ID NO: 1223403 - DNA, 25 bp, Homo sapien
tgtcctgaattaggccctcatagct

SEQ ID NO: 1223404 - DNA, 25 bp, Homo sapien
tcatagctgctattcctccccgtca

SEQ ID NO: 1223405 - DNA, 25 bp, Homo sapien
ccttgtcctgaattaggccctcata

SEQ ID NO: 1223406 - DNA, 25 bp, Homo sapien
aatatcatcacagatcagaacgaag

SEQ ID NO: 1223407 - DNA, 25 bp, Homo sapien
atatcatcacagatcagaacgaagg

SEQ ID NO: 1223408 - DNA, 25 bp, Homo sapien
tgttctagcatcacctttttctggt

SEQ ID NO: 1223409 - DNA, 25 bp, Homo sapien
tggctgttctagcatcacctttttc

SEQ ID NO: 1223410 - DNA, 25 bp, Homo sapien
tcttggctgttctagcatcaccttt

SEQ ID NO: 1223411 - DNA, 25 bp, Homo sapien
tctcttggctgttctagcatcacct

SEQ ID NO: 1223412 - DNA, 25 bp, Homo sapien
ccgctgggcaccaggacttgtgctg

SEQ ID NO: 1223413 - DNA, 25 bp, Homo sapien
gggcatctgcatctcaagtctcaga

SEQ ID NO: 1223414 - DNA, 25 bp, Homo sapien
tgcatctcaagtctcagagcggctg

SEQ ID NO: 1223415 - DNA, 25 bp, Homo sapien
catctgcatctcaagtctcagagcg

SEQ ID NO: 1223416 - DNA, 25 bp, Homo sapien
tgcagactgggctcagcccgacatc

SEQ ID NO: 1223417 - DNA, 25 bp, Homo sapien
cccgacatccaacaggcgccaaact

SEQ ID NO: 1223418 - DNA, 25 bp, Homo sapien
ctgcagactgggctcagcccgacat

SEQ ID NO: 1223419 - DNA, 25 bp, Homo sapien
tccaacaggcgccaaactcacagag

SEQ ID NO: 1223420 - DNA, 25 bp, Homo sapien
tttgcatattatccttgctcagggg

SEQ ID NO: 1223421 - DNA, 25 bp, Homo sapien
tgaatttgcatattatccttgctca

SEQ ID NO: 1223422 - DNA, 25 bp, Homo sapien
tgctcaggggccatgttaatccctg

SEQ ID NO: 1223423 - DNA, 25 bp, Homo sapien
aacactttatgaatttgcatattat

SEQ ID NO: 1223424 - DNA, 25 bp, Homo sapien
cggatgactgatcgccgcggagaaa

SEQ ID NO: 1223425 - DNA, 25 bp, Homo sapien
ggcgcaggaagatgccgcgatggga

SEQ ID NO: 1223426 - DNA, 25 bp, Homo sapien
agtggcgcccggatgactgatcgcc

SEQ ID NO: 1223427 - DNA, 25 bp, Homo sapien
agatgccgcgatgggaccgggaaaa

SEQ ID NO: 1223428 - DNA, 25 bp, Homo sapien
gaccacacttggtaggcacttctgc

SEQ ID NO: 1223429 - DNA, 25 bp, Homo sapien
cacgggtaattgtcttggcttcgca

SEQ ID NO: 1223430 - DNA, 25 bp, Homo sapien
gaatcgcggttatctttcccggtgc

SEQ ID NO: 1223431 - DNA, 25 bp, Homo sapien
tgtggccgctagtgtttccttcgct

SEQ ID NO: 1223432 - DNA, 25 bp, Homo sapien
taaacgcaaagaactgccgatcatc

SEQ ID NO: 1223433 - DNA, 25 bp, Homo sapien
gtttgaagaacaacatgtaggacca

SEQ ID NO: 1223434 - DNA, 25 bp, Homo sapien
caggtataatcttgcctagacgcaa

SEQ ID NO: 1223435 - DNA, 25 bp, Homo sapien
ttaagtcctggaacgctgaaagcag

SEQ ID NO: 1223436 - DNA, 25 bp, Homo sapien
tacaccacagcgacctcgttggttc

SEQ ID NO: 1223437 - DNA, 25 bp, Homo sapien
acagcgacctcgttggttcttctca

SEQ ID NO: 1223438 - DNA, 25 bp, Homo sapien
agcaaaggccttgtccagagtctca

SEQ ID NO: 1223439 - DNA, 25 bp, Homo sapien
tgtccagagtctcagacgctctcac

SEQ ID NO: 1223440 - DNA, 25 bp, Homo sapien
aggcgcgtgctaccatgctgggcta

SEQ ID NO: 1223441 - DNA, 25 bp, Homo sapien
tgctgggctaatatttgcattttta

SEQ ID NO: 1223442 - DNA, 25 bp, Homo sapien
tacaggcgcgtgctaccatgctggg

SEQ ID NO: 1223443 - DNA, 25 bp, Homo sapien
gctgggctaatatttgcatttttat

SEQ ID NO: 1223444 - DNA, 25 bp, Homo sapien
atatccctgcaggacataagagcag

SEQ ID NO: 1223445 - DNA, 25 bp, Homo sapien
cctgcaggacataagagcagaggat

SEQ ID NO: 1223446 - DNA, 25 bp, Homo sapien
gcaggtatagttgccttctgatcac

SEQ ID NO: 1223447 - DNA, 25 bp, Homo sapien
gtgacatcactgtgctagcaggtat

SEQ ID NO: 1223448 - DNA, 25 bp, Homo sapien
tcagcttcagttggatggtgggtca

SEQ ID NO: 1223449 - DNA, 25 bp, Homo sapien
tacattatacagtgtaggcagggcc

SEQ ID NO: 1223450 - DNA, 25 bp, Homo sapien
tgtcttaggcattcctgagctcagc

SEQ ID NO: 1223451 - DNA, 25 bp, Homo sapien
ccagaaggtctgtctcagtgaagaa

SEQ ID NO: 1223452 - DNA, 25 bp, Homo sapien
gtccttaagtgccatcaactctcag

SEQ ID NO: 1223453 - DNA, 25 bp, Homo sapien
acagatagaaaccacaccaacagag

SEQ ID NO: 1223454 - DNA, 25 bp, Homo sapien
tgggagttgaaaataggcaccatca

SEQ ID NO: 1223455 - DNA, 25 bp, Homo sapien
aaatggtatccattgcggccaaaga

SEQ ID NO: 1223456 - DNA, 25 bp, Homo sapien
tgaacaaggagagggattttcccaa

SEQ ID NO: 1223457 - DNA, 25 bp, Homo sapien
tgtttgtttgaagtccttgcctgca

SEQ ID NO: 1223458 - DNA, 25 bp, Homo sapien
gagtactgcatccatctttgtctgt

SEQ ID NO: 1223459 - DNA, 25 bp, Homo sapien
tcaggatgcagcctgttatccacct

SEQ ID NO: 1223460 - DNA, 25 bp, Homo sapien
tacattgtcattgcttgtgcaaccg

SEQ ID NO: 1223461 - DNA, 25 bp, Homo sapien
gaatcctagtgagaggcttcacaaa

SEQ ID NO: 1223462 - DNA, 25 bp, Homo sapien
gcacaactttaggatatctcactag

SEQ ID NO: 1223463 - DNA, 25 bp, Homo sapien
tgtgcaaccgatagaaaacagctgt

SEQ ID NO: 1223464 - DNA, 25 bp, Homo sapien
gcatggaccagccatctgcatgtga

SEQ ID NO: 1223465 - DNA, 25 bp, Homo sapien
agttcttttgctgaccctacaggca

SEQ ID NO: 1223466 - DNA, 25 bp, Homo sapien
tgagaatggtcctcgagaaagccca

SEQ ID NO: 1223467 - DNA, 25 bp, Homo sapien
tcacgaggttctagagagaagacat

SEQ ID NO: 1223468 - DNA, 25 bp, Homo sapien
ggtgaggataccaaagaccttttca

SEQ ID NO: 1223469 - DNA, 25 bp, Homo sapien
gctggcctaggtgaggtactgctgt

SEQ ID NO: 1223470 - DNA, 25 bp, Homo sapien
tttttcagtgttgcccttgttactg

SEQ ID NO: 1223471 - DNA, 25 bp, Homo sapien
aagtaatgcaaaatagataaggtga

SEQ ID NO: 1223472 - DNA, 25 bp, Homo sapien
tgcggccgcttcgtgcaaaagctcg

SEQ ID NO: 1223473 - DNA, 25 bp, Homo sapien
gaaatgctacaactgtgcggccgct

SEQ ID NO: 1223474 - DNA, 25 bp, Homo sapien
ttcgggagcccgctctgcgagatgc

SEQ ID NO: 1223475 - DNA, 25 bp, Homo sapien
tcgaagcgggctgtgaccgaaatgc

SEQ ID NO: 1223476 - DNA, 25 bp, Homo sapien
agccgctcgcattgcgccccggcgg

SEQ ID NO: 1223477 - DNA, 25 bp, Homo sapien
ggcagtgacagtccaccaagcctac

SEQ ID NO: 1223478 - DNA, 25 bp, Homo sapien
aagcctacgccagccgctcgcattg

SEQ ID NO: 1223479 - DNA, 25 bp, Homo sapien
ctgccgctttagaccggccagcaga

SEQ ID NO: 1223480 - DNA, 25 bp, Homo sapien
gatttgaacgcgtttcgaggaccgc

SEQ ID NO: 1223481 - DNA, 25 bp, Homo sapien
tgagggaacgattccaggaactcag

SEQ ID NO: 1223482 - DNA, 25 bp, Homo sapien
tatggccataaacaagggtctgggc

SEQ ID NO: 1223483 - DNA, 25 bp, Homo sapien
tagcttaccgctactgaatcaggaa

SEQ ID NO: 1223484 - DNA, 25 bp, Homo sapien
cccttgcttgggtggctccttgtct

SEQ ID NO: 1223485 - DNA, 25 bp, Homo sapien
ccttgcttgggtggctccttgtctt

SEQ ID NO: 1223486 - DNA, 25 bp, Homo sapien
cttgcttgggtggctccttgtcttt

SEQ ID NO: 1223487 - DNA, 25 bp, Homo sapien
ctaaaacaagcataagaaatcacca

SEQ ID NO: 1223488 - DNA, 25 bp, Homo sapien
taaaacaagcataagaaatcaccat

SEQ ID NO: 1223489 - DNA, 25 bp, Homo sapien
ctgtatgtaaaaatgcactacaacc

SEQ ID NO: 1223490 - DNA, 25 bp, Homo sapien
tgtatgtaaaaatgcactacaacca

SEQ ID NO: 1223491 - DNA, 25 bp, Homo sapien
gtatgtaaaaatgcactacaaccat

SEQ ID NO: 1223492 - DNA, 25 bp, Homo sapien
caactgccacaagggccacaacatt

SEQ ID NO: 1223493 - DNA, 25 bp, Homo sapien
tctcctgaatgttcggcaactgcca

SEQ ID NO: 1223494 - DNA, 25 bp, Homo sapien
tgttcggcaactgccacaagggcca

SEQ ID NO: 1223495 - DNA, 25 bp, Homo sapien
tcaaattctcctgaatgttcggcaa

SEQ ID NO: 1223496 - DNA, 25 bp, Homo sapien
ttagtgtgacacttctttggtcttc

SEQ ID NO: 1223497 - DNA, 25 bp, Homo sapien
tgaacacccaagcatggcaggacaa

SEQ ID NO: 1223498 - DNA, 25 bp, Homo sapien
gcatggcaggacaaacccattatac

SEQ ID NO: 1223499 - DNA, 25 bp, Homo sapien
ctttagtgtgacacttctttggtct

SEQ ID NO: 1223500 - DNA, 25 bp, Homo sapien
tacagtaagtattttccatgtgcta

SEQ ID NO: 1223501 - DNA, 25 bp, Homo sapien
tgaatatgctatttggtatcctgct

SEQ ID NO: 1223502 - DNA, 25 bp, Homo sapien
ttagaaagaggaggattactgagtc

SEQ ID NO: 1223503 - DNA, 25 bp, Homo sapien
tatatgcttatgtagatgtcactca

SEQ ID NO: 1223504 - DNA, 25 bp, Homo sapien
taagtagagctagctacctaaggta

SEQ ID NO: 1223505 - DNA, 25 bp, Homo sapien
gagctagctacctaaggtatcttaa

SEQ ID NO: 1223506 - DNA, 25 bp, Homo sapien
tattttgaaataagtagagctagct

SEQ ID NO: 1223507 - DNA, 25 bp, Homo sapien
ccatgcctggtcatgaattttattt

SEQ ID NO: 1223508 - DNA, 25 bp, Homo sapien
tgccaacaaccgatccttataattc

SEQ ID NO: 1223509 - DNA, 25 bp, Homo sapien
aattgccaacaaccgatccttataa

SEQ ID NO: 1223510 - DNA, 25 bp, Homo sapien
caaccgatccttataattctcaata

SEQ ID NO: 1223511 - DNA, 25 bp, Homo sapien
tccaattgccaacaaccgatcctta

SEQ ID NO: 1223512 - DNA, 25 bp, Homo sapien
caaatttagtcttttggctaactgg

SEQ ID NO: 1223513 - DNA, 25 bp, Homo sapien
cttttggctaactggatctgtctga

SEQ ID NO: 1223514 - DNA, 25 bp, Homo sapien
caaatctgggggagaaatctagtcc

SEQ ID NO: 1223515 - DNA, 25 bp, Homo sapien
ggatctgtctgattaggacttgtct

SEQ ID NO: 1223516 - DNA, 25 bp, Homo sapien
ctctatagctattaacataggaaaa

SEQ ID NO: 1223517 - DNA, 25 bp, Homo sapien
gctctatagctattaacataggaaa

SEQ ID NO: 1223518 - DNA, 25 bp, Homo sapien
tctatagctattaacataggaaaat

SEQ ID NO: 1223519 - DNA, 25 bp, Homo sapien
tgctctatagctattaacataggaa

SEQ ID NO: 1223520 - DNA, 25 bp, Homo sapien
gctcttgtaaaaggttgatggtagg

SEQ ID NO: 1223521 - DNA, 25 bp, Homo sapien
aggtcttccagcagagcgtgagtgc

SEQ ID NO: 1223522 - DNA, 25 bp, Homo sapien
aaaggttgatggtaggtcttccagc

SEQ ID NO: 1223523 - DNA, 25 bp, Homo sapien
tccagcagagcgtgagtgcacattt

SEQ ID NO: 1223524 - DNA, 25 bp, Homo sapien
acgcacctgtaatgctagctacttg

SEQ ID NO: 1223525 - DNA, 25 bp, Homo sapien
cttgggatgctgaagcagaagaata

SEQ ID NO: 1223526 - DNA, 25 bp, Homo sapien
tgggatgctgaagcagaagaatagc

SEQ ID NO: 1223527 - DNA, 25 bp, Homo sapien
aatgctagctacttgggatgctgaa

SEQ ID NO: 1223528 - DNA, 25 bp, Homo sapien
tacagatggccgaccatcaaatgca

SEQ ID NO: 1223529 - DNA, 25 bp, Homo sapien
tggccgaccatcaaatgcatgcagc

SEQ ID NO: 1223530 - DNA, 25 bp, Homo sapien
ggctacagatggccgaccatcaaat

SEQ ID NO: 1223531 - DNA, 25 bp, Homo sapien
gatggccgaccatcaaatgcatgca

SEQ ID NO: 1223532 - DNA, 25 bp, Homo sapien
aagaagtacccagctcttactcctt

SEQ ID NO: 1223533 - DNA, 25 bp, Homo sapien
ctgtccacttcttatgatagaaggg

SEQ ID NO: 1223534 - DNA, 25 bp, Homo sapien
gggaattgagaagaagtacccagct

SEQ ID NO: 1223535 - DNA, 25 bp, Homo sapien
cttatgatagaagggggaattgaga

SEQ ID NO: 1223536 - DNA, 25 bp, Homo sapien
tatatgtgaggtagagacctaagat

SEQ ID NO: 1223537 - DNA, 25 bp, Homo sapien
cctgagcctggccttatttggtttt

SEQ ID NO: 1223538 - DNA, 25 bp, Homo sapien
ggttgcttacgattttaatgaccta

SEQ ID NO: 1223539 - DNA, 25 bp, Homo sapien
tgacctatctaagaagccacagcct

SEQ ID NO: 1223540 - DNA, 25 bp, Homo sapien
cactccctattatccttcccctcaa

SEQ ID NO: 1223541 - DNA, 25 bp, Homo sapien
cacaatccagtgttttttgctatat

SEQ ID NO: 1223542 - DNA, 25 bp, Homo sapien
ttaaagctataattcacataaccat

SEQ ID NO: 1223543 - DNA, 25 bp, Homo sapien
ttagctgtcactccctattatcctt

SEQ ID NO: 1223544 - DNA, 25 bp, Homo sapien
agttaaaggcaattgtttcacaagt

SEQ ID NO: 1223545 - DNA, 25 bp, Homo sapien
aagttaaaggcaattgtttcacaag

SEQ ID NO: 1223546 - DNA, 25 bp, Homo sapien
agaagttaaaggcaattgtttcaca

SEQ ID NO: 1223547 - DNA, 25 bp, Homo sapien
gaagttaaaggcaattgtttcacaa

SEQ ID NO: 1223548 - DNA, 25 bp, Homo sapien
taaaacaatggtaaacaatggtgcc

SEQ ID NO: 1223549 - DNA, 25 bp, Homo sapien
tacaattgaagtccctagctcctag

SEQ ID NO: 1223550 - DNA, 25 bp, Homo sapien
taatatatacagaggttcagccagg

SEQ ID NO: 1223551 - DNA, 25 bp, Homo sapien
ctggtaacctgcctgactaatggat

SEQ ID NO: 1223552 - DNA, 25 bp, Homo sapien
ctgggcaatatattctgctgaaata

SEQ ID NO: 1223553 - DNA, 25 bp, Homo sapien
tgggcaatatattctgctgaaatag

SEQ ID NO: 1223554 - DNA, 25 bp, Homo sapien
tataacttcttccactgagatccct

SEQ ID NO: 1223555 - DNA, 25 bp, Homo sapien
acttcttccactgagatccctttca

SEQ ID NO: 1223556 - DNA, 25 bp, Homo sapien
taacttcttccactgagatcccttt

SEQ ID NO: 1223557 - DNA, 25 bp, Homo sapien
ttctataacttcttccactgagatc

SEQ ID NO: 1223558 - DNA, 25 bp, Homo sapien
tttctggagcaagtgtcggagctta

SEQ ID NO: 1223559 - DNA, 25 bp, Homo sapien
tatttctggagcaagtgtcggagct

SEQ ID NO: 1223560 - DNA, 25 bp, Homo sapien
gagcaagtgtcggagcttaggaaac

SEQ ID NO: 1223561 - DNA, 25 bp, Homo sapien
agtgtcggagcttaggaaacagttt

SEQ ID NO: 1223562 - DNA, 25 bp, Homo sapien
tatttctctacaattacaatcttct

SEQ ID NO: 1223563 - DNA, 25 bp, Homo sapien
atttttcaaatgctgccccctgcag

SEQ ID NO: 1223564 - DNA, 25 bp, Homo sapien
accctataaaacagcttcttcagtt

SEQ ID NO: 1223565 - DNA, 25 bp, Homo sapien
cgattttgtaatggatggttttgaa

SEQ ID NO: 1223566 - DNA, 25 bp, Homo sapien
tctatgacaggtactttttccagca

SEQ ID NO: 1223567 - DNA, 25 bp, Homo sapien
cctgccagaactcggctaattgaaa

SEQ ID NO: 1223568 - DNA, 25 bp, Homo sapien
gattgtttaaaccactggcctcata

SEQ ID NO: 1223569 - DNA, 25 bp, Homo sapien
taattgaaaagcagcacaaggctag

SEQ ID NO: 1223570 - DNA, 25 bp, Homo sapien
tattgtttggcgtggaccgcgtgcc

SEQ ID NO: 1223571 - DNA, 25 bp, Homo sapien
gcctgagcatctctattgtttggcg

SEQ ID NO: 1223572 - DNA, 25 bp, Homo sapien
tctctattgtttggcgtggaccgcg

SEQ ID NO: 1223573 - DNA, 25 bp, Homo sapien
cccgcaggtgctattgtctcccatt

SEQ ID NO: 1223574 - DNA, 25 bp, Homo sapien
aggcatgcttggtgatgcgcaaggt

SEQ ID NO: 1223575 - DNA, 25 bp, Homo sapien
tgatgcgcaaggtcacgagtttctt

SEQ ID NO: 1223576 - DNA, 25 bp, Homo sapien
tcctgtgagcaggtgaatggtctcg

SEQ ID NO: 1223577 - DNA, 25 bp, Homo sapien
gctcggctcgcccaatacgtatgga

SEQ ID NO: 1223578 - DNA, 25 bp, Homo sapien
attcacacggcacaagggggacact

SEQ ID NO: 1223579 - DNA, 25 bp, Homo sapien
cctgattcacacggcacaaggggga

SEQ ID NO: 1223580 - DNA, 25 bp, Homo sapien
tgattcacacggcacaagggggaca

SEQ ID NO: 1223581 - DNA, 25 bp, Homo sapien
ctgattcacacggcacaagggggac

SEQ ID NO: 1223582 - DNA, 25 bp, Homo sapien
agaggagtagagggggccccacatg

SEQ ID NO: 1223583 - DNA, 25 bp, Homo sapien
cccacatgaaactcattatcctcag

SEQ ID NO: 1223584 - DNA, 25 bp, Homo sapien
ggtggctcaggaaatccacagggca

SEQ ID NO: 1223585 - DNA, 25 bp, Homo sapien
gtagagggggccccacatgaaactc

SEQ ID NO: 1223586 - DNA, 25 bp, Homo sapien
ccaggccaatgctcgtgattcccaa

SEQ ID NO: 1223587 - DNA, 25 bp, Homo sapien
aatgctcgtgattcccaattcccca

SEQ ID NO: 1223588 - DNA, 25 bp, Homo sapien
ctggcatctgaaagacccaggccaa

SEQ ID NO: 1223589 - DNA, 25 bp, Homo sapien
aagacccaggccaatgctcgtgatt

SEQ ID NO: 1223590 - DNA, 25 bp, Homo sapien
ggaacccagagcttcttggcatttg

SEQ ID NO: 1223591 - DNA, 25 bp, Homo sapien
ttggttgccctctacttccacagga

SEQ ID NO: 1223592 - DNA, 25 bp, Homo sapien
taagaacctagtccatatgccaagc

SEQ ID NO: 1223593 - DNA, 25 bp, Homo sapien
atatgccaagcagagcactgcctgg

SEQ ID NO: 1223594 - DNA, 25 bp, Homo sapien
tcagatagtgataaatgggtaagag

SEQ ID NO: 1223595 - DNA, 25 bp, Homo sapien
tatcagtgctgaatatttcgctatc

SEQ ID NO: 1223596 - DNA, 25 bp, Homo sapien
cactgtaatctcagcgtgggctttt

SEQ ID NO: 1223597 - DNA, 25 bp, Homo sapien
gagtcagctgttggtccaattgtcc

SEQ ID NO: 1223598 - DNA, 25 bp, Homo sapien
aaatcctgactgctattgtttgagc

SEQ ID NO: 1223599 - DNA, 25 bp, Homo sapien
tgccacagtttacgagcctcagagg

SEQ ID NO: 1223600 - DNA, 25 bp, Homo sapien
tgtggaatgccaagtcagagagatt

SEQ ID NO: 1223601 - DNA, 25 bp, Homo sapien
tactactgggagcatcgtttggctg

SEQ ID NO: 1223602 - DNA, 25 bp, Homo sapien
gagtgatgtagctgtccctgaacaa

SEQ ID NO: 1223603 - DNA, 25 bp, Homo sapien
gcaatccgcgctaccgcgtgaacag

SEQ ID NO: 1223604 - DNA, 25 bp, Homo sapien
gctaccgcgtgaacagatgaaggtc

SEQ ID NO: 1223605 - DNA, 25 bp, Homo sapien
ccgcgtgaacagatgaaggtctcct

SEQ ID NO: 1223606 - DNA, 25 bp, Homo sapien
cgcgctaccgcgtgaacagatgaag

SEQ ID NO: 1223607 - DNA, 25 bp, Homo sapien
cgcgcccctcggcaacgggaggtat

SEQ ID NO: 1223608 - DNA, 25 bp, Homo sapien
aagatcaggagcaccacgaagcgcc

SEQ ID NO: 1223609 - DNA, 25 bp, Homo sapien
cattcaccgggaaggtgcccgcttt

SEQ ID NO: 1223610 - DNA, 25 bp, Homo sapien
tatcctttcgcgagcgggtgtccgg

SEQ ID NO: 1223611 - DNA, 25 bp, Homo sapien
cgtagaagccctcgaagacgttgct

SEQ ID NO: 1223612 - DNA, 25 bp, Homo sapien
gatgtgcagcaaggtgacaccgtag

SEQ ID NO: 1223613 - DNA, 25 bp, Homo sapien
gcacgtaggccagcatgtacaccat

SEQ ID NO: 1223614 - DNA, 25 bp, Homo sapien
tgaaaggcgttgaccagcgagtaca

SEQ ID NO: 1223615 - DNA, 25 bp, Homo sapien
aggccatagttctcacggcctatga

SEQ ID NO: 1223616 - DNA, 25 bp, Homo sapien
cacggcctatgactttttccggtct

SEQ ID NO: 1223617 - DNA, 25 bp, Homo sapien
ctcacggcctatgactttttccggt

SEQ ID NO: 1223618 - DNA, 25 bp, Homo sapien
gccatagttctcacggcctatgact

SEQ ID NO: 1223619 - DNA, 25 bp, Homo sapien
caagccaggagatttgtgtcattct

SEQ ID NO: 1223620 - DNA, 25 bp, Homo sapien
tctgtgtgttgggtactaaaactgg

SEQ ID NO: 1223621 - DNA, 25 bp, Homo sapien
aactggtggtagcaaaaagccaact

SEQ ID NO: 1223622 - DNA, 25 bp, Homo sapien
tggtagcaaaaagccaactgcagtt

SEQ ID NO: 1223623 - DNA, 25 bp, Homo sapien
ataaataaaagtgtggcaacagctg

SEQ ID NO: 1223624 - DNA, 25 bp, Homo sapien
ataaaagtgtggcaacagctgatgt

SEQ ID NO: 1223625 - DNA, 25 bp, Homo sapien
taaataaaagtgtggcaacagctga

SEQ ID NO: 1223626 - DNA, 25 bp, Homo sapien
aaagtgtggcaacagctgatgttcc

SEQ ID NO: 1223627 - DNA, 25 bp, Homo sapien
tgcccaggaccattcactagtcaac

SEQ ID NO: 1223628 - DNA, 25 bp, Homo sapien
gcccaggaccattcactagtcaaca

SEQ ID NO: 1223629 - DNA, 25 bp, Homo sapien
ctgcccaggaccattcactagtcaa

SEQ ID NO: 1223630 - DNA, 25 bp, Homo sapien
cccaggaccattcactagtcaacat

SEQ ID NO: 1223631 - DNA, 25 bp, Homo sapien
gatagttgccacagtttgaaattct

SEQ ID NO: 1223632 - DNA, 25 bp, Homo sapien
gttgccacagtttgaaattctgctg

SEQ ID NO: 1223633 - DNA, 25 bp, Homo sapien
caagtagatagttgccacagtttga

SEQ ID NO: 1223634 - DNA, 25 bp, Homo sapien
ctaacaagtagatagttgccacagt

SEQ ID NO: 1223635 - DNA, 25 bp, Homo sapien
tccaaactgatgatggctgcttgca

SEQ ID NO: 1223636 - DNA, 25 bp, Homo sapien
gctgcttgcagttgattttgactga

SEQ ID NO: 1223637 - DNA, 25 bp, Homo sapien
gagacaggctcagacgagaggactc

SEQ ID NO: 1223638 - DNA, 25 bp, Homo sapien
cagtgacgagtggtggcagccgtgc

SEQ ID NO: 1223639 - DNA, 25 bp, Homo sapien
aatttcgttatttgtccctgtgtga

SEQ ID NO: 1223640 - DNA, 25 bp, Homo sapien
gaatacgttgcaaatctattgctgt

SEQ ID NO: 1223641 - DNA, 25 bp, Homo sapien
tctgttaagagtatgcagccgggcc

SEQ ID NO: 1223642 - DNA, 25 bp, Homo sapien
ctcagctcactgtatgactttgagg

SEQ ID NO: 1223643 - DNA, 25 bp, Homo sapien
aatacaagagttatctgttagtttc

SEQ ID NO: 1223644 - DNA, 25 bp, Homo sapien
tgaatacaagagttatctgttagtt

SEQ ID NO: 1223645 - DNA, 25 bp, Homo sapien
gaatacaagagttatctgttagttt

SEQ ID NO: 1223646 - DNA, 25 bp, Homo sapien
tgctgtgagccaaggtcgcaccacc

SEQ ID NO: 1223647 - DNA, 25 bp, Homo sapien
aaactgtgtctcaaaaatgaaaaga

SEQ ID NO: 1223648 - DNA, 25 bp, Homo sapien
ggcaccttaatcccagctaggaggc

SEQ ID NO: 1223649 - DNA, 25 bp, Homo sapien
agccaggggtggtgggcaccttaat

SEQ ID NO: 1223650 - DNA, 25 bp, Homo sapien
tctacccaaggctcaatgaatcaga

SEQ ID NO: 1223651 - DNA, 25 bp, Homo sapien
cagattttgagattctacccaaggc

SEQ ID NO: 1223652 - DNA, 25 bp, Homo sapien
ttagatctgatggacctagcaactg

SEQ ID NO: 1223653 - DNA, 25 bp, Homo sapien
tttgaaagagggttagatctgatgg

SEQ ID NO: 1223654 - DNA, 25 bp, Homo sapien
ttattgatttcttataggagtactc

SEQ ID NO: 1223655 - DNA, 25 bp, Homo sapien
cataagtgatcaacagaaggacaaa

SEQ ID NO: 1223656 - DNA, 25 bp, Homo sapien
tttcttataggagtactcttcaggg

SEQ ID NO: 1223657 - DNA, 25 bp, Homo sapien
cctgacttggtggataccgaggttt

SEQ ID NO: 1223658 - DNA, 25 bp, Homo sapien
gatttaataacgttgagactgaata

SEQ ID NO: 1223659 - DNA, 25 bp, Homo sapien
gaataaaaggcaccagtcatgatac

SEQ ID NO: 1223660 - DNA, 25 bp, Homo sapien
ctgaataaaaggcaccagtcatgat

SEQ ID NO: 1223661 - DNA, 25 bp, Homo sapien
atttgatttaataacgttgagactg

SEQ ID NO: 1223662 - DNA, 25 bp, Homo sapien
aatccttccagcattgacttcttct

SEQ ID NO: 1223663 - DNA, 25 bp, Homo sapien
tccagctactactagcgttagccca

SEQ ID NO: 1223664 - DNA, 25 bp, Homo sapien
tactactagcgttagcccaatcctt

SEQ ID NO: 1223665 - DNA, 25 bp, Homo sapien
atccttccagcattgacttcttctc

SEQ ID NO: 1223666 - DNA, 25 bp, Homo sapien
taatccagccataagccacaaagaa

SEQ ID NO: 1223667 - DNA, 25 bp, Homo sapien
ccagccataagccacaaagaataga

SEQ ID NO: 1223668 - DNA, 25 bp, Homo sapien
gtatgttttagtataatccagccat

SEQ ID NO: 1223669 - DNA, 25 bp, Homo sapien
atgttttagtataatccagccataa

SEQ ID NO: 1223670 - DNA, 25 bp, Homo sapien
agtgtttagaatccgtatctttaag

SEQ ID NO: 1223671 - DNA, 25 bp, Homo sapien
tgttaagtgaagagaacctactagt

SEQ ID NO: 1223672 - DNA, 25 bp, Homo sapien
tcaaaatacctttggttatacacca

SEQ ID NO: 1223673 - DNA, 25 bp, Homo sapien
tacctttggttatacaccatacatg

SEQ ID NO: 1223674 - DNA, 25 bp, Homo sapien
tcagaaatggctctttttagaatag

SEQ ID NO: 1223675 - DNA, 25 bp, Homo sapien
cagaaatggctctttttagaataga

SEQ ID NO: 1223676 - DNA, 25 bp, Homo sapien
ttgtatttaagcccacaacataaaa

SEQ ID NO: 1223677 - DNA, 25 bp, Homo sapien
ttttgtatttaagcccacaacataa

SEQ ID NO: 1223678 - DNA, 25 bp, Homo sapien
tttgtatttaagcccacaacataaa

SEQ ID NO: 1223679 - DNA, 25 bp, Homo sapien
tgtatttaagcccacaacataaaaa

SEQ ID NO: 1223680 - DNA, 25 bp, Homo sapien
gagaccagtggcacgctatctcagc

SEQ ID NO: 1223681 - DNA, 25 bp, Homo sapien
gccttgaaaggtacacgggacacag

SEQ ID NO: 1223682 - DNA, 25 bp, Homo sapien
taagaaagatgcacacaacaggagt

SEQ ID NO: 1223683 - DNA, 25 bp, Homo sapien
gaacagggatcacataatgccagcc

SEQ ID NO: 1223684 - DNA, 25 bp, Homo sapien
aaatataaactatcagagtagtctg

SEQ ID NO: 1223685 - DNA, 25 bp, Homo sapien
aatataaactatcagagtagtctgt

SEQ ID NO: 1223686 - DNA, 25 bp, Homo sapien
cacgatgataatatatctaaggtcc

SEQ ID NO: 1223687 - DNA, 25 bp, Homo sapien
ccaagcacccctccagtaacaaaca

SEQ ID NO: 1223688 - DNA, 25 bp, Homo sapien
aacacgatgataatatatctaaggt

SEQ ID NO: 1223689 - DNA, 25 bp, Homo sapien
cgatgataatatatctaaggtccaa

SEQ ID NO: 1223690 - DNA, 25 bp, Homo sapien
tcgggcttattctaatgaccaaata

SEQ ID NO: 1223691 - DNA, 25 bp, Homo sapien
tctaatgaccaaataagtgaatatt

SEQ ID NO: 1223692 - DNA, 25 bp, Homo sapien
gaatattttgaagttgctatgtcaa

SEQ ID NO: 1223693 - DNA, 25 bp, Homo sapien
ctgcctctcgggcttattctaatga

SEQ ID NO: 1223694 - DNA, 25 bp, Homo sapien
attcagggtaagtgatttcaacagc

SEQ ID NO: 1223695 - DNA, 25 bp, Homo sapien
ctgtgcagaagcattaagaagacca

SEQ ID NO: 1223696 - DNA, 25 bp, Homo sapien
gattcagggtaagtgatttcaacag

SEQ ID NO: 1223697 - DNA, 25 bp, Homo sapien
gaagaccagatgaagtaccttcaga

SEQ ID NO: 1223698 - DNA, 25 bp, Homo sapien
tactcactagaatatctggtataat

SEQ ID NO: 1223699 - DNA, 25 bp, Homo sapien
tcaggtttagagaaatcagaggttt

SEQ ID NO: 1223700 - DNA, 25 bp, Homo sapien
aataatcatctcaggtttagagaaa

SEQ ID NO: 1223701 - DNA, 25 bp, Homo sapien
aaaaccatggtcaaactcattactc

SEQ ID NO: 1223702 - DNA, 25 bp, Homo sapien
tagtctgatgtgagctttccttgag

SEQ ID NO: 1223703 - DNA, 25 bp, Homo sapien
gccttaggaccatagtctgatgtga

SEQ ID NO: 1223704 - DNA, 25 bp, Homo sapien
gagctttccttgagccaatgtgaac

SEQ ID NO: 1223705 - DNA, 25 bp, Homo sapien
gagaaaaatgttccctgccttagga

SEQ ID NO: 1223706 - DNA, 25 bp, Homo sapien
gatatttcttgttccaatgtggtcc

SEQ ID NO: 1223707 - DNA, 25 bp, Homo sapien
taagcactagctaaggattccacat

SEQ ID NO: 1223708 - DNA, 25 bp, Homo sapien
aactatggataaaaattctctgaca

SEQ ID NO: 1223709 - DNA, 25 bp, Homo sapien
tctggagattgagcactattttctt

SEQ ID NO: 1223710 - DNA, 25 bp, Homo sapien
atttatgttgtgtcttcgcagatca

SEQ ID NO: 1223711 - DNA, 25 bp, Homo sapien
cttcgcagatcagacttgattaatg

SEQ ID NO: 1223712 - DNA, 25 bp, Homo sapien
aacatttgtaattcctatatttatg

SEQ ID NO: 1223713 - DNA, 25 bp, Homo sapien
ttgtgtcttcgcagatcagacttga

SEQ ID NO: 1223714 - DNA, 25 bp, Homo sapien
tcttggtctgtgggactgtcagctg

SEQ ID NO: 1223715 - DNA, 25 bp, Homo sapien
cagccttggtgctcacatctctctc

SEQ ID NO: 1223716 - DNA, 25 bp, Homo sapien
ccaaggatgatcacattgtccccaa

SEQ ID NO: 1223717 - DNA, 25 bp, Homo sapien
aggatgatcacattgtccccaatta

SEQ ID NO: 1223718 - DNA, 25 bp, Homo sapien
ctctccaaggatgatcacattgtcc

SEQ ID NO: 1223719 - DNA, 25 bp, Homo sapien
tgaagaaaagaatccactctcccgg

SEQ ID NO: 1223720 - DNA, 25 bp, Homo sapien
cacactgatagagcatgtacctggg

SEQ ID NO: 1223721 - DNA, 25 bp, Homo sapien
caaatagcattcaagaggtctccac

SEQ ID NO: 1223722 - DNA, 25 bp, Homo sapien
tttatccatgatagaaaggcagcac

SEQ ID NO: 1223723 - DNA, 25 bp, Homo sapien
tgagtaatgacttaagacacaggca

SEQ ID NO: 1223724 - DNA, 25 bp, Homo sapien
tgtagcccagaagcgacagactttg

SEQ ID NO: 1223725 - DNA, 25 bp, Homo sapien
tctttagataacacattccccaggg

SEQ ID NO: 1223726 - DNA, 25 bp, Homo sapien
ttcatggatgaggaaaacgctgccc

SEQ ID NO: 1223727 - DNA, 25 bp, Homo sapien
cgtatctccggtgaaaggtcataaa

SEQ ID NO: 1223728 - DNA, 25 bp, Homo sapien
tagggacccaaaaatatcgtatctc

SEQ ID NO: 1223729 - DNA, 25 bp, Homo sapien
agatgagatattccctcttggtagt

SEQ ID NO: 1223730 - DNA, 25 bp, Homo sapien
tagtctggtgtgctttgaaaccttc

SEQ ID NO: 1223731 - DNA, 25 bp, Homo sapien
aataaatacagttatcagactgtat

SEQ ID NO: 1223732 - DNA, 25 bp, Homo sapien
agcacagcccaagggcgcccaaggg

SEQ ID NO: 1223733 - DNA, 25 bp, Homo sapien
caagggcgcccaagggattccacaa

SEQ ID NO: 1223734 - DNA, 25 bp, Homo sapien
tccacaaaggagcagcctttggtga

SEQ ID NO: 1223735 - DNA, 25 bp, Homo sapien
aatggagaaagcatgcgggtgtggc

SEQ ID NO: 1223736 - DNA, 25 bp, Homo sapien
gtgtccaaatcctgttgccccacgt

SEQ ID NO: 1223737 - DNA, 25 bp, Homo sapien
taacaccgtgtccaaatcctgttgc

SEQ ID NO: 1223738 - DNA, 25 bp, Homo sapien
tgttgccccacgtgcatctgctgtt

SEQ ID NO: 1223739 - DNA, 25 bp, Homo sapien
ctggctccgaggctaacaccgtgtc

SEQ ID NO: 1223740 - DNA, 25 bp, Homo sapien
cagtcagctcagacagtgcaggaag

SEQ ID NO: 1223741 - DNA, 25 bp, Homo sapien
ttgggaacagtcagctcagacagtg

SEQ ID NO: 1223742 - DNA, 25 bp, Homo sapien
gtcctttgggaacagtcagctcaga

SEQ ID NO: 1223743 - DNA, 25 bp, Homo sapien
gaacagtcagctcagacagtgcagg

SEQ ID NO: 1223744 - DNA, 25 bp, Homo sapien
ctgcaaaagacctctcttgagggtc

SEQ ID NO: 1223745 - DNA, 25 bp, Homo sapien
taatccaggcaatcgtgtctcaggc

SEQ ID NO: 1223746 - DNA, 25 bp, Homo sapien
acaggccccggctccatggagtaat

SEQ ID NO: 1223747 - DNA, 25 bp, Homo sapien
agggcagctgcccaacaggttggct

SEQ ID NO: 1223748 - DNA, 25 bp, Homo sapien
gaggtgggcacagaaaggggggcac

SEQ ID NO: 1223749 - DNA, 25 bp, Homo sapien
aggccccaaagatgaggtgggcaca

SEQ ID NO: 1223750 - DNA, 25 bp, Homo sapien
ccaaagatgaggtgggcacagaaag

SEQ ID NO: 1223751 - DNA, 25 bp, Homo sapien
tgtgaggccccaaagatgaggtggg

SEQ ID NO: 1223752 - DNA, 25 bp, Homo sapien
gttctttccgggtatctgactcagg

SEQ ID NO: 1223753 - DNA, 25 bp, Homo sapien
tcatcataaccagaagcccggagtg

SEQ ID NO: 1223754 - DNA, 25 bp, Homo sapien
cacaaaatcgtcatcagagagcctg

SEQ ID NO: 1223755 - DNA, 25 bp, Homo sapien
cagtttgggaatcaccagtctggct

SEQ ID NO: 1223756 - DNA, 25 bp, Homo sapien
tggtagaggaaccttccagggagga

SEQ ID NO: 1223757 - DNA, 25 bp, Homo sapien
tcattgtttggccatggaggcctct

SEQ ID NO: 1223758 - DNA, 25 bp, Homo sapien
cctagggatttagcaataagggatg

SEQ ID NO: 1223759 - DNA, 25 bp, Homo sapien
ggcctctggtggcaaggttccctag

SEQ ID NO: 1223760 - DNA, 25 bp, Homo sapien
gtgcctggccttcctaggaaagcag

SEQ ID NO: 1223761 - DNA, 25 bp, Homo sapien
ggccttcctaggaaagcagccatcc

SEQ ID NO: 1223762 - DNA, 25 bp, Homo sapien
ctgctgtcacctttttaacagtgca

SEQ ID NO: 1223763 - DNA, 25 bp, Homo sapien
ctttttaacagtgcagccgcaggct

SEQ ID NO: 1223764 - DNA, 25 bp, Homo sapien
gcagagctcttacagccaatgccat

SEQ ID NO: 1223765 - DNA, 25 bp, Homo sapien
gggctgcagagctcttacagccaat

SEQ ID NO: 1223766 - DNA, 25 bp, Homo sapien
ggctacatccttagggggctgcaga

SEQ ID NO: 1223767 - DNA, 25 bp, Homo sapien
tggttcttctatggacacatctgaa

SEQ ID NO: 1223768 - DNA, 25 bp, Homo sapien
ggcctatgatcatcctgatgaggga

SEQ ID NO: 1223769 - DNA, 25 bp, Homo sapien
gatgaaagttcagcccatgtgttcg

SEQ ID NO: 1223770 - DNA, 25 bp, Homo sapien
cactgcactgaactagtgaactgac

SEQ ID NO: 1223771 - DNA, 25 bp, Homo sapien
tgatgagggatgttaccactgcact

SEQ ID NO: 1223772 - DNA, 25 bp, Homo sapien
gcagccgccgatgttccgaatgcgt

SEQ ID NO: 1223773 - DNA, 25 bp, Homo sapien
gtctattggccaccgcaacaaagag

SEQ ID NO: 1223774 - DNA, 25 bp, Homo sapien
aatccgatcgctgtggtgtcctgag

SEQ ID NO: 1223775 - DNA, 25 bp, Homo sapien
tttggccatgggacttaagatcgag

SEQ ID NO: 1223776 - DNA, 25 bp, Homo sapien
gggccgtcgcctcattccatgtccc

SEQ ID NO: 1223777 - DNA, 25 bp, Homo sapien
tggggccgtcgcctcattccatgtc

SEQ ID NO: 1223778 - DNA, 25 bp, Homo sapien
ggggccgtcgcctcattccatgtcc

SEQ ID NO: 1223779 - DNA, 25 bp, Homo sapien
ctcgggacggttggcttcatggctg

SEQ ID NO: 1223780 - DNA, 25 bp, Homo sapien
gggtcccggagtgtctccacgacac

SEQ ID NO: 1223781 - DNA, 25 bp, Homo sapien
ctaagtggacgcacagcggaaccga

SEQ ID NO: 1223782 - DNA, 25 bp, Homo sapien
ctgagaatcgatgacgggcttccag

SEQ ID NO: 1223783 - DNA, 25 bp, Homo sapien
gagaatcgatgacgggcttccagcc

SEQ ID NO: 1223784 - DNA, 25 bp, Homo sapien
tgaaatcagcggagacacagctgac

SEQ ID NO: 1223785 - DNA, 25 bp, Homo sapien
ctgaaatcagcggagacacagctga

SEQ ID NO: 1223786 - DNA, 25 bp, Homo sapien
caagggggagcggcggcgggagctc

SEQ ID NO: 1223787 - DNA, 25 bp, Homo sapien
gagcgaggtactgggggcgcgcggc

SEQ ID NO: 1223788 - DNA, 25 bp, Homo sapien
ggggagcgaggtactgggggcgcgc

SEQ ID NO: 1223789 - DNA, 25 bp, Homo sapien
gcggcgaggggatcagcgccccgcg

SEQ ID NO: 1223790 - DNA, 25 bp, Homo sapien
ggcgcggcgaggggatcagcgcccc

SEQ ID NO: 1223791 - DNA, 25 bp, Homo sapien
gcagcggtgagtgtcggccgcggag

SEQ ID NO: 1223792 - DNA, 25 bp, Homo sapien
agcggtgagtgtcggccgcggagcc

SEQ ID NO: 1223793 - DNA, 25 bp, Homo sapien
gggggcagcggtgagtgtcggccgc

SEQ ID NO: 1223794 - DNA, 25 bp, Homo sapien
gggcagcggtgagtgtcggccgcgg

SEQ ID NO: 1223795 - DNA, 25 bp, Homo sapien
gcgtggctgctccgggaccgggtgc

SEQ ID NO: 1223796 - DNA, 25 bp, Homo sapien
cgcgtggctgctccgggaccgggtg

SEQ ID NO: 1223797 - DNA, 25 bp, Homo sapien
cgcgcgtggctgctccgggaccggg

SEQ ID NO: 1223798 - DNA, 25 bp, Homo sapien
gcgcgtggctgctccgggaccgggt

SEQ ID NO: 1223799 - DNA, 25 bp, Homo sapien
cccgctggtggcgaggctcacgggc

SEQ ID NO: 1223800 - DNA, 25 bp, Homo sapien
ggtgcaccttggccacgtgcatcca

SEQ ID NO: 1223801 - DNA, 25 bp, Homo sapien
ggaagccgctcttgttgacgtggaa

SEQ ID NO: 1223802 - DNA, 25 bp, Homo sapien
gtgcatccacatgcgctcccaggtg

SEQ ID NO: 1223803 - DNA, 25 bp, Homo sapien
aaggcggcgttcctgatggcgccca

SEQ ID NO: 1223804 - DNA, 25 bp, Homo sapien
ctttgccaagaaggcggcgttcctg

SEQ ID NO: 1223805 - DNA, 25 bp, Homo sapien
ccaagaaggcggcgttcctgatggc

SEQ ID NO: 1223806 - DNA, 25 bp, Homo sapien
agaaggcggcgttcctgatggcgcc

SEQ ID NO: 1223807 - DNA, 25 bp, Homo sapien
ccccaactccgccctggaagccact

SEQ ID NO: 1223808 - DNA, 25 bp, Homo sapien
caactccgccctggaagccactgac

SEQ ID NO: 1223809 - DNA, 25 bp, Homo sapien
ccaactccgccctggaagccactga

SEQ ID NO: 1223810 - DNA, 25 bp, Homo sapien
cagccccccaactccgccctggaag

SEQ ID NO: 1223811 - DNA, 25 bp, Homo sapien
agcagaggaggagcaagacactcca

SEQ ID NO: 1223812 - DNA, 25 bp, Homo sapien
gaggagcaagacactccaaagagaa

SEQ ID NO: 1223813 - DNA, 25 bp, Homo sapien
taataaatcatttgctgggggaaga

SEQ ID NO: 1223814 - DNA, 25 bp, Homo sapien
tgtgcattctttggcatcgctggta

SEQ ID NO: 1223815 - DNA, 25 bp, Homo sapien
catcatgtgtactggaaagtccctt

SEQ ID NO: 1223816 - DNA, 25 bp, Homo sapien
cctccctcggtaaagatatccttag

SEQ ID NO: 1223817 - DNA, 25 bp, Homo sapien
ggaatcttctcagccgtaccagcgt

SEQ ID NO: 1223818 - DNA, 25 bp, Homo sapien
tataacgtatctactcccaccaggg

SEQ ID NO: 1223819 - DNA, 25 bp, Homo sapien
ctctggccaggcctaagatcagctg

SEQ ID NO: 1223820 - DNA, 25 bp, Homo sapien
ggaagttgacaatgctctgccctga

SEQ ID NO: 1223821 - DNA, 25 bp, Homo sapien
gagcactctctcataacattcaagg

SEQ ID NO: 1223822 - DNA, 25 bp, Homo sapien
gagcttcctaacaatcgactctggc

SEQ ID NO: 1223823 - DNA, 25 bp, Homo sapien
gacagacagacggaaggttctcaat

SEQ ID NO: 1223824 - DNA, 25 bp, Homo sapien
tgaagctcggtcctctaaatgtgaa

SEQ ID NO: 1223825 - DNA, 25 bp, Homo sapien
gtctctagtaccaaacactcccgtg

SEQ ID NO: 1223826 - DNA, 25 bp, Homo sapien
gcagccaggaacctgtgaagggcct

SEQ ID NO: 1223827 - DNA, 25 bp, Homo sapien
tctgttcttgtgaagcacaactgac

SEQ ID NO: 1223828 - DNA, 25 bp, Homo sapien
tccactctgttcttgtgaagcacaa

SEQ ID NO: 1223829 - DNA, 25 bp, Homo sapien
ccactctgttcttgtgaagcacaac

SEQ ID NO: 1223830 - DNA, 25 bp, Homo sapien
actctgttcttgtgaagcacaactg

SEQ ID NO: 1223831 - DNA, 25 bp, Homo sapien
agggggcaggaggagggagtggagt

SEQ ID NO: 1223832 - DNA, 25 bp, Homo sapien
ctagggggcaggaggagggagtgga

SEQ ID NO: 1223833 - DNA, 25 bp, Homo sapien
gggcaggaggagggagtggagtgga

SEQ ID NO: 1223834 - DNA, 25 bp, Homo sapien
ggcaggaggagggagtggagtggac

SEQ ID NO: 1223835 - DNA, 25 bp, Homo sapien
cacacaggcactgtgcctgttttct

SEQ ID NO: 1223836 - DNA, 25 bp, Homo sapien
ctgtgcctgttttctaggggtgggg

SEQ ID NO: 1223837 - DNA, 25 bp, Homo sapien
ttcacacaggcactgtgcctgtttt

SEQ ID NO: 1223838 - DNA, 25 bp, Homo sapien
caggcactgtgcctgttttctaggg

SEQ ID NO: 1223839 - DNA, 25 bp, Homo sapien
gaaggcacaatctagaggaaacaga

SEQ ID NO: 1223840 - DNA, 25 bp, Homo sapien
ctagaggaaacagatcgaaaccaac

SEQ ID NO: 1223841 - DNA, 25 bp, Homo sapien
aatctagaggaaacagatcgaaacc

SEQ ID NO: 1223842 - DNA, 25 bp, Homo sapien
ggcacaatctagaggaaacagatcg

SEQ ID NO: 1223843 - DNA, 25 bp, Homo sapien
taaggatgctctcctacaggatcga

SEQ ID NO: 1223844 - DNA, 25 bp, Homo sapien
caggatcgaggcaaacataaattgg

SEQ ID NO: 1223845 - DNA, 25 bp, Homo sapien
cttttcaagaaaagcccagggcata

SEQ ID NO: 1223846 - DNA, 25 bp, Homo sapien
tacagatacccaatgctggtaagga

SEQ ID NO: 1223847 - DNA, 25 bp, Homo sapien
ggctgttcgaggctctctccctgac

SEQ ID NO: 1223848 - DNA, 25 bp, Homo sapien
ggcagacactgcctaaggctgttcg

SEQ ID NO: 1223849 - DNA, 25 bp, Homo sapien
ccgcctgggcatcggggtctttcca

SEQ ID NO: 1223850 - DNA, 25 bp, Homo sapien
tgcctaaggctgttcgaggctctct

SEQ ID NO: 1223851 - DNA, 25 bp, Homo sapien
tgctccgctgatggaaggggactcc

SEQ ID NO: 1223852 - DNA, 25 bp, Homo sapien
cctgaggacaggtgaggcccatcct

SEQ ID NO: 1223853 - DNA, 25 bp, Homo sapien
tccgctgatggaaggggactccgct

SEQ ID NO: 1223854 - DNA, 25 bp, Homo sapien
agccctggggatctggtgctccgct

SEQ ID NO: 1223855 - DNA, 25 bp, Homo sapien
gacgaagtcctaatccctgccagga

SEQ ID NO: 1223856 - DNA, 25 bp, Homo sapien
taagatatccactcggctctgagca

SEQ ID NO: 1223857 - DNA, 25 bp, Homo sapien
gacagggacgtccaatcaagtcgct

SEQ ID NO: 1223858 - DNA, 25 bp, Homo sapien
tcaagtcgctgctgaaaagccaggc

SEQ ID NO: 1223859 - DNA, 25 bp, Homo sapien
tcatgtaattctggatcgcctggag

SEQ ID NO: 1223860 - DNA, 25 bp, Homo sapien
ccagtctgggatcgtcatcgacagc

SEQ ID NO: 1223861 - DNA, 25 bp, Homo sapien
tgtaattctggatcgcctggagcca

SEQ ID NO: 1223862 - DNA, 25 bp, Homo sapien
catcgacagcctgtagtttgggacc

SEQ ID NO: 1223863 - DNA, 25 bp, Homo sapien
gacagatttgccaccaggcttgcga

SEQ ID NO: 1223864 - DNA, 25 bp, Homo sapien
ggacagatttgccaccaggcttgcg

SEQ ID NO: 1223865 - DNA, 25 bp, Homo sapien
tggggacagatttgccaccaggctt

SEQ ID NO: 1223866 - DNA, 25 bp, Homo sapien
gggacagatttgccaccaggcttgc

SEQ ID NO: 1223867 - DNA, 25 bp, Homo sapien
ccactcagcggtctcattttcctaa

SEQ ID NO: 1223868 - DNA, 25 bp, Homo sapien
cactcagcggtctcattttcctaat

SEQ ID NO: 1223869 - DNA, 25 bp, Homo sapien
cgggaatagaggttgggagaggaag

SEQ ID NO: 1223870 - DNA, 25 bp, Homo sapien
ctgagccatgggctacgggaataga

SEQ ID NO: 1223871 - DNA, 25 bp, Homo sapien
gagaggtcatctggcccatagatca

SEQ ID NO: 1223872 - DNA, 25 bp, Homo sapien
agctggcagctcgaatgtaggagag

SEQ ID NO: 1223873 - DNA, 25 bp, Homo sapien
aggactctcgggtcatttcttttgc

SEQ ID NO: 1223874 - DNA, 25 bp, Homo sapien
gcttcaaggcatttgataggcaagg

SEQ ID NO: 1223875 - DNA, 25 bp, Homo sapien
taggcaaggactctcgggtcatttc

SEQ ID NO: 1223876 - DNA, 25 bp, Homo sapien
gcatttgataggcaaggactctcgg

SEQ ID NO: 1223877 - DNA, 25 bp, Homo sapien
ccaaaaggtcgtgggtgattccagt

SEQ ID NO: 1223878 - DNA, 25 bp, Homo sapien
catctaagcagtcccctagtggtgg

SEQ ID NO: 1223879 - DNA, 25 bp, Homo sapien
gaagttagcttgtctaccccatgaa

SEQ ID NO: 1223880 - DNA, 25 bp, Homo sapien
tcatgtaacagctcccaacgggctt

SEQ ID NO: 1223881 - DNA, 25 bp, Homo sapien
attccactcatctgcggtacctgga

SEQ ID NO: 1223882 - DNA, 25 bp, Homo sapien
agtagcaagtgcatacagacagaga

SEQ ID NO: 1223883 - DNA, 25 bp, Homo sapien
tgagtgaaatcagcctaatacaaaa

SEQ ID NO: 1223884 - DNA, 25 bp, Homo sapien
tttattcagcctcataagggaggga

SEQ ID NO: 1223885 - DNA, 25 bp, Homo sapien
aagagaaggatgctgacagaatcca

SEQ ID NO: 1223886 - DNA, 25 bp, Homo sapien
tcggtgccagagctaatccaagtgc

SEQ ID NO: 1223887 - DNA, 25 bp, Homo sapien
ggtttaatcacggatgcctccactc

SEQ ID NO: 1223888 - DNA, 25 bp, Homo sapien
tgacagaatccatccacagcactgg

SEQ ID NO: 1223889 - DNA, 25 bp, Homo sapien
gggaaccgctcaatggaaggctgcc

SEQ ID NO: 1223890 - DNA, 25 bp, Homo sapien
aaatccccagcacaacgtggtgaaa

SEQ ID NO: 1223891 - DNA, 25 bp, Homo sapien
agcggccattgcagtaaatccccag

SEQ ID NO: 1223892 - DNA, 25 bp, Homo sapien
ggtgaaagtagtttcctgagaagta

SEQ ID NO: 1223893 - DNA, 25 bp, Homo sapien
cagcatctttgagacgttgaggacc

SEQ ID NO: 1223894 - DNA, 25 bp, Homo sapien
ccactcaatgggctggaagctatga

SEQ ID NO: 1223895 - DNA, 25 bp, Homo sapien
gtaagagtcctcaaagtcaaagatg

SEQ ID NO: 1223896 - DNA, 25 bp, Homo sapien
cactcagagtccgaaaagtcaatgg

SEQ ID NO: 1223897 - DNA, 25 bp, Homo sapien
tcctcacgaaggcaaagtcccatct

SEQ ID NO: 1223898 - DNA, 25 bp, Homo sapien
tgaagatgacaagtccacaagtgct

SEQ ID NO: 1223899 - DNA, 25 bp, Homo sapien
cattgtgctccctgtgccgtgtaga

SEQ ID NO: 1223900 - DNA, 25 bp, Homo sapien
cctgtactgtcaagcagcaagggca

SEQ ID NO: 1223901 - DNA, 25 bp, Homo sapien
agtgggcacttgcaggtttcaggat

SEQ ID NO: 1223902 - DNA, 25 bp, Homo sapien
gagagtgggcacttgcaggtttcag

SEQ ID NO: 1223903 - DNA, 25 bp, Homo sapien
cggcttctcacttgggtcggagagt

SEQ ID NO: 1223904 - DNA, 25 bp, Homo sapien
gacagggattttccccggcttctca

SEQ ID NO: 1223905 - DNA, 25 bp, Homo sapien
tagatgtgggatcactggcctcagg

SEQ ID NO: 1223906 - DNA, 25 bp, Homo sapien
acacgtggcacagttgggattcaac

SEQ ID NO: 1223907 - DNA, 25 bp, Homo sapien
aaagcagtattttttcccaggatgg

SEQ ID NO: 1223908 - DNA, 25 bp, Homo sapien
tatcgctggtgaatttgggcatccc

SEQ ID NO: 1223909 - DNA, 25 bp, Homo sapien
atccaagtaaaacggatccaccagg

SEQ ID NO: 1223910 - DNA, 25 bp, Homo sapien
caatagccaccattctgtgcaggaa

SEQ ID NO: 1223911 - DNA, 25 bp, Homo sapien
taaaaactcaacatggccctgtgaa

SEQ ID NO: 1223912 - DNA, 25 bp, Homo sapien
gcttgggccttcatgtcctctggat

SEQ ID NO: 1223913 - DNA, 25 bp, Homo sapien
tgctatccgggcttgaaacgccagg

SEQ ID NO: 1223914 - DNA, 25 bp, Homo sapien
gcctgggcttgtgcagttatcgctc

SEQ ID NO: 1223915 - DNA, 25 bp, Homo sapien
tgtggcataggcatgctggtctcaa

SEQ ID NO: 1223916 - DNA, 25 bp, Homo sapien
ctaagtagatggctccaataggact

SEQ ID NO: 1223917 - DNA, 25 bp, Homo sapien
ggctctttttcttgggcttcctcag

SEQ ID NO: 1223918 - DNA, 25 bp, Homo sapien
tctttttcttgggcttcctcagggc

SEQ ID NO: 1223919 - DNA, 25 bp, Homo sapien
cttctgttctggctctttttcttgg

SEQ ID NO: 1223920 - DNA, 25 bp, Homo sapien
ttctgttctggctctttttcttggg

SEQ ID NO: 1223921 - DNA, 25 bp, Homo sapien
ggtgcactcacagtcctgatccatc

SEQ ID NO: 1223922 - DNA, 25 bp, Homo sapien
gcactcacagtcctgatccatcctc

SEQ ID NO: 1223923 - DNA, 25 bp, Homo sapien
ggctgcggcactctgacagctgtcc

SEQ ID NO: 1223924 - DNA, 25 bp, Homo sapien
tgcactcacagtcctgatccatcct

SEQ ID NO: 1223925 - DNA, 25 bp, Homo sapien
tggtcaaaccgttccaaggccactc

SEQ ID NO: 1223926 - DNA, 25 bp, Homo sapien
aatacaaaattgtccacgggcacct

SEQ ID NO: 1223927 - DNA, 25 bp, Homo sapien
gactctgacctactgggagcagttt

SEQ ID NO: 1223928 - DNA, 25 bp, Homo sapien
caactgggctctgtggatggtcaaa

SEQ ID NO: 1223929 - DNA, 25 bp, Homo sapien
ttattctcatgtcctgcacctctct

SEQ ID NO: 1223930 - DNA, 25 bp, Homo sapien
gcttggcgctccagtgcttgtggcc

SEQ ID NO: 1223931 - DNA, 25 bp, Homo sapien
tcttcttattctcatgtcctgcacc

SEQ ID NO: 1223932 - DNA, 25 bp, Homo sapien
tcctacacagtagaccctgcaatct

SEQ ID NO: 1223933 - DNA, 25 bp, Homo sapien
ctccaggaacacagctgtcctgagt

SEQ ID NO: 1223934 - DNA, 25 bp, Homo sapien
tccaggaacacagctgtcctgagtt

SEQ ID NO: 1223935 - DNA, 25 bp, Homo sapien
ttggcgaaggccatgggtggaagct

SEQ ID NO: 1223936 - DNA, 25 bp, Homo sapien
ggctgcttggcgaaggccatgggtg

SEQ ID NO: 1223937 - DNA, 25 bp, Homo sapien
gcttggcgaaggccatgggtggaag

SEQ ID NO: 1223938 - DNA, 25 bp, Homo sapien
ctgcttggcgaaggccatgggtgga

SEQ ID NO: 1223939 - DNA, 25 bp, Homo sapien
gatggccttatgtaatgctgacaga

SEQ ID NO: 1223940 - DNA, 25 bp, Homo sapien
cttacagtaagattcccggagtttg

SEQ ID NO: 1223941 - DNA, 25 bp, Homo sapien
cagaatagcacagggacagagtcac

SEQ ID NO: 1223942 - DNA, 25 bp, Homo sapien
catttagaaatgacgcgatggcctt

SEQ ID NO: 1223943 - DNA, 25 bp, Homo sapien
ggcagacagagcccgctggagccat

SEQ ID NO: 1223944 - DNA, 25 bp, Homo sapien
gggcagacagagcccgctggagcca

SEQ ID NO: 1223945 - DNA, 25 bp, Homo sapien
tcccctgatggaaagcaccggtgct

SEQ ID NO: 1223946 - DNA, 25 bp, Homo sapien
ctgatggaaagcaccggtgctggca

SEQ ID NO: 1223947 - DNA, 25 bp, Homo sapien
cccctgatggaaagcaccggtgctg

SEQ ID NO: 1223948 - DNA, 25 bp, Homo sapien
cctgatggaaagcaccggtgctggc

SEQ ID NO: 1223949 - DNA, 25 bp, Homo sapien
acgtgtgccggcaggtgctcaccct

SEQ ID NO: 1223950 - DNA, 25 bp, Homo sapien
tgagggccatgtctgggtacgtgtg

SEQ ID NO: 1223951 - DNA, 25 bp, Homo sapien
acacaaaggccagactggcggtaca

SEQ ID NO: 1223952 - DNA, 25 bp, Homo sapien
acaaaggccagactggcggtacagc

SEQ ID NO: 1223953 - DNA, 25 bp, Homo sapien
agtgcagaggaggagctcggcctga

SEQ ID NO: 1223954 - DNA, 25 bp, Homo sapien
gcctcagaaccagaaagtgatggag

SEQ ID NO: 1223955 - DNA, 25 bp, Homo sapien
aaagtgatggagtggagacatgacc

SEQ ID NO: 1223956 - DNA, 25 bp, Homo sapien
catcccaaggctgaacatgcatagg

SEQ ID NO: 1223957 - DNA, 25 bp, Homo sapien
tatctcaactttgacagctgcacac

SEQ ID NO: 1223958 - DNA, 25 bp, Homo sapien
ctatctcaactttgacagctgcaca

SEQ ID NO: 1223959 - DNA, 25 bp, Homo sapien
ctggacggagggtgctcaaagcagg

SEQ ID NO: 1223960 - DNA, 25 bp, Homo sapien
gacggagggtgctcaaagcaggagg

SEQ ID NO: 1223961 - DNA, 25 bp, Homo sapien
cggagggtgctcaaagcaggaggta

SEQ ID NO: 1223962 - DNA, 25 bp, Homo sapien
tggacggagggtgctcaaagcagga

SEQ ID NO: 1223963 - DNA, 25 bp, Homo sapien
ggctacacttaaccccaatgacagg

SEQ ID NO: 1223964 - DNA, 25 bp, Homo sapien
ggtgaaagcttgatggcctggcccc

SEQ ID NO: 1223965 - DNA, 25 bp, Homo sapien
ctgttgtgacgtaaatggactcaga

SEQ ID NO: 1223966 - DNA, 25 bp, Homo sapien
tggactcagagtgaactagggtgaa

SEQ ID NO: 1223967 - DNA, 25 bp, Homo sapien
gcaaccgtggctgcaatctccttgg

SEQ ID NO: 1223968 - DNA, 25 bp, Homo sapien
gaagtaggttatcacagcatgccac

SEQ ID NO: 1223969 - DNA, 25 bp, Homo sapien
ctggcatagggcagaagtaggttat

SEQ ID NO: 1223970 - DNA, 25 bp, Homo sapien
gctaaactgagattcctggtgaact

SEQ ID NO: 1223971 - DNA, 25 bp, Homo sapien
aacagcttgagtgcttccaaaggaa

SEQ ID NO: 1223972 - DNA, 25 bp, Homo sapien
gcttgagtgcttccaaaggaaaggg

SEQ ID NO: 1223973 - DNA, 25 bp, Homo sapien
ccaaaggaaagggactaggtcatct

SEQ ID NO: 1223974 - DNA, 25 bp, Homo sapien
gagtgcttccaaaggaaagggacta

SEQ ID NO: 1223975 - DNA, 25 bp, Homo sapien
taaaatcaaggtgaatcttaggatt

SEQ ID NO: 1223976 - DNA, 25 bp, Homo sapien
cggttaatgttcaggcttgaatgta

SEQ ID NO: 1223977 - DNA, 25 bp, Homo sapien
gtataaaatcaaggtgaatcttagg

SEQ ID NO: 1223978 - DNA, 25 bp, Homo sapien
tcccagggagcggttaatgttcagg

SEQ ID NO: 1223979 - DNA, 25 bp, Homo sapien
cacttcattcagagtgctcagatca

SEQ ID NO: 1223980 - DNA, 25 bp, Homo sapien
gatttgatagcccacttcattcaga

SEQ ID NO: 1223981 - DNA, 25 bp, Homo sapien
gagtgctcagatcagccaccttctt

SEQ ID NO: 1223982 - DNA, 25 bp, Homo sapien
ctaaattcggatttgatagcccact

SEQ ID NO: 1223983 - DNA, 25 bp, Homo sapien
tgaagacctgctgatcactcctggt

SEQ ID NO: 1223984 - DNA, 25 bp, Homo sapien
taattgaaccatcaagccagttggc

SEQ ID NO: 1223985 - DNA, 25 bp, Homo sapien
taaggtgtaacactggaccgaagac

SEQ ID NO: 1223986 - DNA, 25 bp, Homo sapien
gaaaccctcttgctggccggtatgg

SEQ ID NO: 1223987 - DNA, 25 bp, Homo sapien
taaagtcccatgctgtgttagaaac

SEQ ID NO: 1223988 - DNA, 25 bp, Homo sapien
ctatagcttacaaaagactcaggta

SEQ ID NO: 1223989 - DNA, 25 bp, Homo sapien
tgaaacatgcacttactggcattct

SEQ ID NO: 1223990 - DNA, 25 bp, Homo sapien
tatctccgaaataaagtgtactcaa

SEQ ID NO: 1223991 - DNA, 25 bp, Homo sapien
caggatattatgtgccctaattagc

SEQ ID NO: 1223992 - DNA, 25 bp, Homo sapien
gcttcactttgatagagttaatcca

SEQ ID NO: 1223993 - DNA, 25 bp, Homo sapien
cattttatagtagtagtttgcagga

SEQ ID NO: 1223994 - DNA, 25 bp, Homo sapien
aattatagttctaggatttcccaca

SEQ ID NO: 1223995 - DNA, 25 bp, Homo sapien
gatggtgctgacactttctatgaag

SEQ ID NO: 1223996 - DNA, 25 bp, Homo sapien
tctatgaagtggttatgagcaggtt

SEQ ID NO: 1223997 - DNA, 25 bp, Homo sapien
tagaatgcttcaccttaaattggaa

SEQ ID NO: 1223998 - DNA, 25 bp, Homo sapien
cagtaggaacaaggaattatatgca

SEQ ID NO: 1223999 - DNA, 25 bp, Homo sapien
tcgtgacaagtgagctctaaattct

SEQ ID NO: 1224000 - DNA, 25 bp, Homo sapien
cactgtggagattctgaagcggtta

SEQ ID NO: 1224001 - DNA, 25 bp, Homo sapien
gcggttatgttagatgctttgaaac

SEQ ID NO: 1224002 - DNA, 25 bp, Homo sapien
ctttgaaactccatatcagaagaaa

SEQ ID NO: 1224003 - DNA, 25 bp, Homo sapien
acactgctgagaccactattcagaa

SEQ ID NO: 1224004 - DNA, 25 bp, Homo sapien
cactctacctgtgctatgtcagtgg

SEQ ID NO: 1224005 - DNA, 25 bp, Homo sapien
tactttaagttaaagtcagcattca

SEQ ID NO: 1224006 - DNA, 25 bp, Homo sapien
cagtgcatctgtttatggcatagaa

SEQ ID NO: 1224007 - DNA, 25 bp, Homo sapien
caaggtggcaggatagaattttgaa

SEQ ID NO: 1224008 - DNA, 25 bp, Homo sapien
aaaaagtattgacagacatggatac

SEQ ID NO: 1224009 - DNA, 25 bp, Homo sapien
caacatactgcttggaggaattaac

SEQ ID NO: 1224010 - DNA, 25 bp, Homo sapien
caccgataagtaacacaaggtggca

SEQ ID NO: 1224011 - DNA, 25 bp, Homo sapien
ccaaggcgaggtgatattaagctga

SEQ ID NO: 1224012 - DNA, 25 bp, Homo sapien
taagatgcggacaggaaggaaacct

SEQ ID NO: 1224013 - DNA, 25 bp, Homo sapien
caattggcaatgctactggcagaga

SEQ ID NO: 1224014 - DNA, 25 bp, Homo sapien
aaaattccatatgctgcctgccctg

SEQ ID NO: 1224015 - DNA, 25 bp, Homo sapien
taatcctctcatttcggcttcctga

SEQ ID NO: 1224016 - DNA, 25 bp, Homo sapien
tgaggtactcactggaaacttttgt

SEQ ID NO: 1224017 - DNA, 25 bp, Homo sapien
tttcctaggagttgttctgtccacc

SEQ ID NO: 1224018 - DNA, 25 bp, Homo sapien
cctgtagacctataagcttctgagc

SEQ ID NO: 1224019 - DNA, 25 bp, Homo sapien
gcggctccacggcggcgcctcagct

SEQ ID NO: 1224020 - DNA, 25 bp, Homo sapien
gcggtggctccaaggcggctccacg

SEQ ID NO: 1224021 - DNA, 25 bp, Homo sapien
ccacccgcccgggatcatgagggaa

SEQ ID NO: 1224022 - DNA, 25 bp, Homo sapien
gcgccgccgcggtccaggttcccca

SEQ ID NO: 1224023 - DNA, 25 bp, Homo sapien
tgacagtgtagaaacgggccaggtc

SEQ ID NO: 1224024 - DNA, 25 bp, Homo sapien
ccgggcggtgaccttatatactgtg

SEQ ID NO: 1224025 - DNA, 25 bp, Homo sapien
ttatatactgtgtagcccctcgggt

SEQ ID NO: 1224026 - DNA, 25 bp, Homo sapien
ctgtgtagcccctcgggtgtcgctg

SEQ ID NO: 1224027 - DNA, 25 bp, Homo sapien
ctcaaaactcaggagtaagaaacaa

SEQ ID NO: 1224028 - DNA, 25 bp, Homo sapien
tatagtagtatagatagatcgctgc

SEQ ID NO: 1224029 - DNA, 25 bp, Homo sapien
aaattatcagtctaaaaggctaaat

SEQ ID NO: 1224030 - DNA, 25 bp, Homo sapien
gtctaaaaggctaaatactatatga

SEQ ID NO: 1224031 - DNA, 25 bp, Homo sapien
caacctccctttcatgaccacctgc

SEQ ID NO: 1224032 - DNA, 25 bp, Homo sapien
tgaccacctgcacctgagttcttct

SEQ ID NO: 1224033 - DNA, 25 bp, Homo sapien
catgaccacctgcacctgagttctt

SEQ ID NO: 1224034 - DNA, 25 bp, Homo sapien
ttcatgaccacctgcacctgagttc

SEQ ID NO: 1224035 - DNA, 25 bp, Homo sapien
acatcctctggatttcttcgtgaaa

SEQ ID NO: 1224036 - DNA, 25 bp, Homo sapien
catcctctggatttcttcgtgaaac

SEQ ID NO: 1224037 - DNA, 25 bp, Homo sapien
aataaaatcttcatataaatgttac

SEQ ID NO: 1224038 - DNA, 25 bp, Homo sapien
aaataaaatcttcatataaatgtta

SEQ ID NO: 1224039 - DNA, 25 bp, Homo sapien
tgattcaggcaatttcctcaaaaaa

SEQ ID NO: 1224040 - DNA, 25 bp, Homo sapien
tacaaatgattcaggcaatttcctc

SEQ ID NO: 1224041 - DNA, 25 bp, Homo sapien
acaaatgattcaggcaatttcctca

SEQ ID NO: 1224042 - DNA, 25 bp, Homo sapien
aaatgattcaggcaatttcctcaaa

SEQ ID NO: 1224043 - DNA, 25 bp, Homo sapien
agttttcagatgaatggttcaccaa

SEQ ID NO: 1224044 - DNA, 25 bp, Homo sapien
gttttcagatgaatggttcaccaac

SEQ ID NO: 1224045 - DNA, 25 bp, Homo sapien
ttttcagatgaatggttcaccaaca

SEQ ID NO: 1224046 - DNA, 25 bp, Homo sapien
tttcagatgaatggttcaccaacag

SEQ ID NO: 1224047 - DNA, 25 bp, Homo sapien
ctgaatgtcggaataagtttttgtg

SEQ ID NO: 1224048 - DNA, 25 bp, Homo sapien
cactattcctttagcaaatggagga

SEQ ID NO: 1224049 - DNA, 25 bp, Homo sapien
agtttttgtgaatttgccatagttc

SEQ ID NO: 1224050 - DNA, 25 bp, Homo sapien
tagcaaatggaggaaacaactctga

SEQ ID NO: 1224051 - DNA, 25 bp, Homo sapien
cacaaaaagcaactagggttccttg

SEQ ID NO: 1224052 - DNA, 25 bp, Homo sapien
gatgagtaccactaggcatcccaca

SEQ ID NO: 1224053 - DNA, 25 bp, Homo sapien
taaaagggctcctactgatcaaagc

SEQ ID NO: 1224054 - DNA, 25 bp, Homo sapien
gagcaaataggaacggaagcacacc

SEQ ID NO: 1224055 - DNA, 25 bp, Homo sapien
tcctatctctggctgttgaaaaaag

SEQ ID NO: 1224056 - DNA, 25 bp, Homo sapien
ggagacatttctagtcaagaccaga

SEQ ID NO: 1224057 - DNA, 25 bp, Homo sapien
ccagatagtgatctctgtagcagcc

SEQ ID NO: 1224058 - DNA, 25 bp, Homo sapien
gcaagaagcatacctactgtccaga

SEQ ID NO: 1224059 - DNA, 25 bp, Homo sapien
taaccaacagtattgttatcagtga

SEQ ID NO: 1224060 - DNA, 25 bp, Homo sapien
ttctcaaacataaacaactgggcct

SEQ ID NO: 1224061 - DNA, 25 bp, Homo sapien
tcaagctgtcaaaccactgtaagct

SEQ ID NO: 1224062 - DNA, 25 bp, Homo sapien
tctcaacccttgagaacaataattt

SEQ ID NO: 1224063 - DNA, 25 bp, Homo sapien
tttagaagctgattgtaaccctcat

SEQ ID NO: 1224064 - DNA, 25 bp, Homo sapien
ttttagaagctgattgtaaccctca

SEQ ID NO: 1224065 - DNA, 25 bp, Homo sapien
ttagaagctgattgtaaccctcatg

SEQ ID NO: 1224066 - DNA, 25 bp, Homo sapien
tctctcttcgataacagtttcatca

SEQ ID NO: 1224067 - DNA, 25 bp, Homo sapien
gtcttctctcttcgataacagtttc

SEQ ID NO: 1224068 - DNA, 25 bp, Homo sapien
tcttctctcttcgataacagtttca

SEQ ID NO: 1224069 - DNA, 25 bp, Homo sapien
ttgtcttctctcttcgataacagtt

SEQ ID NO: 1224070 - DNA, 25 bp, Homo sapien
gtcttcaagctgtttactattgtaa

SEQ ID NO: 1224071 - DNA, 25 bp, Homo sapien
tcttcaagctgtttactattgtaaa

SEQ ID NO: 1224072 - DNA, 25 bp, Homo sapien
ctgacaacatataccgatacagttc

SEQ ID NO: 1224073 - DNA, 25 bp, Homo sapien
cactaatatccaatgatctccagta

SEQ ID NO: 1224074 - DNA, 25 bp, Homo sapien
tgaaagcattacatatctaggaact

SEQ ID NO: 1224075 - DNA, 25 bp, Homo sapien
catataccgatacagttcaaaataa

SEQ ID NO: 1224076 - DNA, 25 bp, Homo sapien
acatgggagaaaattttcgcaacct

SEQ ID NO: 1224077 - DNA, 25 bp, Homo sapien
agtgggcgaaggacaagaacagaca

SEQ ID NO: 1224078 - DNA, 25 bp, Homo sapien
gtgggcgaaggacaagaacagacac

SEQ ID NO: 1224079 - DNA, 25 bp, Homo sapien
cctacaacatgggagaaaattttcg

SEQ ID NO: 1224080 - DNA, 25 bp, Homo sapien
caatgagggaatctgagtgagcttc

SEQ ID NO: 1224081 - DNA, 25 bp, Homo sapien
tcaggaaaggtatcaatgagggaat

SEQ ID NO: 1224082 - DNA, 25 bp, Homo sapien
agcttcagcaggaccaattaattca

SEQ ID NO: 1224083 - DNA, 25 bp, Homo sapien
gcttcagcaggaccaattaattcag

SEQ ID NO: 1224084 - DNA, 25 bp, Homo sapien
tatgaagtaaatcttccactttccc

SEQ ID NO: 1224085 - DNA, 25 bp, Homo sapien
tcttttgctactagatgttcctctc

SEQ ID NO: 1224086 - DNA, 25 bp, Homo sapien
acaatcttacgatatttaaaagcca

SEQ ID NO: 1224087 - DNA, 25 bp, Homo sapien
tcctgctcttttgctactagatgtt

SEQ ID NO: 1224088 - DNA, 25 bp, Homo sapien
tgtcaccacgatccctctaacaacc

SEQ ID NO: 1224089 - DNA, 25 bp, Homo sapien
tccctctaacaaccctccatttcac

SEQ ID NO: 1224090 - DNA, 25 bp, Homo sapien
aacacaagcatttgtcaccacgatc

SEQ ID NO: 1224091 - DNA, 25 bp, Homo sapien
caccacgatccctctaacaaccctc

SEQ ID NO: 1224092 - DNA, 25 bp, Homo sapien
aatctgtctaggacaccatctctga

SEQ ID NO: 1224093 - DNA, 25 bp, Homo sapien
gaacaggttgagttgccatagaata

SEQ ID NO: 1224094 - DNA, 25 bp, Homo sapien
gaacaacaggtggtctctcatgggt

SEQ ID NO: 1224095 - DNA, 25 bp, Homo sapien
gctttgaactgctcagagtagggca

SEQ ID NO: 1224096 - DNA, 25 bp, Homo sapien
tctagtttggttgccaaaaagagcc

SEQ ID NO: 1224097 - DNA, 25 bp, Homo sapien
taaaacttactgtgtgaccaacagc

SEQ ID NO: 1224098 - DNA, 25 bp, Homo sapien
gcccagcgccagctcttaaaactta

SEQ ID NO: 1224099 - DNA, 25 bp, Homo sapien
ccgagtagcttagatggcatgagcc

SEQ ID NO: 1224100 - DNA, 25 bp, Homo sapien
cccctagtgctgaagaatccgaaga

SEQ ID NO: 1224101 - DNA, 25 bp, Homo sapien
gataccagatcactgtcactggaga

SEQ ID NO: 1224102 - DNA, 25 bp, Homo sapien
aataatctctcttgccaagcttcgg

SEQ ID NO: 1224103 - DNA, 25 bp, Homo sapien
actgccaggaaagaggctacgactt

SEQ ID NO: 1224104 - DNA, 25 bp, Homo sapien
ataaaattagggtgaaaatgatctt

SEQ ID NO: 1224105 - DNA, 25 bp, Homo sapien
tatttgtgtcaattaaacaccagtg

SEQ ID NO: 1224106 - DNA, 25 bp, Homo sapien
gtgtcaattaaacaccagtgatgtt

SEQ ID NO: 1224107 - DNA, 25 bp, Homo sapien
aattaaacaccagtgatgttttagc

SEQ ID NO: 1224108 - DNA, 25 bp, Homo sapien
tttatttgtgtcaattaaacaccag

SEQ ID NO: 1224109 - DNA, 25 bp, Homo sapien
gtagacagtcctttcattccaagaa

SEQ ID NO: 1224110 - DNA, 25 bp, Homo sapien
aatgcttccttctagccagtttcaa

SEQ ID NO: 1224111 - DNA, 25 bp, Homo sapien
tgtttaatactcctccctattgaaa

SEQ ID NO: 1224112 - DNA, 25 bp, Homo sapien
cagagacggatagaaggctcatacc

SEQ ID NO: 1224113 - DNA, 25 bp, Homo sapien
tcttaattagactgttttaaaatgc

SEQ ID NO: 1224114 - DNA, 25 bp, Homo sapien
ttcagttcatgcagtgcatcaggga

SEQ ID NO: 1224115 - DNA, 25 bp, Homo sapien
tggttatgccgttcagttcatgcag

SEQ ID NO: 1224116 - DNA, 25 bp, Homo sapien
tgcagtgcatcagggatagctctgt

SEQ ID NO: 1224117 - DNA, 25 bp, Homo sapien
tccacattccatggttatgccgttc

SEQ ID NO: 1224118 - DNA, 25 bp, Homo sapien
tttctgcccgcatgaggtactcggc

SEQ ID NO: 1224119 - DNA, 25 bp, Homo sapien
tctcgacgggtagggcttgactctc

SEQ ID NO: 1224120 - DNA, 25 bp, Homo sapien
cataaagactagagatactttctgc

SEQ ID NO: 1224121 - DNA, 25 bp, Homo sapien
tcttcacagcttctcgacgggtagg

SEQ ID NO: 1224122 - DNA, 25 bp, Homo sapien
cccacggaaaatgggaattgaatca

SEQ ID NO: 1224123 - DNA, 25 bp, Homo sapien
tatacacattagtactgcacacgag

SEQ ID NO: 1224124 - DNA, 25 bp, Homo sapien
gaggaaggttgtcaatcccacggaa

SEQ ID NO: 1224125 - DNA, 25 bp, Homo sapien
cacagggaattatgttaatgctttc

SEQ ID NO: 1224126 - DNA, 25 bp, Homo sapien
caaagactttcacgggcaatctacc

SEQ ID NO: 1224127 - DNA, 25 bp, Homo sapien
tgagccgcactaggtcacatttcaa

SEQ ID NO: 1224128 - DNA, 25 bp, Homo sapien
taaattttatgtgcaccacctgatg

SEQ ID NO: 1224129 - DNA, 25 bp, Homo sapien
gagtaaccattactgcgggaaaaca

SEQ ID NO: 1224130 - DNA, 25 bp, Homo sapien
ttagagcagaccttattgctatcaa

SEQ ID NO: 1224131 - DNA, 25 bp, Homo sapien
agcagaccttattgctatcaaaaat

SEQ ID NO: 1224132 - DNA, 25 bp, Homo sapien
gagcagaccttattgctatcaaaaa

SEQ ID NO: 1224133 - DNA, 25 bp, Homo sapien
tagagcagaccttattgctatcaaa

SEQ ID NO: 1224134 - DNA, 25 bp, Homo sapien
tcagaccatacagctatcataaaac

SEQ ID NO: 1224135 - DNA, 25 bp, Homo sapien
cccagacacctcaagagtaatttgg

SEQ ID NO: 1224136 - DNA, 25 bp, Homo sapien
taatgagctggcagtttctagagca

SEQ ID NO: 1224137 - DNA, 25 bp, Homo sapien
caaatggataactgggccaacaatc

SEQ ID NO: 1224138 - DNA, 25 bp, Homo sapien
tcctcggcagggctccttaggttcc

SEQ ID NO: 1224139 - DNA, 25 bp, Homo sapien
accccaaggactctgaaggccttca

SEQ ID NO: 1224140 - DNA, 25 bp, Homo sapien
cccaaggactctgaaggccttcagc

SEQ ID NO: 1224141 - DNA, 25 bp, Homo sapien
ggccttgaacttagtgatcctggag

SEQ ID NO: 1224142 - DNA, 25 bp, Homo sapien
gaatgtcagcatgcagtcgatttat

SEQ ID NO: 1224143 - DNA, 25 bp, Homo sapien
agtcgatttatgactgaactcttga

SEQ ID NO: 1224144 - DNA, 25 bp, Homo sapien
ccaaagcttcaaagacagaatgtca

SEQ ID NO: 1224145 - DNA, 25 bp, Homo sapien
catatccttaagatccaaagcttca

SEQ ID NO: 1224146 - DNA, 25 bp, Homo sapien
ctgaatgccaacaaatatgcgcctt

SEQ ID NO: 1224147 - DNA, 25 bp, Homo sapien
taaagtgcacatgcatttgagtcat

SEQ ID NO: 1224148 - DNA, 25 bp, Homo sapien
tgaccttacatgaattgctcagata

SEQ ID NO: 1224149 - DNA, 25 bp, Homo sapien
aaatatattttgcatgaccttacat

SEQ ID NO: 1224150 - DNA, 25 bp, Homo sapien
gaagtcttcgaactgagaaacacat

SEQ ID NO: 1224151 - DNA, 25 bp, Homo sapien
gagaatcactgatcctaggcaatag

SEQ ID NO: 1224152 - DNA, 25 bp, Homo sapien
ccctcaaaggtcaagggcaaagaga

SEQ ID NO: 1224153 - DNA, 25 bp, Homo sapien
ggaaagctcaaagactggctatctg

SEQ ID NO: 1224154 - DNA, 25 bp, Homo sapien
gagatctagacatctaaacacaaga

SEQ ID NO: 1224155 - DNA, 25 bp, Homo sapien
agatctagacatctaaacacaagaa

SEQ ID NO: 1224156 - DNA, 25 bp, Homo sapien
agagatctagacatctaaacacaag

SEQ ID NO: 1224157 - DNA, 25 bp, Homo sapien
tctgtttttgtgaagaatctgccca

SEQ ID NO: 1224158 - DNA, 25 bp, Homo sapien
ctgcccaaggccataaacggattat

SEQ ID NO: 1224159 - DNA, 25 bp, Homo sapien
agaatctgcccaaggccataaacgg

SEQ ID NO: 1224160 - DNA, 25 bp, Homo sapien
tgtttttgtgaagaatctgcccaag

SEQ ID NO: 1224161 - DNA, 25 bp, Homo sapien
caatgagcgaagctccgtgtacgta

SEQ ID NO: 1224162 - DNA, 25 bp, Homo sapien
gcaggtccgtttggagtttgccgga

SEQ ID NO: 1224163 - DNA, 25 bp, Homo sapien
cgtgtacgtaggacccttcaagcca

SEQ ID NO: 1224164 - DNA, 25 bp, Homo sapien
gtacgtaggacccttcaagccaggc

SEQ ID NO: 1224165 - DNA, 25 bp, Homo sapien
ttatcagccctatattagcatatgg

SEQ ID NO: 1224166 - DNA, 25 bp, Homo sapien
tatattagcatatggtctaacagaa

SEQ ID NO: 1224167 - DNA, 25 bp, Homo sapien
tctttgcccatactaatacatgaaa

SEQ ID NO: 1224168 - DNA, 25 bp, Homo sapien
tcatctttgcccatactaatacatg

SEQ ID NO: 1224169 - DNA, 25 bp, Homo sapien
gtgctctggtgtgatttttagctca

SEQ ID NO: 1224170 - DNA, 25 bp, Homo sapien
taagcacttctcttatccaccctgt

SEQ ID NO: 1224171 - DNA, 25 bp, Homo sapien
tatccaccctgtattctctaatctg

SEQ ID NO: 1224172 - DNA, 25 bp, Homo sapien
tgtgctatactttacccaggtgtaa

SEQ ID NO: 1224173 - DNA, 25 bp, Homo sapien
tccttgtgtccattacaagtaaaac

SEQ ID NO: 1224174 - DNA, 25 bp, Homo sapien
gtccttgtgtccattacaagtaaaa

SEQ ID NO: 1224175 - DNA, 25 bp, Homo sapien
tgtccttgtgtccattacaagtaaa

SEQ ID NO: 1224176 - DNA, 25 bp, Homo sapien
tagaagcccaccattatacccggct

SEQ ID NO: 1224177 - DNA, 25 bp, Homo sapien
atagaagcccaccattatacccggc

SEQ ID NO: 1224178 - DNA, 25 bp, Homo sapien
tatagaagcccaccattatacccgg

SEQ ID NO: 1224179 - DNA, 25 bp, Homo sapien
gaacaaaaaggtcagttgtatcctc

SEQ ID NO: 1224180 - DNA, 25 bp, Homo sapien
acaaaaaggtcagttgtatcctcag

SEQ ID NO: 1224181 - DNA, 25 bp, Homo sapien
gagaacaaaaaggtcagttgtatcc

SEQ ID NO: 1224182 - DNA, 25 bp, Homo sapien
caaaaaggtcagttgtatcctcagt

SEQ ID NO: 1224183 - DNA, 25 bp, Homo sapien
tgtattcactgcttttccttagacc

SEQ ID NO: 1224184 - DNA, 25 bp, Homo sapien
gggcacacagcgggggatgatggtc

SEQ ID NO: 1224185 - DNA, 25 bp, Homo sapien
ggcacacagcgggggatgatggtct

SEQ ID NO: 1224186 - DNA, 25 bp, Homo sapien
tgttcctgctgtattcactgctttt

SEQ ID NO: 1224187 - DNA, 25 bp, Homo sapien
gatgatgtacttatgcagacacacc

SEQ ID NO: 1224188 - DNA, 25 bp, Homo sapien
gagatgatgtacttatgcagacaca

SEQ ID NO: 1224189 - DNA, 25 bp, Homo sapien
aatactgactcctcagagatgatgt

SEQ ID NO: 1224190 - DNA, 25 bp, Homo sapien
ctcctcagagatgatgtacttatgc

SEQ ID NO: 1224191 - DNA, 25 bp, Homo sapien
actacgcaagttattttgttccaca

SEQ ID NO: 1224192 - DNA, 25 bp, Homo sapien
ggctgtatttcgctatcagatgaca

SEQ ID NO: 1224193 - DNA, 25 bp, Homo sapien
aaattattatggattattactacgc

SEQ ID NO: 1224194 - DNA, 25 bp, Homo sapien
gaggtggctgtatttcgctatcaga

SEQ ID NO: 1224195 - DNA, 25 bp, Homo sapien
gattgtaccatagcactctaaccta

SEQ ID NO: 1224196 - DNA, 25 bp, Homo sapien
agaatttaagtttcaggcctggcgt

SEQ ID NO: 1224197 - DNA, 25 bp, Homo sapien
aatttaagtttcaggcctggcgtgg

SEQ ID NO: 1224198 - DNA, 25 bp, Homo sapien
atagcactctaacctaggagacaga

SEQ ID NO: 1224199 - DNA, 25 bp, Homo sapien
tctgaacttgaaccagaatctggcc

SEQ ID NO: 1224200 - DNA, 25 bp, Homo sapien
gctattttttgatctactgagggaa

SEQ ID NO: 1224201 - DNA, 25 bp, Homo sapien
gcagagctttaagcatgcttccacc

SEQ ID NO: 1224202 - DNA, 25 bp, Homo sapien
catgaagggctcctcattcaaagac

SEQ ID NO: 1224203 - DNA, 25 bp, Homo sapien
taactggcactgagtcatctgagcc

SEQ ID NO: 1224204 - DNA, 25 bp, Homo sapien
aagtcccaggagttcacttgcgcta

SEQ ID NO: 1224205 - DNA, 25 bp, Homo sapien
taaacttagtaggtcccattgctgc

SEQ ID NO: 1224206 - DNA, 25 bp, Homo sapien
gagcccctgctaatggtgtcctgag

SEQ ID NO: 1224207 - DNA, 25 bp, Homo sapien
tatactataggatttgggcccagag

SEQ ID NO: 1224208 - DNA, 25 bp, Homo sapien
cttgaaacttaggatctgagctggg

SEQ ID NO: 1224209 - DNA, 25 bp, Homo sapien
gctgctacaaataacatcctgggat

SEQ ID NO: 1224210 - DNA, 25 bp, Homo sapien
ggcccagagggatcactcagttcct

SEQ ID NO: 1224211 - DNA, 25 bp, Homo sapien
caagggctaccaccatttcagctgc

SEQ ID NO: 1224212 - DNA, 25 bp, Homo sapien
cacaattccctctctatgtaaagca

SEQ ID NO: 1224213 - DNA, 25 bp, Homo sapien
agccctctgggatgtaaaacctgga

SEQ ID NO: 1224214 - DNA, 25 bp, Homo sapien
gtttgggttcaaatcgcggcacaca

SEQ ID NO: 1224215 - DNA, 25 bp, Homo sapien
gggtgaatttgctgcactgataatg

SEQ ID NO: 1224216 - DNA, 25 bp, Homo sapien
aaacgcctactcagttaattggaag

SEQ ID NO: 1224217 - DNA, 25 bp, Homo sapien
gaagcaacagcgaataaaaagaaat

SEQ ID NO: 1224218 - DNA, 25 bp, Homo sapien
taatgaagctctagacaggaaatga

SEQ ID NO: 1224219 - DNA, 25 bp, Homo sapien
cattttctgcagaagtgaactgtaa

SEQ ID NO: 1224220 - DNA, 25 bp, Homo sapien
tctgcagaagtgaactgtaattact

SEQ ID NO: 1224221 - DNA, 25 bp, Homo sapien
ccattttctgcagaagtgaactgta

SEQ ID NO: 1224222 - DNA, 25 bp, Homo sapien
ttttctgcagaagtgaactgtaatt

SEQ ID NO: 1224223 - DNA, 25 bp, Homo sapien
gggcacagtacattctctctatggc

SEQ ID NO: 1224224 - DNA, 25 bp, Homo sapien
tcactccacctgctaaaatacgtta

SEQ ID NO: 1224225 - DNA, 25 bp, Homo sapien
ctaaaatacgttagctgaatgtgtc

SEQ ID NO: 1224226 - DNA, 25 bp, Homo sapien
ggcatcgctgtcacaggaatcttca

SEQ ID NO: 1224227 - DNA, 25 bp, Homo sapien
gaaatgagagctgccgaaccacttt

SEQ ID NO: 1224228 - DNA, 25 bp, Homo sapien
tgcatctaaagagggtcagggtatt

SEQ ID NO: 1224229 - DNA, 25 bp, Homo sapien
gtgaaacattttaggagattgctct

SEQ ID NO: 1224230 - DNA, 25 bp, Homo sapien
tgcagttcttaatgaggtattaaac

SEQ ID NO: 1224231 - DNA, 25 bp, Homo sapien
tctataaaaatttgttataaaatgc

SEQ ID NO: 1224232 - DNA, 25 bp, Homo sapien
tataaaaatttgttataaaatgcca

SEQ ID NO: 1224233 - DNA, 25 bp, Homo sapien
ataaaaatttgttataaaatgccag

SEQ ID NO: 1224234 - DNA, 25 bp, Homo sapien
catccaaagaggctaaatggtaagc

SEQ ID NO: 1224235 - DNA, 25 bp, Homo sapien
tcaataaaagatctaatacccacag

SEQ ID NO: 1224236 - DNA, 25 bp, Homo sapien
cccatctgcactgatgactgagaaa

SEQ ID NO: 1224237 - DNA, 25 bp, Homo sapien
gattcataatacagccccatctgca

SEQ ID NO: 1224238 - DNA, 25 bp, Homo sapien
tcccattatgcagagaaacaaggtt

SEQ ID NO: 1224239 - DNA, 25 bp, Homo sapien
aaaactttggtattctctactgcag

SEQ ID NO: 1224240 - DNA, 25 bp, Homo sapien
ccctaatagttgctttcaggaacgt

SEQ ID NO: 1224241 - DNA, 25 bp, Homo sapien
gttgtaactagaaacaatctagctc

SEQ ID NO: 1224242 - DNA, 25 bp, Homo sapien
cccactgtacttcactttagcatgt

SEQ ID NO: 1224243 - DNA, 25 bp, Homo sapien
cactggaacctaaaatgttatttct

SEQ ID NO: 1224244 - DNA, 25 bp, Homo sapien
tctaagtacactggaacctaaaatg

SEQ ID NO: 1224245 - DNA, 25 bp, Homo sapien
cactttagcatgtaacaggcttgac

SEQ ID NO: 1224246 - DNA, 25 bp, Homo sapien
ccacctgctggtcaactaagagaat

SEQ ID NO: 1224247 - DNA, 25 bp, Homo sapien
gaatgtaatatggttctgttccaca

SEQ ID NO: 1224248 - DNA, 25 bp, Homo sapien
cattaatggtagactgccacctgct

SEQ ID NO: 1224249 - DNA, 25 bp, Homo sapien
agaattgtaatttctgggacaaggc

SEQ ID NO: 1224250 - DNA, 25 bp, Homo sapien
aaagcacctcttcagactacagctt

SEQ ID NO: 1224251 - DNA, 25 bp, Homo sapien
aagcttggaagtacaattcttttat

SEQ ID NO: 1224252 - DNA, 25 bp, Homo sapien
tcttcagactacagcttttttcaaa

SEQ ID NO: 1224253 - DNA, 25 bp, Homo sapien
tggaagtacaattcttttatgcaaa

SEQ ID NO: 1224254 - DNA, 25 bp, Homo sapien
tacgagcacatagacttaaccaagt

SEQ ID NO: 1224255 - DNA, 25 bp, Homo sapien
tctgttaaggccattactcgttttg

SEQ ID NO: 1224256 - DNA, 25 bp, Homo sapien
tagcactgcctatgaacttttggag

SEQ ID NO: 1224257 - DNA, 25 bp, Homo sapien
taacaggcccaatgaatggaaagcc

SEQ ID NO: 1224258 - DNA, 25 bp, Homo sapien
caaatatgtgataaggattcccagg

SEQ ID NO: 1224259 - DNA, 25 bp, Homo sapien
tagagggtgcacactgtttaaacag

SEQ ID NO: 1224260 - DNA, 25 bp, Homo sapien
gaaacttgtgaatcttgggcatcct

SEQ ID NO: 1224261 - DNA, 25 bp, Homo sapien
cacagggcaggtggataatgttttc

SEQ ID NO: 1224262 - DNA, 25 bp, Homo sapien
tgaattcgtattctcaagaccctct

SEQ ID NO: 1224263 - DNA, 25 bp, Homo sapien
cagctgcagccatttatgcgctggc

SEQ ID NO: 1224264 - DNA, 25 bp, Homo sapien
cagggctgggtttgatcagtgaatt

SEQ ID NO: 1224265 - DNA, 25 bp, Homo sapien
ccatttatgcgctggctttttcaca

SEQ ID NO: 1224266 - DNA, 25 bp, Homo sapien
tctcctaatgtggaaaccagacagt

SEQ ID NO: 1224267 - DNA, 25 bp, Homo sapien
aaatcagagtaaccagaagaaagtc

SEQ ID NO: 1224268 - DNA, 25 bp, Homo sapien
taaagtatctacaagtctcctaatg

SEQ ID NO: 1224269 - DNA, 25 bp, Homo sapien
ttctgtggtatgaaaggaacccatt

SEQ ID NO: 1224270 - DNA, 25 bp, Homo sapien
ttgacatctgggagcatggagatcg

SEQ ID NO: 1224271 - DNA, 25 bp, Homo sapien
catttgacatctgggagcatggaga

SEQ ID NO: 1224272 - DNA, 25 bp, Homo sapien
ctaagagaggaagcaaagctgtcat

SEQ ID NO: 1224273 - DNA, 25 bp, Homo sapien
gctgtcatttgacatctgggagcat

SEQ ID NO: 1224274 - DNA, 25 bp, Homo sapien
tttcaccgtcagctgtgagctgttt

SEQ ID NO: 1224275 - DNA, 25 bp, Homo sapien
ttttcaccgtcagctgtgagctgtt

SEQ ID NO: 1224276 - DNA, 25 bp, Homo sapien
gtcagctgtgagctgtttccaagtg

SEQ ID NO: 1224277 - DNA, 25 bp, Homo sapien
cgtcagctgtgagctgtttccaagt

SEQ ID NO: 1224278 - DNA, 25 bp, Homo sapien
tcaaaggcgcaaagctgttcacagg

SEQ ID NO: 1224279 - DNA, 25 bp, Homo sapien
catgatagactaactagagcctgga

SEQ ID NO: 1224280 - DNA, 25 bp, Homo sapien
ccaggttcggaatgctcctctaata

SEQ ID NO: 1224281 - DNA, 25 bp, Homo sapien
taaagtcctccagcattgtactcaa

SEQ ID NO: 1224282 - DNA, 25 bp, Homo sapien
tatgcaggggctgagcattagtctt

SEQ ID NO: 1224283 - DNA, 25 bp, Homo sapien
tctatgcaggggctgagcattagtc

SEQ ID NO: 1224284 - DNA, 25 bp, Homo sapien
gtataaagattttctatgcaggggc

SEQ ID NO: 1224285 - DNA, 25 bp, Homo sapien
agattttctatgcaggggctgagca

SEQ ID NO: 1224286 - DNA, 25 bp, Homo sapien
ggtgttaagtttctgggcatgcccc

SEQ ID NO: 1224287 - DNA, 25 bp, Homo sapien
gaaaatgagaacagccagacctcta

SEQ ID NO: 1224288 - DNA, 25 bp, Homo sapien
caaacagatgtattgccagggctct

SEQ ID NO: 1224289 - DNA, 25 bp, Homo sapien
ttctaggcttggtaaaacagtatcc

SEQ ID NO: 1224290 - DNA, 25 bp, Homo sapien
gcagctaggctgaatgtcatcttta

SEQ ID NO: 1224291 - DNA, 25 bp, Homo sapien
tgctggtcccatctaaggaaaactg

SEQ ID NO: 1224292 - DNA, 25 bp, Homo sapien
taagctacgacaaagagttctgcat

SEQ ID NO: 1224293 - DNA, 25 bp, Homo sapien
cacttaggcctaaagacactgctgg

SEQ ID NO: 1224294 - DNA, 25 bp, Homo sapien
tctttcactccccattttccatctt

SEQ ID NO: 1224295 - DNA, 25 bp, Homo sapien
atctcctctcttccacggacagcct

SEQ ID NO: 1224296 - DNA, 25 bp, Homo sapien
gatcttcatctcctctcttccacgg

SEQ ID NO: 1224297 - DNA, 25 bp, Homo sapien
tctcttccacggacagcctgcttca

SEQ ID NO: 1224298 - DNA, 25 bp, Homo sapien
aaagcaaaagtcatacggaccagaa

SEQ ID NO: 1224299 - DNA, 25 bp, Homo sapien
taaattagtcccgaagccttgccaa

SEQ ID NO: 1224300 - DNA, 25 bp, Homo sapien
catgtaagtggtactcaggtgccta

SEQ ID NO: 1224301 - DNA, 25 bp, Homo sapien
tgtgtgggagaaccccaaacttaca

SEQ ID NO: 1224302 - DNA, 25 bp, Homo sapien
ttttcaaccaaaggaggagcatgtg

SEQ ID NO: 1224303 - DNA, 25 bp, Homo sapien
gaaaccagagagacgaaatgccttg

SEQ ID NO: 1224304 - DNA, 25 bp, Homo sapien
tatagccaattctacctcatgggtg

SEQ ID NO: 1224305 - DNA, 25 bp, Homo sapien
cttcagttgatagagggacaccttc

SEQ ID NO: 1224306 - DNA, 25 bp, Homo sapien
ccagtgagaagttcaaagaggacag

SEQ ID NO: 1224307 - DNA, 25 bp, Homo sapien
aaactccaccaatcacaggcttcag

SEQ ID NO: 1224308 - DNA, 25 bp, Homo sapien
gaagttcaaagaggacagcacccaa

SEQ ID NO: 1224309 - DNA, 25 bp, Homo sapien
caaagaggacagcacccaaactcca

SEQ ID NO: 1224310 - DNA, 25 bp, Homo sapien
tattcctgctggatggcattcaacc

SEQ ID NO: 1224311 - DNA, 25 bp, Homo sapien
ttctggcatgttcaaagtagtgtga

SEQ ID NO: 1224312 - DNA, 25 bp, Homo sapien
gcgagcctcttcagagacacattct

SEQ ID NO: 1224313 - DNA, 25 bp, Homo sapien
tgttgaatgagtgagcgagcctctt

SEQ ID NO: 1224314 - DNA, 25 bp, Homo sapien
tatttctagcactcaaattgaacca

SEQ ID NO: 1224315 - DNA, 25 bp, Homo sapien
cactgttgattaaacctaattgctc

SEQ ID NO: 1224316 - DNA, 25 bp, Homo sapien
caaacatcacaggaatatcccacat

SEQ ID NO: 1224317 - DNA, 25 bp, Homo sapien
tgtctactgactaaaatgtggaagg

SEQ ID NO: 1224318 - DNA, 25 bp, Homo sapien
tgtgtcatgaatgttcgtcactgtc

SEQ ID NO: 1224319 - DNA, 25 bp, Homo sapien
tatacacgacacttatcacatgcca

SEQ ID NO: 1224320 - DNA, 25 bp, Homo sapien
tgtgtcaatagcaatagcctcattc

SEQ ID NO: 1224321 - DNA, 25 bp, Homo sapien
tcacatgccaggtacttattctaag

SEQ ID NO: 1224322 - DNA, 25 bp, Homo sapien
tatagcctatgggtcaaccagtgac

SEQ ID NO: 1224323 - DNA, 25 bp, Homo sapien
gaacacattcaaagtttaggccaca

SEQ ID NO: 1224324 - DNA, 25 bp, Homo sapien
aaagcaggcctgagtcaagagtccc

SEQ ID NO: 1224325 - DNA, 25 bp, Homo sapien
taccctggcagaacctttgcacctg

SEQ ID NO: 1224326 - DNA, 25 bp, Homo sapien
gcatattcaatttcccagtgccatt

SEQ ID NO: 1224327 - DNA, 25 bp, Homo sapien
tacggtgcaagctaagattctgatt

SEQ ID NO: 1224328 - DNA, 25 bp, Homo sapien
tatgcacagtttggaaccagctaaa

SEQ ID NO: 1224329 - DNA, 25 bp, Homo sapien
tgcaaacagtatgaagggtctaagt

SEQ ID NO: 1224330 - DNA, 25 bp, Homo sapien
gagatttgatatcttcaacaccagc

SEQ ID NO: 1224331 - DNA, 25 bp, Homo sapien
aactccagcaccaagtcgttccaga

SEQ ID NO: 1224332 - DNA, 25 bp, Homo sapien
cagttctgcccaatccacaggggta

SEQ ID NO: 1224333 - DNA, 25 bp, Homo sapien
caccaagtcgttccagaggattgaa

SEQ ID NO: 1224334 - DNA, 25 bp, Homo sapien
tacacttctagcttcctatcagagg

SEQ ID NO: 1224335 - DNA, 25 bp, Homo sapien
gcatcagggtacaggttttccgtca

SEQ ID NO: 1224336 - DNA, 25 bp, Homo sapien
tatatgtatataacagcccctggca

SEQ ID NO: 1224337 - DNA, 25 bp, Homo sapien
tgtgtgaagataaccctgcattacg

SEQ ID NO: 1224338 - DNA, 25 bp, Homo sapien
ttcacaaggaaaggaacagacgcat

SEQ ID NO: 1224339 - DNA, 25 bp, Homo sapien
ttaatttgatgagaggacctggtcg

SEQ ID NO: 1224340 - DNA, 25 bp, Homo sapien
tgtgtctcacctgcataagttcctg

SEQ ID NO: 1224341 - DNA, 25 bp, Homo sapien
tgactgaactatgatcctggtgacc

SEQ ID NO: 1224342 - DNA, 25 bp, Homo sapien
aaacagactctggttcatcacccca

SEQ ID NO: 1224343 - DNA, 25 bp, Homo sapien
ctgacatggcaaccatctgttgaca

SEQ ID NO: 1224344 - DNA, 25 bp, Homo sapien
tgtatttacattaggcacaagctcc

SEQ ID NO: 1224345 - DNA, 25 bp, Homo sapien
ctcaaatcatgtggtagggcaggga

SEQ ID NO: 1224346 - DNA, 25 bp, Homo sapien
gtggtgatgtcgcacaaaaatgtac

SEQ ID NO: 1224347 - DNA, 25 bp, Homo sapien
gattctgcttatatgaagtacttag

SEQ ID NO: 1224348 - DNA, 25 bp, Homo sapien
tccatttgaggtgccgaaaaagtcc

SEQ ID NO: 1224349 - DNA, 25 bp, Homo sapien
taatgccactactgaagtgtatatt

SEQ ID NO: 1224350 - DNA, 25 bp, Homo sapien
cctctcattctataggtaagggaac

SEQ ID NO: 1224351 - DNA, 25 bp, Homo sapien
gagacatgaccaggacaccactcta

SEQ ID NO: 1224352 - DNA, 25 bp, Homo sapien
tacatggctaattagtcacagagac

SEQ ID NO: 1224353 - DNA, 25 bp, Homo sapien
agatgtacggcagcaacccaagcat

SEQ ID NO: 1224354 - DNA, 25 bp, Homo sapien
tgccctaatcacattaggtggaggc

SEQ ID NO: 1224355 - DNA, 25 bp, Homo sapien
gccctaatcacattaggtggaggca

SEQ ID NO: 1224356 - DNA, 25 bp, Homo sapien
ccctaatcacattaggtggaggcat

SEQ ID NO: 1224357 - DNA, 25 bp, Homo sapien
ctgccctaatcacattaggtggagg

SEQ ID NO: 1224358 - DNA, 25 bp, Homo sapien
gccagcacaactgccggcaatgctt

SEQ ID NO: 1224359 - DNA, 25 bp, Homo sapien
gcttgccaataagccagatgctgcc

SEQ ID NO: 1224360 - DNA, 25 bp, Homo sapien
gaatagcaaccatgttctcagtctg

SEQ ID NO: 1224361 - DNA, 25 bp, Homo sapien
gtaggctcagccacatgacaggccg

SEQ ID NO: 1224362 - DNA, 25 bp, Homo sapien
ataattcatgtcctctccgcacagc

SEQ ID NO: 1224363 - DNA, 25 bp, Homo sapien
caataattcatgtcctctccgcaca

SEQ ID NO: 1224364 - DNA, 25 bp, Homo sapien
tcaccctgcccaataattcatgtcc

SEQ ID NO: 1224365 - DNA, 25 bp, Homo sapien
ctgcccaataattcatgtcctctcc

SEQ ID NO: 1224366 - DNA, 25 bp, Homo sapien
atcgccgaagttcagagcaggatgc

SEQ ID NO: 1224367 - DNA, 25 bp, Homo sapien
tcagagcaggatgcgcttcggaaac

SEQ ID NO: 1224368 - DNA, 25 bp, Homo sapien
gatgcgcttcggaaacctgaagcag

SEQ ID NO: 1224369 - DNA, 25 bp, Homo sapien
aagttcagagcaggatgcgcttcgg

SEQ ID NO: 1224370 - DNA, 25 bp, Homo sapien
tgcgtgtcccattctgccatttatc

SEQ ID NO: 1224371 - DNA, 25 bp, Homo sapien
tttcccctatgcgtgtcccattctg

SEQ ID NO: 1224372 - DNA, 25 bp, Homo sapien
gcctttccactcaatttggacaatg

SEQ ID NO: 1224373 - DNA, 25 bp, Homo sapien
tatctgaattgggatagattgtgcc

SEQ ID NO: 1224374 - DNA, 25 bp, Homo sapien
tataaaaaggtggtaggatgcttcc

SEQ ID NO: 1224375 - DNA, 25 bp, Homo sapien
cagagaggggcggtttctcctcaaa

SEQ ID NO: 1224376 - DNA, 25 bp, Homo sapien
ttcttcttagcctgaatttaagccc

SEQ ID NO: 1224377 - DNA, 25 bp, Homo sapien
gaatttaagccctgcatcatacatg

SEQ ID NO: 1224378 - DNA, 25 bp, Homo sapien
tcatattcagatagtaattaccacc

SEQ ID NO: 1224379 - DNA, 25 bp, Homo sapien
ccataataatgaggagatgctgtca

SEQ ID NO: 1224380 - DNA, 25 bp, Homo sapien
aggccagtgcaggctatgcccactt

SEQ ID NO: 1224381 - DNA, 25 bp, Homo sapien
taccaccaaccctatattttccata

SEQ ID NO: 1224382 - DNA, 25 bp, Homo sapien
gctggggaagctgccggagatggca

SEQ ID NO: 1224383 - DNA, 25 bp, Homo sapien
aagctgccggagatggcagttagta

SEQ ID NO: 1224384 - DNA, 25 bp, Homo sapien
cctgtcctcatattgtggagctggg

SEQ ID NO: 1224385 - DNA, 25 bp, Homo sapien
tgccggagatggcagttagtaggct

SEQ ID NO: 1224386 - DNA, 25 bp, Homo sapien
tacaatagggaattgaagattagag

SEQ ID NO: 1224387 - DNA, 25 bp, Homo sapien
tgactatgacactgttctcaacatc

SEQ ID NO: 1224388 - DNA, 25 bp, Homo sapien
gcctgagctgactatgacactgttc

SEQ ID NO: 1224389 - DNA, 25 bp, Homo sapien
gagctgactatgacactgttctcaa

SEQ ID NO: 1224390 - DNA, 25 bp, Homo sapien
tattcaaggagtctgattgcatctg

SEQ ID NO: 1224391 - DNA, 25 bp, Homo sapien
attcaaggagtctgattgcatctgg

SEQ ID NO: 1224392 - DNA, 25 bp, Homo sapien
ctattcaaggagtctgattgcatct

SEQ ID NO: 1224393 - DNA, 25 bp, Homo sapien
ttcaaggagtctgattgcatctggc

SEQ ID NO: 1224394 - DNA, 25 bp, Homo sapien
cagcattgtcaacatagagggaaga

SEQ ID NO: 1224395 - DNA, 25 bp, Homo sapien
cattgtcaacatagagggaagaaga

SEQ ID NO: 1224396 - DNA, 25 bp, Homo sapien
aggcccagcattgtcaacatagagg

SEQ ID NO: 1224397 - DNA, 25 bp, Homo sapien
gcccagcattgtcaacatagaggga

SEQ ID NO: 1224398 - DNA, 25 bp, Homo sapien
aagctgttcttaattgagaaggtgg

SEQ ID NO: 1224399 - DNA, 25 bp, Homo sapien
tcttaattgagaaggtggtataggc

SEQ ID NO: 1224400 - DNA, 25 bp, Homo sapien
taattgagaaggtggtataggcagc

SEQ ID NO: 1224401 - DNA, 25 bp, Homo sapien
ctgagagccgtgaagataaaaggga

SEQ ID NO: 1224402 - DNA, 25 bp, Homo sapien
tagtctgccaagattcatctaaaga

SEQ ID NO: 1224403 - DNA, 25 bp, Homo sapien
tcctaaccatcatgcaagcctccga

SEQ ID NO: 1224404 - DNA, 25 bp, Homo sapien
ccatagtctgccaagattcatctaa

SEQ ID NO: 1224405 - DNA, 25 bp, Homo sapien
taaccatcatgcaagcctccgacca

SEQ ID NO: 1224406 - DNA, 25 bp, Homo sapien
tcaagccgcaatggtgagtcagccg

SEQ ID NO: 1224407 - DNA, 25 bp, Homo sapien
tgagttagcggcatccctcctggat

SEQ ID NO: 1224408 - DNA, 25 bp, Homo sapien
ccacagagccatagaggagacgtaa

SEQ ID NO: 1224409 - DNA, 25 bp, Homo sapien
cctggatgtagatggaagacctgca

SEQ ID NO: 1224410 - DNA, 25 bp, Homo sapien
caggtaagttatgggtgctagacaa

SEQ ID NO: 1224411 - DNA, 25 bp, Homo sapien
tgggacttagaggtaccacggccac

SEQ ID NO: 1224412 - DNA, 25 bp, Homo sapien
tagacaaagcctaatgcggaagcct

SEQ ID NO: 1224413 - DNA, 25 bp, Homo sapien
gcggaagcctgtgccatctgaagag

SEQ ID NO: 1224414 - DNA, 25 bp, Homo sapien
gaggagtgacccttgactcctccct

SEQ ID NO: 1224415 - DNA, 25 bp, Homo sapien
cacctcgggactcaccctgtggtct

SEQ ID NO: 1224416 - DNA, 25 bp, Homo sapien
aggcagtgtgctgcaaccccagagg

SEQ ID NO: 1224417 - DNA, 25 bp, Homo sapien
cgggtcggaggaggcttcaccgcca

SEQ ID NO: 1224418 - DNA, 25 bp, Homo sapien
ggctaggtcttcaccccaaggtcaa

SEQ ID NO: 1224419 - DNA, 25 bp, Homo sapien
ctaggaatgaccatgtgcagacccc

SEQ ID NO: 1224420 - DNA, 25 bp, Homo sapien
tgggaagtgccacatcacatatctg

SEQ ID NO: 1224421 - DNA, 25 bp, Homo sapien
gaggagaggctcaaaccatggctag

SEQ ID NO: 1224422 - DNA, 25 bp, Homo sapien
tctggaaataaagattcgtagcaaa

SEQ ID NO: 1224423 - DNA, 25 bp, Homo sapien
tcagggacgctccattttgtgtgca

SEQ ID NO: 1224424 - DNA, 25 bp, Homo sapien
gatgagggcccgatggtccctctga

SEQ ID NO: 1224425 - DNA, 25 bp, Homo sapien
tttgtgtgcatggtgactaatctgg

SEQ ID NO: 1224426 - DNA, 25 bp, Homo sapien
gatagaaagagctctcgaaacgctt

SEQ ID NO: 1224427 - DNA, 25 bp, Homo sapien
tatcccctggagtaacacaagggca

SEQ ID NO: 1224428 - DNA, 25 bp, Homo sapien
ggcccatggccttgttatcccctgg

SEQ ID NO: 1224429 - DNA, 25 bp, Homo sapien
gcaccatatggagagatacaaacct

SEQ ID NO: 1224430 - DNA, 25 bp, Homo sapien
cagcctctgtccttgtcacagtgcc

SEQ ID NO: 1224431 - DNA, 25 bp, Homo sapien
tcagcctctgtccttgtcacagtgc

SEQ ID NO: 1224432 - DNA, 25 bp, Homo sapien
cctggtgagttgctggaacagcgat

SEQ ID NO: 1224433 - DNA, 25 bp, Homo sapien
gtgagttgctggaacagcgatgtga

SEQ ID NO: 1224434 - DNA, 25 bp, Homo sapien
tgagttgctggaacagcgatgtgag

SEQ ID NO: 1224435 - DNA, 25 bp, Homo sapien
ggccctggtgagttgctggaacagc

SEQ ID NO: 1224436 - DNA, 25 bp, Homo sapien
gactaggtgactgcgaaggctcacc

SEQ ID NO: 1224437 - DNA, 25 bp, Homo sapien
ctgatcaaggccttgatttcccatc

SEQ ID NO: 1224438 - DNA, 25 bp, Homo sapien
tagcccagggtcagtctaagcagag

SEQ ID NO: 1224439 - DNA, 25 bp, Homo sapien
tcccatcagtaagccagtggaagac

SEQ ID NO: 1224440 - DNA, 25 bp, Homo sapien
ttcccaaattgatttcccttccaca

SEQ ID NO: 1224441 - DNA, 25 bp, Homo sapien
ccaaattgatttcccttccacacca

SEQ ID NO: 1224442 - DNA, 25 bp, Homo sapien
ctttgtcagatgctccttcccaaat

SEQ ID NO: 1224443 - DNA, 25 bp, Homo sapien
attgatttcccttccacaccagcat

SEQ ID NO: 1224444 - DNA, 25 bp, Homo sapien
tcaccgaagcaggtgtagcagttgt

SEQ ID NO: 1224445 - DNA, 25 bp, Homo sapien
gttcaccgaagcaggtgtagcagtt

SEQ ID NO: 1224446 - DNA, 25 bp, Homo sapien
ccgaagcaggtgtagcagttgtaag

SEQ ID NO: 1224447 - DNA, 25 bp, Homo sapien
tgtagcagttgtaagggcatgaggg

SEQ ID NO: 1224448 - DNA, 25 bp, Homo sapien
tagagcaccagttcgctgcaagctt

SEQ ID NO: 1224449 - DNA, 25 bp, Homo sapien
tcagctctgcttgggaactgggatc

SEQ ID NO: 1224450 - DNA, 25 bp, Homo sapien
tcagaaaccaggacttagagcacca

SEQ ID NO: 1224451 - DNA, 25 bp, Homo sapien
aacctgcactattttcaggaatgga

SEQ ID NO: 1224452 - DNA, 25 bp, Homo sapien
aatgctcagaatatatccagttgtt

SEQ ID NO: 1224453 - DNA, 25 bp, Homo sapien
taatgatgcttagaggcctcagctg

SEQ ID NO: 1224454 - DNA, 25 bp, Homo sapien
tgaggccccacttatggaagacatt

SEQ ID NO: 1224455 - DNA, 25 bp, Homo sapien
gaactctcttgtatccagggtcttg

SEQ ID NO: 1224456 - DNA, 25 bp, Homo sapien
tgccggggtaagaagtctgtccaag

SEQ ID NO: 1224457 - DNA, 25 bp, Homo sapien
gggtaagaagtctgtccaagatggc

SEQ ID NO: 1224458 - DNA, 25 bp, Homo sapien
ctgtccaagatggcacggccccgtg

SEQ ID NO: 1224459 - DNA, 25 bp, Homo sapien
acagtgccggggtaagaagtctgtc

SEQ ID NO: 1224460 - DNA, 25 bp, Homo sapien
cctgaactttcatggcctcgtggac

SEQ ID NO: 1224461 - DNA, 25 bp, Homo sapien
cacatcagagccaatatggaggcca

SEQ ID NO: 1224462 - DNA, 25 bp, Homo sapien
tcccggtgaaatagctagaacctcc

SEQ ID NO: 1224463 - DNA, 25 bp, Homo sapien
tcctggaagctcaaacagtgaccca

SEQ ID NO: 1224464 - DNA, 25 bp, Homo sapien
gattatctttgccaaaaggacttga

SEQ ID NO: 1224465 - DNA, 25 bp, Homo sapien
agattatctttgccaaaaggacttg

SEQ ID NO: 1224466 - DNA, 25 bp, Homo sapien
ttatctttgccaaaaggacttgaaa

SEQ ID NO: 1224467 - DNA, 25 bp, Homo sapien
tatctttgccaaaaggacttgaaac

SEQ ID NO: 1224468 - DNA, 25 bp, Homo sapien
tgtccgacacccaggtacaatgggc

SEQ ID NO: 1224469 - DNA, 25 bp, Homo sapien
caaagtgcggctttgtccaggtagc

SEQ ID NO: 1224470 - DNA, 25 bp, Homo sapien
ctacgcatcctagccagggaggcaa

SEQ ID NO: 1224471 - DNA, 25 bp, Homo sapien
agcactccaggcctttttagaaggg

SEQ ID NO: 1224472 - DNA, 25 bp, Homo sapien
agtcctgccatcttgaactacgcat

SEQ ID NO: 1224473 - DNA, 25 bp, Homo sapien
tgggtcacaaccctaaacgggcagc

SEQ ID NO: 1224474 - DNA, 25 bp, Homo sapien
gttgataaccacagcgactcctggg

SEQ ID NO: 1224475 - DNA, 25 bp, Homo sapien
catgtgtccgtttgagctctcgcag

SEQ ID NO: 1224476 - DNA, 25 bp, Homo sapien
gatgggctccaatgcagatagcgca

SEQ ID NO: 1224477 - DNA, 25 bp, Homo sapien
tccaagccttaatgatacaatgggt

SEQ ID NO: 1224478 - DNA, 25 bp, Homo sapien
taaaaacagtgtacggatgtgtatc

SEQ ID NO: 1224479 - DNA, 25 bp, Homo sapien
taatgtaatagaattggcatgaggc

SEQ ID NO: 1224480 - DNA, 25 bp, Homo sapien
caggctttttcaatgcacactgtat

SEQ ID NO: 1224481 - DNA, 25 bp, Homo sapien
ccccggcttgccagagcagggccgt

SEQ ID NO: 1224482 - DNA, 25 bp, Homo sapien
ctgctggatggccagccccggcttg

SEQ ID NO: 1224483 - DNA, 25 bp, Homo sapien
ctgctgctccacaatgctgctggat

SEQ ID NO: 1224484 - DNA, 25 bp, Homo sapien
caaaaatgtcaatgccttcccaggc

SEQ ID NO: 1224485 - DNA, 25 bp, Homo sapien
gatctacatatgcttgatctcagca

SEQ ID NO: 1224486 - DNA, 25 bp, Homo sapien
atctacatatgcttgatctcagcat

SEQ ID NO: 1224487 - DNA, 25 bp, Homo sapien
gagatctacatatgcttgatctcag

SEQ ID NO: 1224488 - DNA, 25 bp, Homo sapien
tgtgtatatttgaactaggagatct

SEQ ID NO: 1224489 - DNA, 25 bp, Homo sapien
gacctggctgatgagatccatatga

SEQ ID NO: 1224490 - DNA, 25 bp, Homo sapien
agacctggctgatgagatccatatg

SEQ ID NO: 1224491 - DNA, 25 bp, Homo sapien
gagacctggctgatgagatccatat

SEQ ID NO: 1224492 - DNA, 25 bp, Homo sapien
gtaagcgctgctagccctggcatgc

SEQ ID NO: 1224493 - DNA, 25 bp, Homo sapien
gaggtgccaggcaacaatgtgtttt

SEQ ID NO: 1224494 - DNA, 25 bp, Homo sapien
tctcttgtgagtgaaggccgtaagc

SEQ ID NO: 1224495 - DNA, 25 bp, Homo sapien
cagtgccaagaaaagcatactcgag

SEQ ID NO: 1224496 - DNA, 25 bp, Homo sapien
ggactcagtctggcatgcaccatca

SEQ ID NO: 1224497 - DNA, 25 bp, Homo sapien
tggactcagtctggcatgcaccatc

SEQ ID NO: 1224498 - DNA, 25 bp, Homo sapien
ctggactcagtctggcatgcaccat

SEQ ID NO: 1224499 - DNA, 25 bp, Homo sapien
gactcagtctggcatgcaccatcat

SEQ ID NO: 1224500 - DNA, 25 bp, Homo sapien
tggcagtgacgctgagagcatggaa

SEQ ID NO: 1224501 - DNA, 25 bp, Homo sapien
aatcgtaggattaaccatgattggg

SEQ ID NO: 1224502 - DNA, 25 bp, Homo sapien
cagtgcgaacttaatcgtaggatta

SEQ ID NO: 1224503 - DNA, 25 bp, Homo sapien
tctcagtgttgatatagtatgtcct

SEQ ID NO: 1224504 - DNA, 25 bp, Homo sapien
tataaccctgaacttgataggaacg

SEQ ID NO: 1224505 - DNA, 25 bp, Homo sapien
tacatatgcctctagcagatgcctc

SEQ ID NO: 1224506 - DNA, 25 bp, Homo sapien
ggaacgttcagaactatctgccaga

SEQ ID NO: 1224507 - DNA, 25 bp, Homo sapien
ttctttggcttcatcgtacatatgc

SEQ ID NO: 1224508 - DNA, 25 bp, Homo sapien
tctgcctgctgacagtagaatgttc

SEQ ID NO: 1224509 - DNA, 25 bp, Homo sapien
tccatggacatggaatgcccacatg

SEQ ID NO: 1224510 - DNA, 25 bp, Homo sapien
gcccacatggaactagccaagtgaa

SEQ ID NO: 1224511 - DNA, 25 bp, Homo sapien
cttctcatggtgagaatggactcca

SEQ ID NO: 1224512 - DNA, 25 bp, Homo sapien
gctacttcccgctcatggttgttgg

SEQ ID NO: 1224513 - DNA, 25 bp, Homo sapien
gtggccatggctgctacttcccgct

SEQ ID NO: 1224514 - DNA, 25 bp, Homo sapien
ccgtgacaatttgcagagtctgcct

SEQ ID NO: 1224515 - DNA, 25 bp, Homo sapien
catggttgttggcaaggcccgtgac

SEQ ID NO: 1224516 - DNA, 25 bp, Homo sapien
tcgagggcactctgtgctctccttc

SEQ ID NO: 1224517 - DNA, 25 bp, Homo sapien
tggtcgagggcactctgtgctctcc

SEQ ID NO: 1224518 - DNA, 25 bp, Homo sapien
gctggtcgagggcactctgtgctct

SEQ ID NO: 1224519 - DNA, 25 bp, Homo sapien
tgctggtcgagggcactctgtgctc

SEQ ID NO: 1224520 - DNA, 25 bp, Homo sapien
gcaggcaagagattatgttcaggga

SEQ ID NO: 1224521 - DNA, 25 bp, Homo sapien
atattatgtcctctcatatcaaaac

SEQ ID NO: 1224522 - DNA, 25 bp, Homo sapien
caagagattatgttcagggaaagtg

SEQ ID NO: 1224523 - DNA, 25 bp, Homo sapien
ggcaagagattatgttcagggaaag

SEQ ID NO: 1224524 - DNA, 25 bp, Homo sapien
ctctgataatgtgatcctggtgaca

SEQ ID NO: 1224525 - DNA, 25 bp, Homo sapien
gatcctggtgacagaggatagcagt

SEQ ID NO: 1224526 - DNA, 25 bp, Homo sapien
tagcagtgaggccatgtgccgtcag

SEQ ID NO: 1224527 - DNA, 25 bp, Homo sapien
ttttgacaaatagtagtcagaggcc

SEQ ID NO: 1224528 - DNA, 25 bp, Homo sapien
agtttttacaggctcccagatttat

SEQ ID NO: 1224529 - DNA, 25 bp, Homo sapien
agttcataaacttccctgacctgct

SEQ ID NO: 1224530 - DNA, 25 bp, Homo sapien
tattcccagcgttgcggtgtggccg

SEQ ID NO: 1224531 - DNA, 25 bp, Homo sapien
ttatgattagatacagcaagagttc

SEQ ID NO: 1224532 - DNA, 25 bp, Homo sapien
ctgctgggagcagagactggaccat

SEQ ID NO: 1224533 - DNA, 25 bp, Homo sapien
tcttctacagcccaaaagtgtggga

SEQ ID NO: 1224534 - DNA, 25 bp, Homo sapien
tccttcttctacagcccaaaagtgt

SEQ ID NO: 1224535 - DNA, 25 bp, Homo sapien
aaagtgtgggaatgtgaagtgggtc

SEQ ID NO: 1224536 - DNA, 25 bp, Homo sapien
tgaagtgggtcaataaggccagtgt

SEQ ID NO: 1224537 - DNA, 25 bp, Homo sapien
gggtccagagcactaagcccctgct

SEQ ID NO: 1224538 - DNA, 25 bp, Homo sapien
catttggtttacttttgggtgcctg

SEQ ID NO: 1224539 - DNA, 25 bp, Homo sapien
ccatgctcctgagagatctgtaaga

SEQ ID NO: 1224540 - DNA, 25 bp, Homo sapien
gcctctgaatctccctctcatttgg

SEQ ID NO: 1224541 - DNA, 25 bp, Homo sapien
ggcagttaatagaaggagacacagc

SEQ ID NO: 1224542 - DNA, 25 bp, Homo sapien
tctcttctgatgcacatgctgccta

SEQ ID NO: 1224543 - DNA, 25 bp, Homo sapien
catgctgcctaaaagaaacatctag

SEQ ID NO: 1224544 - DNA, 25 bp, Homo sapien
ccataatgacaaatttccctttggg

SEQ ID NO: 1224545 - DNA, 25 bp, Homo sapien
ccagtgccacgaaggccaagatttt

SEQ ID NO: 1224546 - DNA, 25 bp, Homo sapien
atgggcttcactttgacatcctctc

SEQ ID NO: 1224547 - DNA, 25 bp, Homo sapien
gggcttcactttgacatcctctcca

SEQ ID NO: 1224548 - DNA, 25 bp, Homo sapien
tttcaacaaaatctagccccaggcc

SEQ ID NO: 1224549 - DNA, 25 bp, Homo sapien
actggcggacatggcccaaacccat

SEQ ID NO: 1224550 - DNA, 25 bp, Homo sapien
aaacccatgaccctgcgctcgcctc

SEQ ID NO: 1224551 - DNA, 25 bp, Homo sapien
ctgcacaccaacctgcatttctcca

SEQ ID NO: 1224552 - DNA, 25 bp, Homo sapien
cctagactggcggacatggcccaaa

SEQ ID NO: 1224553 - DNA, 25 bp, Homo sapien
ctgtattccctgaaagagtctcgct

SEQ ID NO: 1224554 - DNA, 25 bp, Homo sapien
tctcgctctgggatgtagcccatgg

SEQ ID NO: 1224555 - DNA, 25 bp, Homo sapien
cgctctgggatgtagcccatggccc

SEQ ID NO: 1224556 - DNA, 25 bp, Homo sapien
gtctcgctctgggatgtagcccatg

SEQ ID NO: 1224557 - DNA, 25 bp, Homo sapien
agtgtgacttcttcaacagcttctc

SEQ ID NO: 1224558 - DNA, 25 bp, Homo sapien
tggagagtgtgacttcttcaacagc

SEQ ID NO: 1224559 - DNA, 25 bp, Homo sapien
gagagtgtgacttcttcaacagctt

SEQ ID NO: 1224560 - DNA, 25 bp, Homo sapien
gagtgtgacttcttcaacagcttct

SEQ ID NO: 1224561 - DNA, 25 bp, Homo sapien
tccaggccaagtgtcggagcagcat

SEQ ID NO: 1224562 - DNA, 25 bp, Homo sapien
ttggtgagtctacaggaatggagcc

SEQ ID NO: 1224563 - DNA, 25 bp, Homo sapien
gggatcaggcctgagcacagaacat

SEQ ID NO: 1224564 - DNA, 25 bp, Homo sapien
gcaggcgagagtcagggtgtcggca

SEQ ID NO: 1224565 - DNA, 25 bp, Homo sapien
gagcacagaacatcaagatctaagg

SEQ ID NO: 1224566 - DNA, 25 bp, Homo sapien
atggtttgcactccctcaacctcat

SEQ ID NO: 1224567 - DNA, 25 bp, Homo sapien
gcgttgtctcccttgcacatgtcct

SEQ ID NO: 1224568 - DNA, 25 bp, Homo sapien
tgtcctctggcgtaaccttggtcgt

SEQ ID NO: 1224569 - DNA, 25 bp, Homo sapien
aacctcattctgtaatcggcggcat

SEQ ID NO: 1224570 - DNA, 25 bp, Homo sapien
tccaaggctgaattagtgagatgct

SEQ ID NO: 1224571 - DNA, 25 bp, Homo sapien
aaagcagatgctaggtcaataggtc

SEQ ID NO: 1224572 - DNA, 25 bp, Homo sapien
gatgcacatgagagatacaggcctt

SEQ ID NO: 1224573 - DNA, 25 bp, Homo sapien
tataggccataccttgagtagcaag

SEQ ID NO: 1224574 - DNA, 25 bp, Homo sapien
gagtttcagcccagacatcaagcat

SEQ ID NO: 1224575 - DNA, 25 bp, Homo sapien
tatggagtgcctactgtgagcagga

SEQ ID NO: 1224576 - DNA, 25 bp, Homo sapien
gatgggctaattcacaacagttcct

SEQ ID NO: 1224577 - DNA, 25 bp, Homo sapien
gaatgacaccttgggcttaagaagc

SEQ ID NO: 1224578 - DNA, 25 bp, Homo sapien
cgctgagtttcagactgaatgttta

SEQ ID NO: 1224579 - DNA, 25 bp, Homo sapien
tagcacaataactgccagcgctttg

SEQ ID NO: 1224580 - DNA, 25 bp, Homo sapien
taactgccagcgctttgctctgcca

SEQ ID NO: 1224581 - DNA, 25 bp, Homo sapien
tttcatagcacaataactgccagcg

SEQ ID NO: 1224582 - DNA, 25 bp, Homo sapien
taactggctgagattcaagacatgg

SEQ ID NO: 1224583 - DNA, 25 bp, Homo sapien
cccactgtgaccagcgacatgtgcg

SEQ ID NO: 1224584 - DNA, 25 bp, Homo sapien
agattcaagacatggttggcggtgt

SEQ ID NO: 1224585 - DNA, 25 bp, Homo sapien
catgtgcgagtgataactggctgag

SEQ ID NO: 1224586 - DNA, 25 bp, Homo sapien
aagttcacctgggtcgatgggtgag

SEQ ID NO: 1224587 - DNA, 25 bp, Homo sapien
aattgatccggccatgttcagaagt

SEQ ID NO: 1224588 - DNA, 25 bp, Homo sapien
gaggtaaaagcaaattgatccggcc

SEQ ID NO: 1224589 - DNA, 25 bp, Homo sapien
ccggccatgttcagaagtacttcct

SEQ ID NO: 1224590 - DNA, 25 bp, Homo sapien
aagcaaattgatccggccatgttca

SEQ ID NO: 1224591 - DNA, 25 bp, Homo sapien
atttgcaccgggactgggtgttgca

SEQ ID NO: 1224592 - DNA, 25 bp, Homo sapien
tcatccagatgatatagaatttgca

SEQ ID NO: 1224593 - DNA, 25 bp, Homo sapien
tatagaatttgcaccgggactgggt

SEQ ID NO: 1224594 - DNA, 25 bp, Homo sapien
gatgatatagaatttgcaccgggac

SEQ ID NO: 1224595 - DNA, 25 bp, Homo sapien
ggagactcttaagatttcagtggag

SEQ ID NO: 1224596 - DNA, 25 bp, Homo sapien
gcttattcccaattaccgatccttg

SEQ ID NO: 1224597 - DNA, 25 bp, Homo sapien
ccgatccttgatagaataggtcctg

SEQ ID NO: 1224598 - DNA, 25 bp, Homo sapien
tttcctaacaagcactggagactct

SEQ ID NO: 1224599 - DNA, 25 bp, Homo sapien
tggggaatagtttgaccacctctgg

SEQ ID NO: 1224600 - DNA, 25 bp, Homo sapien
aatagtttgaccacctctggatgaa

SEQ ID NO: 1224601 - DNA, 25 bp, Homo sapien
cttggggaatagtttgaccacctct

SEQ ID NO: 1224602 - DNA, 25 bp, Homo sapien
gggaatagtttgaccacctctggat

SEQ ID NO: 1224603 - DNA, 25 bp, Homo sapien
gtttccaggttgctgaaatcaccat

SEQ ID NO: 1224604 - DNA, 25 bp, Homo sapien
tgtttccaggttgctgaaatcacca

SEQ ID NO: 1224605 - DNA, 25 bp, Homo sapien
ctgtttccaggttgctgaaatcacc

SEQ ID NO: 1224606 - DNA, 25 bp, Homo sapien
ccatttgattggtttataggacagg

SEQ ID NO: 1224607 - DNA, 25 bp, Homo sapien
cctgtaggtataagttgctactcca

SEQ ID NO: 1224608 - DNA, 25 bp, Homo sapien
tttcttgcctgtaggtataagttgc

SEQ ID NO: 1224609 - DNA, 25 bp, Homo sapien
attggtttataggacagggctggct

SEQ ID NO: 1224610 - DNA, 25 bp, Homo sapien
agcacgcattttctcacaattaggg

SEQ ID NO: 1224611 - DNA, 25 bp, Homo sapien
gatgtttgaagccatcaagcacgca

SEQ ID NO: 1224612 - DNA, 25 bp, Homo sapien
catggaggttgtattggttcacaga

SEQ ID NO: 1224613 - DNA, 25 bp, Homo sapien
tggcaactcgtaaaaagacgacagc

SEQ ID NO: 1224614 - DNA, 25 bp, Homo sapien
gagcttcccagtcaccccagctctg

SEQ ID NO: 1224615 - DNA, 25 bp, Homo sapien
ccgaccctcagagacaccatctgca

SEQ ID NO: 1224616 - DNA, 25 bp, Homo sapien
gggtcatgcagaaacctccacttcc

SEQ ID NO: 1224617 - DNA, 25 bp, Homo sapien
cccagctctgcatcgggtcatgcag

SEQ ID NO: 1224618 - DNA, 25 bp, Homo sapien
cccttccatttctcccaaatgagca

SEQ ID NO: 1224619 - DNA, 25 bp, Homo sapien
ccttccatttctcccaaatgagcat

SEQ ID NO: 1224620 - DNA, 25 bp, Homo sapien
ttcccttccatttctcccaaatgag

SEQ ID NO: 1224621 - DNA, 25 bp, Homo sapien
ttccatttctcccaaatgagcatac

SEQ ID NO: 1224622 - DNA, 25 bp, Homo sapien
tgtttgtgtttggacagggctgccc

SEQ ID NO: 1224623 - DNA, 25 bp, Homo sapien
cacatctgtgtaggtagggacacca

SEQ ID NO: 1224624 - DNA, 25 bp, Homo sapien
aacaccagaggatcttattagctga

SEQ ID NO: 1224625 - DNA, 25 bp, Homo sapien
tagggacaccactgccagcgtgttt

SEQ ID NO: 1224626 - DNA, 25 bp, Homo sapien
caccgactggcatgctgacagaatc

SEQ ID NO: 1224627 - DNA, 25 bp, Homo sapien
ggattcggcatcacagatttgactg

SEQ ID NO: 1224628 - DNA, 25 bp, Homo sapien
catggatgacattgcagggaacgag

SEQ ID NO: 1224629 - DNA, 25 bp, Homo sapien
gagcacatgatgacttgaggcacct

SEQ ID NO: 1224630 - DNA, 25 bp, Homo sapien
agcagctctgagacaccttttcacc

SEQ ID NO: 1224631 - DNA, 25 bp, Homo sapien
caggggtctggagagactcattctt

SEQ ID NO: 1224632 - DNA, 25 bp, Homo sapien
gagacaccttttcacccactgggtg

SEQ ID NO: 1224633 - DNA, 25 bp, Homo sapien
actgagcagctctgagacacctttt

SEQ ID NO: 1224634 - DNA, 25 bp, Homo sapien
tgatagcagggacaacctaaaagag

SEQ ID NO: 1224635 - DNA, 25 bp, Homo sapien
tacactctgatagcagggacaacct

SEQ ID NO: 1224636 - DNA, 25 bp, Homo sapien
ggacaacctaaaagagggtctgatg

SEQ ID NO: 1224637 - DNA, 25 bp, Homo sapien
tcttttgttccttacactctgatag

SEQ ID NO: 1224638 - DNA, 25 bp, Homo sapien
ctgaggttgtaggattcatgaggca

SEQ ID NO: 1224639 - DNA, 25 bp, Homo sapien
tgaggttgtaggattcatgaggcat

SEQ ID NO: 1224640 - DNA, 25 bp, Homo sapien
ggaatggtatcacagaactagagct

SEQ ID NO: 1224641 - DNA, 25 bp, Homo sapien
gaatggtatcacagaactagagctt

SEQ ID NO: 1224642 - DNA, 25 bp, Homo sapien
tggaatggtatcacagaactagagc

SEQ ID NO: 1224643 - DNA, 25 bp, Homo sapien
ctggaatggtatcacagaactagag

SEQ ID NO: 1224644 - DNA, 25 bp, Homo sapien
ctgtccccaagagcgtccactgaaa

SEQ ID NO: 1224645 - DNA, 25 bp, Homo sapien
gtccccaagagcgtccactgaaaag

SEQ ID NO: 1224646 - DNA, 25 bp, Homo sapien
aaaagctgtcagaggcatccatgtg

SEQ ID NO: 1224647 - DNA, 25 bp, Homo sapien
actgaaaagctgtcagaggcatcca

SEQ ID NO: 1224648 - DNA, 25 bp, Homo sapien
ccaccatctctctgaaaggagcttg

SEQ ID NO: 1224649 - DNA, 25 bp, Homo sapien
ccaaggaagtttatggtgtttgtca

SEQ ID NO: 1224650 - DNA, 25 bp, Homo sapien
ggagcttggtgcaccaggatgacca

SEQ ID NO: 1224651 - DNA, 25 bp, Homo sapien
ggatgaccacttccctcggtggctg

SEQ ID NO: 1224652 - DNA, 25 bp, Homo sapien
catccgatgcgccttggtttagctg

SEQ ID NO: 1224653 - DNA, 25 bp, Homo sapien
tcaatatacaaagatagagccagct

SEQ ID NO: 1224654 - DNA, 25 bp, Homo sapien
gagccagctttgtgcatcgaaaagg

SEQ ID NO: 1224655 - DNA, 25 bp, Homo sapien
gtcatactgcggtgtctggagccct

SEQ ID NO: 1224656 - DNA, 25 bp, Homo sapien
ttcctgttgcacacaaaataccata

SEQ ID NO: 1224657 - DNA, 25 bp, Homo sapien
tgttgacaactcttctaaatttaac

SEQ ID NO: 1224658 - DNA, 25 bp, Homo sapien
tgttgcacacaaaataccatagttt

SEQ ID NO: 1224659 - DNA, 25 bp, Homo sapien
cctgttgcacacaaaataccatagt

SEQ ID NO: 1224660 - DNA, 25 bp, Homo sapien
tgttcctaatagcttcaatgcgtct

SEQ ID NO: 1224661 - DNA, 25 bp, Homo sapien
caatgcgtctcataggtccatcaaa

SEQ ID NO: 1224662 - DNA, 25 bp, Homo sapien
gcagttattagacagcagagccatc

SEQ ID NO: 1224663 - DNA, 25 bp, Homo sapien
tgcactttgcctgaacatggcgtac

SEQ ID NO: 1224664 - DNA, 25 bp, Homo sapien
gtgaatgttctttgagatgcaccat

SEQ ID NO: 1224665 - DNA, 25 bp, Homo sapien
ctaatggtttcagtggattagacgc

SEQ ID NO: 1224666 - DNA, 25 bp, Homo sapien
cagtggattagacgccccaaggtgt

SEQ ID NO: 1224667 - DNA, 25 bp, Homo sapien
gattagacgccccaaggtgtaagga

SEQ ID NO: 1224668 - DNA, 25 bp, Homo sapien
ggtttcagtggattagacgccccaa

SEQ ID NO: 1224669 - DNA, 25 bp, Homo sapien
tcttgactgacatgcttggagcact

SEQ ID NO: 1224670 - DNA, 25 bp, Homo sapien
tatccaggccgttatgggcagctcg

SEQ ID NO: 1224671 - DNA, 25 bp, Homo sapien
tttgcctccggttagtcttgactga

SEQ ID NO: 1224672 - DNA, 25 bp, Homo sapien
taaaaatttactggcgaggcgttca

SEQ ID NO: 1224673 - DNA, 25 bp, Homo sapien
tcacataaccttgaagtcgaaagac

SEQ ID NO: 1224674 - DNA, 25 bp, Homo sapien
agtcgaaagacacagcctgtgataa

SEQ ID NO: 1224675 - DNA, 25 bp, Homo sapien
gtgtgggcttcctgatacctgtctt

SEQ ID NO: 1224676 - DNA, 25 bp, Homo sapien
tgactccagaatggctatctcacct

SEQ ID NO: 1224677 - DNA, 25 bp, Homo sapien
tgcccagtgctgacaaaatcccaaa

SEQ ID NO: 1224678 - DNA, 25 bp, Homo sapien
aatcccaaaaccgtctctgtgtggg

SEQ ID NO: 1224679 - DNA, 25 bp, Homo sapien
attcctgaccgtgaatgtcatccat

SEQ ID NO: 1224680 - DNA, 25 bp, Homo sapien
atattcctgaccgtgaatgtcatcc

SEQ ID NO: 1224681 - DNA, 25 bp, Homo sapien
caatattcctgaccgtgaatgtcat

SEQ ID NO: 1224682 - DNA, 25 bp, Homo sapien
cccaatattcctgaccgtgaatgtc

SEQ ID NO: 1224683 - DNA, 25 bp, Homo sapien
tgttttggcacactccacaaccacg

SEQ ID NO: 1224684 - DNA, 25 bp, Homo sapien
caaccacgtttcctgattgtgttct

SEQ ID NO: 1224685 - DNA, 25 bp, Homo sapien
attgtgttctctggagcattggtcc

SEQ ID NO: 1224686 - DNA, 25 bp, Homo sapien
taactctcatacagtgttttggcac

SEQ ID NO: 1224687 - DNA, 25 bp, Homo sapien
gatttaacgtggaaaatgtgtgacc

SEQ ID NO: 1224688 - DNA, 25 bp, Homo sapien
gagacaagaagcgagcacatgccgt

SEQ ID NO: 1224689 - DNA, 25 bp, Homo sapien
tcatagattgccataacagatacag

SEQ ID NO: 1224690 - DNA, 25 bp, Homo sapien
gtgagaaatatgacccagagacaag

SEQ ID NO: 1224691 - DNA, 25 bp, Homo sapien
tgagttcatttcaagaccgtggcca

SEQ ID NO: 1224692 - DNA, 25 bp, Homo sapien
ccatgaaggcctgataggaaggtct

SEQ ID NO: 1224693 - DNA, 25 bp, Homo sapien
tggcccacagtagcacttcttgagt

SEQ ID NO: 1224694 - DNA, 25 bp, Homo sapien
ggaagaaagtggtcatgctttggcc

SEQ ID NO: 1224695 - DNA, 25 bp, Homo sapien
tacattccaacttgttgtttgggcc

SEQ ID NO: 1224696 - DNA, 25 bp, Homo sapien
caagtttgtacattccaacttgttg

SEQ ID NO: 1224697 - DNA, 25 bp, Homo sapien
cagggtgaaaattggataaacagcc

SEQ ID NO: 1224698 - DNA, 25 bp, Homo sapien
gggccttgttggacataactgaagt

SEQ ID NO: 1224699 - DNA, 25 bp, Homo sapien
taagccttcacccatgtaattttcc

SEQ ID NO: 1224700 - DNA, 25 bp, Homo sapien
caaaggctttaacatgctgaggtgt

SEQ ID NO: 1224701 - DNA, 25 bp, Homo sapien
ttcaggctgaatgcactatggctgt

SEQ ID NO: 1224702 - DNA, 25 bp, Homo sapien
ttccttgttttgtcggagagagtgg

SEQ ID NO: 1224703 - DNA, 25 bp, Homo sapien
aaaaaatcgctgctttatcctggta

SEQ ID NO: 1224704 - DNA, 25 bp, Homo sapien
tacatgtaaacaaggatttgagttc

SEQ ID NO: 1224705 - DNA, 25 bp, Homo sapien
ggaagagtggactgagtactcctca

SEQ ID NO: 1224706 - DNA, 25 bp, Homo sapien
tatcctggtacagtaattgattcct

SEQ ID NO: 1224707 - DNA, 25 bp, Homo sapien
tgaagaggtgacttccctctttgat

SEQ ID NO: 1224708 - DNA, 25 bp, Homo sapien
gaagaggtgacttccctctttgatt

SEQ ID NO: 1224709 - DNA, 25 bp, Homo sapien
ggtgacttccctctttgattcagtg

SEQ ID NO: 1224710 - DNA, 25 bp, Homo sapien
acttccctctttgattcagtgttca

SEQ ID NO: 1224711 - DNA, 25 bp, Homo sapien
caatcaaggcacaatcactgaaatg

SEQ ID NO: 1224712 - DNA, 25 bp, Homo sapien
ttaatttcaatagcaccccatggtg

SEQ ID NO: 1224713 - DNA, 25 bp, Homo sapien
gctattgtcataatgactagcaatc

SEQ ID NO: 1224714 - DNA, 25 bp, Homo sapien
cccatggtgcatttataaattccac

SEQ ID NO: 1224715 - DNA, 25 bp, Homo sapien
aagggggcggtatccaagatgactc

SEQ ID NO: 1224716 - DNA, 25 bp, Homo sapien
taagaaacaattgtcttgaactgaa

SEQ ID NO: 1224717 - DNA, 25 bp, Homo sapien
tgctccaagatgactctgagaacgg

SEQ ID NO: 1224718 - DNA, 25 bp, Homo sapien
gaattatgcggcaaaaagacaatgg

SEQ ID NO: 1224719 - DNA, 25 bp, Homo sapien
taccgtattactgattgttggataa

SEQ ID NO: 1224720 - DNA, 25 bp, Homo sapien
attactgattgttggataattcaca

SEQ ID NO: 1224721 - DNA, 25 bp, Homo sapien
ctggccatagtaccgtattactgat

SEQ ID NO: 1224722 - DNA, 25 bp, Homo sapien
catagtaccgtattactgattgttg

SEQ ID NO: 1224723 - DNA, 25 bp, Homo sapien
cagctcctgatttgtccagacaatg

SEQ ID NO: 1224724 - DNA, 25 bp, Homo sapien
ctaaagggagcacgtaagcacctga

SEQ ID NO: 1224725 - DNA, 25 bp, Homo sapien
aagggagcacgtaagcacctgaagg

SEQ ID NO: 1224726 - DNA, 25 bp, Homo sapien
gaaggcacctctgccaggctacatg

SEQ ID NO: 1224727 - DNA, 25 bp, Homo sapien
atggctctggtgaaacactcagtat

SEQ ID NO: 1224728 - DNA, 25 bp, Homo sapien
catggctctggtgaaacactcagta

SEQ ID NO: 1224729 - DNA, 25 bp, Homo sapien
tgtccatggctctggtgaaacactc

SEQ ID NO: 1224730 - DNA, 25 bp, Homo sapien
tccatggctctggtgaaacactcag

SEQ ID NO: 1224731 - DNA, 25 bp, Homo sapien
gatgggaagaaccaagacaagggca

SEQ ID NO: 1224732 - DNA, 25 bp, Homo sapien
gaaatgatgggaagaaccaagacaa

SEQ ID NO: 1224733 - DNA, 25 bp, Homo sapien
gaagaggaaatgatgggaagaacca

SEQ ID NO: 1224734 - DNA, 25 bp, Homo sapien
tgggaagaaccaagacaagggcaga

SEQ ID NO: 1224735 - DNA, 25 bp, Homo sapien
tcagccactagttcaaggtggaaat

SEQ ID NO: 1224736 - DNA, 25 bp, Homo sapien
cagagagcacgaaggaaggaaaccg

SEQ ID NO: 1224737 - DNA, 25 bp, Homo sapien
tctggtgaggtcagccactagttca

SEQ ID NO: 1224738 - DNA, 25 bp, Homo sapien
gctttcaagtgtgcagcactcagct

SEQ ID NO: 1224739 - DNA, 25 bp, Homo sapien
ctcttctgcccagacctgccctgct

SEQ ID NO: 1224740 - DNA, 25 bp, Homo sapien
ctgctgaggcccctgcctggcagga

SEQ ID NO: 1224741 - DNA, 25 bp, Homo sapien
ttctgcccagacctgccctgctgag

SEQ ID NO: 1224742 - DNA, 25 bp, Homo sapien
tgctgaggcccctgcctggcaggac

SEQ ID NO: 1224743 - DNA, 25 bp, Homo sapien
tgtggctactgtcctcctaactgct

SEQ ID NO: 1224744 - DNA, 25 bp, Homo sapien
tccttatgtcctacagatgcctgcc

SEQ ID NO: 1224745 - DNA, 25 bp, Homo sapien
ggtgaccctgttcgtcttggctgca

SEQ ID NO: 1224746 - DNA, 25 bp, Homo sapien
tgtccctctgggctatctatagtgt

SEQ ID NO: 1224747 - DNA, 25 bp, Homo sapien
tcacttgtcatctgttcttcgagtg

SEQ ID NO: 1224748 - DNA, 25 bp, Homo sapien
tgtgactatgaatgatggctctggc

SEQ ID NO: 1224749 - DNA, 25 bp, Homo sapien
tggctaaatgacaccatcctgatgg

SEQ ID NO: 1224750 - DNA, 25 bp, Homo sapien
catctgttcttcgagtgtaaccaac

SEQ ID NO: 1224751 - DNA, 25 bp, Homo sapien
gtaaagatgcaattacctctctttg

SEQ ID NO: 1224752 - DNA, 25 bp, Homo sapien
tacctctctttgtagactacagtct

SEQ ID NO: 1224753 - DNA, 25 bp, Homo sapien
tttctctggagaagtaaagatgcaa

SEQ ID NO: 1224754 - DNA, 25 bp, Homo sapien
tcaaatcactaaattttctctggag

SEQ ID NO: 1224755 - DNA, 25 bp, Homo sapien
tccatcagggattaatttgagggca

SEQ ID NO: 1224756 - DNA, 25 bp, Homo sapien
gtccatcagggattaatttgagggc

SEQ ID NO: 1224757 - DNA, 25 bp, Homo sapien
tggtccatcagggattaatttgagg

SEQ ID NO: 1224758 - DNA, 25 bp, Homo sapien
cattggtccatcagggattaatttg

SEQ ID NO: 1224759 - DNA, 25 bp, Homo sapien
ggatccctaatggttatcagtagct

SEQ ID NO: 1224760 - DNA, 25 bp, Homo sapien
ggagaaattcccaagctcaacttac

SEQ ID NO: 1224761 - DNA, 25 bp, Homo sapien
tcagtagctttggtcttaaggacaa

SEQ ID NO: 1224762 - DNA, 25 bp, Homo sapien
taaggacaaatttggtctcacaacc

SEQ ID NO: 1224763 - DNA, 25 bp, Homo sapien
taacagggagttaacaagttcagac

SEQ ID NO: 1224764 - DNA, 25 bp, Homo sapien
aagtcaatgtaaatacagtcttgtg

SEQ ID NO: 1224765 - DNA, 25 bp, Homo sapien
tatatgaatcccgacatcccggaat

SEQ ID NO: 1224766 - DNA, 25 bp, Homo sapien
gttcagacctttggtcagatgggtc

SEQ ID NO: 1224767 - DNA, 25 bp, Homo sapien
aaaggatgtggctaaagaaagagag

SEQ ID NO: 1224768 - DNA, 25 bp, Homo sapien
gaagtagctggagtagatgctaatc

SEQ ID NO: 1224769 - DNA, 25 bp, Homo sapien
tggtttcctagcctgttattggtag

SEQ ID NO: 1224770 - DNA, 25 bp, Homo sapien
ttggtagggcagaacggcaacccag

SEQ ID NO: 1224771 - DNA, 25 bp, Homo sapien
caagtgtttgtaatctcggaattct

SEQ ID NO: 1224772 - DNA, 25 bp, Homo sapien
ttaatctgacgccaggacagtccct

SEQ ID NO: 1224773 - DNA, 25 bp, Homo sapien
cccatgggaacagaaagttttgagg

SEQ ID NO: 1224774 - DNA, 25 bp, Homo sapien
ggatgttgaccgaagaaagtagatt

SEQ ID NO: 1224775 - DNA, 25 bp, Homo sapien
caggtatgtacattgatgaggagct

SEQ ID NO: 1224776 - DNA, 25 bp, Homo sapien
gctgccactgtatatgcaggtatgt

SEQ ID NO: 1224777 - DNA, 25 bp, Homo sapien
cttttctaaccaatttgctgttctt

SEQ ID NO: 1224778 - DNA, 25 bp, Homo sapien
tatgcaggtatgtacattgatgagg

SEQ ID NO: 1224779 - DNA, 25 bp, Homo sapien
agaagagtgagagtcttcatagaaa

SEQ ID NO: 1224780 - DNA, 25 bp, Homo sapien
catagaaagatcaggctccccaaag

SEQ ID NO: 1224781 - DNA, 25 bp, Homo sapien
cctttgtccctaggatcatggctga

SEQ ID NO: 1224782 - DNA, 25 bp, Homo sapien
catggctgaaatgcaatcgtgagtt

SEQ ID NO: 1224783 - DNA, 25 bp, Homo sapien
tctccatgggtagcaaataggttca

SEQ ID NO: 1224784 - DNA, 25 bp, Homo sapien
ttttatctccatgggtagcaaatag

SEQ ID NO: 1224785 - DNA, 25 bp, Homo sapien
aatagttatacttccagtttgtcca

SEQ ID NO: 1224786 - DNA, 25 bp, Homo sapien
ccatttttatctccatgggtagcaa

SEQ ID NO: 1224787 - DNA, 25 bp, Homo sapien
ttaggagactgttctgaggatacgc

SEQ ID NO: 1224788 - DNA, 25 bp, Homo sapien
ggacagaagagctccttggcactgg

SEQ ID NO: 1224789 - DNA, 25 bp, Homo sapien
gatgcctccgggtctggttgagaga

SEQ ID NO: 1224790 - DNA, 25 bp, Homo sapien
gatacgcagacatcatccaaagctt

SEQ ID NO: 1224791 - DNA, 25 bp, Homo sapien
tttccattagctgatcatgacatcc

SEQ ID NO: 1224792 - DNA, 25 bp, Homo sapien
gcttctgtgatagcagcaagctcct

SEQ ID NO: 1224793 - DNA, 25 bp, Homo sapien
aagggcgagcaagcagattacttcc

SEQ ID NO: 1224794 - DNA, 25 bp, Homo sapien
gacactcaaaagactggcctaaagg

SEQ ID NO: 1224795 - DNA, 25 bp, Homo sapien
taggagaacagttggcagtgaacag

SEQ ID NO: 1224796 - DNA, 25 bp, Homo sapien
tcttaggagaacagttggcagtgaa

SEQ ID NO: 1224797 - DNA, 25 bp, Homo sapien
atgtcctctaggcttgtgcatagac

SEQ ID NO: 1224798 - DNA, 25 bp, Homo sapien
tttcctacatgctcctcaactgcat

SEQ ID NO: 1224799 - DNA, 25 bp, Homo sapien
tggacacttgtcacgtggacctggc

SEQ ID NO: 1224800 - DNA, 25 bp, Homo sapien
ccttgtaaggactggccattctgtc

SEQ ID NO: 1224801 - DNA, 25 bp, Homo sapien
tgaggactcccacgccttgtaagga

SEQ ID NO: 1224802 - DNA, 25 bp, Homo sapien
cattttcggtgctcttgaggactcc

SEQ ID NO: 1224803 - DNA, 25 bp, Homo sapien
ctgactgcgactcgggaccgccgaa

SEQ ID NO: 1224804 - DNA, 25 bp, Homo sapien
cctgcgtgtgttggaaaagtttcgg

SEQ ID NO: 1224805 - DNA, 25 bp, Homo sapien
ggcacgtgtgcttcccgagcctcct

SEQ ID NO: 1224806 - DNA, 25 bp, Homo sapien
gaatcctgcgaggaatacgcctgcg

SEQ ID NO: 1224807 - DNA, 25 bp, Homo sapien
gcacccaatcgcgaggcgccttcgg

SEQ ID NO: 1224808 - DNA, 25 bp, Homo sapien
gcgccttcggattcaaggggggata

SEQ ID NO: 1224809 - DNA, 25 bp, Homo sapien
ggccccagcacccaatcgcgaggcg

SEQ ID NO: 1224810 - DNA, 25 bp, Homo sapien
caaggggggatagcaaggcaagaga

SEQ ID NO: 1224811 - DNA, 25 bp, Homo sapien
cacggtgatatcttgcgggtgatga

SEQ ID NO: 1224812 - DNA, 25 bp, Homo sapien
tgtattatttcagagcgctccctca

SEQ ID NO: 1224813 - DNA, 25 bp, Homo sapien
aatatgataattggacaagggacgg

SEQ ID NO: 1224814 - DNA, 25 bp, Homo sapien
agagagaggaaaacacgcgagtgca

SEQ ID NO: 1224815 - DNA, 25 bp, Homo sapien
gttccacggaggctcccgcttagaa

SEQ ID NO: 1224816 - DNA, 25 bp, Homo sapien
ggagcggagcgctgagttccacgga

SEQ ID NO: 1224817 - DNA, 25 bp, Homo sapien
actgtttagaggctattttattatg

SEQ ID NO: 1224818 - DNA, 25 bp, Homo sapien
gaataatgtttacacgggtctgagt

SEQ ID NO: 1224819 - DNA, 25 bp, Homo sapien
gacctgggagtctgtggaaagctac

SEQ ID NO: 1224820 - DNA, 25 bp, Homo sapien
tttgagacgaaagtaacagagcgcc

SEQ ID NO: 1224821 - DNA, 25 bp, Homo sapien
tgacaagcaaattggaagagccggg

SEQ ID NO: 1224822 - DNA, 25 bp, Homo sapien
gatttccacaattcggcttcgacag

SEQ ID NO: 1224823 - DNA, 25 bp, Homo sapien
cttggaaaggacagactggtgtcgc

SEQ ID NO: 1224824 - DNA, 25 bp, Homo sapien
acagactggtgtcgctgatgagcac

SEQ ID NO: 1224825 - DNA, 25 bp, Homo sapien
gaaaggacagactggtgtcgctgat

SEQ ID NO: 1224826 - DNA, 25 bp, Homo sapien
gactggtgtcgctgatgagcacaag

SEQ ID NO: 1224827 - DNA, 25 bp, Homo sapien
taaaaacatctacgtgctccctagg

SEQ ID NO: 1224828 - DNA, 25 bp, Homo sapien
gtgctccctaggactgcatctgtgg

SEQ ID NO: 1224829 - DNA, 25 bp, Homo sapien
tctgtggctagctttaaagaatgac

SEQ ID NO: 1224830 - DNA, 25 bp, Homo sapien
ctatccatgcaaataggcataattt

SEQ ID NO: 1224831 - DNA, 25 bp, Homo sapien
aaggagaacacccttagcagcagca

SEQ ID NO: 1224832 - DNA, 25 bp, Homo sapien
gcatctttcaaacataaatggtcag

SEQ ID NO: 1224833 - DNA, 25 bp, Homo sapien
ccatcaaatgtgtgagaaagggaaa

SEQ ID NO: 1224834 - DNA, 25 bp, Homo sapien
ctttaacatacaggatttgtgaacc

SEQ ID NO: 1224835 - DNA, 25 bp, Homo sapien
gggcacagctcaagaatcccgggac

SEQ ID NO: 1224836 - DNA, 25 bp, Homo sapien
ttcaaaagctcgtcagctgggcaca

SEQ ID NO: 1224837 - DNA, 25 bp, Homo sapien
catcttcaaaagctcgtcagctggg

SEQ ID NO: 1224838 - DNA, 25 bp, Homo sapien
ggacggttattgtgccatcttcaaa

SEQ ID NO: 1224839 - DNA, 25 bp, Homo sapien
tttatgagcgacaaggagagccctt

SEQ ID NO: 1224840 - DNA, 25 bp, Homo sapien
gtagaacttttcctgcagctggcgc

SEQ ID NO: 1224841 - DNA, 25 bp, Homo sapien
gaattatattctcaacccgggcgcg

SEQ ID NO: 1224842 - DNA, 25 bp, Homo sapien
cctgtactagagagaccgctggctt

SEQ ID NO: 1224843 - DNA, 25 bp, Homo sapien
tcccgaataaggtgatatttcagac

SEQ ID NO: 1224844 - DNA, 25 bp, Homo sapien
ttcccgaataaggtgatatttcaga

SEQ ID NO: 1224845 - DNA, 25 bp, Homo sapien
tactctagatattgtgtaaacccaa

SEQ ID NO: 1224846 - DNA, 25 bp, Homo sapien
gaacaacttgtggaagctgcaaaga

SEQ ID NO: 1224847 - DNA, 25 bp, Homo sapien
tgaataatgggaaaggttgccttct

SEQ ID NO: 1224848 - DNA, 25 bp, Homo sapien
atcaggaatggcacacgcatgctga

SEQ ID NO: 1224849 - DNA, 25 bp, Homo sapien
ataacaatccaggcttcctgattct

SEQ ID NO: 1224850 - DNA, 25 bp, Homo sapien
gattcttggcactcctcagcagact

SEQ ID NO: 1224851 - DNA, 25 bp, Homo sapien
tggtcacatctgtgccgcagcctgg

SEQ ID NO: 1224852 - DNA, 25 bp, Homo sapien
tgattctcccccagattcttggcac

SEQ ID NO: 1224853 - DNA, 25 bp, Homo sapien
tcaagtgattgggtgacaatccttc

SEQ ID NO: 1224854 - DNA, 25 bp, Homo sapien
tggagctgggataacgggtataaaa

SEQ ID NO: 1224855 - DNA, 25 bp, Homo sapien
tattggagctgggataacgggtata

SEQ ID NO: 1224856 - DNA, 25 bp, Homo sapien
tgcttttttcaagtgattgggtgac

SEQ ID NO: 1224857 - DNA, 25 bp, Homo sapien
tggccatgaccaagtagagcctcat

SEQ ID NO: 1224858 - DNA, 25 bp, Homo sapien
tcattataacaagcattacatggtc

SEQ ID NO: 1224859 - DNA, 25 bp, Homo sapien
tttctcctagatgaatgtggccatg

SEQ ID NO: 1224860 - DNA, 25 bp, Homo sapien
tagagcctcatgtcattataacaag

SEQ ID NO: 1224861 - DNA, 25 bp, Homo sapien
cttcaaagctaaaatgacactgaat

SEQ ID NO: 1224862 - DNA, 25 bp, Homo sapien
tacatcatttaacactgccggcttg

SEQ ID NO: 1224863 - DNA, 25 bp, Homo sapien
ccggcttgaaaagctgtgagcgtct

SEQ ID NO: 1224864 - DNA, 25 bp, Homo sapien
tctggctaggcagcagttgactcaa

SEQ ID NO: 1224865 - DNA, 25 bp, Homo sapien
ggaaattgctaaaccacttgatgag

SEQ ID NO: 1224866 - DNA, 25 bp, Homo sapien
catcgttgatggcttgacgtgcgta

SEQ ID NO: 1224867 - DNA, 25 bp, Homo sapien
tagacagctcttcagtactggtgac

SEQ ID NO: 1224868 - DNA, 25 bp, Homo sapien
tattgtagtgcatgttcagagccct

SEQ ID NO: 1224869 - DNA, 25 bp, Homo sapien
taaatggagcagcttgtcgggtacc

SEQ ID NO: 1224870 - DNA, 25 bp, Homo sapien
gcagcttgtcgggtacctcctgatg

SEQ ID NO: 1224871 - DNA, 25 bp, Homo sapien
tgatgccagccatcccctgtttgtg

SEQ ID NO: 1224872 - DNA, 25 bp, Homo sapien
ttgtcgggtacctcctgatgccagc

SEQ ID NO: 1224873 - DNA, 25 bp, Homo sapien
tggtgctaagcagtgacaaaggtgc

SEQ ID NO: 1224874 - DNA, 25 bp, Homo sapien
cggaggtggtgctaagcagtgacaa

SEQ ID NO: 1224875 - DNA, 25 bp, Homo sapien
ctggacggaggtggtgctaagcagt

SEQ ID NO: 1224876 - DNA, 25 bp, Homo sapien
tgctaagcagtgacaaaggtgccac

SEQ ID NO: 1224877 - DNA, 25 bp, Homo sapien
tctctgtgccgaggaacaatctttc

SEQ ID NO: 1224878 - DNA, 25 bp, Homo sapien
tgatacctaaagacatgaatctgtg

SEQ ID NO: 1224879 - DNA, 25 bp, Homo sapien
gaaatagatcatagaactccactga

SEQ ID NO: 1224880 - DNA, 25 bp, Homo sapien
gccgaggaacaatctttcaaaggaa

SEQ ID NO: 1224881 - DNA, 25 bp, Homo sapien
agacatttaatccaggatgggctga

SEQ ID NO: 1224882 - DNA, 25 bp, Homo sapien
ggatgggctgaacacaatgataaca

SEQ ID NO: 1224883 - DNA, 25 bp, Homo sapien
cttcagacatttaatccaggatggg

SEQ ID NO: 1224884 - DNA, 25 bp, Homo sapien
agctctcagaagagaacttgctctc

SEQ ID NO: 1224885 - DNA, 25 bp, Homo sapien
tctcctcggaagaacgattatattt

SEQ ID NO: 1224886 - DNA, 25 bp, Homo sapien
tcctcggaagaacgattatatttgt

SEQ ID NO: 1224887 - DNA, 25 bp, Homo sapien
ctcggaagaacgattatatttgttt

SEQ ID NO: 1224888 - DNA, 25 bp, Homo sapien
ctcctcggaagaacgattatatttg

SEQ ID NO: 1224889 - DNA, 25 bp, Homo sapien
gattatcttgtacgccttcaggtca

SEQ ID NO: 1224890 - DNA, 25 bp, Homo sapien
taaaagtggatgctctaaatgaaag

SEQ ID NO: 1224891 - DNA, 25 bp, Homo sapien
gactcctacccaatgggacttgagg

SEQ ID NO: 1224892 - DNA, 25 bp, Homo sapien
ggtgggacaacctaggatgctgtca

SEQ ID NO: 1224893 - DNA, 25 bp, Homo sapien
ccccgatggagttaaggctgcctat

SEQ ID NO: 1224894 - DNA, 25 bp, Homo sapien
tgaattcgacctgtaaggccagacc

SEQ ID NO: 1224895 - DNA, 25 bp, Homo sapien
tgcctatgtctacgggaacagagtt

SEQ ID NO: 1224896 - DNA, 25 bp, Homo sapien
tagccaaacttgagggctaacagct

SEQ ID NO: 1224897 - DNA, 25 bp, Homo sapien
caaaatcccgaagccaaactctcta

SEQ ID NO: 1224898 - DNA, 25 bp, Homo sapien
tcagaggtttcagctggtggaagct

SEQ ID NO: 1224899 - DNA, 25 bp, Homo sapien
caaactctctagtgagtttgagatc

SEQ ID NO: 1224900 - DNA, 25 bp, Homo sapien
tgagtttgagatcagaggtttcagc

SEQ ID NO: 1224901 - DNA, 25 bp, Homo sapien
cagatgctttagtaactcctcatag

SEQ ID NO: 1224902 - DNA, 25 bp, Homo sapien
ctcctcatagagattatcagatgaa

SEQ ID NO: 1224903 - DNA, 25 bp, Homo sapien
tcacactaaactctcctgccagagg

SEQ ID NO: 1224904 - DNA, 25 bp, Homo sapien
gaacagatacgttattgctgctcct

SEQ ID NO: 1224905 - DNA, 25 bp, Homo sapien
tcttgcagaaaggggcttacatggc

SEQ ID NO: 1224906 - DNA, 25 bp, Homo sapien
aaaggggcttacatggcacctgcat

SEQ ID NO: 1224907 - DNA, 25 bp, Homo sapien
ttgcagaaaggggcttacatggcac

SEQ ID NO: 1224908 - DNA, 25 bp, Homo sapien
gcagaaaggggcttacatggcacct

SEQ ID NO: 1224909 - DNA, 25 bp, Homo sapien
caatggcattaataaagttttcagt

SEQ ID NO: 1224910 - DNA, 25 bp, Homo sapien
gttattccaaggaaactgagctaag

SEQ ID NO: 1224911 - DNA, 25 bp, Homo sapien
gctgatacaaggagacaatggcatt

SEQ ID NO: 1224912 - DNA, 25 bp, Homo sapien
aaagttttcagtttcaagtctacag

SEQ ID NO: 1224913 - DNA, 25 bp, Homo sapien
ccgtaatgtgatctgagcaacttcc

SEQ ID NO: 1224914 - DNA, 25 bp, Homo sapien
caacatctttgcctgcgataatggc

SEQ ID NO: 1224915 - DNA, 25 bp, Homo sapien
gataatggcattgaaaaactcccgt

SEQ ID NO: 1224916 - DNA, 25 bp, Homo sapien
ggaaggatcaacatctttgcctgcg

SEQ ID NO: 1224917 - DNA, 25 bp, Homo sapien
aagcagctcttgtaggcagttcggg

SEQ ID NO: 1224918 - DNA, 25 bp, Homo sapien
aaatctcagggacttcactatccag

SEQ ID NO: 1224919 - DNA, 25 bp, Homo sapien
cagttcggggatttgaaaatctcag

SEQ ID NO: 1224920 - DNA, 25 bp, Homo sapien
atgaagcagctcttgtaggcagttc

SEQ ID NO: 1224921 - DNA, 25 bp, Homo sapien
tactcggaggcacaaagcaaacttc

SEQ ID NO: 1224922 - DNA, 25 bp, Homo sapien
tggcacactgacacgaacaaggact

SEQ ID NO: 1224923 - DNA, 25 bp, Homo sapien
tctaggagctgcacgttaggctaac

SEQ ID NO: 1224924 - DNA, 25 bp, Homo sapien
cgttaaattacagcgatcgggtcag

SEQ ID NO: 1224925 - DNA, 25 bp, Homo sapien
aggtaggaatccttggcaggtgaaa

SEQ ID NO: 1224926 - DNA, 25 bp, Homo sapien
ggtaggaatccttggcaggtgaaag

SEQ ID NO: 1224927 - DNA, 25 bp, Homo sapien
gtaggaatccttggcaggtgaaagt

SEQ ID NO: 1224928 - DNA, 25 bp, Homo sapien
cagaagtttttagttcctgctgcac

SEQ ID NO: 1224929 - DNA, 25 bp, Homo sapien
gagctgtcccactcttattctggag

SEQ ID NO: 1224930 - DNA, 25 bp, Homo sapien
cactcttattctggagcctaggcaa

SEQ ID NO: 1224931 - DNA, 25 bp, Homo sapien
ttctggagcctaggcaagcatggct

SEQ ID NO: 1224932 - DNA, 25 bp, Homo sapien
acgtttcagcagcagcgtgccttct

SEQ ID NO: 1224933 - DNA, 25 bp, Homo sapien
ttctaacatacctcaagtgcatgcc

SEQ ID NO: 1224934 - DNA, 25 bp, Homo sapien
ggacaagaacaagaactgcccataa

SEQ ID NO: 1224935 - DNA, 25 bp, Homo sapien
agtgcatgccctcggccaaaacaga

SEQ ID NO: 1224936 - DNA, 25 bp, Homo sapien
taaaacaaatatcaactgggacaag

SEQ ID NO: 1224937 - DNA, 25 bp, Homo sapien
ttgccagctctgtactgtacttcat

SEQ ID NO: 1224938 - DNA, 25 bp, Homo sapien
cagggctctgtttgccagctctgta

SEQ ID NO: 1224939 - DNA, 25 bp, Homo sapien
gtttgccagctctgtactgtacttc

SEQ ID NO: 1224940 - DNA, 25 bp, Homo sapien
ctctgtttgccagctctgtactgta

SEQ ID NO: 1224941 - DNA, 25 bp, Homo sapien
tctcggtccaaggatgccatgctgc

SEQ ID NO: 1224942 - DNA, 25 bp, Homo sapien
tgcattctgagaccctcatggccgc

SEQ ID NO: 1224943 - DNA, 25 bp, Homo sapien
tctctcctgcttggaagcggccgct

SEQ ID NO: 1224944 - DNA, 25 bp, Homo sapien
ctctggctctcggtccaaggatgcc

SEQ ID NO: 1224945 - DNA, 25 bp, Homo sapien
gatgtcctcggaaaaagaaatgaac

SEQ ID NO: 1224946 - DNA, 25 bp, Homo sapien
ctgtacatcagggtaatcatcaatg

SEQ ID NO: 1224947 - DNA, 25 bp, Homo sapien
acgatgtcctcggaaaaagaaatga

SEQ ID NO: 1224948 - DNA, 25 bp, Homo sapien
tctcaccccctcttccaataatttg

SEQ ID NO: 1224949 - DNA, 25 bp, Homo sapien
tgccactccgtaaaatggaagaacc

SEQ ID NO: 1224950 - DNA, 25 bp, Homo sapien
aagaaccttggctccccgtgtgaat

SEQ ID NO: 1224951 - DNA, 25 bp, Homo sapien
acactgctgttcaggtgaaggagag

SEQ ID NO: 1224952 - DNA, 25 bp, Homo sapien
agccgatcctgccactccgtaaaat

SEQ ID NO: 1224953 - DNA, 25 bp, Homo sapien
cttcttcctcttcctttcccagcat

SEQ ID NO: 1224954 - DNA, 25 bp, Homo sapien
ccttcttcctcttcctttcccagca

SEQ ID NO: 1224955 - DNA, 25 bp, Homo sapien
tccttcttcctcttcctttcccagc

SEQ ID NO: 1224956 - DNA, 25 bp, Homo sapien
catcgtctcccaaaatagacgaaaa

SEQ ID NO: 1224957 - DNA, 25 bp, Homo sapien
ggagtccaatgacaccagcatcgtc

SEQ ID NO: 1224958 - DNA, 25 bp, Homo sapien
ctcttcactccctggctggttggag

SEQ ID NO: 1224959 - DNA, 25 bp, Homo sapien
tagacgaaaataatcctcagctcgg

SEQ ID NO: 1224960 - DNA, 25 bp, Homo sapien
gtctcaggttggcattgagtccgga

SEQ ID NO: 1224961 - DNA, 25 bp, Homo sapien
gaggggcaggaagggacagtaagtc

SEQ ID NO: 1224962 - DNA, 25 bp, Homo sapien
gggacagtaagtccttgatgttgtt

SEQ ID NO: 1224963 - DNA, 25 bp, Homo sapien
ttgttggccgcccaccaactcttgg

SEQ ID NO: 1224964 - DNA, 25 bp, Homo sapien
tcagccctggtgctgcaaagcgctg

SEQ ID NO: 1224965 - DNA, 25 bp, Homo sapien
tttcccaactggctcggtgcatggc

SEQ ID NO: 1224966 - DNA, 25 bp, Homo sapien
cacagggctggatttttgacctcca

SEQ ID NO: 1224967 - DNA, 25 bp, Homo sapien
gaattctgcgcttggactgtctgcc

SEQ ID NO: 1224968 - DNA, 25 bp, Homo sapien
cagttatccctggaaccccggcttg

SEQ ID NO: 1224969 - DNA, 25 bp, Homo sapien
gaccgcccttgacagttatccctgg

SEQ ID NO: 1224970 - DNA, 25 bp, Homo sapien
ctgcgagtgcggaccgcccttgaca

SEQ ID NO: 1224971 - DNA, 25 bp, Homo sapien
gaactggggccaggacaaagtgcat

SEQ ID NO: 1224972 - DNA, 25 bp, Homo sapien
tgatgatctcgggtgagtcctcttt

SEQ ID NO: 1224973 - DNA, 25 bp, Homo sapien
ctcgggtgagtcctctttgtcccct

SEQ ID NO: 1224974 - DNA, 25 bp, Homo sapien
ttcttgtttcaattagtgtgtcaac

SEQ ID NO: 1224975 - DNA, 25 bp, Homo sapien
ttagtgtgtcaacattgatgatctc

SEQ ID NO: 1224976 - DNA, 25 bp, Homo sapien
ctccaggaggaagagtggagagaga

SEQ ID NO: 1224977 - DNA, 25 bp, Homo sapien
tccaggaggaagagtggagagagac

SEQ ID NO: 1224978 - DNA, 25 bp, Homo sapien
ggaggaagagtggagagagacgtac

SEQ ID NO: 1224979 - DNA, 25 bp, Homo sapien
caggaggaagagtggagagagacgt

SEQ ID NO: 1224980 - DNA, 25 bp, Homo sapien
tgggttgagaaacctccaaggtcag

SEQ ID NO: 1224981 - DNA, 25 bp, Homo sapien
aacctccaaggtcagcagatggcat

SEQ ID NO: 1224982 - DNA, 25 bp, Homo sapien
ctccaaggtcagcagatggcatggg

SEQ ID NO: 1224983 - DNA, 25 bp, Homo sapien
ctgggttgagaaacctccaaggtca

SEQ ID NO: 1224984 - DNA, 25 bp, Homo sapien
tacagtgtacaggtagcgggatagc

SEQ ID NO: 1224985 - DNA, 25 bp, Homo sapien
gagccatttcgagggcactcctgtg

SEQ ID NO: 1224986 - DNA, 25 bp, Homo sapien
tggagtcgccgaggatacagtgtac

SEQ ID NO: 1224987 - DNA, 25 bp, Homo sapien
caaggcctaccgagaaatgcagagg

SEQ ID NO: 1224988 - DNA, 25 bp, Homo sapien
cgctgaaggactgagtgaattccaa

SEQ ID NO: 1224989 - DNA, 25 bp, Homo sapien
tcccgcctgctcttaacgctgaagg

SEQ ID NO: 1224990 - DNA, 25 bp, Homo sapien
caagtgtggccttgccgaatgagtc

SEQ ID NO: 1224991 - DNA, 25 bp, Homo sapien
ggaaggaagcatgcctcagattggt

SEQ ID NO: 1224992 - DNA, 25 bp, Homo sapien
tggagttggtgatgagagtaggagc

SEQ ID NO: 1224993 - DNA, 25 bp, Homo sapien
caagaactggtgtttctttaggtgt

SEQ ID NO: 1224994 - DNA, 25 bp, Homo sapien
tctttaggtgttcttggatctggag

SEQ ID NO: 1224995 - DNA, 25 bp, Homo sapien
tctggaggtcacatatctcaagaac

SEQ ID NO: 1224996 - DNA, 25 bp, Homo sapien
caccaacaatatacaccagggtcat

SEQ ID NO: 1224997 - DNA, 25 bp, Homo sapien
actcaccaacaatatacaccagggt

SEQ ID NO: 1224998 - DNA, 25 bp, Homo sapien
tttgttgtgatctgtctgggactca

SEQ ID NO: 1224999 - DNA, 25 bp, Homo sapien
ttttgttgtgatctgtctgggactc

SEQ ID NO: 1225000 - DNA, 25 bp, Homo sapien
tactttgtcactccttccttactaa

SEQ ID NO: 1225001 - DNA, 25 bp, Homo sapien
ttacccaacttgctacaaagaatag

SEQ ID NO: 1225002 - DNA, 25 bp, Homo sapien
ttgtccatgcctagcctttgtgaga

SEQ ID NO: 1225003 - DNA, 25 bp, Homo sapien
caagtaatcaaaagtccatttaaga

SEQ ID NO: 1225004 - DNA, 25 bp, Homo sapien
tcttgaggagagctttagatgtccc

SEQ ID NO: 1225005 - DNA, 25 bp, Homo sapien
tcccactggacgttgcagagtcagc

SEQ ID NO: 1225006 - DNA, 25 bp, Homo sapien
tccaagaccacgttggtgagcagca

SEQ ID NO: 1225007 - DNA, 25 bp, Homo sapien
tataagaactcgagcttagagcgag

SEQ ID NO: 1225008 - DNA, 25 bp, Homo sapien
ggaagtgaataaggccatacagctg

SEQ ID NO: 1225009 - DNA, 25 bp, Homo sapien
tacttctggatgtgtcaacagaagt

SEQ ID NO: 1225010 - DNA, 25 bp, Homo sapien
ccaactagggcggtaggaagtgaat

SEQ ID NO: 1225011 - DNA, 25 bp, Homo sapien
ccactgagcattctcctgcgagttt

SEQ ID NO: 1225012 - DNA, 25 bp, Homo sapien
ctaagaaaagcaggtaagacaggga

SEQ ID NO: 1225013 - DNA, 25 bp, Homo sapien
aagaaaagcaggtaagacagggact

SEQ ID NO: 1225014 - DNA, 25 bp, Homo sapien
gaaaagcaggtaagacagggactta

SEQ ID NO: 1225015 - DNA, 25 bp, Homo sapien
taagaaaagcaggtaagacagggac

SEQ ID NO: 1225016 - DNA, 25 bp, Homo sapien
taggagcggacaggaatataggcac

SEQ ID NO: 1225017 - DNA, 25 bp, Homo sapien
tcactgccactaccatcataggagc

SEQ ID NO: 1225018 - DNA, 25 bp, Homo sapien
cttttgtagtgtgtagcaattgtct

SEQ ID NO: 1225019 - DNA, 25 bp, Homo sapien
tagtgtgtagcaattgtctatatct

SEQ ID NO: 1225020 - DNA, 25 bp, Homo sapien
gtgaaacacttggtaaaactgtcat

SEQ ID NO: 1225021 - DNA, 25 bp, Homo sapien
tatacattggtgaaacacttggtaa

SEQ ID NO: 1225022 - DNA, 25 bp, Homo sapien
attatacattggtgaaacacttggt

SEQ ID NO: 1225023 - DNA, 25 bp, Homo sapien
cattggtgaaacacttggtaaaact

SEQ ID NO: 1225024 - DNA, 25 bp, Homo sapien
cacagtgtcccgtggatatgaccta

SEQ ID NO: 1225025 - DNA, 25 bp, Homo sapien
gacctacatagagtccaaactgaag

SEQ ID NO: 1225026 - DNA, 25 bp, Homo sapien
ctgaagctttaatgtgcttgtgtgg

SEQ ID NO: 1225027 - DNA, 25 bp, Homo sapien
aaaagcataccccagcagcgagtgg

SEQ ID NO: 1225028 - DNA, 25 bp, Homo sapien
gactgagtctgcagcgagtgcaaag

SEQ ID NO: 1225029 - DNA, 25 bp, Homo sapien
tgaagcagtcgggacacagtgttcc

SEQ ID NO: 1225030 - DNA, 25 bp, Homo sapien
tctgcagcgagtgcaaagcagtgaa

SEQ ID NO: 1225031 - DNA, 25 bp, Homo sapien
ggcatgccaggtcgtctcctttcca

SEQ ID NO: 1225032 - DNA, 25 bp, Homo sapien
gtttccatggacttcgtaagcgtgc

SEQ ID NO: 1225033 - DNA, 25 bp, Homo sapien
gtttccatggacttcgtaagcagtt

SEQ ID NO: 1225034 - DNA, 25 bp, Homo sapien
gacttcgtaagcagtttccatggac

SEQ ID NO: 1225035 - DNA, 25 bp, Homo sapien
tggacttcgtaagcgtgcattgagc

SEQ ID NO: 1225036 - DNA, 25 bp, Homo sapien
cccaaccagggttagcttttgtcat

SEQ ID NO: 1225037 - DNA, 25 bp, Homo sapien
tcccaaccagggttagcttttgtca

SEQ ID NO: 1225038 - DNA, 25 bp, Homo sapien
ccttttcgactctcttcccaaccag

SEQ ID NO: 1225039 - DNA, 25 bp, Homo sapien
tccttttcgactctcttcccaacca

SEQ ID NO: 1225040 - DNA, 25 bp, Homo sapien
tttctcagaggcgacaagcttccaa

SEQ ID NO: 1225041 - DNA, 25 bp, Homo sapien
tatttgggaagtaaggcacaaggcc

SEQ ID NO: 1225042 - DNA, 25 bp, Homo sapien
caggaagacagagtacaagccctcc

SEQ ID NO: 1225043 - DNA, 25 bp, Homo sapien
cttatcaagaaggattttgtctccc

SEQ ID NO: 1225044 - DNA, 25 bp, Homo sapien
taaagacaagttatgtggccctaaa

SEQ ID NO: 1225045 - DNA, 25 bp, Homo sapien
taagtccacgtgctcaggtgcaagg

SEQ ID NO: 1225046 - DNA, 25 bp, Homo sapien
gagggcagtggaaatctaagtccac

SEQ ID NO: 1225047 - DNA, 25 bp, Homo sapien
gctcctcttcctagccatttatgta

SEQ ID NO: 1225048 - DNA, 25 bp, Homo sapien
ctgtaccaactatgaaggaagcatg

SEQ ID NO: 1225049 - DNA, 25 bp, Homo sapien
tcacatccgatggagctgccactgt

SEQ ID NO: 1225050 - DNA, 25 bp, Homo sapien
gggatgcctaacctccggatctaaa

SEQ ID NO: 1225051 - DNA, 25 bp, Homo sapien
aagctgcccggttgtcctgacagta

SEQ ID NO: 1225052 - DNA, 25 bp, Homo sapien
tgagttcagtcagctctccggatgt

SEQ ID NO: 1225053 - DNA, 25 bp, Homo sapien
cagctgagagggcttcccattagta

SEQ ID NO: 1225054 - DNA, 25 bp, Homo sapien
agagctgtaaaacactcagtgccag

SEQ ID NO: 1225055 - DNA, 25 bp, Homo sapien
gcgtcgcagctcctaactaacgagg

SEQ ID NO: 1225056 - DNA, 25 bp, Homo sapien
tgacagatcagtgcacagcacggac

SEQ ID NO: 1225057 - DNA, 25 bp, Homo sapien
tagcctgagaactctctgtctcagt

SEQ ID NO: 1225058 - DNA, 25 bp, Homo sapien
tgtcagctatctgtccccagttcaa

SEQ ID NO: 1225059 - DNA, 25 bp, Homo sapien
tgtccccagttcaaatgggtactaa

SEQ ID NO: 1225060 - DNA, 25 bp, Homo sapien
cagttcaaatgggtactaataatca

SEQ ID NO: 1225061 - DNA, 25 bp, Homo sapien
gagctatgagagtggaaggtcttac

SEQ ID NO: 1225062 - DNA, 25 bp, Homo sapien
ctccagacgttttttggagcttctc

SEQ ID NO: 1225063 - DNA, 25 bp, Homo sapien
ctttctctccagacgttttttggag

SEQ ID NO: 1225064 - DNA, 25 bp, Homo sapien
tcttactcacgtagcttctgtagcc

SEQ ID NO: 1225065 - DNA, 25 bp, Homo sapien
ggaggaacacaaatgagtgagacag

SEQ ID NO: 1225066 - DNA, 25 bp, Homo sapien
ggaacacaaatgagtgagacagaca

SEQ ID NO: 1225067 - DNA, 25 bp, Homo sapien
gaacacaaatgagtgagacagacat

SEQ ID NO: 1225068 - DNA, 25 bp, Homo sapien
gaatggaggaacacaaatgagtgag

SEQ ID NO: 1225069 - DNA, 25 bp, Homo sapien
gaggagctttagagggtgtttctaa

SEQ ID NO: 1225070 - DNA, 25 bp, Homo sapien
ggaggagctttagagggtgtttcta

SEQ ID NO: 1225071 - DNA, 25 bp, Homo sapien
gaaaagcctgtggagccatcttctt

SEQ ID NO: 1225072 - DNA, 25 bp, Homo sapien
aaagcctgtggagccatcttcttcc

SEQ ID NO: 1225073 - DNA, 25 bp, Homo sapien
tgttctttcttaggattctcttgtt

SEQ ID NO: 1225074 - DNA, 25 bp, Homo sapien
tctgtgtctttatatgttttctcac

SEQ ID NO: 1225075 - DNA, 25 bp, Homo sapien
caccatcccccactttgttctttct

SEQ ID NO: 1225076 - DNA, 25 bp, Homo sapien
ggactgcattctgatttgcaatttt

SEQ ID NO: 1225077 - DNA, 25 bp, Homo sapien
tggctggcccttgacgtcaatggtg

SEQ ID NO: 1225078 - DNA, 25 bp, Homo sapien
tggcccttgacgtcaatggtgttgt

SEQ ID NO: 1225079 - DNA, 25 bp, Homo sapien
gctggcccttgacgtcaatggtgtt

SEQ ID NO: 1225080 - DNA, 25 bp, Homo sapien
ggcccttgacgtcaatggtgttgtc

SEQ ID NO: 1225081 - DNA, 25 bp, Homo sapien
cagtcttcccaaattaatgatgtgg

SEQ ID NO: 1225082 - DNA, 25 bp, Homo sapien
tgatgtggaatccttgagttgctcc

SEQ ID NO: 1225083 - DNA, 25 bp, Homo sapien
gagttgctccatcatatatcaaaac

SEQ ID NO: 1225084 - DNA, 25 bp, Homo sapien
ttctggttggttggttcagctaaaa

SEQ ID NO: 1225085 - DNA, 25 bp, Homo sapien
gagacacagtgaagcggataaagga

SEQ ID NO: 1225086 - DNA, 25 bp, Homo sapien
ctgaggcctgagacaaaaggtgaaa

SEQ ID NO: 1225087 - DNA, 25 bp, Homo sapien
tcatatgcagtaaactggaggcagc

SEQ ID NO: 1225088 - DNA, 25 bp, Homo sapien
ggagggaaagatgattcacaataac

SEQ ID NO: 1225089 - DNA, 25 bp, Homo sapien
ggtggcgccaatgccctttgaagca

SEQ ID NO: 1225090 - DNA, 25 bp, Homo sapien
cattttcggagatgttggtggcgcc

SEQ ID NO: 1225091 - DNA, 25 bp, Homo sapien
caagttcaaagggattcccttgact

SEQ ID NO: 1225092 - DNA, 25 bp, Homo sapien
cccttgacttgcattttcggagatg

SEQ ID NO: 1225093 - DNA, 25 bp, Homo sapien
ggattgcaccaccagtccacctttt

SEQ ID NO: 1225094 - DNA, 25 bp, Homo sapien
gttcacttgcaagggagccagagag

SEQ ID NO: 1225095 - DNA, 25 bp, Homo sapien
cctctagaggcgtgtcaggccaagg

SEQ ID NO: 1225096 - DNA, 25 bp, Homo sapien
tctctgagccttgccggcggattgc

SEQ ID NO: 1225097 - DNA, 25 bp, Homo sapien
gactaatttcgtaacctcttccaga

SEQ ID NO: 1225098 - DNA, 25 bp, Homo sapien
ttccagattcttagattggcggtgc

SEQ ID NO: 1225099 - DNA, 25 bp, Homo sapien
ctgtgcatagccgtgggtgactaat

SEQ ID NO: 1225100 - DNA, 25 bp, Homo sapien
tgctggacagcaagtgaccagaaga

SEQ ID NO: 1225101 - DNA, 25 bp, Homo sapien
gaagcccatacttgtcactctgcca

SEQ ID NO: 1225102 - DNA, 25 bp, Homo sapien
tgatgacagcgctcttcatgaagcc

SEQ ID NO: 1225103 - DNA, 25 bp, Homo sapien
cgtgaagtctttgagcagccaggac

SEQ ID NO: 1225104 - DNA, 25 bp, Homo sapien
tacgccctctgctccataacgtagg

SEQ ID NO: 1225105 - DNA, 25 bp, Homo sapien
accacctctcaagtggtgctgaggt

SEQ ID NO: 1225106 - DNA, 25 bp, Homo sapien
gctgtggtgactccattatactcca

SEQ ID NO: 1225107 - DNA, 25 bp, Homo sapien
gagctgtggtgactccattatactc

SEQ ID NO: 1225108 - DNA, 25 bp, Homo sapien
tgggaaattaaccacctctcaagtg

SEQ ID NO: 1225109 - DNA, 25 bp, Homo sapien
gaaaagtcacttgggttaggagtca

SEQ ID NO: 1225110 - DNA, 25 bp, Homo sapien
tctgaggcatgctgcgaacgttgca

SEQ ID NO: 1225111 - DNA, 25 bp, Homo sapien
caggacactgcgctagagtttgcag

SEQ ID NO: 1225112 - DNA, 25 bp, Homo sapien
tatgcttgaccacccacgaactgtg

SEQ ID NO: 1225113 - DNA, 25 bp, Homo sapien
agccagctccgaaaccttacgttcg

SEQ ID NO: 1225114 - DNA, 25 bp, Homo sapien
taaagaccctagaggcagtgatcgg

SEQ ID NO: 1225115 - DNA, 25 bp, Homo sapien
agcctggcccgaaggatgaccagcc

SEQ ID NO: 1225116 - DNA, 25 bp, Homo sapien
cgtttccggtgtggccgcgacaaag

SEQ ID NO: 1225117 - DNA, 25 bp, Homo sapien
tggagacgcgtcacctagagctgcg

SEQ ID NO: 1225118 - DNA, 25 bp, Homo sapien
tattggagacgcgtcacctagagct

SEQ ID NO: 1225119 - DNA, 25 bp, Homo sapien
cggctcccggcgagctgttattgga

SEQ ID NO: 1225120 - DNA, 25 bp, Homo sapien
agctgttattggagacgcgtcacct

SEQ ID NO: 1225121 - DNA, 25 bp, Homo sapien
ggaagggctgcagagcccgcagccc

SEQ ID NO: 1225122 - DNA, 25 bp, Homo sapien
cgtgagcacgtaggcataggccggg

SEQ ID NO: 1225123 - DNA, 25 bp, Homo sapien
agggctgcagagcccgcagcccccg

SEQ ID NO: 1225124 - DNA, 25 bp, Homo sapien
gtgagcacgtaggcataggccgggc

SEQ ID NO: 1225125 - DNA, 25 bp, Homo sapien
cgcagtggttgccccgctcgttgac

SEQ ID NO: 1225126 - DNA, 25 bp, Homo sapien
ctggtgaagcagtactcgcagtggt

SEQ ID NO: 1225127 - DNA, 25 bp, Homo sapien
gtgaagcagtactcgcagtggttgc

SEQ ID NO: 1225128 - DNA, 25 bp, Homo sapien
ctcgcagtggttgccccgctcgttg

SEQ ID NO: 1225129 - DNA, 25 bp, Homo sapien
gcaggaacctgcacgcccgggtttg

SEQ ID NO: 1225130 - DNA, 25 bp, Homo sapien
cagcccgtggctgcccaaatttggg

SEQ ID NO: 1225131 - DNA, 25 bp, Homo sapien
aatgcaccgggagggcagtgagtgc

SEQ ID NO: 1225132 - DNA, 25 bp, Homo sapien
cgggtttgcgcatccagcgtgagca

SEQ ID NO: 1225133 - DNA, 25 bp, Homo sapien
caggtccccccaagcggaagacagt

SEQ ID NO: 1225134 - DNA, 25 bp, Homo sapien
gcccacggcatgattccgtgtctag

SEQ ID NO: 1225135 - DNA, 25 bp, Homo sapien
gattccgtgtctagttcctttccag

SEQ ID NO: 1225136 - DNA, 25 bp, Homo sapien
agcccttaagctgcccacggcatga

SEQ ID NO: 1225137 - DNA, 25 bp, Homo sapien
tgctggcacaaggaccaaactgctt

SEQ ID NO: 1225138 - DNA, 25 bp, Homo sapien
cgtgaacaaaggtggtcataagact

SEQ ID NO: 1225139 - DNA, 25 bp, Homo sapien
tgtaagtacactctagcatgctggc

SEQ ID NO: 1225140 - DNA, 25 bp, Homo sapien
gactctctcacgtagctttgtgtaa

SEQ ID NO: 1225141 - DNA, 25 bp, Homo sapien
gttgggactatactacacctggcta

SEQ ID NO: 1225142 - DNA, 25 bp, Homo sapien
gcctcctgggttcctaggttcaagc

SEQ ID NO: 1225143 - DNA, 25 bp, Homo sapien
catgcccagtccacacttttttatt

SEQ ID NO: 1225144 - DNA, 25 bp, Homo sapien
gtagttgggactatactacacctgg

SEQ ID NO: 1225145 - DNA, 25 bp, Homo sapien
cagcttaatggtgactccactggtc

SEQ ID NO: 1225146 - DNA, 25 bp, Homo sapien
gactccactggtcaacaatttccag

SEQ ID NO: 1225147 - DNA, 25 bp, Homo sapien
ccaataggccagcttaatggtgact

SEQ ID NO: 1225148 - DNA, 25 bp, Homo sapien
gcccagccaataggccagcttaatg

SEQ ID NO: 1225149 - DNA, 25 bp, Homo sapien
gatcggataccgtttgaacagattt

SEQ ID NO: 1225150 - DNA, 25 bp, Homo sapien
taaactgatcggataccgtttgaac

SEQ ID NO: 1225151 - DNA, 25 bp, Homo sapien
ccgtttgaacagatttagcagacat

SEQ ID NO: 1225152 - DNA, 25 bp, Homo sapien
cttgaaaacttaaactgatcggata

SEQ ID NO: 1225153 - DNA, 25 bp, Homo sapien
aaagatatcgtttccacctcatagg

SEQ ID NO: 1225154 - DNA, 25 bp, Homo sapien
tctaccctactgtgaacagaagggc

SEQ ID NO: 1225155 - DNA, 25 bp, Homo sapien
tcaataaatgctgggtactactaca

SEQ ID NO: 1225156 - DNA, 25 bp, Homo sapien
tctcactcagactcatagctagagg

SEQ ID NO: 1225157 - DNA, 25 bp, Homo sapien
tgatagctactgttactgatagtga

SEQ ID NO: 1225158 - DNA, 25 bp, Homo sapien
tactgatagtgaataacataagaat

SEQ ID NO: 1225159 - DNA, 25 bp, Homo sapien
aaagctaacagtttttgatagctac

SEQ ID NO: 1225160 - DNA, 25 bp, Homo sapien
cataggtcttcttgggccagcttgc

SEQ ID NO: 1225161 - DNA, 25 bp, Homo sapien
aaaagctttgcctggctctagggaa

SEQ ID NO: 1225162 - DNA, 25 bp, Homo sapien
tcattcagtatcgtgagcctacatg

SEQ ID NO: 1225163 - DNA, 25 bp, Homo sapien
tattgtgtacatagaaggtccctcc

SEQ ID NO: 1225164 - DNA, 25 bp, Homo sapien
catgtgctctaggaacctggtgaga

SEQ ID NO: 1225165 - DNA, 25 bp, Homo sapien
tatggcttctgattgcacatcacaa

SEQ ID NO: 1225166 - DNA, 25 bp, Homo sapien
gaacatccgcatttaactgagaagg

SEQ ID NO: 1225167 - DNA, 25 bp, Homo sapien
ccaagtgcaaggtaaaccaatggat

SEQ ID NO: 1225168 - DNA, 25 bp, Homo sapien
tagatctgccatcctaagcttgaca

SEQ ID NO: 1225169 - DNA, 25 bp, Homo sapien
aacccaccagtatgaagagcactgt

SEQ ID NO: 1225170 - DNA, 25 bp, Homo sapien
ccaaagacaccaaggctatgaacat

SEQ ID NO: 1225171 - DNA, 25 bp, Homo sapien
atttaccaaacccaccagtatgaag

SEQ ID NO: 1225172 - DNA, 25 bp, Homo sapien
tggtgacctggccaaagacaccaag

SEQ ID NO: 1225173 - DNA, 25 bp, Homo sapien
cttaagagtttgaccagattcagcc

SEQ ID NO: 1225174 - DNA, 25 bp, Homo sapien
ccttaagagtttgaccagattcagc

SEQ ID NO: 1225175 - DNA, 25 bp, Homo sapien
gttccttaagagtttgaccagattc

SEQ ID NO: 1225176 - DNA, 25 bp, Homo sapien
tccttaagagtttgaccagattcag

SEQ ID NO: 1225177 - DNA, 25 bp, Homo sapien
ttactctcccactgagaaggtgcat

SEQ ID NO: 1225178 - DNA, 25 bp, Homo sapien
cttactctcccactgagaaggtgca

SEQ ID NO: 1225179 - DNA, 25 bp, Homo sapien
acattgcagtaaaatgcctgcttgc

SEQ ID NO: 1225180 - DNA, 25 bp, Homo sapien
tgacactccacattgcagtaaaatg

SEQ ID NO: 1225181 - DNA, 25 bp, Homo sapien
tgcatcttccacatttggacaatcc

SEQ ID NO: 1225182 - DNA, 25 bp, Homo sapien
ttccacatttggacaatccttcttt

SEQ ID NO: 1225183 - DNA, 25 bp, Homo sapien
ttggccagaatccttgctgttagtc

SEQ ID NO: 1225184 - DNA, 25 bp, Homo sapien
gttagtcttacagtctccgagggat

SEQ ID NO: 1225185 - DNA, 25 bp, Homo sapien
gcttgtgcatgggccaatcttcttt

SEQ ID NO: 1225186 - DNA, 25 bp, Homo sapien
cccaaaaacaaccatgggagaacat

SEQ ID NO: 1225187 - DNA, 25 bp, Homo sapien
aactccttcacagctaacaattttt

SEQ ID NO: 1225188 - DNA, 25 bp, Homo sapien
aatttttccgaaggtgttctctctg

SEQ ID NO: 1225189 - DNA, 25 bp, Homo sapien
tccttcacagctaacaatttttccg

SEQ ID NO: 1225190 - DNA, 25 bp, Homo sapien
caatttttccgaaggtgttctctct

SEQ ID NO: 1225191 - DNA, 25 bp, Homo sapien
gctatcattgtcagggaatccgaga

SEQ ID NO: 1225192 - DNA, 25 bp, Homo sapien
ctgtgcaaagagtactacgaggcta

SEQ ID NO: 1225193 - DNA, 25 bp, Homo sapien
gcaaagagtactacgaggctatcat

SEQ ID NO: 1225194 - DNA, 25 bp, Homo sapien
tactacgaggctatcattgtcaggg

SEQ ID NO: 1225195 - DNA, 25 bp, Homo sapien
gggccatcacaaagggccctcctat

SEQ ID NO: 1225196 - DNA, 25 bp, Homo sapien
tccttcctcgggccatcacaaaggg

SEQ ID NO: 1225197 - DNA, 25 bp, Homo sapien
aagggccctcctatcagtgcagcct

SEQ ID NO: 1225198 - DNA, 25 bp, Homo sapien
tcacaaagggccctcctatcagtgc

SEQ ID NO: 1225199 - DNA, 25 bp, Homo sapien
ggtgggaccggtggcatgtggctgc

SEQ ID NO: 1225200 - DNA, 25 bp, Homo sapien
gtgggaccggtggcatgtggctgca

SEQ ID NO: 1225201 - DNA, 25 bp, Homo sapien
tgggaccggtggcatgtggctgcag

SEQ ID NO: 1225202 - DNA, 25 bp, Homo sapien
ggaacagcagacacgtagctgctgg

SEQ ID NO: 1225203 - DNA, 25 bp, Homo sapien
tggaacagcagacacgtagctgctg

SEQ ID NO: 1225204 - DNA, 25 bp, Homo sapien
ctggaacagcagacacgtagctgct

SEQ ID NO: 1225205 - DNA, 25 bp, Homo sapien
tggaccagacggtggaaagggctca

SEQ ID NO: 1225206 - DNA, 25 bp, Homo sapien
gtctcgaggtaacccacaacagcct

SEQ ID NO: 1225207 - DNA, 25 bp, Homo sapien
ctgctgccaggtctcgaggtaaccc

SEQ ID NO: 1225208 - DNA, 25 bp, Homo sapien
tgccaggtctcgaggtaacccacaa

SEQ ID NO: 1225209 - DNA, 25 bp, Homo sapien
atagcaattttcctgccagctttcc

SEQ ID NO: 1225210 - DNA, 25 bp, Homo sapien
gctttccttcccttctgaaatatcc

SEQ ID NO: 1225211 - DNA, 25 bp, Homo sapien
agcaattttcctgccagctttcctt

SEQ ID NO: 1225212 - DNA, 25 bp, Homo sapien
cagctttccttcccttctgaaatat

SEQ ID NO: 1225213 - DNA, 25 bp, Homo sapien
ggaaatatcgctgatcccaaatgag

SEQ ID NO: 1225214 - DNA, 25 bp, Homo sapien
aatatcgctgatcccaaatgagaaa

SEQ ID NO: 1225215 - DNA, 25 bp, Homo sapien
caggaaatatcgctgatcccaaatg

SEQ ID NO: 1225216 - DNA, 25 bp, Homo sapien
gaaatatcgctgatcccaaatgaga

SEQ ID NO: 1225217 - DNA, 25 bp, Homo sapien
gctgttccttctatgcgcgctataa

SEQ ID NO: 1225218 - DNA, 25 bp, Homo sapien
tagtctgtactcaagcttgtggcca

SEQ ID NO: 1225219 - DNA, 25 bp, Homo sapien
caaatttctcagcagggcatgagct

SEQ ID NO: 1225220 - DNA, 25 bp, Homo sapien
gcctagcaggacttaacaagcaact

SEQ ID NO: 1225221 - DNA, 25 bp, Homo sapien
agttataaaggtgtcaatacacgcc

SEQ ID NO: 1225222 - DNA, 25 bp, Homo sapien
tgcccggcagcaccttactcttaat

SEQ ID NO: 1225223 - DNA, 25 bp, Homo sapien
ggtgtcaatacacgccttcttcagt

SEQ ID NO: 1225224 - DNA, 25 bp, Homo sapien
caccacacctgtaaggcgtgcccgg

SEQ ID NO: 1225225 - DNA, 25 bp, Homo sapien
ttaaaatgagataggcagactgttt

SEQ ID NO: 1225226 - DNA, 25 bp, Homo sapien
ggtcacaatgacattggggcaacag

SEQ ID NO: 1225227 - DNA, 25 bp, Homo sapien
ctgccagggtccctttgtaggtcac

SEQ ID NO: 1225228 - DNA, 25 bp, Homo sapien
tctcccggcttgatttcctgtacag

SEQ ID NO: 1225229 - DNA, 25 bp, Homo sapien
gatttcctgtacagctctgacttct

SEQ ID NO: 1225230 - DNA, 25 bp, Homo sapien
gaaataagaatctcttaaccggtca

SEQ ID NO: 1225231 - DNA, 25 bp, Homo sapien
ccgttgggtacaggagatcaatata

SEQ ID NO: 1225232 - DNA, 25 bp, Homo sapien
tcatttctatcttccgttgggtaca

SEQ ID NO: 1225233 - DNA, 25 bp, Homo sapien
ggagatcaatatagctggtaaaaac

SEQ ID NO: 1225234 - DNA, 25 bp, Homo sapien
tcttcaatgacgttgcgtgcatatc

SEQ ID NO: 1225235 - DNA, 25 bp, Homo sapien
catatctgaccatgtctcggatggc

SEQ ID NO: 1225236 - DNA, 25 bp, Homo sapien
tgtctcggatggcttctgcctttgg

SEQ ID NO: 1225237 - DNA, 25 bp, Homo sapien
ggatcgctgagcttccggatttcca

SEQ ID NO: 1225238 - DNA, 25 bp, Homo sapien
tttatagtgcttggccctccggaac

SEQ ID NO: 1225239 - DNA, 25 bp, Homo sapien
atttatagtgcttggccctccggaa

SEQ ID NO: 1225240 - DNA, 25 bp, Homo sapien
aataagctatcagggcagttgtaaa

SEQ ID NO: 1225241 - DNA, 25 bp, Homo sapien
tgccttgttggcgagggataataag

SEQ ID NO: 1225242 - DNA, 25 bp, Homo sapien
cgagggataataagctatcagggca

SEQ ID NO: 1225243 - DNA, 25 bp, Homo sapien
ttggcgagggataataagctatcag

SEQ ID NO: 1225244 - DNA, 25 bp, Homo sapien
ggttttcagaatcttaaatccatcc

SEQ ID NO: 1225245 - DNA, 25 bp, Homo sapien
tttcagaatcttaaatccatccttc

SEQ ID NO: 1225246 - DNA, 25 bp, Homo sapien
tttggttttcagaatcttaaatcca

SEQ ID NO: 1225247 - DNA, 25 bp, Homo sapien
tcagaatcttaaatccatccttctc

SEQ ID NO: 1225248 - DNA, 25 bp, Homo sapien
cattgtgggtggtcagtacgccttt

SEQ ID NO: 1225249 - DNA, 25 bp, Homo sapien
ggtcggaaccgctcaactcaagaat

SEQ ID NO: 1225250 - DNA, 25 bp, Homo sapien
tcaagaattttagccgcagggtcca

SEQ ID NO: 1225251 - DNA, 25 bp, Homo sapien
tctgatagagctgggacaaaatcct

SEQ ID NO: 1225252 - DNA, 25 bp, Homo sapien
tggctgagctcgcagatctccagca

SEQ ID NO: 1225253 - DNA, 25 bp, Homo sapien
ttcccagtcctgcatgtacaagcag

SEQ ID NO: 1225254 - DNA, 25 bp, Homo sapien
tacaagcagacacccatggcctggt

SEQ ID NO: 1225255 - DNA, 25 bp, Homo sapien
tgcaacatgtacacgttactgtcct

SEQ ID NO: 1225256 - DNA, 25 bp, Homo sapien
taactactatggatatggccctgga

SEQ ID NO: 1225257 - DNA, 25 bp, Homo sapien
cactccgtggatgattagaacagcc

SEQ ID NO: 1225258 - DNA, 25 bp, Homo sapien
tatttaaaggctaggctgttccacc

SEQ ID NO: 1225259 - DNA, 25 bp, Homo sapien
gggctcacgcagataaagatgggtc

SEQ ID NO: 1225260 - DNA, 25 bp, Homo sapien
cggctttgtgttccaggcccatgta

SEQ ID NO: 1225261 - DNA, 25 bp, Homo sapien
gtctccctagcttcaaccacatgga

SEQ ID NO: 1225262 - DNA, 25 bp, Homo sapien
aggcccatgtagagtctccctagct

SEQ ID NO: 1225263 - DNA, 25 bp, Homo sapien
ctccctagcttcaaccacatggagg

SEQ ID NO: 1225264 - DNA, 25 bp, Homo sapien
gggtcttggtatgtaactggtcctc

SEQ ID NO: 1225265 - DNA, 25 bp, Homo sapien
ggaaaagcacacgagggtcttggta

SEQ ID NO: 1225266 - DNA, 25 bp, Homo sapien
catcaggaaagcctctcggttttgt

SEQ ID NO: 1225267 - DNA, 25 bp, Homo sapien
gaaagcctctcggttttgtgagaat

SEQ ID NO: 1225268 - DNA, 25 bp, Homo sapien
tacagtgtttcgaacagcgcctggc

SEQ ID NO: 1225269 - DNA, 25 bp, Homo sapien
cctagatctcaagccaagaggaggc

SEQ ID NO: 1225270 - DNA, 25 bp, Homo sapien
tgcaagccttcggaaatcacctgtt

SEQ ID NO: 1225271 - DNA, 25 bp, Homo sapien
ggtgaaagattaggcctgcaggccc

SEQ ID NO: 1225272 - DNA, 25 bp, Homo sapien
gacaaacaatgagagcctagaagcc

SEQ ID NO: 1225273 - DNA, 25 bp, Homo sapien
tctactgctaggtaaaacattctgc

SEQ ID NO: 1225274 - DNA, 25 bp, Homo sapien
cacaggatgcaaactggccattaga

SEQ ID NO: 1225275 - DNA, 25 bp, Homo sapien
tggtagctaactcatccagtgtcta

SEQ ID NO: 1225276 - DNA, 25 bp, Homo sapien
tggatgatctttgccgtgagctact

SEQ ID NO: 1225277 - DNA, 25 bp, Homo sapien
gagctacttccatgattgcaatggc

SEQ ID NO: 1225278 - DNA, 25 bp, Homo sapien
tatatggatgatctttgccgtgagc

SEQ ID NO: 1225279 - DNA, 25 bp, Homo sapien
tctttgccgtgagctacttccatga

SEQ ID NO: 1225280 - DNA, 25 bp, Homo sapien
caaagtacggcatgtgcagtgttta

SEQ ID NO: 1225281 - DNA, 25 bp, Homo sapien
cagaacattacaagaggcatgaaag

SEQ ID NO: 1225282 - DNA, 25 bp, Homo sapien
gctggagtgacgtgtgcaatttgaa

SEQ ID NO: 1225283 - DNA, 25 bp, Homo sapien
aaaccatgccattatctcttaggaa

SEQ ID NO: 1225284 - DNA, 25 bp, Homo sapien
tgcagaataaagaggctgcccgacc

SEQ ID NO: 1225285 - DNA, 25 bp, Homo sapien
gaagttcctctctttcgactacaag

SEQ ID NO: 1225286 - DNA, 25 bp, Homo sapien
tttacacactgaaggaataccaggc

SEQ ID NO: 1225287 - DNA, 25 bp, Homo sapien
agattcaaaacctcgcctgctggag

SEQ ID NO: 1225288 - DNA, 25 bp, Homo sapien
catatcaagggtgataggaggctct

SEQ ID NO: 1225289 - DNA, 25 bp, Homo sapien
taccccaatatatacagagctcaga

SEQ ID NO: 1225290 - DNA, 25 bp, Homo sapien
gcaatggccatgtggtatcacagaa

SEQ ID NO: 1225291 - DNA, 25 bp, Homo sapien
tatatgacaaggagctaatacccca

SEQ ID NO: 1225292 - DNA, 25 bp, Homo sapien
ttcactggactaggcttgtgctccc

SEQ ID NO: 1225293 - DNA, 25 bp, Homo sapien
tgaaacgatgtacagacaagtcccc

SEQ ID NO: 1225294 - DNA, 25 bp, Homo sapien
cttgggatcctgagagcacattcgc

SEQ ID NO: 1225295 - DNA, 25 bp, Homo sapien
taaggttcttgcgtcagcccataga

SEQ ID NO: 1225296 - DNA, 25 bp, Homo sapien
cagaaatatgtaattaggaaatctt

SEQ ID NO: 1225297 - DNA, 25 bp, Homo sapien
tatggatcaactctcaacagtacac

SEQ ID NO: 1225298 - DNA, 25 bp, Homo sapien
gatgtaagagttaatcctcgtcaga

SEQ ID NO: 1225299 - DNA, 25 bp, Homo sapien
ctaccctatgagtgcaacccagatg

SEQ ID NO: 1225300 - DNA, 25 bp, Homo sapien
cagccgctgttttcgaggttttcca

SEQ ID NO: 1225301 - DNA, 25 bp, Homo sapien
cgaggttttccagttgaactgtttg

SEQ ID NO: 1225302 - DNA, 25 bp, Homo sapien
tggatacattgacccgaggtattca

SEQ ID NO: 1225303 - DNA, 25 bp, Homo sapien
gccatcaaacattttccagccgctg

SEQ ID NO: 1225304 - DNA, 25 bp, Homo sapien
aaagaaacccattagtattacatgt

SEQ ID NO: 1225305 - DNA, 25 bp, Homo sapien
gaagctcatcaataagcaaaaagat

SEQ ID NO: 1225306 - DNA, 25 bp, Homo sapien
tcagtgaacagagcttataaccctt

SEQ ID NO: 1225307 - DNA, 25 bp, Homo sapien
taacccttattataagaagctcatc

SEQ ID NO: 1225308 - DNA, 25 bp, Homo sapien
ctcagtgaaggagtataatctgctg

SEQ ID NO: 1225309 - DNA, 25 bp, Homo sapien
gtgaaggagtataatctgctgatct

SEQ ID NO: 1225310 - DNA, 25 bp, Homo sapien
tctgaaggctcagtgaaggagtata

SEQ ID NO: 1225311 - DNA, 25 bp, Homo sapien
gagtataatctgctgatctttgtag

SEQ ID NO: 1225312 - DNA, 25 bp, Homo sapien
aaaagtatgcctttgtgacatccca

SEQ ID NO: 1225313 - DNA, 25 bp, Homo sapien
ccatcaccacatgccaacaggtata

SEQ ID NO: 1225314 - DNA, 25 bp, Homo sapien
cctctgtttcaacctggccaggtgt

SEQ ID NO: 1225315 - DNA, 25 bp, Homo sapien
taagttcttcggaataggaatcctc

SEQ ID NO: 1225316 - DNA, 25 bp, Homo sapien
ggcttcattctgattgtaggtgaca

SEQ ID NO: 1225317 - DNA, 25 bp, Homo sapien
ctttggtttgtctgatgagtcggct

SEQ ID NO: 1225318 - DNA, 25 bp, Homo sapien
tcccagtaacctcctctgagatact

SEQ ID NO: 1225319 - DNA, 25 bp, Homo sapien
tgatgagtcggctgccaccaggata

SEQ ID NO: 1225320 - DNA, 25 bp, Homo sapien
gcaggtatggtgagaatttgccctc

SEQ ID NO: 1225321 - DNA, 25 bp, Homo sapien
tctgtttgatggatggttccgccgc

SEQ ID NO: 1225322 - DNA, 25 bp, Homo sapien
taagggccctcttgatcagaacaca

SEQ ID NO: 1225323 - DNA, 25 bp, Homo sapien
tgtagtcccctagccagaagttgat

SEQ ID NO: 1225324 - DNA, 25 bp, Homo sapien
tattagagagtattgccccagcaga

SEQ ID NO: 1225325 - DNA, 25 bp, Homo sapien
gagcataagccactcacaggttttg

SEQ ID NO: 1225326 - DNA, 25 bp, Homo sapien
tatccaggcattgagtcctaccagt

SEQ ID NO: 1225327 - DNA, 25 bp, Homo sapien
gcatgtagctatgagtccacgtaga

SEQ ID NO: 1225328 - DNA, 25 bp, Homo sapien
ggtgccttatttgtagttctgtggt

SEQ ID NO: 1225329 - DNA, 25 bp, Homo sapien
ctggtgccttatttgtagttctgtg

SEQ ID NO: 1225330 - DNA, 25 bp, Homo sapien
cttatttgtagttctgtggtaatac

SEQ ID NO: 1225331 - DNA, 25 bp, Homo sapien
gccttatttgtagttctgtggtaat

SEQ ID NO: 1225332 - DNA, 25 bp, Homo sapien
gatttaccatgactaatttacattc

SEQ ID NO: 1225333 - DNA, 25 bp, Homo sapien
aaactgctttctaccatggctgatt

SEQ ID NO: 1225334 - DNA, 25 bp, Homo sapien
gtctaccaccgatggatatttaggt

SEQ ID NO: 1225335 - DNA, 25 bp, Homo sapien
tgcccatgtgttctagatgtttagc

SEQ ID NO: 1225336 - DNA, 25 bp, Homo sapien
tacaaaagggtgagagcactggtct

SEQ ID NO: 1225337 - DNA, 25 bp, Homo sapien
tgaatgttgtcacgtggaccaggta

SEQ ID NO: 1225338 - DNA, 25 bp, Homo sapien
cctgtagagggagccaccatattgg

SEQ ID NO: 1225339 - DNA, 25 bp, Homo sapien
tagcccatgtggtatcctgtagagg

SEQ ID NO: 1225340 - DNA, 25 bp, Homo sapien
aagcttccttcaatgcagtcaaggg

SEQ ID NO: 1225341 - DNA, 25 bp, Homo sapien
cacttgtctaatgaggacttgatcc

SEQ ID NO: 1225342 - DNA, 25 bp, Homo sapien
gatcccggtggttatcacagatttc

SEQ ID NO: 1225343 - DNA, 25 bp, Homo sapien
ggttatcacagatttcccaaaattg

SEQ ID NO: 1225344 - DNA, 25 bp, Homo sapien
tgccagctcagagtccattagctct

SEQ ID NO: 1225345 - DNA, 25 bp, Homo sapien
ccagctcagagtccattagctcttc

SEQ ID NO: 1225346 - DNA, 25 bp, Homo sapien
tctgccagctcagagtccattagct

SEQ ID NO: 1225347 - DNA, 25 bp, Homo sapien
ctgtaggtccacttctgccagctca

SEQ ID NO: 1225348 - DNA, 25 bp, Homo sapien
cttatgttgtctttcgatgcagcct

SEQ ID NO: 1225349 - DNA, 25 bp, Homo sapien
ccttagctacaccatgaactagtgg

SEQ ID NO: 1225350 - DNA, 25 bp, Homo sapien
tgtctttcgatgcagccttagctac

SEQ ID NO: 1225351 - DNA, 25 bp, Homo sapien
gatgcagccttagctacaccatgaa

SEQ ID NO: 1225352 - DNA, 25 bp, Homo sapien
ccagtcagaacctcgtaggcagtcc

SEQ ID NO: 1225353 - DNA, 25 bp, Homo sapien
tggcttcacttgcagctgtccccag

SEQ ID NO: 1225354 - DNA, 25 bp, Homo sapien
taggcagtccgttctgaggcttcct

SEQ ID NO: 1225355 - DNA, 25 bp, Homo sapien
tctgacctccgaacatgtcttgctt

SEQ ID NO: 1225356 - DNA, 25 bp, Homo sapien
cattagttgtgctgcaatctccaga

SEQ ID NO: 1225357 - DNA, 25 bp, Homo sapien
gattgtgtcagttgtacccaaggga

SEQ ID NO: 1225358 - DNA, 25 bp, Homo sapien
taagaagaaggagcatgccaaaccc

SEQ ID NO: 1225359 - DNA, 25 bp, Homo sapien
attaaccgggcatgatgatgtgcgc

SEQ ID NO: 1225360 - DNA, 25 bp, Homo sapien
gacttctgaatcttcgcagagattt

SEQ ID NO: 1225361 - DNA, 25 bp, Homo sapien
atttagtgctgattctgtgtagttc

SEQ ID NO: 1225362 - DNA, 25 bp, Homo sapien
tgggaattgcaacatgatctccagg

SEQ ID NO: 1225363 - DNA, 25 bp, Homo sapien
acattgccttctgtcacagtgctgg

SEQ ID NO: 1225364 - DNA, 25 bp, Homo sapien
tggcattggttactcctgatcgaat

SEQ ID NO: 1225365 - DNA, 25 bp, Homo sapien
ttagggcttcgcagtataaatttct

SEQ ID NO: 1225366 - DNA, 25 bp, Homo sapien
tcctgatcgaatgcataagatcaag

SEQ ID NO: 1225367 - DNA, 25 bp, Homo sapien
gtataaatttctaagttggcattgg

SEQ ID NO: 1225368 - DNA, 25 bp, Homo sapien
tgaggtatctgtagtcagctctgtt

SEQ ID NO: 1225369 - DNA, 25 bp, Homo sapien
aggtatctgtagtcagctctgtttt

SEQ ID NO: 1225370 - DNA, 25 bp, Homo sapien
gtatctgtagtcagctctgtttttc

SEQ ID NO: 1225371 - DNA, 25 bp, Homo sapien
atgaggtatctgtagtcagctctgt

SEQ ID NO: 1225372 - DNA, 25 bp, Homo sapien
agtaattggtggagaagttggagca

SEQ ID NO: 1225373 - DNA, 25 bp, Homo sapien
agttggagcaagtggtgaaactcat

SEQ ID NO: 1225374 - DNA, 25 bp, Homo sapien
gaagttggagcaagtggtgaaactc

SEQ ID NO: 1225375 - DNA, 25 bp, Homo sapien
gagaagttggagcaagtggtgaaac

SEQ ID NO: 1225376 - DNA, 25 bp, Homo sapien
cccctggcacgtgcataggctctgg

SEQ ID NO: 1225377 - DNA, 25 bp, Homo sapien
ccctggcacgtgcataggctctggc

SEQ ID NO: 1225378 - DNA, 25 bp, Homo sapien
agagcccctggcacgtgcataggct

SEQ ID NO: 1225379 - DNA, 25 bp, Homo sapien
agcccctggcacgtgcataggctct

SEQ ID NO: 1225380 - DNA, 25 bp, Homo sapien
cttgaagtaatggcccccagtctct

SEQ ID NO: 1225381 - DNA, 25 bp, Homo sapien
gaagtaatggcccccagtctctgac

SEQ ID NO: 1225382 - DNA, 25 bp, Homo sapien
tgaagtaatggcccccagtctctga

SEQ ID NO: 1225383 - DNA, 25 bp, Homo sapien
ttgaagtaatggcccccagtctctg

SEQ ID NO: 1225384 - DNA, 25 bp, Homo sapien
acagactggcgcctgagagtctgtc

SEQ ID NO: 1225385 - DNA, 25 bp, Homo sapien
ccacagactggcgcctgagagtctg

SEQ ID NO: 1225386 - DNA, 25 bp, Homo sapien
cacagactggcgcctgagagtctgt

SEQ ID NO: 1225387 - DNA, 25 bp, Homo sapien
tccacagactggcgcctgagagtct

SEQ ID NO: 1225388 - DNA, 25 bp, Homo sapien
cttgtaggccttttagttcatcttt

SEQ ID NO: 1225389 - DNA, 25 bp, Homo sapien
tttagttcatctttgtggttcttca

SEQ ID NO: 1225390 - DNA, 25 bp, Homo sapien
ttgtaggccttttagttcatctttg

SEQ ID NO: 1225391 - DNA, 25 bp, Homo sapien
agttcatctttgtggttcttcatga

SEQ ID NO: 1225392 - DNA, 25 bp, Homo sapien
gcactcctgggcttggtgttgcgcc

SEQ ID NO: 1225393 - DNA, 25 bp, Homo sapien
gcggtaggtggtgaccctagcctcc

SEQ ID NO: 1225394 - DNA, 25 bp, Homo sapien
tgggccagccctgacgccaggtgca

SEQ ID NO: 1225395 - DNA, 25 bp, Homo sapien
tcagtccgctcagaccagcacttgt

SEQ ID NO: 1225396 - DNA, 25 bp, Homo sapien
ccaagattgaagattgaagtcctca

SEQ ID NO: 1225397 - DNA, 25 bp, Homo sapien
caccaagattgaagattgaagtcct

SEQ ID NO: 1225398 - DNA, 25 bp, Homo sapien
tcaccaagattgaagattgaagtcc

SEQ ID NO: 1225399 - DNA, 25 bp, Homo sapien
caagattgaagattgaagtcctcac

SEQ ID NO: 1225400 - DNA, 25 bp, Homo sapien
tagtgtcgttggactgagacaccac

SEQ ID NO: 1225401 - DNA, 25 bp, Homo sapien
cagaactttagtgtcgttggactga

SEQ ID NO: 1225402 - DNA, 25 bp, Homo sapien
actcactttgcggcaggtggtggtc

SEQ ID NO: 1225403 - DNA, 25 bp, Homo sapien
aactttagtgtcgttggactgagac

SEQ ID NO: 1225404 - DNA, 25 bp, Homo sapien
gctggccatcccgtaaatgctttat

SEQ ID NO: 1225405 - DNA, 25 bp, Homo sapien
ttaggcccaggtcaagagtttcatc

SEQ ID NO: 1225406 - DNA, 25 bp, Homo sapien
gactactgcatatccagagagccgt

SEQ ID NO: 1225407 - DNA, 25 bp, Homo sapien
tcaattagtttgaccccgaggacta

SEQ ID NO: 1225408 - DNA, 25 bp, Homo sapien
gaagtggtgttgtagtattgttcat

SEQ ID NO: 1225409 - DNA, 25 bp, Homo sapien
tcaagggtgtctcttcactggactg

SEQ ID NO: 1225410 - DNA, 25 bp, Homo sapien
ttgcctttcaagggtgtctcttcac

SEQ ID NO: 1225411 - DNA, 25 bp, Homo sapien
tcactggactgaagtggtgttgtag

SEQ ID NO: 1225412 - DNA, 25 bp, Homo sapien
tcctacttgggtggtcgagctggct

SEQ ID NO: 1225413 - DNA, 25 bp, Homo sapien
gctagaggatgaaagacgaacgacg

SEQ ID NO: 1225414 - DNA, 25 bp, Homo sapien
cctcggaagggcaactagagatacc

SEQ ID NO: 1225415 - DNA, 25 bp, Homo sapien
atgtaagcaggtaagccccgtccaa

SEQ ID NO: 1225416 - DNA, 25 bp, Homo sapien
ctcgggcgggacagccccgtgctta

SEQ ID NO: 1225417 - DNA, 25 bp, Homo sapien
tgctcggactctcgcgccgggatcg

SEQ ID NO: 1225418 - DNA, 25 bp, Homo sapien
cccggtgcgcctctgctcggactct

SEQ ID NO: 1225419 - DNA, 25 bp, Homo sapien
tctcgcgccgggatcgcggcggaaa

SEQ ID NO: 1225420 - DNA, 25 bp, Homo sapien
aactccgtgaaggtgttattggctc

SEQ ID NO: 1225421 - DNA, 25 bp, Homo sapien
cactcacagtgaattctatagctgt

SEQ ID NO: 1225422 - DNA, 25 bp, Homo sapien
ctctcattcaactccgtgaaggtgt

SEQ ID NO: 1225423 - DNA, 25 bp, Homo sapien
cattcaactccgtgaaggtgttatt

SEQ ID NO: 1225424 - DNA, 25 bp, Homo sapien
gctggaatggagggtctcttacaca

SEQ ID NO: 1225425 - DNA, 25 bp, Homo sapien
ctggaatggagggtctcttacacat

SEQ ID NO: 1225426 - DNA, 25 bp, Homo sapien
agctggaatggagggtctcttacac

SEQ ID NO: 1225427 - DNA, 25 bp, Homo sapien
tcacacagggaggccggagcccagg

SEQ ID NO: 1225428 - DNA, 25 bp, Homo sapien
atgtgtcacacagggaggccggagc

SEQ ID NO: 1225429 - DNA, 25 bp, Homo sapien
catgtgtcacacagggaggccggag

SEQ ID NO: 1225430 - DNA, 25 bp, Homo sapien
cacagggaggccggagcccaggcat

SEQ ID NO: 1225431 - DNA, 25 bp, Homo sapien
ctaggtggtcactggacctgctagg

SEQ ID NO: 1225432 - DNA, 25 bp, Homo sapien
cctgatgtacacaagggcctgtttg

SEQ ID NO: 1225433 - DNA, 25 bp, Homo sapien
gacctgctaggtatcgcttttcata

SEQ ID NO: 1225434 - DNA, 25 bp, Homo sapien
cgcttttcataacctgatgtacaca

SEQ ID NO: 1225435 - DNA, 25 bp, Homo sapien
ccagagtctaattcaaactgcccgc

SEQ ID NO: 1225436 - DNA, 25 bp, Homo sapien
gagtctaattcaaactgcccgcagc

SEQ ID NO: 1225437 - DNA, 25 bp, Homo sapien
gcccagagtctaattcaaactgccc

SEQ ID NO: 1225438 - DNA, 25 bp, Homo sapien
gagcccagagtctaattcaaactgc

SEQ ID NO: 1225439 - DNA, 25 bp, Homo sapien
tctcggagagtacagttctggcgcg

SEQ ID NO: 1225440 - DNA, 25 bp, Homo sapien
acgacctctcggagagtacagttct

SEQ ID NO: 1225441 - DNA, 25 bp, Homo sapien
cctctcggagagtacagttctggcg

SEQ ID NO: 1225442 - DNA, 25 bp, Homo sapien
ggaaaacgacctctcggagagtaca

SEQ ID NO: 1225443 - DNA, 25 bp, Homo sapien
gattctccagttcggtcgggtggga

SEQ ID NO: 1225444 - DNA, 25 bp, Homo sapien
catcccggggcggattctccagttc

SEQ ID NO: 1225445 - DNA, 25 bp, Homo sapien
gaccagtttgaacccgagcagaagg

SEQ ID NO: 1225446 - DNA, 25 bp, Homo sapien
agaagggcgcagacacccctacgaa

SEQ ID NO: 1225447 - DNA, 25 bp, Homo sapien
ccgtgaccgagtagggtctgggaca

SEQ ID NO: 1225448 - DNA, 25 bp, Homo sapien
ccctaaagtgtgagtccgtgaccga

SEQ ID NO: 1225449 - DNA, 25 bp, Homo sapien
tagtcatctccaattcttttacgga

SEQ ID NO: 1225450 - DNA, 25 bp, Homo sapien
tcttttacggaggaagaaaatgatc

SEQ ID NO: 1225451 - DNA, 25 bp, Homo sapien
tacatcaagatgctatagccaacag

SEQ ID NO: 1225452 - DNA, 25 bp, Homo sapien
tagatgtagaccaagctaactgtga

SEQ ID NO: 1225453 - DNA, 25 bp, Homo sapien
accaacaaaggacaactgaccctgt

SEQ ID NO: 1225454 - DNA, 25 bp, Homo sapien
tccaatctagtttgtcaggagtcaa

SEQ ID NO: 1225455 - DNA, 25 bp, Homo sapien
cctaacatcgagaaggtgtccaaga

SEQ ID NO: 1225456 - DNA, 25 bp, Homo sapien
agactggagggtcgcatccggagct

SEQ ID NO: 1225457 - DNA, 25 bp, Homo sapien
tgcttcgacgccttccctaacatcg

SEQ ID NO: 1225458 - DNA, 25 bp, Homo sapien
tcacctcgggcatgcgcgtcgcctt

SEQ ID NO: 1225459 - DNA, 25 bp, Homo sapien
cgccgcggtgttgagggctgggggt

SEQ ID NO: 1225460 - DNA, 25 bp, Homo sapien
ggtggccctcgggactggtgtggag

SEQ ID NO: 1225461 - DNA, 25 bp, Homo sapien
tggagcctgggcctgacccactgac

SEQ ID NO: 1225462 - DNA, 25 bp, Homo sapien
gccctcgggactggtgtggagcctg

SEQ ID NO: 1225463 - DNA, 25 bp, Homo sapien
gccgaggacttgtccactcccaagg

SEQ ID NO: 1225464 - DNA, 25 bp, Homo sapien
tgaggtggccgaggacttgtccact

SEQ ID NO: 1225465 - DNA, 25 bp, Homo sapien
aggtggccgaggacttgtccactcc

SEQ ID NO: 1225466 - DNA, 25 bp, Homo sapien
tggccgaggacttgtccactcccaa

SEQ ID NO: 1225467 - DNA, 25 bp, Homo sapien
gggtcacgggctgcacaccagtgac

SEQ ID NO: 1225468 - DNA, 25 bp, Homo sapien
ctgggtcacgggctgcacaccagtg

SEQ ID NO: 1225469 - DNA, 25 bp, Homo sapien
tgggtcacgggctgcacaccagtga

SEQ ID NO: 1225470 - DNA, 25 bp, Homo sapien
agctgggtcacgggctgcacaccag

SEQ ID NO: 1225471 - DNA, 25 bp, Homo sapien
agctgtggagtgctgccaggaggct

SEQ ID NO: 1225472 - DNA, 25 bp, Homo sapien
cctgctggtggagtccgaatgccag

SEQ ID NO: 1225473 - DNA, 25 bp, Homo sapien
ggctcctgcctggtagcaggtgaca

SEQ ID NO: 1225474 - DNA, 25 bp, Homo sapien
cacaagccaggcagcatcctttggg

SEQ ID NO: 1225475 - DNA, 25 bp, Homo sapien
tctgtctgctcggccatctgtcctg

SEQ ID NO: 1225476 - DNA, 25 bp, Homo sapien
tgctcccgcagggaccaggcatagc

SEQ ID NO: 1225477 - DNA, 25 bp, Homo sapien
ggcctgggagctggtcccctggcac

SEQ ID NO: 1225478 - DNA, 25 bp, Homo sapien
ccaggcatagctctgagaagtcaga

SEQ ID NO: 1225479 - DNA, 25 bp, Homo sapien
gtgtggggcgctgacaccaaccact

SEQ ID NO: 1225480 - DNA, 25 bp, Homo sapien
tggaagctgcacctgacggagcgcg

SEQ ID NO: 1225481 - DNA, 25 bp, Homo sapien
gaagctgcacctgacggagcgcgcc

SEQ ID NO: 1225482 - DNA, 25 bp, Homo sapien
agctgcacctgacggagcgcgccga

SEQ ID NO: 1225483 - DNA, 25 bp, Homo sapien
tgcacctgacggagcgcgccgactt

SEQ ID NO: 1225484 - DNA, 25 bp, Homo sapien
gcatagttagctggtgtttagaaga

SEQ ID NO: 1225485 - DNA, 25 bp, Homo sapien
gtctctcgaagtttccaactgatgg

SEQ ID NO: 1225486 - DNA, 25 bp, Homo sapien
cacaggatcaggagtaaaagtctct

SEQ ID NO: 1225487 - DNA, 25 bp, Homo sapien
aggtggcatagttagctggtgttta

SEQ ID NO: 1225488 - DNA, 25 bp, Homo sapien
ctgccttctttattactccaacatt

SEQ ID NO: 1225489 - DNA, 25 bp, Homo sapien
gttctgccttctttattactccaac

SEQ ID NO: 1225490 - DNA, 25 bp, Homo sapien
gccttctttattactccaacatttg

SEQ ID NO: 1225491 - DNA, 25 bp, Homo sapien
tctttattactccaacatttgtaaa

SEQ ID NO: 1225492 - DNA, 25 bp, Homo sapien
tcaagctgtccttcaagctcttgaa

SEQ ID NO: 1225493 - DNA, 25 bp, Homo sapien
cctcgagactgtcaagctgaaactg

SEQ ID NO: 1225494 - DNA, 25 bp, Homo sapien
tttttgcttctgcagcgcagcctcg

SEQ ID NO: 1225495 - DNA, 25 bp, Homo sapien
agctcttgtaggcagcccttctttc

SEQ ID NO: 1225496 - DNA, 25 bp, Homo sapien
gacttgaagttcatgagaaatcttc

SEQ ID NO: 1225497 - DNA, 25 bp, Homo sapien
gcctgaattcagttgtccttcctgg

SEQ ID NO: 1225498 - DNA, 25 bp, Homo sapien
cacttgtgactccttgacttgaagt

SEQ ID NO: 1225499 - DNA, 25 bp, Homo sapien
tgttttttgcctgaattcagttgtc

SEQ ID NO: 1225500 - DNA, 25 bp, Homo sapien
tccctataaataccatcccaaaata

SEQ ID NO: 1225501 - DNA, 25 bp, Homo sapien
aagacaaacgcatctgattaataca

SEQ ID NO: 1225502 - DNA, 25 bp, Homo sapien
tacatacaaatatcatccctataaa

SEQ ID NO: 1225503 - DNA, 25 bp, Homo sapien
ggtacagagaccgaatcattactta

SEQ ID NO: 1225504 - DNA, 25 bp, Homo sapien
tgcagactgcgcagcttgttggctt

SEQ ID NO: 1225505 - DNA, 25 bp, Homo sapien
catctgcagactgcgcagcttgttg

SEQ ID NO: 1225506 - DNA, 25 bp, Homo sapien
gcagactgcgcagcttgttggcttc

SEQ ID NO: 1225507 - DNA, 25 bp, Homo sapien
tctgcagactgcgcagcttgttggc

SEQ ID NO: 1225508 - DNA, 25 bp, Homo sapien
agcctgcaaggctttaacctctgcc

SEQ ID NO: 1225509 - DNA, 25 bp, Homo sapien
ttagcctgcaaggctttaacctctg

SEQ ID NO: 1225510 - DNA, 25 bp, Homo sapien
tagcctgcaaggctttaacctctgc

SEQ ID NO: 1225511 - DNA, 25 bp, Homo sapien
tttagcctgcaaggctttaacctct

SEQ ID NO: 1225512 - DNA, 25 bp, Homo sapien
tgtagaaacagaatctctttagagg

SEQ ID NO: 1225513 - DNA, 25 bp, Homo sapien
ctgtagaaacagaatctctttagag

SEQ ID NO: 1225514 - DNA, 25 bp, Homo sapien
gtagaaacagaatctctttagaggc

SEQ ID NO: 1225515 - DNA, 25 bp, Homo sapien
acagatgatgaagcctgatgccggg

SEQ ID NO: 1225516 - DNA, 25 bp, Homo sapien
ttcatggtggcttgtggaagagtct

SEQ ID NO: 1225517 - DNA, 25 bp, Homo sapien
caatgtcgcggtgattcatggtggc

SEQ ID NO: 1225518 - DNA, 25 bp, Homo sapien
gatgaagcctgatgccgggcaatgt

SEQ ID NO: 1225519 - DNA, 25 bp, Homo sapien
ttgatcgacttggagtcacctcttg

SEQ ID NO: 1225520 - DNA, 25 bp, Homo sapien
ttccctatttgcaaagttgatcgac

SEQ ID NO: 1225521 - DNA, 25 bp, Homo sapien
gtaagatgcagagaaatctctccta

SEQ ID NO: 1225522 - DNA, 25 bp, Homo sapien
gattctgcgcttttaattgatccaa

SEQ ID NO: 1225523 - DNA, 25 bp, Homo sapien
caactcattaatcttgtttcttagc

SEQ ID NO: 1225524 - DNA, 25 bp, Homo sapien
ttccaactcattaatcttgtttctt

SEQ ID NO: 1225525 - DNA, 25 bp, Homo sapien
cttggttgacgcctggtcgtattgt

SEQ ID NO: 1225526 - DNA, 25 bp, Homo sapien
ttggttgacgcctggtcgtattgtg

SEQ ID NO: 1225527 - DNA, 25 bp, Homo sapien
gctgacaactcaaatcttccgtcaa

SEQ ID NO: 1225528 - DNA, 25 bp, Homo sapien
ttctgcattttgtcgctgacaactc

SEQ ID NO: 1225529 - DNA, 25 bp, Homo sapien
tttgtcgctgacaactcaaatcttc

SEQ ID NO: 1225530 - DNA, 25 bp, Homo sapien
caaatcttccgtcaattttttcagt

SEQ ID NO: 1225531 - DNA, 25 bp, Homo sapien
aagaacgctgttgacgggagagctc

SEQ ID NO: 1225532 - DNA, 25 bp, Homo sapien
gatgcactcctggtccagtgtttgg

SEQ ID NO: 1225533 - DNA, 25 bp, Homo sapien
gacgttgtgcatattcttggcttgc

SEQ ID NO: 1225534 - DNA, 25 bp, Homo sapien
cagcctgcaggacgttgtgcatatt

SEQ ID NO: 1225535 - DNA, 25 bp, Homo sapien
tgactcgcctggaacgcctgttcag

SEQ ID NO: 1225536 - DNA, 25 bp, Homo sapien
tctgcacaacttttgcttaaactct

SEQ ID NO: 1225537 - DNA, 25 bp, Homo sapien
tccttgatctgactcgcctggaacg

SEQ ID NO: 1225538 - DNA, 25 bp, Homo sapien
cgcctggaacgcctgttcagctctg

SEQ ID NO: 1225539 - DNA, 25 bp, Homo sapien
gagaaaattcggcatcctcctccct

SEQ ID NO: 1225540 - DNA, 25 bp, Homo sapien
ctgtggaaatgttagcagaagcatc

SEQ ID NO: 1225541 - DNA, 25 bp, Homo sapien
tatctccagcagtattgcccctttg

SEQ ID NO: 1225542 - DNA, 25 bp, Homo sapien
caatcacctgtctgctactgacaga

SEQ ID NO: 1225543 - DNA, 25 bp, Homo sapien
aagcatctgttggttggtccccact

SEQ ID NO: 1225544 - DNA, 25 bp, Homo sapien
gagggaagagttcgatgccagtctg

SEQ ID NO: 1225545 - DNA, 25 bp, Homo sapien
agggaagagttcgatgccagtctgc

SEQ ID NO: 1225546 - DNA, 25 bp, Homo sapien
agagggaagagttcgatgccagtct

SEQ ID NO: 1225547 - DNA, 25 bp, Homo sapien
accaggcagccagtggagtcgcggg

SEQ ID NO: 1225548 - DNA, 25 bp, Homo sapien
tggagtcgcgggagagttcctggct

SEQ ID NO: 1225549 - DNA, 25 bp, Homo sapien
ggactctcttaaccagatgattgct

SEQ ID NO: 1225550 - DNA, 25 bp, Homo sapien
taaagtgtttggactctcttaacca

SEQ ID NO: 1225551 - DNA, 25 bp, Homo sapien
gttcttgagttctgcctccaggtgg

SEQ ID NO: 1225552 - DNA, 25 bp, Homo sapien
ctgatttaaacactgtttgatgttc

SEQ ID NO: 1225553 - DNA, 25 bp, Homo sapien
tcttctgcaaaattctggctctgat

SEQ ID NO: 1225554 - DNA, 25 bp, Homo sapien
caggtggcagacttctctggccttt

SEQ ID NO: 1225555 - DNA, 25 bp, Homo sapien
catgcaagtcttggtaacaccggtc

SEQ ID NO: 1225556 - DNA, 25 bp, Homo sapien
gctagtttctgggtctctacctcca

SEQ ID NO: 1225557 - DNA, 25 bp, Homo sapien
gaggctctcatattcggcatgcaag

SEQ ID NO: 1225558 - DNA, 25 bp, Homo sapien
ttaactctaaagcactcagcaaggc

SEQ ID NO: 1225559 - DNA, 25 bp, Homo sapien
caactctattttgtaggatggcaga

SEQ ID NO: 1225560 - DNA, 25 bp, Homo sapien
ggcaggctgctgatcaaaagccaaa

SEQ ID NO: 1225561 - DNA, 25 bp, Homo sapien
taagatcctcatatgcatttccggt

SEQ ID NO: 1225562 - DNA, 25 bp, Homo sapien
caagggcacttaaggtttcagcaac

SEQ ID NO: 1225563 - DNA, 25 bp, Homo sapien
cgttttgacttgttgacaactcatg

SEQ ID NO: 1225564 - DNA, 25 bp, Homo sapien
ctgaaggtgtgcattgtcgttttga

SEQ ID NO: 1225565 - DNA, 25 bp, Homo sapien
tatacttttcttccgcatctatttc

SEQ ID NO: 1225566 - DNA, 25 bp, Homo sapien
ttttcttccgcatctatttcacagt

SEQ ID NO: 1225567 - DNA, 25 bp, Homo sapien
tctgccattttcctagttgctgtga

SEQ ID NO: 1225568 - DNA, 25 bp, Homo sapien
aatcattcagctcagttacgagttc

SEQ ID NO: 1225569 - DNA, 25 bp, Homo sapien
cagcttgttcattgttgtttgcaga

SEQ ID NO: 1225570 - DNA, 25 bp, Homo sapien
gctgtgatacattctgaccttgaat

SEQ ID NO: 1225571 - DNA, 25 bp, Homo sapien
gaattactctcgtccaatggagcca

SEQ ID NO: 1225572 - DNA, 25 bp, Homo sapien
taatgagtcaacataggtctgcagc

SEQ ID NO: 1225573 - DNA, 25 bp, Homo sapien
taagactagagctgtcaggcacaca

SEQ ID NO: 1225574 - DNA, 25 bp, Homo sapien
tgacaatgtcaagtgctcgtaggaa

SEQ ID NO: 1225575 - DNA, 25 bp, Homo sapien
ggagtcgtgctacttccagctcaag

SEQ ID NO: 1225576 - DNA, 25 bp, Homo sapien
ccagctcaagtgacagttgttccgt

SEQ ID NO: 1225577 - DNA, 25 bp, Homo sapien
catctccagagtcacgcttgtcagc

SEQ ID NO: 1225578 - DNA, 25 bp, Homo sapien
tgtcgatgccaagcaaagaccgaga

SEQ ID NO: 1225579 - DNA, 25 bp, Homo sapien
ggagtaactcctggtgatcacaaga

SEQ ID NO: 1225580 - DNA, 25 bp, Homo sapien
ccctggaggctcataattggtatct

SEQ ID NO: 1225581 - DNA, 25 bp, Homo sapien
tgtcacggtcctctatcacatgaag

SEQ ID NO: 1225582 - DNA, 25 bp, Homo sapien
gatgtctcttttacccgcagttgaa

SEQ ID NO: 1225583 - DNA, 25 bp, Homo sapien
taagtgaatcattctcccgctcgcg

SEQ ID NO: 1225584 - DNA, 25 bp, Homo sapien
cagacaactgatccagtgccgtggt

SEQ ID NO: 1225585 - DNA, 25 bp, Homo sapien
ggcatcaagaatcactagctcctgg

SEQ ID NO: 1225586 - DNA, 25 bp, Homo sapien
ccaggtagagggcttcatgctcaat

SEQ ID NO: 1225587 - DNA, 25 bp, Homo sapien
tagggtctctacctctcctttggaa

SEQ ID NO: 1225588 - DNA, 25 bp, Homo sapien
tcctctattggtgggtctagactct

SEQ ID NO: 1225589 - DNA, 25 bp, Homo sapien
catcagcttctaggcgggctctcag

SEQ ID NO: 1225590 - DNA, 25 bp, Homo sapien
taattccagacctctcagactttgg

SEQ ID NO: 1225591 - DNA, 25 bp, Homo sapien
catcaaggccttgtagcaactgagc

SEQ ID NO: 1225592 - DNA, 25 bp, Homo sapien
cagggctgccactctctcattgagc

SEQ ID NO: 1225593 - DNA, 25 bp, Homo sapien
cacctgggacagtttagagacaagc

SEQ ID NO: 1225594 - DNA, 25 bp, Homo sapien
ggccttacaggcttcttggtcatta

SEQ ID NO: 1225595 - DNA, 25 bp, Homo sapien
tcagtatctttaaaagtgctttgtc

SEQ ID NO: 1225596 - DNA, 25 bp, Homo sapien
tctatcagtatctttaaaagtgctt

SEQ ID NO: 1225597 - DNA, 25 bp, Homo sapien
ttacaaatctatcagtatctttaaa

SEQ ID NO: 1225598 - DNA, 25 bp, Homo sapien
tatcagtatctttaaaagtgctttg

SEQ ID NO: 1225599 - DNA, 25 bp, Homo sapien
caactctccagctagcctatttttc

SEQ ID NO: 1225600 - DNA, 25 bp, Homo sapien
ctctccagctagcctatttttctct

SEQ ID NO: 1225601 - DNA, 25 bp, Homo sapien
aactctccagctagcctatttttct

SEQ ID NO: 1225602 - DNA, 25 bp, Homo sapien
gcaactctccagctagcctattttt

SEQ ID NO: 1225603 - DNA, 25 bp, Homo sapien
tctaggctcttcttcaattcactat

SEQ ID NO: 1225604 - DNA, 25 bp, Homo sapien
catgaagccgtagctgatattcagc

SEQ ID NO: 1225605 - DNA, 25 bp, Homo sapien
cagcttcatgaagccgtagctgata

SEQ ID NO: 1225606 - DNA, 25 bp, Homo sapien
tctttgtgcatgcaatctaggctct

SEQ ID NO: 1225607 - DNA, 25 bp, Homo sapien
ctagactttaaaaggtctatctcca

SEQ ID NO: 1225608 - DNA, 25 bp, Homo sapien
tctttagaagtcaatttctctcggt

SEQ ID NO: 1225609 - DNA, 25 bp, Homo sapien
caatttctctcggtatgtctggatt

SEQ ID NO: 1225610 - DNA, 25 bp, Homo sapien
tgagtagtagctttcaatgaattat

SEQ ID NO: 1225611 - DNA, 25 bp, Homo sapien
taaaaccatctgatatggcatcatg

SEQ ID NO: 1225612 - DNA, 25 bp, Homo sapien
gcaatattatagcagatccctctgg

SEQ ID NO: 1225613 - DNA, 25 bp, Homo sapien
tctatttatcctgccttgtgagagt

SEQ ID NO: 1225614 - DNA, 25 bp, Homo sapien
ggcatcatgaatttccaaaggaaga

SEQ ID NO: 1225615 - DNA, 25 bp, Homo sapien
tttctttttataagcatatggaaaa

SEQ ID NO: 1225616 - DNA, 25 bp, Homo sapien
ttctttttataagcatatggaaaaa

SEQ ID NO: 1225617 - DNA, 25 bp, Homo sapien
aatttctttttataagcatatggaa

SEQ ID NO: 1225618 - DNA, 25 bp, Homo sapien
tgaatttctttttataagcatatgg

SEQ ID NO: 1225619 - DNA, 25 bp, Homo sapien
gatttacatattttagattgtccat

SEQ ID NO: 1225620 - DNA, 25 bp, Homo sapien
ttgagagagttctttctgcagtatc

SEQ ID NO: 1225621 - DNA, 25 bp, Homo sapien
tttacaggatttgatcaacaacttc

SEQ ID NO: 1225622 - DNA, 25 bp, Homo sapien
tgcttctcctgtgcagcttgaagtt

SEQ ID NO: 1225623 - DNA, 25 bp, Homo sapien
cctgtgcagcttgaagttgagagag

SEQ ID NO: 1225624 - DNA, 25 bp, Homo sapien
gagaccctcgggaatcttgtttaga

SEQ ID NO: 1225625 - DNA, 25 bp, Homo sapien
taacagaagggattggagatggtcc

SEQ ID NO: 1225626 - DNA, 25 bp, Homo sapien
cagggtgaataccactcatgactgc

SEQ ID NO: 1225627 - DNA, 25 bp, Homo sapien
caactggacctagcaaaggagaccc

SEQ ID NO: 1225628 - DNA, 25 bp, Homo sapien
gggatagcgctaacttctgtgcagc

SEQ ID NO: 1225629 - DNA, 25 bp, Homo sapien
tcttcgcaggatatatgggctagtc

SEQ ID NO: 1225630 - DNA, 25 bp, Homo sapien
caagattttctttgccgagactcag

SEQ ID NO: 1225631 - DNA, 25 bp, Homo sapien
caccagctgttggtttggaggactc

SEQ ID NO: 1225632 - DNA, 25 bp, Homo sapien
aatggctaacgtccactctttctgg

SEQ ID NO: 1225633 - DNA, 25 bp, Homo sapien
aaagtgcaagcataccctaattgtc

SEQ ID NO: 1225634 - DNA, 25 bp, Homo sapien
gagagacagatagcccataggaaac

SEQ ID NO: 1225635 - DNA, 25 bp, Homo sapien
taaactgtggatttgaccctcctgt

SEQ ID NO: 1225636 - DNA, 25 bp, Homo sapien
gaaaaataaagcactatgtcactaa

SEQ ID NO: 1225637 - DNA, 25 bp, Homo sapien
acaaacatctctgttagaggttcaa

SEQ ID NO: 1225638 - DNA, 25 bp, Homo sapien
tcttcttctctaggagttatatata

SEQ ID NO: 1225639 - DNA, 25 bp, Homo sapien
catctctgttagaggttcaatcaca

SEQ ID NO: 1225640 - DNA, 25 bp, Homo sapien
tgtcagtcggacttctctcaggaag

SEQ ID NO: 1225641 - DNA, 25 bp, Homo sapien
cctgaatctactgggctccgctgag

SEQ ID NO: 1225642 - DNA, 25 bp, Homo sapien
gttctcactgccgttggactccagt

SEQ ID NO: 1225643 - DNA, 25 bp, Homo sapien
attattgactgggacggatttcgtg

SEQ ID NO: 1225644 - DNA, 25 bp, Homo sapien
ctttttcaatacctacacatgggag

SEQ ID NO: 1225645 - DNA, 25 bp, Homo sapien
cagtagaggaatggcaatgctaaca

SEQ ID NO: 1225646 - DNA, 25 bp, Homo sapien
taaagcatgccctgactaaagagaa

SEQ ID NO: 1225647 - DNA, 25 bp, Homo sapien
tgctaacaggtgatcagtgcttcca

SEQ ID NO: 1225648 - DNA, 25 bp, Homo sapien
catggtatagcacacctctaggaag

SEQ ID NO: 1225649 - DNA, 25 bp, Homo sapien
gcacaacgacagacgcatggtatag

SEQ ID NO: 1225650 - DNA, 25 bp, Homo sapien
ggctatatgttaatccatcaccaga

SEQ ID NO: 1225651 - DNA, 25 bp, Homo sapien
tcaccagatacgacaatgcttacca

SEQ ID NO: 1225652 - DNA, 25 bp, Homo sapien
cattttcacgtgtataagaggctgt

SEQ ID NO: 1225653 - DNA, 25 bp, Homo sapien
taccctgattcaaggatgtaagaac

SEQ ID NO: 1225654 - DNA, 25 bp, Homo sapien
caagtgagctgggaaataccacata

SEQ ID NO: 1225655 - DNA, 25 bp, Homo sapien
ggcactgggctggacgtcttatatt

SEQ ID NO: 1225656 - DNA, 25 bp, Homo sapien
cagttggaaagtggaagaggtctcc

SEQ ID NO: 1225657 - DNA, 25 bp, Homo sapien
tcagctcacatgaaccgaagcggga

SEQ ID NO: 1225658 - DNA, 25 bp, Homo sapien
tcattaagcaagatctccccaggcc

SEQ ID NO: 1225659 - DNA, 25 bp, Homo sapien
ttcctgggccaaatacgctgagcct

SEQ ID NO: 1225660 - DNA, 25 bp, Homo sapien
gaagatttcagatcagaacttgacc

SEQ ID NO: 1225661 - DNA, 25 bp, Homo sapien
tctgtagtgattaaactcatttgca

SEQ ID NO: 1225662 - DNA, 25 bp, Homo sapien
gaataaccaacattctattgagtgt

SEQ ID NO: 1225663 - DNA, 25 bp, Homo sapien
taatcgaatgatatgtgcaaatctg

SEQ ID NO: 1225664 - DNA, 25 bp, Homo sapien
gctcagtgctcctctttcccgcctt

SEQ ID NO: 1225665 - DNA, 25 bp, Homo sapien
tcccatctgctcagtgctcctcttt

SEQ ID NO: 1225666 - DNA, 25 bp, Homo sapien
ccacatcgtgtctcctcttcccatc

SEQ ID NO: 1225667 - DNA, 25 bp, Homo sapien
cctcttcccatctgctcagtgctcc

SEQ ID NO: 1225668 - DNA, 25 bp, Homo sapien
ccctggcagggctaagaaaggccca

SEQ ID NO: 1225669 - DNA, 25 bp, Homo sapien
ttaagtcaattctatggctctccct

SEQ ID NO: 1225670 - DNA, 25 bp, Homo sapien
aaaggcccagggtcatccgcttcct

SEQ ID NO: 1225671 - DNA, 25 bp, Homo sapien
gcttcctgggggtgatgaatttcag

SEQ ID NO: 1225672 - DNA, 25 bp, Homo sapien
cttgacttagcgcaggtttggcagt

SEQ ID NO: 1225673 - DNA, 25 bp, Homo sapien
tctgcttgacttagcgcaggtttgg

SEQ ID NO: 1225674 - DNA, 25 bp, Homo sapien
tagcgcaggtttggcagtaaactgg

SEQ ID NO: 1225675 - DNA, 25 bp, Homo sapien
gacttagcgcaggtttggcagtaaa

SEQ ID NO: 1225676 - DNA, 25 bp, Homo sapien
tctgcttgtctataatgtccagctg

SEQ ID NO: 1225677 - DNA, 25 bp, Homo sapien
agccaggtcaccctcggatccattc

SEQ ID NO: 1225678 - DNA, 25 bp, Homo sapien
gaatggcaccattactgtggactgc

SEQ ID NO: 1225679 - DNA, 25 bp, Homo sapien
tgcaggtacacacagctccgaatgg

SEQ ID NO: 1225680 - DNA, 25 bp, Homo sapien
taaatttctgttgtaccgttatgct

SEQ ID NO: 1225681 - DNA, 25 bp, Homo sapien
gtaccgttatgctggataaggtcac

SEQ ID NO: 1225682 - DNA, 25 bp, Homo sapien
aatttctgttgtaccgttatgctgg

SEQ ID NO: 1225683 - DNA, 25 bp, Homo sapien
tctgttgtaccgttatgctggataa

SEQ ID NO: 1225684 - DNA, 25 bp, Homo sapien
ttttcactctttgaagatgttattc

SEQ ID NO: 1225685 - DNA, 25 bp, Homo sapien
cactctttgaagatgttattctaag

SEQ ID NO: 1225686 - DNA, 25 bp, Homo sapien
gatgttattctaagtgtctcataag

SEQ ID NO: 1225687 - DNA, 25 bp, Homo sapien
ctttgaagatgttattctaagtgtc

SEQ ID NO: 1225688 - DNA, 25 bp, Homo sapien
tctgctcttagatcatgaactccca

SEQ ID NO: 1225689 - DNA, 25 bp, Homo sapien
tttgctggccgctgctccatctgga

SEQ ID NO: 1225690 - DNA, 25 bp, Homo sapien
taatggcttcggaaggaattctatc

SEQ ID NO: 1225691 - DNA, 25 bp, Homo sapien
ggagacagcacacctcttcttaatg

SEQ ID NO: 1225692 - DNA, 25 bp, Homo sapien
gattacaccctgtgccttatcgcga

SEQ ID NO: 1225693 - DNA, 25 bp, Homo sapien
tagcatgcagctcgtgttaatcagc

SEQ ID NO: 1225694 - DNA, 25 bp, Homo sapien
gcatgcaatggaggtgtagctcact

SEQ ID NO: 1225695 - DNA, 25 bp, Homo sapien
ggattgagtgtttacggctcccaaa

SEQ ID NO: 1225696 - DNA, 25 bp, Homo sapien
aacacaactttttcattgagctctt

SEQ ID NO: 1225697 - DNA, 25 bp, Homo sapien
acaactttttcattgagctcttcca

SEQ ID NO: 1225698 - DNA, 25 bp, Homo sapien
agaacacaactttttcattgagctc

SEQ ID NO: 1225699 - DNA, 25 bp, Homo sapien
cacaactttttcattgagctcttcc

SEQ ID NO: 1225700 - DNA, 25 bp, Homo sapien
gccctccttttcatagagtgctcaa

SEQ ID NO: 1225701 - DNA, 25 bp, Homo sapien
gagtccagggaacactggcctttgt

SEQ ID NO: 1225702 - DNA, 25 bp, Homo sapien
ttaagtagtcagagacatagagtcc

SEQ ID NO: 1225703 - DNA, 25 bp, Homo sapien
tgctgtttgagcaatattccatata

SEQ ID NO: 1225704 - DNA, 25 bp, Homo sapien
ctttgggttaattcccactgaagag

SEQ ID NO: 1225705 - DNA, 25 bp, Homo sapien
actgactcagatgcaaaatctgaca

SEQ ID NO: 1225706 - DNA, 25 bp, Homo sapien
caaaatctgacaaagctttgggtta

SEQ ID NO: 1225707 - DNA, 25 bp, Homo sapien
agctttgggttaattcccactgaag

SEQ ID NO: 1225708 - DNA, 25 bp, Homo sapien
gtcaccagtccaatactacagtcag

SEQ ID NO: 1225709 - DNA, 25 bp, Homo sapien
tctcattgtcaccagtccaatacta

SEQ ID NO: 1225710 - DNA, 25 bp, Homo sapien
cagtccaatactacagtcagattca

SEQ ID NO: 1225711 - DNA, 25 bp, Homo sapien
ccaatactacagtcagattcaaaca

SEQ ID NO: 1225712 - DNA, 25 bp, Homo sapien
caaatttagatgatctacaatcatg

SEQ ID NO: 1225713 - DNA, 25 bp, Homo sapien
cagtgcttgacaaatttagatgatc

SEQ ID NO: 1225714 - DNA, 25 bp, Homo sapien
gacaaatttagatgatctacaatca

SEQ ID NO: 1225715 - DNA, 25 bp, Homo sapien
gcttgacaaatttagatgatctaca

SEQ ID NO: 1225716 - DNA, 25 bp, Homo sapien
tcctcaaatggctaccatggccgta

SEQ ID NO: 1225717 - DNA, 25 bp, Homo sapien
aggatcctcaaatggctaccatggc

SEQ ID NO: 1225718 - DNA, 25 bp, Homo sapien
aatggctaccatggccgtaactcac

SEQ ID NO: 1225719 - DNA, 25 bp, Homo sapien
accatggccgtaactcacttctgaa

SEQ ID NO: 1225720 - DNA, 25 bp, Homo sapien
ccacaagtgagtgggtacgccagga

SEQ ID NO: 1225721 - DNA, 25 bp, Homo sapien
tgccttcgacgtctgggaggaaccc

SEQ ID NO: 1225722 - DNA, 25 bp, Homo sapien
gccaggattgcacgggtcccaagat

SEQ ID NO: 1225723 - DNA, 25 bp, Homo sapien
ggcttcctcgtccagaatataagtg

SEQ ID NO: 1225724 - DNA, 25 bp, Homo sapien
ctcagcagagaacgcaactgtggat

SEQ ID NO: 1225725 - DNA, 25 bp, Homo sapien
caggccatgctgttaggccccacaa

SEQ ID NO: 1225726 - DNA, 25 bp, Homo sapien
gccatgctgttaggccccacaaaac

SEQ ID NO: 1225727 - DNA, 25 bp, Homo sapien
actgtggattgcactcctcagcagg

SEQ ID NO: 1225728 - DNA, 25 bp, Homo sapien
ggttctccagcagcaacgtagcatc

SEQ ID NO: 1225729 - DNA, 25 bp, Homo sapien
ctgtgggagtgtagtagaagtggtt

SEQ ID NO: 1225730 - DNA, 25 bp, Homo sapien
gcatcataggataacgaagttggag

SEQ ID NO: 1225731 - DNA, 25 bp, Homo sapien
gcagcaacgtagcatcataggataa

SEQ ID NO: 1225732 - DNA, 25 bp, Homo sapien
taatccaggcgggaaatgacagtga

SEQ ID NO: 1225733 - DNA, 25 bp, Homo sapien
gactggagcaggtagaacaattaga

SEQ ID NO: 1225734 - DNA, 25 bp, Homo sapien
cactgaatggaacaggactggagca

SEQ ID NO: 1225735 - DNA, 25 bp, Homo sapien
gaggactgacaagatctgacctata

SEQ ID NO: 1225736 - DNA, 25 bp, Homo sapien
tgtctcattagattgctcctcgcca

SEQ ID NO: 1225737 - DNA, 25 bp, Homo sapien
gagccggctgcagctttattccatt

SEQ ID NO: 1225738 - DNA, 25 bp, Homo sapien
tgctcctcgccactaaatattcctt

SEQ ID NO: 1225739 - DNA, 25 bp, Homo sapien
tttcagctgtctcattagattgctc

SEQ ID NO: 1225740 - DNA, 25 bp, Homo sapien
cacttttggtgttgccttccattaa

SEQ ID NO: 1225741 - DNA, 25 bp, Homo sapien
ggttcacacttttggtgttgccttc

SEQ ID NO: 1225742 - DNA, 25 bp, Homo sapien
ccaccccatgagggcacaaagtcgg

SEQ ID NO: 1225743 - DNA, 25 bp, Homo sapien
catgtggttcacacttttggtgttg

SEQ ID NO: 1225744 - DNA, 25 bp, Homo sapien
cagtggatatgtggcatccagcaca

SEQ ID NO: 1225745 - DNA, 25 bp, Homo sapien
gatgtgcgcccattcactgcgtgcc

SEQ ID NO: 1225746 - DNA, 25 bp, Homo sapien
tttgtctgtctatccgtatctctgg

SEQ ID NO: 1225747 - DNA, 25 bp, Homo sapien
gcacaatgcaggtccaacaatctct

SEQ ID NO: 1225748 - DNA, 25 bp, Homo sapien
tgcccaatacggccaaaaccattta

SEQ ID NO: 1225749 - DNA, 25 bp, Homo sapien
gtcaatgaaggaatcattgagggtg

SEQ ID NO: 1225750 - DNA, 25 bp, Homo sapien
aggaatcattgagggtgacaatatc

SEQ ID NO: 1225751 - DNA, 25 bp, Homo sapien
aaaccatttactccatccttcactt

SEQ ID NO: 1225752 - DNA, 25 bp, Homo sapien
ggaagataatgatgggatttccatt

SEQ ID NO: 1225753 - DNA, 25 bp, Homo sapien
tcctggaagataatgatgggatttc

SEQ ID NO: 1225754 - DNA, 25 bp, Homo sapien
gaagataatgatgggatttccattg

SEQ ID NO: 1225755 - DNA, 25 bp, Homo sapien
ctggaagataatgatgggatttcca

SEQ ID NO: 1225756 - DNA, 25 bp, Homo sapien
cataatcagcaccagtatcatccca

SEQ ID NO: 1225757 - DNA, 25 bp, Homo sapien
tgaccttggctagggggctactcag

SEQ ID NO: 1225758 - DNA, 25 bp, Homo sapien
ccatcatgaacagggggaatcagca

SEQ ID NO: 1225759 - DNA, 25 bp, Homo sapien
gtggcattgctgatttataattctc

SEQ ID NO: 1225760 - DNA, 25 bp, Homo sapien
agtgacagtgatcatgagtgtggtc

SEQ ID NO: 1225761 - DNA, 25 bp, Homo sapien
tttcccagagggggcatccatggtc

SEQ ID NO: 1225762 - DNA, 25 bp, Homo sapien
tcccagagggggcatccatggtctt

SEQ ID NO: 1225763 - DNA, 25 bp, Homo sapien
agtttcccagagggggcatccatgg

SEQ ID NO: 1225764 - DNA, 25 bp, Homo sapien
gcagtttcccagagggggcatccat

SEQ ID NO: 1225765 - DNA, 25 bp, Homo sapien
ctggagagccccatggccatcacac

SEQ ID NO: 1225766 - DNA, 25 bp, Homo sapien
cttagcagcacccgtagatataggg

SEQ ID NO: 1225767 - DNA, 25 bp, Homo sapien
gcagcacccgtagatatagggatga

SEQ ID NO: 1225768 - DNA, 25 bp, Homo sapien
gcacccgtagatatagggatgattt

SEQ ID NO: 1225769 - DNA, 25 bp, Homo sapien
tagcagcacccgtagatatagggat

SEQ ID NO: 1225770 - DNA, 25 bp, Homo sapien
gctcagggatgaccttgcccacagc

SEQ ID NO: 1225771 - DNA, 25 bp, Homo sapien
cagctcagggatgaccttgcccaca

SEQ ID NO: 1225772 - DNA, 25 bp, Homo sapien
gccagtgagcttcttgttcagctca

SEQ ID NO: 1225773 - DNA, 25 bp, Homo sapien
cagtgagcttcttgttcagctcagg

SEQ ID NO: 1225774 - DNA, 25 bp, Homo sapien
tggcagtggggacatggaaggccat

SEQ ID NO: 1225775 - DNA, 25 bp, Homo sapien
ttggcagtggggacatggaaggcca

SEQ ID NO: 1225776 - DNA, 25 bp, Homo sapien
gttggcagtggggacatggaaggcc

SEQ ID NO: 1225777 - DNA, 25 bp, Homo sapien
atgccaggtcaggtctcgtaccaac

SEQ ID NO: 1225778 - DNA, 25 bp, Homo sapien
gccaggtcaggtctcgtaccaacat

SEQ ID NO: 1225779 - DNA, 25 bp, Homo sapien
gatgccaggtcaggtctcgtaccaa

SEQ ID NO: 1225780 - DNA, 25 bp, Homo sapien
tgccaggtcaggtctcgtaccaaca

SEQ ID NO: 1225781 - DNA, 25 bp, Homo sapien
aggccatgtggtctgcgaagtccac

SEQ ID NO: 1225782 - DNA, 25 bp, Homo sapien
gcactgtaataccaggacatgagct

SEQ ID NO: 1225783 - DNA, 25 bp, Homo sapien
tctgttgctgtagctaactgcactg

SEQ ID NO: 1225784 - DNA, 25 bp, Homo sapien
tctcgtgctcttgcttgtgttgatg

SEQ ID NO: 1225785 - DNA, 25 bp, Homo sapien
tgatggcacatgacaaggtagggat

SEQ ID NO: 1225786 - DNA, 25 bp, Homo sapien
atggcacatgacaaggtagggatac

SEQ ID NO: 1225787 - DNA, 25 bp, Homo sapien
gatggcacatgacaaggtagggata

SEQ ID NO: 1225788 - DNA, 25 bp, Homo sapien
ttgatggcacatgacaaggtaggga

SEQ ID NO: 1225789 - DNA, 25 bp, Homo sapien
ctcagctcaccctaaccgccccccg

SEQ ID NO: 1225790 - DNA, 25 bp, Homo sapien
caatctcagctcaccctaaccgccc

SEQ ID NO: 1225791 - DNA, 25 bp, Homo sapien
gtgcatgccaccacggccaactaat

SEQ ID NO: 1225792 - DNA, 25 bp, Homo sapien
gatgcggtttcactatgttagccaa

SEQ ID NO: 1225793 - DNA, 25 bp, Homo sapien
cttctgaggagctgtgctggtctcc

SEQ ID NO: 1225794 - DNA, 25 bp, Homo sapien
acatcagccctccagtatccataag

SEQ ID NO: 1225795 - DNA, 25 bp, Homo sapien
cacacccatcaatgccttctgagga

SEQ ID NO: 1225796 - DNA, 25 bp, Homo sapien
agggagtctgcacagtctgccagct

SEQ ID NO: 1225797 - DNA, 25 bp, Homo sapien
tgctgctgttgtccttgcatccctt

SEQ ID NO: 1225798 - DNA, 25 bp, Homo sapien
ctgctgttgtccttgcatccctttc

SEQ ID NO: 1225799 - DNA, 25 bp, Homo sapien
agttctgtataatttgagcccacat

SEQ ID NO: 1225800 - DNA, 25 bp, Homo sapien
gctgctgttgtccttgcatcccttt

SEQ ID NO: 1225801 - DNA, 25 bp, Homo sapien
cttactgctgccactgtctctgcca

SEQ ID NO: 1225802 - DNA, 25 bp, Homo sapien
ttactgctgccactgtctctgccat

SEQ ID NO: 1225803 - DNA, 25 bp, Homo sapien
ttccccacatcataagaattccaga

SEQ ID NO: 1225804 - DNA, 25 bp, Homo sapien
gatggtttcagttcagtccaattgc

SEQ ID NO: 1225805 - DNA, 25 bp, Homo sapien
catagatgtgttgacctctaggata

SEQ ID NO: 1225806 - DNA, 25 bp, Homo sapien
catgctcctctgatagcctgcacat

SEQ ID NO: 1225807 - DNA, 25 bp, Homo sapien
ggatatttctagtctcagaatctag

SEQ ID NO: 1225808 - DNA, 25 bp, Homo sapien
gtgaaggactcacgatagtcatcca

SEQ ID NO: 1225809 - DNA, 25 bp, Homo sapien
tgaaggactcacgatagtcatccat

SEQ ID NO: 1225810 - DNA, 25 bp, Homo sapien
agtgaaggactcacgatagtcatcc

SEQ ID NO: 1225811 - DNA, 25 bp, Homo sapien
tgacaagcagatgatcaatagtggg

SEQ ID NO: 1225812 - DNA, 25 bp, Homo sapien
ggaaggagcgtgctgttcacagtca

SEQ ID NO: 1225813 - DNA, 25 bp, Homo sapien
gctgccctcttaagacggaagccgg

SEQ ID NO: 1225814 - DNA, 25 bp, Homo sapien
cggaagccggaatctcttctgagga

SEQ ID NO: 1225815 - DNA, 25 bp, Homo sapien
gaagccaatggtacctaaaaagcaa

SEQ ID NO: 1225816 - DNA, 25 bp, Homo sapien
gtgtttggatcatgacatctgcttt

SEQ ID NO: 1225817 - DNA, 25 bp, Homo sapien
ttagtttctccagcctagtgtttgg

SEQ ID NO: 1225818 - DNA, 25 bp, Homo sapien
tccatatgtttgacatgcttcataa

SEQ ID NO: 1225819 - DNA, 25 bp, Homo sapien
tagtagctctaatgcctaaaggatc

SEQ ID NO: 1225820 - DNA, 25 bp, Homo sapien
tcaaatccagtgctatacttttgtg

SEQ ID NO: 1225821 - DNA, 25 bp, Homo sapien
gcccgaagacgcacagcattgattt

SEQ ID NO: 1225822 - DNA, 25 bp, Homo sapien
aaggatcataagagcgacacatctc

SEQ ID NO: 1225823 - DNA, 25 bp, Homo sapien
cacagaagtcttgtgacatgagcca

SEQ ID NO: 1225824 - DNA, 25 bp, Homo sapien
cttttcaaaggcgtgaaaacatgca

SEQ ID NO: 1225825 - DNA, 25 bp, Homo sapien
aacatgcagccacattggtttggtt

SEQ ID NO: 1225826 - DNA, 25 bp, Homo sapien
acacagaagtcttgtgacatgagcc

SEQ ID NO: 1225827 - DNA, 25 bp, Homo sapien
tgaaatgtgctactcaaatcctctg

SEQ ID NO: 1225828 - DNA, 25 bp, Homo sapien
ctcaaaacgaacaaacgctgctgta

SEQ ID NO: 1225829 - DNA, 25 bp, Homo sapien
caaacgctgctgtatgcaagtgaaa

SEQ ID NO: 1225830 - DNA, 25 bp, Homo sapien
tacagtctggttcaggaagaaattc

SEQ ID NO: 1225831 - DNA, 25 bp, Homo sapien
ttgtactaacaagccatcgtcccat

SEQ ID NO: 1225832 - DNA, 25 bp, Homo sapien
tcttgtccgtaatttccaaaacaga

SEQ ID NO: 1225833 - DNA, 25 bp, Homo sapien
ccaaaacagagtcacttgtactaac

SEQ ID NO: 1225834 - DNA, 25 bp, Homo sapien
gtgtgaatgttaccctgtagatcag

SEQ ID NO: 1225835 - DNA, 25 bp, Homo sapien
gctcgtgggttcatcatttggtgat

SEQ ID NO: 1225836 - DNA, 25 bp, Homo sapien
ttttgctcgtgggttcatcatttgg

SEQ ID NO: 1225837 - DNA, 25 bp, Homo sapien
tccctttttgctcgtgggttcatca

SEQ ID NO: 1225838 - DNA, 25 bp, Homo sapien
cctttttgctcgtgggttcatcatt

SEQ ID NO: 1225839 - DNA, 25 bp, Homo sapien
tcctgctgctaaaagacagaagtgc

SEQ ID NO: 1225840 - DNA, 25 bp, Homo sapien
ctaaaagacagaagtgcaaggtgca

SEQ ID NO: 1225841 - DNA, 25 bp, Homo sapien
tcagctcctgctgctaaaagacaga

SEQ ID NO: 1225842 - DNA, 25 bp, Homo sapien
agtgcaaggtgcaatcctgtatccc

SEQ ID NO: 1225843 - DNA, 25 bp, Homo sapien
cctcattggttttctggtgtgttca

SEQ ID NO: 1225844 - DNA, 25 bp, Homo sapien
tatcccattgtattgtatgtcctca

SEQ ID NO: 1225845 - DNA, 25 bp, Homo sapien
caagattgagcattgctttccctgt

SEQ ID NO: 1225846 - DNA, 25 bp, Homo sapien
tgaccggcacccaacacatagttga

SEQ ID NO: 1225847 - DNA, 25 bp, Homo sapien
gaaaagaaggctaatgtaccgtgta

SEQ ID NO: 1225848 - DNA, 25 bp, Homo sapien
tcgtcccaatcacaagagacctgct

SEQ ID NO: 1225849 - DNA, 25 bp, Homo sapien
aatgcttgccaggaccctcagtatg

SEQ ID NO: 1225850 - DNA, 25 bp, Homo sapien
tatccctccggttctaatgcttgcc

SEQ ID NO: 1225851 - DNA, 25 bp, Homo sapien
tgagctgggcgctataatctgcaga

SEQ ID NO: 1225852 - DNA, 25 bp, Homo sapien
cacctccggcggtgctggacatgag

SEQ ID NO: 1225853 - DNA, 25 bp, Homo sapien
aagggttaaggagtcaccagctcgc

SEQ ID NO: 1225854 - DNA, 25 bp, Homo sapien
tctgcagaacgtccgggaccgaaaa

SEQ ID NO: 1225855 - DNA, 25 bp, Homo sapien
tgtgggaccgggtgtgggaccaagc

SEQ ID NO: 1225856 - DNA, 25 bp, Homo sapien
catcacactgcgctgcatcctatct

SEQ ID NO: 1225857 - DNA, 25 bp, Homo sapien
ctcgctgtctggcatccacatcaca

SEQ ID NO: 1225858 - DNA, 25 bp, Homo sapien
gctctgggacgcgagtccttggacc

SEQ ID NO: 1225859 - DNA, 25 bp, Homo sapien
tcagccccttccactaacccccatc

SEQ ID NO: 1225860 - DNA, 25 bp, Homo sapien
tctcagccccttccactaaccccca

SEQ ID NO: 1225861 - DNA, 25 bp, Homo sapien
tcccctctcagccccttccactaac

SEQ ID NO: 1225862 - DNA, 25 bp, Homo sapien
cctcccctctcagccccttccacta

SEQ ID NO: 1225863 - DNA, 25 bp, Homo sapien
gggtgtgtggcacggtccgggcgcc

SEQ ID NO: 1225864 - DNA, 25 bp, Homo sapien
ccctcttcgcatgtctttgtgtgtc

SEQ ID NO: 1225865 - DNA, 25 bp, Homo sapien
tgcgccccggcgtctttgtgcgcga

SEQ ID NO: 1225866 - DNA, 25 bp, Homo sapien
tctttgtgcgcgagcctcgttcagc

SEQ ID NO: 1225867 - DNA, 25 bp, Homo sapien
tgagaagaaacgaaatcgcgggaag

SEQ ID NO: 1225868 - DNA, 25 bp, Homo sapien
gctgcacgggcaggcattttccccg

SEQ ID NO: 1225869 - DNA, 25 bp, Homo sapien
ggagcgtgagaagaaacgaaatcgc

SEQ ID NO: 1225870 - DNA, 25 bp, Homo sapien
cgggcaggcattttccccggctttg

SEQ ID NO: 1225871 - DNA, 25 bp, Homo sapien
tttacaaacacgccattgtactcac

SEQ ID NO: 1225872 - DNA, 25 bp, Homo sapien
tttttacaaacacgccattgtactc

SEQ ID NO: 1225873 - DNA, 25 bp, Homo sapien
ttttacaaacacgccattgtactca

SEQ ID NO: 1225874 - DNA, 25 bp, Homo sapien
tctctcccgcgaggcgctgggaagc

SEQ ID NO: 1225875 - DNA, 25 bp, Homo sapien
tctatagccgggtctctcccgcgag

SEQ ID NO: 1225876 - DNA, 25 bp, Homo sapien
tcctgctctatagccgggtctctcc

SEQ ID NO: 1225877 - DNA, 25 bp, Homo sapien
atagccgggtctctcccgcgaggcg

SEQ ID NO: 1225878 - DNA, 25 bp, Homo sapien
agaggatctggcaagggtttgcctc

SEQ ID NO: 1225879 - DNA, 25 bp, Homo sapien
caacactttggacgcgaagcgaaga

SEQ ID NO: 1225880 - DNA, 25 bp, Homo sapien
tctggcaagggtttgcctccaaatc

SEQ ID NO: 1225881 - DNA, 25 bp, Homo sapien
cagatgcaaaaaccccgggcaccgg

SEQ ID NO: 1225882 - DNA, 25 bp, Homo sapien
ggcaacaagtgtgaccggggtcacc

SEQ ID NO: 1225883 - DNA, 25 bp, Homo sapien
gggcaacaagtgtgaccggggtcac

SEQ ID NO: 1225884 - DNA, 25 bp, Homo sapien
ggaagcaagcttttttcagcaccac

SEQ ID NO: 1225885 - DNA, 25 bp, Homo sapien
ctccagcggcgactgaccactgaat

SEQ ID NO: 1225886 - DNA, 25 bp, Homo sapien
cactgaatagcagcggaagcaagct

SEQ ID NO: 1225887 - DNA, 25 bp, Homo sapien
ccagatatgtcttcgctccagcggc

SEQ ID NO: 1225888 - DNA, 25 bp, Homo sapien
gaaggttgattgaattccgctcgct

SEQ ID NO: 1225889 - DNA, 25 bp, Homo sapien
tcagagaaggttgattgaattccgc

SEQ ID NO: 1225890 - DNA, 25 bp, Homo sapien
gattgaattccgctcgctctcctag

SEQ ID NO: 1225891 - DNA, 25 bp, Homo sapien
tccgctcgctctcctagtggaagct

SEQ ID NO: 1225892 - DNA, 25 bp, Homo sapien
tgagaagggaattggtcgggcttct

SEQ ID NO: 1225893 - DNA, 25 bp, Homo sapien
gatgagaagggaattggtcgggctt

SEQ ID NO: 1225894 - DNA, 25 bp, Homo sapien
aggagatgagaagggaattggtcgg

SEQ ID NO: 1225895 - DNA, 25 bp, Homo sapien
gagatgagaagggaattggtcgggc

SEQ ID NO: 1225896 - DNA, 25 bp, Homo sapien
taggatccagcaagtcaggtgccgc

SEQ ID NO: 1225897 - DNA, 25 bp, Homo sapien
gatgatcagatagaggacaaccacc

SEQ ID NO: 1225898 - DNA, 25 bp, Homo sapien
gaatgagttcatccagctccgtcga

SEQ ID NO: 1225899 - DNA, 25 bp, Homo sapien
caatgctttgaacacggtggctccg

SEQ ID NO: 1225900 - DNA, 25 bp, Homo sapien
agatgatgactcacagataatttcc

SEQ ID NO: 1225901 - DNA, 25 bp, Homo sapien
cagatgatgactcacagataatttc

SEQ ID NO: 1225902 - DNA, 25 bp, Homo sapien
tcagatgatgactcacagataattt

SEQ ID NO: 1225903 - DNA, 25 bp, Homo sapien
catacacacatgcttctataacaaa

SEQ ID NO: 1225904 - DNA, 25 bp, Homo sapien
tcttgaaggtccagtgccaaaaaca

SEQ ID NO: 1225905 - DNA, 25 bp, Homo sapien
ttgatctcatctgccttaatgctcc

SEQ ID NO: 1225906 - DNA, 25 bp, Homo sapien
tataacaaaagaagcagttgatctc

SEQ ID NO: 1225907 - DNA, 25 bp, Homo sapien
tggttacgcaggaaacacatcccta

SEQ ID NO: 1225908 - DNA, 25 bp, Homo sapien
gctatgtcgctggaactggttacgc

SEQ ID NO: 1225909 - DNA, 25 bp, Homo sapien
tgtgaccagcaagatataagaagcc

SEQ ID NO: 1225910 - DNA, 25 bp, Homo sapien
tcttgattcaagagaggagtgtcct

SEQ ID NO: 1225911 - DNA, 25 bp, Homo sapien
gggattatgcaatcgagtgtcaaag

SEQ ID NO: 1225912 - DNA, 25 bp, Homo sapien
ccatttggggattatgcaatcgagt

SEQ ID NO: 1225913 - DNA, 25 bp, Homo sapien
tatgcaatcgagtgtcaaagctatt

SEQ ID NO: 1225914 - DNA, 25 bp, Homo sapien
gcaatcgagtgtcaaagctattttt

SEQ ID NO: 1225915 - DNA, 25 bp, Homo sapien
gactgatttgattggaggtgtttcc

SEQ ID NO: 1225916 - DNA, 25 bp, Homo sapien
cagcaaagaagaaggaacttcccaa

SEQ ID NO: 1225917 - DNA, 25 bp, Homo sapien
acggtataatccctgcatttattgc

SEQ ID NO: 1225918 - DNA, 25 bp, Homo sapien
tgtttcctaacggtataatccctgc

SEQ ID NO: 1225919 - DNA, 25 bp, Homo sapien
caagagtaagtaagattgcacaagt

SEQ ID NO: 1225920 - DNA, 25 bp, Homo sapien
tccaagagtaagtaagattgcacaa

SEQ ID NO: 1225921 - DNA, 25 bp, Homo sapien
ccaagagtaagtaagattgcacaag

SEQ ID NO: 1225922 - DNA, 25 bp, Homo sapien
tttccaagagtaagtaagattgcac

SEQ ID NO: 1225923 - DNA, 25 bp, Homo sapien
gatgtgtaactatacagatcctgaa

SEQ ID NO: 1225924 - DNA, 25 bp, Homo sapien
tgaaaggctacatcactaaaaccat

SEQ ID NO: 1225925 - DNA, 25 bp, Homo sapien
cagatcctgaatctgagtgatgaca

SEQ ID NO: 1225926 - DNA, 25 bp, Homo sapien
gacagctgaagttgggtcatttaga

SEQ ID NO: 1225927 - DNA, 25 bp, Homo sapien
tcttttccttctcccgaacactcat

SEQ ID NO: 1225928 - DNA, 25 bp, Homo sapien
atcttttccttctcccgaacactca

SEQ ID NO: 1225929 - DNA, 25 bp, Homo sapien
taagatggcaaatgtctttagagtc

SEQ ID NO: 1225930 - DNA, 25 bp, Homo sapien
ctctaagatggcaaatgtctttaga

SEQ ID NO: 1225931 - DNA, 25 bp, Homo sapien
agatggcaaatgtctttagagtcat

SEQ ID NO: 1225932 - DNA, 25 bp, Homo sapien
ctaagatggcaaatgtctttagagt

SEQ ID NO: 1225933 - DNA, 25 bp, Homo sapien
atattttgccgccttctgtgcgtgg

SEQ ID NO: 1225934 - DNA, 25 bp, Homo sapien
gtgcgtggtgagatgtttccaaatc

SEQ ID NO: 1225935 - DNA, 25 bp, Homo sapien
tatggtgcctagctgatctccaact

SEQ ID NO: 1225936 - DNA, 25 bp, Homo sapien
atatggtgcctagctgatctccaac

SEQ ID NO: 1225937 - DNA, 25 bp, Homo sapien
tgaatatgatcgcaggcagagccac

SEQ ID NO: 1225938 - DNA, 25 bp, Homo sapien
caatagttgttagagtgataaccac

SEQ ID NO: 1225939 - DNA, 25 bp, Homo sapien
caaagagtacacagccaaatagtat

SEQ ID NO: 1225940 - DNA, 25 bp, Homo sapien
aaataaatggcgtccagggcactcc

SEQ ID NO: 1225941 - DNA, 25 bp, Homo sapien
cattccaaaaacactccctggacac

SEQ ID NO: 1225942 - DNA, 25 bp, Homo sapien
tcattccaaaaacactccctggaca

SEQ ID NO: 1225943 - DNA, 25 bp, Homo sapien
gggcatacaacatcccctcttagtt

SEQ ID NO: 1225944 - DNA, 25 bp, Homo sapien
taaaggataacctagccactccgga

SEQ ID NO: 1225945 - DNA, 25 bp, Homo sapien
ccggactaaggttatcagttccata

SEQ ID NO: 1225946 - DNA, 25 bp, Homo sapien
tcggccctcttcgatgctaaagaac

SEQ ID NO: 1225947 - DNA, 25 bp, Homo sapien
taagcaagccctacaaggatccaga

SEQ ID NO: 1225948 - DNA, 25 bp, Homo sapien
tctttttagatatcactcggagcca

SEQ ID NO: 1225949 - DNA, 25 bp, Homo sapien
gatccagaaccacacgacaggctta

SEQ ID NO: 1225950 - DNA, 25 bp, Homo sapien
caggcttatagaagtccagatattc

SEQ ID NO: 1225951 - DNA, 25 bp, Homo sapien
ctttcagttgagagtcatgaagatc

SEQ ID NO: 1225952 - DNA, 25 bp, Homo sapien
gagtcatgaagatcactcataagta

SEQ ID NO: 1225953 - DNA, 25 bp, Homo sapien
catgaagatcactcataagtaggga

SEQ ID NO: 1225954 - DNA, 25 bp, Homo sapien
tcatactttcagttgagagtcatga

SEQ ID NO: 1225955 - DNA, 25 bp, Homo sapien
catgacttttgatagaatagcgtcc

SEQ ID NO: 1225956 - DNA, 25 bp, Homo sapien
ccagagtccgtttcatgtaaaaatg

SEQ ID NO: 1225957 - DNA, 25 bp, Homo sapien
tagcgtccagagtccgtttcatgta

SEQ ID NO: 1225958 - DNA, 25 bp, Homo sapien
gatagaatagcgtccagagtccgtt

SEQ ID NO: 1225959 - DNA, 25 bp, Homo sapien
ggctattccagaacctgagctttat

SEQ ID NO: 1225960 - DNA, 25 bp, Homo sapien
gctattccagaacctgagctttatc

SEQ ID NO: 1225961 - DNA, 25 bp, Homo sapien
caggctattccagaacctgagcttt

SEQ ID NO: 1225962 - DNA, 25 bp, Homo sapien
tattccagaacctgagctttatcat

SEQ ID NO: 1225963 - DNA, 25 bp, Homo sapien
tctcagtcttcagtaagggaggcaa

SEQ ID NO: 1225964 - DNA, 25 bp, Homo sapien
cacagtgtggcgtcaaaccattcag

SEQ ID NO: 1225965 - DNA, 25 bp, Homo sapien
ggtggcccgctggaacttgtcataa

SEQ ID NO: 1225966 - DNA, 25 bp, Homo sapien
aattcggctgtgacgttggctgtcc

SEQ ID NO: 1225967 - DNA, 25 bp, Homo sapien
tgttctcaatcacagcaatctcttc

SEQ ID NO: 1225968 - DNA, 25 bp, Homo sapien
tgatgttctcaatcacagcaatctc

SEQ ID NO: 1225969 - DNA, 25 bp, Homo sapien
ttctcaatcacagcaatctcttcac

SEQ ID NO: 1225970 - DNA, 25 bp, Homo sapien
ctatttgatgttctcaatcacagca

SEQ ID NO: 1225971 - DNA, 25 bp, Homo sapien
gaggccttatggcacattagggaaa

SEQ ID NO: 1225972 - DNA, 25 bp, Homo sapien
ccacacattagctagagaggttctg

SEQ ID NO: 1225973 - DNA, 25 bp, Homo sapien
ggaccgttcaacaagcatcatcaga

SEQ ID NO: 1225974 - DNA, 25 bp, Homo sapien
tatctaggctcagttaggtagaccc

SEQ ID NO: 1225975 - DNA, 25 bp, Homo sapien
atgtccatctaatttggcatctatt

SEQ ID NO: 1225976 - DNA, 25 bp, Homo sapien
gtcattttacacactgtttccagca

SEQ ID NO: 1225977 - DNA, 25 bp, Homo sapien
ctatttcatcttcgggcatcatcac

SEQ ID NO: 1225978 - DNA, 25 bp, Homo sapien
tccagcaaggtatggtattcaaatg

SEQ ID NO: 1225979 - DNA, 25 bp, Homo sapien
gagcagccaattttaccagcctggt

SEQ ID NO: 1225980 - DNA, 25 bp, Homo sapien
ccagcctggtcataattacactgta

SEQ ID NO: 1225981 - DNA, 25 bp, Homo sapien
tttaacgctaggcaacgctgagtgt

SEQ ID NO: 1225982 - DNA, 25 bp, Homo sapien
tatatatgtaccactggtacctgag

SEQ ID NO: 1225983 - DNA, 25 bp, Homo sapien
gaatgataattcacacccactgttt

SEQ ID NO: 1225984 - DNA, 25 bp, Homo sapien
tccaaaagtatacccacagaaggct

SEQ ID NO: 1225985 - DNA, 25 bp, Homo sapien
cagaaggctaggactgtgccctgca

SEQ ID NO: 1225986 - DNA, 25 bp, Homo sapien
tggcaaaagtcacccaacgaaaaga

SEQ ID NO: 1225987 - DNA, 25 bp, Homo sapien
cacagtttatacatggcgcattcca

SEQ ID NO: 1225988 - DNA, 25 bp, Homo sapien
tcaagaccctaatctgaatgccact

SEQ ID NO: 1225989 - DNA, 25 bp, Homo sapien
caccatataaattttcggaacagtt

SEQ ID NO: 1225990 - DNA, 25 bp, Homo sapien
attttggaaaataagcgtctattag

SEQ ID NO: 1225991 - DNA, 25 bp, Homo sapien
ttcataactctgatggcatatacca

SEQ ID NO: 1225992 - DNA, 25 bp, Homo sapien
tgataatcttgtattctttctgcat

SEQ ID NO: 1225993 - DNA, 25 bp, Homo sapien
tccaaacctagtggtttcttcataa

SEQ ID NO: 1225994 - DNA, 25 bp, Homo sapien
ggcatataccattgataatcttgta

SEQ ID NO: 1225995 - DNA, 25 bp, Homo sapien
ttgtcacaaatatgcttttagtcat

SEQ ID NO: 1225996 - DNA, 25 bp, Homo sapien
cataccaagttaattcctttgtcac

SEQ ID NO: 1225997 - DNA, 25 bp, Homo sapien
cactttctccctcaagccataccaa

SEQ ID NO: 1225998 - DNA, 25 bp, Homo sapien
tttatcactcactttctccctcaag

SEQ ID NO: 1225999 - DNA, 25 bp, Homo sapien
cacaagctgtacagatgtaatgagc

SEQ ID NO: 1226000 - DNA, 25 bp, Homo sapien
tagcttctgaataaggtcctttatg

SEQ ID NO: 1226001 - DNA, 25 bp, Homo sapien
caaagcattgagaaactctgagaat

SEQ ID NO: 1226002 - DNA, 25 bp, Homo sapien
tcagacgaagcacaaaatgcagtgc

SEQ ID NO: 1226003 - DNA, 25 bp, Homo sapien
gaatgaaatgcctctcgaaatcgaa

SEQ ID NO: 1226004 - DNA, 25 bp, Homo sapien
aatattaatggccagcatgccctgg

SEQ ID NO: 1226005 - DNA, 25 bp, Homo sapien
gccaaacatgtttacaatctccact

SEQ ID NO: 1226006 - DNA, 25 bp, Homo sapien
aatgccatgacaccttttgtctcaa

SEQ ID NO: 1226007 - DNA, 25 bp, Homo sapien
tcagcatatcagcatactccatcat

SEQ ID NO: 1226008 - DNA, 25 bp, Homo sapien
gatgaattgggccatactttagcca

SEQ ID NO: 1226009 - DNA, 25 bp, Homo sapien
actttagccatcatgttaatcagca

SEQ ID NO: 1226010 - DNA, 25 bp, Homo sapien
tgttaatcagcatatcagcatactc

SEQ ID NO: 1226011 - DNA, 25 bp, Homo sapien
gaaagccagtcctgctccactgaaa

SEQ ID NO: 1226012 - DNA, 25 bp, Homo sapien
ctgagcaagttgacatcagcagttg

SEQ ID NO: 1226013 - DNA, 25 bp, Homo sapien
tagatagtcacttccattacgcaga

SEQ ID NO: 1226014 - DNA, 25 bp, Homo sapien
ccatgcagtgcagcaacctcactgg

SEQ ID NO: 1226015 - DNA, 25 bp, Homo sapien
tctgtaaacatcaggccatggtctg

SEQ ID NO: 1226016 - DNA, 25 bp, Homo sapien
cagcttcagtccatgtgtgttattc

SEQ ID NO: 1226017 - DNA, 25 bp, Homo sapien
aacatccctggcaggtttgtcaaga

SEQ ID NO: 1226018 - DNA, 25 bp, Homo sapien
tcttcatggtaatctcagtgcctag

SEQ ID NO: 1226019 - DNA, 25 bp, Homo sapien
gaatatatcctaaacctaacaggct

SEQ ID NO: 1226020 - DNA, 25 bp, Homo sapien
gtttatccaaaaagcaagcatcagg

SEQ ID NO: 1226021 - DNA, 25 bp, Homo sapien
atatcctaaacctaacaggctgaag

SEQ ID NO: 1226022 - DNA, 25 bp, Homo sapien
tcagtttatccaaaaagcaagcatc

SEQ ID NO: 1226023 - DNA, 25 bp, Homo sapien
caggaaagctgacagtgtcagtctg

SEQ ID NO: 1226024 - DNA, 25 bp, Homo sapien
ggaaagctgacagtgtcagtctgat

SEQ ID NO: 1226025 - DNA, 25 bp, Homo sapien
aaagctgacagtgtcagtctgatac

SEQ ID NO: 1226026 - DNA, 25 bp, Homo sapien
catacaggaaagctgacagtgtcag

SEQ ID NO: 1226027 - DNA, 25 bp, Homo sapien
aagcttgtgagcctgaacgttctta

SEQ ID NO: 1226028 - DNA, 25 bp, Homo sapien
agcttgtgagcctgaacgttcttac

SEQ ID NO: 1226029 - DNA, 25 bp, Homo sapien
caagcttgtgagcctgaacgttctt

SEQ ID NO: 1226030 - DNA, 25 bp, Homo sapien
aattactggcttcatcacattcatc

SEQ ID NO: 1226031 - DNA, 25 bp, Homo sapien
tcctctctactcctaaatggccaaa

SEQ ID NO: 1226032 - DNA, 25 bp, Homo sapien
gaattaagtcctgaattactggctt

SEQ ID NO: 1226033 - DNA, 25 bp, Homo sapien
gcaaaaaaccacaacacgagaagga

SEQ ID NO: 1226034 - DNA, 25 bp, Homo sapien
actcttcagattctcaatccggtct

SEQ ID NO: 1226035 - DNA, 25 bp, Homo sapien
aagtttggggaaatgccacatgcat

SEQ ID NO: 1226036 - DNA, 25 bp, Homo sapien
acacagcaaggagcaaggttgtctg

SEQ ID NO: 1226037 - DNA, 25 bp, Homo sapien
ccaagtagtatgatgtctcttcctg

SEQ ID NO: 1226038 - DNA, 25 bp, Homo sapien
tgtccagatgtgtgcgtgaatgccg

SEQ ID NO: 1226039 - DNA, 25 bp, Homo sapien
gagttaatagacaccacgctagagg

SEQ ID NO: 1226040 - DNA, 25 bp, Homo sapien
gatcaggagttcataaggacccctc

SEQ ID NO: 1226041 - DNA, 25 bp, Homo sapien
aaattgacgttagaccatctggcag

SEQ ID NO: 1226042 - DNA, 25 bp, Homo sapien
ttctcagccgtagtataggctcctg

SEQ ID NO: 1226043 - DNA, 25 bp, Homo sapien
gcttgtgctgatgctaaggcaccag

SEQ ID NO: 1226044 - DNA, 25 bp, Homo sapien
ggctcctggattcctattcagaaga

SEQ ID NO: 1226045 - DNA, 25 bp, Homo sapien
cctattcagaagaggttgtgcagtt

SEQ ID NO: 1226046 - DNA, 25 bp, Homo sapien
cctaagccagagagccatgtggttt

SEQ ID NO: 1226047 - DNA, 25 bp, Homo sapien
gagagccatgtggtttggctcagca

SEQ ID NO: 1226048 - DNA, 25 bp, Homo sapien
ttggctcagcaggtctcaccctcac

SEQ ID NO: 1226049 - DNA, 25 bp, Homo sapien
gggtacctaagccagagagccatgt

SEQ ID NO: 1226050 - DNA, 25 bp, Homo sapien
cctgaaacagaatcagccaacttgt

SEQ ID NO: 1226051 - DNA, 25 bp, Homo sapien
aaacagaatcagccaacttgttcat

SEQ ID NO: 1226052 - DNA, 25 bp, Homo sapien
gaaacagaatcagccaacttgttca

SEQ ID NO: 1226053 - DNA, 25 bp, Homo sapien
tgaaacagaatcagccaacttgttc

SEQ ID NO: 1226054 - DNA, 25 bp, Homo sapien
tctcatcattgaccccactaaaact

SEQ ID NO: 1226055 - DNA, 25 bp, Homo sapien
atcaccttgcttctcatcattgacc

SEQ ID NO: 1226056 - DNA, 25 bp, Homo sapien
gcttctcatcattgaccccactaaa

SEQ ID NO: 1226057 - DNA, 25 bp, Homo sapien
ttgcttctcatcattgaccccacta

SEQ ID NO: 1226058 - DNA, 25 bp, Homo sapien
ggtggtcctgcattgtagacttgca

SEQ ID NO: 1226059 - DNA, 25 bp, Homo sapien
gtggtcctgcattgtagacttgcat

SEQ ID NO: 1226060 - DNA, 25 bp, Homo sapien
cttttctttcaaactttgatgccag

SEQ ID NO: 1226061 - DNA, 25 bp, Homo sapien
accttcttggtcaggtcttccactt

SEQ ID NO: 1226062 - DNA, 25 bp, Homo sapien
cttcttggtcaggtcttccacttcc

SEQ ID NO: 1226063 - DNA, 25 bp, Homo sapien
ccttcttggtcaggtcttccacttc

SEQ ID NO: 1226064 - DNA, 25 bp, Homo sapien
aaagatgttcattcatgatcaagct

SEQ ID NO: 1226065 - DNA, 25 bp, Homo sapien
aagatgttcattcatgatcaagctc

SEQ ID NO: 1226066 - DNA, 25 bp, Homo sapien
tcatgatcaagctctgtaggcacat

SEQ ID NO: 1226067 - DNA, 25 bp, Homo sapien
cattcatgatcaagctctgtaggca

SEQ ID NO: 1226068 - DNA, 25 bp, Homo sapien
catatcatcttgatttatggtcaca

SEQ ID NO: 1226069 - DNA, 25 bp, Homo sapien
tccatcatatccagacagctgtttt

SEQ ID NO: 1226070 - DNA, 25 bp, Homo sapien
ccacagccaacttttgggcaggtgg

SEQ ID NO: 1226071 - DNA, 25 bp, Homo sapien
tcacatatagtgcaaacgctctgct

SEQ ID NO: 1226072 - DNA, 25 bp, Homo sapien
ccgggcctcttctccgtgctccgct

SEQ ID NO: 1226073 - DNA, 25 bp, Homo sapien
cttcccgggtcaatcctgcggtgca

SEQ ID NO: 1226074 - DNA, 25 bp, Homo sapien
ctttcgcggcctccaggccgccggg

SEQ ID NO: 1226075 - DNA, 25 bp, Homo sapien
aatcctgcggtgcacaagggcggcc

SEQ ID NO: 1226076 - DNA, 25 bp, Homo sapien
gggaagctgccgcagtgccctcccg

SEQ ID NO: 1226077 - DNA, 25 bp, Homo sapien
gttcagttggacgatctcgccgctg

SEQ ID NO: 1226078 - DNA, 25 bp, Homo sapien
cagttggacgatctcgccgctgccg

SEQ ID NO: 1226079 - DNA, 25 bp, Homo sapien
gttggacgatctcgccgctgccggc

SEQ ID NO: 1226080 - DNA, 25 bp, Homo sapien
taaaaattagtcatttctataattc

SEQ ID NO: 1226081 - DNA, 25 bp, Homo sapien
tcttgggctatctgcaactgctgac

SEQ ID NO: 1226082 - DNA, 25 bp, Homo sapien
tagttaccatgcactatcaccagga

SEQ ID NO: 1226083 - DNA, 25 bp, Homo sapien
tattaccaagggaggatctttacca

SEQ ID NO: 1226084 - DNA, 25 bp, Homo sapien
cagcctggaattatcaaaaacgtgg

SEQ ID NO: 1226085 - DNA, 25 bp, Homo sapien
ctctccagtacaaatgctggttttc

SEQ ID NO: 1226086 - DNA, 25 bp, Homo sapien
aaaaagaatctggaatccacataag

SEQ ID NO: 1226087 - DNA, 25 bp, Homo sapien
tccacataagagtttgtcttgaggt

SEQ ID NO: 1226088 - DNA, 25 bp, Homo sapien
atccacataagagtttgtcttgagg

SEQ ID NO: 1226089 - DNA, 25 bp, Homo sapien
aaagaatctggaatccacataagag

SEQ ID NO: 1226090 - DNA, 25 bp, Homo sapien
tttcatctcgaagtgttgaaattct

SEQ ID NO: 1226091 - DNA, 25 bp, Homo sapien
gtttcatctcgaagtgttgaaattc

SEQ ID NO: 1226092 - DNA, 25 bp, Homo sapien
agtttcatctcgaagtgttgaaatt

SEQ ID NO: 1226093 - DNA, 25 bp, Homo sapien
gcaaatgctgctggatctctatcaa

SEQ ID NO: 1226094 - DNA, 25 bp, Homo sapien
ggtgcaaatgctgctggatctctat

SEQ ID NO: 1226095 - DNA, 25 bp, Homo sapien
taagtctagttcttttgtccgaaga

SEQ ID NO: 1226096 - DNA, 25 bp, Homo sapien
tgctgctggatctctatcaataaat

SEQ ID NO: 1226097 - DNA, 25 bp, Homo sapien
ttcatgcctgagaacattaatactc

SEQ ID NO: 1226098 - DNA, 25 bp, Homo sapien
gagtgatcccgtaaaattctgcttc

SEQ ID NO: 1226099 - DNA, 25 bp, Homo sapien
cttcatgcctgagaacattaatact

SEQ ID NO: 1226100 - DNA, 25 bp, Homo sapien
ctaatggagtgatcccgtaaaattc

SEQ ID NO: 1226101 - DNA, 25 bp, Homo sapien
caagaggaacgctccaattcttcac

SEQ ID NO: 1226102 - DNA, 25 bp, Homo sapien
tggtgggggcaagtaaccatgaaaa

SEQ ID NO: 1226103 - DNA, 25 bp, Homo sapien
ccaattcttcacataagagaagcct

SEQ ID NO: 1226104 - DNA, 25 bp, Homo sapien
aaggacactgccacaagaggaacgc

SEQ ID NO: 1226105 - DNA, 25 bp, Homo sapien
agagaacaggctgtgtaccatttcc

SEQ ID NO: 1226106 - DNA, 25 bp, Homo sapien
tagaccattcctagaatcagcagat

SEQ ID NO: 1226107 - DNA, 25 bp, Homo sapien
ccttctgtagaatttagaccattcc

SEQ ID NO: 1226108 - DNA, 25 bp, Homo sapien
gtttcttctcccgttccagagagaa

SEQ ID NO: 1226109 - DNA, 25 bp, Homo sapien
agttgtgatggccagctactattag

SEQ ID NO: 1226110 - DNA, 25 bp, Homo sapien
cagcaaaatgggcatatgcagctac

SEQ ID NO: 1226111 - DNA, 25 bp, Homo sapien
ggcatatgcagctacaatccagttg

SEQ ID NO: 1226112 - DNA, 25 bp, Homo sapien
tattagcacctttcgtggatccaca

SEQ ID NO: 1226113 - DNA, 25 bp, Homo sapien
acccaccgtgcccagccaaaacact

SEQ ID NO: 1226114 - DNA, 25 bp, Homo sapien
tgacccaccgtgcccagccaaaaca

SEQ ID NO: 1226115 - DNA, 25 bp, Homo sapien
cgtgacccaccgtgcccagccaaaa

SEQ ID NO: 1226116 - DNA, 25 bp, Homo sapien
tcttgaactccacccatctcggcct

SEQ ID NO: 1226117 - DNA, 25 bp, Homo sapien
taaagctactcgttcgatagtccaa

SEQ ID NO: 1226118 - DNA, 25 bp, Homo sapien
tccaaccacctttgcatttaaagct

SEQ ID NO: 1226119 - DNA, 25 bp, Homo sapien
caagatgatgctactctctgaggca

SEQ ID NO: 1226120 - DNA, 25 bp, Homo sapien
tatgggctcgtaaacacttgctgcc

SEQ ID NO: 1226121 - DNA, 25 bp, Homo sapien
tggataagatttccttggttgtgaa

SEQ ID NO: 1226122 - DNA, 25 bp, Homo sapien
tcattaagtacaggaaacgatgctt

SEQ ID NO: 1226123 - DNA, 25 bp, Homo sapien
aataagtaacaggatgacaacctca

SEQ ID NO: 1226124 - DNA, 25 bp, Homo sapien
caggtacaggcctccctcaactgtg

SEQ ID NO: 1226125 - DNA, 25 bp, Homo sapien
aggtaacgggagatagctgctttag

SEQ ID NO: 1226126 - DNA, 25 bp, Homo sapien
gctgctttaggactaaggtaactgg

SEQ ID NO: 1226127 - DNA, 25 bp, Homo sapien
gagcccctctggcattcagttaaat

SEQ ID NO: 1226128 - DNA, 25 bp, Homo sapien
gctgctttaggactaagaggtaacg

SEQ ID NO: 1226129 - DNA, 25 bp, Homo sapien
ccaactggttaccaataaagaagag

SEQ ID NO: 1226130 - DNA, 25 bp, Homo sapien
ctgtatgactcgtggccaccaactg

SEQ ID NO: 1226131 - DNA, 25 bp, Homo sapien
tgacagcattccacactcccacttt

SEQ ID NO: 1226132 - DNA, 25 bp, Homo sapien
tcccactttccctgtatgactcgtg

SEQ ID NO: 1226133 - DNA, 25 bp, Homo sapien
actgccattagttgaggtgctctgc

SEQ ID NO: 1226134 - DNA, 25 bp, Homo sapien
taatttctcacatcaatcagacagc

SEQ ID NO: 1226135 - DNA, 25 bp, Homo sapien
aatgtactcatctttgccacctcga

SEQ ID NO: 1226136 - DNA, 25 bp, Homo sapien
tgctgtagtaaattccctcctgacc

SEQ ID NO: 1226137 - DNA, 25 bp, Homo sapien
gggtcaaacctttctagctgtgctg

SEQ ID NO: 1226138 - DNA, 25 bp, Homo sapien
aaatgtctctactccctgttgggtc

SEQ ID NO: 1226139 - DNA, 25 bp, Homo sapien
cactcttgacttttatgggaccgga

SEQ ID NO: 1226140 - DNA, 25 bp, Homo sapien
ctaaagaactacatgggatcccagg

SEQ ID NO: 1226141 - DNA, 25 bp, Homo sapien
ctgagaaagtgttctaactggtgtc

SEQ ID NO: 1226142 - DNA, 25 bp, Homo sapien
tacaggattcttgtgtgctctcttc

SEQ ID NO: 1226143 - DNA, 25 bp, Homo sapien
agaaatgtcaatagtcctagatcag

SEQ ID NO: 1226144 - DNA, 25 bp, Homo sapien
aactggtgtcatatctgtatctaga

SEQ ID NO: 1226145 - DNA, 25 bp, Homo sapien
tctgatcaaagtctaatgacaggca

SEQ ID NO: 1226146 - DNA, 25 bp, Homo sapien
catttggagaatgcccgttgtcgtc

SEQ ID NO: 1226147 - DNA, 25 bp, Homo sapien
caaatataacgttcttctcaaaagg

SEQ ID NO: 1226148 - DNA, 25 bp, Homo sapien
ctactactggtgatgagaaatctga

SEQ ID NO: 1226149 - DNA, 25 bp, Homo sapien
tgtaacctttaatcatgatctgcct

SEQ ID NO: 1226150 - DNA, 25 bp, Homo sapien
agcctagcgcttcccaaggcacaaa

SEQ ID NO: 1226151 - DNA, 25 bp, Homo sapien
catgtctacccctccatacgggaaa

SEQ ID NO: 1226152 - DNA, 25 bp, Homo sapien
tctccttctgtaacctttaatcatg

SEQ ID NO: 1226153 - DNA, 25 bp, Homo sapien
gatccagcagtgtcataactagtta

SEQ ID NO: 1226154 - DNA, 25 bp, Homo sapien
taatatattgatccattgttacatc

SEQ ID NO: 1226155 - DNA, 25 bp, Homo sapien
tgtaatatattgatccattgttaca

SEQ ID NO: 1226156 - DNA, 25 bp, Homo sapien
ctatgtaatatattgatccattgtt

SEQ ID NO: 1226157 - DNA, 25 bp, Homo sapien
catttgaaggatcatgatacagttc

SEQ ID NO: 1226158 - DNA, 25 bp, Homo sapien
tgtgaggtaaacactcagagcagta

SEQ ID NO: 1226159 - DNA, 25 bp, Homo sapien
cattatctttcattcgcaaggggaa

SEQ ID NO: 1226160 - DNA, 25 bp, Homo sapien
tacagttcagttacaagaagatcat

SEQ ID NO: 1226161 - DNA, 25 bp, Homo sapien
tcccagttttatgcctgccttttaa

SEQ ID NO: 1226162 - DNA, 25 bp, Homo sapien
tggtatcaaaaagagccagcttggc

SEQ ID NO: 1226163 - DNA, 25 bp, Homo sapien
tgaaaaacacctcctagaaccagaa

SEQ ID NO: 1226164 - DNA, 25 bp, Homo sapien
tctcaattctgtcattgtggcataa

SEQ ID NO: 1226165 - DNA, 25 bp, Homo sapien
gatagcatgatttttgttacgggac

SEQ ID NO: 1226166 - DNA, 25 bp, Homo sapien
tacgggacttcggtgaactgtgaaa

SEQ ID NO: 1226167 - DNA, 25 bp, Homo sapien
gctccagagctcgtaccataggcga

SEQ ID NO: 1226168 - DNA, 25 bp, Homo sapien
aactgtctctgggtgttgtacaatc

SEQ ID NO: 1226169 - DNA, 25 bp, Homo sapien
cttcagtcattaaacttttctagta

SEQ ID NO: 1226170 - DNA, 25 bp, Homo sapien
ttcagtcattaaacttttctagtac

SEQ ID NO: 1226171 - DNA, 25 bp, Homo sapien
tttatattatgaagaactacaaacc

SEQ ID NO: 1226172 - DNA, 25 bp, Homo sapien
aaatcacatctcctaaatttaagta

SEQ ID NO: 1226173 - DNA, 25 bp, Homo sapien
cctcttagcagggtcataataaata

SEQ ID NO: 1226174 - DNA, 25 bp, Homo sapien
taaaccataatataatcaacccaat

SEQ ID NO: 1226175 - DNA, 25 bp, Homo sapien
cgtccggacatgattattatctgca

SEQ ID NO: 1226176 - DNA, 25 bp, Homo sapien
tgtccacgtccggacatgattatta

SEQ ID NO: 1226177 - DNA, 25 bp, Homo sapien
cggacatgattattatctgcacaga

SEQ ID NO: 1226178 - DNA, 25 bp, Homo sapien
cacgtccggacatgattattatctg

SEQ ID NO: 1226179 - DNA, 25 bp, Homo sapien
tagagatcattcctctgaatcgtgt

SEQ ID NO: 1226180 - DNA, 25 bp, Homo sapien
gctgagtagagatcattcctctgaa

SEQ ID NO: 1226181 - DNA, 25 bp, Homo sapien
agatcattcctctgaatcgtgttac

SEQ ID NO: 1226182 - DNA, 25 bp, Homo sapien
ctggctgagtagagatcattcctct

SEQ ID NO: 1226183 - DNA, 25 bp, Homo sapien
gtcatttccagaggaatagctacca

SEQ ID NO: 1226184 - DNA, 25 bp, Homo sapien
ttgaatgacgctaaaggagtagaac

SEQ ID NO: 1226185 - DNA, 25 bp, Homo sapien
gtctcctccagggatagtatcttga

SEQ ID NO: 1226186 - DNA, 25 bp, Homo sapien
gaatagctaccatgactttctgtct

SEQ ID NO: 1226187 - DNA, 25 bp, Homo sapien
tagttaacatgtgaagatgacattc

SEQ ID NO: 1226188 - DNA, 25 bp, Homo sapien
taaggaaaaacgctgcaataaaata

SEQ ID NO: 1226189 - DNA, 25 bp, Homo sapien
taatatagtacctaaaaatgcccta

SEQ ID NO: 1226190 - DNA, 25 bp, Homo sapien
tgtggttttattagttgatatgctt

SEQ ID NO: 1226191 - DNA, 25 bp, Homo sapien
tgatcgtctcgctctccaaaaggtc

SEQ ID NO: 1226192 - DNA, 25 bp, Homo sapien
cgatgagagtcttacaaatagtttg

SEQ ID NO: 1226193 - DNA, 25 bp, Homo sapien
tggtgatgggaacaactttctggat

SEQ ID NO: 1226194 - DNA, 25 bp, Homo sapien
tttctggataaacacctgttgatcg

SEQ ID NO: 1226195 - DNA, 25 bp, Homo sapien
tttgtaagacaaaaggtggcttctg

SEQ ID NO: 1226196 - DNA, 25 bp, Homo sapien
aattatgccatatgttttgtaagac

SEQ ID NO: 1226197 - DNA, 25 bp, Homo sapien
tatgttttgtaagacaaaaggtggc

SEQ ID NO: 1226198 - DNA, 25 bp, Homo sapien
gacaaaaggtggcttctgaatacaa

SEQ ID NO: 1226199 - DNA, 25 bp, Homo sapien
tgtttggccatgaaaaaaagttcac

SEQ ID NO: 1226200 - DNA, 25 bp, Homo sapien
aatgtatacagatttatatgggatg

SEQ ID NO: 1226201 - DNA, 25 bp, Homo sapien
ataatgtatacagatttatatggga

SEQ ID NO: 1226202 - DNA, 25 bp, Homo sapien
taatgtatacagatttatatgggat

SEQ ID NO: 1226203 - DNA, 25 bp, Homo sapien
atgtatacagatttatatgggatgg

SEQ ID NO: 1226204 - DNA, 25 bp, Homo sapien
tattcaattctacagagtaatttct

SEQ ID NO: 1226205 - DNA, 25 bp, Homo sapien
acttctcactattaagagcctgaac

SEQ ID NO: 1226206 - DNA, 25 bp, Homo sapien
tcatttcacttctcactattaagag

SEQ ID NO: 1226207 - DNA, 25 bp, Homo sapien
ttataaagggctaattttctattca

SEQ ID NO: 1226208 - DNA, 25 bp, Homo sapien
aagtgccaaccttctactcccatct

SEQ ID NO: 1226209 - DNA, 25 bp, Homo sapien
caaccttctactcccatcttggtct

SEQ ID NO: 1226210 - DNA, 25 bp, Homo sapien
ccattgatcaacttagccttcggct

SEQ ID NO: 1226211 - DNA, 25 bp, Homo sapien
aatggctccattatataggcatgat

SEQ ID NO: 1226212 - DNA, 25 bp, Homo sapien
taagcatattcactcaggtccactg

SEQ ID NO: 1226213 - DNA, 25 bp, Homo sapien
ggttcaccaaacaccaagcaagcag

SEQ ID NO: 1226214 - DNA, 25 bp, Homo sapien
gagaggtcagctatccccttctgaa

SEQ ID NO: 1226215 - DNA, 25 bp, Homo sapien
tatcacacgggtagaagactcggtc

SEQ ID NO: 1226216 - DNA, 25 bp, Homo sapien
ctgacaagagagaagcatatacatt

SEQ ID NO: 1226217 - DNA, 25 bp, Homo sapien
tcttcacaagagagtgaggtccaaa

SEQ ID NO: 1226218 - DNA, 25 bp, Homo sapien
caagagagtgaggtccaaagaagtg

SEQ ID NO: 1226219 - DNA, 25 bp, Homo sapien
gacaagagagaagcatatacatttt

SEQ ID NO: 1226220 - DNA, 25 bp, Homo sapien
gtgggctcttggctggatctagaaa

SEQ ID NO: 1226221 - DNA, 25 bp, Homo sapien
ggctcttggctggatctagaaacca

SEQ ID NO: 1226222 - DNA, 25 bp, Homo sapien
gttatgtgggctcttggctggatct

SEQ ID NO: 1226223 - DNA, 25 bp, Homo sapien
aatgcccttttagttatgtgggctc

SEQ ID NO: 1226224 - DNA, 25 bp, Homo sapien
ccaaagtcacgtaagggctaactga

SEQ ID NO: 1226225 - DNA, 25 bp, Homo sapien
ttagatgagcttcctagtaggccgg

SEQ ID NO: 1226226 - DNA, 25 bp, Homo sapien
tcagtataggcaaacgcaaggtcaa

SEQ ID NO: 1226227 - DNA, 25 bp, Homo sapien
tatacagctctatggagatggccca

SEQ ID NO: 1226228 - DNA, 25 bp, Homo sapien
tgaggatattgtagtacagtcaaca

SEQ ID NO: 1226229 - DNA, 25 bp, Homo sapien
ggatattgtagtacagtcaacagcc

SEQ ID NO: 1226230 - DNA, 25 bp, Homo sapien
gaggatattgtagtacagtcaacag

SEQ ID NO: 1226231 - DNA, 25 bp, Homo sapien
aggatattgtagtacagtcaacagc

SEQ ID NO: 1226232 - DNA, 25 bp, Homo sapien
gcctgtgaacaagtagcgccttggt

SEQ ID NO: 1226233 - DNA, 25 bp, Homo sapien
tggtcttgagcccatcctactggat

SEQ ID NO: 1226234 - DNA, 25 bp, Homo sapien
gatcccacatttgaatactgccatt

SEQ ID NO: 1226235 - DNA, 25 bp, Homo sapien
ccatatccatagcagtggtcagatc

SEQ ID NO: 1226236 - DNA, 25 bp, Homo sapien
cttaggagaacaaatagtcattaaa

SEQ ID NO: 1226237 - DNA, 25 bp, Homo sapien
ttaggagaacaaatagtcattaaaa

SEQ ID NO: 1226238 - DNA, 25 bp, Homo sapien
gagtagctcttcttcggttggacca

SEQ ID NO: 1226239 - DNA, 25 bp, Homo sapien
tgattctcgtaagtggctatgctga

SEQ ID NO: 1226240 - DNA, 25 bp, Homo sapien
tgatgttaggagtagcacagcgaga

SEQ ID NO: 1226241 - DNA, 25 bp, Homo sapien
tgaactacggaagttgctggactga

SEQ ID NO: 1226242 - DNA, 25 bp, Homo sapien
gtccctataactgtgaaagctctca

SEQ ID NO: 1226243 - DNA, 25 bp, Homo sapien
tggtgatgacgccagatagggaact

SEQ ID NO: 1226244 - DNA, 25 bp, Homo sapien
ggactttctctgtaaggcctcatgg

SEQ ID NO: 1226245 - DNA, 25 bp, Homo sapien
ctcatggaaccgtaagtagctgctt

SEQ ID NO: 1226246 - DNA, 25 bp, Homo sapien
cacaagctgtactcctgacctgaag

SEQ ID NO: 1226247 - DNA, 25 bp, Homo sapien
gaatcactttttttatgccgaggag

SEQ ID NO: 1226248 - DNA, 25 bp, Homo sapien
tactcctgacctgaagaatcacttt

SEQ ID NO: 1226249 - DNA, 25 bp, Homo sapien
ccgaggagatggagtagtctttgta

SEQ ID NO: 1226250 - DNA, 25 bp, Homo sapien
tatgggcaccatcctattaagacgt

SEQ ID NO: 1226251 - DNA, 25 bp, Homo sapien
caatcacaataagtgttgggagacc

SEQ ID NO: 1226252 - DNA, 25 bp, Homo sapien
taaagggatgctcacctatatgggc

SEQ ID NO: 1226253 - DNA, 25 bp, Homo sapien
caggttagcaactggtacagctttc

SEQ ID NO: 1226254 - DNA, 25 bp, Homo sapien
taaataaatacaagagaactgttgt

SEQ ID NO: 1226255 - DNA, 25 bp, Homo sapien
aaataaatacaagagaactgttgtg

SEQ ID NO: 1226256 - DNA, 25 bp, Homo sapien
tgataaataaatacaagagaactgt

SEQ ID NO: 1226257 - DNA, 25 bp, Homo sapien
ataaatacaagagaactgttgtgaa

SEQ ID NO: 1226258 - DNA, 25 bp, Homo sapien
caaggttcaatctcctgtaagcaaa

SEQ ID NO: 1226259 - DNA, 25 bp, Homo sapien
gggcaatctgagaaattagtgtcag

SEQ ID NO: 1226260 - DNA, 25 bp, Homo sapien
gcaatctagtatagtcagtttcctt

SEQ ID NO: 1226261 - DNA, 25 bp, Homo sapien
accacagcgaccctaatgaggtagg

SEQ ID NO: 1226262 - DNA, 25 bp, Homo sapien
ggacacacatgtgcatccacccttg

SEQ ID NO: 1226263 - DNA, 25 bp, Homo sapien
agccttcaaaaacgacagtgctgct

SEQ ID NO: 1226264 - DNA, 25 bp, Homo sapien
cttcaaaaacgacagtgctgctgac

SEQ ID NO: 1226265 - DNA, 25 bp, Homo sapien
cacatgtgcatccacccttgagatg

SEQ ID NO: 1226266 - DNA, 25 bp, Homo sapien
gtatagacagttgccttttctgcta

SEQ ID NO: 1226267 - DNA, 25 bp, Homo sapien
taccattccgtaggagatggaggaa

SEQ ID NO: 1226268 - DNA, 25 bp, Homo sapien
ttttctgctaaaccgcattttacca

SEQ ID NO: 1226269 - DNA, 25 bp, Homo sapien
gcattttaccattccgtaggagatg

SEQ ID NO: 1226270 - DNA, 25 bp, Homo sapien
gcctgaaatattggtaaatacgtac

SEQ ID NO: 1226271 - DNA, 25 bp, Homo sapien
gaaaacattttcaagcctggcctga

SEQ ID NO: 1226272 - DNA, 25 bp, Homo sapien
ccaagatgggtataggcattttgat

SEQ ID NO: 1226273 - DNA, 25 bp, Homo sapien
aacaccccataacaaacagcagaag

SEQ ID NO: 1226274 - DNA, 25 bp, Homo sapien
cacaaggcattggtaaccccaagtc

SEQ ID NO: 1226275 - DNA, 25 bp, Homo sapien
aggcattggtaaccccaagtcagga

SEQ ID NO: 1226276 - DNA, 25 bp, Homo sapien
gccacaaggcattggtaaccccaag

SEQ ID NO: 1226277 - DNA, 25 bp, Homo sapien
ctgaggccacaaggcattggtaacc

SEQ ID NO: 1226278 - DNA, 25 bp, Homo sapien
taaggcagcaatggatgatatcggg

SEQ ID NO: 1226279 - DNA, 25 bp, Homo sapien
tcccagataccaactccagatgagg

SEQ ID NO: 1226280 - DNA, 25 bp, Homo sapien
tgtttttcgacagctccagatggcg

SEQ ID NO: 1226281 - DNA, 25 bp, Homo sapien
tggtctacaccagctcgtaataacg

SEQ ID NO: 1226282 - DNA, 25 bp, Homo sapien
gcctggcacttagcacaatcacaaa

SEQ ID NO: 1226283 - DNA, 25 bp, Homo sapien
cccataatggtgtgactctggctag

SEQ ID NO: 1226284 - DNA, 25 bp, Homo sapien
gcttggagattgcatagtaaacagg

SEQ ID NO: 1226285 - DNA, 25 bp, Homo sapien
tatgcacccatcacctggcacgatg

SEQ ID NO: 1226286 - DNA, 25 bp, Homo sapien
cacaggaaaaagcttaaatcttatt

SEQ ID NO: 1226287 - DNA, 25 bp, Homo sapien
atcacaggaaaaagcttaaatctta

SEQ ID NO: 1226288 - DNA, 25 bp, Homo sapien
gatcacaggaaaaagcttaaatctt

SEQ ID NO: 1226289 - DNA, 25 bp, Homo sapien
tcacaggaaaaagcttaaatcttat

SEQ ID NO: 1226290 - DNA, 25 bp, Homo sapien
taagaaagcaggaatactttcctca

SEQ ID NO: 1226291 - DNA, 25 bp, Homo sapien
tcctcatcaaaatctgaagttgagg

SEQ ID NO: 1226292 - DNA, 25 bp, Homo sapien
ctgggccataagaaagcaggaatac

SEQ ID NO: 1226293 - DNA, 25 bp, Homo sapien
catcaaaatctgaagttgagggcat

SEQ ID NO: 1226294 - DNA, 25 bp, Homo sapien
tcacagtcttcctgaatgggccagg

SEQ ID NO: 1226295 - DNA, 25 bp, Homo sapien
taccaaagataaccaattccagatg

SEQ ID NO: 1226296 - DNA, 25 bp, Homo sapien
cattcgtagggccagaggtctttcc

SEQ ID NO: 1226297 - DNA, 25 bp, Homo sapien
taagaaagccatcgtgttgctcaca

SEQ ID NO: 1226298 - DNA, 25 bp, Homo sapien
tgaggcggcgatgtaatgatgaaat

SEQ ID NO: 1226299 - DNA, 25 bp, Homo sapien
attcaggatatgcagcccacagagc

SEQ ID NO: 1226300 - DNA, 25 bp, Homo sapien
gaaatggaaattgtaaccatgggtc

SEQ ID NO: 1226301 - DNA, 25 bp, Homo sapien
ccatgggtcgtacactgattcagga

SEQ ID NO: 1226302 - DNA, 25 bp, Homo sapien
gcactggaactctcatgtccactgt

SEQ ID NO: 1226303 - DNA, 25 bp, Homo sapien
catttacactgagggtagggaggtc

SEQ ID NO: 1226304 - DNA, 25 bp, Homo sapien
actgagggtagggaggtctgcatgg

SEQ ID NO: 1226305 - DNA, 25 bp, Homo sapien
ctgttaactgaaaggattttgaata

SEQ ID NO: 1226306 - DNA, 25 bp, Homo sapien
cactatactaggtgctatatccaag

SEQ ID NO: 1226307 - DNA, 25 bp, Homo sapien
catttctccttaagcttgtactgca

SEQ ID NO: 1226308 - DNA, 25 bp, Homo sapien
tctttcgtatgtcctgtgctccagc

SEQ ID NO: 1226309 - DNA, 25 bp, Homo sapien
tagataaacaggcacatccaaaaag

SEQ ID NO: 1226310 - DNA, 25 bp, Homo sapien
gccacggttactccactgggcatct

SEQ ID NO: 1226311 - DNA, 25 bp, Homo sapien
ttgcacttaggatcaagctggacac

SEQ ID NO: 1226312 - DNA, 25 bp, Homo sapien
gacaccaattggctaagtgccacgg

SEQ ID NO: 1226313 - DNA, 25 bp, Homo sapien
tcaagctggacaccaattggctaag

SEQ ID NO: 1226314 - DNA, 25 bp, Homo sapien
tgtttactataccttccactctcat

SEQ ID NO: 1226315 - DNA, 25 bp, Homo sapien
tttactatgagaggaaaactgcgaa

SEQ ID NO: 1226316 - DNA, 25 bp, Homo sapien
tggcacacgacctaaacaagggcat

SEQ ID NO: 1226317 - DNA, 25 bp, Homo sapien
taattacaaccacaaggttggtgca

SEQ ID NO: 1226318 - DNA, 25 bp, Homo sapien
tgtgtgacaacaaaagagaagggtt

SEQ ID NO: 1226319 - DNA, 25 bp, Homo sapien
ttcacaggctttagagtcgagttta

SEQ ID NO: 1226320 - DNA, 25 bp, Homo sapien
gagaagggttcaacccagtgtggaa

SEQ ID NO: 1226321 - DNA, 25 bp, Homo sapien
taaagtgtcacagaagaatgttcac

SEQ ID NO: 1226322 - DNA, 25 bp, Homo sapien
tatagaatcgacattcttcccgtag

SEQ ID NO: 1226323 - DNA, 25 bp, Homo sapien
tcttcccgtagggtttgccagtgga

SEQ ID NO: 1226324 - DNA, 25 bp, Homo sapien
aggtttccatatagaatcgacattc

SEQ ID NO: 1226325 - DNA, 25 bp, Homo sapien
gacattcttcccgtagggtttgcca

SEQ ID NO: 1226326 - DNA, 25 bp, Homo sapien
tcaaagtgtcaacaatttttttctc

SEQ ID NO: 1226327 - DNA, 25 bp, Homo sapien
caaagtgtcaacaatttttttctca

SEQ ID NO: 1226328 - DNA, 25 bp, Homo sapien
ttaatgccaggtactaaggttgtaa

SEQ ID NO: 1226329 - DNA, 25 bp, Homo sapien
attaatgccaggtactaaggttgta

SEQ ID NO: 1226330 - DNA, 25 bp, Homo sapien
taatgccaggtactaaggttgtaat

SEQ ID NO: 1226331 - DNA, 25 bp, Homo sapien
aatgccaggtactaaggttgtaata

SEQ ID NO: 1226332 - DNA, 25 bp, Homo sapien
tcgttgctggaatgaagacttagag

SEQ ID NO: 1226333 - DNA, 25 bp, Homo sapien
atgaagacttagagacagccctagg

SEQ ID NO: 1226334 - DNA, 25 bp, Homo sapien
atgcctgggtcgttgctggaatgaa

SEQ ID NO: 1226335 - DNA, 25 bp, Homo sapien
cagtagcccacggagatgcctgggt

SEQ ID NO: 1226336 - DNA, 25 bp, Homo sapien
aatacataataaggagcaattagta

SEQ ID NO: 1226337 - DNA, 25 bp, Homo sapien
taggaaatcgtcagaagtaaataaa

SEQ ID NO: 1226338 - DNA, 25 bp, Homo sapien
ggagcaattagtaatctttgccaca

SEQ ID NO: 1226339 - DNA, 25 bp, Homo sapien
taatctttgccacaataggaaatcg

SEQ ID NO: 1226340 - DNA, 25 bp, Homo sapien
cacctctggttatcttgcgtggcca

SEQ ID NO: 1226341 - DNA, 25 bp, Homo sapien
taggtgtccacagtaagtcaatgca

SEQ ID NO: 1226342 - DNA, 25 bp, Homo sapien
taccacgttccatgctagtgctagg

SEQ ID NO: 1226343 - DNA, 25 bp, Homo sapien
acatggctgtacctagcttcaggga

SEQ ID NO: 1226344 - DNA, 25 bp, Homo sapien
cctttacagatggtgtagatagcaa

SEQ ID NO: 1226345 - DNA, 25 bp, Homo sapien
taaggataggtaacctttacagatg

SEQ ID NO: 1226346 - DNA, 25 bp, Homo sapien
ctaacatgtctaaggataggtaacc

SEQ ID NO: 1226347 - DNA, 25 bp, Homo sapien
taggtaacctttacagatggtgtag

SEQ ID NO: 1226348 - DNA, 25 bp, Homo sapien
ctgacagagcatgccttggtttgaa

SEQ ID NO: 1226349 - DNA, 25 bp, Homo sapien
tttgtagtcttctgacagagcatgc

SEQ ID NO: 1226350 - DNA, 25 bp, Homo sapien
tagtcttctgacagagcatgccttg

SEQ ID NO: 1226351 - DNA, 25 bp, Homo sapien
tcttctgacagagcatgccttggtt

SEQ ID NO: 1226352 - DNA, 25 bp, Homo sapien
acaggagcaggtaaatacttatctt

SEQ ID NO: 1226353 - DNA, 25 bp, Homo sapien
cgagtgatagcctcgcatgaaggag

SEQ ID NO: 1226354 - DNA, 25 bp, Homo sapien
catgaaggaggttcagtatatagtg

SEQ ID NO: 1226355 - DNA, 25 bp, Homo sapien
gagtcgaggacgtacaacaggagca

SEQ ID NO: 1226356 - DNA, 25 bp, Homo sapien
gacacaattgatctcaagattttaa

SEQ ID NO: 1226357 - DNA, 25 bp, Homo sapien
gatttaatttgttttactcgacaca

SEQ ID NO: 1226358 - DNA, 25 bp, Homo sapien
tgttttactcgacacaattgatctc

SEQ ID NO: 1226359 - DNA, 25 bp, Homo sapien
gaagatgatgcttttatggaaaaat

SEQ ID NO: 1226360 - DNA, 25 bp, Homo sapien
atgcttttcataacgtgatgatggc

SEQ ID NO: 1226361 - DNA, 25 bp, Homo sapien
ccctcctccttgtcaacaacaacag

SEQ ID NO: 1226362 - DNA, 25 bp, Homo sapien
ttttcataacgtgatgatggcagaa

SEQ ID NO: 1226363 - DNA, 25 bp, Homo sapien
gcttttcataacgtgatgatggcag

SEQ ID NO: 1226364 - DNA, 25 bp, Homo sapien
tctgccatcctgaatggtagtactg

SEQ ID NO: 1226365 - DNA, 25 bp, Homo sapien
ggctcccgcgaagttataccatcct

SEQ ID NO: 1226366 - DNA, 25 bp, Homo sapien
gagataacacaggagtctttctggg

SEQ ID NO: 1226367 - DNA, 25 bp, Homo sapien
tagtaaaactagagtatcctggtga

SEQ ID NO: 1226368 - DNA, 25 bp, Homo sapien
acttatcactgttgcagaggtccga

SEQ ID NO: 1226369 - DNA, 25 bp, Homo sapien
gtagaacagtaagaaagaacttcgc

SEQ ID NO: 1226370 - DNA, 25 bp, Homo sapien
cataggtgatcagagtgctgtggca

SEQ ID NO: 1226371 - DNA, 25 bp, Homo sapien
gagtctgtcaaggagcaagcaatgc

SEQ ID NO: 1226372 - DNA, 25 bp, Homo sapien
tgaaagggttagcttagctgttccc

SEQ ID NO: 1226373 - DNA, 25 bp, Homo sapien
caaggactggtatactctctagctc

SEQ ID NO: 1226374 - DNA, 25 bp, Homo sapien
tgccaaatctgggttgaggacctct

SEQ ID NO: 1226375 - DNA, 25 bp, Homo sapien
tgaacatattgatacctttgccggg

SEQ ID NO: 1226376 - DNA, 25 bp, Homo sapien
gatgctttaagatattgacacagcc

SEQ ID NO: 1226377 - DNA, 25 bp, Homo sapien
gacagggtgcttattaagaatgtct

SEQ ID NO: 1226378 - DNA, 25 bp, Homo sapien
tcatattctattgacagggtgctta

SEQ ID NO: 1226379 - DNA, 25 bp, Homo sapien
tgtcttatgtagtctgctccccacc

SEQ ID NO: 1226380 - DNA, 25 bp, Homo sapien
tcttgtttgcgtcctggtccagtgc

SEQ ID NO: 1226381 - DNA, 25 bp, Homo sapien
tctttaagacactgattggtgagca

SEQ ID NO: 1226382 - DNA, 25 bp, Homo sapien
ggtccagtgcccttttgcaagtgtt

SEQ ID NO: 1226383 - DNA, 25 bp, Homo sapien
tgcaagtgttctggcctagcagtgt

SEQ ID NO: 1226384 - DNA, 25 bp, Homo sapien
gtttcaatgcctgtgacaaagtctg

SEQ ID NO: 1226385 - DNA, 25 bp, Homo sapien
tctctctccattgcaaaatcttcaa

SEQ ID NO: 1226386 - DNA, 25 bp, Homo sapien
tgttattaatggctttggagttgct

SEQ ID NO: 1226387 - DNA, 25 bp, Homo sapien
gagtattgcactgctgcttctttag

SEQ ID NO: 1226388 - DNA, 25 bp, Homo sapien
tagagtctccttcctagggccagtc

SEQ ID NO: 1226389 - DNA, 25 bp, Homo sapien
tacgactatcttagggcaaattccc

SEQ ID NO: 1226390 - DNA, 25 bp, Homo sapien
gagatcattgtaaaccagcaagtgg

SEQ ID NO: 1226391 - DNA, 25 bp, Homo sapien
cggaagcagactcttggtagaggac

SEQ ID NO: 1226392 - DNA, 25 bp, Homo sapien
tacagttgtggctgatatacctctc

SEQ ID NO: 1226393 - DNA, 25 bp, Homo sapien
gatggaaggatgtcaaccgaacaag

SEQ ID NO: 1226394 - DNA, 25 bp, Homo sapien
ttacagttgtggctgatatacctct

SEQ ID NO: 1226395 - DNA, 25 bp, Homo sapien
caaccgaacaagttcttctgtgtat

SEQ ID NO: 1226396 - DNA, 25 bp, Homo sapien
tgaggctttactgtgtacgtgaact

SEQ ID NO: 1226397 - DNA, 25 bp, Homo sapien
tactgtgtacgtgaactaattcatc

SEQ ID NO: 1226398 - DNA, 25 bp, Homo sapien
ctttactgtgtacgtgaactaattc

SEQ ID NO: 1226399 - DNA, 25 bp, Homo sapien
ggctttactgtgtacgtgaactaat

SEQ ID NO: 1226400 - DNA, 25 bp, Homo sapien
tttaaggtagaggtcaagctagcgc

SEQ ID NO: 1226401 - DNA, 25 bp, Homo sapien
cccttctgggttgctcataggtatc

SEQ ID NO: 1226402 - DNA, 25 bp, Homo sapien
caaaggagcactagacatagtaggc

SEQ ID NO: 1226403 - DNA, 25 bp, Homo sapien
cataggtatcttacgtgtcatagga

SEQ ID NO: 1226404 - DNA, 25 bp, Homo sapien
ttgaccacttggccaattcttccac

SEQ ID NO: 1226405 - DNA, 25 bp, Homo sapien
gaccacttggccaattcttccactg

SEQ ID NO: 1226406 - DNA, 25 bp, Homo sapien
accacttggccaattcttccactgt

SEQ ID NO: 1226407 - DNA, 25 bp, Homo sapien
tgaccacttggccaattcttccact

SEQ ID NO: 1226408 - DNA, 25 bp, Homo sapien
tatccaccattgctccagagcctag

SEQ ID NO: 1226409 - DNA, 25 bp, Homo sapien
tcttttctgttgtcagtaaccttcc

SEQ ID NO: 1226410 - DNA, 25 bp, Homo sapien
tgtcacccggttgactgtgcatatc

SEQ ID NO: 1226411 - DNA, 25 bp, Homo sapien
tgttgtcagtaaccttcccaccaaa

SEQ ID NO: 1226412 - DNA, 25 bp, Homo sapien
gttgtgttgctgtttagttctgtca

SEQ ID NO: 1226413 - DNA, 25 bp, Homo sapien
gttgctgtttagttctgtcagcttt

SEQ ID NO: 1226414 - DNA, 25 bp, Homo sapien
tgtgttgctgtttagttctgtcagc

SEQ ID NO: 1226415 - DNA, 25 bp, Homo sapien
ttgttgtgttgctgtttagttctgt

SEQ ID NO: 1226416 - DNA, 25 bp, Homo sapien
gggacaggaattgcaaacagcattt

SEQ ID NO: 1226417 - DNA, 25 bp, Homo sapien
aagatttgacctgattttggagcac

SEQ ID NO: 1226418 - DNA, 25 bp, Homo sapien
ttcccatcaccaggcatcagcgagt

SEQ ID NO: 1226419 - DNA, 25 bp, Homo sapien
catttggagtgacagtctgggtcag

SEQ ID NO: 1226420 - DNA, 25 bp, Homo sapien
tatgcagataaattgtggctctagc

SEQ ID NO: 1226421 - DNA, 25 bp, Homo sapien
tcagcaagtagtgtcagcagcttag

SEQ ID NO: 1226422 - DNA, 25 bp, Homo sapien
ggctctagcttgtcctccgatgtca

SEQ ID NO: 1226423 - DNA, 25 bp, Homo sapien
ggagcttccttgtcaagagcttcag

SEQ ID NO: 1226424 - DNA, 25 bp, Homo sapien
ttgcttgttcacactactttgttgc

SEQ ID NO: 1226425 - DNA, 25 bp, Homo sapien
tcattgcttgttcacactactttgt

SEQ ID NO: 1226426 - DNA, 25 bp, Homo sapien
gcagggtaggggtggaagctgagct

SEQ ID NO: 1226427 - DNA, 25 bp, Homo sapien
tgcttgttcacactactttgttgct

SEQ ID NO: 1226428 - DNA, 25 bp, Homo sapien
gcctatgcagtaagggttaagaatt

SEQ ID NO: 1226429 - DNA, 25 bp, Homo sapien
tctaataagtaaaaatcgttggtgc

SEQ ID NO: 1226430 - DNA, 25 bp, Homo sapien
taactggtctttacattcgaactga

SEQ ID NO: 1226431 - DNA, 25 bp, Homo sapien
gaaacatgctaaaatagcaacctct

SEQ ID NO: 1226432 - DNA, 25 bp, Homo sapien
gctgcgggctacacgctctgtccat

SEQ ID NO: 1226433 - DNA, 25 bp, Homo sapien
gtgctgcgggctacacgctctgtcc

SEQ ID NO: 1226434 - DNA, 25 bp, Homo sapien
aggtgctgcgggctacacgctctgt

SEQ ID NO: 1226435 - DNA, 25 bp, Homo sapien
tgtctgggagggagaatagggctgt

SEQ ID NO: 1226436 - DNA, 25 bp, Homo sapien
tccatgagaacgtagatttgtatct

SEQ ID NO: 1226437 - DNA, 25 bp, Homo sapien
tcttctccgtattgatccttccatg

SEQ ID NO: 1226438 - DNA, 25 bp, Homo sapien
tgtcgctagcgtgccttctccatca

SEQ ID NO: 1226439 - DNA, 25 bp, Homo sapien
taaagtttccgtgcacgtaaatgtc

SEQ ID NO: 1226440 - DNA, 25 bp, Homo sapien
cgtgaaacgagccaacatgaggctg

SEQ ID NO: 1226441 - DNA, 25 bp, Homo sapien
tcctttgggataagccacattgcag

SEQ ID NO: 1226442 - DNA, 25 bp, Homo sapien
cattgcagacaagctatctggtcgc

SEQ ID NO: 1226443 - DNA, 25 bp, Homo sapien
tgacttggattgacccactgatggg

SEQ ID NO: 1226444 - DNA, 25 bp, Homo sapien
tcctccaccagtcagcacgtttgtg

SEQ ID NO: 1226445 - DNA, 25 bp, Homo sapien
caccagtcagcacgtttgtgccagg

SEQ ID NO: 1226446 - DNA, 25 bp, Homo sapien
tccaccagtcagcacgtttgtgcca

SEQ ID NO: 1226447 - DNA, 25 bp, Homo sapien
cctccaccagtcagcacgtttgtgc

SEQ ID NO: 1226448 - DNA, 25 bp, Homo sapien
caaggatttcgcctctgatttattc

SEQ ID NO: 1226449 - DNA, 25 bp, Homo sapien
ggatttcgcctctgatttattcagc

SEQ ID NO: 1226450 - DNA, 25 bp, Homo sapien
ttttagcaaggatttcgcctctgat

SEQ ID NO: 1226451 - DNA, 25 bp, Homo sapien
tagcaaggatttcgcctctgattta

SEQ ID NO: 1226452 - DNA, 25 bp, Homo sapien
gtagttgtgattaataagggtcgaa

SEQ ID NO: 1226453 - DNA, 25 bp, Homo sapien
cctgtagttgtgattaataagggtc

SEQ ID NO: 1226454 - DNA, 25 bp, Homo sapien
ctgtatacctgtagttgtgattaat

SEQ ID NO: 1226455 - DNA, 25 bp, Homo sapien
tgtgattaataagggtcgaatgatt

SEQ ID NO: 1226456 - DNA, 25 bp, Homo sapien
ccgcgctcggataagcgcatgctaa

SEQ ID NO: 1226457 - DNA, 25 bp, Homo sapien
tttcgtccgcgctcggataagcgca

SEQ ID NO: 1226458 - DNA, 25 bp, Homo sapien
taagcgcatgctaacacaatatgat

SEQ ID NO: 1226459 - DNA, 25 bp, Homo sapien
ttctctttcaatttcgtccgcgctc

SEQ ID NO: 1226460 - DNA, 25 bp, Homo sapien
ggaacacagctgacatttctgaatg

SEQ ID NO: 1226461 - DNA, 25 bp, Homo sapien
taacgaactgtcaggcgatatcgca

SEQ ID NO: 1226462 - DNA, 25 bp, Homo sapien
cgatatcgcagtgaagctaatttga

SEQ ID NO: 1226463 - DNA, 25 bp, Homo sapien
taggtgtgcagcgttcaggcgacaa

SEQ ID NO: 1226464 - DNA, 25 bp, Homo sapien
tcacatttgttggtggctgaaccgg

SEQ ID NO: 1226465 - DNA, 25 bp, Homo sapien
tgaaccggagaagatctatgccatg

SEQ ID NO: 1226466 - DNA, 25 bp, Homo sapien
actgtgtgacttggccgaccgagag

SEQ ID NO: 1226467 - DNA, 25 bp, Homo sapien
tgtagtgctctggtctgatcctgca

SEQ ID NO: 1226468 - DNA, 25 bp, Homo sapien
acgggagcccaatccaggcagagaa

SEQ ID NO: 1226469 - DNA, 25 bp, Homo sapien
agcaacccacgggagcccaatccag

SEQ ID NO: 1226470 - DNA, 25 bp, Homo sapien
gggaggaacgccgaagcagctcttt

SEQ ID NO: 1226471 - DNA, 25 bp, Homo sapien
gaggaacgccgaagcagctctttct

SEQ ID NO: 1226472 - DNA, 25 bp, Homo sapien
caaacagatgttttactacagctgc

SEQ ID NO: 1226473 - DNA, 25 bp, Homo sapien
gaaagtacagatcacattgccttca

SEQ ID NO: 1226474 - DNA, 25 bp, Homo sapien
tttgcaaactgctccatatgtctag

SEQ ID NO: 1226475 - DNA, 25 bp, Homo sapien
gatcataatgttacctgtttcacac

SEQ ID NO: 1226476 - DNA, 25 bp, Homo sapien
attttgtaagttaggctgatgccgc

SEQ ID NO: 1226477 - DNA, 25 bp, Homo sapien
tattttgtaagttaggctgatgccg

SEQ ID NO: 1226478 - DNA, 25 bp, Homo sapien
agttaggctgatgccgcagtgttct

SEQ ID NO: 1226479 - DNA, 25 bp, Homo sapien
tgtaagttaggctgatgccgcagtg

SEQ ID NO: 1226480 - DNA, 25 bp, Homo sapien
tcctgccaacaatgggaattctggt

SEQ ID NO: 1226481 - DNA, 25 bp, Homo sapien
tcagctcagcgttatcctgccaaca

SEQ ID NO: 1226482 - DNA, 25 bp, Homo sapien
gcgttatcctgccaacaatgggaat

SEQ ID NO: 1226483 - DNA, 25 bp, Homo sapien
gaattctggtttgggcaatggcagc

SEQ ID NO: 1226484 - DNA, 25 bp, Homo sapien
gaggcagtacaatagctagattcca

SEQ ID NO: 1226485 - DNA, 25 bp, Homo sapien
tgggcacttacttaaccactgtttc

SEQ ID NO: 1226486 - DNA, 25 bp, Homo sapien
aatgttagttactcctctcagaggc

SEQ ID NO: 1226487 - DNA, 25 bp, Homo sapien
ggcctcccaactgagatgcttcttg

SEQ ID NO: 1226488 - DNA, 25 bp, Homo sapien
tcccattaatggcttttgtaagcag

SEQ ID NO: 1226489 - DNA, 25 bp, Homo sapien
gagaaggcccctgaagaccagttga

SEQ ID NO: 1226490 - DNA, 25 bp, Homo sapien
taagttattccactgcgctgctgca

SEQ ID NO: 1226491 - DNA, 25 bp, Homo sapien
taggaaacataaaggtgtctctgcc

SEQ ID NO: 1226492 - DNA, 25 bp, Homo sapien
aggactttctccattgaggtcattg

SEQ ID NO: 1226493 - DNA, 25 bp, Homo sapien
aagtatcattttggctagagtcaag

SEQ ID NO: 1226494 - DNA, 25 bp, Homo sapien
tgaggtcattgtggtcaaatgaagc

SEQ ID NO: 1226495 - DNA, 25 bp, Homo sapien
agcctcagaaggataactttcatgg

SEQ ID NO: 1226496 - DNA, 25 bp, Homo sapien
gctatttgaatatggtgacaggctc

SEQ ID NO: 1226497 - DNA, 25 bp, Homo sapien
aaattaggtttatcatcaggacagc

SEQ ID NO: 1226498 - DNA, 25 bp, Homo sapien
gttgaagactcctgacaacactgca

SEQ ID NO: 1226499 - DNA, 25 bp, Homo sapien
cagaccctttgcagtggacgtcaca

SEQ ID NO: 1226500 - DNA, 25 bp, Homo sapien
cttccactgtcaaagccagagagct

SEQ ID NO: 1226501 - DNA, 25 bp, Homo sapien
ctcttccactgtcaaagccagagag

SEQ ID NO: 1226502 - DNA, 25 bp, Homo sapien
gtcaaagccagagagcttctcagtt

SEQ ID NO: 1226503 - DNA, 25 bp, Homo sapien
agagagcttctcagttttccttggg

SEQ ID NO: 1226504 - DNA, 25 bp, Homo sapien
tgacatagtagtacactggatagag

SEQ ID NO: 1226505 - DNA, 25 bp, Homo sapien
gagacttaagtcagtgagccattag

SEQ ID NO: 1226506 - DNA, 25 bp, Homo sapien
catcacctatagatacataagttgc

SEQ ID NO: 1226507 - DNA, 25 bp, Homo sapien
taaagtcagggtagggagacacaag

SEQ ID NO: 1226508 - DNA, 25 bp, Homo sapien
ggccctccgattcttctgactatga

SEQ ID NO: 1226509 - DNA, 25 bp, Homo sapien
tgaaagtgtccaggttgcacctgaa

SEQ ID NO: 1226510 - DNA, 25 bp, Homo sapien
cacctgaactagttggagcctgcca

SEQ ID NO: 1226511 - DNA, 25 bp, Homo sapien
tacaatgcttgctcggatttgacag

SEQ ID NO: 1226512 - DNA, 25 bp, Homo sapien
ccatacctgggctaaatattttcag

SEQ ID NO: 1226513 - DNA, 25 bp, Homo sapien
ctgaggatcctgaaggtatagaata

SEQ ID NO: 1226514 - DNA, 25 bp, Homo sapien
tgtttctcctaatcccactgtgcaa

SEQ ID NO: 1226515 - DNA, 25 bp, Homo sapien
tccaattgttaggaaatcttgtcac

SEQ ID NO: 1226516 - DNA, 25 bp, Homo sapien
tgtcttcacattgctcgctgtccat

SEQ ID NO: 1226517 - DNA, 25 bp, Homo sapien
tgctcgctgtccatgtctcgctggg

SEQ ID NO: 1226518 - DNA, 25 bp, Homo sapien
ctgtgtgactctggcccaagaccct

SEQ ID NO: 1226519 - DNA, 25 bp, Homo sapien
aggtccccgataatgctctgtgtga

SEQ ID NO: 1226520 - DNA, 25 bp, Homo sapien
tggcttttatttttcttcagggctg

SEQ ID NO: 1226521 - DNA, 25 bp, Homo sapien
taacttgcagcctcagttaatgcat

SEQ ID NO: 1226522 - DNA, 25 bp, Homo sapien
tgcattgattttaactggaaaccca

SEQ ID NO: 1226523 - DNA, 25 bp, Homo sapien
gacagtgctgtagtcagctgaactc

SEQ ID NO: 1226524 - DNA, 25 bp, Homo sapien
aggagacagtgctgtagtcagctga

SEQ ID NO: 1226525 - DNA, 25 bp, Homo sapien
cctattgtttagcagaagaggttct

SEQ ID NO: 1226526 - DNA, 25 bp, Homo sapien
gtctgtccccgagaggctgtccagg

SEQ ID NO: 1226527 - DNA, 25 bp, Homo sapien
ggttctgccattgcccagcgtctgt

SEQ ID NO: 1226528 - DNA, 25 bp, Homo sapien
gataactggtccaaatttgtggtcc

SEQ ID NO: 1226529 - DNA, 25 bp, Homo sapien
cactttgtagtagcaatatcactaa

SEQ ID NO: 1226530 - DNA, 25 bp, Homo sapien
cactaattcatgatagttacattta

SEQ ID NO: 1226531 - DNA, 25 bp, Homo sapien
gtagtagcaatatcactaattcatg

SEQ ID NO: 1226532 - DNA, 25 bp, Homo sapien
taagtaatacactttgtagtagcaa

SEQ ID NO: 1226533 - DNA, 25 bp, Homo sapien
tgttttctcaaatcacacgttgcac

SEQ ID NO: 1226534 - DNA, 25 bp, Homo sapien
cacgttgcaccgttgatttctgaca

SEQ ID NO: 1226535 - DNA, 25 bp, Homo sapien
tgtgatgccataatgacaccctgtc

SEQ ID NO: 1226536 - DNA, 25 bp, Homo sapien
ttagacccagcagttgtcaaagcat

SEQ ID NO: 1226537 - DNA, 25 bp, Homo sapien
tttcagggattggagacaaaatgct

SEQ ID NO: 1226538 - DNA, 25 bp, Homo sapien
tccgtctaggaggttttcgagattc

SEQ ID NO: 1226539 - DNA, 25 bp, Homo sapien
gagattctctcttcggatccattgg

SEQ ID NO: 1226540 - DNA, 25 bp, Homo sapien
tatagcacactgttcgaaagccctt

SEQ ID NO: 1226541 - DNA, 25 bp, Homo sapien
tccactcctggtgaactgatctatg

SEQ ID NO: 1226542 - DNA, 25 bp, Homo sapien
cactcctggtgaactgatctatgtc

SEQ ID NO: 1226543 - DNA, 25 bp, Homo sapien
gttccactcctggtgaactgatcta

SEQ ID NO: 1226544 - DNA, 25 bp, Homo sapien
ctcctggtgaactgatctatgtcta

SEQ ID NO: 1226545 - DNA, 25 bp, Homo sapien
taaaggttctttgcgaatggaagcg

SEQ ID NO: 1226546 - DNA, 25 bp, Homo sapien
cctgtcttgacagccaatttcgaga

SEQ ID NO: 1226547 - DNA, 25 bp, Homo sapien
cgttcgtgcacttgatagacgggta

SEQ ID NO: 1226548 - DNA, 25 bp, Homo sapien
tagacgggtataaatcacaacaatc

SEQ ID NO: 1226549 - DNA, 25 bp, Homo sapien
ttttacagcattcttgcccttatca

SEQ ID NO: 1226550 - DNA, 25 bp, Homo sapien
ggaactgaaacttagtaaatgagca

SEQ ID NO: 1226551 - DNA, 25 bp, Homo sapien
cacacctggcttgcctgtaatatct

SEQ ID NO: 1226552 - DNA, 25 bp, Homo sapien
ttcaccctctctcataagactagag

SEQ ID NO: 1226553 - DNA, 25 bp, Homo sapien
gcatgaatcagcacagcctactggc

SEQ ID NO: 1226554 - DNA, 25 bp, Homo sapien
ttttgtatctaacaagataagttta

SEQ ID NO: 1226555 - DNA, 25 bp, Homo sapien
taagtttacaaagctgtagtgtcat

SEQ ID NO: 1226556 - DNA, 25 bp, Homo sapien
tcttttgtatctaacaagataagtt

SEQ ID NO: 1226557 - DNA, 25 bp, Homo sapien
atcttttgtatctaacaagataagt

SEQ ID NO: 1226558 - DNA, 25 bp, Homo sapien
catctggtgactgcaatagctcatt

SEQ ID NO: 1226559 - DNA, 25 bp, Homo sapien
cattcatgagtccatctggtgactg

SEQ ID NO: 1226560 - DNA, 25 bp, Homo sapien
gagtccatctggtgactgcaatagc

SEQ ID NO: 1226561 - DNA, 25 bp, Homo sapien
catgagtccatctggtgactgcaat

SEQ ID NO: 1226562 - DNA, 25 bp, Homo sapien
agacagggcgccttgccatctgccc

SEQ ID NO: 1226563 - DNA, 25 bp, Homo sapien
atcagacagggcgccttgccatctg

SEQ ID NO: 1226564 - DNA, 25 bp, Homo sapien
cagacagggcgccttgccatctgcc

SEQ ID NO: 1226565 - DNA, 25 bp, Homo sapien
tcagacagggcgccttgccatctgc

SEQ ID NO: 1226566 - DNA, 25 bp, Homo sapien
agccctttgttcagtactagttcct

SEQ ID NO: 1226567 - DNA, 25 bp, Homo sapien
tcattggaaagttcgtttttgcaac

SEQ ID NO: 1226568 - DNA, 25 bp, Homo sapien
attcaggaacagaatgttcacaagc

SEQ ID NO: 1226569 - DNA, 25 bp, Homo sapien
tgacaaagcgttcagctttaaatag

SEQ ID NO: 1226570 - DNA, 25 bp, Homo sapien
tctccactccaattctattaaacat

SEQ ID NO: 1226571 - DNA, 25 bp, Homo sapien
atgaaattacaggtgaatatgttga

SEQ ID NO: 1226572 - DNA, 25 bp, Homo sapien
ctctggagaaattaagtactccttt

SEQ ID NO: 1226573 - DNA, 25 bp, Homo sapien
ggtgaatatgttgataaaagaaact

SEQ ID NO: 1226574 - DNA, 25 bp, Homo sapien
gattcggtagaactttgccttcctg

SEQ ID NO: 1226575 - DNA, 25 bp, Homo sapien
taattgcactgtgctctgtcaagga

SEQ ID NO: 1226576 - DNA, 25 bp, Homo sapien
tagctggggtgcacaaataatggtt

SEQ ID NO: 1226577 - DNA, 25 bp, Homo sapien
taatggttgccggtcgcacatggat

SEQ ID NO: 1226578 - DNA, 25 bp, Homo sapien
gagagatttaattcgctatttaccc

SEQ ID NO: 1226579 - DNA, 25 bp, Homo sapien
tgaagaagccaatttgtcctgcggc

SEQ ID NO: 1226580 - DNA, 25 bp, Homo sapien
tgcggctgtttaccgttgttttgaa

SEQ ID NO: 1226581 - DNA, 25 bp, Homo sapien
tattttgtcaaaatgcatcgagaga

SEQ ID NO: 1226582 - DNA, 25 bp, Homo sapien
gagataggactgtagccagataaaa

SEQ ID NO: 1226583 - DNA, 25 bp, Homo sapien
taacatagccgaggtcagcagtcag

SEQ ID NO: 1226584 - DNA, 25 bp, Homo sapien
tctctggccacatttacaagacaat

SEQ ID NO: 1226585 - DNA, 25 bp, Homo sapien
taatagcaagtcagtgatccaaggg

SEQ ID NO: 1226586 - DNA, 25 bp, Homo sapien
ctagtcagacgacatcatgaaggct

SEQ ID NO: 1226587 - DNA, 25 bp, Homo sapien
gtcagacgacatcatgaaggctgat

SEQ ID NO: 1226588 - DNA, 25 bp, Homo sapien
cagacgacatcatgaaggctgatgt

SEQ ID NO: 1226589 - DNA, 25 bp, Homo sapien
gacgacatcatgaaggctgatgtag

SEQ ID NO: 1226590 - DNA, 25 bp, Homo sapien
gcagctttaacaggtgccgtcggta

SEQ ID NO: 1226591 - DNA, 25 bp, Homo sapien
tattcagtcagagatccaggaagtc

SEQ ID NO: 1226592 - DNA, 25 bp, Homo sapien
tccagccagacaaatgcagaacagc

SEQ ID NO: 1226593 - DNA, 25 bp, Homo sapien
ctatcgcgcttgttgccaaacactg

SEQ ID NO: 1226594 - DNA, 25 bp, Homo sapien
ctgattacatgcttggctttctgag

SEQ ID NO: 1226595 - DNA, 25 bp, Homo sapien
gctgatggtgcaagctgcgtgtcta

SEQ ID NO: 1226596 - DNA, 25 bp, Homo sapien
ttgctgatggtgcaagctgcgtgtc

SEQ ID NO: 1226597 - DNA, 25 bp, Homo sapien
tgcaagctgcgtgtctattcctaca

SEQ ID NO: 1226598 - DNA, 25 bp, Homo sapien
gatggtgcaagctgcgtgtctattc

SEQ ID NO: 1226599 - DNA, 25 bp, Homo sapien
gtttttgaagcaatcgttgatggct

SEQ ID NO: 1226600 - DNA, 25 bp, Homo sapien
cgttgatggctgtaagtatctaagc

SEQ ID NO: 1226601 - DNA, 25 bp, Homo sapien
gcaatcgttgatggctgtaagtatc

SEQ ID NO: 1226602 - DNA, 25 bp, Homo sapien
gaagcaatcgttgatggctgtaagt

SEQ ID NO: 1226603 - DNA, 25 bp, Homo sapien
gggtaatgtcattggaatggtgaaa

SEQ ID NO: 1226604 - DNA, 25 bp, Homo sapien
ggcccaggcaaacacgaacccatag

SEQ ID NO: 1226605 - DNA, 25 bp, Homo sapien
caaacacgaacccatagaaagaaat

SEQ ID NO: 1226606 - DNA, 25 bp, Homo sapien
ataccaaaagacgattgagcactca

SEQ ID NO: 1226607 - DNA, 25 bp, Homo sapien
ttgtatagtcaagccccactctgtg

SEQ ID NO: 1226608 - DNA, 25 bp, Homo sapien
gttaagcgagcgtcagtcactggta

SEQ ID NO: 1226609 - DNA, 25 bp, Homo sapien
actctgtgcagagcaaatctttgct

SEQ ID NO: 1226610 - DNA, 25 bp, Homo sapien
ccttgctgtcactactggttcttgt

SEQ ID NO: 1226611 - DNA, 25 bp, Homo sapien
cacatgttcgtggtgtggaaaggac

SEQ ID NO: 1226612 - DNA, 25 bp, Homo sapien
caccacatctcgattcaaagaatag

SEQ ID NO: 1226613 - DNA, 25 bp, Homo sapien
aatttcttcagctataccaagagtg

SEQ ID NO: 1226614 - DNA, 25 bp, Homo sapien
tcagctataccaagagtggtgttgt

SEQ ID NO: 1226615 - DNA, 25 bp, Homo sapien
cagggcagccgaacactgtccagtc

SEQ ID NO: 1226616 - DNA, 25 bp, Homo sapien
ccaaatttcaagattgaaagctgac

SEQ ID NO: 1226617 - DNA, 25 bp, Homo sapien
caagattgaaagctgacacctgaat

SEQ ID NO: 1226618 - DNA, 25 bp, Homo sapien
ccagggcagccgaacactgtccagt

SEQ ID NO: 1226619 - DNA, 25 bp, Homo sapien
catttcaagaatgtgcctatgagga

SEQ ID NO: 1226620 - DNA, 25 bp, Homo sapien
catttcatgccccttagctgtgcca

SEQ ID NO: 1226621 - DNA, 25 bp, Homo sapien
cgagccaagtgcctgactgccattt

SEQ ID NO: 1226622 - DNA, 25 bp, Homo sapien
tctgcagtaagagcggcaacagtcc

SEQ ID NO: 1226623 - DNA, 25 bp, Homo sapien
ggatacaaagcatctcttaactcag

SEQ ID NO: 1226624 - DNA, 25 bp, Homo sapien
gcaccatttgcaactctattccaga

SEQ ID NO: 1226625 - DNA, 25 bp, Homo sapien
gatatgttaaagtactcgggtgtgt

SEQ ID NO: 1226626 - DNA, 25 bp, Homo sapien
tcaggaaacttaggcatgcaccatt

SEQ ID NO: 1226627 - DNA, 25 bp, Homo sapien
tggaatattagatgtttctttgctg

SEQ ID NO: 1226628 - DNA, 25 bp, Homo sapien
tagtgtatgatttgcgtgctgttgc

SEQ ID NO: 1226629 - DNA, 25 bp, Homo sapien
tctgttctgtcgagtaatccctaaa

SEQ ID NO: 1226630 - DNA, 25 bp, Homo sapien
tgctgtaatccctcggcccaatagg

SEQ ID NO: 1226631 - DNA, 25 bp, Homo sapien
gacacatcttggttcacacaagaac

SEQ ID NO: 1226632 - DNA, 25 bp, Homo sapien
cctagagtcgaaaggcttactggca

SEQ ID NO: 1226633 - DNA, 25 bp, Homo sapien
aggcttactggcatgggaatttgaa

SEQ ID NO: 1226634 - DNA, 25 bp, Homo sapien
tgaatttttgaatgagtgcctagag

SEQ ID NO: 1226635 - DNA, 25 bp, Homo sapien
cactgcaataccaatctccaaagaa

SEQ ID NO: 1226636 - DNA, 25 bp, Homo sapien
aaatgaagttggcagctgtttttgc

SEQ ID NO: 1226637 - DNA, 25 bp, Homo sapien
tgcccagtgttcatgtacttccaca

SEQ ID NO: 1226638 - DNA, 25 bp, Homo sapien
aaactgatgctgaccagattgccag

SEQ ID NO: 1226639 - DNA, 25 bp, Homo sapien
ccctcaggacaaggatagtgtacaa

SEQ ID NO: 1226640 - DNA, 25 bp, Homo sapien
gactctgctctgacgtgttgaacca

SEQ ID NO: 1226641 - DNA, 25 bp, Homo sapien
ccctggattatggaagactgactct

SEQ ID NO: 1226642 - DNA, 25 bp, Homo sapien
gttacagccccacaatctgttaggg

SEQ ID NO: 1226643 - DNA, 25 bp, Homo sapien
tcagaatgtgatccgcgtcttggtc

SEQ ID NO: 1226644 - DNA, 25 bp, Homo sapien
tgggagccttctgtagacgatttcc

SEQ ID NO: 1226645 - DNA, 25 bp, Homo sapien
gagggtgtatcactcttccaggaaa

SEQ ID NO: 1226646 - DNA, 25 bp, Homo sapien
tcttggtgcaatagaaacgcagctt

SEQ ID NO: 1226647 - DNA, 25 bp, Homo sapien
cctaagagtagcgactgggagaata

SEQ ID NO: 1226648 - DNA, 25 bp, Homo sapien
gacaactccctgatcttcaagaata

SEQ ID NO: 1226649 - DNA, 25 bp, Homo sapien
gcttcaaggcgtgtaaaaatggata

SEQ ID NO: 1226650 - DNA, 25 bp, Homo sapien
cgttagatgcttcaaggcgtgtaaa

SEQ ID NO: 1226651 - DNA, 25 bp, Homo sapien
tgtaaaaatggataagacaactccc

SEQ ID NO: 1226652 - DNA, 25 bp, Homo sapien
tctttcatgtgaacaatagcagaca

SEQ ID NO: 1226653 - DNA, 25 bp, Homo sapien
catctttcctattagatttatgcca

SEQ ID NO: 1226654 - DNA, 25 bp, Homo sapien
gttcacaacacatctttcctattag

SEQ ID NO: 1226655 - DNA, 25 bp, Homo sapien
ctttcctattagatttatgccataa

SEQ ID NO: 1226656 - DNA, 25 bp, Homo sapien
agatggttcacaacacatctttcct

SEQ ID NO: 1226657 - DNA, 25 bp, Homo sapien
gaaagttaatttgcaaggcactcag

SEQ ID NO: 1226658 - DNA, 25 bp, Homo sapien
tggatactctggtagctgacaaagc

SEQ ID NO: 1226659 - DNA, 25 bp, Homo sapien
gaatgtatagctcaaggtcctggct

SEQ ID NO: 1226660 - DNA, 25 bp, Homo sapien
tcagagcagtctggtgagccacagg

SEQ ID NO: 1226661 - DNA, 25 bp, Homo sapien
tcagtcacatctattgatcttcggg

SEQ ID NO: 1226662 - DNA, 25 bp, Homo sapien
gaacgtaaacgctttctcagtcaca

SEQ ID NO: 1226663 - DNA, 25 bp, Homo sapien
attcacacactcatttggcattggg

SEQ ID NO: 1226664 - DNA, 25 bp, Homo sapien
gaaacacagtgaactctagccctga

SEQ ID NO: 1226665 - DNA, 25 bp, Homo sapien
cacttgaccgtgttctctggtgaac

SEQ ID NO: 1226666 - DNA, 25 bp, Homo sapien
ggcaagtaatcgctctcttcctcct

SEQ ID NO: 1226667 - DNA, 25 bp, Homo sapien
tgctaattaacatcagtgctgctcc

SEQ ID NO: 1226668 - DNA, 25 bp, Homo sapien
tggtgaacatgtgctggtttggcaa

SEQ ID NO: 1226669 - DNA, 25 bp, Homo sapien
ttcttggtgggctgattggcttctg

SEQ ID NO: 1226670 - DNA, 25 bp, Homo sapien
agctttccagtgtcagcagcctgaa

SEQ ID NO: 1226671 - DNA, 25 bp, Homo sapien
cagcagcctgaacaccaacatgagt

SEQ ID NO: 1226672 - DNA, 25 bp, Homo sapien
catgagtgggcgatatcttcctcca

SEQ ID NO: 1226673 - DNA, 25 bp, Homo sapien
gggagtgttcccattactgcttgat

SEQ ID NO: 1226674 - DNA, 25 bp, Homo sapien
taggaacgtgcaaacaggatggagt

SEQ ID NO: 1226675 - DNA, 25 bp, Homo sapien
gcttgatgaaacaatgacagccttg

SEQ ID NO: 1226676 - DNA, 25 bp, Homo sapien
tgggctatgaaagtaaccccaggac

SEQ ID NO: 1226677 - DNA, 25 bp, Homo sapien
gatggagttcagttggctagcagtc

SEQ ID NO: 1226678 - DNA, 25 bp, Homo sapien
tagtttaaccaggacatcccctgtc

SEQ ID NO: 1226679 - DNA, 25 bp, Homo sapien
tgcagagggtggttggtatagatgg

SEQ ID NO: 1226680 - DNA, 25 bp, Homo sapien
catgtcaggggcatttagtttaacc

SEQ ID NO: 1226681 - DNA, 25 bp, Homo sapien
gcatttagtttaaccaggacatccc

SEQ ID NO: 1226682 - DNA, 25 bp, Homo sapien
ctcttgtctttttaaccaaataatg

SEQ ID NO: 1226683 - DNA, 25 bp, Homo sapien
tgtctttttaaccaaataatgatct

SEQ ID NO: 1226684 - DNA, 25 bp, Homo sapien
tctttttaaccaaataatgatctat

SEQ ID NO: 1226685 - DNA, 25 bp, Homo sapien
tttttaaccaaataatgatctatac

SEQ ID NO: 1226686 - DNA, 25 bp, Homo sapien
tttgatgaaactacttgtctcttgc

SEQ ID NO: 1226687 - DNA, 25 bp, Homo sapien
tacttgtctcttgcagaatcatcac

SEQ ID NO: 1226688 - DNA, 25 bp, Homo sapien
cagaatatcccctaaactttgaagt

SEQ ID NO: 1226689 - DNA, 25 bp, Homo sapien
ccagaatatcccctaaactttgaag

SEQ ID NO: 1226690 - DNA, 25 bp, Homo sapien
cctgtcactcggtaatggcttttcc

SEQ ID NO: 1226691 - DNA, 25 bp, Homo sapien
ttttttgtctcctgtcactcggtaa

SEQ ID NO: 1226692 - DNA, 25 bp, Homo sapien
caggtgcagagatgctgtattttca

SEQ ID NO: 1226693 - DNA, 25 bp, Homo sapien
tcaccatcaggtgaacaggtgcaga

SEQ ID NO: 1226694 - DNA, 25 bp, Homo sapien
tgttccaggacagatcctggggcag

SEQ ID NO: 1226695 - DNA, 25 bp, Homo sapien
ggcagatgttcagttatctgctgga

SEQ ID NO: 1226696 - DNA, 25 bp, Homo sapien
cagatgttcagttatctgctggatc

SEQ ID NO: 1226697 - DNA, 25 bp, Homo sapien
agatgttcagttatctgctggatca

SEQ ID NO: 1226698 - DNA, 25 bp, Homo sapien
gagtcactgccgtgagcatctttcc

SEQ ID NO: 1226699 - DNA, 25 bp, Homo sapien
ggaacgctcccatttctgacactga

SEQ ID NO: 1226700 - DNA, 25 bp, Homo sapien
gacactgaacccgaaaatccaattc

SEQ ID NO: 1226701 - DNA, 25 bp, Homo sapien
tccaattcagtgttaaagaggccct

SEQ ID NO: 1226702 - DNA, 25 bp, Homo sapien
taaactcagactgggcaggaatcca

SEQ ID NO: 1226703 - DNA, 25 bp, Homo sapien
aggaatccagcgatgctctttcccc

SEQ ID NO: 1226704 - DNA, 25 bp, Homo sapien
tgatcctgactataaaaagtttatt

SEQ ID NO: 1226705 - DNA, 25 bp, Homo sapien
ttcccctgcaacatcctgggtttca

SEQ ID NO: 1226706 - DNA, 25 bp, Homo sapien
taaatacctattgctaagccatagg

SEQ ID NO: 1226707 - DNA, 25 bp, Homo sapien
aggactttccagtggaaagtgcctt

SEQ ID NO: 1226708 - DNA, 25 bp, Homo sapien
tgtaaatacctattgctaagccata

SEQ ID NO: 1226709 - DNA, 25 bp, Homo sapien
tacctattgctaagccataggtaga

SEQ ID NO: 1226710 - DNA, 25 bp, Homo sapien
aagtataaggaagataaaagtccat

SEQ ID NO: 1226711 - DNA, 25 bp, Homo sapien
tgaagtataaggaagataaaagtcc

SEQ ID NO: 1226712 - DNA, 25 bp, Homo sapien
gaagtataaggaagataaaagtcca

SEQ ID NO: 1226713 - DNA, 25 bp, Homo sapien
acatatcatcttatctaactcttcc

SEQ ID NO: 1226714 - DNA, 25 bp, Homo sapien
catttctacttccagtcctctgcat

SEQ ID NO: 1226715 - DNA, 25 bp, Homo sapien
aatgtaacatatcatcttatctaac

SEQ ID NO: 1226716 - DNA, 25 bp, Homo sapien
gtcctctgcatgtacactttttata

SEQ ID NO: 1226717 - DNA, 25 bp, Homo sapien
catttttcccatttccattccttgt

SEQ ID NO: 1226718 - DNA, 25 bp, Homo sapien
ccatttttcccatttccattccttg

SEQ ID NO: 1226719 - DNA, 25 bp, Homo sapien
cctatccatttttcccatttccatt

SEQ ID NO: 1226720 - DNA, 25 bp, Homo sapien
atccatttttcccatttccattcct

SEQ ID NO: 1226721 - DNA, 25 bp, Homo sapien
taaaggcctccctcatgggcaaagg

SEQ ID NO: 1226722 - DNA, 25 bp, Homo sapien
tctgcagggttgtctttaaggagct

SEQ ID NO: 1226723 - DNA, 25 bp, Homo sapien
aatatcctgctagcggcatgttctg

SEQ ID NO: 1226724 - DNA, 25 bp, Homo sapien
tggtctgtttcactgcatgccaggc

SEQ ID NO: 1226725 - DNA, 25 bp, Homo sapien
acagcatggttcattttggtgccgg

SEQ ID NO: 1226726 - DNA, 25 bp, Homo sapien
ccctgattgaatggaaaagtgtatc

SEQ ID NO: 1226727 - DNA, 25 bp, Homo sapien
catagtgtggatagctggagtttca

SEQ ID NO: 1226728 - DNA, 25 bp, Homo sapien
gccaccatcctacatgacagcatgg

SEQ ID NO: 1226729 - DNA, 25 bp, Homo sapien
tgtaaagacggtaatcaagtgtgga

SEQ ID NO: 1226730 - DNA, 25 bp, Homo sapien
ctgtaaagacggtaatcaagtgtgg

SEQ ID NO: 1226731 - DNA, 25 bp, Homo sapien
ttcagactctggtgcttgcaaaggg

SEQ ID NO: 1226732 - DNA, 25 bp, Homo sapien
tttcagactctggtgcttgcaaagg

SEQ ID NO: 1226733 - DNA, 25 bp, Homo sapien
tcagactctggtgcttgcaaagggt

SEQ ID NO: 1226734 - DNA, 25 bp, Homo sapien
ttttactgcccaaggcagtttggta

SEQ ID NO: 1226735 - DNA, 25 bp, Homo sapien
aacctgtctgtcagtcaacacccac

SEQ ID NO: 1226736 - DNA, 25 bp, Homo sapien
caacctgtctgtcagtcaacaccca

SEQ ID NO: 1226737 - DNA, 25 bp, Homo sapien
cctgtctgtcagtcaacacccactt

SEQ ID NO: 1226738 - DNA, 25 bp, Homo sapien
gtctgtcagtcaacacccacttcat

SEQ ID NO: 1226739 - DNA, 25 bp, Homo sapien
tcttcaggctcatgtaaatattctg

SEQ ID NO: 1226740 - DNA, 25 bp, Homo sapien
ctcttcaggctcatgtaaatattct

SEQ ID NO: 1226741 - DNA, 25 bp, Homo sapien
tgtgtgcaaatgagcgacttgccgt

SEQ ID NO: 1226742 - DNA, 25 bp, Homo sapien
ggaatcctgtcataacagtttcagg

SEQ ID NO: 1226743 - DNA, 25 bp, Homo sapien
cttgccgtttgcatatgggaatcct

SEQ ID NO: 1226744 - DNA, 25 bp, Homo sapien
atttgttaataatcaagttctctga

SEQ ID NO: 1226745 - DNA, 25 bp, Homo sapien
aacttttcaggttgagtctggcaat

SEQ ID NO: 1226746 - DNA, 25 bp, Homo sapien
caatttagctgcagttggtgagggc

SEQ ID NO: 1226747 - DNA, 25 bp, Homo sapien
gaatgtggtgtgatagccctacaga

SEQ ID NO: 1226748 - DNA, 25 bp, Homo sapien
tactttgctgggtctaggattggaa

SEQ ID NO: 1226749 - DNA, 25 bp, Homo sapien
ctgaagctttcggcaggaagtccat

SEQ ID NO: 1226750 - DNA, 25 bp, Homo sapien
agtgccagtgaattattctggtggc

SEQ ID NO: 1226751 - DNA, 25 bp, Homo sapien
tgctgaagctttcggcaggaagtcc

SEQ ID NO: 1226752 - DNA, 25 bp, Homo sapien
tttgctgaagctttcggcaggaagt

SEQ ID NO: 1226753 - DNA, 25 bp, Homo sapien
attgattagtactccttctcccatg

SEQ ID NO: 1226754 - DNA, 25 bp, Homo sapien
catcgagaccagatgttatgtaagt

SEQ ID NO: 1226755 - DNA, 25 bp, Homo sapien
tgtaagtatattgattagtactcct

SEQ ID NO: 1226756 - DNA, 25 bp, Homo sapien
catggcatatcccatggctgatcat

SEQ ID NO: 1226757 - DNA, 25 bp, Homo sapien
tccccgataccgtggtctggaaatg

SEQ ID NO: 1226758 - DNA, 25 bp, Homo sapien
ccgataccgtggtctggaaatgtgg

SEQ ID NO: 1226759 - DNA, 25 bp, Homo sapien
tcttcttccccgataccgtggtctg

SEQ ID NO: 1226760 - DNA, 25 bp, Homo sapien
tcttccccgataccgtggtctggaa

SEQ ID NO: 1226761 - DNA, 25 bp, Homo sapien
tctctgctaacttgtgtttcccttc

SEQ ID NO: 1226762 - DNA, 25 bp, Homo sapien
gctaacttgtgtttcccttcacctc

SEQ ID NO: 1226763 - DNA, 25 bp, Homo sapien
tgggctcctctagttagggaggacc

SEQ ID NO: 1226764 - DNA, 25 bp, Homo sapien
tctgctaacttgtgtttcccttcac

SEQ ID NO: 1226765 - DNA, 25 bp, Homo sapien
cactgagcacacaggacctcctaga

SEQ ID NO: 1226766 - DNA, 25 bp, Homo sapien
cacaggacctcctagatcctgctgt

SEQ ID NO: 1226767 - DNA, 25 bp, Homo sapien
agtaccgtcagcgactgcccttgtc

SEQ ID NO: 1226768 - DNA, 25 bp, Homo sapien
ggacctcctagatcctgctgtacta

SEQ ID NO: 1226769 - DNA, 25 bp, Homo sapien
ttctgccccattctggatcactttc

SEQ ID NO: 1226770 - DNA, 25 bp, Homo sapien
cagagctaagccctttccatccagt

SEQ ID NO: 1226771 - DNA, 25 bp, Homo sapien
ttctcacgaatgacactggctgatc

SEQ ID NO: 1226772 - DNA, 25 bp, Homo sapien
acttcactttctgccccattctgga

SEQ ID NO: 1226773 - DNA, 25 bp, Homo sapien
ttgaagaactcttggatattctgtc

SEQ ID NO: 1226774 - DNA, 25 bp, Homo sapien
tgttattaaattcctggttctgaac

SEQ ID NO: 1226775 - DNA, 25 bp, Homo sapien
tttgaagaactcttggatattctgt

SEQ ID NO: 1226776 - DNA, 25 bp, Homo sapien
ccccatgtctggtgataataaccat

SEQ ID NO: 1226777 - DNA, 25 bp, Homo sapien
ggactcttcttctgcactatcaggg

SEQ ID NO: 1226778 - DNA, 25 bp, Homo sapien
tgacgatagccagccctttggtggc

SEQ ID NO: 1226779 - DNA, 25 bp, Homo sapien
caaaagaacacaaagggactcttct

SEQ ID NO: 1226780 - DNA, 25 bp, Homo sapien
ggacccaccatggagtttccaaatg

SEQ ID NO: 1226781 - DNA, 25 bp, Homo sapien
gctgctgaggaattggctgagactt

SEQ ID NO: 1226782 - DNA, 25 bp, Homo sapien
gctttgtaaagaacgccacggctga

SEQ ID NO: 1226783 - DNA, 25 bp, Homo sapien
caaacatgtcagcagtaagcagcca

SEQ ID NO: 1226784 - DNA, 25 bp, Homo sapien
gggcttacgctggaagggtgccaag

SEQ ID NO: 1226785 - DNA, 25 bp, Homo sapien
ggcttacgctggaagggtgccaagt

SEQ ID NO: 1226786 - DNA, 25 bp, Homo sapien
gggggcttacgctggaagggtgcca

SEQ ID NO: 1226787 - DNA, 25 bp, Homo sapien
ggggcttacgctggaagggtgccaa

SEQ ID NO: 1226788 - DNA, 25 bp, Homo sapien
gtgagtatgcctgacttgtggacat

SEQ ID NO: 1226789 - DNA, 25 bp, Homo sapien
tgtgagtatgcctgacttgtggaca

SEQ ID NO: 1226790 - DNA, 25 bp, Homo sapien
tccttcttgattaagagctgatgaa

SEQ ID NO: 1226791 - DNA, 25 bp, Homo sapien
gttttattgccatcttcaccagaat

SEQ ID NO: 1226792 - DNA, 25 bp, Homo sapien
gattaagagctgatgaagtagcgtg

SEQ ID NO: 1226793 - DNA, 25 bp, Homo sapien
gatgaagtagcgtgcaccttatcct

SEQ ID NO: 1226794 - DNA, 25 bp, Homo sapien
ttttcttagaatccaggctggggcc

SEQ ID NO: 1226795 - DNA, 25 bp, Homo sapien
cagacactatggtgtcttccctaga

SEQ ID NO: 1226796 - DNA, 25 bp, Homo sapien
cctggagtccaccagacactatggt

SEQ ID NO: 1226797 - DNA, 25 bp, Homo sapien
tgccttcttgtgctgtagcttcctg

SEQ ID NO: 1226798 - DNA, 25 bp, Homo sapien
taaccacccttgtctgatgctccag

SEQ ID NO: 1226799 - DNA, 25 bp, Homo sapien
tacaatcttctttcccaagggcaga

SEQ ID NO: 1226800 - DNA, 25 bp, Homo sapien
caaaaccagggctatggcttgcgat

SEQ ID NO: 1226801 - DNA, 25 bp, Homo sapien
ccatggtactattcgggcagagaca

SEQ ID NO: 1226802 - DNA, 25 bp, Homo sapien
tctgggcaaagtgtggtgacttgtg

SEQ ID NO: 1226803 - DNA, 25 bp, Homo sapien
gagaagggcggccaatgtgattctg

SEQ ID NO: 1226804 - DNA, 25 bp, Homo sapien
agggcggccaatgtgattctgggca

SEQ ID NO: 1226805 - DNA, 25 bp, Homo sapien
tgacttgtggattttcactggtaag

SEQ ID NO: 1226806 - DNA, 25 bp, Homo sapien
aagtaggtatctccacaaacttggc

SEQ ID NO: 1226807 - DNA, 25 bp, Homo sapien
cccaagtaggtatctccacaaactt

SEQ ID NO: 1226808 - DNA, 25 bp, Homo sapien
cacaaacttggcaggtcccactctg

SEQ ID NO: 1226809 - DNA, 25 bp, Homo sapien
caaacttggcaggtcccactctgtg

SEQ ID NO: 1226810 - DNA, 25 bp, Homo sapien
agctgctactgtgtatacacaacca

SEQ ID NO: 1226811 - DNA, 25 bp, Homo sapien
cctgagactttccaagatctcctct

SEQ ID NO: 1226812 - DNA, 25 bp, Homo sapien
cagggagcaaatcaaccagcacatt

SEQ ID NO: 1226813 - DNA, 25 bp, Homo sapien
taaagcagcctttttaaccctgaga

SEQ ID NO: 1226814 - DNA, 25 bp, Homo sapien
tgccattggttttcagtaaaggttc

SEQ ID NO: 1226815 - DNA, 25 bp, Homo sapien
ttctgacctgtggtgagtctgctgg

SEQ ID NO: 1226816 - DNA, 25 bp, Homo sapien
ggtgaattgtgtgaagttgtcaaag

SEQ ID NO: 1226817 - DNA, 25 bp, Homo sapien
cctggtggggagatactttccacat

SEQ ID NO: 1226818 - DNA, 25 bp, Homo sapien
cactgttgtcagaatccagccagta

SEQ ID NO: 1226819 - DNA, 25 bp, Homo sapien
tttcccagggactgcgctaacatac

SEQ ID NO: 1226820 - DNA, 25 bp, Homo sapien
ggtttcccagggactgcgctaacat

SEQ ID NO: 1226821 - DNA, 25 bp, Homo sapien
tccagccagtaacagtgtgtggttt

SEQ ID NO: 1226822 - DNA, 25 bp, Homo sapien
ctaccaagagaaaagggaggcgcct

SEQ ID NO: 1226823 - DNA, 25 bp, Homo sapien
ctcgcagcccggctcggtgagtgca

SEQ ID NO: 1226824 - DNA, 25 bp, Homo sapien
acagggagtgcggaccgacgctacc

SEQ ID NO: 1226825 - DNA, 25 bp, Homo sapien
ttggcgctccggctagccgtgggcg

SEQ ID NO: 1226826 - DNA, 25 bp, Homo sapien
cacgtaaccacccgaggagaacctg

SEQ ID NO: 1226827 - DNA, 25 bp, Homo sapien
aaccacccgaggagaacctggcagc

SEQ ID NO: 1226828 - DNA, 25 bp, Homo sapien
taaccacccgaggagaacctggcag

SEQ ID NO: 1226829 - DNA, 25 bp, Homo sapien
gtaaccacccgaggagaacctggca

SEQ ID NO: 1226830 - DNA, 25 bp, Homo sapien
gcactgaatgtcaccctgaaggtaa

SEQ ID NO: 1226831 - DNA, 25 bp, Homo sapien
tggtgacggtcaaaagggagcagtt

SEQ ID NO: 1226832 - DNA, 25 bp, Homo sapien
catgcttgctttccgtttgcagcgg

SEQ ID NO: 1226833 - DNA, 25 bp, Homo sapien
agacaaaagatgaacgcatgcttgc

SEQ ID NO: 1226834 - DNA, 25 bp, Homo sapien
agaacgtagttggtagcttgtggca

SEQ ID NO: 1226835 - DNA, 25 bp, Homo sapien
ccacatagctgagaacgtagttggt

SEQ ID NO: 1226836 - DNA, 25 bp, Homo sapien
cgtagttggtagcttgtggcatcag

SEQ ID NO: 1226837 - DNA, 25 bp, Homo sapien
catcaggtgacatcttgattatttt

SEQ ID NO: 1226838 - DNA, 25 bp, Homo sapien
tcactcatattgttcccatagtttt

SEQ ID NO: 1226839 - DNA, 25 bp, Homo sapien
ttcttctttggttcactcatattgt

SEQ ID NO: 1226840 - DNA, 25 bp, Homo sapien
gttcccatagttttgaatgccatgg

SEQ ID NO: 1226841 - DNA, 25 bp, Homo sapien
agtttctgaagtttatgaagtcttg

SEQ ID NO: 1226842 - DNA, 25 bp, Homo sapien
tgaggtcttaagaaagactggattt

SEQ ID NO: 1226843 - DNA, 25 bp, Homo sapien
ttgaggtcttaagaaagactggatt

SEQ ID NO: 1226844 - DNA, 25 bp, Homo sapien
ccttcttgaggtcttaagaaagact

SEQ ID NO: 1226845 - DNA, 25 bp, Homo sapien
ttcttgaggtcttaagaaagactgg

SEQ ID NO: 1226846 - DNA, 25 bp, Homo sapien
ggttgctacagtctcagtaacagga

SEQ ID NO: 1226847 - DNA, 25 bp, Homo sapien
ttgcccacactgtctttgtaagtag

SEQ ID NO: 1226848 - DNA, 25 bp, Homo sapien
gaagcatcttggttgctacagtctc

SEQ ID NO: 1226849 - DNA, 25 bp, Homo sapien
tctttgtaagtaggaagcatcttgg

SEQ ID NO: 1226850 - DNA, 25 bp, Homo sapien
tttatcctcaatcctttaatagtag

SEQ ID NO: 1226851 - DNA, 25 bp, Homo sapien
aatgaggctgactgatttgtccagg

SEQ ID NO: 1226852 - DNA, 25 bp, Homo sapien
catcccaatgggctgatgtagggag

SEQ ID NO: 1226853 - DNA, 25 bp, Homo sapien
aatagtagagattcttgccaactcc

SEQ ID NO: 1226854 - DNA, 25 bp, Homo sapien
ctgggaatgaggacgcagtgcccag

SEQ ID NO: 1226855 - DNA, 25 bp, Homo sapien
catttggcaccatccctctgcggtg

SEQ ID NO: 1226856 - DNA, 25 bp, Homo sapien
gcggggacagatctctcttaatcaa

SEQ ID NO: 1226857 - DNA, 25 bp, Homo sapien
gcggtgcggggacagatctctctta

SEQ ID NO: 1226858 - DNA, 25 bp, Homo sapien
gtgctgatcgtcctattgaccctgg

SEQ ID NO: 1226859 - DNA, 25 bp, Homo sapien
tgctgatcgtcctattgaccctggt

SEQ ID NO: 1226860 - DNA, 25 bp, Homo sapien
ccgtgctgatcgtcctattgaccct

SEQ ID NO: 1226861 - DNA, 25 bp, Homo sapien
ctgatcgtcctattgaccctggttt

SEQ ID NO: 1226862 - DNA, 25 bp, Homo sapien
ccggtacctggcgtcagctgcaata

SEQ ID NO: 1226863 - DNA, 25 bp, Homo sapien
gcttgactcccatttcgcaggcctg

SEQ ID NO: 1226864 - DNA, 25 bp, Homo sapien
cactgaggcagagaacgtccaaaga

SEQ ID NO: 1226865 - DNA, 25 bp, Homo sapien
gagcaacgtccctgcatctgcggac

SEQ ID NO: 1226866 - DNA, 25 bp, Homo sapien
ggaccgacaggcggtaccgcagcct

SEQ ID NO: 1226867 - DNA, 25 bp, Homo sapien
aaagggcagtccgtcagctctcgag

SEQ ID NO: 1226868 - DNA, 25 bp, Homo sapien
ccccgtctttgagaactcttaagca

SEQ ID NO: 1226869 - DNA, 25 bp, Homo sapien
actcttaagcaagcgcgctcgggac

SEQ ID NO: 1226870 - DNA, 25 bp, Homo sapien
caaaggctttctttgcggagttgct

SEQ ID NO: 1226871 - DNA, 25 bp, Homo sapien
tctttgcggagttgctgcagtttca

SEQ ID NO: 1226872 - DNA, 25 bp, Homo sapien
ggagttgctgcagtttcaaagcctg

SEQ ID NO: 1226873 - DNA, 25 bp, Homo sapien
cacattcggccctctaggaggtttt

SEQ ID NO: 1226874 - DNA, 25 bp, Homo sapien
gacagccacagagacgctgttcgtg

SEQ ID NO: 1226875 - DNA, 25 bp, Homo sapien
gtagctctcccggaggcataaaaca

SEQ ID NO: 1226876 - DNA, 25 bp, Homo sapien
taaaacaatagacgtgaacctcgcg

SEQ ID NO: 1226877 - DNA, 25 bp, Homo sapien
tgttcgtgcgtctgtcatttctgcc

SEQ ID NO: 1226878 - DNA, 25 bp, Homo sapien
gggcgatggcgagatagcgcgagcg

SEQ ID NO: 1226879 - DNA, 25 bp, Homo sapien
cagaaagaaaccctcggtgtcctgt

SEQ ID NO: 1226880 - DNA, 25 bp, Homo sapien
catttgaaagaagcgtgaggcttgg

SEQ ID NO: 1226881 - DNA, 25 bp, Homo sapien
cagcccgaagcggaaagggacgaat

SEQ ID NO: 1226882 - DNA, 25 bp, Homo sapien
ttagcctcggagagcctccggcaaa

SEQ ID NO: 1226883 - DNA, 25 bp, Homo sapien
gacccggagccctagagtttgtggc

SEQ ID NO: 1226884 - DNA, 25 bp, Homo sapien
ggaagagcagaaccgcaaaaggcaa

SEQ ID NO: 1226885 - DNA, 25 bp, Homo sapien
gtgctccaagcagggatacggcgaa

SEQ ID NO: 1226886 - DNA, 25 bp, Homo sapien
gttgatggcacaaggaatgcaaata

SEQ ID NO: 1226887 - DNA, 25 bp, Homo sapien
tgacctttaggaggctgtgagagcc

SEQ ID NO: 1226888 - DNA, 25 bp, Homo sapien
tgatctatttttagcatttctacaa

SEQ ID NO: 1226889 - DNA, 25 bp, Homo sapien
gagccaaagcagttgtatgagtgac

SEQ ID NO: 1226890 - DNA, 25 bp, Homo sapien
ttttccccactgttattaagctgcc

SEQ ID NO: 1226891 - DNA, 25 bp, Homo sapien
tccccactgttattaagctgccttc

SEQ ID NO: 1226892 - DNA, 25 bp, Homo sapien
cactgttattaagctgccttccagc

SEQ ID NO: 1226893 - DNA, 25 bp, Homo sapien
cccactgttattaagctgccttcca

SEQ ID NO: 1226894 - DNA, 25 bp, Homo sapien
tgaggatgtttgtatcatcttctgt

SEQ ID NO: 1226895 - DNA, 25 bp, Homo sapien
tgttgaggatgtttgtatcatcttc

SEQ ID NO: 1226896 - DNA, 25 bp, Homo sapien
tccaaaattgtgttctgctgctgag

SEQ ID NO: 1226897 - DNA, 25 bp, Homo sapien
gctgctgagtgtgcagttttgttga

SEQ ID NO: 1226898 - DNA, 25 bp, Homo sapien
atttgtttttcactcggcagactaa

SEQ ID NO: 1226899 - DNA, 25 bp, Homo sapien
catttgtttttcactcggcagacta

SEQ ID NO: 1226900 - DNA, 25 bp, Homo sapien
ttgtttttcactcggcagactaaac

SEQ ID NO: 1226901 - DNA, 25 bp, Homo sapien
ttcatttgtttttcactcggcagac

SEQ ID NO: 1226902 - DNA, 25 bp, Homo sapien
gaaatgactcccaacttgcctctgt

SEQ ID NO: 1226903 - DNA, 25 bp, Homo sapien
tatcagtgacaaaacgcccaagtcc

SEQ ID NO: 1226904 - DNA, 25 bp, Homo sapien
tgtgctgagaatgggacagctgtcc

SEQ ID NO: 1226905 - DNA, 25 bp, Homo sapien
tgtccatcataatcaacagcacagg

SEQ ID NO: 1226906 - DNA, 25 bp, Homo sapien
agtcatcttttcccattaccttcat

SEQ ID NO: 1226907 - DNA, 25 bp, Homo sapien
aaagtctgctaagttgccttttaga

SEQ ID NO: 1226908 - DNA, 25 bp, Homo sapien
taagttgccttttagacagtcatct

SEQ ID NO: 1226909 - DNA, 25 bp, Homo sapien
atgggaggaaaagtctgctaagttg

SEQ ID NO: 1226910 - DNA, 25 bp, Homo sapien
tgcagcggacaaagctagtaagaac

SEQ ID NO: 1226911 - DNA, 25 bp, Homo sapien
tagagaaaccaggattccaactgtc

SEQ ID NO: 1226912 - DNA, 25 bp, Homo sapien
caccacctttgaaggctggagtgtg

SEQ ID NO: 1226913 - DNA, 25 bp, Homo sapien
gaacaaagatagctcctatcacaag

SEQ ID NO: 1226914 - DNA, 25 bp, Homo sapien
ctgtctggactaatcataaactttt

SEQ ID NO: 1226915 - DNA, 25 bp, Homo sapien
caagatggataggaatttaatggat

SEQ ID NO: 1226916 - DNA, 25 bp, Homo sapien
gatgacaagatggataggaatttaa

SEQ ID NO: 1226917 - DNA, 25 bp, Homo sapien
ggatttatggtattagacaatgaag

SEQ ID NO: 1226918 - DNA, 25 bp, Homo sapien
agaggatgacaagatggataggaat

SEQ ID NO: 1226919 - DNA, 25 bp, Homo sapien
gaaggttgccatactgtctgaagat

SEQ ID NO: 1226920 - DNA, 25 bp, Homo sapien
agaaggttgccatactgtctgaaga

SEQ ID NO: 1226921 - DNA, 25 bp, Homo sapien
cattgacatccccatacttaggcat

SEQ ID NO: 1226922 - DNA, 25 bp, Homo sapien
gtctgaagatttggcattgacatcc

SEQ ID NO: 1226923 - DNA, 25 bp, Homo sapien
gctgtaaccaagcttgtatattcat

SEQ ID NO: 1226924 - DNA, 25 bp, Homo sapien
gaaaaattctcctcgaagaagttca

SEQ ID NO: 1226925 - DNA, 25 bp, Homo sapien
cctcgaagaagttcaaattgtttat

SEQ ID NO: 1226926 - DNA, 25 bp, Homo sapien
taagctgtaaccaagcttgtatatt

SEQ ID NO: 1226927 - DNA, 25 bp, Homo sapien
tgttcaatttctagcacagaggctg

SEQ ID NO: 1226928 - DNA, 25 bp, Homo sapien
aaataagaaacaactggtcatcggg

SEQ ID NO: 1226929 - DNA, 25 bp, Homo sapien
ttagaaaatttattcgccatggtgg

SEQ ID NO: 1226930 - DNA, 25 bp, Homo sapien
cagagagtaaagctcagacaattaa

SEQ ID NO: 1226931 - DNA, 25 bp, Homo sapien
ctcctgtgacccaatgttgtttctt

SEQ ID NO: 1226932 - DNA, 25 bp, Homo sapien
tcctcctcctgtgacccaatgttgt

SEQ ID NO: 1226933 - DNA, 25 bp, Homo sapien
ctcctcctgtgacccaatgttgttt

SEQ ID NO: 1226934 - DNA, 25 bp, Homo sapien
cctcctgtgacccaatgttgtttct

SEQ ID NO: 1226935 - DNA, 25 bp, Homo sapien
ttaatacagctgcagttgtccaacc

SEQ ID NO: 1226936 - DNA, 25 bp, Homo sapien
tccaagaaataggtaagtctctttc

SEQ ID NO: 1226937 - DNA, 25 bp, Homo sapien
tctcatgtatattaatacagctgca

SEQ ID NO: 1226938 - DNA, 25 bp, Homo sapien
cattcgtttttgtagaataacacta

SEQ ID NO: 1226939 - DNA, 25 bp, Homo sapien
tatcttggtaaagttgaggttcact

SEQ ID NO: 1226940 - DNA, 25 bp, Homo sapien
gttccatttgttagcaaatccaatg

SEQ ID NO: 1226941 - DNA, 25 bp, Homo sapien
ttcaattgatgagggcatggtatct

SEQ ID NO: 1226942 - DNA, 25 bp, Homo sapien
tgaggttcacttctaggtctatcat

SEQ ID NO: 1226943 - DNA, 25 bp, Homo sapien
ccctgtgataaagaagtacctctac

SEQ ID NO: 1226944 - DNA, 25 bp, Homo sapien
ctgtgataaagaagtacctctactt

SEQ ID NO: 1226945 - DNA, 25 bp, Homo sapien
tccctgtgataaagaagtacctcta

SEQ ID NO: 1226946 - DNA, 25 bp, Homo sapien
gtgataaagaagtacctctacttac

SEQ ID NO: 1226947 - DNA, 25 bp, Homo sapien
ccactaggtagaggagtacattcac

SEQ ID NO: 1226948 - DNA, 25 bp, Homo sapien
ggaagttccctcagtttatctggta

SEQ ID NO: 1226949 - DNA, 25 bp, Homo sapien
tacattcacaagtatgttttgcaga

SEQ ID NO: 1226950 - DNA, 25 bp, Homo sapien
tcttccactaggtagaggagtacat

SEQ ID NO: 1226951 - DNA, 25 bp, Homo sapien
tgtggtcacatcatgggttgctgtc

SEQ ID NO: 1226952 - DNA, 25 bp, Homo sapien
tggtcacatcatgggttgctgtctg

SEQ ID NO: 1226953 - DNA, 25 bp, Homo sapien
gtggtcacatcatgggttgctgtct

SEQ ID NO: 1226954 - DNA, 25 bp, Homo sapien
gtcacatcatgggttgctgtctgca

SEQ ID NO: 1226955 - DNA, 25 bp, Homo sapien
tcactcagcccctgggtaacctgtg

SEQ ID NO: 1226956 - DNA, 25 bp, Homo sapien
tcagcccctgggtaacctgtggtct

SEQ ID NO: 1226957 - DNA, 25 bp, Homo sapien
cttcaggaccccttcacacggacag

SEQ ID NO: 1226958 - DNA, 25 bp, Homo sapien
ccctgggtaacctgtggtcttcagg

SEQ ID NO: 1226959 - DNA, 25 bp, Homo sapien
tcctgatagacagcaaaatctgtgg

SEQ ID NO: 1226960 - DNA, 25 bp, Homo sapien
ttttacctagatcctgatagacagc

SEQ ID NO: 1226961 - DNA, 25 bp, Homo sapien
tttttacctagatcctgatagacag

SEQ ID NO: 1226962 - DNA, 25 bp, Homo sapien
ctttttacctagatcctgatagaca

SEQ ID NO: 1226963 - DNA, 25 bp, Homo sapien
gctaaggctgactggctagaagtga

SEQ ID NO: 1226964 - DNA, 25 bp, Homo sapien
gactaactcgcaaagttggatcagc

SEQ ID NO: 1226965 - DNA, 25 bp, Homo sapien
gggtggctggactaactcgcaaagt

SEQ ID NO: 1226966 - DNA, 25 bp, Homo sapien
tggatcagctggtgagagtttcttg

SEQ ID NO: 1226967 - DNA, 25 bp, Homo sapien
cagtgttcaatgactcagcaacacc

SEQ ID NO: 1226968 - DNA, 25 bp, Homo sapien
caatgactcagcaacacctcctatt

SEQ ID NO: 1226969 - DNA, 25 bp, Homo sapien
tcaatgactcagcaacacctcctat

SEQ ID NO: 1226970 - DNA, 25 bp, Homo sapien
gtttgacagtgttcaatgactcagc

SEQ ID NO: 1226971 - DNA, 25 bp, Homo sapien
gcagcctgagtagcaaacactttgt

SEQ ID NO: 1226972 - DNA, 25 bp, Homo sapien
catccagttgtcttgagctctcaga

SEQ ID NO: 1226973 - DNA, 25 bp, Homo sapien
tggtgccccggtccagatcagatct

SEQ ID NO: 1226974 - DNA, 25 bp, Homo sapien
tcagacagcgtcgaagagagaccaa

SEQ ID NO: 1226975 - DNA, 25 bp, Homo sapien
tgttgaggagtagtccctgcaggta

SEQ ID NO: 1226976 - DNA, 25 bp, Homo sapien
tgcaggtatccttgaatgtggggct

SEQ ID NO: 1226977 - DNA, 25 bp, Homo sapien
gaggagtagtccctgcaggtatcct

SEQ ID NO: 1226978 - DNA, 25 bp, Homo sapien
gctttcttgttgaggagtagtccct

SEQ ID NO: 1226979 - DNA, 25 bp, Homo sapien
ccatcaacggcaattaaacatggag

SEQ ID NO: 1226980 - DNA, 25 bp, Homo sapien
gacacgcgggcattgtcatgcatga

SEQ ID NO: 1226981 - DNA, 25 bp, Homo sapien
cattgtcatgcatgactgaccagca

SEQ ID NO: 1226982 - DNA, 25 bp, Homo sapien
ggagagctcgggatctttttggaca

SEQ ID NO: 1226983 - DNA, 25 bp, Homo sapien
gacctttcgggttatctacagaaca

SEQ ID NO: 1226984 - DNA, 25 bp, Homo sapien
gcaggtggcaactatcgatgtgacc

SEQ ID NO: 1226985 - DNA, 25 bp, Homo sapien
cacatcaatgtctggaagcccagtg

SEQ ID NO: 1226986 - DNA, 25 bp, Homo sapien
tctgtccattgatctaagacactgg

SEQ ID NO: 1226987 - DNA, 25 bp, Homo sapien
tctgatagtgtttggaacgagagac

SEQ ID NO: 1226988 - DNA, 25 bp, Homo sapien
tacttaacaggacaatgatgtgccc

SEQ ID NO: 1226989 - DNA, 25 bp, Homo sapien
tctattatcaaatgtcaggctgctg

SEQ ID NO: 1226990 - DNA, 25 bp, Homo sapien
gcagagaattgcctttacttaacag

SEQ ID NO: 1226991 - DNA, 25 bp, Homo sapien
gaggcacatggttgcccctctgact

SEQ ID NO: 1226992 - DNA, 25 bp, Homo sapien
caggactggcgtggagagtggatga

SEQ ID NO: 1226993 - DNA, 25 bp, Homo sapien
acccttttgacagcgaaatttggtg

SEQ ID NO: 1226994 - DNA, 25 bp, Homo sapien
accgtgctcttcaattgtgggtgag

SEQ ID NO: 1226995 - DNA, 25 bp, Homo sapien
tgaaggccaccgtgctcttcaattg

SEQ ID NO: 1226996 - DNA, 25 bp, Homo sapien
ctttaggaaatgtatatccttgttc

SEQ ID NO: 1226997 - DNA, 25 bp, Homo sapien
aagctttgttcaaccatcctgttct

SEQ ID NO: 1226998 - DNA, 25 bp, Homo sapien
tccatcatcaaagctttgttcaacc

SEQ ID NO: 1226999 - DNA, 25 bp, Homo sapien
aatgtatatccttgttcagggtttc

SEQ ID NO: 1227000 - DNA, 25 bp, Homo sapien
ggaatttcaaagtagcagctgaaga

SEQ ID NO: 1227001 - DNA, 25 bp, Homo sapien
ttcaaagtagcagctgaagacaacg

SEQ ID NO: 1227002 - DNA, 25 bp, Homo sapien
aagtagcagctgaagacaacgataa

SEQ ID NO: 1227003 - DNA, 25 bp, Homo sapien
aagacaacgataattgttgctacca

SEQ ID NO: 1227004 - DNA, 25 bp, Homo sapien
gcatctacctctagtccagtcagct

SEQ ID NO: 1227005 - DNA, 25 bp, Homo sapien
tggtaggaggtgtcgtgcatctacc

SEQ ID NO: 1227006 - DNA, 25 bp, Homo sapien
tgtcgtgcatctacctctagtccag

SEQ ID NO: 1227007 - DNA, 25 bp, Homo sapien
ggaggtgtcgtgcatctacctctag

SEQ ID NO: 1227008 - DNA, 25 bp, Homo sapien
gctaactcggttgcaaagaacagaa

SEQ ID NO: 1227009 - DNA, 25 bp, Homo sapien
tccttgaagggaggatgtaccctta

SEQ ID NO: 1227010 - DNA, 25 bp, Homo sapien
gccattggtatctgacttggattgt

SEQ ID NO: 1227011 - DNA, 25 bp, Homo sapien
cagagcagatatctttgatgtgccc

SEQ ID NO: 1227012 - DNA, 25 bp, Homo sapien
ttgtagtgcacaggcatactaacca

SEQ ID NO: 1227013 - DNA, 25 bp, Homo sapien
tatgattgtagtgcacaggcatact

SEQ ID NO: 1227014 - DNA, 25 bp, Homo sapien
tgacaaaactatgattgtagtgcac

SEQ ID NO: 1227015 - DNA, 25 bp, Homo sapien
gcacaggcatactaaccaagcccat

SEQ ID NO: 1227016 - DNA, 25 bp, Homo sapien
ccagctccagtggagaatagagttg

SEQ ID NO: 1227017 - DNA, 25 bp, Homo sapien
gtggagaatagagttgtcccaggac

SEQ ID NO: 1227018 - DNA, 25 bp, Homo sapien
atgaaggaagacaccgaacccagtg

SEQ ID NO: 1227019 - DNA, 25 bp, Homo sapien
catatgctactgatcgctgagaacc

SEQ ID NO: 1227020 - DNA, 25 bp, Homo sapien
gggagataccatgaggcattttcac

SEQ ID NO: 1227021 - DNA, 25 bp, Homo sapien
aacagtctttctctttacttcttca

SEQ ID NO: 1227022 - DNA, 25 bp, Homo sapien
tcttcagattcagggagataccatg

SEQ ID NO: 1227023 - DNA, 25 bp, Homo sapien
cagtctttctctttacttcttcaga

SEQ ID NO: 1227024 - DNA, 25 bp, Homo sapien
taacaaggtacacacgctctctctg

SEQ ID NO: 1227025 - DNA, 25 bp, Homo sapien
tctgtgaagcttgattagactaact

SEQ ID NO: 1227026 - DNA, 25 bp, Homo sapien
taatagtgcagttaagttcagcgaa

SEQ ID NO: 1227027 - DNA, 25 bp, Homo sapien
catagccgattgtgagctgctctac

SEQ ID NO: 1227028 - DNA, 25 bp, Homo sapien
gaagacatggtccacatttcagagc

SEQ ID NO: 1227029 - DNA, 25 bp, Homo sapien
ggtgccgtaataatcctgagtcagg

SEQ ID NO: 1227030 - DNA, 25 bp, Homo sapien
tgtgtccctgtaaatttgagccctg

SEQ ID NO: 1227031 - DNA, 25 bp, Homo sapien
tggactgggccgaatatgttctcac

SEQ ID NO: 1227032 - DNA, 25 bp, Homo sapien
acctggattctgtctttcactcctt

SEQ ID NO: 1227033 - DNA, 25 bp, Homo sapien
aaaacctggattctgtctttcactc

SEQ ID NO: 1227034 - DNA, 25 bp, Homo sapien
aacctggattctgtctttcactcct

SEQ ID NO: 1227035 - DNA, 25 bp, Homo sapien
aaacctggattctgtctttcactcc

SEQ ID NO: 1227036 - DNA, 25 bp, Homo sapien
ctgccaatagtttatatccaaccac

SEQ ID NO: 1227037 - DNA, 25 bp, Homo sapien
tcatagctgccaatagtttatatcc

SEQ ID NO: 1227038 - DNA, 25 bp, Homo sapien
catagctgccaatagtttatatcca

SEQ ID NO: 1227039 - DNA, 25 bp, Homo sapien
tagctgccaatagtttatatccaac

SEQ ID NO: 1227040 - DNA, 25 bp, Homo sapien
tccctactgtgagcaatattgaagt

SEQ ID NO: 1227041 - DNA, 25 bp, Homo sapien
tgagcaatattgaagttagctggcc

SEQ ID NO: 1227042 - DNA, 25 bp, Homo sapien
ttgaagttagctggcctcatgtgcc

SEQ ID NO: 1227043 - DNA, 25 bp, Homo sapien
tgctggttccctactgtgagcaata

SEQ ID NO: 1227044 - DNA, 25 bp, Homo sapien
gcattcaaatcttggacagctgtct

SEQ ID NO: 1227045 - DNA, 25 bp, Homo sapien
caaatcttggacagctgtcttcgag

SEQ ID NO: 1227046 - DNA, 25 bp, Homo sapien
tcaaatcttggacagctgtcttcga

SEQ ID NO: 1227047 - DNA, 25 bp, Homo sapien
ttctggcattcaaatcttggacagc

SEQ ID NO: 1227048 - DNA, 25 bp, Homo sapien
ctcctcaggggagttttcaggacct

SEQ ID NO: 1227049 - DNA, 25 bp, Homo sapien
ctcaactcctcaggggagttttcag

SEQ ID NO: 1227050 - DNA, 25 bp, Homo sapien
caactcctcaggggagttttcagga

SEQ ID NO: 1227051 - DNA, 25 bp, Homo sapien
aaataaatgcgtgatccttaatcag

SEQ ID NO: 1227052 - DNA, 25 bp, Homo sapien
caaataaatgcgtgatccttaatca

SEQ ID NO: 1227053 - DNA, 25 bp, Homo sapien
tgatgctgcagaattcatatcaagg

SEQ ID NO: 1227054 - DNA, 25 bp, Homo sapien
tgctgcagaattcatatcaagggct

SEQ ID NO: 1227055 - DNA, 25 bp, Homo sapien
atatcaagggctttgtgtattgctc

SEQ ID NO: 1227056 - DNA, 25 bp, Homo sapien
cagaattcatatcaagggctttgtg

SEQ ID NO: 1227057 - DNA, 25 bp, Homo sapien
aggcagttcaaagccatggcctcca

SEQ ID NO: 1227058 - DNA, 25 bp, Homo sapien
cagcaggctcatgctctttgtcaga

SEQ ID NO: 1227059 - DNA, 25 bp, Homo sapien
agtttaatggcttcgccctgaggca

SEQ ID NO: 1227060 - DNA, 25 bp, Homo sapien
gcaggtaggtataggtctttaggaa

SEQ ID NO: 1227061 - DNA, 25 bp, Homo sapien
atggtataaattagctataaattct

SEQ ID NO: 1227062 - DNA, 25 bp, Homo sapien
tcaggcaatttatcacatgggtgta

SEQ ID NO: 1227063 - DNA, 25 bp, Homo sapien
ggtataaattagctataaattctgt

SEQ ID NO: 1227064 - DNA, 25 bp, Homo sapien
aggcaatttatcacatgggtgtatg

SEQ ID NO: 1227065 - DNA, 25 bp, Homo sapien
tctgggtcttgacaaactggccggg

SEQ ID NO: 1227066 - DNA, 25 bp, Homo sapien
gattgaccagtcctcacaaaatgga

SEQ ID NO: 1227067 - DNA, 25 bp, Homo sapien
aataattgccgtaagagaaaccaga

SEQ ID NO: 1227068 - DNA, 25 bp, Homo sapien
ggcagcttgccaacataagtgtttg

SEQ ID NO: 1227069 - DNA, 25 bp, Homo sapien
gacaaggtgccagttcaaatgtggc

SEQ ID NO: 1227070 - DNA, 25 bp, Homo sapien
ctctgtgccctgttggacaaggtgc

SEQ ID NO: 1227071 - DNA, 25 bp, Homo sapien
tcaaatgtggcacctcttctagaca

SEQ ID NO: 1227072 - DNA, 25 bp, Homo sapien
cctgttggacaaggtgccagttcaa

SEQ ID NO: 1227073 - DNA, 25 bp, Homo sapien
catttgcctcggatcttcaagtccc

SEQ ID NO: 1227074 - DNA, 25 bp, Homo sapien
agcccacagattccagccatttgcc

SEQ ID NO: 1227075 - DNA, 25 bp, Homo sapien
ccctcaagagggtacaggaactcct

SEQ ID NO: 1227076 - DNA, 25 bp, Homo sapien
tggtcccctcaagagggtacaggaa

SEQ ID NO: 1227077 - DNA, 25 bp, Homo sapien
acttctgtgagtctggttccatttg

SEQ ID NO: 1227078 - DNA, 25 bp, Homo sapien
ctctagctggtctggactgaacact

SEQ ID NO: 1227079 - DNA, 25 bp, Homo sapien
cattcacttctgtgagtctggttcc

SEQ ID NO: 1227080 - DNA, 25 bp, Homo sapien
gaacactggcaccacattcacttct

SEQ ID NO: 1227081 - DNA, 25 bp, Homo sapien
tctttgtcactgttgattttgtaac

SEQ ID NO: 1227082 - DNA, 25 bp, Homo sapien
caaaggttatgtctttgtcactgtt

SEQ ID NO: 1227083 - DNA, 25 bp, Homo sapien
cacaaaggttatgtctttgtcactg

SEQ ID NO: 1227084 - DNA, 25 bp, Homo sapien
tgtctttgtcactgttgattttgta

SEQ ID NO: 1227085 - DNA, 25 bp, Homo sapien
caagtacacaggatacatctggctc

SEQ ID NO: 1227086 - DNA, 25 bp, Homo sapien
caactggagttacggttgtcacaca

SEQ ID NO: 1227087 - DNA, 25 bp, Homo sapien
tgaaatgtttggatacaactggagt

SEQ ID NO: 1227088 - DNA, 25 bp, Homo sapien
tgtactctcattgagtctccagaaa

SEQ ID NO: 1227089 - DNA, 25 bp, Homo sapien
tctgtaagcatttggcgaataaatg

SEQ ID NO: 1227090 - DNA, 25 bp, Homo sapien
ctcagcactgagcaggtaggtttct

SEQ ID NO: 1227091 - DNA, 25 bp, Homo sapien
caactttgagggtaatgaatgtcta

SEQ ID NO: 1227092 - DNA, 25 bp, Homo sapien
taagttcaaatcagtactcagcact

SEQ ID NO: 1227093 - DNA, 25 bp, Homo sapien
gctagctcaagagctggacaagaag

SEQ ID NO: 1227094 - DNA, 25 bp, Homo sapien
aaggatgagttgtttgcgctgaagc

SEQ ID NO: 1227095 - DNA, 25 bp, Homo sapien
tattcatcattatcagctggagcta

SEQ ID NO: 1227096 - DNA, 25 bp, Homo sapien
caagaaggtccgaagaaggatgagt

SEQ ID NO: 1227097 - DNA, 25 bp, Homo sapien
ccctgtgcacaacaataaactcaaa

SEQ ID NO: 1227098 - DNA, 25 bp, Homo sapien
taaatcttcaatgtgtaataatgac

SEQ ID NO: 1227099 - DNA, 25 bp, Homo sapien
gactggcagctataacaaggcttct

SEQ ID NO: 1227100 - DNA, 25 bp, Homo sapien
aatgacaagagcgaaagactggcag

SEQ ID NO: 1227101 - DNA, 25 bp, Homo sapien
tgctgcattacttttcacgttggtt

SEQ ID NO: 1227102 - DNA, 25 bp, Homo sapien
tttgctgcattacttttcacgttgg

SEQ ID NO: 1227103 - DNA, 25 bp, Homo sapien
gctgcattacttttcacgttggttt

SEQ ID NO: 1227104 - DNA, 25 bp, Homo sapien
cttttgctgcattacttttcacgtt

SEQ ID NO: 1227105 - DNA, 25 bp, Homo sapien
ttgaaaagtgataatgggggcctga

SEQ ID NO: 1227106 - DNA, 25 bp, Homo sapien
agccgtgtggtcagttgagtgtgag

SEQ ID NO: 1227107 - DNA, 25 bp, Homo sapien
tgagtgtgaggaacttgaaaagtga

SEQ ID NO: 1227108 - DNA, 25 bp, Homo sapien
gccgtgtggtcagttgagtgtgagg

SEQ ID NO: 1227109 - DNA, 25 bp, Homo sapien
ttgattcccataagttgcctcaggc

SEQ ID NO: 1227110 - DNA, 25 bp, Homo sapien
cttgattcccataagttgcctcagg

SEQ ID NO: 1227111 - DNA, 25 bp, Homo sapien
gaatgtaaaatttgttgatcagcct

SEQ ID NO: 1227112 - DNA, 25 bp, Homo sapien
aatttgttgatcagcctattcatga

SEQ ID NO: 1227113 - DNA, 25 bp, Homo sapien
tgatcagcctattcatgacaacaca

SEQ ID NO: 1227114 - DNA, 25 bp, Homo sapien
agcctattcatgacaacacaggagc

SEQ ID NO: 1227115 - DNA, 25 bp, Homo sapien
gaatcgatgggaggttgactgacta

SEQ ID NO: 1227116 - DNA, 25 bp, Homo sapien
gaggactctacggaaaatataggaa

SEQ ID NO: 1227117 - DNA, 25 bp, Homo sapien
ttacgatatgatagcagagagaact

SEQ ID NO: 1227118 - DNA, 25 bp, Homo sapien
tctaaaaaggtgaatctccaaggaa

SEQ ID NO: 1227119 - DNA, 25 bp, Homo sapien
taaaggctcgcttgtcatacaactc

SEQ ID NO: 1227120 - DNA, 25 bp, Homo sapien
aaggctcgcttgtcatacaactcac

SEQ ID NO: 1227121 - DNA, 25 bp, Homo sapien
tctctttaaaggctcgcttgtcata

SEQ ID NO: 1227122 - DNA, 25 bp, Homo sapien
tttaaaggctcgcttgtcatacaac

SEQ ID NO: 1227123 - DNA, 25 bp, Homo sapien
caaccgatcggagctccagcagccg

SEQ ID NO: 1227124 - DNA, 25 bp, Homo sapien
ccaggctcccgggtgtcgttaatgt

SEQ ID NO: 1227125 - DNA, 25 bp, Homo sapien
ctctttggaagtcgccggtgctgtt

SEQ ID NO: 1227126 - DNA, 25 bp, Homo sapien
ggagtctgttcacgggcctgagctt

SEQ ID NO: 1227127 - DNA, 25 bp, Homo sapien
caactggtgttactaccggtctcca

SEQ ID NO: 1227128 - DNA, 25 bp, Homo sapien
ggctaaaccatagctcactcccggg

SEQ ID NO: 1227129 - DNA, 25 bp, Homo sapien
cttggccttgggtttacaactggtg

SEQ ID NO: 1227130 - DNA, 25 bp, Homo sapien
catgctgctttgactttaagagcac

SEQ ID NO: 1227131 - DNA, 25 bp, Homo sapien
tgttcctaaagtagtactgatttcc

SEQ ID NO: 1227132 - DNA, 25 bp, Homo sapien
cttgcagccgggctaacgtggccat

SEQ ID NO: 1227133 - DNA, 25 bp, Homo sapien
tgatttcctacagtcgacgacctag

SEQ ID NO: 1227134 - DNA, 25 bp, Homo sapien
acgacctagcttgcagccgggctaa

SEQ ID NO: 1227135 - DNA, 25 bp, Homo sapien
cgaacttgacatcctcgaaaccagc

SEQ ID NO: 1227136 - DNA, 25 bp, Homo sapien
acttgacatcctcgaaaccagcttt

SEQ ID NO: 1227137 - DNA, 25 bp, Homo sapien
taactgctgcatcattctccttttt

SEQ ID NO: 1227138 - DNA, 25 bp, Homo sapien
tgatatatgcccgaacttgacatcc

SEQ ID NO: 1227139 - DNA, 25 bp, Homo sapien
tagttgatattgctttctgcctaag

SEQ ID NO: 1227140 - DNA, 25 bp, Homo sapien
tgcacagttagttgatattgctttc

SEQ ID NO: 1227141 - DNA, 25 bp, Homo sapien
ttgctttctgcctaagaaacttctc

SEQ ID NO: 1227142 - DNA, 25 bp, Homo sapien
gatattgctttctgcctaagaaact

SEQ ID NO: 1227143 - DNA, 25 bp, Homo sapien
attacaagcgcgagccactatgcct

SEQ ID NO: 1227144 - DNA, 25 bp, Homo sapien
atgcctggccaatttttgtattttt

SEQ ID NO: 1227145 - DNA, 25 bp, Homo sapien
aatagagacagggtttcactaagtt

SEQ ID NO: 1227146 - DNA, 25 bp, Homo sapien
gagacagggtttcactaagttggcc

SEQ ID NO: 1227147 - DNA, 25 bp, Homo sapien
aagatcatagactttcaatagtttc

SEQ ID NO: 1227148 - DNA, 25 bp, Homo sapien
ggctgattgatgtaactaacacact

SEQ ID NO: 1227149 - DNA, 25 bp, Homo sapien
taacacacttgagtatttcagatca

SEQ ID NO: 1227150 - DNA, 25 bp, Homo sapien
caatagtttccaattgcttaaagca

SEQ ID NO: 1227151 - DNA, 25 bp, Homo sapien
ctgacagccattgcattgtagagat

SEQ ID NO: 1227152 - DNA, 25 bp, Homo sapien
cattgcattgtagagattcatcatc

SEQ ID NO: 1227153 - DNA, 25 bp, Homo sapien
cagccattgcattgtagagattcat

SEQ ID NO: 1227154 - DNA, 25 bp, Homo sapien
tcatcatcatagtataatatgctac

SEQ ID NO: 1227155 - DNA, 25 bp, Homo sapien
tttctaactctatcttctgtgcttc

SEQ ID NO: 1227156 - DNA, 25 bp, Homo sapien
ctaactctatcttctgtgcttctcc

SEQ ID NO: 1227157 - DNA, 25 bp, Homo sapien
tctaactctatcttctgtgcttctc

SEQ ID NO: 1227158 - DNA, 25 bp, Homo sapien
ctttctaactctatcttctgtgctt

SEQ ID NO: 1227159 - DNA, 25 bp, Homo sapien
cattcatgtgatattgctccagttg

SEQ ID NO: 1227160 - DNA, 25 bp, Homo sapien
attcatgtgatattgctccagttgt

SEQ ID NO: 1227161 - DNA, 25 bp, Homo sapien
ttcatgtgatattgctccagttgtt

SEQ ID NO: 1227162 - DNA, 25 bp, Homo sapien
tacttccgaaccctatagcctcgcc

SEQ ID NO: 1227163 - DNA, 25 bp, Homo sapien
tatagcctcgccatcgtctctgaat

SEQ ID NO: 1227164 - DNA, 25 bp, Homo sapien
tcattggtctctgaaacgactttca

SEQ ID NO: 1227165 - DNA, 25 bp, Homo sapien
gaaacgactttcaggtactctttca

SEQ ID NO: 1227166 - DNA, 25 bp, Homo sapien
catattaatgataaatccattagtc

SEQ ID NO: 1227167 - DNA, 25 bp, Homo sapien
ttatgcttcaggagtaaaaaagata

SEQ ID NO: 1227168 - DNA, 25 bp, Homo sapien
tgagataacgttccctatctttggg

SEQ ID NO: 1227169 - DNA, 25 bp, Homo sapien
ttgtaaaggtgttgccacttctgag

SEQ ID NO: 1227170 - DNA, 25 bp, Homo sapien
ctattagcattttggcaagcatgtc

SEQ ID NO: 1227171 - DNA, 25 bp, Homo sapien
gcattttggcaagcatgtcaatgaa

SEQ ID NO: 1227172 - DNA, 25 bp, Homo sapien
tggcaagcatgtcaatgaatctaag

SEQ ID NO: 1227173 - DNA, 25 bp, Homo sapien
caagcatgtcaatgaatctaagaac

SEQ ID NO: 1227174 - DNA, 25 bp, Homo sapien
gttgatgccaatatgacagagctgc

SEQ ID NO: 1227175 - DNA, 25 bp, Homo sapien
caagctaagtgtatgaatgtatgga

SEQ ID NO: 1227176 - DNA, 25 bp, Homo sapien
ctagggatcttgaaagcactggaga

SEQ ID NO: 1227177 - DNA, 25 bp, Homo sapien
cagaataatcaaggaaactaagcac

SEQ ID NO: 1227178 - DNA, 25 bp, Homo sapien
tacaatgcacaaactcttgccacag

SEQ ID NO: 1227179 - DNA, 25 bp, Homo sapien
tgccacagaattattggagtgaact

SEQ ID NO: 1227180 - DNA, 25 bp, Homo sapien
ctagaggatgcccttattaaatgta

SEQ ID NO: 1227181 - DNA, 25 bp, Homo sapien
ggatggacagcataacaaggcttac

SEQ ID NO: 1227182 - DNA, 25 bp, Homo sapien
caacaagcatatctgctgaactatg

SEQ ID NO: 1227183 - DNA, 25 bp, Homo sapien
aaaaaagacaacaagcatatctgct

SEQ ID NO: 1227184 - DNA, 25 bp, Homo sapien
aaagacaacaagcatatctgctgaa

SEQ ID NO: 1227185 - DNA, 25 bp, Homo sapien
gacaacaagcatatctgctgaacta

SEQ ID NO: 1227186 - DNA, 25 bp, Homo sapien
gaatatgagttcctaagaggcatgg

SEQ ID NO: 1227187 - DNA, 25 bp, Homo sapien
tctctctggatgagagtgcactttg

SEQ ID NO: 1227188 - DNA, 25 bp, Homo sapien
actcaactggatatgctttctctaa

SEQ ID NO: 1227189 - DNA, 25 bp, Homo sapien
tgtcctccacctactactctgaggg

SEQ ID NO: 1227190 - DNA, 25 bp, Homo sapien
cttcctgacacaagaaatattatgc

SEQ ID NO: 1227191 - DNA, 25 bp, Homo sapien
tggaattagaatctctgtgtttgca

SEQ ID NO: 1227192 - DNA, 25 bp, Homo sapien
caaataagttaatggcagaaatgga

SEQ ID NO: 1227193 - DNA, 25 bp, Homo sapien
taatagccacaatatagtggagtga

SEQ ID NO: 1227194 - DNA, 25 bp, Homo sapien
ttccaagacatttagataggttgtt

SEQ ID NO: 1227195 - DNA, 25 bp, Homo sapien
tccaagacatttagataggttgttt

SEQ ID NO: 1227196 - DNA, 25 bp, Homo sapien
cttccaagacatttagataggttgt

SEQ ID NO: 1227197 - DNA, 25 bp, Homo sapien
ggtaatgcatctttcgggcttggta

SEQ ID NO: 1227198 - DNA, 25 bp, Homo sapien
gtgctgaggaggtaatgcatctttc

SEQ ID NO: 1227199 - DNA, 25 bp, Homo sapien
tcgggcttggtaatctcttttcttc

SEQ ID NO: 1227200 - DNA, 25 bp, Homo sapien
tttcgaggttagccttcttctcttc

SEQ ID NO: 1227201 - DNA, 25 bp, Homo sapien
agctgtcagggacaggtaaaccaac

SEQ ID NO: 1227202 - DNA, 25 bp, Homo sapien
aggagctgtcagggacaggtaaacc

SEQ ID NO: 1227203 - DNA, 25 bp, Homo sapien
ggagctgtcagggacaggtaaacca

SEQ ID NO: 1227204 - DNA, 25 bp, Homo sapien
gagctgtcagggacaggtaaaccaa

SEQ ID NO: 1227205 - DNA, 25 bp, Homo sapien
gccagaactacaacactgaacttga

SEQ ID NO: 1227206 - DNA, 25 bp, Homo sapien
gtgactctggccagaactacaacac

SEQ ID NO: 1227207 - DNA, 25 bp, Homo sapien
ctggagacattcaactatgtgactc

SEQ ID NO: 1227208 - DNA, 25 bp, Homo sapien
gagacattcaactatgtgactctgg

SEQ ID NO: 1227209 - DNA, 25 bp, Homo sapien
aaagtcagactgtatcagtatgctc

SEQ ID NO: 1227210 - DNA, 25 bp, Homo sapien
aagtcagactgtatcagtatgctca

SEQ ID NO: 1227211 - DNA, 25 bp, Homo sapien
taaagtcagactgtatcagtatgct

SEQ ID NO: 1227212 - DNA, 25 bp, Homo sapien
gtcagactgtatcagtatgctcata

SEQ ID NO: 1227213 - DNA, 25 bp, Homo sapien
caccagaagtcacctacctcatata

SEQ ID NO: 1227214 - DNA, 25 bp, Homo sapien
cgtattagtgaaaagcttgtaacat

SEQ ID NO: 1227215 - DNA, 25 bp, Homo sapien
aagtaacagtcaaattcaacgtatt

SEQ ID NO: 1227216 - DNA, 25 bp, Homo sapien
attcaacgtattagtgaaaagcttg

SEQ ID NO: 1227217 - DNA, 25 bp, Homo sapien
aattgcagctcccatggatcaggct

SEQ ID NO: 1227218 - DNA, 25 bp, Homo sapien
tcagaccgaggaaaagaacgggcgc

SEQ ID NO: 1227219 - DNA, 25 bp, Homo sapien
tgcttaactttaggtcttcggtgtg

SEQ ID NO: 1227220 - DNA, 25 bp, Homo sapien
gtacaagctagccaatcagtaaggc

SEQ ID NO: 1227221 - DNA, 25 bp, Homo sapien
tctctggccaactttaactcatcga

SEQ ID NO: 1227222 - DNA, 25 bp, Homo sapien
aactcatcgattggttctgccaccc

SEQ ID NO: 1227223 - DNA, 25 bp, Homo sapien
tacttcggtgatatctcggaagggc

SEQ ID NO: 1227224 - DNA, 25 bp, Homo sapien
gcaacgttggctccaaaggcctgta

SEQ ID NO: 1227225 - DNA, 25 bp, Homo sapien
tcagagcaaagggtcatcagcaaca

SEQ ID NO: 1227226 - DNA, 25 bp, Homo sapien
tccctgctcgtgaattaactctact

SEQ ID NO: 1227227 - DNA, 25 bp, Homo sapien
caaatcagatttgctctataaagta

SEQ ID NO: 1227228 - DNA, 25 bp, Homo sapien
tactttcatttagccatcatgtttc

SEQ ID NO: 1227229 - DNA, 25 bp, Homo sapien
ccgagacgacaaggctggaagactg

SEQ ID NO: 1227230 - DNA, 25 bp, Homo sapien
taaatgcattgatgggatgtacttt

SEQ ID NO: 1227231 - DNA, 25 bp, Homo sapien
tttatggtatgaagaaaatggcaaa

SEQ ID NO: 1227232 - DNA, 25 bp, Homo sapien
cttgcttgataaatgcattgatggg

SEQ ID NO: 1227233 - DNA, 25 bp, Homo sapien
gcttgataaatgcattgatgggatg

SEQ ID NO: 1227234 - DNA, 25 bp, Homo sapien
ttcacttcggaattgttctttgtaa

SEQ ID NO: 1227235 - DNA, 25 bp, Homo sapien
tttcacttcggaattgttctttgta

SEQ ID NO: 1227236 - DNA, 25 bp, Homo sapien
attttcacttcggaattgttctttg

SEQ ID NO: 1227237 - DNA, 25 bp, Homo sapien
tcacttcggaattgttctttgtaag

SEQ ID NO: 1227238 - DNA, 25 bp, Homo sapien
aaggaggcggtatgcaaatgaatga

SEQ ID NO: 1227239 - DNA, 25 bp, Homo sapien
taatagaatcattagatctggtagt

SEQ ID NO: 1227240 - DNA, 25 bp, Homo sapien
gaatgaatcctcactgatagactat

SEQ ID NO: 1227241 - DNA, 25 bp, Homo sapien
tgccttaaatcccttcaggaaggag

SEQ ID NO: 1227242 - DNA, 25 bp, Homo sapien
tgatgtgttctacatcccactccat

SEQ ID NO: 1227243 - DNA, 25 bp, Homo sapien
aaatctatgatgtgttctacatccc

SEQ ID NO: 1227244 - DNA, 25 bp, Homo sapien
acgatgtgccacattaaatctatga

SEQ ID NO: 1227245 - DNA, 25 bp, Homo sapien
ctgcagacaacgatgtgccacatta

SEQ ID NO: 1227246 - DNA, 25 bp, Homo sapien
tgaatgttcattattatcaggatgc

SEQ ID NO: 1227247 - DNA, 25 bp, Homo sapien
tcacggtcgttaagctgaatgttca

SEQ ID NO: 1227248 - DNA, 25 bp, Homo sapien
cagcagattcaatcaccgggtgcaa

SEQ ID NO: 1227249 - DNA, 25 bp, Homo sapien
tgcaatgggcaagcagtcacagtcc

SEQ ID NO: 1227250 - DNA, 25 bp, Homo sapien
ttcatactgccttgaatattcaggt

SEQ ID NO: 1227251 - DNA, 25 bp, Homo sapien
taagttcccaggtacgtgtgccaaa

SEQ ID NO: 1227252 - DNA, 25 bp, Homo sapien
gagactatcagttccccacagtgtc

SEQ ID NO: 1227253 - DNA, 25 bp, Homo sapien
tccagtttccttgcatcatttgtca

SEQ ID NO: 1227254 - DNA, 25 bp, Homo sapien
ggaaacaagtatatggtaaatgcta

SEQ ID NO: 1227255 - DNA, 25 bp, Homo sapien
gctagtcatatatagcttgagcaag

SEQ ID NO: 1227256 - DNA, 25 bp, Homo sapien
tgtcatcctgatctatagctttagg

SEQ ID NO: 1227257 - DNA, 25 bp, Homo sapien
taaaatggtttataggattcagtca

SEQ ID NO: 1227258 - DNA, 25 bp, Homo sapien
gatgaatgtagaatgctgtgcccaa

SEQ ID NO: 1227259 - DNA, 25 bp, Homo sapien
gaattgaccagatcctgggacataa

SEQ ID NO: 1227260 - DNA, 25 bp, Homo sapien
taacatggaggacataaattagtac

SEQ ID NO: 1227261 - DNA, 25 bp, Homo sapien
tagcaaaccgctggaaatggatgaa

SEQ ID NO: 1227262 - DNA, 25 bp, Homo sapien
atgatggtaatacagtctggaaatc

SEQ ID NO: 1227263 - DNA, 25 bp, Homo sapien
ctttgagaagagctcaaatgatggt

SEQ ID NO: 1227264 - DNA, 25 bp, Homo sapien
aatgatggtaatacagtctggaaat

SEQ ID NO: 1227265 - DNA, 25 bp, Homo sapien
ccatactttgagaagagctcaaatg

SEQ ID NO: 1227266 - DNA, 25 bp, Homo sapien
gctttggagcaccaacagtattttt

SEQ ID NO: 1227267 - DNA, 25 bp, Homo sapien
taaagggtatctaagggccgcgcat

SEQ ID NO: 1227268 - DNA, 25 bp, Homo sapien
cacagcactgagaagtattttggct

SEQ ID NO: 1227269 - DNA, 25 bp, Homo sapien
gacacacttcaattgtaaccactgc

SEQ ID NO: 1227270 - DNA, 25 bp, Homo sapien
caaaattaaacactagacattcatt

SEQ ID NO: 1227271 - DNA, 25 bp, Homo sapien
cttaatctcagttttacatttcatc

SEQ ID NO: 1227272 - DNA, 25 bp, Homo sapien
tctcagttttacatttcatcttctg

SEQ ID NO: 1227273 - DNA, 25 bp, Homo sapien
tcagttttacatttcatcttctgtt

SEQ ID NO: 1227274 - DNA, 25 bp, Homo sapien
agttttacatttcatcttctgtttt

SEQ ID NO: 1227275 - DNA, 25 bp, Homo sapien
tcactcatcagacgtggaagaatcc

SEQ ID NO: 1227276 - DNA, 25 bp, Homo sapien
tccaaggtcactcatcagacgtgga

SEQ ID NO: 1227277 - DNA, 25 bp, Homo sapien
tgtggggtcttctattcacactcac

SEQ ID NO: 1227278 - DNA, 25 bp, Homo sapien
gtggaagaatccaggactccaggca

SEQ ID NO: 1227279 - DNA, 25 bp, Homo sapien
aagtatatttcctacaggatcttca

SEQ ID NO: 1227280 - DNA, 25 bp, Homo sapien
gtttattgaatcatagcaagtatat

SEQ ID NO: 1227281 - DNA, 25 bp, Homo sapien
attgaatcatagcaagtatatttcc

SEQ ID NO: 1227282 - DNA, 25 bp, Homo sapien
atatttcctacaggatcttcatctg

SEQ ID NO: 1227283 - DNA, 25 bp, Homo sapien
catcatttgtgacccgggtgatggg

SEQ ID NO: 1227284 - DNA, 25 bp, Homo sapien
tgtgtgtctcaagttcaacagtctg

SEQ ID NO: 1227285 - DNA, 25 bp, Homo sapien
aatttgggtacccagcactggtgtc

SEQ ID NO: 1227286 - DNA, 25 bp, Homo sapien
ccatttatggcactgttggtcacca

SEQ ID NO: 1227287 - DNA, 25 bp, Homo sapien
agagtctggatttcgctggccagca

SEQ ID NO: 1227288 - DNA, 25 bp, Homo sapien
tcaggagctcaaaactgtacacaca

SEQ ID NO: 1227289 - DNA, 25 bp, Homo sapien
gattccaggaaaatctaagcatcgc

SEQ ID NO: 1227290 - DNA, 25 bp, Homo sapien
cctcaggatacctctagcaggaagt

SEQ ID NO: 1227291 - DNA, 25 bp, Homo sapien
catacagccaatcatcagctttaac

SEQ ID NO: 1227292 - DNA, 25 bp, Homo sapien
agctttaacaataaccaagtcttgg

SEQ ID NO: 1227293 - DNA, 25 bp, Homo sapien
cagatggtccgctatttatggtggc

SEQ ID NO: 1227294 - DNA, 25 bp, Homo sapien
cacaaaattgtatagtaaatcttca

SEQ ID NO: 1227295 - DNA, 25 bp, Homo sapien
ccatttttacgaacatgtgggagga

SEQ ID NO: 1227296 - DNA, 25 bp, Homo sapien
atgaaggccattcatacctgggttc

SEQ ID NO: 1227297 - DNA, 25 bp, Homo sapien
gaaggtcagggtctacaaaatcaat

SEQ ID NO: 1227298 - DNA, 25 bp, Homo sapien
tacactagcgataaagagccttaag

SEQ ID NO: 1227299 - DNA, 25 bp, Homo sapien
caacctaaacagcattacccagcga

SEQ ID NO: 1227300 - DNA, 25 bp, Homo sapien
tacccagcgatttgttcagtcattc

SEQ ID NO: 1227301 - DNA, 25 bp, Homo sapien
gcagctgtaacaggtaggccataaa

SEQ ID NO: 1227302 - DNA, 25 bp, Homo sapien
cacagaaaatggataccgtgcagct

SEQ ID NO: 1227303 - DNA, 25 bp, Homo sapien
taataccgacctcgcaaggttgtgg

SEQ ID NO: 1227304 - DNA, 25 bp, Homo sapien
caggacaagcctggatttgggtagc

SEQ ID NO: 1227305 - DNA, 25 bp, Homo sapien
ggcatctctgtggagcaatagcagc

SEQ ID NO: 1227306 - DNA, 25 bp, Homo sapien
gagagtcggttaacacagtttctgg

SEQ ID NO: 1227307 - DNA, 25 bp, Homo sapien
agatagcccacgaagtttctccagg

SEQ ID NO: 1227308 - DNA, 25 bp, Homo sapien
cttataagcctgagtgtcgaaggct

SEQ ID NO: 1227309 - DNA, 25 bp, Homo sapien
tcttggcacactagactgttagctg

SEQ ID NO: 1227310 - DNA, 25 bp, Homo sapien
tcgaaggctagatggagcctgagat

SEQ ID NO: 1227311 - DNA, 25 bp, Homo sapien
tgaacgtggccgtccttgcaggcat

SEQ ID NO: 1227312 - DNA, 25 bp, Homo sapien
cagacaaagggaactagtgggcgct

SEQ ID NO: 1227313 - DNA, 25 bp, Homo sapien
tccctgaaagggaggcgtaaagcca

SEQ ID NO: 1227314 - DNA, 25 bp, Homo sapien
tgagaatgagaacccgctaacgtgt

SEQ ID NO: 1227315 - DNA, 25 bp, Homo sapien
cgctggacgccaaattaggatttcg

SEQ ID NO: 1227316 - DNA, 25 bp, Homo sapien
taggatttcgctcacaaaaccttct

SEQ ID NO: 1227317 - DNA, 25 bp, Homo sapien
caaattaggatttcgctcacaaaac

SEQ ID NO: 1227318 - DNA, 25 bp, Homo sapien
aaccttctccctcgtcgctgttcca

SEQ ID NO: 1227319 - DNA, 25 bp, Homo sapien
cattaagctgctgattgtgcccctt

SEQ ID NO: 1227320 - DNA, 25 bp, Homo sapien
tgattggcaggtgagatgtggagtc

SEQ ID NO: 1227321 - DNA, 25 bp, Homo sapien
aacacagttcgtgaaaggcaggtgc

SEQ ID NO: 1227322 - DNA, 25 bp, Homo sapien
tgagatgtggagtcgaatgtagcct

SEQ ID NO: 1227323 - DNA, 25 bp, Homo sapien
tgggaacatctgtcgccgtgacctg

SEQ ID NO: 1227324 - DNA, 25 bp, Homo sapien
gaatgttcctcggagcccattaagg

SEQ ID NO: 1227325 - DNA, 25 bp, Homo sapien
taaggagtgctttaatccaagagga

SEQ ID NO: 1227326 - DNA, 25 bp, Homo sapien
aaatttggacaaaatgactctccgc

SEQ ID NO: 1227327 - DNA, 25 bp, Homo sapien
aattcataattcatcaaatcatagc

SEQ ID NO: 1227328 - DNA, 25 bp, Homo sapien
gaaaagaagtttcactgattatctc

SEQ ID NO: 1227329 - DNA, 25 bp, Homo sapien
ttaagacccaatagagcagctcctg

SEQ ID NO: 1227330 - DNA, 25 bp, Homo sapien
gcaggcaggtggctactcgcatagt

SEQ ID NO: 1227331 - DNA, 25 bp, Homo sapien
ttcctttgcacatcgcatagcagag

SEQ ID NO: 1227332 - DNA, 25 bp, Homo sapien
tcctttgcacatcgcatagcagaga

SEQ ID NO: 1227333 - DNA, 25 bp, Homo sapien
tttgcacatcgcatagcagagataa

SEQ ID NO: 1227334 - DNA, 25 bp, Homo sapien
gattcctttgcacatcgcatagcag

SEQ ID NO: 1227335 - DNA, 25 bp, Homo sapien
tatttgttttgtcaactaagtcttg

SEQ ID NO: 1227336 - DNA, 25 bp, Homo sapien
ttgaacgttttctctacttcgtata

SEQ ID NO: 1227337 - DNA, 25 bp, Homo sapien
tgtcaactaagtcttggagttcttt

SEQ ID NO: 1227338 - DNA, 25 bp, Homo sapien
tctctacttcgtatatcatatttgt

SEQ ID NO: 1227339 - DNA, 25 bp, Homo sapien
ggtggcaaaacagccgcgaaccaaa

SEQ ID NO: 1227340 - DNA, 25 bp, Homo sapien
caaaacagccgcgaaccaaactcca

SEQ ID NO: 1227341 - DNA, 25 bp, Homo sapien
aaggtggcaaaacagccgcgaacca

SEQ ID NO: 1227342 - DNA, 25 bp, Homo sapien
agctgtggactaacaagttcttcag

SEQ ID NO: 1227343 - DNA, 25 bp, Homo sapien
gctttagcagaagtgtaattcgatc

SEQ ID NO: 1227344 - DNA, 25 bp, Homo sapien
tcttgaacaacatagatgatgctgt

SEQ ID NO: 1227345 - DNA, 25 bp, Homo sapien
taattcgatcggaagtcttgaacaa

SEQ ID NO: 1227346 - DNA, 25 bp, Homo sapien
ttttatactccaagggccaagctgc

SEQ ID NO: 1227347 - DNA, 25 bp, Homo sapien
gttgaaatacaatccatcttcaagc

SEQ ID NO: 1227348 - DNA, 25 bp, Homo sapien
tgttgaaatacaatccatcttcaag

SEQ ID NO: 1227349 - DNA, 25 bp, Homo sapien
cttgttgaaatacaatccatcttca

SEQ ID NO: 1227350 - DNA, 25 bp, Homo sapien
tgaaatacaatccatcttcaagctc

SEQ ID NO: 1227351 - DNA, 25 bp, Homo sapien
actttgtctggatctctgactcctc

SEQ ID NO: 1227352 - DNA, 25 bp, Homo sapien
ccactttgtctggatctctgactcc

SEQ ID NO: 1227353 - DNA, 25 bp, Homo sapien
ctttgtctggatctctgactcctct

SEQ ID NO: 1227354 - DNA, 25 bp, Homo sapien
cactttgtctggatctctgactcct

SEQ ID NO: 1227355 - DNA, 25 bp, Homo sapien
caggaagttaccgtttcatcgcgga

SEQ ID NO: 1227356 - DNA, 25 bp, Homo sapien
tcatcgcggaagacataagctaaag

SEQ ID NO: 1227357 - DNA, 25 bp, Homo sapien
tgtgccaggccacgttctagatatg

SEQ ID NO: 1227358 - DNA, 25 bp, Homo sapien
aacctttggttatggcgatggcatc

SEQ ID NO: 1227359 - DNA, 25 bp, Homo sapien
cagtacaaacaagcacaaacataat

SEQ ID NO: 1227360 - DNA, 25 bp, Homo sapien
gctctccagtacaaacaagcacaaa

SEQ ID NO: 1227361 - DNA, 25 bp, Homo sapien
tccagtacaaacaagcacaaacata

SEQ ID NO: 1227362 - DNA, 25 bp, Homo sapien
tctccagtacaaacaagcacaaaca

SEQ ID NO: 1227363 - DNA, 25 bp, Homo sapien
cgaaggaggcacaatttctcctgtg

SEQ ID NO: 1227364 - DNA, 25 bp, Homo sapien
ggcgaaggaggcacaatttctcctg

SEQ ID NO: 1227365 - DNA, 25 bp, Homo sapien
tggcgaaggaggcacaatttctcct

SEQ ID NO: 1227366 - DNA, 25 bp, Homo sapien
gatggcgaaggaggcacaatttctc

SEQ ID NO: 1227367 - DNA, 25 bp, Homo sapien
gcagctccgcctctaagacttctgt

SEQ ID NO: 1227368 - DNA, 25 bp, Homo sapien
tgtctaccaagctcttgattcctat

SEQ ID NO: 1227369 - DNA, 25 bp, Homo sapien
aggtaggaggtttagtcacttgcca

SEQ ID NO: 1227370 - DNA, 25 bp, Homo sapien
gaatctaggcagctccgcctctaag

SEQ ID NO: 1227371 - DNA, 25 bp, Homo sapien
tgacactgtactccagcccgcgtga

SEQ ID NO: 1227372 - DNA, 25 bp, Homo sapien
atgacactgtactccagcccgcgtg

SEQ ID NO: 1227373 - DNA, 25 bp, Homo sapien
tcatgacactgtactccagcccgcg

SEQ ID NO: 1227374 - DNA, 25 bp, Homo sapien
acactgtactccagcccgcgtgact

SEQ ID NO: 1227375 - DNA, 25 bp, Homo sapien
tgtgctcacatgaaatactgtagcc

SEQ ID NO: 1227376 - DNA, 25 bp, Homo sapien
gcctatttgttcatcacgtacctgg

SEQ ID NO: 1227377 - DNA, 25 bp, Homo sapien
tattcgttcatagtctgtgaccaca

SEQ ID NO: 1227378 - DNA, 25 bp, Homo sapien
tgtagccatgattaaatgtcacctg

SEQ ID NO: 1227379 - DNA, 25 bp, Homo sapien
cgccttatgaaaatttgcactgcag

SEQ ID NO: 1227380 - DNA, 25 bp, Homo sapien
tgaaaatttgcactgcagggttcat

SEQ ID NO: 1227381 - DNA, 25 bp, Homo sapien
aatcgccttatgaaaatttgcactg

SEQ ID NO: 1227382 - DNA, 25 bp, Homo sapien
gaataaatcgccttatgaaaatttg

SEQ ID NO: 1227383 - DNA, 25 bp, Homo sapien
tgctcctatagacaaaggaggttta

SEQ ID NO: 1227384 - DNA, 25 bp, Homo sapien
ttgctcctatagacaaaggaggttt

SEQ ID NO: 1227385 - DNA, 25 bp, Homo sapien
tttgctcctatagacaaaggaggtt

SEQ ID NO: 1227386 - DNA, 25 bp, Homo sapien
cttagtacatggtttgttgagccac

SEQ ID NO: 1227387 - DNA, 25 bp, Homo sapien
catggtttgttgagccacgtcagga

SEQ ID NO: 1227388 - DNA, 25 bp, Homo sapien
tacatggtttgttgagccacgtcag

SEQ ID NO: 1227389 - DNA, 25 bp, Homo sapien
tagtacatggtttgttgagccacgt

SEQ ID NO: 1227390 - DNA, 25 bp, Homo sapien
tcctctccggtggagctctcttcat

SEQ ID NO: 1227391 - DNA, 25 bp, Homo sapien
gcttctccagtttggctgtagcctc

SEQ ID NO: 1227392 - DNA, 25 bp, Homo sapien
gaacagagagcactctaatgggcct

SEQ ID NO: 1227393 - DNA, 25 bp, Homo sapien
aaaagctttgcgcttctccagtttg

SEQ ID NO: 1227394 - DNA, 25 bp, Homo sapien
ttacaacatgactacagcttggctg

SEQ ID NO: 1227395 - DNA, 25 bp, Homo sapien
aacatgactacagcttggctgtgca

SEQ ID NO: 1227396 - DNA, 25 bp, Homo sapien
tgactacagcttggctgtgcattac

SEQ ID NO: 1227397 - DNA, 25 bp, Homo sapien
aagcgttacaacatgactacagctt

SEQ ID NO: 1227398 - DNA, 25 bp, Homo sapien
tttccattgtgatttgagcaaatga

SEQ ID NO: 1227399 - DNA, 25 bp, Homo sapien
ttgtcaaggaaggaacatctgtttc

SEQ ID NO: 1227400 - DNA, 25 bp, Homo sapien
taattaatgggccaaagactttcca

SEQ ID NO: 1227401 - DNA, 25 bp, Homo sapien
aatgaataataaatcaagaaaggag

SEQ ID NO: 1227402 - DNA, 25 bp, Homo sapien
caacttgcctagattcaaggtgcaa

SEQ ID NO: 1227403 - DNA, 25 bp, Homo sapien
agaagtttgctttaagtggatggca

SEQ ID NO: 1227404 - DNA, 25 bp, Homo sapien
tatggtatttgctaagtatttcttc

SEQ ID NO: 1227405 - DNA, 25 bp, Homo sapien
gcctagattcaaggtgcaacatcct

SEQ ID NO: 1227406 - DNA, 25 bp, Homo sapien
cttctcttctcctccaccaccccat

SEQ ID NO: 1227407 - DNA, 25 bp, Homo sapien
tctcttctcctccaccaccccatgg

SEQ ID NO: 1227408 - DNA, 25 bp, Homo sapien
cttctcctccaccaccccatggcat

SEQ ID NO: 1227409 - DNA, 25 bp, Homo sapien
tcttctcctccaccaccccatggca

SEQ ID NO: 1227410 - DNA, 25 bp, Homo sapien
gagggagacgatcaaaggttcttgt

SEQ ID NO: 1227411 - DNA, 25 bp, Homo sapien
gacttggcaaatccagatggaggat

SEQ ID NO: 1227412 - DNA, 25 bp, Homo sapien
gcaaagctgaatgggtagcattgga

SEQ ID NO: 1227413 - DNA, 25 bp, Homo sapien
ggaaaggatggaggctctatagacc

SEQ ID NO: 1227414 - DNA, 25 bp, Homo sapien
cagactgctaccttggcagatggca

SEQ ID NO: 1227415 - DNA, 25 bp, Homo sapien
ggtccctggctagcatcatctaggc

SEQ ID NO: 1227416 - DNA, 25 bp, Homo sapien
gatacattgtccaaaaggtccctgg

SEQ ID NO: 1227417 - DNA, 25 bp, Homo sapien
agatggcagcttttcggaaacctag

SEQ ID NO: 1227418 - DNA, 25 bp, Homo sapien
gagaatggtgtactctccaatggct

SEQ ID NO: 1227419 - DNA, 25 bp, Homo sapien
catgctaaaatagcccatttctggt

SEQ ID NO: 1227420 - DNA, 25 bp, Homo sapien
tctggttcagatttagggaggaagt

SEQ ID NO: 1227421 - DNA, 25 bp, Homo sapien
tgtactctccaatggctgcctgatg

SEQ ID NO: 1227422 - DNA, 25 bp, Homo sapien
gccatggttttacaatataagacaa

SEQ ID NO: 1227423 - DNA, 25 bp, Homo sapien
tcaccaggagatgtagaggaaactg

SEQ ID NO: 1227424 - DNA, 25 bp, Homo sapien
gacataggtttggtcaatgaggaaa

SEQ ID NO: 1227425 - DNA, 25 bp, Homo sapien
tcagagatgggcacttgacataggt

SEQ ID NO: 1227426 - DNA, 25 bp, Homo sapien
tttggaatcgtggtttgttccctga

SEQ ID NO: 1227427 - DNA, 25 bp, Homo sapien
tgtactactacaaatcatgcagtca

SEQ ID NO: 1227428 - DNA, 25 bp, Homo sapien
gagtgcagtggatgagcttagcctt

SEQ ID NO: 1227429 - DNA, 25 bp, Homo sapien
catgaacacgggctgtactactaca

SEQ ID NO: 1227430 - DNA, 25 bp, Homo sapien
gttccacctcgctgtacaatttctc

SEQ ID NO: 1227431 - DNA, 25 bp, Homo sapien
caatctggtcaataaccgttccacc

SEQ ID NO: 1227432 - DNA, 25 bp, Homo sapien
gcacttgcagaacaatgtaaagctt

SEQ ID NO: 1227433 - DNA, 25 bp, Homo sapien
caccggcagatttgttcccatgatc

SEQ ID NO: 1227434 - DNA, 25 bp, Homo sapien
atgtaaaactgtaaaatcctctagg

SEQ ID NO: 1227435 - DNA, 25 bp, Homo sapien
cagtgttatgtaaaactgtaaaatc

SEQ ID NO: 1227436 - DNA, 25 bp, Homo sapien
tgtaaaatcctctaggtccttcatt

SEQ ID NO: 1227437 - DNA, 25 bp, Homo sapien
actgtaaaatcctctaggtccttca

SEQ ID NO: 1227438 - DNA, 25 bp, Homo sapien
tgatagagtgggtttgtgcagacca

SEQ ID NO: 1227439 - DNA, 25 bp, Homo sapien
tatgcattatcctgccatgattgat

SEQ ID NO: 1227440 - DNA, 25 bp, Homo sapien
tcatttgggctccatttcatactac

SEQ ID NO: 1227441 - DNA, 25 bp, Homo sapien
ctgtcacaggtgcagcctctatgca

SEQ ID NO: 1227442 - DNA, 25 bp, Homo sapien
tcccgcccccgctccccgctgcaca

SEQ ID NO: 1227443 - DNA, 25 bp, Homo sapien
cccgcccccgctccccgctgcacat

SEQ ID NO: 1227444 - DNA, 25 bp, Homo sapien
gtcccgcccccgctccccgctgcac

SEQ ID NO: 1227445 - DNA, 25 bp, Homo sapien
ggtcactttgctccccctcttgttg

SEQ ID NO: 1227446 - DNA, 25 bp, Homo sapien
tcctttctcgccgtcttggcgtctc

SEQ ID NO: 1227447 - DNA, 25 bp, Homo sapien
gcacctccgcgatcccggtttctac

SEQ ID NO: 1227448 - DNA, 25 bp, Homo sapien
gcgtctccccgggaagcgctccgct

SEQ ID NO: 1227449 - DNA, 25 bp, Homo sapien
cacagtttcagctggctcacttgaa

SEQ ID NO: 1227450 - DNA, 25 bp, Homo sapien
tccctcctactttgtctgccagtgg

SEQ ID NO: 1227451 - DNA, 25 bp, Homo sapien
tcccatgcacagtttcagctggctc

SEQ ID NO: 1227452 - DNA, 25 bp, Homo sapien
ttttctcttactcatggtccagctg

SEQ ID NO: 1227453 - DNA, 25 bp, Homo sapien
tgtgattagcttgcctggaaattct

SEQ ID NO: 1227454 - DNA, 25 bp, Homo sapien
tagcattttagcacttagccgctgg

SEQ ID NO: 1227455 - DNA, 25 bp, Homo sapien
ttacataagcaggacattaaccttc

SEQ ID NO: 1227456 - DNA, 25 bp, Homo sapien
ccttctgagcactaaatagcatttt

SEQ ID NO: 1227457 - DNA, 25 bp, Homo sapien
aaatagcatgcattatgaacagttg

SEQ ID NO: 1227458 - DNA, 25 bp, Homo sapien
tagcatgcattatgaacagttgaac

SEQ ID NO: 1227459 - DNA, 25 bp, Homo sapien
atagcatgcattatgaacagttgaa

SEQ ID NO: 1227460 - DNA, 25 bp, Homo sapien
ccaaatagcatgcattatgaacagt

SEQ ID NO: 1227461 - DNA, 25 bp, Homo sapien
gggccgataattagaatacgatcgt

SEQ ID NO: 1227462 - DNA, 25 bp, Homo sapien
gacagatccactgggggccgataat

SEQ ID NO: 1227463 - DNA, 25 bp, Homo sapien
cgataattagaatacgatcgtatca

SEQ ID NO: 1227464 - DNA, 25 bp, Homo sapien
cagcagctaggacgcgggacagatc

SEQ ID NO: 1227465 - DNA, 25 bp, Homo sapien
tccggtggcaaccagaggaacttct

SEQ ID NO: 1227466 - DNA, 25 bp, Homo sapien
cctgacagttgcgtccggtggcaac

SEQ ID NO: 1227467 - DNA, 25 bp, Homo sapien
catttagtgccggtaacacaaggtt

SEQ ID NO: 1227468 - DNA, 25 bp, Homo sapien
ttttctgcgccggaagcgtcacctg

SEQ ID NO: 1227469 - DNA, 25 bp, Homo sapien
cgtgagtccggagcggcggctgcca

SEQ ID NO: 1227470 - DNA, 25 bp, Homo sapien
gtgagtccggagcggcggctgccat

SEQ ID NO: 1227471 - DNA, 25 bp, Homo sapien
acgtgagtccggagcggcggctgcc

SEQ ID NO: 1227472 - DNA, 25 bp, Homo sapien
tttttcaggttttcttcctcactca

SEQ ID NO: 1227473 - DNA, 25 bp, Homo sapien
ttttcaggttttcttcctcactcac

SEQ ID NO: 1227474 - DNA, 25 bp, Homo sapien
tgtctgtggcctcgtcttccagcac

SEQ ID NO: 1227475 - DNA, 25 bp, Homo sapien
agcaccgacgctacggctccagtta

SEQ ID NO: 1227476 - DNA, 25 bp, Homo sapien
gctacggctccagttaccattttca

SEQ ID NO: 1227477 - DNA, 25 bp, Homo sapien
ttcactatcagaagtgtctgtggcc

SEQ ID NO: 1227478 - DNA, 25 bp, Homo sapien
tttgctactgtaagtttctcggtag

SEQ ID NO: 1227479 - DNA, 25 bp, Homo sapien
tctcggtagctgcaggtgtttcacc

SEQ ID NO: 1227480 - DNA, 25 bp, Homo sapien
aaccttttgcttcttacaccctatg

SEQ ID NO: 1227481 - DNA, 25 bp, Homo sapien
ttgcttcttacaccctatgagaccc

SEQ ID NO: 1227482 - DNA, 25 bp, Homo sapien
taagctggtgccaagaatgatggta

SEQ ID NO: 1227483 - DNA, 25 bp, Homo sapien
acacagcatggttgaaagcctcaaa

SEQ ID NO: 1227484 - DNA, 25 bp, Homo sapien
tgcaattccttgtaacctaataagc

SEQ ID NO: 1227485 - DNA, 25 bp, Homo sapien
agaatgatggtaaagaggagcaaca

SEQ ID NO: 1227486 - DNA, 25 bp, Homo sapien
tagcatctgcccagcccatattagt

SEQ ID NO: 1227487 - DNA, 25 bp, Homo sapien
tattagtcccaacacttgattctcc

SEQ ID NO: 1227488 - DNA, 25 bp, Homo sapien
cagaatagtaggtttactttcagga

SEQ ID NO: 1227489 - DNA, 25 bp, Homo sapien
tcagcttctattgcgtcatcatcag

SEQ ID NO: 1227490 - DNA, 25 bp, Homo sapien
tctaatctacaagagaactggtgga

SEQ ID NO: 1227491 - DNA, 25 bp, Homo sapien
gagctagcctagacaaacaatctaa

SEQ ID NO: 1227492 - DNA, 25 bp, Homo sapien
gttcggtcaagataagagctagcct

SEQ ID NO: 1227493 - DNA, 25 bp, Homo sapien
taattggtcaaacactgcaagaaac

SEQ ID NO: 1227494 - DNA, 25 bp, Homo sapien
ctgcgttataaatattgttatgtga

SEQ ID NO: 1227495 - DNA, 25 bp, Homo sapien
tattgttatgtgaaagaatattaga

SEQ ID NO: 1227496 - DNA, 25 bp, Homo sapien
gcgttataaatattgttatgtgaaa

SEQ ID NO: 1227497 - DNA, 25 bp, Homo sapien
gttatgtgaaagaatattagatatt

SEQ ID NO: 1227498 - DNA, 25 bp, Homo sapien
ttggacaacatctggctttactctg

SEQ ID NO: 1227499 - DNA, 25 bp, Homo sapien
tgtcttggacaacatctggctttac

SEQ ID NO: 1227500 - DNA, 25 bp, Homo sapien
tcttggacaacatctggctttactc

SEQ ID NO: 1227501 - DNA, 25 bp, Homo sapien
tctttgtcttggacaacatctggct

SEQ ID NO: 1227502 - DNA, 25 bp, Homo sapien
tggaaacagttgatatcaacttagc

SEQ ID NO: 1227503 - DNA, 25 bp, Homo sapien
tcatttgtacttccatccatccctc

SEQ ID NO: 1227504 - DNA, 25 bp, Homo sapien
aacttagcacgctttctcatagaac

SEQ ID NO: 1227505 - DNA, 25 bp, Homo sapien
ttcctgcttgaagcagtctcatttg

SEQ ID NO: 1227506 - DNA, 25 bp, Homo sapien
gtccagattcctcaagataggacac

SEQ ID NO: 1227507 - DNA, 25 bp, Homo sapien
ccatgtttacttcatgccattttaa

SEQ ID NO: 1227508 - DNA, 25 bp, Homo sapien
caagataggacacttcaaatctaat

SEQ ID NO: 1227509 - DNA, 25 bp, Homo sapien
atctaatgccaacctacttcctcag

SEQ ID NO: 1227510 - DNA, 25 bp, Homo sapien
gttggtatgtaattgggatgatgct

SEQ ID NO: 1227511 - DNA, 25 bp, Homo sapien
catttattcatgtggaaaactctct

SEQ ID NO: 1227512 - DNA, 25 bp, Homo sapien
gcttctggattagggaattccttcc

SEQ ID NO: 1227513 - DNA, 25 bp, Homo sapien
tatgtaattgggatgatgcttcctg

SEQ ID NO: 1227514 - DNA, 25 bp, Homo sapien
gccaatgctttcctaagagcagcca

SEQ ID NO: 1227515 - DNA, 25 bp, Homo sapien
tagaaagtctgtaattcaagagtac

SEQ ID NO: 1227516 - DNA, 25 bp, Homo sapien
taacagaaaccagctagcattttcc

SEQ ID NO: 1227517 - DNA, 25 bp, Homo sapien
tcaagagtacaagtaaagccaatgc

SEQ ID NO: 1227518 - DNA, 25 bp, Homo sapien
cctaccaccacgcctggctaatttt

SEQ ID NO: 1227519 - DNA, 25 bp, Homo sapien
ttctctgtcaccaggctggagtgca

SEQ ID NO: 1227520 - DNA, 25 bp, Homo sapien
aatctcagcacactgctacctccat

SEQ ID NO: 1227521 - DNA, 25 bp, Homo sapien
ccatctcccaggttcaagcgattct

SEQ ID NO: 1227522 - DNA, 25 bp, Homo sapien
tgtttgtaaaagagaagtagcaatt

SEQ ID NO: 1227523 - DNA, 25 bp, Homo sapien
taagataaagttaaccatactgtac

SEQ ID NO: 1227524 - DNA, 25 bp, Homo sapien
tgactccagtactgcaaattagaaa

SEQ ID NO: 1227525 - DNA, 25 bp, Homo sapien
tttagaggtacaggccttgaaagaa

SEQ ID NO: 1227526 - DNA, 25 bp, Homo sapien
attgccgggagctatggaccctgcc

SEQ ID NO: 1227527 - DNA, 25 bp, Homo sapien
gatccaggctggtagcacgagccga

SEQ ID NO: 1227528 - DNA, 25 bp, Homo sapien
cccataggaccgagcaaaacaggca

SEQ ID NO: 1227529 - DNA, 25 bp, Homo sapien
tggctgtgttcagtggcaggacccc

SEQ ID NO: 1227530 - DNA, 25 bp, Homo sapien
agggctgtgacacctctttagggct

SEQ ID NO: 1227531 - DNA, 25 bp, Homo sapien
gacacctctttagggctctgcagtt

SEQ ID NO: 1227532 - DNA, 25 bp, Homo sapien
tctttagggctctgcagttactggc

SEQ ID NO: 1227533 - DNA, 25 bp, Homo sapien
tctgcagttactggcatctccaagc

SEQ ID NO: 1227534 - DNA, 25 bp, Homo sapien
tgttcactgctataagaccaagtac

SEQ ID NO: 1227535 - DNA, 25 bp, Homo sapien
gcactgtatgccttaagtatggaca

SEQ ID NO: 1227536 - DNA, 25 bp, Homo sapien
tttacactgtgaagcaacaatttgg

SEQ ID NO: 1227537 - DNA, 25 bp, Homo sapien
caggtatgttagatggcatctgtca

SEQ ID NO: 1227538 - DNA, 25 bp, Homo sapien
ggaaaactgtcctattggctcactc

SEQ ID NO: 1227539 - DNA, 25 bp, Homo sapien
tcacactgataggagaacaataacg

SEQ ID NO: 1227540 - DNA, 25 bp, Homo sapien
cagttccaatgcttctcacgtcaca

SEQ ID NO: 1227541 - DNA, 25 bp, Homo sapien
caataacgtaggaagataactggag

SEQ ID NO: 1227542 - DNA, 25 bp, Homo sapien
aaatattcaaaagtcaattccatca

SEQ ID NO: 1227543 - DNA, 25 bp, Homo sapien
agtcaattccatcataaggaaacaa

SEQ ID NO: 1227544 - DNA, 25 bp, Homo sapien
caaaagtcaattccatcataaggaa

SEQ ID NO: 1227545 - DNA, 25 bp, Homo sapien
aaagtcaattccatcataaggaaac

SEQ ID NO: 1227546 - DNA, 25 bp, Homo sapien
gaaatcatcacgtaggatcgtccaa

SEQ ID NO: 1227547 - DNA, 25 bp, Homo sapien
ccagtctttcatagatgctcccatc

SEQ ID NO: 1227548 - DNA, 25 bp, Homo sapien
taggatcgtccaacctgggccttct

SEQ ID NO: 1227549 - DNA, 25 bp, Homo sapien
gctcccatcatgaaatcatcacgta

SEQ ID NO: 1227550 - DNA, 25 bp, Homo sapien
agtcacttgcagattctggtctgct

SEQ ID NO: 1227551 - DNA, 25 bp, Homo sapien
atgtatcagagtcacttgcagattc

SEQ ID NO: 1227552 - DNA, 25 bp, Homo sapien
gtcacttgcagattctggtctgctg

SEQ ID NO: 1227553 - DNA, 25 bp, Homo sapien
ttatgtatcagagtcacttgcagat

SEQ ID NO: 1227554 - DNA, 25 bp, Homo sapien
tacaaatggtatccttataattccc

SEQ ID NO: 1227555 - DNA, 25 bp, Homo sapien
ctgcaattgtatttcctatgatgct

SEQ ID NO: 1227556 - DNA, 25 bp, Homo sapien
ttcttacaaatggtatccttataat

SEQ ID NO: 1227557 - DNA, 25 bp, Homo sapien
actgcaattgtatttcctatgatgc

SEQ ID NO: 1227558 - DNA, 25 bp, Homo sapien
tttctgaaaacattggtgatactga

SEQ ID NO: 1227559 - DNA, 25 bp, Homo sapien
gcacatctcgctggtcaagcagaaa

SEQ ID NO: 1227560 - DNA, 25 bp, Homo sapien
acatgaccaatatgatcctggcaaa

SEQ ID NO: 1227561 - DNA, 25 bp, Homo sapien
gaaataatacaccaatagacatgac

SEQ ID NO: 1227562 - DNA, 25 bp, Homo sapien
gagtctataagttagaaggcagaaa

SEQ ID NO: 1227563 - DNA, 25 bp, Homo sapien
actacagatacatagttgagtctat

SEQ ID NO: 1227564 - DNA, 25 bp, Homo sapien
gatacatagttgagtctataagtta

SEQ ID NO: 1227565 - DNA, 25 bp, Homo sapien
catagttgagtctataagttagaag

SEQ ID NO: 1227566 - DNA, 25 bp, Homo sapien
gcatgtcaaacttgcttcctgagaa

SEQ ID NO: 1227567 - DNA, 25 bp, Homo sapien
tatgataacaaataccaggccacag

SEQ ID NO: 1227568 - DNA, 25 bp, Homo sapien
ttaacagctggatactaaaagtcac

SEQ ID NO: 1227569 - DNA, 25 bp, Homo sapien
taaatctctcatgcaaaaataggct

SEQ ID NO: 1227570 - DNA, 25 bp, Homo sapien
tataggcacgaagtagttctctctc

SEQ ID NO: 1227571 - DNA, 25 bp, Homo sapien
ccaggactaccagtgctgcaacagt

SEQ ID NO: 1227572 - DNA, 25 bp, Homo sapien
tgggatagacccactagccacgtgt

SEQ ID NO: 1227573 - DNA, 25 bp, Homo sapien
taagattcaaatacccagctggcca

SEQ ID NO: 1227574 - DNA, 25 bp, Homo sapien
tgggaattcactccttacatggtgg

SEQ ID NO: 1227575 - DNA, 25 bp, Homo sapien
gttgctccggcagttctcaaaatgt

SEQ ID NO: 1227576 - DNA, 25 bp, Homo sapien
tgcctgaatctgcaacctacatttg

SEQ ID NO: 1227577 - DNA, 25 bp, Homo sapien
gaatagaatggacctaggcaactct

SEQ ID NO: 1227578 - DNA, 25 bp, Homo sapien
gaattgctgggcctcaataagcacc

SEQ ID NO: 1227579 - DNA, 25 bp, Homo sapien
tcttgacacgctactacataacagg

SEQ ID NO: 1227580 - DNA, 25 bp, Homo sapien
ggcactgtgctagatagacactgca

SEQ ID NO: 1227581 - DNA, 25 bp, Homo sapien
ggattctagcaaacaggactcttca

SEQ ID NO: 1227582 - DNA, 25 bp, Homo sapien
cttggaagtgaggacccgaaagagc

SEQ ID NO: 1227583 - DNA, 25 bp, Homo sapien
tggaagtgaggacccgaaagagcat

SEQ ID NO: 1227584 - DNA, 25 bp, Homo sapien
ccttggaagtgaggacccgaaagag

SEQ ID NO: 1227585 - DNA, 25 bp, Homo sapien
ttggaagtgaggacccgaaagagca

SEQ ID NO: 1227586 - DNA, 25 bp, Homo sapien
cttgggcacacatgtggctgccacc

SEQ ID NO: 1227587 - DNA, 25 bp, Homo sapien
gctgccaccctttttggcatgatca

SEQ ID NO: 1227588 - DNA, 25 bp, Homo sapien
gtggctgccaccctttttggcatga

SEQ ID NO: 1227589 - DNA, 25 bp, Homo sapien
acatgtggctgccaccctttttggc

SEQ ID NO: 1227590 - DNA, 25 bp, Homo sapien
atgcattgaagacacttgctgcagc

SEQ ID NO: 1227591 - DNA, 25 bp, Homo sapien
gcattgaagacacttgctgcagcct

SEQ ID NO: 1227592 - DNA, 25 bp, Homo sapien
tgcattgaagacacttgctgcagcc

SEQ ID NO: 1227593 - DNA, 25 bp, Homo sapien
agtggagatgttcagttcttgcagg

SEQ ID NO: 1227594 - DNA, 25 bp, Homo sapien
catctgcaggtctaaatagaagtgg

SEQ ID NO: 1227595 - DNA, 25 bp, Homo sapien
ctgcaggtctaaatagaagtggaga

SEQ ID NO: 1227596 - DNA, 25 bp, Homo sapien
gaagtggagatgttcagttcttgca

SEQ ID NO: 1227597 - DNA, 25 bp, Homo sapien
gagataggaccaagaaaaaccacag

SEQ ID NO: 1227598 - DNA, 25 bp, Homo sapien
catcacactaatgatacactgtggg

SEQ ID NO: 1227599 - DNA, 25 bp, Homo sapien
tgtgaggctttaaagagataaactc

SEQ ID NO: 1227600 - DNA, 25 bp, Homo sapien
aaccacagcatatcagcaggttgtg

SEQ ID NO: 1227601 - DNA, 25 bp, Homo sapien
gggcagcccctcagtttgttcctgg

SEQ ID NO: 1227602 - DNA, 25 bp, Homo sapien
tctccccaacgtggaattgctcgct

SEQ ID NO: 1227603 - DNA, 25 bp, Homo sapien
tggatgactccctagaccgtcaggc

SEQ ID NO: 1227604 - DNA, 25 bp, Homo sapien
cttagggtaggtaggcacttgccac

SEQ ID NO: 1227605 - DNA, 25 bp, Homo sapien
ctgcggatcacaacggcagcccttg

SEQ ID NO: 1227606 - DNA, 25 bp, Homo sapien
gcggttgcgttcaccccctgcggat

SEQ ID NO: 1227607 - DNA, 25 bp, Homo sapien
agccacagacgatcagccgtcgcgg

SEQ ID NO: 1227608 - DNA, 25 bp, Homo sapien
cgcttggttactccacgttgctgcc

SEQ ID NO: 1227609 - DNA, 25 bp, Homo sapien
ctacaccctggcgggcgcgcgctga

SEQ ID NO: 1227610 - DNA, 25 bp, Homo sapien
agcagagaagcgcacacgtgtgtgc

SEQ ID NO: 1227611 - DNA, 25 bp, Homo sapien
ctgccttccactgcggcgctgagag

SEQ ID NO: 1227612 - DNA, 25 bp, Homo sapien
aagaaggagcggttcggtcctgcct

SEQ ID NO: 1227613 - DNA, 25 bp, Homo sapien
ttcgcagggcgctcggtactcggtc

SEQ ID NO: 1227614 - DNA, 25 bp, Homo sapien
gaaatattaatacgggacgggcaga

SEQ ID NO: 1227615 - DNA, 25 bp, Homo sapien
gctcctccggccaaaagggaagaga

SEQ ID NO: 1227616 - DNA, 25 bp, Homo sapien
gagggaaccctgactttggcgagta

SEQ ID NO: 1227617 - DNA, 25 bp, Homo sapien
gagtggcggatctgaactcggctcc

SEQ ID NO: 1227618 - DNA, 25 bp, Homo sapien
gatcctcttgcgcatgaactggtcc

SEQ ID NO: 1227619 - DNA, 25 bp, Homo sapien
aactggtccatatcgagtgtgctgc

SEQ ID NO: 1227620 - DNA, 25 bp, Homo sapien
gaccgtgaccagatgcaggatcaga

SEQ ID NO: 1227621 - DNA, 25 bp, Homo sapien
tcctcgggctcaggatagtcttctg

SEQ ID NO: 1227622 - DNA, 25 bp, Homo sapien
tagggtagttagagacaatagagaa

SEQ ID NO: 1227623 - DNA, 25 bp, Homo sapien
cggcgatgctgacatttttagggta

SEQ ID NO: 1227624 - DNA, 25 bp, Homo sapien
ttttagggtagttagagacaataga

SEQ ID NO: 1227625 - DNA, 25 bp, Homo sapien
caaaccgggttttgtctcggcgatg

SEQ ID NO: 1227626 - DNA, 25 bp, Homo sapien
taggaatgcattgaagtaactgcag

SEQ ID NO: 1227627 - DNA, 25 bp, Homo sapien
tgcaggaagcctacgaaaaggcagg

SEQ ID NO: 1227628 - DNA, 25 bp, Homo sapien
taagaaaaatgatctgctacactgg

SEQ ID NO: 1227629 - DNA, 25 bp, Homo sapien
gcaggagcaggataacagacccgta

SEQ ID NO: 1227630 - DNA, 25 bp, Homo sapien
tcactccctgaacgctaataagttg

SEQ ID NO: 1227631 - DNA, 25 bp, Homo sapien
gggcttatgaccctcgccagattca

SEQ ID NO: 1227632 - DNA, 25 bp, Homo sapien
cgctaataagttgatggtaaaaaat

SEQ ID NO: 1227633 - DNA, 25 bp, Homo sapien
aatgaaccagtgatctttcccatgg

SEQ ID NO: 1227634 - DNA, 25 bp, Homo sapien
aactgtctgactatcctcctattca

SEQ ID NO: 1227635 - DNA, 25 bp, Homo sapien
gctgactgaagctagtaatggatag

SEQ ID NO: 1227636 - DNA, 25 bp, Homo sapien
taatggataggtcaacaccatcact

SEQ ID NO: 1227637 - DNA, 25 bp, Homo sapien
tatacaatggtctaatccacactcc

SEQ ID NO: 1227638 - DNA, 25 bp, Homo sapien
caggatgctaactcactgagagaat

SEQ ID NO: 1227639 - DNA, 25 bp, Homo sapien
aagtggtgttactgggttgccccag

SEQ ID NO: 1227640 - DNA, 25 bp, Homo sapien
ccaggatgctaactcactgagagaa

SEQ ID NO: 1227641 - DNA, 25 bp, Homo sapien
ctgaagtggtgttactgggttgccc

SEQ ID NO: 1227642 - DNA, 25 bp, Homo sapien
gtgaattcaattcctcttggacagc

SEQ ID NO: 1227643 - DNA, 25 bp, Homo sapien
ggttgagggaacatctaagccaaac

SEQ ID NO: 1227644 - DNA, 25 bp, Homo sapien
gaggaccgctttctcagcacgatga

SEQ ID NO: 1227645 - DNA, 25 bp, Homo sapien
gacttatcaggcagtaacaaatcca

SEQ ID NO: 1227646 - DNA, 25 bp, Homo sapien
ttttcttcagaaacgcagcgtctct

SEQ ID NO: 1227647 - DNA, 25 bp, Homo sapien
tgtgagagaaaaacagctgcctgtg

SEQ ID NO: 1227648 - DNA, 25 bp, Homo sapien
gacatatagatagcttggaaggcct

SEQ ID NO: 1227649 - DNA, 25 bp, Homo sapien
gacacgctagtggaacatgctagtg

SEQ ID NO: 1227650 - DNA, 25 bp, Homo sapien
cacctggccgccttatcaagatgca

SEQ ID NO: 1227651 - DNA, 25 bp, Homo sapien
tacaggttagcaaggccttttacag

SEQ ID NO: 1227652 - DNA, 25 bp, Homo sapien
gaactatctgcacaaggatcacctg

SEQ ID NO: 1227653 - DNA, 25 bp, Homo sapien
tataatctgaattggagtggctgac

SEQ ID NO: 1227654 - DNA, 25 bp, Homo sapien
ctgagccagagggtgttgtaacaac

SEQ ID NO: 1227655 - DNA, 25 bp, Homo sapien
gcaaacgagacatgtcaatacaaag

SEQ ID NO: 1227656 - DNA, 25 bp, Homo sapien
caaaggtcacaaataatcagcagca

SEQ ID NO: 1227657 - DNA, 25 bp, Homo sapien
catgacgatccatttccttaagcaa

SEQ ID NO: 1227658 - DNA, 25 bp, Homo sapien
gagggcctgacccatgacgatccat

SEQ ID NO: 1227659 - DNA, 25 bp, Homo sapien
acgtggctctaaacaatcaccctgg

SEQ ID NO: 1227660 - DNA, 25 bp, Homo sapien
tctaaacaatcaccctggtgggtca

SEQ ID NO: 1227661 - DNA, 25 bp, Homo sapien
gtaggaacgtggctctaaacaatca

SEQ ID NO: 1227662 - DNA, 25 bp, Homo sapien
gaaacaacaggtaggaacgtggctc

SEQ ID NO: 1227663 - DNA, 25 bp, Homo sapien
gatgtccagccatgtgcaaaacaat

SEQ ID NO: 1227664 - DNA, 25 bp, Homo sapien
ttgcatcatacacacaacagggcaa

SEQ ID NO: 1227665 - DNA, 25 bp, Homo sapien
tgtccagccatgtgcaaaacaatgc

SEQ ID NO: 1227666 - DNA, 25 bp, Homo sapien
gttgcatcatacacacaacagggca

SEQ ID NO: 1227667 - DNA, 25 bp, Homo sapien
catagggagttaccttcctggtctc

SEQ ID NO: 1227668 - DNA, 25 bp, Homo sapien
tggccacagttccatagggagttac

SEQ ID NO: 1227669 - DNA, 25 bp, Homo sapien
ttaacgatccttgaagtcccagtgg

SEQ ID NO: 1227670 - DNA, 25 bp, Homo sapien
gctctcttcctaacaataacactag

SEQ ID NO: 1227671 - DNA, 25 bp, Homo sapien
gcttaaaattgaatactcatgaaag

SEQ ID NO: 1227672 - DNA, 25 bp, Homo sapien
catatagaccaccagtgcttaaaat

SEQ ID NO: 1227673 - DNA, 25 bp, Homo sapien
ctccatatagaccaccagtgcttaa

SEQ ID NO: 1227674 - DNA, 25 bp, Homo sapien
tatagaccaccagtgcttaaaattg

SEQ ID NO: 1227675 - DNA, 25 bp, Homo sapien
tcgggatcccgaatgtggtgctttt

SEQ ID NO: 1227676 - DNA, 25 bp, Homo sapien
ccttcgccacgtagctgtgtgaaaa

SEQ ID NO: 1227677 - DNA, 25 bp, Homo sapien
aatcaaatctcgcaagtccttcgcc

SEQ ID NO: 1227678 - DNA, 25 bp, Homo sapien
ttgcaatctgtaacccatcgaaacc

SEQ ID NO: 1227679 - DNA, 25 bp, Homo sapien
tgtactggcaacacagctatgggca

SEQ ID NO: 1227680 - DNA, 25 bp, Homo sapien
catattagcacttcagtagatggcc

SEQ ID NO: 1227681 - DNA, 25 bp, Homo sapien
tagatggccatttagtgccagaaag

SEQ ID NO: 1227682 - DNA, 25 bp, Homo sapien
tgtattcattaagggtgtgcactct

SEQ ID NO: 1227683 - DNA, 25 bp, Homo sapien
cagtgacagagaacttagaacccag

SEQ ID NO: 1227684 - DNA, 25 bp, Homo sapien
gggtctagttcagccacataagatg

SEQ ID NO: 1227685 - DNA, 25 bp, Homo sapien
tctacaagagctacaccacataagt

SEQ ID NO: 1227686 - DNA, 25 bp, Homo sapien
ggctgacagctgctttctacaagag

SEQ ID NO: 1227687 - DNA, 25 bp, Homo sapien
cgcctcttgggttcacgcaactcac

SEQ ID NO: 1227688 - DNA, 25 bp, Homo sapien
ttgggttcacgcaactcacctgtct

SEQ ID NO: 1227689 - DNA, 25 bp, Homo sapien
cttgggttcacgcaactcacctgtc

SEQ ID NO: 1227690 - DNA, 25 bp, Homo sapien
ctcttgggttcacgcaactcacctg

SEQ ID NO: 1227691 - DNA, 25 bp, Homo sapien
tcctagttttgtggcaacagggata

SEQ ID NO: 1227692 - DNA, 25 bp, Homo sapien
aattttgtagctagccctgccgaag

SEQ ID NO: 1227693 - DNA, 25 bp, Homo sapien
aaagttggagcgctgggtctagcac

SEQ ID NO: 1227694 - DNA, 25 bp, Homo sapien
cctgccgaagcctcatatagttata

SEQ ID NO: 1227695 - DNA, 25 bp, Homo sapien
aggctttctcatgggccttcctccc

SEQ ID NO: 1227696 - DNA, 25 bp, Homo sapien
tcccggggaaaattttgcacataga

SEQ ID NO: 1227697 - DNA, 25 bp, Homo sapien
catagaagattccagtatgtcatca

SEQ ID NO: 1227698 - DNA, 25 bp, Homo sapien
ctcacctcaaccttggccacacatg

SEQ ID NO: 1227699 - DNA, 25 bp, Homo sapien
tttccttcataggaactttctccca

SEQ ID NO: 1227700 - DNA, 25 bp, Homo sapien
tcatcttaagagcctgaattttttc

SEQ ID NO: 1227701 - DNA, 25 bp, Homo sapien
atcttaagagcctgaattttttcct

SEQ ID NO: 1227702 - DNA, 25 bp, Homo sapien
ttcataggaactttctcccaaccca

SEQ ID NO: 1227703 - DNA, 25 bp, Homo sapien
ctgtagaaagtgggcgggatggcat

SEQ ID NO: 1227704 - DNA, 25 bp, Homo sapien
tccattgctgagacgtcaaatcgaa

SEQ ID NO: 1227705 - DNA, 25 bp, Homo sapien
ctggcttttgggttctgcaaacgaa

SEQ ID NO: 1227706 - DNA, 25 bp, Homo sapien
tgcaaacgaaagactctgaactctg

SEQ ID NO: 1227707 - DNA, 25 bp, Homo sapien
aatccgttgttcaggcactctggct

SEQ ID NO: 1227708 - DNA, 25 bp, Homo sapien
ctcagagcttcaatactgcattcta

SEQ ID NO: 1227709 - DNA, 25 bp, Homo sapien
tgctcagagcttcaatactgcattc

SEQ ID NO: 1227710 - DNA, 25 bp, Homo sapien
tccctcctgagtgattaggaacaag

SEQ ID NO: 1227711 - DNA, 25 bp, Homo sapien
tactgcattctaaagggttcttccc

SEQ ID NO: 1227712 - DNA, 25 bp, Homo sapien
acattttgacgcagctgcccaccaa

SEQ ID NO: 1227713 - DNA, 25 bp, Homo sapien
catcattacattttgacgcagctgc

SEQ ID NO: 1227714 - DNA, 25 bp, Homo sapien
tcagcaagttggcatttcatcatca

SEQ ID NO: 1227715 - DNA, 25 bp, Homo sapien
attacattttgacgcagctgcccac

SEQ ID NO: 1227716 - DNA, 25 bp, Homo sapien
ttataattgcatctgtctaagaggt

SEQ ID NO: 1227717 - DNA, 25 bp, Homo sapien
taattgcatctgtctaagaggtcgt

SEQ ID NO: 1227718 - DNA, 25 bp, Homo sapien
tctaagaggtcgtaagtaatgtata

SEQ ID NO: 1227719 - DNA, 25 bp, Homo sapien
catctgtctaagaggtcgtaagtaa

SEQ ID NO: 1227720 - DNA, 25 bp, Homo sapien
ttgcttctgccatcaccatgtcctg

SEQ ID NO: 1227721 - DNA, 25 bp, Homo sapien
cttgcttctgccatcaccatgtcct

SEQ ID NO: 1227722 - DNA, 25 bp, Homo sapien
tgcttctgccatcaccatgtcctgt

SEQ ID NO: 1227723 - DNA, 25 bp, Homo sapien
gcttctgccatcaccatgtcctgta

SEQ ID NO: 1227724 - DNA, 25 bp, Homo sapien
catcagttacatcgaaggagagcca

SEQ ID NO: 1227725 - DNA, 25 bp, Homo sapien
gccattcatgaacagcatcagttac

SEQ ID NO: 1227726 - DNA, 25 bp, Homo sapien
tcacaactttgctgtcgatgtagcg

SEQ ID NO: 1227727 - DNA, 25 bp, Homo sapien
ggagatgttaaatctttggacttga

SEQ ID NO: 1227728 - DNA, 25 bp, Homo sapien
tgaacatcttgggaggaaaagagag

SEQ ID NO: 1227729 - DNA, 25 bp, Homo sapien
aggaaaagagagagtggcttgtaac

SEQ ID NO: 1227730 - DNA, 25 bp, Homo sapien
ggaggaaaagagagagtggcttgta

SEQ ID NO: 1227731 - DNA, 25 bp, Homo sapien
tgggaggaaaagagagagtggcttg

SEQ ID NO: 1227732 - DNA, 25 bp, Homo sapien
tgcaatcaatttaaagtaacttagg

SEQ ID NO: 1227733 - DNA, 25 bp, Homo sapien
cccttaaatctgcaatcaatttaaa

SEQ ID NO: 1227734 - DNA, 25 bp, Homo sapien
atctgcaatcaatttaaagtaactt

SEQ ID NO: 1227735 - DNA, 25 bp, Homo sapien
aaatctgcaatcaatttaaagtaac

SEQ ID NO: 1227736 - DNA, 25 bp, Homo sapien
tattagatggtacaaaagtgcagca

SEQ ID NO: 1227737 - DNA, 25 bp, Homo sapien
cagcagggacagtgtaagcttattt

SEQ ID NO: 1227738 - DNA, 25 bp, Homo sapien
taggagggcaataacattagcagga

SEQ ID NO: 1227739 - DNA, 25 bp, Homo sapien
aagcacgcttcttccgccggttggt

SEQ ID NO: 1227740 - DNA, 25 bp, Homo sapien
aataggccgcatccaaagcacgctt

SEQ ID NO: 1227741 - DNA, 25 bp, Homo sapien
tgtgactcaagtctgtaggagggca

SEQ ID NO: 1227742 - DNA, 25 bp, Homo sapien
cataaatacgggcatgctccagcac

SEQ ID NO: 1227743 - DNA, 25 bp, Homo sapien
tgtgctgagtgtctgaactccataa

SEQ ID NO: 1227744 - DNA, 25 bp, Homo sapien
aatcaatgtaaagtggacgtaggca

SEQ ID NO: 1227745 - DNA, 25 bp, Homo sapien
cagcacagaagttggcattgtaccc

SEQ ID NO: 1227746 - DNA, 25 bp, Homo sapien
acacggtcgcccccgagtgccaaag

SEQ ID NO: 1227747 - DNA, 25 bp, Homo sapien
caagcacacggtcgcccccgagtgc

SEQ ID NO: 1227748 - DNA, 25 bp, Homo sapien
ggccaagcacacggtcgcccccgag

SEQ ID NO: 1227749 - DNA, 25 bp, Homo sapien
cacggtcgcccccgagtgccaaagt

SEQ ID NO: 1227750 - DNA, 25 bp, Homo sapien
ttatggtattatataagctcaggac

SEQ ID NO: 1227751 - DNA, 25 bp, Homo sapien
tagaaagctgttcaatcttgggtgt

SEQ ID NO: 1227752 - DNA, 25 bp, Homo sapien
gcatttgcaagactttacaatcata

SEQ ID NO: 1227753 - DNA, 25 bp, Homo sapien
gttctaaatcttgggacacgcagca

SEQ ID NO: 1227754 - DNA, 25 bp, Homo sapien
gaaaaatcaagtgaggcgcgggata

SEQ ID NO: 1227755 - DNA, 25 bp, Homo sapien
taggaacggtacgtacagcaactcc

SEQ ID NO: 1227756 - DNA, 25 bp, Homo sapien
caagcatcatcgttgtcgtcgtcat

SEQ ID NO: 1227757 - DNA, 25 bp, Homo sapien
tacaagaagcttccttaggcagctg

SEQ ID NO: 1227758 - DNA, 25 bp, Homo sapien
gaaaagacaagtggacccaggtagc

SEQ ID NO: 1227759 - DNA, 25 bp, Homo sapien
gaaacacaaagcacaagtagggcaa

SEQ ID NO: 1227760 - DNA, 25 bp, Homo sapien
caaaatgtcatcctatctgagagga

SEQ ID NO: 1227761 - DNA, 25 bp, Homo sapien
ttaaccccagcatgaggatacctct

SEQ ID NO: 1227762 - DNA, 25 bp, Homo sapien
cacaggtgttttctagactcgatga

SEQ ID NO: 1227763 - DNA, 25 bp, Homo sapien
ttttctggtcggcagtcaagctgga

SEQ ID NO: 1227764 - DNA, 25 bp, Homo sapien
aactgacaggcaagtagctgatccc

SEQ ID NO: 1227765 - DNA, 25 bp, Homo sapien
ccctggcgttggcagaacatagaac

SEQ ID NO: 1227766 - DNA, 25 bp, Homo sapien
cctttagcaggttggtaaagcccat

SEQ ID NO: 1227767 - DNA, 25 bp, Homo sapien
gaagaccgggttacagagattgatc

SEQ ID NO: 1227768 - DNA, 25 bp, Homo sapien
ccattactggcagaaatatctggcc

SEQ ID NO: 1227769 - DNA, 25 bp, Homo sapien
gcccatccatacagaaatgtgcgag

SEQ ID NO: 1227770 - DNA, 25 bp, Homo sapien
ctgcttggtctggtatgttcgtgca

SEQ ID NO: 1227771 - DNA, 25 bp, Homo sapien
tgcttggtctggtatgttcgtgcat

SEQ ID NO: 1227772 - DNA, 25 bp, Homo sapien
aagggaagtcatcagcgggctcact

SEQ ID NO: 1227773 - DNA, 25 bp, Homo sapien
caggcctgtgtgtagtccgtgaagg

SEQ ID NO: 1227774 - DNA, 25 bp, Homo sapien
gcagctggccaaggggcgcctgata

SEQ ID NO: 1227775 - DNA, 25 bp, Homo sapien
tgtgtgtagtccgtgaagggaagtc

SEQ ID NO: 1227776 - DNA, 25 bp, Homo sapien
tgcttaatggaacaagccagcttgg

SEQ ID NO: 1227777 - DNA, 25 bp, Homo sapien
gccagcttgggagaagtaattgtta

SEQ ID NO: 1227778 - DNA, 25 bp, Homo sapien
catcaatagccatttggttttccca

SEQ ID NO: 1227779 - DNA, 25 bp, Homo sapien
gttatctgtggccagtctgtgtctt

SEQ ID NO: 1227780 - DNA, 25 bp, Homo sapien
tacttcttgattctgtagttaattt

SEQ ID NO: 1227781 - DNA, 25 bp, Homo sapien
tcttgattctgtagttaatttcatc

SEQ ID NO: 1227782 - DNA, 25 bp, Homo sapien
tgattctgtagttaatttcatcaaa

SEQ ID NO: 1227783 - DNA, 25 bp, Homo sapien
ttttgagtatatacttcttgattct

SEQ ID NO: 1227784 - DNA, 25 bp, Homo sapien
agctgtgttagcaggtacctctaaa

SEQ ID NO: 1227785 - DNA, 25 bp, Homo sapien
gctgtgttagcaggtacctctaaaa

SEQ ID NO: 1227786 - DNA, 25 bp, Homo sapien
ctgtgttagcaggtacctctaaaag

SEQ ID NO: 1227787 - DNA, 25 bp, Homo sapien
aggggatctttaaagctgtgttagc

SEQ ID NO: 1227788 - DNA, 25 bp, Homo sapien
gcgttgctcttcccaacttgccttc

SEQ ID NO: 1227789 - DNA, 25 bp, Homo sapien
tctgcgttgctcttcccaacttgcc

SEQ ID NO: 1227790 - DNA, 25 bp, Homo sapien
tgcgttgctcttcccaacttgcctt

SEQ ID NO: 1227791 - DNA, 25 bp, Homo sapien
gttctgcgttgctcttcccaacttg

SEQ ID NO: 1227792 - DNA, 25 bp, Homo sapien
atatatcatttgcacccccacaact

SEQ ID NO: 1227793 - DNA, 25 bp, Homo sapien
aaaggtgaagaacttcctctgttca

SEQ ID NO: 1227794 - DNA, 25 bp, Homo sapien
ggatcacatcagtgaccagcagcga

SEQ ID NO: 1227795 - DNA, 25 bp, Homo sapien
cgccttcctgtaccaacagtttttg

SEQ ID NO: 1227796 - DNA, 25 bp, Homo sapien
aaagctgggagtgaatattgggttc

SEQ ID NO: 1227797 - DNA, 25 bp, Homo sapien
catagcaggtcagttggcttcccag

SEQ ID NO: 1227798 - DNA, 25 bp, Homo sapien
tcccagtggaaccataaagtcctcc

SEQ ID NO: 1227799 - DNA, 25 bp, Homo sapien
gttacagactgatcacaactcacgt

SEQ ID NO: 1227800 - DNA, 25 bp, Homo sapien
tcattcattcgtgccacatagcagg

SEQ ID NO: 1227801 - DNA, 25 bp, Homo sapien
ttccagccgatagatgttttccaca

SEQ ID NO: 1227802 - DNA, 25 bp, Homo sapien
tatgccttaaacagcttacaactaa

SEQ ID NO: 1227803 - DNA, 25 bp, Homo sapien
aactttagcttatgccttaaacagc

SEQ ID NO: 1227804 - DNA, 25 bp, Homo sapien
gggcttccagccgatagatgttttc

SEQ ID NO: 1227805 - DNA, 25 bp, Homo sapien
ttatccactcacagaaagcttccca

SEQ ID NO: 1227806 - DNA, 25 bp, Homo sapien
ctcacagaaagcttcccatatagcc

SEQ ID NO: 1227807 - DNA, 25 bp, Homo sapien
ccactcacagaaagcttcccatata

SEQ ID NO: 1227808 - DNA, 25 bp, Homo sapien
tatccactcacagaaagcttcccat

SEQ ID NO: 1227809 - DNA, 25 bp, Homo sapien
aagacccatggtgagcttagctgaa

SEQ ID NO: 1227810 - DNA, 25 bp, Homo sapien
tttccccatagtaagtgcctcaggc

SEQ ID NO: 1227811 - DNA, 25 bp, Homo sapien
ttttcctcgtatactcagcaatggt

SEQ ID NO: 1227812 - DNA, 25 bp, Homo sapien
tatgatttctgtccgcctctgggtg

SEQ ID NO: 1227813 - DNA, 25 bp, Homo sapien
cagtgaatgttgtcgagtgtaagtg

SEQ ID NO: 1227814 - DNA, 25 bp, Homo sapien
tgaatgttgtcgagtgtaagtgcag

SEQ ID NO: 1227815 - DNA, 25 bp, Homo sapien
ttcacagtgaatgttgtcgagtgta

SEQ ID NO: 1227816 - DNA, 25 bp, Homo sapien
cacagtgaatgttgtcgagtgtaag

SEQ ID NO: 1227817 - DNA, 25 bp, Homo sapien
gagttgtggtttcaggatgtctcca

SEQ ID NO: 1227818 - DNA, 25 bp, Homo sapien
gctttgacccagacaccagttggag

SEQ ID NO: 1227819 - DNA, 25 bp, Homo sapien
ccaacgattgatgaattgaggcact

SEQ ID NO: 1227820 - DNA, 25 bp, Homo sapien
gaggcacttttagctctggctttga

SEQ ID NO: 1227821 - DNA, 25 bp, Homo sapien
gactcacaagtcttacattctccat

SEQ ID NO: 1227822 - DNA, 25 bp, Homo sapien
cagaaccttgcacataataacatct

SEQ ID NO: 1227823 - DNA, 25 bp, Homo sapien
acagaaccttgcacataataacatc

SEQ ID NO: 1227824 - DNA, 25 bp, Homo sapien
ggcgtctgtcctgtctgctagtccc

SEQ ID NO: 1227825 - DNA, 25 bp, Homo sapien
gtctgtcctgtctgctagtcccctc

SEQ ID NO: 1227826 - DNA, 25 bp, Homo sapien
ttccacgtgcagatacagactccag

SEQ ID NO: 1227827 - DNA, 25 bp, Homo sapien
ttcaagagctttggtgtgcattatc

SEQ ID NO: 1227828 - DNA, 25 bp, Homo sapien
aatgaaaatgaagaaggtagctggg

SEQ ID NO: 1227829 - DNA, 25 bp, Homo sapien
atttaatgtggtccccagcaatacg

SEQ ID NO: 1227830 - DNA, 25 bp, Homo sapien
actgtagcctgaaagacaattcctt

SEQ ID NO: 1227831 - DNA, 25 bp, Homo sapien
caagaatgaagattctagtctccct

SEQ ID NO: 1227832 - DNA, 25 bp, Homo sapien
gaaggttcaggaatttcactcaaga

SEQ ID NO: 1227833 - DNA, 25 bp, Homo sapien
gctacttaaatatcccagggttcca

SEQ ID NO: 1227834 - DNA, 25 bp, Homo sapien
ccttgttcccaatacgtgactgcag

SEQ ID NO: 1227835 - DNA, 25 bp, Homo sapien
tgagtggtccacacgcagccctctg

SEQ ID NO: 1227836 - DNA, 25 bp, Homo sapien
agcttgagtggtccacacgcagccc

SEQ ID NO: 1227837 - DNA, 25 bp, Homo sapien
ttgttcccaatacgtgactgcagct

SEQ ID NO: 1227838 - DNA, 25 bp, Homo sapien
caaaatgagtcagagccttcacata

SEQ ID NO: 1227839 - DNA, 25 bp, Homo sapien
aatactgtacaccatgctgaaaact

SEQ ID NO: 1227840 - DNA, 25 bp, Homo sapien
tgcaatcttgggataatcagacttc

SEQ ID NO: 1227841 - DNA, 25 bp, Homo sapien
caccaaccttaaggaaataattcat

SEQ ID NO: 1227842 - DNA, 25 bp, Homo sapien
atgaactgctccatcgatcgtggct

SEQ ID NO: 1227843 - DNA, 25 bp, Homo sapien
tgtcctgatagacatcagggtctcg

SEQ ID NO: 1227844 - DNA, 25 bp, Homo sapien
gatcgtggcttgtgtcctgatagac

SEQ ID NO: 1227845 - DNA, 25 bp, Homo sapien
tagacatcagggtctcgagcggcat

SEQ ID NO: 1227846 - DNA, 25 bp, Homo sapien
tgcaagctcgcaggcatccgaatag

SEQ ID NO: 1227847 - DNA, 25 bp, Homo sapien
atgtatgtgtgtgcccgtacacgag

SEQ ID NO: 1227848 - DNA, 25 bp, Homo sapien
ggcatccgaatagggaagtcatcac

SEQ ID NO: 1227849 - DNA, 25 bp, Homo sapien
gcccgtacacgagtgtgcaagctcg

SEQ ID NO: 1227850 - DNA, 25 bp, Homo sapien
gcactaggccctagttccaacactg

SEQ ID NO: 1227851 - DNA, 25 bp, Homo sapien
tccaatcatggtgtcagaagaaggg

SEQ ID NO: 1227852 - DNA, 25 bp, Homo sapien
gagtcacggttctggacgctgtaca

SEQ ID NO: 1227853 - DNA, 25 bp, Homo sapien
gaactccacgaggacaggaccaatt

SEQ ID NO: 1227854 - DNA, 25 bp, Homo sapien
aggaaaaggtcaatgccatggacat

SEQ ID NO: 1227855 - DNA, 25 bp, Homo sapien
tatgtagactgtcccttttaaaaca

SEQ ID NO: 1227856 - DNA, 25 bp, Homo sapien
tggcttctttagtgcaaacagtttg

SEQ ID NO: 1227857 - DNA, 25 bp, Homo sapien
aaaacaccaacaatcccttgtgaag

SEQ ID NO: 1227858 - DNA, 25 bp, Homo sapien
tgcatcagccattgttgtcagagga

SEQ ID NO: 1227859 - DNA, 25 bp, Homo sapien
tactcttgtcttgcatcagccattg

SEQ ID NO: 1227860 - DNA, 25 bp, Homo sapien
gaaataatggaaggcgtttggctgc

SEQ ID NO: 1227861 - DNA, 25 bp, Homo sapien
tcagagaaataatggaaggcgtttg

SEQ ID NO: 1227862 - DNA, 25 bp, Homo sapien
catttgacactcataggctgtgcta

SEQ ID NO: 1227863 - DNA, 25 bp, Homo sapien
taaggaaagtggaccctgctgggtc

SEQ ID NO: 1227864 - DNA, 25 bp, Homo sapien
cctgcttatatgtagcagagactat

SEQ ID NO: 1227865 - DNA, 25 bp, Homo sapien
caagtttccaatccaataagagtca

SEQ ID NO: 1227866 - DNA, 25 bp, Homo sapien
gggcctttgttgccccatggcttct

SEQ ID NO: 1227867 - DNA, 25 bp, Homo sapien
gcctttgttgccccatggcttctgt

SEQ ID NO: 1227868 - DNA, 25 bp, Homo sapien
ggcctttgttgccccatggcttctg

SEQ ID NO: 1227869 - DNA, 25 bp, Homo sapien
cctttgttgccccatggcttctgtt

SEQ ID NO: 1227870 - DNA, 25 bp, Homo sapien
gatcgtttctgctgagtcaaatctc

SEQ ID NO: 1227871 - DNA, 25 bp, Homo sapien
agagatcgtttctgctgagtcaaat

SEQ ID NO: 1227872 - DNA, 25 bp, Homo sapien
cagagatcgtttctgctgagtcaaa

SEQ ID NO: 1227873 - DNA, 25 bp, Homo sapien
gagatcgtttctgctgagtcaaatc

SEQ ID NO: 1227874 - DNA, 25 bp, Homo sapien
tcgaatttgttctaaggcactgggt

SEQ ID NO: 1227875 - DNA, 25 bp, Homo sapien
cgaatttgttctaaggcactgggtt

SEQ ID NO: 1227876 - DNA, 25 bp, Homo sapien
gagctaactgctgcatccgcattct

SEQ ID NO: 1227877 - DNA, 25 bp, Homo sapien
gccgtctgataacaaaagaggctgt

SEQ ID NO: 1227878 - DNA, 25 bp, Homo sapien
gaggctgttccgctgcttgatggca

SEQ ID NO: 1227879 - DNA, 25 bp, Homo sapien
ccgcattcttggagccgtctgataa

SEQ ID NO: 1227880 - DNA, 25 bp, Homo sapien
caaaacttatctgagctgcttccgc

SEQ ID NO: 1227881 - DNA, 25 bp, Homo sapien
tgggttctcagttcaatggcagact

SEQ ID NO: 1227882 - DNA, 25 bp, Homo sapien
cagctgcctgacaaagcctttgggt

SEQ ID NO: 1227883 - DNA, 25 bp, Homo sapien
taaacttgaggattttcgcaggagc

SEQ ID NO: 1227884 - DNA, 25 bp, Homo sapien
tcagattcatgcttatagtctgaat

SEQ ID NO: 1227885 - DNA, 25 bp, Homo sapien
cagattcatgcttatagtctgaata

SEQ ID NO: 1227886 - DNA, 25 bp, Homo sapien
ctgatgccaggaacttatctgcatt

SEQ ID NO: 1227887 - DNA, 25 bp, Homo sapien
tttggctccactcatcatcttttcc

SEQ ID NO: 1227888 - DNA, 25 bp, Homo sapien
ttgcctggtgctttggttcccagag

SEQ ID NO: 1227889 - DNA, 25 bp, Homo sapien
gcagattcctttgcctggtgctttg

SEQ ID NO: 1227890 - DNA, 25 bp, Homo sapien
tccaagcactggcagattcctttgc

SEQ ID NO: 1227891 - DNA, 25 bp, Homo sapien
catcccagcaggatgttaaccttct

SEQ ID NO: 1227892 - DNA, 25 bp, Homo sapien
acatacagaatcctgactgggagaa

SEQ ID NO: 1227893 - DNA, 25 bp, Homo sapien
ttacttcctaatacatccatgcaca

SEQ ID NO: 1227894 - DNA, 25 bp, Homo sapien
cagcaggatgttaaccttctcaact

SEQ ID NO: 1227895 - DNA, 25 bp, Homo sapien
tgacatcgttcaaagtccttcacaa

SEQ ID NO: 1227896 - DNA, 25 bp, Homo sapien
tctgacatcgttcaaagtccttcac

SEQ ID NO: 1227897 - DNA, 25 bp, Homo sapien
aatctgacatcgttcaaagtccttc

SEQ ID NO: 1227898 - DNA, 25 bp, Homo sapien
aaaatctgacatcgttcaaagtcct

SEQ ID NO: 1227899 - DNA, 25 bp, Homo sapien
agacctgttagtcaacgaccccaag

SEQ ID NO: 1227900 - DNA, 25 bp, Homo sapien
ttaaagcctgcgatggaatgctctg

SEQ ID NO: 1227901 - DNA, 25 bp, Homo sapien
ttttgttgagggacatgatgtcatc

SEQ ID NO: 1227902 - DNA, 25 bp, Homo sapien
tcaggatccatctggtagacctgtt

SEQ ID NO: 1227903 - DNA, 25 bp, Homo sapien
cagcgacgtgtggtattatttttcc

SEQ ID NO: 1227904 - DNA, 25 bp, Homo sapien
ccctggccccagttggatgtgattt

SEQ ID NO: 1227905 - DNA, 25 bp, Homo sapien
tgtaaggatcctggacaaattgcac

SEQ ID NO: 1227906 - DNA, 25 bp, Homo sapien
tattcaatgtttgtaaggatcctgg

SEQ ID NO: 1227907 - DNA, 25 bp, Homo sapien
tagtgggcctgggaatacattcaac

SEQ ID NO: 1227908 - DNA, 25 bp, Homo sapien
tagtgttcatcaagttggaccttgg

SEQ ID NO: 1227909 - DNA, 25 bp, Homo sapien
tcatctgtgattagtacatggctat

SEQ ID NO: 1227910 - DNA, 25 bp, Homo sapien
tagatattagacatacacatgctcc

SEQ ID NO: 1227911 - DNA, 25 bp, Homo sapien
ctcctttaacctcagtatcagaaag

SEQ ID NO: 1227912 - DNA, 25 bp, Homo sapien
atggtctaattctcctttaacctca

SEQ ID NO: 1227913 - DNA, 25 bp, Homo sapien
ctttaacctcagtatcagaaagcat

SEQ ID NO: 1227914 - DNA, 25 bp, Homo sapien
tatggtctaattctcctttaacctc

SEQ ID NO: 1227915 - DNA, 25 bp, Homo sapien
ttcagtatgaattcccctctggcca

SEQ ID NO: 1227916 - DNA, 25 bp, Homo sapien
ttgatgtgtcagaaatactttacaa

SEQ ID NO: 1227917 - DNA, 25 bp, Homo sapien
gtgttgtgcaatagcctcccctcag

SEQ ID NO: 1227918 - DNA, 25 bp, Homo sapien
taaagcagctggtttgaatctctgg

SEQ ID NO: 1227919 - DNA, 25 bp, Homo sapien
cctttcttgctgtgtggtgttgtgc

SEQ ID NO: 1227920 - DNA, 25 bp, Homo sapien
gttgccagagtctgtccctttcttg

SEQ ID NO: 1227921 - DNA, 25 bp, Homo sapien
tgccttcacacccgcacaagtaatt

SEQ ID NO: 1227922 - DNA, 25 bp, Homo sapien
cccgcacaagtaattgtcaaagtga

SEQ ID NO: 1227923 - DNA, 25 bp, Homo sapien
cttcacacccgcacaagtaattgtc

SEQ ID NO: 1227924 - DNA, 25 bp, Homo sapien
cacacccgcacaagtaattgtcaaa

SEQ ID NO: 1227925 - DNA, 25 bp, Homo sapien
aagtcaaatgagcatcacactggga

SEQ ID NO: 1227926 - DNA, 25 bp, Homo sapien
ttaaacgaagtgacagagccctggc

SEQ ID NO: 1227927 - DNA, 25 bp, Homo sapien
tcctgggatgactgatgtagcctct

SEQ ID NO: 1227928 - DNA, 25 bp, Homo sapien
cacactgggagataagagaaactgc

SEQ ID NO: 1227929 - DNA, 25 bp, Homo sapien
gatgaaacacatcaggaaaagttca

SEQ ID NO: 1227930 - DNA, 25 bp, Homo sapien
tgatgaaacacatcaggaaaagttc

SEQ ID NO: 1227931 - DNA, 25 bp, Homo sapien
attgatgaaacacatcaggaaaagt

SEQ ID NO: 1227932 - DNA, 25 bp, Homo sapien
tgaaacacatcaggaaaagttcagg

SEQ ID NO: 1227933 - DNA, 25 bp, Homo sapien
ttgtgggggctgcattaaaaggatt

SEQ ID NO: 1227934 - DNA, 25 bp, Homo sapien
tgtgggggctgcattaaaaggattt

SEQ ID NO: 1227935 - DNA, 25 bp, Homo sapien
gtgggggctgcattaaaaggatttc

SEQ ID NO: 1227936 - DNA, 25 bp, Homo sapien
attgtgggggctgcattaaaaggat

SEQ ID NO: 1227937 - DNA, 25 bp, Homo sapien
ggagtactagctagacaaactgtac

SEQ ID NO: 1227938 - DNA, 25 bp, Homo sapien
tcagcaggagtactagctagacaaa

SEQ ID NO: 1227939 - DNA, 25 bp, Homo sapien
gcaggagtactagctagacaaactg

SEQ ID NO: 1227940 - DNA, 25 bp, Homo sapien
tagtcagcaggagtactagctagac

SEQ ID NO: 1227941 - DNA, 25 bp, Homo sapien
ggttttgctgctcagtaagcttatc

SEQ ID NO: 1227942 - DNA, 25 bp, Homo sapien
ttctgtgagggttttgctgctcagt

SEQ ID NO: 1227943 - DNA, 25 bp, Homo sapien
gtaagcttatcagccttgctctggg

SEQ ID NO: 1227944 - DNA, 25 bp, Homo sapien
tgctgctcagtaagcttatcagcct

SEQ ID NO: 1227945 - DNA, 25 bp, Homo sapien
caaactccactgtctacttaacatt

SEQ ID NO: 1227946 - DNA, 25 bp, Homo sapien
catagggaaagtgtacaaactccac

SEQ ID NO: 1227947 - DNA, 25 bp, Homo sapien
tccaactggggcaggcttcaagctg

SEQ ID NO: 1227948 - DNA, 25 bp, Homo sapien
ctccacaagctcaagagacataggg

SEQ ID NO: 1227949 - DNA, 25 bp, Homo sapien
tttctgtccttatcacttggtaagg

SEQ ID NO: 1227950 - DNA, 25 bp, Homo sapien
gtcctttggttcttccgtgtgtgtg

SEQ ID NO: 1227951 - DNA, 25 bp, Homo sapien
tttggttcttccgtgtgtgtgggca

SEQ ID NO: 1227952 - DNA, 25 bp, Homo sapien
caggtggaaggtgtcttctgctttt

SEQ ID NO: 1227953 - DNA, 25 bp, Homo sapien
gaagcaagcacatcttcacattgct

SEQ ID NO: 1227954 - DNA, 25 bp, Homo sapien
gggcaccctttatattcaacatggt

SEQ ID NO: 1227955 - DNA, 25 bp, Homo sapien
ggatttttgggaaatgacggcagca

SEQ ID NO: 1227956 - DNA, 25 bp, Homo sapien
caacatggttggagtgcaacatcac

SEQ ID NO: 1227957 - DNA, 25 bp, Homo sapien
gcagctagatcaactggagtcctga

SEQ ID NO: 1227958 - DNA, 25 bp, Homo sapien
agtagatacggagagtgtgcattcc

SEQ ID NO: 1227959 - DNA, 25 bp, Homo sapien
tccttttccattagccacgcagcag

SEQ ID NO: 1227960 - DNA, 25 bp, Homo sapien
ttttccattagccacgcagcagctg

SEQ ID NO: 1227961 - DNA, 25 bp, Homo sapien
ctgttggcattgagtagatacggag

SEQ ID NO: 1227962 - DNA, 25 bp, Homo sapien
ttgaattggtgcaggccacgttcat

SEQ ID NO: 1227963 - DNA, 25 bp, Homo sapien
gtttgaattggtgcaggccacgttc

SEQ ID NO: 1227964 - DNA, 25 bp, Homo sapien
tgtgggagtttgaattggtgcaggc

SEQ ID NO: 1227965 - DNA, 25 bp, Homo sapien
gagtttgaattggtgcaggccacgt

SEQ ID NO: 1227966 - DNA, 25 bp, Homo sapien
taaatcctggattcagtgagaacag

SEQ ID NO: 1227967 - DNA, 25 bp, Homo sapien
aaagatttgccagggcgttcttcca

SEQ ID NO: 1227968 - DNA, 25 bp, Homo sapien
gaaggaccaatggatcagggctctt

SEQ ID NO: 1227969 - DNA, 25 bp, Homo sapien
cacagagtgagcgtgaaggaccaat

SEQ ID NO: 1227970 - DNA, 25 bp, Homo sapien
tggtatcagcacgcacatacagaga

SEQ ID NO: 1227971 - DNA, 25 bp, Homo sapien
gactgcatcactttcgcaaagtcac

SEQ ID NO: 1227972 - DNA, 25 bp, Homo sapien
cgagatggcatagcctagccagaac

SEQ ID NO: 1227973 - DNA, 25 bp, Homo sapien
acaaggactgcatcactttcgcaaa

SEQ ID NO: 1227974 - DNA, 25 bp, Homo sapien
tcacgagatggcatagcctagccag

SEQ ID NO: 1227975 - DNA, 25 bp, Homo sapien
tggcacccaagcccgtgctgaagct

SEQ ID NO: 1227976 - DNA, 25 bp, Homo sapien
ttaacgacgaggactgctgggagtt

SEQ ID NO: 1227977 - DNA, 25 bp, Homo sapien
tgggagttcccgtggcacccaagcc

SEQ ID NO: 1227978 - DNA, 25 bp, Homo sapien
gactgctgggagttcccgtggcacc

SEQ ID NO: 1227979 - DNA, 25 bp, Homo sapien
agtggcagtggtaggacttcatgtg

SEQ ID NO: 1227980 - DNA, 25 bp, Homo sapien
gaggagcagcttggttagaagctgg

SEQ ID NO: 1227981 - DNA, 25 bp, Homo sapien
cagcaaggatgaccagtggcagtgg

SEQ ID NO: 1227982 - DNA, 25 bp, Homo sapien
tcatgtgggacatgacttggctggc

SEQ ID NO: 1227983 - DNA, 25 bp, Homo sapien
taatgactaaatcccttctttgcac

SEQ ID NO: 1227984 - DNA, 25 bp, Homo sapien
atgactaaatcccttctttgcacaa

SEQ ID NO: 1227985 - DNA, 25 bp, Homo sapien
gactaaatcccttctttgcacaact

SEQ ID NO: 1227986 - DNA, 25 bp, Homo sapien
gtaatgactaaatcccttctttgca

SEQ ID NO: 1227987 - DNA, 25 bp, Homo sapien
tgtaacaggggtatacgtgaaagcc

SEQ ID NO: 1227988 - DNA, 25 bp, Homo sapien
gggtatacgtgaaagccaaatagtc

SEQ ID NO: 1227989 - DNA, 25 bp, Homo sapien
gaaagccaaatagtccatcagctgg

SEQ ID NO: 1227990 - DNA, 25 bp, Homo sapien
gtccatcagctggctatattgcaaa

SEQ ID NO: 1227991 - DNA, 25 bp, Homo sapien
tgtaacctgtatggagtaactctcc

SEQ ID NO: 1227992 - DNA, 25 bp, Homo sapien
cctggtctttgtaacctgtatggag

SEQ ID NO: 1227993 - DNA, 25 bp, Homo sapien
cagagagagtagctctcagttactt

SEQ ID NO: 1227994 - DNA, 25 bp, Homo sapien
ggagtaactctccatagttacagag

SEQ ID NO: 1227995 - DNA, 25 bp, Homo sapien
gcctgagacctatgacatctgggtt

SEQ ID NO: 1227996 - DNA, 25 bp, Homo sapien
tactaagtggaagagtagccaaggc

SEQ ID NO: 1227997 - DNA, 25 bp, Homo sapien
gttacgctaccgtgaaactctctgg

SEQ ID NO: 1227998 - DNA, 25 bp, Homo sapien
cacggaggtggccagataggcttct

SEQ ID NO: 1227999 - DNA, 25 bp, Homo sapien
gctcttctacaagctctaagaatgt

SEQ ID NO: 1228000 - DNA, 25 bp, Homo sapien
tttaatgaccgctcttctacaagct

SEQ ID NO: 1228001 - DNA, 25 bp, Homo sapien
tccaaagagacagatagcttttgtc

SEQ ID NO: 1228002 - DNA, 25 bp, Homo sapien
tgtaatgcagtggatgagcccagag

SEQ ID NO: 1228003 - DNA, 25 bp, Homo sapien
tagcacatataggtatcacaacagt

SEQ ID NO: 1228004 - DNA, 25 bp, Homo sapien
tcacaacagtcattacaccttctcg

SEQ ID NO: 1228005 - DNA, 25 bp, Homo sapien
aagcacttttgttatcccatatggg

SEQ ID NO: 1228006 - DNA, 25 bp, Homo sapien
cccatatgggttgcatgtattgacc

SEQ ID NO: 1228007 - DNA, 25 bp, Homo sapien
ggaactgtagcactttcaactggaa

SEQ ID NO: 1228008 - DNA, 25 bp, Homo sapien
ctggaactcattaagaattcatggg

SEQ ID NO: 1228009 - DNA, 25 bp, Homo sapien
taagagacacattgacatttatgga

SEQ ID NO: 1228010 - DNA, 25 bp, Homo sapien
taaatatgcatattacaccagaatg

SEQ ID NO: 1228011 - DNA, 25 bp, Homo sapien
gatgccttcaaggtggagacctcca

SEQ ID NO: 1228012 - DNA, 25 bp, Homo sapien
atgccttcaaggtggagacctccat

SEQ ID NO: 1228013 - DNA, 25 bp, Homo sapien
acagatgccttcaaggtggagacct

SEQ ID NO: 1228014 - DNA, 25 bp, Homo sapien
gaggaaagcattccacagatgcctt

SEQ ID NO: 1228015 - DNA, 25 bp, Homo sapien
ttctggctgctgcctcatttgaaac

SEQ ID NO: 1228016 - DNA, 25 bp, Homo sapien
ctgcagagttaatgttagttatttt

SEQ ID NO: 1228017 - DNA, 25 bp, Homo sapien
cagagttaatgttagttattttcaa

SEQ ID NO: 1228018 - DNA, 25 bp, Homo sapien
caacaaagaaattccaggtgttcat

SEQ ID NO: 1228019 - DNA, 25 bp, Homo sapien
ctgacccccaaagcaacaaagaaat

SEQ ID NO: 1228020 - DNA, 25 bp, Homo sapien
aagaaagagttctgctgtagggcca

SEQ ID NO: 1228021 - DNA, 25 bp, Homo sapien
gctgaagtagtcgtaggtgtaagta

SEQ ID NO: 1228022 - DNA, 25 bp, Homo sapien
gaaaatcactactgatcatccggtt

SEQ ID NO: 1228023 - DNA, 25 bp, Homo sapien
tctttctagcaggacctactcccaa

SEQ ID NO: 1228024 - DNA, 25 bp, Homo sapien
gcacaagttccagccaaatgtttaa

SEQ ID NO: 1228025 - DNA, 25 bp, Homo sapien
ttgaattgattcccaggcacaagtt

SEQ ID NO: 1228026 - DNA, 25 bp, Homo sapien
ttatcattccatcaacgtatatggc

SEQ ID NO: 1228027 - DNA, 25 bp, Homo sapien
cgtatatggcaatttccttaatcat

SEQ ID NO: 1228028 - DNA, 25 bp, Homo sapien
tagtgaaatgtacagaacacgattg

SEQ ID NO: 1228029 - DNA, 25 bp, Homo sapien
gattgtttacagtatctctgggctg

SEQ ID NO: 1228030 - DNA, 25 bp, Homo sapien
cagcgtggatagtgaaatgtacaga

SEQ ID NO: 1228031 - DNA, 25 bp, Homo sapien
tgaagccgccgtgattgcagctggc

SEQ ID NO: 1228032 - DNA, 25 bp, Homo sapien
ggttgatagtagatcacagttgcag

SEQ ID NO: 1228033 - DNA, 25 bp, Homo sapien
caaatggattttgcagagatagtcg

SEQ ID NO: 1228034 - DNA, 25 bp, Homo sapien
cagagatagtcgaaagccatgccaa

SEQ ID NO: 1228035 - DNA, 25 bp, Homo sapien
agccatgccaatttggcctcttttg

SEQ ID NO: 1228036 - DNA, 25 bp, Homo sapien
tgctgaacttcatcggagtcccatg

SEQ ID NO: 1228037 - DNA, 25 bp, Homo sapien
ctggaagagacccaacaattacaga

SEQ ID NO: 1228038 - DNA, 25 bp, Homo sapien
tacagagggctgcatcatacagact

SEQ ID NO: 1228039 - DNA, 25 bp, Homo sapien
ctgcatgtaatttcagcctgaactt

SEQ ID NO: 1228040 - DNA, 25 bp, Homo sapien
ctctgatgttctgaacttcggtgtt

SEQ ID NO: 1228041 - DNA, 25 bp, Homo sapien
cactctcatatctgtggatgctcat

SEQ ID NO: 1228042 - DNA, 25 bp, Homo sapien
tcattgttgatataggatatttgcc

SEQ ID NO: 1228043 - DNA, 25 bp, Homo sapien
cacactcactctcatatctgtggat

SEQ ID NO: 1228044 - DNA, 25 bp, Homo sapien
cttccagctcaacatctttcaaagg

SEQ ID NO: 1228045 - DNA, 25 bp, Homo sapien
gggatggctctcagtcccgaaatga

SEQ ID NO: 1228046 - DNA, 25 bp, Homo sapien
gaaaaggtggcttggtgcaaatcat

SEQ ID NO: 1228047 - DNA, 25 bp, Homo sapien
agccacagacatcgctcctcttcca

SEQ ID NO: 1228048 - DNA, 25 bp, Homo sapien
tcctgcggcatgagaatatacattt

SEQ ID NO: 1228049 - DNA, 25 bp, Homo sapien
gccagatttctatattcgtgccaaa

SEQ ID NO: 1228050 - DNA, 25 bp, Homo sapien
gctctccagctttcggacatatgag

SEQ ID NO: 1228051 - DNA, 25 bp, Homo sapien
ttttgcaaaaccaacttcctgcggc

SEQ ID NO: 1228052 - DNA, 25 bp, Homo sapien
ctgcagcttttagaagggatgttaa

SEQ ID NO: 1228053 - DNA, 25 bp, Homo sapien
tttgtaataatgcttgcaattcggc

SEQ ID NO: 1228054 - DNA, 25 bp, Homo sapien
tcggcattgcctttcatcagggctt

SEQ ID NO: 1228055 - DNA, 25 bp, Homo sapien
gacaggttttgcagatataccactg

SEQ ID NO: 1228056 - DNA, 25 bp, Homo sapien
cttgtaggtttattgaaagtttgtg

SEQ ID NO: 1228057 - DNA, 25 bp, Homo sapien
attaagtaacttctagcaaccttgg

SEQ ID NO: 1228058 - DNA, 25 bp, Homo sapien
tcttttaggtcatgggccacttttc

SEQ ID NO: 1228059 - DNA, 25 bp, Homo sapien
tgtcatccccctggcataacagagg

SEQ ID NO: 1228060 - DNA, 25 bp, Homo sapien
tcagcaggtcatgttgaaaacaaca

SEQ ID NO: 1228061 - DNA, 25 bp, Homo sapien
gctaccatgactccgcaataacaga

SEQ ID NO: 1228062 - DNA, 25 bp, Homo sapien
ggttgatgggccatgctaccatgac

SEQ ID NO: 1228063 - DNA, 25 bp, Homo sapien
cagatagcacttgggaaaatcagca

SEQ ID NO: 1228064 - DNA, 25 bp, Homo sapien
tgttggagctgttaacttgaagtgt

SEQ ID NO: 1228065 - DNA, 25 bp, Homo sapien
tctgatgagtggaggatcggagcct

SEQ ID NO: 1228066 - DNA, 25 bp, Homo sapien
gcaactgcagtactatgagcagctc

SEQ ID NO: 1228067 - DNA, 25 bp, Homo sapien
tggtaggagggtagaaagcaactgc

SEQ ID NO: 1228068 - DNA, 25 bp, Homo sapien
taaagaaggcgagttttatgtctct

SEQ ID NO: 1228069 - DNA, 25 bp, Homo sapien
gcgagttttatgtctcttttgacac

SEQ ID NO: 1228070 - DNA, 25 bp, Homo sapien
ttgacacacaaggactcaaatccca

SEQ ID NO: 1228071 - DNA, 25 bp, Homo sapien
tcccatcattgtctttacgtcatcc

SEQ ID NO: 1228072 - DNA, 25 bp, Homo sapien
agctaccacgaacatagccatttgc

SEQ ID NO: 1228073 - DNA, 25 bp, Homo sapien
agcaagctcagctaccacgaacata

SEQ ID NO: 1228074 - DNA, 25 bp, Homo sapien
gctcagctaccacgaacatagccat

SEQ ID NO: 1228075 - DNA, 25 bp, Homo sapien
ctacaggcttttagcaagctcagct

SEQ ID NO: 1228076 - DNA, 25 bp, Homo sapien
gggccgcgcacgcaaatacgcaggc

SEQ ID NO: 1228077 - DNA, 25 bp, Homo sapien
agtcatgcggttccgcccctgcgtt

SEQ ID NO: 1228078 - DNA, 25 bp, Homo sapien
acgcaaatacgcaggcacgcgcggg

SEQ ID NO: 1228079 - DNA, 25 bp, Homo sapien
gatgccactgccagtcatgcggttc

SEQ ID NO: 1228080 - DNA, 25 bp, Homo sapien
gagaggcgctatgcctccctgccgg

SEQ ID NO: 1228081 - DNA, 25 bp, Homo sapien
gcgacacgatacagcgctgcagaac

SEQ ID NO: 1228082 - DNA, 25 bp, Homo sapien
tcagagaggcgctatgcctccctgc

SEQ ID NO: 1228083 - DNA, 25 bp, Homo sapien
ctgccggcgacacgatacagcgctg

SEQ ID NO: 1228084 - DNA, 25 bp, Homo sapien
ctccacttgggcaatactggggtaa

SEQ ID NO: 1228085 - DNA, 25 bp, Homo sapien
tccacttgggcaatactggggtaac

SEQ ID NO: 1228086 - DNA, 25 bp, Homo sapien
cacttgggcaatactggggtaaccg

SEQ ID NO: 1228087 - DNA, 25 bp, Homo sapien
cttgggcaatactggggtaaccgag

SEQ ID NO: 1228088 - DNA, 25 bp, Homo sapien
cccgatagaaagaggaagactaacg

SEQ ID NO: 1228089 - DNA, 25 bp, Homo sapien
gtggtggaccagtgaccgcccgata

SEQ ID NO: 1228090 - DNA, 25 bp, Homo sapien
acacaaggccccaaagcgagggtgg

SEQ ID NO: 1228091 - DNA, 25 bp, Homo sapien
gtggcgctgcccgtgcatctacagc

SEQ ID NO: 1228092 - DNA, 25 bp, Homo sapien
tggcaggaaaccatgcaccgtcttg

SEQ ID NO: 1228093 - DNA, 25 bp, Homo sapien
aattcacttggcaggaaaccatgca

SEQ ID NO: 1228094 - DNA, 25 bp, Homo sapien
gctgactcaaactaattggattgtt

SEQ ID NO: 1228095 - DNA, 25 bp, Homo sapien
ccatgcaccgtcttgtgatcttcca

SEQ ID NO: 1228096 - DNA, 25 bp, Homo sapien
gtctcggctcaaagaccactttctt

SEQ ID NO: 1228097 - DNA, 25 bp, Homo sapien
tcggctcaaagaccactttcttcga

SEQ ID NO: 1228098 - DNA, 25 bp, Homo sapien
ccgtctcggctcaaagaccactttc

SEQ ID NO: 1228099 - DNA, 25 bp, Homo sapien
ggctcaaagaccactttcttcgaaa

SEQ ID NO: 1228100 - DNA, 25 bp, Homo sapien
gtaacagctaagagaccttggccaa

SEQ ID NO: 1228101 - DNA, 25 bp, Homo sapien
agtaacagctaagagaccttggcca

SEQ ID NO: 1228102 - DNA, 25 bp, Homo sapien
tatgtgttggaatgttaaatcttga

SEQ ID NO: 1228103 - DNA, 25 bp, Homo sapien
ggaggagctgttggataaataattt

SEQ ID NO: 1228104 - DNA, 25 bp, Homo sapien
cattcttaatccttgtccagaatca

SEQ ID NO: 1228105 - DNA, 25 bp, Homo sapien
ttgatccacattcttaatccttgtc

SEQ ID NO: 1228106 - DNA, 25 bp, Homo sapien
ctggcaaaacttggtccaacagtgt

SEQ ID NO: 1228107 - DNA, 25 bp, Homo sapien
catataaaaacgtccttgaagttct

SEQ ID NO: 1228108 - DNA, 25 bp, Homo sapien
caaggcatttgcatagtatgcctga

SEQ ID NO: 1228109 - DNA, 25 bp, Homo sapien
gcatagtatgcctgataagaaaaaa

SEQ ID NO: 1228110 - DNA, 25 bp, Homo sapien
tctccttaatactaagttaatgaaa

SEQ ID NO: 1228111 - DNA, 25 bp, Homo sapien
caaataatgcttagtgcacatggag

SEQ ID NO: 1228112 - DNA, 25 bp, Homo sapien
tggtgagtatggtctaaaacgttcg

SEQ ID NO: 1228113 - DNA, 25 bp, Homo sapien
cgttcgatgatctgttcaaatagct

SEQ ID NO: 1228114 - DNA, 25 bp, Homo sapien
ccatgaagctggtccaatgatttca

SEQ ID NO: 1228115 - DNA, 25 bp, Homo sapien
acagcaatgggaccatttagatttg

SEQ ID NO: 1228116 - DNA, 25 bp, Homo sapien
gctacagtaatgattagtgagaaat

SEQ ID NO: 1228117 - DNA, 25 bp, Homo sapien
aaaaattagtggaacttagctacag

SEQ ID NO: 1228118 - DNA, 25 bp, Homo sapien
aagtacagcaatgggaccatttaga

SEQ ID NO: 1228119 - DNA, 25 bp, Homo sapien
taacatttatagaacgtgacacgca

SEQ ID NO: 1228120 - DNA, 25 bp, Homo sapien
caaagccataaaaaggtcccaatga

SEQ ID NO: 1228121 - DNA, 25 bp, Homo sapien
tgtgtaatgctttcaaataccttga

SEQ ID NO: 1228122 - DNA, 25 bp, Homo sapien
gattttaatacccatcccttggcaa

SEQ ID NO: 1228123 - DNA, 25 bp, Homo sapien
cataccatacagctctaatcaaaag

SEQ ID NO: 1228124 - DNA, 25 bp, Homo sapien
aacaaagcccaactacgtgttgtct

SEQ ID NO: 1228125 - DNA, 25 bp, Homo sapien
tatcataatccctatggcaatcaga

SEQ ID NO: 1228126 - DNA, 25 bp, Homo sapien
caatgatataggtaggttaaaagca

SEQ ID NO: 1228127 - DNA, 25 bp, Homo sapien
gggcacttcatttaaagagtccaaa

SEQ ID NO: 1228128 - DNA, 25 bp, Homo sapien
gtagggttccttactagcatacttg

SEQ ID NO: 1228129 - DNA, 25 bp, Homo sapien
gagagggctctcctactatcatgct

SEQ ID NO: 1228130 - DNA, 25 bp, Homo sapien
tcatgcttcagataggaattctaag

SEQ ID NO: 1228131 - DNA, 25 bp, Homo sapien
gaatggtgctcgttctatatcatac

SEQ ID NO: 1228132 - DNA, 25 bp, Homo sapien
ccctgatttctgtaagacatatgct

SEQ ID NO: 1228133 - DNA, 25 bp, Homo sapien
tgctatatataatgaactgacttcc

SEQ ID NO: 1228134 - DNA, 25 bp, Homo sapien
gggaatttcatacatggagtaacct

SEQ ID NO: 1228135 - DNA, 25 bp, Homo sapien
ctgtcaaaccatacattggagattc

SEQ ID NO: 1228136 - DNA, 25 bp, Homo sapien
gtcaaaccatacattggagattcct

SEQ ID NO: 1228137 - DNA, 25 bp, Homo sapien
caaaccatacattggagattcctcc

SEQ ID NO: 1228138 - DNA, 25 bp, Homo sapien
tgtcaaaccatacattggagattcc

SEQ ID NO: 1228139 - DNA, 25 bp, Homo sapien
acatcaattgattcaaggtgttctg

SEQ ID NO: 1228140 - DNA, 25 bp, Homo sapien
ggtgttctgggcagtcattggttat

SEQ ID NO: 1228141 - DNA, 25 bp, Homo sapien
aaggtgttctgggcagtcattggtt

SEQ ID NO: 1228142 - DNA, 25 bp, Homo sapien
gacatcaattgattcaaggtgttct

SEQ ID NO: 1228143 - DNA, 25 bp, Homo sapien
caatcaaatcagtaagcacttgaca

SEQ ID NO: 1228144 - DNA, 25 bp, Homo sapien
tcttcttgatgccactttttacttc

SEQ ID NO: 1228145 - DNA, 25 bp, Homo sapien
atcaaatcagtaagcacttgacaca

SEQ ID NO: 1228146 - DNA, 25 bp, Homo sapien
catcaatcaaatcagtaagcacttg

SEQ ID NO: 1228147 - DNA, 25 bp, Homo sapien
caaaagtgaacagtgataaattacc

SEQ ID NO: 1228148 - DNA, 25 bp, Homo sapien
tctgaaactatgaatgcatcgaatg

SEQ ID NO: 1228149 - DNA, 25 bp, Homo sapien
aaaatcaattaaagtttcatgcgct

SEQ ID NO: 1228150 - DNA, 25 bp, Homo sapien
taatgttccaagtaagatttgatgt

SEQ ID NO: 1228151 - DNA, 25 bp, Homo sapien
cattatgccatcacgttctagtctc

SEQ ID NO: 1228152 - DNA, 25 bp, Homo sapien
tccactttacagattaggtagcaaa

SEQ ID NO: 1228153 - DNA, 25 bp, Homo sapien
tacagccaactactgtccagacaga

SEQ ID NO: 1228154 - DNA, 25 bp, Homo sapien
taagtggtgagccaactaggaagtg

SEQ ID NO: 1228155 - DNA, 25 bp, Homo sapien
caaagtacaattcttatgacttgaa

SEQ ID NO: 1228156 - DNA, 25 bp, Homo sapien
aaaactgaacagagtatttactgag

SEQ ID NO: 1228157 - DNA, 25 bp, Homo sapien
ttcctattgccaccacaccacttca

SEQ ID NO: 1228158 - DNA, 25 bp, Homo sapien
taaaaactgaacagagtatttactg

SEQ ID NO: 1228159 - DNA, 25 bp, Homo sapien
tccctctaagaaaatataggtgctc

SEQ ID NO: 1228160 - DNA, 25 bp, Homo sapien
tatgggcaatctggctggtaagaca

SEQ ID NO: 1228161 - DNA, 25 bp, Homo sapien
tgtcaatcagaaaactaccctggag

SEQ ID NO: 1228162 - DNA, 25 bp, Homo sapien
gatttaatcaatcacattgtcggac

SEQ ID NO: 1228163 - DNA, 25 bp, Homo sapien
ggagatcttcttgaatacccttaaa

SEQ ID NO: 1228164 - DNA, 25 bp, Homo sapien
catcttttgtgcattcacgtaatat

SEQ ID NO: 1228165 - DNA, 25 bp, Homo sapien
taaaacatagctttagcaacctatt

SEQ ID NO: 1228166 - DNA, 25 bp, Homo sapien
tctgggctgtaaacttatacatcag

SEQ ID NO: 1228167 - DNA, 25 bp, Homo sapien
aaaagaatttgtcttgcacagggta

SEQ ID NO: 1228168 - DNA, 25 bp, Homo sapien
tgtctgtacaggatctcatttcacc

SEQ ID NO: 1228169 - DNA, 25 bp, Homo sapien
tactttggagtacgcatactacttg

SEQ ID NO: 1228170 - DNA, 25 bp, Homo sapien
gcacagggtaactgagggactcaca

SEQ ID NO: 1228171 - DNA, 25 bp, Homo sapien
caaggaaagcaggtctacggatcaa

SEQ ID NO: 1228172 - DNA, 25 bp, Homo sapien
gatggaaggatgcaaagcaactgct

SEQ ID NO: 1228173 - DNA, 25 bp, Homo sapien
ttttcttggctcgagataagcacca

SEQ ID NO: 1228174 - DNA, 25 bp, Homo sapien
tcaactgcttatcccacgtggtggc

SEQ ID NO: 1228175 - DNA, 25 bp, Homo sapien
tgaacatcccctgtaatgagccttt

SEQ ID NO: 1228176 - DNA, 25 bp, Homo sapien
catttttgacctgtccaagctagac

SEQ ID NO: 1228177 - DNA, 25 bp, Homo sapien
gatactaggatttgggatgtacacc

SEQ ID NO: 1228178 - DNA, 25 bp, Homo sapien
ttttcatagctaaaccccacagatg

SEQ ID NO: 1228179 - DNA, 25 bp, Homo sapien
tgttagaacaacagtccagagcctt

SEQ ID NO: 1228180 - DNA, 25 bp, Homo sapien
gctgggctatagagaaaacgtgtac

SEQ ID NO: 1228181 - DNA, 25 bp, Homo sapien
tgaagttttagctcccagctgggct

SEQ ID NO: 1228182 - DNA, 25 bp, Homo sapien
ccagtgtagttccagaaagacttga

SEQ ID NO: 1228183 - DNA, 25 bp, Homo sapien
gagcctgaattatgtgtctgccaaa

SEQ ID NO: 1228184 - DNA, 25 bp, Homo sapien
tatgttagtgtgaccaaggaaccaa

SEQ ID NO: 1228185 - DNA, 25 bp, Homo sapien
gaatgattagtgtgctccaagccca

SEQ ID NO: 1228186 - DNA, 25 bp, Homo sapien
tccacacgcgatagataacaaggct

SEQ ID NO: 1228187 - DNA, 25 bp, Homo sapien
aacaaagtgtctctgtggtgcacgc

SEQ ID NO: 1228188 - DNA, 25 bp, Homo sapien
tgtgatactcccaagctgaatgtct

SEQ ID NO: 1228189 - DNA, 25 bp, Homo sapien
actagttctagtcctgcctgtgata

SEQ ID NO: 1228190 - DNA, 25 bp, Homo sapien
tggtgcacgcatactaatgagtcag

SEQ ID NO: 1228191 - DNA, 25 bp, Homo sapien
tgattccaggcctgacgacaagtca

SEQ ID NO: 1228192 - DNA, 25 bp, Homo sapien
taagtttcacagacaaaggcctgcg

SEQ ID NO: 1228193 - DNA, 25 bp, Homo sapien
cagtgtgacattcctaagcttgaga

SEQ ID NO: 1228194 - DNA, 25 bp, Homo sapien
tcaccactggtaaagagagctgtgc

SEQ ID NO: 1228195 - DNA, 25 bp, Homo sapien
ccacatcttgatgatttctatatgc

SEQ ID NO: 1228196 - DNA, 25 bp, Homo sapien
gagcaaatactcctgccacatcttg

SEQ ID NO: 1228197 - DNA, 25 bp, Homo sapien
gcagatgctttattcagaaaactag

SEQ ID NO: 1228198 - DNA, 25 bp, Homo sapien
ttctatatgctaaatgtattgccat

SEQ ID NO: 1228199 - DNA, 25 bp, Homo sapien
gagtgctgtctgaggtatacattgg

SEQ ID NO: 1228200 - DNA, 25 bp, Homo sapien
taccaaggcttcaataactaatggg

SEQ ID NO: 1228201 - DNA, 25 bp, Homo sapien
gggacttagctggttcctggcatca

SEQ ID NO: 1228202 - DNA, 25 bp, Homo sapien
gttcctggcatcactcaatttgtaa

SEQ ID NO: 1228203 - DNA, 25 bp, Homo sapien
tgcccaagaatgaagaactaactca

SEQ ID NO: 1228204 - DNA, 25 bp, Homo sapien
aggaagtacaccattactcttctga

SEQ ID NO: 1228205 - DNA, 25 bp, Homo sapien
taattcaggaagtacaccattactc

SEQ ID NO: 1228206 - DNA, 25 bp, Homo sapien
tcatctgcagtaccatgacactgaa

SEQ ID NO: 1228207 - DNA, 25 bp, Homo sapien
tccataacttcaatatgtctaactc

SEQ ID NO: 1228208 - DNA, 25 bp, Homo sapien
aatccataacttcaatatgtctaac

SEQ ID NO: 1228209 - DNA, 25 bp, Homo sapien
agctttgtaagaatccataacttca

SEQ ID NO: 1228210 - DNA, 25 bp, Homo sapien
gcagctttgtaagaatccataactt

SEQ ID NO: 1228211 - DNA, 25 bp, Homo sapien
tacattaacaaatcactcttgattc

SEQ ID NO: 1228212 - DNA, 25 bp, Homo sapien
cattaacaaatcactcttgattcat

SEQ ID NO: 1228213 - DNA, 25 bp, Homo sapien
aaaaatcacttttcacaaagacatt

SEQ ID NO: 1228214 - DNA, 25 bp, Homo sapien
cttacattaacaaatcactcttgat

SEQ ID NO: 1228215 - DNA, 25 bp, Homo sapien
gctactgtctacagtgataagcatt

SEQ ID NO: 1228216 - DNA, 25 bp, Homo sapien
tttacagaattgtgtctgaaaaatt

SEQ ID NO: 1228217 - DNA, 25 bp, Homo sapien
taagattagctactgtctacagtga

SEQ ID NO: 1228218 - DNA, 25 bp, Homo sapien
attaataagattagctactgtctac

SEQ ID NO: 1228219 - DNA, 25 bp, Homo sapien
gacctgcaagctgtgggaaagtctt

SEQ ID NO: 1228220 - DNA, 25 bp, Homo sapien
taaataccagtaacaacttctcggc

SEQ ID NO: 1228221 - DNA, 25 bp, Homo sapien
tttgggttaacagaaatagagctcc

SEQ ID NO: 1228222 - DNA, 25 bp, Homo sapien
tccactgagaattaggagacctgaa

SEQ ID NO: 1228223 - DNA, 25 bp, Homo sapien
cattatggcagtgtggcacagtgac

SEQ ID NO: 1228224 - DNA, 25 bp, Homo sapien
cagtgacaataacatccataaggag

SEQ ID NO: 1228225 - DNA, 25 bp, Homo sapien
gattgggcctgctatcacactgagg

SEQ ID NO: 1228226 - DNA, 25 bp, Homo sapien
gcagagggagagaccaatgcattcc

SEQ ID NO: 1228227 - DNA, 25 bp, Homo sapien
gaacctacgtggcttctcagggaag

SEQ ID NO: 1228228 - DNA, 25 bp, Homo sapien
gaagaatattttgaccgatgatcag

SEQ ID NO: 1228229 - DNA, 25 bp, Homo sapien
tgtgtggcaatcactgtactaggca

SEQ ID NO: 1228230 - DNA, 25 bp, Homo sapien
gcaaaaaacagaggatcagatccct

SEQ ID NO: 1228231 - DNA, 25 bp, Homo sapien
tgtttgatgtttccaatgttctcct

SEQ ID NO: 1228232 - DNA, 25 bp, Homo sapien
gttctcctctaacatgtttcaaaca

SEQ ID NO: 1228233 - DNA, 25 bp, Homo sapien
tgcttacaatcacagtgtttgatgt

SEQ ID NO: 1228234 - DNA, 25 bp, Homo sapien
tgatgtttccaatgttctcctctaa

SEQ ID NO: 1228235 - DNA, 25 bp, Homo sapien
ttacagtttaggacagttatttcca

SEQ ID NO: 1228236 - DNA, 25 bp, Homo sapien
tacagtttaggacagttatttccat

SEQ ID NO: 1228237 - DNA, 25 bp, Homo sapien
ctttgacatcttcatgttcttgcat

SEQ ID NO: 1228238 - DNA, 25 bp, Homo sapien
gggctttgacatcttcatgttcttg

SEQ ID NO: 1228239 - DNA, 25 bp, Homo sapien
gctttgacatcttcatgttcttgca

SEQ ID NO: 1228240 - DNA, 25 bp, Homo sapien
catgggctttgacatcttcatgttc

SEQ ID NO: 1228241 - DNA, 25 bp, Homo sapien
cattttctaccgtttactagtgaca

SEQ ID NO: 1228242 - DNA, 25 bp, Homo sapien
caatacatggaaatacacacccaca

SEQ ID NO: 1228243 - DNA, 25 bp, Homo sapien
cgttctctgaaaaacctcaatacat

SEQ ID NO: 1228244 - DNA, 25 bp, Homo sapien
ctagctttagtgttgttgttaagaa

SEQ ID NO: 1228245 - DNA, 25 bp, Homo sapien
ttaagagaatgtcttattgacagtt

SEQ ID NO: 1228246 - DNA, 25 bp, Homo sapien
tcttattgacagttagggattccat

SEQ ID NO: 1228247 - DNA, 25 bp, Homo sapien
ttgacagttagggattccataaagg

SEQ ID NO: 1228248 - DNA, 25 bp, Homo sapien
gagaatgtcttattgacagttaggg

SEQ ID NO: 1228249 - DNA, 25 bp, Homo sapien
tggctttccttcagtattttcactt

SEQ ID NO: 1228250 - DNA, 25 bp, Homo sapien
gtattttcacttccctgtgcctttc

SEQ ID NO: 1228251 - DNA, 25 bp, Homo sapien
tccctgtgcctttctttatatttct

SEQ ID NO: 1228252 - DNA, 25 bp, Homo sapien
ccttcagtattttcacttccctgtg

SEQ ID NO: 1228253 - DNA, 25 bp, Homo sapien
ttatttttactatagccttcacgcc

SEQ ID NO: 1228254 - DNA, 25 bp, Homo sapien
catcacaatactcttcaatgttgag

SEQ ID NO: 1228255 - DNA, 25 bp, Homo sapien
taattcatcatcacaatactcttca

SEQ ID NO: 1228256 - DNA, 25 bp, Homo sapien
aggtgtctaattcatcatcacaata

SEQ ID NO: 1228257 - DNA, 25 bp, Homo sapien
caatgtggcgccagccgtgtagaga

SEQ ID NO: 1228258 - DNA, 25 bp, Homo sapien
catggccataagacaatgaatctcg

SEQ ID NO: 1228259 - DNA, 25 bp, Homo sapien
ggccagccttttcgtgcactatgca

SEQ ID NO: 1228260 - DNA, 25 bp, Homo sapien
tgccaataactggagggcagccaga

SEQ ID NO: 1228261 - DNA, 25 bp, Homo sapien
tacagtggctgtctgctaaatctaa

SEQ ID NO: 1228262 - DNA, 25 bp, Homo sapien
gttgtgtcaagtaagttaagcctcc

SEQ ID NO: 1228263 - DNA, 25 bp, Homo sapien
tgtgtgttagcaattctgcatgaca

SEQ ID NO: 1228264 - DNA, 25 bp, Homo sapien
gaaagtgagctcatgtggagagcaa

SEQ ID NO: 1228265 - DNA, 25 bp, Homo sapien
tatgaatcaaactgccaagcccatc

SEQ ID NO: 1228266 - DNA, 25 bp, Homo sapien
cagggaagatattaattgcatgtgt

SEQ ID NO: 1228267 - DNA, 25 bp, Homo sapien
taagttactggcacagggtagacag

SEQ ID NO: 1228268 - DNA, 25 bp, Homo sapien
tggaatgtcatctcaatcaccctga

SEQ ID NO: 1228269 - DNA, 25 bp, Homo sapien
tttaaggaagccactagccagccta

SEQ ID NO: 1228270 - DNA, 25 bp, Homo sapien
caaatgatctcatggccctaggaac

SEQ ID NO: 1228271 - DNA, 25 bp, Homo sapien
tggaactctagagggccagtacctg

SEQ ID NO: 1228272 - DNA, 25 bp, Homo sapien
ccagtacctggtggccatttagtcc

SEQ ID NO: 1228273 - DNA, 25 bp, Homo sapien
gtagataaattatcccacgcctcaa

SEQ ID NO: 1228274 - DNA, 25 bp, Homo sapien
tctgtgcttccgtgaaaattttcac

SEQ ID NO: 1228275 - DNA, 25 bp, Homo sapien
tgcattgtctgaacataccacagtt

SEQ ID NO: 1228276 - DNA, 25 bp, Homo sapien
cagtcgatgaaacgacattggcaca

SEQ ID NO: 1228277 - DNA, 25 bp, Homo sapien
ggctctcggtaaacaccagtattca

SEQ ID NO: 1228278 - DNA, 25 bp, Homo sapien
gctctcggtaaacaccagtattcat

SEQ ID NO: 1228279 - DNA, 25 bp, Homo sapien
ttaggctctcggtaaacaccagtat

SEQ ID NO: 1228280 - DNA, 25 bp, Homo sapien
taggctctcggtaaacaccagtatt

SEQ ID NO: 1228281 - DNA, 25 bp, Homo sapien
catagatataccttgtccctgcaaa

SEQ ID NO: 1228282 - DNA, 25 bp, Homo sapien
tattttcacaagacaatcatgcttc

SEQ ID NO: 1228283 - DNA, 25 bp, Homo sapien
tgggatgggaagatagcctgagccc

SEQ ID NO: 1228284 - DNA, 25 bp, Homo sapien
aactaaacatattaggtgggcatag

SEQ ID NO: 1228285 - DNA, 25 bp, Homo sapien
aatttcttgagccacagtccatgta

SEQ ID NO: 1228286 - DNA, 25 bp, Homo sapien
gccacagtccatgtaagaacagact

SEQ ID NO: 1228287 - DNA, 25 bp, Homo sapien
ctggcattccagatagtctaacatt

SEQ ID NO: 1228288 - DNA, 25 bp, Homo sapien
ggcattccagatagtctaacatttt

SEQ ID NO: 1228289 - DNA, 25 bp, Homo sapien
tgcttcttgctgccgcttggtgaca

SEQ ID NO: 1228290 - DNA, 25 bp, Homo sapien
gcttcttgctgccgcttggtgacac

SEQ ID NO: 1228291 - DNA, 25 bp, Homo sapien
ttgcttcttgctgccgcttggtgac

SEQ ID NO: 1228292 - DNA, 25 bp, Homo sapien
ccctgaacccagtgaaatgtagata

SEQ ID NO: 1228293 - DNA, 25 bp, Homo sapien
tctctaccaaagtgcagaatgctgg

SEQ ID NO: 1228294 - DNA, 25 bp, Homo sapien
tctatgcctcatgagaccgtgtgtg

SEQ ID NO: 1228295 - DNA, 25 bp, Homo sapien
tggaacctcactctaatctcagcag

SEQ ID NO: 1228296 - DNA, 25 bp, Homo sapien
tacttcacctatgggtcttggcctc

SEQ ID NO: 1228297 - DNA, 25 bp, Homo sapien
ttactatacatcagcactgtgtgtg

SEQ ID NO: 1228298 - DNA, 25 bp, Homo sapien
ggtgaaaagtcctactgaaggtcaa

SEQ ID NO: 1228299 - DNA, 25 bp, Homo sapien
gaattcagagttcgcattagaaccc

SEQ ID NO: 1228300 - DNA, 25 bp, Homo sapien
agctcgtattgtactgtgttgtctt

SEQ ID NO: 1228301 - DNA, 25 bp, Homo sapien
tagctcgtattgtactgtgttgtct

SEQ ID NO: 1228302 - DNA, 25 bp, Homo sapien
ctcgtattgtactgtgttgtctttt

SEQ ID NO: 1228303 - DNA, 25 bp, Homo sapien
catagctcgtattgtactgtgttgt

SEQ ID NO: 1228304 - DNA, 25 bp, Homo sapien
gagggcaatccatacagatccatac

SEQ ID NO: 1228305 - DNA, 25 bp, Homo sapien
gctgcctagaagagggcaatccata

SEQ ID NO: 1228306 - DNA, 25 bp, Homo sapien
agggcaatccatacagatccataca

SEQ ID NO: 1228307 - DNA, 25 bp, Homo sapien
caagatccgtagagtcttatttgga

SEQ ID NO: 1228308 - DNA, 25 bp, Homo sapien
gacgatccaagatccgtagagtctt

SEQ ID NO: 1228309 - DNA, 25 bp, Homo sapien
tatagtctggacgatccaagatccg

SEQ ID NO: 1228310 - DNA, 25 bp, Homo sapien
tcaagtcatatagtctggacgatcc

SEQ ID NO: 1228311 - DNA, 25 bp, Homo sapien
aaatgtatctcttgatagatgtatg

SEQ ID NO: 1228312 - DNA, 25 bp, Homo sapien
gaggcagggttaagtggcaattaaa

SEQ ID NO: 1228313 - DNA, 25 bp, Homo sapien
tcttgatagatgtatgggatttcct

SEQ ID NO: 1228314 - DNA, 25 bp, Homo sapien
ttccccaattattcactaacacatg

SEQ ID NO: 1228315 - DNA, 25 bp, Homo sapien
agtcatttcctctgcgctctggtag

SEQ ID NO: 1228316 - DNA, 25 bp, Homo sapien
ctgtaatgaactggccttggaaggt

SEQ ID NO: 1228317 - DNA, 25 bp, Homo sapien
aaggtctttgatgctgcctttgcat

SEQ ID NO: 1228318 - DNA, 25 bp, Homo sapien
catactgtatatgagctttctgctc

SEQ ID NO: 1228319 - DNA, 25 bp, Homo sapien
gaagcacttatggtgttttagtcaa

SEQ ID NO: 1228320 - DNA, 25 bp, Homo sapien
ggtacctgctatatatggtctctaa

SEQ ID NO: 1228321 - DNA, 25 bp, Homo sapien
catacctcctgtttatgaagcactt

SEQ ID NO: 1228322 - DNA, 25 bp, Homo sapien
aatgttatggtacctgctatatatg

SEQ ID NO: 1228323 - DNA, 25 bp, Homo sapien
ttgatgctcacaagctcattacatt

SEQ ID NO: 1228324 - DNA, 25 bp, Homo sapien
catacattgatgctcacaagctcat

SEQ ID NO: 1228325 - DNA, 25 bp, Homo sapien
cattgatgctcacaagctcattaca

SEQ ID NO: 1228326 - DNA, 25 bp, Homo sapien
agtaacatacattgatgctcacaag

SEQ ID NO: 1228327 - DNA, 25 bp, Homo sapien
tgctttttaatgaacgtttattcac

SEQ ID NO: 1228328 - DNA, 25 bp, Homo sapien
aaacatacctctcacatcctcagag

SEQ ID NO: 1228329 - DNA, 25 bp, Homo sapien
acaaaacatacctctcacatcctca

SEQ ID NO: 1228330 - DNA, 25 bp, Homo sapien
gctttttaatgaacgtttattcaca

SEQ ID NO: 1228331 - DNA, 25 bp, Homo sapien
gctgactcagttacatcctgcctag

SEQ ID NO: 1228332 - DNA, 25 bp, Homo sapien
gagatggaactctaaaccaacaatt

SEQ ID NO: 1228333 - DNA, 25 bp, Homo sapien
ttttgaccacactaagagatggaac

SEQ ID NO: 1228334 - DNA, 25 bp, Homo sapien
caacacatgagttccattagctgac

SEQ ID NO: 1228335 - DNA, 25 bp, Homo sapien
gatcagtggcagtccgaaaagccca

SEQ ID NO: 1228336 - DNA, 25 bp, Homo sapien
gaaagtagctatcccaaatggattg

SEQ ID NO: 1228337 - DNA, 25 bp, Homo sapien
cagacagctgcttactttccctagt

SEQ ID NO: 1228338 - DNA, 25 bp, Homo sapien
gatgaggatcccttatctggatgga

SEQ ID NO: 1228339 - DNA, 25 bp, Homo sapien
ccttggaaggctgcactttgccgta

SEQ ID NO: 1228340 - DNA, 25 bp, Homo sapien
tgactgcccgacatgccttggaagg

SEQ ID NO: 1228341 - DNA, 25 bp, Homo sapien
tggtccattaagcactgccccatgg

SEQ ID NO: 1228342 - DNA, 25 bp, Homo sapien
gccgtatgattccttggcagagatt

SEQ ID NO: 1228343 - DNA, 25 bp, Homo sapien
tctggacagagacctagggtccgtc

SEQ ID NO: 1228344 - DNA, 25 bp, Homo sapien
cctgcaggagagaacgcagtagctg

SEQ ID NO: 1228345 - DNA, 25 bp, Homo sapien
taaacctattaagtatcctgggcag

SEQ ID NO: 1228346 - DNA, 25 bp, Homo sapien
ttcatgtcccaaaaattcctgcagg

SEQ ID NO: 1228347 - DNA, 25 bp, Homo sapien
taagagatcaaccagcgtaggttgt

SEQ ID NO: 1228348 - DNA, 25 bp, Homo sapien
tgatctgtggttgctattgcactac

SEQ ID NO: 1228349 - DNA, 25 bp, Homo sapien
acttcaaagcttagagtgactgacc

SEQ ID NO: 1228350 - DNA, 25 bp, Homo sapien
gaccacttttggaaggacagtgtta

SEQ ID NO: 1228351 - DNA, 25 bp, Homo sapien
aatcctccaggaatgttgaactcag

SEQ ID NO: 1228352 - DNA, 25 bp, Homo sapien
gaaaatcgcccaacttggcaactgc

SEQ ID NO: 1228353 - DNA, 25 bp, Homo sapien
gaatactaatatagttagccccagg

SEQ ID NO: 1228354 - DNA, 25 bp, Homo sapien
taccaagatcctttgaatcctccag

SEQ ID NO: 1228355 - DNA, 25 bp, Homo sapien
caacatcccgagataaggcctaggc

SEQ ID NO: 1228356 - DNA, 25 bp, Homo sapien
gagacggctactttccagggtcctg

SEQ ID NO: 1228357 - DNA, 25 bp, Homo sapien
tccagtccccgctagaaacaggatg

SEQ ID NO: 1228358 - DNA, 25 bp, Homo sapien
tggagtagaaaacccagagacggct

SEQ ID NO: 1228359 - DNA, 25 bp, Homo sapien
cagtaagaggctcctcaggatggct

SEQ ID NO: 1228360 - DNA, 25 bp, Homo sapien
gaatacacatcgatcctgggttgac

SEQ ID NO: 1228361 - DNA, 25 bp, Homo sapien
tctctatggtacatgaagatccagg

SEQ ID NO: 1228362 - DNA, 25 bp, Homo sapien
taactcactggtcaaaagtggccaa

SEQ ID NO: 1228363 - DNA, 25 bp, Homo sapien
ttttcgtgaagtcagcagtgattga

SEQ ID NO: 1228364 - DNA, 25 bp, Homo sapien
gaggctcaatcacattcaccttgga

SEQ ID NO: 1228365 - DNA, 25 bp, Homo sapien
tggtttcacgtatcatgcttttctg

SEQ ID NO: 1228366 - DNA, 25 bp, Homo sapien
gctaattggatccttgtggtttcac

SEQ ID NO: 1228367 - DNA, 25 bp, Homo sapien
gaggagatccttattagctgagcag

SEQ ID NO: 1228368 - DNA, 25 bp, Homo sapien
tcataaggaatagttgctcccaatc

SEQ ID NO: 1228369 - DNA, 25 bp, Homo sapien
aagaaagggcaacagtctgagagct

SEQ ID NO: 1228370 - DNA, 25 bp, Homo sapien
tgttggcatcacaggtttaagtcct

SEQ ID NO: 1228371 - DNA, 25 bp, Homo sapien
ctttggcaaggcagtgattacagct

SEQ ID NO: 1228372 - DNA, 25 bp, Homo sapien
catttgactgttagagacctctgtg

SEQ ID NO: 1228373 - DNA, 25 bp, Homo sapien
gaagctgttattggagctccatgac

SEQ ID NO: 1228374 - DNA, 25 bp, Homo sapien
taccaaaggctactatgtgaagtgc

SEQ ID NO: 1228375 - DNA, 25 bp, Homo sapien
tgatgtgaggcaaagcagagttcct

SEQ ID NO: 1228376 - DNA, 25 bp, Homo sapien
gaaacactgtcagggcagactctta

SEQ ID NO: 1228377 - DNA, 25 bp, Homo sapien
catgggaattcgaatggtacgatcc

SEQ ID NO: 1228378 - DNA, 25 bp, Homo sapien
ggattaaggccagagcacatgccat

SEQ ID NO: 1228379 - DNA, 25 bp, Homo sapien
cggcagactggagggcaccgtgtaa

SEQ ID NO: 1228380 - DNA, 25 bp, Homo sapien
gactttctcatcagccaccaagagg

SEQ ID NO: 1228381 - DNA, 25 bp, Homo sapien
ctgatagttacgtgagactttctca

SEQ ID NO: 1228382 - DNA, 25 bp, Homo sapien
ccgtgtaaaggtttatgggagccat

SEQ ID NO: 1228383 - DNA, 25 bp, Homo sapien
taataggccacgtgatattggtctg

SEQ ID NO: 1228384 - DNA, 25 bp, Homo sapien
tcttcacacttgatgtttaataggc

SEQ ID NO: 1228385 - DNA, 25 bp, Homo sapien
cttgatgtttaataggccacgtgat

SEQ ID NO: 1228386 - DNA, 25 bp, Homo sapien
aaggaagacattaggcatgggacgt

SEQ ID NO: 1228387 - DNA, 25 bp, Homo sapien
gattcttgagagtagagtccagtcc

SEQ ID NO: 1228388 - DNA, 25 bp, Homo sapien
cccagagattcttgagagtagagtc

SEQ ID NO: 1228389 - DNA, 25 bp, Homo sapien
tgagagtagagtccagtcctccacc

SEQ ID NO: 1228390 - DNA, 25 bp, Homo sapien
tcttgagagtagagtccagtcctcc

SEQ ID NO: 1228391 - DNA, 25 bp, Homo sapien
atttagttgagtggactcctgcaat

SEQ ID NO: 1228392 - DNA, 25 bp, Homo sapien
tttagttgagtggactcctgcaatg

SEQ ID NO: 1228393 - DNA, 25 bp, Homo sapien
tgctcctcatcgttaaaggaaaccc

SEQ ID NO: 1228394 - DNA, 25 bp, Homo sapien
caggcagtgttgcagtgaccttgac

SEQ ID NO: 1228395 - DNA, 25 bp, Homo sapien
tgtttattagtctgctcctcatcgt

SEQ ID NO: 1228396 - DNA, 25 bp, Homo sapien
caacagttagctgaaccccagccag

SEQ ID NO: 1228397 - DNA, 25 bp, Homo sapien
ttatccatcaatgattctgagcttc

SEQ ID NO: 1228398 - DNA, 25 bp, Homo sapien
gggtgatgggaatcagagaaggaca

SEQ ID NO: 1228399 - DNA, 25 bp, Homo sapien
gccgaactcttaacaggtagggtga

SEQ ID NO: 1228400 - DNA, 25 bp, Homo sapien
tgagaggagcaggacggatggctgg

SEQ ID NO: 1228401 - DNA, 25 bp, Homo sapien
gagaagttgctaaggagagccgaac

SEQ ID NO: 1228402 - DNA, 25 bp, Homo sapien
gcttaactccatgggcagcaatgat

SEQ ID NO: 1228403 - DNA, 25 bp, Homo sapien
tgacagaatcagataagataagcac

SEQ ID NO: 1228404 - DNA, 25 bp, Homo sapien
ccagcagaagctgactctacaatga

SEQ ID NO: 1228405 - DNA, 25 bp, Homo sapien
ggcttctgtgatttagcagccccag

SEQ ID NO: 1228406 - DNA, 25 bp, Homo sapien
aatgttttggccttaaattctctat

SEQ ID NO: 1228407 - DNA, 25 bp, Homo sapien
attctctatttcttcaagccacctg

SEQ ID NO: 1228408 - DNA, 25 bp, Homo sapien
ctatttcttcaagccacctggaaaa

SEQ ID NO: 1228409 - DNA, 25 bp, Homo sapien
caaatgttttggccttaaattctct

SEQ ID NO: 1228410 - DNA, 25 bp, Homo sapien
ctggtaggtgctgcaaggcctcctc

SEQ ID NO: 1228411 - DNA, 25 bp, Homo sapien
gctggtaggtgctgcaaggcctcct

SEQ ID NO: 1228412 - DNA, 25 bp, Homo sapien
tgctggtaggtgctgcaaggcctcc

SEQ ID NO: 1228413 - DNA, 25 bp, Homo sapien
tggtaggtgctgcaaggcctcctct

SEQ ID NO: 1228414 - DNA, 25 bp, Homo sapien
ggcattgcagcctaaattggaactc

SEQ ID NO: 1228415 - DNA, 25 bp, Homo sapien
cagactacagcggtgatggataaca

SEQ ID NO: 1228416 - DNA, 25 bp, Homo sapien
ggtggccaggtccttaagcctttca

SEQ ID NO: 1228417 - DNA, 25 bp, Homo sapien
tacttttagagtcagcggaggtcct

SEQ ID NO: 1228418 - DNA, 25 bp, Homo sapien
agtagaagtttagatccattgacaa

SEQ ID NO: 1228419 - DNA, 25 bp, Homo sapien
ggcagggcgtttccagcttatgctc

SEQ ID NO: 1228420 - DNA, 25 bp, Homo sapien
agctggcagggcgtttccagcttat

SEQ ID NO: 1228421 - DNA, 25 bp, Homo sapien
ttagatccattgacaagcagcagct

SEQ ID NO: 1228422 - DNA, 25 bp, Homo sapien
ctggtccttggtcagcatttctcca

SEQ ID NO: 1228423 - DNA, 25 bp, Homo sapien
atctccaatgtaagcaagtgggttc

SEQ ID NO: 1228424 - DNA, 25 bp, Homo sapien
tctccaatgtaagcaagtgggttct

SEQ ID NO: 1228425 - DNA, 25 bp, Homo sapien
tggtcagcatttctccatttgcctg

SEQ ID NO: 1228426 - DNA, 25 bp, Homo sapien
catcttcccataaccttggtatttg

SEQ ID NO: 1228427 - DNA, 25 bp, Homo sapien
ttatatggggcttcaaaacatcttc

SEQ ID NO: 1228428 - DNA, 25 bp, Homo sapien
ataaggcaggaagtgtcagtttccc

SEQ ID NO: 1228429 - DNA, 25 bp, Homo sapien
tttgatctttgcaactgcaacaata

SEQ ID NO: 1228430 - DNA, 25 bp, Homo sapien
tcaccatgctttgggaaacgtctct

SEQ ID NO: 1228431 - DNA, 25 bp, Homo sapien
acgtctctgggaaggttcggctggt

SEQ ID NO: 1228432 - DNA, 25 bp, Homo sapien
gcatagaaatgagacctcgaccatt

SEQ ID NO: 1228433 - DNA, 25 bp, Homo sapien
ttcggctggtgtaggtttgaactca

SEQ ID NO: 1228434 - DNA, 25 bp, Homo sapien
cacatggggtttctcgaaatgaact

SEQ ID NO: 1228435 - DNA, 25 bp, Homo sapien
tccccactcggagggctccccactg

SEQ ID NO: 1228436 - DNA, 25 bp, Homo sapien
ctcgaaatgaactcactactttcta

SEQ ID NO: 1228437 - DNA, 25 bp, Homo sapien
cttggaattccccactcggagggct

SEQ ID NO: 1228438 - DNA, 25 bp, Homo sapien
tatgaaaacagcagatccagtgaga

SEQ ID NO: 1228439 - DNA, 25 bp, Homo sapien
caccacttcttagaggctgccaagc

SEQ ID NO: 1228440 - DNA, 25 bp, Homo sapien
tgggcagtctctgttccaccacttc

SEQ ID NO: 1228441 - DNA, 25 bp, Homo sapien
tcctgtggctaagcactgagagcct

SEQ ID NO: 1228442 - DNA, 25 bp, Homo sapien
aaagaatgaatagagtcctaacttt

SEQ ID NO: 1228443 - DNA, 25 bp, Homo sapien
gatgatgattataaacttccattgt

SEQ ID NO: 1228444 - DNA, 25 bp, Homo sapien
gatgattataaacttccattgtctt

SEQ ID NO: 1228445 - DNA, 25 bp, Homo sapien
gaatagagtcctaacttttgttcat

SEQ ID NO: 1228446 - DNA, 25 bp, Homo sapien
tcacatagactctaaatcttcacat

SEQ ID NO: 1228447 - DNA, 25 bp, Homo sapien
tctttttcccaatgggcaccaggta

SEQ ID NO: 1228448 - DNA, 25 bp, Homo sapien
cccagagtctttttcccaatgggca

SEQ ID NO: 1228449 - DNA, 25 bp, Homo sapien
cagagtctttttcccaatgggcacc

SEQ ID NO: 1228450 - DNA, 25 bp, Homo sapien
tttcccaatgggcaccaggtatcat

SEQ ID NO: 1228451 - DNA, 25 bp, Homo sapien
cagtctgcattagcaggtggtggaa

SEQ ID NO: 1228452 - DNA, 25 bp, Homo sapien
catgcccctataacttcagttagtg

SEQ ID NO: 1228453 - DNA, 25 bp, Homo sapien
agagctttcggcagacatgccccta

SEQ ID NO: 1228454 - DNA, 25 bp, Homo sapien
tataacttcagttagtggcagcacc

SEQ ID NO: 1228455 - DNA, 25 bp, Homo sapien
cctcatcccaaatgagcatgaaaac

SEQ ID NO: 1228456 - DNA, 25 bp, Homo sapien
gatttcaggaggcaaattggaagct

SEQ ID NO: 1228457 - DNA, 25 bp, Homo sapien
tcagattcctcacccccggaggtgt

SEQ ID NO: 1228458 - DNA, 25 bp, Homo sapien
gagcatgaaaactcgccgactcagc

SEQ ID NO: 1228459 - DNA, 25 bp, Homo sapien
tcttaaggagcgattaggcatgtca

SEQ ID NO: 1228460 - DNA, 25 bp, Homo sapien
cgaaaattttcgacaggcggtgaca

SEQ ID NO: 1228461 - DNA, 25 bp, Homo sapien
ttagattgggccttactgagacact

SEQ ID NO: 1228462 - DNA, 25 bp, Homo sapien
tgatcctccattaaagcgtagcctg

SEQ ID NO: 1228463 - DNA, 25 bp, Homo sapien
atctttgacgctggcagtcttggtt

SEQ ID NO: 1228464 - DNA, 25 bp, Homo sapien
cgtgctggcacttttaccggccggg

SEQ ID NO: 1228465 - DNA, 25 bp, Homo sapien
agaaagacgtggcagcaagcgggag

SEQ ID NO: 1228466 - DNA, 25 bp, Homo sapien
agtcttggttttctgctagtgctgc

SEQ ID NO: 1228467 - DNA, 25 bp, Homo sapien
gtccggtccttgactcattttccca

SEQ ID NO: 1228468 - DNA, 25 bp, Homo sapien
tggtccggtccttgactcattttcc

SEQ ID NO: 1228469 - DNA, 25 bp, Homo sapien
catacagcagttggtccggtccttg

SEQ ID NO: 1228470 - DNA, 25 bp, Homo sapien
gcagttggtccggtccttgactcat

SEQ ID NO: 1228471 - DNA, 25 bp, Homo sapien
catgtactggcgtatcctgctgatg

SEQ ID NO: 1228472 - DNA, 25 bp, Homo sapien
tgccaaacggtgtagagctggtaac

SEQ ID NO: 1228473 - DNA, 25 bp, Homo sapien
ctggtgcttagtgtatggaacaaat

SEQ ID NO: 1228474 - DNA, 25 bp, Homo sapien
gaacgaggaccacacactctattgt

SEQ ID NO: 1228475 - DNA, 25 bp, Homo sapien
gatgccaagtccagaatagacttcc

SEQ ID NO: 1228476 - DNA, 25 bp, Homo sapien
ggagggatgccaagtccagaataga

SEQ ID NO: 1228477 - DNA, 25 bp, Homo sapien
caacattagaggagtaagggaagaa

SEQ ID NO: 1228478 - DNA, 25 bp, Homo sapien
ccaaccctcaacattagaggagtaa

SEQ ID NO: 1228479 - DNA, 25 bp, Homo sapien
caaagaagcatcaagcatttcactt

SEQ ID NO: 1228480 - DNA, 25 bp, Homo sapien
gagggcaaagaagcatcaagcattt

SEQ ID NO: 1228481 - DNA, 25 bp, Homo sapien
ctgagggcaaagaagcatcaagcat

SEQ ID NO: 1228482 - DNA, 25 bp, Homo sapien
ggcaaagaagcatcaagcatttcac

SEQ ID NO: 1228483 - DNA, 25 bp, Homo sapien
ggctatgtgaacttgctgaatcagt

SEQ ID NO: 1228484 - DNA, 25 bp, Homo sapien
tcagtgggcttctattcagatcacc

SEQ ID NO: 1228485 - DNA, 25 bp, Homo sapien
acaaaggcaatagcattggtagctg

SEQ ID NO: 1228486 - DNA, 25 bp, Homo sapien
caccaaatgcggagacaaaggcaat

SEQ ID NO: 1228487 - DNA, 25 bp, Homo sapien
cacccaggagtaagcgcttgcaagg

SEQ ID NO: 1228488 - DNA, 25 bp, Homo sapien
caatttggccctccgagatttggtc

SEQ ID NO: 1228489 - DNA, 25 bp, Homo sapien
agctcccatgtacacggcagagggc

SEQ ID NO: 1228490 - DNA, 25 bp, Homo sapien
ctgcgaggagtagttggaaccgact

SEQ ID NO: 1228491 - DNA, 25 bp, Homo sapien
acagaagcaaagatgtcgccataac

SEQ ID NO: 1228492 - DNA, 25 bp, Homo sapien
ggctgttcgattctcaaggaacttt

SEQ ID NO: 1228493 - DNA, 25 bp, Homo sapien
ggcctttgggtatgcagggagctgc

SEQ ID NO: 1228494 - DNA, 25 bp, Homo sapien
aggcccggtggcctttgggtatgca

SEQ ID NO: 1228495 - DNA, 25 bp, Homo sapien
gtagccctggctgttcgattctcaa

SEQ ID NO: 1228496 - DNA, 25 bp, Homo sapien
tctgggctccaaacagatctagtgc

SEQ ID NO: 1228497 - DNA, 25 bp, Homo sapien
ctctgggctccaaacagatctagtg

SEQ ID NO: 1228498 - DNA, 25 bp, Homo sapien
tgggctccaaacagatctagtgctc

SEQ ID NO: 1228499 - DNA, 25 bp, Homo sapien
ggctccaaacagatctagtgctcat

SEQ ID NO: 1228500 - DNA, 25 bp, Homo sapien
caggggtaagccatactctgtattc

SEQ ID NO: 1228501 - DNA, 25 bp, Homo sapien
tctgatcaggggtaagccatactct

SEQ ID NO: 1228502 - DNA, 25 bp, Homo sapien
ggtaagccatactctgtattctcct

SEQ ID NO: 1228503 - DNA, 25 bp, Homo sapien
ggtctcttgtgcactctgatcaggg

SEQ ID NO: 1228504 - DNA, 25 bp, Homo sapien
catacggagctttaattaaaccaag

SEQ ID NO: 1228505 - DNA, 25 bp, Homo sapien
ctgatgggttgctgacatacggagc

SEQ ID NO: 1228506 - DNA, 25 bp, Homo sapien
tgaagctgatgggttgctgacatac

SEQ ID NO: 1228507 - DNA, 25 bp, Homo sapien
tttggggcaatctgaatcacacctg

SEQ ID NO: 1228508 - DNA, 25 bp, Homo sapien
cctggtggagcccataagtacccac

SEQ ID NO: 1228509 - DNA, 25 bp, Homo sapien
tactagtgggaaatatgtggtggcc

SEQ ID NO: 1228510 - DNA, 25 bp, Homo sapien
ccataagtacccactgttgttcctc

SEQ ID NO: 1228511 - DNA, 25 bp, Homo sapien
tgccgatatcccctgcccattggct

SEQ ID NO: 1228512 - DNA, 25 bp, Homo sapien
gatctggaccactttcttttgccgt

SEQ ID NO: 1228513 - DNA, 25 bp, Homo sapien
cactccatgcgagacttcaattgag

SEQ ID NO: 1228514 - DNA, 25 bp, Homo sapien
tcaggagggtggcaacatgtttctc

SEQ ID NO: 1228515 - DNA, 25 bp, Homo sapien
caaggctttggctgtccactccatg

SEQ ID NO: 1228516 - DNA, 25 bp, Homo sapien
tctggttgcgatttaaaagtcgaca

SEQ ID NO: 1228517 - DNA, 25 bp, Homo sapien
gccttgttgatctggttgcgattta

SEQ ID NO: 1228518 - DNA, 25 bp, Homo sapien
ttaaaagttgccttgttgatctggt

SEQ ID NO: 1228519 - DNA, 25 bp, Homo sapien
cgatttaaaagtcgacattttgcct

SEQ ID NO: 1228520 - DNA, 25 bp, Homo sapien
ttcttcagagcccaaggtcttattt

SEQ ID NO: 1228521 - DNA, 25 bp, Homo sapien
cttcagagcccaaggtcttatttac

SEQ ID NO: 1228522 - DNA, 25 bp, Homo sapien
cctgggtcatcatggacttcagcag

SEQ ID NO: 1228523 - DNA, 25 bp, Homo sapien
ggtcttatttacacctgggtcatca

SEQ ID NO: 1228524 - DNA, 25 bp, Homo sapien
cagatggtacgtgacccagtgttct

SEQ ID NO: 1228525 - DNA, 25 bp, Homo sapien
tggttgtgaaatgcacggtgtggtg

SEQ ID NO: 1228526 - DNA, 25 bp, Homo sapien
gacttgggccagatggtacgtgacc

SEQ ID NO: 1228527 - DNA, 25 bp, Homo sapien
ggtggtaaaggtccaggagcctggc

SEQ ID NO: 1228528 - DNA, 25 bp, Homo sapien
tacagcctccactgatgtcacaaaa

SEQ ID NO: 1228529 - DNA, 25 bp, Homo sapien
aatctggtggaatttcttcaggaac

SEQ ID NO: 1228530 - DNA, 25 bp, Homo sapien
tcatttggggctagcactcaaggtc

SEQ ID NO: 1228531 - DNA, 25 bp, Homo sapien
tgttcccgaatgtggattgtctgca

SEQ ID NO: 1228532 - DNA, 25 bp, Homo sapien
gaaaagaagcttgtgatgaagaaca

SEQ ID NO: 1228533 - DNA, 25 bp, Homo sapien
gtctcccttgggaaggagtgatata

SEQ ID NO: 1228534 - DNA, 25 bp, Homo sapien
tatggatagtacctattcttcccca

SEQ ID NO: 1228535 - DNA, 25 bp, Homo sapien
tctgttagtagaacaacaccctggt

SEQ ID NO: 1228536 - DNA, 25 bp, Homo sapien
tactgaagacaagttctagcttcca

SEQ ID NO: 1228537 - DNA, 25 bp, Homo sapien
agcccagcaagtgcttgacaggaac

SEQ ID NO: 1228538 - DNA, 25 bp, Homo sapien
tatccatatcaagattatagacaac

SEQ ID NO: 1228539 - DNA, 25 bp, Homo sapien
ttgacaggaactcccaccgggtgag

SEQ ID NO: 1228540 - DNA, 25 bp, Homo sapien
caggaactaagtccgtgggtggcca

SEQ ID NO: 1228541 - DNA, 25 bp, Homo sapien
tctggtgtaacaatagagcttgaac

SEQ ID NO: 1228542 - DNA, 25 bp, Homo sapien
tggccaggaccactggaataggcaa

SEQ ID NO: 1228543 - DNA, 25 bp, Homo sapien
gaataggcaacctctggtgtaacaa

SEQ ID NO: 1228544 - DNA, 25 bp, Homo sapien
tgccatcagaacactaaccaggcct

SEQ ID NO: 1228545 - DNA, 25 bp, Homo sapien
cctgaccctgttagtttctgagatc

SEQ ID NO: 1228546 - DNA, 25 bp, Homo sapien
aggcctgaccctgttagtttctgag

SEQ ID NO: 1228547 - DNA, 25 bp, Homo sapien
ccatcagaacactaaccaggcctga

SEQ ID NO: 1228548 - DNA, 25 bp, Homo sapien
cagccttccggatgggttggaggaa

SEQ ID NO: 1228549 - DNA, 25 bp, Homo sapien
gtttagggggtgcaatgtggtttga

SEQ ID NO: 1228550 - DNA, 25 bp, Homo sapien
agccttccggatgggttggaggaag

SEQ ID NO: 1228551 - DNA, 25 bp, Homo sapien
tagggggtgcaatgtggtttgagaa

SEQ ID NO: 1228552 - DNA, 25 bp, Homo sapien
gaggaatgcctgctcaactggtttg

SEQ ID NO: 1228553 - DNA, 25 bp, Homo sapien
gaatgcctgctcaactggtttgatc

SEQ ID NO: 1228554 - DNA, 25 bp, Homo sapien
atgcctgctcaactggtttgatcat

SEQ ID NO: 1228555 - DNA, 25 bp, Homo sapien
aggaatgcctgctcaactggtttga

SEQ ID NO: 1228556 - DNA, 25 bp, Homo sapien
gcaactgcgcagaagacaaatctcc

SEQ ID NO: 1228557 - DNA, 25 bp, Homo sapien
agggcttctggcaactgcgcagaag

SEQ ID NO: 1228558 - DNA, 25 bp, Homo sapien
aaatgccagcattgtgtccaacagg

SEQ ID NO: 1228559 - DNA, 25 bp, Homo sapien
gagttcatctgttgcaaatgccagc

SEQ ID NO: 1228560 - DNA, 25 bp, Homo sapien
ctatcacaagtacgctgtgcagggc

SEQ ID NO: 1228561 - DNA, 25 bp, Homo sapien
ctagatatcacactgcaaagttgcc

SEQ ID NO: 1228562 - DNA, 25 bp, Homo sapien
ccagtccagtgatgttgggaaggtt

SEQ ID NO: 1228563 - DNA, 25 bp, Homo sapien
caactgaactggaaacttgccacca

SEQ ID NO: 1228564 - DNA, 25 bp, Homo sapien
tttcctgcaccttctcatcccccat

SEQ ID NO: 1228565 - DNA, 25 bp, Homo sapien
ggcaacgaagtcttcagctgactct

SEQ ID NO: 1228566 - DNA, 25 bp, Homo sapien
cacaggtggcatctcgaacagtaat

SEQ ID NO: 1228567 - DNA, 25 bp, Homo sapien
gaacagtaatgtcaattgctagagg

SEQ ID NO: 1228568 - DNA, 25 bp, Homo sapien
ttgctagagggctactgagtccagg

SEQ ID NO: 1228569 - DNA, 25 bp, Homo sapien
tggctgacttccttttctatgtgag

SEQ ID NO: 1228570 - DNA, 25 bp, Homo sapien
gactagtgtcctgattccagagcac

SEQ ID NO: 1228571 - DNA, 25 bp, Homo sapien
catatcccatgagcgtaagcagagc

SEQ ID NO: 1228572 - DNA, 25 bp, Homo sapien
tgaccaactgcgaccttccttgact

SEQ ID NO: 1228573 - DNA, 25 bp, Homo sapien
gcagacaagcagagcacaaagatac

SEQ ID NO: 1228574 - DNA, 25 bp, Homo sapien
agcagacaagcagagcacaaagata

SEQ ID NO: 1228575 - DNA, 25 bp, Homo sapien
cagcagacaagcagagcacaaagat

SEQ ID NO: 1228576 - DNA, 25 bp, Homo sapien
tcagcagacaagcagagcacaaaga

SEQ ID NO: 1228577 - DNA, 25 bp, Homo sapien
cattccaacccctgggtagcgtctg

SEQ ID NO: 1228578 - DNA, 25 bp, Homo sapien
cgacatttcatgactatcagtttct

SEQ ID NO: 1228579 - DNA, 25 bp, Homo sapien
taaaagggggctacacgacatttca

SEQ ID NO: 1228580 - DNA, 25 bp, Homo sapien
ctgggtagcgtctgcaataaaaggg

SEQ ID NO: 1228581 - DNA, 25 bp, Homo sapien
tgattttcaagggagagtgacctct

SEQ ID NO: 1228582 - DNA, 25 bp, Homo sapien
gcactctaatgagaacaatccggaa

SEQ ID NO: 1228583 - DNA, 25 bp, Homo sapien
tatttacccttgagtagccacaggt

SEQ ID NO: 1228584 - DNA, 25 bp, Homo sapien
tgtcacctcttagtacaaagccatg

SEQ ID NO: 1228585 - DNA, 25 bp, Homo sapien
tgagcccactatccaatgagactgg

SEQ ID NO: 1228586 - DNA, 25 bp, Homo sapien
ctgagccactgggtagaactaaggg

SEQ ID NO: 1228587 - DNA, 25 bp, Homo sapien
tgccctgtgaggtcataagagcttt

SEQ ID NO: 1228588 - DNA, 25 bp, Homo sapien
ccctgaccgctatgcataaatgccg

SEQ ID NO: 1228589 - DNA, 25 bp, Homo sapien
tctgagtgaccacggacaaagtctt

SEQ ID NO: 1228590 - DNA, 25 bp, Homo sapien
cccagactagacttgcagcatgcat

SEQ ID NO: 1228591 - DNA, 25 bp, Homo sapien
cataatcagaccatatagacgaggc

SEQ ID NO: 1228592 - DNA, 25 bp, Homo sapien
tagacgaggcactttggaaccacaa

SEQ ID NO: 1228593 - DNA, 25 bp, Homo sapien
cggcacagtcgctcttcctgcaggt

SEQ ID NO: 1228594 - DNA, 25 bp, Homo sapien
cgatgtggcccagtgagacggcaca

SEQ ID NO: 1228595 - DNA, 25 bp, Homo sapien
ttcctaggctgttgctcttccaagg

SEQ ID NO: 1228596 - DNA, 25 bp, Homo sapien
caatggaaatgttgccagagtccct

SEQ ID NO: 1228597 - DNA, 25 bp, Homo sapien
caaggccaaaatgtactgttctgag

SEQ ID NO: 1228598 - DNA, 25 bp, Homo sapien
gaagggtctcccttaagctagtaga

SEQ ID NO: 1228599 - DNA, 25 bp, Homo sapien
tttctcctggatcctcgggtagccc

SEQ ID NO: 1228600 - DNA, 25 bp, Homo sapien
tattgggcaacaggcaggactctcc

SEQ ID NO: 1228601 - DNA, 25 bp, Homo sapien
ggttacagacgtacacattatataa

SEQ ID NO: 1228602 - DNA, 25 bp, Homo sapien
cacaataagaatttggtgctttgga

SEQ ID NO: 1228603 - DNA, 25 bp, Homo sapien
caaaaggttacagacgtacacatta

SEQ ID NO: 1228604 - DNA, 25 bp, Homo sapien
caccaatgaggagctgacttcatcc

SEQ ID NO: 1228605 - DNA, 25 bp, Homo sapien
tatcagcagcccattcaaagtggtg

SEQ ID NO: 1228606 - DNA, 25 bp, Homo sapien
tgaccccagataccacagttggcct

SEQ ID NO: 1228607 - DNA, 25 bp, Homo sapien
cagggtttctctatgagtgcgtctc

SEQ ID NO: 1228608 - DNA, 25 bp, Homo sapien
tcaataatgacaagatgaccccaga

SEQ ID NO: 1228609 - DNA, 25 bp, Homo sapien
gaagttcagccttagcaaactcctg

SEQ ID NO: 1228610 - DNA, 25 bp, Homo sapien
ctcctgagctgaagctgttttgaag

SEQ ID NO: 1228611 - DNA, 25 bp, Homo sapien
tgctttatgctcctccaaacattat

SEQ ID NO: 1228612 - DNA, 25 bp, Homo sapien
tgagctgaagctgttttgaaggctt

SEQ ID NO: 1228613 - DNA, 25 bp, Homo sapien
ggaggtagttttccctatgtccaca

SEQ ID NO: 1228614 - DNA, 25 bp, Homo sapien
catacgtagcatgactttagactgc

SEQ ID NO: 1228615 - DNA, 25 bp, Homo sapien
tgcctgagggcattaccaacttgta

SEQ ID NO: 1228616 - DNA, 25 bp, Homo sapien
cacaaccaaggctaacagattcaag

SEQ ID NO: 1228617 - DNA, 25 bp, Homo sapien
gcagtgaagcaatgccaagaaccaa

SEQ ID NO: 1228618 - DNA, 25 bp, Homo sapien
caagaaccaacttcacgctcaggag

SEQ ID NO: 1228619 - DNA, 25 bp, Homo sapien
cagggctgcgccatttaaaaactct

SEQ ID NO: 1228620 - DNA, 25 bp, Homo sapien
cgctcaggagagaatactgaacctc

SEQ ID NO: 1228621 - DNA, 25 bp, Homo sapien
aaatgtgtctgtggcaagaaccctg

SEQ ID NO: 1228622 - DNA, 25 bp, Homo sapien
tgaacctggtgctccatccatggga

SEQ ID NO: 1228623 - DNA, 25 bp, Homo sapien
tggtcgcagctactgagggatgaac

SEQ ID NO: 1228624 - DNA, 25 bp, Homo sapien
tccatgggagctaaaagcctttgca

SEQ ID NO: 1228625 - DNA, 25 bp, Homo sapien
caccaaaggaagatgtagatgcagc

SEQ ID NO: 1228626 - DNA, 25 bp, Homo sapien
tggaaaccctcctgctgaaatagga

SEQ ID NO: 1228627 - DNA, 25 bp, Homo sapien
tctctgtatgatgaagttgctgcac

SEQ ID NO: 1228628 - DNA, 25 bp, Homo sapien
caaggagatgtggttcgtgaattaa

SEQ ID NO: 1228629 - DNA, 25 bp, Homo sapien
tctactccaattaagaatatatatg

SEQ ID NO: 1228630 - DNA, 25 bp, Homo sapien
tctttagggcacaattttttctgga

SEQ ID NO: 1228631 - DNA, 25 bp, Homo sapien
ttttctggaatctcactcttgtttt

SEQ ID NO: 1228632 - DNA, 25 bp, Homo sapien
gaatctcactcttgtttttcacagt

SEQ ID NO: 1228633 - DNA, 25 bp, Homo sapien
actgggcatcctgtcatgcgcctgt

SEQ ID NO: 1228634 - DNA, 25 bp, Homo sapien
ctgggcatcctgtcatgcgcctgtc

SEQ ID NO: 1228635 - DNA, 25 bp, Homo sapien
gattctctcaggagaagttctttgc

SEQ ID NO: 1228636 - DNA, 25 bp, Homo sapien
gaagttctttgccagtgatattgtt

SEQ ID NO: 1228637 - DNA, 25 bp, Homo sapien
caggagaagttctttgccagtgata

SEQ ID NO: 1228638 - DNA, 25 bp, Homo sapien
ttctttgaaactgttaaccagaaca

SEQ ID NO: 1228639 - DNA, 25 bp, Homo sapien
tatccatggctactcttcaatattg

SEQ ID NO: 1228640 - DNA, 25 bp, Homo sapien
tattgtattggcctattcagttgcc

SEQ ID NO: 1228641 - DNA, 25 bp, Homo sapien
caatgtagttgaaattgagttctgc

SEQ ID NO: 1228642 - DNA, 25 bp, Homo sapien
gtcatcattacctattcctgtagca

SEQ ID NO: 1228643 - DNA, 25 bp, Homo sapien
gctcagtagctgaggtagggatgcc

SEQ ID NO: 1228644 - DNA, 25 bp, Homo sapien
ctcagtagctgaggtagggatgcca

SEQ ID NO: 1228645 - DNA, 25 bp, Homo sapien
tcagtagctgaggtagggatgccat

SEQ ID NO: 1228646 - DNA, 25 bp, Homo sapien
tgcgcttgcgcgcagtttcccgcat

SEQ ID NO: 1228647 - DNA, 25 bp, Homo sapien
cgcggatcaggagtctaaagaggca

SEQ ID NO: 1228648 - DNA, 25 bp, Homo sapien
cacggacaagtggaattttcccgcg

SEQ ID NO: 1228649 - DNA, 25 bp, Homo sapien
tgtgaaatcgctgttgtgcgcttgc

SEQ ID NO: 1228650 - DNA, 25 bp, Homo sapien
ctttgaaagttgacacatctttcgc

SEQ ID NO: 1228651 - DNA, 25 bp, Homo sapien
agttgacacatctttcgcttttatt

SEQ ID NO: 1228652 - DNA, 25 bp, Homo sapien
gaaagttgacacatctttcgctttt

SEQ ID NO: 1228653 - DNA, 25 bp, Homo sapien
cacatctttcgcttttatttaatgc

SEQ ID NO: 1228654 - DNA, 25 bp, Homo sapien
gaattcaactatgccgttttctcgt

SEQ ID NO: 1228655 - DNA, 25 bp, Homo sapien
tgctgaattcaactatgccgttttc

SEQ ID NO: 1228656 - DNA, 25 bp, Homo sapien
tgaattcaactatgccgttttctcg

SEQ ID NO: 1228657 - DNA, 25 bp, Homo sapien
tcaactatgccgttttctcgtaaaa

SEQ ID NO: 1228658 - DNA, 25 bp, Homo sapien
tctctgaaatccctgttatatccca

SEQ ID NO: 1228659 - DNA, 25 bp, Homo sapien
ggttgtccagttcataatagttcac

SEQ ID NO: 1228660 - DNA, 25 bp, Homo sapien
tgagtatacaacttgggaatagcct

SEQ ID NO: 1228661 - DNA, 25 bp, Homo sapien
gattctgctctatttggttgtccag

SEQ ID NO: 1228662 - DNA, 25 bp, Homo sapien
ccaaggggagccgagtaagagggcg

SEQ ID NO: 1228663 - DNA, 25 bp, Homo sapien
ccagcttgaaggggcaggaccccag

SEQ ID NO: 1228664 - DNA, 25 bp, Homo sapien
ggggagccgagtaagagggcgcacg

SEQ ID NO: 1228665 - DNA, 25 bp, Homo sapien
tccggcaacccctgagagcggggtc

SEQ ID NO: 1228666 - DNA, 25 bp, Homo sapien
ccccacaaacttcgggcagtggcca

SEQ ID NO: 1228667 - DNA, 25 bp, Homo sapien
cacaaacttcgggcagtggccaggg

SEQ ID NO: 1228668 - DNA, 25 bp, Homo sapien
tcccccacaaacttcgggcagtggc

SEQ ID NO: 1228669 - DNA, 25 bp, Homo sapien
cgtcccccacaaacttcgggcagtg

SEQ ID NO: 1228670 - DNA, 25 bp, Homo sapien
ctcgtctgcggcagcagcaccgtgt

SEQ ID NO: 1228671 - DNA, 25 bp, Homo sapien
attcgagttcggctggtggttactg

SEQ ID NO: 1228672 - DNA, 25 bp, Homo sapien
gaccgcaccagaagcctcttcgtcg

SEQ ID NO: 1228673 - DNA, 25 bp, Homo sapien
accgtgtcccggtatctgccactat

SEQ ID NO: 1228674 - DNA, 25 bp, Homo sapien
tctccagctccgtgtccggctgctg

SEQ ID NO: 1228675 - DNA, 25 bp, Homo sapien
tccgtgtccggctgctggcggccca

SEQ ID NO: 1228676 - DNA, 25 bp, Homo sapien
ccagctccgtgtccggctgctggcg

SEQ ID NO: 1228677 - DNA, 25 bp, Homo sapien
tggatctccagctccgtgtccggct

SEQ ID NO: 1228678 - DNA, 25 bp, Homo sapien
cgtggagcctagaggtgtggcgcct

SEQ ID NO: 1228679 - DNA, 25 bp, Homo sapien
ccgcaccggcgtggagcctagaggt

SEQ ID NO: 1228680 - DNA, 25 bp, Homo sapien
tctggaggccccgcgccgaggcggg

SEQ ID NO: 1228681 - DNA, 25 bp, Homo sapien
ggtgtggcgcctgcgagcgcccggt

SEQ ID NO: 1228682 - DNA, 25 bp, Homo sapien
ctggtaactgggcatcgctagtgac

SEQ ID NO: 1228683 - DNA, 25 bp, Homo sapien
gctagtgaccccttaatgtcccgct

SEQ ID NO: 1228684 - DNA, 25 bp, Homo sapien
ggcatcgctagtgaccccttaatgt

SEQ ID NO: 1228685 - DNA, 25 bp, Homo sapien
gtgcgatacatgctggtaactgggc

SEQ ID NO: 1228686 - DNA, 25 bp, Homo sapien
tgagggtcaccgtttgcataaggag

SEQ ID NO: 1228687 - DNA, 25 bp, Homo sapien
gcatgtccaacatgagggtcaccgt

SEQ ID NO: 1228688 - DNA, 25 bp, Homo sapien
ctttctctttgccatgaataaagtt

SEQ ID NO: 1228689 - DNA, 25 bp, Homo sapien
cataaggaggtccatcatgaaggca

SEQ ID NO: 1228690 - DNA, 25 bp, Homo sapien
catatggaatcgattggctatgtct

SEQ ID NO: 1228691 - DNA, 25 bp, Homo sapien
atatggaatcgattggctatgtctt

SEQ ID NO: 1228692 - DNA, 25 bp, Homo sapien
aatgggcaacccatgacaatcccag

SEQ ID NO: 1228693 - DNA, 25 bp, Homo sapien
tttccatagctgaaagattctgagc

SEQ ID NO: 1228694 - DNA, 25 bp, Homo sapien
gattctgagcttctctaccaagttc

SEQ ID NO: 1228695 - DNA, 25 bp, Homo sapien
cttttatttcaatgggcaacccatg

SEQ ID NO: 1228696 - DNA, 25 bp, Homo sapien
agttctcaactgtttggcttcatac

SEQ ID NO: 1228697 - DNA, 25 bp, Homo sapien
tctcaatggctgctttagcaaatga

SEQ ID NO: 1228698 - DNA, 25 bp, Homo sapien
tattccccaacgaataaatgctgat

SEQ ID NO: 1228699 - DNA, 25 bp, Homo sapien
tgtatagtagcaattattccaatct

SEQ ID NO: 1228700 - DNA, 25 bp, Homo sapien
gagaccaaaacacaggtttgtaaga

SEQ ID NO: 1228701 - DNA, 25 bp, Homo sapien
gtttgtaagatcgataaaccaagcc

SEQ ID NO: 1228702 - DNA, 25 bp, Homo sapien
caaaacacaggtttgtaagatcgat

SEQ ID NO: 1228703 - DNA, 25 bp, Homo sapien
atgacggagaccaaaacacaggttt

SEQ ID NO: 1228704 - DNA, 25 bp, Homo sapien
tattgaacgactgacatgctcagga

SEQ ID NO: 1228705 - DNA, 25 bp, Homo sapien
catatattgaacgactgacatgctc

SEQ ID NO: 1228706 - DNA, 25 bp, Homo sapien
tttacatatattgaacgactgacat

SEQ ID NO: 1228707 - DNA, 25 bp, Homo sapien
gaacgactgacatgctcaggattat

SEQ ID NO: 1228708 - DNA, 25 bp, Homo sapien
cttcattggctggaatcgtccaagg

SEQ ID NO: 1228709 - DNA, 25 bp, Homo sapien
aatcgtccaaggttgtgtggtccag

SEQ ID NO: 1228710 - DNA, 25 bp, Homo sapien
caaaatactaacaggagatgaacca

SEQ ID NO: 1228711 - DNA, 25 bp, Homo sapien
tgtggtccagaccaaaatactaaca

SEQ ID NO: 1228712 - DNA, 25 bp, Homo sapien
gcaacagatgctactttatctgccg

SEQ ID NO: 1228713 - DNA, 25 bp, Homo sapien
tatctgccgccagtacgtagaggtc

SEQ ID NO: 1228714 - DNA, 25 bp, Homo sapien
tgttgtttccaaagtagaagcaaca

SEQ ID NO: 1228715 - DNA, 25 bp, Homo sapien
gaaagtgttgaaatagtctcaaatg

SEQ ID NO: 1228716 - DNA, 25 bp, Homo sapien
gggctgtgtgaaccaatcccgttcc

SEQ ID NO: 1228717 - DNA, 25 bp, Homo sapien
tatcaggaattaatggatgactgca

SEQ ID NO: 1228718 - DNA, 25 bp, Homo sapien
gttccttttgccatggtcacatgat

SEQ ID NO: 1228719 - DNA, 25 bp, Homo sapien
ctttatcaggaattaatggatgact

SEQ ID NO: 1228720 - DNA, 25 bp, Homo sapien
gttgtgctgagacgctacaccgtag

SEQ ID NO: 1228721 - DNA, 25 bp, Homo sapien
gacgctacaccgtagtcttccatac

SEQ ID NO: 1228722 - DNA, 25 bp, Homo sapien
caggttgtgctgagacgctacaccg

SEQ ID NO: 1228723 - DNA, 25 bp, Homo sapien
tgctgagacgctacaccgtagtctt

SEQ ID NO: 1228724 - DNA, 25 bp, Homo sapien
aagttcaggacctgcaacatctgtg

SEQ ID NO: 1228725 - DNA, 25 bp, Homo sapien
catcagttccctcttcaaggacagc

SEQ ID NO: 1228726 - DNA, 25 bp, Homo sapien
gttttgaagttcaggacctgcaaca

SEQ ID NO: 1228727 - DNA, 25 bp, Homo sapien
gaaaactccatcttcgtccactaga

SEQ ID NO: 1228728 - DNA, 25 bp, Homo sapien
aacaaattctttgcagtctgaagca

SEQ ID NO: 1228729 - DNA, 25 bp, Homo sapien
taaaccactgcttgctggcacgaat

SEQ ID NO: 1228730 - DNA, 25 bp, Homo sapien
ttggtcctccagtcatacggatagc

SEQ ID NO: 1228731 - DNA, 25 bp, Homo sapien
ggctgcagtcttaatatccgtgatg

SEQ ID NO: 1228732 - DNA, 25 bp, Homo sapien
attcatccttggtcttatgatgaaa

SEQ ID NO: 1228733 - DNA, 25 bp, Homo sapien
tatacaccaatatggccgcctgtcc

SEQ ID NO: 1228734 - DNA, 25 bp, Homo sapien
gaaacacaggaattggaacacccca

SEQ ID NO: 1228735 - DNA, 25 bp, Homo sapien
ttcaaccatgccattcagtgctgat

SEQ ID NO: 1228736 - DNA, 25 bp, Homo sapien
gggctaagtttcactatgttaacta

SEQ ID NO: 1228737 - DNA, 25 bp, Homo sapien
tgttaactatagcattaatagcatg

SEQ ID NO: 1228738 - DNA, 25 bp, Homo sapien
taactatagcattaatagcatgaaa

SEQ ID NO: 1228739 - DNA, 25 bp, Homo sapien
aagttaggggctaagtttcactatg

SEQ ID NO: 1228740 - DNA, 25 bp, Homo sapien
gaacttcgatatcaaccggaatgag

SEQ ID NO: 1228741 - DNA, 25 bp, Homo sapien
actgctgataaaagtgggtgaaacc

SEQ ID NO: 1228742 - DNA, 25 bp, Homo sapien
catgcattacgtgtcccttcttagg

SEQ ID NO: 1228743 - DNA, 25 bp, Homo sapien
gaaaatccactaggtagcatgagca

SEQ ID NO: 1228744 - DNA, 25 bp, Homo sapien
tatttagagagcaagacttccttcc

SEQ ID NO: 1228745 - DNA, 25 bp, Homo sapien
gacaaaagtctcttagtgaggagga

SEQ ID NO: 1228746 - DNA, 25 bp, Homo sapien
gaaacaacgtaactacacattagct

SEQ ID NO: 1228747 - DNA, 25 bp, Homo sapien
gaagctttatctcattaagagagca

SEQ ID NO: 1228748 - DNA, 25 bp, Homo sapien
tttgaaagattacagtggttcccac

SEQ ID NO: 1228749 - DNA, 25 bp, Homo sapien
catctgtttccgttactgatttacc

SEQ ID NO: 1228750 - DNA, 25 bp, Homo sapien
tatccaggtacttatactcaaagcc

SEQ ID NO: 1228751 - DNA, 25 bp, Homo sapien
gggacatggcagaattattcaatta

SEQ ID NO: 1228752 - DNA, 25 bp, Homo sapien
gccgtgttgttccactagtttaaca

SEQ ID NO: 1228753 - DNA, 25 bp, Homo sapien
ccagatatcactgccgtgttgttcc

SEQ ID NO: 1228754 - DNA, 25 bp, Homo sapien
gaagagtccaccagatatcactgcc

SEQ ID NO: 1228755 - DNA, 25 bp, Homo sapien
ctagtttaacaatatgctcagtggt

SEQ ID NO: 1228756 - DNA, 25 bp, Homo sapien
atacatacaaaggctgttaaataca

SEQ ID NO: 1228757 - DNA, 25 bp, Homo sapien
tgtctactttcacactgcattagct

SEQ ID NO: 1228758 - DNA, 25 bp, Homo sapien
acaaaatgtctactttcacactgca

SEQ ID NO: 1228759 - DNA, 25 bp, Homo sapien
aaatgtctactttcacactgcatta

SEQ ID NO: 1228760 - DNA, 25 bp, Homo sapien
aaatatcctgacctggcacatattc

SEQ ID NO: 1228761 - DNA, 25 bp, Homo sapien
gaagttccgctatcaaaccagatgt

SEQ ID NO: 1228762 - DNA, 25 bp, Homo sapien
gaacataagaccatgaagttccgct

SEQ ID NO: 1228763 - DNA, 25 bp, Homo sapien
tgacctggcacatattccaaggcat

SEQ ID NO: 1228764 - DNA, 25 bp, Homo sapien
caaaagcctcccaaatagtcaaagc

SEQ ID NO: 1228765 - DNA, 25 bp, Homo sapien
aaaagcctcccaaatagtcaaagca

SEQ ID NO: 1228766 - DNA, 25 bp, Homo sapien
atgcaaaataccaatgatattcttc

SEQ ID NO: 1228767 - DNA, 25 bp, Homo sapien
gctgccacacttgttaataaggatg

SEQ ID NO: 1228768 - DNA, 25 bp, Homo sapien
tgttaataaggatgactgaaaccaa

SEQ ID NO: 1228769 - DNA, 25 bp, Homo sapien
cacttgttaataaggatgactgaaa

SEQ ID NO: 1228770 - DNA, 25 bp, Homo sapien
ccacacttgttaataaggatgactg

SEQ ID NO: 1228771 - DNA, 25 bp, Homo sapien
ttcacacactggcaggtactcagca

SEQ ID NO: 1228772 - DNA, 25 bp, Homo sapien
gcaggttggttcaggcataaatact

SEQ ID NO: 1228773 - DNA, 25 bp, Homo sapien
catctctgtagtactcagcatagtg

SEQ ID NO: 1228774 - DNA, 25 bp, Homo sapien
agcatagtgcttcacacactggcag

SEQ ID NO: 1228775 - DNA, 25 bp, Homo sapien
ttttacttcaaattcttacaggaca

SEQ ID NO: 1228776 - DNA, 25 bp, Homo sapien
agacaccttggtgttgtctcctttt

SEQ ID NO: 1228777 - DNA, 25 bp, Homo sapien
aagacaccttggtgttgtctccttt

SEQ ID NO: 1228778 - DNA, 25 bp, Homo sapien
ttcaaagagttatgatctgcatcac

SEQ ID NO: 1228779 - DNA, 25 bp, Homo sapien
ttcttcaaagagttatgatctgcat

SEQ ID NO: 1228780 - DNA, 25 bp, Homo sapien
ccaactactccagtcaatgctgact

SEQ ID NO: 1228781 - DNA, 25 bp, Homo sapien
caaagagttatgatctgcatcacac

SEQ ID NO: 1228782 - DNA, 25 bp, Homo sapien
tccagcctgggtgactgaatgcgat

SEQ ID NO: 1228783 - DNA, 25 bp, Homo sapien
actccagcctgggtgactgaatgcg

SEQ ID NO: 1228784 - DNA, 25 bp, Homo sapien
gcactccagcctgggtgactgaatg

SEQ ID NO: 1228785 - DNA, 25 bp, Homo sapien
ccagcctgggtgactgaatgcgatc

SEQ ID NO: 1228786 - DNA, 25 bp, Homo sapien
tttctccaagggtaaatccatgaac

SEQ ID NO: 1228787 - DNA, 25 bp, Homo sapien
tccattaacgacaacatcaggatga

SEQ ID NO: 1228788 - DNA, 25 bp, Homo sapien
ttgtcctccattaacgacaacatca

SEQ ID NO: 1228789 - DNA, 25 bp, Homo sapien
ttctccaagggtaaatccatgaaca

SEQ ID NO: 1228790 - DNA, 25 bp, Homo sapien
cagacagcaatgtgccaacactgta

SEQ ID NO: 1228791 - DNA, 25 bp, Homo sapien
tcacacaatagtgcgaaaacccaat

SEQ ID NO: 1228792 - DNA, 25 bp, Homo sapien
acagcaatgtgccaacactgtaaca

SEQ ID NO: 1228793 - DNA, 25 bp, Homo sapien
gcacacctcacacaatagtgcgaaa

SEQ ID NO: 1228794 - DNA, 25 bp, Homo sapien
tcaattccaattagccgaacaaatg

SEQ ID NO: 1228795 - DNA, 25 bp, Homo sapien
gtaagtacaaactatactagcactg

SEQ ID NO: 1228796 - DNA, 25 bp, Homo sapien
cagatatttttgagcacaatgtaag

SEQ ID NO: 1228797 - DNA, 25 bp, Homo sapien
tgaaatgcgggctaacaatctcaaa

SEQ ID NO: 1228798 - DNA, 25 bp, Homo sapien
agacattggaatcagctacccacca

SEQ ID NO: 1228799 - DNA, 25 bp, Homo sapien
ccatacggaggctctttgctttgat

SEQ ID NO: 1228800 - DNA, 25 bp, Homo sapien
aggacatcagcaccatacggaggct

SEQ ID NO: 1228801 - DNA, 25 bp, Homo sapien
tacccaccagcgaaggacatcagca

SEQ ID NO: 1228802 - DNA, 25 bp, Homo sapien
cattgagcacggatgggccaattgc

SEQ ID NO: 1228803 - DNA, 25 bp, Homo sapien
ttgagcacggatgggccaattgcaa

SEQ ID NO: 1228804 - DNA, 25 bp, Homo sapien
agcattgagcacggatgggccaatt

SEQ ID NO: 1228805 - DNA, 25 bp, Homo sapien
cttgctaatatcatctctggcagca

SEQ ID NO: 1228806 - DNA, 25 bp, Homo sapien
cacaataaatgaagaactcgttttc

SEQ ID NO: 1228807 - DNA, 25 bp, Homo sapien
aaatctcacaataaatgaagaactc

SEQ ID NO: 1228808 - DNA, 25 bp, Homo sapien
aaatgaagaactcgttttcattcag

SEQ ID NO: 1228809 - DNA, 25 bp, Homo sapien
tgaagaactcgttttcattcagttt

SEQ ID NO: 1228810 - DNA, 25 bp, Homo sapien
atgtgaaaggttattgagtacataa

SEQ ID NO: 1228811 - DNA, 25 bp, Homo sapien
catgtgtgtgggtcagaataatgtt

SEQ ID NO: 1228812 - DNA, 25 bp, Homo sapien
tggtattactaccaatgttttgaaa

SEQ ID NO: 1228813 - DNA, 25 bp, Homo sapien
tgttatttcacttgcttcacaatga

SEQ ID NO: 1228814 - DNA, 25 bp, Homo sapien
atagcccagttataggaacaaccac

SEQ ID NO: 1228815 - DNA, 25 bp, Homo sapien
tagcccagttataggaacaaccact

SEQ ID NO: 1228816 - DNA, 25 bp, Homo sapien
gcatgtactggtctatgacatacat

SEQ ID NO: 1228817 - DNA, 25 bp, Homo sapien
ttctgggttgaaatcagccacattt

SEQ ID NO: 1228818 - DNA, 25 bp, Homo sapien
catacatatcgtttacagggatgga

SEQ ID NO: 1228819 - DNA, 25 bp, Homo sapien
atcctgcagtaagtgtagcatgtac

SEQ ID NO: 1228820 - DNA, 25 bp, Homo sapien
aaataaaagttagagagctctctgg

SEQ ID NO: 1228821 - DNA, 25 bp, Homo sapien
tagagagctctctggtataaaacgt

SEQ ID NO: 1228822 - DNA, 25 bp, Homo sapien
tcatattgtttgtataattcggtaa

SEQ ID NO: 1228823 - DNA, 25 bp, Homo sapien
tctggtataaaacgtccgtaacagc

SEQ ID NO: 1228824 - DNA, 25 bp, Homo sapien
cagtctgacaagagcgtcgtttggg

SEQ ID NO: 1228825 - DNA, 25 bp, Homo sapien
tgggagcaaaagaacgaactattac

SEQ ID NO: 1228826 - DNA, 25 bp, Homo sapien
tataaggtatgtgctggaacacctc

SEQ ID NO: 1228827 - DNA, 25 bp, Homo sapien
gaacacctcttcagccaggtgagga

SEQ ID NO: 1228828 - DNA, 25 bp, Homo sapien
agaaatgagtctcgcattgcacacg

SEQ ID NO: 1228829 - DNA, 25 bp, Homo sapien
agcagtccaggttctatcacagtga

SEQ ID NO: 1228830 - DNA, 25 bp, Homo sapien
ccagtacggaaaacactcttgggct

SEQ ID NO: 1228831 - DNA, 25 bp, Homo sapien
gcatttttgccagggatgcttccaa

SEQ ID NO: 1228832 - DNA, 25 bp, Homo sapien
catttcaaaaggtacatattgctgc

SEQ ID NO: 1228833 - DNA, 25 bp, Homo sapien
tcaaaaggtacatattgctgcatac

SEQ ID NO: 1228834 - DNA, 25 bp, Homo sapien
tttcaaaaggtacatattgctgcat

SEQ ID NO: 1228835 - DNA, 25 bp, Homo sapien
ccatttcaaaaggtacatattgctg

SEQ ID NO: 1228836 - DNA, 25 bp, Homo sapien
aacataatagaataattgcatagta

SEQ ID NO: 1228837 - DNA, 25 bp, Homo sapien
cataacccaatgttatttgattaat

SEQ ID NO: 1228838 - DNA, 25 bp, Homo sapien
gaataattgcatagtaaagttacac

SEQ ID NO: 1228839 - DNA, 25 bp, Homo sapien
tacacataacccaatgttatttgat

SEQ ID NO: 1228840 - DNA, 25 bp, Homo sapien
catgtgaaagttacagtttatgtta

SEQ ID NO: 1228841 - DNA, 25 bp, Homo sapien
gaagcatgtgaaagttacagtttat

SEQ ID NO: 1228842 - DNA, 25 bp, Homo sapien
aagcatgtgaaagttacagtttatg

SEQ ID NO: 1228843 - DNA, 25 bp, Homo sapien
gcatgtgaaagttacagtttatgtt

SEQ ID NO: 1228844 - DNA, 25 bp, Homo sapien
agaggtgctggaagtctcttcagac

SEQ ID NO: 1228845 - DNA, 25 bp, Homo sapien
tgagaggtgctggaagtctcttcag

SEQ ID NO: 1228846 - DNA, 25 bp, Homo sapien
ttcaactgagaggtgctggaagtct

SEQ ID NO: 1228847 - DNA, 25 bp, Homo sapien
actgagaggtgctggaagtctcttc

SEQ ID NO: 1228848 - DNA, 25 bp, Homo sapien
tcctgagccagtaaagttgactcag

SEQ ID NO: 1228849 - DNA, 25 bp, Homo sapien
cctgagccagtaaagttgactcaga

SEQ ID NO: 1228850 - DNA, 25 bp, Homo sapien
tgagccagtaaagttgactcagaag

SEQ ID NO: 1228851 - DNA, 25 bp, Homo sapien
ctgagccagtaaagttgactcagaa

SEQ ID NO: 1228852 - DNA, 25 bp, Homo sapien
gaatttccctttaagctcgattaca

SEQ ID NO: 1228853 - DNA, 25 bp, Homo sapien
tccctttaagctcgattacatctgc

SEQ ID NO: 1228854 - DNA, 25 bp, Homo sapien
cttctaagttgatgaggaatttccc

SEQ ID NO: 1228855 - DNA, 25 bp, Homo sapien
taagctcgattacatctgcagtcat

SEQ ID NO: 1228856 - DNA, 25 bp, Homo sapien
tccgctgtatacttccaacaacggg

SEQ ID NO: 1228857 - DNA, 25 bp, Homo sapien
tttttctttcgtagtcggcatgaca

SEQ ID NO: 1228858 - DNA, 25 bp, Homo sapien
gacaacttctgcacatcgaggacac

SEQ ID NO: 1228859 - DNA, 25 bp, Homo sapien
tcgaggacacagtgtatctgaagac

SEQ ID NO: 1228860 - DNA, 25 bp, Homo sapien
catccactcattacctaaatcttgg

SEQ ID NO: 1228861 - DNA, 25 bp, Homo sapien
tctatgttctgaataagtccactat

SEQ ID NO: 1228862 - DNA, 25 bp, Homo sapien
ttggccgtatttgaagacaagctga

SEQ ID NO: 1228863 - DNA, 25 bp, Homo sapien
acttctagccagtactgtcaggagg

SEQ ID NO: 1228864 - DNA, 25 bp, Homo sapien
tcatctatggtcaaagtaaacactg

SEQ ID NO: 1228865 - DNA, 25 bp, Homo sapien
cctctctcaccctgataggaatggg

SEQ ID NO: 1228866 - DNA, 25 bp, Homo sapien
catttagaagttgctgtggtccact

SEQ ID NO: 1228867 - DNA, 25 bp, Homo sapien
gattcctgctgaatagaattagcca

SEQ ID NO: 1228868 - DNA, 25 bp, Homo sapien
gtctctagttagatttgttatccta

SEQ ID NO: 1228869 - DNA, 25 bp, Homo sapien
taaaatctaattctgacttgtatgg

SEQ ID NO: 1228870 - DNA, 25 bp, Homo sapien
aaatctgattgataggaagaaaggc

SEQ ID NO: 1228871 - DNA, 25 bp, Homo sapien
taaatacctatgtagacattctata

SEQ ID NO: 1228872 - DNA, 25 bp, Homo sapien
tagtatgaacttaaggaggctagtc

SEQ ID NO: 1228873 - DNA, 25 bp, Homo sapien
taaagaataaatcctcaattccatc

SEQ ID NO: 1228874 - DNA, 25 bp, Homo sapien
ttccaagtacgctgaaagtagtagt

SEQ ID NO: 1228875 - DNA, 25 bp, Homo sapien
gaggctagtcaaagaaacttggagt

SEQ ID NO: 1228876 - DNA, 25 bp, Homo sapien
agccacacacatcctagaattcttg

SEQ ID NO: 1228877 - DNA, 25 bp, Homo sapien
cacacatcctagaattcttgtaaac

SEQ ID NO: 1228878 - DNA, 25 bp, Homo sapien
gaattcttgtaaacatatctggctc

SEQ ID NO: 1228879 - DNA, 25 bp, Homo sapien
cttgtaaacatatctggctctgtgt

SEQ ID NO: 1228880 - DNA, 25 bp, Homo sapien
tactgttaagtaactatcaaacttg

SEQ ID NO: 1228881 - DNA, 25 bp, Homo sapien
gctaaaagagcacatccaaacaaga

SEQ ID NO: 1228882 - DNA, 25 bp, Homo sapien
gaagccaactatagtaatcatgcaa

SEQ ID NO: 1228883 - DNA, 25 bp, Homo sapien
agataaatggttaagatgtcttgag

SEQ ID NO: 1228884 - DNA, 25 bp, Homo sapien
tatttttagaatgtagccatacagt

SEQ ID NO: 1228885 - DNA, 25 bp, Homo sapien
cagtgtaattatgggtatctgtcat

SEQ ID NO: 1228886 - DNA, 25 bp, Homo sapien
ctttgagctctacaaataccaagta

SEQ ID NO: 1228887 - DNA, 25 bp, Homo sapien
catagtaagtcattgtgatacagaa

SEQ ID NO: 1228888 - DNA, 25 bp, Homo sapien
gctaatattatctgtccttgggaac

SEQ ID NO: 1228889 - DNA, 25 bp, Homo sapien
gtaccctatagtgcctagagcagtc

SEQ ID NO: 1228890 - DNA, 25 bp, Homo sapien
ctatagtgcctagagcagtccaagt

SEQ ID NO: 1228891 - DNA, 25 bp, Homo sapien
aaaaactgcttagtggtattacagc

SEQ ID NO: 1228892 - DNA, 25 bp, Homo sapien
gaggaagaatgggttcaagatcatc

SEQ ID NO: 1228893 - DNA, 25 bp, Homo sapien
ttgtatccacatcaggtcactgtaa

SEQ ID NO: 1228894 - DNA, 25 bp, Homo sapien
tgccaaaattgagaatcagagatgt

SEQ ID NO: 1228895 - DNA, 25 bp, Homo sapien
catcaggtcactgtaaaaatgtatt

SEQ ID NO: 1228896 - DNA, 25 bp, Homo sapien
aaagtgcaaccctggctaaattcca

SEQ ID NO: 1228897 - DNA, 25 bp, Homo sapien
gttcatgtacagtccccatcagtag

SEQ ID NO: 1228898 - DNA, 25 bp, Homo sapien
gaaaatgcctttgttgtcatgctcc

SEQ ID NO: 1228899 - DNA, 25 bp, Homo sapien
catcagtagcgtatagaacacccca

SEQ ID NO: 1228900 - DNA, 25 bp, Homo sapien
tatttgattatcctgcagcctaaca

SEQ ID NO: 1228901 - DNA, 25 bp, Homo sapien
gattatcctgcagcctaacatatta

SEQ ID NO: 1228902 - DNA, 25 bp, Homo sapien
tgcagcctaacatattactgtgtat

SEQ ID NO: 1228903 - DNA, 25 bp, Homo sapien
cagatgttagaaacatcactgtttg

SEQ ID NO: 1228904 - DNA, 25 bp, Homo sapien
gaaagggtaaggatgccatttgaat

SEQ ID NO: 1228905 - DNA, 25 bp, Homo sapien
tgaaagggtaaggatgccatttgaa

SEQ ID NO: 1228906 - DNA, 25 bp, Homo sapien
aaagggtaaggatgccatttgaata

SEQ ID NO: 1228907 - DNA, 25 bp, Homo sapien
tactggaaggactgtatatgaggtt

SEQ ID NO: 1228908 - DNA, 25 bp, Homo sapien
tctactgtcctggaatcatttgggt

SEQ ID NO: 1228909 - DNA, 25 bp, Homo sapien
tcctcctaatatccacagaacgtta

SEQ ID NO: 1228910 - DNA, 25 bp, Homo sapien
gaacgttattcctctgttgtgaagc

SEQ ID NO: 1228911 - DNA, 25 bp, Homo sapien
gtgaatgtcacccagaagtgtcagt

SEQ ID NO: 1228912 - DNA, 25 bp, Homo sapien
ggtcttagccctcagctgttgttgg

SEQ ID NO: 1228913 - DNA, 25 bp, Homo sapien
tgtgtcacactttggagtcggctgg

SEQ ID NO: 1228914 - DNA, 25 bp, Homo sapien
agaaagctccactgaggatatgtgt

SEQ ID NO: 1228915 - DNA, 25 bp, Homo sapien
aaaagtggtcagaagtaaatatagc

SEQ ID NO: 1228916 - DNA, 25 bp, Homo sapien
gtaagatttgataaggctgggtgat

SEQ ID NO: 1228917 - DNA, 25 bp, Homo sapien
tgggtgatagactggttattattta

SEQ ID NO: 1228918 - DNA, 25 bp, Homo sapien
agaaaaagtggtcagaagtaaatat

SEQ ID NO: 1228919 - DNA, 25 bp, Homo sapien
taaaccagatcaacgtaaaatgcca

SEQ ID NO: 1228920 - DNA, 25 bp, Homo sapien
catactttagtctttgctaaaccag

SEQ ID NO: 1228921 - DNA, 25 bp, Homo sapien
aaatattgtattgggaaacaagact

SEQ ID NO: 1228922 - DNA, 25 bp, Homo sapien
caagactgtgagagatgaatgcgct

SEQ ID NO: 1228923 - DNA, 25 bp, Homo sapien
gagagtccgactgcctgaatttctg

SEQ ID NO: 1228924 - DNA, 25 bp, Homo sapien
ttactaattatgaaaccctgggcaa

SEQ ID NO: 1228925 - DNA, 25 bp, Homo sapien
catagtgtcataattgagagtccga

SEQ ID NO: 1228926 - DNA, 25 bp, Homo sapien
tgttagctagccttattccatcaga

SEQ ID NO: 1228927 - DNA, 25 bp, Homo sapien
tcaattactattcgtttagcaaata

SEQ ID NO: 1228928 - DNA, 25 bp, Homo sapien
aggtttagaaacaaccactgatttg

SEQ ID NO: 1228929 - DNA, 25 bp, Homo sapien
cacatacacaggatacacgttctct

SEQ ID NO: 1228930 - DNA, 25 bp, Homo sapien
gggtatatgcggaaggatttgagta

SEQ ID NO: 1228931 - DNA, 25 bp, Homo sapien
tcaagccatctactctgaactaggt

SEQ ID NO: 1228932 - DNA, 25 bp, Homo sapien
gaactaggtttttagaagatcttca

SEQ ID NO: 1228933 - DNA, 25 bp, Homo sapien
tgttgaaagtcccatgtaattgagc

SEQ ID NO: 1228934 - DNA, 25 bp, Homo sapien
tctatccctaccatgaaatcaggtt

SEQ ID NO: 1228935 - DNA, 25 bp, Homo sapien
ggggatccattgtcattctgctttg

SEQ ID NO: 1228936 - DNA, 25 bp, Homo sapien
tttttatgagagatggggatccatt

SEQ ID NO: 1228937 - DNA, 25 bp, Homo sapien
atggggatccattgtcattctgctt

SEQ ID NO: 1228938 - DNA, 25 bp, Homo sapien
ggatccattgtcattctgctttgcc

SEQ ID NO: 1228939 - DNA, 25 bp, Homo sapien
tctgggttcaggagaacaatggccc

SEQ ID NO: 1228940 - DNA, 25 bp, Homo sapien
tcggtggatgtactattctgggttc

SEQ ID NO: 1228941 - DNA, 25 bp, Homo sapien
taaaattccaccaacctctagggca

SEQ ID NO: 1228942 - DNA, 25 bp, Homo sapien
tccttccgagaacacctcagcttgg

SEQ ID NO: 1228943 - DNA, 25 bp, Homo sapien
tttgctgtaagaacagtgctccact

SEQ ID NO: 1228944 - DNA, 25 bp, Homo sapien
gcatccttatacatgtgggtcacaa

SEQ ID NO: 1228945 - DNA, 25 bp, Homo sapien
tattacactgaagactccactaggc

SEQ ID NO: 1228946 - DNA, 25 bp, Homo sapien
cacccagtctatagcatgttcttaa

SEQ ID NO: 1228947 - DNA, 25 bp, Homo sapien
aactccgcgtcagacgcgccgtcag

SEQ ID NO: 1228948 - DNA, 25 bp, Homo sapien
ctccgcgtcagacgcgccgtcaggc

SEQ ID NO: 1228949 - DNA, 25 bp, Homo sapien
acccaactccgcgtcagacgcgccg

SEQ ID NO: 1228950 - DNA, 25 bp, Homo sapien
accccacccaactccgcgtcagacg

SEQ ID NO: 1228951 - DNA, 25 bp, Homo sapien
ctggaatttaggcttcgggtcctgc

SEQ ID NO: 1228952 - DNA, 25 bp, Homo sapien
tttaggcttcgggtcctgcttccgc

SEQ ID NO: 1228953 - DNA, 25 bp, Homo sapien
taggcttcgggtcctgcttccgcgc

SEQ ID NO: 1228954 - DNA, 25 bp, Homo sapien
gaatttaggcttcgggtcctgcttc

SEQ ID NO: 1228955 - DNA, 25 bp, Homo sapien
aagaagaggcccatgaaagcacagc

SEQ ID NO: 1228956 - DNA, 25 bp, Homo sapien
cataaagaagaggcccatgaaagca

SEQ ID NO: 1228957 - DNA, 25 bp, Homo sapien
gaagaggcccatgaaagcacagcac

SEQ ID NO: 1228958 - DNA, 25 bp, Homo sapien
cttcataaagaagaggcccatgaaa

SEQ ID NO: 1228959 - DNA, 25 bp, Homo sapien
aagttctcgctgtttctgcaaattg

SEQ ID NO: 1228960 - DNA, 25 bp, Homo sapien
tgaagttctcgctgtttctgcaaat

SEQ ID NO: 1228961 - DNA, 25 bp, Homo sapien
agtcatcaacaagccacggttttag

SEQ ID NO: 1228962 - DNA, 25 bp, Homo sapien
tcccagtcatcaacaagccacggtt

SEQ ID NO: 1228963 - DNA, 25 bp, Homo sapien
aagataaaagagctgtttttgcctg

SEQ ID NO: 1228964 - DNA, 25 bp, Homo sapien
tttgcctggtaattaagtcccagtc

SEQ ID NO: 1228965 - DNA, 25 bp, Homo sapien
ctgggacatgggtgcatcgggatga

SEQ ID NO: 1228966 - DNA, 25 bp, Homo sapien
caaatttatagagtagctgggtacc

SEQ ID NO: 1228967 - DNA, 25 bp, Homo sapien
ttatagagtagctgggtacccaaca

SEQ ID NO: 1228968 - DNA, 25 bp, Homo sapien
tgcatcgggatgatctgcaagaatt

SEQ ID NO: 1228969 - DNA, 25 bp, Homo sapien
tgctccaattcgtacaaataatctc

SEQ ID NO: 1228970 - DNA, 25 bp, Homo sapien
ctcaggagatgtggcgctccataca

SEQ ID NO: 1228971 - DNA, 25 bp, Homo sapien
ccaattcgtacaaataatctcagga

SEQ ID NO: 1228972 - DNA, 25 bp, Homo sapien
tctcaggagatgtggcgctccatac

SEQ ID NO: 1228973 - DNA, 25 bp, Homo sapien
ttgagtaataaagcaaggctcttct

SEQ ID NO: 1228974 - DNA, 25 bp, Homo sapien
ttaggaaatcgtgaagataattgag

SEQ ID NO: 1228975 - DNA, 25 bp, Homo sapien
gagccacttcataatcgctggcact

SEQ ID NO: 1228976 - DNA, 25 bp, Homo sapien
agataattgagtaataaagcaaggc

SEQ ID NO: 1228977 - DNA, 25 bp, Homo sapien
tgtacaagagatagactaagaacaa

SEQ ID NO: 1228978 - DNA, 25 bp, Homo sapien
aaaacaaacatcaattgttatacac

SEQ ID NO: 1228979 - DNA, 25 bp, Homo sapien
aacaaacatcaattgttatacacta

SEQ ID NO: 1228980 - DNA, 25 bp, Homo sapien
tttgtacaagagatagactaagaac

SEQ ID NO: 1228981 - DNA, 25 bp, Homo sapien
gcaaaggatgggctctttactttaa

SEQ ID NO: 1228982 - DNA, 25 bp, Homo sapien
ggatgggctctttactttaagcacc

SEQ ID NO: 1228983 - DNA, 25 bp, Homo sapien
aaggatgggctctttactttaagca

SEQ ID NO: 1228984 - DNA, 25 bp, Homo sapien
cttgcaaaggatgggctctttactt

SEQ ID NO: 1228985 - DNA, 25 bp, Homo sapien
caatcccattactacctgaaagtac

SEQ ID NO: 1228986 - DNA, 25 bp, Homo sapien
ccattactacctgaaagtacttagc

SEQ ID NO: 1228987 - DNA, 25 bp, Homo sapien
tagcagtaactatcatttgcctcat

SEQ ID NO: 1228988 - DNA, 25 bp, Homo sapien
cctgaaagtacttagcagtaactat

SEQ ID NO: 1228989 - DNA, 25 bp, Homo sapien
caccaccactcactatctgcacatc

SEQ ID NO: 1228990 - DNA, 25 bp, Homo sapien
tcaccaccactcactatctgcacat

SEQ ID NO: 1228991 - DNA, 25 bp, Homo sapien
gcgtcaagacctgcttattttgccc

SEQ ID NO: 1228992 - DNA, 25 bp, Homo sapien
atgagaacataagggtgtcccaagc

SEQ ID NO: 1228993 - DNA, 25 bp, Homo sapien
tggccacaggcagcgatgcaacctg

SEQ ID NO: 1228994 - DNA, 25 bp, Homo sapien
tgagtgaacaaatctgcgcgtcaag

SEQ ID NO: 1228995 - DNA, 25 bp, Homo sapien
ctgaaggccactccagaccaccagc

SEQ ID NO: 1228996 - DNA, 25 bp, Homo sapien
aaggccactccagaccaccagccat

SEQ ID NO: 1228997 - DNA, 25 bp, Homo sapien
caaggggctgaaggccactccagac

SEQ ID NO: 1228998 - DNA, 25 bp, Homo sapien
gggctgaaggccactccagaccacc

SEQ ID NO: 1228999 - DNA, 25 bp, Homo sapien
acccctgctgagtcgtggcttctgg

SEQ ID NO: 1229000 - DNA, 25 bp, Homo sapien
cccctgctgagtcgtggcttctggg

SEQ ID NO: 1229001 - DNA, 25 bp, Homo sapien
taacccctgctgagtcgtggcttct

SEQ ID NO: 1229002 - DNA, 25 bp, Homo sapien
aacccctgctgagtcgtggcttctg

SEQ ID NO: 1229003 - DNA, 25 bp, Homo sapien
tactgaacagtttaccacaatggga

SEQ ID NO: 1229004 - DNA, 25 bp, Homo sapien
aatccagaatatgtgaccactgtgc

SEQ ID NO: 1229005 - DNA, 25 bp, Homo sapien
ggtctgcaagcattgacatccacag

SEQ ID NO: 1229006 - DNA, 25 bp, Homo sapien
ccacaatgggactattctgggaatc

SEQ ID NO: 1229007 - DNA, 25 bp, Homo sapien
ggagagggtttagcatctctgcctg

SEQ ID NO: 1229008 - DNA, 25 bp, Homo sapien
agagggtttagcatctctgcctgag

SEQ ID NO: 1229009 - DNA, 25 bp, Homo sapien
aaggagagggtttagcatctctgcc

SEQ ID NO: 1229010 - DNA, 25 bp, Homo sapien
tcaaggagagggtttagcatctctg

SEQ ID NO: 1229011 - DNA, 25 bp, Homo sapien
gcaactttgttgactttggcaacca

SEQ ID NO: 1229012 - DNA, 25 bp, Homo sapien
cttcagcaactttgttgactttggc

SEQ ID NO: 1229013 - DNA, 25 bp, Homo sapien
tttgttgactttggcaaccacagga

SEQ ID NO: 1229014 - DNA, 25 bp, Homo sapien
ttcttcagcaactttgttgactttg

SEQ ID NO: 1229015 - DNA, 25 bp, Homo sapien
tggaatcctcctcccctatttttgc

SEQ ID NO: 1229016 - DNA, 25 bp, Homo sapien
ctgtggaatcctcctcccctatttt

SEQ ID NO: 1229017 - DNA, 25 bp, Homo sapien
aaagaggtgagcaggtgcaggctct

SEQ ID NO: 1229018 - DNA, 25 bp, Homo sapien
ctgtttccaggccatcatggcactt

SEQ ID NO: 1229019 - DNA, 25 bp, Homo sapien
ctacgccctttccacttctcttcca

SEQ ID NO: 1229020 - DNA, 25 bp, Homo sapien
tttccacttctcttccaacattccc

SEQ ID NO: 1229021 - DNA, 25 bp, Homo sapien
tccacttctcttccaacattcccac

SEQ ID NO: 1229022 - DNA, 25 bp, Homo sapien
cctttccacttctcttccaacattc

SEQ ID NO: 1229023 - DNA, 25 bp, Homo sapien
gtctctcaggtagagagttagttga

SEQ ID NO: 1229024 - DNA, 25 bp, Homo sapien
aaaggaaggattcataggcaatctt

SEQ ID NO: 1229025 - DNA, 25 bp, Homo sapien
gcatagtcatgcacaaaggaaggat

SEQ ID NO: 1229026 - DNA, 25 bp, Homo sapien
tagagagttagttgattcatgactc

SEQ ID NO: 1229027 - DNA, 25 bp, Homo sapien
aattcattcacgaaaatcgaagtgg

SEQ ID NO: 1229028 - DNA, 25 bp, Homo sapien
tcacagccagactctctcgcatggt

SEQ ID NO: 1229029 - DNA, 25 bp, Homo sapien
gttcacttggctcagaggatgcagg

SEQ ID NO: 1229030 - DNA, 25 bp, Homo sapien
cacgaaaatcgaagtggcatttaag

SEQ ID NO: 1229031 - DNA, 25 bp, Homo sapien
ttactgaccaaaaagtactggtgag

SEQ ID NO: 1229032 - DNA, 25 bp, Homo sapien
aaagtactggtgagaagcatttgag

SEQ ID NO: 1229033 - DNA, 25 bp, Homo sapien
ctctaagaattactgaccaaaaagt

SEQ ID NO: 1229034 - DNA, 25 bp, Homo sapien
ccaaaaagtactggtgagaagcatt

SEQ ID NO: 1229035 - DNA, 25 bp, Homo sapien
tcagatccggcatattctcctcact

SEQ ID NO: 1229036 - DNA, 25 bp, Homo sapien
tggctctcagatccggcatattctc

SEQ ID NO: 1229037 - DNA, 25 bp, Homo sapien
tctcagatccggcatattctcctca

SEQ ID NO: 1229038 - DNA, 25 bp, Homo sapien
aagctggctctcagatccggcatat

SEQ ID NO: 1229039 - DNA, 25 bp, Homo sapien
cactcagtgagtgcactcgcaatga

SEQ ID NO: 1229040 - DNA, 25 bp, Homo sapien
caatgaccccttaattggaagtgcc

SEQ ID NO: 1229041 - DNA, 25 bp, Homo sapien
ttaattggaagtgccaggacctctg

SEQ ID NO: 1229042 - DNA, 25 bp, Homo sapien
ccctttcacatgcactcagtgagtg

SEQ ID NO: 1229043 - DNA, 25 bp, Homo sapien
ctacttttaatcacagcagtgtaac

SEQ ID NO: 1229044 - DNA, 25 bp, Homo sapien
tgttaaattcacctgaatcctcaga

SEQ ID NO: 1229045 - DNA, 25 bp, Homo sapien
tccctggcctcacactacttttaat

SEQ ID NO: 1229046 - DNA, 25 bp, Homo sapien
actttgttaaattcacctgaatcct

SEQ ID NO: 1229047 - DNA, 25 bp, Homo sapien
tgttagagcactgccctgttccgct

SEQ ID NO: 1229048 - DNA, 25 bp, Homo sapien
agtgttagagcactgccctgttccg

SEQ ID NO: 1229049 - DNA, 25 bp, Homo sapien
cagcttgacaccagtgttagagcac

SEQ ID NO: 1229050 - DNA, 25 bp, Homo sapien
agagcactgccctgttccgctagac

SEQ ID NO: 1229051 - DNA, 25 bp, Homo sapien
ttttaattacggtgtatgcagcccc

SEQ ID NO: 1229052 - DNA, 25 bp, Homo sapien
cacttcatgagaacgtaatgggaac

SEQ ID NO: 1229053 - DNA, 25 bp, Homo sapien
gctgttactggcttgagagagcata

SEQ ID NO: 1229054 - DNA, 25 bp, Homo sapien
cacctggagcgccttagagttgtga

SEQ ID NO: 1229055 - DNA, 25 bp, Homo sapien
cagggattgtagagatactctctca

SEQ ID NO: 1229056 - DNA, 25 bp, Homo sapien
cagcacgtaagtgttctctttggca

SEQ ID NO: 1229057 - DNA, 25 bp, Homo sapien
gatactctctcaacctgtcactgat

SEQ ID NO: 1229058 - DNA, 25 bp, Homo sapien
tttgaggtacaacatatccccaggg

SEQ ID NO: 1229059 - DNA, 25 bp, Homo sapien
gacacggtgcaaagcaaatatcgcc

SEQ ID NO: 1229060 - DNA, 25 bp, Homo sapien
tgtttagaactgctgggaagcccct

SEQ ID NO: 1229061 - DNA, 25 bp, Homo sapien
caaaggtgacattacagctgatccc

SEQ ID NO: 1229062 - DNA, 25 bp, Homo sapien
gaagcccctgcaagtagacatgctg

SEQ ID NO: 1229063 - DNA, 25 bp, Homo sapien
tgtggcaaagacagcatcatcatcc

SEQ ID NO: 1229064 - DNA, 25 bp, Homo sapien
catccttgtagacagctttgtgagc

SEQ ID NO: 1229065 - DNA, 25 bp, Homo sapien
gagaccagactttccccatatggca

SEQ ID NO: 1229066 - DNA, 25 bp, Homo sapien
tgggaggcctagcactagaggaaaa

SEQ ID NO: 1229067 - DNA, 25 bp, Homo sapien
ctgcattacaacggtcattggcctt

SEQ ID NO: 1229068 - DNA, 25 bp, Homo sapien
gcagtaggagcatttcctatcatct

SEQ ID NO: 1229069 - DNA, 25 bp, Homo sapien
gttgcagtaggagcatttcctatca

SEQ ID NO: 1229070 - DNA, 25 bp, Homo sapien
aagttgcagtaggagcatttcctat

SEQ ID NO: 1229071 - DNA, 25 bp, Homo sapien
ggagggccattaagcaatgacagag

SEQ ID NO: 1229072 - DNA, 25 bp, Homo sapien
tggagggccattaagcaatgacaga

SEQ ID NO: 1229073 - DNA, 25 bp, Homo sapien
cttgctgtataagtgtggaagaatc

SEQ ID NO: 1229074 - DNA, 25 bp, Homo sapien
gaaggaactgtgagtacaccaaata

SEQ ID NO: 1229075 - DNA, 25 bp, Homo sapien
ctattctagttgctcctctgtccag

SEQ ID NO: 1229076 - DNA, 25 bp, Homo sapien
ccacaacatgcagtgtcacgtctct

SEQ ID NO: 1229077 - DNA, 25 bp, Homo sapien
ttggctggaacaccaatactacccc

SEQ ID NO: 1229078 - DNA, 25 bp, Homo sapien
gtgtcacgtctctgcgcctactgca

SEQ ID NO: 1229079 - DNA, 25 bp, Homo sapien
tctgcacgttcacaagctccaggct

SEQ ID NO: 1229080 - DNA, 25 bp, Homo sapien
ctgtactgattctgcacgttcacaa

SEQ ID NO: 1229081 - DNA, 25 bp, Homo sapien
ttctgcacgttcacaagctccaggc

SEQ ID NO: 1229082 - DNA, 25 bp, Homo sapien
tactgattctgcacgttcacaagct

SEQ ID NO: 1229083 - DNA, 25 bp, Homo sapien
tcatacccacataagctactgtcag

SEQ ID NO: 1229084 - DNA, 25 bp, Homo sapien
tttactaaactcttgctttgctgtc

SEQ ID NO: 1229085 - DNA, 25 bp, Homo sapien
cctctccaagggtttaatgccaaag

SEQ ID NO: 1229086 - DNA, 25 bp, Homo sapien
caggaagacaccagttcattgtcat

SEQ ID NO: 1229087 - DNA, 25 bp, Homo sapien
gaagtaggaggtaaatagagatttc

SEQ ID NO: 1229088 - DNA, 25 bp, Homo sapien
ctttagaagtaggaggtaaatagag

SEQ ID NO: 1229089 - DNA, 25 bp, Homo sapien
aatctgcaaggtaccctcaaattgc

SEQ ID NO: 1229090 - DNA, 25 bp, Homo sapien
ggtaaatagagatttcaggaacaag

SEQ ID NO: 1229091 - DNA, 25 bp, Homo sapien
acataataaagctgacagaagtatt

SEQ ID NO: 1229092 - DNA, 25 bp, Homo sapien
gctacaacaataggaggaataacaa

SEQ ID NO: 1229093 - DNA, 25 bp, Homo sapien
aaagctgacagaagtatttcacaag

SEQ ID NO: 1229094 - DNA, 25 bp, Homo sapien
agaaagagagtcaaagctacaacaa

SEQ ID NO: 1229095 - DNA, 25 bp, Homo sapien
cttattaaggcccttcatggaggac

SEQ ID NO: 1229096 - DNA, 25 bp, Homo sapien
taaggcccttcatggaggacagccc

SEQ ID NO: 1229097 - DNA, 25 bp, Homo sapien
gcccttcatggaggacagccccaag

SEQ ID NO: 1229098 - DNA, 25 bp, Homo sapien
tattaaggcccttcatggaggacag

SEQ ID NO: 1229099 - DNA, 25 bp, Homo sapien
tgatagccatgacagagtacatact

SEQ ID NO: 1229100 - DNA, 25 bp, Homo sapien
caacagcctggcatgggaggtcccc

SEQ ID NO: 1229101 - DNA, 25 bp, Homo sapien
ggaggtcccccatatggatgatagc

SEQ ID NO: 1229102 - DNA, 25 bp, Homo sapien
atgacagagtacatactcataaagg

SEQ ID NO: 1229103 - DNA, 25 bp, Homo sapien
taagcatagacccaacaaaaagatg

SEQ ID NO: 1229104 - DNA, 25 bp, Homo sapien
aagcatagacccaacaaaaagatgt

SEQ ID NO: 1229105 - DNA, 25 bp, Homo sapien
ttaagcatagacccaacaaaaagat

SEQ ID NO: 1229106 - DNA, 25 bp, Homo sapien
cttaagcatagacccaacaaaaaga

SEQ ID NO: 1229107 - DNA, 25 bp, Homo sapien
actggttgtccattgctggcttctc

SEQ ID NO: 1229108 - DNA, 25 bp, Homo sapien
cctcctgggcctgaattcctctcct

SEQ ID NO: 1229109 - DNA, 25 bp, Homo sapien
tgctggcttctcgtcctgcctcgat

SEQ ID NO: 1229110 - DNA, 25 bp, Homo sapien
gtccattgctggcttctcgtcctgc

SEQ ID NO: 1229111 - DNA, 25 bp, Homo sapien
gtagctccaactccgctttcccaca

SEQ ID NO: 1229112 - DNA, 25 bp, Homo sapien
tccgctttcccacaggcagatcctc

SEQ ID NO: 1229113 - DNA, 25 bp, Homo sapien
ggatgcaccaagctgtgcatcagta

SEQ ID NO: 1229114 - DNA, 25 bp, Homo sapien
caagctgtgcatcagtaattattgc

SEQ ID NO: 1229115 - DNA, 25 bp, Homo sapien
gctctgcagggcgggacccagtgag

SEQ ID NO: 1229116 - DNA, 25 bp, Homo sapien
gcatcatttttagggtgttcctctc

SEQ ID NO: 1229117 - DNA, 25 bp, Homo sapien
tcagggtaaccactaaggctaactc

SEQ ID NO: 1229118 - DNA, 25 bp, Homo sapien
tccttcagggtaaccactaaggcta

SEQ ID NO: 1229119 - DNA, 25 bp, Homo sapien
tcagtggacagtagtgtaaagagac

SEQ ID NO: 1229120 - DNA, 25 bp, Homo sapien
gacagtagtgtaaagagactcacag

SEQ ID NO: 1229121 - DNA, 25 bp, Homo sapien
aagagactcacagacccgaccagac

SEQ ID NO: 1229122 - DNA, 25 bp, Homo sapien
gacccgaccagaccagaaatctatc

SEQ ID NO: 1229123 - DNA, 25 bp, Homo sapien
atggagttcatcactatcactggtg

SEQ ID NO: 1229124 - DNA, 25 bp, Homo sapien
cgctataaggcatgaatggagttca

SEQ ID NO: 1229125 - DNA, 25 bp, Homo sapien
ttatgcagaatggtgtgctcccgct

SEQ ID NO: 1229126 - DNA, 25 bp, Homo sapien
gcatggaaggactcaagctgggatt

SEQ ID NO: 1229127 - DNA, 25 bp, Homo sapien
ttgcaaaaactgagtaatgggaaat

SEQ ID NO: 1229128 - DNA, 25 bp, Homo sapien
taatgggaaatgttctgccaagact

SEQ ID NO: 1229129 - DNA, 25 bp, Homo sapien
attttgcaaaaactgagtaatggga

SEQ ID NO: 1229130 - DNA, 25 bp, Homo sapien
gtaatgggaaatgttctgccaagac

SEQ ID NO: 1229131 - DNA, 25 bp, Homo sapien
tcttctggatcctctgcgtgggcct

SEQ ID NO: 1229132 - DNA, 25 bp, Homo sapien
ttcttccactagtacaccactctgt

SEQ ID NO: 1229133 - DNA, 25 bp, Homo sapien
gaaatgtcagctgtagccaattcca

SEQ ID NO: 1229134 - DNA, 25 bp, Homo sapien
catgtggtcgactgacatctcccca

SEQ ID NO: 1229135 - DNA, 25 bp, Homo sapien
tctccaaatcagcatgaatacccat

SEQ ID NO: 1229136 - DNA, 25 bp, Homo sapien
aaatcagcatgaatacccatgctgg

SEQ ID NO: 1229137 - DNA, 25 bp, Homo sapien
ctctccaaatcagcatgaataccca

SEQ ID NO: 1229138 - DNA, 25 bp, Homo sapien
tccaaatcagcatgaatacccatgc

SEQ ID NO: 1229139 - DNA, 25 bp, Homo sapien
tctgggtcttttcacctgtcggaga

SEQ ID NO: 1229140 - DNA, 25 bp, Homo sapien
ctgggtcttttcacctgtcggagag

SEQ ID NO: 1229141 - DNA, 25 bp, Homo sapien
ctctgggtcttttcacctgtcggag

SEQ ID NO: 1229142 - DNA, 25 bp, Homo sapien
tgggtcttttcacctgtcggagagg

SEQ ID NO: 1229143 - DNA, 25 bp, Homo sapien
cgttctccgcctcaggtgtacggcg

SEQ ID NO: 1229144 - DNA, 25 bp, Homo sapien
atcactgcctggctcgtcctggcga

SEQ ID NO: 1229145 - DNA, 25 bp, Homo sapien
ggtgaagccggtgcctcaaatcact

SEQ ID NO: 1229146 - DNA, 25 bp, Homo sapien
taggctctccggaccatgggtgaag

SEQ ID NO: 1229147 - DNA, 25 bp, Homo sapien
gtgcggacgcgagcacaaggccggg

SEQ ID NO: 1229148 - DNA, 25 bp, Homo sapien
gccgcggggcggtgcaacaagcggc

SEQ ID NO: 1229149 - DNA, 25 bp, Homo sapien
gcggtgcaacaagcggccccggcgg

SEQ ID NO: 1229150 - DNA, 25 bp, Homo sapien
gaaaggggtgcggacgcgagcacaa

SEQ ID NO: 1229151 - DNA, 25 bp, Homo sapien
gtctcgccggccgggctgtggtgcg

SEQ ID NO: 1229152 - DNA, 25 bp, Homo sapien
cggggtctcgccggccgggctgtgg

SEQ ID NO: 1229153 - DNA, 25 bp, Homo sapien
ccggggtctcgccggccgggctgtg

SEQ ID NO: 1229154 - DNA, 25 bp, Homo sapien
gggtctcgccggccgggctgtggtg

SEQ ID NO: 1229155 - DNA, 25 bp, Homo sapien
cgctcgttcaccgtcggcaatggcg

SEQ ID NO: 1229156 - DNA, 25 bp, Homo sapien
ctcgttcaccgtcggcaatggcgtc

SEQ ID NO: 1229157 - DNA, 25 bp, Homo sapien
ttcaccgtcggcaatggcgtccggg

SEQ ID NO: 1229158 - DNA, 25 bp, Homo sapien
ttccgtgtcccgctcgttcaccgtc

SEQ ID NO: 1229159 - DNA, 25 bp, Homo sapien
tgtacaacacaataaggcacaagac

SEQ ID NO: 1229160 - DNA, 25 bp, Homo sapien
cattttcagaaggtactcacaacaa

SEQ ID NO: 1229161 - DNA, 25 bp, Homo sapien
catacttattaattgacaggtgtca

SEQ ID NO: 1229162 - DNA, 25 bp, Homo sapien
ccttgcagggagagactttatctta

SEQ ID NO: 1229163 - DNA, 25 bp, Homo sapien
gatgatgccatttactaccaactag

SEQ ID NO: 1229164 - DNA, 25 bp, Homo sapien
gtcaccaatggtgatttcgtagcca

SEQ ID NO: 1229165 - DNA, 25 bp, Homo sapien
tagagaataaagagagtcaccaatg

SEQ ID NO: 1229166 - DNA, 25 bp, Homo sapien
tactttatttcatcgatgagaagta

SEQ ID NO: 1229167 - DNA, 25 bp, Homo sapien
cattttggctgccatactggcatta

SEQ ID NO: 1229168 - DNA, 25 bp, Homo sapien
cgacaacgaaatatcaagatggtgt

SEQ ID NO: 1229169 - DNA, 25 bp, Homo sapien
tagaaccctttaatagtcatatgaa

SEQ ID NO: 1229170 - DNA, 25 bp, Homo sapien
agttagtgtccttgatataccaaag

SEQ ID NO: 1229171 - DNA, 25 bp, Homo sapien
tattaacaaggcacacacaaatctt

SEQ ID NO: 1229172 - DNA, 25 bp, Homo sapien
caaatacgttatatggatgaccaaa

SEQ ID NO: 1229173 - DNA, 25 bp, Homo sapien
cctgttgtatttagcccgttgaggc

SEQ ID NO: 1229174 - DNA, 25 bp, Homo sapien
cagtagtatataagagatcagtgct

SEQ ID NO: 1229175 - DNA, 25 bp, Homo sapien
ccatttatatgctctgaaggtcagt

SEQ ID NO: 1229176 - DNA, 25 bp, Homo sapien
gcttaaccagcttccacaattgtgt

SEQ ID NO: 1229177 - DNA, 25 bp, Homo sapien
ccctgactgaactccaatgtgataa

SEQ ID NO: 1229178 - DNA, 25 bp, Homo sapien
aaggcagtgagagacacgagttcca

SEQ ID NO: 1229179 - DNA, 25 bp, Homo sapien
tctactcgacatatagcatggagct

SEQ ID NO: 1229180 - DNA, 25 bp, Homo sapien
taaggcctccggtactgatgacaag

SEQ ID NO: 1229181 - DNA, 25 bp, Homo sapien
caaggctttgagcttcatacaggag

SEQ ID NO: 1229182 - DNA, 25 bp, Homo sapien
gataccgtatttcctgtccctaaga

SEQ ID NO: 1229183 - DNA, 25 bp, Homo sapien
cagtgtattaatagagatccaagga

SEQ ID NO: 1229184 - DNA, 25 bp, Homo sapien
tgaaatattagctgatatcaccaat

SEQ ID NO: 1229185 - DNA, 25 bp, Homo sapien
gtatgatcagaaggcaaagttaact

SEQ ID NO: 1229186 - DNA, 25 bp, Homo sapien
tcacttcaatcaattaggtgtatga

SEQ ID NO: 1229187 - DNA, 25 bp, Homo sapien
tcaagaggccttgttgtgtctcaac

SEQ ID NO: 1229188 - DNA, 25 bp, Homo sapien
gatttaatcaactgatccccagctg

SEQ ID NO: 1229189 - DNA, 25 bp, Homo sapien
gaaggacttatccagactgacagca

SEQ ID NO: 1229190 - DNA, 25 bp, Homo sapien
gatggtatgcgagtcccaagctaga

SEQ ID NO: 1229191 - DNA, 25 bp, Homo sapien
gatttaggatcctcatactcctggt

SEQ ID NO: 1229192 - DNA, 25 bp, Homo sapien
aaattgaagggatttaggatcctca

SEQ ID NO: 1229193 - DNA, 25 bp, Homo sapien
cccttatagaatgacttctgaggag

SEQ ID NO: 1229194 - DNA, 25 bp, Homo sapien
atactcctggtacccttatagaatg

SEQ ID NO: 1229195 - DNA, 25 bp, Homo sapien
ctgctactcgacttggtaggctgga

SEQ ID NO: 1229196 - DNA, 25 bp, Homo sapien
taccagttagaacgtgtcttgccaa

SEQ ID NO: 1229197 - DNA, 25 bp, Homo sapien
gatgtgtggttcagtatatccatcc

SEQ ID NO: 1229198 - DNA, 25 bp, Homo sapien
tgacgtaatggagtttctacaccgg

SEQ ID NO: 1229199 - DNA, 25 bp, Homo sapien
cagcaagaacttttgttcctgaggg

SEQ ID NO: 1229200 - DNA, 25 bp, Homo sapien
caagcagcaagaacttttgttcctg

SEQ ID NO: 1229201 - DNA, 25 bp, Homo sapien
agcagcaagaacttttgttcctgag

SEQ ID NO: 1229202 - DNA, 25 bp, Homo sapien
tcaagcagcaagaacttttgttcct

SEQ ID NO: 1229203 - DNA, 25 bp, Homo sapien
ttgtagactggtaggatttagctga

SEQ ID NO: 1229204 - DNA, 25 bp, Homo sapien
cttttgtagactggtaggatttagc

SEQ ID NO: 1229205 - DNA, 25 bp, Homo sapien
tagactggtaggatttagctgagtt

SEQ ID NO: 1229206 - DNA, 25 bp, Homo sapien
gactggtaggatttagctgagtttt

SEQ ID NO: 1229207 - DNA, 25 bp, Homo sapien
gccatggacagggacactgtgtaca

SEQ ID NO: 1229208 - DNA, 25 bp, Homo sapien
gagtaacccacaactaaatccagga

SEQ ID NO: 1229209 - DNA, 25 bp, Homo sapien
tgtgtattccagctagcacaacagg

SEQ ID NO: 1229210 - DNA, 25 bp, Homo sapien
tatgtcctactgtggttccagccca

SEQ ID NO: 1229211 - DNA, 25 bp, Homo sapien
gacattatctagtaaagttgaggct

SEQ ID NO: 1229212 - DNA, 25 bp, Homo sapien
gaggctatgcatgcccttcaaccca

SEQ ID NO: 1229213 - DNA, 25 bp, Homo sapien
cggtacaactacactggagagcaat

SEQ ID NO: 1229214 - DNA, 25 bp, Homo sapien
catacaatgggatctaacaatagca

SEQ ID NO: 1229215 - DNA, 25 bp, Homo sapien
acgaagttgcccttggtctcatcaa

SEQ ID NO: 1229216 - DNA, 25 bp, Homo sapien
tctgacgaagttgcccttggtctca

SEQ ID NO: 1229217 - DNA, 25 bp, Homo sapien
gacgaagttgcccttggtctcatca

SEQ ID NO: 1229218 - DNA, 25 bp, Homo sapien
cagtctgacgaagttgcccttggtc

SEQ ID NO: 1229219 - DNA, 25 bp, Homo sapien
ggtgattatccagagtgagggctga

SEQ ID NO: 1229220 - DNA, 25 bp, Homo sapien
gggtgattatccagagtgagggctg

SEQ ID NO: 1229221 - DNA, 25 bp, Homo sapien
cagggaggtgtgggccttggtctga

SEQ ID NO: 1229222 - DNA, 25 bp, Homo sapien
agtggcgtgccctcaggtcagcaga

SEQ ID NO: 1229223 - DNA, 25 bp, Homo sapien
gagggagccagaagtcatattccct

SEQ ID NO: 1229224 - DNA, 25 bp, Homo sapien
cagaagtcatattccctcaattcct

SEQ ID NO: 1229225 - DNA, 25 bp, Homo sapien
tctgtggtgtgaatacactatacac

SEQ ID NO: 1229226 - DNA, 25 bp, Homo sapien
aactcaaatgatctgtgtgtgtctg

SEQ ID NO: 1229227 - DNA, 25 bp, Homo sapien
gactgtgacattaacttcgctgtga

SEQ ID NO: 1229228 - DNA, 25 bp, Homo sapien
caagctatgttaacttagactgtga

SEQ ID NO: 1229229 - DNA, 25 bp, Homo sapien
ttcattattcgtacttctcgaaata

SEQ ID NO: 1229230 - DNA, 25 bp, Homo sapien
cttcattattcgtacttctcgaaat

SEQ ID NO: 1229231 - DNA, 25 bp, Homo sapien
tcattattcgtacttctcgaaataa

SEQ ID NO: 1229232 - DNA, 25 bp, Homo sapien
ccccactcgcgtattccatgactaa

SEQ ID NO: 1229233 - DNA, 25 bp, Homo sapien
tgactaaatagagagtcttctctgt

SEQ ID NO: 1229234 - DNA, 25 bp, Homo sapien
tattccatgactaaatagagagtct

SEQ ID NO: 1229235 - DNA, 25 bp, Homo sapien
ccatgactaaatagagagtcttctc

SEQ ID NO: 1229236 - DNA, 25 bp, Homo sapien
ccatgggcaactaagtaatcaaata

SEQ ID NO: 1229237 - DNA, 25 bp, Homo sapien
cttccatgggcaactaagtaatcaa

SEQ ID NO: 1229238 - DNA, 25 bp, Homo sapien
tcttccatgggcaactaagtaatca

SEQ ID NO: 1229239 - DNA, 25 bp, Homo sapien
tccatgggcaactaagtaatcaaat

SEQ ID NO: 1229240 - DNA, 25 bp, Homo sapien
ctgcctaaattttgcacgggcctct

SEQ ID NO: 1229241 - DNA, 25 bp, Homo sapien
ctaaattttgcacgggcctctttct

SEQ ID NO: 1229242 - DNA, 25 bp, Homo sapien
tttgcacgggcctctttctctttca

SEQ ID NO: 1229243 - DNA, 25 bp, Homo sapien
aattttgcacgggcctctttctctt

SEQ ID NO: 1229244 - DNA, 25 bp, Homo sapien
gatcacggtgaacaatgtacttttg

SEQ ID NO: 1229245 - DNA, 25 bp, Homo sapien
cacggtgaacaatgtacttttgatg

SEQ ID NO: 1229246 - DNA, 25 bp, Homo sapien
cttaagatcacggtgaacaatgtac

SEQ ID NO: 1229247 - DNA, 25 bp, Homo sapien
taagatcacggtgaacaatgtactt

SEQ ID NO: 1229248 - DNA, 25 bp, Homo sapien
taaattctggccatcgaaaggcaag

SEQ ID NO: 1229249 - DNA, 25 bp, Homo sapien
tatagagaatgacgcccagactcca

SEQ ID NO: 1229250 - DNA, 25 bp, Homo sapien
ccttggaaaagctcgggagcagcat

SEQ ID NO: 1229251 - DNA, 25 bp, Homo sapien
ggcaaggagccactgactaatgtat

SEQ ID NO: 1229252 - DNA, 25 bp, Homo sapien
aacattaataaagaatttagctgat

SEQ ID NO: 1229253 - DNA, 25 bp, Homo sapien
acattaataaagaatttagctgata

SEQ ID NO: 1229254 - DNA, 25 bp, Homo sapien
cattaataaagaatttagctgatac

SEQ ID NO: 1229255 - DNA, 25 bp, Homo sapien
tacttccctcgtaaaactcgctctc

SEQ ID NO: 1229256 - DNA, 25 bp, Homo sapien
catatagaagggaatacggtacttc

SEQ ID NO: 1229257 - DNA, 25 bp, Homo sapien
cctcgtaaaactcgctctcgcagtt

SEQ ID NO: 1229258 - DNA, 25 bp, Homo sapien
ggacatatagaagggaatacggtac

SEQ ID NO: 1229259 - DNA, 25 bp, Homo sapien
tacagaacatatgtaggcaacacaa

SEQ ID NO: 1229260 - DNA, 25 bp, Homo sapien
aatgcctgtttccagtatgttgtac

SEQ ID NO: 1229261 - DNA, 25 bp, Homo sapien
gaaagtactagtgaataatgcatgc

SEQ ID NO: 1229262 - DNA, 25 bp, Homo sapien
tgcttggctgtaacatacttagtcc

SEQ ID NO: 1229263 - DNA, 25 bp, Homo sapien
cacttttatgggaggaccaatgacg

SEQ ID NO: 1229264 - DNA, 25 bp, Homo sapien
tagtccatcttggttaaacactgga

SEQ ID NO: 1229265 - DNA, 25 bp, Homo sapien
gctttactgtcatttggcagacata

SEQ ID NO: 1229266 - DNA, 25 bp, Homo sapien
tgacgacaaagagagggcaataaga

SEQ ID NO: 1229267 - DNA, 25 bp, Homo sapien
ctgaagagatggagcgcaagaattt

SEQ ID NO: 1229268 - DNA, 25 bp, Homo sapien
tagtcatccctgtggtacttggtca

SEQ ID NO: 1229269 - DNA, 25 bp, Homo sapien
gaatttaatgtagtcatccctgtgg

SEQ ID NO: 1229270 - DNA, 25 bp, Homo sapien
gaagagatggagcgcaagaatttaa

SEQ ID NO: 1229271 - DNA, 25 bp, Homo sapien
ttgctgacgttgaatctgcatctgc

SEQ ID NO: 1229272 - DNA, 25 bp, Homo sapien
ccttgctgacgttgaatctgcatct

SEQ ID NO: 1229273 - DNA, 25 bp, Homo sapien
tccttgctgacgttgaatctgcatc

SEQ ID NO: 1229274 - DNA, 25 bp, Homo sapien
agtccttgctgacgttgaatctgca

SEQ ID NO: 1229275 - DNA, 25 bp, Homo sapien
gccaagacaatgtcattgatgtaat

SEQ ID NO: 1229276 - DNA, 25 bp, Homo sapien
agacaatgtcattgatgtaatagaa

SEQ ID NO: 1229277 - DNA, 25 bp, Homo sapien
cttccatcccatcgccgtggtgaat

SEQ ID NO: 1229278 - DNA, 25 bp, Homo sapien
tcttccatcccatcgccgtggtgaa

SEQ ID NO: 1229279 - DNA, 25 bp, Homo sapien
catcccatcgccgtggtgaatatca

SEQ ID NO: 1229280 - DNA, 25 bp, Homo sapien
cccatcgccgtggtgaatatcaatg

SEQ ID NO: 1229281 - DNA, 25 bp, Homo sapien
tacttaggagaagacatagtcatga

SEQ ID NO: 1229282 - DNA, 25 bp, Homo sapien
ctacttaggagaagacatagtcatg

SEQ ID NO: 1229283 - DNA, 25 bp, Homo sapien
acttaggagaagacatagtcatgac

SEQ ID NO: 1229284 - DNA, 25 bp, Homo sapien
gacttgtcgtcaatcccatctcgga

SEQ ID NO: 1229285 - DNA, 25 bp, Homo sapien
ctcataggacttgtcgtcaatccca

SEQ ID NO: 1229286 - DNA, 25 bp, Homo sapien
gccacactgtaagagcactgaactt

SEQ ID NO: 1229287 - DNA, 25 bp, Homo sapien
gccccaatatcctgtagatccctag

SEQ ID NO: 1229288 - DNA, 25 bp, Homo sapien
aggaacagatcgagatccatttgtc

SEQ ID NO: 1229289 - DNA, 25 bp, Homo sapien
gtcagaggaacagatcgagatccat

SEQ ID NO: 1229290 - DNA, 25 bp, Homo sapien
cttcttcgctctcatcgccactctc

SEQ ID NO: 1229291 - DNA, 25 bp, Homo sapien
tttgtcagaggaacagatcgagatc

SEQ ID NO: 1229292 - DNA, 25 bp, Homo sapien
ttttgaagttggaagagttcttgtg

SEQ ID NO: 1229293 - DNA, 25 bp, Homo sapien
tgaagttggaagagttcttgtggcc

SEQ ID NO: 1229294 - DNA, 25 bp, Homo sapien
agttcttgtggccaccctctctcac

SEQ ID NO: 1229295 - DNA, 25 bp, Homo sapien
aagagttcttgtggccaccctctct

SEQ ID NO: 1229296 - DNA, 25 bp, Homo sapien
catctaggtctttctcttttccatc

SEQ ID NO: 1229297 - DNA, 25 bp, Homo sapien
tcttttccatcctgttttgactctc

SEQ ID NO: 1229298 - DNA, 25 bp, Homo sapien
tctcttttccatcctgttttgactc

SEQ ID NO: 1229299 - DNA, 25 bp, Homo sapien
tttctcttttccatcctgttttgac

SEQ ID NO: 1229300 - DNA, 25 bp, Homo sapien
cctccttgacccctttggcttctgg

SEQ ID NO: 1229301 - DNA, 25 bp, Homo sapien
ttctcctcttctgtgactttgctct

SEQ ID NO: 1229302 - DNA, 25 bp, Homo sapien
ctcctcttctgtgactttgctcttc

SEQ ID NO: 1229303 - DNA, 25 bp, Homo sapien
ctcctccttgacccctttggcttct

SEQ ID NO: 1229304 - DNA, 25 bp, Homo sapien
gaggagagtcctgtcaaatatagcc

SEQ ID NO: 1229305 - DNA, 25 bp, Homo sapien
tcaggaatccttagcctacagagga

SEQ ID NO: 1229306 - DNA, 25 bp, Homo sapien
tgacgcctaaataagtagccccttg

SEQ ID NO: 1229307 - DNA, 25 bp, Homo sapien
gaaaaacccgcacagcatgacatgg

SEQ ID NO: 1229308 - DNA, 25 bp, Homo sapien
atcaggctcagtatatggctttagt

SEQ ID NO: 1229309 - DNA, 25 bp, Homo sapien
tgtcattgaaatccggatcaggctc

SEQ ID NO: 1229310 - DNA, 25 bp, Homo sapien
ctcttcatgaccaacattcatccat

SEQ ID NO: 1229311 - DNA, 25 bp, Homo sapien
ctcagtatatggctttagttcttcc

SEQ ID NO: 1229312 - DNA, 25 bp, Homo sapien
catacttctgatttattaaggcatc

SEQ ID NO: 1229313 - DNA, 25 bp, Homo sapien
cctagaagaatataagtagccataa

SEQ ID NO: 1229314 - DNA, 25 bp, Homo sapien
tttcatctcgtgcaaagcccatggt

SEQ ID NO: 1229315 - DNA, 25 bp, Homo sapien
tcaggtggttttctacctagaagaa

SEQ ID NO: 1229316 - DNA, 25 bp, Homo sapien
catgatcactgaaacgccgctgctt

SEQ ID NO: 1229317 - DNA, 25 bp, Homo sapien
gtttccactggataacgattcacca

SEQ ID NO: 1229318 - DNA, 25 bp, Homo sapien
tgctgagatacttctctggaccttc

SEQ ID NO: 1229319 - DNA, 25 bp, Homo sapien
ggccgggacctctgacacaagtttc

SEQ ID NO: 1229320 - DNA, 25 bp, Homo sapien
tttccacactgttagcctgaggtct

SEQ ID NO: 1229321 - DNA, 25 bp, Homo sapien
gctgccaagttttcgagccacatct

SEQ ID NO: 1229322 - DNA, 25 bp, Homo sapien
gagggcttgcagtcatctcgctttt

SEQ ID NO: 1229323 - DNA, 25 bp, Homo sapien
tctctggccctacaagagggcttgc

SEQ ID NO: 1229324 - DNA, 25 bp, Homo sapien
ggagagcatcttcttctagttccca

SEQ ID NO: 1229325 - DNA, 25 bp, Homo sapien
aaacacctattatctgaatgttacc

SEQ ID NO: 1229326 - DNA, 25 bp, Homo sapien
tctggcttctatttgtcactctggg

SEQ ID NO: 1229327 - DNA, 25 bp, Homo sapien
tcctgctgccttatgggagagcatc

SEQ ID NO: 1229328 - DNA, 25 bp, Homo sapien
actgaggagcatgaggagcctgcct

SEQ ID NO: 1229329 - DNA, 25 bp, Homo sapien
ggactgaggagcatgaggagcctgc

SEQ ID NO: 1229330 - DNA, 25 bp, Homo sapien
tcatggactgaggagcatgaggagc

SEQ ID NO: 1229331 - DNA, 25 bp, Homo sapien
gaggagcatgaggagcctgcctctt

SEQ ID NO: 1229332 - DNA, 25 bp, Homo sapien
tgagttgtctactaaccccacttgg

SEQ ID NO: 1229333 - DNA, 25 bp, Homo sapien
gacaaaaagcacagtatcacggacg

SEQ ID NO: 1229334 - DNA, 25 bp, Homo sapien
aattgccctcattctgaacgcccag

SEQ ID NO: 1229335 - DNA, 25 bp, Homo sapien
taggactgcttaacctgagaccaca

SEQ ID NO: 1229336 - DNA, 25 bp, Homo sapien
gggtccttctatattgggtgcatgt

SEQ ID NO: 1229337 - DNA, 25 bp, Homo sapien
tcctgagtatcttgttaatcttctg

SEQ ID NO: 1229338 - DNA, 25 bp, Homo sapien
tcttactatttttaaggaactcaga

SEQ ID NO: 1229339 - DNA, 25 bp, Homo sapien
gacattgacctgaagttttttgttg

SEQ ID NO: 1229340 - DNA, 25 bp, Homo sapien
tgcaattccttttggcgatttcatc

SEQ ID NO: 1229341 - DNA, 25 bp, Homo sapien
gcacaatttgttaaaatagggattc

SEQ ID NO: 1229342 - DNA, 25 bp, Homo sapien
ccttttggcgatttcatcatacaat

SEQ ID NO: 1229343 - DNA, 25 bp, Homo sapien
gttctcccagcacaatttgttaaaa

SEQ ID NO: 1229344 - DNA, 25 bp, Homo sapien
taatgctctcccgcgacctccgccc

SEQ ID NO: 1229345 - DNA, 25 bp, Homo sapien
aagtgtgcatgaacctttataacag

SEQ ID NO: 1229346 - DNA, 25 bp, Homo sapien
atgctctcccgcgacctccgccctc

SEQ ID NO: 1229347 - DNA, 25 bp, Homo sapien
ctaatgctctcccgcgacctccgcc

SEQ ID NO: 1229348 - DNA, 25 bp, Homo sapien
cagacatatgtattccttcttgcca

SEQ ID NO: 1229349 - DNA, 25 bp, Homo sapien
tacgtatcgatctgtggtcctttca

SEQ ID NO: 1229350 - DNA, 25 bp, Homo sapien
gtcctttcacagacatatgtattcc

SEQ ID NO: 1229351 - DNA, 25 bp, Homo sapien
gtcttttccattctgcaatgctacg

SEQ ID NO: 1229352 - DNA, 25 bp, Homo sapien
cagaagtggacatggacttctggtg

SEQ ID NO: 1229353 - DNA, 25 bp, Homo sapien
cagagccgtctttaatggttggcag

SEQ ID NO: 1229354 - DNA, 25 bp, Homo sapien
gaagagcctgcagaagatatgctac

SEQ ID NO: 1229355 - DNA, 25 bp, Homo sapien
tttaataggatgaccagaagtggac

SEQ ID NO: 1229356 - DNA, 25 bp, Homo sapien
atggggaagcagcaggcactctctg

SEQ ID NO: 1229357 - DNA, 25 bp, Homo sapien
agcagcaggcactctctgggttgta

SEQ ID NO: 1229358 - DNA, 25 bp, Homo sapien
ggggaagcagcaggcactctctggg

SEQ ID NO: 1229359 - DNA, 25 bp, Homo sapien
gaagcagcaggcactctctgggttg

SEQ ID NO: 1229360 - DNA, 25 bp, Homo sapien
caaatgcacccgtttcatgggatgg

SEQ ID NO: 1229361 - DNA, 25 bp, Homo sapien
catggaaagtgcttcggcttgagct

SEQ ID NO: 1229362 - DNA, 25 bp, Homo sapien
tggcccattataagcaacgctgcgt

SEQ ID NO: 1229363 - DNA, 25 bp, Homo sapien
gacgttccccttctggcatgtgcaa

SEQ ID NO: 1229364 - DNA, 25 bp, Homo sapien
aaagagcagctctaatgaaatgtta

SEQ ID NO: 1229365 - DNA, 25 bp, Homo sapien
gaatcaaaacacgacagtacattgg

SEQ ID NO: 1229366 - DNA, 25 bp, Homo sapien
aacacgacagtacattggtactgac

SEQ ID NO: 1229367 - DNA, 25 bp, Homo sapien
agaggaatcaaaacacgacagtaca

SEQ ID NO: 1229368 - DNA, 25 bp, Homo sapien
ggttctgccactggcttcgccttca

SEQ ID NO: 1229369 - DNA, 25 bp, Homo sapien
tcggttctgccactggcttcgcctt

SEQ ID NO: 1229370 - DNA, 25 bp, Homo sapien
cggttctgccactggcttcgccttc

SEQ ID NO: 1229371 - DNA, 25 bp, Homo sapien
cacacagtaaggtaagtggtggaac

SEQ ID NO: 1229372 - DNA, 25 bp, Homo sapien
tggaactgatggctggaaaacttaa

SEQ ID NO: 1229373 - DNA, 25 bp, Homo sapien
tagctgaaacccatgcactctggct

SEQ ID NO: 1229374 - DNA, 25 bp, Homo sapien
cttactaggtgcaggaattgtccta

SEQ ID NO: 1229375 - DNA, 25 bp, Homo sapien
ccaggagggcaaggaattttgtcta

SEQ ID NO: 1229376 - DNA, 25 bp, Homo sapien
taactcctatcctagcatggccaag

SEQ ID NO: 1229377 - DNA, 25 bp, Homo sapien
tatatctcgggcatctagaactgtg

SEQ ID NO: 1229378 - DNA, 25 bp, Homo sapien
cattagactgtaaactccaggaggg

SEQ ID NO: 1229379 - DNA, 25 bp, Homo sapien
tgaagcgaaccccattaagtgacag

SEQ ID NO: 1229380 - DNA, 25 bp, Homo sapien
gatgtcccagatattcgcttgaagc

SEQ ID NO: 1229381 - DNA, 25 bp, Homo sapien
tactccatgtgaaccgcaaagaacg

SEQ ID NO: 1229382 - DNA, 25 bp, Homo sapien
taagtgacagtcgtggcaacttgca

SEQ ID NO: 1229383 - DNA, 25 bp, Homo sapien
tatgtatgtatcttccctgaacctg

SEQ ID NO: 1229384 - DNA, 25 bp, Homo sapien
gggagattcacaggcagaccacatt

SEQ ID NO: 1229385 - DNA, 25 bp, Homo sapien
gcattaagggcaaattctacatggg

SEQ ID NO: 1229386 - DNA, 25 bp, Homo sapien
cctgaacctgtaaatttggacttct

SEQ ID NO: 1229387 - DNA, 25 bp, Homo sapien
ggtacttcctagttagctcaaggca

SEQ ID NO: 1229388 - DNA, 25 bp, Homo sapien
taggcaaatgcccaatcacaaagcg

SEQ ID NO: 1229389 - DNA, 25 bp, Homo sapien
taaattgcggtattctgaaggcagc

SEQ ID NO: 1229390 - DNA, 25 bp, Homo sapien
tatcttctcaactaaaccttgcggg

SEQ ID NO: 1229391 - DNA, 25 bp, Homo sapien
tatcagtttctaccgtggaaaacac

SEQ ID NO: 1229392 - DNA, 25 bp, Homo sapien
cagtgacaggaattcctataaaaag

SEQ ID NO: 1229393 - DNA, 25 bp, Homo sapien
aaaaccttcacagcttcaccctttg

SEQ ID NO: 1229394 - DNA, 25 bp, Homo sapien
catagccggtgaacataaactggta

SEQ ID NO: 1229395 - DNA, 25 bp, Homo sapien
aacaaataaaatgctgtgccccagt

SEQ ID NO: 1229396 - DNA, 25 bp, Homo sapien
taacaaataaaatgctgtgccccag

SEQ ID NO: 1229397 - DNA, 25 bp, Homo sapien
aaataaaatgctgtgccccagtttc

SEQ ID NO: 1229398 - DNA, 25 bp, Homo sapien
caaataaaatgctgtgccccagttt

SEQ ID NO: 1229399 - DNA, 25 bp, Homo sapien
ccagatcagtgacttgcccaggcgt

SEQ ID NO: 1229400 - DNA, 25 bp, Homo sapien
aaagcccactttccgcccagccctg

SEQ ID NO: 1229401 - DNA, 25 bp, Homo sapien
cccaggcgtggaaacggctgcagct

SEQ ID NO: 1229402 - DNA, 25 bp, Homo sapien
cgtggaaacggctgcagctcgctgc

SEQ ID NO: 1229403 - DNA, 25 bp, Homo sapien
caagcatgcaagctctgcttggcaa

SEQ ID NO: 1229404 - DNA, 25 bp, Homo sapien
tgtgcggatgcacaagcaagcatgc

SEQ ID NO: 1229405 - DNA, 25 bp, Homo sapien
ggcttcaacttcaggagagccgagg

SEQ ID NO: 1229406 - DNA, 25 bp, Homo sapien
cagcgtaggcgtttgggttcacttt

SEQ ID NO: 1229407 - DNA, 25 bp, Homo sapien
aaactgtgcagactacggcgcgcac

SEQ ID NO: 1229408 - DNA, 25 bp, Homo sapien
gcatggcgagatagtcacggtaaca

SEQ ID NO: 1229409 - DNA, 25 bp, Homo sapien
tattcggaaacgcaagacagtgtgt

SEQ ID NO: 1229410 - DNA, 25 bp, Homo sapien
tagagatcacgctcagtgctaggga

SEQ ID NO: 1229411 - DNA, 25 bp, Homo sapien
tgctctccgccttgcttcggagcct

SEQ ID NO: 1229412 - DNA, 25 bp, Homo sapien
tctccgccttgcttcggagcctggc

SEQ ID NO: 1229413 - DNA, 25 bp, Homo sapien
gctgctctccgccttgcttcggagc

SEQ ID NO: 1229414 - DNA, 25 bp, Homo sapien
gctctccgccttgcttcggagcctg

SEQ ID NO: 1229415 - DNA, 25 bp, Homo sapien
cgccgcctccgcctcgtccgcgtac

SEQ ID NO: 1229416 - DNA, 25 bp, Homo sapien
gcgctcgtcccgctctcggccgccg

SEQ ID NO: 1229417 - DNA, 25 bp, Homo sapien
tccgccgcgctcgtcccgctctcgg

SEQ ID NO: 1229418 - DNA, 25 bp, Homo sapien
gccgcgctcgtcccgctctcggccg

SEQ ID NO: 1229419 - DNA, 25 bp, Homo sapien
cttcagcttcctccggtacctcttc

SEQ ID NO: 1229420 - DNA, 25 bp, Homo sapien
tcctgggctgctcgctcggcgccgg

SEQ ID NO: 1229421 - DNA, 25 bp, Homo sapien
cttcctgggctgctcgctcggcgcc

SEQ ID NO: 1229422 - DNA, 25 bp, Homo sapien
ttcctgggctgctcgctcggcgccg

SEQ ID NO: 1229423 - DNA, 25 bp, Homo sapien
tgggaatatttgggagagtaaccca

SEQ ID NO: 1229424 - DNA, 25 bp, Homo sapien
gacgagaaaaattcaacgagcgcct

SEQ ID NO: 1229425 - DNA, 25 bp, Homo sapien
tgtttccatgcagagacacctggga

SEQ ID NO: 1229426 - DNA, 25 bp, Homo sapien
ttatgtatttgttgcgctcccaggc

SEQ ID NO: 1229427 - DNA, 25 bp, Homo sapien
tttgaaggccccagagtacactgat

SEQ ID NO: 1229428 - DNA, 25 bp, Homo sapien
atgaccacgtagcggcatcctttga

SEQ ID NO: 1229429 - DNA, 25 bp, Homo sapien
acgtagcggcatcctttgatgatga

SEQ ID NO: 1229430 - DNA, 25 bp, Homo sapien
taggctgcagcgaagccttgcaggc

SEQ ID NO: 1229431 - DNA, 25 bp, Homo sapien
cacgctggtggctaccgcaaacggg

SEQ ID NO: 1229432 - DNA, 25 bp, Homo sapien
acagcaggggctcccgttcactctg

SEQ ID NO: 1229433 - DNA, 25 bp, Homo sapien
tgtgtgttcaagtctgagatgctcc

SEQ ID NO: 1229434 - DNA, 25 bp, Homo sapien
gggatgactcactcatcatactaat

SEQ ID NO: 1229435 - DNA, 25 bp, Homo sapien
tccaggattcacaaagttcccacag

SEQ ID NO: 1229436 - DNA, 25 bp, Homo sapien
caaagcactcttagttggactggca

SEQ ID NO: 1229437 - DNA, 25 bp, Homo sapien
caaggaatgtgagcgcctgtcagcc

SEQ ID NO: 1229438 - DNA, 25 bp, Homo sapien
catctgttgagtgttggcttccgcc

SEQ ID NO: 1229439 - DNA, 25 bp, Homo sapien
tctctgcaggattgaccactgggtc

SEQ ID NO: 1229440 - DNA, 25 bp, Homo sapien
ctcttccaatgtcctcttgcctcat

SEQ ID NO: 1229441 - DNA, 25 bp, Homo sapien
ctccctcacactgatgctccagacc

SEQ ID NO: 1229442 - DNA, 25 bp, Homo sapien
cctcacactgatgctccagacctgg

SEQ ID NO: 1229443 - DNA, 25 bp, Homo sapien
tcacactgatgctccagacctggct

SEQ ID NO: 1229444 - DNA, 25 bp, Homo sapien
gagatgagatcaaaccaggcagcac

SEQ ID NO: 1229445 - DNA, 25 bp, Homo sapien
taacaatgcaggaattgggtcccag

SEQ ID NO: 1229446 - DNA, 25 bp, Homo sapien
gacaggatgctacaaaggcagccaa

SEQ ID NO: 1229447 - DNA, 25 bp, Homo sapien
tgccacagagaatgacggctcaggt

SEQ ID NO: 1229448 - DNA, 25 bp, Homo sapien
tatttacatcataggacaagaaaag

SEQ ID NO: 1229449 - DNA, 25 bp, Homo sapien
ctctaaaactcaatactcagtaagg

SEQ ID NO: 1229450 - DNA, 25 bp, Homo sapien
ttggtcaagcacatcaagcgaaagc

SEQ ID NO: 1229451 - DNA, 25 bp, Homo sapien
aaaaggatacaaaagaagtctcttg

SEQ ID NO: 1229452 - DNA, 25 bp, Homo sapien
cccgttacagataaggtgagtttgg

SEQ ID NO: 1229453 - DNA, 25 bp, Homo sapien
tgccttggggagctaacaggacttc

SEQ ID NO: 1229454 - DNA, 25 bp, Homo sapien
aggacttcttccatcccgttacaga

SEQ ID NO: 1229455 - DNA, 25 bp, Homo sapien
gggagctaacaggacttcttccatc

SEQ ID NO: 1229456 - DNA, 25 bp, Homo sapien
caggcgagaggagtcaaagttgacc

SEQ ID NO: 1229457 - DNA, 25 bp, Homo sapien
gtgaccaagcctgcgcggtaatgga

SEQ ID NO: 1229458 - DNA, 25 bp, Homo sapien
gaatgccttaatgcggtgaccaagc

SEQ ID NO: 1229459 - DNA, 25 bp, Homo sapien
tcaccgccgagacggcagagcagtt

SEQ ID NO: 1229460 - DNA, 25 bp, Homo sapien
ccacggcggccagtcctagcgcggc

SEQ ID NO: 1229461 - DNA, 25 bp, Homo sapien
cggcgaccccgagccacctgggcca

SEQ ID NO: 1229462 - DNA, 25 bp, Homo sapien
atgcgcggcgccaggcgacagtccc

SEQ ID NO: 1229463 - DNA, 25 bp, Homo sapien
catgcgcggcgccaggcgacagtcc

SEQ ID NO: 1229464 - DNA, 25 bp, Homo sapien
tgtcccgcaggttgccgctgcgcag

SEQ ID NO: 1229465 - DNA, 25 bp, Homo sapien
ctgtcccgcaggttgccgctgcgca

SEQ ID NO: 1229466 - DNA, 25 bp, Homo sapien
ccaggcaggctccgcgctgccccgc

SEQ ID NO: 1229467 - DNA, 25 bp, Homo sapien
gccccgcgcccgcgctgtgctgtac

SEQ ID NO: 1229468 - DNA, 25 bp, Homo sapien
ctgccccgcgcccgcgctgtgctgt

SEQ ID NO: 1229469 - DNA, 25 bp, Homo sapien
tgcccccccgctcctcatcccaggc

SEQ ID NO: 1229470 - DNA, 25 bp, Homo sapien
gggtcctacatcaggaaacctccca

SEQ ID NO: 1229471 - DNA, 25 bp, Homo sapien
ctacatcaggaaacctcccaaacag

SEQ ID NO: 1229472 - DNA, 25 bp, Homo sapien
gcatgcgggggtcctacatcaggaa

SEQ ID NO: 1229473 - DNA, 25 bp, Homo sapien
tgcgggggtcctacatcaggaaacc

SEQ ID NO: 1229474 - DNA, 25 bp, Homo sapien
gagatgagcacgaggcgaggctcct

SEQ ID NO: 1229475 - DNA, 25 bp, Homo sapien
accatgtgtccatcttccttaatca

SEQ ID NO: 1229476 - DNA, 25 bp, Homo sapien
gcttgctaggcaaaaccagctggtc

SEQ ID NO: 1229477 - DNA, 25 bp, Homo sapien
gctcctgtcgggcagtgaccatgtg

SEQ ID NO: 1229478 - DNA, 25 bp, Homo sapien
gagccaagtaccagacaacctgtga

SEQ ID NO: 1229479 - DNA, 25 bp, Homo sapien
tagcgtgcctccagtttctagagaa

SEQ ID NO: 1229480 - DNA, 25 bp, Homo sapien
tatttggtgcttacatgccgggcca

SEQ ID NO: 1229481 - DNA, 25 bp, Homo sapien
tcttccagggctgaccaattcctag

SEQ ID NO: 1229482 - DNA, 25 bp, Homo sapien
gaaaattgggaaccatgagttgtgg

SEQ ID NO: 1229483 - DNA, 25 bp, Homo sapien
gaattcagtgaattattgcttcaga

SEQ ID NO: 1229484 - DNA, 25 bp, Homo sapien
gagttgtggatttcagcttagacgc

SEQ ID NO: 1229485 - DNA, 25 bp, Homo sapien
gaaaaagcgtaagatgagagttcac

SEQ ID NO: 1229486 - DNA, 25 bp, Homo sapien
cacagtgagtctacagggcaacacc

SEQ ID NO: 1229487 - DNA, 25 bp, Homo sapien
gaactgatgggctcaaaacctgtca

SEQ ID NO: 1229488 - DNA, 25 bp, Homo sapien
cacatgtcttccaattaagccgaga

SEQ ID NO: 1229489 - DNA, 25 bp, Homo sapien
cacatgtcagctacgtatttaccca

SEQ ID NO: 1229490 - DNA, 25 bp, Homo sapien
tctgcctatttagctggtaaagagc

SEQ ID NO: 1229491 - DNA, 25 bp, Homo sapien
tttctgcctatttagctggtaaaga

SEQ ID NO: 1229492 - DNA, 25 bp, Homo sapien
caggaaggtgagtgtccccctagat

SEQ ID NO: 1229493 - DNA, 25 bp, Homo sapien
gaaggtgagtgtccccctagatttc

SEQ ID NO: 1229494 - DNA, 25 bp, Homo sapien
gaataggctgcaattgctgtctttt

SEQ ID NO: 1229495 - DNA, 25 bp, Homo sapien
aaaaagaataggctgcaattgctgt

SEQ ID NO: 1229496 - DNA, 25 bp, Homo sapien
taggctgcaattgctgtctttttca

SEQ ID NO: 1229497 - DNA, 25 bp, Homo sapien
aagaataggctgcaattgctgtctt

SEQ ID NO: 1229498 - DNA, 25 bp, Homo sapien
tgtataccaggtcctcttgcaagtg

SEQ ID NO: 1229499 - DNA, 25 bp, Homo sapien
taagacaataatcaggccgtgcacg

SEQ ID NO: 1229500 - DNA, 25 bp, Homo sapien
tagctatttaagacctaatatccag

SEQ ID NO: 1229501 - DNA, 25 bp, Homo sapien
tcaatatagggttgaagtcatgtct

SEQ ID NO: 1229502 - DNA, 25 bp, Homo sapien
gcaacaatttcactggaggcccctt

SEQ ID NO: 1229503 - DNA, 25 bp, Homo sapien
taatgtaagacaaagagttggaacc

SEQ ID NO: 1229504 - DNA, 25 bp, Homo sapien
taagccctgaggaatttttcacaca

SEQ ID NO: 1229505 - DNA, 25 bp, Homo sapien
gaatgaatctcacatattgctagaa

SEQ ID NO: 1229506 - DNA, 25 bp, Homo sapien
agtgtgtaacgggatctaaatgcca

SEQ ID NO: 1229507 - DNA, 25 bp, Homo sapien
tggtttgatatccaccattatccat

SEQ ID NO: 1229508 - DNA, 25 bp, Homo sapien
tatggctatcgctcacttactgtat

SEQ ID NO: 1229509 - DNA, 25 bp, Homo sapien
ccatgttggtttgatatccaccatt

SEQ ID NO: 1229510 - DNA, 25 bp, Homo sapien
caatctatacgcttcagttttcaag

SEQ ID NO: 1229511 - DNA, 25 bp, Homo sapien
ttcaagaagttggtgaaccacttag

SEQ ID NO: 1229512 - DNA, 25 bp, Homo sapien
cacttagctgcctcattgccacagt

SEQ ID NO: 1229513 - DNA, 25 bp, Homo sapien
gcctttaatgtcaaggccaaatatc

SEQ ID NO: 1229514 - DNA, 25 bp, Homo sapien
gggagaagttttcttgatgttcttc

SEQ ID NO: 1229515 - DNA, 25 bp, Homo sapien
atcaagagtggggagaagttttctt

SEQ ID NO: 1229516 - DNA, 25 bp, Homo sapien
agttttcttgatgttcttcccttca

SEQ ID NO: 1229517 - DNA, 25 bp, Homo sapien
ctggaaattctgatcaagagtgggg

SEQ ID NO: 1229518 - DNA, 25 bp, Homo sapien
gcgggcagtagtctgggtaggccac

SEQ ID NO: 1229519 - DNA, 25 bp, Homo sapien
tcctcaaaagcatcacagccggtca

SEQ ID NO: 1229520 - DNA, 25 bp, Homo sapien
attcaaatctaccagggaggcatct

SEQ ID NO: 1229521 - DNA, 25 bp, Homo sapien
ggtcaccacaatatttggcctgaaa

SEQ ID NO: 1229522 - DNA, 25 bp, Homo sapien
gcattaacgggtgagagcaacgccc

SEQ ID NO: 1229523 - DNA, 25 bp, Homo sapien
tccgcaagcaatgagtgatggcagc

SEQ ID NO: 1229524 - DNA, 25 bp, Homo sapien
gcaacaatgggtgaacaactccgca

SEQ ID NO: 1229525 - DNA, 25 bp, Homo sapien
tctggtgtcaatcccatagaagagc

SEQ ID NO: 1229526 - DNA, 25 bp, Homo sapien
ttctgagctacacggacaaagtaca

SEQ ID NO: 1229527 - DNA, 25 bp, Homo sapien
cattttgctgcattcccggaactca

SEQ ID NO: 1229528 - DNA, 25 bp, Homo sapien
caaagtactttaggccacagacagt

SEQ ID NO: 1229529 - DNA, 25 bp, Homo sapien
caagtttatctcatcaggacagtga

SEQ ID NO: 1229530 - DNA, 25 bp, Homo sapien
actgagcacaattgtcctgcttctt

SEQ ID NO: 1229531 - DNA, 25 bp, Homo sapien
tactgagcacaattgtcctgcttct

SEQ ID NO: 1229532 - DNA, 25 bp, Homo sapien
ccttgatgagaaagaggcgaaagtc

SEQ ID NO: 1229533 - DNA, 25 bp, Homo sapien
gaaggaacctcgcagaagcatctcc

SEQ ID NO: 1229534 - DNA, 25 bp, Homo sapien
gaggcgaaagtcctgtagtccttgg

SEQ ID NO: 1229535 - DNA, 25 bp, Homo sapien
tgtgtgaggctgtgcggaaggaacc

SEQ ID NO: 1229536 - DNA, 25 bp, Homo sapien
caagctcacgatgatttaaaggcca

SEQ ID NO: 1229537 - DNA, 25 bp, Homo sapien
aatgcagcggttctatcagacaggg

SEQ ID NO: 1229538 - DNA, 25 bp, Homo sapien
tcagggaggttaaggccaagctcac

SEQ ID NO: 1229539 - DNA, 25 bp, Homo sapien
taaccttgtgatctgaccgccaaaa

SEQ ID NO: 1229540 - DNA, 25 bp, Homo sapien
gcatggtgaaggacatctcgagaaa

SEQ ID NO: 1229541 - DNA, 25 bp, Homo sapien
taaacacaactcaatggccaagtcc

SEQ ID NO: 1229542 - DNA, 25 bp, Homo sapien
tctcgagaaatggactttaagtgac

SEQ ID NO: 1229543 - DNA, 25 bp, Homo sapien
gttcaacaaggtctcacacaaagcc

SEQ ID NO: 1229544 - DNA, 25 bp, Homo sapien
actcgaggggaataccgcgcaccac

SEQ ID NO: 1229545 - DNA, 25 bp, Homo sapien
aagggatcgataagcgtgcgttcac

SEQ ID NO: 1229546 - DNA, 25 bp, Homo sapien
ttcacgtatcacactcactcgaggg

SEQ ID NO: 1229547 - DNA, 25 bp, Homo sapien
gcgcaccaccgtctctgaagacaca

SEQ ID NO: 1229548 - DNA, 25 bp, Homo sapien
ctccactctgccgtctctactccaa

SEQ ID NO: 1229549 - DNA, 25 bp, Homo sapien
caacatctgtatttgaagggcttgt

SEQ ID NO: 1229550 - DNA, 25 bp, Homo sapien
ccactctgccgtctctactccaaca

SEQ ID NO: 1229551 - DNA, 25 bp, Homo sapien
ccaacatctgtatttgaagggcttg

SEQ ID NO: 1229552 - DNA, 25 bp, Homo sapien
gttacggccacgagaattttagtgc

SEQ ID NO: 1229553 - DNA, 25 bp, Homo sapien
taccaattgaattcccaaaggcagt

SEQ ID NO: 1229554 - DNA, 25 bp, Homo sapien
tattcactgactgggacatcctgca

SEQ ID NO: 1229555 - DNA, 25 bp, Homo sapien
gctgacgccgtctgtgtgttccacc

SEQ ID NO: 1229556 - DNA, 25 bp, Homo sapien
aaattatagcaatgccaggaagagc

SEQ ID NO: 1229557 - DNA, 25 bp, Homo sapien
caacaaaatgttatcacaggctacc

SEQ ID NO: 1229558 - DNA, 25 bp, Homo sapien
ggcacgcttatgctcaccttgaggg

SEQ ID NO: 1229559 - DNA, 25 bp, Homo sapien
cacaggatggactaacatggaacca

SEQ ID NO: 1229560 - DNA, 25 bp, Homo sapien
gattctctgtgacatcaaatacatg

SEQ ID NO: 1229561 - DNA, 25 bp, Homo sapien
cactcactactagaagcaagtagag

SEQ ID NO: 1229562 - DNA, 25 bp, Homo sapien
ggaaggctcctcaccaagatttaaa

SEQ ID NO: 1229563 - DNA, 25 bp, Homo sapien
tataagaggtataatcccaacagca

SEQ ID NO: 1229564 - DNA, 25 bp, Homo sapien
gctgaccacagaagtataagaccgc

SEQ ID NO: 1229565 - DNA, 25 bp, Homo sapien
gagcagcagttcaaattagatccag

SEQ ID NO: 1229566 - DNA, 25 bp, Homo sapien
aatctctgtcgcaggactggcgcct

SEQ ID NO: 1229567 - DNA, 25 bp, Homo sapien
tagatccaggccaccaagcctttgg

SEQ ID NO: 1229568 - DNA, 25 bp, Homo sapien
tcgttattatgacagaaggcaggga

SEQ ID NO: 1229569 - DNA, 25 bp, Homo sapien
cgcaaggccgcgtttaaaagagcaa

SEQ ID NO: 1229570 - DNA, 25 bp, Homo sapien
gacacataacggtggcaattctgcg

SEQ ID NO: 1229571 - DNA, 25 bp, Homo sapien
caaatgccggctctagttacttcct

SEQ ID NO: 1229572 - DNA, 25 bp, Homo sapien
taacctcctggtagatcgtgacctc

SEQ ID NO: 1229573 - DNA, 25 bp, Homo sapien
gtaaggatcaatgggtaccctggcc

SEQ ID NO: 1229574 - DNA, 25 bp, Homo sapien
gaagaactacaagacaaccacagcg

SEQ ID NO: 1229575 - DNA, 25 bp, Homo sapien
tggaatcgccatgtcctactcagga

SEQ ID NO: 1229576 - DNA, 25 bp, Homo sapien
gtcaagaagcatctgcacacgggag

SEQ ID NO: 1229577 - DNA, 25 bp, Homo sapien
tatataaaggttgcaggcccctccg

SEQ ID NO: 1229578 - DNA, 25 bp, Homo sapien
tctgtccaggtctcaaggtaggagg

SEQ ID NO: 1229579 - DNA, 25 bp, Homo sapien
ttgaatttcacagggcaatcctctg

SEQ ID NO: 1229580 - DNA, 25 bp, Homo sapien
tgggagacatcttttacacaggaat

SEQ ID NO: 1229581 - DNA, 25 bp, Homo sapien
gggacctggcgggacagaattcaat

SEQ ID NO: 1229582 - DNA, 25 bp, Homo sapien
ggattgtcatccctactgttggagg

SEQ ID NO: 1229583 - DNA, 25 bp, Homo sapien
taagaaacggaagggcagagtgatc

SEQ ID NO: 1229584 - DNA, 25 bp, Homo sapien
cattagcctttgagtctgtttattc

SEQ ID NO: 1229585 - DNA, 25 bp, Homo sapien
ttatcttttaaatggtggcttcatt

SEQ ID NO: 1229586 - DNA, 25 bp, Homo sapien
cagaatgctggcaagttcaggtcca

SEQ ID NO: 1229587 - DNA, 25 bp, Homo sapien
gtatgaaactattatagcagaagaa

SEQ ID NO: 1229588 - DNA, 25 bp, Homo sapien
ctggggcatgccattacctttttca

SEQ ID NO: 1229589 - DNA, 25 bp, Homo sapien
ctacactaccaattaggagttcatc

SEQ ID NO: 1229590 - DNA, 25 bp, Homo sapien
ggcatgccattacctttttcacttc

SEQ ID NO: 1229591 - DNA, 25 bp, Homo sapien
ttctacactaccaattaggagttca

SEQ ID NO: 1229592 - DNA, 25 bp, Homo sapien
ctgttatgcagtaaccaagggttag

SEQ ID NO: 1229593 - DNA, 25 bp, Homo sapien
taggaaccaatgaatgggccacacc

SEQ ID NO: 1229594 - DNA, 25 bp, Homo sapien
taaccaagggttaggtgatgcttag

SEQ ID NO: 1229595 - DNA, 25 bp, Homo sapien
tgatgcttaggaaccaatgaatggg

SEQ ID NO: 1229596 - DNA, 25 bp, Homo sapien
tctgggtccaccgttgtcaaaatac

SEQ ID NO: 1229597 - DNA, 25 bp, Homo sapien
ccagtggctgtttcctgtctatgac

SEQ ID NO: 1229598 - DNA, 25 bp, Homo sapien
tgtccagtggctgtttcctgtctat

SEQ ID NO: 1229599 - DNA, 25 bp, Homo sapien
agtggctgtttcctgtctatgactc

SEQ ID NO: 1229600 - DNA, 25 bp, Homo sapien
gatacacagggtcaccaactctcag

SEQ ID NO: 1229601 - DNA, 25 bp, Homo sapien
caacttgtacaattccctctcagaa

SEQ ID NO: 1229602 - DNA, 25 bp, Homo sapien
aagtggagacaacttgtacaattcc

SEQ ID NO: 1229603 - DNA, 25 bp, Homo sapien
tccactgaataatagatcccaaaaa

SEQ ID NO: 1229604 - DNA, 25 bp, Homo sapien
accctagtggatccatcactcatca

SEQ ID NO: 1229605 - DNA, 25 bp, Homo sapien
caccctagtggatccatcactcatc

SEQ ID NO: 1229606 - DNA, 25 bp, Homo sapien
tactgcagggaacagaaattaaggg

SEQ ID NO: 1229607 - DNA, 25 bp, Homo sapien
gctgaggtaggagtacacaaattac

SEQ ID NO: 1229608 - DNA, 25 bp, Homo sapien
ggcattttccaactccaaagatcag

SEQ ID NO: 1229609 - DNA, 25 bp, Homo sapien
acatatacctgtctttctgctgagc

SEQ ID NO: 1229610 - DNA, 25 bp, Homo sapien
aacagtcacttattgaggttacaca

SEQ ID NO: 1229611 - DNA, 25 bp, Homo sapien
taataagaatctctggttatttggt

SEQ ID NO: 1229612 - DNA, 25 bp, Homo sapien
gtcacttattgaggttacacatata

SEQ ID NO: 1229613 - DNA, 25 bp, Homo sapien
aaaacagtcacttattgaggttaca

SEQ ID NO: 1229614 - DNA, 25 bp, Homo sapien
tttgctgatgtatcgttgctgctgt

SEQ ID NO: 1229615 - DNA, 25 bp, Homo sapien
tccagggtaaagatagttgaaggct

SEQ ID NO: 1229616 - DNA, 25 bp, Homo sapien
tcaggaagtaaaagtgtaatagcca

SEQ ID NO: 1229617 - DNA, 25 bp, Homo sapien
tgcattaacctggagcatacacaac

SEQ ID NO: 1229618 - DNA, 25 bp, Homo sapien
tggcagttacacacaaacagattac

SEQ ID NO: 1229619 - DNA, 25 bp, Homo sapien
cagcccagattccataatgctagag

SEQ ID NO: 1229620 - DNA, 25 bp, Homo sapien
gagtgtggtaacatgcgtcctgcac

SEQ ID NO: 1229621 - DNA, 25 bp, Homo sapien
cctgcacatcaggacacagtgatct

SEQ ID NO: 1229622 - DNA, 25 bp, Homo sapien
agctcctgaacccttccgggccaat

SEQ ID NO: 1229623 - DNA, 25 bp, Homo sapien
gaaggtgcggcctttggccccgagc

SEQ ID NO: 1229624 - DNA, 25 bp, Homo sapien
gctggcttctccgcgaggtggcggc

SEQ ID NO: 1229625 - DNA, 25 bp, Homo sapien
gcggcaaggccggagcgcgctggtc

SEQ ID NO: 1229626 - DNA, 25 bp, Homo sapien
cacccgggccgggattgcgcgagga

SEQ ID NO: 1229627 - DNA, 25 bp, Homo sapien
atgcgcggcgccaggcgacagcccc

SEQ ID NO: 1229628 - DNA, 25 bp, Homo sapien
tgcgcgaggaggacaaagcgcgcca

SEQ ID NO: 1229629 - DNA, 25 bp, Homo sapien
agcgccaccgcggtcaggcccagcg

SEQ ID NO: 1229630 - DNA, 25 bp, Homo sapien
gtagatccagagctgcgccactgtg

SEQ ID NO: 1229631 - DNA, 25 bp, Homo sapien
tccagagctgcgccactgtgcccac

SEQ ID NO: 1229632 - DNA, 25 bp, Homo sapien
ggtagatccagagctgcgccactgt

SEQ ID NO: 1229633 - DNA, 25 bp, Homo sapien
agatccagagctgcgccactgtgcc

SEQ ID NO: 1229634 - DNA, 25 bp, Homo sapien
ggcacccccttgcaggatttcacag

SEQ ID NO: 1229635 - DNA, 25 bp, Homo sapien
agccccatggccgtgcactccgcct

SEQ ID NO: 1229636 - DNA, 25 bp, Homo sapien
ctcgctcaccggcacccccttgcag

SEQ ID NO: 1229637 - DNA, 25 bp, Homo sapien
atggccgtgcactccgcctcgctca

SEQ ID NO: 1229638 - DNA, 25 bp, Homo sapien
ggaaatagcaggactgttgcttata

SEQ ID NO: 1229639 - DNA, 25 bp, Homo sapien
tgagcaacacacagtgccacttata

SEQ ID NO: 1229640 - DNA, 25 bp, Homo sapien
caacgggctcttgtcagtggaaata

SEQ ID NO: 1229641 - DNA, 25 bp, Homo sapien
gccacttatactctgccagttccag

SEQ ID NO: 1229642 - DNA, 25 bp, Homo sapien
gaaatcaggaccaggcgaggttcct

SEQ ID NO: 1229643 - DNA, 25 bp, Homo sapien
tgtcaccatcgcaggtcagggaaat

SEQ ID NO: 1229644 - DNA, 25 bp, Homo sapien
cgttttgataggcagtagtaggtcc

SEQ ID NO: 1229645 - DNA, 25 bp, Homo sapien
tcctggcgagcagtaaccatgtttc

SEQ ID NO: 1229646 - DNA, 25 bp, Homo sapien
cgaaatctttaggaaactgtgggct

SEQ ID NO: 1229647 - DNA, 25 bp, Homo sapien
tcataatcacccagaacttgaggcc

SEQ ID NO: 1229648 - DNA, 25 bp, Homo sapien
tgctcgaagagtctgtatactaccg

SEQ ID NO: 1229649 - DNA, 25 bp, Homo sapien
tatactaccgtagcatgtctaagcc

SEQ ID NO: 1229650 - DNA, 25 bp, Homo sapien
catgtgaggctcgaagtgcaccagg

SEQ ID NO: 1229651 - DNA, 25 bp, Homo sapien
tgacttcaggaagctggttatccac

SEQ ID NO: 1229652 - DNA, 25 bp, Homo sapien
tctgctatttgatgaggacgtctcg

SEQ ID NO: 1229653 - DNA, 25 bp, Homo sapien
tccttgggtcggaacaagtctgcta

SEQ ID NO: 1229654 - DNA, 25 bp, Homo sapien
gttaggtgtgcctagttcctagaca

SEQ ID NO: 1229655 - DNA, 25 bp, Homo sapien
caacttttcagtggttaggtgtgcc

SEQ ID NO: 1229656 - DNA, 25 bp, Homo sapien
aacacatggcacaccaacttttcag

SEQ ID NO: 1229657 - DNA, 25 bp, Homo sapien
tagttcctagacatagcctccatgc

SEQ ID NO: 1229658 - DNA, 25 bp, Homo sapien
tagcctggagttgagatccgccagc

SEQ ID NO: 1229659 - DNA, 25 bp, Homo sapien
tctgcatagacatcgcatcctgaaa

SEQ ID NO: 1229660 - DNA, 25 bp, Homo sapien
ccagcgacgcctcagaaaggatcaa

SEQ ID NO: 1229661 - DNA, 25 bp, Homo sapien
tgaaattacaatattgggcctgaag

SEQ ID NO: 1229662 - DNA, 25 bp, Homo sapien
atccaaggaaagatccaaaggggca

SEQ ID NO: 1229663 - DNA, 25 bp, Homo sapien
agtcaaatccaaggaaagatccaaa

SEQ ID NO: 1229664 - DNA, 25 bp, Homo sapien
tcaaatccaaggaaagatccaaagg

SEQ ID NO: 1229665 - DNA, 25 bp, Homo sapien
caaatccaaggaaagatccaaaggg

SEQ ID NO: 1229666 - DNA, 25 bp, Homo sapien
gaattctccttagaagccttagata

SEQ ID NO: 1229667 - DNA, 25 bp, Homo sapien
agtctctgacccatcaacatttgta

SEQ ID NO: 1229668 - DNA, 25 bp, Homo sapien
gccttagatactgaactgcctcctt

SEQ ID NO: 1229669 - DNA, 25 bp, Homo sapien
tccacacagaagtctgcacttatta

SEQ ID NO: 1229670 - DNA, 25 bp, Homo sapien
tacaaaggtaaatttgctgccagaa

SEQ ID NO: 1229671 - DNA, 25 bp, Homo sapien
gaatcaagttaaatagccaaaggcc

SEQ ID NO: 1229672 - DNA, 25 bp, Homo sapien
agggagagaatcaagttaaatagcc

SEQ ID NO: 1229673 - DNA, 25 bp, Homo sapien
caaaggtaaatttgctgccagaatc

SEQ ID NO: 1229674 - DNA, 25 bp, Homo sapien
tgaagaatataattggctcctctga

SEQ ID NO: 1229675 - DNA, 25 bp, Homo sapien
tgcctccgtacagcaaaagtgaaga

SEQ ID NO: 1229676 - DNA, 25 bp, Homo sapien
ggctcctctgaggataaaaggttaa

SEQ ID NO: 1229677 - DNA, 25 bp, Homo sapien
tttcagcatagttttgcctccgtac

SEQ ID NO: 1229678 - DNA, 25 bp, Homo sapien
taaggtaaccctaggcagaaatatg

SEQ ID NO: 1229679 - DNA, 25 bp, Homo sapien
ggcgtacttttattatcctccatcg

SEQ ID NO: 1229680 - DNA, 25 bp, Homo sapien
cagaagctgaaaccagccgtcacat

SEQ ID NO: 1229681 - DNA, 25 bp, Homo sapien
tcaggcaaggtaaatgggacttagc

SEQ ID NO: 1229682 - DNA, 25 bp, Homo sapien
caggtagggtggttgtctctactgt

SEQ ID NO: 1229683 - DNA, 25 bp, Homo sapien
gcagcgaaaagccacagttgctgag

SEQ ID NO: 1229684 - DNA, 25 bp, Homo sapien
aaacggtcactgactgtggcaggta

SEQ ID NO: 1229685 - DNA, 25 bp, Homo sapien
agaaacttccatgcaggtcctcggc

SEQ ID NO: 1229686 - DNA, 25 bp, Homo sapien
gcaaactgccttgtccttggatgat

SEQ ID NO: 1229687 - DNA, 25 bp, Homo sapien
tcctgaccttcttaccctcggagag

SEQ ID NO: 1229688 - DNA, 25 bp, Homo sapien
aaaactgggcacagcggattagcac

SEQ ID NO: 1229689 - DNA, 25 bp, Homo sapien
ttcacaaaaagcactccaaggcagc

SEQ ID NO: 1229690 - DNA, 25 bp, Homo sapien
gaagtatttacgaagcactgcagcc

SEQ ID NO: 1229691 - DNA, 25 bp, Homo sapien
cagatacggacacatcaggagcagg

SEQ ID NO: 1229692 - DNA, 25 bp, Homo sapien
tatatcagatcccttagtgcctgcc

SEQ ID NO: 1229693 - DNA, 25 bp, Homo sapien
ggatcaagagccttaagtcactgag

SEQ ID NO: 1229694 - DNA, 25 bp, Homo sapien
tctcctctcacttgtaaaaatgtca

SEQ ID NO: 1229695 - DNA, 25 bp, Homo sapien
gtcaccaataagaagctcatcccaa

SEQ ID NO: 1229696 - DNA, 25 bp, Homo sapien
caccaataagaagctcatcccaaga

SEQ ID NO: 1229697 - DNA, 25 bp, Homo sapien
cgtcaccaataagaagctcatccca

SEQ ID NO: 1229698 - DNA, 25 bp, Homo sapien
tcaccaataagaagctcatcccaag

SEQ ID NO: 1229699 - DNA, 25 bp, Homo sapien
ggtgtctgggtccactgtggttaaa

SEQ ID NO: 1229700 - DNA, 25 bp, Homo sapien
cttcctgctcatgacaccggtgtct

SEQ ID NO: 1229701 - DNA, 25 bp, Homo sapien
ctcatgacaccggtgtctgggtcca

SEQ ID NO: 1229702 - DNA, 25 bp, Homo sapien
ctgctcatgacaccggtgtctgggt

SEQ ID NO: 1229703 - DNA, 25 bp, Homo sapien
taaacacaggctcccaatggaggaa

SEQ ID NO: 1229704 - DNA, 25 bp, Homo sapien
gatgcagagaacaagcccaaacacg

SEQ ID NO: 1229705 - DNA, 25 bp, Homo sapien
ttatcctccttctataaacacaggc

SEQ ID NO: 1229706 - DNA, 25 bp, Homo sapien
aacacgtgaagtgctttgcggaggc

SEQ ID NO: 1229707 - DNA, 25 bp, Homo sapien
acttgaagagcctaagcgacttgcc

SEQ ID NO: 1229708 - DNA, 25 bp, Homo sapien
tgacacaagtggctgctggcaaatg

SEQ ID NO: 1229709 - DNA, 25 bp, Homo sapien
tgagtacccatgcagtaactgtgct

SEQ ID NO: 1229710 - DNA, 25 bp, Homo sapien
tcatggaagcaacaacggcagactc

SEQ ID NO: 1229711 - DNA, 25 bp, Homo sapien
gagcaggaagcccaagacactttat

SEQ ID NO: 1229712 - DNA, 25 bp, Homo sapien
caccactggcgttcatgggaccata

SEQ ID NO: 1229713 - DNA, 25 bp, Homo sapien
tgttaccgttaaagtgctgtgcacc

SEQ ID NO: 1229714 - DNA, 25 bp, Homo sapien
cctggtttacgcattcactggtcaa

SEQ ID NO: 1229715 - DNA, 25 bp, Homo sapien
agagggtgacctcttcaggaacagg

SEQ ID NO: 1229716 - DNA, 25 bp, Homo sapien
agctctgcagtctaagagtccagac

SEQ ID NO: 1229717 - DNA, 25 bp, Homo sapien
tgtatgggtgtttccgttgctgcca

SEQ ID NO: 1229718 - DNA, 25 bp, Homo sapien
gacacatcagctgcttgtatgggtg

SEQ ID NO: 1229719 - DNA, 25 bp, Homo sapien
gctggatttcaccttgctttgcatt

SEQ ID NO: 1229720 - DNA, 25 bp, Homo sapien
gactcggtaagtcctctgtgattcc

SEQ ID NO: 1229721 - DNA, 25 bp, Homo sapien
ccttgctttgcattgtactgactcg

SEQ ID NO: 1229722 - DNA, 25 bp, Homo sapien
cattgtactgactcggtaagtcctc

SEQ ID NO: 1229723 - DNA, 25 bp, Homo sapien
taagacgttagatacttggccaggt

SEQ ID NO: 1229724 - DNA, 25 bp, Homo sapien
gatgcaagagctcaaccagcacgtg

SEQ ID NO: 1229725 - DNA, 25 bp, Homo sapien
acagaacagcgcctcctggagtggg

SEQ ID NO: 1229726 - DNA, 25 bp, Homo sapien
agtcacagccaagcggatgcaagag

SEQ ID NO: 1229727 - DNA, 25 bp, Homo sapien
gtctcccactttgatggtccctggg

SEQ ID NO: 1229728 - DNA, 25 bp, Homo sapien
tctcccactttgatggtccctgggt

SEQ ID NO: 1229729 - DNA, 25 bp, Homo sapien
tccatataactttcgttctgaaggg

SEQ ID NO: 1229730 - DNA, 25 bp, Homo sapien
taactttcgttctgaagggtcacac

SEQ ID NO: 1229731 - DNA, 25 bp, Homo sapien
gagacaccagaagtccaaaagacga

SEQ ID NO: 1229732 - DNA, 25 bp, Homo sapien
tgggacattgaagcattgagacacc

SEQ ID NO: 1229733 - DNA, 25 bp, Homo sapien
cttggtagataaacggagaagcagg

SEQ ID NO: 1229734 - DNA, 25 bp, Homo sapien
taatattccaggacatacggttccc

SEQ ID NO: 1229735 - DNA, 25 bp, Homo sapien
cttctctttctctaacgagtggtag

SEQ ID NO: 1229736 - DNA, 25 bp, Homo sapien
ttctctaacgagtggtagtgacagg

SEQ ID NO: 1229737 - DNA, 25 bp, Homo sapien
tctttctctaacgagtggtagtgac

SEQ ID NO: 1229738 - DNA, 25 bp, Homo sapien
ctctaacgagtggtagtgacaggat

SEQ ID NO: 1229739 - DNA, 25 bp, Homo sapien
tttcacccggaactggagaaggagc

SEQ ID NO: 1229740 - DNA, 25 bp, Homo sapien
gcagggccagatccagatctatgga

SEQ ID NO: 1229741 - DNA, 25 bp, Homo sapien
tgagcacctttaggaaatccaatgc

SEQ ID NO: 1229742 - DNA, 25 bp, Homo sapien
aaggagcactccgtcattagctgag

SEQ ID NO: 1229743 - DNA, 25 bp, Homo sapien
gaggagtatttctccctataggaca

SEQ ID NO: 1229744 - DNA, 25 bp, Homo sapien
tctgccttcgtgtgtataagttgct

SEQ ID NO: 1229745 - DNA, 25 bp, Homo sapien
aggagaggaggagtatttctcccta

SEQ ID NO: 1229746 - DNA, 25 bp, Homo sapien
ggacaacggcctgaattccaacagc

SEQ ID NO: 1229747 - DNA, 25 bp, Homo sapien
acactgtctaccaacatgtggcttg

SEQ ID NO: 1229748 - DNA, 25 bp, Homo sapien
taaagagtctgctctgacagtagca

SEQ ID NO: 1229749 - DNA, 25 bp, Homo sapien
cctaagaagcttaatgtggacacta

SEQ ID NO: 1229750 - DNA, 25 bp, Homo sapien
aaagctgctgagtatggcataacaa

SEQ ID NO: 1229751 - DNA, 25 bp, Homo sapien
cattgactttgttgcgtggaggctc

SEQ ID NO: 1229752 - DNA, 25 bp, Homo sapien
ttgtgggtttggtgccttcagagct

SEQ ID NO: 1229753 - DNA, 25 bp, Homo sapien
tcaggattcgttaatgatgtggtca

SEQ ID NO: 1229754 - DNA, 25 bp, Homo sapien
tccctttcagggcatacacgatcct

SEQ ID NO: 1229755 - DNA, 25 bp, Homo sapien
agtaaccacattaagaggtgaaaag

SEQ ID NO: 1229756 - DNA, 25 bp, Homo sapien
tagtaaccacattaagaggtgaaaa

SEQ ID NO: 1229757 - DNA, 25 bp, Homo sapien
gtaaccacattaagaggtgaaaaga

SEQ ID NO: 1229758 - DNA, 25 bp, Homo sapien
gttatatgagtgttgtacaggcctc

SEQ ID NO: 1229759 - DNA, 25 bp, Homo sapien
ggcaatgccgaagttatatgagtgt

SEQ ID NO: 1229760 - DNA, 25 bp, Homo sapien
gagtgttgtacaggcctcttccatc

SEQ ID NO: 1229761 - DNA, 25 bp, Homo sapien
gctacaaagaaggtggcaatgccga

SEQ ID NO: 1229762 - DNA, 25 bp, Homo sapien
acctcgtaccaattacacaatcatt

SEQ ID NO: 1229763 - DNA, 25 bp, Homo sapien
tgtagtgcattcacaatattgtgta

SEQ ID NO: 1229764 - DNA, 25 bp, Homo sapien
catttactattagtggcatgtagtg

SEQ ID NO: 1229765 - DNA, 25 bp, Homo sapien
tcatcacaaaggaaacctcgtacca

SEQ ID NO: 1229766 - DNA, 25 bp, Homo sapien
cgtcaatccaggtccccacaggaag

SEQ ID NO: 1229767 - DNA, 25 bp, Homo sapien
atcgtcaatccaggtccccacagga

SEQ ID NO: 1229768 - DNA, 25 bp, Homo sapien
cctccaggactctgacaggcatcgt

SEQ ID NO: 1229769 - DNA, 25 bp, Homo sapien
ctctgacaggcatcgtcaatccagg

SEQ ID NO: 1229770 - DNA, 25 bp, Homo sapien
tctaatctggggactggattgtggg

SEQ ID NO: 1229771 - DNA, 25 bp, Homo sapien
taatctggggactggattgtgggac

SEQ ID NO: 1229772 - DNA, 25 bp, Homo sapien
ctggggactggattgtgggacggac

SEQ ID NO: 1229773 - DNA, 25 bp, Homo sapien
tctggggactggattgtgggacgga

SEQ ID NO: 1229774 - DNA, 25 bp, Homo sapien
gagatcaacctcaggggagaccaga

SEQ ID NO: 1229775 - DNA, 25 bp, Homo sapien
gagtacaggacaaggaagtagaagt

SEQ ID NO: 1229776 - DNA, 25 bp, Homo sapien
cggtgaattacaccaggtggggtga

SEQ ID NO: 1229777 - DNA, 25 bp, Homo sapien
caggctgttgtccccagaagaagag

SEQ ID NO: 1229778 - DNA, 25 bp, Homo sapien
cagctcatgaggtccaaagttttct

SEQ ID NO: 1229779 - DNA, 25 bp, Homo sapien
ttgcccagctcatgaggtccaaagt

SEQ ID NO: 1229780 - DNA, 25 bp, Homo sapien
ttctcaacaaactgcttggtgtcga

SEQ ID NO: 1229781 - DNA, 25 bp, Homo sapien
ggtgtcgatgttgtaacctggagca

SEQ ID NO: 1229782 - DNA, 25 bp, Homo sapien
ccgtattacatgataagctccatta

SEQ ID NO: 1229783 - DNA, 25 bp, Homo sapien
ggagctcaggctgttatcctccagg

SEQ ID NO: 1229784 - DNA, 25 bp, Homo sapien
taatttgttgcttatcccaggcttc

SEQ ID NO: 1229785 - DNA, 25 bp, Homo sapien
gggctctgctgattccctgggcacc

SEQ ID NO: 1229786 - DNA, 25 bp, Homo sapien
agggagagtttcaatcaaccttggc

SEQ ID NO: 1229787 - DNA, 25 bp, Homo sapien
ctgaattggctcctgccaagtttat

SEQ ID NO: 1229788 - DNA, 25 bp, Homo sapien
cttggcttttcataaaggacttggg

SEQ ID NO: 1229789 - DNA, 25 bp, Homo sapien
tgctgatgaggaagctttgcctcta

SEQ ID NO: 1229790 - DNA, 25 bp, Homo sapien
tgggtcttctaggactccacaattg

SEQ ID NO: 1229791 - DNA, 25 bp, Homo sapien
gatcaagcacgagccctgagttggc

SEQ ID NO: 1229792 - DNA, 25 bp, Homo sapien
gaatgctgactaacacagatcccct

SEQ ID NO: 1229793 - DNA, 25 bp, Homo sapien
gattcagacttaattacgtcactgg

SEQ ID NO: 1229794 - DNA, 25 bp, Homo sapien
cacagtcagtgggttgttcactcag

SEQ ID NO: 1229795 - DNA, 25 bp, Homo sapien
caatgctgggcatatgaaactagag

SEQ ID NO: 1229796 - DNA, 25 bp, Homo sapien
gcctatgtgctttcctagagctgct

SEQ ID NO: 1229797 - DNA, 25 bp, Homo sapien
tgatgtgtcaagttgtgtacaatgc

SEQ ID NO: 1229798 - DNA, 25 bp, Homo sapien
tgcatttcaagatgtttggagcagc

SEQ ID NO: 1229799 - DNA, 25 bp, Homo sapien
agcagccccttggttcttgaagaag

SEQ ID NO: 1229800 - DNA, 25 bp, Homo sapien
gatgagatttcaactgcactattac

SEQ ID NO: 1229801 - DNA, 25 bp, Homo sapien
tcaactgcactattactcattcctt

SEQ ID NO: 1229802 - DNA, 25 bp, Homo sapien
taagaaatgccagtgacctcgtaga

SEQ ID NO: 1229803 - DNA, 25 bp, Homo sapien
tggtcgaaatatccctacataaaga

SEQ ID NO: 1229804 - DNA, 25 bp, Homo sapien
caagttggaccggatcaatctgtcc

SEQ ID NO: 1229805 - DNA, 25 bp, Homo sapien
caatctgtccctagctttggtcgaa

SEQ ID NO: 1229806 - DNA, 25 bp, Homo sapien
tgcattattagtccccagtgccaaa

SEQ ID NO: 1229807 - DNA, 25 bp, Homo sapien
tttgctattgttggttgccttctgt

SEQ ID NO: 1229808 - DNA, 25 bp, Homo sapien
aattagataatttccattaggagac

SEQ ID NO: 1229809 - DNA, 25 bp, Homo sapien
ttccattaggagaccgtgcattatt

SEQ ID NO: 1229810 - DNA, 25 bp, Homo sapien
agtggatctctctgcagaaacccta

SEQ ID NO: 1229811 - DNA, 25 bp, Homo sapien
ttacccactaagggaagcctatctg

SEQ ID NO: 1229812 - DNA, 25 bp, Homo sapien
actaagggaagcctatctgactaac

SEQ ID NO: 1229813 - DNA, 25 bp, Homo sapien
ccactaagggaagcctatctgacta

SEQ ID NO: 1229814 - DNA, 25 bp, Homo sapien
gaaagcagtctattttggttgccat

SEQ ID NO: 1229815 - DNA, 25 bp, Homo sapien
tgaccctctggatctgagaatgcct

SEQ ID NO: 1229816 - DNA, 25 bp, Homo sapien
agtcacctttttccgttgcagctgg

SEQ ID NO: 1229817 - DNA, 25 bp, Homo sapien
gccatcaaagccctgacttcaatct

SEQ ID NO: 1229818 - DNA, 25 bp, Homo sapien
ttggagcctccatatttaaatcatc

SEQ ID NO: 1229819 - DNA, 25 bp, Homo sapien
tgtctttggagcctccatatttaaa

SEQ ID NO: 1229820 - DNA, 25 bp, Homo sapien
ctttggagcctccatatttaaatca

SEQ ID NO: 1229821 - DNA, 25 bp, Homo sapien
ctgtctttggagcctccatatttaa

SEQ ID NO: 1229822 - DNA, 25 bp, Homo sapien
taaatgcacggaaatcaattccctt

SEQ ID NO: 1229823 - DNA, 25 bp, Homo sapien
gaaaaactctataatgactcctagc

SEQ ID NO: 1229824 - DNA, 25 bp, Homo sapien
gttgctcgggtgacgcaaatccgcc

SEQ ID NO: 1229825 - DNA, 25 bp, Homo sapien
tatctccaccggcaagttgctcggg

SEQ ID NO: 1229826 - DNA, 25 bp, Homo sapien
ggttcgttgttttgcaagtgcccac

SEQ ID NO: 1229827 - DNA, 25 bp, Homo sapien
gctgcgtggtggtcaacgtcttcca

SEQ ID NO: 1229828 - DNA, 25 bp, Homo sapien
aacgtcttccattcgtgccttgggt

SEQ ID NO: 1229829 - DNA, 25 bp, Homo sapien
caatactgctttcaattctgtgaca

SEQ ID NO: 1229830 - DNA, 25 bp, Homo sapien
gcttttattccaggagtccgtgtcc

SEQ ID NO: 1229831 - DNA, 25 bp, Homo sapien
gcggccgcaaattggttttattctg

SEQ ID NO: 1229832 - DNA, 25 bp, Homo sapien
ttgcccaaatgttgccgccctgagt

SEQ ID NO: 1229833 - DNA, 25 bp, Homo sapien
ttcctgggcccttgcccaaatgttg

SEQ ID NO: 1229834 - DNA, 25 bp, Homo sapien
gacaccgcaagaaaacccaaatagc

SEQ ID NO: 1229835 - DNA, 25 bp, Homo sapien
cccaaatagctaagccctaagagct

SEQ ID NO: 1229836 - DNA, 25 bp, Homo sapien
ccagggagacgggagccggacaccg

SEQ ID NO: 1229837 - DNA, 25 bp, Homo sapien
caacaataatagtccgttagttagg

SEQ ID NO: 1229838 - DNA, 25 bp, Homo sapien
ctggcctcgctttaaaggcggcgcg

SEQ ID NO: 1229839 - DNA, 25 bp, Homo sapien
ggatctcggccggtcaccgcctcgc

SEQ ID NO: 1229840 - DNA, 25 bp, Homo sapien
gcgagggccggatctcggccggtca

SEQ ID NO: 1229841 - DNA, 25 bp, Homo sapien
tcgctccctggcctcgctttaaagg

SEQ ID NO: 1229842 - DNA, 25 bp, Homo sapien
ctgccgcagtccagccggactgggt

SEQ ID NO: 1229843 - DNA, 25 bp, Homo sapien
aggacgatccgctttcgcttctccg

SEQ ID NO: 1229844 - DNA, 25 bp, Homo sapien
gcggcagccgaggacgatccgcttt

SEQ ID NO: 1229845 - DNA, 25 bp, Homo sapien
gggcgcgcgagtcccggagaaggcg

SEQ ID NO: 1229846 - DNA, 25 bp, Homo sapien
ggctgaagttggaggcgtagaaggg

SEQ ID NO: 1229847 - DNA, 25 bp, Homo sapien
cgtagaagggagccagcccggctgc

SEQ ID NO: 1229848 - DNA, 25 bp, Homo sapien
gctgaagttggaggcgtagaaggga

SEQ ID NO: 1229849 - DNA, 25 bp, Homo sapien
ggcgtagaagggagccagcccggct

SEQ ID NO: 1229850 - DNA, 25 bp, Homo sapien
ggccggccgaggagcagtaagcggc

SEQ ID NO: 1229851 - DNA, 25 bp, Homo sapien
ccggcgtgcagaatgtctgcgatgc

SEQ ID NO: 1229852 - DNA, 25 bp, Homo sapien
tctgcgatgcagaaggagggctttt

SEQ ID NO: 1229853 - DNA, 25 bp, Homo sapien
cctgggccggccgaggagcagtaag

SEQ ID NO: 1229854 - DNA, 25 bp, Homo sapien
ggaaagaggcgtgcgggtgaaccga

SEQ ID NO: 1229855 - DNA, 25 bp, Homo sapien
gcgggtgaaccgagcccaagtgcgc

SEQ ID NO: 1229856 - DNA, 25 bp, Homo sapien
ttggaaagaggcgtgcgggtgaacc

SEQ ID NO: 1229857 - DNA, 25 bp, Homo sapien
tgaaccgagcccaagtgcgcggtga

SEQ ID NO: 1229858 - DNA, 25 bp, Homo sapien
gggtgggtcgaagcggggatctggc

SEQ ID NO: 1229859 - DNA, 25 bp, Homo sapien
ctggggtgggtcgaagcggggatct

SEQ ID NO: 1229860 - DNA, 25 bp, Homo sapien
ggtcgaagcggggatctggccgccg

SEQ ID NO: 1229861 - DNA, 25 bp, Homo sapien
tgggtcgaagcggggatctggccgc

SEQ ID NO: 1229862 - DNA, 25 bp, Homo sapien
gtggtaggcggctgagagcggagac

SEQ ID NO: 1229863 - DNA, 25 bp, Homo sapien
aagccagccgggacttcggagggcg

SEQ ID NO: 1229864 - DNA, 25 bp, Homo sapien
tgagagcggagacagccgctgcggg

SEQ ID NO: 1229865 - DNA, 25 bp, Homo sapien
tgctgttgttgttgcgggtgatggt

SEQ ID NO: 1229866 - DNA, 25 bp, Homo sapien
tcggaaccactcgcgtccccgaggc

SEQ ID NO: 1229867 - DNA, 25 bp, Homo sapien
ggtcaaattctgcagataaaatgcg

SEQ ID NO: 1229868 - DNA, 25 bp, Homo sapien
aaatgcggtcaattccaaatttgag

SEQ ID NO: 1229869 - DNA, 25 bp, Homo sapien
tgcagataaaatgcggtcaattcca

SEQ ID NO: 1229870 - DNA, 25 bp, Homo sapien
tctcagcgtgttgccttctttgact

SEQ ID NO: 1229871 - DNA, 25 bp, Homo sapien
caagggaaaaggatagcaggttaca

SEQ ID NO: 1229872 - DNA, 25 bp, Homo sapien
tcacactctccgctgatttgttcct

SEQ ID NO: 1229873 - DNA, 25 bp, Homo sapien
gcaggttacatctcgggcacactca

SEQ ID NO: 1229874 - DNA, 25 bp, Homo sapien
acactcacactctccgctgatttgt

SEQ ID NO: 1229875 - DNA, 25 bp, Homo sapien
ttgcagaagcctcgttaatgggatc

SEQ ID NO: 1229876 - DNA, 25 bp, Homo sapien
tctagagatgcgaagaactggccgg

SEQ ID NO: 1229877 - DNA, 25 bp, Homo sapien
cttggaactgatgctgaactgaatt

SEQ ID NO: 1229878 - DNA, 25 bp, Homo sapien
ccaccggttagcagggaagtgagat

SEQ ID NO: 1229879 - DNA, 25 bp, Homo sapien
tgtccttcgtgagcacagcataggg

SEQ ID NO: 1229880 - DNA, 25 bp, Homo sapien
tacgtctgcggcatggtgtccttcg

SEQ ID NO: 1229881 - DNA, 25 bp, Homo sapien
gaacgcttccttttgtacgtctgcg

SEQ ID NO: 1229882 - DNA, 25 bp, Homo sapien
tccggcttggtcacgtacttctgaa

SEQ ID NO: 1229883 - DNA, 25 bp, Homo sapien
aacatgcagtgcttgttgacacaca

SEQ ID NO: 1229884 - DNA, 25 bp, Homo sapien
gtatcagtgttatttccagcggccc

SEQ ID NO: 1229885 - DNA, 25 bp, Homo sapien
tcaagatcttgcgtttgcaccgcag

SEQ ID NO: 1229886 - DNA, 25 bp, Homo sapien
gttgcgtagtccacaaagcctcttg

SEQ ID NO: 1229887 - DNA, 25 bp, Homo sapien
gagacaagaagagacaccgagatga

SEQ ID NO: 1229888 - DNA, 25 bp, Homo sapien
gacaccgagatgagacccaggtttg

SEQ ID NO: 1229889 - DNA, 25 bp, Homo sapien
gagacccaggtttgctcctatccga

SEQ ID NO: 1229890 - DNA, 25 bp, Homo sapien
ggtttgctcctatccgactcgcgtg

SEQ ID NO: 1229891 - DNA, 25 bp, Homo sapien
cctcagtccgctccgtgtcgctggg

SEQ ID NO: 1229892 - DNA, 25 bp, Homo sapien
tcagcctcgccttcagaacggctgg

SEQ ID NO: 1229893 - DNA, 25 bp, Homo sapien
gctcctctcgtcctgctcgccatcc

SEQ ID NO: 1229894 - DNA, 25 bp, Homo sapien
agtgccgccacttcatccgccggtt

SEQ ID NO: 1229895 - DNA, 25 bp, Homo sapien
tgttgtttggtgcagagaacgctca

SEQ ID NO: 1229896 - DNA, 25 bp, Homo sapien
gttgtttggtgcagagaacgctcac

SEQ ID NO: 1229897 - DNA, 25 bp, Homo sapien
tgctggcgctgctgaagctgaaact

SEQ ID NO: 1229898 - DNA, 25 bp, Homo sapien
tataagcagccaagcgcgccttggg

SEQ ID NO: 1229899 - DNA, 25 bp, Homo sapien
tgctgctactaagactgctggcgct

SEQ ID NO: 1229900 - DNA, 25 bp, Homo sapien
cccagcactgctggcggtaatgagg

SEQ ID NO: 1229901 - DNA, 25 bp, Homo sapien
agcccatggttgggaggctgcacgc

SEQ ID NO: 1229902 - DNA, 25 bp, Homo sapien
cggatcccctccgccctagtacagt

SEQ ID NO: 1229903 - DNA, 25 bp, Homo sapien
gaggctgcacgcaaggcccggatcc

SEQ ID NO: 1229904 - DNA, 25 bp, Homo sapien
cccatggttgggaggctgcacgcaa

SEQ ID NO: 1229905 - DNA, 25 bp, Homo sapien
agtgtccgctgcagccagtcggagc

SEQ ID NO: 1229906 - DNA, 25 bp, Homo sapien
aagtgttcggctggctagcaggaca

SEQ ID NO: 1229907 - DNA, 25 bp, Homo sapien
aatgtcgggaggtaggctccacgct

SEQ ID NO: 1229908 - DNA, 25 bp, Homo sapien
aggacactgagactcccctctgctt

SEQ ID NO: 1229909 - DNA, 25 bp, Homo sapien
gtcagagaaacagtttagtcaaaca

SEQ ID NO: 1229910 - DNA, 25 bp, Homo sapien
agtcagagaaacagtttagtcaaac

SEQ ID NO: 1229911 - DNA, 25 bp, Homo sapien
caaatttaaggcgtcctaagtgcct

SEQ ID NO: 1229912 - DNA, 25 bp, Homo sapien
cctaagtgcctttgagccacgacct

SEQ ID NO: 1229913 - DNA, 25 bp, Homo sapien
cgtcctaagtgcctttgagccacga

SEQ ID NO: 1229914 - DNA, 25 bp, Homo sapien
taaggcgtcctaagtgcctttgagc

SEQ ID NO: 1229915 - DNA, 25 bp, Homo sapien
gcattctacagtgtccccgggacta

SEQ ID NO: 1229916 - DNA, 25 bp, Homo sapien
gctgctgcattctacagtgtccccg

SEQ ID NO: 1229917 - DNA, 25 bp, Homo sapien
gactaaggtccggttgtagatctct

SEQ ID NO: 1229918 - DNA, 25 bp, Homo sapien
cggttgtagatctctggccttaaca

SEQ ID NO: 1229919 - DNA, 25 bp, Homo sapien
attcgatgtgcttgggatatcctgc

SEQ ID NO: 1229920 - DNA, 25 bp, Homo sapien
tcagctaagtgtgcgtgccgacgcg

SEQ ID NO: 1229921 - DNA, 25 bp, Homo sapien
tattctccttaacgccagagctgga

SEQ ID NO: 1229922 - DNA, 25 bp, Homo sapien
gattgaagcacctcaaaattcgatg

SEQ ID NO: 1229923 - DNA, 25 bp, Homo sapien
tcatgacattccccgatgatgattt

SEQ ID NO: 1229924 - DNA, 25 bp, Homo sapien
atgatgattttcttcacgttcaaag

SEQ ID NO: 1229925 - DNA, 25 bp, Homo sapien
cagggcgtggacctacggtctgggt

SEQ ID NO: 1229926 - DNA, 25 bp, Homo sapien
gacattccccgatgatgattttctt

SEQ ID NO: 1229927 - DNA, 25 bp, Homo sapien
cctgggatgggactatccggccaaa

SEQ ID NO: 1229928 - DNA, 25 bp, Homo sapien
ccgattctgatgaaatgtggaagaa

SEQ ID NO: 1229929 - DNA, 25 bp, Homo sapien
tgctagggtaaagccccgcaagaac

SEQ ID NO: 1229930 - DNA, 25 bp, Homo sapien
gcttgtgatattccgattctgatga

SEQ ID NO: 1229931 - DNA, 25 bp, Homo sapien
aacctagttcatcccctgccaacat

SEQ ID NO: 1229932 - DNA, 25 bp, Homo sapien
ccctgccaacatcaaactccagatc

SEQ ID NO: 1229933 - DNA, 25 bp, Homo sapien
ccctgcgctggccacaacctagttc

SEQ ID NO: 1229934 - DNA, 25 bp, Homo sapien
ctgcgctggccacaacctagttcat

SEQ ID NO: 1229935 - DNA, 25 bp, Homo sapien
cagagagtcgttgagggtctccaga

SEQ ID NO: 1229936 - DNA, 25 bp, Homo sapien
ccagagaggcaagttcggagcgcat

SEQ ID NO: 1229937 - DNA, 25 bp, Homo sapien
ggtgaggcttactatctgccatggc

SEQ ID NO: 1229938 - DNA, 25 bp, Homo sapien
tctggttcctcgtgtgttgcgcagg

SEQ ID NO: 1229939 - DNA, 25 bp, Homo sapien
catccttggagagggataaactcta

SEQ ID NO: 1229940 - DNA, 25 bp, Homo sapien
tgaggagcctggatgacttgttctg

SEQ ID NO: 1229941 - DNA, 25 bp, Homo sapien
gactttctatgcaaccagacactaa

SEQ ID NO: 1229942 - DNA, 25 bp, Homo sapien
ggaatccaagggtgtactcactgct

SEQ ID NO: 1229943 - DNA, 25 bp, Homo sapien
tatttaatagtctccatttcaaaat

SEQ ID NO: 1229944 - DNA, 25 bp, Homo sapien
ttatttaatagtctccatttcaaaa

SEQ ID NO: 1229945 - DNA, 25 bp, Homo sapien
taatagtctccatttcaaaatccac

SEQ ID NO: 1229946 - DNA, 25 bp, Homo sapien
tttaatagtctccatttcaaaatcc

SEQ ID NO: 1229947 - DNA, 25 bp, Homo sapien
tttagctgatgggatgcaccggcag

SEQ ID NO: 1229948 - DNA, 25 bp, Homo sapien
tgatcatgcccacagctcgacagtg

SEQ ID NO: 1229949 - DNA, 25 bp, Homo sapien
caaaacctggactgaaactcggcct

SEQ ID NO: 1229950 - DNA, 25 bp, Homo sapien
catgtgtctgtgtaccgagcagcca

SEQ ID NO: 1229951 - DNA, 25 bp, Homo sapien
tcctgaagtgccatacaaaacttct

SEQ ID NO: 1229952 - DNA, 25 bp, Homo sapien
caaaacttctagagatctggcaatg

SEQ ID NO: 1229953 - DNA, 25 bp, Homo sapien
ctggcaatgtggatagaaatgggca

SEQ ID NO: 1229954 - DNA, 25 bp, Homo sapien
cagacacatgaagtgtctgggtgtt

SEQ ID NO: 1229955 - DNA, 25 bp, Homo sapien
gagaggcagcagacaaacagcgccc

SEQ ID NO: 1229956 - DNA, 25 bp, Homo sapien
cattgaacgtggagtcagagaggca

SEQ ID NO: 1229957 - DNA, 25 bp, Homo sapien
tttcaaaggcatctgcaacgttgtt

SEQ ID NO: 1229958 - DNA, 25 bp, Homo sapien
agcgccccgagagccagcaaatgat

SEQ ID NO: 1229959 - DNA, 25 bp, Homo sapien
tcagggcgtcctcacaacttctgac

SEQ ID NO: 1229960 - DNA, 25 bp, Homo sapien
agggcgtcctcacaacttctgaccc

SEQ ID NO: 1229961 - DNA, 25 bp, Homo sapien
catcagggcgtcctcacaacttctg

SEQ ID NO: 1229962 - DNA, 25 bp, Homo sapien
atcagggcgtcctcacaacttctga

SEQ ID NO: 1229963 - DNA, 25 bp, Homo sapien
ccccaaagatgagctctccaggcat

SEQ ID NO: 1229964 - DNA, 25 bp, Homo sapien
atagcccccaaagatgagctctcca

SEQ ID NO: 1229965 - DNA, 25 bp, Homo sapien
cccccaaagatgagctctccaggca

SEQ ID NO: 1229966 - DNA, 25 bp, Homo sapien
ctcatagcccccaaagatgagctct

SEQ ID NO: 1229967 - DNA, 25 bp, Homo sapien
taaaccgtaacagtacagccacatc

SEQ ID NO: 1229968 - DNA, 25 bp, Homo sapien
tagccactgcctctgtctagtaata

SEQ ID NO: 1229969 - DNA, 25 bp, Homo sapien
ataaaggcagtgacacagcaaaaga

SEQ ID NO: 1229970 - DNA, 25 bp, Homo sapien
agccacatcacaatacaatagccac

SEQ ID NO: 1229971 - DNA, 25 bp, Homo sapien
ccttctgattgtgcataagtccaag

SEQ ID NO: 1229972 - DNA, 25 bp, Homo sapien
ttctgattgtgcataagtccaagaa

SEQ ID NO: 1229973 - DNA, 25 bp, Homo sapien
atgaccctagggccttctgattgtg

SEQ ID NO: 1229974 - DNA, 25 bp, Homo sapien
tgaccctagggccttctgattgtgc

SEQ ID NO: 1229975 - DNA, 25 bp, Homo sapien
tgctctctcatgtatcattgcagag

SEQ ID NO: 1229976 - DNA, 25 bp, Homo sapien
ggtctctgctctctcatgtatcatt

SEQ ID NO: 1229977 - DNA, 25 bp, Homo sapien
acagcccagaatttcctgtccttct

SEQ ID NO: 1229978 - DNA, 25 bp, Homo sapien
tggcactcttaattcccacacagcc

SEQ ID NO: 1229979 - DNA, 25 bp, Homo sapien
tggacaccaggttaagcttccatac

SEQ ID NO: 1229980 - DNA, 25 bp, Homo sapien
aggccacaggatccacaaatgcttg

SEQ ID NO: 1229981 - DNA, 25 bp, Homo sapien
ctcttccaaagtgtaggcagaggcc

SEQ ID NO: 1229982 - DNA, 25 bp, Homo sapien
caaatgcttggatgctatggacacc

SEQ ID NO: 1229983 - DNA, 25 bp, Homo sapien
gccaaggtgctcataaaaggagaaa

SEQ ID NO: 1229984 - DNA, 25 bp, Homo sapien
gaaactgccaaaatggccgtctgca

SEQ ID NO: 1229985 - DNA, 25 bp, Homo sapien
ttttgaatccattaggcaaccggga

SEQ ID NO: 1229986 - DNA, 25 bp, Homo sapien
gaggtctccatatgtagacttctcg

SEQ ID NO: 1229987 - DNA, 25 bp, Homo sapien
tctgtctgtagctaccaccgttgaa

SEQ ID NO: 1229988 - DNA, 25 bp, Homo sapien
gcagcctgaactgttcgaatgaaca

SEQ ID NO: 1229989 - DNA, 25 bp, Homo sapien
aaaataatcagagggcttctgtctc

SEQ ID NO: 1229990 - DNA, 25 bp, Homo sapien
caattaccagcatagagcctgtggg

SEQ ID NO: 1229991 - DNA, 25 bp, Homo sapien
ccttagatccctttgattccttctt

SEQ ID NO: 1229992 - DNA, 25 bp, Homo sapien
tcagtgcttacaagagagcagtgcc

SEQ ID NO: 1229993 - DNA, 25 bp, Homo sapien
aaagattctccaagcgtgggcctca

SEQ ID NO: 1229994 - DNA, 25 bp, Homo sapien
agaaatacttgagccccacacgcaa

SEQ ID NO: 1229995 - DNA, 25 bp, Homo sapien
agctctgggcagtagttcatggaca

SEQ ID NO: 1229996 - DNA, 25 bp, Homo sapien
tgtgggttctgacgacagttccaca

SEQ ID NO: 1229997 - DNA, 25 bp, Homo sapien
gggtgagacagttccaactggctga

SEQ ID NO: 1229998 - DNA, 25 bp, Homo sapien
ccgcttctgggtgagacagttccaa

SEQ ID NO: 1229999 - DNA, 25 bp, Homo sapien
gacgacagttccacaagctctggct

SEQ ID NO: 1230000 - DNA, 25 bp, Homo sapien
ggcaacattcgaattcatgggaaag

SEQ ID NO: 1230001 - DNA, 25 bp, Homo sapien
cgaattcatgggaaaggctgtagaa

SEQ ID NO: 1230002 - DNA, 25 bp, Homo sapien
gctcagatgagacttgcaggaagga

SEQ ID NO: 1230003 - DNA, 25 bp, Homo sapien
gctgtgtgggattcaatgggcaaca

SEQ ID NO: 1230004 - DNA, 25 bp, Homo sapien
ttgggcgaggcagaaaacaatcttc

SEQ ID NO: 1230005 - DNA, 25 bp, Homo sapien
aagaagagaaatatcgaatggtgat

SEQ ID NO: 1230006 - DNA, 25 bp, Homo sapien
gagaaatatcgaatggtgataacag

SEQ ID NO: 1230007 - DNA, 25 bp, Homo sapien
cacattctgttgggcgaggcagaaa

SEQ ID NO: 1230008 - DNA, 25 bp, Homo sapien
tcttctggctatggtccagcatccc

SEQ ID NO: 1230009 - DNA, 25 bp, Homo sapien
tctggatctcctttctagatgctcc

SEQ ID NO: 1230010 - DNA, 25 bp, Homo sapien
gagtcatgacccaaatacacatctg

SEQ ID NO: 1230011 - DNA, 25 bp, Homo sapien
atccccaaccctctgagtggagtca

SEQ ID NO: 1230012 - DNA, 25 bp, Homo sapien
caactgctaactccaatgttaattt

SEQ ID NO: 1230013 - DNA, 25 bp, Homo sapien
gtctttccaactgctaactccaatg

SEQ ID NO: 1230014 - DNA, 25 bp, Homo sapien
caaactggaatctgggacaccagtg

SEQ ID NO: 1230015 - DNA, 25 bp, Homo sapien
cctctccaccaaactggaatctggg

SEQ ID NO: 1230016 - DNA, 25 bp, Homo sapien
tgcttaaatcgagggtcatgagtca

SEQ ID NO: 1230017 - DNA, 25 bp, Homo sapien
tcttccagatgcttaaatcgagggt

SEQ ID NO: 1230018 - DNA, 25 bp, Homo sapien
cagagtttctccgaaaataaaactg

SEQ ID NO: 1230019 - DNA, 25 bp, Homo sapien
tttactaaaggtgacacagagtttc

SEQ ID NO: 1230020 - DNA, 25 bp, Homo sapien
gctgagagtgttggtgcattacaat

SEQ ID NO: 1230021 - DNA, 25 bp, Homo sapien
tacaatgagtcatccccattctctt

SEQ ID NO: 1230022 - DNA, 25 bp, Homo sapien
attttggagagcatctgctgagagt

SEQ ID NO: 1230023 - DNA, 25 bp, Homo sapien
gagagtgttggtgcattacaatgag

SEQ ID NO: 1230024 - DNA, 25 bp, Homo sapien
actcccctggaatttgagcaaggtc

SEQ ID NO: 1230025 - DNA, 25 bp, Homo sapien
ctcccctggaatttgagcaaggtcc

SEQ ID NO: 1230026 - DNA, 25 bp, Homo sapien
ccctggaatttgagcaaggtccaca

SEQ ID NO: 1230027 - DNA, 25 bp, Homo sapien
tcccctggaatttgagcaaggtcca

SEQ ID NO: 1230028 - DNA, 25 bp, Homo sapien
atgtggccaaagagatactatgaaa

SEQ ID NO: 1230029 - DNA, 25 bp, Homo sapien
gtggccaaagagatactatgaaatg

SEQ ID NO: 1230030 - DNA, 25 bp, Homo sapien
tgtggccaaagagatactatgaaat

SEQ ID NO: 1230031 - DNA, 25 bp, Homo sapien
ggaatacagtttcagcgttcttcta

SEQ ID NO: 1230032 - DNA, 25 bp, Homo sapien
gcatttctgacaactacactgagtc

SEQ ID NO: 1230033 - DNA, 25 bp, Homo sapien
tcagcgttcttctacactttccatt

SEQ ID NO: 1230034 - DNA, 25 bp, Homo sapien
tacactgagtctgttggaatacagt

SEQ ID NO: 1230035 - DNA, 25 bp, Homo sapien
aaagatgtgacagccctttacctga

SEQ ID NO: 1230036 - DNA, 25 bp, Homo sapien
atcattccatctcccagtcaacatg

SEQ ID NO: 1230037 - DNA, 25 bp, Homo sapien
ttctctggaaagatgtgacagccct

SEQ ID NO: 1230038 - DNA, 25 bp, Homo sapien
cctcacattcctgagagatagaaag

SEQ ID NO: 1230039 - DNA, 25 bp, Homo sapien
tcatcatccatggacatcgggctag

SEQ ID NO: 1230040 - DNA, 25 bp, Homo sapien
tcgtcatcatccatggacatcgggc

SEQ ID NO: 1230041 - DNA, 25 bp, Homo sapien
atccatggacatcgggctaggaaga

SEQ ID NO: 1230042 - DNA, 25 bp, Homo sapien
gccatcgtcatcatccatggacatc

SEQ ID NO: 1230043 - DNA, 25 bp, Homo sapien
tctgggtcgcaaaatctggatggca

SEQ ID NO: 1230044 - DNA, 25 bp, Homo sapien
taagaatacacactccagtctagga

SEQ ID NO: 1230045 - DNA, 25 bp, Homo sapien
gaaggccttccatggactggtcaga

SEQ ID NO: 1230046 - DNA, 25 bp, Homo sapien
cacaaatgttggtcctggttgagac

SEQ ID NO: 1230047 - DNA, 25 bp, Homo sapien
tcacacttgtgaaagctggcattct

SEQ ID NO: 1230048 - DNA, 25 bp, Homo sapien
tgcatgtgcctctctttcatagcag

SEQ ID NO: 1230049 - DNA, 25 bp, Homo sapien
atgtgcctctctttcatagcagtcc

SEQ ID NO: 1230050 - DNA, 25 bp, Homo sapien
ctatgcatgtgcctctctttcatag

SEQ ID NO: 1230051 - DNA, 25 bp, Homo sapien
gcatgtgcctctctttcatagcagt

SEQ ID NO: 1230052 - DNA, 25 bp, Homo sapien
tcggctgcccttcctgtaagaacct

SEQ ID NO: 1230053 - DNA, 25 bp, Homo sapien
tccacggtcattggccactgtgctt

SEQ ID NO: 1230054 - DNA, 25 bp, Homo sapien
taatcattgatgttctcggctgccc

SEQ ID NO: 1230055 - DNA, 25 bp, Homo sapien
tcctgggagacttctccacggtcat

SEQ ID NO: 1230056 - DNA, 25 bp, Homo sapien
gaaaggacaaatgctcacaatccca

SEQ ID NO: 1230057 - DNA, 25 bp, Homo sapien
taatattgaagggacacttggaggt

SEQ ID NO: 1230058 - DNA, 25 bp, Homo sapien
cactttgttgcctgagttgcctaga

SEQ ID NO: 1230059 - DNA, 25 bp, Homo sapien
tgttgtgcaacccagcaaaaggctg

SEQ ID NO: 1230060 - DNA, 25 bp, Homo sapien
tatagtcccctagacctgtcgcgct

SEQ ID NO: 1230061 - DNA, 25 bp, Homo sapien
acctgtcgcgctcctcaaggccatg

SEQ ID NO: 1230062 - DNA, 25 bp, Homo sapien
ctgaactccctatagtcccctagac

SEQ ID NO: 1230063 - DNA, 25 bp, Homo sapien
aactccctatagtcccctagacctg

SEQ ID NO: 1230064 - DNA, 25 bp, Homo sapien
gagtcatggtggcttatggcaaacg

SEQ ID NO: 1230065 - DNA, 25 bp, Homo sapien
tctttttagtagtggcaggcggagc

SEQ ID NO: 1230066 - DNA, 25 bp, Homo sapien
tagagcttcaagaaaggactcggct

SEQ ID NO: 1230067 - DNA, 25 bp, Homo sapien
caggaagcagtatcagtcacagaac

SEQ ID NO: 1230068 - DNA, 25 bp, Homo sapien
tcttgtccctttttcacccagtatc

SEQ ID NO: 1230069 - DNA, 25 bp, Homo sapien
cacttcttgtccctttttcacccag

SEQ ID NO: 1230070 - DNA, 25 bp, Homo sapien
ttgtccctttttcacccagtatcat

SEQ ID NO: 1230071 - DNA, 25 bp, Homo sapien
tcacttcttgtccctttttcaccca

SEQ ID NO: 1230072 - DNA, 25 bp, Homo sapien
gtggattctgctgtcttcttatcat

SEQ ID NO: 1230073 - DNA, 25 bp, Homo sapien
atgaatcttgcccatagcgtgaagt

SEQ ID NO: 1230074 - DNA, 25 bp, Homo sapien
atcttgcccatagcgtgaagtggga

SEQ ID NO: 1230075 - DNA, 25 bp, Homo sapien
tgcccatagcgtgaagtgggaaatt

SEQ ID NO: 1230076 - DNA, 25 bp, Homo sapien
gaatcttgcccatagcgtgaagtgg

SEQ ID NO: 1230077 - DNA, 25 bp, Homo sapien
ttggagcacaggtgaccaaagagtt

SEQ ID NO: 1230078 - DNA, 25 bp, Homo sapien
gaggccatgtgagacttggagcaca

SEQ ID NO: 1230079 - DNA, 25 bp, Homo sapien
gccatgtgagacttggagcacaggt

SEQ ID NO: 1230080 - DNA, 25 bp, Homo sapien
cttggagcacaggtgaccaaagagt

SEQ ID NO: 1230081 - DNA, 25 bp, Homo sapien
cgtgttgggtggtgtttgtctggag

SEQ ID NO: 1230082 - DNA, 25 bp, Homo sapien
aaatgatatacatgaggcgtgttgg

SEQ ID NO: 1230083 - DNA, 25 bp, Homo sapien
atgatatacatgaggcgtgttgggt

SEQ ID NO: 1230084 - DNA, 25 bp, Homo sapien
ccatatttctgtagcttaaaatgat

SEQ ID NO: 1230085 - DNA, 25 bp, Homo sapien
gatctccctgtattggctggaaagc

SEQ ID NO: 1230086 - DNA, 25 bp, Homo sapien
tctgaatgcagtgtgtggccttaca

SEQ ID NO: 1230087 - DNA, 25 bp, Homo sapien
taagggtaacgtcagtccaacactg

SEQ ID NO: 1230088 - DNA, 25 bp, Homo sapien
gctggaaagcatgccactggatgac

SEQ ID NO: 1230089 - DNA, 25 bp, Homo sapien
tccactgagtgagccgtttagatca

SEQ ID NO: 1230090 - DNA, 25 bp, Homo sapien
gaattatggccgatgaaaaagacat

SEQ ID NO: 1230091 - DNA, 25 bp, Homo sapien
tcaacacttgtaacatcactgagga

SEQ ID NO: 1230092 - DNA, 25 bp, Homo sapien
gacataagtagatggctctccactg

SEQ ID NO: 1230093 - DNA, 25 bp, Homo sapien
gaatgttgtatagaggaaacggcat

SEQ ID NO: 1230094 - DNA, 25 bp, Homo sapien
acactccctctcaattagctttgga

SEQ ID NO: 1230095 - DNA, 25 bp, Homo sapien
cccattagctgaattccttcacagg

SEQ ID NO: 1230096 - DNA, 25 bp, Homo sapien
ccctctcaattagctttggaatgtt

SEQ ID NO: 1230097 - DNA, 25 bp, Homo sapien
tataatgctcctcagaaaactctga

SEQ ID NO: 1230098 - DNA, 25 bp, Homo sapien
tgctgaagatgcgtaaaccatctgt

SEQ ID NO: 1230099 - DNA, 25 bp, Homo sapien
ccacactgagattatataatgctcc

SEQ ID NO: 1230100 - DNA, 25 bp, Homo sapien
gaactcgatacgcaagctccatctg

SEQ ID NO: 1230101 - DNA, 25 bp, Homo sapien
cttcggattggtgttctattgtttc

SEQ ID NO: 1230102 - DNA, 25 bp, Homo sapien
gaaacttcggattggtgttctattg

SEQ ID NO: 1230103 - DNA, 25 bp, Homo sapien
cggattggtgttctattgtttctgt

SEQ ID NO: 1230104 - DNA, 25 bp, Homo sapien
taagaaacttcggattggtgttcta

SEQ ID NO: 1230105 - DNA, 25 bp, Homo sapien
ctactgttcccgcaaagatatctta

SEQ ID NO: 1230106 - DNA, 25 bp, Homo sapien
tactgttcccgcaaagatatcttaa

SEQ ID NO: 1230107 - DNA, 25 bp, Homo sapien
tgcacaaagtgagcacaactgttcc

SEQ ID NO: 1230108 - DNA, 25 bp, Homo sapien
tgcccagcgaaagccccgtggacag

SEQ ID NO: 1230109 - DNA, 25 bp, Homo sapien
gccccataagcccactcaagcctca

SEQ ID NO: 1230110 - DNA, 25 bp, Homo sapien
gcgaaagccccgtggacaggtagga

SEQ ID NO: 1230111 - DNA, 25 bp, Homo sapien
ccagaggccccataagcccactcaa

SEQ ID NO: 1230112 - DNA, 25 bp, Homo sapien
gcttcgcgtatgtggctgcaacaat

SEQ ID NO: 1230113 - DNA, 25 bp, Homo sapien
cttgaaagtcaatttgtcagtctgc

SEQ ID NO: 1230114 - DNA, 25 bp, Homo sapien
ctccccatgggcttcgcgtatgtgg

SEQ ID NO: 1230115 - DNA, 25 bp, Homo sapien
aatttgtcagtctgctccgtgtgtc

SEQ ID NO: 1230116 - DNA, 25 bp, Homo sapien
cacccttaggccttttgtattgaag

SEQ ID NO: 1230117 - DNA, 25 bp, Homo sapien
cctaaagaatttggcctcagaaaca

SEQ ID NO: 1230118 - DNA, 25 bp, Homo sapien
aatagtcataatgtttccctaaaga

SEQ ID NO: 1230119 - DNA, 25 bp, Homo sapien
gctatatgtttgcttaaggaagtga

SEQ ID NO: 1230120 - DNA, 25 bp, Homo sapien
gctctccgcgcatataatataacgc

SEQ ID NO: 1230121 - DNA, 25 bp, Homo sapien
gcaagctgtgaacacaaagatactt

SEQ ID NO: 1230122 - DNA, 25 bp, Homo sapien
tgatatatagaacagaggatcgtcc

SEQ ID NO: 1230123 - DNA, 25 bp, Homo sapien
tataacgccatgtgcatgtgcggtg

SEQ ID NO: 1230124 - DNA, 25 bp, Homo sapien
gtaggcctaaggctaaattctcagc

SEQ ID NO: 1230125 - DNA, 25 bp, Homo sapien
tcagctgaccctaattcaagcaggt

SEQ ID NO: 1230126 - DNA, 25 bp, Homo sapien
ccttctgtaggcctaaggctaaatt

SEQ ID NO: 1230127 - DNA, 25 bp, Homo sapien
ggtgattctacactatgggcactca

SEQ ID NO: 1230128 - DNA, 25 bp, Homo sapien
tacttttggccgtaacatccaagga

SEQ ID NO: 1230129 - DNA, 25 bp, Homo sapien
gaatggagtcaatcctgggtccaaa

SEQ ID NO: 1230130 - DNA, 25 bp, Homo sapien
ccaaagacctgtctttggagtactt

SEQ ID NO: 1230131 - DNA, 25 bp, Homo sapien
gagacaactatcaatcccaggtgga

SEQ ID NO: 1230132 - DNA, 25 bp, Homo sapien
tgaaagcaccctgaatctgagatct

SEQ ID NO: 1230133 - DNA, 25 bp, Homo sapien
tctgagatctggttcaaaggctttc

SEQ ID NO: 1230134 - DNA, 25 bp, Homo sapien
gatctggttcaaaggctttctccat

SEQ ID NO: 1230135 - DNA, 25 bp, Homo sapien
tctctttgctccatgaaagcaccct

SEQ ID NO: 1230136 - DNA, 25 bp, Homo sapien
tcagaacaagaaaggcataacttgc

SEQ ID NO: 1230137 - DNA, 25 bp, Homo sapien
tctggacctgctccattattgtaca

SEQ ID NO: 1230138 - DNA, 25 bp, Homo sapien
gcatacgcaagtagttcagaacaag

SEQ ID NO: 1230139 - DNA, 25 bp, Homo sapien
aacttgcattaggatctgtgttccc

SEQ ID NO: 1230140 - DNA, 25 bp, Homo sapien
gctgagcagcaagctaatgtgtccc

SEQ ID NO: 1230141 - DNA, 25 bp, Homo sapien
gaggcactcaatgatgcttgtcaaa

SEQ ID NO: 1230142 - DNA, 25 bp, Homo sapien
gatgcatgagcacgtagaggcactc

SEQ ID NO: 1230143 - DNA, 25 bp, Homo sapien
taattggaagtcacatctggaccct

SEQ ID NO: 1230144 - DNA, 25 bp, Homo sapien
ttagtgagcaccacattactaaatc

SEQ ID NO: 1230145 - DNA, 25 bp, Homo sapien
gtttgtatctccattaatccttttg

SEQ ID NO: 1230146 - DNA, 25 bp, Homo sapien
attactaaatctaaccatcaattcc

SEQ ID NO: 1230147 - DNA, 25 bp, Homo sapien
cttgtttgtatctccattaatcctt

SEQ ID NO: 1230148 - DNA, 25 bp, Homo sapien
gtctccatcagccccacagaggtcc

SEQ ID NO: 1230149 - DNA, 25 bp, Homo sapien
tccagtctccatcagccccacagag

SEQ ID NO: 1230150 - DNA, 25 bp, Homo sapien
ctccatcagccccacagaggtcccc

SEQ ID NO: 1230151 - DNA, 25 bp, Homo sapien
cagtctccatcagccccacagaggt

SEQ ID NO: 1230152 - DNA, 25 bp, Homo sapien
gcgccacatgttctgcactgatgga

SEQ ID NO: 1230153 - DNA, 25 bp, Homo sapien
caaggctgctgtacagagaatgttc

SEQ ID NO: 1230154 - DNA, 25 bp, Homo sapien
cactgatggatggtggcttataaag

SEQ ID NO: 1230155 - DNA, 25 bp, Homo sapien
gcattgcacgctctgctaacaccag

SEQ ID NO: 1230156 - DNA, 25 bp, Homo sapien
agcattgtggcaattgttcttattc

SEQ ID NO: 1230157 - DNA, 25 bp, Homo sapien
tattctctccagtatcgtgttgtct

SEQ ID NO: 1230158 - DNA, 25 bp, Homo sapien
ccagtatcgtgttgtctctggtgct

SEQ ID NO: 1230159 - DNA, 25 bp, Homo sapien
ctgaaagcattgtggcaattgttct

SEQ ID NO: 1230160 - DNA, 25 bp, Homo sapien
ctgtcccctgtgctacaaaccagat

SEQ ID NO: 1230161 - DNA, 25 bp, Homo sapien
tgtgctacaaaccagattgggaggg

SEQ ID NO: 1230162 - DNA, 25 bp, Homo sapien
tcccctgtgctacaaaccagattgg

SEQ ID NO: 1230163 - DNA, 25 bp, Homo sapien
cctgtgctacaaaccagattgggag

SEQ ID NO: 1230164 - DNA, 25 bp, Homo sapien
cctgtcctagctcgtctgtgttcat

SEQ ID NO: 1230165 - DNA, 25 bp, Homo sapien
ccctgtcctagctcgtctgtgttca

SEQ ID NO: 1230166 - DNA, 25 bp, Homo sapien
accctgtcctagctcgtctgtgttc

SEQ ID NO: 1230167 - DNA, 25 bp, Homo sapien
gggatctagagcatgagacttcttt

SEQ ID NO: 1230168 - DNA, 25 bp, Homo sapien
tactcatgccacgtgtattcccttt

SEQ ID NO: 1230169 - DNA, 25 bp, Homo sapien
tgtctccatatttgaagtgtctttt

SEQ ID NO: 1230170 - DNA, 25 bp, Homo sapien
catacaacatgggagaataagcata

SEQ ID NO: 1230171 - DNA, 25 bp, Homo sapien
gattccaaactaactccatcatcga

SEQ ID NO: 1230172 - DNA, 25 bp, Homo sapien
gtagattccaaactaactccatcat

SEQ ID NO: 1230173 - DNA, 25 bp, Homo sapien
ctccctcttttaatgccactaccat

SEQ ID NO: 1230174 - DNA, 25 bp, Homo sapien
ctagtagattccaaactaactccat

SEQ ID NO: 1230175 - DNA, 25 bp, Homo sapien
cattggtctacctgtctcctttggt

SEQ ID NO: 1230176 - DNA, 25 bp, Homo sapien
tactacagccttatagtatggcttg

SEQ ID NO: 1230177 - DNA, 25 bp, Homo sapien
gattcttcaaattcgtgagtatgga

SEQ ID NO: 1230178 - DNA, 25 bp, Homo sapien
gctggttagtgtaaataggattgca

SEQ ID NO: 1230179 - DNA, 25 bp, Homo sapien
taaaggttcatcagtgggcctatca

SEQ ID NO: 1230180 - DNA, 25 bp, Homo sapien
tgttctctgtttgtagtcctgcaat

SEQ ID NO: 1230181 - DNA, 25 bp, Homo sapien
ctctgtttgtagtcctgcaatcata

SEQ ID NO: 1230182 - DNA, 25 bp, Homo sapien
tcagtgggcctatcagtatggtaga

SEQ ID NO: 1230183 - DNA, 25 bp, Homo sapien
gctatgtgcatgtggatcagttgca

SEQ ID NO: 1230184 - DNA, 25 bp, Homo sapien
gcatgtggatcagttgcagaagcac

SEQ ID NO: 1230185 - DNA, 25 bp, Homo sapien
agaagcactcgtcaggagctcagaa

SEQ ID NO: 1230186 - DNA, 25 bp, Homo sapien
tcagttgcagaagcactcgtcagga

SEQ ID NO: 1230187 - DNA, 25 bp, Homo sapien
tattttctacatgcacatagggcac

SEQ ID NO: 1230188 - DNA, 25 bp, Homo sapien
gcttattttctacatgcacataggg

SEQ ID NO: 1230189 - DNA, 25 bp, Homo sapien
cttattttctacatgcacatagggc

SEQ ID NO: 1230190 - DNA, 25 bp, Homo sapien
ttattttctacatgcacatagggca

SEQ ID NO: 1230191 - DNA, 25 bp, Homo sapien
tagcaccctacccatttgatctctg

SEQ ID NO: 1230192 - DNA, 25 bp, Homo sapien
tgccacactccaaatattgcagctc

SEQ ID NO: 1230193 - DNA, 25 bp, Homo sapien
caatccctgtagcaccctacccatt

SEQ ID NO: 1230194 - DNA, 25 bp, Homo sapien
ctgccacactccaaatattgcagct

SEQ ID NO: 1230195 - DNA, 25 bp, Homo sapien
ctcagcatctgagccaagtgcatct

SEQ ID NO: 1230196 - DNA, 25 bp, Homo sapien
tcctctaactcctgcaagatagcca

SEQ ID NO: 1230197 - DNA, 25 bp, Homo sapien
gtctgggatctgacttcagacactc

SEQ ID NO: 1230198 - DNA, 25 bp, Homo sapien
gatctgacttcagacactcagcatc

SEQ ID NO: 1230199 - DNA, 25 bp, Homo sapien
aaaggagggaaccaatataagtatg

SEQ ID NO: 1230200 - DNA, 25 bp, Homo sapien
taagtatgaaggcagctgtgtggta

SEQ ID NO: 1230201 - DNA, 25 bp, Homo sapien
aaggagggaaccaatataagtatga

SEQ ID NO: 1230202 - DNA, 25 bp, Homo sapien
atataagtatgaaggcagctgtgtg

SEQ ID NO: 1230203 - DNA, 25 bp, Homo sapien
gatgaagcatctgtaggctttgaag

SEQ ID NO: 1230204 - DNA, 25 bp, Homo sapien
gcctgtccaaattacattagcatga

SEQ ID NO: 1230205 - DNA, 25 bp, Homo sapien
ggctttgaagtcatgcctgtccaaa

SEQ ID NO: 1230206 - DNA, 25 bp, Homo sapien
tagaatggtaagtactacttctcct

SEQ ID NO: 1230207 - DNA, 25 bp, Homo sapien
gaataccatacactctctccatgac

SEQ ID NO: 1230208 - DNA, 25 bp, Homo sapien
tccttctagaataccatacactctc

SEQ ID NO: 1230209 - DNA, 25 bp, Homo sapien
catttccttctagaataccatacac

SEQ ID NO: 1230210 - DNA, 25 bp, Homo sapien
tcttcatttccttctagaataccat

SEQ ID NO: 1230211 - DNA, 25 bp, Homo sapien
ttgtggttcatttaagtcaccactc

SEQ ID NO: 1230212 - DNA, 25 bp, Homo sapien
tgtggttcatttaagtcaccactca

SEQ ID NO: 1230213 - DNA, 25 bp, Homo sapien
cttaatttctccaacttgggtggat

SEQ ID NO: 1230214 - DNA, 25 bp, Homo sapien
aatttctccaacttgggtggatgtg

SEQ ID NO: 1230215 - DNA, 25 bp, Homo sapien
gtttcagtgatacattgtgctgcca

SEQ ID NO: 1230216 - DNA, 25 bp, Homo sapien
caattcatcacaagacttggaagtt

SEQ ID NO: 1230217 - DNA, 25 bp, Homo sapien
aatgacaagtctatctcagagcctg

SEQ ID NO: 1230218 - DNA, 25 bp, Homo sapien
tgtaagtgcacaaggaagtgagaca

SEQ ID NO: 1230219 - DNA, 25 bp, Homo sapien
gctagcaaagccgtgtgtaagtgca

SEQ ID NO: 1230220 - DNA, 25 bp, Homo sapien
gacaggtcaccctgggttctgcctt

SEQ ID NO: 1230221 - DNA, 25 bp, Homo sapien
ggcattaggaacattgctactacca

SEQ ID NO: 1230222 - DNA, 25 bp, Homo sapien
agccgtctgtaagtccctcacactc

SEQ ID NO: 1230223 - DNA, 25 bp, Homo sapien
ggtgcctcttgaatgctcacactcc

SEQ ID NO: 1230224 - DNA, 25 bp, Homo sapien
ctagataattgcaaatggtgcctct

SEQ ID NO: 1230225 - DNA, 25 bp, Homo sapien
tccctgccagcaaagccgtctgtaa

SEQ ID NO: 1230226 - DNA, 25 bp, Homo sapien
caaccattctccgagcatgatactt

SEQ ID NO: 1230227 - DNA, 25 bp, Homo sapien
cattctccgagcatgatacttatcc

SEQ ID NO: 1230228 - DNA, 25 bp, Homo sapien
gaacatccaaccattctccgagcat

SEQ ID NO: 1230229 - DNA, 25 bp, Homo sapien
tgcagaacatccaaccattctccga

SEQ ID NO: 1230230 - DNA, 25 bp, Homo sapien
tctgcagcacttctcttctttccca

SEQ ID NO: 1230231 - DNA, 25 bp, Homo sapien
tcaaacatttctgcagcacttctct

SEQ ID NO: 1230232 - DNA, 25 bp, Homo sapien
aacatttctgcagcacttctcttct

SEQ ID NO: 1230233 - DNA, 25 bp, Homo sapien
ctgcagcacttctcttctttcccac

SEQ ID NO: 1230234 - DNA, 25 bp, Homo sapien
aataatttctttagggccattctgt

SEQ ID NO: 1230235 - DNA, 25 bp, Homo sapien
ataatttctttagggccattctgtt

SEQ ID NO: 1230236 - DNA, 25 bp, Homo sapien
tctgctttgcctatggtgcagctat

SEQ ID NO: 1230237 - DNA, 25 bp, Homo sapien
agcttctgctttgcctatggtgcag

SEQ ID NO: 1230238 - DNA, 25 bp, Homo sapien
atatctagtctctggtcagcttctg

SEQ ID NO: 1230239 - DNA, 25 bp, Homo sapien
aagaaatatctagtctctggtcagc

SEQ ID NO: 1230240 - DNA, 25 bp, Homo sapien
tacactggtgattatggccatgcag

SEQ ID NO: 1230241 - DNA, 25 bp, Homo sapien
gcttctgtgattacaaggtcttcac

SEQ ID NO: 1230242 - DNA, 25 bp, Homo sapien
cgtccatcagctgatcaaggtcatc

SEQ ID NO: 1230243 - DNA, 25 bp, Homo sapien
agaccctctgctaccagaaggcctt

SEQ ID NO: 1230244 - DNA, 25 bp, Homo sapien
gtgccatttccagtatctgagccat

SEQ ID NO: 1230245 - DNA, 25 bp, Homo sapien
gagaatagagtgaaccaagccagtg

SEQ ID NO: 1230246 - DNA, 25 bp, Homo sapien
agaatagagtgaaccaagccagtgc

SEQ ID NO: 1230247 - DNA, 25 bp, Homo sapien
cagtgccatttccagtatctgagcc

SEQ ID NO: 1230248 - DNA, 25 bp, Homo sapien
taagggaggacactatatctgtcta

SEQ ID NO: 1230249 - DNA, 25 bp, Homo sapien
ttgctgagaaagacagtaatcggcc

SEQ ID NO: 1230250 - DNA, 25 bp, Homo sapien
tgcgtggcacgcgatgtctgagcac

SEQ ID NO: 1230251 - DNA, 25 bp, Homo sapien
tgacgctagtccgtctcttccacgg

SEQ ID NO: 1230252 - DNA, 25 bp, Homo sapien
taagcagctttagtcatcagaaatc

SEQ ID NO: 1230253 - DNA, 25 bp, Homo sapien
agcagctttagtcatcagaaatctc

SEQ ID NO: 1230254 - DNA, 25 bp, Homo sapien
ttaagcagctttagtcatcagaaat

SEQ ID NO: 1230255 - DNA, 25 bp, Homo sapien
aagcagctttagtcatcagaaatct

SEQ ID NO: 1230256 - DNA, 25 bp, Homo sapien
attttactggggctcatagaatgag

SEQ ID NO: 1230257 - DNA, 25 bp, Homo sapien
aggatcagggtgtcaaatacctgca

SEQ ID NO: 1230258 - DNA, 25 bp, Homo sapien
gtgtcaaatacctgcatagatgcca

SEQ ID NO: 1230259 - DNA, 25 bp, Homo sapien
aggattatagaggatcagggtgtca

SEQ ID NO: 1230260 - DNA, 25 bp, Homo sapien
cccatccaacaagctctctgcaaag

SEQ ID NO: 1230261 - DNA, 25 bp, Homo sapien
ctttaacagttatcattactccata

SEQ ID NO: 1230262 - DNA, 25 bp, Homo sapien
tactgcgcactctcaaatgcagagc

SEQ ID NO: 1230263 - DNA, 25 bp, Homo sapien
ttgatgcagcttcacccttggctga

SEQ ID NO: 1230264 - DNA, 25 bp, Homo sapien
agaaattcaggccattgtaagggag

SEQ ID NO: 1230265 - DNA, 25 bp, Homo sapien
tcggctggtggccagtacagtggat

SEQ ID NO: 1230266 - DNA, 25 bp, Homo sapien
cagtacagtggatcagaagaaaagg

SEQ ID NO: 1230267 - DNA, 25 bp, Homo sapien
aattcaggccattgtaagggagagg

SEQ ID NO: 1230268 - DNA, 25 bp, Homo sapien
taatggaataagcatagctggagca

SEQ ID NO: 1230269 - DNA, 25 bp, Homo sapien
ttggcagcaaataatggaataagca

SEQ ID NO: 1230270 - DNA, 25 bp, Homo sapien
tccgaggttcatggggactcccgga

SEQ ID NO: 1230271 - DNA, 25 bp, Homo sapien
catagctggagcaagaacggaactg

SEQ ID NO: 1230272 - DNA, 25 bp, Homo sapien
tttgtatgtctgacagtgcggagac

SEQ ID NO: 1230273 - DNA, 25 bp, Homo sapien
tgtatgtctgacagtgcggagacat

SEQ ID NO: 1230274 - DNA, 25 bp, Homo sapien
caaggctatcagtaatttgtatgtc

SEQ ID NO: 1230275 - DNA, 25 bp, Homo sapien
tcaatccttccaacaaggctatcag

SEQ ID NO: 1230276 - DNA, 25 bp, Homo sapien
cagactagtccaaagggatgcccac

SEQ ID NO: 1230277 - DNA, 25 bp, Homo sapien
gtgtggtcgatttcctcagcatcag

SEQ ID NO: 1230278 - DNA, 25 bp, Homo sapien
ttccagaagctgttcgtgtggtcga

SEQ ID NO: 1230279 - DNA, 25 bp, Homo sapien
tcagcatcaggaatccagactagtc

SEQ ID NO: 1230280 - DNA, 25 bp, Homo sapien
accctcttggcacaccccagatggc

SEQ ID NO: 1230281 - DNA, 25 bp, Homo sapien
tgggctctggaaacatgctcactcg

SEQ ID NO: 1230282 - DNA, 25 bp, Homo sapien
ggctctggaaacatgctcactcggc

SEQ ID NO: 1230283 - DNA, 25 bp, Homo sapien
ctctggaaacatgctcactcggcat

SEQ ID NO: 1230284 - DNA, 25 bp, Homo sapien
tgtctccaggatagtgcactgtcca

SEQ ID NO: 1230285 - DNA, 25 bp, Homo sapien
tgctgcccatactagtccacttgag

SEQ ID NO: 1230286 - DNA, 25 bp, Homo sapien
gctaagtggatgcaaaatcgcctgt

SEQ ID NO: 1230287 - DNA, 25 bp, Homo sapien
tagagatgccatcgtctgtgagctt

SEQ ID NO: 1230288 - DNA, 25 bp, Homo sapien
gtgtttctgttgattgtgtaaaaat

SEQ ID NO: 1230289 - DNA, 25 bp, Homo sapien
cctttcttaagctctggtaacttgc

SEQ ID NO: 1230290 - DNA, 25 bp, Homo sapien
gttcaagcctttcttaagctctggt

SEQ ID NO: 1230291 - DNA, 25 bp, Homo sapien
ctggtaacttgcatatacaacaaag

SEQ ID NO: 1230292 - DNA, 25 bp, Homo sapien
gacattgaatcaccaaggcctggga

SEQ ID NO: 1230293 - DNA, 25 bp, Homo sapien
tagtctgtgcaggttcatagaccga

SEQ ID NO: 1230294 - DNA, 25 bp, Homo sapien
taagtggtctaagaatccttcaggc

SEQ ID NO: 1230295 - DNA, 25 bp, Homo sapien
caaagagaagatcagggcagcttaa

SEQ ID NO: 1230296 - DNA, 25 bp, Homo sapien
cctgttttgtatacagggaaactga

SEQ ID NO: 1230297 - DNA, 25 bp, Homo sapien
tgtgctggacattgttttaaggtac

SEQ ID NO: 1230298 - DNA, 25 bp, Homo sapien
ccctgttttgtatacagggaaactg

SEQ ID NO: 1230299 - DNA, 25 bp, Homo sapien
taggaaagctaggaccaacaaagtg

SEQ ID NO: 1230300 - DNA, 25 bp, Homo sapien
ctttaaaactgctcggataccttgg

SEQ ID NO: 1230301 - DNA, 25 bp, Homo sapien
gcagtcgccaaaacagcaacaggag

SEQ ID NO: 1230302 - DNA, 25 bp, Homo sapien
tatgttcgcactaataactgcaggc

SEQ ID NO: 1230303 - DNA, 25 bp, Homo sapien
taaaggtactactcccatcacagga

SEQ ID NO: 1230304 - DNA, 25 bp, Homo sapien
caaatgccgtagactggatagctta

SEQ ID NO: 1230305 - DNA, 25 bp, Homo sapien
tctaaaagtaagctacactgggaat

SEQ ID NO: 1230306 - DNA, 25 bp, Homo sapien
caagtggcactatattcatttgggc

SEQ ID NO: 1230307 - DNA, 25 bp, Homo sapien
cagagctagaacccagtatcttttt

SEQ ID NO: 1230308 - DNA, 25 bp, Homo sapien
gcttcaggggaaatggtcgaaagtc

SEQ ID NO: 1230309 - DNA, 25 bp, Homo sapien
tgtgcaaagttagacatggcttcag

SEQ ID NO: 1230310 - DNA, 25 bp, Homo sapien
gtctgatggtgccagatacgggatg

SEQ ID NO: 1230311 - DNA, 25 bp, Homo sapien
agtgttctctgccactcattgactg

SEQ ID NO: 1230312 - DNA, 25 bp, Homo sapien
aattcatcagaaccaactgaagagg

SEQ ID NO: 1230313 - DNA, 25 bp, Homo sapien
cattgactgtggaagtctcagtccc

SEQ ID NO: 1230314 - DNA, 25 bp, Homo sapien
cagataactatgaggcagtgttctc

SEQ ID NO: 1230315 - DNA, 25 bp, Homo sapien
cagaatggaccaccatcaggcatct

SEQ ID NO: 1230316 - DNA, 25 bp, Homo sapien
cattttcgagttggtgagacaccgc

SEQ ID NO: 1230317 - DNA, 25 bp, Homo sapien
actgcgaggcctcgtcattttcgag

SEQ ID NO: 1230318 - DNA, 25 bp, Homo sapien
gctctggtggtagaggttagattat

SEQ ID NO: 1230319 - DNA, 25 bp, Homo sapien
ggcagtcgacttggaagatgctctg

SEQ ID NO: 1230320 - DNA, 25 bp, Homo sapien
tgagtttgaacacattgcatattta

SEQ ID NO: 1230321 - DNA, 25 bp, Homo sapien
agtttgaacacattgcatatttaaa

SEQ ID NO: 1230322 - DNA, 25 bp, Homo sapien
gtttgaacacattgcatatttaaat

SEQ ID NO: 1230323 - DNA, 25 bp, Homo sapien
gagtttgaacacattgcatatttaa

SEQ ID NO: 1230324 - DNA, 25 bp, Homo sapien
tggtagtgagagatagtcgtcttct

SEQ ID NO: 1230325 - DNA, 25 bp, Homo sapien
tcattcggcatcttttacctggtgg

SEQ ID NO: 1230326 - DNA, 25 bp, Homo sapien
tctgggtcacatctccaaccagtct

SEQ ID NO: 1230327 - DNA, 25 bp, Homo sapien
tgtgttctgagccaaggtacgcagt

SEQ ID NO: 1230328 - DNA, 25 bp, Homo sapien
ctgacaacggttggcatcatggctc

SEQ ID NO: 1230329 - DNA, 25 bp, Homo sapien
gacaacggttggcatcatggctcct

SEQ ID NO: 1230330 - DNA, 25 bp, Homo sapien
ctcccaagatggagtaatgggtcac

SEQ ID NO: 1230331 - DNA, 25 bp, Homo sapien
gagtaatgggtcacttgccccagta

SEQ ID NO: 1230332 - DNA, 25 bp, Homo sapien
tacaacaagagtcacatccaaggag

SEQ ID NO: 1230333 - DNA, 25 bp, Homo sapien
tgccgataagatcagccggcggaga

SEQ ID NO: 1230334 - DNA, 25 bp, Homo sapien
catccaaggagctgtccacattaac

SEQ ID NO: 1230335 - DNA, 25 bp, Homo sapien
cgagtcagggccctgtcatcattga

SEQ ID NO: 1230336 - DNA, 25 bp, Homo sapien
caaacccaagccattgccgctggca

SEQ ID NO: 1230337 - DNA, 25 bp, Homo sapien
cccaagccattgccgctggcaccac

SEQ ID NO: 1230338 - DNA, 25 bp, Homo sapien
aaacccaagccattgccgctggcac

SEQ ID NO: 1230339 - DNA, 25 bp, Homo sapien
aacccaagccattgccgctggcacc

SEQ ID NO: 1230340 - DNA, 25 bp, Homo sapien
gacgtatatgccctcatccagcggc

SEQ ID NO: 1230341 - DNA, 25 bp, Homo sapien
aaggctgcgaatctgacgtatatgc

SEQ ID NO: 1230342 - DNA, 25 bp, Homo sapien
accaccgttgtgtccctcaaggctg

SEQ ID NO: 1230343 - DNA, 25 bp, Homo sapien
tctgcccgctcgctgaattgtggat

SEQ ID NO: 1230344 - DNA, 25 bp, Homo sapien
gcaagcatgcaagggtggacaaatg

SEQ ID NO: 1230345 - DNA, 25 bp, Homo sapien
tacccctttgcctttgcagcgagtg

SEQ ID NO: 1230346 - DNA, 25 bp, Homo sapien
tagctgctgtacctttctgtgaacc

SEQ ID NO: 1230347 - DNA, 25 bp, Homo sapien
cagtgtacttctgcccgagagctga

SEQ ID NO: 1230348 - DNA, 25 bp, Homo sapien
gcaagcctgagttgtagagtgcccc

SEQ ID NO: 1230349 - DNA, 25 bp, Homo sapien
aagcctgagttgtagagtgcccctg

SEQ ID NO: 1230350 - DNA, 25 bp, Homo sapien
aagaagagttagcaagcctgagttg

SEQ ID NO: 1230351 - DNA, 25 bp, Homo sapien
cctgagttgtagagtgcccctgtgc

SEQ ID NO: 1230352 - DNA, 25 bp, Homo sapien
tgtgtagacggatgatagatggcat

SEQ ID NO: 1230353 - DNA, 25 bp, Homo sapien
aacccgagtcgttggagatctgccg

SEQ ID NO: 1230354 - DNA, 25 bp, Homo sapien
tgtggattccgcctgtgacactttg

SEQ ID NO: 1230355 - DNA, 25 bp, Homo sapien
taaagttcgtttaggtgagcgtctc

SEQ ID NO: 1230356 - DNA, 25 bp, Homo sapien
gacgcaggccgcgtcgaggctgaag

SEQ ID NO: 1230357 - DNA, 25 bp, Homo sapien
cagccagaggggcagcgacatctgc

SEQ ID NO: 1230358 - DNA, 25 bp, Homo sapien
gctgaagggcctccctgtccgggac

SEQ ID NO: 1230359 - DNA, 25 bp, Homo sapien
tgtccgggacggtcagctgccaagt

SEQ ID NO: 1230360 - DNA, 25 bp, Homo sapien
tcttctccctgatcaggagctgcgg

SEQ ID NO: 1230361 - DNA, 25 bp, Homo sapien
gtagactctccacagttcatctggg

SEQ ID NO: 1230362 - DNA, 25 bp, Homo sapien
caatctagctatttgcactcggctc

SEQ ID NO: 1230363 - DNA, 25 bp, Homo sapien
gccagctgcggctgttccagaagcg

SEQ ID NO: 1230364 - DNA, 25 bp, Homo sapien
caagtttcctgaccataacctgttg

SEQ ID NO: 1230365 - DNA, 25 bp, Homo sapien
ccctgagcgcttgaatgagttccct

SEQ ID NO: 1230366 - DNA, 25 bp, Homo sapien
gatagatcaagggtagaacctctgg

SEQ ID NO: 1230367 - DNA, 25 bp, Homo sapien
agccttccagctccagatagatcaa

SEQ ID NO: 1230368 - DNA, 25 bp, Homo sapien
catctgcaggttcactgcctggtga

SEQ ID NO: 1230369 - DNA, 25 bp, Homo sapien
gagggtccaatctctgatttcaaga

SEQ ID NO: 1230370 - DNA, 25 bp, Homo sapien
gtctcaatgacctcaaacacttacc

SEQ ID NO: 1230371 - DNA, 25 bp, Homo sapien
gaaaactaactcactccctgaagcc

SEQ ID NO: 1230372 - DNA, 25 bp, Homo sapien
ggatggtttgcagctgtgcagccac

SEQ ID NO: 1230373 - DNA, 25 bp, Homo sapien
gcagcgaccacctgtgcgggtgagg

SEQ ID NO: 1230374 - DNA, 25 bp, Homo sapien
gcgaccacctgtgcgggtgaggcag

SEQ ID NO: 1230375 - DNA, 25 bp, Homo sapien
tgggatggtttgcagctgtgcagcc

SEQ ID NO: 1230376 - DNA, 25 bp, Homo sapien
tctcctgttagcttggcctgtccca

SEQ ID NO: 1230377 - DNA, 25 bp, Homo sapien
tagctgaatcgctatgtggaaggct

SEQ ID NO: 1230378 - DNA, 25 bp, Homo sapien
taatttgcaattccacttggagcac

SEQ ID NO: 1230379 - DNA, 25 bp, Homo sapien
ccaattttcagtgggccctgctcat

SEQ ID NO: 1230380 - DNA, 25 bp, Homo sapien
caattcccagattatcaagtttctt

SEQ ID NO: 1230381 - DNA, 25 bp, Homo sapien
cttggcttccctcaattcccagatt

SEQ ID NO: 1230382 - DNA, 25 bp, Homo sapien
tcagtgactcagtgacaaaagtctt

SEQ ID NO: 1230383 - DNA, 25 bp, Homo sapien
tccctcaattcccagattatcaagt

SEQ ID NO: 1230384 - DNA, 25 bp, Homo sapien
ttttgaaccctgaatcatacagaga

SEQ ID NO: 1230385 - DNA, 25 bp, Homo sapien
tttgaaccctgaatcatacagagaa

SEQ ID NO: 1230386 - DNA, 25 bp, Homo sapien
cttttgaaccctgaatcatacagag

SEQ ID NO: 1230387 - DNA, 25 bp, Homo sapien
caccactaccattgatagaaactct

SEQ ID NO: 1230388 - DNA, 25 bp, Homo sapien
accactaccattgatagaaactcta

SEQ ID NO: 1230389 - DNA, 25 bp, Homo sapien
ccaccactaccattgatagaaactc

SEQ ID NO: 1230390 - DNA, 25 bp, Homo sapien
ccactaccattgatagaaactctat

SEQ ID NO: 1230391 - DNA, 25 bp, Homo sapien
atttaggatcactgtgtttttcttt

SEQ ID NO: 1230392 - DNA, 25 bp, Homo sapien
agtgccctcttaaatctggaagtac

SEQ ID NO: 1230393 - DNA, 25 bp, Homo sapien
catattattgggttcactaacacta

SEQ ID NO: 1230394 - DNA, 25 bp, Homo sapien
tagctattggcattgacattcctcc

SEQ ID NO: 1230395 - DNA, 25 bp, Homo sapien
taacactacatgttagtgccctctt

SEQ ID NO: 1230396 - DNA, 25 bp, Homo sapien
tccctggatttcccgtaataggatc

SEQ ID NO: 1230397 - DNA, 25 bp, Homo sapien
gatttcccgtaataggatcttccat

SEQ ID NO: 1230398 - DNA, 25 bp, Homo sapien
cctggatttcccgtaataggatctt

SEQ ID NO: 1230399 - DNA, 25 bp, Homo sapien
tggatttcccgtaataggatcttcc

SEQ ID NO: 1230400 - DNA, 25 bp, Homo sapien
ttatgatgaagggaagatttctgca

SEQ ID NO: 1230401 - DNA, 25 bp, Homo sapien
ctggtttatgatgaagggaagattt

SEQ ID NO: 1230402 - DNA, 25 bp, Homo sapien
gtttatgatgaagggaagatttctg

SEQ ID NO: 1230403 - DNA, 25 bp, Homo sapien
tatgatgaagggaagatttctgcat

SEQ ID NO: 1230404 - DNA, 25 bp, Homo sapien
gaaggaacagcgagtggtgaaaaga

SEQ ID NO: 1230405 - DNA, 25 bp, Homo sapien
aaggaacagcgagtggtgaaaagat

SEQ ID NO: 1230406 - DNA, 25 bp, Homo sapien
gaacagcgagtggtgaaaagatgac

SEQ ID NO: 1230407 - DNA, 25 bp, Homo sapien
ctgaaggaacagcgagtggtgaaaa

SEQ ID NO: 1230408 - DNA, 25 bp, Homo sapien
aatgcgattgtaaacattgagtcac

SEQ ID NO: 1230409 - DNA, 25 bp, Homo sapien
agccacggcgttcctcacaggttaa

SEQ ID NO: 1230410 - DNA, 25 bp, Homo sapien
cctcacaggttaatgcgattgtaaa

SEQ ID NO: 1230411 - DNA, 25 bp, Homo sapien
gggccttgttcttcgacacagccac

SEQ ID NO: 1230412 - DNA, 25 bp, Homo sapien
ctcttcccaagaacatgtccacagt

SEQ ID NO: 1230413 - DNA, 25 bp, Homo sapien
cttcccaagaacatgtccacagtta

SEQ ID NO: 1230414 - DNA, 25 bp, Homo sapien
tcttcccaagaacatgtccacagtt

SEQ ID NO: 1230415 - DNA, 25 bp, Homo sapien
ttcccaagaacatgtccacagttac

SEQ ID NO: 1230416 - DNA, 25 bp, Homo sapien
aactggattcctgttatttgcaatt

SEQ ID NO: 1230417 - DNA, 25 bp, Homo sapien
cttcacactcatagaaactggattc

SEQ ID NO: 1230418 - DNA, 25 bp, Homo sapien
ggattcttcacactcatagaaactg

SEQ ID NO: 1230419 - DNA, 25 bp, Homo sapien
ctgaggattcttcacactcatagaa

SEQ ID NO: 1230420 - DNA, 25 bp, Homo sapien
ggttgaacggaattcataaaacagc

SEQ ID NO: 1230421 - DNA, 25 bp, Homo sapien
taattagggttgaacggaattcata

SEQ ID NO: 1230422 - DNA, 25 bp, Homo sapien
tgacttctgttaccgccatgatttt

SEQ ID NO: 1230423 - DNA, 25 bp, Homo sapien
ttggagactccgcactgtaaatgac

SEQ ID NO: 1230424 - DNA, 25 bp, Homo sapien
ttctgttaccgccatgattttcacc

SEQ ID NO: 1230425 - DNA, 25 bp, Homo sapien
atgcccagtgattgtgggttggaga

SEQ ID NO: 1230426 - DNA, 25 bp, Homo sapien
tttaacccagtctagaaagcttgtc

SEQ ID NO: 1230427 - DNA, 25 bp, Homo sapien
tctaagaagatgagagtgtggccac

SEQ ID NO: 1230428 - DNA, 25 bp, Homo sapien
aagcttgtcctgagatcccgaagac

SEQ ID NO: 1230429 - DNA, 25 bp, Homo sapien
ggaccctggttggtgccatatgaat

SEQ ID NO: 1230430 - DNA, 25 bp, Homo sapien
ctctggagaactggcatcatgtttg

SEQ ID NO: 1230431 - DNA, 25 bp, Homo sapien
gagaactggcatcatgtttgacaga

SEQ ID NO: 1230432 - DNA, 25 bp, Homo sapien
ctggagaactggcatcatgtttgac

SEQ ID NO: 1230433 - DNA, 25 bp, Homo sapien
gaactggcatcatgtttgacagact

SEQ ID NO: 1230434 - DNA, 25 bp, Homo sapien
gcttcaaagctgaacagcccttacc

SEQ ID NO: 1230435 - DNA, 25 bp, Homo sapien
cccatcttgtctcctcgggaacatg

SEQ ID NO: 1230436 - DNA, 25 bp, Homo sapien
tgtctcctcgggaacatgtagtgtc

SEQ ID NO: 1230437 - DNA, 25 bp, Homo sapien
gaacatgtagtgtccaaggaggtga

SEQ ID NO: 1230438 - DNA, 25 bp, Homo sapien
ctgcagatagaagatgatagtgccc

SEQ ID NO: 1230439 - DNA, 25 bp, Homo sapien
tgcagatagaagatgatagtgccca

SEQ ID NO: 1230440 - DNA, 25 bp, Homo sapien
gcagatagaagatgatagtgcccat

SEQ ID NO: 1230441 - DNA, 25 bp, Homo sapien
cagatagaagatgatagtgcccatt

SEQ ID NO: 1230442 - DNA, 25 bp, Homo sapien
ctaggtgttcttggctgccgcttcc

SEQ ID NO: 1230443 - DNA, 25 bp, Homo sapien
taggtgttcttggctgccgcttccc

SEQ ID NO: 1230444 - DNA, 25 bp, Homo sapien
atcgcccaagttccactctgatgtc

SEQ ID NO: 1230445 - DNA, 25 bp, Homo sapien
tcatgttggcagcatcgcccaagtt

SEQ ID NO: 1230446 - DNA, 25 bp, Homo sapien
tgttggcagcatcgcccaagttcca

SEQ ID NO: 1230447 - DNA, 25 bp, Homo sapien
agcatcgcccaagttccactctgat

SEQ ID NO: 1230448 - DNA, 25 bp, Homo sapien
tcagaaatttagcaaaatgcacatg

SEQ ID NO: 1230449 - DNA, 25 bp, Homo sapien
tattggactgaggttatttgtgttt

SEQ ID NO: 1230450 - DNA, 25 bp, Homo sapien
gacacacgtaggtcataatagtctg

SEQ ID NO: 1230451 - DNA, 25 bp, Homo sapien
agttcctaaatattggactgaggtt

SEQ ID NO: 1230452 - DNA, 25 bp, Homo sapien
tgtttttaatgcctgggctacatgt

SEQ ID NO: 1230453 - DNA, 25 bp, Homo sapien
gaaatagaatcacaaagactcctct

SEQ ID NO: 1230454 - DNA, 25 bp, Homo sapien
gatcatagtagcctttcttgccaga

SEQ ID NO: 1230455 - DNA, 25 bp, Homo sapien
tcagcctttctaaaccaagaccagt

SEQ ID NO: 1230456 - DNA, 25 bp, Homo sapien
tctgtctaaatcttggacttccaag

SEQ ID NO: 1230457 - DNA, 25 bp, Homo sapien
ggccactgctcccaaagtgactata

SEQ ID NO: 1230458 - DNA, 25 bp, Homo sapien
gctttgtgcttgtcgtggccactgc

SEQ ID NO: 1230459 - DNA, 25 bp, Homo sapien
ctagggatttacagctttgtgcttg

SEQ ID NO: 1230460 - DNA, 25 bp, Homo sapien
ggaggatccccacgacccttcagag

SEQ ID NO: 1230461 - DNA, 25 bp, Homo sapien
cctcctcacacaagaggttgggcat

SEQ ID NO: 1230462 - DNA, 25 bp, Homo sapien
tgcagcgagactcccaagcgaccat

SEQ ID NO: 1230463 - DNA, 25 bp, Homo sapien
ttactctggtagattccccagagag

SEQ ID NO: 1230464 - DNA, 25 bp, Homo sapien
tttctccttactgtgcagcgagact

SEQ ID NO: 1230465 - DNA, 25 bp, Homo sapien
accctgaagttactctggtagattc

SEQ ID NO: 1230466 - DNA, 25 bp, Homo sapien
ggagcacatcggcaagcacagagag

SEQ ID NO: 1230467 - DNA, 25 bp, Homo sapien
gagcacatcggcaagcacagagagt

SEQ ID NO: 1230468 - DNA, 25 bp, Homo sapien
agagggagcacatcggcaagcacag

SEQ ID NO: 1230469 - DNA, 25 bp, Homo sapien
cacatcggcaagcacagagagtggg

SEQ ID NO: 1230470 - DNA, 25 bp, Homo sapien
caacatgctgttctccattcactgg

SEQ ID NO: 1230471 - DNA, 25 bp, Homo sapien
ggtgtagagaactgtcctgagttca

SEQ ID NO: 1230472 - DNA, 25 bp, Homo sapien
gctgttctccattcactggtgtaga

SEQ ID NO: 1230473 - DNA, 25 bp, Homo sapien
cactggtgtagagaactgtcctgag

SEQ ID NO: 1230474 - DNA, 25 bp, Homo sapien
ttaggcctcgatagagcaggtgaat

SEQ ID NO: 1230475 - DNA, 25 bp, Homo sapien
ggcctcgatagagcaggtgaatata

SEQ ID NO: 1230476 - DNA, 25 bp, Homo sapien
cgatagagcaggtgaatataaatga

SEQ ID NO: 1230477 - DNA, 25 bp, Homo sapien
cctcgatagagcaggtgaatataaa

SEQ ID NO: 1230478 - DNA, 25 bp, Homo sapien
aatgtctcaggcgtgcccaggaaat

SEQ ID NO: 1230479 - DNA, 25 bp, Homo sapien
tcaccaagggtgctcaatttgtact

SEQ ID NO: 1230480 - DNA, 25 bp, Homo sapien
ggcatggtcgttccttcttttccca

SEQ ID NO: 1230481 - DNA, 25 bp, Homo sapien
gccatctgctttctcccgttgccat

SEQ ID NO: 1230482 - DNA, 25 bp, Homo sapien
tcaggatttgcagttccagcactga

SEQ ID NO: 1230483 - DNA, 25 bp, Homo sapien
caaggtttagttgtgcaggcaaaga

SEQ ID NO: 1230484 - DNA, 25 bp, Homo sapien
caaagaaagtgatcatcctggagca

SEQ ID NO: 1230485 - DNA, 25 bp, Homo sapien
tcctggagcaagtgaatgcaaacct

SEQ ID NO: 1230486 - DNA, 25 bp, Homo sapien
gccaatgatctgttatatcaccctt

SEQ ID NO: 1230487 - DNA, 25 bp, Homo sapien
tcctgttgtcaagccaatgatctgt

SEQ ID NO: 1230488 - DNA, 25 bp, Homo sapien
gaataggatttcctgttgtcaagcc

SEQ ID NO: 1230489 - DNA, 25 bp, Homo sapien
cccatcatatgaataggatttcctg

SEQ ID NO: 1230490 - DNA, 25 bp, Homo sapien
caatctaggtagacaccagagccac

SEQ ID NO: 1230491 - DNA, 25 bp, Homo sapien
taactatcaggattgatgggcctta

SEQ ID NO: 1230492 - DNA, 25 bp, Homo sapien
ccttctaccggttgttatccaatct

SEQ ID NO: 1230493 - DNA, 25 bp, Homo sapien
gagggagctgctctaaccttctacc

SEQ ID NO: 1230494 - DNA, 25 bp, Homo sapien
ttcctgaggcaggtcccccgatccg

SEQ ID NO: 1230495 - DNA, 25 bp, Homo sapien
ttgatttcctgaggcaggtcccccg

SEQ ID NO: 1230496 - DNA, 25 bp, Homo sapien
atttcctgaggcaggtcccccgatc

SEQ ID NO: 1230497 - DNA, 25 bp, Homo sapien
gatttcctgaggcaggtcccccgat

SEQ ID NO: 1230498 - DNA, 25 bp, Homo sapien
cgctaagccaagaaggagtcagtca

SEQ ID NO: 1230499 - DNA, 25 bp, Homo sapien
agagttaactaaagctcggcgtccg

SEQ ID NO: 1230500 - DNA, 25 bp, Homo sapien
gatgtggagtgggtagcctccgtat

SEQ ID NO: 1230501 - DNA, 25 bp, Homo sapien
tctacggggtttctgaggcgatcgg

SEQ ID NO: 1230502 - DNA, 25 bp, Homo sapien
aatagaccattagtctgtcactgaa

SEQ ID NO: 1230503 - DNA, 25 bp, Homo sapien
ttaatagaccattagtctgtcactg

SEQ ID NO: 1230504 - DNA, 25 bp, Homo sapien
gaccattagtctgtcactgaatact

SEQ ID NO: 1230505 - DNA, 25 bp, Homo sapien
cattagtctgtcactgaatactaag

SEQ ID NO: 1230506 - DNA, 25 bp, Homo sapien
agatggatgtggtcaaaggcagatg

SEQ ID NO: 1230507 - DNA, 25 bp, Homo sapien
ctctcaggttcttccagatggatgt

SEQ ID NO: 1230508 - DNA, 25 bp, Homo sapien
tgatgcaaatgtctcggaccctctt

SEQ ID NO: 1230509 - DNA, 25 bp, Homo sapien
tacaggtctcactgaatgatgatgc

SEQ ID NO: 1230510 - DNA, 25 bp, Homo sapien
tgtagatggtctgccgttgcaggct

SEQ ID NO: 1230511 - DNA, 25 bp, Homo sapien
aattgtcagtcttcctccgttaggg

SEQ ID NO: 1230512 - DNA, 25 bp, Homo sapien
tgaaccagctgtctacattgttggc

SEQ ID NO: 1230513 - DNA, 25 bp, Homo sapien
tcatgttgcaatataggagtccttt

SEQ ID NO: 1230514 - DNA, 25 bp, Homo sapien
ctttatcatcagctgggttagaagc

SEQ ID NO: 1230515 - DNA, 25 bp, Homo sapien
tctttatcatcagctgggttagaag

SEQ ID NO: 1230516 - DNA, 25 bp, Homo sapien
tttatcttctttatcatcagctggg

SEQ ID NO: 1230517 - DNA, 25 bp, Homo sapien
tcttctttatcatcagctgggttag

SEQ ID NO: 1230518 - DNA, 25 bp, Homo sapien
gatggcctggtgagatagctcaagt

SEQ ID NO: 1230519 - DNA, 25 bp, Homo sapien
tctgatggcctggtgagatagctca

SEQ ID NO: 1230520 - DNA, 25 bp, Homo sapien
ctggttctgatggcctggtgagata

SEQ ID NO: 1230521 - DNA, 25 bp, Homo sapien
tggcctggtgagatagctcaagttc

SEQ ID NO: 1230522 - DNA, 25 bp, Homo sapien
ggccatgaacattagcttcagtttt

SEQ ID NO: 1230523 - DNA, 25 bp, Homo sapien
tctggcaaggccatgaacattagct

SEQ ID NO: 1230524 - DNA, 25 bp, Homo sapien
tttggctggtgcattttgcagacag

SEQ ID NO: 1230525 - DNA, 25 bp, Homo sapien
aattccatttggctggtgcattttg

SEQ ID NO: 1230526 - DNA, 25 bp, Homo sapien
cccaaagctctggattgatcagctc

SEQ ID NO: 1230527 - DNA, 25 bp, Homo sapien
ggttctttcagacttacctctagaa

SEQ ID NO: 1230528 - DNA, 25 bp, Homo sapien
cagctcttccttgagattctcggtt

SEQ ID NO: 1230529 - DNA, 25 bp, Homo sapien
ccaaagctctggattgatcagctct

SEQ ID NO: 1230530 - DNA, 25 bp, Homo sapien
agatctgtaggtggcttctatgtcc

SEQ ID NO: 1230531 - DNA, 25 bp, Homo sapien
ttctggtcctggagatctgtaggtg

SEQ ID NO: 1230532 - DNA, 25 bp, Homo sapien
cctggagatctgtaggtggcttcta

SEQ ID NO: 1230533 - DNA, 25 bp, Homo sapien
tggagatctgtaggtggcttctatg

SEQ ID NO: 1230534 - DNA, 25 bp, Homo sapien
catgttatctacatcagcagggaca

SEQ ID NO: 1230535 - DNA, 25 bp, Homo sapien
tgccaggatctactgccatgttatc

SEQ ID NO: 1230536 - DNA, 25 bp, Homo sapien
gatgctctgatttccaagaccgctt

SEQ ID NO: 1230537 - DNA, 25 bp, Homo sapien
tccaagaacaagttagatgctctga

SEQ ID NO: 1230538 - DNA, 25 bp, Homo sapien
gtcagatgctttattcaaatagaag

SEQ ID NO: 1230539 - DNA, 25 bp, Homo sapien
atagactctggtccccctggaaagg

SEQ ID NO: 1230540 - DNA, 25 bp, Homo sapien
tggaaagggtcagatgctttattca

SEQ ID NO: 1230541 - DNA, 25 bp, Homo sapien
tcaggatagactctggtccccctgg

SEQ ID NO: 1230542 - DNA, 25 bp, Homo sapien
cactatcagctgatgaacttcatta

SEQ ID NO: 1230543 - DNA, 25 bp, Homo sapien
gaagatgtcttataaattccatatg

SEQ ID NO: 1230544 - DNA, 25 bp, Homo sapien
aaacagaagatgtcttataaattcc

SEQ ID NO: 1230545 - DNA, 25 bp, Homo sapien
ctaactatgaatcactatcagctga

SEQ ID NO: 1230546 - DNA, 25 bp, Homo sapien
ctctttgtcggggtctgacaccgtt

SEQ ID NO: 1230547 - DNA, 25 bp, Homo sapien
gcccgtgtgcgcactctttgtcggg

SEQ ID NO: 1230548 - DNA, 25 bp, Homo sapien
tgcgcactctttgtcggggtctgac

SEQ ID NO: 1230549 - DNA, 25 bp, Homo sapien
tttgtcggggtctgacaccgttgca

SEQ ID NO: 1230550 - DNA, 25 bp, Homo sapien
gcttgaattcatgagactttcttcc

SEQ ID NO: 1230551 - DNA, 25 bp, Homo sapien
aatgctgctgttctaaggatccttg

SEQ ID NO: 1230552 - DNA, 25 bp, Homo sapien
ggataaagcgctcccttgttggtgt

SEQ ID NO: 1230553 - DNA, 25 bp, Homo sapien
tgatgccgtcctgccgtcctgcatc

SEQ ID NO: 1230554 - DNA, 25 bp, Homo sapien
tccctccaggttcagggtggctgtc

SEQ ID NO: 1230555 - DNA, 25 bp, Homo sapien
atccctgtccccgtgctgttgagct

SEQ ID NO: 1230556 - DNA, 25 bp, Homo sapien
gtgctgttgagcttgttccctccag

SEQ ID NO: 1230557 - DNA, 25 bp, Homo sapien
tgtctggtccagtctgaccaagccc

SEQ ID NO: 1230558 - DNA, 25 bp, Homo sapien
tggcacaacatccatattcagagac

SEQ ID NO: 1230559 - DNA, 25 bp, Homo sapien
gcttagaaacaatgattggcacaac

SEQ ID NO: 1230560 - DNA, 25 bp, Homo sapien
tttgtcggcacaacgcggtaggcaa

SEQ ID NO: 1230561 - DNA, 25 bp, Homo sapien
gacagcctcagtctgactgtctggt

SEQ ID NO: 1230562 - DNA, 25 bp, Homo sapien
agggcaccagtccgcatcactcctc

SEQ ID NO: 1230563 - DNA, 25 bp, Homo sapien
gagaagggcaccagtccgcatcact

SEQ ID NO: 1230564 - DNA, 25 bp, Homo sapien
agaagggcaccagtccgcatcactc

SEQ ID NO: 1230565 - DNA, 25 bp, Homo sapien
aagggcaccagtccgcatcactcct

SEQ ID NO: 1230566 - DNA, 25 bp, Homo sapien
aacgtggcctacatctggtccttga

SEQ ID NO: 1230567 - DNA, 25 bp, Homo sapien
taccttcagaccctcggatgctgtg

SEQ ID NO: 1230568 - DNA, 25 bp, Homo sapien
cctcagcaagcttgggaacagttac

SEQ ID NO: 1230569 - DNA, 25 bp, Homo sapien
ggagtaagctgcctaacaccatcat

SEQ ID NO: 1230570 - DNA, 25 bp, Homo sapien
tgggaaactaggccagtctagtctt

SEQ ID NO: 1230571 - DNA, 25 bp, Homo sapien
ctgggaaactaggccagtctagtct

SEQ ID NO: 1230572 - DNA, 25 bp, Homo sapien
cattaattgtcacctgaagtcctgc

SEQ ID NO: 1230573 - DNA, 25 bp, Homo sapien
gaacgtggtcttcatttccagggag

SEQ ID NO: 1230574 - DNA, 25 bp, Homo sapien
taagggctcatgtctgctgatagac

SEQ ID NO: 1230575 - DNA, 25 bp, Homo sapien
ataatttggttggtccccagcccag

SEQ ID NO: 1230576 - DNA, 25 bp, Homo sapien
catgaatgcatctcaccctgggagt

SEQ ID NO: 1230577 - DNA, 25 bp, Homo sapien
gaatccttcgcgtgctcctagtgca

SEQ ID NO: 1230578 - DNA, 25 bp, Homo sapien
gaactggtggcatagcagctgctga

SEQ ID NO: 1230579 - DNA, 25 bp, Homo sapien
ccgacttttcgtagcccagggcaat

SEQ ID NO: 1230580 - DNA, 25 bp, Homo sapien
gtctggtagctaattatcagcacag

SEQ ID NO: 1230581 - DNA, 25 bp, Homo sapien
gagctgcggactaaacctgtgtttg

SEQ ID NO: 1230582 - DNA, 25 bp, Homo sapien
aggctgcagtgcctgaccacaccca

SEQ ID NO: 1230583 - DNA, 25 bp, Homo sapien
ctgttgatgtaggagctgcggacta

SEQ ID NO: 1230584 - DNA, 25 bp, Homo sapien
ggcagatgtctagtgagtttagcac

SEQ ID NO: 1230585 - DNA, 25 bp, Homo sapien
atccttgacagcctctgggttttag

SEQ ID NO: 1230586 - DNA, 25 bp, Homo sapien
catttgtgatggacggatgctggca

SEQ ID NO: 1230587 - DNA, 25 bp, Homo sapien
taggacttagcatgtctttatcatc

SEQ ID NO: 1230588 - DNA, 25 bp, Homo sapien
ccaagtaggcacacagtatccttac

SEQ ID NO: 1230589 - DNA, 25 bp, Homo sapien
ggttttgctcttgcgcatatttccc

SEQ ID NO: 1230590 - DNA, 25 bp, Homo sapien
tgacttattctgttgccaagtaggc

SEQ ID NO: 1230591 - DNA, 25 bp, Homo sapien
ctttaggacaaccactccaccagtg

SEQ ID NO: 1230592 - DNA, 25 bp, Homo sapien
tataatgattaagcttctttgtact

SEQ ID NO: 1230593 - DNA, 25 bp, Homo sapien
aatgattaagcttctttgtactctg

SEQ ID NO: 1230594 - DNA, 25 bp, Homo sapien
taatgattaagcttctttgtactct

SEQ ID NO: 1230595 - DNA, 25 bp, Homo sapien
aatataatgattaagcttctttgta

SEQ ID NO: 1230596 - DNA, 25 bp, Homo sapien
tattggagagacaccagattgggtt

SEQ ID NO: 1230597 - DNA, 25 bp, Homo sapien
tgttcaaattaaccttcttcagaaa

SEQ ID NO: 1230598 - DNA, 25 bp, Homo sapien
ggctgtgtaaaactgaacaatttgc

SEQ ID NO: 1230599 - DNA, 25 bp, Homo sapien
tcctatcgccatcagtattggagag

SEQ ID NO: 1230600 - DNA, 25 bp, Homo sapien
aagggaaacctcaatgtagcttagc

SEQ ID NO: 1230601 - DNA, 25 bp, Homo sapien
gatttttccatgatgtgtgggtaaa

SEQ ID NO: 1230602 - DNA, 25 bp, Homo sapien
gacagctagtcctgatttttccatg

SEQ ID NO: 1230603 - DNA, 25 bp, Homo sapien
cttgaagggaaacctcaatgtagct

SEQ ID NO: 1230604 - DNA, 25 bp, Homo sapien
tatccgtgaagcatcgcagttctac

SEQ ID NO: 1230605 - DNA, 25 bp, Homo sapien
atcgcagttctactgtctccgcagg

SEQ ID NO: 1230606 - DNA, 25 bp, Homo sapien
tggttgagggcctatccgtgaagca

SEQ ID NO: 1230607 - DNA, 25 bp, Homo sapien
ggcctatccgtgaagcatcgcagtt

SEQ ID NO: 1230608 - DNA, 25 bp, Homo sapien
attaccactgaggtaactctctttg

SEQ ID NO: 1230609 - DNA, 25 bp, Homo sapien
ctctttggtatagcattcatgaatg

SEQ ID NO: 1230610 - DNA, 25 bp, Homo sapien
ccactgaggtaactctctttggtat

SEQ ID NO: 1230611 - DNA, 25 bp, Homo sapien
tatagcattcatgaatgaagaccat

SEQ ID NO: 1230612 - DNA, 25 bp, Homo sapien
gtgcacctgggtgtatgtgtgggca

SEQ ID NO: 1230613 - DNA, 25 bp, Homo sapien
tgtgcacctgggtgtatgtgtgggc

SEQ ID NO: 1230614 - DNA, 25 bp, Homo sapien
tttttccaggcatatcttatttcta

SEQ ID NO: 1230615 - DNA, 25 bp, Homo sapien
tttccaggcatatcttatttctatc

SEQ ID NO: 1230616 - DNA, 25 bp, Homo sapien
tccaggcatatcttatttctatctg

SEQ ID NO: 1230617 - DNA, 25 bp, Homo sapien
tctttttccaggcatatcttatttc

SEQ ID NO: 1230618 - DNA, 25 bp, Homo sapien
agcaacaccagctcatcggacagct

SEQ ID NO: 1230619 - DNA, 25 bp, Homo sapien
agctcatcggacagctccctcaaaa

SEQ ID NO: 1230620 - DNA, 25 bp, Homo sapien
catttcctcatagagctcatctctt

SEQ ID NO: 1230621 - DNA, 25 bp, Homo sapien
tgactggcaagttcttaagttgact

SEQ ID NO: 1230622 - DNA, 25 bp, Homo sapien
tgaaggagtggagcggaggtgggaa

SEQ ID NO: 1230623 - DNA, 25 bp, Homo sapien
gcggaggtgggaagttctcagagag

SEQ ID NO: 1230624 - DNA, 25 bp, Homo sapien
agtggagcggaggtgggaagttctc

SEQ ID NO: 1230625 - DNA, 25 bp, Homo sapien
ctgaaggagtggagcggaggtggga

SEQ ID NO: 1230626 - DNA, 25 bp, Homo sapien
cagaacgatatgcatgcaccttaaa

SEQ ID NO: 1230627 - DNA, 25 bp, Homo sapien
gatagaagcccacagaacgatatgc

SEQ ID NO: 1230628 - DNA, 25 bp, Homo sapien
gtggctgatcatgccgcagatagaa

SEQ ID NO: 1230629 - DNA, 25 bp, Homo sapien
cagagagcatgatacacagatgcac

SEQ ID NO: 1230630 - DNA, 25 bp, Homo sapien
agagctgtttgtcccagacctggcc

SEQ ID NO: 1230631 - DNA, 25 bp, Homo sapien
ctttgttgcaatttgggtctctgtc

SEQ ID NO: 1230632 - DNA, 25 bp, Homo sapien
agggcatggagatctttagagctgt

SEQ ID NO: 1230633 - DNA, 25 bp, Homo sapien
tcaagggttgtgcatttgctgagca

SEQ ID NO: 1230634 - DNA, 25 bp, Homo sapien
taaccagaaccagaggacaatggga

SEQ ID NO: 1230635 - DNA, 25 bp, Homo sapien
tcatcaatgactcagagctggcact

SEQ ID NO: 1230636 - DNA, 25 bp, Homo sapien
cacctgtaatatagcaggagcagct

SEQ ID NO: 1230637 - DNA, 25 bp, Homo sapien
ccctgggtggcggtaatgtcatcaa

SEQ ID NO: 1230638 - DNA, 25 bp, Homo sapien
ggaagggatgggtagtggctctaac

SEQ ID NO: 1230639 - DNA, 25 bp, Homo sapien
ttcctgtgtaattgcaggacagtgg

SEQ ID NO: 1230640 - DNA, 25 bp, Homo sapien
tcctgtgtaattgcaggacagtggg

SEQ ID NO: 1230641 - DNA, 25 bp, Homo sapien
cctgtgtaattgcaggacagtggga

SEQ ID NO: 1230642 - DNA, 25 bp, Homo sapien
gcttcctgtgtaattgcaggacagt

SEQ ID NO: 1230643 - DNA, 25 bp, Homo sapien
ccttctctgtcggtgggagtgatgc

SEQ ID NO: 1230644 - DNA, 25 bp, Homo sapien
gggagtgatgcactgccccgttctc

SEQ ID NO: 1230645 - DNA, 25 bp, Homo sapien
ttctctgtcggtgggagtgatgcac

SEQ ID NO: 1230646 - DNA, 25 bp, Homo sapien
tgttccctgcttggactagagtcct

SEQ ID NO: 1230647 - DNA, 25 bp, Homo sapien
tcagtagctagggaaacgatgtcct

SEQ ID NO: 1230648 - DNA, 25 bp, Homo sapien
gccatgaatccaaggcagacggaga

SEQ ID NO: 1230649 - DNA, 25 bp, Homo sapien
gagccagcctgtcagttgccatgaa

SEQ ID NO: 1230650 - DNA, 25 bp, Homo sapien
gacaatcgaggagtctgcagctctg

SEQ ID NO: 1230651 - DNA, 25 bp, Homo sapien
gatgacactcccaaaaagtcttgga

SEQ ID NO: 1230652 - DNA, 25 bp, Homo sapien
ccatctgctgtgtatttactcagcc

SEQ ID NO: 1230653 - DNA, 25 bp, Homo sapien
gttggtagcatcaaacaaagtttcc

SEQ ID NO: 1230654 - DNA, 25 bp, Homo sapien
tgctgtgtatttactcagccagatg

SEQ ID NO: 1230655 - DNA, 25 bp, Homo sapien
ggaaatggtgacgtctttcttccat

SEQ ID NO: 1230656 - DNA, 25 bp, Homo sapien
tccagaggcctgtcatcaaaaggaa

SEQ ID NO: 1230657 - DNA, 25 bp, Homo sapien
cagttggcattatcttggtgacccc

SEQ ID NO: 1230658 - DNA, 25 bp, Homo sapien
ttccactccttcaagagtcttgcca

SEQ ID NO: 1230659 - DNA, 25 bp, Homo sapien
tatgggtgcacctacaatgacagct

SEQ ID NO: 1230660 - DNA, 25 bp, Homo sapien
ggtactgaccttccaccagactggg

SEQ ID NO: 1230661 - DNA, 25 bp, Homo sapien
acagctgggtactgaccttccacca

SEQ ID NO: 1230662 - DNA, 25 bp, Homo sapien
cctcctgccagcaagggttctatgg

SEQ ID NO: 1230663 - DNA, 25 bp, Homo sapien
aatgcctaattgttcttcacgggta

SEQ ID NO: 1230664 - DNA, 25 bp, Homo sapien
tcacgggtagttaaagcctgcttta

SEQ ID NO: 1230665 - DNA, 25 bp, Homo sapien
tcttcacgggtagttaaagcctgct

SEQ ID NO: 1230666 - DNA, 25 bp, Homo sapien
tggtgctcttctgggaatgcctaat

SEQ ID NO: 1230667 - DNA, 25 bp, Homo sapien
atcataaagacagatggtagcccca

SEQ ID NO: 1230668 - DNA, 25 bp, Homo sapien
agacagatggtagccccactttcta

SEQ ID NO: 1230669 - DNA, 25 bp, Homo sapien
atggtagccccactttctagttgga

SEQ ID NO: 1230670 - DNA, 25 bp, Homo sapien
taaagacagatggtagccccacttt

SEQ ID NO: 1230671 - DNA, 25 bp, Homo sapien
ctggccaccagaactaaggctgaat

SEQ ID NO: 1230672 - DNA, 25 bp, Homo sapien
ccaccagaactaaggctgaatacat

SEQ ID NO: 1230673 - DNA, 25 bp, Homo sapien
ggccaccagaactaaggctgaatac

SEQ ID NO: 1230674 - DNA, 25 bp, Homo sapien
caccagaactaaggctgaatacatc

SEQ ID NO: 1230675 - DNA, 25 bp, Homo sapien
ccctgagtgttgctttttgtattcc

SEQ ID NO: 1230676 - DNA, 25 bp, Homo sapien
tcatccctgagtgttgctttttgta

SEQ ID NO: 1230677 - DNA, 25 bp, Homo sapien
tgagtgttgctttttgtattcctgt

SEQ ID NO: 1230678 - DNA, 25 bp, Homo sapien
catccctgagtgttgctttttgtat

SEQ ID NO: 1230679 - DNA, 25 bp, Homo sapien
tgctgtcttgacattcctttatttg

SEQ ID NO: 1230680 - DNA, 25 bp, Homo sapien
tatccctatactgtttaactgcttg

SEQ ID NO: 1230681 - DNA, 25 bp, Homo sapien
tttatttgtgtagcccggatcctgg

SEQ ID NO: 1230682 - DNA, 25 bp, Homo sapien
gtccagcgcctttgagtaatgccta

SEQ ID NO: 1230683 - DNA, 25 bp, Homo sapien
agtgctccggtaatgatgacggtca

SEQ ID NO: 1230684 - DNA, 25 bp, Homo sapien
gtgctccggtaatgatgacggtcat

SEQ ID NO: 1230685 - DNA, 25 bp, Homo sapien
tatagtgctccggtaatgatgacgg

SEQ ID NO: 1230686 - DNA, 25 bp, Homo sapien
tagtgctccggtaatgatgacggtc

SEQ ID NO: 1230687 - DNA, 25 bp, Homo sapien
taagataatggaattcatcctgtag

SEQ ID NO: 1230688 - DNA, 25 bp, Homo sapien
gataatggaattcatcctgtagcat

SEQ ID NO: 1230689 - DNA, 25 bp, Homo sapien
aaagccaaggcaagaatcaaaccct

SEQ ID NO: 1230690 - DNA, 25 bp, Homo sapien
aaggcaagaatcaaacccttctcct

SEQ ID NO: 1230691 - DNA, 25 bp, Homo sapien
catgagagtaggaaagagtggattt

SEQ ID NO: 1230692 - DNA, 25 bp, Homo sapien
agagtaggaaagagtggattttgct

SEQ ID NO: 1230693 - DNA, 25 bp, Homo sapien
ctacatgagagtaggaaagagtgga

SEQ ID NO: 1230694 - DNA, 25 bp, Homo sapien
atgagagtaggaaagagtggatttt

SEQ ID NO: 1230695 - DNA, 25 bp, Homo sapien
tctggatttttgggcatctggtttg

SEQ ID NO: 1230696 - DNA, 25 bp, Homo sapien
tgtctggatttttgggcatctggtt

SEQ ID NO: 1230697 - DNA, 25 bp, Homo sapien
tttgtctggatttttgggcatctgg

SEQ ID NO: 1230698 - DNA, 25 bp, Homo sapien
ttgtctggatttttgggcatctggt

SEQ ID NO: 1230699 - DNA, 25 bp, Homo sapien
tggctttagcatgaaagctttctgt

SEQ ID NO: 1230700 - DNA, 25 bp, Homo sapien
cagagaaaatttagccctactgctt

SEQ ID NO: 1230701 - DNA, 25 bp, Homo sapien
gctttctgtgccatcctttctaaca

SEQ ID NO: 1230702 - DNA, 25 bp, Homo sapien
cagtaacacaagactagggcatttc

SEQ ID NO: 1230703 - DNA, 25 bp, Homo sapien
tctgggtagtgagactaaatttcaa

SEQ ID NO: 1230704 - DNA, 25 bp, Homo sapien
caagatggtctttatgagttgactt

SEQ ID NO: 1230705 - DNA, 25 bp, Homo sapien
ggccaccaatttccaggtctgggta

SEQ ID NO: 1230706 - DNA, 25 bp, Homo sapien
gagttgacttagaatgggctctgga

SEQ ID NO: 1230707 - DNA, 25 bp, Homo sapien
caggaaacacagcaactcagtagtc

SEQ ID NO: 1230708 - DNA, 25 bp, Homo sapien
cttccagtgatcctaacaccagatt

SEQ ID NO: 1230709 - DNA, 25 bp, Homo sapien
caccagattttgtgactttggacag

SEQ ID NO: 1230710 - DNA, 25 bp, Homo sapien
tgactttggacaggaaacacagcaa

SEQ ID NO: 1230711 - DNA, 25 bp, Homo sapien
ccatatcttggcatgatataacctg

SEQ ID NO: 1230712 - DNA, 25 bp, Homo sapien
catatcttggcatgatataacctgg

SEQ ID NO: 1230713 - DNA, 25 bp, Homo sapien
cccatatcttggcatgatataacct

SEQ ID NO: 1230714 - DNA, 25 bp, Homo sapien
agcccatatcttggcatgatataac

SEQ ID NO: 1230715 - DNA, 25 bp, Homo sapien
tggttctagtaaccaggctaggttc

SEQ ID NO: 1230716 - DNA, 25 bp, Homo sapien
cagcatgtgactctgtcgcctgaag

SEQ ID NO: 1230717 - DNA, 25 bp, Homo sapien
cagggccgtactacaggggcactgt

SEQ ID NO: 1230718 - DNA, 25 bp, Homo sapien
tatccagaggtggttctagtaacca

SEQ ID NO: 1230719 - DNA, 25 bp, Homo sapien
gagctcctgacacttgctaccctga

SEQ ID NO: 1230720 - DNA, 25 bp, Homo sapien
ctgaggctttgcatccggggattca

SEQ ID NO: 1230721 - DNA, 25 bp, Homo sapien
tgtttttgagtatggaggagctcct

SEQ ID NO: 1230722 - DNA, 25 bp, Homo sapien
gtttcctctccaaaatagttcactg

SEQ ID NO: 1230723 - DNA, 25 bp, Homo sapien
ctaatgattcaaaccatagtagaga

SEQ ID NO: 1230724 - DNA, 25 bp, Homo sapien
attgggctgtatggaactttgccaa

SEQ ID NO: 1230725 - DNA, 25 bp, Homo sapien
gtagagagtcattgggctgtatgga

SEQ ID NO: 1230726 - DNA, 25 bp, Homo sapien
gattcaaaccatagtagagagtcat

SEQ ID NO: 1230727 - DNA, 25 bp, Homo sapien
gtgatccatgtcatcggccagctgt

SEQ ID NO: 1230728 - DNA, 25 bp, Homo sapien
ggagtgatccatgtcatcggccagc

SEQ ID NO: 1230729 - DNA, 25 bp, Homo sapien
taaaggagtgatccatgtcatcggc

SEQ ID NO: 1230730 - DNA, 25 bp, Homo sapien
tcactttaacttggattagttcctg

SEQ ID NO: 1230731 - DNA, 25 bp, Homo sapien
tattgagcggttggtgaccatttaa

SEQ ID NO: 1230732 - DNA, 25 bp, Homo sapien
atattgagcggttggtgaccattta

SEQ ID NO: 1230733 - DNA, 25 bp, Homo sapien
attgagcggttggtgaccatttaac

SEQ ID NO: 1230734 - DNA, 25 bp, Homo sapien
tgagcggttggtgaccatttaactt

SEQ ID NO: 1230735 - DNA, 25 bp, Homo sapien
ctttcagtgtgtgccactctggtca

SEQ ID NO: 1230736 - DNA, 25 bp, Homo sapien
tcctgccatacagacaaaatgcttg

SEQ ID NO: 1230737 - DNA, 25 bp, Homo sapien
cacaaacttagcatgagctgctggg

SEQ ID NO: 1230738 - DNA, 25 bp, Homo sapien
cattgtctgcaaggtatttgtgttc

SEQ ID NO: 1230739 - DNA, 25 bp, Homo sapien
cacagcaactcatcctgcagaggtt

SEQ ID NO: 1230740 - DNA, 25 bp, Homo sapien
gatgtgacattgatgtgtccactga

SEQ ID NO: 1230741 - DNA, 25 bp, Homo sapien
tatgatatggtcacagatgtgacat

SEQ ID NO: 1230742 - DNA, 25 bp, Homo sapien
gatatggtcacagatgtgacattga

SEQ ID NO: 1230743 - DNA, 25 bp, Homo sapien
tgtgacattgatgtgtccactgaag

SEQ ID NO: 1230744 - DNA, 25 bp, Homo sapien
gacagcacagatcagcgtaatgagg

SEQ ID NO: 1230745 - DNA, 25 bp, Homo sapien
ggagctgccttcaccctgacttggc

SEQ ID NO: 1230746 - DNA, 25 bp, Homo sapien
gcggagctgccttcaccctgacttg

SEQ ID NO: 1230747 - DNA, 25 bp, Homo sapien
agatcagcgtaatgagggccgtcgc

SEQ ID NO: 1230748 - DNA, 25 bp, Homo sapien
gctggcaggtggaccactaggaaaa

SEQ ID NO: 1230749 - DNA, 25 bp, Homo sapien
ttgctgggaagggtcgagtcgggtg

SEQ ID NO: 1230750 - DNA, 25 bp, Homo sapien
ctcttgctgggaagggtcgagtcgg

SEQ ID NO: 1230751 - DNA, 25 bp, Homo sapien
actaggaaaacaccccttgctcttg

SEQ ID NO: 1230752 - DNA, 25 bp, Homo sapien
gaggatcatcaaatactcattgctt

SEQ ID NO: 1230753 - DNA, 25 bp, Homo sapien
gacctcttgaaagggcacagatggg

SEQ ID NO: 1230754 - DNA, 25 bp, Homo sapien
agtgacaggatgaccaagggccaga

SEQ ID NO: 1230755 - DNA, 25 bp, Homo sapien
aagggccagaggatcatcaaatact

SEQ ID NO: 1230756 - DNA, 25 bp, Homo sapien
gagctgtgagctctttgctgttgat

SEQ ID NO: 1230757 - DNA, 25 bp, Homo sapien
gactgagatatctgccgggccagag

SEQ ID NO: 1230758 - DNA, 25 bp, Homo sapien
gacctggtcaatgcagtctgcctgg

SEQ ID NO: 1230759 - DNA, 25 bp, Homo sapien
gatatcagtagctggtggaaaggcc

SEQ ID NO: 1230760 - DNA, 25 bp, Homo sapien
ttgtagcgccgaactcatgagggac

SEQ ID NO: 1230761 - DNA, 25 bp, Homo sapien
tagtgatatgttcatttgatacttc

SEQ ID NO: 1230762 - DNA, 25 bp, Homo sapien
gagggacagctctagtgatatgttc

SEQ ID NO: 1230763 - DNA, 25 bp, Homo sapien
ttttgtatgtcttgtagcgccgaac

SEQ ID NO: 1230764 - DNA, 25 bp, Homo sapien
ggcgttaatgtgtagcatgcagatc

SEQ ID NO: 1230765 - DNA, 25 bp, Homo sapien
tgggcgttaatgtgtagcatgcaga

SEQ ID NO: 1230766 - DNA, 25 bp, Homo sapien
gatgggcgttaatgtgtagcatgca

SEQ ID NO: 1230767 - DNA, 25 bp, Homo sapien
ctgatgggcgttaatgtgtagcatg

SEQ ID NO: 1230768 - DNA, 25 bp, Homo sapien
tgcaagcatgtgatggctgaggaca

SEQ ID NO: 1230769 - DNA, 25 bp, Homo sapien
taattgctagatgagatgttttgcc

SEQ ID NO: 1230770 - DNA, 25 bp, Homo sapien
tgaggacagagtcttgatgataatt

SEQ ID NO: 1230771 - DNA, 25 bp, Homo sapien
catgcaagcatgtgatggctgagga

SEQ ID NO: 1230772 - DNA, 25 bp, Homo sapien
tatgaagctgacagcagtaatagca

SEQ ID NO: 1230773 - DNA, 25 bp, Homo sapien
gaatgacaatgctgtcaagagggtg

SEQ ID NO: 1230774 - DNA, 25 bp, Homo sapien
caagagggtgacaatgagaatatga

SEQ ID NO: 1230775 - DNA, 25 bp, Homo sapien
agcagtaatagcaaggggtctctct

SEQ ID NO: 1230776 - DNA, 25 bp, Homo sapien
ccaatacactttcggactcccagga

SEQ ID NO: 1230777 - DNA, 25 bp, Homo sapien
cagaagctggaggaataatcattgt

SEQ ID NO: 1230778 - DNA, 25 bp, Homo sapien
ccttggcaaagtctacagaagctgg

SEQ ID NO: 1230779 - DNA, 25 bp, Homo sapien
tttcaagaaaaatcctatcacggcc

SEQ ID NO: 1230780 - DNA, 25 bp, Homo sapien
ctgggaggatgtgcatttccgctgc

SEQ ID NO: 1230781 - DNA, 25 bp, Homo sapien
ctcatctgaatgtgggctccggaac

SEQ ID NO: 1230782 - DNA, 25 bp, Homo sapien
gagaggtctgtgcaggctcatctga

SEQ ID NO: 1230783 - DNA, 25 bp, Homo sapien
catttccgctgccatgtagcaggcc

SEQ ID NO: 1230784 - DNA, 25 bp, Homo sapien
gtggagagaagagcacagaaccttg

SEQ ID NO: 1230785 - DNA, 25 bp, Homo sapien
gagaagagcacagaaccttgaggca

SEQ ID NO: 1230786 - DNA, 25 bp, Homo sapien
gagagaagagcacagaaccttgagg

SEQ ID NO: 1230787 - DNA, 25 bp, Homo sapien
agaagagcacagaaccttgaggcat

SEQ ID NO: 1230788 - DNA, 25 bp, Homo sapien
gagttggtgcattccacagggtgta

SEQ ID NO: 1230789 - DNA, 25 bp, Homo sapien
aagttggagttctatgagttggtgc

SEQ ID NO: 1230790 - DNA, 25 bp, Homo sapien
gagttctatgagttggtgcattcca

SEQ ID NO: 1230791 - DNA, 25 bp, Homo sapien
ctgcatagatgaaagttggagttct

SEQ ID NO: 1230792 - DNA, 25 bp, Homo sapien
ctgagtgccatgctgatttttatgc

SEQ ID NO: 1230793 - DNA, 25 bp, Homo sapien
gagtgccatgctgatttttatgcaa

SEQ ID NO: 1230794 - DNA, 25 bp, Homo sapien
agtgccatgctgatttttatgcaaa

SEQ ID NO: 1230795 - DNA, 25 bp, Homo sapien
gtgccatgctgatttttatgcaaag

SEQ ID NO: 1230796 - DNA, 25 bp, Homo sapien
ttttcagtttcagacaggctcgggg

SEQ ID NO: 1230797 - DNA, 25 bp, Homo sapien
tcagtttcagacaggctcggggaac

SEQ ID NO: 1230798 - DNA, 25 bp, Homo sapien
catctgttggtgattccaccagaat

SEQ ID NO: 1230799 - DNA, 25 bp, Homo sapien
tttcagacaggctcggggaacctct

SEQ ID NO: 1230800 - DNA, 25 bp, Homo sapien
gctgccaccatatactaagtggata

SEQ ID NO: 1230801 - DNA, 25 bp, Homo sapien
tttctctaggtaggacctgtgtccc

SEQ ID NO: 1230802 - DNA, 25 bp, Homo sapien
ggatatgtctgatggaattctttct

SEQ ID NO: 1230803 - DNA, 25 bp, Homo sapien
tgtgtcccacaattctttggcatct

SEQ ID NO: 1230804 - DNA, 25 bp, Homo sapien
ttgtggtcccattgccgcctctcct

SEQ ID NO: 1230805 - DNA, 25 bp, Homo sapien
ttggcaatacctcggagctggatgg

SEQ ID NO: 1230806 - DNA, 25 bp, Homo sapien
gggcaaccttctggtgccaaagaag

SEQ ID NO: 1230807 - DNA, 25 bp, Homo sapien
gccaaagaagctgccctggcaaaat

SEQ ID NO: 1230808 - DNA, 25 bp, Homo sapien
tcagaatgggacctgcctgtccatc

SEQ ID NO: 1230809 - DNA, 25 bp, Homo sapien
ctgcctgtccatcgggaccaactga

SEQ ID NO: 1230810 - DNA, 25 bp, Homo sapien
agggcaacagagcccatcccttatc

SEQ ID NO: 1230811 - DNA, 25 bp, Homo sapien
ccacttctcatagtggtgtttatta

SEQ ID NO: 1230812 - DNA, 25 bp, Homo sapien
gacgccaaatggataaggacttcag

SEQ ID NO: 1230813 - DNA, 25 bp, Homo sapien
caagacgccaaatggataaggactt

SEQ ID NO: 1230814 - DNA, 25 bp, Homo sapien
caaatggataaggacttcagagaag

SEQ ID NO: 1230815 - DNA, 25 bp, Homo sapien
cgccaaatggataaggacttcagag

SEQ ID NO: 1230816 - DNA, 25 bp, Homo sapien
cgctgcggggctttgtggccataac

SEQ ID NO: 1230817 - DNA, 25 bp, Homo sapien
tgccctgtgggaccatgccagctgc

SEQ ID NO: 1230818 - DNA, 25 bp, Homo sapien
tgtgagatcctggaccaaatagaat

SEQ ID NO: 1230819 - DNA, 25 bp, Homo sapien
gctttgtggccataacggtgccctg

SEQ ID NO: 1230820 - DNA, 25 bp, Homo sapien
ggattattgccctaccttgagccta

SEQ ID NO: 1230821 - DNA, 25 bp, Homo sapien
caggagatcccagctagctgtgctt

SEQ ID NO: 1230822 - DNA, 25 bp, Homo sapien
ttgggaaggaatctcatgcttagct

SEQ ID NO: 1230823 - DNA, 25 bp, Homo sapien
taggccctgagatggcaggagatcc

SEQ ID NO: 1230824 - DNA, 25 bp, Homo sapien
gggcatagcatgctgtccaaggaca

SEQ ID NO: 1230825 - DNA, 25 bp, Homo sapien
cattccatggcttttccgggttcac

SEQ ID NO: 1230826 - DNA, 25 bp, Homo sapien
gcatgaagcaccgaaccatggttga

SEQ ID NO: 1230827 - DNA, 25 bp, Homo sapien
ccgggttcacaaatgcacaaggaga

SEQ ID NO: 1230828 - DNA, 25 bp, Homo sapien
gaaggtttgataacctcgtgctggg

SEQ ID NO: 1230829 - DNA, 25 bp, Homo sapien
gggcattgctgcagtctgcgaatcc

SEQ ID NO: 1230830 - DNA, 25 bp, Homo sapien
aagaactatgaatggacttctttct

SEQ ID NO: 1230831 - DNA, 25 bp, Homo sapien
gaatccagaagatcacttgcagtct

SEQ ID NO: 1230832 - DNA, 25 bp, Homo sapien
aatatcgagaatctacgaagaactc

SEQ ID NO: 1230833 - DNA, 25 bp, Homo sapien
atatcgagaatctacgaagaactca

SEQ ID NO: 1230834 - DNA, 25 bp, Homo sapien
gttccgatgtgaggcctggcgctgt

SEQ ID NO: 1230835 - DNA, 25 bp, Homo sapien
ttgtgagctgtgtatgtcaggttcc

SEQ ID NO: 1230836 - DNA, 25 bp, Homo sapien
cccttctgaattggattttgtgagc

SEQ ID NO: 1230837 - DNA, 25 bp, Homo sapien
tgtggaggttccaatggccgccatg

SEQ ID NO: 1230838 - DNA, 25 bp, Homo sapien
tgagttgctgggaatgcgttgcacc

SEQ ID NO: 1230839 - DNA, 25 bp, Homo sapien
tagaggaatttcagtcattggaaag

SEQ ID NO: 1230840 - DNA, 25 bp, Homo sapien
aaagacttggccctgtaagactgag

SEQ ID NO: 1230841 - DNA, 25 bp, Homo sapien
tgtttttgatgaccacttgggacat

SEQ ID NO: 1230842 - DNA, 25 bp, Homo sapien
gagagagtgtaattactgaatggcc

SEQ ID NO: 1230843 - DNA, 25 bp, Homo sapien
taagtctaagcagattcagtaatgc

SEQ ID NO: 1230844 - DNA, 25 bp, Homo sapien
attttccctagtgctatcattgtag

SEQ ID NO: 1230845 - DNA, 25 bp, Homo sapien
ttactgaatggccattcattacaga

SEQ ID NO: 1230846 - DNA, 25 bp, Homo sapien
ccatagagtagacatagggtggaga

SEQ ID NO: 1230847 - DNA, 25 bp, Homo sapien
actattactggggagaaggatacca

SEQ ID NO: 1230848 - DNA, 25 bp, Homo sapien
caaggtcccaggtggaaggttgact

SEQ ID NO: 1230849 - DNA, 25 bp, Homo sapien
gagcaggcttgtagaggagatggtg

SEQ ID NO: 1230850 - DNA, 25 bp, Homo sapien
ccctgtgcaggggtcctcactttta

SEQ ID NO: 1230851 - DNA, 25 bp, Homo sapien
tgccctgtgcaggggtcctcacttt

SEQ ID NO: 1230852 - DNA, 25 bp, Homo sapien
caggggtcctcacttttaggcttca

SEQ ID NO: 1230853 - DNA, 25 bp, Homo sapien
tgtgcaggggtcctcacttttaggc

SEQ ID NO: 1230854 - DNA, 25 bp, Homo sapien
taatgactattacagaaggtctcac

SEQ ID NO: 1230855 - DNA, 25 bp, Homo sapien
ctaatgactattacagaaggtctca

SEQ ID NO: 1230856 - DNA, 25 bp, Homo sapien
ggtgtaggtgagctgtctgacattc

SEQ ID NO: 1230857 - DNA, 25 bp, Homo sapien
catctgcatgaagggataaactgtg

SEQ ID NO: 1230858 - DNA, 25 bp, Homo sapien
ctctccaggtcgacacatgtgtgct

SEQ ID NO: 1230859 - DNA, 25 bp, Homo sapien
gacctagcagcaggattaagtgtgc

SEQ ID NO: 1230860 - DNA, 25 bp, Homo sapien
cacagcgatgaaaatgcttcatcat

SEQ ID NO: 1230861 - DNA, 25 bp, Homo sapien
ggaacaacactgacgtgtgtcaaag

SEQ ID NO: 1230862 - DNA, 25 bp, Homo sapien
gatggggtactgaatcgacaggaac

SEQ ID NO: 1230863 - DNA, 25 bp, Homo sapien
gatgaaaatgcttcatcatgcctct

SEQ ID NO: 1230864 - DNA, 25 bp, Homo sapien
aataggggtggaagagcgatccctt

SEQ ID NO: 1230865 - DNA, 25 bp, Homo sapien
ttggggtgggagacttaatgccagg

SEQ ID NO: 1230866 - DNA, 25 bp, Homo sapien
ggaataggggtggaagagcgatccc

SEQ ID NO: 1230867 - DNA, 25 bp, Homo sapien
gtgggagacttaatgccaggttctg

SEQ ID NO: 1230868 - DNA, 25 bp, Homo sapien
ctggtgtgttctgagaatagagcag

SEQ ID NO: 1230869 - DNA, 25 bp, Homo sapien
gtgttctgagaatagagcagcttca

SEQ ID NO: 1230870 - DNA, 25 bp, Homo sapien
tgtgttctgagaatagagcagcttc

SEQ ID NO: 1230871 - DNA, 25 bp, Homo sapien
ggtgtgttctgagaatagagcagct

SEQ ID NO: 1230872 - DNA, 25 bp, Homo sapien
gccgagaggacgctcctgtcctaga

SEQ ID NO: 1230873 - DNA, 25 bp, Homo sapien
tggtcagtaggtggcgctaagtcat

SEQ ID NO: 1230874 - DNA, 25 bp, Homo sapien
ctgtcctagacctgagttactgtca

SEQ ID NO: 1230875 - DNA, 25 bp, Homo sapien
tcaccgtggttgctgaacgtggccg

SEQ ID NO: 1230876 - DNA, 25 bp, Homo sapien
catgagagcagagggtgagcacaca

SEQ ID NO: 1230877 - DNA, 25 bp, Homo sapien
gcagagggtgagcacacaaggccct

SEQ ID NO: 1230878 - DNA, 25 bp, Homo sapien
ttccatgagagcagagggtgagcac

SEQ ID NO: 1230879 - DNA, 25 bp, Homo sapien
gagcagagggtgagcacacaaggcc

SEQ ID NO: 1230880 - DNA, 25 bp, Homo sapien
ctttcacacattccacttgccccat

SEQ ID NO: 1230881 - DNA, 25 bp, Homo sapien
agcgaggatcgaactcgcgacccct

SEQ ID NO: 1230882 - DNA, 25 bp, Homo sapien
tgctctaaccactgagctatggagc

SEQ ID NO: 1230883 - DNA, 25 bp, Homo sapien
caagaccagtgctctaaccactgag

SEQ ID NO: 1230884 - DNA, 25 bp, Homo sapien
aggccccagcgaggatcgaactcgc

SEQ ID NO: 1230885 - DNA, 25 bp, Homo sapien
gagcctccaattccagtactccggc

SEQ ID NO: 1230886 - DNA, 25 bp, Homo sapien
ggagcctccaattccagtactccgg

SEQ ID NO: 1230887 - DNA, 25 bp, Homo sapien
tgttagccagcagccgagttgacgg

SEQ ID NO: 1230888 - DNA, 25 bp, Homo sapien
tgcctgtgtgcaggacgttgaatac

SEQ ID NO: 1230889 - DNA, 25 bp, Homo sapien
cagcagccgagttgacggccaaggc

SEQ ID NO: 1230890 - DNA, 25 bp, Homo sapien
tgcaggacgttgaatacgagcccat

SEQ ID NO: 1230891 - DNA, 25 bp, Homo sapien
ctagcctccggtgaggcgatgggga

SEQ ID NO: 1230892 - DNA, 25 bp, Homo sapien
agcctccggtgaggcgatggggagc

SEQ ID NO: 1230893 - DNA, 25 bp, Homo sapien
tagcctccggtgaggcgatggggag

SEQ ID NO: 1230894 - DNA, 25 bp, Homo sapien
ggccacagagtgaccttccacattc

SEQ ID NO: 1230895 - DNA, 25 bp, Homo sapien
ggggaacacggccacagagtgacct

SEQ ID NO: 1230896 - DNA, 25 bp, Homo sapien
ggaacacggccacagagtgaccttc

SEQ ID NO: 1230897 - DNA, 25 bp, Homo sapien
acggccacagagtgaccttccacat

SEQ ID NO: 1230898 - DNA, 25 bp, Homo sapien
ctggtggacgcttatgagcaacagc

SEQ ID NO: 1230899 - DNA, 25 bp, Homo sapien
agctgccaacttggcaggttgtttt

SEQ ID NO: 1230900 - DNA, 25 bp, Homo sapien
tggacgcttatgagcaacagctgcc

SEQ ID NO: 1230901 - DNA, 25 bp, Homo sapien
tgactggcaggttgctgggcctcat

SEQ ID NO: 1230902 - DNA, 25 bp, Homo sapien
ggccgcccagggtcaacactccctg

SEQ ID NO: 1230903 - DNA, 25 bp, Homo sapien
cgcccagggtcaacactccctgtcc

SEQ ID NO: 1230904 - DNA, 25 bp, Homo sapien
caaagtgtgtggggttgcgggccct

SEQ ID NO: 1230905 - DNA, 25 bp, Homo sapien
ccagggtcaacactccctgtcccac

SEQ ID NO: 1230906 - DNA, 25 bp, Homo sapien
gccgcttgctgaagatcatgaccgg

SEQ ID NO: 1230907 - DNA, 25 bp, Homo sapien
agtcctgttccttgcgcaggcactg

SEQ ID NO: 1230908 - DNA, 25 bp, Homo sapien
ctgttccttgcgcaggcactgaggg

SEQ ID NO: 1230909 - DNA, 25 bp, Homo sapien
ttgctgaagatcatgaccggcactc

SEQ ID NO: 1230910 - DNA, 25 bp, Homo sapien
tctggctgatggtccggttatagtg

SEQ ID NO: 1230911 - DNA, 25 bp, Homo sapien
gctgatggtccggttatagtggttg

SEQ ID NO: 1230912 - DNA, 25 bp, Homo sapien
tgatggtccggttatagtggttggg

SEQ ID NO: 1230913 - DNA, 25 bp, Homo sapien
catctggctgatggtccggttatag

SEQ ID NO: 1230914 - DNA, 25 bp, Homo sapien
tgcctgtctctgatatgctccgctc

SEQ ID NO: 1230915 - DNA, 25 bp, Homo sapien
cagtgcctgtctctgatatgctccg

SEQ ID NO: 1230916 - DNA, 25 bp, Homo sapien
tgtctctgatatgctccgctcccac

SEQ ID NO: 1230917 - DNA, 25 bp, Homo sapien
cccacgagcccttgttacactcctg

SEQ ID NO: 1230918 - DNA, 25 bp, Homo sapien
gtgcagccgttctgccccacagaag

SEQ ID NO: 1230919 - DNA, 25 bp, Homo sapien
cttggtatccgagctctggagtgtt

SEQ ID NO: 1230920 - DNA, 25 bp, Homo sapien
tccttggtatccgagctctggagtg

SEQ ID NO: 1230921 - DNA, 25 bp, Homo sapien
tggtatccgagctctggagtgtttg

SEQ ID NO: 1230922 - DNA, 25 bp, Homo sapien
ccgctgtgggagaaggcttgggcca

SEQ ID NO: 1230923 - DNA, 25 bp, Homo sapien
ttgggccaggctgagccaggtttcc

SEQ ID NO: 1230924 - DNA, 25 bp, Homo sapien
cccgctgtgggagaaggcttgggcc

SEQ ID NO: 1230925 - DNA, 25 bp, Homo sapien
ggcttgggccaggctgagccaggtt

SEQ ID NO: 1230926 - DNA, 25 bp, Homo sapien
ctgtgtcagttcccgtagtgcctga

SEQ ID NO: 1230927 - DNA, 25 bp, Homo sapien
ttcccgtagtgcctgacggtctatt

SEQ ID NO: 1230928 - DNA, 25 bp, Homo sapien
ccgtagtgcctgacggtctatttcc

SEQ ID NO: 1230929 - DNA, 25 bp, Homo sapien
tcagttcccgtagtgcctgacggtc

SEQ ID NO: 1230930 - DNA, 25 bp, Homo sapien
ctcgtcactcgctatgtcctcactg

SEQ ID NO: 1230931 - DNA, 25 bp, Homo sapien
gtgtgctcctcgtcactcgctatgt

SEQ ID NO: 1230932 - DNA, 25 bp, Homo sapien
ctcctcgtcactcgctatgtcctca

SEQ ID NO: 1230933 - DNA, 25 bp, Homo sapien
atgaccgtgtgctcctcgtcactcg

SEQ ID NO: 1230934 - DNA, 25 bp, Homo sapien
aggaggaagcatccgagtatgtgta

SEQ ID NO: 1230935 - DNA, 25 bp, Homo sapien
aggaagcatccgagtatgtgtagga

SEQ ID NO: 1230936 - DNA, 25 bp, Homo sapien
aggacagggtgggaccatagacttt

SEQ ID NO: 1230937 - DNA, 25 bp, Homo sapien
aggaggacagggtgggaccatagac

SEQ ID NO: 1230938 - DNA, 25 bp, Homo sapien
gggtcatagggggcccgctctgctg

SEQ ID NO: 1230939 - DNA, 25 bp, Homo sapien
aggaaacaggtcaccttggaaggcg

SEQ ID NO: 1230940 - DNA, 25 bp, Homo sapien
ccatccccaggggtaggggtcatag

SEQ ID NO: 1230941 - DNA, 25 bp, Homo sapien
gtcaccttggaaggcgtccctgggc

SEQ ID NO: 1230942 - DNA, 25 bp, Homo sapien
agggccggcactggtccagggcgcg

SEQ ID NO: 1230943 - DNA, 25 bp, Homo sapien
ggcactggtccagggcgcgtgcagt

SEQ ID NO: 1230944 - DNA, 25 bp, Homo sapien
ctgagcctgtcctcggcttctccac

SEQ ID NO: 1230945 - DNA, 25 bp, Homo sapien
ccagggcgcgtgcagtgaagaggac

SEQ ID NO: 1230946 - DNA, 25 bp, Homo sapien
aggggaagatgtgtgcatagtgggc

SEQ ID NO: 1230947 - DNA, 25 bp, Homo sapien
tggaggggaagatgtgtgcatagtg

SEQ ID NO: 1230948 - DNA, 25 bp, Homo sapien
gaggggaagatgtgtgcatagtggg

SEQ ID NO: 1230949 - DNA, 25 bp, Homo sapien
cttggaggggaagatgtgtgcatag

SEQ ID NO: 1230950 - DNA, 25 bp, Homo sapien
ccagggcagcgtcaagagtctgagc

SEQ ID NO: 1230951 - DNA, 25 bp, Homo sapien
gccagggcagcgtcaagagtctgag

SEQ ID NO: 1230952 - DNA, 25 bp, Homo sapien
gaagatcatgcagtcatcagtccca

SEQ ID NO: 1230953 - DNA, 25 bp, Homo sapien
agaagatcatgcagtcatcagtccc

SEQ ID NO: 1230954 - DNA, 25 bp, Homo sapien
gtcctgggatcttctttggggtcgc

SEQ ID NO: 1230955 - DNA, 25 bp, Homo sapien
tctcaggggatactgtgagtcctgg

SEQ ID NO: 1230956 - DNA, 25 bp, Homo sapien
atcttctttggggtcgcccacctgc

SEQ ID NO: 1230957 - DNA, 25 bp, Homo sapien
tgggatcttctttggggtcgcccac

SEQ ID NO: 1230958 - DNA, 25 bp, Homo sapien
actgcccagctttcccctggcacag

SEQ ID NO: 1230959 - DNA, 25 bp, Homo sapien
gaactacccctagtccacaggcgct

SEQ ID NO: 1230960 - DNA, 25 bp, Homo sapien
gaaactgcccagctttcccctggca

SEQ ID NO: 1230961 - DNA, 25 bp, Homo sapien
acccctagtccacaggcgcttccct

SEQ ID NO: 1230962 - DNA, 25 bp, Homo sapien
aacaggtttaatgacggtcatggca

SEQ ID NO: 1230963 - DNA, 25 bp, Homo sapien
tttaatgacggtcatggcaactttt

SEQ ID NO: 1230964 - DNA, 25 bp, Homo sapien
acaatgaaaaatatcgcccatgatc

SEQ ID NO: 1230965 - DNA, 25 bp, Homo sapien
aaaaatatcgcccatgatcaacgtg

SEQ ID NO: 1230966 - DNA, 25 bp, Homo sapien
aatggtctccggtcggtgggctcct

SEQ ID NO: 1230967 - DNA, 25 bp, Homo sapien
tgcaggccccaaatggtctccggtc

SEQ ID NO: 1230968 - DNA, 25 bp, Homo sapien
tgggctcctccatgccaagcttggg

SEQ ID NO: 1230969 - DNA, 25 bp, Homo sapien
aggatgagctcctgccctccgatgg

SEQ ID NO: 1230970 - DNA, 25 bp, Homo sapien
atgtcatgtcacaacatactgccgc

SEQ ID NO: 1230971 - DNA, 25 bp, Homo sapien
tcatgtcacaacatactgccgctgc

SEQ ID NO: 1230972 - DNA, 25 bp, Homo sapien
ccaaggtatgtcatgtcacaacata

SEQ ID NO: 1230973 - DNA, 25 bp, Homo sapien
tccaaggtatgtcatgtcacaacat

SEQ ID NO: 1230974 - DNA, 25 bp, Homo sapien
ccatggataagtaaaggctgacccc

SEQ ID NO: 1230975 - DNA, 25 bp, Homo sapien
gagtaagcggatcccgttcagacca

SEQ ID NO: 1230976 - DNA, 25 bp, Homo sapien
tgcccgtgagaaccaagagtaagcg

SEQ ID NO: 1230977 - DNA, 25 bp, Homo sapien
gtgcaaatacaagccagtgcccgtg

SEQ ID NO: 1230978 - DNA, 25 bp, Homo sapien
ctgcttctttgcctatctgtctcag

SEQ ID NO: 1230979 - DNA, 25 bp, Homo sapien
aggcaaaagccacaataccacttcc

SEQ ID NO: 1230980 - DNA, 25 bp, Homo sapien
tctcagaggctgaccaacctccacc

SEQ ID NO: 1230981 - DNA, 25 bp, Homo sapien
acttcccacttgagaggtggttggg

SEQ ID NO: 1230982 - DNA, 25 bp, Homo sapien
gaatcagggtaaacaggctttacag

SEQ ID NO: 1230983 - DNA, 25 bp, Homo sapien
cccagtagcttgtggcacccagcta

SEQ ID NO: 1230984 - DNA, 25 bp, Homo sapien
cggccccatcctttttacatataga

SEQ ID NO: 1230985 - DNA, 25 bp, Homo sapien
taagtactcctgttcaattatctgg

SEQ ID NO: 1230986 - DNA, 25 bp, Homo sapien
tattgcttccctaatgtcctgagga

SEQ ID NO: 1230987 - DNA, 25 bp, Homo sapien
gagtctcatggaagggacggtaccc

SEQ ID NO: 1230988 - DNA, 25 bp, Homo sapien
tccattctaactgtcactcagccat

SEQ ID NO: 1230989 - DNA, 25 bp, Homo sapien
tgaggaacgactatctcaaccgcca

SEQ ID NO: 1230990 - DNA, 25 bp, Homo sapien
tggacttcatctgcgtttcaaacag

SEQ ID NO: 1230991 - DNA, 25 bp, Homo sapien
gcttttgccagtaaggaaattcaag

SEQ ID NO: 1230992 - DNA, 25 bp, Homo sapien
aatgtccccattggcctacaccttg

SEQ ID NO: 1230993 - DNA, 25 bp, Homo sapien
gttagctcaagtgccaaatgtcccc

SEQ ID NO: 1230994 - DNA, 25 bp, Homo sapien
ggccgcgcgctgcctaaatacctaa

SEQ ID NO: 1230995 - DNA, 25 bp, Homo sapien
cagaagtcacttccggggtcgaggc

SEQ ID NO: 1230996 - DNA, 25 bp, Homo sapien
ctgcagcaggaggagttacgagccg

SEQ ID NO: 1230997 - DNA, 25 bp, Homo sapien
gaggccaacgatacgcctgctgcag

SEQ ID NO: 1230998 - DNA, 25 bp, Homo sapien
tcatgaaagttgacccagacgggtc

SEQ ID NO: 1230999 - DNA, 25 bp, Homo sapien
caagctcgcaatgaaaaggctatgc

SEQ ID NO: 1231000 - DNA, 25 bp, Homo sapien
tgtggagaaggcagtcgaaccaatt

SEQ ID NO: 1231001 - DNA, 25 bp, Homo sapien
cagacgggtccgcagaacaactttt

SEQ ID NO: 1231002 - DNA, 25 bp, Homo sapien
actgtctccagcaggatagactggt

SEQ ID NO: 1231003 - DNA, 25 bp, Homo sapien
cttctttttgtagctgctcagagta

SEQ ID NO: 1231004 - DNA, 25 bp, Homo sapien
ctgtctccagcaggatagactggtc

SEQ ID NO: 1231005 - DNA, 25 bp, Homo sapien
tgtctccagcaggatagactggtct

SEQ ID NO: 1231006 - DNA, 25 bp, Homo sapien
aaacaatcaatacaatatagaagat

SEQ ID NO: 1231007 - DNA, 25 bp, Homo sapien
attcacagccatagtttaagtttta

SEQ ID NO: 1231008 - DNA, 25 bp, Homo sapien
ctgaagacaactattaaccacctta

SEQ ID NO: 1231009 - DNA, 25 bp, Homo sapien
actaaagtaagtggcaaattcacag

SEQ ID NO: 1231010 - DNA, 25 bp, Homo sapien
tacgggcttatcagtagattggaca

SEQ ID NO: 1231011 - DNA, 25 bp, Homo sapien
gagtcataataaacgggatatcagc

SEQ ID NO: 1231012 - DNA, 25 bp, Homo sapien
tggacaaatctaggaaactcagtga

SEQ ID NO: 1231013 - DNA, 25 bp, Homo sapien
catagcaatatgcagtggtcttaca

SEQ ID NO: 1231014 - DNA, 25 bp, Homo sapien
tccgagaaccgccggccagtgctgg

SEQ ID NO: 1231015 - DNA, 25 bp, Homo sapien
cggagcacgagcagccagacgagca

SEQ ID NO: 1231016 - DNA, 25 bp, Homo sapien
tcgtcgtccgcgcagagtttgtgct

SEQ ID NO: 1231017 - DNA, 25 bp, Homo sapien
tgctgcattcgtcgtccgcgcagag

SEQ ID NO: 1231018 - DNA, 25 bp, Homo sapien
tccaagcacagaaacgacaggattg

SEQ ID NO: 1231019 - DNA, 25 bp, Homo sapien
tcaaaaggcggtacaagcccaaatc

SEQ ID NO: 1231020 - DNA, 25 bp, Homo sapien
aaataaaacgctggcaacaagtggg

SEQ ID NO: 1231021 - DNA, 25 bp, Homo sapien
gcagagacctcggaatacaatgagt

SEQ ID NO: 1231022 - DNA, 25 bp, Homo sapien
cttcatctgagcctgaagatctgtg

SEQ ID NO: 1231023 - DNA, 25 bp, Homo sapien
tcttcatctgagcctgaagatctgt

SEQ ID NO: 1231024 - DNA, 25 bp, Homo sapien
ccagactggagagcaattccgcttc

SEQ ID NO: 1231025 - DNA, 25 bp, Homo sapien
ttcatctgagcctgaagatctgtgc

SEQ ID NO: 1231026 - DNA, 25 bp, Homo sapien
aaaaccgtttctgcagtggctatca

SEQ ID NO: 1231027 - DNA, 25 bp, Homo sapien
agaggtttcaacacgcaagcggcta

SEQ ID NO: 1231028 - DNA, 25 bp, Homo sapien
taaaatgatcctggtccggcgaaca

SEQ ID NO: 1231029 - DNA, 25 bp, Homo sapien
tagctaaaccatagagttcttggcc

SEQ ID NO: 1231030 - DNA, 25 bp, Homo sapien
caatccgggcctgtgaaatcttcaa

SEQ ID NO: 1231031 - DNA, 25 bp, Homo sapien
tcaagagcctcaccgcggtacatta

SEQ ID NO: 1231032 - DNA, 25 bp, Homo sapien
gtaaacatatacaggatcacctttt

SEQ ID NO: 1231033 - DNA, 25 bp, Homo sapien
ttcacaaaacgacaatccgggcctg

SEQ ID NO: 1231034 - DNA, 25 bp, Homo sapien
tcatgaactacctggattaaatctt

SEQ ID NO: 1231035 - DNA, 25 bp, Homo sapien
gaaaatatccaaaagtgcgtccaac

SEQ ID NO: 1231036 - DNA, 25 bp, Homo sapien
tttggtatattcatgaactacctgg

SEQ ID NO: 1231037 - DNA, 25 bp, Homo sapien
gaacttgtagctcttctttggtata

SEQ ID NO: 1231038 - DNA, 25 bp, Homo sapien
gattcaaatgaagcctgctctccct

SEQ ID NO: 1231039 - DNA, 25 bp, Homo sapien
aagaccatcatctacattgtcaggg

SEQ ID NO: 1231040 - DNA, 25 bp, Homo sapien
tgacaatagagaagatagtgtcccc

SEQ ID NO: 1231041 - DNA, 25 bp, Homo sapien
ggatatttctcaacgccagactttg

SEQ ID NO: 1231042 - DNA, 25 bp, Homo sapien
gagtggtgcactacccagggattcc

SEQ ID NO: 1231043 - DNA, 25 bp, Homo sapien
gatgctccactgaaagcgtgtgcag

SEQ ID NO: 1231044 - DNA, 25 bp, Homo sapien
tgtctttacccttttcagcagctgg

SEQ ID NO: 1231045 - DNA, 25 bp, Homo sapien
cagaatgggaacctcgtcttccagt

SEQ ID NO: 1231046 - DNA, 25 bp, Homo sapien
tattttcagccacacgagtatcaag

SEQ ID NO: 1231047 - DNA, 25 bp, Homo sapien
tatgccctggctctacacttgtatg

SEQ ID NO: 1231048 - DNA, 25 bp, Homo sapien
gaagcacggaagaccttatctagga

SEQ ID NO: 1231049 - DNA, 25 bp, Homo sapien
ttccatattatagggcaggctctcc

SEQ ID NO: 1231050 - DNA, 25 bp, Homo sapien
tccaagtgggtgggttcttcaggaa

SEQ ID NO: 1231051 - DNA, 25 bp, Homo sapien
gtccccaatcacacgttggtccaag

SEQ ID NO: 1231052 - DNA, 25 bp, Homo sapien
tgagtgtccccaatcacacgttggt

SEQ ID NO: 1231053 - DNA, 25 bp, Homo sapien
caatcacacgttggtccaagtgggt

SEQ ID NO: 1231054 - DNA, 25 bp, Homo sapien
caaaggtgtgacacttgccggctct

SEQ ID NO: 1231055 - DNA, 25 bp, Homo sapien
tgcatcaatagcatccataggagtg

SEQ ID NO: 1231056 - DNA, 25 bp, Homo sapien
ttgccggctcttcggcggctgtctc

SEQ ID NO: 1231057 - DNA, 25 bp, Homo sapien
agaaggattgcgttttccaaaggtg

SEQ ID NO: 1231058 - DNA, 25 bp, Homo sapien
ctctcctggctaaactgaaaggtcc

SEQ ID NO: 1231059 - DNA, 25 bp, Homo sapien
tacatttcaagtgactgtctttctc

SEQ ID NO: 1231060 - DNA, 25 bp, Homo sapien
ttacatttcaagtgactgtctttct

SEQ ID NO: 1231061 - DNA, 25 bp, Homo sapien
tttctctcctggctaaactgaaagg

SEQ ID NO: 1231062 - DNA, 25 bp, Homo sapien
tgaaccaatttatgccacagattgt

SEQ ID NO: 1231063 - DNA, 25 bp, Homo sapien
ctccctccacgatgaaccaatttat

SEQ ID NO: 1231064 - DNA, 25 bp, Homo sapien
taccatcaggtaaatacttctcttc

SEQ ID NO: 1231065 - DNA, 25 bp, Homo sapien
tgccacagattgttctaccatcagg

SEQ ID NO: 1231066 - DNA, 25 bp, Homo sapien
tattcctagcacaatttctggtaca

SEQ ID NO: 1231067 - DNA, 25 bp, Homo sapien
ttttgacaatccctctcaagtcggc

SEQ ID NO: 1231068 - DNA, 25 bp, Homo sapien
aacactgcgcccttatatcttgcca

SEQ ID NO: 1231069 - DNA, 25 bp, Homo sapien
caagtcggcatcttataacactgcg

SEQ ID NO: 1231070 - DNA, 25 bp, Homo sapien
ggtgatggtcccacggattctctgc

SEQ ID NO: 1231071 - DNA, 25 bp, Homo sapien
taaacagctcctgtgtagggtaaga

SEQ ID NO: 1231072 - DNA, 25 bp, Homo sapien
tgaactgacacacaaaaaactatgg

SEQ ID NO: 1231073 - DNA, 25 bp, Homo sapien
ccagagttgtcacagggctgcaaga

SEQ ID NO: 1231074 - DNA, 25 bp, Homo sapien
ttcagtgcagggatagggaacccaa

SEQ ID NO: 1231075 - DNA, 25 bp, Homo sapien
cacacaattgtgacccctgagagaa

SEQ ID NO: 1231076 - DNA, 25 bp, Homo sapien
aaataggtgagctctacaacctccc

SEQ ID NO: 1231077 - DNA, 25 bp, Homo sapien
gagtacaccaatcttgcagaggagg

SEQ ID NO: 1231078 - DNA, 25 bp, Homo sapien
gaagtccactgtcatacatgtatat

SEQ ID NO: 1231079 - DNA, 25 bp, Homo sapien
tacatgatgcttgggctattctagg

SEQ ID NO: 1231080 - DNA, 25 bp, Homo sapien
tctgctgtcttacttactagagctt

SEQ ID NO: 1231081 - DNA, 25 bp, Homo sapien
tgtcagaagtccactgtcatacatg

SEQ ID NO: 1231082 - DNA, 25 bp, Homo sapien
tgcgctcgctgtctcacattcttgc

SEQ ID NO: 1231083 - DNA, 25 bp, Homo sapien
gctcgctgtctcacattcttgccga

SEQ ID NO: 1231084 - DNA, 25 bp, Homo sapien
tcgctgtctcacattcttgccgaca

SEQ ID NO: 1231085 - DNA, 25 bp, Homo sapien
gctgtctcacattcttgccgacact

SEQ ID NO: 1231086 - DNA, 25 bp, Homo sapien
acagcgtggaaggaccaccgctcag

SEQ ID NO: 1231087 - DNA, 25 bp, Homo sapien
ctgtcacagcgtggaaggaccaccg

SEQ ID NO: 1231088 - DNA, 25 bp, Homo sapien
ggcgccactgcagtgcgcggccttt

SEQ ID NO: 1231089 - DNA, 25 bp, Homo sapien
cgtggaaggaccaccgctcagatgg

SEQ ID NO: 1231090 - DNA, 25 bp, Homo sapien
aaagcaggtctctcgtgccggcccg

SEQ ID NO: 1231091 - DNA, 25 bp, Homo sapien
gaaaagcaggtctctcgtgccggcc

SEQ ID NO: 1231092 - DNA, 25 bp, Homo sapien
agcaggtctctcgtgccggcccgga

SEQ ID NO: 1231093 - DNA, 25 bp, Homo sapien
gagaaaagcaggtctctcgtgccgg

SEQ ID NO: 1231094 - DNA, 25 bp, Homo sapien
ggacgggagagaagagcgaataggg

SEQ ID NO: 1231095 - DNA, 25 bp, Homo sapien
gggacgggagagaagagcgaatagg

SEQ ID NO: 1231096 - DNA, 25 bp, Homo sapien
ggggacgggagagaagagcgaatag

SEQ ID NO: 1231097 - DNA, 25 bp, Homo sapien
gccactgcccctggcgcacctcaag

SEQ ID NO: 1231098 - DNA, 25 bp, Homo sapien
aggcaccaaaggagccggccggcga

SEQ ID NO: 1231099 - DNA, 25 bp, Homo sapien
aaggcaccaaaggagccggccggcg

SEQ ID NO: 1231100 - DNA, 25 bp, Homo sapien
ggcaccaaaggagccggccggcgag

SEQ ID NO: 1231101 - DNA, 25 bp, Homo sapien
tgtagaacagctgaacgcaagcgac

SEQ ID NO: 1231102 - DNA, 25 bp, Homo sapien
caattccctgcggaatggcactggg

SEQ ID NO: 1231103 - DNA, 25 bp, Homo sapien
tatgaaggctgcgtagagcacagac

SEQ ID NO: 1231104 - DNA, 25 bp, Homo sapien
cggactctgggattgaacttcgcct

SEQ ID NO: 1231105 - DNA, 25 bp, Homo sapien
ttctcctttgcacagacaatcagtg

SEQ ID NO: 1231106 - DNA, 25 bp, Homo sapien
catccacccgcctgtgacagcttgg

SEQ ID NO: 1231107 - DNA, 25 bp, Homo sapien
acagcatagaaacgtcttgctttcc

SEQ ID NO: 1231108 - DNA, 25 bp, Homo sapien
tgctttcctcggatctgacacactc

SEQ ID NO: 1231109 - DNA, 25 bp, Homo sapien
gagtgacgaaaccttctcaaacaca

SEQ ID NO: 1231110 - DNA, 25 bp, Homo sapien
aagagtgacgaaaccttctcaaaca

SEQ ID NO: 1231111 - DNA, 25 bp, Homo sapien
gctgtcacttcgtaagtactcaata

SEQ ID NO: 1231112 - DNA, 25 bp, Homo sapien
agtgctgtcacttcgtaagtactca

SEQ ID NO: 1231113 - DNA, 25 bp, Homo sapien
caagaaggcagtgataaatacaggt

SEQ ID NO: 1231114 - DNA, 25 bp, Homo sapien
aagaaaatggcaaacgaagcaattc

SEQ ID NO: 1231115 - DNA, 25 bp, Homo sapien
caaggacagttctccataagaaaat

SEQ ID NO: 1231116 - DNA, 25 bp, Homo sapien
aacgaagcaattcccaagaaggcag

SEQ ID NO: 1231117 - DNA, 25 bp, Homo sapien
ccactgtgccggctgactggttatt

SEQ ID NO: 1231118 - DNA, 25 bp, Homo sapien
tcctagttctactaacagtgtacat

SEQ ID NO: 1231119 - DNA, 25 bp, Homo sapien
tttaaggcttatcatacacatcatg

SEQ ID NO: 1231120 - DNA, 25 bp, Homo sapien
ggatcgattactagacatgacatta

SEQ ID NO: 1231121 - DNA, 25 bp, Homo sapien
cagtgctcataaacctgacagggaa

SEQ ID NO: 1231122 - DNA, 25 bp, Homo sapien
tggtctgacagataaagcactgagg

SEQ ID NO: 1231123 - DNA, 25 bp, Homo sapien
cctactcaaagttgactactggctg

SEQ ID NO: 1231124 - DNA, 25 bp, Homo sapien
tgagcaccagtcttacgaaatgagc

SEQ ID NO: 1231125 - DNA, 25 bp, Homo sapien
aaaatggcatcacttcaaatatgtc

SEQ ID NO: 1231126 - DNA, 25 bp, Homo sapien
gctcaatattcctccctgcatgaag

SEQ ID NO: 1231127 - DNA, 25 bp, Homo sapien
agcaatctgctaacaagaataagga

SEQ ID NO: 1231128 - DNA, 25 bp, Homo sapien
gcaggcgtgctgatttatatttcta

SEQ ID NO: 1231129 - DNA, 25 bp, Homo sapien
ccatccctgtggtgctattctgtga

SEQ ID NO: 1231130 - DNA, 25 bp, Homo sapien
tatacttcctatagcctgcagaaac

SEQ ID NO: 1231131 - DNA, 25 bp, Homo sapien
tacccaatgtatcagcagcaaagac

SEQ ID NO: 1231132 - DNA, 25 bp, Homo sapien
taagatggcctgctctcgctttgcc

SEQ ID NO: 1231133 - DNA, 25 bp, Homo sapien
tcaacttctcagaaatttgctgttc

SEQ ID NO: 1231134 - DNA, 25 bp, Homo sapien
ttctcagaaatttgctgttccgtga

SEQ ID NO: 1231135 - DNA, 25 bp, Homo sapien
ttgacaatttttgtacaagttctgt

SEQ ID NO: 1231136 - DNA, 25 bp, Homo sapien
aacttctcagaaatttgctgttccg

SEQ ID NO: 1231137 - DNA, 25 bp, Homo sapien
tcagagagaatcatattttgtttcc

SEQ ID NO: 1231138 - DNA, 25 bp, Homo sapien
agagaatcatattttgtttcctggt

SEQ ID NO: 1231139 - DNA, 25 bp, Homo sapien
tggtttcctgaacatgtttctttga

SEQ ID NO: 1231140 - DNA, 25 bp, Homo sapien
atatttaattgcttcatcagagaga

SEQ ID NO: 1231141 - DNA, 25 bp, Homo sapien
aagatttttagctgtgtcatccaga

SEQ ID NO: 1231142 - DNA, 25 bp, Homo sapien
ctagcataacacgaagatttttagc

SEQ ID NO: 1231143 - DNA, 25 bp, Homo sapien
tttagctgtgtcatccagaatttcc

SEQ ID NO: 1231144 - DNA, 25 bp, Homo sapien
ctcagattctagcataacacgaaga

SEQ ID NO: 1231145 - DNA, 25 bp, Homo sapien
tcctttaacttctctatagatttct

SEQ ID NO: 1231146 - DNA, 25 bp, Homo sapien
taacttctctatagatttcttgttt

SEQ ID NO: 1231147 - DNA, 25 bp, Homo sapien
ctttaacttctctatagatttcttg

SEQ ID NO: 1231148 - DNA, 25 bp, Homo sapien
tttaacttctctatagatttcttgt

SEQ ID NO: 1231149 - DNA, 25 bp, Homo sapien
ttcttgaacccgatggcattcagac

SEQ ID NO: 1231150 - DNA, 25 bp, Homo sapien
cttcactaagcttagcttcattaag

SEQ ID NO: 1231151 - DNA, 25 bp, Homo sapien
cttcttaagcctagcattttcttct

SEQ ID NO: 1231152 - DNA, 25 bp, Homo sapien
tcttcttaagcctagcattttcttc

SEQ ID NO: 1231153 - DNA, 25 bp, Homo sapien
catgattcccacaggttagggcttt

SEQ ID NO: 1231154 - DNA, 25 bp, Homo sapien
acacatgattcccacaggttagggc

SEQ ID NO: 1231155 - DNA, 25 bp, Homo sapien
tgattcccacaggttagggcttttg

SEQ ID NO: 1231156 - DNA, 25 bp, Homo sapien
gttaaaacacatgattcccacaggt

SEQ ID NO: 1231157 - DNA, 25 bp, Homo sapien
catgtaatttactccagtcttcgat

SEQ ID NO: 1231158 - DNA, 25 bp, Homo sapien
tatcatccttgtgagtaagagctac

SEQ ID NO: 1231159 - DNA, 25 bp, Homo sapien
taatattatcatccttgtgagtaag

SEQ ID NO: 1231160 - DNA, 25 bp, Homo sapien
tactccagtcttcgatttcctgctg

SEQ ID NO: 1231161 - DNA, 25 bp, Homo sapien
ttcagattcacactctaacagattc

SEQ ID NO: 1231162 - DNA, 25 bp, Homo sapien
cagattcaactgtgtaatgcagtta

SEQ ID NO: 1231163 - DNA, 25 bp, Homo sapien
gattcacactctaacagattcaact

SEQ ID NO: 1231164 - DNA, 25 bp, Homo sapien
actgtgtaatgcagttagtcaaagc

SEQ ID NO: 1231165 - DNA, 25 bp, Homo sapien
catccatcatctgcttaatttgatt

SEQ ID NO: 1231166 - DNA, 25 bp, Homo sapien
ccgagagacatccatcatctgctta

SEQ ID NO: 1231167 - DNA, 25 bp, Homo sapien
atttttcatcttctcattccggtca

SEQ ID NO: 1231168 - DNA, 25 bp, Homo sapien
tttttcatcttctcattccggtcac

SEQ ID NO: 1231169 - DNA, 25 bp, Homo sapien
tgtaaaagctttagatcctcttcaa

SEQ ID NO: 1231170 - DNA, 25 bp, Homo sapien
ggctcttagcttaagctgtaaaagc

SEQ ID NO: 1231171 - DNA, 25 bp, Homo sapien
caactaccgatattgcagtctgtgt

SEQ ID NO: 1231172 - DNA, 25 bp, Homo sapien
acacggaggctcttagcttaagctg

SEQ ID NO: 1231173 - DNA, 25 bp, Homo sapien
gatagagctcattcagaatctccac

SEQ ID NO: 1231174 - DNA, 25 bp, Homo sapien
cttctgctgatagagctcattcaga

SEQ ID NO: 1231175 - DNA, 25 bp, Homo sapien
tagtgagttgcggtcatcttccaat

SEQ ID NO: 1231176 - DNA, 25 bp, Homo sapien
cagcttgtagtgagttgcggtcatc

SEQ ID NO: 1231177 - DNA, 25 bp, Homo sapien
ccaactgtggcctgttgatacatca

SEQ ID NO: 1231178 - DNA, 25 bp, Homo sapien
ccaaggctggtaccatgataaagac

SEQ ID NO: 1231179 - DNA, 25 bp, Homo sapien
gccaggactgatcaacctaacacag

SEQ ID NO: 1231180 - DNA, 25 bp, Homo sapien
tatttctaaccatggaaagaccact

SEQ ID NO: 1231181 - DNA, 25 bp, Homo sapien
gccgttcatactcttcttgactcag

SEQ ID NO: 1231182 - DNA, 25 bp, Homo sapien
tctttcttgccgttcatactcttct

SEQ ID NO: 1231183 - DNA, 25 bp, Homo sapien
gctgacagcctgtgctctctttctt

SEQ ID NO: 1231184 - DNA, 25 bp, Homo sapien
tgacagcctgtgctctctttcttgc

SEQ ID NO: 1231185 - DNA, 25 bp, Homo sapien
ttaaatgaccgctctgtcttctgta

SEQ ID NO: 1231186 - DNA, 25 bp, Homo sapien
ctggtttttaaatgaccgctctgtc

SEQ ID NO: 1231187 - DNA, 25 bp, Homo sapien
tggtttttaaatgaccgctctgtct

SEQ ID NO: 1231188 - DNA, 25 bp, Homo sapien
tttttaaatgaccgctctgtcttct

SEQ ID NO: 1231189 - DNA, 25 bp, Homo sapien
gttatcaaagaattccgggcactat

SEQ ID NO: 1231190 - DNA, 25 bp, Homo sapien
tagcctctattagttatcaaagaat

SEQ ID NO: 1231191 - DNA, 25 bp, Homo sapien
ggcactatatagtagggcactagaa

SEQ ID NO: 1231192 - DNA, 25 bp, Homo sapien
catacagattcattataatagcctc

SEQ ID NO: 1231193 - DNA, 25 bp, Homo sapien
gagctttcttctcatgggtagcgat

SEQ ID NO: 1231194 - DNA, 25 bp, Homo sapien
atgagctttcttctcatgggtagcg

SEQ ID NO: 1231195 - DNA, 25 bp, Homo sapien
tcatgagctttcttctcatgggtag

SEQ ID NO: 1231196 - DNA, 25 bp, Homo sapien
ccagttttcatgagctttcttctca

SEQ ID NO: 1231197 - DNA, 25 bp, Homo sapien
tgtgggagactatgcacaaaataag

SEQ ID NO: 1231198 - DNA, 25 bp, Homo sapien
gtgggagactatgcacaaaataagg

SEQ ID NO: 1231199 - DNA, 25 bp, Homo sapien
tatagctctttctgcagcacgagct

SEQ ID NO: 1231200 - DNA, 25 bp, Homo sapien
ctctttctgcagcacgagctttgag

SEQ ID NO: 1231201 - DNA, 25 bp, Homo sapien
tagctctttctgcagcacgagcttt

SEQ ID NO: 1231202 - DNA, 25 bp, Homo sapien
tttctcttcagctatagctctttct

SEQ ID NO: 1231203 - DNA, 25 bp, Homo sapien
tgaaatagaaaccaattccttaaga

SEQ ID NO: 1231204 - DNA, 25 bp, Homo sapien
gagaacacgcgctgaaaatatagcc

SEQ ID NO: 1231205 - DNA, 25 bp, Homo sapien
cttaagagaacacgcgctgaaaata

SEQ ID NO: 1231206 - DNA, 25 bp, Homo sapien
gctgaaaatatagccatcaaaatcc

SEQ ID NO: 1231207 - DNA, 25 bp, Homo sapien
ctggcattggttttacaatcacagg

SEQ ID NO: 1231208 - DNA, 25 bp, Homo sapien
ttcctggcattggttttacaatcac

SEQ ID NO: 1231209 - DNA, 25 bp, Homo sapien
cctggcattggttttacaatcacag

SEQ ID NO: 1231210 - DNA, 25 bp, Homo sapien
tcctggcattggttttacaatcaca

SEQ ID NO: 1231211 - DNA, 25 bp, Homo sapien
aaagtcacttatatacattttacat

SEQ ID NO: 1231212 - DNA, 25 bp, Homo sapien
tgccctttacaaggtagctccctta

SEQ ID NO: 1231213 - DNA, 25 bp, Homo sapien
tacatcaaaaaacagattgttgccc

SEQ ID NO: 1231214 - DNA, 25 bp, Homo sapien
gggtaccataaccattacacacaga

SEQ ID NO: 1231215 - DNA, 25 bp, Homo sapien
ccactcacaggggatgggccaaaag

SEQ ID NO: 1231216 - DNA, 25 bp, Homo sapien
caaattcacttctaggcatatctct

SEQ ID NO: 1231217 - DNA, 25 bp, Homo sapien
gaggggagcattctccaccactcac

SEQ ID NO: 1231218 - DNA, 25 bp, Homo sapien
ctcttcgattgagagtagcagagag

SEQ ID NO: 1231219 - DNA, 25 bp, Homo sapien
aacatcacacggtgttttaagcgga

SEQ ID NO: 1231220 - DNA, 25 bp, Homo sapien
gatgaactgcccacatgcagattaa

SEQ ID NO: 1231221 - DNA, 25 bp, Homo sapien
gagagattatgtttactgtgataca

SEQ ID NO: 1231222 - DNA, 25 bp, Homo sapien
gctgcacactccaaactatggtata

SEQ ID NO: 1231223 - DNA, 25 bp, Homo sapien
accatcgaggatgaggtagaggccc

SEQ ID NO: 1231224 - DNA, 25 bp, Homo sapien
aggatgaggtagaggcccgtccact

SEQ ID NO: 1231225 - DNA, 25 bp, Homo sapien
tcgaggatgaggtagaggcccgtcc

SEQ ID NO: 1231226 - DNA, 25 bp, Homo sapien
gaccatcgaggatgaggtagaggcc

SEQ ID NO: 1231227 - DNA, 25 bp, Homo sapien
gaactgatgtagacttattctgact

SEQ ID NO: 1231228 - DNA, 25 bp, Homo sapien
tgtagacttattctgacttgtgtac

SEQ ID NO: 1231229 - DNA, 25 bp, Homo sapien
taaagaccagagaactgatgtagac

SEQ ID NO: 1231230 - DNA, 25 bp, Homo sapien
ctgttaaagaccagagaactgatgt

SEQ ID NO: 1231231 - DNA, 25 bp, Homo sapien
tgctgttcatcatggtagctgtacc

SEQ ID NO: 1231232 - DNA, 25 bp, Homo sapien
gccttcatcgagtaccctggtaggg

SEQ ID NO: 1231233 - DNA, 25 bp, Homo sapien
aagagcctcttgagctgctgttcat

SEQ ID NO: 1231234 - DNA, 25 bp, Homo sapien
catggtagctgtaccagatcctgga

SEQ ID NO: 1231235 - DNA, 25 bp, Homo sapien
caaagagagagttgtaggaagagct

SEQ ID NO: 1231236 - DNA, 25 bp, Homo sapien
aaatgagatagtacagatagaacac

SEQ ID NO: 1231237 - DNA, 25 bp, Homo sapien
gagagttgtaggaagagctaaatgt

SEQ ID NO: 1231238 - DNA, 25 bp, Homo sapien
gaacacacaaataggagatgaggca

SEQ ID NO: 1231239 - DNA, 25 bp, Homo sapien
tcagccaaagatgtaatgctgggaa

SEQ ID NO: 1231240 - DNA, 25 bp, Homo sapien
ctcagccaaagatgtaatgctggga

SEQ ID NO: 1231241 - DNA, 25 bp, Homo sapien
tgctactggacgctcagccaaagat

SEQ ID NO: 1231242 - DNA, 25 bp, Homo sapien
gctactggacgctcagccaaagatg

SEQ ID NO: 1231243 - DNA, 25 bp, Homo sapien
ttaaatgtctaaccaaacaggagag

SEQ ID NO: 1231244 - DNA, 25 bp, Homo sapien
aacttatagcccagttcagtccaca

SEQ ID NO: 1231245 - DNA, 25 bp, Homo sapien
taattacagttacagcagatgctct

SEQ ID NO: 1231246 - DNA, 25 bp, Homo sapien
gagaaaaggccaatgaatccgtcag

SEQ ID NO: 1231247 - DNA, 25 bp, Homo sapien
tctaaatatgcaggaacacaggcgc

SEQ ID NO: 1231248 - DNA, 25 bp, Homo sapien
gaaaggttaaaagtatgccacagga

SEQ ID NO: 1231249 - DNA, 25 bp, Homo sapien
aacccaatgaagcagatgtcaggca

SEQ ID NO: 1231250 - DNA, 25 bp, Homo sapien
catctgcaaatggaagggaacgcac

SEQ ID NO: 1231251 - DNA, 25 bp, Homo sapien
tgaggtggtggtccatatcgaatgg

SEQ ID NO: 1231252 - DNA, 25 bp, Homo sapien
gtccatatcgaatgggtggtggtac

SEQ ID NO: 1231253 - DNA, 25 bp, Homo sapien
cctcccatgggggtgctcatgagag

SEQ ID NO: 1231254 - DNA, 25 bp, Homo sapien
cgaggcccaaaaggtccgcagagct

SEQ ID NO: 1231255 - DNA, 25 bp, Homo sapien
gttacggtgtactcaatcagcttca

SEQ ID NO: 1231256 - DNA, 25 bp, Homo sapien
tagcaccctttgtgtctgaagaaac

SEQ ID NO: 1231257 - DNA, 25 bp, Homo sapien
tatccattgcagagcctagtacaca

SEQ ID NO: 1231258 - DNA, 25 bp, Homo sapien
gcaaagccccgcaattgcagttgtt

SEQ ID NO: 1231259 - DNA, 25 bp, Homo sapien
tgcctcagcctcgtctaatgaatgc

SEQ ID NO: 1231260 - DNA, 25 bp, Homo sapien
gcctcgtctaatgaatgctgggatt

SEQ ID NO: 1231261 - DNA, 25 bp, Homo sapien
aatgctgggattcataaagtgctgg

SEQ ID NO: 1231262 - DNA, 25 bp, Homo sapien
tgaatgctgggattcataaagtgct

SEQ ID NO: 1231263 - DNA, 25 bp, Homo sapien
taagtctcttacagcaggtggtggt

SEQ ID NO: 1231264 - DNA, 25 bp, Homo sapien
ttcctggtggaacgcctggtgcaaa

SEQ ID NO: 1231265 - DNA, 25 bp, Homo sapien
catctctagagcctgacggcagtaa

SEQ ID NO: 1231266 - DNA, 25 bp, Homo sapien
gaataaagtactctcttgggccaag

SEQ ID NO: 1231267 - DNA, 25 bp, Homo sapien
aatgcacagtacactttctttccaa

SEQ ID NO: 1231268 - DNA, 25 bp, Homo sapien
ttgtttggctcaaaaatgcacactg

SEQ ID NO: 1231269 - DNA, 25 bp, Homo sapien
ccaaggcagcttagttctaacaaca

SEQ ID NO: 1231270 - DNA, 25 bp, Homo sapien
tgtaatggataatgcacagtacact

SEQ ID NO: 1231271 - DNA, 25 bp, Homo sapien
tgcacatttcaaagttgtaaggacg

SEQ ID NO: 1231272 - DNA, 25 bp, Homo sapien
gcacatttcaaagttgtaaggacgc

SEQ ID NO: 1231273 - DNA, 25 bp, Homo sapien
attgcacatttcaaagttgtaagga

SEQ ID NO: 1231274 - DNA, 25 bp, Homo sapien
ttgcacatttcaaagttgtaaggac

SEQ ID NO: 1231275 - DNA, 25 bp, Homo sapien
tagcgtaacagtctttgtgaccaga

SEQ ID NO: 1231276 - DNA, 25 bp, Homo sapien
agacgtcacttgtagagttcacagg

SEQ ID NO: 1231277 - DNA, 25 bp, Homo sapien
tctgggagcctgagtttacatgttc

SEQ ID NO: 1231278 - DNA, 25 bp, Homo sapien
aacgcttataaacaccattgctccg

SEQ ID NO: 1231279 - DNA, 25 bp, Homo sapien
tatggactggctcacaacttctcag

SEQ ID NO: 1231280 - DNA, 25 bp, Homo sapien
tgatttggctgagggatgatactcc

SEQ ID NO: 1231281 - DNA, 25 bp, Homo sapien
cacaattagttggagatgacttcca

SEQ ID NO: 1231282 - DNA, 25 bp, Homo sapien
cagccattggcgatataactacaac

SEQ ID NO: 1231283 - DNA, 25 bp, Homo sapien
gctaacgagatactgcaggcataac

SEQ ID NO: 1231284 - DNA, 25 bp, Homo sapien
taagctcttcaaggagcaagaggcg

SEQ ID NO: 1231285 - DNA, 25 bp, Homo sapien
cccattaaagtgtagcaaaaccgat

SEQ ID NO: 1231286 - DNA, 25 bp, Homo sapien
caagaggcgcattttctccgtgtca

SEQ ID NO: 1231287 - DNA, 25 bp, Homo sapien
gcttagaaagtgtgccttggccaga

SEQ ID NO: 1231288 - DNA, 25 bp, Homo sapien
tgaagtggcctaaattcaccctgat

SEQ ID NO: 1231289 - DNA, 25 bp, Homo sapien
cttggccagatcagtatcccacatg

SEQ ID NO: 1231290 - DNA, 25 bp, Homo sapien
tgatagttttcctgcttagaaagtg

SEQ ID NO: 1231291 - DNA, 25 bp, Homo sapien
gacttaacgtcaagctttgggttga

SEQ ID NO: 1231292 - DNA, 25 bp, Homo sapien
gctagagtttacacatctgttcact

SEQ ID NO: 1231293 - DNA, 25 bp, Homo sapien
aaactgctttgagaggaatgggacc

SEQ ID NO: 1231294 - DNA, 25 bp, Homo sapien
tcctggaacaatactgttgtgggta

SEQ ID NO: 1231295 - DNA, 25 bp, Homo sapien
cagctacttgggaggtttaggcagg

SEQ ID NO: 1231296 - DNA, 25 bp, Homo sapien
gcgtggtcagacatgcttgtaatcc

SEQ ID NO: 1231297 - DNA, 25 bp, Homo sapien
aaatcacaccactgcacccgagcct

SEQ ID NO: 1231298 - DNA, 25 bp, Homo sapien
ttagctgggcgtggtcagacatgct

SEQ ID NO: 1231299 - DNA, 25 bp, Homo sapien
actttggccagacggggtgtctcac

SEQ ID NO: 1231300 - DNA, 25 bp, Homo sapien
catactttggccagacggggtgtct

SEQ ID NO: 1231301 - DNA, 25 bp, Homo sapien
acatactttggccagacggggtgtc

SEQ ID NO: 1231302 - DNA, 25 bp, Homo sapien
tactttggccagacggggtgtctca

SEQ ID NO: 1231303 - DNA, 25 bp, Homo sapien
ggaagagaagagttgcccctacctc

SEQ ID NO: 1231304 - DNA, 25 bp, Homo sapien
ggccatgatagctaccgaggcggta

SEQ ID NO: 1231305 - DNA, 25 bp, Homo sapien
gttgcagtcccctcaaaacgcttcg

SEQ ID NO: 1231306 - DNA, 25 bp, Homo sapien
gagaaccgagactacagaaccaggg

SEQ ID NO: 1231307 - DNA, 25 bp, Homo sapien
aaggagacttttggtccactgtcca

SEQ ID NO: 1231308 - DNA, 25 bp, Homo sapien
gaaagccgatactgtcaacccggga

SEQ ID NO: 1231309 - DNA, 25 bp, Homo sapien
tataagctctccaatgaccaatgga

SEQ ID NO: 1231310 - DNA, 25 bp, Homo sapien
ggtgatcctattgcttgagactccg

SEQ ID NO: 1231311 - DNA, 25 bp, Homo sapien
cattcggatcgaagctgtaagctaa

SEQ ID NO: 1231312 - DNA, 25 bp, Homo sapien
ttagagccaccaatacaacattcgg

SEQ ID NO: 1231313 - DNA, 25 bp, Homo sapien
cagggacaagggtgcctttagagcc

SEQ ID NO: 1231314 - DNA, 25 bp, Homo sapien
gaggactcccgctcctaacaaggga

SEQ ID NO: 1231315 - DNA, 25 bp, Homo sapien
aagctggttttgaggagcaccacat

SEQ ID NO: 1231316 - DNA, 25 bp, Homo sapien
gttttgaggagcaccacatacttaa

SEQ ID NO: 1231317 - DNA, 25 bp, Homo sapien
aatgaatagagaatacagtgtgtac

SEQ ID NO: 1231318 - DNA, 25 bp, Homo sapien
tgtacccaacgaaaaactgagcagg

SEQ ID NO: 1231319 - DNA, 25 bp, Homo sapien
gcaggctctaattcaatagcctggg

SEQ ID NO: 1231320 - DNA, 25 bp, Homo sapien
tgggtggttttgtccaatgcaggct

SEQ ID NO: 1231321 - DNA, 25 bp, Homo sapien
ccccagacacttttgaatagcaaag

SEQ ID NO: 1231322 - DNA, 25 bp, Homo sapien
caaagtactagattttggttggaca

SEQ ID NO: 1231323 - DNA, 25 bp, Homo sapien
ggttcctatgaaaccaatgggtcat

SEQ ID NO: 1231324 - DNA, 25 bp, Homo sapien
gtgactacaccatagtaattaaaag

SEQ ID NO: 1231325 - DNA, 25 bp, Homo sapien
gagctgtggcttttaatgggttcct

SEQ ID NO: 1231326 - DNA, 25 bp, Homo sapien
gccagtgactacaccatagtaatta

SEQ ID NO: 1231327 - DNA, 25 bp, Homo sapien
tggtaagcaccaagagagtagaggc

SEQ ID NO: 1231328 - DNA, 25 bp, Homo sapien
cagaaggcaattagcttagtgaggc

SEQ ID NO: 1231329 - DNA, 25 bp, Homo sapien
cagttccaaatcgaatccagaaggc

SEQ ID NO: 1231330 - DNA, 25 bp, Homo sapien
ggcttccgaaattacaatacatggg

SEQ ID NO: 1231331 - DNA, 25 bp, Homo sapien
taaatgttatagatccaccttttcc

SEQ ID NO: 1231332 - DNA, 25 bp, Homo sapien
ccttgacatgtaattcaacatatac

SEQ ID NO: 1231333 - DNA, 25 bp, Homo sapien
gaatatgtaaaacgtggccatcagt

SEQ ID NO: 1231334 - DNA, 25 bp, Homo sapien
taaaactgctccctaatctacattc

SEQ ID NO: 1231335 - DNA, 25 bp, Homo sapien
cagtgaacagttcaaggagtcgtgc

SEQ ID NO: 1231336 - DNA, 25 bp, Homo sapien
tcgtgccctggatgacctcaagtca

SEQ ID NO: 1231337 - DNA, 25 bp, Homo sapien
agtcgtgccctggatgacctcaagt

SEQ ID NO: 1231338 - DNA, 25 bp, Homo sapien
tggattacagctcaaatcagtgaac

SEQ ID NO: 1231339 - DNA, 25 bp, Homo sapien
gagaaatatgaatctgctgcattct

SEQ ID NO: 1231340 - DNA, 25 bp, Homo sapien
gaaatatgaatctgctgcattcttc

SEQ ID NO: 1231341 - DNA, 25 bp, Homo sapien
tgagaaatatgaatctgctgcattc

SEQ ID NO: 1231342 - DNA, 25 bp, Homo sapien
agtgagaaatatgaatctgctgcat

SEQ ID NO: 1231343 - DNA, 25 bp, Homo sapien
tgtccttgcaatgtatcagtccact

SEQ ID NO: 1231344 - DNA, 25 bp, Homo sapien
gaatatatcgtaacttgctttcttg

SEQ ID NO: 1231345 - DNA, 25 bp, Homo sapien
tcttgggtagattcatccaaagaat

SEQ ID NO: 1231346 - DNA, 25 bp, Homo sapien
tccacttgaaattttgaatatatcg

SEQ ID NO: 1231347 - DNA, 25 bp, Homo sapien
aaagtactctatctgtagccccaag

SEQ ID NO: 1231348 - DNA, 25 bp, Homo sapien
tgcacacattatagaatctgtcaaa

SEQ ID NO: 1231349 - DNA, 25 bp, Homo sapien
tatcccagaatattatgaattcgac

SEQ ID NO: 1231350 - DNA, 25 bp, Homo sapien
taagcctagtactgttgtcagtcac

SEQ ID NO: 1231351 - DNA, 25 bp, Homo sapien
ttccagccagtcttgaagcatattt

SEQ ID NO: 1231352 - DNA, 25 bp, Homo sapien
tttccagccagtcttgaagcatatt

SEQ ID NO: 1231353 - DNA, 25 bp, Homo sapien
caatctttaggcttcgatgaacttc

SEQ ID NO: 1231354 - DNA, 25 bp, Homo sapien
gctgcaatctttaggcttcgatgaa

SEQ ID NO: 1231355 - DNA, 25 bp, Homo sapien
tttaggcttcgatgaacttcttttg

SEQ ID NO: 1231356 - DNA, 25 bp, Homo sapien
atcccagctgcaatctttaggcttc

SEQ ID NO: 1231357 - DNA, 25 bp, Homo sapien
tcagcctgacattgaataacgtatg

SEQ ID NO: 1231358 - DNA, 25 bp, Homo sapien
cgtatgcttctatgagtcgtgactc

SEQ ID NO: 1231359 - DNA, 25 bp, Homo sapien
aaatctcttcctttttccgcaggtg

SEQ ID NO: 1231360 - DNA, 25 bp, Homo sapien
cctttttccgcaggtgtaatgagtt

SEQ ID NO: 1231361 - DNA, 25 bp, Homo sapien
tgtttcatacgccagtgcagcaatt

SEQ ID NO: 1231362 - DNA, 25 bp, Homo sapien
caggagcatgttttagttcaattgc

SEQ ID NO: 1231363 - DNA, 25 bp, Homo sapien
aattggctgtttcatacgccagtgc

SEQ ID NO: 1231364 - DNA, 25 bp, Homo sapien
cagtgcagcaattagtccaggagca

SEQ ID NO: 1231365 - DNA, 25 bp, Homo sapien
ctccatttggcagaatatgcaggct

SEQ ID NO: 1231366 - DNA, 25 bp, Homo sapien
ccatttggcagaatatgcaggctcc

SEQ ID NO: 1231367 - DNA, 25 bp, Homo sapien
tccatttggcagaatatgcaggctc

SEQ ID NO: 1231368 - DNA, 25 bp, Homo sapien
catttggcagaatatgcaggctcca

SEQ ID NO: 1231369 - DNA, 25 bp, Homo sapien
tgtttttagcgttgtgaatacttac

SEQ ID NO: 1231370 - DNA, 25 bp, Homo sapien
ttgtttttagcgttgtgaatactta

SEQ ID NO: 1231371 - DNA, 25 bp, Homo sapien
attgtttttagcgttgtgaatactt

SEQ ID NO: 1231372 - DNA, 25 bp, Homo sapien
ttatcactagccaataaagtctcac

SEQ ID NO: 1231373 - DNA, 25 bp, Homo sapien
aagtctcaccatggtaacagtaagc

SEQ ID NO: 1231374 - DNA, 25 bp, Homo sapien
gcttcaccgcatttatcactagcca

SEQ ID NO: 1231375 - DNA, 25 bp, Homo sapien
cttcttggagagacctgattgcttc

SEQ ID NO: 1231376 - DNA, 25 bp, Homo sapien
gtccaggtcctttggtttctccata

SEQ ID NO: 1231377 - DNA, 25 bp, Homo sapien
agaacagatgtcctgaaggtttgac

SEQ ID NO: 1231378 - DNA, 25 bp, Homo sapien
gaaggtttgactgttggtccaggtc

SEQ ID NO: 1231379 - DNA, 25 bp, Homo sapien
tagggtgttcttcacaaggtttcca

SEQ ID NO: 1231380 - DNA, 25 bp, Homo sapien
tgggtcttttggtgagatcaaatgc

SEQ ID NO: 1231381 - DNA, 25 bp, Homo sapien
cacttgtaggaggaaattcgaaagg

SEQ ID NO: 1231382 - DNA, 25 bp, Homo sapien
catccttgggtcttttggtgagatc

SEQ ID NO: 1231383 - DNA, 25 bp, Homo sapien
ggctctacgagaccataatttgctt

SEQ ID NO: 1231384 - DNA, 25 bp, Homo sapien
gatgtagcacccagtgtccttttga

SEQ ID NO: 1231385 - DNA, 25 bp, Homo sapien
tgtagcacccagtgtccttttgagg

SEQ ID NO: 1231386 - DNA, 25 bp, Homo sapien
ttaggagatgtagcacccagtgtcc

SEQ ID NO: 1231387 - DNA, 25 bp, Homo sapien
ggagatgtagcacccagtgtccttt

SEQ ID NO: 1231388 - DNA, 25 bp, Homo sapien
tgtcctgattaaaaaggagagtctg

SEQ ID NO: 1231389 - DNA, 25 bp, Homo sapien
tataccctttagaggcacaataaaa

SEQ ID NO: 1231390 - DNA, 25 bp, Homo sapien
caaagcaagaaacatctccgctgta

SEQ ID NO: 1231391 - DNA, 25 bp, Homo sapien
gaaacatctccgctgtattaaaaat

SEQ ID NO: 1231392 - DNA, 25 bp, Homo sapien
tcgtatatggtagtatcatccccaa

SEQ ID NO: 1231393 - DNA, 25 bp, Homo sapien
ccacagagtagagagctggcatcaa

SEQ ID NO: 1231394 - DNA, 25 bp, Homo sapien
tctgcgctctgattaacacaatgga

SEQ ID NO: 1231395 - DNA, 25 bp, Homo sapien
catgtcaaagatgcctactgatgta

SEQ ID NO: 1231396 - DNA, 25 bp, Homo sapien
gctactggcttagtaagtataaaaa

SEQ ID NO: 1231397 - DNA, 25 bp, Homo sapien
tatttgtcgaaaaacaaaagatctc

SEQ ID NO: 1231398 - DNA, 25 bp, Homo sapien
actgttttaactgctactggcttag

SEQ ID NO: 1231399 - DNA, 25 bp, Homo sapien
ttttgcactgttttaactgctactg

SEQ ID NO: 1231400 - DNA, 25 bp, Homo sapien
ttatacaacgctaaaagtgctgcct

SEQ ID NO: 1231401 - DNA, 25 bp, Homo sapien
taatgatacactctttagcttagcg

SEQ ID NO: 1231402 - DNA, 25 bp, Homo sapien
taagtagaaactgaacaaggagcgt

SEQ ID NO: 1231403 - DNA, 25 bp, Homo sapien
tactaagcacgagacataaacaggc

SEQ ID NO: 1231404 - DNA, 25 bp, Homo sapien
ctccatattccacctgtctctgtct

SEQ ID NO: 1231405 - DNA, 25 bp, Homo sapien
tgaacactccatattccacctgtct

SEQ ID NO: 1231406 - DNA, 25 bp, Homo sapien
agggttttacctgttatgttcactg

SEQ ID NO: 1231407 - DNA, 25 bp, Homo sapien
cactgaacactccatattccacctg

SEQ ID NO: 1231408 - DNA, 25 bp, Homo sapien
agttgctcaggccaacaacactaaa

SEQ ID NO: 1231409 - DNA, 25 bp, Homo sapien
ctggcagccttctcatctcaataaa

SEQ ID NO: 1231410 - DNA, 25 bp, Homo sapien
tcaggccaacaacactaaagtcatt

SEQ ID NO: 1231411 - DNA, 25 bp, Homo sapien
caacactaaagtcattcttggttct

SEQ ID NO: 1231412 - DNA, 25 bp, Homo sapien
taccaggcttgatgcacatcttaga

SEQ ID NO: 1231413 - DNA, 25 bp, Homo sapien
tgtaccaggcttgatgcacatctta

SEQ ID NO: 1231414 - DNA, 25 bp, Homo sapien
caggcttgatgcacatcttagaaga

SEQ ID NO: 1231415 - DNA, 25 bp, Homo sapien
ttgatgcacatcttagaagacagga

SEQ ID NO: 1231416 - DNA, 25 bp, Homo sapien
tttggaaggtacactcttctctagg

SEQ ID NO: 1231417 - DNA, 25 bp, Homo sapien
ggtcaagtgttgaatttgtgctctg

SEQ ID NO: 1231418 - DNA, 25 bp, Homo sapien
catgatgtctccgtcaacaaaatgg

SEQ ID NO: 1231419 - DNA, 25 bp, Homo sapien
tggataatccttttaggagtagtct

SEQ ID NO: 1231420 - DNA, 25 bp, Homo sapien
gcttgctattcgtcctgcccaaaat

SEQ ID NO: 1231421 - DNA, 25 bp, Homo sapien
tcctgcccaaaatcgtaggtagggc

SEQ ID NO: 1231422 - DNA, 25 bp, Homo sapien
atgaggtgcttgctattcgtcctgc

SEQ ID NO: 1231423 - DNA, 25 bp, Homo sapien
gctattcgtcctgcccaaaatcgta

SEQ ID NO: 1231424 - DNA, 25 bp, Homo sapien
tgaaggttcataccatctgcctaaa

SEQ ID NO: 1231425 - DNA, 25 bp, Homo sapien
tcatggtcctcaagctagccttagc

SEQ ID NO: 1231426 - DNA, 25 bp, Homo sapien
ggtcagagcccctatacactttcta

SEQ ID NO: 1231427 - DNA, 25 bp, Homo sapien
taccctggcaactgtgacaacaaat

SEQ ID NO: 1231428 - DNA, 25 bp, Homo sapien
tctccaattccctccctctaaaaca

SEQ ID NO: 1231429 - DNA, 25 bp, Homo sapien
cttttgccttaaccgaagtgtagag

SEQ ID NO: 1231430 - DNA, 25 bp, Homo sapien
accgaagtgtagagagctttctgga

SEQ ID NO: 1231431 - DNA, 25 bp, Homo sapien
cttaaccgaagtgtagagagctttc

SEQ ID NO: 1231432 - DNA, 25 bp, Homo sapien
gtgttaccaagacccacatcaggaa

SEQ ID NO: 1231433 - DNA, 25 bp, Homo sapien
ccatgcatccagacagacttctcag

SEQ ID NO: 1231434 - DNA, 25 bp, Homo sapien
gacttctcagaagttgtttaaggcc

SEQ ID NO: 1231435 - DNA, 25 bp, Homo sapien
ggaattcttccatgcatccagacag

SEQ ID NO: 1231436 - DNA, 25 bp, Homo sapien
ttaacaacaggtatagcatgggtcc

SEQ ID NO: 1231437 - DNA, 25 bp, Homo sapien
taactaaagcttcgcatcagttgag

SEQ ID NO: 1231438 - DNA, 25 bp, Homo sapien
taaaagaaagaacgagcacttgcgt

SEQ ID NO: 1231439 - DNA, 25 bp, Homo sapien
tgcataccggctaaacatctgctcc

SEQ ID NO: 1231440 - DNA, 25 bp, Homo sapien
tgggttgagtaagaccaaagaagac

SEQ ID NO: 1231441 - DNA, 25 bp, Homo sapien
cttgttttgtatcctatagaactcg

SEQ ID NO: 1231442 - DNA, 25 bp, Homo sapien
tagaactcgtttaacacatactgat

SEQ ID NO: 1231443 - DNA, 25 bp, Homo sapien
ttgtatcctatagaactcgtttaac

SEQ ID NO: 1231444 - DNA, 25 bp, Homo sapien
ctaccttcttctacaacacagctca

SEQ ID NO: 1231445 - DNA, 25 bp, Homo sapien
actaccttcttctacaacacagctc

SEQ ID NO: 1231446 - DNA, 25 bp, Homo sapien
taccttcttctacaacacagctcat

SEQ ID NO: 1231447 - DNA, 25 bp, Homo sapien
tggttccatactcttggaccccagc

SEQ ID NO: 1231448 - DNA, 25 bp, Homo sapien
atggttccatactcttggaccccag

SEQ ID NO: 1231449 - DNA, 25 bp, Homo sapien
tgtatcacagttactttggccagca

SEQ ID NO: 1231450 - DNA, 25 bp, Homo sapien
tcatgagctaggatctgccaccaga

SEQ ID NO: 1231451 - DNA, 25 bp, Homo sapien
ggaacagatccagggaaactgcagt

SEQ ID NO: 1231452 - DNA, 25 bp, Homo sapien
catgttcgatctttccaggttttga

SEQ ID NO: 1231453 - DNA, 25 bp, Homo sapien
gattgccactgcttaactctccatg

SEQ ID NO: 1231454 - DNA, 25 bp, Homo sapien
gatcaaagaagcatgcaacactgag

SEQ ID NO: 1231455 - DNA, 25 bp, Homo sapien
cccgagagcacatcacagtatggag

SEQ ID NO: 1231456 - DNA, 25 bp, Homo sapien
tgagctatcacacggagaacacctg

SEQ ID NO: 1231457 - DNA, 25 bp, Homo sapien
taccttctgctccaatgagacctct

SEQ ID NO: 1231458 - DNA, 25 bp, Homo sapien
cacttggccccagatcagttttcca

SEQ ID NO: 1231459 - DNA, 25 bp, Homo sapien
gatagctgtgtccactattatgtga

SEQ ID NO: 1231460 - DNA, 25 bp, Homo sapien
gacaaatcaaggacaggcccttcag

SEQ ID NO: 1231461 - DNA, 25 bp, Homo sapien
catagagtgtacgcaggtcctccat

SEQ ID NO: 1231462 - DNA, 25 bp, Homo sapien
gctccagatccggtattaaaggagg

SEQ ID NO: 1231463 - DNA, 25 bp, Homo sapien
ccagatccggtattaaaggagggcg

SEQ ID NO: 1231464 - DNA, 25 bp, Homo sapien
gggctgctccagatccggtattaaa

SEQ ID NO: 1231465 - DNA, 25 bp, Homo sapien
gatgaatgggctgttgtcttaggga

SEQ ID NO: 1231466 - DNA, 25 bp, Homo sapien
ttctgtttgtgaagcacctccttca

SEQ ID NO: 1231467 - DNA, 25 bp, Homo sapien
gggtcactgctgaaacccaattccg

SEQ ID NO: 1231468 - DNA, 25 bp, Homo sapien
tgaaacccaattccgcaacttctgt

SEQ ID NO: 1231469 - DNA, 25 bp, Homo sapien
ttcacctaaacacaaagggtcactg

SEQ ID NO: 1231470 - DNA, 25 bp, Homo sapien
ggcggcggcgcgccgaaaggcatcc

SEQ ID NO: 1231471 - DNA, 25 bp, Homo sapien
gcggcggcgcgccgaaaggcatcca

SEQ ID NO: 1231472 - DNA, 25 bp, Homo sapien
cggcggcgcgccgaaaggcatccac

SEQ ID NO: 1231473 - DNA, 25 bp, Homo sapien
caaaagcatgccaaagacccgtggg

SEQ ID NO: 1231474 - DNA, 25 bp, Homo sapien
acaacaggcctgctgattacagagg

SEQ ID NO: 1231475 - DNA, 25 bp, Homo sapien
gagaagtactctacatatggccaga

SEQ ID NO: 1231476 - DNA, 25 bp, Homo sapien
gacccgtgggatggataagcatatt

SEQ ID NO: 1231477 - DNA, 25 bp, Homo sapien
tcttctcaactcctatagggaagaa

SEQ ID NO: 1231478 - DNA, 25 bp, Homo sapien
tagggaagaaatatgttctcagata

SEQ ID NO: 1231479 - DNA, 25 bp, Homo sapien
cctcttctcaactcctatagggaag

SEQ ID NO: 1231480 - DNA, 25 bp, Homo sapien
tgtctcctcccattattcttcctcc

SEQ ID NO: 1231481 - DNA, 25 bp, Homo sapien
tagtaagtcaagtattcccagtaac

SEQ ID NO: 1231482 - DNA, 25 bp, Homo sapien
gtgttcagtaaaagcttagtaagtc

SEQ ID NO: 1231483 - DNA, 25 bp, Homo sapien
tgaagattatttcgtgagtttagaa

SEQ ID NO: 1231484 - DNA, 25 bp, Homo sapien
tgagcatgtaataccaaaatttgat

SEQ ID NO: 1231485 - DNA, 25 bp, Homo sapien
caactacaggacaggatgctatgct

SEQ ID NO: 1231486 - DNA, 25 bp, Homo sapien
aaggaccagcccacaaagagttagc

SEQ ID NO: 1231487 - DNA, 25 bp, Homo sapien
tgatcagaacccacagaaatgtcct

SEQ ID NO: 1231488 - DNA, 25 bp, Homo sapien
gactcaccatgtaccaaggacactg

SEQ ID NO: 1231489 - DNA, 25 bp, Homo sapien
agatggtgtctgctctctcagaaat

SEQ ID NO: 1231490 - DNA, 25 bp, Homo sapien
ttttaaatgaagctgcttctgacag

SEQ ID NO: 1231491 - DNA, 25 bp, Homo sapien
tctgacagcttggtatatgcctttt

SEQ ID NO: 1231492 - DNA, 25 bp, Homo sapien
aattcaacagaaataagatggtgtc

SEQ ID NO: 1231493 - DNA, 25 bp, Homo sapien
gaatggctactggagtatatttggc

SEQ ID NO: 1231494 - DNA, 25 bp, Homo sapien
tggcagtctctgtcataggtaggta

SEQ ID NO: 1231495 - DNA, 25 bp, Homo sapien
gcagtctctgtcataggtaggtatt

SEQ ID NO: 1231496 - DNA, 25 bp, Homo sapien
tggagtatatttggcagtctctgtc

SEQ ID NO: 1231497 - DNA, 25 bp, Homo sapien
gtcatgggctagcttaaacttcagg

SEQ ID NO: 1231498 - DNA, 25 bp, Homo sapien
acttgtgtagtcatgggctagctta

SEQ ID NO: 1231499 - DNA, 25 bp, Homo sapien
gggctagcttaaacttcaggcagga

SEQ ID NO: 1231500 - DNA, 25 bp, Homo sapien
tgtagtcatgggctagcttaaactt

SEQ ID NO: 1231501 - DNA, 25 bp, Homo sapien
gcccaaacttactgggcccaatcta

SEQ ID NO: 1231502 - DNA, 25 bp, Homo sapien
actgggcccaatctaccggcatcta

SEQ ID NO: 1231503 - DNA, 25 bp, Homo sapien
tgcccgcatctcttcctttcacatc

SEQ ID NO: 1231504 - DNA, 25 bp, Homo sapien
ttcacatcccaacggcccaaactta

SEQ ID NO: 1231505 - DNA, 25 bp, Homo sapien
tctctctcacataacagtacaaaag

SEQ ID NO: 1231506 - DNA, 25 bp, Homo sapien
taagtggataacctagggtggagag

SEQ ID NO: 1231507 - DNA, 25 bp, Homo sapien
cagggaacccagactagccagtcag

SEQ ID NO: 1231508 - DNA, 25 bp, Homo sapien
tgctgtcttcatcaattggcgtcca

SEQ ID NO: 1231509 - DNA, 25 bp, Homo sapien
attcattaggtacttatcacaaatg

SEQ ID NO: 1231510 - DNA, 25 bp, Homo sapien
atgtctaaaattccaatccctctgg

SEQ ID NO: 1231511 - DNA, 25 bp, Homo sapien
gatgtctaaaattccaatccctctg

SEQ ID NO: 1231512 - DNA, 25 bp, Homo sapien
attaggtacttatcacaaatgacaa

SEQ ID NO: 1231513 - DNA, 25 bp, Homo sapien
tttttacgagccataccatactaga

SEQ ID NO: 1231514 - DNA, 25 bp, Homo sapien
tctcaattaggatatagatcactca

SEQ ID NO: 1231515 - DNA, 25 bp, Homo sapien
gaaatggtttagcaagcaaacagtg

SEQ ID NO: 1231516 - DNA, 25 bp, Homo sapien
cagaactcaagaagcagatgctttt

SEQ ID NO: 1231517 - DNA, 25 bp, Homo sapien
tacaatttcatctttctcttccacc

SEQ ID NO: 1231518 - DNA, 25 bp, Homo sapien
caatttcatctttctcttccaccat

SEQ ID NO: 1231519 - DNA, 25 bp, Homo sapien
gctacaatttcatctttctcttcca

SEQ ID NO: 1231520 - DNA, 25 bp, Homo sapien
catcctggttgctacaatttcatct

SEQ ID NO: 1231521 - DNA, 25 bp, Homo sapien
tttaggctcaactataggattccca

SEQ ID NO: 1231522 - DNA, 25 bp, Homo sapien
ggatcagtgtccaaacggtattcct

SEQ ID NO: 1231523 - DNA, 25 bp, Homo sapien
tgagaacggactaagacgcctagct

SEQ ID NO: 1231524 - DNA, 25 bp, Homo sapien
tgggtttcaaagcaccgtattctgg

SEQ ID NO: 1231525 - DNA, 25 bp, Homo sapien
cagatgtaatcatggtatactacag

SEQ ID NO: 1231526 - DNA, 25 bp, Homo sapien
gtccaattccaaagtctacaatctt

SEQ ID NO: 1231527 - DNA, 25 bp, Homo sapien
acagatgtaatcatggtatactaca

SEQ ID NO: 1231528 - DNA, 25 bp, Homo sapien
cttttgtccaattccaaagtctaca

SEQ ID NO: 1231529 - DNA, 25 bp, Homo sapien
cactgcaatctctgaagcgattctc

SEQ ID NO: 1231530 - DNA, 25 bp, Homo sapien
gactacaggcacacgctaccccgcc

SEQ ID NO: 1231531 - DNA, 25 bp, Homo sapien
ctgcctcagcccctcaggtagctgg

SEQ ID NO: 1231532 - DNA, 25 bp, Homo sapien
ctacaggcacacgctaccccgccca

SEQ ID NO: 1231533 - DNA, 25 bp, Homo sapien
taccagaggcacaaggaggagctgg

SEQ ID NO: 1231534 - DNA, 25 bp, Homo sapien
gccgaattctaccagaggcacaagg

SEQ ID NO: 1231535 - DNA, 25 bp, Homo sapien
agccgaattctaccagaggcacaag

SEQ ID NO: 1231536 - DNA, 25 bp, Homo sapien
gaggcacaaggaggagctggtacca

SEQ ID NO: 1231537 - DNA, 25 bp, Homo sapien
ttaaggcacatcatgaatttaaggc

SEQ ID NO: 1231538 - DNA, 25 bp, Homo sapien
catcccattataagcccaaattctc

SEQ ID NO: 1231539 - DNA, 25 bp, Homo sapien
atggtttaccaattcgtttacaatg

SEQ ID NO: 1231540 - DNA, 25 bp, Homo sapien
taatagtttcctttgacctgataac

SEQ ID NO: 1231541 - DNA, 25 bp, Homo sapien
tccattatctgagttggaaacgtgt

SEQ ID NO: 1231542 - DNA, 25 bp, Homo sapien
tttgtgtatgagctccattatctga

SEQ ID NO: 1231543 - DNA, 25 bp, Homo sapien
ttggaaacgtgtcgctgaaaggtct

SEQ ID NO: 1231544 - DNA, 25 bp, Homo sapien
gttggaaacgtgtcgctgaaaggtc

SEQ ID NO: 1231545 - DNA, 25 bp, Homo sapien
taatcgtagcctgtagcagatacca

SEQ ID NO: 1231546 - DNA, 25 bp, Homo sapien
tgtgatcaccaagctggacattcaa

SEQ ID NO: 1231547 - DNA, 25 bp, Homo sapien
gcagataccaaacactggaagccct

SEQ ID NO: 1231548 - DNA, 25 bp, Homo sapien
cacatcaaagtgttccatagccaca

SEQ ID NO: 1231549 - DNA, 25 bp, Homo sapien
tcaaggccagcccgggcaagagtga

SEQ ID NO: 1231550 - DNA, 25 bp, Homo sapien
gaggtcgaggcaggtagatggcttg

SEQ ID NO: 1231551 - DNA, 25 bp, Homo sapien
aggtcgaggcaggtagatggcttga

SEQ ID NO: 1231552 - DNA, 25 bp, Homo sapien
agttcaaggccagcccgggcaagag

SEQ ID NO: 1231553 - DNA, 25 bp, Homo sapien
gactaacttcaaatagagaggcaag

SEQ ID NO: 1231554 - DNA, 25 bp, Homo sapien
tccttcagatcacctagcattagag

SEQ ID NO: 1231555 - DNA, 25 bp, Homo sapien
gagttatataagcagatcctaccca

SEQ ID NO: 1231556 - DNA, 25 bp, Homo sapien
tgagctattcccacacttaagtaca

SEQ ID NO: 1231557 - DNA, 25 bp, Homo sapien
tactccttgaatgaagaccactatg

SEQ ID NO: 1231558 - DNA, 25 bp, Homo sapien
catgtggtatgcatagattgagagg

SEQ ID NO: 1231559 - DNA, 25 bp, Homo sapien
aatatcacctgcatacaaacacctg

SEQ ID NO: 1231560 - DNA, 25 bp, Homo sapien
caaaagttagactccgtaggaatat

SEQ ID NO: 1231561 - DNA, 25 bp, Homo sapien
tgcccggcccaattaatcttatagt

SEQ ID NO: 1231562 - DNA, 25 bp, Homo sapien
tttaaagcaaaaaccatagagatca

SEQ ID NO: 1231563 - DNA, 25 bp, Homo sapien
gatttctgtgataaagtgtcttaga

SEQ ID NO: 1231564 - DNA, 25 bp, Homo sapien
tagactagaaaaccgtatgcatttt

SEQ ID NO: 1231565 - DNA, 25 bp, Homo sapien
gttacatacatgacctgagatccct

SEQ ID NO: 1231566 - DNA, 25 bp, Homo sapien
ttaaacatcttagctggcacacaag

SEQ ID NO: 1231567 - DNA, 25 bp, Homo sapien
tttactgctgatttatatgggcccc

SEQ ID NO: 1231568 - DNA, 25 bp, Homo sapien
tatgggccccacaatatgttacact

SEQ ID NO: 1231569 - DNA, 25 bp, Homo sapien
aaagcaatgagttggcaggcgcagc

SEQ ID NO: 1231570 - DNA, 25 bp, Homo sapien
caggcgcagctccacagagcggcag

SEQ ID NO: 1231571 - DNA, 25 bp, Homo sapien
cggcaactgactgcaggatcacagc

SEQ ID NO: 1231572 - DNA, 25 bp, Homo sapien
gcaaatgattgcagtagcaacagcg

SEQ ID NO: 1231573 - DNA, 25 bp, Homo sapien
tagcatgccattctctaagtagaca

SEQ ID NO: 1231574 - DNA, 25 bp, Homo sapien
catagtaatctcactggcaaacctg

SEQ ID NO: 1231575 - DNA, 25 bp, Homo sapien
tacacacaaaatccgggaattcaca

SEQ ID NO: 1231576 - DNA, 25 bp, Homo sapien
caaaacggcttgtgcaggaatctct

SEQ ID NO: 1231577 - DNA, 25 bp, Homo sapien
gcagagttgtgagacagtggtagaa

SEQ ID NO: 1231578 - DNA, 25 bp, Homo sapien
tccgcagcatctgtgatggaaccag

SEQ ID NO: 1231579 - DNA, 25 bp, Homo sapien
caaatatgtaggaaagacaagtatg

SEQ ID NO: 1231580 - DNA, 25 bp, Homo sapien
aaaatcgcccagttacagtcaggca

SEQ ID NO: 1231581 - DNA, 25 bp, Homo sapien
catggtctccatcacagggggtgag

SEQ ID NO: 1231582 - DNA, 25 bp, Homo sapien
gctgttgctcagaaccacaaaatca

SEQ ID NO: 1231583 - DNA, 25 bp, Homo sapien
agcactggttgcgatgctgctgttg

SEQ ID NO: 1231584 - DNA, 25 bp, Homo sapien
ctgttgctcagaaccacaaaatcat

SEQ ID NO: 1231585 - DNA, 25 bp, Homo sapien
catgcaacacgaggccaaagcagag

SEQ ID NO: 1231586 - DNA, 25 bp, Homo sapien
ctgctatggctagtcaaagggtgat

SEQ ID NO: 1231587 - DNA, 25 bp, Homo sapien
gggtaacatctgaggcattctttgg

SEQ ID NO: 1231588 - DNA, 25 bp, Homo sapien
cctcgggatggcactcttggtgact

SEQ ID NO: 1231589 - DNA, 25 bp, Homo sapien
tacacaggtgaatgatttggacaaa

SEQ ID NO: 1231590 - DNA, 25 bp, Homo sapien
gctgaagacagcacgtagtctgata

SEQ ID NO: 1231591 - DNA, 25 bp, Homo sapien
gtcaggccacggatgatgcaggcag

SEQ ID NO: 1231592 - DNA, 25 bp, Homo sapien
aaagagatgcagaatactcggagtg

SEQ ID NO: 1231593 - DNA, 25 bp, Homo sapien
cacgtggcattagttgaatgctaaa

SEQ ID NO: 1231594 - DNA, 25 bp, Homo sapien
cacaagctgtcatgttcacgtggca

SEQ ID NO: 1231595 - DNA, 25 bp, Homo sapien
taaacacaagctgtcatgttcacgt

SEQ ID NO: 1231596 - DNA, 25 bp, Homo sapien
tcatgttcacgtggcattagttgaa

SEQ ID NO: 1231597 - DNA, 25 bp, Homo sapien
ggattctgtaatccccgcagccatg

SEQ ID NO: 1231598 - DNA, 25 bp, Homo sapien
aaagtcccgtgctacaattcacagg

SEQ ID NO: 1231599 - DNA, 25 bp, Homo sapien
aaagattgccaaacacgaaagagtg

SEQ ID NO: 1231600 - DNA, 25 bp, Homo sapien
tatggactgaggtggaaataagcac

SEQ ID NO: 1231601 - DNA, 25 bp, Homo sapien
ttttttgatggacaattgtggcaat

SEQ ID NO: 1231602 - DNA, 25 bp, Homo sapien
taaacattatatagttcagccactg

SEQ ID NO: 1231603 - DNA, 25 bp, Homo sapien
tgcctttacttccaagcaacttctc

SEQ ID NO: 1231604 - DNA, 25 bp, Homo sapien
tccatgggtgtcaattcccttttaa

SEQ ID NO: 1231605 - DNA, 25 bp, Homo sapien
gggacacccacaatgaccctccgct

SEQ ID NO: 1231606 - DNA, 25 bp, Homo sapien
accctccgctcccacaatcttgttc

SEQ ID NO: 1231607 - DNA, 25 bp, Homo sapien
acagatcatcaaatggactgttcag

SEQ ID NO: 1231608 - DNA, 25 bp, Homo sapien
tcaggacgtagattggggacaccca

SEQ ID NO: 1231609 - DNA, 25 bp, Homo sapien
gcttcaaccagcacacgtggaatgt

SEQ ID NO: 1231610 - DNA, 25 bp, Homo sapien
gaatgtgactggcttttgagaggta

SEQ ID NO: 1231611 - DNA, 25 bp, Homo sapien
gaataactcaaaacttgcttcaacc

SEQ ID NO: 1231612 - DNA, 25 bp, Homo sapien
taatacggcaataagaagatcccaa

SEQ ID NO: 1231613 - DNA, 25 bp, Homo sapien
taagaggctaagctagtcccagggt

SEQ ID NO: 1231614 - DNA, 25 bp, Homo sapien
tacggttccctctacgccaagcatt

SEQ ID NO: 1231615 - DNA, 25 bp, Homo sapien
gataatgagtctgtggcattgccaa

SEQ ID NO: 1231616 - DNA, 25 bp, Homo sapien
tatggagtcctctgttacaatcaag

SEQ ID NO: 1231617 - DNA, 25 bp, Homo sapien
tatgtcaatctgatggtaatgccac

SEQ ID NO: 1231618 - DNA, 25 bp, Homo sapien
gatgtgttaaaagactgcagtgaac

SEQ ID NO: 1231619 - DNA, 25 bp, Homo sapien
gctcaagtgtctatggagtatgggc

SEQ ID NO: 1231620 - DNA, 25 bp, Homo sapien
caatgacagaaatgtgctgtgtgca

SEQ ID NO: 1231621 - DNA, 25 bp, Homo sapien
tttatcatgaatagctattattctg

SEQ ID NO: 1231622 - DNA, 25 bp, Homo sapien
catgaatagctattattctgagata

SEQ ID NO: 1231623 - DNA, 25 bp, Homo sapien
gaatagctattattctgagatacgt

SEQ ID NO: 1231624 - DNA, 25 bp, Homo sapien
tatcatgaatagctattattctgag

SEQ ID NO: 1231625 - DNA, 25 bp, Homo sapien
ctgtgcctggcgatgatggggtttt

SEQ ID NO: 1231626 - DNA, 25 bp, Homo sapien
tgtgcctggcgatgatggggttttc

SEQ ID NO: 1231627 - DNA, 25 bp, Homo sapien
cacgttcacatctgaagaagccatg

SEQ ID NO: 1231628 - DNA, 25 bp, Homo sapien
tatgcatagagggacggagtgcagg

SEQ ID NO: 1231629 - DNA, 25 bp, Homo sapien
cttagcagctttacacagactgggc

SEQ ID NO: 1231630 - DNA, 25 bp, Homo sapien
tgaagcacacttagtttttctggtg

SEQ ID NO: 1231631 - DNA, 25 bp, Homo sapien
ttggaatttcttgaagatctaaagt

SEQ ID NO: 1231632 - DNA, 25 bp, Homo sapien
tggcaacttgaaaggtctggatggt

SEQ ID NO: 1231633 - DNA, 25 bp, Homo sapien
ctttttggcaacttgaaaggtctgg

SEQ ID NO: 1231634 - DNA, 25 bp, Homo sapien
tttggcaacttgaaaggtctggatg

SEQ ID NO: 1231635 - DNA, 25 bp, Homo sapien
tttttggcaacttgaaaggtctgga

SEQ ID NO: 1231636 - DNA, 25 bp, Homo sapien
aaacacaaagaagtgtcggctatca

SEQ ID NO: 1231637 - DNA, 25 bp, Homo sapien
gaagtgtcggctatcagagctgcat

SEQ ID NO: 1231638 - DNA, 25 bp, Homo sapien
aagaagtgtcggctatcagagctgc

SEQ ID NO: 1231639 - DNA, 25 bp, Homo sapien
acaaagaagtgtcggctatcagagc

SEQ ID NO: 1231640 - DNA, 25 bp, Homo sapien
ggcactaatactccaaccaaggcac

SEQ ID NO: 1231641 - DNA, 25 bp, Homo sapien
ggccagtcggctatcagggctgcat

SEQ ID NO: 1231642 - DNA, 25 bp, Homo sapien
cagactacgatgaacatggtgcaca

SEQ ID NO: 1231643 - DNA, 25 bp, Homo sapien
cagcaatggatcagagaagtcaggg

SEQ ID NO: 1231644 - DNA, 25 bp, Homo sapien
aatctctggcctattgctgttcctc

SEQ ID NO: 1231645 - DNA, 25 bp, Homo sapien
ttcaccatattattccatgtgacca

SEQ ID NO: 1231646 - DNA, 25 bp, Homo sapien
taaagggataatttgctaatgttgc

SEQ ID NO: 1231647 - DNA, 25 bp, Homo sapien
tttggcttgttcatctgcatattta

SEQ ID NO: 1231648 - DNA, 25 bp, Homo sapien
caataaagttctcgttatttcaaag

SEQ ID NO: 1231649 - DNA, 25 bp, Homo sapien
tcaataaagttctcgttatttcaaa

SEQ ID NO: 1231650 - DNA, 25 bp, Homo sapien
gatcttcaataaagttctcgttatt

SEQ ID NO: 1231651 - DNA, 25 bp, Homo sapien
tcttcaataaagttctcgttatttc

SEQ ID NO: 1231652 - DNA, 25 bp, Homo sapien
ttggaacgtcgcagaaaaagctgtc

SEQ ID NO: 1231653 - DNA, 25 bp, Homo sapien
tctctctttcataatgatcatctga

SEQ ID NO: 1231654 - DNA, 25 bp, Homo sapien
gatcatctgaccatctatcatcccg

SEQ ID NO: 1231655 - DNA, 25 bp, Homo sapien
tgtccttgtggaagttccagtcaac

SEQ ID NO: 1231656 - DNA, 25 bp, Homo sapien
aataccactctggaatatcggtcac

SEQ ID NO: 1231657 - DNA, 25 bp, Homo sapien
gcacattgatttaattgcaggtaaa

SEQ ID NO: 1231658 - DNA, 25 bp, Homo sapien
ggaattatctacattgcacattgat

SEQ ID NO: 1231659 - DNA, 25 bp, Homo sapien
tgcaggtaaattccataatgtctcc

SEQ ID NO: 1231660 - DNA, 25 bp, Homo sapien
accttatttgtgctaaggagatttt

SEQ ID NO: 1231661 - DNA, 25 bp, Homo sapien
gctcaactattttctgacaggacga

SEQ ID NO: 1231662 - DNA, 25 bp, Homo sapien
ttcagaatggcgatgtagtttccca

SEQ ID NO: 1231663 - DNA, 25 bp, Homo sapien
gcttcaaggtatgagaaacgtctcg

SEQ ID NO: 1231664 - DNA, 25 bp, Homo sapien
gacaggacgatctattgttcagaat

SEQ ID NO: 1231665 - DNA, 25 bp, Homo sapien
taaagctggcgtggcatagtcagcc

SEQ ID NO: 1231666 - DNA, 25 bp, Homo sapien
tagtcacgccgtcagaagagttcca

SEQ ID NO: 1231667 - DNA, 25 bp, Homo sapien
caatggctatggcaggatacacagt

SEQ ID NO: 1231668 - DNA, 25 bp, Homo sapien
caatcccggtgatggtagtcacgcc

SEQ ID NO: 1231669 - DNA, 25 bp, Homo sapien
taccgctcatgcagcacaacaactg

SEQ ID NO: 1231670 - DNA, 25 bp, Homo sapien
ggaagccatgtgaccatcaaaacgt

SEQ ID NO: 1231671 - DNA, 25 bp, Homo sapien
taaaccccaaagcatcggattgctg

SEQ ID NO: 1231672 - DNA, 25 bp, Homo sapien
taattcaccaatatagctgtccccg

SEQ ID NO: 1231673 - DNA, 25 bp, Homo sapien
gccccacctacagttaaggcaagga

SEQ ID NO: 1231674 - DNA, 25 bp, Homo sapien
aactcggataactccagtgagggca

SEQ ID NO: 1231675 - DNA, 25 bp, Homo sapien
gaccggaacacctggaactcggata

SEQ ID NO: 1231676 - DNA, 25 bp, Homo sapien
taacgctcaaaaggatgggacgacc

SEQ ID NO: 1231677 - DNA, 25 bp, Homo sapien
attgatatcaaacctcggccctggg

SEQ ID NO: 1231678 - DNA, 25 bp, Homo sapien
ctgggctggcgatgttaaaactgct

SEQ ID NO: 1231679 - DNA, 25 bp, Homo sapien
gaatgtctcaatgaagcagctggtg

SEQ ID NO: 1231680 - DNA, 25 bp, Homo sapien
gacacgccccagattactgtgatgg

SEQ ID NO: 1231681 - DNA, 25 bp, Homo sapien
ctgacaaaccaaccattgctgaggc

SEQ ID NO: 1231682 - DNA, 25 bp, Homo sapien
ggcgaaagcccaactgatacacatg

SEQ ID NO: 1231683 - DNA, 25 bp, Homo sapien
taaatgcaacagcaactgacagccc

SEQ ID NO: 1231684 - DNA, 25 bp, Homo sapien
aaagtctacagacaagccgacggca

SEQ ID NO: 1231685 - DNA, 25 bp, Homo sapien
gatcactttgccttctcggtcggga

SEQ ID NO: 1231686 - DNA, 25 bp, Homo sapien
tgggcccctgggatctaaatgataa

SEQ ID NO: 1231687 - DNA, 25 bp, Homo sapien
gacagcttggtgtgtggccttcaga

SEQ ID NO: 1231688 - DNA, 25 bp, Homo sapien
tgcactgggtggaggaaaaaattcc

SEQ ID NO: 1231689 - DNA, 25 bp, Homo sapien
tgtaacaaggcagagccagcgtcac

SEQ ID NO: 1231690 - DNA, 25 bp, Homo sapien
cgagtgtgttaatacagcaggcaca

SEQ ID NO: 1231691 - DNA, 25 bp, Homo sapien
ggcttccatgtttggcatttgacag

SEQ ID NO: 1231692 - DNA, 25 bp, Homo sapien
cagaaagttccgagtgtgttaatac

SEQ ID NO: 1231693 - DNA, 25 bp, Homo sapien
ttccatgtttggcatttgacagtcc

SEQ ID NO: 1231694 - DNA, 25 bp, Homo sapien
gcatcgtgcagatatttactagaga

SEQ ID NO: 1231695 - DNA, 25 bp, Homo sapien
cagtgacttagaggaaggattgaag

SEQ ID NO: 1231696 - DNA, 25 bp, Homo sapien
tactagagagctgtgtaatttgcca

SEQ ID NO: 1231697 - DNA, 25 bp, Homo sapien
gcttcttctcggttggcatcgtgca

SEQ ID NO: 1231698 - DNA, 25 bp, Homo sapien
cctgaggtactagaaagtggctggt

SEQ ID NO: 1231699 - DNA, 25 bp, Homo sapien
ctgtgtgacagggaatcagctgaca

SEQ ID NO: 1231700 - DNA, 25 bp, Homo sapien
tatttccaggataggagatgcacct

SEQ ID NO: 1231701 - DNA, 25 bp, Homo sapien
cgaatgtttgcaggatgagcgttaa

SEQ ID NO: 1231702 - DNA, 25 bp, Homo sapien
tccgtcccggcagataaggaagagc

SEQ ID NO: 1231703 - DNA, 25 bp, Homo sapien
tgcaggtttcctgccggactccagg

SEQ ID NO: 1231704 - DNA, 25 bp, Homo sapien
tctccgccacaccagtgcaggtttc

SEQ ID NO: 1231705 - DNA, 25 bp, Homo sapien
ggaagagccacccattctctccgcc

SEQ ID NO: 1231706 - DNA, 25 bp, Homo sapien
tggaaggattcctggatgagaccat

SEQ ID NO: 1231707 - DNA, 25 bp, Homo sapien
tctggaaggattcctggatgagacc

SEQ ID NO: 1231708 - DNA, 25 bp, Homo sapien
cccttcctactgtgggtctggaagg

SEQ ID NO: 1231709 - DNA, 25 bp, Homo sapien
ggtctggaaggattcctggatgaga

SEQ ID NO: 1231710 - DNA, 25 bp, Homo sapien
catccatgtgaggtattgactccca

SEQ ID NO: 1231711 - DNA, 25 bp, Homo sapien
cagttgcccggacacaggaagggat

SEQ ID NO: 1231712 - DNA, 25 bp, Homo sapien
cgtgtgtctaacagtgatgtgggcc

SEQ ID NO: 1231713 - DNA, 25 bp, Homo sapien
tctctacatcctcggagggtccctg

SEQ ID NO: 1231714 - DNA, 25 bp, Homo sapien
gagcttgggtctgatccgtaggcag

SEQ ID NO: 1231715 - DNA, 25 bp, Homo sapien
gcttgggtctgatccgtaggcaggg

SEQ ID NO: 1231716 - DNA, 25 bp, Homo sapien
cttgggtctgatccgtaggcaggga

SEQ ID NO: 1231717 - DNA, 25 bp, Homo sapien
agcttgggtctgatccgtaggcagg

SEQ ID NO: 1231718 - DNA, 25 bp, Homo sapien
ttcctgatatcagggagcaattggc

SEQ ID NO: 1231719 - DNA, 25 bp, Homo sapien
gaatagcccaatatccagtttctgg

SEQ ID NO: 1231720 - DNA, 25 bp, Homo sapien
gggaatagcccaatatccagtttct

SEQ ID NO: 1231721 - DNA, 25 bp, Homo sapien
ggctccttcctgatatcagggagca

SEQ ID NO: 1231722 - DNA, 25 bp, Homo sapien
aaatttgcaactcggactctaacag

SEQ ID NO: 1231723 - DNA, 25 bp, Homo sapien
tggcccagtcagattgtcgctcttg

SEQ ID NO: 1231724 - DNA, 25 bp, Homo sapien
gtcgctcttgaaatttgcaactcgg

SEQ ID NO: 1231725 - DNA, 25 bp, Homo sapien
gactctaacagcctgggtcagtttg

SEQ ID NO: 1231726 - DNA, 25 bp, Homo sapien
gaagccagagtgatgttctcgtggc

SEQ ID NO: 1231727 - DNA, 25 bp, Homo sapien
tggttgaacatcatcctgcagagac

SEQ ID NO: 1231728 - DNA, 25 bp, Homo sapien
cagagctgatggggatgttggcctc

SEQ ID NO: 1231729 - DNA, 25 bp, Homo sapien
ggcactgttcggcctcagagctgat

SEQ ID NO: 1231730 - DNA, 25 bp, Homo sapien
gcagcaggctggggcaagagtttcc

SEQ ID NO: 1231731 - DNA, 25 bp, Homo sapien
ggagcagcaggctggggcaagagtt

SEQ ID NO: 1231732 - DNA, 25 bp, Homo sapien
cagcaggctggggcaagagtttcct

SEQ ID NO: 1231733 - DNA, 25 bp, Homo sapien
gagcagcaggctggggcaagagttt

SEQ ID NO: 1231734 - DNA, 25 bp, Homo sapien
tggcaccagtgtctaactgtggcac

SEQ ID NO: 1231735 - DNA, 25 bp, Homo sapien
ttaaccagaggagacgaacaaaggc

SEQ ID NO: 1231736 - DNA, 25 bp, Homo sapien
cagcttcagagggattaccgggcac

SEQ ID NO: 1231737 - DNA, 25 bp, Homo sapien
taacccagatggaattgctctcagg

SEQ ID NO: 1231738 - DNA, 25 bp, Homo sapien
agagactcagaagtcagataggtac

SEQ ID NO: 1231739 - DNA, 25 bp, Homo sapien
taggtacatcctgaactgaaacaga

SEQ ID NO: 1231740 - DNA, 25 bp, Homo sapien
agcttagagactcagaagtcagata

SEQ ID NO: 1231741 - DNA, 25 bp, Homo sapien
tgaaacagaaaccagtggaggctgc

SEQ ID NO: 1231742 - DNA, 25 bp, Homo sapien
tgggctgcaaggtaactgaaactct

SEQ ID NO: 1231743 - DNA, 25 bp, Homo sapien
tccgtggctgtgagataacaaatct

SEQ ID NO: 1231744 - DNA, 25 bp, Homo sapien
ttcccacggagagagatgtgattcc

SEQ ID NO: 1231745 - DNA, 25 bp, Homo sapien
gacaccgcttcactaggactgtagg

SEQ ID NO: 1231746 - DNA, 25 bp, Homo sapien
ttcttgtgtggttttgggagatgag

SEQ ID NO: 1231747 - DNA, 25 bp, Homo sapien
gaaggccaggacttcttgtgtggtt

SEQ ID NO: 1231748 - DNA, 25 bp, Homo sapien
atctgagaaggccaggacttcttgt

SEQ ID NO: 1231749 - DNA, 25 bp, Homo sapien
aatccagctgctccctggtctgttg

SEQ ID NO: 1231750 - DNA, 25 bp, Homo sapien
tcccgtgttccctgcgtggtctgta

SEQ ID NO: 1231751 - DNA, 25 bp, Homo sapien
tggtctgtactaagcaacctggact

SEQ ID NO: 1231752 - DNA, 25 bp, Homo sapien
cccctgtctgatgggatggtggaca

SEQ ID NO: 1231753 - DNA, 25 bp, Homo sapien
cttgccatctggattcccgtgttcc

SEQ ID NO: 1231754 - DNA, 25 bp, Homo sapien
gctgcaatctttcggatgtccactt

SEQ ID NO: 1231755 - DNA, 25 bp, Homo sapien
gcaatctttcggatgtccacttcca

SEQ ID NO: 1231756 - DNA, 25 bp, Homo sapien
tctttcggatgtccacttccacaag

SEQ ID NO: 1231757 - DNA, 25 bp, Homo sapien
aagctgcaatctttcggatgtccac

SEQ ID NO: 1231758 - DNA, 25 bp, Homo sapien
aaaccgcggcaggtccgctgctgag

SEQ ID NO: 1231759 - DNA, 25 bp, Homo sapien
ggatgaccggtagagggcagcagcg

SEQ ID NO: 1231760 - DNA, 25 bp, Homo sapien
atgaccggtagagggcagcagcgcg

SEQ ID NO: 1231761 - DNA, 25 bp, Homo sapien
cctagtccagaaaccgcggcaggtc

SEQ ID NO: 1231762 - DNA, 25 bp, Homo sapien
gtttgcacgagtgagctgccctccc

SEQ ID NO: 1231763 - DNA, 25 bp, Homo sapien
agggtgcattggattttatctgcct

SEQ ID NO: 1231764 - DNA, 25 bp, Homo sapien
tgcattggattttatctgcctggga

SEQ ID NO: 1231765 - DNA, 25 bp, Homo sapien
ttggattttatctgcctgggaagct

SEQ ID NO: 1231766 - DNA, 25 bp, Homo sapien
cattggattttatctgcctgggaag

SEQ ID NO: 1231767 - DNA, 25 bp, Homo sapien
ctgccctggaccaatgactagggag

SEQ ID NO: 1231768 - DNA, 25 bp, Homo sapien
caatgactagggagctggctacaga

SEQ ID NO: 1231769 - DNA, 25 bp, Homo sapien
gaccaatgactagggagctggctac

SEQ ID NO: 1231770 - DNA, 25 bp, Homo sapien
cctggaccaatgactagggagctgg

SEQ ID NO: 1231771 - DNA, 25 bp, Homo sapien
tgtgctgtctcgctgtcactctcgc

SEQ ID NO: 1231772 - DNA, 25 bp, Homo sapien
cttcttgtgctgtctcgctgtcact

SEQ ID NO: 1231773 - DNA, 25 bp, Homo sapien
atcctcgctttgaaacagagcgggt

SEQ ID NO: 1231774 - DNA, 25 bp, Homo sapien
tcctcgctttgaaacagagcgggtc

SEQ ID NO: 1231775 - DNA, 25 bp, Homo sapien
ctgtgcccggcaggttggagacgaa

SEQ ID NO: 1231776 - DNA, 25 bp, Homo sapien
acgaagagacctcggcacagacgaa

SEQ ID NO: 1231777 - DNA, 25 bp, Homo sapien
gttggagacgaagagacctcggcac

SEQ ID NO: 1231778 - DNA, 25 bp, Homo sapien
acctcggcacagacgaagtcactca

SEQ ID NO: 1231779 - DNA, 25 bp, Homo sapien
ccgcttttgcgtccgggaggagcca

SEQ ID NO: 1231780 - DNA, 25 bp, Homo sapien
ccgcgaggttttcaggagcccgagc

SEQ ID NO: 1231781 - DNA, 25 bp, Homo sapien
ttttccagtctatgtccaactcgcg

SEQ ID NO: 1231782 - DNA, 25 bp, Homo sapien
agagaaaaccctgagctgcggcgtg

SEQ ID NO: 1231783 - DNA, 25 bp, Homo sapien
tttgtcactcaggcttcaagctgcc

SEQ ID NO: 1231784 - DNA, 25 bp, Homo sapien
tttacacctatctttcccgccttgc

SEQ ID NO: 1231785 - DNA, 25 bp, Homo sapien
gatctttgcactgtaattaagtgcc

SEQ ID NO: 1231786 - DNA, 25 bp, Homo sapien
ctgagaagactctataatgagatct

SEQ ID NO: 1231787 - DNA, 25 bp, Homo sapien
tccacatgtgagaagaccctaagct

SEQ ID NO: 1231788 - DNA, 25 bp, Homo sapien
caatgatctcggctgttggaagaca

SEQ ID NO: 1231789 - DNA, 25 bp, Homo sapien
tgggaggccataacaccgtctggaa

SEQ ID NO: 1231790 - DNA, 25 bp, Homo sapien
caaagttgcatgataagccaggccc

SEQ ID NO: 1231791 - DNA, 25 bp, Homo sapien
cttttccgtggaatgcagccaactg

SEQ ID NO: 1231792 - DNA, 25 bp, Homo sapien
tttccgtggaatgcagccaactggc

SEQ ID NO: 1231793 - DNA, 25 bp, Homo sapien
ttccgtggaatgcagccaactggcc

SEQ ID NO: 1231794 - DNA, 25 bp, Homo sapien
ttttccgtggaatgcagccaactgg

SEQ ID NO: 1231795 - DNA, 25 bp, Homo sapien
aactgctgggcactcatgaacaaag

SEQ ID NO: 1231796 - DNA, 25 bp, Homo sapien
gccaggcagcacaatgaagctttgc

SEQ ID NO: 1231797 - DNA, 25 bp, Homo sapien
tgcgatttcagatacgtggttcaca

SEQ ID NO: 1231798 - DNA, 25 bp, Homo sapien
taatgccatcctggcagtgctgcag

SEQ ID NO: 1231799 - DNA, 25 bp, Homo sapien
aaaggctgctttcccacggttctgc

SEQ ID NO: 1231800 - DNA, 25 bp, Homo sapien
aattggcattattgggggtgcagta

SEQ ID NO: 1231801 - DNA, 25 bp, Homo sapien
tgcagtaaaggttagcctttttgtc

SEQ ID NO: 1231802 - DNA, 25 bp, Homo sapien
tttctgcaaaagccgtttttacaca

SEQ ID NO: 1231803 - DNA, 25 bp, Homo sapien
gacatccagggatccctctaggcat

SEQ ID NO: 1231804 - DNA, 25 bp, Homo sapien
cagcttgtatgatcccacaattgca

SEQ ID NO: 1231805 - DNA, 25 bp, Homo sapien
ccacttgagccttacagctcacaga

SEQ ID NO: 1231806 - DNA, 25 bp, Homo sapien
aggaatccacttgagccttacagct

SEQ ID NO: 1231807 - DNA, 25 bp, Homo sapien
agaattgcttgagcactggaggtcc

SEQ ID NO: 1231808 - DNA, 25 bp, Homo sapien
ttgcttgagcactggaggtccaggt

SEQ ID NO: 1231809 - DNA, 25 bp, Homo sapien
cttgagcactggaggtccaggttgc

SEQ ID NO: 1231810 - DNA, 25 bp, Homo sapien
gaattgcttgagcactggaggtcca

SEQ ID NO: 1231811 - DNA, 25 bp, Homo sapien
cagtcacggactgtgtagcagcctt

SEQ ID NO: 1231812 - DNA, 25 bp, Homo sapien
ggtatggatgaaccagtctgcttaa

SEQ ID NO: 1231813 - DNA, 25 bp, Homo sapien
tccactccggataattctctggaga

SEQ ID NO: 1231814 - DNA, 25 bp, Homo sapien
tcatttaccgacttgttgaaggaca

SEQ ID NO: 1231815 - DNA, 25 bp, Homo sapien
tgctacctgcaccagtgccctcctg

SEQ ID NO: 1231816 - DNA, 25 bp, Homo sapien
ctgcaccagcacctttccaggaacc

SEQ ID NO: 1231817 - DNA, 25 bp, Homo sapien
caccagctgctacctgcaccagtgc

SEQ ID NO: 1231818 - DNA, 25 bp, Homo sapien
agctgctacctgcaccagtgccctc

SEQ ID NO: 1231819 - DNA, 25 bp, Homo sapien
ctgcaccagctcccacctgcaccag

SEQ ID NO: 1231820 - DNA, 25 bp, Homo sapien
agctcccacctgcaccagcgcccac

SEQ ID NO: 1231821 - DNA, 25 bp, Homo sapien
accagctcccacctgcaccagcgcc

SEQ ID NO: 1231822 - DNA, 25 bp, Homo sapien
gcaccagctcccacctgcaccagcg

SEQ ID NO: 1231823 - DNA, 25 bp, Homo sapien
tattcacacagaacaatctcttaga

SEQ ID NO: 1231824 - DNA, 25 bp, Homo sapien
actaccaaatatctatgatattggc

SEQ ID NO: 1231825 - DNA, 25 bp, Homo sapien
cacacagaacaatctcttagaggaa

SEQ ID NO: 1231826 - DNA, 25 bp, Homo sapien
tgtcagatacataatagaactacca

SEQ ID NO: 1231827 - DNA, 25 bp, Homo sapien
tgctccatcaactgccagcagcagg

SEQ ID NO: 1231828 - DNA, 25 bp, Homo sapien
cagcccctggagttgtgaggtggca

SEQ ID NO: 1231829 - DNA, 25 bp, Homo sapien
aggtggcagctcacttcttgggcct

SEQ ID NO: 1231830 - DNA, 25 bp, Homo sapien
aaagcagccaatcaccactcccaca

SEQ ID NO: 1231831 - DNA, 25 bp, Homo sapien
ggatgttatttcctccaaatctcat

SEQ ID NO: 1231832 - DNA, 25 bp, Homo sapien
ttttggatgttatttcctccaaatc

SEQ ID NO: 1231833 - DNA, 25 bp, Homo sapien
tataaggacacaagttgatatgttt

SEQ ID NO: 1231834 - DNA, 25 bp, Homo sapien
gaaagtatgcccgaagagaacaagc

SEQ ID NO: 1231835 - DNA, 25 bp, Homo sapien
cagagatcagctgccgtgaagccat

SEQ ID NO: 1231836 - DNA, 25 bp, Homo sapien
aacacttctgctaggcaagttggac

SEQ ID NO: 1231837 - DNA, 25 bp, Homo sapien
ttttctctgcaccaaatgggaacag

SEQ ID NO: 1231838 - DNA, 25 bp, Homo sapien
ttgcatagcccatcacatggtggtt

SEQ ID NO: 1231839 - DNA, 25 bp, Homo sapien
cttgcatagcccatcacatggtggt

SEQ ID NO: 1231840 - DNA, 25 bp, Homo sapien
ttctcatccatgaaagggaggcccg

SEQ ID NO: 1231841 - DNA, 25 bp, Homo sapien
gcaattctcatccatgaaagggagg

SEQ ID NO: 1231842 - DNA, 25 bp, Homo sapien
tccatgaaagggaggcccgatggca

SEQ ID NO: 1231843 - DNA, 25 bp, Homo sapien
tgcataaccaagcaggcaattctca

SEQ ID NO: 1231844 - DNA, 25 bp, Homo sapien
agcaaagtacggcatacatggtggc

SEQ ID NO: 1231845 - DNA, 25 bp, Homo sapien
tttggagactaaactggagcctgct

SEQ ID NO: 1231846 - DNA, 25 bp, Homo sapien
cctttgggtatagacaacatgttcc

SEQ ID NO: 1231847 - DNA, 25 bp, Homo sapien
gtagattcagggtgttccttgaaca

SEQ ID NO: 1231848 - DNA, 25 bp, Homo sapien
taatctgttacacaagagcaccttg

SEQ ID NO: 1231849 - DNA, 25 bp, Homo sapien
cagttgatgagtaagcagcctggct

SEQ ID NO: 1231850 - DNA, 25 bp, Homo sapien
cagcctggctggaattaatcctaca

SEQ ID NO: 1231851 - DNA, 25 bp, Homo sapien
ttagggaaagacctgttgcagcccc

SEQ ID NO: 1231852 - DNA, 25 bp, Homo sapien
cccggcattcccgagaatggcttca

SEQ ID NO: 1231853 - DNA, 25 bp, Homo sapien
ctttgaaggctctgtagcccgattt

SEQ ID NO: 1231854 - DNA, 25 bp, Homo sapien
tagggttcgatgaccttcaagtgtg

SEQ ID NO: 1231855 - DNA, 25 bp, Homo sapien
tctctttgttgatgtagggttcgat

SEQ ID NO: 1231856 - DNA, 25 bp, Homo sapien
tgtagaacttctctagactcaggct

SEQ ID NO: 1231857 - DNA, 25 bp, Homo sapien
catctgttgttggtgcaggcacaca

SEQ ID NO: 1231858 - DNA, 25 bp, Homo sapien
cttggctcagggtggatctccagaa

SEQ ID NO: 1231859 - DNA, 25 bp, Homo sapien
gactcaggctcaggaggagtcctcc

SEQ ID NO: 1231860 - DNA, 25 bp, Homo sapien
tcatccttgtttagagggaattctt

SEQ ID NO: 1231861 - DNA, 25 bp, Homo sapien
ttatgtttcatccttgtttagaggg

SEQ ID NO: 1231862 - DNA, 25 bp, Homo sapien
tcttcatatttcatggtctttgtga

SEQ ID NO: 1231863 - DNA, 25 bp, Homo sapien
tgtttcatccttgtttagagggaat

SEQ ID NO: 1231864 - DNA, 25 bp, Homo sapien
tgttagaactcagagacacaactcc

SEQ ID NO: 1231865 - DNA, 25 bp, Homo sapien
caggcacgccgtggtcctgtccagc

SEQ ID NO: 1231866 - DNA, 25 bp, Homo sapien
ccagatgttagaactcagagacaca

SEQ ID NO: 1231867 - DNA, 25 bp, Homo sapien
ttcttgtgtagaccagatgttagaa

SEQ ID NO: 1231868 - DNA, 25 bp, Homo sapien
aaaccagtctgtcttgtgtttcctg

SEQ ID NO: 1231869 - DNA, 25 bp, Homo sapien
gtgaaaaccagtctgtcttgtgttt

SEQ ID NO: 1231870 - DNA, 25 bp, Homo sapien
gaaaaccagtctgtcttgtgtttcc

SEQ ID NO: 1231871 - DNA, 25 bp, Homo sapien
tgaaaaccagtctgtcttgtgtttc

SEQ ID NO: 1231872 - DNA, 25 bp, Homo sapien
cctgtgaacactaggactctttggt

SEQ ID NO: 1231873 - DNA, 25 bp, Homo sapien
atgagaagcgggctgtcactgaaaa

SEQ ID NO: 1231874 - DNA, 25 bp, Homo sapien
ggcacgtcttgtggagtagggcaat

SEQ ID NO: 1231875 - DNA, 25 bp, Homo sapien
caatggcctgatcagatgagaagcg

SEQ ID NO: 1231876 - DNA, 25 bp, Homo sapien
ttgcaaggcactcccaggatggtcc

SEQ ID NO: 1231877 - DNA, 25 bp, Homo sapien
ttcttccgtcagaaagaacatggta

SEQ ID NO: 1231878 - DNA, 25 bp, Homo sapien
gcaggtggccatttcttccgtcaga

SEQ ID NO: 1231879 - DNA, 25 bp, Homo sapien
cagcttccacgcagagtatcaggag

SEQ ID NO: 1231880 - DNA, 25 bp, Homo sapien
gtggcacactactctcaaagccttc

SEQ ID NO: 1231881 - DNA, 25 bp, Homo sapien
cacactactctcaaagccttccctt

SEQ ID NO: 1231882 - DNA, 25 bp, Homo sapien
ttgtggcacactactctcaaagcct

SEQ ID NO: 1231883 - DNA, 25 bp, Homo sapien
cactactctcaaagccttcccttct

SEQ ID NO: 1231884 - DNA, 25 bp, Homo sapien
agcttgatgggagccggccccttct

SEQ ID NO: 1231885 - DNA, 25 bp, Homo sapien
tcagtggatctggagaccgctggca

SEQ ID NO: 1231886 - DNA, 25 bp, Homo sapien
gagaacacttgggtgccccgtcagt

SEQ ID NO: 1231887 - DNA, 25 bp, Homo sapien
agaccgctggcatttctgcatcggg

SEQ ID NO: 1231888 - DNA, 25 bp, Homo sapien
tactctgttggtggtggaaataaag

SEQ ID NO: 1231889 - DNA, 25 bp, Homo sapien
ggaggtggctcaacagaggttgaca

SEQ ID NO: 1231890 - DNA, 25 bp, Homo sapien
ggccatgttctcgtactctgttggt

SEQ ID NO: 1231891 - DNA, 25 bp, Homo sapien
aggttgacacgttggtttggatctg

SEQ ID NO: 1231892 - DNA, 25 bp, Homo sapien
tgggcagcggtaattataatcagtg

SEQ ID NO: 1231893 - DNA, 25 bp, Homo sapien
tcatgggcagcggtaattataatca

SEQ ID NO: 1231894 - DNA, 25 bp, Homo sapien
gacacagggactgtgagggatcccc

SEQ ID NO: 1231895 - DNA, 25 bp, Homo sapien
gcagcggtaattataatcagtgttc

SEQ ID NO: 1231896 - DNA, 25 bp, Homo sapien
ttgatgttgttgctaaactgggtca

SEQ ID NO: 1231897 - DNA, 25 bp, Homo sapien
ttggcgttttcctatagtgcctgct

SEQ ID NO: 1231898 - DNA, 25 bp, Homo sapien
actgggtcatgttctcggtgatgta

SEQ ID NO: 1231899 - DNA, 25 bp, Homo sapien
cctatagtgcctgctgtgttgatgt

SEQ ID NO: 1231900 - DNA, 25 bp, Homo sapien
gtttttagctgtatcgccaccttta

SEQ ID NO: 1231901 - DNA, 25 bp, Homo sapien
caagcacttgacaagtacagtttgc

SEQ ID NO: 1231902 - DNA, 25 bp, Homo sapien
catgtaacttggacaagcacttgac

SEQ ID NO: 1231903 - DNA, 25 bp, Homo sapien
taagagtggttctttttcatgtaac

SEQ ID NO: 1231904 - DNA, 25 bp, Homo sapien
cactgccgtcaccattcccttctga

SEQ ID NO: 1231905 - DNA, 25 bp, Homo sapien
gagtaaacaagtggctggtttctgg

SEQ ID NO: 1231906 - DNA, 25 bp, Homo sapien
ggtgagtaaacaagtggctggtttc

SEQ ID NO: 1231907 - DNA, 25 bp, Homo sapien
ccttctgctagtgactgtcactgcc

SEQ ID NO: 1231908 - DNA, 25 bp, Homo sapien
gggcgaccgagctgcgtgcgtgtgc

SEQ ID NO: 1231909 - DNA, 25 bp, Homo sapien
ggcgcctcgcgccccgacaggtgca

SEQ ID NO: 1231910 - DNA, 25 bp, Homo sapien
gcgtgtgcaagaccggccgccggcg

SEQ ID NO: 1231911 - DNA, 25 bp, Homo sapien
ccgacaggtgcaggcgcgcgggctt

SEQ ID NO: 1231912 - DNA, 25 bp, Homo sapien
caactatgttcaggtgacttccatc

SEQ ID NO: 1231913 - DNA, 25 bp, Homo sapien
tacaactatgttcaggtgacttcca

SEQ ID NO: 1231914 - DNA, 25 bp, Homo sapien
tcctgcatcccctattttgactcct

SEQ ID NO: 1231915 - DNA, 25 bp, Homo sapien
ccttacaactatgttcaggtgactt

SEQ ID NO: 1231916 - DNA, 25 bp, Homo sapien
ctgggcacgcgcagcgtctgcccaa

SEQ ID NO: 1231917 - DNA, 25 bp, Homo sapien
tccctctgggcacgcgcagcgtctg

SEQ ID NO: 1231918 - DNA, 25 bp, Homo sapien
ctgcccaaggggcctgagacctccc

SEQ ID NO: 1231919 - DNA, 25 bp, Homo sapien
cctccctctgggcacgcgcagcgtc

SEQ ID NO: 1231920 - DNA, 25 bp, Homo sapien
tttctaccctgaatgtgccactcag

SEQ ID NO: 1231921 - DNA, 25 bp, Homo sapien
ggctgccccgcagtgaatctgagca

SEQ ID NO: 1231922 - DNA, 25 bp, Homo sapien
gggccacatcgctcaggcttcggct

SEQ ID NO: 1231923 - DNA, 25 bp, Homo sapien
gacctagatgtctgccgagtggcac

SEQ ID NO: 1231924 - DNA, 25 bp, Homo sapien
taatgactcaacctggtcgctgctg

SEQ ID NO: 1231925 - DNA, 25 bp, Homo sapien
ttctgggcgcacacgcaggctgagt

SEQ ID NO: 1231926 - DNA, 25 bp, Homo sapien
gctgagtgcctcttgaacttttgcg

SEQ ID NO: 1231927 - DNA, 25 bp, Homo sapien
ggagtcccggctggctaatgactca

SEQ ID NO: 1231928 - DNA, 25 bp, Homo sapien
ggtgtatctcctgggaccgctggaa

SEQ ID NO: 1231929 - DNA, 25 bp, Homo sapien
ccttccgggcctggtaattgatgag

SEQ ID NO: 1231930 - DNA, 25 bp, Homo sapien
ttcttgagacgggtcagcaccaggg

SEQ ID NO: 1231931 - DNA, 25 bp, Homo sapien
gcatgtaggtgcctcttgcgacagg

SEQ ID NO: 1231932 - DNA, 25 bp, Homo sapien
ggagctgttgggaggcgctctctcc

SEQ ID NO: 1231933 - DNA, 25 bp, Homo sapien
agtaccatctgatcaagggagctgt

SEQ ID NO: 1231934 - DNA, 25 bp, Homo sapien
acggagctgggcctctagtaccatc

SEQ ID NO: 1231935 - DNA, 25 bp, Homo sapien
ccatctgatcaagggagctgttggg

SEQ ID NO: 1231936 - DNA, 25 bp, Homo sapien
ctccttctggctgcgcactgtaagc

SEQ ID NO: 1231937 - DNA, 25 bp, Homo sapien
caattataatcagattacaaaagga

SEQ ID NO: 1231938 - DNA, 25 bp, Homo sapien
cactgtaagccaggcgtccttggtt

SEQ ID NO: 1231939 - DNA, 25 bp, Homo sapien
gaatcacattgccacatctccttct

SEQ ID NO: 1231940 - DNA, 25 bp, Homo sapien
tattgaccaccatgttaagtactgt

SEQ ID NO: 1231941 - DNA, 25 bp, Homo sapien
gaagtctaagacgatgatcctggct

SEQ ID NO: 1231942 - DNA, 25 bp, Homo sapien
cctttgactggaaagagctgacttg

SEQ ID NO: 1231943 - DNA, 25 bp, Homo sapien
tttcagcttgcgagggtaaaagtct

SEQ ID NO: 1231944 - DNA, 25 bp, Homo sapien
cagaacatggcccacatgtcaatca

SEQ ID NO: 1231945 - DNA, 25 bp, Homo sapien
agaacatggcccacatgtcaatcat

SEQ ID NO: 1231946 - DNA, 25 bp, Homo sapien
ggcagaacatggcccacatgtcaat

SEQ ID NO: 1231947 - DNA, 25 bp, Homo sapien
aggcagaacatggcccacatgtcaa

SEQ ID NO: 1231948 - DNA, 25 bp, Homo sapien
catttttatagtatcattcacgtga

SEQ ID NO: 1231949 - DNA, 25 bp, Homo sapien
ttcagatctataggcaaacttgttc

SEQ ID NO: 1231950 - DNA, 25 bp, Homo sapien
caaacttgttcatatgagggcttcc

SEQ ID NO: 1231951 - DNA, 25 bp, Homo sapien
cattcacgtgaaattcagatctata

SEQ ID NO: 1231952 - DNA, 25 bp, Homo sapien
gaagtggtatccagggctcatagcc

SEQ ID NO: 1231953 - DNA, 25 bp, Homo sapien
ataccctgagggctgtagtactctg

SEQ ID NO: 1231954 - DNA, 25 bp, Homo sapien
ttagatgatgaacccgaagagggag

SEQ ID NO: 1231955 - DNA, 25 bp, Homo sapien
gccagctgctttgataccctgaggg

SEQ ID NO: 1231956 - DNA, 25 bp, Homo sapien
gctgctgaggtctgctgagctctcc

SEQ ID NO: 1231957 - DNA, 25 bp, Homo sapien
cccatgtcacaaggtcagaggtgct

SEQ ID NO: 1231958 - DNA, 25 bp, Homo sapien
tgggcagaattaaagctacagaggc

SEQ ID NO: 1231959 - DNA, 25 bp, Homo sapien
catttgtctgggaggccacagagct

SEQ ID NO: 1231960 - DNA, 25 bp, Homo sapien
ggcaccactggacccggaagaccat

SEQ ID NO: 1231961 - DNA, 25 bp, Homo sapien
atcagagggacaaaatgatccttcc

SEQ ID NO: 1231962 - DNA, 25 bp, Homo sapien
agagagcttgctgtataggaggcta

SEQ ID NO: 1231963 - DNA, 25 bp, Homo sapien
gaagaccatctcactagggagagag

SEQ ID NO: 1231964 - DNA, 25 bp, Homo sapien
gtggccccttggaaagcatggtgac

SEQ ID NO: 1231965 - DNA, 25 bp, Homo sapien
cagctgtggccccttggaaagcatg

SEQ ID NO: 1231966 - DNA, 25 bp, Homo sapien
gctgtggccccttggaaagcatggt

SEQ ID NO: 1231967 - DNA, 25 bp, Homo sapien
tgtggccccttggaaagcatggtga

SEQ ID NO: 1231968 - DNA, 25 bp, Homo sapien
tcattttgcacatgttccatttatt

SEQ ID NO: 1231969 - DNA, 25 bp, Homo sapien
cctgtgaatctgacagcacttgtga

SEQ ID NO: 1231970 - DNA, 25 bp, Homo sapien
tctgtggccatcatctgagaggctc

SEQ ID NO: 1231971 - DNA, 25 bp, Homo sapien
ccatttattgctcccctcatgagaa

SEQ ID NO: 1231972 - DNA, 25 bp, Homo sapien
acagagcagacgaaggcggtgtgca

SEQ ID NO: 1231973 - DNA, 25 bp, Homo sapien
agagcagacgaaggcggtgtgcaga

SEQ ID NO: 1231974 - DNA, 25 bp, Homo sapien
taggggggttaccaagatgaagaca

SEQ ID NO: 1231975 - DNA, 25 bp, Homo sapien
gaagacagagcagacgaaggcggtg

SEQ ID NO: 1231976 - DNA, 25 bp, Homo sapien
tgagggccaggtagccacattgaga

SEQ ID NO: 1231977 - DNA, 25 bp, Homo sapien
ggccaggtagccacattgagaggta

SEQ ID NO: 1231978 - DNA, 25 bp, Homo sapien
ttttgagggccaggtagccacattg

SEQ ID NO: 1231979 - DNA, 25 bp, Homo sapien
gccaggtagccacattgagaggtac

SEQ ID NO: 1231980 - DNA, 25 bp, Homo sapien
ggatcaggtaaaccctggcacacac

SEQ ID NO: 1231981 - DNA, 25 bp, Homo sapien
agcagtggaaggatccagggagtga

SEQ ID NO: 1231982 - DNA, 25 bp, Homo sapien
actggtggatcaggtaaaccctggc

SEQ ID NO: 1231983 - DNA, 25 bp, Homo sapien
gtaaaccctggcacacactgagctc

SEQ ID NO: 1231984 - DNA, 25 bp, Homo sapien
caaatttgcatttatcgagtaaatg

SEQ ID NO: 1231985 - DNA, 25 bp, Homo sapien
cacattcagctttgggttataggta

SEQ ID NO: 1231986 - DNA, 25 bp, Homo sapien
tgggatcgtcacattcagctttggg

SEQ ID NO: 1231987 - DNA, 25 bp, Homo sapien
cagctttgggttataggtactttgt

SEQ ID NO: 1231988 - DNA, 25 bp, Homo sapien
gatccccggtgtgatctttacttta

SEQ ID NO: 1231989 - DNA, 25 bp, Homo sapien
actttatcctctgaacctgcacagc

SEQ ID NO: 1231990 - DNA, 25 bp, Homo sapien
tatcctctgaacctgcacagctctt

SEQ ID NO: 1231991 - DNA, 25 bp, Homo sapien
accttctccatgtaggtttcatgga

SEQ ID NO: 1231992 - DNA, 25 bp, Homo sapien
caggcgagtaaagtccatgggtacc

SEQ ID NO: 1231993 - DNA, 25 bp, Homo sapien
tccatgggtaccatgggcactggca

SEQ ID NO: 1231994 - DNA, 25 bp, Homo sapien
taaagtccatgggtaccatgggcac

SEQ ID NO: 1231995 - DNA, 25 bp, Homo sapien
aaggcaggcaacaggcgagtaaagt

SEQ ID NO: 1231996 - DNA, 25 bp, Homo sapien
tgtcattgacggtggcatttagtaa

SEQ ID NO: 1231997 - DNA, 25 bp, Homo sapien
agatgctactctcctaactgttccc

SEQ ID NO: 1231998 - DNA, 25 bp, Homo sapien
tgctactctcctaactgttcccctt

SEQ ID NO: 1231999 - DNA, 25 bp, Homo sapien
gcagatgctactctcctaactgttc

SEQ ID NO: 1232000 - DNA, 25 bp, Homo sapien
ccaccggggtcagcttaaatccatt

SEQ ID NO: 1232001 - DNA, 25 bp, Homo sapien
ctgcagcattgggtttgtagctctc

SEQ ID NO: 1232002 - DNA, 25 bp, Homo sapien
gctttgtacttcatattccaccggg

SEQ ID NO: 1232003 - DNA, 25 bp, Homo sapien
tgtagctctctcacggcactcgtag

SEQ ID NO: 1232004 - DNA, 25 bp, Homo sapien
ttagcatgtgtgggctcctccctga

SEQ ID NO: 1232005 - DNA, 25 bp, Homo sapien
attttagcatgtgtgggctcctccc

SEQ ID NO: 1232006 - DNA, 25 bp, Homo sapien
ttttagcatgtgtgggctcctccct

SEQ ID NO: 1232007 - DNA, 25 bp, Homo sapien
gggctcctccctgaatgagagttca

SEQ ID NO: 1232008 - DNA, 25 bp, Homo sapien
gttcgtctccataggcggatgaagc

SEQ ID NO: 1232009 - DNA, 25 bp, Homo sapien
tagtgatattggtcagtgctacaga

SEQ ID NO: 1232010 - DNA, 25 bp, Homo sapien
gatagacaccagtgtgaagcctgcc

SEQ ID NO: 1232011 - DNA, 25 bp, Homo sapien
catttctgttggagggaccttgttc

SEQ ID NO: 1232012 - DNA, 25 bp, Homo sapien
caaaccaagactcttctgccaaact

SEQ ID NO: 1232013 - DNA, 25 bp, Homo sapien
tgctcccggccaacagaaggtccat

SEQ ID NO: 1232014 - DNA, 25 bp, Homo sapien
acctggcacggggtaggatgctccc

SEQ ID NO: 1232015 - DNA, 25 bp, Homo sapien
aaaccaagactcttctgccaaactc

SEQ ID NO: 1232016 - DNA, 25 bp, Homo sapien
ccagagcctcccagtctctgaccat

SEQ ID NO: 1232017 - DNA, 25 bp, Homo sapien
ggaaacctgccaagagtcctgggct

SEQ ID NO: 1232018 - DNA, 25 bp, Homo sapien
tcctgggctggcttgcagcctcttc

SEQ ID NO: 1232019 - DNA, 25 bp, Homo sapien
gccaggaaacctgccaagagtcctg

SEQ ID NO: 1232020 - DNA, 25 bp, Homo sapien
tcagcagatggtctgagtatactgc

SEQ ID NO: 1232021 - DNA, 25 bp, Homo sapien
cctgggtctgttggtgctatttgtt

SEQ ID NO: 1232022 - DNA, 25 bp, Homo sapien
gatcctgggtctgttggtgctattt

SEQ ID NO: 1232023 - DNA, 25 bp, Homo sapien
tatactgctcactttcaagagacaa

SEQ ID NO: 1232024 - DNA, 25 bp, Homo sapien
ggtccgccaggtcaaatgatgtgga

SEQ ID NO: 1232025 - DNA, 25 bp, Homo sapien
caccgggatcggcctgtactccagg

SEQ ID NO: 1232026 - DNA, 25 bp, Homo sapien
ccttgaagcacaagtttttgctgca

SEQ ID NO: 1232027 - DNA, 25 bp, Homo sapien
tgggggacacatttgaccagggtct

SEQ ID NO: 1232028 - DNA, 25 bp, Homo sapien
tctctgcactggaaactctgtctcc

SEQ ID NO: 1232029 - DNA, 25 bp, Homo sapien
ctctctctgcactggaaactctgtc

SEQ ID NO: 1232030 - DNA, 25 bp, Homo sapien
actctgtctcccagtttcaagaaat

SEQ ID NO: 1232031 - DNA, 25 bp, Homo sapien
gagtgcagaggagcaatctctctct

SEQ ID NO: 1232032 - DNA, 25 bp, Homo sapien
ggaacaaacttgagaagcaagtcag

SEQ ID NO: 1232033 - DNA, 25 bp, Homo sapien
tgaggcatggggaacaaacttgaga

SEQ ID NO: 1232034 - DNA, 25 bp, Homo sapien
ggagatgaggctctacttgaggcat

SEQ ID NO: 1232035 - DNA, 25 bp, Homo sapien
catgatatacgcgaagtcttcagag

SEQ ID NO: 1232036 - DNA, 25 bp, Homo sapien
caaacaggagtactgaggatgctaa

SEQ ID NO: 1232037 - DNA, 25 bp, Homo sapien
acaggagcaaacaggagtactgagg

SEQ ID NO: 1232038 - DNA, 25 bp, Homo sapien
gagtactgaggatgctaagaagtca

SEQ ID NO: 1232039 - DNA, 25 bp, Homo sapien
aggatgctaagaagtcatggcagag

SEQ ID NO: 1232040 - DNA, 25 bp, Homo sapien
catgaaatccatcgaattgagcaaa

SEQ ID NO: 1232041 - DNA, 25 bp, Homo sapien
ttcccttttcaaggaccagtcctgc

SEQ ID NO: 1232042 - DNA, 25 bp, Homo sapien
tgttcagtgttactttgcaaccacc

SEQ ID NO: 1232043 - DNA, 25 bp, Homo sapien
tggtcagtggtactgaagcagatct

SEQ ID NO: 1232044 - DNA, 25 bp, Homo sapien
ccttttgagttttctgggtatctgt

SEQ ID NO: 1232045 - DNA, 25 bp, Homo sapien
gccttttgagttttctgggtatctg

SEQ ID NO: 1232046 - DNA, 25 bp, Homo sapien
cttttgagttttctgggtatctgtc

SEQ ID NO: 1232047 - DNA, 25 bp, Homo sapien
tttgagttttctgggtatctgtcat

SEQ ID NO: 1232048 - DNA, 25 bp, Homo sapien
cagaatagtcctcggccaaatgcca

SEQ ID NO: 1232049 - DNA, 25 bp, Homo sapien
atcaggtctgagaggccccttctgg

SEQ ID NO: 1232050 - DNA, 25 bp, Homo sapien
cccttctgggtcgtcatgggaacca

SEQ ID NO: 1232051 - DNA, 25 bp, Homo sapien
tagtgatgtgtgatagctgcccctc

SEQ ID NO: 1232052 - DNA, 25 bp, Homo sapien
gggcctaaggacaatttctctatca

SEQ ID NO: 1232053 - DNA, 25 bp, Homo sapien
ttcagctctctctgacttacgaggg

SEQ ID NO: 1232054 - DNA, 25 bp, Homo sapien
cagccattagttccagcacatgtgg

SEQ ID NO: 1232055 - DNA, 25 bp, Homo sapien
agttttgcagacatcgtcccagggc

SEQ ID NO: 1232056 - DNA, 25 bp, Homo sapien
tcacaatcctgagacaatttagggt

SEQ ID NO: 1232057 - DNA, 25 bp, Homo sapien
ccctggtgcagtgcagtcaatgata

SEQ ID NO: 1232058 - DNA, 25 bp, Homo sapien
tcaaggtcaagcataggttctcagg

SEQ ID NO: 1232059 - DNA, 25 bp, Homo sapien
tgcttggttaatgcccagcccaggt

SEQ ID NO: 1232060 - DNA, 25 bp, Homo sapien
aatgcagtgcctatttatgggcatg

SEQ ID NO: 1232061 - DNA, 25 bp, Homo sapien
ggaatgcagtgcctatttatgggca

SEQ ID NO: 1232062 - DNA, 25 bp, Homo sapien
ctggaatgcagtgcctatttatggg

SEQ ID NO: 1232063 - DNA, 25 bp, Homo sapien
cagtgcctatttatgggcatgatca

SEQ ID NO: 1232064 - DNA, 25 bp, Homo sapien
ttttttgttttctccacatagtcga

SEQ ID NO: 1232065 - DNA, 25 bp, Homo sapien
tttgttttctccacatagtcgaaca

SEQ ID NO: 1232066 - DNA, 25 bp, Homo sapien
ttttgttttctccacatagtcgaac

SEQ ID NO: 1232067 - DNA, 25 bp, Homo sapien
ttgttttctccacatagtcgaacat

SEQ ID NO: 1232068 - DNA, 25 bp, Homo sapien
ttcacgggaacacaaggacatagac

SEQ ID NO: 1232069 - DNA, 25 bp, Homo sapien
ttttcacgggaacacaaggacatag

SEQ ID NO: 1232070 - DNA, 25 bp, Homo sapien
caatccttttcacgggaacacaagg

SEQ ID NO: 1232071 - DNA, 25 bp, Homo sapien
tccttttcacgggaacacaaggaca

SEQ ID NO: 1232072 - DNA, 25 bp, Homo sapien
ccatcctgcggcctgccgagcgccg

SEQ ID NO: 1232073 - DNA, 25 bp, Homo sapien
agcgatgattcaccggagggaagcg

SEQ ID NO: 1232074 - DNA, 25 bp, Homo sapien
ctgcgagcgatgattcaccggaggg

SEQ ID NO: 1232075 - DNA, 25 bp, Homo sapien
gggaccaggccatcctgcggcctgc

SEQ ID NO: 1232076 - DNA, 25 bp, Homo sapien
gccgtactgcgcagagaaaggtcgg

SEQ ID NO: 1232077 - DNA, 25 bp, Homo sapien
aaaggtcggggcgactccgcgctgc

SEQ ID NO: 1232078 - DNA, 25 bp, Homo sapien
tcccggcggccgtactgcgcagaga

SEQ ID NO: 1232079 - DNA, 25 bp, Homo sapien
ccggcggccgtactgcgcagagaaa

SEQ ID NO: 1232080 - DNA, 25 bp, Homo sapien
ctcgtagtcctggttgaggtacttg

SEQ ID NO: 1232081 - DNA, 25 bp, Homo sapien
cgatgccccgggttttgctggagta

SEQ ID NO: 1232082 - DNA, 25 bp, Homo sapien
acttgatggccctgtcgtgggagcc

SEQ ID NO: 1232083 - DNA, 25 bp, Homo sapien
gagtagggccccaactccttgaagc

SEQ ID NO: 1232084 - DNA, 25 bp, Homo sapien
caggtcagcgtatcactttcacaac

SEQ ID NO: 1232085 - DNA, 25 bp, Homo sapien
taatttcatttgaggcacattacaa

SEQ ID NO: 1232086 - DNA, 25 bp, Homo sapien
ggcactgagtcaggtcagcgtatca

SEQ ID NO: 1232087 - DNA, 25 bp, Homo sapien
catttgaggcacattacaatcctgc

SEQ ID NO: 1232088 - DNA, 25 bp, Homo sapien
gcattggaccctgcacactctggac

SEQ ID NO: 1232089 - DNA, 25 bp, Homo sapien
agccttttctgccagacgtggagac

SEQ ID NO: 1232090 - DNA, 25 bp, Homo sapien
ggagaccatccacactctagagcca

SEQ ID NO: 1232091 - DNA, 25 bp, Homo sapien
tatccactgggttagcatcctctct

SEQ ID NO: 1232092 - DNA, 25 bp, Homo sapien
tctgtgcgggtggctcctccaatga

SEQ ID NO: 1232093 - DNA, 25 bp, Homo sapien
gtctgtgcgggtggctcctccaatg

SEQ ID NO: 1232094 - DNA, 25 bp, Homo sapien
ctcctccaatgataaactgggggtc

SEQ ID NO: 1232095 - DNA, 25 bp, Homo sapien
taaactgggggtcagcgcagatctc

SEQ ID NO: 1232096 - DNA, 25 bp, Homo sapien
atctctgtaacctcagcaactagcc

SEQ ID NO: 1232097 - DNA, 25 bp, Homo sapien
gtggcagcatctctgtaacctcagc

SEQ ID NO: 1232098 - DNA, 25 bp, Homo sapien
aagccccctggtcctcctagtggca

SEQ ID NO: 1232099 - DNA, 25 bp, Homo sapien
caaggggtggctgacatccagaagc

SEQ ID NO: 1232100 - DNA, 25 bp, Homo sapien
caatggagatggctcttggtgagag

SEQ ID NO: 1232101 - DNA, 25 bp, Homo sapien
atggagatggctcttggtgagagca

SEQ ID NO: 1232102 - DNA, 25 bp, Homo sapien
tgcaatggagatggctcttggtgag

SEQ ID NO: 1232103 - DNA, 25 bp, Homo sapien
ctgcaatggagatggctcttggtga

SEQ ID NO: 1232104 - DNA, 25 bp, Homo sapien
gctgaatcaattcttacacaactat

SEQ ID NO: 1232105 - DNA, 25 bp, Homo sapien
tgcagggtcagccagtggaggctcc

SEQ ID NO: 1232106 - DNA, 25 bp, Homo sapien
gatttcagagccatatttagctgca

SEQ ID NO: 1232107 - DNA, 25 bp, Homo sapien
tggttattaccccacgatttcagag

SEQ ID NO: 1232108 - DNA, 25 bp, Homo sapien
tgcacgaaggcaagagatgtctcat

SEQ ID NO: 1232109 - DNA, 25 bp, Homo sapien
tgtagctggagaccgtgggtaccat

SEQ ID NO: 1232110 - DNA, 25 bp, Homo sapien
catttacaaccagaagagaagccga

SEQ ID NO: 1232111 - DNA, 25 bp, Homo sapien
caatgtagccatggacagtgccctg

SEQ ID NO: 1232112 - DNA, 25 bp, Homo sapien
gagatcacaaggtactggaagcacg

SEQ ID NO: 1232113 - DNA, 25 bp, Homo sapien
gagagagtccacgttccttggcact

SEQ ID NO: 1232114 - DNA, 25 bp, Homo sapien
gaaactttctcactcggatcctggt

SEQ ID NO: 1232115 - DNA, 25 bp, Homo sapien
gaatgggcccaacaagaatgaacgt

SEQ ID NO: 1232116 - DNA, 25 bp, Homo sapien
agctgaactactagtcttgcttggg

SEQ ID NO: 1232117 - DNA, 25 bp, Homo sapien
aaagctgaactactagtcttgcttg

SEQ ID NO: 1232118 - DNA, 25 bp, Homo sapien
aagctgaactactagtcttgcttgg

SEQ ID NO: 1232119 - DNA, 25 bp, Homo sapien
aattcctgctcttcaggaactctcc

SEQ ID NO: 1232120 - DNA, 25 bp, Homo sapien
aggaggtggaaccttgccctcggct

SEQ ID NO: 1232121 - DNA, 25 bp, Homo sapien
tcggctgccaattcctgtcttaaat

SEQ ID NO: 1232122 - DNA, 25 bp, Homo sapien
ctgctcttcaggaactctcctttct

SEQ ID NO: 1232123 - DNA, 25 bp, Homo sapien
gcatgttttgtcgtttttgtgtccc

SEQ ID NO: 1232124 - DNA, 25 bp, Homo sapien
ccacggtcactagtcaatatcagag

SEQ ID NO: 1232125 - DNA, 25 bp, Homo sapien
cagaaggacataacctgttgcatgt

SEQ ID NO: 1232126 - DNA, 25 bp, Homo sapien
tccagtaccccagcagaggtggctg

SEQ ID NO: 1232127 - DNA, 25 bp, Homo sapien
ctagtcccttgcctgtctcagccgt

SEQ ID NO: 1232128 - DNA, 25 bp, Homo sapien
cccttgcctgtctcagccgtgccct

SEQ ID NO: 1232129 - DNA, 25 bp, Homo sapien
tagtcccttgcctgtctcagccgtg

SEQ ID NO: 1232130 - DNA, 25 bp, Homo sapien
ttgcctgtctcagccgtgccctgga

SEQ ID NO: 1232131 - DNA, 25 bp, Homo sapien
gaaaccctgatggatctcaaatcgt

SEQ ID NO: 1232132 - DNA, 25 bp, Homo sapien
tagatacacgataaacagaccaagc

SEQ ID NO: 1232133 - DNA, 25 bp, Homo sapien
tatttactcatacttgcggctggat

SEQ ID NO: 1232134 - DNA, 25 bp, Homo sapien
cagacatttttgagtggcacacggg

SEQ ID NO: 1232135 - DNA, 25 bp, Homo sapien
tgcagttcccaaggtaccctggacc

SEQ ID NO: 1232136 - DNA, 25 bp, Homo sapien
tgtggtttggaaaggcacctgagct

SEQ ID NO: 1232137 - DNA, 25 bp, Homo sapien
ggtgccagcaagagaatggagccaa

SEQ ID NO: 1232138 - DNA, 25 bp, Homo sapien
ctggacctgagatgttcccactgtc

SEQ ID NO: 1232139 - DNA, 25 bp, Homo sapien
gctttgagtctgaacagggcagact

SEQ ID NO: 1232140 - DNA, 25 bp, Homo sapien
agggcagactgggactgtaggaggg

SEQ ID NO: 1232141 - DNA, 25 bp, Homo sapien
gaggctttgagtctgaacagggcag

SEQ ID NO: 1232142 - DNA, 25 bp, Homo sapien
cagggcagactgggactgtaggagg

SEQ ID NO: 1232143 - DNA, 25 bp, Homo sapien
tctgtcctcgcgtaagtcaactctg

SEQ ID NO: 1232144 - DNA, 25 bp, Homo sapien
ccaggcctgtactcagtctagagga

SEQ ID NO: 1232145 - DNA, 25 bp, Homo sapien
tccaatctagtctcaggctccttgt

SEQ ID NO: 1232146 - DNA, 25 bp, Homo sapien
ctagaggagactggcgctggttctg

SEQ ID NO: 1232147 - DNA, 25 bp, Homo sapien
cacgtttcacacactggccaaggga

SEQ ID NO: 1232148 - DNA, 25 bp, Homo sapien
gggcccagcttgccgtgcctctgca

SEQ ID NO: 1232149 - DNA, 25 bp, Homo sapien
gcccagcttgccgtgcctctgcaca

SEQ ID NO: 1232150 - DNA, 25 bp, Homo sapien
acacacgtttcacacactggccaag

SEQ ID NO: 1232151 - DNA, 25 bp, Homo sapien
gtcacagttacacccagtgcctgca

SEQ ID NO: 1232152 - DNA, 25 bp, Homo sapien
tggtgctggctgtcacagttacacc

SEQ ID NO: 1232153 - DNA, 25 bp, Homo sapien
ctggctgtcacagttacacccagtg

SEQ ID NO: 1232154 - DNA, 25 bp, Homo sapien
ctgcaggacaggaggtgtgtgggca

SEQ ID NO: 1232155 - DNA, 25 bp, Homo sapien
tgtggctctgtcacactatagtgca

SEQ ID NO: 1232156 - DNA, 25 bp, Homo sapien
ctgtggctctgtcacactatagtgc

SEQ ID NO: 1232157 - DNA, 25 bp, Homo sapien
gagagagggttgtggccgggggtca

SEQ ID NO: 1232158 - DNA, 25 bp, Homo sapien
tggcagtcttgtcctcgaaagggtg

SEQ ID NO: 1232159 - DNA, 25 bp, Homo sapien
cagtcttgtcctcgaaagggtgcca

SEQ ID NO: 1232160 - DNA, 25 bp, Homo sapien
agagagggttgtggccgggggtcag

SEQ ID NO: 1232161 - DNA, 25 bp, Homo sapien
caggtggttctcaaaccagaaagga

SEQ ID NO: 1232162 - DNA, 25 bp, Homo sapien
ggcacaggccaaatggctccacgga

SEQ ID NO: 1232163 - DNA, 25 bp, Homo sapien
cccacagccacgttgagccttcagg

SEQ ID NO: 1232164 - DNA, 25 bp, Homo sapien
ccagaaaggagtatggtggaaagac

SEQ ID NO: 1232165 - DNA, 25 bp, Homo sapien
ttctacgttgtccaggacccctcca

SEQ ID NO: 1232166 - DNA, 25 bp, Homo sapien
acctgcccgatgccatcctcctggg

SEQ ID NO: 1232167 - DNA, 25 bp, Homo sapien
gcttctaggcgcttgactgccctct

SEQ ID NO: 1232168 - DNA, 25 bp, Homo sapien
ctccagcaaacaatcccagaggcgg

SEQ ID NO: 1232169 - DNA, 25 bp, Homo sapien
tacccagccatgcttctgtcctgga

SEQ ID NO: 1232170 - DNA, 25 bp, Homo sapien
tgccccgtgaaggtcctgaccacgg

SEQ ID NO: 1232171 - DNA, 25 bp, Homo sapien
gggcttgacagaccggccatcccta

SEQ ID NO: 1232172 - DNA, 25 bp, Homo sapien
ctgcctggaggttcctaagctgccc

SEQ ID NO: 1232173 - DNA, 25 bp, Homo sapien
tttgaattctagtcgatgacttagc

SEQ ID NO: 1232174 - DNA, 25 bp, Homo sapien
tgaattctagtcgatgacttagcat

SEQ ID NO: 1232175 - DNA, 25 bp, Homo sapien
tctttgaattctagtcgatgactta

SEQ ID NO: 1232176 - DNA, 25 bp, Homo sapien
aattctttgaattctagtcgatgac

SEQ ID NO: 1232177 - DNA, 25 bp, Homo sapien
gtgaaagatccctgcatagttttcc

SEQ ID NO: 1232178 - DNA, 25 bp, Homo sapien
agatccctgcatagttttcctggaa

SEQ ID NO: 1232179 - DNA, 25 bp, Homo sapien
gggacgactcgagccaggatttctt

SEQ ID NO: 1232180 - DNA, 25 bp, Homo sapien
ccctgcatagttttcctggaagctc

SEQ ID NO: 1232181 - DNA, 25 bp, Homo sapien
ttcggctgaatgcacaaagagcagc

SEQ ID NO: 1232182 - DNA, 25 bp, Homo sapien
cgctcccttcggctgaatgcacaaa

SEQ ID NO: 1232183 - DNA, 25 bp, Homo sapien
ccgtccttggtgggcagcctgtcat

SEQ ID NO: 1232184 - DNA, 25 bp, Homo sapien
agaactcgctcccttcggctgaatg

SEQ ID NO: 1232185 - DNA, 25 bp, Homo sapien
gggccaggggaggatggcaacttac

SEQ ID NO: 1232186 - DNA, 25 bp, Homo sapien
attttttggaatccagggcattggg

SEQ ID NO: 1232187 - DNA, 25 bp, Homo sapien
gtgaattttttggaatccagggcat

SEQ ID NO: 1232188 - DNA, 25 bp, Homo sapien
gaattttttggaatccagggcattg

SEQ ID NO: 1232189 - DNA, 25 bp, Homo sapien
tgtcctgtcaaggaagtagagctcc

SEQ ID NO: 1232190 - DNA, 25 bp, Homo sapien
gtcactttaatggaaggagccgggc

SEQ ID NO: 1232191 - DNA, 25 bp, Homo sapien
caaactcaactgtgggcaacctggg

SEQ ID NO: 1232192 - DNA, 25 bp, Homo sapien
ttatcagcgtacagtgcagccaggc

SEQ ID NO: 1232193 - DNA, 25 bp, Homo sapien
ccccagtattgagcagtgggactta

SEQ ID NO: 1232194 - DNA, 25 bp, Homo sapien
gaggtctactaatgggtcgtttggc

SEQ ID NO: 1232195 - DNA, 25 bp, Homo sapien
ttagtgctcctgactgctgatgctg

SEQ ID NO: 1232196 - DNA, 25 bp, Homo sapien
gggacttagaagcatccgtcaggct

SEQ ID NO: 1232197 - DNA, 25 bp, Homo sapien
gggattagacgctgccgctaccctt

SEQ ID NO: 1232198 - DNA, 25 bp, Homo sapien
tagtaccgtctagatttgatgctcc

SEQ ID NO: 1232199 - DNA, 25 bp, Homo sapien
gaaggcaaggtataatgtccacagt

SEQ ID NO: 1232200 - DNA, 25 bp, Homo sapien
tccttggccttgttcccagctcggg

SEQ ID NO: 1232201 - DNA, 25 bp, Homo sapien
tagcgcttcatagcatccgttgatc

SEQ ID NO: 1232202 - DNA, 25 bp, Homo sapien
gcagagctttctggatgatcttgaa

SEQ ID NO: 1232203 - DNA, 25 bp, Homo sapien
actcagcaatgcctccggtgaagtc

SEQ ID NO: 1232204 - DNA, 25 bp, Homo sapien
ggcttcttcaactcataccactcag

SEQ ID NO: 1232205 - DNA, 25 bp, Homo sapien
tcctcggctccggtgaccgagtacg

SEQ ID NO: 1232206 - DNA, 25 bp, Homo sapien
ggtgaccgagtacgcgtgccccttc

SEQ ID NO: 1232207 - DNA, 25 bp, Homo sapien
gcttctgaaacgtgatggcctccga

SEQ ID NO: 1232208 - DNA, 25 bp, Homo sapien
tggcctccgagtccgcggcgctggt

SEQ ID NO: 1232209 - DNA, 25 bp, Homo sapien
tggccatcgtgtcaggacagcagga

SEQ ID NO: 1232210 - DNA, 25 bp, Homo sapien
ctcccgcgcggaacttcaggagtgc

SEQ ID NO: 1232211 - DNA, 25 bp, Homo sapien
cgagtgtaaactggaccaccgtggg

SEQ ID NO: 1232212 - DNA, 25 bp, Homo sapien
cgagctgcgaaagggacgcccttct

SEQ ID NO: 1232213 - DNA, 25 bp, Homo sapien
ccccagggatttcggatgcggatca

SEQ ID NO: 1232214 - DNA, 25 bp, Homo sapien
ccagggatttcggatgcggatcagt

SEQ ID NO: 1232215 - DNA, 25 bp, Homo sapien
gggatttcggatgcggatcagtttc

SEQ ID NO: 1232216 - DNA, 25 bp, Homo sapien
ctccccagggatttcggatgcggat

SEQ ID NO: 1232217 - DNA, 25 bp, Homo sapien
tgccgtctggtcagcctttccctct

SEQ ID NO: 1232218 - DNA, 25 bp, Homo sapien
catcttcatgccgtctggtcagcct

SEQ ID NO: 1232219 - DNA, 25 bp, Homo sapien
ttcatgccgtctggtcagcctttcc

SEQ ID NO: 1232220 - DNA, 25 bp, Homo sapien
tcttcatgccgtctggtcagccttt

SEQ ID NO: 1232221 - DNA, 25 bp, Homo sapien
gttcctgcaacctcccgcggtggag

SEQ ID NO: 1232222 - DNA, 25 bp, Homo sapien
tcttgtaggtatcgctggtgagagt

SEQ ID NO: 1232223 - DNA, 25 bp, Homo sapien
cccatccattttggtgagtttccac

SEQ ID NO: 1232224 - DNA, 25 bp, Homo sapien
tccaggcgggaatagtgcctcagga

SEQ ID NO: 1232225 - DNA, 25 bp, Homo sapien
acaaacagggcctgatatgtggagg

SEQ ID NO: 1232226 - DNA, 25 bp, Homo sapien
aaggttcccttgtaggctcggctgc

SEQ ID NO: 1232227 - DNA, 25 bp, Homo sapien
tgaagtgagtatggggcaacaaaca

SEQ ID NO: 1232228 - DNA, 25 bp, Homo sapien
gggcagcgcccagtcaacatttgct

SEQ ID NO: 1232229 - DNA, 25 bp, Homo sapien
gttctgcgtcccttgtcctctcagg

SEQ ID NO: 1232230 - DNA, 25 bp, Homo sapien
ctgcacttgccggtcgccgccccct

SEQ ID NO: 1232231 - DNA, 25 bp, Homo sapien
tctcaggcctattcccttgccctgc

SEQ ID NO: 1232232 - DNA, 25 bp, Homo sapien
ccctcggtgagcccggaggccaaga

SEQ ID NO: 1232233 - DNA, 25 bp, Homo sapien
tcctcctcctccagcttgatcaggt

SEQ ID NO: 1232234 - DNA, 25 bp, Homo sapien
catcctcctcctccagcttgatcag

SEQ ID NO: 1232235 - DNA, 25 bp, Homo sapien
ctctccccatcctcctcgtcctcat

SEQ ID NO: 1232236 - DNA, 25 bp, Homo sapien
ctcctcctccagcttgatcaggtac

SEQ ID NO: 1232237 - DNA, 25 bp, Homo sapien
cgatggtgtgcatgtcctcgcccat

SEQ ID NO: 1232238 - DNA, 25 bp, Homo sapien
ctctgccgccgtcggtgcttctgaa

SEQ ID NO: 1232239 - DNA, 25 bp, Homo sapien
atagatgccaaagccgatggtgtgc

SEQ ID NO: 1232240 - DNA, 25 bp, Homo sapien
gccgccgtcggtgcttctgaatgag

SEQ ID NO: 1232241 - DNA, 25 bp, Homo sapien
tttccttggccaagctcccggtctg

SEQ ID NO: 1232242 - DNA, 25 bp, Homo sapien
tgaagggcttagaaggccccacaac

SEQ ID NO: 1232243 - DNA, 25 bp, Homo sapien
ggctgaccagaatgccaggcctgga

SEQ ID NO: 1232244 - DNA, 25 bp, Homo sapien
tgagagtggaactccctgcaggctg

SEQ ID NO: 1232245 - DNA, 25 bp, Homo sapien
agaggagactgcaatgcggctgccc

SEQ ID NO: 1232246 - DNA, 25 bp, Homo sapien
tgcagcccacgaaagctctttcttg

SEQ ID NO: 1232247 - DNA, 25 bp, Homo sapien
gaaaacacgcatacagcaggagtct

SEQ ID NO: 1232248 - DNA, 25 bp, Homo sapien
caggagtctgtgtagggatctgggc

SEQ ID NO: 1232249 - DNA, 25 bp, Homo sapien
taaaggagatgcaattcagatgccg

SEQ ID NO: 1232250 - DNA, 25 bp, Homo sapien
cagatgccggaaaagcagtgtaaga

SEQ ID NO: 1232251 - DNA, 25 bp, Homo sapien
tcaactaattcaaccgagtaactgt

SEQ ID NO: 1232252 - DNA, 25 bp, Homo sapien
ttatgttgataagccctcacctccc

SEQ ID NO: 1232253 - DNA, 25 bp, Homo sapien
tagtacagtctgcagggttcacctt

SEQ ID NO: 1232254 - DNA, 25 bp, Homo sapien
gactttccagaaaccttgcccagag

SEQ ID NO: 1232255 - DNA, 25 bp, Homo sapien
tactacaggtgggtcaaagtgcccc

SEQ ID NO: 1232256 - DNA, 25 bp, Homo sapien
taaaagagcccgatgtgctaccggt

SEQ ID NO: 1232257 - DNA, 25 bp, Homo sapien
tggcgcgattcgtcaggaagaagtt

SEQ ID NO: 1232258 - DNA, 25 bp, Homo sapien
gatgaaggtgtctgagcgctccctg

SEQ ID NO: 1232259 - DNA, 25 bp, Homo sapien
cagcttgaagcggttgagcacctcc

SEQ ID NO: 1232260 - DNA, 25 bp, Homo sapien
cgagaatgtactctcctggcggcag

SEQ ID NO: 1232261 - DNA, 25 bp, Homo sapien
caagattggcctcgatttcatcatc

SEQ ID NO: 1232262 - DNA, 25 bp, Homo sapien
gattggcctcgatttcatcatcgac

SEQ ID NO: 1232263 - DNA, 25 bp, Homo sapien
ctcttcaagattggcctcgatttca

SEQ ID NO: 1232264 - DNA, 25 bp, Homo sapien
ggcctcgatttcatcatcgacagct

SEQ ID NO: 1232265 - DNA, 25 bp, Homo sapien
cggctttatccttagtttcaggctt

SEQ ID NO: 1232266 - DNA, 25 bp, Homo sapien
tttcaggctttgttcgtgaagtcca

SEQ ID NO: 1232267 - DNA, 25 bp, Homo sapien
caggctttgttcgtgaagtccaaaa

SEQ ID NO: 1232268 - DNA, 25 bp, Homo sapien
ccggctttatccttagtttcaggct

SEQ ID NO: 1232269 - DNA, 25 bp, Homo sapien
ctgcccgcccttccatggcagccac

SEQ ID NO: 1232270 - DNA, 25 bp, Homo sapien
gaatgcatcagagcgaggcatgaca

SEQ ID NO: 1232271 - DNA, 25 bp, Homo sapien
atcagagcgaggcatgacaccaagt

SEQ ID NO: 1232272 - DNA, 25 bp, Homo sapien
cagagcgaggcatgacaccaagtgt

SEQ ID NO: 1232273 - DNA, 25 bp, Homo sapien
tgcatcagagcgaggcatgacacca

SEQ ID NO: 1232274 - DNA, 25 bp, Homo sapien
tcaatgtcatcctcgctgatgtcga

SEQ ID NO: 1232275 - DNA, 25 bp, Homo sapien
ccaactgggcaaacagtctcctgaa

SEQ ID NO: 1232276 - DNA, 25 bp, Homo sapien
atcaatgtcatcctcgctgatgtcg

SEQ ID NO: 1232277 - DNA, 25 bp, Homo sapien
tcctgccaactgggcaaacagtctc

SEQ ID NO: 1232278 - DNA, 25 bp, Homo sapien
tgctagaacccttctcaggatggtc

SEQ ID NO: 1232279 - DNA, 25 bp, Homo sapien
gctttgctagaacccttctcaggat

SEQ ID NO: 1232280 - DNA, 25 bp, Homo sapien
gctcaaaggcagagatctccgcatc

SEQ ID NO: 1232281 - DNA, 25 bp, Homo sapien
agctcaaaggcagagatctccgcat

SEQ ID NO: 1232282 - DNA, 25 bp, Homo sapien
ggttttgcaatgaggggatactcac

SEQ ID NO: 1232283 - DNA, 25 bp, Homo sapien
gagcaggatgaggttttgcaatgag

SEQ ID NO: 1232284 - DNA, 25 bp, Homo sapien
agagcaggatgaggttttgcaatga

SEQ ID NO: 1232285 - DNA, 25 bp, Homo sapien
agcaggatgaggttttgcaatgagg

SEQ ID NO: 1232286 - DNA, 25 bp, Homo sapien
ggtaaacacaatcttcttgccttcc

SEQ ID NO: 1232287 - DNA, 25 bp, Homo sapien
tggtggcctccagggtaaacacaat

SEQ ID NO: 1232288 - DNA, 25 bp, Homo sapien
cctccagggtaaacacaatcttctt

SEQ ID NO: 1232289 - DNA, 25 bp, Homo sapien
cctggtggcctccagggtaaacaca

SEQ ID NO: 1232290 - DNA, 25 bp, Homo sapien
tctgggcaccaaccccttagatggt

SEQ ID NO: 1232291 - DNA, 25 bp, Homo sapien
tagatggtcataaggctctggccca

SEQ ID NO: 1232292 - DNA, 25 bp, Homo sapien
gactctggtgtggagccctccagaa

SEQ ID NO: 1232293 - DNA, 25 bp, Homo sapien
gcagctgtgcatgcagactctggtg

SEQ ID NO: 1232294 - DNA, 25 bp, Homo sapien
aagccatctgacttgatatcttggc

SEQ ID NO: 1232295 - DNA, 25 bp, Homo sapien
ttttgcatgtctcgatgctgaagcc

SEQ ID NO: 1232296 - DNA, 25 bp, Homo sapien
cataattttgcatgtctcgatgctg

SEQ ID NO: 1232297 - DNA, 25 bp, Homo sapien
taattttgcatgtctcgatgctgaa

SEQ ID NO: 1232298 - DNA, 25 bp, Homo sapien
gtccagagaatgtagaactccttca

SEQ ID NO: 1232299 - DNA, 25 bp, Homo sapien
ggtatttttgaatcttcgtccagag

SEQ ID NO: 1232300 - DNA, 25 bp, Homo sapien
gaatcttcgtccagagaatgtagaa

SEQ ID NO: 1232301 - DNA, 25 bp, Homo sapien
ttttgaatcttcgtccagagaatgt

SEQ ID NO: 1232302 - DNA, 25 bp, Homo sapien
aagcatatgaacagaatgtttccca

SEQ ID NO: 1232303 - DNA, 25 bp, Homo sapien
tatgaacagaatgtttcccaacaca

SEQ ID NO: 1232304 - DNA, 25 bp, Homo sapien
ccaacacagatccacccgcatctct

SEQ ID NO: 1232305 - DNA, 25 bp, Homo sapien
gaacagaatgtttcccaacacagat

SEQ ID NO: 1232306 - DNA, 25 bp, Homo sapien
tctagtttggccgtggaagaatcac

SEQ ID NO: 1232307 - DNA, 25 bp, Homo sapien
tagatgatcccaataatcaggagga

SEQ ID NO: 1232308 - DNA, 25 bp, Homo sapien
gaaacccttgatggtggcctttaga

SEQ ID NO: 1232309 - DNA, 25 bp, Homo sapien
gcaaagctggcaagttacctcccta

SEQ ID NO: 1232310 - DNA, 25 bp, Homo sapien
tggaacacataagttagctgtaaga

SEQ ID NO: 1232311 - DNA, 25 bp, Homo sapien
ctggaacacataagttagctgtaag

SEQ ID NO: 1232312 - DNA, 25 bp, Homo sapien
gtaccagacctgtcaacgtcgattt

SEQ ID NO: 1232313 - DNA, 25 bp, Homo sapien
ggtaccagacctgtcaacgtcgatt

SEQ ID NO: 1232314 - DNA, 25 bp, Homo sapien
taccagacctgtcaacgtcgatttc

SEQ ID NO: 1232315 - DNA, 25 bp, Homo sapien
aatgccttccgcatttcataggaat

SEQ ID NO: 1232316 - DNA, 25 bp, Homo sapien
gcttcttctaatgccttccgcattt

SEQ ID NO: 1232317 - DNA, 25 bp, Homo sapien
ctgcttcttctaatgccttccgcat

SEQ ID NO: 1232318 - DNA, 25 bp, Homo sapien
ccttccgcatttcataggaattcat

SEQ ID NO: 1232319 - DNA, 25 bp, Homo sapien
ccttgcagtcaacagaggccttgtg

SEQ ID NO: 1232320 - DNA, 25 bp, Homo sapien
tatggccacctagcatcaagactgc

SEQ ID NO: 1232321 - DNA, 25 bp, Homo sapien
tgttccatttagctgcgctcacagg

SEQ ID NO: 1232322 - DNA, 25 bp, Homo sapien
gagctgggattgctatacgacagaa

SEQ ID NO: 1232323 - DNA, 25 bp, Homo sapien
gaatagcgtttccagccgaaccaaa

SEQ ID NO: 1232324 - DNA, 25 bp, Homo sapien
catctgcaaaccgagcaacgatgac

SEQ ID NO: 1232325 - DNA, 25 bp, Homo sapien
accgagcaacgatgacttggtggag

SEQ ID NO: 1232326 - DNA, 25 bp, Homo sapien
attatcaaaatcgatgatgagctgg

SEQ ID NO: 1232327 - DNA, 25 bp, Homo sapien
ctctattgttccagtattctcggga

SEQ ID NO: 1232328 - DNA, 25 bp, Homo sapien
tcgggatccagctgcttaaatatct

SEQ ID NO: 1232329 - DNA, 25 bp, Homo sapien
gagataaggtcgagctctattgttc

SEQ ID NO: 1232330 - DNA, 25 bp, Homo sapien
tgttccagtattctcgggatccagc

SEQ ID NO: 1232331 - DNA, 25 bp, Homo sapien
agcaaggcggggcctgctgactcac

SEQ ID NO: 1232332 - DNA, 25 bp, Homo sapien
tagaagcaaggcggggcctgctgac

SEQ ID NO: 1232333 - DNA, 25 bp, Homo sapien
gaagcaaggcggggcctgctgactc

SEQ ID NO: 1232334 - DNA, 25 bp, Homo sapien
ttagaagcaaggcggggcctgctga

SEQ ID NO: 1232335 - DNA, 25 bp, Homo sapien
gccccgacagaccaagagctcttta

SEQ ID NO: 1232336 - DNA, 25 bp, Homo sapien
aaagcagatcactcaagtaacagcc

SEQ ID NO: 1232337 - DNA, 25 bp, Homo sapien
ttgtgggatcttacaaccggttaca

SEQ ID NO: 1232338 - DNA, 25 bp, Homo sapien
cggttacaggcctggccccgacaga

SEQ ID NO: 1232339 - DNA, 25 bp, Homo sapien
cagagatgtgtattgctagggttcc

SEQ ID NO: 1232340 - DNA, 25 bp, Homo sapien
tcaagtcaaagctcatgagaagagg

SEQ ID NO: 1232341 - DNA, 25 bp, Homo sapien
tcattgggatgacacgagaacattt

SEQ ID NO: 1232342 - DNA, 25 bp, Homo sapien
ttttctaagcatgatcctgcagcca

SEQ ID NO: 1232343 - DNA, 25 bp, Homo sapien
ttcactcctctgttacacggacagg

SEQ ID NO: 1232344 - DNA, 25 bp, Homo sapien
aatgctgactggagccaggtgataa

SEQ ID NO: 1232345 - DNA, 25 bp, Homo sapien
gataatggaagtataccccacctgg

SEQ ID NO: 1232346 - DNA, 25 bp, Homo sapien
gacaggactgacaactgccattctc

SEQ ID NO: 1232347 - DNA, 25 bp, Homo sapien
gggtagagatatttcctaggatatg

SEQ ID NO: 1232348 - DNA, 25 bp, Homo sapien
taggatatgtaaagttttaagcaag

SEQ ID NO: 1232349 - DNA, 25 bp, Homo sapien
tgagacagttatttagttgctgcct

SEQ ID NO: 1232350 - DNA, 25 bp, Homo sapien
gttatttgtaaccagatagactata

SEQ ID NO: 1232351 - DNA, 25 bp, Homo sapien
aacatgtggcatgtttcgtgtcaca

SEQ ID NO: 1232352 - DNA, 25 bp, Homo sapien
tagaataggatatccagcaagaatg

SEQ ID NO: 1232353 - DNA, 25 bp, Homo sapien
gcaagaatgacaggctaggatttcc

SEQ ID NO: 1232354 - DNA, 25 bp, Homo sapien
ggatttccagaacttaacatgtggc

SEQ ID NO: 1232355 - DNA, 25 bp, Homo sapien
taaatattccctgccaagggcctcg

SEQ ID NO: 1232356 - DNA, 25 bp, Homo sapien
ccttgtcaagggttaagcgactcat

SEQ ID NO: 1232357 - DNA, 25 bp, Homo sapien
gcctcgtgtcctttgagagcgactc

SEQ ID NO: 1232358 - DNA, 25 bp, Homo sapien
tcatgggaaatggtaatcttggact

SEQ ID NO: 1232359 - DNA, 25 bp, Homo sapien
tcagttgatcaagcgcaggatccct

SEQ ID NO: 1232360 - DNA, 25 bp, Homo sapien
taactccatggacagacactagtgg

SEQ ID NO: 1232361 - DNA, 25 bp, Homo sapien
tgtttaacccaagcgacagaggtga

SEQ ID NO: 1232362 - DNA, 25 bp, Homo sapien
tataaggccgaatagggtcaagaac

SEQ ID NO: 1232363 - DNA, 25 bp, Homo sapien
taattataggcaaggtgtcttttcc

SEQ ID NO: 1232364 - DNA, 25 bp, Homo sapien
ggcagcataccttgttaaagtagaa

SEQ ID NO: 1232365 - DNA, 25 bp, Homo sapien
aatttacagaggcagcataccttgt

SEQ ID NO: 1232366 - DNA, 25 bp, Homo sapien
gtgtgctcataaaccgtcctgtggg

SEQ ID NO: 1232367 - DNA, 25 bp, Homo sapien
ccgatgcgaggaggttgggactcct

SEQ ID NO: 1232368 - DNA, 25 bp, Homo sapien
agaaatcaccgatgcgaggaggttg

SEQ ID NO: 1232369 - DNA, 25 bp, Homo sapien
agagaaatcaccgatgcgaggaggt

SEQ ID NO: 1232370 - DNA, 25 bp, Homo sapien
gacagagaaatcaccgatgcgagga

SEQ ID NO: 1232371 - DNA, 25 bp, Homo sapien
caatcttgagtcagtccaaacatct

SEQ ID NO: 1232372 - DNA, 25 bp, Homo sapien
ctccaatcttgagtcagtccaaaca

SEQ ID NO: 1232373 - DNA, 25 bp, Homo sapien
tcttgagtcagtccaaacatctccc

SEQ ID NO: 1232374 - DNA, 25 bp, Homo sapien
tccaatcttgagtcagtccaaacat

SEQ ID NO: 1232375 - DNA, 25 bp, Homo sapien
cagcagcaaagagaggtaggtgact

SEQ ID NO: 1232376 - DNA, 25 bp, Homo sapien
gaattgagatccagtgtggacagct

SEQ ID NO: 1232377 - DNA, 25 bp, Homo sapien
actggtgatcataaaaagcagcagc

SEQ ID NO: 1232378 - DNA, 25 bp, Homo sapien
tcgtaaatggtgttaaaggcagcag

SEQ ID NO: 1232379 - DNA, 25 bp, Homo sapien
caagccgttgggatatcatacccag

SEQ ID NO: 1232380 - DNA, 25 bp, Homo sapien
cataaatagaccttgtttaatagtc

SEQ ID NO: 1232381 - DNA, 25 bp, Homo sapien
tgtttaatagtcacaagccgttggg

SEQ ID NO: 1232382 - DNA, 25 bp, Homo sapien
ttgtttttgatgtcataaatagacc

SEQ ID NO: 1232383 - DNA, 25 bp, Homo sapien
ggttgtcagtgaacaataactttat

SEQ ID NO: 1232384 - DNA, 25 bp, Homo sapien
tgtagaatcttgtttgtaggctgaa

SEQ ID NO: 1232385 - DNA, 25 bp, Homo sapien
ttgaaactaagctacggtaccagta

SEQ ID NO: 1232386 - DNA, 25 bp, Homo sapien
ggtaccagtaattagatgtagaatc

SEQ ID NO: 1232387 - DNA, 25 bp, Homo sapien
ggctcgaaggcactgcacacttgta

SEQ ID NO: 1232388 - DNA, 25 bp, Homo sapien
ctgcacacttgtatattgtcagtga

SEQ ID NO: 1232389 - DNA, 25 bp, Homo sapien
gcacacttgtatattgtcagtgaag

SEQ ID NO: 1232390 - DNA, 25 bp, Homo sapien
ctgaaggctcgaaggcactgcacac

SEQ ID NO: 1232391 - DNA, 25 bp, Homo sapien
acatcgctgtctctgattgtccccg

SEQ ID NO: 1232392 - DNA, 25 bp, Homo sapien
ctctgtcctgttgagtgttttcagc

SEQ ID NO: 1232393 - DNA, 25 bp, Homo sapien
agaaaggaccagtgccgtcacatcg

SEQ ID NO: 1232394 - DNA, 25 bp, Homo sapien
tcagctctctgtcctgttgagtgtt

SEQ ID NO: 1232395 - DNA, 25 bp, Homo sapien
tcagataagtatacagcgacaatcc

SEQ ID NO: 1232396 - DNA, 25 bp, Homo sapien
tgaagaattcaccattagaggacat

SEQ ID NO: 1232397 - DNA, 25 bp, Homo sapien
gcttgaaagcgatgaagaatgtctc

SEQ ID NO: 1232398 - DNA, 25 bp, Homo sapien
aaaggtgtcccgtgtagcactcaga

SEQ ID NO: 1232399 - DNA, 25 bp, Homo sapien
ttagtttctaagtctgatcacctga

SEQ ID NO: 1232400 - DNA, 25 bp, Homo sapien
tttaatactaaaggacctgtgcttc

SEQ ID NO: 1232401 - DNA, 25 bp, Homo sapien
tacctgtgtagctctgtttgtctct

SEQ ID NO: 1232402 - DNA, 25 bp, Homo sapien
cccagtgaggttactcataggcatc

SEQ ID NO: 1232403 - DNA, 25 bp, Homo sapien
tttgctctctcactgagtttgaaag

SEQ ID NO: 1232404 - DNA, 25 bp, Homo sapien
tacatgcccaccagagttttactgt

SEQ ID NO: 1232405 - DNA, 25 bp, Homo sapien
aaatatatgtgtagtggtatcgcat

SEQ ID NO: 1232406 - DNA, 25 bp, Homo sapien
ccttgccaaagtttggtatggtcag

SEQ ID NO: 1232407 - DNA, 25 bp, Homo sapien
aagtttttgcagcacattcgtggct

SEQ ID NO: 1232408 - DNA, 25 bp, Homo sapien
gcagcacattcgtggcttgtgggtt

SEQ ID NO: 1232409 - DNA, 25 bp, Homo sapien
gcttgtgggttgggaattgacccat

SEQ ID NO: 1232410 - DNA, 25 bp, Homo sapien
aacaaattttgtgcattgaaagttt

SEQ ID NO: 1232411 - DNA, 25 bp, Homo sapien
atattgccctccatgacgtgctccg

SEQ ID NO: 1232412 - DNA, 25 bp, Homo sapien
ttgctcacagcaagttgtactctgt

SEQ ID NO: 1232413 - DNA, 25 bp, Homo sapien
gcatattgctctccactcttgcata

SEQ ID NO: 1232414 - DNA, 25 bp, Homo sapien
cattcggccttccttcggaattgtg

SEQ ID NO: 1232415 - DNA, 25 bp, Homo sapien
gaagagcatccggtcacctcgtggt

SEQ ID NO: 1232416 - DNA, 25 bp, Homo sapien
gcagaagagcatccggtcacctcgt

SEQ ID NO: 1232417 - DNA, 25 bp, Homo sapien
gctgtgcagaagagcatccggtcac

SEQ ID NO: 1232418 - DNA, 25 bp, Homo sapien
tatggcacagtagtgggaatgcctt

SEQ ID NO: 1232419 - DNA, 25 bp, Homo sapien
gggcacacagatccctcttctccat

SEQ ID NO: 1232420 - DNA, 25 bp, Homo sapien
ggagctgttgagtcaccagggcaca

SEQ ID NO: 1232421 - DNA, 25 bp, Homo sapien
tctcctggagctgttgagtcaccag

SEQ ID NO: 1232422 - DNA, 25 bp, Homo sapien
ctggagctgttgagtcaccagggca

SEQ ID NO: 1232423 - DNA, 25 bp, Homo sapien
tcagggctgcccgtgtagtagggag

SEQ ID NO: 1232424 - DNA, 25 bp, Homo sapien
cagcagtgactttgaagtgtccaga

SEQ ID NO: 1232425 - DNA, 25 bp, Homo sapien
tagggagcagtaattcaatgtagtc

SEQ ID NO: 1232426 - DNA, 25 bp, Homo sapien
catttccagttgctcgaatggtgca

SEQ ID NO: 1232427 - DNA, 25 bp, Homo sapien
ccacctctatctaatattaccatag

SEQ ID NO: 1232428 - DNA, 25 bp, Homo sapien
tcccacctctatctaatattaccat

SEQ ID NO: 1232429 - DNA, 25 bp, Homo sapien
tattaccatagagatctcagatctt

SEQ ID NO: 1232430 - DNA, 25 bp, Homo sapien
tatctaatattaccatagagatctc

SEQ ID NO: 1232431 - DNA, 25 bp, Homo sapien
ctatgcttgtggctccatttgttca

SEQ ID NO: 1232432 - DNA, 25 bp, Homo sapien
gcttgtggctccatttgttcagaca

SEQ ID NO: 1232433 - DNA, 25 bp, Homo sapien
gtggctccatttgttcagacaaaga

SEQ ID NO: 1232434 - DNA, 25 bp, Homo sapien
tggctccatttgttcagacaaagaa

SEQ ID NO: 1232435 - DNA, 25 bp, Homo sapien
ctgaagtggggacatcttgcaggca

SEQ ID NO: 1232436 - DNA, 25 bp, Homo sapien
tgaagtggggacatcttgcaggcat

SEQ ID NO: 1232437 - DNA, 25 bp, Homo sapien
tctctgtcattcagcgatcgcggaa

SEQ ID NO: 1232438 - DNA, 25 bp, Homo sapien
ggaagttgtatttgcacctctccca

SEQ ID NO: 1232439 - DNA, 25 bp, Homo sapien
tgtgttgcggtggcttctgcagact

SEQ ID NO: 1232440 - DNA, 25 bp, Homo sapien
gacttcagtagcgagtttcttcgtg

SEQ ID NO: 1232441 - DNA, 25 bp, Homo sapien
ttcgtttcccacagcttttagcaag

SEQ ID NO: 1232442 - DNA, 25 bp, Homo sapien
gctccgcaggcttttgacacggcca

SEQ ID NO: 1232443 - DNA, 25 bp, Homo sapien
tagattgcaggaaagcgtacgtgcc

SEQ ID NO: 1232444 - DNA, 25 bp, Homo sapien
cctccggagaggattagtgccttct

SEQ ID NO: 1232445 - DNA, 25 bp, Homo sapien
cgcttccatgcggttcgggtccaag

SEQ ID NO: 1232446 - DNA, 25 bp, Homo sapien
tccaagatgatgccggtaagtgggc

SEQ ID NO: 1232447 - DNA, 25 bp, Homo sapien
catgcggttcgggtccaagatgatg

SEQ ID NO: 1232448 - DNA, 25 bp, Homo sapien
atgccggtaagtgggcgagcggcca

SEQ ID NO: 1232449 - DNA, 25 bp, Homo sapien
ctcagctcggccggggccgcagtct

SEQ ID NO: 1232450 - DNA, 25 bp, Homo sapien
agctcggccggggccgcagtctggc

SEQ ID NO: 1232451 - DNA, 25 bp, Homo sapien
tcggccggggccgcagtctggccac

SEQ ID NO: 1232452 - DNA, 25 bp, Homo sapien
tcagctcggccggggccgcagtctg

SEQ ID NO: 1232453 - DNA, 25 bp, Homo sapien
tccgaaagccggatcactgaggagc

SEQ ID NO: 1232454 - DNA, 25 bp, Homo sapien
gcggctcggtgccattcactaccat

SEQ ID NO: 1232455 - DNA, 25 bp, Homo sapien
catcctgttttcctgaggcgcggcc

SEQ ID NO: 1232456 - DNA, 25 bp, Homo sapien
gatgaaaggcgaacaatccgaaagc

SEQ ID NO: 1232457 - DNA, 25 bp, Homo sapien
gggacggtctaatcgagcaggaagc

SEQ ID NO: 1232458 - DNA, 25 bp, Homo sapien
acggtctaatcgagcaggaagctgt

SEQ ID NO: 1232459 - DNA, 25 bp, Homo sapien
tcaccgcgggggacggtctaatcga

SEQ ID NO: 1232460 - DNA, 25 bp, Homo sapien
gggggacggtctaatcgagcaggaa

SEQ ID NO: 1232461 - DNA, 25 bp, Homo sapien
cagggaaaggatcgcctatgccaca

SEQ ID NO: 1232462 - DNA, 25 bp, Homo sapien
catatgaggcaactgttttcaggca

SEQ ID NO: 1232463 - DNA, 25 bp, Homo sapien
gagagccaaggaacaaacctgcgta

SEQ ID NO: 1232464 - DNA, 25 bp, Homo sapien
aaaggtggcatggatatcgtgagac

SEQ ID NO: 1232465 - DNA, 25 bp, Homo sapien
tccctgtcacagtcagtttggggac

SEQ ID NO: 1232466 - DNA, 25 bp, Homo sapien
agtcagtttggggactgatcctcca

SEQ ID NO: 1232467 - DNA, 25 bp, Homo sapien
tcacagtcagtttggggactgatcc

SEQ ID NO: 1232468 - DNA, 25 bp, Homo sapien
ttctcctttgtgactcccctgccat

SEQ ID NO: 1232469 - DNA, 25 bp, Homo sapien
gaaaatgccctgaggtgtctctgcc

SEQ ID NO: 1232470 - DNA, 25 bp, Homo sapien
aaatgccctgaggtgtctctgcccc

SEQ ID NO: 1232471 - DNA, 25 bp, Homo sapien
aaaatgccctgaggtgtctctgccc

SEQ ID NO: 1232472 - DNA, 25 bp, Homo sapien
gactcccaatctgaggtccaatgct

SEQ ID NO: 1232473 - DNA, 25 bp, Homo sapien
tcagactcccaatctgaggtccaat

SEQ ID NO: 1232474 - DNA, 25 bp, Homo sapien
tcccaatctgaggtccaatgctctc

SEQ ID NO: 1232475 - DNA, 25 bp, Homo sapien
agactcccaatctgaggtccaatgc

SEQ ID NO: 1232476 - DNA, 25 bp, Homo sapien
tagcccactagtgctaaggcggaag

SEQ ID NO: 1232477 - DNA, 25 bp, Homo sapien
gcagtgtgtggtctggcatccccag

SEQ ID NO: 1232478 - DNA, 25 bp, Homo sapien
cagtggtgatgtcttccctttgatg

SEQ ID NO: 1232479 - DNA, 25 bp, Homo sapien
tgctaaggcggaaggcatccgcagt

SEQ ID NO: 1232480 - DNA, 25 bp, Homo sapien
ggtctctatagtggcatctccaaca

SEQ ID NO: 1232481 - DNA, 25 bp, Homo sapien
catgcccctcagtggtatcatctga

SEQ ID NO: 1232482 - DNA, 25 bp, Homo sapien
ctcagtggtatcatctgactcagct

SEQ ID NO: 1232483 - DNA, 25 bp, Homo sapien
tctggattgctaagaccagggtctc

SEQ ID NO: 1232484 - DNA, 25 bp, Homo sapien
attccccctgattttgagtgtgaat

SEQ ID NO: 1232485 - DNA, 25 bp, Homo sapien
ccctgattttgagtgtgaatgggta

SEQ ID NO: 1232486 - DNA, 25 bp, Homo sapien
cccctgattttgagtgtgaatgggt

SEQ ID NO: 1232487 - DNA, 25 bp, Homo sapien
tccccctgattttgagtgtgaatgg

SEQ ID NO: 1232488 - DNA, 25 bp, Homo sapien
catgtagacgccagaagctgtgtca

SEQ ID NO: 1232489 - DNA, 25 bp, Homo sapien
atccatgtagacgccagaagctgtg

SEQ ID NO: 1232490 - DNA, 25 bp, Homo sapien
agacgccagaagctgtgtcatacac

SEQ ID NO: 1232491 - DNA, 25 bp, Homo sapien
tgtagacgccagaagctgtgtcata

SEQ ID NO: 1232492 - DNA, 25 bp, Homo sapien
tcaggcagtcttacgtatctcatcc

SEQ ID NO: 1232493 - DNA, 25 bp, Homo sapien
caggcagtcttacgtatctcatcca

SEQ ID NO: 1232494 - DNA, 25 bp, Homo sapien
ctgaagccatttgtaacttactcta

SEQ ID NO: 1232495 - DNA, 25 bp, Homo sapien
gcagtcttacgtatctcatccactc

SEQ ID NO: 1232496 - DNA, 25 bp, Homo sapien
gtgcctgccaccacacccagctaat

SEQ ID NO: 1232497 - DNA, 25 bp, Homo sapien
actccacctcctgggttcaagcgat

SEQ ID NO: 1232498 - DNA, 25 bp, Homo sapien
gattttggctcactgtaaactccac

SEQ ID NO: 1232499 - DNA, 25 bp, Homo sapien
gcgtgattttggctcactgtaaact

SEQ ID NO: 1232500 - DNA, 25 bp, Homo sapien
catggccacagagtgaacttccaca

SEQ ID NO: 1232501 - DNA, 25 bp, Homo sapien
gggaacatggccacagagtgaactt

SEQ ID NO: 1232502 - DNA, 25 bp, Homo sapien
aacatggccacagagtgaacttcca

SEQ ID NO: 1232503 - DNA, 25 bp, Homo sapien
gaacatggccacagagtgaacttcc

SEQ ID NO: 1232504 - DNA, 25 bp, Homo sapien
agctgccaacttggcaggttgtttt

SEQ ID NO: 1232505 - DNA, 25 bp, Homo sapien
ctggtggacactcatgagcaacagc

SEQ ID NO: 1232506 - DNA, 25 bp, Homo sapien
aacttggcaggttgttttctctggt

SEQ ID NO: 1232507 - DNA, 25 bp, Homo sapien
gccaacttggcaggttgttttctct

SEQ ID NO: 1232508 - DNA, 25 bp, Homo sapien
gccgcccagggtcaacgctccctgt

SEQ ID NO: 1232509 - DNA, 25 bp, Homo sapien
cacccccaaagtgtgtggggttgcg

SEQ ID NO: 1232510 - DNA, 25 bp, Homo sapien
cagggggccgcccagggtcaacgct

SEQ ID NO: 1232511 - DNA, 25 bp, Homo sapien
ttgcgggccctgggctttcagggca

SEQ ID NO: 1232512 - DNA, 25 bp, Homo sapien
tcatctgagcggtagaggcaactgg

SEQ ID NO: 1232513 - DNA, 25 bp, Homo sapien
tcatggtcattctctgtgtcactgt

SEQ ID NO: 1232514 - DNA, 25 bp, Homo sapien
tcatcatggtcattctctgtgtcac

SEQ ID NO: 1232515 - DNA, 25 bp, Homo sapien
gcatcatcatggtcattctctgtgt

SEQ ID NO: 1232516 - DNA, 25 bp, Homo sapien
tgccgcttgctcaagatcatgaccg

SEQ ID NO: 1232517 - DNA, 25 bp, Homo sapien
gcttgctcaagatcatgaccgccac

SEQ ID NO: 1232518 - DNA, 25 bp, Homo sapien
cgcttgctcaagatcatgaccgcca

SEQ ID NO: 1232519 - DNA, 25 bp, Homo sapien
ttgctcaagatcatgaccgccactc

SEQ ID NO: 1232520 - DNA, 25 bp, Homo sapien
ggccaggtcatggtatttctgtgtc

SEQ ID NO: 1232521 - DNA, 25 bp, Homo sapien
ccaggtcatggtatttctgtgtctc

SEQ ID NO: 1232522 - DNA, 25 bp, Homo sapien
aaggccaggtcatggtatttctgtg

SEQ ID NO: 1232523 - DNA, 25 bp, Homo sapien
ctggaaggccaggtcatggtatttc

SEQ ID NO: 1232524 - DNA, 25 bp, Homo sapien
cagtgcctgtctctgatatgctccg

SEQ ID NO: 1232525 - DNA, 25 bp, Homo sapien
tgcctgtctctgatatgctccgctc

SEQ ID NO: 1232526 - DNA, 25 bp, Homo sapien
tgtctctgatatgctccgctcccac

SEQ ID NO: 1232527 - DNA, 25 bp, Homo sapien
cccacgagcccttgttacactcctg

SEQ ID NO: 1232528 - DNA, 25 bp, Homo sapien
ctccttggtatctgagctctggagt

SEQ ID NO: 1232529 - DNA, 25 bp, Homo sapien
aagctgctccttggtatctgagctc

SEQ ID NO: 1232530 - DNA, 25 bp, Homo sapien
gctgctccttggtatctgagctctg

SEQ ID NO: 1232531 - DNA, 25 bp, Homo sapien
tggtatctgagctctggagtgtttg

SEQ ID NO: 1232532 - DNA, 25 bp, Homo sapien
ttgggccaggctgagccaggtttcc

SEQ ID NO: 1232533 - DNA, 25 bp, Homo sapien
tgtaccccgctgtgggagaaggctt

SEQ ID NO: 1232534 - DNA, 25 bp, Homo sapien
ctgtgtaccccgctgtgggagaagg

SEQ ID NO: 1232535 - DNA, 25 bp, Homo sapien
gcttgggccaggctgagccaggttt

SEQ ID NO: 1232536 - DNA, 25 bp, Homo sapien
tgcctgacggtctatttccctgcct

SEQ ID NO: 1232537 - DNA, 25 bp, Homo sapien
gacggtctatttccctgccttccag

SEQ ID NO: 1232538 - DNA, 25 bp, Homo sapien
ctgtgtcagttcccgtagtgcctga

SEQ ID NO: 1232539 - DNA, 25 bp, Homo sapien
ccgtagtgcctgacggtctatttcc

SEQ ID NO: 1232540 - DNA, 25 bp, Homo sapien
tgcaaagtggcctggagctccatac

SEQ ID NO: 1232541 - DNA, 25 bp, Homo sapien
catactgagtagaaggctttgggcc

SEQ ID NO: 1232542 - DNA, 25 bp, Homo sapien
gctccatactgagtagaaggctttg

SEQ ID NO: 1232543 - DNA, 25 bp, Homo sapien
agagtatgatgcagtgccagacact

SEQ ID NO: 1232544 - DNA, 25 bp, Homo sapien
ctcgtcactcgctatgtcctcactg

SEQ ID NO: 1232545 - DNA, 25 bp, Homo sapien
gtgtgctcctcgtcactcgctatgt

SEQ ID NO: 1232546 - DNA, 25 bp, Homo sapien
atgaccgtgtgctcctcgtcactcg

SEQ ID NO: 1232547 - DNA, 25 bp, Homo sapien
ctcctcgtcactcgctatgtcctca

SEQ ID NO: 1232548 - DNA, 25 bp, Homo sapien
tgagatcggtgtcagtggtgctaaa

SEQ ID NO: 1232549 - DNA, 25 bp, Homo sapien
ccttgaacttgagatcggtgtcagt

SEQ ID NO: 1232550 - DNA, 25 bp, Homo sapien
cagtggtgctaaagccatcatcagc

SEQ ID NO: 1232551 - DNA, 25 bp, Homo sapien
gatcggtgtcagtggtgctaaagcc

SEQ ID NO: 1232552 - DNA, 25 bp, Homo sapien
caaaagctgctggtggatcggggga

SEQ ID NO: 1232553 - DNA, 25 bp, Homo sapien
aagctgctggtggatcgggggaccc

SEQ ID NO: 1232554 - DNA, 25 bp, Homo sapien
actttgccaaaagctgctggtggat

SEQ ID NO: 1232555 - DNA, 25 bp, Homo sapien
tgccaaaagctgctggtggatcggg

SEQ ID NO: 1232556 - DNA, 25 bp, Homo sapien
aggtcaccttggaaggcgtccctgg

SEQ ID NO: 1232557 - DNA, 25 bp, Homo sapien
atagggggcccgctctgctgtcttg

SEQ ID NO: 1232558 - DNA, 25 bp, Homo sapien
ccatccccaggggtaggggtcatag

SEQ ID NO: 1232559 - DNA, 25 bp, Homo sapien
ggtcatagggggcccgctctgctgt

SEQ ID NO: 1232560 - DNA, 25 bp, Homo sapien
agaggacagcgccttctcggtctcc

SEQ ID NO: 1232561 - DNA, 25 bp, Homo sapien
tcggtctccggttccctgagcctgt

SEQ ID NO: 1232562 - DNA, 25 bp, Homo sapien
agtgaagaggacagcgccttctcgg

SEQ ID NO: 1232563 - DNA, 25 bp, Homo sapien
ctgagcctgtcctcggcttctccac

SEQ ID NO: 1232564 - DNA, 25 bp, Homo sapien
gaagagctgcatgatcagggccggc

SEQ ID NO: 1232565 - DNA, 25 bp, Homo sapien
atcagggccggcactggtccagggc

SEQ ID NO: 1232566 - DNA, 25 bp, Homo sapien
gagctgcatgatcagggccggcact

SEQ ID NO: 1232567 - DNA, 25 bp, Homo sapien
cagggccggcactggtccagggcac

SEQ ID NO: 1232568 - DNA, 25 bp, Homo sapien
gaggggaagatgtgtgcatagtggg

SEQ ID NO: 1232569 - DNA, 25 bp, Homo sapien
tggaggggaagatgtgtgcatagtg

SEQ ID NO: 1232570 - DNA, 25 bp, Homo sapien
cttggaggggaagatgtgtgcatag

SEQ ID NO: 1232571 - DNA, 25 bp, Homo sapien
aggggaagatgtgtgcatagtgggc

SEQ ID NO: 1232572 - DNA, 25 bp, Homo sapien
ctgggagtcagggcaggggcagaac

SEQ ID NO: 1232573 - DNA, 25 bp, Homo sapien
gagtcagggcaggggcagaacaaac

SEQ ID NO: 1232574 - DNA, 25 bp, Homo sapien
ggagtcagggcaggggcagaacaaa

SEQ ID NO: 1232575 - DNA, 25 bp, Homo sapien
tgggagtcagggcaggggcagaaca

SEQ ID NO: 1232576 - DNA, 25 bp, Homo sapien
ccagggcagcgtcaagagtctgagc

SEQ ID NO: 1232577 - DNA, 25 bp, Homo sapien
gccagggcagcgtcaagagtctgag

SEQ ID NO: 1232578 - DNA, 25 bp, Homo sapien
agaagatcatgcagtcatcagtccc

SEQ ID NO: 1232579 - DNA, 25 bp, Homo sapien
gaagatcatgcagtcatcagtccca

SEQ ID NO: 1232580 - DNA, 25 bp, Homo sapien
gggatctttggggttgcccacctgc

SEQ ID NO: 1232581 - DNA, 25 bp, Homo sapien
tgggatctttggggttgcccacctg

SEQ ID NO: 1232582 - DNA, 25 bp, Homo sapien
cggaggagggaaactgcccagcttt

SEQ ID NO: 1232583 - DNA, 25 bp, Homo sapien
gccccagcaggagctattttctgaa

SEQ ID NO: 1232584 - DNA, 25 bp, Homo sapien
gaaactgcccagctttcccccggca

SEQ ID NO: 1232585 - DNA, 25 bp, Homo sapien
cccacaattcatggtatgtacaggg

SEQ ID NO: 1232586 - DNA, 25 bp, Homo sapien
acaatgaaaaatatcgcccatgatc

SEQ ID NO: 1232587 - DNA, 25 bp, Homo sapien
aatgaaaaatatcgcccatgatcaa

SEQ ID NO: 1232588 - DNA, 25 bp, Homo sapien
atatcgcccatgatcaacgtgttct

SEQ ID NO: 1232589 - DNA, 25 bp, Homo sapien
aaaaatatcgcccatgatcaacgtg

SEQ ID NO: 1232590 - DNA, 25 bp, Homo sapien
ccaaggtatgtcatgtcacaacata

SEQ ID NO: 1232591 - DNA, 25 bp, Homo sapien
tcatgtcacaacatactgccgctgc

SEQ ID NO: 1232592 - DNA, 25 bp, Homo sapien
tccaaggtatgtcatgtcacaacat

SEQ ID NO: 1232593 - DNA, 25 bp, Homo sapien
atgtcatgtcacaacatactgccgc

SEQ ID NO: 1232594 - DNA, 25 bp, Homo sapien
gagccattttgcctggccaaaatta

SEQ ID NO: 1232595 - DNA, 25 bp, Homo sapien
agccattttgcctggccaaaattaa

SEQ ID NO: 1232596 - DNA, 25 bp, Homo sapien
gccattttgcctggccaaaattaat

SEQ ID NO: 1232597 - DNA, 25 bp, Homo sapien
tgagccattttgcctggccaaaatt

SEQ ID NO: 1232598 - DNA, 25 bp, Homo sapien
ctgattgcttcatcagcaaggagct

SEQ ID NO: 1232599 - DNA, 25 bp, Homo sapien
caaggagctggttattgggctgtcc

SEQ ID NO: 1232600 - DNA, 25 bp, Homo sapien
ggtgaaggagttttcctgttgctcc

SEQ ID NO: 1232601 - DNA, 25 bp, Homo sapien
ttagctcaactcgagccatttcctg

SEQ ID NO: 1232602 - DNA, 25 bp, Homo sapien
agtgcaatcggaagctcttctggag

SEQ ID NO: 1232603 - DNA, 25 bp, Homo sapien
agagggagagaagcttccagttaag

SEQ ID NO: 1232604 - DNA, 25 bp, Homo sapien
catcaagtgcaatcggaagctcttc

SEQ ID NO: 1232605 - DNA, 25 bp, Homo sapien
aaataatagtgcatgcatcaagtgc

SEQ ID NO: 1232606 - DNA, 25 bp, Homo sapien
aaaaaatgagctacacgttgcagtg

SEQ ID NO: 1232607 - DNA, 25 bp, Homo sapien
ctttgctaagagcaagactgcattt

SEQ ID NO: 1232608 - DNA, 25 bp, Homo sapien
tgagctacacgttgcagtgcacacc

SEQ ID NO: 1232609 - DNA, 25 bp, Homo sapien
tgctaagagcaagactgcatttctt

SEQ ID NO: 1232610 - DNA, 25 bp, Homo sapien
aacttatgaattcaacaggtgaaga

SEQ ID NO: 1232611 - DNA, 25 bp, Homo sapien
aattcaacaggtgaagatttacaac

SEQ ID NO: 1232612 - DNA, 25 bp, Homo sapien
tgaattcaacaggtgaagatttaca

SEQ ID NO: 1232613 - DNA, 25 bp, Homo sapien
caacaggtgaagatttacaacttga

SEQ ID NO: 1232614 - DNA, 25 bp, Homo sapien
gcgcgacagtgcgatcggttgcacc

SEQ ID NO: 1232615 - DNA, 25 bp, Homo sapien
ggttggcgcgcagcgcctgctagcg

SEQ ID NO: 1232616 - DNA, 25 bp, Homo sapien
gcgatcggttgcaccttctgcgaca

SEQ ID NO: 1232617 - DNA, 25 bp, Homo sapien
agtgcgatcggttgcaccttctgcg

SEQ ID NO: 1232618 - DNA, 25 bp, Homo sapien
agctggcgctggccattgaggagct

SEQ ID NO: 1232619 - DNA, 25 bp, Homo sapien
tcagatgaggcgagtgggcggccgg

SEQ ID NO: 1232620 - DNA, 25 bp, Homo sapien
cagatgaggcgagtgggcggccggg

SEQ ID NO: 1232621 - DNA, 25 bp, Homo sapien
tgcagctggcgctggccattgagga

SEQ ID NO: 1232622 - DNA, 25 bp, Homo sapien
atatctgttaaactcacccacttta

SEQ ID NO: 1232623 - DNA, 25 bp, Homo sapien
aaaatatctgttaaactcacccact

SEQ ID NO: 1232624 - DNA, 25 bp, Homo sapien
ggaaaatatctgttaaactcaccca

SEQ ID NO: 1232625 - DNA, 25 bp, Homo sapien
taagggaaaatatctgttaaactca

SEQ ID NO: 1232626 - DNA, 25 bp, Homo sapien
gacctggatactctggagaatacaa

SEQ ID NO: 1232627 - DNA, 25 bp, Homo sapien
tgagttgattaatatcaactttccc

SEQ ID NO: 1232628 - DNA, 25 bp, Homo sapien
tagacctgtacaggctttttaattc

SEQ ID NO: 1232629 - DNA, 25 bp, Homo sapien
taattctctgagaaggacctggata

SEQ ID NO: 1232630 - DNA, 25 bp, Homo sapien
taatattattccagcttatcatcaa

SEQ ID NO: 1232631 - DNA, 25 bp, Homo sapien
aatgaaagttacaacacgtgctttg

SEQ ID NO: 1232632 - DNA, 25 bp, Homo sapien
tattccagcttatcatcaattaaaa

SEQ ID NO: 1232633 - DNA, 25 bp, Homo sapien
agttacaacacgtgctttgtgtgta

SEQ ID NO: 1232634 - DNA, 25 bp, Homo sapien
ctggctaagggcaaatttgcatctt

SEQ ID NO: 1232635 - DNA, 25 bp, Homo sapien
actggctaagggcaaatttgcatct

SEQ ID NO: 1232636 - DNA, 25 bp, Homo sapien
cactggctaagggcaaatttgcatc

SEQ ID NO: 1232637 - DNA, 25 bp, Homo sapien
tggctaagggcaaatttgcatctta

SEQ ID NO: 1232638 - DNA, 25 bp, Homo sapien
ctgctcagaatatatagactgtcct

SEQ ID NO: 1232639 - DNA, 25 bp, Homo sapien
gaatatatagactgtcctcctatcc

SEQ ID NO: 1232640 - DNA, 25 bp, Homo sapien
tcagaatatatagactgtcctccta

SEQ ID NO: 1232641 - DNA, 25 bp, Homo sapien
tatatgagttactgctcagaatata

SEQ ID NO: 1232642 - DNA, 25 bp, Homo sapien
acccaaaggcttatctacaataaat

SEQ ID NO: 1232643 - DNA, 25 bp, Homo sapien
taagtctactaagacatgcacaaga

SEQ ID NO: 1232644 - DNA, 25 bp, Homo sapien
caacagcaatgagtgcctaagtcta

SEQ ID NO: 1232645 - DNA, 25 bp, Homo sapien
gcacaagaatgttcccgttagtaaa

SEQ ID NO: 1232646 - DNA, 25 bp, Homo sapien
aagaagtcagcgacatatggaagag

SEQ ID NO: 1232647 - DNA, 25 bp, Homo sapien
tcagcgacatatggaagagatccag

SEQ ID NO: 1232648 - DNA, 25 bp, Homo sapien
gcttttacaagtatcctcatgggat

SEQ ID NO: 1232649 - DNA, 25 bp, Homo sapien
tgcttttacaagtatcctcatggga

SEQ ID NO: 1232650 - DNA, 25 bp, Homo sapien
tcttatctggtttaggaagtttaca

SEQ ID NO: 1232651 - DNA, 25 bp, Homo sapien
acaatatcatcttatctggtttagg

SEQ ID NO: 1232652 - DNA, 25 bp, Homo sapien
tatcatcttatctggtttaggaagt

SEQ ID NO: 1232653 - DNA, 25 bp, Homo sapien
catcttatctggtttaggaagttta

SEQ ID NO: 1232654 - DNA, 25 bp, Homo sapien
tctcagcatggatgtaattaccctt

SEQ ID NO: 1232655 - DNA, 25 bp, Homo sapien
gactattctctatcaagtttggccc

SEQ ID NO: 1232656 - DNA, 25 bp, Homo sapien
tccggacaatgtaatcagcaaaggt

SEQ ID NO: 1232657 - DNA, 25 bp, Homo sapien
tcaaatgcgatactccacattccgg

SEQ ID NO: 1232658 - DNA, 25 bp, Homo sapien
ctgttatccactgcatctccaaata

SEQ ID NO: 1232659 - DNA, 25 bp, Homo sapien
tctgattaaaactttggattgttcc

SEQ ID NO: 1232660 - DNA, 25 bp, Homo sapien
atactggggtatcaactattgtaag

SEQ ID NO: 1232661 - DNA, 25 bp, Homo sapien
tattgtaagcagcaactgaacacca

SEQ ID NO: 1232662 - DNA, 25 bp, Homo sapien
cactggaaagttgtgaggacaaatc

SEQ ID NO: 1232663 - DNA, 25 bp, Homo sapien
cacttaggacttatggaaaaactga

SEQ ID NO: 1232664 - DNA, 25 bp, Homo sapien
gaagtttggtgacctttgctaagaa

SEQ ID NO: 1232665 - DNA, 25 bp, Homo sapien
aagttggtatacaaacctgtcatgt

SEQ ID NO: 1232666 - DNA, 25 bp, Homo sapien
catctgttcacttgcgattctgcat

SEQ ID NO: 1232667 - DNA, 25 bp, Homo sapien
actatcaatgtaattgatagcaggc

SEQ ID NO: 1232668 - DNA, 25 bp, Homo sapien
aatgtaattgatagcaggctgccag

SEQ ID NO: 1232669 - DNA, 25 bp, Homo sapien
gacatctgttcacttgcgattctgc

SEQ ID NO: 1232670 - DNA, 25 bp, Homo sapien
tcacttaatccacaatatcatgtac

SEQ ID NO: 1232671 - DNA, 25 bp, Homo sapien
ctttgctccatttctaaaaatagtt

SEQ ID NO: 1232672 - DNA, 25 bp, Homo sapien
cacaatatcatgtaccaatgggcaa

SEQ ID NO: 1232673 - DNA, 25 bp, Homo sapien
taatccacaatatcatgtaccaatg

SEQ ID NO: 1232674 - DNA, 25 bp, Homo sapien
gcagttcatacttggtagagggagg

SEQ ID NO: 1232675 - DNA, 25 bp, Homo sapien
ctggaactctatacataaaattctg

SEQ ID NO: 1232676 - DNA, 25 bp, Homo sapien
cagttcatacttggtagagggaggt

SEQ ID NO: 1232677 - DNA, 25 bp, Homo sapien
agttcatacttggtagagggaggta

SEQ ID NO: 1232678 - DNA, 25 bp, Homo sapien
ccaagttctaggtagcaggtgtgct

SEQ ID NO: 1232679 - DNA, 25 bp, Homo sapien
tcccaggccctttccgtgaacagag

SEQ ID NO: 1232680 - DNA, 25 bp, Homo sapien
tgttgaggtgttgcagctcccaggc

SEQ ID NO: 1232681 - DNA, 25 bp, Homo sapien
aaaccaagttctaggtagcaggtgt

SEQ ID NO: 1232682 - DNA, 25 bp, Homo sapien
aatttgtgagaagataccttaagac

SEQ ID NO: 1232683 - DNA, 25 bp, Homo sapien
atacataatttgtgagaagatacct

SEQ ID NO: 1232684 - DNA, 25 bp, Homo sapien
gaagataccttaagactacataaat

SEQ ID NO: 1232685 - DNA, 25 bp, Homo sapien
catttcctttaacgaatttcaatat

SEQ ID NO: 1232686 - DNA, 25 bp, Homo sapien
agtgagaactaatcatgcatggagt

SEQ ID NO: 1232687 - DNA, 25 bp, Homo sapien
actaatcatgcatggagtttatagc

SEQ ID NO: 1232688 - DNA, 25 bp, Homo sapien
gagaactaatcatgcatggagttta

SEQ ID NO: 1232689 - DNA, 25 bp, Homo sapien
taatcatgcatggagtttatagcac

SEQ ID NO: 1232690 - DNA, 25 bp, Homo sapien
tgcccatgggtacaacagcatgctg

SEQ ID NO: 1232691 - DNA, 25 bp, Homo sapien
tatcttgactgggagccataaaggc

SEQ ID NO: 1232692 - DNA, 25 bp, Homo sapien
tcttacctaagaatttgcccatggg

SEQ ID NO: 1232693 - DNA, 25 bp, Homo sapien
ggaattggacttggtgcagctctat

SEQ ID NO: 1232694 - DNA, 25 bp, Homo sapien
ggagatcaaggatcaccctgggcaa

SEQ ID NO: 1232695 - DNA, 25 bp, Homo sapien
gaggcctgacaagtatgagtatgat

SEQ ID NO: 1232696 - DNA, 25 bp, Homo sapien
aaccaggtaagtgaaagatctgcac

SEQ ID NO: 1232697 - DNA, 25 bp, Homo sapien
gactacatcagactacatcaaactg

SEQ ID NO: 1232698 - DNA, 25 bp, Homo sapien
tctttgttcacatactagagctgag

SEQ ID NO: 1232699 - DNA, 25 bp, Homo sapien
tggtgttagtattgtcttgcgcatc

SEQ ID NO: 1232700 - DNA, 25 bp, Homo sapien
aaaatgcaccatgatagaatagtgg

SEQ ID NO: 1232701 - DNA, 25 bp, Homo sapien
gagctgagttatagttgtggcaatt

SEQ ID NO: 1232702 - DNA, 25 bp, Homo sapien
tttctttcgcccacaccttaagcaa

SEQ ID NO: 1232703 - DNA, 25 bp, Homo sapien
gctcgatttctagtttgttcgttca

SEQ ID NO: 1232704 - DNA, 25 bp, Homo sapien
tccaaggttcctgctcgatttctag

SEQ ID NO: 1232705 - DNA, 25 bp, Homo sapien
taagcaataggtcctccaaggttcc

SEQ ID NO: 1232706 - DNA, 25 bp, Homo sapien
tttcattccattcgagtgcgttcca

SEQ ID NO: 1232707 - DNA, 25 bp, Homo sapien
tcgagtctattccgttccattctgt

SEQ ID NO: 1232708 - DNA, 25 bp, Homo sapien
ccattccattcgcatccatttcatt

SEQ ID NO: 1232709 - DNA, 25 bp, Homo sapien
gtttgactcgaatccattcaattcc

SEQ ID NO: 1232710 - DNA, 25 bp, Homo sapien
cattccattcgcatacattccactc

SEQ ID NO: 1232711 - DNA, 25 bp, Homo sapien
attccataccattacattccgtttg

SEQ ID NO: 1232712 - DNA, 25 bp, Homo sapien
tgtacaaccaagtgagacagcagga

SEQ ID NO: 1232713 - DNA, 25 bp, Homo sapien
tcaagttggcagaagaaaggatggc

SEQ ID NO: 1232714 - DNA, 25 bp, Homo sapien
tcttactgagggaaaagatcagggt

SEQ ID NO: 1232715 - DNA, 25 bp, Homo sapien
gccaggagaaccaacacagaggtga

SEQ ID NO: 1232716 - DNA, 25 bp, Homo sapien
gataattacatttgtgctgatagtt

SEQ ID NO: 1232717 - DNA, 25 bp, Homo sapien
tgtactgcacctacaggttactttt

SEQ ID NO: 1232718 - DNA, 25 bp, Homo sapien
aggaactattaagatactctaagat

SEQ ID NO: 1232719 - DNA, 25 bp, Homo sapien
tgtgctgatagttgtactgcaccta

SEQ ID NO: 1232720 - DNA, 25 bp, Homo sapien
ctctcctgcagtcgctctggacctt

SEQ ID NO: 1232721 - DNA, 25 bp, Homo sapien
tctggaccttgcacaccattcttca

SEQ ID NO: 1232722 - DNA, 25 bp, Homo sapien
tctcctgcagtcgctctggaccttg

SEQ ID NO: 1232723 - DNA, 25 bp, Homo sapien
tcctgcagtcgctctggaccttgca

SEQ ID NO: 1232724 - DNA, 25 bp, Homo sapien
cttgcaaacctcttgagaagggctg

SEQ ID NO: 1232725 - DNA, 25 bp, Homo sapien
cacctctcagaggtggagcgaggga

SEQ ID NO: 1232726 - DNA, 25 bp, Homo sapien
tgcaaacctcttgagaagggctgtg

SEQ ID NO: 1232727 - DNA, 25 bp, Homo sapien
ttctccaaaccacctctcagaggtg

SEQ ID NO: 1232728 - DNA, 25 bp, Homo sapien
gatagaacggtcgtgggatctttac

SEQ ID NO: 1232729 - DNA, 25 bp, Homo sapien
gatttcacgaatgttttctgcttcg

SEQ ID NO: 1232730 - DNA, 25 bp, Homo sapien
tctgcttcgtgtttttcacagggaa

SEQ ID NO: 1232731 - DNA, 25 bp, Homo sapien
ggatctttacctgatgatttcacga

SEQ ID NO: 1232732 - DNA, 25 bp, Homo sapien
ggtactgtctgaaatcattgttcat

SEQ ID NO: 1232733 - DNA, 25 bp, Homo sapien
cacatggcttcagtcattaataata

SEQ ID NO: 1232734 - DNA, 25 bp, Homo sapien
catttcttgtcaatatagtaagtca

SEQ ID NO: 1232735 - DNA, 25 bp, Homo sapien
taagttactaggacttggtactgtc

SEQ ID NO: 1232736 - DNA, 25 bp, Homo sapien
tgtatagcaggctcccttacctcgg

SEQ ID NO: 1232737 - DNA, 25 bp, Homo sapien
gcagtaagagattaacgagaataat

SEQ ID NO: 1232738 - DNA, 25 bp, Homo sapien
tatgaagtacaataagggttcttta

SEQ ID NO: 1232739 - DNA, 25 bp, Homo sapien
aaacagttatagcaagatggccacc

SEQ ID NO: 1232740 - DNA, 25 bp, Homo sapien
ggcatgctgcacttttatcaccgtc

SEQ ID NO: 1232741 - DNA, 25 bp, Homo sapien
gcatgctgcacttttatcaccgtca

SEQ ID NO: 1232742 - DNA, 25 bp, Homo sapien
catgctgcacttttatcaccgtcat

SEQ ID NO: 1232743 - DNA, 25 bp, Homo sapien
ggttgttctttgtctgcattgtcca

SEQ ID NO: 1232744 - DNA, 25 bp, Homo sapien
tggtggttgttctttgtctgcattg

SEQ ID NO: 1232745 - DNA, 25 bp, Homo sapien
tgttctttgtctgcattgtccaagc

SEQ ID NO: 1232746 - DNA, 25 bp, Homo sapien
ttctttgtctgcattgtccaagctg

SEQ ID NO: 1232747 - DNA, 25 bp, Homo sapien
taaagggatgagcttcatatacaaa

SEQ ID NO: 1232748 - DNA, 25 bp, Homo sapien
tggaggctatttgtggctctcacct

SEQ ID NO: 1232749 - DNA, 25 bp, Homo sapien
aaaatgctgtctgactacgccaggg

SEQ ID NO: 1232750 - DNA, 25 bp, Homo sapien
ggaagggaatgtatgatcaaagatc

SEQ ID NO: 1232751 - DNA, 25 bp, Homo sapien
aagggtgcctgagagcgtgctccca

SEQ ID NO: 1232752 - DNA, 25 bp, Homo sapien
taaagggtgcctgagagcgtgctcc

SEQ ID NO: 1232753 - DNA, 25 bp, Homo sapien
ttaaagggtgcctgagagcgtgctc

SEQ ID NO: 1232754 - DNA, 25 bp, Homo sapien
aaagggtgcctgagagcgtgctccc

SEQ ID NO: 1232755 - DNA, 25 bp, Homo sapien
tgctggccactgaaaaggacccgtg

SEQ ID NO: 1232756 - DNA, 25 bp, Homo sapien
gcatgtgtattacatagggctctac

SEQ ID NO: 1232757 - DNA, 25 bp, Homo sapien
catttgtcagaccaagcatgtgtat

SEQ ID NO: 1232758 - DNA, 25 bp, Homo sapien
tcttttggagatcagtgtagtgtgt

SEQ ID NO: 1232759 - DNA, 25 bp, Homo sapien
gcagatgtgtatcagcattatttgg

SEQ ID NO: 1232760 - DNA, 25 bp, Homo sapien
tgagcagatgtgtatcagcattatt

SEQ ID NO: 1232761 - DNA, 25 bp, Homo sapien
gagcagatgtgtatcagcattattt

SEQ ID NO: 1232762 - DNA, 25 bp, Homo sapien
tttgagcagatgtgtatcagcatta

SEQ ID NO: 1232763 - DNA, 25 bp, Homo sapien
tgctccttccataagagttggcagg

SEQ ID NO: 1232764 - DNA, 25 bp, Homo sapien
ttctgtgcagctgacatgcaaactt

SEQ ID NO: 1232765 - DNA, 25 bp, Homo sapien
gagttggcaggatgggaactttcat

SEQ ID NO: 1232766 - DNA, 25 bp, Homo sapien
cttttctgtgcagctgacatgcaaa

SEQ ID NO: 1232767 - DNA, 25 bp, Homo sapien
cattagtaattaatcctgtcctgga

SEQ ID NO: 1232768 - DNA, 25 bp, Homo sapien
gccctccaggaatcaactgagctgt

SEQ ID NO: 1232769 - DNA, 25 bp, Homo sapien
tctgccagtactgacgtattactgt

SEQ ID NO: 1232770 - DNA, 25 bp, Homo sapien
agtcgagccggccaactggcctgtc

SEQ ID NO: 1232771 - DNA, 25 bp, Homo sapien
catgactgaaggatctcttcctgac

SEQ ID NO: 1232772 - DNA, 25 bp, Homo sapien
ctcttcctgacactggagaaccaag

SEQ ID NO: 1232773 - DNA, 25 bp, Homo sapien
tgactgaaggatctcttcctgacac

SEQ ID NO: 1232774 - DNA, 25 bp, Homo sapien
cccatgactgaaggatctcttcctg

SEQ ID NO: 1232775 - DNA, 25 bp, Homo sapien
gctgccagagttccttggctcatgt

SEQ ID NO: 1232776 - DNA, 25 bp, Homo sapien
tgactacgaactcggccaagaaagg

SEQ ID NO: 1232777 - DNA, 25 bp, Homo sapien
gcacgtgtccaaccattcttctgta

SEQ ID NO: 1232778 - DNA, 25 bp, Homo sapien
tccttcctctgtaaagcccacagtg

SEQ ID NO: 1232779 - DNA, 25 bp, Homo sapien
aaataggagcttcttttcttacatt

SEQ ID NO: 1232780 - DNA, 25 bp, Homo sapien
tttttggtccactcaaataggagct

SEQ ID NO: 1232781 - DNA, 25 bp, Homo sapien
ctcaaataggagcttcttttcttac

SEQ ID NO: 1232782 - DNA, 25 bp, Homo sapien
ctttttggtccactcaaataggagc

SEQ ID NO: 1232783 - DNA, 25 bp, Homo sapien
cagagcccgtatgcactgtgaagga

SEQ ID NO: 1232784 - DNA, 25 bp, Homo sapien
gctctttaacaatgagggttcagca

SEQ ID NO: 1232785 - DNA, 25 bp, Homo sapien
catttgtggatagagcagctgtcag

SEQ ID NO: 1232786 - DNA, 25 bp, Homo sapien
tttaagactaactggagactcctgt

SEQ ID NO: 1232787 - DNA, 25 bp, Homo sapien
tgggcagcgccacaagcgtgttgtt

SEQ ID NO: 1232788 - DNA, 25 bp, Homo sapien
gagctggctaatttcgtcgtaggac

SEQ ID NO: 1232789 - DNA, 25 bp, Homo sapien
ggacataaagctgaggatgttctcg

SEQ ID NO: 1232790 - DNA, 25 bp, Homo sapien
tctcgatggctacgatgggcagcgc

SEQ ID NO: 1232791 - DNA, 25 bp, Homo sapien
aattagactgaataaacccgcctca

SEQ ID NO: 1232792 - DNA, 25 bp, Homo sapien
gggacaatgttctagattagagaac

SEQ ID NO: 1232793 - DNA, 25 bp, Homo sapien
ccctggaaatgaggatattgtgatc

SEQ ID NO: 1232794 - DNA, 25 bp, Homo sapien
tagagaacaatccttaattagactg

SEQ ID NO: 1232795 - DNA, 25 bp, Homo sapien
tgattaggctgcttgttaagactcc

SEQ ID NO: 1232796 - DNA, 25 bp, Homo sapien
taaatgatcacaagctgattaggct

SEQ ID NO: 1232797 - DNA, 25 bp, Homo sapien
acttaaagacatcagaacctatcct

SEQ ID NO: 1232798 - DNA, 25 bp, Homo sapien
tagtttggcactctacagttcttaa

SEQ ID NO: 1232799 - DNA, 25 bp, Homo sapien
tgtttctgacatagattatggtacc

SEQ ID NO: 1232800 - DNA, 25 bp, Homo sapien
cattctctggcagaccaagtccatt

SEQ ID NO: 1232801 - DNA, 25 bp, Homo sapien
tatggtacctctccactttcagaaa

SEQ ID NO: 1232802 - DNA, 25 bp, Homo sapien
gaaatccctgattcaacattctctg

SEQ ID NO: 1232803 - DNA, 25 bp, Homo sapien
gaatgtctgcatgacgagctaatga

SEQ ID NO: 1232804 - DNA, 25 bp, Homo sapien
gcaagaatgtctgcatgacgagcta

SEQ ID NO: 1232805 - DNA, 25 bp, Homo sapien
tctgcatgacgagctaatgaatggt

SEQ ID NO: 1232806 - DNA, 25 bp, Homo sapien
catgacgagctaatgaatggtttct

SEQ ID NO: 1232807 - DNA, 25 bp, Homo sapien
tgaaagtcatatttaatagtgacag

SEQ ID NO: 1232808 - DNA, 25 bp, Homo sapien
gaaagtcatatttaatagtgacagc

SEQ ID NO: 1232809 - DNA, 25 bp, Homo sapien
ctgggatgaagcaacagagattgga

SEQ ID NO: 1232810 - DNA, 25 bp, Homo sapien
cctgggatgaagcaacagagattgg

SEQ ID NO: 1232811 - DNA, 25 bp, Homo sapien
tccagctgttctaggcaagcaattc

SEQ ID NO: 1232812 - DNA, 25 bp, Homo sapien
taagtttatgtagggcagtccagct

SEQ ID NO: 1232813 - DNA, 25 bp, Homo sapien
cacttaattcaaggagtagggtact

SEQ ID NO: 1232814 - DNA, 25 bp, Homo sapien
caaattcattagtagaaactcagag

SEQ ID NO: 1232815 - DNA, 25 bp, Homo sapien
ccatgttaagggaaacttttgccag

SEQ ID NO: 1232816 - DNA, 25 bp, Homo sapien
ggaaataacaaaaagcgaacattca

SEQ ID NO: 1232817 - DNA, 25 bp, Homo sapien
tgcaaagaaagtgagatataccaaa

SEQ ID NO: 1232818 - DNA, 25 bp, Homo sapien
atacaatcataagaaatgggattcc

SEQ ID NO: 1232819 - DNA, 25 bp, Homo sapien
ttacttaacaactgactgaatctct

SEQ ID NO: 1232820 - DNA, 25 bp, Homo sapien
gcgagccactacagccggcctggat

SEQ ID NO: 1232821 - DNA, 25 bp, Homo sapien
tctttgtaggccacatgaactctgt

SEQ ID NO: 1232822 - DNA, 25 bp, Homo sapien
aactatgatgctatatgaaacaagc

SEQ ID NO: 1232823 - DNA, 25 bp, Homo sapien
tgcccagtcccaactattactttaa

SEQ ID NO: 1232824 - DNA, 25 bp, Homo sapien
tgcctgcaattggagaggtaacctg

SEQ ID NO: 1232825 - DNA, 25 bp, Homo sapien
gattcctgtcctagataatagcaaa

SEQ ID NO: 1232826 - DNA, 25 bp, Homo sapien
gcacaaggttcacagggccaaaaat

SEQ ID NO: 1232827 - DNA, 25 bp, Homo sapien
acccctctagtgaataagcctttgg

SEQ ID NO: 1232828 - DNA, 25 bp, Homo sapien
tatatagatttttacgtctgttcag

SEQ ID NO: 1232829 - DNA, 25 bp, Homo sapien
cagggaaatatagcttcatggcctt

SEQ ID NO: 1232830 - DNA, 25 bp, Homo sapien
actgtgctcggccaaaatgtattta

SEQ ID NO: 1232831 - DNA, 25 bp, Homo sapien
tgttcagggaaatatagcttcatgg

SEQ ID NO: 1232832 - DNA, 25 bp, Homo sapien
gaccacaggccttaggaaggtcact

SEQ ID NO: 1232833 - DNA, 25 bp, Homo sapien
catgttgaaccttacccaggctgta

SEQ ID NO: 1232834 - DNA, 25 bp, Homo sapien
gaagtaaaatagtcagtccctccgc

SEQ ID NO: 1232835 - DNA, 25 bp, Homo sapien
ggtccaggaccacattgtcaaaatg

SEQ ID NO: 1232836 - DNA, 25 bp, Homo sapien
gaatgccatccctgtgtatctccct

SEQ ID NO: 1232837 - DNA, 25 bp, Homo sapien
tccttagttatacacgaggtcacag

SEQ ID NO: 1232838 - DNA, 25 bp, Homo sapien
tatagatacaaactggccatcagcc

SEQ ID NO: 1232839 - DNA, 25 bp, Homo sapien
tgacatggtattggttcactgtaac

SEQ ID NO: 1232840 - DNA, 25 bp, Homo sapien
ggatgacatctatgggcccttaacc

SEQ ID NO: 1232841 - DNA, 25 bp, Homo sapien
tgtcatctccaaccgcagggttcaa

SEQ ID NO: 1232842 - DNA, 25 bp, Homo sapien
gatattagctttcatctcggtgagg

SEQ ID NO: 1232843 - DNA, 25 bp, Homo sapien
taaagaccccaatctggatgacatc

SEQ ID NO: 1232844 - DNA, 25 bp, Homo sapien
gtatacaaattgctatagacactag

SEQ ID NO: 1232845 - DNA, 25 bp, Homo sapien
taagcaccttttatgtatcaggtac

SEQ ID NO: 1232846 - DNA, 25 bp, Homo sapien
gacactagaggactaaactaagaaa

SEQ ID NO: 1232847 - DNA, 25 bp, Homo sapien
tgttacatacttcatacttgcattt

SEQ ID NO: 1232848 - DNA, 25 bp, Homo sapien
tctcaacacacgataaatctcatca

SEQ ID NO: 1232849 - DNA, 25 bp, Homo sapien
ttgacatatctcaacacacgataaa

SEQ ID NO: 1232850 - DNA, 25 bp, Homo sapien
catatctcaacacacgataaatctc

SEQ ID NO: 1232851 - DNA, 25 bp, Homo sapien
tcaacacacgataaatctcatcaat

SEQ ID NO: 1232852 - DNA, 25 bp, Homo sapien
gaaacatctgatcctggtaatttcc

SEQ ID NO: 1232853 - DNA, 25 bp, Homo sapien
cattgccatagaggatatatccctt

SEQ ID NO: 1232854 - DNA, 25 bp, Homo sapien
ggagagcccatgagtcttccagaaa

SEQ ID NO: 1232855 - DNA, 25 bp, Homo sapien
tttcatcaaagtactccattgccat

SEQ ID NO: 1232856 - DNA, 25 bp, Homo sapien
tgcgaagctcagaaatttcacgcct

SEQ ID NO: 1232857 - DNA, 25 bp, Homo sapien
gaacagtcacgccagcaccatttgt

SEQ ID NO: 1232858 - DNA, 25 bp, Homo sapien
cgtagtttgcgttctagctctgcca

SEQ ID NO: 1232859 - DNA, 25 bp, Homo sapien
ttgttgttagggctgcagacggtcc

SEQ ID NO: 1232860 - DNA, 25 bp, Homo sapien
taagacgccgctctaaaaagtggag

SEQ ID NO: 1232861 - DNA, 25 bp, Homo sapien
taaaggatgcataaccatgtcacgg

SEQ ID NO: 1232862 - DNA, 25 bp, Homo sapien
gttgttaaagcgaccactcaggagg

SEQ ID NO: 1232863 - DNA, 25 bp, Homo sapien
gcaaaactgcatcccgcaagtcgag

SEQ ID NO: 1232864 - DNA, 25 bp, Homo sapien
tatccatgtgtgcagcgctgtacca

SEQ ID NO: 1232865 - DNA, 25 bp, Homo sapien
gaaaaccagttaagccaagtgcatg

SEQ ID NO: 1232866 - DNA, 25 bp, Homo sapien
cagactagtagaggccccgggtatt

SEQ ID NO: 1232867 - DNA, 25 bp, Homo sapien
tacatttctatgtgggaaggaccca

SEQ ID NO: 1232868 - DNA, 25 bp, Homo sapien
caaaaggacagcagtacttaagcct

SEQ ID NO: 1232869 - DNA, 25 bp, Homo sapien
cacctcagatggcaggctatacaag

SEQ ID NO: 1232870 - DNA, 25 bp, Homo sapien
gatagatcccaagtcaaagaaccaa

SEQ ID NO: 1232871 - DNA, 25 bp, Homo sapien
tagggagcagccaactaattgctag

SEQ ID NO: 1232872 - DNA, 25 bp, Homo sapien
tgtgtgaccgggaggtgtttttcac

SEQ ID NO: 1232873 - DNA, 25 bp, Homo sapien
tttcactttccaataattgattcgg

SEQ ID NO: 1232874 - DNA, 25 bp, Homo sapien
ccaataattgattcggttataacaa

SEQ ID NO: 1232875 - DNA, 25 bp, Homo sapien
acacatttatttacgtaccctgttg

SEQ ID NO: 1232876 - DNA, 25 bp, Homo sapien
cccaagcgatgctgggcgcgctccc

SEQ ID NO: 1232877 - DNA, 25 bp, Homo sapien
cagaggcgtagtggcctcccctaag

SEQ ID NO: 1232878 - DNA, 25 bp, Homo sapien
caagaaatgtaaccagaggcgtagt

SEQ ID NO: 1232879 - DNA, 25 bp, Homo sapien
aaatgtaaccagaggcgtagtggcc

SEQ ID NO: 1232880 - DNA, 25 bp, Homo sapien
agaactaggtctagggacacgtaca

SEQ ID NO: 1232881 - DNA, 25 bp, Homo sapien
ggtcttaatatagcgactgtttatc

SEQ ID NO: 1232882 - DNA, 25 bp, Homo sapien
gcgactgtttatcctgtcctgacta

SEQ ID NO: 1232883 - DNA, 25 bp, Homo sapien
tagggacacgtacatggtcttaata

SEQ ID NO: 1232884 - DNA, 25 bp, Homo sapien
cggaggagacggaggcgtgggcgga

SEQ ID NO: 1232885 - DNA, 25 bp, Homo sapien
cggcggctccccggctggtgtggtg

SEQ ID NO: 1232886 - DNA, 25 bp, Homo sapien
gctgtggcggagcgcggaggagacg

SEQ ID NO: 1232887 - DNA, 25 bp, Homo sapien
ctccccggctggtgtggtgtcggcc

SEQ ID NO: 1232888 - DNA, 25 bp, Homo sapien
gcgacagcggtggcttgcagactag

SEQ ID NO: 1232889 - DNA, 25 bp, Homo sapien
ggcgacagcggtggcttgcagacta

SEQ ID NO: 1232890 - DNA, 25 bp, Homo sapien
tgcggctggtcggtgtagacccact

SEQ ID NO: 1232891 - DNA, 25 bp, Homo sapien
cggctggtcggtgtagacccactcg

SEQ ID NO: 1232892 - DNA, 25 bp, Homo sapien
gctggtcggtgtagacccactcgaa

SEQ ID NO: 1232893 - DNA, 25 bp, Homo sapien
ggtcggtgtagacccactcgaagtc

SEQ ID NO: 1232894 - DNA, 25 bp, Homo sapien
taacggggcgcccgctggccctcac

SEQ ID NO: 1232895 - DNA, 25 bp, Homo sapien
ataacggggcgcccgctggccctca

SEQ ID NO: 1232896 - DNA, 25 bp, Homo sapien
gggcctccggcgcccacgaccgcgc

SEQ ID NO: 1232897 - DNA, 25 bp, Homo sapien
ctccggcgcccacgaccgcgcaggg

SEQ ID NO: 1232898 - DNA, 25 bp, Homo sapien
cggcgcccacgaccgcgcagggccc

SEQ ID NO: 1232899 - DNA, 25 bp, Homo sapien
gcctccggcgcccacgaccgcgcag

SEQ ID NO: 1232900 - DNA, 25 bp, Homo sapien
cctgcgcctcttcgcggaagggtcg

SEQ ID NO: 1232901 - DNA, 25 bp, Homo sapien
ggcccgctccggaggagagggagtg

SEQ ID NO: 1232902 - DNA, 25 bp, Homo sapien
gaagggtcggagctgcgcggctccg

SEQ ID NO: 1232903 - DNA, 25 bp, Homo sapien
agggcacaggaatcttctagcgaaa

SEQ ID NO: 1232904 - DNA, 25 bp, Homo sapien
cgctggtaggcccaaggatgcccag

SEQ ID NO: 1232905 - DNA, 25 bp, Homo sapien
ctgcctagcactcaggcagccccaa

SEQ ID NO: 1232906 - DNA, 25 bp, Homo sapien
aggcccaaggatgcccaggaccaca

SEQ ID NO: 1232907 - DNA, 25 bp, Homo sapien
agggctcgctggtaggcccaaggat

SEQ ID NO: 1232908 - DNA, 25 bp, Homo sapien
catggcaggcgcatcatctgagacc

SEQ ID NO: 1232909 - DNA, 25 bp, Homo sapien
gtttttacacaggtaggacgctaga

SEQ ID NO: 1232910 - DNA, 25 bp, Homo sapien
tatatcatatgtggcctggcagggt

SEQ ID NO: 1232911 - DNA, 25 bp, Homo sapien
agtagctcagtttcagtattccaga

SEQ ID NO: 1232912 - DNA, 25 bp, Homo sapien
ataatccatatcaaattgggatcag

SEQ ID NO: 1232913 - DNA, 25 bp, Homo sapien
tatcaaattgggatcaggtttcatc

SEQ ID NO: 1232914 - DNA, 25 bp, Homo sapien
tcaaattgggatcaggtttcatcaa

SEQ ID NO: 1232915 - DNA, 25 bp, Homo sapien
ccatatcaaattgggatcaggtttc

SEQ ID NO: 1232916 - DNA, 25 bp, Homo sapien
gatgctgccaacatgtagactaagg

SEQ ID NO: 1232917 - DNA, 25 bp, Homo sapien
tgtcaaaagtgacctgtgccacggt

SEQ ID NO: 1232918 - DNA, 25 bp, Homo sapien
caaacccaggccaagtaaagatgct

SEQ ID NO: 1232919 - DNA, 25 bp, Homo sapien
tgccacggtattgataacttccaga

SEQ ID NO: 1232920 - DNA, 25 bp, Homo sapien
accactaagcttaaggacccaagag

SEQ ID NO: 1232921 - DNA, 25 bp, Homo sapien
gactgacaaaatactagcctggcca

SEQ ID NO: 1232922 - DNA, 25 bp, Homo sapien
tttttaatgaactgcttggactgac

SEQ ID NO: 1232923 - DNA, 25 bp, Homo sapien
cctttgtaaaagtaggctggaagat

SEQ ID NO: 1232924 - DNA, 25 bp, Homo sapien
actgcacccatccaggaaactccag

SEQ ID NO: 1232925 - DNA, 25 bp, Homo sapien
ttttggtgcctcttcattcttgagt

SEQ ID NO: 1232926 - DNA, 25 bp, Homo sapien
ttatccaggaattgtagtgagggag

SEQ ID NO: 1232927 - DNA, 25 bp, Homo sapien
gagtagggacttattgtatcatcca

SEQ ID NO: 1232928 - DNA, 25 bp, Homo sapien
gagggaggttgtcatagtattcagc

SEQ ID NO: 1232929 - DNA, 25 bp, Homo sapien
agaagaatccctttggcactaatga

SEQ ID NO: 1232930 - DNA, 25 bp, Homo sapien
agaatccctttggcactaatgatat

SEQ ID NO: 1232931 - DNA, 25 bp, Homo sapien
gaagaatccctttggcactaatgat

SEQ ID NO: 1232932 - DNA, 25 bp, Homo sapien
gagaagaatccctttggcactaatg

SEQ ID NO: 1232933 - DNA, 25 bp, Homo sapien
cctgtgagtgaaactgagcagtaca

SEQ ID NO: 1232934 - DNA, 25 bp, Homo sapien
tgacagacatgagtgaaacatcctc

SEQ ID NO: 1232935 - DNA, 25 bp, Homo sapien
ccgtgcctggcgaaatagcttttta

SEQ ID NO: 1232936 - DNA, 25 bp, Homo sapien
cacttcttggtatcaccgagctctt

SEQ ID NO: 1232937 - DNA, 25 bp, Homo sapien
taatagctgtttattagctttttaa

SEQ ID NO: 1232938 - DNA, 25 bp, Homo sapien
gtgattaatagctgtttattagctt

SEQ ID NO: 1232939 - DNA, 25 bp, Homo sapien
taaagcaaaactttatagtgaaata

SEQ ID NO: 1232940 - DNA, 25 bp, Homo sapien
tagtgaaataaactagaaatagctt

SEQ ID NO: 1232941 - DNA, 25 bp, Homo sapien
gtacccaagttaccatattatatag

SEQ ID NO: 1232942 - DNA, 25 bp, Homo sapien
aaatgagtaattcagcttacaggga

SEQ ID NO: 1232943 - DNA, 25 bp, Homo sapien
cttttatgctatatcatacctcagg

SEQ ID NO: 1232944 - DNA, 25 bp, Homo sapien
taattcgggtcccatatagaagtta

SEQ ID NO: 1232945 - DNA, 25 bp, Homo sapien
agtaaggctgtacaggattcagcag

SEQ ID NO: 1232946 - DNA, 25 bp, Homo sapien
ttatttatgagtaaggctgtacagg

SEQ ID NO: 1232947 - DNA, 25 bp, Homo sapien
ttatgagtaaggctgtacaggattc

SEQ ID NO: 1232948 - DNA, 25 bp, Homo sapien
tgagtaaggctgtacaggattcagc

SEQ ID NO: 1232949 - DNA, 25 bp, Homo sapien
tgcctgtgatagcaactgcattctg

SEQ ID NO: 1232950 - DNA, 25 bp, Homo sapien
gaaaccttcctcctgagttgagtcc

SEQ ID NO: 1232951 - DNA, 25 bp, Homo sapien
gagttgagtccaattatcagcttca

SEQ ID NO: 1232952 - DNA, 25 bp, Homo sapien
tgcagggatgcatttacttgtcagc

SEQ ID NO: 1232953 - DNA, 25 bp, Homo sapien
gcgtgccaccaagacaggtatgcgc

SEQ ID NO: 1232954 - DNA, 25 bp, Homo sapien
tgccaccaagacaggtatgcgccac

SEQ ID NO: 1232955 - DNA, 25 bp, Homo sapien
gctggaatgtagttgtggcgcagtc

SEQ ID NO: 1232956 - DNA, 25 bp, Homo sapien
gtgccaccaagacaggtatgcgcca

SEQ ID NO: 1232957 - DNA, 25 bp, Homo sapien
gattatctactttacattgtgtatg

SEQ ID NO: 1232958 - DNA, 25 bp, Homo sapien
taagattatctactttacattgtgt

SEQ ID NO: 1232959 - DNA, 25 bp, Homo sapien
gataagattatctactttacattgt

SEQ ID NO: 1232960 - DNA, 25 bp, Homo sapien
atctactttacattgtgtatgttac

SEQ ID NO: 1232961 - DNA, 25 bp, Homo sapien
tactcagagatcaagctggccaact

SEQ ID NO: 1232962 - DNA, 25 bp, Homo sapien
aggattcccaactggacggcagcaa

SEQ ID NO: 1232963 - DNA, 25 bp, Homo sapien
tagagcagtcaggtacaaatgggtc

SEQ ID NO: 1232964 - DNA, 25 bp, Homo sapien
catttcatacgtgaccagacggagg

SEQ ID NO: 1232965 - DNA, 25 bp, Homo sapien
gccactgcttggcctgctgcctgtg

SEQ ID NO: 1232966 - DNA, 25 bp, Homo sapien
cctcactgagagccactgcttggcc

SEQ ID NO: 1232967 - DNA, 25 bp, Homo sapien
tcactgagagccactgcttggcctg

SEQ ID NO: 1232968 - DNA, 25 bp, Homo sapien
cactgcttggcctgctgcctgtgtt

SEQ ID NO: 1232969 - DNA, 25 bp, Homo sapien
gctctgaaaactatttggttaaatg

SEQ ID NO: 1232970 - DNA, 25 bp, Homo sapien
accattggagtgtggaagtagcttg

SEQ ID NO: 1232971 - DNA, 25 bp, Homo sapien
gccgaggagttctgcttgcttgtcc

SEQ ID NO: 1232972 - DNA, 25 bp, Homo sapien
ctgcattctcctgaccattggagtg

SEQ ID NO: 1232973 - DNA, 25 bp, Homo sapien
ggagtcagtgacttgaggcactcac

SEQ ID NO: 1232974 - DNA, 25 bp, Homo sapien
ctggtcatgaggagggggagtcagt

SEQ ID NO: 1232975 - DNA, 25 bp, Homo sapien
catgaggagggggagtcagtgactt

SEQ ID NO: 1232976 - DNA, 25 bp, Homo sapien
gggagtcagtgacttgaggcactca

SEQ ID NO: 1232977 - DNA, 25 bp, Homo sapien
ccggtggcttattaaacagctgctc

SEQ ID NO: 1232978 - DNA, 25 bp, Homo sapien
tctgagatgcctaaggggctgcact

SEQ ID NO: 1232979 - DNA, 25 bp, Homo sapien
ggctgcactcccaagtcggggttct

SEQ ID NO: 1232980 - DNA, 25 bp, Homo sapien
tttgacaccggtggcttattaaaca

SEQ ID NO: 1232981 - DNA, 25 bp, Homo sapien
caagtgtgacctgtgctctgactgc

SEQ ID NO: 1232982 - DNA, 25 bp, Homo sapien
aatgactgactcctgtagcttggtg

SEQ ID NO: 1232983 - DNA, 25 bp, Homo sapien
tttccaaggcatctcaaggtcccgg

SEQ ID NO: 1232984 - DNA, 25 bp, Homo sapien
cacaacccctgcagtgagtgacagt

SEQ ID NO: 1232985 - DNA, 25 bp, Homo sapien
tctggagataggttgcataacaatg

SEQ ID NO: 1232986 - DNA, 25 bp, Homo sapien
gaatgtatgtaatactcctgaactg

SEQ ID NO: 1232987 - DNA, 25 bp, Homo sapien
cacgtgaaaatggtaacaatgggct

SEQ ID NO: 1232988 - DNA, 25 bp, Homo sapien
acaatgggctgggtgcgttggctaa

SEQ ID NO: 1232989 - DNA, 25 bp, Homo sapien
caaagctcagagacagaaactccgg

SEQ ID NO: 1232990 - DNA, 25 bp, Homo sapien
cagagtccagctcggtgttggctaa

SEQ ID NO: 1232991 - DNA, 25 bp, Homo sapien
aaactccggagatggagcaggcaga

SEQ ID NO: 1232992 - DNA, 25 bp, Homo sapien
ccaggccctcggagatgacgagcat

SEQ ID NO: 1232993 - DNA, 25 bp, Homo sapien
aagtctggaggtaatgccagttggc

SEQ ID NO: 1232994 - DNA, 25 bp, Homo sapien
gctgcagaagggcattttgaagtct

SEQ ID NO: 1232995 - DNA, 25 bp, Homo sapien
ttaaaactaaaatgtgctccagtgg

SEQ ID NO: 1232996 - DNA, 25 bp, Homo sapien
gccaagtcgactcagctggctcttt

SEQ ID NO: 1232997 - DNA, 25 bp, Homo sapien
tttttgtcggagatgagatcagcta

SEQ ID NO: 1232998 - DNA, 25 bp, Homo sapien
ccccgagtagcgtcaggtaggcttg

SEQ ID NO: 1232999 - DNA, 25 bp, Homo sapien
tagaacatcccagctggtgggctgt

SEQ ID NO: 1233000 - DNA, 25 bp, Homo sapien
gaaactatcagatgatgtgctcccc

SEQ ID NO: 1233001 - DNA, 25 bp, Homo sapien
tagaggtggaagtaaaaagtccaca

SEQ ID NO: 1233002 - DNA, 25 bp, Homo sapien
tgtcttccaagaccgaagtctcaag

SEQ ID NO: 1233003 - DNA, 25 bp, Homo sapien
tcacccaagcgagaaatctgacatc

SEQ ID NO: 1233004 - DNA, 25 bp, Homo sapien
tccaaagaacgctttcctagaggtg

SEQ ID NO: 1233005 - DNA, 25 bp, Homo sapien
taagaatagtcaccaagcgaagagc

SEQ ID NO: 1233006 - DNA, 25 bp, Homo sapien
caagaaaccaggatcgtgggcaacc

SEQ ID NO: 1233007 - DNA, 25 bp, Homo sapien
tcccgggactagagagtgatgagct

SEQ ID NO: 1233008 - DNA, 25 bp, Homo sapien
ccaagaatgcaatgtgtcagcggaa

SEQ ID NO: 1233009 - DNA, 25 bp, Homo sapien
tatgaacgtttgcaggagtccctca

SEQ ID NO: 1233010 - DNA, 25 bp, Homo sapien
tcagcccaaaacaagcagtgacggt

SEQ ID NO: 1233011 - DNA, 25 bp, Homo sapien
tctggccagccttgtgtgaaaatgc

SEQ ID NO: 1233012 - DNA, 25 bp, Homo sapien
ttagaggagctagcccatcaagccg

SEQ ID NO: 1233013 - DNA, 25 bp, Homo sapien
gtattatttcttccgtcctagccag

SEQ ID NO: 1233014 - DNA, 25 bp, Homo sapien
cctttggaaagatcgaggtgctagt

SEQ ID NO: 1233015 - DNA, 25 bp, Homo sapien
tcctggccaggttcagtattatttc

SEQ ID NO: 1233016 - DNA, 25 bp, Homo sapien
taaaccttaacagcaccagtctgga

SEQ ID NO: 1233017 - DNA, 25 bp, Homo sapien
taactaaaagattgaaaagactggc

SEQ ID NO: 1233018 - DNA, 25 bp, Homo sapien
gtacagttacttcaccataggaggt

SEQ ID NO: 1233019 - DNA, 25 bp, Homo sapien
tgcttcacaccattagtcactaggg

SEQ ID NO: 1233020 - DNA, 25 bp, Homo sapien
taggaggtgtacaaatggcaaactc

SEQ ID NO: 1233021 - DNA, 25 bp, Homo sapien
aaatgaaaatactgtcctctcacca

SEQ ID NO: 1233022 - DNA, 25 bp, Homo sapien
ttctgaagaactgggacagccctct

SEQ ID NO: 1233023 - DNA, 25 bp, Homo sapien
gaggtattaatgcttagaaagtaaa

SEQ ID NO: 1233024 - DNA, 25 bp, Homo sapien
tgtcctctcaccattccacctttgg

SEQ ID NO: 1233025 - DNA, 25 bp, Homo sapien
caaacgatgtaccagttccatttgt

SEQ ID NO: 1233026 - DNA, 25 bp, Homo sapien
actggttgctttaggcctgtggtct

SEQ ID NO: 1233027 - DNA, 25 bp, Homo sapien
tatttcaggacttccttgactgttc

SEQ ID NO: 1233028 - DNA, 25 bp, Homo sapien
ttatcttgcttacaccctcattttg

SEQ ID NO: 1233029 - DNA, 25 bp, Homo sapien
catgcccctatatctgccctgaata

SEQ ID NO: 1233030 - DNA, 25 bp, Homo sapien
tgcacccgaccagcatacacttttg

SEQ ID NO: 1233031 - DNA, 25 bp, Homo sapien
tgtggtttctctctagcttatagga

SEQ ID NO: 1233032 - DNA, 25 bp, Homo sapien
aaacgagactcttcactctagtaga

SEQ ID NO: 1233033 - DNA, 25 bp, Homo sapien
acaccattgtactccattctgggca

SEQ ID NO: 1233034 - DNA, 25 bp, Homo sapien
tgaaacttcatctcaaaaaacaaaa

SEQ ID NO: 1233035 - DNA, 25 bp, Homo sapien
aagatcacaccattgtactccattc

SEQ ID NO: 1233036 - DNA, 25 bp, Homo sapien
acaagagtgaaacttcatctcaaaa

SEQ ID NO: 1233037 - DNA, 25 bp, Homo sapien
tgcagcaaaatctatcagtcattct

SEQ ID NO: 1233038 - DNA, 25 bp, Homo sapien
tatgattctgttagtgttatgttac

SEQ ID NO: 1233039 - DNA, 25 bp, Homo sapien
gccagaatattatggctttaatgca

SEQ ID NO: 1233040 - DNA, 25 bp, Homo sapien
tgagtatggattatgattctgttag

SEQ ID NO: 1233041 - DNA, 25 bp, Homo sapien
caatttgaagcttagtgaagcataa

SEQ ID NO: 1233042 - DNA, 25 bp, Homo sapien
cagaaacagttgttattaggagtgc

SEQ ID NO: 1233043 - DNA, 25 bp, Homo sapien
taacctttttgaagcagatagcaac

SEQ ID NO: 1233044 - DNA, 25 bp, Homo sapien
ttcagtacggagtaccagaaacagt

SEQ ID NO: 1233045 - DNA, 25 bp, Homo sapien
ccagcagcatgctggataacgttat

SEQ ID NO: 1233046 - DNA, 25 bp, Homo sapien
gcagcatgctggataacgttataga

SEQ ID NO: 1233047 - DNA, 25 bp, Homo sapien
tgctggataacgttatagactcttc

SEQ ID NO: 1233048 - DNA, 25 bp, Homo sapien
gctggataacgttatagactcttcc

SEQ ID NO: 1233049 - DNA, 25 bp, Homo sapien
taatctttgtatcattccaatttta

SEQ ID NO: 1233050 - DNA, 25 bp, Homo sapien
tatatgtgctgccaaggccagcacc

SEQ ID NO: 1233051 - DNA, 25 bp, Homo sapien
tgtcatccttgcacaggggccatgc

SEQ ID NO: 1233052 - DNA, 25 bp, Homo sapien
atatgggatgcttcacaaatttcca

SEQ ID NO: 1233053 - DNA, 25 bp, Homo sapien
tcagacgtgtaatatgcacggaaca

SEQ ID NO: 1233054 - DNA, 25 bp, Homo sapien
aatatgcacggaacaaggtttgagg

SEQ ID NO: 1233055 - DNA, 25 bp, Homo sapien
tagcacatcttatccttctgcatga

SEQ ID NO: 1233056 - DNA, 25 bp, Homo sapien
gagggtagcacatcttatccttctg

SEQ ID NO: 1233057 - DNA, 25 bp, Homo sapien
tccttccgtcaaacccgctcggatg

SEQ ID NO: 1233058 - DNA, 25 bp, Homo sapien
gctgaggcgtgtggtcctcgaatcc

SEQ ID NO: 1233059 - DNA, 25 bp, Homo sapien
tggtcctcgaatcctggtgtggcat

SEQ ID NO: 1233060 - DNA, 25 bp, Homo sapien
ccacccctgataggcccttgccggg

SEQ ID NO: 1233061 - DNA, 25 bp, Homo sapien
agagagaagacgaacaccaccgcct

SEQ ID NO: 1233062 - DNA, 25 bp, Homo sapien
aagatgagcgcgcaacaatcgagga

SEQ ID NO: 1233063 - DNA, 25 bp, Homo sapien
cgcaacaatcgaggagagagaagac

SEQ ID NO: 1233064 - DNA, 25 bp, Homo sapien
aggagagagaagacgaacaccaccg

SEQ ID NO: 1233065 - DNA, 25 bp, Homo sapien
cgttcgcctgcctcaggcaaggata

SEQ ID NO: 1233066 - DNA, 25 bp, Homo sapien
caaggcgttcgcctgcctcaggcaa

SEQ ID NO: 1233067 - DNA, 25 bp, Homo sapien
aggcgttcgcctgcctcaggcaagg

SEQ ID NO: 1233068 - DNA, 25 bp, Homo sapien
cggcaaggcgttcgcctgcctcagg

SEQ ID NO: 1233069 - DNA, 25 bp, Homo sapien
ctgcccgggtgcccaactggcccac

SEQ ID NO: 1233070 - DNA, 25 bp, Homo sapien
gagaggcccactcggacccgagtga

SEQ ID NO: 1233071 - DNA, 25 bp, Homo sapien
acccaggcagggcaagtgcgtgcag

SEQ ID NO: 1233072 - DNA, 25 bp, Homo sapien
gggacgagcggagagcaggcgggca

SEQ ID NO: 1233073 - DNA, 25 bp, Homo sapien
gcagcagggcccgtcgggtagggca

SEQ ID NO: 1233074 - DNA, 25 bp, Homo sapien
tgggacccccaatatccgacgaaga

SEQ ID NO: 1233075 - DNA, 25 bp, Homo sapien
actgtcgcaagcgaccgcccttggg

SEQ ID NO: 1233076 - DNA, 25 bp, Homo sapien
agcgacgcttctctcccgagggcgg

SEQ ID NO: 1233077 - DNA, 25 bp, Homo sapien
tcccagaaaaacagcgacgcttctc

SEQ ID NO: 1233078 - DNA, 25 bp, Homo sapien
gaaggaagcaacttcgctcctttgg

SEQ ID NO: 1233079 - DNA, 25 bp, Homo sapien
tacaaaacggcacagtgaaggaagc

SEQ ID NO: 1233080 - DNA, 25 bp, Homo sapien
cctttggcgaatgagtcaactcctg

SEQ ID NO: 1233081 - DNA, 25 bp, Homo sapien
tcaactcctggatgtgaaaggtccc

SEQ ID NO: 1233082 - DNA, 25 bp, Homo sapien
tatatcctatattaagtctaccgtg

SEQ ID NO: 1233083 - DNA, 25 bp, Homo sapien
tatccctaagttagtgcaactattc

SEQ ID NO: 1233084 - DNA, 25 bp, Homo sapien
gcataaattggtgtaaaccagggct

SEQ ID NO: 1233085 - DNA, 25 bp, Homo sapien
tctgagcataagctctagttcaggg

SEQ ID NO: 1233086 - DNA, 25 bp, Homo sapien
tctgcaccttcgctcttgccagtgt

SEQ ID NO: 1233087 - DNA, 25 bp, Homo sapien
tattcgttaaccatagcccagaaat

SEQ ID NO: 1233088 - DNA, 25 bp, Homo sapien
tagcccagaaatccacgaacatacc

SEQ ID NO: 1233089 - DNA, 25 bp, Homo sapien
gatttggaatattcacctcttcccc

SEQ ID NO: 1233090 - DNA, 25 bp, Homo sapien
aaatcaaccatgtgctccagatggt

SEQ ID NO: 1233091 - DNA, 25 bp, Homo sapien
gtaatcctgcctttccaacttagcc

SEQ ID NO: 1233092 - DNA, 25 bp, Homo sapien
caacttagccttctactgacgccaa

SEQ ID NO: 1233093 - DNA, 25 bp, Homo sapien
ccttaacattcaagccctccaaaat

SEQ ID NO: 1233094 - DNA, 25 bp, Homo sapien
ctgatgatcaagataaggaattatt

SEQ ID NO: 1233095 - DNA, 25 bp, Homo sapien
tgatgatcaagataaggaattatta

SEQ ID NO: 1233096 - DNA, 25 bp, Homo sapien
ttttgagcaacatgatctagcatta

SEQ ID NO: 1233097 - DNA, 25 bp, Homo sapien
tttgagcaacatgatctagcattaa

SEQ ID NO: 1233098 - DNA, 25 bp, Homo sapien
tgagcaacatgatctagcattaatg

SEQ ID NO: 1233099 - DNA, 25 bp, Homo sapien
ttgagcaacatgatctagcattaat

SEQ ID NO: 1233100 - DNA, 25 bp, Homo sapien
cagcactttgggcagattacgaggt

SEQ ID NO: 1233101 - DNA, 25 bp, Homo sapien
acatggtgaaaccctgtctctatta

SEQ ID NO: 1233102 - DNA, 25 bp, Homo sapien
caggagatcaagaccatcctggcta

SEQ ID NO: 1233103 - DNA, 25 bp, Homo sapien
tgtctctattaaaaatacaaaaaca

SEQ ID NO: 1233104 - DNA, 25 bp, Homo sapien
tacagggaagtctaccagtcaacaa

SEQ ID NO: 1233105 - DNA, 25 bp, Homo sapien
cgaatttgttctcagtacactggca

SEQ ID NO: 1233106 - DNA, 25 bp, Homo sapien
tagataacaattaccctacagggaa

SEQ ID NO: 1233107 - DNA, 25 bp, Homo sapien
aacgatatgcccttccccgaatttg

SEQ ID NO: 1233108 - DNA, 25 bp, Homo sapien
tgcgatccatatcagatccctaaag

SEQ ID NO: 1233109 - DNA, 25 bp, Homo sapien
gttatactaatactctgcgatccat

SEQ ID NO: 1233110 - DNA, 25 bp, Homo sapien
taagccacatgcaaagtaggcactc

SEQ ID NO: 1233111 - DNA, 25 bp, Homo sapien
tacacagacacagacctgaaacatg

SEQ ID NO: 1233112 - DNA, 25 bp, Homo sapien
gcagagcaatatagtgtaagcccag

SEQ ID NO: 1233113 - DNA, 25 bp, Homo sapien
caacagcttttgtggcagggttctc

SEQ ID NO: 1233114 - DNA, 25 bp, Homo sapien
tcggctttacagagctccatgccct

SEQ ID NO: 1233115 - DNA, 25 bp, Homo sapien
agaaactggcatgcctcactttcag

SEQ ID NO: 1233116 - DNA, 25 bp, Homo sapien
tatttttagactcccatgtcccaga

SEQ ID NO: 1233117 - DNA, 25 bp, Homo sapien
gggatgtctgatatccacacacatg

SEQ ID NO: 1233118 - DNA, 25 bp, Homo sapien
tagtatctatgccaaagcccctagc

SEQ ID NO: 1233119 - DNA, 25 bp, Homo sapien
cacacatgttgcctttcaagtcaga

SEQ ID NO: 1233120 - DNA, 25 bp, Homo sapien
tgacaatggtatggccaatcaattc

SEQ ID NO: 1233121 - DNA, 25 bp, Homo sapien
gatgaaccagtgcaatgacatgagc

SEQ ID NO: 1233122 - DNA, 25 bp, Homo sapien
ggccaatcaattctggaattaccca

SEQ ID NO: 1233123 - DNA, 25 bp, Homo sapien
tgacatgagcagtaatacagtgaca

SEQ ID NO: 1233124 - DNA, 25 bp, Homo sapien
cttgacaccaaagtaaacaaactat

SEQ ID NO: 1233125 - DNA, 25 bp, Homo sapien
ataaagatacatgaagaagcagagc

SEQ ID NO: 1233126 - DNA, 25 bp, Homo sapien
ggtttaatcaaatcgtatacacagg

SEQ ID NO: 1233127 - DNA, 25 bp, Homo sapien
tgttcacctctaaaacacacaggaa

SEQ ID NO: 1233128 - DNA, 25 bp, Homo sapien
ctttgatacaaaggttaagcctgac

SEQ ID NO: 1233129 - DNA, 25 bp, Homo sapien
gcctgacttctagcttttcaaaggt

SEQ ID NO: 1233130 - DNA, 25 bp, Homo sapien
aagacaatcattcatacccaaagga

SEQ ID NO: 1233131 - DNA, 25 bp, Homo sapien
gaatgttcctacagagcctggtttg

SEQ ID NO: 1233132 - DNA, 25 bp, Homo sapien
ggtttgtccagacttgcgtccctaa

SEQ ID NO: 1233133 - DNA, 25 bp, Homo sapien
catactgttctatgcctggaacctc

SEQ ID NO: 1233134 - DNA, 25 bp, Homo sapien
tcagtcatttatcaaagctaagatc

SEQ ID NO: 1233135 - DNA, 25 bp, Homo sapien
cagtcatttatcaaagctaagatca

SEQ ID NO: 1233136 - DNA, 25 bp, Homo sapien
tagtgtaggctgacttcaaccacgg

SEQ ID NO: 1233137 - DNA, 25 bp, Homo sapien
tttggtctcccagttcacaacgtgg

SEQ ID NO: 1233138 - DNA, 25 bp, Homo sapien
cgtggcgcaccaaaaggctcaattt

SEQ ID NO: 1233139 - DNA, 25 bp, Homo sapien
gaagtgttgatctggcaccacgtgg

SEQ ID NO: 1233140 - DNA, 25 bp, Homo sapien
tgttgccagggcactacttccagcc

SEQ ID NO: 1233141 - DNA, 25 bp, Homo sapien
gcccaaatgccagtgcttaagatag

SEQ ID NO: 1233142 - DNA, 25 bp, Homo sapien
tgaaacatggtctgtctgcacaggg

SEQ ID NO: 1233143 - DNA, 25 bp, Homo sapien
tctgccaaggctagacctggtcaag

SEQ ID NO: 1233144 - DNA, 25 bp, Homo sapien
caggagtagctagccgtaatcccag

SEQ ID NO: 1233145 - DNA, 25 bp, Homo sapien
tgcagtgtaccacgattgcgccagt

SEQ ID NO: 1233146 - DNA, 25 bp, Homo sapien
aaggagcaatttctgtgaccccaaa

SEQ ID NO: 1233147 - DNA, 25 bp, Homo sapien
catgatttgtagaagtgcccctaaa

SEQ ID NO: 1233148 - DNA, 25 bp, Homo sapien
agcattcagatgttcccagttacaa

SEQ ID NO: 1233149 - DNA, 25 bp, Homo sapien
agttacaacaccctgaacgatctct

SEQ ID NO: 1233150 - DNA, 25 bp, Homo sapien
tacaacaccctgaacgatctctagg

SEQ ID NO: 1233151 - DNA, 25 bp, Homo sapien
tgttcccagttacaacaccctgaac

SEQ ID NO: 1233152 - DNA, 25 bp, Homo sapien
acaacaccctgaacgatctctaggc

SEQ ID NO: 1233153 - DNA, 25 bp, Homo sapien
gcattcagatgttcccagttacaac

SEQ ID NO: 1233154 - DNA, 25 bp, Homo sapien
gttacaacaccctgaacgatctcta

SEQ ID NO: 1233155 - DNA, 25 bp, Homo sapien
agcattcagatgttcccagttacaa

SEQ ID NO: 1233156 - DNA, 25 bp, Homo sapien
cctgggtactgccattatagaggga

SEQ ID NO: 1233157 - DNA, 25 bp, Homo sapien
gcaagggaaaatgatacgtactaag

SEQ ID NO: 1233158 - DNA, 25 bp, Homo sapien
cacataggagcactcgatagtagtc

SEQ ID NO: 1233159 - DNA, 25 bp, Homo sapien
gatagtagtctatggaccgggccct

SEQ ID NO: 1233160 - DNA, 25 bp, Homo sapien
taagtgccatgggagatactactat

SEQ ID NO: 1233161 - DNA, 25 bp, Homo sapien
cagccgaggttacggtgattagcaa

SEQ ID NO: 1233162 - DNA, 25 bp, Homo sapien
tccaggaacatacaatctaagagtg

SEQ ID NO: 1233163 - DNA, 25 bp, Homo sapien
tctgtggcaggcatgaaaaggcagc

SEQ ID NO: 1233164 - DNA, 25 bp, Homo sapien
aatgggaactgatatagatgaaacc

SEQ ID NO: 1233165 - DNA, 25 bp, Homo sapien
gaagccacaggcaaaccactgagtt

SEQ ID NO: 1233166 - DNA, 25 bp, Homo sapien
ccaagattgctccataacggatgta

SEQ ID NO: 1233167 - DNA, 25 bp, Homo sapien
ccataacggatgtagcaaaccaaat

SEQ ID NO: 1233168 - DNA, 25 bp, Homo sapien
gtcaagatttacatggcattgtggt

SEQ ID NO: 1233169 - DNA, 25 bp, Homo sapien
agtgcgcagcacttaaccagtcgtt

SEQ ID NO: 1233170 - DNA, 25 bp, Homo sapien
taactatttgctatggactgattaa

SEQ ID NO: 1233171 - DNA, 25 bp, Homo sapien
gcattgtggtggaactagttaacac

SEQ ID NO: 1233172 - DNA, 25 bp, Homo sapien
tgaaagtctcgtgcacatgtgaagt

SEQ ID NO: 1233173 - DNA, 25 bp, Homo sapien
tagtagctgccctatagttacaaaa

SEQ ID NO: 1233174 - DNA, 25 bp, Homo sapien
tatctacttaatccagatagcctgg

SEQ ID NO: 1233175 - DNA, 25 bp, Homo sapien
tgtccttttgggttgccctccaaca

SEQ ID NO: 1233176 - DNA, 25 bp, Homo sapien
taaaccagtgaactatgtcaaaagc

SEQ ID NO: 1233177 - DNA, 25 bp, Homo sapien
tttgtctggcaggataccattcttg

SEQ ID NO: 1233178 - DNA, 25 bp, Homo sapien
gattctagccttgcccgttgcgcag

SEQ ID NO: 1233179 - DNA, 25 bp, Homo sapien
gcagcttggttcatggattctagcc

SEQ ID NO: 1233180 - DNA, 25 bp, Homo sapien
ggttatcggagtagcatgtatggtt

SEQ ID NO: 1233181 - DNA, 25 bp, Homo sapien
gaagagcacacgagtcaaaaagttt

SEQ ID NO: 1233182 - DNA, 25 bp, Homo sapien
tatctttgtggtacagactgtagaa

SEQ ID NO: 1233183 - DNA, 25 bp, Homo sapien
tactggcgggtaaggatatgcaatc

SEQ ID NO: 1233184 - DNA, 25 bp, Homo sapien
caaaaattattgagcagcagatact

SEQ ID NO: 1233185 - DNA, 25 bp, Homo sapien
ttcaaaaattattgagcagcagata

SEQ ID NO: 1233186 - DNA, 25 bp, Homo sapien
tcaaaaattattgagcagcagatac

SEQ ID NO: 1233187 - DNA, 25 bp, Homo sapien
tcagtatttcttcagcggtcaccag

SEQ ID NO: 1233188 - DNA, 25 bp, Homo sapien
taaaagtgtcagtattccagacagg

SEQ ID NO: 1233189 - DNA, 25 bp, Homo sapien
gcttattctgaccacgtagcagtgt

SEQ ID NO: 1233190 - DNA, 25 bp, Homo sapien
tatgatgctctacctgaacttggac

SEQ ID NO: 1233191 - DNA, 25 bp, Homo sapien
gctgtattatagtgagtcctctggg

SEQ ID NO: 1233192 - DNA, 25 bp, Homo sapien
cctctgggactgtttggttcttttg

SEQ ID NO: 1233193 - DNA, 25 bp, Homo sapien
tgaaacagagagacttttagagact

SEQ ID NO: 1233194 - DNA, 25 bp, Homo sapien
taataggtgttacatgtaaagggct

SEQ ID NO: 1233195 - DNA, 25 bp, Homo sapien
taattgcctgcatttgagagtgaag

SEQ ID NO: 1233196 - DNA, 25 bp, Homo sapien
tgagagtcttactgcgcatcacaca

SEQ ID NO: 1233197 - DNA, 25 bp, Homo sapien
gaaggaaacaccaaatttcaggctg

SEQ ID NO: 1233198 - DNA, 25 bp, Homo sapien
tggacccattcttgtagatctcagg

SEQ ID NO: 1233199 - DNA, 25 bp, Homo sapien
ggccaagaggcgatttttagagcag

SEQ ID NO: 1233200 - DNA, 25 bp, Homo sapien
tcctaagaatcacaaagccgtgcag

SEQ ID NO: 1233201 - DNA, 25 bp, Homo sapien
gaaatgacagtgacgatcctaagaa

SEQ ID NO: 1233202 - DNA, 25 bp, Homo sapien
gaacttaacctattgcaacatttgc

SEQ ID NO: 1233203 - DNA, 25 bp, Homo sapien
gggaagaatcaacacaccagggagc

SEQ ID NO: 1233204 - DNA, 25 bp, Homo sapien
tgaggagggcagtataggcatttcc

SEQ ID NO: 1233205 - DNA, 25 bp, Homo sapien
catttcctgtgacgcgagcgcctgg

SEQ ID NO: 1233206 - DNA, 25 bp, Homo sapien
gcctggactccattaggcagcagct

SEQ ID NO: 1233207 - DNA, 25 bp, Homo sapien
tgatggagaaggtgcagtccctccg

SEQ ID NO: 1233208 - DNA, 25 bp, Homo sapien
ggagggcggctacgaacttactgct

SEQ ID NO: 1233209 - DNA, 25 bp, Homo sapien
ttactgctcgtcgagccagccgagc

SEQ ID NO: 1233210 - DNA, 25 bp, Homo sapien
atgccacactggtggactcacgcac

SEQ ID NO: 1233211 - DNA, 25 bp, Homo sapien
cattatctcacagctcccgggatgg

SEQ ID NO: 1233212 - DNA, 25 bp, Homo sapien
caactgtgtggcacttggctgtgga

SEQ ID NO: 1233213 - DNA, 25 bp, Homo sapien
cctggaagttcctgcctgtcgaagc

SEQ ID NO: 1233214 - DNA, 25 bp, Homo sapien
atggccccgggtacagcaactgtgt

SEQ ID NO: 1233215 - DNA, 25 bp, Homo sapien
cagtgacagagctctatgaacctca

SEQ ID NO: 1233216 - DNA, 25 bp, Homo sapien
ttcctgtctgaggatccataaacct

SEQ ID NO: 1233217 - DNA, 25 bp, Homo sapien
caaatccctgtaagatcctgcattg

SEQ ID NO: 1233218 - DNA, 25 bp, Homo sapien
taaacactgtatgtgagtcaccttg

SEQ ID NO: 1233219 - DNA, 25 bp, Homo sapien
catctgcacatagacctgaaacttg

SEQ ID NO: 1233220 - DNA, 25 bp, Homo sapien
ttcagaattctaacacgagcagtgt

SEQ ID NO: 1233221 - DNA, 25 bp, Homo sapien
aagacctaaagacccagagttcaga

SEQ ID NO: 1233222 - DNA, 25 bp, Homo sapien
gaaagcaacctgtggtgagcaagac

SEQ ID NO: 1233223 - DNA, 25 bp, Homo sapien
tctctactagttacaaagacttgtg

SEQ ID NO: 1233224 - DNA, 25 bp, Homo sapien
tatctggacagaacaactacagtct

SEQ ID NO: 1233225 - DNA, 25 bp, Homo sapien
taagtgccaagttgatataccacac

SEQ ID NO: 1233226 - DNA, 25 bp, Homo sapien
gccgtgggcagtactagtgatttgt

SEQ ID NO: 1233227 - DNA, 25 bp, Homo sapien
taaaactgccagatgactatgccct

SEQ ID NO: 1233228 - DNA, 25 bp, Homo sapien
caagcgctggagagacatgcataga

SEQ ID NO: 1233229 - DNA, 25 bp, Homo sapien
tcactgctggctgtaaaggcgcctg

SEQ ID NO: 1233230 - DNA, 25 bp, Homo sapien
taatacggcccatactgcaaaagtg

SEQ ID NO: 1233231 - DNA, 25 bp, Homo sapien
gaagccatgcagaccagtacctgga

SEQ ID NO: 1233232 - DNA, 25 bp, Homo sapien
tatttgttgagggagtctctgaacc

SEQ ID NO: 1233233 - DNA, 25 bp, Homo sapien
gacttgagggagactgggcctccaa

SEQ ID NO: 1233234 - DNA, 25 bp, Homo sapien
ggtattggccagttcttaagaagcc

SEQ ID NO: 1233235 - DNA, 25 bp, Homo sapien
cagctatgatctcccttcggttcta

SEQ ID NO: 1233236 - DNA, 25 bp, Homo sapien
ccttcggttctatctcccttagagg

SEQ ID NO: 1233237 - DNA, 25 bp, Homo sapien
tctatctcccttagaggcattttct

SEQ ID NO: 1233238 - DNA, 25 bp, Homo sapien
accagctatgatctcccttcggttc

SEQ ID NO: 1233239 - DNA, 25 bp, Homo sapien
gcgatgagctttgtagttgccacat

SEQ ID NO: 1233240 - DNA, 25 bp, Homo sapien
atgagctttgtagttgccacatcat

SEQ ID NO: 1233241 - DNA, 25 bp, Homo sapien
ctgcgatgagctttgtagttgccac

SEQ ID NO: 1233242 - DNA, 25 bp, Homo sapien
gatgagctttgtagttgccacatca

SEQ ID NO: 1233243 - DNA, 25 bp, Homo sapien
gcttaaaagaagtcatcgggtcacc

SEQ ID NO: 1233244 - DNA, 25 bp, Homo sapien
gcgtggcgactctggtaatttgaaa

SEQ ID NO: 1233245 - DNA, 25 bp, Homo sapien
taacctgtatagaagcagaagccac

SEQ ID NO: 1233246 - DNA, 25 bp, Homo sapien
tgctaccccactttacgaaccagaa

SEQ ID NO: 1233247 - DNA, 25 bp, Homo sapien
caagcctcctagctttgcaaaagaa

SEQ ID NO: 1233248 - DNA, 25 bp, Homo sapien
aaatattagttgatagagtggaagg

SEQ ID NO: 1233249 - DNA, 25 bp, Homo sapien
aaagaaatattagttgatagagtgg

SEQ ID NO: 1233250 - DNA, 25 bp, Homo sapien
atagagtggaaggacagctagaagc

SEQ ID NO: 1233251 - DNA, 25 bp, Homo sapien
tccggtctcttcaccagtaccagag

SEQ ID NO: 1233252 - DNA, 25 bp, Homo sapien
accagtaccagaggccgattctctt

SEQ ID NO: 1233253 - DNA, 25 bp, Homo sapien
aaaatctccggtctcttcaccagta

SEQ ID NO: 1233254 - DNA, 25 bp, Homo sapien
tcttcaccagtaccagaggccgatt

SEQ ID NO: 1233255 - DNA, 25 bp, Homo sapien
cgacacaggtttggcaactgagatt

SEQ ID NO: 1233256 - DNA, 25 bp, Homo sapien
ccatgactgatatagtaactgttgc

SEQ ID NO: 1233257 - DNA, 25 bp, Homo sapien
tttaatgtggccgacacaggtttgg

SEQ ID NO: 1233258 - DNA, 25 bp, Homo sapien
tgtggccgacacaggtttggcaact

SEQ ID NO: 1233259 - DNA, 25 bp, Homo sapien
gcacgagaatggcacaagtggctgc

SEQ ID NO: 1233260 - DNA, 25 bp, Homo sapien
ttggatcactgatacctgcactggc

SEQ ID NO: 1233261 - DNA, 25 bp, Homo sapien
gctgcagagtgagctaatgtcttcc

SEQ ID NO: 1233262 - DNA, 25 bp, Homo sapien
gaagcagttacgacaaggccttgtg

SEQ ID NO: 1233263 - DNA, 25 bp, Homo sapien
cagaggacgtccctggatgcaaaat

SEQ ID NO: 1233264 - DNA, 25 bp, Homo sapien
aactttggtaagtgggcagcctgcc

SEQ ID NO: 1233265 - DNA, 25 bp, Homo sapien
tcagagtgaatccagccgtacgtca

SEQ ID NO: 1233266 - DNA, 25 bp, Homo sapien
tacgggacctttctcggctttggca

SEQ ID NO: 1233267 - DNA, 25 bp, Homo sapien
gccttgtgcgatcggctcctggcag

SEQ ID NO: 1233268 - DNA, 25 bp, Homo sapien
gccttgccaagccttgtgcgatcgg

SEQ ID NO: 1233269 - DNA, 25 bp, Homo sapien
aagggtggttgctgtcatcagacca

SEQ ID NO: 1233270 - DNA, 25 bp, Homo sapien
cgcaggccacaatcccagcccttct

SEQ ID NO: 1233271 - DNA, 25 bp, Homo sapien
agtgagttcagtatgttatcattag

SEQ ID NO: 1233272 - DNA, 25 bp, Homo sapien
ggaaggttggaatcagacagtaaca

SEQ ID NO: 1233273 - DNA, 25 bp, Homo sapien
tgagttcagtatgttatcattaggg

SEQ ID NO: 1233274 - DNA, 25 bp, Homo sapien
ctgttcaacagtggaaggttggaat

SEQ ID NO: 1233275 - DNA, 25 bp, Homo sapien
tacttgggatatcgctgagggtcac

SEQ ID NO: 1233276 - DNA, 25 bp, Homo sapien
tctaacagaagaaatgcctcgccca

SEQ ID NO: 1233277 - DNA, 25 bp, Homo sapien
tctttactgagaggtatttgcccct

SEQ ID NO: 1233278 - DNA, 25 bp, Homo sapien
gcctcgcccaagatagaagttgtta

SEQ ID NO: 1233279 - DNA, 25 bp, Homo sapien
aatgcaaacgaatctgcagggacag

SEQ ID NO: 1233280 - DNA, 25 bp, Homo sapien
tttgtgggtgatggatatgatcccc

SEQ ID NO: 1233281 - DNA, 25 bp, Homo sapien
aatagccaaatattggaagtgatcc

SEQ ID NO: 1233282 - DNA, 25 bp, Homo sapien
acagacaaaagaagagcacgtactc

SEQ ID NO: 1233283 - DNA, 25 bp, Homo sapien
gggattctgaataaccaagaaaagc

SEQ ID NO: 1233284 - DNA, 25 bp, Homo sapien
ctgaataaccaagaaaagctaccat

SEQ ID NO: 1233285 - DNA, 25 bp, Homo sapien
ctgtaagggattctgaataaccaag

SEQ ID NO: 1233286 - DNA, 25 bp, Homo sapien
ttctgaataaccaagaaaagctacc

SEQ ID NO: 1233287 - DNA, 25 bp, Homo sapien
tccagggaaatcgttgactcaatcc

SEQ ID NO: 1233288 - DNA, 25 bp, Homo sapien
aatcgttgactcaatccttataaat

SEQ ID NO: 1233289 - DNA, 25 bp, Homo sapien
tctccagggaaatcgttgactcaat

SEQ ID NO: 1233290 - DNA, 25 bp, Homo sapien
gaaatcgttgactcaatccttataa

SEQ ID NO: 1233291 - DNA, 25 bp, Homo sapien
tggcttttaaggctaaaagactgaa

SEQ ID NO: 1233292 - DNA, 25 bp, Homo sapien
gcagcaaatttacatacccgattgg

SEQ ID NO: 1233293 - DNA, 25 bp, Homo sapien
tcatcagatcaataccttcaagtgt

SEQ ID NO: 1233294 - DNA, 25 bp, Homo sapien
acatatttaaaaatcgaccctggtg

SEQ ID NO: 1233295 - DNA, 25 bp, Homo sapien
tagaccctcctcgagtggatggtgg

SEQ ID NO: 1233296 - DNA, 25 bp, Homo sapien
caacactagttaggtgggccagagc

SEQ ID NO: 1233297 - DNA, 25 bp, Homo sapien
tggagttgacatctgcccacgggac

SEQ ID NO: 1233298 - DNA, 25 bp, Homo sapien
cagaaagtgctcagacatggaagtt

SEQ ID NO: 1233299 - DNA, 25 bp, Homo sapien
acgccagggcagtgaaggttccttg

SEQ ID NO: 1233300 - DNA, 25 bp, Homo sapien
tgaagcagcgcatggtaacctggct

SEQ ID NO: 1233301 - DNA, 25 bp, Homo sapien
ctggctgcccgtgttctgatgcatt

SEQ ID NO: 1233302 - DNA, 25 bp, Homo sapien
taattccaatagctttcactgccag

SEQ ID NO: 1233303 - DNA, 25 bp, Homo sapien
tccctccagttgctcatgaagcctc

SEQ ID NO: 1233304 - DNA, 25 bp, Homo sapien
tgggctttcggctccaaaggctgcc

SEQ ID NO: 1233305 - DNA, 25 bp, Homo sapien
ttagcgataaagaaataggccagcc

SEQ ID NO: 1233306 - DNA, 25 bp, Homo sapien
gtccacatggagtctctatcacgag

SEQ ID NO: 1233307 - DNA, 25 bp, Homo sapien
gaccagctacgttcacagagatcat

SEQ ID NO: 1233308 - DNA, 25 bp, Homo sapien
tccgatcccatcaccttagcctgtg

SEQ ID NO: 1233309 - DNA, 25 bp, Homo sapien
ttagcctgtgttctaccccctgtca

SEQ ID NO: 1233310 - DNA, 25 bp, Homo sapien
cctgtcaactcacaggctttcaaca

SEQ ID NO: 1233311 - DNA, 25 bp, Homo sapien
ctccaaagctccgatcccatcacct

SEQ ID NO: 1233312 - DNA, 25 bp, Homo sapien
tgtttcagagtgagagtccaggctg

SEQ ID NO: 1233313 - DNA, 25 bp, Homo sapien
gcagacagcagcgacagccctcctc

SEQ ID NO: 1233314 - DNA, 25 bp, Homo sapien
gctgtttcagagtgagagtccaggc

SEQ ID NO: 1233315 - DNA, 25 bp, Homo sapien
acagcagcgacagccctcctcctgc

SEQ ID NO: 1233316 - DNA, 25 bp, Homo sapien
cacgggaagcagactaagaaaagga

SEQ ID NO: 1233317 - DNA, 25 bp, Homo sapien
tctatggttcgtgcatcgagggctg

SEQ ID NO: 1233318 - DNA, 25 bp, Homo sapien
gccctttttctaggtggacagctgg

SEQ ID NO: 1233319 - DNA, 25 bp, Homo sapien
gagacactgacactgtcgcctgcag

SEQ ID NO: 1233320 - DNA, 25 bp, Homo sapien
tgtcctcagccaaatggttccccgt

SEQ ID NO: 1233321 - DNA, 25 bp, Homo sapien
tacgtgcatctgaactgaggctggg

SEQ ID NO: 1233322 - DNA, 25 bp, Homo sapien
atggttccccgtgtcctccaggtgc

SEQ ID NO: 1233323 - DNA, 25 bp, Homo sapien
cacagcttttgcaacagcccttacg

SEQ ID NO: 1233324 - DNA, 25 bp, Homo sapien
caatgcataatgcatgactgttaag

SEQ ID NO: 1233325 - DNA, 25 bp, Homo sapien
atgactgttaagaagacagatccca

SEQ ID NO: 1233326 - DNA, 25 bp, Homo sapien
tgttaagaagacagatcccatgaag

SEQ ID NO: 1233327 - DNA, 25 bp, Homo sapien
gaagacagatcccatgaagtagctc

SEQ ID NO: 1233328 - DNA, 25 bp, Homo sapien
cctctcccggcagaaacgtgcgggt

SEQ ID NO: 1233329 - DNA, 25 bp, Homo sapien
cctctcaatggtcgtgtgagtgcgc

SEQ ID NO: 1233330 - DNA, 25 bp, Homo sapien
gagtgcgcagtcttgcaaaaacgca

SEQ ID NO: 1233331 - DNA, 25 bp, Homo sapien
tttctgacaaagacggacacccaac

SEQ ID NO: 1233332 - DNA, 25 bp, Homo sapien
tagacaagcctgggtaagtggaact

SEQ ID NO: 1233333 - DNA, 25 bp, Homo sapien
ctgttatagacaagcctgggtaagt

SEQ ID NO: 1233334 - DNA, 25 bp, Homo sapien
ttatagacaagcctgggtaagtgga

SEQ ID NO: 1233335 - DNA, 25 bp, Homo sapien
tgttatagacaagcctgggtaagtg

SEQ ID NO: 1233336 - DNA, 25 bp, Homo sapien
tgacactggcgattctacttctcgg

SEQ ID NO: 1233337 - DNA, 25 bp, Homo sapien
tacttctcggctcttgttcagcatg

SEQ ID NO: 1233338 - DNA, 25 bp, Homo sapien
tggacggcttgacactggcgattct

SEQ ID NO: 1233339 - DNA, 25 bp, Homo sapien
tgggcatcccacaacgtggacggct

SEQ ID NO: 1233340 - DNA, 25 bp, Homo sapien
gggtcataaaacacaatccagaggg

SEQ ID NO: 1233341 - DNA, 25 bp, Homo sapien
tattcactctaagcaacgaccttcg

SEQ ID NO: 1233342 - DNA, 25 bp, Homo sapien
gctaagctttattaatattcactct

SEQ ID NO: 1233343 - DNA, 25 bp, Homo sapien
ctctacatttgtgggtcataaaaca

SEQ ID NO: 1233344 - DNA, 25 bp, Homo sapien
ttagcactgcgtagagacagatttt

SEQ ID NO: 1233345 - DNA, 25 bp, Homo sapien
cagagggtaagaaaacgtgctgcaa

SEQ ID NO: 1233346 - DNA, 25 bp, Homo sapien
cccatctgttcagcgctgttctgtc

SEQ ID NO: 1233347 - DNA, 25 bp, Homo sapien
cgtgctgcaaagtttacaatctgcc

SEQ ID NO: 1233348 - DNA, 25 bp, Homo sapien
gaggtttatacagacagcccacttg

SEQ ID NO: 1233349 - DNA, 25 bp, Homo sapien
tccaagcctattcccagttcctgcc

SEQ ID NO: 1233350 - DNA, 25 bp, Homo sapien
gctctctgatcaataagatggacag

SEQ ID NO: 1233351 - DNA, 25 bp, Homo sapien
tgggtgaatttataacgctctctga

SEQ ID NO: 1233352 - DNA, 25 bp, Homo sapien
gcttggcaatatgtccaatttcagg

SEQ ID NO: 1233353 - DNA, 25 bp, Homo sapien
aatcataaccagtctaaaccaagga

SEQ ID NO: 1233354 - DNA, 25 bp, Homo sapien
ctggctgatggaatctcaatttcgc

SEQ ID NO: 1233355 - DNA, 25 bp, Homo sapien
cagtctaaaccaaggacaacatgca

SEQ ID NO: 1233356 - DNA, 25 bp, Homo sapien
tgaaattaaacctcactgaccgggc

SEQ ID NO: 1233357 - DNA, 25 bp, Homo sapien
tgtcacagctgcataccggtctcaa

SEQ ID NO: 1233358 - DNA, 25 bp, Homo sapien
cattcaggtaggtaggcaggtaaaa

SEQ ID NO: 1233359 - DNA, 25 bp, Homo sapien
gaccgggctcagatcatgtgctcac

SEQ ID NO: 1233360 - DNA, 25 bp, Homo sapien
cctagaatgtgtagtgggatctcct

SEQ ID NO: 1233361 - DNA, 25 bp, Homo sapien
caacttttgataaccccgaggatgg

SEQ ID NO: 1233362 - DNA, 25 bp, Homo sapien
gataggagcactttaccagttagac

SEQ ID NO: 1233363 - DNA, 25 bp, Homo sapien
gaggatgagggttccaacagttcca

SEQ ID NO: 1233364 - DNA, 25 bp, Homo sapien
agccgatctgacaaccctggttctg

SEQ ID NO: 1233365 - DNA, 25 bp, Homo sapien
tagcaggggactgaggtccttgacc

SEQ ID NO: 1233366 - DNA, 25 bp, Homo sapien
gtcccctttgccagtcgtcctccat

SEQ ID NO: 1233367 - DNA, 25 bp, Homo sapien
gaggtccttgaccagccgatctgac

SEQ ID NO: 1233368 - DNA, 25 bp, Homo sapien
tgtaactgtagttaagtgaatctgc

SEQ ID NO: 1233369 - DNA, 25 bp, Homo sapien
tagttaagtgaatctgctgtgctcc

SEQ ID NO: 1233370 - DNA, 25 bp, Homo sapien
ctgtagttaagtgaatctgctgtgc

SEQ ID NO: 1233371 - DNA, 25 bp, Homo sapien
ttaagtgaatctgctgtgctcccat

SEQ ID NO: 1233372 - DNA, 25 bp, Homo sapien
gctttcccatttccggtgggagcag

SEQ ID NO: 1233373 - DNA, 25 bp, Homo sapien
ccccaaatggtacacagtccatgaa

SEQ ID NO: 1233374 - DNA, 25 bp, Homo sapien
tgaaacagtgatgccagcagtctgc

SEQ ID NO: 1233375 - DNA, 25 bp, Homo sapien
gccgactcgccctcacagtgtccat

SEQ ID NO: 1233376 - DNA, 25 bp, Homo sapien
cacagattgtatcaaagtagaaact

SEQ ID NO: 1233377 - DNA, 25 bp, Homo sapien
ctgataaatatcctgcaggagctgg

SEQ ID NO: 1233378 - DNA, 25 bp, Homo sapien
gtgccaatggatcactggataccag

SEQ ID NO: 1233379 - DNA, 25 bp, Homo sapien
ttaactgccaggctgacacagattg

SEQ ID NO: 1233380 - DNA, 25 bp, Homo sapien
cacagcatgatgtaagggcagcaaa

SEQ ID NO: 1233381 - DNA, 25 bp, Homo sapien
ggatcttcgggtccatgttggccaa

SEQ ID NO: 1233382 - DNA, 25 bp, Homo sapien
caggtgctcagcaatgccagtacat

SEQ ID NO: 1233383 - DNA, 25 bp, Homo sapien
caagcgctcagcaataccaagctgg

SEQ ID NO: 1233384 - DNA, 25 bp, Homo sapien
gctaggaatataagggcgcgccact

SEQ ID NO: 1233385 - DNA, 25 bp, Homo sapien
ccaactctatgactttgccagagca

SEQ ID NO: 1233386 - DNA, 25 bp, Homo sapien
cataaatttctcctgaatagactca

SEQ ID NO: 1233387 - DNA, 25 bp, Homo sapien
tcctatgctggtgtctctgatactt

SEQ ID NO: 1233388 - DNA, 25 bp, Homo sapien
accaacctccgggacttgttcattg

SEQ ID NO: 1233389 - DNA, 25 bp, Homo sapien
ggacttgttcattgtggatcagccc

SEQ ID NO: 1233390 - DNA, 25 bp, Homo sapien
gattggcaagaggtacttaggaaaa

SEQ ID NO: 1233391 - DNA, 25 bp, Homo sapien
tgttcattgtggatcagcccctgta

SEQ ID NO: 1233392 - DNA, 25 bp, Homo sapien
tgtcccgcagttgtgaagatcagct

SEQ ID NO: 1233393 - DNA, 25 bp, Homo sapien
ccttgcgggcaaattgtgatggaga

SEQ ID NO: 1233394 - DNA, 25 bp, Homo sapien
gacaaatggttgcagtctttccagt

SEQ ID NO: 1233395 - DNA, 25 bp, Homo sapien
gatgcgaccatcctttgctcatgcg

SEQ ID NO: 1233396 - DNA, 25 bp, Homo sapien
tccatgtaagttggcccgtaggata

SEQ ID NO: 1233397 - DNA, 25 bp, Homo sapien
caaaatgaaacgagagtgcagctgc

SEQ ID NO: 1233398 - DNA, 25 bp, Homo sapien
tggcccgtaggatacttccccagga

SEQ ID NO: 1233399 - DNA, 25 bp, Homo sapien
cagggccatgagacaaaaccacagg

SEQ ID NO: 1233400 - DNA, 25 bp, Homo sapien
catgtcaaatggccccatcatcatc

SEQ ID NO: 1233401 - DNA, 25 bp, Homo sapien
atgtcaaatggccccatcatcatct

SEQ ID NO: 1233402 - DNA, 25 bp, Homo sapien
gtcaaatggccccatcatcatctct

SEQ ID NO: 1233403 - DNA, 25 bp, Homo sapien
tgtcaaatggccccatcatcatctc

SEQ ID NO: 1233404 - DNA, 25 bp, Homo sapien
ttgagaatgggtccttcaccaaggc

SEQ ID NO: 1233405 - DNA, 25 bp, Homo sapien
tgctccttgtagtccaggagctcct

SEQ ID NO: 1233406 - DNA, 25 bp, Homo sapien
gctccttgtagtccaggagctcctc

SEQ ID NO: 1233407 - DNA, 25 bp, Homo sapien
tgagaatgggtccttcaccaaggct

SEQ ID NO: 1233408 - DNA, 25 bp, Homo sapien
tttagtaataaaggctctggcactg

SEQ ID NO: 1233409 - DNA, 25 bp, Homo sapien
ttttagtaataaaggctctggcact

SEQ ID NO: 1233410 - DNA, 25 bp, Homo sapien
cttttagtaataaaggctctggcac

SEQ ID NO: 1233411 - DNA, 25 bp, Homo sapien
gcagtacccaacattaatggccacc

SEQ ID NO: 1233412 - DNA, 25 bp, Homo sapien
gtacccaacattaatggccaccttc

SEQ ID NO: 1233413 - DNA, 25 bp, Homo sapien
cagtacccaacattaatggccacct

SEQ ID NO: 1233414 - DNA, 25 bp, Homo sapien
agtacccaacattaatggccacctt

SEQ ID NO: 1233415 - DNA, 25 bp, Homo sapien
ctggttggccagcgaataaggtaga

SEQ ID NO: 1233416 - DNA, 25 bp, Homo sapien
caggtcaatgagcatcttctggcag

SEQ ID NO: 1233417 - DNA, 25 bp, Homo sapien
ggttggccagcgaataaggtagagg

SEQ ID NO: 1233418 - DNA, 25 bp, Homo sapien
tggttggccagcgaataaggtagag

SEQ ID NO: 1233419 - DNA, 25 bp, Homo sapien
gaatgttactgttactgggaaccac

SEQ ID NO: 1233420 - DNA, 25 bp, Homo sapien
ggaaccacattaccattacctggct

SEQ ID NO: 1233421 - DNA, 25 bp, Homo sapien
agaatgttactgttactgggaacca

SEQ ID NO: 1233422 - DNA, 25 bp, Homo sapien
accattacctggctcatccaatggg

SEQ ID NO: 1233423 - DNA, 25 bp, Homo sapien
ggagatggttgaagttggagatgcc

SEQ ID NO: 1233424 - DNA, 25 bp, Homo sapien
ctggagatggttgaagttggagatg

SEQ ID NO: 1233425 - DNA, 25 bp, Homo sapien
agatggttgaagttggagatgccaa

SEQ ID NO: 1233426 - DNA, 25 bp, Homo sapien
agttggagatgccaatagctttcac

SEQ ID NO: 1233427 - DNA, 25 bp, Homo sapien
agtcaggtttgtttaagatcctctc

SEQ ID NO: 1233428 - DNA, 25 bp, Homo sapien
taagtcaggtttgtttaagatcctc

SEQ ID NO: 1233429 - DNA, 25 bp, Homo sapien
caggtttgtttaagatcctctcaac

SEQ ID NO: 1233430 - DNA, 25 bp, Homo sapien
tcaggtttgtttaagatcctctcaa

SEQ ID NO: 1233431 - DNA, 25 bp, Homo sapien
tgagtgaggtacgggtggcactcaa

SEQ ID NO: 1233432 - DNA, 25 bp, Homo sapien
gagtgaggtacgggtggcactcaat

SEQ ID NO: 1233433 - DNA, 25 bp, Homo sapien
ctgagtgaggtacgggtggcactca

SEQ ID NO: 1233434 - DNA, 25 bp, Homo sapien
ctgaaggagctgtaggcagtcacca

SEQ ID NO: 1233435 - DNA, 25 bp, Homo sapien
agctgaaggagctgtaggcagtcac

SEQ ID NO: 1233436 - DNA, 25 bp, Homo sapien
gagctgtaggcagtcaccatgatgc

SEQ ID NO: 1233437 - DNA, 25 bp, Homo sapien
gaaggagctgtaggcagtcaccatg

SEQ ID NO: 1233438 - DNA, 25 bp, Homo sapien
tgtgtttggctgtgatcgccttgat

SEQ ID NO: 1233439 - DNA, 25 bp, Homo sapien
ttttattgtgtttggctgtgatcgc

SEQ ID NO: 1233440 - DNA, 25 bp, Homo sapien
catggggaaccagatcagaacctgg

SEQ ID NO: 1233441 - DNA, 25 bp, Homo sapien
tttggctgtgatcgccttgatcctg

SEQ ID NO: 1233442 - DNA, 25 bp, Homo sapien
gttctgttgtaactgaataaggtgg

SEQ ID NO: 1233443 - DNA, 25 bp, Homo sapien
tctgttgtaactgaataaggtggtc

SEQ ID NO: 1233444 - DNA, 25 bp, Homo sapien
accctccagttctgttgtaactgaa

SEQ ID NO: 1233445 - DNA, 25 bp, Homo sapien
cctccagttctgttgtaactgaata

SEQ ID NO: 1233446 - DNA, 25 bp, Homo sapien
tgagacagaaaacacggtataggtc

SEQ ID NO: 1233447 - DNA, 25 bp, Homo sapien
aaatgagacagaaaacacggtatag

SEQ ID NO: 1233448 - DNA, 25 bp, Homo sapien
agacagaaaacacggtataggtcac

SEQ ID NO: 1233449 - DNA, 25 bp, Homo sapien
cagaaaacacggtataggtcacttg

SEQ ID NO: 1233450 - DNA, 25 bp, Homo sapien
caagtggacccagaataacttcttt

SEQ ID NO: 1233451 - DNA, 25 bp, Homo sapien
agagcacagactcaagtggacccag

SEQ ID NO: 1233452 - DNA, 25 bp, Homo sapien
actatgaaagaggaggaaatatcta

SEQ ID NO: 1233453 - DNA, 25 bp, Homo sapien
agaggaggaaatatctaagagcaca

SEQ ID NO: 1233454 - DNA, 25 bp, Homo sapien
tctctccatcctgtgaaatcttaca

SEQ ID NO: 1233455 - DNA, 25 bp, Homo sapien
aaatcttacagcactttgcatgtgc

SEQ ID NO: 1233456 - DNA, 25 bp, Homo sapien
tctgtccactgccacagatgttctc

SEQ ID NO: 1233457 - DNA, 25 bp, Homo sapien
tgtccactgccacagatgttctctc

SEQ ID NO: 1233458 - DNA, 25 bp, Homo sapien
tcaagtcctgcctccagaaagcctt

SEQ ID NO: 1233459 - DNA, 25 bp, Homo sapien
ctccagaaagccttctgtggtcact

SEQ ID NO: 1233460 - DNA, 25 bp, Homo sapien
cagaaagccttctgtggtcactcac

SEQ ID NO: 1233461 - DNA, 25 bp, Homo sapien
ctcaagtcctgcctccagaaagcct

SEQ ID NO: 1233462 - DNA, 25 bp, Homo sapien
agcagatgtagctgtgtcgttccca

SEQ ID NO: 1233463 - DNA, 25 bp, Homo sapien
catagtcaactaggccacaaactgg

SEQ ID NO: 1233464 - DNA, 25 bp, Homo sapien
catagacttaatgctgggccaaccc

SEQ ID NO: 1233465 - DNA, 25 bp, Homo sapien
taaagatgtcccttggtcctatcct

SEQ ID NO: 1233466 - DNA, 25 bp, Homo sapien
acatgacccaaagctccagcactgt

SEQ ID NO: 1233467 - DNA, 25 bp, Homo sapien
cacaggcagaacacgtgggtatagg

SEQ ID NO: 1233468 - DNA, 25 bp, Homo sapien
cactttctagggctgttgcaacaaa

SEQ ID NO: 1233469 - DNA, 25 bp, Homo sapien
tcaactcttccaatgtctagcagct

SEQ ID NO: 1233470 - DNA, 25 bp, Homo sapien
tgatgttctgggatgttgtgttgac

SEQ ID NO: 1233471 - DNA, 25 bp, Homo sapien
ttcagcgcacctgcattctcactca

SEQ ID NO: 1233472 - DNA, 25 bp, Homo sapien
tctgggatgttgtgttgaccccaaa

SEQ ID NO: 1233473 - DNA, 25 bp, Homo sapien
atgttgtgttgaccccaaaagctgc

SEQ ID NO: 1233474 - DNA, 25 bp, Homo sapien
tgtcccctggcttctactgggttgc

SEQ ID NO: 1233475 - DNA, 25 bp, Homo sapien
ctggcttctactgggttgcttctgg

SEQ ID NO: 1233476 - DNA, 25 bp, Homo sapien
gacaccgatgtcctactgcagggtc

SEQ ID NO: 1233477 - DNA, 25 bp, Homo sapien
ggtctcatctggacaccgatgtcct

SEQ ID NO: 1233478 - DNA, 25 bp, Homo sapien
tactatccaggcagaggtcagacaa

SEQ ID NO: 1233479 - DNA, 25 bp, Homo sapien
taagtaagtgttgcctagtgctgcc

SEQ ID NO: 1233480 - DNA, 25 bp, Homo sapien
gaaagtttcaactcgcgcattgcag

SEQ ID NO: 1233481 - DNA, 25 bp, Homo sapien
tactcaggacatgttggcagacacc

SEQ ID NO: 1233482 - DNA, 25 bp, Homo sapien
gaaatggaggtctcataatccacag

SEQ ID NO: 1233483 - DNA, 25 bp, Homo sapien
ctgagcagggaaacctagcgaggcc

SEQ ID NO: 1233484 - DNA, 25 bp, Homo sapien
tggccagctcgaagacagaaaggtt

SEQ ID NO: 1233485 - DNA, 25 bp, Homo sapien
tggaagctttctgtaccctccgacc

SEQ ID NO: 1233486 - DNA, 25 bp, Homo sapien
gactcgagggtcagcgaataagcgc

SEQ ID NO: 1233487 - DNA, 25 bp, Homo sapien
aaacggatagtgtccagcgaggtgc

SEQ ID NO: 1233488 - DNA, 25 bp, Homo sapien
caggaaaacgtgtgtcgagagtcgc

SEQ ID NO: 1233489 - DNA, 25 bp, Homo sapien
taaaccgctgaggagagacgagcgc

SEQ ID NO: 1233490 - DNA, 25 bp, Homo sapien
cagaacgcagcgaaagtgaaggcca

SEQ ID NO: 1233491 - DNA, 25 bp, Homo sapien
cagcatgtagcagaacgcagcgaaa

SEQ ID NO: 1233492 - DNA, 25 bp, Homo sapien
gcgcagcgcacagcaccagagacag

SEQ ID NO: 1233493 - DNA, 25 bp, Homo sapien
gcgaagaagatgagcgcagcgcaca

SEQ ID NO: 1233494 - DNA, 25 bp, Homo sapien
cactatcatcaagaagggccctata

SEQ ID NO: 1233495 - DNA, 25 bp, Homo sapien
caaacaaggataaagcggcaagcaa

SEQ ID NO: 1233496 - DNA, 25 bp, Homo sapien
taggtgacctgtgaattctgcacac

SEQ ID NO: 1233497 - DNA, 25 bp, Homo sapien
gataaggtgccatgcatcaatccag

SEQ ID NO: 1233498 - DNA, 25 bp, Homo sapien
acttactgggagagaggtccacagc

SEQ ID NO: 1233499 - DNA, 25 bp, Homo sapien
tcagggccagtataggcaagagctc

SEQ ID NO: 1233500 - DNA, 25 bp, Homo sapien
taaggccccagaggaacctgtttgc

SEQ ID NO: 1233501 - DNA, 25 bp, Homo sapien
cacagctactgaagaataaggcccc

SEQ ID NO: 1233502 - DNA, 25 bp, Homo sapien
tagaggagcgatgcattgagagaag

SEQ ID NO: 1233503 - DNA, 25 bp, Homo sapien
ggagcgatgcattgagagaagaagg

SEQ ID NO: 1233504 - DNA, 25 bp, Homo sapien
gagcgatgcattgagagaagaagga

SEQ ID NO: 1233505 - DNA, 25 bp, Homo sapien
gaggagcgatgcattgagagaagaa

SEQ ID NO: 1233506 - DNA, 25 bp, Homo sapien
tgaggccagctaaggtcaaaccgtg

SEQ ID NO: 1233507 - DNA, 25 bp, Homo sapien
gaaggcaatactgaggccagctaag

SEQ ID NO: 1233508 - DNA, 25 bp, Homo sapien
aggtcaaaccgtgcatccgcctggg

SEQ ID NO: 1233509 - DNA, 25 bp, Homo sapien
gtcaaaccgtgcatccgcctgggac

SEQ ID NO: 1233510 - DNA, 25 bp, Homo sapien
ccaaaggcttgtctgcagctcagag

SEQ ID NO: 1233511 - DNA, 25 bp, Homo sapien
agagggcctggggaccaaaggcttg

SEQ ID NO: 1233512 - DNA, 25 bp, Homo sapien
agcagttgcaaagaagacacggaca

SEQ ID NO: 1233513 - DNA, 25 bp, Homo sapien
ggacagcagtctcaaagccacggag

SEQ ID NO: 1233514 - DNA, 25 bp, Homo sapien
taagcactaaatggtgcccagagat

SEQ ID NO: 1233515 - DNA, 25 bp, Homo sapien
cacggagaggccaagataagcacta

SEQ ID NO: 1233516 - DNA, 25 bp, Homo sapien
gacatagaggcccggatatgtagct

SEQ ID NO: 1233517 - DNA, 25 bp, Homo sapien
gagacatagaggcccggatatgtag

SEQ ID NO: 1233518 - DNA, 25 bp, Homo sapien
atagaggcccggatatgtagctcct

SEQ ID NO: 1233519 - DNA, 25 bp, Homo sapien
agggagacatagaggcccggatatg

SEQ ID NO: 1233520 - DNA, 25 bp, Homo sapien
ctgctctaaaggcttccagtttgca

SEQ ID NO: 1233521 - DNA, 25 bp, Homo sapien
taaaggcttccagtttgcagtagcc

SEQ ID NO: 1233522 - DNA, 25 bp, Homo sapien
tctaaaggcttccagtttgcagtag

SEQ ID NO: 1233523 - DNA, 25 bp, Homo sapien
aaggcttccagtttgcagtagccat

SEQ ID NO: 1233524 - DNA, 25 bp, Homo sapien
cagaccacagctgctcctcatcaag

SEQ ID NO: 1233525 - DNA, 25 bp, Homo sapien
atgttcagggccacaagtccagcaa

SEQ ID NO: 1233526 - DNA, 25 bp, Homo sapien
gacgttttcatgagaagtggagatt

SEQ ID NO: 1233527 - DNA, 25 bp, Homo sapien
gtgggtagtcatccccttgcaggga

SEQ ID NO: 1233528 - DNA, 25 bp, Homo sapien
cgaacacgtgccacggaagcatgct

SEQ ID NO: 1233529 - DNA, 25 bp, Homo sapien
gggctggaagttcctggctctcttc

SEQ ID NO: 1233530 - DNA, 25 bp, Homo sapien
ttagcaacgtcgtccactcagacac

SEQ ID NO: 1233531 - DNA, 25 bp, Homo sapien
tgcagcatttgtgctcttagcaacg

SEQ ID NO: 1233532 - DNA, 25 bp, Homo sapien
ggaagttcctggctctcttcagggt

SEQ ID NO: 1233533 - DNA, 25 bp, Homo sapien
cagaagtgtagctgcagggctccat

SEQ ID NO: 1233534 - DNA, 25 bp, Homo sapien
tactttgtctatccacgctaccagt

SEQ ID NO: 1233535 - DNA, 25 bp, Homo sapien
tgggagcggccactatactttgtct

SEQ ID NO: 1233536 - DNA, 25 bp, Homo sapien
tatccacgctaccagtgagagacac

SEQ ID NO: 1233537 - DNA, 25 bp, Homo sapien
cataacagactccacaaaaggatgg

SEQ ID NO: 1233538 - DNA, 25 bp, Homo sapien
ataacagactccacaaaaggatggg

SEQ ID NO: 1233539 - DNA, 25 bp, Homo sapien
ctacccataacagactccacaaaag

SEQ ID NO: 1233540 - DNA, 25 bp, Homo sapien
cccataacagactccacaaaaggat

SEQ ID NO: 1233541 - DNA, 25 bp, Homo sapien
cagggtagcttatcattgtctcaag

SEQ ID NO: 1233542 - DNA, 25 bp, Homo sapien
tcaagagcagtgtccaccctcatca

SEQ ID NO: 1233543 - DNA, 25 bp, Homo sapien
tagcttatcattgtctcaagagcag

SEQ ID NO: 1233544 - DNA, 25 bp, Homo sapien
tgagtggggaccgtctgtgctgtgg

SEQ ID NO: 1233545 - DNA, 25 bp, Homo sapien
gggagtgaggaacctttattaatgc

SEQ ID NO: 1233546 - DNA, 25 bp, Homo sapien
cctccattgggccatgcagtctcac

SEQ ID NO: 1233547 - DNA, 25 bp, Homo sapien
cattgggccatgcagtctcaccctc

SEQ ID NO: 1233548 - DNA, 25 bp, Homo sapien
ccattgggccatgcagtctcaccct

SEQ ID NO: 1233549 - DNA, 25 bp, Homo sapien
tccattgggccatgcagtctcaccc

SEQ ID NO: 1233550 - DNA, 25 bp, Homo sapien
ttgaagagggcagtgctggggccag

SEQ ID NO: 1233551 - DNA, 25 bp, Homo sapien
ctggttgaagagggcagtgctgggg

SEQ ID NO: 1233552 - DNA, 25 bp, Homo sapien
aagagggcagtgctggggccagtcc

SEQ ID NO: 1233553 - DNA, 25 bp, Homo sapien
ggttgaagagggcagtgctggggcc

SEQ ID NO: 1233554 - DNA, 25 bp, Homo sapien
tgaacaggattgcactggtctatgg

SEQ ID NO: 1233555 - DNA, 25 bp, Homo sapien
catgaacaggattgcactggtctat

SEQ ID NO: 1233556 - DNA, 25 bp, Homo sapien
cgcatgaacaggattgcactggtct

SEQ ID NO: 1233557 - DNA, 25 bp, Homo sapien
gaacaggattgcactggtctatggg

SEQ ID NO: 1233558 - DNA, 25 bp, Homo sapien
gaaggacaacatctaccattacttt

SEQ ID NO: 1233559 - DNA, 25 bp, Homo sapien
gacaacatctaccattactttaaag

SEQ ID NO: 1233560 - DNA, 25 bp, Homo sapien
tccagcaagccagagcccctgaagg

SEQ ID NO: 1233561 - DNA, 25 bp, Homo sapien
cagcaagccagagcccctgaaggac

SEQ ID NO: 1233562 - DNA, 25 bp, Homo sapien
aaagggaatgctacaagacacgcac

SEQ ID NO: 1233563 - DNA, 25 bp, Homo sapien
gaaagggaatgctacaagacacgca

SEQ ID NO: 1233564 - DNA, 25 bp, Homo sapien
ggcatctcccggtgcttcattactg

SEQ ID NO: 1233565 - DNA, 25 bp, Homo sapien
cactgaacacagctgtggcatctcc

SEQ ID NO: 1233566 - DNA, 25 bp, Homo sapien
gactttaacgatttccaaagccaca

SEQ ID NO: 1233567 - DNA, 25 bp, Homo sapien
tgcccgcatcgtgcactaaatgccg

SEQ ID NO: 1233568 - DNA, 25 bp, Homo sapien
agatgcgctcgatgttcctcaaccg

SEQ ID NO: 1233569 - DNA, 25 bp, Homo sapien
gaagcagatgcgctcgatgttcctc

SEQ ID NO: 1233570 - DNA, 25 bp, Homo sapien
gcagatgcgctcgatgttcctcaac

SEQ ID NO: 1233571 - DNA, 25 bp, Homo sapien
tgcgctcgatgttcctcaaccgttc

SEQ ID NO: 1233572 - DNA, 25 bp, Homo sapien
cgatcctccatcctcggcatgaagc

SEQ ID NO: 1233573 - DNA, 25 bp, Homo sapien
acccaccaccatgcgatcctccatc

SEQ ID NO: 1233574 - DNA, 25 bp, Homo sapien
tagcctctttcactgtgtgcccacc

SEQ ID NO: 1233575 - DNA, 25 bp, Homo sapien
atcctcggcatgaagctgccacact

SEQ ID NO: 1233576 - DNA, 25 bp, Homo sapien
tattttccacgacgatgagtagcaa

SEQ ID NO: 1233577 - DNA, 25 bp, Homo sapien
ctccccggtattttccacgacgatg

SEQ ID NO: 1233578 - DNA, 25 bp, Homo sapien
cacgacgatgagtagcaactgcatt

SEQ ID NO: 1233579 - DNA, 25 bp, Homo sapien
tagcaactgcatttgacctcccaga

SEQ ID NO: 1233580 - DNA, 25 bp, Homo sapien
gtcttgaagtcactgtctcatgtcc

SEQ ID NO: 1233581 - DNA, 25 bp, Homo sapien
aacacattttctgataattatagag

SEQ ID NO: 1233582 - DNA, 25 bp, Homo sapien
gaacacattttctgataattataga

SEQ ID NO: 1233583 - DNA, 25 bp, Homo sapien
ccaaagaacacattttctgataatt

SEQ ID NO: 1233584 - DNA, 25 bp, Homo sapien
aagaacacattttctgataattata

SEQ ID NO: 1233585 - DNA, 25 bp, Homo sapien
cacacagccaggacatagcaacttg

SEQ ID NO: 1233586 - DNA, 25 bp, Homo sapien
tgggtggaagctcttgtccctctcc

SEQ ID NO: 1233587 - DNA, 25 bp, Homo sapien
ttgtggaaatgctcccaagtccagg

SEQ ID NO: 1233588 - DNA, 25 bp, Homo sapien
gccaggacatagcaacttgtggaaa

SEQ ID NO: 1233589 - DNA, 25 bp, Homo sapien
gcttttactctgctaccattttgaa

SEQ ID NO: 1233590 - DNA, 25 bp, Homo sapien
tgcttttactctgctaccattttga

SEQ ID NO: 1233591 - DNA, 25 bp, Homo sapien
tttgaaaattacggctctctaaatc

SEQ ID NO: 1233592 - DNA, 25 bp, Homo sapien
aaattacggctctctaaatcatacc

SEQ ID NO: 1233593 - DNA, 25 bp, Homo sapien
tctcacctctcaagtcagtgctgtg

SEQ ID NO: 1233594 - DNA, 25 bp, Homo sapien
tgcaggtgtaggtgtctgtgccatt

SEQ ID NO: 1233595 - DNA, 25 bp, Homo sapien
tgtgtcagcaattaccactcctaag

SEQ ID NO: 1233596 - DNA, 25 bp, Homo sapien
ttatccccagaaacaccatgtgttc

SEQ ID NO: 1233597 - DNA, 25 bp, Homo sapien
gcaatttgctgaacgtcctgaccca

SEQ ID NO: 1233598 - DNA, 25 bp, Homo sapien
tgcaagaacaagacgaatggacaca

SEQ ID NO: 1233599 - DNA, 25 bp, Homo sapien
ggttgtctgaattcgagcacatgca

SEQ ID NO: 1233600 - DNA, 25 bp, Homo sapien
tgacccagagccctaactgcaagaa

SEQ ID NO: 1233601 - DNA, 25 bp, Homo sapien
tacactcagcagcttggaaaaattt

SEQ ID NO: 1233602 - DNA, 25 bp, Homo sapien
ctcagcagcttggaaaaattttgcc

SEQ ID NO: 1233603 - DNA, 25 bp, Homo sapien
ctgttacactcagcagcttggaaaa

SEQ ID NO: 1233604 - DNA, 25 bp, Homo sapien
cactcagcagcttggaaaaattttg

SEQ ID NO: 1233605 - DNA, 25 bp, Homo sapien
ctctgtccagcattctgcaagccat

SEQ ID NO: 1233606 - DNA, 25 bp, Homo sapien
aatacagatagattcctctgtccag

SEQ ID NO: 1233607 - DNA, 25 bp, Homo sapien
ccaatacagatagattcctctgtcc

SEQ ID NO: 1233608 - DNA, 25 bp, Homo sapien
tacagatagattcctctgtccagca

SEQ ID NO: 1233609 - DNA, 25 bp, Homo sapien
ctgaagagggagcagagacacggcc

SEQ ID NO: 1233610 - DNA, 25 bp, Homo sapien
gaaaagtagagggacattcagcccc

SEQ ID NO: 1233611 - DNA, 25 bp, Homo sapien
atgcagaagaggctatggatggagt

SEQ ID NO: 1233612 - DNA, 25 bp, Homo sapien
ttcagccccagcgtgagccactctt

SEQ ID NO: 1233613 - DNA, 25 bp, Homo sapien
cactcttgcgcacacaggaacataa

SEQ ID NO: 1233614 - DNA, 25 bp, Homo sapien
agatagaaggccagcttacaccagg

SEQ ID NO: 1233615 - DNA, 25 bp, Homo sapien
gctagttctgagctatctgctggac

SEQ ID NO: 1233616 - DNA, 25 bp, Homo sapien
tctgacagtaactcaaagtgtcggc

SEQ ID NO: 1233617 - DNA, 25 bp, Homo sapien
tcggcattcatgaccaccggtgggt

SEQ ID NO: 1233618 - DNA, 25 bp, Homo sapien
tggattctttatgccaccagctgcc

SEQ ID NO: 1233619 - DNA, 25 bp, Homo sapien
gatgatgctggataatacggtagtg

SEQ ID NO: 1233620 - DNA, 25 bp, Homo sapien
gggtgcagtggattctttatgccac

SEQ ID NO: 1233621 - DNA, 25 bp, Homo sapien
catcaggatgatgattatggttgtt

SEQ ID NO: 1233622 - DNA, 25 bp, Homo sapien
aagagctcactaaagtgtagatcat

SEQ ID NO: 1233623 - DNA, 25 bp, Homo sapien
agagctcactaaagtgtagatcatg

SEQ ID NO: 1233624 - DNA, 25 bp, Homo sapien
taagatgatgtcctcacgtcgacct

SEQ ID NO: 1233625 - DNA, 25 bp, Homo sapien
accccgtgtgtggaattcgaatgcc

SEQ ID NO: 1233626 - DNA, 25 bp, Homo sapien
cattctcgaggctttcaacaggtcc

SEQ ID NO: 1233627 - DNA, 25 bp, Homo sapien
tgatgctcagaagggctctaggacc

SEQ ID NO: 1233628 - DNA, 25 bp, Homo sapien
ctaaaaataggatgcaaagggagga

SEQ ID NO: 1233629 - DNA, 25 bp, Homo sapien
tgcaaagggaggattttcttgagag

SEQ ID NO: 1233630 - DNA, 25 bp, Homo sapien
aataggatgcaaagggaggattttc

SEQ ID NO: 1233631 - DNA, 25 bp, Homo sapien
ggatgcaaagggaggattttcttga

SEQ ID NO: 1233632 - DNA, 25 bp, Homo sapien
tatggaaatggatctgtgtaacgac

SEQ ID NO: 1233633 - DNA, 25 bp, Homo sapien
tgtaacgacacagcgtgagtgcaat

SEQ ID NO: 1233634 - DNA, 25 bp, Homo sapien
tgaaggcttactcccttggtcagct

SEQ ID NO: 1233635 - DNA, 25 bp, Homo sapien
tcaaacgcccacagtgagtagtgcc

SEQ ID NO: 1233636 - DNA, 25 bp, Homo sapien
tttccactggtacctgtaacaccat

SEQ ID NO: 1233637 - DNA, 25 bp, Homo sapien
tgattttaaagactggtccactacg

SEQ ID NO: 1233638 - DNA, 25 bp, Homo sapien
taacaccattagatatgcgctacac

SEQ ID NO: 1233639 - DNA, 25 bp, Homo sapien
cagggcataggtgttttgaatgcaa

SEQ ID NO: 1233640 - DNA, 25 bp, Homo sapien
gcgttgggtctgagttaaaatgcac

SEQ ID NO: 1233641 - DNA, 25 bp, Homo sapien
tcagaatgcccctcacaaagtggag

SEQ ID NO: 1233642 - DNA, 25 bp, Homo sapien
ggcacgttaggcttccattggatac

SEQ ID NO: 1233643 - DNA, 25 bp, Homo sapien
tattccatagactgtacaggcgcca

SEQ ID NO: 1233644 - DNA, 25 bp, Homo sapien
caactgtgtgtgtcgtctctggata

SEQ ID NO: 1233645 - DNA, 25 bp, Homo sapien
caacccaaatgaaggcaactgtgtg

SEQ ID NO: 1233646 - DNA, 25 bp, Homo sapien
gctggacacagtggaaagaccgtat

SEQ ID NO: 1233647 - DNA, 25 bp, Homo sapien
tagggcatcattgttacccatgctg

SEQ ID NO: 1233648 - DNA, 25 bp, Homo sapien
tcagcagttgaaaggttgcacagtt

SEQ ID NO: 1233649 - DNA, 25 bp, Homo sapien
tgcacagtttcaaggctaagcaatg

SEQ ID NO: 1233650 - DNA, 25 bp, Homo sapien
ggtaccacctgcaatgaattttatg

SEQ ID NO: 1233651 - DNA, 25 bp, Homo sapien
catcttgctgaggttgttttcatca

SEQ ID NO: 1233652 - DNA, 25 bp, Homo sapien
tcctattataatcaggatcccagtt

SEQ ID NO: 1233653 - DNA, 25 bp, Homo sapien
ttatcattaaggttgcttgtaggca

SEQ ID NO: 1233654 - DNA, 25 bp, Homo sapien
gagtacctgatttactcttgcacaa

SEQ ID NO: 1233655 - DNA, 25 bp, Homo sapien
cttattctgtcaggtgaaagtagga

SEQ ID NO: 1233656 - DNA, 25 bp, Homo sapien
agatggttaggaggccttccaattt

SEQ ID NO: 1233657 - DNA, 25 bp, Homo sapien
tgctgaggatatccaggtgcagaaa

SEQ ID NO: 1233658 - DNA, 25 bp, Homo sapien
gaagcagaggcctgtacatctatct

SEQ ID NO: 1233659 - DNA, 25 bp, Homo sapien
tattgttgattacaagtctcatcaa

SEQ ID NO: 1233660 - DNA, 25 bp, Homo sapien
cattcatccagcagtagagaccctt

SEQ ID NO: 1233661 - DNA, 25 bp, Homo sapien
tcattcatccagcagtagagaccct

SEQ ID NO: 1233662 - DNA, 25 bp, Homo sapien
attcatccagcagtagagacccttg

SEQ ID NO: 1233663 - DNA, 25 bp, Homo sapien
tcctgttcccaatttctactgtctc

SEQ ID NO: 1233664 - DNA, 25 bp, Homo sapien
gtgtgagggcgcatgtgtgtggtct

SEQ ID NO: 1233665 - DNA, 25 bp, Homo sapien
tgtggtctgatggtccgatgatgat

SEQ ID NO: 1233666 - DNA, 25 bp, Homo sapien
cattcagggcatttagaagcagagt

SEQ ID NO: 1233667 - DNA, 25 bp, Homo sapien
gcgcatgtgtgtggtctgatggtcc

SEQ ID NO: 1233668 - DNA, 25 bp, Homo sapien
tgacattagacagcacgaggatggt

SEQ ID NO: 1233669 - DNA, 25 bp, Homo sapien
cagtgacctctacccttggtgctag

SEQ ID NO: 1233670 - DNA, 25 bp, Homo sapien
gtgctaggacccaagagcttccctt

SEQ ID NO: 1233671 - DNA, 25 bp, Homo sapien
ggagagcatatcttggcaggacaac

SEQ ID NO: 1233672 - DNA, 25 bp, Homo sapien
gaaagtcctccaagctggcaccttg

SEQ ID NO: 1233673 - DNA, 25 bp, Homo sapien
gctggctctgttgagggcatcagca

SEQ ID NO: 1233674 - DNA, 25 bp, Homo sapien
gggcttgccgagcatggatccacat

SEQ ID NO: 1233675 - DNA, 25 bp, Homo sapien
cagagggcactatgccagagctggc

SEQ ID NO: 1233676 - DNA, 25 bp, Homo sapien
ggctgatccgctgtgctaacttgtc

SEQ ID NO: 1233677 - DNA, 25 bp, Homo sapien
gaaaaagtgccatgcttgcactgca

SEQ ID NO: 1233678 - DNA, 25 bp, Homo sapien
tgagtgttcagcaactgcattgcca

SEQ ID NO: 1233679 - DNA, 25 bp, Homo sapien
tgagccaccgcagcgatagaaaagg

SEQ ID NO: 1233680 - DNA, 25 bp, Homo sapien
tgagatttctctatccctactgcct

SEQ ID NO: 1233681 - DNA, 25 bp, Homo sapien
gcatcccagggttgagagcgctaga

SEQ ID NO: 1233682 - DNA, 25 bp, Homo sapien
ttttcatgatacacatcctggaccc

SEQ ID NO: 1233683 - DNA, 25 bp, Homo sapien
ggcaggcccataatccatcactggc

SEQ ID NO: 1233684 - DNA, 25 bp, Homo sapien
tcgtttcagagtttagctcagctga

SEQ ID NO: 1233685 - DNA, 25 bp, Homo sapien
atcgtttcagagtttagctcagctg

SEQ ID NO: 1233686 - DNA, 25 bp, Homo sapien
ccatcgtttcagagtttagctcagc

SEQ ID NO: 1233687 - DNA, 25 bp, Homo sapien
catcgtttcagagtttagctcagct

SEQ ID NO: 1233688 - DNA, 25 bp, Homo sapien
catagcccagatccactgtgatcgc

SEQ ID NO: 1233689 - DNA, 25 bp, Homo sapien
gcacgagccagtcctatgtgcagac

SEQ ID NO: 1233690 - DNA, 25 bp, Homo sapien
tatgtgcagacttaggactggtacc

SEQ ID NO: 1233691 - DNA, 25 bp, Homo sapien
ggtaccagcatctgacacctcatag

SEQ ID NO: 1233692 - DNA, 25 bp, Homo sapien
aatccccactagtccttaggtcctg

SEQ ID NO: 1233693 - DNA, 25 bp, Homo sapien
tgtcgagtactgtagtggtcagttt

SEQ ID NO: 1233694 - DNA, 25 bp, Homo sapien
gcttggatccagtgtctgtcgagta

SEQ ID NO: 1233695 - DNA, 25 bp, Homo sapien
aggccaatccccactagtccttagg

SEQ ID NO: 1233696 - DNA, 25 bp, Homo sapien
tctggaattagaggaactcaatggg

SEQ ID NO: 1233697 - DNA, 25 bp, Homo sapien
gaattagaggaactcaatgggttca

SEQ ID NO: 1233698 - DNA, 25 bp, Homo sapien
agtgatcctctggaattagaggaac

SEQ ID NO: 1233699 - DNA, 25 bp, Homo sapien
cctttccacccagtgatcctctgga

SEQ ID NO: 1233700 - DNA, 25 bp, Homo sapien
tcttatgaggcattctatcttggaa

SEQ ID NO: 1233701 - DNA, 25 bp, Homo sapien
gcattacatcttatgaggcattcta

SEQ ID NO: 1233702 - DNA, 25 bp, Homo sapien
agaggaaagggtgcattacatctta

SEQ ID NO: 1233703 - DNA, 25 bp, Homo sapien
gggtgcattacatcttatgaggcat

SEQ ID NO: 1233704 - DNA, 25 bp, Homo sapien
ggtgcagagtgtggcccaaaagtgt

SEQ ID NO: 1233705 - DNA, 25 bp, Homo sapien
gtgcagagtgtggcccaaaagtgtg

SEQ ID NO: 1233706 - DNA, 25 bp, Homo sapien
tcttgcgagattccaccgcgggtac

SEQ ID NO: 1233707 - DNA, 25 bp, Homo sapien
gctcttgcgagattccaccgcgggt

SEQ ID NO: 1233708 - DNA, 25 bp, Homo sapien
ttgcgagattccaccgcgggtacgc

SEQ ID NO: 1233709 - DNA, 25 bp, Homo sapien
ctggctcttgcgagattccaccgcg

SEQ ID NO: 1233710 - DNA, 25 bp, Homo sapien
gcccttcctggaagcggcgaaggtc

SEQ ID NO: 1233711 - DNA, 25 bp, Homo sapien
ccggcgagcgccagactagggtgaa

SEQ ID NO: 1233712 - DNA, 25 bp, Homo sapien
tgaatgggaaggaccgcgcagcaca

SEQ ID NO: 1233713 - DNA, 25 bp, Homo sapien
tggccgtaaccgcctgaccaagagc

SEQ ID NO: 1233714 - DNA, 25 bp, Homo sapien
gagatcctaatggtactacagatag

SEQ ID NO: 1233715 - DNA, 25 bp, Homo sapien
tataagcaacccatctaagaggaga

SEQ ID NO: 1233716 - DNA, 25 bp, Homo sapien
cccaacaataacagcatagaggtca

SEQ ID NO: 1233717 - DNA, 25 bp, Homo sapien
ctgcagaatgccaaagacaaggaag

SEQ ID NO: 1233718 - DNA, 25 bp, Homo sapien
ctgaacaaaactataaaggaactgg

SEQ ID NO: 1233719 - DNA, 25 bp, Homo sapien
tgtcaaatcaatgggtataaacgtc

SEQ ID NO: 1233720 - DNA, 25 bp, Homo sapien
caaatcaatgggtataaacgtctcc

SEQ ID NO: 1233721 - DNA, 25 bp, Homo sapien
tttcagttgtcaaatcaatgggtat

SEQ ID NO: 1233722 - DNA, 25 bp, Homo sapien
tgggtataaacgtctccatatgttt

SEQ ID NO: 1233723 - DNA, 25 bp, Homo sapien
tttgtcttggtttcctccttgtcca

SEQ ID NO: 1233724 - DNA, 25 bp, Homo sapien
ttgtcttggtttcctccttgtccat

SEQ ID NO: 1233725 - DNA, 25 bp, Homo sapien
ctaggatttctcagttgttggttaa

SEQ ID NO: 1233726 - DNA, 25 bp, Homo sapien
agagtgaagtcagaacacaattttc

SEQ ID NO: 1233727 - DNA, 25 bp, Homo sapien
ttcatactcatatgttgccttcctt

SEQ ID NO: 1233728 - DNA, 25 bp, Homo sapien
tctgaaatttcatactcatatgttg

SEQ ID NO: 1233729 - DNA, 25 bp, Homo sapien
gaaatttcatactcatatgttgcct

SEQ ID NO: 1233730 - DNA, 25 bp, Homo sapien
ctaatggtttcacatcttcatattt

SEQ ID NO: 1233731 - DNA, 25 bp, Homo sapien
ccatatgttgttgaattatactttc

SEQ ID NO: 1233732 - DNA, 25 bp, Homo sapien
catttggacaagcatgagtttgatc

SEQ ID NO: 1233733 - DNA, 25 bp, Homo sapien
tttggacaagcatgagtttgatcct

SEQ ID NO: 1233734 - DNA, 25 bp, Homo sapien
cctttctccttaagggaagctggct

SEQ ID NO: 1233735 - DNA, 25 bp, Homo sapien
gacaagcatgagtttgatccttttt

SEQ ID NO: 1233736 - DNA, 25 bp, Homo sapien
gatacagcttaacggatcctctgct

SEQ ID NO: 1233737 - DNA, 25 bp, Homo sapien
caaaggctgtaatcgaggtgttgct

SEQ ID NO: 1233738 - DNA, 25 bp, Homo sapien
tagcagcttgcttcttcgaagccag

SEQ ID NO: 1233739 - DNA, 25 bp, Homo sapien
caagctccctcaggttgtaagaaga

SEQ ID NO: 1233740 - DNA, 25 bp, Homo sapien
gaggcacttgcatgactctaagagt

SEQ ID NO: 1233741 - DNA, 25 bp, Homo sapien
tggtattgacgtagaaaagcacaga

SEQ ID NO: 1233742 - DNA, 25 bp, Homo sapien
tattataactaggatgaggcacttg

SEQ ID NO: 1233743 - DNA, 25 bp, Homo sapien
ggataagtaacatcatagacccaga

SEQ ID NO: 1233744 - DNA, 25 bp, Homo sapien
ttcaaactgtgctgcggtaatatag

SEQ ID NO: 1233745 - DNA, 25 bp, Homo sapien
tctgaattgcaattttggagcttcc

SEQ ID NO: 1233746 - DNA, 25 bp, Homo sapien
caaccaagcttttctcgtagcctaa

SEQ ID NO: 1233747 - DNA, 25 bp, Homo sapien
ggtaatatagtttgccaaccaagct

SEQ ID NO: 1233748 - DNA, 25 bp, Homo sapien
tatggattgtaaagggatttaggac

SEQ ID NO: 1233749 - DNA, 25 bp, Homo sapien
taggacttttccgaggaaggcaata

SEQ ID NO: 1233750 - DNA, 25 bp, Homo sapien
aagatcatatggattgtaaagggat

SEQ ID NO: 1233751 - DNA, 25 bp, Homo sapien
ctgaagatcatatggattgtaaagg

SEQ ID NO: 1233752 - DNA, 25 bp, Homo sapien
caatgtttagcagtatgagccgata

SEQ ID NO: 1233753 - DNA, 25 bp, Homo sapien
gtttagcagtatgagccgatactac

SEQ ID NO: 1233754 - DNA, 25 bp, Homo sapien
aatgtttagcagtatgagccgatac

SEQ ID NO: 1233755 - DNA, 25 bp, Homo sapien
tgtttagcagtatgagccgatacta

SEQ ID NO: 1233756 - DNA, 25 bp, Homo sapien
tattatagttcccattaagctagca

SEQ ID NO: 1233757 - DNA, 25 bp, Homo sapien
gaatcttcaaacctaaatctctaca

SEQ ID NO: 1233758 - DNA, 25 bp, Homo sapien
gagattcttatatataaactgctcc

SEQ ID NO: 1233759 - DNA, 25 bp, Homo sapien
taaataacatgctcccaaggagatt

SEQ ID NO: 1233760 - DNA, 25 bp, Homo sapien
aatgctatttcttgtgctccaacag

SEQ ID NO: 1233761 - DNA, 25 bp, Homo sapien
tctcacttgatactgcatattagag

SEQ ID NO: 1233762 - DNA, 25 bp, Homo sapien
tacttttcacaaatagctgttcaga

SEQ ID NO: 1233763 - DNA, 25 bp, Homo sapien
ttatcagcacatatgtatctacgtg

SEQ ID NO: 1233764 - DNA, 25 bp, Homo sapien
tctgatagccattccaaagtaggta

SEQ ID NO: 1233765 - DNA, 25 bp, Homo sapien
tacttcctttacactaccaactata

SEQ ID NO: 1233766 - DNA, 25 bp, Homo sapien
gaaaatatcttgaattgccgtaata

SEQ ID NO: 1233767 - DNA, 25 bp, Homo sapien
caaagtaggtatgagttctacttcc

SEQ ID NO: 1233768 - DNA, 25 bp, Homo sapien
tccagagtcaactgtagggtgtatt

SEQ ID NO: 1233769 - DNA, 25 bp, Homo sapien
taacccttgcgttgttccagagtca

SEQ ID NO: 1233770 - DNA, 25 bp, Homo sapien
tactggtattactgtagtagaaccc

SEQ ID NO: 1233771 - DNA, 25 bp, Homo sapien
gaacccagatgtcactcaggcaact

SEQ ID NO: 1233772 - DNA, 25 bp, Homo sapien
ggaattttattatgatctacttcca

SEQ ID NO: 1233773 - DNA, 25 bp, Homo sapien
aatgatgaggatgaaggaattttat

SEQ ID NO: 1233774 - DNA, 25 bp, Homo sapien
ttatgatctacttccatttaatgag

SEQ ID NO: 1233775 - DNA, 25 bp, Homo sapien
ctgcaacaaaaaccaacctctactt

SEQ ID NO: 1233776 - DNA, 25 bp, Homo sapien
aatcacaagggtatttattgtgata

SEQ ID NO: 1233777 - DNA, 25 bp, Homo sapien
cacaagggtatttattgtgataagt

SEQ ID NO: 1233778 - DNA, 25 bp, Homo sapien
caagggtatttattgtgataagtat

SEQ ID NO: 1233779 - DNA, 25 bp, Homo sapien
gggtatttattgtgataagtatcca

SEQ ID NO: 1233780 - DNA, 25 bp, Homo sapien
tttaacattcaatttccaggtaaca

SEQ ID NO: 1233781 - DNA, 25 bp, Homo sapien
attcttttaacattcaatttccagg

SEQ ID NO: 1233782 - DNA, 25 bp, Homo sapien
ctgtcttaattcttttaacattcaa

SEQ ID NO: 1233783 - DNA, 25 bp, Homo sapien
attcaatttccaggtaacaaatgct

SEQ ID NO: 1233784 - DNA, 25 bp, Homo sapien
gctttgggttatatctccttggtgt

SEQ ID NO: 1233785 - DNA, 25 bp, Homo sapien
agctttgatcttcttacttgttact

SEQ ID NO: 1233786 - DNA, 25 bp, Homo sapien
gtttgagtaggattgctatagttct

SEQ ID NO: 1233787 - DNA, 25 bp, Homo sapien
gatcttcttacttgttactggtatt

SEQ ID NO: 1233788 - DNA, 25 bp, Homo sapien
gccctaaacggatgccagttgtcaa

SEQ ID NO: 1233789 - DNA, 25 bp, Homo sapien
catggaacgacccagtacaaaggcc

SEQ ID NO: 1233790 - DNA, 25 bp, Homo sapien
gaacttggactggaacttaaatcac

SEQ ID NO: 1233791 - DNA, 25 bp, Homo sapien
tccagacccgtaagacaaatatgct

SEQ ID NO: 1233792 - DNA, 25 bp, Homo sapien
ggcatatggcagatagattattttc

SEQ ID NO: 1233793 - DNA, 25 bp, Homo sapien
cacaaagtcctcttatataaaccaa

SEQ ID NO: 1233794 - DNA, 25 bp, Homo sapien
tgagattaattgcatcttcacaaag

SEQ ID NO: 1233795 - DNA, 25 bp, Homo sapien
ggtttgaaacaagtcatcagccaaa

SEQ ID NO: 1233796 - DNA, 25 bp, Homo sapien
tcctcgttgtcagtcttcattggca

SEQ ID NO: 1233797 - DNA, 25 bp, Homo sapien
ctcgttgtcagtcttcattggcatc

SEQ ID NO: 1233798 - DNA, 25 bp, Homo sapien
cctcgttgtcagtcttcattggcat

SEQ ID NO: 1233799 - DNA, 25 bp, Homo sapien
atcctcgttgtcagtcttcattggc

SEQ ID NO: 1233800 - DNA, 25 bp, Homo sapien
gtatatcctatatgacttacatgtt

SEQ ID NO: 1233801 - DNA, 25 bp, Homo sapien
tatttggtcttttcaggtcataaag

SEQ ID NO: 1233802 - DNA, 25 bp, Homo sapien
gcattattggggaaaccagcaccca

SEQ ID NO: 1233803 - DNA, 25 bp, Homo sapien
cttttgaagtcaccattatctgtaa

SEQ ID NO: 1233804 - DNA, 25 bp, Homo sapien
tagagaatatgttcgagaactatcc

SEQ ID NO: 1233805 - DNA, 25 bp, Homo sapien
gagaatatgttcgagaactatccag

SEQ ID NO: 1233806 - DNA, 25 bp, Homo sapien
ctagagaatatgttcgagaactatc

SEQ ID NO: 1233807 - DNA, 25 bp, Homo sapien
agagaatatgttcgagaactatcca

SEQ ID NO: 1233808 - DNA, 25 bp, Homo sapien
gctgtaactgctcttcacaaaattc

SEQ ID NO: 1233809 - DNA, 25 bp, Homo sapien
caatgcctgggtagcttgctgtaac

SEQ ID NO: 1233810 - DNA, 25 bp, Homo sapien
tgatgtcctcaagttgtttcaatgc

SEQ ID NO: 1233811 - DNA, 25 bp, Homo sapien
tttattcctgatgtcctcaagttgt

SEQ ID NO: 1233812 - DNA, 25 bp, Homo sapien
tacaggccaggagacattggaatga

SEQ ID NO: 1233813 - DNA, 25 bp, Homo sapien
cattacaataagagctacagtccca

SEQ ID NO: 1233814 - DNA, 25 bp, Homo sapien
tgtgttccttaagccctgtcctgaa

SEQ ID NO: 1233815 - DNA, 25 bp, Homo sapien
caagtcacatataagggaatttcca

SEQ ID NO: 1233816 - DNA, 25 bp, Homo sapien
tcttgaggtaggtgtacagcactat

SEQ ID NO: 1233817 - DNA, 25 bp, Homo sapien
gcttgagctgtggtccaacagtgtg

SEQ ID NO: 1233818 - DNA, 25 bp, Homo sapien
ggttcctctaggtgcaataattaga

SEQ ID NO: 1233819 - DNA, 25 bp, Homo sapien
taaatctaggcaccaggctatcaaa

SEQ ID NO: 1233820 - DNA, 25 bp, Homo sapien
gtatttctaatagagatgaggtttc

SEQ ID NO: 1233821 - DNA, 25 bp, Homo sapien
tagctgaaactacagacacatgcca

SEQ ID NO: 1233822 - DNA, 25 bp, Homo sapien
atagagatgaggtttcaccatgttg

SEQ ID NO: 1233823 - DNA, 25 bp, Homo sapien
atgccaccacacctggctaattttt

SEQ ID NO: 1233824 - DNA, 25 bp, Homo sapien
cataagttgacgaatgagttcctga

SEQ ID NO: 1233825 - DNA, 25 bp, Homo sapien
ttctaataaacgtctatatttaggc

SEQ ID NO: 1233826 - DNA, 25 bp, Homo sapien
taataaacgtctatatttaggcagc

SEQ ID NO: 1233827 - DNA, 25 bp, Homo sapien
ctgcagtgttcataagttgacgaat

SEQ ID NO: 1233828 - DNA, 25 bp, Homo sapien
tgtttaccagctacaaagtatgcca

SEQ ID NO: 1233829 - DNA, 25 bp, Homo sapien
gaagacagagtatacttaggcacag

SEQ ID NO: 1233830 - DNA, 25 bp, Homo sapien
tttactgcgcatcctatagcaccga

SEQ ID NO: 1233831 - DNA, 25 bp, Homo sapien
gagtacatgtactctgccacaagga

SEQ ID NO: 1233832 - DNA, 25 bp, Homo sapien
taggaaaagagttgtccttgaatgt

SEQ ID NO: 1233833 - DNA, 25 bp, Homo sapien
tcttcacaatcatttgttgtctttc

SEQ ID NO: 1233834 - DNA, 25 bp, Homo sapien
cagaaatagcatgtaactttgaatt

SEQ ID NO: 1233835 - DNA, 25 bp, Homo sapien
gttcttcacaatcatttgttgtctt

SEQ ID NO: 1233836 - DNA, 25 bp, Homo sapien
gagaatttggtatgcccactgctgt

SEQ ID NO: 1233837 - DNA, 25 bp, Homo sapien
caaagacagagtagtgtagcagtgg

SEQ ID NO: 1233838 - DNA, 25 bp, Homo sapien
aaaatagcatacaacatcactcctg

SEQ ID NO: 1233839 - DNA, 25 bp, Homo sapien
ggccttcccttaccattcctatgta

SEQ ID NO: 1233840 - DNA, 25 bp, Homo sapien
ccaaacttgggctatgggacaaaag

SEQ ID NO: 1233841 - DNA, 25 bp, Homo sapien
taaactacaagagaggaatagccac

SEQ ID NO: 1233842 - DNA, 25 bp, Homo sapien
aaccaaggtcagatactagagggca

SEQ ID NO: 1233843 - DNA, 25 bp, Homo sapien
ggaggcagcaccaatgattaccaga

SEQ ID NO: 1233844 - DNA, 25 bp, Homo sapien
gaattttctgaagaatcactctcag

SEQ ID NO: 1233845 - DNA, 25 bp, Homo sapien
tcttcaagattgtaactaatttctt

SEQ ID NO: 1233846 - DNA, 25 bp, Homo sapien
ggaattctcaagcatagatttactt

SEQ ID NO: 1233847 - DNA, 25 bp, Homo sapien
gggagcaattcttcacttgagtgtt

SEQ ID NO: 1233848 - DNA, 25 bp, Homo sapien
tgaatttttactgaaaactccaatc

SEQ ID NO: 1233849 - DNA, 25 bp, Homo sapien
ttccatattagtcaacatattttga

SEQ ID NO: 1233850 - DNA, 25 bp, Homo sapien
catttttccatattagtcaacatat

SEQ ID NO: 1233851 - DNA, 25 bp, Homo sapien
tactgaaaactccaatctgttggga

SEQ ID NO: 1233852 - DNA, 25 bp, Homo sapien
aaaaggatgtgacaatctggccatc

SEQ ID NO: 1233853 - DNA, 25 bp, Homo sapien
taatgtattatgcttcctgtcttat

SEQ ID NO: 1233854 - DNA, 25 bp, Homo sapien
gtcttattaggtaaatccattattg

SEQ ID NO: 1233855 - DNA, 25 bp, Homo sapien
aaggatgtgacaatctggccatctg

SEQ ID NO: 1233856 - DNA, 25 bp, Homo sapien
gaatgttgagatgttagtcagaatt

SEQ ID NO: 1233857 - DNA, 25 bp, Homo sapien
agaatgttgagatgttagtcagaat

SEQ ID NO: 1233858 - DNA, 25 bp, Homo sapien
taccaataatagtcaggagattcac

SEQ ID NO: 1233859 - DNA, 25 bp, Homo sapien
gaagttaattctcccatagatgata

SEQ ID NO: 1233860 - DNA, 25 bp, Homo sapien
taccaatacgcttctcaatggccat

SEQ ID NO: 1233861 - DNA, 25 bp, Homo sapien
gctgtaagcattaactaggcccatt

SEQ ID NO: 1233862 - DNA, 25 bp, Homo sapien
ggctcatatgtatgacgttgtcaat

SEQ ID NO: 1233863 - DNA, 25 bp, Homo sapien
ttacagattgtatgagggtgtggct

SEQ ID NO: 1233864 - DNA, 25 bp, Homo sapien
gcattctgattgataatcaagactt

SEQ ID NO: 1233865 - DNA, 25 bp, Homo sapien
tatacagtaagcattctgattgata

SEQ ID NO: 1233866 - DNA, 25 bp, Homo sapien
ttttttcacctttatcatactctgc

SEQ ID NO: 1233867 - DNA, 25 bp, Homo sapien
gcatgtgacatgatatcatatattc

SEQ ID NO: 1233868 - DNA, 25 bp, Homo sapien
cctttatcatactctgcatgtgaca

SEQ ID NO: 1233869 - DNA, 25 bp, Homo sapien
taaaatttactaatctgaaacattc

SEQ ID NO: 1233870 - DNA, 25 bp, Homo sapien
aaaactatccccaggcagaaatcct

SEQ ID NO: 1233871 - DNA, 25 bp, Homo sapien
gccatatcctcaacttattgaggcc

SEQ ID NO: 1233872 - DNA, 25 bp, Homo sapien
gccctaaaaatttcagccatatcct

SEQ ID NO: 1233873 - DNA, 25 bp, Homo sapien
cctgtacatatttgcagtccaaaaa
